United States Patent Application Publication US 2007/0042381 A1 - sequence listing, part 41

SEQ ID NO: 1832583 - RNA, 16 nt, Human
ggaaagaguaggaaga

SEQ ID NO: 1832584 - RNA, 19 nt, Human
ggaaagcaaaggagauugg

SEQ ID NO: 1832585 - RNA, 16 nt, Human
ggaaagcccugugcuc

SEQ ID NO: 1832586 - RNA, 21 nt, Human
ggaaacuaggugcauauuuau

SEQ ID NO: 1832587 - RNA, 15 nt, Human
ggaaacccagcucug

SEQ ID NO: 1832588 - RNA, 20 nt, Human
ggaaacagcuaaugggacac

SEQ ID NO: 1832589 - RNA, 15 nt, Human
gcuuuuuaauauuga

SEQ ID NO: 1832590 - RNA, 13 nt, Human
gcuuuugugcauu

SEQ ID NO: 1832591 - RNA, 19 nt, Human
gcuuuugugcauuaucuag

SEQ ID NO: 1832592 - RNA, 16 nt, Human
ggaaaaaauaacaaug

SEQ ID NO: 1832593 - RNA, 13 nt, Human
gcugcaccggcug

SEQ ID NO: 1832594 - RNA, 19 nt, Human
gcugcacccucaggcaggu

SEQ ID NO: 1832595 - RNA, 18 nt, Human
gcugcacccucaggcagg

SEQ ID NO: 1832596 - RNA, 19 nt, Human
gcugccccuggcagccccu

SEQ ID NO: 1832597 - RNA, 18 nt, Human
gcugccccuggcagcccc

SEQ ID NO: 1832598 - RNA, 20 nt, Human
gcugccccuggcagccccug

SEQ ID NO: 1832599 - RNA, 21 nt, Human
gcugccugggaucccucaucc

SEQ ID NO: 1832600 - RNA, 23 nt, Human
gcugcucuugaacuccugaccuc

SEQ ID NO: 1832601 - RNA, 17 nt, Human
gcugccuguucagcucc

SEQ ID NO: 1832602 - RNA, 12 nt, Human
gcugccuguuca

SEQ ID NO: 1832603 - RNA, 13 nt, Human
gcugccuguucag

SEQ ID NO: 1832604 - RNA, 20 nt, Human
gcugccugggaucccucauc

SEQ ID NO: 1832605 - RNA, 16 nt, Human
gcugccucucccauca

SEQ ID NO: 1832606 - RNA, 13 nt, Human
gcugccucaugcu

SEQ ID NO: 1832607 - RNA, 16 nt, Human
gcugagaggagagaga

SEQ ID NO: 1832608 - RNA, 14 nt, Human
gcugaggugggagg

SEQ ID NO: 1832609 - RNA, 23 nt, Human
gcugagggugagugggugaauaa

SEQ ID NO: 1832610 - RNA, 21 nt, Human
gcuggguucuacccaggugcu

SEQ ID NO: 1832611 - RNA, 20 nt, Human
gcuggguucuacccaggugc

SEQ ID NO: 1832612 - RNA, 17 nt, Human
gcuggguucuacccagg

SEQ ID NO: 1832613 - RNA, 18 nt, Human
gcuggguucuacccaggu

SEQ ID NO: 1832614 - RNA, 23 nt, Human
gcugggguggggaccucaggccu

SEQ ID NO: 1832615 - RNA, 22 nt, Human
gcugggguggggaccucaggcc

SEQ ID NO: 1832616 - RNA, 19 nt, Human
gcugggguggggaccucag

SEQ ID NO: 1832617 - RNA, 17 nt, Human
gcugggguggggaccuc

SEQ ID NO: 1832618 - RNA, 20 nt, Human
gcugggccccugccucucug

SEQ ID NO: 1832619 - RNA, 18 nt, Human
gcugggccccugccucuc

SEQ ID NO: 1832620 - RNA, 14 nt, Human
gcugggccccugcc

SEQ ID NO: 1832621 - RNA, 13 nt, Human
gcugggccccugc

SEQ ID NO: 1832622 - RNA, 12 nt, Human
gcugggccccug

SEQ ID NO: 1832623 - RNA, 20 nt, Human
gcuggcuguuggcugggggc

SEQ ID NO: 1832624 - RNA, 23 nt, Human
gcuggcuguuggcugggggccuc

SEQ ID NO: 1832625 - RNA, 14 nt, Human
gcuggcgugcagug

SEQ ID NO: 1832626 - RNA, 15 nt, Human
gcuggcgugcagugg

SEQ ID NO: 1832627 - RNA, 18 nt, Human
gcuggcgugcaguggugc

SEQ ID NO: 1832628 - RNA, 11 nt, Human
gcuggcugccu

SEQ ID NO: 1832629 - RNA, 20 nt, Human
gcuggcugccuuagaaccuu

SEQ ID NO: 1832630 - RNA, 14 nt, Human
gcuggcugccuuag

SEQ ID NO: 1832631 - RNA, 18 nt, Human
gcuggcuguuggcugggg

SEQ ID NO: 1832632 - RNA, 19 nt, Human
gcuggcuguuggcuggggg

SEQ ID NO: 1832633 - RNA, 12 nt, Human
gcugcugaaggc

SEQ ID NO: 1832634 - RNA, 17 nt, Human
gcuguaucccaugagcc

SEQ ID NO: 1832635 - RNA, 19 nt, Human
gcuguaucccaugagccuc

SEQ ID NO: 1832636 - RNA, 14 nt, Human
gcugugcugcccug

SEQ ID NO: 1832637 - RNA, 18 nt, Human
gcugugcucuggacaggc

SEQ ID NO: 1832638 - RNA, 15 nt, Human
gcugugcucuggaca

SEQ ID NO: 1832639 - RNA, 16 nt, Human
gcugugcucuggacag

SEQ ID NO: 1832640 - RNA, 16 nt, Human
gcugugccucugccug

SEQ ID NO: 1832641 - RNA, 15 nt, Human
gcugugccucugccu

SEQ ID NO: 1832642 - RNA, 14 nt, Human
gcugugccucugcc

SEQ ID NO: 1832643 - RNA, 13 nt, Human
gcugugcucugga

SEQ ID NO: 1832644 - RNA, 16 nt, Human
gcugugcugcccugcc

SEQ ID NO: 1832645 - RNA, 15 nt, Human
gcugugcugcccugc

SEQ ID NO: 1832646 - RNA, 17 nt, Human
gcugugcugcccugccc

SEQ ID NO: 1832647 - RNA, 15 nt, Human
gcuguuggcuggggg

SEQ ID NO: 1832648 - RNA, 16 nt, Human
gcuguuggcugggggc

SEQ ID NO: 1832649 - RNA, 20 nt, Human
gcuguuggcugggggccuca

SEQ ID NO: 1832650 - RNA, 13 nt, Human
ggcucacugcagc

SEQ ID NO: 1832651 - RNA, 14 nt, Human
ggcucacugcagcc

SEQ ID NO: 1832652 - RNA, 15 nt, Human
ggcucacugcagccu

SEQ ID NO: 1832653 - RNA, 18 nt, Human
ggcugcccuuucugggca

SEQ ID NO: 1832654 - RNA, 14 nt, Human
ggcugcccuuucug

SEQ ID NO: 1832655 - RNA, 11 nt, Human
ggcugcccuuu

SEQ ID NO: 1832656 - RNA, 10 nt, Human
ggcugcccuu

SEQ ID NO: 1832657 - RNA, 12 nt, Human
ggcugcccuggu

SEQ ID NO: 1832658 - RNA, 18 nt, Human
ggcucuuccaggcuggga

SEQ ID NO: 1832659 - RNA, 17 nt, Human
ggcucuuccaggcuggg

SEQ ID NO: 1832660 - RNA, 15 nt, Human
ggcucuuccaggcug

SEQ ID NO: 1832661 - RNA, 13 nt, Human
ggcucccuuccca

SEQ ID NO: 1832662 - RNA, 22 nt, Human
aaaaaacugcugacuguuuucu

SEQ ID NO: 1832663 - RNA, 14 nt, Human
aaaaaggaggaaga

SEQ ID NO: 1832664 - RNA, 12 nt, Human
aaaaaggcagga

SEQ ID NO: 1832665 - RNA, 21 nt, Human
aaaaaggaugcacagaguugu

SEQ ID NO: 1832666 - RNA, 14 nt, Human
aaaaauaaaaaaca

SEQ ID NO: 1832667 - RNA, 22 nt, Human
ggcuggguucuacccaggugcu

SEQ ID NO: 1832668 - RNA, 14 nt, Human
ggcuggguuggagg

SEQ ID NO: 1832669 - RNA, 13 nt, Human
aaaaauacaaaaa

SEQ ID NO: 1832670 - RNA, 15 nt, Human
ggcuggccuggcccc

SEQ ID NO: 1832671 - RNA, 14 nt, Human
ggcuggccuggccc

SEQ ID NO: 1832672 - RNA, 13 nt, Human
ggcuggccuggcc

SEQ ID NO: 1832673 - RNA, 17 nt, Human
ggcuggcccugcccugg

SEQ ID NO: 1832674 - RNA, 19 nt, Human
ggccccugccucucugcag

SEQ ID NO: 1832675 - RNA, 18 nt, Human
ggccccugccucucugca

SEQ ID NO: 1832676 - RNA, 17 nt, Human
ggccccugccucucugc

SEQ ID NO: 1832677 - RNA, 13 nt, Human
ggccccugccucu

SEQ ID NO: 1832678 - RNA, 21 nt, Human
ggccccugccucucugcaggu

SEQ ID NO: 1832679 - RNA, 17 nt, Human
ggccagaugcaccagcc

SEQ ID NO: 1832680 - RNA, 22 nt, Human
ggccagagggagugacagaggc

SEQ ID NO: 1832681 - RNA, 15 nt, Human
ggccagaugcaccag

SEQ ID NO: 1832682 - RNA, 16 nt, Human
ggccagaugcaccagc

SEQ ID NO: 1832683 - RNA, 22 nt, Human
ggccucccaacucaccccagcc

SEQ ID NO: 1832684 - RNA, 20 nt, Human
ggccucccaacucaccccag

SEQ ID NO: 1832685 - RNA, 23 nt, Human
ggccucccaacucaccccagccc

SEQ ID NO: 1832686 - RNA, 19 nt, Human
ggccucccaacucacccca

SEQ ID NO: 1832687 - RNA, 18 nt, Human
ggccucccaacucacccc

SEQ ID NO: 1832688 - RNA, 17 nt, Human
ggccucccaacucaccc

SEQ ID NO: 1832689 - RNA, 13 nt, Human
ggccucagugcca

SEQ ID NO: 1832690 - RNA, 16 nt, Human
ggccugcaagggagug

SEQ ID NO: 1832691 - RNA, 17 nt, Human
ggccuucagggagugag

SEQ ID NO: 1832692 - RNA, 16 nt, Human
ggccuggccagaugca

SEQ ID NO: 1832693 - RNA, 15 nt, Human
ggccuggcagccgug

SEQ ID NO: 1832694 - RNA, 14 nt, Human
ggccuggcagccgu

SEQ ID NO: 1832695 - RNA, 12 nt, Human
ggccuggccaga

SEQ ID NO: 1832696 - RNA, 15 nt, Human
ggccuggccagaugc

SEQ ID NO: 1832697 - RNA, 11 nt, Human
ggccugccugu

SEQ ID NO: 1832698 - RNA, 16 nt, Human
ggcuagagguucaaag

SEQ ID NO: 1832699 - RNA, 14 nt, Human
ggcuaccuuuguau

SEQ ID NO: 1832700 - RNA, 13 nt, Human
ggcuaccuuugua

SEQ ID NO: 1832701 - RNA, 22 nt, Human
ggcuacaccuuagccugcccuc

SEQ ID NO: 1832702 - RNA, 23 nt, Human
ggcuacaccuuagccugcccucc

SEQ ID NO: 1832703 - RNA, 18 nt, Human
ggcuaauuuuuguuuugu

SEQ ID NO: 1832704 - RNA, 16 nt, Human
ggcuaauguacugcau

SEQ ID NO: 1832705 - RNA, 20 nt, Human
ggcuaagugauccucccacc

SEQ ID NO: 1832706 - RNA, 18 nt, Human
ggccuucggccuccaucc

SEQ ID NO: 1832707 - RNA, 22 nt, Human
ggccuucggccuccauccugag

SEQ ID NO: 1832708 - RNA, 16 nt, Human
ggccuucggccuccau

SEQ ID NO: 1832709 - RNA, 18 nt, Human
ggcgugagaccugccccu

SEQ ID NO: 1832710 - RNA, 17 nt, Human
ggcgugagaccugcccc

SEQ ID NO: 1832711 - RNA, 16 nt, Human
ggcgugagaccugccc

SEQ ID NO: 1832712 - RNA, 14 nt, Human
ggcgugagaccugc

SEQ ID NO: 1832713 - RNA, 20 nt, Human
ggcuaagcuucacuguaaaa

SEQ ID NO: 1832714 - RNA, 18 nt, Human
ggcacaccgggcacucag

SEQ ID NO: 1832715 - RNA, 16 nt, Human
ggcacugcuuccagug

SEQ ID NO: 1832716 - RNA, 18 nt, Human
ggcacaucagcacgauuu

SEQ ID NO: 1832717 - RNA, 15 nt, Human
ggcaaaaaggcagga

SEQ ID NO: 1832718 - RNA, 14 nt, Human
ggauuuuugucuug

SEQ ID NO: 1832719 - RNA, 16 nt, Human
ggauuuuugucuugug

SEQ ID NO: 1832720 - RNA, 10 nt, Human
ggcaaaauaa

SEQ ID NO: 1832721 - RNA, 18 nt, Human
ggcaggaggaucacuuga

SEQ ID NO: 1832722 - RNA, 10 nt, Human
ggcagggagg

SEQ ID NO: 1832723 - RNA, 18 nt, Human
ggcagggagggccugggc

SEQ ID NO: 1832724 - RNA, 17 nt, Human
ggcagggagggccuggg

SEQ ID NO: 1832725 - RNA, 20 nt, Human
ggcagggagggccugggccc

SEQ ID NO: 1832726 - RNA, 19 nt, Human
ggcagggagggccugggcc

SEQ ID NO: 1832727 - RNA, 13 nt, Human
ggcagccaggcca

SEQ ID NO: 1832728 - RNA, 14 nt, Human
ggcagccaggccac

SEQ ID NO: 1832729 - RNA, 20 nt, Human
ggcacugcuuccagugaggc

SEQ ID NO: 1832730 - RNA, 22 nt, Human
ggcacugcuuccagugaggcuc

SEQ ID NO: 1832731 - RNA, 16 nt, Human
ggcagccucuucaaaa

SEQ ID NO: 1832732 - RNA, 22 nt, Human
ggcagccccauucugccugccc

SEQ ID NO: 1832733 - RNA, 16 nt, Human
ggcagccccauucugc

SEQ ID NO: 1832734 - RNA, 20 nt, Human
ggcagccccauucugccugc

SEQ ID NO: 1832735 - RNA, 21 nt, Human
ggcagccccauucugccugcc

SEQ ID NO: 1832736 - RNA, 14 nt, Human
ggcauuugcugaau

SEQ ID NO: 1832737 - RNA, 20 nt, Human
ggcaucgcaauguaagacuc

SEQ ID NO: 1832738 - RNA, 19 nt, Human
ggccaaaggaagcacaugc

SEQ ID NO: 1832739 - RNA, 16 nt, Human
ggccaaaggaagcaca

SEQ ID NO: 1832740 - RNA, 14 nt, Human
ggccaaaggaagca

SEQ ID NO: 1832741 - RNA, 17 nt, Human
ggcauuuguuugaacug

SEQ ID NO: 1832742 - RNA, 17 nt, Human
ggccagagacacaagcc

SEQ ID NO: 1832743 - RNA, 18 nt, Human
ggccagagacacaagccu

SEQ ID NO: 1832744 - RNA, 17 nt, Human
ggccagagggagugaca

SEQ ID NO: 1832745 - RNA, 19 nt, Human
ggccagagggagugacaga

SEQ ID NO: 1832746 - RNA, 15 nt, Human
ggaggcucuggagcc

SEQ ID NO: 1832747 - RNA, 14 nt, Human
ggaggggggaggug

SEQ ID NO: 1832748 - RNA, 13 nt, Human
ggaggggggaggu

SEQ ID NO: 1832749 - RNA, 21 nt, Human
ggagggugacgggggugaacu

SEQ ID NO: 1832750 - RNA, 22 nt, Human
ggagguaaggaauaccuguccc

SEQ ID NO: 1832751 - RNA, 23 nt, Human
ggaggugggauccuccaggugca

SEQ ID NO: 1832752 - RNA, 22 nt, Human
ggaggugggauccuccaggugc

SEQ ID NO: 1832753 - RNA, 15 nt, Human
ggaguggccacagaa

SEQ ID NO: 1832754 - RNA, 22 nt, Human
ggagugggcccaaugcacuuug

SEQ ID NO: 1832755 - RNA, 12 nt, Human
ggagugggccca

SEQ ID NO: 1832756 - RNA, 16 nt, Human
ggaguggccacagaaa

SEQ ID NO: 1832757 - RNA, 14 nt, Human
ggaugaaaaaauaa

SEQ ID NO: 1832758 - RNA, 22 nt, Human
ggaucuuuggacagaagcagcu

SEQ ID NO: 1832759 - RNA, 13 nt, Human
ggauuguccccga

SEQ ID NO: 1832760 - RNA, 14 nt, Human
ggauuguaguccca

SEQ ID NO: 1832761 - RNA, 22 nt, Human
ggauuuaacagaaauguacagc

SEQ ID NO: 1832762 - RNA, 16 nt, Human
ggauuuaacagaaaug

SEQ ID NO: 1832763 - RNA, 17 nt, Human
ggauuuaacagaaaugu

SEQ ID NO: 1832764 - RNA, 20 nt, Human
ggauuguccccgacccuugc

SEQ ID NO: 1832765 - RNA, 16 nt, Human
ggauuguccccgaccc

SEQ ID NO: 1832766 - RNA, 12 nt, Human
ggauuuaacaga

SEQ ID NO: 1832767 - RNA, 23 nt, Human
ggauccugagccagauuucacuc

SEQ ID NO: 1832768 - RNA, 20 nt, Human
ggauccugagccagauuuca

SEQ ID NO: 1832769 - RNA, 19 nt, Human
ggauccugagccagauuuc

SEQ ID NO: 1832770 - RNA, 18 nt, Human
ggauccugagccagauuu

SEQ ID NO: 1832771 - RNA, 16 nt, Human
ggauccugagccagau

SEQ ID NO: 1832772 - RNA, 15 nt, Human
ggauccugagccaga

SEQ ID NO: 1832773 - RNA, 16 nt, Human
ggaguucaucuugaau

SEQ ID NO: 1832774 - RNA, 21 nt, Human
ggaucuuuggacagaagcagc

SEQ ID NO: 1832775 - RNA, 18 nt, Human
ggaucucuugagccuggg

SEQ ID NO: 1832776 - RNA, 14 nt, Human
gggccaggagccuc

SEQ ID NO: 1832777 - RNA, 13 nt, Human
gggccaggagccu

SEQ ID NO: 1832778 - RNA, 12 nt, Human
gggccaggagcc

SEQ ID NO: 1832779 - RNA, 15 nt, Human
gggccucagugccac

SEQ ID NO: 1832780 - RNA, 13 nt, Human
gggccucagugcc

SEQ ID NO: 1832781 - RNA, 14 nt, Human
gggccucagugcca

SEQ ID NO: 1832782 - RNA, 22 nt, Human
gggccucgguguggagaagcgg

SEQ ID NO: 1832783 - RNA, 18 nt, Human
gggccucuuaugggcugg

SEQ ID NO: 1832784 - RNA, 19 nt, Human
gggccucuuaugggcuggg

SEQ ID NO: 1832785 - RNA, 19 nt, Human
gggcgugagaccugccccu

SEQ ID NO: 1832786 - RNA, 18 nt, Human
gggcgugagaccugcccc

SEQ ID NO: 1832787 - RNA, 21 nt, Human
gggcggugagaggggaacaga

SEQ ID NO: 1832788 - RNA, 15 nt, Human
gggcgugguggugag

SEQ ID NO: 1832789 - RNA, 19 nt, Human
gggcugcaccggcuggccu

SEQ ID NO: 1832790 - RNA, 17 nt, Human
gggcugcaccggcuggc

SEQ ID NO: 1832791 - RNA, 13 nt, Human
gggcuccagacac

SEQ ID NO: 1832792 - RNA, 10 nt, Human
gggcuccaga

SEQ ID NO: 1832793 - RNA, 21 nt, Human
gggcucagcggggacagcucc

SEQ ID NO: 1832794 - RNA, 20 nt, Human
gggcuaggaaauccagggug

SEQ ID NO: 1832795 - RNA, 15 nt, Human
gggcuaguugggcuu

SEQ ID NO: 1832796 - RNA, 22 nt, Human
gggcucagcaaaagaugcuucu

SEQ ID NO: 1832797 - RNA, 18 nt, Human
gggcuaguugggcuuccu

SEQ ID NO: 1832798 - RNA, 17 nt, Human
gggcucagcggggacag

SEQ ID NO: 1832799 - RNA, 19 nt, Human
gggcucagcggggacagcu

SEQ ID NO: 1832800 - RNA, 15 nt, Human
gggcugggcagagga

SEQ ID NO: 1832801 - RNA, 21 nt, Human
gggcugcaccggcuggccugg

SEQ ID NO: 1832802 - RNA, 20 nt, Human
gggcugcaccggcuggccug

SEQ ID NO: 1832803 - RNA, 16 nt, Human
aaaaugguuuaaaugg

SEQ ID NO: 1832804 - RNA, 18 nt, Human
aaaaugguuuaaaugguc

SEQ ID NO: 1832805 - RNA, 17 nt, Human
gggcuggguucuaccca

SEQ ID NO: 1832806 - RNA, 14 nt, Human
aaaaggaugcacag

SEQ ID NO: 1832807 - RNA, 15 nt, Human
aaaaggaugcacaga

SEQ ID NO: 1832808 - RNA, 19 nt, Human
aaaaggaugcacagaguug

SEQ ID NO: 1832809 - RNA, 22 nt, Human
aaaaggaugcacagaguuguua

SEQ ID NO: 1832810 - RNA, 13 nt, Human
aaaaggaugcaca

SEQ ID NO: 1832811 - RNA, 22 nt, Human
aaaaggagccaauuuaaagaaa

SEQ ID NO: 1832812 - RNA, 16 nt, Human
aaaagguuaauaaagu

SEQ ID NO: 1832813 - RNA, 17 nt, Human
aaaagguuaauaaagua

SEQ ID NO: 1832814 - RNA, 11 nt, Human
aaaaggcagga

SEQ ID NO: 1832815 - RNA, 13 nt, Human
aaaauaccaagga

SEQ ID NO: 1832816 - RNA, 15 nt, Human
aaaauauuccugcau

SEQ ID NO: 1832817 - RNA, 22 nt, Human
aaaauaugaccacacuccagcu

SEQ ID NO: 1832818 - RNA, 16 nt, Human
aaaauauuuuccugcc

SEQ ID NO: 1832819 - RNA, 15 nt, Human
aaaaucugcuaggga

SEQ ID NO: 1832820 - RNA, 12 nt, Human
aaaaugagaaau

SEQ ID NO: 1832821 - RNA, 11 nt, Human
aaaaugagaaa

SEQ ID NO: 1832822 - RNA, 21 nt, Human
aaaaugcuguauuagucacag

SEQ ID NO: 1832823 - RNA, 23 nt, Human
aaaaugcuguauuagucacagag

SEQ ID NO: 1832824 - RNA, 20 nt, Human
aaaauggaagacagcucuua

SEQ ID NO: 1832825 - RNA, 15 nt, Human
ggggcccugccuccu

SEQ ID NO: 1832826 - RNA, 17 nt, Human
gggggaucacagccucu

SEQ ID NO: 1832827 - RNA, 11 nt, Human
gggggcuggga

SEQ ID NO: 1832828 - RNA, 15 nt, Human
gggggcugggcagag

SEQ ID NO: 1832829 - RNA, 13 nt, Human
ggggguggccucc

SEQ ID NO: 1832830 - RNA, 21 nt, Human
ggggucacucuggcagcucag

SEQ ID NO: 1832831 - RNA, 13 nt, Human
ggggaccagagcu

SEQ ID NO: 1832832 - RNA, 12 nt, Human
ggggaccagagc

SEQ ID NO: 1832833 - RNA, 18 nt, Human
aaaauguauguguaagua

SEQ ID NO: 1832834 - RNA, 14 nt, Human
ggggaccagagcug

SEQ ID NO: 1832835 - RNA, 22 nt, Human
aaaccugugucucugagaguag

SEQ ID NO: 1832836 - RNA, 17 nt, Human
aaaccuucacuuaggaa

SEQ ID NO: 1832837 - RNA, 20 nt, Human
gggucacucuggcagcucag

SEQ ID NO: 1832838 - RNA, 14 nt, Human
gggucacucuggca

SEQ ID NO: 1832839 - RNA, 22 nt, Human
gggucacucuggcagcucagag

SEQ ID NO: 1832840 - RNA, 19 nt, Human
aaacauuuugucauauaag

SEQ ID NO: 1832841 - RNA, 19 nt, Human
gguaucaggugcugccauc

SEQ ID NO: 1832842 - RNA, 14 nt, Human
ggucagugcaaaua

SEQ ID NO: 1832843 - RNA, 22 nt, Human
aaacuugauguguuaucucuua

SEQ ID NO: 1832844 - RNA, 20 nt, Human
gguaaggaauaccugucccc

SEQ ID NO: 1832845 - RNA, 20 nt, Human
gguaggguaagugagagagg

SEQ ID NO: 1832846 - RNA, 23 nt, Human
gguagggugggccuucagggagu

SEQ ID NO: 1832847 - RNA, 11 nt, Human
gguaggguggg

SEQ ID NO: 1832848 - RNA, 13 nt, Human
gguauagaaaugc

SEQ ID NO: 1832849 - RNA, 14 nt, Human
gguaucaggugcug

SEQ ID NO: 1832850 - RNA, 21 nt, Human
aaacguggcugcuucaaggau

SEQ ID NO: 1832851 - RNA, 18 nt, Human
gggugggacacccuguga

SEQ ID NO: 1832852 - RNA, 15 nt, Human
gggugggacacccug

SEQ ID NO: 1832853 - RNA, 19 nt, Human
aaacuuaaucuaaauggaa

SEQ ID NO: 1832854 - RNA, 14 nt, Human
aaacuuaaucuaaa

SEQ ID NO: 1832855 - RNA, 22 nt, Human
gguaaaucagacuaugaaguuu

SEQ ID NO: 1832856 - RNA, 13 nt, Human
gguaacaggcaga

SEQ ID NO: 1832857 - RNA, 19 nt, Human
gggugggacacccugugau

SEQ ID NO: 1832858 - RNA, 15 nt, Human
gggugguggugauag

SEQ ID NO: 1832859 - RNA, 20 nt, Human
ggguuuugccauguuggcca

SEQ ID NO: 1832860 - RNA, 23 nt, Human
ggguuuugccauguuggccaggc

SEQ ID NO: 1832861 - RNA, 16 nt, Human
guaaagcuagaaauga

SEQ ID NO: 1832862 - RNA, 15 nt, Human
guaaagcuagaaaug

SEQ ID NO: 1832863 - RNA, 19 nt, Human
guaacaggaaaauuuuaaa

SEQ ID NO: 1832864 - RNA, 16 nt, Human
guaacaagccacccca

SEQ ID NO: 1832865 - RNA, 20 nt, Human
guaacaggaaaauuuuaaaa

SEQ ID NO: 1832866 - RNA, 13 nt, Human
guaaaccuuuuau

SEQ ID NO: 1832867 - RNA, 22 nt, Human
aaaguguauuuuuuuacuaaua

SEQ ID NO: 1832868 - RNA, 22 nt, Human
aaauaaugugaaacuggauuaa

SEQ ID NO: 1832869 - RNA, 14 nt, Human
aaauaaugugaaac

SEQ ID NO: 1832870 - RNA, 15 nt, Human
guaaucgaccugccu

SEQ ID NO: 1832871 - RNA, 23 nt, Human
guaauccuagcacuuugggaggc

SEQ ID NO: 1832872 - RNA, 15 nt, Human
guaauuugugauaca

SEQ ID NO: 1832873 - RNA, 17 nt, Human
guaaucgaccugccucg

SEQ ID NO: 1832874 - RNA, 17 nt, Human
guaauuugugauacaau

SEQ ID NO: 1832875 - RNA, 20 nt, Human
guaauuugugauacaaugcu

SEQ ID NO: 1832876 - RNA, 21 nt, Human
guaauuuuuuuaucgucacug

SEQ ID NO: 1832877 - RNA, 22 nt, Human
guacaaccuguucugcuuuccu

SEQ ID NO: 1832878 - RNA, 23 nt, Human
aaauaucugaaaauguaugugua

SEQ ID NO: 1832879 - RNA, 22 nt, Human
aaauaucugaaaauguaugugu

SEQ ID NO: 1832880 - RNA, 21 nt, Human
aaauaucugaaaauguaugug

SEQ ID NO: 1832881 - RNA, 19 nt, Human
aaauaucugaaaauguaug

SEQ ID NO: 1832882 - RNA, 18 nt, Human
aaauaucugaaaauguau

SEQ ID NO: 1832883 - RNA, 17 nt, Human
aaauaucugaaaaugua

SEQ ID NO: 1832884 - RNA, 14 nt, Human
aaauaucugaaaau

SEQ ID NO: 1832885 - RNA, 12 nt, Human
aaauaucugaaa

SEQ ID NO: 1832886 - RNA, 23 nt, Human
aaaucagccugcuccagcuguuc

SEQ ID NO: 1832887 - RNA, 21 nt, Human
aaaucagccugcuccagcugu

SEQ ID NO: 1832888 - RNA, 19 nt, Human
aaaucagccugcuccagcu

SEQ ID NO: 1832889 - RNA, 19 nt, Human
aaauauuaagaaagacuau

SEQ ID NO: 1832890 - RNA, 20 nt, Human
aaauauuccugcauuuguga

SEQ ID NO: 1832891 - RNA, 22 nt, Human
aaauauauuuuaagacgaaaca

SEQ ID NO: 1832892 - RNA, 16 nt, Human
aaauauauuuuaagac

SEQ ID NO: 1832893 - RNA, 14 nt, Human
aaauauauaucaaa

SEQ ID NO: 1832894 - RNA, 18 nt, Human
aaauauaugcuaagucuu

SEQ ID NO: 1832895 - RNA, 15 nt, Human
aaauauaggaacuua

SEQ ID NO: 1832896 - RNA, 20 nt, Human
aaauaccagccaguaaaugg

SEQ ID NO: 1832897 - RNA, 21 nt, Human
aaauaccagccaguaaauggg

SEQ ID NO: 1832898 - RNA, 19 nt, Human
aaauaccagccaguaaaug

SEQ ID NO: 1832899 - RNA, 16 nt, Human
guacacacacauacac

SEQ ID NO: 1832900 - RNA, 21 nt, Human
aaaguauccugcuucugauau

SEQ ID NO: 1832901 - RNA, 14 nt, Human
aaaguguauuuuuu

SEQ ID NO: 1832902 - RNA, 21 nt, Human
aaaguguauuuuuuuacuaau

SEQ ID NO: 1832903 - RNA, 16 nt, Human
aaagugguauagaaau

SEQ ID NO: 1832904 - RNA, 17 nt, Human
aaagugguauagaaaug

SEQ ID NO: 1832905 - RNA, 20 nt, Human
aaagugguauagaaaugcug

SEQ ID NO: 1832906 - RNA, 19 nt, Human
aaaguacacuguuucaaac

SEQ ID NO: 1832907 - RNA, 18 nt, Human
aaaguacacuguuucaaa

SEQ ID NO: 1832908 - RNA, 22 nt, Human
aaaguagaagucuuagauguau

SEQ ID NO: 1832909 - RNA, 20 nt, Human
aaaguagaagucuuagaugu

SEQ ID NO: 1832910 - RNA, 21 nt, Human
aaaguaucccuacuguaauuu

SEQ ID NO: 1832911 - RNA, 15 nt, Human
gguuuccugcccugg

SEQ ID NO: 1832912 - RNA, 13 nt, Human
gguuuccugcccu

SEQ ID NO: 1832913 - RNA, 12 nt, Human
gguuuccugccc

SEQ ID NO: 1832914 - RNA, 16 nt, Human
gguuucuaaagcugcc

SEQ ID NO: 1832915 - RNA, 19 nt, Human
gguuuccugcccugggagg

SEQ ID NO: 1832916 - RNA, 16 nt, Human
gguuuccugcccuggg

SEQ ID NO: 1832917 - RNA, 22 nt, Human
gguuucuaaagcugccagccga

SEQ ID NO: 1832918 - RNA, 20 nt, Human
gguuuguaaauuaacuuuua

SEQ ID NO: 1832919 - RNA, 12 nt, Human
gguguggagaag

SEQ ID NO: 1832920 - RNA, 23 nt, Human
gguguggagaagcggcuggcagc

SEQ ID NO: 1832921 - RNA, 14 nt, Human
gguguggagaagcg

SEQ ID NO: 1832922 - RNA, 13 nt, Human
ggugggggccucg

SEQ ID NO: 1832923 - RNA, 13 nt, Human
ggugugggggaag

SEQ ID NO: 1832924 - RNA, 11 nt, Human
gguguggggga

SEQ ID NO: 1832925 - RNA, 17 nt, Human
gguguuuccuggcacug

SEQ ID NO: 1832926 - RNA, 19 nt, Human
gguguuuccuggcacugcu

SEQ ID NO: 1832927 - RNA, 17 nt, Human
gguucccauuugcuccu

SEQ ID NO: 1832928 - RNA, 23 nt, Human
gguucccuuugacgccaucccag

SEQ ID NO: 1832929 - RNA, 22 nt, Human
gguucccuuuuuuggcugcuga

SEQ ID NO: 1832930 - RNA, 20 nt, Human
ggugggaggaucucuugagc

SEQ ID NO: 1832931 - RNA, 17 nt, Human
ggugggacacccuguga

SEQ ID NO: 1832932 - RNA, 16 nt, Human
ggugggacacccugug

SEQ ID NO: 1832933 - RNA, 13 nt, Human
ggugggacacccu

SEQ ID NO: 1832934 - RNA, 19 nt, Human
gguggggaccucaggccug

SEQ ID NO: 1832935 - RNA, 21 nt, Human
aaaguaaaaacaaagaaauua

SEQ ID NO: 1832936 - RNA, 18 nt, Human
gguggcuggguuggaggg

SEQ ID NO: 1832937 - RNA, 12 nt, Human
gguggcuggguu

SEQ ID NO: 1832938 - RNA, 18 nt, Human
aaagguucaugcaaacuu

SEQ ID NO: 1832939 - RNA, 20 nt, Human
aaagggcccagagagggugg

SEQ ID NO: 1832940 - RNA, 12 nt, Human
aaacuuuaugcu

SEQ ID NO: 1832941 - RNA, 19 nt, Human
aaacuuuaugcuaagugaa

SEQ ID NO: 1832942 - RNA, 16 nt, Human
aaagcagaacagugau

SEQ ID NO: 1832943 - RNA, 20 nt, Human
gguggcaccagcagccugga

SEQ ID NO: 1832944 - RNA, 14 nt, Human
gguggcaccagcag

SEQ ID NO: 1832945 - RNA, 14 nt, Human
aaagcuguguggca

SEQ ID NO: 1832946 - RNA, 22 nt, Human
aaagcugccagccgagauagcc

SEQ ID NO: 1832947 - RNA, 13 nt, Human
aaagcugccagcc

SEQ ID NO: 1832948 - RNA, 12 nt, Human
aaagcugccagc

SEQ ID NO: 1832949 - RNA, 17 nt, Human
aaagcuaggccuggcca

SEQ ID NO: 1832950 - RNA, 16 nt, Human
aaagcagugcaugcug

SEQ ID NO: 1832951 - RNA, 14 nt, Human
aaagcuagaaauga

SEQ ID NO: 1832952 - RNA, 13 nt, Human
aaagcagugcaug

SEQ ID NO: 1832953 - RNA, 14 nt, Human
aaagcuaggccugg

SEQ ID NO: 1832954 - RNA, 16 nt, Human
aaagcuaggccuggcc

SEQ ID NO: 1832955 - RNA, 15 nt, Human
aaagcagcguuucua

SEQ ID NO: 1832956 - RNA, 14 nt, Human
gugucaccugaaga

SEQ ID NO: 1832957 - RNA, 22 nt, Human
gugucaccugaagacucauucu

SEQ ID NO: 1832958 - RNA, 14 nt, Human
gugucagguggggc

SEQ ID NO: 1832959 - RNA, 18 nt, Human
gugucagguggggcagcu

SEQ ID NO: 1832960 - RNA, 23 nt, Human
gugugaaccaccacacccagccc

SEQ ID NO: 1832961 - RNA, 20 nt, Human
gugucagguggggcagcuug

SEQ ID NO: 1832962 - RNA, 19 nt, Human
gugucagguggggcagcuu

SEQ ID NO: 1832963 - RNA, 20 nt, Human
aagaucaaaagguuaauaaa

SEQ ID NO: 1832964 - RNA, 23 nt, Human
aagaucaaaagguuaauaaagua

SEQ ID NO: 1832965 - RNA, 16 nt, Human
aagauggcugugccuc

SEQ ID NO: 1832966 - RNA, 23 nt, Human
aagauggcacuuauaaccaaagc

SEQ ID NO: 1832967 - RNA, 17 nt, Human
aagcaacccaaauguuc

SEQ ID NO: 1832968 - RNA, 20 nt, Human
aagcaaaugugaaucauuuu

SEQ ID NO: 1832969 - RNA, 11 nt, Human
aagaggcaggg

SEQ ID NO: 1832970 - RNA, 14 nt, Human
aagaggcagggucu

SEQ ID NO: 1832971 - RNA, 22 nt, Human
aagagggagggagggcuccaga

SEQ ID NO: 1832972 - RNA, 21 nt, Human
aagagggagggagggcuccag

SEQ ID NO: 1832973 - RNA, 15 nt, Human
gugguuucagaaaug

SEQ ID NO: 1832974 - RNA, 23 nt, Human
gugcugcccugcccaccuggccu

SEQ ID NO: 1832975 - RNA, 12 nt, Human
aagcaugugaga

SEQ ID NO: 1832976 - RNA, 23 nt, Human
aagcaugcacaaauucugucucu

SEQ ID NO: 1832977 - RNA, 17 nt, Human
aagccaaagcuaggccu

SEQ ID NO: 1832978 - RNA, 18 nt, Human
aagccaaagcuaggccug

SEQ ID NO: 1832979 - RNA, 20 nt, Human
aagccaaagcuaggccuggc

SEQ ID NO: 1832980 - RNA, 20 nt, Human
aagcacaugccucucucagg

SEQ ID NO: 1832981 - RNA, 19 nt, Human
aagcacaugccucucucag

SEQ ID NO: 1832982 - RNA, 16 nt, Human
aagcacaugccucucu

SEQ ID NO: 1832983 - RNA, 15 nt, Human
aagcacaugccucuc

SEQ ID NO: 1832984 - RNA, 14 nt, Human
aagcacaugccucu

SEQ ID NO: 1832985 - RNA, 16 nt, Human
aagcacacuugacauc

SEQ ID NO: 1832986 - RNA, 13 nt, Human
guguuucuuuagu

SEQ ID NO: 1832987 - RNA, 16 nt, Human
guguuucuuuaguuuu

SEQ ID NO: 1832988 - RNA, 21 nt, Human
aagcacaugccucucucaggc

SEQ ID NO: 1832989 - RNA, 13 nt, Human
aagcaccuccugc

SEQ ID NO: 1832990 - RNA, 14 nt, Human
aagcaccuccugcc

SEQ ID NO: 1832991 - RNA, 15 nt, Human
aagcaccuccugccu

SEQ ID NO: 1832992 - RNA, 16 nt, Human
aagcaccuccugccuc

SEQ ID NO: 1832993 - RNA, 17 nt, Human
aagcaccuccugccucg

SEQ ID NO: 1832994 - RNA, 16 nt, Human
aagcacuaaacaaaga

SEQ ID NO: 1832995 - RNA, 17 nt, Human
guucagguaacaggcag

SEQ ID NO: 1832996 - RNA, 18 nt, Human
guucagguaacaggcaga

SEQ ID NO: 1832997 - RNA, 15 nt, Human
aagccguggcuuccc

SEQ ID NO: 1832998 - RNA, 14 nt, Human
aagccguggcuucc

SEQ ID NO: 1832999 - RNA, 13 nt, Human
aagccguggcuuc

SEQ ID NO: 1833000 - RNA, 21 nt, Human
aagccgugauuuucauugcug

SEQ ID NO: 1833001 - RNA, 20 nt, Human
guucaggguuggccccugcc

SEQ ID NO: 1833002 - RNA, 21 nt, Human
guucaggguuggccccugccc

SEQ ID NO: 1833003 - RNA, 22 nt, Human
guucaggguuggccccugcccg

SEQ ID NO: 1833004 - RNA, 23 nt, Human
guucagcuuguaaauagcucagg

SEQ ID NO: 1833005 - RNA, 18 nt, Human
aagccuguuuaagagaca

SEQ ID NO: 1833006 - RNA, 15 nt, Human
aagccuguuuaagag

SEQ ID NO: 1833007 - RNA, 15 nt, Human
aagccuccuccagcc

SEQ ID NO: 1833008 - RNA, 16 nt, Human
aagccucccacgacug

SEQ ID NO: 1833009 - RNA, 18 nt, Human
guuaaucauuagguguga

SEQ ID NO: 1833010 - RNA, 19 nt, Human
guuaauauuuauaggucac

SEQ ID NO: 1833011 - RNA, 23 nt, Human
guuacucuucaguuaagccuuug

SEQ ID NO: 1833012 - RNA, 13 nt, Human
aagcccagcuuga

SEQ ID NO: 1833013 - RNA, 19 nt, Human
guuagagguucccuuugac

SEQ ID NO: 1833014 - RNA, 19 nt, Human
guuauuauauuuacaaaug

SEQ ID NO: 1833015 - RNA, 20 nt, Human
guuauuauauuuacaaaugg

SEQ ID NO: 1833016 - RNA, 22 nt, Human
guucccuuuuuuggcugcugaa

SEQ ID NO: 1833017 - RNA, 21 nt, Human
guucccuuuuuuggcugcuga

SEQ ID NO: 1833018 - RNA, 21 nt, Human
aagcuuuuaugugaaacaugu

SEQ ID NO: 1833019 - RNA, 19 nt, Human
aagcuuuuaugugaaacau

SEQ ID NO: 1833020 - RNA, 15 nt, Human
guuccccaagacauu

SEQ ID NO: 1833021 - RNA, 17 nt, Human
aagcucugcuccucucc

SEQ ID NO: 1833022 - RNA, 19 nt, Human
guucuagcauggcugccaa

SEQ ID NO: 1833023 - RNA, 15 nt, Human
guucucucuucucca

SEQ ID NO: 1833024 - RNA, 12 nt, Human
guucucugagga

SEQ ID NO: 1833025 - RNA, 15 nt, Human
guucucugcccucca

SEQ ID NO: 1833026 - RNA, 14 nt, Human
guucucugaggaca

SEQ ID NO: 1833027 - RNA, 14 nt, Human
guucuuaauucuua

SEQ ID NO: 1833028 - RNA, 17 nt, Human
guucuuaauucuuagcu

SEQ ID NO: 1833029 - RNA, 18 nt, Human
guucucugcccuccaaga

SEQ ID NO: 1833030 - RNA, 17 nt, Human
guucucugcccuccaag

SEQ ID NO: 1833031 - RNA, 13 nt, Human
guucuuaauucuu

SEQ ID NO: 1833032 - RNA, 16 nt, Human
guucuuaagacgugau

SEQ ID NO: 1833033 - RNA, 19 nt, Human
guugauagcacagacccug

SEQ ID NO: 1833034 - RNA, 14 nt, Human
guugauagcacaga

SEQ ID NO: 1833035 - RNA, 15 nt, Human
guucuugguuuguaa

SEQ ID NO: 1833036 - RNA, 18 nt, Human
guucuugguuuguaaauu

SEQ ID NO: 1833037 - RNA, 14 nt, Human
guucuugguuugua

SEQ ID NO: 1833038 - RNA, 13 nt, Human
guuuggagacaga

SEQ ID NO: 1833039 - RNA, 20 nt, Human
guuugcuuuguaugcacuuu

SEQ ID NO: 1833040 - RNA, 21 nt, Human
aaguaauaugcacacauuuuu

SEQ ID NO: 1833041 - RNA, 17 nt, Human
aaguaauaugcacacau

SEQ ID NO: 1833042 - RNA, 18 nt, Human
aaguaauaugcacacauu

SEQ ID NO: 1833043 - RNA, 20 nt, Human
aaguaauaugcacacauuuu

SEQ ID NO: 1833044 - RNA, 14 nt, Human
guuuucuguucuuu

SEQ ID NO: 1833045 - RNA, 15 nt, Human
guuuucuguucuuuc

SEQ ID NO: 1833046 - RNA, 16 nt, Human
guuuucuguucuuucu

SEQ ID NO: 1833047 - RNA, 19 nt, Human
guuuucuguucuuucuggc

SEQ ID NO: 1833048 - RNA, 22 nt, Human
guuuuaaggaugcuuguacaua

SEQ ID NO: 1833049 - RNA, 13 nt, Human
aaguacuauguau

SEQ ID NO: 1833050 - RNA, 17 nt, Human
aaguacuauaauuuacc

SEQ ID NO: 1833051 - RNA, 14 nt, Human
aaguacuauaauuu

SEQ ID NO: 1833052 - RNA, 15 nt, Human
aaguauuauaccuuu

SEQ ID NO: 1833053 - RNA, 18 nt, Human
aaguacuucuccacccug

SEQ ID NO: 1833054 - RNA, 19 nt, Human
aaguacuucuccacccugc

SEQ ID NO: 1833055 - RNA, 20 nt, Human
aaguacuucuccacccugcu

SEQ ID NO: 1833056 - RNA, 23 nt, Human
aaguauucuuauuuaaugaaaga

SEQ ID NO: 1833057 - RNA, 16 nt, Human
aaguauuauaccuuuu

SEQ ID NO: 1833058 - RNA, 19 nt, Human
aaguauuauaccuuuuuua

SEQ ID NO: 1833059 - RNA, 21 nt, Human
aaguauucuuauuuaaugaaa

SEQ ID NO: 1833060 - RNA, 22 nt, Human
aagucacugcacagugcaucuc

SEQ ID NO: 1833061 - RNA, 23 nt, Human
guuguuugauucagacagcugcc

SEQ ID NO: 1833062 - RNA, 22 nt, Human
aaggaaacccagcucuggucca

SEQ ID NO: 1833063 - RNA, 17 nt, Human
aaggaaacccagcucug

SEQ ID NO: 1833064 - RNA, 21 nt, Human
guuuaagugacugauggcuaa

SEQ ID NO: 1833065 - RNA, 14 nt, Human
guuuaugauuccac

SEQ ID NO: 1833066 - RNA, 23 nt, Human
aagguuucagaaagaagugggga

SEQ ID NO: 1833067 - RNA, 23 nt, Human
aagggggcugggacaugggaaag

SEQ ID NO: 1833068 - RNA, 12 nt, Human
aagggggcuggg

SEQ ID NO: 1833069 - RNA, 13 nt, Human
aaggggagaguaa

SEQ ID NO: 1833070 - RNA, 20 nt, Human
aaggcugucaauuacaggaa

SEQ ID NO: 1833071 - RNA, 22 nt, Human
aaggcugggggaagaagcucuc

SEQ ID NO: 1833072 - RNA, 19 nt, Human
aaggcugggggaagaagcu

SEQ ID NO: 1833073 - RNA, 11 nt, Human
guuucagaaau

SEQ ID NO: 1833074 - RNA, 13 nt, Human
guuucagaaaugu

SEQ ID NO: 1833075 - RNA, 14 nt, Human
aaggcugggggaag

SEQ ID NO: 1833076 - RNA, 16 nt, Human
aaggcugggggaagaa

SEQ ID NO: 1833077 - RNA, 21 nt, Human
aaguguguguuuuucauaaag

SEQ ID NO: 1833078 - RNA, 16 nt, Human
aaguguguguuuuuca

SEQ ID NO: 1833079 - RNA, 11 nt, Human
aaguuaagaau

SEQ ID NO: 1833080 - RNA, 23 nt, Human
aaguuaagaauguucuuauguug

SEQ ID NO: 1833081 - RNA, 14 nt, Human
aaguuacacauuuu

SEQ ID NO: 1833082 - RNA, 13 nt, Human
aagugugguagag

SEQ ID NO: 1833083 - RNA, 12 nt, Human
aaguguguguuu

SEQ ID NO: 1833084 - RNA, 23 nt, Human
aaguguauuuuuuuacuaauaga

SEQ ID NO: 1833085 - RNA, 20 nt, Human
aaguucccuacuuccuguga

SEQ ID NO: 1833086 - RNA, 17 nt, Human
aaguucccuacuuccug

SEQ ID NO: 1833087 - RNA, 14 nt, Human
aaguucccuacuuc

SEQ ID NO: 1833088 - RNA, 21 nt, Human
aaguuucugccgcagcccugc

SEQ ID NO: 1833089 - RNA, 19 nt, Human
aaguuucugccgcagcccu

SEQ ID NO: 1833090 - RNA, 9 nt, Human
uaaaauggu

SEQ ID NO: 1833091 - RNA, 20 nt, Human
aaguuugagaucagccuggg

SEQ ID NO: 1833092 - RNA, 20 nt, Human
uaaaaguacauguuaaacuu

SEQ ID NO: 1833093 - RNA, 13 nt, Human
uaaaagucuugug

SEQ ID NO: 1833094 - RNA, 21 nt, Human
uaaaauaccagccaguaaaug

SEQ ID NO: 1833095 - RNA, 13 nt, Human
aagugauccuccc

SEQ ID NO: 1833096 - RNA, 19 nt, Human
aagugauccucccaccuca

SEQ ID NO: 1833097 - RNA, 20 nt, Human
aagugauccucccaccucag

SEQ ID NO: 1833098 - RNA, 17 nt, Human
aagugauucucaugccu

SEQ ID NO: 1833099 - RNA, 21 nt, Human
aagugauucuccugccucagc

SEQ ID NO: 1833100 - RNA, 19 nt, Human
aagugauucucaugccuca

SEQ ID NO: 1833101 - RNA, 16 nt, Human
aagugauucucaugcc

SEQ ID NO: 1833102 - RNA, 13 nt, Human
aagugauucucau

SEQ ID NO: 1833103 - RNA, 23 nt, Human
aagugauccucccaccucagccu

SEQ ID NO: 1833104 - RNA, 12 nt, Human
uaaaacuuuuua

SEQ ID NO: 1833105 - RNA, 15 nt, Human
uaaaacuuuuuaaaa

SEQ ID NO: 1833106 - RNA, 13 nt, Human
uaaaacccaagug

SEQ ID NO: 1833107 - RNA, 23 nt, Human
uaaaaaucucaaauuucuaaauc

SEQ ID NO: 1833108 - RNA, 15 nt, Human
uaaaaaugagguacu

SEQ ID NO: 1833109 - RNA, 22 nt, Human
uaaaaaugagguacucuccugg

SEQ ID NO: 1833110 - RNA, 21 nt, Human
uaaaaaaaaaccugagcccca

SEQ ID NO: 1833111 - RNA, 22 nt, Human
uaaaaagcuccaaaugcagcuu

SEQ ID NO: 1833112 - RNA, 16 nt, Human
gucgaggacagggagg

SEQ ID NO: 1833113 - RNA, 12 nt, Human
gucgaggcagga

SEQ ID NO: 1833114 - RNA, 16 nt, Human
guccuggcaugggaau

SEQ ID NO: 1833115 - RNA, 19 nt, Human
guccugcugcaguugccag

SEQ ID NO: 1833116 - RNA, 14 nt, Human
guccucuuuucuga

SEQ ID NO: 1833117 - RNA, 16 nt, Human
gucuaccugaggggcc

SEQ ID NO: 1833118 - RNA, 15 nt, Human
gucuaccugaggggc

SEQ ID NO: 1833119 - RNA, 13 nt, Human
gucuaccugaggg

SEQ ID NO: 1833120 - RNA, 14 nt, Human
gucuaccugagggg

SEQ ID NO: 1833121 - RNA, 12 nt, Human
gucgccucugca

SEQ ID NO: 1833122 - RNA, 23 nt, Human
gucuaggcaggaccuguggccaa

SEQ ID NO: 1833123 - RNA, 22 nt, Human
gucuaugggacucaaugcacug

SEQ ID NO: 1833124 - RNA, 18 nt, Human
aacaguccauugaaaggg

SEQ ID NO: 1833125 - RNA, 18 nt, Human
guccccuguuuguuucug

SEQ ID NO: 1833126 - RNA, 22 nt, Human
guccccuguuuguuucugaaag

SEQ ID NO: 1833127 - RNA, 12 nt, Human
gucccuaauaaa

SEQ ID NO: 1833128 - RNA, 19 nt, Human
gucccuuacgugaguccug

SEQ ID NO: 1833129 - RNA, 18 nt, Human
gucccuuacgugaguccu

SEQ ID NO: 1833130 - RNA, 18 nt, Human
gucccugguggcagcuca

SEQ ID NO: 1833131 - RNA, 15 nt, Human
gucccuaauaaagcu

SEQ ID NO: 1833132 - RNA, 19 nt, Human
gucccugguggcagcucac

SEQ ID NO: 1833133 - RNA, 18 nt, Human
guccccaccgcagacagg

SEQ ID NO: 1833134 - RNA, 20 nt, Human
gucccaccccacacacgcca

SEQ ID NO: 1833135 - RNA, 22 nt, Human
guccccaccgcagacaggacca

SEQ ID NO: 1833136 - RNA, 15 nt, Human
gucccaccccacaca

SEQ ID NO: 1833137 - RNA, 19 nt, Human
gucauuugagcagggcuca

SEQ ID NO: 1833138 - RNA, 22 nt, Human
guccaugaagauguagaggaga

SEQ ID NO: 1833139 - RNA, 23 nt, Human
guccaugaagauguagaggagaa

SEQ ID NO: 1833140 - RNA, 19 nt, Human
aaauuucuaaaucuccaaa

SEQ ID NO: 1833141 - RNA, 17 nt, Human
aaauuucucuacugucu

SEQ ID NO: 1833142 - RNA, 19 nt, Human
aacacaaacgggcucagca

SEQ ID NO: 1833143 - RNA, 17 nt, Human
aacacucauugaccuga

SEQ ID NO: 1833144 - RNA, 21 nt, Human
aacacugggagaaaugaaaaa

SEQ ID NO: 1833145 - RNA, 21 nt, Human
aacacucacauuuauucugcu

SEQ ID NO: 1833146 - RNA, 19 nt, Human
aacacuguucucugcccuc

SEQ ID NO: 1833147 - RNA, 17 nt, Human
gucauuugagcagggcu

SEQ ID NO: 1833148 - RNA, 18 nt, Human
aacacuguucucugcccu

SEQ ID NO: 1833149 - RNA, 17 nt, Human
aacacuguucucugccc

SEQ ID NO: 1833150 - RNA, 16 nt, Human
aacacuguucucugcc

SEQ ID NO: 1833151 - RNA, 13 nt, Human
aaauuucuaaauc

SEQ ID NO: 1833152 - RNA, 15 nt, Human
aaauuucuaaaucuc

SEQ ID NO: 1833153 - RNA, 12 nt, Human
aaauuucuaaau

SEQ ID NO: 1833154 - RNA, 16 nt, Human
gucagguggggcagcu

SEQ ID NO: 1833155 - RNA, 17 nt, Human
gucagguggggcagcuu

SEQ ID NO: 1833156 - RNA, 18 nt, Human
gucagguggggcagcuug

SEQ ID NO: 1833157 - RNA, 22 nt, Human
gucagguggggcagcuugaggg

SEQ ID NO: 1833158 - RNA, 15 nt, Human
gucacugcuuaacuu

SEQ ID NO: 1833159 - RNA, 21 nt, Human
gucacugcuuaacuucacaua

SEQ ID NO: 1833160 - RNA, 17 nt, Human
gucacuuuguuuuacug

SEQ ID NO: 1833161 - RNA, 21 nt, Human
gucagaaguuucugccgcagc

SEQ ID NO: 1833162 - RNA, 23 nt, Human
gucagaaguuucugccgcagccc

SEQ ID NO: 1833163 - RNA, 23 nt, Human
gucacugagacagcccgggcucu

SEQ ID NO: 1833164 - RNA, 21 nt, Human
gucacugagacagcccgggcu

SEQ ID NO: 1833165 - RNA, 18 nt, Human
gucacugagacagcccgg

SEQ ID NO: 1833166 - RNA, 17 nt, Human
gucacugagacagcccg

SEQ ID NO: 1833167 - RNA, 10 nt, Human
gucacugcuu

SEQ ID NO: 1833168 - RNA, 23 nt, Human
gucacugcacagugcaucucagc

SEQ ID NO: 1833169 - RNA, 20 nt, Human
gucacugcacagugcaucuc

SEQ ID NO: 1833170 - RNA, 16 nt, Human
gucacugagacagccc

SEQ ID NO: 1833171 - RNA, 15 nt, Human
gucacugagacagcc

SEQ ID NO: 1833172 - RNA, 14 nt, Human
gucacugagacagc

SEQ ID NO: 1833173 - RNA, 12 nt, Human
gucaccaagccc

SEQ ID NO: 1833174 - RNA, 15 nt, Human
gucaccaagcccagu

SEQ ID NO: 1833175 - RNA, 23 nt, Human
gucacucuggcagcucagagagg

SEQ ID NO: 1833176 - RNA, 22 nt, Human
gucaauuacaggaaguacugga

SEQ ID NO: 1833177 - RNA, 13 nt, Human
gucacaggaagua

SEQ ID NO: 1833178 - RNA, 15 nt, Human
gucacaggaaguaga

SEQ ID NO: 1833179 - RNA, 21 nt, Human
gucaauuuuguuauguauauu

SEQ ID NO: 1833180 - RNA, 22 nt, Human
gucaccaaaucagcugcuacua

SEQ ID NO: 1833181 - RNA, 20 nt, Human
gucacaggaaguagaggagg

SEQ ID NO: 1833182 - RNA, 18 nt, Human
gucacaggacucugccuc

SEQ ID NO: 1833183 - RNA, 17 nt, Human
gucacaggacucugccu

SEQ ID NO: 1833184 - RNA, 16 nt, Human
gucacaggagggaggg

SEQ ID NO: 1833185 - RNA, 19 nt, Human
gucacaggacucugccucc

SEQ ID NO: 1833186 - RNA, 12 nt, Human
gucacaggcagg

SEQ ID NO: 1833187 - RNA, 18 nt, Human
guauucucuccuguaccu

SEQ ID NO: 1833188 - RNA, 21 nt, Human
guauucucuccuguaccucuu

SEQ ID NO: 1833189 - RNA, 16 nt, Human
aaaucauucauuuucu

SEQ ID NO: 1833190 - RNA, 11 nt, Human
guauuuauuca

SEQ ID NO: 1833191 - RNA, 14 nt, Human
aaaugucuuccugg

SEQ ID NO: 1833192 - RNA, 21 nt, Human
aaaugucucuuuaaugucaca

SEQ ID NO: 1833193 - RNA, 14 nt, Human
aaauuaaucugggc

SEQ ID NO: 1833194 - RNA, 15 nt, Human
aaauguggcuccugg

SEQ ID NO: 1833195 - RNA, 23 nt, Human
aaauuaugugccagauuuaugca

SEQ ID NO: 1833196 - RNA, 19 nt, Human
aaauuaggauuucaugauu

SEQ ID NO: 1833197 - RNA, 18 nt, Human
aaauuaggauuucaugau

SEQ ID NO: 1833198 - RNA, 18 nt, Human
aaauugucagaugcugug

SEQ ID NO: 1833199 - RNA, 17 nt, Human
aaauuguauuacaaauc

SEQ ID NO: 1833200 - RNA, 16 nt, Human
aaauuccccacccuga

SEQ ID NO: 1833201 - RNA, 17 nt, Human
aaauuccaagugauuga

SEQ ID NO: 1833202 - RNA, 18 nt, Human
gugaggcucugcccuugg

SEQ ID NO: 1833203 - RNA, 23 nt, Human
gugaguacuacaguccucccauc

SEQ ID NO: 1833204 - RNA, 17 nt, Human
gugagucaccaagccca

SEQ ID NO: 1833205 - RNA, 21 nt, Human
aacucuccucugcugcuggcu

SEQ ID NO: 1833206 - RNA, 19 nt, Human
aacucuccucugcugcugg

SEQ ID NO: 1833207 - RNA, 19 nt, Human
gugagucaccaagcccagu

SEQ ID NO: 1833208 - RNA, 17 nt, Human
gugaggcucugcccuug

SEQ ID NO: 1833209 - RNA, 16 nt, Human
gugaggcucugcccuu

SEQ ID NO: 1833210 - RNA, 15 nt, Human
gugaggcucugcccu

SEQ ID NO: 1833211 - RNA, 14 nt, Human
gugaggcucugccc

SEQ ID NO: 1833212 - RNA, 13 nt, Human
gugaggcucugcc

SEQ ID NO: 1833213 - RNA, 12 nt, Human
gugaggcucugc

SEQ ID NO: 1833214 - RNA, 18 nt, Human
gugagacucugucucaaa

SEQ ID NO: 1833215 - RNA, 23 nt, Human
aacucuccucugcugcuggcugg

SEQ ID NO: 1833216 - RNA, 22 nt, Human
aacucuccucugcugcuggcug

SEQ ID NO: 1833217 - RNA, 16 nt, Human
aacucugacaacagac

SEQ ID NO: 1833218 - RNA, 16 nt, Human
aacugcauuggcuuug

SEQ ID NO: 1833219 - RNA, 23 nt, Human
aacugauuuuuuuuuccuucagu

SEQ ID NO: 1833220 - RNA, 22 nt, Human
aacugauuuuuuuuuccuucag

SEQ ID NO: 1833221 - RNA, 21 nt, Human
aacugauuuuuuuuuccuuca

SEQ ID NO: 1833222 - RNA, 20 nt, Human
aacugauuuuuuuuuccuuc

SEQ ID NO: 1833223 - RNA, 23 nt, Human
gugacagaggcagccccauucug

SEQ ID NO: 1833224 - RNA, 20 nt, Human
gugacagagugagacucugu

SEQ ID NO: 1833225 - RNA, 22 nt, Human
gugacagagugagacucugucu

SEQ ID NO: 1833226 - RNA, 23 nt, Human
gugaauaauacaguaucucaggg

SEQ ID NO: 1833227 - RNA, 19 nt, Human
gugaaguuuaauugacuua

SEQ ID NO: 1833228 - RNA, 14 nt, Human
aacuccugaccuca

SEQ ID NO: 1833229 - RNA, 12 nt, Human
aacuccugaccu

SEQ ID NO: 1833230 - RNA, 16 nt, Human
gugacuucagcucugu

SEQ ID NO: 1833231 - RNA, 19 nt, Human
gugacaugucuuuucuugc

SEQ ID NO: 1833232 - RNA, 22 nt, Human
gugacauguguuggcagccucu

SEQ ID NO: 1833233 - RNA, 15 nt, Human
gugagaccugccccu

SEQ ID NO: 1833234 - RNA, 14 nt, Human
gugagaccugcccc

SEQ ID NO: 1833235 - RNA, 13 nt, Human
gugagaccugccc

SEQ ID NO: 1833236 - RNA, 22 nt, Human
gugagacccugucucaaaaaaa

SEQ ID NO: 1833237 - RNA, 23 nt, Human
gugagaccugccccuccucucug

SEQ ID NO: 1833238 - RNA, 16 nt, Human
gugagaccugccccuc

SEQ ID NO: 1833239 - RNA, 14 nt, Human
gugagacucugucu

SEQ ID NO: 1833240 - RNA, 16 nt, Human
gugagacucugucuca

SEQ ID NO: 1833241 - RNA, 19 nt, Human
gucucaaaaaaagaaaaag

SEQ ID NO: 1833242 - RNA, 17 nt, Human
gucucaaaaaaagaaaa

SEQ ID NO: 1833243 - RNA, 14 nt, Human
gucucaaaaaaaca

SEQ ID NO: 1833244 - RNA, 20 nt, Human
gucugacaggcaaugcuggc

SEQ ID NO: 1833245 - RNA, 15 nt, Human
gucugacaggcaaug

SEQ ID NO: 1833246 - RNA, 18 nt, Human
gucugacaggcaaugcug

SEQ ID NO: 1833247 - RNA, 12 nt, Human
gucugacaggca

SEQ ID NO: 1833248 - RNA, 13 nt, Human
gucugacaggcaa

SEQ ID NO: 1833249 - RNA, 14 nt, Human
gucugacaggcaau

SEQ ID NO: 1833250 - RNA, 18 nt, Human
gucuggaaugcaguggua

SEQ ID NO: 1833251 - RNA, 15 nt, Human
gucuggaaugcagug

SEQ ID NO: 1833252 - RNA, 16 nt, Human
gucuggaaugcagugg

SEQ ID NO: 1833253 - RNA, 19 nt, Human
gucuuauauauuguagaua

SEQ ID NO: 1833254 - RNA, 22 nt, Human
gucuuguuuuuuuuuuccacuu

SEQ ID NO: 1833255 - RNA, 20 nt, Human
gucuuguguuucuuuaguuu

SEQ ID NO: 1833256 - RNA, 21 nt, Human
aaccuucgccaccuggguucc

SEQ ID NO: 1833257 - RNA, 12 nt, Human
aacgugaaaaug

SEQ ID NO: 1833258 - RNA, 23 nt, Human
aaccuggucacaggacucugccu

SEQ ID NO: 1833259 - RNA, 17 nt, Human
aacuagggaagauaaua

SEQ ID NO: 1833260 - RNA, 21 nt, Human
aacuaggugcauauuuauaaa

SEQ ID NO: 1833261 - RNA, 17 nt, Human
aacguuuuuccuguucu

SEQ ID NO: 1833262 - RNA, 13 nt, Human
aacguggcugcuu

SEQ ID NO: 1833263 - RNA, 12 nt, Human
aacguggcugcu

SEQ ID NO: 1833264 - RNA, 15 nt, Human
aacuauguugauaaa

SEQ ID NO: 1833265 - RNA, 12 nt, Human
aacuauggccug

SEQ ID NO: 1833266 - RNA, 16 nt, Human
gugcucaggagcccug

SEQ ID NO: 1833267 - RNA, 19 nt, Human
gugcuaucucccccagccc

SEQ ID NO: 1833268 - RNA, 18 nt, Human
gugcucaggagcccuggg

SEQ ID NO: 1833269 - RNA, 19 nt, Human
gugcucaggagcccuggga

SEQ ID NO: 1833270 - RNA, 18 nt, Human
gugcuccauggcugccau

SEQ ID NO: 1833271 - RNA, 22 nt, Human
gugcuccauggcugccaucuca

SEQ ID NO: 1833272 - RNA, 15 nt, Human
gugcugcccugccca

SEQ ID NO: 1833273 - RNA, 14 nt, Human
gugcugcccugccc

SEQ ID NO: 1833274 - RNA, 13 nt, Human
gugcugcccugcc

SEQ ID NO: 1833275 - RNA, 12 nt, Human
gugcugcccugc

SEQ ID NO: 1833276 - RNA, 16 nt, Human
gugcucugaucaucca

SEQ ID NO: 1833277 - RNA, 13 nt, Human
gugcucuggacag

SEQ ID NO: 1833278 - RNA, 14 nt, Human
gugcucuggacagg

SEQ ID NO: 1833279 - RNA, 18 nt, Human
gugcuaucucccccagcc

SEQ ID NO: 1833280 - RNA, 15 nt, Human
gugcuaucuccccca

SEQ ID NO: 1833281 - RNA, 17 nt, Human
gugcuaggaacacuccu

SEQ ID NO: 1833282 - RNA, 21 nt, Human
aacuuuaccuuuuuuauacau

SEQ ID NO: 1833283 - RNA, 22 nt, Human
aacuuuaccuuuuuuauacaua

SEQ ID NO: 1833284 - RNA, 23 nt, Human
aacuuuaccuuuuuuauacauaa

SEQ ID NO: 1833285 - RNA, 19 nt, Human
gugccagauuuaugcauau

SEQ ID NO: 1833286 - RNA, 18 nt, Human
aagaaaaagaaaaagaaa

SEQ ID NO: 1833287 - RNA, 13 nt, Human
aagaaaaagaaaa

SEQ ID NO: 1833288 - RNA, 19 nt, Human
aagaaaaaauauuuucccu

SEQ ID NO: 1833289 - RNA, 18 nt, Human
aagaaaaaugagccuggc

SEQ ID NO: 1833290 - RNA, 17 nt, Human
aagaaaaaugagccugg

SEQ ID NO: 1833291 - RNA, 14 nt, Human
aagaaagaaaauca

SEQ ID NO: 1833292 - RNA, 13 nt, Human
aagaaagaaaauc

SEQ ID NO: 1833293 - RNA, 16 nt, Human
aagaaagaaaaucagg

SEQ ID NO: 1833294 - RNA, 19 nt, Human
aagaaagcccuuaggaaga

SEQ ID NO: 1833295 - RNA, 15 nt, Human
aagaaaauaguggug

SEQ ID NO: 1833296 - RNA, 21 nt, Human
aagaaaauaguggugugauuu

SEQ ID NO: 1833297 - RNA, 22 nt, Human
aagaaaauaguggugugauuug

SEQ ID NO: 1833298 - RNA, 13 nt, Human
aacuucagacaua

SEQ ID NO: 1833299 - RNA, 17 nt, Human
aacugcccccucugccc

SEQ ID NO: 1833300 - RNA, 16 nt, Human
aacugcccccucugcc

SEQ ID NO: 1833301 - RNA, 21 nt, Human
aacugcccccucugcccugcg

SEQ ID NO: 1833302 - RNA, 20 nt, Human
aacugcccccucugcccugc

SEQ ID NO: 1833303 - RNA, 19 nt, Human
aacugcccccucugcccug

SEQ ID NO: 1833304 - RNA, 18 nt, Human
aacugcccccucugcccu

SEQ ID NO: 1833305 - RNA, 14 nt, Human
aacuucacauauug

SEQ ID NO: 1833306 - RNA, 22 nt, Human
aacuucacauauugauuuccgu

SEQ ID NO: 1833307 - RNA, 22 nt, Human
aacuucaccauauuaccacaga

SEQ ID NO: 1833308 - RNA, 11 nt, Human
gugauuaccag

SEQ ID NO: 1833309 - RNA, 16 nt, Human
gugauuaccagggacu

SEQ ID NO: 1833310 - RNA, 17 nt, Human
gugauuaccagggacug

SEQ ID NO: 1833311 - RNA, 23 nt, Human
gugaugguuccccuguucacucu

SEQ ID NO: 1833312 - RNA, 21 nt, Human
gugcacaagcuccaagcuccc

SEQ ID NO: 1833313 - RNA, 16 nt, Human
gugcacaagcuccaag

SEQ ID NO: 1833314 - RNA, 13 nt, Human
gugcacaagcucc

SEQ ID NO: 1833315 - RNA, 18 nt, Human
gugcaaugaccuuucaau

SEQ ID NO: 1833316 - RNA, 22 nt, Human
gugcaaugaccuuucaauagga

SEQ ID NO: 1833317 - RNA, 23 nt, Human
gugcacaagcuccaagcucccag

SEQ ID NO: 1833318 - RNA, 21 nt, Human
gugcacaugcacgugugugca

SEQ ID NO: 1833319 - RNA, 17 nt, Human
gugcauuugaggucugu

SEQ ID NO: 1833320 - RNA, 19 nt, Human
gugcauuugaggucuguuc

SEQ ID NO: 1833321 - RNA, 23 nt, Human
gugccaaaaacaacaacaaaaug

SEQ ID NO: 1833322 - RNA, 21 nt, Human
gugcauuuggugguuucagaa

SEQ ID NO: 1833323 - RNA, 19 nt, Human
uagauauaugcucugcaug

SEQ ID NO: 1833324 - RNA, 22 nt, Human
uagaggagaaacuggaacucuc

SEQ ID NO: 1833325 - RNA, 15 nt, Human
uagauauaugcucug

SEQ ID NO: 1833326 - RNA, 19 nt, Human
uagaggagaaacuggaacu

SEQ ID NO: 1833327 - RNA, 22 nt, Human
acaaaggaugcccaaagaugca

SEQ ID NO: 1833328 - RNA, 16 nt, Human
aauuguuacaaauugu

SEQ ID NO: 1833329 - RNA, 20 nt, Human
aauuguguuuauaauuuuaa

SEQ ID NO: 1833330 - RNA, 21 nt, Human
aauuguguuuauaauuuuaaa

SEQ ID NO: 1833331 - RNA, 11 nt, Human
acaaaagcaug

SEQ ID NO: 1833332 - RNA, 22 nt, Human
acaaaagcaugugagacugguu

SEQ ID NO: 1833333 - RNA, 18 nt, Human
acaaaaggauaaugaaua

SEQ ID NO: 1833334 - RNA, 20 nt, Human
acaagacccaaaaggcagaa

SEQ ID NO: 1833335 - RNA, 19 nt, Human
acaagacccuugugguccc

SEQ ID NO: 1833336 - RNA, 19 nt, Human
acaagaccacguuucuaaa

SEQ ID NO: 1833337 - RNA, 21 nt, Human
acaacacucauugaccugagg

SEQ ID NO: 1833338 - RNA, 23 nt, Human
acaacacucauugaccugaggcc

SEQ ID NO: 1833339 - RNA, 15 nt, Human
uagccagaggagaga

SEQ ID NO: 1833340 - RNA, 11 nt, Human
uagccagagga

SEQ ID NO: 1833341 - RNA, 19 nt, Human
acaaauuuacagagacaga

SEQ ID NO: 1833342 - RNA, 18 nt, Human
acaaauuuacagagacag

SEQ ID NO: 1833343 - RNA, 16 nt, Human
uagcauuuugcuaaau

SEQ ID NO: 1833344 - RNA, 22 nt, Human
uagcauuuugcuaaaugugaau

SEQ ID NO: 1833345 - RNA, 21 nt, Human
uagccaaggccaaaggaagca

SEQ ID NO: 1833346 - RNA, 14 nt, Human
uagaugcugacugu

SEQ ID NO: 1833347 - RNA, 23 nt, Human
uagaugcugacuguacuccuccc

SEQ ID NO: 1833348 - RNA, 19 nt, Human
uagcauggcugccaauggg

SEQ ID NO: 1833349 - RNA, 16 nt, Human
uaggaaauccagggug

SEQ ID NO: 1833350 - RNA, 21 nt, Human
uagcuuacaagccagcuggag

SEQ ID NO: 1833351 - RNA, 13 nt, Human
uaggacuguagaa

SEQ ID NO: 1833352 - RNA, 14 nt, Human
uaggacuguagaaa

SEQ ID NO: 1833353 - RNA, 20 nt, Human
uaggcauuugcugaauacag

SEQ ID NO: 1833354 - RNA, 16 nt, Human
uaggcauuugcugaau

SEQ ID NO: 1833355 - RNA, 14 nt, Human
uaggcauuguggga

SEQ ID NO: 1833356 - RNA, 21 nt, Human
uagggaaggauacaaaagcau

SEQ ID NO: 1833357 - RNA, 17 nt, Human
acaaugacuuacuguac

SEQ ID NO: 1833358 - RNA, 18 nt, Human
acaaugacuuacuguaca

SEQ ID NO: 1833359 - RNA, 19 nt, Human
acaaugacuuacuguacau

SEQ ID NO: 1833360 - RNA, 12 nt, Human
acaaugacuuac

SEQ ID NO: 1833361 - RNA, 19 nt, Human
acaaggacuaggguccugg

SEQ ID NO: 1833362 - RNA, 18 nt, Human
acaaggacuaggguccug

SEQ ID NO: 1833363 - RNA, 21 nt, Human
acaaggacagccccuccucca

SEQ ID NO: 1833364 - RNA, 22 nt, Human
acaaggacagccccuccuccau

SEQ ID NO: 1833365 - RNA, 18 nt, Human
acaagaccacguuucuaa

SEQ ID NO: 1833366 - RNA, 21 nt, Human
acaccuuagccugcccuccuu

SEQ ID NO: 1833367 - RNA, 20 nt, Human
acacuaaccacgcuggaccu

SEQ ID NO: 1833368 - RNA, 21 nt, Human
acaccucugcacaagcugcac

SEQ ID NO: 1833369 - RNA, 14 nt, Human
acaccgggccugga

SEQ ID NO: 1833370 - RNA, 16 nt, Human
acaccgggcacucaga

SEQ ID NO: 1833371 - RNA, 15 nt, Human
acacucaaaagcugg

SEQ ID NO: 1833372 - RNA, 15 nt, Human
uauaaguguguguuu

SEQ ID NO: 1833373 - RNA, 20 nt, Human
acacucacauuuauucugcu

SEQ ID NO: 1833374 - RNA, 22 nt, Human
acacucacauuuauucugcuca

SEQ ID NO: 1833375 - RNA, 18 nt, Human
acacaugauccugcaauu

SEQ ID NO: 1833376 - RNA, 21 nt, Human
acacaugagcaucaggccagg

SEQ ID NO: 1833377 - RNA, 14 nt, Human
acacauuuuauuuu

SEQ ID NO: 1833378 - RNA, 19 nt, Human
acacauuuuauuuuauuau

SEQ ID NO: 1833379 - RNA, 20 nt, Human
acacauuuuauuuuauuaug

SEQ ID NO: 1833380 - RNA, 20 nt, Human
uauaaaagccuguuuaagag

SEQ ID NO: 1833381 - RNA, 19 nt, Human
uauaaaaauaaaaaacacu

SEQ ID NO: 1833382 - RNA, 22 nt, Human
uauaaaagggacugagaaauuu

SEQ ID NO: 1833383 - RNA, 19 nt, Human
uauaaaagccuguuuaaga

SEQ ID NO: 1833384 - RNA, 20 nt, Human
uaguuccaccaucaagccac

SEQ ID NO: 1833385 - RNA, 19 nt, Human
acacacagcucuguccugg

SEQ ID NO: 1833386 - RNA, 17 nt, Human
acacacagcucuguccu

SEQ ID NO: 1833387 - RNA, 13 nt, Human
acacacagcucug

SEQ ID NO: 1833388 - RNA, 14 nt, Human
acacacagcucugu

SEQ ID NO: 1833389 - RNA, 22 nt, Human
acacacacgcgugcacacacca

SEQ ID NO: 1833390 - RNA, 21 nt, Human
acacacugcauguuugugauu

SEQ ID NO: 1833391 - RNA, 14 nt, Human
acacaccagagccc

SEQ ID NO: 1833392 - RNA, 15 nt, Human
acacaccagagccca

SEQ ID NO: 1833393 - RNA, 20 nt, Human
acacaccagagcccaccuug

SEQ ID NO: 1833394 - RNA, 21 nt, Human
acacacgcgugcacacaccag

SEQ ID NO: 1833395 - RNA, 21 nt, Human
acaaugcugugcccuaaagug

SEQ ID NO: 1833396 - RNA, 22 nt, Human
acaaugcugugcccuaaagugu

SEQ ID NO: 1833397 - RNA, 23 nt, Human
acaaugcugugcccuaaagugua

SEQ ID NO: 1833398 - RNA, 24 nt, Human
acaaugcugugcccuaaaguguau

SEQ ID NO: 1833399 - RNA, 19 nt, Human
acaauggauaggcacagga

SEQ ID NO: 1833400 - RNA, 17 nt, Human
acaaugugaaaagaaaa

SEQ ID NO: 1833401 - RNA, 19 nt, Human
acaaugugaaaagaaaaau

SEQ ID NO: 1833402 - RNA, 19 nt, Human
acacaguauuacuucugcu

SEQ ID NO: 1833403 - RNA, 22 nt, Human
acacaguauuacuucugcuaca

SEQ ID NO: 1833404 - RNA, 18 nt, Human
acacaguauuacuucugc

SEQ ID NO: 1833405 - RNA, 21 nt, Human
uagugaaucacguaaagcuag

SEQ ID NO: 1833406 - RNA, 17 nt, Human
acagcaaggagauuuac

SEQ ID NO: 1833407 - RNA, 15 nt, Human
acagauuugagcuca

SEQ ID NO: 1833408 - RNA, 14 nt, Human
acagauuugagcuc

SEQ ID NO: 1833409 - RNA, 19 nt, Human
acagagcccacgcccccac

SEQ ID NO: 1833410 - RNA, 18 nt, Human
acagagcccacgccccca

SEQ ID NO: 1833411 - RNA, 15 nt, Human
acagagcccacgccc

SEQ ID NO: 1833412 - RNA, 14 nt, Human
acagagcccacgcc

SEQ ID NO: 1833413 - RNA, 17 nt, Human
acagauccccaagccug

SEQ ID NO: 1833414 - RNA, 18 nt, Human
acagauccccaagccugg

SEQ ID NO: 1833415 - RNA, 22 nt, Human
acagaucucugcuuuggaaauc

SEQ ID NO: 1833416 - RNA, 17 nt, Human
acagcccgggcucugcc

SEQ ID NO: 1833417 - RNA, 21 nt, Human
acagcaaggagauuuacaacu

SEQ ID NO: 1833418 - RNA, 20 nt, Human
acagcccgggcucugccucc

SEQ ID NO: 1833419 - RNA, 19 nt, Human
acagcccgggcucugccuc

SEQ ID NO: 1833420 - RNA, 18 nt, Human
acagcccgggcucugccu

SEQ ID NO: 1833421 - RNA, 18 nt, Human
acagccguuuguucccca

SEQ ID NO: 1833422 - RNA, 11 nt, Human
uaugcauuuga

SEQ ID NO: 1833423 - RNA, 23 nt, Human
uaugcauuugaaaauuuugaugu

SEQ ID NO: 1833424 - RNA, 24 nt, Human
uaugcauuugaaaauuuugauguu

SEQ ID NO: 1833425 - RNA, 17 nt, Human
uaugccugggcagaagg

SEQ ID NO: 1833426 - RNA, 18 nt, Human
uauggcuuuugugcauua

SEQ ID NO: 1833427 - RNA, 21 nt, Human
uauggcuuuugugcauuaucu

SEQ ID NO: 1833428 - RNA, 17 nt, Human
uauggcuuuugugcauu

SEQ ID NO: 1833429 - RNA, 15 nt, Human
uaugcuuauacacuu

SEQ ID NO: 1833430 - RNA, 23 nt, Human
uauggcuuuugugcauuaucuag

SEQ ID NO: 1833431 - RNA, 12 nt, Human
acagccuggcac

SEQ ID NO: 1833432 - RNA, 14 nt, Human
uaucucccccagcc

SEQ ID NO: 1833433 - RNA, 16 nt, Human
uaucucccccagcccc

SEQ ID NO: 1833434 - RNA, 13 nt, Human
uaucucccccagc

SEQ ID NO: 1833435 - RNA, 11 nt, Human
acagagaaagu

SEQ ID NO: 1833436 - RNA, 18 nt, Human
acagagaaaguacuucuc

SEQ ID NO: 1833437 - RNA, 18 nt, Human
uaucaaguauuauaccuu

SEQ ID NO: 1833438 - RNA, 18 nt, Human
acagaaaauucuucucca

SEQ ID NO: 1833439 - RNA, 17 nt, Human
acagaaaauucuucucc

SEQ ID NO: 1833440 - RNA, 20 nt, Human
acagaaaauggaagacagcu

SEQ ID NO: 1833441 - RNA, 14 nt, Human
acagaaauguacag

SEQ ID NO: 1833442 - RNA, 16 nt, Human
acagaaauguacagca

SEQ ID NO: 1833443 - RNA, 17 nt, Human
acagaaauguacagcaa

SEQ ID NO: 1833444 - RNA, 23 nt, Human
uauaaguguguguuuuucauaaa

SEQ ID NO: 1833445 - RNA, 17 nt, Human
uauaaguguguguuuuu

SEQ ID NO: 1833446 - RNA, 16 nt, Human
uauauuuaguaucuuu

SEQ ID NO: 1833447 - RNA, 15 nt, Human
acagacccugcccug

SEQ ID NO: 1833448 - RNA, 14 nt, Human
acagacccugcccu

SEQ ID NO: 1833449 - RNA, 13 nt, Human
acagacccugccc

SEQ ID NO: 1833450 - RNA, 23 nt, Human
acaggaccagggauuuccaugau

SEQ ID NO: 1833451 - RNA, 14 nt, Human
acaggacucugccu

SEQ ID NO: 1833452 - RNA, 14 nt, Human
acaggcauguucuc

SEQ ID NO: 1833453 - RNA, 14 nt, Human
acaggcagguccag

SEQ ID NO: 1833454 - RNA, 16 nt, Human
acaggcagguccaggg

SEQ ID NO: 1833455 - RNA, 16 nt, Human
acaggagugagcacua

SEQ ID NO: 1833456 - RNA, 14 nt, Human
acaggaucagucug

SEQ ID NO: 1833457 - RNA, 13 nt, Human
acaggcaggucca

SEQ ID NO: 1833458 - RNA, 13 nt, Human
acagcuaacaugg

SEQ ID NO: 1833459 - RNA, 11 nt, Human
acagccuggca

SEQ ID NO: 1833460 - RNA, 17 nt, Human
acaggaaguagaggagg

SEQ ID NO: 1833461 - RNA, 13 nt, Human
acaggaaguacug

SEQ ID NO: 1833462 - RNA, 15 nt, Human
acaggaaaagcugcu

SEQ ID NO: 1833463 - RNA, 16 nt, Human
acaggaaaagcugcug

SEQ ID NO: 1833464 - RNA, 17 nt, Human
acaggaaaagcugcuga

SEQ ID NO: 1833465 - RNA, 18 nt, Human
acaggaaaagcugcugac

SEQ ID NO: 1833466 - RNA, 20 nt, Human
uauguggaguucaucuugaa

SEQ ID NO: 1833467 - RNA, 23 nt, Human
uaugugccagauuuaugcauauu

SEQ ID NO: 1833468 - RNA, 17 nt, Human
uaugugaaacauguuuc

SEQ ID NO: 1833469 - RNA, 14 nt, Human
uaugugaaacaugu

SEQ ID NO: 1833470 - RNA, 22 nt, Human
acaggcauguucucugaggaca

SEQ ID NO: 1833471 - RNA, 15 nt, Human
acaggcauguucucu

SEQ ID NO: 1833472 - RNA, 18 nt, Human
acaggcauguucucugag

SEQ ID NO: 1833473 - RNA, 19 nt, Human
acaggcauguucucugagg

SEQ ID NO: 1833474 - RNA, 20 nt, Human
acaggcauguucucugagga

SEQ ID NO: 1833475 - RNA, 19 nt, Human
uauuagugaccucagcuuu

SEQ ID NO: 1833476 - RNA, 21 nt, Human
uauuagugaccucagcuuuga

SEQ ID NO: 1833477 - RNA, 14 nt, Human
uauuacuucugcua

SEQ ID NO: 1833478 - RNA, 13 nt, Human
uauuacuucugcu

SEQ ID NO: 1833479 - RNA, 20 nt, Human
uauucaguaauaacucuacc

SEQ ID NO: 1833480 - RNA, 14 nt, Human
uauucaggaagcuc

SEQ ID NO: 1833481 - RNA, 16 nt, Human
uauucaggaagcucag

SEQ ID NO: 1833482 - RNA, 12 nt, Human
acaggcuccugc

SEQ ID NO: 1833483 - RNA, 14 nt, Human
uauucauaauuauu

SEQ ID NO: 1833484 - RNA, 22 nt, Human
acaggcgugagccaccgugccu

SEQ ID NO: 1833485 - RNA, 21 nt, Human
uauucagcucauggacuucug

SEQ ID NO: 1833486 - RNA, 12 nt, Human
acagggcacacc

SEQ ID NO: 1833487 - RNA, 20 nt, Human
acagggcacaccgggcacuc

SEQ ID NO: 1833488 - RNA, 20 nt, Human
acagggaggacgcucucugg

SEQ ID NO: 1833489 - RNA, 21 nt, Human
acagggaggacgcucucuggc

SEQ ID NO: 1833490 - RNA, 22 nt, Human
acaggcuccugccaccacgccc

SEQ ID NO: 1833491 - RNA, 21 nt, Human
acaggcuccugccaccacgcc

SEQ ID NO: 1833492 - RNA, 15 nt, Human
acaggcuccugccac

SEQ ID NO: 1833493 - RNA, 13 nt, Human
acaggcuccugcc

SEQ ID NO: 1833494 - RNA, 12 nt, Human
acaggcugggcu

SEQ ID NO: 1833495 - RNA, 22 nt, Human
acaggcugggcuucaguggcag

SEQ ID NO: 1833496 - RNA, 23 nt, Human
acaggcugggcuucaguggcagc

SEQ ID NO: 1833497 - RNA, 20 nt, Human
aauguauguguaaguauucu

SEQ ID NO: 1833498 - RNA, 19 nt, Human
aauguauguguaaguauuc

SEQ ID NO: 1833499 - RNA, 11 nt, Human
aaugugugugu

SEQ ID NO: 1833500 - RNA, 19 nt, Human
aaugugaaaagaaaaauga

SEQ ID NO: 1833501 - RNA, 14 nt, Human
aaugugaaacugga

SEQ ID NO: 1833502 - RNA, 15 nt, Human
aaugugaaacuggau

SEQ ID NO: 1833503 - RNA, 22 nt, Human
uacauauaagugauugcugguu

SEQ ID NO: 1833504 - RNA, 23 nt, Human
uacauaaugcgugcauaccacuu

SEQ ID NO: 1833505 - RNA, 24 nt, Human
uacauaaugcgugcauaccacuuu

SEQ ID NO: 1833506 - RNA, 16 nt, Human
uacaggugugagucac

SEQ ID NO: 1833507 - RNA, 11 nt, Human
aauuaacuuuu

SEQ ID NO: 1833508 - RNA, 21 nt, Human
aauguucucucuucuccaccu

SEQ ID NO: 1833509 - RNA, 13 nt, Human
uacauucuguuaa

SEQ ID NO: 1833510 - RNA, 22 nt, Human
aauuaaucugggccagaauuuc

SEQ ID NO: 1833511 - RNA, 21 nt, Human
aauuaagaaaggauaaaguug

SEQ ID NO: 1833512 - RNA, 21 nt, Human
aaugcacuuuguucuggcucu

SEQ ID NO: 1833513 - RNA, 20 nt, Human
aaugaccuuucaauaggaaa

SEQ ID NO: 1833514 - RNA, 17 nt, Human
aaugaccuuucaauagg

SEQ ID NO: 1833515 - RNA, 16 nt, Human
aaugaccuuucaauag

SEQ ID NO: 1833516 - RNA, 18 nt, Human
aaugaccuuucaauagga

SEQ ID NO: 1833517 - RNA, 21 nt, Human
uacaaugcugugcccuaaagu

SEQ ID NO: 1833518 - RNA, 22 nt, Human
aaugcacuuuguucuggcucuu

SEQ ID NO: 1833519 - RNA, 20 nt, Human
aauggacuaacuugucuuug

SEQ ID NO: 1833520 - RNA, 23 nt, Human
aauggacguguuaugacuccaga

SEQ ID NO: 1833521 - RNA, 14 nt, Human
aauggaaccacucu

SEQ ID NO: 1833522 - RNA, 21 nt, Human
aauggaaaugggcagagcaga

SEQ ID NO: 1833523 - RNA, 20 nt, Human
aauggaaaugggcagagcag

SEQ ID NO: 1833524 - RNA, 16 nt, Human
aaugcuucaucccuuu

SEQ ID NO: 1833525 - RNA, 12 nt, Human
aaugcccagccc

SEQ ID NO: 1833526 - RNA, 11 nt, Human
aaugcccagcc

SEQ ID NO: 1833527 - RNA, 13 nt, Human
aaugcccagcccc

SEQ ID NO: 1833528 - RNA, 22 nt, Human
aaugcuguauuagucacagaga

SEQ ID NO: 1833529 - RNA, 15 nt, Human
uacacuaaaagguga

SEQ ID NO: 1833530 - RNA, 23 nt, Human
uacacauuuuauuuuauuaugca

SEQ ID NO: 1833531 - RNA, 21 nt, Human
uacacauuuuauuuuauuaug

SEQ ID NO: 1833532 - RNA, 22 nt, Human
uacacauuuuauuuuauuaugc

SEQ ID NO: 1833533 - RNA, 19 nt, Human
uacacauuuuauuuuauua

SEQ ID NO: 1833534 - RNA, 22 nt, Human
uacagacaacaaaccuguuucu

SEQ ID NO: 1833535 - RNA, 20 nt, Human
uacagauccccaagccuggc

SEQ ID NO: 1833536 - RNA, 23 nt, Human
aauggcacaaucucggcucacug

SEQ ID NO: 1833537 - RNA, 16 nt, Human
aauggcagccuuggca

SEQ ID NO: 1833538 - RNA, 12 nt, Human
aauggcagccuu

SEQ ID NO: 1833539 - RNA, 20 nt, Human
uacuaucaugucaaacguga

SEQ ID NO: 1833540 - RNA, 17 nt, Human
uacuacuccuguaggaa

SEQ ID NO: 1833541 - RNA, 13 nt, Human
uacuacuccugua

SEQ ID NO: 1833542 - RNA, 13 nt, Human
uacuauguaucaa

SEQ ID NO: 1833543 - RNA, 12 nt, Human
uacuauguauca

SEQ ID NO: 1833544 - RNA, 23 nt, Human
uacuauggcccuggccuagcaua

SEQ ID NO: 1833545 - RNA, 23 nt, Human
uacucuccuggaaauauuaagaa

SEQ ID NO: 1833546 - RNA, 22 nt, Human
uacucuccuggaaauauuaaga

SEQ ID NO: 1833547 - RNA, 14 nt, Human
uacuauguaucaau

SEQ ID NO: 1833548 - RNA, 13 nt, Human
uacguacacauuu

SEQ ID NO: 1833549 - RNA, 14 nt, Human
uacguacacauuuu

SEQ ID NO: 1833550 - RNA, 15 nt, Human
uacguugugcauuug

SEQ ID NO: 1833551 - RNA, 16 nt, Human
uacguugugcauuugg

SEQ ID NO: 1833552 - RNA, 12 nt, Human
uacguacacauu

SEQ ID NO: 1833553 - RNA, 18 nt, Human
uacgggaggguaaggcug

SEQ ID NO: 1833554 - RNA, 22 nt, Human
uacgccaggggaaaaucagccu

SEQ ID NO: 1833555 - RNA, 12 nt, Human
aauugcauuucc

SEQ ID NO: 1833556 - RNA, 19 nt, Human
aauugaugggauuugguca

SEQ ID NO: 1833557 - RNA, 22 nt, Human
aauugacccacaagaaaugaaa

SEQ ID NO: 1833558 - RNA, 14 nt, Human
aauugacuuauuua

SEQ ID NO: 1833559 - RNA, 21 nt, Human
aauugacccacaagaaaugaa

SEQ ID NO: 1833560 - RNA, 22 nt, Human
uacuguacaugaaaacacauuu

SEQ ID NO: 1833561 - RNA, 21 nt, Human
uacuguacaugaaaacacauu

SEQ ID NO: 1833562 - RNA, 23 nt, Human
uacuguaauuugugauacaaugc

SEQ ID NO: 1833563 - RNA, 18 nt, Human
uacuguaaggcaaucaug

SEQ ID NO: 1833564 - RNA, 19 nt, Human
uacuguaauuugugauaca

SEQ ID NO: 1833565 - RNA, 20 nt, Human
uacuguaauuugugauacaa

SEQ ID NO: 1833566 - RNA, 18 nt, Human
uacuguaauuugugauac

SEQ ID NO: 1833567 - RNA, 19 nt, Human
uacuguaaggcaaucaugg

SEQ ID NO: 1833568 - RNA, 16 nt, Human
uacuggagaaaaugga

SEQ ID NO: 1833569 - RNA, 21 nt, Human
uacucugugucagguggggca

SEQ ID NO: 1833570 - RNA, 12 nt, Human
uacucuguguca

SEQ ID NO: 1833571 - RNA, 16 nt, Human
aauuauuauuuggccc

SEQ ID NO: 1833572 - RNA, 14 nt, Human
aauuccccacccug

SEQ ID NO: 1833573 - RNA, 12 nt, Human
aauuccccagau

SEQ ID NO: 1833574 - RNA, 22 nt, Human
aauuccacuuauaggaauugac

SEQ ID NO: 1833575 - RNA, 18 nt, Human
aauuccaagugauugaaa

SEQ ID NO: 1833576 - RNA, 17 nt, Human
uaccugucccccugaca

SEQ ID NO: 1833577 - RNA, 16 nt, Human
uaccugucccccugac

SEQ ID NO: 1833578 - RNA, 14 nt, Human
uaccugucccccug

SEQ ID NO: 1833579 - RNA, 13 nt, Human
uaccugucccccu

SEQ ID NO: 1833580 - RNA, 10 nt, Human
uaccuguccc

SEQ ID NO: 1833581 - RNA, 20 nt, Human
uaccugccaggaagccagca

SEQ ID NO: 1833582 - RNA, 18 nt, Human
uaccugccaggaagccag

SEQ ID NO: 1833583 - RNA, 23 nt, Human
uaccugccaggaagccagcaggc

SEQ ID NO: 1833584 - RNA, 11 nt, Human
aauuacaggaa

SEQ ID NO: 1833585 - RNA, 15 nt, Human
aauuagccaagugug

SEQ ID NO: 1833586 - RNA, 18 nt, Human
uaauagacaauuuauuau

SEQ ID NO: 1833587 - RNA, 22 nt, Human
uaauagacaauuuauuauggca

SEQ ID NO: 1833588 - RNA, 19 nt, Human
uaauagcgucauaacuaga

SEQ ID NO: 1833589 - RNA, 16 nt, Human
uaauacaccacuacau

SEQ ID NO: 1833590 - RNA, 18 nt, Human
uaauacaccacuacauuc

SEQ ID NO: 1833591 - RNA, 19 nt, Human
uaauacaccacuacauucu

SEQ ID NO: 1833592 - RNA, 14 nt, Human
uaauagacaauuua

SEQ ID NO: 1833593 - RNA, 16 nt, Human
uaauagacaauuuauu

SEQ ID NO: 1833594 - RNA, 17 nt, Human
uaaugaaugaaacauuu

SEQ ID NO: 1833595 - RNA, 17 nt, Human
aaugaaaccugugucuc

SEQ ID NO: 1833596 - RNA, 17 nt, Human
aaugaaagacuguacaa

SEQ ID NO: 1833597 - RNA, 16 nt, Human
aaugaaagacuguaca

SEQ ID NO: 1833598 - RNA, 17 nt, Human
aaugaaacauuuuguca

SEQ ID NO: 1833599 - RNA, 13 nt, Human
aaucuuucugcag

SEQ ID NO: 1833600 - RNA, 13 nt, Human
aaugaaugucagu

SEQ ID NO: 1833601 - RNA, 22 nt, Human
aaugaauggcuaagcaaaaugu

SEQ ID NO: 1833602 - RNA, 17 nt, Human
aaugaaugcauaaaaug

SEQ ID NO: 1833603 - RNA, 13 nt, Human
aaugacacagucu

SEQ ID NO: 1833604 - RNA, 22 nt, Human
aaugaaugucagugugacugau

SEQ ID NO: 1833605 - RNA, 16 nt, Human
aaucuuuaauuuuaca

SEQ ID NO: 1833606 - RNA, 15 nt, Human
aaucuuuaauuuuac

SEQ ID NO: 1833607 - RNA, 15 nt, Human
uaaugaaugcauaaa

SEQ ID NO: 1833608 - RNA, 13 nt, Human
uaauguacugcau

SEQ ID NO: 1833609 - RNA, 18 nt, Human
uaaugucacaggcagguc

SEQ ID NO: 1833610 - RNA, 19 nt, Human
uaaguauucuuauuuaaug

SEQ ID NO: 1833611 - RNA, 20 nt, Human
uaaguauucuuauuuaauga

SEQ ID NO: 1833612 - RNA, 19 nt, Human
uaaguacuauguaucaaug

SEQ ID NO: 1833613 - RNA, 17 nt, Human
uaaguacuauguaucaa

SEQ ID NO: 1833614 - RNA, 16 nt, Human
uaaguacuauguauca

SEQ ID NO: 1833615 - RNA, 13 nt, Human
uaaguacuaugua

SEQ ID NO: 1833616 - RNA, 18 nt, Human
uaauaaacacucuugaaa

SEQ ID NO: 1833617 - RNA, 12 nt, Human
uaauaaacacuc

SEQ ID NO: 1833618 - RNA, 17 nt, Human
aaucugggccagaauuu

SEQ ID NO: 1833619 - RNA, 16 nt, Human
aaucugggccagaauu

SEQ ID NO: 1833620 - RNA, 19 nt, Human
aaucuacacuccagugaga

SEQ ID NO: 1833621 - RNA, 19 nt, Human
aaucuuauaauuuaaaaua

SEQ ID NO: 1833622 - RNA, 15 nt, Human
aaucauuagguguga

SEQ ID NO: 1833623 - RNA, 17 nt, Human
aaucauuaggugugacu

SEQ ID NO: 1833624 - RNA, 23 nt, Human
aaucauuaggugugacugaauuu

SEQ ID NO: 1833625 - RNA, 12 nt, Human
aauccgcccauc

SEQ ID NO: 1833626 - RNA, 15 nt, Human
aaucgaccugccucg

SEQ ID NO: 1833627 - RNA, 21 nt, Human
aauccuggggaacauagaacu

SEQ ID NO: 1833628 - RNA, 11 nt, Human
aauccuggcug

SEQ ID NO: 1833629 - RNA, 14 nt, Human
aauccuggggaaca

SEQ ID NO: 1833630 - RNA, 15 nt, Human
aauauuguacaguuu

SEQ ID NO: 1833631 - RNA, 17 nt, Human
aauauuguacaguuuuu

SEQ ID NO: 1833632 - RNA, 23 nt, Human
aauauuguacaguuuuuauugcu

SEQ ID NO: 1833633 - RNA, 17 nt, Human
aauauugauaugcuuau

SEQ ID NO: 1833634 - RNA, 12 nt, Human
aauauuuagugu

SEQ ID NO: 1833635 - RNA, 22 nt, Human
aauaugcacacauuuuuuaaau

SEQ ID NO: 1833636 - RNA, 16 nt, Human
aauaugcacacauuuu

SEQ ID NO: 1833637 - RNA, 17 nt, Human
aauaugcacacauuuuu

SEQ ID NO: 1833638 - RNA, 15 nt, Human
uaagagaaaugagcu

SEQ ID NO: 1833639 - RNA, 15 nt, Human
aauauuccugcauuu

SEQ ID NO: 1833640 - RNA, 12 nt, Human
aauauuccagag

SEQ ID NO: 1833641 - RNA, 18 nt, Human
uaagcacacuugacauca

SEQ ID NO: 1833642 - RNA, 22 nt, Human
uaagcuguuacugucuucagua

SEQ ID NO: 1833643 - RNA, 21 nt, Human
uaagauuccagagaguggcuc

SEQ ID NO: 1833644 - RNA, 14 nt, Human
uaagauuccagaga

SEQ ID NO: 1833645 - RNA, 16 nt, Human
aauaguggugugauuu

SEQ ID NO: 1833646 - RNA, 22 nt, Human
aauaguggugugauuuggggau

SEQ ID NO: 1833647 - RNA, 15 nt, Human
aauauauuuuaagac

SEQ ID NO: 1833648 - RNA, 14 nt, Human
aauauauuuuaaga

SEQ ID NO: 1833649 - RNA, 14 nt, Human
aauaguuguugauu

SEQ ID NO: 1833650 - RNA, 13 nt, Human
aauaguuggcuag

SEQ ID NO: 1833651 - RNA, 18 nt, Human
aauauauuuuaagacgaa

SEQ ID NO: 1833652 - RNA, 18 nt, Human
uaacauggacaugaucuu

SEQ ID NO: 1833653 - RNA, 17 nt, Human
uaacauguaauuaagua

SEQ ID NO: 1833654 - RNA, 23 nt, Human
uaacauggacaugaucuucuuua

SEQ ID NO: 1833655 - RNA, 16 nt, Human
uaacuuucugaaauaa

SEQ ID NO: 1833656 - RNA, 13 nt, Human
uaagacaaauaug

SEQ ID NO: 1833657 - RNA, 18 nt, Human
uaagaagugaaaaucuac

SEQ ID NO: 1833658 - RNA, 21 nt, Human
uaacuucacauauugauuucc

SEQ ID NO: 1833659 - RNA, 17 nt, Human
uaacuuccaauuuacau

SEQ ID NO: 1833660 - RNA, 14 nt, Human
uaacuucaccauau

SEQ ID NO: 1833661 - RNA, 12 nt, Human
uaacuagaacug

SEQ ID NO: 1833662 - RNA, 14 nt, Human
uaacuagaacugaa

SEQ ID NO: 1833663 - RNA, 17 nt, Human
uaacuagaacugaauuu

SEQ ID NO: 1833664 - RNA, 20 nt, Human
uaacuagaacugaauuuugu

SEQ ID NO: 1833665 - RNA, 18 nt, Human
uaacauggugugcuucuu

SEQ ID NO: 1833666 - RNA, 20 nt, Human
uaacgauaaaagacagugaa

SEQ ID NO: 1833667 - RNA, 15 nt, Human
accaccacacccagc

SEQ ID NO: 1833668 - RNA, 20 nt, Human
accaccacacccagcccacu

SEQ ID NO: 1833669 - RNA, 24 nt, Human
accacauuggagauguuuaguaau

SEQ ID NO: 1833670 - RNA, 18 nt, Human
accacaugugcacaugca

SEQ ID NO: 1833671 - RNA, 17 nt, Human
accacaucuugcucugc

SEQ ID NO: 1833672 - RNA, 18 nt, Human
accacaucuugcucugcu

SEQ ID NO: 1833673 - RNA, 19 nt, Human
accacaucuugcucugcug

SEQ ID NO: 1833674 - RNA, 15 nt, Human
ucaccauguuggcca

SEQ ID NO: 1833675 - RNA, 22 nt, Human
ucaccauguuggccaggcuggu

SEQ ID NO: 1833676 - RNA, 21 nt, Human
ucaccauguuggccaggcugg

SEQ ID NO: 1833677 - RNA, 20 nt, Human
ucacaguucucuccuucuuc

SEQ ID NO: 1833678 - RNA, 16 nt, Human
ucacaguucucuccuu

SEQ ID NO: 1833679 - RNA, 13 nt, Human
ucacagccucuga

SEQ ID NO: 1833680 - RNA, 21 nt, Human
ucacagaugugugauucacag

SEQ ID NO: 1833681 - RNA, 23 nt, Human
ucacagaugugugauucacagug

SEQ ID NO: 1833682 - RNA, 20 nt, Human
ucacagaugggugcuuggag

SEQ ID NO: 1833683 - RNA, 14 nt, Human
ucacaaccuucugu

SEQ ID NO: 1833684 - RNA, 16 nt, Human
ucaauucuugccaaau

SEQ ID NO: 1833685 - RNA, 17 nt, Human
ucacaaaggaugcccaa

SEQ ID NO: 1833686 - RNA, 17 nt, Human
accacuacauucuguua

SEQ ID NO: 1833687 - RNA, 16 nt, Human
accacuacauucuguu

SEQ ID NO: 1833688 - RNA, 15 nt, Human
accacuacauucugu

SEQ ID NO: 1833689 - RNA, 22 nt, Human
accagcgugugacuacuccccc

SEQ ID NO: 1833690 - RNA, 19 nt, Human
ucacguaaagcuagaaaug

SEQ ID NO: 1833691 - RNA, 20 nt, Human
ucacguaaagcuagaaauga

SEQ ID NO: 1833692 - RNA, 16 nt, Human
ucacuaggcuucuggu

SEQ ID NO: 1833693 - RNA, 18 nt, Human
ucacguaaagcuagaaau

SEQ ID NO: 1833694 - RNA, 23 nt, Human
ucacuugaacccgggaggcagag

SEQ ID NO: 1833695 - RNA, 10 nt, Human
ucacuugagu

SEQ ID NO: 1833696 - RNA, 15 nt, Human
accaguguuguggau

SEQ ID NO: 1833697 - RNA, 17 nt, Human
accaguguuguggauuu

SEQ ID NO: 1833698 - RNA, 20 nt, Human
ucacuaucccggcugcccuu

SEQ ID NO: 1833699 - RNA, 19 nt, Human
ucacuaucccggcugcccu

SEQ ID NO: 1833700 - RNA, 16 nt, Human
ucacugagacagcccg

SEQ ID NO: 1833701 - RNA, 21 nt, Human
ucacugagacagcccgggcuc

SEQ ID NO: 1833702 - RNA, 17 nt, Human
ucacugagacagcccgg

SEQ ID NO: 1833703 - RNA, 22 nt, Human
ucacugagacagcccgggcucu

SEQ ID NO: 1833704 - RNA, 14 nt, Human
ucacugcagccuca

SEQ ID NO: 1833705 - RNA, 15 nt, Human
ucacugcagccucaa

SEQ ID NO: 1833706 - RNA, 13 nt, Human
ucacugcauccuc

SEQ ID NO: 1833707 - RNA, 23 nt, Human
ucacuguugcccaggcuggcgug

SEQ ID NO: 1833708 - RNA, 18 nt, Human
acauuuuauuuuauuaug

SEQ ID NO: 1833709 - RNA, 14 nt, Human
acauuuuauuuuau

SEQ ID NO: 1833710 - RNA, 19 nt, Human
acauuuuauuuuauuaugc

SEQ ID NO: 1833711 - RNA, 20 nt, Human
acauuuuauuuuauuaugca

SEQ ID NO: 1833712 - RNA, 15 nt, Human
acauugcaauagaaa

SEQ ID NO: 1833713 - RNA, 16 nt, Human
acauugcaauagaaau

SEQ ID NO: 1833714 - RNA, 14 nt, Human
acauugcaauagaa

SEQ ID NO: 1833715 - RNA, 21 nt, Human
acauuuuuaagugcugcauuu

SEQ ID NO: 1833716 - RNA, 22 nt, Human
acauuuuuaagugcugcauuua

SEQ ID NO: 1833717 - RNA, 23 nt, Human
acauuuuuaagugcugcauuuaa

SEQ ID NO: 1833718 - RNA, 11 nt, Human
acauuuuguau

SEQ ID NO: 1833719 - RNA, 14 nt, Human
acauuuuuuaaaug

SEQ ID NO: 1833720 - RNA, 16 nt, Human
acauuuuuuaaaugca

SEQ ID NO: 1833721 - RNA, 17 nt, Human
acauuuuuuaaaugcac

SEQ ID NO: 1833722 - RNA, 21 nt, Human
acauuuuuuaaaugcaccugg

SEQ ID NO: 1833723 - RNA, 23 nt, Human
ucaaugaaugaaugaauggcuaa

SEQ ID NO: 1833724 - RNA, 22 nt, Human
ucaauaucuuuuuuuuaauaaa

SEQ ID NO: 1833725 - RNA, 22 nt, Human
ucaaguccucuuuucugagagg

SEQ ID NO: 1833726 - RNA, 23 nt, Human
acaugagguacugagagugaaca

SEQ ID NO: 1833727 - RNA, 15 nt, Human
acaugcuacacacug

SEQ ID NO: 1833728 - RNA, 21 nt, Human
acaugcuacacacugcauguu

SEQ ID NO: 1833729 - RNA, 20 nt, Human
acaugagguacugagaguga

SEQ ID NO: 1833730 - RNA, 12 nt, Human
acagucccugcc

SEQ ID NO: 1833731 - RNA, 20 nt, Human
acaugaauauuuaguguuca

SEQ ID NO: 1833732 - RNA, 22 nt, Human
acauguaauuaaguacuaugua

SEQ ID NO: 1833733 - RNA, 21 nt, Human
acauguaauuaaguacuaugu

SEQ ID NO: 1833734 - RNA, 19 nt, Human
acauguaauuaaguacuau

SEQ ID NO: 1833735 - RNA, 17 nt, Human
acauguaauuaaguacu

SEQ ID NO: 1833736 - RNA, 15 nt, Human
acauguaauuaagua

SEQ ID NO: 1833737 - RNA, 19 nt, Human
acauguccaagaagcccag

SEQ ID NO: 1833738 - RNA, 15 nt, Human
acauguccaagaagc

SEQ ID NO: 1833739 - RNA, 23 nt, Human
acauguaauuaaguacuauguau

SEQ ID NO: 1833740 - RNA, 14 nt, Human
acauuccugaugcu

SEQ ID NO: 1833741 - RNA, 14 nt, Human
ucaaccagcagaug

SEQ ID NO: 1833742 - RNA, 18 nt, Human
ucaaccauuccccauggg

SEQ ID NO: 1833743 - RNA, 15 nt, Human
ucaaccauuccccau

SEQ ID NO: 1833744 - RNA, 20 nt, Human
ucaacugcaucaagauguga

SEQ ID NO: 1833745 - RNA, 13 nt, Human
ucaaauuucuaaa

SEQ ID NO: 1833746 - RNA, 14 nt, Human
ucaaauuucuaaau

SEQ ID NO: 1833747 - RNA, 14 nt, Human
acccugaggcccag

SEQ ID NO: 1833748 - RNA, 18 nt, Human
acccugaaagcccugagc

SEQ ID NO: 1833749 - RNA, 16 nt, Human
acccugaaagcccuga

SEQ ID NO: 1833750 - RNA, 19 nt, Human
acccucgaggcggaucuuu

SEQ ID NO: 1833751 - RNA, 23 nt, Human
acccuuguggucccaccccacac

SEQ ID NO: 1833752 - RNA, 20 nt, Human
acccuuguggucccacccca

SEQ ID NO: 1833753 - RNA, 17 nt, Human
acccuugccgucuaccu

SEQ ID NO: 1833754 - RNA, 15 nt, Human
accgaaaacguggcu

SEQ ID NO: 1833755 - RNA, 15 nt, Human
acccugcccuguggg

SEQ ID NO: 1833756 - RNA, 17 nt, Human
acccugaggcccagagg

SEQ ID NO: 1833757 - RNA, 16 nt, Human
acccugaggcccagag

SEQ ID NO: 1833758 - RNA, 15 nt, Human
acccugaggcccaga

SEQ ID NO: 1833759 - RNA, 22 nt, Human
acccugcccugugggcccccaa

SEQ ID NO: 1833760 - RNA, 17 nt, Human
acccugcccugugggcc

SEQ ID NO: 1833761 - RNA, 12 nt, Human
acccuucuuuuc

SEQ ID NO: 1833762 - RNA, 20 nt, Human
ucaggccaggcccucugccc

SEQ ID NO: 1833763 - RNA, 22 nt, Human
ucaggccaggcccucugcccac

SEQ ID NO: 1833764 - RNA, 21 nt, Human
ucaggccaggcccucugccca

SEQ ID NO: 1833765 - RNA, 14 nt, Human
ucagcuccagcuca

SEQ ID NO: 1833766 - RNA, 15 nt, Human
ucagcuccagcucac

SEQ ID NO: 1833767 - RNA, 21 nt, Human
ucagcuuguaaauagcucagg

SEQ ID NO: 1833768 - RNA, 22 nt, Human
ucagcuuguaaauagcucaggu

SEQ ID NO: 1833769 - RNA, 23 nt, Human
ucaggccaggcccucugcccacu

SEQ ID NO: 1833770 - RNA, 19 nt, Human
ucagggucccugguggcag

SEQ ID NO: 1833771 - RNA, 16 nt, Human
ucaggguuggccccug

SEQ ID NO: 1833772 - RNA, 23 nt, Human
ucagguaacaggcagauacagga

SEQ ID NO: 1833773 - RNA, 21 nt, Human
ucagguaacaggcagauacag

SEQ ID NO: 1833774 - RNA, 22 nt, Human
ucagguaacaggcagauacagg

SEQ ID NO: 1833775 - RNA, 21 nt, Human
acccggaggggccuggcagcc

SEQ ID NO: 1833776 - RNA, 18 nt, Human
acccggaggggccuggca

SEQ ID NO: 1833777 - RNA, 14 nt, Human
acccggccccugcu

SEQ ID NO: 1833778 - RNA, 15 nt, Human
acccggccccugcug

SEQ ID NO: 1833779 - RNA, 16 nt, Human
acccggccccugcugg

SEQ ID NO: 1833780 - RNA, 22 nt, Human
acccggccccugcugguucagg

SEQ ID NO: 1833781 - RNA, 17 nt, Human
acccggccccugcuggu

SEQ ID NO: 1833782 - RNA, 20 nt, Human
acccggccccugcugguuca

SEQ ID NO: 1833783 - RNA, 13 nt, Human
acccgggaagggg

SEQ ID NO: 1833784 - RNA, 12 nt, Human
acccgggaaggg

SEQ ID NO: 1833785 - RNA, 17 nt, Human
acccgggaggcagaggu

SEQ ID NO: 1833786 - RNA, 21 nt, Human
accccuggcuuuucacugcug

SEQ ID NO: 1833787 - RNA, 20 nt, Human
accccuggcuuuucacugcu

SEQ ID NO: 1833788 - RNA, 19 nt, Human
accccuggcuuuucacugc

SEQ ID NO: 1833789 - RNA, 18 nt, Human
accccuggcuuuucacug

SEQ ID NO: 1833790 - RNA, 12 nt, Human
ucagcuccagcu

SEQ ID NO: 1833791 - RNA, 19 nt, Human
ucagcggggacagcuccuu

SEQ ID NO: 1833792 - RNA, 20 nt, Human
ucagcggggacagcuccuuc

SEQ ID NO: 1833793 - RNA, 21 nt, Human
ucagcggggacagcuccuucu

SEQ ID NO: 1833794 - RNA, 23 nt, Human
ucagcggggacagcuccuucugu

SEQ ID NO: 1833795 - RNA, 18 nt, Human
accccaucucuacaaaaa

SEQ ID NO: 1833796 - RNA, 15 nt, Human
accccugagcuugca

SEQ ID NO: 1833797 - RNA, 16 nt, Human
ucagcccucccugccc

SEQ ID NO: 1833798 - RNA, 15 nt, Human
ucagcccucccugcc

SEQ ID NO: 1833799 - RNA, 14 nt, Human
ucagcccucccugc

SEQ ID NO: 1833800 - RNA, 13 nt, Human
ucagcccucccug

SEQ ID NO: 1833801 - RNA, 17 nt, Human
ucagcccucccugcccc

SEQ ID NO: 1833802 - RNA, 19 nt, Human
acccaggagccccgaggcc

SEQ ID NO: 1833803 - RNA, 23 nt, Human
acccaggagccccgaggccuucu

SEQ ID NO: 1833804 - RNA, 17 nt, Human
accccacacacgccaga

SEQ ID NO: 1833805 - RNA, 13 nt, Human
accccagccccaa

SEQ ID NO: 1833806 - RNA, 22 nt, Human
accccagccccaaaacucuccu

SEQ ID NO: 1833807 - RNA, 12 nt, Human
ucagauuugaac

SEQ ID NO: 1833808 - RNA, 21 nt, Human
ucagauuugaacucuucaauc

SEQ ID NO: 1833809 - RNA, 18 nt, Human
accaguguuguggauuua

SEQ ID NO: 1833810 - RNA, 15 nt, Human
ucagcaaaagaugcu

SEQ ID NO: 1833811 - RNA, 23 nt, Human
ucaugcaaacuuuauuuuguguu

SEQ ID NO: 1833812 - RNA, 16 nt, Human
ucaugugaaaucauuc

SEQ ID NO: 1833813 - RNA, 17 nt, Human
ucaugugaaaucauuca

SEQ ID NO: 1833814 - RNA, 13 nt, Human
ucauccauccagg

SEQ ID NO: 1833815 - RNA, 13 nt, Human
ucaucuaggauuu

SEQ ID NO: 1833816 - RNA, 14 nt, Human
ucaugcaaacuuua

SEQ ID NO: 1833817 - RNA, 11 nt, Human
ucaugauuuuu

SEQ ID NO: 1833818 - RNA, 20 nt, Human
accucccacaaaggagagcu

SEQ ID NO: 1833819 - RNA, 16 nt, Human
accgcagacaggacca

SEQ ID NO: 1833820 - RNA, 12 nt, Human
accgcagacagg

SEQ ID NO: 1833821 - RNA, 17 nt, Human
accgcagacaggaccag

SEQ ID NO: 1833822 - RNA, 15 nt, Human
ucagugccuuaugga

SEQ ID NO: 1833823 - RNA, 14 nt, Human
ucagugccuuaugg

SEQ ID NO: 1833824 - RNA, 12 nt, Human
ucagugccuuau

SEQ ID NO: 1833825 - RNA, 11 nt, Human
ucagugccuua

SEQ ID NO: 1833826 - RNA, 10 nt, Human
ucagugccuu

SEQ ID NO: 1833827 - RNA, 9 nt, Human
ucagugccu

SEQ ID NO: 1833828 - RNA, 20 nt, Human
ucagugcccuccaggauaga

SEQ ID NO: 1833829 - RNA, 19 nt, Human
accgaaaacguggcugcuu

SEQ ID NO: 1833830 - RNA, 17 nt, Human
accgaaaacguggcugc

SEQ ID NO: 1833831 - RNA, 16 nt, Human
ucagugccaaaaacaa

SEQ ID NO: 1833832 - RNA, 12 nt, Human
ucagugccacua

SEQ ID NO: 1833833 - RNA, 16 nt, Human
ucaguggggaggggcu

SEQ ID NO: 1833834 - RNA, 12 nt, Human
ucaguggcagcu

SEQ ID NO: 1833835 - RNA, 13 nt, Human
ucaguggcagcug

SEQ ID NO: 1833836 - RNA, 18 nt, Human
ucagugccuuauggaaca

SEQ ID NO: 1833837 - RNA, 16 nt, Human
ucagugccuuauggaa

SEQ ID NO: 1833838 - RNA, 11 nt, Human
ucaguggcagc

SEQ ID NO: 1833839 - RNA, 15 nt, Human
ucaguuuuugugaaa

SEQ ID NO: 1833840 - RNA, 16 nt, Human
ucaguuuucaggagug

SEQ ID NO: 1833841 - RNA, 17 nt, Human
ucaguuuuugugaaaag

SEQ ID NO: 1833842 - RNA, 14 nt, Human
ucauaaccuagccu

SEQ ID NO: 1833843 - RNA, 15 nt, Human
ucauaguaugguggc

SEQ ID NO: 1833844 - RNA, 18 nt, Human
ucauaguaugguggcugg

SEQ ID NO: 1833845 - RNA, 19 nt, Human
ucauaguaugguggcuggg

SEQ ID NO: 1833846 - RNA, 18 nt, Human
ucauauaagauucauauu

SEQ ID NO: 1833847 - RNA, 21 nt, Human
ucauaguaugguggcuggguu

SEQ ID NO: 1833848 - RNA, 16 nt, Human
ucauauuuacuucuua

SEQ ID NO: 1833849 - RNA, 17 nt, Human
accgagucucuucucca

SEQ ID NO: 1833850 - RNA, 16 nt, Human
accgagucucuucucc

SEQ ID NO: 1833851 - RNA, 23 nt, Human
ucauauuuacuucuuauacauuu

SEQ ID NO: 1833852 - RNA, 15 nt, Human
ucauauuuacuucuu

SEQ ID NO: 1833853 - RNA, 11 nt, Human
uccagccuggg

SEQ ID NO: 1833854 - RNA, 20 nt, Human
uccagccugcugccugcuuu

SEQ ID NO: 1833855 - RNA, 13 nt, Human
uccagaccccugg

SEQ ID NO: 1833856 - RNA, 15 nt, Human
uccagaauuucccaa

SEQ ID NO: 1833857 - RNA, 14 nt, Human
uccagaauuuccca

SEQ ID NO: 1833858 - RNA, 18 nt, Human
acgaauauugcugauggu

SEQ ID NO: 1833859 - RNA, 15 nt, Human
acgaauauugcugau

SEQ ID NO: 1833860 - RNA, 23 nt, Human
uccaggcugggagagccuuccag

SEQ ID NO: 1833861 - RNA, 10 nt, Human
uccaggcucc

SEQ ID NO: 1833862 - RNA, 21 nt, Human
uccaggcugggagagccuucc

SEQ ID NO: 1833863 - RNA, 20 nt, Human
uccaggcugggagagccuuc

SEQ ID NO: 1833864 - RNA, 12 nt, Human
uccaggcuccuu

SEQ ID NO: 1833865 - RNA, 22 nt, Human
uccaggcuccuuuagcgcccag

SEQ ID NO: 1833866 - RNA, 17 nt, Human
accuuuguccccaccgc

SEQ ID NO: 1833867 - RNA, 18 nt, Human
accuuugacaaagguaaa

SEQ ID NO: 1833868 - RNA, 17 nt, Human
accuuugacaaagguaa

SEQ ID NO: 1833869 - RNA, 18 nt, Human
accuuuguccccaccgca

SEQ ID NO: 1833870 - RNA, 22 nt, Human
accuuuguuugcaucugaaaau

SEQ ID NO: 1833871 - RNA, 19 nt, Human
accuugaaaacuuuaugcu

SEQ ID NO: 1833872 - RNA, 20 nt, Human
accuugaacuggguacuugu

SEQ ID NO: 1833873 - RNA, 13 nt, Human
accuuuuuuauac

SEQ ID NO: 1833874 - RNA, 22 nt, Human
uccacugguucuucuuggucuc

SEQ ID NO: 1833875 - RNA, 18 nt, Human
uccagaauggucuuucua

SEQ ID NO: 1833876 - RNA, 21 nt, Human
uccacugugccaugugccagg

SEQ ID NO: 1833877 - RNA, 21 nt, Human
acgcuacccgggaagggggcu

SEQ ID NO: 1833878 - RNA, 20 nt, Human
acgcgugcacacaccagagc

SEQ ID NO: 1833879 - RNA, 21 nt, Human
acgaauauugcugauggugca

SEQ ID NO: 1833880 - RNA, 23 nt, Human
acggagucccaccuuggcugcag

SEQ ID NO: 1833881 - RNA, 17 nt, Human
acgcuggagugcaguga

SEQ ID NO: 1833882 - RNA, 18 nt, Human
acgcuggagugcagugag

SEQ ID NO: 1833883 - RNA, 20 nt, Human
acgcuggaccuugaacuggg

SEQ ID NO: 1833884 - RNA, 23 nt, Human
acgcuggaccuugaacuggguac

SEQ ID NO: 1833885 - RNA, 15 nt, Human
acgcuggagugcagu

SEQ ID NO: 1833886 - RNA, 16 nt, Human
acgcuggagugcagug

SEQ ID NO: 1833887 - RNA, 15 nt, Human
acgcuccuuccucug

SEQ ID NO: 1833888 - RNA, 14 nt, Human
acgcuccuuccucu

SEQ ID NO: 1833889 - RNA, 11 nt, Human
acgcucucugg

SEQ ID NO: 1833890 - RNA, 14 nt, Human
acgcucucuggccu

SEQ ID NO: 1833891 - RNA, 13 nt, Human
acgcuggaccuug

SEQ ID NO: 1833892 - RNA, 18 nt, Human
uccaguaucuugaagacu

SEQ ID NO: 1833893 - RNA, 16 nt, Human
uccaguaucuugaaga

SEQ ID NO: 1833894 - RNA, 18 nt, Human
uccagugagacagcucug

SEQ ID NO: 1833895 - RNA, 15 nt, Human
uccagugaggcucug

SEQ ID NO: 1833896 - RNA, 16 nt, Human
uccagugaggcucugc

SEQ ID NO: 1833897 - RNA, 23 nt, Human
uccagugaggcucugcccuuggu

SEQ ID NO: 1833898 - RNA, 22 nt, Human
uccagugaggcucugcccuugg

SEQ ID NO: 1833899 - RNA, 15 nt, Human
uccaguaucuugaag

SEQ ID NO: 1833900 - RNA, 14 nt, Human
uccaguaucuugaa

SEQ ID NO: 1833901 - RNA, 18 nt, Human
acggcuuuuacuuaaacc

SEQ ID NO: 1833902 - RNA, 13 nt, Human
acggccaggccag

SEQ ID NO: 1833903 - RNA, 16 nt, Human
acggcucacugcagcc

SEQ ID NO: 1833904 - RNA, 17 nt, Human
acggcucacugcagccu

SEQ ID NO: 1833905 - RNA, 18 nt, Human
acggcucacugcagccuc

SEQ ID NO: 1833906 - RNA, 12 nt, Human
acggccaggcca

SEQ ID NO: 1833907 - RNA, 21 nt, Human
uccccaggaggccagccuuga

SEQ ID NO: 1833908 - RNA, 20 nt, Human
uccccaggaggccagccuug

SEQ ID NO: 1833909 - RNA, 11 nt, Human
ucccccagccc

SEQ ID NO: 1833910 - RNA, 15 nt, Human
ucccccagccccauc

SEQ ID NO: 1833911 - RNA, 13 nt, Human
ucccccagcccca

SEQ ID NO: 1833912 - RNA, 16 nt, Human
ucccccagccccaucc

SEQ ID NO: 1833913 - RNA, 19 nt, Human
acuagacucccaagcugga

SEQ ID NO: 1833914 - RNA, 12 nt, Human
uccccacccuga

SEQ ID NO: 1833915 - RNA, 18 nt, Human
uccccaggaggccagccu

SEQ ID NO: 1833916 - RNA, 16 nt, Human
uccccaccgcagacag

SEQ ID NO: 1833917 - RNA, 15 nt, Human
uccccaccgcagaca

SEQ ID NO: 1833918 - RNA, 23 nt, Human
uccccacccugaaagcccugagc

SEQ ID NO: 1833919 - RNA, 20 nt, Human
acuauagccuaggugacaga

SEQ ID NO: 1833920 - RNA, 22 nt, Human
acuauagccuaggugacagagu

SEQ ID NO: 1833921 - RNA, 21 nt, Human
acuaucuaaauguugaaagau

SEQ ID NO: 1833922 - RNA, 16 nt, Human
acuaucuaaauguuga

SEQ ID NO: 1833923 - RNA, 17 nt, Human
acuauguugcccaggca

SEQ ID NO: 1833924 - RNA, 15 nt, Human
acuauguugcccagg

SEQ ID NO: 1833925 - RNA, 16 nt, Human
acuauguugcccaggc

SEQ ID NO: 1833926 - RNA, 22 nt, Human
acuauggcccuggccuagcaua

SEQ ID NO: 1833927 - RNA, 14 nt, Human
acuauguugcccag

SEQ ID NO: 1833928 - RNA, 16 nt, Human
acucaaugcacugaca

SEQ ID NO: 1833929 - RNA, 18 nt, Human
acguggcugcuucaagga

SEQ ID NO: 1833930 - RNA, 21 nt, Human
acguggcugcuucaaggaucc

SEQ ID NO: 1833931 - RNA, 19 nt, Human
acguggcugcuucaaggau

SEQ ID NO: 1833932 - RNA, 15 nt, Human
acguuucuaaaggcu

SEQ ID NO: 1833933 - RNA, 16 nt, Human
acguuucuaaaggcua

SEQ ID NO: 1833934 - RNA, 14 nt, Human
acguugugcauuug

SEQ ID NO: 1833935 - RNA, 15 nt, Human
acguugugcauuugg

SEQ ID NO: 1833936 - RNA, 13 nt, Human
acguugugcauuu

SEQ ID NO: 1833937 - RNA, 15 nt, Human
acguuaccaggcagg

SEQ ID NO: 1833938 - RNA, 17 nt, Human
acguaaagcuagaaaug

SEQ ID NO: 1833939 - RNA, 18 nt, Human
acguaaagcuagaaauga

SEQ ID NO: 1833940 - RNA, 12 nt, Human
uccauccugagg

SEQ ID NO: 1833941 - RNA, 15 nt, Human
uccauccugaggcuc

SEQ ID NO: 1833942 - RNA, 19 nt, Human
uccauccugaggcuccacu

SEQ ID NO: 1833943 - RNA, 16 nt, Human
ucccagauacuugggg

SEQ ID NO: 1833944 - RNA, 18 nt, Human
ucccagauacuugggggg

SEQ ID NO: 1833945 - RNA, 22 nt, Human
acguuucuaaaggcuaccuuug

SEQ ID NO: 1833946 - RNA, 15 nt, Human
acuaauuuuaaaaug

SEQ ID NO: 1833947 - RNA, 14 nt, Human
uccugcaggcagcc

SEQ ID NO: 1833948 - RNA, 13 nt, Human
uccugcaggcagc

SEQ ID NO: 1833949 - RNA, 12 nt, Human
uccugcaggcag

SEQ ID NO: 1833950 - RNA, 21 nt, Human
uccugcugcaguugccaguca

SEQ ID NO: 1833951 - RNA, 13 nt, Human
uccugcugggcag

SEQ ID NO: 1833952 - RNA, 12 nt, Human
uccugggaguga

SEQ ID NO: 1833953 - RNA, 14 nt, Human
uccugggagugagc

SEQ ID NO: 1833954 - RNA, 17 nt, Human
uccugggagugagcugg

SEQ ID NO: 1833955 - RNA, 23 nt, Human
uccuggaagugcuaauuuugaaa

SEQ ID NO: 1833956 - RNA, 15 nt, Human
uccuggaaauauuaa

SEQ ID NO: 1833957 - RNA, 20 nt, Human
acugcacuccagccugggug

SEQ ID NO: 1833958 - RNA, 19 nt, Human
acugcacuccagccugggu

SEQ ID NO: 1833959 - RNA, 18 nt, Human
acugcacuccagccuggg

SEQ ID NO: 1833960 - RNA, 17 nt, Human
acugcacuccagccugg

SEQ ID NO: 1833961 - RNA, 14 nt, Human
acugcacuccagcc

SEQ ID NO: 1833962 - RNA, 21 nt, Human
acugcacuauagccuagguga

SEQ ID NO: 1833963 - RNA, 21 nt, Human
uccugaugcuucuucagagac

SEQ ID NO: 1833964 - RNA, 20 nt, Human
uccugaugcuucuucagaga

SEQ ID NO: 1833965 - RNA, 19 nt, Human
uccugaugcuucuucagag

SEQ ID NO: 1833966 - RNA, 22 nt, Human
uccugcacacgcuccuuccucu

SEQ ID NO: 1833967 - RNA, 21 nt, Human
uccugcacacgcuccuuccuc

SEQ ID NO: 1833968 - RNA, 14 nt, Human
uccugcacacgcuc

SEQ ID NO: 1833969 - RNA, 13 nt, Human
acugauaaagaug

SEQ ID NO: 1833970 - RNA, 21 nt, Human
acugauaaagaugagugagca

SEQ ID NO: 1833971 - RNA, 20 nt, Human
acugcaacuuguaaaugugg

SEQ ID NO: 1833972 - RNA, 16 nt, Human
acugcaacuucugccu

SEQ ID NO: 1833973 - RNA, 14 nt, Human
acugcaacuucugc

SEQ ID NO: 1833974 - RNA, 22 nt, Human
acugcacagugcaucucagccc

SEQ ID NO: 1833975 - RNA, 23 nt, Human
acugcacagugcaucucagccca

SEQ ID NO: 1833976 - RNA, 16 nt, Human
acugcaccgggccaca

SEQ ID NO: 1833977 - RNA, 20 nt, Human
acugcacuauagccuaggug

SEQ ID NO: 1833978 - RNA, 14 nt, Human
acugcaccgggcca

SEQ ID NO: 1833979 - RNA, 20 nt, Human
acugaacucugacaacagac

SEQ ID NO: 1833980 - RNA, 13 nt, Human
acugaacauucca

SEQ ID NO: 1833981 - RNA, 16 nt, Human
acugaacauuccagag

SEQ ID NO: 1833982 - RNA, 15 nt, Human
acucuuguuuccuua

SEQ ID NO: 1833983 - RNA, 19 nt, Human
acucuuucuauuguuucuu

SEQ ID NO: 1833984 - RNA, 12 nt, Human
uccucuuuccau

SEQ ID NO: 1833985 - RNA, 11 nt, Human
uccucuuucca

SEQ ID NO: 1833986 - RNA, 14 nt, Human
uccucccucccucu

SEQ ID NO: 1833987 - RNA, 11 nt, Human
uccucccuccc

SEQ ID NO: 1833988 - RNA, 21 nt, Human
uccucuuuggucuacacugug

SEQ ID NO: 1833989 - RNA, 19 nt, Human
uccucuuuggucuacacug

SEQ ID NO: 1833990 - RNA, 19 nt, Human
uccucuuuccaucuacccu

SEQ ID NO: 1833991 - RNA, 21 nt, Human
uccugaauuuuauuuuuuggg

SEQ ID NO: 1833992 - RNA, 22 nt, Human
uccucuuuggucuacacugugc

SEQ ID NO: 1833993 - RNA, 21 nt, Human
acugagacagcccgggcucug

SEQ ID NO: 1833994 - RNA, 18 nt, Human
acugagacagcccgggcu

SEQ ID NO: 1833995 - RNA, 15 nt, Human
acugagacagcccgg

SEQ ID NO: 1833996 - RNA, 21 nt, Human
acugagaaauuuauaaacuuu

SEQ ID NO: 1833997 - RNA, 17 nt, Human
acugagaaauuuauaaa

SEQ ID NO: 1833998 - RNA, 12 nt, Human
acugagaaauuu

SEQ ID NO: 1833999 - RNA, 18 nt, Human
acugagagugaacaaauu

SEQ ID NO: 1834000 - RNA, 23 nt, Human
acugagacagcccgggcucugcc

SEQ ID NO: 1834001 - RNA, 22 nt, Human
acugagacagcccgggcucugc

SEQ ID NO: 1834002 - RNA, 22 nt, Human
acucugagacucgcgacaaugc

SEQ ID NO: 1834003 - RNA, 11 nt, Human
acucugagacu

SEQ ID NO: 1834004 - RNA, 23 nt, Human
acucuccuuggugucgggcauga

SEQ ID NO: 1834005 - RNA, 16 nt, Human
acucuccuuggugucg

SEQ ID NO: 1834006 - RNA, 15 nt, Human
acucuggcagcucag

SEQ ID NO: 1834007 - RNA, 13 nt, Human
acucuggcagcuc

SEQ ID NO: 1834008 - RNA, 16 nt, Human
acucugccuccucuuc

SEQ ID NO: 1834009 - RNA, 12 nt, Human
acucugccuccu

SEQ ID NO: 1834010 - RNA, 15 nt, Human
acucuccuugguguc

SEQ ID NO: 1834011 - RNA, 18 nt, Human
acucuccuggaaauauua

SEQ ID NO: 1834012 - RNA, 16 nt, Human
acucuccucugcugcu

SEQ ID NO: 1834013 - RNA, 14 nt, Human
acucuccucugcug

SEQ ID NO: 1834014 - RNA, 13 nt, Human
acucuccucugcu

SEQ ID NO: 1834015 - RNA, 12 nt, Human
acucuccucugc

SEQ ID NO: 1834016 - RNA, 17 nt, Human
acucuccuccagaguca

SEQ ID NO: 1834017 - RNA, 14 nt, Human
acucuccuccagag

SEQ ID NO: 1834018 - RNA, 24 nt, Human
acuccuugaaaacacuguucucug

SEQ ID NO: 1834019 - RNA, 23 nt, Human
acuccuugaaaacacuguucucu

SEQ ID NO: 1834020 - RNA, 23 nt, Human
uccucauacccacccccacccaa

SEQ ID NO: 1834021 - RNA, 21 nt, Human
uccucccaggcgccccuuccc

SEQ ID NO: 1834022 - RNA, 19 nt, Human
uccucccaggcgccccuuc

SEQ ID NO: 1834023 - RNA, 13 nt, Human
uccucccaggcgc

SEQ ID NO: 1834024 - RNA, 22 nt, Human
uccucauaguaugguggcuggg

SEQ ID NO: 1834025 - RNA, 15 nt, Human
acucuugaccucagg

SEQ ID NO: 1834026 - RNA, 16 nt, Human
acucuugaccucaggu

SEQ ID NO: 1834027 - RNA, 14 nt, Human
acucuugaccucag

SEQ ID NO: 1834028 - RNA, 19 nt, Human
ucccuuuuuuggcugcuga

SEQ ID NO: 1834029 - RNA, 17 nt, Human
ucccuuuuuuggcugcu

SEQ ID NO: 1834030 - RNA, 19 nt, Human
ucccuuugacgccauccca

SEQ ID NO: 1834031 - RNA, 21 nt, Human
ucccuuugacgccaucccagc

SEQ ID NO: 1834032 - RNA, 22 nt, Human
ucccuuuuuuggcugcugaagg

SEQ ID NO: 1834033 - RNA, 20 nt, Human
ucccuuuuuuggcugcugaa

SEQ ID NO: 1834034 - RNA, 23 nt, Human
ucccuuuuuuggcugcugaaggc

SEQ ID NO: 1834035 - RNA, 13 nt, Human
ucccuuuuuuuaa

SEQ ID NO: 1834036 - RNA, 20 nt, Human
ucccuuggauuguccccgac

SEQ ID NO: 1834037 - RNA, 19 nt, Human
ucccuuggauuguccccga

SEQ ID NO: 1834038 - RNA, 23 nt, Human
ucccugguggcagcucaccucuc

SEQ ID NO: 1834039 - RNA, 22 nt, Human
ucccugguggcagcucaccucu

SEQ ID NO: 1834040 - RNA, 18 nt, Human
ucccuuugacgccauccc

SEQ ID NO: 1834041 - RNA, 16 nt, Human
ucccuuugacgccauc

SEQ ID NO: 1834042 - RNA, 21 nt, Human
ucccuuuuuuuaaguaaggaa

SEQ ID NO: 1834043 - RNA, 16 nt, Human
ucccuuuuuuuaagua

SEQ ID NO: 1834044 - RNA, 18 nt, Human
uccgguguuuaagacauu

SEQ ID NO: 1834045 - RNA, 13 nt, Human
uccuacucugugu

SEQ ID NO: 1834046 - RNA, 14 nt, Human
uccuacucuguguc

SEQ ID NO: 1834047 - RNA, 15 nt, Human
uccuacucuguguca

SEQ ID NO: 1834048 - RNA, 13 nt, Human
uccuaggcauuug

SEQ ID NO: 1834049 - RNA, 12 nt, Human
acuccuggccuc

SEQ ID NO: 1834050 - RNA, 13 nt, Human
acuccuggccuca

SEQ ID NO: 1834051 - RNA, 14 nt, Human
acuccuggccucaa

SEQ ID NO: 1834052 - RNA, 14 nt, Human
acuccugcaggcag

SEQ ID NO: 1834053 - RNA, 12 nt, Human
acuccugcaggc

SEQ ID NO: 1834054 - RNA, 12 nt, Human
acuccucccagg

SEQ ID NO: 1834055 - RNA, 16 nt, Human
acuccugcaggcagcc

SEQ ID NO: 1834056 - RNA, 15 nt, Human
acuccugcaggcagc

SEQ ID NO: 1834057 - RNA, 22 nt, Human
acuccugcaggcagccaggcca

SEQ ID NO: 1834058 - RNA, 21 nt, Human
ucccugguggcagcucaccuc

SEQ ID NO: 1834059 - RNA, 20 nt, Human
ucccugguggcagcucaccu

SEQ ID NO: 1834060 - RNA, 19 nt, Human
ucccugguggcagcucacc

SEQ ID NO: 1834061 - RNA, 18 nt, Human
ucccugguggcagcucac

SEQ ID NO: 1834062 - RNA, 17 nt, Human
ucccugguggcagcuca

SEQ ID NO: 1834063 - RNA, 16 nt, Human
ucccugguggcagcuc

SEQ ID NO: 1834064 - RNA, 11 nt, Human
acuccuggccu

SEQ ID NO: 1834065 - RNA, 15 nt, Human
acucaccccagcccc

SEQ ID NO: 1834066 - RNA, 14 nt, Human
acucaccccagccc

SEQ ID NO: 1834067 - RNA, 16 nt, Human
acucaccccagcccca

SEQ ID NO: 1834068 - RNA, 15 nt, Human
acuccagaccccugg

SEQ ID NO: 1834069 - RNA, 13 nt, Human
acuccagaccccu

SEQ ID NO: 1834070 - RNA, 13 nt, Human
acucaccccagcc

SEQ ID NO: 1834071 - RNA, 19 nt, Human
acuccagugagacagcucu

SEQ ID NO: 1834072 - RNA, 21 nt, Human
acuccagaccccuggcuuuuc

SEQ ID NO: 1834073 - RNA, 19 nt, Human
acuccagaccccuggcuuu

SEQ ID NO: 1834074 - RNA, 18 nt, Human
acuccagaccccuggcuu

SEQ ID NO: 1834075 - RNA, 19 nt, Human
ucugcccuccaagaccuuc

SEQ ID NO: 1834076 - RNA, 21 nt, Human
ucugcccacucccugcaaccu

SEQ ID NO: 1834077 - RNA, 18 nt, Human
ucugcccacucccugcaa

SEQ ID NO: 1834078 - RNA, 15 nt, Human
ucugccgcagcccug

SEQ ID NO: 1834079 - RNA, 14 nt, Human
ucugccgcagcccu

SEQ ID NO: 1834080 - RNA, 12 nt, Human
ucugcccugcgg

SEQ ID NO: 1834081 - RNA, 11 nt, Human
ucugcccugcg

SEQ ID NO: 1834082 - RNA, 10 nt, Human
ucugcccugc

SEQ ID NO: 1834083 - RNA, 22 nt, Human
ucugccgcagcccugcagaggg

SEQ ID NO: 1834084 - RNA, 23 nt, Human
ucugccgcagcccugcagagggc

SEQ ID NO: 1834085 - RNA, 21 nt, Human
ucugccugcccaggccccugc

SEQ ID NO: 1834086 - RNA, 22 nt, Human
ucugccugcccaggccccugcc

SEQ ID NO: 1834087 - RNA, 19 nt, Human
ucugcucacauaucuguca

SEQ ID NO: 1834088 - RNA, 20 nt, Human
ucugcucacauaucugucau

SEQ ID NO: 1834089 - RNA, 14 nt, Human
ucugcuucagccuc

SEQ ID NO: 1834090 - RNA, 15 nt, Human
ucugcuucagccucc

SEQ ID NO: 1834091 - RNA, 13 nt, Human
ucugcuucagccu

SEQ ID NO: 1834092 - RNA, 18 nt, Human
agaagauuuugaaauuuu

SEQ ID NO: 1834093 - RNA, 17 nt, Human
ucugcccacucccugca

SEQ ID NO: 1834094 - RNA, 22 nt, Human
agaagcccaggaaaggcuccag

SEQ ID NO: 1834095 - RNA, 21 nt, Human
agaagcccaggaaaggcucca

SEQ ID NO: 1834096 - RNA, 20 nt, Human
agaagcccaggaaaggcucc

SEQ ID NO: 1834097 - RNA, 18 nt, Human
agaagcccaggaaaggcu

SEQ ID NO: 1834098 - RNA, 16 nt, Human
agaagcccaggaaagg

SEQ ID NO: 1834099 - RNA, 12 nt, Human
agaagcccagga

SEQ ID NO: 1834100 - RNA, 20 nt, Human
agaaauugcauuuccugaca

SEQ ID NO: 1834101 - RNA, 17 nt, Human
agaaauugcauuuccug

SEQ ID NO: 1834102 - RNA, 22 nt, Human
agaaagcccuuaggaagaauuu

SEQ ID NO: 1834103 - RNA, 20 nt, Human
agaaagcccuuaggaagaau

SEQ ID NO: 1834104 - RNA, 16 nt, Human
ucuccuuucacaaccu

SEQ ID NO: 1834105 - RNA, 15 nt, Human
ucugaauuauuuucu

SEQ ID NO: 1834106 - RNA, 13 nt, Human
ucugacacacagc

SEQ ID NO: 1834107 - RNA, 14 nt, Human
ucugacacacagcu

SEQ ID NO: 1834108 - RNA, 15 nt, Human
ucugacacacagcuc

SEQ ID NO: 1834109 - RNA, 10 nt, Human
ucugaauuau

SEQ ID NO: 1834110 - RNA, 22 nt, Human
ucugaaggacauugcggacagc

SEQ ID NO: 1834111 - RNA, 21 nt, Human
ucugaaggacauugcggacag

SEQ ID NO: 1834112 - RNA, 18 nt, Human
ucugcagauaaacaguag

SEQ ID NO: 1834113 - RNA, 15 nt, Human
ucugcagauaaacag

SEQ ID NO: 1834114 - RNA, 17 nt, Human
ucugcagcaauaaagca

SEQ ID NO: 1834115 - RNA, 15 nt, Human
ucugcacuccccugc

SEQ ID NO: 1834116 - RNA, 14 nt, Human
ucugcacuccccug

SEQ ID NO: 1834117 - RNA, 16 nt, Human
ucugcacuccccugcu

SEQ ID NO: 1834118 - RNA, 17 nt, Human
ucugcacuccccugcug

SEQ ID NO: 1834119 - RNA, 21 nt, Human
ucugaugcaagcaagaaacac

SEQ ID NO: 1834120 - RNA, 12 nt, Human
ucugcagguccc

SEQ ID NO: 1834121 - RNA, 11 nt, Human
ucugcaggucc

SEQ ID NO: 1834122 - RNA, 13 nt, Human
ucugcaggucccu

SEQ ID NO: 1834123 - RNA, 14 nt, Human
agaaauguacagca

SEQ ID NO: 1834124 - RNA, 15 nt, Human
agaaauguacagcaa

SEQ ID NO: 1834125 - RNA, 21 nt, Human
ucugagacucgcgacaaugca

SEQ ID NO: 1834126 - RNA, 22 nt, Human
ucugagacucgcgacaaugcaa

SEQ ID NO: 1834127 - RNA, 16 nt, Human
ucugaugcaagcaaga

SEQ ID NO: 1834128 - RNA, 17 nt, Human
ucugaucauccacugug

SEQ ID NO: 1834129 - RNA, 21 nt, Human
ucugaucauccacugugccau

SEQ ID NO: 1834130 - RNA, 13 nt, Human
agacagagcuaca

SEQ ID NO: 1834131 - RNA, 20 nt, Human
agacacauguccaagaagcc

SEQ ID NO: 1834132 - RNA, 16 nt, Human
agacacauguccaaga

SEQ ID NO: 1834133 - RNA, 18 nt, Human
agacaccuugacagggca

SEQ ID NO: 1834134 - RNA, 17 nt, Human
agacaccuugacagggc

SEQ ID NO: 1834135 - RNA, 12 nt, Human
agacacaggccc

SEQ ID NO: 1834136 - RNA, 13 nt, Human
agacacaggcccg

SEQ ID NO: 1834137 - RNA, 16 nt, Human
agacacaggcccggcu

SEQ ID NO: 1834138 - RNA, 14 nt, Human
ucugugagaugcua

SEQ ID NO: 1834139 - RNA, 23 nt, Human
ucugugagaugcuagaacucccu

SEQ ID NO: 1834140 - RNA, 17 nt, Human
ucugugagaugcuagaa

SEQ ID NO: 1834141 - RNA, 22 nt, Human
ucugugagaugcuagaacuccc

SEQ ID NO: 1834142 - RNA, 15 nt, Human
ucugggccagaauuu

SEQ ID NO: 1834143 - RNA, 14 nt, Human
ucugggccagaauu

SEQ ID NO: 1834144 - RNA, 22 nt, Human
ucugugaaaggaaagagggagg

SEQ ID NO: 1834145 - RNA, 13 nt, Human
ucuguuuagauaa

SEQ ID NO: 1834146 - RNA, 13 nt, Human
ucuguucuuucca

SEQ ID NO: 1834147 - RNA, 22 nt, Human
ucuguucuuuccaaaguacacu

SEQ ID NO: 1834148 - RNA, 15 nt, Human
ucuguugcugccuca

SEQ ID NO: 1834149 - RNA, 16 nt, Human
ucuguugcccaggcug

SEQ ID NO: 1834150 - RNA, 12 nt, Human
ucuguuggccag

SEQ ID NO: 1834151 - RNA, 17 nt, Human
ucuguuggccaguguga

SEQ ID NO: 1834152 - RNA, 17 nt, Human
agaauaaaauuuuuaau

SEQ ID NO: 1834153 - RNA, 14 nt, Human
agaauaaaauuuuu

SEQ ID NO: 1834154 - RNA, 12 nt, Human
agaauaaaauuu

SEQ ID NO: 1834155 - RNA, 16 nt, Human
agaauagaugcugacu

SEQ ID NO: 1834156 - RNA, 23 nt, Human
agaaguuucugccgcagcccugc

SEQ ID NO: 1834157 - RNA, 22 nt, Human
agaaguuucugccgcagcccug

SEQ ID NO: 1834158 - RNA, 21 nt, Human
agaaguuucugccgcagcccu

SEQ ID NO: 1834159 - RNA, 20 nt, Human
agaaguggggacagagcaga

SEQ ID NO: 1834160 - RNA, 18 nt, Human
ucugcuuuccucuuccug

SEQ ID NO: 1834161 - RNA, 13 nt, Human
ucugcuuuccucu

SEQ ID NO: 1834162 - RNA, 12 nt, Human
ucugcuuuccuc

SEQ ID NO: 1834163 - RNA, 23 nt, Human
agaauuaacacaugauccugcaa

SEQ ID NO: 1834164 - RNA, 15 nt, Human
agaauuaacacauga

SEQ ID NO: 1834165 - RNA, 17 nt, Human
ucucacuauguugccca

SEQ ID NO: 1834166 - RNA, 19 nt, Human
ucucacuauguugcccagg

SEQ ID NO: 1834167 - RNA, 19 nt, Human
ucucaccuccugcugggca

SEQ ID NO: 1834168 - RNA, 17 nt, Human
ucucaccuccugcuggg

SEQ ID NO: 1834169 - RNA, 16 nt, Human
ucucaccuccugcugg

SEQ ID NO: 1834170 - RNA, 15 nt, Human
ucucaccuccugcug

SEQ ID NO: 1834171 - RNA, 14 nt, Human
ucucaccuccugcu

SEQ ID NO: 1834172 - RNA, 23 nt, Human
ucuaugggacucaaugcacugac

SEQ ID NO: 1834173 - RNA, 13 nt, Human
ucuagccagagga

SEQ ID NO: 1834174 - RNA, 12 nt, Human
ucuaggaagacu

SEQ ID NO: 1834175 - RNA, 22 nt, Human
ucuaguuguuugauucagacag

SEQ ID NO: 1834176 - RNA, 22 nt, Human
ucuaguuugauuaaauucuugc

SEQ ID NO: 1834177 - RNA, 21 nt, Human
ucuaguuugauuaaauucuug

SEQ ID NO: 1834178 - RNA, 23 nt, Human
ucuaguuguuugauucagacagc

SEQ ID NO: 1834179 - RNA, 19 nt, Human
acuuccccuuccuaauucc

SEQ ID NO: 1834180 - RNA, 13 nt, Human
acuuccccuuccu

SEQ ID NO: 1834181 - RNA, 16 nt, Human
acuucaucccucuggg

SEQ ID NO: 1834182 - RNA, 18 nt, Human
ucuagcauggcugccaau

SEQ ID NO: 1834183 - RNA, 13 nt, Human
ucuagauacugua

SEQ ID NO: 1834184 - RNA, 20 nt, Human
ucuacagcuaaucagcauuc

SEQ ID NO: 1834185 - RNA, 23 nt, Human
ucuacagcuaaucagcauucuca

SEQ ID NO: 1834186 - RNA, 19 nt, Human
ucuacccagcgagcccugg

SEQ ID NO: 1834187 - RNA, 21 nt, Human
ucuacagaggccaugggccuc

SEQ ID NO: 1834188 - RNA, 18 nt, Human
uccugggagugagcuggu

SEQ ID NO: 1834189 - RNA, 14 nt, Human
ucuacccuggcacu

SEQ ID NO: 1834190 - RNA, 19 nt, Human
ucuacccuggcacuauaau

SEQ ID NO: 1834191 - RNA, 14 nt, Human
ucuacccaggugcu

SEQ ID NO: 1834192 - RNA, 20 nt, Human
ucuacccagcgagcccuggu

SEQ ID NO: 1834193 - RNA, 21 nt, Human
ucuacccuggcacuauaaugu

SEQ ID NO: 1834194 - RNA, 18 nt, Human
acuguucucugcccucca

SEQ ID NO: 1834195 - RNA, 19 nt, Human
acuguucucugcccuccaa

SEQ ID NO: 1834196 - RNA, 17 nt, Human
acuguucucugcccucc

SEQ ID NO: 1834197 - RNA, 16 nt, Human
acuguucucugcccuc

SEQ ID NO: 1834198 - RNA, 13 nt, Human
acuuaagcacacu

SEQ ID NO: 1834199 - RNA, 17 nt, Human
acuuaaucuaaauggaa

SEQ ID NO: 1834200 - RNA, 19 nt, Human
acuuaaucuaaauggaacc

SEQ ID NO: 1834201 - RNA, 22 nt, Human
acuuaaucuaaauggaaccacu

SEQ ID NO: 1834202 - RNA, 16 nt, Human
acuuacacuuuaugca

SEQ ID NO: 1834203 - RNA, 20 nt, Human
acuuaaauaaugugaaacug

SEQ ID NO: 1834204 - RNA, 17 nt, Human
acuuacacuuuaugcac

SEQ ID NO: 1834205 - RNA, 21 nt, Human
acuuacuguacaugaaaacac

SEQ ID NO: 1834206 - RNA, 16 nt, Human
acuuacuguacaugaa

SEQ ID NO: 1834207 - RNA, 22 nt, Human
acuuacuguacaugaaaacaca

SEQ ID NO: 1834208 - RNA, 14 nt, Human
acuuagcugggaga

SEQ ID NO: 1834209 - RNA, 15 nt, Human
acuuagguguggggg

SEQ ID NO: 1834210 - RNA, 20 nt, Human
acuuucugaaauaacauggc

SEQ ID NO: 1834211 - RNA, 14 nt, Human
acuuucugaaauaa

SEQ ID NO: 1834212 - RNA, 12 nt, Human
acuuuaccuuuu

SEQ ID NO: 1834213 - RNA, 16 nt, Human
ucuccucugcugcugg

SEQ ID NO: 1834214 - RNA, 15 nt, Human
ucuccucugcugcug

SEQ ID NO: 1834215 - RNA, 15 nt, Human
ucuccuccagaguca

SEQ ID NO: 1834216 - RNA, 18 nt, Human
ucuccucugcugcuggcu

SEQ ID NO: 1834217 - RNA, 17 nt, Human
ucuccucugcugcuggc

SEQ ID NO: 1834218 - RNA, 19 nt, Human
ucuccaagcaggacaugga

SEQ ID NO: 1834219 - RNA, 18 nt, Human
ucuccaagcaggacaugg

SEQ ID NO: 1834220 - RNA, 23 nt, Human
ucuccccagcaagugagagcugg

SEQ ID NO: 1834221 - RNA, 12 nt, Human
ucuccacccugc

SEQ ID NO: 1834222 - RNA, 17 nt, Human
ucuccgaccagacaccu

SEQ ID NO: 1834223 - RNA, 23 nt, Human
ucuccgaccagacaccuugacag

SEQ ID NO: 1834224 - RNA, 12 nt, Human
acuuugaccucu

SEQ ID NO: 1834225 - RNA, 13 nt, Human
acuuugaccucug

SEQ ID NO: 1834226 - RNA, 20 nt, Human
acuuuguuaguuucuccaag

SEQ ID NO: 1834227 - RNA, 14 nt, Human
acuuuguucuggcu

SEQ ID NO: 1834228 - RNA, 21 nt, Human
acuuuguuaguuucuccaagc

SEQ ID NO: 1834229 - RNA, 12 nt, Human
acuuuuguucuu

SEQ ID NO: 1834230 - RNA, 13 nt, Human
acuuuuguucuug

SEQ ID NO: 1834231 - RNA, 15 nt, Human
acuuuuguucuuggu

SEQ ID NO: 1834232 - RNA, 23 nt, Human
acuuuuguucuugguuuguaaau

SEQ ID NO: 1834233 - RNA, 18 nt, Human
ucuccuucaccuuugucc

SEQ ID NO: 1834234 - RNA, 16 nt, Human
ucuccuucaccuuugu

SEQ ID NO: 1834235 - RNA, 13 nt, Human
ucuccuuguguua

SEQ ID NO: 1834236 - RNA, 21 nt, Human
ucuccuuguguuacuaaguuu

SEQ ID NO: 1834237 - RNA, 15 nt, Human
ucuccuucaccuuug

SEQ ID NO: 1834238 - RNA, 14 nt, Human
ucuccuucaccuuu

SEQ ID NO: 1834239 - RNA, 17 nt, Human
agaaaaaauauuuuccc

SEQ ID NO: 1834240 - RNA, 21 nt, Human
ucucaugccucagccuccuga

SEQ ID NO: 1834241 - RNA, 18 nt, Human
ucucaggccagcugcuug

SEQ ID NO: 1834242 - RNA, 17 nt, Human
ucucaggccagcugcuu

SEQ ID NO: 1834243 - RNA, 21 nt, Human
ucucaggccagcugcuugggc

SEQ ID NO: 1834244 - RNA, 20 nt, Human
ucucaugccucagccuccug

SEQ ID NO: 1834245 - RNA, 16 nt, Human
ucuccaagcaggacau

SEQ ID NO: 1834246 - RNA, 15 nt, Human
ucuccaagcaggaca

SEQ ID NO: 1834247 - RNA, 13 nt, Human
ucuccaaaauaaa

SEQ ID NO: 1834248 - RNA, 16 nt, Human
ucucauuugucacaca

SEQ ID NO: 1834249 - RNA, 19 nt, Human
ucucauuugccaauaauaa

SEQ ID NO: 1834250 - RNA, 14 nt, Human
ucucauuugucaca

SEQ ID NO: 1834251 - RNA, 10 nt, Human
ucucaggcca

SEQ ID NO: 1834252 - RNA, 13 nt, Human
ucucaggccagcu

SEQ ID NO: 1834253 - RNA, 12 nt, Human
ucucaggccagc

SEQ ID NO: 1834254 - RNA, 12 nt, Human
ucucaggccaaa

SEQ ID NO: 1834255 - RNA, 19 nt, Human
acuuguauuauguguguuu

SEQ ID NO: 1834256 - RNA, 18 nt, Human
acuuguauuauguguguu

SEQ ID NO: 1834257 - RNA, 14 nt, Human
acuugcuuuuaaaa

SEQ ID NO: 1834258 - RNA, 21 nt, Human
acuugucuuuggacccugagg

SEQ ID NO: 1834259 - RNA, 18 nt, Human
acuugucuuuggacccug

SEQ ID NO: 1834260 - RNA, 20 nt, Human
acuugucuuuggacccugag

SEQ ID NO: 1834261 - RNA, 19 nt, Human
acuuguggacacagcucuu

SEQ ID NO: 1834262 - RNA, 22 nt, Human
acuuguggacacagcucuucuc

SEQ ID NO: 1834263 - RNA, 20 nt, Human
acuugcucuugaugccuggc

SEQ ID NO: 1834264 - RNA, 18 nt, Human
acuugcucuugaugccug

SEQ ID NO: 1834265 - RNA, 17 nt, Human
acuugcucuugaugccu

SEQ ID NO: 1834266 - RNA, 16 nt, Human
acuugcucuugaugcc

SEQ ID NO: 1834267 - RNA, 23 nt, Human
acuugcagacucuacagaggcca

SEQ ID NO: 1834268 - RNA, 19 nt, Human
acuugcagacucuacagag

SEQ ID NO: 1834269 - RNA, 22 nt, Human
acuugcagacucuacagaggcc

SEQ ID NO: 1834270 - RNA, 20 nt, Human
ucucacuauguugcccaggc

SEQ ID NO: 1834271 - RNA, 21 nt, Human
ucucacuauguugcccaggca

SEQ ID NO: 1834272 - RNA, 22 nt, Human
ucucacuauguugcccaggcag

SEQ ID NO: 1834273 - RNA, 23 nt, Human
ucucacuauguugcccaggcagg

SEQ ID NO: 1834274 - RNA, 18 nt, Human
ucucaccuccugcugggc

SEQ ID NO: 1834275 - RNA, 13 nt, Human
ugaccuuucaaua

SEQ ID NO: 1834276 - RNA, 12 nt, Human
ugaccuuucaau

SEQ ID NO: 1834277 - RNA, 21 nt, Human
ugacucguauaugucucaggu

SEQ ID NO: 1834278 - RNA, 19 nt, Human
ugacuauuuuucagaaucu

SEQ ID NO: 1834279 - RNA, 21 nt, Human
ugacuguuuucucuugagagg

SEQ ID NO: 1834280 - RNA, 15 nt, Human
ugaccuuuaagagaa

SEQ ID NO: 1834281 - RNA, 19 nt, Human
ugaccugccaggcacacug

SEQ ID NO: 1834282 - RNA, 16 nt, Human
ugaccugccaggcaca

SEQ ID NO: 1834283 - RNA, 17 nt, Human
agauuucacucuccuug

SEQ ID NO: 1834284 - RNA, 19 nt, Human
agauuucacucuccuuggu

SEQ ID NO: 1834285 - RNA, 19 nt, Human
agauucauauuuacuucuu

SEQ ID NO: 1834286 - RNA, 21 nt, Human
agauuccagagaguggcuccu

SEQ ID NO: 1834287 - RNA, 22 nt, Human
agauuccagagaguggcuccuc

SEQ ID NO: 1834288 - RNA, 16 nt, Human
agauucauauuuacuu

SEQ ID NO: 1834289 - RNA, 13 nt, Human
agauucauauuua

SEQ ID NO: 1834290 - RNA, 12 nt, Human
ugacuuacugua

SEQ ID NO: 1834291 - RNA, 20 nt, Human
ugacuuacuguacaugaaaa

SEQ ID NO: 1834292 - RNA, 18 nt, Human
agauccccaagccuggca

SEQ ID NO: 1834293 - RNA, 18 nt, Human
agaucucuaacuucacca

SEQ ID NO: 1834294 - RNA, 16 nt, Human
agaucguucucugccu

SEQ ID NO: 1834295 - RNA, 21 nt, Human
agaugcuagaacucccuuuca

SEQ ID NO: 1834296 - RNA, 22 nt, Human
agaugcuagaacucccuuucaa

SEQ ID NO: 1834297 - RNA, 22 nt, Human
agauguagccccucuccuggaa

SEQ ID NO: 1834298 - RNA, 21 nt, Human
agauguagccccucuccugga

SEQ ID NO: 1834299 - RNA, 19 nt, Human
agaugcuagaacucccuuu

SEQ ID NO: 1834300 - RNA, 19 nt, Human
ugacacgaauauugcugau

SEQ ID NO: 1834301 - RNA, 15 nt, Human
ugacacuuaaaaaug

SEQ ID NO: 1834302 - RNA, 22 nt, Human
ugacagagugagacucugucuc

SEQ ID NO: 1834303 - RNA, 16 nt, Human
ugacacgaauauugcu

SEQ ID NO: 1834304 - RNA, 17 nt, Human
ugacaggcaaugcuggc

SEQ ID NO: 1834305 - RNA, 19 nt, Human
ugacaggcaaugcuggcug

SEQ ID NO: 1834306 - RNA, 22 nt, Human
ugacagggcacaccgggcacuc

SEQ ID NO: 1834307 - RNA, 17 nt, Human
agcaccuagccucgcuc

SEQ ID NO: 1834308 - RNA, 22 nt, Human
agcaccuacaguguacagucuu

SEQ ID NO: 1834309 - RNA, 14 nt, Human
agcaccuacagugu

SEQ ID NO: 1834310 - RNA, 15 nt, Human
agcaccuacagugua

SEQ ID NO: 1834311 - RNA, 19 nt, Human
agcaccuacaguguacagu

SEQ ID NO: 1834312 - RNA, 21 nt, Human
agcaccuacaguguacagucu

SEQ ID NO: 1834313 - RNA, 13 nt, Human
agcaccuccugcc

SEQ ID NO: 1834314 - RNA, 14 nt, Human
agcaccuccugccu

SEQ ID NO: 1834315 - RNA, 16 nt, Human
agcaccuccugccucg

SEQ ID NO: 1834316 - RNA, 23 nt, Human
agcacaugccucucucaggccaa

SEQ ID NO: 1834317 - RNA, 22 nt, Human
agcaccaaaagcuuaccaaggg

SEQ ID NO: 1834318 - RNA, 16 nt, Human
agcaccaucucuccuc

SEQ ID NO: 1834319 - RNA, 22 nt, Human
agcacaugccucucucaggcca

SEQ ID NO: 1834320 - RNA, 21 nt, Human
agcacaugccucucucaggcc

SEQ ID NO: 1834321 - RNA, 20 nt, Human
agcacaugccucucucaggc

SEQ ID NO: 1834322 - RNA, 19 nt, Human
agcacaugccucucucagg

SEQ ID NO: 1834323 - RNA, 18 nt, Human
agcacaugccucucucag

SEQ ID NO: 1834324 - RNA, 21 nt, Human
agcacagcuucauuuccugug

SEQ ID NO: 1834325 - RNA, 17 nt, Human
agcaagugagagcuggg

SEQ ID NO: 1834326 - RNA, 21 nt, Human
ugagccagauuucacucuccu

SEQ ID NO: 1834327 - RNA, 20 nt, Human
ugagccagauuucacucucc

SEQ ID NO: 1834328 - RNA, 19 nt, Human
ugagccagauuucacucuc

SEQ ID NO: 1834329 - RNA, 18 nt, Human
ugagccagauuucacucu

SEQ ID NO: 1834330 - RNA, 14 nt, Human
ugagccacugcacc

SEQ ID NO: 1834331 - RNA, 14 nt, Human
ugagcauuagauuu

SEQ ID NO: 1834332 - RNA, 16 nt, Human
ugagcauuagauuucu

SEQ ID NO: 1834333 - RNA, 12 nt, Human
ugagccacugca

SEQ ID NO: 1834334 - RNA, 13 nt, Human
ugagccacugcac

SEQ ID NO: 1834335 - RNA, 17 nt, Human
agcaaggagauuuacaa

SEQ ID NO: 1834336 - RNA, 19 nt, Human
agcaaggagauuuacaacu

SEQ ID NO: 1834337 - RNA, 14 nt, Human
agcaaggagauuua

SEQ ID NO: 1834338 - RNA, 15 nt, Human
agcaagucagaauag

SEQ ID NO: 1834339 - RNA, 16 nt, Human
agcaagugagacccug

SEQ ID NO: 1834340 - RNA, 15 nt, Human
agcaagugagagcug

SEQ ID NO: 1834341 - RNA, 16 nt, Human
agcaagugagagcugg

SEQ ID NO: 1834342 - RNA, 14 nt, Human
ugagauguguucac

SEQ ID NO: 1834343 - RNA, 23 nt, Human
ugagauguagccccucuccugga

SEQ ID NO: 1834344 - RNA, 17 nt, Human
ugagaggaaaucaccga

SEQ ID NO: 1834345 - RNA, 23 nt, Human
ugagaggacuuuucuuuguggcu

SEQ ID NO: 1834346 - RNA, 14 nt, Human
ugagaggaaaucac

SEQ ID NO: 1834347 - RNA, 13 nt, Human
ugagaggaaauca

SEQ ID NO: 1834348 - RNA, 12 nt, Human
ugagaggaaauc

SEQ ID NO: 1834349 - RNA, 11 nt, Human
ugagaggaaau

SEQ ID NO: 1834350 - RNA, 10 nt, Human
ugagaggaaa

SEQ ID NO: 1834351 - RNA, 14 nt, Human
ugagagcugggugu

SEQ ID NO: 1834352 - RNA, 20 nt, Human
ugagacagcccgggcucugc

SEQ ID NO: 1834353 - RNA, 19 nt, Human
ugagacagcccgggcucug

SEQ ID NO: 1834354 - RNA, 18 nt, Human
ugagacagcccgggcucu

SEQ ID NO: 1834355 - RNA, 17 nt, Human
ugagacagcccgggcuc

SEQ ID NO: 1834356 - RNA, 12 nt, Human
ugagacagcucu

SEQ ID NO: 1834357 - RNA, 22 nt, Human
ugagacagcccgggcucugccu

SEQ ID NO: 1834358 - RNA, 20 nt, Human
ugagacucugucucagucca

SEQ ID NO: 1834359 - RNA, 20 nt, Human
ugagacucugucucaaaaaa

SEQ ID NO: 1834360 - RNA, 20 nt, Human
ugagacagaaucucgcucug

SEQ ID NO: 1834361 - RNA, 11 nt, Human
ugagacagagu

SEQ ID NO: 1834362 - RNA, 13 nt, Human
ugagacagcccgg

SEQ ID NO: 1834363 - RNA, 21 nt, Human
ugagacagaguuuucacucuu

SEQ ID NO: 1834364 - RNA, 22 nt, Human
ugaagacaaugacuuacuguac

SEQ ID NO: 1834365 - RNA, 23 nt, Human
ugaagacaaugacuuacuguaca

SEQ ID NO: 1834366 - RNA, 13 nt, Human
ugaagacagagcu

SEQ ID NO: 1834367 - RNA, 15 nt, Human
ugaacuccugaccuc

SEQ ID NO: 1834368 - RNA, 11 nt, Human
ugaacuccugg

SEQ ID NO: 1834369 - RNA, 13 nt, Human
ugaacaaauuuac

SEQ ID NO: 1834370 - RNA, 21 nt, Human
ugaaccaccacacccagccca

SEQ ID NO: 1834371 - RNA, 18 nt, Human
ugaacaaauuuacagaga

SEQ ID NO: 1834372 - RNA, 22 nt, Human
ugaaccaccacacccagcccac

SEQ ID NO: 1834373 - RNA, 22 nt, Human
ugaacccauauuuguacaccaa

SEQ ID NO: 1834374 - RNA, 18 nt, Human
ugaacccgggaggcagag

SEQ ID NO: 1834375 - RNA, 19 nt, Human
ugaaauuuuuauuaaauua

SEQ ID NO: 1834376 - RNA, 20 nt, Human
ugaaauuuuuauuaaauuau

SEQ ID NO: 1834377 - RNA, 23 nt, Human
ugaaauagacccacaagaggcag

SEQ ID NO: 1834378 - RNA, 14 nt, Human
ugaaauaagccaga

SEQ ID NO: 1834379 - RNA, 16 nt, Human
ugaaauaacauggccu

SEQ ID NO: 1834380 - RNA, 17 nt, Human
ugaaauaacauggccuu

SEQ ID NO: 1834381 - RNA, 16 nt, Human
agagauugugguuuca

SEQ ID NO: 1834382 - RNA, 21 nt, Human
agaggcagccccauucugccu

SEQ ID NO: 1834383 - RNA, 22 nt, Human
agaggcagccccauucugccug

SEQ ID NO: 1834384 - RNA, 21 nt, Human
agaggcagggucucacucugu

SEQ ID NO: 1834385 - RNA, 23 nt, Human
agaggcagccccauucugccugc

SEQ ID NO: 1834386 - RNA, 22 nt, Human
agaggcugccucucccaucacu

SEQ ID NO: 1834387 - RNA, 13 nt, Human
agagguucaaaga

SEQ ID NO: 1834388 - RNA, 20 nt, Human
agagggagugacagaggcag

SEQ ID NO: 1834389 - RNA, 15 nt, Human
agagggagguaagga

SEQ ID NO: 1834390 - RNA, 15 nt, Human
agagggagugacaga

SEQ ID NO: 1834391 - RNA, 16 nt, Human
agagguucaaagauau

SEQ ID NO: 1834392 - RNA, 19 nt, Human
agagguucaaagauauuuu

SEQ ID NO: 1834393 - RNA, 20 nt, Human
agagguucaaagauauuuug

SEQ ID NO: 1834394 - RNA, 18 nt, Human
agaguaauccaagcaaau

SEQ ID NO: 1834395 - RNA, 20 nt, Human
agaguaauccaagcaaaugu

SEQ ID NO: 1834396 - RNA, 22 nt, Human
agaguaauccaagcaaauguga

SEQ ID NO: 1834397 - RNA, 15 nt, Human
ugaaguaauaugcac

SEQ ID NO: 1834398 - RNA, 14 nt, Human
ugaaguaagcaaag

SEQ ID NO: 1834399 - RNA, 13 nt, Human
ugaaguaagcaaa

SEQ ID NO: 1834400 - RNA, 16 nt, Human
ugaaguaauaugcaca

SEQ ID NO: 1834401 - RNA, 20 nt, Human
ugaaguaauaugcacacauu

SEQ ID NO: 1834402 - RNA, 21 nt, Human
ugaaguaauaugcacacauuu

SEQ ID NO: 1834403 - RNA, 22 nt, Human
ugaaguaauaugcacacauuuu

SEQ ID NO: 1834404 - RNA, 18 nt, Human
ugaauauuuaguguucau

SEQ ID NO: 1834405 - RNA, 13 nt, Human
ugaauaauacagu

SEQ ID NO: 1834406 - RNA, 23 nt, Human
ugaauaauguaagacaaauaugu

SEQ ID NO: 1834407 - RNA, 12 nt, Human
ugaauaauacag

SEQ ID NO: 1834408 - RNA, 13 nt, Human
ugaagucacacag

SEQ ID NO: 1834409 - RNA, 17 nt, Human
ugaaguacucauacaug

SEQ ID NO: 1834410 - RNA, 15 nt, Human
ugaaguaagcaaaga

SEQ ID NO: 1834411 - RNA, 12 nt, Human
ucuuuccugagg

SEQ ID NO: 1834412 - RNA, 18 nt, Human
ucuuuaaugucacaggca

SEQ ID NO: 1834413 - RNA, 19 nt, Human
ucuuuaaugucacaggcag

SEQ ID NO: 1834414 - RNA, 20 nt, Human
agacaggcaagcaccuccug

SEQ ID NO: 1834415 - RNA, 22 nt, Human
agacaggcaagcaccuccugcc

SEQ ID NO: 1834416 - RNA, 15 nt, Human
ucuuuaaugucacag

SEQ ID NO: 1834417 - RNA, 13 nt, Human
agacuccugcagg

SEQ ID NO: 1834418 - RNA, 21 nt, Human
agacuccagcuggguuggaaa

SEQ ID NO: 1834419 - RNA, 16 nt, Human
agacucccaagcugga

SEQ ID NO: 1834420 - RNA, 19 nt, Human
agagacacaagccuucggc

SEQ ID NO: 1834421 - RNA, 16 nt, Human
agagacacaagccuuc

SEQ ID NO: 1834422 - RNA, 19 nt, Human
agacuuuucuuucagccaa

SEQ ID NO: 1834423 - RNA, 19 nt, Human
agacuuuggaaagaguagg

SEQ ID NO: 1834424 - RNA, 12 nt, Human
agacuuuuauga

SEQ ID NO: 1834425 - RNA, 15 nt, Human
agacuuuuccaaccc

SEQ ID NO: 1834426 - RNA, 15 nt, Human
agacuuuuaugauac

SEQ ID NO: 1834427 - RNA, 15 nt, Human
agacuuuggaaagag

SEQ ID NO: 1834428 - RNA, 17 nt, Human
agacuuuggaaagacuu

SEQ ID NO: 1834429 - RNA, 14 nt, Human
agacuguacaaagu

SEQ ID NO: 1834430 - RNA, 20 nt, Human
agacugguuccauggccucu

SEQ ID NO: 1834431 - RNA, 14 nt, Human
agagacagaaagca

SEQ ID NO: 1834432 - RNA, 15 nt, Human
agagacagaaagcag

SEQ ID NO: 1834433 - RNA, 20 nt, Human
ucuuuguacagacaacaaac

SEQ ID NO: 1834434 - RNA, 15 nt, Human
ucuuuguacagacaa

SEQ ID NO: 1834435 - RNA, 14 nt, Human
ucuuuguacagaca

SEQ ID NO: 1834436 - RNA, 16 nt, Human
ucuuuguaaugaaaac

SEQ ID NO: 1834437 - RNA, 22 nt, Human
ucuuuuuucuaaaguaaaaaca

SEQ ID NO: 1834438 - RNA, 21 nt, Human
ucuuuuuucuaaaguaaaaac

SEQ ID NO: 1834439 - RNA, 14 nt, Human
ucuuuguggcuucc

SEQ ID NO: 1834440 - RNA, 22 nt, Human
ugaaagaaaauaccaaggaaca

SEQ ID NO: 1834441 - RNA, 16 nt, Human
ugaaagacuguacaaa

SEQ ID NO: 1834442 - RNA, 17 nt, Human
ugaaagaggaaugaagu

SEQ ID NO: 1834443 - RNA, 22 nt, Human
ugaaagacuguacaaaguagaa

SEQ ID NO: 1834444 - RNA, 19 nt, Human
ugaaagacuguacaaagua

SEQ ID NO: 1834445 - RNA, 18 nt, Human
ugaaagacuguacaaagu

SEQ ID NO: 1834446 - RNA, 18 nt, Human
ugaaagaggaaugaagua

SEQ ID NO: 1834447 - RNA, 21 nt, Human
agagaccaucccugaaggccc

SEQ ID NO: 1834448 - RNA, 19 nt, Human
agagaccaucccugaaggc

SEQ ID NO: 1834449 - RNA, 23 nt, Human
agagaccaucccugaaggccccg

SEQ ID NO: 1834450 - RNA, 22 nt, Human
agagaccaucccugaaggcccc

SEQ ID NO: 1834451 - RNA, 17 nt, Human
agagaguggcuccuccc

SEQ ID NO: 1834452 - RNA, 14 nt, Human
agagacuccugcag

SEQ ID NO: 1834453 - RNA, 13 nt, Human
agagacuccugca

SEQ ID NO: 1834454 - RNA, 12 nt, Human
agagacuccugc

SEQ ID NO: 1834455 - RNA, 15 nt, Human
agagacuccugcagg

SEQ ID NO: 1834456 - RNA, 15 nt, Human
ugaaaacacauuuuu

SEQ ID NO: 1834457 - RNA, 17 nt, Human
ugaaaacacauuuuucu

SEQ ID NO: 1834458 - RNA, 19 nt, Human
ugaaaacacauuuuucuua

SEQ ID NO: 1834459 - RNA, 20 nt, Human
ugaaaacacauuuuucuuag

SEQ ID NO: 1834460 - RNA, 14 nt, Human
ugaaaacacauuuu

SEQ ID NO: 1834461 - RNA, 12 nt, Human
ugaaaacacauu

SEQ ID NO: 1834462 - RNA, 13 nt, Human
ugaaaacacauuu

SEQ ID NO: 1834463 - RNA, 16 nt, Human
ucuuuuuuugugaugu

SEQ ID NO: 1834464 - RNA, 14 nt, Human
ucuuuuuuugugau

SEQ ID NO: 1834465 - RNA, 23 nt, Human
ucuuuuuuuuuuuuuaaagacag

SEQ ID NO: 1834466 - RNA, 14 nt, Human
ugaaaauuaacaug

SEQ ID NO: 1834467 - RNA, 17 nt, Human
ugaaacuggauuaaacu

SEQ ID NO: 1834468 - RNA, 18 nt, Human
ugaaacuggauuaaacuu

SEQ ID NO: 1834469 - RNA, 13 nt, Human
ugaaagaaaauaa

SEQ ID NO: 1834470 - RNA, 12 nt, Human
ugucccuuuucc

SEQ ID NO: 1834471 - RNA, 17 nt, Human
ugucccuuuuccuuuuu

SEQ ID NO: 1834472 - RNA, 14 nt, Human
ugucccugcacuug

SEQ ID NO: 1834473 - RNA, 16 nt, Human
ugucagccauuccugu

SEQ ID NO: 1834474 - RNA, 19 nt, Human
uguccaggcacugcugccc

SEQ ID NO: 1834475 - RNA, 21 nt, Human
uguccaggcacugcugcccag

SEQ ID NO: 1834476 - RNA, 20 nt, Human
uguccaggcacugcugccca

SEQ ID NO: 1834477 - RNA, 22 nt, Human
ugucccuaccgagucucuucuc

SEQ ID NO: 1834478 - RNA, 21 nt, Human
ugucccuaccgagucucuucu

SEQ ID NO: 1834479 - RNA, 20 nt, Human
ugucccuaccgagucucuuc

SEQ ID NO: 1834480 - RNA, 19 nt, Human
agucagggguucccuuuuu

SEQ ID NO: 1834481 - RNA, 20 nt, Human
agucccaggcugagccucag

SEQ ID NO: 1834482 - RNA, 19 nt, Human
aguccccuguuuguuucug

SEQ ID NO: 1834483 - RNA, 14 nt, Human
aguccccuguuugu

SEQ ID NO: 1834484 - RNA, 21 nt, Human
agucccaccuuggcugcaggg

SEQ ID NO: 1834485 - RNA, 23 nt, Human
agucccaccuuggcugcagggag

SEQ ID NO: 1834486 - RNA, 20 nt, Human
agucccaccuuggcugcagg

SEQ ID NO: 1834487 - RNA, 20 nt, Human
agucacauuccaagccucau

SEQ ID NO: 1834488 - RNA, 15 nt, Human
ugucagcauagaagu

SEQ ID NO: 1834489 - RNA, 17 nt, Human
agucacugagacagccc

SEQ ID NO: 1834490 - RNA, 16 nt, Human
agucacugagacagcc

SEQ ID NO: 1834491 - RNA, 15 nt, Human
agucacugagacagc

SEQ ID NO: 1834492 - RNA, 21 nt, Human
aguauuuaauucauguugccu

SEQ ID NO: 1834493 - RNA, 22 nt, Human
agucacagagauaauucuagcu

SEQ ID NO: 1834494 - RNA, 15 nt, Human
aguauuauaccuuuu

SEQ ID NO: 1834495 - RNA, 14 nt, Human
aguauuauaccuuu

SEQ ID NO: 1834496 - RNA, 17 nt, Human
aguagcuggauuacagg

SEQ ID NO: 1834497 - RNA, 22 nt, Human
aguagcugggacuacaggcacc

SEQ ID NO: 1834498 - RNA, 19 nt, Human
aguagcugggacuacaggc

SEQ ID NO: 1834499 - RNA, 21 nt, Human
aguagcugggacuacaggcac

SEQ ID NO: 1834500 - RNA, 13 nt, Human
aguagcugggacu

SEQ ID NO: 1834501 - RNA, 14 nt, Human
aguagcugggacua

SEQ ID NO: 1834502 - RNA, 19 nt, Human
ugucaaaguggugagaggc

SEQ ID NO: 1834503 - RNA, 16 nt, Human
ugucaaaguggugaga

SEQ ID NO: 1834504 - RNA, 15 nt, Human
ugucaaaguggugag

SEQ ID NO: 1834505 - RNA, 14 nt, Human
ugucaaagugguga

SEQ ID NO: 1834506 - RNA, 11 nt, Human
uguauuaugug

SEQ ID NO: 1834507 - RNA, 21 nt, Human
uguauuaaguuguuaauaaaa

SEQ ID NO: 1834508 - RNA, 15 nt, Human
uguauuagucacaga

SEQ ID NO: 1834509 - RNA, 14 nt, Human
uguauguguaagua

SEQ ID NO: 1834510 - RNA, 15 nt, Human
uguaucccaugagcc

SEQ ID NO: 1834511 - RNA, 16 nt, Human
uguaucccaugagccu

SEQ ID NO: 1834512 - RNA, 12 nt, Human
uguagagccagg

SEQ ID NO: 1834513 - RNA, 15 nt, Human
uguagagccaggguc

SEQ ID NO: 1834514 - RNA, 21 nt, Human
ugucucuugguccugcugcag

SEQ ID NO: 1834515 - RNA, 20 nt, Human
ugucucuugguccugcugca

SEQ ID NO: 1834516 - RNA, 19 nt, Human
ugucucuugguccugcugc

SEQ ID NO: 1834517 - RNA, 18 nt, Human
ugucucuugguccugcug

SEQ ID NO: 1834518 - RNA, 22 nt, Human
ugucucuuuaaugucacaggca

SEQ ID NO: 1834519 - RNA, 22 nt, Human
ugucucuugguccugcugcagu

SEQ ID NO: 1834520 - RNA, 21 nt, Human
ugucucuuuaaugucacaggc

SEQ ID NO: 1834521 - RNA, 17 nt, Human
ugucucuacuaaaaaua

SEQ ID NO: 1834522 - RNA, 21 nt, Human
ugucucgugguaggacuguag

SEQ ID NO: 1834523 - RNA, 18 nt, Human
ugucucgugguaggacug

SEQ ID NO: 1834524 - RNA, 19 nt, Human
ugucucgugguaggacugu

SEQ ID NO: 1834525 - RNA, 20 nt, Human
ugucucgugguaggacugua

SEQ ID NO: 1834526 - RNA, 13 nt, Human
ugucucugagagu

SEQ ID NO: 1834527 - RNA, 22 nt, Human
ugucucuggauuauauuaugaa

SEQ ID NO: 1834528 - RNA, 16 nt, Human
agucccugccaaugga

SEQ ID NO: 1834529 - RNA, 14 nt, Human
agucccugccaaug

SEQ ID NO: 1834530 - RNA, 13 nt, Human
agucccugccaau

SEQ ID NO: 1834531 - RNA, 23 nt, Human
aguccccuguuuguuucugaaag

SEQ ID NO: 1834532 - RNA, 15 nt, Human
ugugaaccaccacac

SEQ ID NO: 1834533 - RNA, 17 nt, Human
ugucuuuaaaugcugcu

SEQ ID NO: 1834534 - RNA, 16 nt, Human
ugugaaccaccacacc

SEQ ID NO: 1834535 - RNA, 17 nt, Human
ugugaaccaccacaccc

SEQ ID NO: 1834536 - RNA, 22 nt, Human
ugugaaccaccacacccagccc

SEQ ID NO: 1834537 - RNA, 23 nt, Human
ugugaaccaccacacccagccca

SEQ ID NO: 1834538 - RNA, 15 nt, Human
ugucuugcaauggca

SEQ ID NO: 1834539 - RNA, 17 nt, Human
ugucuugcaauggcagc

SEQ ID NO: 1834540 - RNA, 18 nt, Human
ugucuugcaauggcagcc

SEQ ID NO: 1834541 - RNA, 20 nt, Human
ugucuugcaauggcagccuu

SEQ ID NO: 1834542 - RNA, 21 nt, Human
ugucuugcaauggcagccuug

SEQ ID NO: 1834543 - RNA, 23 nt, Human
agugaaaaaggaggaagagaaaa

SEQ ID NO: 1834544 - RNA, 20 nt, Human
agugaaaaaggaggaagaga

SEQ ID NO: 1834545 - RNA, 17 nt, Human
agugaaaaaggaggaag

SEQ ID NO: 1834546 - RNA, 11 nt, Human
agugaaaaagg

SEQ ID NO: 1834547 - RNA, 15 nt, Human
agucuuuuccaugaa

SEQ ID NO: 1834548 - RNA, 13 nt, Human
agucuuuuccaug

SEQ ID NO: 1834549 - RNA, 19 nt, Human
ugugagcacaaagguagcu

SEQ ID NO: 1834550 - RNA, 22 nt, Human
ugugagaugcuagaacucccuu

SEQ ID NO: 1834551 - RNA, 23 nt, Human
ugugaacugaacucugacaacag

SEQ ID NO: 1834552 - RNA, 14 nt, Human
ugugaacugaacuc

SEQ ID NO: 1834553 - RNA, 18 nt, Human
agucucccucccuugggg

SEQ ID NO: 1834554 - RNA, 14 nt, Human
agucucccucccuu

SEQ ID NO: 1834555 - RNA, 19 nt, Human
agucuccaaagucucugga

SEQ ID NO: 1834556 - RNA, 18 nt, Human
ugugauggggcccugccu

SEQ ID NO: 1834557 - RNA, 17 nt, Human
ugugauggggcccugcc

SEQ ID NO: 1834558 - RNA, 16 nt, Human
ugugauggggcccugc

SEQ ID NO: 1834559 - RNA, 15 nt, Human
ugugauggggcccug

SEQ ID NO: 1834560 - RNA, 16 nt, Human
agugagccgagauugu

SEQ ID NO: 1834561 - RNA, 14 nt, Human
agugagagcugggu

SEQ ID NO: 1834562 - RNA, 22 nt, Human
agugagacucugucucaaaaaa

SEQ ID NO: 1834563 - RNA, 16 nt, Human
agugagacucugucuc

SEQ ID NO: 1834564 - RNA, 17 nt, Human
agugagacucugucuca

SEQ ID NO: 1834565 - RNA, 17 nt, Human
agugagacccugucuca

SEQ ID NO: 1834566 - RNA, 21 nt, Human
agugagacccugucucaaaaa

SEQ ID NO: 1834567 - RNA, 13 nt, Human
agugagacucugu

SEQ ID NO: 1834568 - RNA, 14 nt, Human
agugagacagcucu

SEQ ID NO: 1834569 - RNA, 17 nt, Human
agugaaagaaaauaaca

SEQ ID NO: 1834570 - RNA, 22 nt, Human
uguaagcucuacugaggugcua

SEQ ID NO: 1834571 - RNA, 15 nt, Human
uguaaggaaugauua

SEQ ID NO: 1834572 - RNA, 14 nt, Human
uguaaggaaugauu

SEQ ID NO: 1834573 - RNA, 13 nt, Human
uguaaggaaugau

SEQ ID NO: 1834574 - RNA, 20 nt, Human
agguugucugaagucacugc

SEQ ID NO: 1834575 - RNA, 16 nt, Human
agguugucugaaguca

SEQ ID NO: 1834576 - RNA, 16 nt, Human
agguggggcagcuuga

SEQ ID NO: 1834577 - RNA, 23 nt, Human
agguggggucacucuggcagcuc

SEQ ID NO: 1834578 - RNA, 14 nt, Human
agguggggcagcuu

SEQ ID NO: 1834579 - RNA, 22 nt, Human
aggugauccacucgccuucauc

SEQ ID NO: 1834580 - RNA, 13 nt, Human
agguggggcagcu

SEQ ID NO: 1834581 - RNA, 18 nt, Human
aggugugacugaauuucu

SEQ ID NO: 1834582 - RNA, 23 nt, Human
aggugugaaccaccacacccagc

SEQ ID NO: 1834583 - RNA, 22 nt, Human
aggugugaaccaccacacccag

SEQ ID NO: 1834584 - RNA, 20 nt, Human
aggugugacugaauuucuuu

SEQ ID NO: 1834585 - RNA, 20 nt, Human
aggugugagccaccacgccc

SEQ ID NO: 1834586 - RNA, 14 nt, Human
aggugugagucacc

SEQ ID NO: 1834587 - RNA, 20 nt, Human
aggugugagucaccaagccc

SEQ ID NO: 1834588 - RNA, 23 nt, Human
uguacaaaguagaagucuuagau

SEQ ID NO: 1834589 - RNA, 19 nt, Human
uguacaaaguagaagucuu

SEQ ID NO: 1834590 - RNA, 17 nt, Human
uguaauuugugauacaa

SEQ ID NO: 1834591 - RNA, 21 nt, Human
uguaauuugugauacaaugcu

SEQ ID NO: 1834592 - RNA, 18 nt, Human
uguaaggaaugauuaauu

SEQ ID NO: 1834593 - RNA, 16 nt, Human
uguaauuugugauaca

SEQ ID NO: 1834594 - RNA, 15 nt, Human
uguaaggcaaucaug

SEQ ID NO: 1834595 - RNA, 17 nt, Human
uguacaugaaaacacau

SEQ ID NO: 1834596 - RNA, 18 nt, Human
uguacaugaaaacacauu

SEQ ID NO: 1834597 - RNA, 19 nt, Human
uguacaugaaaacacauuu

SEQ ID NO: 1834598 - RNA, 20 nt, Human
uguacaugaaaacacauuuu

SEQ ID NO: 1834599 - RNA, 15 nt, Human
uguacuugcucuuga

SEQ ID NO: 1834600 - RNA, 19 nt, Human
uguacuugcucuugaugcc

SEQ ID NO: 1834601 - RNA, 23 nt, Human
ugguggcagcucaccucucccuu

SEQ ID NO: 1834602 - RNA, 20 nt, Human
ugguggcagcucaccucucc

SEQ ID NO: 1834603 - RNA, 19 nt, Human
ugguggcagcucaccucuc

SEQ ID NO: 1834604 - RNA, 16 nt, Human
ugguggcagcucaccu

SEQ ID NO: 1834605 - RNA, 12 nt, Human
ugguggcagcuc

SEQ ID NO: 1834606 - RNA, 15 nt, Human
ugguggcagagugga

SEQ ID NO: 1834607 - RNA, 15 nt, Human
ugguguguguaugcg

SEQ ID NO: 1834608 - RNA, 12 nt, Human
ugguggcagcug

SEQ ID NO: 1834609 - RNA, 20 nt, Human
ugguucaggguuggccccug

SEQ ID NO: 1834610 - RNA, 22 nt, Human
ugguucaggguuggccccugcc

SEQ ID NO: 1834611 - RNA, 23 nt, Human
ugguucaggguuggccccugccc

SEQ ID NO: 1834612 - RNA, 17 nt, Human
ugguguuuccuggcacu

SEQ ID NO: 1834613 - RNA, 15 nt, Human
ugguguuuccuggca

SEQ ID NO: 1834614 - RNA, 14 nt, Human
ugguuucagaaaug

SEQ ID NO: 1834615 - RNA, 15 nt, Human
ugguuucagaaaugu

SEQ ID NO: 1834616 - RNA, 21 nt, Human
ugguuuguaaauuaacuuuua

SEQ ID NO: 1834617 - RNA, 12 nt, Human
ugguuuucuguu

SEQ ID NO: 1834618 - RNA, 18 nt, Human
ugguuuuaguugcaacuu

SEQ ID NO: 1834619 - RNA, 21 nt, Human
aggugauccacccaccucagc

SEQ ID NO: 1834620 - RNA, 23 nt, Human
aggugauccacccaccucagccu

SEQ ID NO: 1834621 - RNA, 13 nt, Human
ugguuuucuguuc

SEQ ID NO: 1834622 - RNA, 15 nt, Human
ugguuuucuguucuu

SEQ ID NO: 1834623 - RNA, 16 nt, Human
uguaaaggaauuuaaa

SEQ ID NO: 1834624 - RNA, 18 nt, Human
uggucugacccacugcuu

SEQ ID NO: 1834625 - RNA, 16 nt, Human
uggucuuauuuguaaa

SEQ ID NO: 1834626 - RNA, 22 nt, Human
uggucugugagaugcuagaacu

SEQ ID NO: 1834627 - RNA, 12 nt, Human
uggucuguguga

SEQ ID NO: 1834628 - RNA, 13 nt, Human
uggucccacccca

SEQ ID NO: 1834629 - RNA, 19 nt, Human
uggucucgaacuccugacc

SEQ ID NO: 1834630 - RNA, 15 nt, Human
uggucucgaacuccu

SEQ ID NO: 1834631 - RNA, 21 nt, Human
uggucucgaacuccugaccuu

SEQ ID NO: 1834632 - RNA, 20 nt, Human
uggucucgaacuccugaccu

SEQ ID NO: 1834633 - RNA, 19 nt, Human
ugguccauagagagcaaga

SEQ ID NO: 1834634 - RNA, 22 nt, Human
ugguccaugggccauaugaaaa

SEQ ID NO: 1834635 - RNA, 13 nt, Human
aggguuggccccu

SEQ ID NO: 1834636 - RNA, 14 nt, Human
aggguuggccccug

SEQ ID NO: 1834637 - RNA, 17 nt, Human
aggguuggccccugccc

SEQ ID NO: 1834638 - RNA, 15 nt, Human
aggguugggcuggug

SEQ ID NO: 1834639 - RNA, 17 nt, Human
aggguggugaccucugc

SEQ ID NO: 1834640 - RNA, 18 nt, Human
aggguggugaccucugcc

SEQ ID NO: 1834641 - RNA, 19 nt, Human
aggguggugaccucugccu

SEQ ID NO: 1834642 - RNA, 21 nt, Human
aggguggugaccucugccuga

SEQ ID NO: 1834643 - RNA, 19 nt, Human
uggugaacagaacaaaagg

SEQ ID NO: 1834644 - RNA, 15 nt, Human
uggugaacauugcaa

SEQ ID NO: 1834645 - RNA, 20 nt, Human
uggugaacauugcaauagaa

SEQ ID NO: 1834646 - RNA, 17 nt, Human
aggguugggcugguguc

SEQ ID NO: 1834647 - RNA, 20 nt, Human
aggguuuauguuuaggaugu

SEQ ID NO: 1834648 - RNA, 17 nt, Human
agguaugcaaucaaauc

SEQ ID NO: 1834649 - RNA, 22 nt, Human
aggucuugaacuccuggccuca

SEQ ID NO: 1834650 - RNA, 17 nt, Human
agguccacaacacacag

SEQ ID NO: 1834651 - RNA, 20 nt, Human
aggucuugaacuccuggccu

SEQ ID NO: 1834652 - RNA, 21 nt, Human
aggucuugaacuccuggccuc

SEQ ID NO: 1834653 - RNA, 22 nt, Human
aggucauuuuuuuuaagaaaaa

SEQ ID NO: 1834654 - RNA, 23 nt, Human
aggucauuuuuuuuaagaaaaag

SEQ ID NO: 1834655 - RNA, 21 nt, Human
aggucaaggcugcagugagcc

SEQ ID NO: 1834656 - RNA, 15 nt, Human
aggucagugcaaaua

SEQ ID NO: 1834657 - RNA, 13 nt, Human
agggggcugggac

SEQ ID NO: 1834658 - RNA, 15 nt, Human
agggggaaggcaggg

SEQ ID NO: 1834659 - RNA, 16 nt, Human
aggggauagagagaga

SEQ ID NO: 1834660 - RNA, 19 nt, Human
aggguacuaaggaaucuuu

SEQ ID NO: 1834661 - RNA, 18 nt, Human
aggguaucaggugcugcc

SEQ ID NO: 1834662 - RNA, 12 nt, Human
aggguagggugg

SEQ ID NO: 1834663 - RNA, 16 nt, Human
aggguaucaggugcug

SEQ ID NO: 1834664 - RNA, 21 nt, Human
uggucaccaaaucagcugcua

SEQ ID NO: 1834665 - RNA, 23 nt, Human
uggucaccaaaucagcugcuacu

SEQ ID NO: 1834666 - RNA, 22 nt, Human
ugguaauuuaagauuccagaga

SEQ ID NO: 1834667 - RNA, 16 nt, Human
ugguccauagagagca

SEQ ID NO: 1834668 - RNA, 15 nt, Human
ugguccauagagagc

SEQ ID NO: 1834669 - RNA, 22 nt, Human
ugggucuuguuuuuuuuuucca

SEQ ID NO: 1834670 - RNA, 14 nt, Human
uggguggaugccug

SEQ ID NO: 1834671 - RNA, 23 nt, Human
uggguggaugccugguggcagcu

SEQ ID NO: 1834672 - RNA, 17 nt, Human
auaaguuaacuuccaau

SEQ ID NO: 1834673 - RNA, 23 nt, Human
auaagaaccuuuugagugccuua

SEQ ID NO: 1834674 - RNA, 22 nt, Human
auaagaaccuuuugagugccuu

SEQ ID NO: 1834675 - RNA, 23 nt, Human
auaauacaccacuacauucuguu

SEQ ID NO: 1834676 - RNA, 21 nt, Human
auaauacaccacuacauucug

SEQ ID NO: 1834677 - RNA, 22 nt, Human
auaaguuaacuuccaauuuaca

SEQ ID NO: 1834678 - RNA, 19 nt, Human
auaauacaguaucucaggg

SEQ ID NO: 1834679 - RNA, 14 nt, Human
auaauucuacuuug

SEQ ID NO: 1834680 - RNA, 14 nt, Human
auaaugaauacuuu

SEQ ID NO: 1834681 - RNA, 16 nt, Human
uuacaggaaguacugg

SEQ ID NO: 1834682 - RNA, 15 nt, Human
uuacaggaaguacug

SEQ ID NO: 1834683 - RNA, 22 nt, Human
uuacaggaaguacuggagaaaa

SEQ ID NO: 1834684 - RNA, 18 nt, Human
uuacaggaaguacuggag

SEQ ID NO: 1834685 - RNA, 23 nt, Human
uuaccauuuugggguacccacug

SEQ ID NO: 1834686 - RNA, 19 nt, Human
auaaauaaaguuuguugaa

SEQ ID NO: 1834687 - RNA, 13 nt, Human
auaaauaaaguuu

SEQ ID NO: 1834688 - RNA, 12 nt, Human
auaaauaacuuu

SEQ ID NO: 1834689 - RNA, 20 nt, Human
auaaccaguguuguggauuu

SEQ ID NO: 1834690 - RNA, 20 nt, Human
auaaccaaagcccaaagugg

SEQ ID NO: 1834691 - RNA, 23 nt, Human
auaaacacucuugaaaaaugcau

SEQ ID NO: 1834692 - RNA, 13 nt, Human
auaaacuuuaccu

SEQ ID NO: 1834693 - RNA, 15 nt, Human
auaaacuuuaccuuu

SEQ ID NO: 1834694 - RNA, 22 nt, Human
auacaaaaaaaaaaaaaaauua

SEQ ID NO: 1834695 - RNA, 12 nt, Human
auacaaaagcau

SEQ ID NO: 1834696 - RNA, 13 nt, Human
auacaaaagcaug

SEQ ID NO: 1834697 - RNA, 15 nt, Human
auacaaaagcaugug

SEQ ID NO: 1834698 - RNA, 18 nt, Human
uuauacccccugcaaagc

SEQ ID NO: 1834699 - RNA, 14 nt, Human
uuagccccauaauu

SEQ ID NO: 1834700 - RNA, 16 nt, Human
uuagcaguuugcuuug

SEQ ID NO: 1834701 - RNA, 16 nt, Human
auacauuugauaaagu

SEQ ID NO: 1834702 - RNA, 20 nt, Human
auacauaaacaagaccacgu

SEQ ID NO: 1834703 - RNA, 14 nt, Human
auacaggaaaagcu

SEQ ID NO: 1834704 - RNA, 19 nt, Human
auacaggaaaagcugcuga

SEQ ID NO: 1834705 - RNA, 20 nt, Human
auacaggaaaagcugcugac

SEQ ID NO: 1834706 - RNA, 22 nt, Human
auacaggaaaagcugcugacag

SEQ ID NO: 1834707 - RNA, 21 nt, Human
auacaguucggugagcuacaa

SEQ ID NO: 1834708 - RNA, 13 nt, Human
auacuacaguuug

SEQ ID NO: 1834709 - RNA, 15 nt, Human
auacuacaguuuguu

SEQ ID NO: 1834710 - RNA, 16 nt, Human
auacuacaguuuguua

SEQ ID NO: 1834711 - RNA, 20 nt, Human
auacuacaguuuguuaguau

SEQ ID NO: 1834712 - RNA, 21 nt, Human
auacuaaccagcagaaaugcc

SEQ ID NO: 1834713 - RNA, 19 nt, Human
auaccagccaguaaauggg

SEQ ID NO: 1834714 - RNA, 22 nt, Human
uuaucaugugaaaucauucauu

SEQ ID NO: 1834715 - RNA, 20 nt, Human
uuaucaugugaaaucauuca

SEQ ID NO: 1834716 - RNA, 18 nt, Human
uuaucaugugaaaucauu

SEQ ID NO: 1834717 - RNA, 17 nt, Human
uuaucaugugaaaucau

SEQ ID NO: 1834718 - RNA, 13 nt, Human
uguugucagcuga

SEQ ID NO: 1834719 - RNA, 16 nt, Human
uguugggccaggagcc

SEQ ID NO: 1834720 - RNA, 13 nt, Human
uguugggccagga

SEQ ID NO: 1834721 - RNA, 17 nt, Human
aguucccuacuuccugu

SEQ ID NO: 1834722 - RNA, 21 nt, Human
aguuauuuuuauuuauuuaaa

SEQ ID NO: 1834723 - RNA, 18 nt, Human
uguucuuuccaaaguaca

SEQ ID NO: 1834724 - RNA, 20 nt, Human
uguucuuuccaaaguacacu

SEQ ID NO: 1834725 - RNA, 20 nt, Human
aguuauuauauuuacaaaug

SEQ ID NO: 1834726 - RNA, 20 nt, Human
agugggggaguggccacaga

SEQ ID NO: 1834727 - RNA, 19 nt, Human
agugggggaguggccacag

SEQ ID NO: 1834728 - RNA, 18 nt, Human
agugggugaauaauacag

SEQ ID NO: 1834729 - RNA, 13 nt, Human
agugggugaauaa

SEQ ID NO: 1834730 - RNA, 18 nt, Human
agugggggaucacagccu

SEQ ID NO: 1834731 - RNA, 14 nt, Human
aguggcagcugcuu

SEQ ID NO: 1834732 - RNA, 20 nt, Human
aguggcagcugcuuuugucu

SEQ ID NO: 1834733 - RNA, 12 nt, Human
aguggcagcugc

SEQ ID NO: 1834734 - RNA, 13 nt, Human
aguggcagcugcu

SEQ ID NO: 1834735 - RNA, 22 nt, Human
aguguacauggaauaacaugua

SEQ ID NO: 1834736 - RNA, 21 nt, Human
aguguacauggaauaacaugu

SEQ ID NO: 1834737 - RNA, 13 nt, Human
aguguacagucuu

SEQ ID NO: 1834738 - RNA, 15 nt, Human
aguguacagucuugu

SEQ ID NO: 1834739 - RNA, 16 nt, Human
aguguacagucuugua

SEQ ID NO: 1834740 - RNA, 19 nt, Human
agugggugaauaauacagu

SEQ ID NO: 1834741 - RNA, 21 nt, Human
agugguuccuaauccucuagg

SEQ ID NO: 1834742 - RNA, 16 nt, Human
aguggugcgaucuggg

SEQ ID NO: 1834743 - RNA, 19 nt, Human
uguucuugguuuguaaauu

SEQ ID NO: 1834744 - RNA, 13 nt, Human
uguucuuuccaaa

SEQ ID NO: 1834745 - RNA, 14 nt, Human
uguucuuuccaaag

SEQ ID NO: 1834746 - RNA, 17 nt, Human
uguucuugguuuguaaa

SEQ ID NO: 1834747 - RNA, 18 nt, Human
uguucuugguuuguaaau

SEQ ID NO: 1834748 - RNA, 16 nt, Human
uguucuuaagacguga

SEQ ID NO: 1834749 - RNA, 14 nt, Human
uguucuuaauucuu

SEQ ID NO: 1834750 - RNA, 16 nt, Human
uguucuuaauucuuag

SEQ ID NO: 1834751 - RNA, 14 nt, Human
uguucugggacaca

SEQ ID NO: 1834752 - RNA, 15 nt, Human
uguucugggacacag

SEQ ID NO: 1834753 - RNA, 13 nt, Human
uguucugggacac

SEQ ID NO: 1834754 - RNA, 23 nt, Human
aguguacauggaauaacauguaa

SEQ ID NO: 1834755 - RNA, 17 nt, Human
aguguacagucuuguau

SEQ ID NO: 1834756 - RNA, 16 nt, Human
uguucccauucuugca

SEQ ID NO: 1834757 - RNA, 21 nt, Human
aguugauagcacagacccugc

SEQ ID NO: 1834758 - RNA, 20 nt, Human
aguugauagcacagacccug

SEQ ID NO: 1834759 - RNA, 19 nt, Human
aguugauagcacagacccu

SEQ ID NO: 1834760 - RNA, 15 nt, Human
aguugauagcacaga

SEQ ID NO: 1834761 - RNA, 14 nt, Human
aguugauagcacag

SEQ ID NO: 1834762 - RNA, 18 nt, Human
aguugauucagcucugca

SEQ ID NO: 1834763 - RNA, 17 nt, Human
aguugauucagcucugc

SEQ ID NO: 1834764 - RNA, 15 nt, Human
aguugauucagcucu

SEQ ID NO: 1834765 - RNA, 14 nt, Human
aguugauucagcuc

SEQ ID NO: 1834766 - RNA, 23 nt, Human
aguugauucagcucugcaagaau

SEQ ID NO: 1834767 - RNA, 19 nt, Human
aguugcaacuuuguauaaa

SEQ ID NO: 1834768 - RNA, 13 nt, Human
aguugauucagcu

SEQ ID NO: 1834769 - RNA, 23 nt, Human
aguugauagcacagacccugccc

SEQ ID NO: 1834770 - RNA, 22 nt, Human
aguugauagcacagacccugcc

SEQ ID NO: 1834771 - RNA, 12 nt, Human
aguucucuccuu

SEQ ID NO: 1834772 - RNA, 13 nt, Human
aguucucuccuuc

SEQ ID NO: 1834773 - RNA, 16 nt, Human
aguucucuccuucuuc

SEQ ID NO: 1834774 - RNA, 15 nt, Human
uguuuucucuugaga

SEQ ID NO: 1834775 - RNA, 17 nt, Human
uguuuucaguguacaug

SEQ ID NO: 1834776 - RNA, 15 nt, Human
uguuuucaguguaca

SEQ ID NO: 1834777 - RNA, 19 nt, Human
uguuuggggaugagaaagg

SEQ ID NO: 1834778 - RNA, 15 nt, Human
uguuuggggaugaga

SEQ ID NO: 1834779 - RNA, 15 nt, Human
uguuugcaucugaaa

SEQ ID NO: 1834780 - RNA, 14 nt, Human
uguuugccucugcc

SEQ ID NO: 1834781 - RNA, 16 nt, Human
uguuugccucugccuc

SEQ ID NO: 1834782 - RNA, 14 nt, Human
uguugucagcugaa

SEQ ID NO: 1834783 - RNA, 13 nt, Human
uuaaauucuugca

SEQ ID NO: 1834784 - RNA, 16 nt, Human
uuaaauucuugcaaag

SEQ ID NO: 1834785 - RNA, 15 nt, Human
aguuucuccaagcag

SEQ ID NO: 1834786 - RNA, 13 nt, Human
aguuucuccaagc

SEQ ID NO: 1834787 - RNA, 21 nt, Human
aguuucuccaagcaggacaug

SEQ ID NO: 1834788 - RNA, 16 nt, Human
aguuucucagcuccca

SEQ ID NO: 1834789 - RNA, 16 nt, Human
aguuucguuuucaaaa

SEQ ID NO: 1834790 - RNA, 15 nt, Human
aguuucguuuucaaa

SEQ ID NO: 1834791 - RNA, 22 nt, Human
aguuuucacucuuauugcccac

SEQ ID NO: 1834792 - RNA, 17 nt, Human
uuaaaccgccaaggcug

SEQ ID NO: 1834793 - RNA, 19 nt, Human
uuaaaauauuccugcauuu

SEQ ID NO: 1834794 - RNA, 16 nt, Human
uuaaaauauuccugca

SEQ ID NO: 1834795 - RNA, 15 nt, Human
uuaaauaaaucauaa

SEQ ID NO: 1834796 - RNA, 13 nt, Human
uuaaauaaaucau

SEQ ID NO: 1834797 - RNA, 20 nt, Human
uuaaauaaugugaaacugga

SEQ ID NO: 1834798 - RNA, 21 nt, Human
uuaaauaaugugaaacuggau

SEQ ID NO: 1834799 - RNA, 19 nt, Human
uuaaauaaugugaaacugg

SEQ ID NO: 1834800 - RNA, 22 nt, Human
uuaaauaaugugaaacuggauu

SEQ ID NO: 1834801 - RNA, 18 nt, Human
uuaaaaaguggaaaaaua

SEQ ID NO: 1834802 - RNA, 20 nt, Human
uuaaaaaugguuuaaauggu

SEQ ID NO: 1834803 - RNA, 17 nt, Human
uuaaaacaacacucaca

SEQ ID NO: 1834804 - RNA, 20 nt, Human
aguugccagucaccccggcc

SEQ ID NO: 1834805 - RNA, 22 nt, Human
aguugcauagguuuaauaauuu

SEQ ID NO: 1834806 - RNA, 20 nt, Human
agccacugcaccgggccaca

SEQ ID NO: 1834807 - RNA, 18 nt, Human
agccacugcaccgggcca

SEQ ID NO: 1834808 - RNA, 19 nt, Human
agccacugcaccgggccac

SEQ ID NO: 1834809 - RNA, 11 nt, Human
agccagaggag

SEQ ID NO: 1834810 - RNA, 10 nt, Human
agccagagga

SEQ ID NO: 1834811 - RNA, 19 nt, Human
ugauuaaccacuucagcug

SEQ ID NO: 1834812 - RNA, 20 nt, Human
ugauuaaauucuugcaaagu

SEQ ID NO: 1834813 - RNA, 17 nt, Human
ugauggugaugaaaugu

SEQ ID NO: 1834814 - RNA, 13 nt, Human
ugauggugcaaug

SEQ ID NO: 1834815 - RNA, 16 nt, Human
ugauggugaugaaaug

SEQ ID NO: 1834816 - RNA, 15 nt, Human
ugauggugaugaaau

SEQ ID NO: 1834817 - RNA, 15 nt, Human
ugauggugcaaugac

SEQ ID NO: 1834818 - RNA, 19 nt, Human
ugauuaaauucuugcaaag

SEQ ID NO: 1834819 - RNA, 20 nt, Human
ugauuaaccacuucagcuga

SEQ ID NO: 1834820 - RNA, 15 nt, Human
agccacgguguucug

SEQ ID NO: 1834821 - RNA, 17 nt, Human
ugauuaauggaaauguu

SEQ ID NO: 1834822 - RNA, 16 nt, Human
agccacugcaccgggc

SEQ ID NO: 1834823 - RNA, 14 nt, Human
ugaugggauuuggu

SEQ ID NO: 1834824 - RNA, 19 nt, Human
ugauggggcccugccuccu

SEQ ID NO: 1834825 - RNA, 16 nt, Human
ugauggggcccugccu

SEQ ID NO: 1834826 - RNA, 15 nt, Human
ugauggggcccugcc

SEQ ID NO: 1834827 - RNA, 14 nt, Human
ugauggggcccugc

SEQ ID NO: 1834828 - RNA, 23 nt, Human
ugaugcuucuucagagacuccug

SEQ ID NO: 1834829 - RNA, 16 nt, Human
ugaugagaggaaauca

SEQ ID NO: 1834830 - RNA, 15 nt, Human
ugaugagaggaaauc

SEQ ID NO: 1834831 - RNA, 14 nt, Human
ugaugagaggaaau

SEQ ID NO: 1834832 - RNA, 13 nt, Human
ugaugagaggaaa

SEQ ID NO: 1834833 - RNA, 16 nt, Human
ugauccuaguuccacc

SEQ ID NO: 1834834 - RNA, 22 nt, Human
ugauccuaaugaaugcauaaaa

SEQ ID NO: 1834835 - RNA, 15 nt, Human
ugauccucccaccuc

SEQ ID NO: 1834836 - RNA, 22 nt, Human
ugauccucccaccucagccucc

SEQ ID NO: 1834837 - RNA, 16 nt, Human
ugauccucccaccuca

SEQ ID NO: 1834838 - RNA, 21 nt, Human
ugauccucccaccucagccuc

SEQ ID NO: 1834839 - RNA, 16 nt, Human
agcccacuguacuugc

SEQ ID NO: 1834840 - RNA, 14 nt, Human
agcccacuguacuu

SEQ ID NO: 1834841 - RNA, 13 nt, Human
agcccacuucugc

SEQ ID NO: 1834842 - RNA, 14 nt, Human
agcccacuucugcc

SEQ ID NO: 1834843 - RNA, 15 nt, Human
agcccacuucugcca

SEQ ID NO: 1834844 - RNA, 13 nt, Human
agccaguaaaugg

SEQ ID NO: 1834845 - RNA, 22 nt, Human
agccaguaaaugggggugcauu

SEQ ID NO: 1834846 - RNA, 21 nt, Human
agccaguaaaugggggugcau

SEQ ID NO: 1834847 - RNA, 22 nt, Human
ugauuuccguuaaaauaccagc

SEQ ID NO: 1834848 - RNA, 17 nt, Human
ugauuucagcucacugc

SEQ ID NO: 1834849 - RNA, 21 nt, Human
ugauuucagcaccuacagugu

SEQ ID NO: 1834850 - RNA, 17 nt, Human
ugauuuggggauauuuu

SEQ ID NO: 1834851 - RNA, 22 nt, Human
ugauucccaagcucugcuccuc

SEQ ID NO: 1834852 - RNA, 23 nt, Human
ugauucccaagcucugcuccucu

SEQ ID NO: 1834853 - RNA, 15 nt, Human
ugauucucaugccuc

SEQ ID NO: 1834854 - RNA, 14 nt, Human
ugauucucaugccu

SEQ ID NO: 1834855 - RNA, 13 nt, Human
ugauucucaugcc

SEQ ID NO: 1834856 - RNA, 16 nt, Human
ugauucucaugccuca

SEQ ID NO: 1834857 - RNA, 13 nt, Human
ugauucuccugcc

SEQ ID NO: 1834858 - RNA, 16 nt, Human
ugauucauaaugacuu

SEQ ID NO: 1834859 - RNA, 18 nt, Human
agcccaggaaaggcucca

SEQ ID NO: 1834860 - RNA, 21 nt, Human
ugauucauaaugacuuaagca

SEQ ID NO: 1834861 - RNA, 14 nt, Human
agcccaggaaaggc

SEQ ID NO: 1834862 - RNA, 23 nt, Human
agcccagcuugaaaccuucacuu

SEQ ID NO: 1834863 - RNA, 20 nt, Human
agccucagucucccucccuu

SEQ ID NO: 1834864 - RNA, 19 nt, Human
agccucagucucccucccu

SEQ ID NO: 1834865 - RNA, 16 nt, Human
agccucagucucccuc

SEQ ID NO: 1834866 - RNA, 13 nt, Human
agccucagucucc

SEQ ID NO: 1834867 - RNA, 22 nt, Human
agccucagucucccucccuugg

SEQ ID NO: 1834868 - RNA, 18 nt, Human
agccucacaguccuuacc

SEQ ID NO: 1834869 - RNA, 17 nt, Human
agccucacaguccuuac

SEQ ID NO: 1834870 - RNA, 20 nt, Human
agccucaaccuccugggcua

SEQ ID NO: 1834871 - RNA, 19 nt, Human
agccucaaccuccugggcu

SEQ ID NO: 1834872 - RNA, 18 nt, Human
agccgagaucacgccacu

SEQ ID NO: 1834873 - RNA, 20 nt, Human
ugcagccucaaccuccuggg

SEQ ID NO: 1834874 - RNA, 21 nt, Human
ugcagccucaaccuccugggc

SEQ ID NO: 1834875 - RNA, 22 nt, Human
ugcagccucaaccuccugggcu

SEQ ID NO: 1834876 - RNA, 23 nt, Human
ugcagccucaaccuccugggcua

SEQ ID NO: 1834877 - RNA, 21 nt, Human
agccuccaagcuccaucucca

SEQ ID NO: 1834878 - RNA, 17 nt, Human
agccuccaugcugccuc

SEQ ID NO: 1834879 - RNA, 23 nt, Human
agccucugaaaaccaauguucuc

SEQ ID NO: 1834880 - RNA, 18 nt, Human
ugcagacucuacagaggc

SEQ ID NO: 1834881 - RNA, 16 nt, Human
ugcagacucuacagag

SEQ ID NO: 1834882 - RNA, 17 nt, Human
ugcagacucuacagagg

SEQ ID NO: 1834883 - RNA, 16 nt, Human
agcccuuagcagggaa

SEQ ID NO: 1834884 - RNA, 21 nt, Human
agcccuuagcagggaaacagc

SEQ ID NO: 1834885 - RNA, 20 nt, Human
agccgagauagccaaggcca

SEQ ID NO: 1834886 - RNA, 21 nt, Human
agccgagauagccaaggccaa

SEQ ID NO: 1834887 - RNA, 17 nt, Human
agccgagaucacgccac

SEQ ID NO: 1834888 - RNA, 11 nt, Human
ugcacacauuu

SEQ ID NO: 1834889 - RNA, 12 nt, Human
ugcacacauuuu

SEQ ID NO: 1834890 - RNA, 13 nt, Human
ugcacacauuuuu

SEQ ID NO: 1834891 - RNA, 15 nt, Human
ugcacacauuuuuua

SEQ ID NO: 1834892 - RNA, 17 nt, Human
ugcacuccccugcuggg

SEQ ID NO: 1834893 - RNA, 16 nt, Human
ugcacuccccugcugg

SEQ ID NO: 1834894 - RNA, 19 nt, Human
ugcacuccccugcugggug

SEQ ID NO: 1834895 - RNA, 14 nt, Human
ugcagaagacagua

SEQ ID NO: 1834896 - RNA, 15 nt, Human
ugcagaagacaguau

SEQ ID NO: 1834897 - RNA, 22 nt, Human
ugcagacaggcaagcaccuccu

SEQ ID NO: 1834898 - RNA, 17 nt, Human
agcccugcuuugggcug

SEQ ID NO: 1834899 - RNA, 20 nt, Human
agcccugcuuugggcugccc

SEQ ID NO: 1834900 - RNA, 19 nt, Human
agcccugcuuugggcugcc

SEQ ID NO: 1834901 - RNA, 22 nt, Human
ugcacacaccagagcccaccuu

SEQ ID NO: 1834902 - RNA, 21 nt, Human
ugcacacaccagagcccaccu

SEQ ID NO: 1834903 - RNA, 17 nt, Human
ugcacacaccagagccc

SEQ ID NO: 1834904 - RNA, 18 nt, Human
ugcacacaccagagccca

SEQ ID NO: 1834905 - RNA, 14 nt, Human
agcccugguggcag

SEQ ID NO: 1834906 - RNA, 15 nt, Human
agcccugguggcagu

SEQ ID NO: 1834907 - RNA, 16 nt, Human
agcccugguggcagug

SEQ ID NO: 1834908 - RNA, 23 nt, Human
agccccauucugccugcccaggc

SEQ ID NO: 1834909 - RNA, 17 nt, Human
agccccaaaacucuccu

SEQ ID NO: 1834910 - RNA, 16 nt, Human
agccccaaaacucucc

SEQ ID NO: 1834911 - RNA, 18 nt, Human
agccccaaaacucuccuc

SEQ ID NO: 1834912 - RNA, 21 nt, Human
agccccauucugccugcccag

SEQ ID NO: 1834913 - RNA, 22 nt, Human
agccccauucugccugcccagg

SEQ ID NO: 1834914 - RNA, 21 nt, Human
ugcaaaccaucauugaaaucu

SEQ ID NO: 1834915 - RNA, 23 nt, Human
ugccucucugcaggucccuaaua

SEQ ID NO: 1834916 - RNA, 15 nt, Human
ugccucucugcaggu

SEQ ID NO: 1834917 - RNA, 14 nt, Human
ugccucugacacac

SEQ ID NO: 1834918 - RNA, 16 nt, Human
ugccucugacacacag

SEQ ID NO: 1834919 - RNA, 21 nt, Human
ugccucucugcaggucccuaa

SEQ ID NO: 1834920 - RNA, 11 nt, Human
ugccucugccu

SEQ ID NO: 1834921 - RNA, 12 nt, Human
ugccucugccuc

SEQ ID NO: 1834922 - RNA, 17 nt, Human
ugccugcccaggccccu

SEQ ID NO: 1834923 - RNA, 18 nt, Human
ugccugcccaggccccug

SEQ ID NO: 1834924 - RNA, 19 nt, Human
ugccugcccaggccccugc

SEQ ID NO: 1834925 - RNA, 23 nt, Human
agcugcuuuugucuaugggacuc

SEQ ID NO: 1834926 - RNA, 24 nt, Human
agcugcuuuugucuaugggacuca

SEQ ID NO: 1834927 - RNA, 13 nt, Human
agcugccuguuca

SEQ ID NO: 1834928 - RNA, 22 nt, Human
agcugcuuuugucuaugggacu

SEQ ID NO: 1834929 - RNA, 22 nt, Human
ugcccuuaccugccaggaagcc

SEQ ID NO: 1834930 - RNA, 18 nt, Human
ugcccugugggcccccaa

SEQ ID NO: 1834931 - RNA, 15 nt, Human
ugcccugugggcccc

SEQ ID NO: 1834932 - RNA, 15 nt, Human
agcucuucuccaggc

SEQ ID NO: 1834933 - RNA, 16 nt, Human
agcucuucuccaggcu

SEQ ID NO: 1834934 - RNA, 17 nt, Human
agcucuucuccaggcug

SEQ ID NO: 1834935 - RNA, 15 nt, Human
ugccucaccccuugc

SEQ ID NO: 1834936 - RNA, 20 nt, Human
ugccgcagcccugcagaggg

SEQ ID NO: 1834937 - RNA, 19 nt, Human
ugcccuuaccugccaggaa

SEQ ID NO: 1834938 - RNA, 17 nt, Human
ugccucucucaggccaa

SEQ ID NO: 1834939 - RNA, 12 nt, Human
ugccucucugca

SEQ ID NO: 1834940 - RNA, 11 nt, Human
ugccucucugc

SEQ ID NO: 1834941 - RNA, 15 nt, Human
ugccucagccucccg

SEQ ID NO: 1834942 - RNA, 15 nt, Human
ugccucagccuccug

SEQ ID NO: 1834943 - RNA, 17 nt, Human
ugccucagccuccugag

SEQ ID NO: 1834944 - RNA, 22 nt, Human
ugccucccaucacccgcuaaga

SEQ ID NO: 1834945 - RNA, 19 nt, Human
agcuccaagcucccaggca

SEQ ID NO: 1834946 - RNA, 18 nt, Human
agcuccaagcucccaggc

SEQ ID NO: 1834947 - RNA, 17 nt, Human
agcuccaagcucccagg

SEQ ID NO: 1834948 - RNA, 14 nt, Human
ugcccugcccaccu

SEQ ID NO: 1834949 - RNA, 13 nt, Human
agcuccagcucac

SEQ ID NO: 1834950 - RNA, 17 nt, Human
agcuccagcucaccagc

SEQ ID NO: 1834951 - RNA, 20 nt, Human
ugcccuaaugcgcaggcugg

SEQ ID NO: 1834952 - RNA, 23 nt, Human
ugcccuaaugcgcaggcuggccc

SEQ ID NO: 1834953 - RNA, 23 nt, Human
agcucugcccauccugccccuga

SEQ ID NO: 1834954 - RNA, 21 nt, Human
agcucugcagagcaggaaaca

SEQ ID NO: 1834955 - RNA, 22 nt, Human
agcuccuucuguccuacucugu

SEQ ID NO: 1834956 - RNA, 23 nt, Human
agcuccuucuguccuacucugug

SEQ ID NO: 1834957 - RNA, 21 nt, Human
agcuccaucuccacuccagau

SEQ ID NO: 1834958 - RNA, 21 nt, Human
agcuccagcucaccagcccca

SEQ ID NO: 1834959 - RNA, 18 nt, Human
agcuccagcucaccagcc

SEQ ID NO: 1834960 - RNA, 19 nt, Human
agcuccagcucaccagccc

SEQ ID NO: 1834961 - RNA, 17 nt, Human
agcuaucguaaaauuaa

SEQ ID NO: 1834962 - RNA, 21 nt, Human
agcuaggccuggccagaugca

SEQ ID NO: 1834963 - RNA, 13 nt, Human
agcgugagccacu

SEQ ID NO: 1834964 - RNA, 13 nt, Human
agcucagggccug

SEQ ID NO: 1834965 - RNA, 12 nt, Human
agcucagggccu

SEQ ID NO: 1834966 - RNA, 19 nt, Human
agcuauucaguaauaacuc

SEQ ID NO: 1834967 - RNA, 19 nt, Human
agcucagggccuggcucag

SEQ ID NO: 1834968 - RNA, 14 nt, Human
agcucagggccugg

SEQ ID NO: 1834969 - RNA, 20 nt, Human
agcucagggccuggcucagg

SEQ ID NO: 1834970 - RNA, 16 nt, Human
agcuccaagcucccag

SEQ ID NO: 1834971 - RNA, 15 nt, Human
agcuccaagcuccca

SEQ ID NO: 1834972 - RNA, 17 nt, Human
agcucaggugucccugc

SEQ ID NO: 1834973 - RNA, 17 nt, Human
ugcccagccccuucuga

SEQ ID NO: 1834974 - RNA, 16 nt, Human
ugcccagccccuucug

SEQ ID NO: 1834975 - RNA, 12 nt, Human
ugcccagccccu

SEQ ID NO: 1834976 - RNA, 13 nt, Human
ugcccagccccuu

SEQ ID NO: 1834977 - RNA, 20 nt, Human
ugcccaaagaugcagccggu

SEQ ID NO: 1834978 - RNA, 17 nt, Human
ugcccaaagaugcagcc

SEQ ID NO: 1834979 - RNA, 15 nt, Human
ugcccaggccccugc

SEQ ID NO: 1834980 - RNA, 17 nt, Human
ugcccaggccccugcca

SEQ ID NO: 1834981 - RNA, 18 nt, Human
ugcccaggccccugccac

SEQ ID NO: 1834982 - RNA, 23 nt, Human
ugccccgaacauguuuuucuucu

SEQ ID NO: 1834983 - RNA, 20 nt, Human
ugcccuaaaguguauuuuuu

SEQ ID NO: 1834984 - RNA, 18 nt, Human
ugcccccucugcccugcg

SEQ ID NO: 1834985 - RNA, 17 nt, Human
ugcccccucugcccugc

SEQ ID NO: 1834986 - RNA, 16 nt, Human
ugcccccucugcccug

SEQ ID NO: 1834987 - RNA, 15 nt, Human
ugcccccucugcccu

SEQ ID NO: 1834988 - RNA, 14 nt, Human
ugcccccucugccc

SEQ ID NO: 1834989 - RNA, 20 nt, Human
ugcauuugaggucuguucuu

SEQ ID NO: 1834990 - RNA, 21 nt, Human
ugcauuugaggucuguucuuu

SEQ ID NO: 1834991 - RNA, 17 nt, Human
ugccacugccucuuccu

SEQ ID NO: 1834992 - RNA, 13 nt, Human
ugccacugccucu

SEQ ID NO: 1834993 - RNA, 20 nt, Human
ugccacugccucuuccuccc

SEQ ID NO: 1834994 - RNA, 19 nt, Human
ugccacugccucuuccucc

SEQ ID NO: 1834995 - RNA, 18 nt, Human
ugccacugccucuuccuc

SEQ ID NO: 1834996 - RNA, 20 nt, Human
ugccagucccccugccccag

SEQ ID NO: 1834997 - RNA, 18 nt, Human
ugccagcuuaucucaggg

SEQ ID NO: 1834998 - RNA, 13 nt, Human
agcggcuggcagc

SEQ ID NO: 1834999 - RNA, 22 nt, Human
agcggggacagcuccuucuguc

SEQ ID NO: 1835000 - RNA, 23 nt, Human
agcggcuggcagcccaccccuca

SEQ ID NO: 1835001 - RNA, 19 nt, Human
agcggggacagcuccuucu

SEQ ID NO: 1835002 - RNA, 20 nt, Human
agcggggacagcuccuucug

SEQ ID NO: 1835003 - RNA, 22 nt, Human
agccuugaccauucuccaccug

SEQ ID NO: 1835004 - RNA, 23 nt, Human
agccuugaacuuugaccucugca

SEQ ID NO: 1835005 - RNA, 16 nt, Human
agccuugaacuuugac

SEQ ID NO: 1835006 - RNA, 22 nt, Human
agccuugaacuuugaccucugc

SEQ ID NO: 1835007 - RNA, 23 nt, Human
agccuugaccauucuccaccugc

SEQ ID NO: 1835008 - RNA, 22 nt, Human
agcgauucuucugcuucagccu

SEQ ID NO: 1835009 - RNA, 15 nt, Human
agccuugaacuuuga

SEQ ID NO: 1835010 - RNA, 18 nt, Human
agccuuccagggguggga

SEQ ID NO: 1835011 - RNA, 20 nt, Human
ugcauuuaaaagauacaguu

SEQ ID NO: 1835012 - RNA, 19 nt, Human
ugcauuugaggucuguucu

SEQ ID NO: 1835013 - RNA, 18 nt, Human
ugcauuugaggucuguuc

SEQ ID NO: 1835014 - RNA, 16 nt, Human
agcgcuggccgggacc

SEQ ID NO: 1835015 - RNA, 22 nt, Human
agcgcuggccgggaccccgagc

SEQ ID NO: 1835016 - RNA, 19 nt, Human
aggagcccugggaggcucu

SEQ ID NO: 1835017 - RNA, 16 nt, Human
ugcuugggcuucaucc

SEQ ID NO: 1835018 - RNA, 12 nt, Human
ugcuugggcuuc

SEQ ID NO: 1835019 - RNA, 21 nt, Human
ugcuuggaggaaggaaaccca

SEQ ID NO: 1835020 - RNA, 15 nt, Human
uggaaauauuaagaa

SEQ ID NO: 1835021 - RNA, 19 nt, Human
ugcuugggcuucauccucc

SEQ ID NO: 1835022 - RNA, 21 nt, Human
ugcuuugggcugcccuggugc

SEQ ID NO: 1835023 - RNA, 20 nt, Human
ugcuuugggcugcccuggug

SEQ ID NO: 1835024 - RNA, 19 nt, Human
ugcuuugggcugcccuggu

SEQ ID NO: 1835025 - RNA, 18 nt, Human
ugcuuugggcugcccugg

SEQ ID NO: 1835026 - RNA, 19 nt, Human
aggacucugccuccucuuc

SEQ ID NO: 1835027 - RNA, 19 nt, Human
aggacauugcggacagcca

SEQ ID NO: 1835028 - RNA, 23 nt, Human
aggacauugcggacagccacggc

SEQ ID NO: 1835029 - RNA, 15 nt, Human
aggacauugcggaca

SEQ ID NO: 1835030 - RNA, 17 nt, Human
aggacauugcggacagc

SEQ ID NO: 1835031 - RNA, 18 nt, Human
aggacauugcggacagcc

SEQ ID NO: 1835032 - RNA, 14 nt, Human
aggagcagccacau

SEQ ID NO: 1835033 - RNA, 18 nt, Human
aggagcccugggaggcuc

SEQ ID NO: 1835034 - RNA, 22 nt, Human
aggagccccgaggccuucucug

SEQ ID NO: 1835035 - RNA, 17 nt, Human
aggagaaacuggaacuc

SEQ ID NO: 1835036 - RNA, 17 nt, Human
aggagauuggaaggaac

SEQ ID NO: 1835037 - RNA, 11 nt, Human
aggagaaacug

SEQ ID NO: 1835038 - RNA, 23 nt, Human
aggacuuuucuuuguggcuuccu

SEQ ID NO: 1835039 - RNA, 23 nt, Human
uggaaaugggcagagcagagacc

SEQ ID NO: 1835040 - RNA, 20 nt, Human
uggaaauauuaagaaagacu

SEQ ID NO: 1835041 - RNA, 21 nt, Human
aggagggagcaucagugcccu

SEQ ID NO: 1835042 - RNA, 14 nt, Human
aggagggaggggga

SEQ ID NO: 1835043 - RNA, 16 nt, Human
aggauccugagccaga

SEQ ID NO: 1835044 - RNA, 15 nt, Human
aggauccugagccag

SEQ ID NO: 1835045 - RNA, 21 nt, Human
aggauacaaaagcaugugaga

SEQ ID NO: 1835046 - RNA, 22 nt, Human
aggaucucuugagccugggagg

SEQ ID NO: 1835047 - RNA, 21 nt, Human
aggaucucuugagccugggag

SEQ ID NO: 1835048 - RNA, 18 nt, Human
aggauccugagccagauu

SEQ ID NO: 1835049 - RNA, 17 nt, Human
aggauccugagccagau

SEQ ID NO: 1835050 - RNA, 17 nt, Human
aggaugaucuaggaaga

SEQ ID NO: 1835051 - RNA, 16 nt, Human
aggaugaucuaggaag

SEQ ID NO: 1835052 - RNA, 15 nt, Human
uggacacagcucuuc

SEQ ID NO: 1835053 - RNA, 16 nt, Human
uggacacagcucuucu

SEQ ID NO: 1835054 - RNA, 18 nt, Human
uggacacagcucuucucc

SEQ ID NO: 1835055 - RNA, 21 nt, Human
uggacacagcucuucuccagg

SEQ ID NO: 1835056 - RNA, 13 nt, Human
uggacccugaggc

SEQ ID NO: 1835057 - RNA, 12 nt, Human
uggacccugagg

SEQ ID NO: 1835058 - RNA, 14 nt, Human
uggacccugaggcc

SEQ ID NO: 1835059 - RNA, 17 nt, Human
aggcaacucaucuuagg

SEQ ID NO: 1835060 - RNA, 14 nt, Human
aggaugcccaaaga

SEQ ID NO: 1835061 - RNA, 20 nt, Human
aggaugaucuaggaagacuu

SEQ ID NO: 1835062 - RNA, 19 nt, Human
aggaugcccaaagaugcag

SEQ ID NO: 1835063 - RNA, 17 nt, Human
aggaugccccguccccc

SEQ ID NO: 1835064 - RNA, 19 nt, Human
aggauuuugauccaagcug

SEQ ID NO: 1835065 - RNA, 21 nt, Human
ugcucugcugacagacacagg

SEQ ID NO: 1835066 - RNA, 22 nt, Human
ugcucugcugacagacacaggc

SEQ ID NO: 1835067 - RNA, 14 nt, Human
ugcugagucugaag

SEQ ID NO: 1835068 - RNA, 15 nt, Human
ugcugagucugaagg

SEQ ID NO: 1835069 - RNA, 14 nt, Human
ugcugacuguacuc

SEQ ID NO: 1835070 - RNA, 20 nt, Human
ugcuccagcuguucagcugg

SEQ ID NO: 1835071 - RNA, 19 nt, Human
ugcuccagcuguucagcug

SEQ ID NO: 1835072 - RNA, 16 nt, Human
ugcuccagcuguucag

SEQ ID NO: 1835073 - RNA, 19 nt, Human
agcugggacuacaggcacc

SEQ ID NO: 1835074 - RNA, 16 nt, Human
agcugggacuacaggc

SEQ ID NO: 1835075 - RNA, 18 nt, Human
agcugggacuacaggcac

SEQ ID NO: 1835076 - RNA, 19 nt, Human
aggaagacuucaucccucu

SEQ ID NO: 1835077 - RNA, 13 nt, Human
aggaagacuucau

SEQ ID NO: 1835078 - RNA, 23 nt, Human
ugcugagucugaaggcuggguuc

SEQ ID NO: 1835079 - RNA, 22 nt, Human
ugcugagucugaaggcuggguu

SEQ ID NO: 1835080 - RNA, 21 nt, Human
ugcugagucugaaggcugggu

SEQ ID NO: 1835081 - RNA, 18 nt, Human
ugcugagucugaaggcug

SEQ ID NO: 1835082 - RNA, 17 nt, Human
ugcugagucugaaggcu

SEQ ID NO: 1835083 - RNA, 16 nt, Human
ugcugagucugaaggc

SEQ ID NO: 1835084 - RNA, 24 nt, Human
aggaagcacaugccucucucaggc

SEQ ID NO: 1835085 - RNA, 23 nt, Human
aggaagcacaugccucucucagg

SEQ ID NO: 1835086 - RNA, 14 nt, Human
aggaagacuuugga

SEQ ID NO: 1835087 - RNA, 13 nt, Human
aggaagacuuugg

SEQ ID NO: 1835088 - RNA, 15 nt, Human
aggaagccagcaggc

SEQ ID NO: 1835089 - RNA, 14 nt, Human
aggaagccagcagg

SEQ ID NO: 1835090 - RNA, 18 nt, Human
aggaagccagcaggcucu

SEQ ID NO: 1835091 - RNA, 17 nt, Human
aggaagccagcaggcuc

SEQ ID NO: 1835092 - RNA, 18 nt, Human
aggaaggaaacccagcuc

SEQ ID NO: 1835093 - RNA, 15 nt, Human
aggaaggagaggaga

SEQ ID NO: 1835094 - RNA, 19 nt, Human
aggaaggaaacccagcucu

SEQ ID NO: 1835095 - RNA, 23 nt, Human
aggaauuguguuuauaauuuuaa

SEQ ID NO: 1835096 - RNA, 23 nt, Human
aggaauugacccacaagaaauga

SEQ ID NO: 1835097 - RNA, 11 nt, Human
aggaauuuaaa

SEQ ID NO: 1835098 - RNA, 13 nt, Human
ugcuggagcucug

SEQ ID NO: 1835099 - RNA, 14 nt, Human
ugcuggagcucugc

SEQ ID NO: 1835100 - RNA, 15 nt, Human
ugcugcccugugagu

SEQ ID NO: 1835101 - RNA, 20 nt, Human
aggaauuuuauuuuuuucug

SEQ ID NO: 1835102 - RNA, 14 nt, Human
ugcugcccugugag

SEQ ID NO: 1835103 - RNA, 13 nt, Human
ugcugcccuguga

SEQ ID NO: 1835104 - RNA, 12 nt, Human
ugcugcccugug

SEQ ID NO: 1835105 - RNA, 21 nt, Human
ugcuggcugccuuagaaccuu

SEQ ID NO: 1835106 - RNA, 14 nt, Human
ugcuggcugccuua

SEQ ID NO: 1835107 - RNA, 15 nt, Human
ugcuggcugccuuag

SEQ ID NO: 1835108 - RNA, 16 nt, Human
ugcuggcugguuagag

SEQ ID NO: 1835109 - RNA, 18 nt, Human
ugcuggcuguuggcuggg

SEQ ID NO: 1835110 - RNA, 22 nt, Human
aggacagggaggugaccccagg

SEQ ID NO: 1835111 - RNA, 14 nt, Human
ugcuucaucccuuu

SEQ ID NO: 1835112 - RNA, 23 nt, Human
aggacacuaaccacgcuggaccu

SEQ ID NO: 1835113 - RNA, 19 nt, Human
aggacacuaaccacgcugg

SEQ ID NO: 1835114 - RNA, 19 nt, Human
ugcuucaaggauccugagc

SEQ ID NO: 1835115 - RNA, 18 nt, Human
ugcuucaaggauccugag

SEQ ID NO: 1835116 - RNA, 16 nt, Human
ugcuucaaggauccug

SEQ ID NO: 1835117 - RNA, 13 nt, Human
ugcuucagccucc

SEQ ID NO: 1835118 - RNA, 14 nt, Human
ugcuucagccuccc

SEQ ID NO: 1835119 - RNA, 12 nt, Human
ugcuucaaggau

SEQ ID NO: 1835120 - RNA, 13 nt, Human
ugcuuauacacuu

SEQ ID NO: 1835121 - RNA, 13 nt, Human
aggccugccuguu

SEQ ID NO: 1835122 - RNA, 15 nt, Human
uggcaugggaaugaa

SEQ ID NO: 1835123 - RNA, 12 nt, Human
uggcaugggaau

SEQ ID NO: 1835124 - RNA, 20 nt, Human
uggccaggcuggucucgaac

SEQ ID NO: 1835125 - RNA, 16 nt, Human
uggccaaguucuuagu

SEQ ID NO: 1835126 - RNA, 15 nt, Human
uggccaggcuggucu

SEQ ID NO: 1835127 - RNA, 17 nt, Human
uggccaggcuggucuca

SEQ ID NO: 1835128 - RNA, 14 nt, Human
aggcccucugccca

SEQ ID NO: 1835129 - RNA, 13 nt, Human
aggcccucugccc

SEQ ID NO: 1835130 - RNA, 15 nt, Human
aggcccucugcccac

SEQ ID NO: 1835131 - RNA, 18 nt, Human
uggccucugcacuccccu

SEQ ID NO: 1835132 - RNA, 17 nt, Human
uggccucugcacucccc

SEQ ID NO: 1835133 - RNA, 15 nt, Human
uggccucugcacucc

SEQ ID NO: 1835134 - RNA, 14 nt, Human
uggccucugcacuc

SEQ ID NO: 1835135 - RNA, 23 nt, Human
aggccugggggcugggcagagga

SEQ ID NO: 1835136 - RNA, 12 nt, Human
uggccuggcccc

SEQ ID NO: 1835137 - RNA, 22 nt, Human
aggccuggccagaugcaccagc

SEQ ID NO: 1835138 - RNA, 23 nt, Human
aggccuggccagaugcaccagcc

SEQ ID NO: 1835139 - RNA, 15 nt, Human
aggccuggccagaug

SEQ ID NO: 1835140 - RNA, 16 nt, Human
aggccuggccagaugc

SEQ ID NO: 1835141 - RNA, 17 nt, Human
aggccuggccagaugca

SEQ ID NO: 1835142 - RNA, 21 nt, Human
aggccuggccagaugcaccag

SEQ ID NO: 1835143 - RNA, 15 nt, Human
uggccgggagccuga

SEQ ID NO: 1835144 - RNA, 23 nt, Human
uggccgggaccccgagccuggcu

SEQ ID NO: 1835145 - RNA, 17 nt, Human
uggccgggaccccgagc

SEQ ID NO: 1835146 - RNA, 15 nt, Human
uggccgggaccccga

SEQ ID NO: 1835147 - RNA, 17 nt, Human
uggcccgacagccuggc

SEQ ID NO: 1835148 - RNA, 16 nt, Human
uggcccgacagccugg

SEQ ID NO: 1835149 - RNA, 15 nt, Human
uggcccgacagccug

SEQ ID NO: 1835150 - RNA, 14 nt, Human
uggcccgacagccu

SEQ ID NO: 1835151 - RNA, 19 nt, Human
uggcccgacagccuggcac

SEQ ID NO: 1835152 - RNA, 18 nt, Human
uggcccgacagccuggca

SEQ ID NO: 1835153 - RNA, 21 nt, Human
uggccccugcccggcugcgga

SEQ ID NO: 1835154 - RNA, 12 nt, Human
uggcagccccug

SEQ ID NO: 1835155 - RNA, 16 nt, Human
uggcagccgugccuuc

SEQ ID NO: 1835156 - RNA, 20 nt, Human
aggccacaagacccuugugg

SEQ ID NO: 1835157 - RNA, 16 nt, Human
uggcagccucuucaaa

SEQ ID NO: 1835158 - RNA, 15 nt, Human
uggcagccucuucaa

SEQ ID NO: 1835159 - RNA, 23 nt, Human
uggcagccgugccuucagcucua

SEQ ID NO: 1835160 - RNA, 12 nt, Human
aggccagagaca

SEQ ID NO: 1835161 - RNA, 13 nt, Human
uggcagccuuggc

SEQ ID NO: 1835162 - RNA, 21 nt, Human
uggcacaucagcacgauuucu

SEQ ID NO: 1835163 - RNA, 15 nt, Human
uggcacccggccccu

SEQ ID NO: 1835164 - RNA, 21 nt, Human
uggcagaguugaagacagagc

SEQ ID NO: 1835165 - RNA, 16 nt, Human
uggcacccggccccug

SEQ ID NO: 1835166 - RNA, 22 nt, Human
uggcagaguugaagacagagcu

SEQ ID NO: 1835167 - RNA, 18 nt, Human
uggcaccagcagccugga

SEQ ID NO: 1835168 - RNA, 20 nt, Human
uggcacaucagcacgauuuc

SEQ ID NO: 1835169 - RNA, 22 nt, Human
uggauuaaacuuaaucuaaaug

SEQ ID NO: 1835170 - RNA, 12 nt, Human
uggauguucuga

SEQ ID NO: 1835171 - RNA, 15 nt, Human
aggccacaagacccu

SEQ ID NO: 1835172 - RNA, 19 nt, Human
uggagucagacagaugugg

SEQ ID NO: 1835173 - RNA, 20 nt, Human
uggaguucaucuugaauugu

SEQ ID NO: 1835174 - RNA, 15 nt, Human
uggaugccugguggc

SEQ ID NO: 1835175 - RNA, 17 nt, Human
uggaguucaucuugaau

SEQ ID NO: 1835176 - RNA, 16 nt, Human
uggaguucaucuugaa

SEQ ID NO: 1835177 - RNA, 20 nt, Human
uggaugccugguggcagcug

SEQ ID NO: 1835178 - RNA, 18 nt, Human
uggaugccugguggcagc

SEQ ID NO: 1835179 - RNA, 19 nt, Human
uggaugccugguggcagcu

SEQ ID NO: 1835180 - RNA, 18 nt, Human
aggccaaggugggaggau

SEQ ID NO: 1835181 - RNA, 22 nt, Human
aggccaacccaaaauaagcagg

SEQ ID NO: 1835182 - RNA, 23 nt, Human
aggccaaaggaagcacaugccuc

SEQ ID NO: 1835183 - RNA, 15 nt, Human
aggccaaaggaagca

SEQ ID NO: 1835184 - RNA, 14 nt, Human
aggccaaaggaagc

SEQ ID NO: 1835185 - RNA, 20 nt, Human
aggccaaacucaccugcccc

SEQ ID NO: 1835186 - RNA, 18 nt, Human
aggcauuuguuugaacug

SEQ ID NO: 1835187 - RNA, 16 nt, Human
aggccaaacucaccug

SEQ ID NO: 1835188 - RNA, 13 nt, Human
aggccaaaaaaau

SEQ ID NO: 1835189 - RNA, 18 nt, Human
uggacgagaaaacaauaa

SEQ ID NO: 1835190 - RNA, 20 nt, Human
aggcucucaggccagcugcu

SEQ ID NO: 1835191 - RNA, 19 nt, Human
aggcucucaggccagcugc

SEQ ID NO: 1835192 - RNA, 18 nt, Human
aggcucucaggccagcug

SEQ ID NO: 1835193 - RNA, 16 nt, Human
aggcucucaggccagc

SEQ ID NO: 1835194 - RNA, 15 nt, Human
aggcucucaggccag

SEQ ID NO: 1835195 - RNA, 14 nt, Human
aggcucucaggcca

SEQ ID NO: 1835196 - RNA, 12 nt, Human
aggcucucaggc

SEQ ID NO: 1835197 - RNA, 11 nt, Human
aggcucucagg

SEQ ID NO: 1835198 - RNA, 15 nt, Human
aggcucugcccuugg

SEQ ID NO: 1835199 - RNA, 14 nt, Human
aggcucugcccuug

SEQ ID NO: 1835200 - RNA, 13 nt, Human
aggcucugcccuu

SEQ ID NO: 1835201 - RNA, 12 nt, Human
aggcucugcccu

SEQ ID NO: 1835202 - RNA, 11 nt, Human
aggcucugccc

SEQ ID NO: 1835203 - RNA, 21 nt, Human
aggcucucaggccagcugcuu

SEQ ID NO: 1835204 - RNA, 19 nt, Human
aggcucgagcaugccugga

SEQ ID NO: 1835205 - RNA, 18 nt, Human
aggcucgagcaugccugg

SEQ ID NO: 1835206 - RNA, 17 nt, Human
aggcucgagcaugccug

SEQ ID NO: 1835207 - RNA, 15 nt, Human
aggcucgagcaugcc

SEQ ID NO: 1835208 - RNA, 21 nt, Human
aggcucgagcaugccuggaug

SEQ ID NO: 1835209 - RNA, 14 nt, Human
aggcuccugccacc

SEQ ID NO: 1835210 - RNA, 20 nt, Human
aggcuccugccaccacgccc

SEQ ID NO: 1835211 - RNA, 12 nt, Human
aggcucgagcau

SEQ ID NO: 1835212 - RNA, 19 nt, Human
aggcuccuuuagcgcccag

SEQ ID NO: 1835213 - RNA, 23 nt, Human
aggcugcucuugaacuccugacc

SEQ ID NO: 1835214 - RNA, 16 nt, Human
aggcucugcccuuggu

SEQ ID NO: 1835215 - RNA, 13 nt, Human
aggcucuggagcc

SEQ ID NO: 1835216 - RNA, 15 nt, Human
aggcucuggagccca

SEQ ID NO: 1835217 - RNA, 14 nt, Human
aggcucuggagccc

SEQ ID NO: 1835218 - RNA, 19 nt, Human
aggcucuggagcccacugu

SEQ ID NO: 1835219 - RNA, 18 nt, Human
aggcucuggagcccacug

SEQ ID NO: 1835220 - RNA, 14 nt, Human
aggcuggcccugcc

SEQ ID NO: 1835221 - RNA, 12 nt, Human
aggcuggcccug

SEQ ID NO: 1835222 - RNA, 18 nt, Human
aggcuggcccugcccugg

SEQ ID NO: 1835223 - RNA, 17 nt, Human
aggcuggcccugcccug

SEQ ID NO: 1835224 - RNA, 16 nt, Human
aggcuggcccugcccu

SEQ ID NO: 1835225 - RNA, 15 nt, Human
aggcuggcccugccc

SEQ ID NO: 1835226 - RNA, 19 nt, Human
aggcuggcccugcccuggu

SEQ ID NO: 1835227 - RNA, 13 nt, Human
aggcuggcgugca

SEQ ID NO: 1835228 - RNA, 17 nt, Human
aggcuggcgugcagugg

SEQ ID NO: 1835229 - RNA, 16 nt, Human
ugggaaaggggaaguu

SEQ ID NO: 1835230 - RNA, 16 nt, Human
uggcuucccgcucagc

SEQ ID NO: 1835231 - RNA, 15 nt, Human
uggcuucccgcucag

SEQ ID NO: 1835232 - RNA, 17 nt, Human
uggcuucccgcucagcc

SEQ ID NO: 1835233 - RNA, 13 nt, Human
ugggaacuagacu

SEQ ID NO: 1835234 - RNA, 23 nt, Human
uggcuucacggaagagccuugcg

SEQ ID NO: 1835235 - RNA, 22 nt, Human
uggcuucacggaagagccuugc

SEQ ID NO: 1835236 - RNA, 14 nt, Human
uggcugugucuccc

SEQ ID NO: 1835237 - RNA, 13 nt, Human
uggcuguuggcug

SEQ ID NO: 1835238 - RNA, 15 nt, Human
uggcuguuggcuggg

SEQ ID NO: 1835239 - RNA, 17 nt, Human
uggcuuaaaacaacacu

SEQ ID NO: 1835240 - RNA, 11 nt, Human
uggcugcugaa

SEQ ID NO: 1835241 - RNA, 20 nt, Human
uggcugccaaugggagcuca

SEQ ID NO: 1835242 - RNA, 18 nt, Human
uggcugccaaugggagcu

SEQ ID NO: 1835243 - RNA, 15 nt, Human
uggcugcagggaguc

SEQ ID NO: 1835244 - RNA, 13 nt, Human
uggcugcagggag

SEQ ID NO: 1835245 - RNA, 14 nt, Human
uggcugcagggagu

SEQ ID NO: 1835246 - RNA, 12 nt, Human
uggcugcaaagg

SEQ ID NO: 1835247 - RNA, 21 nt, Human
uggcucuuccaggcugggaga

SEQ ID NO: 1835248 - RNA, 20 nt, Human
uggcucuuccaggcugggag

SEQ ID NO: 1835249 - RNA, 19 nt, Human
uggcucuuccaggcuggga

SEQ ID NO: 1835250 - RNA, 18 nt, Human
uggcucaaguccucuuuu

SEQ ID NO: 1835251 - RNA, 15 nt, Human
uggcuaugcauuuga

SEQ ID NO: 1835252 - RNA, 17 nt, Human
uggcuaugcauuugaaa

SEQ ID NO: 1835253 - RNA, 14 nt, Human
uggcuaugcauuug

SEQ ID NO: 1835254 - RNA, 19 nt, Human
uggcuaugcauuugaaaau

SEQ ID NO: 1835255 - RNA, 22 nt, Human
uggcuauuagagaucaaccccu

SEQ ID NO: 1835256 - RNA, 14 nt, Human
aggcugggagagcc

SEQ ID NO: 1835257 - RNA, 22 nt, Human
uggcuagagguucaaagauauu

SEQ ID NO: 1835258 - RNA, 18 nt, Human
aggcuggcgugcaguggu

SEQ ID NO: 1835259 - RNA, 20 nt, Human
aggcuggcgugcaguggugc

SEQ ID NO: 1835260 - RNA, 11 nt, Human
uucuucucccu

SEQ ID NO: 1835261 - RNA, 22 nt, Human
uucuucuccacuuucuagccag

SEQ ID NO: 1835262 - RNA, 17 nt, Human
uucuuucuggcuaugca

SEQ ID NO: 1835263 - RNA, 20 nt, Human
uucuuucuggcuaugcauuu

SEQ ID NO: 1835264 - RNA, 12 nt, Human
uucuuucuggcu

SEQ ID NO: 1835265 - RNA, 13 nt, Human
uucuguuuagaua

SEQ ID NO: 1835266 - RNA, 18 nt, Human
uucuguuuagauaauaca

SEQ ID NO: 1835267 - RNA, 23 nt, Human
uucuuaaccagaucauugugaaa

SEQ ID NO: 1835268 - RNA, 22 nt, Human
uucuuaaccagaucauugugaa

SEQ ID NO: 1835269 - RNA, 11 nt, Human
aucccagcccc

SEQ ID NO: 1835270 - RNA, 12 nt, Human
aucccagcccca

SEQ ID NO: 1835271 - RNA, 16 nt, Human
aucccaugagccucag

SEQ ID NO: 1835272 - RNA, 17 nt, Human
aucccugaaggccccgc

SEQ ID NO: 1835273 - RNA, 22 nt, Human
aucccugaaggccccgcccagg

SEQ ID NO: 1835274 - RNA, 17 nt, Human
aucccaugagccucagc

SEQ ID NO: 1835275 - RNA, 18 nt, Human
aucccaugagccucagca

SEQ ID NO: 1835276 - RNA, 14 nt, Human
auccaguaucuuga

SEQ ID NO: 1835277 - RNA, 15 nt, Human
auccaguaucuugaa

SEQ ID NO: 1835278 - RNA, 13 nt, Human
auccaauuggaua

SEQ ID NO: 1835279 - RNA, 17 nt, Human
auccagguucagcuugu

SEQ ID NO: 1835280 - RNA, 15 nt, Human
uucugccugcccagg

SEQ ID NO: 1835281 - RNA, 16 nt, Human
uucugccugcccaggc

SEQ ID NO: 1835282 - RNA, 16 nt, Human
auccaagcaaauguga

SEQ ID NO: 1835283 - RNA, 19 nt, Human
aucauugugaaauuauuca

SEQ ID NO: 1835284 - RNA, 15 nt, Human
aucauugugaaauua

SEQ ID NO: 1835285 - RNA, 13 nt, Human
aucauugugaaau

SEQ ID NO: 1835286 - RNA, 13 nt, Human
aucauugaaaucu

SEQ ID NO: 1835287 - RNA, 12 nt, Human
aucauugaaauc

SEQ ID NO: 1835288 - RNA, 22 nt, Human
uucuccuuucacaaccuucugu

SEQ ID NO: 1835289 - RNA, 18 nt, Human
uucuccuuucacaaccuu

SEQ ID NO: 1835290 - RNA, 21 nt, Human
uucucuaguuugauuaaauuc

SEQ ID NO: 1835291 - RNA, 17 nt, Human
aucaggugcugccaucc

SEQ ID NO: 1835292 - RNA, 19 nt, Human
aucaggugcugccauccag

SEQ ID NO: 1835293 - RNA, 23 nt, Human
aucacuugaacccgggaggcaga

SEQ ID NO: 1835294 - RNA, 15 nt, Human
aucaggugcugccau

SEQ ID NO: 1835295 - RNA, 15 nt, Human
aucagugcccuccag

SEQ ID NO: 1835296 - RNA, 13 nt, Human
aucagugcccucc

SEQ ID NO: 1835297 - RNA, 17 nt, Human
aucagugcccuccagga

SEQ ID NO: 1835298 - RNA, 19 nt, Human
aucagucugauucccaagc

SEQ ID NO: 1835299 - RNA, 15 nt, Human
aucauaaaacuugau

SEQ ID NO: 1835300 - RNA, 16 nt, Human
aucauuaggugugacu

SEQ ID NO: 1835301 - RNA, 21 nt, Human
aucauccacugugccaugugc

SEQ ID NO: 1835302 - RNA, 23 nt, Human
aucauccacugugccaugugcca

SEQ ID NO: 1835303 - RNA, 24 nt, Human
uugaccauucuccaccugccaggg

SEQ ID NO: 1835304 - RNA, 19 nt, Human
uugacacuuaaaaaugguu

SEQ ID NO: 1835305 - RNA, 19 nt, Human
uugacagggcacaccgggc

SEQ ID NO: 1835306 - RNA, 13 nt, Human
uugacaucaacug

SEQ ID NO: 1835307 - RNA, 19 nt, Human
uugaccauucuccaccugc

SEQ ID NO: 1835308 - RNA, 18 nt, Human
uugaccauucuccaccug

SEQ ID NO: 1835309 - RNA, 16 nt, Human
uugaggucuguucuuu

SEQ ID NO: 1835310 - RNA, 15 nt, Human
uugaggucuguucuu

SEQ ID NO: 1835311 - RNA, 12 nt, Human
uugauaaaguaa

SEQ ID NO: 1835312 - RNA, 18 nt, Human
aucgucacugcuuaacuu

SEQ ID NO: 1835313 - RNA, 14 nt, Human
aucgucacugcuua

SEQ ID NO: 1835314 - RNA, 14 nt, Human
aucgugacaacacu

SEQ ID NO: 1835315 - RNA, 15 nt, Human
aucgugacaacacuu

SEQ ID NO: 1835316 - RNA, 19 nt, Human
aucuaaauggaaccacucu

SEQ ID NO: 1835317 - RNA, 15 nt, Human
aucuaaacugccccc

SEQ ID NO: 1835318 - RNA, 15 nt, Human
aucuaaauguugaaa

SEQ ID NO: 1835319 - RNA, 17 nt, Human
uugacacuuaaaaaugg

SEQ ID NO: 1835320 - RNA, 16 nt, Human
auccugcaauuccacu

SEQ ID NO: 1835321 - RNA, 22 nt, Human
auccugaggcuccacuuggucu

SEQ ID NO: 1835322 - RNA, 13 nt, Human
auccugccccuga

SEQ ID NO: 1835323 - RNA, 11 nt, Human
auccugaggcu

SEQ ID NO: 1835324 - RNA, 13 nt, Human
auccugaggcucc

SEQ ID NO: 1835325 - RNA, 16 nt, Human
auccugaggcuccacu

SEQ ID NO: 1835326 - RNA, 18 nt, Human
auccugaggcuccacuug

SEQ ID NO: 1835327 - RNA, 21 nt, Human
auccugagccagauuucacuc

SEQ ID NO: 1835328 - RNA, 17 nt, Human
auccugagccagauuuc

SEQ ID NO: 1835329 - RNA, 15 nt, Human
auccugagccagauu

SEQ ID NO: 1835330 - RNA, 14 nt, Human
auccugagccagau

SEQ ID NO: 1835331 - RNA, 13 nt, Human
auccugagccaga

SEQ ID NO: 1835332 - RNA, 12 nt, Human
auccugagccag

SEQ ID NO: 1835333 - RNA, 11 nt, Human
auccugagcca

SEQ ID NO: 1835334 - RNA, 17 nt, Human
auccucuuugagugaag

SEQ ID NO: 1835335 - RNA, 20 nt, Human
uucuuuugccguuauuaaaa

SEQ ID NO: 1835336 - RNA, 20 nt, Human
auccucuguacagagcccac

SEQ ID NO: 1835337 - RNA, 18 nt, Human
auccucuguacagagccc

SEQ ID NO: 1835338 - RNA, 15 nt, Human
auccuggaguucugg

SEQ ID NO: 1835339 - RNA, 19 nt, Human
auccugcuucugauaugca

SEQ ID NO: 1835340 - RNA, 21 nt, Human
auccugcuucugauaugcagu

SEQ ID NO: 1835341 - RNA, 17 nt, Human
auccuggcacccggccc

SEQ ID NO: 1835342 - RNA, 19 nt, Human
auccuggcacccggccccu

SEQ ID NO: 1835343 - RNA, 20 nt, Human
auccuggcacccggccccug

SEQ ID NO: 1835344 - RNA, 21 nt, Human
auccuggcacccggccccugc

SEQ ID NO: 1835345 - RNA, 22 nt, Human
auccuggcacccggccccugcu

SEQ ID NO: 1835346 - RNA, 23 nt, Human
auccuggcacccggccccugcug

SEQ ID NO: 1835347 - RNA, 20 nt, Human
auccuggcugucgagaaaca

SEQ ID NO: 1835348 - RNA, 17 nt, Human
aucguaaaauuaagaaa

SEQ ID NO: 1835349 - RNA, 14 nt, Human
aucguaaaauuaag

SEQ ID NO: 1835350 - RNA, 13 nt, Human
aucguaaaauuaa

SEQ ID NO: 1835351 - RNA, 12 nt, Human
aucguaaaauua

SEQ ID NO: 1835352 - RNA, 17 nt, Human
auauuaccacagacaua

SEQ ID NO: 1835353 - RNA, 22 nt, Human
auauuaagaaagacuaucuaaa

SEQ ID NO: 1835354 - RNA, 17 nt, Human
auauuaagaaagacuau

SEQ ID NO: 1835355 - RNA, 15 nt, Human
auauuaagaaagacu

SEQ ID NO: 1835356 - RNA, 16 nt, Human
auauuaagaaagacua

SEQ ID NO: 1835357 - RNA, 16 nt, Human
uuccagugaggcucug

SEQ ID NO: 1835358 - RNA, 15 nt, Human
uuccagugaggcucu

SEQ ID NO: 1835359 - RNA, 22 nt, Human
uuccagugaaaucaguuacucu

SEQ ID NO: 1835360 - RNA, 16 nt, Human
auauguucugacauaa

SEQ ID NO: 1835361 - RNA, 22 nt, Human
auauugcugauggugcaaugac

SEQ ID NO: 1835362 - RNA, 12 nt, Human
auauuguacagu

SEQ ID NO: 1835363 - RNA, 19 nt, Human
auauuaccacagacauacu

SEQ ID NO: 1835364 - RNA, 21 nt, Human
auauuccugcauuugugaaau

SEQ ID NO: 1835365 - RNA, 15 nt, Human
auauugauaugcuua

SEQ ID NO: 1835366 - RNA, 17 nt, Human
auauuguuuucagugua

SEQ ID NO: 1835367 - RNA, 13 nt, Human
auauuguuuucag

SEQ ID NO: 1835368 - RNA, 13 nt, Human
auauuguacaguu

SEQ ID NO: 1835369 - RNA, 14 nt, Human
auauuguacaguuu

SEQ ID NO: 1835370 - RNA, 13 nt, Human
auauuuacaaaug

SEQ ID NO: 1835371 - RNA, 21 nt, Human
aucaacugcaucaagauguga

SEQ ID NO: 1835372 - RNA, 15 nt, Human
aucacgccacugcac

SEQ ID NO: 1835373 - RNA, 17 nt, Human
aucacgccacugcacua

SEQ ID NO: 1835374 - RNA, 13 nt, Human
aucaauuuaaaaa

SEQ ID NO: 1835375 - RNA, 16 nt, Human
aucaauucauaucuau

SEQ ID NO: 1835376 - RNA, 21 nt, Human
uuccuaaauauauuuuaagac

SEQ ID NO: 1835377 - RNA, 18 nt, Human
uuccucuccacugccuuc

SEQ ID NO: 1835378 - RNA, 16 nt, Human
uuccucuccacugccu

SEQ ID NO: 1835379 - RNA, 19 nt, Human
uuccucuccacugccuucg

SEQ ID NO: 1835380 - RNA, 13 nt, Human
uuccucugagccu

SEQ ID NO: 1835381 - RNA, 19 nt, Human
uuccuggcacugcuuccag

SEQ ID NO: 1835382 - RNA, 22 nt, Human
uuccucuuuuuauuuaguuccu

SEQ ID NO: 1835383 - RNA, 22 nt, Human
uuccuggcacugcuuccaguga

SEQ ID NO: 1835384 - RNA, 20 nt, Human
uuccuggcacugcuuccagu

SEQ ID NO: 1835385 - RNA, 12 nt, Human
uucccgcucagc

SEQ ID NO: 1835386 - RNA, 15 nt, Human
uucccgcucagcccu

SEQ ID NO: 1835387 - RNA, 14 nt, Human
uucccgcucagccc

SEQ ID NO: 1835388 - RNA, 13 nt, Human
uucccuacuuccu

SEQ ID NO: 1835389 - RNA, 15 nt, Human
uucccuuuuuuuaag

SEQ ID NO: 1835390 - RNA, 23 nt, Human
auauguaccuaacgaaguauccu

SEQ ID NO: 1835391 - RNA, 21 nt, Human
auauguggaguucaucuugaa

SEQ ID NO: 1835392 - RNA, 20 nt, Human
auauguggaguucaucuuga

SEQ ID NO: 1835393 - RNA, 17 nt, Human
uuccagguuuaagcugu

SEQ ID NO: 1835394 - RNA, 18 nt, Human
uuccagguuuaagcuguu

SEQ ID NO: 1835395 - RNA, 17 nt, Human
uuccaggcugggagagc

SEQ ID NO: 1835396 - RNA, 15 nt, Human
uuccaggcugggaga

SEQ ID NO: 1835397 - RNA, 13 nt, Human
uuccaggcuggga

SEQ ID NO: 1835398 - RNA, 18 nt, Human
uuccaccaucaagccacc

SEQ ID NO: 1835399 - RNA, 15 nt, Human
uuccaccuucccaug

SEQ ID NO: 1835400 - RNA, 21 nt, Human
uuccacaagagcccaggccuc

SEQ ID NO: 1835401 - RNA, 22 nt, Human
uuccaauuuacauacucugcuu

SEQ ID NO: 1835402 - RNA, 14 nt, Human
uucaggguuggccc

SEQ ID NO: 1835403 - RNA, 16 nt, Human
uucaggguuggccccu

SEQ ID NO: 1835404 - RNA, 17 nt, Human
uucaggguuggccccug

SEQ ID NO: 1835405 - RNA, 19 nt, Human
uucaggguuggccccugcc

SEQ ID NO: 1835406 - RNA, 22 nt, Human
uucaggguuggccccugcccgg

SEQ ID NO: 1835407 - RNA, 15 nt, Human
uucagguaacaggca

SEQ ID NO: 1835408 - RNA, 16 nt, Human
uucagguaacaggcag

SEQ ID NO: 1835409 - RNA, 14 nt, Human
uucagccaagaauu

SEQ ID NO: 1835410 - RNA, 20 nt, Human
uucagccugccuucuuuucu

SEQ ID NO: 1835411 - RNA, 15 nt, Human
uucagccugccuucu

SEQ ID NO: 1835412 - RNA, 22 nt, Human
uucagauauaaaagacugacca

SEQ ID NO: 1835413 - RNA, 16 nt, Human
uucagaaauguguuau

SEQ ID NO: 1835414 - RNA, 15 nt, Human
auauauuuuaagacg

SEQ ID NO: 1835415 - RNA, 21 nt, Human
auauauguuuuaagaggcagg

SEQ ID NO: 1835416 - RNA, 22 nt, Human
auauauguuuuaagaggcaggg

SEQ ID NO: 1835417 - RNA, 15 nt, Human
uucaucaaugaauga

SEQ ID NO: 1835418 - RNA, 13 nt, Human
auauaugcuaagu

SEQ ID NO: 1835419 - RNA, 17 nt, Human
uucagguaacaggcaga

SEQ ID NO: 1835420 - RNA, 14 nt, Human
uucaguaagccgug

SEQ ID NO: 1835421 - RNA, 20 nt, Human
uucauaucuauuuauuaaau

SEQ ID NO: 1835422 - RNA, 14 nt, Human
uuucacucuccuug

SEQ ID NO: 1835423 - RNA, 17 nt, Human
uuuauuuuuuucugaau

SEQ ID NO: 1835424 - RNA, 16 nt, Human
uuuauuuuuugggaaa

SEQ ID NO: 1835425 - RNA, 12 nt, Human
uuucauaaagca

SEQ ID NO: 1835426 - RNA, 15 nt, Human
uuucaguuuucagga

SEQ ID NO: 1835427 - RNA, 24 nt, Human
uuucacugcuggcugccuuagaac

SEQ ID NO: 1835428 - RNA, 15 nt, Human
uuucacucuccuugg

SEQ ID NO: 1835429 - RNA, 24 nt, Human
uuucacucuuauugcccacgcugg

SEQ ID NO: 1835430 - RNA, 19 nt, Human
uuuccagguuuaagcuguu

SEQ ID NO: 1835431 - RNA, 14 nt, Human
augcuguauauguu

SEQ ID NO: 1835432 - RNA, 19 nt, Human
augcugugcccuaaagugu

SEQ ID NO: 1835433 - RNA, 22 nt, Human
augcuggcuguuggcugggggc

SEQ ID NO: 1835434 - RNA, 13 nt, Human
uuuauuuuuuggg

SEQ ID NO: 1835435 - RNA, 15 nt, Human
auggaauaacaugua

SEQ ID NO: 1835436 - RNA, 14 nt, Human
auggaauaacaugu

SEQ ID NO: 1835437 - RNA, 21 nt, Human
auggaaguacuauaauuuacc

SEQ ID NO: 1835438 - RNA, 17 nt, Human
auggaacacucugagac

SEQ ID NO: 1835439 - RNA, 18 nt, Human
auggaacacucugagacu

SEQ ID NO: 1835440 - RNA, 21 nt, Human
uuuaaagaaaaguuuuguaaa

SEQ ID NO: 1835441 - RNA, 13 nt, Human
uuuaaagaaaagu

SEQ ID NO: 1835442 - RNA, 15 nt, Human
uuuaaagaaaaguuu

SEQ ID NO: 1835443 - RNA, 17 nt, Human
uuuaaagaaaaguuuug

SEQ ID NO: 1835444 - RNA, 23 nt, Human
augcgcaggcuggcccugcccug

SEQ ID NO: 1835445 - RNA, 13 nt, Human
augcuaagugaaa

SEQ ID NO: 1835446 - RNA, 21 nt, Human
uuuaccuuuuuuauacauaaa

SEQ ID NO: 1835447 - RNA, 14 nt, Human
uuuacuaauagaca

SEQ ID NO: 1835448 - RNA, 17 nt, Human
uuuacuaauagacaauu

SEQ ID NO: 1835449 - RNA, 18 nt, Human
uuuacuaauagacaauuu

SEQ ID NO: 1835450 - RNA, 14 nt, Human
uuuaccuuuuuuau

SEQ ID NO: 1835451 - RNA, 19 nt, Human
uuuaccuuuuuuauacaua

SEQ ID NO: 1835452 - RNA, 20 nt, Human
uuuaccuuuuuuauacauaa

SEQ ID NO: 1835453 - RNA, 17 nt, Human
augcuacacacugcaug

SEQ ID NO: 1835454 - RNA, 18 nt, Human
augcuacacacugcaugu

SEQ ID NO: 1835455 - RNA, 15 nt, Human
uuuaugugaaacaug

SEQ ID NO: 1835456 - RNA, 14 nt, Human
uuuaugugaaacau

SEQ ID NO: 1835457 - RNA, 19 nt, Human
uuuauuaaaugcccagccc

SEQ ID NO: 1835458 - RNA, 19 nt, Human
uuuauuaaauguagaaagu

SEQ ID NO: 1835459 - RNA, 15 nt, Human
uuuagauaauacacc

SEQ ID NO: 1835460 - RNA, 18 nt, Human
uuuagaguugauacuaca

SEQ ID NO: 1835461 - RNA, 13 nt, Human
uuuagauaauaca

SEQ ID NO: 1835462 - RNA, 15 nt, Human
uuuccuucagugccu

SEQ ID NO: 1835463 - RNA, 12 nt, Human
uuuccuucagug

SEQ ID NO: 1835464 - RNA, 11 nt, Human
uuuccuucagu

SEQ ID NO: 1835465 - RNA, 19 nt, Human
uuuccuuaaauuaucuaaa

SEQ ID NO: 1835466 - RNA, 17 nt, Human
augggccuccugugugu

SEQ ID NO: 1835467 - RNA, 12 nt, Human
uuuccugugucu

SEQ ID NO: 1835468 - RNA, 21 nt, Human
uuuccuucauucaacccaccu

SEQ ID NO: 1835469 - RNA, 22 nt, Human
uuuccuucagugccuuauggaa

SEQ ID NO: 1835470 - RNA, 21 nt, Human
uuuccuucagugccuuaugga

SEQ ID NO: 1835471 - RNA, 18 nt, Human
uuuccuucagugccuuau

SEQ ID NO: 1835472 - RNA, 23 nt, Human
uuuccuucauucaacccaccugc

SEQ ID NO: 1835473 - RNA, 21 nt, Human
uuuccuuuuaaaacacuucca

SEQ ID NO: 1835474 - RNA, 22 nt, Human
uuucgcaggauucuuccucccu

SEQ ID NO: 1835475 - RNA, 18 nt, Human
uuucgcaggauucuuccu

SEQ ID NO: 1835476 - RNA, 18 nt, Human
auggccucuucagaucuc

SEQ ID NO: 1835477 - RNA, 21 nt, Human
auggacccaauauuuaccaga

SEQ ID NO: 1835478 - RNA, 15 nt, Human
augggacuggccucu

SEQ ID NO: 1835479 - RNA, 13 nt, Human
augggagcucaug

SEQ ID NO: 1835480 - RNA, 19 nt, Human
augggcaacccccagccug

SEQ ID NO: 1835481 - RNA, 21 nt, Human
augggcaacccccagccugcu

SEQ ID NO: 1835482 - RNA, 14 nt, Human
augggcagagcaga

SEQ ID NO: 1835483 - RNA, 13 nt, Human
augggcagagcag

SEQ ID NO: 1835484 - RNA, 15 nt, Human
augggcagagcagag

SEQ ID NO: 1835485 - RNA, 15 nt, Human
augggccuccugugu

SEQ ID NO: 1835486 - RNA, 23 nt, Human
augggcuggguucuacccaggug

SEQ ID NO: 1835487 - RNA, 13 nt, Human
auggggcccugcc

SEQ ID NO: 1835488 - RNA, 14 nt, Human
auggggcccugccu

SEQ ID NO: 1835489 - RNA, 19 nt, Human
uuugaaacacuuugcauaa

SEQ ID NO: 1835490 - RNA, 17 nt, Human
uuugaaacacuuugcau

SEQ ID NO: 1835491 - RNA, 21 nt, Human
uuucuuuaguuuuugugaagu

SEQ ID NO: 1835492 - RNA, 13 nt, Human
uuucuuuguggcu

SEQ ID NO: 1835493 - RNA, 15 nt, Human
uuucuaugacacaug

SEQ ID NO: 1835494 - RNA, 21 nt, Human
uuucuaugacacaugcaaggu

SEQ ID NO: 1835495 - RNA, 14 nt, Human
uuucucaaagaaau

SEQ ID NO: 1835496 - RNA, 15 nt, Human
uuucucaaagaaauu

SEQ ID NO: 1835497 - RNA, 16 nt, Human
uuucucaaagaaauuu

SEQ ID NO: 1835498 - RNA, 16 nt, Human
uuucugccgcagcccu

SEQ ID NO: 1835499 - RNA, 14 nt, Human
uuucugccgcagcc

SEQ ID NO: 1835500 - RNA, 22 nt, Human
uuucucauuugccaauaauaau

SEQ ID NO: 1835501 - RNA, 21 nt, Human
augagcaucaggccaggcccu

SEQ ID NO: 1835502 - RNA, 20 nt, Human
augagcaucaggccaggccc

SEQ ID NO: 1835503 - RNA, 19 nt, Human
augagcaucaggccaggcc

SEQ ID NO: 1835504 - RNA, 18 nt, Human
augagcaucaggccaggc

SEQ ID NO: 1835505 - RNA, 17 nt, Human
augagcaucaggccagg

SEQ ID NO: 1835506 - RNA, 16 nt, Human
augagcaucaggccag

SEQ ID NO: 1835507 - RNA, 15 nt, Human
augagcaucaggcca

SEQ ID NO: 1835508 - RNA, 22 nt, Human
augagcaucaggccaggcccuc

SEQ ID NO: 1835509 - RNA, 18 nt, Human
augagccaccgcgcccag

SEQ ID NO: 1835510 - RNA, 21 nt, Human
augagccaccgcgcccagccu

SEQ ID NO: 1835511 - RNA, 12 nt, Human
augagccucagc

SEQ ID NO: 1835512 - RNA, 15 nt, Human
augagccucagcauc

SEQ ID NO: 1835513 - RNA, 16 nt, Human
augagccucagcaucc

SEQ ID NO: 1835514 - RNA, 15 nt, Human
augagaggaaaucac

SEQ ID NO: 1835515 - RNA, 14 nt, Human
augagaggaaauca

SEQ ID NO: 1835516 - RNA, 16 nt, Human
augagaggaaaucacc

SEQ ID NO: 1835517 - RNA, 13 nt, Human
augagaggaaauc

SEQ ID NO: 1835518 - RNA, 12 nt, Human
augagaggaaau

SEQ ID NO: 1835519 - RNA, 17 nt, Human
augagccucagcauccu

SEQ ID NO: 1835520 - RNA, 18 nt, Human
augagccucagcauccug

SEQ ID NO: 1835521 - RNA, 15 nt, Human
augauaaaacacaaa

SEQ ID NO: 1835522 - RNA, 18 nt, Human
uugucacacacuuuggcu

SEQ ID NO: 1835523 - RNA, 13 nt, Human
uugugaaauuauu

SEQ ID NO: 1835524 - RNA, 22 nt, Human
augcaaaccaucauugaaaucu

SEQ ID NO: 1835525 - RNA, 21 nt, Human
augcaaaccaucauugaaauc

SEQ ID NO: 1835526 - RNA, 20 nt, Human
augcaaaccaucauugaaau

SEQ ID NO: 1835527 - RNA, 19 nt, Human
augcaaaccaucauugaaa

SEQ ID NO: 1835528 - RNA, 18 nt, Human
augcaaaccaucauugaa

SEQ ID NO: 1835529 - RNA, 16 nt, Human
augcaaaccaucauug

SEQ ID NO: 1835530 - RNA, 18 nt, Human
augaucuucuuuauaauu

SEQ ID NO: 1835531 - RNA, 15 nt, Human
augaucuucuuuaua

SEQ ID NO: 1835532 - RNA, 14 nt, Human
augcaaggucauuu

SEQ ID NO: 1835533 - RNA, 16 nt, Human
augcaaggucauuuuu

SEQ ID NO: 1835534 - RNA, 22 nt, Human
augcaaacuuuauuuuguguuu

SEQ ID NO: 1835535 - RNA, 16 nt, Human
augcaccuggaauaua

SEQ ID NO: 1835536 - RNA, 14 nt, Human
augcaccuggaaua

SEQ ID NO: 1835537 - RNA, 22 nt, Human
augcaaggucauuuuuuuuaag

SEQ ID NO: 1835538 - RNA, 19 nt, Human
uuguuuuuuuuuuccacuu

SEQ ID NO: 1835539 - RNA, 17 nt, Human
uuuaaaaaauuaaucug

SEQ ID NO: 1835540 - RNA, 19 nt, Human
augcaccuggaauauauaa

SEQ ID NO: 1835541 - RNA, 18 nt, Human
uuguuuuuuuuuuccacu

SEQ ID NO: 1835542 - RNA, 18 nt, Human
uugugaagguggaaauaa

SEQ ID NO: 1835543 - RNA, 17 nt, Human
uugugaagguggaaaua

SEQ ID NO: 1835544 - RNA, 14 nt, Human
augaucuucuuuau

SEQ ID NO: 1835545 - RNA, 15 nt, Human
augauccuaaugaau

SEQ ID NO: 1835546 - RNA, 15 nt, Human
augaucuaggaagac

SEQ ID NO: 1835547 - RNA, 16 nt, Human
augauccuaggcauuu

SEQ ID NO: 1835548 - RNA, 23 nt, Human
augaucacggcucacugcagccu

SEQ ID NO: 1835549 - RNA, 18 nt, Human
augaucacggcucacugc

SEQ ID NO: 1835550 - RNA, 19 nt, Human
augaucacggcucacugca

SEQ ID NO: 1835551 - RNA, 15 nt, Human
augaucacggcucac

SEQ ID NO: 1835552 - RNA, 19 nt, Human
uuggggaagaacgaagcca

SEQ ID NO: 1835553 - RNA, 17 nt, Human
uugggguacccacugcu

SEQ ID NO: 1835554 - RNA, 20 nt, Human
augaaccacaucuugcucug

SEQ ID NO: 1835555 - RNA, 13 nt, Human
augaaccacaucu

SEQ ID NO: 1835556 - RNA, 14 nt, Human
uuguaaggaaugau

SEQ ID NO: 1835557 - RNA, 22 nt, Human
uuguaagcaugcacaaauucug

SEQ ID NO: 1835558 - RNA, 19 nt, Human
uugguuaggcauuguggga

SEQ ID NO: 1835559 - RNA, 22 nt, Human
uugggguacccacugcucuggu

SEQ ID NO: 1835560 - RNA, 20 nt, Human
uuguaaggaaugauuaauua

SEQ ID NO: 1835561 - RNA, 13 nt, Human
uuguaaugaaaac

SEQ ID NO: 1835562 - RNA, 19 nt, Human
augacacgaauauugcuga

SEQ ID NO: 1835563 - RNA, 20 nt, Human
augacacgaauauugcugau

SEQ ID NO: 1835564 - RNA, 23 nt, Human
uuggaaagaguaggaagacuuug

SEQ ID NO: 1835565 - RNA, 18 nt, Human
uuggaaagaguaggaaga

SEQ ID NO: 1835566 - RNA, 21 nt, Human
uuggcuagagguucaaagaua

SEQ ID NO: 1835567 - RNA, 22 nt, Human
uuggcuagagguucaaagauau

SEQ ID NO: 1835568 - RNA, 22 nt, Human
uuggcuaggaccccuccaugug

SEQ ID NO: 1835569 - RNA, 15 nt, Human
uuggcugcugaaggc

SEQ ID NO: 1835570 - RNA, 11 nt, Human
uuggcugcuga

SEQ ID NO: 1835571 - RNA, 23 nt, Human
uuggcuauuagagaucaaccccu

SEQ ID NO: 1835572 - RNA, 14 nt, Human
uuggcugcagggag

SEQ ID NO: 1835573 - RNA, 13 nt, Human
aucuuucugcaga

SEQ ID NO: 1835574 - RNA, 22 nt, Human
uuggcgcugccccuggcagccc

SEQ ID NO: 1835575 - RNA, 20 nt, Human
augaaagacuguacaaagua

SEQ ID NO: 1835576 - RNA, 23 nt, Human
augaaagauggcugugccucugc

SEQ ID NO: 1835577 - RNA, 20 nt, Human
augaaagauggcugugccuc

SEQ ID NO: 1835578 - RNA, 19 nt, Human
augaaagauggcugugccu

SEQ ID NO: 1835579 - RNA, 14 nt, Human
augaaaugagguca

SEQ ID NO: 1835580 - RNA, 20 nt, Human
uugcuaagugaggaugaaaa

SEQ ID NO: 1835581 - RNA, 19 nt, Human
uugcugaauacagaggcaa

SEQ ID NO: 1835582 - RNA, 16 nt, Human
uugcuuuuaaaaucca

SEQ ID NO: 1835583 - RNA, 17 nt, Human
uuggaaagaguaggaag

SEQ ID NO: 1835584 - RNA, 19 nt, Human
uugcugauggugcaaugac

SEQ ID NO: 1835585 - RNA, 18 nt, Human
uugcugauggugcaauga

SEQ ID NO: 1835586 - RNA, 17 nt, Human
uugcugauggugcaaug

SEQ ID NO: 1835587 - RNA, 14 nt, Human
auuugugauacaau

SEQ ID NO: 1835588 - RNA, 23 nt, Human
auuugugaagguggaaauaaacu

SEQ ID NO: 1835589 - RNA, 15 nt, Human
auuuuaauucaguug

SEQ ID NO: 1835590 - RNA, 17 nt, Human
auuuuaccuuugacaaa

SEQ ID NO: 1835591 - RNA, 17 nt, Human
auuuuacuuuuuccugg

SEQ ID NO: 1835592 - RNA, 16 nt, Human
auuuuacuuuuuccug

SEQ ID NO: 1835593 - RNA, 22 nt, Human
auuuucaguuauuauauuuaca

SEQ ID NO: 1835594 - RNA, 20 nt, Human
auuuucaacgcagcccugcu

SEQ ID NO: 1835595 - RNA, 18 nt, Human
auuuucaacgcagcccug

SEQ ID NO: 1835596 - RNA, 21 nt, Human
auuuuauuuuuuucugaauua

SEQ ID NO: 1835597 - RNA, 18 nt, Human
auugacccacaagaaaug

SEQ ID NO: 1835598 - RNA, 18 nt, Human
auucuuauuuaaugaaag

SEQ ID NO: 1835599 - RNA, 14 nt, Human
auucuuauuuaaug

SEQ ID NO: 1835600 - RNA, 13 nt, Human
auucuuauuuaau

SEQ ID NO: 1835601 - RNA, 13 nt, Human
auucuucuccacu

SEQ ID NO: 1835602 - RNA, 22 nt, Human
auucuuccucccucccucuuuc

SEQ ID NO: 1835603 - RNA, 24 nt, Human
auucugucucuggauuauauuaug

SEQ ID NO: 1835604 - RNA, 17 nt, Human
auucuccuuguguuacu

SEQ ID NO: 1835605 - RNA, 20 nt, Human
auuguccccgacccuugccg

SEQ ID NO: 1835606 - RNA, 19 nt, Human
auuguccccgacccuugcc

SEQ ID NO: 1835607 - RNA, 17 nt, Human
auuguccccgacccuug

SEQ ID NO: 1835608 - RNA, 13 nt, Human
auuguauucagag

SEQ ID NO: 1835609 - RNA, 14 nt, Human
auugugucucuugg

SEQ ID NO: 1835610 - RNA, 18 nt, Human
auugugucucuugguccu

SEQ ID NO: 1835611 - RNA, 14 nt, Human
auuuauucugcuca

SEQ ID NO: 1835612 - RNA, 15 nt, Human
auuuagaaauauaau

SEQ ID NO: 1835613 - RNA, 16 nt, Human
auuuacuucuuauaca

SEQ ID NO: 1835614 - RNA, 14 nt, Human
auuuacuucuuaua

SEQ ID NO: 1835615 - RNA, 17 nt, Human
auuuacuucuuauacau

SEQ ID NO: 1835616 - RNA, 14 nt, Human
auuuaacagaaaug

SEQ ID NO: 1835617 - RNA, 12 nt, Human
auuuaacagaaa

SEQ ID NO: 1835618 - RNA, 20 nt, Human
auuuaguaucuuuuuauuca

SEQ ID NO: 1835619 - RNA, 13 nt, Human
auuuaguguucau

SEQ ID NO: 1835620 - RNA, 22 nt, Human
auuuauaaaaauaaaaaacacu

SEQ ID NO: 1835621 - RNA, 17 nt, Human
auuuauaaaaauaaaaa

SEQ ID NO: 1835622 - RNA, 13 nt, Human
auuuauucugcuc

SEQ ID NO: 1835623 - RNA, 15 nt, Human
auuuccguuaaaaua

SEQ ID NO: 1835624 - RNA, 16 nt, Human
auuuccguuaaaauac

SEQ ID NO: 1835625 - RNA, 15 nt, Human
auuugaaaauuuuga

SEQ ID NO: 1835626 - RNA, 14 nt, Human
auuugaaaauuuug

SEQ ID NO: 1835627 - RNA, 16 nt, Human
auuucaaacggccuca

SEQ ID NO: 1835628 - RNA, 17 nt, Human
auuuccagccaaagccu

SEQ ID NO: 1835629 - RNA, 22 nt, Human
auuucauuugugccagaaugcu

SEQ ID NO: 1835630 - RNA, 20 nt, Human
auuuccagugaaaucaguua

SEQ ID NO: 1835631 - RNA, 12 nt, Human
auugaaaucuuu

SEQ ID NO: 1835632 - RNA, 20 nt, Human
auucuccaccugccagggac

SEQ ID NO: 1835633 - RNA, 19 nt, Human
auucuccaccugccaggga

SEQ ID NO: 1835634 - RNA, 15 nt, Human
auucucaugccucag

SEQ ID NO: 1835635 - RNA, 14 nt, Human
auucucaugccuca

SEQ ID NO: 1835636 - RNA, 16 nt, Human
auucuccuuguguuac

SEQ ID NO: 1835637 - RNA, 18 nt, Human
auucuccugccucagccu

SEQ ID NO: 1835638 - RNA, 20 nt, Human
auucuccugccucagccucc

SEQ ID NO: 1835639 - RNA, 19 nt, Human
auucuccugccucagccuc

SEQ ID NO: 1835640 - RNA, 15 nt, Human
auucuccugccucag

SEQ ID NO: 1835641 - RNA, 17 nt, Human
auucuccugccucagcc

SEQ ID NO: 1835642 - RNA, 21 nt, Human
auucuccaccugccagggaca

SEQ ID NO: 1835643 - RNA, 12 nt, Human
auucuccugccu

SEQ ID NO: 1835644 - RNA, 11 nt, Human
auucuccugcc

SEQ ID NO: 1835645 - RNA, 14 nt, Human
auucuccugccuca

SEQ ID NO: 1835646 - RNA, 13 nt, Human
auucuccugccuc

SEQ ID NO: 1835647 - RNA, 14 nt, Human
auucaggaagcuca

SEQ ID NO: 1835648 - RNA, 17 nt, Human
auucagaguugaugguu

SEQ ID NO: 1835649 - RNA, 19 nt, Human
auucaggaagcucagggcc

SEQ ID NO: 1835650 - RNA, 17 nt, Human
auucaggaagcucaggg

SEQ ID NO: 1835651 - RNA, 20 nt, Human
auucaggaagcucagggccu

SEQ ID NO: 1835652 - RNA, 19 nt, Human
auucaguaauaacucuacc

SEQ ID NO: 1835653 - RNA, 15 nt, Human
auucaguaauaacuc

SEQ ID NO: 1835654 - RNA, 16 nt, Human
auucccaagcucugcu

SEQ ID NO: 1835655 - RNA, 14 nt, Human
auucccaagcucug

SEQ ID NO: 1835656 - RNA, 15 nt, Human
auucccaagcucugc

SEQ ID NO: 1835657 - RNA, 20 nt, Human
auguggaguucaucuugaau

SEQ ID NO: 1835658 - RNA, 24 nt, Human
auguggaguucaucuugaauugua

SEQ ID NO: 1835659 - RNA, 23 nt, Human
auguguguuuuaaaaugagaaau

SEQ ID NO: 1835660 - RNA, 12 nt, Human
augugugugugc

SEQ ID NO: 1835661 - RNA, 20 nt, Human
auggggcccugccuccuuug

SEQ ID NO: 1835662 - RNA, 14 nt, Human
uuuuaauaaacacu

SEQ ID NO: 1835663 - RNA, 22 nt, Human
augugccagguuuuuggucuga

SEQ ID NO: 1835664 - RNA, 20 nt, Human
auguugcccuguugcugccu

SEQ ID NO: 1835665 - RNA, 20 nt, Human
auguugcccaggcaggucuu

SEQ ID NO: 1835666 - RNA, 18 nt, Human
auguucaucaaugaauga

SEQ ID NO: 1835667 - RNA, 18 nt, Human
auguugcauagaauaaaa

SEQ ID NO: 1835668 - RNA, 17 nt, Human
auguugcauagaauaaa

SEQ ID NO: 1835669 - RNA, 17 nt, Human
auguugcccaggcaggu

SEQ ID NO: 1835670 - RNA, 12 nt, Human
auguugcccagg

SEQ ID NO: 1835671 - RNA, 15 nt, Human
auguugcauagaaua

SEQ ID NO: 1835672 - RNA, 21 nt, Human
auguuaaacuuacuuaguguu

SEQ ID NO: 1835673 - RNA, 20 nt, Human
uuuucauuuaggugaggaag

SEQ ID NO: 1835674 - RNA, 13 nt, Human
uuuuauuaugcau

SEQ ID NO: 1835675 - RNA, 20 nt, Human
uuuuaggccaaaaaaaugua

SEQ ID NO: 1835676 - RNA, 11 nt, Human
uuuuauuuuau

SEQ ID NO: 1835677 - RNA, 12 nt, Human
uuuucaguuuuc

SEQ ID NO: 1835678 - RNA, 14 nt, Human
uuuucaguuuucag

SEQ ID NO: 1835679 - RNA, 15 nt, Human
auuaaaaaucucaaa

SEQ ID NO: 1835680 - RNA, 19 nt, Human
auuaaaaaucucaaauuuc

SEQ ID NO: 1835681 - RNA, 20 nt, Human
auuaaaaaucucaaauuucu

SEQ ID NO: 1835682 - RNA, 22 nt, Human
auuaaaaaucucaaauuucuaa

SEQ ID NO: 1835683 - RNA, 23 nt, Human
auuaaaacacaacaucuuuuucu

SEQ ID NO: 1835684 - RNA, 17 nt, Human
auguuuaguaaucauau

SEQ ID NO: 1835685 - RNA, 16 nt, Human
auuaaguacuauguau

SEQ ID NO: 1835686 - RNA, 14 nt, Human
auuaaguuguuaau

SEQ ID NO: 1835687 - RNA, 14 nt, Human
auuaaguacuaugu

SEQ ID NO: 1835688 - RNA, 19 nt, Human
auuaaguuguuaauaaaag

SEQ ID NO: 1835689 - RNA, 20 nt, Human
auuaaguuguuaauaaaagu

SEQ ID NO: 1835690 - RNA, 20 nt, Human
uuuuuauggcuuuugugcau

SEQ ID NO: 1835691 - RNA, 21 nt, Human
uuuuuauggcuuuugugcauu

SEQ ID NO: 1835692 - RNA, 22 nt, Human
uuuuuauggcuuuugugcauua

SEQ ID NO: 1835693 - RNA, 19 nt, Human
uuuuuguagagccaggguc

SEQ ID NO: 1835694 - RNA, 20 nt, Human
uuuuuguagagccagggucu

SEQ ID NO: 1835695 - RNA, 19 nt, Human
uuuuugugaaaagcuccau

SEQ ID NO: 1835696 - RNA, 23 nt, Human
uuuugccauguuggccaggcugg

SEQ ID NO: 1835697 - RNA, 17 nt, Human
uuuugagugccuuacac

SEQ ID NO: 1835698 - RNA, 17 nt, Human
uuuugauccaagcuggu

SEQ ID NO: 1835699 - RNA, 23 nt, Human
uuuugugcauuaucuagauacug

SEQ ID NO: 1835700 - RNA, 17 nt, Human
uuuugugcauuaucuag

SEQ ID NO: 1835701 - RNA, 20 nt, Human
uuuugugcauuaucuagaua

SEQ ID NO: 1835702 - RNA, 21 nt, Human
uuuugugaugucccaacuugu

SEQ ID NO: 1835703 - RNA, 13 nt, Human
uuuugcuguagaa

SEQ ID NO: 1835704 - RNA, 14 nt, Human
uuuugcuguagaag

SEQ ID NO: 1835705 - RNA, 12 nt, Human
uuuuguuucaua

SEQ ID NO: 1835706 - RNA, 19 nt, Human
uuuuguuucauauugaugu

SEQ ID NO: 1835707 - RNA, 21 nt, Human
uuuuguuccacaaguuaaaua

SEQ ID NO: 1835708 - RNA, 15 nt, Human
uuuuguuccacaagu

SEQ ID NO: 1835709 - RNA, 23 nt, Human
uuuuuauacauaaacaagaccac

SEQ ID NO: 1835710 - RNA, 12 nt, Human
uuuuuauggcuu

SEQ ID NO: 1835711 - RNA, 20 nt, Human
uuuuuaucgucacugcuuaa

SEQ ID NO: 1835712 - RNA, 12 nt, Human
uuuuuaucaugu

SEQ ID NO: 1835713 - RNA, 11 nt, Human
uuuuuacuaau

SEQ ID NO: 1835714 - RNA, 22 nt, Human
uuuuuagacagagucucacugu

SEQ ID NO: 1835715 - RNA, 22 nt, Human
cacaguccuuaccagcagagca

SEQ ID NO: 1835716 - RNA, 21 nt, Human
cacaguccuuaccagcagagc

SEQ ID NO: 1835717 - RNA, 15 nt, Human
cacaguccuuaccag

SEQ ID NO: 1835718 - RNA, 13 nt, Human
cacaguccuuacc

SEQ ID NO: 1835719 - RNA, 14 nt, Human
cacagugcaucuca

SEQ ID NO: 1835720 - RNA, 19 nt, Human
cacaggcagguccaggguu

SEQ ID NO: 1835721 - RNA, 22 nt, Human
cacagugagucgaggacaggga

SEQ ID NO: 1835722 - RNA, 21 nt, Human
cacagugagucgaggacaggg

SEQ ID NO: 1835723 - RNA, 15 nt, Human
cacaguucucuccuu

SEQ ID NO: 1835724 - RNA, 14 nt, Human
cacaguucucuccu

SEQ ID NO: 1835725 - RNA, 14 nt, Human
cacaggagggaggg

SEQ ID NO: 1835726 - RNA, 21 nt, Human
cacaggagggagggggaaggc

SEQ ID NO: 1835727 - RNA, 19 nt, Human
cacaggagggagggggaag

SEQ ID NO: 1835728 - RNA, 11 nt, Human
cacaggcaggu

SEQ ID NO: 1835729 - RNA, 14 nt, Human
cacaggcaggucca

SEQ ID NO: 1835730 - RNA, 15 nt, Human
cacaggcagguccag

SEQ ID NO: 1835731 - RNA, 23 nt, Human
cacagcugggguggggaccucag

SEQ ID NO: 1835732 - RNA, 22 nt, Human
cacagcugggguggggaccuca

SEQ ID NO: 1835733 - RNA, 21 nt, Human
cacagcuucauuuccuguguc

SEQ ID NO: 1835734 - RNA, 22 nt, Human
cacagcuucauuuccugugucu

SEQ ID NO: 1835735 - RNA, 21 nt, Human
cacauagugaugguuccccug

SEQ ID NO: 1835736 - RNA, 14 nt, Human
caauaggaaaaacu

SEQ ID NO: 1835737 - RNA, 14 nt, Human
caauguucucucuu

SEQ ID NO: 1835738 - RNA, 21 nt, Human
caaugcacuuuguucuggcuc

SEQ ID NO: 1835739 - RNA, 20 nt, Human
caaugcacuuuguucuggcu

SEQ ID NO: 1835740 - RNA, 22 nt, Human
caaugcacuuuguucuggcucu

SEQ ID NO: 1835741 - RNA, 17 nt, Human
caaugcacuuuguucug

SEQ ID NO: 1835742 - RNA, 17 nt, Human
caaugugauaaaacccc

SEQ ID NO: 1835743 - RNA, 15 nt, Human
caaugugauaaaacc

SEQ ID NO: 1835744 - RNA, 16 nt, Human
caauucuccugccuca

SEQ ID NO: 1835745 - RNA, 15 nt, Human
caauucuccugccuc

SEQ ID NO: 1835746 - RNA, 14 nt, Human
caauucuccugccu

SEQ ID NO: 1835747 - RNA, 16 nt, Human
caauuacaggaaguac

SEQ ID NO: 1835748 - RNA, 13 nt, Human
caauucuccugcc

SEQ ID NO: 1835749 - RNA, 23 nt, Human
caauucucauuugucacacacuu

SEQ ID NO: 1835750 - RNA, 15 nt, Human
caaugacuuacugua

SEQ ID NO: 1835751 - RNA, 21 nt, Human
caaugaccuuucaauaggaaa

SEQ ID NO: 1835752 - RNA, 17 nt, Human
caaugacuuacuguaca

SEQ ID NO: 1835753 - RNA, 18 nt, Human
caaugacuuacuguacau

SEQ ID NO: 1835754 - RNA, 23 nt, Human
caaugaccuuucaauaggaaaaa

SEQ ID NO: 1835755 - RNA, 14 nt, Human
caauauuguacagu

SEQ ID NO: 1835756 - RNA, 15 nt, Human
caauauuguacaguu

SEQ ID NO: 1835757 - RNA, 17 nt, Human
caauauucgcuguguca

SEQ ID NO: 1835758 - RNA, 13 nt, Human
caauaggaaaaac

SEQ ID NO: 1835759 - RNA, 12 nt, Human
caauaggaaaaa

SEQ ID NO: 1835760 - RNA, 15 nt, Human
caaccuccugggcua

SEQ ID NO: 1835761 - RNA, 14 nt, Human
caaccuccugggcu

SEQ ID NO: 1835762 - RNA, 19 nt, Human
caaccuucgccaccugggu

SEQ ID NO: 1835763 - RNA, 20 nt, Human
caaccuguucugcuuuccuc

SEQ ID NO: 1835764 - RNA, 14 nt, Human
caacgucugugcca

SEQ ID NO: 1835765 - RNA, 13 nt, Human
caacgucugugcc

SEQ ID NO: 1835766 - RNA, 17 nt, Human
caacugaccagccucca

SEQ ID NO: 1835767 - RNA, 15 nt, Human
caacugaccagccuc

SEQ ID NO: 1835768 - RNA, 13 nt, Human
caacccucagagc

SEQ ID NO: 1835769 - RNA, 17 nt, Human
caacccuggcacccagg

SEQ ID NO: 1835770 - RNA, 22 nt, Human
caaccccuucgcuccugugucu

SEQ ID NO: 1835771 - RNA, 22 nt, Human
caacacucauugaccugaggcc

SEQ ID NO: 1835772 - RNA, 20 nt, Human
caacacucauugaccugagg

SEQ ID NO: 1835773 - RNA, 18 nt, Human
caacacucauugaccuga

SEQ ID NO: 1835774 - RNA, 22 nt, Human
caacacucacauuuauucugcu

SEQ ID NO: 1835775 - RNA, 17 nt, Human
caagacgcugugcugcc

SEQ ID NO: 1835776 - RNA, 16 nt, Human
caagacgcugugcugc

SEQ ID NO: 1835777 - RNA, 18 nt, Human
caagaccuucuccuucac

SEQ ID NO: 1835778 - RNA, 17 nt, Human
caagaccuucuccuuca

SEQ ID NO: 1835779 - RNA, 16 nt, Human
caagaccuucuccuuc

SEQ ID NO: 1835780 - RNA, 14 nt, Human
caagaccuucuccu

SEQ ID NO: 1835781 - RNA, 20 nt, Human
caagaacuuuccaggaaggc

SEQ ID NO: 1835782 - RNA, 19 nt, Human
caacugaccagccuccaug

SEQ ID NO: 1835783 - RNA, 18 nt, Human
caagacucuuuggacacu

SEQ ID NO: 1835784 - RNA, 15 nt, Human
caagagcccaggccu

SEQ ID NO: 1835785 - RNA, 14 nt, Human
caagagcccaggcc

SEQ ID NO: 1835786 - RNA, 23 nt, Human
caagacgcugugcugcccugccc

SEQ ID NO: 1835787 - RNA, 18 nt, Human
caagacgcugugcugccc

SEQ ID NO: 1835788 - RNA, 19 nt, Human
caagacgcugugcugcccu

SEQ ID NO: 1835789 - RNA, 16 nt, Human
caagagcccaggccuc

SEQ ID NO: 1835790 - RNA, 13 nt, Human
caagagggcacug

SEQ ID NO: 1835791 - RNA, 15 nt, Human
caagagggcacuggu

SEQ ID NO: 1835792 - RNA, 14 nt, Human
caagagggcacugg

SEQ ID NO: 1835793 - RNA, 15 nt, Human
caagcaccuccugcc

SEQ ID NO: 1835794 - RNA, 16 nt, Human
caagcaccuccugccu

SEQ ID NO: 1835795 - RNA, 17 nt, Human
caagcaccuccugccuc

SEQ ID NO: 1835796 - RNA, 15 nt, Human
caaggacugcaggga

SEQ ID NO: 1835797 - RNA, 17 nt, Human
caagcuggucccacuca

SEQ ID NO: 1835798 - RNA, 19 nt, Human
caagcuggucccacucagu

SEQ ID NO: 1835799 - RNA, 22 nt, Human
caaggacugcagggacugccag

SEQ ID NO: 1835800 - RNA, 14 nt, Human
caaggagccaaaca

SEQ ID NO: 1835801 - RNA, 17 nt, Human
caaggcugauuaaacca

SEQ ID NO: 1835802 - RNA, 18 nt, Human
caagccguggcuucccgc

SEQ ID NO: 1835803 - RNA, 19 nt, Human
caagcgauucuucugcuuc

SEQ ID NO: 1835804 - RNA, 14 nt, Human
caagccuggcaagg

SEQ ID NO: 1835805 - RNA, 20 nt, Human
caagcgauucuucugcuuca

SEQ ID NO: 1835806 - RNA, 22 nt, Human
caagcgauucuucugcuucagc

SEQ ID NO: 1835807 - RNA, 14 nt, Human
caagcaggacaugg

SEQ ID NO: 1835808 - RNA, 18 nt, Human
caagcaggacauggacaa

SEQ ID NO: 1835809 - RNA, 14 nt, Human
caagccagcuggag

SEQ ID NO: 1835810 - RNA, 22 nt, Human
caagccaccaacauacucccau

SEQ ID NO: 1835811 - RNA, 23 nt, Human
caaggcugucaauuacaggaagu

SEQ ID NO: 1835812 - RNA, 15 nt, Human
caaggcugcagugag

SEQ ID NO: 1835813 - RNA, 12 nt, Human
caaggcugcagu

SEQ ID NO: 1835814 - RNA, 17 nt, Human
caaggggcccaaauucu

SEQ ID NO: 1835815 - RNA, 18 nt, Human
caaggggcccaaauucuu

SEQ ID NO: 1835816 - RNA, 14 nt, Human
caaggucauuuuuu

SEQ ID NO: 1835817 - RNA, 20 nt, Human
caaggucauuuuuuuuaaga

SEQ ID NO: 1835818 - RNA, 18 nt, Human
caaggguagggugggccu

SEQ ID NO: 1835819 - RNA, 14 nt, Human
caaguccucuuuuc

SEQ ID NO: 1835820 - RNA, 14 nt, Human
caaguuaaauaaau

SEQ ID NO: 1835821 - RNA, 19 nt, Human
caaguggcucccacacccu

SEQ ID NO: 1835822 - RNA, 21 nt, Human
caagugauucucaugccucag

SEQ ID NO: 1835823 - RNA, 20 nt, Human
caagugauucucaugccuca

SEQ ID NO: 1835824 - RNA, 18 nt, Human
caagugauucucaugccu

SEQ ID NO: 1835825 - RNA, 17 nt, Human
caagugauucucaugcc

SEQ ID NO: 1835826 - RNA, 18 nt, Human
caagugagagcugggugu

SEQ ID NO: 1835827 - RNA, 21 nt, Human
caaguccucuuuucugagagg

SEQ ID NO: 1835828 - RNA, 14 nt, Human
caagugagagcugg

SEQ ID NO: 1835829 - RNA, 15 nt, Human
caagugagagcuggg

SEQ ID NO: 1835830 - RNA, 17 nt, Human
caagugagagcugggug

SEQ ID NO: 1835831 - RNA, 16 nt, Human
caaaaaaugcuugcuu

SEQ ID NO: 1835832 - RNA, 22 nt, Human
auuuugggguacccacugcucu

SEQ ID NO: 1835833 - RNA, 23 nt, Human
auuuugggguacccacugcucug

SEQ ID NO: 1835834 - RNA, 21 nt, Human
auuuugggguacccacugcuc

SEQ ID NO: 1835835 - RNA, 13 nt, Human
caaaaaggcagga

SEQ ID NO: 1835836 - RNA, 20 nt, Human
caaaaacauggccuuugcuu

SEQ ID NO: 1835837 - RNA, 23 nt, Human
caaaacuucagacauagaauuaa

SEQ ID NO: 1835838 - RNA, 17 nt, Human
caaaauaaaaaugaggu

SEQ ID NO: 1835839 - RNA, 21 nt, Human
caaaacucuccucugcugcug

SEQ ID NO: 1835840 - RNA, 20 nt, Human
caaaacucuccucugcugcu

SEQ ID NO: 1835841 - RNA, 22 nt, Human
caaaacucuccucugcugcugg

SEQ ID NO: 1835842 - RNA, 23 nt, Human
caaaacucuccucugcugcuggc

SEQ ID NO: 1835843 - RNA, 20 nt, Human
caaagugcugggauuacagg

SEQ ID NO: 1835844 - RNA, 23 nt, Human
caaagugcugggauuacaggugu

SEQ ID NO: 1835845 - RNA, 19 nt, Human
caaagugcugggauuacag

SEQ ID NO: 1835846 - RNA, 19 nt, Human
caaaggguaucaggugcug

SEQ ID NO: 1835847 - RNA, 21 nt, Human
caaauuguaagcaugcacaaa

SEQ ID NO: 1835848 - RNA, 12 nt, Human
caaauuucuaaa

SEQ ID NO: 1835849 - RNA, 14 nt, Human
caaauuucuaaauc

SEQ ID NO: 1835850 - RNA, 11 nt, Human
caaauuucuaa

SEQ ID NO: 1835851 - RNA, 18 nt, Human
caaagccuccuccagccg

SEQ ID NO: 1835852 - RNA, 17 nt, Human
caaagccuccuccagcc

SEQ ID NO: 1835853 - RNA, 17 nt, Human
caaacucaccugccccu

SEQ ID NO: 1835854 - RNA, 14 nt, Human
caaaggaagcacau

SEQ ID NO: 1835855 - RNA, 16 nt, Human
caaaggguaucaggug

SEQ ID NO: 1835856 - RNA, 18 nt, Human
caaaggguaucaggugcu

SEQ ID NO: 1835857 - RNA, 13 nt, Human
caaaggaagcaca

SEQ ID NO: 1835858 - RNA, 12 nt, Human
caaaggaagcac

SEQ ID NO: 1835859 - RNA, 13 nt, Human
caaagcuaggccu

SEQ ID NO: 1835860 - RNA, 14 nt, Human
caaagcuaggccug

SEQ ID NO: 1835861 - RNA, 19 nt, Human
caaagcuaggccuggccag

SEQ ID NO: 1835862 - RNA, 15 nt, Human
caaagcuaggccugg

SEQ ID NO: 1835863 - RNA, 20 nt, Human
caaacccuucagugccaaaa

SEQ ID NO: 1835864 - RNA, 14 nt, Human
caaacccuucagug

SEQ ID NO: 1835865 - RNA, 15 nt, Human
caaacacauacagga

SEQ ID NO: 1835866 - RNA, 16 nt, Human
caaaauuguuacaaau

SEQ ID NO: 1835867 - RNA, 12 nt, Human
caaaauaaaacu

SEQ ID NO: 1835868 - RNA, 14 nt, Human
caaaauaaaacuuu

SEQ ID NO: 1835869 - RNA, 15 nt, Human
caaaauguaggguua

SEQ ID NO: 1835870 - RNA, 18 nt, Human
cacuggacucaccucccc

SEQ ID NO: 1835871 - RNA, 15 nt, Human
cacuggacucaccuc

SEQ ID NO: 1835872 - RNA, 17 nt, Human
cacuggaacacuaauga

SEQ ID NO: 1835873 - RNA, 21 nt, Human
cacugcuuuuggucuguguga

SEQ ID NO: 1835874 - RNA, 16 nt, Human
cacugcuuccagugag

SEQ ID NO: 1835875 - RNA, 15 nt, Human
cacugcuuccaguga

SEQ ID NO: 1835876 - RNA, 14 nt, Human
cacugcuuccagug

SEQ ID NO: 1835877 - RNA, 13 nt, Human
cacugcuuaacuu

SEQ ID NO: 1835878 - RNA, 21 nt, Human
cacugcuggcugccuuagaac

SEQ ID NO: 1835879 - RNA, 16 nt, Human
cacugcuggcugccuu

SEQ ID NO: 1835880 - RNA, 15 nt, Human
cacugcuggcugccu

SEQ ID NO: 1835881 - RNA, 14 nt, Human
cacugcuggcugcc

SEQ ID NO: 1835882 - RNA, 13 nt, Human
cacugcuggcugc

SEQ ID NO: 1835883 - RNA, 12 nt, Human
cacugcuggcug

SEQ ID NO: 1835884 - RNA, 21 nt, Human
cacugcuuccagugaggcucu

SEQ ID NO: 1835885 - RNA, 20 nt, Human
cacugcuuccagugaggcuc

SEQ ID NO: 1835886 - RNA, 19 nt, Human
cacugcuuccagugaggcu

SEQ ID NO: 1835887 - RNA, 18 nt, Human
cacugcuuccagugaggc

SEQ ID NO: 1835888 - RNA, 22 nt, Human
cacugcuuccagugaggcucug

SEQ ID NO: 1835889 - RNA, 20 nt, Human
cacugcuuuuggucugugug

SEQ ID NO: 1835890 - RNA, 16 nt, Human
cacugccucuuccucc

SEQ ID NO: 1835891 - RNA, 23 nt, Human
cacugcacagugcaucucagccc

SEQ ID NO: 1835892 - RNA, 14 nt, Human
cacugcaccgggcc

SEQ ID NO: 1835893 - RNA, 15 nt, Human
cacugcaccgggcca

SEQ ID NO: 1835894 - RNA, 16 nt, Human
cacugcaccgggccac

SEQ ID NO: 1835895 - RNA, 18 nt, Human
cacugcaccgggccacag

SEQ ID NO: 1835896 - RNA, 19 nt, Human
cacugcaccgggccacaga

SEQ ID NO: 1835897 - RNA, 18 nt, Human
cacugcacuauagccuag

SEQ ID NO: 1835898 - RNA, 22 nt, Human
cacugccuucgauacaccgggc

SEQ ID NO: 1835899 - RNA, 20 nt, Human
cacugccuucgauacaccgg

SEQ ID NO: 1835900 - RNA, 17 nt, Human
cacugcugcccagccuc

SEQ ID NO: 1835901 - RNA, 15 nt, Human
cacugcugcccagcc

SEQ ID NO: 1835902 - RNA, 20 nt, Human
cacugcucugaugaagagga

SEQ ID NO: 1835903 - RNA, 12 nt, Human
cacugcucuggu

SEQ ID NO: 1835904 - RNA, 13 nt, Human
cacugagacagcc

SEQ ID NO: 1835905 - RNA, 12 nt, Human
cacugagacagc

SEQ ID NO: 1835906 - RNA, 22 nt, Human
cacugagacagcccgggcucug

SEQ ID NO: 1835907 - RNA, 19 nt, Human
cacugagacagcccgggcu

SEQ ID NO: 1835908 - RNA, 17 nt, Human
cacugagacagcccggg

SEQ ID NO: 1835909 - RNA, 14 nt, Human
cacugagacagccc

SEQ ID NO: 1835910 - RNA, 19 nt, Human
cacucuggcagcucagaga

SEQ ID NO: 1835911 - RNA, 17 nt, Human
cacucuggcagcucaga

SEQ ID NO: 1835912 - RNA, 16 nt, Human
cacucuggcagcucag

SEQ ID NO: 1835913 - RNA, 15 nt, Human
cacucuggcagcuca

SEQ ID NO: 1835914 - RNA, 21 nt, Human
cacucuggcagcucagagagg

SEQ ID NO: 1835915 - RNA, 20 nt, Human
cacucuggcagcucagagag

SEQ ID NO: 1835916 - RNA, 23 nt, Human
cacucuggcagcucagagagggu

SEQ ID NO: 1835917 - RNA, 15 nt, Human
cacucugucgcccag

SEQ ID NO: 1835918 - RNA, 16 nt, Human
cacucugucgcccagu

SEQ ID NO: 1835919 - RNA, 19 nt, Human
cacucugucgcccagucug

SEQ ID NO: 1835920 - RNA, 23 nt, Human
cacugacauuguuggccaaagcc

SEQ ID NO: 1835921 - RNA, 20 nt, Human
cacucugucgcccagucugg

SEQ ID NO: 1835922 - RNA, 22 nt, Human
cacugcacagugcaucucagcc

SEQ ID NO: 1835923 - RNA, 21 nt, Human
cacugcacagugcaucucagc

SEQ ID NO: 1835924 - RNA, 19 nt, Human
cacugcacagugcaucuca

SEQ ID NO: 1835925 - RNA, 18 nt, Human
cacugcacagugcaucuc

SEQ ID NO: 1835926 - RNA, 23 nt, Human
cacugcaaccuucgccaccuggg

SEQ ID NO: 1835927 - RNA, 16 nt, Human
cacugcaacuucugcc

SEQ ID NO: 1835928 - RNA, 22 nt, Human
cacugcaaccuucgccaccugg

SEQ ID NO: 1835929 - RNA, 14 nt, Human
cacugcaaccuucg

SEQ ID NO: 1835930 - RNA, 17 nt, Human
cacugcaacuucugccu

SEQ ID NO: 1835931 - RNA, 23 nt, Human
cacugcaaccuccgccucuuggg

SEQ ID NO: 1835932 - RNA, 14 nt, Human
cacugcaaccuccg

SEQ ID NO: 1835933 - RNA, 16 nt, Human
cacugcaaccuccgcc

SEQ ID NO: 1835934 - RNA, 13 nt, Human
cacugcaaccucc

SEQ ID NO: 1835935 - RNA, 14 nt, Human
cacugaugggcaac

SEQ ID NO: 1835936 - RNA, 18 nt, Human
cacugaugggcaaccccc

SEQ ID NO: 1835937 - RNA, 24 nt, Human
cacugaugggcaacccccagccug

SEQ ID NO: 1835938 - RNA, 23 nt, Human
cacugagacagcccgggcucugc

SEQ ID NO: 1835939 - RNA, 19 nt, Human
cacuguacuugcucuugau

SEQ ID NO: 1835940 - RNA, 18 nt, Human
cacuguacuugcucuuga

SEQ ID NO: 1835941 - RNA, 15 nt, Human
cacuguacuugcucu

SEQ ID NO: 1835942 - RNA, 13 nt, Human
cacugugaagaga

SEQ ID NO: 1835943 - RNA, 14 nt, Human
cacugugccaugug

SEQ ID NO: 1835944 - RNA, 22 nt, Human
cacuguucucugcccuccaaga

SEQ ID NO: 1835945 - RNA, 21 nt, Human
cacuguucucugcccuccaag

SEQ ID NO: 1835946 - RNA, 19 nt, Human
cacuguucucugcccucca

SEQ ID NO: 1835947 - RNA, 17 nt, Human
cacuguucucugcccuc

SEQ ID NO: 1835948 - RNA, 16 nt, Human
cacuguucucugcccu

SEQ ID NO: 1835949 - RNA, 15 nt, Human
cacuguucucugccc

SEQ ID NO: 1835950 - RNA, 14 nt, Human
cacuguucucugcc

SEQ ID NO: 1835951 - RNA, 13 nt, Human
cacuguucucugc

SEQ ID NO: 1835952 - RNA, 22 nt, Human
cacugugcugagucugaaggcu

SEQ ID NO: 1835953 - RNA, 21 nt, Human
cacugugcugagucugaaggc

SEQ ID NO: 1835954 - RNA, 20 nt, Human
cacugugcugagucugaagg

SEQ ID NO: 1835955 - RNA, 17 nt, Human
cacugugcugagucuga

SEQ ID NO: 1835956 - RNA, 15 nt, Human
cacugugcugagucu

SEQ ID NO: 1835957 - RNA, 13 nt, Human
cacugugcugagu

SEQ ID NO: 1835958 - RNA, 18 nt, Human
cacugugccaugugccag

SEQ ID NO: 1835959 - RNA, 15 nt, Human
cacugugccaugugc

SEQ ID NO: 1835960 - RNA, 16 nt, Human
cacugugccaugugcc

SEQ ID NO: 1835961 - RNA, 20 nt, Human
cacuugaacccgggaggcag

SEQ ID NO: 1835962 - RNA, 21 nt, Human
cacuugaacccgggaggcaga

SEQ ID NO: 1835963 - RNA, 23 nt, Human
cacuugaacccgggaggcagagg

SEQ ID NO: 1835964 - RNA, 16 nt, Human
cacuugacaucaacug

SEQ ID NO: 1835965 - RNA, 20 nt, Human
cacuugagaauuacccuuuu

SEQ ID NO: 1835966 - RNA, 17 nt, Human
cacuugagaauuacccu

SEQ ID NO: 1835967 - RNA, 19 nt, Human
cacuugacaucaacugcau

SEQ ID NO: 1835968 - RNA, 13 nt, Human
cacuugaguccag

SEQ ID NO: 1835969 - RNA, 19 nt, Human
cacuugaugacccccaacc

SEQ ID NO: 1835970 - RNA, 13 nt, Human
cacuugcagacuc

SEQ ID NO: 1835971 - RNA, 15 nt, Human
cacuuggucugugag

SEQ ID NO: 1835972 - RNA, 20 nt, Human
cacuuucuagccagaggaga

SEQ ID NO: 1835973 - RNA, 19 nt, Human
cacuuucuagccagaggag

SEQ ID NO: 1835974 - RNA, 24 nt, Human
cacuugcagacucuacagaggcca

SEQ ID NO: 1835975 - RNA, 14 nt, Human
cacuugcagacucu

SEQ ID NO: 1835976 - RNA, 18 nt, Human
cacuugcagacucuacag

SEQ ID NO: 1835977 - RNA, 19 nt, Human
cacuugcagacucuacaga

SEQ ID NO: 1835978 - RNA, 22 nt, Human
cacuugcagacucuacagaggc

SEQ ID NO: 1835979 - RNA, 16 nt, Human
cacuucccuacaugga

SEQ ID NO: 1835980 - RNA, 20 nt, Human
cacuuccauaaucuggacuc

SEQ ID NO: 1835981 - RNA, 22 nt, Human
cacuucugccauauucuguugg

SEQ ID NO: 1835982 - RNA, 23 nt, Human
cacuucgggaggucgaggcagga

SEQ ID NO: 1835983 - RNA, 21 nt, Human
cacuucgggaggucgaggcag

SEQ ID NO: 1835984 - RNA, 21 nt, Human
cacuucagcugacuuuucugu

SEQ ID NO: 1835985 - RNA, 12 nt, Human
cacuucagcuga

SEQ ID NO: 1835986 - RNA, 20 nt, Human
cacuucaggcucuucuccuu

SEQ ID NO: 1835987 - RNA, 16 nt, Human
cacuucaggcucuucu

SEQ ID NO: 1835988 - RNA, 15 nt, Human
cacuucaggcucuuc

SEQ ID NO: 1835989 - RNA, 14 nt, Human
cacuucaggcucuu

SEQ ID NO: 1835990 - RNA, 23 nt, Human
cacuucaggcucuucuccuuuca

SEQ ID NO: 1835991 - RNA, 14 nt, Human
cacuguugcccagg

SEQ ID NO: 1835992 - RNA, 18 nt, Human
cacgcccccacuggugac

SEQ ID NO: 1835993 - RNA, 17 nt, Human
cacgcccccacugguga

SEQ ID NO: 1835994 - RNA, 15 nt, Human
cacgcccccacuggu

SEQ ID NO: 1835995 - RNA, 13 nt, Human
cacgcccccacug

SEQ ID NO: 1835996 - RNA, 23 nt, Human
cacgccagauucuuuccugaggc

SEQ ID NO: 1835997 - RNA, 13 nt, Human
cacgccacugcac

SEQ ID NO: 1835998 - RNA, 22 nt, Human
cacgccagauucuuuccugagg

SEQ ID NO: 1835999 - RNA, 20 nt, Human
cacgccagauucuuuccuga

SEQ ID NO: 1836000 - RNA, 19 nt, Human
cacgccagauucuuuccug

SEQ ID NO: 1836001 - RNA, 15 nt, Human
cacgccacugcacua

SEQ ID NO: 1836002 - RNA, 12 nt, Human
cacgauuucugu

SEQ ID NO: 1836003 - RNA, 14 nt, Human
cacgauuucuguuu

SEQ ID NO: 1836004 - RNA, 16 nt, Human
cacgauuucuguuuag

SEQ ID NO: 1836005 - RNA, 17 nt, Human
cacgcacuucgggaggu

SEQ ID NO: 1836006 - RNA, 18 nt, Human
caccuugacagggcacac

SEQ ID NO: 1836007 - RNA, 15 nt, Human
caccuugacagggca

SEQ ID NO: 1836008 - RNA, 16 nt, Human
caccuugacagggcac

SEQ ID NO: 1836009 - RNA, 14 nt, Human
caccuucccaugcc

SEQ ID NO: 1836010 - RNA, 13 nt, Human
caccuucccaugc

SEQ ID NO: 1836011 - RNA, 13 nt, Human
caccuugacaggg

SEQ ID NO: 1836012 - RNA, 22 nt, Human
cacgaauauugcugauggugca

SEQ ID NO: 1836013 - RNA, 19 nt, Human
cacgaauauugcugauggu

SEQ ID NO: 1836014 - RNA, 16 nt, Human
cacgaauauugcugau

SEQ ID NO: 1836015 - RNA, 16 nt, Human
cacgacugcccggcag

SEQ ID NO: 1836016 - RNA, 17 nt, Human
cacgacugcccggcagg

SEQ ID NO: 1836017 - RNA, 23 nt, Human
caccuuagacagucccugccaau

SEQ ID NO: 1836018 - RNA, 21 nt, Human
caccuuagacagucccugcca

SEQ ID NO: 1836019 - RNA, 22 nt, Human
caccuuagccugcccuccuuuc

SEQ ID NO: 1836020 - RNA, 19 nt, Human
caccuuagacagucccugc

SEQ ID NO: 1836021 - RNA, 18 nt, Human
caccuuagacagucccug

SEQ ID NO: 1836022 - RNA, 16 nt, Human
caccuuagacaguccc

SEQ ID NO: 1836023 - RNA, 14 nt, Human
caccuuagacaguc

SEQ ID NO: 1836024 - RNA, 20 nt, Human
cacgccuguaauccuagcac

SEQ ID NO: 1836025 - RNA, 19 nt, Human
cacgccuguaauccuagca

SEQ ID NO: 1836026 - RNA, 23 nt, Human
cacgcgugcacacaccagagccc

SEQ ID NO: 1836027 - RNA, 15 nt, Human
cacgcgugcacacac

SEQ ID NO: 1836028 - RNA, 16 nt, Human
cacgcgugcacacacc

SEQ ID NO: 1836029 - RNA, 21 nt, Human
cacgcgugcacacaccagagc

SEQ ID NO: 1836030 - RNA, 15 nt, Human
cacgggggccaagga

SEQ ID NO: 1836031 - RNA, 20 nt, Human
cacgcuggaccuugaacugg

SEQ ID NO: 1836032 - RNA, 14 nt, Human
cacgcuccuuccuc

SEQ ID NO: 1836033 - RNA, 17 nt, Human
cacgcuggaccuugaac

SEQ ID NO: 1836034 - RNA, 16 nt, Human
cacggcucacugcagc

SEQ ID NO: 1836035 - RNA, 17 nt, Human
cacggcucacugcagcc

SEQ ID NO: 1836036 - RNA, 19 nt, Human
cacggcucacugcagccuc

SEQ ID NO: 1836037 - RNA, 20 nt, Human
cacggcucacugcagccuca

SEQ ID NO: 1836038 - RNA, 13 nt, Human
cacgugacagccg

SEQ ID NO: 1836039 - RNA, 18 nt, Human
cacguacacacacauaca

SEQ ID NO: 1836040 - RNA, 19 nt, Human
cacguacacacacauacac

SEQ ID NO: 1836041 - RNA, 14 nt, Human
cacguacacacaca

SEQ ID NO: 1836042 - RNA, 19 nt, Human
cacgugguccuaaucuucu

SEQ ID NO: 1836043 - RNA, 16 nt, Human
cacgugguccuaaucu

SEQ ID NO: 1836044 - RNA, 22 nt, Human
cacguucuuacuaguuucccuu

SEQ ID NO: 1836045 - RNA, 12 nt, Human
cacguuucuaaa

SEQ ID NO: 1836046 - RNA, 14 nt, Human
cacguuucuaaagg

SEQ ID NO: 1836047 - RNA, 23 nt, Human
cacguuucuaaaggcuaccuuug

SEQ ID NO: 1836048 - RNA, 13 nt, Human
cacuaaacaaaga

SEQ ID NO: 1836049 - RNA, 22 nt, Human
cacucagaagacacugaugggc

SEQ ID NO: 1836050 - RNA, 18 nt, Human
cacucagaagacacugau

SEQ ID NO: 1836051 - RNA, 19 nt, Human
cacucagaagacacugaug

SEQ ID NO: 1836052 - RNA, 19 nt, Human
cacucacauuuauucugcu

SEQ ID NO: 1836053 - RNA, 20 nt, Human
cacucacauuuauucugcuc

SEQ ID NO: 1836054 - RNA, 12 nt, Human
cacucagaagac

SEQ ID NO: 1836055 - RNA, 16 nt, Human
cacucagaagacacug

SEQ ID NO: 1836056 - RNA, 17 nt, Human
cacucagaagacacuga

SEQ ID NO: 1836057 - RNA, 20 nt, Human
cacucaaaagcugggcaggu

SEQ ID NO: 1836058 - RNA, 19 nt, Human
cacucaaaagcugggcagg

SEQ ID NO: 1836059 - RNA, 18 nt, Human
cacucaaaagcugggcag

SEQ ID NO: 1836060 - RNA, 17 nt, Human
cacucaaaagcugggca

SEQ ID NO: 1836061 - RNA, 15 nt, Human
cacucaaaagcuggg

SEQ ID NO: 1836062 - RNA, 20 nt, Human
cacuauguugcccaggcagg

SEQ ID NO: 1836063 - RNA, 21 nt, Human
cacuauguugcccaggcaggu

SEQ ID NO: 1836064 - RNA, 19 nt, Human
cacuaucccggcugcccuu

SEQ ID NO: 1836065 - RNA, 18 nt, Human
cacuaucccggcugcccu

SEQ ID NO: 1836066 - RNA, 15 nt, Human
cacuauguugcccag

SEQ ID NO: 1836067 - RNA, 16 nt, Human
cacuauguugcccagg

SEQ ID NO: 1836068 - RNA, 17 nt, Human
cacuauguugcccaggc

SEQ ID NO: 1836069 - RNA, 18 nt, Human
cacuauguugcccaggca

SEQ ID NO: 1836070 - RNA, 19 nt, Human
cacuauguugcccaggcag

SEQ ID NO: 1836071 - RNA, 14 nt, Human
cacuauaauguaag

SEQ ID NO: 1836072 - RNA, 18 nt, Human
cacuauaauguaagcucu

SEQ ID NO: 1836073 - RNA, 14 nt, Human
cacuauagccuagg

SEQ ID NO: 1836074 - RNA, 21 nt, Human
cacuauagccuaggugacaga

SEQ ID NO: 1836075 - RNA, 21 nt, Human
cacuaaauugacacuuaaaaa

SEQ ID NO: 1836076 - RNA, 16 nt, Human
cacuaacaugauuugg

SEQ ID NO: 1836077 - RNA, 14 nt, Human
cacuaaccacgcug

SEQ ID NO: 1836078 - RNA, 15 nt, Human
cacuaaccacgcugg

SEQ ID NO: 1836079 - RNA, 16 nt, Human
cacuaaccacgcugga

SEQ ID NO: 1836080 - RNA, 17 nt, Human
cacuaaggugugcucug

SEQ ID NO: 1836081 - RNA, 18 nt, Human
cacuaaggugugcucuga

SEQ ID NO: 1836082 - RNA, 18 nt, Human
cacuaaccacgcuggacc

SEQ ID NO: 1836083 - RNA, 16 nt, Human
cacucccugcaaccug

SEQ ID NO: 1836084 - RNA, 13 nt, Human
cacucccugcaac

SEQ ID NO: 1836085 - RNA, 12 nt, Human
cacucccugcaa

SEQ ID NO: 1836086 - RNA, 22 nt, Human
cacucauugaccugaggcccuu

SEQ ID NO: 1836087 - RNA, 20 nt, Human
cacucauugaccugaggccc

SEQ ID NO: 1836088 - RNA, 19 nt, Human
cacucauugaccugaggcc

SEQ ID NO: 1836089 - RNA, 18 nt, Human
cacucauugaccugaggc

SEQ ID NO: 1836090 - RNA, 15 nt, Human
cacucauugaccuga

SEQ ID NO: 1836091 - RNA, 16 nt, Human
cacucaggucuguuuu

SEQ ID NO: 1836092 - RNA, 16 nt, Human
cacucaguccauagca

SEQ ID NO: 1836093 - RNA, 14 nt, Human
cacuccuaccuggu

SEQ ID NO: 1836094 - RNA, 13 nt, Human
cacuccuaccugg

SEQ ID NO: 1836095 - RNA, 17 nt, Human
cacucccugcaaccuga

SEQ ID NO: 1836096 - RNA, 21 nt, Human
cacuccuucacagaugggugc

SEQ ID NO: 1836097 - RNA, 14 nt, Human
cacuccuucacaga

SEQ ID NO: 1836098 - RNA, 23 nt, Human
cacucugagacucgcgacaaugc

SEQ ID NO: 1836099 - RNA, 12 nt, Human
cacucugagacu

SEQ ID NO: 1836100 - RNA, 12 nt, Human
cacucuccuugg

SEQ ID NO: 1836101 - RNA, 14 nt, Human
cacucuggcagcuc

SEQ ID NO: 1836102 - RNA, 13 nt, Human
cacucuggcagcu

SEQ ID NO: 1836103 - RNA, 12 nt, Human
cacucuggcagc

SEQ ID NO: 1836104 - RNA, 14 nt, Human
cacucuacuuagca

SEQ ID NO: 1836105 - RNA, 16 nt, Human
cacgccagauucuuuc

SEQ ID NO: 1836106 - RNA, 20 nt, Human
cacauauugauuuccguuaa

SEQ ID NO: 1836107 - RNA, 23 nt, Human
cacccugugauggggcccugccu

SEQ ID NO: 1836108 - RNA, 22 nt, Human
cacccugugauggggcccugcc

SEQ ID NO: 1836109 - RNA, 21 nt, Human
cacccugugauggggcccugc

SEQ ID NO: 1836110 - RNA, 20 nt, Human
cacccugugauggggcccug

SEQ ID NO: 1836111 - RNA, 18 nt, Human
cacccugugauggggccc

SEQ ID NO: 1836112 - RNA, 15 nt, Human
cacccugugaugggg

SEQ ID NO: 1836113 - RNA, 12 nt, Human
cacccugugaug

SEQ ID NO: 1836114 - RNA, 11 nt, Human
cacccugugau

SEQ ID NO: 1836115 - RNA, 18 nt, Human
caccgcagacaggaccag

SEQ ID NO: 1836116 - RNA, 17 nt, Human
caccgcagacaggacca

SEQ ID NO: 1836117 - RNA, 15 nt, Human
caccgcagacaggac

SEQ ID NO: 1836118 - RNA, 14 nt, Human
caccgcagacagga

SEQ ID NO: 1836119 - RNA, 13 nt, Human
caccgcagacagg

SEQ ID NO: 1836120 - RNA, 12 nt, Human
caccgcagacag

SEQ ID NO: 1836121 - RNA, 18 nt, Human
caccgaaaacguggcugc

SEQ ID NO: 1836122 - RNA, 15 nt, Human
caccgaaaacguggc

SEQ ID NO: 1836123 - RNA, 21 nt, Human
caccgaaaacguggcugcuuc

SEQ ID NO: 1836124 - RNA, 19 nt, Human
caccgaaaacguggcugcu

SEQ ID NO: 1836125 - RNA, 22 nt, Human
caccgaaaacguggcugcuuca

SEQ ID NO: 1836126 - RNA, 19 nt, Human
cacccgcuaagagggaggg

SEQ ID NO: 1836127 - RNA, 12 nt, Human
cacccggccccu

SEQ ID NO: 1836128 - RNA, 13 nt, Human
cacccggccccug

SEQ ID NO: 1836129 - RNA, 14 nt, Human
cacccggccccugc

SEQ ID NO: 1836130 - RNA, 16 nt, Human
cacccggccccugcug

SEQ ID NO: 1836131 - RNA, 17 nt, Human
cacccggccccugcugg

SEQ ID NO: 1836132 - RNA, 18 nt, Human
cacccggccccugcuggu

SEQ ID NO: 1836133 - RNA, 21 nt, Human
cacccggccccugcugguuca

SEQ ID NO: 1836134 - RNA, 20 nt, Human
caccccucaacaccucugca

SEQ ID NO: 1836135 - RNA, 13 nt, Human
cacauauugauuu

SEQ ID NO: 1836136 - RNA, 15 nt, Human
caccuggccucugca

SEQ ID NO: 1836137 - RNA, 14 nt, Human
caccuggccucugc

SEQ ID NO: 1836138 - RNA, 13 nt, Human
caccuggccucug

SEQ ID NO: 1836139 - RNA, 12 nt, Human
caccuggccucu

SEQ ID NO: 1836140 - RNA, 20 nt, Human
caccuggccucugcacuccc

SEQ ID NO: 1836141 - RNA, 19 nt, Human
caccuggccucugcacucc

SEQ ID NO: 1836142 - RNA, 18 nt, Human
caccuggccucugcacuc

SEQ ID NO: 1836143 - RNA, 17 nt, Human
caccuggccucugcacu

SEQ ID NO: 1836144 - RNA, 23 nt, Human
caccuggccucugcacuccccug

SEQ ID NO: 1836145 - RNA, 20 nt, Human
caccuggaauauauaaccag

SEQ ID NO: 1836146 - RNA, 23 nt, Human
caccugcggugcuaucuccccca

SEQ ID NO: 1836147 - RNA, 19 nt, Human
caccucugcacaagcugca

SEQ ID NO: 1836148 - RNA, 18 nt, Human
caccucugcacaagcugc

SEQ ID NO: 1836149 - RNA, 19 nt, Human
caccucucucacuccuuga

SEQ ID NO: 1836150 - RNA, 18 nt, Human
caccucucucacuccuug

SEQ ID NO: 1836151 - RNA, 17 nt, Human
caccucucucacuccuu

SEQ ID NO: 1836152 - RNA, 15 nt, Human
caccucucucacucc

SEQ ID NO: 1836153 - RNA, 23 nt, Human
caccugaagacucauucuucugu

SEQ ID NO: 1836154 - RNA, 14 nt, Human
caccugaagacuca

SEQ ID NO: 1836155 - RNA, 15 nt, Human
caccugaagacucau

SEQ ID NO: 1836156 - RNA, 17 nt, Human
caccucucccuuggauu

SEQ ID NO: 1836157 - RNA, 14 nt, Human
caccucucccuugg

SEQ ID NO: 1836158 - RNA, 13 nt, Human
caccucucccuug

SEQ ID NO: 1836159 - RNA, 17 nt, Human
caccuccugcugggcag

SEQ ID NO: 1836160 - RNA, 14 nt, Human
caccuccugccucg

SEQ ID NO: 1836161 - RNA, 15 nt, Human
caccuccugcugggc

SEQ ID NO: 1836162 - RNA, 14 nt, Human
caccuccugcuggg

SEQ ID NO: 1836163 - RNA, 13 nt, Human
caccuccugccuc

SEQ ID NO: 1836164 - RNA, 11 nt, Human
caccuccugcc

SEQ ID NO: 1836165 - RNA, 21 nt, Human
caccucccccaucucuucugg

SEQ ID NO: 1836166 - RNA, 14 nt, Human
caccucccccaucu

SEQ ID NO: 1836167 - RNA, 20 nt, Human
caccgugccuggccacgccc

SEQ ID NO: 1836168 - RNA, 15 nt, Human
caccgugccuggcca

SEQ ID NO: 1836169 - RNA, 13 nt, Human
caccgggccugga

SEQ ID NO: 1836170 - RNA, 15 nt, Human
caccggggccucgga

SEQ ID NO: 1836171 - RNA, 15 nt, Human
caccgggcacucaga

SEQ ID NO: 1836172 - RNA, 22 nt, Human
caccgggcacucagaagacacu

SEQ ID NO: 1836173 - RNA, 15 nt, Human
caccgggccacagag

SEQ ID NO: 1836174 - RNA, 18 nt, Human
caccgggccacagagaaa

SEQ ID NO: 1836175 - RNA, 21 nt, Human
caccgcagacaggaccaggga

SEQ ID NO: 1836176 - RNA, 18 nt, Human
caccggcuggccuggccc

SEQ ID NO: 1836177 - RNA, 17 nt, Human
caccggcuggccuggcc

SEQ ID NO: 1836178 - RNA, 20 nt, Human
caccggcuggccuggccccu

SEQ ID NO: 1836179 - RNA, 14 nt, Human
caccgggcacucag

SEQ ID NO: 1836180 - RNA, 16 nt, Human
caccggcuggccuggc

SEQ ID NO: 1836181 - RNA, 15 nt, Human
caccggcuggccugg

SEQ ID NO: 1836182 - RNA, 14 nt, Human
caccggcuggccug

SEQ ID NO: 1836183 - RNA, 21 nt, Human
cagagcagagaccaucccuga

SEQ ID NO: 1836184 - RNA, 19 nt, Human
cagagcagagaccaucccu

SEQ ID NO: 1836185 - RNA, 18 nt, Human
cagagcagagaccauccc

SEQ ID NO: 1836186 - RNA, 17 nt, Human
cagagcagagaccaucc

SEQ ID NO: 1836187 - RNA, 15 nt, Human
cagagcagagaccau

SEQ ID NO: 1836188 - RNA, 14 nt, Human
cagagcagagacca

SEQ ID NO: 1836189 - RNA, 13 nt, Human
cagagcagagacc

SEQ ID NO: 1836190 - RNA, 22 nt, Human
cagagcaccuuagacagucccu

SEQ ID NO: 1836191 - RNA, 21 nt, Human
cagagcaccuuagacaguccc

SEQ ID NO: 1836192 - RNA, 19 nt, Human
cagagcaccuuagacaguc

SEQ ID NO: 1836193 - RNA, 18 nt, Human
cagagcaccuuagacagu

SEQ ID NO: 1836194 - RNA, 12 nt, Human
cagagcagagac

SEQ ID NO: 1836195 - RNA, 11 nt, Human
cagagcagaga

SEQ ID NO: 1836196 - RNA, 23 nt, Human
cagagcaccuuagacagucccug

SEQ ID NO: 1836197 - RNA, 22 nt, Human
cagagccaccccuaaagagaua

SEQ ID NO: 1836198 - RNA, 15 nt, Human
cagagcccaccuugg

SEQ ID NO: 1836199 - RNA, 17 nt, Human
cagagcccaccuuggcu

SEQ ID NO: 1836200 - RNA, 19 nt, Human
cagagcccaccuuggcuca

SEQ ID NO: 1836201 - RNA, 16 nt, Human
cagagcccacgccccc

SEQ ID NO: 1836202 - RNA, 20 nt, Human
cagagcccaccuuggcucaa

SEQ ID NO: 1836203 - RNA, 21 nt, Human
cagagcccacgcccccacugg

SEQ ID NO: 1836204 - RNA, 20 nt, Human
cagagcccacgcccccacug

SEQ ID NO: 1836205 - RNA, 19 nt, Human
cagagcccacgcccccacu

SEQ ID NO: 1836206 - RNA, 17 nt, Human
cagagcccacgccccca

SEQ ID NO: 1836207 - RNA, 23 nt, Human
cagagcccacgcccccacuggug

SEQ ID NO: 1836208 - RNA, 12 nt, Human
cagagccugcag

SEQ ID NO: 1836209 - RNA, 13 nt, Human
cagaggaaggaga

SEQ ID NO: 1836210 - RNA, 13 nt, Human
cagagccugcagu

SEQ ID NO: 1836211 - RNA, 20 nt, Human
cagaggagagaggacccccu

SEQ ID NO: 1836212 - RNA, 11 nt, Human
cagaggcagcc

SEQ ID NO: 1836213 - RNA, 19 nt, Human
cagaggagagaggaccccc

SEQ ID NO: 1836214 - RNA, 15 nt, Human
cagaggagagaggac

SEQ ID NO: 1836215 - RNA, 13 nt, Human
cagaggagagagg

SEQ ID NO: 1836216 - RNA, 16 nt, Human
cagagaccaucccuga

SEQ ID NO: 1836217 - RNA, 14 nt, Human
cagagaccaucccu

SEQ ID NO: 1836218 - RNA, 13 nt, Human
cagagaccauccc

SEQ ID NO: 1836219 - RNA, 15 nt, Human
cagagacacaagccu

SEQ ID NO: 1836220 - RNA, 14 nt, Human
cagagacacaagcc

SEQ ID NO: 1836221 - RNA, 17 nt, Human
cagagacacaagccuuc

SEQ ID NO: 1836222 - RNA, 16 nt, Human
cagagacacaagccuu

SEQ ID NO: 1836223 - RNA, 19 nt, Human
cagagaaugaaagggccca

SEQ ID NO: 1836224 - RNA, 15 nt, Human
cagagaauucucuua

SEQ ID NO: 1836225 - RNA, 20 nt, Human
cagagaaugaaagggcccag

SEQ ID NO: 1836226 - RNA, 21 nt, Human
cagagaaugaaagggcccaga

SEQ ID NO: 1836227 - RNA, 19 nt, Human
cagagacuccugcaggcag

SEQ ID NO: 1836228 - RNA, 18 nt, Human
cagagacuccugcaggca

SEQ ID NO: 1836229 - RNA, 17 nt, Human
cagagacuccugcaggc

SEQ ID NO: 1836230 - RNA, 16 nt, Human
cagagacuccugcagg

SEQ ID NO: 1836231 - RNA, 15 nt, Human
cagagacuccugcag

SEQ ID NO: 1836232 - RNA, 14 nt, Human
cagagacuccugca

SEQ ID NO: 1836233 - RNA, 13 nt, Human
cagagacuccugc

SEQ ID NO: 1836234 - RNA, 20 nt, Human
cagagaccaucccugaaggc

SEQ ID NO: 1836235 - RNA, 19 nt, Human
cagagaccaucccugaagg

SEQ ID NO: 1836236 - RNA, 18 nt, Human
cagagaccaucccugaag

SEQ ID NO: 1836237 - RNA, 17 nt, Human
cagagaccaucccugaa

SEQ ID NO: 1836238 - RNA, 21 nt, Human
cagagaccaucccugaaggcc

SEQ ID NO: 1836239 - RNA, 20 nt, Human
cagagcaagugagacccugu

SEQ ID NO: 1836240 - RNA, 14 nt, Human
cagagcaagugaga

SEQ ID NO: 1836241 - RNA, 16 nt, Human
cagagcaccuuagaca

SEQ ID NO: 1836242 - RNA, 18 nt, Human
cagagcacagcagccccu

SEQ ID NO: 1836243 - RNA, 18 nt, Human
cagagaguggcuccuccc

SEQ ID NO: 1836244 - RNA, 15 nt, Human
cagagaguggcuccu

SEQ ID NO: 1836245 - RNA, 14 nt, Human
cagagaguggcucc

SEQ ID NO: 1836246 - RNA, 13 nt, Human
cagagaguggcuc

SEQ ID NO: 1836247 - RNA, 13 nt, Human
cagaggcugccuc

SEQ ID NO: 1836248 - RNA, 23 nt, Human
cagaggcgcaugaauuugugaag

SEQ ID NO: 1836249 - RNA, 23 nt, Human
cagaggcugccucucccaucacu

SEQ ID NO: 1836250 - RNA, 14 nt, Human
cagagggagugaca

SEQ ID NO: 1836251 - RNA, 16 nt, Human
cagagggagugacaga

SEQ ID NO: 1836252 - RNA, 18 nt, Human
cagagggagugacagagg

SEQ ID NO: 1836253 - RNA, 19 nt, Human
cagagggagugacagaggc

SEQ ID NO: 1836254 - RNA, 23 nt, Human
cagaggcagccccauucugccug

SEQ ID NO: 1836255 - RNA, 19 nt, Human
cagaggccaugggccuccu

SEQ ID NO: 1836256 - RNA, 16 nt, Human
cagaggccaugggccu

SEQ ID NO: 1836257 - RNA, 20 nt, Human
cagaggccaugggccuccug

SEQ ID NO: 1836258 - RNA, 21 nt, Human
cagaggccaugggccuccugu

SEQ ID NO: 1836259 - RNA, 12 nt, Human
cagaggcagccc

SEQ ID NO: 1836260 - RNA, 13 nt, Human
cagaggcagcccc

SEQ ID NO: 1836261 - RNA, 14 nt, Human
cagaggcagcccca

SEQ ID NO: 1836262 - RNA, 15 nt, Human
cagaggcagccccau

SEQ ID NO: 1836263 - RNA, 18 nt, Human
cagaggcagccccauucu

SEQ ID NO: 1836264 - RNA, 19 nt, Human
cagaggcagccccauucug

SEQ ID NO: 1836265 - RNA, 20 nt, Human
cagaggcagccccauucugc

SEQ ID NO: 1836266 - RNA, 22 nt, Human
cagaggcagccccauucugccu

SEQ ID NO: 1836267 - RNA, 13 nt, Human
cagagucucacug

SEQ ID NO: 1836268 - RNA, 17 nt, Human
cagagucucacuguugc

SEQ ID NO: 1836269 - RNA, 19 nt, Human
cagagucucacuguugccc

SEQ ID NO: 1836270 - RNA, 20 nt, Human
cagagucucacuguugccca

SEQ ID NO: 1836271 - RNA, 21 nt, Human
cagagucucacuguugcccag

SEQ ID NO: 1836272 - RNA, 19 nt, Human
cagagggccugcaagggag

SEQ ID NO: 1836273 - RNA, 15 nt, Human
cagagggccugcaag

SEQ ID NO: 1836274 - RNA, 20 nt, Human
cagagggagugacagaggca

SEQ ID NO: 1836275 - RNA, 21 nt, Human
cagagggagugacagaggcag

SEQ ID NO: 1836276 - RNA, 22 nt, Human
cagagggagugacagaggcagc

SEQ ID NO: 1836277 - RNA, 23 nt, Human
cagagggagugacagaggcagcc

SEQ ID NO: 1836278 - RNA, 23 nt, Human
cagagucucgcucuguugcccag

SEQ ID NO: 1836279 - RNA, 22 nt, Human
cagagucucacuguugcccagg

SEQ ID NO: 1836280 - RNA, 23 nt, Human
cagagucucacuguugcccaggc

SEQ ID NO: 1836281 - RNA, 16 nt, Human
cagagugagacucugu

SEQ ID NO: 1836282 - RNA, 17 nt, Human
cagagugagacucuguc

SEQ ID NO: 1836283 - RNA, 18 nt, Human
cagagugagacucugucu

SEQ ID NO: 1836284 - RNA, 19 nt, Human
cagagugagacucugucuc

SEQ ID NO: 1836285 - RNA, 20 nt, Human
cagagugagacucugucuca

SEQ ID NO: 1836286 - RNA, 16 nt, Human
cagaguugaagacaga

SEQ ID NO: 1836287 - RNA, 15 nt, Human
cagaguugaagacag

SEQ ID NO: 1836288 - RNA, 14 nt, Human
cagaguugaagaca

SEQ ID NO: 1836289 - RNA, 20 nt, Human
cagaguugaagacagagcua

SEQ ID NO: 1836290 - RNA, 19 nt, Human
cagaguugaagacagagcu

SEQ ID NO: 1836291 - RNA, 18 nt, Human
cagaguugaagacagagc

SEQ ID NO: 1836292 - RNA, 17 nt, Human
cagaguugaagacagag

SEQ ID NO: 1836293 - RNA, 14 nt, Human
cagaguuguuacau

SEQ ID NO: 1836294 - RNA, 22 nt, Human
cagaguugaagacagagcuaca

SEQ ID NO: 1836295 - RNA, 23 nt, Human
cagauaaauaguuuaugauucca

SEQ ID NO: 1836296 - RNA, 22 nt, Human
cagauaaagguucaugcaaacu

SEQ ID NO: 1836297 - RNA, 14 nt, Human
cagauaaacaguag

SEQ ID NO: 1836298 - RNA, 15 nt, Human
cagaguuguuacauu

SEQ ID NO: 1836299 - RNA, 18 nt, Human
cagaguuguuacauuuuu

SEQ ID NO: 1836300 - RNA, 19 nt, Human
cagaguuguuacauuuuua

SEQ ID NO: 1836301 - RNA, 20 nt, Human
cagaucucuaacuucaccau

SEQ ID NO: 1836302 - RNA, 20 nt, Human
cagauacaggaaaagcugcu

SEQ ID NO: 1836303 - RNA, 21 nt, Human
cagauacaggaaaagcugcug

SEQ ID NO: 1836304 - RNA, 22 nt, Human
cagauacaggaaaagcugcuga

SEQ ID NO: 1836305 - RNA, 17 nt, Human
cagaugcaccagcccuu

SEQ ID NO: 1836306 - RNA, 22 nt, Human
cagaugcaccagcccuuagcag

SEQ ID NO: 1836307 - RNA, 13 nt, Human
cagaugcaccagc

SEQ ID NO: 1836308 - RNA, 14 nt, Human
cagaugcaccagcc

SEQ ID NO: 1836309 - RNA, 16 nt, Human
cagaugcaccagcccu

SEQ ID NO: 1836310 - RNA, 16 nt, Human
cagacaacaaaccugu

SEQ ID NO: 1836311 - RNA, 23 nt, Human
cagaaaauggaagacagcucuua

SEQ ID NO: 1836312 - RNA, 22 nt, Human
cagaaaauggaagacagcucuu

SEQ ID NO: 1836313 - RNA, 21 nt, Human
cagaaaauggaagacagcucu

SEQ ID NO: 1836314 - RNA, 20 nt, Human
cagaaaauggaagacagcuc

SEQ ID NO: 1836315 - RNA, 16 nt, Human
cagaaaauggaagaca

SEQ ID NO: 1836316 - RNA, 21 nt, Human
cagaaaagaaaguucaugcuu

SEQ ID NO: 1836317 - RNA, 23 nt, Human
cagaacagugauuaccagggacu

SEQ ID NO: 1836318 - RNA, 19 nt, Human
cagaaagcagaacagugau

SEQ ID NO: 1836319 - RNA, 18 nt, Human
cagaaagcagaacaguga

SEQ ID NO: 1836320 - RNA, 24 nt, Human
cagaaagaaguggggacagagcag

SEQ ID NO: 1836321 - RNA, 23 nt, Human
cacuuuguucuggcucuuccagg

SEQ ID NO: 1836322 - RNA, 16 nt, Human
cacuuuguucuggcuc

SEQ ID NO: 1836323 - RNA, 14 nt, Human
cacuuuguucuggc

SEQ ID NO: 1836324 - RNA, 13 nt, Human
cacuuuguucugg

SEQ ID NO: 1836325 - RNA, 13 nt, Human
cacuuugggaggc

SEQ ID NO: 1836326 - RNA, 12 nt, Human
cacuuugggagg

SEQ ID NO: 1836327 - RNA, 16 nt, Human
cacuuugggaggccaa

SEQ ID NO: 1836328 - RNA, 22 nt, Human
cacuuucuagccagaggagaga

SEQ ID NO: 1836329 - RNA, 12 nt, Human
cacuuugcauaa

SEQ ID NO: 1836330 - RNA, 18 nt, Human
cacuuuuauuuagcacca

SEQ ID NO: 1836331 - RNA, 22 nt, Human
cacuuuuguucuugguuuguaa

SEQ ID NO: 1836332 - RNA, 14 nt, Human
cacuuuuguucuug

SEQ ID NO: 1836333 - RNA, 18 nt, Human
cagaaucucaaauaacua

SEQ ID NO: 1836334 - RNA, 17 nt, Human
cagaaucucaaauaacu

SEQ ID NO: 1836335 - RNA, 18 nt, Human
cagaaggaagacuucauc

SEQ ID NO: 1836336 - RNA, 17 nt, Human
cagaaggaagacuucau

SEQ ID NO: 1836337 - RNA, 16 nt, Human
cagaaggaagacuuca

SEQ ID NO: 1836338 - RNA, 19 nt, Human
cagaaggaagacuucaucc

SEQ ID NO: 1836339 - RNA, 19 nt, Human
cagaagcaacccaaauguu

SEQ ID NO: 1836340 - RNA, 20 nt, Human
cagaagcaacccaaauguuc

SEQ ID NO: 1836341 - RNA, 13 nt, Human
cagaagcagcucu

SEQ ID NO: 1836342 - RNA, 14 nt, Human
cagaagcagcucuu

SEQ ID NO: 1836343 - RNA, 21 nt, Human
cagaagacacugaugggcaac

SEQ ID NO: 1836344 - RNA, 22 nt, Human
cagaacccuuggagccaaugga

SEQ ID NO: 1836345 - RNA, 15 nt, Human
cagaauucucuaguu

SEQ ID NO: 1836346 - RNA, 18 nt, Human
cagaauucucuaguuuga

SEQ ID NO: 1836347 - RNA, 11 nt, Human
cagaauucuca

SEQ ID NO: 1836348 - RNA, 14 nt, Human
cagaauuucccaaa

SEQ ID NO: 1836349 - RNA, 15 nt, Human
cagaaucucgcucug

SEQ ID NO: 1836350 - RNA, 20 nt, Human
cagaauuucccaaagcagug

SEQ ID NO: 1836351 - RNA, 19 nt, Human
cagaauuucccaaagcagu

SEQ ID NO: 1836352 - RNA, 18 nt, Human
cagaauuucccaaagcag

SEQ ID NO: 1836353 - RNA, 17 nt, Human
cagaauuucccaaagca

SEQ ID NO: 1836354 - RNA, 12 nt, Human
cagacaaagcgu

SEQ ID NO: 1836355 - RNA, 24 nt, Human
cagaauuucccaaagcagugcaug

SEQ ID NO: 1836356 - RNA, 20 nt, Human
cagacaacaaaccuguuucu

SEQ ID NO: 1836357 - RNA, 22 nt, Human
cagacaaagcgugguggacaug

SEQ ID NO: 1836358 - RNA, 23 nt, Human
cagacacauguccaagaagccca

SEQ ID NO: 1836359 - RNA, 22 nt, Human
cagacacauguccaagaagccc

SEQ ID NO: 1836360 - RNA, 21 nt, Human
cagacacauguccaagaagcc

SEQ ID NO: 1836361 - RNA, 17 nt, Human
cagacacauguccaaga

SEQ ID NO: 1836362 - RNA, 14 nt, Human
cagacacaugucca

SEQ ID NO: 1836363 - RNA, 13 nt, Human
cagacacaggccc

SEQ ID NO: 1836364 - RNA, 14 nt, Human
cagacacaggcccg

SEQ ID NO: 1836365 - RNA, 15 nt, Human
cagacacaggcccgg

SEQ ID NO: 1836366 - RNA, 17 nt, Human
cagacacaggcccggcu

SEQ ID NO: 1836367 - RNA, 18 nt, Human
cagacacaggcccggcuc

SEQ ID NO: 1836368 - RNA, 21 nt, Human
cagacacaggcccggcuccag

SEQ ID NO: 1836369 - RNA, 22 nt, Human
cagacacaggcccggcuccagg

SEQ ID NO: 1836370 - RNA, 23 nt, Human
cagacacaggcccggcuccaggc

SEQ ID NO: 1836371 - RNA, 17 nt, Human
cagacauagaauuaaca

SEQ ID NO: 1836372 - RNA, 19 nt, Human
cagacauagaauuaacaca

SEQ ID NO: 1836373 - RNA, 19 nt, Human
cagacauacuaaccagcag

SEQ ID NO: 1836374 - RNA, 20 nt, Human
cagacaguuaagagaaauga

SEQ ID NO: 1836375 - RNA, 19 nt, Human
cagacaccuugacagggca

SEQ ID NO: 1836376 - RNA, 20 nt, Human
cagacaccuugacagggcac

SEQ ID NO: 1836377 - RNA, 22 nt, Human
cagacaccuugacagggcacac

SEQ ID NO: 1836378 - RNA, 20 nt, Human
cagacuuuuuuuaaauagua

SEQ ID NO: 1836379 - RNA, 19 nt, Human
cagagaaaguacuucucca

SEQ ID NO: 1836380 - RNA, 23 nt, Human
cagagaaaguacuucuccacccu

SEQ ID NO: 1836381 - RNA, 20 nt, Human
cagaccacaaaacuuuucua

SEQ ID NO: 1836382 - RNA, 14 nt, Human
cagaccacaaaacu

SEQ ID NO: 1836383 - RNA, 18 nt, Human
cagaccccuggcuuuuca

SEQ ID NO: 1836384 - RNA, 16 nt, Human
cagaccccuggcuuuu

SEQ ID NO: 1836385 - RNA, 15 nt, Human
cagaccccuggcuuu

SEQ ID NO: 1836386 - RNA, 14 nt, Human
cagaccccuggcuu

SEQ ID NO: 1836387 - RNA, 13 nt, Human
cagaccccuggcu

SEQ ID NO: 1836388 - RNA, 21 nt, Human
cagacccugcccugugggccc

SEQ ID NO: 1836389 - RNA, 17 nt, Human
cagacccugcccugugg

SEQ ID NO: 1836390 - RNA, 16 nt, Human
cagacccugcccugug

SEQ ID NO: 1836391 - RNA, 15 nt, Human
cagacccugcccugu

SEQ ID NO: 1836392 - RNA, 22 nt, Human
cagacccugcccugugggcccc

SEQ ID NO: 1836393 - RNA, 14 nt, Human
cagacccugcccug

SEQ ID NO: 1836394 - RNA, 13 nt, Human
cagacccugcccu

SEQ ID NO: 1836395 - RNA, 12 nt, Human
cagacccugccc

SEQ ID NO: 1836396 - RNA, 16 nt, Human
cagacccggcugcgug

SEQ ID NO: 1836397 - RNA, 23 nt, Human
cagaccccuggcuuuucacugcu

SEQ ID NO: 1836398 - RNA, 22 nt, Human
cagaccccuggcuuuucacugc

SEQ ID NO: 1836399 - RNA, 21 nt, Human
cagaccccuggcuuuucacug

SEQ ID NO: 1836400 - RNA, 12 nt, Human
cagacccggcug

SEQ ID NO: 1836401 - RNA, 14 nt, Human
cagacccggcugcg

SEQ ID NO: 1836402 - RNA, 18 nt, Human
cagccuccaugcugccuc

SEQ ID NO: 1836403 - RNA, 14 nt, Human
cagcucaccagccc

SEQ ID NO: 1836404 - RNA, 20 nt, Human
cagcaauucuccugccucag

SEQ ID NO: 1836405 - RNA, 19 nt, Human
cagcaauucuccugccuca

SEQ ID NO: 1836406 - RNA, 18 nt, Human
cagcaauucuccugccuc

SEQ ID NO: 1836407 - RNA, 17 nt, Human
cagcaauucuccugccu

SEQ ID NO: 1836408 - RNA, 16 nt, Human
cagcaauucuccugcc

SEQ ID NO: 1836409 - RNA, 15 nt, Human
cagcaauucuccugc

SEQ ID NO: 1836410 - RNA, 22 nt, Human
cagcaauaaagcagcguuucua

SEQ ID NO: 1836411 - RNA, 13 nt, Human
cagcaauaaagca

SEQ ID NO: 1836412 - RNA, 21 nt, Human
cagcaauaaagcagcguuucu

SEQ ID NO: 1836413 - RNA, 19 nt, Human
cagcaagugagagcugggu

SEQ ID NO: 1836414 - RNA, 21 nt, Human
cagcaagugagagcugggugu

SEQ ID NO: 1836415 - RNA, 14 nt, Human
cagcaagugagagc

SEQ ID NO: 1836416 - RNA, 15 nt, Human
cagcaagugagagcu

SEQ ID NO: 1836417 - RNA, 16 nt, Human
cagcaagugagagcug

SEQ ID NO: 1836418 - RNA, 17 nt, Human
cagcaagugagagcugg

SEQ ID NO: 1836419 - RNA, 12 nt, Human
cagcaagugaga

SEQ ID NO: 1836420 - RNA, 18 nt, Human
cagcaaggagauuuacaa

SEQ ID NO: 1836421 - RNA, 17 nt, Human
cagcaaggagauuuaca

SEQ ID NO: 1836422 - RNA, 15 nt, Human
cagcagaaaugccuu

SEQ ID NO: 1836423 - RNA, 17 nt, Human
cagcagaaaugccuuac

SEQ ID NO: 1836424 - RNA, 19 nt, Human
cagcagaaaugccuuaccc

SEQ ID NO: 1836425 - RNA, 22 nt, Human
cagcagaaaugccuuacccuca

SEQ ID NO: 1836426 - RNA, 13 nt, Human
cagcagagcaccu

SEQ ID NO: 1836427 - RNA, 11 nt, Human
cagcagagcac

SEQ ID NO: 1836428 - RNA, 23 nt, Human
cagcagccccugcacaaagcccu

SEQ ID NO: 1836429 - RNA, 16 nt, Human
cagcagccccugcaca

SEQ ID NO: 1836430 - RNA, 13 nt, Human
cagcagccccugc

SEQ ID NO: 1836431 - RNA, 18 nt, Human
cagaugggugcuuggagg

SEQ ID NO: 1836432 - RNA, 15 nt, Human
cagaugcugugcaaa

SEQ ID NO: 1836433 - RNA, 23 nt, Human
cagaugggugcuuggaggaagga

SEQ ID NO: 1836434 - RNA, 18 nt, Human
cagcaaaagaugcuucuc

SEQ ID NO: 1836435 - RNA, 14 nt, Human
cagauucuuuccug

SEQ ID NO: 1836436 - RNA, 22 nt, Human
cagauuuuuuacagcugccugc

SEQ ID NO: 1836437 - RNA, 19 nt, Human
cagauuuuuuacagcugcc

SEQ ID NO: 1836438 - RNA, 15 nt, Human
cagcccaccccucaa

SEQ ID NO: 1836439 - RNA, 19 nt, Human
cagcccacauagugauggu

SEQ ID NO: 1836440 - RNA, 15 nt, Human
cagcccacuucugcc

SEQ ID NO: 1836441 - RNA, 21 nt, Human
cagccccaaaacucuccucug

SEQ ID NO: 1836442 - RNA, 20 nt, Human
cagccccaaaacucuccucu

SEQ ID NO: 1836443 - RNA, 22 nt, Human
cagccccaaaacucuccucugc

SEQ ID NO: 1836444 - RNA, 18 nt, Human
cagcccacuucugccaua

SEQ ID NO: 1836445 - RNA, 22 nt, Human
cagccaguaaaugggggugcau

SEQ ID NO: 1836446 - RNA, 23 nt, Human
cagccacggccaggccagaggga

SEQ ID NO: 1836447 - RNA, 14 nt, Human
cagccacggccagg

SEQ ID NO: 1836448 - RNA, 15 nt, Human
cagccacggccaggc

SEQ ID NO: 1836449 - RNA, 16 nt, Human
cagccacggccaggcc

SEQ ID NO: 1836450 - RNA, 17 nt, Human
cagccacggccaggcca

SEQ ID NO: 1836451 - RNA, 18 nt, Human
cagccacggccaggccag

SEQ ID NO: 1836452 - RNA, 19 nt, Human
cagccacggccaggccaga

SEQ ID NO: 1836453 - RNA, 21 nt, Human
cagccacggccaggccagagg

SEQ ID NO: 1836454 - RNA, 22 nt, Human
cagccacggccaggccagaggg

SEQ ID NO: 1836455 - RNA, 14 nt, Human
cagccacauuccug

SEQ ID NO: 1836456 - RNA, 17 nt, Human
cagccacauuccugaug

SEQ ID NO: 1836457 - RNA, 15 nt, Human
cagccacauuccuga

SEQ ID NO: 1836458 - RNA, 19 nt, Human
cagccacauuccugaugcu

SEQ ID NO: 1836459 - RNA, 18 nt, Human
cagcagggagggcuucug

SEQ ID NO: 1836460 - RNA, 22 nt, Human
cagcaggcucucaggccagcug

SEQ ID NO: 1836461 - RNA, 20 nt, Human
cagcaggcucucaggccagc

SEQ ID NO: 1836462 - RNA, 19 nt, Human
cagcaggcucucaggccag

SEQ ID NO: 1836463 - RNA, 18 nt, Human
cagcaggcucucaggcca

SEQ ID NO: 1836464 - RNA, 17 nt, Human
cagcaggcucucaggcc

SEQ ID NO: 1836465 - RNA, 16 nt, Human
cagcaggcucucaggc

SEQ ID NO: 1836466 - RNA, 20 nt, Human
cagcagggagggcuucugcc

SEQ ID NO: 1836467 - RNA, 14 nt, Human
cagcauccuggcac

SEQ ID NO: 1836468 - RNA, 15 nt, Human
cagcauccuggcacc

SEQ ID NO: 1836469 - RNA, 16 nt, Human
cagcauccuggcaccc

SEQ ID NO: 1836470 - RNA, 17 nt, Human
cagcauccuggcacccg

SEQ ID NO: 1836471 - RNA, 18 nt, Human
cagcagccuggacccugu

SEQ ID NO: 1836472 - RNA, 15 nt, Human
cagcagccuggaccc

SEQ ID NO: 1836473 - RNA, 14 nt, Human
cagcagccuggacc

SEQ ID NO: 1836474 - RNA, 12 nt, Human
cagcagccugga

SEQ ID NO: 1836475 - RNA, 22 nt, Human
cagcagccuggacccuguggau

SEQ ID NO: 1836476 - RNA, 19 nt, Human
cagcagccuggacccugug

SEQ ID NO: 1836477 - RNA, 15 nt, Human
cagcaggcucucagg

SEQ ID NO: 1836478 - RNA, 14 nt, Human
cagcaggcucucag

SEQ ID NO: 1836479 - RNA, 12 nt, Human
cagcaggcucuc

SEQ ID NO: 1836480 - RNA, 18 nt, Human
cagccaacuauggccugu

SEQ ID NO: 1836481 - RNA, 21 nt, Human
cagccaaagccuccuccagcc

SEQ ID NO: 1836482 - RNA, 18 nt, Human
cagccaaagccuccucca

SEQ ID NO: 1836483 - RNA, 16 nt, Human
cagccaaagccuccuc

SEQ ID NO: 1836484 - RNA, 15 nt, Human
cagccaaagccuccu

SEQ ID NO: 1836485 - RNA, 14 nt, Human
cagcauucucacuc

SEQ ID NO: 1836486 - RNA, 15 nt, Human
cagcauucucacucc

SEQ ID NO: 1836487 - RNA, 21 nt, Human
cagcauccuggcacccggccc

SEQ ID NO: 1836488 - RNA, 19 nt, Human
cagcauccuggcacccggc

SEQ ID NO: 1836489 - RNA, 20 nt, Human
cagcauccuggcacccggcc

SEQ ID NO: 1836490 - RNA, 16 nt, Human
cagcccgggcucugcc

SEQ ID NO: 1836491 - RNA, 15 nt, Human
cagcccgggcucugc

SEQ ID NO: 1836492 - RNA, 14 nt, Human
cagcccgggcucug

SEQ ID NO: 1836493 - RNA, 13 nt, Human
cagcccgggcucu

SEQ ID NO: 1836494 - RNA, 21 nt, Human
cagccccuucugacccaugcu

SEQ ID NO: 1836495 - RNA, 19 nt, Human
cagccccuucugacccaug

SEQ ID NO: 1836496 - RNA, 17 nt, Human
cagccccuucugaccca

SEQ ID NO: 1836497 - RNA, 16 nt, Human
cagccccuucugaccc

SEQ ID NO: 1836498 - RNA, 23 nt, Human
cagccccuucugacccaugcugc

SEQ ID NO: 1836499 - RNA, 22 nt, Human
cagccccuucugacccaugcug

SEQ ID NO: 1836500 - RNA, 24 nt, Human
cagccccuucugacccaugcugcc

SEQ ID NO: 1836501 - RNA, 20 nt, Human
cagcccgggcucugccuccc

SEQ ID NO: 1836502 - RNA, 19 nt, Human
cagcccgggcucugccucc

SEQ ID NO: 1836503 - RNA, 18 nt, Human
cagcccgggcucugccuc

SEQ ID NO: 1836504 - RNA, 17 nt, Human
cagcccgggcucugccu

SEQ ID NO: 1836505 - RNA, 22 nt, Human
cagcccgggcucugccucccau

SEQ ID NO: 1836506 - RNA, 21 nt, Human
cagcccgggcucugccuccca

SEQ ID NO: 1836507 - RNA, 15 nt, Human
cagcccucccugccc

SEQ ID NO: 1836508 - RNA, 13 nt, Human
cagcccucccugc

SEQ ID NO: 1836509 - RNA, 23 nt, Human
cagcccuccaucuaaacugcccc

SEQ ID NO: 1836510 - RNA, 22 nt, Human
cagcccuccaucuaaacugccc

SEQ ID NO: 1836511 - RNA, 13 nt, Human
cagccccagugcc

SEQ ID NO: 1836512 - RNA, 14 nt, Human
cagccccagugccc

SEQ ID NO: 1836513 - RNA, 15 nt, Human
cagccccagugccca

SEQ ID NO: 1836514 - RNA, 16 nt, Human
cagccccagugcccac

SEQ ID NO: 1836515 - RNA, 21 nt, Human
cagccccaucccaaacccuuc

SEQ ID NO: 1836516 - RNA, 11 nt, Human
cagccccaucc

SEQ ID NO: 1836517 - RNA, 17 nt, Human
cagccccagugcccaca

SEQ ID NO: 1836518 - RNA, 18 nt, Human
cagccccagugcccacag

SEQ ID NO: 1836519 - RNA, 21 nt, Human
cagccccuguucuggcagagu

SEQ ID NO: 1836520 - RNA, 20 nt, Human
cagccccuguucuggcagag

SEQ ID NO: 1836521 - RNA, 16 nt, Human
cagccccauucugccu

SEQ ID NO: 1836522 - RNA, 17 nt, Human
cagccccauucugccug

SEQ ID NO: 1836523 - RNA, 23 nt, Human
cagccccuggaugcagccucaca

SEQ ID NO: 1836524 - RNA, 18 nt, Human
cagccccauucugccugc

SEQ ID NO: 1836525 - RNA, 14 nt, Human
cagccccauccucu

SEQ ID NO: 1836526 - RNA, 13 nt, Human
cagccccauccuc

SEQ ID NO: 1836527 - RNA, 12 nt, Human
cagccccauccu

SEQ ID NO: 1836528 - RNA, 22 nt, Human
cagccccaucccaaacccuuca

SEQ ID NO: 1836529 - RNA, 22 nt, Human
cagccccauccucuguacagag

SEQ ID NO: 1836530 - RNA, 16 nt, Human
cagccccauccucugu

SEQ ID NO: 1836531 - RNA, 13 nt, Human
cagccccauucug

SEQ ID NO: 1836532 - RNA, 14 nt, Human
cagccccauucugc

SEQ ID NO: 1836533 - RNA, 21 nt, Human
cagccguguaaccauggaccc

SEQ ID NO: 1836534 - RNA, 20 nt, Human
cagccgugccuucagcucua

SEQ ID NO: 1836535 - RNA, 18 nt, Human
cagccgugccuucagcuc

SEQ ID NO: 1836536 - RNA, 16 nt, Human
cagccgugccuucagc

SEQ ID NO: 1836537 - RNA, 14 nt, Human
cagccgugccuuca

SEQ ID NO: 1836538 - RNA, 9 nt, Human
cagccgugc

SEQ ID NO: 1836539 - RNA, 23 nt, Human
cagcccugcuuugggcugcccug

SEQ ID NO: 1836540 - RNA, 22 nt, Human
cagcccugcuuugggcugcccu

SEQ ID NO: 1836541 - RNA, 21 nt, Human
cagcccugcuuugggcugccc

SEQ ID NO: 1836542 - RNA, 20 nt, Human
cagcccugcuuugggcugcc

SEQ ID NO: 1836543 - RNA, 19 nt, Human
cagcccugcuuugggcugc

SEQ ID NO: 1836544 - RNA, 13 nt, Human
cagcccugcuuug

SEQ ID NO: 1836545 - RNA, 11 nt, Human
cagcccugcuu

SEQ ID NO: 1836546 - RNA, 16 nt, Human
cagcccugcagagggc

SEQ ID NO: 1836547 - RNA, 15 nt, Human
cagcccugcagaggg

SEQ ID NO: 1836548 - RNA, 14 nt, Human
cagcccugcagagg

SEQ ID NO: 1836549 - RNA, 13 nt, Human
cagcccugcagag

SEQ ID NO: 1836550 - RNA, 20 nt, Human
cagcccugcagagggcacag

SEQ ID NO: 1836551 - RNA, 18 nt, Human
cagcccugcagagggcac

SEQ ID NO: 1836552 - RNA, 22 nt, Human
cagcccucccugccccucccuu

SEQ ID NO: 1836553 - RNA, 18 nt, Human
cagcccucccugccccuc

SEQ ID NO: 1836554 - RNA, 17 nt, Human
cagcccucccugccccu

SEQ ID NO: 1836555 - RNA, 16 nt, Human
cagcccucccugcccc

SEQ ID NO: 1836556 - RNA, 14 nt, Human
cagccuccaugcug

SEQ ID NO: 1836557 - RNA, 20 nt, Human
cagccuccaugcugccucca

SEQ ID NO: 1836558 - RNA, 17 nt, Human
cagccuccaugcugccu

SEQ ID NO: 1836559 - RNA, 15 nt, Human
cagccuccaugcugc

SEQ ID NO: 1836560 - RNA, 19 nt, Human
cagccucccaaagugcugg

SEQ ID NO: 1836561 - RNA, 20 nt, Human
cagccucccaaagugcuggg

SEQ ID NO: 1836562 - RNA, 21 nt, Human
cagccucccaaagugcuggga

SEQ ID NO: 1836563 - RNA, 23 nt, Human
cagccucccaaagugcugggauu

SEQ ID NO: 1836564 - RNA, 20 nt, Human
cagccucccgaauagcuggg

SEQ ID NO: 1836565 - RNA, 21 nt, Human
cagccucccgaauagcuggga

SEQ ID NO: 1836566 - RNA, 22 nt, Human
cagccucccgaauagcugggac

SEQ ID NO: 1836567 - RNA, 20 nt, Human
cagccucacaguccuuacca

SEQ ID NO: 1836568 - RNA, 15 nt, Human
cagccucacaguccu

SEQ ID NO: 1836569 - RNA, 14 nt, Human
cagccucacagucc

SEQ ID NO: 1836570 - RNA, 20 nt, Human
cagccuccaagcuccaucuc

SEQ ID NO: 1836571 - RNA, 14 nt, Human
cagccuccaagcuc

SEQ ID NO: 1836572 - RNA, 19 nt, Human
cagccucaaccuccugggc

SEQ ID NO: 1836573 - RNA, 20 nt, Human
cagccucaaccuccugggcu

SEQ ID NO: 1836574 - RNA, 21 nt, Human
cagccucaaccuccugggcua

SEQ ID NO: 1836575 - RNA, 17 nt, Human
cagccucaaccuccugg

SEQ ID NO: 1836576 - RNA, 18 nt, Human
cagccucaaccuccuggg

SEQ ID NO: 1836577 - RNA, 20 nt, Human
cagcucaccucucccuugga

SEQ ID NO: 1836578 - RNA, 19 nt, Human
cagcucaccucucccuugg

SEQ ID NO: 1836579 - RNA, 14 nt, Human
cagcucacugcaac

SEQ ID NO: 1836580 - RNA, 12 nt, Human
cagcucacugca

SEQ ID NO: 1836581 - RNA, 12 nt, Human
cagcucagagag

SEQ ID NO: 1836582 - RNA, 15 nt, Human
cagcucacugcaacc

SEQ ID NO: 1836583 - RNA, 21 nt, Human
cagcucacugcaaccuucgcc

SEQ ID NO: 1836584 - RNA, 17 nt, Human
cagcucaccucucccuu

SEQ ID NO: 1836585 - RNA, 16 nt, Human
cagcucaccucucccu

SEQ ID NO: 1836586 - RNA, 15 nt, Human
cagcucaccucuccc

SEQ ID NO: 1836587 - RNA, 13 nt, Human
cagcucaccucuc

SEQ ID NO: 1836588 - RNA, 22 nt, Human
cagcucaccagccccagugccc

SEQ ID NO: 1836589 - RNA, 20 nt, Human
cagcucaccagccccagugc

SEQ ID NO: 1836590 - RNA, 21 nt, Human
cagcucaccagccccagugcc

SEQ ID NO: 1836591 - RNA, 13 nt, Human
cagcucaccagcc

SEQ ID NO: 1836592 - RNA, 15 nt, Human
cagcucaccagcccc

SEQ ID NO: 1836593 - RNA, 16 nt, Human
cagcucaccagcccca

SEQ ID NO: 1836594 - RNA, 17 nt, Human
cagcucaccagccccag

SEQ ID NO: 1836595 - RNA, 19 nt, Human
cagcucaccagccccagug

SEQ ID NO: 1836596 - RNA, 18 nt, Human
cagcuaacauggaaguac

SEQ ID NO: 1836597 - RNA, 19 nt, Human
cagcuaacauggaaguacu

SEQ ID NO: 1836598 - RNA, 21 nt, Human
cagcgagcccugguggcagug

SEQ ID NO: 1836599 - RNA, 13 nt, Human
cagcgagcccugg

SEQ ID NO: 1836600 - RNA, 16 nt, Human
cagcgagcccuggugg

SEQ ID NO: 1836601 - RNA, 17 nt, Human
cagcgagcccugguggc

SEQ ID NO: 1836602 - RNA, 19 nt, Human
cagcgagcccugguggcag

SEQ ID NO: 1836603 - RNA, 20 nt, Human
cagcgagcccugguggcagu

SEQ ID NO: 1836604 - RNA, 19 nt, Human
cagcuacuugggaggcuga

SEQ ID NO: 1836605 - RNA, 20 nt, Human
cagcuaacauggaaguacua

SEQ ID NO: 1836606 - RNA, 19 nt, Human
cagcuaaucagcauucuca

SEQ ID NO: 1836607 - RNA, 15 nt, Human
cagcuaaugggacac

SEQ ID NO: 1836608 - RNA, 16 nt, Human
cagcuaaugggacacu

SEQ ID NO: 1836609 - RNA, 19 nt, Human
cagccugggcaaugugaua

SEQ ID NO: 1836610 - RNA, 16 nt, Human
cagccugggcaaugug

SEQ ID NO: 1836611 - RNA, 21 nt, Human
cagccuugaccauucuccacc

SEQ ID NO: 1836612 - RNA, 20 nt, Human
cagccuugaccauucuccac

SEQ ID NO: 1836613 - RNA, 17 nt, Human
cagccuugaccauucuc

SEQ ID NO: 1836614 - RNA, 14 nt, Human
cagccugugucuuu

SEQ ID NO: 1836615 - RNA, 23 nt, Human
cagccugugucuuuaaaugcugc

SEQ ID NO: 1836616 - RNA, 24 nt, Human
cagccuugaccauucuccaccugc

SEQ ID NO: 1836617 - RNA, 23 nt, Human
cagccuugaccauucuccaccug

SEQ ID NO: 1836618 - RNA, 22 nt, Human
cagccuugaccauucuccaccu

SEQ ID NO: 1836619 - RNA, 19 nt, Human
cagccuggacccuguggau

SEQ ID NO: 1836620 - RNA, 15 nt, Human
cagccuggacccugu

SEQ ID NO: 1836621 - RNA, 10 nt, Human
cagccuggca

SEQ ID NO: 1836622 - RNA, 21 nt, Human
cagccuggcacagggcagugg

SEQ ID NO: 1836623 - RNA, 20 nt, Human
cagccuggcacagggcagug

SEQ ID NO: 1836624 - RNA, 13 nt, Human
cagccuggcacag

SEQ ID NO: 1836625 - RNA, 20 nt, Human
cagccugcuccagcuguuca

SEQ ID NO: 1836626 - RNA, 15 nt, Human
cagccuccugaguag

SEQ ID NO: 1836627 - RNA, 20 nt, Human
cagccuccugaguagcugga

SEQ ID NO: 1836628 - RNA, 23 nt, Human
cagccucccgaauagcugggacu

SEQ ID NO: 1836629 - RNA, 19 nt, Human
cagccucccgaguagcugg

SEQ ID NO: 1836630 - RNA, 20 nt, Human
cagccucccgaguagcuggg

SEQ ID NO: 1836631 - RNA, 21 nt, Human
cagccucccgaguagcuggga

SEQ ID NO: 1836632 - RNA, 22 nt, Human
cagccucccgaguagcugggac

SEQ ID NO: 1836633 - RNA, 23 nt, Human
cagccucccgaguagcugggacu

SEQ ID NO: 1836634 - RNA, 22 nt, Human
caggaagcucagggccuggcuc

SEQ ID NO: 1836635 - RNA, 21 nt, Human
cagcucugguccauagagagc

SEQ ID NO: 1836636 - RNA, 18 nt, Human
cagcucugguccauagag

SEQ ID NO: 1836637 - RNA, 17 nt, Human
cagcucugguccauaga

SEQ ID NO: 1836638 - RNA, 16 nt, Human
cagcucugguccauag

SEQ ID NO: 1836639 - RNA, 13 nt, Human
cagcucuggucca

SEQ ID NO: 1836640 - RNA, 10 nt, Human
cagcucuggu

SEQ ID NO: 1836641 - RNA, 23 nt, Human
cagcucugguccauagagagcaa

SEQ ID NO: 1836642 - RNA, 22 nt, Human
cagcucugguccauagagagca

SEQ ID NO: 1836643 - RNA, 12 nt, Human
cagcucuguccu

SEQ ID NO: 1836644 - RNA, 13 nt, Human
cagcucuguccug

SEQ ID NO: 1836645 - RNA, 14 nt, Human
cagcucuguccugg

SEQ ID NO: 1836646 - RNA, 16 nt, Human
cagcucuguccuggga

SEQ ID NO: 1836647 - RNA, 17 nt, Human
cagcucuguccugggag

SEQ ID NO: 1836648 - RNA, 18 nt, Human
cagcucuguccugggagu

SEQ ID NO: 1836649 - RNA, 21 nt, Human
cagcucuuauauugccauuuc

SEQ ID NO: 1836650 - RNA, 10 nt, Human
cagcucuuau

SEQ ID NO: 1836651 - RNA, 23 nt, Human
cagcucuguccugggagugagcu

SEQ ID NO: 1836652 - RNA, 13 nt, Human
cagcucuucucca

SEQ ID NO: 1836653 - RNA, 14 nt, Human
cagcucuucuccag

SEQ ID NO: 1836654 - RNA, 15 nt, Human
cagcucuucuccagg

SEQ ID NO: 1836655 - RNA, 16 nt, Human
cagcucuucuccaggc

SEQ ID NO: 1836656 - RNA, 17 nt, Human
cagcucuucuccaggcu

SEQ ID NO: 1836657 - RNA, 18 nt, Human
cagcucuucuccaggcug

SEQ ID NO: 1836658 - RNA, 19 nt, Human
cagcucuucuccaggcugu

SEQ ID NO: 1836659 - RNA, 23 nt, Human
cagcucuucuccaggcuguaucc

SEQ ID NO: 1836660 - RNA, 20 nt, Human
cagcucagagagggugggag

SEQ ID NO: 1836661 - RNA, 19 nt, Human
cagcucagagaggguggga

SEQ ID NO: 1836662 - RNA, 17 nt, Human
cagcucagagagggugg

SEQ ID NO: 1836663 - RNA, 13 nt, Human
cagcucagagagg

SEQ ID NO: 1836664 - RNA, 16 nt, Human
cagcuccuucuguccu

SEQ ID NO: 1836665 - RNA, 17 nt, Human
cagcuccuucuguccua

SEQ ID NO: 1836666 - RNA, 21 nt, Human
cagcuccuucuguccuacucu

SEQ ID NO: 1836667 - RNA, 23 nt, Human
cagcuccuucuguccuacucugu

SEQ ID NO: 1836668 - RNA, 20 nt, Human
cagcucugcauacucauuag

SEQ ID NO: 1836669 - RNA, 21 nt, Human
cagcucugcaagaauugaagc

SEQ ID NO: 1836670 - RNA, 16 nt, Human
cagcucugcaagaauu

SEQ ID NO: 1836671 - RNA, 15 nt, Human
cagcucugcaagaau

SEQ ID NO: 1836672 - RNA, 17 nt, Human
cagcugcuacuacuccu

SEQ ID NO: 1836673 - RNA, 21 nt, Human
cagcugcucaauaaaguacaa

SEQ ID NO: 1836674 - RNA, 22 nt, Human
cagcugcuugggcuucauccuc

SEQ ID NO: 1836675 - RNA, 21 nt, Human
cagcugcuugggcuucauccu

SEQ ID NO: 1836676 - RNA, 19 nt, Human
cagcugcuugggcuucauc

SEQ ID NO: 1836677 - RNA, 18 nt, Human
cagcugcuugggcuucau

SEQ ID NO: 1836678 - RNA, 16 nt, Human
cagcugcuugggcuuc

SEQ ID NO: 1836679 - RNA, 15 nt, Human
cagcugcuugggcuu

SEQ ID NO: 1836680 - RNA, 14 nt, Human
cagcugcuugggcu

SEQ ID NO: 1836681 - RNA, 13 nt, Human
cagcugcuugggc

SEQ ID NO: 1836682 - RNA, 23 nt, Human
cagcugccugggaucccucaucc

SEQ ID NO: 1836683 - RNA, 18 nt, Human
cagcugccugggaucccu

SEQ ID NO: 1836684 - RNA, 18 nt, Human
cagcugcgguccacccag

SEQ ID NO: 1836685 - RNA, 15 nt, Human
cagcugccugggauc

SEQ ID NO: 1836686 - RNA, 19 nt, Human
cagcugcgguccacccagg

SEQ ID NO: 1836687 - RNA, 20 nt, Human
cagcugcgguccacccagga

SEQ ID NO: 1836688 - RNA, 21 nt, Human
cagcugcgguccacccaggag

SEQ ID NO: 1836689 - RNA, 22 nt, Human
cagcugcgguccacccaggagc

SEQ ID NO: 1836690 - RNA, 23 nt, Human
cagcugcgguccacccaggagcc

SEQ ID NO: 1836691 - RNA, 24 nt, Human
cagcugcgguccacccaggagccc

SEQ ID NO: 1836692 - RNA, 17 nt, Human
cagcuggguuggaaaac

SEQ ID NO: 1836693 - RNA, 16 nt, Human
cagcuggguuggaaaa

SEQ ID NO: 1836694 - RNA, 18 nt, Human
cagcugguugagguuuca

SEQ ID NO: 1836695 - RNA, 23 nt, Human
cagcugggguggggaccucaggc

SEQ ID NO: 1836696 - RNA, 22 nt, Human
cagcugggguggggaccucagg

SEQ ID NO: 1836697 - RNA, 21 nt, Human
cagcugggguggggaccucag

SEQ ID NO: 1836698 - RNA, 22 nt, Human
cagcuggggccaggcugggucg

SEQ ID NO: 1836699 - RNA, 21 nt, Human
cagcuggggccaggcuggguc

SEQ ID NO: 1836700 - RNA, 20 nt, Human
cagcuggggccaggcugggu

SEQ ID NO: 1836701 - RNA, 19 nt, Human
cagcuggggccaggcuggg

SEQ ID NO: 1836702 - RNA, 18 nt, Human
cagcuggggccaggcugg

SEQ ID NO: 1836703 - RNA, 23 nt, Human
cagcugggaucacauguggacuu

SEQ ID NO: 1836704 - RNA, 18 nt, Human
cagcuggagaaauauggu

SEQ ID NO: 1836705 - RNA, 19 nt, Human
cagcuggccgggagccuga

SEQ ID NO: 1836706 - RNA, 23 nt, Human
cagcugcuuuugucuaugggacu

SEQ ID NO: 1836707 - RNA, 22 nt, Human
cagcugcuuuugucuaugggac

SEQ ID NO: 1836708 - RNA, 15 nt, Human
caggaaggcuaaagg

SEQ ID NO: 1836709 - RNA, 19 nt, Human
caggaaggcugagaggaga

SEQ ID NO: 1836710 - RNA, 16 nt, Human
caggaaguacuggaga

SEQ ID NO: 1836711 - RNA, 14 nt, Human
caggaaguacugga

SEQ ID NO: 1836712 - RNA, 12 nt, Human
caggaaguacug

SEQ ID NO: 1836713 - RNA, 15 nt, Human
caggaaguagaggag

SEQ ID NO: 1836714 - RNA, 20 nt, Human
caggaaguacuggagaaaau

SEQ ID NO: 1836715 - RNA, 18 nt, Human
caggaaguacuggagaaa

SEQ ID NO: 1836716 - RNA, 17 nt, Human
caggaaguacuggagaa

SEQ ID NO: 1836717 - RNA, 16 nt, Human
caggaaguagaggagg

SEQ ID NO: 1836718 - RNA, 17 nt, Human
caggaccuguggccaag

SEQ ID NO: 1836719 - RNA, 19 nt, Human
caggaagcucagggccugg

SEQ ID NO: 1836720 - RNA, 18 nt, Human
caggaagcucagggccug

SEQ ID NO: 1836721 - RNA, 17 nt, Human
caggaagcucagggccu

SEQ ID NO: 1836722 - RNA, 16 nt, Human
caggaagcucagggcc

SEQ ID NO: 1836723 - RNA, 15 nt, Human
caggaagcucagggc

SEQ ID NO: 1836724 - RNA, 14 nt, Human
caggaagcucaggg

SEQ ID NO: 1836725 - RNA, 13 nt, Human
caggaagcucagg

SEQ ID NO: 1836726 - RNA, 21 nt, Human
caggaagcucagggccuggcu

SEQ ID NO: 1836727 - RNA, 20 nt, Human
caggaagcucagggccuggc

SEQ ID NO: 1836728 - RNA, 23 nt, Human
caggaagcucagggccuggcuca

SEQ ID NO: 1836729 - RNA, 18 nt, Human
caggaagccagcaggcuc

SEQ ID NO: 1836730 - RNA, 17 nt, Human
caggaagccagcaggcu

SEQ ID NO: 1836731 - RNA, 16 nt, Human
caggaagccagcaggc

SEQ ID NO: 1836732 - RNA, 14 nt, Human
caggaagccagcag

SEQ ID NO: 1836733 - RNA, 21 nt, Human
caggaagccagcaggcucuca

SEQ ID NO: 1836734 - RNA, 19 nt, Human
caggaagccagcaggcucu

SEQ ID NO: 1836735 - RNA, 22 nt, Human
caggaagccagcaggcucucag

SEQ ID NO: 1836736 - RNA, 14 nt, Human
caggaagcagcuuu

SEQ ID NO: 1836737 - RNA, 18 nt, Human
cagcuugaggguugggcu

SEQ ID NO: 1836738 - RNA, 19 nt, Human
cagcuugaggguugggcug

SEQ ID NO: 1836739 - RNA, 20 nt, Human
cagcuugaggguugggcugg

SEQ ID NO: 1836740 - RNA, 21 nt, Human
cagcuugaggguugggcuggu

SEQ ID NO: 1836741 - RNA, 21 nt, Human
cagcuugaccgugaggccaga

SEQ ID NO: 1836742 - RNA, 20 nt, Human
cagcuugaccgugaggccag

SEQ ID NO: 1836743 - RNA, 19 nt, Human
cagcuugaccgugaggcca

SEQ ID NO: 1836744 - RNA, 18 nt, Human
cagcuugaccgugaggcc

SEQ ID NO: 1836745 - RNA, 14 nt, Human
cagcuugaggguug

SEQ ID NO: 1836746 - RNA, 15 nt, Human
cagcuugaggguugg

SEQ ID NO: 1836747 - RNA, 20 nt, Human
cagcuucauuuccugugucu

SEQ ID NO: 1836748 - RNA, 21 nt, Human
cagcuucauuuccugugucuu

SEQ ID NO: 1836749 - RNA, 14 nt, Human
cagcuuugauauuu

SEQ ID NO: 1836750 - RNA, 23 nt, Human
cagcuuuguuuguugucagcuga

SEQ ID NO: 1836751 - RNA, 22 nt, Human
cagcuuuguuuguugucagcug

SEQ ID NO: 1836752 - RNA, 21 nt, Human
cagcuuuguuuguugucagcu

SEQ ID NO: 1836753 - RNA, 12 nt, Human
cagcuuuguuug

SEQ ID NO: 1836754 - RNA, 23 nt, Human
cagcuuuccucaaaacuucagac

SEQ ID NO: 1836755 - RNA, 23 nt, Human
cagcuuuccccaugucucgacuc

SEQ ID NO: 1836756 - RNA, 22 nt, Human
cagcuuuaaaaaauuaaucugg

SEQ ID NO: 1836757 - RNA, 21 nt, Human
cagcuuguaaauagcucaggu

SEQ ID NO: 1836758 - RNA, 22 nt, Human
cagcuuguaaauagcucaggug

SEQ ID NO: 1836759 - RNA, 18 nt, Human
cagcuuguaaauagcuca

SEQ ID NO: 1836760 - RNA, 19 nt, Human
cagcuuguaaauagcucag

SEQ ID NO: 1836761 - RNA, 20 nt, Human
cagcuuguaaauagcucagg

SEQ ID NO: 1836762 - RNA, 16 nt, Human
cagucccugccaaugg

SEQ ID NO: 1836763 - RNA, 15 nt, Human
cagucccugccaaug

SEQ ID NO: 1836764 - RNA, 14 nt, Human
cagucccugccaau

SEQ ID NO: 1836765 - RNA, 13 nt, Human
cagucccugccaa

SEQ ID NO: 1836766 - RNA, 12 nt, Human
cagucccugcca

SEQ ID NO: 1836767 - RNA, 15 nt, Human
caguccucccaucuc

SEQ ID NO: 1836768 - RNA, 14 nt, Human
caguccucccaucu

SEQ ID NO: 1836769 - RNA, 13 nt, Human
caguccucccauc

SEQ ID NO: 1836770 - RNA, 12 nt, Human
caguccucccau

SEQ ID NO: 1836771 - RNA, 17 nt, Human
cagucccugccaaugga

SEQ ID NO: 1836772 - RNA, 17 nt, Human
cagucccccugccccag

SEQ ID NO: 1836773 - RNA, 16 nt, Human
cagucccccugcccca

SEQ ID NO: 1836774 - RNA, 23 nt, Human
caguccccgugaaggagagcccu

SEQ ID NO: 1836775 - RNA, 13 nt, Human
caguccaugaaga

SEQ ID NO: 1836776 - RNA, 14 nt, Human
caguccauugaaag

SEQ ID NO: 1836777 - RNA, 16 nt, Human
caguccauagcagaga

SEQ ID NO: 1836778 - RNA, 16 nt, Human
caguauuacuucugcu

SEQ ID NO: 1836779 - RNA, 18 nt, Human
caguauuacuucugcuac

SEQ ID NO: 1836780 - RNA, 19 nt, Human
caguauuacuucugcuaca

SEQ ID NO: 1836781 - RNA, 12 nt, Human
caguagugauag

SEQ ID NO: 1836782 - RNA, 12 nt, Human
caguauggcagc

SEQ ID NO: 1836783 - RNA, 21 nt, Human
caguaucuugaagacuuuucu

SEQ ID NO: 1836784 - RNA, 18 nt, Human
caguaucuugaagacuuu

SEQ ID NO: 1836785 - RNA, 12 nt, Human
caguaucuugaa

SEQ ID NO: 1836786 - RNA, 15 nt, Human
caguaucucagggcc

SEQ ID NO: 1836787 - RNA, 13 nt, Human
caguaucucaggg

SEQ ID NO: 1836788 - RNA, 23 nt, Human
cagugccuuauggaacacucuga

SEQ ID NO: 1836789 - RNA, 13 nt, Human
cagugcuccagcc

SEQ ID NO: 1836790 - RNA, 22 nt, Human
cagugccuuauggaacacucug

SEQ ID NO: 1836791 - RNA, 21 nt, Human
cagugccuuauggaacacucu

SEQ ID NO: 1836792 - RNA, 20 nt, Human
cagugccuuauggaacacuc

SEQ ID NO: 1836793 - RNA, 19 nt, Human
cagugccuuauggaacacu

SEQ ID NO: 1836794 - RNA, 18 nt, Human
cagugccuuauggaacac

SEQ ID NO: 1836795 - RNA, 17 nt, Human
cagugccuuauggaaca

SEQ ID NO: 1836796 - RNA, 16 nt, Human
cagugccuuauggaac

SEQ ID NO: 1836797 - RNA, 15 nt, Human
cagugccuuauggaa

SEQ ID NO: 1836798 - RNA, 13 nt, Human
cagugccuuaugg

SEQ ID NO: 1836799 - RNA, 11 nt, Human
cagugccuuau

SEQ ID NO: 1836800 - RNA, 18 nt, Human
cagugccgagaaggaagc

SEQ ID NO: 1836801 - RNA, 15 nt, Human
cagugccgagaagga

SEQ ID NO: 1836802 - RNA, 19 nt, Human
cagugagucgaggacaggg

SEQ ID NO: 1836803 - RNA, 20 nt, Human
cagugagucgaggacaggga

SEQ ID NO: 1836804 - RNA, 22 nt, Human
cagugagucgaggacagggagg

SEQ ID NO: 1836805 - RNA, 23 nt, Human
cagugagucgaggacagggaggu

SEQ ID NO: 1836806 - RNA, 15 nt, Human
cagugcccuccagga

SEQ ID NO: 1836807 - RNA, 17 nt, Human
cagugauuaccagggac

SEQ ID NO: 1836808 - RNA, 18 nt, Human
cagugauuaccagggacu

SEQ ID NO: 1836809 - RNA, 16 nt, Human
cagugaggcucugccc

SEQ ID NO: 1836810 - RNA, 15 nt, Human
cagugaggcucugcc

SEQ ID NO: 1836811 - RNA, 14 nt, Human
cagugaggcucugc

SEQ ID NO: 1836812 - RNA, 13 nt, Human
cagugaggcucug

SEQ ID NO: 1836813 - RNA, 12 nt, Human
cagugaggcucu

SEQ ID NO: 1836814 - RNA, 24 nt, Human
cagugagccgagauugcaccacug

SEQ ID NO: 1836815 - RNA, 20 nt, Human
cagugaggcucugcccuugg

SEQ ID NO: 1836816 - RNA, 19 nt, Human
cagugaggcucugcccuug

SEQ ID NO: 1836817 - RNA, 18 nt, Human
cagugaggcucugcccuu

SEQ ID NO: 1836818 - RNA, 17 nt, Human
cagugaggcucugcccu

SEQ ID NO: 1836819 - RNA, 21 nt, Human
cagugaggcucugcccuuggu

SEQ ID NO: 1836820 - RNA, 17 nt, Human
cagugagucgaggacag

SEQ ID NO: 1836821 - RNA, 18 nt, Human
cagugagucgaggacagg

SEQ ID NO: 1836822 - RNA, 15 nt, Human
cagugagacagcucu

SEQ ID NO: 1836823 - RNA, 18 nt, Human
cagucuggaaugcagugg

SEQ ID NO: 1836824 - RNA, 21 nt, Human
caguccuuaccagcagagcac

SEQ ID NO: 1836825 - RNA, 20 nt, Human
caguccuuaccagcagagca

SEQ ID NO: 1836826 - RNA, 19 nt, Human
caguccuuaccagcagagc

SEQ ID NO: 1836827 - RNA, 18 nt, Human
caguccuuaccagcagag

SEQ ID NO: 1836828 - RNA, 15 nt, Human
caguccuuaccagca

SEQ ID NO: 1836829 - RNA, 17 nt, Human
caguccucccaucucac

SEQ ID NO: 1836830 - RNA, 16 nt, Human
caguccucccaucuca

SEQ ID NO: 1836831 - RNA, 19 nt, Human
cagucuggaaugcaguggu

SEQ ID NO: 1836832 - RNA, 16 nt, Human
cagucuuggcucacug

SEQ ID NO: 1836833 - RNA, 17 nt, Human
cagucuuguauuaaguu

SEQ ID NO: 1836834 - RNA, 20 nt, Human
cagugaaagaaaauaacaau

SEQ ID NO: 1836835 - RNA, 16 nt, Human
cagugaaagaaaauaa

SEQ ID NO: 1836836 - RNA, 22 nt, Human
caggucccuaauaaagcugugu

SEQ ID NO: 1836837 - RNA, 21 nt, Human
caggucccuaauaaagcugug

SEQ ID NO: 1836838 - RNA, 20 nt, Human
caggucccuaauaaagcugu

SEQ ID NO: 1836839 - RNA, 19 nt, Human
caggucccuaauaaagcug

SEQ ID NO: 1836840 - RNA, 18 nt, Human
caggucuugaacuccugg

SEQ ID NO: 1836841 - RNA, 19 nt, Human
caggucuugaacuccuggc

SEQ ID NO: 1836842 - RNA, 20 nt, Human
caggucuugaacuccuggcc

SEQ ID NO: 1836843 - RNA, 21 nt, Human
caggucuugaacuccuggccu

SEQ ID NO: 1836844 - RNA, 22 nt, Human
caggucuugaacuccuggccuc

SEQ ID NO: 1836845 - RNA, 23 nt, Human
caggucuugaacuccuggccuca

SEQ ID NO: 1836846 - RNA, 21 nt, Human
cagguggccacuccagacccc

SEQ ID NO: 1836847 - RNA, 19 nt, Human
cagguggccacuccagacc

SEQ ID NO: 1836848 - RNA, 16 nt, Human
cagguggccacuccag

SEQ ID NO: 1836849 - RNA, 15 nt, Human
cagguggccacucca

SEQ ID NO: 1836850 - RNA, 20 nt, Human
caggugagaagcagaggaag

SEQ ID NO: 1836851 - RNA, 13 nt, Human
caggugagaagca

SEQ ID NO: 1836852 - RNA, 21 nt, Human
caggugagaagcagaggaagg

SEQ ID NO: 1836853 - RNA, 20 nt, Human
cagguaaucgaccugccucg

SEQ ID NO: 1836854 - RNA, 19 nt, Human
cagguaaucgaccugccuc

SEQ ID NO: 1836855 - RNA, 18 nt, Human
cagguaaucgaccugccu

SEQ ID NO: 1836856 - RNA, 17 nt, Human
cagguaaucgaccugcc

SEQ ID NO: 1836857 - RNA, 20 nt, Human
cagguaacaggcagauacag

SEQ ID NO: 1836858 - RNA, 21 nt, Human
cagguaacaggcagauacagg

SEQ ID NO: 1836859 - RNA, 18 nt, Human
caggucccuaauaaagcu

SEQ ID NO: 1836860 - RNA, 17 nt, Human
caggucccuaauaaagc

SEQ ID NO: 1836861 - RNA, 16 nt, Human
caggucccuaauaaag

SEQ ID NO: 1836862 - RNA, 15 nt, Human
caggucccuaauaaa

SEQ ID NO: 1836863 - RNA, 14 nt, Human
caggucccuaauaa

SEQ ID NO: 1836864 - RNA, 13 nt, Human
caggucccuaaua

SEQ ID NO: 1836865 - RNA, 12 nt, Human
caggucccuaau

SEQ ID NO: 1836866 - RNA, 11 nt, Human
caggucccuaa

SEQ ID NO: 1836867 - RNA, 21 nt, Human
caggggugggacacccuguga

SEQ ID NO: 1836868 - RNA, 20 nt, Human
caggggugggacacccugug

SEQ ID NO: 1836869 - RNA, 15 nt, Human
caggggugggacacc

SEQ ID NO: 1836870 - RNA, 14 nt, Human
caggggugggacac

SEQ ID NO: 1836871 - RNA, 16 nt, Human
caggguuuugccaugu

SEQ ID NO: 1836872 - RNA, 17 nt, Human
cagggucucacucuguc

SEQ ID NO: 1836873 - RNA, 16 nt, Human
cagggucucacucugu

SEQ ID NO: 1836874 - RNA, 14 nt, Human
cagguaacaggcag

SEQ ID NO: 1836875 - RNA, 15 nt, Human
cagguaacaggcaga

SEQ ID NO: 1836876 - RNA, 16 nt, Human
cagguaacaggcagau

SEQ ID NO: 1836877 - RNA, 17 nt, Human
cagguaacaggcagaua

SEQ ID NO: 1836878 - RNA, 18 nt, Human
caggguccuguagcccua

SEQ ID NO: 1836879 - RNA, 23 nt, Human
cagggucccugguggcagcucac

SEQ ID NO: 1836880 - RNA, 21 nt, Human
cagggucucacuauguugccc

SEQ ID NO: 1836881 - RNA, 22 nt, Human
cagggucucacuauguugccca

SEQ ID NO: 1836882 - RNA, 23 nt, Human
cagggucucacuauguugcccag

SEQ ID NO: 1836883 - RNA, 15 nt, Human
cagggucucacucug

SEQ ID NO: 1836884 - RNA, 22 nt, Human
cagggucccugguggcagcuca

SEQ ID NO: 1836885 - RNA, 19 nt, Human
cagggucccugguggcagc

SEQ ID NO: 1836886 - RNA, 18 nt, Human
cagggucccugguggcag

SEQ ID NO: 1836887 - RNA, 15 nt, Human
cagggucccuggugg

SEQ ID NO: 1836888 - RNA, 14 nt, Human
cagggucccuggug

SEQ ID NO: 1836889 - RNA, 12 nt, Human
cagggucccugg

SEQ ID NO: 1836890 - RNA, 20 nt, Human
caggguauuccagagugggg

SEQ ID NO: 1836891 - RNA, 21 nt, Human
caggguauuccagagugggga

SEQ ID NO: 1836892 - RNA, 13 nt, Human
cagguggggcagc

SEQ ID NO: 1836893 - RNA, 14 nt, Human
cagguggggcagcu

SEQ ID NO: 1836894 - RNA, 15 nt, Human
cagguggggcagcuu

SEQ ID NO: 1836895 - RNA, 16 nt, Human
cagguggggcagcuug

SEQ ID NO: 1836896 - RNA, 18 nt, Human
cagguggggucacucugg

SEQ ID NO: 1836897 - RNA, 17 nt, Human
cagguggggcagcuuga

SEQ ID NO: 1836898 - RNA, 22 nt, Human
cagguggggucacucuggcagc

SEQ ID NO: 1836899 - RNA, 21 nt, Human
cagguggggucacucuggcag

SEQ ID NO: 1836900 - RNA, 20 nt, Human
cagguggggucacucuggca

SEQ ID NO: 1836901 - RNA, 19 nt, Human
cagguggggucacucuggc

SEQ ID NO: 1836902 - RNA, 23 nt, Human
cagguggggucacucuggcagcu

SEQ ID NO: 1836903 - RNA, 18 nt, Human
caggugguuauggagagg

SEQ ID NO: 1836904 - RNA, 20 nt, Human
caggugguuauggagagggu

SEQ ID NO: 1836905 - RNA, 11 nt, Human
caggugucccu

SEQ ID NO: 1836906 - RNA, 14 nt, Human
caggugucccugca

SEQ ID NO: 1836907 - RNA, 21 nt, Human
caggugugagccaccacgccc

SEQ ID NO: 1836908 - RNA, 22 nt, Human
caggugugagucaccaagccca

SEQ ID NO: 1836909 - RNA, 23 nt, Human
caggugugagucaccaagcccag

SEQ ID NO: 1836910 - RNA, 18 nt, Human
caggugugagccaccacg

SEQ ID NO: 1836911 - RNA, 16 nt, Human
caggugugagucacca

SEQ ID NO: 1836912 - RNA, 20 nt, Human
caggugugagucaccaagcc

SEQ ID NO: 1836913 - RNA, 21 nt, Human
caggugugagucaccaagccc

SEQ ID NO: 1836914 - RNA, 16 nt, Human
caggugugaaccacca

SEQ ID NO: 1836915 - RNA, 19 nt, Human
caggugugaaccaccacac

SEQ ID NO: 1836916 - RNA, 22 nt, Human
caggugugaaccaccacaccca

SEQ ID NO: 1836917 - RNA, 23 nt, Human
caggugugaaccaccacacccag

SEQ ID NO: 1836918 - RNA, 15 nt, Human
caggugucccugcac

SEQ ID NO: 1836919 - RNA, 16 nt, Human
caggugucccugcacu

SEQ ID NO: 1836920 - RNA, 18 nt, Human
caggugucccugcacuug

SEQ ID NO: 1836921 - RNA, 19 nt, Human
caggugucccugcacuugc

SEQ ID NO: 1836922 - RNA, 12 nt, Human
caggugugaacc

SEQ ID NO: 1836923 - RNA, 22 nt, Human
caguaaaugggggugcauuuga

SEQ ID NO: 1836924 - RNA, 21 nt, Human
caguaaaugggggugcauuug

SEQ ID NO: 1836925 - RNA, 12 nt, Human
cagguucagcuu

SEQ ID NO: 1836926 - RNA, 13 nt, Human
cagguucagcuug

SEQ ID NO: 1836927 - RNA, 13 nt, Human
caguaauaacucu

SEQ ID NO: 1836928 - RNA, 12 nt, Human
caguaauaacuc

SEQ ID NO: 1836929 - RNA, 23 nt, Human
caggaguuugagaccaaccuggg

SEQ ID NO: 1836930 - RNA, 22 nt, Human
caggaguuugagaccaaccugg

SEQ ID NO: 1836931 - RNA, 13 nt, Human
caggauagacuuu

SEQ ID NO: 1836932 - RNA, 21 nt, Human
caggaguuugagaccaaccug

SEQ ID NO: 1836933 - RNA, 19 nt, Human
caggaguuucguuuucaaa

SEQ ID NO: 1836934 - RNA, 16 nt, Human
caggaguuggaagugu

SEQ ID NO: 1836935 - RNA, 17 nt, Human
caggaguggguugauuu

SEQ ID NO: 1836936 - RNA, 19 nt, Human
caggagcccugggaggcuc

SEQ ID NO: 1836937 - RNA, 18 nt, Human
caggagcccugggaggcu

SEQ ID NO: 1836938 - RNA, 16 nt, Human
caggagcccugggagg

SEQ ID NO: 1836939 - RNA, 14 nt, Human
caggagcccuggga

SEQ ID NO: 1836940 - RNA, 11 nt, Human
caggagcccug

SEQ ID NO: 1836941 - RNA, 23 nt, Human
caggagccccgaggccuucucug

SEQ ID NO: 1836942 - RNA, 20 nt, Human
caggagccccgaggccuucu

SEQ ID NO: 1836943 - RNA, 22 nt, Human
caggagccccgaggccuucucu

SEQ ID NO: 1836944 - RNA, 19 nt, Human
caggagcagccacauuccu

SEQ ID NO: 1836945 - RNA, 14 nt, Human
caggagcagccaca

SEQ ID NO: 1836946 - RNA, 13 nt, Human
caggagcagccac

SEQ ID NO: 1836947 - RNA, 12 nt, Human
caggagcagcca

SEQ ID NO: 1836948 - RNA, 15 nt, Human
caggagccccgaggc

SEQ ID NO: 1836949 - RNA, 16 nt, Human
caggagccccgaggcc

SEQ ID NO: 1836950 - RNA, 18 nt, Human
caggagccccgaggccuu

SEQ ID NO: 1836951 - RNA, 21 nt, Human
caggagcccugggaggcucug

SEQ ID NO: 1836952 - RNA, 17 nt, Human
caggagccuccugcccu

SEQ ID NO: 1836953 - RNA, 14 nt, Human
caggagccuccugc

SEQ ID NO: 1836954 - RNA, 20 nt, Human
caggagccuccugcccuuac

SEQ ID NO: 1836955 - RNA, 12 nt, Human
caggagugagca

SEQ ID NO: 1836956 - RNA, 16 nt, Human
caggacucugccuccu

SEQ ID NO: 1836957 - RNA, 15 nt, Human
caggacucugccucc

SEQ ID NO: 1836958 - RNA, 13 nt, Human
caggacucugccu

SEQ ID NO: 1836959 - RNA, 12 nt, Human
caggacucugcc

SEQ ID NO: 1836960 - RNA, 13 nt, Human
caggcccggcucc

SEQ ID NO: 1836961 - RNA, 14 nt, Human
caggcccggcucca

SEQ ID NO: 1836962 - RNA, 15 nt, Human
caggcccggcuccag

SEQ ID NO: 1836963 - RNA, 15 nt, Human
caggccccugccacc

SEQ ID NO: 1836964 - RNA, 17 nt, Human
caggccccugccacccu

SEQ ID NO: 1836965 - RNA, 19 nt, Human
caggccccugccacccugg

SEQ ID NO: 1836966 - RNA, 20 nt, Human
caggccccugccacccuggg

SEQ ID NO: 1836967 - RNA, 22 nt, Human
caggccaggcccucugcccacu

SEQ ID NO: 1836968 - RNA, 21 nt, Human
caggccaggcccucugcccac

SEQ ID NO: 1836969 - RNA, 20 nt, Human
caggccacaagacccuugug

SEQ ID NO: 1836970 - RNA, 18 nt, Human
caggccauuccccgucuc

SEQ ID NO: 1836971 - RNA, 18 nt, Human
caggccacaagacccuug

SEQ ID NO: 1836972 - RNA, 17 nt, Human
caggccacaagacccuu

SEQ ID NO: 1836973 - RNA, 13 nt, Human
caggccacaagac

SEQ ID NO: 1836974 - RNA, 23 nt, Human
caggccaaacucaccugccccuc

SEQ ID NO: 1836975 - RNA, 18 nt, Human
caggccaaacucaccugc

SEQ ID NO: 1836976 - RNA, 21 nt, Human
caggccauuccccgucucugg

SEQ ID NO: 1836977 - RNA, 13 nt, Human
caggccccugcca

SEQ ID NO: 1836978 - RNA, 17 nt, Human
caggcaugguggcccac

SEQ ID NO: 1836979 - RNA, 14 nt, Human
caggcagguccagg

SEQ ID NO: 1836980 - RNA, 15 nt, Human
caggcagguccaggg

SEQ ID NO: 1836981 - RNA, 19 nt, Human
caggcagguccaggguuug

SEQ ID NO: 1836982 - RNA, 12 nt, Human
caggcaggucuu

SEQ ID NO: 1836983 - RNA, 13 nt, Human
caggcaggucuug

SEQ ID NO: 1836984 - RNA, 22 nt, Human
caggcaggucuugaacuccugg

SEQ ID NO: 1836985 - RNA, 15 nt, Human
caggcaggugggaug

SEQ ID NO: 1836986 - RNA, 23 nt, Human
caggcaggucuugaacuccuggc

SEQ ID NO: 1836987 - RNA, 21 nt, Human
caggcauuccccaggaggcca

SEQ ID NO: 1836988 - RNA, 20 nt, Human
caggcauuccccaggaggcc

SEQ ID NO: 1836989 - RNA, 19 nt, Human
caggcauuccccaggaggc

SEQ ID NO: 1836990 - RNA, 18 nt, Human
caggcauuccccaggagg

SEQ ID NO: 1836991 - RNA, 23 nt, Human
caggcauuccccaggaggccagc

SEQ ID NO: 1836992 - RNA, 22 nt, Human
caggcauuccccaggaggccag

SEQ ID NO: 1836993 - RNA, 24 nt, Human
caggcauuccccaggaggccagcc

SEQ ID NO: 1836994 - RNA, 17 nt, Human
caggcauuccccaggag

SEQ ID NO: 1836995 - RNA, 16 nt, Human
caggcauuccccagga

SEQ ID NO: 1836996 - RNA, 15 nt, Human
caggcauuccccagg

SEQ ID NO: 1836997 - RNA, 13 nt, Human
caggcauucccca

SEQ ID NO: 1836998 - RNA, 15 nt, Human
caggcauguucucug

SEQ ID NO: 1836999 - RNA, 18 nt, Human
caggcauguucucugagg

SEQ ID NO: 1837000 - RNA, 19 nt, Human
caggcauguucucugagga

SEQ ID NO: 1837001 - RNA, 20 nt, Human
caggcauguucucugaggac

SEQ ID NO: 1837002 - RNA, 17 nt, Human
caggcagccaggccaca

SEQ ID NO: 1837003 - RNA, 16 nt, Human
caggcagccaggccac

SEQ ID NO: 1837004 - RNA, 20 nt, Human
caggcaggaaggcugagagg

SEQ ID NO: 1837005 - RNA, 13 nt, Human
caggcagguccag

SEQ ID NO: 1837006 - RNA, 15 nt, Human
caggcagccaggcca

SEQ ID NO: 1837007 - RNA, 14 nt, Human
caggcagccaggcc

SEQ ID NO: 1837008 - RNA, 14 nt, Human
caggcaagcaccuc

SEQ ID NO: 1837009 - RNA, 15 nt, Human
caggcaagcaccucc

SEQ ID NO: 1837010 - RNA, 16 nt, Human
caggcaagcaccuccu

SEQ ID NO: 1837011 - RNA, 21 nt, Human
caggcaagcaccuccugccuc

SEQ ID NO: 1837012 - RNA, 20 nt, Human
caggauucuuccucccuccc

SEQ ID NO: 1837013 - RNA, 18 nt, Human
caggauucuuccucccuc

SEQ ID NO: 1837014 - RNA, 17 nt, Human
caggauucuuccucccu

SEQ ID NO: 1837015 - RNA, 19 nt, Human
caggauguacaaggacagc

SEQ ID NO: 1837016 - RNA, 23 nt, Human
caggauggccgggcgcgguggcu

SEQ ID NO: 1837017 - RNA, 22 nt, Human
caggaugaugacuauggaaaga

SEQ ID NO: 1837018 - RNA, 20 nt, Human
caggaugaugacuauggaaa

SEQ ID NO: 1837019 - RNA, 18 nt, Human
caggaugaugacuaugga

SEQ ID NO: 1837020 - RNA, 13 nt, Human
caggaucagucug

SEQ ID NO: 1837021 - RNA, 14 nt, Human
caggaucagucuga

SEQ ID NO: 1837022 - RNA, 21 nt, Human
caggcugagccucagucuccc

SEQ ID NO: 1837023 - RNA, 17 nt, Human
caggcugagccucaguc

SEQ ID NO: 1837024 - RNA, 16 nt, Human
caggcugagccucagu

SEQ ID NO: 1837025 - RNA, 15 nt, Human
caggcugagccucag

SEQ ID NO: 1837026 - RNA, 14 nt, Human
caggcugagccuca

SEQ ID NO: 1837027 - RNA, 13 nt, Human
caggcugagccuc

SEQ ID NO: 1837028 - RNA, 12 nt, Human
caggcucuucuc

SEQ ID NO: 1837029 - RNA, 15 nt, Human
caggcucuucuccuu

SEQ ID NO: 1837030 - RNA, 14 nt, Human
caggcucuucuccu

SEQ ID NO: 1837031 - RNA, 22 nt, Human
caggcucuucuccuuucacaac

SEQ ID NO: 1837032 - RNA, 18 nt, Human
caggcucuucuccuuuca

SEQ ID NO: 1837033 - RNA, 12 nt, Human
caggcugagccu

SEQ ID NO: 1837034 - RNA, 20 nt, Human
caggcugcucuugaacuccu

SEQ ID NO: 1837035 - RNA, 12 nt, Human
caggcugcucuu

SEQ ID NO: 1837036 - RNA, 23 nt, Human
caggcugcucuugaacuccugac

SEQ ID NO: 1837037 - RNA, 16 nt, Human
caggcuggcccugccc

SEQ ID NO: 1837038 - RNA, 15 nt, Human
caggcuggcccugcc

SEQ ID NO: 1837039 - RNA, 14 nt, Human
caggcuggcccugc

SEQ ID NO: 1837040 - RNA, 12 nt, Human
caggcuggcccu

SEQ ID NO: 1837041 - RNA, 23 nt, Human
caggcugggucgcccuggacugu

SEQ ID NO: 1837042 - RNA, 21 nt, Human
caggcugggucgcccuggacu

SEQ ID NO: 1837043 - RNA, 23 nt, Human
caggcugggcuucaguggcagcu

SEQ ID NO: 1837044 - RNA, 21 nt, Human
caggcuuagucacugagacag

SEQ ID NO: 1837045 - RNA, 20 nt, Human
caggcuuagucacugagaca

SEQ ID NO: 1837046 - RNA, 17 nt, Human
caggcuuagucacugag

SEQ ID NO: 1837047 - RNA, 16 nt, Human
caggcuuagucacuga

SEQ ID NO: 1837048 - RNA, 14 nt, Human
caggcugugaguuu

SEQ ID NO: 1837049 - RNA, 22 nt, Human
caggcuguaucccaugagccuc

SEQ ID NO: 1837050 - RNA, 23 nt, Human
caggcuguaucccaugagccuca

SEQ ID NO: 1837051 - RNA, 23 nt, Human
caggcuggucucaaacuccugac

SEQ ID NO: 1837052 - RNA, 12 nt, Human
caggcuggucuc

SEQ ID NO: 1837053 - RNA, 22 nt, Human
caggcuggucucgaacuccuga

SEQ ID NO: 1837054 - RNA, 20 nt, Human
caggcuggucucgaacuccu

SEQ ID NO: 1837055 - RNA, 19 nt, Human
caggcuggucucaaacucu

SEQ ID NO: 1837056 - RNA, 23 nt, Human
caggcuggucucgaacuccugac

SEQ ID NO: 1837057 - RNA, 14 nt, Human
caggcuguauccca

SEQ ID NO: 1837058 - RNA, 20 nt, Human
caggcuguaucccaugagcc

SEQ ID NO: 1837059 - RNA, 21 nt, Human
caggcuguaucccaugagccu

SEQ ID NO: 1837060 - RNA, 23 nt, Human
caggcuuagucacugagacagcc

SEQ ID NO: 1837061 - RNA, 22 nt, Human
caggcuuagucacugagacagc

SEQ ID NO: 1837062 - RNA, 23 nt, Human
caggcuuuuuuaucaugugaaau

SEQ ID NO: 1837063 - RNA, 16 nt, Human
cagggaaacagcuaau

SEQ ID NO: 1837064 - RNA, 22 nt, Human
caggcccucugcccacucccug

SEQ ID NO: 1837065 - RNA, 21 nt, Human
caggcccucugcccacucccu

SEQ ID NO: 1837066 - RNA, 20 nt, Human
caggcccucugcccacuccc

SEQ ID NO: 1837067 - RNA, 19 nt, Human
caggcccucugcccacucc

SEQ ID NO: 1837068 - RNA, 17 nt, Human
caggcccucugcccacu

SEQ ID NO: 1837069 - RNA, 16 nt, Human
caggcccucugcccac

SEQ ID NO: 1837070 - RNA, 15 nt, Human
caggcccuuccucuc

SEQ ID NO: 1837071 - RNA, 17 nt, Human
caggcccuuccucucca

SEQ ID NO: 1837072 - RNA, 16 nt, Human
caggcccuuccucucc

SEQ ID NO: 1837073 - RNA, 23 nt, Human
caggcccuuccucuccacugccu

SEQ ID NO: 1837074 - RNA, 21 nt, Human
caggcccuuccucuccacugc

SEQ ID NO: 1837075 - RNA, 20 nt, Human
caggcccuuccucuccacug

SEQ ID NO: 1837076 - RNA, 19 nt, Human
caggcccuuccucuccacu

SEQ ID NO: 1837077 - RNA, 15 nt, Human
caggcccucugccca

SEQ ID NO: 1837078 - RNA, 14 nt, Human
caggcccucugccc

SEQ ID NO: 1837079 - RNA, 13 nt, Human
caggcccucugcc

SEQ ID NO: 1837080 - RNA, 22 nt, Human
caggcccggcuccaggcuccuu

SEQ ID NO: 1837081 - RNA, 20 nt, Human
caggcccggcuccaggcucc

SEQ ID NO: 1837082 - RNA, 21 nt, Human
caggcccggcuccaggcuccu

SEQ ID NO: 1837083 - RNA, 17 nt, Human
caggcccggcuccaggc

SEQ ID NO: 1837084 - RNA, 16 nt, Human
caggcccggcuccagg

SEQ ID NO: 1837085 - RNA, 18 nt, Human
caggcccggcuccaggcu

SEQ ID NO: 1837086 - RNA, 19 nt, Human
caggcccggcuccaggcuc

SEQ ID NO: 1837087 - RNA, 20 nt, Human
caggcucucaggccagcugc

SEQ ID NO: 1837088 - RNA, 19 nt, Human
caggcucucaggccagcug

SEQ ID NO: 1837089 - RNA, 18 nt, Human
caggcucucaggccagcu

SEQ ID NO: 1837090 - RNA, 17 nt, Human
caggcucucaggccagc

SEQ ID NO: 1837091 - RNA, 23 nt, Human
caggcucucaggccagcugcuug

SEQ ID NO: 1837092 - RNA, 21 nt, Human
caggcucucaggccagcugcu

SEQ ID NO: 1837093 - RNA, 16 nt, Human
caggcucucaggccag

SEQ ID NO: 1837094 - RNA, 15 nt, Human
caggcucucaggcca

SEQ ID NO: 1837095 - RNA, 14 nt, Human
caggcucucaggcc

SEQ ID NO: 1837096 - RNA, 13 nt, Human
caggcucucaggc

SEQ ID NO: 1837097 - RNA, 12 nt, Human
caggcucucagg

SEQ ID NO: 1837098 - RNA, 20 nt, Human
caggcucgggcuccccagcc

SEQ ID NO: 1837099 - RNA, 21 nt, Human
caggcuccuuuagcgcccagu

SEQ ID NO: 1837100 - RNA, 16 nt, Human
caggcuccugccacca

SEQ ID NO: 1837101 - RNA, 15 nt, Human
caggcuccugccacc

SEQ ID NO: 1837102 - RNA, 14 nt, Human
caggcuccugccac

SEQ ID NO: 1837103 - RNA, 13 nt, Human
caggcuccugcca

SEQ ID NO: 1837104 - RNA, 18 nt, Human
caggcuccugccaccacg

SEQ ID NO: 1837105 - RNA, 14 nt, Human
caggcuccuuuagc

SEQ ID NO: 1837106 - RNA, 19 nt, Human
caggcuccuuuagcgccca

SEQ ID NO: 1837107 - RNA, 20 nt, Human
caggcuccuuuagcgcccag

SEQ ID NO: 1837108 - RNA, 15 nt, Human
cagggccuggcucag

SEQ ID NO: 1837109 - RNA, 14 nt, Human
cagggccuggcuca

SEQ ID NO: 1837110 - RNA, 13 nt, Human
cagggccuggcuc

SEQ ID NO: 1837111 - RNA, 19 nt, Human
cagggccuggcucaggugg

SEQ ID NO: 1837112 - RNA, 16 nt, Human
cagggccuggcucagg

SEQ ID NO: 1837113 - RNA, 19 nt, Human
caggggaggguagagcgga

SEQ ID NO: 1837114 - RNA, 22 nt, Human
cagggcacaccgggcacucaga

SEQ ID NO: 1837115 - RNA, 23 nt, Human
cagggcacaccgggcacucagaa

SEQ ID NO: 1837116 - RNA, 15 nt, Human
cagggcacaccgggc

SEQ ID NO: 1837117 - RNA, 17 nt, Human
cagggcacaccgggcac

SEQ ID NO: 1837118 - RNA, 19 nt, Human
cagggcacaccgggcacuc

SEQ ID NO: 1837119 - RNA, 21 nt, Human
cagggcacaccgggcacucag

SEQ ID NO: 1837120 - RNA, 23 nt, Human
cagggacagaggggguggccucc

SEQ ID NO: 1837121 - RNA, 14 nt, Human
cagggcacaccggg

SEQ ID NO: 1837122 - RNA, 20 nt, Human
cagggcauggccagguggcc

SEQ ID NO: 1837123 - RNA, 20 nt, Human
cagggacagaggggguggcc

SEQ ID NO: 1837124 - RNA, 14 nt, Human
cagggacagagggg

SEQ ID NO: 1837125 - RNA, 13 nt, Human
cagggacagaggg

SEQ ID NO: 1837126 - RNA, 17 nt, Human
cagggaaggggacaagg

SEQ ID NO: 1837127 - RNA, 15 nt, Human
cagggaaggggacaa

SEQ ID NO: 1837128 - RNA, 22 nt, Human
cagggaaacagcuaaugggaca

SEQ ID NO: 1837129 - RNA, 19 nt, Human
caucuugcucugcugacag

SEQ ID NO: 1837130 - RNA, 16 nt, Human
caucuugcucugcuga

SEQ ID NO: 1837131 - RNA, 17 nt, Human
caucuugcucugcugac

SEQ ID NO: 1837132 - RNA, 21 nt, Human
caucuugaauuguaaggaaug

SEQ ID NO: 1837133 - RNA, 16 nt, Human
caucuugaauuguaag

SEQ ID NO: 1837134 - RNA, 19 nt, Human
cauccuacaagacacagug

SEQ ID NO: 1837135 - RNA, 17 nt, Human
cauccuacaagacacag

SEQ ID NO: 1837136 - RNA, 18 nt, Human
cauccuacaagacacagu

SEQ ID NO: 1837137 - RNA, 16 nt, Human
caucucuacaaaaagc

SEQ ID NO: 1837138 - RNA, 15 nt, Human
caucucuccuccuuu

SEQ ID NO: 1837139 - RNA, 21 nt, Human
caugaggaacaaggcaaggcu

SEQ ID NO: 1837140 - RNA, 20 nt, Human
caugaggaacaaggcaaggc

SEQ ID NO: 1837141 - RNA, 17 nt, Human
caugaggaacaaggcaa

SEQ ID NO: 1837142 - RNA, 16 nt, Human
caugaggaacaaggca

SEQ ID NO: 1837143 - RNA, 22 nt, Human
caugagccucagcauccuggca

SEQ ID NO: 1837144 - RNA, 23 nt, Human
caugagccucagcauccuggcac

SEQ ID NO: 1837145 - RNA, 23 nt, Human
caugaggaacaaggcaaggcugu

SEQ ID NO: 1837146 - RNA, 16 nt, Human
caugagguacugagag

SEQ ID NO: 1837147 - RNA, 19 nt, Human
caugagguacugagaguga

SEQ ID NO: 1837148 - RNA, 13 nt, Human
caugaguccccug

SEQ ID NO: 1837149 - RNA, 15 nt, Human
caugaguccccuguu

SEQ ID NO: 1837150 - RNA, 14 nt, Human
caugaguccccugu

SEQ ID NO: 1837151 - RNA, 23 nt, Human
caugaguccccuguuuguuucug

SEQ ID NO: 1837152 - RNA, 23 nt, Human
caugagcaucaggccaggcccuc

SEQ ID NO: 1837153 - RNA, 22 nt, Human
caugagcaucaggccaggcccu

SEQ ID NO: 1837154 - RNA, 21 nt, Human
caugagcaucaggccaggccc

SEQ ID NO: 1837155 - RNA, 20 nt, Human
caugagcaucaggccaggcc

SEQ ID NO: 1837156 - RNA, 18 nt, Human
caugagcaucaggccagg

SEQ ID NO: 1837157 - RNA, 17 nt, Human
caugagcaucaggccag

SEQ ID NO: 1837158 - RNA, 16 nt, Human
caugagcaucaggcca

SEQ ID NO: 1837159 - RNA, 15 nt, Human
caugagcaucaggcc

SEQ ID NO: 1837160 - RNA, 12 nt, Human
caugagccucag

SEQ ID NO: 1837161 - RNA, 15 nt, Human
caugagccucagcau

SEQ ID NO: 1837162 - RNA, 17 nt, Human
caugagccucagcaucc

SEQ ID NO: 1837163 - RNA, 18 nt, Human
caugagccucagcauccu

SEQ ID NO: 1837164 - RNA, 19 nt, Human
caugagccucagcauccug

SEQ ID NO: 1837165 - RNA, 20 nt, Human
caugagccucagcauccugg

SEQ ID NO: 1837166 - RNA, 21 nt, Human
caugagccucagcauccuggc

SEQ ID NO: 1837167 - RNA, 13 nt, Human
caugagcaucagg

SEQ ID NO: 1837168 - RNA, 20 nt, Human
caugacucguauaugucuca

SEQ ID NO: 1837169 - RNA, 23 nt, Human
caugacucguauaugucucaggu

SEQ ID NO: 1837170 - RNA, 18 nt, Human
caugaagauguagaggag

SEQ ID NO: 1837171 - RNA, 19 nt, Human
caugaagauguagaggaga

SEQ ID NO: 1837172 - RNA, 13 nt, Human
caugaaaacacau

SEQ ID NO: 1837173 - RNA, 14 nt, Human
caugaaaacacauu

SEQ ID NO: 1837174 - RNA, 15 nt, Human
caugaaaacacauuu

SEQ ID NO: 1837175 - RNA, 16 nt, Human
caugaaaacacauuuu

SEQ ID NO: 1837176 - RNA, 17 nt, Human
caugaaaacacauuuuu

SEQ ID NO: 1837177 - RNA, 19 nt, Human
caugaaaacacauuuuucu

SEQ ID NO: 1837178 - RNA, 21 nt, Human
caugaaaacacauuuuucuua

SEQ ID NO: 1837179 - RNA, 12 nt, Human
caugaagacaga

SEQ ID NO: 1837180 - RNA, 14 nt, Human
caucaacaucuugg

SEQ ID NO: 1837181 - RNA, 19 nt, Human
cauauuguuacugguacca

SEQ ID NO: 1837182 - RNA, 13 nt, Human
cauauuguuacug

SEQ ID NO: 1837183 - RNA, 21 nt, Human
cauauugauuuccguuaaaau

SEQ ID NO: 1837184 - RNA, 17 nt, Human
cauauugauuuccguua

SEQ ID NO: 1837185 - RNA, 22 nt, Human
cauauucuguuggccaguguga

SEQ ID NO: 1837186 - RNA, 16 nt, Human
cauaguaugguggcug

SEQ ID NO: 1837187 - RNA, 17 nt, Human
cauaguaugguggcugg

SEQ ID NO: 1837188 - RNA, 15 nt, Human
cauaguaugguggcu

SEQ ID NO: 1837189 - RNA, 23 nt, Human
cauauaagauucauauuuacuuc

SEQ ID NO: 1837190 - RNA, 16 nt, Human
cauauaagugauugcu

SEQ ID NO: 1837191 - RNA, 19 nt, Human
cauagugaugguuccccug

SEQ ID NO: 1837192 - RNA, 18 nt, Human
cauagugaugguuccccu

SEQ ID NO: 1837193 - RNA, 16 nt, Human
caucauccuaagcuau

SEQ ID NO: 1837194 - RNA, 13 nt, Human
caucaugucuggc

SEQ ID NO: 1837195 - RNA, 14 nt, Human
caucaugucuggcu

SEQ ID NO: 1837196 - RNA, 15 nt, Human
caucaugucuggcua

SEQ ID NO: 1837197 - RNA, 12 nt, Human
caucacccgcua

SEQ ID NO: 1837198 - RNA, 20 nt, Human
caucaccaacgucugugcca

SEQ ID NO: 1837199 - RNA, 13 nt, Human
caucccuccuggg

SEQ ID NO: 1837200 - RNA, 15 nt, Human
caucccucuggggcu

SEQ ID NO: 1837201 - RNA, 17 nt, Human
cauccagguucagcuug

SEQ ID NO: 1837202 - RNA, 12 nt, Human
cauccauccagg

SEQ ID NO: 1837203 - RNA, 14 nt, Human
cauccacugugcca

SEQ ID NO: 1837204 - RNA, 17 nt, Human
cauccacugugccaugu

SEQ ID NO: 1837205 - RNA, 23 nt, Human
cauccacugugccaugugccagg

SEQ ID NO: 1837206 - RNA, 22 nt, Human
cauuaaaaaaaaaaaaaaaagu

SEQ ID NO: 1837207 - RNA, 20 nt, Human
cauguuuuucuucucccuca

SEQ ID NO: 1837208 - RNA, 19 nt, Human
cauguuuuucuucucccuc

SEQ ID NO: 1837209 - RNA, 12 nt, Human
cauguuugugau

SEQ ID NO: 1837210 - RNA, 14 nt, Human
cauguuugugauug

SEQ ID NO: 1837211 - RNA, 14 nt, Human
caugucucgacuca

SEQ ID NO: 1837212 - RNA, 12 nt, Human
caugucuggcua

SEQ ID NO: 1837213 - RNA, 21 nt, Human
caugugaugagaggaaaucac

SEQ ID NO: 1837214 - RNA, 20 nt, Human
caugugaugagaggaaauca

SEQ ID NO: 1837215 - RNA, 18 nt, Human
caugugaugagaggaaau

SEQ ID NO: 1837216 - RNA, 17 nt, Human
caugugaugagaggaaa

SEQ ID NO: 1837217 - RNA, 16 nt, Human
caugugaugagaggaa

SEQ ID NO: 1837218 - RNA, 15 nt, Human
caugugaugagagga

SEQ ID NO: 1837219 - RNA, 14 nt, Human
caugugcacaugca

SEQ ID NO: 1837220 - RNA, 18 nt, Human
cauguguuggcagccucu

SEQ ID NO: 1837221 - RNA, 14 nt, Human
cauguguuccaagg

SEQ ID NO: 1837222 - RNA, 17 nt, Human
cauggucggaaaacaug

SEQ ID NO: 1837223 - RNA, 19 nt, Human
cauggucggaaaacaugcu

SEQ ID NO: 1837224 - RNA, 23 nt, Human
cauggucggaaaacaugcuacac

SEQ ID NO: 1837225 - RNA, 23 nt, Human
caugggacagggaggacgcucuc

SEQ ID NO: 1837226 - RNA, 18 nt, Human
caugggccuccugugugu

SEQ ID NO: 1837227 - RNA, 15 nt, Human
cauggacuuccacug

SEQ ID NO: 1837228 - RNA, 22 nt, Human
cauggacuucugccagcauaau

SEQ ID NO: 1837229 - RNA, 17 nt, Human
caugcgggcuuccuccu

SEQ ID NO: 1837230 - RNA, 15 nt, Human
caugcugucccuuac

SEQ ID NO: 1837231 - RNA, 13 nt, Human
caugcugucccuu

SEQ ID NO: 1837232 - RNA, 17 nt, Human
caugcugucccuuacgu

SEQ ID NO: 1837233 - RNA, 14 nt, Human
caugcagcaucuaa

SEQ ID NO: 1837234 - RNA, 17 nt, Human
cauuugaaaauuuugau

SEQ ID NO: 1837235 - RNA, 19 nt, Human
cauuugaaaauuuugaugu

SEQ ID NO: 1837236 - RNA, 22 nt, Human
cauuuacccuucuuuucugacu

SEQ ID NO: 1837237 - RNA, 18 nt, Human
cauugaccugaggcccuu

SEQ ID NO: 1837238 - RNA, 17 nt, Human
cauugaccugaggcccu

SEQ ID NO: 1837239 - RNA, 15 nt, Human
cauugaccugaggcc

SEQ ID NO: 1837240 - RNA, 14 nt, Human
cauugaccugaggc

SEQ ID NO: 1837241 - RNA, 13 nt, Human
cauugugggaagg

SEQ ID NO: 1837242 - RNA, 15 nt, Human
cauugugggaagggg

SEQ ID NO: 1837243 - RNA, 15 nt, Human
cauuuaaaaaaaauc

SEQ ID NO: 1837244 - RNA, 23 nt, Human
cauuuuaccuuugacaaagguaa

SEQ ID NO: 1837245 - RNA, 23 nt, Human
cauuuuauuuuauuaugcaugaa

SEQ ID NO: 1837246 - RNA, 22 nt, Human
cauuuuauuuuauuaugcauga

SEQ ID NO: 1837247 - RNA, 17 nt, Human
cauuuuacuuuuuccug

SEQ ID NO: 1837248 - RNA, 20 nt, Human
cauuuuacuuuuuccuggcu

SEQ ID NO: 1837249 - RNA, 22 nt, Human
cauuuuacuuuuuccuggcuca

SEQ ID NO: 1837250 - RNA, 16 nt, Human
ccaaacccuucagugc

SEQ ID NO: 1837251 - RNA, 17 nt, Human
cauuuuuaguagagaca

SEQ ID NO: 1837252 - RNA, 21 nt, Human
cauuuuuaagugcugcauuua

SEQ ID NO: 1837253 - RNA, 19 nt, Human
cauuccccaggaggccagc

SEQ ID NO: 1837254 - RNA, 18 nt, Human
cauuccccaggaggccag

SEQ ID NO: 1837255 - RNA, 20 nt, Human
cauuccccaggaggccagcc

SEQ ID NO: 1837256 - RNA, 13 nt, Human
cauuccccauggg

SEQ ID NO: 1837257 - RNA, 17 nt, Human
cauuccccgucucuggu

SEQ ID NO: 1837258 - RNA, 17 nt, Human
cauuccccaggaggcca

SEQ ID NO: 1837259 - RNA, 15 nt, Human
cauuccccaggaggc

SEQ ID NO: 1837260 - RNA, 13 nt, Human
cauuccccaggag

SEQ ID NO: 1837261 - RNA, 17 nt, Human
cauuccaccuucccaug

SEQ ID NO: 1837262 - RNA, 22 nt, Human
cauuccaccuucccaugcccug

SEQ ID NO: 1837263 - RNA, 19 nt, Human
cauucauuuucuggguguu

SEQ ID NO: 1837264 - RNA, 23 nt, Human
cauucuucuguacgucugacagg

SEQ ID NO: 1837265 - RNA, 12 nt, Human
cauucugccugc

SEQ ID NO: 1837266 - RNA, 13 nt, Human
cauucugccugcc

SEQ ID NO: 1837267 - RNA, 15 nt, Human
cauucugccugccca

SEQ ID NO: 1837268 - RNA, 16 nt, Human
cauucugccugcccag

SEQ ID NO: 1837269 - RNA, 17 nt, Human
cauucugccugcccagg

SEQ ID NO: 1837270 - RNA, 18 nt, Human
cauucugccugcccaggc

SEQ ID NO: 1837271 - RNA, 19 nt, Human
cauucugccugcccaggcc

SEQ ID NO: 1837272 - RNA, 20 nt, Human
cauucugccugcccaggccc

SEQ ID NO: 1837273 - RNA, 17 nt, Human
cauucuguuaaucauua

SEQ ID NO: 1837274 - RNA, 13 nt, Human
cauucuggaauaa

SEQ ID NO: 1837275 - RNA, 22 nt, Human
cauuccugaugcuucuucagag

SEQ ID NO: 1837276 - RNA, 19 nt, Human
cauuccugaugcuucuuca

SEQ ID NO: 1837277 - RNA, 16 nt, Human
cauuccugaugcuucu

SEQ ID NO: 1837278 - RNA, 14 nt, Human
cauuccugaugcuu

SEQ ID NO: 1837279 - RNA, 23 nt, Human
cauuccugaugcuucuucagaga

SEQ ID NO: 1837280 - RNA, 24 nt, Human
ccaggugcacaagcuccaagcucc

SEQ ID NO: 1837281 - RNA, 17 nt, Human
ccagguuuuuggucuga

SEQ ID NO: 1837282 - RNA, 18 nt, Human
ccagucuggaaugcagug

SEQ ID NO: 1837283 - RNA, 19 nt, Human
ccagucuggaaugcagugg

SEQ ID NO: 1837284 - RNA, 20 nt, Human
ccagucuggaaugcaguggu

SEQ ID NO: 1837285 - RNA, 21 nt, Human
ccagggcuggaaugauuucag

SEQ ID NO: 1837286 - RNA, 18 nt, Human
ccaggugcacaagcucca

SEQ ID NO: 1837287 - RNA, 20 nt, Human
ccaggugcacaagcuccaag

SEQ ID NO: 1837288 - RNA, 19 nt, Human
ccaggugcacaagcuccaa

SEQ ID NO: 1837289 - RNA, 22 nt, Human
ccagggacagaggggguggccu

SEQ ID NO: 1837290 - RNA, 21 nt, Human
ccagggacagaggggguggcc

SEQ ID NO: 1837291 - RNA, 15 nt, Human
ccagggacagagggg

SEQ ID NO: 1837292 - RNA, 14 nt, Human
ccagggacagaggg

SEQ ID NO: 1837293 - RNA, 20 nt, Human
ccaggcuuagucacugagac

SEQ ID NO: 1837294 - RNA, 16 nt, Human
ccagccuccaugcugc

SEQ ID NO: 1837295 - RNA, 15 nt, Human
ccagccuccaugcug

SEQ ID NO: 1837296 - RNA, 21 nt, Human
ccaggcauuccccaggaggcc

SEQ ID NO: 1837297 - RNA, 19 nt, Human
ccaggcauuccccaggagg

SEQ ID NO: 1837298 - RNA, 18 nt, Human
ccaggcauuccccaggag

SEQ ID NO: 1837299 - RNA, 16 nt, Human
ccaggagccccgaggc

SEQ ID NO: 1837300 - RNA, 19 nt, Human
ccaggagccccgaggccuu

SEQ ID NO: 1837301 - RNA, 12 nt, Human
ccaggagccucc

SEQ ID NO: 1837302 - RNA, 20 nt, Human
ccaggagccccgaggccuuc

SEQ ID NO: 1837303 - RNA, 21 nt, Human
ccaggcccucugcccacuccc

SEQ ID NO: 1837304 - RNA, 20 nt, Human
ccaggcccucugcccacucc

SEQ ID NO: 1837305 - RNA, 23 nt, Human
ccaggcccucugcccacucccug

SEQ ID NO: 1837306 - RNA, 22 nt, Human
ccaggcccucugcccacucccu

SEQ ID NO: 1837307 - RNA, 19 nt, Human
ccaggcgccccuucccccu

SEQ ID NO: 1837308 - RNA, 18 nt, Human
ccaggcgccccuuccccc

SEQ ID NO: 1837309 - RNA, 17 nt, Human
ccaggcuuagucacuga

SEQ ID NO: 1837310 - RNA, 24 nt, Human
ccaggcuguaucccaugagccuca

SEQ ID NO: 1837311 - RNA, 13 nt, Human
ccaucuacccucc

SEQ ID NO: 1837312 - RNA, 17 nt, Human
ccagugaggcucugccc

SEQ ID NO: 1837313 - RNA, 20 nt, Human
ccagugccgagaaggaagcc

SEQ ID NO: 1837314 - RNA, 22 nt, Human
ccagugguuccuaauccucuag

SEQ ID NO: 1837315 - RNA, 15 nt, Human
ccagugaggcucugc

SEQ ID NO: 1837316 - RNA, 14 nt, Human
ccagugaggcucug

SEQ ID NO: 1837317 - RNA, 16 nt, Human
ccagugaggcucugcc

SEQ ID NO: 1837318 - RNA, 22 nt, Human
ccaguguuguggauuuaacaga

SEQ ID NO: 1837319 - RNA, 12 nt, Human
ccauaggucacc

SEQ ID NO: 1837320 - RNA, 21 nt, Human
ccauaguaugggacuggccuc

SEQ ID NO: 1837321 - RNA, 23 nt, Human
ccauauucuguuggccaguguga

SEQ ID NO: 1837322 - RNA, 16 nt, Human
ccaucuaaacugcccc

SEQ ID NO: 1837323 - RNA, 15 nt, Human
ccaucuaaacugccc

SEQ ID NO: 1837324 - RNA, 21 nt, Human
ccaugggaaaugucaacaagu

SEQ ID NO: 1837325 - RNA, 14 nt, Human
ccaucuaaacugcc

SEQ ID NO: 1837326 - RNA, 16 nt, Human
ccaugggacagggagg

SEQ ID NO: 1837327 - RNA, 19 nt, Human
ccaugggacagggaggacg

SEQ ID NO: 1837328 - RNA, 21 nt, Human
ccauguuggccaggcugcucu

SEQ ID NO: 1837329 - RNA, 18 nt, Human
ccauguuggccaggcugc

SEQ ID NO: 1837330 - RNA, 17 nt, Human
ccauguuggccaggcug

SEQ ID NO: 1837331 - RNA, 16 nt, Human
ccauguuggccaggcu

SEQ ID NO: 1837332 - RNA, 18 nt, Human
ccauucuccaccugccag

SEQ ID NO: 1837333 - RNA, 15 nt, Human
cccaacccuggcacc

SEQ ID NO: 1837334 - RNA, 17 nt, Human
cccaaggcucugagcaa

SEQ ID NO: 1837335 - RNA, 22 nt, Human
cccaaauggaaaugggcagagc

SEQ ID NO: 1837336 - RNA, 18 nt, Human
cccaaauggaaaugggca

SEQ ID NO: 1837337 - RNA, 23 nt, Human
cccaaauggaaaugggcagagca

SEQ ID NO: 1837338 - RNA, 21 nt, Human
cccaaagugguauagaaaugc

SEQ ID NO: 1837339 - RNA, 20 nt, Human
cccaaagugguauagaaaug

SEQ ID NO: 1837340 - RNA, 16 nt, Human
cccaaagugcugggau

SEQ ID NO: 1837341 - RNA, 18 nt, Human
cccaaaacucuccucugc

SEQ ID NO: 1837342 - RNA, 16 nt, Human
cccaaaacucuccucu

SEQ ID NO: 1837343 - RNA, 20 nt, Human
cccaaaacucuccucugcug

SEQ ID NO: 1837344 - RNA, 13 nt, Human
cccaaagugcugg

SEQ ID NO: 1837345 - RNA, 15 nt, Human
cccaaagugcuggga

SEQ ID NO: 1837346 - RNA, 14 nt, Human
ccauuuguguuuau

SEQ ID NO: 1837347 - RNA, 20 nt, Human
ccauucuccaccugccaggg

SEQ ID NO: 1837348 - RNA, 19 nt, Human
ccauucuccaccugccagg

SEQ ID NO: 1837349 - RNA, 18 nt, Human
ccagcaauucuccugccu

SEQ ID NO: 1837350 - RNA, 16 nt, Human
ccagcaauucuccugc

SEQ ID NO: 1837351 - RNA, 21 nt, Human
ccagcaauucuccugccucag

SEQ ID NO: 1837352 - RNA, 20 nt, Human
ccagcaauucuccugccuca

SEQ ID NO: 1837353 - RNA, 19 nt, Human
ccagcaauucuccugccuc

SEQ ID NO: 1837354 - RNA, 16 nt, Human
ccagcaagugagagcu

SEQ ID NO: 1837355 - RNA, 20 nt, Human
ccagcaagugagagcugggu

SEQ ID NO: 1837356 - RNA, 21 nt, Human
ccagcaagugagagcugggug

SEQ ID NO: 1837357 - RNA, 22 nt, Human
ccagcaagugagagcugggugu

SEQ ID NO: 1837358 - RNA, 14 nt, Human
ccagauuucacucu

SEQ ID NO: 1837359 - RNA, 15 nt, Human
ccagcaagugagagc

SEQ ID NO: 1837360 - RNA, 19 nt, Human
ccagccgccaugcuccugg

SEQ ID NO: 1837361 - RNA, 18 nt, Human
ccagccgccaugcuccug

SEQ ID NO: 1837362 - RNA, 14 nt, Human
ccagccgccaugcu

SEQ ID NO: 1837363 - RNA, 21 nt, Human
ccagccuccaagcuccaucuc

SEQ ID NO: 1837364 - RNA, 19 nt, Human
ccagccucaucucuuuguu

SEQ ID NO: 1837365 - RNA, 16 nt, Human
ccagccccagugccca

SEQ ID NO: 1837366 - RNA, 21 nt, Human
ccagcccuccuuaucaaagga

SEQ ID NO: 1837367 - RNA, 16 nt, Human
ccagcccuuagcaggg

SEQ ID NO: 1837368 - RNA, 17 nt, Human
ccagcccuuagcaggga

SEQ ID NO: 1837369 - RNA, 23 nt, Human
ccagccccaaaacucuccucugc

SEQ ID NO: 1837370 - RNA, 13 nt, Human
ccagccccagugc

SEQ ID NO: 1837371 - RNA, 15 nt, Human
ccagccccagugccc

SEQ ID NO: 1837372 - RNA, 19 nt, Human
ccagccaaagccuccucca

SEQ ID NO: 1837373 - RNA, 18 nt, Human
ccagccaaagccuccucc

SEQ ID NO: 1837374 - RNA, 15 nt, Human
ccagccaaagccucc

SEQ ID NO: 1837375 - RNA, 23 nt, Human
ccagcauaauacuugcuuuggaa

SEQ ID NO: 1837376 - RNA, 12 nt, Human
ccagauuucacu

SEQ ID NO: 1837377 - RNA, 22 nt, Human
ccagauuuaugcauauuauuuu

SEQ ID NO: 1837378 - RNA, 13 nt, Human
ccagauuuaugca

SEQ ID NO: 1837379 - RNA, 21 nt, Human
ccagauugcaacaggcugggc

SEQ ID NO: 1837380 - RNA, 23 nt, Human
ccagauucuuuccugaggcuggg

SEQ ID NO: 1837381 - RNA, 19 nt, Human
ccagauugcaacaggcugg

SEQ ID NO: 1837382 - RNA, 20 nt, Human
ccagauugcaacaggcuggg

SEQ ID NO: 1837383 - RNA, 22 nt, Human
ccagauucuuuccugaggcugg

SEQ ID NO: 1837384 - RNA, 21 nt, Human
ccagauucuuuccugaggcug

SEQ ID NO: 1837385 - RNA, 20 nt, Human
ccagauucuuuccugaggcu

SEQ ID NO: 1837386 - RNA, 19 nt, Human
ccagauucuuuccugaggc

SEQ ID NO: 1837387 - RNA, 18 nt, Human
ccagauucuuuccugagg

SEQ ID NO: 1837388 - RNA, 16 nt, Human
ccagagggccugcaag

SEQ ID NO: 1837389 - RNA, 15 nt, Human
ccagagggccugcaa

SEQ ID NO: 1837390 - RNA, 13 nt, Human
ccagagggccugc

SEQ ID NO: 1837391 - RNA, 22 nt, Human
ccagagggagugacagaggcag

SEQ ID NO: 1837392 - RNA, 23 nt, Human
ccagagggagugacagaggcagc

SEQ ID NO: 1837393 - RNA, 13 nt, Human
ccagagcugccac

SEQ ID NO: 1837394 - RNA, 12 nt, Human
ccagagcugcca

SEQ ID NO: 1837395 - RNA, 11 nt, Human
ccagagcugcc

SEQ ID NO: 1837396 - RNA, 19 nt, Human
ccagagcugccaccugccu

SEQ ID NO: 1837397 - RNA, 16 nt, Human
ccagagcugccaccug

SEQ ID NO: 1837398 - RNA, 15 nt, Human
ccagagcugccaccu

SEQ ID NO: 1837399 - RNA, 14 nt, Human
ccagagcugccacc

SEQ ID NO: 1837400 - RNA, 16 nt, Human
ccagagggagugacag

SEQ ID NO: 1837401 - RNA, 17 nt, Human
ccagagggagugacaga

SEQ ID NO: 1837402 - RNA, 18 nt, Human
ccagagggagugacagag

SEQ ID NO: 1837403 - RNA, 19 nt, Human
ccagagggagugacagagg

SEQ ID NO: 1837404 - RNA, 20 nt, Human
ccagagggagugacagaggc

SEQ ID NO: 1837405 - RNA, 21 nt, Human
ccagagggagugacagaggca

SEQ ID NO: 1837406 - RNA, 21 nt, Human
ccagaggagagaggacccccu

SEQ ID NO: 1837407 - RNA, 22 nt, Human
ccagaggagagaggacccccug

SEQ ID NO: 1837408 - RNA, 20 nt, Human
ccagacaccuugacagggca

SEQ ID NO: 1837409 - RNA, 21 nt, Human
ccagagaggguggugaccucu

SEQ ID NO: 1837410 - RNA, 23 nt, Human
ccagagaggguggugaccucugc

SEQ ID NO: 1837411 - RNA, 14 nt, Human
ccagagaggguggu

SEQ ID NO: 1837412 - RNA, 20 nt, Human
ccacuguacuugcucuugau

SEQ ID NO: 1837413 - RNA, 17 nt, Human
ccagacaccuugacagg

SEQ ID NO: 1837414 - RNA, 19 nt, Human
ccagacaccuugacagggc

SEQ ID NO: 1837415 - RNA, 19 nt, Human
ccacuguacuugcucuuga

SEQ ID NO: 1837416 - RNA, 18 nt, Human
ccacuguacuugcucuug

SEQ ID NO: 1837417 - RNA, 17 nt, Human
ccacuguacuugcucuu

SEQ ID NO: 1837418 - RNA, 12 nt, Human
ccacacccagcc

SEQ ID NO: 1837419 - RNA, 13 nt, Human
ccacacuccagcu

SEQ ID NO: 1837420 - RNA, 17 nt, Human
ccacacuccagcuggga

SEQ ID NO: 1837421 - RNA, 14 nt, Human
ccacacuccagcug

SEQ ID NO: 1837422 - RNA, 13 nt, Human
ccacacccagccc

SEQ ID NO: 1837423 - RNA, 14 nt, Human
ccacacccagccca

SEQ ID NO: 1837424 - RNA, 19 nt, Human
ccacccaagggccuggccu

SEQ ID NO: 1837425 - RNA, 17 nt, Human
ccacccaagggccuggc

SEQ ID NO: 1837426 - RNA, 16 nt, Human
ccacccaagggccugg

SEQ ID NO: 1837427 - RNA, 20 nt, Human
ccaccaacauacucccaucu

SEQ ID NO: 1837428 - RNA, 14 nt, Human
ccaccacacccagc

SEQ ID NO: 1837429 - RNA, 16 nt, Human
ccaccacacccagccc

SEQ ID NO: 1837430 - RNA, 16 nt, Human
ccacccaccucagccu

SEQ ID NO: 1837431 - RNA, 14 nt, Human
ccacccaccucagc

SEQ ID NO: 1837432 - RNA, 15 nt, Human
ccacccaccucagcc

SEQ ID NO: 1837433 - RNA, 21 nt, Human
ccacccaagggccuggccuga

SEQ ID NO: 1837434 - RNA, 20 nt, Human
ccacccaagggccuggccug

SEQ ID NO: 1837435 - RNA, 22 nt, Human
ccacccaagggccuggccugag

SEQ ID NO: 1837436 - RNA, 13 nt, Human
ccacccaccucag

SEQ ID NO: 1837437 - RNA, 22 nt, Human
ccacauagugaugguuccccug

SEQ ID NO: 1837438 - RNA, 21 nt, Human
ccacauagugaugguuccccu

SEQ ID NO: 1837439 - RNA, 19 nt, Human
ccacauagugaugguuccc

SEQ ID NO: 1837440 - RNA, 23 nt, Human
ccacauagugaugguuccccugu

SEQ ID NO: 1837441 - RNA, 14 nt, Human
ccacaucuugcucu

SEQ ID NO: 1837442 - RNA, 18 nt, Human
ccaccaacauacucccau

SEQ ID NO: 1837443 - RNA, 14 nt, Human
ccaccaacauacuc

SEQ ID NO: 1837444 - RNA, 16 nt, Human
ccacaucuugcucugc

SEQ ID NO: 1837445 - RNA, 22 nt, Human
ccacaucuugcucugcugacag

SEQ ID NO: 1837446 - RNA, 23 nt, Human
ccacaucuugcucugcugacaga

SEQ ID NO: 1837447 - RNA, 19 nt, Human
ccaccccucaacaccucug

SEQ ID NO: 1837448 - RNA, 17 nt, Human
ccacccugaaagcccug

SEQ ID NO: 1837449 - RNA, 16 nt, Human
ccacccugaaagcccu

SEQ ID NO: 1837450 - RNA, 18 nt, Human
ccacccugaaagcccuga

SEQ ID NO: 1837451 - RNA, 12 nt, Human
ccaccucagccu

SEQ ID NO: 1837452 - RNA, 13 nt, Human
ccaccucagccuc

SEQ ID NO: 1837453 - RNA, 14 nt, Human
ccaccucagccucc

SEQ ID NO: 1837454 - RNA, 15 nt, Human
ccaccucagccuccc

SEQ ID NO: 1837455 - RNA, 12 nt, Human
ccacccaggagc

SEQ ID NO: 1837456 - RNA, 14 nt, Human
ccacccaggagccc

SEQ ID NO: 1837457 - RNA, 16 nt, Human
ccaccuggccucugca

SEQ ID NO: 1837458 - RNA, 15 nt, Human
ccaccuggccucugc

SEQ ID NO: 1837459 - RNA, 22 nt, Human
ccaccugcggugcuaucucccc

SEQ ID NO: 1837460 - RNA, 17 nt, Human
ccaccuggccucugcac

SEQ ID NO: 1837461 - RNA, 12 nt, Human
ccacggccaggc

SEQ ID NO: 1837462 - RNA, 13 nt, Human
ccacggccaggcc

SEQ ID NO: 1837463 - RNA, 14 nt, Human
ccacggccaggcca

SEQ ID NO: 1837464 - RNA, 15 nt, Human
ccacggccaggccag

SEQ ID NO: 1837465 - RNA, 17 nt, Human
ccaccucccacaaagga

SEQ ID NO: 1837466 - RNA, 12 nt, Human
ccaccugccagg

SEQ ID NO: 1837467 - RNA, 14 nt, Human
ccaccugcccaacc

SEQ ID NO: 1837468 - RNA, 20 nt, Human
ccaccugccuguugggccag

SEQ ID NO: 1837469 - RNA, 17 nt, Human
ccaccugccuguugggc

SEQ ID NO: 1837470 - RNA, 13 nt, Human
ccacguuucuaaa

SEQ ID NO: 1837471 - RNA, 13 nt, Human
ccacucccugcaa

SEQ ID NO: 1837472 - RNA, 12 nt, Human
ccacucccugca

SEQ ID NO: 1837473 - RNA, 19 nt, Human
ccacuccagaccccuggcu

SEQ ID NO: 1837474 - RNA, 17 nt, Human
ccacuccagaccccugg

SEQ ID NO: 1837475 - RNA, 23 nt, Human
ccacuacggaauaguuggcuagg

SEQ ID NO: 1837476 - RNA, 18 nt, Human
ccacuacauucuguuaau

SEQ ID NO: 1837477 - RNA, 22 nt, Human
ccacuacggaauaguuggcuag

SEQ ID NO: 1837478 - RNA, 20 nt, Human
ccacugcacuccagccuggg

SEQ ID NO: 1837479 - RNA, 19 nt, Human
ccacugcacuccagccugg

SEQ ID NO: 1837480 - RNA, 15 nt, Human
ccacucccugcaacc

SEQ ID NO: 1837481 - RNA, 23 nt, Human
ccacugcacuccagccuggguga

SEQ ID NO: 1837482 - RNA, 16 nt, Human
ccacugcgaccacaag

SEQ ID NO: 1837483 - RNA, 11 nt, Human
ccacugccucu

SEQ ID NO: 1837484 - RNA, 11 nt, Human
ccacugcucug

SEQ ID NO: 1837485 - RNA, 22 nt, Human
ccugccaggaagccagcaggcu

SEQ ID NO: 1837486 - RNA, 21 nt, Human
ccugccaggaagccagcaggc

SEQ ID NO: 1837487 - RNA, 19 nt, Human
ccugccaggaagccagcag

SEQ ID NO: 1837488 - RNA, 18 nt, Human
ccugccaggaagccagca

SEQ ID NO: 1837489 - RNA, 11 nt, Human
ccugccaggga

SEQ ID NO: 1837490 - RNA, 16 nt, Human
ccugccaggcauggug

SEQ ID NO: 1837491 - RNA, 23 nt, Human
ccugccaggaagccagcaggcuc

SEQ ID NO: 1837492 - RNA, 15 nt, Human
ccugccagggacaga

SEQ ID NO: 1837493 - RNA, 14 nt, Human
ccugccagggacag

SEQ ID NO: 1837494 - RNA, 13 nt, Human
ccugccagggaca

SEQ ID NO: 1837495 - RNA, 12 nt, Human
ccugccagggac

SEQ ID NO: 1837496 - RNA, 16 nt, Human
ccugccagggacagag

SEQ ID NO: 1837497 - RNA, 17 nt, Human
ccugccaggaagccagc

SEQ ID NO: 1837498 - RNA, 15 nt, Human
ccugccaggaagcca

SEQ ID NO: 1837499 - RNA, 14 nt, Human
ccugccaggaagcc

SEQ ID NO: 1837500 - RNA, 13 nt, Human
ccugccaggaagc

SEQ ID NO: 1837501 - RNA, 14 nt, Human
ccugcaagaacaag

SEQ ID NO: 1837502 - RNA, 20 nt, Human
ccugcaguacuuuaccuccu

SEQ ID NO: 1837503 - RNA, 18 nt, Human
ccugcaguacuuuaccuc

SEQ ID NO: 1837504 - RNA, 15 nt, Human
ccugcagggccaagc

SEQ ID NO: 1837505 - RNA, 15 nt, Human
ccugauugugucucu

SEQ ID NO: 1837506 - RNA, 14 nt, Human
ccugaggcccuucu

SEQ ID NO: 1837507 - RNA, 22 nt, Human
ccugaugcuucuucagagacuc

SEQ ID NO: 1837508 - RNA, 21 nt, Human
ccugaugcuucuucagagacu

SEQ ID NO: 1837509 - RNA, 20 nt, Human
ccugaugcuucuucagagac

SEQ ID NO: 1837510 - RNA, 19 nt, Human
ccugaugcuucuucagaga

SEQ ID NO: 1837511 - RNA, 12 nt, Human
ccugaggcccuu

SEQ ID NO: 1837512 - RNA, 11 nt, Human
ccugaggcccu

SEQ ID NO: 1837513 - RNA, 19 nt, Human
ccugauugugucucuuggu

SEQ ID NO: 1837514 - RNA, 17 nt, Human
ccugauugugucucuug

SEQ ID NO: 1837515 - RNA, 21 nt, Human
ccugcaaccugauugugucuc

SEQ ID NO: 1837516 - RNA, 22 nt, Human
ccugcaaccugauugugucucu

SEQ ID NO: 1837517 - RNA, 11 nt, Human
ccugagcccca

SEQ ID NO: 1837518 - RNA, 14 nt, Human
ccugagcuuucugc

SEQ ID NO: 1837519 - RNA, 12 nt, Human
ccugagccagau

SEQ ID NO: 1837520 - RNA, 21 nt, Human
ccugaggcccagagggccugc

SEQ ID NO: 1837521 - RNA, 16 nt, Human
ccugagcuuucugcua

SEQ ID NO: 1837522 - RNA, 16 nt, Human
ccugacagaaggacuc

SEQ ID NO: 1837523 - RNA, 23 nt, Human
ccugacaacacucauugaccuga

SEQ ID NO: 1837524 - RNA, 18 nt, Human
ccuggaauauauaaccag

SEQ ID NO: 1837525 - RNA, 13 nt, Human
ccuggcagccccu

SEQ ID NO: 1837526 - RNA, 14 nt, Human
ccuggcagccccug

SEQ ID NO: 1837527 - RNA, 12 nt, Human
ccuggcagcccc

SEQ ID NO: 1837528 - RNA, 22 nt, Human
ccuggcacccggccccugcugg

SEQ ID NO: 1837529 - RNA, 22 nt, Human
ccuggcacuauaauguaagcuc

SEQ ID NO: 1837530 - RNA, 23 nt, Human
ccuggcacccggccccugcuggu

SEQ ID NO: 1837531 - RNA, 22 nt, Human
ccuggcuccaaacccucgaggc

SEQ ID NO: 1837532 - RNA, 17 nt, Human
ccuggcucccacaggcc

SEQ ID NO: 1837533 - RNA, 23 nt, Human
ccuggcucccacaggcccuuccu

SEQ ID NO: 1837534 - RNA, 22 nt, Human
ccuggcagccgugccuucagcu

SEQ ID NO: 1837535 - RNA, 21 nt, Human
ccuggcagccgugccuucagc

SEQ ID NO: 1837536 - RNA, 15 nt, Human
ccuggccagaugcac

SEQ ID NO: 1837537 - RNA, 24 nt, Human
ccuggcuuuucacugcuggcugcc

SEQ ID NO: 1837538 - RNA, 23 nt, Human
ccuggcuuuucacugcuggcugc

SEQ ID NO: 1837539 - RNA, 22 nt, Human
ccuggcuuuucacugcuggcug

SEQ ID NO: 1837540 - RNA, 21 nt, Human
ccuggcuuuucacugcuggcu

SEQ ID NO: 1837541 - RNA, 18 nt, Human
ccuggcuuuucacugcug

SEQ ID NO: 1837542 - RNA, 20 nt, Human
ccuggcuuuucacugcuggc

SEQ ID NO: 1837543 - RNA, 23 nt, Human
ccuggggguucuuucuuccucug

SEQ ID NO: 1837544 - RNA, 22 nt, Human
ccuggggguucuuucuuccucu

SEQ ID NO: 1837545 - RNA, 21 nt, Human
ccuggggguucuuucuuccuc

SEQ ID NO: 1837546 - RNA, 18 nt, Human
ccuggggguucuuucuuc

SEQ ID NO: 1837547 - RNA, 21 nt, Human
ccuggucacaggacucugccu

SEQ ID NO: 1837548 - RNA, 23 nt, Human
ccuggucacaggacucugccucc

SEQ ID NO: 1837549 - RNA, 22 nt, Human
ccuggucacaggacucugccuc

SEQ ID NO: 1837550 - RNA, 22 nt, Human
ccugcggugcuaucucccccag

SEQ ID NO: 1837551 - RNA, 21 nt, Human
ccugcucuccgaccagacacc

SEQ ID NO: 1837552 - RNA, 22 nt, Human
ccugcucuccucuugccacugc

SEQ ID NO: 1837553 - RNA, 21 nt, Human
ccugcucuccucuugccacug

SEQ ID NO: 1837554 - RNA, 19 nt, Human
ccugcucuccucuugccac

SEQ ID NO: 1837555 - RNA, 18 nt, Human
ccugcucuccucuugcca

SEQ ID NO: 1837556 - RNA, 16 nt, Human
ccugcucuccucuugc

SEQ ID NO: 1837557 - RNA, 22 nt, Human
ccugcucuccgaccagacaccu

SEQ ID NO: 1837558 - RNA, 14 nt, Human
ccugcuucaaauau

SEQ ID NO: 1837559 - RNA, 15 nt, Human
ccugcugagucccag

SEQ ID NO: 1837560 - RNA, 23 nt, Human
ccugcuuugggcugcccuggugc

SEQ ID NO: 1837561 - RNA, 22 nt, Human
ccugcuuugggcugcccuggug

SEQ ID NO: 1837562 - RNA, 21 nt, Human
ccugcuuugggcugcccuggu

SEQ ID NO: 1837563 - RNA, 19 nt, Human
ccugcuuugggcugcccug

SEQ ID NO: 1837564 - RNA, 20 nt, Human
ccugcuuugggcugcccugg

SEQ ID NO: 1837565 - RNA, 23 nt, Human
ccugccuguugggccaggagccu

SEQ ID NO: 1837566 - RNA, 11 nt, Human
ccugccucagc

SEQ ID NO: 1837567 - RNA, 22 nt, Human
ccugccccucaacucuccucca

SEQ ID NO: 1837568 - RNA, 17 nt, Human
ccugcggugcuaucucc

SEQ ID NO: 1837569 - RNA, 16 nt, Human
ccugcggugcuaucuc

SEQ ID NO: 1837570 - RNA, 22 nt, Human
ccugcgggucacaggagggagg

SEQ ID NO: 1837571 - RNA, 18 nt, Human
ccugcgggucacaggagg

SEQ ID NO: 1837572 - RNA, 12 nt, Human
ccuucagugccu

SEQ ID NO: 1837573 - RNA, 19 nt, Human
ccuuaccugccaggaagcc

SEQ ID NO: 1837574 - RNA, 19 nt, Human
ccuuacccucauguucuua

SEQ ID NO: 1837575 - RNA, 17 nt, Human
ccuuagaagucacacag

SEQ ID NO: 1837576 - RNA, 14 nt, Human
ccuuagaaguggaa

SEQ ID NO: 1837577 - RNA, 18 nt, Human
ccuuagaagucacacagu

SEQ ID NO: 1837578 - RNA, 20 nt, Human
ccuuaccagcagagcaccuu

SEQ ID NO: 1837579 - RNA, 20 nt, Human
ccuuaccacugcucugauga

SEQ ID NO: 1837580 - RNA, 15 nt, Human
ccuuacccucauguu

SEQ ID NO: 1837581 - RNA, 13 nt, Human
ccuuaccagcaga

SEQ ID NO: 1837582 - RNA, 17 nt, Human
ccuuaccacugcucuga

SEQ ID NO: 1837583 - RNA, 20 nt, Human
ccuuacacaaugguuuucuu

SEQ ID NO: 1837584 - RNA, 14 nt, Human
ccuuacacaauggu

SEQ ID NO: 1837585 - RNA, 17 nt, Human
ccuuaaagaguguggca

SEQ ID NO: 1837586 - RNA, 20 nt, Human
ccugugugugcgccuacagg

SEQ ID NO: 1837587 - RNA, 21 nt, Human
ccugugugugcgccuacagga

SEQ ID NO: 1837588 - RNA, 22 nt, Human
ccugugucuugcaauggcagcc

SEQ ID NO: 1837589 - RNA, 22 nt, Human
ccugugucuuuaaaugcugcuu

SEQ ID NO: 1837590 - RNA, 17 nt, Human
ccugugucuugcaaugg

SEQ ID NO: 1837591 - RNA, 19 nt, Human
ccugugucuugcaauggca

SEQ ID NO: 1837592 - RNA, 21 nt, Human
ccugugucuugcaauggcagc

SEQ ID NO: 1837593 - RNA, 16 nt, Human
ccuguuucugcagcca

SEQ ID NO: 1837594 - RNA, 18 nt, Human
ccuguuuguuucugaaag

SEQ ID NO: 1837595 - RNA, 14 nt, Human
ccuguuuguuucug

SEQ ID NO: 1837596 - RNA, 15 nt, Human
ccuguuuaagagaca

SEQ ID NO: 1837597 - RNA, 12 nt, Human
ccuguuuaagag

SEQ ID NO: 1837598 - RNA, 23 nt, Human
ccuguugggccaggagccuccug

SEQ ID NO: 1837599 - RNA, 12 nt, Human
ccuucagccuga

SEQ ID NO: 1837600 - RNA, 14 nt, Human
ccuucagugccaaa

SEQ ID NO: 1837601 - RNA, 19 nt, Human
ccuucauuuggcauucccc

SEQ ID NO: 1837602 - RNA, 11 nt, Human
ccuucagugcc

SEQ ID NO: 1837603 - RNA, 20 nt, Human
ccuucaccuuuguccccacc

SEQ ID NO: 1837604 - RNA, 19 nt, Human
ccuucaccuuuguccccac

SEQ ID NO: 1837605 - RNA, 17 nt, Human
ccuucacagaugggugc

SEQ ID NO: 1837606 - RNA, 14 nt, Human
ccuuagacaguccc

SEQ ID NO: 1837607 - RNA, 21 nt, Human
ccuucaccuuuguccccaccg

SEQ ID NO: 1837608 - RNA, 14 nt, Human
ccuucacuuaggaa

SEQ ID NO: 1837609 - RNA, 14 nt, Human
ccuucggccuccau

SEQ ID NO: 1837610 - RNA, 19 nt, Human
ccuucggccuccauccuga

SEQ ID NO: 1837611 - RNA, 20 nt, Human
ccuucggccuccauccugag

SEQ ID NO: 1837612 - RNA, 22 nt, Human
ccuucauuuggcauuccccacu

SEQ ID NO: 1837613 - RNA, 13 nt, Human
ccuuccucugagg

SEQ ID NO: 1837614 - RNA, 20 nt, Human
ccuuccucugagccuuggga

SEQ ID NO: 1837615 - RNA, 21 nt, Human
ccuuccucuccacugccuucg

SEQ ID NO: 1837616 - RNA, 16 nt, Human
ccuuccucugagccuu

SEQ ID NO: 1837617 - RNA, 15 nt, Human
ccuuccucugagccu

SEQ ID NO: 1837618 - RNA, 22 nt, Human
ccuugguuaggcauugugggaa

SEQ ID NO: 1837619 - RNA, 21 nt, Human
ccuugguuaggcauuguggga

SEQ ID NO: 1837620 - RNA, 22 nt, Human
ccuuggugucgggcaugacacg

SEQ ID NO: 1837621 - RNA, 12 nt, Human
ccuugggacccc

SEQ ID NO: 1837622 - RNA, 18 nt, Human
ccuuugacgccaucccag

SEQ ID NO: 1837623 - RNA, 17 nt, Human
ccuuugacgccauccca

SEQ ID NO: 1837624 - RNA, 16 nt, Human
ccuuugacgccauccc

SEQ ID NO: 1837625 - RNA, 14 nt, Human
ccuucuguggcuca

SEQ ID NO: 1837626 - RNA, 21 nt, Human
ccuucuguggcucacagaacc

SEQ ID NO: 1837627 - RNA, 19 nt, Human
ccuucuccuucaccuuugu

SEQ ID NO: 1837628 - RNA, 15 nt, Human
ccuucuccuucaccu

SEQ ID NO: 1837629 - RNA, 15 nt, Human
ccuucggcgccuuaa

SEQ ID NO: 1837630 - RNA, 16 nt, Human
ccuucggccuccaucc

SEQ ID NO: 1837631 - RNA, 20 nt, Human
ccuugaaaacuuuaugcuaa

SEQ ID NO: 1837632 - RNA, 13 nt, Human
ccuugaacuagga

SEQ ID NO: 1837633 - RNA, 20 nt, Human
ccuugaguugauucagcucu

SEQ ID NO: 1837634 - RNA, 23 nt, Human
ccuugaccauucuccaccugcca

SEQ ID NO: 1837635 - RNA, 13 nt, Human
ccuugacucuuuc

SEQ ID NO: 1837636 - RNA, 17 nt, Human
cgccaugcuccuggccc

SEQ ID NO: 1837637 - RNA, 20 nt, Human
cgauuucuguuuagauaaua

SEQ ID NO: 1837638 - RNA, 18 nt, Human
cgagcccugguggcagug

SEQ ID NO: 1837639 - RNA, 18 nt, Human
cgagcaugccuggauggg

SEQ ID NO: 1837640 - RNA, 15 nt, Human
cgagcccugguggca

SEQ ID NO: 1837641 - RNA, 16 nt, Human
cgagcccugguggcag

SEQ ID NO: 1837642 - RNA, 21 nt, Human
cgccagauucuuuccugaggc

SEQ ID NO: 1837643 - RNA, 20 nt, Human
cgccagauucuuuccugagg

SEQ ID NO: 1837644 - RNA, 19 nt, Human
cgccagauucuuuccugag

SEQ ID NO: 1837645 - RNA, 22 nt, Human
cgccaggggaaaaucagccugc

SEQ ID NO: 1837646 - RNA, 16 nt, Human
cgcagacaggaccagg

SEQ ID NO: 1837647 - RNA, 15 nt, Human
cgcagacaggaccag

SEQ ID NO: 1837648 - RNA, 14 nt, Human
cgcagcccugcaga

SEQ ID NO: 1837649 - RNA, 10 nt, Human
cgcagcccug

SEQ ID NO: 1837650 - RNA, 12 nt, Human
cgaaagaacagu

SEQ ID NO: 1837651 - RNA, 21 nt, Human
cgaaagaacaguccauugaaa

SEQ ID NO: 1837652 - RNA, 22 nt, Human
cgaaagggacuuggaagcuccg

SEQ ID NO: 1837653 - RNA, 20 nt, Human
cgaaaggaugaaagugacca

SEQ ID NO: 1837654 - RNA, 19 nt, Human
cgaaagggacuuggaagcu

SEQ ID NO: 1837655 - RNA, 14 nt, Human
cgaacuccugaccu

SEQ ID NO: 1837656 - RNA, 12 nt, Human
cgaacuggcugc

SEQ ID NO: 1837657 - RNA, 14 nt, Human
cgaacuggcugcaa

SEQ ID NO: 1837658 - RNA, 20 nt, Human
cgaaaacguggcugcuucaa

SEQ ID NO: 1837659 - RNA, 19 nt, Human
cgaaaacguggcugcuuca

SEQ ID NO: 1837660 - RNA, 18 nt, Human
cgaaaacguggcugcuuc

SEQ ID NO: 1837661 - RNA, 15 nt, Human
cgaaaacguggcugc

SEQ ID NO: 1837662 - RNA, 21 nt, Human
ccuuugacgccaucccagccc

SEQ ID NO: 1837663 - RNA, 20 nt, Human
ccuuugacgccaucccagcc

SEQ ID NO: 1837664 - RNA, 22 nt, Human
ccuuugacgccaucccagcccc

SEQ ID NO: 1837665 - RNA, 20 nt, Human
cgagcaggcuucuucccccc

SEQ ID NO: 1837666 - RNA, 17 nt, Human
cgagcaugccuggaugg

SEQ ID NO: 1837667 - RNA, 16 nt, Human
cgagcaugccuggaug

SEQ ID NO: 1837668 - RNA, 13 nt, Human
cgagcaugccugg

SEQ ID NO: 1837669 - RNA, 14 nt, Human
cgagcaugccugga

SEQ ID NO: 1837670 - RNA, 18 nt, Human
cgagaucacgccacugca

SEQ ID NO: 1837671 - RNA, 20 nt, Human
cgagaucacgccacugcacu

SEQ ID NO: 1837672 - RNA, 20 nt, Human
cgagauugcaccacugcacu

SEQ ID NO: 1837673 - RNA, 18 nt, Human
cgagauagccaaggccaa

SEQ ID NO: 1837674 - RNA, 17 nt, Human
cgagaucacgccacugc

SEQ ID NO: 1837675 - RNA, 13 nt, Human
cgaauagcuggga

SEQ ID NO: 1837676 - RNA, 14 nt, Human
cgaauagcugggac

SEQ ID NO: 1837677 - RNA, 17 nt, Human
cgagaaacagccugugu

SEQ ID NO: 1837678 - RNA, 22 nt, Human
cccaccucucucacuccuugaa

SEQ ID NO: 1837679 - RNA, 23 nt, Human
cccaccgggcugggagcucugca

SEQ ID NO: 1837680 - RNA, 17 nt, Human
cccaccucagccucccg

SEQ ID NO: 1837681 - RNA, 20 nt, Human
cccaccgcagacaggaccag

SEQ ID NO: 1837682 - RNA, 19 nt, Human
cccaccgcagacaggacca

SEQ ID NO: 1837683 - RNA, 18 nt, Human
cccaccaucaugucuggc

SEQ ID NO: 1837684 - RNA, 19 nt, Human
cccacgcuggagugcagug

SEQ ID NO: 1837685 - RNA, 20 nt, Human
cccacgcuggagugcaguga

SEQ ID NO: 1837686 - RNA, 21 nt, Human
cccacgcuggagugcagugag

SEQ ID NO: 1837687 - RNA, 23 nt, Human
cccacuugagaauuacccuuuug

SEQ ID NO: 1837688 - RNA, 12 nt, Human
cccacuucugcc

SEQ ID NO: 1837689 - RNA, 16 nt, Human
cccaccuggccucugc

SEQ ID NO: 1837690 - RNA, 21 nt, Human
cccacgacugcccggcagggu

SEQ ID NO: 1837691 - RNA, 20 nt, Human
cccacgacugcccggcaggg

SEQ ID NO: 1837692 - RNA, 21 nt, Human
cccaccuggccucugcacucc

SEQ ID NO: 1837693 - RNA, 19 nt, Human
cccaccuggccucugcacu

SEQ ID NO: 1837694 - RNA, 17 nt, Human
cccaccuggccucugca

SEQ ID NO: 1837695 - RNA, 19 nt, Human
cccacagcgcuggccggga

SEQ ID NO: 1837696 - RNA, 13 nt, Human
cccacaagaaaug

SEQ ID NO: 1837697 - RNA, 20 nt, Human
cccaaugcacuuuguucugg

SEQ ID NO: 1837698 - RNA, 16 nt, Human
cccaaugcacuuuguu

SEQ ID NO: 1837699 - RNA, 20 nt, Human
cccacaagaaaugaaagcag

SEQ ID NO: 1837700 - RNA, 14 nt, Human
cccagagggccugc

SEQ ID NO: 1837701 - RNA, 15 nt, Human
cccagagggccugca

SEQ ID NO: 1837702 - RNA, 21 nt, Human
cccgaggccuucucugaagga

SEQ ID NO: 1837703 - RNA, 13 nt, Human
cccgaguagcugg

SEQ ID NO: 1837704 - RNA, 14 nt, Human
cccgaguagcuggg

SEQ ID NO: 1837705 - RNA, 15 nt, Human
cccgaguagcuggga

SEQ ID NO: 1837706 - RNA, 16 nt, Human
cccgaguagcugggac

SEQ ID NO: 1837707 - RNA, 17 nt, Human
cccgaguagcugggacu

SEQ ID NO: 1837708 - RNA, 18 nt, Human
cccgaguagcugggacua

SEQ ID NO: 1837709 - RNA, 21 nt, Human
cccgaguagcugggacuacag

SEQ ID NO: 1837710 - RNA, 15 nt, Human
cccgggcucugccuc

SEQ ID NO: 1837711 - RNA, 14 nt, Human
cccgggcucugccu

SEQ ID NO: 1837712 - RNA, 12 nt, Human
cccgggcucugc

SEQ ID NO: 1837713 - RNA, 20 nt, Human
cccgcugucagccauuccug

SEQ ID NO: 1837714 - RNA, 19 nt, Human
cccgcugucagccauuccu

SEQ ID NO: 1837715 - RNA, 22 nt, Human
cccgaguagcugggacuacagg

SEQ ID NO: 1837716 - RNA, 20 nt, Human
cccuacaguugaaaaacagc

SEQ ID NO: 1837717 - RNA, 23 nt, Human
cccuaaugcgcaggcuggcccug

SEQ ID NO: 1837718 - RNA, 17 nt, Human
cccuaaugcgcaggcug

SEQ ID NO: 1837719 - RNA, 22 nt, Human
cccuaaugcgcaggcuggcccu

SEQ ID NO: 1837720 - RNA, 21 nt, Human
cccuaaugcgcaggcuggccc

SEQ ID NO: 1837721 - RNA, 18 nt, Human
cccuaccgagucucuucu

SEQ ID NO: 1837722 - RNA, 21 nt, Human
cccuaccgagucucuucucca

SEQ ID NO: 1837723 - RNA, 15 nt, Human
cccgugggguuccuc

SEQ ID NO: 1837724 - RNA, 22 nt, Human
cccgucucugguuccuccccuc

SEQ ID NO: 1837725 - RNA, 17 nt, Human
cccgucgacguagaacc

SEQ ID NO: 1837726 - RNA, 16 nt, Human
cccgggcucugccucc

SEQ ID NO: 1837727 - RNA, 18 nt, Human
cccggugcccaagaauag

SEQ ID NO: 1837728 - RNA, 15 nt, Human
cccugcaaagcccag

SEQ ID NO: 1837729 - RNA, 23 nt, Human
cccugcacaaagcccuuccaugu

SEQ ID NO: 1837730 - RNA, 20 nt, Human
cccugcaaagcccagcuuga

SEQ ID NO: 1837731 - RNA, 19 nt, Human
cccugcaaagcccagcuug

SEQ ID NO: 1837732 - RNA, 17 nt, Human
cccugcaaagcccagcu

SEQ ID NO: 1837733 - RNA, 16 nt, Human
cccugcaaagcccagc

SEQ ID NO: 1837734 - RNA, 22 nt, Human
cccugcacuugcagacucuaca

SEQ ID NO: 1837735 - RNA, 19 nt, Human
cccugcacuugcagacucu

SEQ ID NO: 1837736 - RNA, 12 nt, Human
cccugcacuugc

SEQ ID NO: 1837737 - RNA, 23 nt, Human
cccugaggcccagagggccugca

SEQ ID NO: 1837738 - RNA, 20 nt, Human
cccugaggcccagagggccu

SEQ ID NO: 1837739 - RNA, 19 nt, Human
cccugaggcccagagggcc

SEQ ID NO: 1837740 - RNA, 18 nt, Human
cccugaggcccagagggc

SEQ ID NO: 1837741 - RNA, 17 nt, Human
cccugaggcccagaggg

SEQ ID NO: 1837742 - RNA, 16 nt, Human
cccugaggcccagagg

SEQ ID NO: 1837743 - RNA, 15 nt, Human
cccugaggcccagag

SEQ ID NO: 1837744 - RNA, 14 nt, Human
cccugaggcccaga

SEQ ID NO: 1837745 - RNA, 16 nt, Human
cccugaaagcccugag

SEQ ID NO: 1837746 - RNA, 13 nt, Human
cccugaggcccag

SEQ ID NO: 1837747 - RNA, 15 nt, Human
cccugaaagcccuga

SEQ ID NO: 1837748 - RNA, 16 nt, Human
cccucuggggcuguuc

SEQ ID NO: 1837749 - RNA, 17 nt, Human
cccugguggcagcucac

SEQ ID NO: 1837750 - RNA, 16 nt, Human
cccugguggcagcuca

SEQ ID NO: 1837751 - RNA, 15 nt, Human
cccugguggcagcuc

SEQ ID NO: 1837752 - RNA, 15 nt, Human
cccuggacugugugc

SEQ ID NO: 1837753 - RNA, 18 nt, Human
cccuggcuuuucacugcu

SEQ ID NO: 1837754 - RNA, 18 nt, Human
cccugggaggcagugaug

SEQ ID NO: 1837755 - RNA, 22 nt, Human
cccuggcuuuucacugcuggcu

SEQ ID NO: 1837756 - RNA, 19 nt, Human
cccuggcuuuucacugcug

SEQ ID NO: 1837757 - RNA, 17 nt, Human
cccugcccaccuggccu

SEQ ID NO: 1837758 - RNA, 14 nt, Human
cccugcccaccugg

SEQ ID NO: 1837759 - RNA, 13 nt, Human
cccugcccaccug

SEQ ID NO: 1837760 - RNA, 21 nt, Human
cccugcuggguguggcgcagc

SEQ ID NO: 1837761 - RNA, 16 nt, Human
cccugcuggguguggc

SEQ ID NO: 1837762 - RNA, 18 nt, Human
cccugcccaccuggccuc

SEQ ID NO: 1837763 - RNA, 22 nt, Human
cccugcuggguguggcgcagca

SEQ ID NO: 1837764 - RNA, 17 nt, Human
cccugcuuugggcugcc

SEQ ID NO: 1837765 - RNA, 19 nt, Human
cccugcuuugggcugcccu

SEQ ID NO: 1837766 - RNA, 18 nt, Human
cccugcuuugggcugccc

SEQ ID NO: 1837767 - RNA, 22 nt, Human
cccugcuuugggcugcccuggu

SEQ ID NO: 1837768 - RNA, 20 nt, Human
cccugcuuugggcugcccug

SEQ ID NO: 1837769 - RNA, 17 nt, Human
ccucccgaauagcuggg

SEQ ID NO: 1837770 - RNA, 16 nt, Human
ccucuaggaggucucu

SEQ ID NO: 1837771 - RNA, 14 nt, Human
ccucgguguggaga

SEQ ID NO: 1837772 - RNA, 16 nt, Human
ccucggugccuuccuc

SEQ ID NO: 1837773 - RNA, 18 nt, Human
ccucgguguggagaagcg

SEQ ID NO: 1837774 - RNA, 23 nt, Human
ccuccugccucgaacuggcugca

SEQ ID NO: 1837775 - RNA, 14 nt, Human
ccuccugggcuaag

SEQ ID NO: 1837776 - RNA, 13 nt, Human
ccuccugcugggc

SEQ ID NO: 1837777 - RNA, 10 nt, Human
ccucccuccc

SEQ ID NO: 1837778 - RNA, 21 nt, Human
ccucccugccccucccuucaa

SEQ ID NO: 1837779 - RNA, 18 nt, Human
ccucccugccccucccuu

SEQ ID NO: 1837780 - RNA, 14 nt, Human
ccuccucagaucuu

SEQ ID NO: 1837781 - RNA, 24 nt, Human
ccucccugccccucccuucaacca

SEQ ID NO: 1837782 - RNA, 22 nt, Human
ccucccugccccucccuucaac

SEQ ID NO: 1837783 - RNA, 13 nt, Human
ccucccugccccu

SEQ ID NO: 1837784 - RNA, 20 nt, Human
ccucccgaguagcugggacu

SEQ ID NO: 1837785 - RNA, 21 nt, Human
ccucccgaguagcugggacua

SEQ ID NO: 1837786 - RNA, 23 nt, Human
ccuccaaucccaccaacccucag

SEQ ID NO: 1837787 - RNA, 20 nt, Human
ccucauccucauacccaccc

SEQ ID NO: 1837788 - RNA, 13 nt, Human
ccucauccucaua

SEQ ID NO: 1837789 - RNA, 21 nt, Human
ccucaucuccccaucauuggu

SEQ ID NO: 1837790 - RNA, 19 nt, Human
ccuaugcagagguccacaa

SEQ ID NO: 1837791 - RNA, 19 nt, Human
ccucagucuggcccuuccu

SEQ ID NO: 1837792 - RNA, 20 nt, Human
ccucagucuggcccuuccuu

SEQ ID NO: 1837793 - RNA, 11 nt, Human
ccucagugcca

SEQ ID NO: 1837794 - RNA, 13 nt, Human
ccucauacccacc

SEQ ID NO: 1837795 - RNA, 18 nt, Human
ccucauagcccucacccu

SEQ ID NO: 1837796 - RNA, 17 nt, Human
ccucauagcccucaccc

SEQ ID NO: 1837797 - RNA, 22 nt, Human
ccucauagcccucacccugggg

SEQ ID NO: 1837798 - RNA, 21 nt, Human
ccucauagcccucacccuggg

SEQ ID NO: 1837799 - RNA, 20 nt, Human
ccucauaguaugguggcugg

SEQ ID NO: 1837800 - RNA, 14 nt, Human
ccucaucaccaacg

SEQ ID NO: 1837801 - RNA, 13 nt, Human
ccucaucaccaac

SEQ ID NO: 1837802 - RNA, 21 nt, Human
ccucauaguaugguggcuggg

SEQ ID NO: 1837803 - RNA, 22 nt, Human
ccucauaguaugguggcugggu

SEQ ID NO: 1837804 - RNA, 21 nt, Human
ccuccaggugcacaagcucca

SEQ ID NO: 1837805 - RNA, 19 nt, Human
ccuccaggugcacaagcuc

SEQ ID NO: 1837806 - RNA, 22 nt, Human
ccuccaggugcacaagcuccaa

SEQ ID NO: 1837807 - RNA, 18 nt, Human
ccuccaucuaaacugccc

SEQ ID NO: 1837808 - RNA, 14 nt, Human
ccuccauccugagg

SEQ ID NO: 1837809 - RNA, 14 nt, Human
ccuccaugcugccu

SEQ ID NO: 1837810 - RNA, 23 nt, Human
ccuccaugugggcuaguugggcu

SEQ ID NO: 1837811 - RNA, 15 nt, Human
ccuccaugcugccuc

SEQ ID NO: 1837812 - RNA, 15 nt, Human
ccucccaaagugcug

SEQ ID NO: 1837813 - RNA, 16 nt, Human
ccucccaaagugcugg

SEQ ID NO: 1837814 - RNA, 17 nt, Human
cccugguuuccugcccu

SEQ ID NO: 1837815 - RNA, 16 nt, Human
cccugguuuccugccc

SEQ ID NO: 1837816 - RNA, 20 nt, Human
cccugguggcagcucaccuc

SEQ ID NO: 1837817 - RNA, 19 nt, Human
cccugguuuccugcccugg

SEQ ID NO: 1837818 - RNA, 18 nt, Human
cccugguuuccugcccug

SEQ ID NO: 1837819 - RNA, 14 nt, Human
ccgaggccuucucu

SEQ ID NO: 1837820 - RNA, 20 nt, Human
ccgaguagcugggacuacag

SEQ ID NO: 1837821 - RNA, 17 nt, Human
ccgaggccuucucugaa

SEQ ID NO: 1837822 - RNA, 17 nt, Human
ccgaguagcugggacua

SEQ ID NO: 1837823 - RNA, 23 nt, Human
ccgcuaagagggagggagggcuc

SEQ ID NO: 1837824 - RNA, 13 nt, Human
ccgcucagcccuc

SEQ ID NO: 1837825 - RNA, 12 nt, Human
ccgcucagcccu

SEQ ID NO: 1837826 - RNA, 11 nt, Human
ccgcucagccc

SEQ ID NO: 1837827 - RNA, 21 nt, Human
ccgcuaagagggagggagggc

SEQ ID NO: 1837828 - RNA, 19 nt, Human
ccgcacugggcuuggggac

SEQ ID NO: 1837829 - RNA, 14 nt, Human
ccgcacugggcuug

SEQ ID NO: 1837830 - RNA, 17 nt, Human
ccgggaccccgagccug

SEQ ID NO: 1837831 - RNA, 20 nt, Human
ccgggaagggggcugggaca

SEQ ID NO: 1837832 - RNA, 18 nt, Human
ccggcuggccuggccccu

SEQ ID NO: 1837833 - RNA, 17 nt, Human
ccggcuggccuggcccc

SEQ ID NO: 1837834 - RNA, 19 nt, Human
ccgcuuucuacccagcgag

SEQ ID NO: 1837835 - RNA, 15 nt, Human
ccggcuggccuggcc

SEQ ID NO: 1837836 - RNA, 22 nt, Human
ccgcucagcccucccugccccu

SEQ ID NO: 1837837 - RNA, 21 nt, Human
ccgcucagcccucccugcccc

SEQ ID NO: 1837838 - RNA, 19 nt, Human
ccgcucagcccucccugcc

SEQ ID NO: 1837839 - RNA, 15 nt, Human
ccgcucagcccuccc

SEQ ID NO: 1837840 - RNA, 12 nt, Human
ccgcuuucuacc

SEQ ID NO: 1837841 - RNA, 13 nt, Human
ccgggcucugccu

SEQ ID NO: 1837842 - RNA, 22 nt, Human
ccgggcucugccucccaucacc

SEQ ID NO: 1837843 - RNA, 19 nt, Human
ccgggcugggagcucugca

SEQ ID NO: 1837844 - RNA, 18 nt, Human
ccgggcugggagcucugc

SEQ ID NO: 1837845 - RNA, 13 nt, Human
ccgggcugggagc

SEQ ID NO: 1837846 - RNA, 16 nt, Human
ccgggcguggugguga

SEQ ID NO: 1837847 - RNA, 20 nt, Human
ccgggcgcgguggcucacgc

SEQ ID NO: 1837848 - RNA, 18 nt, Human
ccgggaccccgagccugg

SEQ ID NO: 1837849 - RNA, 15 nt, Human
ccuacaagacacagu

SEQ ID NO: 1837850 - RNA, 18 nt, Human
ccuaaauauauuuuaaga

SEQ ID NO: 1837851 - RNA, 16 nt, Human
ccuaaauauauuuuaa

SEQ ID NO: 1837852 - RNA, 15 nt, Human
ccuaaaauucagugg

SEQ ID NO: 1837853 - RNA, 23 nt, Human
ccuaccgagucucuucuccacug

SEQ ID NO: 1837854 - RNA, 22 nt, Human
ccuaccgagucucuucuccacu

SEQ ID NO: 1837855 - RNA, 15 nt, Human
ccuacuuccugugac

SEQ ID NO: 1837856 - RNA, 21 nt, Human
ccuacuuccccuuccuaauuc

SEQ ID NO: 1837857 - RNA, 13 nt, Human
ccuacuuccugug

SEQ ID NO: 1837858 - RNA, 23 nt, Human
ccuaguuccaccaucaagccacc

SEQ ID NO: 1837859 - RNA, 21 nt, Human
ccuaguuccaccaucaagcca

SEQ ID NO: 1837860 - RNA, 13 nt, Human
ccuaguuccacca

SEQ ID NO: 1837861 - RNA, 22 nt, Human
ccuauauuguuuucaguguaca

SEQ ID NO: 1837862 - RNA, 18 nt, Human
ccuauauuguuuucagug

SEQ ID NO: 1837863 - RNA, 19 nt, Human
cuguauuagucacagagau

SEQ ID NO: 1837864 - RNA, 17 nt, Human
cuguauuagucacagag

SEQ ID NO: 1837865 - RNA, 21 nt, Human
cuguaucccaugagccucagc

SEQ ID NO: 1837866 - RNA, 22 nt, Human
cuguaucccaugagccucagca

SEQ ID NO: 1837867 - RNA, 20 nt, Human
cuguaucccaugagccucag

SEQ ID NO: 1837868 - RNA, 16 nt, Human
cugucaauuacaggaa

SEQ ID NO: 1837869 - RNA, 15 nt, Human
cugucaauuacagga

SEQ ID NO: 1837870 - RNA, 20 nt, Human
cuguauuuuguuuuugucuu

SEQ ID NO: 1837871 - RNA, 21 nt, Human
cuguacuccucccaggcgccc

SEQ ID NO: 1837872 - RNA, 19 nt, Human
cuguacuccucccaggcgc

SEQ ID NO: 1837873 - RNA, 16 nt, Human
cuguacuccucccagg

SEQ ID NO: 1837874 - RNA, 15 nt, Human
cuguacuccucccag

SEQ ID NO: 1837875 - RNA, 14 nt, Human
cuguacuccuccca

SEQ ID NO: 1837876 - RNA, 19 nt, Human
cuguacgucugacaggcaa

SEQ ID NO: 1837877 - RNA, 20 nt, Human
cuguacgucugacaggcaau

SEQ ID NO: 1837878 - RNA, 17 nt, Human
cuguacaugaaaacaca

SEQ ID NO: 1837879 - RNA, 20 nt, Human
cuguacaugaaaacacauuu

SEQ ID NO: 1837880 - RNA, 21 nt, Human
cuguacaugaaaacacauuuu

SEQ ID NO: 1837881 - RNA, 14 nt, Human
cuguacgucugaca

SEQ ID NO: 1837882 - RNA, 15 nt, Human
cuguacgucugacag

SEQ ID NO: 1837883 - RNA, 16 nt, Human
cuguacgucugacagg

SEQ ID NO: 1837884 - RNA, 18 nt, Human
cuguacgucugacaggca

SEQ ID NO: 1837885 - RNA, 18 nt, Human
cugguggcagcucaccuc

SEQ ID NO: 1837886 - RNA, 17 nt, Human
cugguggcagcucaccu

SEQ ID NO: 1837887 - RNA, 20 nt, Human
cugguggcagcucaccucuc

SEQ ID NO: 1837888 - RNA, 15 nt, Human
cugguggcagcugcg

SEQ ID NO: 1837889 - RNA, 14 nt, Human
cugguggcaguggg

SEQ ID NO: 1837890 - RNA, 18 nt, Human
cugguggcagugggagcu

SEQ ID NO: 1837891 - RNA, 22 nt, Human
cuguacagagcccacgccccca

SEQ ID NO: 1837892 - RNA, 18 nt, Human
cuguacagagcccacgcc

SEQ ID NO: 1837893 - RNA, 15 nt, Human
cuguacagagcccac

SEQ ID NO: 1837894 - RNA, 14 nt, Human
cuguacagagccca

SEQ ID NO: 1837895 - RNA, 14 nt, Human
cuguaauuugugau

SEQ ID NO: 1837896 - RNA, 15 nt, Human
cuguaauuugugaua

SEQ ID NO: 1837897 - RNA, 21 nt, Human
cugguuagagguucccuuuga

SEQ ID NO: 1837898 - RNA, 22 nt, Human
cugguuagagguucccuuugac

SEQ ID NO: 1837899 - RNA, 19 nt, Human
cuguaauccuagcacuuug

SEQ ID NO: 1837900 - RNA, 16 nt, Human
cugggggccucuucug

SEQ ID NO: 1837901 - RNA, 14 nt, Human
cugggggcugggca

SEQ ID NO: 1837902 - RNA, 18 nt, Human
cugggggcugggcagagg

SEQ ID NO: 1837903 - RNA, 18 nt, Human
cugggcuugucuguagau

SEQ ID NO: 1837904 - RNA, 22 nt, Human
cugggcuuggggaccagagcug

SEQ ID NO: 1837905 - RNA, 15 nt, Human
cugggcuucaguggc

SEQ ID NO: 1837906 - RNA, 16 nt, Human
cugggucgcccuggac

SEQ ID NO: 1837907 - RNA, 15 nt, Human
cugggucgcccugga

SEQ ID NO: 1837908 - RNA, 23 nt, Human
cuggggguucuuucuuccucugc

SEQ ID NO: 1837909 - RNA, 20 nt, Human
cuggggguucuuucuuccuc

SEQ ID NO: 1837910 - RNA, 13 nt, Human
cugggucgcccug

SEQ ID NO: 1837911 - RNA, 23 nt, Human
cugggccccugccucucugcagg

SEQ ID NO: 1837912 - RNA, 20 nt, Human
cugggccccugccucucugc

SEQ ID NO: 1837913 - RNA, 19 nt, Human
cugggccccugccucucug

SEQ ID NO: 1837914 - RNA, 18 nt, Human
cugggauuacaggcguga

SEQ ID NO: 1837915 - RNA, 21 nt, Human
cugggauuacaagcgugagcc

SEQ ID NO: 1837916 - RNA, 14 nt, Human
cugugugcucagga

SEQ ID NO: 1837917 - RNA, 20 nt, Human
cugugucuuuuuucacuaca

SEQ ID NO: 1837918 - RNA, 21 nt, Human
cugugucuuuaaaugcugcuu

SEQ ID NO: 1837919 - RNA, 20 nt, Human
cugugucuuuaaaugcugcu

SEQ ID NO: 1837920 - RNA, 19 nt, Human
cugugucuuuaaaugcugc

SEQ ID NO: 1837921 - RNA, 18 nt, Human
cugugugugcgccuacag

SEQ ID NO: 1837922 - RNA, 24 nt, Human
cuguggaucaaauccagccugcug

SEQ ID NO: 1837923 - RNA, 14 nt, Human
cuguggaucaaauc

SEQ ID NO: 1837924 - RNA, 17 nt, Human
cugugccucugccuguc

SEQ ID NO: 1837925 - RNA, 16 nt, Human
cugugccucugccugu

SEQ ID NO: 1837926 - RNA, 15 nt, Human
cugugccucugccug

SEQ ID NO: 1837927 - RNA, 14 nt, Human
cugugccucugccu

SEQ ID NO: 1837928 - RNA, 13 nt, Human
cugugccucugcc

SEQ ID NO: 1837929 - RNA, 12 nt, Human
cugugccucugc

SEQ ID NO: 1837930 - RNA, 21 nt, Human
cuguggguuucuaaagcugcc

SEQ ID NO: 1837931 - RNA, 22 nt, Human
cuguggguuucuaaagcugcca

SEQ ID NO: 1837932 - RNA, 14 nt, Human
cugugccaugugcc

SEQ ID NO: 1837933 - RNA, 19 nt, Human
cugugcccuaaaguguauu

SEQ ID NO: 1837934 - RNA, 15 nt, Human
cugugccaugugcca

SEQ ID NO: 1837935 - RNA, 21 nt, Human
cugugauggggcccugccucc

SEQ ID NO: 1837936 - RNA, 16 nt, Human
cugugauggggcccug

SEQ ID NO: 1837937 - RNA, 23 nt, Human
cugugauggggcccugccuccuu

SEQ ID NO: 1837938 - RNA, 15 nt, Human
cugugauggggcccu

SEQ ID NO: 1837939 - RNA, 22 nt, Human
cugugaaaggaaagagggaggu

SEQ ID NO: 1837940 - RNA, 16 nt, Human
cugugaaaggaaagag

SEQ ID NO: 1837941 - RNA, 23 nt, Human
cugucauuugagcagggcucagc

SEQ ID NO: 1837942 - RNA, 18 nt, Human
cugucaauuacaggaagu

SEQ ID NO: 1837943 - RNA, 21 nt, Human
cugucauuugagcagggcuca

SEQ ID NO: 1837944 - RNA, 22 nt, Human
cugucauuugagcagggcucag

SEQ ID NO: 1837945 - RNA, 18 nt, Human
cugucuucaguaagccgu

SEQ ID NO: 1837946 - RNA, 15 nt, Human
cugugaaaggaaaga

SEQ ID NO: 1837947 - RNA, 21 nt, Human
cugucuuuuuucuaaaguaaa

SEQ ID NO: 1837948 - RNA, 13 nt, Human
cuuccugugacuu

SEQ ID NO: 1837949 - RNA, 16 nt, Human
cuuccugugacuucag

SEQ ID NO: 1837950 - RNA, 15 nt, Human
cuucccccuccaauc

SEQ ID NO: 1837951 - RNA, 12 nt, Human
cuucccccucca

SEQ ID NO: 1837952 - RNA, 16 nt, Human
cuuccacaagagccca

SEQ ID NO: 1837953 - RNA, 16 nt, Human
cuucgauacaccgggc

SEQ ID NO: 1837954 - RNA, 21 nt, Human
cuucgauacaccgggccugga

SEQ ID NO: 1837955 - RNA, 14 nt, Human
cuucgccaccuggg

SEQ ID NO: 1837956 - RNA, 15 nt, Human
cuucgccaccugggu

SEQ ID NO: 1837957 - RNA, 17 nt, Human
cuucgcuccugugucuu

SEQ ID NO: 1837958 - RNA, 20 nt, Human
cuucggccuccauccugagg

SEQ ID NO: 1837959 - RNA, 19 nt, Human
cuucgggaggucgaggcag

SEQ ID NO: 1837960 - RNA, 21 nt, Human
cuucucacugccaugccagcu

SEQ ID NO: 1837961 - RNA, 16 nt, Human
cuucucacugccaugc

SEQ ID NO: 1837962 - RNA, 17 nt, Human
cuucaacugaccagccu

SEQ ID NO: 1837963 - RNA, 23 nt, Human
cuucaacugaccagccuccaugc

SEQ ID NO: 1837964 - RNA, 20 nt, Human
cuucaacugaccagccucca

SEQ ID NO: 1837965 - RNA, 20 nt, Human
cuucaaggauccugagccag

SEQ ID NO: 1837966 - RNA, 19 nt, Human
cuucaaggauccugagcca

SEQ ID NO: 1837967 - RNA, 18 nt, Human
cuucaaggauccugagcc

SEQ ID NO: 1837968 - RNA, 17 nt, Human
cuucaaggauccugagc

SEQ ID NO: 1837969 - RNA, 22 nt, Human
cuuagucacugagacagcccgg

SEQ ID NO: 1837970 - RNA, 20 nt, Human
cuuagucacugagacagccc

SEQ ID NO: 1837971 - RNA, 21 nt, Human
cuuagucacugagacagcccg

SEQ ID NO: 1837972 - RNA, 15 nt, Human
cuucaaauauuuccc

SEQ ID NO: 1837973 - RNA, 23 nt, Human
cuucaaggauccugagccagauu

SEQ ID NO: 1837974 - RNA, 22 nt, Human
cuucaaggauccugagccagau

SEQ ID NO: 1837975 - RNA, 21 nt, Human
cuucaaggauccugagccaga

SEQ ID NO: 1837976 - RNA, 14 nt, Human
cuucacauauugau

SEQ ID NO: 1837977 - RNA, 23 nt, Human
cuucacauauugauuuccguuaa

SEQ ID NO: 1837978 - RNA, 19 nt, Human
cuucagcugacuuuucugu

SEQ ID NO: 1837979 - RNA, 15 nt, Human
cuucagcugacuuuu

SEQ ID NO: 1837980 - RNA, 14 nt, Human
cuucaguaagccgu

SEQ ID NO: 1837981 - RNA, 16 nt, Human
cuucagccucccgagu

SEQ ID NO: 1837982 - RNA, 20 nt, Human
cuucagccucccgaguagcu

SEQ ID NO: 1837983 - RNA, 15 nt, Human
cuucagccugaaaga

SEQ ID NO: 1837984 - RNA, 14 nt, Human
cuucagccucccga

SEQ ID NO: 1837985 - RNA, 15 nt, Human
cuuccacaagagccc

SEQ ID NO: 1837986 - RNA, 14 nt, Human
cuuccacaagagcc

SEQ ID NO: 1837987 - RNA, 13 nt, Human
cuuccacaagagc

SEQ ID NO: 1837988 - RNA, 14 nt, Human
cuucagugccaaaa

SEQ ID NO: 1837989 - RNA, 15 nt, Human
cuucaguaagccgug

SEQ ID NO: 1837990 - RNA, 19 nt, Human
cuuagaauuaguggcacuu

SEQ ID NO: 1837991 - RNA, 18 nt, Human
cuuagaaguuuguuguga

SEQ ID NO: 1837992 - RNA, 21 nt, Human
cuuagguuggcaaaaaggcag

SEQ ID NO: 1837993 - RNA, 23 nt, Human
cuuagguuggcaaaaaggcagga

SEQ ID NO: 1837994 - RNA, 14 nt, Human
cuuagucacugaga

SEQ ID NO: 1837995 - RNA, 20 nt, Human
cuuaccugccaggaagccag

SEQ ID NO: 1837996 - RNA, 20 nt, Human
cuuagaaaaaccaccaccau

SEQ ID NO: 1837997 - RNA, 13 nt, Human
cuuacuguacaug

SEQ ID NO: 1837998 - RNA, 16 nt, Human
cuuagaaauugcauuu

SEQ ID NO: 1837999 - RNA, 16 nt, Human
cuuagaaguggaagua

SEQ ID NO: 1838000 - RNA, 17 nt, Human
cuuagaagucacacagu

SEQ ID NO: 1838001 - RNA, 20 nt, Human
cuuagaagucacacaguauu

SEQ ID NO: 1838002 - RNA, 12 nt, Human
cuuaaaaauggu

SEQ ID NO: 1838003 - RNA, 18 nt, Human
cuuaagaauuuugagcag

SEQ ID NO: 1838004 - RNA, 17 nt, Human
cuuaaccagaucauugu

SEQ ID NO: 1838005 - RNA, 20 nt, Human
cuuaauucuuagcucauucu

SEQ ID NO: 1838006 - RNA, 23 nt, Human
cuguucuuucuggcuaugcauuu

SEQ ID NO: 1838007 - RNA, 12 nt, Human
cuguugcccagg

SEQ ID NO: 1838008 - RNA, 13 nt, Human
cuguugcccaggc

SEQ ID NO: 1838009 - RNA, 14 nt, Human
cuguugcccaggcu

SEQ ID NO: 1838010 - RNA, 15 nt, Human
cuguugcccaggcug

SEQ ID NO: 1838011 - RNA, 16 nt, Human
cuguugcccaggcugg

SEQ ID NO: 1838012 - RNA, 15 nt, Human
cuguucuuuccaaag

SEQ ID NO: 1838013 - RNA, 16 nt, Human
cuguucuuuccaaagu

SEQ ID NO: 1838014 - RNA, 19 nt, Human
cuguucuuuccaaaguaca

SEQ ID NO: 1838015 - RNA, 21 nt, Human
cuguucuuuccaaaguacacu

SEQ ID NO: 1838016 - RNA, 13 nt, Human
cuguucuuucugg

SEQ ID NO: 1838017 - RNA, 14 nt, Human
cuguucuuucuggc

SEQ ID NO: 1838018 - RNA, 21 nt, Human
cuguucuuucuggcuaugcau

SEQ ID NO: 1838019 - RNA, 18 nt, Human
cuguucuuaagacgugau

SEQ ID NO: 1838020 - RNA, 16 nt, Human
cuguuaauaguucagg

SEQ ID NO: 1838021 - RNA, 17 nt, Human
cuuaaaaaguggaaaaa

SEQ ID NO: 1838022 - RNA, 16 nt, Human
cuuaaaaaguggaaaa

SEQ ID NO: 1838023 - RNA, 22 nt, Human
cuguuuuacaaaaaagaaaaga

SEQ ID NO: 1838024 - RNA, 14 nt, Human
cuguuuagauaaua

SEQ ID NO: 1838025 - RNA, 17 nt, Human
cuguuuagauaauacac

SEQ ID NO: 1838026 - RNA, 18 nt, Human
cuguugcccaggcuggcg

SEQ ID NO: 1838027 - RNA, 17 nt, Human
cuguugcccaggcuggc

SEQ ID NO: 1838028 - RNA, 15 nt, Human
cuguuucaaacuuua

SEQ ID NO: 1838029 - RNA, 17 nt, Human
cuguuucaaacuuuacu

SEQ ID NO: 1838030 - RNA, 18 nt, Human
cuguuuagauaauacacc

SEQ ID NO: 1838031 - RNA, 19 nt, Human
cuguuugcuaagugaggau

SEQ ID NO: 1838032 - RNA, 17 nt, Human
cuguuugcuaagugagg

SEQ ID NO: 1838033 - RNA, 21 nt, Human
cuuguguguuuauugucaaag

SEQ ID NO: 1838034 - RNA, 21 nt, Human
cuuguguuucuuuaguuuuug

SEQ ID NO: 1838035 - RNA, 21 nt, Human
cuuguuggauuuuugucuugu

SEQ ID NO: 1838036 - RNA, 23 nt, Human
cuuguuggauuuuugucuugugu

SEQ ID NO: 1838037 - RNA, 20 nt, Human
cuuguguguuuauugucaaa

SEQ ID NO: 1838038 - RNA, 21 nt, Human
cuuguuuuuuuuuuccacuua

SEQ ID NO: 1838039 - RNA, 20 nt, Human
cuuguuuuuuuuuuccacuu

SEQ ID NO: 1838040 - RNA, 19 nt, Human
cuuguuuuuuuuuuccacu

SEQ ID NO: 1838041 - RNA, 14 nt, Human
cuuguuuucuggga

SEQ ID NO: 1838042 - RNA, 22 nt, Human
cuuuccaaaugcccagcuuaaa

SEQ ID NO: 1838043 - RNA, 19 nt, Human
cuuuccaaaugcccagcuu

SEQ ID NO: 1838044 - RNA, 18 nt, Human
cuuuccaaaugcccagcu

SEQ ID NO: 1838045 - RNA, 13 nt, Human
cuuuaguuuuugu

SEQ ID NO: 1838046 - RNA, 15 nt, Human
cuuuaguuuuuguga

SEQ ID NO: 1838047 - RNA, 20 nt, Human
cuuuauucuggcagaggagg

SEQ ID NO: 1838048 - RNA, 17 nt, Human
cuuuauuaaauguagaa

SEQ ID NO: 1838049 - RNA, 21 nt, Human
cuuuauuuucuauaauuuaaa

SEQ ID NO: 1838050 - RNA, 20 nt, Human
cuugcuucaaccccaugaga

SEQ ID NO: 1838051 - RNA, 16 nt, Human
cuugcucugcugacag

SEQ ID NO: 1838052 - RNA, 17 nt, Human
cuugcucugcugacaga

SEQ ID NO: 1838053 - RNA, 16 nt, Human
cuuggaaaugggagac

SEQ ID NO: 1838054 - RNA, 13 nt, Human
cuuggaggaagga

SEQ ID NO: 1838055 - RNA, 13 nt, Human
cuuggaagcuccg

SEQ ID NO: 1838056 - RNA, 14 nt, Human
cuugcucugcugac

SEQ ID NO: 1838057 - RNA, 17 nt, Human
cuucuccacccugcucu

SEQ ID NO: 1838058 - RNA, 18 nt, Human
cuucuccacccugcucuc

SEQ ID NO: 1838059 - RNA, 21 nt, Human
cuucuccacccugcucuccga

SEQ ID NO: 1838060 - RNA, 13 nt, Human
cuugccacugccu

SEQ ID NO: 1838061 - RNA, 15 nt, Human
cuugccacugccucu

SEQ ID NO: 1838062 - RNA, 14 nt, Human
cuugccacugccuc

SEQ ID NO: 1838063 - RNA, 12 nt, Human
cuuggagggcau

SEQ ID NO: 1838064 - RNA, 23 nt, Human
cuuggagggcaugaagacagaua

SEQ ID NO: 1838065 - RNA, 22 nt, Human
cuuggaggaaggaaacccagcu

SEQ ID NO: 1838066 - RNA, 16 nt, Human
cuuggcugcagggagu

SEQ ID NO: 1838067 - RNA, 17 nt, Human
cuuggcugcagggaguc

SEQ ID NO: 1838068 - RNA, 22 nt, Human
cuugggcuucauccuccucaga

SEQ ID NO: 1838069 - RNA, 21 nt, Human
cuuggggaccagagcugccac

SEQ ID NO: 1838070 - RNA, 20 nt, Human
cuuggggaccagagcugcca

SEQ ID NO: 1838071 - RNA, 14 nt, Human
cuugggccacugug

SEQ ID NO: 1838072 - RNA, 13 nt, Human
cuugggcuucauc

SEQ ID NO: 1838073 - RNA, 15 nt, Human
cuuggggggcugagg

SEQ ID NO: 1838074 - RNA, 22 nt, Human
cuuggggaccagagcugccacc

SEQ ID NO: 1838075 - RNA, 22 nt, Human
cuuggggggcugaggugggagg

SEQ ID NO: 1838076 - RNA, 16 nt, Human
cuuggggggcugaggu

SEQ ID NO: 1838077 - RNA, 19 nt, Human
cuuguaaaggaauuuaaaa

SEQ ID NO: 1838078 - RNA, 16 nt, Human
cuuuggacccugaggc

SEQ ID NO: 1838079 - RNA, 15 nt, Human
cuuuggacccugagg

SEQ ID NO: 1838080 - RNA, 21 nt, Human
cuuuggacagaagcagcucuu

SEQ ID NO: 1838081 - RNA, 20 nt, Human
cuuuggacagaagcagcucu

SEQ ID NO: 1838082 - RNA, 19 nt, Human
cuuuggacagaagcagcuc

SEQ ID NO: 1838083 - RNA, 18 nt, Human
cuuuggacagaagcagcu

SEQ ID NO: 1838084 - RNA, 18 nt, Human
cuuuggacccugaggccc

SEQ ID NO: 1838085 - RNA, 17 nt, Human
cuuuggacccugaggcc

SEQ ID NO: 1838086 - RNA, 19 nt, Human
cuuuggacccugaggccca

SEQ ID NO: 1838087 - RNA, 16 nt, Human
cuuucccaucuuccaa

SEQ ID NO: 1838088 - RNA, 14 nt, Human
cuuugugauuuuug

SEQ ID NO: 1838089 - RNA, 22 nt, Human
cuuuguccccaccgcagacagg

SEQ ID NO: 1838090 - RNA, 18 nt, Human
cuuuguccccaccgcaga

SEQ ID NO: 1838091 - RNA, 13 nt, Human
cuuugggaggcca

SEQ ID NO: 1838092 - RNA, 17 nt, Human
cuuugugauuuuuguaa

SEQ ID NO: 1838093 - RNA, 18 nt, Human
cuuugugauuuuuguaau

SEQ ID NO: 1838094 - RNA, 19 nt, Human
cuuugugauuuuuguaauu

SEQ ID NO: 1838095 - RNA, 15 nt, Human
cuuuguucagccugc

SEQ ID NO: 1838096 - RNA, 15 nt, Human
cuuuguucuggcucu

SEQ ID NO: 1838097 - RNA, 14 nt, Human
cuuuguucuggcuc

SEQ ID NO: 1838098 - RNA, 18 nt, Human
cuuuguucuaaagaugga

SEQ ID NO: 1838099 - RNA, 20 nt, Human
cuuuuacguccaucucuugu

SEQ ID NO: 1838100 - RNA, 20 nt, Human
cuuuguuuguugucagcuga

SEQ ID NO: 1838101 - RNA, 18 nt, Human
cuuuguuuguugucagcu

SEQ ID NO: 1838102 - RNA, 22 nt, Human
cuuuucauaaccuagccuuaga

SEQ ID NO: 1838103 - RNA, 17 nt, Human
cuuuucacugcuggcug

SEQ ID NO: 1838104 - RNA, 20 nt, Human
cuuuucacugcuggcugccu

SEQ ID NO: 1838105 - RNA, 18 nt, Human
cuuuucacugcuggcugc

SEQ ID NO: 1838106 - RNA, 20 nt, Human
cuuuucauaaccuagccuua

SEQ ID NO: 1838107 - RNA, 23 nt, Human
cuuuucuguccgagcuuugaaaa

SEQ ID NO: 1838108 - RNA, 18 nt, Human
cuuuucuguccgagcuuu

SEQ ID NO: 1838109 - RNA, 23 nt, Human
cuuuucuugcaugaggcuagugu

SEQ ID NO: 1838110 - RNA, 18 nt, Human
cuuuucuugcaugaggcu

SEQ ID NO: 1838111 - RNA, 16 nt, Human
cuuuucuuucagccaa

SEQ ID NO: 1838112 - RNA, 16 nt, Human
gaaacacuuugcauaa

SEQ ID NO: 1838113 - RNA, 15 nt, Human
gaaacagcucgacuu

SEQ ID NO: 1838114 - RNA, 17 nt, Human
gaaacagccugugucuu

SEQ ID NO: 1838115 - RNA, 16 nt, Human
gaaacagccugugucu

SEQ ID NO: 1838116 - RNA, 20 nt, Human
gaaacagcucgacuuuaaaa

SEQ ID NO: 1838117 - RNA, 18 nt, Human
gaaacagcuaaugggaca

SEQ ID NO: 1838118 - RNA, 22 nt, Human
gaaacacugggcuucuagaacc

SEQ ID NO: 1838119 - RNA, 20 nt, Human
gaaaaucuuauaauuuaaaa

SEQ ID NO: 1838120 - RNA, 13 nt, Human
gaaaagcugcuga

SEQ ID NO: 1838121 - RNA, 17 nt, Human
gaaaagcugcugacagu

SEQ ID NO: 1838122 - RNA, 19 nt, Human
gaaaauaacgauaaaagac

SEQ ID NO: 1838123 - RNA, 14 nt, Human
gaaaaucagccugc

SEQ ID NO: 1838124 - RNA, 18 nt, Human
gaaaaucagccugcucca

SEQ ID NO: 1838125 - RNA, 16 nt, Human
gaaaaucagccugcuc

SEQ ID NO: 1838126 - RNA, 19 nt, Human
gaaaaucuuauaauuuaaa

SEQ ID NO: 1838127 - RNA, 15 nt, Human
cuuuuuuggcugcug

SEQ ID NO: 1838128 - RNA, 14 nt, Human
cuuuuuuggcugcu

SEQ ID NO: 1838129 - RNA, 23 nt, Human
gaaaaaggaugcacagaguuguu

SEQ ID NO: 1838130 - RNA, 17 nt, Human
gaaaaaggaugcacaga

SEQ ID NO: 1838131 - RNA, 21 nt, Human
cuuuugagugccuuacacaau

SEQ ID NO: 1838132 - RNA, 16 nt, Human
cuuuugagcauuuaga

SEQ ID NO: 1838133 - RNA, 14 nt, Human
cuuuuuucuaaagu

SEQ ID NO: 1838134 - RNA, 15 nt, Human
cuuuuuucacuacau

SEQ ID NO: 1838135 - RNA, 19 nt, Human
gaaaaccaagccguggcuu

SEQ ID NO: 1838136 - RNA, 18 nt, Human
gaaaaccaagccguggcu

SEQ ID NO: 1838137 - RNA, 21 nt, Human
gaaaaccaagccguggcuucc

SEQ ID NO: 1838138 - RNA, 16 nt, Human
gaaaacguggcugcuu

SEQ ID NO: 1838139 - RNA, 15 nt, Human
gaaaacguggcugcu

SEQ ID NO: 1838140 - RNA, 18 nt, Human
gaaaacguggcugcuuca

SEQ ID NO: 1838141 - RNA, 19 nt, Human
gaaaacguggcugcuucaa

SEQ ID NO: 1838142 - RNA, 14 nt, Human
gaaaacaugcuaca

SEQ ID NO: 1838143 - RNA, 15 nt, Human
gaaaacaugcuacac

SEQ ID NO: 1838144 - RNA, 12 nt, Human
gaaaacaugcua

SEQ ID NO: 1838145 - RNA, 14 nt, Human
gaaaacacauuuuu

SEQ ID NO: 1838146 - RNA, 13 nt, Human
gaaaacacauuuu

SEQ ID NO: 1838147 - RNA, 22 nt, Human
gaaaacaauaacgauaaaagac

SEQ ID NO: 1838148 - RNA, 23 nt, Human
gaagcccaggaaaggcuccagga

SEQ ID NO: 1838149 - RNA, 22 nt, Human
gaagcccaggaaaggcuccagg

SEQ ID NO: 1838150 - RNA, 21 nt, Human
gaagcccaggaaaggcuccag

SEQ ID NO: 1838151 - RNA, 20 nt, Human
gaagcccaggaaaggcucca

SEQ ID NO: 1838152 - RNA, 14 nt, Human
gaagcggcuggcag

SEQ ID NO: 1838153 - RNA, 11 nt, Human
gaagccuuugu

SEQ ID NO: 1838154 - RNA, 10 nt, Human
gaagccuuug

SEQ ID NO: 1838155 - RNA, 18 nt, Human
gaagcuuuuaugugaaac

SEQ ID NO: 1838156 - RNA, 23 nt, Human
gaagccagcaggcucucaggcca

SEQ ID NO: 1838157 - RNA, 19 nt, Human
gaagccagcaggcucucag

SEQ ID NO: 1838158 - RNA, 16 nt, Human
gaagccagcaggcucu

SEQ ID NO: 1838159 - RNA, 15 nt, Human
gaagccagcaggcuc

SEQ ID NO: 1838160 - RNA, 22 nt, Human
gaagccacgguguucugugaua

SEQ ID NO: 1838161 - RNA, 14 nt, Human
gaagaagcucucuc

SEQ ID NO: 1838162 - RNA, 19 nt, Human
gaagacucauucuucugua

SEQ ID NO: 1838163 - RNA, 21 nt, Human
gaagacucauucuucuguacg

SEQ ID NO: 1838164 - RNA, 15 nt, Human
gaaggccccgcccag

SEQ ID NO: 1838165 - RNA, 14 nt, Human
gaaggccccgccca

SEQ ID NO: 1838166 - RNA, 16 nt, Human
gaaggccccgcccagg

SEQ ID NO: 1838167 - RNA, 14 nt, Human
gaaggcagggaggg

SEQ ID NO: 1838168 - RNA, 13 nt, Human
gaaggcagggagg

SEQ ID NO: 1838169 - RNA, 18 nt, Human
gaaggaaacccagcucug

SEQ ID NO: 1838170 - RNA, 23 nt, Human
gaaggacccggaggggccuggca

SEQ ID NO: 1838171 - RNA, 17 nt, Human
gaaggaaacccagcucu

SEQ ID NO: 1838172 - RNA, 14 nt, Human
gaaggaaacccagc

SEQ ID NO: 1838173 - RNA, 21 nt, Human
gaaggauacaaaagcauguga

SEQ ID NO: 1838174 - RNA, 12 nt, Human
gaaggauacaaa

SEQ ID NO: 1838175 - RNA, 19 nt, Human
gaaggauacaaaagcaugu

SEQ ID NO: 1838176 - RNA, 15 nt, Human
gaauagcugggacua

SEQ ID NO: 1838177 - RNA, 15 nt, Human
gaauagaugcugacu

SEQ ID NO: 1838178 - RNA, 14 nt, Human
gaauagcugggacu

SEQ ID NO: 1838179 - RNA, 14 nt, Human
gaaugaaagggccc

SEQ ID NO: 1838180 - RNA, 19 nt, Human
gaaugaaagggcccagaga

SEQ ID NO: 1838181 - RNA, 16 nt, Human
gaaucucaaauaacua

SEQ ID NO: 1838182 - RNA, 12 nt, Human
gaaguuucugcc

SEQ ID NO: 1838183 - RNA, 12 nt, Human
gaauaaaauuuu

SEQ ID NO: 1838184 - RNA, 14 nt, Human
gaauaaagacaccu

SEQ ID NO: 1838185 - RNA, 14 nt, Human
gaauacuuuauaaa

SEQ ID NO: 1838186 - RNA, 14 nt, Human
gaauaacauguaau

SEQ ID NO: 1838187 - RNA, 15 nt, Human
gaauaaauugcuccu

SEQ ID NO: 1838188 - RNA, 20 nt, Human
gaauaauccuaaacauauga

SEQ ID NO: 1838189 - RNA, 17 nt, Human
gaaauuuguuauaauga

SEQ ID NO: 1838190 - RNA, 19 nt, Human
gaaauugcauuuccugaca

SEQ ID NO: 1838191 - RNA, 20 nt, Human
gaaaugggcagagcagagac

SEQ ID NO: 1838192 - RNA, 14 nt, Human
gaaaugggcagagc

SEQ ID NO: 1838193 - RNA, 23 nt, Human
gaaaugcugguuuuucaguuuuc

SEQ ID NO: 1838194 - RNA, 20 nt, Human
gaaacaugacucguauaugu

SEQ ID NO: 1838195 - RNA, 20 nt, Human
gaaacagccugugucuuuaa

SEQ ID NO: 1838196 - RNA, 13 nt, Human
gaaauauaauuga

SEQ ID NO: 1838197 - RNA, 21 nt, Human
gaaauaucugaaaauguaugu

SEQ ID NO: 1838198 - RNA, 15 nt, Human
gaacagacuggaagc

SEQ ID NO: 1838199 - RNA, 16 nt, Human
gaacagacuggaagca

SEQ ID NO: 1838200 - RNA, 21 nt, Human
gaaccacaucuugcucugcug

SEQ ID NO: 1838201 - RNA, 11 nt, Human
gaaccugaccc

SEQ ID NO: 1838202 - RNA, 12 nt, Human
gaaccugacccc

SEQ ID NO: 1838203 - RNA, 16 nt, Human
gaaccaccacacccag

SEQ ID NO: 1838204 - RNA, 17 nt, Human
gaaccaccacacccagc

SEQ ID NO: 1838205 - RNA, 14 nt, Human
gaacucccuuucaa

SEQ ID NO: 1838206 - RNA, 15 nt, Human
gaacucccuuucaac

SEQ ID NO: 1838207 - RNA, 22 nt, Human
gaacuggguacuuguggacaca

SEQ ID NO: 1838208 - RNA, 16 nt, Human
gaacuuggcgcugccc

SEQ ID NO: 1838209 - RNA, 15 nt, Human
gaacuuggcgcugcc

SEQ ID NO: 1838210 - RNA, 13 nt, Human
gaacuuggcgcug

SEQ ID NO: 1838211 - RNA, 23 nt, Human
gaacuugguucccauuugcuccu

SEQ ID NO: 1838212 - RNA, 21 nt, Human
gaacuuguaaaggaauuuaaa

SEQ ID NO: 1838213 - RNA, 15 nt, Human
cugaggcuccacuug

SEQ ID NO: 1838214 - RNA, 21 nt, Human
cugaggcuccacuuggucugu

SEQ ID NO: 1838215 - RNA, 24 nt, Human
cugaggcccuucucuccagccccu

SEQ ID NO: 1838216 - RNA, 22 nt, Human
cugaggcugggcucccuuccca

SEQ ID NO: 1838217 - RNA, 17 nt, Human
cugaggcugggcucccu

SEQ ID NO: 1838218 - RNA, 16 nt, Human
cugaggcugggcuccc

SEQ ID NO: 1838219 - RNA, 15 nt, Human
cugaggcugggcucc

SEQ ID NO: 1838220 - RNA, 13 nt, Human
cugaggcugggcu

SEQ ID NO: 1838221 - RNA, 19 nt, Human
cugagucugaaggcugggu

SEQ ID NO: 1838222 - RNA, 18 nt, Human
cugagucugaaggcuggg

SEQ ID NO: 1838223 - RNA, 20 nt, Human
cugagucccaggcugagccu

SEQ ID NO: 1838224 - RNA, 15 nt, Human
cugaucaccugcccu

SEQ ID NO: 1838225 - RNA, 16 nt, Human
cugauggugcaaugac

SEQ ID NO: 1838226 - RNA, 15 nt, Human
cugauggugcaauga

SEQ ID NO: 1838227 - RNA, 14 nt, Human
cugauggugcaaug

SEQ ID NO: 1838228 - RNA, 21 nt, Human
cugauccuaguuccaccauca

SEQ ID NO: 1838229 - RNA, 20 nt, Human
cugauccuaguuccaccauc

SEQ ID NO: 1838230 - RNA, 20 nt, Human
cugauuuuuuuuuccuucag

SEQ ID NO: 1838231 - RNA, 19 nt, Human
cugauuuuuuuuuccuuca

SEQ ID NO: 1838232 - RNA, 18 nt, Human
cugauuuuuuuuuccuuc

SEQ ID NO: 1838233 - RNA, 16 nt, Human
cugauuuuuuuuuccu

SEQ ID NO: 1838234 - RNA, 22 nt, Human
cugauuuuuuuuuccuucagug

SEQ ID NO: 1838235 - RNA, 21 nt, Human
cugauuuuuuuuuccuucagu

SEQ ID NO: 1838236 - RNA, 23 nt, Human
cugauuuuuuuuuccuucagugc

SEQ ID NO: 1838237 - RNA, 15 nt, Human
cugcaaagcccagcu

SEQ ID NO: 1838238 - RNA, 13 nt, Human
cugcaaagcccag

SEQ ID NO: 1838239 - RNA, 21 nt, Human
cugauggugcaaugaccuuuc

SEQ ID NO: 1838240 - RNA, 20 nt, Human
cugauggugcaaugaccuuu

SEQ ID NO: 1838241 - RNA, 19 nt, Human
cugauggugcaaugaccuu

SEQ ID NO: 1838242 - RNA, 17 nt, Human
cugauggugcaaugacc

SEQ ID NO: 1838243 - RNA, 17 nt, Human
cugauugugucucuugg

SEQ ID NO: 1838244 - RNA, 21 nt, Human
cugauugugucucuugguccu

SEQ ID NO: 1838245 - RNA, 22 nt, Human
cugcacaagcugcacccucagg

SEQ ID NO: 1838246 - RNA, 13 nt, Human
cugcacacagcac

SEQ ID NO: 1838247 - RNA, 18 nt, Human
cugcaauaaggggagagu

SEQ ID NO: 1838248 - RNA, 22 nt, Human
cugcacacgcuccuuccucuga

SEQ ID NO: 1838249 - RNA, 20 nt, Human
cugcacacgcuccuuccucu

SEQ ID NO: 1838250 - RNA, 14 nt, Human
cugcacacagcacg

SEQ ID NO: 1838251 - RNA, 18 nt, Human
cugcacuccccugcuggg

SEQ ID NO: 1838252 - RNA, 17 nt, Human
cugcacuccccugcugg

SEQ ID NO: 1838253 - RNA, 16 nt, Human
cugcacuccccugcug

SEQ ID NO: 1838254 - RNA, 18 nt, Human
cugcacuugcagacucua

SEQ ID NO: 1838255 - RNA, 22 nt, Human
cugcaccggcuggccuggcccc

SEQ ID NO: 1838256 - RNA, 16 nt, Human
cugcacccucaggcag

SEQ ID NO: 1838257 - RNA, 14 nt, Human
cugcacccucaggc

SEQ ID NO: 1838258 - RNA, 13 nt, Human
cugcacccucagg

SEQ ID NO: 1838259 - RNA, 15 nt, Human
cugcacuccccugcu

SEQ ID NO: 1838260 - RNA, 23 nt, Human
cugcaccggcuggccuggccccu

SEQ ID NO: 1838261 - RNA, 12 nt, Human
cugcaccgggcc

SEQ ID NO: 1838262 - RNA, 15 nt, Human
cugcccaccuggccu

SEQ ID NO: 1838263 - RNA, 14 nt, Human
cugcccaccuggcc

SEQ ID NO: 1838264 - RNA, 13 nt, Human
cugcccaccuggc

SEQ ID NO: 1838265 - RNA, 15 nt, Human
cugccaugccagcuu

SEQ ID NO: 1838266 - RNA, 14 nt, Human
cugccaugccagcu

SEQ ID NO: 1838267 - RNA, 21 nt, Human
cugccaucucaccuccugcug

SEQ ID NO: 1838268 - RNA, 23 nt, Human
cugccaucucaccuccugcuggg

SEQ ID NO: 1838269 - RNA, 13 nt, Human
cugccaggcaugg

SEQ ID NO: 1838270 - RNA, 11 nt, Human
cugccaggcau

SEQ ID NO: 1838271 - RNA, 16 nt, Human
cugcccacucccugca

SEQ ID NO: 1838272 - RNA, 15 nt, Human
cugcccacucccugc

SEQ ID NO: 1838273 - RNA, 14 nt, Human
cugcccacucccug

SEQ ID NO: 1838274 - RNA, 22 nt, Human
cugcccaccuggccucugcacu

SEQ ID NO: 1838275 - RNA, 20 nt, Human
cugcccaccuggccucugca

SEQ ID NO: 1838276 - RNA, 19 nt, Human
cugcccaccuggccucugc

SEQ ID NO: 1838277 - RNA, 18 nt, Human
cugcccaccuggccucug

SEQ ID NO: 1838278 - RNA, 17 nt, Human
cugcccaccuggccucu

SEQ ID NO: 1838279 - RNA, 18 nt, Human
cugcccacucccugcaac

SEQ ID NO: 1838280 - RNA, 17 nt, Human
cugcccagccuccaagc

SEQ ID NO: 1838281 - RNA, 19 nt, Human
cugccaaugggagcucaug

SEQ ID NO: 1838282 - RNA, 18 nt, Human
cugccaaugggagcucau

SEQ ID NO: 1838283 - RNA, 22 nt, Human
cugcaugcgggcuuccuccugg

SEQ ID NO: 1838284 - RNA, 18 nt, Human
cugcaugcgggcuuccuc

SEQ ID NO: 1838285 - RNA, 16 nt, Human
cugcaucguuucaucu

SEQ ID NO: 1838286 - RNA, 20 nt, Human
cugcauccuccgccucccgg

SEQ ID NO: 1838287 - RNA, 19 nt, Human
cugcauccuccgccucccg

SEQ ID NO: 1838288 - RNA, 22 nt, Human
cugcaucguuucaucuuccaac

SEQ ID NO: 1838289 - RNA, 22 nt, Human
cugcaguugccagucaccccgg

SEQ ID NO: 1838290 - RNA, 21 nt, Human
cugcaguugccagucaccccg

SEQ ID NO: 1838291 - RNA, 17 nt, Human
cugcaguugccagucac

SEQ ID NO: 1838292 - RNA, 19 nt, Human
cugcaguugccagucaccc

SEQ ID NO: 1838293 - RNA, 23 nt, Human
cugcacuugcagacucuacagag

SEQ ID NO: 1838294 - RNA, 22 nt, Human
cugccuccagaauggucuuucu

SEQ ID NO: 1838295 - RNA, 14 nt, Human
cugccuccagaaug

SEQ ID NO: 1838296 - RNA, 18 nt, Human
cugccucucugcaggucc

SEQ ID NO: 1838297 - RNA, 17 nt, Human
cugccucucugcagguc

SEQ ID NO: 1838298 - RNA, 16 nt, Human
cugccucucugcaggu

SEQ ID NO: 1838299 - RNA, 15 nt, Human
cugccucucugcagg

SEQ ID NO: 1838300 - RNA, 15 nt, Human
cugccucagccuccc

SEQ ID NO: 1838301 - RNA, 17 nt, Human
cugccucagccucccga

SEQ ID NO: 1838302 - RNA, 19 nt, Human
cugccucagccucccaaag

SEQ ID NO: 1838303 - RNA, 22 nt, Human
cugccgcagcccugcagagggc

SEQ ID NO: 1838304 - RNA, 21 nt, Human
cugccgcagcccugcagaggg

SEQ ID NO: 1838305 - RNA, 20 nt, Human
cugccgcagcccugcagagg

SEQ ID NO: 1838306 - RNA, 19 nt, Human
cugccgcagcccugcagag

SEQ ID NO: 1838307 - RNA, 23 nt, Human
cugccgcagcccugcagagggca

SEQ ID NO: 1838308 - RNA, 13 nt, Human
cugccgcagcccu

SEQ ID NO: 1838309 - RNA, 12 nt, Human
cugccgcagccc

SEQ ID NO: 1838310 - RNA, 21 nt, Human
cugccccuccucucugcccua

SEQ ID NO: 1838311 - RNA, 20 nt, Human
cugccccuccucucugcccu

SEQ ID NO: 1838312 - RNA, 19 nt, Human
cugccucucugcagguccc

SEQ ID NO: 1838313 - RNA, 17 nt, Human
cugccucugacacacag

SEQ ID NO: 1838314 - RNA, 18 nt, Human
cugccucugacacacagc

SEQ ID NO: 1838315 - RNA, 21 nt, Human
cugccucugacacacagcucu

SEQ ID NO: 1838316 - RNA, 21 nt, Human
cugccugcccaggccccugcc

SEQ ID NO: 1838317 - RNA, 22 nt, Human
cugccugcccaggccccugcca

SEQ ID NO: 1838318 - RNA, 19 nt, Human
cugcgguccacccaggagc

SEQ ID NO: 1838319 - RNA, 20 nt, Human
cugcgguccacccaggagcc

SEQ ID NO: 1838320 - RNA, 18 nt, Human
cugcgguccacccaggag

SEQ ID NO: 1838321 - RNA, 18 nt, Human
cucugucgcccagucugg

SEQ ID NO: 1838322 - RNA, 19 nt, Human
cucugucgcccagucugga

SEQ ID NO: 1838323 - RNA, 22 nt, Human
cucugucgcccaggcuggagug

SEQ ID NO: 1838324 - RNA, 18 nt, Human
cucugucgcccaggcugg

SEQ ID NO: 1838325 - RNA, 17 nt, Human
cucugucgcccagucug

SEQ ID NO: 1838326 - RNA, 15 nt, Human
cucugucgcccaggc

SEQ ID NO: 1838327 - RNA, 13 nt, Human
cucugucgcccag

SEQ ID NO: 1838328 - RNA, 14 nt, Human
cucuguccugggag

SEQ ID NO: 1838329 - RNA, 15 nt, Human
cucuguccugggagu

SEQ ID NO: 1838330 - RNA, 22 nt, Human
cucuguccugggagugagcugg

SEQ ID NO: 1838331 - RNA, 21 nt, Human
cucuggccuucggccuccauc

SEQ ID NO: 1838332 - RNA, 22 nt, Human
cucuggccuucggccuccaucc

SEQ ID NO: 1838333 - RNA, 23 nt, Human
cucuggcagcucagagagggugg

SEQ ID NO: 1838334 - RNA, 20 nt, Human
cucuggauuauauuaugaag

SEQ ID NO: 1838335 - RNA, 19 nt, Human
cucuggauuauauuaugaa

SEQ ID NO: 1838336 - RNA, 10 nt, Human
cucugccuga

SEQ ID NO: 1838337 - RNA, 21 nt, Human
cucugccucccaucacccgcu

SEQ ID NO: 1838338 - RNA, 19 nt, Human
cucugccucugacacacag

SEQ ID NO: 1838339 - RNA, 20 nt, Human
cucugccucugacacacagc

SEQ ID NO: 1838340 - RNA, 13 nt, Human
cucuucuccacug

SEQ ID NO: 1838341 - RNA, 12 nt, Human
cucuucuccacu

SEQ ID NO: 1838342 - RNA, 15 nt, Human
cucuucuccaggcug

SEQ ID NO: 1838343 - RNA, 13 nt, Human
cucuucuccaggc

SEQ ID NO: 1838344 - RNA, 20 nt, Human
cucugugucagguggggcag

SEQ ID NO: 1838345 - RNA, 21 nt, Human
cucugugucagguggggcagc

SEQ ID NO: 1838346 - RNA, 22 nt, Human
cucugugucagguggggcagcu

SEQ ID NO: 1838347 - RNA, 23 nt, Human
cucugugucagguggggcagcuu

SEQ ID NO: 1838348 - RNA, 20 nt, Human
cucuguugcccaggcuggag

SEQ ID NO: 1838349 - RNA, 22 nt, Human
cucuguugcccaggcuggagug

SEQ ID NO: 1838350 - RNA, 17 nt, Human
cucugccucccaucacc

SEQ ID NO: 1838351 - RNA, 16 nt, Human
cucugccucccaucac

SEQ ID NO: 1838352 - RNA, 14 nt, Human
cucugccucccauc

SEQ ID NO: 1838353 - RNA, 13 nt, Human
cucugccucccau

SEQ ID NO: 1838354 - RNA, 20 nt, Human
cucugcccuaaugcgcaggc

SEQ ID NO: 1838355 - RNA, 22 nt, Human
cucugcccuaaugcgcaggcug

SEQ ID NO: 1838356 - RNA, 17 nt, Human
cucugcccacucccugc

SEQ ID NO: 1838357 - RNA, 16 nt, Human
cucugcccacucccug

SEQ ID NO: 1838358 - RNA, 15 nt, Human
cucugcccacucccu

SEQ ID NO: 1838359 - RNA, 13 nt, Human
cucugcccacucc

SEQ ID NO: 1838360 - RNA, 20 nt, Human
cucugcccacucccugcaac

SEQ ID NO: 1838361 - RNA, 18 nt, Human
cucugcccacucccugca

SEQ ID NO: 1838362 - RNA, 18 nt, Human
cucugcaggucccuaaua

SEQ ID NO: 1838363 - RNA, 22 nt, Human
cucugcaggucccuaauaaagc

SEQ ID NO: 1838364 - RNA, 21 nt, Human
cucugcaggucccuaauaaag

SEQ ID NO: 1838365 - RNA, 15 nt, Human
cucugcacaagcugc

SEQ ID NO: 1838366 - RNA, 14 nt, Human
cucugcacaagcug

SEQ ID NO: 1838367 - RNA, 20 nt, Human
cucugcaggucccuaauaaa

SEQ ID NO: 1838368 - RNA, 19 nt, Human
cucugcaggucccuaauaa

SEQ ID NO: 1838369 - RNA, 13 nt, Human
cucugcacaagcu

SEQ ID NO: 1838370 - RNA, 23 nt, Human
cucugagacucgcgacaaugcaa

SEQ ID NO: 1838371 - RNA, 16 nt, Human
cucugaggacacuaac

SEQ ID NO: 1838372 - RNA, 12 nt, Human
cucugaggacac

SEQ ID NO: 1838373 - RNA, 14 nt, Human
cucugaggacacua

SEQ ID NO: 1838374 - RNA, 21 nt, Human
cucugagacucgcgacaaugc

SEQ ID NO: 1838375 - RNA, 22 nt, Human
cucugacaacagacuucugaaa

SEQ ID NO: 1838376 - RNA, 21 nt, Human
cucugacaacagacuucugaa

SEQ ID NO: 1838377 - RNA, 14 nt, Human
cucugacacacagc

SEQ ID NO: 1838378 - RNA, 15 nt, Human
cucugacacacagcu

SEQ ID NO: 1838379 - RNA, 16 nt, Human
cucugacacacagcuc

SEQ ID NO: 1838380 - RNA, 17 nt, Human
cucugacacacagcucu

SEQ ID NO: 1838381 - RNA, 18 nt, Human
cucugacacacagcucug

SEQ ID NO: 1838382 - RNA, 23 nt, Human
cucugacagaagaaccccagggu

SEQ ID NO: 1838383 - RNA, 19 nt, Human
cucugacacacagcucugu

SEQ ID NO: 1838384 - RNA, 16 nt, Human
cucugacaacagacuu

SEQ ID NO: 1838385 - RNA, 22 nt, Human
cucugaaggacauugcggacag

SEQ ID NO: 1838386 - RNA, 15 nt, Human
cugaacauuccagag

SEQ ID NO: 1838387 - RNA, 23 nt, Human
cucuuuggucuacacugugcuga

SEQ ID NO: 1838388 - RNA, 22 nt, Human
cucuuuggucuacacugugcug

SEQ ID NO: 1838389 - RNA, 16 nt, Human
cucuucuccaggcugu

SEQ ID NO: 1838390 - RNA, 23 nt, Human
cugaaagggacgcuacccgggaa

SEQ ID NO: 1838391 - RNA, 14 nt, Human
cucuuuucaaaaca

SEQ ID NO: 1838392 - RNA, 20 nt, Human
cucuuuguucuaaagaugga

SEQ ID NO: 1838393 - RNA, 20 nt, Human
cugaagucuuuguacagaca

SEQ ID NO: 1838394 - RNA, 17 nt, Human
cugaagucuuuguacag

SEQ ID NO: 1838395 - RNA, 22 nt, Human
cugaagucccagauacuugggg

SEQ ID NO: 1838396 - RNA, 17 nt, Human
cugaaguucagcugcau

SEQ ID NO: 1838397 - RNA, 15 nt, Human
cugaagucacugcac

SEQ ID NO: 1838398 - RNA, 14 nt, Human
cugaagucacugca

SEQ ID NO: 1838399 - RNA, 13 nt, Human
cugaagucacugc

SEQ ID NO: 1838400 - RNA, 21 nt, Human
cugaagucacacagugagucg

SEQ ID NO: 1838401 - RNA, 18 nt, Human
cugaagucacacagugag

SEQ ID NO: 1838402 - RNA, 19 nt, Human
cugaagucacacagugagu

SEQ ID NO: 1838403 - RNA, 17 nt, Human
cugaagucacacaguga

SEQ ID NO: 1838404 - RNA, 12 nt, Human
cugaauuucuuu

SEQ ID NO: 1838405 - RNA, 12 nt, Human
cugaauuauuuu

SEQ ID NO: 1838406 - RNA, 20 nt, Human
cugaaugguuuucaaaauaa

SEQ ID NO: 1838407 - RNA, 19 nt, Human
cugaaugguuuucaaaaua

SEQ ID NO: 1838408 - RNA, 23 nt, Human
cugaccagccuccaugcugccuc

SEQ ID NO: 1838409 - RNA, 21 nt, Human
cugaccagccuccaugcugcc

SEQ ID NO: 1838410 - RNA, 14 nt, Human
cugaauuucuuuug

SEQ ID NO: 1838411 - RNA, 16 nt, Human
cugacagacacaggcc

SEQ ID NO: 1838412 - RNA, 17 nt, Human
cugaccagccuccaugc

SEQ ID NO: 1838413 - RNA, 17 nt, Human
cugacagacacaggccc

SEQ ID NO: 1838414 - RNA, 18 nt, Human
cugacagacacaggcccg

SEQ ID NO: 1838415 - RNA, 17 nt, Human
cugacuguacuccuccc

SEQ ID NO: 1838416 - RNA, 22 nt, Human
cugagacagcccgggcucugcc

SEQ ID NO: 1838417 - RNA, 21 nt, Human
cugagacagcccgggcucugc

SEQ ID NO: 1838418 - RNA, 19 nt, Human
cugagacagcccgggcucu

SEQ ID NO: 1838419 - RNA, 20 nt, Human
cugagacagcccgggcucug

SEQ ID NO: 1838420 - RNA, 21 nt, Human
cugagcaaauguggcuccugg

SEQ ID NO: 1838421 - RNA, 20 nt, Human
cugagcaaauguggcuccug

SEQ ID NO: 1838422 - RNA, 17 nt, Human
cugagcaaauguggcuc

SEQ ID NO: 1838423 - RNA, 15 nt, Human
cugagcaaauguggc

SEQ ID NO: 1838424 - RNA, 23 nt, Human
cugagauuauaggcaccuaccac

SEQ ID NO: 1838425 - RNA, 14 nt, Human
cugagccagauuuc

SEQ ID NO: 1838426 - RNA, 13 nt, Human
cugagccagauuu

SEQ ID NO: 1838427 - RNA, 15 nt, Human
cugagccagauuuca

SEQ ID NO: 1838428 - RNA, 22 nt, Human
cucgagcaugccuggauggggc

SEQ ID NO: 1838429 - RNA, 15 nt, Human
cucgccuucaucucc

SEQ ID NO: 1838430 - RNA, 23 nt, Human
cucgcucugucgcccaggcugga

SEQ ID NO: 1838431 - RNA, 19 nt, Human
cucgagcaugccuggaugg

SEQ ID NO: 1838432 - RNA, 16 nt, Human
cucgagcaugccugga

SEQ ID NO: 1838433 - RNA, 15 nt, Human
cucgagcaugccugg

SEQ ID NO: 1838434 - RNA, 13 nt, Human
cucgagcaugccu

SEQ ID NO: 1838435 - RNA, 23 nt, Human
cuccuuggugucgggcaugacac

SEQ ID NO: 1838436 - RNA, 22 nt, Human
cuccuuaucaaaggacaccauu

SEQ ID NO: 1838437 - RNA, 17 nt, Human
cuccuuaucaaaggaca

SEQ ID NO: 1838438 - RNA, 12 nt, Human
cuccuggacucc

SEQ ID NO: 1838439 - RNA, 13 nt, Human
cuccuuagaagug

SEQ ID NO: 1838440 - RNA, 17 nt, Human
cuccuuagaaguggaag

SEQ ID NO: 1838441 - RNA, 20 nt, Human
cuccuuagaaguggaaguag

SEQ ID NO: 1838442 - RNA, 14 nt, Human
cuccuggaaauauu

SEQ ID NO: 1838443 - RNA, 13 nt, Human
cuccugcugggca

SEQ ID NO: 1838444 - RNA, 11 nt, Human
cuccuggacuc

SEQ ID NO: 1838445 - RNA, 21 nt, Human
cuccugugugugcgccuacag

SEQ ID NO: 1838446 - RNA, 23 nt, Human
cuccugugugugcgccuacagga

SEQ ID NO: 1838447 - RNA, 24 nt, Human
cuccugugugugcgccuacaggag

SEQ ID NO: 1838448 - RNA, 17 nt, Human
cuccugccucagccucc

SEQ ID NO: 1838449 - RNA, 16 nt, Human
cuccugccucagccuc

SEQ ID NO: 1838450 - RNA, 12 nt, Human
cuccugccucag

SEQ ID NO: 1838451 - RNA, 11 nt, Human
cuccugccuca

SEQ ID NO: 1838452 - RNA, 13 nt, Human
cuccucuccccag

SEQ ID NO: 1838453 - RNA, 15 nt, Human
cuccucuccccagca

SEQ ID NO: 1838454 - RNA, 22 nt, Human
cuccugccucgaacuggcugca

SEQ ID NO: 1838455 - RNA, 19 nt, Human
cuccugccucagccucccg

SEQ ID NO: 1838456 - RNA, 21 nt, Human
cuccugccucagccuccugag

SEQ ID NO: 1838457 - RNA, 18 nt, Human
cuccugccucgaacuggc

SEQ ID NO: 1838458 - RNA, 20 nt, Human
cuccugccucgaacuggcug

SEQ ID NO: 1838459 - RNA, 21 nt, Human
cuccugccucgaacuggcugc

SEQ ID NO: 1838460 - RNA, 15 nt, Human
cuccuccagagucag

SEQ ID NO: 1838461 - RNA, 13 nt, Human
cuccuccagaguc

SEQ ID NO: 1838462 - RNA, 15 nt, Human
cuccuccagccgcca

SEQ ID NO: 1838463 - RNA, 19 nt, Human
cuccuccuggacuccugca

SEQ ID NO: 1838464 - RNA, 15 nt, Human
cuccuccuggacucc

SEQ ID NO: 1838465 - RNA, 14 nt, Human
cuccuccuggacuc

SEQ ID NO: 1838466 - RNA, 23 nt, Human
cuccucccaggcgccccuucccc

SEQ ID NO: 1838467 - RNA, 22 nt, Human
cuccucccaggcgccccuuccc

SEQ ID NO: 1838468 - RNA, 17 nt, Human
cuccucccaggcgcccc

SEQ ID NO: 1838469 - RNA, 18 nt, Human
cuccucagaucuucugug

SEQ ID NO: 1838470 - RNA, 12 nt, Human
cucccuuucaac

SEQ ID NO: 1838471 - RNA, 19 nt, Human
cucccuuggggccuaugca

SEQ ID NO: 1838472 - RNA, 21 nt, Human
cucccugccccucccuucaac

SEQ ID NO: 1838473 - RNA, 20 nt, Human
cucccugccccucccuucaa

SEQ ID NO: 1838474 - RNA, 18 nt, Human
cucccugccccucccuuc

SEQ ID NO: 1838475 - RNA, 17 nt, Human
cucccugccccucccuu

SEQ ID NO: 1838476 - RNA, 14 nt, Human
cucccugccccucc

SEQ ID NO: 1838477 - RNA, 13 nt, Human
cucccugccccuc

SEQ ID NO: 1838478 - RNA, 23 nt, Human
cucccugccccccagcccuccuu

SEQ ID NO: 1838479 - RNA, 17 nt, Human
cucccugccccccagcc

SEQ ID NO: 1838480 - RNA, 21 nt, Human
cucccggugcccaagaauaga

SEQ ID NO: 1838481 - RNA, 15 nt, Human
cucccggugcccaag

SEQ ID NO: 1838482 - RNA, 19 nt, Human
cucccgaguagcugggacu

SEQ ID NO: 1838483 - RNA, 20 nt, Human
cucccgaguagcugggacua

SEQ ID NO: 1838484 - RNA, 20 nt, Human
cuccccuccuccuggacucc

SEQ ID NO: 1838485 - RNA, 12 nt, Human
cuccccuccucc

SEQ ID NO: 1838486 - RNA, 14 nt, Human
cuccauccugaggc

SEQ ID NO: 1838487 - RNA, 13 nt, Human
cuccauccugagg

SEQ ID NO: 1838488 - RNA, 22 nt, Human
cuccccagcaagugagagcugg

SEQ ID NO: 1838489 - RNA, 23 nt, Human
cuccccagcaagugagagcuggg

SEQ ID NO: 1838490 - RNA, 15 nt, Human
cucauacccaccccc

SEQ ID NO: 1838491 - RNA, 14 nt, Human
cucauacucaccuc

SEQ ID NO: 1838492 - RNA, 22 nt, Human
cucauacucaccucaccccacu

SEQ ID NO: 1838493 - RNA, 17 nt, Human
cucauagcccucacccu

SEQ ID NO: 1838494 - RNA, 13 nt, Human
cucauagcccuca

SEQ ID NO: 1838495 - RNA, 21 nt, Human
cucauagcccucacccugggg

SEQ ID NO: 1838496 - RNA, 20 nt, Human
cucauagcccucacccuggg

SEQ ID NO: 1838497 - RNA, 21 nt, Human
cucauaguaugguggcugggu

SEQ ID NO: 1838498 - RNA, 21 nt, Human
cucauacccacccccacccaa

SEQ ID NO: 1838499 - RNA, 19 nt, Human
cucauacccacccccaccc

SEQ ID NO: 1838500 - RNA, 18 nt, Human
cucauacccacccccacc

SEQ ID NO: 1838501 - RNA, 16 nt, Human
cucauacccaccccca

SEQ ID NO: 1838502 - RNA, 22 nt, Human
cucaggugauccacccaccuca

SEQ ID NO: 1838503 - RNA, 20 nt, Human
cucaggugauccacccaccu

SEQ ID NO: 1838504 - RNA, 18 nt, Human
cucaggugauccacccac

SEQ ID NO: 1838505 - RNA, 19 nt, Human
cucaggugauccacccacc

SEQ ID NO: 1838506 - RNA, 22 nt, Human
cucaucaccaacgucugugcca

SEQ ID NO: 1838507 - RNA, 21 nt, Human
cucaucaccaacgucugugcc

SEQ ID NO: 1838508 - RNA, 23 nt, Human
cucauaguaugguggcuggguug

SEQ ID NO: 1838509 - RNA, 15 nt, Human
cucauccucauaccc

SEQ ID NO: 1838510 - RNA, 23 nt, Human
cucaggaguuugagaccaaccug

SEQ ID NO: 1838511 - RNA, 18 nt, Human
cucaggaguuugagacca

SEQ ID NO: 1838512 - RNA, 21 nt, Human
cucagcccacauagugauggu

SEQ ID NO: 1838513 - RNA, 19 nt, Human
cucagcccacauagugaug

SEQ ID NO: 1838514 - RNA, 18 nt, Human
cucagcauccuggcaccc

SEQ ID NO: 1838515 - RNA, 13 nt, Human
cucagggccuggc

SEQ ID NO: 1838516 - RNA, 15 nt, Human
cucagggccuggcuc

SEQ ID NO: 1838517 - RNA, 14 nt, Human
cucagggccuggcu

SEQ ID NO: 1838518 - RNA, 15 nt, Human
cucagggccuggucg

SEQ ID NO: 1838519 - RNA, 16 nt, Human
cucagggccuggcuca

SEQ ID NO: 1838520 - RNA, 20 nt, Human
cucaggugagaagcagagga

SEQ ID NO: 1838521 - RNA, 19 nt, Human
cucaggugagaagcagagg

SEQ ID NO: 1838522 - RNA, 16 nt, Human
cucaggugagaagcag

SEQ ID NO: 1838523 - RNA, 18 nt, Human
cucagggucccugguggc

SEQ ID NO: 1838524 - RNA, 17 nt, Human
cucagggucccuggugg

SEQ ID NO: 1838525 - RNA, 16 nt, Human
cucagggucccuggug

SEQ ID NO: 1838526 - RNA, 15 nt, Human
cucagggucccuggu

SEQ ID NO: 1838527 - RNA, 13 nt, Human
cuccaccugccag

SEQ ID NO: 1838528 - RNA, 12 nt, Human
cuccaccugcca

SEQ ID NO: 1838529 - RNA, 14 nt, Human
cuccaccugccagg

SEQ ID NO: 1838530 - RNA, 15 nt, Human
cuccagccccuggau

SEQ ID NO: 1838531 - RNA, 17 nt, Human
cuccagccccuggaugc

SEQ ID NO: 1838532 - RNA, 16 nt, Human
cuccagccccuggaug

SEQ ID NO: 1838533 - RNA, 20 nt, Human
cuccagccccuggaugcagc

SEQ ID NO: 1838534 - RNA, 12 nt, Human
cuccagccuggg

SEQ ID NO: 1838535 - RNA, 14 nt, Human
cuccagcucaccag

SEQ ID NO: 1838536 - RNA, 17 nt, Human
cuccaggagcagccaca

SEQ ID NO: 1838537 - RNA, 16 nt, Human
cuccaggagcagccac

SEQ ID NO: 1838538 - RNA, 15 nt, Human
cuccaggagcagcca

SEQ ID NO: 1838539 - RNA, 14 nt, Human
cuccaggagcagcc

SEQ ID NO: 1838540 - RNA, 13 nt, Human
cuccaggagcagc

SEQ ID NO: 1838541 - RNA, 11 nt, Human
cuccaggagca

SEQ ID NO: 1838542 - RNA, 23 nt, Human
cuccaggagcagccacauuccug

SEQ ID NO: 1838543 - RNA, 18 nt, Human
cuccaggagcagccacau

SEQ ID NO: 1838544 - RNA, 12 nt, Human
cuccauccugag

SEQ ID NO: 1838545 - RNA, 15 nt, Human
cuccacccugcucuc

SEQ ID NO: 1838546 - RNA, 13 nt, Human
cuccacccugcuc

SEQ ID NO: 1838547 - RNA, 23 nt, Human
cuccaaguccacaguggaaccag

SEQ ID NO: 1838548 - RNA, 22 nt, Human
cuccaaucccaccaacccucag

SEQ ID NO: 1838549 - RNA, 13 nt, Human
cucauuaaaaaaa

SEQ ID NO: 1838550 - RNA, 17 nt, Human
cucauuugucacacacu

SEQ ID NO: 1838551 - RNA, 18 nt, Human
cuccaaaauaaaacuuuu

SEQ ID NO: 1838552 - RNA, 15 nt, Human
cuccaaaauaaaacu

SEQ ID NO: 1838553 - RNA, 16 nt, Human
cuccaaaauaaaacuu

SEQ ID NO: 1838554 - RNA, 18 nt, Human
cucauuugucacacacuu

SEQ ID NO: 1838555 - RNA, 18 nt, Human
cuaugggacucaaugcac

SEQ ID NO: 1838556 - RNA, 22 nt, Human
cuaugggacucaaugcacugac

SEQ ID NO: 1838557 - RNA, 23 nt, Human
cuaugggacucaaugcacugaca

SEQ ID NO: 1838558 - RNA, 15 nt, Human
cuauuagagaagaga

SEQ ID NO: 1838559 - RNA, 20 nt, Human
cuaugcagagguccacaaca

SEQ ID NO: 1838560 - RNA, 13 nt, Human
cuauggccugugg

SEQ ID NO: 1838561 - RNA, 22 nt, Human
cuauaauuuaccugaagucuuu

SEQ ID NO: 1838562 - RNA, 21 nt, Human
cuauaauguaagcucuacuga

SEQ ID NO: 1838563 - RNA, 16 nt, Human
cuauaauguaagcucu

SEQ ID NO: 1838564 - RNA, 17 nt, Human
cuauagccuaggugaca

SEQ ID NO: 1838565 - RNA, 22 nt, Human
cuagguaaauuacaguuccuag

SEQ ID NO: 1838566 - RNA, 23 nt, Human
cgcccaguuggguggaugccugg

SEQ ID NO: 1838567 - RNA, 15 nt, Human
cgccaugcuccuggc

SEQ ID NO: 1838568 - RNA, 20 nt, Human
cgccaucccagccccaauga

SEQ ID NO: 1838569 - RNA, 22 nt, Human
cgcccaguuggguggaugccug

SEQ ID NO: 1838570 - RNA, 14 nt, Human
cuaggugacagagu

SEQ ID NO: 1838571 - RNA, 18 nt, Human
cuaggugacagagugaga

SEQ ID NO: 1838572 - RNA, 24 nt, Human
cuaggugacagagugagacucugu

SEQ ID NO: 1838573 - RNA, 15 nt, Human
cucacaguccuuacc

SEQ ID NO: 1838574 - RNA, 24 nt, Human
cucacacaugagcaucaggccagg

SEQ ID NO: 1838575 - RNA, 22 nt, Human
cucacacaugagcaucaggcca

SEQ ID NO: 1838576 - RNA, 14 nt, Human
cucaagacuuccag

SEQ ID NO: 1838577 - RNA, 17 nt, Human
cucaagugauucuccug

SEQ ID NO: 1838578 - RNA, 16 nt, Human
cucaagacuuccagag

SEQ ID NO: 1838579 - RNA, 21 nt, Human
cucaaguccucuuuucugaga

SEQ ID NO: 1838580 - RNA, 17 nt, Human
cucaccagccccagugc

SEQ ID NO: 1838581 - RNA, 18 nt, Human
cucaccagccccagugcc

SEQ ID NO: 1838582 - RNA, 13 nt, Human
cucaccagcccca

SEQ ID NO: 1838583 - RNA, 14 nt, Human
cucaccagccccag

SEQ ID NO: 1838584 - RNA, 15 nt, Human
cucaccagccccagu

SEQ ID NO: 1838585 - RNA, 23 nt, Human
cucacaguccuuaccagcagagc

SEQ ID NO: 1838586 - RNA, 22 nt, Human
cucacaguccuuaccagcagag

SEQ ID NO: 1838587 - RNA, 19 nt, Human
cucacaguccuuaccagca

SEQ ID NO: 1838588 - RNA, 17 nt, Human
cucacaguccuuaccag

SEQ ID NO: 1838589 - RNA, 22 nt, Human
cucacauuuauucugcucacau

SEQ ID NO: 1838590 - RNA, 15 nt, Human
cucacauuuauucug

SEQ ID NO: 1838591 - RNA, 19 nt, Human
cucacauuuauucugcuca

SEQ ID NO: 1838592 - RNA, 18 nt, Human
cuauuguuagucucuuga

SEQ ID NO: 1838593 - RNA, 19 nt, Human
cuauugucaccagggcugg

SEQ ID NO: 1838594 - RNA, 22 nt, Human
cuauuuaugugauccuuuugga

SEQ ID NO: 1838595 - RNA, 21 nt, Human
cucaacaccucugcacaagcu

SEQ ID NO: 1838596 - RNA, 13 nt, Human
cucaaccuccugg

SEQ ID NO: 1838597 - RNA, 15 nt, Human
cucaaccuccugggc

SEQ ID NO: 1838598 - RNA, 17 nt, Human
cucaaccuccugggcua

SEQ ID NO: 1838599 - RNA, 14 nt, Human
cucagagagggugg

SEQ ID NO: 1838600 - RNA, 18 nt, Human
cucagagagggugggagu

SEQ ID NO: 1838601 - RNA, 21 nt, Human
cucacuguugcccaggcuggc

SEQ ID NO: 1838602 - RNA, 22 nt, Human
cucacuguugcccaggcuggcg

SEQ ID NO: 1838603 - RNA, 22 nt, Human
cucacugccaugccagcuuauc

SEQ ID NO: 1838604 - RNA, 19 nt, Human
cucacugccaugccagcuu

SEQ ID NO: 1838605 - RNA, 20 nt, Human
cucacuguugcccaggcugg

SEQ ID NO: 1838606 - RNA, 15 nt, Human
cucagaucuucugug

SEQ ID NO: 1838607 - RNA, 16 nt, Human
cucagcauccuggcac

SEQ ID NO: 1838608 - RNA, 17 nt, Human
cucagcauccuggcacc

SEQ ID NO: 1838609 - RNA, 15 nt, Human
cucaccccagcccca

SEQ ID NO: 1838610 - RNA, 19 nt, Human
cucacuauguugcccaggc

SEQ ID NO: 1838611 - RNA, 20 nt, Human
cucacuauguugcccaggca

SEQ ID NO: 1838612 - RNA, 15 nt, Human
cucacuccuaccugg

SEQ ID NO: 1838613 - RNA, 13 nt, Human
cucacuccuaccu

SEQ ID NO: 1838614 - RNA, 23 nt, Human
cucacuauguugcccaggcaggu

SEQ ID NO: 1838615 - RNA, 21 nt, Human
cucacuauguugcccaggcag

SEQ ID NO: 1838616 - RNA, 22 nt, Human
cucacuauguugcccaggcagg

SEQ ID NO: 1838617 - RNA, 13 nt, Human
cucacuccuugaa

SEQ ID NO: 1838618 - RNA, 19 nt, Human
cucacuccuaccugguaau

SEQ ID NO: 1838619 - RNA, 17 nt, Human
cucacuccuaccuggua

SEQ ID NO: 1838620 - RNA, 16 nt, Human
cucacuccuaccuggu

SEQ ID NO: 1838621 - RNA, 11 nt, Human
cucacucuguc

SEQ ID NO: 1838622 - RNA, 12 nt, Human
cucacucugucg

SEQ ID NO: 1838623 - RNA, 22 nt, Human
cucacucugucgcccagucugg

SEQ ID NO: 1838624 - RNA, 13 nt, Human
cucacucugucgc

SEQ ID NO: 1838625 - RNA, 21 nt, Human
cucacucugucgcccagucug

SEQ ID NO: 1838626 - RNA, 12 nt, Human
cucacugcagcc

SEQ ID NO: 1838627 - RNA, 13 nt, Human
cucacugcagccu

SEQ ID NO: 1838628 - RNA, 14 nt, Human
cucacugcagccuc

SEQ ID NO: 1838629 - RNA, 15 nt, Human
gagggagggcuccag

SEQ ID NO: 1838630 - RNA, 15 nt, Human
gagggagggagggcu

SEQ ID NO: 1838631 - RNA, 14 nt, Human
gagggagggagggc

SEQ ID NO: 1838632 - RNA, 18 nt, Human
gagggcacugguggcccg

SEQ ID NO: 1838633 - RNA, 16 nt, Human
gagggcacugguggcc

SEQ ID NO: 1838634 - RNA, 22 nt, Human
gaggggccucuuaugggcuggg

SEQ ID NO: 1838635 - RNA, 20 nt, Human
gaggggccuggcagccgugc

SEQ ID NO: 1838636 - RNA, 18 nt, Human
gaggggccuggcagccgu

SEQ ID NO: 1838637 - RNA, 14 nt, Human
gaggggccuggcag

SEQ ID NO: 1838638 - RNA, 13 nt, Human
gaggggccuggca

SEQ ID NO: 1838639 - RNA, 22 nt, Human
gagggcacagaaaauggaagac

SEQ ID NO: 1838640 - RNA, 14 nt, Human
gagggcacagaaaa

SEQ ID NO: 1838641 - RNA, 23 nt, Human
gagggcacagaaaauggaagaca

SEQ ID NO: 1838642 - RNA, 12 nt, Human
gagggcacuggu

SEQ ID NO: 1838643 - RNA, 14 nt, Human
gagggagguaagga

SEQ ID NO: 1838644 - RNA, 13 nt, Human
gagggagugacag

SEQ ID NO: 1838645 - RNA, 14 nt, Human
gagggagugacaga

SEQ ID NO: 1838646 - RNA, 16 nt, Human
gagggagggcuccaga

SEQ ID NO: 1838647 - RNA, 16 nt, Human
gagggagugacagagg

SEQ ID NO: 1838648 - RNA, 15 nt, Human
gaggcugggcucccu

SEQ ID NO: 1838649 - RNA, 14 nt, Human
gaggcugggcuccc

SEQ ID NO: 1838650 - RNA, 13 nt, Human
gaggcugggcucc

SEQ ID NO: 1838651 - RNA, 20 nt, Human
gaggcggccccggccggggu

SEQ ID NO: 1838652 - RNA, 19 nt, Human
gaggcggaucuuuggacag

SEQ ID NO: 1838653 - RNA, 14 nt, Human
gaggccuucucuga

SEQ ID NO: 1838654 - RNA, 23 nt, Human
gaggcccuucucuccagccccug

SEQ ID NO: 1838655 - RNA, 14 nt, Human
gaggcccuucucuc

SEQ ID NO: 1838656 - RNA, 24 nt, Human
gaggcccuucucuccagccccugg

SEQ ID NO: 1838657 - RNA, 13 nt, Human
gaggcccggccuc

SEQ ID NO: 1838658 - RNA, 19 nt, Human
gaggcccccaucuccuuaa

SEQ ID NO: 1838659 - RNA, 12 nt, Human
gaggauguucug

SEQ ID NO: 1838660 - RNA, 17 nt, Human
gaggauguucugggaca

SEQ ID NO: 1838661 - RNA, 20 nt, Human
gaggauguucugggacacag

SEQ ID NO: 1838662 - RNA, 16 nt, Human
gaggauugcuugagcu

SEQ ID NO: 1838663 - RNA, 23 nt, Human
gaggaguuugggguaugggagag

SEQ ID NO: 1838664 - RNA, 13 nt, Human
gaggcagccccau

SEQ ID NO: 1838665 - RNA, 23 nt, Human
gaggcagccccauucugccugcc

SEQ ID NO: 1838666 - RNA, 22 nt, Human
gaggcagccccauucugccugc

SEQ ID NO: 1838667 - RNA, 12 nt, Human
gaggccagccuu

SEQ ID NO: 1838668 - RNA, 13 nt, Human
gaggccagccuug

SEQ ID NO: 1838669 - RNA, 13 nt, Human
gaggacagggagg

SEQ ID NO: 1838670 - RNA, 22 nt, Human
gaggacagggaggugaccccag

SEQ ID NO: 1838671 - RNA, 23 nt, Human
gaggacagggaggugaccccagg

SEQ ID NO: 1838672 - RNA, 22 nt, Human
gaggaaggaaacccagcucugg

SEQ ID NO: 1838673 - RNA, 21 nt, Human
gagcuucuguugcugccucau

SEQ ID NO: 1838674 - RNA, 14 nt, Human
gaggaauccagacc

SEQ ID NO: 1838675 - RNA, 15 nt, Human
gaggaauccagaccc

SEQ ID NO: 1838676 - RNA, 14 nt, Human
gagccuccugcccu

SEQ ID NO: 1838677 - RNA, 18 nt, Human
gagccucagucucccucc

SEQ ID NO: 1838678 - RNA, 20 nt, Human
gagccucagcauccuggcac

SEQ ID NO: 1838679 - RNA, 21 nt, Human
gagccucagcauccuggcacc

SEQ ID NO: 1838680 - RNA, 15 nt, Human
gagcccugguggcag

SEQ ID NO: 1838681 - RNA, 16 nt, Human
gagcccugguggcagu

SEQ ID NO: 1838682 - RNA, 19 nt, Human
gagccucagcauccuggca

SEQ ID NO: 1838683 - RNA, 17 nt, Human
gagcccugguggcagug

SEQ ID NO: 1838684 - RNA, 22 nt, Human
gagccuccugcccuuaccugcc

SEQ ID NO: 1838685 - RNA, 20 nt, Human
gagccuccugcccuuaccug

SEQ ID NO: 1838686 - RNA, 21 nt, Human
gagccugggaggucaaggcug

SEQ ID NO: 1838687 - RNA, 13 nt, Human
gagccugggaggu

SEQ ID NO: 1838688 - RNA, 10 nt, Human
gagccuggca

SEQ ID NO: 1838689 - RNA, 15 nt, Human
gagccuggcaagaau

SEQ ID NO: 1838690 - RNA, 13 nt, Human
gagcuacaaaugc

SEQ ID NO: 1838691 - RNA, 12 nt, Human
gagcuacaaaug

SEQ ID NO: 1838692 - RNA, 16 nt, Human
gagcugccaccugccu

SEQ ID NO: 1838693 - RNA, 15 nt, Human
gagcugccaccugcc

SEQ ID NO: 1838694 - RNA, 13 nt, Human
gagcugccaccug

SEQ ID NO: 1838695 - RNA, 16 nt, Human
gagcucugcagagcag

SEQ ID NO: 1838696 - RNA, 15 nt, Human
gagcuuaacagugug

SEQ ID NO: 1838697 - RNA, 18 nt, Human
gagcuucuguugcugccu

SEQ ID NO: 1838698 - RNA, 14 nt, Human
gagcuucuggcacu

SEQ ID NO: 1838699 - RNA, 23 nt, Human
gagcuacacaggggaaaagagga

SEQ ID NO: 1838700 - RNA, 14 nt, Human
gagcuacaaaugca

SEQ ID NO: 1838701 - RNA, 16 nt, Human
gagaucagccugggca

SEQ ID NO: 1838702 - RNA, 14 nt, Human
gagaucagccuggg

SEQ ID NO: 1838703 - RNA, 13 nt, Human
gagaucagccugg

SEQ ID NO: 1838704 - RNA, 20 nt, Human
gagaucaaccccuucgcucc

SEQ ID NO: 1838705 - RNA, 19 nt, Human
gagcaaaaucgaugcagug

SEQ ID NO: 1838706 - RNA, 23 nt, Human
gagcaagacgcugugcugcccug

SEQ ID NO: 1838707 - RNA, 22 nt, Human
gagcaagacgcugugcugcccu

SEQ ID NO: 1838708 - RNA, 18 nt, Human
gagcaagacgcugugcug

SEQ ID NO: 1838709 - RNA, 21 nt, Human
gagcaagacgcugugcugccc

SEQ ID NO: 1838710 - RNA, 17 nt, Human
gagcaccuuagacaguc

SEQ ID NO: 1838711 - RNA, 19 nt, Human
gagcaccuuagacaguccc

SEQ ID NO: 1838712 - RNA, 11 nt, Human
gagcccacgcc

SEQ ID NO: 1838713 - RNA, 13 nt, Human
gagccagauuuca

SEQ ID NO: 1838714 - RNA, 22 nt, Human
gagccacugcaccgggccacag

SEQ ID NO: 1838715 - RNA, 12 nt, Human
gagcccaggccu

SEQ ID NO: 1838716 - RNA, 16 nt, Human
gagcccacgcccccac

SEQ ID NO: 1838717 - RNA, 15 nt, Human
gagcccacgccccca

SEQ ID NO: 1838718 - RNA, 12 nt, Human
gagcccacgccc

SEQ ID NO: 1838719 - RNA, 14 nt, Human
gagcccaggccucc

SEQ ID NO: 1838720 - RNA, 13 nt, Human
gagcccaggccuc

SEQ ID NO: 1838721 - RNA, 14 nt, Human
gagccaccgugccu

SEQ ID NO: 1838722 - RNA, 18 nt, Human
gagccaccgcgcccagcc

SEQ ID NO: 1838723 - RNA, 20 nt, Human
gagccaccgugccuggccac

SEQ ID NO: 1838724 - RNA, 13 nt, Human
gagccacugcacc

SEQ ID NO: 1838725 - RNA, 18 nt, Human
gagcagccacauuccuga

SEQ ID NO: 1838726 - RNA, 18 nt, Human
gaggugggauccuccagg

SEQ ID NO: 1838727 - RNA, 22 nt, Human
gaggugggauccuccaggugca

SEQ ID NO: 1838728 - RNA, 21 nt, Human
gaggugggauccuccaggugc

SEQ ID NO: 1838729 - RNA, 15 nt, Human
gaggggggagguggg

SEQ ID NO: 1838730 - RNA, 15 nt, Human
gaggggguggccucc

SEQ ID NO: 1838731 - RNA, 18 nt, Human
gagguccacaacacacag

SEQ ID NO: 1838732 - RNA, 22 nt, Human
gaggggggaggugggauccucc

SEQ ID NO: 1838733 - RNA, 19 nt, Human
gaguacuacaguccuccca

SEQ ID NO: 1838734 - RNA, 18 nt, Human
gaguacuacaguccuccc

SEQ ID NO: 1838735 - RNA, 12 nt, Human
gaguagcuggau

SEQ ID NO: 1838736 - RNA, 17 nt, Human
gaguacguugugcauuu

SEQ ID NO: 1838737 - RNA, 18 nt, Human
gaguacguugugcauuug

SEQ ID NO: 1838738 - RNA, 15 nt, Human
gaguacuacaguccu

SEQ ID NO: 1838739 - RNA, 20 nt, Human
gaguacguugugcauuuggu

SEQ ID NO: 1838740 - RNA, 14 nt, Human
gagguucccuuuga

SEQ ID NO: 1838741 - RNA, 19 nt, Human
gagguucaaagauauuuug

SEQ ID NO: 1838742 - RNA, 19 nt, Human
gagguuuuaaaaaaauccc

SEQ ID NO: 1838743 - RNA, 16 nt, Human
gaguacguugugcauu

SEQ ID NO: 1838744 - RNA, 21 nt, Human
gagucugaaggcuggguucug

SEQ ID NO: 1838745 - RNA, 18 nt, Human
gagucucuucuccacugg

SEQ ID NO: 1838746 - RNA, 17 nt, Human
gagucucuucuccacug

SEQ ID NO: 1838747 - RNA, 16 nt, Human
gagucucuucuccacu

SEQ ID NO: 1838748 - RNA, 15 nt, Human
gagucucuucuccac

SEQ ID NO: 1838749 - RNA, 14 nt, Human
gagucucuucucca

SEQ ID NO: 1838750 - RNA, 12 nt, Human
gagucucuucuc

SEQ ID NO: 1838751 - RNA, 23 nt, Human
gagucucgcuauugucaccaggg

SEQ ID NO: 1838752 - RNA, 22 nt, Human
gagucucacuguugcccaggcu

SEQ ID NO: 1838753 - RNA, 23 nt, Human
gagucucacuguugcccaggcug

SEQ ID NO: 1838754 - RNA, 19 nt, Human
gagucucacuguugcccag

SEQ ID NO: 1838755 - RNA, 20 nt, Human
gagucucacuguugcccagg

SEQ ID NO: 1838756 - RNA, 21 nt, Human
gagucucacuguugcccaggc

SEQ ID NO: 1838757 - RNA, 17 nt, Human
gagucgaggacagggag

SEQ ID NO: 1838758 - RNA, 12 nt, Human
gaguccccuguu

SEQ ID NO: 1838759 - RNA, 19 nt, Human
gagucccaggcugagccuc

SEQ ID NO: 1838760 - RNA, 18 nt, Human
gagucccaggcugagccu

SEQ ID NO: 1838761 - RNA, 23 nt, Human
gaguccccuguuuguuucugaaa

SEQ ID NO: 1838762 - RNA, 14 nt, Human
gaguccccuguuug

SEQ ID NO: 1838763 - RNA, 12 nt, Human
gaguagcuggga

SEQ ID NO: 1838764 - RNA, 14 nt, Human
gaguagcugggacu

SEQ ID NO: 1838765 - RNA, 20 nt, Human
gauagcacagacccugcccu

SEQ ID NO: 1838766 - RNA, 19 nt, Human
gauagcacagacccugccc

SEQ ID NO: 1838767 - RNA, 12 nt, Human
gauagccaaggc

SEQ ID NO: 1838768 - RNA, 14 nt, Human
gauagccaaggcca

SEQ ID NO: 1838769 - RNA, 13 nt, Human
gauagccaaggcc

SEQ ID NO: 1838770 - RNA, 21 nt, Human
gauauaaguguguguuuuuca

SEQ ID NO: 1838771 - RNA, 17 nt, Human
gauauaaguguguguuu

SEQ ID NO: 1838772 - RNA, 23 nt, Human
gauauaugcucugcauguuacau

SEQ ID NO: 1838773 - RNA, 21 nt, Human
gaucaaccccuucgcuccugu

SEQ ID NO: 1838774 - RNA, 22 nt, Human
gaucaaccccuucgcuccugug

SEQ ID NO: 1838775 - RNA, 13 nt, Human
gauacaaugcugu

SEQ ID NO: 1838776 - RNA, 18 nt, Human
gauacaaugcugugcccu

SEQ ID NO: 1838777 - RNA, 18 nt, Human
gauagcacagacccugcc

SEQ ID NO: 1838778 - RNA, 17 nt, Human
gauagcacagacccugc

SEQ ID NO: 1838779 - RNA, 15 nt, Human
gaguggcuccucccg

SEQ ID NO: 1838780 - RNA, 13 nt, Human
gaguggcuccucc

SEQ ID NO: 1838781 - RNA, 23 nt, Human
gagugggggaucacagccucuga

SEQ ID NO: 1838782 - RNA, 12 nt, Human
gagugggcccaa

SEQ ID NO: 1838783 - RNA, 19 nt, Human
gagugaacaaauuuacaga

SEQ ID NO: 1838784 - RNA, 22 nt, Human
gagugaacaaauuuacagagac

SEQ ID NO: 1838785 - RNA, 23 nt, Human
gagugaacaaauuuacagagaca

SEQ ID NO: 1838786 - RNA, 23 nt, Human
gaguucaucuugaauuguaagga

SEQ ID NO: 1838787 - RNA, 17 nt, Human
gagugugccugaagucc

SEQ ID NO: 1838788 - RNA, 14 nt, Human
gaguugaagacaga

SEQ ID NO: 1838789 - RNA, 21 nt, Human
gaguugaaaaucuuauaauuu

SEQ ID NO: 1838790 - RNA, 19 nt, Human
gauguugaaaaaguucugc

SEQ ID NO: 1838791 - RNA, 21 nt, Human
gauguucuuucacccuuuucu

SEQ ID NO: 1838792 - RNA, 14 nt, Human
gauguuuuccauga

SEQ ID NO: 1838793 - RNA, 23 nt, Human
gauguuuuccaugaguccccugu

SEQ ID NO: 1838794 - RNA, 15 nt, Human
gauguuuuccaugag

SEQ ID NO: 1838795 - RNA, 12 nt, Human
gauuaaauucuu

SEQ ID NO: 1838796 - RNA, 19 nt, Human
gauuaaauucuugcaaagu

SEQ ID NO: 1838797 - RNA, 21 nt, Human
gauuaaccacuucagcugacu

SEQ ID NO: 1838798 - RNA, 19 nt, Human
gauuaaccacuucagcuga

SEQ ID NO: 1838799 - RNA, 18 nt, Human
gauuaaccacuucagcug

SEQ ID NO: 1838800 - RNA, 19 nt, Human
gauucaacagguuuuccug

SEQ ID NO: 1838801 - RNA, 20 nt, Human
gauggugcaaugaccuuuca

SEQ ID NO: 1838802 - RNA, 19 nt, Human
gaugugcuuguuaacugag

SEQ ID NO: 1838803 - RNA, 23 nt, Human
gauggugcaaugaccuuucaaua

SEQ ID NO: 1838804 - RNA, 20 nt, Human
gaugugcuuguuaacugagu

SEQ ID NO: 1838805 - RNA, 16 nt, Human
gauguucugggacaca

SEQ ID NO: 1838806 - RNA, 12 nt, Human
gauucagacagc

SEQ ID NO: 1838807 - RNA, 22 nt, Human
gauucccaagcucugcuccucu

SEQ ID NO: 1838808 - RNA, 23 nt, Human
gauugacgggacuguugguauug

SEQ ID NO: 1838809 - RNA, 15 nt, Human
gauuguccccgaccc

SEQ ID NO: 1838810 - RNA, 20 nt, Human
gauuguccccgacccuugcc

SEQ ID NO: 1838811 - RNA, 13 nt, Human
gauugugccccug

SEQ ID NO: 1838812 - RNA, 11 nt, Human
gauccuccagg

SEQ ID NO: 1838813 - RNA, 18 nt, Human
gauccuaguuccaccauc

SEQ ID NO: 1838814 - RNA, 15 nt, Human
gaucacgccacugca

SEQ ID NO: 1838815 - RNA, 23 nt, Human
gaucaaccccuucgcuccugugu

SEQ ID NO: 1838816 - RNA, 13 nt, Human
gaucacgccacug

SEQ ID NO: 1838817 - RNA, 14 nt, Human
gaucacgccacugc

SEQ ID NO: 1838818 - RNA, 19 nt, Human
gauccugagccagauuuca

SEQ ID NO: 1838819 - RNA, 15 nt, Human
gauccugagccagau

SEQ ID NO: 1838820 - RNA, 14 nt, Human
gauccugagccaga

SEQ ID NO: 1838821 - RNA, 13 nt, Human
gauccugagccag

SEQ ID NO: 1838822 - RNA, 12 nt, Human
gauccuccaggu

SEQ ID NO: 1838823 - RNA, 19 nt, Human
gauccucccaccucagccu

SEQ ID NO: 1838824 - RNA, 20 nt, Human
gauccucccaccucagccuc

SEQ ID NO: 1838825 - RNA, 21 nt, Human
gauccucccaccucagccucc

SEQ ID NO: 1838826 - RNA, 17 nt, Human
gauccuuuuggagucag

SEQ ID NO: 1838827 - RNA, 15 nt, Human
gauccuuuuggaguc

SEQ ID NO: 1838828 - RNA, 15 nt, Human
gaugaaaaaauaaca

SEQ ID NO: 1838829 - RNA, 16 nt, Human
gaucuuugcagacagg

SEQ ID NO: 1838830 - RNA, 14 nt, Human
gaugacuauggaaa

SEQ ID NO: 1838831 - RNA, 11 nt, Human
gaugagaaagg

SEQ ID NO: 1838832 - RNA, 22 nt, Human
gaugagaaagguugaagcacca

SEQ ID NO: 1838833 - RNA, 21 nt, Human
gaugccuggcgggguggggug

SEQ ID NO: 1838834 - RNA, 21 nt, Human
gauggcacuuauaaccaaagc

SEQ ID NO: 1838835 - RNA, 22 nt, Human
gaugggcaacccccagccugcu

SEQ ID NO: 1838836 - RNA, 14 nt, Human
gcagcucagagagg

SEQ ID NO: 1838837 - RNA, 21 nt, Human
gcagcucaccucucccuugga

SEQ ID NO: 1838838 - RNA, 20 nt, Human
gcagcucaccucucccuugg

SEQ ID NO: 1838839 - RNA, 17 nt, Human
gcagcucaccucucccu

SEQ ID NO: 1838840 - RNA, 16 nt, Human
gcagcucaccucuccc

SEQ ID NO: 1838841 - RNA, 19 nt, Human
gcagcucagagaggguggg

SEQ ID NO: 1838842 - RNA, 18 nt, Human
gcagcucagagagggugg

SEQ ID NO: 1838843 - RNA, 19 nt, Human
gcagcagggagggcuucug

SEQ ID NO: 1838844 - RNA, 18 nt, Human
gcagcagggagggcuucu

SEQ ID NO: 1838845 - RNA, 20 nt, Human
gcagcagggagggcuucugc

SEQ ID NO: 1838846 - RNA, 14 nt, Human
gcagcccugcuuug

SEQ ID NO: 1838847 - RNA, 24 nt, Human
gcagcccugcuuugggcugcccug

SEQ ID NO: 1838848 - RNA, 19 nt, Human
gcagccucacaguccuuac

SEQ ID NO: 1838849 - RNA, 17 nt, Human
gcagccucacaguccuu

SEQ ID NO: 1838850 - RNA, 15 nt, Human
gcagccucacagucc

SEQ ID NO: 1838851 - RNA, 23 nt, Human
gcagagguugcagugagccgaga

SEQ ID NO: 1838852 - RNA, 18 nt, Human
gcagagguugcagugagc

SEQ ID NO: 1838853 - RNA, 21 nt, Human
gcagagguccacaacacacag

SEQ ID NO: 1838854 - RNA, 18 nt, Human
gcagauguccuugaugcu

SEQ ID NO: 1838855 - RNA, 18 nt, Human
gcagauggagaccccuug

SEQ ID NO: 1838856 - RNA, 21 nt, Human
gcagagaccaucccugaaggc

SEQ ID NO: 1838857 - RNA, 20 nt, Human
gcagagaccaucccugaagg

SEQ ID NO: 1838858 - RNA, 22 nt, Human
gcagagaccaucccugaaggcc

SEQ ID NO: 1838859 - RNA, 17 nt, Human
gcagacucuacagaggc

SEQ ID NO: 1838860 - RNA, 18 nt, Human
gcagacucuacagaggcc

SEQ ID NO: 1838861 - RNA, 19 nt, Human
gcagacucuacagaggcca

SEQ ID NO: 1838862 - RNA, 22 nt, Human
gcagacucuacagaggccaugg

SEQ ID NO: 1838863 - RNA, 22 nt, Human
gcacuucgggaggucgaggcag

SEQ ID NO: 1838864 - RNA, 14 nt, Human
gcacuugcagacuc

SEQ ID NO: 1838865 - RNA, 16 nt, Human
gcacuugcagacucua

SEQ ID NO: 1838866 - RNA, 15 nt, Human
gcaccaucucuccuc

SEQ ID NO: 1838867 - RNA, 14 nt, Human
gcaccaucucuccu

SEQ ID NO: 1838868 - RNA, 13 nt, Human
gcaccagcagccu

SEQ ID NO: 1838869 - RNA, 14 nt, Human
gcaccagcagccug

SEQ ID NO: 1838870 - RNA, 17 nt, Human
gcaccaucucuccuccu

SEQ ID NO: 1838871 - RNA, 20 nt, Human
gauugugucucuugguccug

SEQ ID NO: 1838872 - RNA, 16 nt, Human
gcacagggcaguggga

SEQ ID NO: 1838873 - RNA, 23 nt, Human
gcacagcuucauuuccugugucu

SEQ ID NO: 1838874 - RNA, 21 nt, Human
gcacagcuucauuuccugugu

SEQ ID NO: 1838875 - RNA, 19 nt, Human
gcacccucaggcagguggg

SEQ ID NO: 1838876 - RNA, 16 nt, Human
gcacccucaggcaggu

SEQ ID NO: 1838877 - RNA, 14 nt, Human
gcacgugugugcac

SEQ ID NO: 1838878 - RNA, 20 nt, Human
gcacuaaggugugcucugau

SEQ ID NO: 1838879 - RNA, 15 nt, Human
gcacugcuuccagug

SEQ ID NO: 1838880 - RNA, 14 nt, Human
gcacugcuuccagu

SEQ ID NO: 1838881 - RNA, 13 nt, Human
gcacugcuuccag

SEQ ID NO: 1838882 - RNA, 12 nt, Human
gcacugcuucca

SEQ ID NO: 1838883 - RNA, 15 nt, Human
gcacuauaauguaag

SEQ ID NO: 1838884 - RNA, 14 nt, Human
gcacuauaauguaa

SEQ ID NO: 1838885 - RNA, 20 nt, Human
gcacuauaauguaagcucua

SEQ ID NO: 1838886 - RNA, 22 nt, Human
gcacuauaauguaagcucuacu

SEQ ID NO: 1838887 - RNA, 12 nt, Human
gcacugggcuug

SEQ ID NO: 1838888 - RNA, 14 nt, Human
gcacugggcuuggg

SEQ ID NO: 1838889 - RNA, 19 nt, Human
gcacuguuuuauuuuaauu

SEQ ID NO: 1838890 - RNA, 17 nt, Human
gcaggcagccaggccac

SEQ ID NO: 1838891 - RNA, 18 nt, Human
gcaggcagccaggccaca

SEQ ID NO: 1838892 - RNA, 15 nt, Human
gcaggucccuaauaa

SEQ ID NO: 1838893 - RNA, 14 nt, Human
gcaggucccuaaua

SEQ ID NO: 1838894 - RNA, 19 nt, Human
gcaggguccuagaaauucc

SEQ ID NO: 1838895 - RNA, 16 nt, Human
gcagggucucacucug

SEQ ID NO: 1838896 - RNA, 22 nt, Human
gcaggggaggguagagcggaga

SEQ ID NO: 1838897 - RNA, 23 nt, Human
gcaggucccuaauaaagcugugu

SEQ ID NO: 1838898 - RNA, 21 nt, Human
gcaggucccuaauaaagcugu

SEQ ID NO: 1838899 - RNA, 20 nt, Human
gcaggucccuaauaaagcug

SEQ ID NO: 1838900 - RNA, 19 nt, Human
gcaggucccuaauaaagcu

SEQ ID NO: 1838901 - RNA, 18 nt, Human
gcaggucccuaauaaagc

SEQ ID NO: 1838902 - RNA, 17 nt, Human
gcaggucccuaauaaag

SEQ ID NO: 1838903 - RNA, 16 nt, Human
gcaggucccuaauaaa

SEQ ID NO: 1838904 - RNA, 21 nt, Human
gcagugggacagggcauggcc

SEQ ID NO: 1838905 - RNA, 11 nt, Human
gcagugggagc

SEQ ID NO: 1838906 - RNA, 12 nt, Human
gcagugggagcu

SEQ ID NO: 1838907 - RNA, 18 nt, Human
gcaguggugcgaucuggg

SEQ ID NO: 1838908 - RNA, 19 nt, Human
gcaguggugcgaucugggu

SEQ ID NO: 1838909 - RNA, 19 nt, Human
gcauacguacacauuuuau

SEQ ID NO: 1838910 - RNA, 20 nt, Human
gcaguggugguuuucuguuc

SEQ ID NO: 1838911 - RNA, 21 nt, Human
gcaguggugguuuucuguucu

SEQ ID NO: 1838912 - RNA, 19 nt, Human
gcaguggugguuuucuguu

SEQ ID NO: 1838913 - RNA, 22 nt, Human
gcaguggugcgaucuggguuca

SEQ ID NO: 1838914 - RNA, 20 nt, Human
gcaguggugcgaucuggguu

SEQ ID NO: 1838915 - RNA, 21 nt, Human
gcaguggugcgaucuggguuc

SEQ ID NO: 1838916 - RNA, 21 nt, Human
gcauuccccaggaggccagcc

SEQ ID NO: 1838917 - RNA, 20 nt, Human
gcauuccccaggaggccagc

SEQ ID NO: 1838918 - RNA, 19 nt, Human
gcauuccccaggaggccag

SEQ ID NO: 1838919 - RNA, 18 nt, Human
gcauuccccaggaggcca

SEQ ID NO: 1838920 - RNA, 17 nt, Human
gcauuccccaggaggcc

SEQ ID NO: 1838921 - RNA, 16 nt, Human
gcauuccccaggaggc

SEQ ID NO: 1838922 - RNA, 15 nt, Human
gcauuccccaggagg

SEQ ID NO: 1838923 - RNA, 14 nt, Human
gcauuccccaggag

SEQ ID NO: 1838924 - RNA, 22 nt, Human
gcauuccccaggaggccagccu

SEQ ID NO: 1838925 - RNA, 18 nt, Human
gcauuugaggucuguucu

SEQ ID NO: 1838926 - RNA, 19 nt, Human
gcauuaucuagauacugua

SEQ ID NO: 1838927 - RNA, 22 nt, Human
gcauuaucuagauacuguauca

SEQ ID NO: 1838928 - RNA, 24 nt, Human
gcauuaucuagauacuguaucaug

SEQ ID NO: 1838929 - RNA, 15 nt, Human
gcaugccuggauggg

SEQ ID NO: 1838930 - RNA, 13 nt, Human
gcauguuacauaa

SEQ ID NO: 1838931 - RNA, 14 nt, Human
gcauguucucugag

SEQ ID NO: 1838932 - RNA, 14 nt, Human
gcaugccuggaugg

SEQ ID NO: 1838933 - RNA, 12 nt, Human
gcaucaggccag

SEQ ID NO: 1838934 - RNA, 18 nt, Human
gcaucaggccaggcccuc

SEQ ID NO: 1838935 - RNA, 23 nt, Human
gcaucaggccaggcccucugccc

SEQ ID NO: 1838936 - RNA, 15 nt, Human
gcaucagugcccucc

SEQ ID NO: 1838937 - RNA, 23 nt, Human
gcaucagugcccuccaggauaga

SEQ ID NO: 1838938 - RNA, 12 nt, Human
gcaucucagccc

SEQ ID NO: 1838939 - RNA, 14 nt, Human
gcaucucagcccac

SEQ ID NO: 1838940 - RNA, 13 nt, Human
gcaucucagccca

SEQ ID NO: 1838941 - RNA, 22 nt, Human
gcaugacacgaauauugcugau

SEQ ID NO: 1838942 - RNA, 21 nt, Human
gcaugacacgaauauugcuga

SEQ ID NO: 1838943 - RNA, 23 nt, Human
gcaugaaguaauaugcacacauu

SEQ ID NO: 1838944 - RNA, 21 nt, Human
gcaugaaguaauaugcacaca

SEQ ID NO: 1838945 - RNA, 22 nt, Human
gcaugaaguaauaugcacacau

SEQ ID NO: 1838946 - RNA, 20 nt, Human
gcaugaaguaauaugcacac

SEQ ID NO: 1838947 - RNA, 15 nt, Human
gcaucucagcccaca

SEQ ID NO: 1838948 - RNA, 19 nt, Human
gcccagagggccugcaagg

SEQ ID NO: 1838949 - RNA, 18 nt, Human
gcccagagggccugcaag

SEQ ID NO: 1838950 - RNA, 15 nt, Human
gcccagagggccugc

SEQ ID NO: 1838951 - RNA, 14 nt, Human
gcccagagggccug

SEQ ID NO: 1838952 - RNA, 12 nt, Human
gcccagagggcc

SEQ ID NO: 1838953 - RNA, 21 nt, Human
gcccaaugcacuuuguucugg

SEQ ID NO: 1838954 - RNA, 15 nt, Human
gcccagagagggugg

SEQ ID NO: 1838955 - RNA, 21 nt, Human
gcccagagggccugcaaggga

SEQ ID NO: 1838956 - RNA, 20 nt, Human
gcccagagggccugcaaggg

SEQ ID NO: 1838957 - RNA, 22 nt, Human
gcccagagggccugcaagggag

SEQ ID NO: 1838958 - RNA, 9 nt, Human
gcccagccc

SEQ ID NO: 1838959 - RNA, 11 nt, Human
gcccagccccu

SEQ ID NO: 1838960 - RNA, 12 nt, Human
gcccagccccuu

SEQ ID NO: 1838961 - RNA, 17 nt, Human
gcccagccccuucugac

SEQ ID NO: 1838962 - RNA, 16 nt, Human
gcccagccccuucuga

SEQ ID NO: 1838963 - RNA, 14 nt, Human
gcccagccccuucu

SEQ ID NO: 1838964 - RNA, 13 nt, Human
gcccagccccuuc

SEQ ID NO: 1838965 - RNA, 24 nt, Human
gcccagccccuucugacccaugcu

SEQ ID NO: 1838966 - RNA, 20 nt, Human
gcccagccccuucugaccca

SEQ ID NO: 1838967 - RNA, 21 nt, Human
gcccagcuugaaaccuucacu

SEQ ID NO: 1838968 - RNA, 21 nt, Human
gcccaggaaaggcuccaggag

SEQ ID NO: 1838969 - RNA, 20 nt, Human
gcccaggaaaggcuccagga

SEQ ID NO: 1838970 - RNA, 19 nt, Human
gcccaggaaaggcuccagg

SEQ ID NO: 1838971 - RNA, 18 nt, Human
gcccaggaaaggcuccag

SEQ ID NO: 1838972 - RNA, 22 nt, Human
gcccaggcuggcgugcaguggu

SEQ ID NO: 1838973 - RNA, 19 nt, Human
gcccaggcuggcgugcagu

SEQ ID NO: 1838974 - RNA, 20 nt, Human
gcccaggcuggcgugcagug

SEQ ID NO: 1838975 - RNA, 21 nt, Human
gcccaggcuuagucacugaga

SEQ ID NO: 1838976 - RNA, 19 nt, Human
gcccaggcuuagucacuga

SEQ ID NO: 1838977 - RNA, 23 nt, Human
gcccaggcuuagucacugagaca

SEQ ID NO: 1838978 - RNA, 19 nt, Human
gcccagucuggaaugcagu

SEQ ID NO: 1838979 - RNA, 20 nt, Human
gcccagucuggaaugcagug

SEQ ID NO: 1838980 - RNA, 15 nt, Human
gcccaguugggugga

SEQ ID NO: 1838981 - RNA, 18 nt, Human
gccagucaccccggccac

SEQ ID NO: 1838982 - RNA, 17 nt, Human
gccagucaccccggcca

SEQ ID NO: 1838983 - RNA, 20 nt, Human
gccagucaccccggccaccu

SEQ ID NO: 1838984 - RNA, 12 nt, Human
gccaguaaaugg

SEQ ID NO: 1838985 - RNA, 17 nt, Human
gccagguuuuuggucug

SEQ ID NO: 1838986 - RNA, 18 nt, Human
gccagguggccacuccag

SEQ ID NO: 1838987 - RNA, 14 nt, Human
gccaggcugcucuu

SEQ ID NO: 1838988 - RNA, 13 nt, Human
gccaggcugcucu

SEQ ID NO: 1838989 - RNA, 13 nt, Human
gccaggcuggguc

SEQ ID NO: 1838990 - RNA, 22 nt, Human
gccaggcugcucuugaacuccu

SEQ ID NO: 1838991 - RNA, 21 nt, Human
gccagauuucacucuccuugg

SEQ ID NO: 1838992 - RNA, 18 nt, Human
gccagauuucacucuccu

SEQ ID NO: 1838993 - RNA, 16 nt, Human
gccagauuucacucuc

SEQ ID NO: 1838994 - RNA, 18 nt, Human
gccagggacagagggggu

SEQ ID NO: 1838995 - RNA, 16 nt, Human
gccagggacagagggg

SEQ ID NO: 1838996 - RNA, 13 nt, Human
gccagggacagag

SEQ ID NO: 1838997 - RNA, 22 nt, Human
gccaggcuggucucgaacuccu

SEQ ID NO: 1838998 - RNA, 23 nt, Human
gccagggacagaggggguggccu

SEQ ID NO: 1838999 - RNA, 20 nt, Human
gccaugaggaacaaggcaag

SEQ ID NO: 1839000 - RNA, 18 nt, Human
gccaugaggaacaaggca

SEQ ID NO: 1839001 - RNA, 18 nt, Human
gccaugccagcuuaucuc

SEQ ID NO: 1839002 - RNA, 13 nt, Human
gccaugccagcuu

SEQ ID NO: 1839003 - RNA, 19 nt, Human
gccaugccagcuuaucuca

SEQ ID NO: 1839004 - RNA, 21 nt, Human
gccaucucaccuccugcuggg

SEQ ID NO: 1839005 - RNA, 20 nt, Human
gccaucucaccuccugcugg

SEQ ID NO: 1839006 - RNA, 19 nt, Human
gccaucucaccuccugcug

SEQ ID NO: 1839007 - RNA, 14 nt, Human
gcccaaccugcucu

SEQ ID NO: 1839008 - RNA, 23 nt, Human
gccaugggacagggaggacgcuc

SEQ ID NO: 1839009 - RNA, 22 nt, Human
gccaugggacagggaggacgcu

SEQ ID NO: 1839010 - RNA, 20 nt, Human
gccaccugcggugcuaucuc

SEQ ID NO: 1839011 - RNA, 14 nt, Human
gccaccugcggugc

SEQ ID NO: 1839012 - RNA, 22 nt, Human
gccaccugcggugcuaucuccc

SEQ ID NO: 1839013 - RNA, 11 nt, Human
gccaccugggu

SEQ ID NO: 1839014 - RNA, 19 nt, Human
gccacggccaggccagagg

SEQ ID NO: 1839015 - RNA, 20 nt, Human
gccacgcccaacuaauuuuu

SEQ ID NO: 1839016 - RNA, 18 nt, Human
gccacggccaggccagag

SEQ ID NO: 1839017 - RNA, 17 nt, Human
gccacggccaggccaga

SEQ ID NO: 1839018 - RNA, 22 nt, Human
gccaccgugccuggccacgccc

SEQ ID NO: 1839019 - RNA, 17 nt, Human
gccaccgugccuggcca

SEQ ID NO: 1839020 - RNA, 17 nt, Human
gccaccgcgcccagccu

SEQ ID NO: 1839021 - RNA, 17 nt, Human
gccaccugccuguuggg

SEQ ID NO: 1839022 - RNA, 17 nt, Human
gccagaggagagaggac

SEQ ID NO: 1839023 - RNA, 15 nt, Human
gccagaggagagagg

SEQ ID NO: 1839024 - RNA, 13 nt, Human
gccagaggagaga

SEQ ID NO: 1839025 - RNA, 12 nt, Human
gccagaggagag

SEQ ID NO: 1839026 - RNA, 22 nt, Human
gccagaggagagaggacccccu

SEQ ID NO: 1839027 - RNA, 19 nt, Human
gccagaggagagaggaccc

SEQ ID NO: 1839028 - RNA, 21 nt, Human
gccagagggagugacagaggc

SEQ ID NO: 1839029 - RNA, 22 nt, Human
gccagagggagugacagaggca

SEQ ID NO: 1839030 - RNA, 23 nt, Human
gccagagggagugacagaggcag

SEQ ID NO: 1839031 - RNA, 16 nt, Human
gccagaugcaccagcc

SEQ ID NO: 1839032 - RNA, 17 nt, Human
gccagaugcaccagccc

SEQ ID NO: 1839033 - RNA, 18 nt, Human
gccagaugcaccagcccu

SEQ ID NO: 1839034 - RNA, 16 nt, Human
gccagagacacaagcc

SEQ ID NO: 1839035 - RNA, 19 nt, Human
gccagagacacaagccuuc

SEQ ID NO: 1839036 - RNA, 17 nt, Human
gccagagacacaagccu

SEQ ID NO: 1839037 - RNA, 10 nt, Human
gccagaggag

SEQ ID NO: 1839038 - RNA, 20 nt, Human
gccagagacacaagccuucg

SEQ ID NO: 1839039 - RNA, 20 nt, Human
gccacuauuguuagucucuu

SEQ ID NO: 1839040 - RNA, 20 nt, Human
gccaauaauaauaccucccu

SEQ ID NO: 1839041 - RNA, 12 nt, Human
gccaaguucuua

SEQ ID NO: 1839042 - RNA, 21 nt, Human
gccaauggagacugucucaag

SEQ ID NO: 1839043 - RNA, 19 nt, Human
gccaauggagacugucuca

SEQ ID NO: 1839044 - RNA, 16 nt, Human
gccaauggagacuguc

SEQ ID NO: 1839045 - RNA, 21 nt, Human
gccaaggcugggggaagaagc

SEQ ID NO: 1839046 - RNA, 12 nt, Human
gcauuugugaaa

SEQ ID NO: 1839047 - RNA, 19 nt, Human
gcauuugaggucuguucuu

SEQ ID NO: 1839048 - RNA, 20 nt, Human
gcauuugaggucuguucuuu

SEQ ID NO: 1839049 - RNA, 22 nt, Human
gcauuuggugguuucagaaaug

SEQ ID NO: 1839050 - RNA, 23 nt, Human
gcauuuggugguuucagaaaugu

SEQ ID NO: 1839051 - RNA, 23 nt, Human
gccaaggugggaggauugcuuga

SEQ ID NO: 1839052 - RNA, 15 nt, Human
gccaaggugggagga

SEQ ID NO: 1839053 - RNA, 14 nt, Human
gccaaggugggagg

SEQ ID NO: 1839054 - RNA, 22 nt, Human
gccacaagacccuugugguccc

SEQ ID NO: 1839055 - RNA, 16 nt, Human
gccacaagacccuugu

SEQ ID NO: 1839056 - RNA, 23 nt, Human
gccacagagaaaguacuucucca

SEQ ID NO: 1839057 - RNA, 22 nt, Human
gccacacuucaggcucuucucc

SEQ ID NO: 1839058 - RNA, 20 nt, Human
gccacacuucaggcucuucu

SEQ ID NO: 1839059 - RNA, 23 nt, Human
gccacacuucaggcucuucuccu

SEQ ID NO: 1839060 - RNA, 13 nt, Human
gccacagagaaag

SEQ ID NO: 1839061 - RNA, 14 nt, Human
gccacagagaaagu

SEQ ID NO: 1839062 - RNA, 20 nt, Human
gccacagagaaaguacuucu

SEQ ID NO: 1839063 - RNA, 16 nt, Human
ggacagaggggguggc

SEQ ID NO: 1839064 - RNA, 14 nt, Human
ggacagaagcagcu

SEQ ID NO: 1839065 - RNA, 17 nt, Human
ggacagaagcagcucuu

SEQ ID NO: 1839066 - RNA, 16 nt, Human
ggacagaagcagcucu

SEQ ID NO: 1839067 - RNA, 15 nt, Human
ggacagaagcagcuc

SEQ ID NO: 1839068 - RNA, 21 nt, Human
gcuuuuaugugaaacauguuu

SEQ ID NO: 1839069 - RNA, 20 nt, Human
gcuuuuaugugaaacauguu

SEQ ID NO: 1839070 - RNA, 19 nt, Human
gcuuuuaugugaaacaugu

SEQ ID NO: 1839071 - RNA, 12 nt, Human
gcuuuucacugc

SEQ ID NO: 1839072 - RNA, 20 nt, Human
ggacagaggggguggccucc

SEQ ID NO: 1839073 - RNA, 16 nt, Human
ggacagccccuccucc

SEQ ID NO: 1839074 - RNA, 15 nt, Human
ggacagccccuccuc

SEQ ID NO: 1839075 - RNA, 11 nt, Human
ggacagcuccu

SEQ ID NO: 1839076 - RNA, 15 nt, Human
ggacagcuccuucug

SEQ ID NO: 1839077 - RNA, 16 nt, Human
ggacagcuccuucugu

SEQ ID NO: 1839078 - RNA, 17 nt, Human
ggacagcuccuucuguc

SEQ ID NO: 1839079 - RNA, 14 nt, Human
ggaccagagcugcc

SEQ ID NO: 1839080 - RNA, 19 nt, Human
ggaccagagcugccaccug

SEQ ID NO: 1839081 - RNA, 18 nt, Human
ggaccuugaacuggguac

SEQ ID NO: 1839082 - RNA, 14 nt, Human
ggacugagaaauuu

SEQ ID NO: 1839083 - RNA, 16 nt, Human
ggacgcucucuggccu

SEQ ID NO: 1839084 - RNA, 19 nt, Human
ggacgcucucuggccuucg

SEQ ID NO: 1839085 - RNA, 18 nt, Human
ggacugagaaauuuauaa

SEQ ID NO: 1839086 - RNA, 15 nt, Human
ggagccuccugcccu

SEQ ID NO: 1839087 - RNA, 20 nt, Human
ggagcccugggaggcucugg

SEQ ID NO: 1839088 - RNA, 14 nt, Human
ggagccuccugccc

SEQ ID NO: 1839089 - RNA, 19 nt, Human
ggagcccugggaggcucug

SEQ ID NO: 1839090 - RNA, 16 nt, Human
ggagcccugggaggcu

SEQ ID NO: 1839091 - RNA, 21 nt, Human
ggaggggccuggcagccgugc

SEQ ID NO: 1839092 - RNA, 18 nt, Human
ggaggggccuggcagccg

SEQ ID NO: 1839093 - RNA, 14 nt, Human
ggaggggccuggca

SEQ ID NO: 1839094 - RNA, 22 nt, Human
ggagucccaccuuggcugcagg

SEQ ID NO: 1839095 - RNA, 13 nt, Human
ggaggggccuggc

SEQ ID NO: 1839096 - RNA, 19 nt, Human
ggaggggagcaugggaagu

SEQ ID NO: 1839097 - RNA, 13 nt, Human
ggagggccugggc

SEQ ID NO: 1839098 - RNA, 16 nt, Human
ggagggagggcuccag

SEQ ID NO: 1839099 - RNA, 13 nt, Human
ggagggagggcuc

SEQ ID NO: 1839100 - RNA, 17 nt, Human
ggagggagggcuccaga

SEQ ID NO: 1839101 - RNA, 17 nt, Human
ggaggcaggaguuucgu

SEQ ID NO: 1839102 - RNA, 16 nt, Human
ggaggacgcucucugg

SEQ ID NO: 1839103 - RNA, 18 nt, Human
ggaggauguucugggaca

SEQ ID NO: 1839104 - RNA, 21 nt, Human
ggaggauguucugggacacag

SEQ ID NO: 1839105 - RNA, 16 nt, Human
ggccaggcccucugcc

SEQ ID NO: 1839106 - RNA, 15 nt, Human
ggccaggcccucugc

SEQ ID NO: 1839107 - RNA, 17 nt, Human
ggccaggcccucugccc

SEQ ID NO: 1839108 - RNA, 14 nt, Human
ggccaggcccucug

SEQ ID NO: 1839109 - RNA, 13 nt, Human
ggccaggagccuc

SEQ ID NO: 1839110 - RNA, 11 nt, Human
ggccaggagcc

SEQ ID NO: 1839111 - RNA, 20 nt, Human
ggccacugugaagagaacca

SEQ ID NO: 1839112 - RNA, 22 nt, Human
ggccacagaaaauucuucucca

SEQ ID NO: 1839113 - RNA, 20 nt, Human
ggcauguucucugaggacac

SEQ ID NO: 1839114 - RNA, 22 nt, Human
ggcaugacacgaauauugcuga

SEQ ID NO: 1839115 - RNA, 23 nt, Human
ggcaugugaugagaggaaaucac

SEQ ID NO: 1839116 - RNA, 18 nt, Human
ggcaugugaugagaggaa

SEQ ID NO: 1839117 - RNA, 15 nt, Human
ggcaugaugcgggcc

SEQ ID NO: 1839118 - RNA, 17 nt, Human
ggcagguuggugggggc

SEQ ID NO: 1839119 - RNA, 17 nt, Human
ggcagggucucacucug

SEQ ID NO: 1839120 - RNA, 18 nt, Human
ggcagggucucacucugu

SEQ ID NO: 1839121 - RNA, 12 nt, Human
ggcaggguccua

SEQ ID NO: 1839122 - RNA, 23 nt, Human
ggcagcugcgguccacccaggag

SEQ ID NO: 1839123 - RNA, 24 nt, Human
ggcagcugcgguccacccaggagc

SEQ ID NO: 1839124 - RNA, 21 nt, Human
ggcagaguugaagacagagcu

SEQ ID NO: 1839125 - RNA, 19 nt, Human
ggcagaguugaagacagag

SEQ ID NO: 1839126 - RNA, 17 nt, Human
ggcagaguugaagacag

SEQ ID NO: 1839127 - RNA, 21 nt, Human
ggcagcugcgguccacccagg

SEQ ID NO: 1839128 - RNA, 12 nt, Human
ggauuauauuau

SEQ ID NO: 1839129 - RNA, 18 nt, Human
ggaugccugguggcagcu

SEQ ID NO: 1839130 - RNA, 19 nt, Human
ggaugccugguggcagcug

SEQ ID NO: 1839131 - RNA, 20 nt, Human
ggaugccugguggcagcugc

SEQ ID NO: 1839132 - RNA, 21 nt, Human
ggaugccugguggcagcugcg

SEQ ID NO: 1839133 - RNA, 18 nt, Human
ggaugcccaaagaugcag

SEQ ID NO: 1839134 - RNA, 18 nt, Human
ggaugaugacuauggaaa

SEQ ID NO: 1839135 - RNA, 19 nt, Human
ggaugcccaaagaugcagc

SEQ ID NO: 1839136 - RNA, 17 nt, Human
ggaugccccgucccccu

SEQ ID NO: 1839137 - RNA, 13 nt, Human
ggaugccuggugg

SEQ ID NO: 1839138 - RNA, 17 nt, Human
ggaugccugguggcagc

SEQ ID NO: 1839139 - RNA, 22 nt, Human
ggaugaucuaggaagacuuugg

SEQ ID NO: 1839140 - RNA, 18 nt, Human
ggaugaucuaggaagacu

SEQ ID NO: 1839141 - RNA, 16 nt, Human
ggaugaucuaggaaga

SEQ ID NO: 1839142 - RNA, 23 nt, Human
ggagucccaccuuggcugcaggg

SEQ ID NO: 1839143 - RNA, 20 nt, Human
ggcacccaccaucaugucug

SEQ ID NO: 1839144 - RNA, 18 nt, Human
ggcacccggccccugcug

SEQ ID NO: 1839145 - RNA, 19 nt, Human
ggcacccggccccugcugg

SEQ ID NO: 1839146 - RNA, 20 nt, Human
ggcacccggccccugcuggu

SEQ ID NO: 1839147 - RNA, 18 nt, Human
ggcacucagaagacacug

SEQ ID NO: 1839148 - RNA, 19 nt, Human
ggcacucagaagacacuga

SEQ ID NO: 1839149 - RNA, 20 nt, Human
ggcacucagaagacacugau

SEQ ID NO: 1839150 - RNA, 22 nt, Human
ggcagagcagagaccaucccug

SEQ ID NO: 1839151 - RNA, 21 nt, Human
ggcagagguugcagugagccg

SEQ ID NO: 1839152 - RNA, 17 nt, Human
ggcaccagcagccugga

SEQ ID NO: 1839153 - RNA, 18 nt, Human
ggcaagcaccuccugccu

SEQ ID NO: 1839154 - RNA, 19 nt, Human
ggcaagcaccuccugccuc

SEQ ID NO: 1839155 - RNA, 21 nt, Human
ggauucuuccucccucccucu

SEQ ID NO: 1839156 - RNA, 17 nt, Human
ggcaagcaccuccugcc

SEQ ID NO: 1839157 - RNA, 15 nt, Human
ggccgggagccugau

SEQ ID NO: 1839158 - RNA, 23 nt, Human
ggccgggaccccgagccuggcuc

SEQ ID NO: 1839159 - RNA, 22 nt, Human
ggccgggaccccgagccuggcu

SEQ ID NO: 1839160 - RNA, 14 nt, Human
ggcccagagggccu

SEQ ID NO: 1839161 - RNA, 19 nt, Human
ggcccagagggccugcaag

SEQ ID NO: 1839162 - RNA, 17 nt, Human
ggcccagagggccugca

SEQ ID NO: 1839163 - RNA, 20 nt, Human
ggcccagagggccugcaagg

SEQ ID NO: 1839164 - RNA, 20 nt, Human
ggccuagcauacguacacau

SEQ ID NO: 1839165 - RNA, 22 nt, Human
ggccuagcauacguacacauuu

SEQ ID NO: 1839166 - RNA, 14 nt, Human
ggccucaagugauu

SEQ ID NO: 1839167 - RNA, 22 nt, Human
ggccucaagugauucuccugcc

SEQ ID NO: 1839168 - RNA, 14 nt, Human
ggccuccugugugu

SEQ ID NO: 1839169 - RNA, 14 nt, Human
ggccuggccugagc

SEQ ID NO: 1839170 - RNA, 13 nt, Human
ggccuggccugag

SEQ ID NO: 1839171 - RNA, 10 nt, Human
ggccuggccu

SEQ ID NO: 1839172 - RNA, 23 nt, Human
ggccuggccccucagggucccug

SEQ ID NO: 1839173 - RNA, 18 nt, Human
ggccuggccccucagggu

SEQ ID NO: 1839174 - RNA, 17 nt, Human
ggccuggccccucaggg

SEQ ID NO: 1839175 - RNA, 15 nt, Human
ggccuggccccucag

SEQ ID NO: 1839176 - RNA, 14 nt, Human
ggccuggccccuca

SEQ ID NO: 1839177 - RNA, 19 nt, Human
ggccucugcacuccccugc

SEQ ID NO: 1839178 - RNA, 18 nt, Human
ggccucugcacuccccug

SEQ ID NO: 1839179 - RNA, 22 nt, Human
ggccucugcacuccccugcugg

SEQ ID NO: 1839180 - RNA, 13 nt, Human
ggccuggccccuc

SEQ ID NO: 1839181 - RNA, 24 nt, Human
ggcgcagcauauucaggaagcuca

SEQ ID NO: 1839182 - RNA, 23 nt, Human
ggcgcagcauauucaggaagcuc

SEQ ID NO: 1839183 - RNA, 16 nt, Human
ggccuggccugagcug

SEQ ID NO: 1839184 - RNA, 15 nt, Human
ggccuggccugagcu

SEQ ID NO: 1839185 - RNA, 23 nt, Human
ggccugggggcugggcagaggaa

SEQ ID NO: 1839186 - RNA, 11 nt, Human
ggccugggccc

SEQ ID NO: 1839187 - RNA, 12 nt, Human
ggcucugcccuu

SEQ ID NO: 1839188 - RNA, 15 nt, Human
ggcucugccucccau

SEQ ID NO: 1839189 - RNA, 13 nt, Human
ggcucugccuccc

SEQ ID NO: 1839190 - RNA, 15 nt, Human
ggcucugcccuuggu

SEQ ID NO: 1839191 - RNA, 14 nt, Human
ggcucugcccuugg

SEQ ID NO: 1839192 - RNA, 16 nt, Human
ggcucugccucccauc

SEQ ID NO: 1839193 - RNA, 16 nt, Human
ggcucuggagcccacu

SEQ ID NO: 1839194 - RNA, 19 nt, Human
ggcucuggagcccacugua

SEQ ID NO: 1839195 - RNA, 17 nt, Human
ggcucuggagcccacug

SEQ ID NO: 1839196 - RNA, 20 nt, Human
ggcucucaggccagcugcuu

SEQ ID NO: 1839197 - RNA, 19 nt, Human
ggcucucaggccagcugcu

SEQ ID NO: 1839198 - RNA, 18 nt, Human
ggcucucaggccagcugc

SEQ ID NO: 1839199 - RNA, 17 nt, Human
ggcucucaggccagcug

SEQ ID NO: 1839200 - RNA, 16 nt, Human
ggcucucaggccagcu

SEQ ID NO: 1839201 - RNA, 15 nt, Human
ggcucucaggccagc

SEQ ID NO: 1839202 - RNA, 15 nt, Human
ggcuccaggcuccuu

SEQ ID NO: 1839203 - RNA, 14 nt, Human
ggcuccaggcuccu

SEQ ID NO: 1839204 - RNA, 20 nt, Human
ggcuaguaucaaaagaaaga

SEQ ID NO: 1839205 - RNA, 15 nt, Human
ggcgcgguggcucac

SEQ ID NO: 1839206 - RNA, 11 nt, Human
ggcgcugcccc

SEQ ID NO: 1839207 - RNA, 17 nt, Human
ggcgcugccccuggcag

SEQ ID NO: 1839208 - RNA, 16 nt, Human
ggcuccaggagcagcc

SEQ ID NO: 1839209 - RNA, 14 nt, Human
ggcuccaggagcag

SEQ ID NO: 1839210 - RNA, 10 nt, Human
ggcuccagac

SEQ ID NO: 1839211 - RNA, 17 nt, Human
ggcuccaggagcagcca

SEQ ID NO: 1839212 - RNA, 18 nt, Human
ggcuccaggagcagccac

SEQ ID NO: 1839213 - RNA, 12 nt, Human
ggcuccaggcuc

SEQ ID NO: 1839214 - RNA, 13 nt, Human
ggcuccaggcucc

SEQ ID NO: 1839215 - RNA, 12 nt, Human
ggcuaugcauuu

SEQ ID NO: 1839216 - RNA, 13 nt, Human
ggcuaugcauuug

SEQ ID NO: 1839217 - RNA, 14 nt, Human
ggcuaugcauuuga

SEQ ID NO: 1839218 - RNA, 16 nt, Human
ggcuccacuuggucug

SEQ ID NO: 1839219 - RNA, 9 nt, Human
ggcuccaga

SEQ ID NO: 1839220 - RNA, 15 nt, Human
ggcugggagcucugc

SEQ ID NO: 1839221 - RNA, 21 nt, Human
ggcugggcucccuucccaccu

SEQ ID NO: 1839222 - RNA, 20 nt, Human
ggcugggcucccuucccacc

SEQ ID NO: 1839223 - RNA, 11 nt, Human
ggcugggcuuc

SEQ ID NO: 1839224 - RNA, 21 nt, Human
ggcugggcuucaguggcagcu

SEQ ID NO: 1839225 - RNA, 22 nt, Human
ggcugggcuucaguggcagcug

SEQ ID NO: 1839226 - RNA, 16 nt, Human
ggcugggggaagaagc

SEQ ID NO: 1839227 - RNA, 14 nt, Human
ggcugggggccuca

SEQ ID NO: 1839228 - RNA, 19 nt, Human
ggcugcuucaaggauccug

SEQ ID NO: 1839229 - RNA, 15 nt, Human
ggcugcuucaaggau

SEQ ID NO: 1839230 - RNA, 23 nt, Human
ggcucuggagcccacuguacuug

SEQ ID NO: 1839231 - RNA, 20 nt, Human
ggcugcuucaaggauccuga

SEQ ID NO: 1839232 - RNA, 21 nt, Human
ggcugcuucaaggauccugag

SEQ ID NO: 1839233 - RNA, 12 nt, Human
ggcuucacagau

SEQ ID NO: 1839234 - RNA, 21 nt, Human
ggcuucacggaagagccuugc

SEQ ID NO: 1839235 - RNA, 20 nt, Human
ggcuucacggaagagccuug

SEQ ID NO: 1839236 - RNA, 15 nt, Human
ggcuuagucacugag

SEQ ID NO: 1839237 - RNA, 14 nt, Human
ggcuuagucacuga

SEQ ID NO: 1839238 - RNA, 19 nt, Human
ggcuuggggaccagagcug

SEQ ID NO: 1839239 - RNA, 18 nt, Human
ggcuuggggaccagagcu

SEQ ID NO: 1839240 - RNA, 17 nt, Human
ggcuuggggaccagagc

SEQ ID NO: 1839241 - RNA, 11 nt, Human
ggcuugcugcc

SEQ ID NO: 1839242 - RNA, 16 nt, Human
ggcugugccucugccu

SEQ ID NO: 1839243 - RNA, 13 nt, Human
ggcugugccucug

SEQ ID NO: 1839244 - RNA, 14 nt, Human
ggcuguuggcuggg

SEQ ID NO: 1839245 - RNA, 15 nt, Human
ggcuguuggcugggg

SEQ ID NO: 1839246 - RNA, 16 nt, Human
ggcuguuggcuggggg

SEQ ID NO: 1839247 - RNA, 20 nt, Human
ggcuguuggcugggggccuc

SEQ ID NO: 1839248 - RNA, 15 nt, Human
ggcuuaaaacaacac

SEQ ID NO: 1839249 - RNA, 21 nt, Human
gggagccugaucaccugcccu

SEQ ID NO: 1839250 - RNA, 12 nt, Human
gggagcucugca

SEQ ID NO: 1839251 - RNA, 13 nt, Human
gggagcugccugu

SEQ ID NO: 1839252 - RNA, 21 nt, Human
gggagcugccuguucagcucc

SEQ ID NO: 1839253 - RNA, 22 nt, Human
gggagcugccuguucagcucca

SEQ ID NO: 1839254 - RNA, 20 nt, Human
gggaggugggauccuccagg

SEQ ID NO: 1839255 - RNA, 23 nt, Human
gggaggauugcuugagcucagga

SEQ ID NO: 1839256 - RNA, 21 nt, Human
gggagugaguugauagcacag

SEQ ID NO: 1839257 - RNA, 17 nt, Human
gggagugacagaggcag

SEQ ID NO: 1839258 - RNA, 17 nt, Human
gggaggacgcucucugg

SEQ ID NO: 1839259 - RNA, 20 nt, Human
gggaggacgcucucuggccu

SEQ ID NO: 1839260 - RNA, 23 nt, Human
gggaggaucucuugagccuggga

SEQ ID NO: 1839261 - RNA, 21 nt, Human
gggaggauugcuugagcucag

SEQ ID NO: 1839262 - RNA, 22 nt, Human
gggaggauguucugggacacag

SEQ ID NO: 1839263 - RNA, 16 nt, Human
gggaccccgagccugg

SEQ ID NO: 1839264 - RNA, 17 nt, Human
gggacucaaugcacuga

SEQ ID NO: 1839265 - RNA, 19 nt, Human
gggacucaaugcacugaca

SEQ ID NO: 1839266 - RNA, 23 nt, Human
gggacugccagucccccugcccc

SEQ ID NO: 1839267 - RNA, 21 nt, Human
gggacugaggggaggggagca

SEQ ID NO: 1839268 - RNA, 15 nt, Human
gggacugagaaauuu

SEQ ID NO: 1839269 - RNA, 23 nt, Human
gggacucaaugcacugacauugu

SEQ ID NO: 1839270 - RNA, 14 nt, Human
gggacacccuguga

SEQ ID NO: 1839271 - RNA, 19 nt, Human
gggaauguuugccucugcc

SEQ ID NO: 1839272 - RNA, 21 nt, Human
gggaauguuugccucugccuc

SEQ ID NO: 1839273 - RNA, 13 nt, Human
ggcuuuucacugc

SEQ ID NO: 1839274 - RNA, 15 nt, Human
gcuggccuggccccu

SEQ ID NO: 1839275 - RNA, 14 nt, Human
gcuggccuggcccc

SEQ ID NO: 1839276 - RNA, 12 nt, Human
gcuggccuggcc

SEQ ID NO: 1839277 - RNA, 13 nt, Human
gcuggccuggccc

SEQ ID NO: 1839278 - RNA, 21 nt, Human
gcugggcucccuucccaccuc

SEQ ID NO: 1839279 - RNA, 19 nt, Human
gcugggaugauuggagggg

SEQ ID NO: 1839280 - RNA, 21 nt, Human
gcugggcuucaguggcagcug

SEQ ID NO: 1839281 - RNA, 22 nt, Human
gcugggcuucaguggcagcugc

SEQ ID NO: 1839282 - RNA, 20 nt, Human
gcugggcuucaguggcagcu

SEQ ID NO: 1839283 - RNA, 14 nt, Human
gcugggggccucag

SEQ ID NO: 1839284 - RNA, 15 nt, Human
gcugggggccucagu

SEQ ID NO: 1839285 - RNA, 18 nt, Human
gcugggggccucagugcc

SEQ ID NO: 1839286 - RNA, 23 nt, Human
gcuggucucgaacuccugaccuu

SEQ ID NO: 1839287 - RNA, 22 nt, Human
gcuggucucgaacuccugaccu

SEQ ID NO: 1839288 - RNA, 19 nt, Human
gcuggucucgaacuccuga

SEQ ID NO: 1839289 - RNA, 20 nt, Human
gcuggucucaaacuccugac

SEQ ID NO: 1839290 - RNA, 19 nt, Human
gcuggucucaaacuccuga

SEQ ID NO: 1839291 - RNA, 14 nt, Human
gcuggucccacuca

SEQ ID NO: 1839292 - RNA, 15 nt, Human
gcugugucucccuuc

SEQ ID NO: 1839293 - RNA, 16 nt, Human
gcuguguggcagucug

SEQ ID NO: 1839294 - RNA, 16 nt, Human
gcugucccuuuuccuu

SEQ ID NO: 1839295 - RNA, 23 nt, Human
gcugucccuuacgugaguccugg

SEQ ID NO: 1839296 - RNA, 17 nt, Human
gcugucagccauuccug

SEQ ID NO: 1839297 - RNA, 13 nt, Human
gcugucaucucag

SEQ ID NO: 1839298 - RNA, 14 nt, Human
gcuggugucaccug

SEQ ID NO: 1839299 - RNA, 15 nt, Human
gcuggugucaccuga

SEQ ID NO: 1839300 - RNA, 14 nt, Human
gcuuguuggauuuu

SEQ ID NO: 1839301 - RNA, 15 nt, Human
gcuuuuaugugaaac

SEQ ID NO: 1839302 - RNA, 13 nt, Human
gcuuuuaugugaa

SEQ ID NO: 1839303 - RNA, 19 nt, Human
gcuuugggcugcccuggug

SEQ ID NO: 1839304 - RNA, 18 nt, Human
gcuuugggcugcccuggu

SEQ ID NO: 1839305 - RNA, 19 nt, Human
gcuucuguugcugccucau

SEQ ID NO: 1839306 - RNA, 18 nt, Human
gcuucuguugcugccuca

SEQ ID NO: 1839307 - RNA, 17 nt, Human
gcuucuguugcugccuc

SEQ ID NO: 1839308 - RNA, 18 nt, Human
gcuucauuuccugugucu

SEQ ID NO: 1839309 - RNA, 22 nt, Human
gcuucucacugccaugccagcu

SEQ ID NO: 1839310 - RNA, 19 nt, Human
gcuucaguggcagcugcuu

SEQ ID NO: 1839311 - RNA, 13 nt, Human
gcuuaucucaggg

SEQ ID NO: 1839312 - RNA, 20 nt, Human
gcuucaguggcagcugcuuu

SEQ ID NO: 1839313 - RNA, 21 nt, Human
gcucucaggccagcugcuugg

SEQ ID NO: 1839314 - RNA, 21 nt, Human
gcucuugaacuccugaccuca

SEQ ID NO: 1839315 - RNA, 19 nt, Human
gcucuugaacuccugaccu

SEQ ID NO: 1839316 - RNA, 16 nt, Human
gcucuugaacuccuga

SEQ ID NO: 1839317 - RNA, 14 nt, Human
gcucuugaacuccu

SEQ ID NO: 1839318 - RNA, 19 nt, Human
gcucuugaugccuggcggg

SEQ ID NO: 1839319 - RNA, 19 nt, Human
gcucuuggcagguacucag

SEQ ID NO: 1839320 - RNA, 22 nt, Human
gcugacuguuuucucuugagag

SEQ ID NO: 1839321 - RNA, 20 nt, Human
gcugacagacacaggcccgg

SEQ ID NO: 1839322 - RNA, 17 nt, Human
gcugacagacacaggcc

SEQ ID NO: 1839323 - RNA, 18 nt, Human
gcugacagacacaggccc

SEQ ID NO: 1839324 - RNA, 19 nt, Human
gcugacagacacaggcccg

SEQ ID NO: 1839325 - RNA, 13 nt, Human
gcugccaccugcc

SEQ ID NO: 1839326 - RNA, 12 nt, Human
gcugccaccugc

SEQ ID NO: 1839327 - RNA, 23 nt, Human
gcugccacacuucaggcucuucu

SEQ ID NO: 1839328 - RNA, 22 nt, Human
gcugccacacuucaggcucuuc

SEQ ID NO: 1839329 - RNA, 21 nt, Human
gcugccacacuucaggcucuu

SEQ ID NO: 1839330 - RNA, 18 nt, Human
gcugccacacuucaggcu

SEQ ID NO: 1839331 - RNA, 17 nt, Human
gcugccacacuucaggc

SEQ ID NO: 1839332 - RNA, 15 nt, Human
gcugccacacuucag

SEQ ID NO: 1839333 - RNA, 20 nt, Human
gcugccaaugggagcucaug

SEQ ID NO: 1839334 - RNA, 14 nt, Human
gcugcaguugccag

SEQ ID NO: 1839335 - RNA, 13 nt, Human
gcugcaguugcca

SEQ ID NO: 1839336 - RNA, 17 nt, Human
gcugcaguugccaguca

SEQ ID NO: 1839337 - RNA, 18 nt, Human
gcugcauuuaaaagauac

SEQ ID NO: 1839338 - RNA, 19 nt, Human
gcugcauuuaaaagauaca

SEQ ID NO: 1839339 - RNA, 21 nt, Human
gcugauuaaaccaaggcuaga

SEQ ID NO: 1839340 - RNA, 22 nt, Human
gcugcaaaggguaucaggugcu

SEQ ID NO: 1839341 - RNA, 23 nt, Human
gcugcaaaggguaucaggugcug

SEQ ID NO: 1839342 - RNA, 12 nt, Human
gcugcccugccc

SEQ ID NO: 1839343 - RNA, 14 nt, Human
gcugcccugcccac

SEQ ID NO: 1839344 - RNA, 13 nt, Human
gcugcccugccca

SEQ ID NO: 1839345 - RNA, 24 nt, Human
gcugcccugcccaccuggccucug

SEQ ID NO: 1839346 - RNA, 23 nt, Human
gcugcccugcccaccuggccucu

SEQ ID NO: 1839347 - RNA, 22 nt, Human
gcugcccugcccaccuggccuc

SEQ ID NO: 1839348 - RNA, 21 nt, Human
gcugcccugcccaccuggccu

SEQ ID NO: 1839349 - RNA, 20 nt, Human
gcugcccugcccaccuggcc

SEQ ID NO: 1839350 - RNA, 18 nt, Human
gcugcccugcccaccugg

SEQ ID NO: 1839351 - RNA, 16 nt, Human
gcugcccugcccaccu

SEQ ID NO: 1839352 - RNA, 15 nt, Human
gcugccuuagaaccu

SEQ ID NO: 1839353 - RNA, 17 nt, Human
gcugcccuggugcugcc

SEQ ID NO: 1839354 - RNA, 20 nt, Human
gcugccuuagaaccuuucuu

SEQ ID NO: 1839355 - RNA, 20 nt, Human
gcugccuguucagcuccagc

SEQ ID NO: 1839356 - RNA, 22 nt, Human
gcugccuguucagcuccagcuc

SEQ ID NO: 1839357 - RNA, 15 nt, Human
gcugcccuggugcug

SEQ ID NO: 1839358 - RNA, 14 nt, Human
gcugcccuggugcu

SEQ ID NO: 1839359 - RNA, 13 nt, Human
gcugcccuggugc

SEQ ID NO: 1839360 - RNA, 12 nt, Human
gcugcccuggug

SEQ ID NO: 1839361 - RNA, 18 nt, Human
gcugccuguucagcucca

SEQ ID NO: 1839362 - RNA, 19 nt, Human
gcugccuguucagcuccag

SEQ ID NO: 1839363 - RNA, 14 nt, Human
gcugcgguccaccc

SEQ ID NO: 1839364 - RNA, 15 nt, Human
gcugcgguccaccca

SEQ ID NO: 1839365 - RNA, 22 nt, Human
gcugcgguccacccaggagccc

SEQ ID NO: 1839366 - RNA, 16 nt, Human
gcugcgguccacccag

SEQ ID NO: 1839367 - RNA, 21 nt, Human
gcugcgguccacccaggagcc

SEQ ID NO: 1839368 - RNA, 22 nt, Human
gcugcuuuugucuaugggacuc

SEQ ID NO: 1839369 - RNA, 23 nt, Human
gcuggaaugauuucagcucacug

SEQ ID NO: 1839370 - RNA, 19 nt, Human
gcuggcccuggcucccaca

SEQ ID NO: 1839371 - RNA, 16 nt, Human
gcuggcccugcccugg

SEQ ID NO: 1839372 - RNA, 15 nt, Human
gcuggcccugcccug

SEQ ID NO: 1839373 - RNA, 14 nt, Human
gcuggcccugcccu

SEQ ID NO: 1839374 - RNA, 16 nt, Human
gcuggaccuugaacug

SEQ ID NO: 1839375 - RNA, 15 nt, Human
gcuggaccuugaacu

SEQ ID NO: 1839376 - RNA, 21 nt, Human
gcgccuuaaggauguucuagc

SEQ ID NO: 1839377 - RNA, 13 nt, Human
gcgccccuucccc

SEQ ID NO: 1839378 - RNA, 23 nt, Human
gcgcccaguuggguggaugccug

SEQ ID NO: 1839379 - RNA, 21 nt, Human
gcgcugccccuggcagccccu

SEQ ID NO: 1839380 - RNA, 18 nt, Human
gcgcugccccuggcagcc

SEQ ID NO: 1839381 - RNA, 16 nt, Human
gcggagaaaggaaggg

SEQ ID NO: 1839382 - RNA, 19 nt, Human
gcggagacggagucccacc

SEQ ID NO: 1839383 - RNA, 14 nt, Human
gcggggacagcucc

SEQ ID NO: 1839384 - RNA, 18 nt, Human
gcggggacagcuccuucu

SEQ ID NO: 1839385 - RNA, 15 nt, Human
gcggggacagcuccu

SEQ ID NO: 1839386 - RNA, 17 nt, Human
gcggggacagcuccuuc

SEQ ID NO: 1839387 - RNA, 19 nt, Human
gcggugagaggggaacaga

SEQ ID NO: 1839388 - RNA, 13 nt, Human
gcgguccacccag

SEQ ID NO: 1839389 - RNA, 14 nt, Human
gcgguccacccagg

SEQ ID NO: 1839390 - RNA, 15 nt, Human
gccuuacacaauggu

SEQ ID NO: 1839391 - RNA, 16 nt, Human
gccuuacacaaugguu

SEQ ID NO: 1839392 - RNA, 21 nt, Human
gcgacaaugcaaaccaucauu

SEQ ID NO: 1839393 - RNA, 20 nt, Human
gcgacaaugcaaaccaucau

SEQ ID NO: 1839394 - RNA, 13 nt, Human
gcgacaaugcaaa

SEQ ID NO: 1839395 - RNA, 12 nt, Human
gcgacaaugcaa

SEQ ID NO: 1839396 - RNA, 22 nt, Human
gcgcaggcuggcccugcccugg

SEQ ID NO: 1839397 - RNA, 21 nt, Human
gcgcaggcuggcccugcccug

SEQ ID NO: 1839398 - RNA, 20 nt, Human
gcgcaggcuggcccugcccu

SEQ ID NO: 1839399 - RNA, 17 nt, Human
gcgcaggcuggcccugc

SEQ ID NO: 1839400 - RNA, 19 nt, Human
gcgcaggcuggcccugccc

SEQ ID NO: 1839401 - RNA, 18 nt, Human
gcgcaggcuggcccugcc

SEQ ID NO: 1839402 - RNA, 14 nt, Human
gccuggccccucag

SEQ ID NO: 1839403 - RNA, 13 nt, Human
gccuggccccuca

SEQ ID NO: 1839404 - RNA, 21 nt, Human
gccuggcagccgugccuucag

SEQ ID NO: 1839405 - RNA, 20 nt, Human
gccuggcagccgugccuuca

SEQ ID NO: 1839406 - RNA, 12 nt, Human
gccuggcagccg

SEQ ID NO: 1839407 - RNA, 19 nt, Human
gccuggcacagggcagugg

SEQ ID NO: 1839408 - RNA, 18 nt, Human
gccuggcacagggcagug

SEQ ID NO: 1839409 - RNA, 22 nt, Human
gccuggcagccgugccuucagc

SEQ ID NO: 1839410 - RNA, 20 nt, Human
gccuggccagaugcaccagc

SEQ ID NO: 1839411 - RNA, 21 nt, Human
gccuggccagaugcaccagcc

SEQ ID NO: 1839412 - RNA, 22 nt, Human
gccuggccagaugcaccagccc

SEQ ID NO: 1839413 - RNA, 15 nt, Human
gccuguaauccuagc

SEQ ID NO: 1839414 - RNA, 20 nt, Human
gccuguaauccuagcacuuu

SEQ ID NO: 1839415 - RNA, 20 nt, Human
gccuggauggggcugcaccg

SEQ ID NO: 1839416 - RNA, 14 nt, Human
gccuggcacagggc

SEQ ID NO: 1839417 - RNA, 13 nt, Human
gccuggcacaggg

SEQ ID NO: 1839418 - RNA, 18 nt, Human
gccuggauggggcugcac

SEQ ID NO: 1839419 - RNA, 16 nt, Human
gccuggauggggcugc

SEQ ID NO: 1839420 - RNA, 12 nt, Human
gccugagcuggg

SEQ ID NO: 1839421 - RNA, 19 nt, Human
gcccaguuggguggaugcc

SEQ ID NO: 1839422 - RNA, 21 nt, Human
gcccaguuggguggaugccug

SEQ ID NO: 1839423 - RNA, 22 nt, Human
gcccaguuggguggaugccugg

SEQ ID NO: 1839424 - RNA, 16 nt, Human
gccugaagucacacag

SEQ ID NO: 1839425 - RNA, 17 nt, Human
gccugagcgacagugag

SEQ ID NO: 1839426 - RNA, 20 nt, Human
gccugagcgacagugagacu

SEQ ID NO: 1839427 - RNA, 17 nt, Human
gccugaagucacacagu

SEQ ID NO: 1839428 - RNA, 18 nt, Human
gccugaagucacacagug

SEQ ID NO: 1839429 - RNA, 14 nt, Human
gcuccucccggugc

SEQ ID NO: 1839430 - RNA, 23 nt, Human
gcuccuggggguucuuucuuccu

SEQ ID NO: 1839431 - RNA, 24 nt, Human
gcuccgcuuucuacccagcgagcc

SEQ ID NO: 1839432 - RNA, 18 nt, Human
gcuccuuccucugaggcu

SEQ ID NO: 1839433 - RNA, 22 nt, Human
gcuccuuccucugaggcugaaa

SEQ ID NO: 1839434 - RNA, 20 nt, Human
gcuccuuccucugaggcuga

SEQ ID NO: 1839435 - RNA, 12 nt, Human
gcuccugugucu

SEQ ID NO: 1839436 - RNA, 13 nt, Human
gcuccugugucuu

SEQ ID NO: 1839437 - RNA, 13 nt, Human
gcuccuucugucc

SEQ ID NO: 1839438 - RNA, 17 nt, Human
gcuccuuuagcgcccag

SEQ ID NO: 1839439 - RNA, 19 nt, Human
gcucgagcaugccuggaug

SEQ ID NO: 1839440 - RNA, 21 nt, Human
gcucgagcaugccuggauggg

SEQ ID NO: 1839441 - RNA, 21 nt, Human
gcuccagcuguucagcugguu

SEQ ID NO: 1839442 - RNA, 13 nt, Human
gcuccaaacccuc

SEQ ID NO: 1839443 - RNA, 14 nt, Human
gcuccaggagcagc

SEQ ID NO: 1839444 - RNA, 12 nt, Human
gcuccaggagca

SEQ ID NO: 1839445 - RNA, 11 nt, Human
gcuccaggagc

SEQ ID NO: 1839446 - RNA, 18 nt, Human
gcuccaggagcagccaca

SEQ ID NO: 1839447 - RNA, 17 nt, Human
gcuccaggagcagccac

SEQ ID NO: 1839448 - RNA, 16 nt, Human
gcuccaggagcagcca

SEQ ID NO: 1839449 - RNA, 15 nt, Human
gcuccaggagcagcc

SEQ ID NO: 1839450 - RNA, 12 nt, Human
gcuccaggcucc

SEQ ID NO: 1839451 - RNA, 15 nt, Human
gcucccacaggcccu

SEQ ID NO: 1839452 - RNA, 20 nt, Human
gcucccuucccaccucucuc

SEQ ID NO: 1839453 - RNA, 18 nt, Human
gcuccgcuuucuacccag

SEQ ID NO: 1839454 - RNA, 21 nt, Human
gcuccgcuuucuacccagcga

SEQ ID NO: 1839455 - RNA, 22 nt, Human
gcuccgcuuucuacccagcgag

SEQ ID NO: 1839456 - RNA, 23 nt, Human
gcuccgcuuucuacccagcgagc

SEQ ID NO: 1839457 - RNA, 13 nt, Human
gcuaucuccccca

SEQ ID NO: 1839458 - RNA, 17 nt, Human
gcuaucguaaaauuaag

SEQ ID NO: 1839459 - RNA, 16 nt, Human
gcuaucguaaaauuaa

SEQ ID NO: 1839460 - RNA, 15 nt, Human
gcuaucguaaaauua

SEQ ID NO: 1839461 - RNA, 15 nt, Human
gcuaucucccccagc

SEQ ID NO: 1839462 - RNA, 14 nt, Human
gcuaucucccccag

SEQ ID NO: 1839463 - RNA, 18 nt, Human
gcucaaguccucuuuucu

SEQ ID NO: 1839464 - RNA, 19 nt, Human
gcucaaguccucuuuucug

SEQ ID NO: 1839465 - RNA, 22 nt, Human
gcucaaguccucuuuucugaga

SEQ ID NO: 1839466 - RNA, 20 nt, Human
gcuauaacuauguugauaaa

SEQ ID NO: 1839467 - RNA, 22 nt, Human
gcggugcuaucucccccagccc

SEQ ID NO: 1839468 - RNA, 19 nt, Human
gcggugcuaucucccccag

SEQ ID NO: 1839469 - RNA, 21 nt, Human
gcuaguugggcuuccucauag

SEQ ID NO: 1839470 - RNA, 18 nt, Human
gcucaccucucccuugga

SEQ ID NO: 1839471 - RNA, 17 nt, Human
gcucaccucucccuugg

SEQ ID NO: 1839472 - RNA, 16 nt, Human
gcucaccucucccuug

SEQ ID NO: 1839473 - RNA, 14 nt, Human
gcucaccucucccu

SEQ ID NO: 1839474 - RNA, 12 nt, Human
gcucagcccucc

SEQ ID NO: 1839475 - RNA, 16 nt, Human
gcucagcccucccugc

SEQ ID NO: 1839476 - RNA, 15 nt, Human
gcucagcccucccug

SEQ ID NO: 1839477 - RNA, 22 nt, Human
gcucacagaacccuuggagcca

SEQ ID NO: 1839478 - RNA, 16 nt, Human
gcucacauaucuguca

SEQ ID NO: 1839479 - RNA, 12 nt, Human
gcucaccagccc

SEQ ID NO: 1839480 - RNA, 13 nt, Human
gcucaccagcccc

SEQ ID NO: 1839481 - RNA, 14 nt, Human
gcucaccagcccca

SEQ ID NO: 1839482 - RNA, 15 nt, Human
gcucaccagccccag

SEQ ID NO: 1839483 - RNA, 18 nt, Human
gcucaccagccccagugc

SEQ ID NO: 1839484 - RNA, 21 nt, Human
gcucagcccucccugccccuc

SEQ ID NO: 1839485 - RNA, 19 nt, Human
gcucagcccucccugcccc

SEQ ID NO: 1839486 - RNA, 18 nt, Human
gcucagcccucccugccc

SEQ ID NO: 1839487 - RNA, 17 nt, Human
gcucagcccucccugcc

SEQ ID NO: 1839488 - RNA, 16 nt, Human
gcucagcggggacagc

SEQ ID NO: 1839489 - RNA, 17 nt, Human
gcucagcggggacagcu

SEQ ID NO: 1839490 - RNA, 18 nt, Human
gcucagcggggacagcuc

SEQ ID NO: 1839491 - RNA, 19 nt, Human
gcucagcggggacagcucc

SEQ ID NO: 1839492 - RNA, 23 nt, Human
gcucagcggggacagcuccuucu

SEQ ID NO: 1839493 - RNA, 18 nt, Human
gcucauggacuucugcca

SEQ ID NO: 1839494 - RNA, 14 nt, Human
ucacugcuuaacuu

SEQ ID NO: 1839495 - RNA, 22 nt, Human
ucacugcuggcugccuuagaac

SEQ ID NO: 1839496 - RNA, 18 nt, Human
ucacugcuggcugccuua

SEQ ID NO: 1839497 - RNA, 17 nt, Human
ucacugcuggcugccuu

SEQ ID NO: 1839498 - RNA, 12 nt, Human
ucacugcuggcu

SEQ ID NO: 1839499 - RNA, 16 nt, Human
ucacugcuggcugccu

SEQ ID NO: 1839500 - RNA, 15 nt, Human
ucacugcuggcugcc

SEQ ID NO: 1839501 - RNA, 14 nt, Human
ucacugcuggcugc

SEQ ID NO: 1839502 - RNA, 13 nt, Human
ucacugcuggcug

SEQ ID NO: 1839503 - RNA, 18 nt, Human
ucacugccaugccagcuu

SEQ ID NO: 1839504 - RNA, 19 nt, Human
ucacugcauccuccgccuc

SEQ ID NO: 1839505 - RNA, 18 nt, Human
ucacugcauccuccgccu

SEQ ID NO: 1839506 - RNA, 20 nt, Human
ucacucuuauugcccacgcu

SEQ ID NO: 1839507 - RNA, 17 nt, Human
ucacucuuauugcccac

SEQ ID NO: 1839508 - RNA, 13 nt, Human
ucaccagccccag

SEQ ID NO: 1839509 - RNA, 16 nt, Human
ucaccagccccagugc

SEQ ID NO: 1839510 - RNA, 10 nt, Human
ucagaaaugu

SEQ ID NO: 1839511 - RNA, 15 nt, Human
ucagaaauguguuau

SEQ ID NO: 1839512 - RNA, 23 nt, Human
ucagaauucucuaguuugauuaa

SEQ ID NO: 1839513 - RNA, 16 nt, Human
ucagaauucucuaguu

SEQ ID NO: 1839514 - RNA, 14 nt, Human
ucagacagcugccu

SEQ ID NO: 1839515 - RNA, 13 nt, Human
ucagacagcugcc

SEQ ID NO: 1839516 - RNA, 22 nt, Human
ucagaguaauccaagcaaaugu

SEQ ID NO: 1839517 - RNA, 21 nt, Human
ucagaguaauccaagcaaaug

SEQ ID NO: 1839518 - RNA, 20 nt, Human
ucagcauucucacuccuacc

SEQ ID NO: 1839519 - RNA, 17 nt, Human
ucagcauucucacuccu

SEQ ID NO: 1839520 - RNA, 18 nt, Human
ucagauauaaaagacuga

SEQ ID NO: 1839521 - RNA, 20 nt, Human
ucagauauaaaagacugacc

SEQ ID NO: 1839522 - RNA, 14 nt, Human
ucagauauaaaaga

SEQ ID NO: 1839523 - RNA, 17 nt, Human
ucagauauaaaagacug

SEQ ID NO: 1839524 - RNA, 20 nt, Human
ucagccucccgaguagcugg

SEQ ID NO: 1839525 - RNA, 18 nt, Human
ucagccucccgaguagcu

SEQ ID NO: 1839526 - RNA, 21 nt, Human
ucagccucccgaauagcuggg

SEQ ID NO: 1839527 - RNA, 22 nt, Human
ucagccucccgaauagcuggga

SEQ ID NO: 1839528 - RNA, 23 nt, Human
ucagcauucucacuccuaccugg

SEQ ID NO: 1839529 - RNA, 14 nt, Human
ucagccucccaaag

SEQ ID NO: 1839530 - RNA, 19 nt, Human
ucagccucccaaagugcug

SEQ ID NO: 1839531 - RNA, 21 nt, Human
ucagccucccaaagugcuggg

SEQ ID NO: 1839532 - RNA, 16 nt, Human
ucagcugaaccugggu

SEQ ID NO: 1839533 - RNA, 15 nt, Human
ucagcugaaccuggg

SEQ ID NO: 1839534 - RNA, 19 nt, Human
ucagccugcuccagcuguu

SEQ ID NO: 1839535 - RNA, 18 nt, Human
ucagccugcuccagcugu

SEQ ID NO: 1839536 - RNA, 22 nt, Human
ucagccuccugaguagcuggga

SEQ ID NO: 1839537 - RNA, 13 nt, Human
ucagccuccugag

SEQ ID NO: 1839538 - RNA, 21 nt, Human
ucagccuccugaguagcugga

SEQ ID NO: 1839539 - RNA, 20 nt, Human
ucagccuccugaguagcugg

SEQ ID NO: 1839540 - RNA, 21 nt, Human
ucagccucccgaguagcuggg

SEQ ID NO: 1839541 - RNA, 22 nt, Human
ucagccucccgaguagcuggga

SEQ ID NO: 1839542 - RNA, 16 nt, Human
ucaggugagaagcaga

SEQ ID NO: 1839543 - RNA, 15 nt, Human
ucaggugagaagcag

SEQ ID NO: 1839544 - RNA, 16 nt, Human
ucagggccuggcucag

SEQ ID NO: 1839545 - RNA, 14 nt, Human
ucagggccuggcuc

SEQ ID NO: 1839546 - RNA, 21 nt, Human
ucagggagugggcuaagcacg

SEQ ID NO: 1839547 - RNA, 23 nt, Human
ucaggagcccugggaggcucugg

SEQ ID NO: 1839548 - RNA, 20 nt, Human
ucaggagcccugggaggcuc

SEQ ID NO: 1839549 - RNA, 18 nt, Human
ucaggagcccugggaggc

SEQ ID NO: 1839550 - RNA, 19 nt, Human
ucaggagcccugggaggcu

SEQ ID NO: 1839551 - RNA, 18 nt, Human
ucauugugaaauuauuca

SEQ ID NO: 1839552 - RNA, 17 nt, Human
ucauugugaaauuauuc

SEQ ID NO: 1839553 - RNA, 15 nt, Human
ucauugugaaauuau

SEQ ID NO: 1839554 - RNA, 12 nt, Human
ucauugugaaau

SEQ ID NO: 1839555 - RNA, 13 nt, Human
ucauuuccugugu

SEQ ID NO: 1839556 - RNA, 16 nt, Human
ucauuuccugugucuu

SEQ ID NO: 1839557 - RNA, 21 nt, Human
ucauucaacccaccugcgucu

SEQ ID NO: 1839558 - RNA, 23 nt, Human
ucauuccaccuucccaugcccug

SEQ ID NO: 1839559 - RNA, 21 nt, Human
ucaucaccaacgucugugcca

SEQ ID NO: 1839560 - RNA, 20 nt, Human
ucaucaccaacgucugugcc

SEQ ID NO: 1839561 - RNA, 19 nt, Human
ucaucaccaacgucugugc

SEQ ID NO: 1839562 - RNA, 15 nt, Human
ucauacucaccucac

SEQ ID NO: 1839563 - RNA, 21 nt, Human
ucauagcccucacccuggggc

SEQ ID NO: 1839564 - RNA, 21 nt, Human
ucaggugagaagcagaggaag

SEQ ID NO: 1839565 - RNA, 23 nt, Human
ucaggugccucaagagaaggcaa

SEQ ID NO: 1839566 - RNA, 13 nt, Human
ucaggugcugcca

SEQ ID NO: 1839567 - RNA, 14 nt, Human
ucaggugcugccau

SEQ ID NO: 1839568 - RNA, 15 nt, Human
ucaggugcugccauc

SEQ ID NO: 1839569 - RNA, 19 nt, Human
ucaucuugaauuguaagga

SEQ ID NO: 1839570 - RNA, 23 nt, Human
ucaucuuagguuggcaaaaaggc

SEQ ID NO: 1839571 - RNA, 18 nt, Human
uccaggagcagccacauu

SEQ ID NO: 1839572 - RNA, 17 nt, Human
uccaggagcagccacau

SEQ ID NO: 1839573 - RNA, 22 nt, Human
uccaggagcagccacauuccug

SEQ ID NO: 1839574 - RNA, 23 nt, Human
uccaggggugggacacccuguga

SEQ ID NO: 1839575 - RNA, 15 nt, Human
uccaggugcacaagc

SEQ ID NO: 1839576 - RNA, 22 nt, Human
uccaggugcacaagcuccaagc

SEQ ID NO: 1839577 - RNA, 21 nt, Human
uccaggugcacaagcuccaag

SEQ ID NO: 1839578 - RNA, 20 nt, Human
uccaggugcacaagcuccaa

SEQ ID NO: 1839579 - RNA, 18 nt, Human
uccaggugcacaagcucc

SEQ ID NO: 1839580 - RNA, 11 nt, Human
uccaggguggu

SEQ ID NO: 1839581 - RNA, 15 nt, Human
uccagguucagcuug

SEQ ID NO: 1839582 - RNA, 16 nt, Human
uccagguucagcuugu

SEQ ID NO: 1839583 - RNA, 18 nt, Human
uccagcucaccagcccca

SEQ ID NO: 1839584 - RNA, 16 nt, Human
uccagcucaccagccc

SEQ ID NO: 1839585 - RNA, 17 nt, Human
uccagcucaccagcccc

SEQ ID NO: 1839586 - RNA, 16 nt, Human
uccaggagcagccaca

SEQ ID NO: 1839587 - RNA, 17 nt, Human
uccagcuguucagcugg

SEQ ID NO: 1839588 - RNA, 15 nt, Human
uccacuuggucugug

SEQ ID NO: 1839589 - RNA, 16 nt, Human
uccacuuggucuguga

SEQ ID NO: 1839590 - RNA, 15 nt, Human
uccaccuucccaugc

SEQ ID NO: 1839591 - RNA, 17 nt, Human
uccagccacagaaaaga

SEQ ID NO: 1839592 - RNA, 15 nt, Human
uccaccugccaggga

SEQ ID NO: 1839593 - RNA, 17 nt, Human
uccaccugccagggaca

SEQ ID NO: 1839594 - RNA, 21 nt, Human
uccaccugccagggacagagg

SEQ ID NO: 1839595 - RNA, 18 nt, Human
uccaccugccagggacag

SEQ ID NO: 1839596 - RNA, 12 nt, Human
uccacccugcuc

SEQ ID NO: 1839597 - RNA, 18 nt, Human
uccacaagagcccaggcc

SEQ ID NO: 1839598 - RNA, 17 nt, Human
uccacaagagcccaggc

SEQ ID NO: 1839599 - RNA, 16 nt, Human
uccacaagagcccagg

SEQ ID NO: 1839600 - RNA, 18 nt, Human
uccacaaguuaaauaaau

SEQ ID NO: 1839601 - RNA, 17 nt, Human
uccacaaguuaaauaaa

SEQ ID NO: 1839602 - RNA, 20 nt, Human
uccaaaauaaaacuuuuuaa

SEQ ID NO: 1839603 - RNA, 18 nt, Human
uccaaaauaaaacuuuuu

SEQ ID NO: 1839604 - RNA, 18 nt, Human
uccaauuuacauacucug

SEQ ID NO: 1839605 - RNA, 17 nt, Human
uccaauuuacauacucu

SEQ ID NO: 1839606 - RNA, 12 nt, Human
uauuaaauuaug

SEQ ID NO: 1839607 - RNA, 24 nt, Human
uauuaagaaagacuaucuaaaugu

SEQ ID NO: 1839608 - RNA, 16 nt, Human
uauguugcauagaaua

SEQ ID NO: 1839609 - RNA, 13 nt, Human
uauguugcccagg

SEQ ID NO: 1839610 - RNA, 16 nt, Human
uauguugcccaggcag

SEQ ID NO: 1839611 - RNA, 19 nt, Human
uauguugcccaggcagguc

SEQ ID NO: 1839612 - RNA, 20 nt, Human
uauguugcccaggcaggucu

SEQ ID NO: 1839613 - RNA, 12 nt, Human
uauguugcauag

SEQ ID NO: 1839614 - RNA, 14 nt, Human
uauguugauaaaag

SEQ ID NO: 1839615 - RNA, 15 nt, Human
gggaguggccacaga

SEQ ID NO: 1839616 - RNA, 13 nt, Human
gggaguggccaca

SEQ ID NO: 1839617 - RNA, 21 nt, Human
uauuccugcauuugugaaaug

SEQ ID NO: 1839618 - RNA, 20 nt, Human
uauuccugcauuugugaaau

SEQ ID NO: 1839619 - RNA, 19 nt, Human
uauuccugcauuugugaaa

SEQ ID NO: 1839620 - RNA, 17 nt, Human
uauuccugcauuuguga

SEQ ID NO: 1839621 - RNA, 12 nt, Human
uauuguuuucag

SEQ ID NO: 1839622 - RNA, 20 nt, Human
uauuguuuucaguguacaug

SEQ ID NO: 1839623 - RNA, 18 nt, Human
uauuguuuucaguguaca

SEQ ID NO: 1839624 - RNA, 22 nt, Human
uauuguuuucaguguacaugga

SEQ ID NO: 1839625 - RNA, 24 nt, Human
uauuuauaaaaauaaaaaacacug

SEQ ID NO: 1839626 - RNA, 21 nt, Human
uauugauaugcuuauacacuu

SEQ ID NO: 1839627 - RNA, 18 nt, Human
uauucucuccuguaccuc

SEQ ID NO: 1839628 - RNA, 17 nt, Human
uauucucuccuguaccu

SEQ ID NO: 1839629 - RNA, 17 nt, Human
uauugcugauggugcaa

SEQ ID NO: 1839630 - RNA, 22 nt, Human
uauuggaaauuuguuauaauga

SEQ ID NO: 1839631 - RNA, 19 nt, Human
uauugcuuguuggauuuuu

SEQ ID NO: 1839632 - RNA, 21 nt, Human
uauugcuugcacaaaccaauu

SEQ ID NO: 1839633 - RNA, 18 nt, Human
ucacauuuauucugcuca

SEQ ID NO: 1839634 - RNA, 19 nt, Human
ucacauuuauucugcucac

SEQ ID NO: 1839635 - RNA, 17 nt, Human
ucacauuuauucugcuc

SEQ ID NO: 1839636 - RNA, 16 nt, Human
ucaccacaugugcaca

SEQ ID NO: 1839637 - RNA, 20 nt, Human
ucaccaaaucagcugcuacu

SEQ ID NO: 1839638 - RNA, 19 nt, Human
ucaccaaaucagcugcuac

SEQ ID NO: 1839639 - RNA, 14 nt, Human
ucaccaaggcugau

SEQ ID NO: 1839640 - RNA, 13 nt, Human
ucacaagacccaa

SEQ ID NO: 1839641 - RNA, 17 nt, Human
ucacaagacccaaaagg

SEQ ID NO: 1839642 - RNA, 18 nt, Human
ucacaagacccaaaaggc

SEQ ID NO: 1839643 - RNA, 16 nt, Human
ucacagucacauucca

SEQ ID NO: 1839644 - RNA, 19 nt, Human
ucacaguccuuaccagcag

SEQ ID NO: 1839645 - RNA, 23 nt, Human
ucacaguccuuaccagcagagca

SEQ ID NO: 1839646 - RNA, 22 nt, Human
ucacaguccuuaccagcagagc

SEQ ID NO: 1839647 - RNA, 16 nt, Human
ucacaggcagguccag

SEQ ID NO: 1839648 - RNA, 17 nt, Human
ucacaggcagguccagg

SEQ ID NO: 1839649 - RNA, 18 nt, Human
ucacaggcagguccaggg

SEQ ID NO: 1839650 - RNA, 19 nt, Human
ucacaggcagguccagggu

SEQ ID NO: 1839651 - RNA, 23 nt, Human
ucaauuacaggaaguacuggaga

SEQ ID NO: 1839652 - RNA, 21 nt, Human
ucaauuacaggaaguacugga

SEQ ID NO: 1839653 - RNA, 13 nt, Human
ucaaugcagcccc

SEQ ID NO: 1839654 - RNA, 18 nt, Human
ucaacgcagcccugcuuu

SEQ ID NO: 1839655 - RNA, 15 nt, Human
ucaacgcagcccugc

SEQ ID NO: 1839656 - RNA, 14 nt, Human
ucaacgcagcccug

SEQ ID NO: 1839657 - RNA, 20 nt, Human
ucaagugauucuccugccuc

SEQ ID NO: 1839658 - RNA, 18 nt, Human
ucaagugauucuccugcc

SEQ ID NO: 1839659 - RNA, 19 nt, Human
ucaagugauucuccugccu

SEQ ID NO: 1839660 - RNA, 21 nt, Human
ucaagugauucuccugccuca

SEQ ID NO: 1839661 - RNA, 15 nt, Human
ucaaaaaaagaaaaa

SEQ ID NO: 1839662 - RNA, 14 nt, Human
ucaaaaaaagaaaa

SEQ ID NO: 1839663 - RNA, 14 nt, Human
uauuuuuuuacuaa

SEQ ID NO: 1839664 - RNA, 17 nt, Human
uauuuuuuucuuuucuu

SEQ ID NO: 1839665 - RNA, 22 nt, Human
uauuuucccuauuagagaagag

SEQ ID NO: 1839666 - RNA, 13 nt, Human
uauuuauauaaau

SEQ ID NO: 1839667 - RNA, 17 nt, Human
uauuuuauguugcauag

SEQ ID NO: 1839668 - RNA, 14 nt, Human
uauuuuauuaugca

SEQ ID NO: 1839669 - RNA, 17 nt, Human
uauuuuauuaugcauga

SEQ ID NO: 1839670 - RNA, 19 nt, Human
uauuuucaacgcagcccug

SEQ ID NO: 1839671 - RNA, 23 nt, Human
ucaaauauauucagccuggcuuc

SEQ ID NO: 1839672 - RNA, 22 nt, Human
ucaaauauauucagccuggcuu

SEQ ID NO: 1839673 - RNA, 21 nt, Human
ucaaauauauucagccuggcu

SEQ ID NO: 1839674 - RNA, 12 nt, Human
ucaaagaaauuu

SEQ ID NO: 1839675 - RNA, 13 nt, Human
ucaaagaaauuuc

SEQ ID NO: 1839676 - RNA, 19 nt, Human
ucaaagaaauuuccacuca

SEQ ID NO: 1839677 - RNA, 20 nt, Human
ucaaagaaauuuccacucag

SEQ ID NO: 1839678 - RNA, 15 nt, Human
ucaaaugagaaaaug

SEQ ID NO: 1839679 - RNA, 23 nt, Human
ucaaccccuucgcuccugugucu

SEQ ID NO: 1839680 - RNA, 20 nt, Human
ucaaauuguaagcaugcaca

SEQ ID NO: 1839681 - RNA, 17 nt, Human
ucaaauuguaagcaugc

SEQ ID NO: 1839682 - RNA, 14 nt, Human
ucugccugcccagg

SEQ ID NO: 1839683 - RNA, 13 nt, Human
ucugccugcccag

SEQ ID NO: 1839684 - RNA, 15 nt, Human
ucugccugcccaggc

SEQ ID NO: 1839685 - RNA, 16 nt, Human
ucugccugcccaggcc

SEQ ID NO: 1839686 - RNA, 18 nt, Human
ucugcuccucuccccagc

SEQ ID NO: 1839687 - RNA, 21 nt, Human
ucugcuccucuccccagcaag

SEQ ID NO: 1839688 - RNA, 18 nt, Human
ucugcugacagacacagg

SEQ ID NO: 1839689 - RNA, 17 nt, Human
ucugcugacagacacag

SEQ ID NO: 1839690 - RNA, 21 nt, Human
ucuggacaggcauguucucug

SEQ ID NO: 1839691 - RNA, 16 nt, Human
ucuggaaugcaguggu

SEQ ID NO: 1839692 - RNA, 14 nt, Human
ucuggacaggcaug

SEQ ID NO: 1839693 - RNA, 19 nt, Human
ucuggaauaaggagaauga

SEQ ID NO: 1839694 - RNA, 15 nt, Human
ucuggaaugcagugg

SEQ ID NO: 1839695 - RNA, 22 nt, Human
ucugcugauccucccaggcuuc

SEQ ID NO: 1839696 - RNA, 19 nt, Human
ucugcugacagacacaggc

SEQ ID NO: 1839697 - RNA, 20 nt, Human
ucugcugacagacacaggcc

SEQ ID NO: 1839698 - RNA, 21 nt, Human
ucugcugacagacacaggccc

SEQ ID NO: 1839699 - RNA, 22 nt, Human
ucugcugacagacacaggcccg

SEQ ID NO: 1839700 - RNA, 21 nt, Human
ucugguuccuccccuccuccu

SEQ ID NO: 1839701 - RNA, 20 nt, Human
ucugguuccuccccuccucc

SEQ ID NO: 1839702 - RNA, 14 nt, Human
ucuguccuacucug

SEQ ID NO: 1839703 - RNA, 13 nt, Human
ucugguuccuccc

SEQ ID NO: 1839704 - RNA, 22 nt, Human
ucugucucuggauuauauuaug

SEQ ID NO: 1839705 - RNA, 16 nt, Human
ucugucgcccagucug

SEQ ID NO: 1839706 - RNA, 14 nt, Human
ucugucgcccaguc

SEQ ID NO: 1839707 - RNA, 21 nt, Human
ucuguccugggagugagcugg

SEQ ID NO: 1839708 - RNA, 20 nt, Human
ucuguccuacucugugucag

SEQ ID NO: 1839709 - RNA, 15 nt, Human
ucuguccuacucugu

SEQ ID NO: 1839710 - RNA, 19 nt, Human
ucuguccuacucuguguca

SEQ ID NO: 1839711 - RNA, 17 nt, Human
ucuggccuucggccucc

SEQ ID NO: 1839712 - RNA, 18 nt, Human
ucuggccuucggccucca

SEQ ID NO: 1839713 - RNA, 23 nt, Human
ucuggccuucggccuccauccug

SEQ ID NO: 1839714 - RNA, 19 nt, Human
ucuggcuaugcauuugaaa

SEQ ID NO: 1839715 - RNA, 22 nt, Human
ucuggcuaugcauuugaaaauu

SEQ ID NO: 1839716 - RNA, 15 nt, Human
ucuggcuccagcugg

SEQ ID NO: 1839717 - RNA, 23 nt, Human
ucuggcucuuccaggcugggaga

SEQ ID NO: 1839718 - RNA, 18 nt, Human
ucuggcucuuccaggcug

SEQ ID NO: 1839719 - RNA, 23 nt, Human
ucuggugacuuuccucuuugguc

SEQ ID NO: 1839720 - RNA, 14 nt, Human
ucugggacacaguu

SEQ ID NO: 1839721 - RNA, 22 nt, Human
ucuuaaauauguggaguucauc

SEQ ID NO: 1839722 - RNA, 17 nt, Human
ucuuaaccagaucauug

SEQ ID NO: 1839723 - RNA, 16 nt, Human
ucuuaaccagaucauu

SEQ ID NO: 1839724 - RNA, 22 nt, Human
ucuuaaccagaucauugugaaa

SEQ ID NO: 1839725 - RNA, 13 nt, Human
ucuuaaaaagugg

SEQ ID NO: 1839726 - RNA, 12 nt, Human
ucuucuccacug

SEQ ID NO: 1839727 - RNA, 13 nt, Human
ucuucuccuuuca

SEQ ID NO: 1839728 - RNA, 14 nt, Human
ucuucuccuuucac

SEQ ID NO: 1839729 - RNA, 18 nt, Human
ucuucuuuuuuugugaug

SEQ ID NO: 1839730 - RNA, 17 nt, Human
ucuucuuuuuuugugau

SEQ ID NO: 1839731 - RNA, 16 nt, Human
ucuucuuuuuuuguga

SEQ ID NO: 1839732 - RNA, 19 nt, Human
ucuucuuuuugcuucaaaa

SEQ ID NO: 1839733 - RNA, 13 nt, Human
ucuugaaaaaugc

SEQ ID NO: 1839734 - RNA, 19 nt, Human
ucuugaacuccugaccuca

SEQ ID NO: 1839735 - RNA, 17 nt, Human
ucuugaacuccugaccu

SEQ ID NO: 1839736 - RNA, 12 nt, Human
ucuugaacuccu

SEQ ID NO: 1839737 - RNA, 18 nt, Human
ucuucagaucucuaacuu

SEQ ID NO: 1839738 - RNA, 23 nt, Human
ucuucagaucucuaacuucacca

SEQ ID NO: 1839739 - RNA, 17 nt, Human
ucuuccuggauuauuca

SEQ ID NO: 1839740 - RNA, 13 nt, Human
ucugaaaauguau

SEQ ID NO: 1839741 - RNA, 14 nt, Human
ucugaaaauugaug

SEQ ID NO: 1839742 - RNA, 22 nt, Human
ucugaaaauugaugggauuugg

SEQ ID NO: 1839743 - RNA, 14 nt, Human
ucugaaaauguaug

SEQ ID NO: 1839744 - RNA, 16 nt, Human
ucugacacacagcucu

SEQ ID NO: 1839745 - RNA, 17 nt, Human
ucugacacacagcucug

SEQ ID NO: 1839746 - RNA, 18 nt, Human
ucugacacacagcucugu

SEQ ID NO: 1839747 - RNA, 19 nt, Human
ucugacacacagcucuguc

SEQ ID NO: 1839748 - RNA, 12 nt, Human
ucugacaggcaa

SEQ ID NO: 1839749 - RNA, 21 nt, Human
ucugacaggcaaugcuggcug

SEQ ID NO: 1839750 - RNA, 22 nt, Human
ucugacaggcaaugcuggcugu

SEQ ID NO: 1839751 - RNA, 15 nt, Human
ucugacauaaguauu

SEQ ID NO: 1839752 - RNA, 13 nt, Human
ucugacccacugc

SEQ ID NO: 1839753 - RNA, 21 nt, Human
ucugcaagaauugaagcagga

SEQ ID NO: 1839754 - RNA, 20 nt, Human
ucugcaagaauugaagcagg

SEQ ID NO: 1839755 - RNA, 14 nt, Human
ucugcacacagcac

SEQ ID NO: 1839756 - RNA, 23 nt, Human
ucugaggcugaaauucagaauau

SEQ ID NO: 1839757 - RNA, 11 nt, Human
ucugaggcuga

SEQ ID NO: 1839758 - RNA, 14 nt, Human
ucugacccacugcu

SEQ ID NO: 1839759 - RNA, 15 nt, Human
ucugacccacugcuu

SEQ ID NO: 1839760 - RNA, 23 nt, Human
ucugaggaauccagacccggcug

SEQ ID NO: 1839761 - RNA, 17 nt, Human
ucugcauucaggaucaa

SEQ ID NO: 1839762 - RNA, 16 nt, Human
ucucuaguuugauuaa

SEQ ID NO: 1839763 - RNA, 15 nt, Human
ucucuaguuugauua

SEQ ID NO: 1839764 - RNA, 14 nt, Human
ucucugcagguccc

SEQ ID NO: 1839765 - RNA, 13 nt, Human
ucucugcaggucc

SEQ ID NO: 1839766 - RNA, 17 nt, Human
ucucugaggacacuaac

SEQ ID NO: 1839767 - RNA, 14 nt, Human
ucucugaggacacu

SEQ ID NO: 1839768 - RNA, 18 nt, Human
ucucugcaggucccuaau

SEQ ID NO: 1839769 - RNA, 16 nt, Human
ucucugcaggucccua

SEQ ID NO: 1839770 - RNA, 15 nt, Human
ucucugcaggucccu

SEQ ID NO: 1839771 - RNA, 19 nt, Human
ucucuaacuucaccauauu

SEQ ID NO: 1839772 - RNA, 12 nt, Human
ucucuaacuuca

SEQ ID NO: 1839773 - RNA, 22 nt, Human
ucucgugauugauaagaaccuu

SEQ ID NO: 1839774 - RNA, 14 nt, Human
ucucgugauugaua

SEQ ID NO: 1839775 - RNA, 19 nt, Human
ucucgugguaggacuguag

SEQ ID NO: 1839776 - RNA, 21 nt, Human
ucucgugguaggacuguagaa

SEQ ID NO: 1839777 - RNA, 19 nt, Human
ucuccuguaccucuugagc

SEQ ID NO: 1839778 - RNA, 16 nt, Human
ucuccuguaccucuug

SEQ ID NO: 1839779 - RNA, 17 nt, Human
ucuccuguaccucuuga

SEQ ID NO: 1839780 - RNA, 15 nt, Human
ucuccuguaccucuu

SEQ ID NO: 1839781 - RNA, 21 nt, Human
ucuccuggaaauauuaagaaa

SEQ ID NO: 1839782 - RNA, 21 nt, Human
ucuccuggaagugcuaauuuu

SEQ ID NO: 1839783 - RNA, 19 nt, Human
ucuccugccucagccuccc

SEQ ID NO: 1839784 - RNA, 17 nt, Human
ucuccugccucagccuc

SEQ ID NO: 1839785 - RNA, 15 nt, Human
ucuccugccucagcc

SEQ ID NO: 1839786 - RNA, 18 nt, Human
ucucaagagggcacuggu

SEQ ID NO: 1839787 - RNA, 17 nt, Human
ucucaagagggcacugg

SEQ ID NO: 1839788 - RNA, 19 nt, Human
ucucaagagggcacuggug

SEQ ID NO: 1839789 - RNA, 12 nt, Human
ucuccugccuca

SEQ ID NO: 1839790 - RNA, 21 nt, Human
ucuaucaaguauuauaccuuu

SEQ ID NO: 1839791 - RNA, 22 nt, Human
ucuaucaaguauuauaccuuuu

SEQ ID NO: 1839792 - RNA, 15 nt, Human
ucuaucaaguauuau

SEQ ID NO: 1839793 - RNA, 17 nt, Human
ucucaaauaacuaaaag

SEQ ID NO: 1839794 - RNA, 21 nt, Human
ucucaaagaaauuuccacuca

SEQ ID NO: 1839795 - RNA, 22 nt, Human
ucucaaagaaauuuccacucag

SEQ ID NO: 1839796 - RNA, 14 nt, Human
ucuaaugugugaau

SEQ ID NO: 1839797 - RNA, 14 nt, Human
ucuaauauguaaca

SEQ ID NO: 1839798 - RNA, 21 nt, Human
ucuaaaucuccaaaauaaaac

SEQ ID NO: 1839799 - RNA, 22 nt, Human
ucggccucccaaagugcuggga

SEQ ID NO: 1839800 - RNA, 16 nt, Human
ucgugauugauaagaa

SEQ ID NO: 1839801 - RNA, 16 nt, Human
ucgagguuucucaaag

SEQ ID NO: 1839802 - RNA, 22 nt, Human
ucgagguuucucaaagaaauuu

SEQ ID NO: 1839803 - RNA, 18 nt, Human
ucggccuccauccugagg

SEQ ID NO: 1839804 - RNA, 22 nt, Human
uccuguaccucuugagccuuga

SEQ ID NO: 1839805 - RNA, 20 nt, Human
uccuguaccucuugagccuu

SEQ ID NO: 1839806 - RNA, 22 nt, Human
uccuggcacugcuuccagugag

SEQ ID NO: 1839807 - RNA, 18 nt, Human
uccuggcacugcuuccag

SEQ ID NO: 1839808 - RNA, 20 nt, Human
uccuggcacccggccccugc

SEQ ID NO: 1839809 - RNA, 21 nt, Human
uccuggcacccggccccugcu

SEQ ID NO: 1839810 - RNA, 17 nt, Human
uccuggcacugcuucca

SEQ ID NO: 1839811 - RNA, 22 nt, Human
uccuggcacccggccccugcug

SEQ ID NO: 1839812 - RNA, 17 nt, Human
uccugccucagccuccc

SEQ ID NO: 1839813 - RNA, 16 nt, Human
uccugccucagccucc

SEQ ID NO: 1839814 - RNA, 13 nt, Human
uccugccucagcc

SEQ ID NO: 1839815 - RNA, 15 nt, Human
uccugccucagccuc

SEQ ID NO: 1839816 - RNA, 14 nt, Human
uccuggcacccggc

SEQ ID NO: 1839817 - RNA, 16 nt, Human
uccuggcacccggccc

SEQ ID NO: 1839818 - RNA, 19 nt, Human
uccuggcacccggccccug

SEQ ID NO: 1839819 - RNA, 13 nt, Human
uccugagccagau

SEQ ID NO: 1839820 - RNA, 20 nt, Human
uccugccuaagugcagcccc

SEQ ID NO: 1839821 - RNA, 14 nt, Human
uccugagccagauu

SEQ ID NO: 1839822 - RNA, 14 nt, Human
uccugccucagccu

SEQ ID NO: 1839823 - RNA, 18 nt, Human
uccuuuucgcaggauucu

SEQ ID NO: 1839824 - RNA, 15 nt, Human
ucgaacuccugaccu

SEQ ID NO: 1839825 - RNA, 22 nt, Human
ucgaggcggaucuuuggacaga

SEQ ID NO: 1839826 - RNA, 17 nt, Human
ucgaggcggaucuuugg

SEQ ID NO: 1839827 - RNA, 23 nt, Human
uccuuuucacaguucucuccuuc

SEQ ID NO: 1839828 - RNA, 19 nt, Human
uccuuuuaaaacacuucca

SEQ ID NO: 1839829 - RNA, 20 nt, Human
uccuucaccuuuguccccac

SEQ ID NO: 1839830 - RNA, 18 nt, Human
uccuucaccuuugucccc

SEQ ID NO: 1839831 - RNA, 20 nt, Human
uccuuaccagcagagcaccu

SEQ ID NO: 1839832 - RNA, 19 nt, Human
uccuucacagaugggugcu

SEQ ID NO: 1839833 - RNA, 18 nt, Human
uccuucacagaugggugc

SEQ ID NO: 1839834 - RNA, 18 nt, Human
uccuuaccagcagagcac

SEQ ID NO: 1839835 - RNA, 17 nt, Human
uccuuaccagcagagca

SEQ ID NO: 1839836 - RNA, 16 nt, Human
uccuuaccagcagagc

SEQ ID NO: 1839837 - RNA, 22 nt, Human
uccuucaccuuuguccccaccg

SEQ ID NO: 1839838 - RNA, 21 nt, Human
uccuucaccuuuguccccacc

SEQ ID NO: 1839839 - RNA, 16 nt, Human
uccuaaucuucugaac

SEQ ID NO: 1839840 - RNA, 13 nt, Human
uccgaccagacac

SEQ ID NO: 1839841 - RNA, 17 nt, Human
uccgaccagacaccuug

SEQ ID NO: 1839842 - RNA, 18 nt, Human
uccuaauuccacagcugc

SEQ ID NO: 1839843 - RNA, 17 nt, Human
uccuaauuccacagcug

SEQ ID NO: 1839844 - RNA, 16 nt, Human
uccuaauuccacagcu

SEQ ID NO: 1839845 - RNA, 15 nt, Human
uccuaauuccacagc

SEQ ID NO: 1839846 - RNA, 22 nt, Human
uccuaaugaaugcauaaaaugu

SEQ ID NO: 1839847 - RNA, 15 nt, Human
uccuacaagacacag

SEQ ID NO: 1839848 - RNA, 18 nt, Human
uccuacccacccuccuuu

SEQ ID NO: 1839849 - RNA, 17 nt, Human
uccucauuagcauuuug

SEQ ID NO: 1839850 - RNA, 21 nt, Human
uccuauauuguuuucagugua

SEQ ID NO: 1839851 - RNA, 18 nt, Human
uccuauauuguuuucagu

SEQ ID NO: 1839852 - RNA, 17 nt, Human
uccucugcugcuggcug

SEQ ID NO: 1839853 - RNA, 16 nt, Human
uccucugcugcuggcu

SEQ ID NO: 1839854 - RNA, 15 nt, Human
uccucugcugcuggc

SEQ ID NO: 1839855 - RNA, 14 nt, Human
uccucugcugcugg

SEQ ID NO: 1839856 - RNA, 19 nt, Human
uccucuguacagagcccac

SEQ ID NO: 1839857 - RNA, 18 nt, Human
uccucuguacagagccca

SEQ ID NO: 1839858 - RNA, 17 nt, Human
uccucuguacagagccc

SEQ ID NO: 1839859 - RNA, 16 nt, Human
uccucuguacagagcc

SEQ ID NO: 1839860 - RNA, 21 nt, Human
uccucuuccugaauuuuauuu

SEQ ID NO: 1839861 - RNA, 19 nt, Human
uccuccuuuucacaguucu

SEQ ID NO: 1839862 - RNA, 14 nt, Human
uccucuaggagguc

SEQ ID NO: 1839863 - RNA, 20 nt, Human
ucccugccccucccuucaac

SEQ ID NO: 1839864 - RNA, 13 nt, Human
ucccugcacuugc

SEQ ID NO: 1839865 - RNA, 19 nt, Human
ucccugccccucccuucaa

SEQ ID NO: 1839866 - RNA, 14 nt, Human
ucccugcacuugca

SEQ ID NO: 1839867 - RNA, 13 nt, Human
ucccuucccaccu

SEQ ID NO: 1839868 - RNA, 14 nt, Human
ucccuucccaccuc

SEQ ID NO: 1839869 - RNA, 15 nt, Human
ucccuaauaaagcug

SEQ ID NO: 1839870 - RNA, 14 nt, Human
ucccuaauaaagcu

SEQ ID NO: 1839871 - RNA, 16 nt, Human
ucccguggaacguuuu

SEQ ID NO: 1839872 - RNA, 22 nt, Human
ucccguggaacguuuuuccugu

SEQ ID NO: 1839873 - RNA, 23 nt, Human
ucccguggaacguuuuuccuguu

SEQ ID NO: 1839874 - RNA, 20 nt, Human
uccccuguuuguuucugaaa

SEQ ID NO: 1839875 - RNA, 18 nt, Human
uccagguuuaagcuguua

SEQ ID NO: 1839876 - RNA, 17 nt, Human
uccagguuuaagcuguu

SEQ ID NO: 1839877 - RNA, 21 nt, Human
uccccuguuuguuucugaaag

SEQ ID NO: 1839878 - RNA, 13 nt, Human
uccccuucacucc

SEQ ID NO: 1839879 - RNA, 16 nt, Human
ucccuaauaaagcugu

SEQ ID NO: 1839880 - RNA, 16 nt, Human
ucccuauuagagaaga

SEQ ID NO: 1839881 - RNA, 19 nt, Human
ucccuccugggaaugaagc

SEQ ID NO: 1839882 - RNA, 11 nt, Human
ucccuccuggg

SEQ ID NO: 1839883 - RNA, 19 nt, Human
uggugucgggcaugacacg

SEQ ID NO: 1839884 - RNA, 18 nt, Human
uggugucgggcaugacac

SEQ ID NO: 1839885 - RNA, 20 nt, Human
ugguuccccuguucacucua

SEQ ID NO: 1839886 - RNA, 19 nt, Human
ugguuccccuguucacucu

SEQ ID NO: 1839887 - RNA, 18 nt, Human
ugguuccccuguucacuc

SEQ ID NO: 1839888 - RNA, 11 nt, Human
ugguuccccug

SEQ ID NO: 1839889 - RNA, 15 nt, Human
uggugucgggcauga

SEQ ID NO: 1839890 - RNA, 16 nt, Human
uggugucaccugaaga

SEQ ID NO: 1839891 - RNA, 23 nt, Human
ugguuccccuguucacucuacuu

SEQ ID NO: 1839892 - RNA, 23 nt, Human
ugguuccuccccuccuccuggac

SEQ ID NO: 1839893 - RNA, 18 nt, Human
ugguuccuccccuccucc

SEQ ID NO: 1839894 - RNA, 12 nt, Human
ugguuccucccc

SEQ ID NO: 1839895 - RNA, 18 nt, Human
ugguugaugaucuuugca

SEQ ID NO: 1839896 - RNA, 19 nt, Human
uggugguuuucuguucuuu

SEQ ID NO: 1839897 - RNA, 17 nt, Human
uggugguuucagaaaug

SEQ ID NO: 1839898 - RNA, 18 nt, Human
uggugguuucagaaaugu

SEQ ID NO: 1839899 - RNA, 20 nt, Human
ugguggggcugccaggggag

SEQ ID NO: 1839900 - RNA, 18 nt, Human
uggugggggccucggugu

SEQ ID NO: 1839901 - RNA, 16 nt, Human
uggugggggccucggu

SEQ ID NO: 1839902 - RNA, 21 nt, Human
ugguggcccgacagccuggca

SEQ ID NO: 1839903 - RNA, 13 nt, Human
ugguggcuggguu

SEQ ID NO: 1839904 - RNA, 20 nt, Human
uggugcaaugaccuuucaau

SEQ ID NO: 1839905 - RNA, 19 nt, Human
uggugcaaugaccuuucaa

SEQ ID NO: 1839906 - RNA, 14 nt, Human
uggugcaaugaccu

SEQ ID NO: 1839907 - RNA, 19 nt, Human
ugguggcccgacagccugg

SEQ ID NO: 1839908 - RNA, 20 nt, Human
ugguggcagugggagcugcc

SEQ ID NO: 1839909 - RNA, 13 nt, Human
ugguggcaguggg

SEQ ID NO: 1839910 - RNA, 18 nt, Human
ugguggcagugggagcug

SEQ ID NO: 1839911 - RNA, 14 nt, Human
uggugagaggcauc

SEQ ID NO: 1839912 - RNA, 20 nt, Human
uggguacuuguggacacagc

SEQ ID NO: 1839913 - RNA, 23 nt, Human
uggguacuuguggacacagcucu

SEQ ID NO: 1839914 - RNA, 12 nt, Human
uguaaaauggug

SEQ ID NO: 1839915 - RNA, 11 nt, Human
uguaaaauggu

SEQ ID NO: 1839916 - RNA, 21 nt, Human
ugguuuuuaaaaaacugcuga

SEQ ID NO: 1839917 - RNA, 19 nt, Human
ugguuuucuuguguguuua

SEQ ID NO: 1839918 - RNA, 16 nt, Human
ugguuuuucaguuuuc

SEQ ID NO: 1839919 - RNA, 23 nt, Human
ugguuuuuaaaaaacugcugacu

SEQ ID NO: 1839920 - RNA, 20 nt, Human
ugguuguacauauaagugau

SEQ ID NO: 1839921 - RNA, 16 nt, Human
ugguuuucuguucuuu

SEQ ID NO: 1839922 - RNA, 13 nt, Human
ugguugcauccua

SEQ ID NO: 1839923 - RNA, 14 nt, Human
uguaacaagccacc

SEQ ID NO: 1839924 - RNA, 17 nt, Human
uguaacaagccacccca

SEQ ID NO: 1839925 - RNA, 17 nt, Human
uguaaugaaaaccacau

SEQ ID NO: 1839926 - RNA, 13 nt, Human
uguaaugaaaacc

SEQ ID NO: 1839927 - RNA, 12 nt, Human
uguaaugaaaac

SEQ ID NO: 1839928 - RNA, 11 nt, Human
uguaaugaaaa

SEQ ID NO: 1839929 - RNA, 11 nt, Human
uguacagagcc

SEQ ID NO: 1839930 - RNA, 14 nt, Human
uguacagacaacaa

SEQ ID NO: 1839931 - RNA, 14 nt, Human
ugucagugugacug

SEQ ID NO: 1839932 - RNA, 15 nt, Human
ugucagugugacuga

SEQ ID NO: 1839933 - RNA, 19 nt, Human
ugucagugugacugaucuc

SEQ ID NO: 1839934 - RNA, 16 nt, Human
ugucagugugacugau

SEQ ID NO: 1839935 - RNA, 15 nt, Human
ugucacaggcagguc

SEQ ID NO: 1839936 - RNA, 16 nt, Human
ugucacaggcaggucc

SEQ ID NO: 1839937 - RNA, 17 nt, Human
ugucacaggcaggucca

SEQ ID NO: 1839938 - RNA, 21 nt, Human
ugucacaggcagguccagggu

SEQ ID NO: 1839939 - RNA, 13 nt, Human
uguaugcgugugu

SEQ ID NO: 1839940 - RNA, 21 nt, Human
ugucaauuacaggaaguacug

SEQ ID NO: 1839941 - RNA, 13 nt, Human
ugucacacacuuu

SEQ ID NO: 1839942 - RNA, 14 nt, Human
ugucacaggcaggu

SEQ ID NO: 1839943 - RNA, 19 nt, Human
uguauuuuacuaauaaaau

SEQ ID NO: 1839944 - RNA, 13 nt, Human
uguaucugagcag

SEQ ID NO: 1839945 - RNA, 22 nt, Human
uguaugaaagauggcugugccu

SEQ ID NO: 1839946 - RNA, 23 nt, Human
uguacagcaaggagauuuacaac

SEQ ID NO: 1839947 - RNA, 12 nt, Human
uguacagagccc

SEQ ID NO: 1839948 - RNA, 21 nt, Human
uguacagagcccacgccccca

SEQ ID NO: 1839949 - RNA, 13 nt, Human
uguacagagccca

SEQ ID NO: 1839950 - RNA, 22 nt, Human
uguacagcaaggagauuuacaa

SEQ ID NO: 1839951 - RNA, 19 nt, Human
uguccccgcacugggcuug

SEQ ID NO: 1839952 - RNA, 17 nt, Human
uguccccgcacugggcu

SEQ ID NO: 1839953 - RNA, 13 nt, Human
ugucaucucagcu

SEQ ID NO: 1839954 - RNA, 13 nt, Human
uguccccuauccu

SEQ ID NO: 1839955 - RNA, 14 nt, Human
ugucuaaugaaacc

SEQ ID NO: 1839956 - RNA, 22 nt, Human
uguccugccuaaggcugaacuu

SEQ ID NO: 1839957 - RNA, 12 nt, Human
uguccugggagu

SEQ ID NO: 1839958 - RNA, 19 nt, Human
uguccugggagugagcugg

SEQ ID NO: 1839959 - RNA, 20 nt, Human
uguccugggagugagcuggu

SEQ ID NO: 1839960 - RNA, 21 nt, Human
ugucucaaaaaaagaaaaaga

SEQ ID NO: 1839961 - RNA, 18 nt, Human
ugucucaagagggcacug

SEQ ID NO: 1839962 - RNA, 17 nt, Human
ugucucaagagggcacu

SEQ ID NO: 1839963 - RNA, 23 nt, Human
ugucuaguuguuugauucagaca

SEQ ID NO: 1839964 - RNA, 15 nt, Human
ugucuaguuguuuga

SEQ ID NO: 1839965 - RNA, 17 nt, Human
ugucuaggcaggaccug

SEQ ID NO: 1839966 - RNA, 19 nt, Human
ugucuaggcaggaccugug

SEQ ID NO: 1839967 - RNA, 14 nt, Human
ugucuaugggacuc

SEQ ID NO: 1839968 - RNA, 15 nt, Human
ugucuaugggacuca

SEQ ID NO: 1839969 - RNA, 16 nt, Human
ugucuaugggacucaa

SEQ ID NO: 1839970 - RNA, 23 nt, Human
ugucuuuggacccugaggcccag

SEQ ID NO: 1839971 - RNA, 16 nt, Human
ugucuuuucuugcaug

SEQ ID NO: 1839972 - RNA, 20 nt, Human
ugucugaagucacugcacag

SEQ ID NO: 1839973 - RNA, 22 nt, Human
uggccccucagggucccuggug

SEQ ID NO: 1839974 - RNA, 21 nt, Human
uggccccucagggucccuggu

SEQ ID NO: 1839975 - RNA, 20 nt, Human
uggccuagcauacguacaca

SEQ ID NO: 1839976 - RNA, 20 nt, Human
uggccccucagggucccugg

SEQ ID NO: 1839977 - RNA, 13 nt, Human
uggccccucaggg

SEQ ID NO: 1839978 - RNA, 17 nt, Human
uggcagcugcgguccac

SEQ ID NO: 1839979 - RNA, 19 nt, Human
uggcagcugcgguccaccc

SEQ ID NO: 1839980 - RNA, 22 nt, Human
uggccucccaacucaccccagc

SEQ ID NO: 1839981 - RNA, 21 nt, Human
uggccucccaacucaccccag

SEQ ID NO: 1839982 - RNA, 20 nt, Human
uggccucccaacucacccca

SEQ ID NO: 1839983 - RNA, 19 nt, Human
uggccucccaacucacccc

SEQ ID NO: 1839984 - RNA, 14 nt, Human
uggccucccaacuc

SEQ ID NO: 1839985 - RNA, 11 nt, Human
uggccucccaa

SEQ ID NO: 1839986 - RNA, 13 nt, Human
uggccuccaaguc

SEQ ID NO: 1839987 - RNA, 23 nt, Human
uggccuccaaguccacaguggaa

SEQ ID NO: 1839988 - RNA, 23 nt, Human
uggccuagcauacguacacauuu

SEQ ID NO: 1839989 - RNA, 18 nt, Human
uggccucaagugauucuc

SEQ ID NO: 1839990 - RNA, 23 nt, Human
uggccucaagugauucuccugcc

SEQ ID NO: 1839991 - RNA, 14 nt, Human
ugggaaugaagcaa

SEQ ID NO: 1839992 - RNA, 22 nt, Human
uggcuuuucacugcuggcugcc

SEQ ID NO: 1839993 - RNA, 21 nt, Human
uggcuuuucacugcuggcugc

SEQ ID NO: 1839994 - RNA, 19 nt, Human
uggcuuuucacugcuggcu

SEQ ID NO: 1839995 - RNA, 18 nt, Human
uggcuuuucacugcuggc

SEQ ID NO: 1839996 - RNA, 16 nt, Human
uggcuuuucacugcug

SEQ ID NO: 1839997 - RNA, 21 nt, Human
uggcuucccgcucagcccucc

SEQ ID NO: 1839998 - RNA, 20 nt, Human
uggcuucccgcucagcccuc

SEQ ID NO: 1839999 - RNA, 19 nt, Human
uggcuucccgcucagcccu

SEQ ID NO: 1840000 - RNA, 18 nt, Human
uggcuucccgcucagccc

SEQ ID NO: 1840001 - RNA, 22 nt, Human
uggcuucccgcucagcccuccc

SEQ ID NO: 1840002 - RNA, 22 nt, Human
uggcuuccuaaaauucagugga

SEQ ID NO: 1840003 - RNA, 23 nt, Human
uggccuucggccuccauccugag

SEQ ID NO: 1840004 - RNA, 13 nt, Human
uggccucugcacu

SEQ ID NO: 1840005 - RNA, 22 nt, Human
uggccuucggccuccauccuga

SEQ ID NO: 1840006 - RNA, 17 nt, Human
uggcuccagcuggccgg

SEQ ID NO: 1840007 - RNA, 16 nt, Human
uggcugcugaaggcuc

SEQ ID NO: 1840008 - RNA, 14 nt, Human
uggcugcugaaggc

SEQ ID NO: 1840009 - RNA, 13 nt, Human
uggcugcugaagg

SEQ ID NO: 1840010 - RNA, 15 nt, Human
ugggcuucauccucc

SEQ ID NO: 1840011 - RNA, 22 nt, Human
ugggcuucauccuccucagauc

SEQ ID NO: 1840012 - RNA, 22 nt, Human
ugggcuucaguggcagcugcuu

SEQ ID NO: 1840013 - RNA, 21 nt, Human
ugggcuucaguggcagcugcu

SEQ ID NO: 1840014 - RNA, 21 nt, Human
ugggcuugucuguagauuuua

SEQ ID NO: 1840015 - RNA, 17 nt, Human
ugggcuugucuguagau

SEQ ID NO: 1840016 - RNA, 23 nt, Human
ugggcuuggggaccagagcugcc

SEQ ID NO: 1840017 - RNA, 13 nt, Human
uggggcagcuuga

SEQ ID NO: 1840018 - RNA, 17 nt, Human
uggggccaggcuggguc

SEQ ID NO: 1840019 - RNA, 16 nt, Human
ugggggccucagugcc

SEQ ID NO: 1840020 - RNA, 19 nt, Human
uggggggcugaggugggag

SEQ ID NO: 1840021 - RNA, 18 nt, Human
ugggcagagcagagacca

SEQ ID NO: 1840022 - RNA, 17 nt, Human
ugggcagagcagagacc

SEQ ID NO: 1840023 - RNA, 15 nt, Human
ugggcagagcagaga

SEQ ID NO: 1840024 - RNA, 14 nt, Human
ugggcagagcagag

SEQ ID NO: 1840025 - RNA, 14 nt, Human
ugggacagggagga

SEQ ID NO: 1840026 - RNA, 16 nt, Human
ugggaggaucucuuga

SEQ ID NO: 1840027 - RNA, 15 nt, Human
ugggacacccuguga

SEQ ID NO: 1840028 - RNA, 14 nt, Human
ugggacacccugug

SEQ ID NO: 1840029 - RNA, 21 nt, Human
ugggaaugaaugucaguguga

SEQ ID NO: 1840030 - RNA, 16 nt, Human
ugggaaugaaugucag

SEQ ID NO: 1840031 - RNA, 18 nt, Human
ugggaugauuggaggggg

SEQ ID NO: 1840032 - RNA, 23 nt, Human
uggaggggggaggugggauccuc

SEQ ID NO: 1840033 - RNA, 19 nt, Human
uggaucaaauccagccugc

SEQ ID NO: 1840034 - RNA, 21 nt, Human
uggaugcagccucacaguccu

SEQ ID NO: 1840035 - RNA, 13 nt, Human
uggaugcagccuc

SEQ ID NO: 1840036 - RNA, 22 nt, Human
uggaugcagccucacaguccuu

SEQ ID NO: 1840037 - RNA, 21 nt, Human
uggcacuauaauguaagcucu

SEQ ID NO: 1840038 - RNA, 17 nt, Human
uggauuuaacagaaaug

SEQ ID NO: 1840039 - RNA, 15 nt, Human
uggauuuaacagaaa

SEQ ID NO: 1840040 - RNA, 22 nt, Human
uggcacuauaauguaagcucua

SEQ ID NO: 1840041 - RNA, 19 nt, Human
uggcacugcuuccagugag

SEQ ID NO: 1840042 - RNA, 22 nt, Human
uggcacugcuuccagugaggcu

SEQ ID NO: 1840043 - RNA, 23 nt, Human
uggacguguuaugacuccagaau

SEQ ID NO: 1840044 - RNA, 19 nt, Human
uggacguguuaugacucca

SEQ ID NO: 1840045 - RNA, 20 nt, Human
uggacuaacuugucuuugga

SEQ ID NO: 1840046 - RNA, 19 nt, Human
uggacuaacuugucuuugg

SEQ ID NO: 1840047 - RNA, 18 nt, Human
uggacaggcauguucucu

SEQ ID NO: 1840048 - RNA, 22 nt, Human
uggacaggcauguucucugagg

SEQ ID NO: 1840049 - RNA, 23 nt, Human
uggacaggcauguucucugagga

SEQ ID NO: 1840050 - RNA, 17 nt, Human
uggaacacucugagacu

SEQ ID NO: 1840051 - RNA, 15 nt, Human
uggaacacucugaga

SEQ ID NO: 1840052 - RNA, 14 nt, Human
ugcuuguuaacuga

SEQ ID NO: 1840053 - RNA, 16 nt, Human
ugcuuguuaacugagu

SEQ ID NO: 1840054 - RNA, 13 nt, Human
ugcuucuucagag

SEQ ID NO: 1840055 - RNA, 18 nt, Human
ugcuugugaaaggaaaga

SEQ ID NO: 1840056 - RNA, 17 nt, Human
ugcuuuggaaaacccag

SEQ ID NO: 1840057 - RNA, 13 nt, Human
ugcuuuggaaauc

SEQ ID NO: 1840058 - RNA, 19 nt, Human
ugcuuaacuucacauauug

SEQ ID NO: 1840059 - RNA, 13 nt, Human
ugcuuaacuucac

SEQ ID NO: 1840060 - RNA, 14 nt, Human
ugcuuaacuucaca

SEQ ID NO: 1840061 - RNA, 17 nt, Human
ugcuuaacuucacauau

SEQ ID NO: 1840062 - RNA, 18 nt, Human
ugcuuaacuucacauauu

SEQ ID NO: 1840063 - RNA, 23 nt, Human
ugcuuccagugaggcucugcccu

SEQ ID NO: 1840064 - RNA, 22 nt, Human
ugcuuccagugaggcucugccc

SEQ ID NO: 1840065 - RNA, 20 nt, Human
ugaucugaugcaagcaagaa

SEQ ID NO: 1840066 - RNA, 21 nt, Human
ugaucuaggaagacuuuggaa

SEQ ID NO: 1840067 - RNA, 19 nt, Human
ugaucuaggaagacuuugg

SEQ ID NO: 1840068 - RNA, 21 nt, Human
ugauccacccaccucagccuc

SEQ ID NO: 1840069 - RNA, 22 nt, Human
ugauccacccaccucagccucc

SEQ ID NO: 1840070 - RNA, 13 nt, Human
ugaucauccacug

SEQ ID NO: 1840071 - RNA, 24 nt, Human
ugaucauccacugugccaugugcc

SEQ ID NO: 1840072 - RNA, 21 nt, Human
ugauccaagcuggucccacuc

SEQ ID NO: 1840073 - RNA, 15 nt, Human
ugauccacccaccuc

SEQ ID NO: 1840074 - RNA, 16 nt, Human
ugauccacccaccuca

SEQ ID NO: 1840075 - RNA, 20 nt, Human
ugauccacccaccucagccu

SEQ ID NO: 1840076 - RNA, 19 nt, Human
ugauaugcaguuuuccuua

SEQ ID NO: 1840077 - RNA, 22 nt, Human
ugaucacggcucacugcagccu

SEQ ID NO: 1840078 - RNA, 24 nt, Human
ugauaguuguaccgcaaugugacu

SEQ ID NO: 1840079 - RNA, 23 nt, Human
ugauauaaguguguguuuuucau

SEQ ID NO: 1840080 - RNA, 17 nt, Human
ugauauaaguguguguu

SEQ ID NO: 1840081 - RNA, 22 nt, Human
ugaugcuucuucagagacuccu

SEQ ID NO: 1840082 - RNA, 21 nt, Human
ugaugcuucuucagagacucc

SEQ ID NO: 1840083 - RNA, 19 nt, Human
ugaugcuucuucagagacu

SEQ ID NO: 1840084 - RNA, 13 nt, Human
ugauguacaugua

SEQ ID NO: 1840085 - RNA, 21 nt, Human
ugaucuuugcagacaggcaag

SEQ ID NO: 1840086 - RNA, 23 nt, Human
ugaucuuugcagacaggcaagca

SEQ ID NO: 1840087 - RNA, 21 nt, Human
ugaucugaugcaagcaagaaa

SEQ ID NO: 1840088 - RNA, 19 nt, Human
ugaucuuugcagacaggca

SEQ ID NO: 1840089 - RNA, 20 nt, Human
ugaucuuugcagacaggcaa

SEQ ID NO: 1840090 - RNA, 14 nt, Human
ugaugccaugagga

SEQ ID NO: 1840091 - RNA, 22 nt, Human
ugaugaucuuugcagacaggca

SEQ ID NO: 1840092 - RNA, 23 nt, Human
ugaugaucuuugcagacaggcaa

SEQ ID NO: 1840093 - RNA, 20 nt, Human
ugaugaugaaaugaggucag

SEQ ID NO: 1840094 - RNA, 20 nt, Human
ugaggucuguucuuuccaaa

SEQ ID NO: 1840095 - RNA, 14 nt, Human
ugaggucuguucuu

SEQ ID NO: 1840096 - RNA, 15 nt, Human
ugaggucuguucuuu

SEQ ID NO: 1840097 - RNA, 11 nt, Human
ugaggcugggc

SEQ ID NO: 1840098 - RNA, 23 nt, Human
ugaggacuuaaaauauuccugca

SEQ ID NO: 1840099 - RNA, 15 nt, Human
ugaggugcuauguuc

SEQ ID NO: 1840100 - RNA, 16 nt, Human
ugaggugcuauguucu

SEQ ID NO: 1840101 - RNA, 21 nt, Human
ugaguccccuguuuguuucug

SEQ ID NO: 1840102 - RNA, 19 nt, Human
ugagguuucaaaccucccu

SEQ ID NO: 1840103 - RNA, 22 nt, Human
ugaguccuggcaugggaaugaa

SEQ ID NO: 1840104 - RNA, 19 nt, Human
ugaguccuggcaugggaau

SEQ ID NO: 1840105 - RNA, 14 nt, Human
ugagucgaggacag

SEQ ID NO: 1840106 - RNA, 18 nt, Human
ugaguccuggcaugggaa

SEQ ID NO: 1840107 - RNA, 11 nt, Human
ugaguccuggc

SEQ ID NO: 1840108 - RNA, 23 nt, Human
ugaguugauagcacagacccugc

SEQ ID NO: 1840109 - RNA, 21 nt, Human
ugaguugauagcacagacccu

SEQ ID NO: 1840110 - RNA, 15 nt, Human
ugagucgaggacagg

SEQ ID NO: 1840111 - RNA, 16 nt, Human
ugagucgaggacaggg

SEQ ID NO: 1840112 - RNA, 19 nt, Human
ugaguugauucagcucugc

SEQ ID NO: 1840113 - RNA, 16 nt, Human
ugaguugauucagcuc

SEQ ID NO: 1840114 - RNA, 18 nt, Human
ugagucgaggacagggag

SEQ ID NO: 1840115 - RNA, 23 nt, Human
ugauagcacagacccugcccugu

SEQ ID NO: 1840116 - RNA, 22 nt, Human
ugauagcacagacccugcccug

SEQ ID NO: 1840117 - RNA, 18 nt, Human
ugauagguauaaguggug

SEQ ID NO: 1840118 - RNA, 21 nt, Human
ugauagcacagacccugcccu

SEQ ID NO: 1840119 - RNA, 20 nt, Human
ugauagcacagacccugccc

SEQ ID NO: 1840120 - RNA, 18 nt, Human
ugauagcacagacccugc

SEQ ID NO: 1840121 - RNA, 17 nt, Human
ugauagcacagacccug

SEQ ID NO: 1840122 - RNA, 16 nt, Human
ugauagcacagacccu

SEQ ID NO: 1840123 - RNA, 15 nt, Human
ugauagcacagaccc

SEQ ID NO: 1840124 - RNA, 15 nt, Human
ugagcaucaggccag

SEQ ID NO: 1840125 - RNA, 14 nt, Human
ugagcaucaggcca

SEQ ID NO: 1840126 - RNA, 13 nt, Human
ugagccccaaaag

SEQ ID NO: 1840127 - RNA, 13 nt, Human
ugagcaucaggcc

SEQ ID NO: 1840128 - RNA, 14 nt, Human
ugagaugcuagaac

SEQ ID NO: 1840129 - RNA, 16 nt, Human
ugagaugcuagaacuc

SEQ ID NO: 1840130 - RNA, 20 nt, Human
ugagaugcuagaacucccuu

SEQ ID NO: 1840131 - RNA, 13 nt, Human
ugagccucagcau

SEQ ID NO: 1840132 - RNA, 15 nt, Human
ugagccucagcaucc

SEQ ID NO: 1840133 - RNA, 14 nt, Human
ugagacagcucugc

SEQ ID NO: 1840134 - RNA, 16 nt, Human
ugagacagcucugcau

SEQ ID NO: 1840135 - RNA, 12 nt, Human
ugagacccuguc

SEQ ID NO: 1840136 - RNA, 22 nt, Human
ugacuguacuccucccaggcgc

SEQ ID NO: 1840137 - RNA, 18 nt, Human
ugacuguacuccucccag

SEQ ID NO: 1840138 - RNA, 17 nt, Human
ugacuguacuccuccca

SEQ ID NO: 1840139 - RNA, 16 nt, Human
ugacuguacuccuccc

SEQ ID NO: 1840140 - RNA, 13 nt, Human
ugagaaaucuaaa

SEQ ID NO: 1840141 - RNA, 17 nt, Human
ugagaaaucuaaaaaac

SEQ ID NO: 1840142 - RNA, 22 nt, Human
ugagaggcauccaguaucuuga

SEQ ID NO: 1840143 - RNA, 23 nt, Human
ugagaggcauccaguaucuugaa

SEQ ID NO: 1840144 - RNA, 12 nt, Human
ugagacucuguc

SEQ ID NO: 1840145 - RNA, 13 nt, Human
ugagacucugucu

SEQ ID NO: 1840146 - RNA, 14 nt, Human
ugagacucugucuc

SEQ ID NO: 1840147 - RNA, 17 nt, Human
ugagaguagagucacug

SEQ ID NO: 1840148 - RNA, 16 nt, Human
ugacgccaucccagcc

SEQ ID NO: 1840149 - RNA, 15 nt, Human
ugacgccaucccagc

SEQ ID NO: 1840150 - RNA, 14 nt, Human
ugacgccaucccag

SEQ ID NO: 1840151 - RNA, 13 nt, Human
ugacgccauccca

SEQ ID NO: 1840152 - RNA, 22 nt, Human
ugaccuuucaauaggaaaaacu

SEQ ID NO: 1840153 - RNA, 18 nt, Human
ugaccuuucaauaggaaa

SEQ ID NO: 1840154 - RNA, 20 nt, Human
ugacgccaucccagccccaa

SEQ ID NO: 1840155 - RNA, 19 nt, Human
ugacgccaucccagcccca

SEQ ID NO: 1840156 - RNA, 18 nt, Human
ugacgccaucccagcccc

SEQ ID NO: 1840157 - RNA, 17 nt, Human
ugacgccaucccagccc

SEQ ID NO: 1840158 - RNA, 13 nt, Human
ugacugaauuucu

SEQ ID NO: 1840159 - RNA, 14 nt, Human
ugacugaauuucuu

SEQ ID NO: 1840160 - RNA, 15 nt, Human
ugacugaauuucuuu

SEQ ID NO: 1840161 - RNA, 13 nt, Human
ugaccucugcagc

SEQ ID NO: 1840162 - RNA, 16 nt, Human
ugaccucugcagcaau

SEQ ID NO: 1840163 - RNA, 22 nt, Human
ugaccucaggugauccacccac

SEQ ID NO: 1840164 - RNA, 16 nt, Human
ugaccuuucaauagga

SEQ ID NO: 1840165 - RNA, 15 nt, Human
ugaccuuucaauagg

SEQ ID NO: 1840166 - RNA, 14 nt, Human
ugaccuuucaauag

SEQ ID NO: 1840167 - RNA, 18 nt, Human
ugaccucugcagcaauaa

SEQ ID NO: 1840168 - RNA, 21 nt, Human
ugaccucugcagcaauaaagc

SEQ ID NO: 1840169 - RNA, 23 nt, Human
ugaccucugcagcaauaaagcag

SEQ ID NO: 1840170 - RNA, 12 nt, Human
ugaccucugccu

SEQ ID NO: 1840171 - RNA, 22 nt, Human
ugaccauucuccaccugccagg

SEQ ID NO: 1840172 - RNA, 21 nt, Human
ugaccauucuccaccugccag

SEQ ID NO: 1840173 - RNA, 20 nt, Human
ugaccauucuccaccugcca

SEQ ID NO: 1840174 - RNA, 17 nt, Human
ucuugaauuguaaggaa

SEQ ID NO: 1840175 - RNA, 16 nt, Human
ucuugaauaauguaag

SEQ ID NO: 1840176 - RNA, 15 nt, Human
ucuugaacuccuggc

SEQ ID NO: 1840177 - RNA, 21 nt, Human
ugcaccggcuggccuggcccc

SEQ ID NO: 1840178 - RNA, 17 nt, Human
ugcaccuggaauauaua

SEQ ID NO: 1840179 - RNA, 20 nt, Human
ugcaccuggaauauauaacc

SEQ ID NO: 1840180 - RNA, 22 nt, Human
ugcaccuggaauauauaaccag

SEQ ID NO: 1840181 - RNA, 20 nt, Human
ugcaccggcuggccuggccc

SEQ ID NO: 1840182 - RNA, 19 nt, Human
ugcaccggcuggccuggcc

SEQ ID NO: 1840183 - RNA, 18 nt, Human
ugcaccggcuggccuggc

SEQ ID NO: 1840184 - RNA, 17 nt, Human
ugcacagugcaucucag

SEQ ID NO: 1840185 - RNA, 16 nt, Human
ugcacagugcaucuca

SEQ ID NO: 1840186 - RNA, 20 nt, Human
ugcacagaguuguuacauuu

SEQ ID NO: 1840187 - RNA, 15 nt, Human
ugcacagugcaucuc

SEQ ID NO: 1840188 - RNA, 18 nt, Human
ugcacugacauuguuggc

SEQ ID NO: 1840189 - RNA, 21 nt, Human
ugcacugacauuguuggccaa

SEQ ID NO: 1840190 - RNA, 19 nt, Human
ugcagagguccacaacaca

SEQ ID NO: 1840191 - RNA, 19 nt, Human
ugcacaaacagaggccgcc

SEQ ID NO: 1840192 - RNA, 17 nt, Human
ugcacaaacagaggccg

SEQ ID NO: 1840193 - RNA, 20 nt, Human
ugcacaaacagaggccgcca

SEQ ID NO: 1840194 - RNA, 17 nt, Human
ugcacagaguuguuaca

SEQ ID NO: 1840195 - RNA, 17 nt, Human
ugcacaaagcccuucca

SEQ ID NO: 1840196 - RNA, 15 nt, Human
ugcacaaagcccuuc

SEQ ID NO: 1840197 - RNA, 18 nt, Human
ugcacagaguuguuacau

SEQ ID NO: 1840198 - RNA, 19 nt, Human
ugcacagaguuguuacauu

SEQ ID NO: 1840199 - RNA, 16 nt, Human
ugcacaaacagaggcc

SEQ ID NO: 1840200 - RNA, 15 nt, Human
ugcacaaacagaggc

SEQ ID NO: 1840201 - RNA, 13 nt, Human
ugcaauggcagcc

SEQ ID NO: 1840202 - RNA, 14 nt, Human
ugcaauggcagccu

SEQ ID NO: 1840203 - RNA, 15 nt, Human
ugcaauggcagccuu

SEQ ID NO: 1840204 - RNA, 16 nt, Human
ugcaauggcagccuug

SEQ ID NO: 1840205 - RNA, 23 nt, Human
ugcaaugaccuuucaauaggaaa

SEQ ID NO: 1840206 - RNA, 22 nt, Human
ugcaaugaccuuucaauaggaa

SEQ ID NO: 1840207 - RNA, 19 nt, Human
ugcaaugaccuuucaauag

SEQ ID NO: 1840208 - RNA, 17 nt, Human
ugcaaugaccuuucaau

SEQ ID NO: 1840209 - RNA, 16 nt, Human
ugcaaugaccuuucaa

SEQ ID NO: 1840210 - RNA, 13 nt, Human
ugcaaugaccuuu

SEQ ID NO: 1840211 - RNA, 21 nt, Human
ugcaaugacacagucuuggcu

SEQ ID NO: 1840212 - RNA, 22 nt, Human
ugcaaccugauugugucucuug

SEQ ID NO: 1840213 - RNA, 21 nt, Human
ugcaaccuucgccaccugggu

SEQ ID NO: 1840214 - RNA, 18 nt, Human
ugcaaccuucgccaccug

SEQ ID NO: 1840215 - RNA, 18 nt, Human
ugcaacuuuguauaaaag

SEQ ID NO: 1840216 - RNA, 18 nt, Human
ugcaacuuguaaaugugg

SEQ ID NO: 1840217 - RNA, 16 nt, Human
ugcaacuuguaaaugu

SEQ ID NO: 1840218 - RNA, 13 nt, Human
ugcaacuucugcc

SEQ ID NO: 1840219 - RNA, 14 nt, Human
ugcaacuucugccu

SEQ ID NO: 1840220 - RNA, 20 nt, Human
ugcaaccugauugugucucu

SEQ ID NO: 1840221 - RNA, 19 nt, Human
ugcaaccugauugugucuc

SEQ ID NO: 1840222 - RNA, 18 nt, Human
ugcaaccuccgccucuug

SEQ ID NO: 1840223 - RNA, 20 nt, Human
ugcaaccuccgccucuuggg

SEQ ID NO: 1840224 - RNA, 21 nt, Human
ugcaaccuccgccucuugggu

SEQ ID NO: 1840225 - RNA, 13 nt, Human
ugcaaccuccgcc

SEQ ID NO: 1840226 - RNA, 14 nt, Human
ugcaaccuccgccu

SEQ ID NO: 1840227 - RNA, 19 nt, Human
ugcaacaggcugggcuuca

SEQ ID NO: 1840228 - RNA, 20 nt, Human
ugcaacaggcugggcuucag

SEQ ID NO: 1840229 - RNA, 14 nt, Human
ugcaacaggcuggg

SEQ ID NO: 1840230 - RNA, 15 nt, Human
ugcaacaggcugggc

SEQ ID NO: 1840231 - RNA, 16 nt, Human
ugcaacaggcugggcu

SEQ ID NO: 1840232 - RNA, 17 nt, Human
ugcaacaggcugggcuu

SEQ ID NO: 1840233 - RNA, 13 nt, Human
ugauuuucauugc

SEQ ID NO: 1840234 - RNA, 15 nt, Human
ugauuuucauugcug

SEQ ID NO: 1840235 - RNA, 19 nt, Human
ugauuuuuaaagaaaaguu

SEQ ID NO: 1840236 - RNA, 17 nt, Human
ugauuuugcuguagaag

SEQ ID NO: 1840237 - RNA, 19 nt, Human
ugauuuugcuguagaagau

SEQ ID NO: 1840238 - RNA, 14 nt, Human
ugauuuugcuguag

SEQ ID NO: 1840239 - RNA, 16 nt, Human
ugauuuugcuguagaa

SEQ ID NO: 1840240 - RNA, 20 nt, Human
ugauuuuuuuuuccuucagu

SEQ ID NO: 1840241 - RNA, 19 nt, Human
ugauuuuuuuuuccuucag

SEQ ID NO: 1840242 - RNA, 17 nt, Human
ugauuuuuuuuuccuuc

SEQ ID NO: 1840243 - RNA, 16 nt, Human
ugauuuuuuuuuccuu

SEQ ID NO: 1840244 - RNA, 13 nt, Human
ugauuuuuuucca

SEQ ID NO: 1840245 - RNA, 16 nt, Human
ugauuuuuuuuuuuca

SEQ ID NO: 1840246 - RNA, 23 nt, Human
ugauuuuuuuuuccuucagugcc

SEQ ID NO: 1840247 - RNA, 22 nt, Human
ugauuuuuuuuuccuucagugc

SEQ ID NO: 1840248 - RNA, 13 nt, Human
ugccucuuccucc

SEQ ID NO: 1840249 - RNA, 21 nt, Human
ugccucuucucuacucuaggg

SEQ ID NO: 1840250 - RNA, 13 nt, Human
ugccugcccaggc

SEQ ID NO: 1840251 - RNA, 17 nt, Human
ugccugguggcagcugc

SEQ ID NO: 1840252 - RNA, 18 nt, Human
ugccugguggcagcugcg

SEQ ID NO: 1840253 - RNA, 19 nt, Human
ugccugguggcagcugcgg

SEQ ID NO: 1840254 - RNA, 13 nt, Human
ugccucugggacu

SEQ ID NO: 1840255 - RNA, 18 nt, Human
ugccucugccugucuccc

SEQ ID NO: 1840256 - RNA, 14 nt, Human
ugccucugccuguc

SEQ ID NO: 1840257 - RNA, 13 nt, Human
ugccucugccugu

SEQ ID NO: 1840258 - RNA, 20 nt, Human
ugccuccuuugugaggaagc

SEQ ID NO: 1840259 - RNA, 21 nt, Human
ugccuccuuugugaggaagcc

SEQ ID NO: 1840260 - RNA, 22 nt, Human
ugccuccuuugugaggaagccg

SEQ ID NO: 1840261 - RNA, 23 nt, Human
ugcccugcccaccuggccucugc

SEQ ID NO: 1840262 - RNA, 22 nt, Human
ugcccugcccaccuggccucug

SEQ ID NO: 1840263 - RNA, 17 nt, Human
ugcccuaaaguguauuu

SEQ ID NO: 1840264 - RNA, 19 nt, Human
ugcccuaaaguguauuuuu

SEQ ID NO: 1840265 - RNA, 21 nt, Human
ugcccugcccaccuggccucu

SEQ ID NO: 1840266 - RNA, 23 nt, Human
ugcccugcugagucccaggcuga

SEQ ID NO: 1840267 - RNA, 22 nt, Human
ugcccugcugagucccaggcug

SEQ ID NO: 1840268 - RNA, 18 nt, Human
ugcccugcugagucccag

SEQ ID NO: 1840269 - RNA, 19 nt, Human
ugcccugcgggucacagga

SEQ ID NO: 1840270 - RNA, 19 nt, Human
ugccgucuaccugaggggc

SEQ ID NO: 1840271 - RNA, 17 nt, Human
ugccgucuaccugaggg

SEQ ID NO: 1840272 - RNA, 16 nt, Human
ugccgucuaccugagg

SEQ ID NO: 1840273 - RNA, 15 nt, Human
ugccgucuaccugag

SEQ ID NO: 1840274 - RNA, 15 nt, Human
ugcccugguuuccug

SEQ ID NO: 1840275 - RNA, 18 nt, Human
ugcccuggugcugccaca

SEQ ID NO: 1840276 - RNA, 20 nt, Human
ugcccuggugcugccacacu

SEQ ID NO: 1840277 - RNA, 21 nt, Human
ugcccuggugcugccacacuu

SEQ ID NO: 1840278 - RNA, 18 nt, Human
ugcccuggauccaucagg

SEQ ID NO: 1840279 - RNA, 20 nt, Human
ugccaugaggaacaaggcaa

SEQ ID NO: 1840280 - RNA, 23 nt, Human
ugccaugaggaacaaggcaaggc

SEQ ID NO: 1840281 - RNA, 14 nt, Human
ugccaugugccagg

SEQ ID NO: 1840282 - RNA, 15 nt, Human
ugccaugugccaggu

SEQ ID NO: 1840283 - RNA, 13 nt, Human
ugcccacucccug

SEQ ID NO: 1840284 - RNA, 18 nt, Human
ugcccacgcuggagugca

SEQ ID NO: 1840285 - RNA, 12 nt, Human
ugccauguuggc

SEQ ID NO: 1840286 - RNA, 15 nt, Human
ugccauguuggccag

SEQ ID NO: 1840287 - RNA, 20 nt, Human
ugcccaccuggccucugcac

SEQ ID NO: 1840288 - RNA, 16 nt, Human
ugccauguuggccagg

SEQ ID NO: 1840289 - RNA, 19 nt, Human
ugccaggaagccagcaggc

SEQ ID NO: 1840290 - RNA, 18 nt, Human
ugccaggaagccagcagg

SEQ ID NO: 1840291 - RNA, 16 nt, Human
ugccaggaagccagca

SEQ ID NO: 1840292 - RNA, 12 nt, Human
ugccaggaagcc

SEQ ID NO: 1840293 - RNA, 17 nt, Human
ugccagguuuuuggucu

SEQ ID NO: 1840294 - RNA, 15 nt, Human
ugccauccagguuca

SEQ ID NO: 1840295 - RNA, 12 nt, Human
ugccauccaggu

SEQ ID NO: 1840296 - RNA, 12 nt, Human
ugcauuaucuag

SEQ ID NO: 1840297 - RNA, 17 nt, Human
ugcauuaucuagauacu

SEQ ID NO: 1840298 - RNA, 18 nt, Human
ugcauuaucuagauacug

SEQ ID NO: 1840299 - RNA, 15 nt, Human
ugccaccacgcccgg

SEQ ID NO: 1840300 - RNA, 14 nt, Human
ugcauccuccgccu

SEQ ID NO: 1840301 - RNA, 19 nt, Human
ugcagauaaacaguaguga

SEQ ID NO: 1840302 - RNA, 15 nt, Human
ugcauccuccgccuc

SEQ ID NO: 1840303 - RNA, 17 nt, Human
ugcaugguuuagaaagc

SEQ ID NO: 1840304 - RNA, 15 nt, Human
ugcauguuugugauu

SEQ ID NO: 1840305 - RNA, 14 nt, Human
uuuuaaaauccacu

SEQ ID NO: 1840306 - RNA, 23 nt, Human
uuuuaaaauccacuuuaucuuga

SEQ ID NO: 1840307 - RNA, 20 nt, Human
uuuuaaacccuauugguaaa

SEQ ID NO: 1840308 - RNA, 22 nt, Human
uuuguuaguaugaggcauuugu

SEQ ID NO: 1840309 - RNA, 15 nt, Human
uuuguugucagcuga

SEQ ID NO: 1840310 - RNA, 14 nt, Human
uuuguauuuuuagu

SEQ ID NO: 1840311 - RNA, 17 nt, Human
uuuggucuacacugugc

SEQ ID NO: 1840312 - RNA, 15 nt, Human
uuuggucaacacuaa

SEQ ID NO: 1840313 - RNA, 18 nt, Human
uuugcauaacguauaaaa

SEQ ID NO: 1840314 - RNA, 13 nt, Human
uuuggacccugag

SEQ ID NO: 1840315 - RNA, 12 nt, Human
uuuggaaaauaa

SEQ ID NO: 1840316 - RNA, 15 nt, Human
uuuccguuaaaauac

SEQ ID NO: 1840317 - RNA, 17 nt, Human
uuuccguuaaaauacca

SEQ ID NO: 1840318 - RNA, 21 nt, Human
uuugagugccuuacacaaugg

SEQ ID NO: 1840319 - RNA, 13 nt, Human
uuuucuucucccu

SEQ ID NO: 1840320 - RNA, 22 nt, Human
uuuucuuguguguuuauuguca

SEQ ID NO: 1840321 - RNA, 16 nt, Human
uuuucuuucagccaag

SEQ ID NO: 1840322 - RNA, 23 nt, Human
uuuucuacucgaguuacagacaa

SEQ ID NO: 1840323 - RNA, 22 nt, Human
uuuucuacucgaguuacagaca

SEQ ID NO: 1840324 - RNA, 20 nt, Human
uuuucuacucgaguuacaga

SEQ ID NO: 1840325 - RNA, 13 nt, Human
uuuucuacucgag

SEQ ID NO: 1840326 - RNA, 15 nt, Human
uuuucagauauaaaa

SEQ ID NO: 1840327 - RNA, 22 nt, Human
uuuucccuauuagagaagagau

SEQ ID NO: 1840328 - RNA, 18 nt, Human
uuuucccuauuagagaag

SEQ ID NO: 1840329 - RNA, 21 nt, Human
uuuucaaaauuguuacaaauu

SEQ ID NO: 1840330 - RNA, 13 nt, Human
uuuuauacauaaa

SEQ ID NO: 1840331 - RNA, 21 nt, Human
uuuuauacauaaacaagacca

SEQ ID NO: 1840332 - RNA, 17 nt, Human
uuuucaaaauaaaaaug

SEQ ID NO: 1840333 - RNA, 18 nt, Human
uuuuauuuuuagacagag

SEQ ID NO: 1840334 - RNA, 19 nt, Human
uuuuaucgucacugcuuaa

SEQ ID NO: 1840335 - RNA, 15 nt, Human
uuuuacuaauagaca

SEQ ID NO: 1840336 - RNA, 19 nt, Human
uuuuacguccaucucuugu

SEQ ID NO: 1840337 - RNA, 17 nt, Human
uuuuacaauaaaaucuu

SEQ ID NO: 1840338 - RNA, 19 nt, Human
uuuuacaaaaaagaaaaga

SEQ ID NO: 1840339 - RNA, 21 nt, Human
uuuuaaaguaacccuacaaaa

SEQ ID NO: 1840340 - RNA, 12 nt, Human
uuuuuaagaaaa

SEQ ID NO: 1840341 - RNA, 23 nt, Human
uuuuuaagaaaaaggaugcacag

SEQ ID NO: 1840342 - RNA, 16 nt, Human
uuuuuaagugcugcau

SEQ ID NO: 1840343 - RNA, 17 nt, Human
uuuuuaagugcugcauu

SEQ ID NO: 1840344 - RNA, 18 nt, Human
uuuuuaagugcugcauuu

SEQ ID NO: 1840345 - RNA, 19 nt, Human
uuuuuaagugcugcauuua

SEQ ID NO: 1840346 - RNA, 22 nt, Human
uuuuuaagugcugcauuuaaaa

SEQ ID NO: 1840347 - RNA, 23 nt, Human
uuuuuaagugcugcauuuaaaag

SEQ ID NO: 1840348 - RNA, 13 nt, Human
uuuuuaaucuuua

SEQ ID NO: 1840349 - RNA, 18 nt, Human
uuuuuaaguuacacauuu

SEQ ID NO: 1840350 - RNA, 17 nt, Human
uuuuuaauaaagacagg

SEQ ID NO: 1840351 - RNA, 20 nt, Human
uuuuuaauaaagacaggguu

SEQ ID NO: 1840352 - RNA, 12 nt, Human
uuuuucaguuuu

SEQ ID NO: 1840353 - RNA, 15 nt, Human
uuuuucaguuuucag

SEQ ID NO: 1840354 - RNA, 12 nt, Human
uuuuuuuuaaga

SEQ ID NO: 1840355 - RNA, 13 nt, Human
uuuuuuccacuua

SEQ ID NO: 1840356 - RNA, 11 nt, Human
uuuuuuuacua

SEQ ID NO: 1840357 - RNA, 13 nt, Human
uuuuuuuugacaa

SEQ ID NO: 1840358 - RNA, 15 nt, Human
uuguaaauuaacuuu

SEQ ID NO: 1840359 - RNA, 16 nt, Human
uuguaaauuaacuuuu

SEQ ID NO: 1840360 - RNA, 18 nt, Human
uuguaaauuaacuuuuau

SEQ ID NO: 1840361 - RNA, 23 nt, Human
uuguaaauuaacuuuuauaaacu

SEQ ID NO: 1840362 - RNA, 18 nt, Human
uuguacauaaugcgugca

SEQ ID NO: 1840363 - RNA, 21 nt, Human
uuguaaaugugguaaagaguu

SEQ ID NO: 1840364 - RNA, 16 nt, Human
uuguaaaugugguaaa

SEQ ID NO: 1840365 - RNA, 17 nt, Human
uuguaaauagcucaggu

SEQ ID NO: 1840366 - RNA, 21 nt, Human
uuggugaacauugcaauagaa

SEQ ID NO: 1840367 - RNA, 22 nt, Human
uuguaaaaauuaaaaguuaugg

SEQ ID NO: 1840368 - RNA, 16 nt, Human
uuggucugugagaugc

SEQ ID NO: 1840369 - RNA, 13 nt, Human
uuggucuguguga

SEQ ID NO: 1840370 - RNA, 19 nt, Human
uugcacguauuuuaauagc

SEQ ID NO: 1840371 - RNA, 22 nt, Human
uuggguucaagcgauucuucug

SEQ ID NO: 1840372 - RNA, 22 nt, Human
uugucuuaaaaaguggaaaaau

SEQ ID NO: 1840373 - RNA, 20 nt, Human
uugugaaaggaaagaggcuc

SEQ ID NO: 1840374 - RNA, 16 nt, Human
uugugauuuuuguaau

SEQ ID NO: 1840375 - RNA, 17 nt, Human
uugugauuuuuguaauu

SEQ ID NO: 1840376 - RNA, 12 nt, Human
uugugauuuuug

SEQ ID NO: 1840377 - RNA, 14 nt, Human
uugugaaaugaugg

SEQ ID NO: 1840378 - RNA, 20 nt, Human
uugucugaagucacugcaca

SEQ ID NO: 1840379 - RNA, 15 nt, Human
uugucuuaaaaagug

SEQ ID NO: 1840380 - RNA, 21 nt, Human
uugucugaagucacugcacag

SEQ ID NO: 1840381 - RNA, 21 nt, Human
uuguauucagaguugaugguu

SEQ ID NO: 1840382 - RNA, 15 nt, Human
uuguauucucuccug

SEQ ID NO: 1840383 - RNA, 16 nt, Human
uuguauucucuccugu

SEQ ID NO: 1840384 - RNA, 19 nt, Human
uuguauucucuccuguacc

SEQ ID NO: 1840385 - RNA, 17 nt, Human
uugugcauuaucuagau

SEQ ID NO: 1840386 - RNA, 22 nt, Human
uugugcauuaucuagauacugu

SEQ ID NO: 1840387 - RNA, 23 nt, Human
uugugcauuaucuagauacugua

SEQ ID NO: 1840388 - RNA, 12 nt, Human
uugugcauuugg

SEQ ID NO: 1840389 - RNA, 12 nt, Human
uugugccccugc

SEQ ID NO: 1840390 - RNA, 21 nt, Human
uugugccagaaugcuuuagga

SEQ ID NO: 1840391 - RNA, 16 nt, Human
uugugccagaaugcuu

SEQ ID NO: 1840392 - RNA, 17 nt, Human
uuguggacacagcucuu

SEQ ID NO: 1840393 - RNA, 21 nt, Human
uuguggaaaaugaaaauuagg

SEQ ID NO: 1840394 - RNA, 16 nt, Human
uuguggacacagcucu

SEQ ID NO: 1840395 - RNA, 20 nt, Human
uuguggauuuaacagaaaug

SEQ ID NO: 1840396 - RNA, 21 nt, Human
uuguggauuuaacagaaaugu

SEQ ID NO: 1840397 - RNA, 22 nt, Human
uuguggauuuaacagaaaugua

SEQ ID NO: 1840398 - RNA, 23 nt, Human
uuguggauuuaacagaaauguac

SEQ ID NO: 1840399 - RNA, 21 nt, Human
uuguguuuauauauaagccaa

SEQ ID NO: 1840400 - RNA, 19 nt, Human
uuguuaguaugaggcauuu

SEQ ID NO: 1840401 - RNA, 21 nt, Human
uuguuaguaugaggcauuugu

SEQ ID NO: 1840402 - RNA, 14 nt, Human
uuguuacauuuuua

SEQ ID NO: 1840403 - RNA, 21 nt, Human
uuguuaauaaaaguacauguu

SEQ ID NO: 1840404 - RNA, 14 nt, Human
uuguuaauaaaagu

SEQ ID NO: 1840405 - RNA, 19 nt, Human
uuguuaauaaaaguacaug

SEQ ID NO: 1840406 - RNA, 19 nt, Human
uuguguuucuuuaguuuuu

SEQ ID NO: 1840407 - RNA, 20 nt, Human
uuguuagugugucuuagugu

SEQ ID NO: 1840408 - RNA, 22 nt, Human
uuguuaguaugaggcauuuguu

SEQ ID NO: 1840409 - RNA, 18 nt, Human
uuuaagaaaaaggaugca

SEQ ID NO: 1840410 - RNA, 22 nt, Human
uuuaagaaaaaggaugcacaga

SEQ ID NO: 1840411 - RNA, 19 nt, Human
uuuaagacauuuuuggaag

SEQ ID NO: 1840412 - RNA, 20 nt, Human
uuuaagacgaaacauuuguu

SEQ ID NO: 1840413 - RNA, 18 nt, Human
uuuaaguuacacauuuuu

SEQ ID NO: 1840414 - RNA, 18 nt, Human
uuuaacagaaauguacag

SEQ ID NO: 1840415 - RNA, 18 nt, Human
uuguuuggagacagaguc

SEQ ID NO: 1840416 - RNA, 23 nt, Human
uuuaacaacuaugauuuggaaaa

SEQ ID NO: 1840417 - RNA, 19 nt, Human
uuuaacucuauaauguguu

SEQ ID NO: 1840418 - RNA, 23 nt, Human
uuuauaaaaauaaaaaacacugg

SEQ ID NO: 1840419 - RNA, 21 nt, Human
uuuauaaaaauaaaaaacacu

SEQ ID NO: 1840420 - RNA, 12 nt, Human
uuuagacagagu

SEQ ID NO: 1840421 - RNA, 22 nt, Human
uuuacuucuuauacauuugaua

SEQ ID NO: 1840422 - RNA, 19 nt, Human
uuuacuucuuauacauuug

SEQ ID NO: 1840423 - RNA, 14 nt, Human
uuuagaaauauaau

SEQ ID NO: 1840424 - RNA, 22 nt, Human
uuuaauagcgucauaacuagaa

SEQ ID NO: 1840425 - RNA, 21 nt, Human
uuuaauagcgucauaacuaga

SEQ ID NO: 1840426 - RNA, 16 nt, Human
uuuacagcugccugca

SEQ ID NO: 1840427 - RNA, 15 nt, Human
uuuacagcugccugc

SEQ ID NO: 1840428 - RNA, 14 nt, Human
uuucagauauaaaa

SEQ ID NO: 1840429 - RNA, 16 nt, Human
uuucagauauaaaaga

SEQ ID NO: 1840430 - RNA, 18 nt, Human
uuucagauauaaaagacu

SEQ ID NO: 1840431 - RNA, 16 nt, Human
uuucacaaccuucugu

SEQ ID NO: 1840432 - RNA, 22 nt, Human
uuucacaaccuucuguggcuca

SEQ ID NO: 1840433 - RNA, 19 nt, Human
uuucaauaggaaaaacuga

SEQ ID NO: 1840434 - RNA, 17 nt, Human
uuucaauaggaaaaacu

SEQ ID NO: 1840435 - RNA, 14 nt, Human
uuucaauaggaaaa

SEQ ID NO: 1840436 - RNA, 12 nt, Human
uuucaauaggaa

SEQ ID NO: 1840437 - RNA, 18 nt, Human
uuucauuuaggugaggaa

SEQ ID NO: 1840438 - RNA, 14 nt, Human
uuucauuuagguga

SEQ ID NO: 1840439 - RNA, 23 nt, Human
uuucagcaccuacaguguacagu

SEQ ID NO: 1840440 - RNA, 14 nt, Human
uuucaguguacaug

SEQ ID NO: 1840441 - RNA, 13 nt, Human
uuucaguguacau

SEQ ID NO: 1840442 - RNA, 19 nt, Human
uuuauuuaguuccuugagu

SEQ ID NO: 1840443 - RNA, 20 nt, Human
uuucaacgcagcccugcuuu

SEQ ID NO: 1840444 - RNA, 16 nt, Human
uuucaacgcagcccug

SEQ ID NO: 1840445 - RNA, 15 nt, Human
uuucaacgcagcccu

SEQ ID NO: 1840446 - RNA, 21 nt, Human
uuucaacgcagcccugcuuug

SEQ ID NO: 1840447 - RNA, 14 nt, Human
uuuauggcuuuugu

SEQ ID NO: 1840448 - RNA, 16 nt, Human
uuuauggcuuuugugc

SEQ ID NO: 1840449 - RNA, 13 nt, Human
uuuauuaugcaug

SEQ ID NO: 1840450 - RNA, 13 nt, Human
uuuauuauggcac

SEQ ID NO: 1840451 - RNA, 16 nt, Human
uucucuccagccccug

SEQ ID NO: 1840452 - RNA, 15 nt, Human
uucucuccagccccu

SEQ ID NO: 1840453 - RNA, 14 nt, Human
uucucuccuguacc

SEQ ID NO: 1840454 - RNA, 18 nt, Human
uucucuccuguaccucuu

SEQ ID NO: 1840455 - RNA, 14 nt, Human
uucucuccagcccc

SEQ ID NO: 1840456 - RNA, 13 nt, Human
uucucuccagccc

SEQ ID NO: 1840457 - RNA, 22 nt, Human
uucucuccuguaccucuugagc

SEQ ID NO: 1840458 - RNA, 19 nt, Human
uucucuccuguaccucuug

SEQ ID NO: 1840459 - RNA, 12 nt, Human
uucucugcccuc

SEQ ID NO: 1840460 - RNA, 11 nt, Human
uucucugcccu

SEQ ID NO: 1840461 - RNA, 14 nt, Human
uucucugaggacac

SEQ ID NO: 1840462 - RNA, 20 nt, Human
uucucugaggacacuaacca

SEQ ID NO: 1840463 - RNA, 15 nt, Human
uucuccaccugccag

SEQ ID NO: 1840464 - RNA, 14 nt, Human
uucuccaccugcca

SEQ ID NO: 1840465 - RNA, 12 nt, Human
uucuccaccugc

SEQ ID NO: 1840466 - RNA, 21 nt, Human
uucuccaccucccacaaagga

SEQ ID NO: 1840467 - RNA, 18 nt, Human
uucuccaccugccaggga

SEQ ID NO: 1840468 - RNA, 16 nt, Human
uucuccaccugccagg

SEQ ID NO: 1840469 - RNA, 20 nt, Human
uucuccaccugccagggaca

SEQ ID NO: 1840470 - RNA, 12 nt, Human
uucuccacugga

SEQ ID NO: 1840471 - RNA, 20 nt, Human
uucucauuugccaauaauaa

SEQ ID NO: 1840472 - RNA, 16 nt, Human
uucuccacccugcucu

SEQ ID NO: 1840473 - RNA, 19 nt, Human
uucugauccuaguuccacc

SEQ ID NO: 1840474 - RNA, 22 nt, Human
uucugauaugcaguuuuccuua

SEQ ID NO: 1840475 - RNA, 19 nt, Human
uucugcucacauaucuguc

SEQ ID NO: 1840476 - RNA, 21 nt, Human
uucugacccugcuucaaauau

SEQ ID NO: 1840477 - RNA, 18 nt, Human
uucugacccugcuucaaa

SEQ ID NO: 1840478 - RNA, 22 nt, Human
uucugacccaugcugcccugug

SEQ ID NO: 1840479 - RNA, 23 nt, Human
uucugacccaugcugcccuguga

SEQ ID NO: 1840480 - RNA, 17 nt, Human
uucucugcccuccaaga

SEQ ID NO: 1840481 - RNA, 16 nt, Human
uucucugcccuccaag

SEQ ID NO: 1840482 - RNA, 22 nt, Human
uucuacucgaguuacagacaaa

SEQ ID NO: 1840483 - RNA, 14 nt, Human
uucuauagcuuuuc

SEQ ID NO: 1840484 - RNA, 13 nt, Human
uucuacgccaggg

SEQ ID NO: 1840485 - RNA, 13 nt, Human
uucuacuauuuau

SEQ ID NO: 1840486 - RNA, 14 nt, Human
uucuacccaggugc

SEQ ID NO: 1840487 - RNA, 20 nt, Human
uucuacccagcgagcccugg

SEQ ID NO: 1840488 - RNA, 21 nt, Human
uucuacccagcgagcccuggu

SEQ ID NO: 1840489 - RNA, 23 nt, Human
uucuaaugugugaaucagagcac

SEQ ID NO: 1840490 - RNA, 12 nt, Human
uucuacccagcg

SEQ ID NO: 1840491 - RNA, 19 nt, Human
uucuacccagcgagcccug

SEQ ID NO: 1840492 - RNA, 15 nt, Human
uuccugaggcugggc

SEQ ID NO: 1840493 - RNA, 20 nt, Human
uuccugaggcugggcucccu

SEQ ID NO: 1840494 - RNA, 16 nt, Human
uuccauggccucuuca

SEQ ID NO: 1840495 - RNA, 12 nt, Human
uuccauggccuc

SEQ ID NO: 1840496 - RNA, 16 nt, Human
uuccaugucgccucug

SEQ ID NO: 1840497 - RNA, 21 nt, Human
uuccuugaguugauucagcuc

SEQ ID NO: 1840498 - RNA, 18 nt, Human
uucggugagcuacaaaug

SEQ ID NO: 1840499 - RNA, 14 nt, Human
uucuuaguugcugu

SEQ ID NO: 1840500 - RNA, 15 nt, Human
uucuuaguugcugua

SEQ ID NO: 1840501 - RNA, 23 nt, Human
uucuuaguugcuguaugucucgu

SEQ ID NO: 1840502 - RNA, 18 nt, Human
uucuguauuuuguuuuug

SEQ ID NO: 1840503 - RNA, 18 nt, Human
uucugcuuuccucuuccu

SEQ ID NO: 1840504 - RNA, 14 nt, Human
uucugcuucagccu

SEQ ID NO: 1840505 - RNA, 15 nt, Human
uucugcuucagccuc

SEQ ID NO: 1840506 - RNA, 16 nt, Human
uucugcuucagccucc

SEQ ID NO: 1840507 - RNA, 19 nt, Human
uucugcuucagccucccga

SEQ ID NO: 1840508 - RNA, 23 nt, Human
uugaaaacacuguucucugcccu

SEQ ID NO: 1840509 - RNA, 21 nt, Human
uucuuuccaaaguacacuguu

SEQ ID NO: 1840510 - RNA, 20 nt, Human
uugaaaaaccauuuugcugu

SEQ ID NO: 1840511 - RNA, 15 nt, Human
uugaacuccuggccu

SEQ ID NO: 1840512 - RNA, 16 nt, Human
uugaacuccuggccuc

SEQ ID NO: 1840513 - RNA, 12 nt, Human
uucuuucagcca

SEQ ID NO: 1840514 - RNA, 14 nt, Human
uucuuuccaaagua

SEQ ID NO: 1840515 - RNA, 13 nt, Human
uucuuccucccuc

SEQ ID NO: 1840516 - RNA, 21 nt, Human
uucuuguguguuuauugucaa

SEQ ID NO: 1840517 - RNA, 21 nt, Human
uucuuauacauuugauaaagu

SEQ ID NO: 1840518 - RNA, 21 nt, Human
uucuuccacaagagcccaggc

SEQ ID NO: 1840519 - RNA, 21 nt, Human
uugcaaaguaucccuacugua

SEQ ID NO: 1840520 - RNA, 17 nt, Human
uugaugacccccaacca

SEQ ID NO: 1840521 - RNA, 16 nt, Human
uugaugaucuuugcag

SEQ ID NO: 1840522 - RNA, 16 nt, Human
uugaggguugggcugg

SEQ ID NO: 1840523 - RNA, 14 nt, Human
uugagccugggagg

SEQ ID NO: 1840524 - RNA, 13 nt, Human
uugaggguugggc

SEQ ID NO: 1840525 - RNA, 11 nt, Human
uugagccuggg

SEQ ID NO: 1840526 - RNA, 23 nt, Human
uugauauccucuuugagugaagc

SEQ ID NO: 1840527 - RNA, 19 nt, Human
uugacgccaucccagcccc

SEQ ID NO: 1840528 - RNA, 18 nt, Human
uugacgccaucccagccc

SEQ ID NO: 1840529 - RNA, 17 nt, Human
uugacgccaucccagcc

SEQ ID NO: 1840530 - RNA, 16 nt, Human
uugaccucugcagcaa

SEQ ID NO: 1840531 - RNA, 20 nt, Human
uugacgccaucccagcccca

SEQ ID NO: 1840532 - RNA, 14 nt, Human
uugaccucugcagc

SEQ ID NO: 1840533 - RNA, 15 nt, Human
uugaccucugcagca

SEQ ID NO: 1840534 - RNA, 21 nt, Human
uugaccucaggugauccaccc

SEQ ID NO: 1840535 - RNA, 17 nt, Human
uugacccacaagaaaug

SEQ ID NO: 1840536 - RNA, 17 nt, Human
uugaccgugaggccaga

SEQ ID NO: 1840537 - RNA, 14 nt, Human
uugacccacaagaa

SEQ ID NO: 1840538 - RNA, 14 nt, Human
uugaauuguaagga

SEQ ID NO: 1840539 - RNA, 13 nt, Human
uugaacuuugacc

SEQ ID NO: 1840540 - RNA, 17 nt, Human
uugaacuccugaccuca

SEQ ID NO: 1840541 - RNA, 18 nt, Human
uugaacuggguacuugug

SEQ ID NO: 1840542 - RNA, 12 nt, Human
uucagauauaaa

SEQ ID NO: 1840543 - RNA, 14 nt, Human
uucagcucacugca

SEQ ID NO: 1840544 - RNA, 19 nt, Human
uucagauauaaaagacuga

SEQ ID NO: 1840545 - RNA, 14 nt, Human
uucagauauaaaag

SEQ ID NO: 1840546 - RNA, 15 nt, Human
uucagauauaaaaga

SEQ ID NO: 1840547 - RNA, 17 nt, Human
uucagacagcugccugg

SEQ ID NO: 1840548 - RNA, 16 nt, Human
uucagacagcugccug

SEQ ID NO: 1840549 - RNA, 15 nt, Human
uucagacagcugccu

SEQ ID NO: 1840550 - RNA, 14 nt, Human
uucagacagcugcc

SEQ ID NO: 1840551 - RNA, 17 nt, Human
uucacggaagagccuug

SEQ ID NO: 1840552 - RNA, 22 nt, Human
uucaccuuuguccccaccgcag

SEQ ID NO: 1840553 - RNA, 13 nt, Human
uucacggaagagc

SEQ ID NO: 1840554 - RNA, 22 nt, Human
uucacaagacccaaaaggcaga

SEQ ID NO: 1840555 - RNA, 21 nt, Human
uucacaaccuucuguggcuca

SEQ ID NO: 1840556 - RNA, 13 nt, Human
uucacccuuuucu

SEQ ID NO: 1840557 - RNA, 20 nt, Human
uucaccuuuguccccaccgc

SEQ ID NO: 1840558 - RNA, 19 nt, Human
uucaccuuuguccccaccg

SEQ ID NO: 1840559 - RNA, 14 nt, Human
uucaccuuuguccc

SEQ ID NO: 1840560 - RNA, 22 nt, Human
uucaauaggaaaaacugauuuu

SEQ ID NO: 1840561 - RNA, 21 nt, Human
uucaauaggaaaaacugauuu

SEQ ID NO: 1840562 - RNA, 15 nt, Human
uucaaccauucccca

SEQ ID NO: 1840563 - RNA, 18 nt, Human
uucaaaugcuguaacuuu

SEQ ID NO: 1840564 - RNA, 22 nt, Human
uuauuuuggaaaauaaauuauu

SEQ ID NO: 1840565 - RNA, 17 nt, Human
uuauuuuaauucaguug

SEQ ID NO: 1840566 - RNA, 18 nt, Human
uuauuuuauuaugcauga

SEQ ID NO: 1840567 - RNA, 22 nt, Human
uucagcuuguaaauagcucagg

SEQ ID NO: 1840568 - RNA, 14 nt, Human
uucaguggcagcug

SEQ ID NO: 1840569 - RNA, 22 nt, Human
uucagcuccagcucaccagccc

SEQ ID NO: 1840570 - RNA, 12 nt, Human
uucagcuccagc

SEQ ID NO: 1840571 - RNA, 15 nt, Human
uucagcuccagcuca

SEQ ID NO: 1840572 - RNA, 13 nt, Human
uucaguguacaug

SEQ ID NO: 1840573 - RNA, 12 nt, Human
uucaguguacau

SEQ ID NO: 1840574 - RNA, 17 nt, Human
uucaguggcagcugcuu

SEQ ID NO: 1840575 - RNA, 15 nt, Human
uucaguggcagcugc

SEQ ID NO: 1840576 - RNA, 16 nt, Human
uucaguggcagcugcu

SEQ ID NO: 1840577 - RNA, 19 nt, Human
uucauccuccucagaucuu

SEQ ID NO: 1840578 - RNA, 15 nt, Human
uucauccuccucaga

SEQ ID NO: 1840579 - RNA, 15 nt, Human
uucauaaccuagccu

SEQ ID NO: 1840580 - RNA, 20 nt, Human
uucauaaauaaaguuuguug

SEQ ID NO: 1840581 - RNA, 23 nt, Human
uucaguuauuauauuuacaaaug

SEQ ID NO: 1840582 - RNA, 19 nt, Human
uuccaacccucaucaccaa

SEQ ID NO: 1840583 - RNA, 13 nt, Human
uuccagagccuca

SEQ ID NO: 1840584 - RNA, 15 nt, Human
uuccauggacuuugu

SEQ ID NO: 1840585 - RNA, 14 nt, Human
uuccauggacuuug

SEQ ID NO: 1840586 - RNA, 16 nt, Human
uuccaaaguacacugu

SEQ ID NO: 1840587 - RNA, 13 nt, Human
uuccaaaguacac

SEQ ID NO: 1840588 - RNA, 11 nt, Human
uuauacauaaa

SEQ ID NO: 1840589 - RNA, 13 nt, Human
uuauacauaaaca

SEQ ID NO: 1840590 - RNA, 16 nt, Human
uuauauuaugaagcuu

SEQ ID NO: 1840591 - RNA, 15 nt, Human
uuauaauaauguuaa

SEQ ID NO: 1840592 - RNA, 18 nt, Human
uuauaauaauguuaacau

SEQ ID NO: 1840593 - RNA, 15 nt, Human
uuauaaugaaugaaa

SEQ ID NO: 1840594 - RNA, 21 nt, Human
uuauaauuuuaaauguuuuuu

SEQ ID NO: 1840595 - RNA, 17 nt, Human
uuauaauuuuaaauguu

SEQ ID NO: 1840596 - RNA, 12 nt, Human
uuauaauuuuaa

SEQ ID NO: 1840597 - RNA, 12 nt, Human
uuauaauuuaaa

SEQ ID NO: 1840598 - RNA, 15 nt, Human
ugugaaaagaaaaau

SEQ ID NO: 1840599 - RNA, 13 nt, Human
ugugaaaagaaaa

SEQ ID NO: 1840600 - RNA, 17 nt, Human
ugugaaaagaaaaauga

SEQ ID NO: 1840601 - RNA, 21 nt, Human
ugugaaaagaaaaaugagccu

SEQ ID NO: 1840602 - RNA, 19 nt, Human
uuagugaccucagcuuuga

SEQ ID NO: 1840603 - RNA, 16 nt, Human
uuauggcuuuugugca

SEQ ID NO: 1840604 - RNA, 14 nt, Human
uuauggcacaucag

SEQ ID NO: 1840605 - RNA, 17 nt, Human
uuauguugcauagaaua

SEQ ID NO: 1840606 - RNA, 18 nt, Human
uuauggcuuuugugcauu

SEQ ID NO: 1840607 - RNA, 17 nt, Human
uuauggcuuuugugcau

SEQ ID NO: 1840608 - RNA, 20 nt, Human
uuauggaacacucugagacu

SEQ ID NO: 1840609 - RNA, 18 nt, Human
uuauggaacacucugaga

SEQ ID NO: 1840610 - RNA, 21 nt, Human
uuauggacaaugacccagugg

SEQ ID NO: 1840611 - RNA, 17 nt, Human
uuauggaacacucugag

SEQ ID NO: 1840612 - RNA, 16 nt, Human
uuaugauuuuuaaaga

SEQ ID NO: 1840613 - RNA, 19 nt, Human
uuaugauuuuuaaagaaaa

SEQ ID NO: 1840614 - RNA, 21 nt, Human
uuauuaaaugcccagccccuu

SEQ ID NO: 1840615 - RNA, 19 nt, Human
uuauuaaaugcccagcccc

SEQ ID NO: 1840616 - RNA, 23 nt, Human
uuauuaaaaaucucaaauuucua

SEQ ID NO: 1840617 - RNA, 16 nt, Human
uuauauuuacaaaugg

SEQ ID NO: 1840618 - RNA, 14 nt, Human
uuaucuagauacug

SEQ ID NO: 1840619 - RNA, 16 nt, Human
uuaucuugaauaaugu

SEQ ID NO: 1840620 - RNA, 14 nt, Human
uuaucuugaauaau

SEQ ID NO: 1840621 - RNA, 15 nt, Human
aaaaaauauuuuccu

SEQ ID NO: 1840622 - RNA, 18 nt, Human
acucugucucaguccaug

SEQ ID NO: 1840623 - RNA, 20 nt, Human
acucugucucaguccaugaa

SEQ ID NO: 1840624 - RNA, 15 nt, Human
acuggagaaaaugga

SEQ ID NO: 1840625 - RNA, 18 nt, Human
acugguaggaaacuaggu

SEQ ID NO: 1840626 - RNA, 15 nt, Human
acugcccccucugcc

SEQ ID NO: 1840627 - RNA, 14 nt, Human
acugcccccucugc

SEQ ID NO: 1840628 - RNA, 19 nt, Human
acuggaagcacagcuucau

SEQ ID NO: 1840629 - RNA, 17 nt, Human
acugcccccucugcccu

SEQ ID NO: 1840630 - RNA, 16 nt, Human
acugcccccucugccc

SEQ ID NO: 1840631 - RNA, 17 nt, Human
acuggaagcacagcuuc

SEQ ID NO: 1840632 - RNA, 23 nt, Human
acugucucaagagggcacuggug

SEQ ID NO: 1840633 - RNA, 21 nt, Human
acugucucaagagggcacugg

SEQ ID NO: 1840634 - RNA, 20 nt, Human
acugucucaagagggcacug

SEQ ID NO: 1840635 - RNA, 18 nt, Human
acugguuccauggccucu

SEQ ID NO: 1840636 - RNA, 19 nt, Human
acugucucaagagggcacu

SEQ ID NO: 1840637 - RNA, 20 nt, Human
acugugcugagucugaaggc

SEQ ID NO: 1840638 - RNA, 22 nt, Human
acugugcugagucugaaggcug

SEQ ID NO: 1840639 - RNA, 12 nt, Human
acuucagacaua

SEQ ID NO: 1840640 - RNA, 15 nt, Human
acuugggccacugug

SEQ ID NO: 1840641 - RNA, 14 nt, Human
acuugggccacugu

SEQ ID NO: 1840642 - RNA, 16 nt, Human
acuugguuuuuaaaaa

SEQ ID NO: 1840643 - RNA, 16 nt, Human
acuuuucuuucagcca

SEQ ID NO: 1840644 - RNA, 23 nt, Human
acuuuuauuuccagugaaaucag

SEQ ID NO: 1840645 - RNA, 23 nt, Human
acuuuuaugauacuugaaaauua

SEQ ID NO: 1840646 - RNA, 20 nt, Human
acuuuucauaaccuagccuu

SEQ ID NO: 1840647 - RNA, 14 nt, Human
acuuuucuuugugg

SEQ ID NO: 1840648 - RNA, 15 nt, Human
agaaaauaccaagga

SEQ ID NO: 1840649 - RNA, 19 nt, Human
agaaaauaguggugugauu

SEQ ID NO: 1840650 - RNA, 16 nt, Human
agaaaaucaggcuggc

SEQ ID NO: 1840651 - RNA, 13 nt, Human
acuuuuauaaacu

SEQ ID NO: 1840652 - RNA, 16 nt, Human
acuuuuaugauacuug

SEQ ID NO: 1840653 - RNA, 12 nt, Human
acuuuuaugaua

SEQ ID NO: 1840654 - RNA, 19 nt, Human
acuuuguucuggcucuucc

SEQ ID NO: 1840655 - RNA, 20 nt, Human
acuuuguucuggcucuucca

SEQ ID NO: 1840656 - RNA, 22 nt, Human
acuuuaucuugaauaauguaag

SEQ ID NO: 1840657 - RNA, 17 nt, Human
acuuuguucuggcucuu

SEQ ID NO: 1840658 - RNA, 16 nt, Human
acuuuguucuggcucu

SEQ ID NO: 1840659 - RNA, 22 nt, Human
acuuuauuuucuauaauuuaaa

SEQ ID NO: 1840660 - RNA, 23 nt, Human
agaaaguacuucuccacccugcu

SEQ ID NO: 1840661 - RNA, 22 nt, Human
agaaaguacuucuccacccugc

SEQ ID NO: 1840662 - RNA, 16 nt, Human
agaaaggauaaaguug

SEQ ID NO: 1840663 - RNA, 14 nt, Human
agaaaguucaugcu

SEQ ID NO: 1840664 - RNA, 21 nt, Human
accucugcagcaauaaagcag

SEQ ID NO: 1840665 - RNA, 18 nt, Human
accucugcagcaauaaag

SEQ ID NO: 1840666 - RNA, 20 nt, Human
accucugcagcaauaaagca

SEQ ID NO: 1840667 - RNA, 15 nt, Human
accucugcagcaaua

SEQ ID NO: 1840668 - RNA, 20 nt, Human
accugcccugcugaguccca

SEQ ID NO: 1840669 - RNA, 15 nt, Human
accugucccccugac

SEQ ID NO: 1840670 - RNA, 12 nt, Human
accugucccccu

SEQ ID NO: 1840671 - RNA, 16 nt, Human
accugucccccugaca

SEQ ID NO: 1840672 - RNA, 15 nt, Human
accuuuaagagaaau

SEQ ID NO: 1840673 - RNA, 18 nt, Human
accuuucccaucuuccaa

SEQ ID NO: 1840674 - RNA, 13 nt, Human
accuuucccaucu

SEQ ID NO: 1840675 - RNA, 17 nt, Human
accuuggcugcagggag

SEQ ID NO: 1840676 - RNA, 18 nt, Human
accuuggcugcagggagu

SEQ ID NO: 1840677 - RNA, 11 nt, Human
acgugaguccu

SEQ ID NO: 1840678 - RNA, 14 nt, Human
acgcugugcugccc

SEQ ID NO: 1840679 - RNA, 12 nt, Human
acgcugugcugc

SEQ ID NO: 1840680 - RNA, 11 nt, Human
acgcugugcug

SEQ ID NO: 1840681 - RNA, 13 nt, Human
acgucugacaggc

SEQ ID NO: 1840682 - RNA, 14 nt, Human
acgucugacaggca

SEQ ID NO: 1840683 - RNA, 15 nt, Human
acgucugacaggcaa

SEQ ID NO: 1840684 - RNA, 17 nt, Human
acucuagggaaaaacca

SEQ ID NO: 1840685 - RNA, 15 nt, Human
acucuagggaaaaac

SEQ ID NO: 1840686 - RNA, 17 nt, Human
acucuauguucuaagaa

SEQ ID NO: 1840687 - RNA, 23 nt, Human
acucuaucaaguauuauaccuuu

SEQ ID NO: 1840688 - RNA, 19 nt, Human
acucugucgcccagucugg

SEQ ID NO: 1840689 - RNA, 18 nt, Human
acucaaaagcugggcagg

SEQ ID NO: 1840690 - RNA, 13 nt, Human
acucaaaagcugg

SEQ ID NO: 1840691 - RNA, 18 nt, Human
acuauuuuucagaaucuc

SEQ ID NO: 1840692 - RNA, 19 nt, Human
acucaguccauagcagaga

SEQ ID NO: 1840693 - RNA, 21 nt, Human
acaggaugaugacuauggaaa

SEQ ID NO: 1840694 - RNA, 18 nt, Human
acaggcaaugcuggcugu

SEQ ID NO: 1840695 - RNA, 12 nt, Human
acaggcaagcac

SEQ ID NO: 1840696 - RNA, 16 nt, Human
acagcucuucuccagg

SEQ ID NO: 1840697 - RNA, 17 nt, Human
acagcucuucuccaggc

SEQ ID NO: 1840698 - RNA, 15 nt, Human
acaggaucagucuga

SEQ ID NO: 1840699 - RNA, 18 nt, Human
acagcucuucuccaggcu

SEQ ID NO: 1840700 - RNA, 18 nt, Human
acagccacggccaggcca

SEQ ID NO: 1840701 - RNA, 15 nt, Human
acagccacggccagg

SEQ ID NO: 1840702 - RNA, 16 nt, Human
acagccacggccaggc

SEQ ID NO: 1840703 - RNA, 17 nt, Human
acagccacggccaggcc

SEQ ID NO: 1840704 - RNA, 14 nt, Human
acacugcauguuug

SEQ ID NO: 1840705 - RNA, 15 nt, Human
acacugcauguuugu

SEQ ID NO: 1840706 - RNA, 15 nt, Human
acacuguacugcaau

SEQ ID NO: 1840707 - RNA, 13 nt, Human
acagacaaagcgu

SEQ ID NO: 1840708 - RNA, 11 nt, Human
acagacacagg

SEQ ID NO: 1840709 - RNA, 15 nt, Human
acagacacaggcccg

SEQ ID NO: 1840710 - RNA, 19 nt, Human
acagaggcagccccauucu

SEQ ID NO: 1840711 - RNA, 23 nt, Human
acagaggcagccccauucugccu

SEQ ID NO: 1840712 - RNA, 13 nt, Human
acagacacaggcc

SEQ ID NO: 1840713 - RNA, 14 nt, Human
acagacacaggccc

SEQ ID NO: 1840714 - RNA, 14 nt, Human
acagaggcagcccc

SEQ ID NO: 1840715 - RNA, 15 nt, Human
acagaggcagcccca

SEQ ID NO: 1840716 - RNA, 17 nt, Human
acagccaacuauggccu

SEQ ID NO: 1840717 - RNA, 19 nt, Human
acagccaacuauggccugu

SEQ ID NO: 1840718 - RNA, 14 nt, Human
acagaggggguggc

SEQ ID NO: 1840719 - RNA, 15 nt, Human
acagagugagacucu

SEQ ID NO: 1840720 - RNA, 23 nt, Human
acagagucucacuguugcccagg

SEQ ID NO: 1840721 - RNA, 19 nt, Human
acagagugagacucugucu

SEQ ID NO: 1840722 - RNA, 17 nt, Human
acacagauuugagcuca

SEQ ID NO: 1840723 - RNA, 20 nt, Human
acacagcucuguccugggag

SEQ ID NO: 1840724 - RNA, 19 nt, Human
acacagaggcugccucucc

SEQ ID NO: 1840725 - RNA, 12 nt, Human
acacauuuuucu

SEQ ID NO: 1840726 - RNA, 14 nt, Human
acacauuuuucaga

SEQ ID NO: 1840727 - RNA, 20 nt, Human
acacauuuuuuaaaugcacc

SEQ ID NO: 1840728 - RNA, 22 nt, Human
acacauuuuuuaaaugcaccug

SEQ ID NO: 1840729 - RNA, 21 nt, Human
acacauuuuauuuuauuaugc

SEQ ID NO: 1840730 - RNA, 22 nt, Human
acacauuuuauuuuauuaugca

SEQ ID NO: 1840731 - RNA, 11 nt, Human
acacagcucuu

SEQ ID NO: 1840732 - RNA, 13 nt, Human
acacagcucuucu

SEQ ID NO: 1840733 - RNA, 14 nt, Human
acacgcuccuuccu

SEQ ID NO: 1840734 - RNA, 16 nt, Human
acacgcuccuuccucu

SEQ ID NO: 1840735 - RNA, 15 nt, Human
acacgcgugcacaca

SEQ ID NO: 1840736 - RNA, 17 nt, Human
acacgcgugcacacacc

SEQ ID NO: 1840737 - RNA, 15 nt, Human
acaaggcaaggcugu

SEQ ID NO: 1840738 - RNA, 22 nt, Human
acaaaauguaggguuauaauaa

SEQ ID NO: 1840739 - RNA, 14 nt, Human
acaaggcaaggcug

SEQ ID NO: 1840740 - RNA, 12 nt, Human
acaaggcaaggc

SEQ ID NO: 1840741 - RNA, 13 nt, Human
acaagaaaugaaa

SEQ ID NO: 1840742 - RNA, 17 nt, Human
acaaggauugcuacugu

SEQ ID NO: 1840743 - RNA, 17 nt, Human
accagccaguaaauggg

SEQ ID NO: 1840744 - RNA, 15 nt, Human
accagcccagacccu

SEQ ID NO: 1840745 - RNA, 13 nt, Human
accagcagaaaug

SEQ ID NO: 1840746 - RNA, 19 nt, Human
accagagcugccaccugcc

SEQ ID NO: 1840747 - RNA, 13 nt, Human
accagaucauugu

SEQ ID NO: 1840748 - RNA, 12 nt, Human
accaagcccagu

SEQ ID NO: 1840749 - RNA, 19 nt, Human
acauuuguucuauagcuuu

SEQ ID NO: 1840750 - RNA, 15 nt, Human
acauuuauucugcuc

SEQ ID NO: 1840751 - RNA, 14 nt, Human
acauuuauucugcu

SEQ ID NO: 1840752 - RNA, 23 nt, Human
acauaaugcgugcauaccacuuu

SEQ ID NO: 1840753 - RNA, 22 nt, Human
acauaaugcgugcauaccacuu

SEQ ID NO: 1840754 - RNA, 21 nt, Human
acauaaugcgugcauaccacu

SEQ ID NO: 1840755 - RNA, 19 nt, Human
acaggcaaugcuggcuguu

SEQ ID NO: 1840756 - RNA, 23 nt, Human
acaggcaaugcuggcuguuggcu

SEQ ID NO: 1840757 - RNA, 19 nt, Human
acaggguuuugccauguug

SEQ ID NO: 1840758 - RNA, 22 nt, Human
acauguuucuuuguaaugaaaa

SEQ ID NO: 1840759 - RNA, 19 nt, Human
acauguuucuuuguaauga

SEQ ID NO: 1840760 - RNA, 23 nt, Human
acauguuucuuuguaaugaaaac

SEQ ID NO: 1840761 - RNA, 15 nt, Human
acaucagcacgauuu

SEQ ID NO: 1840762 - RNA, 17 nt, Human
acaucagcacgauuucu

SEQ ID NO: 1840763 - RNA, 18 nt, Human
acaucagcacgauuucug

SEQ ID NO: 1840764 - RNA, 19 nt, Human
acaucagcacgauuucugu

SEQ ID NO: 1840765 - RNA, 19 nt, Human
acaugaucuucuuuauaau

SEQ ID NO: 1840766 - RNA, 16 nt, Human
acaugugcacaugcac

SEQ ID NO: 1840767 - RNA, 18 nt, Human
acaugugcacaugcacgu

SEQ ID NO: 1840768 - RNA, 17 nt, Human
accccucauagcccuca

SEQ ID NO: 1840769 - RNA, 16 nt, Human
accccuccaugugggc

SEQ ID NO: 1840770 - RNA, 19 nt, Human
accccuccaugugggcuag

SEQ ID NO: 1840771 - RNA, 14 nt, Human
accauauuaccaca

SEQ ID NO: 1840772 - RNA, 16 nt, Human
accauauuaccacaga

SEQ ID NO: 1840773 - RNA, 22 nt, Human
acccaagggccuggccugagcu

SEQ ID NO: 1840774 - RNA, 19 nt, Human
acccaagggccuggccuga

SEQ ID NO: 1840775 - RNA, 18 nt, Human
acccaagggccuggccug

SEQ ID NO: 1840776 - RNA, 20 nt, Human
accauauuaccacagacaua

SEQ ID NO: 1840777 - RNA, 21 nt, Human
acccacaagaaaugaaagcag

SEQ ID NO: 1840778 - RNA, 17 nt, Human
acccacaagaaaugaaa

SEQ ID NO: 1840779 - RNA, 23 nt, Human
acccaagggccuggccugagcug

SEQ ID NO: 1840780 - RNA, 13 nt, Human
acccaccucagcc

SEQ ID NO: 1840781 - RNA, 14 nt, Human
acccaccucagccu

SEQ ID NO: 1840782 - RNA, 15 nt, Human
acccaccucagccuc

SEQ ID NO: 1840783 - RNA, 16 nt, Human
acccaccucagccucc

SEQ ID NO: 1840784 - RNA, 11 nt, Human
acccccugaau

SEQ ID NO: 1840785 - RNA, 17 nt, Human
acccccugcaaagccca

SEQ ID NO: 1840786 - RNA, 14 nt, Human
acccccugcaaagc

SEQ ID NO: 1840787 - RNA, 20 nt, Human
acccccugcaaagcccagcu

SEQ ID NO: 1840788 - RNA, 18 nt, Human
acccccugcaaagcccag

SEQ ID NO: 1840789 - RNA, 22 nt, Human
acccccugcaaagcccagcuug

SEQ ID NO: 1840790 - RNA, 18 nt, Human
aaaaguucugcagauaaa

SEQ ID NO: 1840791 - RNA, 17 nt, Human
aaaauaaaacuuuuuaa

SEQ ID NO: 1840792 - RNA, 19 nt, Human
aaaauaaaauuaaagcuga

SEQ ID NO: 1840793 - RNA, 22 nt, Human
aaaaucccuuaccucggugccu

SEQ ID NO: 1840794 - RNA, 21 nt, Human
aaaaucuacacuccagugaga

SEQ ID NO: 1840795 - RNA, 15 nt, Human
aaaaagaaaggaggg

SEQ ID NO: 1840796 - RNA, 21 nt, Human
aaacacugggagaaaugaaaa

SEQ ID NO: 1840797 - RNA, 22 nt, Human
aaacacugggagaaaugaaaaa

SEQ ID NO: 1840798 - RNA, 16 nt, Human
aaacacuguucucugc

SEQ ID NO: 1840799 - RNA, 19 nt, Human
aaaaucucaaauuucuaaa

SEQ ID NO: 1840800 - RNA, 22 nt, Human
aaaaucucaaauuucuaaaucu

SEQ ID NO: 1840801 - RNA, 21 nt, Human
aaaauugaugggauuugguca

SEQ ID NO: 1840802 - RNA, 17 nt, Human
aaagauauuuugcuuug

SEQ ID NO: 1840803 - RNA, 20 nt, Human
aaagauauuuugcuuuguga

SEQ ID NO: 1840804 - RNA, 12 nt, Human
aaagauauuuug

SEQ ID NO: 1840805 - RNA, 16 nt, Human
aaagauauuuugcuuu

SEQ ID NO: 1840806 - RNA, 14 nt, Human
aaagaguaggaaga

SEQ ID NO: 1840807 - RNA, 20 nt, Human
aaagaagguuucagaaagaa

SEQ ID NO: 1840808 - RNA, 19 nt, Human
aaagaguguggcaaaauaa

SEQ ID NO: 1840809 - RNA, 17 nt, Human
aaagaaauauaccuaaa

SEQ ID NO: 1840810 - RNA, 15 nt, Human
aaagaaauauaccua

SEQ ID NO: 1840811 - RNA, 18 nt, Human
aaaccaucauugaaaucu

SEQ ID NO: 1840812 - RNA, 18 nt, Human
aaacucuccucugcugcu

SEQ ID NO: 1840813 - RNA, 24 nt, Human
aaacccucgaggcggaucuuugga

SEQ ID NO: 1840814 - RNA, 13 nt, Human
aaacccucgaggc

SEQ ID NO: 1840815 - RNA, 16 nt, Human
aaacccuauugguaaa

SEQ ID NO: 1840816 - RNA, 19 nt, Human
aaagcccuuaggaagaauu

SEQ ID NO: 1840817 - RNA, 13 nt, Human
aaagcccugugcu

SEQ ID NO: 1840818 - RNA, 16 nt, Human
aaagccuccuccagcc

SEQ ID NO: 1840819 - RNA, 23 nt, Human
aaagcccuuccaugucgccucug

SEQ ID NO: 1840820 - RNA, 22 nt, Human
aaagcccuuccaugucgccucu

SEQ ID NO: 1840821 - RNA, 14 nt, Human
aaagcccugugcuc

SEQ ID NO: 1840822 - RNA, 16 nt, Human
aaaggcuccaggagca

SEQ ID NO: 1840823 - RNA, 15 nt, Human
aaaggcuccaggagc

SEQ ID NO: 1840824 - RNA, 14 nt, Human
aaaggcagaagcaa

SEQ ID NO: 1840825 - RNA, 20 nt, Human
aaaggcuccaggagcagcca

SEQ ID NO: 1840826 - RNA, 19 nt, Human
aaaggcuccaggagcagcc

SEQ ID NO: 1840827 - RNA, 13 nt, Human
aaaguggaaaaau

SEQ ID NO: 1840828 - RNA, 19 nt, Human
aaauaaaacuuuuuaaaau

SEQ ID NO: 1840829 - RNA, 13 nt, Human
aaauaaaacuuuu

SEQ ID NO: 1840830 - RNA, 16 nt, Human
aaauaaaacuuuuuaa

SEQ ID NO: 1840831 - RNA, 19 nt, Human
aaaucaaugcuauaacuau

SEQ ID NO: 1840832 - RNA, 24 nt, Human
aaauagcucaggugucccugcacu

SEQ ID NO: 1840833 - RNA, 19 nt, Human
aaauaguggugugauuugg

SEQ ID NO: 1840834 - RNA, 21 nt, Human
aacuuuaugcuaagugaaaua

SEQ ID NO: 1840835 - RNA, 20 nt, Human
aacuuuaugcuaagugaaau

SEQ ID NO: 1840836 - RNA, 15 nt, Human
aacuuaaucuaaaug

SEQ ID NO: 1840837 - RNA, 16 nt, Human
aacuuaaucuaaaugg

SEQ ID NO: 1840838 - RNA, 18 nt, Human
aacuuaaucuaaauggaa

SEQ ID NO: 1840839 - RNA, 16 nt, Human
aacugagugccuuuug

SEQ ID NO: 1840840 - RNA, 14 nt, Human
aacugauaaagaug

SEQ ID NO: 1840841 - RNA, 11 nt, Human
aacgcagcccu

SEQ ID NO: 1840842 - RNA, 21 nt, Human
aacccuuggagccaauggaga

SEQ ID NO: 1840843 - RNA, 15 nt, Human
aacccuauugguaaa

SEQ ID NO: 1840844 - RNA, 13 nt, Human
aaccacgcuggac

SEQ ID NO: 1840845 - RNA, 15 nt, Human
aaccacuucagcuga

SEQ ID NO: 1840846 - RNA, 22 nt, Human
aaccacuggaaaguuuaugguu

SEQ ID NO: 1840847 - RNA, 18 nt, Human
aacaaauuuacagagaca

SEQ ID NO: 1840848 - RNA, 17 nt, Human
aaauuuuuuuuguuuca

SEQ ID NO: 1840849 - RNA, 18 nt, Human
aaauuuuuuuuguuucau

SEQ ID NO: 1840850 - RNA, 21 nt, Human
aaauucuugcaaaguaucccu

SEQ ID NO: 1840851 - RNA, 17 nt, Human
aaauuaaagcugaaaac

SEQ ID NO: 1840852 - RNA, 13 nt, Human
aaauuaaagcuga

SEQ ID NO: 1840853 - RNA, 14 nt, Human
aaauugcuccuuga

SEQ ID NO: 1840854 - RNA, 13 nt, Human
aaauugcuccuug

SEQ ID NO: 1840855 - RNA, 19 nt, Human
aaauugacacuuaaaaaug

SEQ ID NO: 1840856 - RNA, 15 nt, Human
aaaugccuuuguacu

SEQ ID NO: 1840857 - RNA, 17 nt, Human
aaaucuuauaauuuaaa

SEQ ID NO: 1840858 - RNA, 21 nt, Human
aagcgauucuucugcuucagc

SEQ ID NO: 1840859 - RNA, 12 nt, Human
aaggcagggagg

SEQ ID NO: 1840860 - RNA, 15 nt, Human
aaggauguucuagca

SEQ ID NO: 1840861 - RNA, 15 nt, Human
aaggauugcuacugu

SEQ ID NO: 1840862 - RNA, 19 nt, Human
aaggacagccccuccucca

SEQ ID NO: 1840863 - RNA, 13 nt, Human
aaggacagccccu

SEQ ID NO: 1840864 - RNA, 13 nt, Human
aaggacacuagaa

SEQ ID NO: 1840865 - RNA, 18 nt, Human
aagcuguguggcagucug

SEQ ID NO: 1840866 - RNA, 18 nt, Human
aagcuggucccacucagu

SEQ ID NO: 1840867 - RNA, 21 nt, Human
aagcuggucccacucagucca

SEQ ID NO: 1840868 - RNA, 14 nt, Human
aagcagcguuucua

SEQ ID NO: 1840869 - RNA, 17 nt, Human
aagcagcguuucuauga

SEQ ID NO: 1840870 - RNA, 20 nt, Human
aagcagcguuucuaugacac

SEQ ID NO: 1840871 - RNA, 21 nt, Human
aagcagcguuucuaugacaca

SEQ ID NO: 1840872 - RNA, 22 nt, Human
aagcagcguuucuaugacacau

SEQ ID NO: 1840873 - RNA, 23 nt, Human
aagccagcaggcucucaggccag

SEQ ID NO: 1840874 - RNA, 20 nt, Human
aagccagcaggcucucaggc

SEQ ID NO: 1840875 - RNA, 14 nt, Human
aagauaaaugugcu

SEQ ID NO: 1840876 - RNA, 13 nt, Human
aagauaaaugugc

SEQ ID NO: 1840877 - RNA, 12 nt, Human
aagauaaaugug

SEQ ID NO: 1840878 - RNA, 19 nt, Human
aaguggaaaaauagccugc

SEQ ID NO: 1840879 - RNA, 21 nt, Human
aaguggaaaaauagccugccu

SEQ ID NO: 1840880 - RNA, 15 nt, Human
aagucuccaaagucu

SEQ ID NO: 1840881 - RNA, 21 nt, Human
aaguagaagucuuagauguau

SEQ ID NO: 1840882 - RNA, 18 nt, Human
aaguaucccuacuguaau

SEQ ID NO: 1840883 - RNA, 23 nt, Human
aaguaucccuacuguaauuugug

SEQ ID NO: 1840884 - RNA, 17 nt, Human
aaguaucccuacuguaa

SEQ ID NO: 1840885 - RNA, 15 nt, Human
aaguaguggagcccc

SEQ ID NO: 1840886 - RNA, 20 nt, Human
aaggugaggagcuugaaacc

SEQ ID NO: 1840887 - RNA, 20 nt, Human
aaguagaagucuuagaugua

SEQ ID NO: 1840888 - RNA, 19 nt, Human
aaguagaagucuuagaugu

SEQ ID NO: 1840889 - RNA, 18 nt, Human
aaguauccugcuucugau

SEQ ID NO: 1840890 - RNA, 14 nt, Human
aaguccacagugga

SEQ ID NO: 1840891 - RNA, 19 nt, Human
aaguccacaguggaaccag

SEQ ID NO: 1840892 - RNA, 18 nt, Human
aaguccucuuuucugaga

SEQ ID NO: 1840893 - RNA, 14 nt, Human
aagucuccaaaguc

SEQ ID NO: 1840894 - RNA, 22 nt, Human
aaguccucuuuucugagaggac

SEQ ID NO: 1840895 - RNA, 18 nt, Human
aaggucauuuuuuuuaag

SEQ ID NO: 1840896 - RNA, 19 nt, Human
aaggucauuuuuuuuaaga

SEQ ID NO: 1840897 - RNA, 18 nt, Human
aagggacgcuacccggga

SEQ ID NO: 1840898 - RNA, 22 nt, Human
aauguuuuuuuuuaaagacuuu

SEQ ID NO: 1840899 - RNA, 20 nt, Human
aauguuuuuuuuuaaagacu

SEQ ID NO: 1840900 - RNA, 15 nt, Human
aauguuuuuuuuuaa

SEQ ID NO: 1840901 - RNA, 19 nt, Human
aaugcgugcauaccacuuu

SEQ ID NO: 1840902 - RNA, 18 nt, Human
aaugcgugcauaccacuu

SEQ ID NO: 1840903 - RNA, 21 nt, Human
aaugcgcaggcuggcccugcc

SEQ ID NO: 1840904 - RNA, 22 nt, Human
aaugcgcaggcuggcccugccc

SEQ ID NO: 1840905 - RNA, 23 nt, Human
aaugccuuacccucauguucuua

SEQ ID NO: 1840906 - RNA, 23 nt, Human
aaugcuauaacuauguugauaaa

SEQ ID NO: 1840907 - RNA, 12 nt, Human
aauguuuccuuu

SEQ ID NO: 1840908 - RNA, 22 nt, Human
aauguuuacagauccccaagcc

SEQ ID NO: 1840909 - RNA, 13 nt, Human
aauguuuccuuua

SEQ ID NO: 1840910 - RNA, 15 nt, Human
aauguuugccucugc

SEQ ID NO: 1840911 - RNA, 16 nt, Human
aauguuugccucugcc

SEQ ID NO: 1840912 - RNA, 15 nt, Human
aaugugaaaagaaaa

SEQ ID NO: 1840913 - RNA, 17 nt, Human
aaugugaaaagaaaaau

SEQ ID NO: 1840914 - RNA, 22 nt, Human
aauacucuacccucuuagaaaa

SEQ ID NO: 1840915 - RNA, 20 nt, Human
aauacucuacccucuuagaa

SEQ ID NO: 1840916 - RNA, 21 nt, Human
aauauuagugaccucagcuuu

SEQ ID NO: 1840917 - RNA, 14 nt, Human
aaucaccgaaaacg

SEQ ID NO: 1840918 - RNA, 19 nt, Human
aaucacauucgaguguuuc

SEQ ID NO: 1840919 - RNA, 15 nt, Human
aaucaccgaaaacgu

SEQ ID NO: 1840920 - RNA, 13 nt, Human
aauagacaauuua

SEQ ID NO: 1840921 - RNA, 16 nt, Human
aauauauaucaaauau

SEQ ID NO: 1840922 - RNA, 18 nt, Human
aauccaagcaaaugugaa

SEQ ID NO: 1840923 - RNA, 17 nt, Human
aauccaagcaaauguga

SEQ ID NO: 1840924 - RNA, 22 nt, Human
aaugauccccagcuguuuaugc

SEQ ID NO: 1840925 - RNA, 19 nt, Human
aaugauccccagcuguuua

SEQ ID NO: 1840926 - RNA, 20 nt, Human
aaugauccccagcuguuuau

SEQ ID NO: 1840927 - RNA, 16 nt, Human
aaugauccccagcugu

SEQ ID NO: 1840928 - RNA, 17 nt, Human
aaucucaaauuucuaaa

SEQ ID NO: 1840929 - RNA, 18 nt, Human
aaucucaaauuucuaaau

SEQ ID NO: 1840930 - RNA, 16 nt, Human
aaucucuccauucccg

SEQ ID NO: 1840931 - RNA, 16 nt, Human
aaucucaaauuucuaa

SEQ ID NO: 1840932 - RNA, 15 nt, Human
aaucucaaauuucua

SEQ ID NO: 1840933 - RNA, 13 nt, Human
aauccagccugcu

SEQ ID NO: 1840934 - RNA, 19 nt, Human
aauccagacccggcugcgu

SEQ ID NO: 1840935 - RNA, 17 nt, Human
aauccagacccggcugc

SEQ ID NO: 1840936 - RNA, 15 nt, Human
aauccaaugaaauga

SEQ ID NO: 1840937 - RNA, 14 nt, Human
agagcccaggccuc

SEQ ID NO: 1840938 - RNA, 13 nt, Human
agagcccaggccu

SEQ ID NO: 1840939 - RNA, 15 nt, Human
agagcccaggccucc

SEQ ID NO: 1840940 - RNA, 16 nt, Human
agaggaaggagaggag

SEQ ID NO: 1840941 - RNA, 16 nt, Human
agaggagagaggaccc

SEQ ID NO: 1840942 - RNA, 15 nt, Human
agaggagagaggacc

SEQ ID NO: 1840943 - RNA, 14 nt, Human
agaggacuuuucuu

SEQ ID NO: 1840944 - RNA, 12 nt, Human
agagggcacaga

SEQ ID NO: 1840945 - RNA, 20 nt, Human
agaggguggugaccucugcc

SEQ ID NO: 1840946 - RNA, 22 nt, Human
agaggguggugaccucugccug

SEQ ID NO: 1840947 - RNA, 19 nt, Human
agaggguggugaccucugc

SEQ ID NO: 1840948 - RNA, 19 nt, Human
agaguggggauaugauuua

SEQ ID NO: 1840949 - RNA, 23 nt, Human
agaguggcuccucccggugccca

SEQ ID NO: 1840950 - RNA, 11 nt, Human
agagugggagc

SEQ ID NO: 1840951 - RNA, 19 nt, Human
agaguggcuccucccggug

SEQ ID NO: 1840952 - RNA, 23 nt, Human
agaggguggugaccucugccuga

SEQ ID NO: 1840953 - RNA, 14 nt, Human
agagugugccugaa

SEQ ID NO: 1840954 - RNA, 17 nt, Human
agaguguggcaaaauaa

SEQ ID NO: 1840955 - RNA, 14 nt, Human
agauggcugugccu

SEQ ID NO: 1840956 - RNA, 14 nt, Human
agaucuucuguggg

SEQ ID NO: 1840957 - RNA, 19 nt, Human
agauauaugcucugcaugu

SEQ ID NO: 1840958 - RNA, 15 nt, Human
agacagcccgggcuc

SEQ ID NO: 1840959 - RNA, 14 nt, Human
agacagcccgggcu

SEQ ID NO: 1840960 - RNA, 16 nt, Human
agacagcccgggcucu

SEQ ID NO: 1840961 - RNA, 21 nt, Human
agacagauacuccuccaaggu

SEQ ID NO: 1840962 - RNA, 15 nt, Human
agacagauacuccuc

SEQ ID NO: 1840963 - RNA, 17 nt, Human
agacgugauuuugcugu

SEQ ID NO: 1840964 - RNA, 22 nt, Human
agacgcugugcugcccugccca

SEQ ID NO: 1840965 - RNA, 18 nt, Human
agacggagucccaccuug

SEQ ID NO: 1840966 - RNA, 12 nt, Human
agacagcucuua

SEQ ID NO: 1840967 - RNA, 11 nt, Human
agacagcucuu

SEQ ID NO: 1840968 - RNA, 12 nt, Human
agacagcugccu

SEQ ID NO: 1840969 - RNA, 21 nt, Human
agacgcugugcugcccugccc

SEQ ID NO: 1840970 - RNA, 16 nt, Human
agagcccacgccccca

SEQ ID NO: 1840971 - RNA, 17 nt, Human
agagcccacgcccccac

SEQ ID NO: 1840972 - RNA, 13 nt, Human
agagcccacgccc

SEQ ID NO: 1840973 - RNA, 19 nt, Human
agagcccaccuuggcucaa

SEQ ID NO: 1840974 - RNA, 22 nt, Human
agagaggguggugaccucugcc

SEQ ID NO: 1840975 - RNA, 20 nt, Human
agagaggguggugaccucug

SEQ ID NO: 1840976 - RNA, 21 nt, Human
agagaggguggugaccucugc

SEQ ID NO: 1840977 - RNA, 19 nt, Human
agacuggaagcacagcuuc

SEQ ID NO: 1840978 - RNA, 17 nt, Human
agacuggaagcacagcu

SEQ ID NO: 1840979 - RNA, 16 nt, Human
agacuggaagcacagc

SEQ ID NO: 1840980 - RNA, 20 nt, Human
agccagcaggcucucaggcc

SEQ ID NO: 1840981 - RNA, 17 nt, Human
agccagcaggcucucag

SEQ ID NO: 1840982 - RNA, 19 nt, Human
agccagcaggcucucaggc

SEQ ID NO: 1840983 - RNA, 18 nt, Human
agccagcaggcucucagg

SEQ ID NO: 1840984 - RNA, 13 nt, Human
agccccagugccc

SEQ ID NO: 1840985 - RNA, 14 nt, Human
agccccagugccca

SEQ ID NO: 1840986 - RNA, 15 nt, Human
agccccagugcccac

SEQ ID NO: 1840987 - RNA, 17 nt, Human
agcccucacccuggggc

SEQ ID NO: 1840988 - RNA, 13 nt, Human
agccccauucugc

SEQ ID NO: 1840989 - RNA, 16 nt, Human
agccccauucugccug

SEQ ID NO: 1840990 - RNA, 13 nt, Human
agccgcuggggcc

SEQ ID NO: 1840991 - RNA, 21 nt, Human
agccgccaugcuccuggccca

SEQ ID NO: 1840992 - RNA, 14 nt, Human
agccuccuccagcc

SEQ ID NO: 1840993 - RNA, 20 nt, Human
agccucccgaguagcuggga

SEQ ID NO: 1840994 - RNA, 18 nt, Human
agccucccgaguagcugg

SEQ ID NO: 1840995 - RNA, 19 nt, Human
agccucccgaguagcuggg

SEQ ID NO: 1840996 - RNA, 21 nt, Human
agccgggcgugguggugagug

SEQ ID NO: 1840997 - RNA, 16 nt, Human
agccgugccuucagcu

SEQ ID NO: 1840998 - RNA, 15 nt, Human
agccgugccuucagc

SEQ ID NO: 1840999 - RNA, 22 nt, Human
agccucccacgacugcccggca

SEQ ID NO: 1841000 - RNA, 17 nt, Human
agccgugccuucagcuc

SEQ ID NO: 1841001 - RNA, 21 nt, Human
agccucccaaagugcugggau

SEQ ID NO: 1841002 - RNA, 17 nt, Human
agcacagacccugcccu

SEQ ID NO: 1841003 - RNA, 23 nt, Human
agcacacuugacaucaacugcau

SEQ ID NO: 1841004 - RNA, 19 nt, Human
agcacagacccugcccugu

SEQ ID NO: 1841005 - RNA, 18 nt, Human
agcacagacccugcccug

SEQ ID NO: 1841006 - RNA, 20 nt, Human
agcacagacccugcccugug

SEQ ID NO: 1841007 - RNA, 13 nt, Human
agcagcguuucua

SEQ ID NO: 1841008 - RNA, 20 nt, Human
agcagugcaugcugucccuu

SEQ ID NO: 1841009 - RNA, 19 nt, Human
agcagugcaugcugucccu

SEQ ID NO: 1841010 - RNA, 18 nt, Human
agcagugcaugcuguccc

SEQ ID NO: 1841011 - RNA, 23 nt, Human
agcaugccuggauggggcugcac

SEQ ID NO: 1841012 - RNA, 20 nt, Human
agcaugccuggauggggcug

SEQ ID NO: 1841013 - RNA, 23 nt, Human
agccaagugugguagagugugcc

SEQ ID NO: 1841014 - RNA, 22 nt, Human
agcauccuggcacccggccccu

SEQ ID NO: 1841015 - RNA, 23 nt, Human
agcauccuggcacccggccccug

SEQ ID NO: 1841016 - RNA, 21 nt, Human
agcuuuucccuuuuuuuaagu

SEQ ID NO: 1841017 - RNA, 20 nt, Human
aggaauccagacccggcugc

SEQ ID NO: 1841018 - RNA, 21 nt, Human
aggaaucaugugccaagcaga

SEQ ID NO: 1841019 - RNA, 17 nt, Human
aggaauccagacccggc

SEQ ID NO: 1841020 - RNA, 13 nt, Human
aggaccucaggug

SEQ ID NO: 1841021 - RNA, 18 nt, Human
aggaguggguugauuuca

SEQ ID NO: 1841022 - RNA, 21 nt, Human
aggaugcuuguacauaaugcg

SEQ ID NO: 1841023 - RNA, 23 nt, Human
aggaugcuuguacauaaugcgug

SEQ ID NO: 1841024 - RNA, 14 nt, Human
aggauuauuggaaa

SEQ ID NO: 1841025 - RNA, 20 nt, Human
aggauuaaauaauguaaaua

SEQ ID NO: 1841026 - RNA, 14 nt, Human
aggauuaaauaaug

SEQ ID NO: 1841027 - RNA, 18 nt, Human
aggauguucugggacaca

SEQ ID NO: 1841028 - RNA, 22 nt, Human
aggauguucuagcauggcugcc

SEQ ID NO: 1841029 - RNA, 22 nt, Human
aggauguacaaggacagccccu

SEQ ID NO: 1841030 - RNA, 15 nt, Human
aggauguucugggac

SEQ ID NO: 1841031 - RNA, 16 nt, Human
aggauguucugggaca

SEQ ID NO: 1841032 - RNA, 23 nt, Human
agcugagauuauaggcaccuacc

SEQ ID NO: 1841033 - RNA, 12 nt, Human
agcuccuucugu

SEQ ID NO: 1841034 - RNA, 13 nt, Human
agcuccuucuguc

SEQ ID NO: 1841035 - RNA, 20 nt, Human
agcuccgcuuucuacccagc

SEQ ID NO: 1841036 - RNA, 21 nt, Human
agcuccgcuuucuacccagcg

SEQ ID NO: 1841037 - RNA, 23 nt, Human
agcuccgcuuucuacccagcgag

SEQ ID NO: 1841038 - RNA, 19 nt, Human
agcuucuguugcugccuca

SEQ ID NO: 1841039 - RNA, 23 nt, Human
agcugcgguccacccaggagccc

SEQ ID NO: 1841040 - RNA, 17 nt, Human
agggacgcuacccggga

SEQ ID NO: 1841041 - RNA, 23 nt, Human
agggacagaggggguggccuccc

SEQ ID NO: 1841042 - RNA, 22 nt, Human
agggacagaggggguggccucc

SEQ ID NO: 1841043 - RNA, 21 nt, Human
aggcugucaauuacaggaagu

SEQ ID NO: 1841044 - RNA, 20 nt, Human
aggcugucaauuacaggaag

SEQ ID NO: 1841045 - RNA, 13 nt, Human
aggcuguauccca

SEQ ID NO: 1841046 - RNA, 18 nt, Human
aggcuguaucccaugagc

SEQ ID NO: 1841047 - RNA, 21 nt, Human
aggcccuucucuccagccccu

SEQ ID NO: 1841048 - RNA, 20 nt, Human
aggcccuucucuccagcccc

SEQ ID NO: 1841049 - RNA, 18 nt, Human
aggcccuuccucuccacu

SEQ ID NO: 1841050 - RNA, 17 nt, Human
aggcccuuccucuccac

SEQ ID NO: 1841051 - RNA, 15 nt, Human
aggcccuuccucucc

SEQ ID NO: 1841052 - RNA, 13 nt, Human
aggcccuuccucu

SEQ ID NO: 1841053 - RNA, 23 nt, Human
aggcccuucucuccagccccugg

SEQ ID NO: 1841054 - RNA, 22 nt, Human
aggcccuucucuccagccccug

SEQ ID NO: 1841055 - RNA, 19 nt, Human
aggcccuuccucuccacug

SEQ ID NO: 1841056 - RNA, 21 nt, Human
aggcuagaaccaccugccuau

SEQ ID NO: 1841057 - RNA, 23 nt, Human
aggcuacuguaaggcaaucaugg

SEQ ID NO: 1841058 - RNA, 21 nt, Human
aggcgugagccaccgugccug

SEQ ID NO: 1841059 - RNA, 21 nt, Human
aggggccucuuaugggcuggg

SEQ ID NO: 1841060 - RNA, 20 nt, Human
aggggccucuuaugggcugg

SEQ ID NO: 1841061 - RNA, 19 nt, Human
aggggccucuuaugggcug

SEQ ID NO: 1841062 - RNA, 19 nt, Human
aggguaucaggugcugcca

SEQ ID NO: 1841063 - RNA, 15 nt, Human
aggguaucuggugac

SEQ ID NO: 1841064 - RNA, 21 nt, Human
aggguaucaggugcugccauc

SEQ ID NO: 1841065 - RNA, 23 nt, Human
aggguccuggggaaccugacccc

SEQ ID NO: 1841066 - RNA, 21 nt, Human
aggguccuggggaaccugacc

SEQ ID NO: 1841067 - RNA, 15 nt, Human
aggguccuggggaac

SEQ ID NO: 1841068 - RNA, 12 nt, Human
aggguccugggg

SEQ ID NO: 1841069 - RNA, 11 nt, Human
agggucccugg

SEQ ID NO: 1841070 - RNA, 22 nt, Human
aggucuguucuuuccaaaguac

SEQ ID NO: 1841071 - RNA, 23 nt, Human
aggucuguucuuuccaaaguaca

SEQ ID NO: 1841072 - RNA, 18 nt, Human
aggucuguucuuuccaaa

SEQ ID NO: 1841073 - RNA, 16 nt, Human
aggucccuaauaaagc

SEQ ID NO: 1841074 - RNA, 15 nt, Human
aggucccuaauaaag

SEQ ID NO: 1841075 - RNA, 13 nt, Human
aggucccuaauaa

SEQ ID NO: 1841076 - RNA, 11 nt, Human
aggucccuaau

SEQ ID NO: 1841077 - RNA, 12 nt, Human
aggucccuaaua

SEQ ID NO: 1841078 - RNA, 17 nt, Human
agguacaaccuguucug

SEQ ID NO: 1841079 - RNA, 23 nt, Human
agguaaaucagacuaugaaguuu

SEQ ID NO: 1841080 - RNA, 21 nt, Human
agguaaucgaccugccucggc

SEQ ID NO: 1841081 - RNA, 19 nt, Human
agguaaucgaccugccucg

SEQ ID NO: 1841082 - RNA, 18 nt, Human
agguaaaucagacuauga

SEQ ID NO: 1841083 - RNA, 20 nt, Human
agguaaaagcaucacaugaa

SEQ ID NO: 1841084 - RNA, 22 nt, Human
aggugcuaggaacacuccuuca

SEQ ID NO: 1841085 - RNA, 19 nt, Human
aggugcuaggaacacuccu

SEQ ID NO: 1841086 - RNA, 23 nt, Human
aggugcuaggaacacuccuucac

SEQ ID NO: 1841087 - RNA, 23 nt, Human
agguucccuuugacgccauccca

SEQ ID NO: 1841088 - RNA, 13 nt, Human
agguucccuuuga

SEQ ID NO: 1841089 - RNA, 22 nt, Human
agguucccuuugacgccauccc

SEQ ID NO: 1841090 - RNA, 14 nt, Human
agguucaaagauau

SEQ ID NO: 1841091 - RNA, 15 nt, Human
agguucaaagauauu

SEQ ID NO: 1841092 - RNA, 22 nt, Human
auguuugccucugccucugaca

SEQ ID NO: 1841093 - RNA, 19 nt, Human
auguuugccucugccucug

SEQ ID NO: 1841094 - RNA, 13 nt, Human
auguucugggaca

SEQ ID NO: 1841095 - RNA, 11 nt, Human
auguucuggga

SEQ ID NO: 1841096 - RNA, 12 nt, Human
auguucugggac

SEQ ID NO: 1841097 - RNA, 17 nt, Human
auguucuaagaagugaa

SEQ ID NO: 1841098 - RNA, 20 nt, Human
augugggcuaguugggcuuc

SEQ ID NO: 1841099 - RNA, 22 nt, Human
augugaaacuggauuaaacuua

SEQ ID NO: 1841100 - RNA, 14 nt, Human
augugaaaucauuc

SEQ ID NO: 1841101 - RNA, 15 nt, Human
augugaaacauguuu

SEQ ID NO: 1841102 - RNA, 14 nt, Human
augucuuuucuugc

SEQ ID NO: 1841103 - RNA, 13 nt, Human
augucuuccugga

SEQ ID NO: 1841104 - RNA, 19 nt, Human
auggucaccaaaucagcug

SEQ ID NO: 1841105 - RNA, 17 nt, Human
auguaauuaaguacuau

SEQ ID NO: 1841106 - RNA, 15 nt, Human
auguaauuaaguacu

SEQ ID NO: 1841107 - RNA, 15 nt, Human
auggucggaaaacau

SEQ ID NO: 1841108 - RNA, 23 nt, Human
auguaauuaaguacuauguauca

SEQ ID NO: 1841109 - RNA, 17 nt, Human
augcacagaguuguuac

SEQ ID NO: 1841110 - RNA, 18 nt, Human
augcacagaguuguuaca

SEQ ID NO: 1841111 - RNA, 17 nt, Human
augcacaaacagaggcc

SEQ ID NO: 1841112 - RNA, 16 nt, Human
augcacaaacagaggc

SEQ ID NO: 1841113 - RNA, 16 nt, Human
augcacagaguuguua

SEQ ID NO: 1841114 - RNA, 19 nt, Human
augccucucucaggccaaa

SEQ ID NO: 1841115 - RNA, 16 nt, Human
augcaugaaguaauau

SEQ ID NO: 1841116 - RNA, 17 nt, Human
augccucucucaggcca

SEQ ID NO: 1841117 - RNA, 20 nt, Human
augcauauuauuuuauguug

SEQ ID NO: 1841118 - RNA, 16 nt, Human
augcauauuauuuuau

SEQ ID NO: 1841119 - RNA, 17 nt, Human
augaugccaugaggaac

SEQ ID NO: 1841120 - RNA, 16 nt, Human
augaugccaugaggaa

SEQ ID NO: 1841121 - RNA, 15 nt, Human
augcacaaacagagg

SEQ ID NO: 1841122 - RNA, 24 nt, Human
augauguuuuccaugaguccccug

SEQ ID NO: 1841123 - RNA, 20 nt, Human
auggcugugccucugccugu

SEQ ID NO: 1841124 - RNA, 19 nt, Human
auggcugugccucugccug

SEQ ID NO: 1841125 - RNA, 12 nt, Human
augcugcccugu

SEQ ID NO: 1841126 - RNA, 12 nt, Human
augcuuguacau

SEQ ID NO: 1841127 - RNA, 13 nt, Human
augcuuguacaua

SEQ ID NO: 1841128 - RNA, 14 nt, Human
augcuuguacauaa

SEQ ID NO: 1841129 - RNA, 18 nt, Human
auggcugugccucugccu

SEQ ID NO: 1841130 - RNA, 15 nt, Human
auggauuuccagcca

SEQ ID NO: 1841131 - RNA, 16 nt, Human
auggaggaaaaccaag

SEQ ID NO: 1841132 - RNA, 22 nt, Human
auggaggaaaaccaagccgugg

SEQ ID NO: 1841133 - RNA, 16 nt, Human
augcucuuuacuucau

SEQ ID NO: 1841134 - RNA, 11 nt, Human
augcugcccug

SEQ ID NO: 1841135 - RNA, 23 nt, Human
augaccuuucaauaggaaaaacu

SEQ ID NO: 1841136 - RNA, 22 nt, Human
augaccuuucaauaggaaaaac

SEQ ID NO: 1841137 - RNA, 21 nt, Human
augaccuuucaauaggaaaaa

SEQ ID NO: 1841138 - RNA, 22 nt, Human
augaagcuuuuaugugaaacau

SEQ ID NO: 1841139 - RNA, 19 nt, Human
augaaguuuuuuuuauaca

SEQ ID NO: 1841140 - RNA, 19 nt, Human
augaaagacuguacaaagu

SEQ ID NO: 1841141 - RNA, 17 nt, Human
augaaagacuguacaaa

SEQ ID NO: 1841142 - RNA, 16 nt, Human
augaaagacuguacaa

SEQ ID NO: 1841143 - RNA, 13 nt, Human
augaaagacugua

SEQ ID NO: 1841144 - RNA, 22 nt, Human
aucugcuuuuuaaagaaugcuc

SEQ ID NO: 1841145 - RNA, 19 nt, Human
aucuggacuccucugucca

SEQ ID NO: 1841146 - RNA, 18 nt, Human
aucuggacuccucugucc

SEQ ID NO: 1841147 - RNA, 17 nt, Human
aucuggacuccucuguc

SEQ ID NO: 1841148 - RNA, 16 nt, Human
aucuggacuccucugu

SEQ ID NO: 1841149 - RNA, 15 nt, Human
aucuggacuccucug

SEQ ID NO: 1841150 - RNA, 17 nt, Human
aucucugcuuuggaaau

SEQ ID NO: 1841151 - RNA, 15 nt, Human
aucucggcucacugc

SEQ ID NO: 1841152 - RNA, 14 nt, Human
aucucggcucacug

SEQ ID NO: 1841153 - RNA, 16 nt, Human
aucucggcucacugca

SEQ ID NO: 1841154 - RNA, 17 nt, Human
aucuugaauuguaagga

SEQ ID NO: 1841155 - RNA, 18 nt, Human
aucuugaauaauguaaga

SEQ ID NO: 1841156 - RNA, 14 nt, Human
aucuucuuuauaau

SEQ ID NO: 1841157 - RNA, 18 nt, Human
aucuugaagacuuuucuu

SEQ ID NO: 1841158 - RNA, 22 nt, Human
aucuucugaacuuggcgcugcc

SEQ ID NO: 1841159 - RNA, 16 nt, Human
auccagaaagaaaacu

SEQ ID NO: 1841160 - RNA, 18 nt, Human
auccagaaagaaaacuug

SEQ ID NO: 1841161 - RNA, 15 nt, Human
auccagacccggcug

SEQ ID NO: 1841162 - RNA, 15 nt, Human
aucccauuuaaaaaa

SEQ ID NO: 1841163 - RNA, 13 nt, Human
auccccaagccug

SEQ ID NO: 1841164 - RNA, 14 nt, Human
aucccauuuaaaaa

SEQ ID NO: 1841165 - RNA, 15 nt, Human
auccccuguagagug

SEQ ID NO: 1841166 - RNA, 16 nt, Human
auccccaagccuggca

SEQ ID NO: 1841167 - RNA, 11 nt, Human
auccuccaggu

SEQ ID NO: 1841168 - RNA, 23 nt, Human
auccuccaggugcacaagcucca

SEQ ID NO: 1841169 - RNA, 15 nt, Human
auccucccaccucag

SEQ ID NO: 1841170 - RNA, 20 nt, Human
auccucccaccucagccucc

SEQ ID NO: 1841171 - RNA, 18 nt, Human
auccucccaccucagccu

SEQ ID NO: 1841172 - RNA, 19 nt, Human
auccucccaccucagccuc

SEQ ID NO: 1841173 - RNA, 19 nt, Human
aucaccaacgucugugcca

SEQ ID NO: 1841174 - RNA, 18 nt, Human
aucaccaacgucugugcc

SEQ ID NO: 1841175 - RNA, 15 nt, Human
aucacauguggacuu

SEQ ID NO: 1841176 - RNA, 21 nt, Human
aucacagccucugaaaaccaa

SEQ ID NO: 1841177 - RNA, 21 nt, Human
aucaccgaaaacguggcugcu

SEQ ID NO: 1841178 - RNA, 19 nt, Human
aucaccgaaaacguggcug

SEQ ID NO: 1841179 - RNA, 14 nt, Human
aucaccgaaaacgu

SEQ ID NO: 1841180 - RNA, 19 nt, Human
aucagcacgauuucuguuu

SEQ ID NO: 1841181 - RNA, 20 nt, Human
aucagcacgauuucuguuua

SEQ ID NO: 1841182 - RNA, 23 nt, Human
aucagcacgauuucuguuuagau

SEQ ID NO: 1841183 - RNA, 18 nt, Human
aucagccugcuccagcug

SEQ ID NO: 1841184 - RNA, 17 nt, Human
aucagccugcuccagcu

SEQ ID NO: 1841185 - RNA, 19 nt, Human
aucagccugcuccagcugu

SEQ ID NO: 1841186 - RNA, 20 nt, Human
aucagccugcuccagcuguu

SEQ ID NO: 1841187 - RNA, 16 nt, Human
aucaugugaaaucauu

SEQ ID NO: 1841188 - RNA, 14 nt, Human
aucaugugaaauca

SEQ ID NO: 1841189 - RNA, 15 nt, Human
aucaugugaaaucau

SEQ ID NO: 1841190 - RNA, 15 nt, Human
auaucaauuuaaaaa

SEQ ID NO: 1841191 - RNA, 16 nt, Human
auaucaaauauauuca

SEQ ID NO: 1841192 - RNA, 22 nt, Human
auauuaccacagacauacuaac

SEQ ID NO: 1841193 - RNA, 21 nt, Human
auaugcuuauacacuuacacu

SEQ ID NO: 1841194 - RNA, 23 nt, Human
auauuaugaagcuuuuaugugaa

SEQ ID NO: 1841195 - RNA, 19 nt, Human
auauuuacuucuuauacau

SEQ ID NO: 1841196 - RNA, 21 nt, Human
auagccaaggccaaaggaagc

SEQ ID NO: 1841197 - RNA, 15 nt, Human
auagccaaggccaaa

SEQ ID NO: 1841198 - RNA, 18 nt, Human
auagcagcuuauucacaa

SEQ ID NO: 1841199 - RNA, 21 nt, Human
auagguauaaguggugugugu

SEQ ID NO: 1841200 - RNA, 17 nt, Human
auaguaugguggcuggg

SEQ ID NO: 1841201 - RNA, 18 nt, Human
auaguaugguggcugggu

SEQ ID NO: 1841202 - RNA, 15 nt, Human
auagguuuaauaauu

SEQ ID NO: 1841203 - RNA, 20 nt, Human
auaaugcgugcauaccacuu

SEQ ID NO: 1841204 - RNA, 21 nt, Human
auaaugcgugcauaccacuuu

SEQ ID NO: 1841205 - RNA, 18 nt, Human
auacaccacuacauucug

SEQ ID NO: 1841206 - RNA, 21 nt, Human
auacaccacuacauucuguua

SEQ ID NO: 1841207 - RNA, 19 nt, Human
auacaccacuacauucugu

SEQ ID NO: 1841208 - RNA, 20 nt, Human
auacaccacuacauucuguu

SEQ ID NO: 1841209 - RNA, 15 nt, Human
auaauguaagcucua

SEQ ID NO: 1841210 - RNA, 18 nt, Human
auaccugucccccugaca

SEQ ID NO: 1841211 - RNA, 12 nt, Human
auacccaccccc

SEQ ID NO: 1841212 - RNA, 11 nt, Human
auacccacccc

SEQ ID NO: 1841213 - RNA, 17 nt, Human
auaaaacuuuuuaaaau

SEQ ID NO: 1841214 - RNA, 21 nt, Human
auaaacuuuaccuuuuuuaua

SEQ ID NO: 1841215 - RNA, 16 nt, Human
auaaacuuuaccuuuu

SEQ ID NO: 1841216 - RNA, 24 nt, Human
auaaacuuuaccuuuuuuauacau

SEQ ID NO: 1841217 - RNA, 20 nt, Human
auaaacuuuuuucuuacugu

SEQ ID NO: 1841218 - RNA, 15 nt, Human
auaaaacuuuuuaaa

SEQ ID NO: 1841219 - RNA, 11 nt, Human
auaaaacuuuu

SEQ ID NO: 1841220 - RNA, 18 nt, Human
auaaagcuguguggcagu

SEQ ID NO: 1841221 - RNA, 15 nt, Human
auaaagcaggcagaa

SEQ ID NO: 1841222 - RNA, 14 nt, Human
auaaagcagcguuu

SEQ ID NO: 1841223 - RNA, 18 nt, Human
auaaagcagcguuucuau

SEQ ID NO: 1841224 - RNA, 19 nt, Human
auaaagcagcguuucuaug

SEQ ID NO: 1841225 - RNA, 20 nt, Human
auaaagcagcguuucuauga

SEQ ID NO: 1841226 - RNA, 13 nt, Human
auaaagcagcguu

SEQ ID NO: 1841227 - RNA, 11 nt, Human
auaaagacagg

SEQ ID NO: 1841228 - RNA, 12 nt, Human
auaaagacaccu

SEQ ID NO: 1841229 - RNA, 19 nt, Human
auaaauuuuuuuuguuuca

SEQ ID NO: 1841230 - RNA, 22 nt, Human
auaaauuuuuuuuguuucauau

SEQ ID NO: 1841231 - RNA, 18 nt, Human
auaaaggauuaaugucaa

SEQ ID NO: 1841232 - RNA, 16 nt, Human
aguuguuaauaaaagu

SEQ ID NO: 1841233 - RNA, 20 nt, Human
aguuguuugauucagacagc

SEQ ID NO: 1841234 - RNA, 14 nt, Human
aguugaagacagag

SEQ ID NO: 1841235 - RNA, 23 nt, Human
aguugaaaaucuuauaauuuaaa

SEQ ID NO: 1841236 - RNA, 16 nt, Human
aguuacagacaaagcg

SEQ ID NO: 1841237 - RNA, 14 nt, Human
aguuacagacaaag

SEQ ID NO: 1841238 - RNA, 14 nt, Human
aguuaagccuuugg

SEQ ID NO: 1841239 - RNA, 12 nt, Human
aguuaaauaaau

SEQ ID NO: 1841240 - RNA, 13 nt, Human
aguuaagccuuug

SEQ ID NO: 1841241 - RNA, 20 nt, Human
aguucagguaacaggcagau

SEQ ID NO: 1841242 - RNA, 17 nt, Human
aguuacagacaaagcgu

SEQ ID NO: 1841243 - RNA, 19 nt, Human
aguucagguaacaggcaga

SEQ ID NO: 1841244 - RNA, 22 nt, Human
aguugaaaaucuuauaauuuaa

SEQ ID NO: 1841245 - RNA, 21 nt, Human
aguggcuccucccggugccca

SEQ ID NO: 1841246 - RNA, 17 nt, Human
aguggcuccucccggug

SEQ ID NO: 1841247 - RNA, 13 nt, Human
aguggcuccuccc

SEQ ID NO: 1841248 - RNA, 23 nt, Human
aguggcuuaaaacaacacucaca

SEQ ID NO: 1841249 - RNA, 17 nt, Human
aguguauuuuuuuacua

SEQ ID NO: 1841250 - RNA, 18 nt, Human
aguguauuuuuuuacuaa

SEQ ID NO: 1841251 - RNA, 16 nt, Human
agugggagcugccugu

SEQ ID NO: 1841252 - RNA, 15 nt, Human
agugggagcugccug

SEQ ID NO: 1841253 - RNA, 14 nt, Human
agugggagcugccu

SEQ ID NO: 1841254 - RNA, 15 nt, Human
aguaucuugaagacu

SEQ ID NO: 1841255 - RNA, 12 nt, Human
aguaucuugaag

SEQ ID NO: 1841256 - RNA, 11 nt, Human
aguaucuugaa

SEQ ID NO: 1841257 - RNA, 16 nt, Human
aguaucuuuuuauuca

SEQ ID NO: 1841258 - RNA, 16 nt, Human
aguaugaauaaagaca

SEQ ID NO: 1841259 - RNA, 15 nt, Human
aguaugaggcauuug

SEQ ID NO: 1841260 - RNA, 16 nt, Human
aguaugaggcauuugu

SEQ ID NO: 1841261 - RNA, 20 nt, Human
aguaugggacuggccucugc

SEQ ID NO: 1841262 - RNA, 17 nt, Human
aguaugggacuggccuc

SEQ ID NO: 1841263 - RNA, 14 nt, Human
aguaugguggcugg

SEQ ID NO: 1841264 - RNA, 18 nt, Human
agugaccauacuaauuau

SEQ ID NO: 1841265 - RNA, 14 nt, Human
agugaagacaauga

SEQ ID NO: 1841266 - RNA, 16 nt, Human
agugaagacaaugacu

SEQ ID NO: 1841267 - RNA, 20 nt, Human
agucugauucccaagcucug

SEQ ID NO: 1841268 - RNA, 16 nt, Human
agucugauucccaagc

SEQ ID NO: 1841269 - RNA, 18 nt, Human
agucugauucccaagcuc

SEQ ID NO: 1841270 - RNA, 17 nt, Human
agucuggaaugcagugg

SEQ ID NO: 1841271 - RNA, 20 nt, Human
agugaacuugggccacugug

SEQ ID NO: 1841272 - RNA, 18 nt, Human
agucuggaaugcaguggu

SEQ ID NO: 1841273 - RNA, 21 nt, Human
aguccuggcaugggaaugaau

SEQ ID NO: 1841274 - RNA, 20 nt, Human
aguccuggcaugggaaugaa

SEQ ID NO: 1841275 - RNA, 22 nt, Human
aguccuggcaugggaaugaaug

SEQ ID NO: 1841276 - RNA, 15 nt, Human
agucugaaggcuggg

SEQ ID NO: 1841277 - RNA, 13 nt, Human
agucugaaggcug

SEQ ID NO: 1841278 - RNA, 16 nt, Human
agucugaaggcugggu

SEQ ID NO: 1841279 - RNA, 17 nt, Human
agucugaaggcuggguu

SEQ ID NO: 1841280 - RNA, 12 nt, Human
aguccuguaaug

SEQ ID NO: 1841281 - RNA, 13 nt, Human
cucucccuuggau

SEQ ID NO: 1841282 - RNA, 15 nt, Human
cucgugguaggacug

SEQ ID NO: 1841283 - RNA, 16 nt, Human
cucgugguaggacugu

SEQ ID NO: 1841284 - RNA, 17 nt, Human
cucgugguaggacugua

SEQ ID NO: 1841285 - RNA, 20 nt, Human
cucuccuccuuuucacaguu

SEQ ID NO: 1841286 - RNA, 13 nt, Human
cucuccuccuuuu

SEQ ID NO: 1841287 - RNA, 16 nt, Human
cucuccgaccagacac

SEQ ID NO: 1841288 - RNA, 19 nt, Human
cucucuggccuucggccuc

SEQ ID NO: 1841289 - RNA, 22 nt, Human
cucucuggccuucggccuccau

SEQ ID NO: 1841290 - RNA, 17 nt, Human
cucucuggccuucggcc

SEQ ID NO: 1841291 - RNA, 10 nt, Human
cucuccucug

SEQ ID NO: 1841292 - RNA, 16 nt, Human
cucugcacaagcugca

SEQ ID NO: 1841293 - RNA, 17 nt, Human
cucgaacuccugaccuu

SEQ ID NO: 1841294 - RNA, 16 nt, Human
cucgaacuccugaccu

SEQ ID NO: 1841295 - RNA, 13 nt, Human
cucgaacuccuga

SEQ ID NO: 1841296 - RNA, 24 nt, Human
cuccuuuucacaguucucuccuuc

SEQ ID NO: 1841297 - RNA, 22 nt, Human
cuccuagccugugccucuggga

SEQ ID NO: 1841298 - RNA, 16 nt, Human
cuccuuuagcgcccag

SEQ ID NO: 1841299 - RNA, 17 nt, Human
cuccuuuagcgcccagu

SEQ ID NO: 1841300 - RNA, 22 nt, Human
cuccuuuagcgcccaguugggu

SEQ ID NO: 1841301 - RNA, 20 nt, Human
cucguauaugucucaggucc

SEQ ID NO: 1841302 - RNA, 18 nt, Human
cucguauaugucucaggu

SEQ ID NO: 1841303 - RNA, 11 nt, Human
cucggugccuu

SEQ ID NO: 1841304 - RNA, 23 nt, Human
cuccgcuuucuacccagcgagcc

SEQ ID NO: 1841305 - RNA, 22 nt, Human
cuccgcuuucuacccagcgagc

SEQ ID NO: 1841306 - RNA, 21 nt, Human
cuccgcuuucuacccagcgag

SEQ ID NO: 1841307 - RNA, 20 nt, Human
cuccgcuuucuacccagcga

SEQ ID NO: 1841308 - RNA, 19 nt, Human
cucccucuuucccucccuu

SEQ ID NO: 1841309 - RNA, 15 nt, Human
cucccucuuucccuc

SEQ ID NO: 1841310 - RNA, 16 nt, Human
cucccucccucuuucc

SEQ ID NO: 1841311 - RNA, 21 nt, Human
cuccagaauuucccaaagcag

SEQ ID NO: 1841312 - RNA, 17 nt, Human
cucagaaucucaaauaa

SEQ ID NO: 1841313 - RNA, 16 nt, Human
cucagaaucucaaaua

SEQ ID NO: 1841314 - RNA, 11 nt, Human
cuccagacaca

SEQ ID NO: 1841315 - RNA, 22 nt, Human
cuccagaauuucccaaagcagu

SEQ ID NO: 1841316 - RNA, 16 nt, Human
cuccagacacaugucc

SEQ ID NO: 1841317 - RNA, 23 nt, Human
cuccaggcuguaucccaugagcc

SEQ ID NO: 1841318 - RNA, 20 nt, Human
cuccaggugcacaagcucca

SEQ ID NO: 1841319 - RNA, 19 nt, Human
cuccaggugcacaagcucc

SEQ ID NO: 1841320 - RNA, 18 nt, Human
cuccaggugcacaagcuc

SEQ ID NO: 1841321 - RNA, 22 nt, Human
cuccaggugcacaagcuccaag

SEQ ID NO: 1841322 - RNA, 14 nt, Human
cucccaccucagcc

SEQ ID NO: 1841323 - RNA, 16 nt, Human
cucccaccucagccuc

SEQ ID NO: 1841324 - RNA, 17 nt, Human
cucccaccucagccucc

SEQ ID NO: 1841325 - RNA, 14 nt, Human
cugaaaauguaugu

SEQ ID NO: 1841326 - RNA, 13 nt, Human
cugacacacagcu

SEQ ID NO: 1841327 - RNA, 15 nt, Human
cugacacacagcucu

SEQ ID NO: 1841328 - RNA, 16 nt, Human
cugacacacagcucug

SEQ ID NO: 1841329 - RNA, 17 nt, Human
cugacacacagcucugu

SEQ ID NO: 1841330 - RNA, 18 nt, Human
cugacacacagcucuguc

SEQ ID NO: 1841331 - RNA, 19 nt, Human
cugacacacagcucugucc

SEQ ID NO: 1841332 - RNA, 20 nt, Human
cugacacacagcucuguccu

SEQ ID NO: 1841333 - RNA, 21 nt, Human
cugacacacagcucuguccug

SEQ ID NO: 1841334 - RNA, 22 nt, Human
cugacacacagcucuguccugg

SEQ ID NO: 1841335 - RNA, 23 nt, Human
cugacacacagcucuguccuggg

SEQ ID NO: 1841336 - RNA, 17 nt, Human
cugaccccucauagccc

SEQ ID NO: 1841337 - RNA, 21 nt, Human
cugaccccucauagcccucac

SEQ ID NO: 1841338 - RNA, 20 nt, Human
cugaccccucauagcccuca

SEQ ID NO: 1841339 - RNA, 14 nt, Human
cucuugagccuggg

SEQ ID NO: 1841340 - RNA, 13 nt, Human
cucuugagccugg

SEQ ID NO: 1841341 - RNA, 16 nt, Human
cucuugagccugggag

SEQ ID NO: 1841342 - RNA, 15 nt, Human
cucuugagccuggga

SEQ ID NO: 1841343 - RNA, 22 nt, Human
cucuugauucauaaugacuuaa

SEQ ID NO: 1841344 - RNA, 13 nt, Human
cugaaagaggaau

SEQ ID NO: 1841345 - RNA, 17 nt, Human
cugaaagaggaaugaag

SEQ ID NO: 1841346 - RNA, 22 nt, Human
cucuugccacugccucuuccuc

SEQ ID NO: 1841347 - RNA, 24 nt, Human
cucuugauucauaaugacuuaagc

SEQ ID NO: 1841348 - RNA, 19 nt, Human
cucugcacaagcugcaccc

SEQ ID NO: 1841349 - RNA, 18 nt, Human
cucugcacaagcugcacc

SEQ ID NO: 1841350 - RNA, 17 nt, Human
cucugcacaagcugcac

SEQ ID NO: 1841351 - RNA, 19 nt, Human
cugacccugcuucaaauau

SEQ ID NO: 1841352 - RNA, 12 nt, Human
cugagcugggau

SEQ ID NO: 1841353 - RNA, 22 nt, Human
cugagcugggaugauuggaggg

SEQ ID NO: 1841354 - RNA, 22 nt, Human
cugagcuugcagagaugaggcc

SEQ ID NO: 1841355 - RNA, 14 nt, Human
cugaggaauccaga

SEQ ID NO: 1841356 - RNA, 22 nt, Human
cugaggugggaggaucucuuga

SEQ ID NO: 1841357 - RNA, 13 nt, Human
cugaggugggagg

SEQ ID NO: 1841358 - RNA, 14 nt, Human
cugaggggccucuu

SEQ ID NO: 1841359 - RNA, 23 nt, Human
cugaggaauccagacccggcugc

SEQ ID NO: 1841360 - RNA, 18 nt, Human
cugaucucucgugauuga

SEQ ID NO: 1841361 - RNA, 17 nt, Human
cugaucucucgugauug

SEQ ID NO: 1841362 - RNA, 21 nt, Human
cucacacaugagcaucaggcc

SEQ ID NO: 1841363 - RNA, 14 nt, Human
cucacacaugagca

SEQ ID NO: 1841364 - RNA, 12 nt, Human
cucaaauaacua

SEQ ID NO: 1841365 - RNA, 14 nt, Human
cucacaaaggaugc

SEQ ID NO: 1841366 - RNA, 22 nt, Human
cucaaagaaauuuccacucagg

SEQ ID NO: 1841367 - RNA, 18 nt, Human
cucaaaaaaagaaaaaga

SEQ ID NO: 1841368 - RNA, 14 nt, Human
cuauuuuucagaau

SEQ ID NO: 1841369 - RNA, 16 nt, Human
cuauguugcccaggca

SEQ ID NO: 1841370 - RNA, 17 nt, Human
cuauguugcccaggcag

SEQ ID NO: 1841371 - RNA, 20 nt, Human
cuaucucccccagccccauc

SEQ ID NO: 1841372 - RNA, 19 nt, Human
cuauguaucaaugaguaac

SEQ ID NO: 1841373 - RNA, 22 nt, Human
cuauguguagggcgggaggaug

SEQ ID NO: 1841374 - RNA, 15 nt, Human
cuauguugcccaggc

SEQ ID NO: 1841375 - RNA, 23 nt, Human
cuaugucauuugcuggagcucug

SEQ ID NO: 1841376 - RNA, 14 nt, Human
cucacccuggggcu

SEQ ID NO: 1841377 - RNA, 17 nt, Human
cucaccucucccuugga

SEQ ID NO: 1841378 - RNA, 16 nt, Human
cucaccucucccuugg

SEQ ID NO: 1841379 - RNA, 15 nt, Human
cucaccucucccuug

SEQ ID NO: 1841380 - RNA, 14 nt, Human
cucaccucucccuu

SEQ ID NO: 1841381 - RNA, 13 nt, Human
cucaccucucccu

SEQ ID NO: 1841382 - RNA, 16 nt, Human
cucaccucccccaucu

SEQ ID NO: 1841383 - RNA, 13 nt, Human
cucaccuccugcu

SEQ ID NO: 1841384 - RNA, 16 nt, Human
cucaccugccccucaa

SEQ ID NO: 1841385 - RNA, 14 nt, Human
cucaccugccccuc

SEQ ID NO: 1841386 - RNA, 18 nt, Human
cucaccugccccucaacu

SEQ ID NO: 1841387 - RNA, 13 nt, Human
cucaccugccccu

SEQ ID NO: 1841388 - RNA, 14 nt, Human
cucaccuccugcug

SEQ ID NO: 1841389 - RNA, 20 nt, Human
cuacuagggaaaugccuuug

SEQ ID NO: 1841390 - RNA, 23 nt, Human
cuaccugaggggccucuuauggg

SEQ ID NO: 1841391 - RNA, 19 nt, Human
cuaccugaggggccucuua

SEQ ID NO: 1841392 - RNA, 16 nt, Human
cuaccugaggggccuc

SEQ ID NO: 1841393 - RNA, 18 nt, Human
cuaccuuccaguuccuca

SEQ ID NO: 1841394 - RNA, 16 nt, Human
cuagcauacguacaca

SEQ ID NO: 1841395 - RNA, 18 nt, Human
cuagcauacguacacauu

SEQ ID NO: 1841396 - RNA, 19 nt, Human
cuagcauacguacacauuu

SEQ ID NO: 1841397 - RNA, 20 nt, Human
cuagcauacguacacauuuu

SEQ ID NO: 1841398 - RNA, 21 nt, Human
cuagacccacuggacucaccu

SEQ ID NO: 1841399 - RNA, 13 nt, Human
cuaggccugggga

SEQ ID NO: 1841400 - RNA, 12 nt, Human
cuaggccugggg

SEQ ID NO: 1841401 - RNA, 14 nt, Human
cuaggccuggccag

SEQ ID NO: 1841402 - RNA, 15 nt, Human
cuaggccuggccaga

SEQ ID NO: 1841403 - RNA, 18 nt, Human
cuaggccuggccagaugc

SEQ ID NO: 1841404 - RNA, 19 nt, Human
cuaggccuggccagaugca

SEQ ID NO: 1841405 - RNA, 17 nt, Human
cuagccagaggagagag

SEQ ID NO: 1841406 - RNA, 19 nt, Human
cuagccagaggagagagga

SEQ ID NO: 1841407 - RNA, 13 nt, Human
cuaggccuggcca

SEQ ID NO: 1841408 - RNA, 20 nt, Human
cuaguuugauuaaauucuug

SEQ ID NO: 1841409 - RNA, 14 nt, Human
cuagggaagauaau

SEQ ID NO: 1841410 - RNA, 15 nt, Human
cuaggguccugggga

SEQ ID NO: 1841411 - RNA, 14 nt, Human
cuaggguccugggg

SEQ ID NO: 1841412 - RNA, 13 nt, Human
cuaggguccuggg

SEQ ID NO: 1841413 - RNA, 17 nt, Human
cuaguuugauuaaauuc

SEQ ID NO: 1841414 - RNA, 19 nt, Human
cuaguuugauuaaauucuu

SEQ ID NO: 1841415 - RNA, 15 nt, Human
cggagacggaguccc

SEQ ID NO: 1841416 - RNA, 13 nt, Human
cguacacauuuua

SEQ ID NO: 1841417 - RNA, 16 nt, Human
cguacacauuuuauuu

SEQ ID NO: 1841418 - RNA, 13 nt, Human
cgguguggagaag

SEQ ID NO: 1841419 - RNA, 22 nt, Human
cuaaaguguauuuuuuuacuaa

SEQ ID NO: 1841420 - RNA, 17 nt, Human
cuaaaggcuaccuuugu

SEQ ID NO: 1841421 - RNA, 19 nt, Human
cuaaaggcuaccuuuguau

SEQ ID NO: 1841422 - RNA, 14 nt, Human
cuaaagcugccagc

SEQ ID NO: 1841423 - RNA, 21 nt, Human
cuaaagaagguuucagaaaga

SEQ ID NO: 1841424 - RNA, 15 nt, Human
cuaaaggcuaccuuu

SEQ ID NO: 1841425 - RNA, 16 nt, Human
cuaaaggcuaccuuug

SEQ ID NO: 1841426 - RNA, 15 nt, Human
cuaaagcugccagcc

SEQ ID NO: 1841427 - RNA, 14 nt, Human
cguuaccaggcagg

SEQ ID NO: 1841428 - RNA, 13 nt, Human
cguuaaaauacca

SEQ ID NO: 1841429 - RNA, 22 nt, Human
cguguccccuauccuacuuccc

SEQ ID NO: 1841430 - RNA, 20 nt, Human
cgcuggggccaguugguccc

SEQ ID NO: 1841431 - RNA, 17 nt, Human
cgcuggggccaguuggu

SEQ ID NO: 1841432 - RNA, 23 nt, Human
cgcuggccgggaccccgagccug

SEQ ID NO: 1841433 - RNA, 18 nt, Human
cgcuggccgggaccccga

SEQ ID NO: 1841434 - RNA, 16 nt, Human
cgccuuaaggauguuc

SEQ ID NO: 1841435 - RNA, 18 nt, Human
cgcugccccuggcagccc

SEQ ID NO: 1841436 - RNA, 19 nt, Human
cgcuggaccuugaacuggg

SEQ ID NO: 1841437 - RNA, 23 nt, Human
cgcuggaccuugaacuggguacu

SEQ ID NO: 1841438 - RNA, 17 nt, Human
cgcugccccuggcagcc

SEQ ID NO: 1841439 - RNA, 16 nt, Human
cgcugccccuggcagc

SEQ ID NO: 1841440 - RNA, 13 nt, Human
cgcugccccuggc

SEQ ID NO: 1841441 - RNA, 21 nt, Human
cgagguuucucaaagaaauuu

SEQ ID NO: 1841442 - RNA, 21 nt, Human
cgauacaccgggccuggagaa

SEQ ID NO: 1841443 - RNA, 20 nt, Human
cgauacaccgggccuggaga

SEQ ID NO: 1841444 - RNA, 18 nt, Human
cgauacaccgggccugga

SEQ ID NO: 1841445 - RNA, 19 nt, Human
cgaguagcugagauuauag

SEQ ID NO: 1841446 - RNA, 22 nt, Human
cccauccucuguacagagccca

SEQ ID NO: 1841447 - RNA, 21 nt, Human
cccauccucuguacagagccc

SEQ ID NO: 1841448 - RNA, 16 nt, Human
cccaggaaaggcucca

SEQ ID NO: 1841449 - RNA, 15 nt, Human
cccaggaaaggcucc

SEQ ID NO: 1841450 - RNA, 16 nt, Human
cccacuggacucaccu

SEQ ID NO: 1841451 - RNA, 18 nt, Human
cccaggaaaggcuccagg

SEQ ID NO: 1841452 - RNA, 17 nt, Human
cccaggaaaggcuccag

SEQ ID NO: 1841453 - RNA, 17 nt, Human
cccaggcugagccucag

SEQ ID NO: 1841454 - RNA, 16 nt, Human
cccaggcugagccuca

SEQ ID NO: 1841455 - RNA, 15 nt, Human
cccaggcugagccuc

SEQ ID NO: 1841456 - RNA, 22 nt, Human
cccaggcuuagucacugagaca

SEQ ID NO: 1841457 - RNA, 20 nt, Human
cccaggcuggagugcaauga

SEQ ID NO: 1841458 - RNA, 18 nt, Human
cccaggcugagccucagu

SEQ ID NO: 1841459 - RNA, 13 nt, Human
cccaggcuggagu

SEQ ID NO: 1841460 - RNA, 14 nt, Human
ccccgcacugggcu

SEQ ID NO: 1841461 - RNA, 17 nt, Human
ccccagaggcuggguga

SEQ ID NO: 1841462 - RNA, 15 nt, Human
ccccagauugcaaca

SEQ ID NO: 1841463 - RNA, 20 nt, Human
ccccagauugcaacaggcug

SEQ ID NO: 1841464 - RNA, 15 nt, Human
cccauuugcuccuuu

SEQ ID NO: 1841465 - RNA, 19 nt, Human
cccauucugccugcccagg

SEQ ID NO: 1841466 - RNA, 14 nt, Human
cccauucugccugc

SEQ ID NO: 1841467 - RNA, 15 nt, Human
cccauucugccugcc

SEQ ID NO: 1841468 - RNA, 15 nt, Human
cccuccucucugccc

SEQ ID NO: 1841469 - RNA, 16 nt, Human
cccuccucucugcccu

SEQ ID NO: 1841470 - RNA, 21 nt, Human
cccgggaagggggcugggaca

SEQ ID NO: 1841471 - RNA, 18 nt, Human
cccgggaagggggcuggg

SEQ ID NO: 1841472 - RNA, 16 nt, Human
cccucaacaccucugc

SEQ ID NO: 1841473 - RNA, 22 nt, Human
cccgggaagggggcugggacau

SEQ ID NO: 1841474 - RNA, 16 nt, Human
cccucaacucuccucc

SEQ ID NO: 1841475 - RNA, 20 nt, Human
cccucaacucuccuccagag

SEQ ID NO: 1841476 - RNA, 16 nt, Human
cccucacccuggggcu

SEQ ID NO: 1841477 - RNA, 15 nt, Human
cccucacccuggggc

SEQ ID NO: 1841478 - RNA, 16 nt, Human
ccccuucugacccaug

SEQ ID NO: 1841479 - RNA, 14 nt, Human
ccccuucugaccca

SEQ ID NO: 1841480 - RNA, 13 nt, Human
ccccuucugaccc

SEQ ID NO: 1841481 - RNA, 16 nt, Human
cccgaauagcugggac

SEQ ID NO: 1841482 - RNA, 17 nt, Human
cccgaauagcugggacu

SEQ ID NO: 1841483 - RNA, 18 nt, Human
cccgaauagcugggacua

SEQ ID NO: 1841484 - RNA, 22 nt, Human
cccgaauagcugggacuacagg

SEQ ID NO: 1841485 - RNA, 15 nt, Human
cccgggaagggggcu

SEQ ID NO: 1841486 - RNA, 20 nt, Human
cccggcuaauuuuuguauuu

SEQ ID NO: 1841487 - RNA, 15 nt, Human
cccggccccugcugg

SEQ ID NO: 1841488 - RNA, 16 nt, Human
cccggccccugcuggu

SEQ ID NO: 1841489 - RNA, 23 nt, Human
ccccucugcccugcgggucacag

SEQ ID NO: 1841490 - RNA, 20 nt, Human
ccccucugcccugcggguca

SEQ ID NO: 1841491 - RNA, 15 nt, Human
ccccucugcccugcg

SEQ ID NO: 1841492 - RNA, 14 nt, Human
ccccugccacccug

SEQ ID NO: 1841493 - RNA, 16 nt, Human
ccccugccacccuggg

SEQ ID NO: 1841494 - RNA, 13 nt, Human
ccccugcacucca

SEQ ID NO: 1841495 - RNA, 21 nt, Human
ccccugcaaagcccagcuuga

SEQ ID NO: 1841496 - RNA, 20 nt, Human
ccccugcaaagcccagcuug

SEQ ID NO: 1841497 - RNA, 18 nt, Human
ccccugcaaagcccagcu

SEQ ID NO: 1841498 - RNA, 15 nt, Human
ccccugacaacacuc

SEQ ID NO: 1841499 - RNA, 18 nt, Human
ccccucuggcuccagcug

SEQ ID NO: 1841500 - RNA, 16 nt, Human
ccccucuggcuccagc

SEQ ID NO: 1841501 - RNA, 18 nt, Human
ccagucccccugccccag

SEQ ID NO: 1841502 - RNA, 21 nt, Human
ccaggcugcucuugaacuccu

SEQ ID NO: 1841503 - RNA, 23 nt, Human
ccaggcaggucuugaacuccugg

SEQ ID NO: 1841504 - RNA, 12 nt, Human
ccaggcaggucu

SEQ ID NO: 1841505 - RNA, 14 nt, Human
ccaggcaggucuug

SEQ ID NO: 1841506 - RNA, 21 nt, Human
ccaggggaaaaucagccugcu

SEQ ID NO: 1841507 - RNA, 12 nt, Human
ccaggcuggcgu

SEQ ID NO: 1841508 - RNA, 16 nt, Human
ccaggcuggcgugcag

SEQ ID NO: 1841509 - RNA, 24 nt, Human
ccagccccuucugacccaugcugc

SEQ ID NO: 1841510 - RNA, 23 nt, Human
ccagccccuucugacccaugcug

SEQ ID NO: 1841511 - RNA, 12 nt, Human
ccagcagaaaug

SEQ ID NO: 1841512 - RNA, 17 nt, Human
ccagccccauccucugu

SEQ ID NO: 1841513 - RNA, 15 nt, Human
ccagccccauccucu

SEQ ID NO: 1841514 - RNA, 18 nt, Human
ccagccccauccucugua

SEQ ID NO: 1841515 - RNA, 13 nt, Human
ccagcagagcacc

SEQ ID NO: 1841516 - RNA, 12 nt, Human
ccagcagagcac

SEQ ID NO: 1841517 - RNA, 14 nt, Human
ccagcagagcaccu

SEQ ID NO: 1841518 - RNA, 17 nt, Human
ccagccccagugcccac

SEQ ID NO: 1841519 - RNA, 16 nt, Human
cccaacucaccccagc

SEQ ID NO: 1841520 - RNA, 15 nt, Human
cccaacucaccccag

SEQ ID NO: 1841521 - RNA, 22 nt, Human
ccauuucauuugugccagaaug

SEQ ID NO: 1841522 - RNA, 21 nt, Human
ccauuucauuugugccagaau

SEQ ID NO: 1841523 - RNA, 12 nt, Human
cccacucccugc

SEQ ID NO: 1841524 - RNA, 13 nt, Human
cccacucccugca

SEQ ID NO: 1841525 - RNA, 12 nt, Human
cccacccccacc

SEQ ID NO: 1841526 - RNA, 23 nt, Human
cccacugcuuuuggucuguguga

SEQ ID NO: 1841527 - RNA, 13 nt, Human
cccaagcucugcu

SEQ ID NO: 1841528 - RNA, 14 nt, Human
cccaagcucugcuc

SEQ ID NO: 1841529 - RNA, 12 nt, Human
cccaagcucugc

SEQ ID NO: 1841530 - RNA, 15 nt, Human
cccaagcucugcucc

SEQ ID NO: 1841531 - RNA, 20 nt, Human
cccaacuaauuuuuguauuu

SEQ ID NO: 1841532 - RNA, 20 nt, Human
cccaacucaccccagcccca

SEQ ID NO: 1841533 - RNA, 17 nt, Human
cccaacucaccccagcc

SEQ ID NO: 1841534 - RNA, 20 nt, Human
ccaugaggaacaaggcaagg

SEQ ID NO: 1841535 - RNA, 23 nt, Human
ccaugaggaacaaggcaaggcug

SEQ ID NO: 1841536 - RNA, 18 nt, Human
ccaugaguccccuguuug

SEQ ID NO: 1841537 - RNA, 19 nt, Human
ccaugucgccucugcauuc

SEQ ID NO: 1841538 - RNA, 17 nt, Human
ccaugucgccucugcau

SEQ ID NO: 1841539 - RNA, 16 nt, Human
ccaugucgccucugca

SEQ ID NO: 1841540 - RNA, 15 nt, Human
ccaugucgccucugc

SEQ ID NO: 1841541 - RNA, 12 nt, Human
ccaugucgccuc

SEQ ID NO: 1841542 - RNA, 21 nt, Human
ccaucccauaugccugggcag

SEQ ID NO: 1841543 - RNA, 20 nt, Human
ccaucccauaugccugggca

SEQ ID NO: 1841544 - RNA, 19 nt, Human
ccaucccauaugccugggc

SEQ ID NO: 1841545 - RNA, 20 nt, Human
ccaucccaaacccuucagug

SEQ ID NO: 1841546 - RNA, 20 nt, Human
ccaguuggucccccuuccau

SEQ ID NO: 1841547 - RNA, 18 nt, Human
ccaguuggucccccuucc

SEQ ID NO: 1841548 - RNA, 21 nt, Human
ccauaaucuggacuccucugu

SEQ ID NO: 1841549 - RNA, 14 nt, Human
ccauaaucuggacu

SEQ ID NO: 1841550 - RNA, 18 nt, Human
ccauccagguucagcuug

SEQ ID NO: 1841551 - RNA, 19 nt, Human
ccauccagguucagcuugu

SEQ ID NO: 1841552 - RNA, 13 nt, Human
ccaguuggucccc

SEQ ID NO: 1841553 - RNA, 23 nt, Human
ccaguuggguggaugccuggugg

SEQ ID NO: 1841554 - RNA, 21 nt, Human
ccuaaugcgcaggcuggcccu

SEQ ID NO: 1841555 - RNA, 13 nt, Human
ccuaauaaagcug

SEQ ID NO: 1841556 - RNA, 12 nt, Human
ccuaauaaagcu

SEQ ID NO: 1841557 - RNA, 22 nt, Human
ccuagccuuagaagucacacag

SEQ ID NO: 1841558 - RNA, 23 nt, Human
ccuagccugugccucugggacug

SEQ ID NO: 1841559 - RNA, 19 nt, Human
ccuagccuuagaagucaca

SEQ ID NO: 1841560 - RNA, 14 nt, Human
ccgucccccucugg

SEQ ID NO: 1841561 - RNA, 18 nt, Human
ccggccaccugcggugcu

SEQ ID NO: 1841562 - RNA, 17 nt, Human
ccggccaccugcggugc

SEQ ID NO: 1841563 - RNA, 23 nt, Human
ccgcagcccugcagagggcacag

SEQ ID NO: 1841564 - RNA, 18 nt, Human
ccgcagcccugcagaggg

SEQ ID NO: 1841565 - RNA, 14 nt, Human
ccgcagcccugcag

SEQ ID NO: 1841566 - RNA, 15 nt, Human
cccugugggccccca

SEQ ID NO: 1841567 - RNA, 15 nt, Human
cccugugauggggcc

SEQ ID NO: 1841568 - RNA, 23 nt, Human
cccugugaguacuacaguccucc

SEQ ID NO: 1841569 - RNA, 21 nt, Human
cccugugaguacuacaguccu

SEQ ID NO: 1841570 - RNA, 14 nt, Human
cccuccuuucacca

SEQ ID NO: 1841571 - RNA, 23 nt, Human
cccuuuuuuggcugcugaaggcu

SEQ ID NO: 1841572 - RNA, 22 nt, Human
cccuuuuuuggcugcugaaggc

SEQ ID NO: 1841573 - RNA, 21 nt, Human
cccuuuuuuggcugcugaagg

SEQ ID NO: 1841574 - RNA, 19 nt, Human
cccuucucuccagccccug

SEQ ID NO: 1841575 - RNA, 14 nt, Human
cccuucucuccagc

SEQ ID NO: 1841576 - RNA, 12 nt, Human
ccgacagccugg

SEQ ID NO: 1841577 - RNA, 14 nt, Human
ccgacagccuggca

SEQ ID NO: 1841578 - RNA, 13 nt, Human
ccgacagccuggc

SEQ ID NO: 1841579 - RNA, 22 nt, Human
ccgacagccuggcacagggcag

SEQ ID NO: 1841580 - RNA, 15 nt, Human
ccgacagccuggcac

SEQ ID NO: 1841581 - RNA, 14 nt, Human
ccucaaaugagaaa

SEQ ID NO: 1841582 - RNA, 16 nt, Human
ccucaacaccucugca

SEQ ID NO: 1841583 - RNA, 23 nt, Human
ccucaacucuccuccagagucag

SEQ ID NO: 1841584 - RNA, 21 nt, Human
ccucaacucuccuccagaguc

SEQ ID NO: 1841585 - RNA, 19 nt, Human
ccucaacucuccuccagag

SEQ ID NO: 1841586 - RNA, 15 nt, Human
ccucaaccuccuggg

SEQ ID NO: 1841587 - RNA, 18 nt, Human
ccucaggcaggugggaug

SEQ ID NO: 1841588 - RNA, 12 nt, Human
ccucaggcaggu

SEQ ID NO: 1841589 - RNA, 10 nt, Human
ccucaggccu

SEQ ID NO: 1841590 - RNA, 21 nt, Human
ccucauuccaccuucccaugc

SEQ ID NO: 1841591 - RNA, 23 nt, Human
ccucaagugauucuccugccuca

SEQ ID NO: 1841592 - RNA, 16 nt, Human
ccucaaccuccugggc

SEQ ID NO: 1841593 - RNA, 20 nt, Human
ccucaagugauucuccugcc

SEQ ID NO: 1841594 - RNA, 19 nt, Human
ccuccaagaccuucuccuu

SEQ ID NO: 1841595 - RNA, 17 nt, Human
ccuccaagaccuucucc

SEQ ID NO: 1841596 - RNA, 16 nt, Human
ccuccaagaccuucuc

SEQ ID NO: 1841597 - RNA, 12 nt, Human
ccucccaucacc

SEQ ID NO: 1841598 - RNA, 20 nt, Human
ccuccaagaccuucuccuuc

SEQ ID NO: 1841599 - RNA, 17 nt, Human
ccucccaucacccgcua

SEQ ID NO: 1841600 - RNA, 23 nt, Human
ccuccuuugugaggaagccgcug

SEQ ID NO: 1841601 - RNA, 19 nt, Human
ccuccuaucagaaguuucu

SEQ ID NO: 1841602 - RNA, 18 nt, Human
ccuccuuuucacaguucu

SEQ ID NO: 1841603 - RNA, 21 nt, Human
ccucgagguuucucaaagaaa

SEQ ID NO: 1841604 - RNA, 20 nt, Human
ccucggacuuagcugggaga

SEQ ID NO: 1841605 - RNA, 19 nt, Human
ccucggacuuagcugggag

SEQ ID NO: 1841606 - RNA, 13 nt, Human
ccuccgccucuug

SEQ ID NO: 1841607 - RNA, 14 nt, Human
ccuccgccucuugg

SEQ ID NO: 1841608 - RNA, 16 nt, Human
ccucccuucucuucac

SEQ ID NO: 1841609 - RNA, 20 nt, Human
ccucccuuggggccuaugca

SEQ ID NO: 1841610 - RNA, 15 nt, Human
ccugccucucugcag

SEQ ID NO: 1841611 - RNA, 14 nt, Human
ccugccucucugca

SEQ ID NO: 1841612 - RNA, 20 nt, Human
ccugcugagucccaggcuga

SEQ ID NO: 1841613 - RNA, 19 nt, Human
ccugcugagucccaggcug

SEQ ID NO: 1841614 - RNA, 18 nt, Human
ccugcugagucccaggcu

SEQ ID NO: 1841615 - RNA, 13 nt, Human
ccugccucucugc

SEQ ID NO: 1841616 - RNA, 17 nt, Human
ccugccucagccucccg

SEQ ID NO: 1841617 - RNA, 16 nt, Human
ccugccucagccuccc

SEQ ID NO: 1841618 - RNA, 15 nt, Human
ccugccucagccucc

SEQ ID NO: 1841619 - RNA, 21 nt, Human
ccugcccaggccccugccacc

SEQ ID NO: 1841620 - RNA, 22 nt, Human
ccugcccaggccccugccaccc

SEQ ID NO: 1841621 - RNA, 19 nt, Human
ccugcccaccuggccucug

SEQ ID NO: 1841622 - RNA, 18 nt, Human
ccugcccaccuggccucu

SEQ ID NO: 1841623 - RNA, 19 nt, Human
ccugcccaggccccugcca

SEQ ID NO: 1841624 - RNA, 17 nt, Human
ccugcccaccuggccuc

SEQ ID NO: 1841625 - RNA, 15 nt, Human
ccugcccaccuggcc

SEQ ID NO: 1841626 - RNA, 19 nt, Human
ccucuuucccucccuuccu

SEQ ID NO: 1841627 - RNA, 15 nt, Human
ccucuuugagugaag

SEQ ID NO: 1841628 - RNA, 14 nt, Human
ccucuugccacugc

SEQ ID NO: 1841629 - RNA, 22 nt, Human
ccucuugccacugccucuuccu

SEQ ID NO: 1841630 - RNA, 23 nt, Human
ccucuugccacugccucuuccuc

SEQ ID NO: 1841631 - RNA, 18 nt, Human
ccugaccccucauagccc

SEQ ID NO: 1841632 - RNA, 13 nt, Human
ccugcaggcagcc

SEQ ID NO: 1841633 - RNA, 12 nt, Human
ccugcaggcagc

SEQ ID NO: 1841634 - RNA, 14 nt, Human
ccugcaggcagcca

SEQ ID NO: 1841635 - RNA, 22 nt, Human
ccugguuuccugcccugggagg

SEQ ID NO: 1841636 - RNA, 17 nt, Human
ccugucucuacuaaaaa

SEQ ID NO: 1841637 - RNA, 15 nt, Human
ccuggauggggcugc

SEQ ID NO: 1841638 - RNA, 18 nt, Human
ccuggauggggcugcacc

SEQ ID NO: 1841639 - RNA, 17 nt, Human
ccuggauggggcugcac

SEQ ID NO: 1841640 - RNA, 18 nt, Human
ccuggccccucagggucc

SEQ ID NO: 1841641 - RNA, 21 nt, Human
ccuggccccucagggucccug

SEQ ID NO: 1841642 - RNA, 20 nt, Human
ccuggccccucagggucccu

SEQ ID NO: 1841643 - RNA, 22 nt, Human
ccuggccucaagugauucuccu

SEQ ID NO: 1841644 - RNA, 13 nt, Human
ccugguguggaag

SEQ ID NO: 1841645 - RNA, 16 nt, Human
ccugguuuccugcccu

SEQ ID NO: 1841646 - RNA, 21 nt, Human
ccugguuuccugcccugggag

SEQ ID NO: 1841647 - RNA, 20 nt, Human
ccugguuuccugcccuggga

SEQ ID NO: 1841648 - RNA, 19 nt, Human
ccugguuuccugcccuggg

SEQ ID NO: 1841649 - RNA, 18 nt, Human
ccugguuuccugcccugg

SEQ ID NO: 1841650 - RNA, 20 nt, Human
ccugguggcagugggagcug

SEQ ID NO: 1841651 - RNA, 18 nt, Human
ccugguggcagugggagc

SEQ ID NO: 1841652 - RNA, 19 nt, Human
ccugguggcagugggagcu

SEQ ID NO: 1841653 - RNA, 18 nt, Human
ccuggggaaccugacccc

SEQ ID NO: 1841654 - RNA, 15 nt, Human
ccuggggagaaagua

SEQ ID NO: 1841655 - RNA, 19 nt, Human
ccaccgggcugggagcucu

SEQ ID NO: 1841656 - RNA, 18 nt, Human
ccaccaucaugucuggcu

SEQ ID NO: 1841657 - RNA, 19 nt, Human
ccaccaucaugucuggcua

SEQ ID NO: 1841658 - RNA, 22 nt, Human
ccaccgggcugggagcucugca

SEQ ID NO: 1841659 - RNA, 12 nt, Human
ccaccuuggcug

SEQ ID NO: 1841660 - RNA, 14 nt, Human
ccaccuuggcugca

SEQ ID NO: 1841661 - RNA, 15 nt, Human
ccaccuuggcugcag

SEQ ID NO: 1841662 - RNA, 16 nt, Human
ccaccuuggcugcagg

SEQ ID NO: 1841663 - RNA, 13 nt, Human
ccacgcuggagug

SEQ ID NO: 1841664 - RNA, 18 nt, Human
ccacgcuggaccuugaac

SEQ ID NO: 1841665 - RNA, 13 nt, Human
ccacgcccccacu

SEQ ID NO: 1841666 - RNA, 18 nt, Human
ccaccuuggcugcaggga

SEQ ID NO: 1841667 - RNA, 19 nt, Human
ccaccuuggcugcagggag

SEQ ID NO: 1841668 - RNA, 21 nt, Human
ccacacuucaggcucuucucc

SEQ ID NO: 1841669 - RNA, 20 nt, Human
ccacacuucaggcucuucuc

SEQ ID NO: 1841670 - RNA, 16 nt, Human
ccacacuucaggcucu

SEQ ID NO: 1841671 - RNA, 15 nt, Human
ccaccacgcccggcu

SEQ ID NO: 1841672 - RNA, 22 nt, Human
ccacagagaaaguacuucucca

SEQ ID NO: 1841673 - RNA, 15 nt, Human
ccaaggccaaaggaa

SEQ ID NO: 1841674 - RNA, 18 nt, Human
ccaaggaugccccguccc

SEQ ID NO: 1841675 - RNA, 14 nt, Human
ccaagaagcccagg

SEQ ID NO: 1841676 - RNA, 12 nt, Human
ccaagcuggucc

SEQ ID NO: 1841677 - RNA, 19 nt, Human
ccaagcuggucccacucag

SEQ ID NO: 1841678 - RNA, 15 nt, Human
ccaacgucugugcca

SEQ ID NO: 1841679 - RNA, 13 nt, Human
ccaacgucugugc

SEQ ID NO: 1841680 - RNA, 22 nt, Human
ccaaauggaaaugggcagagca

SEQ ID NO: 1841681 - RNA, 16 nt, Human
ccaacgucugugccau

SEQ ID NO: 1841682 - RNA, 13 nt, Human
ccaagaagcccag

SEQ ID NO: 1841683 - RNA, 12 nt, Human
ccaaaugcagcu

SEQ ID NO: 1841684 - RNA, 18 nt, Human
ccaaaugcagcuuuaaaa

SEQ ID NO: 1841685 - RNA, 15 nt, Human
ccaaaugcagcuuua

SEQ ID NO: 1841686 - RNA, 13 nt, Human
ccaaaugcagcuu

SEQ ID NO: 1841687 - RNA, 16 nt, Human
ccaaggccaaaggaag

SEQ ID NO: 1841688 - RNA, 19 nt, Human
cauuuuuuaaaugcaccug

SEQ ID NO: 1841689 - RNA, 15 nt, Human
cauuuuuuaaaugca

SEQ ID NO: 1841690 - RNA, 16 nt, Human
cauuuuuuaaaugcac

SEQ ID NO: 1841691 - RNA, 14 nt, Human
cauuuauucugcuc

SEQ ID NO: 1841692 - RNA, 15 nt, Human
cauuuauucugcuca

SEQ ID NO: 1841693 - RNA, 16 nt, Human
cauuugugaaaugaug

SEQ ID NO: 1841694 - RNA, 14 nt, Human
cauuugugaaauga

SEQ ID NO: 1841695 - RNA, 17 nt, Human
cauuugucacacacuuu

SEQ ID NO: 1841696 - RNA, 15 nt, Human
cauuuggauuggaug

SEQ ID NO: 1841697 - RNA, 15 nt, Human
caucaggccaggccc

SEQ ID NO: 1841698 - RNA, 19 nt, Human
caucaggccaggcccucug

SEQ ID NO: 1841699 - RNA, 16 nt, Human
caucaggccaggcccu

SEQ ID NO: 1841700 - RNA, 20 nt, Human
caucaggccaggcccucugc

SEQ ID NO: 1841701 - RNA, 19 nt, Human
caucccauaugccugggca

SEQ ID NO: 1841702 - RNA, 14 nt, Human
cauccccuguagag

SEQ ID NO: 1841703 - RNA, 21 nt, Human
cauccccuguagagugggagc

SEQ ID NO: 1841704 - RNA, 15 nt, Human
cauauucaggaagcu

SEQ ID NO: 1841705 - RNA, 14 nt, Human
cauauucaggaagc

SEQ ID NO: 1841706 - RNA, 20 nt, Human
cauauucaggaagcucaggg

SEQ ID NO: 1841707 - RNA, 22 nt, Human
cauauucaggaagcucagggcc

SEQ ID NO: 1841708 - RNA, 20 nt, Human
cauaugccugggcagaagga

SEQ ID NO: 1841709 - RNA, 15 nt, Human
cauaugccugggcag

SEQ ID NO: 1841710 - RNA, 22 nt, Human
cauaugccugggcagaaggaag

SEQ ID NO: 1841711 - RNA, 22 nt, Human
cauagcuuacaagccagcugga

SEQ ID NO: 1841712 - RNA, 19 nt, Human
cauagcagagaaugaaagg

SEQ ID NO: 1841713 - RNA, 22 nt, Human
cauagcagagaaugaaagggcc

SEQ ID NO: 1841714 - RNA, 15 nt, Human
cagugggagcugccu

SEQ ID NO: 1841715 - RNA, 15 nt, Human
caugcugcccuguga

SEQ ID NO: 1841716 - RNA, 14 nt, Human
caugcugcccugug

SEQ ID NO: 1841717 - RNA, 13 nt, Human
cauggccaggugg

SEQ ID NO: 1841718 - RNA, 14 nt, Human
cauggccagguggc

SEQ ID NO: 1841719 - RNA, 15 nt, Human
caugaaguaauaugc

SEQ ID NO: 1841720 - RNA, 19 nt, Human
caugaaguaauaugcacac

SEQ ID NO: 1841721 - RNA, 22 nt, Human
caugaaguaauaugcacacauu

SEQ ID NO: 1841722 - RNA, 23 nt, Human
caugaaguaauaugcacacauuu

SEQ ID NO: 1841723 - RNA, 23 nt, Human
caugacacgaauauugcugaugg

SEQ ID NO: 1841724 - RNA, 21 nt, Human
caugacacgaauauugcugau

SEQ ID NO: 1841725 - RNA, 24 nt, Human
caugauuaaccacuucagcugacu

SEQ ID NO: 1841726 - RNA, 12 nt, Human
caugcacaaauu

SEQ ID NO: 1841727 - RNA, 23 nt, Human
caugauuaaccacuucagcugac

SEQ ID NO: 1841728 - RNA, 22 nt, Human
caugauuaaccacuucagcuga

SEQ ID NO: 1841729 - RNA, 13 nt, Human
caugcugcccugu

SEQ ID NO: 1841730 - RNA, 12 nt, Human
caugcugcccug

SEQ ID NO: 1841731 - RNA, 13 nt, Human
caugcuccuggcc

SEQ ID NO: 1841732 - RNA, 16 nt, Human
caugcacgugugugca

SEQ ID NO: 1841733 - RNA, 20 nt, Human
cauguccaagaagcccagga

SEQ ID NO: 1841734 - RNA, 19 nt, Human
cauguccaagaagcccagg

SEQ ID NO: 1841735 - RNA, 18 nt, Human
cauguccaagaagcccag

SEQ ID NO: 1841736 - RNA, 12 nt, Human
cauguuggccag

SEQ ID NO: 1841737 - RNA, 13 nt, Human
cauguuggccagg

SEQ ID NO: 1841738 - RNA, 23 nt, Human
cauuaucuagauacuguaucaug

SEQ ID NO: 1841739 - RNA, 22 nt, Human
cauuaggugugacugaauuucu

SEQ ID NO: 1841740 - RNA, 14 nt, Human
cauucucacuccua

SEQ ID NO: 1841741 - RNA, 18 nt, Human
cauucuagguuugcaaga

SEQ ID NO: 1841742 - RNA, 13 nt, Human
cauucucacuccu

SEQ ID NO: 1841743 - RNA, 12 nt, Human
cauuccuguucc

SEQ ID NO: 1841744 - RNA, 20 nt, Human
cagaggggguggccucccaa

SEQ ID NO: 1841745 - RNA, 19 nt, Human
cagaggggguggccuccca

SEQ ID NO: 1841746 - RNA, 17 nt, Human
cagaggggguggccucc

SEQ ID NO: 1841747 - RNA, 18 nt, Human
cagaggggguggccuccc

SEQ ID NO: 1841748 - RNA, 20 nt, Human
cagagucagaaguuucugcc

SEQ ID NO: 1841749 - RNA, 18 nt, Human
cagagcugccaccugccu

SEQ ID NO: 1841750 - RNA, 16 nt, Human
cagagcugccaccugc

SEQ ID NO: 1841751 - RNA, 23 nt, Human
cagaaguuugagaucagccuggg

SEQ ID NO: 1841752 - RNA, 22 nt, Human
cagaaguuugagaucagccugg

SEQ ID NO: 1841753 - RNA, 20 nt, Human
cagaaguuugagaucagccu

SEQ ID NO: 1841754 - RNA, 19 nt, Human
cagaaguuucugccgcagc

SEQ ID NO: 1841755 - RNA, 23 nt, Human
cagaaguuucugccgcagcccug

SEQ ID NO: 1841756 - RNA, 22 nt, Human
cagagggccugcaagggaguga

SEQ ID NO: 1841757 - RNA, 23 nt, Human
cagcauauucaggaagcucaggg

SEQ ID NO: 1841758 - RNA, 22 nt, Human
cagcauauucaggaagcucagg

SEQ ID NO: 1841759 - RNA, 19 nt, Human
cagcauauucaggaagcuc

SEQ ID NO: 1841760 - RNA, 13 nt, Human
cagccaggccaca

SEQ ID NO: 1841761 - RNA, 12 nt, Human
cagccaggccac

SEQ ID NO: 1841762 - RNA, 22 nt, Human
cagccaggccacaagacccuug

SEQ ID NO: 1841763 - RNA, 15 nt, Human
cagcaccuacagugu

SEQ ID NO: 1841764 - RNA, 20 nt, Human
cagcaccuacaguguacagu

SEQ ID NO: 1841765 - RNA, 13 nt, Human
cagcuccagcuca

SEQ ID NO: 1841766 - RNA, 14 nt, Human
cagcuccagcucac

SEQ ID NO: 1841767 - RNA, 15 nt, Human
cagcuccagcucacc

SEQ ID NO: 1841768 - RNA, 21 nt, Human
cagcucccaaggcucugagca

SEQ ID NO: 1841769 - RNA, 22 nt, Human
cagcuccagcucaccagcccca

SEQ ID NO: 1841770 - RNA, 16 nt, Human
cagcuccagcucacca

SEQ ID NO: 1841771 - RNA, 17 nt, Human
cagcuccagcucaccag

SEQ ID NO: 1841772 - RNA, 18 nt, Human
cagcuccagcucaccagc

SEQ ID NO: 1841773 - RNA, 20 nt, Human
cagcuccagcucaccagccc

SEQ ID NO: 1841774 - RNA, 19 nt, Human
cagcugugcucuggacagg

SEQ ID NO: 1841775 - RNA, 18 nt, Human
cagcugugcucuggacag

SEQ ID NO: 1841776 - RNA, 15 nt, Human
cagcuucauuuccug

SEQ ID NO: 1841777 - RNA, 18 nt, Human
cagcuucauuuccugugu

SEQ ID NO: 1841778 - RNA, 19 nt, Human
cagcuucauuuccuguguc

SEQ ID NO: 1841779 - RNA, 15 nt, Human
caggaaaggcuccag

SEQ ID NO: 1841780 - RNA, 14 nt, Human
caggaaaggcucca

SEQ ID NO: 1841781 - RNA, 15 nt, Human
cagcggggacagcuc

SEQ ID NO: 1841782 - RNA, 16 nt, Human
cagcggggacagcucc

SEQ ID NO: 1841783 - RNA, 17 nt, Human
cagcggggacagcuccu

SEQ ID NO: 1841784 - RNA, 19 nt, Human
cagccugagcgacagugag

SEQ ID NO: 1841785 - RNA, 22 nt, Human
cagccugagcgacagugagacu

SEQ ID NO: 1841786 - RNA, 18 nt, Human
cagccugagcgacaguga

SEQ ID NO: 1841787 - RNA, 14 nt, Human
cagccccuggaugc

SEQ ID NO: 1841788 - RNA, 13 nt, Human
cagccccuggaug

SEQ ID NO: 1841789 - RNA, 12 nt, Human
cagccccuggau

SEQ ID NO: 1841790 - RNA, 21 nt, Human
cagccccuggaugcagccuca

SEQ ID NO: 1841791 - RNA, 19 nt, Human
cagccccuggaugcagccu

SEQ ID NO: 1841792 - RNA, 18 nt, Human
cagccccuggaugcagcc

SEQ ID NO: 1841793 - RNA, 17 nt, Human
cagccccuggaugcagc

SEQ ID NO: 1841794 - RNA, 15 nt, Human
cagcccuuagcaggg

SEQ ID NO: 1841795 - RNA, 22 nt, Human
cagccccuggaugcagccucac

SEQ ID NO: 1841796 - RNA, 16 nt, Human
cagcccuuagcaggga

SEQ ID NO: 1841797 - RNA, 21 nt, Human
cagcccuuagcagggaaacag

SEQ ID NO: 1841798 - RNA, 21 nt, Human
cagccgagauagccaaggcca

SEQ ID NO: 1841799 - RNA, 23 nt, Human
caggccagagggagugacagagg

SEQ ID NO: 1841800 - RNA, 19 nt, Human
caggccagagggagugaca

SEQ ID NO: 1841801 - RNA, 21 nt, Human
caggccagagggagugacaga

SEQ ID NO: 1841802 - RNA, 16 nt, Human
caggaggccagccuug

SEQ ID NO: 1841803 - RNA, 15 nt, Human
caggaggccagccuu

SEQ ID NO: 1841804 - RNA, 14 nt, Human
caggaggccagccu

SEQ ID NO: 1841805 - RNA, 18 nt, Human
caggcacccaccaucaug

SEQ ID NO: 1841806 - RNA, 22 nt, Human
caggcacccaccaucaugucug

SEQ ID NO: 1841807 - RNA, 23 nt, Human
caggcacccaccaucaugucugg

SEQ ID NO: 1841808 - RNA, 15 nt, Human
caggagggaggggga

SEQ ID NO: 1841809 - RNA, 17 nt, Human
caggaggccagccuuga

SEQ ID NO: 1841810 - RNA, 23 nt, Human
caggagggagggggaaggcaggg

SEQ ID NO: 1841811 - RNA, 22 nt, Human
cagggaguccgaaagggacuug

SEQ ID NO: 1841812 - RNA, 16 nt, Human
cagggagggccugggc

SEQ ID NO: 1841813 - RNA, 14 nt, Human
cagggagggccugg

SEQ ID NO: 1841814 - RNA, 18 nt, Human
cagggaggugaccccagg

SEQ ID NO: 1841815 - RNA, 15 nt, Human
caggcgccccuuccc

SEQ ID NO: 1841816 - RNA, 20 nt, Human
caggccugccuguucccauu

SEQ ID NO: 1841817 - RNA, 19 nt, Human
caggcuggcccugcccugg

SEQ ID NO: 1841818 - RNA, 18 nt, Human
caggcuggcccugcccug

SEQ ID NO: 1841819 - RNA, 17 nt, Human
caggcuggcccugcccu

SEQ ID NO: 1841820 - RNA, 17 nt, Human
caggcgccccuuccccc

SEQ ID NO: 1841821 - RNA, 20 nt, Human
caggcuggcccugcccuggu

SEQ ID NO: 1841822 - RNA, 15 nt, Human
caggcuggcgugcag

SEQ ID NO: 1841823 - RNA, 16 nt, Human
caggcugggcuucagu

SEQ ID NO: 1841824 - RNA, 19 nt, Human
cagggaggacgcucucugg

SEQ ID NO: 1841825 - RNA, 13 nt, Human
cagggagggccug

SEQ ID NO: 1841826 - RNA, 12 nt, Human
cagggagggccu

SEQ ID NO: 1841827 - RNA, 17 nt, Human
cagggaggacgcucucu

SEQ ID NO: 1841828 - RNA, 18 nt, Human
cagggaggacgcucucug

SEQ ID NO: 1841829 - RNA, 17 nt, Human
caggcugggcuucagug

SEQ ID NO: 1841830 - RNA, 19 nt, Human
caggcugggcuucaguggc

SEQ ID NO: 1841831 - RNA, 20 nt, Human
caggugcuaggaacacuccu

SEQ ID NO: 1841832 - RNA, 18 nt, Human
caggugcuaggaacacuc

SEQ ID NO: 1841833 - RNA, 14 nt, Human
caggugcgaaagga

SEQ ID NO: 1841834 - RNA, 14 nt, Human
cagguugguggggg

SEQ ID NO: 1841835 - RNA, 20 nt, Human
caggugauccacccaccuca

SEQ ID NO: 1841836 - RNA, 14 nt, Human
caggguuggccccu

SEQ ID NO: 1841837 - RNA, 12 nt, Human
caggguuggccc

SEQ ID NO: 1841838 - RNA, 16 nt, Human
caggugauccacccac

SEQ ID NO: 1841839 - RNA, 17 nt, Human
caggugauccacccacc

SEQ ID NO: 1841840 - RNA, 22 nt, Human
cagggucucacucugucgccca

SEQ ID NO: 1841841 - RNA, 21 nt, Human
cagggucucacucugucgccc

SEQ ID NO: 1841842 - RNA, 18 nt, Human
cagggucucacucugucg

SEQ ID NO: 1841843 - RNA, 18 nt, Human
cagguuuaagcuguuacu

SEQ ID NO: 1841844 - RNA, 16 nt, Human
cagguuuaagcuguua

SEQ ID NO: 1841845 - RNA, 22 nt, Human
cagucaccccggccaccugcgg

SEQ ID NO: 1841846 - RNA, 19 nt, Human
cagucaccccggccaccug

SEQ ID NO: 1841847 - RNA, 20 nt, Human
cagucaccccggccaccugc

SEQ ID NO: 1841848 - RNA, 14 nt, Human
cagucucccucccu

SEQ ID NO: 1841849 - RNA, 23 nt, Human
cagugcaugcugucccuuacgug

SEQ ID NO: 1841850 - RNA, 22 nt, Human
cagugcaugcugucccuuacgu

SEQ ID NO: 1841851 - RNA, 19 nt, Human
cagugcaugcugucccuua

SEQ ID NO: 1841852 - RNA, 19 nt, Human
cagucugauucccaagcuc

SEQ ID NO: 1841853 - RNA, 20 nt, Human
cagucugauucccaagcucu

SEQ ID NO: 1841854 - RNA, 11 nt, Human
cagugggagcu

SEQ ID NO: 1841855 - RNA, 16 nt, Human
cagugggacagggcau

SEQ ID NO: 1841856 - RNA, 19 nt, Human
cagugggacagggcauggc

SEQ ID NO: 1841857 - RNA, 12 nt, Human
cagugcccacag

SEQ ID NO: 1841858 - RNA, 15 nt, Human
cagugccaaaaacaa

SEQ ID NO: 1841859 - RNA, 22 nt, Human
auuuaugcauauuauuuuaugu

SEQ ID NO: 1841860 - RNA, 16 nt, Human
auuuaugcauauuauu

SEQ ID NO: 1841861 - RNA, 21 nt, Human
auuuaaugaaagacuguacaa

SEQ ID NO: 1841862 - RNA, 20 nt, Human
auuuaaugaaagacuguaca

SEQ ID NO: 1841863 - RNA, 15 nt, Human
auuuaaugaaagacu

SEQ ID NO: 1841864 - RNA, 16 nt, Human
auuuaaugaaagacug

SEQ ID NO: 1841865 - RNA, 14 nt, Human
auugcuugcacaaa

SEQ ID NO: 1841866 - RNA, 16 nt, Human
auugcuuguuggauuu

SEQ ID NO: 1841867 - RNA, 15 nt, Human
auuccugcauuugug

SEQ ID NO: 1841868 - RNA, 18 nt, Human
auuccugcauuugugaaa

SEQ ID NO: 1841869 - RNA, 18 nt, Human
auucuccuuguguuacua

SEQ ID NO: 1841870 - RNA, 19 nt, Human
auucuccuuguguuacuaa

SEQ ID NO: 1841871 - RNA, 21 nt, Human
auucuccuuguguuacuaagu

SEQ ID NO: 1841872 - RNA, 22 nt, Human
auucuccuuguguuacuaaguu

SEQ ID NO: 1841873 - RNA, 17 nt, Human
auucucuaguuugauua

SEQ ID NO: 1841874 - RNA, 18 nt, Human
auucucuaguuugauuaa

SEQ ID NO: 1841875 - RNA, 19 nt, Human
auucucuaguuugauuaaa

SEQ ID NO: 1841876 - RNA, 19 nt, Human
auucuucugcuucagccuc

SEQ ID NO: 1841877 - RNA, 20 nt, Human
auucuucugcuucagccucc

SEQ ID NO: 1841878 - RNA, 22 nt, Human
auucuucuguacgucugacagg

SEQ ID NO: 1841879 - RNA, 15 nt, Human
auucuugcaaaguau

SEQ ID NO: 1841880 - RNA, 16 nt, Human
auucuugcaaaguauc

SEQ ID NO: 1841881 - RNA, 14 nt, Human
auucuugcaaagua

SEQ ID NO: 1841882 - RNA, 19 nt, Human
auuaaaugcccagccccuu

SEQ ID NO: 1841883 - RNA, 17 nt, Human
auuaaaugcccagcccc

SEQ ID NO: 1841884 - RNA, 16 nt, Human
auuaggauuucaugau

SEQ ID NO: 1841885 - RNA, 14 nt, Human
auuaggauuucaug

SEQ ID NO: 1841886 - RNA, 11 nt, Human
auuaaauuaug

SEQ ID NO: 1841887 - RNA, 20 nt, Human
auuaguacuccccuccuuga

SEQ ID NO: 1841888 - RNA, 18 nt, Human
auucaacagguuuuccug

SEQ ID NO: 1841889 - RNA, 21 nt, Human
auuuuauaucaauuuaaaaaa

SEQ ID NO: 1841890 - RNA, 16 nt, Human
auuuuuaagugcugca

SEQ ID NO: 1841891 - RNA, 18 nt, Human
auuuuuaagugcugcauu

SEQ ID NO: 1841892 - RNA, 19 nt, Human
auuuuuaagugcugcauuu

SEQ ID NO: 1841893 - RNA, 14 nt, Human
auuuuuagacagag

SEQ ID NO: 1841894 - RNA, 23 nt, Human
auuuuuuuuuccuucagugccuu

SEQ ID NO: 1841895 - RNA, 22 nt, Human
auuuuuuuuuccuucagugccu

SEQ ID NO: 1841896 - RNA, 20 nt, Human
auuuuuuuuuccuucagugc

SEQ ID NO: 1841897 - RNA, 18 nt, Human
auuuuuuuuuccuucagu

SEQ ID NO: 1841898 - RNA, 16 nt, Human
auuuuuuugagacaga

SEQ ID NO: 1841899 - RNA, 21 nt, Human
caaaccccgaccaccugccca

SEQ ID NO: 1841900 - RNA, 18 nt, Human
caaaccccgaccaccugc

SEQ ID NO: 1841901 - RNA, 21 nt, Human
caaaaggauaaugaauacuuu

SEQ ID NO: 1841902 - RNA, 18 nt, Human
caacucaccccagcccca

SEQ ID NO: 1841903 - RNA, 18 nt, Human
caacuaauuuuuguauuu

SEQ ID NO: 1841904 - RNA, 22 nt, Human
caagaauugaagcaggacuaaa

SEQ ID NO: 1841905 - RNA, 14 nt, Human
caacucuccuccag

SEQ ID NO: 1841906 - RNA, 17 nt, Human
caagaccacguuucuaa

SEQ ID NO: 1841907 - RNA, 18 nt, Human
caagaccacguuucuaaa

SEQ ID NO: 1841908 - RNA, 19 nt, Human
caagacccaaaaggcagaa

SEQ ID NO: 1841909 - RNA, 22 nt, Human
caacacacagauuugagcucag

SEQ ID NO: 1841910 - RNA, 21 nt, Human
caacacacagauuugagcuca

SEQ ID NO: 1841911 - RNA, 19 nt, Human
caaaguaucccuacuguaa

SEQ ID NO: 1841912 - RNA, 21 nt, Human
caaaguaucccuacuguaauu

SEQ ID NO: 1841913 - RNA, 22 nt, Human
caaaguagaagucuuagaugua

SEQ ID NO: 1841914 - RNA, 22 nt, Human
caaagguaaaucagacuaugaa

SEQ ID NO: 1841915 - RNA, 14 nt, Human
caaagguaaaucag

SEQ ID NO: 1841916 - RNA, 21 nt, Human
caaagcagugcaugcuguccc

SEQ ID NO: 1841917 - RNA, 18 nt, Human
caaagcagugcaugcugu

SEQ ID NO: 1841918 - RNA, 14 nt, Human
caaagauauuuugc

SEQ ID NO: 1841919 - RNA, 16 nt, Human
caaagauauuuugcuu

SEQ ID NO: 1841920 - RNA, 22 nt, Human
caaagcagugcaugcugucccu

SEQ ID NO: 1841921 - RNA, 18 nt, Human
caaagauauuuugcuuug

SEQ ID NO: 1841922 - RNA, 23 nt, Human
caaaugcuguaacuuucugaaau

SEQ ID NO: 1841923 - RNA, 22 nt, Human
caaaugagaaaaugucuuuauu

SEQ ID NO: 1841924 - RNA, 12 nt, Human
caccuacugagu

SEQ ID NO: 1841925 - RNA, 12 nt, Human
caccucagccuc

SEQ ID NO: 1841926 - RNA, 13 nt, Human
caccugcccaacc

SEQ ID NO: 1841927 - RNA, 19 nt, Human
caccugcccaaccugcucu

SEQ ID NO: 1841928 - RNA, 18 nt, Human
caccugcccaaccugcuc

SEQ ID NO: 1841929 - RNA, 23 nt, Human
caccuuuauucuggcagaggagg

SEQ ID NO: 1841930 - RNA, 18 nt, Human
caccuuggcugcagggag

SEQ ID NO: 1841931 - RNA, 15 nt, Human
caccuuggcugcagg

SEQ ID NO: 1841932 - RNA, 16 nt, Human
caccuuggcugcaggg

SEQ ID NO: 1841933 - RNA, 14 nt, Human
caccuuucccaucu

SEQ ID NO: 1841934 - RNA, 15 nt, Human
cacggcucacugcag

SEQ ID NO: 1841935 - RNA, 14 nt, Human
cacggcucacugca

SEQ ID NO: 1841936 - RNA, 17 nt, Human
cacggccaggccagagg

SEQ ID NO: 1841937 - RNA, 12 nt, Human
cacggccaggcc

SEQ ID NO: 1841938 - RNA, 13 nt, Human
cacggccaggcca

SEQ ID NO: 1841939 - RNA, 23 nt, Human
cacuccagccugagcgacaguga

SEQ ID NO: 1841940 - RNA, 14 nt, Human
cacuccagccuggg

SEQ ID NO: 1841941 - RNA, 13 nt, Human
cacuccagccugg

SEQ ID NO: 1841942 - RNA, 13 nt, Human
cacuccagccuga

SEQ ID NO: 1841943 - RNA, 12 nt, Human
cacuccagccug

SEQ ID NO: 1841944 - RNA, 21 nt, Human
cacuacauucuguuaaucauu

SEQ ID NO: 1841945 - RNA, 16 nt, Human
cacuacauucuguuaa

SEQ ID NO: 1841946 - RNA, 17 nt, Human
cacuacauucuguuaau

SEQ ID NO: 1841947 - RNA, 21 nt, Human
cacuacauuauaaaugucucu

SEQ ID NO: 1841948 - RNA, 20 nt, Human
cacucuuauugcccacgcug

SEQ ID NO: 1841949 - RNA, 21 nt, Human
cacucuuauugcccacgcugg

SEQ ID NO: 1841950 - RNA, 22 nt, Human
cacucuuauugcccacgcugga

SEQ ID NO: 1841951 - RNA, 20 nt, Human
cagaaagguuuucuucuuuu

SEQ ID NO: 1841952 - RNA, 16 nt, Human
cagaaauguacagcaa

SEQ ID NO: 1841953 - RNA, 18 nt, Human
cagaacagugauuaccag

SEQ ID NO: 1841954 - RNA, 19 nt, Human
cagaaguuucucagcuccc

SEQ ID NO: 1841955 - RNA, 15 nt, Human
cagaaguuucucagc

SEQ ID NO: 1841956 - RNA, 16 nt, Human
cagaaguuucugccgc

SEQ ID NO: 1841957 - RNA, 14 nt, Human
cagaaguuucugcc

SEQ ID NO: 1841958 - RNA, 12 nt, Human
cagaacagugau

SEQ ID NO: 1841959 - RNA, 17 nt, Human
cagaacagugauuacca

SEQ ID NO: 1841960 - RNA, 11 nt, Human
cagaacaguga

SEQ ID NO: 1841961 - RNA, 13 nt, Human
cacuuucuagcca

SEQ ID NO: 1841962 - RNA, 17 nt, Human
cacuuucuagccagagg

SEQ ID NO: 1841963 - RNA, 16 nt, Human
cacuuucuagccagag

SEQ ID NO: 1841964 - RNA, 18 nt, Human
cacuuucuagccagagga

SEQ ID NO: 1841965 - RNA, 19 nt, Human
cacuuguugauuaauggaa

SEQ ID NO: 1841966 - RNA, 18 nt, Human
cacuuguguuaugaagca

SEQ ID NO: 1841967 - RNA, 17 nt, Human
cacugccaugccagcuu

SEQ ID NO: 1841968 - RNA, 20 nt, Human
cacugcagccucaaccuccu

SEQ ID NO: 1841969 - RNA, 21 nt, Human
cacugcagccucaaccuccug

SEQ ID NO: 1841970 - RNA, 22 nt, Human
cacugcagccucaaccuccugg

SEQ ID NO: 1841971 - RNA, 23 nt, Human
cacugcagccucaaccuccuggg

SEQ ID NO: 1841972 - RNA, 19 nt, Human
cacugcagccucaaccucc

SEQ ID NO: 1841973 - RNA, 14 nt, Human
cacugcagccucaa

SEQ ID NO: 1841974 - RNA, 19 nt, Human
cacugggagaaaugaaaaa

SEQ ID NO: 1841975 - RNA, 20 nt, Human
cacugggcuuggggaccaga

SEQ ID NO: 1841976 - RNA, 13 nt, Human
cacugggcuucua

SEQ ID NO: 1841977 - RNA, 15 nt, Human
cacuuaaaaaugguu

SEQ ID NO: 1841978 - RNA, 18 nt, Human
cacuguugcccaggcugg

SEQ ID NO: 1841979 - RNA, 19 nt, Human
cacuguugcccaggcuggc

SEQ ID NO: 1841980 - RNA, 23 nt, Human
cacuguugcccaggcuggcgugc

SEQ ID NO: 1841981 - RNA, 14 nt, Human
caccaacgucugug

SEQ ID NO: 1841982 - RNA, 13 nt, Human
caccaacccucag

SEQ ID NO: 1841983 - RNA, 16 nt, Human
caccaacgucugugcc

SEQ ID NO: 1841984 - RNA, 17 nt, Human
caccaacauacucccau

SEQ ID NO: 1841985 - RNA, 19 nt, Human
cacauuuuauuuuauuaug

SEQ ID NO: 1841986 - RNA, 20 nt, Human
cacauuuuauuuuauuaugc

SEQ ID NO: 1841987 - RNA, 21 nt, Human
cacauuuuauuuuauuaugca

SEQ ID NO: 1841988 - RNA, 17 nt, Human
cacauuuuauuuuauua

SEQ ID NO: 1841989 - RNA, 13 nt, Human
caccagggaaggg

SEQ ID NO: 1841990 - RNA, 21 nt, Human
caccagggaaggggacaagga

SEQ ID NO: 1841991 - RNA, 18 nt, Human
caccagggaaggggacaa

SEQ ID NO: 1841992 - RNA, 17 nt, Human
cacccaccucagccucc

SEQ ID NO: 1841993 - RNA, 13 nt, Human
caccagccccagu

SEQ ID NO: 1841994 - RNA, 16 nt, Human
caccagccccagugcc

SEQ ID NO: 1841995 - RNA, 18 nt, Human
cacccaccucagccuccc

SEQ ID NO: 1841996 - RNA, 16 nt, Human
cacccaggagccccga

SEQ ID NO: 1841997 - RNA, 12 nt, Human
cacacauuuuuu

SEQ ID NO: 1841998 - RNA, 16 nt, Human
cacacauuuuuuaaau

SEQ ID NO: 1841999 - RNA, 19 nt, Human
cacacauuuuuuaaaugca

SEQ ID NO: 1842000 - RNA, 20 nt, Human
cacacauuuuuuaaaugcac

SEQ ID NO: 1842001 - RNA, 10 nt, Human
cacacauuuu

SEQ ID NO: 1842002 - RNA, 11 nt, Human
cacacauuuuu

SEQ ID NO: 1842003 - RNA, 13 nt, Human
cacagaacccuug

SEQ ID NO: 1842004 - RNA, 23 nt, Human
cacagaaaagaaaguucaugcuu

SEQ ID NO: 1842005 - RNA, 17 nt, Human
cacagcucuucuccagg

SEQ ID NO: 1842006 - RNA, 14 nt, Human
cacagcucuucucc

SEQ ID NO: 1842007 - RNA, 15 nt, Human
cacagcucuucucca

SEQ ID NO: 1842008 - RNA, 15 nt, Human
cacagcucuguccug

SEQ ID NO: 1842009 - RNA, 16 nt, Human
cacagcucuguccugg

SEQ ID NO: 1842010 - RNA, 18 nt, Human
cacagcucuguccuggga

SEQ ID NO: 1842011 - RNA, 19 nt, Human
cacagcucuguccugggag

SEQ ID NO: 1842012 - RNA, 18 nt, Human
cacagacccugcccugug

SEQ ID NO: 1842013 - RNA, 11 nt, Human
cacagcucugu

SEQ ID NO: 1842014 - RNA, 14 nt, Human
cacagcucuguccu

SEQ ID NO: 1842015 - RNA, 17 nt, Human
cacagacccugcccugu

SEQ ID NO: 1842016 - RNA, 16 nt, Human
cacagacccugcccug

SEQ ID NO: 1842017 - RNA, 14 nt, Human
cacagacccugccc

SEQ ID NO: 1842018 - RNA, 21 nt, Human
cacaagcuccaagcucccagg

SEQ ID NO: 1842019 - RNA, 20 nt, Human
cacaagcuccaagcucccag

SEQ ID NO: 1842020 - RNA, 15 nt, Human
caaugggagcucaug

SEQ ID NO: 1842021 - RNA, 19 nt, Human
cacaagcuccaagcuccca

SEQ ID NO: 1842022 - RNA, 18 nt, Human
cacaagcuccaagcuccc

SEQ ID NO: 1842023 - RNA, 20 nt, Human
cacaagagcccaggccuccu

SEQ ID NO: 1842024 - RNA, 19 nt, Human
cacaagagcccaggccucc

SEQ ID NO: 1842025 - RNA, 18 nt, Human
cacaagagcccaggccuc

SEQ ID NO: 1842026 - RNA, 22 nt, Human
caaucccaccaacccucagagc

SEQ ID NO: 1842027 - RNA, 17 nt, Human
caaucccaccaacccuc

SEQ ID NO: 1842028 - RNA, 16 nt, Human
caaucccaccaacccu

SEQ ID NO: 1842029 - RNA, 23 nt, Human
caaucccaccaacccucagagcc

SEQ ID NO: 1842030 - RNA, 13 nt, Human
caaugcuggcugu

SEQ ID NO: 1842031 - RNA, 20 nt, Human
caaugcuggcuguuggcugg

SEQ ID NO: 1842032 - RNA, 21 nt, Human
caaugcuggcuguuggcuggg

SEQ ID NO: 1842033 - RNA, 20 nt, Human
caaggccaaaggaagcacau

SEQ ID NO: 1842034 - RNA, 19 nt, Human
caaggccaaaggaagcaca

SEQ ID NO: 1842035 - RNA, 21 nt, Human
caaggccaaaggaagcacaug

SEQ ID NO: 1842036 - RNA, 18 nt, Human
caaggcaaggcugucaau

SEQ ID NO: 1842037 - RNA, 16 nt, Human
caaggcaaggcuguca

SEQ ID NO: 1842038 - RNA, 17 nt, Human
caaggcaaggcugucaa

SEQ ID NO: 1842039 - RNA, 12 nt, Human
caagauuucaga

SEQ ID NO: 1842040 - RNA, 15 nt, Human
caaggcucugagcaa

SEQ ID NO: 1842041 - RNA, 20 nt, Human
caauaaaaucuugaaaaugc

SEQ ID NO: 1842042 - RNA, 20 nt, Human
cugaucugaugcaagcaaga

SEQ ID NO: 1842043 - RNA, 22 nt, Human
cugccucucccaucacuucccu

SEQ ID NO: 1842044 - RNA, 15 nt, Human
cugccucucccauca

SEQ ID NO: 1842045 - RNA, 23 nt, Human
cugccucucccaucacuucccua

SEQ ID NO: 1842046 - RNA, 24 nt, Human
cugccuccucuucaacugaccagc

SEQ ID NO: 1842047 - RNA, 15 nt, Human
cugccuccucuucaa

SEQ ID NO: 1842048 - RNA, 14 nt, Human
cugccuccucuuca

SEQ ID NO: 1842049 - RNA, 13 nt, Human
cugccuccucuuc

SEQ ID NO: 1842050 - RNA, 17 nt, Human
cugccuguucagcucca

SEQ ID NO: 1842051 - RNA, 18 nt, Human
cugccuguucagcuccag

SEQ ID NO: 1842052 - RNA, 20 nt, Human
cugccuguugggccaggagc

SEQ ID NO: 1842053 - RNA, 19 nt, Human
cugccuguucagcuccagc

SEQ ID NO: 1842054 - RNA, 22 nt, Human
cugccuguugggccaggagccu

SEQ ID NO: 1842055 - RNA, 21 nt, Human
cugccuguugggccaggagcc

SEQ ID NO: 1842056 - RNA, 23 nt, Human
cugccuguugggccaggagccuc

SEQ ID NO: 1842057 - RNA, 21 nt, Human
cugcugacuguuuucucuuga

SEQ ID NO: 1842058 - RNA, 18 nt, Human
cugcugacuguuuucucu

SEQ ID NO: 1842059 - RNA, 14 nt, Human
cugcuucaaauauu

SEQ ID NO: 1842060 - RNA, 21 nt, Human
cugcuucaaggauccugagcc

SEQ ID NO: 1842061 - RNA, 13 nt, Human
cugcuucaaggau

SEQ ID NO: 1842062 - RNA, 12 nt, Human
cugcuucaagga

SEQ ID NO: 1842063 - RNA, 19 nt, Human
cugcuucaaauauuucccu

SEQ ID NO: 1842064 - RNA, 23 nt, Human
cugcuucaaggauccugagccag

SEQ ID NO: 1842065 - RNA, 22 nt, Human
cugcuucaaggauccugagcca

SEQ ID NO: 1842066 - RNA, 20 nt, Human
cugcuuuugucuaugggacu

SEQ ID NO: 1842067 - RNA, 14 nt, Human
cuggagaaaaugga

SEQ ID NO: 1842068 - RNA, 14 nt, Human
cuggaagcacagcu

SEQ ID NO: 1842069 - RNA, 19 nt, Human
cugcuuuuuaaagaaugcu

SEQ ID NO: 1842070 - RNA, 21 nt, Human
cugcuuuugucuaugggacuc

SEQ ID NO: 1842071 - RNA, 20 nt, Human
cugggcaccggggccucgga

SEQ ID NO: 1842072 - RNA, 15 nt, Human
cugggcagaaggaag

SEQ ID NO: 1842073 - RNA, 12 nt, Human
cugggcagaagg

SEQ ID NO: 1842074 - RNA, 14 nt, Human
cugggccagaauuu

SEQ ID NO: 1842075 - RNA, 12 nt, Human
cugggccagaau

SEQ ID NO: 1842076 - RNA, 15 nt, Human
cuggggccaggcugg

SEQ ID NO: 1842077 - RNA, 15 nt, Human
cuggguucacugcaa

SEQ ID NO: 1842078 - RNA, 18 nt, Human
cuggguucacugcaaccu

SEQ ID NO: 1842079 - RNA, 20 nt, Human
cuggguucacugcaaccucc

SEQ ID NO: 1842080 - RNA, 11 nt, Human
cugggacacag

SEQ ID NO: 1842081 - RNA, 22 nt, Human
cuggccccucagggucccuggu

SEQ ID NO: 1842082 - RNA, 14 nt, Human
cuggcccugcccug

SEQ ID NO: 1842083 - RNA, 13 nt, Human
cuggcccugcccu

SEQ ID NO: 1842084 - RNA, 11 nt, Human
cuggcccugcc

SEQ ID NO: 1842085 - RNA, 22 nt, Human
cuggccgggaccccgagccugg

SEQ ID NO: 1842086 - RNA, 16 nt, Human
cuggccgggagccuga

SEQ ID NO: 1842087 - RNA, 15 nt, Human
cuggcccugcccugg

SEQ ID NO: 1842088 - RNA, 14 nt, Human
cuggccuagcauac

SEQ ID NO: 1842089 - RNA, 18 nt, Human
cuggcagaguugaagaca

SEQ ID NO: 1842090 - RNA, 17 nt, Human
cuggcagaguugaagac

SEQ ID NO: 1842091 - RNA, 13 nt, Human
cuggcagccccug

SEQ ID NO: 1842092 - RNA, 20 nt, Human
cuggcagccgugccuucagc

SEQ ID NO: 1842093 - RNA, 19 nt, Human
cuggcagccgugccuucag

SEQ ID NO: 1842094 - RNA, 22 nt, Human
cuggcagccgugccuucagcuc

SEQ ID NO: 1842095 - RNA, 21 nt, Human
cuggcagccgugccuucagcu

SEQ ID NO: 1842096 - RNA, 12 nt, Human
cuggcagccccu

SEQ ID NO: 1842097 - RNA, 11 nt, Human
cuggcagccca

SEQ ID NO: 1842098 - RNA, 19 nt, Human
cuggcagaguugaagacag

SEQ ID NO: 1842099 - RNA, 14 nt, Human
cuggcagaggaggg

SEQ ID NO: 1842100 - RNA, 21 nt, Human
cuuaaaaaugguuuaaauggu

SEQ ID NO: 1842101 - RNA, 14 nt, Human
cuguuuaagagaca

SEQ ID NO: 1842102 - RNA, 12 nt, Human
cuguuuaagaga

SEQ ID NO: 1842103 - RNA, 14 nt, Human
cuguuggcuggggg

SEQ ID NO: 1842104 - RNA, 19 nt, Human
cuguuggcugggggccuca

SEQ ID NO: 1842105 - RNA, 22 nt, Human
cuguuggcugggggccucagug

SEQ ID NO: 1842106 - RNA, 15 nt, Human
cuuaccagcagagca

SEQ ID NO: 1842107 - RNA, 20 nt, Human
cuuacauuuuacuuuuuccu

SEQ ID NO: 1842108 - RNA, 22 nt, Human
cuuacauuagcaguuugcuuug

SEQ ID NO: 1842109 - RNA, 21 nt, Human
cuuacauuagcaguuugcuuu

SEQ ID NO: 1842110 - RNA, 16 nt, Human
cuuacaagccagcugg

SEQ ID NO: 1842111 - RNA, 17 nt, Human
cuuacaagccagcugga

SEQ ID NO: 1842112 - RNA, 14 nt, Human
cuuaaaacaacacu

SEQ ID NO: 1842113 - RNA, 21 nt, Human
cuuagggaaggauacaaaagc

SEQ ID NO: 1842114 - RNA, 19 nt, Human
cuuagggaaggauacaaaa

SEQ ID NO: 1842115 - RNA, 15 nt, Human
cuuaggaagaauuuu

SEQ ID NO: 1842116 - RNA, 23 nt, Human
cuuagcucauucuccuuguguua

SEQ ID NO: 1842117 - RNA, 13 nt, Human
cuuagcugggaga

SEQ ID NO: 1842118 - RNA, 16 nt, Human
cuuaccagcagagcac

SEQ ID NO: 1842119 - RNA, 22 nt, Human
cuuagcucauucuccuuguguu

SEQ ID NO: 1842120 - RNA, 14 nt, Human
cugugcugcccugc

SEQ ID NO: 1842121 - RNA, 13 nt, Human
cugugcugcccug

SEQ ID NO: 1842122 - RNA, 12 nt, Human
cugugcugcccu

SEQ ID NO: 1842123 - RNA, 19 nt, Human
cugugcugcccugcccacc

SEQ ID NO: 1842124 - RNA, 18 nt, Human
cugugcugcccugcccac

SEQ ID NO: 1842125 - RNA, 17 nt, Human
cugugcugcccugccca

SEQ ID NO: 1842126 - RNA, 15 nt, Human
cugugcugcccugcc

SEQ ID NO: 1842127 - RNA, 19 nt, Human
cugugucagcauagaagua

SEQ ID NO: 1842128 - RNA, 17 nt, Human
cugugucagcauagaag

SEQ ID NO: 1842129 - RNA, 21 nt, Human
cugugcugcccugcccaccug

SEQ ID NO: 1842130 - RNA, 15 nt, Human
cugucgcccagucug

SEQ ID NO: 1842131 - RNA, 16 nt, Human
cugucgcccagucugg

SEQ ID NO: 1842132 - RNA, 21 nt, Human
cuguccugggagugagcuggu

SEQ ID NO: 1842133 - RNA, 23 nt, Human
cugucaauuacaggaaguacugg

SEQ ID NO: 1842134 - RNA, 20 nt, Human
cugucaauuacaggaaguac

SEQ ID NO: 1842135 - RNA, 19 nt, Human
cugucaauuacaggaagua

SEQ ID NO: 1842136 - RNA, 22 nt, Human
cuggugacaugucuuuucuugc

SEQ ID NO: 1842137 - RNA, 14 nt, Human
cugguuuccugccc

SEQ ID NO: 1842138 - RNA, 13 nt, Human
cugguuuccugcc

SEQ ID NO: 1842139 - RNA, 19 nt, Human
cuguagaaaagggaacuga

SEQ ID NO: 1842140 - RNA, 13 nt, Human
cuguagaguggga

SEQ ID NO: 1842141 - RNA, 15 nt, Human
cuuucuacccagcga

SEQ ID NO: 1842142 - RNA, 16 nt, Human
cuuucuacccagcgag

SEQ ID NO: 1842143 - RNA, 17 nt, Human
cuuugacgccaucccag

SEQ ID NO: 1842144 - RNA, 16 nt, Human
cuuugacgccauccca

SEQ ID NO: 1842145 - RNA, 20 nt, Human
cuuuuauaaacuuuaccuuu

SEQ ID NO: 1842146 - RNA, 21 nt, Human
cuuuuauaaacuuuaccuuuu

SEQ ID NO: 1842147 - RNA, 22 nt, Human
cuuuguauucucuccuguaccu

SEQ ID NO: 1842148 - RNA, 17 nt, Human
cuuuguauucucuccug

SEQ ID NO: 1842149 - RNA, 12 nt, Human
cuuuguaugcac

SEQ ID NO: 1842150 - RNA, 16 nt, Human
cuuuguaaugaaaacc

SEQ ID NO: 1842151 - RNA, 15 nt, Human
cuuuguaaugaaaac

SEQ ID NO: 1842152 - RNA, 14 nt, Human
cuuuguaaugaaaa

SEQ ID NO: 1842153 - RNA, 23 nt, Human
cuuuaaugucacaggcaggucca

SEQ ID NO: 1842154 - RNA, 20 nt, Human
cuuucacccuuuucuguuug

SEQ ID NO: 1842155 - RNA, 15 nt, Human
cuuucacccuuuucu

SEQ ID NO: 1842156 - RNA, 14 nt, Human
cuuucacccuuuuc

SEQ ID NO: 1842157 - RNA, 19 nt, Human
cuuggucugugagaugcua

SEQ ID NO: 1842158 - RNA, 16 nt, Human
cuuggucugugagaug

SEQ ID NO: 1842159 - RNA, 14 nt, Human
cuugguccugcugc

SEQ ID NO: 1842160 - RNA, 22 nt, Human
cuugguagaagcccuucuaccu

SEQ ID NO: 1842161 - RNA, 23 nt, Human
cuuggguucaagugauucuccug

SEQ ID NO: 1842162 - RNA, 19 nt, Human
cuugucuuuggacccugag

SEQ ID NO: 1842163 - RNA, 18 nt, Human
cuugucuuuggacccuga

SEQ ID NO: 1842164 - RNA, 15 nt, Human
cuugucuuuggaccc

SEQ ID NO: 1842165 - RNA, 13 nt, Human
cuugucuuuggac

SEQ ID NO: 1842166 - RNA, 20 nt, Human
cuuggugucgggcaugacac

SEQ ID NO: 1842167 - RNA, 19 nt, Human
cuuggugucgggcaugaca

SEQ ID NO: 1842168 - RNA, 13 nt, Human
cuuccuccuggug

SEQ ID NO: 1842169 - RNA, 15 nt, Human
cuuccucugagccuu

SEQ ID NO: 1842170 - RNA, 14 nt, Human
cuuccucugagccu

SEQ ID NO: 1842171 - RNA, 15 nt, Human
cuuccucuccacugc

SEQ ID NO: 1842172 - RNA, 14 nt, Human
cuuccucuccacug

SEQ ID NO: 1842173 - RNA, 13 nt, Human
cuuccucuccacu

SEQ ID NO: 1842174 - RNA, 21 nt, Human
cuuccucuuuccaucuacccu

SEQ ID NO: 1842175 - RNA, 16 nt, Human
cuuccucugaggcuga

SEQ ID NO: 1842176 - RNA, 22 nt, Human
cuuccucuuuccaucuacccuc

SEQ ID NO: 1842177 - RNA, 22 nt, Human
cuuccucugaggcugaaauuca

SEQ ID NO: 1842178 - RNA, 20 nt, Human
cuucucacauuuauauuuuu

SEQ ID NO: 1842179 - RNA, 13 nt, Human
cuucucacauuua

SEQ ID NO: 1842180 - RNA, 18 nt, Human
cuucuucagagacuccug

SEQ ID NO: 1842181 - RNA, 14 nt, Human
cuucuucagagacu

SEQ ID NO: 1842182 - RNA, 13 nt, Human
cuucuucagagac

SEQ ID NO: 1842183 - RNA, 12 nt, Human
cuugauucauaa

SEQ ID NO: 1842184 - RNA, 12 nt, Human
cuugcaaaguau

SEQ ID NO: 1842185 - RNA, 24 nt, Human
cuuggauuguccccgacccuugcc

SEQ ID NO: 1842186 - RNA, 23 nt, Human
cuuggauuguccccgacccuugc

SEQ ID NO: 1842187 - RNA, 18 nt, Human
cuugauguguuaucucuu

SEQ ID NO: 1842188 - RNA, 17 nt, Human
cuugauauccucuuuga

SEQ ID NO: 1842189 - RNA, 22 nt, Human
cuugauauccucuuugagugaa

SEQ ID NO: 1842190 - RNA, 16 nt, Human
cuugacaucaacugca

SEQ ID NO: 1842191 - RNA, 21 nt, Human
gaaaacuuuaugcuaagugaa

SEQ ID NO: 1842192 - RNA, 23 nt, Human
gaaaagaaaaaugagccuggcaa

SEQ ID NO: 1842193 - RNA, 22 nt, Human
gaaaacuuguauuauguguguu

SEQ ID NO: 1842194 - RNA, 19 nt, Human
gaaaacuuguauuaugugu

SEQ ID NO: 1842195 - RNA, 15 nt, Human
gaaaaugugugugug

SEQ ID NO: 1842196 - RNA, 12 nt, Human
gaaaaugugugu

SEQ ID NO: 1842197 - RNA, 18 nt, Human
gaaagaaaaucaggcugg

SEQ ID NO: 1842198 - RNA, 13 nt, Human
gaaacuggauuaa

SEQ ID NO: 1842199 - RNA, 17 nt, Human
gaaacuggauuaaacuu

SEQ ID NO: 1842200 - RNA, 15 nt, Human
gaaaggcuccaggag

SEQ ID NO: 1842201 - RNA, 14 nt, Human
gaaaggcuccagga

SEQ ID NO: 1842202 - RNA, 13 nt, Human
gaaaggcuccagg

SEQ ID NO: 1842203 - RNA, 16 nt, Human
gaaaggcuccaggagc

SEQ ID NO: 1842204 - RNA, 13 nt, Human
gaaagggcccaga

SEQ ID NO: 1842205 - RNA, 20 nt, Human
gaacacauaauucaggaagc

SEQ ID NO: 1842206 - RNA, 17 nt, Human
gaacacauaauucagga

SEQ ID NO: 1842207 - RNA, 11 nt, Human
gaaaugaaaaa

SEQ ID NO: 1842208 - RNA, 17 nt, Human
gaaaugaaagcagggac

SEQ ID NO: 1842209 - RNA, 15 nt, Human
gaaagggcccagaga

SEQ ID NO: 1842210 - RNA, 16 nt, Human
gaaagggcccagagag

SEQ ID NO: 1842211 - RNA, 18 nt, Human
gaaccaccacacccagcc

SEQ ID NO: 1842212 - RNA, 20 nt, Human
gaaccaccacacccagccca

SEQ ID NO: 1842213 - RNA, 21 nt, Human
gaaccaccacacccagcccac

SEQ ID NO: 1842214 - RNA, 22 nt, Human
gaaccaccacacccagcccacu

SEQ ID NO: 1842215 - RNA, 22 nt, Human
gaaccauggucggaaaacaugc

SEQ ID NO: 1842216 - RNA, 23 nt, Human
gaaccaccacacccagcccacuu

SEQ ID NO: 1842217 - RNA, 15 nt, Human
gaacuccuggccuca

SEQ ID NO: 1842218 - RNA, 14 nt, Human
gaacuccuggccuc

SEQ ID NO: 1842219 - RNA, 17 nt, Human
gaacccgggaggcagag

SEQ ID NO: 1842220 - RNA, 19 nt, Human
gaacccgggaggcagaggu

SEQ ID NO: 1842221 - RNA, 14 nt, Human
gaacuccugaccuc

SEQ ID NO: 1842222 - RNA, 13 nt, Human
gaacuccuggccu

SEQ ID NO: 1842223 - RNA, 13 nt, Human
gaagacagcucuu

SEQ ID NO: 1842224 - RNA, 12 nt, Human
gaagacagcucu

SEQ ID NO: 1842225 - RNA, 15 nt, Human
gaagacagagcuaca

SEQ ID NO: 1842226 - RNA, 13 nt, Human
gaagacagagcua

SEQ ID NO: 1842227 - RNA, 21 nt, Human
gaagacacugaugggcaaccc

SEQ ID NO: 1842228 - RNA, 16 nt, Human
gaagacacugaugggc

SEQ ID NO: 1842229 - RNA, 15 nt, Human
gaagacagcucuuau

SEQ ID NO: 1842230 - RNA, 14 nt, Human
gaagacagcucuua

SEQ ID NO: 1842231 - RNA, 12 nt, Human
gaagcagcucuu

SEQ ID NO: 1842232 - RNA, 16 nt, Human
gaagcaccauaacuuu

SEQ ID NO: 1842233 - RNA, 22 nt, Human
gaagcacaugccucucucaggc

SEQ ID NO: 1842234 - RNA, 14 nt, Human
gaagcacaugccuc

SEQ ID NO: 1842235 - RNA, 13 nt, Human
gaagcacagcuuc

SEQ ID NO: 1842236 - RNA, 14 nt, Human
gaagcacagcuuca

SEQ ID NO: 1842237 - RNA, 17 nt, Human
gaagacucauucuucug

SEQ ID NO: 1842238 - RNA, 18 nt, Human
gaagacucauucuucugu

SEQ ID NO: 1842239 - RNA, 16 nt, Human
gaagacucauucuucu

SEQ ID NO: 1842240 - RNA, 15 nt, Human
gacgcugugcugccc

SEQ ID NO: 1842241 - RNA, 13 nt, Human
gacgcugugcugc

SEQ ID NO: 1842242 - RNA, 12 nt, Human
gacgcugugcug

SEQ ID NO: 1842243 - RNA, 17 nt, Human
gagaagcggcuggcagc

SEQ ID NO: 1842244 - RNA, 14 nt, Human
gacuuuggaaagag

SEQ ID NO: 1842245 - RNA, 14 nt, Human
gacuuuggaaagac

SEQ ID NO: 1842246 - RNA, 18 nt, Human
gacuguuuucucuugaga

SEQ ID NO: 1842247 - RNA, 16 nt, Human
gacuguuuucucuuga

SEQ ID NO: 1842248 - RNA, 21 nt, Human
gacuuuucuguccgagcuuug

SEQ ID NO: 1842249 - RNA, 23 nt, Human
gacuuuucuguccgagcuuugaa

SEQ ID NO: 1842250 - RNA, 22 nt, Human
gacuuuguuaguuucuccaagc

SEQ ID NO: 1842251 - RNA, 14 nt, Human
gacucaaugcacug

SEQ ID NO: 1842252 - RNA, 17 nt, Human
gacucaaugcacugaca

SEQ ID NO: 1842253 - RNA, 22 nt, Human
gacuguacaaaguagaagucuu

SEQ ID NO: 1842254 - RNA, 17 nt, Human
gacuguacuccucccag

SEQ ID NO: 1842255 - RNA, 16 nt, Human
gacuguacuccuccca

SEQ ID NO: 1842256 - RNA, 20 nt, Human
gacugugugcucaggagccc

SEQ ID NO: 1842257 - RNA, 17 nt, Human
gacugugugcucaggag

SEQ ID NO: 1842258 - RNA, 16 nt, Human
gacugugugcucagga

SEQ ID NO: 1842259 - RNA, 14 nt, Human
gacugugugcucag

SEQ ID NO: 1842260 - RNA, 21 nt, Human
gacugucucaagagggcacug

SEQ ID NO: 1842261 - RNA, 23 nt, Human
gacugucucaagagggcacuggu

SEQ ID NO: 1842262 - RNA, 22 nt, Human
gacugucucaagagggcacugg

SEQ ID NO: 1842263 - RNA, 15 nt, Human
gaccaucccugaagg

SEQ ID NO: 1842264 - RNA, 14 nt, Human
gaccaucccugaag

SEQ ID NO: 1842265 - RNA, 17 nt, Human
gaccauucuccaccugc

SEQ ID NO: 1842266 - RNA, 13 nt, Human
gaccccuggcuuu

SEQ ID NO: 1842267 - RNA, 16 nt, Human
gaccauucuccaccug

SEQ ID NO: 1842268 - RNA, 17 nt, Human
gaccaucccugaaggcc

SEQ ID NO: 1842269 - RNA, 16 nt, Human
gaccaucccugaaggc

SEQ ID NO: 1842270 - RNA, 16 nt, Human
gacccuauugcugcuu

SEQ ID NO: 1842271 - RNA, 22 nt, Human
gaccccuggcuuuucacugcug

SEQ ID NO: 1842272 - RNA, 21 nt, Human
gaccccuggcuuuucacugcu

SEQ ID NO: 1842273 - RNA, 12 nt, Human
gacccggcugcg

SEQ ID NO: 1842274 - RNA, 13 nt, Human
gacccggcugcgu

SEQ ID NO: 1842275 - RNA, 20 nt, Human
gacaguauggcagcuuuccu

SEQ ID NO: 1842276 - RNA, 17 nt, Human
gacaggguuucaccaug

SEQ ID NO: 1842277 - RNA, 12 nt, Human
gacagccuggca

SEQ ID NO: 1842278 - RNA, 11 nt, Human
gacagccuggc

SEQ ID NO: 1842279 - RNA, 13 nt, Human
gacagcuccuucu

SEQ ID NO: 1842280 - RNA, 14 nt, Human
gacagcuccuucug

SEQ ID NO: 1842281 - RNA, 15 nt, Human
gacagcuccuucugu

SEQ ID NO: 1842282 - RNA, 20 nt, Human
gacagaaagcagaacaguga

SEQ ID NO: 1842283 - RNA, 14 nt, Human
gacagaaagcagaa

SEQ ID NO: 1842284 - RNA, 20 nt, Human
gaggccagagacacaagccu

SEQ ID NO: 1842285 - RNA, 17 nt, Human
gaggcucugcccuuggu

SEQ ID NO: 1842286 - RNA, 15 nt, Human
gaggcucugcccuug

SEQ ID NO: 1842287 - RNA, 19 nt, Human
gaggcucuggagcccacug

SEQ ID NO: 1842288 - RNA, 14 nt, Human
gaggcucuggagcc

SEQ ID NO: 1842289 - RNA, 14 nt, Human
gaggcucugcccuu

SEQ ID NO: 1842290 - RNA, 13 nt, Human
gaggcucugcccu

SEQ ID NO: 1842291 - RNA, 12 nt, Human
gaggcucugccc

SEQ ID NO: 1842292 - RNA, 15 nt, Human
gagggcuccagacac

SEQ ID NO: 1842293 - RNA, 14 nt, Human
gagggcuccagaca

SEQ ID NO: 1842294 - RNA, 13 nt, Human
gagggcuccagac

SEQ ID NO: 1842295 - RNA, 12 nt, Human
gagggcuccaga

SEQ ID NO: 1842296 - RNA, 12 nt, Human
gaggggaacaga

SEQ ID NO: 1842297 - RNA, 14 nt, Human
gaggcugccucucc

SEQ ID NO: 1842298 - RNA, 13 nt, Human
gaggugggauccu

SEQ ID NO: 1842299 - RNA, 16 nt, Human
gaggugggauccucca

SEQ ID NO: 1842300 - RNA, 15 nt, Human
gaggugggauccucc

SEQ ID NO: 1842301 - RNA, 21 nt, Human
gagucacuggaacacuaauga

SEQ ID NO: 1842302 - RNA, 14 nt, Human
gagucacuggaaca

SEQ ID NO: 1842303 - RNA, 17 nt, Human
gaggugggauccuccag

SEQ ID NO: 1842304 - RNA, 18 nt, Human
gagucagaaguuucugcc

SEQ ID NO: 1842305 - RNA, 14 nt, Human
gagugagacucugu

SEQ ID NO: 1842306 - RNA, 18 nt, Human
gagugagacucugucuca

SEQ ID NO: 1842307 - RNA, 19 nt, Human
gaguugauacuacaguuug

SEQ ID NO: 1842308 - RNA, 21 nt, Human
gaguugauagcacagacccug

SEQ ID NO: 1842309 - RNA, 22 nt, Human
gaguugauacuacaguuuguua

SEQ ID NO: 1842310 - RNA, 13 nt, Human
gagugcagugagc

SEQ ID NO: 1842311 - RNA, 18 nt, Human
gagugcagugagccgaga

SEQ ID NO: 1842312 - RNA, 20 nt, Human
gagcugccuguucagcucca

SEQ ID NO: 1842313 - RNA, 17 nt, Human
gagcggagaaaggaagg

SEQ ID NO: 1842314 - RNA, 15 nt, Human
gagcugccuguucag

SEQ ID NO: 1842315 - RNA, 16 nt, Human
gagcugccuguucagc

SEQ ID NO: 1842316 - RNA, 19 nt, Human
gagcugccuguucagcucc

SEQ ID NO: 1842317 - RNA, 13 nt, Human
gagcgacagugag

SEQ ID NO: 1842318 - RNA, 15 nt, Human
gagcgacagugagac

SEQ ID NO: 1842319 - RNA, 13 nt, Human
gagccuuccaggg

SEQ ID NO: 1842320 - RNA, 12 nt, Human
gagccuuccagg

SEQ ID NO: 1842321 - RNA, 17 nt, Human
gagcaucaggccaggcc

SEQ ID NO: 1842322 - RNA, 22 nt, Human
gagcaucaggccaggcccucug

SEQ ID NO: 1842323 - RNA, 20 nt, Human
gagcaucaggccaggcccuc

SEQ ID NO: 1842324 - RNA, 14 nt, Human
gaugaugacuaugg

SEQ ID NO: 1842325 - RNA, 23 nt, Human
gaugcuucucacugccaugccag

SEQ ID NO: 1842326 - RNA, 14 nt, Human
gaugcuuguacaua

SEQ ID NO: 1842327 - RNA, 16 nt, Human
gaugcuuguacauaau

SEQ ID NO: 1842328 - RNA, 23 nt, Human
gauggaggaaaaccaagccgugg

SEQ ID NO: 1842329 - RNA, 22 nt, Human
gauggaaaaaccacccccaaau

SEQ ID NO: 1842330 - RNA, 17 nt, Human
gaugucccaacuuguaa

SEQ ID NO: 1842331 - RNA, 18 nt, Human
gaugucccaacuuguaaa

SEQ ID NO: 1842332 - RNA, 20 nt, Human
gaucuggguucacugcaacc

SEQ ID NO: 1842333 - RNA, 22 nt, Human
gaguugauagcacagacccugc

SEQ ID NO: 1842334 - RNA, 18 nt, Human
gaucuggguucacugcaa

SEQ ID NO: 1842335 - RNA, 19 nt, Human
gauucuccugccucagccu

SEQ ID NO: 1842336 - RNA, 20 nt, Human
gauucuccugccucagccuc

SEQ ID NO: 1842337 - RNA, 21 nt, Human
gauucuccugccucagccucc

SEQ ID NO: 1842338 - RNA, 20 nt, Human
gauuuaacagaaauguacag

SEQ ID NO: 1842339 - RNA, 23 nt, Human
gauuuaacagaaauguacagcaa

SEQ ID NO: 1842340 - RNA, 23 nt, Human
gauucuuauggacaaugacccag

SEQ ID NO: 1842341 - RNA, 21 nt, Human
gauucuucugcuucagccucc

SEQ ID NO: 1842342 - RNA, 23 nt, Human
gauuuuuuuuuccuucagugccu

SEQ ID NO: 1842343 - RNA, 22 nt, Human
gauuuuuuuuuccuucagugcc

SEQ ID NO: 1842344 - RNA, 18 nt, Human
gauuucacucuccuuggu

SEQ ID NO: 1842345 - RNA, 17 nt, Human
gauuucacucuccuugg

SEQ ID NO: 1842346 - RNA, 20 nt, Human
gauuucagcucacugcaacc

SEQ ID NO: 1842347 - RNA, 17 nt, Human
gauuucagcucacugca

SEQ ID NO: 1842348 - RNA, 15 nt, Human
gauuucagcucacug

SEQ ID NO: 1842349 - RNA, 16 nt, Human
gauuucacucuccuug

SEQ ID NO: 1842350 - RNA, 13 nt, Human
gauuucacucucc

SEQ ID NO: 1842351 - RNA, 18 nt, Human
gcaaccuccgccucuugg

SEQ ID NO: 1842352 - RNA, 22 nt, Human
gcaacccuggugaccagcacca

SEQ ID NO: 1842353 - RNA, 15 nt, Human
gcaaaagaugcuucu

SEQ ID NO: 1842354 - RNA, 16 nt, Human
gcaaaagaugcuucuc

SEQ ID NO: 1842355 - RNA, 17 nt, Human
gcaacccccagccugcu

SEQ ID NO: 1842356 - RNA, 18 nt, Human
gcaacccccagccugcua

SEQ ID NO: 1842357 - RNA, 11 nt, Human
gcaauaaagca

SEQ ID NO: 1842358 - RNA, 21 nt, Human
gcaauaaagcagcguuucuau

SEQ ID NO: 1842359 - RNA, 12 nt, Human
gcacacaccaga

SEQ ID NO: 1842360 - RNA, 14 nt, Human
gcacacaccagagc

SEQ ID NO: 1842361 - RNA, 15 nt, Human
gcacacaccagagcc

SEQ ID NO: 1842362 - RNA, 16 nt, Human
gcacacaccagagccc

SEQ ID NO: 1842363 - RNA, 17 nt, Human
gcacacaccagagccca

SEQ ID NO: 1842364 - RNA, 18 nt, Human
gcacacaccagagcccac

SEQ ID NO: 1842365 - RNA, 19 nt, Human
gcacacaccagagcccacc

SEQ ID NO: 1842366 - RNA, 12 nt, Human
gcaccuccugcc

SEQ ID NO: 1842367 - RNA, 16 nt, Human
gcaccggcuggccugg

SEQ ID NO: 1842368 - RNA, 15 nt, Human
gcaccggcuggccug

SEQ ID NO: 1842369 - RNA, 17 nt, Human
gcaccggcuggccuggc

SEQ ID NO: 1842370 - RNA, 18 nt, Human
gcaccuacaguguacagu

SEQ ID NO: 1842371 - RNA, 19 nt, Human
gcaccuacaguguacaguc

SEQ ID NO: 1842372 - RNA, 21 nt, Human
gcaccuacaguguacagucuu

SEQ ID NO: 1842373 - RNA, 18 nt, Human
gcaccuaccaccacgccc

SEQ ID NO: 1842374 - RNA, 17 nt, Human
gcaccuaccaccacgcc

SEQ ID NO: 1842375 - RNA, 12 nt, Human
gcacacauuuuu

SEQ ID NO: 1842376 - RNA, 11 nt, Human
gcacacauuuu

SEQ ID NO: 1842377 - RNA, 20 nt, Human
gcacacaccagagcccaccu

SEQ ID NO: 1842378 - RNA, 11 nt, Human
gcacacagcac

SEQ ID NO: 1842379 - RNA, 23 nt, Human
gcacacagcacgggggccaagga

SEQ ID NO: 1842380 - RNA, 22 nt, Human
gcacuauagccuaggugacaga

SEQ ID NO: 1842381 - RNA, 12 nt, Human
gcacuccccugc

SEQ ID NO: 1842382 - RNA, 17 nt, Human
gcacuccagccugggug

SEQ ID NO: 1842383 - RNA, 17 nt, Human
gcauccuggcacccggc

SEQ ID NO: 1842384 - RNA, 21 nt, Human
gcauccuggcacccggccccu

SEQ ID NO: 1842385 - RNA, 13 nt, Human
gcaucgcaaugua

SEQ ID NO: 1842386 - RNA, 22 nt, Human
gcauccuggcacccggccccug

SEQ ID NO: 1842387 - RNA, 23 nt, Human
gcauccuggcacccggccccugc

SEQ ID NO: 1842388 - RNA, 13 nt, Human
gcauggccaggug

SEQ ID NO: 1842389 - RNA, 17 nt, Human
gcauggccagguggcca

SEQ ID NO: 1842390 - RNA, 14 nt, Human
gcauggccaggugg

SEQ ID NO: 1842391 - RNA, 16 nt, Human
gcaugggaaugaaugu

SEQ ID NO: 1842392 - RNA, 13 nt, Human
gcaugggaaugaa

SEQ ID NO: 1842393 - RNA, 19 nt, Human
gcaugggaaugaaugucag

SEQ ID NO: 1842394 - RNA, 23 nt, Human
gcaugucccuaccgagucucuuc

SEQ ID NO: 1842395 - RNA, 17 nt, Human
gcaugugaugagaggaa

SEQ ID NO: 1842396 - RNA, 18 nt, Human
gccaagaauucuuaaaua

SEQ ID NO: 1842397 - RNA, 14 nt, Human
gccaagaauucuua

SEQ ID NO: 1842398 - RNA, 19 nt, Human
gccaacuauggccugugga

SEQ ID NO: 1842399 - RNA, 15 nt, Human
gccaacuauggccug

SEQ ID NO: 1842400 - RNA, 14 nt, Human
gccaacuauggccu

SEQ ID NO: 1842401 - RNA, 12 nt, Human
gcauuuaaaaga

SEQ ID NO: 1842402 - RNA, 15 nt, Human
gcauuuaaaagauac

SEQ ID NO: 1842403 - RNA, 14 nt, Human
gcauuugaaaauuu

SEQ ID NO: 1842404 - RNA, 16 nt, Human
gcauuugaaaauuuug

SEQ ID NO: 1842405 - RNA, 22 nt, Human
gccaagcaccuagccucgcucu

SEQ ID NO: 1842406 - RNA, 11 nt, Human
gccaaggccaa

SEQ ID NO: 1842407 - RNA, 17 nt, Human
gccaaggccaaaggaag

SEQ ID NO: 1842408 - RNA, 19 nt, Human
gccaaggccaaaggaagca

SEQ ID NO: 1842409 - RNA, 15 nt, Human
gcauaccacuuuugu

SEQ ID NO: 1842410 - RNA, 16 nt, Human
gcauaccacuuuuguu

SEQ ID NO: 1842411 - RNA, 23 nt, Human
gcaguugccagucaccccggcca

SEQ ID NO: 1842412 - RNA, 14 nt, Human
gcaguugccaguca

SEQ ID NO: 1842413 - RNA, 15 nt, Human
gcauaaaaauuagcc

SEQ ID NO: 1842414 - RNA, 22 nt, Human
gcagcugcgguccacccaggag

SEQ ID NO: 1842415 - RNA, 23 nt, Human
gcagcugcgguccacccaggagc

SEQ ID NO: 1842416 - RNA, 13 nt, Human
gcagcugcuuuug

SEQ ID NO: 1842417 - RNA, 20 nt, Human
gcagcugcuuuugucuaugg

SEQ ID NO: 1842418 - RNA, 15 nt, Human
gcagcuuauucacaa

SEQ ID NO: 1842419 - RNA, 16 nt, Human
gcagcuugaggguugg

SEQ ID NO: 1842420 - RNA, 17 nt, Human
gcaggcucucaggccag

SEQ ID NO: 1842421 - RNA, 18 nt, Human
gcaggcucucaggccagc

SEQ ID NO: 1842422 - RNA, 13 nt, Human
gcaggcuggcccu

SEQ ID NO: 1842423 - RNA, 22 nt, Human
gcagggaaacagcuaaugggac

SEQ ID NO: 1842424 - RNA, 16 nt, Human
gcaggcucucaggcca

SEQ ID NO: 1842425 - RNA, 15 nt, Human
gcaggcucucaggcc

SEQ ID NO: 1842426 - RNA, 14 nt, Human
gcaggcucucaggc

SEQ ID NO: 1842427 - RNA, 13 nt, Human
gcaggcucucagg

SEQ ID NO: 1842428 - RNA, 12 nt, Human
gcaggcucucag

SEQ ID NO: 1842429 - RNA, 22 nt, Human
gcaggcucgggcuccccagccc

SEQ ID NO: 1842430 - RNA, 19 nt, Human
gcagcuugaggguugggcu

SEQ ID NO: 1842431 - RNA, 21 nt, Human
gcagcuugaggguugggcugg

SEQ ID NO: 1842432 - RNA, 16 nt, Human
gcacuuuguucuggcu

SEQ ID NO: 1842433 - RNA, 11 nt, Human
gcucugcccuu

SEQ ID NO: 1842434 - RNA, 23 nt, Human
gcucugcaagaauugaagcagga

SEQ ID NO: 1842435 - RNA, 23 nt, Human
gcucugaucauccacugugccau

SEQ ID NO: 1842436 - RNA, 17 nt, Human
gcucugaucauccacug

SEQ ID NO: 1842437 - RNA, 15 nt, Human
gcuccacuuggucug

SEQ ID NO: 1842438 - RNA, 19 nt, Human
gcuccuggcccacugcauc

SEQ ID NO: 1842439 - RNA, 18 nt, Human
gcuccuggcccacugcau

SEQ ID NO: 1842440 - RNA, 20 nt, Human
gcuccuggcccacugcaucg

SEQ ID NO: 1842441 - RNA, 15 nt, Human
gcuccuggcccacug

SEQ ID NO: 1842442 - RNA, 14 nt, Human
gcuccuggcccacu

SEQ ID NO: 1842443 - RNA, 21 nt, Human
gcuccugccaccacgcccggc

SEQ ID NO: 1842444 - RNA, 18 nt, Human
gcuccugccaccacgccc

SEQ ID NO: 1842445 - RNA, 12 nt, Human
gcuccugccacc

SEQ ID NO: 1842446 - RNA, 17 nt, Human
gcucccaggcauucccc

SEQ ID NO: 1842447 - RNA, 22 nt, Human
gcucccacaggcccuuccucuc

SEQ ID NO: 1842448 - RNA, 21 nt, Human
gcucccacaggcccuuccucu

SEQ ID NO: 1842449 - RNA, 20 nt, Human
gcucccacaggcccuuccuc

SEQ ID NO: 1842450 - RNA, 17 nt, Human
gcucccacaggcccuuc

SEQ ID NO: 1842451 - RNA, 16 nt, Human
gcucccacaggcccuu

SEQ ID NO: 1842452 - RNA, 20 nt, Human
gcuccagcucaccagcccca

SEQ ID NO: 1842453 - RNA, 21 nt, Human
gcuccagcucaccagccccag

SEQ ID NO: 1842454 - RNA, 18 nt, Human
gcuccacuuggucuguga

SEQ ID NO: 1842455 - RNA, 19 nt, Human
gcuccacuuggucugugag

SEQ ID NO: 1842456 - RNA, 18 nt, Human
gcuccagcucaccagccc

SEQ ID NO: 1842457 - RNA, 16 nt, Human
gcuagaacucccuuuc

SEQ ID NO: 1842458 - RNA, 18 nt, Human
gcuagaacucccuuucaa

SEQ ID NO: 1842459 - RNA, 12 nt, Human
gcuagaacuccc

SEQ ID NO: 1842460 - RNA, 13 nt, Human
gcuagaacucccu

SEQ ID NO: 1842461 - RNA, 14 nt, Human
gcuagaacucccuu

SEQ ID NO: 1842462 - RNA, 15 nt, Human
gcuagaacucccuuu

SEQ ID NO: 1842463 - RNA, 20 nt, Human
gcgggaggauguucugggac

SEQ ID NO: 1842464 - RNA, 21 nt, Human
gcgggaggauguucugggaca

SEQ ID NO: 1842465 - RNA, 22 nt, Human
gcgggaggauguucugggacac

SEQ ID NO: 1842466 - RNA, 20 nt, Human
gcgugcacacaccagagccc

SEQ ID NO: 1842467 - RNA, 18 nt, Human
gcguuucuaugacacaug

SEQ ID NO: 1842468 - RNA, 23 nt, Human
gcgugcacacaccagagcccacc

SEQ ID NO: 1842469 - RNA, 14 nt, Human
gcuaaucagcauuc

SEQ ID NO: 1842470 - RNA, 22 nt, Human
gcuaaucagcauucucacuccu

SEQ ID NO: 1842471 - RNA, 17 nt, Human
gcuaaucagcauucuca

SEQ ID NO: 1842472 - RNA, 16 nt, Human
gcuaaucagcauucuc

SEQ ID NO: 1842473 - RNA, 23 nt, Human
gcuaagugauccucccaccucag

SEQ ID NO: 1842474 - RNA, 15 nt, Human
gcuaaugggacacua

SEQ ID NO: 1842475 - RNA, 13 nt, Human
gcuaaugggacac

SEQ ID NO: 1842476 - RNA, 16 nt, Human
gcuaggccuggccaga

SEQ ID NO: 1842477 - RNA, 17 nt, Human
gcuaggccuggccagau

SEQ ID NO: 1842478 - RNA, 23 nt, Human
gcuaggccuggccagaugcacca

SEQ ID NO: 1842479 - RNA, 22 nt, Human
gcuagugugguguuuccuggca

SEQ ID NO: 1842480 - RNA, 21 nt, Human
gcuagugugguguuuccuggc

SEQ ID NO: 1842481 - RNA, 12 nt, Human
gcuaugcauuug

SEQ ID NO: 1842482 - RNA, 19 nt, Human
gcuauucaguaauaacucu

SEQ ID NO: 1842483 - RNA, 13 nt, Human
gcuaugcauuuga

SEQ ID NO: 1842484 - RNA, 13 nt, Human
gcucagagagggu

SEQ ID NO: 1842485 - RNA, 20 nt, Human
gcucacugcauccuccgccu

SEQ ID NO: 1842486 - RNA, 14 nt, Human
gcucagagagggug

SEQ ID NO: 1842487 - RNA, 23 nt, Human
gcucagguggggucacucuggca

SEQ ID NO: 1842488 - RNA, 14 nt, Human
gcucaggugucccu

SEQ ID NO: 1842489 - RNA, 16 nt, Human
gcucaggugucccugc

SEQ ID NO: 1842490 - RNA, 17 nt, Human
gcucaggugucccugca

SEQ ID NO: 1842491 - RNA, 16 nt, Human
gcucacugcauccucc

SEQ ID NO: 1842492 - RNA, 17 nt, Human
gcucacugcagccucaa

SEQ ID NO: 1842493 - RNA, 15 nt, Human
gcucacugcagccuc

SEQ ID NO: 1842494 - RNA, 16 nt, Human
gcucacugcagccuca

SEQ ID NO: 1842495 - RNA, 11 nt, Human
gcucacugcag

SEQ ID NO: 1842496 - RNA, 12 nt, Human
gcucacugcagc

SEQ ID NO: 1842497 - RNA, 13 nt, Human
gcucacugcagcc

SEQ ID NO: 1842498 - RNA, 14 nt, Human
gcucacugcagccu

SEQ ID NO: 1842499 - RNA, 20 nt, Human
gcuauucaguaauaacucua

SEQ ID NO: 1842500 - RNA, 22 nt, Human
gccugcccaggccccugccacc

SEQ ID NO: 1842501 - RNA, 15 nt, Human
gccugcccaggcccc

SEQ ID NO: 1842502 - RNA, 12 nt, Human
gccuccauccug

SEQ ID NO: 1842503 - RNA, 17 nt, Human
gccucgaacuggcugca

SEQ ID NO: 1842504 - RNA, 19 nt, Human
gccuccugugugugcgccu

SEQ ID NO: 1842505 - RNA, 23 nt, Human
gccuccugugugugcgccuacag

SEQ ID NO: 1842506 - RNA, 16 nt, Human
gccucccaaagugcug

SEQ ID NO: 1842507 - RNA, 17 nt, Human
gccucccaaagugcugg

SEQ ID NO: 1842508 - RNA, 21 nt, Human
gccucuuaugggcuggguucu

SEQ ID NO: 1842509 - RNA, 14 nt, Human
gccucuuggguuca

SEQ ID NO: 1842510 - RNA, 13 nt, Human
gccugcccaggcc

SEQ ID NO: 1842511 - RNA, 14 nt, Human
gccugcccaggccc

SEQ ID NO: 1842512 - RNA, 16 nt, Human
gccucuuaugggcugg

SEQ ID NO: 1842513 - RNA, 18 nt, Human
gccucuuaugggcugggu

SEQ ID NO: 1842514 - RNA, 17 nt, Human
gccucuuaugggcuggg

SEQ ID NO: 1842515 - RNA, 20 nt, Human
gccucgaacuggcugcaaag

SEQ ID NO: 1842516 - RNA, 22 nt, Human
gccucgaacuggcugcaaaggg

SEQ ID NO: 1842517 - RNA, 20 nt, Human
gcgcagcauauucaggaagc

SEQ ID NO: 1842518 - RNA, 22 nt, Human
gcgaucuggguucacugcaacc

SEQ ID NO: 1842519 - RNA, 21 nt, Human
gccuucggccuccauccugag

SEQ ID NO: 1842520 - RNA, 23 nt, Human
gccuucggccuccauccugaggc

SEQ ID NO: 1842521 - RNA, 20 nt, Human
gccuucggccuccauccuga

SEQ ID NO: 1842522 - RNA, 21 nt, Human
gccuguugggccaggagccuc

SEQ ID NO: 1842523 - RNA, 21 nt, Human
gccuugaccauucuccaccug

SEQ ID NO: 1842524 - RNA, 20 nt, Human
gccuugaccauucuccaccu

SEQ ID NO: 1842525 - RNA, 19 nt, Human
gccuugaccauucuccacc

SEQ ID NO: 1842526 - RNA, 17 nt, Human
gccuugaccauucucca

SEQ ID NO: 1842527 - RNA, 17 nt, Human
gcgagcccugguggcag

SEQ ID NO: 1842528 - RNA, 15 nt, Human
gcgagcccugguggc

SEQ ID NO: 1842529 - RNA, 20 nt, Human
gccuggccugagcugggaug

SEQ ID NO: 1842530 - RNA, 13 nt, Human
gccuggccugagc

SEQ ID NO: 1842531 - RNA, 18 nt, Human
gccuggccugagcuggga

SEQ ID NO: 1842532 - RNA, 14 nt, Human
gccuggccugagcu

SEQ ID NO: 1842533 - RNA, 20 nt, Human
gccuguugggccaggagccu

SEQ ID NO: 1842534 - RNA, 18 nt, Human
gccuguugggccaggagc

SEQ ID NO: 1842535 - RNA, 16 nt, Human
gccuguugggccagga

SEQ ID NO: 1842536 - RNA, 15 nt, Human
gccuguugggccagg

SEQ ID NO: 1842537 - RNA, 14 nt, Human
gccuguugggccag

SEQ ID NO: 1842538 - RNA, 23 nt, Human
gccuguucccauucuugcauggc

SEQ ID NO: 1842539 - RNA, 19 nt, Human
gccuguucccauucuugca

SEQ ID NO: 1842540 - RNA, 17 nt, Human
gccugugccucugggac

SEQ ID NO: 1842541 - RNA, 16 nt, Human
gccugugccucuggga

SEQ ID NO: 1842542 - RNA, 13 nt, Human
gccuggcucaggu

SEQ ID NO: 1842543 - RNA, 23 nt, Human
gccuggcuccaaacccucgaggc

SEQ ID NO: 1842544 - RNA, 18 nt, Human
gccugugccucugggacu

SEQ ID NO: 1842545 - RNA, 12 nt, Human
gcccccacuggu

SEQ ID NO: 1842546 - RNA, 17 nt, Human
gccccugccacccuggg

SEQ ID NO: 1842547 - RNA, 16 nt, Human
gccccugccacccugg

SEQ ID NO: 1842548 - RNA, 23 nt, Human
gcccgggcucugccucccaucac

SEQ ID NO: 1842549 - RNA, 23 nt, Human
gccccugccucucugcagguccc

SEQ ID NO: 1842550 - RNA, 20 nt, Human
gccccugccucucugcaggu

SEQ ID NO: 1842551 - RNA, 15 nt, Human
gccccugcucuggug

SEQ ID NO: 1842552 - RNA, 15 nt, Human
gcccucacccugggg

SEQ ID NO: 1842553 - RNA, 23 nt, Human
gcccuaaugcgcaggcuggcccu

SEQ ID NO: 1842554 - RNA, 20 nt, Human
gcccuaaugcgcaggcuggc

SEQ ID NO: 1842555 - RNA, 19 nt, Human
gcccuaaugcgcaggcugg

SEQ ID NO: 1842556 - RNA, 17 nt, Human
gcccuaaugcgcaggcu

SEQ ID NO: 1842557 - RNA, 16 nt, Human
gcccuaaugcgcaggc

SEQ ID NO: 1842558 - RNA, 18 nt, Human
gcccugcagagggcacag

SEQ ID NO: 1842559 - RNA, 22 nt, Human
gcccugcccaccuggccucugc

SEQ ID NO: 1842560 - RNA, 21 nt, Human
gcccugcccaccuggccucug

SEQ ID NO: 1842561 - RNA, 20 nt, Human
gcccugcccaccuggccucu

SEQ ID NO: 1842562 - RNA, 17 nt, Human
gcccugcccaccuggcc

SEQ ID NO: 1842563 - RNA, 11 nt, Human
gcccugccucc

SEQ ID NO: 1842564 - RNA, 16 nt, Human
gcccugcccugguuuc

SEQ ID NO: 1842565 - RNA, 12 nt, Human
gcccugcccugg

SEQ ID NO: 1842566 - RNA, 11 nt, Human
gcccugcccug

SEQ ID NO: 1842567 - RNA, 20 nt, Human
gccgcagcccugcagagggc

SEQ ID NO: 1842568 - RNA, 22 nt, Human
gcccuuagcagggaaacagcua

SEQ ID NO: 1842569 - RNA, 13 nt, Human
gcccugccuccuu

SEQ ID NO: 1842570 - RNA, 12 nt, Human
gcccugccuccu

SEQ ID NO: 1842571 - RNA, 14 nt, Human
gcccugccuccuuu

SEQ ID NO: 1842572 - RNA, 18 nt, Human
gcccugcccugguuuccu

SEQ ID NO: 1842573 - RNA, 22 nt, Human
gcccuguccugccuaaggcuga

SEQ ID NO: 1842574 - RNA, 20 nt, Human
gcccuuagcagggaaacagc

SEQ ID NO: 1842575 - RNA, 20 nt, Human
gccuaggugacagagugaga

SEQ ID NO: 1842576 - RNA, 20 nt, Human
gccuagcauacguacacauu

SEQ ID NO: 1842577 - RNA, 21 nt, Human
gccuagcauacguacacauuu

SEQ ID NO: 1842578 - RNA, 22 nt, Human
gccuagcauacguacacauuuu

SEQ ID NO: 1842579 - RNA, 23 nt, Human
gccuagcauacguacacauuuua

SEQ ID NO: 1842580 - RNA, 13 nt, Human
gccuaggugacag

SEQ ID NO: 1842581 - RNA, 14 nt, Human
gccuaggugacaga

SEQ ID NO: 1842582 - RNA, 15 nt, Human
gccuaggugacagag

SEQ ID NO: 1842583 - RNA, 15 nt, Human
ggaagccgcuggggc

SEQ ID NO: 1842584 - RNA, 23 nt, Human
ggaagcucagggccuggcucagg

SEQ ID NO: 1842585 - RNA, 15 nt, Human
ggaagcucagggccu

SEQ ID NO: 1842586 - RNA, 11 nt, Human
ggaagcuccgc

SEQ ID NO: 1842587 - RNA, 16 nt, Human
ggaaggaaacccagcu

SEQ ID NO: 1842588 - RNA, 20 nt, Human
ggaaggaaacccagcucugg

SEQ ID NO: 1842589 - RNA, 19 nt, Human
ggaaggaaacccagcucug

SEQ ID NO: 1842590 - RNA, 23 nt, Human
ggacaaggaugaucuaggaagac

SEQ ID NO: 1842591 - RNA, 22 nt, Human
ggacaaggaugaucuaggaaga

SEQ ID NO: 1842592 - RNA, 13 nt, Human
ggacaagagcagg

SEQ ID NO: 1842593 - RNA, 18 nt, Human
ggaauaacauguaauuaa

SEQ ID NO: 1842594 - RNA, 16 nt, Human
ggaauccagacccggc

SEQ ID NO: 1842595 - RNA, 19 nt, Human
ggacaaggacuaggguccu

SEQ ID NO: 1842596 - RNA, 21 nt, Human
ggacacagcucuucuccaggc

SEQ ID NO: 1842597 - RNA, 15 nt, Human
ggacacagcucuucu

SEQ ID NO: 1842598 - RNA, 18 nt, Human
ggacacagcucuucucca

SEQ ID NO: 1842599 - RNA, 17 nt, Human
ggacacuaaccacgcug

SEQ ID NO: 1842600 - RNA, 22 nt, Human
ggacacuaaccacgcuggaccu

SEQ ID NO: 1842601 - RNA, 19 nt, Human
ggacagcuccuucuguccu

SEQ ID NO: 1842602 - RNA, 20 nt, Human
ggacagcuccuucuguccua

SEQ ID NO: 1842603 - RNA, 13 nt, Human
ggaagagaaaaaa

SEQ ID NO: 1842604 - RNA, 18 nt, Human
ggaagacuuuggaaagag

SEQ ID NO: 1842605 - RNA, 15 nt, Human
ggaagagaaaaaaua

SEQ ID NO: 1842606 - RNA, 12 nt, Human
ggaagacuuugg

SEQ ID NO: 1842607 - RNA, 17 nt, Human
ggaagacuuuggaaaga

SEQ ID NO: 1842608 - RNA, 13 nt, Human
ggaagacuuugga

SEQ ID NO: 1842609 - RNA, 14 nt, Human
ggaagacagcucuu

SEQ ID NO: 1842610 - RNA, 13 nt, Human
ggaagacagcucu

SEQ ID NO: 1842611 - RNA, 14 nt, Human
ggaacacucugaga

SEQ ID NO: 1842612 - RNA, 12 nt, Human
ggaacacucuga

SEQ ID NO: 1842613 - RNA, 16 nt, Human
ggaacacucugagacu

SEQ ID NO: 1842614 - RNA, 15 nt, Human
ggaacacucugagac

SEQ ID NO: 1842615 - RNA, 23 nt, Human
ggacaggcauguucucugaggac

SEQ ID NO: 1842616 - RNA, 12 nt, Human
ggacccccugaa

SEQ ID NO: 1842617 - RNA, 15 nt, Human
ggaccccgagccugg

SEQ ID NO: 1842618 - RNA, 11 nt, Human
ggacccugagg

SEQ ID NO: 1842619 - RNA, 18 nt, Human
ggaccccgagccuggcuc

SEQ ID NO: 1842620 - RNA, 13 nt, Human
ggacccugaggcc

SEQ ID NO: 1842621 - RNA, 12 nt, Human
ggacccugaggc

SEQ ID NO: 1842622 - RNA, 13 nt, Human
ggaccucaggccu

SEQ ID NO: 1842623 - RNA, 15 nt, Human
ggaccucaggccugg

SEQ ID NO: 1842624 - RNA, 14 nt, Human
ggaccucaggccug

SEQ ID NO: 1842625 - RNA, 20 nt, Human
ggaccucaggccugggggcu

SEQ ID NO: 1842626 - RNA, 20 nt, Human
ggacguguuaugacuccaga

SEQ ID NO: 1842627 - RNA, 15 nt, Human
ggacucaaugcacug

SEQ ID NO: 1842628 - RNA, 24 nt, Human
ggacuaacuugucuuuggacccug

SEQ ID NO: 1842629 - RNA, 14 nt, Human
ggacuacaggugug

SEQ ID NO: 1842630 - RNA, 20 nt, Human
ggacuaacuugucuuuggac

SEQ ID NO: 1842631 - RNA, 16 nt, Human
ggacucaaugcacuga

SEQ ID NO: 1842632 - RNA, 18 nt, Human
ggacucaaugcacugaca

SEQ ID NO: 1842633 - RNA, 13 nt, Human
ggagaaacuggaa

SEQ ID NO: 1842634 - RNA, 16 nt, Human
ggagaaaggaagggcu

SEQ ID NO: 1842635 - RNA, 9 nt, Human
ggacuuugu

SEQ ID NO: 1842636 - RNA, 14 nt, Human
ggacuuggaagcuc

SEQ ID NO: 1842637 - RNA, 18 nt, Human
gcugcugaaggcucgagc

SEQ ID NO: 1842638 - RNA, 13 nt, Human
gcugcuggcuggu

SEQ ID NO: 1842639 - RNA, 15 nt, Human
gcugcugaaggcucg

SEQ ID NO: 1842640 - RNA, 14 nt, Human
gcugcugaaggcuc

SEQ ID NO: 1842641 - RNA, 13 nt, Human
gcugcugaaggcu

SEQ ID NO: 1842642 - RNA, 23 nt, Human
gcucugguccauagagagcaaga

SEQ ID NO: 1842643 - RNA, 16 nt, Human
gcucugguccauagag

SEQ ID NO: 1842644 - RNA, 15 nt, Human
gcucugguccauaga

SEQ ID NO: 1842645 - RNA, 13 nt, Human
gcucugcccuugg

SEQ ID NO: 1842646 - RNA, 20 nt, Human
gcuggcgugcaguggugcga

SEQ ID NO: 1842647 - RNA, 18 nt, Human
gcuggagugcagugagcc

SEQ ID NO: 1842648 - RNA, 17 nt, Human
gcuggagugcagugagc

SEQ ID NO: 1842649 - RNA, 20 nt, Human
gcuggccuggccccucaggg

SEQ ID NO: 1842650 - RNA, 22 nt, Human
gcuggagugcagugagccgaga

SEQ ID NO: 1842651 - RNA, 23 nt, Human
gcuggguggcaccagcagccugg

SEQ ID NO: 1842652 - RNA, 22 nt, Human
gcuggguggcaccagcagccug

SEQ ID NO: 1842653 - RNA, 21 nt, Human
gcuggguggcaccagcagccu

SEQ ID NO: 1842654 - RNA, 15 nt, Human
gcuggcuguuggcug

SEQ ID NO: 1842655 - RNA, 16 nt, Human
gcuggcuguuggcugg

SEQ ID NO: 1842656 - RNA, 17 nt, Human
gcuggcuguuggcuggg

SEQ ID NO: 1842657 - RNA, 12 nt, Human
gcugggucgccc

SEQ ID NO: 1842658 - RNA, 22 nt, Human
gcugggccccugccucucugca

SEQ ID NO: 1842659 - RNA, 21 nt, Human
gcugggccccugccucucugc

SEQ ID NO: 1842660 - RNA, 23 nt, Human
gcugggccccugccucucugcag

SEQ ID NO: 1842661 - RNA, 22 nt, Human
gcuuccucauaguaugguggcu

SEQ ID NO: 1842662 - RNA, 12 nt, Human
gcuuguacauaa

SEQ ID NO: 1842663 - RNA, 14 nt, Human
gcuugagcucagga

SEQ ID NO: 1842664 - RNA, 20 nt, Human
gcuuguaaauagcucaggug

SEQ ID NO: 1842665 - RNA, 15 nt, Human
gcuucacggaagagc

SEQ ID NO: 1842666 - RNA, 17 nt, Human
gcuucacggaagagccu

SEQ ID NO: 1842667 - RNA, 21 nt, Human
gcuucaaggauccugagccag

SEQ ID NO: 1842668 - RNA, 20 nt, Human
gcuucaaggauccugagcca

SEQ ID NO: 1842669 - RNA, 19 nt, Human
gcuucaaggauccugagcc

SEQ ID NO: 1842670 - RNA, 18 nt, Human
gcuucaaggauccugagc

SEQ ID NO: 1842671 - RNA, 18 nt, Human
gcuucacggaagagccuu

SEQ ID NO: 1842672 - RNA, 19 nt, Human
gcuucacggaagagccuug

SEQ ID NO: 1842673 - RNA, 12 nt, Human
gcuucagccucc

SEQ ID NO: 1842674 - RNA, 13 nt, Human
ggccccugcuggu

SEQ ID NO: 1842675 - RNA, 14 nt, Human
ggccccugcugguu

SEQ ID NO: 1842676 - RNA, 23 nt, Human
ggccccugcugguucaggguugg

SEQ ID NO: 1842677 - RNA, 13 nt, Human
ggcccggcuccag

SEQ ID NO: 1842678 - RNA, 15 nt, Human
ggcccggcuccaggc

SEQ ID NO: 1842679 - RNA, 21 nt, Human
ggcccuucucuccagccccug

SEQ ID NO: 1842680 - RNA, 20 nt, Human
ggcccuucucuccagccccu

SEQ ID NO: 1842681 - RNA, 19 nt, Human
ggcccuucucuccagcccc

SEQ ID NO: 1842682 - RNA, 14 nt, Human
ggccuccauccuga

SEQ ID NO: 1842683 - RNA, 15 nt, Human
ggccuccauccugag

SEQ ID NO: 1842684 - RNA, 16 nt, Human
ggccuccauccugagg

SEQ ID NO: 1842685 - RNA, 19 nt, Human
ggccucacuaggcuucugg

SEQ ID NO: 1842686 - RNA, 23 nt, Human
ggccucaagugauucuccugccu

SEQ ID NO: 1842687 - RNA, 23 nt, Human
ggcccuucucuccagccccugga

SEQ ID NO: 1842688 - RNA, 22 nt, Human
ggcccuucucuccagccccugg

SEQ ID NO: 1842689 - RNA, 17 nt, Human
ggccaguuggucccccu

SEQ ID NO: 1842690 - RNA, 14 nt, Human
ggccaguugguccc

SEQ ID NO: 1842691 - RNA, 20 nt, Human
ggccagugugacaaggauug

SEQ ID NO: 1842692 - RNA, 22 nt, Human
ggcagccccuguucuggcagag

SEQ ID NO: 1842693 - RNA, 20 nt, Human
ggcaguggugguuuucuguu

SEQ ID NO: 1842694 - RNA, 21 nt, Human
ggcaguggugguuuucuguuc

SEQ ID NO: 1842695 - RNA, 16 nt, Human
ggagagaagagaaugc

SEQ ID NO: 1842696 - RNA, 22 nt, Human
ggagacugcugagucaacccaa

SEQ ID NO: 1842697 - RNA, 23 nt, Human
ggcacagaaaauggaagacagcu

SEQ ID NO: 1842698 - RNA, 13 nt, Human
ggcacaucagcac

SEQ ID NO: 1842699 - RNA, 23 nt, Human
ggcacucagaagacacugauggg

SEQ ID NO: 1842700 - RNA, 19 nt, Human
ggcacagaaaauggaagac

SEQ ID NO: 1842701 - RNA, 21 nt, Human
ggcacagaaaauggaagacag

SEQ ID NO: 1842702 - RNA, 20 nt, Human
ggcacagaaaauggaagaca

SEQ ID NO: 1842703 - RNA, 15 nt, Human
ggcacugguggcccg

SEQ ID NO: 1842704 - RNA, 23 nt, Human
ggcagccccauucugccugccca

SEQ ID NO: 1842705 - RNA, 11 nt, Human
ggcagccccug

SEQ ID NO: 1842706 - RNA, 16 nt, Human
ggcugggagagccuuc

SEQ ID NO: 1842707 - RNA, 15 nt, Human
ggcugggagagccuu

SEQ ID NO: 1842708 - RNA, 14 nt, Human
ggcugggagagccu

SEQ ID NO: 1842709 - RNA, 13 nt, Human
ggcugcugaaggc

SEQ ID NO: 1842710 - RNA, 11 nt, Human
ggcucucaggc

SEQ ID NO: 1842711 - RNA, 12 nt, Human
ggcucuuccagg

SEQ ID NO: 1842712 - RNA, 13 nt, Human
ggcucuucuccuu

SEQ ID NO: 1842713 - RNA, 12 nt, Human
ggcucuucuccu

SEQ ID NO: 1842714 - RNA, 14 nt, Human
ggcucuuccaggcu

SEQ ID NO: 1842715 - RNA, 13 nt, Human
ggcucucaggcca

SEQ ID NO: 1842716 - RNA, 14 nt, Human
ggcucucaggccag

SEQ ID NO: 1842717 - RNA, 21 nt, Human
ggcugccaaugggagcucaug

SEQ ID NO: 1842718 - RNA, 13 nt, Human
ggcugcccuggug

SEQ ID NO: 1842719 - RNA, 19 nt, Human
ggcugcccuggugcugcca

SEQ ID NO: 1842720 - RNA, 16 nt, Human
ggcugcccuggugcug

SEQ ID NO: 1842721 - RNA, 15 nt, Human
ggcugcccuggugcu

SEQ ID NO: 1842722 - RNA, 14 nt, Human
ggcugcccuggugc

SEQ ID NO: 1842723 - RNA, 22 nt, Human
ggcugcccuggugcugccacac

SEQ ID NO: 1842724 - RNA, 16 nt, Human
ggcugccuuagaaccu

SEQ ID NO: 1842725 - RNA, 22 nt, Human
ggcugcggaaugaaccacaucu

SEQ ID NO: 1842726 - RNA, 20 nt, Human
ggcugccaaugggagcucau

SEQ ID NO: 1842727 - RNA, 19 nt, Human
ggcugccaaugggagcuca

SEQ ID NO: 1842728 - RNA, 23 nt, Human
ggcucuucuccuuucacaaccuu

SEQ ID NO: 1842729 - RNA, 15 nt, Human
ggcucuucuccuuuc

SEQ ID NO: 1842730 - RNA, 14 nt, Human
ggcucuucuccuuu

SEQ ID NO: 1842731 - RNA, 22 nt, Human
ggcugacagacagcccuccauc

SEQ ID NO: 1842732 - RNA, 16 nt, Human
ggcucuucuccuuuca

SEQ ID NO: 1842733 - RNA, 19 nt, Human
ggcucagcaaaagaugcuu

SEQ ID NO: 1842734 - RNA, 18 nt, Human
ggcucagcggggacagcu

SEQ ID NO: 1842735 - RNA, 20 nt, Human
ggcucagguggggucacucu

SEQ ID NO: 1842736 - RNA, 19 nt, Human
ggcucagguggggucacuc

SEQ ID NO: 1842737 - RNA, 19 nt, Human
ggcucagcggggacagcuc

SEQ ID NO: 1842738 - RNA, 20 nt, Human
ggcucagcggggacagcucc

SEQ ID NO: 1842739 - RNA, 14 nt, Human
ggcuccacuugguc

SEQ ID NO: 1842740 - RNA, 17 nt, Human
ggcuccaaacccucgag

SEQ ID NO: 1842741 - RNA, 19 nt, Human
gggagagccuuccaggggu

SEQ ID NO: 1842742 - RNA, 15 nt, Human
gggagagccuuccag

SEQ ID NO: 1842743 - RNA, 23 nt, Human
gggagcaggcucgggcuccccag

SEQ ID NO: 1842744 - RNA, 16 nt, Human
gggagggagggcucca

SEQ ID NO: 1842745 - RNA, 15 nt, Human
gggagggagggcucc

SEQ ID NO: 1842746 - RNA, 18 nt, Human
gggaggucaaggcugcag

SEQ ID NO: 1842747 - RNA, 15 nt, Human
gggaggucgaggcag

SEQ ID NO: 1842748 - RNA, 21 nt, Human
gggagaaccaaaaagaggcua

SEQ ID NO: 1842749 - RNA, 15 nt, Human
gggacuuggaagcuc

SEQ ID NO: 1842750 - RNA, 17 nt, Human
gggacuuggaagcuccg

SEQ ID NO: 1842751 - RNA, 18 nt, Human
gggacuuggaagcuccgc

SEQ ID NO: 1842752 - RNA, 23 nt, Human
gggacuuggaagcuccgcuuucu

SEQ ID NO: 1842753 - RNA, 17 nt, Human
aaaaaugguuuaaaugg

SEQ ID NO: 1842754 - RNA, 20 nt, Human
gggaccagagcugccaccug

SEQ ID NO: 1842755 - RNA, 14 nt, Human
gggaccagagcugc

SEQ ID NO: 1842756 - RNA, 12 nt, Human
aaaacccaagug

SEQ ID NO: 1842757 - RNA, 13 nt, Human
aaaacaugcuaca

SEQ ID NO: 1842758 - RNA, 14 nt, Human
aaaacaugcuacac

SEQ ID NO: 1842759 - RNA, 22 nt, Human
aaaacuugauguguuaucucuu

SEQ ID NO: 1842760 - RNA, 15 nt, Human
aaaacuucagacaua

SEQ ID NO: 1842761 - RNA, 18 nt, Human
aaaacucuccucugcugc

SEQ ID NO: 1842762 - RNA, 21 nt, Human
ggcuuccuccugguguggaag

SEQ ID NO: 1842763 - RNA, 22 nt, Human
ggcuucccgcucagcccucccu

SEQ ID NO: 1842764 - RNA, 18 nt, Human
gggaagaagcucucuccu

SEQ ID NO: 1842765 - RNA, 13 nt, Human
gggaaccugaccc

SEQ ID NO: 1842766 - RNA, 13 nt, Human
gggaagagacuug

SEQ ID NO: 1842767 - RNA, 13 nt, Human
gggacagagcaga

SEQ ID NO: 1842768 - RNA, 12 nt, Human
gggacagcuccu

SEQ ID NO: 1842769 - RNA, 13 nt, Human
gggacagcuccuu

SEQ ID NO: 1842770 - RNA, 15 nt, Human
gggacagcuccuucu

SEQ ID NO: 1842771 - RNA, 18 nt, Human
ggcuucauccuccucaga

SEQ ID NO: 1842772 - RNA, 22 nt, Human
ggcuucauccuccucagaucuu

SEQ ID NO: 1842773 - RNA, 14 nt, Human
ggcuucccgcucag

SEQ ID NO: 1842774 - RNA, 18 nt, Human
ggcuucccgcucagcccu

SEQ ID NO: 1842775 - RNA, 17 nt, Human
ggcuucccgcucagccc

SEQ ID NO: 1842776 - RNA, 16 nt, Human
ggcuucccgcucagcc

SEQ ID NO: 1842777 - RNA, 15 nt, Human
ggcuucccgcucagc

SEQ ID NO: 1842778 - RNA, 21 nt, Human
ggcuucccgcucagcccuccc

SEQ ID NO: 1842779 - RNA, 19 nt, Human
ggcuucccgcucagcccuc

SEQ ID NO: 1842780 - RNA, 16 nt, Human
ggcuuccucauaguau

SEQ ID NO: 1842781 - RNA, 18 nt, Human
ggcuucaguggcagcugc

SEQ ID NO: 1842782 - RNA, 17 nt, Human
ggcuucaguggcagcug

SEQ ID NO: 1842783 - RNA, 19 nt, Human
ggcuucaguggcagcugcu

SEQ ID NO: 1842784 - RNA, 20 nt, Human
ggcuucaguggcagcugcuu

SEQ ID NO: 1842785 - RNA, 18 nt, Human
ggcuguaucccaugagcc

SEQ ID NO: 1842786 - RNA, 21 nt, Human
ggcuggguucuacccaggugc

SEQ ID NO: 1842787 - RNA, 19 nt, Human
ggcuggguucuacccaggu

SEQ ID NO: 1842788 - RNA, 19 nt, Human
ggcuggguggcaccagcag

SEQ ID NO: 1842789 - RNA, 20 nt, Human
ggcugggucgcccuggacug

SEQ ID NO: 1842790 - RNA, 17 nt, Human
ggcugggucgcccugga

SEQ ID NO: 1842791 - RNA, 14 nt, Human
ggcugggucgcccu

SEQ ID NO: 1842792 - RNA, 15 nt, Human
ggcugggggccucag

SEQ ID NO: 1842793 - RNA, 16 nt, Human
ggcugggggccucagu

SEQ ID NO: 1842794 - RNA, 17 nt, Human
ggcugggggccucagug

SEQ ID NO: 1842795 - RNA, 19 nt, Human
ggcugggggccucagugcc

SEQ ID NO: 1842796 - RNA, 14 nt, Human
aaaaauaacaauga

SEQ ID NO: 1842797 - RNA, 13 nt, Human
gguggaugccugg

SEQ ID NO: 1842798 - RNA, 16 nt, Human
ggugcugggccccugc

SEQ ID NO: 1842799 - RNA, 15 nt, Human
ggugcugggccccug

SEQ ID NO: 1842800 - RNA, 13 nt, Human
ggugcugggcccc

SEQ ID NO: 1842801 - RNA, 11 nt, Human
ggugcugggcc

SEQ ID NO: 1842802 - RNA, 21 nt, Human
ggugcauuugaggucuguucu

SEQ ID NO: 1842803 - RNA, 21 nt, Human
ggugcauauuuauaaaaauaa

SEQ ID NO: 1842804 - RNA, 16 nt, Human
ggugcaaugaccuuuc

SEQ ID NO: 1842805 - RNA, 13 nt, Human
ggugcaaugaccu

SEQ ID NO: 1842806 - RNA, 18 nt, Human
ggugcaaaguucccuacu

SEQ ID NO: 1842807 - RNA, 12 nt, Human
ggugcaaugacc

SEQ ID NO: 1842808 - RNA, 18 nt, Human
ggugauccacccaccuca

SEQ ID NO: 1842809 - RNA, 23 nt, Human
ggugauccacccaccucagccuc

SEQ ID NO: 1842810 - RNA, 24 nt, Human
ggugauccacccaccucagccucc

SEQ ID NO: 1842811 - RNA, 20 nt, Human
ggucgcccuggacugugugc

SEQ ID NO: 1842812 - RNA, 13 nt, Human
ggugaacagaaca

SEQ ID NO: 1842813 - RNA, 14 nt, Human
ggucgcccuggacu

SEQ ID NO: 1842814 - RNA, 13 nt, Human
ggucgaggcagga

SEQ ID NO: 1842815 - RNA, 15 nt, Human
aaagcucacuuuacu

SEQ ID NO: 1842816 - RNA, 15 nt, Human
aaagcugaaaacugc

SEQ ID NO: 1842817 - RNA, 12 nt, Human
aaagcugaaaac

SEQ ID NO: 1842818 - RNA, 13 nt, Human
aaagcugcugaca

SEQ ID NO: 1842819 - RNA, 15 nt, Human
aaagcuuguuaagau

SEQ ID NO: 1842820 - RNA, 22 nt, Human
aaaggaaagagggagguaagga

SEQ ID NO: 1842821 - RNA, 21 nt, Human
aaaggagagcuagcagcaggg

SEQ ID NO: 1842822 - RNA, 17 nt, Human
aaaggagauuggaagga

SEQ ID NO: 1842823 - RNA, 14 nt, Human
aaagguaaaucaga

SEQ ID NO: 1842824 - RNA, 20 nt, Human
aaagggacugagaaauuuau

SEQ ID NO: 1842825 - RNA, 22 nt, Human
aaagggacuuggaagcuccgcu

SEQ ID NO: 1842826 - RNA, 15 nt, Human
aaagaggaaugaagu

SEQ ID NO: 1842827 - RNA, 14 nt, Human
aaagaugcuucuca

SEQ ID NO: 1842828 - RNA, 17 nt, Human
aaagaugcuucucacug

SEQ ID NO: 1842829 - RNA, 19 nt, Human
aaagaugcuucucacugcc

SEQ ID NO: 1842830 - RNA, 13 nt, Human
aaagacuguacaa

SEQ ID NO: 1842831 - RNA, 23 nt, Human
aaagacugaguacguugugcauu

SEQ ID NO: 1842832 - RNA, 14 nt, Human
aaagacuguacaaa

SEQ ID NO: 1842833 - RNA, 22 nt, Human
aaagauggcugugccucugccu

SEQ ID NO: 1842834 - RNA, 21 nt, Human
aaagauggcugugccucugcc

SEQ ID NO: 1842835 - RNA, 23 nt, Human
aaagauggcugugccucugccug

SEQ ID NO: 1842836 - RNA, 14 nt, Human
gguccugcugcagu

SEQ ID NO: 1842837 - RNA, 12 nt, Human
gguccugcugca

SEQ ID NO: 1842838 - RNA, 11 nt, Human
gguccugcugc

SEQ ID NO: 1842839 - RNA, 19 nt, Human
aaacuucagacauagaauu

SEQ ID NO: 1842840 - RNA, 14 nt, Human
ggguggccucccaa

SEQ ID NO: 1842841 - RNA, 16 nt, Human
aaacuuguauuaugug

SEQ ID NO: 1842842 - RNA, 19 nt, Human
aaagacugaccaauauugu

SEQ ID NO: 1842843 - RNA, 9 nt, Human
aaagacaga

SEQ ID NO: 1842844 - RNA, 13 nt, Human
aaagacagugaaa

SEQ ID NO: 1842845 - RNA, 19 nt, Human
gggggugcugggccccugc

SEQ ID NO: 1842846 - RNA, 15 nt, Human
gggucgcccuggacu

SEQ ID NO: 1842847 - RNA, 13 nt, Human
gggucgcccugga

SEQ ID NO: 1842848 - RNA, 15 nt, Human
aaacauuaugaugug

SEQ ID NO: 1842849 - RNA, 16 nt, Human
aaaccaagccguggcu

SEQ ID NO: 1842850 - RNA, 23 nt, Human
aaaccaagucaagugaaaaagga

SEQ ID NO: 1842851 - RNA, 18 nt, Human
aaaccuuuuauauuuagu

SEQ ID NO: 1842852 - RNA, 18 nt, Human
aaaccuuuguuugcaucu

SEQ ID NO: 1842853 - RNA, 15 nt, Human
aaacgggcucagcaa

SEQ ID NO: 1842854 - RNA, 18 nt, Human
aaacuaggugcauauuua

SEQ ID NO: 1842855 - RNA, 22 nt, Human
aaacuaggugcauauuuauaaa

SEQ ID NO: 1842856 - RNA, 17 nt, Human
aaacuuaaucuaaaugg

SEQ ID NO: 1842857 - RNA, 18 nt, Human
aaacuuaaucuaaaugga

SEQ ID NO: 1842858 - RNA, 16 nt, Human
aaacuuaaucuaaaug

SEQ ID NO: 1842859 - RNA, 19 nt, Human
aaacuguuaauaguucagg

SEQ ID NO: 1842860 - RNA, 13 nt, Human
aaacucuccucug

SEQ ID NO: 1842861 - RNA, 22 nt, Human
aaacugcccccucugcccugcg

SEQ ID NO: 1842862 - RNA, 15 nt, Human
ggggccucagugcca

SEQ ID NO: 1842863 - RNA, 12 nt, Human
gggggccucagu

SEQ ID NO: 1842864 - RNA, 15 nt, Human
gggggccucagugcc

SEQ ID NO: 1842865 - RNA, 17 nt, Human
gggggccucagugccac

SEQ ID NO: 1842866 - RNA, 18 nt, Human
gggggccucagugccacu

SEQ ID NO: 1842867 - RNA, 11 nt, Human
ggggagaaagu

SEQ ID NO: 1842868 - RNA, 17 nt, Human
aaacauggccuuugcuu

SEQ ID NO: 1842869 - RNA, 16 nt, Human
aaacauggccuuugcu

SEQ ID NO: 1842870 - RNA, 14 nt, Human
aaacaguagugaua

SEQ ID NO: 1842871 - RNA, 16 nt, Human
ggggaccagagcugcc

SEQ ID NO: 1842872 - RNA, 15 nt, Human
ggggaccagagcugc

SEQ ID NO: 1842873 - RNA, 13 nt, Human
ggggaaggcaggg

SEQ ID NO: 1842874 - RNA, 18 nt, Human
ggggaauguuugccucug

SEQ ID NO: 1842875 - RNA, 22 nt, Human
ggggaauguuugccucugccuc

SEQ ID NO: 1842876 - RNA, 12 nt, Human
aaacacauuuuu

SEQ ID NO: 1842877 - RNA, 11 nt, Human
aaacacauuuu

SEQ ID NO: 1842878 - RNA, 19 nt, Human
aaacacaaacgggcucagc

SEQ ID NO: 1842879 - RNA, 20 nt, Human
aaaauuuugauguuuuaagg

SEQ ID NO: 1842880 - RNA, 19 nt, Human
aaaauuuagaaauauaauu

SEQ ID NO: 1842881 - RNA, 13 nt, Human
gggaugagaaagg

SEQ ID NO: 1842882 - RNA, 20 nt, Human
aaagguauuuuaaucaccaa

SEQ ID NO: 1842883 - RNA, 20 nt, Human
aaaguacacuguuucaaacu

SEQ ID NO: 1842884 - RNA, 16 nt, Human
aaaguacauguuaaac

SEQ ID NO: 1842885 - RNA, 19 nt, Human
aaaguacuucuccacccug

SEQ ID NO: 1842886 - RNA, 18 nt, Human
aaaguaucccuacuguaa

SEQ ID NO: 1842887 - RNA, 23 nt, Human
aaaguacuucuccacccugcucu

SEQ ID NO: 1842888 - RNA, 20 nt, Human
aaaguacuucuccacccugc

SEQ ID NO: 1842889 - RNA, 21 nt, Human
aaaguacuucuccacccugcu

SEQ ID NO: 1842890 - RNA, 23 nt, Human
aaaguucugcagauaaacaguag

SEQ ID NO: 1842891 - RNA, 17 nt, Human
aaaguugguaaaccuuu

SEQ ID NO: 1842892 - RNA, 16 nt, Human
aaaguugguaaaccuu

SEQ ID NO: 1842893 - RNA, 18 nt, Human
aaauaccagccaguaaau

SEQ ID NO: 1842894 - RNA, 17 nt, Human
aaauacagauagauaua

SEQ ID NO: 1842895 - RNA, 20 nt, Human
guaauaggcguaacuaauuu

SEQ ID NO: 1842896 - RNA, 14 nt, Human
guaauaugcacaca

SEQ ID NO: 1842897 - RNA, 16 nt, Human
guaauaugcacacauu

SEQ ID NO: 1842898 - RNA, 17 nt, Human
guaauaugcacacauuu

SEQ ID NO: 1842899 - RNA, 18 nt, Human
guaauaugcacacauuuu

SEQ ID NO: 1842900 - RNA, 21 nt, Human
guaauccaagcaaaugugaau

SEQ ID NO: 1842901 - RNA, 15 nt, Human
guaauccaccugccu

SEQ ID NO: 1842902 - RNA, 22 nt, Human
guaauuugugauacaaugcugu

SEQ ID NO: 1842903 - RNA, 21 nt, Human
aaaucagacuaugaaguuuuu

SEQ ID NO: 1842904 - RNA, 14 nt, Human
aaaucagacuauga

SEQ ID NO: 1842905 - RNA, 15 nt, Human
aaauauuccugcauu

SEQ ID NO: 1842906 - RNA, 18 nt, Human
aaaucagccugcuccagc

SEQ ID NO: 1842907 - RNA, 16 nt, Human
aaaucagcugcuacua

SEQ ID NO: 1842908 - RNA, 12 nt, Human
aaaucagccugc

SEQ ID NO: 1842909 - RNA, 19 nt, Human
aaaucagccguguaaccau

SEQ ID NO: 1842910 - RNA, 15 nt, Human
aaauccacuuuaucu

SEQ ID NO: 1842911 - RNA, 14 nt, Human
guacaugaaaacac

SEQ ID NO: 1842912 - RNA, 15 nt, Human
guacaugaaaacaca

SEQ ID NO: 1842913 - RNA, 16 nt, Human
guacaugaaaacacau

SEQ ID NO: 1842914 - RNA, 17 nt, Human
guacaugaaaacacauu

SEQ ID NO: 1842915 - RNA, 18 nt, Human
guacaugaaaacacauuu

SEQ ID NO: 1842916 - RNA, 19 nt, Human
guacaugaaaacacauuuu

SEQ ID NO: 1842917 - RNA, 20 nt, Human
guacaugaaaacacauuuuu

SEQ ID NO: 1842918 - RNA, 19 nt, Human
guacauggaauaacaugua

SEQ ID NO: 1842919 - RNA, 12 nt, Human
guacccacugcu

SEQ ID NO: 1842920 - RNA, 23 nt, Human
guaccaagacuacuagggaaaug

SEQ ID NO: 1842921 - RNA, 20 nt, Human
guaccaagacuacuagggaa

SEQ ID NO: 1842922 - RNA, 11 nt, Human
guagagacagg

SEQ ID NO: 1842923 - RNA, 12 nt, Human
guagagacaggg

SEQ ID NO: 1842924 - RNA, 15 nt, Human
guagagccagggucu

SEQ ID NO: 1842925 - RNA, 18 nt, Human
guagagccagggucucac

SEQ ID NO: 1842926 - RNA, 13 nt, Human
guagagacagggu

SEQ ID NO: 1842927 - RNA, 10 nt, Human
guagagccag

SEQ ID NO: 1842928 - RNA, 11 nt, Human
guagagccagg

SEQ ID NO: 1842929 - RNA, 18 nt, Human
guagaagcccuucuaccu

SEQ ID NO: 1842930 - RNA, 12 nt, Human
guagaagauggc

SEQ ID NO: 1842931 - RNA, 21 nt, Human
guagaagucuuagauguauau

SEQ ID NO: 1842932 - RNA, 23 nt, Human
guagaaauaucugaaaauguaug

SEQ ID NO: 1842933 - RNA, 21 nt, Human
guagaaauaucugaaaaugua

SEQ ID NO: 1842934 - RNA, 20 nt, Human
guagaaauaucugaaaaugu

SEQ ID NO: 1842935 - RNA, 14 nt, Human
guacuccucccagg

SEQ ID NO: 1842936 - RNA, 17 nt, Human
guacuauguaucaauga

SEQ ID NO: 1842937 - RNA, 15 nt, Human
guacuauguaucaau

SEQ ID NO: 1842938 - RNA, 14 nt, Human
guacucauuaaaaa

SEQ ID NO: 1842939 - RNA, 13 nt, Human
guacuauguauca

SEQ ID NO: 1842940 - RNA, 19 nt, Human
guacuacaguccucccauc

SEQ ID NO: 1842941 - RNA, 18 nt, Human
guacuacaguccucccau

SEQ ID NO: 1842942 - RNA, 13 nt, Human
guacccacugcuc

SEQ ID NO: 1842943 - RNA, 14 nt, Human
guacccacugcucu

SEQ ID NO: 1842944 - RNA, 16 nt, Human
guacuggagaaaaugg

SEQ ID NO: 1842945 - RNA, 21 nt, Human
gugaccagcaccaucucuccu

SEQ ID NO: 1842946 - RNA, 18 nt, Human
gugaccagcaccaucucu

SEQ ID NO: 1842947 - RNA, 18 nt, Human
gugaccauguuuuguuua

SEQ ID NO: 1842948 - RNA, 17 nt, Human
gugaccaaugaugguca

SEQ ID NO: 1842949 - RNA, 14 nt, Human
gugacaugucuuuu

SEQ ID NO: 1842950 - RNA, 16 nt, Human
gugacagaggcagccc

SEQ ID NO: 1842951 - RNA, 18 nt, Human
gugacagaggcagcccca

SEQ ID NO: 1842952 - RNA, 19 nt, Human
gugacagaggcagccccau

SEQ ID NO: 1842953 - RNA, 14 nt, Human
gugaagugaagaca

SEQ ID NO: 1842954 - RNA, 23 nt, Human
gugaagacaaugacuuacuguac

SEQ ID NO: 1842955 - RNA, 12 nt, Human
gugagagcuggg

SEQ ID NO: 1842956 - RNA, 12 nt, Human
gugaccccaggu

SEQ ID NO: 1842957 - RNA, 17 nt, Human
gugaguacuacaguccu

SEQ ID NO: 1842958 - RNA, 15 nt, Human
gugagcaggcuguga

SEQ ID NO: 1842959 - RNA, 21 nt, Human
gugagcacuaaggugugcucu

SEQ ID NO: 1842960 - RNA, 15 nt, Human
gugagcaauccugca

SEQ ID NO: 1842961 - RNA, 13 nt, Human
gugagagcugggu

SEQ ID NO: 1842962 - RNA, 16 nt, Human
gugagaggggaacaga

SEQ ID NO: 1842963 - RNA, 20 nt, Human
gugaguccuggcaugggaau

SEQ ID NO: 1842964 - RNA, 15 nt, Human
gugagucgaggacag

SEQ ID NO: 1842965 - RNA, 21 nt, Human
gugaguacuacaguccuccca

SEQ ID NO: 1842966 - RNA, 19 nt, Human
gugaguacuacaguccucc

SEQ ID NO: 1842967 - RNA, 17 nt, Human
gugaguccuggcauggg

SEQ ID NO: 1842968 - RNA, 14 nt, Human
aacugaacucugac

SEQ ID NO: 1842969 - RNA, 15 nt, Human
aacugaacauuccag

SEQ ID NO: 1842970 - RNA, 18 nt, Human
gucucuuuaaugucacag

SEQ ID NO: 1842971 - RNA, 19 nt, Human
gucucuuuaaugucacagg

SEQ ID NO: 1842972 - RNA, 20 nt, Human
gucucuuuaaugucacaggc

SEQ ID NO: 1842973 - RNA, 19 nt, Human
gucugaaggcuggguucug

SEQ ID NO: 1842974 - RNA, 14 nt, Human
gucugaaggcuggg

SEQ ID NO: 1842975 - RNA, 16 nt, Human
gucugaagucacugca

SEQ ID NO: 1842976 - RNA, 22 nt, Human
gucucuuuaaugucacaggcag

SEQ ID NO: 1842977 - RNA, 23 nt, Human
gucucuuuaaugucacaggcagg

SEQ ID NO: 1842978 - RNA, 17 nt, Human
gucucuugguccugcug

SEQ ID NO: 1842979 - RNA, 19 nt, Human
gucucuugguccugcugca

SEQ ID NO: 1842980 - RNA, 18 nt, Human
gucucuugguccugcugc

SEQ ID NO: 1842981 - RNA, 20 nt, Human
gucucuugguccugcugcag

SEQ ID NO: 1842982 - RNA, 13 nt, Human
gucucuugguccu

SEQ ID NO: 1842983 - RNA, 19 nt, Human
gucugaagucacugcacag

SEQ ID NO: 1842984 - RNA, 17 nt, Human
gucugaagucacugcac

SEQ ID NO: 1842985 - RNA, 21 nt, Human
gucugacaggcaaugcuggcu

SEQ ID NO: 1842986 - RNA, 22 nt, Human
gucugacaggcaaugcuggcug

SEQ ID NO: 1842987 - RNA, 23 nt, Human
gucugacaggcaaugcuggcugu

SEQ ID NO: 1842988 - RNA, 18 nt, Human
aaccugauugugucucuu

SEQ ID NO: 1842989 - RNA, 19 nt, Human
aaccugauugugucucuug

SEQ ID NO: 1842990 - RNA, 17 nt, Human
aaccuguucugcuuucc

SEQ ID NO: 1842991 - RNA, 13 nt, Human
aaccuguucugcu

SEQ ID NO: 1842992 - RNA, 16 nt, Human
gucuuuguacagacaa

SEQ ID NO: 1842993 - RNA, 15 nt, Human
gucuuuguacagaca

SEQ ID NO: 1842994 - RNA, 16 nt, Human
gucuucaguaagccgu

SEQ ID NO: 1842995 - RNA, 17 nt, Human
aacuagaacugaauuuu

SEQ ID NO: 1842996 - RNA, 23 nt, Human
aacguggcugcuucaaggauccu

SEQ ID NO: 1842997 - RNA, 20 nt, Human
gucuaccugaggggccucuu

SEQ ID NO: 1842998 - RNA, 18 nt, Human
gucgcccuggacugugug

SEQ ID NO: 1842999 - RNA, 14 nt, Human
gucgcccuggacug

SEQ ID NO: 1843000 - RNA, 23 nt, Human
gucgcccagucuggaaugcagug

SEQ ID NO: 1843001 - RNA, 14 nt, Human
gucgcccaggcugg

SEQ ID NO: 1843002 - RNA, 20 nt, Human
gucgcccaggcuggagugca

SEQ ID NO: 1843003 - RNA, 15 nt, Human
gucgcccaggcugga

SEQ ID NO: 1843004 - RNA, 13 nt, Human
gucgcccagucug

SEQ ID NO: 1843005 - RNA, 14 nt, Human
gucgcccagucugg

SEQ ID NO: 1843006 - RNA, 14 nt, Human
gucgaggacaggga

SEQ ID NO: 1843007 - RNA, 16 nt, Human
guccugcugcaguugc

SEQ ID NO: 1843008 - RNA, 13 nt, Human
guccugcugcagu

SEQ ID NO: 1843009 - RNA, 17 nt, Human
guccugcugcaguugcc

SEQ ID NO: 1843010 - RNA, 16 nt, Human
aaccaaauauuccaga

SEQ ID NO: 1843011 - RNA, 13 nt, Human
aaccacaucuugc

SEQ ID NO: 1843012 - RNA, 13 nt, Human
gucuccauguuug

SEQ ID NO: 1843013 - RNA, 16 nt, Human
aacauuuugucauaua

SEQ ID NO: 1843014 - RNA, 22 nt, Human
aacauuuguucuauagcuuuuc

SEQ ID NO: 1843015 - RNA, 17 nt, Human
gucucaagagggcacug

SEQ ID NO: 1843016 - RNA, 15 nt, Human
gucucaagagggcac

SEQ ID NO: 1843017 - RNA, 22 nt, Human
gucucaagagggcacugguggc

SEQ ID NO: 1843018 - RNA, 20 nt, Human
gucucaagagggcacuggug

SEQ ID NO: 1843019 - RNA, 16 nt, Human
gucucaaacuccugac

SEQ ID NO: 1843020 - RNA, 22 nt, Human
gucucaaacucuugaccucagg

SEQ ID NO: 1843021 - RNA, 14 nt, Human
gucuaugggacuca

SEQ ID NO: 1843022 - RNA, 15 nt, Human
gucuaugggacucaa

SEQ ID NO: 1843023 - RNA, 23 nt, Human
gucucaguccaugaagauguaga

SEQ ID NO: 1843024 - RNA, 16 nt, Human
gucucaggucccugca

SEQ ID NO: 1843025 - RNA, 15 nt, Human
gucucaggucccugc

SEQ ID NO: 1843026 - RNA, 22 nt, Human
guagcucuaggagggcuggcaa

SEQ ID NO: 1843027 - RNA, 14 nt, Human
gucccccucuggcu

SEQ ID NO: 1843028 - RNA, 12 nt, Human
gucccccucugg

SEQ ID NO: 1843029 - RNA, 19 nt, Human
gucccaccuuggcugcagg

SEQ ID NO: 1843030 - RNA, 20 nt, Human
gucccaccuuggcugcaggg

SEQ ID NO: 1843031 - RNA, 17 nt, Human
gucccaccuuggcugca

SEQ ID NO: 1843032 - RNA, 18 nt, Human
gucccaccuuggcugcag

SEQ ID NO: 1843033 - RNA, 22 nt, Human
guccgaaagggacuuggaagcu

SEQ ID NO: 1843034 - RNA, 13 nt, Human
gucccuuuuccuu

SEQ ID NO: 1843035 - RNA, 21 nt, Human
guccgaaagggacuuggaagc

SEQ ID NO: 1843036 - RNA, 16 nt, Human
guccccgcacugggcu

SEQ ID NO: 1843037 - RNA, 15 nt, Human
guccccgcacugggc

SEQ ID NO: 1843038 - RNA, 13 nt, Human
gucccccugacaa

SEQ ID NO: 1843039 - RNA, 18 nt, Human
gucccccugacaacacuc

SEQ ID NO: 1843040 - RNA, 23 nt, Human
guccccuguuuguuucugaaagg

SEQ ID NO: 1843041 - RNA, 20 nt, Human
aacauacucccaucugugaa

SEQ ID NO: 1843042 - RNA, 16 nt, Human
aacauacucccaucug

SEQ ID NO: 1843043 - RNA, 18 nt, Human
aacauacucccaucugug

SEQ ID NO: 1843044 - RNA, 22 nt, Human
aacauguuuuucuucucccuca

SEQ ID NO: 1843045 - RNA, 14 nt, Human
aacaucaacaucuu

SEQ ID NO: 1843046 - RNA, 13 nt, Human
guccuacccaccc

SEQ ID NO: 1843047 - RNA, 20 nt, Human
aacagacuggaagcacagcu

SEQ ID NO: 1843048 - RNA, 19 nt, Human
aacagguuuuccugaagaa

SEQ ID NO: 1843049 - RNA, 18 nt, Human
guggggggggugcugggc

SEQ ID NO: 1843050 - RNA, 16 nt, Human
gugguguuuccuggca

SEQ ID NO: 1843051 - RNA, 15 nt, Human
gugguguuuccuggc

SEQ ID NO: 1843052 - RNA, 12 nt, Human
gugggagcugag

SEQ ID NO: 1843053 - RNA, 18 nt, Human
gugggauccuccaggugc

SEQ ID NO: 1843054 - RNA, 15 nt, Human
gugggauccuccagg

SEQ ID NO: 1843055 - RNA, 14 nt, Human
guggccucccaacu

SEQ ID NO: 1843056 - RNA, 13 nt, Human
guggccucccaac

SEQ ID NO: 1843057 - RNA, 17 nt, Human
guggcccgacagccugg

SEQ ID NO: 1843058 - RNA, 15 nt, Human
guggccucccaacuc

SEQ ID NO: 1843059 - RNA, 21 nt, Human
guggcuucccgcucagcccuc

SEQ ID NO: 1843060 - RNA, 16 nt, Human
guggcccgacagccug

SEQ ID NO: 1843061 - RNA, 19 nt, Human
aagagauugugguuucauu

SEQ ID NO: 1843062 - RNA, 16 nt, Human
aagagauugugguuuc

SEQ ID NO: 1843063 - RNA, 16 nt, Human
aagacuguacaaagua

SEQ ID NO: 1843064 - RNA, 14 nt, Human
aagagcccaggccu

SEQ ID NO: 1843065 - RNA, 12 nt, Human
aagagcccaggc

SEQ ID NO: 1843066 - RNA, 16 nt, Human
aagagcccaggccucc

SEQ ID NO: 1843067 - RNA, 17 nt, Human
aagacucauucuucugu

SEQ ID NO: 1843068 - RNA, 23 nt, Human
aagacgcugugcugcccugccca

SEQ ID NO: 1843069 - RNA, 22 nt, Human
aagacgcugugcugcccugccc

SEQ ID NO: 1843070 - RNA, 21 nt, Human
aagacgcugugcugcccugcc

SEQ ID NO: 1843071 - RNA, 23 nt, Human
aagaccccuuaccacugcucuga

SEQ ID NO: 1843072 - RNA, 12 nt, Human
aagaccagucca

SEQ ID NO: 1843073 - RNA, 15 nt, Human
gugugguguuuccug

SEQ ID NO: 1843074 - RNA, 13 nt, Human
gugugagucacca

SEQ ID NO: 1843075 - RNA, 18 nt, Human
gugugagucaccaagccc

SEQ ID NO: 1843076 - RNA, 21 nt, Human
gugucuugcaauggcagccuu

SEQ ID NO: 1843077 - RNA, 19 nt, Human
gugucuuuaaaugcugcuu

SEQ ID NO: 1843078 - RNA, 18 nt, Human
gugucuuuaaaugcugcu

SEQ ID NO: 1843079 - RNA, 19 nt, Human
gugucuugcaauggcagcc

SEQ ID NO: 1843080 - RNA, 20 nt, Human
gugucccaaaaagaaaggag

SEQ ID NO: 1843081 - RNA, 14 nt, Human
guguuuaagacauu

SEQ ID NO: 1843082 - RNA, 13 nt, Human
guguuuaagacau

SEQ ID NO: 1843083 - RNA, 19 nt, Human
gugugguguuuccuggcac

SEQ ID NO: 1843084 - RNA, 19 nt, Human
guguguguaugcgugugug

SEQ ID NO: 1843085 - RNA, 17 nt, Human
aagauauuuugcuuugu

SEQ ID NO: 1843086 - RNA, 20 nt, Human
aagauauuuugcuuugugau

SEQ ID NO: 1843087 - RNA, 20 nt, Human
aagaguaggaagacuuugga

SEQ ID NO: 1843088 - RNA, 22 nt, Human
aagauauuuugcuuugugauuu

SEQ ID NO: 1843089 - RNA, 18 nt, Human
gugguuauggagagggug

SEQ ID NO: 1843090 - RNA, 19 nt, Human
gugguguuuccuggcacug

SEQ ID NO: 1843091 - RNA, 15 nt, Human
aagauauuuugcuuu

SEQ ID NO: 1843092 - RNA, 19 nt, Human
aagaguaggaagacuuugg

SEQ ID NO: 1843093 - RNA, 18 nt, Human
aagaguaggaagacuuug

SEQ ID NO: 1843094 - RNA, 16 nt, Human
aagaguaggaagacuu

SEQ ID NO: 1843095 - RNA, 19 nt, Human
aagauguagaggagaaacu

SEQ ID NO: 1843096 - RNA, 13 nt, Human
aagcaaaauguga

SEQ ID NO: 1843097 - RNA, 22 nt, Human
aagauguagaggagaaacugga

SEQ ID NO: 1843098 - RNA, 16 nt, Human
aagcaagauuucagau

SEQ ID NO: 1843099 - RNA, 14 nt, Human
aagcaaaugugaau

SEQ ID NO: 1843100 - RNA, 13 nt, Human
aagcaaaugugaa

SEQ ID NO: 1843101 - RNA, 12 nt, Human
aagcaaaugucu

SEQ ID NO: 1843102 - RNA, 14 nt, Human
gugccaagcagagg

SEQ ID NO: 1843103 - RNA, 15 nt, Human
gugcauuuggugguu

SEQ ID NO: 1843104 - RNA, 21 nt, Human
gugcauuugaggucuguucuu

SEQ ID NO: 1843105 - RNA, 22 nt, Human
gugcauuugaggucuguucuuu

SEQ ID NO: 1843106 - RNA, 20 nt, Human
gugcauuugaggucuguucu

SEQ ID NO: 1843107 - RNA, 12 nt, Human
gugcacacacca

SEQ ID NO: 1843108 - RNA, 14 nt, Human
gugcacacaccaga

SEQ ID NO: 1843109 - RNA, 18 nt, Human
gugcacguacacacacau

SEQ ID NO: 1843110 - RNA, 17 nt, Human
gugcacacaccagagcc

SEQ ID NO: 1843111 - RNA, 15 nt, Human
gugccucugggacug

SEQ ID NO: 1843112 - RNA, 16 nt, Human
gugccuggccacgccc

SEQ ID NO: 1843113 - RNA, 23 nt, Human
aacuugguucccauuugcuccuu

SEQ ID NO: 1843114 - RNA, 17 nt, Human
aacuuggcgcugccccu

SEQ ID NO: 1843115 - RNA, 15 nt, Human
aacuuguaaaugugg

SEQ ID NO: 1843116 - RNA, 14 nt, Human
aacuuggaaauagu

SEQ ID NO: 1843117 - RNA, 14 nt, Human
aacuuggcgcugcc

SEQ ID NO: 1843118 - RNA, 13 nt, Human
aacuuguuuucug

SEQ ID NO: 1843119 - RNA, 22 nt, Human
aagaaaaaggaugcacagaguu

SEQ ID NO: 1843120 - RNA, 19 nt, Human
aagaaaaaggaugcacaga

SEQ ID NO: 1843121 - RNA, 20 nt, Human
aagaaaaaggaugcacagag

SEQ ID NO: 1843122 - RNA, 15 nt, Human
aagaaaaguuuugua

SEQ ID NO: 1843123 - RNA, 16 nt, Human
aagaaaaguuuuguaa

SEQ ID NO: 1843124 - RNA, 21 nt, Human
aagaaaaguuuuguaaauuuc

SEQ ID NO: 1843125 - RNA, 22 nt, Human
aagaaaaguuuuguaaauuucu

SEQ ID NO: 1843126 - RNA, 17 nt, Human
aagaagcccaggaaagg

SEQ ID NO: 1843127 - RNA, 16 nt, Human
aagaagcccaggaaag

SEQ ID NO: 1843128 - RNA, 14 nt, Human
aagaagcucucucc

SEQ ID NO: 1843129 - RNA, 15 nt, Human
aagaagcucucuccu

SEQ ID NO: 1843130 - RNA, 16 nt, Human
aagaaaauaccaagga

SEQ ID NO: 1843131 - RNA, 14 nt, Human
guggacacagcucu

SEQ ID NO: 1843132 - RNA, 15 nt, Human
guggacacagcucuu

SEQ ID NO: 1843133 - RNA, 17 nt, Human
guggacacagcucuucu

SEQ ID NO: 1843134 - RNA, 24 nt, Human
guggacacagcucuucuccaggcu

SEQ ID NO: 1843135 - RNA, 20 nt, Human
gugcugcccugcccaccugg

SEQ ID NO: 1843136 - RNA, 19 nt, Human
gugcugcccugcccaccug

SEQ ID NO: 1843137 - RNA, 21 nt, Human
gugcugcccugcccaccuggc

SEQ ID NO: 1843138 - RNA, 18 nt, Human
gugcugcccugcccaccu

SEQ ID NO: 1843139 - RNA, 23 nt, Human
aagaagguuucagaaagaagugg

SEQ ID NO: 1843140 - RNA, 16 nt, Human
gugcugggccccugcc

SEQ ID NO: 1843141 - RNA, 19 nt, Human
gugcugggccccugccucu

SEQ ID NO: 1843142 - RNA, 21 nt, Human
guggauuuaacagaaauguac

SEQ ID NO: 1843143 - RNA, 23 nt, Human
guggauuuaacagaaauguacag

SEQ ID NO: 1843144 - RNA, 14 nt, Human
guggcaccagcagc

SEQ ID NO: 1843145 - RNA, 13 nt, Human
guggcaccagcag

SEQ ID NO: 1843146 - RNA, 18 nt, Human
guggcaccagcagccugg

SEQ ID NO: 1843147 - RNA, 22 nt, Human
guggcagcucaccucucccuug

SEQ ID NO: 1843148 - RNA, 14 nt, Human
guggcagcugcggu

SEQ ID NO: 1843149 - RNA, 17 nt, Human
guggcagcugcggucca

SEQ ID NO: 1843150 - RNA, 13 nt, Human
aagacccaaaagg

SEQ ID NO: 1843151 - RNA, 13 nt, Human
uaaagucaggggu

SEQ ID NO: 1843152 - RNA, 14 nt, Human
uaaaguguauuuuu

SEQ ID NO: 1843153 - RNA, 15 nt, Human
uaaaguguauuuuuu

SEQ ID NO: 1843154 - RNA, 19 nt, Human
uaaaguguauuuuuuuacu

SEQ ID NO: 1843155 - RNA, 20 nt, Human
uaaaguguauuuuuuuacua

SEQ ID NO: 1843156 - RNA, 16 nt, Human
aauaaaaucuugaaaa

SEQ ID NO: 1843157 - RNA, 14 nt, Human
aauaaaguaauuau

SEQ ID NO: 1843158 - RNA, 16 nt, Human
aauaaaguacaagagc

SEQ ID NO: 1843159 - RNA, 12 nt, Human
aauaaaaauaau

SEQ ID NO: 1843160 - RNA, 15 nt, Human
aauaacuaaaaggua

SEQ ID NO: 1843161 - RNA, 12 nt, Human
aauaaauuauuu

SEQ ID NO: 1843162 - RNA, 22 nt, Human
aauaacauguaauuaaguacua

SEQ ID NO: 1843163 - RNA, 19 nt, Human
aauaacauguaauuaagua

SEQ ID NO: 1843164 - RNA, 12 nt, Human
aauaacauguaa

SEQ ID NO: 1843165 - RNA, 15 nt, Human
aauaacaauaaaaga

SEQ ID NO: 1843166 - RNA, 22 nt, Human
uaaauuaacuuuuauaaacuuu

SEQ ID NO: 1843167 - RNA, 20 nt, Human
uaaauguuuuuuuuuaaaga

SEQ ID NO: 1843168 - RNA, 17 nt, Human
uaaaugauuucauucaa

SEQ ID NO: 1843169 - RNA, 20 nt, Human
uaaaucuccaaaauaaaacu

SEQ ID NO: 1843170 - RNA, 21 nt, Human
uaaaucuccaaaauaaaacuu

SEQ ID NO: 1843171 - RNA, 22 nt, Human
uaaaucuccaaaauaaaacuuu

SEQ ID NO: 1843172 - RNA, 19 nt, Human
uaaauuuuuuuuguuucau

SEQ ID NO: 1843173 - RNA, 22 nt, Human
uaacaacuaugauuuggaaaau

SEQ ID NO: 1843174 - RNA, 21 nt, Human
uaacaacuaugauuuggaaaa

SEQ ID NO: 1843175 - RNA, 16 nt, Human
uaacaacuaugauuug

SEQ ID NO: 1843176 - RNA, 13 nt, Human
uaacaagccaccc

SEQ ID NO: 1843177 - RNA, 20 nt, Human
uaaauaguaaaaauaaaauu

SEQ ID NO: 1843178 - RNA, 19 nt, Human
uaaauaguaaaaauaaaau

SEQ ID NO: 1843179 - RNA, 19 nt, Human
uaaaucuccaaaauaaaac

SEQ ID NO: 1843180 - RNA, 15 nt, Human
aauacaccacuacau

SEQ ID NO: 1843181 - RNA, 16 nt, Human
aauacaccacuacauu

SEQ ID NO: 1843182 - RNA, 18 nt, Human
aauacaccacuacauucu

SEQ ID NO: 1843183 - RNA, 20 nt, Human
aauacaccacuacauucugu

SEQ ID NO: 1843184 - RNA, 21 nt, Human
aauacaccacuacauucuguu

SEQ ID NO: 1843185 - RNA, 13 nt, Human
uaaauaacuuuuu

SEQ ID NO: 1843186 - RNA, 12 nt, Human
uaaacugccccc

SEQ ID NO: 1843187 - RNA, 19 nt, Human
uaaacccaguaguggugac

SEQ ID NO: 1843188 - RNA, 18 nt, Human
uaaaccgccaaggcuggg

SEQ ID NO: 1843189 - RNA, 16 nt, Human
uaaaccgccaaggcug

SEQ ID NO: 1843190 - RNA, 21 nt, Human
uaaaggcuaccuuuguauucu

SEQ ID NO: 1843191 - RNA, 19 nt, Human
uaaaggcuaccuuuguauu

SEQ ID NO: 1843192 - RNA, 13 nt, Human
uaaagauggaaaa

SEQ ID NO: 1843193 - RNA, 18 nt, Human
uaaagaguuaguuugagu

SEQ ID NO: 1843194 - RNA, 14 nt, Human
uaaagaguguggca

SEQ ID NO: 1843195 - RNA, 15 nt, Human
uaaagacaccuacug

SEQ ID NO: 1843196 - RNA, 9 nt, Human
uaaagacag

SEQ ID NO: 1843197 - RNA, 10 nt, Human
uaaagacaga

SEQ ID NO: 1843198 - RNA, 16 nt, Human
uaaagacuuuuaugau

SEQ ID NO: 1843199 - RNA, 14 nt, Human
uaaagaagguuuca

SEQ ID NO: 1843200 - RNA, 14 nt, Human
aaguuuaauugacu

SEQ ID NO: 1843201 - RNA, 17 nt, Human
aaguucugcagauaaac

SEQ ID NO: 1843202 - RNA, 17 nt, Human
aaguucaugcuuuguuc

SEQ ID NO: 1843203 - RNA, 14 nt, Human
aaguuaaauaaauc

SEQ ID NO: 1843204 - RNA, 12 nt, Human
aaguuaaauaaa

SEQ ID NO: 1843205 - RNA, 17 nt, Human
aaguuacacauuuuuca

SEQ ID NO: 1843206 - RNA, 17 nt, Human
guuuuuuuuuaaagacu

SEQ ID NO: 1843207 - RNA, 19 nt, Human
uaaaauuaaagcugaaaac

SEQ ID NO: 1843208 - RNA, 18 nt, Human
uaaaauuaaagcugaaaa

SEQ ID NO: 1843209 - RNA, 16 nt, Human
uaaaauuaaagcugaa

SEQ ID NO: 1843210 - RNA, 17 nt, Human
uaaaauuuuuaaucuuu

SEQ ID NO: 1843211 - RNA, 19 nt, Human
uaaaccaaggcuagaacca

SEQ ID NO: 1843212 - RNA, 19 nt, Human
uaaaauuuuuaaucuuuaa

SEQ ID NO: 1843213 - RNA, 14 nt, Human
aaggggcaguggug

SEQ ID NO: 1843214 - RNA, 17 nt, Human
aaggggcaguggugguu

SEQ ID NO: 1843215 - RNA, 16 nt, Human
aaggguaucuggugac

SEQ ID NO: 1843216 - RNA, 19 nt, Human
aaggguaucaggugcugcc

SEQ ID NO: 1843217 - RNA, 19 nt, Human
aaggcugagaggagagaga

SEQ ID NO: 1843218 - RNA, 15 nt, Human
aagggcccagagagg

SEQ ID NO: 1843219 - RNA, 13 nt, Human
aagggcccagaga

SEQ ID NO: 1843220 - RNA, 18 nt, Human
guuuuacugcagcuuugu

SEQ ID NO: 1843221 - RNA, 16 nt, Human
guuuuacugcagcuuu

SEQ ID NO: 1843222 - RNA, 14 nt, Human
guuuuaagaggcag

SEQ ID NO: 1843223 - RNA, 18 nt, Human
guuuuaaggaugcuugua

SEQ ID NO: 1843224 - RNA, 16 nt, Human
guuuuaagaggcaggg

SEQ ID NO: 1843225 - RNA, 22 nt, Human
guuucugccgcagcccugcaga

SEQ ID NO: 1843226 - RNA, 22 nt, Human
guuucuaugacacaugcaaggu

SEQ ID NO: 1843227 - RNA, 14 nt, Human
guuucucagcuccc

SEQ ID NO: 1843228 - RNA, 13 nt, Human
guuugcuaaguga

SEQ ID NO: 1843229 - RNA, 19 nt, Human
guuugcaucugaaaauuga

SEQ ID NO: 1843230 - RNA, 17 nt, Human
guuugccucugccucug

SEQ ID NO: 1843231 - RNA, 15 nt, Human
aaguacuauguauca

SEQ ID NO: 1843232 - RNA, 16 nt, Human
aaguacuauguaucaa

SEQ ID NO: 1843233 - RNA, 15 nt, Human
aaguacuggagaaaa

SEQ ID NO: 1843234 - RNA, 21 nt, Human
aaguacuucuccacccugcuc

SEQ ID NO: 1843235 - RNA, 22 nt, Human
aaguacuucuccacccugcucu

SEQ ID NO: 1843236 - RNA, 23 nt, Human
aaguacuucuccacccugcucuc

SEQ ID NO: 1843237 - RNA, 12 nt, Human
aagucacugcac

SEQ ID NO: 1843238 - RNA, 14 nt, Human
aagucacugcacag

SEQ ID NO: 1843239 - RNA, 13 nt, Human
aagucacacagug

SEQ ID NO: 1843240 - RNA, 21 nt, Human
aagucaagugaaaaaggagga

SEQ ID NO: 1843241 - RNA, 19 nt, Human
aagucaaggguaggguggg

SEQ ID NO: 1843242 - RNA, 24 nt, Human
aagucacacaguauuacuucugcu

SEQ ID NO: 1843243 - RNA, 19 nt, Human
aaguauucuuauuuaauga

SEQ ID NO: 1843244 - RNA, 18 nt, Human
aaguauucuuauuuaaug

SEQ ID NO: 1843245 - RNA, 16 nt, Human
guuuuugucuuaaaaa

SEQ ID NO: 1843246 - RNA, 15 nt, Human
guuuuuuuuuaaaga

SEQ ID NO: 1843247 - RNA, 18 nt, Human
guuuuucuaggccugggg

SEQ ID NO: 1843248 - RNA, 17 nt, Human
aagucuuagauguauau

SEQ ID NO: 1843249 - RNA, 19 nt, Human
aagucuuagauguauauau

SEQ ID NO: 1843250 - RNA, 18 nt, Human
aagucuuagauguauaua

SEQ ID NO: 1843251 - RNA, 22 nt, Human
aagucuuauauauuguagauaa

SEQ ID NO: 1843252 - RNA, 19 nt, Human
aaggaugcccaaagaugca

SEQ ID NO: 1843253 - RNA, 14 nt, Human
aaggaugcccaaag

SEQ ID NO: 1843254 - RNA, 24 nt, Human
aaggaugcacagaguuguuacauu

SEQ ID NO: 1843255 - RNA, 22 nt, Human
aaggaugcacagaguuguuaca

SEQ ID NO: 1843256 - RNA, 16 nt, Human
aaggccccgcccaggc

SEQ ID NO: 1843257 - RNA, 14 nt, Human
aaggccccgcccag

SEQ ID NO: 1843258 - RNA, 19 nt, Human
aaggccccgcccaggcuua

SEQ ID NO: 1843259 - RNA, 13 nt, Human
aaggcuaccuuug

SEQ ID NO: 1843260 - RNA, 15 nt, Human
aaggcuaccuuugua

SEQ ID NO: 1843261 - RNA, 14 nt, Human
guugcccaggcugg

SEQ ID NO: 1843262 - RNA, 12 nt, Human
guugcugccuca

SEQ ID NO: 1843263 - RNA, 15 nt, Human
guugcccaggcuggc

SEQ ID NO: 1843264 - RNA, 16 nt, Human
guugcccaggcuggcg

SEQ ID NO: 1843265 - RNA, 17 nt, Human
guugcccaggcuggcgu

SEQ ID NO: 1843266 - RNA, 17 nt, Human
guugggcuggugucacc

SEQ ID NO: 1843267 - RNA, 15 nt, Human
aaggaaacccagcuc

SEQ ID NO: 1843268 - RNA, 16 nt, Human
aaggaaacccagcucu

SEQ ID NO: 1843269 - RNA, 18 nt, Human
aaggagauuuacaacugg

SEQ ID NO: 1843270 - RNA, 22 nt, Human
aaggagcaagucagaauagaaa

SEQ ID NO: 1843271 - RNA, 22 nt, Human
aaggauccugagccagauuuca

SEQ ID NO: 1843272 - RNA, 20 nt, Human
aaggauccugagccagauuu

SEQ ID NO: 1843273 - RNA, 13 nt, Human
aaggauccugagc

SEQ ID NO: 1843274 - RNA, 12 nt, Human
aaggauccugag

SEQ ID NO: 1843275 - RNA, 11 nt, Human
aaggauccuga

SEQ ID NO: 1843276 - RNA, 11 nt, Human
aaggauaaagu

SEQ ID NO: 1843277 - RNA, 20 nt, Human
aaggaggaagagaaaaaaua

SEQ ID NO: 1843278 - RNA, 21 nt, Human
aaggauaaaguugguaaaccu

SEQ ID NO: 1843279 - RNA, 23 nt, Human
aaggauaaaguugguaaaccuuu

SEQ ID NO: 1843280 - RNA, 13 nt, Human
aaggauaaugaau

SEQ ID NO: 1843281 - RNA, 18 nt, Human
aagcuguuacugucuuca

SEQ ID NO: 1843282 - RNA, 13 nt, Human
aagcucugcuccu

SEQ ID NO: 1843283 - RNA, 16 nt, Human
aagcuuuuaugugaaa

SEQ ID NO: 1843284 - RNA, 17 nt, Human
guuccccuguucacucu

SEQ ID NO: 1843285 - RNA, 15 nt, Human
guuccccuguucacu

SEQ ID NO: 1843286 - RNA, 19 nt, Human
aaggaaaaaauaacaauga

SEQ ID NO: 1843287 - RNA, 16 nt, Human
aaggaaaaaauaacaa

SEQ ID NO: 1843288 - RNA, 22 nt, Human
aagcucccaggcauuccccagg

SEQ ID NO: 1843289 - RNA, 12 nt, Human
aagcucccaggc

SEQ ID NO: 1843290 - RNA, 23 nt, Human
aagcucccaggcauuccccagga

SEQ ID NO: 1843291 - RNA, 13 nt, Human
guguuuauuguca

SEQ ID NO: 1843292 - RNA, 11 nt, Human
aagcucccagg

SEQ ID NO: 1843293 - RNA, 22 nt, Human
guguuuaagacauuuuuggaag

SEQ ID NO: 1843294 - RNA, 22 nt, Human
guugauagcacagacccugccc

SEQ ID NO: 1843295 - RNA, 23 nt, Human
guugauagcacagacccugcccu

SEQ ID NO: 1843296 - RNA, 12 nt, Human
guucucugcccu

SEQ ID NO: 1843297 - RNA, 13 nt, Human
guucucugcccuc

SEQ ID NO: 1843298 - RNA, 11 nt, Human
guucucugccc

SEQ ID NO: 1843299 - RNA, 16 nt, Human
guucucugaggacacu

SEQ ID NO: 1843300 - RNA, 18 nt, Human
guuccccuguucacucua

SEQ ID NO: 1843301 - RNA, 16 nt, Human
uacccucauguucuua

SEQ ID NO: 1843302 - RNA, 15 nt, Human
uacccucauguucuu

SEQ ID NO: 1843303 - RNA, 20 nt, Human
uacccgggaagggggcuggg

SEQ ID NO: 1843304 - RNA, 22 nt, Human
uacccuggcacuauaauguaag

SEQ ID NO: 1843305 - RNA, 20 nt, Human
uacccuggcacuauaaugua

SEQ ID NO: 1843306 - RNA, 17 nt, Human
uaccacuuuuguucuug

SEQ ID NO: 1843307 - RNA, 17 nt, Human
uaccauccccuguagag

SEQ ID NO: 1843308 - RNA, 15 nt, Human
aaugucacaggcagg

SEQ ID NO: 1843309 - RNA, 18 nt, Human
aauuaacuuuuauaaacu

SEQ ID NO: 1843310 - RNA, 20 nt, Human
aauuaacuuuuauaaacuuu

SEQ ID NO: 1843311 - RNA, 22 nt, Human
aauuaacuuuuauaaacuuuac

SEQ ID NO: 1843312 - RNA, 20 nt, Human
aauuaagaaaggauaaaguu

SEQ ID NO: 1843313 - RNA, 19 nt, Human
aauuaacaugaauauuuag

SEQ ID NO: 1843314 - RNA, 20 nt, Human
uacauuagcaguuugcuuug

SEQ ID NO: 1843315 - RNA, 19 nt, Human
uacauuagcaguuugcuuu

SEQ ID NO: 1843316 - RNA, 13 nt, Human
aauuaaguacuau

SEQ ID NO: 1843317 - RNA, 17 nt, Human
uacauguacugauuacu

SEQ ID NO: 1843318 - RNA, 22 nt, Human
aaugguuuucuuguguguuuau

SEQ ID NO: 1843319 - RNA, 18 nt, Human
aaugguuuucuugugugu

SEQ ID NO: 1843320 - RNA, 17 nt, Human
aaugguuuucuugugug

SEQ ID NO: 1843321 - RNA, 15 nt, Human
aauguaagcucuacu

SEQ ID NO: 1843322 - RNA, 13 nt, Human
aauguaagcucua

SEQ ID NO: 1843323 - RNA, 13 nt, Human
aauguaagacaaa

SEQ ID NO: 1843324 - RNA, 16 nt, Human
aaugguuuaaaugguc

SEQ ID NO: 1843325 - RNA, 22 nt, Human
uacagcaaggagauuuacaacu

SEQ ID NO: 1843326 - RNA, 21 nt, Human
aauguacagcaaggagauuua

SEQ ID NO: 1843327 - RNA, 23 nt, Human
aauguacagcaaggagauuuaca

SEQ ID NO: 1843328 - RNA, 22 nt, Human
aaugugaaacuggauuaaacuu

SEQ ID NO: 1843329 - RNA, 14 nt, Human
aaugucacaggcag

SEQ ID NO: 1843330 - RNA, 14 nt, Human
aauguauuuuuccu

SEQ ID NO: 1843331 - RNA, 13 nt, Human
aaugucacaggca

SEQ ID NO: 1843332 - RNA, 18 nt, Human
uacaguccucccaucuca

SEQ ID NO: 1843333 - RNA, 17 nt, Human
uacaguccucccaucuc

SEQ ID NO: 1843334 - RNA, 15 nt, Human
uacaguccucccauc

SEQ ID NO: 1843335 - RNA, 12 nt, Human
uacaguccuccc

SEQ ID NO: 1843336 - RNA, 18 nt, Human
uacaguaucucagggccu

SEQ ID NO: 1843337 - RNA, 15 nt, Human
uacauaaugcgugca

SEQ ID NO: 1843338 - RNA, 13 nt, Human
uacagucuuguau

SEQ ID NO: 1843339 - RNA, 12 nt, Human
uacagucuugua

SEQ ID NO: 1843340 - RNA, 16 nt, Human
aaugcaaaccaucauu

SEQ ID NO: 1843341 - RNA, 15 nt, Human
aaugaccuuucaaua

SEQ ID NO: 1843342 - RNA, 14 nt, Human
aaugaccuuucaau

SEQ ID NO: 1843343 - RNA, 13 nt, Human
aaugaccuuucaa

SEQ ID NO: 1843344 - RNA, 21 nt, Human
aaugaaugucagugugacuga

SEQ ID NO: 1843345 - RNA, 20 nt, Human
aaugaaugucagugugacug

SEQ ID NO: 1843346 - RNA, 23 nt, Human
aaugcaaaccaucauugaaaucu

SEQ ID NO: 1843347 - RNA, 22 nt, Human
aaugcaaaccaucauugaaauc

SEQ ID NO: 1843348 - RNA, 18 nt, Human
aaugcacaaacagaggcc

SEQ ID NO: 1843349 - RNA, 16 nt, Human
aaugcacuuuguucug

SEQ ID NO: 1843350 - RNA, 13 nt, Human
aaugcacuuuguu

SEQ ID NO: 1843351 - RNA, 20 nt, Human
aaugcacaaacagaggccgc

SEQ ID NO: 1843352 - RNA, 19 nt, Human
aaugcacaaacagaggccg

SEQ ID NO: 1843353 - RNA, 20 nt, Human
aaugcacuuuguucuggcuc

SEQ ID NO: 1843354 - RNA, 19 nt, Human
aaugcacuuuguucuggcu

SEQ ID NO: 1843355 - RNA, 23 nt, Human
uaauuaguuccucauuagcauuu

SEQ ID NO: 1843356 - RNA, 20 nt, Human
uaauuauacccccugcaaag

SEQ ID NO: 1843357 - RNA, 21 nt, Human
uaauuuuuguauuuuuaguag

SEQ ID NO: 1843358 - RNA, 22 nt, Human
uaauuuuuguguuuuuaauaaa

SEQ ID NO: 1843359 - RNA, 13 nt, Human
uaauuuuuuacua

SEQ ID NO: 1843360 - RNA, 18 nt, Human
uaauuuaccugaagucuu

SEQ ID NO: 1843361 - RNA, 17 nt, Human
uaauuuaccugaagucu

SEQ ID NO: 1843362 - RNA, 13 nt, Human
uaauucauguugc

SEQ ID NO: 1843363 - RNA, 15 nt, Human
uacaaaaagcauaaa

SEQ ID NO: 1843364 - RNA, 18 nt, Human
uacaagccagcuggagaa

SEQ ID NO: 1843365 - RNA, 16 nt, Human
uacaaaaacauggccu

SEQ ID NO: 1843366 - RNA, 16 nt, Human
uacaagcgugagccac

SEQ ID NO: 1843367 - RNA, 18 nt, Human
uacaagcgugagccacug

SEQ ID NO: 1843368 - RNA, 19 nt, Human
uacaagcgugagccacugc

SEQ ID NO: 1843369 - RNA, 20 nt, Human
uacaagcgugagccacugca

SEQ ID NO: 1843370 - RNA, 20 nt, Human
uacaauaaaaucuugaaaau

SEQ ID NO: 1843371 - RNA, 21 nt, Human
uacaagcgugagccacugcac

SEQ ID NO: 1843372 - RNA, 17 nt, Human
uaauguaagcucuacug

SEQ ID NO: 1843373 - RNA, 16 nt, Human
uaauguaagcucuacu

SEQ ID NO: 1843374 - RNA, 15 nt, Human
uaauguaagacaaau

SEQ ID NO: 1843375 - RNA, 12 nt, Human
uaaugugaaacu

SEQ ID NO: 1843376 - RNA, 20 nt, Human
uaaugugaaacuggauuaaa

SEQ ID NO: 1843377 - RNA, 22 nt, Human
uaaugugaaacuggauuaaacu

SEQ ID NO: 1843378 - RNA, 23 nt, Human
uaaugugaaacuggauuaaacuu

SEQ ID NO: 1843379 - RNA, 16 nt, Human
uaaugucacaggcagg

SEQ ID NO: 1843380 - RNA, 17 nt, Human
uaaugucacaggcaggu

SEQ ID NO: 1843381 - RNA, 15 nt, Human
uaaugucacaggcag

SEQ ID NO: 1843382 - RNA, 13 nt, Human
aaucuugaaaaug

SEQ ID NO: 1843383 - RNA, 23 nt, Human
aaucuucugaacuuggcgcugcc

SEQ ID NO: 1843384 - RNA, 15 nt, Human
aaugaaugaaugaau

SEQ ID NO: 1843385 - RNA, 14 nt, Human
aaugaaugaaacau

SEQ ID NO: 1843386 - RNA, 14 nt, Human
aaugaaugucagug

SEQ ID NO: 1843387 - RNA, 15 nt, Human
aaugaaugucagugu

SEQ ID NO: 1843388 - RNA, 21 nt, Human
uaauauugauaugcuuauaca

SEQ ID NO: 1843389 - RNA, 22 nt, Human
uaauccaagcaaaugugaauca

SEQ ID NO: 1843390 - RNA, 17 nt, Human
uaaucuuuaauuuuaca

SEQ ID NO: 1843391 - RNA, 13 nt, Human
uaauaccucccuu

SEQ ID NO: 1843392 - RNA, 18 nt, Human
uaauacuugcuuuggaaa

SEQ ID NO: 1843393 - RNA, 22 nt, Human
uaauacaccacuacauucuguu

SEQ ID NO: 1843394 - RNA, 21 nt, Human
uaauacaccacuacauucugu

SEQ ID NO: 1843395 - RNA, 23 nt, Human
uaauacaccacuacauucuguua

SEQ ID NO: 1843396 - RNA, 20 nt, Human
aauacaguaucucagggccu

SEQ ID NO: 1843397 - RNA, 17 nt, Human
uagaagucuuagaugua

SEQ ID NO: 1843398 - RNA, 16 nt, Human
uagaagucuuagaugu

SEQ ID NO: 1843399 - RNA, 16 nt, Human
uagaagucacacagua

SEQ ID NO: 1843400 - RNA, 19 nt, Human
uagaagucuuagauguaua

SEQ ID NO: 1843401 - RNA, 18 nt, Human
uagaagucuuagauguau

SEQ ID NO: 1843402 - RNA, 20 nt, Human
uagaagucuuagauguauau

SEQ ID NO: 1843403 - RNA, 16 nt, Human
uagacaauuuauuaug

SEQ ID NO: 1843404 - RNA, 15 nt, Human
uagaacucccuuuca

SEQ ID NO: 1843405 - RNA, 13 nt, Human
uagaacugaauuu

SEQ ID NO: 1843406 - RNA, 17 nt, Human
uagaacugaauuuuguc

SEQ ID NO: 1843407 - RNA, 22 nt, Human
uagaacugaauuuugucuuuau

SEQ ID NO: 1843408 - RNA, 18 nt, Human
uagaagauggcacuuaua

SEQ ID NO: 1843409 - RNA, 15 nt, Human
uagaagucacacagu

SEQ ID NO: 1843410 - RNA, 18 nt, Human
aauuuuuauuaaauuaug

SEQ ID NO: 1843411 - RNA, 17 nt, Human
aauuuuuauuaaauuau

SEQ ID NO: 1843412 - RNA, 14 nt, Human
uagacagucccugc

SEQ ID NO: 1843413 - RNA, 12 nt, Human
uagacagucccu

SEQ ID NO: 1843414 - RNA, 14 nt, Human
aauuuuuguauuuu

SEQ ID NO: 1843415 - RNA, 13 nt, Human
acaaaaacauggc

SEQ ID NO: 1843416 - RNA, 17 nt, Human
aauuuuuuugagacaga

SEQ ID NO: 1843417 - RNA, 16 nt, Human
acaaaaagcauaaaaa

SEQ ID NO: 1843418 - RNA, 15 nt, Human
uagagcuucuggcac

SEQ ID NO: 1843419 - RNA, 19 nt, Human
uagcacagacccugcccug

SEQ ID NO: 1843420 - RNA, 18 nt, Human
uagcacagacccugcccu

SEQ ID NO: 1843421 - RNA, 17 nt, Human
uagcacagacccugccc

SEQ ID NO: 1843422 - RNA, 16 nt, Human
uagcacagacccugcc

SEQ ID NO: 1843423 - RNA, 22 nt, Human
uagauuuuagacccuauugcug

SEQ ID NO: 1843424 - RNA, 14 nt, Human
uagcaccagggaag

SEQ ID NO: 1843425 - RNA, 13 nt, Human
uagcaccagggaa

SEQ ID NO: 1843426 - RNA, 16 nt, Human
uagcaccagggaaggg

SEQ ID NO: 1843427 - RNA, 18 nt, Human
uagcaugucgucaaagcu

SEQ ID NO: 1843428 - RNA, 21 nt, Human
uagcaugucgucaaagcugaa

SEQ ID NO: 1843429 - RNA, 15 nt, Human
acaacaacaaaauga

SEQ ID NO: 1843430 - RNA, 18 nt, Human
acaaauucugucucugga

SEQ ID NO: 1843431 - RNA, 15 nt, Human
acaacaaccugguca

SEQ ID NO: 1843432 - RNA, 12 nt, Human
acaacacucaca

SEQ ID NO: 1843433 - RNA, 22 nt, Human
acaagaaaugaaagcagggacu

SEQ ID NO: 1843434 - RNA, 13 nt, Human
acaagccagcugg

SEQ ID NO: 1843435 - RNA, 15 nt, Human
acaagccagcuggag

SEQ ID NO: 1843436 - RNA, 12 nt, Human
acaagccacccc

SEQ ID NO: 1843437 - RNA, 13 nt, Human
acaagcugcaccc

SEQ ID NO: 1843438 - RNA, 20 nt, Human
acaagcgugagccacugcac

SEQ ID NO: 1843439 - RNA, 21 nt, Human
acaagcgugagccacugcacc

SEQ ID NO: 1843440 - RNA, 18 nt, Human
acaagagcccaggccucc

SEQ ID NO: 1843441 - RNA, 17 nt, Human
acaagagcccaggccuc

SEQ ID NO: 1843442 - RNA, 18 nt, Human
acaagcacuaaacaaaga

SEQ ID NO: 1843443 - RNA, 22 nt, Human
uacucuucaguuaagccuuugg

SEQ ID NO: 1843444 - RNA, 18 nt, Human
uacucuuauagacaacau

SEQ ID NO: 1843445 - RNA, 16 nt, Human
uacuauguaucaauga

SEQ ID NO: 1843446 - RNA, 16 nt, Human
uacuauaauuuaccug

SEQ ID NO: 1843447 - RNA, 13 nt, Human
uacguugugcauu

SEQ ID NO: 1843448 - RNA, 14 nt, Human
uacguugugcauuu

SEQ ID NO: 1843449 - RNA, 14 nt, Human
uacguuaccaggca

SEQ ID NO: 1843450 - RNA, 14 nt, Human
uacgucugacaggc

SEQ ID NO: 1843451 - RNA, 13 nt, Human
aauugacccacaa

SEQ ID NO: 1843452 - RNA, 16 nt, Human
aauugacccacaagaa

SEQ ID NO: 1843453 - RNA, 19 nt, Human
aauugacccacaagaaaug

SEQ ID NO: 1843454 - RNA, 15 nt, Human
uacguacacauuuua

SEQ ID NO: 1843455 - RNA, 22 nt, Human
aauucuucuccacuuucuagcc

SEQ ID NO: 1843456 - RNA, 14 nt, Human
aauucuugcaaagu

SEQ ID NO: 1843457 - RNA, 20 nt, Human
aauucuugcaaaguaucccu

SEQ ID NO: 1843458 - RNA, 21 nt, Human
aauucuugccaaauauaaaua

SEQ ID NO: 1843459 - RNA, 15 nt, Human
aauuuaccugaaguc

SEQ ID NO: 1843460 - RNA, 17 nt, Human
aauuuagaaauauaauu

SEQ ID NO: 1843461 - RNA, 13 nt, Human
aauuucuaaaucu

SEQ ID NO: 1843462 - RNA, 21 nt, Human
aauuucuaaaucuccaaaaua

SEQ ID NO: 1843463 - RNA, 20 nt, Human
aauuugaaacacuuugcaua

SEQ ID NO: 1843464 - RNA, 16 nt, Human
aauuucucuacugucu

SEQ ID NO: 1843465 - RNA, 19 nt, Human
aauuuacauacucugcuua

SEQ ID NO: 1843466 - RNA, 13 nt, Human
aauuuaaaagucu

SEQ ID NO: 1843467 - RNA, 12 nt, Human
aauugcuccuug

SEQ ID NO: 1843468 - RNA, 22 nt, Human
aauuguuuggggaugagaaagg

SEQ ID NO: 1843469 - RNA, 16 nt, Human
uauuaaaaaucucaaa

SEQ ID NO: 1843470 - RNA, 18 nt, Human
uauuaaaaaucucaaauu

SEQ ID NO: 1843471 - RNA, 20 nt, Human
uauuaaaaaucucaaauuuc

SEQ ID NO: 1843472 - RNA, 22 nt, Human
uauuaaaaaucucaaauuucua

SEQ ID NO: 1843473 - RNA, 17 nt, Human
uauguuuuaagaggcag

SEQ ID NO: 1843474 - RNA, 19 nt, Human
uauguuuuaagaggcaggg

SEQ ID NO: 1843475 - RNA, 23 nt, Human
uauuaaaaaucucaaauuucuaa

SEQ ID NO: 1843476 - RNA, 16 nt, Human
uauuaccacagacaua

SEQ ID NO: 1843477 - RNA, 12 nt, Human
uauuagagaaga

SEQ ID NO: 1843478 - RNA, 23 nt, Human
uauucauagcagcuuauucacaa

SEQ ID NO: 1843479 - RNA, 22 nt, Human
uauucaggaagcucagggccug

SEQ ID NO: 1843480 - RNA, 18 nt, Human
uauucaggaagcucaggg

SEQ ID NO: 1843481 - RNA, 15 nt, Human
uauucagcucaugga

SEQ ID NO: 1843482 - RNA, 15 nt, Human
acaguccucccaucu

SEQ ID NO: 1843483 - RNA, 14 nt, Human
acaguccucccauc

SEQ ID NO: 1843484 - RNA, 13 nt, Human
acaguccucccau

SEQ ID NO: 1843485 - RNA, 15 nt, Human
acagucccugccaau

SEQ ID NO: 1843486 - RNA, 20 nt, Human
acaguccuuaccagcagagc

SEQ ID NO: 1843487 - RNA, 18 nt, Human
acaguccuuaccagcaga

SEQ ID NO: 1843488 - RNA, 17 nt, Human
acaguccucccaucuca

SEQ ID NO: 1843489 - RNA, 13 nt, Human
acagucccugcca

SEQ ID NO: 1843490 - RNA, 15 nt, Human
acaguauuacuucug

SEQ ID NO: 1843491 - RNA, 16 nt, Human
acaguauuacuucugc

SEQ ID NO: 1843492 - RNA, 17 nt, Human
acaguauuacuucugcu

SEQ ID NO: 1843493 - RNA, 19 nt, Human
acaguauuacuucugcuac

SEQ ID NO: 1843494 - RNA, 21 nt, Human
acaguauggcagcuuuccuca

SEQ ID NO: 1843495 - RNA, 21 nt, Human
acaggcugggcuucaguggca

SEQ ID NO: 1843496 - RNA, 14 nt, Human
acaggcugggcuuc

SEQ ID NO: 1843497 - RNA, 17 nt, Human
acaggcugggcuucagu

SEQ ID NO: 1843498 - RNA, 22 nt, Human
acagguuuuccugaagaauuga

SEQ ID NO: 1843499 - RNA, 22 nt, Human
acagggcacaccgggcacucag

SEQ ID NO: 1843500 - RNA, 14 nt, Human
acagugagacucug

SEQ ID NO: 1843501 - RNA, 18 nt, Human
acagugagacucugucuc

SEQ ID NO: 1843502 - RNA, 15 nt, Human
acaguuaagagaaau

SEQ ID NO: 1843503 - RNA, 22 nt, Human
acaguccuuaccagcagagcac

SEQ ID NO: 1843504 - RNA, 21 nt, Human
acaguccuuaccagcagagca

SEQ ID NO: 1843505 - RNA, 14 nt, Human
acagucuuguauua

SEQ ID NO: 1843506 - RNA, 15 nt, Human
acagucuuguauuaa

SEQ ID NO: 1843507 - RNA, 18 nt, Human
acagucuuguauuaaguu

SEQ ID NO: 1843508 - RNA, 22 nt, Human
acagucuuguauuaaguuguua

SEQ ID NO: 1843509 - RNA, 20 nt, Human
acagugaaagaaaauaacaa

SEQ ID NO: 1843510 - RNA, 21 nt, Human
uauuuaaugaaagacuguaca

SEQ ID NO: 1843511 - RNA, 15 nt, Human
uauuuaaugaaagac

SEQ ID NO: 1843512 - RNA, 11 nt, Human
uauuguacagu

SEQ ID NO: 1843513 - RNA, 12 nt, Human
uauuguacaguu

SEQ ID NO: 1843514 - RNA, 13 nt, Human
uauuguacaguuu

SEQ ID NO: 1843515 - RNA, 14 nt, Human
uauuguacaguuuu

SEQ ID NO: 1843516 - RNA, 15 nt, Human
uauuguacaguuuuu

SEQ ID NO: 1843517 - RNA, 17 nt, Human
uauuguacaguuuuuau

SEQ ID NO: 1843518 - RNA, 17 nt, Human
uauugucaaagugguga

SEQ ID NO: 1843519 - RNA, 13 nt, Human
uauugucaaagug

SEQ ID NO: 1843520 - RNA, 14 nt, Human
uauuuauuuaaauu

SEQ ID NO: 1843521 - RNA, 14 nt, Human
uauuuauuuaguau

SEQ ID NO: 1843522 - RNA, 13 nt, Human
uauuuauuuaaau

SEQ ID NO: 1843523 - RNA, 19 nt, Human
uauuuaguguucauaaaua

SEQ ID NO: 1843524 - RNA, 14 nt, Human
uauuuaauucaugu

SEQ ID NO: 1843525 - RNA, 23 nt, Human
uauuuaauuuuuuugagacagag

SEQ ID NO: 1843526 - RNA, 18 nt, Human
uauuuacuucuuauacau

SEQ ID NO: 1843527 - RNA, 20 nt, Human
uauuuagcaccagggaaggg

SEQ ID NO: 1843528 - RNA, 17 nt, Human
acaguucucuccuucuu

SEQ ID NO: 1843529 - RNA, 20 nt, Human
uauucucuccuguaccucuu

SEQ ID NO: 1843530 - RNA, 24 nt, Human
uauucucuccuguaccucuugagc

SEQ ID NO: 1843531 - RNA, 15 nt, Human
uauucuuauuuaaug

SEQ ID NO: 1843532 - RNA, 16 nt, Human
uauucuguuggccagu

SEQ ID NO: 1843533 - RNA, 13 nt, Human
acaguuacucaga

SEQ ID NO: 1843534 - RNA, 20 nt, Human
acaguuacucagaauucucu

SEQ ID NO: 1843535 - RNA, 20 nt, Human
acaguucaauucucauuugu

SEQ ID NO: 1843536 - RNA, 22 nt, Human
acaguucggugagcuacaaaug

SEQ ID NO: 1843537 - RNA, 19 nt, Human
acaguucggugagcuacaa

SEQ ID NO: 1843538 - RNA, 16 nt, Human
acaguucucuccuucu

SEQ ID NO: 1843539 - RNA, 23 nt, Human
acaguucggugagcuacaaaugc

SEQ ID NO: 1843540 - RNA, 20 nt, Human
uauaaccaguguuguggauu

SEQ ID NO: 1843541 - RNA, 21 nt, Human
uauacacuuacacuuuaugca

SEQ ID NO: 1843542 - RNA, 13 nt, Human
uauacauaaacaa

SEQ ID NO: 1843543 - RNA, 14 nt, Human
uauacauaaacaag

SEQ ID NO: 1843544 - RNA, 14 nt, Human
uauacauuugauaa

SEQ ID NO: 1843545 - RNA, 13 nt, Human
uauauaucaaaua

SEQ ID NO: 1843546 - RNA, 23 nt, Human
acacucauugaccugaggcccuu

SEQ ID NO: 1843547 - RNA, 21 nt, Human
acacucauugaccugaggccc

SEQ ID NO: 1843548 - RNA, 19 nt, Human
acacucauugaccugaggc

SEQ ID NO: 1843549 - RNA, 13 nt, Human
uauaggaauugac

SEQ ID NO: 1843550 - RNA, 14 nt, Human
uauaggaauugacc

SEQ ID NO: 1843551 - RNA, 19 nt, Human
uauaggaauugacccacaa

SEQ ID NO: 1843552 - RNA, 20 nt, Human
uauagccuaggugacagagu

SEQ ID NO: 1843553 - RNA, 16 nt, Human
acaccgggccuggaga

SEQ ID NO: 1843554 - RNA, 19 nt, Human
acacccugugauggggccc

SEQ ID NO: 1843555 - RNA, 18 nt, Human
acacccugugauggggcc

SEQ ID NO: 1843556 - RNA, 12 nt, Human
acacccugugau

SEQ ID NO: 1843557 - RNA, 11 nt, Human
acacccuguga

SEQ ID NO: 1843558 - RNA, 21 nt, Human
acacaugcaaggucauuuuuu

SEQ ID NO: 1843559 - RNA, 19 nt, Human
acacccagcccacuucugc

SEQ ID NO: 1843560 - RNA, 20 nt, Human
acacccagcccacuucugcc

SEQ ID NO: 1843561 - RNA, 21 nt, Human
acacccagcccacuucugcca

SEQ ID NO: 1843562 - RNA, 19 nt, Human
acacaugcaaggucauuuu

SEQ ID NO: 1843563 - RNA, 20 nt, Human
acacaugcaaggucauuuuu

SEQ ID NO: 1843564 - RNA, 18 nt, Human
acacaugcaaggucauuu

SEQ ID NO: 1843565 - RNA, 17 nt, Human
uauaaaagccuguuuaa

SEQ ID NO: 1843566 - RNA, 14 nt, Human
uauaaaagccuguu

SEQ ID NO: 1843567 - RNA, 12 nt, Human
uauaaaagccug

SEQ ID NO: 1843568 - RNA, 20 nt, Human
uaguuccucauuagcauuuu

SEQ ID NO: 1843569 - RNA, 23 nt, Human
acaagcugcacccucaggcaggu

SEQ ID NO: 1843570 - RNA, 22 nt, Human
acaagcugcacccucaggcagg

SEQ ID NO: 1843571 - RNA, 21 nt, Human
acaagcugcacccucaggcag

SEQ ID NO: 1843572 - RNA, 19 nt, Human
acaagcugcacccucaggc

SEQ ID NO: 1843573 - RNA, 21 nt, Human
uagucaggugccucaagagaa

SEQ ID NO: 1843574 - RNA, 16 nt, Human
uauauugauccagaaa

SEQ ID NO: 1843575 - RNA, 14 nt, Human
acagacuggaagca

SEQ ID NO: 1843576 - RNA, 20 nt, Human
acagacccugcccugugggc

SEQ ID NO: 1843577 - RNA, 18 nt, Human
acagacccugcccugugg

SEQ ID NO: 1843578 - RNA, 16 nt, Human
acagacccugcccugu

SEQ ID NO: 1843579 - RNA, 17 nt, Human
acagacccugcccugug

SEQ ID NO: 1843580 - RNA, 15 nt, Human
acagacagcccucca

SEQ ID NO: 1843581 - RNA, 13 nt, Human
acagacagcccuc

SEQ ID NO: 1843582 - RNA, 11 nt, Human
acacuccuuca

SEQ ID NO: 1843583 - RNA, 23 nt, Human
acagacacaggcccggcuccagg

SEQ ID NO: 1843584 - RNA, 18 nt, Human
uaucacccagaagaaaau

SEQ ID NO: 1843585 - RNA, 14 nt, Human
uauauuuacaaaug

SEQ ID NO: 1843586 - RNA, 21 nt, Human
uaucaaguauuauaccuuuuu

SEQ ID NO: 1843587 - RNA, 15 nt, Human
uauauuuacaaaugg

SEQ ID NO: 1843588 - RNA, 14 nt, Human
acagacuucugaaa

SEQ ID NO: 1843589 - RNA, 13 nt, Human
acagacuucugaa

SEQ ID NO: 1843590 - RNA, 20 nt, Human
acagagcccacgcccccacu

SEQ ID NO: 1843591 - RNA, 16 nt, Human
acagagcuacacaggg

SEQ ID NO: 1843592 - RNA, 18 nt, Human
acagagcuacacagggga

SEQ ID NO: 1843593 - RNA, 21 nt, Human
acagagugagacucugucuca

SEQ ID NO: 1843594 - RNA, 10 nt, Human
uaucagaauu

SEQ ID NO: 1843595 - RNA, 15 nt, Human
uaucuagauacugua

SEQ ID NO: 1843596 - RNA, 16 nt, Human
uaucuagauacuguau

SEQ ID NO: 1843597 - RNA, 19 nt, Human
uaucuagauacuguaucau

SEQ ID NO: 1843598 - RNA, 17 nt, Human
uaucucccccagcccca

SEQ ID NO: 1843599 - RNA, 18 nt, Human
uaucucccccagccccau

SEQ ID NO: 1843600 - RNA, 18 nt, Human
acagcagccccugcacaa

SEQ ID NO: 1843601 - RNA, 20 nt, Human
acagaguuuucacucuuauu

SEQ ID NO: 1843602 - RNA, 15 nt, Human
acagaguuguuacau

SEQ ID NO: 1843603 - RNA, 18 nt, Human
acagaguuuucacucuua

SEQ ID NO: 1843604 - RNA, 15 nt, Human
uaucuugaagacuuu

SEQ ID NO: 1843605 - RNA, 15 nt, Human
uaucuugaauaaugu

SEQ ID NO: 1843606 - RNA, 13 nt, Human
uaugaggcauuug

SEQ ID NO: 1843607 - RNA, 21 nt, Human
uaugaucacggcucacugcag

SEQ ID NO: 1843608 - RNA, 23 nt, Human
uaugaucacggcucacugcagcc

SEQ ID NO: 1843609 - RNA, 14 nt, Human
uaugaucacggcuc

SEQ ID NO: 1843610 - RNA, 16 nt, Human
uauggcuuuugugcau

SEQ ID NO: 1843611 - RNA, 15 nt, Human
acagccuggcacagg

SEQ ID NO: 1843612 - RNA, 14 nt, Human
acagccuggcacag

SEQ ID NO: 1843613 - RNA, 15 nt, Human
acagcuaacauggaa

SEQ ID NO: 1843614 - RNA, 14 nt, Human
acagcuaacaugga

SEQ ID NO: 1843615 - RNA, 23 nt, Human
acagccugugucuuuaaaugcug

SEQ ID NO: 1843616 - RNA, 18 nt, Human
acagccugugucuuuaaa

SEQ ID NO: 1843617 - RNA, 14 nt, Human
acagccugugucuu

SEQ ID NO: 1843618 - RNA, 17 nt, Human
acagcuaacauggaagu

SEQ ID NO: 1843619 - RNA, 20 nt, Human
acagcuaaucagcauucuca

SEQ ID NO: 1843620 - RNA, 18 nt, Human
uaugcucugcauguuaca

SEQ ID NO: 1843621 - RNA, 14 nt, Human
uaugcucugcaugu

SEQ ID NO: 1843622 - RNA, 14 nt, Human
uauggccuguggau

SEQ ID NO: 1843623 - RNA, 22 nt, Human
uauggccugugagcuaggaauu

SEQ ID NO: 1843624 - RNA, 19 nt, Human
uaugcucugcauguuacau

SEQ ID NO: 1843625 - RNA, 20 nt, Human
uccucagaucuucugugggu

SEQ ID NO: 1843626 - RNA, 16 nt, Human
acucuuauugcccacg

SEQ ID NO: 1843627 - RNA, 19 nt, Human
acucuuauugcccacgcug

SEQ ID NO: 1843628 - RNA, 18 nt, Human
uccucauacccaccccca

SEQ ID NO: 1843629 - RNA, 14 nt, Human
uccucauacccacc

SEQ ID NO: 1843630 - RNA, 22 nt, Human
uccucauacccacccccaccca

SEQ ID NO: 1843631 - RNA, 16 nt, Human
uccuccccuccuccug

SEQ ID NO: 1843632 - RNA, 20 nt, Human
uccuccccuccuccuggacu

SEQ ID NO: 1843633 - RNA, 18 nt, Human
uccuccccuccuccugga

SEQ ID NO: 1843634 - RNA, 22 nt, Human
uccuccccuccuccuggacucc

SEQ ID NO: 1843635 - RNA, 14 nt, Human
uccucuccacugcc

SEQ ID NO: 1843636 - RNA, 13 nt, Human
uccucuccacugc

SEQ ID NO: 1843637 - RNA, 12 nt, Human
uccucuccacug

SEQ ID NO: 1843638 - RNA, 16 nt, Human
uccucuccacugccuu

SEQ ID NO: 1843639 - RNA, 15 nt, Human
uccucuccacugccu

SEQ ID NO: 1843640 - RNA, 12 nt, Human
uccucuccccag

SEQ ID NO: 1843641 - RNA, 15 nt, Human
uccucccucccucuu

SEQ ID NO: 1843642 - RNA, 17 nt, Human
uccucccucccucuuuc

SEQ ID NO: 1843643 - RNA, 19 nt, Human
uccucccucccucuuuccc

SEQ ID NO: 1843644 - RNA, 19 nt, Human
acucuccucugcugcuggc

SEQ ID NO: 1843645 - RNA, 18 nt, Human
acucuccucugcugcugg

SEQ ID NO: 1843646 - RNA, 21 nt, Human
acucuccucugcugcuggcug

SEQ ID NO: 1843647 - RNA, 18 nt, Human
acucgcgacaaugcaaac

SEQ ID NO: 1843648 - RNA, 19 nt, Human
uccuaggcauuugcugaau

SEQ ID NO: 1843649 - RNA, 23 nt, Human
acucgcgacaaugcaaaccauca

SEQ ID NO: 1843650 - RNA, 20 nt, Human
acucgcgacaaugcaaacca

SEQ ID NO: 1843651 - RNA, 17 nt, Human
acucuccucugcugcug

SEQ ID NO: 1843652 - RNA, 22 nt, Human
ucccuuacgugaguccuggcau

SEQ ID NO: 1843653 - RNA, 18 nt, Human
ucccuuacgugaguccug

SEQ ID NO: 1843654 - RNA, 21 nt, Human
ucccuucaaccauuccccaug

SEQ ID NO: 1843655 - RNA, 11 nt, Human
ucccuucaacc

SEQ ID NO: 1843656 - RNA, 22 nt, Human
ucccuuuccaaaugcccagcuu

SEQ ID NO: 1843657 - RNA, 23 nt, Human
acuccugcacacgcuccuuccuc

SEQ ID NO: 1843658 - RNA, 23 nt, Human
ucccuuugacgccaucccagccc

SEQ ID NO: 1843659 - RNA, 22 nt, Human
ucccuuugacgccaucccagcc

SEQ ID NO: 1843660 - RNA, 18 nt, Human
ucccuuuuaauccuggcu

SEQ ID NO: 1843661 - RNA, 14 nt, Human
uccuaggcauuugc

SEQ ID NO: 1843662 - RNA, 20 nt, Human
uccuagcacuuugggaggcc

SEQ ID NO: 1843663 - RNA, 20 nt, Human
acuccagcuggguuggaaaa

SEQ ID NO: 1843664 - RNA, 14 nt, Human
acuccuaccuggua

SEQ ID NO: 1843665 - RNA, 18 nt, Human
acucaucuagguaaauua

SEQ ID NO: 1843666 - RNA, 16 nt, Human
acucaucuagguaaau

SEQ ID NO: 1843667 - RNA, 23 nt, Human
ucccucauuccaccuucccaugc

SEQ ID NO: 1843668 - RNA, 21 nt, Human
ucccucagucuggcccuuccu

SEQ ID NO: 1843669 - RNA, 22 nt, Human
ucccucauccucauacccaccc

SEQ ID NO: 1843670 - RNA, 17 nt, Human
acucaagacuuccagag

SEQ ID NO: 1843671 - RNA, 20 nt, Human
acucaagacuuccagagccu

SEQ ID NO: 1843672 - RNA, 15 nt, Human
ucccgaauagcuggg

SEQ ID NO: 1843673 - RNA, 16 nt, Human
ucccgaauagcuggga

SEQ ID NO: 1843674 - RNA, 20 nt, Human
ucccgcucagcccucccugc

SEQ ID NO: 1843675 - RNA, 16 nt, Human
ucccgcucagcccucc

SEQ ID NO: 1843676 - RNA, 15 nt, Human
ucccgcucagcccuc

SEQ ID NO: 1843677 - RNA, 14 nt, Human
ucccgcucagcccu

SEQ ID NO: 1843678 - RNA, 13 nt, Human
ucccgcucagccc

SEQ ID NO: 1843679 - RNA, 20 nt, Human
ucccgaguagcugggacuac

SEQ ID NO: 1843680 - RNA, 18 nt, Human
ucccgaauagcugggacu

SEQ ID NO: 1843681 - RNA, 18 nt, Human
ucccuauuagagaagaga

SEQ ID NO: 1843682 - RNA, 19 nt, Human
acuauguugcccaggcagg

SEQ ID NO: 1843683 - RNA, 20 nt, Human
acuauguugcccaggcaggu

SEQ ID NO: 1843684 - RNA, 23 nt, Human
acuauguugcccaggcaggucuu

SEQ ID NO: 1843685 - RNA, 18 nt, Human
acuaucccggcugcccuu

SEQ ID NO: 1843686 - RNA, 17 nt, Human
acuaucccggcugcccu

SEQ ID NO: 1843687 - RNA, 16 nt, Human
acuaucccggcugccc

SEQ ID NO: 1843688 - RNA, 22 nt, Human
acuaucaugucaaacgugaaaa

SEQ ID NO: 1843689 - RNA, 22 nt, Human
acuaugaaguuuuuuuuauaca

SEQ ID NO: 1843690 - RNA, 18 nt, Human
acuauguugcccaggcag

SEQ ID NO: 1843691 - RNA, 24 nt, Human
uccccaccgcagacaggaccaggg

SEQ ID NO: 1843692 - RNA, 23 nt, Human
uccccaggaggccagccuugacc

SEQ ID NO: 1843693 - RNA, 23 nt, Human
acuauaauuuaccugaagucuuu

SEQ ID NO: 1843694 - RNA, 17 nt, Human
acuauagccuaggugac

SEQ ID NO: 1843695 - RNA, 18 nt, Human
acuauagccuaggugaca

SEQ ID NO: 1843696 - RNA, 15 nt, Human
uccccaagccuggca

SEQ ID NO: 1843697 - RNA, 19 nt, Human
ucccaucucacacaugagc

SEQ ID NO: 1843698 - RNA, 14 nt, Human
ucccaucucacaca

SEQ ID NO: 1843699 - RNA, 13 nt, Human
ucccaucucacac

SEQ ID NO: 1843700 - RNA, 15 nt, Human
ucccauaugccuggg

SEQ ID NO: 1843701 - RNA, 16 nt, Human
ucccauaugccugggc

SEQ ID NO: 1843702 - RNA, 16 nt, Human
acuacaguccucccau

SEQ ID NO: 1843703 - RNA, 17 nt, Human
acuacaguccucccauc

SEQ ID NO: 1843704 - RNA, 22 nt, Human
ucccagugccgagaaggaagcc

SEQ ID NO: 1843705 - RNA, 19 nt, Human
ucccagugccgagaaggaa

SEQ ID NO: 1843706 - RNA, 14 nt, Human
acguuucuaaaggc

SEQ ID NO: 1843707 - RNA, 13 nt, Human
acuaaaaauacaa

SEQ ID NO: 1843708 - RNA, 24 nt, Human
uccagccugggugacagagcaagu

SEQ ID NO: 1843709 - RNA, 13 nt, Human
uccagccugggug

SEQ ID NO: 1843710 - RNA, 12 nt, Human
acguuucuaaag

SEQ ID NO: 1843711 - RNA, 15 nt, Human
uccagcucaccagcc

SEQ ID NO: 1843712 - RNA, 14 nt, Human
uccagcucaccagc

SEQ ID NO: 1843713 - RNA, 16 nt, Human
acuaaccagcagaaau

SEQ ID NO: 1843714 - RNA, 13 nt, Human
acuaaccacgcug

SEQ ID NO: 1843715 - RNA, 15 nt, Human
acuacaguccuccca

SEQ ID NO: 1843716 - RNA, 17 nt, Human
acuaaccagcagaaaug

SEQ ID NO: 1843717 - RNA, 23 nt, Human
acuacaggugugagucaccaagc

SEQ ID NO: 1843718 - RNA, 22 nt, Human
acuggcugcaaaggguaucagg

SEQ ID NO: 1843719 - RNA, 23 nt, Human
acuggccucugcugauccuccca

SEQ ID NO: 1843720 - RNA, 16 nt, Human
acuggccucugcugau

SEQ ID NO: 1843721 - RNA, 16 nt, Human
uccuuccucugagccu

SEQ ID NO: 1843722 - RNA, 16 nt, Human
uccuuccucugaggcu

SEQ ID NO: 1843723 - RNA, 17 nt, Human
uccuuccucugagccuu

SEQ ID NO: 1843724 - RNA, 13 nt, Human
uccuucagccuga

SEQ ID NO: 1843725 - RNA, 11 nt, Human
uccuucagugc

SEQ ID NO: 1843726 - RNA, 12 nt, Human
uccuucagugcc

SEQ ID NO: 1843727 - RNA, 20 nt, Human
uccuucagugccuuauggaa

SEQ ID NO: 1843728 - RNA, 13 nt, Human
uccuucagugccu

SEQ ID NO: 1843729 - RNA, 22 nt, Human
uccuucagugccuuauggaaca

SEQ ID NO: 1843730 - RNA, 12 nt, Human
acugcucugaug

SEQ ID NO: 1843731 - RNA, 23 nt, Human
acugcuuccagugaggcucugcc

SEQ ID NO: 1843732 - RNA, 22 nt, Human
acugcuuccagugaggcucugc

SEQ ID NO: 1843733 - RNA, 21 nt, Human
acugcuuccagugaggcucug

SEQ ID NO: 1843734 - RNA, 18 nt, Human
acugcuuccagugaggcu

SEQ ID NO: 1843735 - RNA, 21 nt, Human
acugcugcccagccuccaagc

SEQ ID NO: 1843736 - RNA, 18 nt, Human
acugcugcccagccucca

SEQ ID NO: 1843737 - RNA, 16 nt, Human
acugcugcccagccuc

SEQ ID NO: 1843738 - RNA, 12 nt, Human
acugcuggcugc

SEQ ID NO: 1843739 - RNA, 22 nt, Human
acuggauuaaacuuaaucuaaa

SEQ ID NO: 1843740 - RNA, 13 nt, Human
acugcuggcugcc

SEQ ID NO: 1843741 - RNA, 15 nt, Human
ucgagcaugccugga

SEQ ID NO: 1843742 - RNA, 14 nt, Human
ucgagcaugccugg

SEQ ID NO: 1843743 - RNA, 13 nt, Human
ucgaccugccucg

SEQ ID NO: 1843744 - RNA, 14 nt, Human
ucgaggacagggag

SEQ ID NO: 1843745 - RNA, 17 nt, Human
ucgaggacagggaggug

SEQ ID NO: 1843746 - RNA, 13 nt, Human
ucgcgacaaugca

SEQ ID NO: 1843747 - RNA, 14 nt, Human
ucgcgacaaugcaa

SEQ ID NO: 1843748 - RNA, 19 nt, Human
uccuuucacaaccuucugu

SEQ ID NO: 1843749 - RNA, 18 nt, Human
uccuuucacaaccuucug

SEQ ID NO: 1843750 - RNA, 16 nt, Human
uccuuucacaaccuuc

SEQ ID NO: 1843751 - RNA, 20 nt, Human
uccuuucacaaccuucugug

SEQ ID NO: 1843752 - RNA, 15 nt, Human
uccuuucaccacaug

SEQ ID NO: 1843753 - RNA, 14 nt, Human
ucgaacuggcugca

SEQ ID NO: 1843754 - RNA, 13 nt, Human
ucgaacuggcugc

SEQ ID NO: 1843755 - RNA, 15 nt, Human
ucgaacuggcugcaa

SEQ ID NO: 1843756 - RNA, 16 nt, Human
acuguaaggcaaucau

SEQ ID NO: 1843757 - RNA, 20 nt, Human
acuggguacuuguggacaca

SEQ ID NO: 1843758 - RNA, 23 nt, Human
acuggguacuuguggacacagcu

SEQ ID NO: 1843759 - RNA, 19 nt, Human
acuggguacuuguggacac

SEQ ID NO: 1843760 - RNA, 12 nt, Human
ucgcuccugugu

SEQ ID NO: 1843761 - RNA, 17 nt, Human
acugggagaaaugaaaa

SEQ ID NO: 1843762 - RNA, 13 nt, Human
ucgcuccuguguc

SEQ ID NO: 1843763 - RNA, 23 nt, Human
acuguacaugaaaacacauuuuu

SEQ ID NO: 1843764 - RNA, 13 nt, Human
acuguacaugaaa

SEQ ID NO: 1843765 - RNA, 14 nt, Human
acuguacaugaaaa

SEQ ID NO: 1843766 - RNA, 15 nt, Human
acuguacuccuccca

SEQ ID NO: 1843767 - RNA, 23 nt, Human
acuguagaaaagggaacugaaca

SEQ ID NO: 1843768 - RNA, 14 nt, Human
acuguacuccuccc

SEQ ID NO: 1843769 - RNA, 13 nt, Human
acuguacuccucc

SEQ ID NO: 1843770 - RNA, 13 nt, Human
acuguacaaagua

SEQ ID NO: 1843771 - RNA, 19 nt, Human
acuguaauuugugauacaa

SEQ ID NO: 1843772 - RNA, 15 nt, Human
acuguacaaaguaga

SEQ ID NO: 1843773 - RNA, 14 nt, Human
acuguacaaaguag

SEQ ID NO: 1843774 - RNA, 20 nt, Human
acuguacagacagaaaaaac

SEQ ID NO: 1843775 - RNA, 23 nt, Human
acugcaaccuucgccaccugggu

SEQ ID NO: 1843776 - RNA, 20 nt, Human
acugcaaccuucgccaccug

SEQ ID NO: 1843777 - RNA, 16 nt, Human
acugcaaccuccgccu

SEQ ID NO: 1843778 - RNA, 22 nt, Human
acugcaaccuccgccucuuggg

SEQ ID NO: 1843779 - RNA, 13 nt, Human
acugcaaccuccg

SEQ ID NO: 1843780 - RNA, 14 nt, Human
acugcaaccuccgc

SEQ ID NO: 1843781 - RNA, 22 nt, Human
acugaguacguugugcauuugg

SEQ ID NO: 1843782 - RNA, 23 nt, Human
acugaguacguugugcauuuggu

SEQ ID NO: 1843783 - RNA, 16 nt, Human
acugagugccuuuugg

SEQ ID NO: 1843784 - RNA, 19 nt, Human
acugaguacguugugcauu

SEQ ID NO: 1843785 - RNA, 21 nt, Human
acugaguacguugugcauuug

SEQ ID NO: 1843786 - RNA, 18 nt, Human
acugaguacguugugcau

SEQ ID NO: 1843787 - RNA, 15 nt, Human
uccucuccccagcaa

SEQ ID NO: 1843788 - RNA, 14 nt, Human
acugaggaucagag

SEQ ID NO: 1843789 - RNA, 15 nt, Human
acugaggaccagcca

SEQ ID NO: 1843790 - RNA, 17 nt, Human
acugaggggaggggagc

SEQ ID NO: 1843791 - RNA, 22 nt, Human
acugaggggaggggagcauggg

SEQ ID NO: 1843792 - RNA, 18 nt, Human
acugcacagugcaucuca

SEQ ID NO: 1843793 - RNA, 16 nt, Human
acugcacagugcaucu

SEQ ID NO: 1843794 - RNA, 20 nt, Human
uccugaguagcugggauuac

SEQ ID NO: 1843795 - RNA, 19 nt, Human
uccugaguagcuggauuac

SEQ ID NO: 1843796 - RNA, 15 nt, Human
uccugcaggcagcca

SEQ ID NO: 1843797 - RNA, 20 nt, Human
uccugcaggcagccaggcca

SEQ ID NO: 1843798 - RNA, 19 nt, Human
uccugcaggcagccaggcc

SEQ ID NO: 1843799 - RNA, 17 nt, Human
uccugcaggcagccagg

SEQ ID NO: 1843800 - RNA, 16 nt, Human
uccugcaggcagccag

SEQ ID NO: 1843801 - RNA, 22 nt, Human
uccugcaggcagccaggccaca

SEQ ID NO: 1843802 - RNA, 19 nt, Human
uccugccucagccucccaa

SEQ ID NO: 1843803 - RNA, 21 nt, Human
uccugccucgaacuggcugca

SEQ ID NO: 1843804 - RNA, 20 nt, Human
uccugccucgaacuggcugc

SEQ ID NO: 1843805 - RNA, 19 nt, Human
uccuguucccaugagauga

SEQ ID NO: 1843806 - RNA, 19 nt, Human
uccuguucuuaagacguga

SEQ ID NO: 1843807 - RNA, 18 nt, Human
uccugugugugcgccuac

SEQ ID NO: 1843808 - RNA, 13 nt, Human
uccugugugugcg

SEQ ID NO: 1843809 - RNA, 14 nt, Human
uccugugugugcgc

SEQ ID NO: 1843810 - RNA, 23 nt, Human
uccugugucuugcaauggcagcc

SEQ ID NO: 1843811 - RNA, 24 nt, Human
uccugugucuugcaauggcagccu

SEQ ID NO: 1843812 - RNA, 18 nt, Human
acugcagggacugccagu

SEQ ID NO: 1843813 - RNA, 17 nt, Human
acugcagggacugccag

SEQ ID NO: 1843814 - RNA, 16 nt, Human
acugcagggacugcca

SEQ ID NO: 1843815 - RNA, 23 nt, Human
acugcagccucaaccuccugggc

SEQ ID NO: 1843816 - RNA, 13 nt, Human
acugcacuguuuu

SEQ ID NO: 1843817 - RNA, 18 nt, Human
uccuuaaagaguguggca

SEQ ID NO: 1843818 - RNA, 23 nt, Human
uccuuaaagaguguggcaaaaua

SEQ ID NO: 1843819 - RNA, 17 nt, Human
uccuuaaagaguguggc

SEQ ID NO: 1843820 - RNA, 19 nt, Human
acugcagccucaaccuccu

SEQ ID NO: 1843821 - RNA, 21 nt, Human
acugcagccucaaccuccugg

SEQ ID NO: 1843822 - RNA, 22 nt, Human
acugcagccucaaccuccuggg

SEQ ID NO: 1843823 - RNA, 19 nt, Human
uccuggggaaccugacccc

SEQ ID NO: 1843824 - RNA, 18 nt, Human
uccuggggaaccugaccc

SEQ ID NO: 1843825 - RNA, 23 nt, Human
uccuggggguucuuucuuccucu

SEQ ID NO: 1843826 - RNA, 22 nt, Human
uccuggggguucuuucuuccuc

SEQ ID NO: 1843827 - RNA, 21 nt, Human
uccuggggguucuuucuuccu

SEQ ID NO: 1843828 - RNA, 13 nt, Human
uccugcugcaguu

SEQ ID NO: 1843829 - RNA, 18 nt, Human
uccugugacuucagcucu

SEQ ID NO: 1843830 - RNA, 13 nt, Human
uccaagcucccag

SEQ ID NO: 1843831 - RNA, 12 nt, Human
uccaagcuccca

SEQ ID NO: 1843832 - RNA, 15 nt, Human
uccaagcucccaggc

SEQ ID NO: 1843833 - RNA, 14 nt, Human
uccaagcucccagg

SEQ ID NO: 1843834 - RNA, 16 nt, Human
uccaagcucccaggca

SEQ ID NO: 1843835 - RNA, 18 nt, Human
uccaagcuccaucuccac

SEQ ID NO: 1843836 - RNA, 15 nt, Human
uccaaaugcagcuuu

SEQ ID NO: 1843837 - RNA, 14 nt, Human
uccaaaugcagcuu

SEQ ID NO: 1843838 - RNA, 14 nt, Human
uccacagugacucc

SEQ ID NO: 1843839 - RNA, 11 nt, Human
uccaagcuggu

SEQ ID NO: 1843840 - RNA, 16 nt, Human
uccacaguggaaccag

SEQ ID NO: 1843841 - RNA, 20 nt, Human
uccacaguggaaccagccca

SEQ ID NO: 1843842 - RNA, 13 nt, Human
ucauuuuuuuuaa

SEQ ID NO: 1843843 - RNA, 23 nt, Human
uccaaagucucuggaauuugaaa

SEQ ID NO: 1843844 - RNA, 18 nt, Human
ucauuugugccagaaugc

SEQ ID NO: 1843845 - RNA, 21 nt, Human
ucauuugagcagggcucagcg

SEQ ID NO: 1843846 - RNA, 18 nt, Human
accugcggugcuaucucc

SEQ ID NO: 1843847 - RNA, 22 nt, Human
accugaagucuuuguacagaca

SEQ ID NO: 1843848 - RNA, 15 nt, Human
accugaagucuuugu

SEQ ID NO: 1843849 - RNA, 22 nt, Human
accugcggugcuaucuccccca

SEQ ID NO: 1843850 - RNA, 19 nt, Human
accugcggugcuaucuccc

SEQ ID NO: 1843851 - RNA, 23 nt, Human
accugcggugcuaucucccccag

SEQ ID NO: 1843852 - RNA, 17 nt, Human
accugcucuccucuugc

SEQ ID NO: 1843853 - RNA, 18 nt, Human
accugcucuccucuugcc

SEQ ID NO: 1843854 - RNA, 19 nt, Human
accugcucuccucuugcca

SEQ ID NO: 1843855 - RNA, 14 nt, Human
accuggaauauaua

SEQ ID NO: 1843856 - RNA, 17 nt, Human
accuggaauauauaacc

SEQ ID NO: 1843857 - RNA, 19 nt, Human
ucauuugagcagggcucag

SEQ ID NO: 1843858 - RNA, 22 nt, Human
uccagaaguuugagaucagccu

SEQ ID NO: 1843859 - RNA, 23 nt, Human
accuuuguauucucuccuguacc

SEQ ID NO: 1843860 - RNA, 15 nt, Human
accuuuguauucucu

SEQ ID NO: 1843861 - RNA, 19 nt, Human
accuuuguauucucuccug

SEQ ID NO: 1843862 - RNA, 21 nt, Human
uccagccugagcgacagugag

SEQ ID NO: 1843863 - RNA, 20 nt, Human
uccagccugagcgacaguga

SEQ ID NO: 1843864 - RNA, 22 nt, Human
uccagccccuggaugcagccuc

SEQ ID NO: 1843865 - RNA, 23 nt, Human
uccagaccccuggcuuuucacug

SEQ ID NO: 1843866 - RNA, 21 nt, Human
uccagccccuggaugcagccu

SEQ ID NO: 1843867 - RNA, 19 nt, Human
uccagccccuggaugcagc

SEQ ID NO: 1843868 - RNA, 17 nt, Human
uccagccccuggaugca

SEQ ID NO: 1843869 - RNA, 16 nt, Human
uccagccccuggaugc

SEQ ID NO: 1843870 - RNA, 18 nt, Human
uccagaccccuggcuuuu

SEQ ID NO: 1843871 - RNA, 17 nt, Human
uccagaccccuggcuuu

SEQ ID NO: 1843872 - RNA, 16 nt, Human
uccagaccccuggcuu

SEQ ID NO: 1843873 - RNA, 15 nt, Human
uccagaccccuggcu

SEQ ID NO: 1843874 - RNA, 15 nt, Human
uccagccccuggaug

SEQ ID NO: 1843875 - RNA, 14 nt, Human
uccagacccggcug

SEQ ID NO: 1843876 - RNA, 17 nt, Human
accuuagacagucccug

SEQ ID NO: 1843877 - RNA, 14 nt, Human
accuuagccugccc

SEQ ID NO: 1843878 - RNA, 15 nt, Human
uccaccaucaagcca

SEQ ID NO: 1843879 - RNA, 23 nt, Human
accuggucacaggacucugccuc

SEQ ID NO: 1843880 - RNA, 22 nt, Human
accuggucacaggacucugccu

SEQ ID NO: 1843881 - RNA, 13 nt, Human
accuucuccuuca

SEQ ID NO: 1843882 - RNA, 12 nt, Human
accuucuguggc

SEQ ID NO: 1843883 - RNA, 16 nt, Human
accuucuguggcucac

SEQ ID NO: 1843884 - RNA, 15 nt, Human
accuucuguggcuca

SEQ ID NO: 1843885 - RNA, 13 nt, Human
accuucuguggcu

SEQ ID NO: 1843886 - RNA, 16 nt, Human
accuugacagggcaca

SEQ ID NO: 1843887 - RNA, 15 nt, Human
accuugacagggcac

SEQ ID NO: 1843888 - RNA, 15 nt, Human
accuugaaugaugcc

SEQ ID NO: 1843889 - RNA, 14 nt, Human
accuugacagggca

SEQ ID NO: 1843890 - RNA, 12 nt, Human
accuucuccuuc

SEQ ID NO: 1843891 - RNA, 19 nt, Human
ucaugacaaagacugagua

SEQ ID NO: 1843892 - RNA, 19 nt, Human
ucauccacugugccaugug

SEQ ID NO: 1843893 - RNA, 21 nt, Human
ucauccacugugccaugugcc

SEQ ID NO: 1843894 - RNA, 23 nt, Human
ucauccacugugccaugugccag

SEQ ID NO: 1843895 - RNA, 11 nt, Human
ucauguucuua

SEQ ID NO: 1843896 - RNA, 17 nt, Human
ucauguucuuaauucuu

SEQ ID NO: 1843897 - RNA, 14 nt, Human
ucaugugaaaucau

SEQ ID NO: 1843898 - RNA, 13 nt, Human
ucaugucuggcua

SEQ ID NO: 1843899 - RNA, 22 nt, Human
ucauugaccugaggcccuucuc

SEQ ID NO: 1843900 - RNA, 21 nt, Human
ucauucuccuuguguuacuaa

SEQ ID NO: 1843901 - RNA, 19 nt, Human
ucauugaccugaggcccuu

SEQ ID NO: 1843902 - RNA, 17 nt, Human
accucggugccuuccuc

SEQ ID NO: 1843903 - RNA, 19 nt, Human
accucucucacuccuugaa

SEQ ID NO: 1843904 - RNA, 14 nt, Human
accucucucacucc

SEQ ID NO: 1843905 - RNA, 23 nt, Human
accucucccuuggauuguccccg

SEQ ID NO: 1843906 - RNA, 12 nt, Human
accucugcacaa

SEQ ID NO: 1843907 - RNA, 15 nt, Human
accucucccuuggau

SEQ ID NO: 1843908 - RNA, 14 nt, Human
accucucccuugga

SEQ ID NO: 1843909 - RNA, 13 nt, Human
accucucccuugg

SEQ ID NO: 1843910 - RNA, 20 nt, Human
accgcagacaggaccaggga

SEQ ID NO: 1843911 - RNA, 24 nt, Human
accgagucucuucuccacuggaug

SEQ ID NO: 1843912 - RNA, 21 nt, Human
accgagucucuucuccacugg

SEQ ID NO: 1843913 - RNA, 20 nt, Human
accgagucucuucuccacug

SEQ ID NO: 1843914 - RNA, 17 nt, Human
accgccaaggcuggggg

SEQ ID NO: 1843915 - RNA, 18 nt, Human
accgagucucuucuccac

SEQ ID NO: 1843916 - RNA, 22 nt, Human
ucauauuuacuucuuauacauu

SEQ ID NO: 1843917 - RNA, 21 nt, Human
ucauauuuacuucuuauacau

SEQ ID NO: 1843918 - RNA, 20 nt, Human
ucauauuuacuucuuauaca

SEQ ID NO: 1843919 - RNA, 10 nt, Human
acccuuuucu

SEQ ID NO: 1843920 - RNA, 20 nt, Human
accuccgccucuuggguuca

SEQ ID NO: 1843921 - RNA, 13 nt, Human
accuagccuuaga

SEQ ID NO: 1843922 - RNA, 12 nt, Human
accccuggcuuu

SEQ ID NO: 1843923 - RNA, 12 nt, Human
ucagccugggca

SEQ ID NO: 1843924 - RNA, 10 nt, Human
ucagccuggg

SEQ ID NO: 1843925 - RNA, 19 nt, Human
ucagccuggcuucaaauug

SEQ ID NO: 1843926 - RNA, 17 nt, Human
accccuggcuuuucacu

SEQ ID NO: 1843927 - RNA, 15 nt, Human
accccuggcuuuuca

SEQ ID NO: 1843928 - RNA, 14 nt, Human
acccccagccugcu

SEQ ID NO: 1843929 - RNA, 15 nt, Human
acccccagccugcua

SEQ ID NO: 1843930 - RNA, 19 nt, Human
ucagcccucccugccccuc

SEQ ID NO: 1843931 - RNA, 18 nt, Human
ucagcccucccugccccu

SEQ ID NO: 1843932 - RNA, 15 nt, Human
acccagcucuggucc

SEQ ID NO: 1843933 - RNA, 13 nt, Human
acccagcucuggu

SEQ ID NO: 1843934 - RNA, 13 nt, Human
ucagaucuucugu

SEQ ID NO: 1843935 - RNA, 13 nt, Human
ucagaagacacug

SEQ ID NO: 1843936 - RNA, 20 nt, Human
accccuucgcuccugugucu

SEQ ID NO: 1843937 - RNA, 19 nt, Human
acccuuguggucccacccc

SEQ ID NO: 1843938 - RNA, 17 nt, Human
acccuuguggucccacc

SEQ ID NO: 1843939 - RNA, 16 nt, Human
acccuuguggucccac

SEQ ID NO: 1843940 - RNA, 12 nt, Human
acccugcccugu

SEQ ID NO: 1843941 - RNA, 11 nt, Human
acccugcccug

SEQ ID NO: 1843942 - RNA, 13 nt, Human
acccugcccugug

SEQ ID NO: 1843943 - RNA, 14 nt, Human
acccugcccugugg

SEQ ID NO: 1843944 - RNA, 14 nt, Human
acccucuuagaaaa

SEQ ID NO: 1843945 - RNA, 12 nt, Human
ucaggccaggcc

SEQ ID NO: 1843946 - RNA, 11 nt, Human
ucaggccaggc

SEQ ID NO: 1843947 - RNA, 20 nt, Human
ucaggccagcugcuugggcu

SEQ ID NO: 1843948 - RNA, 15 nt, Human
ucaggccagcugcuu

SEQ ID NO: 1843949 - RNA, 18 nt, Human
ucagggucccugguggca

SEQ ID NO: 1843950 - RNA, 14 nt, Human
ucagggucccuggu

SEQ ID NO: 1843951 - RNA, 13 nt, Human
ucagggucccugg

SEQ ID NO: 1843952 - RNA, 13 nt, Human
ucagguaacaggc

SEQ ID NO: 1843953 - RNA, 15 nt, Human
ucagguaacaggcag

SEQ ID NO: 1843954 - RNA, 16 nt, Human
ucagguaacaggcaga

SEQ ID NO: 1843955 - RNA, 19 nt, Human
accccuucgcuccuguguc

SEQ ID NO: 1843956 - RNA, 20 nt, Human
ucaggaagcucagggccugg

SEQ ID NO: 1843957 - RNA, 19 nt, Human
ucaggaagcucagggccug

SEQ ID NO: 1843958 - RNA, 17 nt, Human
ucaggaagcucagggcc

SEQ ID NO: 1843959 - RNA, 16 nt, Human
ucaggaagcucagggc

SEQ ID NO: 1843960 - RNA, 23 nt, Human
ucaggccaaacucaccugccccu

SEQ ID NO: 1843961 - RNA, 20 nt, Human
ucaggccaaacucaccugcc

SEQ ID NO: 1843962 - RNA, 15 nt, Human
ucagcggggacagcu

SEQ ID NO: 1843963 - RNA, 16 nt, Human
ucagcggggacagcuc

SEQ ID NO: 1843964 - RNA, 17 nt, Human
ucagcggggacagcucc

SEQ ID NO: 1843965 - RNA, 18 nt, Human
ucagcggggacagcuccu

SEQ ID NO: 1843966 - RNA, 16 nt, Human
acccagcccacuucug

SEQ ID NO: 1843967 - RNA, 17 nt, Human
acccagcccacuucugc

SEQ ID NO: 1843968 - RNA, 18 nt, Human
acccagcccacuucugcc

SEQ ID NO: 1843969 - RNA, 21 nt, Human
acccaaauguucaucaaugaa

SEQ ID NO: 1843970 - RNA, 18 nt, Human
acccaaaaggcagaagca

SEQ ID NO: 1843971 - RNA, 16 nt, Human
acccagaagaaaauag

SEQ ID NO: 1843972 - RNA, 19 nt, Human
acccacuugcuuuuaaaau

SEQ ID NO: 1843973 - RNA, 18 nt, Human
accauucuccaccugcca

SEQ ID NO: 1843974 - RNA, 16 nt, Human
accauucuccaccugc

SEQ ID NO: 1843975 - RNA, 13 nt, Human
accauucuccacc

SEQ ID NO: 1843976 - RNA, 22 nt, Human
accaugauuaaccacuucagcu

SEQ ID NO: 1843977 - RNA, 23 nt, Human
accaugauuaaccacuucagcug

SEQ ID NO: 1843978 - RNA, 12 nt, Human
accauuccccau

SEQ ID NO: 1843979 - RNA, 15 nt, Human
accauuccccauggg

SEQ ID NO: 1843980 - RNA, 13 nt, Human
acccaaaaggcag

SEQ ID NO: 1843981 - RNA, 15 nt, Human
acccaaaaggcagaa

SEQ ID NO: 1843982 - RNA, 23 nt, Human
accauuuugggguacccacugcu

SEQ ID NO: 1843983 - RNA, 15 nt, Human
ucacugagacagccc

SEQ ID NO: 1843984 - RNA, 14 nt, Human
ucacugagacagcc

SEQ ID NO: 1843985 - RNA, 13 nt, Human
ucacugagacagc

SEQ ID NO: 1843986 - RNA, 16 nt, Human
ucaccugccccucaac

SEQ ID NO: 1843987 - RNA, 16 nt, Human
ucacuguugcccaggc

SEQ ID NO: 1843988 - RNA, 24 nt, Human
ucacugcacagugcaucucagccc

SEQ ID NO: 1843989 - RNA, 22 nt, Human
ucacugcacagugcaucucagc

SEQ ID NO: 1843990 - RNA, 20 nt, Human
ucacugcacagugcaucuca

SEQ ID NO: 1843991 - RNA, 13 nt, Human
ucacugcagccuc

SEQ ID NO: 1843992 - RNA, 12 nt, Human
ucacugcagccu

SEQ ID NO: 1843993 - RNA, 19 nt, Human
ucacuguugcccaggcugg

SEQ ID NO: 1843994 - RNA, 17 nt, Human
ucacuguugcccaggcu

SEQ ID NO: 1843995 - RNA, 18 nt, Human
ucacuguugcccaggcug

SEQ ID NO: 1843996 - RNA, 21 nt, Human
accaguguuguggauuuaaca

SEQ ID NO: 1843997 - RNA, 19 nt, Human
accaggcaacuugggaacu

SEQ ID NO: 1843998 - RNA, 15 nt, Human
ucaccucccccaucu

SEQ ID NO: 1843999 - RNA, 13 nt, Human
ucaccucccccau

SEQ ID NO: 1844000 - RNA, 13 nt, Human
ucaccuccugcug

SEQ ID NO: 1844001 - RNA, 12 nt, Human
ucaccuccugcu

SEQ ID NO: 1844002 - RNA, 19 nt, Human
ucaccugaagacucauucu

SEQ ID NO: 1844003 - RNA, 17 nt, Human
ucaccuccugcugggca

SEQ ID NO: 1844004 - RNA, 15 nt, Human
ucaccuccugcuggg

SEQ ID NO: 1844005 - RNA, 14 nt, Human
ucaccuccugcugg

SEQ ID NO: 1844006 - RNA, 23 nt, Human
ucaccugaagacucauucuucug

SEQ ID NO: 1844007 - RNA, 19 nt, Human
accagagcccaccuuggcu

SEQ ID NO: 1844008 - RNA, 22 nt, Human
accagagcccaccuuggcucaa

SEQ ID NO: 1844009 - RNA, 22 nt, Human
accagacaccuugacagggcac

SEQ ID NO: 1844010 - RNA, 23 nt, Human
accagacaccuugacagggcaca

SEQ ID NO: 1844011 - RNA, 12 nt, Human
accacuuuuguu

SEQ ID NO: 1844012 - RNA, 17 nt, Human
accagacaccuugacag

SEQ ID NO: 1844013 - RNA, 13 nt, Human
accacugcagaag

SEQ ID NO: 1844014 - RNA, 14 nt, Human
accacugcagaaga

SEQ ID NO: 1844015 - RNA, 19 nt, Human
accacugcagaagacagua

SEQ ID NO: 1844016 - RNA, 14 nt, Human
accacuucagcuga

SEQ ID NO: 1844017 - RNA, 13 nt, Human
accacuucagcug

SEQ ID NO: 1844018 - RNA, 15 nt, Human
accacuucagcugac

SEQ ID NO: 1844019 - RNA, 20 nt, Human
accacucuaucaaguauuau

SEQ ID NO: 1844020 - RNA, 16 nt, Human
accacaucuugcucug

SEQ ID NO: 1844021 - RNA, 20 nt, Human
accacaucuugcucugcuga

SEQ ID NO: 1844022 - RNA, 21 nt, Human
accacaucuugcucugcugac

SEQ ID NO: 1844023 - RNA, 24 nt, Human
accacaucuugcucugcugacaga

SEQ ID NO: 1844024 - RNA, 21 nt, Human
accacagacauacuaaccagc

SEQ ID NO: 1844025 - RNA, 22 nt, Human
accacagacauacuaaccagca

SEQ ID NO: 1844026 - RNA, 14 nt, Human
accacaucuugcuc

SEQ ID NO: 1844027 - RNA, 24 nt, Human
ugaggcccuucucuccagccccug

SEQ ID NO: 1844028 - RNA, 23 nt, Human
ugaggcccuucucuccagccccu

SEQ ID NO: 1844029 - RNA, 22 nt, Human
ugaggcccuucucuccagcccc

SEQ ID NO: 1844030 - RNA, 20 nt, Human
ugaggcccuucucuccagcc

SEQ ID NO: 1844031 - RNA, 19 nt, Human
ugaggcccuucucuccagc

SEQ ID NO: 1844032 - RNA, 18 nt, Human
ugaggcccuucucuccag

SEQ ID NO: 1844033 - RNA, 16 nt, Human
ugaggcccuucucucc

SEQ ID NO: 1844034 - RNA, 19 nt, Human
ugagggauacccaucccau

SEQ ID NO: 1844035 - RNA, 15 nt, Human
ugagggauuaucuuu

SEQ ID NO: 1844036 - RNA, 12 nt, Human
ugaggggccucu

SEQ ID NO: 1844037 - RNA, 13 nt, Human
ugaggggccucuu

SEQ ID NO: 1844038 - RNA, 20 nt, Human
agcagagcaccuuagacagu

SEQ ID NO: 1844039 - RNA, 20 nt, Human
agcagagaccaucccugaag

SEQ ID NO: 1844040 - RNA, 19 nt, Human
ugagguacaaccuguucug

SEQ ID NO: 1844041 - RNA, 19 nt, Human
agcagagaccaucccugaa

SEQ ID NO: 1844042 - RNA, 18 nt, Human
agcagagaccaucccuga

SEQ ID NO: 1844043 - RNA, 17 nt, Human
agcagagaccaucccug

SEQ ID NO: 1844044 - RNA, 17 nt, Human
ugaggucagagccugca

SEQ ID NO: 1844045 - RNA, 14 nt, Human
ugaggucagagccu

SEQ ID NO: 1844046 - RNA, 16 nt, Human
ugaggucagagccugc

SEQ ID NO: 1844047 - RNA, 22 nt, Human
ugagguacugagagugaacaaa

SEQ ID NO: 1844048 - RNA, 13 nt, Human
ugaggucagagcc

SEQ ID NO: 1844049 - RNA, 17 nt, Human
ugagguacugagaguga

SEQ ID NO: 1844050 - RNA, 20 nt, Human
ugaggguugggcugguguca

SEQ ID NO: 1844051 - RNA, 19 nt, Human
agcagauggagaccccuug

SEQ ID NO: 1844052 - RNA, 17 nt, Human
agcagaggaaggagagg

SEQ ID NO: 1844053 - RNA, 20 nt, Human
ugaggcccagagggccugca

SEQ ID NO: 1844054 - RNA, 18 nt, Human
ugaggcccagagggccug

SEQ ID NO: 1844055 - RNA, 17 nt, Human
ugaggcccagagggccu

SEQ ID NO: 1844056 - RNA, 15 nt, Human
ugaggcccagagggc

SEQ ID NO: 1844057 - RNA, 22 nt, Human
ugaggcccagagggccugcaag

SEQ ID NO: 1844058 - RNA, 21 nt, Human
ugaggcccagagggccugcaa

SEQ ID NO: 1844059 - RNA, 23 nt, Human
ugaggcccagagggccugcaagg

SEQ ID NO: 1844060 - RNA, 16 nt, Human
ugaggccagagacaca

SEQ ID NO: 1844061 - RNA, 14 nt, Human
ugaggccagagaca

SEQ ID NO: 1844062 - RNA, 20 nt, Human
ugaggccagagacacaagcc

SEQ ID NO: 1844063 - RNA, 13 nt, Human
ugaggcccagagg

SEQ ID NO: 1844064 - RNA, 12 nt, Human
ugaggcccagag

SEQ ID NO: 1844065 - RNA, 12 nt, Human
ugaggccagaga

SEQ ID NO: 1844066 - RNA, 21 nt, Human
ugaggacacuaaccacgcugg

SEQ ID NO: 1844067 - RNA, 21 nt, Human
ugaggaauccagacccggcug

SEQ ID NO: 1844068 - RNA, 22 nt, Human
ugaggaauccagacccggcugc

SEQ ID NO: 1844069 - RNA, 14 nt, Human
ugagcuaggaauug

SEQ ID NO: 1844070 - RNA, 16 nt, Human
ugagcuacaaaugcau

SEQ ID NO: 1844071 - RNA, 14 nt, Human
ugagcuacaaaugc

SEQ ID NO: 1844072 - RNA, 13 nt, Human
ugagcuacaaaug

SEQ ID NO: 1844073 - RNA, 21 nt, Human
ugaggaagccgcuggggccag

SEQ ID NO: 1844074 - RNA, 19 nt, Human
ugaggaagccgcuggggcc

SEQ ID NO: 1844075 - RNA, 18 nt, Human
ugaggaagccgcuggggc

SEQ ID NO: 1844076 - RNA, 17 nt, Human
ugaggaagccgcugggg

SEQ ID NO: 1844077 - RNA, 14 nt, Human
ugaggaagccgcug

SEQ ID NO: 1844078 - RNA, 22 nt, Human
ugaggaagcaaaagcaucuaug

SEQ ID NO: 1844079 - RNA, 15 nt, Human
ugaggaagcaaaagc

SEQ ID NO: 1844080 - RNA, 21 nt, Human
agcagagaaugaaagggccca

SEQ ID NO: 1844081 - RNA, 10 nt, Human
ugagccuggc

SEQ ID NO: 1844082 - RNA, 16 nt, Human
agcagagaccaucccu

SEQ ID NO: 1844083 - RNA, 15 nt, Human
agcagagaccauccc

SEQ ID NO: 1844084 - RNA, 21 nt, Human
agcagagaauucucuuaucca

SEQ ID NO: 1844085 - RNA, 14 nt, Human
agcagagaauucuc

SEQ ID NO: 1844086 - RNA, 22 nt, Human
agcagagaaugaaagggcccag

SEQ ID NO: 1844087 - RNA, 23 nt, Human
agcagagaaugaaagggcccaga

SEQ ID NO: 1844088 - RNA, 13 nt, Human
ugagcgacaguga

SEQ ID NO: 1844089 - RNA, 14 nt, Human
ugagcgacagugag

SEQ ID NO: 1844090 - RNA, 16 nt, Human
ugagcgacagugagac

SEQ ID NO: 1844091 - RNA, 20 nt, Human
ugagcgacagugagacucug

SEQ ID NO: 1844092 - RNA, 15 nt, Human
ugagccuugaacuuu

SEQ ID NO: 1844093 - RNA, 17 nt, Human
ugagccuugaacuuuga

SEQ ID NO: 1844094 - RNA, 18 nt, Human
ugagccuugaacuuugac

SEQ ID NO: 1844095 - RNA, 19 nt, Human
ugagccuugaacuuugacc

SEQ ID NO: 1844096 - RNA, 14 nt, Human
ugagccuugaacuu

SEQ ID NO: 1844097 - RNA, 22 nt, Human
ugagccugggaggucaaggcug

SEQ ID NO: 1844098 - RNA, 19 nt, Human
ugagccugggaggucaagg

SEQ ID NO: 1844099 - RNA, 16 nt, Human
ugagccuggcaagaau

SEQ ID NO: 1844100 - RNA, 11 nt, Human
ugagccuggca

SEQ ID NO: 1844101 - RNA, 14 nt, Human
ugagccugggaggu

SEQ ID NO: 1844102 - RNA, 22 nt, Human
agcaccuuagacagucccugcc

SEQ ID NO: 1844103 - RNA, 21 nt, Human
agcaccuuagacagucccugc

SEQ ID NO: 1844104 - RNA, 20 nt, Human
agcaccuuagacagucccug

SEQ ID NO: 1844105 - RNA, 19 nt, Human
agcaccuuagacagucccu

SEQ ID NO: 1844106 - RNA, 13 nt, Human
agcaccagggaag

SEQ ID NO: 1844107 - RNA, 12 nt, Human
agcaccagggaa

SEQ ID NO: 1844108 - RNA, 10 nt, Human
agcaccaggg

SEQ ID NO: 1844109 - RNA, 16 nt, Human
agcacgauuucuguuu

SEQ ID NO: 1844110 - RNA, 14 nt, Human
agcacgauuucugu

SEQ ID NO: 1844111 - RNA, 15 nt, Human
agcacgauuucuguu

SEQ ID NO: 1844112 - RNA, 13 nt, Human
agcacgauuucug

SEQ ID NO: 1844113 - RNA, 23 nt, Human
agcaccuuagacagucccugcca

SEQ ID NO: 1844114 - RNA, 14 nt, Human
agcagaacagugau

SEQ ID NO: 1844115 - RNA, 19 nt, Human
agcagaaaugccuuacccu

SEQ ID NO: 1844116 - RNA, 12 nt, Human
agcagaaaugcc

SEQ ID NO: 1844117 - RNA, 13 nt, Human
agcagaaaugccu

SEQ ID NO: 1844118 - RNA, 23 nt, Human
agcacuuugggaggccaaggugg

SEQ ID NO: 1844119 - RNA, 22 nt, Human
agcacuuugggaggccaaggug

SEQ ID NO: 1844120 - RNA, 21 nt, Human
agcacagcagccccugcacaa

SEQ ID NO: 1844121 - RNA, 22 nt, Human
agcaagugagagcuggguguca

SEQ ID NO: 1844122 - RNA, 18 nt, Human
agcaagugagagcugggu

SEQ ID NO: 1844123 - RNA, 14 nt, Human
agcaagugagagcu

SEQ ID NO: 1844124 - RNA, 22 nt, Human
ugagccagauuucacucuccuu

SEQ ID NO: 1844125 - RNA, 17 nt, Human
ugagccagauuucacuc

SEQ ID NO: 1844126 - RNA, 20 nt, Human
agcaagugagacccugucuc

SEQ ID NO: 1844127 - RNA, 13 nt, Human
agcaagugagagc

SEQ ID NO: 1844128 - RNA, 16 nt, Human
agcacaugccucucuc

SEQ ID NO: 1844129 - RNA, 14 nt, Human
agcacaugccucuc

SEQ ID NO: 1844130 - RNA, 13 nt, Human
agcacaugccucu

SEQ ID NO: 1844131 - RNA, 16 nt, Human
agcacagcuucauuuc

SEQ ID NO: 1844132 - RNA, 15 nt, Human
ugagcaauccugcaa

SEQ ID NO: 1844133 - RNA, 15 nt, Human
ugagcaaauguggcu

SEQ ID NO: 1844134 - RNA, 19 nt, Human
ugagcaaauguggcuccug

SEQ ID NO: 1844135 - RNA, 18 nt, Human
ugagcaaauguggcuccu

SEQ ID NO: 1844136 - RNA, 16 nt, Human
ugagcaaauguggcuc

SEQ ID NO: 1844137 - RNA, 20 nt, Human
ugagcacuaaggugugcucu

SEQ ID NO: 1844138 - RNA, 21 nt, Human
ugagcacuaaggugugcucug

SEQ ID NO: 1844139 - RNA, 22 nt, Human
ugagcacuaaggugugcucuga

SEQ ID NO: 1844140 - RNA, 23 nt, Human
ugagcacuaaggugugcucugau

SEQ ID NO: 1844141 - RNA, 21 nt, Human
ugagcaucaggccaggcccuc

SEQ ID NO: 1844142 - RNA, 24 nt, Human
ugagcaucaggccaggcccucugc

SEQ ID NO: 1844143 - RNA, 22 nt, Human
ugagcaucaggccaggcccucu

SEQ ID NO: 1844144 - RNA, 14 nt, Human
ugagccaccgugcc

SEQ ID NO: 1844145 - RNA, 15 nt, Human
ugagccaccacgccc

SEQ ID NO: 1844146 - RNA, 21 nt, Human
ugagccaccgugccuggccac

SEQ ID NO: 1844147 - RNA, 20 nt, Human
ugagccaccgugccuggcca

SEQ ID NO: 1844148 - RNA, 19 nt, Human
ugagccaccgugccuggcc

SEQ ID NO: 1844149 - RNA, 18 nt, Human
ugagccaccgugccuggc

SEQ ID NO: 1844150 - RNA, 21 nt, Human
ugagccacugcaccgggccac

SEQ ID NO: 1844151 - RNA, 18 nt, Human
ugagccacugcaccgggc

SEQ ID NO: 1844152 - RNA, 16 nt, Human
ugagccagauuucacu

SEQ ID NO: 1844153 - RNA, 14 nt, Human
ugagccagauuuca

SEQ ID NO: 1844154 - RNA, 13 nt, Human
ugagccagauuuc

SEQ ID NO: 1844155 - RNA, 23 nt, Human
ugagccacugcaccgggccacag

SEQ ID NO: 1844156 - RNA, 21 nt, Human
agcaaaaccaaauauuccaga

SEQ ID NO: 1844157 - RNA, 14 nt, Human
agauuucacucucc

SEQ ID NO: 1844158 - RNA, 13 nt, Human
agauuucacucuc

SEQ ID NO: 1844159 - RNA, 14 nt, Human
agauuuaugcauau

SEQ ID NO: 1844160 - RNA, 16 nt, Human
agauugugccccugca

SEQ ID NO: 1844161 - RNA, 21 nt, Human
agauugugccccugcacucca

SEQ ID NO: 1844162 - RNA, 20 nt, Human
ugacuuauuuauauaaauuu

SEQ ID NO: 1844163 - RNA, 17 nt, Human
ugacuuauuuauauaaa

SEQ ID NO: 1844164 - RNA, 21 nt, Human
ugacuuauuuauauaaauuuu

SEQ ID NO: 1844165 - RNA, 23 nt, Human
ugacuccagaauuucccaaagca

SEQ ID NO: 1844166 - RNA, 20 nt, Human
ugacuccagaauuucccaaa

SEQ ID NO: 1844167 - RNA, 15 nt, Human
ugaccugaggcccuu

SEQ ID NO: 1844168 - RNA, 14 nt, Human
ugaccugaggcccu

SEQ ID NO: 1844169 - RNA, 17 nt, Human
ugaccugaggcccuucu

SEQ ID NO: 1844170 - RNA, 19 nt, Human
ugacuccagaauuucccaa

SEQ ID NO: 1844171 - RNA, 17 nt, Human
ugacuccagaauuuccc

SEQ ID NO: 1844172 - RNA, 20 nt, Human
agauuauaggcaccuaccac

SEQ ID NO: 1844173 - RNA, 16 nt, Human
agauucaaucccagga

SEQ ID NO: 1844174 - RNA, 21 nt, Human
agaucauugugaaauuauuca

SEQ ID NO: 1844175 - RNA, 20 nt, Human
ugaccacacuccagcuggga

SEQ ID NO: 1844176 - RNA, 19 nt, Human
ugaccacacuccagcuggg

SEQ ID NO: 1844177 - RNA, 17 nt, Human
ugaccacacuccagcug

SEQ ID NO: 1844178 - RNA, 12 nt, Human
ugaccacacucc

SEQ ID NO: 1844179 - RNA, 18 nt, Human
ugacauuguagagcuucu

SEQ ID NO: 1844180 - RNA, 18 nt, Human
agauguguucacaaugga

SEQ ID NO: 1844181 - RNA, 15 nt, Human
agauguguucacaau

SEQ ID NO: 1844182 - RNA, 22 nt, Human
ugacccccaaccaaguggcucc

SEQ ID NO: 1844183 - RNA, 17 nt, Human
ugaccccucauagcccu

SEQ ID NO: 1844184 - RNA, 20 nt, Human
ugaccccucauagcccucac

SEQ ID NO: 1844185 - RNA, 19 nt, Human
ugaccccucauagcccuca

SEQ ID NO: 1844186 - RNA, 13 nt, Human
ugaccucugccug

SEQ ID NO: 1844187 - RNA, 12 nt, Human
ugaccugaggcc

SEQ ID NO: 1844188 - RNA, 14 nt, Human
ugaccucugccuga

SEQ ID NO: 1844189 - RNA, 23 nt, Human
agaugcuagaacucccuuucaac

SEQ ID NO: 1844190 - RNA, 16 nt, Human
agaugcuucucacugc

SEQ ID NO: 1844191 - RNA, 18 nt, Human
agaugcuucucacugcca

SEQ ID NO: 1844192 - RNA, 11 nt, Human
ugaagacaaug

SEQ ID NO: 1844193 - RNA, 13 nt, Human
ugaagacaaugac

SEQ ID NO: 1844194 - RNA, 17 nt, Human
ugaagacaaugacuuac

SEQ ID NO: 1844195 - RNA, 16 nt, Human
ugaacuuugaccucug

SEQ ID NO: 1844196 - RNA, 17 nt, Human
ugaacuuugaccucugc

SEQ ID NO: 1844197 - RNA, 21 nt, Human
ucuuuggucuacacugugcug

SEQ ID NO: 1844198 - RNA, 14 nt, Human
ucuuuggucuacac

SEQ ID NO: 1844199 - RNA, 12 nt, Human
ucuuuguaauga

SEQ ID NO: 1844200 - RNA, 11 nt, Human
ugaacuuugac

SEQ ID NO: 1844201 - RNA, 15 nt, Human
ucuuuguaaugaaaa

SEQ ID NO: 1844202 - RNA, 13 nt, Human
ucuuuguaaugaa

SEQ ID NO: 1844203 - RNA, 18 nt, Human
agaggcaacugcauuggc

SEQ ID NO: 1844204 - RNA, 21 nt, Human
agaggaaaucaccgaaaacgu

SEQ ID NO: 1844205 - RNA, 12 nt, Human
agaggaaaucac

SEQ ID NO: 1844206 - RNA, 11 nt, Human
agaggaaauca

SEQ ID NO: 1844207 - RNA, 19 nt, Human
agaggaaagcaaaggagau

SEQ ID NO: 1844208 - RNA, 18 nt, Human
agaggaaagcaaaggaga

SEQ ID NO: 1844209 - RNA, 16 nt, Human
agaggaaagcaaagga

SEQ ID NO: 1844210 - RNA, 12 nt, Human
agaggaaagcaa

SEQ ID NO: 1844211 - RNA, 21 nt, Human
agagcuucuguugcugccuca

SEQ ID NO: 1844212 - RNA, 20 nt, Human
agagcuucuguugcugccuc

SEQ ID NO: 1844213 - RNA, 19 nt, Human
agagcuucuguugcugccu

SEQ ID NO: 1844214 - RNA, 15 nt, Human
agagcuucuggcacu

SEQ ID NO: 1844215 - RNA, 21 nt, Human
ugaagacaaugacuuacugua

SEQ ID NO: 1844216 - RNA, 19 nt, Human
agagcugggugucaagagg

SEQ ID NO: 1844217 - RNA, 21 nt, Human
agaggcgcaugaauuugugaa

SEQ ID NO: 1844218 - RNA, 21 nt, Human
agagggagggagggcuccaga

SEQ ID NO: 1844219 - RNA, 22 nt, Human
agagggagggagggcuccagac

SEQ ID NO: 1844220 - RNA, 17 nt, Human
ugaagauguagaggaga

SEQ ID NO: 1844221 - RNA, 18 nt, Human
ugaagauguagaggagaa

SEQ ID NO: 1844222 - RNA, 16 nt, Human
ugaaugcauaaaaugu

SEQ ID NO: 1844223 - RNA, 15 nt, Human
ugaaugcauaaaaug

SEQ ID NO: 1844224 - RNA, 18 nt, Human
ugaagguggaaauaaacu

SEQ ID NO: 1844225 - RNA, 18 nt, Human
ugaaugucagugugacug

SEQ ID NO: 1844226 - RNA, 15 nt, Human
ugaaugucaguguga

SEQ ID NO: 1844227 - RNA, 14 nt, Human
ugaaugucagugug

SEQ ID NO: 1844228 - RNA, 22 nt, Human
agagugaacaaauuuacagaga

SEQ ID NO: 1844229 - RNA, 15 nt, Human
agagugagacucugu

SEQ ID NO: 1844230 - RNA, 16 nt, Human
agagugagacucuguc

SEQ ID NO: 1844231 - RNA, 20 nt, Human
agagucucacuguugcccag

SEQ ID NO: 1844232 - RNA, 14 nt, Human
agagugaacaaauu

SEQ ID NO: 1844233 - RNA, 22 nt, Human
agagucucacuguugcccaggc

SEQ ID NO: 1844234 - RNA, 21 nt, Human
agaucaaccccuucgcuccug

SEQ ID NO: 1844235 - RNA, 14 nt, Human
agaucaaccccuuc

SEQ ID NO: 1844236 - RNA, 19 nt, Human
agaucaaccccuucgcucc

SEQ ID NO: 1844237 - RNA, 22 nt, Human
agauauuuugcuuugugauuuu

SEQ ID NO: 1844238 - RNA, 19 nt, Human
agauacaggaaaagcugcu

SEQ ID NO: 1844239 - RNA, 18 nt, Human
agauaauucuagcuuuga

SEQ ID NO: 1844240 - RNA, 19 nt, Human
agauaaggguaucugguga

SEQ ID NO: 1844241 - RNA, 19 nt, Human
agagugagacucugucuca

SEQ ID NO: 1844242 - RNA, 23 nt, Human
agacccugcccugugggccccca

SEQ ID NO: 1844243 - RNA, 21 nt, Human
agacccugcccugugggcccc

SEQ ID NO: 1844244 - RNA, 19 nt, Human
agacccugcccugugggcc

SEQ ID NO: 1844245 - RNA, 16 nt, Human
agacccugcccugugg

SEQ ID NO: 1844246 - RNA, 15 nt, Human
agacccuuguggucc

SEQ ID NO: 1844247 - RNA, 13 nt, Human
agacccuuguggu

SEQ ID NO: 1844248 - RNA, 23 nt, Human
agacccuuguggucccaccccac

SEQ ID NO: 1844249 - RNA, 22 nt, Human
agacccuuguggucccacccca

SEQ ID NO: 1844250 - RNA, 20 nt, Human
agacccuuguggucccaccc

SEQ ID NO: 1844251 - RNA, 19 nt, Human
agacccuuguggucccacc

SEQ ID NO: 1844252 - RNA, 19 nt, Human
agaccuaacgagaaauaga

SEQ ID NO: 1844253 - RNA, 14 nt, Human
agacccugcccugu

SEQ ID NO: 1844254 - RNA, 13 nt, Human
agacccugcccug

SEQ ID NO: 1844255 - RNA, 12 nt, Human
agacccugcccu

SEQ ID NO: 1844256 - RNA, 17 nt, Human
ucuugcaauggcagccu

SEQ ID NO: 1844257 - RNA, 13 nt, Human
ucuugcaauggca

SEQ ID NO: 1844258 - RNA, 16 nt, Human
ucuugcaauggcagcc

SEQ ID NO: 1844259 - RNA, 14 nt, Human
ucuugaugccuggc

SEQ ID NO: 1844260 - RNA, 20 nt, Human
ucuugaugccuggcggggug

SEQ ID NO: 1844261 - RNA, 18 nt, Human
agacuaucuaaauguuga

SEQ ID NO: 1844262 - RNA, 17 nt, Human
agacuaucuaaauguug

SEQ ID NO: 1844263 - RNA, 19 nt, Human
agacuaucuaaauguugaa

SEQ ID NO: 1844264 - RNA, 12 nt, Human
agaccugccccu

SEQ ID NO: 1844265 - RNA, 17 nt, Human
agacucauucuucugua

SEQ ID NO: 1844266 - RNA, 18 nt, Human
agacucauucuucuguac

SEQ ID NO: 1844267 - RNA, 17 nt, Human
agacuucaucccucugg

SEQ ID NO: 1844268 - RNA, 14 nt, Human
agacuucaucccuc

SEQ ID NO: 1844269 - RNA, 14 nt, Human
agagaccaucccug

SEQ ID NO: 1844270 - RNA, 13 nt, Human
agagaccaucccu

SEQ ID NO: 1844271 - RNA, 15 nt, Human
agagaccaucccuga

SEQ ID NO: 1844272 - RNA, 18 nt, Human
agagaccaucccugaagg

SEQ ID NO: 1844273 - RNA, 12 nt, Human
agacuuuggaaa

SEQ ID NO: 1844274 - RNA, 14 nt, Human
agacuuuggaaaga

SEQ ID NO: 1844275 - RNA, 18 nt, Human
agagaaugaaagggccca

SEQ ID NO: 1844276 - RNA, 15 nt, Human
agacuuuggaaagac

SEQ ID NO: 1844277 - RNA, 17 nt, Human
agacuccugcaggcagc

SEQ ID NO: 1844278 - RNA, 16 nt, Human
agacuccugcaggcag

SEQ ID NO: 1844279 - RNA, 15 nt, Human
agacuccugcaggca

SEQ ID NO: 1844280 - RNA, 14 nt, Human
agacuccugcaggc

SEQ ID NO: 1844281 - RNA, 16 nt, Human
ucuuuccugaggcugg

SEQ ID NO: 1844282 - RNA, 15 nt, Human
ucuuuccugaggcug

SEQ ID NO: 1844283 - RNA, 14 nt, Human
ucuuuccugaggcu

SEQ ID NO: 1844284 - RNA, 13 nt, Human
ucuuuccugaggc

SEQ ID NO: 1844285 - RNA, 23 nt, Human
agacuccugcaggcagccaggcc

SEQ ID NO: 1844286 - RNA, 20 nt, Human
agacuccugcaggcagccag

SEQ ID NO: 1844287 - RNA, 19 nt, Human
agacuccugcaggcagcca

SEQ ID NO: 1844288 - RNA, 18 nt, Human
agacuccugcaggcagcc

SEQ ID NO: 1844289 - RNA, 19 nt, Human
agacucuacagaggccaug

SEQ ID NO: 1844290 - RNA, 21 nt, Human
agacucgcgacaaugcaaacc

SEQ ID NO: 1844291 - RNA, 17 nt, Human
agacucuacagaggcca

SEQ ID NO: 1844292 - RNA, 15 nt, Human
ucuuuacuucaugga

SEQ ID NO: 1844293 - RNA, 18 nt, Human
ucugguccauagagagca

SEQ ID NO: 1844294 - RNA, 16 nt, Human
ucuggguuccuuccuc

SEQ ID NO: 1844295 - RNA, 11 nt, Human
ucuggggcugu

SEQ ID NO: 1844296 - RNA, 14 nt, Human
ucuggguucacugc

SEQ ID NO: 1844297 - RNA, 16 nt, Human
ucuggguucacugcaa

SEQ ID NO: 1844298 - RNA, 20 nt, Human
ucugucauuugagcagggcu

SEQ ID NO: 1844299 - RNA, 23 nt, Human
ucugucauuugagcagggcucag

SEQ ID NO: 1844300 - RNA, 15 nt, Human
ucugucauuugagca

SEQ ID NO: 1844301 - RNA, 18 nt, Human
agaauuucccaaagcagu

SEQ ID NO: 1844302 - RNA, 17 nt, Human
agaauuucccaaagcag

SEQ ID NO: 1844303 - RNA, 23 nt, Human
agaauuucccaaagcagugcaug

SEQ ID NO: 1844304 - RNA, 21 nt, Human
ucugugaaaggaaagagggag

SEQ ID NO: 1844305 - RNA, 15 nt, Human
ucugugaaaggaaag

SEQ ID NO: 1844306 - RNA, 24 nt, Human
ucuguccaggcacugcugcccagc

SEQ ID NO: 1844307 - RNA, 18 nt, Human
ucuguuggccagugugac

SEQ ID NO: 1844308 - RNA, 19 nt, Human
ucuguuggccagugugaca

SEQ ID NO: 1844309 - RNA, 20 nt, Human
ucuguuggccagugugacaa

SEQ ID NO: 1844310 - RNA, 22 nt, Human
agacagaaucucgcucugucgc

SEQ ID NO: 1844311 - RNA, 18 nt, Human
agacagaaucucgcucug

SEQ ID NO: 1844312 - RNA, 17 nt, Human
agacagucccugccaau

SEQ ID NO: 1844313 - RNA, 16 nt, Human
agacagucccugccaa

SEQ ID NO: 1844314 - RNA, 15 nt, Human
agacagucccugcca

SEQ ID NO: 1844315 - RNA, 19 nt, Human
agacagucccugccaaugg

SEQ ID NO: 1844316 - RNA, 19 nt, Human
agacaggguuucaccaugu

SEQ ID NO: 1844317 - RNA, 21 nt, Human
agacaggguuuugccauguug

SEQ ID NO: 1844318 - RNA, 16 nt, Human
agacaggaccagggau

SEQ ID NO: 1844319 - RNA, 15 nt, Human
agacaggaccaggga

SEQ ID NO: 1844320 - RNA, 23 nt, Human
agacaggcaagcaccuccugccu

SEQ ID NO: 1844321 - RNA, 14 nt, Human
ucuuaugggcuggg

SEQ ID NO: 1844322 - RNA, 16 nt, Human
ucuuaugggcuggguu

SEQ ID NO: 1844323 - RNA, 15 nt, Human
ucuuaugggcugggu

SEQ ID NO: 1844324 - RNA, 18 nt, Human
ucuuaugggcuggguucu

SEQ ID NO: 1844325 - RNA, 14 nt, Human
ucuuauugcccacg

SEQ ID NO: 1844326 - RNA, 18 nt, Human
ucuuauugcccacgcugg

SEQ ID NO: 1844327 - RNA, 22 nt, Human
ucuuauugcccacgcuggagug

SEQ ID NO: 1844328 - RNA, 17 nt, Human
ucuucaaaaugagcccu

SEQ ID NO: 1844329 - RNA, 22 nt, Human
ucuuccaggcugggagagccuu

SEQ ID NO: 1844330 - RNA, 18 nt, Human
acuuuaccuuuuuuauac

SEQ ID NO: 1844331 - RNA, 19 nt, Human
acuuuaccuuuuuuauaca

SEQ ID NO: 1844332 - RNA, 22 nt, Human
acuuuaccuuuuuuauacauaa

SEQ ID NO: 1844333 - RNA, 23 nt, Human
acuuuaccuuuuuuauacauaaa

SEQ ID NO: 1844334 - RNA, 19 nt, Human
acuuugaccucugcagcaa

SEQ ID NO: 1844335 - RNA, 23 nt, Human
acuuugaccucugcagcaauaaa

SEQ ID NO: 1844336 - RNA, 14 nt, Human
acuuuggaaagacu

SEQ ID NO: 1844337 - RNA, 13 nt, Human
acuuuggaaagac

SEQ ID NO: 1844338 - RNA, 19 nt, Human
acuuugaggguguauauuu

SEQ ID NO: 1844339 - RNA, 17 nt, Human
acuuuggaaagacuuuu

SEQ ID NO: 1844340 - RNA, 23 nt, Human
acuuuggaaagacuuuuccaacc

SEQ ID NO: 1844341 - RNA, 22 nt, Human
acuuuuuuuuuuuaagaguaaa

SEQ ID NO: 1844342 - RNA, 15 nt, Human
acuuuuuuuuaaguu

SEQ ID NO: 1844343 - RNA, 14 nt, Human
acuuuuggcauuuu

SEQ ID NO: 1844344 - RNA, 18 nt, Human
ucucccuuggauuguccc

SEQ ID NO: 1844345 - RNA, 11 nt, Human
ucucccuugga

SEQ ID NO: 1844346 - RNA, 18 nt, Human
ucucccaaagugcuggga

SEQ ID NO: 1844347 - RNA, 21 nt, Human
ucucccuuggauuguccccga

SEQ ID NO: 1844348 - RNA, 19 nt, Human
ucucccuuggauugucccc

SEQ ID NO: 1844349 - RNA, 12 nt, Human
ucuccucugcug

SEQ ID NO: 1844350 - RNA, 14 nt, Human
ucuccucugcugcu

SEQ ID NO: 1844351 - RNA, 13 nt, Human
ucuccucugcugc

SEQ ID NO: 1844352 - RNA, 21 nt, Human
acuuguugauuaauggaaaug

SEQ ID NO: 1844353 - RNA, 19 nt, Human
acuuguugauuaauggaaa

SEQ ID NO: 1844354 - RNA, 15 nt, Human
ucucuccagccccug

SEQ ID NO: 1844355 - RNA, 20 nt, Human
ucucuccuguaccucuugag

SEQ ID NO: 1844356 - RNA, 22 nt, Human
ucucuccuguaccucuugagcc

SEQ ID NO: 1844357 - RNA, 14 nt, Human
ucucuccagccccu

SEQ ID NO: 1844358 - RNA, 13 nt, Human
ucucuccagcccc

SEQ ID NO: 1844359 - RNA, 20 nt, Human
ucuccuucaccuuugucccc

SEQ ID NO: 1844360 - RNA, 14 nt, Human
ucucuugagagggu

SEQ ID NO: 1844361 - RNA, 21 nt, Human
ucucuucuggguuccuuccuc

SEQ ID NO: 1844362 - RNA, 20 nt, Human
ucucuucuggguuccuuccu

SEQ ID NO: 1844363 - RNA, 19 nt, Human
ucucuucuggguuccuucc

SEQ ID NO: 1844364 - RNA, 18 nt, Human
ucucuucuggguuccuuc

SEQ ID NO: 1844365 - RNA, 13 nt, Human
ucucuggccuucg

SEQ ID NO: 1844366 - RNA, 16 nt, Human
ucucuggccuucggcc

SEQ ID NO: 1844367 - RNA, 17 nt, Human
ucucuggccuucggccu

SEQ ID NO: 1844368 - RNA, 11 nt, Human
ucucugcccua

SEQ ID NO: 1844369 - RNA, 22 nt, Human
ucucugcccuaaugcgcaggcu

SEQ ID NO: 1844370 - RNA, 13 nt, Human
agaaacuggaacu

SEQ ID NO: 1844371 - RNA, 15 nt, Human
agaaacuggaacucu

SEQ ID NO: 1844372 - RNA, 15 nt, Human
agaaagaagaugaau

SEQ ID NO: 1844373 - RNA, 17 nt, Human
agaaaaaugagccuggc

SEQ ID NO: 1844374 - RNA, 19 nt, Human
agaaaaauaugaccacacu

SEQ ID NO: 1844375 - RNA, 15 nt, Human
ucucuugagccuggg

SEQ ID NO: 1844376 - RNA, 14 nt, Human
ucucuugagccugg

SEQ ID NO: 1844377 - RNA, 13 nt, Human
ucucuugagccug

SEQ ID NO: 1844378 - RNA, 22 nt, Human
ucucuuuaaugucacaggcagg

SEQ ID NO: 1844379 - RNA, 19 nt, Human
ucugauucccaagcucugc

SEQ ID NO: 1844380 - RNA, 20 nt, Human
ucugauucccaagcucugcu

SEQ ID NO: 1844381 - RNA, 21 nt, Human
ucugauucccaagcucugcuc

SEQ ID NO: 1844382 - RNA, 19 nt, Human
ucugacccugcuucaaaua

SEQ ID NO: 1844383 - RNA, 12 nt, Human
ucugcagagcag

SEQ ID NO: 1844384 - RNA, 11 nt, Human
agaaauguguu

SEQ ID NO: 1844385 - RNA, 17 nt, Human
agaaauguacagcaagg

SEQ ID NO: 1844386 - RNA, 16 nt, Human
agaaauguacagcaag

SEQ ID NO: 1844387 - RNA, 15 nt, Human
ucugcagaaacagaa

SEQ ID NO: 1844388 - RNA, 21 nt, Human
agaacucaugacggaagaguu

SEQ ID NO: 1844389 - RNA, 14 nt, Human
agaacucccuuuca

SEQ ID NO: 1844390 - RNA, 15 nt, Human
agaacucccuuucaa

SEQ ID NO: 1844391 - RNA, 17 nt, Human
ucugcucacauaucugu

SEQ ID NO: 1844392 - RNA, 16 nt, Human
ucugcucacauaucug

SEQ ID NO: 1844393 - RNA, 18 nt, Human
ucugcccuccaagaccuu

SEQ ID NO: 1844394 - RNA, 14 nt, Human
ucugcccuccaaga

SEQ ID NO: 1844395 - RNA, 15 nt, Human
ucuggcagcucagag

SEQ ID NO: 1844396 - RNA, 14 nt, Human
ucuggcagcucaga

SEQ ID NO: 1844397 - RNA, 18 nt, Human
ucuggauuauauuaugaa

SEQ ID NO: 1844398 - RNA, 12 nt, Human
ucuggauuauau

SEQ ID NO: 1844399 - RNA, 18 nt, Human
ucuggagguacgaaaaga

SEQ ID NO: 1844400 - RNA, 16 nt, Human
ucuggcagcucagaga

SEQ ID NO: 1844401 - RNA, 16 nt, Human
agaagcggcuggcagc

SEQ ID NO: 1844402 - RNA, 15 nt, Human
agaagcggcuggcag

SEQ ID NO: 1844403 - RNA, 19 nt, Human
ugcagugagccgagauugu

SEQ ID NO: 1844404 - RNA, 12 nt, Human
ugcaguuuuccu

SEQ ID NO: 1844405 - RNA, 11 nt, Human
ugcauaaaaug

SEQ ID NO: 1844406 - RNA, 15 nt, Human
ugcauaauggucaga

SEQ ID NO: 1844407 - RNA, 20 nt, Human
ugcaggucccuaauaaagcu

SEQ ID NO: 1844408 - RNA, 19 nt, Human
ugcaggucccuaauaaagc

SEQ ID NO: 1844409 - RNA, 18 nt, Human
ugcaggucccuaauaaag

SEQ ID NO: 1844410 - RNA, 14 nt, Human
ugcagugagccgag

SEQ ID NO: 1844411 - RNA, 17 nt, Human
ugcaggucccuaauaaa

SEQ ID NO: 1844412 - RNA, 21 nt, Human
ugcaggucccuaauaaagcug

SEQ ID NO: 1844413 - RNA, 17 nt, Human
agccucaaccuccuggg

SEQ ID NO: 1844414 - RNA, 18 nt, Human
agccucaaccuccugggc

SEQ ID NO: 1844415 - RNA, 13 nt, Human
agccucagcaucc

SEQ ID NO: 1844416 - RNA, 14 nt, Human
agccucagcauccu

SEQ ID NO: 1844417 - RNA, 16 nt, Human
agccucagcauccugg

SEQ ID NO: 1844418 - RNA, 15 nt, Human
agccucagcauccug

SEQ ID NO: 1844419 - RNA, 18 nt, Human
agccugagcgacagugag

SEQ ID NO: 1844420 - RNA, 18 nt, Human
ugcagccucaaccuccug

SEQ ID NO: 1844421 - RNA, 19 nt, Human
ugcagccucaaccuccugg

SEQ ID NO: 1844422 - RNA, 19 nt, Human
agccugagcgacagugaga

SEQ ID NO: 1844423 - RNA, 19 nt, Human
agccugaucaccugcccug

SEQ ID NO: 1844424 - RNA, 16 nt, Human
ugcaugcugucccuua

SEQ ID NO: 1844425 - RNA, 18 nt, Human
agccugaucaccugcccu

SEQ ID NO: 1844426 - RNA, 19 nt, Human
agccugccucuucucuacu

SEQ ID NO: 1844427 - RNA, 16 nt, Human
agccugccucuucucu

SEQ ID NO: 1844428 - RNA, 12 nt, Human
agccugcccucc

SEQ ID NO: 1844429 - RNA, 23 nt, Human
agccugcaguuauuaacacuaac

SEQ ID NO: 1844430 - RNA, 21 nt, Human
ugcaugaggcuaguguggugu

SEQ ID NO: 1844431 - RNA, 22 nt, Human
ugcaugaaguaauaugcacaca

SEQ ID NO: 1844432 - RNA, 20 nt, Human
ugcaugaaguaauaugcaca

SEQ ID NO: 1844433 - RNA, 15 nt, Human
ugcaugcugucccuu

SEQ ID NO: 1844434 - RNA, 14 nt, Human
ugcaugcugucccu

SEQ ID NO: 1844435 - RNA, 13 nt, Human
ugcaugcuguccc

SEQ ID NO: 1844436 - RNA, 21 nt, Human
ugcauaccacuuuuguucuug

SEQ ID NO: 1844437 - RNA, 22 nt, Human
ugcauaccacuuuuguucuugg

SEQ ID NO: 1844438 - RNA, 23 nt, Human
ugcacaagcuccaagcucccagg

SEQ ID NO: 1844439 - RNA, 22 nt, Human
ugcacaagcuccaagcucccag

SEQ ID NO: 1844440 - RNA, 20 nt, Human
ugcacaagcuccaagcuccc

SEQ ID NO: 1844441 - RNA, 18 nt, Human
ugcacaagcuccaagcuc

SEQ ID NO: 1844442 - RNA, 16 nt, Human
ugcacaagcuccaagc

SEQ ID NO: 1844443 - RNA, 15 nt, Human
ugcacaagcuccaag

SEQ ID NO: 1844444 - RNA, 14 nt, Human
ugcacaagcugcac

SEQ ID NO: 1844445 - RNA, 15 nt, Human
ugcacacaccagagc

SEQ ID NO: 1844446 - RNA, 15 nt, Human
ugcaccacugcacuc

SEQ ID NO: 1844447 - RNA, 17 nt, Human
ugcacguauuuuaauag

SEQ ID NO: 1844448 - RNA, 14 nt, Human
ugcaccacugcacu

SEQ ID NO: 1844449 - RNA, 13 nt, Human
ugcacuccccugc

SEQ ID NO: 1844450 - RNA, 12 nt, Human
ugcacuccccug

SEQ ID NO: 1844451 - RNA, 22 nt, Human
ugcacuauagccuaggugacag

SEQ ID NO: 1844452 - RNA, 23 nt, Human
agccguuuguuccccaagacauu

SEQ ID NO: 1844453 - RNA, 15 nt, Human
agccuaggugacaga

SEQ ID NO: 1844454 - RNA, 17 nt, Human
agccuaggugacagagu

SEQ ID NO: 1844455 - RNA, 15 nt, Human
agccucaaccuccug

SEQ ID NO: 1844456 - RNA, 14 nt, Human
agcccuucauuugg

SEQ ID NO: 1844457 - RNA, 13 nt, Human
agcccuucauuug

SEQ ID NO: 1844458 - RNA, 23 nt, Human
agcccuuccaugucgccucugca

SEQ ID NO: 1844459 - RNA, 22 nt, Human
agcccuuccaugucgccucugc

SEQ ID NO: 1844460 - RNA, 19 nt, Human
agcccuuccaugucgccuc

SEQ ID NO: 1844461 - RNA, 22 nt, Human
ugcagacucuacagaggccaug

SEQ ID NO: 1844462 - RNA, 15 nt, Human
ugcacuccccugcug

SEQ ID NO: 1844463 - RNA, 19 nt, Human
ugcagacucuacagaggcc

SEQ ID NO: 1844464 - RNA, 20 nt, Human
ugcagacucuacagaggcca

SEQ ID NO: 1844465 - RNA, 18 nt, Human
ugccccgucccccucugg

SEQ ID NO: 1844466 - RNA, 16 nt, Human
ugccccgucccccucu

SEQ ID NO: 1844467 - RNA, 19 nt, Human
ugccccucaacucuccucc

SEQ ID NO: 1844468 - RNA, 12 nt, Human
ugccccccagcc

SEQ ID NO: 1844469 - RNA, 17 nt, Human
ugcccaggccugccugu

SEQ ID NO: 1844470 - RNA, 15 nt, Human
ugcccaggccugccu

SEQ ID NO: 1844471 - RNA, 12 nt, Human
ugcccaggcccc

SEQ ID NO: 1844472 - RNA, 14 nt, Human
ugcccaggccccug

SEQ ID NO: 1844473 - RNA, 20 nt, Human
ugcccaggccccugccaccc

SEQ ID NO: 1844474 - RNA, 22 nt, Human
ugcccaggccccugccacccug

SEQ ID NO: 1844475 - RNA, 14 nt, Human
ugcccacaggauca

SEQ ID NO: 1844476 - RNA, 15 nt, Human
ugcccaggcaggucu

SEQ ID NO: 1844477 - RNA, 16 nt, Human
ugcccaggcaggucuu

SEQ ID NO: 1844478 - RNA, 17 nt, Human
ugcccaggcaggucuug

SEQ ID NO: 1844479 - RNA, 20 nt, Human
ugcccaggcaggucuugaac

SEQ ID NO: 1844480 - RNA, 11 nt, Human
ugcccaggccc

SEQ ID NO: 1844481 - RNA, 22 nt, Human
ugcccaaccugcucuccucuug

SEQ ID NO: 1844482 - RNA, 18 nt, Human
ugcccaaccugcucuccu

SEQ ID NO: 1844483 - RNA, 24 nt, Human
ugcccaaccugcucuccucuugcc

SEQ ID NO: 1844484 - RNA, 23 nt, Human
ugcccaaccugcucuccucuugc

SEQ ID NO: 1844485 - RNA, 18 nt, Human
agcucagggccuggcuca

SEQ ID NO: 1844486 - RNA, 20 nt, Human
ugccauguuggccaggcugg

SEQ ID NO: 1844487 - RNA, 21 nt, Human
ugccauguuggccaggcuggu

SEQ ID NO: 1844488 - RNA, 16 nt, Human
agcucagggccuggcu

SEQ ID NO: 1844489 - RNA, 15 nt, Human
agcucagggccuggc

SEQ ID NO: 1844490 - RNA, 17 nt, Human
agcucagggccuggcuc

SEQ ID NO: 1844491 - RNA, 17 nt, Human
ugccauguuggccaggc

SEQ ID NO: 1844492 - RNA, 18 nt, Human
ugccauguuggccaggcu

SEQ ID NO: 1844493 - RNA, 19 nt, Human
ugccauguuggccaggcug

SEQ ID NO: 1844494 - RNA, 19 nt, Human
agcuauggugucauaggcu

SEQ ID NO: 1844495 - RNA, 20 nt, Human
ugccagucaccccggccacc

SEQ ID NO: 1844496 - RNA, 18 nt, Human
ugccagucaccccggcca

SEQ ID NO: 1844497 - RNA, 16 nt, Human
ugccagucaccccggc

SEQ ID NO: 1844498 - RNA, 15 nt, Human
ugccagucaccccgg

SEQ ID NO: 1844499 - RNA, 12 nt, Human
ugccacacuuca

SEQ ID NO: 1844500 - RNA, 23 nt, Human
ugccacugccucuuccucccuca

SEQ ID NO: 1844501 - RNA, 23 nt, Human
ugccagucaccccggccaccugc

SEQ ID NO: 1844502 - RNA, 22 nt, Human
ugccagucaccccggccaccug

SEQ ID NO: 1844503 - RNA, 17 nt, Human
ugccagucccccugccc

SEQ ID NO: 1844504 - RNA, 19 nt, Human
ugccagucccccugcccca

SEQ ID NO: 1844505 - RNA, 15 nt, Human
ugccauauucuguug

SEQ ID NO: 1844506 - RNA, 16 nt, Human
ugccauauucuguugg

SEQ ID NO: 1844507 - RNA, 17 nt, Human
ugccauauucuguuggc

SEQ ID NO: 1844508 - RNA, 15 nt, Human
agcgugagccacugc

SEQ ID NO: 1844509 - RNA, 16 nt, Human
agcggggacagcuccu

SEQ ID NO: 1844510 - RNA, 17 nt, Human
agcggggacagcuccuu

SEQ ID NO: 1844511 - RNA, 15 nt, Human
agcggggacagcucc

SEQ ID NO: 1844512 - RNA, 20 nt, Human
ugccauauucuguuggccag

SEQ ID NO: 1844513 - RNA, 21 nt, Human
ugccauauucuguuggccagu

SEQ ID NO: 1844514 - RNA, 23 nt, Human
agcgugguggacaugcacagcua

SEQ ID NO: 1844515 - RNA, 20 nt, Human
agcgugguggacaugcacag

SEQ ID NO: 1844516 - RNA, 16 nt, Human
agcgugagccacugca

SEQ ID NO: 1844517 - RNA, 17 nt, Human
agcgugagccacugcac

SEQ ID NO: 1844518 - RNA, 20 nt, Human
agcgcccacuagacccacug

SEQ ID NO: 1844519 - RNA, 14 nt, Human
agccugcuccagcu

SEQ ID NO: 1844520 - RNA, 14 nt, Human
agcgcccaguuggg

SEQ ID NO: 1844521 - RNA, 22 nt, Human
agcgcccaguuggguggaugcc

SEQ ID NO: 1844522 - RNA, 19 nt, Human
ugcauuugaaaauuuugau

SEQ ID NO: 1844523 - RNA, 23 nt, Human
ugcauuugaaaauuuugauguuu

SEQ ID NO: 1844524 - RNA, 13 nt, Human
ugcauuuccugac

SEQ ID NO: 1844525 - RNA, 14 nt, Human
ugcauuuccugaca

SEQ ID NO: 1844526 - RNA, 14 nt, Human
ugccucucucaggc

SEQ ID NO: 1844527 - RNA, 13 nt, Human
ugccucucucagg

SEQ ID NO: 1844528 - RNA, 19 nt, Human
ugccucccaucacccgcua

SEQ ID NO: 1844529 - RNA, 14 nt, Human
ugccucccaucacc

SEQ ID NO: 1844530 - RNA, 13 nt, Human
ugccucccaucac

SEQ ID NO: 1844531 - RNA, 15 nt, Human
ugccucucucaggcc

SEQ ID NO: 1844532 - RNA, 16 nt, Human
ugccucucucaggcca

SEQ ID NO: 1844533 - RNA, 18 nt, Human
ugccucucugcagguccc

SEQ ID NO: 1844534 - RNA, 16 nt, Human
ugccucucugcagguc

SEQ ID NO: 1844535 - RNA, 20 nt, Human
ugccucucugcaggucccua

SEQ ID NO: 1844536 - RNA, 19 nt, Human
ugccucucugcaggucccu

SEQ ID NO: 1844537 - RNA, 20 nt, Human
ugccucugacacacagcucu

SEQ ID NO: 1844538 - RNA, 21 nt, Human
ugccucugacacacagcucug

SEQ ID NO: 1844539 - RNA, 15 nt, Human
ugcccuuucugggca

SEQ ID NO: 1844540 - RNA, 18 nt, Human
agcugcauacaguuugca

SEQ ID NO: 1844541 - RNA, 13 nt, Human
agcugccaccugc

SEQ ID NO: 1844542 - RNA, 14 nt, Human
agcugccagccgag

SEQ ID NO: 1844543 - RNA, 20 nt, Human
ugcccuccaagaccuucucc

SEQ ID NO: 1844544 - RNA, 19 nt, Human
ugcccuccaagaccuucuc

SEQ ID NO: 1844545 - RNA, 22 nt, Human
ugcccuccaagaccuucuccuu

SEQ ID NO: 1844546 - RNA, 17 nt, Human
agcucuaucaccaagga

SEQ ID NO: 1844547 - RNA, 22 nt, Human
agcucuaucaccaaggagccaa

SEQ ID NO: 1844548 - RNA, 16 nt, Human
agcucucuccucccuu

SEQ ID NO: 1844549 - RNA, 20 nt, Human
agcucugguccauagagagc

SEQ ID NO: 1844550 - RNA, 22 nt, Human
agcucugcuccucuccccagca

SEQ ID NO: 1844551 - RNA, 12 nt, Human
agcucugcuccu

SEQ ID NO: 1844552 - RNA, 22 nt, Human
agcugcacccucaggcaggugg

SEQ ID NO: 1844553 - RNA, 20 nt, Human
agcugcacccucaggcaggu

SEQ ID NO: 1844554 - RNA, 19 nt, Human
agcugcacccucaggcagg

SEQ ID NO: 1844555 - RNA, 18 nt, Human
agcugcacccucaggcag

SEQ ID NO: 1844556 - RNA, 17 nt, Human
agcugcacccucaggca

SEQ ID NO: 1844557 - RNA, 13 nt, Human
agcugcacccuca

SEQ ID NO: 1844558 - RNA, 18 nt, Human
agcucuucuccaggcugu

SEQ ID NO: 1844559 - RNA, 12 nt, Human
agcucuguccug

SEQ ID NO: 1844560 - RNA, 14 nt, Human
agcucuguccuggg

SEQ ID NO: 1844561 - RNA, 14 nt, Human
agcugggcagguug

SEQ ID NO: 1844562 - RNA, 23 nt, Human
agcugggauuacaggcuccugcc

SEQ ID NO: 1844563 - RNA, 22 nt, Human
agcugggauuacaggcuccugc

SEQ ID NO: 1844564 - RNA, 17 nt, Human
agcuggggccaggcugg

SEQ ID NO: 1844565 - RNA, 23 nt, Human
agcugggaugauuggagggggga

SEQ ID NO: 1844566 - RNA, 21 nt, Human
agcugggauuacaggcuccug

SEQ ID NO: 1844567 - RNA, 18 nt, Human
agcugggauuacaggcuc

SEQ ID NO: 1844568 - RNA, 22 nt, Human
agcugggaucacauguggacuu

SEQ ID NO: 1844569 - RNA, 17 nt, Human
agcugggacuacaggug

SEQ ID NO: 1844570 - RNA, 19 nt, Human
agcugggacuacaggugug

SEQ ID NO: 1844571 - RNA, 22 nt, Human
ugccucugacacacagcucugu

SEQ ID NO: 1844572 - RNA, 19 nt, Human
agcugccugggaucccuca

SEQ ID NO: 1844573 - RNA, 13 nt, Human
agcugccugggau

SEQ ID NO: 1844574 - RNA, 21 nt, Human
agcugccugggaucccucauc

SEQ ID NO: 1844575 - RNA, 17 nt, Human
agcuggagaaauauggu

SEQ ID NO: 1844576 - RNA, 10 nt, Human
agcugccugu

SEQ ID NO: 1844577 - RNA, 20 nt, Human
agcuggggccaggcuggguc

SEQ ID NO: 1844578 - RNA, 17 nt, Human
ugccuuagaaccuuucu

SEQ ID NO: 1844579 - RNA, 14 nt, Human
ugccuuagaaccuu

SEQ ID NO: 1844580 - RNA, 21 nt, Human
ugccuuagaaccuuucuuaca

SEQ ID NO: 1844581 - RNA, 15 nt, Human
ugccuguucagcucc

SEQ ID NO: 1844582 - RNA, 16 nt, Human
ugccuguucagcucca

SEQ ID NO: 1844583 - RNA, 17 nt, Human
ugccuguucagcuccag

SEQ ID NO: 1844584 - RNA, 19 nt, Human
ugcgaaaggaugaaaguga

SEQ ID NO: 1844585 - RNA, 18 nt, Human
ugcggacagccacggcca

SEQ ID NO: 1844586 - RNA, 13 nt, Human
ugcgaaaggauga

SEQ ID NO: 1844587 - RNA, 19 nt, Human
agcuuugaaaauucagugg

SEQ ID NO: 1844588 - RNA, 18 nt, Human
agcuuugaaaauucagug

SEQ ID NO: 1844589 - RNA, 16 nt, Human
agcuuugaaaauucag

SEQ ID NO: 1844590 - RNA, 12 nt, Human
agcuuugaaaau

SEQ ID NO: 1844591 - RNA, 17 nt, Human
aggaaacccagcucugg

SEQ ID NO: 1844592 - RNA, 16 nt, Human
aggaaacccagcucug

SEQ ID NO: 1844593 - RNA, 15 nt, Human
aggaaacccagcucu

SEQ ID NO: 1844594 - RNA, 20 nt, Human
aggaaacccagcucuggucc

SEQ ID NO: 1844595 - RNA, 18 nt, Human
aggaaacccagcucuggu

SEQ ID NO: 1844596 - RNA, 21 nt, Human
aggaaacccagcucuggucca

SEQ ID NO: 1844597 - RNA, 23 nt, Human
aggaaaccaguuaggucucaaua

SEQ ID NO: 1844598 - RNA, 21 nt, Human
ugcuauaacuauguugauaaa

SEQ ID NO: 1844599 - RNA, 19 nt, Human
aggaaagcaaaggagauug

SEQ ID NO: 1844600 - RNA, 17 nt, Human
aggaaagcaaaggagau

SEQ ID NO: 1844601 - RNA, 16 nt, Human
aggaaagaggcucugg

SEQ ID NO: 1844602 - RNA, 13 nt, Human
aggaaagaggcuc

SEQ ID NO: 1844603 - RNA, 12 nt, Human
aggaaagaggcu

SEQ ID NO: 1844604 - RNA, 15 nt, Human
agcuuaucucagggg

SEQ ID NO: 1844605 - RNA, 14 nt, Human
agcuuaucucaggg

SEQ ID NO: 1844606 - RNA, 12 nt, Human
agcuuaucucag

SEQ ID NO: 1844607 - RNA, 20 nt, Human
agcuuaaaggggcuagagug

SEQ ID NO: 1844608 - RNA, 20 nt, Human
ugcggacagccacggccagg

SEQ ID NO: 1844609 - RNA, 21 nt, Human
ugcggacagccacggccaggc

SEQ ID NO: 1844610 - RNA, 19 nt, Human
agcuuguaaauagcucagg

SEQ ID NO: 1844611 - RNA, 20 nt, Human
agcuuguaaauagcucaggu

SEQ ID NO: 1844612 - RNA, 21 nt, Human
agcuuguaaauagcucaggug

SEQ ID NO: 1844613 - RNA, 22 nt, Human
aggaauuuuauuuuuuucugaa

SEQ ID NO: 1844614 - RNA, 19 nt, Human
ugcugccacacuucaggcu

SEQ ID NO: 1844615 - RNA, 16 nt, Human
ugcugccacacuucag

SEQ ID NO: 1844616 - RNA, 15 nt, Human
ugcugccacacuuca

SEQ ID NO: 1844617 - RNA, 22 nt, Human
ugcugccacacuucaggcucuu

SEQ ID NO: 1844618 - RNA, 11 nt, Human
ugcugccaucc

SEQ ID NO: 1844619 - RNA, 16 nt, Human
ugcugcccagccucca

SEQ ID NO: 1844620 - RNA, 14 nt, Human
ugcugcccagccuc

SEQ ID NO: 1844621 - RNA, 21 nt, Human
ugcugccauccagguucagcu

SEQ ID NO: 1844622 - RNA, 22 nt, Human
ugcugccauccagguucagcuu

SEQ ID NO: 1844623 - RNA, 12 nt, Human
ugcugccaucca

SEQ ID NO: 1844624 - RNA, 13 nt, Human
ugcugccauccag

SEQ ID NO: 1844625 - RNA, 14 nt, Human
ugcugccauccagg

SEQ ID NO: 1844626 - RNA, 15 nt, Human
ugcugccauccaggu

SEQ ID NO: 1844627 - RNA, 15 nt, Human
aggaagacuuuggaa

SEQ ID NO: 1844628 - RNA, 14 nt, Human
aggaagagaaaaaa

SEQ ID NO: 1844629 - RNA, 22 nt, Human
aggaagcucagggccuggcuca

SEQ ID NO: 1844630 - RNA, 18 nt, Human
aggaagcucagggccugg

SEQ ID NO: 1844631 - RNA, 17 nt, Human
aggaagcucagggccug

SEQ ID NO: 1844632 - RNA, 19 nt, Human
aggaauugacccacaagaa

SEQ ID NO: 1844633 - RNA, 23 nt, Human
aggaauccagacccggcugcgug

SEQ ID NO: 1844634 - RNA, 23 nt, Human
aggaaaggcuccaggagcagcca

SEQ ID NO: 1844635 - RNA, 22 nt, Human
aggaaaggcuccaggagcagcc

SEQ ID NO: 1844636 - RNA, 20 nt, Human
aggaaaggcuccaggagcag

SEQ ID NO: 1844637 - RNA, 18 nt, Human
aggaaaggcuccaggagc

SEQ ID NO: 1844638 - RNA, 22 nt, Human
ugcugagucccaggcugagccu

SEQ ID NO: 1844639 - RNA, 18 nt, Human
ugcugagucccaggcuga

SEQ ID NO: 1844640 - RNA, 15 nt, Human
ugcugagucccaggc

SEQ ID NO: 1844641 - RNA, 24 nt, Human
ugcugacuguuuucucuugagagg

SEQ ID NO: 1844642 - RNA, 21 nt, Human
ugcugacuguuuucucuugag

SEQ ID NO: 1844643 - RNA, 19 nt, Human
ugcucugaugaagaggagu

SEQ ID NO: 1844644 - RNA, 18 nt, Human
ugcucugaugaagaggag

SEQ ID NO: 1844645 - RNA, 22 nt, Human
ugcucugaucauccacugugcc

SEQ ID NO: 1844646 - RNA, 19 nt, Human
ugcucugaucauccacugu

SEQ ID NO: 1844647 - RNA, 18 nt, Human
ugcucugcauguuacaua

SEQ ID NO: 1844648 - RNA, 15 nt, Human
ugcucugcauguuac

SEQ ID NO: 1844649 - RNA, 17 nt, Human
ugcucuggacaggcaug

SEQ ID NO: 1844650 - RNA, 17 nt, Human
ugcugacuguuuucucu

SEQ ID NO: 1844651 - RNA, 13 nt, Human
aggccuggccaga

SEQ ID NO: 1844652 - RNA, 12 nt, Human
aggccuggccag

SEQ ID NO: 1844653 - RNA, 17 nt, Human
aggcccggcuccaggcu

SEQ ID NO: 1844654 - RNA, 14 nt, Human
aggcccggcuccag

SEQ ID NO: 1844655 - RNA, 15 nt, Human
aggcccggcuccagg

SEQ ID NO: 1844656 - RNA, 16 nt, Human
aggcccggcuccaggc

SEQ ID NO: 1844657 - RNA, 20 nt, Human
aggcccagagggccugcaag

SEQ ID NO: 1844658 - RNA, 19 nt, Human
aggcccagagggccugcaa

SEQ ID NO: 1844659 - RNA, 13 nt, Human
aggccccugccac

SEQ ID NO: 1844660 - RNA, 15 nt, Human
aggccccugccaccc

SEQ ID NO: 1844661 - RNA, 17 nt, Human
aggccccugccacccug

SEQ ID NO: 1844662 - RNA, 18 nt, Human
aggccccugccacccugg

SEQ ID NO: 1844663 - RNA, 21 nt, Human
aggccccugccacccugggga

SEQ ID NO: 1844664 - RNA, 15 nt, Human
uggcacagggcagug

SEQ ID NO: 1844665 - RNA, 16 nt, Human
uggcacagggcagugg

SEQ ID NO: 1844666 - RNA, 17 nt, Human
uggcaccagcagccugg

SEQ ID NO: 1844667 - RNA, 16 nt, Human
uggcaccagcagccug

SEQ ID NO: 1844668 - RNA, 17 nt, Human
uggcagccgugccuuca

SEQ ID NO: 1844669 - RNA, 18 nt, Human
aggccagagacacaagcc

SEQ ID NO: 1844670 - RNA, 13 nt, Human
aggccagagacac

SEQ ID NO: 1844671 - RNA, 18 nt, Human
uggcagcucagagagggu

SEQ ID NO: 1844672 - RNA, 16 nt, Human
uggcagcucagagagg

SEQ ID NO: 1844673 - RNA, 15 nt, Human
uggcagcucagagag

SEQ ID NO: 1844674 - RNA, 14 nt, Human
uggcagcucagaga

SEQ ID NO: 1844675 - RNA, 21 nt, Human
uggcagccgugccuucagcuc

SEQ ID NO: 1844676 - RNA, 20 nt, Human
uggcagccgugccuucagcu

SEQ ID NO: 1844677 - RNA, 19 nt, Human
uggcagccgugccuucagc

SEQ ID NO: 1844678 - RNA, 18 nt, Human
uggcagccgugccuucag

SEQ ID NO: 1844679 - RNA, 16 nt, Human
aggcccagagggccug

SEQ ID NO: 1844680 - RNA, 15 nt, Human
aggcccagagggccu

SEQ ID NO: 1844681 - RNA, 20 nt, Human
aggccauuccccgucucugg

SEQ ID NO: 1844682 - RNA, 23 nt, Human
aggccagagacacaagccuucgg

SEQ ID NO: 1844683 - RNA, 22 nt, Human
uggcagccgugccuucagcucu

SEQ ID NO: 1844684 - RNA, 18 nt, Human
aggccaugggccuccugu

SEQ ID NO: 1844685 - RNA, 19 nt, Human
uggccucugcacuccccug

SEQ ID NO: 1844686 - RNA, 20 nt, Human
uggccucugcacuccccugc

SEQ ID NO: 1844687 - RNA, 21 nt, Human
uggccucugcugauccuccca

SEQ ID NO: 1844688 - RNA, 13 nt, Human
uggcccugcccug

SEQ ID NO: 1844689 - RNA, 12 nt, Human
uggcccugcccu

SEQ ID NO: 1844690 - RNA, 14 nt, Human
uggcccacugcauc

SEQ ID NO: 1844691 - RNA, 13 nt, Human
uggcccacugcau

SEQ ID NO: 1844692 - RNA, 19 nt, Human
uggcccacgcacuucggga

SEQ ID NO: 1844693 - RNA, 22 nt, Human
uggcaugggaaugaaugucagu

SEQ ID NO: 1844694 - RNA, 14 nt, Human
aggcgccccuuccc

SEQ ID NO: 1844695 - RNA, 17 nt, Human
aggccuucucugaagga

SEQ ID NO: 1844696 - RNA, 18 nt, Human
aggccuucucugaaggac

SEQ ID NO: 1844697 - RNA, 11 nt, Human
aggcuccacuu

SEQ ID NO: 1844698 - RNA, 17 nt, Human
aggcuccacuuggucug

SEQ ID NO: 1844699 - RNA, 21 nt, Human
aggcuccacuuggucugugag

SEQ ID NO: 1844700 - RNA, 22 nt, Human
aggcuccacuuggucugugaga

SEQ ID NO: 1844701 - RNA, 16 nt, Human
aggcuccaggagcagc

SEQ ID NO: 1844702 - RNA, 14 nt, Human
aggcuccaggagca

SEQ ID NO: 1844703 - RNA, 13 nt, Human
aggcuccaggagc

SEQ ID NO: 1844704 - RNA, 21 nt, Human
aggcaggucuugaacuccugg

SEQ ID NO: 1844705 - RNA, 22 nt, Human
aggcagggucucacucugucgc

SEQ ID NO: 1844706 - RNA, 14 nt, Human
aggcagguccaggg

SEQ ID NO: 1844707 - RNA, 19 nt, Human
aggcagggucucacucugu

SEQ ID NO: 1844708 - RNA, 18 nt, Human
aggcagggucucacucug

SEQ ID NO: 1844709 - RNA, 20 nt, Human
aggcagggucucacucuguc

SEQ ID NO: 1844710 - RNA, 21 nt, Human
aggcagggucucacucugucg

SEQ ID NO: 1844711 - RNA, 16 nt, Human
aggcagggagggccug

SEQ ID NO: 1844712 - RNA, 12 nt, Human
aggcaggauggc

SEQ ID NO: 1844713 - RNA, 20 nt, Human
aggcaggaguuucguuuuca

SEQ ID NO: 1844714 - RNA, 15 nt, Human
aggcacccaccauca

SEQ ID NO: 1844715 - RNA, 19 nt, Human
aggcagccccauucugccu

SEQ ID NO: 1844716 - RNA, 20 nt, Human
aggcagccccauucugccug

SEQ ID NO: 1844717 - RNA, 21 nt, Human
aggcagccccauucugccugc

SEQ ID NO: 1844718 - RNA, 22 nt, Human
aggcagccccauucugccugcc

SEQ ID NO: 1844719 - RNA, 24 nt, Human
uggacuuuguuaguuucuccaagc

SEQ ID NO: 1844720 - RNA, 16 nt, Human
uggagcccacuguacu

SEQ ID NO: 1844721 - RNA, 23 nt, Human
uggagcccacuguacuugcucuu

SEQ ID NO: 1844722 - RNA, 19 nt, Human
uggagcccacuguacuugc

SEQ ID NO: 1844723 - RNA, 11 nt, Human
uggacuuuguu

SEQ ID NO: 1844724 - RNA, 22 nt, Human
uggacuuuguuaguuucuccaa

SEQ ID NO: 1844725 - RNA, 23 nt, Human
uggaggaaaaccaagccguggcu

SEQ ID NO: 1844726 - RNA, 21 nt, Human
uggaggaaaaccaagccgugg

SEQ ID NO: 1844727 - RNA, 15 nt, Human
aggcaaugcuggcug

SEQ ID NO: 1844728 - RNA, 16 nt, Human
aggcaaugcuggcugu

SEQ ID NO: 1844729 - RNA, 14 nt, Human
uggaagugcuaauu

SEQ ID NO: 1844730 - RNA, 15 nt, Human
aggaggccagccuug

SEQ ID NO: 1844731 - RNA, 21 nt, Human
aggaguuugagaccaaccugg

SEQ ID NO: 1844732 - RNA, 19 nt, Human
aggaguuucguuuucaaaa

SEQ ID NO: 1844733 - RNA, 17 nt, Human
uggaaguaguggagccc

SEQ ID NO: 1844734 - RNA, 14 nt, Human
uggaaguaguggag

SEQ ID NO: 1844735 - RNA, 20 nt, Human
uggaaguacuauaauuuacc

SEQ ID NO: 1844736 - RNA, 12 nt, Human
uggaacacucug

SEQ ID NO: 1844737 - RNA, 14 nt, Human
uggaacacucugag

SEQ ID NO: 1844738 - RNA, 13 nt, Human
uggaagcuccgcu

SEQ ID NO: 1844739 - RNA, 12 nt, Human
ugcugcccugcc

SEQ ID NO: 1844740 - RNA, 10 nt, Human
ugcugcccug

SEQ ID NO: 1844741 - RNA, 12 nt, Human
aggaucucuuga

SEQ ID NO: 1844742 - RNA, 15 nt, Human
aggaugcuuguacau

SEQ ID NO: 1844743 - RNA, 16 nt, Human
aggaugcuuguacaua

SEQ ID NO: 1844744 - RNA, 21 nt, Human
aggauccugagccagauuuca

SEQ ID NO: 1844745 - RNA, 12 nt, Human
aggaucagucug

SEQ ID NO: 1844746 - RNA, 18 nt, Human
aggaugcuuguacauaau

SEQ ID NO: 1844747 - RNA, 22 nt, Human
aggauugcuacuguccuaccca

SEQ ID NO: 1844748 - RNA, 14 nt, Human
uggaauuugaaaca

SEQ ID NO: 1844749 - RNA, 16 nt, Human
aggcaacuugggaacu

SEQ ID NO: 1844750 - RNA, 19 nt, Human
aggcaacugcauuggcuuu

SEQ ID NO: 1844751 - RNA, 14 nt, Human
aggcaagcaccucc

SEQ ID NO: 1844752 - RNA, 15 nt, Human
uggacaccggaaaca

SEQ ID NO: 1844753 - RNA, 22 nt, Human
aggcugggggaagaagcucucu

SEQ ID NO: 1844754 - RNA, 10 nt, Human
aggcuggguc

SEQ ID NO: 1844755 - RNA, 18 nt, Human
aggcugggucgcccugga

SEQ ID NO: 1844756 - RNA, 15 nt, Human
aggcugggucgcccu

SEQ ID NO: 1844757 - RNA, 17 nt, Human
aggcuggguucugaucc

SEQ ID NO: 1844758 - RNA, 14 nt, Human
aggcuggguucuga

SEQ ID NO: 1844759 - RNA, 21 nt, Human
aggcugggucgcccuggacug

SEQ ID NO: 1844760 - RNA, 20 nt, Human
aggcugggucgcccuggacu

SEQ ID NO: 1844761 - RNA, 18 nt, Human
aggcugggcuucaguggc

SEQ ID NO: 1844762 - RNA, 19 nt, Human
aggcugggcuucaguggca

SEQ ID NO: 1844763 - RNA, 20 nt, Human
aggcugggcuucaguggcag

SEQ ID NO: 1844764 - RNA, 21 nt, Human
aggcugggcuucaguggcagc

SEQ ID NO: 1844765 - RNA, 17 nt, Human
aggcugggggaagaagc

SEQ ID NO: 1844766 - RNA, 22 nt, Human
aggcugggcuucaguggcagcu

SEQ ID NO: 1844767 - RNA, 23 nt, Human
aggcugggcuucaguggcagcug

SEQ ID NO: 1844768 - RNA, 16 nt, Human
aggcugggagagccuu

SEQ ID NO: 1844769 - RNA, 19 nt, Human
aggcugggagagccuucca

SEQ ID NO: 1844770 - RNA, 21 nt, Human
aggcugggagagccuuccagg

SEQ ID NO: 1844771 - RNA, 20 nt, Human
aggcugggagagccuuccag

SEQ ID NO: 1844772 - RNA, 22 nt, Human
aggcugggagagccuuccaggg

SEQ ID NO: 1844773 - RNA, 18 nt, Human
aggcugggcucccuuccc

SEQ ID NO: 1844774 - RNA, 14 nt, Human
aggcugggcucccu

SEQ ID NO: 1844775 - RNA, 13 nt, Human
aggcugggcuccc

SEQ ID NO: 1844776 - RNA, 23 nt, Human
aggcugggcucccuucccaccuc

SEQ ID NO: 1844777 - RNA, 21 nt, Human
aggcugggcucccuucccacc

SEQ ID NO: 1844778 - RNA, 14 nt, Human
aggcugggcuucag

SEQ ID NO: 1844779 - RNA, 23 nt, Human
aggcuucugguugaugccuguga

SEQ ID NO: 1844780 - RNA, 21 nt, Human
aggcuuagucacugagacagc

SEQ ID NO: 1844781 - RNA, 22 nt, Human
aggcuuagucacugagacagcc

SEQ ID NO: 1844782 - RNA, 23 nt, Human
aggcuuagucacugagacagccc

SEQ ID NO: 1844783 - RNA, 21 nt, Human
aggcuuuuuuaucaugugaaa

SEQ ID NO: 1844784 - RNA, 18 nt, Human
aggcuuuuuuaucaugug

SEQ ID NO: 1844785 - RNA, 15 nt, Human
aggcuuuuuuaucau

SEQ ID NO: 1844786 - RNA, 13 nt, Human
uggcucacgccug

SEQ ID NO: 1844787 - RNA, 21 nt, Human
uggcucacugcaacuucugcc

SEQ ID NO: 1844788 - RNA, 19 nt, Human
uggcuaauguacugcauau

SEQ ID NO: 1844789 - RNA, 17 nt, Human
uggcuaauguacugcau

SEQ ID NO: 1844790 - RNA, 23 nt, Human
aggcuccaggagcagccacauuc

SEQ ID NO: 1844791 - RNA, 19 nt, Human
aggcuccaggagcagccac

SEQ ID NO: 1844792 - RNA, 18 nt, Human
aggcuccaggagcagcca

SEQ ID NO: 1844793 - RNA, 17 nt, Human
aggcuccaggagcagcc

SEQ ID NO: 1844794 - RNA, 14 nt, Human
uggcuaaauucaug

SEQ ID NO: 1844795 - RNA, 18 nt, Human
uggcuaagcaaaauguga

SEQ ID NO: 1844796 - RNA, 13 nt, Human
aggcuccugccac

SEQ ID NO: 1844797 - RNA, 19 nt, Human
uggcugugccucugccugu

SEQ ID NO: 1844798 - RNA, 18 nt, Human
uggcugugccucugccug

SEQ ID NO: 1844799 - RNA, 22 nt, Human
uggcugugccucugccugucuc

SEQ ID NO: 1844800 - RNA, 16 nt, Human
uggcuguuggcugggg

SEQ ID NO: 1844801 - RNA, 18 nt, Human
uggcuguuggcugggggc

SEQ ID NO: 1844802 - RNA, 14 nt, Human
uggcuucacggaag

SEQ ID NO: 1844803 - RNA, 23 nt, Human
uggcuguuggcugggggccucag

SEQ ID NO: 1844804 - RNA, 17 nt, Human
uggcugugccucugccu

SEQ ID NO: 1844805 - RNA, 16 nt, Human
uggcugugccucugcc

SEQ ID NO: 1844806 - RNA, 15 nt, Human
uggcugugccucugc

SEQ ID NO: 1844807 - RNA, 14 nt, Human
uggcugugccucug

SEQ ID NO: 1844808 - RNA, 23 nt, Human
uggcugcaaaggguaucaggugc

SEQ ID NO: 1844809 - RNA, 20 nt, Human
ugggaacaccauaggucacc

SEQ ID NO: 1844810 - RNA, 20 nt, Human
uggcuucacggaagagccuu

SEQ ID NO: 1844811 - RNA, 17 nt, Human
uggcuucacggaagagc

SEQ ID NO: 1844812 - RNA, 15 nt, Human
uggcuuuugugcauu

SEQ ID NO: 1844813 - RNA, 16 nt, Human
uggcuuuugugcauua

SEQ ID NO: 1844814 - RNA, 21 nt, Human
uggcuuuugugcauuaucuag

SEQ ID NO: 1844815 - RNA, 18 nt, Human
ugggaaacaaaaggauaa

SEQ ID NO: 1844816 - RNA, 19 nt, Human
agggagggcuccagacaca

SEQ ID NO: 1844817 - RNA, 17 nt, Human
agggagggcuccagaca

SEQ ID NO: 1844818 - RNA, 13 nt, Human
agggagggcucca

SEQ ID NO: 1844819 - RNA, 12 nt, Human
agggagggcucc

SEQ ID NO: 1844820 - RNA, 15 nt, Human
agggagggccugggc

SEQ ID NO: 1844821 - RNA, 13 nt, Human
agggagggccugg

SEQ ID NO: 1844822 - RNA, 22 nt, Human
agggagggcuccagacacaugu

SEQ ID NO: 1844823 - RNA, 20 nt, Human
agggaguccgaaagggacuu

SEQ ID NO: 1844824 - RNA, 23 nt, Human
agggaguccgaaagggacuugga

SEQ ID NO: 1844825 - RNA, 20 nt, Human
agggagugaguugauagcac

SEQ ID NO: 1844826 - RNA, 20 nt, Human
agggagugacagaggcagcc

SEQ ID NO: 1844827 - RNA, 17 nt, Human
agggcauggccaggugg

SEQ ID NO: 1844828 - RNA, 12 nt, Human
agggcccagaga

SEQ ID NO: 1844829 - RNA, 13 nt, Human
agggcccagagag

SEQ ID NO: 1844830 - RNA, 17 nt, Human
agggcacugguggcccg

SEQ ID NO: 1844831 - RNA, 20 nt, Human
agggcuccagacacaugucc

SEQ ID NO: 1844832 - RNA, 14 nt, Human
agggcccagagagg

SEQ ID NO: 1844833 - RNA, 18 nt, Human
agggcccagagagggugg

SEQ ID NO: 1844834 - RNA, 14 nt, Human
ugggcucccuuccc

SEQ ID NO: 1844835 - RNA, 15 nt, Human
ugggcucccuuccca

SEQ ID NO: 1844836 - RNA, 20 nt, Human
ugggcagaaggaagacuuca

SEQ ID NO: 1844837 - RNA, 16 nt, Human
ugggcagaaggaagac

SEQ ID NO: 1844838 - RNA, 23 nt, Human
ugggcagaaggaagacuucaucc

SEQ ID NO: 1844839 - RNA, 13 nt, Human
ugggcagaaggaa

SEQ ID NO: 1844840 - RNA, 16 nt, Human
ugggauuuggucaaca

SEQ ID NO: 1844841 - RNA, 22 nt, Human
ugggagaaccaaaaagaggcua

SEQ ID NO: 1844842 - RNA, 21 nt, Human
ugggagaaccaaaaagaggcu

SEQ ID NO: 1844843 - RNA, 16 nt, Human
ugggagaaaugaaaaa

SEQ ID NO: 1844844 - RNA, 21 nt, Human
ugggaggauugcuugagcuca

SEQ ID NO: 1844845 - RNA, 18 nt, Human
ugggaggauugcuugagc

SEQ ID NO: 1844846 - RNA, 22 nt, Human
ugggaggauugcuugagcucag

SEQ ID NO: 1844847 - RNA, 19 nt, Human
ugggaggcugagaugggag

SEQ ID NO: 1844848 - RNA, 23 nt, Human
ugggaggcucuggagcccacugu

SEQ ID NO: 1844849 - RNA, 17 nt, Human
ugggaggcucuggagcc

SEQ ID NO: 1844850 - RNA, 14 nt, Human
ugggaggcucugga

SEQ ID NO: 1844851 - RNA, 18 nt, Human
agggagcaucagugcccu

SEQ ID NO: 1844852 - RNA, 18 nt, Human
ugggacuacaggcaccca

SEQ ID NO: 1844853 - RNA, 16 nt, Human
ugggacuggccucugc

SEQ ID NO: 1844854 - RNA, 14 nt, Human
ugggacuggccucu

SEQ ID NO: 1844855 - RNA, 15 nt, Human
ugggagaaaugaaaa

SEQ ID NO: 1844856 - RNA, 13 nt, Human
ugggacuggccuc

SEQ ID NO: 1844857 - RNA, 18 nt, Human
ugggacucaaugcacuga

SEQ ID NO: 1844858 - RNA, 16 nt, Human
ugggacuacaggugug

SEQ ID NO: 1844859 - RNA, 20 nt, Human
agggacuuggaagcuccgcu

SEQ ID NO: 1844860 - RNA, 18 nt, Human
agggacuuggaagcuccg

SEQ ID NO: 1844861 - RNA, 19 nt, Human
agggacuuggaagcuccgc

SEQ ID NO: 1844862 - RNA, 15 nt, Human
agggacuuggaagcu

SEQ ID NO: 1844863 - RNA, 15 nt, Human
uguccaagaagccca

SEQ ID NO: 1844864 - RNA, 14 nt, Human
uguccaagaagccc

SEQ ID NO: 1844865 - RNA, 17 nt, Human
ugucagguggggcagcu

SEQ ID NO: 1844866 - RNA, 18 nt, Human
ugucagguggggcagcuu

SEQ ID NO: 1844867 - RNA, 20 nt, Human
ugucagguggggcagcuuga

SEQ ID NO: 1844868 - RNA, 20 nt, Human
ugucauuugagcagggcuca

SEQ ID NO: 1844869 - RNA, 21 nt, Human
ugucauuugagcagggcucag

SEQ ID NO: 1844870 - RNA, 22 nt, Human
ugucauuugagcagggcucagc

SEQ ID NO: 1844871 - RNA, 22 nt, Human
uguccaagaagcccaggaaagg

SEQ ID NO: 1844872 - RNA, 18 nt, Human
uguccaagaagcccagga

SEQ ID NO: 1844873 - RNA, 17 nt, Human
uguccaagaagcccagg

SEQ ID NO: 1844874 - RNA, 16 nt, Human
uguccaagaagcccag

SEQ ID NO: 1844875 - RNA, 20 nt, Human
ugucccugcacuugcagacu

SEQ ID NO: 1844876 - RNA, 22 nt, Human
ugucccugcacuugcagacucu

SEQ ID NO: 1844877 - RNA, 23 nt, Human
ugucccugcacuugcagacucua

SEQ ID NO: 1844878 - RNA, 17 nt, Human
agucaccccggccaccu

SEQ ID NO: 1844879 - RNA, 15 nt, Human
agucaccaagcccag

SEQ ID NO: 1844880 - RNA, 19 nt, Human
aguauucuuauuuaaugaa

SEQ ID NO: 1844881 - RNA, 19 nt, Human
agucccaggcugagccuca

SEQ ID NO: 1844882 - RNA, 18 nt, Human
agucccaggcugagccuc

SEQ ID NO: 1844883 - RNA, 17 nt, Human
agucccaggcugagccu

SEQ ID NO: 1844884 - RNA, 18 nt, Human
agucccaccuuggcugca

SEQ ID NO: 1844885 - RNA, 19 nt, Human
agucccaccuuggcugcag

SEQ ID NO: 1844886 - RNA, 15 nt, Human
agucccaccuuggcu

SEQ ID NO: 1844887 - RNA, 16 nt, Human
agucccaccuuggcug

SEQ ID NO: 1844888 - RNA, 14 nt, Human
ugucgccucugcau

SEQ ID NO: 1844889 - RNA, 23 nt, Human
ugucccuuacgugaguccuggca

SEQ ID NO: 1844890 - RNA, 19 nt, Human
ugucccuuacgugaguccu

SEQ ID NO: 1844891 - RNA, 22 nt, Human
agucagaaguuucugccgcagc

SEQ ID NO: 1844892 - RNA, 16 nt, Human
aguccucccaucucac

SEQ ID NO: 1844893 - RNA, 14 nt, Human
aguccucccaucuc

SEQ ID NO: 1844894 - RNA, 16 nt, Human
agucccccugccccag

SEQ ID NO: 1844895 - RNA, 23 nt, Human
agucucacuguugcccaggcugg

SEQ ID NO: 1844896 - RNA, 12 nt, Human
aggugggaggau

SEQ ID NO: 1844897 - RNA, 16 nt, Human
ugggcugcccuggugc

SEQ ID NO: 1844898 - RNA, 15 nt, Human
ugggcugcccuggug

SEQ ID NO: 1844899 - RNA, 14 nt, Human
ugggcugcccuggu

SEQ ID NO: 1844900 - RNA, 13 nt, Human
ugggcugcccugg

SEQ ID NO: 1844901 - RNA, 16 nt, Human
aggugucccugcacuu

SEQ ID NO: 1844902 - RNA, 20 nt, Human
aggugucccugcacuugcag

SEQ ID NO: 1844903 - RNA, 21 nt, Human
aggugugagucaccaagccca

SEQ ID NO: 1844904 - RNA, 22 nt, Human
aggugugagucaccaagcccag

SEQ ID NO: 1844905 - RNA, 12 nt, Human
aggugugcucug

SEQ ID NO: 1844906 - RNA, 14 nt, Human
agguugcagugagc

SEQ ID NO: 1844907 - RNA, 14 nt, Human
agguugaagcacca

SEQ ID NO: 1844908 - RNA, 14 nt, Human
uguacauauaagug

SEQ ID NO: 1844909 - RNA, 16 nt, Human
uguacaugaaaacaca

SEQ ID NO: 1844910 - RNA, 14 nt, Human
uguacaugaaaaca

SEQ ID NO: 1844911 - RNA, 20 nt, Human
uguaauuuuuuuaucgucac

SEQ ID NO: 1844912 - RNA, 12 nt, Human
uguacaguuuuu

SEQ ID NO: 1844913 - RNA, 19 nt, Human
uguacauaaugcgugcaua

SEQ ID NO: 1844914 - RNA, 20 nt, Human
uguacauaaugcgugcauac

SEQ ID NO: 1844915 - RNA, 18 nt, Human
uguaauuaaguacuaugu

SEQ ID NO: 1844916 - RNA, 21 nt, Human
uguaauuaaguacuauguauc

SEQ ID NO: 1844917 - RNA, 19 nt, Human
uguaauuaaguacuaugua

SEQ ID NO: 1844918 - RNA, 19 nt, Human
agguuucucaaagaaauuu

SEQ ID NO: 1844919 - RNA, 16 nt, Human
agguuucucaaagaaa

SEQ ID NO: 1844920 - RNA, 20 nt, Human
agguuggcaaaaaggcagga

SEQ ID NO: 1844921 - RNA, 22 nt, Human
uguagugaaucacguaaagcua

SEQ ID NO: 1844922 - RNA, 17 nt, Human
uguaggguuauaauaau

SEQ ID NO: 1844923 - RNA, 16 nt, Human
uguaggguuauaauaa

SEQ ID NO: 1844924 - RNA, 22 nt, Human
uguauauauuuccuauauuguu

SEQ ID NO: 1844925 - RNA, 18 nt, Human
uguauauauuuccuauau

SEQ ID NO: 1844926 - RNA, 21 nt, Human
uguacauggaauaacauguaa

SEQ ID NO: 1844927 - RNA, 23 nt, Human
aguaaaaacaaagaaauuaugug

SEQ ID NO: 1844928 - RNA, 16 nt, Human
aguaaaaacaaagaaa

SEQ ID NO: 1844929 - RNA, 21 nt, Human
aguacacuguuucaaacuuua

SEQ ID NO: 1844930 - RNA, 23 nt, Human
aguacacuguuucaaacuuuacu

SEQ ID NO: 1844931 - RNA, 17 nt, Human
aguggauggaaggggcu

SEQ ID NO: 1844932 - RNA, 14 nt, Human
aguggggaggggcu

SEQ ID NO: 1844933 - RNA, 15 nt, Human
aguggggacagagca

SEQ ID NO: 1844934 - RNA, 22 nt, Human
agugggcccaaugcacuuuguu

SEQ ID NO: 1844935 - RNA, 11 nt, Human
aguggcagcug

SEQ ID NO: 1844936 - RNA, 19 nt, Human
uguuacauaagauaaaugu

SEQ ID NO: 1844937 - RNA, 18 nt, Human
uguuacaaauuguagaag

SEQ ID NO: 1844938 - RNA, 17 nt, Human
uguuacaaauuguagaa

SEQ ID NO: 1844939 - RNA, 19 nt, Human
uguuaauaaaaguacaugu

SEQ ID NO: 1844940 - RNA, 13 nt, Human
uguuaauaaaagu

SEQ ID NO: 1844941 - RNA, 18 nt, Human
uguuaauaaaaguacaug

SEQ ID NO: 1844942 - RNA, 22 nt, Human
uguuaaguugauggugaugaaa

SEQ ID NO: 1844943 - RNA, 22 nt, Human
uguuaacugagugccuuuuggu

SEQ ID NO: 1844944 - RNA, 16 nt, Human
uguuaacugagugccu

SEQ ID NO: 1844945 - RNA, 23 nt, Human
uguguuaucacccagaagaaaau

SEQ ID NO: 1844946 - RNA, 22 nt, Human
uguguuaucacccagaagaaaa

SEQ ID NO: 1844947 - RNA, 11 nt, Human
uguguguuuau

SEQ ID NO: 1844948 - RNA, 20 nt, Human
ugugucuugcaauggcagcc

SEQ ID NO: 1844949 - RNA, 16 nt, Human
agugcccuccaggaua

SEQ ID NO: 1844950 - RNA, 16 nt, Human
aguguuguggauuuaa

SEQ ID NO: 1844951 - RNA, 18 nt, Human
aguguguguuuuucauaa

SEQ ID NO: 1844952 - RNA, 19 nt, Human
aguguuguggauuuaacag

SEQ ID NO: 1844953 - RNA, 20 nt, Human
aguguuguggauuuaacaga

SEQ ID NO: 1844954 - RNA, 13 nt, Human
aguuacucagaau

SEQ ID NO: 1844955 - RNA, 23 nt, Human
aguuacuaucaugucaaacguga

SEQ ID NO: 1844956 - RNA, 15 nt, Human
uguucuaagaaguga

SEQ ID NO: 1844957 - RNA, 15 nt, Human
uguugcauagaauaa

SEQ ID NO: 1844958 - RNA, 23 nt, Human
uguugcccaggcuggcgugcagu

SEQ ID NO: 1844959 - RNA, 20 nt, Human
uguugcccaggcuggcgugc

SEQ ID NO: 1844960 - RNA, 22 nt, Human
agugugguguuuccuggcacug

SEQ ID NO: 1844961 - RNA, 17 nt, Human
uguuaugacuccagaau

SEQ ID NO: 1844962 - RNA, 13 nt, Human
uguuaugacucca

SEQ ID NO: 1844963 - RNA, 19 nt, Human
uguuccacaaguuaaauaa

SEQ ID NO: 1844964 - RNA, 21 nt, Human
agugugccugaagucccagau

SEQ ID NO: 1844965 - RNA, 15 nt, Human
aguguggcaaaauaa

SEQ ID NO: 1844966 - RNA, 20 nt, Human
agugugacugaucucucgug

SEQ ID NO: 1844967 - RNA, 14 nt, Human
agugguauagaaau

SEQ ID NO: 1844968 - RNA, 15 nt, Human
agugguauagaaaug

SEQ ID NO: 1844969 - RNA, 16 nt, Human
agugguauagaaaugc

SEQ ID NO: 1844970 - RNA, 18 nt, Human
agugguauagaaaugcug

SEQ ID NO: 1844971 - RNA, 23 nt, Human
agucuuagauguauauauuuccu

SEQ ID NO: 1844972 - RNA, 16 nt, Human
agucuuagauguauau

SEQ ID NO: 1844973 - RNA, 14 nt, Human
agucuuagauguau

SEQ ID NO: 1844974 - RNA, 13 nt, Human
agucuuagaugua

SEQ ID NO: 1844975 - RNA, 12 nt, Human
agucugaaggcu

SEQ ID NO: 1844976 - RNA, 17 nt, Human
agucucuugauucauaa

SEQ ID NO: 1844977 - RNA, 16 nt, Human
agucucuugauucaua

SEQ ID NO: 1844978 - RNA, 21 nt, Human
agucucuucuccacuggaugg

SEQ ID NO: 1844979 - RNA, 19 nt, Human
agucucuucuccacuggau

SEQ ID NO: 1844980 - RNA, 19 nt, Human
agucucgcucuguugccca

SEQ ID NO: 1844981 - RNA, 19 nt, Human
ugugacuucagcucuguuu

SEQ ID NO: 1844982 - RNA, 18 nt, Human
ugugacuucagcucuguu

SEQ ID NO: 1844983 - RNA, 16 nt, Human
ugugacugaucucucg

SEQ ID NO: 1844984 - RNA, 11 nt, Human
ugugaggaagc

SEQ ID NO: 1844985 - RNA, 14 nt, Human
agugagcacuaagg

SEQ ID NO: 1844986 - RNA, 22 nt, Human
agugagcacuaaggugugcucu

SEQ ID NO: 1844987 - RNA, 19 nt, Human
ugugaugagaggaaaucac

SEQ ID NO: 1844988 - RNA, 22 nt, Human
ugugaugaugaaaugaggucag

SEQ ID NO: 1844989 - RNA, 12 nt, Human
agugagcugguu

SEQ ID NO: 1844990 - RNA, 22 nt, Human
agugaacaaauuuacagagaca

SEQ ID NO: 1844991 - RNA, 23 nt, Human
agugaacaaauuuacagagacag

SEQ ID NO: 1844992 - RNA, 16 nt, Human
agugaacuugggccac

SEQ ID NO: 1844993 - RNA, 21 nt, Human
agugacugauggcuaauguac

SEQ ID NO: 1844994 - RNA, 16 nt, Human
agucuuucacauuuaa

SEQ ID NO: 1844995 - RNA, 21 nt, Human
agugaacaaauuuacagagac

SEQ ID NO: 1844996 - RNA, 18 nt, Human
agucuuucacauuuaaau

SEQ ID NO: 1844997 - RNA, 12 nt, Human
ugugcugcccug

SEQ ID NO: 1844998 - RNA, 19 nt, Human
ugugcugagucugaaggcu

SEQ ID NO: 1844999 - RNA, 18 nt, Human
ugugcugagucugaaggc

SEQ ID NO: 1845000 - RNA, 21 nt, Human
ugugcucaggagcccugggag

SEQ ID NO: 1845001 - RNA, 21 nt, Human
ugugcugcccugcccaccugg

SEQ ID NO: 1845002 - RNA, 20 nt, Human
ugugcugcccugcccaccug

SEQ ID NO: 1845003 - RNA, 19 nt, Human
ugugcugcccugcccaccu

SEQ ID NO: 1845004 - RNA, 18 nt, Human
ugugcugcccugcccacc

SEQ ID NO: 1845005 - RNA, 21 nt, Human
uguggaucaaauccagccugc

SEQ ID NO: 1845006 - RNA, 14 nt, Human
uguggaugauaaaa

SEQ ID NO: 1845007 - RNA, 19 nt, Human
uguggauuuaacagaaaug

SEQ ID NO: 1845008 - RNA, 20 nt, Human
uguggauuuaacagaaaugu

SEQ ID NO: 1845009 - RNA, 22 nt, Human
uguggauuuaacagaaauguac

SEQ ID NO: 1845010 - RNA, 23 nt, Human
agugagcugguuuuuagcggaga

SEQ ID NO: 1845011 - RNA, 13 nt, Human
agugaggcucugc

SEQ ID NO: 1845012 - RNA, 12 nt, Human
agugaggcucug

SEQ ID NO: 1845013 - RNA, 16 nt, Human
agugaggaugaaaaaa

SEQ ID NO: 1845014 - RNA, 14 nt, Human
agugccaaaaacaa

SEQ ID NO: 1845015 - RNA, 14 nt, Human
agugcaugcugucc

SEQ ID NO: 1845016 - RNA, 16 nt, Human
agugcaugcugucccu

SEQ ID NO: 1845017 - RNA, 17 nt, Human
agugcagugagccgaga

SEQ ID NO: 1845018 - RNA, 18 nt, Human
auagauaggucagugcaa

SEQ ID NO: 1845019 - RNA, 14 nt, Human
auagagagagacca

SEQ ID NO: 1845020 - RNA, 18 nt, Human
auagacccacaagaggca

SEQ ID NO: 1845021 - RNA, 16 nt, Human
auagacaauuuauuau

SEQ ID NO: 1845022 - RNA, 22 nt, Human
auagacaauuuauuauggcaca

SEQ ID NO: 1845023 - RNA, 23 nt, Human
auagacaauuuauuauggcacau

SEQ ID NO: 1845024 - RNA, 17 nt, Human
auagaauuaacacauga

SEQ ID NO: 1845025 - RNA, 22 nt, Human
auagaauaaaauuuuuaaucuu

SEQ ID NO: 1845026 - RNA, 19 nt, Human
auagaauaaaauuuuuaau

SEQ ID NO: 1845027 - RNA, 14 nt, Human
auagaauaaaauuu

SEQ ID NO: 1845028 - RNA, 22 nt, Human
auagaaaugcugguuuuucagu

SEQ ID NO: 1845029 - RNA, 19 nt, Human
auagaaaugcugguuuuuc

SEQ ID NO: 1845030 - RNA, 13 nt, Human
auagaaaugcugg

SEQ ID NO: 1845031 - RNA, 13 nt, Human
auagaaguaaaaa

SEQ ID NO: 1845032 - RNA, 12 nt, Human
uuauuaugcaug

SEQ ID NO: 1845033 - RNA, 15 nt, Human
uuauuauauuuacaa

SEQ ID NO: 1845034 - RNA, 14 nt, Human
uuauuauauuuaca

SEQ ID NO: 1845035 - RNA, 13 nt, Human
uuauuaugcauga

SEQ ID NO: 1845036 - RNA, 20 nt, Human
uuauucacuuuuauuuagca

SEQ ID NO: 1845037 - RNA, 12 nt, Human
uuauucauaauu

SEQ ID NO: 1845038 - RNA, 14 nt, Human
auacucccaucugu

SEQ ID NO: 1845039 - RNA, 17 nt, Human
auacuccuccaagguua

SEQ ID NO: 1845040 - RNA, 16 nt, Human
auacucugcuuagaau

SEQ ID NO: 1845041 - RNA, 18 nt, Human
auacucuuauagacaaca

SEQ ID NO: 1845042 - RNA, 16 nt, Human
auacucauuaggaugg

SEQ ID NO: 1845043 - RNA, 11 nt, Human
auacucccauc

SEQ ID NO: 1845044 - RNA, 17 nt, Human
uuaucacccagaagaaa

SEQ ID NO: 1845045 - RNA, 18 nt, Human
uuaucacccagaagaaaa

SEQ ID NO: 1845046 - RNA, 19 nt, Human
uuaucacccagaagaaaau

SEQ ID NO: 1845047 - RNA, 21 nt, Human
uuaucacccagaagaaaauag

SEQ ID NO: 1845048 - RNA, 20 nt, Human
uuaugaagcuuuuaugugaa

SEQ ID NO: 1845049 - RNA, 20 nt, Human
uuaugauacuugaaaauuaa

SEQ ID NO: 1845050 - RNA, 11 nt, Human
uuaugacucca

SEQ ID NO: 1845051 - RNA, 22 nt, Human
uuaugugccagauuuaugcaua

SEQ ID NO: 1845052 - RNA, 15 nt, Human
uuaugugaaacaugu

SEQ ID NO: 1845053 - RNA, 13 nt, Human
uuaugugaaacau

SEQ ID NO: 1845054 - RNA, 19 nt, Human
uuauggcuuuugugcauua

SEQ ID NO: 1845055 - RNA, 13 nt, Human
uuaugggcugggu

SEQ ID NO: 1845056 - RNA, 22 nt, Human
uuaugggcuggguucuacccag

SEQ ID NO: 1845057 - RNA, 13 nt, Human
auacuaaccagca

SEQ ID NO: 1845058 - RNA, 19 nt, Human
auacuaaccagcagaaaug

SEQ ID NO: 1845059 - RNA, 20 nt, Human
auacuaaccagcagaaaugc

SEQ ID NO: 1845060 - RNA, 17 nt, Human
auaccacuuuuguucuu

SEQ ID NO: 1845061 - RNA, 18 nt, Human
auaccacuuuuguucuug

SEQ ID NO: 1845062 - RNA, 17 nt, Human
auaccagccaguaaaug

SEQ ID NO: 1845063 - RNA, 14 nt, Human
auaccuuuuuuaga

SEQ ID NO: 1845064 - RNA, 14 nt, Human
auacguacacauuu

SEQ ID NO: 1845065 - RNA, 15 nt, Human
auacguacacauuuu

SEQ ID NO: 1845066 - RNA, 16 nt, Human
auacguacacauuuua

SEQ ID NO: 1845067 - RNA, 13 nt, Human
auacgauaaauaa

SEQ ID NO: 1845068 - RNA, 13 nt, Human
auacguacacauu

SEQ ID NO: 1845069 - RNA, 21 nt, Human
auacaggaugaugacuaugga

SEQ ID NO: 1845070 - RNA, 18 nt, Human
auacaguuacucagaauu

SEQ ID NO: 1845071 - RNA, 23 nt, Human
auacagauagauauaugcucugc

SEQ ID NO: 1845072 - RNA, 23 nt, Human
auacaggaaaagcugcugacagu

SEQ ID NO: 1845073 - RNA, 20 nt, Human
auacaguuacucagaauucu

SEQ ID NO: 1845074 - RNA, 17 nt, Human
uuauaaacuuuaccuuu

SEQ ID NO: 1845075 - RNA, 18 nt, Human
uuauaaacuuuaccuuuu

SEQ ID NO: 1845076 - RNA, 16 nt, Human
uuauaaacuuuuuucu

SEQ ID NO: 1845077 - RNA, 12 nt, Human
uuauaaacuuuu

SEQ ID NO: 1845078 - RNA, 22 nt, Human
uuauaaacuuuuuucuuacugu

SEQ ID NO: 1845079 - RNA, 17 nt, Human
auacagaggcaacugca

SEQ ID NO: 1845080 - RNA, 16 nt, Human
auacagaggcaacugc

SEQ ID NO: 1845081 - RNA, 12 nt, Human
uuaacagaaaug

SEQ ID NO: 1845082 - RNA, 13 nt, Human
uuaacagaaaugu

SEQ ID NO: 1845083 - RNA, 14 nt, Human
uuaacagaaaugua

SEQ ID NO: 1845084 - RNA, 16 nt, Human
uuaacagaaauguaca

SEQ ID NO: 1845085 - RNA, 19 nt, Human
aguuucugccgcagcccug

SEQ ID NO: 1845086 - RNA, 22 nt, Human
aguuuguuaguaugaggcauuu

SEQ ID NO: 1845087 - RNA, 15 nt, Human
aguuuguugaaacac

SEQ ID NO: 1845088 - RNA, 15 nt, Human
aguuucugccgcagc

SEQ ID NO: 1845089 - RNA, 15 nt, Human
aguuucucagcuccc

SEQ ID NO: 1845090 - RNA, 13 nt, Human
aguuucucagcuc

SEQ ID NO: 1845091 - RNA, 14 nt, Human
aguuucucuuuuca

SEQ ID NO: 1845092 - RNA, 19 nt, Human
uuaaaaugagaaaucuaaa

SEQ ID NO: 1845093 - RNA, 12 nt, Human
uuaaaaugagaa

SEQ ID NO: 1845094 - RNA, 19 nt, Human
uuaaaaaucucaaauuucu

SEQ ID NO: 1845095 - RNA, 20 nt, Human
uuaaaaaucucaaauuucua

SEQ ID NO: 1845096 - RNA, 20 nt, Human
aguuuaaauuguaauaggcg

SEQ ID NO: 1845097 - RNA, 17 nt, Human
aguuuaaauuguaauag

SEQ ID NO: 1845098 - RNA, 15 nt, Human
aguuuuuuuuauaca

SEQ ID NO: 1845099 - RNA, 23 nt, Human
uuaacuuuuauaaacuuuaccuu

SEQ ID NO: 1845100 - RNA, 22 nt, Human
uuaacuuuuauaaacuuuaccu

SEQ ID NO: 1845101 - RNA, 22 nt, Human
auaaaagggacugagaaauuua

SEQ ID NO: 1845102 - RNA, 20 nt, Human
auaaaagccuguuuaagaga

SEQ ID NO: 1845103 - RNA, 19 nt, Human
auaaaagccuguuuaagag

SEQ ID NO: 1845104 - RNA, 18 nt, Human
uuaagacauuuuuggaag

SEQ ID NO: 1845105 - RNA, 23 nt, Human
uuaagacauuuuuggaaggggac

SEQ ID NO: 1845106 - RNA, 19 nt, Human
uuaagacgaaacauuuguu

SEQ ID NO: 1845107 - RNA, 19 nt, Human
uuaagaaaaaggaugcaca

SEQ ID NO: 1845108 - RNA, 17 nt, Human
uuaaucuuuaauuuuac

SEQ ID NO: 1845109 - RNA, 13 nt, Human
uuaaucuuuaauu

SEQ ID NO: 1845110 - RNA, 22 nt, Human
uuaagacgaaacauuuguucua

SEQ ID NO: 1845111 - RNA, 16 nt, Human
uuaauaaaaguacaug

SEQ ID NO: 1845112 - RNA, 15 nt, Human
uuaaucuaaauggaa

SEQ ID NO: 1845113 - RNA, 16 nt, Human
auaaauugcuccuuga

SEQ ID NO: 1845114 - RNA, 13 nt, Human
auaaauugcuccu

SEQ ID NO: 1845115 - RNA, 19 nt, Human
uuaccagcagagcaccuua

SEQ ID NO: 1845116 - RNA, 20 nt, Human
uuacagggaugagccaccgc

SEQ ID NO: 1845117 - RNA, 14 nt, Human
uuacaggugugaac

SEQ ID NO: 1845118 - RNA, 15 nt, Human
auaacuauguugaua

SEQ ID NO: 1845119 - RNA, 18 nt, Human
auaaauugcuccuugaca

SEQ ID NO: 1845120 - RNA, 16 nt, Human
uuagaagucacacagu

SEQ ID NO: 1845121 - RNA, 14 nt, Human
auaagauucauauu

SEQ ID NO: 1845122 - RNA, 18 nt, Human
auaacuuuuuuuuaaguu

SEQ ID NO: 1845123 - RNA, 13 nt, Human
uuacuguacauga

SEQ ID NO: 1845124 - RNA, 14 nt, Human
uuacuguacaugaa

SEQ ID NO: 1845125 - RNA, 22 nt, Human
uuacuguacaugaaaacacauu

SEQ ID NO: 1845126 - RNA, 23 nt, Human
uuacuguacaugaaaacacauuu

SEQ ID NO: 1845127 - RNA, 12 nt, Human
uuacuguacaug

SEQ ID NO: 1845128 - RNA, 23 nt, Human
uuacuguacagacagaaaaaacu

SEQ ID NO: 1845129 - RNA, 15 nt, Human
uuacugcagcuuugu

SEQ ID NO: 1845130 - RNA, 13 nt, Human
auaauuuuaaaug

SEQ ID NO: 1845131 - RNA, 12 nt, Human
auaauuuuaaau

SEQ ID NO: 1845132 - RNA, 14 nt, Human
auaauuuuaaaugu

SEQ ID NO: 1845133 - RNA, 20 nt, Human
auaauucaggaagcagcuuu

SEQ ID NO: 1845134 - RNA, 23 nt, Human
auaauucacauuguauucagagu

SEQ ID NO: 1845135 - RNA, 22 nt, Human
auaaucuggacuccucugucca

SEQ ID NO: 1845136 - RNA, 22 nt, Human
auaagccaaaaaaugcuugcuu

SEQ ID NO: 1845137 - RNA, 21 nt, Human
auaagauucauauuuacuucu

SEQ ID NO: 1845138 - RNA, 14 nt, Human
auaagccagacauc

SEQ ID NO: 1845139 - RNA, 18 nt, Human
uuagguuggcaaaaaggc

SEQ ID NO: 1845140 - RNA, 13 nt, Human
uuaguaaucauau

SEQ ID NO: 1845141 - RNA, 14 nt, Human
uuaguaaucauauu

SEQ ID NO: 1845142 - RNA, 15 nt, Human
uuaggugaggaagca

SEQ ID NO: 1845143 - RNA, 19 nt, Human
uuaggugugggggaagcac

SEQ ID NO: 1845144 - RNA, 22 nt, Human
uuauaaaaauaaaaaacacugg

SEQ ID NO: 1845145 - RNA, 21 nt, Human
uuauaaaaauaaaaaacacug

SEQ ID NO: 1845146 - RNA, 13 nt, Human
uuauaaacuuuac

SEQ ID NO: 1845147 - RNA, 15 nt, Human
uuauaaaaauaaaaa

SEQ ID NO: 1845148 - RNA, 21 nt, Human
uuaguuuuugugaaguuuaau

SEQ ID NO: 1845149 - RNA, 18 nt, Human
uuaguuuuugugaaguuu

SEQ ID NO: 1845150 - RNA, 14 nt, Human
uuaguagagacagg

SEQ ID NO: 1845151 - RNA, 19 nt, Human
uuaguacuccccuccuuga

SEQ ID NO: 1845152 - RNA, 13 nt, Human
uuaguagagacag

SEQ ID NO: 1845153 - RNA, 17 nt, Human
aucugugaaaggaaaga

SEQ ID NO: 1845154 - RNA, 17 nt, Human
aucuggugacuuuccuc

SEQ ID NO: 1845155 - RNA, 16 nt, Human
aucuggugacuuuccu

SEQ ID NO: 1845156 - RNA, 10 nt, Human
aucuggugac

SEQ ID NO: 1845157 - RNA, 20 nt, Human
aucugcuagggaauaucaau

SEQ ID NO: 1845158 - RNA, 18 nt, Human
aucugugaaaggaaagag

SEQ ID NO: 1845159 - RNA, 23 nt, Human
aucugugaaaggaaagagggagg

SEQ ID NO: 1845160 - RNA, 20 nt, Human
aucuuggucagauuugaacu

SEQ ID NO: 1845161 - RNA, 13 nt, Human
aucuugcucugcu

SEQ ID NO: 1845162 - RNA, 14 nt, Human
aucuuauaauuuaa

SEQ ID NO: 1845163 - RNA, 12 nt, Human
uugcuccuugac

SEQ ID NO: 1845164 - RNA, 22 nt, Human
aucuuuucauuuaggugaggaa

SEQ ID NO: 1845165 - RNA, 17 nt, Human
aucuuugcagacaggca

SEQ ID NO: 1845166 - RNA, 18 nt, Human
augaaagggcccagagag

SEQ ID NO: 1845167 - RNA, 11 nt, Human
uuggagacaga

SEQ ID NO: 1845168 - RNA, 14 nt, Human
uugcuugaaagaaa

SEQ ID NO: 1845169 - RNA, 16 nt, Human
uuggagggugucccaa

SEQ ID NO: 1845170 - RNA, 18 nt, Human
uuggccccugcccggcug

SEQ ID NO: 1845171 - RNA, 23 nt, Human
augaauggcuaagcaaaauguga

SEQ ID NO: 1845172 - RNA, 21 nt, Human
augaauauuuaguguucauaa

SEQ ID NO: 1845173 - RNA, 18 nt, Human
uuggggaccagagcugcc

SEQ ID NO: 1845174 - RNA, 11 nt, Human
augaagaggag

SEQ ID NO: 1845175 - RNA, 16 nt, Human
augaauauuuaguguu

SEQ ID NO: 1845176 - RNA, 18 nt, Human
augaacuuguaaaggaau

SEQ ID NO: 1845177 - RNA, 19 nt, Human
augaaagggcccagagagg

SEQ ID NO: 1845178 - RNA, 12 nt, Human
uugagacagagu

SEQ ID NO: 1845179 - RNA, 16 nt, Human
uugagaucagccuggg

SEQ ID NO: 1845180 - RNA, 15 nt, Human
uugagaucagccugg

SEQ ID NO: 1845181 - RNA, 16 nt, Human
uugagauguguucaca

SEQ ID NO: 1845182 - RNA, 20 nt, Human
uugagugaagcugggagaac

SEQ ID NO: 1845183 - RNA, 20 nt, Human
uugaguugauucagcucugc

SEQ ID NO: 1845184 - RNA, 15 nt, Human
uugauacuacaguuu

SEQ ID NO: 1845185 - RNA, 18 nt, Human
aucuaauauguaacaagc

SEQ ID NO: 1845186 - RNA, 19 nt, Human
aucuacacuccagugagac

SEQ ID NO: 1845187 - RNA, 18 nt, Human
aucuacacuccagugaga

SEQ ID NO: 1845188 - RNA, 20 nt, Human
aucuaauauguaacaagcca

SEQ ID NO: 1845189 - RNA, 17 nt, Human
aucuaaauggaaccacu

SEQ ID NO: 1845190 - RNA, 18 nt, Human
aucuaaauggaaccacuc

SEQ ID NO: 1845191 - RNA, 13 nt, Human
aucuaaauggaac

SEQ ID NO: 1845192 - RNA, 14 nt, Human
aucguucucugccu

SEQ ID NO: 1845193 - RNA, 17 nt, Human
auccucuguacagagcc

SEQ ID NO: 1845194 - RNA, 16 nt, Human
auccucuguacagagc

SEQ ID NO: 1845195 - RNA, 13 nt, Human
uugaaucacagua

SEQ ID NO: 1845196 - RNA, 13 nt, Human
uugaagccuuugu

SEQ ID NO: 1845197 - RNA, 17 nt, Human
uugaagggaaauuucag

SEQ ID NO: 1845198 - RNA, 23 nt, Human
aucugaaaauguauguguaagua

SEQ ID NO: 1845199 - RNA, 13 nt, Human
uugauuaaauucu

SEQ ID NO: 1845200 - RNA, 23 nt, Human
uugauguuuuaaggaugcuugua

SEQ ID NO: 1845201 - RNA, 14 nt, Human
uugauuaaauucuu

SEQ ID NO: 1845202 - RNA, 18 nt, Human
uugcaccacugcacucca

SEQ ID NO: 1845203 - RNA, 16 nt, Human
uugcaccacugcacuc

SEQ ID NO: 1845204 - RNA, 15 nt, Human
uugcaccacugcacu

SEQ ID NO: 1845205 - RNA, 14 nt, Human
uugcaccacugcac

SEQ ID NO: 1845206 - RNA, 16 nt, Human
uugcaauggcagccuu

SEQ ID NO: 1845207 - RNA, 17 nt, Human
uugcaauggcagccuug

SEQ ID NO: 1845208 - RNA, 19 nt, Human
uugcaauggcagccuuggc

SEQ ID NO: 1845209 - RNA, 16 nt, Human
aucucagggccugguc

SEQ ID NO: 1845210 - RNA, 17 nt, Human
aucuccaaaauaaaacu

SEQ ID NO: 1845211 - RNA, 20 nt, Human
aucuccaaaauaaaacuuuu

SEQ ID NO: 1845212 - RNA, 21 nt, Human
aucuccaaaauaaaacuuuuu

SEQ ID NO: 1845213 - RNA, 14 nt, Human
aucuccaaaauaaa

SEQ ID NO: 1845214 - RNA, 15 nt, Human
aucucuugagccugg

SEQ ID NO: 1845215 - RNA, 14 nt, Human
aucugaaaauguau

SEQ ID NO: 1845216 - RNA, 18 nt, Human
aucucuugagccugggag

SEQ ID NO: 1845217 - RNA, 22 nt, Human
aucugaaaauguauguguaagu

SEQ ID NO: 1845218 - RNA, 20 nt, Human
aucugaaaauguauguguaa

SEQ ID NO: 1845219 - RNA, 19 nt, Human
aucugaaaauguaugugua

SEQ ID NO: 1845220 - RNA, 16 nt, Human
aucugaaaauguaugu

SEQ ID NO: 1845221 - RNA, 21 nt, Human
aucucuucuggguuccuuccu

SEQ ID NO: 1845222 - RNA, 21 nt, Human
aucucccccagccccauccuc

SEQ ID NO: 1845223 - RNA, 17 nt, Human
aucucccccagccccau

SEQ ID NO: 1845224 - RNA, 16 nt, Human
aucucccccagcccca

SEQ ID NO: 1845225 - RNA, 15 nt, Human
aucucccccagcccc

SEQ ID NO: 1845226 - RNA, 23 nt, Human
uucuaagaagugaaaaucuacac

SEQ ID NO: 1845227 - RNA, 13 nt, Human
uucuaagaaguga

SEQ ID NO: 1845228 - RNA, 16 nt, Human
uucuagcauggcugcc

SEQ ID NO: 1845229 - RNA, 15 nt, Human
uucggccuccauccu

SEQ ID NO: 1845230 - RNA, 19 nt, Human
uucuaaaggcuaccuuugu

SEQ ID NO: 1845231 - RNA, 20 nt, Human
uucuaaaggcuaccuuugua

SEQ ID NO: 1845232 - RNA, 21 nt, Human
uucuaaaggcuaccuuuguau

SEQ ID NO: 1845233 - RNA, 21 nt, Human
uucuaaaucuccaaaauaaaa

SEQ ID NO: 1845234 - RNA, 13 nt, Human
uucuaaaguaaaa

SEQ ID NO: 1845235 - RNA, 15 nt, Human
uucgcuccugugucu

SEQ ID NO: 1845236 - RNA, 19 nt, Human
uucgcuccugugucuugca

SEQ ID NO: 1845237 - RNA, 14 nt, Human
uucggccuccaucc

SEQ ID NO: 1845238 - RNA, 11 nt, Human
aucagaauucu

SEQ ID NO: 1845239 - RNA, 18 nt, Human
aucagaaguuucucagcu

SEQ ID NO: 1845240 - RNA, 18 nt, Human
uucucacuccuaccuggu

SEQ ID NO: 1845241 - RNA, 16 nt, Human
uucucacuccuaccug

SEQ ID NO: 1845242 - RNA, 18 nt, Human
aucaggccaggcccucug

SEQ ID NO: 1845243 - RNA, 16 nt, Human
aucaggccaggcccuc

SEQ ID NO: 1845244 - RNA, 15 nt, Human
aucaggccaggcccu

SEQ ID NO: 1845245 - RNA, 13 nt, Human
aucagcacgauuu

SEQ ID NO: 1845246 - RNA, 12 nt, Human
aucagaauucuc

SEQ ID NO: 1845247 - RNA, 20 nt, Human
aucaggccaggcccucugcc

SEQ ID NO: 1845248 - RNA, 18 nt, Human
aucacggcucacugcagc

SEQ ID NO: 1845249 - RNA, 19 nt, Human
aucacggcucacugcagcc

SEQ ID NO: 1845250 - RNA, 13 nt, Human
aucacgccacugc

SEQ ID NO: 1845251 - RNA, 14 nt, Human
aucacgccacugca

SEQ ID NO: 1845252 - RNA, 15 nt, Human
aucacggcucacugc

SEQ ID NO: 1845253 - RNA, 14 nt, Human
aucaaugaguaaca

SEQ ID NO: 1845254 - RNA, 20 nt, Human
auauuuuuuguuaaaugauu

SEQ ID NO: 1845255 - RNA, 18 nt, Human
auauuuuuuguuaaauga

SEQ ID NO: 1845256 - RNA, 14 nt, Human
aucaacagauaaau

SEQ ID NO: 1845257 - RNA, 11 nt, Human
uuccugugucu

SEQ ID NO: 1845258 - RNA, 22 nt, Human
uuccucuuuccaucuacccucc

SEQ ID NO: 1845259 - RNA, 17 nt, Human
uuccucuuuccaucuac

SEQ ID NO: 1845260 - RNA, 13 nt, Human
uuccucuuuccau

SEQ ID NO: 1845261 - RNA, 18 nt, Human
uuccugaagaauugaaaa

SEQ ID NO: 1845262 - RNA, 14 nt, Human
uuccugaaccgaug

SEQ ID NO: 1845263 - RNA, 21 nt, Human
uuccucugaggcugaaauuca

SEQ ID NO: 1845264 - RNA, 17 nt, Human
uuccucugagccuuggg

SEQ ID NO: 1845265 - RNA, 14 nt, Human
uuccucugagccuu

SEQ ID NO: 1845266 - RNA, 18 nt, Human
uuccuaauuccacagcug

SEQ ID NO: 1845267 - RNA, 17 nt, Human
uuccuaauuccacagcu

SEQ ID NO: 1845268 - RNA, 16 nt, Human
uuccuaauuccacagc

SEQ ID NO: 1845269 - RNA, 20 nt, Human
uuccuaaauauauuuuaaga

SEQ ID NO: 1845270 - RNA, 17 nt, Human
uuccuaauccucuagga

SEQ ID NO: 1845271 - RNA, 22 nt, Human
uucccgcucagcccucccugcc

SEQ ID NO: 1845272 - RNA, 21 nt, Human
uucccgcucagcccucccugc

SEQ ID NO: 1845273 - RNA, 18 nt, Human
uucccgcucagcccuccc

SEQ ID NO: 1845274 - RNA, 16 nt, Human
uucccgcucagcccuc

SEQ ID NO: 1845275 - RNA, 20 nt, Human
uucccucaccuuucccaucu

SEQ ID NO: 1845276 - RNA, 15 nt, Human
uucccuauuagagaa

SEQ ID NO: 1845277 - RNA, 23 nt, Human
uucccguggaacguuuuuccugu

SEQ ID NO: 1845278 - RNA, 14 nt, Human
uuccguuaaaauac

SEQ ID NO: 1845279 - RNA, 16 nt, Human
uuccguuaaaauacca

SEQ ID NO: 1845280 - RNA, 19 nt, Human
uuccguagguuauuuucag

SEQ ID NO: 1845281 - RNA, 14 nt, Human
uucuuuuuuuguga

SEQ ID NO: 1845282 - RNA, 16 nt, Human
uucuuuguaaugaaaa

SEQ ID NO: 1845283 - RNA, 15 nt, Human
uucuuuguaaugaaa

SEQ ID NO: 1845284 - RNA, 17 nt, Human
uucuucuuuuugcuuca

SEQ ID NO: 1845285 - RNA, 21 nt, Human
uucuucuuuuugcuucaaaaa

SEQ ID NO: 1845286 - RNA, 20 nt, Human
uucuucugcuucagccuccc

SEQ ID NO: 1845287 - RNA, 13 nt, Human
uucuucucccuca

SEQ ID NO: 1845288 - RNA, 21 nt, Human
uucuuaagacgugauuuugcu

SEQ ID NO: 1845289 - RNA, 23 nt, Human
uucuuaagacgugauuuugcugu

SEQ ID NO: 1845290 - RNA, 14 nt, Human
uucuucucccucag

SEQ ID NO: 1845291 - RNA, 13 nt, Human
uucuucugcuuca

SEQ ID NO: 1845292 - RNA, 15 nt, Human
uucuucugcuucagc

SEQ ID NO: 1845293 - RNA, 24 nt, Human
aucccauaugccugggcagaagga

SEQ ID NO: 1845294 - RNA, 14 nt, Human
aucccucauccuca

SEQ ID NO: 1845295 - RNA, 13 nt, Human
aucccaugagccu

SEQ ID NO: 1845296 - RNA, 23 nt, Human
aucccucauccucauacccaccc

SEQ ID NO: 1845297 - RNA, 21 nt, Human
aucccucauccucauacccac

SEQ ID NO: 1845298 - RNA, 13 nt, Human
aucccucauccuc

SEQ ID NO: 1845299 - RNA, 16 nt, Human
auccuaggcauuugcu

SEQ ID NO: 1845300 - RNA, 16 nt, Human
auccuccucagaucuu

SEQ ID NO: 1845301 - RNA, 12 nt, Human
auccuaagcuau

SEQ ID NO: 1845302 - RNA, 19 nt, Human
auccuacaagacacaguga

SEQ ID NO: 1845303 - RNA, 18 nt, Human
auccuacaagacacagug

SEQ ID NO: 1845304 - RNA, 21 nt, Human
auccuaagcuauucaguaaua

SEQ ID NO: 1845305 - RNA, 19 nt, Human
uugaacccgggaggcagag

SEQ ID NO: 1845306 - RNA, 17 nt, Human
uugaaauuguauuacaa

SEQ ID NO: 1845307 - RNA, 22 nt, Human
uucugaacuuggcgcugccccu

SEQ ID NO: 1845308 - RNA, 19 nt, Human
uucugaacuuggcgcugcc

SEQ ID NO: 1845309 - RNA, 23 nt, Human
uucugaacuuggcgcugccccug

SEQ ID NO: 1845310 - RNA, 15 nt, Human
uucugccauauucug

SEQ ID NO: 1845311 - RNA, 21 nt, Human
uucugccugcccaggccccug

SEQ ID NO: 1845312 - RNA, 17 nt, Human
uucugccugcccaggcc

SEQ ID NO: 1845313 - RNA, 18 nt, Human
uucugccugcccaggccc

SEQ ID NO: 1845314 - RNA, 17 nt, Human
uucuggcucuuccaggc

SEQ ID NO: 1845315 - RNA, 16 nt, Human
uucuggcucuuccagg

SEQ ID NO: 1845316 - RNA, 17 nt, Human
uucuccuuucacaaccu

SEQ ID NO: 1845317 - RNA, 15 nt, Human
uucucuaguuugauu

SEQ ID NO: 1845318 - RNA, 17 nt, Human
uucucuaguuugauuaa

SEQ ID NO: 1845319 - RNA, 20 nt, Human
uucucuaguuugauuaaauu

SEQ ID NO: 1845320 - RNA, 21 nt, Human
uucuccuuguguuacuaaguu

SEQ ID NO: 1845321 - RNA, 18 nt, Human
aucaguagccagcaucug

SEQ ID NO: 1845322 - RNA, 14 nt, Human
aucaggugcugcca

SEQ ID NO: 1845323 - RNA, 20 nt, Human
aucccaaacccuucagugcc

SEQ ID NO: 1845324 - RNA, 19 nt, Human
aucccaaacccuucagugc

SEQ ID NO: 1845325 - RNA, 18 nt, Human
aucccauaugccugggca

SEQ ID NO: 1845326 - RNA, 21 nt, Human
auccaguaucuugaagacuuu

SEQ ID NO: 1845327 - RNA, 13 nt, Human
auccaucaggcca

SEQ ID NO: 1845328 - RNA, 20 nt, Human
aucauuuuaccuuugacaaa

SEQ ID NO: 1845329 - RNA, 18 nt, Human
auccaagcaaaugugaau

SEQ ID NO: 1845330 - RNA, 18 nt, Human
auccaagcuggucccacu

SEQ ID NO: 1845331 - RNA, 21 nt, Human
auccaagcuggucccacucag

SEQ ID NO: 1845332 - RNA, 13 nt, Human
auccacccaccuc

SEQ ID NO: 1845333 - RNA, 15 nt, Human
auccacccaccucag

SEQ ID NO: 1845334 - RNA, 16 nt, Human
auccaguaucuugaag

SEQ ID NO: 1845335 - RNA, 16 nt, Human
auccacccaccucagc

SEQ ID NO: 1845336 - RNA, 18 nt, Human
auggagacugucucaaga

SEQ ID NO: 1845337 - RNA, 19 nt, Human
auggcuaagcaaaauguga

SEQ ID NO: 1845338 - RNA, 18 nt, Human
auggcuaauguacugcau

SEQ ID NO: 1845339 - RNA, 15 nt, Human
augggagagaagaga

SEQ ID NO: 1845340 - RNA, 19 nt, Human
augggagagaagagaaugc

SEQ ID NO: 1845341 - RNA, 12 nt, Human
auggacuuuguu

SEQ ID NO: 1845342 - RNA, 11 nt, Human
auggacuuugu

SEQ ID NO: 1845343 - RNA, 19 nt, Human
auggacuaacuugucuuug

SEQ ID NO: 1845344 - RNA, 18 nt, Human
uuuccaugaguccccugu

SEQ ID NO: 1845345 - RNA, 17 nt, Human
uuuccaugaguccccug

SEQ ID NO: 1845346 - RNA, 13 nt, Human
augcuucucacug

SEQ ID NO: 1845347 - RNA, 22 nt, Human
augcugugcccuaaaguguauu

SEQ ID NO: 1845348 - RNA, 13 nt, Human
augcugcuuuuuc

SEQ ID NO: 1845349 - RNA, 22 nt, Human
uuucaaaauuguuacaaauugu

SEQ ID NO: 1845350 - RNA, 16 nt, Human
uuucaaacuuuacuau

SEQ ID NO: 1845351 - RNA, 22 nt, Human
uuucaaacuuuacuauggcccu

SEQ ID NO: 1845352 - RNA, 20 nt, Human
uuuauuuuguguuuaggaac

SEQ ID NO: 1845353 - RNA, 16 nt, Human
uuuauuuuguguuuag

SEQ ID NO: 1845354 - RNA, 16 nt, Human
augcuaagacucagug

SEQ ID NO: 1845355 - RNA, 18 nt, Human
uuuaucaugugaaaucau

SEQ ID NO: 1845356 - RNA, 17 nt, Human
uuuaucaugugaaauca

SEQ ID NO: 1845357 - RNA, 20 nt, Human
augcuagaacucccuuucaa

SEQ ID NO: 1845358 - RNA, 21 nt, Human
augcuagaacucccuuucaac

SEQ ID NO: 1845359 - RNA, 22 nt, Human
augcuagaacucccuuucaaca

SEQ ID NO: 1845360 - RNA, 20 nt, Human
augcacuuuguucuggcucu

SEQ ID NO: 1845361 - RNA, 19 nt, Human
augcacuuuguucuggcuc

SEQ ID NO: 1845362 - RNA, 17 nt, Human
augcacuuuguucuggc

SEQ ID NO: 1845363 - RNA, 13 nt, Human
augcaccuggaau

SEQ ID NO: 1845364 - RNA, 22 nt, Human
augcaccagcccuuagcaggga

SEQ ID NO: 1845365 - RNA, 13 nt, Human
uuuaaagaaugcu

SEQ ID NO: 1845366 - RNA, 20 nt, Human
augaucuaggaagacuuugg

SEQ ID NO: 1845367 - RNA, 17 nt, Human
augaucuaggaagacuu

SEQ ID NO: 1845368 - RNA, 17 nt, Human
augauacuugaaaauua

SEQ ID NO: 1845369 - RNA, 21 nt, Human
augauacuugaaaauuaacau

SEQ ID NO: 1845370 - RNA, 13 nt, Human
uuguguuacuaag

SEQ ID NO: 1845371 - RNA, 15 nt, Human
uuguguuacuaaguu

SEQ ID NO: 1845372 - RNA, 20 nt, Human
uuguguuacuaaguuuuuau

SEQ ID NO: 1845373 - RNA, 21 nt, Human
uuguuccacaaguuaaauaaa

SEQ ID NO: 1845374 - RNA, 13 nt, Human
uuguguucaccuu

SEQ ID NO: 1845375 - RNA, 16 nt, Human
augcgggccagugcuc

SEQ ID NO: 1845376 - RNA, 21 nt, Human
augcgggccagugcuccagcc

SEQ ID NO: 1845377 - RNA, 14 nt, Human
augcccagccccuu

SEQ ID NO: 1845378 - RNA, 13 nt, Human
augcccagccccu

SEQ ID NO: 1845379 - RNA, 12 nt, Human
augcccagcccc

SEQ ID NO: 1845380 - RNA, 14 nt, Human
augcccuggaucca

SEQ ID NO: 1845381 - RNA, 16 nt, Human
augccucagccuccug

SEQ ID NO: 1845382 - RNA, 13 nt, Human
augcagugcuucc

SEQ ID NO: 1845383 - RNA, 23 nt, Human
augcagugguaugaucacggcuc

SEQ ID NO: 1845384 - RNA, 11 nt, Human
augcccagccc

SEQ ID NO: 1845385 - RNA, 18 nt, Human
augcagccucacaguccu

SEQ ID NO: 1845386 - RNA, 17 nt, Human
augcagcaucuaaguaa

SEQ ID NO: 1845387 - RNA, 19 nt, Human
uuuaauuuuuuugagacag

SEQ ID NO: 1845388 - RNA, 12 nt, Human
uuuaauucaguu

SEQ ID NO: 1845389 - RNA, 18 nt, Human
uuuaaauauaugcuaagu

SEQ ID NO: 1845390 - RNA, 19 nt, Human
augugaugagaggaaauca

SEQ ID NO: 1845391 - RNA, 17 nt, Human
augugaugagaggaaau

SEQ ID NO: 1845392 - RNA, 16 nt, Human
augugaugagaggaaa

SEQ ID NO: 1845393 - RNA, 23 nt, Human
augucucuuuaaugucacaggca

SEQ ID NO: 1845394 - RNA, 23 nt, Human
augugcacaugcacgugugugca

SEQ ID NO: 1845395 - RNA, 12 nt, Human
uuuguauaaaag

SEQ ID NO: 1845396 - RNA, 14 nt, Human
uuuguaaugaaaac

SEQ ID NO: 1845397 - RNA, 13 nt, Human
uuuguaaugaaaa

SEQ ID NO: 1845398 - RNA, 22 nt, Human
uuugugaaaugauggugaaagu

SEQ ID NO: 1845399 - RNA, 21 nt, Human
uuugucuuguguuucuuuagu

SEQ ID NO: 1845400 - RNA, 19 nt, Human
uuugucuuuggugaacauu

SEQ ID NO: 1845401 - RNA, 20 nt, Human
uuugugaagguggaaauaaa

SEQ ID NO: 1845402 - RNA, 15 nt, Human
augucgccucugcau

SEQ ID NO: 1845403 - RNA, 22 nt, Human
augucucaggucccugcagggc

SEQ ID NO: 1845404 - RNA, 17 nt, Human
augucucaggucccugc

SEQ ID NO: 1845405 - RNA, 14 nt, Human
augucgccucugca

SEQ ID NO: 1845406 - RNA, 13 nt, Human
augucgccucugc

SEQ ID NO: 1845407 - RNA, 15 nt, Human
augucucgugguagg

SEQ ID NO: 1845408 - RNA, 16 nt, Human
augucucgugguagga

SEQ ID NO: 1845409 - RNA, 17 nt, Human
augucucugagcauuag

SEQ ID NO: 1845410 - RNA, 19 nt, Human
augucucgugguaggacug

SEQ ID NO: 1845411 - RNA, 17 nt, Human
auguccacugguucuuc

SEQ ID NO: 1845412 - RNA, 13 nt, Human
augucagugugac

SEQ ID NO: 1845413 - RNA, 12 nt, Human
augucaguguga

SEQ ID NO: 1845414 - RNA, 16 nt, Human
auguauguguaaguau

SEQ ID NO: 1845415 - RNA, 15 nt, Human
auguauguguaagua

SEQ ID NO: 1845416 - RNA, 18 nt, Human
auguaugagguacaaccu

SEQ ID NO: 1845417 - RNA, 19 nt, Human
auguaugaggaauuucugu

SEQ ID NO: 1845418 - RNA, 22 nt, Human
uuugauguucuuucacccuuuu

SEQ ID NO: 1845419 - RNA, 13 nt, Human
uuugauuaaauuc

SEQ ID NO: 1845420 - RNA, 18 nt, Human
uuugauuaaauucuugca

SEQ ID NO: 1845421 - RNA, 21 nt, Human
uuugauuaaauucuugcaaag

SEQ ID NO: 1845422 - RNA, 21 nt, Human
uuugauucagacagcugccug

SEQ ID NO: 1845423 - RNA, 23 nt, Human
uuugauuaaauucuugcaaagua

SEQ ID NO: 1845424 - RNA, 19 nt, Human
uuugacgccaucccagccc

SEQ ID NO: 1845425 - RNA, 16 nt, Human
uuugacgccaucccag

SEQ ID NO: 1845426 - RNA, 14 nt, Human
uuugacgccauccc

SEQ ID NO: 1845427 - RNA, 13 nt, Human
uuugacgccaucc

SEQ ID NO: 1845428 - RNA, 20 nt, Human
uuugacgccaucccagcccc

SEQ ID NO: 1845429 - RNA, 13 nt, Human
uuugccucugccu

SEQ ID NO: 1845430 - RNA, 22 nt, Human
uuugauucagacagcugccugg

SEQ ID NO: 1845431 - RNA, 15 nt, Human
uuugccguuauuaaa

SEQ ID NO: 1845432 - RNA, 12 nt, Human
uuugaccucugc

SEQ ID NO: 1845433 - RNA, 19 nt, Human
auguagccccucuccugga

SEQ ID NO: 1845434 - RNA, 17 nt, Human
auguagaggagaaacug

SEQ ID NO: 1845435 - RNA, 19 nt, Human
auguagaggagaaacugga

SEQ ID NO: 1845436 - RNA, 12 nt, Human
auguagaggaga

SEQ ID NO: 1845437 - RNA, 13 nt, Human
auguagaggagaa

SEQ ID NO: 1845438 - RNA, 15 nt, Human
augguuuucaaaaua

SEQ ID NO: 1845439 - RNA, 14 nt, Human
augguuuucaaaau

SEQ ID NO: 1845440 - RNA, 14 nt, Human
augguuuucuugug

SEQ ID NO: 1845441 - RNA, 16 nt, Human
augguuuucaaaauaa

SEQ ID NO: 1845442 - RNA, 20 nt, Human
augguuccccuguucacucu

SEQ ID NO: 1845443 - RNA, 19 nt, Human
augguuccccuguucacuc

SEQ ID NO: 1845444 - RNA, 13 nt, Human
augguuguacaua

SEQ ID NO: 1845445 - RNA, 17 nt, Human
auguaaaagacuuuuuu

SEQ ID NO: 1845446 - RNA, 17 nt, Human
auggugcaaugaccuuu

SEQ ID NO: 1845447 - RNA, 16 nt, Human
auggugcaaugaccuu

SEQ ID NO: 1845448 - RNA, 19 nt, Human
auggugcaaugaccuuuca

SEQ ID NO: 1845449 - RNA, 15 nt, Human
auggugcaaugaccu

SEQ ID NO: 1845450 - RNA, 13 nt, Human
auggugcaaugac

SEQ ID NO: 1845451 - RNA, 12 nt, Human
auggugcaauga

SEQ ID NO: 1845452 - RNA, 20 nt, Human
auggugagggauacccaucc

SEQ ID NO: 1845453 - RNA, 15 nt, Human
augggugcuuggagg

SEQ ID NO: 1845454 - RNA, 14 nt, Human
auggugaugaaaug

SEQ ID NO: 1845455 - RNA, 17 nt, Human
auggugaugaaauguaa

SEQ ID NO: 1845456 - RNA, 16 nt, Human
auggugaugaaaugua

SEQ ID NO: 1845457 - RNA, 12 nt, Human
augguggcuggg

SEQ ID NO: 1845458 - RNA, 13 nt, Human
augguggcugggu

SEQ ID NO: 1845459 - RNA, 15 nt, Human
augguggcuggguug

SEQ ID NO: 1845460 - RNA, 17 nt, Human
augguggcuggguugga

SEQ ID NO: 1845461 - RNA, 21 nt, Human
uuucugcagccacuauuguua

SEQ ID NO: 1845462 - RNA, 23 nt, Human
uuucugggcaccggggccucgga

SEQ ID NO: 1845463 - RNA, 14 nt, Human
uuucugcagaaaca

SEQ ID NO: 1845464 - RNA, 19 nt, Human
uuucugcagccacuauugu

SEQ ID NO: 1845465 - RNA, 15 nt, Human
uuucuggcuaugcau

SEQ ID NO: 1845466 - RNA, 16 nt, Human
uuucuggcuaugcauu

SEQ ID NO: 1845467 - RNA, 18 nt, Human
uuucuggcuaugcauuug

SEQ ID NO: 1845468 - RNA, 19 nt, Human
uuucuggcuaugcauuuga

SEQ ID NO: 1845469 - RNA, 18 nt, Human
augggcaacccccagccu

SEQ ID NO: 1845470 - RNA, 15 nt, Human
augggauccuggagu

SEQ ID NO: 1845471 - RNA, 15 nt, Human
augggggugcauuug

SEQ ID NO: 1845472 - RNA, 12 nt, Human
auggggcugcac

SEQ ID NO: 1845473 - RNA, 24 nt, Human
auggggcugcaccggcuggccugg

SEQ ID NO: 1845474 - RNA, 14 nt, Human
augggggugcauuu

SEQ ID NO: 1845475 - RNA, 17 nt, Human
augggggcacugaggac

SEQ ID NO: 1845476 - RNA, 18 nt, Human
augggccuccugugugug

SEQ ID NO: 1845477 - RNA, 20 nt, Human
augggcuggguucuacccag

SEQ ID NO: 1845478 - RNA, 14 nt, Human
auucuuaaauaugu

SEQ ID NO: 1845479 - RNA, 13 nt, Human
auucuuccucccu

SEQ ID NO: 1845480 - RNA, 18 nt, Human
auugaaaucuuuuugcuu

SEQ ID NO: 1845481 - RNA, 17 nt, Human
auugaaaucuuuuugcu

SEQ ID NO: 1845482 - RNA, 20 nt, Human
auugaaaucuuuuugcuuug

SEQ ID NO: 1845483 - RNA, 15 nt, Human
auugaaaaaccauuu

SEQ ID NO: 1845484 - RNA, 19 nt, Human
auugacacuuaaaaauggu

SEQ ID NO: 1845485 - RNA, 17 nt, Human
auugaccugaggcccuu

SEQ ID NO: 1845486 - RNA, 11 nt, Human
auugacuucuu

SEQ ID NO: 1845487 - RNA, 15 nt, Human
auugacacuuaaaaa

SEQ ID NO: 1845488 - RNA, 17 nt, Human
auugacacuuaaaaaug

SEQ ID NO: 1845489 - RNA, 11 nt, Human
auucugccugc

SEQ ID NO: 1845490 - RNA, 13 nt, Human
auucugccugccc

SEQ ID NO: 1845491 - RNA, 14 nt, Human
auucugccugccca

SEQ ID NO: 1845492 - RNA, 15 nt, Human
auucugccugcccag

SEQ ID NO: 1845493 - RNA, 16 nt, Human
auucugccugcccagg

SEQ ID NO: 1845494 - RNA, 17 nt, Human
auucugccugcccaggc

SEQ ID NO: 1845495 - RNA, 18 nt, Human
auucugccugcccaggcc

SEQ ID NO: 1845496 - RNA, 19 nt, Human
auucugccugcccaggccc

SEQ ID NO: 1845497 - RNA, 22 nt, Human
auucucaugccucagccuccug

SEQ ID NO: 1845498 - RNA, 17 nt, Human
auucucauuugucacac

SEQ ID NO: 1845499 - RNA, 15 nt, Human
auucuagcuuugagc

SEQ ID NO: 1845500 - RNA, 21 nt, Human
auucucaugccucagccuccu

SEQ ID NO: 1845501 - RNA, 18 nt, Human
auucugcucacauaucug

SEQ ID NO: 1845502 - RNA, 20 nt, Human
auucugccugcccaggcccc

SEQ ID NO: 1845503 - RNA, 21 nt, Human
auucugccugcccaggccccu

SEQ ID NO: 1845504 - RNA, 19 nt, Human
auucugcucacauaucugu

SEQ ID NO: 1845505 - RNA, 20 nt, Human
auucugcucacauaucuguc

SEQ ID NO: 1845506 - RNA, 21 nt, Human
auucugcucacauaucuguca

SEQ ID NO: 1845507 - RNA, 22 nt, Human
auucugcucacauaucugucau

SEQ ID NO: 1845508 - RNA, 19 nt, Human
auucuguuggccaguguga

SEQ ID NO: 1845509 - RNA, 21 nt, Human
auucuguuggccagugugaca

SEQ ID NO: 1845510 - RNA, 14 nt, Human
auucuguuggccag

SEQ ID NO: 1845511 - RNA, 13 nt, Human
auucaggaagcuc

SEQ ID NO: 1845512 - RNA, 19 nt, Human
auuccagagaguggcuccu

SEQ ID NO: 1845513 - RNA, 21 nt, Human
auuccagagaguggcuccucc

SEQ ID NO: 1845514 - RNA, 19 nt, Human
auuccagagcguguaguga

SEQ ID NO: 1845515 - RNA, 23 nt, Human
auuccccgucucugguuccuccc

SEQ ID NO: 1845516 - RNA, 17 nt, Human
auucagacagcugccug

SEQ ID NO: 1845517 - RNA, 16 nt, Human
auucagacagcugccu

SEQ ID NO: 1845518 - RNA, 15 nt, Human
auucagacagcugcc

SEQ ID NO: 1845519 - RNA, 14 nt, Human
auucagacagcugc

SEQ ID NO: 1845520 - RNA, 12 nt, Human
auucaggaagcu

SEQ ID NO: 1845521 - RNA, 22 nt, Human
auucaggaagcagcuuucccca

SEQ ID NO: 1845522 - RNA, 18 nt, Human
auucagacagcugccugg

SEQ ID NO: 1845523 - RNA, 20 nt, Human
auucacauuguauucagagu

SEQ ID NO: 1845524 - RNA, 13 nt, Human
auucacauuguau

SEQ ID NO: 1845525 - RNA, 13 nt, Human
auucagacagcug

SEQ ID NO: 1845526 - RNA, 12 nt, Human
auucagacagcu

SEQ ID NO: 1845527 - RNA, 11 nt, Human
auucagacagc

SEQ ID NO: 1845528 - RNA, 19 nt, Human
auuaucuaaaaucugcuag

SEQ ID NO: 1845529 - RNA, 14 nt, Human
auuaucuagauacu

SEQ ID NO: 1845530 - RNA, 18 nt, Human
auuaucuagauacuguau

SEQ ID NO: 1845531 - RNA, 15 nt, Human
auuauuauuuggccc

SEQ ID NO: 1845532 - RNA, 19 nt, Human
auucagacagcugccuggg

SEQ ID NO: 1845533 - RNA, 11 nt, Human
uuuguggaaaa

SEQ ID NO: 1845534 - RNA, 19 nt, Human
auuauacccccugcaaagc

SEQ ID NO: 1845535 - RNA, 14 nt, Human
auuauauuaugaag

SEQ ID NO: 1845536 - RNA, 15 nt, Human
auuauauuuacaaau

SEQ ID NO: 1845537 - RNA, 22 nt, Human
auuuuucuuagggaaggauaca

SEQ ID NO: 1845538 - RNA, 16 nt, Human
auuuuucagauauaaa

SEQ ID NO: 1845539 - RNA, 21 nt, Human
auuuuucuuagggaaggauac

SEQ ID NO: 1845540 - RNA, 21 nt, Human
auuuuguuuuugucuuaaaaa

SEQ ID NO: 1845541 - RNA, 19 nt, Human
auuuuuuacagcugccugc

SEQ ID NO: 1845542 - RNA, 18 nt, Human
auuuuuuguuaaaugauu

SEQ ID NO: 1845543 - RNA, 13 nt, Human
auuuuuuaaaugc

SEQ ID NO: 1845544 - RNA, 14 nt, Human
auuuuuuaaaugca

SEQ ID NO: 1845545 - RNA, 18 nt, Human
auuuuuuaaauugaauuc

SEQ ID NO: 1845546 - RNA, 12 nt, Human
auuuuuguaauu

SEQ ID NO: 1845547 - RNA, 19 nt, Human
auuuuuguagagccagggu

SEQ ID NO: 1845548 - RNA, 14 nt, Human
auuuuugucuugug

SEQ ID NO: 1845549 - RNA, 22 nt, Human
auuuuugugauuuugugauuga

SEQ ID NO: 1845550 - RNA, 20 nt, Human
auuuuggaaaauaaauuauu

SEQ ID NO: 1845551 - RNA, 19 nt, Human
auuuuggaaaauaaauuau

SEQ ID NO: 1845552 - RNA, 14 nt, Human
auuuuggaaaauaa

SEQ ID NO: 1845553 - RNA, 12 nt, Human
auuuugcuuugu

SEQ ID NO: 1845554 - RNA, 20 nt, Human
auuuugcuguagaagauggc

SEQ ID NO: 1845555 - RNA, 18 nt, Human
auuuugcuuugugauuuu

SEQ ID NO: 1845556 - RNA, 20 nt, Human
auuuugcuuugugauuuuug

SEQ ID NO: 1845557 - RNA, 18 nt, Human
auuuuguauauuuguauu

SEQ ID NO: 1845558 - RNA, 19 nt, Human
auuuugugcccccauguaa

SEQ ID NO: 1845559 - RNA, 12 nt, Human
auuuugucuuua

SEQ ID NO: 1845560 - RNA, 23 nt, Human
auuuugucauauaagauucauau

SEQ ID NO: 1845561 - RNA, 17 nt, Human
auuuuguguuuaggaac

SEQ ID NO: 1845562 - RNA, 20 nt, Human
auuuugcuaaaugugaauga

SEQ ID NO: 1845563 - RNA, 21 nt, Human
auuuugcugucccuuuuccuu

SEQ ID NO: 1845564 - RNA, 18 nt, Human
auuuugccagugggaacu

SEQ ID NO: 1845565 - RNA, 15 nt, Human
auuuugauguuuuaa

SEQ ID NO: 1845566 - RNA, 17 nt, Human
auuuugauguuuuaagg

SEQ ID NO: 1845567 - RNA, 19 nt, Human
auuuugauccaagcugguc

SEQ ID NO: 1845568 - RNA, 17 nt, Human
auuuuaauaaacacucu

SEQ ID NO: 1845569 - RNA, 16 nt, Human
auuuuaauaaacacuc

SEQ ID NO: 1845570 - RNA, 15 nt, Human
auuuuaauaaacacu

SEQ ID NO: 1845571 - RNA, 19 nt, Human
auuuucccuauuagagaag

SEQ ID NO: 1845572 - RNA, 16 nt, Human
auuuuccugccaggca

SEQ ID NO: 1845573 - RNA, 15 nt, Human
auuuucuauaauuua

SEQ ID NO: 1845574 - RNA, 14 nt, Human
auuuucuauaauuu

SEQ ID NO: 1845575 - RNA, 13 nt, Human
auugugggaaggg

SEQ ID NO: 1845576 - RNA, 14 nt, Human
auugugggaagggg

SEQ ID NO: 1845577 - RNA, 16 nt, Human
auugucaaagugguga

SEQ ID NO: 1845578 - RNA, 23 nt, Human
auugucaaaguggugagaggcau

SEQ ID NO: 1845579 - RNA, 14 nt, Human
auuguacaguuuuu

SEQ ID NO: 1845580 - RNA, 15 nt, Human
auuguacaguuuuua

SEQ ID NO: 1845581 - RNA, 21 nt, Human
auuguacaguuuuuauugcuu

SEQ ID NO: 1845582 - RNA, 14 nt, Human
auuuaaaagauaca

SEQ ID NO: 1845583 - RNA, 16 nt, Human
auuuaaaagauacagu

SEQ ID NO: 1845584 - RNA, 17 nt, Human
auuuaaaagauacaguu

SEQ ID NO: 1845585 - RNA, 13 nt, Human
auuuaaaagauac

SEQ ID NO: 1845586 - RNA, 21 nt, Human
auuguuuggggaugagaaagg

SEQ ID NO: 1845587 - RNA, 18 nt, Human
auugguaaagaauggaag

SEQ ID NO: 1845588 - RNA, 16 nt, Human
auuggauuugucuuug

SEQ ID NO: 1845589 - RNA, 21 nt, Human
auugauuuccguuaaaauacc

SEQ ID NO: 1845590 - RNA, 19 nt, Human
auuggacaguaaaauccac

SEQ ID NO: 1845591 - RNA, 22 nt, Human
auuuuaaaaauacagauagaua

SEQ ID NO: 1845592 - RNA, 23 nt, Human
auuugugaaaugauggugaaagu

SEQ ID NO: 1845593 - RNA, 21 nt, Human
auuugugaagguggaaauaaa

SEQ ID NO: 1845594 - RNA, 18 nt, Human
auuugugaagguggaaau

SEQ ID NO: 1845595 - RNA, 15 nt, Human
auuugucaacaaagu

SEQ ID NO: 1845596 - RNA, 13 nt, Human
auuugucaacaaa

SEQ ID NO: 1845597 - RNA, 19 nt, Human
auuucccaaagcagugcau

SEQ ID NO: 1845598 - RNA, 16 nt, Human
auuuccacucaggucu

SEQ ID NO: 1845599 - RNA, 22 nt, Human
auuuccacucaggucuguuuuc

SEQ ID NO: 1845600 - RNA, 14 nt, Human
auuuauuuaaauuu

SEQ ID NO: 1845601 - RNA, 12 nt, Human
auuuauuuaaau

SEQ ID NO: 1845602 - RNA, 23 nt, Human
auuucuuccacaagagcccaggc

SEQ ID NO: 1845603 - RNA, 20 nt, Human
auuucuuccacaagagccca

SEQ ID NO: 1845604 - RNA, 18 nt, Human
auuugaaacacuuugcau

SEQ ID NO: 1845605 - RNA, 16 nt, Human
auuugaaaauuuugau

SEQ ID NO: 1845606 - RNA, 20 nt, Human
auuucuugagguaaaagcau

SEQ ID NO: 1845607 - RNA, 15 nt, Human
caccccuaaagagau

SEQ ID NO: 1845608 - RNA, 17 nt, Human
caccccggccaccugcg

SEQ ID NO: 1845609 - RNA, 16 nt, Human
caccccggccaccugc

SEQ ID NO: 1845610 - RNA, 15 nt, Human
caccccggccaccug

SEQ ID NO: 1845611 - RNA, 14 nt, Human
caccccggccaccu

SEQ ID NO: 1845612 - RNA, 14 nt, Human
caccccuaaagaga

SEQ ID NO: 1845613 - RNA, 22 nt, Human
cacccccacccaagggccuggc

SEQ ID NO: 1845614 - RNA, 18 nt, Human
cacccaagggccuggccu

SEQ ID NO: 1845615 - RNA, 17 nt, Human
cacccaagggccuggcc

SEQ ID NO: 1845616 - RNA, 16 nt, Human
cacccaagggccuggc

SEQ ID NO: 1845617 - RNA, 23 nt, Human
cacccaagggccuggccugagcu

SEQ ID NO: 1845618 - RNA, 21 nt, Human
cacccaagggccuggccugag

SEQ ID NO: 1845619 - RNA, 20 nt, Human
cacccaagggccuggccuga

SEQ ID NO: 1845620 - RNA, 19 nt, Human
cacccaagggccuggccug

SEQ ID NO: 1845621 - RNA, 13 nt, Human
caccccagcccca

SEQ ID NO: 1845622 - RNA, 12 nt, Human
caccccagcccc

SEQ ID NO: 1845623 - RNA, 12 nt, Human
cacccaccucag

SEQ ID NO: 1845624 - RNA, 13 nt, Human
cacccaccucagc

SEQ ID NO: 1845625 - RNA, 14 nt, Human
cacccaccucagcc

SEQ ID NO: 1845626 - RNA, 16 nt, Human
cacccaccucagccuc

SEQ ID NO: 1845627 - RNA, 20 nt, Human
cacccaccaucaugucuggc

SEQ ID NO: 1845628 - RNA, 22 nt, Human
cacccaccaucaugucuggcua

SEQ ID NO: 1845629 - RNA, 16 nt, Human
cacauuccugaugcuu

SEQ ID NO: 1845630 - RNA, 13 nt, Human
cacauguggacuu

SEQ ID NO: 1845631 - RNA, 17 nt, Human
cacaugugcacaugcac

SEQ ID NO: 1845632 - RNA, 14 nt, Human
cacaugugcacaug

SEQ ID NO: 1845633 - RNA, 15 nt, Human
cacaugugcacaugc

SEQ ID NO: 1845634 - RNA, 19 nt, Human
cacaugccucucucaggcc

SEQ ID NO: 1845635 - RNA, 18 nt, Human
cacaugccucucucaggc

SEQ ID NO: 1845636 - RNA, 17 nt, Human
cacaugccucucucagg

SEQ ID NO: 1845637 - RNA, 13 nt, Human
cacaugccucucu

SEQ ID NO: 1845638 - RNA, 19 nt, Human
cacaucagcacgauuucug

SEQ ID NO: 1845639 - RNA, 18 nt, Human
cacaucagcacgauuucu

SEQ ID NO: 1845640 - RNA, 12 nt, Human
cacauaucuguc

SEQ ID NO: 1845641 - RNA, 14 nt, Human
cacauaucugucau

SEQ ID NO: 1845642 - RNA, 19 nt, Human
caccacaugugcacaugca

SEQ ID NO: 1845643 - RNA, 15 nt, Human
caccacaugugcaca

SEQ ID NO: 1845644 - RNA, 18 nt, Human
caccacaugugcacaugc

SEQ ID NO: 1845645 - RNA, 14 nt, Human
caccaccucuuugg

SEQ ID NO: 1845646 - RNA, 16 nt, Human
caccacuacauucugu

SEQ ID NO: 1845647 - RNA, 17 nt, Human
caccacuacauucuguu

SEQ ID NO: 1845648 - RNA, 18 nt, Human
caccacuacauucuguua

SEQ ID NO: 1845649 - RNA, 19 nt, Human
caccacuacauucuguuaa

SEQ ID NO: 1845650 - RNA, 20 nt, Human
caccacuacauucuguuaau

SEQ ID NO: 1845651 - RNA, 13 nt, Human
caccacacccagc

SEQ ID NO: 1845652 - RNA, 15 nt, Human
caccacacccagccc

SEQ ID NO: 1845653 - RNA, 17 nt, Human
caccacacccagcccac

SEQ ID NO: 1845654 - RNA, 18 nt, Human
cacauuggagauguuuag

SEQ ID NO: 1845655 - RNA, 15 nt, Human
caccaagcccaguua

SEQ ID NO: 1845656 - RNA, 19 nt, Human
cacagugagucgaggacag

SEQ ID NO: 1845657 - RNA, 20 nt, Human
cacagugagucgaggacagg

SEQ ID NO: 1845658 - RNA, 15 nt, Human
cacaggcccuuccuc

SEQ ID NO: 1845659 - RNA, 18 nt, Human
cacagugagucgaggaca

SEQ ID NO: 1845660 - RNA, 20 nt, Human
cacaggcccggcuccaggcu

SEQ ID NO: 1845661 - RNA, 23 nt, Human
cacaggcccggcuccaggcuccu

SEQ ID NO: 1845662 - RNA, 22 nt, Human
cacauaauucaggaagcagcuu

SEQ ID NO: 1845663 - RNA, 17 nt, Human
cacauacacacacacgc

SEQ ID NO: 1845664 - RNA, 10 nt, Human
cacaggcagg

SEQ ID NO: 1845665 - RNA, 16 nt, Human
cacaggcccggcucca

SEQ ID NO: 1845666 - RNA, 17 nt, Human
cacaggcccggcuccag

SEQ ID NO: 1845667 - RNA, 18 nt, Human
cacaggcccggcuccagg

SEQ ID NO: 1845668 - RNA, 19 nt, Human
cacaggcccggcuccaggc

SEQ ID NO: 1845669 - RNA, 12 nt, Human
cacaggaucagu

SEQ ID NO: 1845670 - RNA, 15 nt, Human
cacaggaucagucug

SEQ ID NO: 1845671 - RNA, 16 nt, Human
cacaggaucagucuga

SEQ ID NO: 1845672 - RNA, 15 nt, Human
cacaggaaguagagg

SEQ ID NO: 1845673 - RNA, 18 nt, Human
cacagaugggugcuugga

SEQ ID NO: 1845674 - RNA, 14 nt, Human
cacagaugggugcu

SEQ ID NO: 1845675 - RNA, 20 nt, Human
cacagaguuguuacauuuuu

SEQ ID NO: 1845676 - RNA, 20 nt, Human
cacagaugggugcuuggagg

SEQ ID NO: 1845677 - RNA, 20 nt, Human
cacagcacgggggccaagga

SEQ ID NO: 1845678 - RNA, 16 nt, Human
cacagcagccccugca

SEQ ID NO: 1845679 - RNA, 19 nt, Human
caaugugaaaagaaaaaug

SEQ ID NO: 1845680 - RNA, 22 nt, Human
caaugaaugaaugaauggcuaa

SEQ ID NO: 1845681 - RNA, 14 nt, Human
caaugacacagucu

SEQ ID NO: 1845682 - RNA, 19 nt, Human
caaugacacagucuuggcu

SEQ ID NO: 1845683 - RNA, 21 nt, Human
caaugacacagucuuggcuca

SEQ ID NO: 1845684 - RNA, 13 nt, Human
caaugaccuuuca

SEQ ID NO: 1845685 - RNA, 18 nt, Human
caaugcaaaccaucauug

SEQ ID NO: 1845686 - RNA, 17 nt, Human
caaugcaaaccaucauu

SEQ ID NO: 1845687 - RNA, 20 nt, Human
caaugcaaaccaucauugaa

SEQ ID NO: 1845688 - RNA, 19 nt, Human
caaugcaaaccaucauuga

SEQ ID NO: 1845689 - RNA, 23 nt, Human
caaugcacuuuguucuggcucuu

SEQ ID NO: 1845690 - RNA, 20 nt, Human
caauaggaaaaacugauuuu

SEQ ID NO: 1845691 - RNA, 21 nt, Human
caauaggaaaaacugauuuuu

SEQ ID NO: 1845692 - RNA, 21 nt, Human
cacaaauucugucucuggauu

SEQ ID NO: 1845693 - RNA, 22 nt, Human
cacaacacacagauuugagcuc

SEQ ID NO: 1845694 - RNA, 23 nt, Human
cacaaccuucuguggcucacaga

SEQ ID NO: 1845695 - RNA, 19 nt, Human
cacaaccuucuguggcuca

SEQ ID NO: 1845696 - RNA, 18 nt, Human
cacaaccuucuguggcuc

SEQ ID NO: 1845697 - RNA, 17 nt, Human
cacaaccuucuguggcu

SEQ ID NO: 1845698 - RNA, 16 nt, Human
cacaaaaguuucucuu

SEQ ID NO: 1845699 - RNA, 18 nt, Human
cacaaaaguuucucuuuu

SEQ ID NO: 1845700 - RNA, 17 nt, Human
cacacuucaggcucuuc

SEQ ID NO: 1845701 - RNA, 14 nt, Human
cacacuucaggcuc

SEQ ID NO: 1845702 - RNA, 22 nt, Human
cacacuucaggcucuucuccuu

SEQ ID NO: 1845703 - RNA, 21 nt, Human
cacacuucaggcucuucuccu

SEQ ID NO: 1845704 - RNA, 20 nt, Human
cacacuucaggcucuucucc

SEQ ID NO: 1845705 - RNA, 18 nt, Human
cacacuucaggcucuucu

SEQ ID NO: 1845706 - RNA, 21 nt, Human
cacacuugacaucaacugcau

SEQ ID NO: 1845707 - RNA, 16 nt, Human
cacagaguuguuacau

SEQ ID NO: 1845708 - RNA, 17 nt, Human
cacagaguuguuacauu

SEQ ID NO: 1845709 - RNA, 12 nt, Human
cacagagaaagu

SEQ ID NO: 1845710 - RNA, 19 nt, Human
cacacagaggcugccucuc

SEQ ID NO: 1845711 - RNA, 12 nt, Human
cacacagcucug

SEQ ID NO: 1845712 - RNA, 14 nt, Human
cacacaccagagcc

SEQ ID NO: 1845713 - RNA, 13 nt, Human
cacacccagccca

SEQ ID NO: 1845714 - RNA, 15 nt, Human
cacaccagagcccac

SEQ ID NO: 1845715 - RNA, 12 nt, Human
cacaccagagcc

SEQ ID NO: 1845716 - RNA, 13 nt, Human
cacaccagagccc

SEQ ID NO: 1845717 - RNA, 14 nt, Human
cacacccuguuuua

SEQ ID NO: 1845718 - RNA, 17 nt, Human
cacaccgggcacucaga

SEQ ID NO: 1845719 - RNA, 12 nt, Human
caaauauauuca

SEQ ID NO: 1845720 - RNA, 21 nt, Human
caaaggaugcccaaagaugca

SEQ ID NO: 1845721 - RNA, 16 nt, Human
caaaucagcugcuacu

SEQ ID NO: 1845722 - RNA, 18 nt, Human
caaaugucuuccuggauu

SEQ ID NO: 1845723 - RNA, 15 nt, Human
caaaugucuuccugg

SEQ ID NO: 1845724 - RNA, 13 nt, Human
caaaucagcugcu

SEQ ID NO: 1845725 - RNA, 21 nt, Human
caaauguucaucaaugaauga

SEQ ID NO: 1845726 - RNA, 20 nt, Human
caaauguucaucaaugaaug

SEQ ID NO: 1845727 - RNA, 14 nt, Human
caaauguggcuccu

SEQ ID NO: 1845728 - RNA, 22 nt, Human
caaauucugcuugcuugcuuuu

SEQ ID NO: 1845729 - RNA, 16 nt, Human
caaagcuuguuaagau

SEQ ID NO: 1845730 - RNA, 20 nt, Human
caaagccaaagcuaggccug

SEQ ID NO: 1845731 - RNA, 21 nt, Human
caaagccaaagcuaggccugg

SEQ ID NO: 1845732 - RNA, 22 nt, Human
caaagccaaagcuaggccuggc

SEQ ID NO: 1845733 - RNA, 16 nt, Human
caaagcuaggccuggc

SEQ ID NO: 1845734 - RNA, 17 nt, Human
caaagcuaggccuggcc

SEQ ID NO: 1845735 - RNA, 18 nt, Human
caaagcuaggccuggcca

SEQ ID NO: 1845736 - RNA, 18 nt, Human
auuuuuuuacuaauagac

SEQ ID NO: 1845737 - RNA, 16 nt, Human
caaccugauugugucu

SEQ ID NO: 1845738 - RNA, 19 nt, Human
caacucuccuccagaguca

SEQ ID NO: 1845739 - RNA, 18 nt, Human
caacgcagcccugcuuug

SEQ ID NO: 1845740 - RNA, 15 nt, Human
caacgcagcccugcu

SEQ ID NO: 1845741 - RNA, 13 nt, Human
caacgcagcccug

SEQ ID NO: 1845742 - RNA, 12 nt, Human
caacgcagcccu

SEQ ID NO: 1845743 - RNA, 15 nt, Human
caacccucaucacca

SEQ ID NO: 1845744 - RNA, 12 nt, Human
caacccucauca

SEQ ID NO: 1845745 - RNA, 20 nt, Human
caacucuccuccagagucag

SEQ ID NO: 1845746 - RNA, 16 nt, Human
caacugcauuggcuuu

SEQ ID NO: 1845747 - RNA, 12 nt, Human
caacuuuguaua

SEQ ID NO: 1845748 - RNA, 11 nt, Human
caacuuuguau

SEQ ID NO: 1845749 - RNA, 18 nt, Human
caacccucagagccaccc

SEQ ID NO: 1845750 - RNA, 21 nt, Human
caacccucagagccaccccua

SEQ ID NO: 1845751 - RNA, 21 nt, Human
caaccccuucgcuccuguguc

SEQ ID NO: 1845752 - RNA, 18 nt, Human
caaccccuucgcuccugu

SEQ ID NO: 1845753 - RNA, 19 nt, Human
caaccccuucgcuccugug

SEQ ID NO: 1845754 - RNA, 15 nt, Human
caacagguuuuccug

SEQ ID NO: 1845755 - RNA, 18 nt, Human
caacaggguuuuuuucca

SEQ ID NO: 1845756 - RNA, 19 nt, Human
caacagguuuuccugaaga

SEQ ID NO: 1845757 - RNA, 22 nt, Human
caacaucuuggucagauuugaa

SEQ ID NO: 1845758 - RNA, 15 nt, Human
caaauuuacagagac

SEQ ID NO: 1845759 - RNA, 23 nt, Human
caacaggcugggcuucaguggca

SEQ ID NO: 1845760 - RNA, 24 nt, Human
caacaggcugggcuucaguggcag

SEQ ID NO: 1845761 - RNA, 18 nt, Human
caaauucugucucuggau

SEQ ID NO: 1845762 - RNA, 15 nt, Human
caaauucugucucug

SEQ ID NO: 1845763 - RNA, 14 nt, Human
caaauuuacagaga

SEQ ID NO: 1845764 - RNA, 21 nt, Human
caaggaugaucuaggaagacu

SEQ ID NO: 1845765 - RNA, 19 nt, Human
caaggaugccccguccccc

SEQ ID NO: 1845766 - RNA, 13 nt, Human
caaggauccugag

SEQ ID NO: 1845767 - RNA, 14 nt, Human
caaggacuaggguc

SEQ ID NO: 1845768 - RNA, 17 nt, Human
caagcgugagccacugc

SEQ ID NO: 1845769 - RNA, 18 nt, Human
caagcgugagccacugca

SEQ ID NO: 1845770 - RNA, 18 nt, Human
caaggacagccccuccuc

SEQ ID NO: 1845771 - RNA, 21 nt, Human
caagccaccaacauacuccca

SEQ ID NO: 1845772 - RNA, 16 nt, Human
caagccguggcuuccc

SEQ ID NO: 1845773 - RNA, 15 nt, Human
caagccguggcuucc

SEQ ID NO: 1845774 - RNA, 14 nt, Human
caagccguggcuuc

SEQ ID NO: 1845775 - RNA, 17 nt, Human
caagccguggcuucccg

SEQ ID NO: 1845776 - RNA, 16 nt, Human
caagcgugagccacug

SEQ ID NO: 1845777 - RNA, 18 nt, Human
caagcaccuccugccucg

SEQ ID NO: 1845778 - RNA, 17 nt, Human
caagcacuaaacaaaga

SEQ ID NO: 1845779 - RNA, 23 nt, Human
caaggugggaggauugcuugagc

SEQ ID NO: 1845780 - RNA, 12 nt, Human
caaggugggagg

SEQ ID NO: 1845781 - RNA, 19 nt, Human
caagggccuggccugagcu

SEQ ID NO: 1845782 - RNA, 15 nt, Human
caaggauugcuacug

SEQ ID NO: 1845783 - RNA, 19 nt, Human
caaggauugcuacuguccu

SEQ ID NO: 1845784 - RNA, 22 nt, Human
caagugugguagagugugccug

SEQ ID NO: 1845785 - RNA, 14 nt, Human
caagugauucuccu

SEQ ID NO: 1845786 - RNA, 21 nt, Human
caagugauucuccugccucag

SEQ ID NO: 1845787 - RNA, 22 nt, Human
caagugauucuccugccucagc

SEQ ID NO: 1845788 - RNA, 19 nt, Human
caagugaaaaaggaggaag

SEQ ID NO: 1845789 - RNA, 22 nt, Human
caagugauucucaugccucagc

SEQ ID NO: 1845790 - RNA, 16 nt, Human
caagugauucuccugc

SEQ ID NO: 1845791 - RNA, 17 nt, Human
caagugauucuccugcc

SEQ ID NO: 1845792 - RNA, 14 nt, Human
cccacgcuggagug

SEQ ID NO: 1845793 - RNA, 19 nt, Human
cccacgcccccacugguga

SEQ ID NO: 1845794 - RNA, 17 nt, Human
cccacgcccccacuggu

SEQ ID NO: 1845795 - RNA, 16 nt, Human
cccaccuuggcugcag

SEQ ID NO: 1845796 - RNA, 15 nt, Human
cccaccuuggcucaa

SEQ ID NO: 1845797 - RNA, 22 nt, Human
cccaccuuggcucaaguccucu

SEQ ID NO: 1845798 - RNA, 14 nt, Human
cccaccuuggcugc

SEQ ID NO: 1845799 - RNA, 15 nt, Human
cccaccuuggcugca

SEQ ID NO: 1845800 - RNA, 12 nt, Human
cccaccucagcc

SEQ ID NO: 1845801 - RNA, 14 nt, Human
cccaccucagccuc

SEQ ID NO: 1845802 - RNA, 15 nt, Human
cccaccucagccucc

SEQ ID NO: 1845803 - RNA, 19 nt, Human
cccaccucucucacuccuu

SEQ ID NO: 1845804 - RNA, 12 nt, Human
cccaccuuggcu

SEQ ID NO: 1845805 - RNA, 17 nt, Human
cccaccucucucacucc

SEQ ID NO: 1845806 - RNA, 14 nt, Human
cccaccucucucac

SEQ ID NO: 1845807 - RNA, 13 nt, Human
cccaccucucuca

SEQ ID NO: 1845808 - RNA, 21 nt, Human
cccaccucagccucccaaagu

SEQ ID NO: 1845809 - RNA, 14 nt, Human
cccaagggccuggc

SEQ ID NO: 1845810 - RNA, 12 nt, Human
cccaagggccug

SEQ ID NO: 1845811 - RNA, 21 nt, Human
ccauuuuguauuuuacuaaua

SEQ ID NO: 1845812 - RNA, 20 nt, Human
ccauuuugcugucccuuuuc

SEQ ID NO: 1845813 - RNA, 16 nt, Human
cccaagggccuggccu

SEQ ID NO: 1845814 - RNA, 17 nt, Human
cccaagggccuggccug

SEQ ID NO: 1845815 - RNA, 18 nt, Human
cccacaggcccuuccucu

SEQ ID NO: 1845816 - RNA, 16 nt, Human
cccacaggcccuuccu

SEQ ID NO: 1845817 - RNA, 19 nt, Human
cccacauagugaugguucc

SEQ ID NO: 1845818 - RNA, 13 nt, Human
cccacagcgcugg

SEQ ID NO: 1845819 - RNA, 17 nt, Human
cccacaggaucagucug

SEQ ID NO: 1845820 - RNA, 13 nt, Human
cccacaggaucag

SEQ ID NO: 1845821 - RNA, 14 nt, Human
ccauucuccaccug

SEQ ID NO: 1845822 - RNA, 13 nt, Human
ccauuugcuccuu

SEQ ID NO: 1845823 - RNA, 15 nt, Human
ccauucugccugccc

SEQ ID NO: 1845824 - RNA, 18 nt, Human
ccauguuuuguuuacggu

SEQ ID NO: 1845825 - RNA, 23 nt, Human
ccaggcugggagagccuuccagg

SEQ ID NO: 1845826 - RNA, 16 nt, Human
ccaggcccucugccca

SEQ ID NO: 1845827 - RNA, 15 nt, Human
ccaggcccucugccc

SEQ ID NO: 1845828 - RNA, 16 nt, Human
ccaggcugggucgccc

SEQ ID NO: 1845829 - RNA, 12 nt, Human
ccaggcuggguc

SEQ ID NO: 1845830 - RNA, 24 nt, Human
ccaggcugggucgcccuggacugu

SEQ ID NO: 1845831 - RNA, 23 nt, Human
ccaggcugggucgcccuggacug

SEQ ID NO: 1845832 - RNA, 22 nt, Human
ccaggcugggucgcccuggacu

SEQ ID NO: 1845833 - RNA, 21 nt, Human
ccaggcugggucgcccuggac

SEQ ID NO: 1845834 - RNA, 23 nt, Human
ccaggcuuagucacugagacagc

SEQ ID NO: 1845835 - RNA, 22 nt, Human
ccaggcuuagucacugagacag

SEQ ID NO: 1845836 - RNA, 21 nt, Human
ccaggcuuagucacugagaca

SEQ ID NO: 1845837 - RNA, 14 nt, Human
ccaggcuggucuca

SEQ ID NO: 1845838 - RNA, 20 nt, Human
ccaggaggccagccuugacc

SEQ ID NO: 1845839 - RNA, 18 nt, Human
ccaggaggccagccuuga

SEQ ID NO: 1845840 - RNA, 15 nt, Human
ccaggaggccagccu

SEQ ID NO: 1845841 - RNA, 14 nt, Human
ccaggcccucugcc

SEQ ID NO: 1845842 - RNA, 13 nt, Human
ccaggcccucugc

SEQ ID NO: 1845843 - RNA, 12 nt, Human
ccaggccagagg

SEQ ID NO: 1845844 - RNA, 14 nt, Human
ccaggccccugcca

SEQ ID NO: 1845845 - RNA, 15 nt, Human
ccaggccccugccac

SEQ ID NO: 1845846 - RNA, 16 nt, Human
ccaggccccugccacc

SEQ ID NO: 1845847 - RNA, 23 nt, Human
ccagugcccacaggaucagucug

SEQ ID NO: 1845848 - RNA, 20 nt, Human
ccaguaaaugggggugcauu

SEQ ID NO: 1845849 - RNA, 21 nt, Human
ccaguaaaugggggugcauuu

SEQ ID NO: 1845850 - RNA, 22 nt, Human
ccaguaaaugggggugcauuug

SEQ ID NO: 1845851 - RNA, 13 nt, Human
ccagguuuaagcu

SEQ ID NO: 1845852 - RNA, 16 nt, Human
ccagguuucuaugugu

SEQ ID NO: 1845853 - RNA, 21 nt, Human
ccagguggccacuccagaccc

SEQ ID NO: 1845854 - RNA, 16 nt, Human
ccagguggccacucca

SEQ ID NO: 1845855 - RNA, 21 nt, Human
ccaggugcuaggaacacuccu

SEQ ID NO: 1845856 - RNA, 13 nt, Human
ccagugaggcucu

SEQ ID NO: 1845857 - RNA, 23 nt, Human
ccaguaaaugggggugcauuuga

SEQ ID NO: 1845858 - RNA, 20 nt, Human
ccauccugaggcuccacuug

SEQ ID NO: 1845859 - RNA, 18 nt, Human
ccauccugaggcuccacu

SEQ ID NO: 1845860 - RNA, 17 nt, Human
ccaucauugaaaucuuu

SEQ ID NO: 1845861 - RNA, 16 nt, Human
ccaucauugaaaucuu

SEQ ID NO: 1845862 - RNA, 14 nt, Human
ccaucauugaaauc

SEQ ID NO: 1845863 - RNA, 15 nt, Human
ccaucucuccuccuu

SEQ ID NO: 1845864 - RNA, 17 nt, Human
ccaucucaccuccugcu

SEQ ID NO: 1845865 - RNA, 21 nt, Human
ccaucucacacaugagcauca

SEQ ID NO: 1845866 - RNA, 20 nt, Human
ccaucucacacaugagcauc

SEQ ID NO: 1845867 - RNA, 18 nt, Human
ccaucucacacaugagca

SEQ ID NO: 1845868 - RNA, 17 nt, Human
ccaucucacacaugagc

SEQ ID NO: 1845869 - RNA, 15 nt, Human
ccaucucacacauga

SEQ ID NO: 1845870 - RNA, 14 nt, Human
ccaucucacacaug

SEQ ID NO: 1845871 - RNA, 14 nt, Human
ccaucaagccacca

SEQ ID NO: 1845872 - RNA, 13 nt, Human
ccaucaagccacc

SEQ ID NO: 1845873 - RNA, 16 nt, Human
ccaucaagccaccaac

SEQ ID NO: 1845874 - RNA, 19 nt, Human
ccauauuaccacagacaua

SEQ ID NO: 1845875 - RNA, 12 nt, Human
ccaucaugucug

SEQ ID NO: 1845876 - RNA, 12 nt, Human
ccaucauugaaa

SEQ ID NO: 1845877 - RNA, 13 nt, Human
ccaucaugucugg

SEQ ID NO: 1845878 - RNA, 15 nt, Human
ccauaugccugggca

SEQ ID NO: 1845879 - RNA, 12 nt, Human
ccaucaagccac

SEQ ID NO: 1845880 - RNA, 13 nt, Human
ccauaugccuggg

SEQ ID NO: 1845881 - RNA, 14 nt, Human
ccagugugacaagg

SEQ ID NO: 1845882 - RNA, 23 nt, Human
ccagugugacaaggauugcuacu

SEQ ID NO: 1845883 - RNA, 13 nt, Human
ccaccuuggcuca

SEQ ID NO: 1845884 - RNA, 19 nt, Human
ccacccccacccaagggcc

SEQ ID NO: 1845885 - RNA, 14 nt, Human
ccacccuccuuuca

SEQ ID NO: 1845886 - RNA, 16 nt, Human
ccaccugccagggaca

SEQ ID NO: 1845887 - RNA, 15 nt, Human
ccaccugccagggac

SEQ ID NO: 1845888 - RNA, 14 nt, Human
ccaccugccaggga

SEQ ID NO: 1845889 - RNA, 13 nt, Human
ccaccugccaggg

SEQ ID NO: 1845890 - RNA, 20 nt, Human
ccaccuggccucugcacucc

SEQ ID NO: 1845891 - RNA, 18 nt, Human
ccaccuggccucugcacu

SEQ ID NO: 1845892 - RNA, 13 nt, Human
ccaccuggccucu

SEQ ID NO: 1845893 - RNA, 14 nt, Human
ccaccuggccucug

SEQ ID NO: 1845894 - RNA, 20 nt, Human
ccaccucucucacuccuuga

SEQ ID NO: 1845895 - RNA, 19 nt, Human
ccaccucucucacuccuug

SEQ ID NO: 1845896 - RNA, 16 nt, Human
ccaccucucucacucc

SEQ ID NO: 1845897 - RNA, 14 nt, Human
ccaccucucucacu

SEQ ID NO: 1845898 - RNA, 11 nt, Human
ccacccugcuc

SEQ ID NO: 1845899 - RNA, 12 nt, Human
ccacccugcucu

SEQ ID NO: 1845900 - RNA, 22 nt, Human
ccagaagaaaauagugguguga

SEQ ID NO: 1845901 - RNA, 18 nt, Human
ccagaaaccuuuguuugc

SEQ ID NO: 1845902 - RNA, 19 nt, Human
ccacugugccaugugccag

SEQ ID NO: 1845903 - RNA, 15 nt, Human
ccacugugccaugug

SEQ ID NO: 1845904 - RNA, 16 nt, Human
ccacugugccaugugc

SEQ ID NO: 1845905 - RNA, 23 nt, Human
ccacugcaucguuucaucuucca

SEQ ID NO: 1845906 - RNA, 21 nt, Human
ccacugcaucguuucaucuuc

SEQ ID NO: 1845907 - RNA, 14 nt, Human
ccaccuucccaugc

SEQ ID NO: 1845908 - RNA, 16 nt, Human
ccacugccucuuccuc

SEQ ID NO: 1845909 - RNA, 13 nt, Human
ccacugccucuuc

SEQ ID NO: 1845910 - RNA, 15 nt, Human
ccacugguucuucuu

SEQ ID NO: 1845911 - RNA, 23 nt, Human
ccacuggugacaugucuuuucuu

SEQ ID NO: 1845912 - RNA, 15 nt, Human
ccacugugaagagaa

SEQ ID NO: 1845913 - RNA, 14 nt, Human
ccacugugaagaga

SEQ ID NO: 1845914 - RNA, 22 nt, Human
ccacugcuuuuggucuguguga

SEQ ID NO: 1845915 - RNA, 21 nt, Human
ccacugccuucgauacaccgg

SEQ ID NO: 1845916 - RNA, 20 nt, Human
ccacugcuuuuggucugugu

SEQ ID NO: 1845917 - RNA, 12 nt, Human
ccacugcucugg

SEQ ID NO: 1845918 - RNA, 13 nt, Human
ccacugcucuggu

SEQ ID NO: 1845919 - RNA, 15 nt, Human
ccacugcucugguua

SEQ ID NO: 1845920 - RNA, 22 nt, Human
ccagagaguggcuccucccggu

SEQ ID NO: 1845921 - RNA, 18 nt, Human
ccagagaguggcuccucc

SEQ ID NO: 1845922 - RNA, 16 nt, Human
ccagagaguggcuccu

SEQ ID NO: 1845923 - RNA, 15 nt, Human
ccagagaguggcucc

SEQ ID NO: 1845924 - RNA, 14 nt, Human
ccagagaguggcuc

SEQ ID NO: 1845925 - RNA, 16 nt, Human
ccagacccggcugcgu

SEQ ID NO: 1845926 - RNA, 14 nt, Human
ccagacccggcugc

SEQ ID NO: 1845927 - RNA, 15 nt, Human
ccagacccggcugcg

SEQ ID NO: 1845928 - RNA, 20 nt, Human
ccagacacauguccaagaag

SEQ ID NO: 1845929 - RNA, 17 nt, Human
ccagacacauguccaag

SEQ ID NO: 1845930 - RNA, 22 nt, Human
ccagacacauguccaagaagcc

SEQ ID NO: 1845931 - RNA, 14 nt, Human
ccagacaucaacag

SEQ ID NO: 1845932 - RNA, 18 nt, Human
ccagaccccuggcuuuuc

SEQ ID NO: 1845933 - RNA, 24 nt, Human
ccagaccccuggcuuuucacugcu

SEQ ID NO: 1845934 - RNA, 23 nt, Human
ccagcaggcucucaggccagcug

SEQ ID NO: 1845935 - RNA, 21 nt, Human
ccagcaggcucucaggccagc

SEQ ID NO: 1845936 - RNA, 20 nt, Human
ccagcaggcucucaggccag

SEQ ID NO: 1845937 - RNA, 19 nt, Human
ccagcaggcucucaggcca

SEQ ID NO: 1845938 - RNA, 16 nt, Human
ccagcccacuucugcc

SEQ ID NO: 1845939 - RNA, 17 nt, Human
ccagcccacuucugcca

SEQ ID NO: 1845940 - RNA, 19 nt, Human
ccagccccaaaacucuccu

SEQ ID NO: 1845941 - RNA, 22 nt, Human
ccagccgagauagccaaggcca

SEQ ID NO: 1845942 - RNA, 20 nt, Human
ccagccgagauagccaaggc

SEQ ID NO: 1845943 - RNA, 17 nt, Human
ccagccgagauagccaa

SEQ ID NO: 1845944 - RNA, 23 nt, Human
ccagccgagauagccaaggccaa

SEQ ID NO: 1845945 - RNA, 23 nt, Human
ccagccuugaccauucuccaccu

SEQ ID NO: 1845946 - RNA, 13 nt, Human
ccagcgagcccug

SEQ ID NO: 1845947 - RNA, 13 nt, Human
ccagccuggguga

SEQ ID NO: 1845948 - RNA, 19 nt, Human
ccagccugagcgacaguga

SEQ ID NO: 1845949 - RNA, 20 nt, Human
ccagagccucaaaugagaaa

SEQ ID NO: 1845950 - RNA, 23 nt, Human
ccagagccucaaaugagaaaaug

SEQ ID NO: 1845951 - RNA, 14 nt, Human
ccagagcccaccuu

SEQ ID NO: 1845952 - RNA, 14 nt, Human
ccagauugcaacag

SEQ ID NO: 1845953 - RNA, 16 nt, Human
ccagauugcaacaggc

SEQ ID NO: 1845954 - RNA, 15 nt, Human
ccagauuucacucuc

SEQ ID NO: 1845955 - RNA, 19 nt, Human
ccagauuucacucuccuug

SEQ ID NO: 1845956 - RNA, 18 nt, Human
ccagauuucacucuccuu

SEQ ID NO: 1845957 - RNA, 23 nt, Human
ccagauugcaacaggcugggcuu

SEQ ID NO: 1845958 - RNA, 18 nt, Human
ccagauugcaacaggcug

SEQ ID NO: 1845959 - RNA, 22 nt, Human
ccagauugcaacaggcugggcu

SEQ ID NO: 1845960 - RNA, 24 nt, Human
ccagauuuuuuacagcugccugca

SEQ ID NO: 1845961 - RNA, 17 nt, Human
ccagcaagugagagcug

SEQ ID NO: 1845962 - RNA, 18 nt, Human
ccagcaagugagagcugg

SEQ ID NO: 1845963 - RNA, 19 nt, Human
ccagcaagugagagcuggg

SEQ ID NO: 1845964 - RNA, 18 nt, Human
ccagcaggcucucaggcc

SEQ ID NO: 1845965 - RNA, 17 nt, Human
ccagcaggcucucaggc

SEQ ID NO: 1845966 - RNA, 16 nt, Human
ccagcaggcucucagg

SEQ ID NO: 1845967 - RNA, 18 nt, Human
ccagcaccaucucuccuc

SEQ ID NO: 1845968 - RNA, 17 nt, Human
ccagcaccaucucuccu

SEQ ID NO: 1845969 - RNA, 18 nt, Human
ccccuggcuuuucacugc

SEQ ID NO: 1845970 - RNA, 22 nt, Human
ccccuggcuuuucacugcuggc

SEQ ID NO: 1845971 - RNA, 20 nt, Human
ccccuggcuuuucacugcug

SEQ ID NO: 1845972 - RNA, 20 nt, Human
ccccuuccauggacuuuguu

SEQ ID NO: 1845973 - RNA, 13 nt, Human
ccccuuccaugga

SEQ ID NO: 1845974 - RNA, 14 nt, Human
cccgacagccuggc

SEQ ID NO: 1845975 - RNA, 15 nt, Human
ccccuguucacucua

SEQ ID NO: 1845976 - RNA, 18 nt, Human
cccgacagccuggcacag

SEQ ID NO: 1845977 - RNA, 15 nt, Human
cccgacagccuggca

SEQ ID NO: 1845978 - RNA, 15 nt, Human
cccgagccuggcucc

SEQ ID NO: 1845979 - RNA, 13 nt, Human
cccgagccuggcu

SEQ ID NO: 1845980 - RNA, 23 nt, Human
cccgcuaagagggagggagggcu

SEQ ID NO: 1845981 - RNA, 22 nt, Human
cccgcccaggcuuagucacuga

SEQ ID NO: 1845982 - RNA, 20 nt, Human
cccgcccaggcuuagucacu

SEQ ID NO: 1845983 - RNA, 19 nt, Human
ccccugccucucugcaggu

SEQ ID NO: 1845984 - RNA, 17 nt, Human
ccccugccucucugcag

SEQ ID NO: 1845985 - RNA, 16 nt, Human
ccccugccucucugca

SEQ ID NO: 1845986 - RNA, 15 nt, Human
ccccugccucucugc

SEQ ID NO: 1845987 - RNA, 14 nt, Human
ccccugccucucug

SEQ ID NO: 1845988 - RNA, 12 nt, Human
ccccucugcccu

SEQ ID NO: 1845989 - RNA, 14 nt, Human
ccccucugcccugc

SEQ ID NO: 1845990 - RNA, 13 nt, Human
ccccucugcccug

SEQ ID NO: 1845991 - RNA, 17 nt, Human
ccccugcccggcugcgg

SEQ ID NO: 1845992 - RNA, 19 nt, Human
ccccugcccggcugcggaa

SEQ ID NO: 1845993 - RNA, 17 nt, Human
ccccugcuggguguggc

SEQ ID NO: 1845994 - RNA, 14 nt, Human
ccccugcugggugu

SEQ ID NO: 1845995 - RNA, 11 nt, Human
ccccugcuggu

SEQ ID NO: 1845996 - RNA, 13 nt, Human
ccccugcugguuc

SEQ ID NO: 1845997 - RNA, 15 nt, Human
ccccugcugguucag

SEQ ID NO: 1845998 - RNA, 20 nt, Human
ccccugcugguucaggguug

SEQ ID NO: 1845999 - RNA, 15 nt, Human
ccccuggaugcagcc

SEQ ID NO: 1846000 - RNA, 19 nt, Human
ccccuggaugcagccucac

SEQ ID NO: 1846001 - RNA, 18 nt, Human
ccccuggaugcagccuca

SEQ ID NO: 1846002 - RNA, 13 nt, Human
cccccacccaagg

SEQ ID NO: 1846003 - RNA, 24 nt, Human
cccccacccaagggccuggccuga

SEQ ID NO: 1846004 - RNA, 14 nt, Human
ccccauccucugua

SEQ ID NO: 1846005 - RNA, 17 nt, Human
ccccaucauugguaccc

SEQ ID NO: 1846006 - RNA, 13 nt, Human
cccccacugguga

SEQ ID NO: 1846007 - RNA, 11 nt, Human
cccccacuggu

SEQ ID NO: 1846008 - RNA, 15 nt, Human
cccccacuggugaca

SEQ ID NO: 1846009 - RNA, 22 nt, Human
ccccauaauuuuuuuuuuccuu

SEQ ID NO: 1846010 - RNA, 14 nt, Human
ccccagugcccaca

SEQ ID NO: 1846011 - RNA, 15 nt, Human
ccccagugcccacag

SEQ ID NO: 1846012 - RNA, 16 nt, Human
ccccagugcccacagg

SEQ ID NO: 1846013 - RNA, 20 nt, Human
ccccagugcccacaggauca

SEQ ID NO: 1846014 - RNA, 15 nt, Human
ccccucaacaccucu

SEQ ID NO: 1846015 - RNA, 23 nt, Human
ccccucaacucuccuccagaguc

SEQ ID NO: 1846016 - RNA, 16 nt, Human
ccccucaacaccucug

SEQ ID NO: 1846017 - RNA, 12 nt, Human
cccccagccugc

SEQ ID NO: 1846018 - RNA, 19 nt, Human
cccccugacaacacucauu

SEQ ID NO: 1846019 - RNA, 19 nt, Human
cccccugcaaagcccagcu

SEQ ID NO: 1846020 - RNA, 18 nt, Human
cccccugcaaagcccagc

SEQ ID NO: 1846021 - RNA, 21 nt, Human
cccccugcaaagcccagcuug

SEQ ID NO: 1846022 - RNA, 19 nt, Human
cccccucuggcuccagcug

SEQ ID NO: 1846023 - RNA, 12 nt, Human
cccccucuggcu

SEQ ID NO: 1846024 - RNA, 17 nt, Human
cccccugacaacacuca

SEQ ID NO: 1846025 - RNA, 21 nt, Human
cccccucuggcuccagcuggc

SEQ ID NO: 1846026 - RNA, 20 nt, Human
ccccucauagcccucacccu

SEQ ID NO: 1846027 - RNA, 23 nt, Human
ccccuccaaucccaccaacccuc

SEQ ID NO: 1846028 - RNA, 16 nt, Human
ccccucagggucccug

SEQ ID NO: 1846029 - RNA, 15 nt, Human
ccccucccuucaacc

SEQ ID NO: 1846030 - RNA, 12 nt, Human
ccccuccaugug

SEQ ID NO: 1846031 - RNA, 18 nt, Human
ccccuccuccuggacucc

SEQ ID NO: 1846032 - RNA, 22 nt, Human
ccccuccuccuggacuccugca

SEQ ID NO: 1846033 - RNA, 17 nt, Human
ccccuccucucugcccu

SEQ ID NO: 1846034 - RNA, 15 nt, Human
ccccuccucucugcc

SEQ ID NO: 1846035 - RNA, 21 nt, Human
ccccacccaagggccuggccu

SEQ ID NO: 1846036 - RNA, 19 nt, Human
ccccaccgcagacaggacc

SEQ ID NO: 1846037 - RNA, 15 nt, Human
ccccaccgcagacag

SEQ ID NO: 1846038 - RNA, 14 nt, Human
cccaucucuucugg

SEQ ID NO: 1846039 - RNA, 14 nt, Human
cccaguugggugga

SEQ ID NO: 1846040 - RNA, 19 nt, Human
cccaucucuacaaaaagca

SEQ ID NO: 1846041 - RNA, 12 nt, Human
cccaucugugaa

SEQ ID NO: 1846042 - RNA, 14 nt, Human
cccaugagccucag

SEQ ID NO: 1846043 - RNA, 19 nt, Human
ccgagauugcaccacugca

SEQ ID NO: 1846044 - RNA, 15 nt, Human
ccgagauugcaccac

SEQ ID NO: 1846045 - RNA, 21 nt, Human
ccgagauugcaccacugcacu

SEQ ID NO: 1846046 - RNA, 18 nt, Human
ccgagauagccaaggcca

SEQ ID NO: 1846047 - RNA, 23 nt, Human
ccgcacugggcuuggggaccaga

SEQ ID NO: 1846048 - RNA, 21 nt, Human
ccgagucucuucuccacugga

SEQ ID NO: 1846049 - RNA, 20 nt, Human
ccgagucucuucuccacugg

SEQ ID NO: 1846050 - RNA, 19 nt, Human
ccgagucucuucuccacug

SEQ ID NO: 1846051 - RNA, 15 nt, Human
ccgcagacaggacca

SEQ ID NO: 1846052 - RNA, 19 nt, Human
ccgagcuuugaaaauucag

SEQ ID NO: 1846053 - RNA, 18 nt, Human
ccgagucucuucuccacu

SEQ ID NO: 1846054 - RNA, 16 nt, Human
ccgagucucuucucca

SEQ ID NO: 1846055 - RNA, 14 nt, Human
ccgagucucuucuc

SEQ ID NO: 1846056 - RNA, 20 nt, Human
ccgaguagcugagauuauag

SEQ ID NO: 1846057 - RNA, 14 nt, Human
ccgaguagcuggga

SEQ ID NO: 1846058 - RNA, 16 nt, Human
ccgaguagcugggacu

SEQ ID NO: 1846059 - RNA, 11 nt, Human
ccgcuggggcc

SEQ ID NO: 1846060 - RNA, 14 nt, Human
ccgcuggggccagu

SEQ ID NO: 1846061 - RNA, 14 nt, Human
ccggaggggccugg

SEQ ID NO: 1846062 - RNA, 16 nt, Human
ccggaggggccuggca

SEQ ID NO: 1846063 - RNA, 15 nt, Human
ccggaggggccuggc

SEQ ID NO: 1846064 - RNA, 15 nt, Human
ccgggcucugccucc

SEQ ID NO: 1846065 - RNA, 14 nt, Human
ccgggcucugccuc

SEQ ID NO: 1846066 - RNA, 18 nt, Human
ccgggcucugccucccau

SEQ ID NO: 1846067 - RNA, 18 nt, Human
ccgugaggccagagacac

SEQ ID NO: 1846068 - RNA, 16 nt, Human
ccggcuccaggcuccu

SEQ ID NO: 1846069 - RNA, 21 nt, Human
ccggcuccaggcuccuuuagc

SEQ ID NO: 1846070 - RNA, 22 nt, Human
ccgggcacucagaagacacuga

SEQ ID NO: 1846071 - RNA, 13 nt, Human
ccgggccacagag

SEQ ID NO: 1846072 - RNA, 14 nt, Human
ccguggcuucccgc

SEQ ID NO: 1846073 - RNA, 15 nt, Human
ccuaacgaaguaucc

SEQ ID NO: 1846074 - RNA, 18 nt, Human
ccuacaggagugagcacu

SEQ ID NO: 1846075 - RNA, 15 nt, Human
ccuacaguguacagu

SEQ ID NO: 1846076 - RNA, 11 nt, Human
ccguggcuucc

SEQ ID NO: 1846077 - RNA, 18 nt, Human
ccuaggugacagagugag

SEQ ID NO: 1846078 - RNA, 20 nt, Human
ccuaccgagucucuucucca

SEQ ID NO: 1846079 - RNA, 19 nt, Human
ccuaccgagucucuucucc

SEQ ID NO: 1846080 - RNA, 21 nt, Human
ccuaccgagucucuucuccac

SEQ ID NO: 1846081 - RNA, 21 nt, Human
ccuacaguugaaaaacagcug

SEQ ID NO: 1846082 - RNA, 16 nt, Human
ccuacaguguacaguc

SEQ ID NO: 1846083 - RNA, 20 nt, Human
ccuacaguguacagucuugu

SEQ ID NO: 1846084 - RNA, 17 nt, Human
ccuaccgagucucuucu

SEQ ID NO: 1846085 - RNA, 16 nt, Human
ccuaccgagucucuuc

SEQ ID NO: 1846086 - RNA, 15 nt, Human
cccgcucagcccucc

SEQ ID NO: 1846087 - RNA, 14 nt, Human
cccucccugccccu

SEQ ID NO: 1846088 - RNA, 23 nt, Human
cccucccucuuucccucccuucc

SEQ ID NO: 1846089 - RNA, 14 nt, Human
cccgcucagcccuc

SEQ ID NO: 1846090 - RNA, 12 nt, Human
cccucccacagc

SEQ ID NO: 1846091 - RNA, 13 nt, Human
cccgcucagcccu

SEQ ID NO: 1846092 - RNA, 12 nt, Human
cccgcucagccc

SEQ ID NO: 1846093 - RNA, 14 nt, Human
cccucccacagcgc

SEQ ID NO: 1846094 - RNA, 12 nt, Human
cccucuggggcu

SEQ ID NO: 1846095 - RNA, 21 nt, Human
cccucuguucugcacacagca

SEQ ID NO: 1846096 - RNA, 20 nt, Human
cccucuguucugcacacagc

SEQ ID NO: 1846097 - RNA, 22 nt, Human
cccucuggcuccagcuggccgg

SEQ ID NO: 1846098 - RNA, 17 nt, Human
cccucuggcuccagcug

SEQ ID NO: 1846099 - RNA, 16 nt, Human
cccucuggcuccagcu

SEQ ID NO: 1846100 - RNA, 12 nt, Human
cccucuggcucc

SEQ ID NO: 1846101 - RNA, 20 nt, Human
cccucuuucccucccuuccu

SEQ ID NO: 1846102 - RNA, 17 nt, Human
cccucuuucccucccuu

SEQ ID NO: 1846103 - RNA, 12 nt, Human
cccucuuucccu

SEQ ID NO: 1846104 - RNA, 14 nt, Human
cccucugcccugcg

SEQ ID NO: 1846105 - RNA, 13 nt, Human
cccucugcccugc

SEQ ID NO: 1846106 - RNA, 12 nt, Human
cccucugcccug

SEQ ID NO: 1846107 - RNA, 19 nt, Human
cccucugcccacucccugc

SEQ ID NO: 1846108 - RNA, 18 nt, Human
cccucugcccacucccug

SEQ ID NO: 1846109 - RNA, 15 nt, Human
cccucugcccacucc

SEQ ID NO: 1846110 - RNA, 11 nt, Human
cccucugccca

SEQ ID NO: 1846111 - RNA, 16 nt, Human
cccuggugcugccaca

SEQ ID NO: 1846112 - RNA, 11 nt, Human
cccugccuccu

SEQ ID NO: 1846113 - RNA, 14 nt, Human
cccugccucucugc

SEQ ID NO: 1846114 - RNA, 13 nt, Human
cccugccucucug

SEQ ID NO: 1846115 - RNA, 12 nt, Human
cccugaggccca

SEQ ID NO: 1846116 - RNA, 21 nt, Human
cccugcgggucacaggaggga

SEQ ID NO: 1846117 - RNA, 19 nt, Human
cccugcgggucacaggagg

SEQ ID NO: 1846118 - RNA, 15 nt, Human
cccugccucucugca

SEQ ID NO: 1846119 - RNA, 23 nt, Human
cccugcugagucccaggcugagc

SEQ ID NO: 1846120 - RNA, 21 nt, Human
cccugcugagucccaggcuga

SEQ ID NO: 1846121 - RNA, 22 nt, Human
cccugcucuccgaccagacacc

SEQ ID NO: 1846122 - RNA, 21 nt, Human
cccugcucuccgaccagacac

SEQ ID NO: 1846123 - RNA, 18 nt, Human
cccuucaaccauucccca

SEQ ID NO: 1846124 - RNA, 14 nt, Human
cccuucaaccauuc

SEQ ID NO: 1846125 - RNA, 12 nt, Human
cccuuccaugga

SEQ ID NO: 1846126 - RNA, 20 nt, Human
cccuuccaugucgccucugc

SEQ ID NO: 1846127 - RNA, 23 nt, Human
cccuuagcagggaaacagcuaau

SEQ ID NO: 1846128 - RNA, 17 nt, Human
cccuuacgugaguccug

SEQ ID NO: 1846129 - RNA, 15 nt, Human
cccuuacgugagucc

SEQ ID NO: 1846130 - RNA, 20 nt, Human
cccuuagaaguuuguuguga

SEQ ID NO: 1846131 - RNA, 14 nt, Human
cccuuagcagggaa

SEQ ID NO: 1846132 - RNA, 14 nt, Human
cccuggugcugcca

SEQ ID NO: 1846133 - RNA, 13 nt, Human
cccuggugcugcc

SEQ ID NO: 1846134 - RNA, 21 nt, Human
cccuggugaccagcaccaucu

SEQ ID NO: 1846135 - RNA, 21 nt, Human
cccugguggcagcucaccucu

SEQ ID NO: 1846136 - RNA, 13 nt, Human
cccugguggcagu

SEQ ID NO: 1846137 - RNA, 14 nt, Human
cccugguggcagug

SEQ ID NO: 1846138 - RNA, 15 nt, Human
cccugguggcagugg

SEQ ID NO: 1846139 - RNA, 15 nt, Human
cccuggugcugccac

SEQ ID NO: 1846140 - RNA, 14 nt, Human
cccuguucuggcag

SEQ ID NO: 1846141 - RNA, 13 nt, Human
cccuguucuggca

SEQ ID NO: 1846142 - RNA, 23 nt, Human
cccuuaccugccaggaagccagc

SEQ ID NO: 1846143 - RNA, 20 nt, Human
cccuuaccugccaggaagcc

SEQ ID NO: 1846144 - RNA, 17 nt, Human
cccuuaccugccaggaa

SEQ ID NO: 1846145 - RNA, 19 nt, Human
cccuguuuguuucugaaag

SEQ ID NO: 1846146 - RNA, 13 nt, Human
cguuuucaaaauu

SEQ ID NO: 1846147 - RNA, 23 nt, Human
cuaagagggagggagggcuccag

SEQ ID NO: 1846148 - RNA, 22 nt, Human
cuaagagggagggagggcucca

SEQ ID NO: 1846149 - RNA, 15 nt, Human
cuaagagggagggag

SEQ ID NO: 1846150 - RNA, 13 nt, Human
cuaagagggaggg

SEQ ID NO: 1846151 - RNA, 19 nt, Human
cuaaauugacacuuaaaaa

SEQ ID NO: 1846152 - RNA, 16 nt, Human
cuaaauucaugcugcu

SEQ ID NO: 1846153 - RNA, 12 nt, Human
cuaaccacgcug

SEQ ID NO: 1846154 - RNA, 14 nt, Human
cuaaccacgcugga

SEQ ID NO: 1846155 - RNA, 20 nt, Human
cguuuguuccccaagacauu

SEQ ID NO: 1846156 - RNA, 23 nt, Human
cgggaggauguucugggacacag

SEQ ID NO: 1846157 - RNA, 20 nt, Human
cgggaggcagagguugcagu

SEQ ID NO: 1846158 - RNA, 23 nt, Human
cgggaccccgagccuggcuccaa

SEQ ID NO: 1846159 - RNA, 21 nt, Human
cuaaacugcccccucugcccu

SEQ ID NO: 1846160 - RNA, 21 nt, Human
cuaaaucuccaaaauaaaacu

SEQ ID NO: 1846161 - RNA, 17 nt, Human
cuaaauauauuuuaaga

SEQ ID NO: 1846162 - RNA, 22 nt, Human
cuaaaugaaaaucgugacaaca

SEQ ID NO: 1846163 - RNA, 13 nt, Human
cuaaacugccccc

SEQ ID NO: 1846164 - RNA, 12 nt, Human
cuaaacugcccc

SEQ ID NO: 1846165 - RNA, 17 nt, Human
cuaauagacaauuuauu

SEQ ID NO: 1846166 - RNA, 19 nt, Human
cuaauagacaauuuauuau

SEQ ID NO: 1846167 - RNA, 23 nt, Human
cuaauagacaauuuauuauggca

SEQ ID NO: 1846168 - RNA, 14 nt, Human
cuaauaaagcugug

SEQ ID NO: 1846169 - RNA, 22 nt, Human
cuaagcuauucaguaauaacuc

SEQ ID NO: 1846170 - RNA, 21 nt, Human
cuaagcuucacuguaaaauaa

SEQ ID NO: 1846171 - RNA, 22 nt, Human
cuaauuauacccccugcaaagc

SEQ ID NO: 1846172 - RNA, 23 nt, Human
cuaaugcgcaggcuggcccugcc

SEQ ID NO: 1846173 - RNA, 22 nt, Human
cuaaugcgcaggcuggcccugc

SEQ ID NO: 1846174 - RNA, 12 nt, Human
cuaaugggacac

SEQ ID NO: 1846175 - RNA, 13 nt, Human
cuaaugggacacu

SEQ ID NO: 1846176 - RNA, 20 nt, Human
cuaaugcgcaggcuggcccu

SEQ ID NO: 1846177 - RNA, 19 nt, Human
cuaaugcgcaggcuggccc

SEQ ID NO: 1846178 - RNA, 16 nt, Human
cuaaugcgcaggcugg

SEQ ID NO: 1846179 - RNA, 15 nt, Human
cuaaugcgcaggcug

SEQ ID NO: 1846180 - RNA, 21 nt, Human
cuaaucagcauucucacuccu

SEQ ID NO: 1846181 - RNA, 20 nt, Human
cuaaucagcauucucacucc

SEQ ID NO: 1846182 - RNA, 18 nt, Human
cuaauauguaacaagcca

SEQ ID NO: 1846183 - RNA, 21 nt, Human
cuacacaggggaaaagaggag

SEQ ID NO: 1846184 - RNA, 14 nt, Human
cuaauuccacagcu

SEQ ID NO: 1846185 - RNA, 16 nt, Human
cuaauuccacagcugc

SEQ ID NO: 1846186 - RNA, 15 nt, Human
cuaauuccacagcug

SEQ ID NO: 1846187 - RNA, 23 nt, Human
cuacacgagauacagaauuuuau

SEQ ID NO: 1846188 - RNA, 15 nt, Human
cuacaggcacccacc

SEQ ID NO: 1846189 - RNA, 17 nt, Human
cuacaggcacccaccau

SEQ ID NO: 1846190 - RNA, 14 nt, Human
cuacaggagugagc

SEQ ID NO: 1846191 - RNA, 15 nt, Human
cuacaggagugagca

SEQ ID NO: 1846192 - RNA, 16 nt, Human
cuacaggagugagcac

SEQ ID NO: 1846193 - RNA, 14 nt, Human
cuacaggugugagu

SEQ ID NO: 1846194 - RNA, 16 nt, Human
cuacaggugugaguca

SEQ ID NO: 1846195 - RNA, 20 nt, Human
cuacauggaguauaugucaa

SEQ ID NO: 1846196 - RNA, 18 nt, Human
cuacauggaguauauguc

SEQ ID NO: 1846197 - RNA, 13 nt, Human
cuacaguccuccc

SEQ ID NO: 1846198 - RNA, 22 nt, Human
cuacagcuugaccgugaggcca

SEQ ID NO: 1846199 - RNA, 19 nt, Human
cuacagcuugaccgugagg

SEQ ID NO: 1846200 - RNA, 23 nt, Human
cuacagcuugaccgugaggccag

SEQ ID NO: 1846201 - RNA, 19 nt, Human
cuacagcuaaucagcauuc

SEQ ID NO: 1846202 - RNA, 18 nt, Human
cuacagcuaaucagcauu

SEQ ID NO: 1846203 - RNA, 22 nt, Human
cuacagcuaaucagcauucuca

SEQ ID NO: 1846204 - RNA, 21 nt, Human
cuacagcuaaucagcauucuc

SEQ ID NO: 1846205 - RNA, 17 nt, Human
cuacacugugcugaguc

SEQ ID NO: 1846206 - RNA, 14 nt, Human
cuacacugugcuga

SEQ ID NO: 1846207 - RNA, 13 nt, Human
cuacacugugcug

SEQ ID NO: 1846208 - RNA, 22 nt, Human
cuacagaggccaugggccuccu

SEQ ID NO: 1846209 - RNA, 18 nt, Human
cuacagaggccaugggcc

SEQ ID NO: 1846210 - RNA, 20 nt, Human
cuacagaggccaugggccuc

SEQ ID NO: 1846211 - RNA, 17 nt, Human
cuacccucuuagaaaaa

SEQ ID NO: 1846212 - RNA, 13 nt, Human
cuacccaggugcu

SEQ ID NO: 1846213 - RNA, 18 nt, Human
cuacccagcgagcccugg

SEQ ID NO: 1846214 - RNA, 13 nt, Human
cuacccacccucc

SEQ ID NO: 1846215 - RNA, 15 nt, Human
cuacccagcgagccc

SEQ ID NO: 1846216 - RNA, 17 nt, Human
cuacccagcgagcccug

SEQ ID NO: 1846217 - RNA, 13 nt, Human
cuacauucuguua

SEQ ID NO: 1846218 - RNA, 14 nt, Human
cuacauucuguuaa

SEQ ID NO: 1846219 - RNA, 22 nt, Human
cuacauuauaaaugucucuuua

SEQ ID NO: 1846220 - RNA, 18 nt, Human
cuaccauccccuguagag

SEQ ID NO: 1846221 - RNA, 24 nt, Human
cuagauacuguaucaugacaaaga

SEQ ID NO: 1846222 - RNA, 13 nt, Human
cuagauacuguau

SEQ ID NO: 1846223 - RNA, 16 nt, Human
cuagauacuguaucau

SEQ ID NO: 1846224 - RNA, 19 nt, Human
cuagccugugccucuggga

SEQ ID NO: 1846225 - RNA, 21 nt, Human
cuagccugugccucugggacu

SEQ ID NO: 1846226 - RNA, 22 nt, Human
cuagccugugccucugggacug

SEQ ID NO: 1846227 - RNA, 21 nt, Human
cuagccuuagaagucacacag

SEQ ID NO: 1846228 - RNA, 22 nt, Human
cuagccuuagaagucacacagu

SEQ ID NO: 1846229 - RNA, 23 nt, Human
cuagccuuagaagucacacagua

SEQ ID NO: 1846230 - RNA, 12 nt, Human
cuacucuguguc

SEQ ID NO: 1846231 - RNA, 13 nt, Human
cuacucuguguca

SEQ ID NO: 1846232 - RNA, 19 nt, Human
cuacuguccuacccacccu

SEQ ID NO: 1846233 - RNA, 22 nt, Human
cuaccgagucucuucuccacug

SEQ ID NO: 1846234 - RNA, 21 nt, Human
cuaccgagucucuucuccacu

SEQ ID NO: 1846235 - RNA, 23 nt, Human
cuaccgagucucuucuccacugg

SEQ ID NO: 1846236 - RNA, 19 nt, Human
cuaccgagucucuucucca

SEQ ID NO: 1846237 - RNA, 17 nt, Human
cuaccgagucucuucuc

SEQ ID NO: 1846238 - RNA, 19 nt, Human
cuacucgaguuacagacaa

SEQ ID NO: 1846239 - RNA, 16 nt, Human
cuacucgaguuacaga

SEQ ID NO: 1846240 - RNA, 15 nt, Human
cuacucgaguuacag

SEQ ID NO: 1846241 - RNA, 17 nt, Human
cuagagguucaaagaua

SEQ ID NO: 1846242 - RNA, 18 nt, Human
cuagagguucaaagauau

SEQ ID NO: 1846243 - RNA, 21 nt, Human
cuagagguucaaagauauuuu

SEQ ID NO: 1846244 - RNA, 22 nt, Human
cuacuuagcaugucccuaccga

SEQ ID NO: 1846245 - RNA, 17 nt, Human
cuacuuagcaugucccu

SEQ ID NO: 1846246 - RNA, 20 nt, Human
cuacuguccuacccacccuc

SEQ ID NO: 1846247 - RNA, 23 nt, Human
cuagaaaugauccccagcuguuu

SEQ ID NO: 1846248 - RNA, 16 nt, Human
cuauugcugcuugagg

SEQ ID NO: 1846249 - RNA, 11 nt, Human
cuauugguaaa

SEQ ID NO: 1846250 - RNA, 17 nt, Human
cucacagaacccuugga

SEQ ID NO: 1846251 - RNA, 23 nt, Human
cucacacggacacucaaaagcug

SEQ ID NO: 1846252 - RNA, 14 nt, Human
cucaaguccucuuu

SEQ ID NO: 1846253 - RNA, 18 nt, Human
cucaacucuccuccagag

SEQ ID NO: 1846254 - RNA, 16 nt, Human
cucaacucuccuccag

SEQ ID NO: 1846255 - RNA, 14 nt, Human
cucaaauuucuaaa

SEQ ID NO: 1846256 - RNA, 15 nt, Human
cucaaauuucuaaau

SEQ ID NO: 1846257 - RNA, 17 nt, Human
cucaaauuucuaaaucu

SEQ ID NO: 1846258 - RNA, 14 nt, Human
cucaacucuccucc

SEQ ID NO: 1846259 - RNA, 23 nt, Human
cuauucaguaauaacucuacccu

SEQ ID NO: 1846260 - RNA, 17 nt, Human
cuauucaguaauaacuc

SEQ ID NO: 1846261 - RNA, 16 nt, Human
cuauguaucaaugagu

SEQ ID NO: 1846262 - RNA, 13 nt, Human
cuauguaucaaug

SEQ ID NO: 1846263 - RNA, 19 nt, Human
cuaugggggcacugaggac

SEQ ID NO: 1846264 - RNA, 22 nt, Human
cuaugaaguuuuuuuuauacag

SEQ ID NO: 1846265 - RNA, 15 nt, Human
cuaugauuuggaaaa

SEQ ID NO: 1846266 - RNA, 19 nt, Human
cuaugauuuggaaaauaaa

SEQ ID NO: 1846267 - RNA, 19 nt, Human
cuauagccuaggugacaga

SEQ ID NO: 1846268 - RNA, 18 nt, Human
cuauagccuaggugacag

SEQ ID NO: 1846269 - RNA, 20 nt, Human
cuauagccuaggugacagag

SEQ ID NO: 1846270 - RNA, 21 nt, Human
cuauagccuaggugacagagu

SEQ ID NO: 1846271 - RNA, 17 nt, Human
cuaggaagacuuuggaa

SEQ ID NO: 1846272 - RNA, 15 nt, Human
cuaggaagacuuugg

SEQ ID NO: 1846273 - RNA, 20 nt, Human
cuaggaacacuccuucacag

SEQ ID NO: 1846274 - RNA, 13 nt, Human
cuauaauuuaaau

SEQ ID NO: 1846275 - RNA, 12 nt, Human
cuauaauuuaaa

SEQ ID NO: 1846276 - RNA, 22 nt, Human
cuccaaguccacaguggaacca

SEQ ID NO: 1846277 - RNA, 13 nt, Human
cuccacugccuuc

SEQ ID NO: 1846278 - RNA, 13 nt, Human
cuccacuggaugg

SEQ ID NO: 1846279 - RNA, 16 nt, Human
cuccacugccuucgau

SEQ ID NO: 1846280 - RNA, 15 nt, Human
cuccacugccuucga

SEQ ID NO: 1846281 - RNA, 14 nt, Human
cuccacugccuucg

SEQ ID NO: 1846282 - RNA, 14 nt, Human
cuccagccccugga

SEQ ID NO: 1846283 - RNA, 13 nt, Human
cuccagccccugg

SEQ ID NO: 1846284 - RNA, 11 nt, Human
cuccagccccu

SEQ ID NO: 1846285 - RNA, 15 nt, Human
cuccagcucaccagc

SEQ ID NO: 1846286 - RNA, 16 nt, Human
cuccagcucaccagcc

SEQ ID NO: 1846287 - RNA, 18 nt, Human
cuccagcucaccagcccc

SEQ ID NO: 1846288 - RNA, 14 nt, Human
cuccacuggaugga

SEQ ID NO: 1846289 - RNA, 21 nt, Human
cuccagaccccuggcuuuuca

SEQ ID NO: 1846290 - RNA, 16 nt, Human
cuccagagucagaagu

SEQ ID NO: 1846291 - RNA, 21 nt, Human
cucauugaccugaggcccuuc

SEQ ID NO: 1846292 - RNA, 19 nt, Human
cucauugaccugaggcccu

SEQ ID NO: 1846293 - RNA, 18 nt, Human
cucauucuccuuguguua

SEQ ID NO: 1846294 - RNA, 22 nt, Human
cucauucuccuuguguuacuaa

SEQ ID NO: 1846295 - RNA, 17 nt, Human
cucauugaccugaggcc

SEQ ID NO: 1846296 - RNA, 12 nt, Human
cucauucuucug

SEQ ID NO: 1846297 - RNA, 17 nt, Human
cuccaaacccucgaggc

SEQ ID NO: 1846298 - RNA, 15 nt, Human
cuccaaacccucgag

SEQ ID NO: 1846299 - RNA, 21 nt, Human
cuccaaacccucgaggcggau

SEQ ID NO: 1846300 - RNA, 21 nt, Human
cucauuugucacacacuuugg

SEQ ID NO: 1846301 - RNA, 23 nt, Human
cuccccugcuggguguggcgcag

SEQ ID NO: 1846302 - RNA, 21 nt, Human
cuccccugcuggguguggcgc

SEQ ID NO: 1846303 - RNA, 20 nt, Human
cuccccagccccaucccaaa

SEQ ID NO: 1846304 - RNA, 18 nt, Human
cucccucagucuggcccu

SEQ ID NO: 1846305 - RNA, 15 nt, Human
cucccuucauccuuc

SEQ ID NO: 1846306 - RNA, 23 nt, Human
cucccuucaaccauuccccaugg

SEQ ID NO: 1846307 - RNA, 22 nt, Human
cucccuucaaccauuccccaug

SEQ ID NO: 1846308 - RNA, 21 nt, Human
cucccuucaaccauuccccau

SEQ ID NO: 1846309 - RNA, 20 nt, Human
cucccgaauagcugggacua

SEQ ID NO: 1846310 - RNA, 23 nt, Human
cucccgaauagcugggacuacag

SEQ ID NO: 1846311 - RNA, 17 nt, Human
cuccaugcugccuccag

SEQ ID NO: 1846312 - RNA, 16 nt, Human
cuccaugcugccucca

SEQ ID NO: 1846313 - RNA, 15 nt, Human
cuccaugcugccucc

SEQ ID NO: 1846314 - RNA, 14 nt, Human
cuccaugcugccuc

SEQ ID NO: 1846315 - RNA, 13 nt, Human
cuccaugcugccu

SEQ ID NO: 1846316 - RNA, 23 nt, Human
cuccagcuggccgggagccugau

SEQ ID NO: 1846317 - RNA, 22 nt, Human
cuccagcuggccgggagccuga

SEQ ID NO: 1846318 - RNA, 15 nt, Human
cucccaacucacccc

SEQ ID NO: 1846319 - RNA, 14 nt, Human
cucccaacucaccc

SEQ ID NO: 1846320 - RNA, 15 nt, Human
cucccacaaaggaga

SEQ ID NO: 1846321 - RNA, 16 nt, Human
cucccaacucacccca

SEQ ID NO: 1846322 - RNA, 16 nt, Human
cucccaaagugcuggg

SEQ ID NO: 1846323 - RNA, 23 nt, Human
cucccaaagugcugggauuacag

SEQ ID NO: 1846324 - RNA, 16 nt, Human
cucccaucacuucccu

SEQ ID NO: 1846325 - RNA, 22 nt, Human
cucccaggcgccccuucccccu

SEQ ID NO: 1846326 - RNA, 20 nt, Human
cucccaggcgccccuucccc

SEQ ID NO: 1846327 - RNA, 19 nt, Human
cucccaggcgccccuuccc

SEQ ID NO: 1846328 - RNA, 17 nt, Human
cucccaggcgccccuuc

SEQ ID NO: 1846329 - RNA, 22 nt, Human
cucagggucccugguggcagcu

SEQ ID NO: 1846330 - RNA, 21 nt, Human
cucagggucccugguggcagc

SEQ ID NO: 1846331 - RNA, 20 nt, Human
cucagggucccugguggcag

SEQ ID NO: 1846332 - RNA, 14 nt, Human
cucagggccugguc

SEQ ID NO: 1846333 - RNA, 24 nt, Human
cucagggucccugguggcagcuca

SEQ ID NO: 1846334 - RNA, 24 nt, Human
cucagguaaucgaccugccucggc

SEQ ID NO: 1846335 - RNA, 22 nt, Human
cucagguaaucgaccugccucg

SEQ ID NO: 1846336 - RNA, 20 nt, Human
cucagguaaucgaccugccu

SEQ ID NO: 1846337 - RNA, 21 nt, Human
cucagguggggucacucuggc

SEQ ID NO: 1846338 - RNA, 20 nt, Human
cucagguggggucacucugg

SEQ ID NO: 1846339 - RNA, 19 nt, Human
cucagguggggucacucug

SEQ ID NO: 1846340 - RNA, 23 nt, Human
cucaggugauccacccaccucag

SEQ ID NO: 1846341 - RNA, 20 nt, Human
cucagggccuggcucaggug

SEQ ID NO: 1846342 - RNA, 19 nt, Human
cucagggccuggcucaggu

SEQ ID NO: 1846343 - RNA, 18 nt, Human
cucagggccuggcucagg

SEQ ID NO: 1846344 - RNA, 18 nt, Human
cucaggcaggugggaugg

SEQ ID NO: 1846345 - RNA, 15 nt, Human
cucaggcagguggga

SEQ ID NO: 1846346 - RNA, 24 nt, Human
cucaggagcccugggaggcucugg

SEQ ID NO: 1846347 - RNA, 23 nt, Human
cucaggagcccugggaggcucug

SEQ ID NO: 1846348 - RNA, 22 nt, Human
cucaggagcccugggaggcucu

SEQ ID NO: 1846349 - RNA, 21 nt, Human
cucaggagcccugggaggcuc

SEQ ID NO: 1846350 - RNA, 20 nt, Human
cucaggagcccugggaggcu

SEQ ID NO: 1846351 - RNA, 17 nt, Human
cucaggagcccugggag

SEQ ID NO: 1846352 - RNA, 16 nt, Human
cucaggagcccuggga

SEQ ID NO: 1846353 - RNA, 15 nt, Human
cucaggagcccuggg

SEQ ID NO: 1846354 - RNA, 14 nt, Human
cucaggagcccugg

SEQ ID NO: 1846355 - RNA, 13 nt, Human
cucaggagcccug

SEQ ID NO: 1846356 - RNA, 12 nt, Human
cucaggagcccu

SEQ ID NO: 1846357 - RNA, 14 nt, Human
cucacuguugccca

SEQ ID NO: 1846358 - RNA, 15 nt, Human
cucacuguugcccag

SEQ ID NO: 1846359 - RNA, 20 nt, Human
cucacugcauccuccgccuc

SEQ ID NO: 1846360 - RNA, 15 nt, Human
cucacugcagccuca

SEQ ID NO: 1846361 - RNA, 16 nt, Human
cucacugcagccucaa

SEQ ID NO: 1846362 - RNA, 16 nt, Human
cucagaucuucugugg

SEQ ID NO: 1846363 - RNA, 19 nt, Human
cucagagagggugggagug

SEQ ID NO: 1846364 - RNA, 23 nt, Human
cucagagagggugggagugggcc

SEQ ID NO: 1846365 - RNA, 15 nt, Human
cucagagccaccccu

SEQ ID NO: 1846366 - RNA, 16 nt, Human
cucacuguugcccagg

SEQ ID NO: 1846367 - RNA, 17 nt, Human
cucacuguugcccaggc

SEQ ID NO: 1846368 - RNA, 18 nt, Human
cucacuguugcccaggcu

SEQ ID NO: 1846369 - RNA, 19 nt, Human
cucacuguugcccaggcug

SEQ ID NO: 1846370 - RNA, 21 nt, Human
cucagcccucccugccccucc

SEQ ID NO: 1846371 - RNA, 20 nt, Human
cucagcccucccugccccuc

SEQ ID NO: 1846372 - RNA, 19 nt, Human
cucagcccucccugccccu

SEQ ID NO: 1846373 - RNA, 14 nt, Human
cucagcccucccug

SEQ ID NO: 1846374 - RNA, 15 nt, Human
cucagcauccuggca

SEQ ID NO: 1846375 - RNA, 21 nt, Human
cucagcaaaagaugcuucuca

SEQ ID NO: 1846376 - RNA, 16 nt, Human
cucagcaggggagggu

SEQ ID NO: 1846377 - RNA, 20 nt, Human
cucagcaaaagaugcuucuc

SEQ ID NO: 1846378 - RNA, 19 nt, Human
cucagcaaaagaugcuucu

SEQ ID NO: 1846379 - RNA, 13 nt, Human
cucagcauccugg

SEQ ID NO: 1846380 - RNA, 21 nt, Human
cucagcauccuggcacccggc

SEQ ID NO: 1846381 - RNA, 22 nt, Human
cucagcauccuggcacccggcc

SEQ ID NO: 1846382 - RNA, 14 nt, Human
cucagcggggacag

SEQ ID NO: 1846383 - RNA, 15 nt, Human
cucagcggggacagc

SEQ ID NO: 1846384 - RNA, 16 nt, Human
cucagcggggacagcu

SEQ ID NO: 1846385 - RNA, 18 nt, Human
cucagcggggacagcucc

SEQ ID NO: 1846386 - RNA, 19 nt, Human
cucagcggggacagcuccu

SEQ ID NO: 1846387 - RNA, 20 nt, Human
cucagcggggacagcuccuu

SEQ ID NO: 1846388 - RNA, 21 nt, Human
cucagcggggacagcuccuuc

SEQ ID NO: 1846389 - RNA, 15 nt, Human
cucagcucccaaggc

SEQ ID NO: 1846390 - RNA, 19 nt, Human
cucagcucccaaggcucug

SEQ ID NO: 1846391 - RNA, 23 nt, Human
cucagcggggacagcuccuucug

SEQ ID NO: 1846392 - RNA, 13 nt, Human
cgcacugggcuug

SEQ ID NO: 1846393 - RNA, 17 nt, Human
cgcagcccugcagaggg

SEQ ID NO: 1846394 - RNA, 15 nt, Human
cgcagcccugcagag

SEQ ID NO: 1846395 - RNA, 20 nt, Human
cgcagcauauucaggaagcu

SEQ ID NO: 1846396 - RNA, 19 nt, Human
cgcagcauauucaggaagc

SEQ ID NO: 1846397 - RNA, 17 nt, Human
cgcacugggcuugggga

SEQ ID NO: 1846398 - RNA, 23 nt, Human
cgcacuucgggaggucgaggcag

SEQ ID NO: 1846399 - RNA, 13 nt, Human
cgagccuggcucc

SEQ ID NO: 1846400 - RNA, 19 nt, Human
cgagcccugguggcagugg

SEQ ID NO: 1846401 - RNA, 16 nt, Human
cgaggacagggaggug

SEQ ID NO: 1846402 - RNA, 20 nt, Human
cgggaauuuucaucuaggau

SEQ ID NO: 1846403 - RNA, 20 nt, Human
cgggaagggggcugggacau

SEQ ID NO: 1846404 - RNA, 19 nt, Human
cgggaagggggcugggaca

SEQ ID NO: 1846405 - RNA, 16 nt, Human
cgggaagggggcuggg

SEQ ID NO: 1846406 - RNA, 18 nt, Human
cgggaauuuucaucuagg

SEQ ID NO: 1846407 - RNA, 13 nt, Human
cggcuggccuggc

SEQ ID NO: 1846408 - RNA, 23 nt, Human
cggcuggcagcccaccccucaac

SEQ ID NO: 1846409 - RNA, 14 nt, Human
cggcuggccuggcc

SEQ ID NO: 1846410 - RNA, 14 nt, Human
cggcuggcagccca

SEQ ID NO: 1846411 - RNA, 11 nt, Human
cggccaggcca

SEQ ID NO: 1846412 - RNA, 12 nt, Human
cggccaggccag

SEQ ID NO: 1846413 - RNA, 20 nt, Human
cggccaggccagagggagug

SEQ ID NO: 1846414 - RNA, 17 nt, Human
cggagaaaggaagggcu

SEQ ID NO: 1846415 - RNA, 15 nt, Human
cggagaaaggaaggg

SEQ ID NO: 1846416 - RNA, 17 nt, Human
cggacuuagcugggaga

SEQ ID NO: 1846417 - RNA, 16 nt, Human
cggacuuagcugggag

SEQ ID NO: 1846418 - RNA, 21 nt, Human
cggacagccacggccaggcca

SEQ ID NO: 1846419 - RNA, 22 nt, Human
cggacagccacggccaggccag

SEQ ID NO: 1846420 - RNA, 16 nt, Human
cgcuuucuacccagcg

SEQ ID NO: 1846421 - RNA, 14 nt, Human
cgcuuucuacccag

SEQ ID NO: 1846422 - RNA, 16 nt, Human
cggaauaguuggcuag

SEQ ID NO: 1846423 - RNA, 17 nt, Human
cggaauaguuggcuagg

SEQ ID NO: 1846424 - RNA, 14 nt, Human
cgcugugcugcccu

SEQ ID NO: 1846425 - RNA, 13 nt, Human
cgcugugcugccc

SEQ ID NO: 1846426 - RNA, 11 nt, Human
cgcugugcugc

SEQ ID NO: 1846427 - RNA, 19 nt, Human
cgcugugcugcccugccca

SEQ ID NO: 1846428 - RNA, 23 nt, Human
cgcugugcugcccugcccaccug

SEQ ID NO: 1846429 - RNA, 21 nt, Human
cgcugugcugcccugcccacc

SEQ ID NO: 1846430 - RNA, 19 nt, Human
cgcagcccugcagagggca

SEQ ID NO: 1846431 - RNA, 18 nt, Human
cgcagcccugcagagggc

SEQ ID NO: 1846432 - RNA, 24 nt, Human
cgcagcccugcuuugggcugcccu

SEQ ID NO: 1846433 - RNA, 15 nt, Human
cgcagcccugcuuug

SEQ ID NO: 1846434 - RNA, 13 nt, Human
cgcagcccugcuu

SEQ ID NO: 1846435 - RNA, 18 nt, Human
cgcccaacuaauuuuugu

SEQ ID NO: 1846436 - RNA, 13 nt, Human
cgcccagucugga

SEQ ID NO: 1846437 - RNA, 19 nt, Human
cgcccagucuggaaugcag

SEQ ID NO: 1846438 - RNA, 18 nt, Human
cgcccggcuaauuuuugu

SEQ ID NO: 1846439 - RNA, 21 nt, Human
cgcccagucuggaaugcagug

SEQ ID NO: 1846440 - RNA, 13 nt, Human
cgccccuuccccc

SEQ ID NO: 1846441 - RNA, 14 nt, Human
cgcgacaaugcaaa

SEQ ID NO: 1846442 - RNA, 19 nt, Human
cgcgguggcucacgccugu

SEQ ID NO: 1846443 - RNA, 15 nt, Human
cgcgacaaugcaaac

SEQ ID NO: 1846444 - RNA, 24 nt, Human
cgcuacccgggaagggggcuggga

SEQ ID NO: 1846445 - RNA, 21 nt, Human
cgcuacccgggaagggggcug

SEQ ID NO: 1846446 - RNA, 18 nt, Human
cgcuacccgggaaggggg

SEQ ID NO: 1846447 - RNA, 19 nt, Human
ccuucucuccagccccugg

SEQ ID NO: 1846448 - RNA, 20 nt, Human
ccuuggugucgggcaugaca

SEQ ID NO: 1846449 - RNA, 19 nt, Human
ccuuggugucgggcaugac

SEQ ID NO: 1846450 - RNA, 21 nt, Human
ccuuggugucgggcaugacac

SEQ ID NO: 1846451 - RNA, 14 nt, Human
ccuuggggagcagg

SEQ ID NO: 1846452 - RNA, 16 nt, Human
ccuuggcugcagggag

SEQ ID NO: 1846453 - RNA, 23 nt, Human
ccuugacauuguagagcuucugg

SEQ ID NO: 1846454 - RNA, 18 nt, Human
ccuucucuccagccccug

SEQ ID NO: 1846455 - RNA, 17 nt, Human
ccuucucuccagccccu

SEQ ID NO: 1846456 - RNA, 18 nt, Human
ccuugacagggcacaccg

SEQ ID NO: 1846457 - RNA, 21 nt, Human
ccuugacagggcacaccgggc

SEQ ID NO: 1846458 - RNA, 15 nt, Human
ccuuggauugucccc

SEQ ID NO: 1846459 - RNA, 19 nt, Human
ccuuggauuguccccgacc

SEQ ID NO: 1846460 - RNA, 22 nt, Human
ccuuggcucaaguccucuuuuc

SEQ ID NO: 1846461 - RNA, 20 nt, Human
ccugugggcccccaaaugga

SEQ ID NO: 1846462 - RNA, 20 nt, Human
ccuguggaugauaaaacaca

SEQ ID NO: 1846463 - RNA, 18 nt, Human
ccuguggaucaaauccag

SEQ ID NO: 1846464 - RNA, 20 nt, Human
ccugugccucugggacugga

SEQ ID NO: 1846465 - RNA, 16 nt, Human
ccuucucuccagcccc

SEQ ID NO: 1846466 - RNA, 15 nt, Human
ccuucucuccagccc

SEQ ID NO: 1846467 - RNA, 13 nt, Human
ccuucucuccagc

SEQ ID NO: 1846468 - RNA, 12 nt, Human
ccuucucuccag

SEQ ID NO: 1846469 - RNA, 13 nt, Human
ccuuccaggggug

SEQ ID NO: 1846470 - RNA, 17 nt, Human
ccuuccauggacuuugu

SEQ ID NO: 1846471 - RNA, 18 nt, Human
ccuuccaugucgccucug

SEQ ID NO: 1846472 - RNA, 17 nt, Human
ccuucggccuccauccu

SEQ ID NO: 1846473 - RNA, 18 nt, Human
ccuucggccuccauccug

SEQ ID NO: 1846474 - RNA, 17 nt, Human
cgaauauugcugauggu

SEQ ID NO: 1846475 - RNA, 15 nt, Human
cgaauauugcugaug

SEQ ID NO: 1846476 - RNA, 14 nt, Human
cgaauauugcugau

SEQ ID NO: 1846477 - RNA, 12 nt, Human
cgaauauugcug

SEQ ID NO: 1846478 - RNA, 11 nt, Human
cgaauauugcu

SEQ ID NO: 1846479 - RNA, 16 nt, Human
cgaauagcugggacua

SEQ ID NO: 1846480 - RNA, 15 nt, Human
cgaauagcugggacu

SEQ ID NO: 1846481 - RNA, 23 nt, Human
cgaacauguuuuucuucucccuc

SEQ ID NO: 1846482 - RNA, 21 nt, Human
cgaacauguuuuucuucuccc

SEQ ID NO: 1846483 - RNA, 22 nt, Human
ccuuuuuuggcugcugaaggcu

SEQ ID NO: 1846484 - RNA, 20 nt, Human
ccuuuuuuggcugcugaagg

SEQ ID NO: 1846485 - RNA, 18 nt, Human
ccuuuuuuggcugcugaa

SEQ ID NO: 1846486 - RNA, 17 nt, Human
ccuuuuuuggcugcuga

SEQ ID NO: 1846487 - RNA, 23 nt, Human
cgaaagggacuuggaagcuccgc

SEQ ID NO: 1846488 - RNA, 14 nt, Human
ccuuuguccccacc

SEQ ID NO: 1846489 - RNA, 18 nt, Human
ccuuuguccccaccgcag

SEQ ID NO: 1846490 - RNA, 16 nt, Human
ccuuuguccccaccgc

SEQ ID NO: 1846491 - RNA, 24 nt, Human
ccuuuguauucucuccuguaccuc

SEQ ID NO: 1846492 - RNA, 23 nt, Human
ccuuuguaaauugucagaugcug

SEQ ID NO: 1846493 - RNA, 22 nt, Human
ccuuuguauucucuccuguacc

SEQ ID NO: 1846494 - RNA, 23 nt, Human
ccuuuguauucucuccuguaccu

SEQ ID NO: 1846495 - RNA, 21 nt, Human
ccuuuguaaauugucagaugc

SEQ ID NO: 1846496 - RNA, 14 nt, Human
ccuuugugaggaag

SEQ ID NO: 1846497 - RNA, 23 nt, Human
ccuuuguccccaccgcagacagg

SEQ ID NO: 1846498 - RNA, 22 nt, Human
ccuuuguccccaccgcagacag

SEQ ID NO: 1846499 - RNA, 23 nt, Human
ccuuugugaggaagccgcugggg

SEQ ID NO: 1846500 - RNA, 17 nt, Human
ccuuugugaggaagccg

SEQ ID NO: 1846501 - RNA, 16 nt, Human
ccuuugugaggaagcc

SEQ ID NO: 1846502 - RNA, 15 nt, Human
ccuuugugaggaagc

SEQ ID NO: 1846503 - RNA, 15 nt, Human
ccuuuuuuggcugcu

SEQ ID NO: 1846504 - RNA, 22 nt, Human
ccugccuguugggccaggagcc

SEQ ID NO: 1846505 - RNA, 14 nt, Human
ccugcccugugggc

SEQ ID NO: 1846506 - RNA, 12 nt, Human
ccugcccugugg

SEQ ID NO: 1846507 - RNA, 11 nt, Human
ccugcccugug

SEQ ID NO: 1846508 - RNA, 23 nt, Human
ccugcccugguuuccugcccugg

SEQ ID NO: 1846509 - RNA, 22 nt, Human
ccugcccugguuuccugcccug

SEQ ID NO: 1846510 - RNA, 21 nt, Human
ccugcccugguuuccugcccu

SEQ ID NO: 1846511 - RNA, 20 nt, Human
ccugcccugguuuccugccc

SEQ ID NO: 1846512 - RNA, 19 nt, Human
ccugcccugguuuccugcc

SEQ ID NO: 1846513 - RNA, 14 nt, Human
ccugcccugguuuc

SEQ ID NO: 1846514 - RNA, 22 nt, Human
ccugcccugggaggcagugaug

SEQ ID NO: 1846515 - RNA, 20 nt, Human
ccugcccugggaggcaguga

SEQ ID NO: 1846516 - RNA, 15 nt, Human
ccugcccugggaggc

SEQ ID NO: 1846517 - RNA, 14 nt, Human
ccugcccugggagg

SEQ ID NO: 1846518 - RNA, 12 nt, Human
ccugcccuggga

SEQ ID NO: 1846519 - RNA, 10 nt, Human
ccugcccugg

SEQ ID NO: 1846520 - RNA, 22 nt, Human
ccugcccuuaccugccaggaag

SEQ ID NO: 1846521 - RNA, 21 nt, Human
ccugcccuuaccugccaggaa

SEQ ID NO: 1846522 - RNA, 19 nt, Human
ccugcccuuaccugccagg

SEQ ID NO: 1846523 - RNA, 15 nt, Human
ccugcccugugggcc

SEQ ID NO: 1846524 - RNA, 12 nt, Human
ccugccucagcc

SEQ ID NO: 1846525 - RNA, 13 nt, Human
ccugccucagccu

SEQ ID NO: 1846526 - RNA, 14 nt, Human
ccugccucagccuc

SEQ ID NO: 1846527 - RNA, 14 nt, Human
ccugccuguugggc

SEQ ID NO: 1846528 - RNA, 22 nt, Human
ccugccuguucccauucuugca

SEQ ID NO: 1846529 - RNA, 12 nt, Human
ccugccaggcau

SEQ ID NO: 1846530 - RNA, 14 nt, Human
ccugccccccagcc

SEQ ID NO: 1846531 - RNA, 15 nt, Human
ccugccaggcauggu

SEQ ID NO: 1846532 - RNA, 22 nt, Human
ccugccagggacagagggggug

SEQ ID NO: 1846533 - RNA, 17 nt, Human
ccugccccugagcccau

SEQ ID NO: 1846534 - RNA, 22 nt, Human
ccugccccuccucucugcccua

SEQ ID NO: 1846535 - RNA, 21 nt, Human
ccugccccuccucucugcccu

SEQ ID NO: 1846536 - RNA, 20 nt, Human
ccugccccuccucucugccc

SEQ ID NO: 1846537 - RNA, 19 nt, Human
ccugccccuccucucugcc

SEQ ID NO: 1846538 - RNA, 14 nt, Human
ccugccccucccuu

SEQ ID NO: 1846539 - RNA, 18 nt, Human
ccugccccuccucucugc

SEQ ID NO: 1846540 - RNA, 18 nt, Human
ccugccccucccuucaac

SEQ ID NO: 1846541 - RNA, 16 nt, Human
ccugccccucccuuca

SEQ ID NO: 1846542 - RNA, 15 nt, Human
ccugccccucccuuc

SEQ ID NO: 1846543 - RNA, 14 nt, Human
ccugcccggcugcg

SEQ ID NO: 1846544 - RNA, 16 nt, Human
ccugcccggcugcgga

SEQ ID NO: 1846545 - RNA, 21 nt, Human
ccugcacacgcuccuuccucu

SEQ ID NO: 1846546 - RNA, 23 nt, Human
ccugcacaaagcccuuccauguc

SEQ ID NO: 1846547 - RNA, 14 nt, Human
ccugcaaagcccag

SEQ ID NO: 1846548 - RNA, 16 nt, Human
ccugcaaagcccagcu

SEQ ID NO: 1846549 - RNA, 15 nt, Human
ccugcaaagcccagc

SEQ ID NO: 1846550 - RNA, 20 nt, Human
ccugcacaaagcccuuccau

SEQ ID NO: 1846551 - RNA, 22 nt, Human
ccugcacaaagcccuuccaugu

SEQ ID NO: 1846552 - RNA, 18 nt, Human
ccugcaaagcccagcuug

SEQ ID NO: 1846553 - RNA, 17 nt, Human
ccugcaaagcccagcuu

SEQ ID NO: 1846554 - RNA, 16 nt, Human
ccugccacccugggga

SEQ ID NO: 1846555 - RNA, 22 nt, Human
ccugccacccuggggagaaagu

SEQ ID NO: 1846556 - RNA, 14 nt, Human
ccugccacccuggg

SEQ ID NO: 1846557 - RNA, 12 nt, Human
ccugccacccug

SEQ ID NO: 1846558 - RNA, 13 nt, Human
ccugccacccugg

SEQ ID NO: 1846559 - RNA, 23 nt, Human
ccugcauuugugaaaugauggug

SEQ ID NO: 1846560 - RNA, 19 nt, Human
ccugccaauggacuaacuu

SEQ ID NO: 1846561 - RNA, 19 nt, Human
ccugccaccacgcccggcu

SEQ ID NO: 1846562 - RNA, 15 nt, Human
ccugccaccacgccc

SEQ ID NO: 1846563 - RNA, 20 nt, Human
ccugagccagauuucacucu

SEQ ID NO: 1846564 - RNA, 22 nt, Human
ccugaagucuuuguacagacaa

SEQ ID NO: 1846565 - RNA, 19 nt, Human
ccugaaguaagcaaagacu

SEQ ID NO: 1846566 - RNA, 20 nt, Human
ccugaagucacacagugagu

SEQ ID NO: 1846567 - RNA, 19 nt, Human
ccugaagucacacagugag

SEQ ID NO: 1846568 - RNA, 18 nt, Human
ccugagccagauuucacu

SEQ ID NO: 1846569 - RNA, 16 nt, Human
ccugagccagauuuca

SEQ ID NO: 1846570 - RNA, 15 nt, Human
ccugagccagauuuc

SEQ ID NO: 1846571 - RNA, 18 nt, Human
ccugaggcccagagggcc

SEQ ID NO: 1846572 - RNA, 17 nt, Human
ccugaggcccagagggc

SEQ ID NO: 1846573 - RNA, 16 nt, Human
ccugaggcccagaggg

SEQ ID NO: 1846574 - RNA, 15 nt, Human
ccugaggcccagagg

SEQ ID NO: 1846575 - RNA, 12 nt, Human
ccugagcuggga

SEQ ID NO: 1846576 - RNA, 16 nt, Human
ccugaggcugggcucc

SEQ ID NO: 1846577 - RNA, 15 nt, Human
ccugaggcugggcuc

SEQ ID NO: 1846578 - RNA, 14 nt, Human
ccugaggcugggcu

SEQ ID NO: 1846579 - RNA, 13 nt, Human
ccugaggcugggc

SEQ ID NO: 1846580 - RNA, 13 nt, Human
ccugaggcuccac

SEQ ID NO: 1846581 - RNA, 14 nt, Human
ccugaggcuccacu

SEQ ID NO: 1846582 - RNA, 17 nt, Human
ccugaggcuccacuugg

SEQ ID NO: 1846583 - RNA, 15 nt, Human
ccugagcugggauga

SEQ ID NO: 1846584 - RNA, 21 nt, Human
ccugaaggccccgcccaggcu

SEQ ID NO: 1846585 - RNA, 20 nt, Human
ccugaaggccccgcccaggc

SEQ ID NO: 1846586 - RNA, 22 nt, Human
ccugaaggccccgcccaggcuu

SEQ ID NO: 1846587 - RNA, 19 nt, Human
ccugaaggccccgcccagg

SEQ ID NO: 1846588 - RNA, 18 nt, Human
ccugaaggccccgcccag

SEQ ID NO: 1846589 - RNA, 14 nt, Human
ccugaaggccccgc

SEQ ID NO: 1846590 - RNA, 18 nt, Human
ccugaaagcccugagcuu

SEQ ID NO: 1846591 - RNA, 14 nt, Human
ccugaaagcccuga

SEQ ID NO: 1846592 - RNA, 13 nt, Human
ccugaaagcccug

SEQ ID NO: 1846593 - RNA, 13 nt, Human
ccugaaagaggaa

SEQ ID NO: 1846594 - RNA, 11 nt, Human
ccucuuccuga

SEQ ID NO: 1846595 - RNA, 14 nt, Human
ccuggcaugggaau

SEQ ID NO: 1846596 - RNA, 19 nt, Human
ccugccuguugggccagga

SEQ ID NO: 1846597 - RNA, 18 nt, Human
ccugccuguugggccagg

SEQ ID NO: 1846598 - RNA, 20 nt, Human
ccugccuguugggccaggag

SEQ ID NO: 1846599 - RNA, 21 nt, Human
ccugcuaauuccccagauugc

SEQ ID NO: 1846600 - RNA, 13 nt, Human
ccuggagaacuag

SEQ ID NO: 1846601 - RNA, 12 nt, Human
ccuggagaacua

SEQ ID NO: 1846602 - RNA, 16 nt, Human
ccuggagaacuagaga

SEQ ID NO: 1846603 - RNA, 19 nt, Human
ccuggcacccggccccugc

SEQ ID NO: 1846604 - RNA, 12 nt, Human
ccuggcacugcu

SEQ ID NO: 1846605 - RNA, 20 nt, Human
ccuggcacccggccccugcu

SEQ ID NO: 1846606 - RNA, 21 nt, Human
ccuggcacccggccccugcug

SEQ ID NO: 1846607 - RNA, 13 nt, Human
ccuggcaugggaa

SEQ ID NO: 1846608 - RNA, 16 nt, Human
ccuggcacugcuucca

SEQ ID NO: 1846609 - RNA, 13 nt, Human
ccuggcacugcuu

SEQ ID NO: 1846610 - RNA, 14 nt, Human
ccuggcccacugca

SEQ ID NO: 1846611 - RNA, 13 nt, Human
ccuggcccacugc

SEQ ID NO: 1846612 - RNA, 13 nt, Human
ccuggccacgccc

SEQ ID NO: 1846613 - RNA, 21 nt, Human
ccuggccagaugcaccagccc

SEQ ID NO: 1846614 - RNA, 23 nt, Human
ccuggccagaugcaccagcccuu

SEQ ID NO: 1846615 - RNA, 20 nt, Human
ccuggccagaugcaccagcc

SEQ ID NO: 1846616 - RNA, 16 nt, Human
ccuggcccacugcauc

SEQ ID NO: 1846617 - RNA, 16 nt, Human
ccuggcuuuucacugc

SEQ ID NO: 1846618 - RNA, 17 nt, Human
ccuggcuuuucacugcu

SEQ ID NO: 1846619 - RNA, 19 nt, Human
ccugggggcugggcagagg

SEQ ID NO: 1846620 - RNA, 21 nt, Human
ccugggggcugggcagaggaa

SEQ ID NO: 1846621 - RNA, 20 nt, Human
ccugggggcugggcagagga

SEQ ID NO: 1846622 - RNA, 22 nt, Human
ccugggaggucaaggcugcagu

SEQ ID NO: 1846623 - RNA, 16 nt, Human
ccugggagugagcugg

SEQ ID NO: 1846624 - RNA, 16 nt, Human
ccugggcagaaggaag

SEQ ID NO: 1846625 - RNA, 18 nt, Human
ccugggagugagcugguu

SEQ ID NO: 1846626 - RNA, 15 nt, Human
ccugggcagaaggaa

SEQ ID NO: 1846627 - RNA, 21 nt, Human
ccugguggcagcucaccucuc

SEQ ID NO: 1846628 - RNA, 19 nt, Human
ccugguggcagcucaccuc

SEQ ID NO: 1846629 - RNA, 22 nt, Human
ccugguggcagcucaccucucc

SEQ ID NO: 1846630 - RNA, 14 nt, Human
ccugguggcagcug

SEQ ID NO: 1846631 - RNA, 15 nt, Human
ccugguggcagcugc

SEQ ID NO: 1846632 - RNA, 16 nt, Human
ccugguggcagcugcg

SEQ ID NO: 1846633 - RNA, 17 nt, Human
ccugguggcagcugcgg

SEQ ID NO: 1846634 - RNA, 18 nt, Human
ccugguggcagcugcggu

SEQ ID NO: 1846635 - RNA, 15 nt, Human
ccugucccccugaca

SEQ ID NO: 1846636 - RNA, 14 nt, Human
ccugucccccugac

SEQ ID NO: 1846637 - RNA, 13 nt, Human
ccugucccccuga

SEQ ID NO: 1846638 - RNA, 12 nt, Human
ccugucccccug

SEQ ID NO: 1846639 - RNA, 10 nt, Human
ccuguaccuc

SEQ ID NO: 1846640 - RNA, 12 nt, Human
ccuguaccucuu

SEQ ID NO: 1846641 - RNA, 15 nt, Human
ccugguggcaguggg

SEQ ID NO: 1846642 - RNA, 13 nt, Human
ccugguggcagug

SEQ ID NO: 1846643 - RNA, 14 nt, Human
ccugguggcagugg

SEQ ID NO: 1846644 - RNA, 16 nt, Human
ccuguagagugggagc

SEQ ID NO: 1846645 - RNA, 15 nt, Human
ccuguagagugggag

SEQ ID NO: 1846646 - RNA, 13 nt, Human
ccuguagcccuaa

SEQ ID NO: 1846647 - RNA, 22 nt, Human
gaaagcagaacagugauuacca

SEQ ID NO: 1846648 - RNA, 17 nt, Human
gaaagcagaacagugau

SEQ ID NO: 1846649 - RNA, 16 nt, Human
gaaagaguaggaagac

SEQ ID NO: 1846650 - RNA, 15 nt, Human
gaaagaguaggaaga

SEQ ID NO: 1846651 - RNA, 21 nt, Human
gaaagaguacucuuguuuccu

SEQ ID NO: 1846652 - RNA, 21 nt, Human
gaaagaggaaugaaguacuca

SEQ ID NO: 1846653 - RNA, 19 nt, Human
gaaagacuuuuccaacccu

SEQ ID NO: 1846654 - RNA, 14 nt, Human
gaaagcagggacuu

SEQ ID NO: 1846655 - RNA, 22 nt, Human
gaaagcccugagcuuucugcua

SEQ ID NO: 1846656 - RNA, 21 nt, Human
gaaagcccugagcuuucugcu

SEQ ID NO: 1846657 - RNA, 17 nt, Human
gaaagcccugagcuuuc

SEQ ID NO: 1846658 - RNA, 17 nt, Human
gaaagcccugugcucca

SEQ ID NO: 1846659 - RNA, 19 nt, Human
gaaacccagcucuggucca

SEQ ID NO: 1846660 - RNA, 18 nt, Human
gaaacccagcucuggucc

SEQ ID NO: 1846661 - RNA, 16 nt, Human
gaaacccagcucuggu

SEQ ID NO: 1846662 - RNA, 15 nt, Human
gaaacccagcucugg

SEQ ID NO: 1846663 - RNA, 14 nt, Human
gaaacccagcucug

SEQ ID NO: 1846664 - RNA, 13 nt, Human
gaaacccagcucu

SEQ ID NO: 1846665 - RNA, 23 nt, Human
gaaacccagcucugguccauaga

SEQ ID NO: 1846666 - RNA, 14 nt, Human
gaaacccugucucu

SEQ ID NO: 1846667 - RNA, 19 nt, Human
gaaacuaggugcauauuua

SEQ ID NO: 1846668 - RNA, 22 nt, Human
gaaaacacuguucucugcccuc

SEQ ID NO: 1846669 - RNA, 24 nt, Human
gaaaacacuguucucugcccucca

SEQ ID NO: 1846670 - RNA, 22 nt, Human
gaaaacguggcugcuucaagga

SEQ ID NO: 1846671 - RNA, 20 nt, Human
gaaaacguggcugcuucaag

SEQ ID NO: 1846672 - RNA, 19 nt, Human
gaaaagcugcugacagugu

SEQ ID NO: 1846673 - RNA, 18 nt, Human
gaaaagggaacugaacau

SEQ ID NO: 1846674 - RNA, 19 nt, Human
gaaaaguuuuguaaauuuc

SEQ ID NO: 1846675 - RNA, 22 nt, Human
gaaaaucagccugcuccagcug

SEQ ID NO: 1846676 - RNA, 20 nt, Human
gaaaaucagccugcuccagc

SEQ ID NO: 1846677 - RNA, 22 nt, Human
gaaaaucuacacuccagugaga

SEQ ID NO: 1846678 - RNA, 18 nt, Human
gaaaaucuuauaauuuaa

SEQ ID NO: 1846679 - RNA, 22 nt, Human
cuuuuuuggcugcugaaggcuc

SEQ ID NO: 1846680 - RNA, 20 nt, Human
cuuuuuuggcugcugaaggc

SEQ ID NO: 1846681 - RNA, 17 nt, Human
cuuuuuuggcugcugaa

SEQ ID NO: 1846682 - RNA, 16 nt, Human
cuuuuuuggcugcuga

SEQ ID NO: 1846683 - RNA, 15 nt, Human
gaaaaaggaggaaga

SEQ ID NO: 1846684 - RNA, 12 nt, Human
gaaaaaggagga

SEQ ID NO: 1846685 - RNA, 18 nt, Human
gaaaacacauuuuucuua

SEQ ID NO: 1846686 - RNA, 19 nt, Human
gaaaacacauuuuucuuag

SEQ ID NO: 1846687 - RNA, 18 nt, Human
gaaaacacuguucucugc

SEQ ID NO: 1846688 - RNA, 11 nt, Human
cuuuuguucuu

SEQ ID NO: 1846689 - RNA, 12 nt, Human
cuuuuguucuug

SEQ ID NO: 1846690 - RNA, 18 nt, Human
cuuuguuaguuucuccaa

SEQ ID NO: 1846691 - RNA, 20 nt, Human
cuuuuguucuugguuuguaa

SEQ ID NO: 1846692 - RNA, 17 nt, Human
cuuuuuauggccuguga

SEQ ID NO: 1846693 - RNA, 21 nt, Human
cuuuaucuugaauaauguaag

SEQ ID NO: 1846694 - RNA, 18 nt, Human
cuuuaucuugaauaaugu

SEQ ID NO: 1846695 - RNA, 15 nt, Human
cuuuaugcacaaaau

SEQ ID NO: 1846696 - RNA, 23 nt, Human
cuuuaucuugaauaauguaagac

SEQ ID NO: 1846697 - RNA, 19 nt, Human
cuuuauaauucuacuuuga

SEQ ID NO: 1846698 - RNA, 13 nt, Human
cuuuauaauucua

SEQ ID NO: 1846699 - RNA, 14 nt, Human
cuuuagcgcccagu

SEQ ID NO: 1846700 - RNA, 15 nt, Human
cuuuagcgcccaguu

SEQ ID NO: 1846701 - RNA, 22 nt, Human
cuuuaccuuuuuuauacauaaa

SEQ ID NO: 1846702 - RNA, 13 nt, Human
cuuuacuauggcc

SEQ ID NO: 1846703 - RNA, 17 nt, Human
cuuguacuuuauuuucu

SEQ ID NO: 1846704 - RNA, 15 nt, Human
cuuguacauaaugcg

SEQ ID NO: 1846705 - RNA, 12 nt, Human
cuuguacauaau

SEQ ID NO: 1846706 - RNA, 17 nt, Human
cuuguaaauagcucagg

SEQ ID NO: 1846707 - RNA, 18 nt, Human
cuuguaaauagcucaggu

SEQ ID NO: 1846708 - RNA, 19 nt, Human
cuuguacauaaugcgugca

SEQ ID NO: 1846709 - RNA, 21 nt, Human
cuuguacauaaugcgugcaua

SEQ ID NO: 1846710 - RNA, 22 nt, Human
cuuguacauaaugcgugcauac

SEQ ID NO: 1846711 - RNA, 21 nt, Human
cuuguaaauagcucagguguc

SEQ ID NO: 1846712 - RNA, 16 nt, Human
cuuguaaauagcucag

SEQ ID NO: 1846713 - RNA, 23 nt, Human
cuuggggggcugaggugggagga

SEQ ID NO: 1846714 - RNA, 19 nt, Human
cuugaguuuaaauuguaau

SEQ ID NO: 1846715 - RNA, 17 nt, Human
cuuucuggcuaugcauu

SEQ ID NO: 1846716 - RNA, 18 nt, Human
cuuucuggcuaugcauuu

SEQ ID NO: 1846717 - RNA, 19 nt, Human
cuuucuggcuaugcauuug

SEQ ID NO: 1846718 - RNA, 20 nt, Human
cuuucuggcuaugcauuuga

SEQ ID NO: 1846719 - RNA, 20 nt, Human
cuuucugggcaccggggccu

SEQ ID NO: 1846720 - RNA, 11 nt, Human
cuuucuuccuc

SEQ ID NO: 1846721 - RNA, 15 nt, Human
cuuuccugaggcugg

SEQ ID NO: 1846722 - RNA, 13 nt, Human
cuuuccugaggcu

SEQ ID NO: 1846723 - RNA, 16 nt, Human
cuuucccucccuuccu

SEQ ID NO: 1846724 - RNA, 14 nt, Human
cuuucccucccuuc

SEQ ID NO: 1846725 - RNA, 13 nt, Human
cuuucccucccuu

SEQ ID NO: 1846726 - RNA, 11 nt, Human
cuuucccuccc

SEQ ID NO: 1846727 - RNA, 12 nt, Human
cuuuccugaggc

SEQ ID NO: 1846728 - RNA, 15 nt, Human
cuuuccaggaaggcu

SEQ ID NO: 1846729 - RNA, 15 nt, Human
cuuuccaucuacccu

SEQ ID NO: 1846730 - RNA, 14 nt, Human
cuuugaccucugca

SEQ ID NO: 1846731 - RNA, 15 nt, Human
cuuugaccucugcag

SEQ ID NO: 1846732 - RNA, 15 nt, Human
cuuucuuccucugcu

SEQ ID NO: 1846733 - RNA, 14 nt, Human
cuuucuuccucugc

SEQ ID NO: 1846734 - RNA, 13 nt, Human
cuuucuuccucug

SEQ ID NO: 1846735 - RNA, 12 nt, Human
cuuucuuccucu

SEQ ID NO: 1846736 - RNA, 17 nt, Human
cuuugaccucugcagca

SEQ ID NO: 1846737 - RNA, 18 nt, Human
cuuugaccucugcagcaa

SEQ ID NO: 1846738 - RNA, 20 nt, Human
cuuugaccucugcagcaaua

SEQ ID NO: 1846739 - RNA, 24 nt, Human
cuuugaccucugcagcaauaaagc

SEQ ID NO: 1846740 - RNA, 22 nt, Human
cuuugcauaacguauaaaagcc

SEQ ID NO: 1846741 - RNA, 16 nt, Human
cuuugcagacaggcaa

SEQ ID NO: 1846742 - RNA, 13 nt, Human
cuuugaccucugc

SEQ ID NO: 1846743 - RNA, 20 nt, Human
cuuugcagacaggcaagcac

SEQ ID NO: 1846744 - RNA, 15 nt, Human
cuuuguccccaccgc

SEQ ID NO: 1846745 - RNA, 15 nt, Human
cuuugugaggaagcc

SEQ ID NO: 1846746 - RNA, 14 nt, Human
cuuuguccccaccg

SEQ ID NO: 1846747 - RNA, 19 nt, Human
cuuuggcuauuagagauca

SEQ ID NO: 1846748 - RNA, 19 nt, Human
cuucucuccagccccugga

SEQ ID NO: 1846749 - RNA, 17 nt, Human
cuucucuccagccccug

SEQ ID NO: 1846750 - RNA, 15 nt, Human
cuucucuccagcccc

SEQ ID NO: 1846751 - RNA, 13 nt, Human
cuucucuccagcc

SEQ ID NO: 1846752 - RNA, 12 nt, Human
cuucucuccagc

SEQ ID NO: 1846753 - RNA, 19 nt, Human
cuucuccuucaccuuuguc

SEQ ID NO: 1846754 - RNA, 20 nt, Human
cuucuccuuagaaguggaag

SEQ ID NO: 1846755 - RNA, 13 nt, Human
cuucucugaagga

SEQ ID NO: 1846756 - RNA, 17 nt, Human
cuucuccacuggaugga

SEQ ID NO: 1846757 - RNA, 12 nt, Human
cuucuccaggcu

SEQ ID NO: 1846758 - RNA, 13 nt, Human
cuucuccaggcug

SEQ ID NO: 1846759 - RNA, 20 nt, Human
cuucuccacuuucuagccag

SEQ ID NO: 1846760 - RNA, 11 nt, Human
cuucuccacuu

SEQ ID NO: 1846761 - RNA, 13 nt, Human
cuucuccacugga

SEQ ID NO: 1846762 - RNA, 15 nt, Human
cuucuccacuggaug

SEQ ID NO: 1846763 - RNA, 14 nt, Human
cuucuccacuggau

SEQ ID NO: 1846764 - RNA, 15 nt, Human
cuuccucccucauuc

SEQ ID NO: 1846765 - RNA, 23 nt, Human
cuucuggguuccuuccucugagc

SEQ ID NO: 1846766 - RNA, 17 nt, Human
cuucuggguuccuuccu

SEQ ID NO: 1846767 - RNA, 16 nt, Human
cuucuggguuccuucc

SEQ ID NO: 1846768 - RNA, 14 nt, Human
cuucugguugaugc

SEQ ID NO: 1846769 - RNA, 13 nt, Human
cuucugcuucagc

SEQ ID NO: 1846770 - RNA, 21 nt, Human
cuucuguacgucugacaggca

SEQ ID NO: 1846771 - RNA, 14 nt, Human
cuucuguacgucug

SEQ ID NO: 1846772 - RNA, 15 nt, Human
cuucuguacgucuga

SEQ ID NO: 1846773 - RNA, 18 nt, Human
cuucuguacgucugacag

SEQ ID NO: 1846774 - RNA, 20 nt, Human
cuucuguacgucugacaggc

SEQ ID NO: 1846775 - RNA, 16 nt, Human
cuucuguccuacucug

SEQ ID NO: 1846776 - RNA, 17 nt, Human
cuucuguccuacucugu

SEQ ID NO: 1846777 - RNA, 18 nt, Human
cuucuguccuacucugug

SEQ ID NO: 1846778 - RNA, 19 nt, Human
cuucuguccuacucugugu

SEQ ID NO: 1846779 - RNA, 21 nt, Human
cuucuguccuacucuguguca

SEQ ID NO: 1846780 - RNA, 16 nt, Human
cuugagccugggaggu

SEQ ID NO: 1846781 - RNA, 17 nt, Human
cuugagccuugaacuuu

SEQ ID NO: 1846782 - RNA, 18 nt, Human
cuugagccuugaacuuug

SEQ ID NO: 1846783 - RNA, 15 nt, Human
cuugagccuugaacu

SEQ ID NO: 1846784 - RNA, 21 nt, Human
cuugaggguugggcugguguc

SEQ ID NO: 1846785 - RNA, 19 nt, Human
cuugaggguugggcuggug

SEQ ID NO: 1846786 - RNA, 20 nt, Human
cuugaggguugggcuggugu

SEQ ID NO: 1846787 - RNA, 23 nt, Human
cuugaccauucuccaccugccag

SEQ ID NO: 1846788 - RNA, 22 nt, Human
cuugaccauucuccaccugcca

SEQ ID NO: 1846789 - RNA, 17 nt, Human
cuugaccgugaggccag

SEQ ID NO: 1846790 - RNA, 16 nt, Human
cuugaagacuuuucuu

SEQ ID NO: 1846791 - RNA, 20 nt, Human
cuugaccgugaggccagaga

SEQ ID NO: 1846792 - RNA, 18 nt, Human
cuugaccgugaggccaga

SEQ ID NO: 1846793 - RNA, 21 nt, Human
cuugaccgugaggccagagac

SEQ ID NO: 1846794 - RNA, 13 nt, Human
cuugaccucaggu

SEQ ID NO: 1846795 - RNA, 17 nt, Human
cuugaacuuugaccucu

SEQ ID NO: 1846796 - RNA, 21 nt, Human
cuugaacuuugaccucugcag

SEQ ID NO: 1846797 - RNA, 18 nt, Human
cuugaacuccugaccuca

SEQ ID NO: 1846798 - RNA, 16 nt, Human
cuugaacuccugaccu

SEQ ID NO: 1846799 - RNA, 13 nt, Human
cuugaacuccuga

SEQ ID NO: 1846800 - RNA, 13 nt, Human
cuugaacuccugg

SEQ ID NO: 1846801 - RNA, 18 nt, Human
cuugaaaauuaacaugaa

SEQ ID NO: 1846802 - RNA, 13 nt, Human
cuugaaaauuaac

SEQ ID NO: 1846803 - RNA, 12 nt, Human
cuugaaaauuaa

SEQ ID NO: 1846804 - RNA, 23 nt, Human
cuugaaaacacuguucucugccc

SEQ ID NO: 1846805 - RNA, 14 nt, Human
cuugaaaacacugu

SEQ ID NO: 1846806 - RNA, 18 nt, Human
cuugaaaaaugcauguug

SEQ ID NO: 1846807 - RNA, 12 nt, Human
cuugaaaaaugc

SEQ ID NO: 1846808 - RNA, 22 nt, Human
cuucuuuauaauucuacuuuga

SEQ ID NO: 1846809 - RNA, 21 nt, Human
cuucuguggguuucuaaagcu

SEQ ID NO: 1846810 - RNA, 14 nt, Human
cuucuguggguuuc

SEQ ID NO: 1846811 - RNA, 13 nt, Human
cuucuguggguuu

SEQ ID NO: 1846812 - RNA, 22 nt, Human
cuucuguggcucacagaacccu

SEQ ID NO: 1846813 - RNA, 15 nt, Human
cuucuguggcucaca

SEQ ID NO: 1846814 - RNA, 13 nt, Human
cuucuguggcuca

SEQ ID NO: 1846815 - RNA, 15 nt, Human
cuucuguugcugccu

SEQ ID NO: 1846816 - RNA, 14 nt, Human
cuuccaggcuggga

SEQ ID NO: 1846817 - RNA, 12 nt, Human
cuuccaggcugg

SEQ ID NO: 1846818 - RNA, 21 nt, Human
cuuccacaagagcccaggccu

SEQ ID NO: 1846819 - RNA, 19 nt, Human
cuuccacaagagcccaggc

SEQ ID NO: 1846820 - RNA, 17 nt, Human
cuuccacaagagcccag

SEQ ID NO: 1846821 - RNA, 20 nt, Human
cuucauucaacccaccugcg

SEQ ID NO: 1846822 - RNA, 17 nt, Human
cuucaguggcagcugcu

SEQ ID NO: 1846823 - RNA, 23 nt, Human
cuucaguaagccgugauuuucau

SEQ ID NO: 1846824 - RNA, 16 nt, Human
cuucaguaagccguga

SEQ ID NO: 1846825 - RNA, 15 nt, Human
cuucagggagugagg

SEQ ID NO: 1846826 - RNA, 22 nt, Human
cuucaggcucuucuccuuucac

SEQ ID NO: 1846827 - RNA, 19 nt, Human
cuucaggcucuucuccuuu

SEQ ID NO: 1846828 - RNA, 22 nt, Human
cuucagugccuuauggaacacu

SEQ ID NO: 1846829 - RNA, 18 nt, Human
cuucagugccuuauggaa

SEQ ID NO: 1846830 - RNA, 13 nt, Human
cuucaguggcagc

SEQ ID NO: 1846831 - RNA, 14 nt, Human
cuucaguggcagcu

SEQ ID NO: 1846832 - RNA, 15 nt, Human
cuucaguggcagcug

SEQ ID NO: 1846833 - RNA, 16 nt, Human
cuucaguggcagcugc

SEQ ID NO: 1846834 - RNA, 21 nt, Human
cuuccaggggugggacacccu

SEQ ID NO: 1846835 - RNA, 17 nt, Human
cuuccaggggugggaca

SEQ ID NO: 1846836 - RNA, 15 nt, Human
cuuccagggguggga

SEQ ID NO: 1846837 - RNA, 14 nt, Human
cuuccagggguggg

SEQ ID NO: 1846838 - RNA, 19 nt, Human
cuuccaggcugggagagcc

SEQ ID NO: 1846839 - RNA, 16 nt, Human
cuuccaggcugggaga

SEQ ID NO: 1846840 - RNA, 15 nt, Human
cuuccaggcugggag

SEQ ID NO: 1846841 - RNA, 19 nt, Human
cuuccuaauuccacagcug

SEQ ID NO: 1846842 - RNA, 18 nt, Human
cuuccuaauuccacagcu

SEQ ID NO: 1846843 - RNA, 17 nt, Human
cuuccuaauuccacagc

SEQ ID NO: 1846844 - RNA, 13 nt, Human
cuuccuaauucca

SEQ ID NO: 1846845 - RNA, 13 nt, Human
cuuccucccucau

SEQ ID NO: 1846846 - RNA, 17 nt, Human
cuucccuacaguugaaa

SEQ ID NO: 1846847 - RNA, 19 nt, Human
cuucccgcucagcccuccc

SEQ ID NO: 1846848 - RNA, 23 nt, Human
cuucccgcucagcccucccugcc

SEQ ID NO: 1846849 - RNA, 14 nt, Human
cuuauagacaacau

SEQ ID NO: 1846850 - RNA, 13 nt, Human
cuuauauuaugga

SEQ ID NO: 1846851 - RNA, 19 nt, Human
cuuagucacugagacagcc

SEQ ID NO: 1846852 - RNA, 18 nt, Human
cuuagucacugagacagc

SEQ ID NO: 1846853 - RNA, 13 nt, Human
cuuagauguauau

SEQ ID NO: 1846854 - RNA, 16 nt, Human
cuuagucacugagaca

SEQ ID NO: 1846855 - RNA, 19 nt, Human
cuuagauguauauauuucc

SEQ ID NO: 1846856 - RNA, 16 nt, Human
cuguucuggcagaguu

SEQ ID NO: 1846857 - RNA, 16 nt, Human
cuguucugcacacagc

SEQ ID NO: 1846858 - RNA, 17 nt, Human
cuucaaagcaaaugucu

SEQ ID NO: 1846859 - RNA, 18 nt, Human
cuuauuuaaugaaagacu

SEQ ID NO: 1846860 - RNA, 17 nt, Human
cuuauuuaaugaaagac

SEQ ID NO: 1846861 - RNA, 16 nt, Human
cuucaaggauccugag

SEQ ID NO: 1846862 - RNA, 15 nt, Human
cuucaaggauccuga

SEQ ID NO: 1846863 - RNA, 13 nt, Human
cuucaaggauccu

SEQ ID NO: 1846864 - RNA, 10 nt, Human
cuucaaggau

SEQ ID NO: 1846865 - RNA, 16 nt, Human
cuucaacucccugccc

SEQ ID NO: 1846866 - RNA, 20 nt, Human
cuucaaccauuccccauggg

SEQ ID NO: 1846867 - RNA, 16 nt, Human
cuucaaccauucccca

SEQ ID NO: 1846868 - RNA, 23 nt, Human
cuucacagaugggugcuuggagg

SEQ ID NO: 1846869 - RNA, 13 nt, Human
cuguacagagccc

SEQ ID NO: 1846870 - RNA, 13 nt, Human
cugucaauuacag

SEQ ID NO: 1846871 - RNA, 17 nt, Human
cuguccaggcacugcug

SEQ ID NO: 1846872 - RNA, 23 nt, Human
cuguccaggcacugcugcccagc

SEQ ID NO: 1846873 - RNA, 23 nt, Human
cuguaucccaugagccucagcau

SEQ ID NO: 1846874 - RNA, 22 nt, Human
cuguccccgcacugggcuuggg

SEQ ID NO: 1846875 - RNA, 19 nt, Human
cuguccccgcacugggcuu

SEQ ID NO: 1846876 - RNA, 18 nt, Human
cuguccccgcacugggcu

SEQ ID NO: 1846877 - RNA, 17 nt, Human
cuguccccgcacugggc

SEQ ID NO: 1846878 - RNA, 20 nt, Human
cugucccuuacgugaguccu

SEQ ID NO: 1846879 - RNA, 14 nt, Human
cuguccgagcuuug

SEQ ID NO: 1846880 - RNA, 18 nt, Human
cugucucaaaaaaagaaa

SEQ ID NO: 1846881 - RNA, 22 nt, Human
cugucucaagagggcacuggug

SEQ ID NO: 1846882 - RNA, 16 nt, Human
cugucucaaaaaaaga

SEQ ID NO: 1846883 - RNA, 23 nt, Human
cugucucaaaaaaacacaaaagu

SEQ ID NO: 1846884 - RNA, 14 nt, Human
cuguccuacccacc

SEQ ID NO: 1846885 - RNA, 15 nt, Human
cuguccgagcuuuga

SEQ ID NO: 1846886 - RNA, 22 nt, Human
cugucccuuacgugaguccugg

SEQ ID NO: 1846887 - RNA, 17 nt, Human
cuggguucuacccaggu

SEQ ID NO: 1846888 - RNA, 16 nt, Human
cuggguucuacccagg

SEQ ID NO: 1846889 - RNA, 15 nt, Human
cuggguucuacccag

SEQ ID NO: 1846890 - RNA, 14 nt, Human
cuggguucuaccca

SEQ ID NO: 1846891 - RNA, 20 nt, Human
cuggguaacuagggaagaua

SEQ ID NO: 1846892 - RNA, 22 nt, Human
cuggguaacuagggaagauaau

SEQ ID NO: 1846893 - RNA, 24 nt, Human
cugggcuucaguggcagcugcuuu

SEQ ID NO: 1846894 - RNA, 13 nt, Human
cugggggaagaag

SEQ ID NO: 1846895 - RNA, 22 nt, Human
cugggggggauuguaaaauggu

SEQ ID NO: 1846896 - RNA, 19 nt, Human
cugggggcugggcagagga

SEQ ID NO: 1846897 - RNA, 15 nt, Human
cugggggaagaagcu

SEQ ID NO: 1846898 - RNA, 15 nt, Human
cuguacaaaguagaa

SEQ ID NO: 1846899 - RNA, 13 nt, Human
cuguacaaaguag

SEQ ID NO: 1846900 - RNA, 20 nt, Human
cuguaauccuagcacuuugg

SEQ ID NO: 1846901 - RNA, 23 nt, Human
cuguaaucacagcuacuugggag

SEQ ID NO: 1846902 - RNA, 13 nt, Human
cugguuccucccc

SEQ ID NO: 1846903 - RNA, 16 nt, Human
cugguuccauggccuc

SEQ ID NO: 1846904 - RNA, 12 nt, Human
cugguuccuccc

SEQ ID NO: 1846905 - RNA, 18 nt, Human
cuggucacaggacucugc

SEQ ID NO: 1846906 - RNA, 22 nt, Human
cuggugcugccacacuucaggc

SEQ ID NO: 1846907 - RNA, 20 nt, Human
cuggugcugccacacuucag

SEQ ID NO: 1846908 - RNA, 13 nt, Human
cuggugcugccac

SEQ ID NO: 1846909 - RNA, 12 nt, Human
cuggugcugcca

SEQ ID NO: 1846910 - RNA, 23 nt, Human
cugguggcagcucaccucucccu

SEQ ID NO: 1846911 - RNA, 21 nt, Human
cugguggcagcucaccucucc

SEQ ID NO: 1846912 - RNA, 23 nt, Human
cugguggcccgacagccuggcac

SEQ ID NO: 1846913 - RNA, 22 nt, Human
cugguggcccgacagccuggca

SEQ ID NO: 1846914 - RNA, 21 nt, Human
cugguggcccgacagccuggc

SEQ ID NO: 1846915 - RNA, 20 nt, Human
cugguggcccgacagccugg

SEQ ID NO: 1846916 - RNA, 13 nt, Human
cugguggcagcug

SEQ ID NO: 1846917 - RNA, 14 nt, Human
cugguggcagcugc

SEQ ID NO: 1846918 - RNA, 21 nt, Human
cuguucagcugguugagguuu

SEQ ID NO: 1846919 - RNA, 19 nt, Human
cuguucagcugguugaggu

SEQ ID NO: 1846920 - RNA, 13 nt, Human
cuguuacugucuu

SEQ ID NO: 1846921 - RNA, 18 nt, Human
cuguucccauucuugcau

SEQ ID NO: 1846922 - RNA, 17 nt, Human
cuguucucugcccucca

SEQ ID NO: 1846923 - RNA, 16 nt, Human
cuguucucugcccucc

SEQ ID NO: 1846924 - RNA, 15 nt, Human
cuguucucugcccuc

SEQ ID NO: 1846925 - RNA, 14 nt, Human
cuguucucugcccu

SEQ ID NO: 1846926 - RNA, 19 nt, Human
cuguucucugcccuccaag

SEQ ID NO: 1846927 - RNA, 18 nt, Human
cuguucucugcccuccaa

SEQ ID NO: 1846928 - RNA, 20 nt, Human
cuguucucugcccuccaaga

SEQ ID NO: 1846929 - RNA, 13 nt, Human
cuguucucugccc

SEQ ID NO: 1846930 - RNA, 21 nt, Human
cugugugcucaggagcccugg

SEQ ID NO: 1846931 - RNA, 20 nt, Human
cugugugcucaggagcccug

SEQ ID NO: 1846932 - RNA, 16 nt, Human
cugugugcucaggagc

SEQ ID NO: 1846933 - RNA, 19 nt, Human
cugugugcucaggagcccu

SEQ ID NO: 1846934 - RNA, 15 nt, Human
cuguguggcagucug

SEQ ID NO: 1846935 - RNA, 23 nt, Human
cugugugcucaggagcccuggga

SEQ ID NO: 1846936 - RNA, 23 nt, Human
cugugggcgugagaccugccccu

SEQ ID NO: 1846937 - RNA, 21 nt, Human
cugugucuugcaauggcagcc

SEQ ID NO: 1846938 - RNA, 22 nt, Human
cugugucuugcaauggcagccu

SEQ ID NO: 1846939 - RNA, 23 nt, Human
cugugucuugcaauggcagccuu

SEQ ID NO: 1846940 - RNA, 20 nt, Human
cugugugugcgccuacagga

SEQ ID NO: 1846941 - RNA, 23 nt, Human
cugucucaagagggcacuggugg

SEQ ID NO: 1846942 - RNA, 18 nt, Human
cugucuccauguuugaug

SEQ ID NO: 1846943 - RNA, 21 nt, Human
cugugaguacuacaguccucc

SEQ ID NO: 1846944 - RNA, 20 nt, Human
cugugaguacuacaguccuc

SEQ ID NO: 1846945 - RNA, 23 nt, Human
cugugaguacuacaguccuccca

SEQ ID NO: 1846946 - RNA, 17 nt, Human
cugugauggggcccugc

SEQ ID NO: 1846947 - RNA, 18 nt, Human
cugugauggggcccugcc

SEQ ID NO: 1846948 - RNA, 14 nt, Human
cugugccauuuugu

SEQ ID NO: 1846949 - RNA, 22 nt, Human
cugugccauuuuguauuuuacu

SEQ ID NO: 1846950 - RNA, 16 nt, Human
cugugccaugugccag

SEQ ID NO: 1846951 - RNA, 18 nt, Human
cugugccaugugccaggu

SEQ ID NO: 1846952 - RNA, 20 nt, Human
cugugauggggcccugccuc

SEQ ID NO: 1846953 - RNA, 19 nt, Human
cugugauggggcccugccu

SEQ ID NO: 1846954 - RNA, 14 nt, Human
cugugggcccccaa

SEQ ID NO: 1846955 - RNA, 22 nt, Human
cugugggcgugagaccugcccc

SEQ ID NO: 1846956 - RNA, 21 nt, Human
cugugggcgugagaccugccc

SEQ ID NO: 1846957 - RNA, 18 nt, Human
cuguggccaaguucuuag

SEQ ID NO: 1846958 - RNA, 16 nt, Human
cuguggccaaguucuu

SEQ ID NO: 1846959 - RNA, 17 nt, Human
cuguggaugauaaaaca

SEQ ID NO: 1846960 - RNA, 18 nt, Human
cugugccucugggacugg

SEQ ID NO: 1846961 - RNA, 17 nt, Human
cugugccucugggacug

SEQ ID NO: 1846962 - RNA, 22 nt, Human
cugugcugcccugcccaccugg

SEQ ID NO: 1846963 - RNA, 16 nt, Human
cugugccucugggacu

SEQ ID NO: 1846964 - RNA, 14 nt, Human
cugugccucuggga

SEQ ID NO: 1846965 - RNA, 11 nt, Human
cugugccucug

SEQ ID NO: 1846966 - RNA, 13 nt, Human
cuggaauuugaaa

SEQ ID NO: 1846967 - RNA, 23 nt, Human
cuggacaggcauguucucugagg

SEQ ID NO: 1846968 - RNA, 14 nt, Human
cuggacaggcaugu

SEQ ID NO: 1846969 - RNA, 17 nt, Human
cuggacaggcauguucu

SEQ ID NO: 1846970 - RNA, 16 nt, Human
cuggaccuugaacugg

SEQ ID NO: 1846971 - RNA, 15 nt, Human
cuggacccuguggau

SEQ ID NO: 1846972 - RNA, 19 nt, Human
cuggacuccucuguccagg

SEQ ID NO: 1846973 - RNA, 18 nt, Human
cuggacuccucuguccag

SEQ ID NO: 1846974 - RNA, 17 nt, Human
cuggacuccucugucca

SEQ ID NO: 1846975 - RNA, 14 nt, Human
cuggacuccucugu

SEQ ID NO: 1846976 - RNA, 17 nt, Human
cuggaccuugaacuggg

SEQ ID NO: 1846977 - RNA, 20 nt, Human
cuggaccuugaacuggguac

SEQ ID NO: 1846978 - RNA, 21 nt, Human
cuggaccuugaacuggguacu

SEQ ID NO: 1846979 - RNA, 16 nt, Human
cuggagcucugcccau

SEQ ID NO: 1846980 - RNA, 12 nt, Human
cuggagcucugc

SEQ ID NO: 1846981 - RNA, 13 nt, Human
cuggagcucugcc

SEQ ID NO: 1846982 - RNA, 17 nt, Human
cuggagguacgaaaaga

SEQ ID NO: 1846983 - RNA, 22 nt, Human
cuggagguacgaaaagagggga

SEQ ID NO: 1846984 - RNA, 14 nt, Human
cuggagugcaguga

SEQ ID NO: 1846985 - RNA, 15 nt, Human
cuggagugcagugag

SEQ ID NO: 1846986 - RNA, 16 nt, Human
cuggagugcagugagc

SEQ ID NO: 1846987 - RNA, 17 nt, Human
cuggagugcagugagcc

SEQ ID NO: 1846988 - RNA, 14 nt, Human
cuggccagaugcac

SEQ ID NO: 1846989 - RNA, 19 nt, Human
cuggcaguggaacuaagaa

SEQ ID NO: 1846990 - RNA, 15 nt, Human
cuggcccacugcauc

SEQ ID NO: 1846991 - RNA, 21 nt, Human
cuggcacuuggagacuuguau

SEQ ID NO: 1846992 - RNA, 14 nt, Human
cuggcacuuggaga

SEQ ID NO: 1846993 - RNA, 23 nt, Human
cuggcacugcuuccagugaggcu

SEQ ID NO: 1846994 - RNA, 20 nt, Human
cuggcacugcuuccagugag

SEQ ID NO: 1846995 - RNA, 19 nt, Human
cuggcacugcuuccaguga

SEQ ID NO: 1846996 - RNA, 22 nt, Human
cuggcacccggccccugcuggu

SEQ ID NO: 1846997 - RNA, 20 nt, Human
cuggcacccggccccugcug

SEQ ID NO: 1846998 - RNA, 21 nt, Human
cuggcacccggccccugcugg

SEQ ID NO: 1846999 - RNA, 19 nt, Human
cuggcacccggccccugcu

SEQ ID NO: 1847000 - RNA, 20 nt, Human
cuggagugcagugagccgag

SEQ ID NO: 1847001 - RNA, 22 nt, Human
cuggccuucggccuccauccug

SEQ ID NO: 1847002 - RNA, 24 nt, Human
cuggccuggccccucagggucccu

SEQ ID NO: 1847003 - RNA, 13 nt, Human
cuggccuggcccc

SEQ ID NO: 1847004 - RNA, 20 nt, Human
cuggccucugcacuccccug

SEQ ID NO: 1847005 - RNA, 18 nt, Human
cuggccucugcacucccc

SEQ ID NO: 1847006 - RNA, 21 nt, Human
cuggccucugcacuccccugc

SEQ ID NO: 1847007 - RNA, 24 nt, Human
cuggcucuuccaggcugggagagc

SEQ ID NO: 1847008 - RNA, 22 nt, Human
cuggcucuuccaggcugggaga

SEQ ID NO: 1847009 - RNA, 21 nt, Human
cuggcucuuccaggcugggag

SEQ ID NO: 1847010 - RNA, 23 nt, Human
cuggccuucggccuccauccuga

SEQ ID NO: 1847011 - RNA, 14 nt, Human
cuggccugugucua

SEQ ID NO: 1847012 - RNA, 14 nt, Human
cuggcgugcagugg

SEQ ID NO: 1847013 - RNA, 15 nt, Human
cuggcgugcaguggu

SEQ ID NO: 1847014 - RNA, 15 nt, Human
cugcugcuggcuggu

SEQ ID NO: 1847015 - RNA, 23 nt, Human
cugcuuccagugaggcucugccc

SEQ ID NO: 1847016 - RNA, 21 nt, Human
cugcuuccagugaggcucugc

SEQ ID NO: 1847017 - RNA, 20 nt, Human
cugcuuccagugaggcucug

SEQ ID NO: 1847018 - RNA, 19 nt, Human
cugcuuccagugaggcucu

SEQ ID NO: 1847019 - RNA, 18 nt, Human
cugcuuccagugaggcuc

SEQ ID NO: 1847020 - RNA, 16 nt, Human
cugcuuccagugaggc

SEQ ID NO: 1847021 - RNA, 15 nt, Human
cugcuuccagugagg

SEQ ID NO: 1847022 - RNA, 12 nt, Human
cugcuggcugcc

SEQ ID NO: 1847023 - RNA, 13 nt, Human
cugcugguucagg

SEQ ID NO: 1847024 - RNA, 15 nt, Human
cugcugguucagggu

SEQ ID NO: 1847025 - RNA, 23 nt, Human
cugcugguucaggguuggccccu

SEQ ID NO: 1847026 - RNA, 11 nt, Human
cugcugaaggc

SEQ ID NO: 1847027 - RNA, 21 nt, Human
cugcucuccucuugccacugc

SEQ ID NO: 1847028 - RNA, 18 nt, Human
cugcugaaggaauaaauu

SEQ ID NO: 1847029 - RNA, 17 nt, Human
cugcugaaggaauaaau

SEQ ID NO: 1847030 - RNA, 22 nt, Human
cugcugcccagccuccaagcuc

SEQ ID NO: 1847031 - RNA, 15 nt, Human
cugcugcccagccuc

SEQ ID NO: 1847032 - RNA, 12 nt, Human
cugcugcccagc

SEQ ID NO: 1847033 - RNA, 20 nt, Human
cugcucuccucuugccacug

SEQ ID NO: 1847034 - RNA, 14 nt, Human
cugcucuccucuug

SEQ ID NO: 1847035 - RNA, 19 nt, Human
cugcucuccgaccagacac

SEQ ID NO: 1847036 - RNA, 20 nt, Human
cugcuccagcuguucagcug

SEQ ID NO: 1847037 - RNA, 19 nt, Human
cugcuccagcuguucagcu

SEQ ID NO: 1847038 - RNA, 19 nt, Human
cugcgaccacaagaaggau

SEQ ID NO: 1847039 - RNA, 14 nt, Human
cugccgcagcccug

SEQ ID NO: 1847040 - RNA, 15 nt, Human
cugccgcagcccugc

SEQ ID NO: 1847041 - RNA, 21 nt, Human
cugcccuuucugggcaccggg

SEQ ID NO: 1847042 - RNA, 18 nt, Human
cugccgcagcccugcaga

SEQ ID NO: 1847043 - RNA, 17 nt, Human
cugccgcagcccugcag

SEQ ID NO: 1847044 - RNA, 17 nt, Human
cucccuucccaccucuc

SEQ ID NO: 1847045 - RNA, 16 nt, Human
cucccuucccaccucu

SEQ ID NO: 1847046 - RNA, 15 nt, Human
cucccuucccaccuc

SEQ ID NO: 1847047 - RNA, 14 nt, Human
cucccuucccaccu

SEQ ID NO: 1847048 - RNA, 12 nt, Human
cugcccuccaag

SEQ ID NO: 1847049 - RNA, 20 nt, Human
cugcccugcgggucacagga

SEQ ID NO: 1847050 - RNA, 22 nt, Human
cugcccugcugagucccaggcu

SEQ ID NO: 1847051 - RNA, 11 nt, Human
cugccucccau

SEQ ID NO: 1847052 - RNA, 19 nt, Human
cugccucccaucacccgcu

SEQ ID NO: 1847053 - RNA, 16 nt, Human
cugccucccaucaccc

SEQ ID NO: 1847054 - RNA, 14 nt, Human
cugccucccaucac

SEQ ID NO: 1847055 - RNA, 12 nt, Human
cugccucccauc

SEQ ID NO: 1847056 - RNA, 22 nt, Human
cugccucucugcaggucccuaa

SEQ ID NO: 1847057 - RNA, 15 nt, Human
cugccucugacacac

SEQ ID NO: 1847058 - RNA, 22 nt, Human
cugccucugacacacagcucug

SEQ ID NO: 1847059 - RNA, 23 nt, Human
cugccucugacacacagcucugu

SEQ ID NO: 1847060 - RNA, 21 nt, Human
cugccucucugcaggucccua

SEQ ID NO: 1847061 - RNA, 20 nt, Human
cugccucucugcaggucccu

SEQ ID NO: 1847062 - RNA, 21 nt, Human
cugccugggaucccucauccu

SEQ ID NO: 1847063 - RNA, 20 nt, Human
cugccugcccaggccccugc

SEQ ID NO: 1847064 - RNA, 15 nt, Human
cugccugaagucaca

SEQ ID NO: 1847065 - RNA, 16 nt, Human
cugccugcccaggccc

SEQ ID NO: 1847066 - RNA, 17 nt, Human
cugccugcccaggcccc

SEQ ID NO: 1847067 - RNA, 15 nt, Human
cugccucuucucuac

SEQ ID NO: 1847068 - RNA, 17 nt, Human
gagaugaggccgccaug

SEQ ID NO: 1847069 - RNA, 19 nt, Human
gagauagccaaggccaaag

SEQ ID NO: 1847070 - RNA, 18 nt, Human
gagaucacgccacugcac

SEQ ID NO: 1847071 - RNA, 19 nt, Human
gagaucacgccacugcacu

SEQ ID NO: 1847072 - RNA, 14 nt, Human
gagauagccaaggc

SEQ ID NO: 1847073 - RNA, 16 nt, Human
gagauagccaaggcca

SEQ ID NO: 1847074 - RNA, 23 nt, Human
gagaucaaccccuucgcuccugu

SEQ ID NO: 1847075 - RNA, 20 nt, Human
gagcaccuuagacagucccu

SEQ ID NO: 1847076 - RNA, 21 nt, Human
gagcacuaaggugugcucuga

SEQ ID NO: 1847077 - RNA, 22 nt, Human
gagcaccuuagacagucccugc

SEQ ID NO: 1847078 - RNA, 21 nt, Human
gagcaccuuagacagucccug

SEQ ID NO: 1847079 - RNA, 15 nt, Human
gagcacuaaggugug

SEQ ID NO: 1847080 - RNA, 21 nt, Human
gagcauuagauuucucauuug

SEQ ID NO: 1847081 - RNA, 15 nt, Human
gagcauuagauuucu

SEQ ID NO: 1847082 - RNA, 20 nt, Human
gagccagauuucacucuccu

SEQ ID NO: 1847083 - RNA, 19 nt, Human
gagccaauuuaaagaaaac

SEQ ID NO: 1847084 - RNA, 16 nt, Human
gagcagagaauucucu

SEQ ID NO: 1847085 - RNA, 12 nt, Human
gagcagagacca

SEQ ID NO: 1847086 - RNA, 21 nt, Human
gagccagcagccuggcucucc

SEQ ID NO: 1847087 - RNA, 14 nt, Human
gagccagggucuca

SEQ ID NO: 1847088 - RNA, 23 nt, Human
gagccagauuucacucuccuugg

SEQ ID NO: 1847089 - RNA, 23 nt, Human
gagcccacuguacuugcucuuga

SEQ ID NO: 1847090 - RNA, 19 nt, Human
gagccagggucucacuaug

SEQ ID NO: 1847091 - RNA, 18 nt, Human
gagcccugguggcagugg

SEQ ID NO: 1847092 - RNA, 21 nt, Human
gagacuccugcaggcagccag

SEQ ID NO: 1847093 - RNA, 20 nt, Human
gagacuccugcaggcagcca

SEQ ID NO: 1847094 - RNA, 19 nt, Human
gagacuccugcaggcagcc

SEQ ID NO: 1847095 - RNA, 21 nt, Human
gagacucgcgacaaugcaaac

SEQ ID NO: 1847096 - RNA, 20 nt, Human
gagacucgcgacaaugcaaa

SEQ ID NO: 1847097 - RNA, 13 nt, Human
gagacucugucuc

SEQ ID NO: 1847098 - RNA, 21 nt, Human
gagaccaucccugaaggcccc

SEQ ID NO: 1847099 - RNA, 18 nt, Human
gagaccaucccugaaggc

SEQ ID NO: 1847100 - RNA, 14 nt, Human
gagaccaucccuga

SEQ ID NO: 1847101 - RNA, 22 nt, Human
gagacaggguuuugccauguug

SEQ ID NO: 1847102 - RNA, 20 nt, Human
gagacagcucugcauacuca

SEQ ID NO: 1847103 - RNA, 23 nt, Human
gagaaugcacaaacagaggccgc

SEQ ID NO: 1847104 - RNA, 22 nt, Human
gagagagcuucuguugcugccu

SEQ ID NO: 1847105 - RNA, 19 nt, Human
gagagagcuucuguugcug

SEQ ID NO: 1847106 - RNA, 16 nt, Human
gagagcccuucauuug

SEQ ID NO: 1847107 - RNA, 13 nt, Human
gagaggggcacag

SEQ ID NO: 1847108 - RNA, 19 nt, Human
gagaggggaacagacugga

SEQ ID NO: 1847109 - RNA, 16 nt, Human
gagagggugggagugg

SEQ ID NO: 1847110 - RNA, 20 nt, Human
gagagggugggagugggccc

SEQ ID NO: 1847111 - RNA, 14 nt, Human
gagagggugggagu

SEQ ID NO: 1847112 - RNA, 13 nt, Human
gagaguggcuccu

SEQ ID NO: 1847113 - RNA, 21 nt, Human
gagaguggcuccucccggugc

SEQ ID NO: 1847114 - RNA, 16 nt, Human
gagaguggcuccuccc

SEQ ID NO: 1847115 - RNA, 14 nt, Human
gacucauucuucug

SEQ ID NO: 1847116 - RNA, 15 nt, Human
gacucauucuucugu

SEQ ID NO: 1847117 - RNA, 18 nt, Human
gacuacaggugugaguca

SEQ ID NO: 1847118 - RNA, 21 nt, Human
gacuacaggugugagucacca

SEQ ID NO: 1847119 - RNA, 13 nt, Human
gacuacaggugug

SEQ ID NO: 1847120 - RNA, 13 nt, Human
gacucgcgacaau

SEQ ID NO: 1847121 - RNA, 13 nt, Human
gacuccugcaggc

SEQ ID NO: 1847122 - RNA, 23 nt, Human
gacuccugcacacgcuccuuccu

SEQ ID NO: 1847123 - RNA, 12 nt, Human
gacuccugcagg

SEQ ID NO: 1847124 - RNA, 14 nt, Human
gacuccucugucca

SEQ ID NO: 1847125 - RNA, 11 nt, Human
gacuccucugu

SEQ ID NO: 1847126 - RNA, 14 nt, Human
gacuggaagcacag

SEQ ID NO: 1847127 - RNA, 15 nt, Human
gacuggaagcacagc

SEQ ID NO: 1847128 - RNA, 16 nt, Human
gacuggaagcacagcu

SEQ ID NO: 1847129 - RNA, 18 nt, Human
gacuggaagcacagcuuc

SEQ ID NO: 1847130 - RNA, 23 nt, Human
gacugaguacguugugcauuugg

SEQ ID NO: 1847131 - RNA, 13 nt, Human
gacugcccggcag

SEQ ID NO: 1847132 - RNA, 15 nt, Human
gacugcccggcaggg

SEQ ID NO: 1847133 - RNA, 17 nt, Human
gacucgcgacaaugcaa

SEQ ID NO: 1847134 - RNA, 21 nt, Human
gacugaguacguugugcauuu

SEQ ID NO: 1847135 - RNA, 22 nt, Human
gacugaguacguugugcauuug

SEQ ID NO: 1847136 - RNA, 16 nt, Human
gagaagcagaggaagg

SEQ ID NO: 1847137 - RNA, 16 nt, Human
gagaagagaaugcaca

SEQ ID NO: 1847138 - RNA, 14 nt, Human
gagaagagaaugca

SEQ ID NO: 1847139 - RNA, 14 nt, Human
gagaaaugagcuug

SEQ ID NO: 1847140 - RNA, 21 nt, Human
gagaaaugaaaaaauauauau

SEQ ID NO: 1847141 - RNA, 22 nt, Human
gagaaaguacuucuccacccug

SEQ ID NO: 1847142 - RNA, 16 nt, Human
gagaaagguugaagca

SEQ ID NO: 1847143 - RNA, 19 nt, Human
gacuuaagcacacuugaca

SEQ ID NO: 1847144 - RNA, 19 nt, Human
gacuuaaaauauuccugca

SEQ ID NO: 1847145 - RNA, 13 nt, Human
gacuuggaagcuc

SEQ ID NO: 1847146 - RNA, 21 nt, Human
gacagcugccugggaucccuc

SEQ ID NO: 1847147 - RNA, 18 nt, Human
gacagcugccugggaucc

SEQ ID NO: 1847148 - RNA, 17 nt, Human
gacagcugccugggauc

SEQ ID NO: 1847149 - RNA, 16 nt, Human
gacagcugccugggau

SEQ ID NO: 1847150 - RNA, 20 nt, Human
gacagccacggccaggccag

SEQ ID NO: 1847151 - RNA, 21 nt, Human
gacagccacggccaggccaga

SEQ ID NO: 1847152 - RNA, 20 nt, Human
gacagagugagacucugucu

SEQ ID NO: 1847153 - RNA, 22 nt, Human
gacagagugagacucugucuca

SEQ ID NO: 1847154 - RNA, 14 nt, Human
gacagccacggcca

SEQ ID NO: 1847155 - RNA, 17 nt, Human
gacagccacggccaggc

SEQ ID NO: 1847156 - RNA, 18 nt, Human
gacagccacggccaggcc

SEQ ID NO: 1847157 - RNA, 19 nt, Human
gacagccacggccaggcca

SEQ ID NO: 1847158 - RNA, 21 nt, Human
gacagagcaagugagacccug

SEQ ID NO: 1847159 - RNA, 14 nt, Human
gacagaggcagccc

SEQ ID NO: 1847160 - RNA, 16 nt, Human
gacagaggcagcccca

SEQ ID NO: 1847161 - RNA, 19 nt, Human
gacagaggggguggccucc

SEQ ID NO: 1847162 - RNA, 18 nt, Human
gacagaggggguggccuc

SEQ ID NO: 1847163 - RNA, 15 nt, Human
gacagaggggguggc

SEQ ID NO: 1847164 - RNA, 17 nt, Human
gacagaggcagccccau

SEQ ID NO: 1847165 - RNA, 22 nt, Human
gacagaggggguggccucccaa

SEQ ID NO: 1847166 - RNA, 21 nt, Human
gacagaggggguggccuccca

SEQ ID NO: 1847167 - RNA, 23 nt, Human
gacagaggggguggccucccaac

SEQ ID NO: 1847168 - RNA, 14 nt, Human
gacagagucucacu

SEQ ID NO: 1847169 - RNA, 20 nt, Human
gacauagaauuaacacauga

SEQ ID NO: 1847170 - RNA, 22 nt, Human
gacaguuaagagaaaugagcuu

SEQ ID NO: 1847171 - RNA, 14 nt, Human
gacaugggaaaggg

SEQ ID NO: 1847172 - RNA, 14 nt, Human
gacaugaucuucuu

SEQ ID NO: 1847173 - RNA, 17 nt, Human
gacagggaggacgcucu

SEQ ID NO: 1847174 - RNA, 23 nt, Human
gacaggaccagggauuuccauga

SEQ ID NO: 1847175 - RNA, 15 nt, Human
gacaggaccagggau

SEQ ID NO: 1847176 - RNA, 14 nt, Human
gacaggaccaggga

SEQ ID NO: 1847177 - RNA, 14 nt, Human
gacaguuaagagaa

SEQ ID NO: 1847178 - RNA, 24 nt, Human
gacagggcacaccgggcacucaga

SEQ ID NO: 1847179 - RNA, 23 nt, Human
gacagggcacaccgggcacucag

SEQ ID NO: 1847180 - RNA, 18 nt, Human
gacagggaggacgcucuc

SEQ ID NO: 1847181 - RNA, 16 nt, Human
gacagggaggugaccc

SEQ ID NO: 1847182 - RNA, 17 nt, Human
gaccgugaggccagaga

SEQ ID NO: 1847183 - RNA, 16 nt, Human
gaccgugaggccagag

SEQ ID NO: 1847184 - RNA, 18 nt, Human
gaccgugaggccagagac

SEQ ID NO: 1847185 - RNA, 19 nt, Human
gaccgugaggccagagaca

SEQ ID NO: 1847186 - RNA, 21 nt, Human
gacccuuguggucccacccca

SEQ ID NO: 1847187 - RNA, 20 nt, Human
gacccuuguggucccacccc

SEQ ID NO: 1847188 - RNA, 19 nt, Human
gacccuuguggucccaccc

SEQ ID NO: 1847189 - RNA, 12 nt, Human
gacccugucuca

SEQ ID NO: 1847190 - RNA, 16 nt, Human
gacccaaaaggcagaa

SEQ ID NO: 1847191 - RNA, 15 nt, Human
gacccacaagaaaug

SEQ ID NO: 1847192 - RNA, 22 nt, Human
gacccacaagaaaugaaagcag

SEQ ID NO: 1847193 - RNA, 21 nt, Human
gacccccaaccaaguggcucc

SEQ ID NO: 1847194 - RNA, 12 nt, Human
gacccccaacca

SEQ ID NO: 1847195 - RNA, 23 nt, Human
gacccugaggcccagagggccug

SEQ ID NO: 1847196 - RNA, 14 nt, Human
gaccccuccaugug

SEQ ID NO: 1847197 - RNA, 18 nt, Human
gaccccuccaugugggcu

SEQ ID NO: 1847198 - RNA, 22 nt, Human
gacccugaggcccagagggccu

SEQ ID NO: 1847199 - RNA, 21 nt, Human
gaccccuccaugugggcuagu

SEQ ID NO: 1847200 - RNA, 17 nt, Human
gaccagagcugccaccu

SEQ ID NO: 1847201 - RNA, 15 nt, Human
gaccagagcugccac

SEQ ID NO: 1847202 - RNA, 14 nt, Human
gaccagagcugcca

SEQ ID NO: 1847203 - RNA, 13 nt, Human
gaccagagcugcc

SEQ ID NO: 1847204 - RNA, 19 nt, Human
gaccagagcugccaccugc

SEQ ID NO: 1847205 - RNA, 18 nt, Human
gaccagagcugccaccug

SEQ ID NO: 1847206 - RNA, 20 nt, Human
gaccagccuccaugcugccu

SEQ ID NO: 1847207 - RNA, 22 nt, Human
gaccagccuccaugcugccucc

SEQ ID NO: 1847208 - RNA, 21 nt, Human
gaccagccuccaugcugccuc

SEQ ID NO: 1847209 - RNA, 22 nt, Human
gaccauucuccaccugccaggg

SEQ ID NO: 1847210 - RNA, 21 nt, Human
gaccauucuccaccugccagg

SEQ ID NO: 1847211 - RNA, 20 nt, Human
gaccauucuccaccugccag

SEQ ID NO: 1847212 - RNA, 19 nt, Human
gaccauucuccaccugcca

SEQ ID NO: 1847213 - RNA, 18 nt, Human
gacaugggaaaggggaag

SEQ ID NO: 1847214 - RNA, 14 nt, Human
gaccaccugcccaa

SEQ ID NO: 1847215 - RNA, 13 nt, Human
gaccaccugccca

SEQ ID NO: 1847216 - RNA, 21 nt, Human
gaccacugcagaagacaguau

SEQ ID NO: 1847217 - RNA, 14 nt, Human
gaccacguuucuaa

SEQ ID NO: 1847218 - RNA, 11 nt, Human
gaccagagcug

SEQ ID NO: 1847219 - RNA, 13 nt, Human
gaaugucagugug

SEQ ID NO: 1847220 - RNA, 16 nt, Human
gaauugacccacaaga

SEQ ID NO: 1847221 - RNA, 21 nt, Human
gaauugacccacaagaaauga

SEQ ID NO: 1847222 - RNA, 15 nt, Human
gaauguuugccucug

SEQ ID NO: 1847223 - RNA, 12 nt, Human
gaaaggcuccag

SEQ ID NO: 1847224 - RNA, 18 nt, Human
gaauccagacccggcugc

SEQ ID NO: 1847225 - RNA, 20 nt, Human
gaauccagacccggcugcgu

SEQ ID NO: 1847226 - RNA, 20 nt, Human
gaaugcacaaacagaggccg

SEQ ID NO: 1847227 - RNA, 21 nt, Human
gaaugaaagggcccagagagg

SEQ ID NO: 1847228 - RNA, 21 nt, Human
gaaugcacaaacagaggccgc

SEQ ID NO: 1847229 - RNA, 15 nt, Human
gaaugcuguauaugu

SEQ ID NO: 1847230 - RNA, 22 nt, Human
gaauuucuuuugccguuauuaa

SEQ ID NO: 1847231 - RNA, 21 nt, Human
gaauuucuucaacucccugcc

SEQ ID NO: 1847232 - RNA, 15 nt, Human
gaauuguaaggaaug

SEQ ID NO: 1847233 - RNA, 23 nt, Human
gacaacacucauugaccugaggc

SEQ ID NO: 1847234 - RNA, 22 nt, Human
gacaacacucauugaccugagg

SEQ ID NO: 1847235 - RNA, 16 nt, Human
gacaacagacuucuga

SEQ ID NO: 1847236 - RNA, 23 nt, Human
gacacauguccaagaagcccagg

SEQ ID NO: 1847237 - RNA, 20 nt, Human
gacacauguccaagaagccc

SEQ ID NO: 1847238 - RNA, 15 nt, Human
gacacauguccaaga

SEQ ID NO: 1847239 - RNA, 19 nt, Human
gacacaugcaaggucauuu

SEQ ID NO: 1847240 - RNA, 14 nt, Human
gacacaugcaaggu

SEQ ID NO: 1847241 - RNA, 20 nt, Human
gacacaggcccggcuccagg

SEQ ID NO: 1847242 - RNA, 21 nt, Human
gacacaggcccggcuccaggc

SEQ ID NO: 1847243 - RNA, 16 nt, Human
gacacaagccuucggc

SEQ ID NO: 1847244 - RNA, 22 nt, Human
gacacaagccuucggcgccuua

SEQ ID NO: 1847245 - RNA, 19 nt, Human
gacacaggcccggcuccag

SEQ ID NO: 1847246 - RNA, 20 nt, Human
gacaaugugaaaagaaaaau

SEQ ID NO: 1847247 - RNA, 19 nt, Human
gacaaugugaaaagaaaaa

SEQ ID NO: 1847248 - RNA, 18 nt, Human
gacaaugugaaaagaaaa

SEQ ID NO: 1847249 - RNA, 12 nt, Human
gacaaugugaaa

SEQ ID NO: 1847250 - RNA, 22 nt, Human
gacaaugcaaaccaucauugaa

SEQ ID NO: 1847251 - RNA, 21 nt, Human
gacaaggaugaucuaggaaga

SEQ ID NO: 1847252 - RNA, 18 nt, Human
gacaaggauugcuacugu

SEQ ID NO: 1847253 - RNA, 19 nt, Human
gacaaggauugcuacuguc

SEQ ID NO: 1847254 - RNA, 21 nt, Human
gacaaggauugcuacuguccu

SEQ ID NO: 1847255 - RNA, 16 nt, Human
gacaaggaaaaaauaa

SEQ ID NO: 1847256 - RNA, 12 nt, Human
gcaaaccaucau

SEQ ID NO: 1847257 - RNA, 16 nt, Human
gauuuugcuguagaag

SEQ ID NO: 1847258 - RNA, 21 nt, Human
gauuuugaaauuuuuauuaaa

SEQ ID NO: 1847259 - RNA, 19 nt, Human
gauuuugauccaagcuggu

SEQ ID NO: 1847260 - RNA, 15 nt, Human
gcaaauguggcuccu

SEQ ID NO: 1847261 - RNA, 23 nt, Human
gcaaaugugaaucauuuuaccuu

SEQ ID NO: 1847262 - RNA, 15 nt, Human
gcaaaccaucauuga

SEQ ID NO: 1847263 - RNA, 15 nt, Human
gauuuaacagaaaug

SEQ ID NO: 1847264 - RNA, 22 nt, Human
gauuuccguuaaaauaccagcc

SEQ ID NO: 1847265 - RNA, 16 nt, Human
gauuugagcucagccc

SEQ ID NO: 1847266 - RNA, 13 nt, Human
gauuuaacagaaa

SEQ ID NO: 1847267 - RNA, 14 nt, Human
gauuuaacagaaau

SEQ ID NO: 1847268 - RNA, 12 nt, Human
gauuuaaaucag

SEQ ID NO: 1847269 - RNA, 21 nt, Human
gauuacaggcuccugccacca

SEQ ID NO: 1847270 - RNA, 18 nt, Human
gauuacaggcuccugcca

SEQ ID NO: 1847271 - RNA, 18 nt, Human
gauuacagggaugagcca

SEQ ID NO: 1847272 - RNA, 20 nt, Human
gauuacagggaugagccacc

SEQ ID NO: 1847273 - RNA, 16 nt, Human
gauucucaugccucag

SEQ ID NO: 1847274 - RNA, 14 nt, Human
gauucuccugccuc

SEQ ID NO: 1847275 - RNA, 15 nt, Human
gauugcaacaggcug

SEQ ID NO: 1847276 - RNA, 19 nt, Human
gaugggugcuuggaggaag

SEQ ID NO: 1847277 - RNA, 15 nt, Human
gauggggcugcaccg

SEQ ID NO: 1847278 - RNA, 19 nt, Human
gauggggcugcaccggcug

SEQ ID NO: 1847279 - RNA, 13 nt, Human
gauggggcugcac

SEQ ID NO: 1847280 - RNA, 22 nt, Human
gauggccgggcgcgguggcuca

SEQ ID NO: 1847281 - RNA, 20 nt, Human
gaugggcaacccccagccug

SEQ ID NO: 1847282 - RNA, 24 nt, Human
gauggggcccugccuccuuuguga

SEQ ID NO: 1847283 - RNA, 21 nt, Human
gaugggcaacccccagccugc

SEQ ID NO: 1847284 - RNA, 20 nt, Human
gaugcccaaagaugcagccg

SEQ ID NO: 1847285 - RNA, 19 nt, Human
gaugcccaaagaugcagcc

SEQ ID NO: 1847286 - RNA, 18 nt, Human
gaugcuagaacucccuuu

SEQ ID NO: 1847287 - RNA, 16 nt, Human
gaugccccgucccccu

SEQ ID NO: 1847288 - RNA, 20 nt, Human
gaugcuagaacucccuuuca

SEQ ID NO: 1847289 - RNA, 22 nt, Human
gaugcuagaacucccuuucaac

SEQ ID NO: 1847290 - RNA, 20 nt, Human
gaugcugacuguacuccucc

SEQ ID NO: 1847291 - RNA, 17 nt, Human
gaugcugacuguacucc

SEQ ID NO: 1847292 - RNA, 21 nt, Human
gaugccccgucccccucuggc

SEQ ID NO: 1847293 - RNA, 16 nt, Human
gauguuuaguaaucau

SEQ ID NO: 1847294 - RNA, 17 nt, Human
gauuacaggcuccugcc

SEQ ID NO: 1847295 - RNA, 20 nt, Human
gauuacaggcgugagccacc

SEQ ID NO: 1847296 - RNA, 18 nt, Human
gauuacaggcaugugcca

SEQ ID NO: 1847297 - RNA, 23 nt, Human
gauuacaagcgugagccacugca

SEQ ID NO: 1847298 - RNA, 15 nt, Human
gauuaaacuuaaucu

SEQ ID NO: 1847299 - RNA, 22 nt, Human
gauuacaagcgugagccacugc

SEQ ID NO: 1847300 - RNA, 16 nt, Human
gauggugcaaugaccu

SEQ ID NO: 1847301 - RNA, 15 nt, Human
gauggugcaaugacc

SEQ ID NO: 1847302 - RNA, 17 nt, Human
gauggugcaaugaccuu

SEQ ID NO: 1847303 - RNA, 14 nt, Human
gauggugcaaugac

SEQ ID NO: 1847304 - RNA, 12 nt, Human
gauggugcaaug

SEQ ID NO: 1847305 - RNA, 21 nt, Human
gaugguuccccuguucacucu

SEQ ID NO: 1847306 - RNA, 18 nt, Human
gaugguuccccuguucac

SEQ ID NO: 1847307 - RNA, 13 nt, Human
gaugguuccccug

SEQ ID NO: 1847308 - RNA, 17 nt, Human
gcacaagcuccaagcuc

SEQ ID NO: 1847309 - RNA, 15 nt, Human
gcacaagcuccaagc

SEQ ID NO: 1847310 - RNA, 18 nt, Human
gcacaagcuccaagcucc

SEQ ID NO: 1847311 - RNA, 21 nt, Human
gcacaagcuccaagcucccag

SEQ ID NO: 1847312 - RNA, 23 nt, Human
gcacaaauucugucucuggauua

SEQ ID NO: 1847313 - RNA, 20 nt, Human
gcacagaaaauggaagacag

SEQ ID NO: 1847314 - RNA, 21 nt, Human
gcacagacccugcccuguggg

SEQ ID NO: 1847315 - RNA, 20 nt, Human
gcacagacccugcccugugg

SEQ ID NO: 1847316 - RNA, 19 nt, Human
gcacagacccugcccugug

SEQ ID NO: 1847317 - RNA, 18 nt, Human
gcacagacccugcccugu

SEQ ID NO: 1847318 - RNA, 22 nt, Human
gcacagacccugcccugugggc

SEQ ID NO: 1847319 - RNA, 15 nt, Human
gcacagaguuguuac

SEQ ID NO: 1847320 - RNA, 17 nt, Human
gcacagacccugcccug

SEQ ID NO: 1847321 - RNA, 16 nt, Human
gcacagacccugcccu

SEQ ID NO: 1847322 - RNA, 15 nt, Human
gcacagacccugccc

SEQ ID NO: 1847323 - RNA, 14 nt, Human
gcacagacccugcc

SEQ ID NO: 1847324 - RNA, 22 nt, Human
gcacagaaaauggaagacagcu

SEQ ID NO: 1847325 - RNA, 21 nt, Human
gcacagaaaauggaagacagc

SEQ ID NO: 1847326 - RNA, 23 nt, Human
gcacagaaaauggaagacagcuc

SEQ ID NO: 1847327 - RNA, 14 nt, Human
gcaacucaucuuag

SEQ ID NO: 1847328 - RNA, 15 nt, Human
gcaauggcagccuug

SEQ ID NO: 1847329 - RNA, 14 nt, Human
gcaaugugauaaaa

SEQ ID NO: 1847330 - RNA, 14 nt, Human
gcacaaacagaggc

SEQ ID NO: 1847331 - RNA, 16 nt, Human
gcacaaacagaggccg

SEQ ID NO: 1847332 - RNA, 15 nt, Human
gcacaaacagaggcc

SEQ ID NO: 1847333 - RNA, 17 nt, Human
gcaauucuccugccuca

SEQ ID NO: 1847334 - RNA, 16 nt, Human
gcaauucuccugccuc

SEQ ID NO: 1847335 - RNA, 15 nt, Human
gcaauucuccugccu

SEQ ID NO: 1847336 - RNA, 14 nt, Human
gcaauucuccugcc

SEQ ID NO: 1847337 - RNA, 19 nt, Human
gcaauucuccugccucagc

SEQ ID NO: 1847338 - RNA, 18 nt, Human
gcaauucuccugccucag

SEQ ID NO: 1847339 - RNA, 20 nt, Human
gcaauucuccugccucagcc

SEQ ID NO: 1847340 - RNA, 19 nt, Human
gcacugguggcccgacagc

SEQ ID NO: 1847341 - RNA, 14 nt, Human
gcacugguggcccg

SEQ ID NO: 1847342 - RNA, 23 nt, Human
gcacugcuuccagugaggcucug

SEQ ID NO: 1847343 - RNA, 16 nt, Human
gcacgauuucuguuua

SEQ ID NO: 1847344 - RNA, 20 nt, Human
gcacugcugcccagccucca

SEQ ID NO: 1847345 - RNA, 18 nt, Human
gcacugcugcccagccuc

SEQ ID NO: 1847346 - RNA, 15 nt, Human
gcacugcugcccagc

SEQ ID NO: 1847347 - RNA, 14 nt, Human
gcacugcugcccag

SEQ ID NO: 1847348 - RNA, 12 nt, Human
gcagacaggcaa

SEQ ID NO: 1847349 - RNA, 13 nt, Human
gcagacaggcaag

SEQ ID NO: 1847350 - RNA, 14 nt, Human
gcagacaggcaagc

SEQ ID NO: 1847351 - RNA, 13 nt, Human
gcacgauuucugu

SEQ ID NO: 1847352 - RNA, 15 nt, Human
gcacgauuucuguuu

SEQ ID NO: 1847353 - RNA, 21 nt, Human
gcaccuuagacagucccugcc

SEQ ID NO: 1847354 - RNA, 20 nt, Human
gcaccuuagacagucccugc

SEQ ID NO: 1847355 - RNA, 12 nt, Human
gcaccauaacuu

SEQ ID NO: 1847356 - RNA, 22 nt, Human
gcaccccagcuggggccaggcu

SEQ ID NO: 1847357 - RNA, 16 nt, Human
gcacagaguuguuaca

SEQ ID NO: 1847358 - RNA, 18 nt, Human
gcacagaguuguuacauu

SEQ ID NO: 1847359 - RNA, 19 nt, Human
gcacagaguuguuacauuu

SEQ ID NO: 1847360 - RNA, 21 nt, Human
gcacagaguuguuacauuuuu

SEQ ID NO: 1847361 - RNA, 22 nt, Human
gcacagaguuguuacauuuuua

SEQ ID NO: 1847362 - RNA, 13 nt, Human
gcacagugcaucu

SEQ ID NO: 1847363 - RNA, 18 nt, Human
gcacagugcaucucagcc

SEQ ID NO: 1847364 - RNA, 15 nt, Human
gcacagugcaucuca

SEQ ID NO: 1847365 - RNA, 20 nt, Human
gaggcugggcucccuuccca

SEQ ID NO: 1847366 - RNA, 19 nt, Human
gagggagggcuccagacac

SEQ ID NO: 1847367 - RNA, 21 nt, Human
gagggagugacagaggcagcc

SEQ ID NO: 1847368 - RNA, 22 nt, Human
gagggagugacagaggcagccc

SEQ ID NO: 1847369 - RNA, 20 nt, Human
gagggagggcuccagacaca

SEQ ID NO: 1847370 - RNA, 20 nt, Human
gagggagggggaaggcaggg

SEQ ID NO: 1847371 - RNA, 18 nt, Human
gagggagugacagaggca

SEQ ID NO: 1847372 - RNA, 17 nt, Human
gaggggcugugggcgug

SEQ ID NO: 1847373 - RNA, 17 nt, Human
gaggggguggccuccca

SEQ ID NO: 1847374 - RNA, 13 nt, Human
gaggguaaggcug

SEQ ID NO: 1847375 - RNA, 21 nt, Human
gagguaaggaauaccuguccc

SEQ ID NO: 1847376 - RNA, 24 nt, Human
gagguaaggaauaccugucccccu

SEQ ID NO: 1847377 - RNA, 14 nt, Human
gaggguugggcugg

SEQ ID NO: 1847378 - RNA, 15 nt, Human
gaggguugggcuggu

SEQ ID NO: 1847379 - RNA, 17 nt, Human
gaggucaaggcugcagu

SEQ ID NO: 1847380 - RNA, 12 nt, Human
gaggucagagcc

SEQ ID NO: 1847381 - RNA, 13 nt, Human
gaggucagagccu

SEQ ID NO: 1847382 - RNA, 21 nt, Human
gagggugaagugaagacaaug

SEQ ID NO: 1847383 - RNA, 12 nt, Human
gaggguggaaua

SEQ ID NO: 1847384 - RNA, 15 nt, Human
gagggugggaguggg

SEQ ID NO: 1847385 - RNA, 14 nt, Human
gaggguggugaccu

SEQ ID NO: 1847386 - RNA, 21 nt, Human
gaggguggugaccucugccug

SEQ ID NO: 1847387 - RNA, 22 nt, Human
gagggugucccaaaaagaaagg

SEQ ID NO: 1847388 - RNA, 13 nt, Human
gagggucugagga

SEQ ID NO: 1847389 - RNA, 14 nt, Human
gagggucugaggaa

SEQ ID NO: 1847390 - RNA, 20 nt, Human
gaggcccuucucuccagccc

SEQ ID NO: 1847391 - RNA, 15 nt, Human
gaggcccuucucucc

SEQ ID NO: 1847392 - RNA, 21 nt, Human
gaggcccuucucuccagcccc

SEQ ID NO: 1847393 - RNA, 22 nt, Human
gaggcccuucucuccagccccu

SEQ ID NO: 1847394 - RNA, 16 nt, Human
gaggcccagagggccu

SEQ ID NO: 1847395 - RNA, 15 nt, Human
gaggcccagagggcc

SEQ ID NO: 1847396 - RNA, 19 nt, Human
gaggcccagagggccugca

SEQ ID NO: 1847397 - RNA, 14 nt, Human
gaggcccagagggc

SEQ ID NO: 1847398 - RNA, 13 nt, Human
gaggcccagaggg

SEQ ID NO: 1847399 - RNA, 11 nt, Human
gaggcccagag

SEQ ID NO: 1847400 - RNA, 21 nt, Human
gaggcgcaugaauuugugaag

SEQ ID NO: 1847401 - RNA, 16 nt, Human
gaggcugggcucccuu

SEQ ID NO: 1847402 - RNA, 16 nt, Human
gaggccuucucugaag

SEQ ID NO: 1847403 - RNA, 18 nt, Human
gaggccuucucugaagga

SEQ ID NO: 1847404 - RNA, 19 nt, Human
gaggccuucucugaaggac

SEQ ID NO: 1847405 - RNA, 20 nt, Human
gaggauugcuugagcucagg

SEQ ID NO: 1847406 - RNA, 19 nt, Human
gaggaucucuugagccugg

SEQ ID NO: 1847407 - RNA, 16 nt, Human
gaggaucucuugagcc

SEQ ID NO: 1847408 - RNA, 22 nt, Human
gaggaucucuugagccugggag

SEQ ID NO: 1847409 - RNA, 22 nt, Human
gagcccuguccugccuaaggcu

SEQ ID NO: 1847410 - RNA, 13 nt, Human
gaggaucucuuga

SEQ ID NO: 1847411 - RNA, 14 nt, Human
gaggccaugggccu

SEQ ID NO: 1847412 - RNA, 17 nt, Human
gaggccaugggccuccu

SEQ ID NO: 1847413 - RNA, 18 nt, Human
gaggccaugggccuccug

SEQ ID NO: 1847414 - RNA, 20 nt, Human
gaggccaugggccuccugug

SEQ ID NO: 1847415 - RNA, 21 nt, Human
gaggccaugggccuccugugu

SEQ ID NO: 1847416 - RNA, 23 nt, Human
gaggccaugggccuccugugugu

SEQ ID NO: 1847417 - RNA, 21 nt, Human
gaggcagccccauucugccug

SEQ ID NO: 1847418 - RNA, 20 nt, Human
gaggcagccccauucugccu

SEQ ID NO: 1847419 - RNA, 9 nt, Human
gaggcaggg

SEQ ID NO: 1847420 - RNA, 19 nt, Human
gaggcagagguugcaguga

SEQ ID NO: 1847421 - RNA, 19 nt, Human
gaggcagccccauucugcc

SEQ ID NO: 1847422 - RNA, 18 nt, Human
gaggcagccccauucugc

SEQ ID NO: 1847423 - RNA, 13 nt, Human
gagucugaaggcu

SEQ ID NO: 1847424 - RNA, 12 nt, Human
gagucugaaggc

SEQ ID NO: 1847425 - RNA, 14 nt, Human
gagucugaaggcug

SEQ ID NO: 1847426 - RNA, 15 nt, Human
gagucugaaggcugg

SEQ ID NO: 1847427 - RNA, 17 nt, Human
gagugaagcugggagaa

SEQ ID NO: 1847428 - RNA, 14 nt, Human
gagugacagaggca

SEQ ID NO: 1847429 - RNA, 15 nt, Human
gagugacagaggcag

SEQ ID NO: 1847430 - RNA, 16 nt, Human
gagugacagaggcagc

SEQ ID NO: 1847431 - RNA, 11 nt, Human
gaguauauguc

SEQ ID NO: 1847432 - RNA, 19 nt, Human
gaguaggaagacuuuggaa

SEQ ID NO: 1847433 - RNA, 18 nt, Human
gaguaggaagacuuugga

SEQ ID NO: 1847434 - RNA, 15 nt, Human
gagucgaggacaggg

SEQ ID NO: 1847435 - RNA, 16 nt, Human
gagucgaggacaggga

SEQ ID NO: 1847436 - RNA, 19 nt, Human
gaguccgaaagggacuugg

SEQ ID NO: 1847437 - RNA, 14 nt, Human
gagucgaggacagg

SEQ ID NO: 1847438 - RNA, 20 nt, Human
gaguacuacaguccucccau

SEQ ID NO: 1847439 - RNA, 22 nt, Human
gaguaauccaagcaaaugugaa

SEQ ID NO: 1847440 - RNA, 23 nt, Human
gaguacuacaguccucccaucuc

SEQ ID NO: 1847441 - RNA, 21 nt, Human
gaguacuacaguccucccauc

SEQ ID NO: 1847442 - RNA, 19 nt, Human
gaguagcugggacuacagg

SEQ ID NO: 1847443 - RNA, 17 nt, Human
gaguaggaagacuuugg

SEQ ID NO: 1847444 - RNA, 13 nt, Human
gaguaggaagacu

SEQ ID NO: 1847445 - RNA, 12 nt, Human
gaguaggaagac

SEQ ID NO: 1847446 - RNA, 22 nt, Human
gaguagcugggacuacaggcac

SEQ ID NO: 1847447 - RNA, 16 nt, Human
gagguuucaaaccucc

SEQ ID NO: 1847448 - RNA, 20 nt, Human
gagguuucucaaagaaauuu

SEQ ID NO: 1847449 - RNA, 17 nt, Human
gagguugggaggccauu

SEQ ID NO: 1847450 - RNA, 15 nt, Human
gagguugggaggcca

SEQ ID NO: 1847451 - RNA, 17 nt, Human
gaggucagagccugcag

SEQ ID NO: 1847452 - RNA, 20 nt, Human
gaggucagagccugcaguua

SEQ ID NO: 1847453 - RNA, 15 nt, Human
gauauaagugugugu

SEQ ID NO: 1847454 - RNA, 18 nt, Human
gaucacggcucacugcag

SEQ ID NO: 1847455 - RNA, 15 nt, Human
gaucacggcucacug

SEQ ID NO: 1847456 - RNA, 16 nt, Human
gaucacggcucacugc

SEQ ID NO: 1847457 - RNA, 22 nt, Human
gauagccaaggccaaaggaagc

SEQ ID NO: 1847458 - RNA, 15 nt, Human
gauagcacagacccu

SEQ ID NO: 1847459 - RNA, 16 nt, Human
gauagcacagacccug

SEQ ID NO: 1847460 - RNA, 21 nt, Human
gauacaggaaaagcugcugac

SEQ ID NO: 1847461 - RNA, 23 nt, Human
gauacaggaaaagcugcugacag

SEQ ID NO: 1847462 - RNA, 22 nt, Human
gauaagaaccuuuugagugccu

SEQ ID NO: 1847463 - RNA, 20 nt, Human
gauacaggaaaagcugcuga

SEQ ID NO: 1847464 - RNA, 13 nt, Human
gagugggugaaua

SEQ ID NO: 1847465 - RNA, 15 nt, Human
gaguggguugauuuc

SEQ ID NO: 1847466 - RNA, 17 nt, Human
gagugacagaggcagcc

SEQ ID NO: 1847467 - RNA, 20 nt, Human
gagugugccugaagucccag

SEQ ID NO: 1847468 - RNA, 12 nt, Human
gaguuacagaca

SEQ ID NO: 1847469 - RNA, 15 nt, Human
gaguuacagacaaag

SEQ ID NO: 1847470 - RNA, 13 nt, Human
gaguuacagacaa

SEQ ID NO: 1847471 - RNA, 20 nt, Human
gaguucaucuugaauuguaa

SEQ ID NO: 1847472 - RNA, 19 nt, Human
gaguucaucuugaauugua

SEQ ID NO: 1847473 - RNA, 14 nt, Human
gaguucaucuugaa

SEQ ID NO: 1847474 - RNA, 20 nt, Human
gaguucauacccuguuacca

SEQ ID NO: 1847475 - RNA, 21 nt, Human
gaguugaagacagagcuacac

SEQ ID NO: 1847476 - RNA, 17 nt, Human
gaguugaagacagagcu

SEQ ID NO: 1847477 - RNA, 15 nt, Human
gaguugaagacagag

SEQ ID NO: 1847478 - RNA, 23 nt, Human
ggcgcugccccuggcagccccug

SEQ ID NO: 1847479 - RNA, 21 nt, Human
ggcgcugccccuggcagcccc

SEQ ID NO: 1847480 - RNA, 19 nt, Human
ggcgcugccccuggcagcc

SEQ ID NO: 1847481 - RNA, 18 nt, Human
ggcgcugccccuggcagc

SEQ ID NO: 1847482 - RNA, 22 nt, Human
ggccugggggcugggcagagga

SEQ ID NO: 1847483 - RNA, 20 nt, Human
ggccugggggcugggcagag

SEQ ID NO: 1847484 - RNA, 14 nt, Human
ggccugggggcugg

SEQ ID NO: 1847485 - RNA, 11 nt, Human
ggccugugagc

SEQ ID NO: 1847486 - RNA, 19 nt, Human
ggccuggccugagcuggga

SEQ ID NO: 1847487 - RNA, 17 nt, Human
ggcuagagguucaaaga

SEQ ID NO: 1847488 - RNA, 22 nt, Human
ggcuagagguucaaagauauuu

SEQ ID NO: 1847489 - RNA, 22 nt, Human
ggcuaggaccccuccauguggg

SEQ ID NO: 1847490 - RNA, 16 nt, Human
ggcuaggaccccucca

SEQ ID NO: 1847491 - RNA, 15 nt, Human
ggcuaugcauuugaa

SEQ ID NO: 1847492 - RNA, 19 nt, Human
ggcuaugggggcacugagg

SEQ ID NO: 1847493 - RNA, 16 nt, Human
ggcuaguugggcuucc

SEQ ID NO: 1847494 - RNA, 23 nt, Human
ggcuagugugguguuuccuggca

SEQ ID NO: 1847495 - RNA, 15 nt, Human
ggcuaguugggcuuc

SEQ ID NO: 1847496 - RNA, 19 nt, Human
ggcuccaggagcagccaca

SEQ ID NO: 1847497 - RNA, 13 nt, Human
ggcuccaggagca

SEQ ID NO: 1847498 - RNA, 12 nt, Human
ggcuccaggagc

SEQ ID NO: 1847499 - RNA, 12 nt, Human
ggcuccagcugg

SEQ ID NO: 1847500 - RNA, 15 nt, Human
ggcucaaguccucuu

SEQ ID NO: 1847501 - RNA, 21 nt, Human
ggcucaaguccucuuuucuga

SEQ ID NO: 1847502 - RNA, 11 nt, Human
ggcuccaggcu

SEQ ID NO: 1847503 - RNA, 19 nt, Human
ggcucccacaggcccuucc

SEQ ID NO: 1847504 - RNA, 18 nt, Human
ggcucccacaggcccuuc

SEQ ID NO: 1847505 - RNA, 17 nt, Human
ggcucccacaggcccuu

SEQ ID NO: 1847506 - RNA, 16 nt, Human
ggcuccaggcuccuuu

SEQ ID NO: 1847507 - RNA, 16 nt, Human
ggccucugcacucccc

SEQ ID NO: 1847508 - RNA, 15 nt, Human
ggccucugcacuccc

SEQ ID NO: 1847509 - RNA, 14 nt, Human
ggccucugcacucc

SEQ ID NO: 1847510 - RNA, 13 nt, Human
ggccucugcacuc

SEQ ID NO: 1847511 - RNA, 17 nt, Human
ggccucuuaugggcugg

SEQ ID NO: 1847512 - RNA, 20 nt, Human
ggccucgguguggagaagcg

SEQ ID NO: 1847513 - RNA, 18 nt, Human
ggccucuuaugggcuggg

SEQ ID NO: 1847514 - RNA, 17 nt, Human
ggccucggacuuagcug

SEQ ID NO: 1847515 - RNA, 20 nt, Human
ggccucggacuuagcuggga

SEQ ID NO: 1847516 - RNA, 22 nt, Human
ggccucggacuuagcugggaga

SEQ ID NO: 1847517 - RNA, 23 nt, Human
ggccuagcauacguacacauuuu

SEQ ID NO: 1847518 - RNA, 13 nt, Human
ggcccugccuccu

SEQ ID NO: 1847519 - RNA, 20 nt, Human
ggcccugcccugguuuccug

SEQ ID NO: 1847520 - RNA, 13 nt, Human
ggcccugcccugg

SEQ ID NO: 1847521 - RNA, 12 nt, Human
ggcccugcccug

SEQ ID NO: 1847522 - RNA, 11 nt, Human
ggcccugcccu

SEQ ID NO: 1847523 - RNA, 22 nt, Human
ggcccuggcucccacaggcccu

SEQ ID NO: 1847524 - RNA, 13 nt, Human
ggcccuggcuccc

SEQ ID NO: 1847525 - RNA, 15 nt, Human
ggcccugccuccuuu

SEQ ID NO: 1847526 - RNA, 14 nt, Human
ggcccugccuccuu

SEQ ID NO: 1847527 - RNA, 22 nt, Human
ggcccugcccugguuuccugcc

SEQ ID NO: 1847528 - RNA, 11 nt, Human
ggcccagagag

SEQ ID NO: 1847529 - RNA, 12 nt, Human
ggcccagagagg

SEQ ID NO: 1847530 - RNA, 17 nt, Human
ggcccucugcccacucc

SEQ ID NO: 1847531 - RNA, 16 nt, Human
ggcccucugcccacuc

SEQ ID NO: 1847532 - RNA, 15 nt, Human
ggcccucugcccacu

SEQ ID NO: 1847533 - RNA, 13 nt, Human
ggcccucugccca

SEQ ID NO: 1847534 - RNA, 20 nt, Human
ggcccucugcccacucccug

SEQ ID NO: 1847535 - RNA, 19 nt, Human
ggcccucugcccacucccu

SEQ ID NO: 1847536 - RNA, 21 nt, Human
ggcccucugcccacucccugc

SEQ ID NO: 1847537 - RNA, 18 nt, Human
ggcaugacacgaauauug

SEQ ID NO: 1847538 - RNA, 15 nt, Human
ggcaugaagacagau

SEQ ID NO: 1847539 - RNA, 18 nt, Human
ggcauggccagguggcca

SEQ ID NO: 1847540 - RNA, 17 nt, Human
ggcauggccagguggcc

SEQ ID NO: 1847541 - RNA, 19 nt, Human
ggcagggucucacucuguc

SEQ ID NO: 1847542 - RNA, 20 nt, Human
ggcagggucucacucugucg

SEQ ID NO: 1847543 - RNA, 13 nt, Human
ggcagugggagcu

SEQ ID NO: 1847544 - RNA, 14 nt, Human
ggcagugggagcug

SEQ ID NO: 1847545 - RNA, 21 nt, Human
ggcagugggacagggcauggc

SEQ ID NO: 1847546 - RNA, 16 nt, Human
ggcagugggagcugcc

SEQ ID NO: 1847547 - RNA, 14 nt, Human
ggcagcucaccucu

SEQ ID NO: 1847548 - RNA, 12 nt, Human
ggcagcucaccu

SEQ ID NO: 1847549 - RNA, 21 nt, Human
ggcagcucagagaggguggga

SEQ ID NO: 1847550 - RNA, 13 nt, Human
ggcagcucagaga

SEQ ID NO: 1847551 - RNA, 16 nt, Human
ggcagcucaccucucc

SEQ ID NO: 1847552 - RNA, 22 nt, Human
ggcagcugcuuuugucuauggg

SEQ ID NO: 1847553 - RNA, 17 nt, Human
ggcagcuugaggguugg

SEQ ID NO: 1847554 - RNA, 17 nt, Human
ggccagcugcuugggcu

SEQ ID NO: 1847555 - RNA, 22 nt, Human
ggccagccuugaccauucucca

SEQ ID NO: 1847556 - RNA, 20 nt, Human
ggccagccuugaccauucuc

SEQ ID NO: 1847557 - RNA, 18 nt, Human
ggccaggcccucugccca

SEQ ID NO: 1847558 - RNA, 23 nt, Human
ggccagcugcuugggcuucaucc

SEQ ID NO: 1847559 - RNA, 11 nt, Human
ggccaggcugc

SEQ ID NO: 1847560 - RNA, 15 nt, Human
ggccaggcugcucuu

SEQ ID NO: 1847561 - RNA, 14 nt, Human
ggccaggcugcucu

SEQ ID NO: 1847562 - RNA, 16 nt, Human
ggccaggcugcucuug

SEQ ID NO: 1847563 - RNA, 16 nt, Human
ggccaugggccuccug

SEQ ID NO: 1847564 - RNA, 17 nt, Human
ggccacuccagaccccu

SEQ ID NO: 1847565 - RNA, 18 nt, Human
ggcaugggaaugaauguc

SEQ ID NO: 1847566 - RNA, 17 nt, Human
ggcauuccccaggaggc

SEQ ID NO: 1847567 - RNA, 22 nt, Human
ggcaugggaaugaaugucagug

SEQ ID NO: 1847568 - RNA, 19 nt, Human
ggcauuccccaggaggcca

SEQ ID NO: 1847569 - RNA, 18 nt, Human
ggcauuccccaggaggcc

SEQ ID NO: 1847570 - RNA, 16 nt, Human
ggcauuccccaggagg

SEQ ID NO: 1847571 - RNA, 12 nt, Human
ggagugcaguga

SEQ ID NO: 1847572 - RNA, 20 nt, Human
ggagugcaaugacacagucu

SEQ ID NO: 1847573 - RNA, 14 nt, Human
ggagugcagugagc

SEQ ID NO: 1847574 - RNA, 18 nt, Human
ggauacaaaagcauguga

SEQ ID NO: 1847575 - RNA, 22 nt, Human
ggaucaaaccccgaccaccugc

SEQ ID NO: 1847576 - RNA, 17 nt, Human
ggaucccucauccucau

SEQ ID NO: 1847577 - RNA, 13 nt, Human
ggaucccucaucc

SEQ ID NO: 1847578 - RNA, 22 nt, Human
ggaucccucauccucauaccca

SEQ ID NO: 1847579 - RNA, 13 nt, Human
ggauccuccaggu

SEQ ID NO: 1847580 - RNA, 12 nt, Human
ggauccuccagg

SEQ ID NO: 1847581 - RNA, 17 nt, Human
ggaugcagccucacagu

SEQ ID NO: 1847582 - RNA, 16 nt, Human
ggaugcagccucacag

SEQ ID NO: 1847583 - RNA, 21 nt, Human
ggaugauuggaggggggaggu

SEQ ID NO: 1847584 - RNA, 23 nt, Human
ggaugcacagaguuguuacauuu

SEQ ID NO: 1847585 - RNA, 19 nt, Human
ggaugcagccucacagucc

SEQ ID NO: 1847586 - RNA, 15 nt, Human
ggaugcuuguacaua

SEQ ID NO: 1847587 - RNA, 19 nt, Human
ggauuacaagcgugagcca

SEQ ID NO: 1847588 - RNA, 19 nt, Human
ggcaaucauggugcucaga

SEQ ID NO: 1847589 - RNA, 18 nt, Human
ggcaacccccagccugcu

SEQ ID NO: 1847590 - RNA, 14 nt, Human
ggcaaugcuggcug

SEQ ID NO: 1847591 - RNA, 15 nt, Human
ggcaaugcuggcugu

SEQ ID NO: 1847592 - RNA, 23 nt, Human
ggcaaugcuggcuguuggcuggg

SEQ ID NO: 1847593 - RNA, 18 nt, Human
ggcaccggggccucggac

SEQ ID NO: 1847594 - RNA, 22 nt, Human
ggcacccggccccugcugguuc

SEQ ID NO: 1847595 - RNA, 23 nt, Human
ggcacccaccaucaugucuggcu

SEQ ID NO: 1847596 - RNA, 17 nt, Human
ggauugcuacuguccua

SEQ ID NO: 1847597 - RNA, 15 nt, Human
ggauuguaaaauggu

SEQ ID NO: 1847598 - RNA, 16 nt, Human
ggcaacccccagccug

SEQ ID NO: 1847599 - RNA, 17 nt, Human
ggcaacccccagccugc

SEQ ID NO: 1847600 - RNA, 16 nt, Human
ggauucuuccucccuc

SEQ ID NO: 1847601 - RNA, 16 nt, Human
ggauucuuauggacaa

SEQ ID NO: 1847602 - RNA, 19 nt, Human
ggauuacaggcuccugcca

SEQ ID NO: 1847603 - RNA, 23 nt, Human
ggauuacaagcgugagccacugc

SEQ ID NO: 1847604 - RNA, 19 nt, Human
gcuuaucucaggggugugc

SEQ ID NO: 1847605 - RNA, 20 nt, Human
gcuuauacacuuacacuuua

SEQ ID NO: 1847606 - RNA, 12 nt, Human
gcuuauacacuu

SEQ ID NO: 1847607 - RNA, 16 nt, Human
gcuucaguggcagcug

SEQ ID NO: 1847608 - RNA, 17 nt, Human
gcuucaguggcagcugc

SEQ ID NO: 1847609 - RNA, 18 nt, Human
gcuucaguggcagcugcu

SEQ ID NO: 1847610 - RNA, 15 nt, Human
gcuucauccuccuca

SEQ ID NO: 1847611 - RNA, 12 nt, Human
gcuucauccucc

SEQ ID NO: 1847612 - RNA, 13 nt, Human
gcuucauuuccug

SEQ ID NO: 1847613 - RNA, 16 nt, Human
gcuucauuuccugugu

SEQ ID NO: 1847614 - RNA, 18 nt, Human
gcuuccagugaggcucug

SEQ ID NO: 1847615 - RNA, 16 nt, Human
gcuuccagugaggcuc

SEQ ID NO: 1847616 - RNA, 17 nt, Human
gcuucauuuccuguguc

SEQ ID NO: 1847617 - RNA, 21 nt, Human
gcuucauccuccucagaucuu

SEQ ID NO: 1847618 - RNA, 15 nt, Human
gcuuccagugaggcu

SEQ ID NO: 1847619 - RNA, 16 nt, Human
gcuugaggguugggcu

SEQ ID NO: 1847620 - RNA, 17 nt, Human
gcuuagucacugagaca

SEQ ID NO: 1847621 - RNA, 15 nt, Human
gcuuagucacugaga

SEQ ID NO: 1847622 - RNA, 20 nt, Human
gcuuagucacugagacagcc

SEQ ID NO: 1847623 - RNA, 19 nt, Human
gcuuagucacugagacagc

SEQ ID NO: 1847624 - RNA, 21 nt, Human
gcuuagucacugagacagccc

SEQ ID NO: 1847625 - RNA, 14 nt, Human
gcuguucagcuggu

SEQ ID NO: 1847626 - RNA, 20 nt, Human
gcugugggcgugagaccugc

SEQ ID NO: 1847627 - RNA, 22 nt, Human
gcugugggcgugagaccugccc

SEQ ID NO: 1847628 - RNA, 21 nt, Human
gcugugggcgugagaccugcc

SEQ ID NO: 1847629 - RNA, 19 nt, Human
gcugccaaugggagcucau

SEQ ID NO: 1847630 - RNA, 16 nt, Human
gcugccaaugggagcu

SEQ ID NO: 1847631 - RNA, 15 nt, Human
gcugccaaugggagc

SEQ ID NO: 1847632 - RNA, 16 nt, Human
ggaacaggaaacugau

SEQ ID NO: 1847633 - RNA, 14 nt, Human
ggaaaucaccgaaa

SEQ ID NO: 1847634 - RNA, 21 nt, Human
ggaaaucaccgaaaacguggc

SEQ ID NO: 1847635 - RNA, 21 nt, Human
ggaaaggcuccaggagcagcc

SEQ ID NO: 1847636 - RNA, 20 nt, Human
ggaaaggcuccaggagcagc

SEQ ID NO: 1847637 - RNA, 19 nt, Human
ggaaaggcuccaggagcag

SEQ ID NO: 1847638 - RNA, 17 nt, Human
ggaaaggcuccaggagc

SEQ ID NO: 1847639 - RNA, 22 nt, Human
ggaaaggcuccaggagcagcca

SEQ ID NO: 1847640 - RNA, 14 nt, Human
ggaaaggcuccagg

SEQ ID NO: 1847641 - RNA, 13 nt, Human
ggaaaggcuccag

SEQ ID NO: 1847642 - RNA, 12 nt, Human
ggaaaggcucca

SEQ ID NO: 1847643 - RNA, 19 nt, Human
ggaaaaucagccugcucca

SEQ ID NO: 1847644 - RNA, 23 nt, Human
ggaaaaucagccugcuccagcug

SEQ ID NO: 1847645 - RNA, 21 nt, Human
ggaaaaccaagccguggcuuc

SEQ ID NO: 1847646 - RNA, 14 nt, Human
ggaaaagcugcuga

SEQ ID NO: 1847647 - RNA, 18 nt, Human
ggaaaagcugcugacagu

SEQ ID NO: 1847648 - RNA, 20 nt, Human
ggaaaagcugcugacagugu

SEQ ID NO: 1847649 - RNA, 18 nt, Human
ggaaaacaugcuacacac

SEQ ID NO: 1847650 - RNA, 23 nt, Human
gcuuuucacugcuggcugccuua

SEQ ID NO: 1847651 - RNA, 22 nt, Human
gcuuuucacugcuggcugccuu

SEQ ID NO: 1847652 - RNA, 21 nt, Human
gcuuuguuuguugucagcuga

SEQ ID NO: 1847653 - RNA, 18 nt, Human
gcuuuucacugcuggcug

SEQ ID NO: 1847654 - RNA, 14 nt, Human
gcuuuucacugcug

SEQ ID NO: 1847655 - RNA, 13 nt, Human
gcuuuucacugcu

SEQ ID NO: 1847656 - RNA, 22 nt, Human
gcuugaggguugggcugguguc

SEQ ID NO: 1847657 - RNA, 18 nt, Human
gcuugaggguugggcugg

SEQ ID NO: 1847658 - RNA, 20 nt, Human
gcuugaggguugggcuggug

SEQ ID NO: 1847659 - RNA, 15 nt, Human
gcuuugugauuuuug

SEQ ID NO: 1847660 - RNA, 15 nt, Human
gcuuuguaugcacuu

SEQ ID NO: 1847661 - RNA, 17 nt, Human
ggacugugugcucagga

SEQ ID NO: 1847662 - RNA, 15 nt, Human
ggagaaucacuugaa

SEQ ID NO: 1847663 - RNA, 19 nt, Human
ggagaaucacuugaacccg

SEQ ID NO: 1847664 - RNA, 18 nt, Human
ggagaagcggcuggcagc

SEQ ID NO: 1847665 - RNA, 17 nt, Human
ggagaagcggcuggcag

SEQ ID NO: 1847666 - RNA, 18 nt, Human
ggacuggccucugcugau

SEQ ID NO: 1847667 - RNA, 13 nt, Human
ggacgcucucugg

SEQ ID NO: 1847668 - RNA, 14 nt, Human
ggacgcucucuggc

SEQ ID NO: 1847669 - RNA, 15 nt, Human
ggacgcucucuggcc

SEQ ID NO: 1847670 - RNA, 23 nt, Human
ggaccucaggugagaagcagagg

SEQ ID NO: 1847671 - RNA, 19 nt, Human
ggaccucaggugagaagca

SEQ ID NO: 1847672 - RNA, 13 nt, Human
ggaccagagcugc

SEQ ID NO: 1847673 - RNA, 20 nt, Human
ggacgcuacccgggaagggg

SEQ ID NO: 1847674 - RNA, 19 nt, Human
ggacgcuacccgggaaggg

SEQ ID NO: 1847675 - RNA, 17 nt, Human
ggacgcuacccgggaag

SEQ ID NO: 1847676 - RNA, 15 nt, Human
ggaccuugaacuggg

SEQ ID NO: 1847677 - RNA, 17 nt, Human
ggaccuugaacugggua

SEQ ID NO: 1847678 - RNA, 22 nt, Human
ggacacucaaaagcugggcagg

SEQ ID NO: 1847679 - RNA, 17 nt, Human
ggacacucaaaagcugg

SEQ ID NO: 1847680 - RNA, 15 nt, Human
ggacagccacggcca

SEQ ID NO: 1847681 - RNA, 19 nt, Human
ggacagccacggccaggcc

SEQ ID NO: 1847682 - RNA, 20 nt, Human
ggacagccacggccaggcca

SEQ ID NO: 1847683 - RNA, 21 nt, Human
ggacagccacggccaggccag

SEQ ID NO: 1847684 - RNA, 22 nt, Human
ggacagccacggccaggccaga

SEQ ID NO: 1847685 - RNA, 20 nt, Human
ggacauugcggacagccacg

SEQ ID NO: 1847686 - RNA, 24 nt, Human
ggaaugauuaauuaaaacacaaca

SEQ ID NO: 1847687 - RNA, 12 nt, Human
ggaaugcagugg

SEQ ID NO: 1847688 - RNA, 19 nt, Human
ggaauguuugccucugccu

SEQ ID NO: 1847689 - RNA, 12 nt, Human
ggaauuguguuu

SEQ ID NO: 1847690 - RNA, 19 nt, Human
ggaauuuucaucuaggauu

SEQ ID NO: 1847691 - RNA, 23 nt, Human
ggaaggggagauaaggguaucug

SEQ ID NO: 1847692 - RNA, 17 nt, Human
ggaaggcugagaggaga

SEQ ID NO: 1847693 - RNA, 14 nt, Human
ggaaggcagggagg

SEQ ID NO: 1847694 - RNA, 13 nt, Human
ggaaccugacccc

SEQ ID NO: 1847695 - RNA, 20 nt, Human
ggaagugacgguuuaauggg

SEQ ID NO: 1847696 - RNA, 18 nt, Human
ggaagugcuaauuuugaa

SEQ ID NO: 1847697 - RNA, 14 nt, Human
ggaaugauuaauua

SEQ ID NO: 1847698 - RNA, 16 nt, Human
ggaaguacuggagaaa

SEQ ID NO: 1847699 - RNA, 12 nt, Human
ggaaguacugga

SEQ ID NO: 1847700 - RNA, 18 nt, Human
ggaaguacuggagaaaau

SEQ ID NO: 1847701 - RNA, 21 nt, Human
gcccugggaggcucuggagcc

SEQ ID NO: 1847702 - RNA, 19 nt, Human
gcccugggaggcucuggag

SEQ ID NO: 1847703 - RNA, 18 nt, Human
gcccugggaggcucugga

SEQ ID NO: 1847704 - RNA, 17 nt, Human
gcccugggaggcucugg

SEQ ID NO: 1847705 - RNA, 23 nt, Human
gcccugggaggcucuggagccca

SEQ ID NO: 1847706 - RNA, 16 nt, Human
gcccugggaggcagug

SEQ ID NO: 1847707 - RNA, 21 nt, Human
gcccuggugcugccacacuuc

SEQ ID NO: 1847708 - RNA, 17 nt, Human
gcccuggugcugccaca

SEQ ID NO: 1847709 - RNA, 16 nt, Human
gcccuggugcugccac

SEQ ID NO: 1847710 - RNA, 15 nt, Human
gcccuggugcugcca

SEQ ID NO: 1847711 - RNA, 16 nt, Human
gcccugggaggcucug

SEQ ID NO: 1847712 - RNA, 15 nt, Human
gcccugggaggcucu

SEQ ID NO: 1847713 - RNA, 14 nt, Human
gcccugggaggcuc

SEQ ID NO: 1847714 - RNA, 13 nt, Human
gcccugggaggcu

SEQ ID NO: 1847715 - RNA, 14 nt, Human
gcccugggaggcag

SEQ ID NO: 1847716 - RNA, 11 nt, Human
gcccugggagg

SEQ ID NO: 1847717 - RNA, 20 nt, Human
gcccuggcucccacaggccc

SEQ ID NO: 1847718 - RNA, 19 nt, Human
gcccuggcucccacaggcc

SEQ ID NO: 1847719 - RNA, 15 nt, Human
gcccuggcucccaca

SEQ ID NO: 1847720 - RNA, 15 nt, Human
gcccugguuuccugc

SEQ ID NO: 1847721 - RNA, 14 nt, Human
gcccugguuuccug

SEQ ID NO: 1847722 - RNA, 23 nt, Human
gcccugguuuccugcccugggag

SEQ ID NO: 1847723 - RNA, 21 nt, Human
gcccugguuuccugcccuggg

SEQ ID NO: 1847724 - RNA, 20 nt, Human
gcccugguuuccugcccugg

SEQ ID NO: 1847725 - RNA, 19 nt, Human
gcccugguuuccugcccug

SEQ ID NO: 1847726 - RNA, 18 nt, Human
gcccugguuuccugcccu

SEQ ID NO: 1847727 - RNA, 17 nt, Human
gcccugguuuccugccc

SEQ ID NO: 1847728 - RNA, 14 nt, Human
gcccugguggcagu

SEQ ID NO: 1847729 - RNA, 17 nt, Human
gcccugguggcaguggg

SEQ ID NO: 1847730 - RNA, 18 nt, Human
gcccugguggcaguggga

SEQ ID NO: 1847731 - RNA, 19 nt, Human
gcccugguggcagugggag

SEQ ID NO: 1847732 - RNA, 20 nt, Human
gcccugguggcagugggagc

SEQ ID NO: 1847733 - RNA, 21 nt, Human
gcccugguggcagugggagcu

SEQ ID NO: 1847734 - RNA, 22 nt, Human
gcccugguggcagugggagcug

SEQ ID NO: 1847735 - RNA, 23 nt, Human
gcccugguggcagugggagcugc

SEQ ID NO: 1847736 - RNA, 16 nt, Human
gccgagaucacgccac

SEQ ID NO: 1847737 - RNA, 17 nt, Human
gccgagauugcaccacu

SEQ ID NO: 1847738 - RNA, 18 nt, Human
gccgagauugcaccacug

SEQ ID NO: 1847739 - RNA, 18 nt, Human
gccgagaucacgccacug

SEQ ID NO: 1847740 - RNA, 19 nt, Human
gccgagaucacgccacugc

SEQ ID NO: 1847741 - RNA, 19 nt, Human
gcccuucucuccagccccu

SEQ ID NO: 1847742 - RNA, 21 nt, Human
gcccuuccucuccacugccuu

SEQ ID NO: 1847743 - RNA, 19 nt, Human
gcccuuccucuccacugcc

SEQ ID NO: 1847744 - RNA, 18 nt, Human
gcccuuccucuccacugc

SEQ ID NO: 1847745 - RNA, 16 nt, Human
gcccuuccucuccacu

SEQ ID NO: 1847746 - RNA, 17 nt, Human
gcccuuccucuccacug

SEQ ID NO: 1847747 - RNA, 22 nt, Human
gcccuucucuccagccccugga

SEQ ID NO: 1847748 - RNA, 21 nt, Human
gcccuucucuccagccccugg

SEQ ID NO: 1847749 - RNA, 23 nt, Human
gcccuucucuccagccccuggau

SEQ ID NO: 1847750 - RNA, 20 nt, Human
gcccuuccucuccacugccu

SEQ ID NO: 1847751 - RNA, 19 nt, Human
gccccuccucucugcccua

SEQ ID NO: 1847752 - RNA, 18 nt, Human
gccccuccucucugcccu

SEQ ID NO: 1847753 - RNA, 15 nt, Human
gccccucccuucaac

SEQ ID NO: 1847754 - RNA, 14 nt, Human
gccccucccuucaa

SEQ ID NO: 1847755 - RNA, 12 nt, Human
gccccucccuuc

SEQ ID NO: 1847756 - RNA, 15 nt, Human
gcagacucuacagag

SEQ ID NO: 1847757 - RNA, 13 nt, Human
gccccugccaccc

SEQ ID NO: 1847758 - RNA, 21 nt, Human
gccccuguucuggcagaguug

SEQ ID NO: 1847759 - RNA, 14 nt, Human
gccccugccacccu

SEQ ID NO: 1847760 - RNA, 15 nt, Human
gccccugccacccug

SEQ ID NO: 1847761 - RNA, 19 nt, Human
gcccgacagccuggcacag

SEQ ID NO: 1847762 - RNA, 17 nt, Human
gcccgacagccuggcac

SEQ ID NO: 1847763 - RNA, 16 nt, Human
gcccgacagccuggca

SEQ ID NO: 1847764 - RNA, 12 nt, Human
gccccuuccccc

SEQ ID NO: 1847765 - RNA, 16 nt, Human
gcccggcuccaggcuc

SEQ ID NO: 1847766 - RNA, 22 nt, Human
gcccuggacugugugcucagga

SEQ ID NO: 1847767 - RNA, 16 nt, Human
gcccuggacugugugc

SEQ ID NO: 1847768 - RNA, 12 nt, Human
gcccuggacugu

SEQ ID NO: 1847769 - RNA, 23 nt, Human
gcccugcuuugggcugcccuggu

SEQ ID NO: 1847770 - RNA, 22 nt, Human
gcccugcuuugggcugcccugg

SEQ ID NO: 1847771 - RNA, 19 nt, Human
gcccugcuuugggcugccc

SEQ ID NO: 1847772 - RNA, 21 nt, Human
gcccugcuuugggcugcccug

SEQ ID NO: 1847773 - RNA, 20 nt, Human
gcccugcuuugggcugcccu

SEQ ID NO: 1847774 - RNA, 17 nt, Human
gcccggcuccaggcucc

SEQ ID NO: 1847775 - RNA, 18 nt, Human
gcccggcuccaggcuccu

SEQ ID NO: 1847776 - RNA, 16 nt, Human
gcccugagcuuucugc

SEQ ID NO: 1847777 - RNA, 12 nt, Human
gcccucugccca

SEQ ID NO: 1847778 - RNA, 19 nt, Human
gccucucugcaggucccua

SEQ ID NO: 1847779 - RNA, 21 nt, Human
gccucggacuuagcugggaga

SEQ ID NO: 1847780 - RNA, 20 nt, Human
gccucggacuuagcugggag

SEQ ID NO: 1847781 - RNA, 17 nt, Human
gccucccgaguagcugg

SEQ ID NO: 1847782 - RNA, 23 nt, Human
gccucccgaauagcugggacuac

SEQ ID NO: 1847783 - RNA, 15 nt, Human
gccucccgaguagcu

SEQ ID NO: 1847784 - RNA, 23 nt, Human
gccucccaacucaccccagcccc

SEQ ID NO: 1847785 - RNA, 22 nt, Human
gccucccaacucaccccagccc

SEQ ID NO: 1847786 - RNA, 21 nt, Human
gccucccaacucaccccagcc

SEQ ID NO: 1847787 - RNA, 15 nt, Human
gccucagugccacua

SEQ ID NO: 1847788 - RNA, 21 nt, Human
gccucccgaauagcugggacu

SEQ ID NO: 1847789 - RNA, 14 nt, Human
gccucccacgacug

SEQ ID NO: 1847790 - RNA, 21 nt, Human
gccucccacgacugcccggca

SEQ ID NO: 1847791 - RNA, 14 nt, Human
gccucagccucccg

SEQ ID NO: 1847792 - RNA, 16 nt, Human
gccucagccuccugag

SEQ ID NO: 1847793 - RNA, 18 nt, Human
gccucagccuccugagua

SEQ ID NO: 1847794 - RNA, 23 nt, Human
gccucagccucccaaagugcugg

SEQ ID NO: 1847795 - RNA, 18 nt, Human
gccucagucucccucccu

SEQ ID NO: 1847796 - RNA, 15 nt, Human
gccucagucucccuc

SEQ ID NO: 1847797 - RNA, 12 nt, Human
gccucagugcca

SEQ ID NO: 1847798 - RNA, 14 nt, Human
gccucagugccacu

SEQ ID NO: 1847799 - RNA, 22 nt, Human
gccuauauuuuuuguuaaauga

SEQ ID NO: 1847800 - RNA, 17 nt, Human
gccuaagugcagccccg

SEQ ID NO: 1847801 - RNA, 16 nt, Human
gccuaaggcugaacuu

SEQ ID NO: 1847802 - RNA, 14 nt, Human
gccucaaccuccug

SEQ ID NO: 1847803 - RNA, 16 nt, Human
gccucaaccuccuggg

SEQ ID NO: 1847804 - RNA, 17 nt, Human
gccucaaccuccugggc

SEQ ID NO: 1847805 - RNA, 19 nt, Human
gccucaagugauucuccug

SEQ ID NO: 1847806 - RNA, 20 nt, Human
gccucaagugauucuccugc

SEQ ID NO: 1847807 - RNA, 21 nt, Human
gccucaagugauucuccugcc

SEQ ID NO: 1847808 - RNA, 17 nt, Human
gccugggcagaaggaag

SEQ ID NO: 1847809 - RNA, 16 nt, Human
gccugggcagaaggaa

SEQ ID NO: 1847810 - RNA, 18 nt, Human
gccugggcagaaggaaga

SEQ ID NO: 1847811 - RNA, 20 nt, Human
gccugggggcugggcagagg

SEQ ID NO: 1847812 - RNA, 21 nt, Human
gccugggggcugggcagagga

SEQ ID NO: 1847813 - RNA, 13 nt, Human
gccuggccacgcc

SEQ ID NO: 1847814 - RNA, 14 nt, Human
gccuggauggggcu

SEQ ID NO: 1847815 - RNA, 15 nt, Human
gccuggauggggcug

SEQ ID NO: 1847816 - RNA, 15 nt, Human
gccugggcagaagga

SEQ ID NO: 1847817 - RNA, 16 nt, Human
gccuggccagaugcac

SEQ ID NO: 1847818 - RNA, 14 nt, Human
gccuggccagaugc

SEQ ID NO: 1847819 - RNA, 15 nt, Human
gccuggccagaugca

SEQ ID NO: 1847820 - RNA, 21 nt, Human
gccucucugcaggucccuaau

SEQ ID NO: 1847821 - RNA, 20 nt, Human
gccucucugcaggucccuaa

SEQ ID NO: 1847822 - RNA, 18 nt, Human
gccucucugcaggucccu

SEQ ID NO: 1847823 - RNA, 23 nt, Human
gccucucugcaggucccuaauaa

SEQ ID NO: 1847824 - RNA, 12 nt, Human
gccucugccugu

SEQ ID NO: 1847825 - RNA, 13 nt, Human
gccucugccuguc

SEQ ID NO: 1847826 - RNA, 18 nt, Human
gccucugcugauccuccc

SEQ ID NO: 1847827 - RNA, 19 nt, Human
gccucugcugauccuccca

SEQ ID NO: 1847828 - RNA, 22 nt, Human
gccugaagucacacagugaguc

SEQ ID NO: 1847829 - RNA, 22 nt, Human
gccugcuuuuuauggccuguga

SEQ ID NO: 1847830 - RNA, 19 nt, Human
gccugcuuuuuauggccug

SEQ ID NO: 1847831 - RNA, 18 nt, Human
gccugcuuuuuauggccu

SEQ ID NO: 1847832 - RNA, 18 nt, Human
gccugcuccagcuguuca

SEQ ID NO: 1847833 - RNA, 16 nt, Human
gccugcuccagcuguu

SEQ ID NO: 1847834 - RNA, 15 nt, Human
gccugcuccagcugu

SEQ ID NO: 1847835 - RNA, 19 nt, Human
gcugagucugaaggcuggg

SEQ ID NO: 1847836 - RNA, 18 nt, Human
gcugagucugaaggcugg

SEQ ID NO: 1847837 - RNA, 16 nt, Human
gcugagucugaaggcu

SEQ ID NO: 1847838 - RNA, 15 nt, Human
gcugagucugaaggc

SEQ ID NO: 1847839 - RNA, 22 nt, Human
gcugagucccaggcugagccuc

SEQ ID NO: 1847840 - RNA, 21 nt, Human
gcugagucccaggcugagccu

SEQ ID NO: 1847841 - RNA, 17 nt, Human
gcugagucccaggcuga

SEQ ID NO: 1847842 - RNA, 21 nt, Human
gcugacuguacuccucccagg

SEQ ID NO: 1847843 - RNA, 23 nt, Human
gcugagugggggaucacagccuc

SEQ ID NO: 1847844 - RNA, 22 nt, Human
gcugagugggggaucacagccu

SEQ ID NO: 1847845 - RNA, 16 nt, Human
gcugauggugcaauga

SEQ ID NO: 1847846 - RNA, 15 nt, Human
gcugauggugcaaug

SEQ ID NO: 1847847 - RNA, 17 nt, Human
gcugcauuuaaaagaua

SEQ ID NO: 1847848 - RNA, 20 nt, Human
gcugcaguugccagucaccc

SEQ ID NO: 1847849 - RNA, 18 nt, Human
gcugcaguugccagucac

SEQ ID NO: 1847850 - RNA, 21 nt, Human
gcugcaguugccagucacccc

SEQ ID NO: 1847851 - RNA, 21 nt, Human
gcugauggugcaaugaccuuu

SEQ ID NO: 1847852 - RNA, 18 nt, Human
gcugauggugcaaugacc

SEQ ID NO: 1847853 - RNA, 19 nt, Human
gcugacuguacuccuccca

SEQ ID NO: 1847854 - RNA, 18 nt, Human
gcugacuguacuccuccc

SEQ ID NO: 1847855 - RNA, 17 nt, Human
gcucuugaugccuggcg

SEQ ID NO: 1847856 - RNA, 17 nt, Human
gcugacagacagcccuc

SEQ ID NO: 1847857 - RNA, 21 nt, Human
gcugacagacacaggcccggc

SEQ ID NO: 1847858 - RNA, 16 nt, Human
gcucuugaugccuggc

SEQ ID NO: 1847859 - RNA, 15 nt, Human
gcucuugaugccugg

SEQ ID NO: 1847860 - RNA, 14 nt, Human
gcucuugaugccug

SEQ ID NO: 1847861 - RNA, 23 nt, Human
gcucuucuccuuucacaaccuuc

SEQ ID NO: 1847862 - RNA, 13 nt, Human
gcucuucuccuuu

SEQ ID NO: 1847863 - RNA, 21 nt, Human
gcucuucuccuuucacaaccu

SEQ ID NO: 1847864 - RNA, 17 nt, Human
gcucuucuccuuucaca

SEQ ID NO: 1847865 - RNA, 14 nt, Human
gcucuucuccaggc

SEQ ID NO: 1847866 - RNA, 16 nt, Human
gcucuucuccaggcug

SEQ ID NO: 1847867 - RNA, 18 nt, Human
gcucuuccaggcugggag

SEQ ID NO: 1847868 - RNA, 19 nt, Human
gcucuuccaggcugggaga

SEQ ID NO: 1847869 - RNA, 22 nt, Human
gcucuuccaggcugggagagcc

SEQ ID NO: 1847870 - RNA, 12 nt, Human
gcucuucuccag

SEQ ID NO: 1847871 - RNA, 14 nt, Human
gcucuggacaggca

SEQ ID NO: 1847872 - RNA, 15 nt, Human
gcucuggacaggcau

SEQ ID NO: 1847873 - RNA, 16 nt, Human
gcucuggacaggcaug

SEQ ID NO: 1847874 - RNA, 21 nt, Human
gcucuggacaggcauguucuc

SEQ ID NO: 1847875 - RNA, 22 nt, Human
gcucuggacaggcauguucucu

SEQ ID NO: 1847876 - RNA, 19 nt, Human
gcucugcuccucuccccag

SEQ ID NO: 1847877 - RNA, 21 nt, Human
gcucugcuccucuccccagca

SEQ ID NO: 1847878 - RNA, 13 nt, Human
gcucugcugacag

SEQ ID NO: 1847879 - RNA, 14 nt, Human
gcucugcugacaga

SEQ ID NO: 1847880 - RNA, 18 nt, Human
gcucugcugacagacaca

SEQ ID NO: 1847881 - RNA, 19 nt, Human
gcucugcugacagacacag

SEQ ID NO: 1847882 - RNA, 20 nt, Human
gcucugcugacagacacagg

SEQ ID NO: 1847883 - RNA, 23 nt, Human
gcucugcugacagacacaggccc

SEQ ID NO: 1847884 - RNA, 22 nt, Human
gcucugccucccaucacccgcu

SEQ ID NO: 1847885 - RNA, 15 nt, Human
gcucugccucccauc

SEQ ID NO: 1847886 - RNA, 14 nt, Human
gcucugccucccau

SEQ ID NO: 1847887 - RNA, 13 nt, Human
gcucugccuccca

SEQ ID NO: 1847888 - RNA, 13 nt, Human
gcucugcuccucu

SEQ ID NO: 1847889 - RNA, 14 nt, Human
gcucugcuccucuc

SEQ ID NO: 1847890 - RNA, 14 nt, Human
gcucucuggccuuc

SEQ ID NO: 1847891 - RNA, 15 nt, Human
gcucucuggccuucg

SEQ ID NO: 1847892 - RNA, 19 nt, Human
gcucucuggccuucggccu

SEQ ID NO: 1847893 - RNA, 20 nt, Human
gcucucuggccuucggccuc

SEQ ID NO: 1847894 - RNA, 11 nt, Human
gcucugccucc

SEQ ID NO: 1847895 - RNA, 23 nt, Human
gcucugcccuugguuaggcauug

SEQ ID NO: 1847896 - RNA, 14 nt, Human
gcucugcccuuggu

SEQ ID NO: 1847897 - RNA, 18 nt, Human
gcucccuucccaccucuc

SEQ ID NO: 1847898 - RNA, 16 nt, Human
gcucccuucccaccuc

SEQ ID NO: 1847899 - RNA, 15 nt, Human
gcucccuucccaccu

SEQ ID NO: 1847900 - RNA, 15 nt, Human
gcuccuucuguccua

SEQ ID NO: 1847901 - RNA, 19 nt, Human
gcucccuucccaccucucu

SEQ ID NO: 1847902 - RNA, 21 nt, Human
gcuccuucuguccuacucugu

SEQ ID NO: 1847903 - RNA, 17 nt, Human
gcucgagcaugccugga

SEQ ID NO: 1847904 - RNA, 16 nt, Human
gcucgagcaugccugg

SEQ ID NO: 1847905 - RNA, 11 nt, Human
gcucucuggcc

SEQ ID NO: 1847906 - RNA, 12 nt, Human
gcucucuggccu

SEQ ID NO: 1847907 - RNA, 13 nt, Human
gcucucuggccuu

SEQ ID NO: 1847908 - RNA, 15 nt, Human
gcucuccucuugcca

SEQ ID NO: 1847909 - RNA, 22 nt, Human
gcucuccucuugccacugccuc

SEQ ID NO: 1847910 - RNA, 19 nt, Human
gcucuccucuugccacugc

SEQ ID NO: 1847911 - RNA, 19 nt, Human
gcucuccgaccagacaccu

SEQ ID NO: 1847912 - RNA, 13 nt, Human
gcucuccgaccag

SEQ ID NO: 1847913 - RNA, 17 nt, Human
gcucuccgaccagacac

SEQ ID NO: 1847914 - RNA, 23 nt, Human
gcucagcaaaagaugcuucucac

SEQ ID NO: 1847915 - RNA, 22 nt, Human
gcucagcaaaagaugcuucuca

SEQ ID NO: 1847916 - RNA, 20 nt, Human
gcucagcaaaagaugcuucu

SEQ ID NO: 1847917 - RNA, 17 nt, Human
gcucagcaaaagaugcu

SEQ ID NO: 1847918 - RNA, 20 nt, Human
gcucaccagccccagugccc

SEQ ID NO: 1847919 - RNA, 23 nt, Human
gcucaccagccccagugcccaca

SEQ ID NO: 1847920 - RNA, 19 nt, Human
gcucaccagccccagugcc

SEQ ID NO: 1847921 - RNA, 16 nt, Human
gcuccaaacccucgag

SEQ ID NO: 1847922 - RNA, 18 nt, Human
gcuccaaacccucgaggc

SEQ ID NO: 1847923 - RNA, 17 nt, Human
gcuccaaacccucgagg

SEQ ID NO: 1847924 - RNA, 19 nt, Human
gcucaggugucccugcacu

SEQ ID NO: 1847925 - RNA, 15 nt, Human
gcucagcggggacag

SEQ ID NO: 1847926 - RNA, 20 nt, Human
gcucagcggggacagcuccu

SEQ ID NO: 1847927 - RNA, 21 nt, Human
gcucagcggggacagcuccuu

SEQ ID NO: 1847928 - RNA, 22 nt, Human
gcucagcggggacagcuccuuc

SEQ ID NO: 1847929 - RNA, 18 nt, Human
gcucaggugucccugcac

SEQ ID NO: 1847930 - RNA, 19 nt, Human
gcuccaagcucccaggcau

SEQ ID NO: 1847931 - RNA, 18 nt, Human
gcuccaagcucccaggca

SEQ ID NO: 1847932 - RNA, 17 nt, Human
gcuccaagcucccaggc

SEQ ID NO: 1847933 - RNA, 16 nt, Human
gcuccaagcucccagg

SEQ ID NO: 1847934 - RNA, 21 nt, Human
gcuccaagcucccaggcauuc

SEQ ID NO: 1847935 - RNA, 23 nt, Human
gcuccagcuggccgggagccuga

SEQ ID NO: 1847936 - RNA, 17 nt, Human
gcuccagcuggccggga

SEQ ID NO: 1847937 - RNA, 15 nt, Human
gcuccaagcucccag

SEQ ID NO: 1847938 - RNA, 14 nt, Human
gcuccaagcuccca

SEQ ID NO: 1847939 - RNA, 13 nt, Human
gcuccaagcuccc

SEQ ID NO: 1847940 - RNA, 16 nt, Human
gcuccaaaugcagcuu

SEQ ID NO: 1847941 - RNA, 19 nt, Human
gcuccaaacccucgaggcg

SEQ ID NO: 1847942 - RNA, 20 nt, Human
gcuccauuuuuagugaaaua

SEQ ID NO: 1847943 - RNA, 11 nt, Human
gcuccagcugu

SEQ ID NO: 1847944 - RNA, 13 nt, Human
gcuccaggcuccu

SEQ ID NO: 1847945 - RNA, 16 nt, Human
gcuccaggcuccuuua

SEQ ID NO: 1847946 - RNA, 23 nt, Human
gcuccaggcuccuuuagcgccca

SEQ ID NO: 1847947 - RNA, 20 nt, Human
gcuccagcuguucagcuggu

SEQ ID NO: 1847948 - RNA, 24 nt, Human
gcuccaggcuccuuuagcgcccag

SEQ ID NO: 1847949 - RNA, 14 nt, Human
gcuccaucuccacu

SEQ ID NO: 1847950 - RNA, 15 nt, Human
gcuccauggcugcca

SEQ ID NO: 1847951 - RNA, 23 nt, Human
gccugugagcuaggaauuguguu

SEQ ID NO: 1847952 - RNA, 17 nt, Human
gccugugaacugaacuc

SEQ ID NO: 1847953 - RNA, 15 nt, Human
gcgggcuuccuccug

SEQ ID NO: 1847954 - RNA, 12 nt, Human
gcggggacagcu

SEQ ID NO: 1847955 - RNA, 13 nt, Human
gcggggacagcuc

SEQ ID NO: 1847956 - RNA, 16 nt, Human
gcgguccacccaggag

SEQ ID NO: 1847957 - RNA, 18 nt, Human
gcgguccacccaggagcc

SEQ ID NO: 1847958 - RNA, 19 nt, Human
gcgguccacccaggagccc

SEQ ID NO: 1847959 - RNA, 22 nt, Human
gcuaagagggagggagggcucc

SEQ ID NO: 1847960 - RNA, 21 nt, Human
gcuaagagggagggagggcuc

SEQ ID NO: 1847961 - RNA, 16 nt, Human
gcuaaaugugaaugau

SEQ ID NO: 1847962 - RNA, 13 nt, Human
gcuaaaugugaau

SEQ ID NO: 1847963 - RNA, 15 nt, Human
gcgugagaccugccc

SEQ ID NO: 1847964 - RNA, 18 nt, Human
gcgugagccacugcaccg

SEQ ID NO: 1847965 - RNA, 23 nt, Human
gcgugagccacugcaccgggcca

SEQ ID NO: 1847966 - RNA, 22 nt, Human
gcuaucucccccagccccaucc

SEQ ID NO: 1847967 - RNA, 21 nt, Human
gcuaucucccccagccccauc

SEQ ID NO: 1847968 - RNA, 20 nt, Human
gcuaucucccccagccccau

SEQ ID NO: 1847969 - RNA, 19 nt, Human
gcuaucucccccagcccca

SEQ ID NO: 1847970 - RNA, 23 nt, Human
gcuaucucccccagccccauccu

SEQ ID NO: 1847971 - RNA, 18 nt, Human
gcuaucucccccagcccc

SEQ ID NO: 1847972 - RNA, 17 nt, Human
gcuaucucccccagccc

SEQ ID NO: 1847973 - RNA, 16 nt, Human
gcuaucucccccagcc

SEQ ID NO: 1847974 - RNA, 18 nt, Human
gcuagagguucaaagaua

SEQ ID NO: 1847975 - RNA, 19 nt, Human
gcuagagguucaaagauau

SEQ ID NO: 1847976 - RNA, 21 nt, Human
gcuagagguucaaagauauuu

SEQ ID NO: 1847977 - RNA, 21 nt, Human
gcuacccgggaagggggcugg

SEQ ID NO: 1847978 - RNA, 15 nt, Human
gcuacccgggaaggg

SEQ ID NO: 1847979 - RNA, 14 nt, Human
gcuacccgggaagg

SEQ ID NO: 1847980 - RNA, 17 nt, Human
gcuaagcaaaaugugau

SEQ ID NO: 1847981 - RNA, 23 nt, Human
gcuaagagggagggagggcucca

SEQ ID NO: 1847982 - RNA, 23 nt, Human
guacuaaggaaucuuucugcuuu

SEQ ID NO: 1847983 - RNA, 15 nt, Human
guacuaaggaaucuu

SEQ ID NO: 1847984 - RNA, 17 nt, Human
guacguugugcauuugg

SEQ ID NO: 1847985 - RNA, 17 nt, Human
guacuacaguccuccca

SEQ ID NO: 1847986 - RNA, 14 nt, Human
guacuucuccaccc

SEQ ID NO: 1847987 - RNA, 15 nt, Human
guacuucuccacccu

SEQ ID NO: 1847988 - RNA, 15 nt, Human
guacguugugcauuu

SEQ ID NO: 1847989 - RNA, 16 nt, Human
guacguugugcauuug

SEQ ID NO: 1847990 - RNA, 14 nt, Human
guacguugugcauu

SEQ ID NO: 1847991 - RNA, 17 nt, Human
guacgucugacaggcaa

SEQ ID NO: 1847992 - RNA, 14 nt, Human
guacgucugacagg

SEQ ID NO: 1847993 - RNA, 15 nt, Human
guacgucugacaggc

SEQ ID NO: 1847994 - RNA, 13 nt, Human
guaccucuugagc

SEQ ID NO: 1847995 - RNA, 21 nt, Human
guaccucuugagccuugaacu

SEQ ID NO: 1847996 - RNA, 22 nt, Human
guaccucuugagccuugaacuu

SEQ ID NO: 1847997 - RNA, 16 nt, Human
guacccacugcucugg

SEQ ID NO: 1847998 - RNA, 15 nt, Human
guaccgcaaugugac

SEQ ID NO: 1847999 - RNA, 19 nt, Human
guacuugcucuugaugccu

SEQ ID NO: 1848000 - RNA, 18 nt, Human
guacuugcucuugaugcc

SEQ ID NO: 1848001 - RNA, 16 nt, Human
guacuugcucuugaug

SEQ ID NO: 1848002 - RNA, 15 nt, Human
guacuugcucuugau

SEQ ID NO: 1848003 - RNA, 22 nt, Human
guacuugcucuugaugccuggc

SEQ ID NO: 1848004 - RNA, 16 nt, Human
guacuuguggacacag

SEQ ID NO: 1848005 - RNA, 20 nt, Human
guacuuguggacacagcucu

SEQ ID NO: 1848006 - RNA, 14 nt, Human
guacuugcucuuga

SEQ ID NO: 1848007 - RNA, 20 nt, Human
guacuucuccacccugcucu

SEQ ID NO: 1848008 - RNA, 21 nt, Human
guacuucuccacccugcucuc

SEQ ID NO: 1848009 - RNA, 16 nt, Human
guacuucuccacccug

SEQ ID NO: 1848010 - RNA, 17 nt, Human
guacuucuccacccugc

SEQ ID NO: 1848011 - RNA, 18 nt, Human
guacuucuccacccugcu

SEQ ID NO: 1848012 - RNA, 19 nt, Human
guacuucuccacccugcuc

SEQ ID NO: 1848013 - RNA, 15 nt, Human
guagaggagaaacug

SEQ ID NO: 1848014 - RNA, 16 nt, Human
guagagcggagaaagg

SEQ ID NO: 1848015 - RNA, 20 nt, Human
guagaaaagggaacugaaca

SEQ ID NO: 1848016 - RNA, 21 nt, Human
guacuuguggacacagcucuu

SEQ ID NO: 1848017 - RNA, 23 nt, Human
guacuuuauuuucuauaauuuaa

SEQ ID NO: 1848018 - RNA, 18 nt, Human
guacacuguuucaaacuu

SEQ ID NO: 1848019 - RNA, 20 nt, Human
guaauuaaguacuauguauc

SEQ ID NO: 1848020 - RNA, 17 nt, Human
guaauuaaguacuaugu

SEQ ID NO: 1848021 - RNA, 14 nt, Human
guaauuaaguacua

SEQ ID NO: 1848022 - RNA, 21 nt, Human
guaauuaaguacuauguauca

SEQ ID NO: 1848023 - RNA, 13 nt, Human
guaaugaaaacca

SEQ ID NO: 1848024 - RNA, 11 nt, Human
guaaugaaaac

SEQ ID NO: 1848025 - RNA, 15 nt, Human
guaaucguguccccu

SEQ ID NO: 1848026 - RNA, 18 nt, Human
guaaugaugucguuugaa

SEQ ID NO: 1848027 - RNA, 20 nt, Human
guacagcaaggagauuuaca

SEQ ID NO: 1848028 - RNA, 22 nt, Human
guacagagcccacgcccccacu

SEQ ID NO: 1848029 - RNA, 18 nt, Human
guacagagcccacgcccc

SEQ ID NO: 1848030 - RNA, 12 nt, Human
guacagagccca

SEQ ID NO: 1848031 - RNA, 19 nt, Human
guacacuguuucaaacuuu

SEQ ID NO: 1848032 - RNA, 20 nt, Human
guacacuguuucaaacuuua

SEQ ID NO: 1848033 - RNA, 21 nt, Human
guacacuguuucaaacuuuac

SEQ ID NO: 1848034 - RNA, 15 nt, Human
guacagacagaaaaa

SEQ ID NO: 1848035 - RNA, 16 nt, Human
guacagacaacaaacc

SEQ ID NO: 1848036 - RNA, 16 nt, Human
guacagucuuguauua

SEQ ID NO: 1848037 - RNA, 13 nt, Human
guacagucuugua

SEQ ID NO: 1848038 - RNA, 14 nt, Human
guacagucuuguau

SEQ ID NO: 1848039 - RNA, 20 nt, Human
guacauaaugcgugcauacc

SEQ ID NO: 1848040 - RNA, 12 nt, Human
guacaguuuuua

SEQ ID NO: 1848041 - RNA, 13 nt, Human
guacaguuuuuau

SEQ ID NO: 1848042 - RNA, 15 nt, Human
guacccacugcucug

SEQ ID NO: 1848043 - RNA, 19 nt, Human
guaagaucguucucugccu

SEQ ID NO: 1848044 - RNA, 23 nt, Human
guaaauuaacuuuuauaaacuuu

SEQ ID NO: 1848045 - RNA, 22 nt, Human
guaaguauucuuauuuaaugaa

SEQ ID NO: 1848046 - RNA, 13 nt, Human
guaaggaaugauu

SEQ ID NO: 1848047 - RNA, 23 nt, Human
guaaggaauaccugucccccuga

SEQ ID NO: 1848048 - RNA, 21 nt, Human
guaaggaauaccugucccccu

SEQ ID NO: 1848049 - RNA, 20 nt, Human
guaaggaauaccuguccccc

SEQ ID NO: 1848050 - RNA, 18 nt, Human
guaaggaauaccuguccc

SEQ ID NO: 1848051 - RNA, 15 nt, Human
guaaauuaacuuuua

SEQ ID NO: 1848052 - RNA, 16 nt, Human
guaaauuaacuuuuau

SEQ ID NO: 1848053 - RNA, 17 nt, Human
guaaauuaacuuuuaua

SEQ ID NO: 1848054 - RNA, 21 nt, Human
guaaauuaacuuuuauaaacu

SEQ ID NO: 1848055 - RNA, 22 nt, Human
guaaauuaacuuuuauaaacuu

SEQ ID NO: 1848056 - RNA, 18 nt, Human
guaaaugggggugcauuu

SEQ ID NO: 1848057 - RNA, 19 nt, Human
guaaaugggggugcauuug

SEQ ID NO: 1848058 - RNA, 20 nt, Human
guaaaugggggugcauuuga

SEQ ID NO: 1848059 - RNA, 14 nt, Human
gguugggcuggugu

SEQ ID NO: 1848060 - RNA, 18 nt, Human
gguuggcaaaaaggcagg

SEQ ID NO: 1848061 - RNA, 13 nt, Human
gguuuaagcuguu

SEQ ID NO: 1848062 - RNA, 13 nt, Human
gguuggugggggc

SEQ ID NO: 1848063 - RNA, 20 nt, Human
gguucacugcaaccuccgcc

SEQ ID NO: 1848064 - RNA, 22 nt, Human
gguucaagcgauucuucugcuu

SEQ ID NO: 1848065 - RNA, 23 nt, Human
gguucaagcgauucuucugcuuc

SEQ ID NO: 1848066 - RNA, 17 nt, Human
gguucuuucuuccucug

SEQ ID NO: 1848067 - RNA, 12 nt, Human
gguucagcuugu

SEQ ID NO: 1848068 - RNA, 18 nt, Human
gguucuuucuuccucugc

SEQ ID NO: 1848069 - RNA, 14 nt, Human
gguugaagcaccaa

SEQ ID NO: 1848070 - RNA, 20 nt, Human
gguggcccgacagccuggca

SEQ ID NO: 1848071 - RNA, 19 nt, Human
gguggcccgacagccuggc

SEQ ID NO: 1848072 - RNA, 18 nt, Human
gguggcccgacagccugg

SEQ ID NO: 1848073 - RNA, 17 nt, Human
gguggcccgacagccug

SEQ ID NO: 1848074 - RNA, 16 nt, Human
gguggcccgacagccu

SEQ ID NO: 1848075 - RNA, 13 nt, Human
gguggccucccaa

SEQ ID NO: 1848076 - RNA, 17 nt, Human
gguggccucccaacuca

SEQ ID NO: 1848077 - RNA, 21 nt, Human
gguucaagcgauucuucugcu

SEQ ID NO: 1848078 - RNA, 15 nt, Human
guaaaagacuuuuuu

SEQ ID NO: 1848079 - RNA, 20 nt, Human
guaaaaacaaagaaauuaug

SEQ ID NO: 1848080 - RNA, 18 nt, Human
guaaaaacaaagaaauua

SEQ ID NO: 1848081 - RNA, 14 nt, Human
guaaaaauaaaauu

SEQ ID NO: 1848082 - RNA, 13 nt, Human
guaaaaauaaaau

SEQ ID NO: 1848083 - RNA, 12 nt, Human
gguuuucuguuc

SEQ ID NO: 1848084 - RNA, 13 nt, Human
gguuuucuguucu

SEQ ID NO: 1848085 - RNA, 15 nt, Human
gguuuucuguucuuu

SEQ ID NO: 1848086 - RNA, 23 nt, Human
gguuuugccauguuggccaggcu

SEQ ID NO: 1848087 - RNA, 17 nt, Human
ggucccuaauaaagcug

SEQ ID NO: 1848088 - RNA, 16 nt, Human
ggucccuaauaaagcu

SEQ ID NO: 1848089 - RNA, 13 nt, Human
ggucccuaauaaa

SEQ ID NO: 1848090 - RNA, 12 nt, Human
ggucccuaauaa

SEQ ID NO: 1848091 - RNA, 14 nt, Human
ggucccugguggca

SEQ ID NO: 1848092 - RNA, 18 nt, Human
ggucccuaauaaagcugu

SEQ ID NO: 1848093 - RNA, 22 nt, Human
ggucccugguggcagcucaccu

SEQ ID NO: 1848094 - RNA, 23 nt, Human
gguccuagaaauuccccacccug

SEQ ID NO: 1848095 - RNA, 22 nt, Human
ggucucacuauguugcccaggc

SEQ ID NO: 1848096 - RNA, 12 nt, Human
ggucucacucug

SEQ ID NO: 1848097 - RNA, 16 nt, Human
ggucucacucugucgc

SEQ ID NO: 1848098 - RNA, 20 nt, Human
ggucucgaacuccugaccuu

SEQ ID NO: 1848099 - RNA, 19 nt, Human
ggucucgaacuccugaccu

SEQ ID NO: 1848100 - RNA, 15 nt, Human
ggucugacccacugc

SEQ ID NO: 1848101 - RNA, 16 nt, Human
ggucugacccacugcu

SEQ ID NO: 1848102 - RNA, 16 nt, Human
ggugaacuugguuccc

SEQ ID NO: 1848103 - RNA, 14 nt, Human
ggugaacauugcaa

SEQ ID NO: 1848104 - RNA, 19 nt, Human
ggucugaggaauccagacc

SEQ ID NO: 1848105 - RNA, 18 nt, Human
ggugaagugaagacaaug

SEQ ID NO: 1848106 - RNA, 21 nt, Human
ggugacagagugagacucugu

SEQ ID NO: 1848107 - RNA, 14 nt, Human
ggugaccucugccu

SEQ ID NO: 1848108 - RNA, 16 nt, Human
ggugaccucugccuga

SEQ ID NO: 1848109 - RNA, 21 nt, Human
ggugaccucugccugaaguca

SEQ ID NO: 1848110 - RNA, 22 nt, Human
ggugauagguauaaguggugug

SEQ ID NO: 1848111 - RNA, 22 nt, Human
ggugcuaucucccccagcccca

SEQ ID NO: 1848112 - RNA, 23 nt, Human
ggugcuaucucccccagccccau

SEQ ID NO: 1848113 - RNA, 15 nt, Human
ggugcgaucuggguu

SEQ ID NO: 1848114 - RNA, 16 nt, Human
gguggcagugggagcu

SEQ ID NO: 1848115 - RNA, 15 nt, Human
gguggcagcugcggu

SEQ ID NO: 1848116 - RNA, 23 nt, Human
gguggcagcugcgguccacccag

SEQ ID NO: 1848117 - RNA, 13 nt, Human
gguggcagcucac

SEQ ID NO: 1848118 - RNA, 11 nt, Human
gguggcagcug

SEQ ID NO: 1848119 - RNA, 12 nt, Human
gguggcagcugc

SEQ ID NO: 1848120 - RNA, 13 nt, Human
gguggcagcugcg

SEQ ID NO: 1848121 - RNA, 22 nt, Human
ggucccaccccacacacgccag

SEQ ID NO: 1848122 - RNA, 22 nt, Human
ggucccacucaguccauagcag

SEQ ID NO: 1848123 - RNA, 12 nt, Human
ggucccacucag

SEQ ID NO: 1848124 - RNA, 14 nt, Human
ggucccacucaguc

SEQ ID NO: 1848125 - RNA, 23 nt, Human
ggucccccuuccauggacuuugu

SEQ ID NO: 1848126 - RNA, 18 nt, Human
ggucccccuuccauggac

SEQ ID NO: 1848127 - RNA, 13 nt, Human
ggucccccuucca

SEQ ID NO: 1848128 - RNA, 20 nt, Human
ggucacucuggcagcucaga

SEQ ID NO: 1848129 - RNA, 16 nt, Human
ggucacucuggcagcu

SEQ ID NO: 1848130 - RNA, 22 nt, Human
ggucacucuggcagcucagaga

SEQ ID NO: 1848131 - RNA, 12 nt, Human
ggucagagccug

SEQ ID NO: 1848132 - RNA, 13 nt, Human
ggucagagccugc

SEQ ID NO: 1848133 - RNA, 14 nt, Human
ggucagagccugca

SEQ ID NO: 1848134 - RNA, 15 nt, Human
ggucagagccugcag

SEQ ID NO: 1848135 - RNA, 16 nt, Human
ggucagagccugcagu

SEQ ID NO: 1848136 - RNA, 19 nt, Human
gggugcugggccccugccu

SEQ ID NO: 1848137 - RNA, 22 nt, Human
ggguuccagcaauucuccugcc

SEQ ID NO: 1848138 - RNA, 17 nt, Human
ggguucuacccaggugc

SEQ ID NO: 1848139 - RNA, 22 nt, Human
ggguucuacccaggugcuagga

SEQ ID NO: 1848140 - RNA, 23 nt, Human
ggguucccuuuuuuggcugcuga

SEQ ID NO: 1848141 - RNA, 16 nt, Human
ggguuggccccugccc

SEQ ID NO: 1848142 - RNA, 14 nt, Human
ggguucuuucuucc

SEQ ID NO: 1848143 - RNA, 19 nt, Human
ggguuggccccugcccggc

SEQ ID NO: 1848144 - RNA, 20 nt, Human
ggguuucaccauguuggcca

SEQ ID NO: 1848145 - RNA, 17 nt, Human
gguacccacugcucugg

SEQ ID NO: 1848146 - RNA, 15 nt, Human
ggguugggcuggugu

SEQ ID NO: 1848147 - RNA, 22 nt, Human
gguacuuguggacacagcucuu

SEQ ID NO: 1848148 - RNA, 21 nt, Human
gguacuuguggacacagcucu

SEQ ID NO: 1848149 - RNA, 20 nt, Human
gggcucugccucccaucacc

SEQ ID NO: 1848150 - RNA, 17 nt, Human
gggcucugccucccauc

SEQ ID NO: 1848151 - RNA, 16 nt, Human
gggcucugccucccau

SEQ ID NO: 1848152 - RNA, 15 nt, Human
gggcucugccuccca

SEQ ID NO: 1848153 - RNA, 13 nt, Human
gggcucugccucc

SEQ ID NO: 1848154 - RNA, 14 nt, Human
gggcuucaguggca

SEQ ID NO: 1848155 - RNA, 14 nt, Human
gggcugcaccggcu

SEQ ID NO: 1848156 - RNA, 16 nt, Human
gggcugaggugggagg

SEQ ID NO: 1848157 - RNA, 23 nt, Human
gggcucccuucccaccucucuca

SEQ ID NO: 1848158 - RNA, 18 nt, Human
gggcucccuucccaccuc

SEQ ID NO: 1848159 - RNA, 17 nt, Human
gggcucccuucccaccu

SEQ ID NO: 1848160 - RNA, 14 nt, Human
gggcucccuuccca

SEQ ID NO: 1848161 - RNA, 16 nt, Human
gggcgcgguggcucac

SEQ ID NO: 1848162 - RNA, 13 nt, Human
gggcucccuuccc

SEQ ID NO: 1848163 - RNA, 16 nt, Human
gggccuggcucaggug

SEQ ID NO: 1848164 - RNA, 14 nt, Human
gggccuggcucagg

SEQ ID NO: 1848165 - RNA, 18 nt, Human
gggccuggucguuuucaa

SEQ ID NO: 1848166 - RNA, 12 nt, Human
gggccuggccug

SEQ ID NO: 1848167 - RNA, 22 nt, Human
gggccuggcagccgugccuuca

SEQ ID NO: 1848168 - RNA, 10 nt, Human
gggccuggca

SEQ ID NO: 1848169 - RNA, 12 nt, Human
gggccuggcuca

SEQ ID NO: 1848170 - RNA, 21 nt, Human
ggcucccacaggcccuuccuc

SEQ ID NO: 1848171 - RNA, 20 nt, Human
ggcucccacaggcccuuccu

SEQ ID NO: 1848172 - RNA, 14 nt, Human
ggggcugccagggg

SEQ ID NO: 1848173 - RNA, 17 nt, Human
ggggcugggcagaggaa

SEQ ID NO: 1848174 - RNA, 16 nt, Human
ggggcugggcagagga

SEQ ID NO: 1848175 - RNA, 13 nt, Human
ggggcugggacau

SEQ ID NO: 1848176 - RNA, 23 nt, Human
gggguucccuuuuuuggcugcug

SEQ ID NO: 1848177 - RNA, 22 nt, Human
gggguucuuucuuccucugcug

SEQ ID NO: 1848178 - RNA, 20 nt, Human
gggguucuuucuuccucugc

SEQ ID NO: 1848179 - RNA, 18 nt, Human
ggguacccacugcucugg

SEQ ID NO: 1848180 - RNA, 13 nt, Human
ggguacccacugc

SEQ ID NO: 1848181 - RNA, 15 nt, Human
ggguacccacugcuc

SEQ ID NO: 1848182 - RNA, 19 nt, Human
ggguacuuguggacacagc

SEQ ID NO: 1848183 - RNA, 22 nt, Human
ggguacuuguggacacagcucu

SEQ ID NO: 1848184 - RNA, 23 nt, Human
ggguagagcggagaaaggaaggg

SEQ ID NO: 1848185 - RNA, 23 nt, Human
ggguacuuguggacacagcucuu

SEQ ID NO: 1848186 - RNA, 20 nt, Human
gggcuuggggaccagagcug

SEQ ID NO: 1848187 - RNA, 20 nt, Human
gggcuucauccuccucagau

SEQ ID NO: 1848188 - RNA, 19 nt, Human
gggcuucauccuccucaga

SEQ ID NO: 1848189 - RNA, 19 nt, Human
gggcuucaguggcagcugc

SEQ ID NO: 1848190 - RNA, 20 nt, Human
gggcuucaguggcagcugcu

SEQ ID NO: 1848191 - RNA, 15 nt, Human
gggcuucaguggcag

SEQ ID NO: 1848192 - RNA, 16 nt, Human
gggcuucaguggcagc

SEQ ID NO: 1848193 - RNA, 17 nt, Human
gggcuucaguggcagcu

SEQ ID NO: 1848194 - RNA, 18 nt, Human
gggcuucaguggcagcug

SEQ ID NO: 1848195 - RNA, 13 nt, Human
ggggaguggccac

SEQ ID NO: 1848196 - RNA, 21 nt, Human
gggcuuggggaccagagcugc

SEQ ID NO: 1848197 - RNA, 17 nt, Human
ggggaucacagccucug

SEQ ID NO: 1848198 - RNA, 17 nt, Human
gucauaacuagaacuga

SEQ ID NO: 1848199 - RNA, 22 nt, Human
gucauaacuagaacugaauuuu

SEQ ID NO: 1848200 - RNA, 16 nt, Human
gucaucucagcuggau

SEQ ID NO: 1848201 - RNA, 21 nt, Human
gucauauaagauucauauuua

SEQ ID NO: 1848202 - RNA, 14 nt, Human
guccacccaggagc

SEQ ID NO: 1848203 - RNA, 15 nt, Human
guccacccaggagcc

SEQ ID NO: 1848204 - RNA, 16 nt, Human
guccacccaggagccc

SEQ ID NO: 1848205 - RNA, 17 nt, Human
gucccagauacuugggg

SEQ ID NO: 1848206 - RNA, 14 nt, Human
gucccacucagucc

SEQ ID NO: 1848207 - RNA, 15 nt, Human
gucccacucagucca

SEQ ID NO: 1848208 - RNA, 13 nt, Human
guagagugggagc

SEQ ID NO: 1848209 - RNA, 15 nt, Human
guagagugggagcug

SEQ ID NO: 1848210 - RNA, 13 nt, Human
guauuacuucugc

SEQ ID NO: 1848211 - RNA, 14 nt, Human
guauuacuucugcu

SEQ ID NO: 1848212 - RNA, 15 nt, Human
guauuacuucugcua

SEQ ID NO: 1848213 - RNA, 15 nt, Human
guauuauguguguuu

SEQ ID NO: 1848214 - RNA, 14 nt, Human
guauuauaccuuuu

SEQ ID NO: 1848215 - RNA, 19 nt, Human
guauuuauuuaguauuuau

SEQ ID NO: 1848216 - RNA, 15 nt, Human
gucaauuacaggaag

SEQ ID NO: 1848217 - RNA, 13 nt, Human
gucaauuacagga

SEQ ID NO: 1848218 - RNA, 16 nt, Human
gucaauuacaggaagu

SEQ ID NO: 1848219 - RNA, 15 nt, Human
gucaccccggccacc

SEQ ID NO: 1848220 - RNA, 13 nt, Human
gucaccccggcca

SEQ ID NO: 1848221 - RNA, 20 nt, Human
gucaccugaagacucauucu

SEQ ID NO: 1848222 - RNA, 18 nt, Human
gucaagagggucugagga

SEQ ID NO: 1848223 - RNA, 19 nt, Human
gucaagagggucugaggaa

SEQ ID NO: 1848224 - RNA, 18 nt, Human
gucaagugaaaaaggagg

SEQ ID NO: 1848225 - RNA, 16 nt, Human
gucaagugaaaaagga

SEQ ID NO: 1848226 - RNA, 19 nt, Human
gucaagugaaaaaggagga

SEQ ID NO: 1848227 - RNA, 14 nt, Human
guccucccaucuca

SEQ ID NO: 1848228 - RNA, 13 nt, Human
guccucccaucuc

SEQ ID NO: 1848229 - RNA, 12 nt, Human
guccucccaucu

SEQ ID NO: 1848230 - RNA, 23 nt, Human
guccucccaucucacacaugagc

SEQ ID NO: 1848231 - RNA, 15 nt, Human
guccugggagugagc

SEQ ID NO: 1848232 - RNA, 16 nt, Human
guccugggagugagcu

SEQ ID NO: 1848233 - RNA, 17 nt, Human
guccuggcaugggaaug

SEQ ID NO: 1848234 - RNA, 20 nt, Human
guccuggggaaccugacccc

SEQ ID NO: 1848235 - RNA, 19 nt, Human
guccuggggaaccugaccc

SEQ ID NO: 1848236 - RNA, 19 nt, Human
guccugggagugagcuggu

SEQ ID NO: 1848237 - RNA, 17 nt, Human
guccugggagugagcug

SEQ ID NO: 1848238 - RNA, 18 nt, Human
guccugggagugagcugg

SEQ ID NO: 1848239 - RNA, 23 nt, Human
guccuagaaauuccccacccuga

SEQ ID NO: 1848240 - RNA, 15 nt, Human
guccuacucuguguc

SEQ ID NO: 1848241 - RNA, 23 nt, Human
guccuacucugugucaggugggg

SEQ ID NO: 1848242 - RNA, 16 nt, Human
gucccugguggcagcu

SEQ ID NO: 1848243 - RNA, 17 nt, Human
gucccugguggcagcuc

SEQ ID NO: 1848244 - RNA, 13 nt, Human
guccuacucugug

SEQ ID NO: 1848245 - RNA, 12 nt, Human
gucccagugccg

SEQ ID NO: 1848246 - RNA, 13 nt, Human
gucucgugguagg

SEQ ID NO: 1848247 - RNA, 14 nt, Human
gucucuucuccacu

SEQ ID NO: 1848248 - RNA, 16 nt, Human
gucucuucuccacugg

SEQ ID NO: 1848249 - RNA, 15 nt, Human
gucucuucuccacug

SEQ ID NO: 1848250 - RNA, 13 nt, Human
gucugacccacug

SEQ ID NO: 1848251 - RNA, 14 nt, Human
gucugacccacugc

SEQ ID NO: 1848252 - RNA, 17 nt, Human
gucucuucuccacugga

SEQ ID NO: 1848253 - RNA, 15 nt, Human
gucugacccacugcu

SEQ ID NO: 1848254 - RNA, 18 nt, Human
gucugaggaauccagacc

SEQ ID NO: 1848255 - RNA, 19 nt, Human
gucugaggaauccagaccc

SEQ ID NO: 1848256 - RNA, 20 nt, Human
gucugauucccaagcucugc

SEQ ID NO: 1848257 - RNA, 21 nt, Human
gucugauucccaagcucugcu

SEQ ID NO: 1848258 - RNA, 17 nt, Human
gucugauucccaagcuc

SEQ ID NO: 1848259 - RNA, 18 nt, Human
gucugauucccaagcucu

SEQ ID NO: 1848260 - RNA, 19 nt, Human
gucugauucccaagcucug

SEQ ID NO: 1848261 - RNA, 21 nt, Human
gucugaggaauccagacccgg

SEQ ID NO: 1848262 - RNA, 20 nt, Human
gucucacuauguugcccagg

SEQ ID NO: 1848263 - RNA, 21 nt, Human
gucucacuauguugcccaggc

SEQ ID NO: 1848264 - RNA, 13 nt, Human
gucucacuguugc

SEQ ID NO: 1848265 - RNA, 23 nt, Human
gucucacuauguugcccaggcag

SEQ ID NO: 1848266 - RNA, 16 nt, Human
gucucacuguugccca

SEQ ID NO: 1848267 - RNA, 17 nt, Human
gucucacuguugcccag

SEQ ID NO: 1848268 - RNA, 18 nt, Human
gucucacuguugcccagg

SEQ ID NO: 1848269 - RNA, 19 nt, Human
gucucacuguugcccaggc

SEQ ID NO: 1848270 - RNA, 20 nt, Human
gucucacuguugcccaggcu

SEQ ID NO: 1848271 - RNA, 21 nt, Human
gucucacuguugcccaggcug

SEQ ID NO: 1848272 - RNA, 22 nt, Human
gucucacuguugcccaggcugg

SEQ ID NO: 1848273 - RNA, 23 nt, Human
gucucacuguugcccaggcuggc

SEQ ID NO: 1848274 - RNA, 15 nt, Human
gucuacacugugcug

SEQ ID NO: 1848275 - RNA, 17 nt, Human
guccuuaccagcagagc

SEQ ID NO: 1848276 - RNA, 16 nt, Human
guccuuaccagcagag

SEQ ID NO: 1848277 - RNA, 15 nt, Human
guccuuaccagcaga

SEQ ID NO: 1848278 - RNA, 20 nt, Human
gugauucucaugccucagcc

SEQ ID NO: 1848279 - RNA, 14 nt, Human
gugauucuccugcc

SEQ ID NO: 1848280 - RNA, 16 nt, Human
gugauucuccugccuc

SEQ ID NO: 1848281 - RNA, 17 nt, Human
gugauucuccugccuca

SEQ ID NO: 1848282 - RNA, 18 nt, Human
gugauucuccugccucag

SEQ ID NO: 1848283 - RNA, 19 nt, Human
gugauucuccugccucagc

SEQ ID NO: 1848284 - RNA, 20 nt, Human
gugauucuccugccucagcc

SEQ ID NO: 1848285 - RNA, 22 nt, Human
gugauucuccugccucagccuc

SEQ ID NO: 1848286 - RNA, 16 nt, Human
gugauuuugcuguaga

SEQ ID NO: 1848287 - RNA, 13 nt, Human
gugauucuccugc

SEQ ID NO: 1848288 - RNA, 23 nt, Human
gugauucuccugccucagccucc

SEQ ID NO: 1848289 - RNA, 20 nt, Human
gugauucacagugugaaucu

SEQ ID NO: 1848290 - RNA, 23 nt, Human
gugauccucccaccucagccucc

SEQ ID NO: 1848291 - RNA, 20 nt, Human
gugauccucccaccucagcc

SEQ ID NO: 1848292 - RNA, 22 nt, Human
gugauccucccaccucagccuc

SEQ ID NO: 1848293 - RNA, 14 nt, Human
gugauccacucgcc

SEQ ID NO: 1848294 - RNA, 14 nt, Human
gugauccucccacc

SEQ ID NO: 1848295 - RNA, 15 nt, Human
gugauccucccaccu

SEQ ID NO: 1848296 - RNA, 18 nt, Human
gugauccucccaccucag

SEQ ID NO: 1848297 - RNA, 11 nt, Human
gugaggccaga

SEQ ID NO: 1848298 - RNA, 23 nt, Human
gugaggauuaaauaauguaaaua

SEQ ID NO: 1848299 - RNA, 13 nt, Human
gugaggccagaga

SEQ ID NO: 1848300 - RNA, 15 nt, Human
gugauccacccaccu

SEQ ID NO: 1848301 - RNA, 18 nt, Human
gugauccacccaccucag

SEQ ID NO: 1848302 - RNA, 20 nt, Human
gugauccacccaccucagcc

SEQ ID NO: 1848303 - RNA, 23 nt, Human
gugcccaagaauagaugcugacu

SEQ ID NO: 1848304 - RNA, 20 nt, Human
gugcccacaggaucagucug

SEQ ID NO: 1848305 - RNA, 13 nt, Human
gugcauaccacuu

SEQ ID NO: 1848306 - RNA, 14 nt, Human
gugcauaccacuuu

SEQ ID NO: 1848307 - RNA, 21 nt, Human
gugcauaccacuuuuguucuu

SEQ ID NO: 1848308 - RNA, 15 nt, Human
gugcaucucagccca

SEQ ID NO: 1848309 - RNA, 18 nt, Human
gugcaucucagcccacau

SEQ ID NO: 1848310 - RNA, 14 nt, Human
gugcaucucagccc

SEQ ID NO: 1848311 - RNA, 18 nt, Human
gugcaugcagcaucuaag

SEQ ID NO: 1848312 - RNA, 20 nt, Human
gugccagguuuuuggucuga

SEQ ID NO: 1848313 - RNA, 22 nt, Human
gugccagguuuuuggucugacc

SEQ ID NO: 1848314 - RNA, 22 nt, Human
gugcaaaguucccuacuuccug

SEQ ID NO: 1848315 - RNA, 19 nt, Human
gugcauaaguuaacuucca

SEQ ID NO: 1848316 - RNA, 14 nt, Human
gugaaucagagcac

SEQ ID NO: 1848317 - RNA, 18 nt, Human
gugaaucacguaaagcua

SEQ ID NO: 1848318 - RNA, 16 nt, Human
gugaaucacguaaagc

SEQ ID NO: 1848319 - RNA, 19 nt, Human
gugaaaggaaagagggagg

SEQ ID NO: 1848320 - RNA, 13 nt, Human
gugaaaucauuca

SEQ ID NO: 1848321 - RNA, 20 nt, Human
gugaaauuauucauaauuau

SEQ ID NO: 1848322 - RNA, 18 nt, Human
gugaaauuauucauaauu

SEQ ID NO: 1848323 - RNA, 23 nt, Human
gugaaaagaaaaaugagccuggc

SEQ ID NO: 1848324 - RNA, 14 nt, Human
gugaaaagaaaaau

SEQ ID NO: 1848325 - RNA, 16 nt, Human
gugaaaaugugugugu

SEQ ID NO: 1848326 - RNA, 12 nt, Human
gugaaacuggau

SEQ ID NO: 1848327 - RNA, 19 nt, Human
gugaaagaaaauaacaaua

SEQ ID NO: 1848328 - RNA, 16 nt, Human
gugacugaauuucuuu

SEQ ID NO: 1848329 - RNA, 18 nt, Human
gugacugaauuucuuuug

SEQ ID NO: 1848330 - RNA, 15 nt, Human
gugacugaauuucuu

SEQ ID NO: 1848331 - RNA, 16 nt, Human
gugaccucagcuuuga

SEQ ID NO: 1848332 - RNA, 16 nt, Human
gugacaacacuugugu

SEQ ID NO: 1848333 - RNA, 17 nt, Human
gugagcaggcugugagu

SEQ ID NO: 1848334 - RNA, 17 nt, Human
gugacugaucucucgug

SEQ ID NO: 1848335 - RNA, 15 nt, Human
gugagccaccacgcc

SEQ ID NO: 1848336 - RNA, 15 nt, Human
gugagccaccgugcc

SEQ ID NO: 1848337 - RNA, 16 nt, Human
gugagccaccacgccc

SEQ ID NO: 1848338 - RNA, 21 nt, Human
gugagccaccgugccuggcca

SEQ ID NO: 1848339 - RNA, 17 nt, Human
gugagccaccgugccug

SEQ ID NO: 1848340 - RNA, 13 nt, Human
gugagccacugca

SEQ ID NO: 1848341 - RNA, 19 nt, Human
gugaggaagccgcuggggc

SEQ ID NO: 1848342 - RNA, 16 nt, Human
gugaggaagccgcugg

SEQ ID NO: 1848343 - RNA, 11 nt, Human
gugaggaagcc

SEQ ID NO: 1848344 - RNA, 16 nt, Human
gugagcuccuaagcca

SEQ ID NO: 1848345 - RNA, 22 nt, Human
gugagccaccgugccuggccac

SEQ ID NO: 1848346 - RNA, 14 nt, Human
gugagccacugcac

SEQ ID NO: 1848347 - RNA, 14 nt, Human
gugagcuacaaaug

SEQ ID NO: 1848348 - RNA, 21 nt, Human
guggccacuccagaccccugg

SEQ ID NO: 1848349 - RNA, 14 nt, Human
guggccaaguucuu

SEQ ID NO: 1848350 - RNA, 19 nt, Human
guggcagugggagcugccu

SEQ ID NO: 1848351 - RNA, 21 nt, Human
guggcagugggagcugccugu

SEQ ID NO: 1848352 - RNA, 11 nt, Human
guggcagucug

SEQ ID NO: 1848353 - RNA, 15 nt, Human
guggcagugggagcu

SEQ ID NO: 1848354 - RNA, 16 nt, Human
guggcagugggagcug

SEQ ID NO: 1848355 - RNA, 17 nt, Human
guggcagugggagcugc

SEQ ID NO: 1848356 - RNA, 19 nt, Human
guggcagcugcgguccacc

SEQ ID NO: 1848357 - RNA, 20 nt, Human
guggaugccugguggcagcu

SEQ ID NO: 1848358 - RNA, 21 nt, Human
guggcagcugcgguccaccca

SEQ ID NO: 1848359 - RNA, 22 nt, Human
guggcagcugcgguccacccag

SEQ ID NO: 1848360 - RNA, 23 nt, Human
guggcagcugcgguccacccagg

SEQ ID NO: 1848361 - RNA, 12 nt, Human
guggcagcugcu

SEQ ID NO: 1848362 - RNA, 13 nt, Human
guggcagcugcuu

SEQ ID NO: 1848363 - RNA, 19 nt, Human
guggcagcugcuuuugucu

SEQ ID NO: 1848364 - RNA, 18 nt, Human
guggagaggcccggccuc

SEQ ID NO: 1848365 - RNA, 20 nt, Human
guggagaagcggcuggcagc

SEQ ID NO: 1848366 - RNA, 13 nt, Human
guggacuuuuauu

SEQ ID NO: 1848367 - RNA, 22 nt, Human
guggaacguuuuuccuguucuu

SEQ ID NO: 1848368 - RNA, 17 nt, Human
guggaguucaucuugaa

SEQ ID NO: 1848369 - RNA, 16 nt, Human
guggaugccugguggc

SEQ ID NO: 1848370 - RNA, 18 nt, Human
guggaugccugguggcag

SEQ ID NO: 1848371 - RNA, 19 nt, Human
gugcugagucugaaggcug

SEQ ID NO: 1848372 - RNA, 18 nt, Human
gugcugagucugaaggcu

SEQ ID NO: 1848373 - RNA, 17 nt, Human
gugcugagucugaaggc

SEQ ID NO: 1848374 - RNA, 16 nt, Human
gugcugagucugaagg

SEQ ID NO: 1848375 - RNA, 12 nt, Human
gugcugagucug

SEQ ID NO: 1848376 - RNA, 12 nt, Human
gugcugcauuua

SEQ ID NO: 1848377 - RNA, 19 nt, Human
gugcugcauuuaaaagaua

SEQ ID NO: 1848378 - RNA, 20 nt, Human
gugcugcauuuaaaagauac

SEQ ID NO: 1848379 - RNA, 12 nt, Human
gugcugccacac

SEQ ID NO: 1848380 - RNA, 15 nt, Human
gugcugccauccagg

SEQ ID NO: 1848381 - RNA, 18 nt, Human
gugcugccauccagguuc

SEQ ID NO: 1848382 - RNA, 19 nt, Human
gugcugccauccagguuca

SEQ ID NO: 1848383 - RNA, 20 nt, Human
gugcugaaugguuuucaaaa

SEQ ID NO: 1848384 - RNA, 19 nt, Human
gugcugaaugguuuucaaa

SEQ ID NO: 1848385 - RNA, 23 nt, Human
gugcugaaugguuuucaaaauaa

SEQ ID NO: 1848386 - RNA, 17 nt, Human
gugcucuggacaggcau

SEQ ID NO: 1848387 - RNA, 18 nt, Human
gugcucuggacaggcaug

SEQ ID NO: 1848388 - RNA, 21 nt, Human
gugccuuggggacaagagcag

SEQ ID NO: 1848389 - RNA, 22 nt, Human
gugccgagaaggaagccuccca

SEQ ID NO: 1848390 - RNA, 15 nt, Human
gugcucuggacaggc

SEQ ID NO: 1848391 - RNA, 16 nt, Human
gugcucuggacaggca

SEQ ID NO: 1848392 - RNA, 18 nt, Human
guggaaaaauagccugcc

SEQ ID NO: 1848393 - RNA, 18 nt, Human
gugcuuauguaugaggua

SEQ ID NO: 1848394 - RNA, 15 nt, Human
gugcuuggaggaagg

SEQ ID NO: 1848395 - RNA, 13 nt, Human
gugcuuggaggaa

SEQ ID NO: 1848396 - RNA, 12 nt, Human
gugcuuggagga

SEQ ID NO: 1848397 - RNA, 11 nt, Human
gugcugcccug

SEQ ID NO: 1848398 - RNA, 21 nt, Human
gugcugccacacuucaggcuc

SEQ ID NO: 1848399 - RNA, 22 nt, Human
gugcugccauccagguucagcu

SEQ ID NO: 1848400 - RNA, 19 nt, Human
uauauguuuuaagaggcag

SEQ ID NO: 1848401 - RNA, 16 nt, Human
uaucuaaauguugaaa

SEQ ID NO: 1848402 - RNA, 18 nt, Human
uaucguaaaauuaagaaa

SEQ ID NO: 1848403 - RNA, 15 nt, Human
uaucguaaaauuaag

SEQ ID NO: 1848404 - RNA, 15 nt, Human
uauccuucagccuga

SEQ ID NO: 1848405 - RNA, 14 nt, Human
uauccuucagccug

SEQ ID NO: 1848406 - RNA, 16 nt, Human
uaucgucacugcuuaa

SEQ ID NO: 1848407 - RNA, 21 nt, Human
uaucuaauauguaacaagcca

SEQ ID NO: 1848408 - RNA, 22 nt, Human
uaugacacaugcaaggucauuu

SEQ ID NO: 1848409 - RNA, 12 nt, Human
uaugacacaugc

SEQ ID NO: 1848410 - RNA, 19 nt, Human
uaugaccacacuccagcug

SEQ ID NO: 1848411 - RNA, 14 nt, Human
uaugaccacacucc

SEQ ID NO: 1848412 - RNA, 12 nt, Human
uaugaauaacau

SEQ ID NO: 1848413 - RNA, 14 nt, Human
uaucuugaagacuu

SEQ ID NO: 1848414 - RNA, 18 nt, Human
uaugaauaaagacaccua

SEQ ID NO: 1848415 - RNA, 20 nt, Human
uaugaaguuuuuuuuauaca

SEQ ID NO: 1848416 - RNA, 20 nt, Human
uaucugucauuugagcaggg

SEQ ID NO: 1848417 - RNA, 21 nt, Human
uaucugucauuugagcagggc

SEQ ID NO: 1848418 - RNA, 23 nt, Human
uaucugucauuugagcagggcuc

SEQ ID NO: 1848419 - RNA, 19 nt, Human
uauggaacacucugagacu

SEQ ID NO: 1848420 - RNA, 17 nt, Human
uauggacaaugacccag

SEQ ID NO: 1848421 - RNA, 18 nt, Human
uauggaacacucugagac

SEQ ID NO: 1848422 - RNA, 17 nt, Human
uauggaacacucugaga

SEQ ID NO: 1848423 - RNA, 16 nt, Human
uauggaacacucugag

SEQ ID NO: 1848424 - RNA, 13 nt, Human
uauggaacacucu

SEQ ID NO: 1848425 - RNA, 22 nt, Human
uaugcuuauacacuuacacuuu

SEQ ID NO: 1848426 - RNA, 13 nt, Human
uaugcaugaagua

SEQ ID NO: 1848427 - RNA, 18 nt, Human
uaugcaugaaguaauaug

SEQ ID NO: 1848428 - RNA, 20 nt, Human
uaugcauauuauuuuauguu

SEQ ID NO: 1848429 - RNA, 18 nt, Human
uaugcagagguccacaac

SEQ ID NO: 1848430 - RNA, 18 nt, Human
uaugcaaucaaaucugcu

SEQ ID NO: 1848431 - RNA, 13 nt, Human
uaugcacacauuu

SEQ ID NO: 1848432 - RNA, 14 nt, Human
uaugcacacauuuu

SEQ ID NO: 1848433 - RNA, 23 nt, Human
uaugauuuuuaaagaaaaguuuu

SEQ ID NO: 1848434 - RNA, 18 nt, Human
uaugauuuggaaaauaaa

SEQ ID NO: 1848435 - RNA, 12 nt, Human
uaugauuuuuaa

SEQ ID NO: 1848436 - RNA, 17 nt, Human
uaugauuuggaaaauaa

SEQ ID NO: 1848437 - RNA, 15 nt, Human
uaugauuuggaaaau

SEQ ID NO: 1848438 - RNA, 23 nt, Human
uaugacuccagaauuucccaaag

SEQ ID NO: 1848439 - RNA, 17 nt, Human
uaugacuccagaauuuc

SEQ ID NO: 1848440 - RNA, 16 nt, Human
uaugacuccagaauuu

SEQ ID NO: 1848441 - RNA, 15 nt, Human
uauaauucacauugu

SEQ ID NO: 1848442 - RNA, 18 nt, Human
uauacgauaaauaacuuu

SEQ ID NO: 1848443 - RNA, 23 nt, Human
uauauaaauuuuuuuuguuucau

SEQ ID NO: 1848444 - RNA, 21 nt, Human
uauaugcucugcauguuacau

SEQ ID NO: 1848445 - RNA, 13 nt, Human
uaguaucaaaaga

SEQ ID NO: 1848446 - RNA, 21 nt, Human
uaggugauccacucgccuuca

SEQ ID NO: 1848447 - RNA, 23 nt, Human
uaggugacagagugagacucugu

SEQ ID NO: 1848448 - RNA, 20 nt, Human
uaguugcaacuuuguauaaa

SEQ ID NO: 1848449 - RNA, 13 nt, Human
uaguguucauaaa

SEQ ID NO: 1848450 - RNA, 15 nt, Human
uaggccuggccagau

SEQ ID NO: 1848451 - RNA, 18 nt, Human
uaggccuggccagaugca

SEQ ID NO: 1848452 - RNA, 16 nt, Human
uaggccaugggacagg

SEQ ID NO: 1848453 - RNA, 18 nt, Human
uaggccaugggacaggga

SEQ ID NO: 1848454 - RNA, 16 nt, Human
uaggaauuguguuuau

SEQ ID NO: 1848455 - RNA, 12 nt, Human
uaggaauugacc

SEQ ID NO: 1848456 - RNA, 21 nt, Human
uagggaaaaaccagcguguga

SEQ ID NO: 1848457 - RNA, 20 nt, Human
uagggaaaaaccagcgugug

SEQ ID NO: 1848458 - RNA, 19 nt, Human
uagggaaaaaccagcgugu

SEQ ID NO: 1848459 - RNA, 20 nt, Human
uagguauaaguggugugugu

SEQ ID NO: 1848460 - RNA, 16 nt, Human
uagguaaauuacaguu

SEQ ID NO: 1848461 - RNA, 15 nt, Human
uaggucucaauaccu

SEQ ID NO: 1848462 - RNA, 16 nt, Human
uaggucagugcaaaua

SEQ ID NO: 1848463 - RNA, 17 nt, Human
ucaaggauccugagcca

SEQ ID NO: 1848464 - RNA, 16 nt, Human
ucaaggauccugagcc

SEQ ID NO: 1848465 - RNA, 15 nt, Human
ucaaggauccugagc

SEQ ID NO: 1848466 - RNA, 14 nt, Human
ucaaggauccugag

SEQ ID NO: 1848467 - RNA, 13 nt, Human
ucaaggauccuga

SEQ ID NO: 1848468 - RNA, 20 nt, Human
ucaagccaccaacauacucc

SEQ ID NO: 1848469 - RNA, 12 nt, Human
ucaagccaccaa

SEQ ID NO: 1848470 - RNA, 21 nt, Human
ucaagcgauucuucugcuuca

SEQ ID NO: 1848471 - RNA, 18 nt, Human
ucaagcgauucuucugcu

SEQ ID NO: 1848472 - RNA, 19 nt, Human
ucaagcgauucuucugcuu

SEQ ID NO: 1848473 - RNA, 22 nt, Human
ucaacucccugccccccagccc

SEQ ID NO: 1848474 - RNA, 21 nt, Human
ucaacucccugccccccagcc

SEQ ID NO: 1848475 - RNA, 15 nt, Human
ucaacucccugcccc

SEQ ID NO: 1848476 - RNA, 14 nt, Human
ucaacucccugccc

SEQ ID NO: 1848477 - RNA, 18 nt, Human
ucaacugaccagccucca

SEQ ID NO: 1848478 - RNA, 24 nt, Human
ucaacugaccagccuccaugcugc

SEQ ID NO: 1848479 - RNA, 20 nt, Human
ucaacucuccuccagaguca

SEQ ID NO: 1848480 - RNA, 16 nt, Human
ucaaccuccugggcua

SEQ ID NO: 1848481 - RNA, 20 nt, Human
ucaaccccuucgcuccugug

SEQ ID NO: 1848482 - RNA, 15 nt, Human
ucaaccuccugggcu

SEQ ID NO: 1848483 - RNA, 18 nt, Human
ucaaccccuucgcuccug

SEQ ID NO: 1848484 - RNA, 19 nt, Human
ucaaccccuucgcuccugu

SEQ ID NO: 1848485 - RNA, 23 nt, Human
ucaaagagguuuuaaaaaaaucc

SEQ ID NO: 1848486 - RNA, 12 nt, Human
ucaaagagguuu

SEQ ID NO: 1848487 - RNA, 20 nt, Human
ucaaaccccgaccaccugcc

SEQ ID NO: 1848488 - RNA, 19 nt, Human
ucaaaccccgaccaccugc

SEQ ID NO: 1848489 - RNA, 23 nt, Human
ucaaaccccgaccaccugcccaa

SEQ ID NO: 1848490 - RNA, 19 nt, Human
ucacaggagggagggggaa

SEQ ID NO: 1848491 - RNA, 23 nt, Human
ucacaggacucugccuccucuuc

SEQ ID NO: 1848492 - RNA, 19 nt, Human
ucacaggacucugccuccu

SEQ ID NO: 1848493 - RNA, 16 nt, Human
ucacaggacucugccu

SEQ ID NO: 1848494 - RNA, 18 nt, Human
ucacaggacucugccucc

SEQ ID NO: 1848495 - RNA, 17 nt, Human
ucacaggacucugccuc

SEQ ID NO: 1848496 - RNA, 23 nt, Human
ucacacaugagcaucaggccagg

SEQ ID NO: 1848497 - RNA, 22 nt, Human
ucacacaugagcaucaggccag

SEQ ID NO: 1848498 - RNA, 15 nt, Human
ucacacacuuuggcu

SEQ ID NO: 1848499 - RNA, 22 nt, Human
ucacaagacccaaaaggcagaa

SEQ ID NO: 1848500 - RNA, 14 nt, Human
ucaccgaaaacgug

SEQ ID NO: 1848501 - RNA, 12 nt, Human
ucacccuuuucu

SEQ ID NO: 1848502 - RNA, 20 nt, Human
ucacccuggggcuaggaaau

SEQ ID NO: 1848503 - RNA, 19 nt, Human
ucacccgcuaagagggagg

SEQ ID NO: 1848504 - RNA, 21 nt, Human
ucaccgaaaacguggcugcuu

SEQ ID NO: 1848505 - RNA, 20 nt, Human
ucaccgaaaacguggcugcu

SEQ ID NO: 1848506 - RNA, 19 nt, Human
ucaccgaaaacguggcugc

SEQ ID NO: 1848507 - RNA, 15 nt, Human
ucaccgaaaacgugg

SEQ ID NO: 1848508 - RNA, 23 nt, Human
ucaccgaaaacguggcugcuuca

SEQ ID NO: 1848509 - RNA, 22 nt, Human
ucaccgaaaacguggcugcuuc

SEQ ID NO: 1848510 - RNA, 18 nt, Human
ucacccgcuaagagggag

SEQ ID NO: 1848511 - RNA, 13 nt, Human
ucaccaagcccag

SEQ ID NO: 1848512 - RNA, 18 nt, Human
ucaccaacgucugugcca

SEQ ID NO: 1848513 - RNA, 17 nt, Human
ucaccaacgucugugcc

SEQ ID NO: 1848514 - RNA, 21 nt, Human
ucaccaaaucagcugcuacua

SEQ ID NO: 1848515 - RNA, 14 nt, Human
ucacauuuauucug

SEQ ID NO: 1848516 - RNA, 22 nt, Human
ucacauuguauucagaguugau

SEQ ID NO: 1848517 - RNA, 12 nt, Human
ucacauuuaaau

SEQ ID NO: 1848518 - RNA, 17 nt, Human
uauuuaugggauccugg

SEQ ID NO: 1848519 - RNA, 22 nt, Human
uauuuauuaaaugcccagcccc

SEQ ID NO: 1848520 - RNA, 22 nt, Human
uauugcugauggugcaaugacc

SEQ ID NO: 1848521 - RNA, 23 nt, Human
uauugcugauggugcaaugaccu

SEQ ID NO: 1848522 - RNA, 15 nt, Human
uauugcuugcacaaa

SEQ ID NO: 1848523 - RNA, 13 nt, Human
uauugcccacgcu

SEQ ID NO: 1848524 - RNA, 14 nt, Human
uauugcccacgcug

SEQ ID NO: 1848525 - RNA, 15 nt, Human
uauugcccacgcugg

SEQ ID NO: 1848526 - RNA, 20 nt, Human
uauugauaugcuuauacacu

SEQ ID NO: 1848527 - RNA, 22 nt, Human
uauugcagcgauuaauaacagg

SEQ ID NO: 1848528 - RNA, 19 nt, Human
uauuaaaugcccagccccu

SEQ ID NO: 1848529 - RNA, 17 nt, Human
uauuaaaugcccagccc

SEQ ID NO: 1848530 - RNA, 15 nt, Human
uauuaaaugcccagc

SEQ ID NO: 1848531 - RNA, 16 nt, Human
uauuaagaaagacuau

SEQ ID NO: 1848532 - RNA, 17 nt, Human
uauguucuaagaaguga

SEQ ID NO: 1848533 - RNA, 22 nt, Human
uauguucuuaguggauguucug

SEQ ID NO: 1848534 - RNA, 18 nt, Human
uauguugguagauucuaa

SEQ ID NO: 1848535 - RNA, 17 nt, Human
uauguugaagccuuugu

SEQ ID NO: 1848536 - RNA, 21 nt, Human
uauguugcccaggcaggucuu

SEQ ID NO: 1848537 - RNA, 13 nt, Human
uauguguguuuua

SEQ ID NO: 1848538 - RNA, 14 nt, Human
uauggaggcaggag

SEQ ID NO: 1848539 - RNA, 20 nt, Human
uauuauggaggcaggaguuu

SEQ ID NO: 1848540 - RNA, 14 nt, Human
uauuaaggaagaca

SEQ ID NO: 1848541 - RNA, 15 nt, Human
uauuaaguuguuaau

SEQ ID NO: 1848542 - RNA, 12 nt, Human
uauuauaccuuu

SEQ ID NO: 1848543 - RNA, 13 nt, Human
uauuauaccuuuu

SEQ ID NO: 1848544 - RNA, 14 nt, Human
uauuauaccuuuuu

SEQ ID NO: 1848545 - RNA, 17 nt, Human
uauuauauuuacaaaug

SEQ ID NO: 1848546 - RNA, 16 nt, Human
ucaucuccccaucauu

SEQ ID NO: 1848547 - RNA, 18 nt, Human
ucauccacugugccaugu

SEQ ID NO: 1848548 - RNA, 14 nt, Human
ucauccacugugcc

SEQ ID NO: 1848549 - RNA, 17 nt, Human
ucauccacugugccaug

SEQ ID NO: 1848550 - RNA, 20 nt, Human
ucaguguacauggaauaaca

SEQ ID NO: 1848551 - RNA, 11 nt, Human
ucauagcagcu

SEQ ID NO: 1848552 - RNA, 12 nt, Human
ucauagcagcuu

SEQ ID NO: 1848553 - RNA, 17 nt, Human
ucaucaaugaaugaaug

SEQ ID NO: 1848554 - RNA, 14 nt, Human
ucaucauccuaagc

SEQ ID NO: 1848555 - RNA, 14 nt, Human
ucauggugcucaga

SEQ ID NO: 1848556 - RNA, 16 nt, Human
ucauuaggauggcuag

SEQ ID NO: 1848557 - RNA, 13 nt, Human
uccaaaguacacu

SEQ ID NO: 1848558 - RNA, 21 nt, Human
ucaggcucuucuccuuucaca

SEQ ID NO: 1848559 - RNA, 16 nt, Human
ucaggcucuucuccuu

SEQ ID NO: 1848560 - RNA, 12 nt, Human
ucaggucccugc

SEQ ID NO: 1848561 - RNA, 23 nt, Human
ucaggugagaagcagaggaagga

SEQ ID NO: 1848562 - RNA, 16 nt, Human
ucaggugauccaccca

SEQ ID NO: 1848563 - RNA, 23 nt, Human
ucaggugauccacccaccucagc

SEQ ID NO: 1848564 - RNA, 18 nt, Human
ucagguggggcagcuuga

SEQ ID NO: 1848565 - RNA, 19 nt, Human
ucagguggggcagcuugag

SEQ ID NO: 1848566 - RNA, 21 nt, Human
ucagucugauucccaagcucu

SEQ ID NO: 1848567 - RNA, 22 nt, Human
ucagucugauucccaagcucug

SEQ ID NO: 1848568 - RNA, 23 nt, Human
ucagucugauucccaagcucugc

SEQ ID NO: 1848569 - RNA, 16 nt, Human
ucagucucccucccuu

SEQ ID NO: 1848570 - RNA, 20 nt, Human
ucagguggggcagcuugagg

SEQ ID NO: 1848571 - RNA, 23 nt, Human
ucaggaagcucagggccuggcuc

SEQ ID NO: 1848572 - RNA, 23 nt, Human
ucagcucugcaagaauugaagca

SEQ ID NO: 1848573 - RNA, 23 nt, Human
ucagcuccagcucaccagcccca

SEQ ID NO: 1848574 - RNA, 24 nt, Human
ucagcuccagcucaccagccccag

SEQ ID NO: 1848575 - RNA, 15 nt, Human
ucaggagcccuggga

SEQ ID NO: 1848576 - RNA, 14 nt, Human
ucaggagcccuggg

SEQ ID NO: 1848577 - RNA, 12 nt, Human
ucaggagcccug

SEQ ID NO: 1848578 - RNA, 11 nt, Human
ucaggagcccu

SEQ ID NO: 1848579 - RNA, 20 nt, Human
ucaggaucaaaccccgacca

SEQ ID NO: 1848580 - RNA, 15 nt, Human
ucaggcucuucuccu

SEQ ID NO: 1848581 - RNA, 21 nt, Human
ucaggccugggggcugggcag

SEQ ID NO: 1848582 - RNA, 24 nt, Human
ucccaggcauuccccaggaggcca

SEQ ID NO: 1848583 - RNA, 23 nt, Human
ucccaggcauuccccaggaggcc

SEQ ID NO: 1848584 - RNA, 23 nt, Human
ucccagcugugcucuggacaggc

SEQ ID NO: 1848585 - RNA, 21 nt, Human
ucccagcugugcucuggacag

SEQ ID NO: 1848586 - RNA, 22 nt, Human
ucccagcugugcucuggacagg

SEQ ID NO: 1848587 - RNA, 15 nt, Human
ucccaucuuccaagg

SEQ ID NO: 1848588 - RNA, 16 nt, Human
ucccaggcgccccuuc

SEQ ID NO: 1848589 - RNA, 21 nt, Human
ucccaucugugaaaggaaaga

SEQ ID NO: 1848590 - RNA, 18 nt, Human
ucccaugagccucagcau

SEQ ID NO: 1848591 - RNA, 19 nt, Human
ucccaugagccucagcauc

SEQ ID NO: 1848592 - RNA, 22 nt, Human
ucccaccucucucacuccuuga

SEQ ID NO: 1848593 - RNA, 20 nt, Human
uccaugugggcuaguugggc

SEQ ID NO: 1848594 - RNA, 13 nt, Human
ucccaccuuggcu

SEQ ID NO: 1848595 - RNA, 16 nt, Human
ucccaccuuggcugca

SEQ ID NO: 1848596 - RNA, 17 nt, Human
ucccaccuuggcugcag

SEQ ID NO: 1848597 - RNA, 20 nt, Human
ucccagcugugcucuggaca

SEQ ID NO: 1848598 - RNA, 18 nt, Human
ucccaccuuggcugcagg

SEQ ID NO: 1848599 - RNA, 14 nt, Human
uccccaggaggcca

SEQ ID NO: 1848600 - RNA, 17 nt, Human
uccccaggaggccagcc

SEQ ID NO: 1848601 - RNA, 17 nt, Human
ucccccagccccauccu

SEQ ID NO: 1848602 - RNA, 16 nt, Human
uccccaggaggccagc

SEQ ID NO: 1848603 - RNA, 15 nt, Human
uccccaggaggccag

SEQ ID NO: 1848604 - RNA, 21 nt, Human
ucccccagccccauccucugu

SEQ ID NO: 1848605 - RNA, 20 nt, Human
ucccccagccccauccucug

SEQ ID NO: 1848606 - RNA, 22 nt, Human
ucccccagccccauccucugua

SEQ ID NO: 1848607 - RNA, 19 nt, Human
uccccagauugcaacaggc

SEQ ID NO: 1848608 - RNA, 20 nt, Human
uccccagauugcaacaggcu

SEQ ID NO: 1848609 - RNA, 22 nt, Human
uccccagauugcaacaggcugg

SEQ ID NO: 1848610 - RNA, 23 nt, Human
uccccagauugcaacaggcuggg

SEQ ID NO: 1848611 - RNA, 20 nt, Human
uccccagcaagugagagcug

SEQ ID NO: 1848612 - RNA, 21 nt, Human
uccccagcaagugagagcugg

SEQ ID NO: 1848613 - RNA, 22 nt, Human
uccccagcaagugagagcuggg

SEQ ID NO: 1848614 - RNA, 20 nt, Human
ucccaugagccucagcaucc

SEQ ID NO: 1848615 - RNA, 13 nt, Human
uccccagauugca

SEQ ID NO: 1848616 - RNA, 18 nt, Human
uccccagauugcaacagg

SEQ ID NO: 1848617 - RNA, 21 nt, Human
uccacuuggucugugagaugc

SEQ ID NO: 1848618 - RNA, 17 nt, Human
uccacuuggucugugag

SEQ ID NO: 1848619 - RNA, 14 nt, Human
uccaaaguacacug

SEQ ID NO: 1848620 - RNA, 16 nt, Human
uccaaaguacacuguu

SEQ ID NO: 1848621 - RNA, 19 nt, Human
uccacuuucuagccagagg

SEQ ID NO: 1848622 - RNA, 23 nt, Human
uccacuuggucugugagaugcua

SEQ ID NO: 1848623 - RNA, 21 nt, Human
uccacuuucuagccagaggag

SEQ ID NO: 1848624 - RNA, 20 nt, Human
uccacuuucuagccagagga

SEQ ID NO: 1848625 - RNA, 23 nt, Human
uccagaaagaaaacuuguauuau

SEQ ID NO: 1848626 - RNA, 15 nt, Human
uccaggagcagccac

SEQ ID NO: 1848627 - RNA, 14 nt, Human
uccaggagcagcca

SEQ ID NO: 1848628 - RNA, 13 nt, Human
uccaggagcagcc

SEQ ID NO: 1848629 - RNA, 12 nt, Human
uccaggagcagc

SEQ ID NO: 1848630 - RNA, 20 nt, Human
uccaggggugggacacccug

SEQ ID NO: 1848631 - RNA, 19 nt, Human
uccaggggugggacacccu

SEQ ID NO: 1848632 - RNA, 22 nt, Human
uccagcaauucuccugccucag

SEQ ID NO: 1848633 - RNA, 22 nt, Human
uccaggggugggacacccugug

SEQ ID NO: 1848634 - RNA, 20 nt, Human
uccagguuuaagcuguuacu

SEQ ID NO: 1848635 - RNA, 22 nt, Human
uccauaaucuggacuccucugu

SEQ ID NO: 1848636 - RNA, 15 nt, Human
uccaugcugccucca

SEQ ID NO: 1848637 - RNA, 14 nt, Human
uccaugcugccucc

SEQ ID NO: 1848638 - RNA, 20 nt, Human
uccaugggccauaugaaaag

SEQ ID NO: 1848639 - RNA, 21 nt, Human
uccauaaucuggacuccucug

SEQ ID NO: 1848640 - RNA, 15 nt, Human
uccauagagagcaag

SEQ ID NO: 1848641 - RNA, 14 nt, Human
uccauagagagcaa

SEQ ID NO: 1848642 - RNA, 14 nt, Human
uccaucaggccacu

SEQ ID NO: 1848643 - RNA, 17 nt, Human
uccugccccugagccca

SEQ ID NO: 1848644 - RNA, 18 nt, Human
uccugccccugagcccau

SEQ ID NO: 1848645 - RNA, 10 nt, Human
uccugcccug

SEQ ID NO: 1848646 - RNA, 14 nt, Human
uccugccaggcaug

SEQ ID NO: 1848647 - RNA, 13 nt, Human
uccugccaggcau

SEQ ID NO: 1848648 - RNA, 16 nt, Human
uccugccaccacgccc

SEQ ID NO: 1848649 - RNA, 11 nt, Human
uccugccacca

SEQ ID NO: 1848650 - RNA, 19 nt, Human
uccugaggcuccacuuggu

SEQ ID NO: 1848651 - RNA, 20 nt, Human
uccugaggcuccacuugguc

SEQ ID NO: 1848652 - RNA, 21 nt, Human
uccugaggcuccacuuggucu

SEQ ID NO: 1848653 - RNA, 16 nt, Human
uccugcauuugugaaa

SEQ ID NO: 1848654 - RNA, 17 nt, Human
uccugcccuuaccugcc

SEQ ID NO: 1848655 - RNA, 21 nt, Human
uccugcccugggaggcaguga

SEQ ID NO: 1848656 - RNA, 15 nt, Human
uccugcccugggagg

SEQ ID NO: 1848657 - RNA, 14 nt, Human
uccugcccugggag

SEQ ID NO: 1848658 - RNA, 12 nt, Human
uccugcccuggg

SEQ ID NO: 1848659 - RNA, 11 nt, Human
uccugcccugg

SEQ ID NO: 1848660 - RNA, 20 nt, Human
uccugcccuuaccugccagg

SEQ ID NO: 1848661 - RNA, 14 nt, Human
uccuggaguucugg

SEQ ID NO: 1848662 - RNA, 19 nt, Human
uccugccuaaggcugaacu

SEQ ID NO: 1848663 - RNA, 16 nt, Human
uccugccuaaggcuga

SEQ ID NO: 1848664 - RNA, 13 nt, Human
uccuguagcccua

SEQ ID NO: 1848665 - RNA, 11 nt, Human
uccuguagccc

SEQ ID NO: 1848666 - RNA, 12 nt, Human
uccuggccucaa

SEQ ID NO: 1848667 - RNA, 16 nt, Human
uccuggcacugcuucc

SEQ ID NO: 1848668 - RNA, 13 nt, Human
uccuggcacugcu

SEQ ID NO: 1848669 - RNA, 23 nt, Human
uccuggcacccggccccugcugg

SEQ ID NO: 1848670 - RNA, 15 nt, Human
ucccccuuccaugga

SEQ ID NO: 1848671 - RNA, 22 nt, Human
ucccuucaaccauuccccaugg

SEQ ID NO: 1848672 - RNA, 16 nt, Human
ucccuuccucuuucca

SEQ ID NO: 1848673 - RNA, 15 nt, Human
ucccuuccucuuucc

SEQ ID NO: 1848674 - RNA, 14 nt, Human
uccgccucuugggu

SEQ ID NO: 1848675 - RNA, 21 nt, Human
uccuaagcuauucaguaauaa

SEQ ID NO: 1848676 - RNA, 20 nt, Human
uccuaagcuauucaguaaua

SEQ ID NO: 1848677 - RNA, 18 nt, Human
uccgcuuucuacccagcg

SEQ ID NO: 1848678 - RNA, 20 nt, Human
uccgcuuucuacccagcgag

SEQ ID NO: 1848679 - RNA, 16 nt, Human
uccgcuuucuacccag

SEQ ID NO: 1848680 - RNA, 12 nt, Human
uccucccaccuc

SEQ ID NO: 1848681 - RNA, 13 nt, Human
uccucccaccuca

SEQ ID NO: 1848682 - RNA, 10 nt, Human
uccuccaggu

SEQ ID NO: 1848683 - RNA, 18 nt, Human
uccucauuagcauuuugc

SEQ ID NO: 1848684 - RNA, 17 nt, Human
uccuaucagaaguuucu

SEQ ID NO: 1848685 - RNA, 23 nt, Human
uccuauauuguuuucaguguaca

SEQ ID NO: 1848686 - RNA, 12 nt, Human
uccuaguuccac

SEQ ID NO: 1848687 - RNA, 15 nt, Human
ucuccagccccugga

SEQ ID NO: 1848688 - RNA, 14 nt, Human
ucuccagccccugg

SEQ ID NO: 1848689 - RNA, 13 nt, Human
ucuccagccccug

SEQ ID NO: 1848690 - RNA, 12 nt, Human
ucuccagccccu

SEQ ID NO: 1848691 - RNA, 14 nt, Human
ucuccacugccuuc

SEQ ID NO: 1848692 - RNA, 18 nt, Human
ucuccagccccuggaugc

SEQ ID NO: 1848693 - RNA, 16 nt, Human
ucuccagccccuggau

SEQ ID NO: 1848694 - RNA, 22 nt, Human
ucuccagccccuggaugcagcc

SEQ ID NO: 1848695 - RNA, 14 nt, Human
ucucccucccuugg

SEQ ID NO: 1848696 - RNA, 23 nt, Human
ucucccucagucuggcccuuccu

SEQ ID NO: 1848697 - RNA, 18 nt, Human
ucucccucagucuggccc

SEQ ID NO: 1848698 - RNA, 11 nt, Human
ucuccaggcug

SEQ ID NO: 1848699 - RNA, 12 nt, Human
ucucccccagcc

SEQ ID NO: 1848700 - RNA, 13 nt, Human
ucucccccagccc

SEQ ID NO: 1848701 - RNA, 16 nt, Human
ucuccaccugccaggg

SEQ ID NO: 1848702 - RNA, 15 nt, Human
ucuccaccugccagg

SEQ ID NO: 1848703 - RNA, 14 nt, Human
ucuccaccugccag

SEQ ID NO: 1848704 - RNA, 19 nt, Human
ucuccaccugccagggaca

SEQ ID NO: 1848705 - RNA, 17 nt, Human
ucuccaccugccaggga

SEQ ID NO: 1848706 - RNA, 22 nt, Human
ucuccaccugccagggacagag

SEQ ID NO: 1848707 - RNA, 13 nt, Human
ucuccacuccaga

SEQ ID NO: 1848708 - RNA, 13 nt, Human
ucucaugccucag

SEQ ID NO: 1848709 - RNA, 19 nt, Human
ucucaugccucagccuccu

SEQ ID NO: 1848710 - RNA, 16 nt, Human
ucucaugccucagccu

SEQ ID NO: 1848711 - RNA, 13 nt, Human
ucuccacccugcu

SEQ ID NO: 1848712 - RNA, 17 nt, Human
ucuccacccugcucucc

SEQ ID NO: 1848713 - RNA, 14 nt, Human
ucuccacccugcuc

SEQ ID NO: 1848714 - RNA, 16 nt, Human
ucuccacccugcucuc

SEQ ID NO: 1848715 - RNA, 18 nt, Human
ucucauacucaccucacc

SEQ ID NO: 1848716 - RNA, 16 nt, Human
ucucauacucaccuca

SEQ ID NO: 1848717 - RNA, 19 nt, Human
ucuaugggacucaaugcac

SEQ ID NO: 1848718 - RNA, 12 nt, Human
ucuaugggacuc

SEQ ID NO: 1848719 - RNA, 13 nt, Human
ucuaugggacuca

SEQ ID NO: 1848720 - RNA, 23 nt, Human
ucucaguccaugaagauguagag

SEQ ID NO: 1848721 - RNA, 14 nt, Human
ucuaccuuccugca

SEQ ID NO: 1848722 - RNA, 15 nt, Human
ucuacagaggccaug

SEQ ID NO: 1848723 - RNA, 16 nt, Human
ucuacagaggccaugg

SEQ ID NO: 1848724 - RNA, 21 nt, Human
ucuaggaagacuuuggaaaga

SEQ ID NO: 1848725 - RNA, 19 nt, Human
ucuaggaagacuuuggaaa

SEQ ID NO: 1848726 - RNA, 16 nt, Human
ucuaggaagacuuugg

SEQ ID NO: 1848727 - RNA, 15 nt, Human
ucuaggaagacuuug

SEQ ID NO: 1848728 - RNA, 14 nt, Human
ucuaugacacaugc

SEQ ID NO: 1848729 - RNA, 17 nt, Human
ucuaugacacaugcaag

SEQ ID NO: 1848730 - RNA, 14 nt, Human
ucuaucaccaagga

SEQ ID NO: 1848731 - RNA, 18 nt, Human
ucuaaaggcuaccuuugu

SEQ ID NO: 1848732 - RNA, 17 nt, Human
ucuaaaggcuaccuuug

SEQ ID NO: 1848733 - RNA, 19 nt, Human
ucuaaaggcuaccuuugua

SEQ ID NO: 1848734 - RNA, 20 nt, Human
ucuaaaggcuaccuuuguau

SEQ ID NO: 1848735 - RNA, 16 nt, Human
ucguguccccuauccu

SEQ ID NO: 1848736 - RNA, 14 nt, Human
ucgugguaggacug

SEQ ID NO: 1848737 - RNA, 15 nt, Human
ucgugguaggacugu

SEQ ID NO: 1848738 - RNA, 20 nt, Human
ucgugguaggacuguagaaa

SEQ ID NO: 1848739 - RNA, 18 nt, Human
ucggacuuagcugggaga

SEQ ID NO: 1848740 - RNA, 14 nt, Human
uccuuagaagugga

SEQ ID NO: 1848741 - RNA, 13 nt, Human
ucgugacaacacu

SEQ ID NO: 1848742 - RNA, 23 nt, Human
ugaaucauuuuaccuuugacaaa

SEQ ID NO: 1848743 - RNA, 22 nt, Human
ugaaucauuuuaccuuugacaa

SEQ ID NO: 1848744 - RNA, 15 nt, Human
ugaauaaagacaccu

SEQ ID NO: 1848745 - RNA, 14 nt, Human
ugaauaaagacacc

SEQ ID NO: 1848746 - RNA, 23 nt, Human
ugaaugaugauccuaggcauuug

SEQ ID NO: 1848747 - RNA, 16 nt, Human
ugaauuauuuucucuc

SEQ ID NO: 1848748 - RNA, 20 nt, Human
ugaaggaauaaauugcuccu

SEQ ID NO: 1848749 - RNA, 16 nt, Human
ugaacucugacaacag

SEQ ID NO: 1848750 - RNA, 17 nt, Human
ugaacuccuggccucaa

SEQ ID NO: 1848751 - RNA, 16 nt, Human
ugaaggccccgcccag

SEQ ID NO: 1848752 - RNA, 15 nt, Human
ugaaggccccgccca

SEQ ID NO: 1848753 - RNA, 16 nt, Human
ugaaggagagcccuuc

SEQ ID NO: 1848754 - RNA, 22 nt, Human
ugaaggacauugcggacagcca

SEQ ID NO: 1848755 - RNA, 19 nt, Human
ugaaggacauugcggacag

SEQ ID NO: 1848756 - RNA, 20 nt, Human
ugaaggacauugcggacagc

SEQ ID NO: 1848757 - RNA, 17 nt, Human
ugaaggccccgcccagg

SEQ ID NO: 1848758 - RNA, 20 nt, Human
ugaccgugaggccagagaca

SEQ ID NO: 1848759 - RNA, 16 nt, Human
ugaccgugaggccaga

SEQ ID NO: 1848760 - RNA, 14 nt, Human
ugaccgugaggcca

SEQ ID NO: 1848761 - RNA, 13 nt, Human
ugaccgugaggcc

SEQ ID NO: 1848762 - RNA, 19 nt, Human
ugaccauucuccaccugcc

SEQ ID NO: 1848763 - RNA, 18 nt, Human
ugaccauucuccaccugc

SEQ ID NO: 1848764 - RNA, 17 nt, Human
ugaccauucuccaccug

SEQ ID NO: 1848765 - RNA, 16 nt, Human
ugaccauucuccaccu

SEQ ID NO: 1848766 - RNA, 20 nt, Human
ugaccagcaccaucucuccu

SEQ ID NO: 1848767 - RNA, 20 nt, Human
ugaccacugcagaagacagu

SEQ ID NO: 1848768 - RNA, 19 nt, Human
ugaccagcaccaucucucc

SEQ ID NO: 1848769 - RNA, 15 nt, Human
ugacaugucuuuucu

SEQ ID NO: 1848770 - RNA, 13 nt, Human
ugacaugucuuuu

SEQ ID NO: 1848771 - RNA, 16 nt, Human
ugacagacagcccucc

SEQ ID NO: 1848772 - RNA, 13 nt, Human
ugacagaggcagc

SEQ ID NO: 1848773 - RNA, 20 nt, Human
ugacagacacaggcccggcu

SEQ ID NO: 1848774 - RNA, 23 nt, Human
ugacagacacaggcccggcucca

SEQ ID NO: 1848775 - RNA, 14 nt, Human
ugacagaggcagcc

SEQ ID NO: 1848776 - RNA, 15 nt, Human
ugacagaggcagccc

SEQ ID NO: 1848777 - RNA, 16 nt, Human
ugacagaggcagcccc

SEQ ID NO: 1848778 - RNA, 17 nt, Human
ugacagaggcagcccca

SEQ ID NO: 1848779 - RNA, 18 nt, Human
ugacagaggcagccccau

SEQ ID NO: 1848780 - RNA, 23 nt, Human
ugacagaggcagccccauucugc

SEQ ID NO: 1848781 - RNA, 14 nt, Human
ugacagagugagac

SEQ ID NO: 1848782 - RNA, 17 nt, Human
ugacagagugagacucu

SEQ ID NO: 1848783 - RNA, 23 nt, Human
ugacauaaguauuuaauucaugu

SEQ ID NO: 1848784 - RNA, 19 nt, Human
ugacagagugagacucugu

SEQ ID NO: 1848785 - RNA, 18 nt, Human
ugacaaggauugcuacug

SEQ ID NO: 1848786 - RNA, 21 nt, Human
ucuuguguguuuauugucaaa

SEQ ID NO: 1848787 - RNA, 12 nt, Human
ucuuguguuucu

SEQ ID NO: 1848788 - RNA, 16 nt, Human
ucuuguguguuuauug

SEQ ID NO: 1848789 - RNA, 23 nt, Human
ucuuucacccuuuucuguuugcu

SEQ ID NO: 1848790 - RNA, 17 nt, Human
ucuuucacauuuaaaua

SEQ ID NO: 1848791 - RNA, 17 nt, Human
ucuccucuugccacugc

SEQ ID NO: 1848792 - RNA, 22 nt, Human
ucuccucuugccacugccucuu

SEQ ID NO: 1848793 - RNA, 23 nt, Human
ucuugcaauggcagccuuggcaa

SEQ ID NO: 1848794 - RNA, 20 nt, Human
ucuccucugcugcuggcugg

SEQ ID NO: 1848795 - RNA, 16 nt, Human
ucucccuucauccuuc

SEQ ID NO: 1848796 - RNA, 16 nt, Human
ucuccucuugccacug

SEQ ID NO: 1848797 - RNA, 13 nt, Human
ucuccucuugcca

SEQ ID NO: 1848798 - RNA, 15 nt, Human
ucuugcaugaggcua

SEQ ID NO: 1848799 - RNA, 21 nt, Human
ucuuucagccaagaauucuua

SEQ ID NO: 1848800 - RNA, 20 nt, Human
ucuuucagccaagaauucuu

SEQ ID NO: 1848801 - RNA, 19 nt, Human
ucuuucagccaagaauucu

SEQ ID NO: 1848802 - RNA, 16 nt, Human
ucuuucagccaagaau

SEQ ID NO: 1848803 - RNA, 13 nt, Human
ucuuuccaaagua

SEQ ID NO: 1848804 - RNA, 14 nt, Human
ucuuuccaaaguac

SEQ ID NO: 1848805 - RNA, 17 nt, Human
ucuuuccaaaguacacu

SEQ ID NO: 1848806 - RNA, 17 nt, Human
ucuuuggacacucacac

SEQ ID NO: 1848807 - RNA, 19 nt, Human
ucuuuggacagaagcagcu

SEQ ID NO: 1848808 - RNA, 22 nt, Human
ucuuuggacagaagcagcucuu

SEQ ID NO: 1848809 - RNA, 21 nt, Human
ucuuuggacagaagcagcucu

SEQ ID NO: 1848810 - RNA, 12 nt, Human
ucuuugccaagu

SEQ ID NO: 1848811 - RNA, 18 nt, Human
ugaacauugcaauagaaa

SEQ ID NO: 1848812 - RNA, 22 nt, Human
ugaaccaagaacuuuccaggaa

SEQ ID NO: 1848813 - RNA, 19 nt, Human
ugaaccacaucuugcucug

SEQ ID NO: 1848814 - RNA, 23 nt, Human
ugaaccacaucuugcucugcuga

SEQ ID NO: 1848815 - RNA, 17 nt, Human
ugaaccaccacacccag

SEQ ID NO: 1848816 - RNA, 20 nt, Human
ugaaccaccacacccagccc

SEQ ID NO: 1848817 - RNA, 16 nt, Human
ugaacuccuggccuca

SEQ ID NO: 1848818 - RNA, 17 nt, Human
ugaaaucaguuacucuu

SEQ ID NO: 1848819 - RNA, 16 nt, Human
ugaaaucaguuacucu

SEQ ID NO: 1848820 - RNA, 12 nt, Human
ugaaauuauuca

SEQ ID NO: 1848821 - RNA, 18 nt, Human
ugaaagcccugagcuuuc

SEQ ID NO: 1848822 - RNA, 18 nt, Human
ugaaagauggcugugccu

SEQ ID NO: 1848823 - RNA, 19 nt, Human
ugaaagauggcugugccuc

SEQ ID NO: 1848824 - RNA, 23 nt, Human
ugaaagggaguauuacaaaaaca

SEQ ID NO: 1848825 - RNA, 13 nt, Human
ugaaagggcccag

SEQ ID NO: 1848826 - RNA, 14 nt, Human
ugaaacauuuuguc

SEQ ID NO: 1848827 - RNA, 19 nt, Human
ugaaaauuuugauguuuua

SEQ ID NO: 1848828 - RNA, 21 nt, Human
ugaaaauuuugauguuuuaag

SEQ ID NO: 1848829 - RNA, 13 nt, Human
ugaaaauuuugau

SEQ ID NO: 1848830 - RNA, 20 nt, Human
ugaaaagcuccauuuuuagu

SEQ ID NO: 1848831 - RNA, 19 nt, Human
ugaguccagaaguuugaga

SEQ ID NO: 1848832 - RNA, 13 nt, Human
ugaguccagaagu

SEQ ID NO: 1848833 - RNA, 21 nt, Human
ugaggugggaggaucucuuga

SEQ ID NO: 1848834 - RNA, 15 nt, Human
ugagucccaggcuga

SEQ ID NO: 1848835 - RNA, 19 nt, Human
ugagucccaggcugagccu

SEQ ID NO: 1848836 - RNA, 19 nt, Human
ugagucgaggacagggagg

SEQ ID NO: 1848837 - RNA, 18 nt, Human
ugagucugaaggcugggu

SEQ ID NO: 1848838 - RNA, 17 nt, Human
ugagucugaaggcuggg

SEQ ID NO: 1848839 - RNA, 15 nt, Human
ugagucugaaggcug

SEQ ID NO: 1848840 - RNA, 13 nt, Human
ugagucugaaggc

SEQ ID NO: 1848841 - RNA, 20 nt, Human
ugaguugauagcacagaccc

SEQ ID NO: 1848842 - RNA, 16 nt, Human
ugaguugauagcacag

SEQ ID NO: 1848843 - RNA, 14 nt, Human
ugagugagcaugcc

SEQ ID NO: 1848844 - RNA, 23 nt, Human
ugaguuugggccccagaggcugg

SEQ ID NO: 1848845 - RNA, 22 nt, Human
ugaguuugggccccagaggcug

SEQ ID NO: 1848846 - RNA, 12 nt, Human
ugaggcauuugu

SEQ ID NO: 1848847 - RNA, 23 nt, Human
ugaggcaucgcaauguaagacuc

SEQ ID NO: 1848848 - RNA, 19 nt, Human
ugaggcauuuguuugaacu

SEQ ID NO: 1848849 - RNA, 20 nt, Human
ugaggcauuuguuugaacug

SEQ ID NO: 1848850 - RNA, 17 nt, Human
ugaggcuaguguggugu

SEQ ID NO: 1848851 - RNA, 21 nt, Human
ugaggcauuuguuugaacuga

SEQ ID NO: 1848852 - RNA, 23 nt, Human
ugaggcuagugugguguuuccug

SEQ ID NO: 1848853 - RNA, 23 nt, Human
ugaggcauuuguuugaacugaua

SEQ ID NO: 1848854 - RNA, 13 nt, Human
ugagcugggauga

SEQ ID NO: 1848855 - RNA, 16 nt, Human
ugaggagcuugaaacc

SEQ ID NO: 1848856 - RNA, 13 nt, Human
ugaggugggagga

SEQ ID NO: 1848857 - RNA, 12 nt, Human
ugaggugggagg

SEQ ID NO: 1848858 - RNA, 18 nt, Human
ugaggcuccacuuggucu

SEQ ID NO: 1848859 - RNA, 20 nt, Human
ugaggcuccacuuggucugu

SEQ ID NO: 1848860 - RNA, 14 nt, Human
ugaggcucugcccu

SEQ ID NO: 1848861 - RNA, 13 nt, Human
ugaggcucugccc

SEQ ID NO: 1848862 - RNA, 17 nt, Human
ugagggaacagagaggu

SEQ ID NO: 1848863 - RNA, 17 nt, Human
ugagaaauuuauaaacu

SEQ ID NO: 1848864 - RNA, 16 nt, Human
ugaccucagcuuugau

SEQ ID NO: 1848865 - RNA, 22 nt, Human
ugaccucagcuuugauauuuca

SEQ ID NO: 1848866 - RNA, 20 nt, Human
ugaccucaggugauccaccc

SEQ ID NO: 1848867 - RNA, 21 nt, Human
ugaccucaggugauccaccca

SEQ ID NO: 1848868 - RNA, 19 nt, Human
ugagacucgcgacaaugca

SEQ ID NO: 1848869 - RNA, 15 nt, Human
ugagaucagccuggg

SEQ ID NO: 1848870 - RNA, 14 nt, Human
ugagaucagccugg

SEQ ID NO: 1848871 - RNA, 15 nt, Human
ugagaucaaaacggu

SEQ ID NO: 1848872 - RNA, 12 nt, Human
ugagcagggcuc

SEQ ID NO: 1848873 - RNA, 13 nt, Human
ugagcagggcuca

SEQ ID NO: 1848874 - RNA, 14 nt, Human
ugagcagggcucag

SEQ ID NO: 1848875 - RNA, 15 nt, Human
ugagcagggcucagc

SEQ ID NO: 1848876 - RNA, 23 nt, Human
ugagacucgcgacaaugcaaacc

SEQ ID NO: 1848877 - RNA, 22 nt, Human
ugagacucgcgacaaugcaaac

SEQ ID NO: 1848878 - RNA, 21 nt, Human
ugagacucgcgacaaugcaaa

SEQ ID NO: 1848879 - RNA, 20 nt, Human
ugagacucgcgacaaugcaa

SEQ ID NO: 1848880 - RNA, 16 nt, Human
ugagagugaacaaauu

SEQ ID NO: 1848881 - RNA, 18 nt, Human
ugagcccuguccugccua

SEQ ID NO: 1848882 - RNA, 19 nt, Human
ugagccgagaucacgccac

SEQ ID NO: 1848883 - RNA, 21 nt, Human
ugagccgagaucacgccacug

SEQ ID NO: 1848884 - RNA, 17 nt, Human
ugagccucagcauccug

SEQ ID NO: 1848885 - RNA, 14 nt, Human
ugagccucagucuc

SEQ ID NO: 1848886 - RNA, 22 nt, Human
ugagccucagcauccuggcacc

SEQ ID NO: 1848887 - RNA, 18 nt, Human
ugagccucagcauccugg

SEQ ID NO: 1848888 - RNA, 21 nt, Human
ugagccucagcauccuggcac

SEQ ID NO: 1848889 - RNA, 20 nt, Human
ugagcaucaggccaggcccu

SEQ ID NO: 1848890 - RNA, 19 nt, Human
ugagcaucaggccaggccc

SEQ ID NO: 1848891 - RNA, 18 nt, Human
ugagcaucaggccaggcc

SEQ ID NO: 1848892 - RNA, 19 nt, Human
ugagcagggcucagcgggg

SEQ ID NO: 1848893 - RNA, 16 nt, Human
ugagcagggcucagcg

SEQ ID NO: 1848894 - RNA, 17 nt, Human
ugagcagggcucagcgg

SEQ ID NO: 1848895 - RNA, 16 nt, Human
ugagcaucaggccagg

SEQ ID NO: 1848896 - RNA, 13 nt, Human
ugauccaagcugg

SEQ ID NO: 1848897 - RNA, 14 nt, Human
ugauccaagcuggu

SEQ ID NO: 1848898 - RNA, 15 nt, Human
ugauccaagcugguc

SEQ ID NO: 1848899 - RNA, 17 nt, Human
ugauccaagcugguccc

SEQ ID NO: 1848900 - RNA, 14 nt, Human
ugauagcacagacc

SEQ ID NO: 1848901 - RNA, 13 nt, Human
ugauagcacagac

SEQ ID NO: 1848902 - RNA, 20 nt, Human
ugaucuucuuuauaauucua

SEQ ID NO: 1848903 - RNA, 15 nt, Human
ugaucugugggcaca

SEQ ID NO: 1848904 - RNA, 17 nt, Human
ugaucucucgugauuga

SEQ ID NO: 1848905 - RNA, 17 nt, Human
ugauccacccaccucag

SEQ ID NO: 1848906 - RNA, 18 nt, Human
ugauccacccaccucagc

SEQ ID NO: 1848907 - RNA, 19 nt, Human
ugauccacccaccucagcc

SEQ ID NO: 1848908 - RNA, 16 nt, Human
ugauguguuaucucuu

SEQ ID NO: 1848909 - RNA, 19 nt, Human
ugaugucccaacuuguaaa

SEQ ID NO: 1848910 - RNA, 18 nt, Human
ugaugcuucuucagagac

SEQ ID NO: 1848911 - RNA, 17 nt, Human
ugaugcuucuucagaga

SEQ ID NO: 1848912 - RNA, 16 nt, Human
ugaugcuucuucagag

SEQ ID NO: 1848913 - RNA, 21 nt, Human
ugaugguuguacauauaagug

SEQ ID NO: 1848914 - RNA, 14 nt, Human
ugaugguuguacau

SEQ ID NO: 1848915 - RNA, 13 nt, Human
ugaugguuguaca

SEQ ID NO: 1848916 - RNA, 14 nt, Human
ugaugguuccccug

SEQ ID NO: 1848917 - RNA, 18 nt, Human
ugaucuuugcagacaggc

SEQ ID NO: 1848918 - RNA, 16 nt, Human
ugaucuuugcagacag

SEQ ID NO: 1848919 - RNA, 11 nt, Human
ugaugccuggc

SEQ ID NO: 1848920 - RNA, 20 nt, Human
ugaugccugugaacugaacu

SEQ ID NO: 1848921 - RNA, 15 nt, Human
ugaugccugugaacu

SEQ ID NO: 1848922 - RNA, 20 nt, Human
ugaugcuacaggauuugaaa

SEQ ID NO: 1848923 - RNA, 21 nt, Human
ugaugccugugaacugaacuc

SEQ ID NO: 1848924 - RNA, 23 nt, Human
ugaugcgggccagugcuccagcc

SEQ ID NO: 1848925 - RNA, 23 nt, Human
ugaugcuacaggauuugaaauug

SEQ ID NO: 1848926 - RNA, 21 nt, Human
ugauuggaggggggagguggg

SEQ ID NO: 1848927 - RNA, 13 nt, Human
ugauuggaggggg

SEQ ID NO: 1848928 - RNA, 20 nt, Human
ugauuggcaggaguuggaag

SEQ ID NO: 1848929 - RNA, 16 nt, Human
ugauugugucucuugg

SEQ ID NO: 1848930 - RNA, 21 nt, Human
ugauucagacagcugccuggg

SEQ ID NO: 1848931 - RNA, 20 nt, Human
ugauucagacagcugccugg

SEQ ID NO: 1848932 - RNA, 19 nt, Human
ugauucagacagcugccug

SEQ ID NO: 1848933 - RNA, 18 nt, Human
ugauucagacagcugccu

SEQ ID NO: 1848934 - RNA, 23 nt, Human
ugauucagacagcugccugggau

SEQ ID NO: 1848935 - RNA, 21 nt, Human
ugauucuccugccucagccuc

SEQ ID NO: 1848936 - RNA, 16 nt, Human
ugauuaccagggacug

SEQ ID NO: 1848937 - RNA, 20 nt, Human
ugauguucuuucacccuuuu

SEQ ID NO: 1848938 - RNA, 13 nt, Human
ugauuauauguca

SEQ ID NO: 1848939 - RNA, 12 nt, Human
ugauucacagug

SEQ ID NO: 1848940 - RNA, 16 nt, Human
ugauucagacagcugc

SEQ ID NO: 1848941 - RNA, 15 nt, Human
ugauucagacagcug

SEQ ID NO: 1848942 - RNA, 14 nt, Human
ugauucagacagcu

SEQ ID NO: 1848943 - RNA, 13 nt, Human
ugauucagacagc

SEQ ID NO: 1848944 - RNA, 20 nt, Human
ugauucaacagguuuuccug

SEQ ID NO: 1848945 - RNA, 13 nt, Human
ugcuggguguggc

SEQ ID NO: 1848946 - RNA, 20 nt, Human
ugcugggggggauuguaaaa

SEQ ID NO: 1848947 - RNA, 17 nt, Human
ugcugggcuugucugua

SEQ ID NO: 1848948 - RNA, 13 nt, Human
ugcugguuuuagu

SEQ ID NO: 1848949 - RNA, 12 nt, Human
ugcugguuuuuc

SEQ ID NO: 1848950 - RNA, 15 nt, Human
ugcugguuuuucagu

SEQ ID NO: 1848951 - RNA, 16 nt, Human
ugcugguuuuucaguu

SEQ ID NO: 1848952 - RNA, 18 nt, Human
ugcugguuuuucaguuuu

SEQ ID NO: 1848953 - RNA, 18 nt, Human
ugcuguaacuuucugaaa

SEQ ID NO: 1848954 - RNA, 17 nt, Human
ugcugcauuuaaaagau

SEQ ID NO: 1848955 - RNA, 18 nt, Human
ugcugcauuuaaaagaua

SEQ ID NO: 1848956 - RNA, 19 nt, Human
ugcugcauuuaaaagauac

SEQ ID NO: 1848957 - RNA, 23 nt, Human
ugcugcauuuaaaagauacaguu

SEQ ID NO: 1848958 - RNA, 14 nt, Human
ugcugcauuuaaaa

SEQ ID NO: 1848959 - RNA, 17 nt, Human
ugcugccugcuuuuuau

SEQ ID NO: 1848960 - RNA, 15 nt, Human
ugcugccugcuuuuu

SEQ ID NO: 1848961 - RNA, 24 nt, Human
ugcugggccccugccucucugcag

SEQ ID NO: 1848962 - RNA, 23 nt, Human
ugcugggccccugccucucugca

SEQ ID NO: 1848963 - RNA, 22 nt, Human
ugcugggccccugccucucugc

SEQ ID NO: 1848964 - RNA, 21 nt, Human
ugcugggccccugccucucug

SEQ ID NO: 1848965 - RNA, 19 nt, Human
ugcugggccccugccucuc

SEQ ID NO: 1848966 - RNA, 18 nt, Human
ugcugggccccugccucu

SEQ ID NO: 1848967 - RNA, 17 nt, Human
ugcugggccccugccuc

SEQ ID NO: 1848968 - RNA, 16 nt, Human
ugcugggccccugccu

SEQ ID NO: 1848969 - RNA, 12 nt, Human
ugcugcuugagg

SEQ ID NO: 1848970 - RNA, 14 nt, Human
ugcugggccccugc

SEQ ID NO: 1848971 - RNA, 19 nt, Human
ugcugcuugaggcaacuca

SEQ ID NO: 1848972 - RNA, 20 nt, Human
ugcugggauuacagguguga

SEQ ID NO: 1848973 - RNA, 23 nt, Human
ugcgcaggcuggcccugcccugg

SEQ ID NO: 1848974 - RNA, 22 nt, Human
ugcgcaggcuggcccugcccug

SEQ ID NO: 1848975 - RNA, 21 nt, Human
ugcgcaggcuggcccugcccu

SEQ ID NO: 1848976 - RNA, 20 nt, Human
ugccuugcauaauggucaga

SEQ ID NO: 1848977 - RNA, 22 nt, Human
ugcuaagacucaguggggaggg

SEQ ID NO: 1848978 - RNA, 21 nt, Human
ugcuacuguccuacccacccu

SEQ ID NO: 1848979 - RNA, 22 nt, Human
ugcuacuguccuacccacccuc

SEQ ID NO: 1848980 - RNA, 17 nt, Human
ugcggacagccacggcc

SEQ ID NO: 1848981 - RNA, 20 nt, Human
ugcuaggaacacuccuucac

SEQ ID NO: 1848982 - RNA, 21 nt, Human
ugcuaggaacacuccuucaca

SEQ ID NO: 1848983 - RNA, 22 nt, Human
ugcuaggaacacuccuucacag

SEQ ID NO: 1848984 - RNA, 13 nt, Human
ugcuagaacuccc

SEQ ID NO: 1848985 - RNA, 14 nt, Human
ugcuagaacucccu

SEQ ID NO: 1848986 - RNA, 15 nt, Human
ugcuagaacucccuu

SEQ ID NO: 1848987 - RNA, 17 nt, Human
ugcuagaacucccuuuc

SEQ ID NO: 1848988 - RNA, 20 nt, Human
ugcucaggagcccugggagg

SEQ ID NO: 1848989 - RNA, 19 nt, Human
ugcucaggagcccugggag

SEQ ID NO: 1848990 - RNA, 18 nt, Human
ugcucaggagcccuggga

SEQ ID NO: 1848991 - RNA, 17 nt, Human
ugcucacauaucuguca

SEQ ID NO: 1848992 - RNA, 15 nt, Human
ugcucaggagcccug

SEQ ID NO: 1848993 - RNA, 17 nt, Human
ugcucuugaugccuggc

SEQ ID NO: 1848994 - RNA, 14 nt, Human
ugcucuccucuugc

SEQ ID NO: 1848995 - RNA, 12 nt, Human
ugcucuccucuu

SEQ ID NO: 1848996 - RNA, 23 nt, Human
ugcucuccgaccagacaccuuga

SEQ ID NO: 1848997 - RNA, 21 nt, Human
ugcauuuggugguuucagaaa

SEQ ID NO: 1848998 - RNA, 23 nt, Human
ugcauuuggugguuucagaaaug

SEQ ID NO: 1848999 - RNA, 14 nt, Human
ugccaggcauggug

SEQ ID NO: 1849000 - RNA, 22 nt, Human
ugccaggaagccagcaggcucu

SEQ ID NO: 1849001 - RNA, 20 nt, Human
ugccaggaagccagcaggcu

SEQ ID NO: 1849002 - RNA, 16 nt, Human
ugccacuaaauugaca

SEQ ID NO: 1849003 - RNA, 18 nt, Human
ugcauauuauuuuauguu

SEQ ID NO: 1849004 - RNA, 16 nt, Human
ugcaguugccagucac

SEQ ID NO: 1849005 - RNA, 13 nt, Human
ugcagggaguccg

SEQ ID NO: 1849006 - RNA, 21 nt, Human
ugcaguuacacuaaaagguga

SEQ ID NO: 1849007 - RNA, 21 nt, Human
ugcaguggugcgaucuggguu

SEQ ID NO: 1849008 - RNA, 18 nt, Human
ugcccaggcuggcgugca

SEQ ID NO: 1849009 - RNA, 19 nt, Human
ugcccaggcuggcgugcag

SEQ ID NO: 1849010 - RNA, 20 nt, Human
ugcccaggcuggcgugcagu

SEQ ID NO: 1849011 - RNA, 12 nt, Human
ugcccggcugcg

SEQ ID NO: 1849012 - RNA, 14 nt, Human
ugcccggcugcgga

SEQ ID NO: 1849013 - RNA, 16 nt, Human
ugccccuggcagcccc

SEQ ID NO: 1849014 - RNA, 20 nt, Human
ugccccuccucucugcccua

SEQ ID NO: 1849015 - RNA, 19 nt, Human
ugccccuccucucugcccu

SEQ ID NO: 1849016 - RNA, 18 nt, Human
ugccccuccucucugccc

SEQ ID NO: 1849017 - RNA, 17 nt, Human
ugccccuccucucugcc

SEQ ID NO: 1849018 - RNA, 16 nt, Human
ugccccucccuucaac

SEQ ID NO: 1849019 - RNA, 15 nt, Human
ugccccucccuucaa

SEQ ID NO: 1849020 - RNA, 23 nt, Human
ugcccugugaguacuacaguccu

SEQ ID NO: 1849021 - RNA, 23 nt, Human
ugcccugguuuccugcccuggga

SEQ ID NO: 1849022 - RNA, 20 nt, Human
ugcccugguuuccugcccug

SEQ ID NO: 1849023 - RNA, 19 nt, Human
ugcccugguuuccugcccu

SEQ ID NO: 1849024 - RNA, 18 nt, Human
ugcccugguuuccugccc

SEQ ID NO: 1849025 - RNA, 17 nt, Human
ugcccugguuuccugcc

SEQ ID NO: 1849026 - RNA, 17 nt, Human
ugcccuggugcugccac

SEQ ID NO: 1849027 - RNA, 16 nt, Human
ugcccuggugcugcca

SEQ ID NO: 1849028 - RNA, 14 nt, Human
ugcccuggugcugc

SEQ ID NO: 1849029 - RNA, 12 nt, Human
ugcccuggugcu

SEQ ID NO: 1849030 - RNA, 20 nt, Human
ugcccugcccaccuggccuc

SEQ ID NO: 1849031 - RNA, 16 nt, Human
ugcccugcccaccugg

SEQ ID NO: 1849032 - RNA, 15 nt, Human
ugcccugcccaccug

SEQ ID NO: 1849033 - RNA, 18 nt, Human
ugcccugggaggcaguga

SEQ ID NO: 1849034 - RNA, 17 nt, Human
ugcccugggaggcagug

SEQ ID NO: 1849035 - RNA, 15 nt, Human
ugcccugggaggcag

SEQ ID NO: 1849036 - RNA, 13 nt, Human
ugcccugggaggc

SEQ ID NO: 1849037 - RNA, 16 nt, Human
ugccuccucuucaacu

SEQ ID NO: 1849038 - RNA, 14 nt, Human
ugccuccucuucaa

SEQ ID NO: 1849039 - RNA, 14 nt, Human
ugccucaagagaag

SEQ ID NO: 1849040 - RNA, 15 nt, Human
ugccucaagagaagg

SEQ ID NO: 1849041 - RNA, 12 nt, Human
ugggccuucagg

SEQ ID NO: 1849042 - RNA, 15 nt, Human
ugggccuucagggag

SEQ ID NO: 1849043 - RNA, 20 nt, Human
uggggccaguuggucccccu

SEQ ID NO: 1849044 - RNA, 22 nt, Human
uggggccaggcugggucgcccu

SEQ ID NO: 1849045 - RNA, 21 nt, Human
uggggccaggcugggucgccc

SEQ ID NO: 1849046 - RNA, 15 nt, Human
uggggaugagaaagg

SEQ ID NO: 1849047 - RNA, 20 nt, Human
uggggccaggcugggucgcc

SEQ ID NO: 1849048 - RNA, 23 nt, Human
uggggaugagaaagguugaagca

SEQ ID NO: 1849049 - RNA, 16 nt, Human
ugggggaguggccaca

SEQ ID NO: 1849050 - RNA, 13 nt, Human
uggggggggugcu

SEQ ID NO: 1849051 - RNA, 22 nt, Human
uggggguucuuucuuccucugc

SEQ ID NO: 1849052 - RNA, 20 nt, Human
uggggguucuuucuuccucu

SEQ ID NO: 1849053 - RNA, 19 nt, Human
uggggguucuuucuuccuc

SEQ ID NO: 1849054 - RNA, 15 nt, Human
uggggguucuuucuu

SEQ ID NO: 1849055 - RNA, 17 nt, Human
uggguacuuguggacac

SEQ ID NO: 1849056 - RNA, 18 nt, Human
uggguacuuguggacaca

SEQ ID NO: 1849057 - RNA, 13 nt, Human
ugggauccuccag

SEQ ID NO: 1849058 - RNA, 12 nt, Human
ugggauccucca

SEQ ID NO: 1849059 - RNA, 14 nt, Human
ugggauccuccagg

SEQ ID NO: 1849060 - RNA, 22 nt, Human
ugggcagagcagagaccauccc

SEQ ID NO: 1849061 - RNA, 17 nt, Human
ugggauuacaggcguga

SEQ ID NO: 1849062 - RNA, 22 nt, Human
ugggauuacaagcgugagccac

SEQ ID NO: 1849063 - RNA, 16 nt, Human
ugggagugggcccaau

SEQ ID NO: 1849064 - RNA, 14 nt, Human
ugggagugggccca

SEQ ID NO: 1849065 - RNA, 19 nt, Human
ugggaucacauguggacuu

SEQ ID NO: 1849066 - RNA, 16 nt, Human
uggcugggggccucag

SEQ ID NO: 1849067 - RNA, 17 nt, Human
uggcugggggccucagu

SEQ ID NO: 1849068 - RNA, 20 nt, Human
uggcugggggccucagugcc

SEQ ID NO: 1849069 - RNA, 14 nt, Human
ugggccuggcuccc

SEQ ID NO: 1849070 - RNA, 11 nt, Human
ugggccuucag

SEQ ID NO: 1849071 - RNA, 23 nt, Human
ugggccccugccucucugcaggu

SEQ ID NO: 1849072 - RNA, 21 nt, Human
ugggccccugccucucugcag

SEQ ID NO: 1849073 - RNA, 23 nt, Human
ugggcagagcagagaccaucccu

SEQ ID NO: 1849074 - RNA, 14 nt, Human
uggucggaaaacau

SEQ ID NO: 1849075 - RNA, 17 nt, Human
uggucggaaaacaugcu

SEQ ID NO: 1849076 - RNA, 18 nt, Human
uggucuacacugugcuga

SEQ ID NO: 1849077 - RNA, 17 nt, Human
uggucuacacugugcug

SEQ ID NO: 1849078 - RNA, 16 nt, Human
uggucuacacugugcu

SEQ ID NO: 1849079 - RNA, 15 nt, Human
uggucuacacugugc

SEQ ID NO: 1849080 - RNA, 19 nt, Human
uggucuacacugugcugag

SEQ ID NO: 1849081 - RNA, 13 nt, Human
uggugaccucugc

SEQ ID NO: 1849082 - RNA, 14 nt, Human
uggugaccucugcc

SEQ ID NO: 1849083 - RNA, 21 nt, Human
uggugcaaugaccuuucaaua

SEQ ID NO: 1849084 - RNA, 19 nt, Human
uggugacuuuccucuuugg

SEQ ID NO: 1849085 - RNA, 15 nt, Human
uggugaccucugccu

SEQ ID NO: 1849086 - RNA, 16 nt, Human
uggugaccucugccug

SEQ ID NO: 1849087 - RNA, 17 nt, Human
uggugaccucugccuga

SEQ ID NO: 1849088 - RNA, 22 nt, Human
uggugaccucugccugaaguca

SEQ ID NO: 1849089 - RNA, 22 nt, Human
uggucacaggaaguagaggagg

SEQ ID NO: 1849090 - RNA, 18 nt, Human
uggucacaggacucugcc

SEQ ID NO: 1849091 - RNA, 19 nt, Human
uggucacaggacucugccu

SEQ ID NO: 1849092 - RNA, 14 nt, Human
uggucccccuucca

SEQ ID NO: 1849093 - RNA, 23 nt, Human
ugguccugcugcaguugccaguc

SEQ ID NO: 1849094 - RNA, 15 nt, Human
ugguccugcugcagu

SEQ ID NO: 1849095 - RNA, 13 nt, Human
ugguccugcugca

SEQ ID NO: 1849096 - RNA, 19 nt, Human
ugguccuaaucuucugaac

SEQ ID NO: 1849097 - RNA, 17 nt, Human
ugguccuaaucuucuga

SEQ ID NO: 1849098 - RNA, 23 nt, Human
uggucccccuuccauggacuuug

SEQ ID NO: 1849099 - RNA, 18 nt, Human
uggucccccuuccaugga

SEQ ID NO: 1849100 - RNA, 16 nt, Human
uggucccccuuccaug

SEQ ID NO: 1849101 - RNA, 15 nt, Human
uggucccccuuccau

SEQ ID NO: 1849102 - RNA, 23 nt, Human
uggcgcugccccuggcagccccu

SEQ ID NO: 1849103 - RNA, 16 nt, Human
uggcgcugccccuggc

SEQ ID NO: 1849104 - RNA, 23 nt, Human
uggcgcagcauauucaggaagcu

SEQ ID NO: 1849105 - RNA, 22 nt, Human
uggcgcagcauauucaggaagc

SEQ ID NO: 1849106 - RNA, 23 nt, Human
uggccucccaacucaccccagcc

SEQ ID NO: 1849107 - RNA, 15 nt, Human
uggcgggguggggug

SEQ ID NO: 1849108 - RNA, 20 nt, Human
uggcucccacaggcccuucc

SEQ ID NO: 1849109 - RNA, 17 nt, Human
uggcucccacaggcccu

SEQ ID NO: 1849110 - RNA, 14 nt, Human
uggcucccacaggc

SEQ ID NO: 1849111 - RNA, 16 nt, Human
uggcugcuucaaggau

SEQ ID NO: 1849112 - RNA, 15 nt, Human
uggcugcuucaagga

SEQ ID NO: 1849113 - RNA, 11 nt, Human
uggcugcuuca

SEQ ID NO: 1849114 - RNA, 16 nt, Human
uggcuccucccggugc

SEQ ID NO: 1849115 - RNA, 14 nt, Human
uggcuccucccggu

SEQ ID NO: 1849116 - RNA, 19 nt, Human
uggcuccucccggugccca

SEQ ID NO: 1849117 - RNA, 18 nt, Human
uggcuccucccggugccc

SEQ ID NO: 1849118 - RNA, 20 nt, Human
uggccccugcccggcugcgg

SEQ ID NO: 1849119 - RNA, 14 nt, Human
uggccccugcccgg

SEQ ID NO: 1849120 - RNA, 15 nt, Human
uggccccugcccggc

SEQ ID NO: 1849121 - RNA, 16 nt, Human
uggccccugcccggcu

SEQ ID NO: 1849122 - RNA, 20 nt, Human
uggccaggcugcucuugaac

SEQ ID NO: 1849123 - RNA, 13 nt, Human
uggccaggcuggu

SEQ ID NO: 1849124 - RNA, 17 nt, Human
uggccaggcugcucuug

SEQ ID NO: 1849125 - RNA, 16 nt, Human
uggccaggcugcucuu

SEQ ID NO: 1849126 - RNA, 19 nt, Human
uggccagaugcaccagccc

SEQ ID NO: 1849127 - RNA, 15 nt, Human
uggcagaguugaaga

SEQ ID NO: 1849128 - RNA, 12 nt, Human
uggcagaggagg

SEQ ID NO: 1849129 - RNA, 21 nt, Human
uggcagaguggauucuugaac

SEQ ID NO: 1849130 - RNA, 19 nt, Human
uggcagaguugaagacaga

SEQ ID NO: 1849131 - RNA, 17 nt, Human
uggcagaguugaagaca

SEQ ID NO: 1849132 - RNA, 17 nt, Human
uggccagaugcaccagc

SEQ ID NO: 1849133 - RNA, 18 nt, Human
uggccagaugcaccagcc

SEQ ID NO: 1849134 - RNA, 16 nt, Human
uggcacuauaauguaa

SEQ ID NO: 1849135 - RNA, 15 nt, Human
uggcacuauaaugua

SEQ ID NO: 1849136 - RNA, 12 nt, Human
uggcaaaaaggc

SEQ ID NO: 1849137 - RNA, 17 nt, Human
uggauuuuugucuugug

SEQ ID NO: 1849138 - RNA, 16 nt, Human
uggcaaaaaggcagga

SEQ ID NO: 1849139 - RNA, 23 nt, Human
uggaggaaggaaacccagcucug

SEQ ID NO: 1849140 - RNA, 21 nt, Human
uggaggaaggaaacccagcuc

SEQ ID NO: 1849141 - RNA, 14 nt, Human
uggagacugucuca

SEQ ID NO: 1849142 - RNA, 21 nt, Human
uggagaagcucccugaaguaa

SEQ ID NO: 1849143 - RNA, 14 nt, Human
uggacuccucuguc

SEQ ID NO: 1849144 - RNA, 13 nt, Human
uggacuccucugu

SEQ ID NO: 1849145 - RNA, 22 nt, Human
uuaauauugauaugcuuauaca

SEQ ID NO: 1849146 - RNA, 18 nt, Human
uuaauauugauaugcuua

SEQ ID NO: 1849147 - RNA, 16 nt, Human
uuaagccuuuggaaac

SEQ ID NO: 1849148 - RNA, 15 nt, Human
uuaagccuuuggaaa

SEQ ID NO: 1849149 - RNA, 17 nt, Human
uuaagcuguuacugucu

SEQ ID NO: 1849150 - RNA, 21 nt, Human
uuacaagcgugagccacugca

SEQ ID NO: 1849151 - RNA, 20 nt, Human
uuacaagcgugagccacugc

SEQ ID NO: 1849152 - RNA, 18 nt, Human
uuaacuuuuauaaacuuu

SEQ ID NO: 1849153 - RNA, 16 nt, Human
uuaacuuuuauaaacu

SEQ ID NO: 1849154 - RNA, 17 nt, Human
uuaacuuuuauaaacuu

SEQ ID NO: 1849155 - RNA, 15 nt, Human
uuaacuuuuauaaac

SEQ ID NO: 1849156 - RNA, 16 nt, Human
uuaacuucacauauug

SEQ ID NO: 1849157 - RNA, 17 nt, Human
uuaaccacuucagcuga

SEQ ID NO: 1849158 - RNA, 11 nt, Human
uuaaagacaga

SEQ ID NO: 1849159 - RNA, 12 nt, Human
uuaaagacagag

SEQ ID NO: 1849160 - RNA, 23 nt, Human
uuaaauguuuuuuuuuaaagacu

SEQ ID NO: 1849161 - RNA, 21 nt, Human
uuaaauguuuuuuuuuaaaga

SEQ ID NO: 1849162 - RNA, 21 nt, Human
uuaaaauaccagccaguaaau

SEQ ID NO: 1849163 - RNA, 17 nt, Human
uguuuuguuuggagaca

SEQ ID NO: 1849164 - RNA, 18 nt, Human
uguuuuaaggaugcuugu

SEQ ID NO: 1849165 - RNA, 22 nt, Human
uguuuuaagaggcagggucuca

SEQ ID NO: 1849166 - RNA, 19 nt, Human
uguuuuaaggaugcuugua

SEQ ID NO: 1849167 - RNA, 14 nt, Human
uuaaaagauacagu

SEQ ID NO: 1849168 - RNA, 17 nt, Human
uuaaaagauacaguuac

SEQ ID NO: 1849169 - RNA, 18 nt, Human
uguuuuuuuuuaaagacu

SEQ ID NO: 1849170 - RNA, 19 nt, Human
uguuuuuuuuuuccacuua

SEQ ID NO: 1849171 - RNA, 18 nt, Human
uguuuuuuuuuuccacuu

SEQ ID NO: 1849172 - RNA, 13 nt, Human
uguuugugauuga

SEQ ID NO: 1849173 - RNA, 20 nt, Human
uguuuuaagaggcagggucu

SEQ ID NO: 1849174 - RNA, 16 nt, Human
uguuuagauaauacac

SEQ ID NO: 1849175 - RNA, 15 nt, Human
uguuucaaacuuuac

SEQ ID NO: 1849176 - RNA, 20 nt, Human
uguuucauauugaugugugu

SEQ ID NO: 1849177 - RNA, 14 nt, Human
uuagaguugauacu

SEQ ID NO: 1849178 - RNA, 22 nt, Human
uuagauaauacaccacuacauu

SEQ ID NO: 1849179 - RNA, 12 nt, Human
uuagcugggaga

SEQ ID NO: 1849180 - RNA, 17 nt, Human
uuaguagagacaggguu

SEQ ID NO: 1849181 - RNA, 22 nt, Human
uuaggccaaaaaaauguaagau

SEQ ID NO: 1849182 - RNA, 18 nt, Human
uuaggauguugaaaaagu

SEQ ID NO: 1849183 - RNA, 14 nt, Human
uuaguguucauaaa

SEQ ID NO: 1849184 - RNA, 18 nt, Human
uuaguaugaggcauuugu

SEQ ID NO: 1849185 - RNA, 16 nt, Human
uuaguaugaggcauuu

SEQ ID NO: 1849186 - RNA, 17 nt, Human
uuacuuuaaaaggagcc

SEQ ID NO: 1849187 - RNA, 18 nt, Human
uuacuuuaaaaggagcca

SEQ ID NO: 1849188 - RNA, 14 nt, Human
uuacuuuguguuca

SEQ ID NO: 1849189 - RNA, 15 nt, Human
uuagacagucccugc

SEQ ID NO: 1849190 - RNA, 18 nt, Human
uuagacagucccugccaa

SEQ ID NO: 1849191 - RNA, 17 nt, Human
uuagacagucccugcca

SEQ ID NO: 1849192 - RNA, 16 nt, Human
uuagacagucccugcc

SEQ ID NO: 1849193 - RNA, 13 nt, Human
uuacuaaguuuuu

SEQ ID NO: 1849194 - RNA, 14 nt, Human
uuacuaaguuuuua

SEQ ID NO: 1849195 - RNA, 16 nt, Human
uuacuaauagacaauu

SEQ ID NO: 1849196 - RNA, 17 nt, Human
uuacuaguuucccuugc

SEQ ID NO: 1849197 - RNA, 19 nt, Human
uuacuaucaugucaaacgu

SEQ ID NO: 1849198 - RNA, 21 nt, Human
uuacuaucaugucaaacguga

SEQ ID NO: 1849199 - RNA, 21 nt, Human
uuacuuaaaccgccaaggcug

SEQ ID NO: 1849200 - RNA, 17 nt, Human
uuacugucuuuuuucua

SEQ ID NO: 1849201 - RNA, 19 nt, Human
uuacugucuuuuuucuaaa

SEQ ID NO: 1849202 - RNA, 19 nt, Human
uuacuauggcccuggccua

SEQ ID NO: 1849203 - RNA, 11 nt, Human
uuacuucugcu

SEQ ID NO: 1849204 - RNA, 23 nt, Human
uuacuucuuauacauuugauaaa

SEQ ID NO: 1849205 - RNA, 12 nt, Human
uuacuucugcua

SEQ ID NO: 1849206 - RNA, 18 nt, Human
uuacuuagguguggggga

SEQ ID NO: 1849207 - RNA, 19 nt, Human
uucccccuccaaucccacc

SEQ ID NO: 1849208 - RNA, 13 nt, Human
uuccucauuagca

SEQ ID NO: 1849209 - RNA, 20 nt, Human
uucccuuugacgccauccca

SEQ ID NO: 1849210 - RNA, 22 nt, Human
uucccuuugacgccaucccagc

SEQ ID NO: 1849211 - RNA, 21 nt, Human
uucccuuugacgccaucccag

SEQ ID NO: 1849212 - RNA, 20 nt, Human
uucgggaggucgaggcagga

SEQ ID NO: 1849213 - RNA, 17 nt, Human
uucuaaagcugccagcc

SEQ ID NO: 1849214 - RNA, 13 nt, Human
uucuaaagcugcc

SEQ ID NO: 1849215 - RNA, 15 nt, Human
uucuaaagauggaaa

SEQ ID NO: 1849216 - RNA, 15 nt, Human
uuccugaugcuucuu

SEQ ID NO: 1849217 - RNA, 19 nt, Human
uuccugaugcuucuucaga

SEQ ID NO: 1849218 - RNA, 18 nt, Human
uuccugaugcuucuucag

SEQ ID NO: 1849219 - RNA, 15 nt, Human
uuccugcauuuguga

SEQ ID NO: 1849220 - RNA, 23 nt, Human
uuccugaugcuucuucagagacu

SEQ ID NO: 1849221 - RNA, 18 nt, Human
uuccugcauuugugaaau

SEQ ID NO: 1849222 - RNA, 16 nt, Human
uuccugcauuugugaa

SEQ ID NO: 1849223 - RNA, 17 nt, Human
uuccugccaggcauggu

SEQ ID NO: 1849224 - RNA, 14 nt, Human
uuccuggcacugcu

SEQ ID NO: 1849225 - RNA, 20 nt, Human
uuccuugaguugauucagcu

SEQ ID NO: 1849226 - RNA, 13 nt, Human
uucaggaagcuca

SEQ ID NO: 1849227 - RNA, 11 nt, Human
uucaggaagcu

SEQ ID NO: 1849228 - RNA, 21 nt, Human
uucaucuugaauuguaaggaa

SEQ ID NO: 1849229 - RNA, 17 nt, Human
uucaugcaaacuuuauu

SEQ ID NO: 1849230 - RNA, 15 nt, Human
uucauuuccuguguc

SEQ ID NO: 1849231 - RNA, 16 nt, Human
uucauuuccugugucu

SEQ ID NO: 1849232 - RNA, 21 nt, Human
uuccagagaguggcuccuccc

SEQ ID NO: 1849233 - RNA, 20 nt, Human
uuccagagaguggcuccucc

SEQ ID NO: 1849234 - RNA, 19 nt, Human
uuccagagaguggcuccuc

SEQ ID NO: 1849235 - RNA, 18 nt, Human
uuccagagaguggcuccu

SEQ ID NO: 1849236 - RNA, 17 nt, Human
uuccagagaguggcucc

SEQ ID NO: 1849237 - RNA, 18 nt, Human
uuccacucaggucuguuu

SEQ ID NO: 1849238 - RNA, 15 nt, Human
uuccaaauucugcuu

SEQ ID NO: 1849239 - RNA, 20 nt, Human
uuccccaggaggccagccuu

SEQ ID NO: 1849240 - RNA, 19 nt, Human
uuccccaggaggccagccu

SEQ ID NO: 1849241 - RNA, 18 nt, Human
uuccccaggaggccagcc

SEQ ID NO: 1849242 - RNA, 17 nt, Human
uuccccaggaggccagc

SEQ ID NO: 1849243 - RNA, 21 nt, Human
uuccccaggaggccagccuug

SEQ ID NO: 1849244 - RNA, 11 nt, Human
uuccccauggg

SEQ ID NO: 1849245 - RNA, 19 nt, Human
uuccccaugucucgacuca

SEQ ID NO: 1849246 - RNA, 20 nt, Human
uucccucccuuccucuuucc

SEQ ID NO: 1849247 - RNA, 17 nt, Human
uucccucccuuccucuu

SEQ ID NO: 1849248 - RNA, 11 nt, Human
uucccucccuu

SEQ ID NO: 1849249 - RNA, 14 nt, Human
uucccauucuugca

SEQ ID NO: 1849250 - RNA, 16 nt, Human
uuccccaggaggccag

SEQ ID NO: 1849251 - RNA, 15 nt, Human
uuccccaggaggcca

SEQ ID NO: 1849252 - RNA, 16 nt, Human
uucccauuugcuccuu

SEQ ID NO: 1849253 - RNA, 23 nt, Human
uuccagcaauucuccugccucag

SEQ ID NO: 1849254 - RNA, 22 nt, Human
uuccagcaauucuccugccuca

SEQ ID NO: 1849255 - RNA, 21 nt, Human
uuccagcaauucuccugccuc

SEQ ID NO: 1849256 - RNA, 20 nt, Human
uuccagcaauucuccugccu

SEQ ID NO: 1849257 - RNA, 11 nt, Human
uuauucugcuc

SEQ ID NO: 1849258 - RNA, 19 nt, Human
uuauugcagcgauuaauaa

SEQ ID NO: 1849259 - RNA, 15 nt, Human
uuauugcccacgcug

SEQ ID NO: 1849260 - RNA, 13 nt, Human
uuaguugcaacuu

SEQ ID NO: 1849261 - RNA, 14 nt, Human
uuaguuccuugagu

SEQ ID NO: 1849262 - RNA, 16 nt, Human
uuaguuccucauuagc

SEQ ID NO: 1849263 - RNA, 16 nt, Human
uuaucuagauacugua

SEQ ID NO: 1849264 - RNA, 20 nt, Human
uuaguugcaacuuuguauaa

SEQ ID NO: 1849265 - RNA, 13 nt, Human
uuaguugcuguau

SEQ ID NO: 1849266 - RNA, 15 nt, Human
uuaguugcuguaugu

SEQ ID NO: 1849267 - RNA, 20 nt, Human
uuaucuugaauaauguaaga

SEQ ID NO: 1849268 - RNA, 17 nt, Human
uuaucuagauacuguau

SEQ ID NO: 1849269 - RNA, 16 nt, Human
uuaugcaugaaguaau

SEQ ID NO: 1849270 - RNA, 14 nt, Human
uuaugcauagauaa

SEQ ID NO: 1849271 - RNA, 22 nt, Human
uuaugcaugaaguaauaugcac

SEQ ID NO: 1849272 - RNA, 16 nt, Human
uuauggaacacucuga

SEQ ID NO: 1849273 - RNA, 19 nt, Human
uucaacgcagcccugcuuu

SEQ ID NO: 1849274 - RNA, 16 nt, Human
uucaacgcagcccugc

SEQ ID NO: 1849275 - RNA, 20 nt, Human
uucaacgcagcccugcuuug

SEQ ID NO: 1849276 - RNA, 17 nt, Human
uucaacugaccagccuc

SEQ ID NO: 1849277 - RNA, 20 nt, Human
uuauuuuauguugcauagaa

SEQ ID NO: 1849278 - RNA, 18 nt, Human
uuauugucaaagugguga

SEQ ID NO: 1849279 - RNA, 17 nt, Human
uuauugucaaaguggug

SEQ ID NO: 1849280 - RNA, 13 nt, Human
uucacucuccuug

SEQ ID NO: 1849281 - RNA, 16 nt, Human
uucagacauagaauua

SEQ ID NO: 1849282 - RNA, 21 nt, Human
uucagacagcugccugggauc

SEQ ID NO: 1849283 - RNA, 20 nt, Human
uucagacauagaauuaacac

SEQ ID NO: 1849284 - RNA, 19 nt, Human
uucagagacuccugcaggc

SEQ ID NO: 1849285 - RNA, 22 nt, Human
uucagaguugaugguuguacau

SEQ ID NO: 1849286 - RNA, 21 nt, Human
uucagaguugaugguuguaca

SEQ ID NO: 1849287 - RNA, 20 nt, Human
uucaauaggaaaaacugauu

SEQ ID NO: 1849288 - RNA, 18 nt, Human
uucaauaggaaaaacuga

SEQ ID NO: 1849289 - RNA, 15 nt, Human
uucaauaggaaaaac

SEQ ID NO: 1849290 - RNA, 13 nt, Human
uucaauaggaaaa

SEQ ID NO: 1849291 - RNA, 18 nt, Human
uucacggaagagccuugc

SEQ ID NO: 1849292 - RNA, 15 nt, Human
uucacgugguccuaa

SEQ ID NO: 1849293 - RNA, 21 nt, Human
uuugaggguguauauuuucug

SEQ ID NO: 1849294 - RNA, 17 nt, Human
uuugagaucagccuggg

SEQ ID NO: 1849295 - RNA, 16 nt, Human
uuugagaucagccugg

SEQ ID NO: 1849296 - RNA, 18 nt, Human
uuucuuaaccagaucauu

SEQ ID NO: 1849297 - RNA, 23 nt, Human
uuucugaucugaugcaagcaaga

SEQ ID NO: 1849298 - RNA, 19 nt, Human
uuucuuguguguuuauugu

SEQ ID NO: 1849299 - RNA, 21 nt, Human
uuugaaauuguauuacaaauc

SEQ ID NO: 1849300 - RNA, 15 nt, Human
uuuguauucucuccu

SEQ ID NO: 1849301 - RNA, 16 nt, Human
uuuguaugcacuuugu

SEQ ID NO: 1849302 - RNA, 14 nt, Human
uuugauccaagcug

SEQ ID NO: 1849303 - RNA, 19 nt, Human
uuuggacccugaggcccag

SEQ ID NO: 1849304 - RNA, 15 nt, Human
uuuggacccugaggc

SEQ ID NO: 1849305 - RNA, 14 nt, Human
uuugcuugaaagaa

SEQ ID NO: 1849306 - RNA, 16 nt, Human
uuugcuugaaagaaaa

SEQ ID NO: 1849307 - RNA, 23 nt, Human
uuuccuggcacugcuuccaguga

SEQ ID NO: 1849308 - RNA, 22 nt, Human
uuuccucuuagucgagccaagu

SEQ ID NO: 1849309 - RNA, 19 nt, Human
uuuccuggcacugcuucca

SEQ ID NO: 1849310 - RNA, 19 nt, Human
uuucuaaaucuccaaaaua

SEQ ID NO: 1849311 - RNA, 22 nt, Human
uuucuaaaguaaaaacaaagaa

SEQ ID NO: 1849312 - RNA, 17 nt, Human
uuucuaaaguaaaaaca

SEQ ID NO: 1849313 - RNA, 22 nt, Human
uuucuacccagcgagcccuggu

SEQ ID NO: 1849314 - RNA, 15 nt, Human
uuucuacccagcgag

SEQ ID NO: 1849315 - RNA, 18 nt, Human
uuucuacccagcgagccc

SEQ ID NO: 1849316 - RNA, 14 nt, Human
uuucugaaauaaca

SEQ ID NO: 1849317 - RNA, 22 nt, Human
uuuaugauacuugaaaauuaac

SEQ ID NO: 1849318 - RNA, 17 nt, Human
uuucagccaagaauucu

SEQ ID NO: 1849319 - RNA, 17 nt, Human
uuuccacucaggucugu

SEQ ID NO: 1849320 - RNA, 20 nt, Human
uuuccuaaauauauuuuaag

SEQ ID NO: 1849321 - RNA, 12 nt, Human
uuuauacauaaa

SEQ ID NO: 1849322 - RNA, 20 nt, Human
uuuauacauaaacaagacca

SEQ ID NO: 1849323 - RNA, 18 nt, Human
uuuauaaacuuuaccuuu

SEQ ID NO: 1849324 - RNA, 22 nt, Human
uuuagacccuauugcugcuuga

SEQ ID NO: 1849325 - RNA, 18 nt, Human
uuuaguugcaacuuugua

SEQ ID NO: 1849326 - RNA, 17 nt, Human
uuuaguugcaacuuugu

SEQ ID NO: 1849327 - RNA, 19 nt, Human
uuuagacccuauugcugcu

SEQ ID NO: 1849328 - RNA, 14 nt, Human
uuuaacagaaaugu

SEQ ID NO: 1849329 - RNA, 15 nt, Human
uuuaacagaaaugua

SEQ ID NO: 1849330 - RNA, 15 nt, Human
uuuaauaaacacucu

SEQ ID NO: 1849331 - RNA, 14 nt, Human
uuuaauaaacacuc

SEQ ID NO: 1849332 - RNA, 13 nt, Human
uuuaauaaaccau

SEQ ID NO: 1849333 - RNA, 22 nt, Human
uuuaauaaacacucuugaaaaa

SEQ ID NO: 1849334 - RNA, 13 nt, Human
uuuacagagacag

SEQ ID NO: 1849335 - RNA, 13 nt, Human
uuuacagcugccu

SEQ ID NO: 1849336 - RNA, 15 nt, Human
uugucuuuggacccu

SEQ ID NO: 1849337 - RNA, 24 nt, Human
uugucuuuggacccugaggcccag

SEQ ID NO: 1849338 - RNA, 20 nt, Human
uugucuuuggacccugaggc

SEQ ID NO: 1849339 - RNA, 19 nt, Human
uugucuuuggugaacauug

SEQ ID NO: 1849340 - RNA, 20 nt, Human
uuguuuggggaugagaaagg

SEQ ID NO: 1849341 - RNA, 13 nt, Human
uuuaaaagauaca

SEQ ID NO: 1849342 - RNA, 13 nt, Human
uuuaacagaaaug

SEQ ID NO: 1849343 - RNA, 16 nt, Human
uuuaaaaugagaaauc

SEQ ID NO: 1849344 - RNA, 12 nt, Human
uuuaaaaugucu

SEQ ID NO: 1849345 - RNA, 18 nt, Human
uugucugaagucacugca

SEQ ID NO: 1849346 - RNA, 17 nt, Human
uugucugaagucacugc

SEQ ID NO: 1849347 - RNA, 20 nt, Human
uugucuaugggacucaaugc

SEQ ID NO: 1849348 - RNA, 20 nt, Human
uuguaugauccuaaugaaug

SEQ ID NO: 1849349 - RNA, 22 nt, Human
uuguaugaaagauggcugugcc

SEQ ID NO: 1849350 - RNA, 22 nt, Human
uugucaaaguggugagaggcau

SEQ ID NO: 1849351 - RNA, 14 nt, Human
uugucuaugggacu

SEQ ID NO: 1849352 - RNA, 18 nt, Human
uuguacuuuagggaagua

SEQ ID NO: 1849353 - RNA, 20 nt, Human
uuguaaaauggugugaccac

SEQ ID NO: 1849354 - RNA, 16 nt, Human
uuguaccgcaauguga

SEQ ID NO: 1849355 - RNA, 23 nt, Human
uuggcuucacggaagagccuugc

SEQ ID NO: 1849356 - RNA, 15 nt, Human
uuggucugugagaug

SEQ ID NO: 1849357 - RNA, 12 nt, Human
uuguaaaauggu

SEQ ID NO: 1849358 - RNA, 13 nt, Human
uuguaaaauggug

SEQ ID NO: 1849359 - RNA, 20 nt, Human
uuggucugacccacugcuuu

SEQ ID NO: 1849360 - RNA, 18 nt, Human
uugcugucccuuuuccuu

SEQ ID NO: 1849361 - RNA, 16 nt, Human
uugcugucccuuuucc

SEQ ID NO: 1849362 - RNA, 16 nt, Human
uugcugcuugaggcaa

SEQ ID NO: 1849363 - RNA, 14 nt, Human
uugcugcuugaggc

SEQ ID NO: 1849364 - RNA, 20 nt, Human
uugccauguuggccaggcug

SEQ ID NO: 1849365 - RNA, 21 nt, Human
uugccauguuggccaggcugg

SEQ ID NO: 1849366 - RNA, 21 nt, Human
uuggacccugaggcccagagg

SEQ ID NO: 1849367 - RNA, 19 nt, Human
uuggacccugaggcccaga

SEQ ID NO: 1849368 - RNA, 18 nt, Human
uuggacccugaggcccag

SEQ ID NO: 1849369 - RNA, 15 nt, Human
uuggacccugaggcc

SEQ ID NO: 1849370 - RNA, 15 nt, Human
uuggauuguccccga

SEQ ID NO: 1849371 - RNA, 19 nt, Human
uuggaagcuccgcuuucua

SEQ ID NO: 1849372 - RNA, 19 nt, Human
uuggacagaagcagcucuu

SEQ ID NO: 1849373 - RNA, 16 nt, Human
uuggacagaagcagcu

SEQ ID NO: 1849374 - RNA, 17 nt, Human
uugauucauaaugacuu

SEQ ID NO: 1849375 - RNA, 13 nt, Human
uugauucauaaug

SEQ ID NO: 1849376 - RNA, 19 nt, Human
uugcagcgauuaauaacag

SEQ ID NO: 1849377 - RNA, 18 nt, Human
uugcagcgauuaauaaca

SEQ ID NO: 1849378 - RNA, 23 nt, Human
uugcagacaggcaagcaccuccu

SEQ ID NO: 1849379 - RNA, 16 nt, Human
uugcauaacguauaaa

SEQ ID NO: 1849380 - RNA, 13 nt, Human
uugccagucaccc

SEQ ID NO: 1849381 - RNA, 16 nt, Human
uugccauguuggccag

SEQ ID NO: 1849382 - RNA, 17 nt, Human
uugccauguuggccagg

SEQ ID NO: 1849383 - RNA, 18 nt, Human
uugccauguuggccaggc

SEQ ID NO: 1849384 - RNA, 19 nt, Human
uugccauguuggccaggcu

SEQ ID NO: 1849385 - RNA, 14 nt, Human
uugagccuugaacu

SEQ ID NO: 1849386 - RNA, 15 nt, Human
uugagccuugaacuu

SEQ ID NO: 1849387 - RNA, 16 nt, Human
uugagccuugaacuuu

SEQ ID NO: 1849388 - RNA, 13 nt, Human
uugagcucagccc

SEQ ID NO: 1849389 - RNA, 19 nt, Human
uugagccuugaacuuugac

SEQ ID NO: 1849390 - RNA, 16 nt, Human
uugauucagcucugca

SEQ ID NO: 1849391 - RNA, 23 nt, Human
uugauucagacagcugccuggga

SEQ ID NO: 1849392 - RNA, 21 nt, Human
uugauucagacagcugccugg

SEQ ID NO: 1849393 - RNA, 17 nt, Human
uugauucagacagcugc

SEQ ID NO: 1849394 - RNA, 17 nt, Human
uugauccagaaagaaaa

SEQ ID NO: 1849395 - RNA, 16 nt, Human
uugauaugcuuauaca

SEQ ID NO: 1849396 - RNA, 22 nt, Human
uugauauuuucaacgcagcccu

SEQ ID NO: 1849397 - RNA, 14 nt, Human
uucuuguguguuua

SEQ ID NO: 1849398 - RNA, 17 nt, Human
uucuuagggaaggauac

SEQ ID NO: 1849399 - RNA, 13 nt, Human
uucuucagagacu

SEQ ID NO: 1849400 - RNA, 17 nt, Human
uucuuauguugcccagu

SEQ ID NO: 1849401 - RNA, 16 nt, Human
uucuggcuaugcauuu

SEQ ID NO: 1849402 - RNA, 20 nt, Human
uucuggcagaguugaagaca

SEQ ID NO: 1849403 - RNA, 15 nt, Human
uucuggcagaggagg

SEQ ID NO: 1849404 - RNA, 13 nt, Human
uucugugcagcca

SEQ ID NO: 1849405 - RNA, 20 nt, Human
uugaacuuugaccucugcag

SEQ ID NO: 1849406 - RNA, 17 nt, Human
uugaacuuugaccucug

SEQ ID NO: 1849407 - RNA, 18 nt, Human
uugaacuuugaccucugc

SEQ ID NO: 1849408 - RNA, 16 nt, Human
uugaaugaugccauga

SEQ ID NO: 1849409 - RNA, 12 nt, Human
uugaaugaugcc

SEQ ID NO: 1849410 - RNA, 15 nt, Human
uugaacuuugaccuc

SEQ ID NO: 1849411 - RNA, 18 nt, Human
uugaaaauuaacaugaau

SEQ ID NO: 1849412 - RNA, 21 nt, Human
uucuuuccugaggcugggcuc

SEQ ID NO: 1849413 - RNA, 21 nt, Human
uugaaaaucuuauaauuuaaa

SEQ ID NO: 1849414 - RNA, 14 nt, Human
auguucuuaauucu

SEQ ID NO: 1849415 - RNA, 15 nt, Human
auguuugccucugcc

SEQ ID NO: 1849416 - RNA, 17 nt, Human
auguuugccucugccuc

SEQ ID NO: 1849417 - RNA, 14 nt, Human
auguuugccucugc

SEQ ID NO: 1849418 - RNA, 15 nt, Human
auguucugggacaca

SEQ ID NO: 1849419 - RNA, 17 nt, Human
auguucucugaggacac

SEQ ID NO: 1849420 - RNA, 14 nt, Human
auguucugggacac

SEQ ID NO: 1849421 - RNA, 16 nt, Human
auguucucucuucucc

SEQ ID NO: 1849422 - RNA, 17 nt, Human
auguucucucuucucca

SEQ ID NO: 1849423 - RNA, 13 nt, Human
auguucucugagg

SEQ ID NO: 1849424 - RNA, 13 nt, Human
auguguaaguauu

SEQ ID NO: 1849425 - RNA, 23 nt, Human
augggugcuuggaggaaggaaac

SEQ ID NO: 1849426 - RNA, 21 nt, Human
augggugcuuggaggaaggaa

SEQ ID NO: 1849427 - RNA, 20 nt, Human
augggugcuuggaggaagga

SEQ ID NO: 1849428 - RNA, 14 nt, Human
augugaaacauguu

SEQ ID NO: 1849429 - RNA, 19 nt, Human
augucacaggcagguccag

SEQ ID NO: 1849430 - RNA, 18 nt, Human
augugaaaucauucauuu

SEQ ID NO: 1849431 - RNA, 17 nt, Human
augugaaaucauucauu

SEQ ID NO: 1849432 - RNA, 13 nt, Human
augucacaggcag

SEQ ID NO: 1849433 - RNA, 19 nt, Human
augcugacuguacuccucc

SEQ ID NO: 1849434 - RNA, 21 nt, Human
augcugacuguacuccuccca

SEQ ID NO: 1849435 - RNA, 20 nt, Human
augcugacuguacuccuccc

SEQ ID NO: 1849436 - RNA, 15 nt, Human
augcugcccugugag

SEQ ID NO: 1849437 - RNA, 14 nt, Human
augcugcccuguga

SEQ ID NO: 1849438 - RNA, 13 nt, Human
augcugcccugug

SEQ ID NO: 1849439 - RNA, 16 nt, Human
augcugcccugugagu

SEQ ID NO: 1849440 - RNA, 15 nt, Human
augcugccuccagaa

SEQ ID NO: 1849441 - RNA, 12 nt, Human
augcugccucca

SEQ ID NO: 1849442 - RNA, 18 nt, Human
auggcuuuugugcauuau

SEQ ID NO: 1849443 - RNA, 16 nt, Human
auggcuuuugugcauu

SEQ ID NO: 1849444 - RNA, 17 nt, Human
auggcuuuugugcauua

SEQ ID NO: 1849445 - RNA, 16 nt, Human
augcuuguacauaaug

SEQ ID NO: 1849446 - RNA, 15 nt, Human
augcuuguacauaau

SEQ ID NO: 1849447 - RNA, 18 nt, Human
augcuuuaggauguacag

SEQ ID NO: 1849448 - RNA, 17 nt, Human
auggcugugccucugcc

SEQ ID NO: 1849449 - RNA, 16 nt, Human
auggcugugccucugc

SEQ ID NO: 1849450 - RNA, 15 nt, Human
auggcugugccucug

SEQ ID NO: 1849451 - RNA, 17 nt, Human
auggauaggcacaggaa

SEQ ID NO: 1849452 - RNA, 18 nt, Human
auggauaggcacaggaaa

SEQ ID NO: 1849453 - RNA, 13 nt, Human
augcacacauuuu

SEQ ID NO: 1849454 - RNA, 14 nt, Human
augcacacauuuuu

SEQ ID NO: 1849455 - RNA, 15 nt, Human
augcacacauuuuuu

SEQ ID NO: 1849456 - RNA, 19 nt, Human
augcacagaguuguuacau

SEQ ID NO: 1849457 - RNA, 21 nt, Human
augcacagaguuguuacauuu

SEQ ID NO: 1849458 - RNA, 22 nt, Human
augcacagaguuguuacauuuu

SEQ ID NO: 1849459 - RNA, 23 nt, Human
augcacagaguuguuacauuuuu

SEQ ID NO: 1849460 - RNA, 20 nt, Human
augccuggauggggcugcac

SEQ ID NO: 1849461 - RNA, 19 nt, Human
augccuggauggggcugca

SEQ ID NO: 1849462 - RNA, 18 nt, Human
augaucuuugcagacagg

SEQ ID NO: 1849463 - RNA, 19 nt, Human
augaucuuugcagacaggc

SEQ ID NO: 1849464 - RNA, 21 nt, Human
augaucuuugcagacaggcaa

SEQ ID NO: 1849465 - RNA, 17 nt, Human
augaucuuugcagacag

SEQ ID NO: 1849466 - RNA, 23 nt, Human
augcacaaauucugucucuggau

SEQ ID NO: 1849467 - RNA, 22 nt, Human
augcacaaauucugucucugga

SEQ ID NO: 1849468 - RNA, 15 nt, Human
augcacaaauucugu

SEQ ID NO: 1849469 - RNA, 18 nt, Human
augcacaaacagaggccg

SEQ ID NO: 1849470 - RNA, 15 nt, Human
augaugauccuaggc

SEQ ID NO: 1849471 - RNA, 23 nt, Human
augaugaaaugaggucagagccu

SEQ ID NO: 1849472 - RNA, 18 nt, Human
augaugaaaugaggucag

SEQ ID NO: 1849473 - RNA, 16 nt, Human
augaaaacacauuuuu

SEQ ID NO: 1849474 - RNA, 14 nt, Human
augaaaacacauuu

SEQ ID NO: 1849475 - RNA, 15 nt, Human
augaaaacacauuuu

SEQ ID NO: 1849476 - RNA, 13 nt, Human
augaggcauuugu

SEQ ID NO: 1849477 - RNA, 14 nt, Human
augaggcauuuguu

SEQ ID NO: 1849478 - RNA, 21 nt, Human
augaggcauuuguuugaacug

SEQ ID NO: 1849479 - RNA, 22 nt, Human
augaggcauuuguuugaacuga

SEQ ID NO: 1849480 - RNA, 15 nt, Human
augaccacacuccag

SEQ ID NO: 1849481 - RNA, 18 nt, Human
augaccacacuccagcug

SEQ ID NO: 1849482 - RNA, 21 nt, Human
augaaguacucauacauguua

SEQ ID NO: 1849483 - RNA, 16 nt, Human
aucucugcuuuggaaa

SEQ ID NO: 1849484 - RNA, 22 nt, Human
aucuggacuccucuguccaggc

SEQ ID NO: 1849485 - RNA, 18 nt, Human
aucugggggccucuucug

SEQ ID NO: 1849486 - RNA, 23 nt, Human
aucaaagagguuuuaaaaaaauc

SEQ ID NO: 1849487 - RNA, 20 nt, Human
aucaaagagguuuuaaaaaa

SEQ ID NO: 1849488 - RNA, 14 nt, Human
aucaaauauauuca

SEQ ID NO: 1849489 - RNA, 13 nt, Human
aucacagccucug

SEQ ID NO: 1849490 - RNA, 22 nt, Human
aucaaauauauucagccuggcu

SEQ ID NO: 1849491 - RNA, 20 nt, Human
aucaccaacgucugugccau

SEQ ID NO: 1849492 - RNA, 13 nt, Human
aucaccagacagg

SEQ ID NO: 1849493 - RNA, 23 nt, Human
aucacccgcuaagagggagggag

SEQ ID NO: 1849494 - RNA, 12 nt, Human
aucaugugaaau

SEQ ID NO: 1849495 - RNA, 14 nt, Human
aucaugucuggcua

SEQ ID NO: 1849496 - RNA, 13 nt, Human
auccacucgccuu

SEQ ID NO: 1849497 - RNA, 19 nt, Human
auccagacccggcugcgug

SEQ ID NO: 1849498 - RNA, 18 nt, Human
auccccaagccuggcaag

SEQ ID NO: 1849499 - RNA, 19 nt, Human
aucccaugagccucagcau

SEQ ID NO: 1849500 - RNA, 15 nt, Human
aucccggcugcccuu

SEQ ID NO: 1849501 - RNA, 19 nt, Human
auccucaguuuuugugaaa

SEQ ID NO: 1849502 - RNA, 17 nt, Human
auccucauacccacccc

SEQ ID NO: 1849503 - RNA, 22 nt, Human
auauuauuuuauguugcauaga

SEQ ID NO: 1849504 - RNA, 15 nt, Human
auauuauuuuauguu

SEQ ID NO: 1849505 - RNA, 14 nt, Human
auauuauuuuaugu

SEQ ID NO: 1849506 - RNA, 19 nt, Human
auauucaggaagcucaggg

SEQ ID NO: 1849507 - RNA, 20 nt, Human
auaugcucugcauguuacau

SEQ ID NO: 1849508 - RNA, 16 nt, Human
auaugcaguuuuccuu

SEQ ID NO: 1849509 - RNA, 17 nt, Human
auaugcucugcauguua

SEQ ID NO: 1849510 - RNA, 16 nt, Human
auaugcucugcauguu

SEQ ID NO: 1849511 - RNA, 14 nt, Human
auaguaaaaauaaa

SEQ ID NO: 1849512 - RNA, 13 nt, Human
auaguaaaaauaa

SEQ ID NO: 1849513 - RNA, 15 nt, Human
auagccuaggugaca

SEQ ID NO: 1849514 - RNA, 17 nt, Human
auagccuaggugacaga

SEQ ID NO: 1849515 - RNA, 15 nt, Human
auagcagcuuauuca

SEQ ID NO: 1849516 - RNA, 15 nt, Human
auagcacagacccug

SEQ ID NO: 1849517 - RNA, 18 nt, Human
auagcacagacccugccc

SEQ ID NO: 1849518 - RNA, 17 nt, Human
auagcacagacccugcc

SEQ ID NO: 1849519 - RNA, 19 nt, Human
aguuguuacauuuuuaagu

SEQ ID NO: 1849520 - RNA, 20 nt, Human
aguuguuacauuuuuaagug

SEQ ID NO: 1849521 - RNA, 22 nt, Human
aguuguuacauuuuuaagugcu

SEQ ID NO: 1849522 - RNA, 17 nt, Human
aguuugauuaaauucuu

SEQ ID NO: 1849523 - RNA, 18 nt, Human
aguuugauuaaauucuug

SEQ ID NO: 1849524 - RNA, 20 nt, Human
aguuugauuaaauucuugca

SEQ ID NO: 1849525 - RNA, 22 nt, Human
aguuugauuaaauucuugcaaa

SEQ ID NO: 1849526 - RNA, 19 nt, Human
aguuugagaucagccuggg

SEQ ID NO: 1849527 - RNA, 18 nt, Human
aguuugagaucagccugg

SEQ ID NO: 1849528 - RNA, 20 nt, Human
aguuugagaucagccugggc

SEQ ID NO: 1849529 - RNA, 16 nt, Human
aguuugauuaaauucu

SEQ ID NO: 1849530 - RNA, 23 nt, Human
aguuugauuaaauucuugcaaag

SEQ ID NO: 1849531 - RNA, 18 nt, Human
auaacauguaauuaagua

SEQ ID NO: 1849532 - RNA, 13 nt, Human
auaacauguaauu

SEQ ID NO: 1849533 - RNA, 12 nt, Human
auaacauguaau

SEQ ID NO: 1849534 - RNA, 20 nt, Human
auaacauguaauuaaguacu

SEQ ID NO: 1849535 - RNA, 14 nt, Human
auaacaaugaaagu

SEQ ID NO: 1849536 - RNA, 17 nt, Human
auaccugucccccugac

SEQ ID NO: 1849537 - RNA, 20 nt, Human
auacccccugcaaagcccag

SEQ ID NO: 1849538 - RNA, 16 nt, Human
auaccugucccccuga

SEQ ID NO: 1849539 - RNA, 15 nt, Human
auaccugucccccug

SEQ ID NO: 1849540 - RNA, 14 nt, Human
auaccugucccccu

SEQ ID NO: 1849541 - RNA, 21 nt, Human
auacccccugcaaagcccagc

SEQ ID NO: 1849542 - RNA, 17 nt, Human
auacccacccccaccca

SEQ ID NO: 1849543 - RNA, 19 nt, Human
auacccccugcaaagccca

SEQ ID NO: 1849544 - RNA, 17 nt, Human
auacccccugcaaagcc

SEQ ID NO: 1849545 - RNA, 16 nt, Human
auacccacccccaccc

SEQ ID NO: 1849546 - RNA, 14 nt, Human
auacccacccccac

SEQ ID NO: 1849547 - RNA, 13 nt, Human
auacccaccccca

SEQ ID NO: 1849548 - RNA, 22 nt, Human
auacacuuacacuuuaugcaca

SEQ ID NO: 1849549 - RNA, 13 nt, Human
auacacuuacacu

SEQ ID NO: 1849550 - RNA, 14 nt, Human
auacaaugcugugc

SEQ ID NO: 1849551 - RNA, 17 nt, Human
auacaaugcugugcccu

SEQ ID NO: 1849552 - RNA, 21 nt, Human
auaagccagacaucaacagau

SEQ ID NO: 1849553 - RNA, 22 nt, Human
auaagccagacaucaacagaua

SEQ ID NO: 1849554 - RNA, 14 nt, Human
auaauguaagcucu

SEQ ID NO: 1849555 - RNA, 15 nt, Human
auaauguaaauaaag

SEQ ID NO: 1849556 - RNA, 13 nt, Human
auaauggucagag

SEQ ID NO: 1849557 - RNA, 18 nt, Human
auaaggguaucuggugac

SEQ ID NO: 1849558 - RNA, 22 nt, Human
aguucaucuugaauuguaagga

SEQ ID NO: 1849559 - RNA, 16 nt, Human
aguugauacuacaguu

SEQ ID NO: 1849560 - RNA, 19 nt, Human
aguucaucuugaauuguaa

SEQ ID NO: 1849561 - RNA, 15 nt, Human
aguucaucuugaauu

SEQ ID NO: 1849562 - RNA, 13 nt, Human
aguucaucuugaa

SEQ ID NO: 1849563 - RNA, 18 nt, Human
aguucagguaacaggcag

SEQ ID NO: 1849564 - RNA, 20 nt, Human
agugcuaauuuugaaaaacu

SEQ ID NO: 1849565 - RNA, 18 nt, Human
agugcuaauuuugaaaaa

SEQ ID NO: 1849566 - RNA, 15 nt, Human
agugccuuauggaac

SEQ ID NO: 1849567 - RNA, 14 nt, Human
agugccuuauggaa

SEQ ID NO: 1849568 - RNA, 13 nt, Human
agugccuuaugga

SEQ ID NO: 1849569 - RNA, 10 nt, Human
agugccuuau

SEQ ID NO: 1849570 - RNA, 15 nt, Human
agugcuaauuuugaa

SEQ ID NO: 1849571 - RNA, 16 nt, Human
agugccuuauggaaca

SEQ ID NO: 1849572 - RNA, 18 nt, Human
agugccuuauggaacacu

SEQ ID NO: 1849573 - RNA, 21 nt, Human
agugauucucaugccucagcc

SEQ ID NO: 1849574 - RNA, 20 nt, Human
agugauggguuaguggaugg

SEQ ID NO: 1849575 - RNA, 14 nt, Human
agugauucuccugc

SEQ ID NO: 1849576 - RNA, 18 nt, Human
agugccuuacacaauggu

SEQ ID NO: 1849577 - RNA, 15 nt, Human
agugauucuccugcc

SEQ ID NO: 1849578 - RNA, 17 nt, Human
agugauucuccugccuc

SEQ ID NO: 1849579 - RNA, 14 nt, Human
agugauccucccac

SEQ ID NO: 1849580 - RNA, 15 nt, Human
agugauccucccacc

SEQ ID NO: 1849581 - RNA, 18 nt, Human
agugauccucccaccuca

SEQ ID NO: 1849582 - RNA, 24 nt, Human
agugauccucccaccucagccucc

SEQ ID NO: 1849583 - RNA, 21 nt, Human
agugggacagggcauggccag

SEQ ID NO: 1849584 - RNA, 19 nt, Human
agugggacagggcauggcc

SEQ ID NO: 1849585 - RNA, 19 nt, Human
agugucaaugcagccccca

SEQ ID NO: 1849586 - RNA, 19 nt, Human
agucaugcguuuaaucaca

SEQ ID NO: 1849587 - RNA, 22 nt, Human
aguccucuuuucugagaggacu

SEQ ID NO: 1849588 - RNA, 20 nt, Human
aguccuuaccagcagagcac

SEQ ID NO: 1849589 - RNA, 19 nt, Human
aguccucuuuucugagagg

SEQ ID NO: 1849590 - RNA, 18 nt, Human
agugaccucagcuuugau

SEQ ID NO: 1849591 - RNA, 17 nt, Human
agugaccucagcuuuga

SEQ ID NO: 1849592 - RNA, 19 nt, Human
aguccuuaccagcagagca

SEQ ID NO: 1849593 - RNA, 18 nt, Human
aguaaaugggggugcauu

SEQ ID NO: 1849594 - RNA, 13 nt, Human
aggucuguucuuu

SEQ ID NO: 1849595 - RNA, 15 nt, Human
aggucuguucuuucc

SEQ ID NO: 1849596 - RNA, 16 nt, Human
aggucuguucuuucca

SEQ ID NO: 1849597 - RNA, 15 nt, Human
aguacguugugcauu

SEQ ID NO: 1849598 - RNA, 14 nt, Human
aguacguugugcau

SEQ ID NO: 1849599 - RNA, 16 nt, Human
aguacguugugcauuu

SEQ ID NO: 1849600 - RNA, 17 nt, Human
aguacguugugcauuug

SEQ ID NO: 1849601 - RNA, 18 nt, Human
aguacguugugcauuugg

SEQ ID NO: 1849602 - RNA, 22 nt, Human
aguacuacaguccucccaucuc

SEQ ID NO: 1849603 - RNA, 19 nt, Human
aguacuacaguccucccau

SEQ ID NO: 1849604 - RNA, 14 nt, Human
aguacuauaauuua

SEQ ID NO: 1849605 - RNA, 17 nt, Human
aguacuucuccacccug

SEQ ID NO: 1849606 - RNA, 12 nt, Human
aguacuucuuuu

SEQ ID NO: 1849607 - RNA, 14 nt, Human
aguacuauguauca

SEQ ID NO: 1849608 - RNA, 12 nt, Human
aguacuauguau

SEQ ID NO: 1849609 - RNA, 13 nt, Human
aguacucauacau

SEQ ID NO: 1849610 - RNA, 22 nt, Human
agucacacaguauuacuucugc

SEQ ID NO: 1849611 - RNA, 23 nt, Human
aguaugaggcauuuguuugaacu

SEQ ID NO: 1849612 - RNA, 17 nt, Human
aguaugaggcauuuguu

SEQ ID NO: 1849613 - RNA, 15 nt, Human
aguaucucagggccu

SEQ ID NO: 1849614 - RNA, 20 nt, Human
aguaugaggcauuuguuuga

SEQ ID NO: 1849615 - RNA, 21 nt, Human
aguaugaggcauuuguuugaa

SEQ ID NO: 1849616 - RNA, 15 nt, Human
agagcccuucauuug

SEQ ID NO: 1849617 - RNA, 14 nt, Human
agagccucaaauga

SEQ ID NO: 1849618 - RNA, 17 nt, Human
agagccucaaaugagaa

SEQ ID NO: 1849619 - RNA, 13 nt, Human
agagcccaccuug

SEQ ID NO: 1849620 - RNA, 13 nt, Human
agagccagggucu

SEQ ID NO: 1849621 - RNA, 16 nt, Human
agagagaccacuuuuc

SEQ ID NO: 1849622 - RNA, 16 nt, Human
agacgcugugcugccc

SEQ ID NO: 1849623 - RNA, 18 nt, Human
agacucugucucaaaaaa

SEQ ID NO: 1849624 - RNA, 13 nt, Human
agacucugucuca

SEQ ID NO: 1849625 - RNA, 18 nt, Human
agacucugucucagucca

SEQ ID NO: 1849626 - RNA, 20 nt, Human
agacugaguacguugugcau

SEQ ID NO: 1849627 - RNA, 22 nt, Human
agacugaccaauauuguacagu

SEQ ID NO: 1849628 - RNA, 22 nt, Human
agacugaguacguugugcauuu

SEQ ID NO: 1849629 - RNA, 21 nt, Human
agaggacuuuucuuuguggcu

SEQ ID NO: 1849630 - RNA, 22 nt, Human
agaggacuuuucuuuguggcuu

SEQ ID NO: 1849631 - RNA, 23 nt, Human
agaggagggagcaucagugcccu

SEQ ID NO: 1849632 - RNA, 23 nt, Human
agaggacuuuucuuuguggcuuc

SEQ ID NO: 1849633 - RNA, 16 nt, Human
agagggccugcaaggg

SEQ ID NO: 1849634 - RNA, 13 nt, Human
agagggccugcaa

SEQ ID NO: 1849635 - RNA, 19 nt, Human
agaggggguggccucccaa

SEQ ID NO: 1849636 - RNA, 17 nt, Human
agaggggguggccuccc

SEQ ID NO: 1849637 - RNA, 13 nt, Human
agaggaaugaagu

SEQ ID NO: 1849638 - RNA, 14 nt, Human
agaaguaacuuacu

SEQ ID NO: 1849639 - RNA, 18 nt, Human
agaagguuucagaaagaa

SEQ ID NO: 1849640 - RNA, 13 nt, Human
agaagacacugau

SEQ ID NO: 1849641 - RNA, 21 nt, Human
agaagacacugaugggcaacc

SEQ ID NO: 1849642 - RNA, 21 nt, Human
acuuuccucuuuggucuacac

SEQ ID NO: 1849643 - RNA, 21 nt, Human
acuuuccucuuagucgagcca

SEQ ID NO: 1849644 - RNA, 21 nt, Human
agaagagauugugguuucauu

SEQ ID NO: 1849645 - RNA, 22 nt, Human
agaaugcacaaacagaggccgc

SEQ ID NO: 1849646 - RNA, 19 nt, Human
agaaugcacaaacagaggc

SEQ ID NO: 1849647 - RNA, 21 nt, Human
agaagugaaaaucuacacucc

SEQ ID NO: 1849648 - RNA, 18 nt, Human
agaaugaaagggcccaga

SEQ ID NO: 1849649 - RNA, 20 nt, Human
agacaaugacuuacuguaca

SEQ ID NO: 1849650 - RNA, 21 nt, Human
agacaaugacuuacuguacau

SEQ ID NO: 1849651 - RNA, 22 nt, Human
agacaaugacuuacuguacaug

SEQ ID NO: 1849652 - RNA, 15 nt, Human
agacagagcuacaca

SEQ ID NO: 1849653 - RNA, 23 nt, Human
agacaaugacuuacuguacauga

SEQ ID NO: 1849654 - RNA, 11 nt, Human
agacagagucu

SEQ ID NO: 1849655 - RNA, 19 nt, Human
agacagagucucacuguug

SEQ ID NO: 1849656 - RNA, 20 nt, Human
agacagagucucacuguugc

SEQ ID NO: 1849657 - RNA, 15 nt, Human
agaccacguuucuaa

SEQ ID NO: 1849658 - RNA, 22 nt, Human
agacagccaacuauggccugug

SEQ ID NO: 1849659 - RNA, 22 nt, Human
agacagauacuccuccaagguu

SEQ ID NO: 1849660 - RNA, 23 nt, Human
agacagagucucacuguugccca

SEQ ID NO: 1849661 - RNA, 21 nt, Human
agacagagucucacuguugcc

SEQ ID NO: 1849662 - RNA, 19 nt, Human
agacccaaaaggcagaagc

SEQ ID NO: 1849663 - RNA, 23 nt, Human
agccccauccucuguacagagcc

SEQ ID NO: 1849664 - RNA, 17 nt, Human
agccccauccucuguac

SEQ ID NO: 1849665 - RNA, 15 nt, Human
agccccauccucugu

SEQ ID NO: 1849666 - RNA, 17 nt, Human
agccccauucugccugc

SEQ ID NO: 1849667 - RNA, 18 nt, Human
agccccauucugccugcc

SEQ ID NO: 1849668 - RNA, 19 nt, Human
agccccauucugccugccc

SEQ ID NO: 1849669 - RNA, 21 nt, Human
agcccgggcucugccucccau

SEQ ID NO: 1849670 - RNA, 20 nt, Human
agcccgggcucugccuccca

SEQ ID NO: 1849671 - RNA, 18 nt, Human
agcccgggcucugccucc

SEQ ID NO: 1849672 - RNA, 17 nt, Human
agcccgggcucugccuc

SEQ ID NO: 1849673 - RNA, 13 nt, Human
agcccucccugcc

SEQ ID NO: 1849674 - RNA, 12 nt, Human
agcccucccugc

SEQ ID NO: 1849675 - RNA, 23 nt, Human
agcccuccaucuaaacugccccc

SEQ ID NO: 1849676 - RNA, 21 nt, Human
agcccuccaucuaaacugccc

SEQ ID NO: 1849677 - RNA, 20 nt, Human
agccccauucugccugccca

SEQ ID NO: 1849678 - RNA, 13 nt, Human
agcauccuggcac

SEQ ID NO: 1849679 - RNA, 16 nt, Human
agccagcaggcucuca

SEQ ID NO: 1849680 - RNA, 15 nt, Human
agcccaccccucaac

SEQ ID NO: 1849681 - RNA, 16 nt, Human
agcccaccuuggcuca

SEQ ID NO: 1849682 - RNA, 14 nt, Human
agcccaccuuggcu

SEQ ID NO: 1849683 - RNA, 15 nt, Human
agcccacgcccccac

SEQ ID NO: 1849684 - RNA, 14 nt, Human
agcccacgccccca

SEQ ID NO: 1849685 - RNA, 23 nt, Human
agcccacgcccccacuggugaca

SEQ ID NO: 1849686 - RNA, 18 nt, Human
agccagaggagagaggac

SEQ ID NO: 1849687 - RNA, 17 nt, Human
agccagaggagagagga

SEQ ID NO: 1849688 - RNA, 14 nt, Human
agccagcaggcucu

SEQ ID NO: 1849689 - RNA, 15 nt, Human
agccagaggagagag

SEQ ID NO: 1849690 - RNA, 13 nt, Human
agccagaggagag

SEQ ID NO: 1849691 - RNA, 20 nt, Human
agccaaggccaaaggaagca

SEQ ID NO: 1849692 - RNA, 16 nt, Human
agccaaagcuaggccu

SEQ ID NO: 1849693 - RNA, 18 nt, Human
agccaaagcuaggccugg

SEQ ID NO: 1849694 - RNA, 14 nt, Human
agcauccuggcacc

SEQ ID NO: 1849695 - RNA, 17 nt, Human
agcauccuggcacccgg

SEQ ID NO: 1849696 - RNA, 18 nt, Human
agcauccuggcacccggc

SEQ ID NO: 1849697 - RNA, 16 nt, Human
agcacagacccugccc

SEQ ID NO: 1849698 - RNA, 17 nt, Human
agcacgauuucuguuua

SEQ ID NO: 1849699 - RNA, 19 nt, Human
agcacgauuucuguuuaga

SEQ ID NO: 1849700 - RNA, 21 nt, Human
agcacgauuucuguuuagaua

SEQ ID NO: 1849701 - RNA, 12 nt, Human
agcacagacccu

SEQ ID NO: 1849702 - RNA, 15 nt, Human
agcacagacccugcc

SEQ ID NO: 1849703 - RNA, 14 nt, Human
agcacagacccugc

SEQ ID NO: 1849704 - RNA, 20 nt, Human
agcaaaggagauuggaagga

SEQ ID NO: 1849705 - RNA, 16 nt, Human
agcaaauguggcuccu

SEQ ID NO: 1849706 - RNA, 20 nt, Human
agcaaaugucuuccuggauu

SEQ ID NO: 1849707 - RNA, 17 nt, Human
agcaaaugucuuccugg

SEQ ID NO: 1849708 - RNA, 21 nt, Human
agauucuuuccugaggcuggg

SEQ ID NO: 1849709 - RNA, 19 nt, Human
agauucuuuccugaggcug

SEQ ID NO: 1849710 - RNA, 23 nt, Human
agauugcaacaggcugggcuuca

SEQ ID NO: 1849711 - RNA, 20 nt, Human
agauugcaacaggcugggcu

SEQ ID NO: 1849712 - RNA, 21 nt, Human
agauugcaacaggcugggcuu

SEQ ID NO: 1849713 - RNA, 18 nt, Human
agcaaaagaugcuucuca

SEQ ID NO: 1849714 - RNA, 16 nt, Human
agauguagaggagaaa

SEQ ID NO: 1849715 - RNA, 19 nt, Human
agauguagaggagaaacug

SEQ ID NO: 1849716 - RNA, 14 nt, Human
agaugagugagcau

SEQ ID NO: 1849717 - RNA, 18 nt, Human
aggcuggguucugauccu

SEQ ID NO: 1849718 - RNA, 15 nt, Human
aggcuaccuuuguau

SEQ ID NO: 1849719 - RNA, 13 nt, Human
aggcuaccuuugu

SEQ ID NO: 1849720 - RNA, 14 nt, Human
aggcuaccuuugua

SEQ ID NO: 1849721 - RNA, 15 nt, Human
agggacugaggggag

SEQ ID NO: 1849722 - RNA, 23 nt, Human
agggacugccagucccccugccc

SEQ ID NO: 1849723 - RNA, 15 nt, Human
agggacccuccacca

SEQ ID NO: 1849724 - RNA, 18 nt, Human
aggcuuagucacugagac

SEQ ID NO: 1849725 - RNA, 23 nt, Human
aggcuggucucgaacuccugacc

SEQ ID NO: 1849726 - RNA, 22 nt, Human
aggcuggucucaaacuccugac

SEQ ID NO: 1849727 - RNA, 20 nt, Human
aggcuguaucccaugagccu

SEQ ID NO: 1849728 - RNA, 21 nt, Human
aggcuguaucccaugagccuc

SEQ ID NO: 1849729 - RNA, 17 nt, Human
aggcuuagucacugaga

SEQ ID NO: 1849730 - RNA, 22 nt, Human
aggcuguaucccaugagccuca

SEQ ID NO: 1849731 - RNA, 15 nt, Human
aggcaugguggccca

SEQ ID NO: 1849732 - RNA, 17 nt, Human
aggcaugugaugagagg

SEQ ID NO: 1849733 - RNA, 20 nt, Human
aggcaugugaugagaggaaa

SEQ ID NO: 1849734 - RNA, 19 nt, Human
aggcaugugaugagaggaa

SEQ ID NO: 1849735 - RNA, 21 nt, Human
aggcaugugaugagaggaaau

SEQ ID NO: 1849736 - RNA, 17 nt, Human
aggcauguucucugagg

SEQ ID NO: 1849737 - RNA, 17 nt, Human
aggcauuccccaggagg

SEQ ID NO: 1849738 - RNA, 18 nt, Human
aggcauuccccaggaggc

SEQ ID NO: 1849739 - RNA, 18 nt, Human
aggcauguucucugagga

SEQ ID NO: 1849740 - RNA, 19 nt, Human
aggcauguucucugaggac

SEQ ID NO: 1849741 - RNA, 14 nt, Human
aggccaggcccucu

SEQ ID NO: 1849742 - RNA, 13 nt, Human
aggccaggcccuc

SEQ ID NO: 1849743 - RNA, 20 nt, Human
aggcauuccccaggaggcca

SEQ ID NO: 1849744 - RNA, 19 nt, Human
aggcauuccccaggaggcc

SEQ ID NO: 1849745 - RNA, 15 nt, Human
aggccaggcccucug

SEQ ID NO: 1849746 - RNA, 19 nt, Human
aggcccuucucuccagccc

SEQ ID NO: 1849747 - RNA, 15 nt, Human
aggcccuucucucca

SEQ ID NO: 1849748 - RNA, 12 nt, Human
aggcccuucucu

SEQ ID NO: 1849749 - RNA, 22 nt, Human
aggcccuuccucuccacugccu

SEQ ID NO: 1849750 - RNA, 23 nt, Human
aggcccucugcccacucccugca

SEQ ID NO: 1849751 - RNA, 22 nt, Human
aggcccucugcccacucccugc

SEQ ID NO: 1849752 - RNA, 14 nt, Human
agggccuggccuga

SEQ ID NO: 1849753 - RNA, 22 nt, Human
aggggcccaaauucuuucagug

SEQ ID NO: 1849754 - RNA, 22 nt, Human
agggucccugguggcagcucac

SEQ ID NO: 1849755 - RNA, 20 nt, Human
agggucccugguggcagcuc

SEQ ID NO: 1849756 - RNA, 17 nt, Human
agggucccugguggcag

SEQ ID NO: 1849757 - RNA, 16 nt, Human
agggucccugguggca

SEQ ID NO: 1849758 - RNA, 13 nt, Human
aggguauuccaga

SEQ ID NO: 1849759 - RNA, 21 nt, Human
aggguaucuggugacuuuccu

SEQ ID NO: 1849760 - RNA, 12 nt, Human
aggggccuggca

SEQ ID NO: 1849761 - RNA, 13 nt, Human
aggggccuggcag

SEQ ID NO: 1849762 - RNA, 14 nt, Human
agggucccuggugg

SEQ ID NO: 1849763 - RNA, 12 nt, Human
agggucccuggu

SEQ ID NO: 1849764 - RNA, 16 nt, Human
agggauacccauccca

SEQ ID NO: 1849765 - RNA, 13 nt, Human
agggccuggccug

SEQ ID NO: 1849766 - RNA, 12 nt, Human
agggccuggccu

SEQ ID NO: 1849767 - RNA, 15 nt, Human
agggccugcaaggga

SEQ ID NO: 1849768 - RNA, 14 nt, Human
agggccugcaaggg

SEQ ID NO: 1849769 - RNA, 20 nt, Human
agggucucacuauguugccc

SEQ ID NO: 1849770 - RNA, 22 nt, Human
aggguuuugccauguuggccag

SEQ ID NO: 1849771 - RNA, 23 nt, Human
aggguuuugccauguuggccagg

SEQ ID NO: 1849772 - RNA, 23 nt, Human
aggucccuaauaaagcugugugg

SEQ ID NO: 1849773 - RNA, 14 nt, Human
agguacucuccugg

SEQ ID NO: 1849774 - RNA, 13 nt, Human
agguacucuccug

SEQ ID NO: 1849775 - RNA, 16 nt, Human
agguaacaggcagaua

SEQ ID NO: 1849776 - RNA, 22 nt, Human
agguacgaaaagaggggaagag

SEQ ID NO: 1849777 - RNA, 13 nt, Human
agguaacaggcag

SEQ ID NO: 1849778 - RNA, 14 nt, Human
agguaacaggcaga

SEQ ID NO: 1849779 - RNA, 22 nt, Human
agcugguuuuuagcggagacgg

SEQ ID NO: 1849780 - RNA, 18 nt, Human
agcuggucccacucaguc

SEQ ID NO: 1849781 - RNA, 19 nt, Human
agcuggucccacucagucc

SEQ ID NO: 1849782 - RNA, 13 nt, Human
agcugcugacagu

SEQ ID NO: 1849783 - RNA, 14 nt, Human
agcugcugacagug

SEQ ID NO: 1849784 - RNA, 16 nt, Human
agcuggucccacucag

SEQ ID NO: 1849785 - RNA, 17 nt, Human
agcuggucccacucagu

SEQ ID NO: 1849786 - RNA, 21 nt, Human
agcugcgguccacccaggagc

SEQ ID NO: 1849787 - RNA, 12 nt, Human
agcugcugacag

SEQ ID NO: 1849788 - RNA, 19 nt, Human
agcugcgguccacccagga

SEQ ID NO: 1849789 - RNA, 20 nt, Human
agcugcgguccacccaggag

SEQ ID NO: 1849790 - RNA, 13 nt, Human
agcugcgguccac

SEQ ID NO: 1849791 - RNA, 16 nt, Human
agcugcgguccaccca

SEQ ID NO: 1849792 - RNA, 17 nt, Human
agcugcgguccacccag

SEQ ID NO: 1849793 - RNA, 18 nt, Human
agcugcgguccacccagg

SEQ ID NO: 1849794 - RNA, 15 nt, Human
agcugaaccugggua

SEQ ID NO: 1849795 - RNA, 20 nt, Human
agccugggaggucaaggcug

SEQ ID NO: 1849796 - RNA, 12 nt, Human
agccugggaggu

SEQ ID NO: 1849797 - RNA, 18 nt, Human
agccuggcuucaaauugu

SEQ ID NO: 1849798 - RNA, 17 nt, Human
agccuggcuucaaauug

SEQ ID NO: 1849799 - RNA, 22 nt, Human
agccuggcuccaaacccucgag

SEQ ID NO: 1849800 - RNA, 23 nt, Human
agcccucccugccccucccuuca

SEQ ID NO: 1849801 - RNA, 22 nt, Human
agcccucccugccccucccuuc

SEQ ID NO: 1849802 - RNA, 20 nt, Human
agccuggcuccaaacccucg

SEQ ID NO: 1849803 - RNA, 13 nt, Human
agccuggcuccaa

SEQ ID NO: 1849804 - RNA, 19 nt, Human
agcccucccugccccuccc

SEQ ID NO: 1849805 - RNA, 17 nt, Human
agcccucccugccccuc

SEQ ID NO: 1849806 - RNA, 16 nt, Human
agcccucccugccccu

SEQ ID NO: 1849807 - RNA, 15 nt, Human
agcccucccugcccc

SEQ ID NO: 1849808 - RNA, 15 nt, Human
agccuuuggaaacag

SEQ ID NO: 1849809 - RNA, 13 nt, Human
agcgagcccuggu

SEQ ID NO: 1849810 - RNA, 19 nt, Human
agcgagcccugguggcagu

SEQ ID NO: 1849811 - RNA, 14 nt, Human
agcucagagagggu

SEQ ID NO: 1849812 - RNA, 18 nt, Human
agcucagagaggguggga

SEQ ID NO: 1849813 - RNA, 12 nt, Human
agcucagagagg

SEQ ID NO: 1849814 - RNA, 19 nt, Human
agcucaccucucccuugga

SEQ ID NO: 1849815 - RNA, 18 nt, Human
agcucaccucucccuugg

SEQ ID NO: 1849816 - RNA, 15 nt, Human
agcucaccucucccu

SEQ ID NO: 1849817 - RNA, 12 nt, Human
agcucaccucuc

SEQ ID NO: 1849818 - RNA, 19 nt, Human
agcucaccagccccagugc

SEQ ID NO: 1849819 - RNA, 20 nt, Human
agcucaccagccccagugcc

SEQ ID NO: 1849820 - RNA, 16 nt, Human
agcuaaucagcauucu

SEQ ID NO: 1849821 - RNA, 21 nt, Human
agcuaaucagcauucucacuc

SEQ ID NO: 1849822 - RNA, 16 nt, Human
agcucaccagccccag

SEQ ID NO: 1849823 - RNA, 19 nt, Human
aggaacaaggcaaggcugu

SEQ ID NO: 1849824 - RNA, 17 nt, Human
aggaacaaggcaaggcu

SEQ ID NO: 1849825 - RNA, 16 nt, Human
aggaacaaggcaaggc

SEQ ID NO: 1849826 - RNA, 13 nt, Human
aggaacaaggcaa

SEQ ID NO: 1849827 - RNA, 12 nt, Human
aggaacaaggca

SEQ ID NO: 1849828 - RNA, 15 nt, Human
agcuuuuaugugaaa

SEQ ID NO: 1849829 - RNA, 23 nt, Human
aggaacaaggcaaggcugucaau

SEQ ID NO: 1849830 - RNA, 20 nt, Human
aggaacaaggcaaggcuguc

SEQ ID NO: 1849831 - RNA, 21 nt, Human
aggaacuuaaauaaugugaaa

SEQ ID NO: 1849832 - RNA, 18 nt, Human
aggaauaccugucccccu

SEQ ID NO: 1849833 - RNA, 15 nt, Human
aggaauaccuguccc

SEQ ID NO: 1849834 - RNA, 22 nt, Human
aggaauaccugucccccugaca

SEQ ID NO: 1849835 - RNA, 19 nt, Human
aggaauaaauugcuccuug

SEQ ID NO: 1849836 - RNA, 20 nt, Human
aggaauaaauugcuccuuga

SEQ ID NO: 1849837 - RNA, 23 nt, Human
aggaacuuaaauaaugugaaacu

SEQ ID NO: 1849838 - RNA, 22 nt, Human
aggaaggcugagaggagagaga

SEQ ID NO: 1849839 - RNA, 23 nt, Human
agcuuuguuuguugucagcugaa

SEQ ID NO: 1849840 - RNA, 16 nt, Human
agcuuuuaaacccuau

SEQ ID NO: 1849841 - RNA, 19 nt, Human
agcuucauuuccugugucu

SEQ ID NO: 1849842 - RNA, 18 nt, Human
agcuucauuuccuguguc

SEQ ID NO: 1849843 - RNA, 18 nt, Human
agcuucacuguaaaauaa

SEQ ID NO: 1849844 - RNA, 21 nt, Human
aggaccuguggccaaguucuu

SEQ ID NO: 1849845 - RNA, 16 nt, Human
aggaccuguggccaag

SEQ ID NO: 1849846 - RNA, 15 nt, Human
aggagaggagagggg

SEQ ID NO: 1849847 - RNA, 22 nt, Human
aggacccggaggggccuggcag

SEQ ID NO: 1849848 - RNA, 21 nt, Human
aggacccggaggggccuggca

SEQ ID NO: 1849849 - RNA, 20 nt, Human
aggacccggaggggccuggc

SEQ ID NO: 1849850 - RNA, 18 nt, Human
aggacccggaggggccug

SEQ ID NO: 1849851 - RNA, 17 nt, Human
aaacagcuaaugggaca

SEQ ID NO: 1849852 - RNA, 15 nt, Human
aaacagccugugucu

SEQ ID NO: 1849853 - RNA, 15 nt, Human
aaaauaaaaaacacu

SEQ ID NO: 1849854 - RNA, 21 nt, Human
aaaauccacuuuaucuugaau

SEQ ID NO: 1849855 - RNA, 12 nt, Human
aaaauuaagaaa

SEQ ID NO: 1849856 - RNA, 22 nt, Human
aaaauuaacaugaauauuuagu

SEQ ID NO: 1849857 - RNA, 23 nt, Human
aaaauuaaucugggccagaauuu

SEQ ID NO: 1849858 - RNA, 20 nt, Human
aaaauuaagaaaggauaaag

SEQ ID NO: 1849859 - RNA, 13 nt, Human
aaaauuaagaaag

SEQ ID NO: 1849860 - RNA, 19 nt, Human
aaaauuaggauuucaugau

SEQ ID NO: 1849861 - RNA, 15 nt, Human
aaaauuagccaagug

SEQ ID NO: 1849862 - RNA, 11 nt, Human
aaagagguuuu

SEQ ID NO: 1849863 - RNA, 15 nt, Human
aaagauacaguuacu

SEQ ID NO: 1849864 - RNA, 19 nt, Human
aaacugauuuuuuuuuccu

SEQ ID NO: 1849865 - RNA, 13 nt, Human
aaacugauuuuuu

SEQ ID NO: 1849866 - RNA, 20 nt, Human
aaacugauuuuuuuuuccuu

SEQ ID NO: 1849867 - RNA, 17 nt, Human
aaaccccaucucuacaa

SEQ ID NO: 1849868 - RNA, 21 nt, Human
aaacccugucucuacuaaaaa

SEQ ID NO: 1849869 - RNA, 14 nt, Human
aaacccuucagugc

SEQ ID NO: 1849870 - RNA, 17 nt, Human
aaacucuugaccucagg

SEQ ID NO: 1849871 - RNA, 15 nt, Human
aaagccaaagcuagg

SEQ ID NO: 1849872 - RNA, 21 nt, Human
aaaggcuccaggagcagccac

SEQ ID NO: 1849873 - RNA, 22 nt, Human
aaaggcuccaggagcagccaca

SEQ ID NO: 1849874 - RNA, 17 nt, Human
aaaggcuaccuuuguau

SEQ ID NO: 1849875 - RNA, 14 nt, Human
aaaggcuaccuuug

SEQ ID NO: 1849876 - RNA, 14 nt, Human
aaaggcuccaggag

SEQ ID NO: 1849877 - RNA, 18 nt, Human
aaagcccaaagugguaua

SEQ ID NO: 1849878 - RNA, 19 nt, Human
aaaggcagaagcaacccaa

SEQ ID NO: 1849879 - RNA, 11 nt, Human
aaauaaauuau

SEQ ID NO: 1849880 - RNA, 18 nt, Human
aacucaccccagccccaa

SEQ ID NO: 1849881 - RNA, 17 nt, Human
aacucaccccagcccca

SEQ ID NO: 1849882 - RNA, 16 nt, Human
aacucaccccagcccc

SEQ ID NO: 1849883 - RNA, 17 nt, Human
aacucaaacucuuaaaa

SEQ ID NO: 1849884 - RNA, 13 nt, Human
aacgucugugcca

SEQ ID NO: 1849885 - RNA, 15 nt, Human
aacguauaaaagccu

SEQ ID NO: 1849886 - RNA, 22 nt, Human
aacauccuacaagacacaguga

SEQ ID NO: 1849887 - RNA, 15 nt, Human
aacauccuacaagac

SEQ ID NO: 1849888 - RNA, 15 nt, Human
aacaucccuccuggg

SEQ ID NO: 1849889 - RNA, 16 nt, Human
aacagcuaaugggaca

SEQ ID NO: 1849890 - RNA, 22 nt, Human
aacaugcuacacacugcauguu

SEQ ID NO: 1849891 - RNA, 15 nt, Human
aacauggaaguacua

SEQ ID NO: 1849892 - RNA, 19 nt, Human
aaccaguguuguggauuua

SEQ ID NO: 1849893 - RNA, 13 nt, Human
aacccuucagugc

SEQ ID NO: 1849894 - RNA, 20 nt, Human
aaauguucaucaaugaauga

SEQ ID NO: 1849895 - RNA, 21 nt, Human
aaauguuuuuuuuuaaagacu

SEQ ID NO: 1849896 - RNA, 18 nt, Human
aaauguuuuuuuuuaaag

SEQ ID NO: 1849897 - RNA, 18 nt, Human
aaauugaugggauuuggu

SEQ ID NO: 1849898 - RNA, 13 nt, Human
aaauuaacuuuua

SEQ ID NO: 1849899 - RNA, 14 nt, Human
aaauuaacuuuuau

SEQ ID NO: 1849900 - RNA, 22 nt, Human
aaauugacacuuaaaaaugguu

SEQ ID NO: 1849901 - RNA, 12 nt, Human
aaauuaacuuuu

SEQ ID NO: 1849902 - RNA, 22 nt, Human
aaauguuuuuuuuuaaagacuu

SEQ ID NO: 1849903 - RNA, 19 nt, Human
aacaccucugcacaagcug

SEQ ID NO: 1849904 - RNA, 17 nt, Human
aacacuaacaugauuug

SEQ ID NO: 1849905 - RNA, 21 nt, Human
aacacauacaggaagguagaa

SEQ ID NO: 1849906 - RNA, 22 nt, Human
aacaaaccuguuucugcagcca

SEQ ID NO: 1849907 - RNA, 14 nt, Human
aaauggacguguua

SEQ ID NO: 1849908 - RNA, 17 nt, Human
aaauggacguguuauga

SEQ ID NO: 1849909 - RNA, 15 nt, Human
aaauggacguguuau

SEQ ID NO: 1849910 - RNA, 22 nt, Human
aaaucuccaaaauaaaacuuuu

SEQ ID NO: 1849911 - RNA, 18 nt, Human
aaaucugcuuuuuaaaga

SEQ ID NO: 1849912 - RNA, 18 nt, Human
aaguugauggugaugaaa

SEQ ID NO: 1849913 - RNA, 12 nt, Human
aauaaaauuuuu

SEQ ID NO: 1849914 - RNA, 10 nt, Human
aauaaaccau

SEQ ID NO: 1849915 - RNA, 19 nt, Human
aauaaagcuguguggcagu

SEQ ID NO: 1849916 - RNA, 11 nt, Human
aauaaagcugu

SEQ ID NO: 1849917 - RNA, 15 nt, Human
aaguggggacagagc

SEQ ID NO: 1849918 - RNA, 22 nt, Human
aaguucuuaguugcuguauguc

SEQ ID NO: 1849919 - RNA, 15 nt, Human
aaguucuuaguugcu

SEQ ID NO: 1849920 - RNA, 14 nt, Human
aagugcugcauuua

SEQ ID NO: 1849921 - RNA, 13 nt, Human
aagugcugcauuu

SEQ ID NO: 1849922 - RNA, 16 nt, Human
aauauaggaacuuaaa

SEQ ID NO: 1849923 - RNA, 17 nt, Human
aauagaaauggggaacu

SEQ ID NO: 1849924 - RNA, 16 nt, Human
aauagaaauccaauug

SEQ ID NO: 1849925 - RNA, 21 nt, Human
aaugcgugcauaccacuuuug

SEQ ID NO: 1849926 - RNA, 23 nt, Human
aaugcgugcauaccacuuuuguu

SEQ ID NO: 1849927 - RNA, 14 nt, Human
aaugcgcaggcugg

SEQ ID NO: 1849928 - RNA, 15 nt, Human
aaugcgcaggcuggc

SEQ ID NO: 1849929 - RNA, 20 nt, Human
aaugcgcaggcuggcccugc

SEQ ID NO: 1849930 - RNA, 19 nt, Human
aaugcgcaggcuggcccug

SEQ ID NO: 1849931 - RNA, 18 nt, Human
aaugcgcaggcuggcccu

SEQ ID NO: 1849932 - RNA, 17 nt, Human
aaugcgcaggcuggccc

SEQ ID NO: 1849933 - RNA, 15 nt, Human
aaugggggugcauuu

SEQ ID NO: 1849934 - RNA, 17 nt, Human
aaugggggugcauuuga

SEQ ID NO: 1849935 - RNA, 14 nt, Human
aaugggagcucaug

SEQ ID NO: 1849936 - RNA, 13 nt, Human
aaugggacacuaa

SEQ ID NO: 1849937 - RNA, 23 nt, Human
aaugcucuuuacuucauggacuu

SEQ ID NO: 1849938 - RNA, 13 nt, Human
aaugauuaauuaa

SEQ ID NO: 1849939 - RNA, 12 nt, Human
aaugauuaauua

SEQ ID NO: 1849940 - RNA, 16 nt, Human
aaugauuaauuaaaac

SEQ ID NO: 1849941 - RNA, 23 nt, Human
aaugauguauguugaagccuuug

SEQ ID NO: 1849942 - RNA, 15 nt, Human
aaugauagcuacugu

SEQ ID NO: 1849943 - RNA, 23 nt, Human
aaucucgcucugucgcccaggcu

SEQ ID NO: 1849944 - RNA, 18 nt, Human
aaucucggcucacugcau

SEQ ID NO: 1849945 - RNA, 20 nt, Human
aaucuggacuccucugucca

SEQ ID NO: 1849946 - RNA, 18 nt, Human
aaucuggacuccucuguc

SEQ ID NO: 1849947 - RNA, 17 nt, Human
aaucuggacuccucugu

SEQ ID NO: 1849948 - RNA, 16 nt, Human
aaucuggacuccucug

SEQ ID NO: 1849949 - RNA, 15 nt, Human
aaucuggacuccucu

SEQ ID NO: 1849950 - RNA, 18 nt, Human
aauccaccugccucggcc

SEQ ID NO: 1849951 - RNA, 19 nt, Human
aauccaccugccucggccu

SEQ ID NO: 1849952 - RNA, 21 nt, Human
aagccaccaacauacucccau

SEQ ID NO: 1849953 - RNA, 18 nt, Human
aagccagcaggcucucag

SEQ ID NO: 1849954 - RNA, 19 nt, Human
aagccagcaggcucucagg

SEQ ID NO: 1849955 - RNA, 15 nt, Human
aagccagcaggcucu

SEQ ID NO: 1849956 - RNA, 15 nt, Human
aagcgauucuucugc

SEQ ID NO: 1849957 - RNA, 14 nt, Human
aagcgauucuucug

SEQ ID NO: 1849958 - RNA, 16 nt, Human
aagcgauucuucugcu

SEQ ID NO: 1849959 - RNA, 17 nt, Human
aagcgauucuucugcuu

SEQ ID NO: 1849960 - RNA, 16 nt, Human
aagcugcugacagugu

SEQ ID NO: 1849961 - RNA, 23 nt, Human
aaggaaugauuaauuaaaacaca

SEQ ID NO: 1849962 - RNA, 21 nt, Human
aagcgugagccacugcaccgg

SEQ ID NO: 1849963 - RNA, 17 nt, Human
aagcgugagccacugca

SEQ ID NO: 1849964 - RNA, 20 nt, Human
aagcgugagccacugcaccg

SEQ ID NO: 1849965 - RNA, 12 nt, Human
aagcugccagcc

SEQ ID NO: 1849966 - RNA, 11 nt, Human
aagcugccagc

SEQ ID NO: 1849967 - RNA, 22 nt, Human
aagcugccagccgagauagcca

SEQ ID NO: 1849968 - RNA, 14 nt, Human
aagcugcugacagu

SEQ ID NO: 1849969 - RNA, 13 nt, Human
aaggacuaggguc

SEQ ID NO: 1849970 - RNA, 12 nt, Human
aaggaauuuuau

SEQ ID NO: 1849971 - RNA, 22 nt, Human
aaggacccggaggggccuggca

SEQ ID NO: 1849972 - RNA, 12 nt, Human
aaguagaggagg

SEQ ID NO: 1849973 - RNA, 17 nt, Human
aagggacugagaaauuu

SEQ ID NO: 1849974 - RNA, 15 nt, Human
aagggacugagaaau

SEQ ID NO: 1849975 - RNA, 20 nt, Human
aagggacuuggaagcuccgc

SEQ ID NO: 1849976 - RNA, 15 nt, Human
aagacuuuuaugaua

SEQ ID NO: 1849977 - RNA, 14 nt, Human
aacuuacuuagugu

SEQ ID NO: 1849978 - RNA, 16 nt, Human
aagacuuuggaaagag

SEQ ID NO: 1849979 - RNA, 23 nt, Human
aagacagugaaagaaaauaacaa

SEQ ID NO: 1849980 - RNA, 15 nt, Human
aagcagggacuugaa

SEQ ID NO: 1849981 - RNA, 19 nt, Human
aagccaccaacauacuccc

SEQ ID NO: 1849982 - RNA, 19 nt, Human
aagauuuugaaauuuuuau

SEQ ID NO: 1849983 - RNA, 17 nt, Human
aagauucaaucccagga

SEQ ID NO: 1849984 - RNA, 20 nt, Human
aagauucauauuuacuucuu

SEQ ID NO: 1849985 - RNA, 23 nt, Human
accaucauugaaaucuuuuugcu

SEQ ID NO: 1849986 - RNA, 16 nt, Human
accaucccugaaggcc

SEQ ID NO: 1849987 - RNA, 15 nt, Human
accaucaagccacca

SEQ ID NO: 1849988 - RNA, 15 nt, Human
accaucauugaaauc

SEQ ID NO: 1849989 - RNA, 12 nt, Human
accaucauugaa

SEQ ID NO: 1849990 - RNA, 14 nt, Human
accaucaagccacc

SEQ ID NO: 1849991 - RNA, 17 nt, Human
accauaggucaccuuua

SEQ ID NO: 1849992 - RNA, 21 nt, Human
accauacuaauuauacccccu

SEQ ID NO: 1849993 - RNA, 16 nt, Human
accauacuaauuauac

SEQ ID NO: 1849994 - RNA, 13 nt, Human
accauacuaauua

SEQ ID NO: 1849995 - RNA, 15 nt, Human
acccacccccaccca

SEQ ID NO: 1849996 - RNA, 17 nt, Human
acccacccccacccaag

SEQ ID NO: 1849997 - RNA, 13 nt, Human
acccaugcugccc

SEQ ID NO: 1849998 - RNA, 15 nt, Human
acccacccuccuuuc

SEQ ID NO: 1849999 - RNA, 19 nt, Human
acaugccucucucaggcca

SEQ ID NO: 1850000 - RNA, 23 nt, Human
acaugucuuuucuugcaugaggc

SEQ ID NO: 1850001 - RNA, 17 nt, Human
acauuuccuaaauauau

SEQ ID NO: 1850002 - RNA, 16 nt, Human
acauuuccuaaauaua

SEQ ID NO: 1850003 - RNA, 13 nt, Human
accagcagagcac

SEQ ID NO: 1850004 - RNA, 12 nt, Human
accagcagagca

SEQ ID NO: 1850005 - RNA, 14 nt, Human
accagcagaaaugc

SEQ ID NO: 1850006 - RNA, 16 nt, Human
accagccccagugccc

SEQ ID NO: 1850007 - RNA, 17 nt, Human
accagccccagugccca

SEQ ID NO: 1850008 - RNA, 18 nt, Human
accagccccagugcccac

SEQ ID NO: 1850009 - RNA, 19 nt, Human
accagccccagugcccaca

SEQ ID NO: 1850010 - RNA, 20 nt, Human
accagccccagugcccacag

SEQ ID NO: 1850011 - RNA, 12 nt, Human
accaccugccca

SEQ ID NO: 1850012 - RNA, 20 nt, Human
accaaggcugauuaaaccaa

SEQ ID NO: 1850013 - RNA, 19 nt, Human
accaaggcugauuaaacca

SEQ ID NO: 1850014 - RNA, 13 nt, Human
acagcugccuggg

SEQ ID NO: 1850015 - RNA, 16 nt, Human
acagcugccugcagua

SEQ ID NO: 1850016 - RNA, 12 nt, Human
acagcugccugc

SEQ ID NO: 1850017 - RNA, 20 nt, Human
acaggcaagcaccuccugcc

SEQ ID NO: 1850018 - RNA, 23 nt, Human
acaggcaagcaccuccugccucg

SEQ ID NO: 1850019 - RNA, 16 nt, Human
acagcucuguccuggg

SEQ ID NO: 1850020 - RNA, 17 nt, Human
acagcucuguccuggga

SEQ ID NO: 1850021 - RNA, 21 nt, Human
acagaggggguggccucccaa

SEQ ID NO: 1850022 - RNA, 19 nt, Human
acagaggggguggccuccc

SEQ ID NO: 1850023 - RNA, 18 nt, Human
acagaggggguggccucc

SEQ ID NO: 1850024 - RNA, 17 nt, Human
acagaggggguggccuc

SEQ ID NO: 1850025 - RNA, 16 nt, Human
acagcuccuucugucc

SEQ ID NO: 1850026 - RNA, 18 nt, Human
acagcuccuucuguccua

SEQ ID NO: 1850027 - RNA, 23 nt, Human
acagcuccuucuguccuacucug

SEQ ID NO: 1850028 - RNA, 14 nt, Human
acagcucuguccug

SEQ ID NO: 1850029 - RNA, 22 nt, Human
acagugagucgaggacagggag

SEQ ID NO: 1850030 - RNA, 19 nt, Human
acaggugugaaccaccaca

SEQ ID NO: 1850031 - RNA, 22 nt, Human
acaggugugagucaccaagccc

SEQ ID NO: 1850032 - RNA, 23 nt, Human
acaggugugagucaccaagccca

SEQ ID NO: 1850033 - RNA, 14 nt, Human
acaggcaaugcugg

SEQ ID NO: 1850034 - RNA, 15 nt, Human
acaguguacagucuu

SEQ ID NO: 1850035 - RNA, 17 nt, Human
acaguguacagucuugu

SEQ ID NO: 1850036 - RNA, 18 nt, Human
acaguguacagucuugua

SEQ ID NO: 1850037 - RNA, 12 nt, Human
acaguguacagu

SEQ ID NO: 1850038 - RNA, 13 nt, Human
acaguguacaguc

SEQ ID NO: 1850039 - RNA, 21 nt, Human
acagugauuaccagggacuga

SEQ ID NO: 1850040 - RNA, 20 nt, Human
acagugauuaccagggacug

SEQ ID NO: 1850041 - RNA, 23 nt, Human
acagugagucgaggacagggagg

SEQ ID NO: 1850042 - RNA, 20 nt, Human
acauaauucaggaagcagcu

SEQ ID NO: 1850043 - RNA, 16 nt, Human
acauaagauaaaugug

SEQ ID NO: 1850044 - RNA, 18 nt, Human
acaugccucucucaggcc

SEQ ID NO: 1850045 - RNA, 17 nt, Human
acaugccucucucaggc

SEQ ID NO: 1850046 - RNA, 16 nt, Human
acaugccucucucagg

SEQ ID NO: 1850047 - RNA, 15 nt, Human
acaugccucucucag

SEQ ID NO: 1850048 - RNA, 18 nt, Human
acaugcaaggucauuuuu

SEQ ID NO: 1850049 - RNA, 17 nt, Human
acaugcaaggucauuuu

SEQ ID NO: 1850050 - RNA, 16 nt, Human
acaugcaaggucauuu

SEQ ID NO: 1850051 - RNA, 15 nt, Human
acauccuacaagaca

SEQ ID NO: 1850052 - RNA, 20 nt, Human
acacugggagaaaugaaaaa

SEQ ID NO: 1850053 - RNA, 17 nt, Human
acacugugcugagucug

SEQ ID NO: 1850054 - RNA, 22 nt, Human
acacugugcugagucugaaggc

SEQ ID NO: 1850055 - RNA, 13 nt, Human
acagaggcagccc

SEQ ID NO: 1850056 - RNA, 17 nt, Human
acagaggccaugggccu

SEQ ID NO: 1850057 - RNA, 21 nt, Human
acagaggccaugggccuccug

SEQ ID NO: 1850058 - RNA, 23 nt, Human
acagaggccaugggccuccugug

SEQ ID NO: 1850059 - RNA, 14 nt, Human
acagacaaagcgug

SEQ ID NO: 1850060 - RNA, 21 nt, Human
acacgaauauugcugauggug

SEQ ID NO: 1850061 - RNA, 15 nt, Human
acacgaauauugcug

SEQ ID NO: 1850062 - RNA, 21 nt, Human
acaccacuacauucuguuaau

SEQ ID NO: 1850063 - RNA, 16 nt, Human
acacauuuuuuaaaug

SEQ ID NO: 1850064 - RNA, 18 nt, Human
acacauuuuuuaaaugca

SEQ ID NO: 1850065 - RNA, 19 nt, Human
acacauuuuuuaaaugcac

SEQ ID NO: 1850066 - RNA, 15 nt, Human
acaccacuacauucu

SEQ ID NO: 1850067 - RNA, 14 nt, Human
acacgaauauugcu

SEQ ID NO: 1850068 - RNA, 12 nt, Human
acacgaauauug

SEQ ID NO: 1850069 - RNA, 17 nt, Human
acaccacuacauucugu

SEQ ID NO: 1850070 - RNA, 20 nt, Human
acaccacuacauucuguuaa

SEQ ID NO: 1850071 - RNA, 19 nt, Human
acacagcucuucuccaggc

SEQ ID NO: 1850072 - RNA, 19 nt, Human
acacaaaaguuucucuuuu

SEQ ID NO: 1850073 - RNA, 14 nt, Human
acacauuuuuuaaa

SEQ ID NO: 1850074 - RNA, 22 nt, Human
acacagcucuucuccaggcugu

SEQ ID NO: 1850075 - RNA, 20 nt, Human
acacagcucuucuccaggcu

SEQ ID NO: 1850076 - RNA, 21 nt, Human
acacagcucuucuccaggcug

SEQ ID NO: 1850077 - RNA, 20 nt, Human
acaaggaugaucuaggaaga

SEQ ID NO: 1850078 - RNA, 16 nt, Human
acaaggauugcuacug

SEQ ID NO: 1850079 - RNA, 14 nt, Human
acaauuuauuaugg

SEQ ID NO: 1850080 - RNA, 13 nt, Human
acaauuuauuaug

SEQ ID NO: 1850081 - RNA, 12 nt, Human
aauuguaaggaa

SEQ ID NO: 1850082 - RNA, 16 nt, Human
aauuguaaggaaugau

SEQ ID NO: 1850083 - RNA, 16 nt, Human
aaugucacaggcaggu

SEQ ID NO: 1850084 - RNA, 19 nt, Human
aaugucacaggcaggucca

SEQ ID NO: 1850085 - RNA, 20 nt, Human
aauuuauuuaugggauccug

SEQ ID NO: 1850086 - RNA, 15 nt, Human
acaagaaaugaaagc

SEQ ID NO: 1850087 - RNA, 16 nt, Human
acaagaaaugaaagca

SEQ ID NO: 1850088 - RNA, 18 nt, Human
acaaccuucuguggcuca

SEQ ID NO: 1850089 - RNA, 22 nt, Human
acaaaaugaaacgcaaccacca

SEQ ID NO: 1850090 - RNA, 13 nt, Human
acaaaaugaaacg

SEQ ID NO: 1850091 - RNA, 16 nt, Human
acaaagaaauuaugug

SEQ ID NO: 1850092 - RNA, 14 nt, Human
acaaagaaauuaug

SEQ ID NO: 1850093 - RNA, 12 nt, Human
acaaagaaauua

SEQ ID NO: 1850094 - RNA, 18 nt, Human
aauuuucaucuaggauuu

SEQ ID NO: 1850095 - RNA, 14 nt, Human
aauuuugauguuuu

SEQ ID NO: 1850096 - RNA, 16 nt, Human
aauuuugugcccccau

SEQ ID NO: 1850097 - RNA, 15 nt, Human
acugcccggcagggu

SEQ ID NO: 1850098 - RNA, 18 nt, Human
acugccagucccccugcc

SEQ ID NO: 1850099 - RNA, 19 nt, Human
acugccagucccccugccc

SEQ ID NO: 1850100 - RNA, 16 nt, Human
acugcuuuuggucugu

SEQ ID NO: 1850101 - RNA, 20 nt, Human
acugcuuuuggucuguguga

SEQ ID NO: 1850102 - RNA, 22 nt, Human
acugcccggcaggguccuagaa

SEQ ID NO: 1850103 - RNA, 15 nt, Human
acugcuuuuggucug

SEQ ID NO: 1850104 - RNA, 14 nt, Human
acuauuuuucagaa

SEQ ID NO: 1850105 - RNA, 20 nt, Human
acucuacuuagcaugucccu

SEQ ID NO: 1850106 - RNA, 21 nt, Human
acucuacuuagcaugucccua

SEQ ID NO: 1850107 - RNA, 19 nt, Human
acucugucucaaaaaaaca

SEQ ID NO: 1850108 - RNA, 15 nt, Human
acucugucucagucc

SEQ ID NO: 1850109 - RNA, 17 nt, Human
acucugucucaguccau

SEQ ID NO: 1850110 - RNA, 21 nt, Human
acucugugucagguggggcag

SEQ ID NO: 1850111 - RNA, 19 nt, Human
acucugugucagguggggc

SEQ ID NO: 1850112 - RNA, 22 nt, Human
acugauuuuuuuuuccuucagu

SEQ ID NO: 1850113 - RNA, 21 nt, Human
acugauuuuuuuuuccuucag

SEQ ID NO: 1850114 - RNA, 23 nt, Human
acugauuuuuuuuuccuucagug

SEQ ID NO: 1850115 - RNA, 13 nt, Human
acugaccagccuc

SEQ ID NO: 1850116 - RNA, 20 nt, Human
acugaccagccuccaugcug

SEQ ID NO: 1850117 - RNA, 15 nt, Human
acugaccagccucca

SEQ ID NO: 1850118 - RNA, 22 nt, Human
acugaccaauauuguacaguuu

SEQ ID NO: 1850119 - RNA, 20 nt, Human
acugaccaauauuguacagu

SEQ ID NO: 1850120 - RNA, 21 nt, Human
acugaccaauauuguacaguu

SEQ ID NO: 1850121 - RNA, 22 nt, Human
acugacauuguuggccaaagcc

SEQ ID NO: 1850122 - RNA, 23 nt, Human
acugacauuguuggccaaagcca

SEQ ID NO: 1850123 - RNA, 13 nt, Human
acugaucucucgu

SEQ ID NO: 1850124 - RNA, 23 nt, Human
acugaccagccuccaugcugccu

SEQ ID NO: 1850125 - RNA, 22 nt, Human
acugauggcuaauguacugcau

SEQ ID NO: 1850126 - RNA, 12 nt, Human
acugaugggcaa

SEQ ID NO: 1850127 - RNA, 22 nt, Human
acugaugggcaacccccagccu

SEQ ID NO: 1850128 - RNA, 22 nt, Human
acuuucaggccacauggcuaaa

SEQ ID NO: 1850129 - RNA, 12 nt, Human
acuuuaugcuaa

SEQ ID NO: 1850130 - RNA, 17 nt, Human
acuuuaugcuaagugaa

SEQ ID NO: 1850131 - RNA, 15 nt, Human
acuuuauuuuguguu

SEQ ID NO: 1850132 - RNA, 22 nt, Human
acuugggaggcugagaugggag

SEQ ID NO: 1850133 - RNA, 14 nt, Human
acuuaaauaaugug

SEQ ID NO: 1850134 - RNA, 22 nt, Human
acuuaaaauauuccugcauuug

SEQ ID NO: 1850135 - RNA, 21 nt, Human
acuuaaaaaugguuuaaaugg

SEQ ID NO: 1850136 - RNA, 20 nt, Human
acuuaaaauauuccugcauu

SEQ ID NO: 1850137 - RNA, 13 nt, Human
acuuaaaaauggu

SEQ ID NO: 1850138 - RNA, 14 nt, Human
acuuaaaaaugguu

SEQ ID NO: 1850139 - RNA, 18 nt, Human
acuucuuauacauuugau

SEQ ID NO: 1850140 - RNA, 17 nt, Human
acuucuuauacauuuga

SEQ ID NO: 1850141 - RNA, 13 nt, Human
acuucugccucuu

SEQ ID NO: 1850142 - RNA, 13 nt, Human
acuucagcucugu

SEQ ID NO: 1850143 - RNA, 20 nt, Human
acuucugccauauucuguug

SEQ ID NO: 1850144 - RNA, 17 nt, Human
accucuugagccuugaa

SEQ ID NO: 1850145 - RNA, 19 nt, Human
accucuugagccuugaacu

SEQ ID NO: 1850146 - RNA, 20 nt, Human
accucuugagccuugaacuu

SEQ ID NO: 1850147 - RNA, 21 nt, Human
accucuugagccuugaacuuu

SEQ ID NO: 1850148 - RNA, 11 nt, Human
accugccaggg

SEQ ID NO: 1850149 - RNA, 13 nt, Human
accugccagggac

SEQ ID NO: 1850150 - RNA, 12 nt, Human
accugccaggga

SEQ ID NO: 1850151 - RNA, 18 nt, Human
accugccagggacagagg

SEQ ID NO: 1850152 - RNA, 16 nt, Human
accugccagggacaga

SEQ ID NO: 1850153 - RNA, 15 nt, Human
accugccagggacag

SEQ ID NO: 1850154 - RNA, 23 nt, Human
accugccccuccucucugcccua

SEQ ID NO: 1850155 - RNA, 18 nt, Human
accucaggugagaagcag

SEQ ID NO: 1850156 - RNA, 23 nt, Human
accucagguaaucgaccugccuc

SEQ ID NO: 1850157 - RNA, 13 nt, Human
accucaggccugg

SEQ ID NO: 1850158 - RNA, 12 nt, Human
accucaggccug

SEQ ID NO: 1850159 - RNA, 17 nt, Human
accgugaggccagagac

SEQ ID NO: 1850160 - RNA, 16 nt, Human
accgugaggccagaga

SEQ ID NO: 1850161 - RNA, 22 nt, Human
accucaggccugggggcugggc

SEQ ID NO: 1850162 - RNA, 14 nt, Human
accucaggccuggg

SEQ ID NO: 1850163 - RNA, 22 nt, Human
accucagguaaucgaccugccu

SEQ ID NO: 1850164 - RNA, 15 nt, Human
accggcuggccuggc

SEQ ID NO: 1850165 - RNA, 14 nt, Human
accggcuggccugg

SEQ ID NO: 1850166 - RNA, 18 nt, Human
accggcuggccuggcccc

SEQ ID NO: 1850167 - RNA, 17 nt, Human
accggcuggccuggccc

SEQ ID NO: 1850168 - RNA, 19 nt, Human
accggcuggccuggccccu

SEQ ID NO: 1850169 - RNA, 20 nt, Human
accgggcacucagaagacac

SEQ ID NO: 1850170 - RNA, 14 nt, Human
accgugaggccaga

SEQ ID NO: 1850171 - RNA, 20 nt, Human
accgggccacagagaaagua

SEQ ID NO: 1850172 - RNA, 15 nt, Human
accgggccacagaga

SEQ ID NO: 1850173 - RNA, 19 nt, Human
accgggccacagagaaagu

SEQ ID NO: 1850174 - RNA, 16 nt, Human
accccacacacgccag

SEQ ID NO: 1850175 - RNA, 22 nt, Human
acccugugauggggcccugccu

SEQ ID NO: 1850176 - RNA, 15 nt, Human
acccaugcugcccug

SEQ ID NO: 1850177 - RNA, 14 nt, Human
acccaugcugcccu

SEQ ID NO: 1850178 - RNA, 16 nt, Human
acccaugcugcccugu

SEQ ID NO: 1850179 - RNA, 17 nt, Human
acccuguuaccauuuug

SEQ ID NO: 1850180 - RNA, 14 nt, Human
acuaaucuuucugc

SEQ ID NO: 1850181 - RNA, 17 nt, Human
acuagggaagauaauau

SEQ ID NO: 1850182 - RNA, 16 nt, Human
acuauuguuagucucu

SEQ ID NO: 1850183 - RNA, 17 nt, Human
acuauugcuugcacaaa

SEQ ID NO: 1850184 - RNA, 11 nt, Human
accugugucuc

SEQ ID NO: 1850185 - RNA, 18 nt, Human
accuguggccaaguucuu

SEQ ID NO: 1850186 - RNA, 19 nt, Human
accuguggccaaguucuua

SEQ ID NO: 1850187 - RNA, 19 nt, Human
acgcuggagugcagugagc

SEQ ID NO: 1850188 - RNA, 16 nt, Human
acggaagagccuugcg

SEQ ID NO: 1850189 - RNA, 15 nt, Human
acggaagagccuugc

SEQ ID NO: 1850190 - RNA, 19 nt, Human
acggacgaaccuugaaaac

SEQ ID NO: 1850191 - RNA, 15 nt, Human
acggaauaguuggcu

SEQ ID NO: 1850192 - RNA, 11 nt, Human
acguggcugcu

SEQ ID NO: 1850193 - RNA, 15 nt, Human
acuaauagacaauuu

SEQ ID NO: 1850194 - RNA, 23 nt, Human
acgucugacaggcaaugcuggcu

SEQ ID NO: 1850195 - RNA, 20 nt, Human
cucgggauuaguacacacuu

SEQ ID NO: 1850196 - RNA, 14 nt, Human
cucucacuccuuga

SEQ ID NO: 1850197 - RNA, 12 nt, Human
cucucacuccuu

SEQ ID NO: 1850198 - RNA, 19 nt, Human
cucucagauuguaccauug

SEQ ID NO: 1850199 - RNA, 15 nt, Human
cucucacuccuugaa

SEQ ID NO: 1850200 - RNA, 12 nt, Human
cucucuggccuu

SEQ ID NO: 1850201 - RNA, 11 nt, Human
cucucuggccu

SEQ ID NO: 1850202 - RNA, 15 nt, Human
cucugaaggacauug

SEQ ID NO: 1850203 - RNA, 21 nt, Human
cucuccgaccagacaccuuga

SEQ ID NO: 1850204 - RNA, 14 nt, Human
cucugcacuccccu

SEQ ID NO: 1850205 - RNA, 23 nt, Human
cucugcagcaauaaagcagcguu

SEQ ID NO: 1850206 - RNA, 18 nt, Human
cucugcagcaauaaagca

SEQ ID NO: 1850207 - RNA, 19 nt, Human
cucugcagcaauaaagcag

SEQ ID NO: 1850208 - RNA, 18 nt, Human
cucugguccauagagagc

SEQ ID NO: 1850209 - RNA, 16 nt, Human
cucugguccauagaga

SEQ ID NO: 1850210 - RNA, 19 nt, Human
cucugguccauagagagca

SEQ ID NO: 1850211 - RNA, 14 nt, Human
cucugguuccuccc

SEQ ID NO: 1850212 - RNA, 17 nt, Human
cucugcugacagacaca

SEQ ID NO: 1850213 - RNA, 18 nt, Human
cucugcugacagacacag

SEQ ID NO: 1850214 - RNA, 19 nt, Human
cucugcugacagacacagg

SEQ ID NO: 1850215 - RNA, 15 nt, Human
cucugguccauagag

SEQ ID NO: 1850216 - RNA, 21 nt, Human
cucuguacagagcccacgccc

SEQ ID NO: 1850217 - RNA, 17 nt, Human
cucuguacagagcccac

SEQ ID NO: 1850218 - RNA, 16 nt, Human
cucuugccacugccuc

SEQ ID NO: 1850219 - RNA, 20 nt, Human
cucuugccacugccucuucc

SEQ ID NO: 1850220 - RNA, 19 nt, Human
cucuugccacugccucuuc

SEQ ID NO: 1850221 - RNA, 18 nt, Human
cucuugccacugccucuu

SEQ ID NO: 1850222 - RNA, 17 nt, Human
cucuugccacugccucu

SEQ ID NO: 1850223 - RNA, 16 nt, Human
cugaaaauguaugugu

SEQ ID NO: 1850224 - RNA, 22 nt, Human
cugaaggaauaaauugcuccuu

SEQ ID NO: 1850225 - RNA, 18 nt, Human
cugaaggccccgcccagg

SEQ ID NO: 1850226 - RNA, 17 nt, Human
cugaaggccccgcccag

SEQ ID NO: 1850227 - RNA, 14 nt, Human
cugaaggccccgcc

SEQ ID NO: 1850228 - RNA, 13 nt, Human
cugaaggccccgc

SEQ ID NO: 1850229 - RNA, 19 nt, Human
cugaaggacauugcggaca

SEQ ID NO: 1850230 - RNA, 20 nt, Human
cugaaggacauugcggacag

SEQ ID NO: 1850231 - RNA, 21 nt, Human
cugaaggacauugcggacagc

SEQ ID NO: 1850232 - RNA, 15 nt, Human
cugacagacacaggc

SEQ ID NO: 1850233 - RNA, 12 nt, Human
cugacagacaca

SEQ ID NO: 1850234 - RNA, 14 nt, Human
cugacagacacagg

SEQ ID NO: 1850235 - RNA, 14 nt, Human
cugacagaaggacu

SEQ ID NO: 1850236 - RNA, 20 nt, Human
cugacccaugcugcccugug

SEQ ID NO: 1850237 - RNA, 19 nt, Human
cugacccaugcugcccugu

SEQ ID NO: 1850238 - RNA, 17 nt, Human
cugacccaugcugcccu

SEQ ID NO: 1850239 - RNA, 18 nt, Human
cugacccaugcugcccug

SEQ ID NO: 1850240 - RNA, 23 nt, Human
cugacccugcuucaaauauuucc

SEQ ID NO: 1850241 - RNA, 15 nt, Human
cuccgccucccgggu

SEQ ID NO: 1850242 - RNA, 19 nt, Human
cuccgcuuucuacccagcg

SEQ ID NO: 1850243 - RNA, 12 nt, Human
cucccaccucag

SEQ ID NO: 1850244 - RNA, 13 nt, Human
cucccaccucagc

SEQ ID NO: 1850245 - RNA, 21 nt, Human
cuccagugagacagcucugca

SEQ ID NO: 1850246 - RNA, 19 nt, Human
cuccagacacauguccaag

SEQ ID NO: 1850247 - RNA, 17 nt, Human
cuccagacacaugucca

SEQ ID NO: 1850248 - RNA, 18 nt, Human
cuccagaauuucccaaag

SEQ ID NO: 1850249 - RNA, 15 nt, Human
cuccagaauuuccca

SEQ ID NO: 1850250 - RNA, 22 nt, Human
cuccacuuucuagccagaggag

SEQ ID NO: 1850251 - RNA, 21 nt, Human
cuccaagaccuucuccuucac

SEQ ID NO: 1850252 - RNA, 18 nt, Human
cuccaagaccuucuccuu

SEQ ID NO: 1850253 - RNA, 17 nt, Human
cuccaagaccuucuccu

SEQ ID NO: 1850254 - RNA, 16 nt, Human
cuccaagaccuucucc

SEQ ID NO: 1850255 - RNA, 11 nt, Human
cuccaggugca

SEQ ID NO: 1850256 - RNA, 12 nt, Human
cucauguucuua

SEQ ID NO: 1850257 - RNA, 14 nt, Human
cucauguucuuaau

SEQ ID NO: 1850258 - RNA, 18 nt, Human
cucauguucuuaauucuu

SEQ ID NO: 1850259 - RNA, 19 nt, Human
cucauguucuuaauucuua

SEQ ID NO: 1850260 - RNA, 20 nt, Human
cucaugccucagccuccuga

SEQ ID NO: 1850261 - RNA, 18 nt, Human
cucaugccucagccuccu

SEQ ID NO: 1850262 - RNA, 16 nt, Human
cuccaaagucucugga

SEQ ID NO: 1850263 - RNA, 13 nt, Human
cucagugccacua

SEQ ID NO: 1850264 - RNA, 18 nt, Human
cucagucuggcccuuccu

SEQ ID NO: 1850265 - RNA, 17 nt, Human
cucagucuggcccuucc

SEQ ID NO: 1850266 - RNA, 21 nt, Human
cucaggccugggggcugggca

SEQ ID NO: 1850267 - RNA, 20 nt, Human
cucaggccugggggcugggc

SEQ ID NO: 1850268 - RNA, 14 nt, Human
cucaggccuggggg

SEQ ID NO: 1850269 - RNA, 13 nt, Human
cucaggccugggg

SEQ ID NO: 1850270 - RNA, 22 nt, Human
cucagccucccaaagugcuggg

SEQ ID NO: 1850271 - RNA, 13 nt, Human
cucagccucccga

SEQ ID NO: 1850272 - RNA, 23 nt, Human
cucagccucccgaauagcuggga

SEQ ID NO: 1850273 - RNA, 17 nt, Human
cuaucccggcugcccuu

SEQ ID NO: 1850274 - RNA, 21 nt, Human
cucagccucccaaagugcugg

SEQ ID NO: 1850275 - RNA, 14 nt, Human
cucagccucccaaa

SEQ ID NO: 1850276 - RNA, 16 nt, Human
cucagccucccaaagu

SEQ ID NO: 1850277 - RNA, 16 nt, Human
cuaucccggcugcccu

SEQ ID NO: 1850278 - RNA, 15 nt, Human
cuaucccggcugccc

SEQ ID NO: 1850279 - RNA, 13 nt, Human
cucagccucccaa

SEQ ID NO: 1850280 - RNA, 13 nt, Human
cucagccuccuga

SEQ ID NO: 1850281 - RNA, 12 nt, Human
cucagccuccug

SEQ ID NO: 1850282 - RNA, 14 nt, Human
cucagccuccugag

SEQ ID NO: 1850283 - RNA, 22 nt, Human
cucagccuccugaguagcugga

SEQ ID NO: 1850284 - RNA, 22 nt, Human
cucaggccagcugcuugggcuu

SEQ ID NO: 1850285 - RNA, 21 nt, Human
cucaggccagcugcuugggcu

SEQ ID NO: 1850286 - RNA, 15 nt, Human
cucaggccagcugcu

SEQ ID NO: 1850287 - RNA, 14 nt, Human
cucaggccagcugc

SEQ ID NO: 1850288 - RNA, 13 nt, Human
cucaggccagcug

SEQ ID NO: 1850289 - RNA, 14 nt, Human
cucagcgaaugaau

SEQ ID NO: 1850290 - RNA, 13 nt, Human
cucagcggggaca

SEQ ID NO: 1850291 - RNA, 15 nt, Human
cuaacuucaccauau

SEQ ID NO: 1850292 - RNA, 16 nt, Human
cuaacuucaccauauu

SEQ ID NO: 1850293 - RNA, 17 nt, Human
cggcucuggccuccaag

SEQ ID NO: 1850294 - RNA, 23 nt, Human
cgugagccaccgugccuggccac

SEQ ID NO: 1850295 - RNA, 16 nt, Human
cgugagaccugccccu

SEQ ID NO: 1850296 - RNA, 14 nt, Human
cgugagaccugccc

SEQ ID NO: 1850297 - RNA, 13 nt, Human
cgugagaccugcc

SEQ ID NO: 1850298 - RNA, 23 nt, Human
cuaaacugcccccucugcccugc

SEQ ID NO: 1850299 - RNA, 22 nt, Human
cuaaacugcccccucugcccug

SEQ ID NO: 1850300 - RNA, 20 nt, Human
cuaagugaaauaagccagac

SEQ ID NO: 1850301 - RNA, 23 nt, Human
cuaagugaaauaagccagacauc

SEQ ID NO: 1850302 - RNA, 18 nt, Human
cuacauacaauuccaaac

SEQ ID NO: 1850303 - RNA, 15 nt, Human
cuacaugagguacug

SEQ ID NO: 1850304 - RNA, 20 nt, Human
cuacaguguacagucuugua

SEQ ID NO: 1850305 - RNA, 13 nt, Human
cuacaguugaaaa

SEQ ID NO: 1850306 - RNA, 15 nt, Human
cuacaguguacaguc

SEQ ID NO: 1850307 - RNA, 16 nt, Human
cuacaguguacagucu

SEQ ID NO: 1850308 - RNA, 17 nt, Human
cuacaguguacagucuu

SEQ ID NO: 1850309 - RNA, 18 nt, Human
cuacaguccucccaucuc

SEQ ID NO: 1850310 - RNA, 17 nt, Human
cuacaguccucccaucu

SEQ ID NO: 1850311 - RNA, 16 nt, Human
cuacaguccucccauc

SEQ ID NO: 1850312 - RNA, 15 nt, Human
cuacaguccucccau

SEQ ID NO: 1850313 - RNA, 18 nt, Human
cuaagugaggaugaaaaa

SEQ ID NO: 1850314 - RNA, 20 nt, Human
cuaagugauccucccaccuc

SEQ ID NO: 1850315 - RNA, 22 nt, Human
cuaagugauccucccaccucag

SEQ ID NO: 1850316 - RNA, 16 nt, Human
cuagaacucccuuuca

SEQ ID NO: 1850317 - RNA, 17 nt, Human
cuagaacucccuuucaa

SEQ ID NO: 1850318 - RNA, 18 nt, Human
cuagaacucccuuucaac

SEQ ID NO: 1850319 - RNA, 19 nt, Human
cuagaacucccuuucaaca

SEQ ID NO: 1850320 - RNA, 22 nt, Human
cuagcagcagggagggcuucug

SEQ ID NO: 1850321 - RNA, 15 nt, Human
cuagaacugaauuuu

SEQ ID NO: 1850322 - RNA, 17 nt, Human
cuagcauggcugccaau

SEQ ID NO: 1850323 - RNA, 23 nt, Human
cuagcagcagggagggcuucugc

SEQ ID NO: 1850324 - RNA, 19 nt, Human
cuagaaauuccccacccug

SEQ ID NO: 1850325 - RNA, 14 nt, Human
cuaccugaggggcc

SEQ ID NO: 1850326 - RNA, 11 nt, Human
cuaccugaggg

SEQ ID NO: 1850327 - RNA, 15 nt, Human
cuaccugaggggccu

SEQ ID NO: 1850328 - RNA, 19 nt, Human
cuagggaaaaaccagcgug

SEQ ID NO: 1850329 - RNA, 21 nt, Human
cuagggaaaaaccagcgugug

SEQ ID NO: 1850330 - RNA, 20 nt, Human
cuaguuccaccaucaagcca

SEQ ID NO: 1850331 - RNA, 18 nt, Human
cuaguuccaccaucaagc

SEQ ID NO: 1850332 - RNA, 22 nt, Human
cuaguuccaccaucaagccacc

SEQ ID NO: 1850333 - RNA, 16 nt, Human
cgaccugccucggccu

SEQ ID NO: 1850334 - RNA, 12 nt, Human
cgccaaggcugg

SEQ ID NO: 1850335 - RNA, 20 nt, Human
cgcaggcuggcccugcccug

SEQ ID NO: 1850336 - RNA, 19 nt, Human
cgcaggcuggcccugcccu

SEQ ID NO: 1850337 - RNA, 18 nt, Human
cgcaggcuggcccugccc

SEQ ID NO: 1850338 - RNA, 17 nt, Human
cgcaggcuggcccugcc

SEQ ID NO: 1850339 - RNA, 15 nt, Human
cgcaggcuggcccug

SEQ ID NO: 1850340 - RNA, 14 nt, Human
cgcaggcuggcccu

SEQ ID NO: 1850341 - RNA, 16 nt, Human
cgccaaggcuggggga

SEQ ID NO: 1850342 - RNA, 13 nt, Human
cgccaaggcuggg

SEQ ID NO: 1850343 - RNA, 23 nt, Human
cgccaaggcugggggaagaagcu

SEQ ID NO: 1850344 - RNA, 14 nt, Human
cgccuacaggagug

SEQ ID NO: 1850345 - RNA, 18 nt, Human
cgaguuacagacaaagcg

SEQ ID NO: 1850346 - RNA, 17 nt, Human
cgaguuacagacaaagc

SEQ ID NO: 1850347 - RNA, 13 nt, Human
cgaguagcuggga

SEQ ID NO: 1850348 - RNA, 14 nt, Human
cgaguagcugggac

SEQ ID NO: 1850349 - RNA, 15 nt, Human
cgaguagcugggacu

SEQ ID NO: 1850350 - RNA, 16 nt, Human
cgaguagcugggacua

SEQ ID NO: 1850351 - RNA, 18 nt, Human
cggaggggccuggcagcc

SEQ ID NO: 1850352 - RNA, 16 nt, Human
cggaggggccuggcag

SEQ ID NO: 1850353 - RNA, 14 nt, Human
cggagucccaccuu

SEQ ID NO: 1850354 - RNA, 21 nt, Human
cggcucacugcauccuccgcc

SEQ ID NO: 1850355 - RNA, 17 nt, Human
cggcucacugcauccuc

SEQ ID NO: 1850356 - RNA, 19 nt, Human
cggcucacugcagccucaa

SEQ ID NO: 1850357 - RNA, 18 nt, Human
cggcucacugcagccuca

SEQ ID NO: 1850358 - RNA, 22 nt, Human
ccuucugacccaugcugcccug

SEQ ID NO: 1850359 - RNA, 21 nt, Human
ccuucugacccaugcugcccu

SEQ ID NO: 1850360 - RNA, 23 nt, Human
ccuucugacccaugcugcccugu

SEQ ID NO: 1850361 - RNA, 22 nt, Human
ccuucuggaauaaggagaauga

SEQ ID NO: 1850362 - RNA, 20 nt, Human
ccuucugacccaugcugccc

SEQ ID NO: 1850363 - RNA, 17 nt, Human
ccuucugacccaugcug

SEQ ID NO: 1850364 - RNA, 16 nt, Human
ccuucugacccaugcu

SEQ ID NO: 1850365 - RNA, 12 nt, Human
ccuucugaccca

SEQ ID NO: 1850366 - RNA, 15 nt, Human
ccuggccugagcugg

SEQ ID NO: 1850367 - RNA, 14 nt, Human
ccuggccugagcug

SEQ ID NO: 1850368 - RNA, 20 nt, Human
ccuggccugagcugggauga

SEQ ID NO: 1850369 - RNA, 20 nt, Human
ccuucugaaaaaguauccug

SEQ ID NO: 1850370 - RNA, 20 nt, Human
ccuugccgucuaccugaggg

SEQ ID NO: 1850371 - RNA, 17 nt, Human
ccuugccgucuaccuga

SEQ ID NO: 1850372 - RNA, 14 nt, Human
ccuuuagcgcccag

SEQ ID NO: 1850373 - RNA, 20 nt, Human
ccuuuagcgcccaguugggu

SEQ ID NO: 1850374 - RNA, 15 nt, Human
cgacagugagacucu

SEQ ID NO: 1850375 - RNA, 16 nt, Human
cgacagugagacucug

SEQ ID NO: 1850376 - RNA, 17 nt, Human
ccuuuuuuauacauaaa

SEQ ID NO: 1850377 - RNA, 18 nt, Human
ccuuuuuuauacauaaac

SEQ ID NO: 1850378 - RNA, 19 nt, Human
ccuuuuuuauacauaaaca

SEQ ID NO: 1850379 - RNA, 14 nt, Human
cgaccaccugccca

SEQ ID NO: 1850380 - RNA, 12 nt, Human
cgaccaccugcc

SEQ ID NO: 1850381 - RNA, 23 nt, Human
cgaccagacaccuugacagggca

SEQ ID NO: 1850382 - RNA, 12 nt, Human
ccuuuuuuauac

SEQ ID NO: 1850383 - RNA, 23 nt, Human
ccagaugcaccagcccuuagcag

SEQ ID NO: 1850384 - RNA, 18 nt, Human
ccagaugcaccagcccuu

SEQ ID NO: 1850385 - RNA, 17 nt, Human
ccagaugcaccagcccu

SEQ ID NO: 1850386 - RNA, 15 nt, Human
ccagaugcaccagcc

SEQ ID NO: 1850387 - RNA, 20 nt, Human
ccagagggccugcaagggag

SEQ ID NO: 1850388 - RNA, 19 nt, Human
ccagagggccugcaaggga

SEQ ID NO: 1850389 - RNA, 18 nt, Human
ccagagggccugcaaggg

SEQ ID NO: 1850390 - RNA, 17 nt, Human
ccagagggccugcaagg

SEQ ID NO: 1850391 - RNA, 16 nt, Human
ccaccuuggcucaagu

SEQ ID NO: 1850392 - RNA, 13 nt, Human
ccaggaagccagc

SEQ ID NO: 1850393 - RNA, 14 nt, Human
ccaggaagccagca

SEQ ID NO: 1850394 - RNA, 12 nt, Human
ccaggaagccag

SEQ ID NO: 1850395 - RNA, 15 nt, Human
ccaggaaaggcucca

SEQ ID NO: 1850396 - RNA, 14 nt, Human
ccaggaaaggcucc

SEQ ID NO: 1850397 - RNA, 16 nt, Human
ccaggaaaggcuccag

SEQ ID NO: 1850398 - RNA, 12 nt, Human
ccagccccugga

SEQ ID NO: 1850399 - RNA, 11 nt, Human
ccagccccugg

SEQ ID NO: 1850400 - RNA, 19 nt, Human
ccagcuuaaaggggcuaga

SEQ ID NO: 1850401 - RNA, 16 nt, Human
ccagcuuaucucaggg

SEQ ID NO: 1850402 - RNA, 17 nt, Human
ccagcuguucagcuggu

SEQ ID NO: 1850403 - RNA, 15 nt, Human
ccagcucaccagccc

SEQ ID NO: 1850404 - RNA, 16 nt, Human
ccagcucaccagcccc

SEQ ID NO: 1850405 - RNA, 16 nt, Human
ccagcuguucagcugg

SEQ ID NO: 1850406 - RNA, 22 nt, Human
ccagcucaccagccccagugcc

SEQ ID NO: 1850407 - RNA, 15 nt, Human
ccagcaggcucucag

SEQ ID NO: 1850408 - RNA, 13 nt, Human
ccagcaggcucuc

SEQ ID NO: 1850409 - RNA, 18 nt, Human
ccaggcacugcugcccag

SEQ ID NO: 1850410 - RNA, 16 nt, Human
ccaggcacugcugccc

SEQ ID NO: 1850411 - RNA, 17 nt, Human
ccaggggugggacaccc

SEQ ID NO: 1850412 - RNA, 14 nt, Human
ccaggggugggaca

SEQ ID NO: 1850413 - RNA, 19 nt, Human
ccaggggugggacacccug

SEQ ID NO: 1850414 - RNA, 23 nt, Human
ccaggggugggacacccugugau

SEQ ID NO: 1850415 - RNA, 13 nt, Human
ccaggggugggac

SEQ ID NO: 1850416 - RNA, 20 nt, Human
ccaggggaaaaucagccugc

SEQ ID NO: 1850417 - RNA, 19 nt, Human
ccaggggaaaaucagccug

SEQ ID NO: 1850418 - RNA, 20 nt, Human
ccaggcuccuuuagcgccca

SEQ ID NO: 1850419 - RNA, 21 nt, Human
ccaggcuccuuuagcgcccag

SEQ ID NO: 1850420 - RNA, 19 nt, Human
ccaggcuggcgugcagugg

SEQ ID NO: 1850421 - RNA, 17 nt, Human
ccaggcuggcgugcagu

SEQ ID NO: 1850422 - RNA, 18 nt, Human
ccaggcuggcgugcagug

SEQ ID NO: 1850423 - RNA, 17 nt, Human
ccaguuggguggaugcc

SEQ ID NO: 1850424 - RNA, 19 nt, Human
ccaguuggguggaugccug

SEQ ID NO: 1850425 - RNA, 20 nt, Human
ccaguuggguggaugccugg

SEQ ID NO: 1850426 - RNA, 20 nt, Human
ccaucccugaaggccccgcc

SEQ ID NO: 1850427 - RNA, 17 nt, Human
ccaucccugaaggcccc

SEQ ID NO: 1850428 - RNA, 15 nt, Human
ccaucccugaaggcc

SEQ ID NO: 1850429 - RNA, 14 nt, Human
ccaucccugaaggc

SEQ ID NO: 1850430 - RNA, 13 nt, Human
ccaucccagcccc

SEQ ID NO: 1850431 - RNA, 15 nt, Human
ccaucccagccccaa

SEQ ID NO: 1850432 - RNA, 14 nt, Human
ccaucccagcccca

SEQ ID NO: 1850433 - RNA, 23 nt, Human
ccaguuggucccccuuccaugga

SEQ ID NO: 1850434 - RNA, 21 nt, Human
ccaugagccucagcauccugg

SEQ ID NO: 1850435 - RNA, 23 nt, Human
ccaugagccucagcauccuggca

SEQ ID NO: 1850436 - RNA, 20 nt, Human
ccauggucggaaaacaugcu

SEQ ID NO: 1850437 - RNA, 22 nt, Human
cccacccaagggccuggccuga

SEQ ID NO: 1850438 - RNA, 21 nt, Human
cccacccaagggccuggccug

SEQ ID NO: 1850439 - RNA, 20 nt, Human
cccacccaagggccuggccu

SEQ ID NO: 1850440 - RNA, 15 nt, Human
cccacccccacccaa

SEQ ID NO: 1850441 - RNA, 17 nt, Human
cccacccccacccaagg

SEQ ID NO: 1850442 - RNA, 18 nt, Human
cccacccugaaagcccug

SEQ ID NO: 1850443 - RNA, 22 nt, Human
cccacugcuuuuggucugugug

SEQ ID NO: 1850444 - RNA, 19 nt, Human
cccacugcuuuuggucugu

SEQ ID NO: 1850445 - RNA, 12 nt, Human
cccacugcucug

SEQ ID NO: 1850446 - RNA, 13 nt, Human
cccacugcucugg

SEQ ID NO: 1850447 - RNA, 18 nt, Human
cccacuagacccacugga

SEQ ID NO: 1850448 - RNA, 23 nt, Human
cccagcucugguccauagagagc

SEQ ID NO: 1850449 - RNA, 13 nt, Human
cccauccucugua

SEQ ID NO: 1850450 - RNA, 15 nt, Human
cccagcuugaaaccu

SEQ ID NO: 1850451 - RNA, 13 nt, Human
cccaggcuggcgu

SEQ ID NO: 1850452 - RNA, 17 nt, Human
cccaggcuggcgugcag

SEQ ID NO: 1850453 - RNA, 20 nt, Human
cccauauuuguacaccaaua

SEQ ID NO: 1850454 - RNA, 19 nt, Human
ccccucuggcuccagcugg

SEQ ID NO: 1850455 - RNA, 14 nt, Human
cccgaauagcuggg

SEQ ID NO: 1850456 - RNA, 14 nt, Human
cccggccaccugcg

SEQ ID NO: 1850457 - RNA, 13 nt, Human
cccggccaccugc

SEQ ID NO: 1850458 - RNA, 11 nt, Human
cccggcuccag

SEQ ID NO: 1850459 - RNA, 12 nt, Human
cccggcuccagg

SEQ ID NO: 1850460 - RNA, 13 nt, Human
cccggcuccaggc

SEQ ID NO: 1850461 - RNA, 14 nt, Human
cccggcuccaggcu

SEQ ID NO: 1850462 - RNA, 15 nt, Human
cccggcuccaggcuc

SEQ ID NO: 1850463 - RNA, 16 nt, Human
cccggcuccaggcucc

SEQ ID NO: 1850464 - RNA, 17 nt, Human
cccggccaccugcggug

SEQ ID NO: 1850465 - RNA, 23 nt, Human
cccgggaggcagagguugcagug

SEQ ID NO: 1850466 - RNA, 18 nt, Human
cccuauuagagaagagau

SEQ ID NO: 1850467 - RNA, 17 nt, Human
cccuauugguaaagaau

SEQ ID NO: 1850468 - RNA, 23 nt, Human
ccccgaggccuucucugaaggac

SEQ ID NO: 1850469 - RNA, 23 nt, Human
ccccaaaacucuccucugcugcu

SEQ ID NO: 1850470 - RNA, 22 nt, Human
cccauuguggucacaggaagua

SEQ ID NO: 1850471 - RNA, 23 nt, Human
cccauuguggucacaggaaguag

SEQ ID NO: 1850472 - RNA, 22 nt, Human
ccccaaaacucuccucugcugc

SEQ ID NO: 1850473 - RNA, 22 nt, Human
cccccaaauggaaaugggcaga

SEQ ID NO: 1850474 - RNA, 23 nt, Human
ccccgacccuugccgucuaccug

SEQ ID NO: 1850475 - RNA, 13 nt, Human
ccccagaggcugg

SEQ ID NO: 1850476 - RNA, 22 nt, Human
ccccagcaagugagagcugggu

SEQ ID NO: 1850477 - RNA, 15 nt, Human
ccuggccucugcacu

SEQ ID NO: 1850478 - RNA, 14 nt, Human
ccuggccucugcac

SEQ ID NO: 1850479 - RNA, 13 nt, Human
ccuggccugagcu

SEQ ID NO: 1850480 - RNA, 16 nt, Human
ccuggccucugcacuc

SEQ ID NO: 1850481 - RNA, 12 nt, Human
ccuggccucugc

SEQ ID NO: 1850482 - RNA, 20 nt, Human
ccugcuggguguggcgcagc

SEQ ID NO: 1850483 - RNA, 14 nt, Human
ccugcugggugugg

SEQ ID NO: 1850484 - RNA, 21 nt, Human
ccugcuggguguggcgcagca

SEQ ID NO: 1850485 - RNA, 12 nt, Human
ccugcugggugu

SEQ ID NO: 1850486 - RNA, 14 nt, Human
ccugcccaggcccc

SEQ ID NO: 1850487 - RNA, 15 nt, Human
ccugcccaggccccu

SEQ ID NO: 1850488 - RNA, 16 nt, Human
ccugcccaggccccug

SEQ ID NO: 1850489 - RNA, 18 nt, Human
ccugcccaggccccugcc

SEQ ID NO: 1850490 - RNA, 13 nt, Human
ccuggaugcagcc

SEQ ID NO: 1850491 - RNA, 21 nt, Human
ccuggauccaucaggccacuu

SEQ ID NO: 1850492 - RNA, 17 nt, Human
ccuggaugcagccucac

SEQ ID NO: 1850493 - RNA, 14 nt, Human
ccuggaugcagccu

SEQ ID NO: 1850494 - RNA, 19 nt, Human
ccuggaugcagccucacag

SEQ ID NO: 1850495 - RNA, 17 nt, Human
ccuggaguucugguucc

SEQ ID NO: 1850496 - RNA, 16 nt, Human
ccuggaguucugguuc

SEQ ID NO: 1850497 - RNA, 15 nt, Human
ccuggaguucugguu

SEQ ID NO: 1850498 - RNA, 18 nt, Human
ccuggcacagggcagugg

SEQ ID NO: 1850499 - RNA, 17 nt, Human
ccuggcacagggcagug

SEQ ID NO: 1850500 - RNA, 16 nt, Human
ccuggcacagggcagu

SEQ ID NO: 1850501 - RNA, 18 nt, Human
ccuggcacccggccccug

SEQ ID NO: 1850502 - RNA, 13 nt, Human
ccucuugagccuu

SEQ ID NO: 1850503 - RNA, 19 nt, Human
ccucuugagccuugaacuu

SEQ ID NO: 1850504 - RNA, 13 nt, Human
ccucuuggguuca

SEQ ID NO: 1850505 - RNA, 20 nt, Human
ccugaguagcuggauuacag

SEQ ID NO: 1850506 - RNA, 15 nt, Human
ccugaguagcuggau

SEQ ID NO: 1850507 - RNA, 19 nt, Human
ccugaguagcuggauuaca

SEQ ID NO: 1850508 - RNA, 22 nt, Human
ccugcacuugcagacucuacag

SEQ ID NO: 1850509 - RNA, 12 nt, Human
ccucucucaggc

SEQ ID NO: 1850510 - RNA, 17 nt, Human
ccucucucacuccuuga

SEQ ID NO: 1850511 - RNA, 15 nt, Human
ccucucucacuccuu

SEQ ID NO: 1850512 - RNA, 14 nt, Human
ccucucucacuccu

SEQ ID NO: 1850513 - RNA, 13 nt, Human
ccucucucacucc

SEQ ID NO: 1850514 - RNA, 14 nt, Human
ccucucucaggcca

SEQ ID NO: 1850515 - RNA, 20 nt, Human
ccucucugcaggucccuaau

SEQ ID NO: 1850516 - RNA, 15 nt, Human
ccucucugcaggucc

SEQ ID NO: 1850517 - RNA, 13 nt, Human
ccucucugcaggu

SEQ ID NO: 1850518 - RNA, 18 nt, Human
ccucugcugcuggcuggu

SEQ ID NO: 1850519 - RNA, 17 nt, Human
ccucugcugcuggcugg

SEQ ID NO: 1850520 - RNA, 16 nt, Human
ccucugcugcuggcug

SEQ ID NO: 1850521 - RNA, 15 nt, Human
ccucugcugcuggcu

SEQ ID NO: 1850522 - RNA, 14 nt, Human
ccucugcugcuggc

SEQ ID NO: 1850523 - RNA, 13 nt, Human
ccucugcugcugg

SEQ ID NO: 1850524 - RNA, 18 nt, Human
ccucugcugauccuccca

SEQ ID NO: 1850525 - RNA, 15 nt, Human
ccucugcugauccuc

SEQ ID NO: 1850526 - RNA, 22 nt, Human
ccucucugcaggucccuaauaa

SEQ ID NO: 1850527 - RNA, 21 nt, Human
ccucucugcaggucccuaaua

SEQ ID NO: 1850528 - RNA, 23 nt, Human
ccucucugcaggucccuaauaaa

SEQ ID NO: 1850529 - RNA, 12 nt, Human
ccucucugcccu

SEQ ID NO: 1850530 - RNA, 12 nt, Human
ccucugccuguc

SEQ ID NO: 1850531 - RNA, 22 nt, Human
ccucugccugaagucacacagu

SEQ ID NO: 1850532 - RNA, 23 nt, Human
cccuucugacccaugcugcccug

SEQ ID NO: 1850533 - RNA, 22 nt, Human
cccuucugacccaugcugcccu

SEQ ID NO: 1850534 - RNA, 21 nt, Human
cccuucugacccaugcugccc

SEQ ID NO: 1850535 - RNA, 16 nt, Human
cccuucuaccuuccug

SEQ ID NO: 1850536 - RNA, 16 nt, Human
cccuucgcuccugugu

SEQ ID NO: 1850537 - RNA, 18 nt, Human
cccuucgcuccugugucu

SEQ ID NO: 1850538 - RNA, 20 nt, Human
ccgcccaggcuuagucacug

SEQ ID NO: 1850539 - RNA, 16 nt, Human
ccgccaugcuccuggc

SEQ ID NO: 1850540 - RNA, 17 nt, Human
ccgccaaggcuggggga

SEQ ID NO: 1850541 - RNA, 16 nt, Human
ccgacccuugccgucu

SEQ ID NO: 1850542 - RNA, 20 nt, Human
ccgaauagcugggacuacag

SEQ ID NO: 1850543 - RNA, 13 nt, Human
cccuggcagcccc

SEQ ID NO: 1850544 - RNA, 12 nt, Human
cccuggcagccc

SEQ ID NO: 1850545 - RNA, 21 nt, Human
cccugcccugugggcccccaa

SEQ ID NO: 1850546 - RNA, 20 nt, Human
cccugcccugugggccccca

SEQ ID NO: 1850547 - RNA, 16 nt, Human
cccugcccugugggcc

SEQ ID NO: 1850548 - RNA, 15 nt, Human
cccugcccugugggc

SEQ ID NO: 1850549 - RNA, 14 nt, Human
cccugcccuguggg

SEQ ID NO: 1850550 - RNA, 11 nt, Human
cccugcccugu

SEQ ID NO: 1850551 - RNA, 12 nt, Human
cccugcccugug

SEQ ID NO: 1850552 - RNA, 13 nt, Human
cccugcccugugg

SEQ ID NO: 1850553 - RNA, 17 nt, Human
cccuggcuuuucacugc

SEQ ID NO: 1850554 - RNA, 13 nt, Human
cccuggcuuuuca

SEQ ID NO: 1850555 - RNA, 19 nt, Human
cccuggcucccacaggccc

SEQ ID NO: 1850556 - RNA, 17 nt, Human
cccuggcucccacaggc

SEQ ID NO: 1850557 - RNA, 16 nt, Human
cccuggcagccccugu

SEQ ID NO: 1850558 - RNA, 14 nt, Human
cccuggcagccccu

SEQ ID NO: 1850559 - RNA, 15 nt, Human
ccuauuuuaauaaac

SEQ ID NO: 1850560 - RNA, 15 nt, Human
ccucaagagaaggca

SEQ ID NO: 1850561 - RNA, 15 nt, Human
ccucaacucuccucc

SEQ ID NO: 1850562 - RNA, 11 nt, Human
ccucagccucc

SEQ ID NO: 1850563 - RNA, 22 nt, Human
ccucagccucccaaagugcugg

SEQ ID NO: 1850564 - RNA, 20 nt, Human
ccucccaggcgccccuuccc

SEQ ID NO: 1850565 - RNA, 14 nt, Human
ccucccaggcgccc

SEQ ID NO: 1850566 - RNA, 22 nt, Human
ccucccaaggggcccaaauucu

SEQ ID NO: 1850567 - RNA, 22 nt, Human
ccuccaaucccaccaacccuca

SEQ ID NO: 1850568 - RNA, 18 nt, Human
ccuccaaguccacagugg

SEQ ID NO: 1850569 - RNA, 21 nt, Human
ccuccaaguccacaguggaac

SEQ ID NO: 1850570 - RNA, 18 nt, Human
ccucauuagcauuuugcu

SEQ ID NO: 1850571 - RNA, 22 nt, Human
ccuccaagcuccaucuccacuc

SEQ ID NO: 1850572 - RNA, 21 nt, Human
ccuccaagcuccaucuccacu

SEQ ID NO: 1850573 - RNA, 19 nt, Human
ccucauguucuuaauucuu

SEQ ID NO: 1850574 - RNA, 20 nt, Human
ccucauguccacugguucuu

SEQ ID NO: 1850575 - RNA, 14 nt, Human
ccucagccuccuga

SEQ ID NO: 1850576 - RNA, 13 nt, Human
ccucauguucuua

SEQ ID NO: 1850577 - RNA, 15 nt, Human
ccucauguccacugg

SEQ ID NO: 1850578 - RNA, 13 nt, Human
ccucagccuccug

SEQ ID NO: 1850579 - RNA, 23 nt, Human
ccucagccucccaaagugcuggg

SEQ ID NO: 1850580 - RNA, 22 nt, Human
ccucagccucccgaauagcugg

SEQ ID NO: 1850581 - RNA, 23 nt, Human
ccuaggcauuugcugaauacaga

SEQ ID NO: 1850582 - RNA, 18 nt, Human
ccgucucugguuccuccc

SEQ ID NO: 1850583 - RNA, 14 nt, Human
ccuaauaaagcugu

SEQ ID NO: 1850584 - RNA, 23 nt, Human
ccuaauaaagcuguguggcaguc

SEQ ID NO: 1850585 - RNA, 19 nt, Human
ccggcuaauuuuuguauuu

SEQ ID NO: 1850586 - RNA, 17 nt, Human
ccggcuaugggggcacu

SEQ ID NO: 1850587 - RNA, 23 nt, Human
ccggcuaugggggcacugaggac

SEQ ID NO: 1850588 - RNA, 22 nt, Human
ccggcuaugggggcacugagga

SEQ ID NO: 1850589 - RNA, 16 nt, Human
ccguagguuauuuuca

SEQ ID NO: 1850590 - RNA, 20 nt, Human
auugcuacuguccuacccac

SEQ ID NO: 1850591 - RNA, 22 nt, Human
auugcuacuguccuacccaccc

SEQ ID NO: 1850592 - RNA, 17 nt, Human
auugauaugcuuauaca

SEQ ID NO: 1850593 - RNA, 15 nt, Human
auugcuacuguccua

SEQ ID NO: 1850594 - RNA, 21 nt, Human
auugauaagaaccuuuugagu

SEQ ID NO: 1850595 - RNA, 13 nt, Human
auucuuuccugag

SEQ ID NO: 1850596 - RNA, 11 nt, Human
auucuucugcu

SEQ ID NO: 1850597 - RNA, 12 nt, Human
auucuucugcuu

SEQ ID NO: 1850598 - RNA, 11 nt, Human
auucuuuccug

SEQ ID NO: 1850599 - RNA, 14 nt, Human
auucuucugcuuca

SEQ ID NO: 1850600 - RNA, 19 nt, Human
auugcugauggugcaauga

SEQ ID NO: 1850601 - RNA, 18 nt, Human
auugcugauggugcaaug

SEQ ID NO: 1850602 - RNA, 16 nt, Human
auugcugauggugcaa

SEQ ID NO: 1850603 - RNA, 15 nt, Human
auugcugauggugca

SEQ ID NO: 1850604 - RNA, 12 nt, Human
auugcuccuuga

SEQ ID NO: 1850605 - RNA, 14 nt, Human
auugcuugagcuca

SEQ ID NO: 1850606 - RNA, 23 nt, Human
auugcugauggugcaaugaccuu

SEQ ID NO: 1850607 - RNA, 12 nt, Human
auugcugcuuga

SEQ ID NO: 1850608 - RNA, 14 nt, Human
auuguaaaauggug

SEQ ID NO: 1850609 - RNA, 18 nt, Human
auugcuugagcucaggag

SEQ ID NO: 1850610 - RNA, 23 nt, Human
auuguaauaggcguaacuaauuu

SEQ ID NO: 1850611 - RNA, 23 nt, Human
auugugucucuugguccugcugc

SEQ ID NO: 1850612 - RNA, 21 nt, Human
auugugucucuugguccugcu

SEQ ID NO: 1850613 - RNA, 16 nt, Human
auuguuagucucuuga

SEQ ID NO: 1850614 - RNA, 19 nt, Human
auucauagcagcuuauuca

SEQ ID NO: 1850615 - RNA, 22 nt, Human
auucauagcagcuuauucacaa

SEQ ID NO: 1850616 - RNA, 19 nt, Human
auucauaaugacuuaagca

SEQ ID NO: 1850617 - RNA, 21 nt, Human
auucauaauuauuauuuggcc

SEQ ID NO: 1850618 - RNA, 15 nt, Human
auucauaaugacuua

SEQ ID NO: 1850619 - RNA, 14 nt, Human
auucauaaugacuu

SEQ ID NO: 1850620 - RNA, 23 nt, Human
auuaugcaugaaguaauaugcac

SEQ ID NO: 1850621 - RNA, 19 nt, Human
auucacaagacccaaaagg

SEQ ID NO: 1850622 - RNA, 21 nt, Human
auuaggugugacugaauuucu

SEQ ID NO: 1850623 - RNA, 16 nt, Human
auuaggugugacugaa

SEQ ID NO: 1850624 - RNA, 18 nt, Human
auuaggugugacugaauu

SEQ ID NO: 1850625 - RNA, 23 nt, Human
auguuugggagacugcugaguca

SEQ ID NO: 1850626 - RNA, 18 nt, Human
auguuugccucugccucu

SEQ ID NO: 1850627 - RNA, 16 nt, Human
auuacaggugugaacc

SEQ ID NO: 1850628 - RNA, 17 nt, Human
auuacaggaaguacugg

SEQ ID NO: 1850629 - RNA, 17 nt, Human
auuagcaguuugcuuug

SEQ ID NO: 1850630 - RNA, 19 nt, Human
auuagcauuugucaacaaa

SEQ ID NO: 1850631 - RNA, 23 nt, Human
auuagauuucucauuugccaaua

SEQ ID NO: 1850632 - RNA, 15 nt, Human
auuugugauacaaug

SEQ ID NO: 1850633 - RNA, 17 nt, Human
auuugugauacaaugcu

SEQ ID NO: 1850634 - RNA, 20 nt, Human
auuugugauacaaugcugug

SEQ ID NO: 1850635 - RNA, 14 nt, Human
auuugugccagaau

SEQ ID NO: 1850636 - RNA, 12 nt, Human
auuuggaaaaua

SEQ ID NO: 1850637 - RNA, 13 nt, Human
auuuggaaaauaa

SEQ ID NO: 1850638 - RNA, 13 nt, Human
auuugcuccuuuc

SEQ ID NO: 1850639 - RNA, 22 nt, Human
auuuguuugaacugauaaagau

SEQ ID NO: 1850640 - RNA, 23 nt, Human
auuuguuugaacugauaaagaug

SEQ ID NO: 1850641 - RNA, 19 nt, Human
auuuuauagcuacuaauuu

SEQ ID NO: 1850642 - RNA, 17 nt, Human
auuuuauagcuacuaau

SEQ ID NO: 1850643 - RNA, 15 nt, Human
auuugccaauaauaa

SEQ ID NO: 1850644 - RNA, 16 nt, Human
auuugccaauaauaau

SEQ ID NO: 1850645 - RNA, 17 nt, Human
caaagcagugcaugcug

SEQ ID NO: 1850646 - RNA, 15 nt, Human
caaagcagugcaugc

SEQ ID NO: 1850647 - RNA, 22 nt, Human
caaaguacacuguuucaaacuu

SEQ ID NO: 1850648 - RNA, 21 nt, Human
caaaguagaagucuuagaugu

SEQ ID NO: 1850649 - RNA, 14 nt, Human
caaaguagaagucu

SEQ ID NO: 1850650 - RNA, 21 nt, Human
caaagucucuggaauuugaaa

SEQ ID NO: 1850651 - RNA, 22 nt, Human
caaagauauuuugcuuugugau

SEQ ID NO: 1850652 - RNA, 23 nt, Human
caaagauauuuugcuuugugauu

SEQ ID NO: 1850653 - RNA, 14 nt, Human
caacacuaacauga

SEQ ID NO: 1850654 - RNA, 20 nt, Human
caacaccucugcacaagcug

SEQ ID NO: 1850655 - RNA, 22 nt, Human
caaauggaaaugggcagagcag

SEQ ID NO: 1850656 - RNA, 21 nt, Human
caaauggaaaugggcagagca

SEQ ID NO: 1850657 - RNA, 20 nt, Human
caaauggaaaugggcagagc

SEQ ID NO: 1850658 - RNA, 20 nt, Human
caaagauauuuugcuuugug

SEQ ID NO: 1850659 - RNA, 19 nt, Human
caaaccaucauugaaaucu

SEQ ID NO: 1850660 - RNA, 21 nt, Human
caaaccaucauugaaaucuuu

SEQ ID NO: 1850661 - RNA, 15 nt, Human
caaaaggcagaagca

SEQ ID NO: 1850662 - RNA, 18 nt, Human
caaaagaugcuucucacu

SEQ ID NO: 1850663 - RNA, 20 nt, Human
caaaaaaaaaaaaaaauuag

SEQ ID NO: 1850664 - RNA, 16 nt, Human
caaaagaugcuucuca

SEQ ID NO: 1850665 - RNA, 11 nt, Human
caccccagccc

SEQ ID NO: 1850666 - RNA, 16 nt, Human
caccugccccucaacu

SEQ ID NO: 1850667 - RNA, 15 nt, Human
caccugccccucaac

SEQ ID NO: 1850668 - RNA, 14 nt, Human
caccugccccucaa

SEQ ID NO: 1850669 - RNA, 23 nt, Human
caccugccucggccucccaaagu

SEQ ID NO: 1850670 - RNA, 13 nt, Human
caccuacagugua

SEQ ID NO: 1850671 - RNA, 16 nt, Human
caccuacaguguacag

SEQ ID NO: 1850672 - RNA, 17 nt, Human
caccuacaguguacagu

SEQ ID NO: 1850673 - RNA, 17 nt, Human
cacccuggggagaaagu

SEQ ID NO: 1850674 - RNA, 14 nt, Human
caccucagccuccc

SEQ ID NO: 1850675 - RNA, 20 nt, Human
caccuacaguguacagucuu

SEQ ID NO: 1850676 - RNA, 23 nt, Human
caccuacaguguacagucuugua

SEQ ID NO: 1850677 - RNA, 13 nt, Human
caccucagccucc

SEQ ID NO: 1850678 - RNA, 14 nt, Human
cacccucaggcagg

SEQ ID NO: 1850679 - RNA, 17 nt, Human
cacccugaaagcccuga

SEQ ID NO: 1850680 - RNA, 15 nt, Human
cacccuggggagaaa

SEQ ID NO: 1850681 - RNA, 16 nt, Human
cacccuggggagaaag

SEQ ID NO: 1850682 - RNA, 24 nt, Human
caccugccuguugggccaggagcc

SEQ ID NO: 1850683 - RNA, 19 nt, Human
caccugccuguugggccag

SEQ ID NO: 1850684 - RNA, 17 nt, Human
caccugccuguugggcc

SEQ ID NO: 1850685 - RNA, 14 nt, Human
caccuuggcugcag

SEQ ID NO: 1850686 - RNA, 15 nt, Human
caccuuggcucaagu

SEQ ID NO: 1850687 - RNA, 13 nt, Human
caccuuggcugca

SEQ ID NO: 1850688 - RNA, 16 nt, Human
cacuccagccugggug

SEQ ID NO: 1850689 - RNA, 15 nt, Human
cacuccagcugggau

SEQ ID NO: 1850690 - RNA, 12 nt, Human
cacuccagcugg

SEQ ID NO: 1850691 - RNA, 11 nt, Human
cacuccagcug

SEQ ID NO: 1850692 - RNA, 14 nt, Human
cacuaggcuucugg

SEQ ID NO: 1850693 - RNA, 15 nt, Human
cacuccccugcuggg

SEQ ID NO: 1850694 - RNA, 14 nt, Human
cacuccccugcugg

SEQ ID NO: 1850695 - RNA, 13 nt, Human
cacuccccugcug

SEQ ID NO: 1850696 - RNA, 12 nt, Human
cacuccccugcu

SEQ ID NO: 1850697 - RNA, 22 nt, Human
cacugguucuucuuggucucag

SEQ ID NO: 1850698 - RNA, 23 nt, Human
cacugguggcccgacagccuggc

SEQ ID NO: 1850699 - RNA, 18 nt, Human
cacuuacacuuuaugcac

SEQ ID NO: 1850700 - RNA, 16 nt, Human
cacuuacacuuuaugc

SEQ ID NO: 1850701 - RNA, 24 nt, Human
cacuuagaaauugcauuuccugac

SEQ ID NO: 1850702 - RNA, 23 nt, Human
cacuuaggaacguaaucgugucc

SEQ ID NO: 1850703 - RNA, 18 nt, Human
cacugggagaaaugaaaa

SEQ ID NO: 1850704 - RNA, 18 nt, Human
cacugcauccuccgccuc

SEQ ID NO: 1850705 - RNA, 16 nt, Human
cacugcauguuuguga

SEQ ID NO: 1850706 - RNA, 16 nt, Human
cacugcauccuccgcc

SEQ ID NO: 1850707 - RNA, 14 nt, Human
cacugcauccuccg

SEQ ID NO: 1850708 - RNA, 13 nt, Human
cacugcagccuca

SEQ ID NO: 1850709 - RNA, 19 nt, Human
cacugcacuauagccuagg

SEQ ID NO: 1850710 - RNA, 19 nt, Human
cacugcacuccagccuggg

SEQ ID NO: 1850711 - RNA, 18 nt, Human
cacugcacuccagccugg

SEQ ID NO: 1850712 - RNA, 16 nt, Human
cacugcacuccagccu

SEQ ID NO: 1850713 - RNA, 15 nt, Human
cacugcacuccagcc

SEQ ID NO: 1850714 - RNA, 20 nt, Human
cacugcacuccagccugggu

SEQ ID NO: 1850715 - RNA, 21 nt, Human
cacugcagaagacaguauggc

SEQ ID NO: 1850716 - RNA, 12 nt, Human
cacugcagccuc

SEQ ID NO: 1850717 - RNA, 19 nt, Human
caauaaagcagcguuucua

SEQ ID NO: 1850718 - RNA, 12 nt, Human
caagcuccaagc

SEQ ID NO: 1850719 - RNA, 19 nt, Human
caagcucuaucaccaagga

SEQ ID NO: 1850720 - RNA, 13 nt, Human
caagcucugcucc

SEQ ID NO: 1850721 - RNA, 20 nt, Human
caagcugcacccucaggcag

SEQ ID NO: 1850722 - RNA, 18 nt, Human
caagcugcacccucaggc

SEQ ID NO: 1850723 - RNA, 14 nt, Human
caagcugcacccuc

SEQ ID NO: 1850724 - RNA, 13 nt, Human
caagcugcacccu

SEQ ID NO: 1850725 - RNA, 14 nt, Human
caagcucugcuccu

SEQ ID NO: 1850726 - RNA, 16 nt, Human
caaggccaaaggaagc

SEQ ID NO: 1850727 - RNA, 15 nt, Human
caaggccaaaggaag

SEQ ID NO: 1850728 - RNA, 18 nt, Human
caaggccaaaggaagcac

SEQ ID NO: 1850729 - RNA, 17 nt, Human
caaggccaaaggaagca

SEQ ID NO: 1850730 - RNA, 16 nt, Human
caaguaugaauaaaga

SEQ ID NO: 1850731 - RNA, 17 nt, Human
caagucaagugaaaaag

SEQ ID NO: 1850732 - RNA, 13 nt, Human
caagucaagugaa

SEQ ID NO: 1850733 - RNA, 21 nt, Human
caaguaugaauaaagacaccu

SEQ ID NO: 1850734 - RNA, 19 nt, Human
caaguaugaauaaagacac

SEQ ID NO: 1850735 - RNA, 17 nt, Human
caaguccacaguggaac

SEQ ID NO: 1850736 - RNA, 23 nt, Human
cacaggcccuuccucuccacugc

SEQ ID NO: 1850737 - RNA, 22 nt, Human
cacaggcccuuccucuccacug

SEQ ID NO: 1850738 - RNA, 22 nt, Human
cacagcgcuggccgggaccccg

SEQ ID NO: 1850739 - RNA, 19 nt, Human
cacagcgcuggccgggacc

SEQ ID NO: 1850740 - RNA, 18 nt, Human
cacaggggaaaagaggag

SEQ ID NO: 1850741 - RNA, 17 nt, Human
cacaggggaaaagagga

SEQ ID NO: 1850742 - RNA, 19 nt, Human
cacaggggaaaagaggagu

SEQ ID NO: 1850743 - RNA, 20 nt, Human
cacaguauuacuucugcuac

SEQ ID NO: 1850744 - RNA, 21 nt, Human
cacaguauuacuucugcuaca

SEQ ID NO: 1850745 - RNA, 22 nt, Human
cacagaaaauggaagacagcuc

SEQ ID NO: 1850746 - RNA, 20 nt, Human
cacagaaaauggaagacagc

SEQ ID NO: 1850747 - RNA, 19 nt, Human
cacagaaaauggaagacag

SEQ ID NO: 1850748 - RNA, 18 nt, Human
cacagaaaauggaagaca

SEQ ID NO: 1850749 - RNA, 22 nt, Human
cacacaugagcaucaggccagg

SEQ ID NO: 1850750 - RNA, 21 nt, Human
cacacaugagcaucaggccag

SEQ ID NO: 1850751 - RNA, 19 nt, Human
cacagaaaauucuucucca

SEQ ID NO: 1850752 - RNA, 23 nt, Human
cacagaaaauggaagacagcucu

SEQ ID NO: 1850753 - RNA, 13 nt, Human
cacagacccugcc

SEQ ID NO: 1850754 - RNA, 11 nt, Human
cacagccucug

SEQ ID NO: 1850755 - RNA, 19 nt, Human
cacagacauacuaaccagc

SEQ ID NO: 1850756 - RNA, 21 nt, Human
cacagacauacuaaccagcag

SEQ ID NO: 1850757 - RNA, 18 nt, Human
cacacagugagucgagga

SEQ ID NO: 1850758 - RNA, 20 nt, Human
cacacaguauuacuucugcu

SEQ ID NO: 1850759 - RNA, 23 nt, Human
cacacaguauuacuucugcuaca

SEQ ID NO: 1850760 - RNA, 20 nt, Human
cacacaugagcaucaggcca

SEQ ID NO: 1850761 - RNA, 15 nt, Human
cacacauacacacac

SEQ ID NO: 1850762 - RNA, 21 nt, Human
cacacagugagucgaggacag

SEQ ID NO: 1850763 - RNA, 23 nt, Human
cacacagugagucgaggacaggg

SEQ ID NO: 1850764 - RNA, 17 nt, Human
cacacagcucuguccug

SEQ ID NO: 1850765 - RNA, 20 nt, Human
cacacagcucuguccuggga

SEQ ID NO: 1850766 - RNA, 14 nt, Human
cacaagagcccagg

SEQ ID NO: 1850767 - RNA, 13 nt, Human
caauuuauuaugg

SEQ ID NO: 1850768 - RNA, 15 nt, Human
cacaagcuccaagcu

SEQ ID NO: 1850769 - RNA, 14 nt, Human
cacaagcuccaagc

SEQ ID NO: 1850770 - RNA, 13 nt, Human
cacaagcuccaag

SEQ ID NO: 1850771 - RNA, 16 nt, Human
cacaagagcccaggcc

SEQ ID NO: 1850772 - RNA, 23 nt, Human
cacaagcugcacccucaggcagg

SEQ ID NO: 1850773 - RNA, 17 nt, Human
cacaagcugcacccuca

SEQ ID NO: 1850774 - RNA, 23 nt, Human
cacaagcuccaagcucccaggca

SEQ ID NO: 1850775 - RNA, 17 nt, Human
cacaagcuccaagcucc

SEQ ID NO: 1850776 - RNA, 17 nt, Human
cacaagagcccaggccu

SEQ ID NO: 1850777 - RNA, 20 nt, Human
caauggagacugucucaaga

SEQ ID NO: 1850778 - RNA, 11 nt, Human
caauggcagcc

SEQ ID NO: 1850779 - RNA, 12 nt, Human
caauggcagccu

SEQ ID NO: 1850780 - RNA, 15 nt, Human
caauucuugccaaau

SEQ ID NO: 1850781 - RNA, 18 nt, Human
cagucaccccggccaccu

SEQ ID NO: 1850782 - RNA, 19 nt, Human
cauaaucuggacuccucug

SEQ ID NO: 1850783 - RNA, 20 nt, Human
cauaaucuggacuccucugu

SEQ ID NO: 1850784 - RNA, 22 nt, Human
cauaaucuggacuccucugucc

SEQ ID NO: 1850785 - RNA, 21 nt, Human
cauaaucuggacuccucuguc

SEQ ID NO: 1850786 - RNA, 14 nt, Human
cauaaugcgugcau

SEQ ID NO: 1850787 - RNA, 17 nt, Human
cauaaugcgugcauacc

SEQ ID NO: 1850788 - RNA, 23 nt, Human
cauaaucuggacuccucugucca

SEQ ID NO: 1850789 - RNA, 21 nt, Human
caguuugcuuuguaugcacuu

SEQ ID NO: 1850790 - RNA, 14 nt, Human
caguuugcuuugua

SEQ ID NO: 1850791 - RNA, 12 nt, Human
caguuugcuuug

SEQ ID NO: 1850792 - RNA, 15 nt, Human
cauacaauuccaaac

SEQ ID NO: 1850793 - RNA, 21 nt, Human
cauaaugcgugcauaccacuu

SEQ ID NO: 1850794 - RNA, 12 nt, Human
cauagcccucac

SEQ ID NO: 1850795 - RNA, 19 nt, Human
cauagcccucacccugggg

SEQ ID NO: 1850796 - RNA, 15 nt, Human
cauagcccucacccu

SEQ ID NO: 1850797 - RNA, 17 nt, Human
cauauuaccacagacau

SEQ ID NO: 1850798 - RNA, 20 nt, Human
cauauuaccacagacauacu

SEQ ID NO: 1850799 - RNA, 21 nt, Human
cauauuaccacagacauacua

SEQ ID NO: 1850800 - RNA, 14 nt, Human
caugacacgaauau

SEQ ID NO: 1850801 - RNA, 14 nt, Human
caugaauuugugaa

SEQ ID NO: 1850802 - RNA, 18 nt, Human
caugacacgaauauugcu

SEQ ID NO: 1850803 - RNA, 17 nt, Human
caugacacgaauauugc

SEQ ID NO: 1850804 - RNA, 18 nt, Human
caugcugcccugugagua

SEQ ID NO: 1850805 - RNA, 16 nt, Human
caugcugcccugugag

SEQ ID NO: 1850806 - RNA, 19 nt, Human
cauggccuuugcuugaaag

SEQ ID NO: 1850807 - RNA, 22 nt, Human
cauggccuuugcuugaaagaaa

SEQ ID NO: 1850808 - RNA, 14 nt, Human
caugcugccuccag

SEQ ID NO: 1850809 - RNA, 12 nt, Human
caugcugccucc

SEQ ID NO: 1850810 - RNA, 17 nt, Human
caugcaaggucauuuuu

SEQ ID NO: 1850811 - RNA, 18 nt, Human
caugcaaggucauuuuuu

SEQ ID NO: 1850812 - RNA, 22 nt, Human
caugcaaggucauuuuuuuuaa

SEQ ID NO: 1850813 - RNA, 19 nt, Human
caucagcacgauuucuguu

SEQ ID NO: 1850814 - RNA, 13 nt, Human
caucaggccaggc

SEQ ID NO: 1850815 - RNA, 17 nt, Human
caucagcacgauuucug

SEQ ID NO: 1850816 - RNA, 18 nt, Human
caucagcacgauuucugu

SEQ ID NO: 1850817 - RNA, 23 nt, Human
caucaggccaggcccucugccca

SEQ ID NO: 1850818 - RNA, 22 nt, Human
caucaggccaggcccucugccc

SEQ ID NO: 1850819 - RNA, 21 nt, Human
caucaggccaggcccucugcc

SEQ ID NO: 1850820 - RNA, 14 nt, Human
caucaggccaggcc

SEQ ID NO: 1850821 - RNA, 14 nt, Human
caucccagccccaa

SEQ ID NO: 1850822 - RNA, 13 nt, Human
caucccagcccca

SEQ ID NO: 1850823 - RNA, 16 nt, Human
caucccagccccaaug

SEQ ID NO: 1850824 - RNA, 17 nt, Human
caucccagccccaauga

SEQ ID NO: 1850825 - RNA, 22 nt, Human
caucuuagguuggcaaaaaggc

SEQ ID NO: 1850826 - RNA, 21 nt, Human
caucuuagguuggcaaaaagg

SEQ ID NO: 1850827 - RNA, 12 nt, Human
caucgcaaugua

SEQ ID NO: 1850828 - RNA, 19 nt, Human
caucugugaaaggaaagag

SEQ ID NO: 1850829 - RNA, 18 nt, Human
caucugugaaaggaaaga

SEQ ID NO: 1850830 - RNA, 17 nt, Human
ccaccaucaagccacca

SEQ ID NO: 1850831 - RNA, 16 nt, Human
ccaccaucaagccacc

SEQ ID NO: 1850832 - RNA, 22 nt, Human
ccacacuucaggcucuucuccu

SEQ ID NO: 1850833 - RNA, 23 nt, Human
ccacagaaaagaaaguucaugcu

SEQ ID NO: 1850834 - RNA, 18 nt, Human
ccaccgcagacaggacca

SEQ ID NO: 1850835 - RNA, 19 nt, Human
ccaccgcagacaggaccag

SEQ ID NO: 1850836 - RNA, 23 nt, Human
ccaccgggcugggagcucugcag

SEQ ID NO: 1850837 - RNA, 14 nt, Human
ccaccuuggcucaa

SEQ ID NO: 1850838 - RNA, 15 nt, Human
ccaccuuggcucaag

SEQ ID NO: 1850839 - RNA, 17 nt, Human
ccaccgcagacaggacc

SEQ ID NO: 1850840 - RNA, 14 nt, Human
ccaccgcagacagg

SEQ ID NO: 1850841 - RNA, 20 nt, Human
ccaccaucaagccaccaaca

SEQ ID NO: 1850842 - RNA, 18 nt, Human
ccaccaucaccagacagg

SEQ ID NO: 1850843 - RNA, 13 nt, Human
ccacccugcucuc

SEQ ID NO: 1850844 - RNA, 22 nt, Human
ccaaagugcugggauuacaggc

SEQ ID NO: 1850845 - RNA, 22 nt, Human
ccaaagugcugggauuacaggg

SEQ ID NO: 1850846 - RNA, 19 nt, Human
ccaaagugcugggauuaca

SEQ ID NO: 1850847 - RNA, 11 nt, Human
ccaacuuguaa

SEQ ID NO: 1850848 - RNA, 22 nt, Human
ccaaagugcugggauuacaggu

SEQ ID NO: 1850849 - RNA, 19 nt, Human
ccaaagugguauagaaaug

SEQ ID NO: 1850850 - RNA, 22 nt, Human
ccaaagugguauagaaaugcug

SEQ ID NO: 1850851 - RNA, 20 nt, Human
ccaauguucucucuucucca

SEQ ID NO: 1850852 - RNA, 22 nt, Human
ccaaugcacuuuguucuggcuc

SEQ ID NO: 1850853 - RNA, 20 nt, Human
ccaaugcacuuuguucuggc

SEQ ID NO: 1850854 - RNA, 23 nt, Human
ccaaugcacuuuguucuggcucu

SEQ ID NO: 1850855 - RNA, 20 nt, Human
ccaagcuggucccacucagu

SEQ ID NO: 1850856 - RNA, 22 nt, Human
cauggcugccaaugggagcuca

SEQ ID NO: 1850857 - RNA, 15 nt, Human
cauuaggauggcuag

SEQ ID NO: 1850858 - RNA, 12 nt, Human
cauuaucuagau

SEQ ID NO: 1850859 - RNA, 16 nt, Human
cauuaucuagauacug

SEQ ID NO: 1850860 - RNA, 17 nt, Human
cauuaucuagauacugu

SEQ ID NO: 1850861 - RNA, 15 nt, Human
cauguucucugagga

SEQ ID NO: 1850862 - RNA, 16 nt, Human
cauucuccuuguguua

SEQ ID NO: 1850863 - RNA, 18 nt, Human
cauuaucuagauacugua

SEQ ID NO: 1850864 - RNA, 13 nt, Human
cauuaugaugugu

SEQ ID NO: 1850865 - RNA, 16 nt, Human
cauucucacuccuacc

SEQ ID NO: 1850866 - RNA, 17 nt, Human
cauucucacuccuaccu

SEQ ID NO: 1850867 - RNA, 18 nt, Human
cauugcugggcuugucug

SEQ ID NO: 1850868 - RNA, 14 nt, Human
cauugcggacagcc

SEQ ID NO: 1850869 - RNA, 15 nt, Human
cauugcggacagcca

SEQ ID NO: 1850870 - RNA, 17 nt, Human
cauugcggacagccacg

SEQ ID NO: 1850871 - RNA, 21 nt, Human
cauugcggacagccacggcca

SEQ ID NO: 1850872 - RNA, 18 nt, Human
cauuucauuugugccaga

SEQ ID NO: 1850873 - RNA, 16 nt, Human
cauuuauucugcucac

SEQ ID NO: 1850874 - RNA, 22 nt, Human
cauuuggugguuucagaaaugu

SEQ ID NO: 1850875 - RNA, 23 nt, Human
cauuuggugguuucagaaaugug

SEQ ID NO: 1850876 - RNA, 20 nt, Human
cauuuuugaauacaggcaua

SEQ ID NO: 1850877 - RNA, 18 nt, Human
cauuuuugaauacaggca

SEQ ID NO: 1850878 - RNA, 17 nt, Human
ccaaaaaaugcuugcuu

SEQ ID NO: 1850879 - RNA, 17 nt, Human
ccaaaacucuccucugc

SEQ ID NO: 1850880 - RNA, 18 nt, Human
cagauuucacucuccuug

SEQ ID NO: 1850881 - RNA, 16 nt, Human
cagauuucacucuccu

SEQ ID NO: 1850882 - RNA, 15 nt, Human
cagauuucacucucc

SEQ ID NO: 1850883 - RNA, 14 nt, Human
cagauuugagcuca

SEQ ID NO: 1850884 - RNA, 13 nt, Human
cagauuugagcuc

SEQ ID NO: 1850885 - RNA, 16 nt, Human
cagauuugagcucagc

SEQ ID NO: 1850886 - RNA, 21 nt, Human
cagauugcaacaggcugggcu

SEQ ID NO: 1850887 - RNA, 18 nt, Human
cagcauauucaggaagcu

SEQ ID NO: 1850888 - RNA, 17 nt, Human
cagcauauucaggaagc

SEQ ID NO: 1850889 - RNA, 16 nt, Human
cagcauauucaggaag

SEQ ID NO: 1850890 - RNA, 19 nt, Human
cagcguuucuaugacacau

SEQ ID NO: 1850891 - RNA, 16 nt, Human
cagcguuucuaugaca

SEQ ID NO: 1850892 - RNA, 14 nt, Human
cagcguuucuauga

SEQ ID NO: 1850893 - RNA, 14 nt, Human
cagcggggacagcu

SEQ ID NO: 1850894 - RNA, 23 nt, Human
cagccugagcgacagugagacuc

SEQ ID NO: 1850895 - RNA, 13 nt, Human
cagcccuuagcag

SEQ ID NO: 1850896 - RNA, 23 nt, Human
cagccgccaugcuccuggcccac

SEQ ID NO: 1850897 - RNA, 23 nt, Human
cagccccauucugccugcccagg

SEQ ID NO: 1850898 - RNA, 24 nt, Human
cagccccauucugccugcccaggc

SEQ ID NO: 1850899 - RNA, 19 nt, Human
cagccccauucugccugcc

SEQ ID NO: 1850900 - RNA, 20 nt, Human
cagccccauucugccugccc

SEQ ID NO: 1850901 - RNA, 22 nt, Human
cagccccauucugccugcccag

SEQ ID NO: 1850902 - RNA, 13 nt, Human
cagccccugcaca

SEQ ID NO: 1850903 - RNA, 19 nt, Human
cagccccgugggguuccuc

SEQ ID NO: 1850904 - RNA, 20 nt, Human
cagagacuccugcaggcagc

SEQ ID NO: 1850905 - RNA, 22 nt, Human
cagagacuccugcaggcagcca

SEQ ID NO: 1850906 - RNA, 21 nt, Human
cagagacuccugcaggcagcc

SEQ ID NO: 1850907 - RNA, 23 nt, Human
cagagacuccugcaggcagccag

SEQ ID NO: 1850908 - RNA, 22 nt, Human
cagagcuacacaggggaaaaga

SEQ ID NO: 1850909 - RNA, 17 nt, Human
cagagcuacacagggga

SEQ ID NO: 1850910 - RNA, 16 nt, Human
cagagagggugggagu

SEQ ID NO: 1850911 - RNA, 22 nt, Human
cagagagggugggagugggccc

SEQ ID NO: 1850912 - RNA, 20 nt, Human
cagagagggugggagugggc

SEQ ID NO: 1850913 - RNA, 14 nt, Human
cagagccugcaguu

SEQ ID NO: 1850914 - RNA, 16 nt, Human
cagaucauugugaaau

SEQ ID NO: 1850915 - RNA, 22 nt, Human
cagaucauugugaaauuauuca

SEQ ID NO: 1850916 - RNA, 23 nt, Human
cagauacaggaaaagcugcugac

SEQ ID NO: 1850917 - RNA, 22 nt, Human
caggaaaggcuccaggagcagc

SEQ ID NO: 1850918 - RNA, 21 nt, Human
caggaaaggcuccaggagcag

SEQ ID NO: 1850919 - RNA, 23 nt, Human
caggaaaggcuccaggagcagcc

SEQ ID NO: 1850920 - RNA, 19 nt, Human
caggaaaagcugcugacag

SEQ ID NO: 1850921 - RNA, 20 nt, Human
caggaaaagcugcugacagu

SEQ ID NO: 1850922 - RNA, 16 nt, Human
cagcuuauucacaaga

SEQ ID NO: 1850923 - RNA, 17 nt, Human
cagcuuauucacaagac

SEQ ID NO: 1850924 - RNA, 15 nt, Human
cagcuguucagcugg

SEQ ID NO: 1850925 - RNA, 16 nt, Human
cagcuguucagcuggu

SEQ ID NO: 1850926 - RNA, 19 nt, Human
cagcuguucagcugguuga

SEQ ID NO: 1850927 - RNA, 16 nt, Human
caggccaggcccucug

SEQ ID NO: 1850928 - RNA, 15 nt, Human
caggccaggcccucu

SEQ ID NO: 1850929 - RNA, 14 nt, Human
caggccaggcccuc

SEQ ID NO: 1850930 - RNA, 13 nt, Human
caggccaggcccu

SEQ ID NO: 1850931 - RNA, 15 nt, Human
caggccagcugcuug

SEQ ID NO: 1850932 - RNA, 13 nt, Human
caggccagcugcu

SEQ ID NO: 1850933 - RNA, 23 nt, Human
caggcacugcugcccagccucca

SEQ ID NO: 1850934 - RNA, 17 nt, Human
caggcacugcugcccag

SEQ ID NO: 1850935 - RNA, 16 nt, Human
caggcacugcugccca

SEQ ID NO: 1850936 - RNA, 21 nt, Human
caggcaaugcuggcuguuggc

SEQ ID NO: 1850937 - RNA, 13 nt, Human
caggaggccagcc

SEQ ID NO: 1850938 - RNA, 12 nt, Human
caggaggccagc

SEQ ID NO: 1850939 - RNA, 19 nt, Human
caggcaaugcuggcuguug

SEQ ID NO: 1850940 - RNA, 20 nt, Human
caggcaaugcuggcuguugg

SEQ ID NO: 1850941 - RNA, 21 nt, Human
caggaccagggauuuccauga

SEQ ID NO: 1850942 - RNA, 13 nt, Human
caggaccagggau

SEQ ID NO: 1850943 - RNA, 13 nt, Human
caggaccucaggu

SEQ ID NO: 1850944 - RNA, 22 nt, Human
caggccugggggcugggcagag

SEQ ID NO: 1850945 - RNA, 20 nt, Human
caggccugggggcugggcag

SEQ ID NO: 1850946 - RNA, 20 nt, Human
caggcugggagagccuucca

SEQ ID NO: 1850947 - RNA, 19 nt, Human
caggcugggagagccuucc

SEQ ID NO: 1850948 - RNA, 18 nt, Human
caggcugggagagccuuc

SEQ ID NO: 1850949 - RNA, 16 nt, Human
caggcugggagagccu

SEQ ID NO: 1850950 - RNA, 23 nt, Human
caggccugggggcugggcagagg

SEQ ID NO: 1850951 - RNA, 17 nt, Human
caggcuggcgugcagug

SEQ ID NO: 1850952 - RNA, 18 nt, Human
caggcuggcgugcagugg

SEQ ID NO: 1850953 - RNA, 19 nt, Human
caggcuggcgugcaguggu

SEQ ID NO: 1850954 - RNA, 16 nt, Human
cagggagggcuucugc

SEQ ID NO: 1850955 - RNA, 18 nt, Human
cagggagggccugggccc

SEQ ID NO: 1850956 - RNA, 17 nt, Human
cagggagggccugggcc

SEQ ID NO: 1850957 - RNA, 20 nt, Human
cagggcucagcggggacagc

SEQ ID NO: 1850958 - RNA, 12 nt, Human
cagggcucagcg

SEQ ID NO: 1850959 - RNA, 15 nt, Human
cagggcucagcgggg

SEQ ID NO: 1850960 - RNA, 14 nt, Human
caggcugggcuuca

SEQ ID NO: 1850961 - RNA, 22 nt, Human
cagggaggacgcucucuggccu

SEQ ID NO: 1850962 - RNA, 15 nt, Human
caggcugggcuucag

SEQ ID NO: 1850963 - RNA, 21 nt, Human
cagggucucuaccauccccug

SEQ ID NO: 1850964 - RNA, 15 nt, Human
caggguuggccccug

SEQ ID NO: 1850965 - RNA, 16 nt, Human
caggguuggccccugc

SEQ ID NO: 1850966 - RNA, 23 nt, Human
cagggucucacucugucgcccag

SEQ ID NO: 1850967 - RNA, 17 nt, Human
cagucaccccggccacc

SEQ ID NO: 1850968 - RNA, 16 nt, Human
cagucaccccggccac

SEQ ID NO: 1850969 - RNA, 14 nt, Human
cagucaccccggcc

SEQ ID NO: 1850970 - RNA, 19 nt, Human
caguaaaugggggugcauu

SEQ ID NO: 1850971 - RNA, 20 nt, Human
caguaaaugggggugcauuu

SEQ ID NO: 1850972 - RNA, 18 nt, Human
caguaaaugggggugcau

SEQ ID NO: 1850973 - RNA, 13 nt, Human
caggugcugccau

SEQ ID NO: 1850974 - RNA, 14 nt, Human
caggugcugccauc

SEQ ID NO: 1850975 - RNA, 17 nt, Human
caggguuggccccugcc

SEQ ID NO: 1850976 - RNA, 21 nt, Human
caggguuggccccugcccggc

SEQ ID NO: 1850977 - RNA, 23 nt, Human
cagguuuuuggucugacccacug

SEQ ID NO: 1850978 - RNA, 13 nt, Human
gccugcuccagcu

SEQ ID NO: 1850979 - RNA, 13 nt, Human
gccucggacuuag

SEQ ID NO: 1850980 - RNA, 17 nt, Human
gccugcuaauuccccag

SEQ ID NO: 1850981 - RNA, 23 nt, Human
gccugcuaauuccccagauugca

SEQ ID NO: 1850982 - RNA, 16 nt, Human
gccuccauccugaggc

SEQ ID NO: 1850983 - RNA, 20 nt, Human
gccuccauccugaggcucca

SEQ ID NO: 1850984 - RNA, 21 nt, Human
gccuccuuugugaggaagccg

SEQ ID NO: 1850985 - RNA, 20 nt, Human
gccuccuuugugaggaagcc

SEQ ID NO: 1850986 - RNA, 19 nt, Human
gccuccuuugugaggaagc

SEQ ID NO: 1850987 - RNA, 11 nt, Human
gccuccaugcu

SEQ ID NO: 1850988 - RNA, 17 nt, Human
gccuccaagcuccaucu

SEQ ID NO: 1850989 - RNA, 13 nt, Human
gcgauucuucugc

SEQ ID NO: 1850990 - RNA, 17 nt, Human
gcgauucuucugcuuca

SEQ ID NO: 1850991 - RNA, 14 nt, Human
gcgauucuucugcu

SEQ ID NO: 1850992 - RNA, 17 nt, Human
gcuacuugggaggcuga

SEQ ID NO: 1850993 - RNA, 11 nt, Human
gcuagaaauga

SEQ ID NO: 1850994 - RNA, 19 nt, Human
gcuacuguaaggcaaucau

SEQ ID NO: 1850995 - RNA, 18 nt, Human
gcuacuguaaggcaauca

SEQ ID NO: 1850996 - RNA, 19 nt, Human
gcuacuguccuacccaccc

SEQ ID NO: 1850997 - RNA, 20 nt, Human
gcuacuguccuacccacccu

SEQ ID NO: 1850998 - RNA, 17 nt, Human
gcguuucuaugacacau

SEQ ID NO: 1850999 - RNA, 18 nt, Human
gcuaauuuugaaaaacug

SEQ ID NO: 1851000 - RNA, 16 nt, Human
gcuaauuuuucauuuu

SEQ ID NO: 1851001 - RNA, 20 nt, Human
gcgugguggacaugcacagc

SEQ ID NO: 1851002 - RNA, 19 nt, Human
gcgugcacacaccagagcc

SEQ ID NO: 1851003 - RNA, 18 nt, Human
gcgugcacacaccagagc

SEQ ID NO: 1851004 - RNA, 14 nt, Human
gcgugcacacacca

SEQ ID NO: 1851005 - RNA, 16 nt, Human
gccccugccucucugc

SEQ ID NO: 1851006 - RNA, 15 nt, Human
gccccugccucucug

SEQ ID NO: 1851007 - RNA, 18 nt, Human
gccccugccucucugcag

SEQ ID NO: 1851008 - RNA, 17 nt, Human
gccccugccucucugca

SEQ ID NO: 1851009 - RNA, 22 nt, Human
gccccugcugguucaggguugg

SEQ ID NO: 1851010 - RNA, 17 nt, Human
gcccucacccuggggcu

SEQ ID NO: 1851011 - RNA, 16 nt, Human
gcccucacccuggggc

SEQ ID NO: 1851012 - RNA, 15 nt, Human
gccccuggaugcagc

SEQ ID NO: 1851013 - RNA, 17 nt, Human
gcccaggccccugccac

SEQ ID NO: 1851014 - RNA, 18 nt, Human
gcccaggccccugccacc

SEQ ID NO: 1851015 - RNA, 13 nt, Human
gcccaggcagguc

SEQ ID NO: 1851016 - RNA, 12 nt, Human
gcccaggcaggu

SEQ ID NO: 1851017 - RNA, 14 nt, Human
gcccaggcaggucu

SEQ ID NO: 1851018 - RNA, 16 nt, Human
gcccaggcaggucuug

SEQ ID NO: 1851019 - RNA, 15 nt, Human
gcccaggccccugcc

SEQ ID NO: 1851020 - RNA, 13 nt, Human
gcccaggccccug

SEQ ID NO: 1851021 - RNA, 15 nt, Human
gccauguguuccaag

SEQ ID NO: 1851022 - RNA, 16 nt, Human
gccauguguuccaagg

SEQ ID NO: 1851023 - RNA, 14 nt, Human
gccaugugccaggu

SEQ ID NO: 1851024 - RNA, 14 nt, Human
gccaggcccucugc

SEQ ID NO: 1851025 - RNA, 13 nt, Human
gccaggcccucug

SEQ ID NO: 1851026 - RNA, 18 nt, Human
gccaggccacaagacccu

SEQ ID NO: 1851027 - RNA, 13 nt, Human
gccaggccacaag

SEQ ID NO: 1851028 - RNA, 21 nt, Human
gccaggccacaagacccuugu

SEQ ID NO: 1851029 - RNA, 15 nt, Human
gccaggccagaggga

SEQ ID NO: 1851030 - RNA, 22 nt, Human
gccaggccagagggagugacag

SEQ ID NO: 1851031 - RNA, 13 nt, Human
gccaguugguccc

SEQ ID NO: 1851032 - RNA, 13 nt, Human
gccagugugacaa

SEQ ID NO: 1851033 - RNA, 15 nt, Human
gccagugcuccagcc

SEQ ID NO: 1851034 - RNA, 21 nt, Human
gccaguuggucccccuuccau

SEQ ID NO: 1851035 - RNA, 20 nt, Human
gccaguuggucccccuucca

SEQ ID NO: 1851036 - RNA, 18 nt, Human
gccaguuggucccccuuc

SEQ ID NO: 1851037 - RNA, 16 nt, Human
gccaguuggucccccu

SEQ ID NO: 1851038 - RNA, 23 nt, Human
gccaguuggucccccuuccaugg

SEQ ID NO: 1851039 - RNA, 22 nt, Human
gccaguuggucccccuuccaug

SEQ ID NO: 1851040 - RNA, 16 nt, Human
gccauaugaaaaggcu

SEQ ID NO: 1851041 - RNA, 15 nt, Human
gcuuuuggucugugu

SEQ ID NO: 1851042 - RNA, 18 nt, Human
gcuuuugucuaugggacu

SEQ ID NO: 1851043 - RNA, 12 nt, Human
gcuuuugugcau

SEQ ID NO: 1851044 - RNA, 20 nt, Human
gcuuuuuuaucaugugaaau

SEQ ID NO: 1851045 - RNA, 18 nt, Human
gcuuuuuuaucaugugaa

SEQ ID NO: 1851046 - RNA, 15 nt, Human
gcuuuuuuaucaugu

SEQ ID NO: 1851047 - RNA, 16 nt, Human
ggaaacccagcucugg

SEQ ID NO: 1851048 - RNA, 18 nt, Human
ggaaaauuuuaaaaauac

SEQ ID NO: 1851049 - RNA, 17 nt, Human
gcuuugaucccuucuua

SEQ ID NO: 1851050 - RNA, 14 nt, Human
gcuuugaucccuuc

SEQ ID NO: 1851051 - RNA, 20 nt, Human
ggaagacuucaucccucugg

SEQ ID NO: 1851052 - RNA, 17 nt, Human
ggaagacuucaucccuc

SEQ ID NO: 1851053 - RNA, 22 nt, Human
ggaagacaaugugaaaagaaaa

SEQ ID NO: 1851054 - RNA, 19 nt, Human
ggaacacuccuucacagau

SEQ ID NO: 1851055 - RNA, 17 nt, Human
ggaacugaacauuccag

SEQ ID NO: 1851056 - RNA, 15 nt, Human
ggaacacuccuucac

SEQ ID NO: 1851057 - RNA, 23 nt, Human
ggaacaaggcaaggcugucaauu

SEQ ID NO: 1851058 - RNA, 13 nt, Human
ggaacaccuccuc

SEQ ID NO: 1851059 - RNA, 17 nt, Human
ggaacaccauaggucac

SEQ ID NO: 1851060 - RNA, 16 nt, Human
ggaagacaaugugaaa

SEQ ID NO: 1851061 - RNA, 14 nt, Human
ggaagacaauguga

SEQ ID NO: 1851062 - RNA, 21 nt, Human
ggaacaaggcaaggcugucaa

SEQ ID NO: 1851063 - RNA, 17 nt, Human
ggaacaaggcaaggcug

SEQ ID NO: 1851064 - RNA, 15 nt, Human
ggaacaaggcaaggc

SEQ ID NO: 1851065 - RNA, 17 nt, Human
ggaaaugucaacaagua

SEQ ID NO: 1851066 - RNA, 22 nt, Human
ggaaaugggcagagcagagacc

SEQ ID NO: 1851067 - RNA, 18 nt, Human
ggaaaugggcagagcaga

SEQ ID NO: 1851068 - RNA, 17 nt, Human
ggaaaugggcagagcag

SEQ ID NO: 1851069 - RNA, 16 nt, Human
ggaaaugggcagagca

SEQ ID NO: 1851070 - RNA, 14 nt, Human
ggaaaugggcagag

SEQ ID NO: 1851071 - RNA, 22 nt, Human
gcuuccagugaggcucugcccu

SEQ ID NO: 1851072 - RNA, 23 nt, Human
gcuuccagugaggcucugcccuu

SEQ ID NO: 1851073 - RNA, 12 nt, Human
gcuucuucagag

SEQ ID NO: 1851074 - RNA, 15 nt, Human
gcuucuucagagacu

SEQ ID NO: 1851075 - RNA, 20 nt, Human
gcuugaccgugaggccagag

SEQ ID NO: 1851076 - RNA, 16 nt, Human
gcuuuccucuuccuga

SEQ ID NO: 1851077 - RNA, 21 nt, Human
gcuuuccccaugucucgacuc

SEQ ID NO: 1851078 - RNA, 22 nt, Human
gcuuuccccaugucucgacuca

SEQ ID NO: 1851079 - RNA, 18 nt, Human
gcuuguaaauagcucagg

SEQ ID NO: 1851080 - RNA, 19 nt, Human
gcuuguaaauagcucaggu

SEQ ID NO: 1851081 - RNA, 18 nt, Human
gcuugaccuuuaagagaa

SEQ ID NO: 1851082 - RNA, 23 nt, Human
gcuugaccgugaggccagagaca

SEQ ID NO: 1851083 - RNA, 22 nt, Human
gcuugaccuuuaagagaaauga

SEQ ID NO: 1851084 - RNA, 16 nt, Human
gcuugaccgugaggcc

SEQ ID NO: 1851085 - RNA, 17 nt, Human
gcuuguaaauagcucag

SEQ ID NO: 1851086 - RNA, 14 nt, Human
gcuucaaggauccu

SEQ ID NO: 1851087 - RNA, 16 nt, Human
gcuucaaauuguaagc

SEQ ID NO: 1851088 - RNA, 15 nt, Human
gcuucaguggcagcu

SEQ ID NO: 1851089 - RNA, 14 nt, Human
gcuucaguggcagc

SEQ ID NO: 1851090 - RNA, 13 nt, Human
gcuuacaagccag

SEQ ID NO: 1851091 - RNA, 19 nt, Human
gcuuacaagccagcuggag

SEQ ID NO: 1851092 - RNA, 22 nt, Human
gcuuacaagccagcuggagaaa

SEQ ID NO: 1851093 - RNA, 13 nt, Human
gcuguuggcuggg

SEQ ID NO: 1851094 - RNA, 14 nt, Human
gcuguuggcugggg

SEQ ID NO: 1851095 - RNA, 12 nt, Human
gcugugccucug

SEQ ID NO: 1851096 - RNA, 23 nt, Human
gcugguucaggguuggccccugc

SEQ ID NO: 1851097 - RNA, 19 nt, Human
gcuguauuagucacagaga

SEQ ID NO: 1851098 - RNA, 20 nt, Human
gcucucaggccagcugcuug

SEQ ID NO: 1851099 - RNA, 19 nt, Human
gcucucaggccagcugcuu

SEQ ID NO: 1851100 - RNA, 18 nt, Human
gcucucaggccagcugcu

SEQ ID NO: 1851101 - RNA, 17 nt, Human
gcucucaggccagcugc

SEQ ID NO: 1851102 - RNA, 18 nt, Human
gcucucaaguuaucaggg

SEQ ID NO: 1851103 - RNA, 19 nt, Human
gcucuacugaggugcuaug

SEQ ID NO: 1851104 - RNA, 16 nt, Human
gcuccucuccccagca

SEQ ID NO: 1851105 - RNA, 19 nt, Human
gcuccucuccccagcaagu

SEQ ID NO: 1851106 - RNA, 20 nt, Human
gcuccacuuggucugugaga

SEQ ID NO: 1851107 - RNA, 9 nt, Human
gcuccagac

SEQ ID NO: 1851108 - RNA, 21 nt, Human
gcuccagacacauguccaaga

SEQ ID NO: 1851109 - RNA, 18 nt, Human
gcuccagacacaugucca

SEQ ID NO: 1851110 - RNA, 23 nt, Human
gcuccagacacauguccaagaag

SEQ ID NO: 1851111 - RNA, 16 nt, Human
gcuccucccggugccc

SEQ ID NO: 1851112 - RNA, 19 nt, Human
gcuccucccggugcccaag

SEQ ID NO: 1851113 - RNA, 15 nt, Human
gcuccucuccccagc

SEQ ID NO: 1851114 - RNA, 17 nt, Human
gcuccagcucaccagcc

SEQ ID NO: 1851115 - RNA, 13 nt, Human
gcuccagcucacc

SEQ ID NO: 1851116 - RNA, 14 nt, Human
gcuccagcucacca

SEQ ID NO: 1851117 - RNA, 20 nt, Human
gcucugaucauccacugugc

SEQ ID NO: 1851118 - RNA, 21 nt, Human
gcucugcccauccugccccug

SEQ ID NO: 1851119 - RNA, 16 nt, Human
gcucuggagcccacug

SEQ ID NO: 1851120 - RNA, 15 nt, Human
gcucuggagcccacu

SEQ ID NO: 1851121 - RNA, 15 nt, Human
gcucugcccauccug

SEQ ID NO: 1851122 - RNA, 21 nt, Human
gcucugaucauccacugugcc

SEQ ID NO: 1851123 - RNA, 22 nt, Human
gcucugaucauccacugugcca

SEQ ID NO: 1851124 - RNA, 17 nt, Human
gcugaauacagaggcaa

SEQ ID NO: 1851125 - RNA, 23 nt, Human
gcugaaggcucgagcaugccugg

SEQ ID NO: 1851126 - RNA, 20 nt, Human
gcugaacuuguuuucuggga

SEQ ID NO: 1851127 - RNA, 16 nt, Human
gcugagccucagucuc

SEQ ID NO: 1851128 - RNA, 12 nt, Human
gcugagccucag

SEQ ID NO: 1851129 - RNA, 13 nt, Human
gcugacagacaca

SEQ ID NO: 1851130 - RNA, 17 nt, Human
gcucuggagcccacugu

SEQ ID NO: 1851131 - RNA, 23 nt, Human
gcucugucgcccaggcuggagug

SEQ ID NO: 1851132 - RNA, 15 nt, Human
gcugaggugggagga

SEQ ID NO: 1851133 - RNA, 15 nt, Human
gcugcacccucaggc

SEQ ID NO: 1851134 - RNA, 13 nt, Human
gcugcacccucag

SEQ ID NO: 1851135 - RNA, 16 nt, Human
gcugcacccucaggca

SEQ ID NO: 1851136 - RNA, 12 nt, Human
gcugccauccag

SEQ ID NO: 1851137 - RNA, 13 nt, Human
gcugccauccagg

SEQ ID NO: 1851138 - RNA, 17 nt, Human
gcugccccuggcagccc

SEQ ID NO: 1851139 - RNA, 16 nt, Human
gcugccccuggcagcc

SEQ ID NO: 1851140 - RNA, 15 nt, Human
gcugccccuggcagc

SEQ ID NO: 1851141 - RNA, 13 nt, Human
gcugccccuggca

SEQ ID NO: 1851142 - RNA, 17 nt, Human
gcugccauccagguuca

SEQ ID NO: 1851143 - RNA, 12 nt, Human
gcugcugacagu

SEQ ID NO: 1851144 - RNA, 16 nt, Human
ggccagugugacaagg

SEQ ID NO: 1851145 - RNA, 15 nt, Human
ggccagugcuccagc

SEQ ID NO: 1851146 - RNA, 13 nt, Human
ggccagugcucca

SEQ ID NO: 1851147 - RNA, 16 nt, Human
ggccaggcuggucuca

SEQ ID NO: 1851148 - RNA, 18 nt, Human
ggccaggcuggucucaaa

SEQ ID NO: 1851149 - RNA, 14 nt, Human
ggccaggcuggucu

SEQ ID NO: 1851150 - RNA, 21 nt, Human
ggccaaacucaccugccccuc

SEQ ID NO: 1851151 - RNA, 17 nt, Human
ggccaaacucaccugcc

SEQ ID NO: 1851152 - RNA, 17 nt, Human
ggcagugggagcugccu

SEQ ID NO: 1851153 - RNA, 16 nt, Human
ggcaccagcagccugg

SEQ ID NO: 1851154 - RNA, 15 nt, Human
ggcaccagcagccug

SEQ ID NO: 1851155 - RNA, 24 nt, Human
ggcacugcuuccagugaggcucug

SEQ ID NO: 1851156 - RNA, 18 nt, Human
ggcagugggagcugccug

SEQ ID NO: 1851157 - RNA, 19 nt, Human
ggcagugggagcugccugu

SEQ ID NO: 1851158 - RNA, 18 nt, Human
ggcauccaguaucuugaa

SEQ ID NO: 1851159 - RNA, 18 nt, Human
ggcauuuuacuguacaga

SEQ ID NO: 1851160 - RNA, 18 nt, Human
ggcccuucucuccagccc

SEQ ID NO: 1851161 - RNA, 17 nt, Human
ggcccuuccucuccacu

SEQ ID NO: 1851162 - RNA, 17 nt, Human
ggcccuucucuccagcc

SEQ ID NO: 1851163 - RNA, 16 nt, Human
ggcccuucucuccagc

SEQ ID NO: 1851164 - RNA, 15 nt, Human
ggcccuuccucucca

SEQ ID NO: 1851165 - RNA, 13 nt, Human
ggcccuuccucuc

SEQ ID NO: 1851166 - RNA, 19 nt, Human
ggcucacugcauccuccgc

SEQ ID NO: 1851167 - RNA, 16 nt, Human
ggcucacugcauccuc

SEQ ID NO: 1851168 - RNA, 17 nt, Human
ggcucacugcagccuca

SEQ ID NO: 1851169 - RNA, 16 nt, Human
ggcucacugcagccuc

SEQ ID NO: 1851170 - RNA, 14 nt, Human
ggcgugcaguggug

SEQ ID NO: 1851171 - RNA, 19 nt, Human
ggcgugcaguggugcgauc

SEQ ID NO: 1851172 - RNA, 23 nt, Human
ggcucagcaaaagaugcuucuca

SEQ ID NO: 1851173 - RNA, 21 nt, Human
ggcucagcggggacagcuccu

SEQ ID NO: 1851174 - RNA, 22 nt, Human
ggcucagcggggacagcuccuu

SEQ ID NO: 1851175 - RNA, 23 nt, Human
ggcucagcggggacagcuccuuc

SEQ ID NO: 1851176 - RNA, 13 nt, Human
ggccuccauccug

SEQ ID NO: 1851177 - RNA, 23 nt, Human
ggccuccaaguccacaguggaac

SEQ ID NO: 1851178 - RNA, 15 nt, Human
ggccugagcugggau

SEQ ID NO: 1851179 - RNA, 12 nt, Human
ggccugagcugg

SEQ ID NO: 1851180 - RNA, 15 nt, Human
ggccuucucugaagg

SEQ ID NO: 1851181 - RNA, 16 nt, Human
ggccuucucugaagga

SEQ ID NO: 1851182 - RNA, 13 nt, Human
ggccuuuggcuuc

SEQ ID NO: 1851183 - RNA, 14 nt, Human
ggccuuuggcuuca

SEQ ID NO: 1851184 - RNA, 21 nt, Human
ggccuggccagaugcaccagc

SEQ ID NO: 1851185 - RNA, 21 nt, Human
ggccugugucuaguuguuuga

SEQ ID NO: 1851186 - RNA, 20 nt, Human
ggccuguggaucaaauccag

SEQ ID NO: 1851187 - RNA, 23 nt, Human
ggccuucggccuccauccugagg

SEQ ID NO: 1851188 - RNA, 12 nt, Human
ggccuucucuga

SEQ ID NO: 1851189 - RNA, 20 nt, Human
ggaggucaaggcugcaguga

SEQ ID NO: 1851190 - RNA, 14 nt, Human
ggaggucgaggcag

SEQ ID NO: 1851191 - RNA, 14 nt, Human
ggaggugaccccag

SEQ ID NO: 1851192 - RNA, 16 nt, Human
ggaggggggagguggg

SEQ ID NO: 1851193 - RNA, 11 nt, Human
ggaggccagcc

SEQ ID NO: 1851194 - RNA, 12 nt, Human
ggaggccagccu

SEQ ID NO: 1851195 - RNA, 19 nt, Human
ggaggaaggaaacccagcu

SEQ ID NO: 1851196 - RNA, 23 nt, Human
ggaggaaggaaacccagcucugg

SEQ ID NO: 1851197 - RNA, 20 nt, Human
ggaggaaggaaacccagcuc

SEQ ID NO: 1851198 - RNA, 16 nt, Human
ggagccaauggagacu

SEQ ID NO: 1851199 - RNA, 16 nt, Human
ggagccccgaggccuu

SEQ ID NO: 1851200 - RNA, 22 nt, Human
ggagccccgaggccuucucuga

SEQ ID NO: 1851201 - RNA, 12 nt, Human
ggagcugccugu

SEQ ID NO: 1851202 - RNA, 21 nt, Human
ggagcugccuguucagcucca

SEQ ID NO: 1851203 - RNA, 16 nt, Human
ggagcaucagugcccu

SEQ ID NO: 1851204 - RNA, 24 nt, Human
ggcacagaaaauggaagacagcuc

SEQ ID NO: 1851205 - RNA, 22 nt, Human
ggcacaaucucggcucacugca

SEQ ID NO: 1851206 - RNA, 16 nt, Human
ggcacagggcaguggg

SEQ ID NO: 1851207 - RNA, 22 nt, Human
ggauguugaaaaaguucugcag

SEQ ID NO: 1851208 - RNA, 16 nt, Human
ggauguucugggacac

SEQ ID NO: 1851209 - RNA, 15 nt, Human
ggauguucugggaca

SEQ ID NO: 1851210 - RNA, 15 nt, Human
ggagugcagugagcc

SEQ ID NO: 1851211 - RNA, 14 nt, Human
ggauccugagccag

SEQ ID NO: 1851212 - RNA, 13 nt, Human
ggauccugagcca

SEQ ID NO: 1851213 - RNA, 14 nt, Human
ggauccuccaggug

SEQ ID NO: 1851214 - RNA, 15 nt, Human
ggauccuccaggugc

SEQ ID NO: 1851215 - RNA, 16 nt, Human
ggauggggcugcaccg

SEQ ID NO: 1851216 - RNA, 21 nt, Human
ggauguacaaggacagccccu

SEQ ID NO: 1851217 - RNA, 18 nt, Human
ggauggauuuccagccaa

SEQ ID NO: 1851218 - RNA, 14 nt, Human
ggaguggccacaga

SEQ ID NO: 1851219 - RNA, 15 nt, Human
ggaguucugguuccu

SEQ ID NO: 1851220 - RNA, 21 nt, Human
ggaguuggaagugugugaucu

SEQ ID NO: 1851221 - RNA, 16 nt, Human
gggacagcuccuucug

SEQ ID NO: 1851222 - RNA, 23 nt, Human
gggacagaggggguggccuccca

SEQ ID NO: 1851223 - RNA, 22 nt, Human
gggacagaggggguggccuccc

SEQ ID NO: 1851224 - RNA, 13 nt, Human
gggacagaggggg

SEQ ID NO: 1851225 - RNA, 13 nt, Human
gggaaggauacaa

SEQ ID NO: 1851226 - RNA, 16 nt, Human
gggaaggauacaaaag

SEQ ID NO: 1851227 - RNA, 21 nt, Human
gggacagcuccuucuguccua

SEQ ID NO: 1851228 - RNA, 23 nt, Human
aaaaauaugaccacacuccagcu

SEQ ID NO: 1851229 - RNA, 21 nt, Human
aaaaauaugaccacacuccag

SEQ ID NO: 1851230 - RNA, 13 nt, Human
aaaagaugcuucu

SEQ ID NO: 1851231 - RNA, 23 nt, Human
aaaacugcugacuguuuucucuu

SEQ ID NO: 1851232 - RNA, 22 nt, Human
aaaacugcugacuguuuucucu

SEQ ID NO: 1851233 - RNA, 15 nt, Human
aaaacccagauaaag

SEQ ID NO: 1851234 - RNA, 21 nt, Human
aaaaccaauguucucucuucu

SEQ ID NO: 1851235 - RNA, 15 nt, Human
aaaacaugcuacaca

SEQ ID NO: 1851236 - RNA, 14 nt, Human
aaaaaucucaaauu

SEQ ID NO: 1851237 - RNA, 17 nt, Human
aaaaaucucaaauuucu

SEQ ID NO: 1851238 - RNA, 19 nt, Human
aaaagggacugagaaauuu

SEQ ID NO: 1851239 - RNA, 19 nt, Human
aaaagguaugcaaucaaau

SEQ ID NO: 1851240 - RNA, 21 nt, Human
gggauuacaggcuccugccac

SEQ ID NO: 1851241 - RNA, 16 nt, Human
gggauuacaggcuccu

SEQ ID NO: 1851242 - RNA, 13 nt, Human
gggauuacaggcu

SEQ ID NO: 1851243 - RNA, 14 nt, Human
gggauuacaggcgu

SEQ ID NO: 1851244 - RNA, 12 nt, Human
gggauuacaggu

SEQ ID NO: 1851245 - RNA, 15 nt, Human
gggauuacaggugug

SEQ ID NO: 1851246 - RNA, 16 nt, Human
gggauuguaaaauggu

SEQ ID NO: 1851247 - RNA, 17 nt, Human
gggauuguaaaauggug

SEQ ID NO: 1851248 - RNA, 23 nt, Human
gggcagagcagagaccaucccug

SEQ ID NO: 1851249 - RNA, 14 nt, Human
gggcagaggaaagc

SEQ ID NO: 1851250 - RNA, 22 nt, Human
gggcagagcagagaccaucccu

SEQ ID NO: 1851251 - RNA, 17 nt, Human
gggcagagcagagacca

SEQ ID NO: 1851252 - RNA, 16 nt, Human
gggcaacccccagccu

SEQ ID NO: 1851253 - RNA, 18 nt, Human
gggcaacccccagccugc

SEQ ID NO: 1851254 - RNA, 16 nt, Human
gggcagagcagagacc

SEQ ID NO: 1851255 - RNA, 19 nt, Human
gggaggucgaggcaggagg

SEQ ID NO: 1851256 - RNA, 18 nt, Human
gggaggucgaggcaggag

SEQ ID NO: 1851257 - RNA, 17 nt, Human
gggaggucgaggcagga

SEQ ID NO: 1851258 - RNA, 18 nt, Human
gggagggcuccagacaca

SEQ ID NO: 1851259 - RNA, 17 nt, Human
gggagggcuccagacac

SEQ ID NO: 1851260 - RNA, 15 nt, Human
gggagggcuccagac

SEQ ID NO: 1851261 - RNA, 14 nt, Human
gggagggcuccaga

SEQ ID NO: 1851262 - RNA, 22 nt, Human
gggaggcucuggagcccacugu

SEQ ID NO: 1851263 - RNA, 23 nt, Human
gggcuacaccuuagccugcccuc

SEQ ID NO: 1851264 - RNA, 15 nt, Human
gggcgggaggauguu

SEQ ID NO: 1851265 - RNA, 22 nt, Human
gggccucggacuuagcugggag

SEQ ID NO: 1851266 - RNA, 15 nt, Human
gggccuccugugugu

SEQ ID NO: 1851267 - RNA, 13 nt, Human
gggccuccugugu

SEQ ID NO: 1851268 - RNA, 20 nt, Human
gggccucuuaugggcugggu

SEQ ID NO: 1851269 - RNA, 23 nt, Human
gggccaguuggucccccuuccau

SEQ ID NO: 1851270 - RNA, 22 nt, Human
gggccaguuggucccccuucca

SEQ ID NO: 1851271 - RNA, 18 nt, Human
gggccaguuggucccccu

SEQ ID NO: 1851272 - RNA, 14 nt, Human
gggccaguuggucc

SEQ ID NO: 1851273 - RNA, 18 nt, Human
gggccagugcuccagcca

SEQ ID NO: 1851274 - RNA, 21 nt, Human
aaaaugagccuggcaagaaug

SEQ ID NO: 1851275 - RNA, 14 nt, Human
aaaaugagccuggc

SEQ ID NO: 1851276 - RNA, 11 nt, Human
gggccaggagc

SEQ ID NO: 1851277 - RNA, 13 nt, Human
gggccaggcuggg

SEQ ID NO: 1851278 - RNA, 21 nt, Human
gggccaggcugggucgcccug

SEQ ID NO: 1851279 - RNA, 15 nt, Human
gggccaggcuggguc

SEQ ID NO: 1851280 - RNA, 14 nt, Human
gggccaggcugggu

SEQ ID NO: 1851281 - RNA, 14 nt, Human
gggccagugcucca

SEQ ID NO: 1851282 - RNA, 20 nt, Human
gggcuggguucuacccaggu

SEQ ID NO: 1851283 - RNA, 12 nt, Human
gggcugggcaga

SEQ ID NO: 1851284 - RNA, 18 nt, Human
gggcugggagcucugcag

SEQ ID NO: 1851285 - RNA, 16 nt, Human
gggcugggagcucugc

SEQ ID NO: 1851286 - RNA, 21 nt, Human
gggcugcccuggugcugccac

SEQ ID NO: 1851287 - RNA, 15 nt, Human
gggcugcccuggugc

SEQ ID NO: 1851288 - RNA, 14 nt, Human
gggcugcccuggug

SEQ ID NO: 1851289 - RNA, 13 nt, Human
gggcugcccuggu

SEQ ID NO: 1851290 - RNA, 18 nt, Human
gggcucagcaaaagaugc

SEQ ID NO: 1851291 - RNA, 22 nt, Human
gggcugcaccggcuggccuggc

SEQ ID NO: 1851292 - RNA, 10 nt, Human
gggcucagca

SEQ ID NO: 1851293 - RNA, 18 nt, Human
gggcugcaugcgggcuuc

SEQ ID NO: 1851294 - RNA, 21 nt, Human
gggcugcaugcgggcuuccuc

SEQ ID NO: 1851295 - RNA, 15 nt, Human
aaaaugugauaugua

SEQ ID NO: 1851296 - RNA, 22 nt, Human
gggcuggguucuacccaggugc

SEQ ID NO: 1851297 - RNA, 13 nt, Human
aaaaugucuuuau

SEQ ID NO: 1851298 - RNA, 12 nt, Human
aaaaugugugug

SEQ ID NO: 1851299 - RNA, 20 nt, Human
aaacaagaccacguuucuaa

SEQ ID NO: 1851300 - RNA, 16 nt, Human
aaacacauuuuucuua

SEQ ID NO: 1851301 - RNA, 20 nt, Human
aaacaagcacuaaacaaaga

SEQ ID NO: 1851302 - RNA, 22 nt, Human
aaacauccuacaagacacagug

SEQ ID NO: 1851303 - RNA, 18 nt, Human
aaacauccuacaagacac

SEQ ID NO: 1851304 - RNA, 12 nt, Human
ggggacagcucc

SEQ ID NO: 1851305 - RNA, 14 nt, Human
ggggacagcuccuu

SEQ ID NO: 1851306 - RNA, 20 nt, Human
ggggacagcuccuucugucc

SEQ ID NO: 1851307 - RNA, 21 nt, Human
aaaguucccuacuuccuguga

SEQ ID NO: 1851308 - RNA, 12 nt, Human
aaaguggugaga

SEQ ID NO: 1851309 - RNA, 23 nt, Human
aaaguucccuacuuccugugacu

SEQ ID NO: 1851310 - RNA, 16 nt, Human
aaaguuuguugaaaca

SEQ ID NO: 1851311 - RNA, 21 nt, Human
aaaguuucucuuuucaaaaca

SEQ ID NO: 1851312 - RNA, 23 nt, Human
aaaguuucucuuuucaaaacauu

SEQ ID NO: 1851313 - RNA, 13 nt, Human
aaauaaugugaaa

SEQ ID NO: 1851314 - RNA, 12 nt, Human
aaauaaugugaa

SEQ ID NO: 1851315 - RNA, 15 nt, Human
ggugggauccuccag

SEQ ID NO: 1851316 - RNA, 14 nt, Human
ggugggauccucca

SEQ ID NO: 1851317 - RNA, 20 nt, Human
ggugggaggauugcuugagc

SEQ ID NO: 1851318 - RNA, 18 nt, Human
aaagccuguuuaagagac

SEQ ID NO: 1851319 - RNA, 16 nt, Human
aaagccuguuuaagag

SEQ ID NO: 1851320 - RNA, 19 nt, Human
ggugggauccuccaggugc

SEQ ID NO: 1851321 - RNA, 13 nt, Human
gguggggcagcuu

SEQ ID NO: 1851322 - RNA, 17 nt, Human
gguggggcagcuugagg

SEQ ID NO: 1851323 - RNA, 23 nt, Human
gguggggucacucuggcagcuca

SEQ ID NO: 1851324 - RNA, 15 nt, Human
gguggggucacucug

SEQ ID NO: 1851325 - RNA, 17 nt, Human
gguggggggggugcugg

SEQ ID NO: 1851326 - RNA, 16 nt, Human
ggugucgggcaugaca

SEQ ID NO: 1851327 - RNA, 13 nt, Human
ggugucgggcaug

SEQ ID NO: 1851328 - RNA, 16 nt, Human
ggugugaccacugcag

SEQ ID NO: 1851329 - RNA, 16 nt, Human
ggugugacugaauuuc

SEQ ID NO: 1851330 - RNA, 18 nt, Human
ggugugagucaccaagcc

SEQ ID NO: 1851331 - RNA, 12 nt, Human
gguguggaagag

SEQ ID NO: 1851332 - RNA, 21 nt, Human
ggugugcggccuuuggcuuca

SEQ ID NO: 1851333 - RNA, 13 nt, Human
ggugugcucugau

SEQ ID NO: 1851334 - RNA, 22 nt, Human
gguucaggguuggccccugccc

SEQ ID NO: 1851335 - RNA, 18 nt, Human
gguucaggguuggccccu

SEQ ID NO: 1851336 - RNA, 21 nt, Human
gguucaggguuggccccugcc

SEQ ID NO: 1851337 - RNA, 24 nt, Human
gguuccagcaauucuccugccuca

SEQ ID NO: 1851338 - RNA, 15 nt, Human
gguuccccuguucac

SEQ ID NO: 1851339 - RNA, 23 nt, Human
gguuccagcaauucuccugccuc

SEQ ID NO: 1851340 - RNA, 22 nt, Human
gguucccuuugacgccauccca

SEQ ID NO: 1851341 - RNA, 16 nt, Human
gguuccuccccuccuc

SEQ ID NO: 1851342 - RNA, 21 nt, Human
gguucccuuugacgccauccc

SEQ ID NO: 1851343 - RNA, 14 nt, Human
gguuucagaaaugu

SEQ ID NO: 1851344 - RNA, 15 nt, Human
gguuucagaaaugug

SEQ ID NO: 1851345 - RNA, 12 nt, Human
gguuucagaaau

SEQ ID NO: 1851346 - RNA, 13 nt, Human
gguuucagaaaug

SEQ ID NO: 1851347 - RNA, 19 nt, Human
gguuucaccauguuggcca

SEQ ID NO: 1851348 - RNA, 20 nt, Human
gguuccuuccucugagccuu

SEQ ID NO: 1851349 - RNA, 19 nt, Human
gguuccuuccucugagccu

SEQ ID NO: 1851350 - RNA, 16 nt, Human
gguuuagaaagcuugc

SEQ ID NO: 1851351 - RNA, 14 nt, Human
gguagcuuuucccu

SEQ ID NO: 1851352 - RNA, 16 nt, Human
gguccacaacacacag

SEQ ID NO: 1851353 - RNA, 14 nt, Human
gguaugcaaucaaa

SEQ ID NO: 1851354 - RNA, 22 nt, Human
gguaugaucacggcucacugca

SEQ ID NO: 1851355 - RNA, 17 nt, Human
gguccacccaggagccc

SEQ ID NO: 1851356 - RNA, 12 nt, Human
gguccacccagg

SEQ ID NO: 1851357 - RNA, 13 nt, Human
gguccacccagga

SEQ ID NO: 1851358 - RNA, 15 nt, Human
gguccacccaggagc

SEQ ID NO: 1851359 - RNA, 16 nt, Human
gguccacccaggagcc

SEQ ID NO: 1851360 - RNA, 17 nt, Human
aaagacuaucuaaaugu

SEQ ID NO: 1851361 - RNA, 19 nt, Human
aaagacaccuacugagugg

SEQ ID NO: 1851362 - RNA, 13 nt, Human
aaagacaccuacu

SEQ ID NO: 1851363 - RNA, 18 nt, Human
aaagaaguggggacagag

SEQ ID NO: 1851364 - RNA, 12 nt, Human
aaacuuuacuau

SEQ ID NO: 1851365 - RNA, 18 nt, Human
aaacuuuacuauggcccu

SEQ ID NO: 1851366 - RNA, 17 nt, Human
aaacuuuaccuuuuuua

SEQ ID NO: 1851367 - RNA, 22 nt, Human
aaacuuuaccuuuuuuauacau

SEQ ID NO: 1851368 - RNA, 15 nt, Human
gguccauagagagca

SEQ ID NO: 1851369 - RNA, 18 nt, Human
ggguggggggggugcugg

SEQ ID NO: 1851370 - RNA, 15 nt, Human
ggguggggggggugc

SEQ ID NO: 1851371 - RNA, 12 nt, Human
ggguggugaccu

SEQ ID NO: 1851372 - RNA, 17 nt, Human
ggguguggcgcagcaua

SEQ ID NO: 1851373 - RNA, 20 nt, Human
ggguggggaccucaggccug

SEQ ID NO: 1851374 - RNA, 19 nt, Human
ggguggcaccagcagccug

SEQ ID NO: 1851375 - RNA, 12 nt, Human
ggggccuggcag

SEQ ID NO: 1851376 - RNA, 11 nt, Human
ggggccuggca

SEQ ID NO: 1851377 - RNA, 13 nt, Human
ggguggaugccug

SEQ ID NO: 1851378 - RNA, 15 nt, Human
ggguggcaccagcag

SEQ ID NO: 1851379 - RNA, 17 nt, Human
ggguggaugccuggugg

SEQ ID NO: 1851380 - RNA, 23 nt, Human
gguacaaccuguucugcuuuccu

SEQ ID NO: 1851381 - RNA, 24 nt, Human
gguacaaccuguucugcuuuccuc

SEQ ID NO: 1851382 - RNA, 18 nt, Human
gguaaucgaccugccucg

SEQ ID NO: 1851383 - RNA, 17 nt, Human
gguaaucgaccugccuc

SEQ ID NO: 1851384 - RNA, 14 nt, Human
gguaaucgaccugc

SEQ ID NO: 1851385 - RNA, 17 nt, Human
ggguuucuaaagcugcc

SEQ ID NO: 1851386 - RNA, 18 nt, Human
gguaacuagggaagauaa

SEQ ID NO: 1851387 - RNA, 14 nt, Human
gguaacaggcagau

SEQ ID NO: 1851388 - RNA, 20 nt, Human
gguaacaggcagauacagga

SEQ ID NO: 1851389 - RNA, 20 nt, Human
ggugcaaugaccuuucaaua

SEQ ID NO: 1851390 - RNA, 19 nt, Human
ggugcaaugaccuuucaau

SEQ ID NO: 1851391 - RNA, 18 nt, Human
ggugcaaugaccuuucaa

SEQ ID NO: 1851392 - RNA, 20 nt, Human
ggugcugggccccugccucu

SEQ ID NO: 1851393 - RNA, 19 nt, Human
ggugcugggccccugccuc

SEQ ID NO: 1851394 - RNA, 17 nt, Human
aaagcagggacuugaac

SEQ ID NO: 1851395 - RNA, 19 nt, Human
aaagcaggcagaacucauc

SEQ ID NO: 1851396 - RNA, 17 nt, Human
aaagcaggcagaacuca

SEQ ID NO: 1851397 - RNA, 16 nt, Human
aaagcagcguuucuau

SEQ ID NO: 1851398 - RNA, 18 nt, Human
aaagcagcguuucuauga

SEQ ID NO: 1851399 - RNA, 22 nt, Human
aaagcagcguuucuaugacaca

SEQ ID NO: 1851400 - RNA, 14 nt, Human
gguggaugccuggu

SEQ ID NO: 1851401 - RNA, 21 nt, Human
gguggaugccugguggcagcu

SEQ ID NO: 1851402 - RNA, 14 nt, Human
ggucggaaaacaug

SEQ ID NO: 1851403 - RNA, 17 nt, Human
ggucuacacugugcuga

SEQ ID NO: 1851404 - RNA, 13 nt, Human
ggucggaaaacau

SEQ ID NO: 1851405 - RNA, 13 nt, Human
aaagcaaaggaga

SEQ ID NO: 1851406 - RNA, 23 nt, Human
gguccugcugcaguugccaguca

SEQ ID NO: 1851407 - RNA, 21 nt, Human
gguccugcugcaguugccagu

SEQ ID NO: 1851408 - RNA, 13 nt, Human
aaagcaaaugucu

SEQ ID NO: 1851409 - RNA, 13 nt, Human
gaggucuguucuu

SEQ ID NO: 1851410 - RNA, 14 nt, Human
gaggucuguucuuu

SEQ ID NO: 1851411 - RNA, 11 nt, Human
gaggugggagg

SEQ ID NO: 1851412 - RNA, 12 nt, Human
gaggugggaucc

SEQ ID NO: 1851413 - RNA, 16 nt, Human
gagucccaccuuggcu

SEQ ID NO: 1851414 - RNA, 20 nt, Human
gagucccaccuuggcugcag

SEQ ID NO: 1851415 - RNA, 15 nt, Human
gagucaccaagccca

SEQ ID NO: 1851416 - RNA, 13 nt, Human
gagucaccaagcc

SEQ ID NO: 1851417 - RNA, 14 nt, Human
gagucaccaagccc

SEQ ID NO: 1851418 - RNA, 11 nt, Human
gagugcaguga

SEQ ID NO: 1851419 - RNA, 12 nt, Human
gagugcagugag

SEQ ID NO: 1851420 - RNA, 24 nt, Human
gagugagcacuaaggugugcucug

SEQ ID NO: 1851421 - RNA, 21 nt, Human
gagucccaccuuggcugcagg

SEQ ID NO: 1851422 - RNA, 12 nt, Human
gagugagcuggu

SEQ ID NO: 1851423 - RNA, 20 nt, Human
gaguuugggguaugggagag

SEQ ID NO: 1851424 - RNA, 16 nt, Human
gaguuguuacauuuuu

SEQ ID NO: 1851425 - RNA, 20 nt, Human
gaguuguuacauuuuuaagu

SEQ ID NO: 1851426 - RNA, 18 nt, Human
gagugccuuacacaaugg

SEQ ID NO: 1851427 - RNA, 14 nt, Human
gauacccaucccau

SEQ ID NO: 1851428 - RNA, 13 nt, Human
gauacccauccca

SEQ ID NO: 1851429 - RNA, 16 nt, Human
gauacuacaguuuguu

SEQ ID NO: 1851430 - RNA, 11 nt, Human
gauacuacagu

SEQ ID NO: 1851431 - RNA, 17 nt, Human
gauacgacaacuugcac

SEQ ID NO: 1851432 - RNA, 17 nt, Human
gauacuugaaaauuaac

SEQ ID NO: 1851433 - RNA, 18 nt, Human
gauaugcaguuuuccuua

SEQ ID NO: 1851434 - RNA, 16 nt, Human
gauacuugaaaauuaa

SEQ ID NO: 1851435 - RNA, 20 nt, Human
gauauguaccuaacgaagua

SEQ ID NO: 1851436 - RNA, 21 nt, Human
gaugaugaaaugaggucagag

SEQ ID NO: 1851437 - RNA, 20 nt, Human
gaugaucuuugcagacaggc

SEQ ID NO: 1851438 - RNA, 21 nt, Human
gaugaucuuugcagacaggca

SEQ ID NO: 1851439 - RNA, 14 nt, Human
gaugaucuuugcag

SEQ ID NO: 1851440 - RNA, 17 nt, Human
gaucucuugagccuggg

SEQ ID NO: 1851441 - RNA, 16 nt, Human
gaucucuugagccugg

SEQ ID NO: 1851442 - RNA, 12 nt, Human
gaucucuugagc

SEQ ID NO: 1851443 - RNA, 16 nt, Human
gauauuuugcuuugug

SEQ ID NO: 1851444 - RNA, 15 nt, Human
gauauuuuuuucuuu

SEQ ID NO: 1851445 - RNA, 15 nt, Human
gaucucuaacuucac

SEQ ID NO: 1851446 - RNA, 20 nt, Human
gauuacaggugugagccacc

SEQ ID NO: 1851447 - RNA, 20 nt, Human
gauuacaggugugaaccacc

SEQ ID NO: 1851448 - RNA, 18 nt, Human
gauuacugccuauuuuaa

SEQ ID NO: 1851449 - RNA, 14 nt, Human
gauuaccagggacu

SEQ ID NO: 1851450 - RNA, 16 nt, Human
gcagccacauuccuga

SEQ ID NO: 1851451 - RNA, 14 nt, Human
gcagccacuauugu

SEQ ID NO: 1851452 - RNA, 12 nt, Human
gcagccaggcca

SEQ ID NO: 1851453 - RNA, 14 nt, Human
gcagccaggccaca

SEQ ID NO: 1851454 - RNA, 13 nt, Human
gcagccaggccac

SEQ ID NO: 1851455 - RNA, 16 nt, Human
gcagccaggccacaag

SEQ ID NO: 1851456 - RNA, 14 nt, Human
gcauacguacacau

SEQ ID NO: 1851457 - RNA, 22 nt, Human
gcauaacguauaaaagccuguu

SEQ ID NO: 1851458 - RNA, 17 nt, Human
gcauaccacuuuuguuc

SEQ ID NO: 1851459 - RNA, 20 nt, Human
gcauaccacuuuuguucuug

SEQ ID NO: 1851460 - RNA, 23 nt, Human
gcaggcucucaggccagcugcuu

SEQ ID NO: 1851461 - RNA, 14 nt, Human
gcaggcuggcccug

SEQ ID NO: 1851462 - RNA, 18 nt, Human
gcaggcuggcccugcccu

SEQ ID NO: 1851463 - RNA, 17 nt, Human
gcaggcuggcccugccc

SEQ ID NO: 1851464 - RNA, 16 nt, Human
gcaggcuggcccugcc

SEQ ID NO: 1851465 - RNA, 15 nt, Human
gcaggcuggcccugc

SEQ ID NO: 1851466 - RNA, 21 nt, Human
gcaggcuggcccugcccuggu

SEQ ID NO: 1851467 - RNA, 20 nt, Human
gcaggcuggcccugcccugg

SEQ ID NO: 1851468 - RNA, 19 nt, Human
gcaggcuggcccugcccug

SEQ ID NO: 1851469 - RNA, 22 nt, Human
gcaggcucucaggccagcugcu

SEQ ID NO: 1851470 - RNA, 20 nt, Human
gcaggcucucaggccagcug

SEQ ID NO: 1851471 - RNA, 17 nt, Human
gcagcugcgguccaccc

SEQ ID NO: 1851472 - RNA, 19 nt, Human
gcagcugcgguccacccag

SEQ ID NO: 1851473 - RNA, 13 nt, Human
gcagggagggccu

SEQ ID NO: 1851474 - RNA, 10 nt, Human
gcagggaggg

SEQ ID NO: 1851475 - RNA, 19 nt, Human
gcagggacuugaacccaua

SEQ ID NO: 1851476 - RNA, 13 nt, Human
gcagggaaacagc

SEQ ID NO: 1851477 - RNA, 13 nt, Human
gcaagugagagcu

SEQ ID NO: 1851478 - RNA, 14 nt, Human
gcacaagcugcacc

SEQ ID NO: 1851479 - RNA, 23 nt, Human
gcacaagcuccaagcucccaggc

SEQ ID NO: 1851480 - RNA, 22 nt, Human
gcacaagcuccaagcucccagg

SEQ ID NO: 1851481 - RNA, 23 nt, Human
gcaauaaggggagaguaacccug

SEQ ID NO: 1851482 - RNA, 19 nt, Human
gcaccggcuggccuggccc

SEQ ID NO: 1851483 - RNA, 23 nt, Human
gcaccggcuggccuggccccuca

SEQ ID NO: 1851484 - RNA, 21 nt, Human
gcaccggcuggccuggccccu

SEQ ID NO: 1851485 - RNA, 18 nt, Human
gcaccggcuggccuggcc

SEQ ID NO: 1851486 - RNA, 19 nt, Human
gcacaugccucucucaggc

SEQ ID NO: 1851487 - RNA, 18 nt, Human
gcacaugccucucucagg

SEQ ID NO: 1851488 - RNA, 17 nt, Human
gcacaugccucucucag

SEQ ID NO: 1851489 - RNA, 14 nt, Human
gcacaugccucucu

SEQ ID NO: 1851490 - RNA, 21 nt, Human
gcacaugccucucucaggcca

SEQ ID NO: 1851491 - RNA, 20 nt, Human
gcacaugccucucucaggcc

SEQ ID NO: 1851492 - RNA, 22 nt, Human
gcacaugccucucucaggccaa

SEQ ID NO: 1851493 - RNA, 21 nt, Human
gcacaaucucggcucacugca

SEQ ID NO: 1851494 - RNA, 22 nt, Human
gcacaaucucggcucacugcau

SEQ ID NO: 1851495 - RNA, 19 nt, Human
gcacaucagcacgauuucu

SEQ ID NO: 1851496 - RNA, 20 nt, Human
gcacaucagcacgauuucug

SEQ ID NO: 1851497 - RNA, 21 nt, Human
gcacaucagcacgauuucugu

SEQ ID NO: 1851498 - RNA, 13 nt, Human
gcacaugccucuc

SEQ ID NO: 1851499 - RNA, 12 nt, Human
gcacugacauug

SEQ ID NO: 1851500 - RNA, 23 nt, Human
gcagagcaccuuagacagucccu

SEQ ID NO: 1851501 - RNA, 22 nt, Human
gcagagcaccuuagacaguccc

SEQ ID NO: 1851502 - RNA, 19 nt, Human
gcagagcaccuuagacagu

SEQ ID NO: 1851503 - RNA, 15 nt, Human
gcagagcagagacca

SEQ ID NO: 1851504 - RNA, 14 nt, Human
gcagagcagagacc

SEQ ID NO: 1851505 - RNA, 12 nt, Human
gcagagcagaga

SEQ ID NO: 1851506 - RNA, 24 nt, Human
gcagagcaccuuagacagucccug

SEQ ID NO: 1851507 - RNA, 20 nt, Human
gcagagcagagaccaucccu

SEQ ID NO: 1851508 - RNA, 19 nt, Human
gcagagcagagaccauccc

SEQ ID NO: 1851509 - RNA, 22 nt, Human
gaaugaaugucagugugacuga

SEQ ID NO: 1851510 - RNA, 18 nt, Human
gaaugaaugucaguguga

SEQ ID NO: 1851511 - RNA, 14 nt, Human
gaaugaaugucagu

SEQ ID NO: 1851512 - RNA, 11 nt, Human
gaaugaauguc

SEQ ID NO: 1851513 - RNA, 15 nt, Human
gaagcucagggccug

SEQ ID NO: 1851514 - RNA, 14 nt, Human
gaagcucagggccu

SEQ ID NO: 1851515 - RNA, 19 nt, Human
gaagcucagggccuggcuc

SEQ ID NO: 1851516 - RNA, 18 nt, Human
gaagcucagggccuggcu

SEQ ID NO: 1851517 - RNA, 17 nt, Human
gaagcucagggccuggc

SEQ ID NO: 1851518 - RNA, 16 nt, Human
gaagcucagggccugg

SEQ ID NO: 1851519 - RNA, 21 nt, Human
gaagcucagggccuggcucag

SEQ ID NO: 1851520 - RNA, 20 nt, Human
gaagcucagggccuggcuca

SEQ ID NO: 1851521 - RNA, 23 nt, Human
gaagcucagggccuggcucaggu

SEQ ID NO: 1851522 - RNA, 18 nt, Human
gaaauccagggugguggu

SEQ ID NO: 1851523 - RNA, 13 nt, Human
gaaauccagggug

SEQ ID NO: 1851524 - RNA, 15 nt, Human
gaaguggggacagag

SEQ ID NO: 1851525 - RNA, 18 nt, Human
gaagucuuuguacagaca

SEQ ID NO: 1851526 - RNA, 20 nt, Human
gaagucuuuguacagacaac

SEQ ID NO: 1851527 - RNA, 19 nt, Human
gaagucuuuguacagacaa

SEQ ID NO: 1851528 - RNA, 19 nt, Human
gaaggcucgagcaugccug

SEQ ID NO: 1851529 - RNA, 17 nt, Human
gaaggcucgagcaugcc

SEQ ID NO: 1851530 - RNA, 16 nt, Human
gaaggcucgagcaugc

SEQ ID NO: 1851531 - RNA, 21 nt, Human
gacacacagcucuguccuggg

SEQ ID NO: 1851532 - RNA, 19 nt, Human
gaauuuuggcugugucucc

SEQ ID NO: 1851533 - RNA, 21 nt, Human
gaauuuuauuuuuugggaaaa

SEQ ID NO: 1851534 - RNA, 20 nt, Human
gaauuugugaagguggaaau

SEQ ID NO: 1851535 - RNA, 21 nt, Human
gaauuuugugcccccauguaa

SEQ ID NO: 1851536 - RNA, 20 nt, Human
gaauuuugugcccccaugua

SEQ ID NO: 1851537 - RNA, 23 nt, Human
gaauuuuggcugugucucccuuc

SEQ ID NO: 1851538 - RNA, 15 nt, Human
gacacacagcucugu

SEQ ID NO: 1851539 - RNA, 17 nt, Human
gacacacagcucugucc

SEQ ID NO: 1851540 - RNA, 18 nt, Human
gacacacagcucuguccu

SEQ ID NO: 1851541 - RNA, 19 nt, Human
gacacacagcucuguccug

SEQ ID NO: 1851542 - RNA, 14 nt, Human
gacacacagcucug

SEQ ID NO: 1851543 - RNA, 13 nt, Human
gacacugaugggc

SEQ ID NO: 1851544 - RNA, 16 nt, Human
gacacuuaaaaauggu

SEQ ID NO: 1851545 - RNA, 15 nt, Human
gacacugaugggcaa

SEQ ID NO: 1851546 - RNA, 23 nt, Human
gacagcccgggcucugccuccca

SEQ ID NO: 1851547 - RNA, 22 nt, Human
gacagcccgggcucugccuccc

SEQ ID NO: 1851548 - RNA, 21 nt, Human
gacagcccgggcucugccucc

SEQ ID NO: 1851549 - RNA, 12 nt, Human
gacagacacagg

SEQ ID NO: 1851550 - RNA, 20 nt, Human
gacaggguuuugccauguug

SEQ ID NO: 1851551 - RNA, 22 nt, Human
gacaggguuuugccauguuggc

SEQ ID NO: 1851552 - RNA, 19 nt, Human
gacagccuggcacagggca

SEQ ID NO: 1851553 - RNA, 13 nt, Human
gacagccuggcac

SEQ ID NO: 1851554 - RNA, 13 nt, Human
gacagcccuccau

SEQ ID NO: 1851555 - RNA, 11 nt, Human
gacagcuccuu

SEQ ID NO: 1851556 - RNA, 14 nt, Human
gacagugaaagaaa

SEQ ID NO: 1851557 - RNA, 22 nt, Human
gacuaucuaaauguugaaagau

SEQ ID NO: 1851558 - RNA, 18 nt, Human
gacuaggguccuggggaa

SEQ ID NO: 1851559 - RNA, 16 nt, Human
gacuaggguccugggg

SEQ ID NO: 1851560 - RNA, 15 nt, Human
gacuaggguccuggg

SEQ ID NO: 1851561 - RNA, 12 nt, Human
gacucugucuca

SEQ ID NO: 1851562 - RNA, 23 nt, Human
gacuuuucuuucagccaagaauu

SEQ ID NO: 1851563 - RNA, 21 nt, Human
gacuuuucuuuguggcuuccu

SEQ ID NO: 1851564 - RNA, 11 nt, Human
gacuuuccucu

SEQ ID NO: 1851565 - RNA, 15 nt, Human
gagaagcggcuggca

SEQ ID NO: 1851566 - RNA, 13 nt, Human
gagaagcggcugg

SEQ ID NO: 1851567 - RNA, 16 nt, Human
gagaagcggcuggcag

SEQ ID NO: 1851568 - RNA, 12 nt, Human
gagaaggaagcc

SEQ ID NO: 1851569 - RNA, 20 nt, Human
gagaaggacccggaggggcc

SEQ ID NO: 1851570 - RNA, 23 nt, Human
gagaaggacccggaggggccugg

SEQ ID NO: 1851571 - RNA, 22 nt, Human
gagaaggacccggaggggccug

SEQ ID NO: 1851572 - RNA, 13 nt, Human
gagaccugccccu

SEQ ID NO: 1851573 - RNA, 12 nt, Human
gagaccugcccc

SEQ ID NO: 1851574 - RNA, 11 nt, Human
gagaccugccc

SEQ ID NO: 1851575 - RNA, 21 nt, Human
gagacccugucucaaaaaaag

SEQ ID NO: 1851576 - RNA, 14 nt, Human
gagaaucacuugaa

SEQ ID NO: 1851577 - RNA, 15 nt, Human
gagaaucacuugaac

SEQ ID NO: 1851578 - RNA, 14 nt, Human
gagcagggcucagc

SEQ ID NO: 1851579 - RNA, 22 nt, Human
gagcaugccuggauggggcugc

SEQ ID NO: 1851580 - RNA, 13 nt, Human
gagcaucaggcca

SEQ ID NO: 1851581 - RNA, 12 nt, Human
gagcaucaggcc

SEQ ID NO: 1851582 - RNA, 21 nt, Human
gagcagggcucagcggggaca

SEQ ID NO: 1851583 - RNA, 18 nt, Human
gagcugggugucaagagg

SEQ ID NO: 1851584 - RNA, 17 nt, Human
gagccuuccaggggugg

SEQ ID NO: 1851585 - RNA, 16 nt, Human
gagccuuccaggggug

SEQ ID NO: 1851586 - RNA, 15 nt, Human
gagccuuccaggggu

SEQ ID NO: 1851587 - RNA, 14 nt, Human
gagccuuccagggg

SEQ ID NO: 1851588 - RNA, 22 nt, Human
gagccuugaacuuugaccucug

SEQ ID NO: 1851589 - RNA, 19 nt, Human
gagccuugaacuuugaccu

SEQ ID NO: 1851590 - RNA, 21 nt, Human
gagcggagaaaggaagggcug

SEQ ID NO: 1851591 - RNA, 18 nt, Human
gagcggagaaaggaaggg

SEQ ID NO: 1851592 - RNA, 21 nt, Human
gagcugccuguucagcuccag

SEQ ID NO: 1851593 - RNA, 22 nt, Human
gagcugccuguucagcuccagc

SEQ ID NO: 1851594 - RNA, 22 nt, Human
gagaggcauccaguaucuugaa

SEQ ID NO: 1851595 - RNA, 21 nt, Human
gagaugaugccaugggcccuc

SEQ ID NO: 1851596 - RNA, 16 nt, Human
gagacuccugcaggca

SEQ ID NO: 1851597 - RNA, 15 nt, Human
gagacuccugcaggc

SEQ ID NO: 1851598 - RNA, 18 nt, Human
gagacuccugcaggcagc

SEQ ID NO: 1851599 - RNA, 17 nt, Human
gagacuccugcaggcag

SEQ ID NO: 1851600 - RNA, 14 nt, Human
gagaggcauccagu

SEQ ID NO: 1851601 - RNA, 13 nt, Human
gagauuuacaacu

SEQ ID NO: 1851602 - RNA, 14 nt, Human
gagauguagccccu

SEQ ID NO: 1851603 - RNA, 18 nt, Human
gagauugcaccacugcac

SEQ ID NO: 1851604 - RNA, 21 nt, Human
gagauugcaccacugcacucc

SEQ ID NO: 1851605 - RNA, 20 nt, Human
cuuucagccaagaauucuua

SEQ ID NO: 1851606 - RNA, 23 nt, Human
cuuucagccaagaauucuuaaau

SEQ ID NO: 1851607 - RNA, 16 nt, Human
cuuucacaaccuucug

SEQ ID NO: 1851608 - RNA, 23 nt, Human
cuuucaauaggaaaaacugauuu

SEQ ID NO: 1851609 - RNA, 14 nt, Human
cuuucacaaccuuc

SEQ ID NO: 1851610 - RNA, 22 nt, Human
cuuuccugaggcugggcucccu

SEQ ID NO: 1851611 - RNA, 13 nt, Human
cuuuguaaugaaa

SEQ ID NO: 1851612 - RNA, 15 nt, Human
cuuuguaaauuguca

SEQ ID NO: 1851613 - RNA, 21 nt, Human
cuuugggcugcccuggugcug

SEQ ID NO: 1851614 - RNA, 20 nt, Human
cuuugggcugcccuggugcu

SEQ ID NO: 1851615 - RNA, 19 nt, Human
cuuugggcugcccuggugc

SEQ ID NO: 1851616 - RNA, 15 nt, Human
cuuugggcugcccug

SEQ ID NO: 1851617 - RNA, 14 nt, Human
cuuugggcugcccu

SEQ ID NO: 1851618 - RNA, 16 nt, Human
cuuucuagccagagga

SEQ ID NO: 1851619 - RNA, 22 nt, Human
cuuugauauuuucaacgcagcc

SEQ ID NO: 1851620 - RNA, 15 nt, Human
cuuucuagccagagg

SEQ ID NO: 1851621 - RNA, 17 nt, Human
cuuucuacccagcgagc

SEQ ID NO: 1851622 - RNA, 13 nt, Human
cuuuuauaaacuu

SEQ ID NO: 1851623 - RNA, 14 nt, Human
cuuuuauaaacuuu

SEQ ID NO: 1851624 - RNA, 18 nt, Human
cuuuuaugugaaacaugu

SEQ ID NO: 1851625 - RNA, 14 nt, Human
cuuuuaugugaaac

SEQ ID NO: 1851626 - RNA, 15 nt, Human
gaaaauguaugugua

SEQ ID NO: 1851627 - RNA, 23 nt, Human
gaaaauggacguguuaugacucc

SEQ ID NO: 1851628 - RNA, 19 nt, Human
gaaaauggacguguuauga

SEQ ID NO: 1851629 - RNA, 14 nt, Human
gaaaaacugauuuu

SEQ ID NO: 1851630 - RNA, 18 nt, Human
gaaaagaaaaaugagccu

SEQ ID NO: 1851631 - RNA, 21 nt, Human
gaaaauggaagacagcucuua

SEQ ID NO: 1851632 - RNA, 23 nt, Human
gaaaaugcuguauuagucacaga

SEQ ID NO: 1851633 - RNA, 13 nt, Human
cuuuugccauuga

SEQ ID NO: 1851634 - RNA, 13 nt, Human
cuuuuggagucag

SEQ ID NO: 1851635 - RNA, 16 nt, Human
cuuuugccguuauuaa

SEQ ID NO: 1851636 - RNA, 23 nt, Human
cuuuugcccacacuugggagcaa

SEQ ID NO: 1851637 - RNA, 15 nt, Human
cuuuuggcauuuuac

SEQ ID NO: 1851638 - RNA, 18 nt, Human
cuuuugucuaugggacuc

SEQ ID NO: 1851639 - RNA, 21 nt, Human
cuuuuuuuuuuuugagacaga

SEQ ID NO: 1851640 - RNA, 22 nt, Human
cuuuuuuuuuuuuuaaagacag

SEQ ID NO: 1851641 - RNA, 23 nt, Human
cuuuuuuuuuuuuuaaagacaga

SEQ ID NO: 1851642 - RNA, 23 nt, Human
cuuuuuuggcugcugaaggcucg

SEQ ID NO: 1851643 - RNA, 12 nt, Human
cuuuugugcauu

SEQ ID NO: 1851644 - RNA, 13 nt, Human
cuuuugugcauua

SEQ ID NO: 1851645 - RNA, 20 nt, Human
cuuuuuuuuuuuugagacag

SEQ ID NO: 1851646 - RNA, 22 nt, Human
gaaaggcuccaggagcagccac

SEQ ID NO: 1851647 - RNA, 20 nt, Human
gaaaggcuccaggagcagcc

SEQ ID NO: 1851648 - RNA, 21 nt, Human
gaaaggcuccaggagcagcca

SEQ ID NO: 1851649 - RNA, 20 nt, Human
gaaagacuaucuaaauguug

SEQ ID NO: 1851650 - RNA, 21 nt, Human
gaaagaaaauaccaaggaaca

SEQ ID NO: 1851651 - RNA, 19 nt, Human
gaaaucaccgaaaacgugg

SEQ ID NO: 1851652 - RNA, 20 nt, Human
gaaagggacgcuacccggga

SEQ ID NO: 1851653 - RNA, 19 nt, Human
gaaagggacuuggaagcuc

SEQ ID NO: 1851654 - RNA, 22 nt, Human
gaaagggacuuggaagcuccgc

SEQ ID NO: 1851655 - RNA, 13 nt, Human
cuucuagaaccag

SEQ ID NO: 1851656 - RNA, 17 nt, Human
cuucuagaaccaggcaa

SEQ ID NO: 1851657 - RNA, 17 nt, Human
cuuccugcaacaccuug

SEQ ID NO: 1851658 - RNA, 23 nt, Human
cuucugacccaugcugcccugug

SEQ ID NO: 1851659 - RNA, 22 nt, Human
cuucugacccaugcugcccugu

SEQ ID NO: 1851660 - RNA, 21 nt, Human
cuucugacccaugcugcccug

SEQ ID NO: 1851661 - RNA, 20 nt, Human
cuucugacccaugcugcccu

SEQ ID NO: 1851662 - RNA, 21 nt, Human
cuucuguugcugccucaugcu

SEQ ID NO: 1851663 - RNA, 23 nt, Human
cuucuucagagacuccugcaggc

SEQ ID NO: 1851664 - RNA, 20 nt, Human
cuucuguugcugccucaugc

SEQ ID NO: 1851665 - RNA, 19 nt, Human
cuucuguugcugccucaug

SEQ ID NO: 1851666 - RNA, 18 nt, Human
cuucuguugcugccucau

SEQ ID NO: 1851667 - RNA, 17 nt, Human
cuucuguugcugccuca

SEQ ID NO: 1851668 - RNA, 19 nt, Human
cuugaauuguaaggaauga

SEQ ID NO: 1851669 - RNA, 18 nt, Human
cuugaauuguaaggaaug

SEQ ID NO: 1851670 - RNA, 14 nt, Human
cuugacagggcaca

SEQ ID NO: 1851671 - RNA, 15 nt, Human
cuugacagggcacac

SEQ ID NO: 1851672 - RNA, 13 nt, Human
cuugacagggcac

SEQ ID NO: 1851673 - RNA, 20 nt, Human
cuugacagggcacaccgggc

SEQ ID NO: 1851674 - RNA, 20 nt, Human
cuuggcgcugccccuggcag

SEQ ID NO: 1851675 - RNA, 17 nt, Human
cuuggcgcugccccugg

SEQ ID NO: 1851676 - RNA, 14 nt, Human
cuuggcgcugcccc

SEQ ID NO: 1851677 - RNA, 12 nt, Human
cuuggcgcugcc

SEQ ID NO: 1851678 - RNA, 13 nt, Human
cuugaugccuggc

SEQ ID NO: 1851679 - RNA, 12 nt, Human
cuugaugccugg

SEQ ID NO: 1851680 - RNA, 16 nt, Human
cuuauggaacacucug

SEQ ID NO: 1851681 - RNA, 13 nt, Human
cuuauggaacacu

SEQ ID NO: 1851682 - RNA, 19 nt, Human
cuucacggaagagccuugc

SEQ ID NO: 1851683 - RNA, 15 nt, Human
cuucacggaagagcc

SEQ ID NO: 1851684 - RNA, 22 nt, Human
cuucaccuuuguccccaccgca

SEQ ID NO: 1851685 - RNA, 21 nt, Human
cuucaccuuuguccccaccgc

SEQ ID NO: 1851686 - RNA, 21 nt, Human
cuuauggaacacucugagacu

SEQ ID NO: 1851687 - RNA, 20 nt, Human
cuuauggaacacucugagac

SEQ ID NO: 1851688 - RNA, 19 nt, Human
cuuauggaacacucugaga

SEQ ID NO: 1851689 - RNA, 17 nt, Human
cuuauggaacacucuga

SEQ ID NO: 1851690 - RNA, 19 nt, Human
cugugcugagucugaaggc

SEQ ID NO: 1851691 - RNA, 14 nt, Human
cugugcugagucug

SEQ ID NO: 1851692 - RNA, 12 nt, Human
cugugcugaguc

SEQ ID NO: 1851693 - RNA, 23 nt, Human
cuucccaccucucucacuccuug

SEQ ID NO: 1851694 - RNA, 21 nt, Human
cuucccaccucucucacuccu

SEQ ID NO: 1851695 - RNA, 21 nt, Human
cuuccauaaucuggacuccuc

SEQ ID NO: 1851696 - RNA, 11 nt, Human
cuuccauaauc

SEQ ID NO: 1851697 - RNA, 11 nt, Human
cuucccaccuc

SEQ ID NO: 1851698 - RNA, 23 nt, Human
cuuccagugaggcucugcccuug

SEQ ID NO: 1851699 - RNA, 22 nt, Human
cuuccagugaggcucugcccuu

SEQ ID NO: 1851700 - RNA, 21 nt, Human
cuuccagugaggcucugcccu

SEQ ID NO: 1851701 - RNA, 19 nt, Human
cuucagagacuccugcagg

SEQ ID NO: 1851702 - RNA, 18 nt, Human
cuucagagacuccugcag

SEQ ID NO: 1851703 - RNA, 20 nt, Human
cuucagagacuccugcaggc

SEQ ID NO: 1851704 - RNA, 17 nt, Human
cuucagagacuccugca

SEQ ID NO: 1851705 - RNA, 15 nt, Human
cuucacuguaaaaua

SEQ ID NO: 1851706 - RNA, 16 nt, Human
cugucgcccaggcugg

SEQ ID NO: 1851707 - RNA, 13 nt, Human
cugucgcccaguc

SEQ ID NO: 1851708 - RNA, 19 nt, Human
cugucgagaaacagccugu

SEQ ID NO: 1851709 - RNA, 15 nt, Human
cugugaagagaacca

SEQ ID NO: 1851710 - RNA, 16 nt, Human
cugugagaugcuagaa

SEQ ID NO: 1851711 - RNA, 21 nt, Human
cugugagaugcuagaacuccc

SEQ ID NO: 1851712 - RNA, 14 nt, Human
cugugcucuggaca

SEQ ID NO: 1851713 - RNA, 15 nt, Human
cugugcucuggacag

SEQ ID NO: 1851714 - RNA, 19 nt, Human
cugugcuccauggcugcca

SEQ ID NO: 1851715 - RNA, 22 nt, Human
cugguuuccugcccugggaggc

SEQ ID NO: 1851716 - RNA, 16 nt, Human
cugguuuccugcccug

SEQ ID NO: 1851717 - RNA, 21 nt, Human
cugguuuccugcccugggagg

SEQ ID NO: 1851718 - RNA, 18 nt, Human
cugguuuccugcccuggg

SEQ ID NO: 1851719 - RNA, 18 nt, Human
cugucagccauuccuguu

SEQ ID NO: 1851720 - RNA, 12 nt, Human
cuguccugccua

SEQ ID NO: 1851721 - RNA, 20 nt, Human
cugucauuugagcagggcuc

SEQ ID NO: 1851722 - RNA, 17 nt, Human
cugucauuugagcaggg

SEQ ID NO: 1851723 - RNA, 18 nt, Human
cugucauuugagcagggc

SEQ ID NO: 1851724 - RNA, 16 nt, Human
cugucauuugagcagg

SEQ ID NO: 1851725 - RNA, 23 nt, Human
cuguacuugcucuugaugccugg

SEQ ID NO: 1851726 - RNA, 22 nt, Human
cuguacuugcucuugaugccug

SEQ ID NO: 1851727 - RNA, 21 nt, Human
cuguaggaagguuaauguuca

SEQ ID NO: 1851728 - RNA, 15 nt, Human
cuggcagcucagaga

SEQ ID NO: 1851729 - RNA, 13 nt, Human
cuggccccucagg

SEQ ID NO: 1851730 - RNA, 16 nt, Human
cuggacugugugcuca

SEQ ID NO: 1851731 - RNA, 14 nt, Human
cuggcagcucagag

SEQ ID NO: 1851732 - RNA, 13 nt, Human
cuggcagcucaga

SEQ ID NO: 1851733 - RNA, 12 nt, Human
cuggcagcucag

SEQ ID NO: 1851734 - RNA, 21 nt, Human
cuggccccucagggucccugg

SEQ ID NO: 1851735 - RNA, 20 nt, Human
cuggccccucagggucccug

SEQ ID NO: 1851736 - RNA, 18 nt, Human
cuggccccucaggguccc

SEQ ID NO: 1851737 - RNA, 17 nt, Human
cuggccccucagggucc

SEQ ID NO: 1851738 - RNA, 20 nt, Human
cuggcuccaaacccucgagg

SEQ ID NO: 1851739 - RNA, 19 nt, Human
cuggcuccaaacccucgag

SEQ ID NO: 1851740 - RNA, 13 nt, Human
cuggcucaucucu

SEQ ID NO: 1851741 - RNA, 20 nt, Human
cuggcuccagcuggccggga

SEQ ID NO: 1851742 - RNA, 18 nt, Human
cuggcuccagcuggccgg

SEQ ID NO: 1851743 - RNA, 14 nt, Human
cuggcuccagcugg

SEQ ID NO: 1851744 - RNA, 13 nt, Human
cuggcuccagcug

SEQ ID NO: 1851745 - RNA, 15 nt, Human
cuggcucccacaggc

SEQ ID NO: 1851746 - RNA, 12 nt, Human
cugggacacagu

SEQ ID NO: 1851747 - RNA, 13 nt, Human
cugggacacaguu

SEQ ID NO: 1851748 - RNA, 17 nt, Human
cugggcagaaggaagac

SEQ ID NO: 1851749 - RNA, 17 nt, Human
cuggggaaccugacccc

SEQ ID NO: 1851750 - RNA, 16 nt, Human
cuggggaaccugaccc

SEQ ID NO: 1851751 - RNA, 15 nt, Human
cuggggaaccugacc

SEQ ID NO: 1851752 - RNA, 16 nt, Human
cugggcagaaggaaga

SEQ ID NO: 1851753 - RNA, 18 nt, Human
cugggcagaaggaagacu

SEQ ID NO: 1851754 - RNA, 16 nt, Human
cuggggccgaaagaac

SEQ ID NO: 1851755 - RNA, 18 nt, Human
cuggggccaggcuggguc

SEQ ID NO: 1851756 - RNA, 23 nt, Human
cuggugacuuuccucuuuggucu

SEQ ID NO: 1851757 - RNA, 17 nt, Human
cuggguguggcgcagca

SEQ ID NO: 1851758 - RNA, 16 nt, Human
cuggguguggcgcagc

SEQ ID NO: 1851759 - RNA, 22 nt, Human
cuggguggcaccagcagccugg

SEQ ID NO: 1851760 - RNA, 23 nt, Human
cuggguggcaccagcagccugga

SEQ ID NO: 1851761 - RNA, 21 nt, Human
cuggugacuuuccucuuuggu

SEQ ID NO: 1851762 - RNA, 20 nt, Human
cuggugacuuuccucuuugg

SEQ ID NO: 1851763 - RNA, 15 nt, Human
cuggugacuuuccuc

SEQ ID NO: 1851764 - RNA, 23 nt, Human
cuggguuccuuccucugagccuu

SEQ ID NO: 1851765 - RNA, 22 nt, Human
cuggguuccuuccucugagccu

SEQ ID NO: 1851766 - RNA, 18 nt, Human
cuggguuccuuccucuga

SEQ ID NO: 1851767 - RNA, 22 nt, Human
cuggguuccagcaauucuccug

SEQ ID NO: 1851768 - RNA, 14 nt, Human
cuggguucacugca

SEQ ID NO: 1851769 - RNA, 14 nt, Human
cugccuguucagcu

SEQ ID NO: 1851770 - RNA, 15 nt, Human
cugccuguucagcuc

SEQ ID NO: 1851771 - RNA, 23 nt, Human
cugccugggaucccucauccuca

SEQ ID NO: 1851772 - RNA, 15 nt, Human
cugccucgaacuggc

SEQ ID NO: 1851773 - RNA, 17 nt, Human
cugccucgaacuggcug

SEQ ID NO: 1851774 - RNA, 18 nt, Human
cugccucgaacuggcugc

SEQ ID NO: 1851775 - RNA, 19 nt, Human
cugccucgaacuggcugca

SEQ ID NO: 1851776 - RNA, 22 nt, Human
cugccugggaucccucauccuc

SEQ ID NO: 1851777 - RNA, 15 nt, Human
cugcuacagagcaga

SEQ ID NO: 1851778 - RNA, 19 nt, Human
cugccuguugggccaggag

SEQ ID NO: 1851779 - RNA, 18 nt, Human
cugccuguugggccagga

SEQ ID NO: 1851780 - RNA, 14 nt, Human
cugccuguugggcc

SEQ ID NO: 1851781 - RNA, 16 nt, Human
cugccuguugggccag

SEQ ID NO: 1851782 - RNA, 16 nt, Human
cugcuaauuccccaga

SEQ ID NO: 1851783 - RNA, 15 nt, Human
cugcugacagacaca

SEQ ID NO: 1851784 - RNA, 18 nt, Human
cugcugacagacacaggc

SEQ ID NO: 1851785 - RNA, 19 nt, Human
cugcugacagacacaggcc

SEQ ID NO: 1851786 - RNA, 20 nt, Human
cugcugacagacacaggccc

SEQ ID NO: 1851787 - RNA, 21 nt, Human
cugcugacagacacaggcccg

SEQ ID NO: 1851788 - RNA, 23 nt, Human
cugcugacagacacaggcccggc

SEQ ID NO: 1851789 - RNA, 11 nt, Human
cugcugacagu

SEQ ID NO: 1851790 - RNA, 13 nt, Human
cugcuuaacuuca

SEQ ID NO: 1851791 - RNA, 22 nt, Human
cugcuuuuuaaagaaugcucuu

SEQ ID NO: 1851792 - RNA, 17 nt, Human
cugcuuuuuauggccug

SEQ ID NO: 1851793 - RNA, 14 nt, Human
cugcuucagccucc

SEQ ID NO: 1851794 - RNA, 16 nt, Human
cugcuucagccucccg

SEQ ID NO: 1851795 - RNA, 15 nt, Human
cugcuuaacuucaca

SEQ ID NO: 1851796 - RNA, 17 nt, Human
cugcuuaacuucacaua

SEQ ID NO: 1851797 - RNA, 13 nt, Human
cugcuucagccuc

SEQ ID NO: 1851798 - RNA, 13 nt, Human
cuggacugugugc

SEQ ID NO: 1851799 - RNA, 17 nt, Human
cuggaacacuaaugagg

SEQ ID NO: 1851800 - RNA, 16 nt, Human
cuggaaauauuaagaa

SEQ ID NO: 1851801 - RNA, 18 nt, Human
cugcuuuuuauggccugu

SEQ ID NO: 1851802 - RNA, 20 nt, Human
cugagacucgcgacaaugca

SEQ ID NO: 1851803 - RNA, 19 nt, Human
cugagacucgcgacaaugc

SEQ ID NO: 1851804 - RNA, 17 nt, Human
cugagacucgcgacaau

SEQ ID NO: 1851805 - RNA, 20 nt, Human
cugcauuuaaaagauacagu

SEQ ID NO: 1851806 - RNA, 22 nt, Human
cugcauuuaaaagauacaguua

SEQ ID NO: 1851807 - RNA, 13 nt, Human
cugcauuugugaa

SEQ ID NO: 1851808 - RNA, 20 nt, Human
cugcauucaggaucaaaccc

SEQ ID NO: 1851809 - RNA, 13 nt, Human
cugcauguuacau

SEQ ID NO: 1851810 - RNA, 15 nt, Human
cugcauguuugugau

SEQ ID NO: 1851811 - RNA, 17 nt, Human
cugccaaugggagcuca

SEQ ID NO: 1851812 - RNA, 15 nt, Human
cugccaaugggagcu

SEQ ID NO: 1851813 - RNA, 22 nt, Human
cugcauuugugaaaugauggug

SEQ ID NO: 1851814 - RNA, 17 nt, Human
cugcauuugugaaauga

SEQ ID NO: 1851815 - RNA, 15 nt, Human
cugcauuugugaaau

SEQ ID NO: 1851816 - RNA, 14 nt, Human
cugcauuugugaaa

SEQ ID NO: 1851817 - RNA, 18 nt, Human
cugcccugugggccccca

SEQ ID NO: 1851818 - RNA, 16 nt, Human
cugcccugugggcccc

SEQ ID NO: 1851819 - RNA, 15 nt, Human
cugcccugugggccc

SEQ ID NO: 1851820 - RNA, 13 nt, Human
cugcccugugagu

SEQ ID NO: 1851821 - RNA, 12 nt, Human
cugcccugugag

SEQ ID NO: 1851822 - RNA, 23 nt, Human
cugcccugguuuccugcccuggg

SEQ ID NO: 1851823 - RNA, 22 nt, Human
cugcccugguuuccugcccugg

SEQ ID NO: 1851824 - RNA, 21 nt, Human
cugcccuggugcugccacacu

SEQ ID NO: 1851825 - RNA, 20 nt, Human
cugcccuggugcugccacac

SEQ ID NO: 1851826 - RNA, 22 nt, Human
cugccccucaacucuccuccag

SEQ ID NO: 1851827 - RNA, 14 nt, Human
cugccccucaacuc

SEQ ID NO: 1851828 - RNA, 19 nt, Human
cugcccccucugcccugcg

SEQ ID NO: 1851829 - RNA, 18 nt, Human
cugcccccucugcccugc

SEQ ID NO: 1851830 - RNA, 17 nt, Human
cugcccccucugcccug

SEQ ID NO: 1851831 - RNA, 16 nt, Human
cugcccccucugcccu

SEQ ID NO: 1851832 - RNA, 19 nt, Human
cugcccuggugcugccaca

SEQ ID NO: 1851833 - RNA, 18 nt, Human
cugcccuggugcugccac

SEQ ID NO: 1851834 - RNA, 16 nt, Human
cugcccuggugcugcc

SEQ ID NO: 1851835 - RNA, 17 nt, Human
cugcccuggugcugcca

SEQ ID NO: 1851836 - RNA, 19 nt, Human
cugccccagggcucccggc

SEQ ID NO: 1851837 - RNA, 15 nt, Human
cugcccccucugccc

SEQ ID NO: 1851838 - RNA, 14 nt, Human
cugcccccucugcc

SEQ ID NO: 1851839 - RNA, 12 nt, Human
cugccauccagg

SEQ ID NO: 1851840 - RNA, 15 nt, Human
cugccagggacagag

SEQ ID NO: 1851841 - RNA, 12 nt, Human
cugccagggaca

SEQ ID NO: 1851842 - RNA, 11 nt, Human
cugccagggac

SEQ ID NO: 1851843 - RNA, 20 nt, Human
cugccauauucuguuggcca

SEQ ID NO: 1851844 - RNA, 21 nt, Human
cugccauauucuguuggccag

SEQ ID NO: 1851845 - RNA, 22 nt, Human
cugccauauucuguuggccagu

SEQ ID NO: 1851846 - RNA, 23 nt, Human
cugccauauucuguuggccagug

SEQ ID NO: 1851847 - RNA, 14 nt, Human
gugaugagaggaaa

SEQ ID NO: 1851848 - RNA, 16 nt, Human
gugaugagaggaaauc

SEQ ID NO: 1851849 - RNA, 18 nt, Human
gugauggggcccugccuc

SEQ ID NO: 1851850 - RNA, 17 nt, Human
gugauggggcccugccu

SEQ ID NO: 1851851 - RNA, 16 nt, Human
gugauggggcccugcc

SEQ ID NO: 1851852 - RNA, 14 nt, Human
gugauggggcccug

SEQ ID NO: 1851853 - RNA, 22 nt, Human
gugaugcgcaugucacggaggg

SEQ ID NO: 1851854 - RNA, 13 nt, Human
aacuuccaauuua

SEQ ID NO: 1851855 - RNA, 22 nt, Human
aacuucuccccugguagaaaga

SEQ ID NO: 1851856 - RNA, 23 nt, Human
gugcauuaucuagauacuguauc

SEQ ID NO: 1851857 - RNA, 19 nt, Human
gugcauguguguucaugca

SEQ ID NO: 1851858 - RNA, 15 nt, Human
gugcauuaucuagau

SEQ ID NO: 1851859 - RNA, 19 nt, Human
gugcauuaucuagauacug

SEQ ID NO: 1851860 - RNA, 12 nt, Human
gugccucugccu

SEQ ID NO: 1851861 - RNA, 19 nt, Human
gugauggggcccugccucc

SEQ ID NO: 1851862 - RNA, 16 nt, Human
gugaugguuccccugu

SEQ ID NO: 1851863 - RNA, 14 nt, Human
gugaugguuccccu

SEQ ID NO: 1851864 - RNA, 22 nt, Human
gugaugguuccccuguucacuc

SEQ ID NO: 1851865 - RNA, 21 nt, Human
gugcacacaccagagcccacc

SEQ ID NO: 1851866 - RNA, 22 nt, Human
gugcaugcugucccuuacguga

SEQ ID NO: 1851867 - RNA, 21 nt, Human
aacucuucaaucucuugcacu

SEQ ID NO: 1851868 - RNA, 20 nt, Human
aacucugacaacagacuucu

SEQ ID NO: 1851869 - RNA, 23 nt, Human
aacucugacaacagacuucugaa

SEQ ID NO: 1851870 - RNA, 22 nt, Human
aacucugacaacagacuucuga

SEQ ID NO: 1851871 - RNA, 22 nt, Human
gugagucgaggacagggaggug

SEQ ID NO: 1851872 - RNA, 22 nt, Human
gugaggccagagacacaagccu

SEQ ID NO: 1851873 - RNA, 17 nt, Human
gugaggccagagacaca

SEQ ID NO: 1851874 - RNA, 21 nt, Human
gugagaugcuagaacucccuu

SEQ ID NO: 1851875 - RNA, 19 nt, Human
gugaacuugggccacugug

SEQ ID NO: 1851876 - RNA, 17 nt, Human
gugaacuugggccacug

SEQ ID NO: 1851877 - RNA, 15 nt, Human
aacugcugacuguuu

SEQ ID NO: 1851878 - RNA, 21 nt, Human
aacugcugacuguuuucucuu

SEQ ID NO: 1851879 - RNA, 20 nt, Human
aacugcugacuguuuucucu

SEQ ID NO: 1851880 - RNA, 23 nt, Human
aacugcugacuguuuucucuuga

SEQ ID NO: 1851881 - RNA, 16 nt, Human
aacuggauuaaacuua

SEQ ID NO: 1851882 - RNA, 11 nt, Human
aacuggcugca

SEQ ID NO: 1851883 - RNA, 15 nt, Human
aacuggauuaaacuu

SEQ ID NO: 1851884 - RNA, 21 nt, Human
aacugggggagggugaaguga

SEQ ID NO: 1851885 - RNA, 22 nt, Human
aacugggggagggugaagugaa

SEQ ID NO: 1851886 - RNA, 16 nt, Human
aacuggguacuugugg

SEQ ID NO: 1851887 - RNA, 21 nt, Human
aacuggguacuuguggacaca

SEQ ID NO: 1851888 - RNA, 10 nt, Human
aacccagcuc

SEQ ID NO: 1851889 - RNA, 14 nt, Human
aacccagauaaagg

SEQ ID NO: 1851890 - RNA, 16 nt, Human
aacccgggaggcagag

SEQ ID NO: 1851891 - RNA, 18 nt, Human
aaccugagccccaaaagg

SEQ ID NO: 1851892 - RNA, 11 nt, Human
aaccugacccc

SEQ ID NO: 1851893 - RNA, 21 nt, Human
aaccucgagguuucucaaaga

SEQ ID NO: 1851894 - RNA, 22 nt, Human
aaccucgagguuucucaaagaa

SEQ ID NO: 1851895 - RNA, 23 nt, Human
aacccaaauguucaucaaugaau

SEQ ID NO: 1851896 - RNA, 23 nt, Human
aaccauuuugcugucccuuuucc

SEQ ID NO: 1851897 - RNA, 13 nt, Human
aacccaauaguug

SEQ ID NO: 1851898 - RNA, 18 nt, Human
aaccaucauugaaaucuu

SEQ ID NO: 1851899 - RNA, 17 nt, Human
aaccaucauugaaaucu

SEQ ID NO: 1851900 - RNA, 12 nt, Human
aaccaucauuga

SEQ ID NO: 1851901 - RNA, 21 nt, Human
aaccaccacacccagcccacu

SEQ ID NO: 1851902 - RNA, 18 nt, Human
aaccaagccguggcuucc

SEQ ID NO: 1851903 - RNA, 16 nt, Human
aaccaagccguggcuu

SEQ ID NO: 1851904 - RNA, 19 nt, Human
gucucgaacuccugaccuu

SEQ ID NO: 1851905 - RNA, 18 nt, Human
gucucgaacuccugaccu

SEQ ID NO: 1851906 - RNA, 13 nt, Human
gucucgaacuccu

SEQ ID NO: 1851907 - RNA, 20 nt, Human
aaccacauuggagauguuua

SEQ ID NO: 1851908 - RNA, 19 nt, Human
aaccaccacacccagccca

SEQ ID NO: 1851909 - RNA, 15 nt, Human
aaccaagucaaguga

SEQ ID NO: 1851910 - RNA, 20 nt, Human
aaccugagccccaaaaggua

SEQ ID NO: 1851911 - RNA, 14 nt, Human
gucuggcccuuccu

SEQ ID NO: 1851912 - RNA, 16 nt, Human
gucuuuggugaacauu

SEQ ID NO: 1851913 - RNA, 16 nt, Human
gucuuucacauuuaaa

SEQ ID NO: 1851914 - RNA, 17 nt, Human
gucuuuaaaugcugcuu

SEQ ID NO: 1851915 - RNA, 15 nt, Human
gucuuuaaaugcugc

SEQ ID NO: 1851916 - RNA, 18 nt, Human
aacucuccuccagaguca

SEQ ID NO: 1851917 - RNA, 15 nt, Human
aacucuccuccagag

SEQ ID NO: 1851918 - RNA, 16 nt, Human
aacucuccucugcugc

SEQ ID NO: 1851919 - RNA, 17 nt, Human
aacucuccucugcugcu

SEQ ID NO: 1851920 - RNA, 22 nt, Human
gugaaccaccacacccagccca

SEQ ID NO: 1851921 - RNA, 23 nt, Human
gugaaccaccacacccagcccac

SEQ ID NO: 1851922 - RNA, 12 nt, Human
aacuccuggccu

SEQ ID NO: 1851923 - RNA, 22 nt, Human
aacucaucuagguaaauuacag

SEQ ID NO: 1851924 - RNA, 21 nt, Human
aacuaugauuuggaaaauaaa

SEQ ID NO: 1851925 - RNA, 16 nt, Human
aacuaugauuuggaaa

SEQ ID NO: 1851926 - RNA, 20 nt, Human
aacuagacucccaagcugga

SEQ ID NO: 1851927 - RNA, 23 nt, Human
aacuagacucccaagcuggacua

SEQ ID NO: 1851928 - RNA, 18 nt, Human
aaccuugaaaacuuuaug

SEQ ID NO: 1851929 - RNA, 12 nt, Human
aaccugugucuc

SEQ ID NO: 1851930 - RNA, 12 nt, Human
aaaugugugugu

SEQ ID NO: 1851931 - RNA, 14 nt, Human
aaauuaagaaagga

SEQ ID NO: 1851932 - RNA, 19 nt, Human
aaaugucuaguuguaacac

SEQ ID NO: 1851933 - RNA, 24 nt, Human
aaaugucuaguuguaacaccauga

SEQ ID NO: 1851934 - RNA, 17 nt, Human
gucaacacuaacaugau

SEQ ID NO: 1851935 - RNA, 21 nt, Human
gucaacaaguaugaauaaaga

SEQ ID NO: 1851936 - RNA, 14 nt, Human
gucaaacgugaaaa

SEQ ID NO: 1851937 - RNA, 17 nt, Human
gucaaacgugaaaaugc

SEQ ID NO: 1851938 - RNA, 15 nt, Human
gucaaacgugaaaau

SEQ ID NO: 1851939 - RNA, 22 nt, Human
guauuuuguuuuugucuuaaaa

SEQ ID NO: 1851940 - RNA, 20 nt, Human
aaauuguaagcaugcacaaa

SEQ ID NO: 1851941 - RNA, 18 nt, Human
aaauucugucucuggauu

SEQ ID NO: 1851942 - RNA, 19 nt, Human
aaauuguaagcaugcacaa

SEQ ID NO: 1851943 - RNA, 16 nt, Human
aaauucugucucugga

SEQ ID NO: 1851944 - RNA, 19 nt, Human
guauaaaagggacugagaa

SEQ ID NO: 1851945 - RNA, 14 nt, Human
aaauguaagaucgu

SEQ ID NO: 1851946 - RNA, 22 nt, Human
aaauguaagaucguucucugcc

SEQ ID NO: 1851947 - RNA, 22 nt, Human
guaacaggaaaauuuuaaaaau

SEQ ID NO: 1851948 - RNA, 12 nt, Human
guaacaggcaga

SEQ ID NO: 1851949 - RNA, 19 nt, Human
guaucccaugagccucagc

SEQ ID NO: 1851950 - RNA, 22 nt, Human
guaucaggugcugccauccagg

SEQ ID NO: 1851951 - RNA, 15 nt, Human
guaugcgugugugug

SEQ ID NO: 1851952 - RNA, 21 nt, Human
guaucccaugagccucagcau

SEQ ID NO: 1851953 - RNA, 15 nt, Human
guaugguggcugggu

SEQ ID NO: 1851954 - RNA, 16 nt, Human
guaugguggcuggguu

SEQ ID NO: 1851955 - RNA, 14 nt, Human
guaugguggcuggg

SEQ ID NO: 1851956 - RNA, 15 nt, Human
guauaaguggugugu

SEQ ID NO: 1851957 - RNA, 16 nt, Human
guauauuuuauaucaa

SEQ ID NO: 1851958 - RNA, 22 nt, Human
guauauuuguauuuaaaugaaa

SEQ ID NO: 1851959 - RNA, 16 nt, Human
guaucaggugcugcca

SEQ ID NO: 1851960 - RNA, 18 nt, Human
guaucaggugcugccauc

SEQ ID NO: 1851961 - RNA, 18 nt, Human
gucccccuuccauggacu

SEQ ID NO: 1851962 - RNA, 16 nt, Human
gucccccuuccaugga

SEQ ID NO: 1851963 - RNA, 14 nt, Human
gucccccuuccaug

SEQ ID NO: 1851964 - RNA, 12 nt, Human
aacagaaaugua

SEQ ID NO: 1851965 - RNA, 13 nt, Human
aacagaaauguac

SEQ ID NO: 1851966 - RNA, 14 nt, Human
aacagaaauguaca

SEQ ID NO: 1851967 - RNA, 15 nt, Human
aacagaaauguacag

SEQ ID NO: 1851968 - RNA, 16 nt, Human
guccuacccacccucc

SEQ ID NO: 1851969 - RNA, 15 nt, Human
guccuacccacccuc

SEQ ID NO: 1851970 - RNA, 12 nt, Human
guccuacucugu

SEQ ID NO: 1851971 - RNA, 15 nt, Human
aacagugauuaccag

SEQ ID NO: 1851972 - RNA, 22 nt, Human
aacagugauuaccagggacuga

SEQ ID NO: 1851973 - RNA, 16 nt, Human
aacagauaaauaguuu

SEQ ID NO: 1851974 - RNA, 19 nt, Human
gucauuuuuuuuaagaaaa

SEQ ID NO: 1851975 - RNA, 21 nt, Human
gucauuuuuuuuaagaaaaag

SEQ ID NO: 1851976 - RNA, 18 nt, Human
guccaagaagcccaggaa

SEQ ID NO: 1851977 - RNA, 17 nt, Human
guccaagaagcccagga

SEQ ID NO: 1851978 - RNA, 20 nt, Human
guccaagaagcccaggaaag

SEQ ID NO: 1851979 - RNA, 16 nt, Human
guccaagaagcccagg

SEQ ID NO: 1851980 - RNA, 15 nt, Human
guccaagaagcccag

SEQ ID NO: 1851981 - RNA, 13 nt, Human
guccaagaagccc

SEQ ID NO: 1851982 - RNA, 21 nt, Human
gucccaccccacacacgccag

SEQ ID NO: 1851983 - RNA, 14 nt, Human
guccauagagagca

SEQ ID NO: 1851984 - RNA, 13 nt, Human
guccauagagagc

SEQ ID NO: 1851985 - RNA, 14 nt, Human
gucccaccuuggcu

SEQ ID NO: 1851986 - RNA, 15 nt, Human
gucccaccuuggcug

SEQ ID NO: 1851987 - RNA, 16 nt, Human
gucccaccuuggcugc

SEQ ID NO: 1851988 - RNA, 13 nt, Human
gucauaacuagaa

SEQ ID NO: 1851989 - RNA, 15 nt, Human
gucagugugacugau

SEQ ID NO: 1851990 - RNA, 18 nt, Human
aaauuuguuauaaugaau

SEQ ID NO: 1851991 - RNA, 13 nt, Human
gucagaauagaaa

SEQ ID NO: 1851992 - RNA, 17 nt, Human
gucagaauagaaauuag

SEQ ID NO: 1851993 - RNA, 21 nt, Human
gucacacaguauuacuucugc

SEQ ID NO: 1851994 - RNA, 22 nt, Human
gucacacaguauuacuucugcu

SEQ ID NO: 1851995 - RNA, 21 nt, Human
aacaaggcaaggcugucaauu

SEQ ID NO: 1851996 - RNA, 18 nt, Human
aacaaggcaaggcuguca

SEQ ID NO: 1851997 - RNA, 12 nt, Human
aacaauaaaaga

SEQ ID NO: 1851998 - RNA, 18 nt, Human
aaauuuugauguuuuaag

SEQ ID NO: 1851999 - RNA, 23 nt, Human
aaauuuugauguuuuaaggaugc

SEQ ID NO: 1852000 - RNA, 16 nt, Human
aacaaggcaaggcugu

SEQ ID NO: 1852001 - RNA, 15 nt, Human
aacaaggcaaggcug

SEQ ID NO: 1852002 - RNA, 15 nt, Human
aaggaaagagggagg

SEQ ID NO: 1852003 - RNA, 20 nt, Human
aagcuccaucuccacuccag

SEQ ID NO: 1852004 - RNA, 14 nt, Human
aagcuccaucucca

SEQ ID NO: 1852005 - RNA, 17 nt, Human
aaggaauaccugucccc

SEQ ID NO: 1852006 - RNA, 21 nt, Human
aaggaauaaauugcuccuuga

SEQ ID NO: 1852007 - RNA, 16 nt, Human
aaggaagcacaugccu

SEQ ID NO: 1852008 - RNA, 13 nt, Human
aaggaagcacaug

SEQ ID NO: 1852009 - RNA, 15 nt, Human
aaggaagacuucauc

SEQ ID NO: 1852010 - RNA, 14 nt, Human
aaggaagacuucau

SEQ ID NO: 1852011 - RNA, 18 nt, Human
aaggaggaagagaaaaaa

SEQ ID NO: 1852012 - RNA, 20 nt, Human
aaggaggggauagagagaga

SEQ ID NO: 1852013 - RNA, 17 nt, Human
aaggagauuuacaacug

SEQ ID NO: 1852014 - RNA, 14 nt, Human
aaggagauuuacaa

SEQ ID NO: 1852015 - RNA, 11 nt, Human
aaggagagcua

SEQ ID NO: 1852016 - RNA, 18 nt, Human
aaggaauaccuguccccc

SEQ ID NO: 1852017 - RNA, 13 nt, Human
aaggauacaaaag

SEQ ID NO: 1852018 - RNA, 21 nt, Human
aaggauacaaaagcaugugag

SEQ ID NO: 1852019 - RNA, 16 nt, Human
aaggccaaaggaagca

SEQ ID NO: 1852020 - RNA, 23 nt, Human
guugcccaggcaggucuugaacu

SEQ ID NO: 1852021 - RNA, 12 nt, Human
guugcccaggcu

SEQ ID NO: 1852022 - RNA, 13 nt, Human
guugcccaggcug

SEQ ID NO: 1852023 - RNA, 17 nt, Human
guuucaaacuuuacuau

SEQ ID NO: 1852024 - RNA, 15 nt, Human
aaggcuccaggagca

SEQ ID NO: 1852025 - RNA, 18 nt, Human
aaggcuccaggagcagcc

SEQ ID NO: 1852026 - RNA, 16 nt, Human
aaggcuccaggagcag

SEQ ID NO: 1852027 - RNA, 14 nt, Human
guuucaaacuuuac

SEQ ID NO: 1852028 - RNA, 16 nt, Human
guuucaaacuuuacua

SEQ ID NO: 1852029 - RNA, 13 nt, Human
guuucaaacuuua

SEQ ID NO: 1852030 - RNA, 18 nt, Human
aaggcucgagcaugccug

SEQ ID NO: 1852031 - RNA, 16 nt, Human
aaggcucgagcaugcc

SEQ ID NO: 1852032 - RNA, 22 nt, Human
aaggcuccaggagcagccacau

SEQ ID NO: 1852033 - RNA, 19 nt, Human
aaggcuccaggagcagcca

SEQ ID NO: 1852034 - RNA, 20 nt, Human
aaggcucgagcaugccugga

SEQ ID NO: 1852035 - RNA, 19 nt, Human
aaggcucgagcaugccugg

SEQ ID NO: 1852036 - RNA, 22 nt, Human
aaggcucgagcaugccuggaug

SEQ ID NO: 1852037 - RNA, 13 nt, Human
guuuauugucaaa

SEQ ID NO: 1852038 - RNA, 17 nt, Human
guugggccaggagccuc

SEQ ID NO: 1852039 - RNA, 15 nt, Human
guugggccaggagcc

SEQ ID NO: 1852040 - RNA, 13 nt, Human
guugggcuggugu

SEQ ID NO: 1852041 - RNA, 15 nt, Human
guugggcugguguca

SEQ ID NO: 1852042 - RNA, 16 nt, Human
aaguaaggaauuuuau

SEQ ID NO: 1852043 - RNA, 13 nt, Human
aaguaagcaaaga

SEQ ID NO: 1852044 - RNA, 12 nt, Human
aaggucauuuuu

SEQ ID NO: 1852045 - RNA, 18 nt, Human
guuucugaaagggacgcu

SEQ ID NO: 1852046 - RNA, 17 nt, Human
guuucucaaagaaauuu

SEQ ID NO: 1852047 - RNA, 18 nt, Human
guuucucaaagaaauuuc

SEQ ID NO: 1852048 - RNA, 14 nt, Human
guuucucaaagaaa

SEQ ID NO: 1852049 - RNA, 19 nt, Human
guuucuauguguagggcgg

SEQ ID NO: 1852050 - RNA, 20 nt, Human
aagguagaaauaucugaaaa

SEQ ID NO: 1852051 - RNA, 23 nt, Human
aaggcucugagcaaauguggcuc

SEQ ID NO: 1852052 - RNA, 22 nt, Human
aaggggcccaaauucuuucagu

SEQ ID NO: 1852053 - RNA, 13 nt, Human
aaguacacuguuu

SEQ ID NO: 1852054 - RNA, 18 nt, Human
aaguacacuguuucaaac

SEQ ID NO: 1852055 - RNA, 21 nt, Human
aaguaauccaccugccucggc

SEQ ID NO: 1852056 - RNA, 15 nt, Human
guuucugccgcagcc

SEQ ID NO: 1852057 - RNA, 18 nt, Human
guuucugccgcagcccug

SEQ ID NO: 1852058 - RNA, 14 nt, Human
guuucugccgcagc

SEQ ID NO: 1852059 - RNA, 16 nt, Human
guuuugccauguuggc

SEQ ID NO: 1852060 - RNA, 20 nt, Human
guuuugccauguuggccagg

SEQ ID NO: 1852061 - RNA, 21 nt, Human
guuuugccauguuggccaggc

SEQ ID NO: 1852062 - RNA, 22 nt, Human
guuuugccauguuggccaggcu

SEQ ID NO: 1852063 - RNA, 23 nt, Human
aaguacacuguuucaaacuuuac

SEQ ID NO: 1852064 - RNA, 19 nt, Human
aaguacacuguuucaaacu

SEQ ID NO: 1852065 - RNA, 20 nt, Human
aaguacacuguuucaaacuu

SEQ ID NO: 1852066 - RNA, 21 nt, Human
aagugaaaaaggaggaagaga

SEQ ID NO: 1852067 - RNA, 17 nt, Human
aagugaagacaaugacu

SEQ ID NO: 1852068 - RNA, 19 nt, Human
aagugaagacaaugacuua

SEQ ID NO: 1852069 - RNA, 18 nt, Human
aagugagacuuugagggu

SEQ ID NO: 1852070 - RNA, 19 nt, Human
guuuuuccuguucuuaaga

SEQ ID NO: 1852071 - RNA, 14 nt, Human
guuuuucaguuuuc

SEQ ID NO: 1852072 - RNA, 15 nt, Human
guuuuucauaaagca

SEQ ID NO: 1852073 - RNA, 15 nt, Human
aagugagagcugggu

SEQ ID NO: 1852074 - RNA, 12 nt, Human
aagugagagagg

SEQ ID NO: 1852075 - RNA, 14 nt, Human
aagugagagcuggg

SEQ ID NO: 1852076 - RNA, 21 nt, Human
aagucaugcguuuaaucacau

SEQ ID NO: 1852077 - RNA, 16 nt, Human
aagucuuucacauuua

SEQ ID NO: 1852078 - RNA, 19 nt, Human
uaaaaaucucaaauuucua

SEQ ID NO: 1852079 - RNA, 20 nt, Human
uaaaaaucucaaauuucuaa

SEQ ID NO: 1852080 - RNA, 21 nt, Human
uaaaaaucucaaauuucuaaa

SEQ ID NO: 1852081 - RNA, 22 nt, Human
uaaaacuugauguguuaucucu

SEQ ID NO: 1852082 - RNA, 20 nt, Human
uaaaacuugauguguuaucu

SEQ ID NO: 1852083 - RNA, 15 nt, Human
guuuuucuucucccu

SEQ ID NO: 1852084 - RNA, 15 nt, Human
uaaaaaguggaaaaa

SEQ ID NO: 1852085 - RNA, 19 nt, Human
uaaaaauaaaaaacacugg

SEQ ID NO: 1852086 - RNA, 18 nt, Human
uaaaaauaaaaaacacug

SEQ ID NO: 1852087 - RNA, 21 nt, Human
uaaaaauaaaaaacacuggga

SEQ ID NO: 1852088 - RNA, 16 nt, Human
uaaaaaucucaaauuu

SEQ ID NO: 1852089 - RNA, 17 nt, Human
uaaaaaucucaaauuuc

SEQ ID NO: 1852090 - RNA, 15 nt, Human
uaaaaaucucaaauu

SEQ ID NO: 1852091 - RNA, 16 nt, Human
aagugaggaugaaaaa

SEQ ID NO: 1852092 - RNA, 20 nt, Human
aagugauucucaugccucag

SEQ ID NO: 1852093 - RNA, 22 nt, Human
uaaaauauuccugcauuuguga

SEQ ID NO: 1852094 - RNA, 13 nt, Human
uaaaauauuccug

SEQ ID NO: 1852095 - RNA, 21 nt, Human
aagugauucucaugccucagc

SEQ ID NO: 1852096 - RNA, 20 nt, Human
aagugauucuccugccucag

SEQ ID NO: 1852097 - RNA, 19 nt, Human
aagugauucuccugccuca

SEQ ID NO: 1852098 - RNA, 15 nt, Human
aagugauucuccugc

SEQ ID NO: 1852099 - RNA, 16 nt, Human
aagugauucuccugcc

SEQ ID NO: 1852100 - RNA, 17 nt, Human
aagugauucuccugccu

SEQ ID NO: 1852101 - RNA, 18 nt, Human
aagugauucuccugccuc

SEQ ID NO: 1852102 - RNA, 22 nt, Human
uaaaauaccagccaguaaaugg

SEQ ID NO: 1852103 - RNA, 13 nt, Human
uaaaagacuuuuu

SEQ ID NO: 1852104 - RNA, 20 nt, Human
uaaaagacagugaaagaaaa

SEQ ID NO: 1852105 - RNA, 20 nt, Human
aagccgcuggggccaguugg

SEQ ID NO: 1852106 - RNA, 23 nt, Human
aagcccuuccaugucgccucugc

SEQ ID NO: 1852107 - RNA, 20 nt, Human
aagcccuuccaugucgccuc

SEQ ID NO: 1852108 - RNA, 15 nt, Human
aagcccuuccauguc

SEQ ID NO: 1852109 - RNA, 21 nt, Human
aagcccugugcuccauggcug

SEQ ID NO: 1852110 - RNA, 19 nt, Human
aagcccugagcuuucugcu

SEQ ID NO: 1852111 - RNA, 22 nt, Human
aagcccaggaaaggcuccagga

SEQ ID NO: 1852112 - RNA, 19 nt, Human
aagcccaggaaaggcucca

SEQ ID NO: 1852113 - RNA, 17 nt, Human
aagcccaggaaaggcuc

SEQ ID NO: 1852114 - RNA, 14 nt, Human
aagcccaggaaagg

SEQ ID NO: 1852115 - RNA, 22 nt, Human
aagccaaagcuaggccuggcca

SEQ ID NO: 1852116 - RNA, 16 nt, Human
aagcauuuacuuugug

SEQ ID NO: 1852117 - RNA, 20 nt, Human
aagcagugcaugcugucccu

SEQ ID NO: 1852118 - RNA, 15 nt, Human
aagcagugcaugcug

SEQ ID NO: 1852119 - RNA, 14 nt, Human
aagcagugcaugcu

SEQ ID NO: 1852120 - RNA, 12 nt, Human
aagcagugcaug

SEQ ID NO: 1852121 - RNA, 21 nt, Human
gugugugcgccuacaggagug

SEQ ID NO: 1852122 - RNA, 18 nt, Human
aagcuccaagcucccagg

SEQ ID NO: 1852123 - RNA, 17 nt, Human
aagcuccaagcucccag

SEQ ID NO: 1852124 - RNA, 19 nt, Human
aagcucagggccuggcuca

SEQ ID NO: 1852125 - RNA, 18 nt, Human
aagcucagggccuggcuc

SEQ ID NO: 1852126 - RNA, 20 nt, Human
aagcucagggccuggcucag

SEQ ID NO: 1852127 - RNA, 17 nt, Human
aagcucagggccuggcu

SEQ ID NO: 1852128 - RNA, 16 nt, Human
aagcucagggccuggc

SEQ ID NO: 1852129 - RNA, 13 nt, Human
aagcucagggccu

SEQ ID NO: 1852130 - RNA, 12 nt, Human
aagcucagggcc

SEQ ID NO: 1852131 - RNA, 15 nt, Human
guucagcuccagcuc

SEQ ID NO: 1852132 - RNA, 13 nt, Human
guucagcuccagc

SEQ ID NO: 1852133 - RNA, 13 nt, Human
guucagccugccu

SEQ ID NO: 1852134 - RNA, 20 nt, Human
aagccugaguuugcuuucaa

SEQ ID NO: 1852135 - RNA, 12 nt, Human
aagcuaggccug

SEQ ID NO: 1852136 - RNA, 16 nt, Human
aagcuaggccuggcca

SEQ ID NO: 1852137 - RNA, 12 nt, Human
guuaagagaaau

SEQ ID NO: 1852138 - RNA, 11 nt, Human
guuaagagaaa

SEQ ID NO: 1852139 - RNA, 18 nt, Human
guuaagagaaaugagcuu

SEQ ID NO: 1852140 - RNA, 20 nt, Human
guuaggcauugugggaaggg

SEQ ID NO: 1852141 - RNA, 19 nt, Human
guuaggcauugugggaagg

SEQ ID NO: 1852142 - RNA, 18 nt, Human
guucaagcgauucuucug

SEQ ID NO: 1852143 - RNA, 21 nt, Human
guucaaagauauuuugcuuug

SEQ ID NO: 1852144 - RNA, 22 nt, Human
guucaaagauauuuugcuuugu

SEQ ID NO: 1852145 - RNA, 20 nt, Human
guucaaagauauuuugcuuu

SEQ ID NO: 1852146 - RNA, 23 nt, Human
guuauuuuuauuuauuuaaauuu

SEQ ID NO: 1852147 - RNA, 23 nt, Human
aagagggagggagggcuccagac

SEQ ID NO: 1852148 - RNA, 12 nt, Human
aagaguaggaag

SEQ ID NO: 1852149 - RNA, 22 nt, Human
aagagggucugaggaauccaga

SEQ ID NO: 1852150 - RNA, 22 nt, Human
guggggucacucuggcagcuca

SEQ ID NO: 1852151 - RNA, 21 nt, Human
guggggucacucuggcagcuc

SEQ ID NO: 1852152 - RNA, 20 nt, Human
guggggucacucuggcagcu

SEQ ID NO: 1852153 - RNA, 17 nt, Human
guggggucacucuggca

SEQ ID NO: 1852154 - RNA, 16 nt, Human
aagaugcuucucacug

SEQ ID NO: 1852155 - RNA, 17 nt, Human
aagaugcuucucacugc

SEQ ID NO: 1852156 - RNA, 18 nt, Human
aagauggcugugccucug

SEQ ID NO: 1852157 - RNA, 19 nt, Human
aagaugcuucucacugcca

SEQ ID NO: 1852158 - RNA, 23 nt, Human
aagauggcugugccucugccugu

SEQ ID NO: 1852159 - RNA, 21 nt, Human
aagauggcugugccucugccu

SEQ ID NO: 1852160 - RNA, 20 nt, Human
aagauggcugugccucugcc

SEQ ID NO: 1852161 - RNA, 14 nt, Human
aagaguaggaagac

SEQ ID NO: 1852162 - RNA, 13 nt, Human
aagaguaggaaga

SEQ ID NO: 1852163 - RNA, 16 nt, Human
aagaucguucucugcc

SEQ ID NO: 1852164 - RNA, 17 nt, Human
aagaucguucucugccu

SEQ ID NO: 1852165 - RNA, 16 nt, Human
gugucagcauagaagu

SEQ ID NO: 1852166 - RNA, 17 nt, Human
guguauuuuuuuacuaa

SEQ ID NO: 1852167 - RNA, 23 nt, Human
guguauuuuuuuacuaauagaca

SEQ ID NO: 1852168 - RNA, 20 nt, Human
gugucaagagggucugagga

SEQ ID NO: 1852169 - RNA, 13 nt, Human
aagauguagagga

SEQ ID NO: 1852170 - RNA, 20 nt, Human
gugugugaaaaugugugugu

SEQ ID NO: 1852171 - RNA, 16 nt, Human
gugugguagagugugc

SEQ ID NO: 1852172 - RNA, 22 nt, Human
gugugacaaggauugcuacugu

SEQ ID NO: 1852173 - RNA, 21 nt, Human
gugugaccacugcagaagaca

SEQ ID NO: 1852174 - RNA, 22 nt, Human
guggcgcagcauauucaggaag

SEQ ID NO: 1852175 - RNA, 13 nt, Human
gugggacacccug

SEQ ID NO: 1852176 - RNA, 15 nt, Human
gugggacacccugug

SEQ ID NO: 1852177 - RNA, 14 nt, Human
gugggagcugccug

SEQ ID NO: 1852178 - RNA, 15 nt, Human
guggggucacucugg

SEQ ID NO: 1852179 - RNA, 15 nt, Human
gugggagcugccugu

SEQ ID NO: 1852180 - RNA, 18 nt, Human
gugggagcugccuguuca

SEQ ID NO: 1852181 - RNA, 23 nt, Human
gugggaggaucucuugagccugg

SEQ ID NO: 1852182 - RNA, 17 nt, Human
gugggaagggcuacacc

SEQ ID NO: 1852183 - RNA, 23 nt, Human
aagaggaaugaaguacucauaca

SEQ ID NO: 1852184 - RNA, 22 nt, Human
guggccucccaacucaccccag

SEQ ID NO: 1852185 - RNA, 21 nt, Human
guggccucccaacucacccca

SEQ ID NO: 1852186 - RNA, 16 nt, Human
aagacuuuggaaagac

SEQ ID NO: 1852187 - RNA, 16 nt, Human
aagacuuccagagccu

SEQ ID NO: 1852188 - RNA, 18 nt, Human
aagacuuccagagccuca

SEQ ID NO: 1852189 - RNA, 23 nt, Human
aagacugaguacguugugcauuu

SEQ ID NO: 1852190 - RNA, 23 nt, Human
aagacgugauuuugcuguagaag

SEQ ID NO: 1852191 - RNA, 16 nt, Human
aagacgugauuuugcu

SEQ ID NO: 1852192 - RNA, 22 nt, Human
aagacgugauuuugcuguagaa

SEQ ID NO: 1852193 - RNA, 20 nt, Human
aagacgcugugcugcccugc

SEQ ID NO: 1852194 - RNA, 19 nt, Human
aagacgcugugcugcccug

SEQ ID NO: 1852195 - RNA, 18 nt, Human
aagacgcugugcugcccu

SEQ ID NO: 1852196 - RNA, 17 nt, Human
aagacgcugugcugccc

SEQ ID NO: 1852197 - RNA, 15 nt, Human
aagacgcugugcugc

SEQ ID NO: 1852198 - RNA, 13 nt, Human
aagacgcugugcu

SEQ ID NO: 1852199 - RNA, 19 nt, Human
aagaccuucuccuucaccu

SEQ ID NO: 1852200 - RNA, 18 nt, Human
aagaccuucuccuucacc

SEQ ID NO: 1852201 - RNA, 15 nt, Human
aagaccuucuccuuc

SEQ ID NO: 1852202 - RNA, 19 nt, Human
uaacaugaauauuuagugu

SEQ ID NO: 1852203 - RNA, 19 nt, Human
uaacauguaauuaaguacu

SEQ ID NO: 1852204 - RNA, 14 nt, Human
uaacaugaauauuu

SEQ ID NO: 1852205 - RNA, 21 nt, Human
uaacaugaauauuuaguguuc

SEQ ID NO: 1852206 - RNA, 20 nt, Human
uaacaugaauauuuaguguu

SEQ ID NO: 1852207 - RNA, 21 nt, Human
aauauauuuuaagacgaaaca

SEQ ID NO: 1852208 - RNA, 21 nt, Human
aauauauucagccuggcuuca

SEQ ID NO: 1852209 - RNA, 21 nt, Human
aauaguucagguaacaggcag

SEQ ID NO: 1852210 - RNA, 13 nt, Human
uaagaagugaaaa

SEQ ID NO: 1852211 - RNA, 20 nt, Human
uaacuugucuuuggacccug

SEQ ID NO: 1852212 - RNA, 16 nt, Human
uaacuugucuuuggac

SEQ ID NO: 1852213 - RNA, 13 nt, Human
uaacuucacauau

SEQ ID NO: 1852214 - RNA, 17 nt, Human
uaacguauaaaagccug

SEQ ID NO: 1852215 - RNA, 13 nt, Human
uaacguauaaaag

SEQ ID NO: 1852216 - RNA, 19 nt, Human
uaaauuaacuuuuauaaac

SEQ ID NO: 1852217 - RNA, 20 nt, Human
uaaauuaacuuuuauaaacu

SEQ ID NO: 1852218 - RNA, 13 nt, Human
uaaaugugguaaa

SEQ ID NO: 1852219 - RNA, 18 nt, Human
aaguguauuuuuuuacua

SEQ ID NO: 1852220 - RNA, 21 nt, Human
aaguguauuuuuuuacuaaua

SEQ ID NO: 1852221 - RNA, 18 nt, Human
uaaaugaaaaucgugaca

SEQ ID NO: 1852222 - RNA, 21 nt, Human
uaaauuaacuuuuauaaacuu

SEQ ID NO: 1852223 - RNA, 13 nt, Human
aauacagaggcaa

SEQ ID NO: 1852224 - RNA, 12 nt, Human
aauaccaaggaa

SEQ ID NO: 1852225 - RNA, 19 nt, Human
aauaccagccaguaaaugg

SEQ ID NO: 1852226 - RNA, 17 nt, Human
aauaccagccaguaaau

SEQ ID NO: 1852227 - RNA, 21 nt, Human
aauaccugucccccugacaac

SEQ ID NO: 1852228 - RNA, 19 nt, Human
aauaccugucccccugaca

SEQ ID NO: 1852229 - RNA, 18 nt, Human
aauaccugucccccugac

SEQ ID NO: 1852230 - RNA, 15 nt, Human
aauaccugucccccu

SEQ ID NO: 1852231 - RNA, 18 nt, Human
aauagcgucauaacuaga

SEQ ID NO: 1852232 - RNA, 21 nt, Human
uaagcuauucaguaauaacuc

SEQ ID NO: 1852233 - RNA, 15 nt, Human
uaagcaaaaugugau

SEQ ID NO: 1852234 - RNA, 21 nt, Human
uaagcaaaaugugauauguac

SEQ ID NO: 1852235 - RNA, 14 nt, Human
uaagcaaaauguga

SEQ ID NO: 1852236 - RNA, 14 nt, Human
uaagauucauauuu

SEQ ID NO: 1852237 - RNA, 9 nt, Human
uaaggaaua

SEQ ID NO: 1852238 - RNA, 13 nt, Human
uaaggaagacaau

SEQ ID NO: 1852239 - RNA, 18 nt, Human
uaaggaauaccugucccc

SEQ ID NO: 1852240 - RNA, 17 nt, Human
uaaggaauaccuguccc

SEQ ID NO: 1852241 - RNA, 22 nt, Human
uaaggaauuuuauuuuuuucug

SEQ ID NO: 1852242 - RNA, 18 nt, Human
aaucagccugcuccagcu

SEQ ID NO: 1852243 - RNA, 13 nt, Human
aaucagccugcuc

SEQ ID NO: 1852244 - RNA, 19 nt, Human
aaucagccugcuccagcug

SEQ ID NO: 1852245 - RNA, 19 nt, Human
aaucagcauucucacuccu

SEQ ID NO: 1852246 - RNA, 18 nt, Human
aaucagcauucucacucc

SEQ ID NO: 1852247 - RNA, 11 nt, Human
aaucagccugc

SEQ ID NO: 1852248 - RNA, 15 nt, Human
aauauuuauagguca

SEQ ID NO: 1852249 - RNA, 21 nt, Human
aaucacguaaagcuagaaaug

SEQ ID NO: 1852250 - RNA, 20 nt, Human
aaucacguaaagcuagaaau

SEQ ID NO: 1852251 - RNA, 21 nt, Human
uaaguauucuuauuuaaugaa

SEQ ID NO: 1852252 - RNA, 21 nt, Human
uaaguuacacauuuuucagau

SEQ ID NO: 1852253 - RNA, 17 nt, Human
uaaguguguguuuuuca

SEQ ID NO: 1852254 - RNA, 18 nt, Human
aaucugggccagaauuuc

SEQ ID NO: 1852255 - RNA, 13 nt, Human
aaucucaaauaac

SEQ ID NO: 1852256 - RNA, 17 nt, Human
aaucccauuuaaaaaaa

SEQ ID NO: 1852257 - RNA, 12 nt, Human
aaucccaggaug

SEQ ID NO: 1852258 - RNA, 20 nt, Human
aauccucaguuuuugugaaa

SEQ ID NO: 1852259 - RNA, 13 nt, Human
uacaaugcugugc

SEQ ID NO: 1852260 - RNA, 14 nt, Human
uacaaugcugugcc

SEQ ID NO: 1852261 - RNA, 16 nt, Human
uacaaugcugugcccu

SEQ ID NO: 1852262 - RNA, 15 nt, Human
uaauuuuuguauuuu

SEQ ID NO: 1852263 - RNA, 21 nt, Human
uacaaaaaaaaaaaaaaauua

SEQ ID NO: 1852264 - RNA, 22 nt, Human
uaauuuuuuuuuuccuuuuaaa

SEQ ID NO: 1852265 - RNA, 18 nt, Human
uaauuuuuuugagacaga

SEQ ID NO: 1852266 - RNA, 21 nt, Human
aaugcuggcuguuggcugggg

SEQ ID NO: 1852267 - RNA, 22 nt, Human
aaugcuggcuguuggcuggggg

SEQ ID NO: 1852268 - RNA, 18 nt, Human
aaugcugguuuuucaguu

SEQ ID NO: 1852269 - RNA, 13 nt, Human
aauggaagacagc

SEQ ID NO: 1852270 - RNA, 16 nt, Human
aauggaagacagcucu

SEQ ID NO: 1852271 - RNA, 18 nt, Human
aauggaagacagcucuua

SEQ ID NO: 1852272 - RNA, 14 nt, Human
aaugguuuucaaaa

SEQ ID NO: 1852273 - RNA, 12 nt, Human
aauguaaauaaa

SEQ ID NO: 1852274 - RNA, 16 nt, Human
aaugguuuucuugugu

SEQ ID NO: 1852275 - RNA, 16 nt, Human
aaugguuuucaaaaua

SEQ ID NO: 1852276 - RNA, 17 nt, Human
uacagagacagaaagca

SEQ ID NO: 1852277 - RNA, 19 nt, Human
uacagacaaagcguggugg

SEQ ID NO: 1852278 - RNA, 22 nt, Human
uacagagcccacgcccccacug

SEQ ID NO: 1852279 - RNA, 19 nt, Human
uacagagcccacgccccca

SEQ ID NO: 1852280 - RNA, 23 nt, Human
uacagagcagacaguuaagagaa

SEQ ID NO: 1852281 - RNA, 15 nt, Human
uacagacaaagcgug

SEQ ID NO: 1852282 - RNA, 14 nt, Human
uacagacaaagcgu

SEQ ID NO: 1852283 - RNA, 13 nt, Human
uacagacaaagcg

SEQ ID NO: 1852284 - RNA, 17 nt, Human
uacaccgggccuggaga

SEQ ID NO: 1852285 - RNA, 15 nt, Human
uacaccgggccugga

SEQ ID NO: 1852286 - RNA, 24 nt, Human
aaugauuucagcucacugcaaccu

SEQ ID NO: 1852287 - RNA, 13 nt, Human
aaugagccuggca

SEQ ID NO: 1852288 - RNA, 12 nt, Human
aaugagccuggc

SEQ ID NO: 1852289 - RNA, 14 nt, Human
aaugagccuggcaa

SEQ ID NO: 1852290 - RNA, 16 nt, Human
aaugaggucagagccu

SEQ ID NO: 1852291 - RNA, 18 nt, Human
aaugaggucagagccugc

SEQ ID NO: 1852292 - RNA, 21 nt, Human
aaugaccuuucaauaggaaaa

SEQ ID NO: 1852293 - RNA, 20 nt, Human
aaugagaaaaugucuuuauu

SEQ ID NO: 1852294 - RNA, 11 nt, Human
aaugagccugg

SEQ ID NO: 1852295 - RNA, 22 nt, Human
aaugagaaaucuaaaaaacgaa

SEQ ID NO: 1852296 - RNA, 12 nt, Human
aaugagaaaucu

SEQ ID NO: 1852297 - RNA, 13 nt, Human
aaugcaccuggaa

SEQ ID NO: 1852298 - RNA, 16 nt, Human
aaugauuucauucaau

SEQ ID NO: 1852299 - RNA, 13 nt, Human
aaugauuuuuaaa

SEQ ID NO: 1852300 - RNA, 11 nt, Human
aaugcaaacca

SEQ ID NO: 1852301 - RNA, 12 nt, Human
aaugcaaaccau

SEQ ID NO: 1852302 - RNA, 14 nt, Human
aaugcaaaccauca

SEQ ID NO: 1852303 - RNA, 22 nt, Human
uaauuccguagguuauuuucag

SEQ ID NO: 1852304 - RNA, 12 nt, Human
uacauucuguua

SEQ ID NO: 1852305 - RNA, 13 nt, Human
uacauuuccuaaa

SEQ ID NO: 1852306 - RNA, 12 nt, Human
uaccagcagagc

SEQ ID NO: 1852307 - RNA, 14 nt, Human
uaccagcagagcac

SEQ ID NO: 1852308 - RNA, 13 nt, Human
uaccagcagagca

SEQ ID NO: 1852309 - RNA, 22 nt, Human
uaccagcagagcaccuuagaca

SEQ ID NO: 1852310 - RNA, 18 nt, Human
uaccagccaguaaauggg

SEQ ID NO: 1852311 - RNA, 23 nt, Human
uacccccugcaaagcccagcuug

SEQ ID NO: 1852312 - RNA, 19 nt, Human
uacccccugcaaagcccag

SEQ ID NO: 1852313 - RNA, 15 nt, Human
uacccccugcaaagc

SEQ ID NO: 1852314 - RNA, 19 nt, Human
uaccagggacugaggggag

SEQ ID NO: 1852315 - RNA, 12 nt, Human
aauuaacuuuua

SEQ ID NO: 1852316 - RNA, 13 nt, Human
aauuaacuuuuau

SEQ ID NO: 1852317 - RNA, 17 nt, Human
aauuaaguacuauguau

SEQ ID NO: 1852318 - RNA, 16 nt, Human
aauuaaguacuaugua

SEQ ID NO: 1852319 - RNA, 15 nt, Human
aauuaacuuuuauaa

SEQ ID NO: 1852320 - RNA, 16 nt, Human
aauuaacuuuuauaaa

SEQ ID NO: 1852321 - RNA, 16 nt, Human
aauguucaucaaugaa

SEQ ID NO: 1852322 - RNA, 20 nt, Human
aauguucaucaaugaaugaa

SEQ ID NO: 1852323 - RNA, 21 nt, Human
aaugugcugaaugguuuucaa

SEQ ID NO: 1852324 - RNA, 23 nt, Human
uacagagcccacgcccccacugg

SEQ ID NO: 1852325 - RNA, 13 nt, Human
aauguucaucaau

SEQ ID NO: 1852326 - RNA, 16 nt, Human
uaccugccaggaagcc

SEQ ID NO: 1852327 - RNA, 16 nt, Human
uaccugaggggccucu

SEQ ID NO: 1852328 - RNA, 20 nt, Human
aauuacaggaaguacuggag

SEQ ID NO: 1852329 - RNA, 19 nt, Human
aauuacaggaaguacugga

SEQ ID NO: 1852330 - RNA, 17 nt, Human
aauuacaggaaguacug

SEQ ID NO: 1852331 - RNA, 22 nt, Human
uaccucuugagccuugaacuuu

SEQ ID NO: 1852332 - RNA, 23 nt, Human
uaccucuugagccuugaacuuug

SEQ ID NO: 1852333 - RNA, 23 nt, Human
uacccgggaagggggcugggaca

SEQ ID NO: 1852334 - RNA, 14 nt, Human
uaccugaagucuuu

SEQ ID NO: 1852335 - RNA, 13 nt, Human
uaccugaagucuu

SEQ ID NO: 1852336 - RNA, 23 nt, Human
uaccugaagcuaucguaaaauua

SEQ ID NO: 1852337 - RNA, 15 nt, Human
uaccugaggggccuc

SEQ ID NO: 1852338 - RNA, 13 nt, Human
uaccugaggggcc

SEQ ID NO: 1852339 - RNA, 16 nt, Human
uaccugaagucuuugu

SEQ ID NO: 1852340 - RNA, 11 nt, Human
aauucaguugu

SEQ ID NO: 1852341 - RNA, 22 nt, Human
aauucaguuguuagugugucuu

SEQ ID NO: 1852342 - RNA, 17 nt, Human
aauucaguuguuagugu

SEQ ID NO: 1852343 - RNA, 22 nt, Human
aauuauuuauuaaaugcccagc

SEQ ID NO: 1852344 - RNA, 21 nt, Human
aauuauuuauuaaaugcccag

SEQ ID NO: 1852345 - RNA, 22 nt, Human
aauuaugugccagauuuaugca

SEQ ID NO: 1852346 - RNA, 15 nt, Human
uaucccggcugcccu

SEQ ID NO: 1852347 - RNA, 19 nt, Human
uauccaacaucaacaucuu

SEQ ID NO: 1852348 - RNA, 17 nt, Human
uaucagaauucucagaa

SEQ ID NO: 1852349 - RNA, 19 nt, Human
uaucacccagaagaaaaua

SEQ ID NO: 1852350 - RNA, 22 nt, Human
uaucacccagaagaaaauagug

SEQ ID NO: 1852351 - RNA, 16 nt, Human
acacuuacacuuuaug

SEQ ID NO: 1852352 - RNA, 20 nt, Human
acacuguuucaaacuuuacu

SEQ ID NO: 1852353 - RNA, 17 nt, Human
acacucauugaccugag

SEQ ID NO: 1852354 - RNA, 17 nt, Human
acacuguuucaaacuuu

SEQ ID NO: 1852355 - RNA, 18 nt, Human
acacuguuucaaacuuua

SEQ ID NO: 1852356 - RNA, 14 nt, Human
acacuuccauaauc

SEQ ID NO: 1852357 - RNA, 22 nt, Human
acacuucaggcucuucuccuuu

SEQ ID NO: 1852358 - RNA, 19 nt, Human
acacuucaggcucuucucc

SEQ ID NO: 1852359 - RNA, 15 nt, Human
acacuucaggcucuu

SEQ ID NO: 1852360 - RNA, 21 nt, Human
acacuuacacuuuaugcacaa

SEQ ID NO: 1852361 - RNA, 18 nt, Human
acacuuacacuuuaugca

SEQ ID NO: 1852362 - RNA, 16 nt, Human
acagaaagguuuucuu

SEQ ID NO: 1852363 - RNA, 18 nt, Human
acagacauacuaaccagc

SEQ ID NO: 1852364 - RNA, 19 nt, Human
acagacauacuaaccagca

SEQ ID NO: 1852365 - RNA, 13 nt, Human
acagaaauguaca

SEQ ID NO: 1852366 - RNA, 19 nt, Human
uauaagugauugcugguuu

SEQ ID NO: 1852367 - RNA, 21 nt, Human
acacucaaaagcugggcaggu

SEQ ID NO: 1852368 - RNA, 22 nt, Human
acacuaaugaggaaacugcacu

SEQ ID NO: 1852369 - RNA, 15 nt, Human
acacuaaugaggaaa

SEQ ID NO: 1852370 - RNA, 20 nt, Human
uagucacugagacagcccgg

SEQ ID NO: 1852371 - RNA, 17 nt, Human
uagucacugagacagcc

SEQ ID NO: 1852372 - RNA, 22 nt, Human
uauacacuuacacuuuaugcac

SEQ ID NO: 1852373 - RNA, 21 nt, Human
uauaauuuaccugaagucuuu

SEQ ID NO: 1852374 - RNA, 18 nt, Human
uauaauuuaccugaaguc

SEQ ID NO: 1852375 - RNA, 16 nt, Human
acacucauugaccuga

SEQ ID NO: 1852376 - RNA, 12 nt, Human
uauaggaauuga

SEQ ID NO: 1852377 - RNA, 23 nt, Human
uauaggaacuuaaauaaugugaa

SEQ ID NO: 1852378 - RNA, 15 nt, Human
uauaggcaccuacca

SEQ ID NO: 1852379 - RNA, 18 nt, Human
uauagccuaggugacaga

SEQ ID NO: 1852380 - RNA, 21 nt, Human
uaugucucgugguaggacugu

SEQ ID NO: 1852381 - RNA, 22 nt, Human
acaggcccuuccucuccacugc

SEQ ID NO: 1852382 - RNA, 15 nt, Human
acaggcccuuccucu

SEQ ID NO: 1852383 - RNA, 13 nt, Human
acaggcccuuccu

SEQ ID NO: 1852384 - RNA, 18 nt, Human
acaggcccggcuccaggc

SEQ ID NO: 1852385 - RNA, 20 nt, Human
acaggcccggcuccaggcuc

SEQ ID NO: 1852386 - RNA, 21 nt, Human
acaggcccggcuccaggcucc

SEQ ID NO: 1852387 - RNA, 22 nt, Human
acaggcccggcuccaggcuccu

SEQ ID NO: 1852388 - RNA, 16 nt, Human
acaggcccggcuccag

SEQ ID NO: 1852389 - RNA, 17 nt, Human
acaggcccggcuccagg

SEQ ID NO: 1852390 - RNA, 20 nt, Human
acaggaaaauuuuaaaaaua

SEQ ID NO: 1852391 - RNA, 15 nt, Human
acaggacucugccuc

SEQ ID NO: 1852392 - RNA, 16 nt, Human
acaggacucugccucc

SEQ ID NO: 1852393 - RNA, 15 nt, Human
acaggcagauacagg

SEQ ID NO: 1852394 - RNA, 23 nt, Human
acagcuugaccgugaggccagag

SEQ ID NO: 1852395 - RNA, 22 nt, Human
acagcuugaccgugaggccaga

SEQ ID NO: 1852396 - RNA, 19 nt, Human
acaggaaaagcugcugaca

SEQ ID NO: 1852397 - RNA, 20 nt, Human
acaggaaaagcugcugacag

SEQ ID NO: 1852398 - RNA, 21 nt, Human
acaggaaaagcugcugacagu

SEQ ID NO: 1852399 - RNA, 21 nt, Human
acagcuugaccgugaggccag

SEQ ID NO: 1852400 - RNA, 20 nt, Human
acagcuugaccgugaggcca

SEQ ID NO: 1852401 - RNA, 17 nt, Human
acagcuugaccgugagg

SEQ ID NO: 1852402 - RNA, 17 nt, Human
acagcuucauuuccugu

SEQ ID NO: 1852403 - RNA, 19 nt, Human
acagcuucauuuccugugu

SEQ ID NO: 1852404 - RNA, 21 nt, Human
acagcuucauuuccugugucu

SEQ ID NO: 1852405 - RNA, 15 nt, Human
acagcuaaugggaca

SEQ ID NO: 1852406 - RNA, 16 nt, Human
acagcuaaugggacac

SEQ ID NO: 1852407 - RNA, 17 nt, Human
acagcuaaugggacacu

SEQ ID NO: 1852408 - RNA, 19 nt, Human
acagcuaaugggacacuaa

SEQ ID NO: 1852409 - RNA, 14 nt, Human
uaugaggcauuugu

SEQ ID NO: 1852410 - RNA, 15 nt, Human
uaugaggcauuuguu

SEQ ID NO: 1852411 - RNA, 21 nt, Human
uaugaggcauuuguuugaacu

SEQ ID NO: 1852412 - RNA, 23 nt, Human
uaugaggcauuuguuugaacuga

SEQ ID NO: 1852413 - RNA, 23 nt, Human
uaugaagcuuuuaugugaaacau

SEQ ID NO: 1852414 - RNA, 22 nt, Human
uaugaagcuuuuaugugaaaca

SEQ ID NO: 1852415 - RNA, 20 nt, Human
uaugaagcuuuuaugugaaa

SEQ ID NO: 1852416 - RNA, 16 nt, Human
acagcccgggcucugc

SEQ ID NO: 1852417 - RNA, 23 nt, Human
acagcccuccaucuaaacugccc

SEQ ID NO: 1852418 - RNA, 15 nt, Human
acagcccgggcucug

SEQ ID NO: 1852419 - RNA, 16 nt, Human
acagccccuccuccau

SEQ ID NO: 1852420 - RNA, 14 nt, Human
acagccccuccucc

SEQ ID NO: 1852421 - RNA, 17 nt, Human
acagcagccccugcaca

SEQ ID NO: 1852422 - RNA, 19 nt, Human
acagcacgggggccaagga

SEQ ID NO: 1852423 - RNA, 22 nt, Human
acagauuugagcucagcccugg

SEQ ID NO: 1852424 - RNA, 22 nt, Human
uaugcaugaaguaauaugcaca

SEQ ID NO: 1852425 - RNA, 17 nt, Human
uaugauacuugaaaauu

SEQ ID NO: 1852426 - RNA, 22 nt, Human
acagcuaaucagcauucucacu

SEQ ID NO: 1852427 - RNA, 20 nt, Human
uauggcccuggccuagcaua

SEQ ID NO: 1852428 - RNA, 21 nt, Human
uauggcccuggccuagcauac

SEQ ID NO: 1852429 - RNA, 22 nt, Human
uauggcccuggccuagcauacg

SEQ ID NO: 1852430 - RNA, 10 nt, Human
uaugggagag

SEQ ID NO: 1852431 - RNA, 16 nt, Human
uaugggacucaaugca

SEQ ID NO: 1852432 - RNA, 23 nt, Human
uaugggacucaaugcacugacau

SEQ ID NO: 1852433 - RNA, 12 nt, Human
aauuuuacauuu

SEQ ID NO: 1852434 - RNA, 22 nt, Human
uagagcggagaaaggaagggcu

SEQ ID NO: 1852435 - RNA, 14 nt, Human
uagagccagggucu

SEQ ID NO: 1852436 - RNA, 15 nt, Human
uagcacagacccugc

SEQ ID NO: 1852437 - RNA, 21 nt, Human
uagcacagacccugcccugug

SEQ ID NO: 1852438 - RNA, 20 nt, Human
uagcacagacccugcccugu

SEQ ID NO: 1852439 - RNA, 14 nt, Human
uagcacagacccug

SEQ ID NO: 1852440 - RNA, 13 nt, Human
uagccaaggccaa

SEQ ID NO: 1852441 - RNA, 14 nt, Human
uagccaaggccaaa

SEQ ID NO: 1852442 - RNA, 12 nt, Human
uagccaaggcca

SEQ ID NO: 1852443 - RNA, 24 nt, Human
uagcacagacccugcccugugggc

SEQ ID NO: 1852444 - RNA, 22 nt, Human
uagcacagacccugcccugugg

SEQ ID NO: 1852445 - RNA, 14 nt, Human
aauuccacagcugc

SEQ ID NO: 1852446 - RNA, 13 nt, Human
aauuccacagcug

SEQ ID NO: 1852447 - RNA, 12 nt, Human
aauuccacagcu

SEQ ID NO: 1852448 - RNA, 17 nt, Human
uagaacucccuuucaac

SEQ ID NO: 1852449 - RNA, 18 nt, Human
uagaacucccuuucaaca

SEQ ID NO: 1852450 - RNA, 16 nt, Human
uagaacucccuuucaa

SEQ ID NO: 1852451 - RNA, 18 nt, Human
uagacaauuuauuauggc

SEQ ID NO: 1852452 - RNA, 16 nt, Human
uagacagucccugcca

SEQ ID NO: 1852453 - RNA, 10 nt, Human
uagacagagu

SEQ ID NO: 1852454 - RNA, 18 nt, Human
aauuugggggaaaauuua

SEQ ID NO: 1852455 - RNA, 14 nt, Human
aauuugugauacaa

SEQ ID NO: 1852456 - RNA, 17 nt, Human
aauuugugauacaaugc

SEQ ID NO: 1852457 - RNA, 18 nt, Human
aauuugugauacaaugcu

SEQ ID NO: 1852458 - RNA, 20 nt, Human
aauuugugauacaaugcugu

SEQ ID NO: 1852459 - RNA, 21 nt, Human
uagacagucccugccaaugga

SEQ ID NO: 1852460 - RNA, 17 nt, Human
uagacagucccugccaa

SEQ ID NO: 1852461 - RNA, 21 nt, Human
uagacagagucucacuguugc

SEQ ID NO: 1852462 - RNA, 12 nt, Human
uaguaaucauau

SEQ ID NO: 1852463 - RNA, 14 nt, Human
uaguagagacaggg

SEQ ID NO: 1852464 - RNA, 14 nt, Human
uagucacugagaca

SEQ ID NO: 1852465 - RNA, 13 nt, Human
uaguagagacggg

SEQ ID NO: 1852466 - RNA, 15 nt, Human
uaguagagacagggu

SEQ ID NO: 1852467 - RNA, 22 nt, Human
uaguagagacaggguuuugcca

SEQ ID NO: 1852468 - RNA, 16 nt, Human
uaguaaaaauaaaauu

SEQ ID NO: 1852469 - RNA, 13 nt, Human
uaguaaaaauaaa

SEQ ID NO: 1852470 - RNA, 16 nt, Human
acacaguauuacuucu

SEQ ID NO: 1852471 - RNA, 23 nt, Human
acacacagauuugagcucagccc

SEQ ID NO: 1852472 - RNA, 16 nt, Human
acacaggcccggcucc

SEQ ID NO: 1852473 - RNA, 17 nt, Human
acacaggcccggcucca

SEQ ID NO: 1852474 - RNA, 18 nt, Human
acacaggcccggcuccag

SEQ ID NO: 1852475 - RNA, 23 nt, Human
acacaggcccggcuccaggcucc

SEQ ID NO: 1852476 - RNA, 24 nt, Human
acacaggcccggcuccaggcuccu

SEQ ID NO: 1852477 - RNA, 19 nt, Human
acacaggcccggcuccagg

SEQ ID NO: 1852478 - RNA, 20 nt, Human
acacaggcccggcuccaggc

SEQ ID NO: 1852479 - RNA, 21 nt, Human
acacaggcccggcuccaggcu

SEQ ID NO: 1852480 - RNA, 22 nt, Human
acacaggcccggcuccaggcuc

SEQ ID NO: 1852481 - RNA, 18 nt, Human
acaaugcaaaccaucauu

SEQ ID NO: 1852482 - RNA, 17 nt, Human
acaaugcaaaccaucau

SEQ ID NO: 1852483 - RNA, 16 nt, Human
acaaugcaaaccauca

SEQ ID NO: 1852484 - RNA, 11 nt, Human
acaaugcaaac

SEQ ID NO: 1852485 - RNA, 20 nt, Human
acaaugacuuacuguacaug

SEQ ID NO: 1852486 - RNA, 22 nt, Human
acaaugacuuacuguacaugaa

SEQ ID NO: 1852487 - RNA, 19 nt, Human
uaggguaagugagagaggg

SEQ ID NO: 1852488 - RNA, 13 nt, Human
uaggguccugggg

SEQ ID NO: 1852489 - RNA, 17 nt, Human
uaggguuauaauaaugu

SEQ ID NO: 1852490 - RNA, 15 nt, Human
uaggguuauaauaau

SEQ ID NO: 1852491 - RNA, 15 nt, Human
uagggugggccuuca

SEQ ID NO: 1852492 - RNA, 21 nt, Human
acaaugcaaaccaucauugaa

SEQ ID NO: 1852493 - RNA, 19 nt, Human
acaaugcaaaccaucauug

SEQ ID NO: 1852494 - RNA, 23 nt, Human
acaaugcaaaccaucauugaaau

SEQ ID NO: 1852495 - RNA, 13 nt, Human
uaggauguugaaa

SEQ ID NO: 1852496 - RNA, 14 nt, Human
uaggcaggaccugu

SEQ ID NO: 1852497 - RNA, 15 nt, Human
uaggcaggaccugug

SEQ ID NO: 1852498 - RNA, 17 nt, Human
uaggaaaaacugauuuu

SEQ ID NO: 1852499 - RNA, 16 nt, Human
uaggaaaaacugauuu

SEQ ID NO: 1852500 - RNA, 13 nt, Human
uagggaagauaau

SEQ ID NO: 1852501 - RNA, 19 nt, Human
uagggauggggcugugggg

SEQ ID NO: 1852502 - RNA, 14 nt, Human
uaggaaaaacugau

SEQ ID NO: 1852503 - RNA, 13 nt, Human
uaggaaaaacuga

SEQ ID NO: 1852504 - RNA, 13 nt, Human
uagcuuuucccuu

SEQ ID NO: 1852505 - RNA, 20 nt, Human
uagccuuagaagucacacag

SEQ ID NO: 1852506 - RNA, 21 nt, Human
uagccuuagaagucacacagu

SEQ ID NO: 1852507 - RNA, 14 nt, Human
uagcgcccaguugg

SEQ ID NO: 1852508 - RNA, 17 nt, Human
uagcgcccaguugggug

SEQ ID NO: 1852509 - RNA, 22 nt, Human
ucccugaaggccccgcccaggc

SEQ ID NO: 1852510 - RNA, 21 nt, Human
ucccugaaggccccgcccagg

SEQ ID NO: 1852511 - RNA, 18 nt, Human
ucccugaaggccccgccc

SEQ ID NO: 1852512 - RNA, 20 nt, Human
acucaccucccccaucucuu

SEQ ID NO: 1852513 - RNA, 19 nt, Human
acucaccucccccaucucu

SEQ ID NO: 1852514 - RNA, 17 nt, Human
acucaccccagccccaa

SEQ ID NO: 1852515 - RNA, 23 nt, Human
ucccugaaggccccgcccaggcu

SEQ ID NO: 1852516 - RNA, 13 nt, Human
ucccucuuucccu

SEQ ID NO: 1852517 - RNA, 11 nt, Human
ucccucuuucc

SEQ ID NO: 1852518 - RNA, 20 nt, Human
ucccucagucuggcccuucc

SEQ ID NO: 1852519 - RNA, 18 nt, Human
ucccucagucuggcccuu

SEQ ID NO: 1852520 - RNA, 22 nt, Human
acucauugaccugaggcccuuc

SEQ ID NO: 1852521 - RNA, 18 nt, Human
acucauugaccugaggcc

SEQ ID NO: 1852522 - RNA, 17 nt, Human
acucauugaccugaggc

SEQ ID NO: 1852523 - RNA, 16 nt, Human
acucauugaccugagg

SEQ ID NO: 1852524 - RNA, 21 nt, Human
acucaucuagguaaauuacag

SEQ ID NO: 1852525 - RNA, 12 nt, Human
acucaucuuagg

SEQ ID NO: 1852526 - RNA, 23 nt, Human
acucaucuagguaaauuacaguu

SEQ ID NO: 1852527 - RNA, 19 nt, Human
acucaccugccccucaacu

SEQ ID NO: 1852528 - RNA, 14 nt, Human
acucaccugccccu

SEQ ID NO: 1852529 - RNA, 21 nt, Human
acucaccugccccucaacucu

SEQ ID NO: 1852530 - RNA, 14 nt, Human
acucagaagacacu

SEQ ID NO: 1852531 - RNA, 15 nt, Human
acucagaagacacug

SEQ ID NO: 1852532 - RNA, 16 nt, Human
acucagaagacacuga

SEQ ID NO: 1852533 - RNA, 17 nt, Human
acucagaagacacugau

SEQ ID NO: 1852534 - RNA, 18 nt, Human
acucagaagacacugaug

SEQ ID NO: 1852535 - RNA, 21 nt, Human
acucagaauucucuaguuuga

SEQ ID NO: 1852536 - RNA, 22 nt, Human
acucagaauucucuaguuugau

SEQ ID NO: 1852537 - RNA, 14 nt, Human
acucagaauucucu

SEQ ID NO: 1852538 - RNA, 21 nt, Human
acuauaauguaagcucuacug

SEQ ID NO: 1852539 - RNA, 15 nt, Human
acuaugauuuggaaa

SEQ ID NO: 1852540 - RNA, 16 nt, Human
acuaugauuuggaaaa

SEQ ID NO: 1852541 - RNA, 14 nt, Human
acuauaauguaagc

SEQ ID NO: 1852542 - RNA, 13 nt, Human
acuauaauguaag

SEQ ID NO: 1852543 - RNA, 12 nt, Human
acuauaauguaa

SEQ ID NO: 1852544 - RNA, 12 nt, Human
acuauguaucaa

SEQ ID NO: 1852545 - RNA, 13 nt, Human
acuauguugauaa

SEQ ID NO: 1852546 - RNA, 21 nt, Human
acucacauuuauucugcucac

SEQ ID NO: 1852547 - RNA, 19 nt, Human
acucacauuuauucugcuc

SEQ ID NO: 1852548 - RNA, 20 nt, Human
acucacauuuauucugcuca

SEQ ID NO: 1852549 - RNA, 14 nt, Human
acucaaugcacuga

SEQ ID NO: 1852550 - RNA, 13 nt, Human
acguacacauuuu

SEQ ID NO: 1852551 - RNA, 14 nt, Human
acguacacauuuua

SEQ ID NO: 1852552 - RNA, 12 nt, Human
acguacacauuu

SEQ ID NO: 1852553 - RNA, 13 nt, Human
acguacacacaca

SEQ ID NO: 1852554 - RNA, 17 nt, Human
acuagaacugaauuuug

SEQ ID NO: 1852555 - RNA, 18 nt, Human
acuagaacugaauuuugu

SEQ ID NO: 1852556 - RNA, 19 nt, Human
acuagaacugaauuuuguc

SEQ ID NO: 1852557 - RNA, 23 nt, Human
acuagaacugaauuuugucuuua

SEQ ID NO: 1852558 - RNA, 14 nt, Human
acuacuagggaaau

SEQ ID NO: 1852559 - RNA, 16 nt, Human
acuagaacugaauuuu

SEQ ID NO: 1852560 - RNA, 18 nt, Human
acuacggaauaguuggcu

SEQ ID NO: 1852561 - RNA, 15 nt, Human
uccugaagaauugaa

SEQ ID NO: 1852562 - RNA, 12 nt, Human
uccucugcugcu

SEQ ID NO: 1852563 - RNA, 19 nt, Human
uccucuugccacugccucu

SEQ ID NO: 1852564 - RNA, 14 nt, Human
uccucugaggcuga

SEQ ID NO: 1852565 - RNA, 23 nt, Human
uccucuuuggucuacacugugcu

SEQ ID NO: 1852566 - RNA, 19 nt, Human
acucuugaaaaaugcaugu

SEQ ID NO: 1852567 - RNA, 14 nt, Human
acucuugaaaaaug

SEQ ID NO: 1852568 - RNA, 21 nt, Human
acucuugaaaaaugcauguug

SEQ ID NO: 1852569 - RNA, 14 nt, Human
uccucccaccucag

SEQ ID NO: 1852570 - RNA, 15 nt, Human
uccucccaccucagc

SEQ ID NO: 1852571 - RNA, 16 nt, Human
uccucccaccucagcc

SEQ ID NO: 1852572 - RNA, 18 nt, Human
uccucccaccucagccuc

SEQ ID NO: 1852573 - RNA, 20 nt, Human
uccucccaccucagccuccc

SEQ ID NO: 1852574 - RNA, 21 nt, Human
uccucccaccucagccucccg

SEQ ID NO: 1852575 - RNA, 18 nt, Human
uccucuccacugccuucg

SEQ ID NO: 1852576 - RNA, 17 nt, Human
uccucuccacugccuuc

SEQ ID NO: 1852577 - RNA, 17 nt, Human
uccucugagccuuggga

SEQ ID NO: 1852578 - RNA, 13 nt, Human
uccucugagccuu

SEQ ID NO: 1852579 - RNA, 12 nt, Human
uccucugagccu

SEQ ID NO: 1852580 - RNA, 15 nt, Human
uccucucugcccuaa

SEQ ID NO: 1852581 - RNA, 14 nt, Human
uccucucugcccua

SEQ ID NO: 1852582 - RNA, 13 nt, Human
uccucucugcccu

SEQ ID NO: 1852583 - RNA, 12 nt, Human
uccucucugccc

SEQ ID NO: 1852584 - RNA, 16 nt, Human
acucgcgacaaugcaa

SEQ ID NO: 1852585 - RNA, 15 nt, Human
acucgcgacaaugca

SEQ ID NO: 1852586 - RNA, 17 nt, Human
acucgcgacaaugcaaa

SEQ ID NO: 1852587 - RNA, 14 nt, Human
acucguauaugucu

SEQ ID NO: 1852588 - RNA, 17 nt, Human
acucugacaacagacuu

SEQ ID NO: 1852589 - RNA, 13 nt, Human
acucugacaacag

SEQ ID NO: 1852590 - RNA, 23 nt, Human
acucugacaacagacuucugaaa

SEQ ID NO: 1852591 - RNA, 22 nt, Human
acucugacaacagacuucugaa

SEQ ID NO: 1852592 - RNA, 20 nt, Human
acucugacaacagacuucug

SEQ ID NO: 1852593 - RNA, 18 nt, Human
acucugacaacagacuuc

SEQ ID NO: 1852594 - RNA, 13 nt, Human
acucuugaaaaau

SEQ ID NO: 1852595 - RNA, 21 nt, Human
acucuucaguuaagccuuugg

SEQ ID NO: 1852596 - RNA, 20 nt, Human
acucuucaguuaagccuuug

SEQ ID NO: 1852597 - RNA, 17 nt, Human
acucuggcagcucagag

SEQ ID NO: 1852598 - RNA, 16 nt, Human
acucuggcagcucaga

SEQ ID NO: 1852599 - RNA, 20 nt, Human
acucuggcagcucagagagg

SEQ ID NO: 1852600 - RNA, 19 nt, Human
acucuggcagcucagagag

SEQ ID NO: 1852601 - RNA, 21 nt, Human
acucuuauugcccacgcugga

SEQ ID NO: 1852602 - RNA, 16 nt, Human
acucgaguuacagaca

SEQ ID NO: 1852603 - RNA, 21 nt, Human
uccuagccugugccucuggga

SEQ ID NO: 1852604 - RNA, 12 nt, Human
uccuacucugug

SEQ ID NO: 1852605 - RNA, 15 nt, Human
uccguuaaaauacca

SEQ ID NO: 1852606 - RNA, 13 nt, Human
uccguuaaaauac

SEQ ID NO: 1852607 - RNA, 17 nt, Human
accuucccaugcccugg

SEQ ID NO: 1852608 - RNA, 17 nt, Human
accuucgccaccugggu

SEQ ID NO: 1852609 - RNA, 15 nt, Human
accuucgccaccugg

SEQ ID NO: 1852610 - RNA, 21 nt, Human
accuggguaacuagggaagau

SEQ ID NO: 1852611 - RNA, 13 nt, Human
accuuugucccca

SEQ ID NO: 1852612 - RNA, 22 nt, Human
accuucuccuucaccuuugucc

SEQ ID NO: 1852613 - RNA, 14 nt, Human
accuucuccuucac

SEQ ID NO: 1852614 - RNA, 14 nt, Human
accuuuuuuauaca

SEQ ID NO: 1852615 - RNA, 16 nt, Human
accuuuguccccaccg

SEQ ID NO: 1852616 - RNA, 15 nt, Human
accuuuguccccacc

SEQ ID NO: 1852617 - RNA, 14 nt, Human
accuuuguccccac

SEQ ID NO: 1852618 - RNA, 16 nt, Human
accuuuuuuauacaua

SEQ ID NO: 1852619 - RNA, 17 nt, Human
accuuuuuuauacauaa

SEQ ID NO: 1852620 - RNA, 18 nt, Human
accuuuuuuauacauaaa

SEQ ID NO: 1852621 - RNA, 13 nt, Human
accuggccucugc

SEQ ID NO: 1852622 - RNA, 12 nt, Human
accuggccucug

SEQ ID NO: 1852623 - RNA, 18 nt, Human
uccaccaucaagccacca

SEQ ID NO: 1852624 - RNA, 12 nt, Human
uccacccaccuc

SEQ ID NO: 1852625 - RNA, 13 nt, Human
uccacccaccuca

SEQ ID NO: 1852626 - RNA, 17 nt, Human
uccacccaggagccccg

SEQ ID NO: 1852627 - RNA, 20 nt, Human
uccacccaggagccccgagg

SEQ ID NO: 1852628 - RNA, 19 nt, Human
uccaaaugcagcuuuaaaa

SEQ ID NO: 1852629 - RNA, 18 nt, Human
uccaaggguacuaaggaa

SEQ ID NO: 1852630 - RNA, 21 nt, Human
accugcgucucauacucaccu

SEQ ID NO: 1852631 - RNA, 16 nt, Human
accugcggugcuaucu

SEQ ID NO: 1852632 - RNA, 23 nt, Human
accugccuguugggccaggagcc

SEQ ID NO: 1852633 - RNA, 12 nt, Human
accugcucuccu

SEQ ID NO: 1852634 - RNA, 20 nt, Human
accuggaauauauaaccagu

SEQ ID NO: 1852635 - RNA, 16 nt, Human
ucauuugucacacacu

SEQ ID NO: 1852636 - RNA, 14 nt, Human
ucauuugucacaca

SEQ ID NO: 1852637 - RNA, 17 nt, Human
ucauuuuuuuuaagaaa

SEQ ID NO: 1852638 - RNA, 18 nt, Human
ucauuuuuuuuaagaaaa

SEQ ID NO: 1852639 - RNA, 14 nt, Human
ucauuuuugaauac

SEQ ID NO: 1852640 - RNA, 19 nt, Human
ucauuuuuaguagagacag

SEQ ID NO: 1852641 - RNA, 17 nt, Human
accugccaggaagccag

SEQ ID NO: 1852642 - RNA, 16 nt, Human
accugccaggaagcca

SEQ ID NO: 1852643 - RNA, 19 nt, Human
accugccaggaagccagca

SEQ ID NO: 1852644 - RNA, 18 nt, Human
accugccaggaagccagc

SEQ ID NO: 1852645 - RNA, 17 nt, Human
accugccucggccuccc

SEQ ID NO: 1852646 - RNA, 14 nt, Human
accugaggggccuc

SEQ ID NO: 1852647 - RNA, 16 nt, Human
accugaggggccucuu

SEQ ID NO: 1852648 - RNA, 14 nt, Human
accugauugugucu

SEQ ID NO: 1852649 - RNA, 12 nt, Human
accugagcccca

SEQ ID NO: 1852650 - RNA, 17 nt, Human
accugagccccaaaagg

SEQ ID NO: 1852651 - RNA, 23 nt, Human
accugaggcccuucucuccagcc

SEQ ID NO: 1852652 - RNA, 17 nt, Human
accugaccccugacccc

SEQ ID NO: 1852653 - RNA, 22 nt, Human
accugaagcuaucguaaaauua

SEQ ID NO: 1852654 - RNA, 19 nt, Human
accugaauuuuggcugugu

SEQ ID NO: 1852655 - RNA, 18 nt, Human
accugaagacucauucuu

SEQ ID NO: 1852656 - RNA, 12 nt, Human
ucauaaugacuu

SEQ ID NO: 1852657 - RNA, 16 nt, Human
ucauaauaaguugcau

SEQ ID NO: 1852658 - RNA, 18 nt, Human
acgccaucccagccccaa

SEQ ID NO: 1852659 - RNA, 17 nt, Human
acgccaucccagcccca

SEQ ID NO: 1852660 - RNA, 16 nt, Human
acgccaucccagcccc

SEQ ID NO: 1852661 - RNA, 15 nt, Human
acgccaucccagccc

SEQ ID NO: 1852662 - RNA, 14 nt, Human
acgccaucccagcc

SEQ ID NO: 1852663 - RNA, 11 nt, Human
acgccauccca

SEQ ID NO: 1852664 - RNA, 23 nt, Human
acgccaggggaaaaucagccugc

SEQ ID NO: 1852665 - RNA, 18 nt, Human
acgccaggggaaaaucag

SEQ ID NO: 1852666 - RNA, 15 nt, Human
acgacugcccggcag

SEQ ID NO: 1852667 - RNA, 17 nt, Human
uccaggcugggagagcc

SEQ ID NO: 1852668 - RNA, 14 nt, Human
uccaggcugggaga

SEQ ID NO: 1852669 - RNA, 18 nt, Human
uccaggcugggagagccu

SEQ ID NO: 1852670 - RNA, 14 nt, Human
acgaauauugcuga

SEQ ID NO: 1852671 - RNA, 19 nt, Human
acggagucccaccuuggcu

SEQ ID NO: 1852672 - RNA, 17 nt, Human
acgcucucuggccuucg

SEQ ID NO: 1852673 - RNA, 16 nt, Human
acggccaggccagagg

SEQ ID NO: 1852674 - RNA, 21 nt, Human
acggagucccaccuuggcugc

SEQ ID NO: 1852675 - RNA, 17 nt, Human
acgcuacccgggaaggg

SEQ ID NO: 1852676 - RNA, 13 nt, Human
acgcuacccggga

SEQ ID NO: 1852677 - RNA, 15 nt, Human
acgcucucuggccuu

SEQ ID NO: 1852678 - RNA, 16 nt, Human
acgcucucuggccuuc

SEQ ID NO: 1852679 - RNA, 18 nt, Human
acgcuacccgggaagggg

SEQ ID NO: 1852680 - RNA, 14 nt, Human
acgcccccacuggu

SEQ ID NO: 1852681 - RNA, 23 nt, Human
acgcgugcacacaccagagccca

SEQ ID NO: 1852682 - RNA, 14 nt, Human
uccagugagacagc

SEQ ID NO: 1852683 - RNA, 17 nt, Human
uccagugaggcucugcc

SEQ ID NO: 1852684 - RNA, 19 nt, Human
uccagugaggcucugcccu

SEQ ID NO: 1852685 - RNA, 18 nt, Human
uccagugaggcucugccc

SEQ ID NO: 1852686 - RNA, 20 nt, Human
uccagugaggcucugcccuu

SEQ ID NO: 1852687 - RNA, 15 nt, Human
acggcucacugcagc

SEQ ID NO: 1852688 - RNA, 14 nt, Human
acggcucacugcag

SEQ ID NO: 1852689 - RNA, 11 nt, Human
uccauccugag

SEQ ID NO: 1852690 - RNA, 20 nt, Human
uccaucucuuguuuaaauuc

SEQ ID NO: 1852691 - RNA, 22 nt, Human
uccaugaagauguagaggagaa

SEQ ID NO: 1852692 - RNA, 17 nt, Human
uccaugaguccccuguu

SEQ ID NO: 1852693 - RNA, 16 nt, Human
uccaugaguccccugu

SEQ ID NO: 1852694 - RNA, 15 nt, Human
uccaugaguccccug

SEQ ID NO: 1852695 - RNA, 14 nt, Human
ucccaccccacaca

SEQ ID NO: 1852696 - RNA, 11 nt, Human
ucccaccccac

SEQ ID NO: 1852697 - RNA, 19 nt, Human
ucccaccaacccucagagc

SEQ ID NO: 1852698 - RNA, 22 nt, Human
ucccacaggcccuuccucucca

SEQ ID NO: 1852699 - RNA, 21 nt, Human
ucccacaggcccuuccucucc

SEQ ID NO: 1852700 - RNA, 17 nt, Human
ucccacaggcccuuccu

SEQ ID NO: 1852701 - RNA, 15 nt, Human
ucccacaggcccuuc

SEQ ID NO: 1852702 - RNA, 14 nt, Human
ucccacaaaggaga

SEQ ID NO: 1852703 - RNA, 21 nt, Human
ucccaaagugcugggauuaca

SEQ ID NO: 1852704 - RNA, 20 nt, Human
ucccaaagugcugggauuac

SEQ ID NO: 1852705 - RNA, 16 nt, Human
ucccaaagugcuggga

SEQ ID NO: 1852706 - RNA, 15 nt, Human
ucccaaagugcuggg

SEQ ID NO: 1852707 - RNA, 17 nt, Human
uauuuuaauaaacacuc

SEQ ID NO: 1852708 - RNA, 14 nt, Human
uauuuuaauaaaca

SEQ ID NO: 1852709 - RNA, 20 nt, Human
uauuuugcuuugugauuuuu

SEQ ID NO: 1852710 - RNA, 13 nt, Human
uauuuugcuuugu

SEQ ID NO: 1852711 - RNA, 15 nt, Human
uauuuugcuuuguga

SEQ ID NO: 1852712 - RNA, 17 nt, Human
uauuuuuguagagccag

SEQ ID NO: 1852713 - RNA, 20 nt, Human
uauuuuguguuuaggaacua

SEQ ID NO: 1852714 - RNA, 17 nt, Human
uauuuuguguuuaggaa

SEQ ID NO: 1852715 - RNA, 19 nt, Human
acaucuuggucagauuuga

SEQ ID NO: 1852716 - RNA, 22 nt, Human
acaucuugcucugcugacagac

SEQ ID NO: 1852717 - RNA, 17 nt, Human
acaucuugcucugcuga

SEQ ID NO: 1852718 - RNA, 19 nt, Human
uaugugccagauuuaugca

SEQ ID NO: 1852719 - RNA, 14 nt, Human
uaugugccagauuu

SEQ ID NO: 1852720 - RNA, 15 nt, Human
acaucuugcucugcu

SEQ ID NO: 1852721 - RNA, 16 nt, Human
acaucuugcucugcug

SEQ ID NO: 1852722 - RNA, 15 nt, Human
acaugaaaacacauu

SEQ ID NO: 1852723 - RNA, 16 nt, Human
acaugaaaacacauuu

SEQ ID NO: 1852724 - RNA, 22 nt, Human
uauuuuaagacgaaacauuugu

SEQ ID NO: 1852725 - RNA, 14 nt, Human
uauuuuaagacgaa

SEQ ID NO: 1852726 - RNA, 16 nt, Human
acaugagguacugaga

SEQ ID NO: 1852727 - RNA, 14 nt, Human
acauggaaguacua

SEQ ID NO: 1852728 - RNA, 18 nt, Human
acauggaauaacauguaa

SEQ ID NO: 1852729 - RNA, 20 nt, Human
acauggaauaacauguaauu

SEQ ID NO: 1852730 - RNA, 23 nt, Human
acaugagcaucaggccaggcccu

SEQ ID NO: 1852731 - RNA, 19 nt, Human
acauggaguauaugucaag

SEQ ID NO: 1852732 - RNA, 15 nt, Human
acauggaguauaugu

SEQ ID NO: 1852733 - RNA, 14 nt, Human
acauggccuuugcu

SEQ ID NO: 1852734 - RNA, 21 nt, Human
acaugucuuuucuugcaugag

SEQ ID NO: 1852735 - RNA, 16 nt, Human
ucaaaagcugggcagg

SEQ ID NO: 1852736 - RNA, 13 nt, Human
ucaaagauauuuu

SEQ ID NO: 1852737 - RNA, 20 nt, Human
ucaaagauauuuugcuuugu

SEQ ID NO: 1852738 - RNA, 22 nt, Human
ucaaagauauuuugcuuuguga

SEQ ID NO: 1852739 - RNA, 23 nt, Human
ucaaagcaaaugucuuccuggau

SEQ ID NO: 1852740 - RNA, 15 nt, Human
ucaaagcaaaugucu

SEQ ID NO: 1852741 - RNA, 13 nt, Human
ucaaauauauuca

SEQ ID NO: 1852742 - RNA, 23 nt, Human
acaugaaaacacauuuuucuuag

SEQ ID NO: 1852743 - RNA, 22 nt, Human
acaugaaaacacauuuuucuua

SEQ ID NO: 1852744 - RNA, 13 nt, Human
acaugagcaucag

SEQ ID NO: 1852745 - RNA, 12 nt, Human
ucaauuuaaaaa

SEQ ID NO: 1852746 - RNA, 13 nt, Human
ucaauuuaaaaaa

SEQ ID NO: 1852747 - RNA, 21 nt, Human
ucacagaacccuuggagccaa

SEQ ID NO: 1852748 - RNA, 16 nt, Human
ucacagccacuuggga

SEQ ID NO: 1852749 - RNA, 14 nt, Human
ucacagaugggugc

SEQ ID NO: 1852750 - RNA, 15 nt, Human
ucacagaugggugcu

SEQ ID NO: 1852751 - RNA, 16 nt, Human
ucacauauugauuucc

SEQ ID NO: 1852752 - RNA, 18 nt, Human
ucacauauugauuuccgu

SEQ ID NO: 1852753 - RNA, 20 nt, Human
ucacauauugauuuccguua

SEQ ID NO: 1852754 - RNA, 17 nt, Human
ucaccagccccagugcc

SEQ ID NO: 1852755 - RNA, 17 nt, Human
accacacagaggcugcc

SEQ ID NO: 1852756 - RNA, 15 nt, Human
accacacccagccca

SEQ ID NO: 1852757 - RNA, 16 nt, Human
accacacccagcccac

SEQ ID NO: 1852758 - RNA, 20 nt, Human
accacacccagcccacuucu

SEQ ID NO: 1852759 - RNA, 21 nt, Human
accacacccagcccacuucug

SEQ ID NO: 1852760 - RNA, 23 nt, Human
accacacccagcccacuucugcc

SEQ ID NO: 1852761 - RNA, 15 nt, Human
accaacccucagagc

SEQ ID NO: 1852762 - RNA, 19 nt, Human
accaaaucagcugcuacua

SEQ ID NO: 1852763 - RNA, 16 nt, Human
accaaaucagcugcua

SEQ ID NO: 1852764 - RNA, 16 nt, Human
accaacauacucccau

SEQ ID NO: 1852765 - RNA, 17 nt, Human
accaacauacucccauc

SEQ ID NO: 1852766 - RNA, 20 nt, Human
accaaccacugcgaccacaa

SEQ ID NO: 1852767 - RNA, 21 nt, Human
acauugcggacagccacggcc

SEQ ID NO: 1852768 - RNA, 22 nt, Human
acauugcggacagccacggcca

SEQ ID NO: 1852769 - RNA, 18 nt, Human
acauuuuacuuuuuccug

SEQ ID NO: 1852770 - RNA, 15 nt, Human
acauuuuuaagugcu

SEQ ID NO: 1852771 - RNA, 18 nt, Human
acauuuuuaagugcugca

SEQ ID NO: 1852772 - RNA, 19 nt, Human
acauuuuuaagugcugcau

SEQ ID NO: 1852773 - RNA, 21 nt, Human
acauuuuucagauauaaaaga

SEQ ID NO: 1852774 - RNA, 13 nt, Human
acauuuuucuuag

SEQ ID NO: 1852775 - RNA, 23 nt, Human
acauuuuucuuagggaaggauac

SEQ ID NO: 1852776 - RNA, 19 nt, Human
ucaaguaauccaccugccu

SEQ ID NO: 1852777 - RNA, 22 nt, Human
ucaagugauucucaugccucag

SEQ ID NO: 1852778 - RNA, 21 nt, Human
ucaagugauucucaugccuca

SEQ ID NO: 1852779 - RNA, 16 nt, Human
ucaagugauucuccug

SEQ ID NO: 1852780 - RNA, 19 nt, Human
ucaauaggaaaaacugauu

SEQ ID NO: 1852781 - RNA, 18 nt, Human
ucaauaggaaaaacugau

SEQ ID NO: 1852782 - RNA, 17 nt, Human
ucaagugauucuccugc

SEQ ID NO: 1852783 - RNA, 17 nt, Human
ucaauaggaaaaacuga

SEQ ID NO: 1852784 - RNA, 22 nt, Human
ucaauaggaaaaacugauuuuu

SEQ ID NO: 1852785 - RNA, 17 nt, Human
ucaagcaagauuucaga

SEQ ID NO: 1852786 - RNA, 21 nt, Human
ucaagagggcacugguggccc

SEQ ID NO: 1852787 - RNA, 20 nt, Human
ucaagagggcacugguggcc

SEQ ID NO: 1852788 - RNA, 17 nt, Human
ucaagagggucugagga

SEQ ID NO: 1852789 - RNA, 17 nt, Human
ucaggguuggccccugc

SEQ ID NO: 1852790 - RNA, 23 nt, Human
ucaggggugugcggccuuuggcu

SEQ ID NO: 1852791 - RNA, 19 nt, Human
ucaggggugugcggccuuu

SEQ ID NO: 1852792 - RNA, 12 nt, Human
ucaggggugugc

SEQ ID NO: 1852793 - RNA, 18 nt, Human
ucaggccaggcccucugc

SEQ ID NO: 1852794 - RNA, 17 nt, Human
ucaggccaggcccucug

SEQ ID NO: 1852795 - RNA, 19 nt, Human
ucaggccaggcccucugcc

SEQ ID NO: 1852796 - RNA, 19 nt, Human
acccgcuaagagggaggga

SEQ ID NO: 1852797 - RNA, 21 nt, Human
ucagguaaucgaccugccucg

SEQ ID NO: 1852798 - RNA, 20 nt, Human
ucagguaaucgaccugccuc

SEQ ID NO: 1852799 - RNA, 19 nt, Human
ucagguaaucgaccugccu

SEQ ID NO: 1852800 - RNA, 18 nt, Human
ucagguaaucgaccugcc

SEQ ID NO: 1852801 - RNA, 23 nt, Human
ucaggguuggccccugcccggcu

SEQ ID NO: 1852802 - RNA, 18 nt, Human
ucaggguuggccccugcc

SEQ ID NO: 1852803 - RNA, 19 nt, Human
ucaggguuggccccugccc

SEQ ID NO: 1852804 - RNA, 16 nt, Human
ucaggccaggcccucu

SEQ ID NO: 1852805 - RNA, 15 nt, Human
ucaggccaggcccuc

SEQ ID NO: 1852806 - RNA, 14 nt, Human
ucaggccaggcccu

SEQ ID NO: 1852807 - RNA, 13 nt, Human
ucaggccaggccc

SEQ ID NO: 1852808 - RNA, 14 nt, Human
ucaggccagcugcu

SEQ ID NO: 1852809 - RNA, 13 nt, Human
ucaggccagcugc

SEQ ID NO: 1852810 - RNA, 13 nt, Human
ucaggccacuuga

SEQ ID NO: 1852811 - RNA, 18 nt, Human
ucaggcaggugggaugga

SEQ ID NO: 1852812 - RNA, 17 nt, Human
ucaggcaggugggaugg

SEQ ID NO: 1852813 - RNA, 12 nt, Human
acccccagccug

SEQ ID NO: 1852814 - RNA, 13 nt, Human
acccccagccugc

SEQ ID NO: 1852815 - RNA, 23 nt, Human
acccugaggcccagagggccugc

SEQ ID NO: 1852816 - RNA, 21 nt, Human
acccugaggcccagagggccu

SEQ ID NO: 1852817 - RNA, 19 nt, Human
acccugaggcccagagggc

SEQ ID NO: 1852818 - RNA, 13 nt, Human
acccugaggccca

SEQ ID NO: 1852819 - RNA, 11 nt, Human
acccugaggcc

SEQ ID NO: 1852820 - RNA, 18 nt, Human
acccucgaggcggaucuu

SEQ ID NO: 1852821 - RNA, 14 nt, Human
acccucgaggcgga

SEQ ID NO: 1852822 - RNA, 20 nt, Human
acccgggaagggggcuggga

SEQ ID NO: 1852823 - RNA, 19 nt, Human
acccgggaagggggcuggg

SEQ ID NO: 1852824 - RNA, 15 nt, Human
acccggaggggccug

SEQ ID NO: 1852825 - RNA, 22 nt, Human
acccgggaagggggcugggaca

SEQ ID NO: 1852826 - RNA, 14 nt, Human
acccucauguucuu

SEQ ID NO: 1852827 - RNA, 15 nt, Human
acccucauguucuua

SEQ ID NO: 1852828 - RNA, 17 nt, Human
acccucauguucuuaau

SEQ ID NO: 1852829 - RNA, 15 nt, Human
acccgggaggcagag

SEQ ID NO: 1852830 - RNA, 21 nt, Human
acccuccuuucaccacaugug

SEQ ID NO: 1852831 - RNA, 22 nt, Human
accgaaaacguggcugcuucaa

SEQ ID NO: 1852832 - RNA, 21 nt, Human
accgaaaacguggcugcuuca

SEQ ID NO: 1852833 - RNA, 22 nt, Human
ucagguggggucacucuggcag

SEQ ID NO: 1852834 - RNA, 23 nt, Human
ucagguggggucacucuggcagc

SEQ ID NO: 1852835 - RNA, 15 nt, Human
ucaggugucccugca

SEQ ID NO: 1852836 - RNA, 17 nt, Human
ucaggugucccugcacu

SEQ ID NO: 1852837 - RNA, 18 nt, Human
ucaggugucccugcacuu

SEQ ID NO: 1852838 - RNA, 20 nt, Human
acccuugccgucuaccugag

SEQ ID NO: 1852839 - RNA, 15 nt, Human
acccuugugguccca

SEQ ID NO: 1852840 - RNA, 20 nt, Human
accgaaaacguggcugcuuc

SEQ ID NO: 1852841 - RNA, 13 nt, Human
ucaguaagccgug

SEQ ID NO: 1852842 - RNA, 13 nt, Human
ucaguaauaacuc

SEQ ID NO: 1852843 - RNA, 22 nt, Human
ucagguugucugaagucacugc

SEQ ID NO: 1852844 - RNA, 22 nt, Human
ucaggugucccugcacuugcag

SEQ ID NO: 1852845 - RNA, 19 nt, Human
ucaguuguuagugugucuu

SEQ ID NO: 1852846 - RNA, 18 nt, Human
ucauaaauaaaguuuguu

SEQ ID NO: 1852847 - RNA, 13 nt, Human
ucauaacuagaac

SEQ ID NO: 1852848 - RNA, 24 nt, Human
ucauaaagcaggcagaacucaucu

SEQ ID NO: 1852849 - RNA, 15 nt, Human
ucauaacuagaacug

SEQ ID NO: 1852850 - RNA, 23 nt, Human
ucagugccuuauggaacacucug

SEQ ID NO: 1852851 - RNA, 22 nt, Human
ucagugccuuauggaacacucu

SEQ ID NO: 1852852 - RNA, 20 nt, Human
ucagugccuuauggaacacu

SEQ ID NO: 1852853 - RNA, 19 nt, Human
ucagugccuuauggaacac

SEQ ID NO: 1852854 - RNA, 14 nt, Human
ucaguggcagcugc

SEQ ID NO: 1852855 - RNA, 15 nt, Human
ucaguggcagcugcu

SEQ ID NO: 1852856 - RNA, 16 nt, Human
ucaguggcagcugcuu

SEQ ID NO: 1852857 - RNA, 15 nt, Human
ucagugcuucgcaga

SEQ ID NO: 1852858 - RNA, 12 nt, Human
ucagaauucuca

SEQ ID NO: 1852859 - RNA, 10 nt, Human
ucagaauucu

SEQ ID NO: 1852860 - RNA, 20 nt, Human
ucagaauucucagaaucuca

SEQ ID NO: 1852861 - RNA, 22 nt, Human
ucagagacuccugcaggcagcc

SEQ ID NO: 1852862 - RNA, 16 nt, Human
ucagaauagaaauuag

SEQ ID NO: 1852863 - RNA, 23 nt, Human
ucagaaguuucugccgcagcccu

SEQ ID NO: 1852864 - RNA, 15 nt, Human
acccagcccacuucu

SEQ ID NO: 1852865 - RNA, 23 nt, Human
ucagagacuccugcaggcagcca

SEQ ID NO: 1852866 - RNA, 16 nt, Human
ucagagacuccugcag

SEQ ID NO: 1852867 - RNA, 21 nt, Human
ucagagccaccccuaaagaga

SEQ ID NO: 1852868 - RNA, 21 nt, Human
ucagaugcugugcaaauguua

SEQ ID NO: 1852869 - RNA, 16 nt, Human
ucagaucucuaacuuc

SEQ ID NO: 1852870 - RNA, 13 nt, Human
accccagguuucu

SEQ ID NO: 1852871 - RNA, 22 nt, Human
accccagcuggggccaggcugg

SEQ ID NO: 1852872 - RNA, 19 nt, Human
accccagcuggggccaggc

SEQ ID NO: 1852873 - RNA, 23 nt, Human
acccaggugcuaggaacacuccu

SEQ ID NO: 1852874 - RNA, 11 nt, Human
acccaggugcu

SEQ ID NO: 1852875 - RNA, 13 nt, Human
acccaggagcccc

SEQ ID NO: 1852876 - RNA, 15 nt, Human
acccaggagccccga

SEQ ID NO: 1852877 - RNA, 13 nt, Human
acccagcgagccc

SEQ ID NO: 1852878 - RNA, 16 nt, Human
acccagcgagcccugg

SEQ ID NO: 1852879 - RNA, 17 nt, Human
acccagcgagcccuggu

SEQ ID NO: 1852880 - RNA, 21 nt, Human
accauucuccaccugccaggg

SEQ ID NO: 1852881 - RNA, 20 nt, Human
accauucuccaccugccagg

SEQ ID NO: 1852882 - RNA, 19 nt, Human
accauucuccaccugccag

SEQ ID NO: 1852883 - RNA, 18 nt, Human
accauguuggccaggcug

SEQ ID NO: 1852884 - RNA, 22 nt, Human
accauuuugcugucccuuuucc

SEQ ID NO: 1852885 - RNA, 23 nt, Human
accauuuugcugucccuuuuccu

SEQ ID NO: 1852886 - RNA, 21 nt, Human
accauuuugggguacccacug

SEQ ID NO: 1852887 - RNA, 21 nt, Human
acccagauaaagguucaugca

SEQ ID NO: 1852888 - RNA, 21 nt, Human
acccacuggacucaccucccc

SEQ ID NO: 1852889 - RNA, 17 nt, Human
acccacuggacucaccu

SEQ ID NO: 1852890 - RNA, 14 nt, Human
acccacuggacuca

SEQ ID NO: 1852891 - RNA, 20 nt, Human
acccacugcuuuuggucugu

SEQ ID NO: 1852892 - RNA, 16 nt, Human
acccaaauguucauca

SEQ ID NO: 1852893 - RNA, 20 nt, Human
acccaaauguucaucaauga

SEQ ID NO: 1852894 - RNA, 22 nt, Human
accauuuugggguacccacugc

SEQ ID NO: 1852895 - RNA, 15 nt, Human
ucacuguugcccagg

SEQ ID NO: 1852896 - RNA, 15 nt, Human
ucacugcacagugca

SEQ ID NO: 1852897 - RNA, 17 nt, Human
ucacugcaacuucugcc

SEQ ID NO: 1852898 - RNA, 18 nt, Human
ucacugcaacuucugccu

SEQ ID NO: 1852899 - RNA, 14 nt, Human
ucacuguugcccag

SEQ ID NO: 1852900 - RNA, 21 nt, Human
ucacugcaaccuucgccaccu

SEQ ID NO: 1852901 - RNA, 18 nt, Human
ucacugcaaccuccgccu

SEQ ID NO: 1852902 - RNA, 23 nt, Human
ucacugagacagcccgggcucug

SEQ ID NO: 1852903 - RNA, 22 nt, Human
ucaccagccccagugcccacag

SEQ ID NO: 1852904 - RNA, 21 nt, Human
ucacuauguugcccaggcagg

SEQ ID NO: 1852905 - RNA, 16 nt, Human
ucucaaaaaaagaaaa

SEQ ID NO: 1852906 - RNA, 16 nt, Human
ucuauuguuucuuuca

SEQ ID NO: 1852907 - RNA, 13 nt, Human
ucucacuccuacc

SEQ ID NO: 1852908 - RNA, 18 nt, Human
ucucacuccuaccuggua

SEQ ID NO: 1852909 - RNA, 17 nt, Human
ucucacuccuaccuggu

SEQ ID NO: 1852910 - RNA, 16 nt, Human
ucucacuccuaccugg

SEQ ID NO: 1852911 - RNA, 20 nt, Human
acuucgggaggucgaggcag

SEQ ID NO: 1852912 - RNA, 17 nt, Human
acuucgggaggucgagg

SEQ ID NO: 1852913 - RNA, 22 nt, Human
acuucgggaggucgaggcagga

SEQ ID NO: 1852914 - RNA, 18 nt, Human
acuucuccacccugcucu

SEQ ID NO: 1852915 - RNA, 14 nt, Human
acuugucuuuggac

SEQ ID NO: 1852916 - RNA, 15 nt, Human
acuuguauuaugugu

SEQ ID NO: 1852917 - RNA, 14 nt, Human
acuuguauuaugug

SEQ ID NO: 1852918 - RNA, 13 nt, Human
acuuguauuaugu

SEQ ID NO: 1852919 - RNA, 14 nt, Human
acuuguaugaaaga

SEQ ID NO: 1852920 - RNA, 14 nt, Human
acuuggaagcuccg

SEQ ID NO: 1852921 - RNA, 23 nt, Human
acuugaacccgggaggcagaggu

SEQ ID NO: 1852922 - RNA, 18 nt, Human
acuugaaaauuaacauga

SEQ ID NO: 1852923 - RNA, 17 nt, Human
acuugaaaauuaacaug

SEQ ID NO: 1852924 - RNA, 19 nt, Human
acuugagaauuacccuuuu

SEQ ID NO: 1852925 - RNA, 24 nt, Human
ucuagauacuguaucaugacaaag

SEQ ID NO: 1852926 - RNA, 23 nt, Human
ucuaguuugauuaaauucuugca

SEQ ID NO: 1852927 - RNA, 13 nt, Human
ucuauaauuuaaa

SEQ ID NO: 1852928 - RNA, 17 nt, Human
acuuccacugccauccu

SEQ ID NO: 1852929 - RNA, 18 nt, Human
acuuccaauuuacauacu

SEQ ID NO: 1852930 - RNA, 17 nt, Human
acuuccauaaucuggac

SEQ ID NO: 1852931 - RNA, 20 nt, Human
acuucaggcucuucuccuuu

SEQ ID NO: 1852932 - RNA, 18 nt, Human
acuucaggcucuucuccu

SEQ ID NO: 1852933 - RNA, 17 nt, Human
acuucaggcucuucucc

SEQ ID NO: 1852934 - RNA, 13 nt, Human
acuuacuguacau

SEQ ID NO: 1852935 - RNA, 14 nt, Human
acuuacuguacaug

SEQ ID NO: 1852936 - RNA, 20 nt, Human
acuuagagguggggagcaga

SEQ ID NO: 1852937 - RNA, 15 nt, Human
acuuacuguacauga

SEQ ID NO: 1852938 - RNA, 19 nt, Human
ucuaccugaggggccucuu

SEQ ID NO: 1852939 - RNA, 12 nt, Human
ucuaccugaggg

SEQ ID NO: 1852940 - RNA, 16 nt, Human
acuucaggcucuucuc

SEQ ID NO: 1852941 - RNA, 18 nt, Human
ucgcccuggacugugugc

SEQ ID NO: 1852942 - RNA, 14 nt, Human
ucgcuccugugucu

SEQ ID NO: 1852943 - RNA, 15 nt, Human
acuggguacuugugg

SEQ ID NO: 1852944 - RNA, 22 nt, Human
acugggcuuggggaccagagcu

SEQ ID NO: 1852945 - RNA, 21 nt, Human
acugggcuuggggaccagagc

SEQ ID NO: 1852946 - RNA, 21 nt, Human
ucgcucuguugcccaggcugg

SEQ ID NO: 1852947 - RNA, 23 nt, Human
ucgcugugucagcauagaaguaa

SEQ ID NO: 1852948 - RNA, 20 nt, Human
acuguacaugaaaacacauu

SEQ ID NO: 1852949 - RNA, 21 nt, Human
acuguacaugaaaacacauuu

SEQ ID NO: 1852950 - RNA, 15 nt, Human
acuguacuugcucuu

SEQ ID NO: 1852951 - RNA, 20 nt, Human
acuguacuccucccaggcgc

SEQ ID NO: 1852952 - RNA, 14 nt, Human
acuguaucaugaca

SEQ ID NO: 1852953 - RNA, 23 nt, Human
acuguacuugcucuugaugccug

SEQ ID NO: 1852954 - RNA, 19 nt, Human
acuguacaugaaaacacau

SEQ ID NO: 1852955 - RNA, 16 nt, Human
acuguacaugaaaaca

SEQ ID NO: 1852956 - RNA, 18 nt, Human
acuguacagacagaaaaa

SEQ ID NO: 1852957 - RNA, 22 nt, Human
acuguacaaaguagaagucuua

SEQ ID NO: 1852958 - RNA, 16 nt, Human
acuguacaaaguagaa

SEQ ID NO: 1852959 - RNA, 17 nt, Human
acuggguacuuguggac

SEQ ID NO: 1852960 - RNA, 18 nt, Human
acuggguacuuguggaca

SEQ ID NO: 1852961 - RNA, 16 nt, Human
acuguaucaugacaaa

SEQ ID NO: 1852962 - RNA, 20 nt, Human
acuguaucaugacaaagacu

SEQ ID NO: 1852963 - RNA, 13 nt, Human
ucuaaaggcuacc

SEQ ID NO: 1852964 - RNA, 16 nt, Human
ucuaaaggcuaccuuu

SEQ ID NO: 1852965 - RNA, 17 nt, Human
ucuaaagcugccagccg

SEQ ID NO: 1852966 - RNA, 23 nt, Human
ucuaaacugcccccucugcccug

SEQ ID NO: 1852967 - RNA, 22 nt, Human
ucuaaacugcccccucugcccu

SEQ ID NO: 1852968 - RNA, 16 nt, Human
ucuaaacugcccccuc

SEQ ID NO: 1852969 - RNA, 13 nt, Human
ucuaaacugcccc

SEQ ID NO: 1852970 - RNA, 21 nt, Human
ucuacccucuuagaaaaacca

SEQ ID NO: 1852971 - RNA, 17 nt, Human
acuguuaauaguucagg

SEQ ID NO: 1852972 - RNA, 21 nt, Human
acuguuaauaguucagguaac

SEQ ID NO: 1852973 - RNA, 19 nt, Human
ucggggagaggcugaggac

SEQ ID NO: 1852974 - RNA, 13 nt, Human
ucguucucugccu

SEQ ID NO: 1852975 - RNA, 23 nt, Human
ucgucacugcuuaacuucacaua

SEQ ID NO: 1852976 - RNA, 21 nt, Human
ucucucaggccaaacucaccu

SEQ ID NO: 1852977 - RNA, 14 nt, Human
ucucuccauucccg

SEQ ID NO: 1852978 - RNA, 12 nt, Human
ucucucaggcca

SEQ ID NO: 1852979 - RNA, 15 nt, Human
ucucggcucacugca

SEQ ID NO: 1852980 - RNA, 17 nt, Human
ucucgaacuccugaccu

SEQ ID NO: 1852981 - RNA, 20 nt, Human
ucucgcuauugucaccaggg

SEQ ID NO: 1852982 - RNA, 17 nt, Human
ucucgcucuguugccca

SEQ ID NO: 1852983 - RNA, 23 nt, Human
ucuccuuggugucgggcaugaca

SEQ ID NO: 1852984 - RNA, 21 nt, Human
ucuccuuggugucgggcauga

SEQ ID NO: 1852985 - RNA, 15 nt, Human
ucuccuuagaagugg

SEQ ID NO: 1852986 - RNA, 21 nt, Human
ucuccuuagaaguggaaguag

SEQ ID NO: 1852987 - RNA, 20 nt, Human
ucuccuuaaagaguguggca

SEQ ID NO: 1852988 - RNA, 18 nt, Human
acuuuguguucaccuugu

SEQ ID NO: 1852989 - RNA, 16 nt, Human
acuuuguguucaccuu

SEQ ID NO: 1852990 - RNA, 23 nt, Human
acuuugaggguguauauuuucug

SEQ ID NO: 1852991 - RNA, 14 nt, Human
acuuuggaaagagu

SEQ ID NO: 1852992 - RNA, 13 nt, Human
acuuuggaaagag

SEQ ID NO: 1852993 - RNA, 12 nt, Human
acuuuggaaaga

SEQ ID NO: 1852994 - RNA, 23 nt, Human
acuuuggaaagaguaggaagacu

SEQ ID NO: 1852995 - RNA, 19 nt, Human
acuuuguauaaaagggacu

SEQ ID NO: 1852996 - RNA, 13 nt, Human
acuuuagggaagu

SEQ ID NO: 1852997 - RNA, 16 nt, Human
acuuguuuucugggaa

SEQ ID NO: 1852998 - RNA, 15 nt, Human
acuuguggacacagc

SEQ ID NO: 1852999 - RNA, 16 nt, Human
acuuuaaaaggagcca

SEQ ID NO: 1853000 - RNA, 14 nt, Human
acuuguggacacag

SEQ ID NO: 1853001 - RNA, 22 nt, Human
agaaagacuaucuaaauguuga

SEQ ID NO: 1853002 - RNA, 20 nt, Human
agaaagacuaucuaaauguu

SEQ ID NO: 1853003 - RNA, 17 nt, Human
agaaagcagaacaguga

SEQ ID NO: 1853004 - RNA, 18 nt, Human
agaaagcagaacagugau

SEQ ID NO: 1853005 - RNA, 20 nt, Human
agaaagcagaacagugauua

SEQ ID NO: 1853006 - RNA, 18 nt, Human
ucugaaggcuggguucug

SEQ ID NO: 1853007 - RNA, 15 nt, Human
agaaaugccuuaccc

SEQ ID NO: 1853008 - RNA, 20 nt, Human
agaaaugcugguuuuucagu

SEQ ID NO: 1853009 - RNA, 21 nt, Human
agaaaugcugguuuuucaguu

SEQ ID NO: 1853010 - RNA, 16 nt, Human
agaaaugaaaaaauau

SEQ ID NO: 1853011 - RNA, 13 nt, Human
agaaaugaaaaaa

SEQ ID NO: 1853012 - RNA, 12 nt, Human
agaaaugaaaaa

SEQ ID NO: 1853013 - RNA, 18 nt, Human
agaaaaaugagccuggca

SEQ ID NO: 1853014 - RNA, 23 nt, Human
agaaaaaauauuuuccugccagg

SEQ ID NO: 1853015 - RNA, 17 nt, Human
agaaaaaauauuuuccu

SEQ ID NO: 1853016 - RNA, 19 nt, Human
agaaaaaauauuuucccua

SEQ ID NO: 1853017 - RNA, 18 nt, Human
ucucuugguccugcugca

SEQ ID NO: 1853018 - RNA, 17 nt, Human
ucucuugguccugcugc

SEQ ID NO: 1853019 - RNA, 16 nt, Human
ucucuugguccugcug

SEQ ID NO: 1853020 - RNA, 22 nt, Human
ucucugcaggucccuaauaaag

SEQ ID NO: 1853021 - RNA, 21 nt, Human
ucucugcaggucccuaauaaa

SEQ ID NO: 1853022 - RNA, 20 nt, Human
ucucugcaggucccuaauaa

SEQ ID NO: 1853023 - RNA, 19 nt, Human
ucucugcaggucccuaaua

SEQ ID NO: 1853024 - RNA, 23 nt, Human
agaagcucccugaaguaagcaaa

SEQ ID NO: 1853025 - RNA, 22 nt, Human
agaaguuugagaucagccuggg

SEQ ID NO: 1853026 - RNA, 23 nt, Human
ucugcuuuuuaaagaaugcucuu

SEQ ID NO: 1853027 - RNA, 22 nt, Human
ucugcuuugggguuuaucagaa

SEQ ID NO: 1853028 - RNA, 14 nt, Human
ucugccugucuccc

SEQ ID NO: 1853029 - RNA, 12 nt, Human
ucugccugucuc

SEQ ID NO: 1853030 - RNA, 23 nt, Human
ucuggcagaguugaagacagagc

SEQ ID NO: 1853031 - RNA, 20 nt, Human
ucuggcagaguugaagacag

SEQ ID NO: 1853032 - RNA, 17 nt, Human
ucuggcagcucagagag

SEQ ID NO: 1853033 - RNA, 21 nt, Human
ucuggcagcucagagagggug

SEQ ID NO: 1853034 - RNA, 18 nt, Human
ucuggcagcucagagagg

SEQ ID NO: 1853035 - RNA, 10 nt, Human
ucuggccuuc

SEQ ID NO: 1853036 - RNA, 13 nt, Human
agaagcagcucuu

SEQ ID NO: 1853037 - RNA, 12 nt, Human
agaagcagcucu

SEQ ID NO: 1853038 - RNA, 16 nt, Human
agaagcagaggaagga

SEQ ID NO: 1853039 - RNA, 19 nt, Human
agaagcaacccaaauguuc

SEQ ID NO: 1853040 - RNA, 23 nt, Human
agaagcccaggaaaggcuccagg

SEQ ID NO: 1853041 - RNA, 20 nt, Human
ucugcccauccugccccuga

SEQ ID NO: 1853042 - RNA, 23 nt, Human
ucugcccacucccugcaaccuga

SEQ ID NO: 1853043 - RNA, 23 nt, Human
ucugcccuugguuaggcauugug

SEQ ID NO: 1853044 - RNA, 12 nt, Human
ucugcccuuggu

SEQ ID NO: 1853045 - RNA, 22 nt, Human
ucugcccugcgggucacaggag

SEQ ID NO: 1853046 - RNA, 23 nt, Human
agaaccuuuugagugccuuacac

SEQ ID NO: 1853047 - RNA, 19 nt, Human
agaaccuuuugagugccuu

SEQ ID NO: 1853048 - RNA, 17 nt, Human
agaacucccuuucaaca

SEQ ID NO: 1853049 - RNA, 16 nt, Human
agaacucccuuucaac

SEQ ID NO: 1853050 - RNA, 21 nt, Human
agaacugaauuuugucuuuau

SEQ ID NO: 1853051 - RNA, 12 nt, Human
agaaauuaugug

SEQ ID NO: 1853052 - RNA, 23 nt, Human
ucugcaggucccuaauaaagcug

SEQ ID NO: 1853053 - RNA, 22 nt, Human
ucugcaggucccuaauaaagcu

SEQ ID NO: 1853054 - RNA, 19 nt, Human
ucugcaggucccuaauaaa

SEQ ID NO: 1853055 - RNA, 21 nt, Human
ucugcaggucccuaauaaagc

SEQ ID NO: 1853056 - RNA, 22 nt, Human
agagccuuccaggggugggaca

SEQ ID NO: 1853057 - RNA, 17 nt, Human
agagccuuccaggggug

SEQ ID NO: 1853058 - RNA, 15 nt, Human
agagccuuccagggg

SEQ ID NO: 1853059 - RNA, 13 nt, Human
agagccuuccagg

SEQ ID NO: 1853060 - RNA, 20 nt, Human
agagcuagcagcagggaggg

SEQ ID NO: 1853061 - RNA, 14 nt, Human
agagcugccaccug

SEQ ID NO: 1853062 - RNA, 23 nt, Human
agagcaccuuagacagucccugc

SEQ ID NO: 1853063 - RNA, 21 nt, Human
agagcaccuuagacagucccu

SEQ ID NO: 1853064 - RNA, 22 nt, Human
agagcaccuuagacagucccug

SEQ ID NO: 1853065 - RNA, 22 nt, Human
agagacuccugcaggcagccag

SEQ ID NO: 1853066 - RNA, 21 nt, Human
agagacuccugcaggcagcca

SEQ ID NO: 1853067 - RNA, 20 nt, Human
agagacuccugcaggcagcc

SEQ ID NO: 1853068 - RNA, 19 nt, Human
agagacuccugcaggcagc

SEQ ID NO: 1853069 - RNA, 18 nt, Human
agagacuccugcaggcag

SEQ ID NO: 1853070 - RNA, 17 nt, Human
agagacuccugcaggca

SEQ ID NO: 1853071 - RNA, 11 nt, Human
agagacuccug

SEQ ID NO: 1853072 - RNA, 16 nt, Human
agagacuccagcuggg

SEQ ID NO: 1853073 - RNA, 15 nt, Human
ugaaagacuguacaa

SEQ ID NO: 1853074 - RNA, 13 nt, Human
ugaaagacuguac

SEQ ID NO: 1853075 - RNA, 23 nt, Human
agagcaagacgcugugcugcccu

SEQ ID NO: 1853076 - RNA, 19 nt, Human
agagcaagacgcugugcug

SEQ ID NO: 1853077 - RNA, 23 nt, Human
agagacuccugcaggcagccagg

SEQ ID NO: 1853078 - RNA, 22 nt, Human
agagaucaaccccuucgcuccu

SEQ ID NO: 1853079 - RNA, 22 nt, Human
ucuuuggucuacacugugcuga

SEQ ID NO: 1853080 - RNA, 16 nt, Human
ucuuuggugaacauug

SEQ ID NO: 1853081 - RNA, 22 nt, Human
ucuuuggugaacauugcaauag

SEQ ID NO: 1853082 - RNA, 20 nt, Human
ucuuucuggcuaugcauuug

SEQ ID NO: 1853083 - RNA, 21 nt, Human
ucuuucuggcuaugcauuuga

SEQ ID NO: 1853084 - RNA, 21 nt, Human
ucuuucugcagaaacagaaag

SEQ ID NO: 1853085 - RNA, 16 nt, Human
ugaaaaaggaggaaga

SEQ ID NO: 1853086 - RNA, 23 nt, Human
ugaaaaaauauauaucaaauaua

SEQ ID NO: 1853087 - RNA, 22 nt, Human
ugaaaaaguucugcagauaaac

SEQ ID NO: 1853088 - RNA, 22 nt, Human
ugaaaaaguauccugcuucuga

SEQ ID NO: 1853089 - RNA, 22 nt, Human
ugaaaaaggaggaagagaaaaa

SEQ ID NO: 1853090 - RNA, 20 nt, Human
ugaaaaaggaggaagagaaa

SEQ ID NO: 1853091 - RNA, 16 nt, Human
ugaaaaucgugacaac

SEQ ID NO: 1853092 - RNA, 16 nt, Human
ugaaacgcaaccacca

SEQ ID NO: 1853093 - RNA, 17 nt, Human
ugaaaauguauguguaa

SEQ ID NO: 1853094 - RNA, 19 nt, Human
ugaaaaucgugacaacacu

SEQ ID NO: 1853095 - RNA, 20 nt, Human
ugaaaaucuuauaauuuaaa

SEQ ID NO: 1853096 - RNA, 23 nt, Human
agaccuucuccuucaccuuuguc

SEQ ID NO: 1853097 - RNA, 21 nt, Human
agaccuucuccuucaccuuug

SEQ ID NO: 1853098 - RNA, 18 nt, Human
agaccuucuccuucaccu

SEQ ID NO: 1853099 - RNA, 15 nt, Human
agaccuucuccuuca

SEQ ID NO: 1853100 - RNA, 11 nt, Human
agaccuucucc

SEQ ID NO: 1853101 - RNA, 21 nt, Human
ucuugaugccuggcggggugg

SEQ ID NO: 1853102 - RNA, 13 nt, Human
ucuugauucauaa

SEQ ID NO: 1853103 - RNA, 16 nt, Human
ucuugagccugggagg

SEQ ID NO: 1853104 - RNA, 13 nt, Human
ucuugagccuggg

SEQ ID NO: 1853105 - RNA, 16 nt, Human
ucuugagccuugaacu

SEQ ID NO: 1853106 - RNA, 19 nt, Human
ucuugguccugcugcaguu

SEQ ID NO: 1853107 - RNA, 16 nt, Human
ucuuuaaaugcugcuu

SEQ ID NO: 1853108 - RNA, 17 nt, Human
ucuugguccugcugcag

SEQ ID NO: 1853109 - RNA, 15 nt, Human
ucuugguccugcugc

SEQ ID NO: 1853110 - RNA, 17 nt, Human
ucuuuccugaggcuggg

SEQ ID NO: 1853111 - RNA, 19 nt, Human
ucuuucuaaugugugaauc

SEQ ID NO: 1853112 - RNA, 18 nt, Human
ucuuucuaaugugugaau

SEQ ID NO: 1853113 - RNA, 16 nt, Human
ucuuuaugauuuuuaa

SEQ ID NO: 1853114 - RNA, 17 nt, Human
ucuuuauuaaauguaga

SEQ ID NO: 1853115 - RNA, 21 nt, Human
ucuuuauuaaauguagaaagu

SEQ ID NO: 1853116 - RNA, 14 nt, Human
ucuugguccugcug

SEQ ID NO: 1853117 - RNA, 17 nt, Human
ucuuggucagauuugaa

SEQ ID NO: 1853118 - RNA, 19 nt, Human
ucuugcaauggcagccuug

SEQ ID NO: 1853119 - RNA, 18 nt, Human
ucuugcaauggcagccuu

SEQ ID NO: 1853120 - RNA, 22 nt, Human
ucuugcaauggcagccuuggca

SEQ ID NO: 1853121 - RNA, 21 nt, Human
ucuucugaacuuggcgcugcc

SEQ ID NO: 1853122 - RNA, 12 nt, Human
ucuucugcuuca

SEQ ID NO: 1853123 - RNA, 19 nt, Human
ucuucugcuucagccuccc

SEQ ID NO: 1853124 - RNA, 20 nt, Human
ucuucuguggguuucuaaag

SEQ ID NO: 1853125 - RNA, 18 nt, Human
ucuucuggguuccuuccu

SEQ ID NO: 1853126 - RNA, 15 nt, Human
ucuucuguacgucug

SEQ ID NO: 1853127 - RNA, 20 nt, Human
ucuucuguacgucugacagg

SEQ ID NO: 1853128 - RNA, 21 nt, Human
agacauagaauuaacacauga

SEQ ID NO: 1853129 - RNA, 19 nt, Human
agacauacuaaccagcaga

SEQ ID NO: 1853130 - RNA, 17 nt, Human
agacaucaacagauaaa

SEQ ID NO: 1853131 - RNA, 18 nt, Human
agacaucaacagauaaau

SEQ ID NO: 1853132 - RNA, 22 nt, Human
ucuucccuacaguugaaaaaca

SEQ ID NO: 1853133 - RNA, 19 nt, Human
ucuucccuacaguugaaaa

SEQ ID NO: 1853134 - RNA, 14 nt, Human
ucuuccucccuccc

SEQ ID NO: 1853135 - RNA, 15 nt, Human
ucuuccucccucccu

SEQ ID NO: 1853136 - RNA, 14 nt, Human
ucuuccucugcuga

SEQ ID NO: 1853137 - RNA, 12 nt, Human
ucuuccucugcu

SEQ ID NO: 1853138 - RNA, 11 nt, Human
ucuuccucugc

SEQ ID NO: 1853139 - RNA, 14 nt, Human
agaaucacuugaac

SEQ ID NO: 1853140 - RNA, 15 nt, Human
ucuucaacucccugc

SEQ ID NO: 1853141 - RNA, 19 nt, Human
ucuucaacugaccagccuc

SEQ ID NO: 1853142 - RNA, 16 nt, Human
ucuucaacugaccagc

SEQ ID NO: 1853143 - RNA, 12 nt, Human
ucuucagagacu

SEQ ID NO: 1853144 - RNA, 18 nt, Human
ucuucagagacuccugca

SEQ ID NO: 1853145 - RNA, 17 nt, Human
ucuucagagacuccugc

SEQ ID NO: 1853146 - RNA, 20 nt, Human
ucuuccaggcugggagagcc

SEQ ID NO: 1853147 - RNA, 17 nt, Human
ucuuccaggcugggaga

SEQ ID NO: 1853148 - RNA, 15 nt, Human
ucuuccaggcuggga

SEQ ID NO: 1853149 - RNA, 20 nt, Human
ucuucagagacuccugcagg

SEQ ID NO: 1853150 - RNA, 21 nt, Human
ucuuccaggcugggagagccu

SEQ ID NO: 1853151 - RNA, 16 nt, Human
agagggagggagggcu

SEQ ID NO: 1853152 - RNA, 20 nt, Human
agagggagggagggcuccag

SEQ ID NO: 1853153 - RNA, 12 nt, Human
ugaagccuuugu

SEQ ID NO: 1853154 - RNA, 20 nt, Human
ugaagcuaucguaaaauuaa

SEQ ID NO: 1853155 - RNA, 16 nt, Human
agagguggggagcaga

SEQ ID NO: 1853156 - RNA, 15 nt, Human
agagguuaagguggg

SEQ ID NO: 1853157 - RNA, 15 nt, Human
ugaauacuuuauaaa

SEQ ID NO: 1853158 - RNA, 16 nt, Human
ugaauaaagacaccua

SEQ ID NO: 1853159 - RNA, 21 nt, Human
ugaagucacugcacagugcau

SEQ ID NO: 1853160 - RNA, 16 nt, Human
ugaagucacugcacag

SEQ ID NO: 1853161 - RNA, 15 nt, Human
ugaagucacugcaca

SEQ ID NO: 1853162 - RNA, 14 nt, Human
ugaagucacugcac

SEQ ID NO: 1853163 - RNA, 14 nt, Human
ugaagucacacagu

SEQ ID NO: 1853164 - RNA, 20 nt, Human
agauauuuugcuuugugauu

SEQ ID NO: 1853165 - RNA, 21 nt, Human
agauauuuugcuuugugauuu

SEQ ID NO: 1853166 - RNA, 18 nt, Human
agaucaaaagguuaauaa

SEQ ID NO: 1853167 - RNA, 15 nt, Human
agauacuguaucaug

SEQ ID NO: 1853168 - RNA, 16 nt, Human
agauacuguaucauga

SEQ ID NO: 1853169 - RNA, 22 nt, Human
agauaauauuaaggaagacaau

SEQ ID NO: 1853170 - RNA, 18 nt, Human
agauaauauuaaggaaga

SEQ ID NO: 1853171 - RNA, 13 nt, Human
agauacaguuacu

SEQ ID NO: 1853172 - RNA, 20 nt, Human
agauacaggaaaagcugcug

SEQ ID NO: 1853173 - RNA, 11 nt, Human
agauacuguau

SEQ ID NO: 1853174 - RNA, 22 nt, Human
agauacaguuacucagaauucu

SEQ ID NO: 1853175 - RNA, 15 nt, Human
agagucacuggaaca

SEQ ID NO: 1853176 - RNA, 22 nt, Human
agagucagaaguuucugccgca

SEQ ID NO: 1853177 - RNA, 17 nt, Human
agaguuguuacauuuuu

SEQ ID NO: 1853178 - RNA, 19 nt, Human
agaguuguuacauuuuuaa

SEQ ID NO: 1853179 - RNA, 20 nt, Human
agaguuguuacauuuuuaag

SEQ ID NO: 1853180 - RNA, 17 nt, Human
agauaaggguaucuggu

SEQ ID NO: 1853181 - RNA, 18 nt, Human
agauaauacaccacuaca

SEQ ID NO: 1853182 - RNA, 22 nt, Human
ugacacagucuuggcucacugc

SEQ ID NO: 1853183 - RNA, 23 nt, Human
ugacacagucuuggcucacugca

SEQ ID NO: 1853184 - RNA, 19 nt, Human
ugacacacagcucuguccu

SEQ ID NO: 1853185 - RNA, 20 nt, Human
ugacacacagcucuguccug

SEQ ID NO: 1853186 - RNA, 19 nt, Human
ugacaaagacugaguacgu

SEQ ID NO: 1853187 - RNA, 16 nt, Human
ugacacacagcucugu

SEQ ID NO: 1853188 - RNA, 18 nt, Human
ugacacacagcucugucc

SEQ ID NO: 1853189 - RNA, 12 nt, Human
ugacacaugcaa

SEQ ID NO: 1853190 - RNA, 20 nt, Human
ugacacaugcaaggucauuu

SEQ ID NO: 1853191 - RNA, 21 nt, Human
ugaauuugugaagguggaaau

SEQ ID NO: 1853192 - RNA, 13 nt, Human
ugaauuugugaag

SEQ ID NO: 1853193 - RNA, 23 nt, Human
ugaauuucuuuugccguuauuaa

SEQ ID NO: 1853194 - RNA, 23 nt, Human
ugaauuugugaagguggaaauaa

SEQ ID NO: 1853195 - RNA, 22 nt, Human
agcaagacgcugugcugcccug

SEQ ID NO: 1853196 - RNA, 21 nt, Human
agcaagacgcugugcugcccu

SEQ ID NO: 1853197 - RNA, 20 nt, Human
agcaagacgcugugcugccc

SEQ ID NO: 1853198 - RNA, 17 nt, Human
agcaagacgcugugcug

SEQ ID NO: 1853199 - RNA, 23 nt, Human
agcaagacgcugugcugcccugc

SEQ ID NO: 1853200 - RNA, 14 nt, Human
agcaagauuucaga

SEQ ID NO: 1853201 - RNA, 20 nt, Human
ugagaagcagaggaaggaga

SEQ ID NO: 1853202 - RNA, 16 nt, Human
agcaagacgcugugcu

SEQ ID NO: 1853203 - RNA, 13 nt, Human
agcaagacgcugu

SEQ ID NO: 1853204 - RNA, 13 nt, Human
agauuggaaggaa

SEQ ID NO: 1853205 - RNA, 19 nt, Human
agauuccagagaguggcuc

SEQ ID NO: 1853206 - RNA, 19 nt, Human
ugacuuacuguacaugaaa

SEQ ID NO: 1853207 - RNA, 22 nt, Human
agauucauauuuacuucuuaua

SEQ ID NO: 1853208 - RNA, 18 nt, Human
agauuccagagaguggcu

SEQ ID NO: 1853209 - RNA, 20 nt, Human
agauuucucauuugccaaua

SEQ ID NO: 1853210 - RNA, 17 nt, Human
agauuugaacucuucaa

SEQ ID NO: 1853211 - RNA, 21 nt, Human
agauuuugaaauuuuuauuaa

SEQ ID NO: 1853212 - RNA, 17 nt, Human
ugacacuuaaaaauggu

SEQ ID NO: 1853213 - RNA, 16 nt, Human
ugacacuuaaaaaugg

SEQ ID NO: 1853214 - RNA, 23 nt, Human
agaugcugacuguacuccuccca

SEQ ID NO: 1853215 - RNA, 20 nt, Human
agaugcugacuguacuccuc

SEQ ID NO: 1853216 - RNA, 16 nt, Human
agaugccgcauuugga

SEQ ID NO: 1853217 - RNA, 16 nt, Human
ugacccaugcugcccu

SEQ ID NO: 1853218 - RNA, 12 nt, Human
ugacccaugcug

SEQ ID NO: 1853219 - RNA, 21 nt, Human
ugacccaugcugcccugugag

SEQ ID NO: 1853220 - RNA, 15 nt, Human
ugacccaugcugccc

SEQ ID NO: 1853221 - RNA, 14 nt, Human
ugacccaugcugcc

SEQ ID NO: 1853222 - RNA, 13 nt, Human
ugacuuacuguac

SEQ ID NO: 1853223 - RNA, 15 nt, Human
ugacuuacuguacau

SEQ ID NO: 1853224 - RNA, 16 nt, Human
ugacuuacuguacaug

SEQ ID NO: 1853225 - RNA, 19 nt, Human
ugaccugaggcccuucucu

SEQ ID NO: 1853226 - RNA, 18 nt, Human
ugaccugaggcccuucuc

SEQ ID NO: 1853227 - RNA, 23 nt, Human
ugaccccucauagcccucacccu

SEQ ID NO: 1853228 - RNA, 23 nt, Human
ugauauuuucaacgcagcccugc

SEQ ID NO: 1853229 - RNA, 22 nt, Human
ugauauuuucaacgcagcccug

SEQ ID NO: 1853230 - RNA, 21 nt, Human
ugauauuuucaacgcagcccu

SEQ ID NO: 1853231 - RNA, 19 nt, Human
ugauauuuucaacgcagcc

SEQ ID NO: 1853232 - RNA, 19 nt, Human
ugauauguugguagauucu

SEQ ID NO: 1853233 - RNA, 22 nt, Human
agcauauucaggaagcucaggg

SEQ ID NO: 1853234 - RNA, 20 nt, Human
ugaucacggcucacugcagc

SEQ ID NO: 1853235 - RNA, 21 nt, Human
ugaucacggcucacugcagcc

SEQ ID NO: 1853236 - RNA, 13 nt, Human
agcaucaggccag

SEQ ID NO: 1853237 - RNA, 20 nt, Human
agcaucacaugaacuuguaa

SEQ ID NO: 1853238 - RNA, 19 nt, Human
ugaucacggcucacugcag

SEQ ID NO: 1853239 - RNA, 20 nt, Human
agcaucaggccaggcccucu

SEQ ID NO: 1853240 - RNA, 19 nt, Human
agcaucaggccaggcccuc

SEQ ID NO: 1853241 - RNA, 18 nt, Human
agcaucaggccaggcccu

SEQ ID NO: 1853242 - RNA, 17 nt, Human
agcaucaggccaggccc

SEQ ID NO: 1853243 - RNA, 16 nt, Human
agcaucaggccaggcc

SEQ ID NO: 1853244 - RNA, 14 nt, Human
agcaucaggccagg

SEQ ID NO: 1853245 - RNA, 12 nt, Human
agcauggcugcc

SEQ ID NO: 1853246 - RNA, 20 nt, Human
agcaugucgucaaagcugaa

SEQ ID NO: 1853247 - RNA, 17 nt, Human
agcaugucgucaaagcu

SEQ ID NO: 1853248 - RNA, 14 nt, Human
ugagucaccaagcc

SEQ ID NO: 1853249 - RNA, 20 nt, Human
ugagugccuuacacaauggu

SEQ ID NO: 1853250 - RNA, 17 nt, Human
ugagugccuuacacaau

SEQ ID NO: 1853251 - RNA, 16 nt, Human
ugagucaccaagccca

SEQ ID NO: 1853252 - RNA, 17 nt, Human
ugagucaccaagcccag

SEQ ID NO: 1853253 - RNA, 21 nt, Human
ugagugggugaauaauacagu

SEQ ID NO: 1853254 - RNA, 23 nt, Human
ugagugggggaucacagccucug

SEQ ID NO: 1853255 - RNA, 14 nt, Human
ugauacuacaguuu

SEQ ID NO: 1853256 - RNA, 17 nt, Human
ugauacuacaguuuguu

SEQ ID NO: 1853257 - RNA, 20 nt, Human
ugauacaaugcugugcccua

SEQ ID NO: 1853258 - RNA, 21 nt, Human
ugauacaaugcugugcccuaa

SEQ ID NO: 1853259 - RNA, 20 nt, Human
ugauaagaaccuuuugagug

SEQ ID NO: 1853260 - RNA, 17 nt, Human
ugaguucauacccuguu

SEQ ID NO: 1853261 - RNA, 16 nt, Human
agcauacguacacauu

SEQ ID NO: 1853262 - RNA, 17 nt, Human
agcauacguacacauuu

SEQ ID NO: 1853263 - RNA, 18 nt, Human
agcauacguacacauuuu

SEQ ID NO: 1853264 - RNA, 19 nt, Human
agcauacguacacauuuua

SEQ ID NO: 1853265 - RNA, 20 nt, Human
agcauacguacacauuuuau

SEQ ID NO: 1853266 - RNA, 21 nt, Human
agcauacguacacauuuuauu

SEQ ID NO: 1853267 - RNA, 15 nt, Human
agcauacguacacau

SEQ ID NO: 1853268 - RNA, 21 nt, Human
agcauaauacuugcuuuggaa

SEQ ID NO: 1853269 - RNA, 12 nt, Human
ugagaauuaccc

SEQ ID NO: 1853270 - RNA, 23 nt, Human
ugaguacuacaguccucccaucu

SEQ ID NO: 1853271 - RNA, 22 nt, Human
ugaguacuacaguccucccauc

SEQ ID NO: 1853272 - RNA, 21 nt, Human
ugaguacuacaguccucccau

SEQ ID NO: 1853273 - RNA, 17 nt, Human
ugaguacuacaguccuc

SEQ ID NO: 1853274 - RNA, 13 nt, Human
ugaguagcuggga

SEQ ID NO: 1853275 - RNA, 13 nt, Human
ugaguagcuggau

SEQ ID NO: 1853276 - RNA, 14 nt, Human
agcauauucaggaa

SEQ ID NO: 1853277 - RNA, 15 nt, Human
ugaguacuacagucc

SEQ ID NO: 1853278 - RNA, 22 nt, Human
ugaguaacugauuuguaacaag

SEQ ID NO: 1853279 - RNA, 18 nt, Human
agccaccgugccuggcca

SEQ ID NO: 1853280 - RNA, 14 nt, Human
agccacggccaggc

SEQ ID NO: 1853281 - RNA, 23 nt, Human
agccaccaacauacucccaucug

SEQ ID NO: 1853282 - RNA, 20 nt, Human
agccaccaacauacucccau

SEQ ID NO: 1853283 - RNA, 19 nt, Human
agccaccaacauacuccca

SEQ ID NO: 1853284 - RNA, 18 nt, Human
agccacauuccugaugcu

SEQ ID NO: 1853285 - RNA, 14 nt, Human
agccacauuccuga

SEQ ID NO: 1853286 - RNA, 14 nt, Human
ugaugaagaggagu

SEQ ID NO: 1853287 - RNA, 13 nt, Human
ugaugaagaggag

SEQ ID NO: 1853288 - RNA, 18 nt, Human
ugauccuuuuggagucag

SEQ ID NO: 1853289 - RNA, 15 nt, Human
agccacggccaggcc

SEQ ID NO: 1853290 - RNA, 14 nt, Human
ugauuaccagggac

SEQ ID NO: 1853291 - RNA, 12 nt, Human
ugauuaaaccaa

SEQ ID NO: 1853292 - RNA, 15 nt, Human
ugauuaauuaaaaca

SEQ ID NO: 1853293 - RNA, 13 nt, Human
agccacugcaccg

SEQ ID NO: 1853294 - RNA, 21 nt, Human
agccacugcaccgggccacag

SEQ ID NO: 1853295 - RNA, 22 nt, Human
agccacugcaccgggccacaga

SEQ ID NO: 1853296 - RNA, 16 nt, Human
ugauggugcaaugacc

SEQ ID NO: 1853297 - RNA, 23 nt, Human
ugauggugcaaugaccuuucaau

SEQ ID NO: 1853298 - RNA, 17 nt, Human
ugauggugcaaugaccu

SEQ ID NO: 1853299 - RNA, 20 nt, Human
ugaugauccuaggcauuugc

SEQ ID NO: 1853300 - RNA, 14 nt, Human
ugaugauccuaggc

SEQ ID NO: 1853301 - RNA, 17 nt, Human
ugauguuuuaaggaugc

SEQ ID NO: 1853302 - RNA, 18 nt, Human
ugauguuuuaaggaugcu

SEQ ID NO: 1853303 - RNA, 19 nt, Human
ugauucccaagcucugcuc

SEQ ID NO: 1853304 - RNA, 21 nt, Human
ugauucccaagcucugcuccu

SEQ ID NO: 1853305 - RNA, 15 nt, Human
ugauucccaagcucu

SEQ ID NO: 1853306 - RNA, 16 nt, Human
ugauucccaagcucug

SEQ ID NO: 1853307 - RNA, 18 nt, Human
ugauucccaagcucugcu

SEQ ID NO: 1853308 - RNA, 23 nt, Human
agcccaggaaaggcuccaggagc

SEQ ID NO: 1853309 - RNA, 22 nt, Human
agcccaggaaaggcuccaggag

SEQ ID NO: 1853310 - RNA, 24 nt, Human
agcccaggaaaggcuccaggagca

SEQ ID NO: 1853311 - RNA, 14 nt, Human
ugauucagcucugc

SEQ ID NO: 1853312 - RNA, 13 nt, Human
ugauucagcucug

SEQ ID NO: 1853313 - RNA, 15 nt, Human
ugauucauaaugacu

SEQ ID NO: 1853314 - RNA, 21 nt, Human
agcccaggaaaggcuccagga

SEQ ID NO: 1853315 - RNA, 20 nt, Human
agcccaggaaaggcuccagg

SEQ ID NO: 1853316 - RNA, 19 nt, Human
agcccaggaaaggcuccag

SEQ ID NO: 1853317 - RNA, 22 nt, Human
agcccacuucugccauauucug

SEQ ID NO: 1853318 - RNA, 14 nt, Human
agccaggccacaag

SEQ ID NO: 1853319 - RNA, 12 nt, Human
agccaggccaca

SEQ ID NO: 1853320 - RNA, 22 nt, Human
agccaggccacaagacccuugu

SEQ ID NO: 1853321 - RNA, 21 nt, Human
agccaggccacaagacccuug

SEQ ID NO: 1853322 - RNA, 12 nt, Human
agccagggucuc

SEQ ID NO: 1853323 - RNA, 23 nt, Human
agccaguaaaugggggugcauuu

SEQ ID NO: 1853324 - RNA, 16 nt, Human
agcggagaaaggaagg

SEQ ID NO: 1853325 - RNA, 20 nt, Human
ugcauuaucuagauacugua

SEQ ID NO: 1853326 - RNA, 20 nt, Human
agcggagaaaggaagggcug

SEQ ID NO: 1853327 - RNA, 18 nt, Human
agcggagacggaguccca

SEQ ID NO: 1853328 - RNA, 17 nt, Human
agccuuccagggguggg

SEQ ID NO: 1853329 - RNA, 16 nt, Human
agccuuccaggggugg

SEQ ID NO: 1853330 - RNA, 14 nt, Human
agccuuccaggggu

SEQ ID NO: 1853331 - RNA, 11 nt, Human
agccuuccagg

SEQ ID NO: 1853332 - RNA, 22 nt, Human
ugccaauaauaauaccucccuu

SEQ ID NO: 1853333 - RNA, 21 nt, Human
ugccaauaauaauaccucccu

SEQ ID NO: 1853334 - RNA, 16 nt, Human
ugccacacuucaggcu

SEQ ID NO: 1853335 - RNA, 15 nt, Human
ugccacacuucaggc

SEQ ID NO: 1853336 - RNA, 14 nt, Human
ugccacacuucagg

SEQ ID NO: 1853337 - RNA, 13 nt, Human
ugccacacuucag

SEQ ID NO: 1853338 - RNA, 21 nt, Human
ugcauuaucuagauacuguau

SEQ ID NO: 1853339 - RNA, 22 nt, Human
ugcauuaucuagauacuguauc

SEQ ID NO: 1853340 - RNA, 21 nt, Human
agccugugccucugggacugg

SEQ ID NO: 1853341 - RNA, 13 nt, Human
agccuguuuaaga

SEQ ID NO: 1853342 - RNA, 23 nt, Human
agccugugucuuuaaaugcugcu

SEQ ID NO: 1853343 - RNA, 16 nt, Human
agccugugucuuuaaa

SEQ ID NO: 1853344 - RNA, 22 nt, Human
agccugcuccagcuguucagcu

SEQ ID NO: 1853345 - RNA, 19 nt, Human
agccugcuccagcuguuca

SEQ ID NO: 1853346 - RNA, 22 nt, Human
agccugggugacagagcaagug

SEQ ID NO: 1853347 - RNA, 17 nt, Human
agccugcuccagcuguu

SEQ ID NO: 1853348 - RNA, 16 nt, Human
agccugcuccagcugu

SEQ ID NO: 1853349 - RNA, 15 nt, Human
agccugcuccagcug

SEQ ID NO: 1853350 - RNA, 14 nt, Human
ugcauaccacuuuu

SEQ ID NO: 1853351 - RNA, 12 nt, Human
ugcauaccacuu

SEQ ID NO: 1853352 - RNA, 17 nt, Human
agcuacuugggaggcug

SEQ ID NO: 1853353 - RNA, 18 nt, Human
agcuacuugggaggcuga

SEQ ID NO: 1853354 - RNA, 11 nt, Human
agcuagaaaug

SEQ ID NO: 1853355 - RNA, 12 nt, Human
agcuagaaauga

SEQ ID NO: 1853356 - RNA, 18 nt, Human
agcuagacgagcaggcuu

SEQ ID NO: 1853357 - RNA, 23 nt, Human
ugccacacuucaggcucuucucc

SEQ ID NO: 1853358 - RNA, 22 nt, Human
ugccacacuucaggcucuucuc

SEQ ID NO: 1853359 - RNA, 19 nt, Human
agcgugagccacugcaccg

SEQ ID NO: 1853360 - RNA, 15 nt, Human
agcgugcauaaguua

SEQ ID NO: 1853361 - RNA, 22 nt, Human
agcgugagccacugcaccgggc

SEQ ID NO: 1853362 - RNA, 19 nt, Human
agcuacuaauuuuaaaaug

SEQ ID NO: 1853363 - RNA, 18 nt, Human
agcuaggaauuguguuua

SEQ ID NO: 1853364 - RNA, 12 nt, Human
agcuaggccugg

SEQ ID NO: 1853365 - RNA, 16 nt, Human
agcuaggccuggccag

SEQ ID NO: 1853366 - RNA, 14 nt, Human
agcuaggccuggcc

SEQ ID NO: 1853367 - RNA, 15 nt, Human
agcuaggccuggcca

SEQ ID NO: 1853368 - RNA, 18 nt, Human
agcucaggugucccugca

SEQ ID NO: 1853369 - RNA, 22 nt, Human
agcucaggugucccugcacuug

SEQ ID NO: 1853370 - RNA, 20 nt, Human
agcucaggugucccugcacu

SEQ ID NO: 1853371 - RNA, 21 nt, Human
agcucaggugucccugcacuu

SEQ ID NO: 1853372 - RNA, 20 nt, Human
agcucauucuccuuguguua

SEQ ID NO: 1853373 - RNA, 21 nt, Human
agcucauucuccuuguguuac

SEQ ID NO: 1853374 - RNA, 21 nt, Human
ugcccaagaauagaugcugac

SEQ ID NO: 1853375 - RNA, 23 nt, Human
ugcccaagaauagaugcugacug

SEQ ID NO: 1853376 - RNA, 22 nt, Human
ugcccaagaauagaugcugacu

SEQ ID NO: 1853377 - RNA, 20 nt, Human
ugcccagccccuucugaccc

SEQ ID NO: 1853378 - RNA, 21 nt, Human
ugcccagccccuucugaccca

SEQ ID NO: 1853379 - RNA, 20 nt, Human
ugcccacaggaucagucuga

SEQ ID NO: 1853380 - RNA, 19 nt, Human
ugcccacaggaucagucug

SEQ ID NO: 1853381 - RNA, 16 nt, Human
ugcccacaggaucagu

SEQ ID NO: 1853382 - RNA, 10 nt, Human
ugcacacauu

SEQ ID NO: 1853383 - RNA, 20 nt, Human
ugcacacauuuuuuaaaugc

SEQ ID NO: 1853384 - RNA, 17 nt, Human
ugcacccucaggcaggu

SEQ ID NO: 1853385 - RNA, 16 nt, Human
ugcacccucaggcagg

SEQ ID NO: 1853386 - RNA, 14 nt, Human
ugcacgugugugca

SEQ ID NO: 1853387 - RNA, 15 nt, Human
ugcacgugugugcac

SEQ ID NO: 1853388 - RNA, 24 nt, Human
agccccuucugacccaugcugccc

SEQ ID NO: 1853389 - RNA, 20 nt, Human
agccccuucugacccaugcu

SEQ ID NO: 1853390 - RNA, 21 nt, Human
agcccugcuuugggcugcccu

SEQ ID NO: 1853391 - RNA, 23 nt, Human
agcccugcuuugggcugcccugg

SEQ ID NO: 1853392 - RNA, 22 nt, Human
agcccugcuuugggcugcccug

SEQ ID NO: 1853393 - RNA, 21 nt, Human
agcccugguggcagugggagc

SEQ ID NO: 1853394 - RNA, 21 nt, Human
ugcacaagcugcacccucagg

SEQ ID NO: 1853395 - RNA, 18 nt, Human
ugcacaagcugcacccuc

SEQ ID NO: 1853396 - RNA, 24 nt, Human
ugcacacagcacgggggccaagga

SEQ ID NO: 1853397 - RNA, 12 nt, Human
ugcacacagcac

SEQ ID NO: 1853398 - RNA, 15 nt, Human
ugcacaagcugcacc

SEQ ID NO: 1853399 - RNA, 22 nt, Human
agcccugguggcagugggagcu

SEQ ID NO: 1853400 - RNA, 23 nt, Human
agcccugguggcagugggagcug

SEQ ID NO: 1853401 - RNA, 15 nt, Human
ugauucuccugccuc

SEQ ID NO: 1853402 - RNA, 19 nt, Human
ugauucuccugccucagcc

SEQ ID NO: 1853403 - RNA, 20 nt, Human
ugauucuccugccucagccu

SEQ ID NO: 1853404 - RNA, 18 nt, Human
agcccauggcacucuaug

SEQ ID NO: 1853405 - RNA, 20 nt, Human
agccccaaaacucuccucug

SEQ ID NO: 1853406 - RNA, 22 nt, Human
agccccaaaacucuccucugcu

SEQ ID NO: 1853407 - RNA, 21 nt, Human
agccccaaaacucuccucugc

SEQ ID NO: 1853408 - RNA, 24 nt, Human
agccccaaaacucuccucugcugc

SEQ ID NO: 1853409 - RNA, 17 nt, Human
agccccgaggccuucuc

SEQ ID NO: 1853410 - RNA, 22 nt, Human
agccccgaggccuucucugaag

SEQ ID NO: 1853411 - RNA, 16 nt, Human
agccccgaggccuucu

SEQ ID NO: 1853412 - RNA, 18 nt, Human
agccccuggaugcagccu

SEQ ID NO: 1853413 - RNA, 17 nt, Human
agccccuggaugcagcc

SEQ ID NO: 1853414 - RNA, 19 nt, Human
agccccuggaugcagccuc

SEQ ID NO: 1853415 - RNA, 22 nt, Human
agccccuggaugcagccucaca

SEQ ID NO: 1853416 - RNA, 16 nt, Human
ugcaggucccuaauaa

SEQ ID NO: 1853417 - RNA, 15 nt, Human
ugcaggucccuaaua

SEQ ID NO: 1853418 - RNA, 14 nt, Human
ugcaggucccuaau

SEQ ID NO: 1853419 - RNA, 12 nt, Human
ugcaggucccua

SEQ ID NO: 1853420 - RNA, 18 nt, Human
ugcaguacuuuaccuccu

SEQ ID NO: 1853421 - RNA, 17 nt, Human
ugcauaaguuaacuucc

SEQ ID NO: 1853422 - RNA, 14 nt, Human
ugcauaaguuaacu

SEQ ID NO: 1853423 - RNA, 23 nt, Human
ugcauaacguauaaaagccuguu

SEQ ID NO: 1853424 - RNA, 22 nt, Human
ugcauaacguauaaaagccugu

SEQ ID NO: 1853425 - RNA, 15 nt, Human
ugcagccucacaguc

SEQ ID NO: 1853426 - RNA, 13 nt, Human
ugcagccucacag

SEQ ID NO: 1853427 - RNA, 16 nt, Human
ugcagccucacagucc

SEQ ID NO: 1853428 - RNA, 22 nt, Human
agccugaaagaggaaugaagua

SEQ ID NO: 1853429 - RNA, 17 nt, Human
agccucccaaagugcug

SEQ ID NO: 1853430 - RNA, 17 nt, Human
agccucagcauccuggc

SEQ ID NO: 1853431 - RNA, 19 nt, Human
agccucagcauccuggcac

SEQ ID NO: 1853432 - RNA, 20 nt, Human
agccucagcauccuggcacc

SEQ ID NO: 1853433 - RNA, 21 nt, Human
agccucagcauccuggcaccc

SEQ ID NO: 1853434 - RNA, 15 nt, Human
agccucauguccacu

SEQ ID NO: 1853435 - RNA, 12 nt, Human
agccucaucucu

SEQ ID NO: 1853436 - RNA, 22 nt, Human
agccucagcauccuggcacccg

SEQ ID NO: 1853437 - RNA, 23 nt, Human
agccucagcauccuggcacccgg

SEQ ID NO: 1853438 - RNA, 20 nt, Human
agccucauguccacugguuc

SEQ ID NO: 1853439 - RNA, 20 nt, Human
agccuccaugcugccuccag

SEQ ID NO: 1853440 - RNA, 18 nt, Human
agccuccaugcugccucc

SEQ ID NO: 1853441 - RNA, 16 nt, Human
agccucccaaagugcu

SEQ ID NO: 1853442 - RNA, 13 nt, Human
agccguggcuucc

SEQ ID NO: 1853443 - RNA, 21 nt, Human
agccguggcuucccgcucagc

SEQ ID NO: 1853444 - RNA, 14 nt, Human
agccguggcuuccc

SEQ ID NO: 1853445 - RNA, 23 nt, Human
agccguggcuucccgcucagccc

SEQ ID NO: 1853446 - RNA, 22 nt, Human
agccguggcuucccgcucagcc

SEQ ID NO: 1853447 - RNA, 19 nt, Human
agccguuuguuccccaaga

SEQ ID NO: 1853448 - RNA, 23 nt, Human
agcccuucuaccuuccugcaaca

SEQ ID NO: 1853449 - RNA, 23 nt, Human
ugcacuauagccuaggugacaga

SEQ ID NO: 1853450 - RNA, 14 nt, Human
ugcuuguacauaau

SEQ ID NO: 1853451 - RNA, 16 nt, Human
ugcuuguacauaaugc

SEQ ID NO: 1853452 - RNA, 22 nt, Human
ugcuuguacauaaugcgugcau

SEQ ID NO: 1853453 - RNA, 12 nt, Human
ugcuuugugauu

SEQ ID NO: 1853454 - RNA, 14 nt, Human
ugcuuugugauuuu

SEQ ID NO: 1853455 - RNA, 16 nt, Human
ugcuuugugauuuuug

SEQ ID NO: 1853456 - RNA, 14 nt, Human
ugcuuuuggucugu

SEQ ID NO: 1853457 - RNA, 17 nt, Human
ugcuuuuggucugugug

SEQ ID NO: 1853458 - RNA, 12 nt, Human
ugcuuguacaua

SEQ ID NO: 1853459 - RNA, 13 nt, Human
ugcuuguacauaa

SEQ ID NO: 1853460 - RNA, 16 nt, Human
ugcuuggaggaaggaa

SEQ ID NO: 1853461 - RNA, 15 nt, Human
ugcuuggaggaagga

SEQ ID NO: 1853462 - RNA, 14 nt, Human
ugcuuggaggaagg

SEQ ID NO: 1853463 - RNA, 21 nt, Human
ugcuugaggcaacucaucuua

SEQ ID NO: 1853464 - RNA, 14 nt, Human
aggauccugagcca

SEQ ID NO: 1853465 - RNA, 13 nt, Human
aggauccugagcc

SEQ ID NO: 1853466 - RNA, 18 nt, Human
uggaaguacuauaauuua

SEQ ID NO: 1853467 - RNA, 23 nt, Human
uggaaggggacacgugacagccg

SEQ ID NO: 1853468 - RNA, 18 nt, Human
uggaaaugggcagagcag

SEQ ID NO: 1853469 - RNA, 17 nt, Human
uggaaaugggcagagca

SEQ ID NO: 1853470 - RNA, 16 nt, Human
uggaagcacagcuuca

SEQ ID NO: 1853471 - RNA, 14 nt, Human
uggagaacuagaga

SEQ ID NO: 1853472 - RNA, 15 nt, Human
uggacugugugcuca

SEQ ID NO: 1853473 - RNA, 22 nt, Human
uggagaagcggcuggcagccca

SEQ ID NO: 1853474 - RNA, 13 nt, Human
uggagaagcggcu

SEQ ID NO: 1853475 - RNA, 20 nt, Human
aggcaccuaccaccacgccc

SEQ ID NO: 1853476 - RNA, 14 nt, Human
aggcaaugcuggcu

SEQ ID NO: 1853477 - RNA, 20 nt, Human
aggcacccaccaucaugucu

SEQ ID NO: 1853478 - RNA, 21 nt, Human
aggcacccaccaucaugucug

SEQ ID NO: 1853479 - RNA, 22 nt, Human
aggcacccaccaucaugucugg

SEQ ID NO: 1853480 - RNA, 13 nt, Human
aggcaaucauggu

SEQ ID NO: 1853481 - RNA, 23 nt, Human
uggacccuguggaugauaaaaca

SEQ ID NO: 1853482 - RNA, 21 nt, Human
uggacccugaggcccagaggg

SEQ ID NO: 1853483 - RNA, 20 nt, Human
uggacccugaggcccagagg

SEQ ID NO: 1853484 - RNA, 19 nt, Human
uggacccugaggcccagag

SEQ ID NO: 1853485 - RNA, 18 nt, Human
uggacccugaggcccaga

SEQ ID NO: 1853486 - RNA, 16 nt, Human
uggacccugaggccca

SEQ ID NO: 1853487 - RNA, 23 nt, Human
uggacacagcucuucuccaggcu

SEQ ID NO: 1853488 - RNA, 20 nt, Human
uggaccuugaacuggguacu

SEQ ID NO: 1853489 - RNA, 15 nt, Human
uggacccugaggccc

SEQ ID NO: 1853490 - RNA, 22 nt, Human
uggacacagcucuucuccaggc

SEQ ID NO: 1853491 - RNA, 13 nt, Human
uggacacagcucu

SEQ ID NO: 1853492 - RNA, 14 nt, Human
uggacacagcucuu

SEQ ID NO: 1853493 - RNA, 18 nt, Human
aggaucucuugagccugg

SEQ ID NO: 1853494 - RNA, 17 nt, Human
aggaucucuugagccug

SEQ ID NO: 1853495 - RNA, 19 nt, Human
aggaucucuugagccuggg

SEQ ID NO: 1853496 - RNA, 13 nt, Human
uggauuguccccg

SEQ ID NO: 1853497 - RNA, 21 nt, Human
uggauuguccccgacccuugc

SEQ ID NO: 1853498 - RNA, 13 nt, Human
uggauuggauuug

SEQ ID NO: 1853499 - RNA, 17 nt, Human
uggauuauauuaugaag

SEQ ID NO: 1853500 - RNA, 14 nt, Human
uggaguauauguca

SEQ ID NO: 1853501 - RNA, 15 nt, Human
uggauggaaggggcu

SEQ ID NO: 1853502 - RNA, 20 nt, Human
uggagguacgaaaagagggg

SEQ ID NO: 1853503 - RNA, 16 nt, Human
aggccaaggugggagg

SEQ ID NO: 1853504 - RNA, 20 nt, Human
aggccaaaggaagcacaugc

SEQ ID NO: 1853505 - RNA, 19 nt, Human
aggccaaaggaagcacaug

SEQ ID NO: 1853506 - RNA, 18 nt, Human
aggccaaaggaagcacau

SEQ ID NO: 1853507 - RNA, 16 nt, Human
aggccaaaggaagcac

SEQ ID NO: 1853508 - RNA, 16 nt, Human
aggcagccccauucug

SEQ ID NO: 1853509 - RNA, 17 nt, Human
aggcagccccauucugc

SEQ ID NO: 1853510 - RNA, 16 nt, Human
aggccccgcccaggcu

SEQ ID NO: 1853511 - RNA, 21 nt, Human
aggcccagagggccugcaagg

SEQ ID NO: 1853512 - RNA, 20 nt, Human
aggccagagggagugacaga

SEQ ID NO: 1853513 - RNA, 19 nt, Human
uggcagcucaccucucccu

SEQ ID NO: 1853514 - RNA, 16 nt, Human
aggccacaagacccuu

SEQ ID NO: 1853515 - RNA, 15 nt, Human
uggcagcucaccucu

SEQ ID NO: 1853516 - RNA, 17 nt, Human
uggcagccuuggcaaac

SEQ ID NO: 1853517 - RNA, 18 nt, Human
aggccacaagacccuugu

SEQ ID NO: 1853518 - RNA, 17 nt, Human
aggccacaagacccuug

SEQ ID NO: 1853519 - RNA, 19 nt, Human
aggccacaagacccuugug

SEQ ID NO: 1853520 - RNA, 14 nt, Human
aggccagagggagu

SEQ ID NO: 1853521 - RNA, 18 nt, Human
uggcacagggcaguggga

SEQ ID NO: 1853522 - RNA, 13 nt, Human
uggcccacgcacu

SEQ ID NO: 1853523 - RNA, 14 nt, Human
uggcccugcccugg

SEQ ID NO: 1853524 - RNA, 23 nt, Human
uggccgggcgcgguggcucacgc

SEQ ID NO: 1853525 - RNA, 13 nt, Human
uggccucuucaga

SEQ ID NO: 1853526 - RNA, 18 nt, Human
uggccugagcugggauga

SEQ ID NO: 1853527 - RNA, 21 nt, Human
uggccuggccccucagggucc

SEQ ID NO: 1853528 - RNA, 18 nt, Human
uggccuggccccucaggg

SEQ ID NO: 1853529 - RNA, 18 nt, Human
aggccugggggcugggca

SEQ ID NO: 1853530 - RNA, 12 nt, Human
aggccuggggac

SEQ ID NO: 1853531 - RNA, 20 nt, Human
aggccugggggcugggcaga

SEQ ID NO: 1853532 - RNA, 14 nt, Human
uggccuucggccuc

SEQ ID NO: 1853533 - RNA, 15 nt, Human
uggccagguggccac

SEQ ID NO: 1853534 - RNA, 11 nt, Human
uggccaggugg

SEQ ID NO: 1853535 - RNA, 21 nt, Human
uggccaaagccaaagcuaggc

SEQ ID NO: 1853536 - RNA, 23 nt, Human
uggccaaagccaaagcuaggccu

SEQ ID NO: 1853537 - RNA, 19 nt, Human
uggccagguggccacucca

SEQ ID NO: 1853538 - RNA, 17 nt, Human
uggccagguggccacuc

SEQ ID NO: 1853539 - RNA, 16 nt, Human
uggccagguggccacu

SEQ ID NO: 1853540 - RNA, 23 nt, Human
uggccagugugacaaggauugcu

SEQ ID NO: 1853541 - RNA, 17 nt, Human
aggccccgcccaggcuu

SEQ ID NO: 1853542 - RNA, 12 nt, Human
aggccccugcca

SEQ ID NO: 1853543 - RNA, 13 nt, Human
ugcuucaaaaaca

SEQ ID NO: 1853544 - RNA, 21 nt, Human
ugcuucaaaaacauucuuaca

SEQ ID NO: 1853545 - RNA, 17 nt, Human
ugcugucccuuuuccuu

SEQ ID NO: 1853546 - RNA, 13 nt, Human
ugcugugcaaaug

SEQ ID NO: 1853547 - RNA, 15 nt, Human
ugcugucccuuuucc

SEQ ID NO: 1853548 - RNA, 19 nt, Human
ugcugucccuuacgugagu

SEQ ID NO: 1853549 - RNA, 17 nt, Human
ugcugucccuuacguga

SEQ ID NO: 1853550 - RNA, 23 nt, Human
ugcuucaaggauccugagccaga

SEQ ID NO: 1853551 - RNA, 21 nt, Human
ugcuucaaggauccugagcca

SEQ ID NO: 1853552 - RNA, 20 nt, Human
ugcuucaaggauccugagcc

SEQ ID NO: 1853553 - RNA, 16 nt, Human
ugcuuccagugaggcu

SEQ ID NO: 1853554 - RNA, 18 nt, Human
aggacacuaaccacgcug

SEQ ID NO: 1853555 - RNA, 17 nt, Human
aggacagccccuccucc

SEQ ID NO: 1853556 - RNA, 13 nt, Human
ugcuggcugccuu

SEQ ID NO: 1853557 - RNA, 19 nt, Human
ugcugggauuacaagcgug

SEQ ID NO: 1853558 - RNA, 19 nt, Human
ugcuggcuguuggcugggg

SEQ ID NO: 1853559 - RNA, 21 nt, Human
ugcuggcuguuggcugggggc

SEQ ID NO: 1853560 - RNA, 21 nt, Human
ugcugggauuacaagcgugag

SEQ ID NO: 1853561 - RNA, 17 nt, Human
ugcugggauuacaggug

SEQ ID NO: 1853562 - RNA, 21 nt, Human
ugcugcccugcccaccuggcc

SEQ ID NO: 1853563 - RNA, 19 nt, Human
ugcugcccugcccaccugg

SEQ ID NO: 1853564 - RNA, 11 nt, Human
ugcugcccugu

SEQ ID NO: 1853565 - RNA, 18 nt, Human
ugcugcccugcccaccug

SEQ ID NO: 1853566 - RNA, 17 nt, Human
ugcugcccugcccaccu

SEQ ID NO: 1853567 - RNA, 16 nt, Human
ugcugcccugcccacc

SEQ ID NO: 1853568 - RNA, 13 nt, Human
ugcugcccugccc

SEQ ID NO: 1853569 - RNA, 19 nt, Human
ugcuaucucccccagcccc

SEQ ID NO: 1853570 - RNA, 20 nt, Human
ugcuaucucccccagcccca

SEQ ID NO: 1853571 - RNA, 19 nt, Human
ugcugacuguacuccuccc

SEQ ID NO: 1853572 - RNA, 16 nt, Human
ugcugacuguacuccu

SEQ ID NO: 1853573 - RNA, 15 nt, Human
ugcucuggacaggca

SEQ ID NO: 1853574 - RNA, 16 nt, Human
ugcucuggacaggcau

SEQ ID NO: 1853575 - RNA, 14 nt, Human
ugcucuggacaggc

SEQ ID NO: 1853576 - RNA, 19 nt, Human
aggaaaucaccgaaaacgu

SEQ ID NO: 1853577 - RNA, 15 nt, Human
aggaaaucaccgaaa

SEQ ID NO: 1853578 - RNA, 17 nt, Human
aggaagcacaugccucu

SEQ ID NO: 1853579 - RNA, 16 nt, Human
aggaagcacaugccuc

SEQ ID NO: 1853580 - RNA, 11 nt, Human
aggaagcacau

SEQ ID NO: 1853581 - RNA, 14 nt, Human
aggaaauccagggu

SEQ ID NO: 1853582 - RNA, 16 nt, Human
aggaaaggcuccagga

SEQ ID NO: 1853583 - RNA, 15 nt, Human
aggaaaggcuccagg

SEQ ID NO: 1853584 - RNA, 14 nt, Human
aggaaaggcuccag

SEQ ID NO: 1853585 - RNA, 13 nt, Human
aggaaaggcucca

SEQ ID NO: 1853586 - RNA, 16 nt, Human
ugcugacuguuuucuc

SEQ ID NO: 1853587 - RNA, 22 nt, Human
ugcugacuguacuccucccagg

SEQ ID NO: 1853588 - RNA, 21 nt, Human
ugcugacuguacuccucccag

SEQ ID NO: 1853589 - RNA, 23 nt, Human
aggaagccagcaggcucucaggc

SEQ ID NO: 1853590 - RNA, 22 nt, Human
aggaagccagcaggcucucagg

SEQ ID NO: 1853591 - RNA, 21 nt, Human
aggaagccagcaggcucucag

SEQ ID NO: 1853592 - RNA, 22 nt, Human
aggaagcacaugccucucucag

SEQ ID NO: 1853593 - RNA, 20 nt, Human
aggaagccgcuggggccagu

SEQ ID NO: 1853594 - RNA, 19 nt, Human
aggaagccgcuggggccag

SEQ ID NO: 1853595 - RNA, 18 nt, Human
aggaagccgcuggggcca

SEQ ID NO: 1853596 - RNA, 22 nt, Human
aggaaggaaacccagcucuggu

SEQ ID NO: 1853597 - RNA, 20 nt, Human
aggaaggaaacccagcucug

SEQ ID NO: 1853598 - RNA, 23 nt, Human
aggaaggaaacccagcucugguc

SEQ ID NO: 1853599 - RNA, 12 nt, Human
aggaagcucagg

SEQ ID NO: 1853600 - RNA, 16 nt, Human
agcuguguggcagucu

SEQ ID NO: 1853601 - RNA, 14 nt, Human
agcuguguggcagu

SEQ ID NO: 1853602 - RNA, 21 nt, Human
agcugugcucuggacaggcau

SEQ ID NO: 1853603 - RNA, 23 nt, Human
agcugugcucuggacaggcaugu

SEQ ID NO: 1853604 - RNA, 20 nt, Human
agcugugcucuggacaggca

SEQ ID NO: 1853605 - RNA, 15 nt, Human
agcugggacuacagg

SEQ ID NO: 1853606 - RNA, 20 nt, Human
ugccuguugggccaggagcc

SEQ ID NO: 1853607 - RNA, 19 nt, Human
ugccuguugggccaggagc

SEQ ID NO: 1853608 - RNA, 21 nt, Human
ugccuguucagcuccagcuca

SEQ ID NO: 1853609 - RNA, 16 nt, Human
ugccuuauggaacacu

SEQ ID NO: 1853610 - RNA, 15 nt, Human
ugccuuauggaacac

SEQ ID NO: 1853611 - RNA, 14 nt, Human
agcuguuacugucu

SEQ ID NO: 1853612 - RNA, 14 nt, Human
agcuguucagcugg

SEQ ID NO: 1853613 - RNA, 13 nt, Human
agcuguucagcug

SEQ ID NO: 1853614 - RNA, 18 nt, Human
ugccuguucagcuccagc

SEQ ID NO: 1853615 - RNA, 20 nt, Human
ugccuguucagcuccagcuc

SEQ ID NO: 1853616 - RNA, 15 nt, Human
ugccugcccuauucu

SEQ ID NO: 1853617 - RNA, 14 nt, Human
ugccugcccaggcc

SEQ ID NO: 1853618 - RNA, 15 nt, Human
ugccugcccaggccc

SEQ ID NO: 1853619 - RNA, 16 nt, Human
ugccugcccaggcccc

SEQ ID NO: 1853620 - RNA, 12 nt, Human
ugcccaggcagg

SEQ ID NO: 1853621 - RNA, 13 nt, Human
ugcccaggcaggu

SEQ ID NO: 1853622 - RNA, 14 nt, Human
ugcccaggcagguc

SEQ ID NO: 1853623 - RNA, 13 nt, Human
ugccucugccucu

SEQ ID NO: 1853624 - RNA, 14 nt, Human
ugccucugccucug

SEQ ID NO: 1853625 - RNA, 15 nt, Human
ugccucugccucuga

SEQ ID NO: 1853626 - RNA, 22 nt, Human
agcuggaucuccauucucucag

SEQ ID NO: 1853627 - RNA, 21 nt, Human
agcugcuuuugucuaugggac

SEQ ID NO: 1853628 - RNA, 21 nt, Human
agcugcuugggcuucauccuc

SEQ ID NO: 1853629 - RNA, 21 nt, Human
agcugccuguucagcuccagc

SEQ ID NO: 1853630 - RNA, 22 nt, Human
agcugccuguucagcuccagcu

SEQ ID NO: 1853631 - RNA, 15 nt, Human
ugccuggauggggcu

SEQ ID NO: 1853632 - RNA, 14 nt, Human
ugccuggauggggc

SEQ ID NO: 1853633 - RNA, 20 nt, Human
agcugccuguucagcuccag

SEQ ID NO: 1853634 - RNA, 14 nt, Human
agcuugaggguugg

SEQ ID NO: 1853635 - RNA, 18 nt, Human
agcuugaggguugggcug

SEQ ID NO: 1853636 - RNA, 22 nt, Human
agcuugaggguugggcuggugu

SEQ ID NO: 1853637 - RNA, 18 nt, Human
agcuuguaaauagcucag

SEQ ID NO: 1853638 - RNA, 19 nt, Human
agcuugaccgugaggccag

SEQ ID NO: 1853639 - RNA, 11 nt, Human
ugcuacacacu

SEQ ID NO: 1853640 - RNA, 20 nt, Human
ugcgggcuuccuccuggugu

SEQ ID NO: 1853641 - RNA, 19 nt, Human
ugcggccuuuggcuucacg

SEQ ID NO: 1853642 - RNA, 17 nt, Human
ugcggccuuuggcuuca

SEQ ID NO: 1853643 - RNA, 16 nt, Human
ugcgggucacaggagg

SEQ ID NO: 1853644 - RNA, 14 nt, Human
ugcgggucacagga

SEQ ID NO: 1853645 - RNA, 17 nt, Human
ugcgggucacaggaggg

SEQ ID NO: 1853646 - RNA, 17 nt, Human
ugcgguccacccaggag

SEQ ID NO: 1853647 - RNA, 21 nt, Human
ugcggugcuaucucccccagc

SEQ ID NO: 1853648 - RNA, 17 nt, Human
ugcggugcuaucucccc

SEQ ID NO: 1853649 - RNA, 18 nt, Human
ugcgguccacccaggagc

SEQ ID NO: 1853650 - RNA, 23 nt, Human
ugcggacagccacggccaggcca

SEQ ID NO: 1853651 - RNA, 22 nt, Human
ugcggacagccacggccaggcc

SEQ ID NO: 1853652 - RNA, 14 nt, Human
uggggcccugccuc

SEQ ID NO: 1853653 - RNA, 23 nt, Human
uggggaccucaggccugggggcu

SEQ ID NO: 1853654 - RNA, 12 nt, Human
uggggagaaagu

SEQ ID NO: 1853655 - RNA, 15 nt, Human
uggggaggggcugug

SEQ ID NO: 1853656 - RNA, 16 nt, Human
uggggcccugccuccu

SEQ ID NO: 1853657 - RNA, 15 nt, Human
uggggcccugccucc

SEQ ID NO: 1853658 - RNA, 23 nt, Human
uggggcuaggaaauccagggugg

SEQ ID NO: 1853659 - RNA, 18 nt, Human
uggggcggugagagggga

SEQ ID NO: 1853660 - RNA, 15 nt, Human
ugggguaugggagag

SEQ ID NO: 1853661 - RNA, 18 nt, Human
uggggucacucuggcagc

SEQ ID NO: 1853662 - RNA, 17 nt, Human
uggggucacucuggcag

SEQ ID NO: 1853663 - RNA, 15 nt, Human
ugggguacccacugc

SEQ ID NO: 1853664 - RNA, 16 nt, Human
ugggguacccacugcu

SEQ ID NO: 1853665 - RNA, 20 nt, Human
ugggguacccacugcucugg

SEQ ID NO: 1853666 - RNA, 20 nt, Human
uggggcugcaccggcuggcc

SEQ ID NO: 1853667 - RNA, 14 nt, Human
ugggguacccacug

SEQ ID NO: 1853668 - RNA, 15 nt, Human
uggggaccagagcug

SEQ ID NO: 1853669 - RNA, 14 nt, Human
uggggaccagagcu

SEQ ID NO: 1853670 - RNA, 17 nt, Human
uggggacagagcagaac

SEQ ID NO: 1853671 - RNA, 18 nt, Human
uggggaccagagcugcca

SEQ ID NO: 1853672 - RNA, 17 nt, Human
uggggaccagagcugcc

SEQ ID NO: 1853673 - RNA, 13 nt, Human
uggggaccucagg

SEQ ID NO: 1853674 - RNA, 19 nt, Human
ugggcuggguucuacccag

SEQ ID NO: 1853675 - RNA, 18 nt, Human
ugggcuggguucuaccca

SEQ ID NO: 1853676 - RNA, 21 nt, Human
ugggcucccuucccaccucuc

SEQ ID NO: 1853677 - RNA, 20 nt, Human
ugggcucccuucccaccucu

SEQ ID NO: 1853678 - RNA, 21 nt, Human
ugggcugcccuggugcugcca

SEQ ID NO: 1853679 - RNA, 20 nt, Human
ugggcugcccuggugcugcc

SEQ ID NO: 1853680 - RNA, 19 nt, Human
ugggcugcccuggugcugc

SEQ ID NO: 1853681 - RNA, 17 nt, Human
ugggcugcccuggugcu

SEQ ID NO: 1853682 - RNA, 19 nt, Human
ugggcucccuucccaccuc

SEQ ID NO: 1853683 - RNA, 18 nt, Human
ugggcucccuucccaccu

SEQ ID NO: 1853684 - RNA, 23 nt, Human
agggcuucugccauuucugagau

SEQ ID NO: 1853685 - RNA, 17 nt, Human
agggaggugaccccagg

SEQ ID NO: 1853686 - RNA, 17 nt, Human
agggagugacagaggca

SEQ ID NO: 1853687 - RNA, 18 nt, Human
agggagugacagaggcag

SEQ ID NO: 1853688 - RNA, 19 nt, Human
agggagugacagaggcagc

SEQ ID NO: 1853689 - RNA, 15 nt, Human
agggagggcuucugc

SEQ ID NO: 1853690 - RNA, 23 nt, Human
agggcccagagaggguggugacc

SEQ ID NO: 1853691 - RNA, 16 nt, Human
ugggccaggagccucc

SEQ ID NO: 1853692 - RNA, 14 nt, Human
ugggccaggagccu

SEQ ID NO: 1853693 - RNA, 20 nt, Human
ugggcccaaugcacuuuguu

SEQ ID NO: 1853694 - RNA, 13 nt, Human
ugggccaggagcc

SEQ ID NO: 1853695 - RNA, 18 nt, Human
ugggccagaauuucaaac

SEQ ID NO: 1853696 - RNA, 17 nt, Human
ugggccagaauuucaaa

SEQ ID NO: 1853697 - RNA, 17 nt, Human
ugggcaacccccagccu

SEQ ID NO: 1853698 - RNA, 20 nt, Human
ugggcaacccccagccugcu

SEQ ID NO: 1853699 - RNA, 21 nt, Human
ugggcaacccccagccugcua

SEQ ID NO: 1853700 - RNA, 17 nt, Human
ugggaggucaaggcugc

SEQ ID NO: 1853701 - RNA, 23 nt, Human
ugggaggucaaggcugcagugag

SEQ ID NO: 1853702 - RNA, 20 nt, Human
ugggaggucaaggcugcagu

SEQ ID NO: 1853703 - RNA, 19 nt, Human
ugggaggucaaggcugcag

SEQ ID NO: 1853704 - RNA, 18 nt, Human
ugggaggucaaggcugca

SEQ ID NO: 1853705 - RNA, 16 nt, Human
ugggcaacccccagcc

SEQ ID NO: 1853706 - RNA, 23 nt, Human
aggggagcaaaaucgaugcagug

SEQ ID NO: 1853707 - RNA, 15 nt, Human
aggggccuggcagcc

SEQ ID NO: 1853708 - RNA, 23 nt, Human
aggggccuggcagccgugccuuc

SEQ ID NO: 1853709 - RNA, 18 nt, Human
aggggccuggcagccgug

SEQ ID NO: 1853710 - RNA, 19 nt, Human
uggggucacucuggcagcu

SEQ ID NO: 1853711 - RNA, 20 nt, Human
uggggucacucuggcagcuc

SEQ ID NO: 1853712 - RNA, 18 nt, Human
aggggguggccucccaac

SEQ ID NO: 1853713 - RNA, 17 nt, Human
aggggguggccucccaa

SEQ ID NO: 1853714 - RNA, 15 nt, Human
aggggguggccuccc

SEQ ID NO: 1853715 - RNA, 22 nt, Human
aggggugggacacccugugaug

SEQ ID NO: 1853716 - RNA, 20 nt, Human
aggggugggacacccuguga

SEQ ID NO: 1853717 - RNA, 24 nt, Human
agggguucccuuuuuuggcugcug

SEQ ID NO: 1853718 - RNA, 21 nt, Human
agggucucacuauguugccca

SEQ ID NO: 1853719 - RNA, 22 nt, Human
agggucucacuauguugcccag

SEQ ID NO: 1853720 - RNA, 23 nt, Human
agggucucacuauguugcccagg

SEQ ID NO: 1853721 - RNA, 16 nt, Human
ugguacuaacuuuccu

SEQ ID NO: 1853722 - RNA, 17 nt, Human
ugguacucauuaaaaaa

SEQ ID NO: 1853723 - RNA, 20 nt, Human
ugguagcuuuucccuucuuu

SEQ ID NO: 1853724 - RNA, 21 nt, Human
ugguagcuuuucccuucuuuu

SEQ ID NO: 1853725 - RNA, 17 nt, Human
ugguagcuuuucccuuc

SEQ ID NO: 1853726 - RNA, 20 nt, Human
uggucacaggacucugccuc

SEQ ID NO: 1853727 - RNA, 23 nt, Human
uggucacaggacucugccuccuc

SEQ ID NO: 1853728 - RNA, 22 nt, Human
uggucacaggacucugccuccu

SEQ ID NO: 1853729 - RNA, 19 nt, Human
ugggugcuuggaggaagga

SEQ ID NO: 1853730 - RNA, 15 nt, Human
ugggugcuuggagga

SEQ ID NO: 1853731 - RNA, 22 nt, Human
ugggugcuuggaggaaggaaac

SEQ ID NO: 1853732 - RNA, 15 nt, Human
agggugggagugggc

SEQ ID NO: 1853733 - RNA, 21 nt, Human
ugggucgcccuggacugugug

SEQ ID NO: 1853734 - RNA, 22 nt, Human
agggucucacucugucgcccag

SEQ ID NO: 1853735 - RNA, 21 nt, Human
agggucucacucugucgccca

SEQ ID NO: 1853736 - RNA, 18 nt, Human
uggucucaaacuccugac

SEQ ID NO: 1853737 - RNA, 17 nt, Human
uggucucaaacucuuga

SEQ ID NO: 1853738 - RNA, 23 nt, Human
uggucucaaacucuugaccucag

SEQ ID NO: 1853739 - RNA, 19 nt, Human
uggucuaucuuugagcgcc

SEQ ID NO: 1853740 - RNA, 16 nt, Human
uggucucaaacucuug

SEQ ID NO: 1853741 - RNA, 16 nt, Human
uggucccaccccacac

SEQ ID NO: 1853742 - RNA, 13 nt, Human
uggucccacucag

SEQ ID NO: 1853743 - RNA, 20 nt, Human
uggucaccaaaucagcugcu

SEQ ID NO: 1853744 - RNA, 22 nt, Human
uggucagauuugaacucuucaa

SEQ ID NO: 1853745 - RNA, 18 nt, Human
uggucaccaaaucagcug

SEQ ID NO: 1853746 - RNA, 15 nt, Human
uggucccaccccaca

SEQ ID NO: 1853747 - RNA, 14 nt, Human
uggucccaccccac

SEQ ID NO: 1853748 - RNA, 16 nt, Human
uggucugacccacugc

SEQ ID NO: 1853749 - RNA, 17 nt, Human
uggucugacccacugcu

SEQ ID NO: 1853750 - RNA, 22 nt, Human
aggguguccggucccuguccca

SEQ ID NO: 1853751 - RNA, 13 nt, Human
aggguuauaauaa

SEQ ID NO: 1853752 - RNA, 18 nt, Human
aggucaccuuuauucugg

SEQ ID NO: 1853753 - RNA, 19 nt, Human
aggucaccuuuauucuggc

SEQ ID NO: 1853754 - RNA, 17 nt, Human
aggucauuuuuuuuaag

SEQ ID NO: 1853755 - RNA, 20 nt, Human
aggucauuuuuuuuaagaaa

SEQ ID NO: 1853756 - RNA, 12 nt, Human
aggucagagccu

SEQ ID NO: 1853757 - RNA, 21 nt, Human
agguaugcaaucaaaucugcu

SEQ ID NO: 1853758 - RNA, 23 nt, Human
agguauaauucacauuguauuca

SEQ ID NO: 1853759 - RNA, 20 nt, Human
agguauaaguggugugugua

SEQ ID NO: 1853760 - RNA, 19 nt, Human
agguauaaguggugugugu

SEQ ID NO: 1853761 - RNA, 23 nt, Human
agguagaaauaucugaaaaugua

SEQ ID NO: 1853762 - RNA, 19 nt, Human
agguagaaauaucugaaaa

SEQ ID NO: 1853763 - RNA, 17 nt, Human
agguagaaauaucugaa

SEQ ID NO: 1853764 - RNA, 18 nt, Human
aggguuggccccugcccg

SEQ ID NO: 1853765 - RNA, 23 nt, Human
aggguuggccccugcccggcugc

SEQ ID NO: 1853766 - RNA, 13 nt, Human
aggguugggcugg

SEQ ID NO: 1853767 - RNA, 18 nt, Human
uguagaggagaaacugga

SEQ ID NO: 1853768 - RNA, 14 nt, Human
uguagagugggagc

SEQ ID NO: 1853769 - RNA, 13 nt, Human
uguagagugggag

SEQ ID NO: 1853770 - RNA, 14 nt, Human
uguaauuugugaua

SEQ ID NO: 1853771 - RNA, 11 nt, Human
agguuuuccug

SEQ ID NO: 1853772 - RNA, 20 nt, Human
aguaagccgugauuuucauu

SEQ ID NO: 1853773 - RNA, 15 nt, Human
aguaaaaauaaaauu

SEQ ID NO: 1853774 - RNA, 12 nt, Human
aguaaaaauaaa

SEQ ID NO: 1853775 - RNA, 18 nt, Human
aguaauaugcacacauuu

SEQ ID NO: 1853776 - RNA, 19 nt, Human
aguaauaugcacacauuuu

SEQ ID NO: 1853777 - RNA, 17 nt, Human
aguaauaugcacacauu

SEQ ID NO: 1853778 - RNA, 20 nt, Human
aguaauaugcacacauuuuu

SEQ ID NO: 1853779 - RNA, 23 nt, Human
aguaaggaauuuuauuuuuuucu

SEQ ID NO: 1853780 - RNA, 21 nt, Human
aguaauccaagcaaaugugaa

SEQ ID NO: 1853781 - RNA, 14 nt, Human
aguaauccaccugc

SEQ ID NO: 1853782 - RNA, 15 nt, Human
aguaauccaagcaaa

SEQ ID NO: 1853783 - RNA, 19 nt, Human
aguacuuuuggcauuuuac

SEQ ID NO: 1853784 - RNA, 16 nt, Human
aguacacuguuucaaa

SEQ ID NO: 1853785 - RNA, 20 nt, Human
aguacacuguuucaaacuuu

SEQ ID NO: 1853786 - RNA, 14 nt, Human
aguacacuguuuca

SEQ ID NO: 1853787 - RNA, 20 nt, Human
uguaggaagguuaauguuca

SEQ ID NO: 1853788 - RNA, 18 nt, Human
uguaggaagguuaauguu

SEQ ID NO: 1853789 - RNA, 17 nt, Human
aguagaagucuuagaug

SEQ ID NO: 1853790 - RNA, 12 nt, Human
aguagagacagg

SEQ ID NO: 1853791 - RNA, 20 nt, Human
aggugggauccuccaggugc

SEQ ID NO: 1853792 - RNA, 14 nt, Human
agguggccacucca

SEQ ID NO: 1853793 - RNA, 17 nt, Human
agguggccacuccagac

SEQ ID NO: 1853794 - RNA, 21 nt, Human
aggugcacaagcuccaagcuc

SEQ ID NO: 1853795 - RNA, 15 nt, Human
aggugcacaagcucc

SEQ ID NO: 1853796 - RNA, 20 nt, Human
aggugcacaagcuccaagcu

SEQ ID NO: 1853797 - RNA, 18 nt, Human
aggugcacaagcuccaag

SEQ ID NO: 1853798 - RNA, 17 nt, Human
aggugcacaagcuccaa

SEQ ID NO: 1853799 - RNA, 16 nt, Human
aggugcacaagcucca

SEQ ID NO: 1853800 - RNA, 10 nt, Human
aggucccuaa

SEQ ID NO: 1853801 - RNA, 23 nt, Human
aggucuugaacuccuggccucaa

SEQ ID NO: 1853802 - RNA, 23 nt, Human
uguaauuaaguacuauguaucaa

SEQ ID NO: 1853803 - RNA, 19 nt, Human
uguaagaucguucucugcc

SEQ ID NO: 1853804 - RNA, 20 nt, Human
uguaagaucguucucugccu

SEQ ID NO: 1853805 - RNA, 14 nt, Human
agguuggugggggc

SEQ ID NO: 1853806 - RNA, 17 nt, Human
uguaacuuucugaaaua

SEQ ID NO: 1853807 - RNA, 17 nt, Human
aggugguuauggagagg

SEQ ID NO: 1853808 - RNA, 22 nt, Human
aguccaggcuuuuuuaucaugu

SEQ ID NO: 1853809 - RNA, 12 nt, Human
agucccugccaa

SEQ ID NO: 1853810 - RNA, 16 nt, Human
agucucacuguugccc

SEQ ID NO: 1853811 - RNA, 17 nt, Human
agucucacuguugccca

SEQ ID NO: 1853812 - RNA, 23 nt, Human
aguccgaaagggacuuggaagcu

SEQ ID NO: 1853813 - RNA, 14 nt, Human
uguccgagcuuuga

SEQ ID NO: 1853814 - RNA, 13 nt, Human
uguccgagcuuug

SEQ ID NO: 1853815 - RNA, 16 nt, Human
ugucgcccaggcugga

SEQ ID NO: 1853816 - RNA, 15 nt, Human
ugucgcccaggcugg

SEQ ID NO: 1853817 - RNA, 16 nt, Human
uguccuacccacccuc

SEQ ID NO: 1853818 - RNA, 15 nt, Human
ugucgggcaugacac

SEQ ID NO: 1853819 - RNA, 14 nt, Human
ugucgggcaugaca

SEQ ID NO: 1853820 - RNA, 12 nt, Human
ugucgggcauga

SEQ ID NO: 1853821 - RNA, 13 nt, Human
ugucgccucugca

SEQ ID NO: 1853822 - RNA, 14 nt, Human
ugucgcccagucug

SEQ ID NO: 1853823 - RNA, 15 nt, Human
ugucgcccagucugg

SEQ ID NO: 1853824 - RNA, 16 nt, Human
agucagacagaugugg

SEQ ID NO: 1853825 - RNA, 13 nt, Human
agucaccaagccc

SEQ ID NO: 1853826 - RNA, 14 nt, Human
agucaccaagccca

SEQ ID NO: 1853827 - RNA, 16 nt, Human
ugucagcugaaccugg

SEQ ID NO: 1853828 - RNA, 13 nt, Human
agucacugcacag

SEQ ID NO: 1853829 - RNA, 18 nt, Human
agucacugagacagcccg

SEQ ID NO: 1853830 - RNA, 19 nt, Human
agucacugagacagcccgg

SEQ ID NO: 1853831 - RNA, 19 nt, Human
ugucagcugaaccugggua

SEQ ID NO: 1853832 - RNA, 16 nt, Human
ugucagguggggcagc

SEQ ID NO: 1853833 - RNA, 23 nt, Human
ugucauuugcuggagcucugccc

SEQ ID NO: 1853834 - RNA, 16 nt, Human
aguaggaagacuuugg

SEQ ID NO: 1853835 - RNA, 22 nt, Human
aguaggaagacuuuggaaagac

SEQ ID NO: 1853836 - RNA, 19 nt, Human
aguaggaagacuuuggaaa

SEQ ID NO: 1853837 - RNA, 18 nt, Human
aguaggaagacuuuggaa

SEQ ID NO: 1853838 - RNA, 17 nt, Human
aguaggaagacuuugga

SEQ ID NO: 1853839 - RNA, 14 nt, Human
uguauuuuuuuacu

SEQ ID NO: 1853840 - RNA, 16 nt, Human
uguauuuuuuuacuaa

SEQ ID NO: 1853841 - RNA, 15 nt, Human
ugucaagccauaauu

SEQ ID NO: 1853842 - RNA, 19 nt, Human
ugucaagagggucugagga

SEQ ID NO: 1853843 - RNA, 15 nt, Human
ugugcugcccugccc

SEQ ID NO: 1853844 - RNA, 14 nt, Human
ugugcugcccugcc

SEQ ID NO: 1853845 - RNA, 13 nt, Human
ugugcugcccugc

SEQ ID NO: 1853846 - RNA, 16 nt, Human
ugugcucuggacaggc

SEQ ID NO: 1853847 - RNA, 18 nt, Human
ugugcucuggacaggcau

SEQ ID NO: 1853848 - RNA, 19 nt, Human
ugugcucuggacaggcaug

SEQ ID NO: 1853849 - RNA, 20 nt, Human
ugugcccuaaaguguauuuu

SEQ ID NO: 1853850 - RNA, 21 nt, Human
ugugcccuaaaguguauuuuu

SEQ ID NO: 1853851 - RNA, 21 nt, Human
agucucacuguugcccaggcu

SEQ ID NO: 1853852 - RNA, 20 nt, Human
agucucacuguugcccaggc

SEQ ID NO: 1853853 - RNA, 18 nt, Human
agucucacuguugcccag

SEQ ID NO: 1853854 - RNA, 19 nt, Human
agucucacuguugcccagg

SEQ ID NO: 1853855 - RNA, 13 nt, Human
ugugccucugccu

SEQ ID NO: 1853856 - RNA, 12 nt, Human
ugugccucugcc

SEQ ID NO: 1853857 - RNA, 22 nt, Human
ugugcucugaucauccacugug

SEQ ID NO: 1853858 - RNA, 12 nt, Human
ugugcucugauc

SEQ ID NO: 1853859 - RNA, 23 nt, Human
ugugcucugaucauccacugugc

SEQ ID NO: 1853860 - RNA, 15 nt, Human
ugugcucuggacagg

SEQ ID NO: 1853861 - RNA, 17 nt, Human
agugcaucucagcccac

SEQ ID NO: 1853862 - RNA, 16 nt, Human
agugcaucucagccca

SEQ ID NO: 1853863 - RNA, 14 nt, Human
agugcaucucagcc

SEQ ID NO: 1853864 - RNA, 15 nt, Human
agugcaucucagccc

SEQ ID NO: 1853865 - RNA, 16 nt, Human
agugccaaaaacaaca

SEQ ID NO: 1853866 - RNA, 14 nt, Human
agugcccacaggau

SEQ ID NO: 1853867 - RNA, 16 nt, Human
agugagucgaggacag

SEQ ID NO: 1853868 - RNA, 22 nt, Human
agugauucuccugccucagccu

SEQ ID NO: 1853869 - RNA, 24 nt, Human
agugauucuccugccucagccucc

SEQ ID NO: 1853870 - RNA, 16 nt, Human
agugcaaugacacagu

SEQ ID NO: 1853871 - RNA, 18 nt, Human
agugcaaugacacagucu

SEQ ID NO: 1853872 - RNA, 14 nt, Human
uguguuaugaagca

SEQ ID NO: 1853873 - RNA, 16 nt, Human
ugugucucuugguccu

SEQ ID NO: 1853874 - RNA, 20 nt, Human
ugugucuaggcaggaccugu

SEQ ID NO: 1853875 - RNA, 11 nt, Human
ugugugugugc

SEQ ID NO: 1853876 - RNA, 13 nt, Human
ugugucucuuggu

SEQ ID NO: 1853877 - RNA, 19 nt, Human
ugugucuaggcaggaccug

SEQ ID NO: 1853878 - RNA, 20 nt, Human
ugugucagguggggcagcuu

SEQ ID NO: 1853879 - RNA, 17 nt, Human
ugugucagguggggcag

SEQ ID NO: 1853880 - RNA, 19 nt, Human
ugugucagguggggcagcu

SEQ ID NO: 1853881 - RNA, 19 nt, Human
aguggaaaaauagccugcc

SEQ ID NO: 1853882 - RNA, 18 nt, Human
aguggaaaaauagccugc

SEQ ID NO: 1853883 - RNA, 11 nt, Human
aguggaaaaau

SEQ ID NO: 1853884 - RNA, 19 nt, Human
uguuaaugauagcuacugu

SEQ ID NO: 1853885 - RNA, 21 nt, Human
uguuaacauggacaugaucuu

SEQ ID NO: 1853886 - RNA, 12 nt, Human
ugugguuucauu

SEQ ID NO: 1853887 - RNA, 19 nt, Human
ugugucagcauagaaguaa

SEQ ID NO: 1853888 - RNA, 16 nt, Human
agugcuuccaaggaug

SEQ ID NO: 1853889 - RNA, 21 nt, Human
agugccuguaaucacagcuac

SEQ ID NO: 1853890 - RNA, 15 nt, Human
agugccuuacacaau

SEQ ID NO: 1853891 - RNA, 17 nt, Human
agugccuuacacaaugg

SEQ ID NO: 1853892 - RNA, 20 nt, Human
agugcugcauuuaaaagaua

SEQ ID NO: 1853893 - RNA, 22 nt, Human
agugcugcauuuaaaagauaca

SEQ ID NO: 1853894 - RNA, 20 nt, Human
agugcugggauuacaagcgu

SEQ ID NO: 1853895 - RNA, 20 nt, Human
agugcugggauuacaggcgu

SEQ ID NO: 1853896 - RNA, 17 nt, Human
agugcugggauuacagg

SEQ ID NO: 1853897 - RNA, 19 nt, Human
agugcugggauuacaggug

SEQ ID NO: 1853898 - RNA, 14 nt, Human
uguuuauugucaaa

SEQ ID NO: 1853899 - RNA, 17 nt, Human
uguuuaguaaucauauu

SEQ ID NO: 1853900 - RNA, 14 nt, Human
uguuuaguaaucau

SEQ ID NO: 1853901 - RNA, 13 nt, Human
uguuuaguaauca

SEQ ID NO: 1853902 - RNA, 20 nt, Human
uguuuagauaauacaccacu

SEQ ID NO: 1853903 - RNA, 23 nt, Human
aguuccucauuagcauuuugcua

SEQ ID NO: 1853904 - RNA, 15 nt, Human
aguucccuacuuccu

SEQ ID NO: 1853905 - RNA, 16 nt, Human
aguucaauucucauuu

SEQ ID NO: 1853906 - RNA, 19 nt, Human
aguucggugagcuacaaau

SEQ ID NO: 1853907 - RNA, 20 nt, Human
aguucggugagcuacaaaug

SEQ ID NO: 1853908 - RNA, 21 nt, Human
aguguucauaaauaaaguuug

SEQ ID NO: 1853909 - RNA, 19 nt, Human
aguguguguuuuucauaaa

SEQ ID NO: 1853910 - RNA, 22 nt, Human
uguucuugguuuguaaauuaac

SEQ ID NO: 1853911 - RNA, 20 nt, Human
uguucuugguuuguaaauua

SEQ ID NO: 1853912 - RNA, 19 nt, Human
uguucuuucacccuuuucu

SEQ ID NO: 1853913 - RNA, 13 nt, Human
uguugcccaggcu

SEQ ID NO: 1853914 - RNA, 14 nt, Human
uguugcccaggcug

SEQ ID NO: 1853915 - RNA, 21 nt, Human
uguugcccaggcuggagugca

SEQ ID NO: 1853916 - RNA, 15 nt, Human
uguugcccaggcugg

SEQ ID NO: 1853917 - RNA, 21 nt, Human
aguuacucuucaguuaagccu

SEQ ID NO: 1853918 - RNA, 18 nt, Human
uguucuuaguuugcaguu

SEQ ID NO: 1853919 - RNA, 18 nt, Human
uguucuagcauggcugcc

SEQ ID NO: 1853920 - RNA, 16 nt, Human
aguggaaccagcccag

SEQ ID NO: 1853921 - RNA, 21 nt, Human
uuaagaaaaaggaugcacaga

SEQ ID NO: 1853922 - RNA, 20 nt, Human
uuaagaaaaaggaugcacag

SEQ ID NO: 1853923 - RNA, 18 nt, Human
auaaaagccuguuuaaga

SEQ ID NO: 1853924 - RNA, 15 nt, Human
aguuuuuauugcuug

SEQ ID NO: 1853925 - RNA, 20 nt, Human
aguuuuuauugcuuguugga

SEQ ID NO: 1853926 - RNA, 13 nt, Human
auaaaagccuguu

SEQ ID NO: 1853927 - RNA, 23 nt, Human
aguuuuuauggcuuuugugcauu

SEQ ID NO: 1853928 - RNA, 12 nt, Human
aguuuuguaaau

SEQ ID NO: 1853929 - RNA, 15 nt, Human
aguuuuguaaauuuc

SEQ ID NO: 1853930 - RNA, 18 nt, Human
uuaaugaaagacuguaca

SEQ ID NO: 1853931 - RNA, 22 nt, Human
uuaaucugguuuauuuuuguuc

SEQ ID NO: 1853932 - RNA, 21 nt, Human
uuaauugacuuauuuauauaa

SEQ ID NO: 1853933 - RNA, 19 nt, Human
uuaaugaaagacuguacaa

SEQ ID NO: 1853934 - RNA, 22 nt, Human
uuaaucauuaggugugacugaa

SEQ ID NO: 1853935 - RNA, 23 nt, Human
uuaaucauuaggugugacugaau

SEQ ID NO: 1853936 - RNA, 21 nt, Human
uuaaucugggccagaauuuca

SEQ ID NO: 1853937 - RNA, 22 nt, Human
uuaauauuuauaggucacuuug

SEQ ID NO: 1853938 - RNA, 13 nt, Human
uuaaucauuaggu

SEQ ID NO: 1853939 - RNA, 9 nt, Human
uuaaggugg

SEQ ID NO: 1853940 - RNA, 22 nt, Human
uuaagaaagacuaucuaaaugu

SEQ ID NO: 1853941 - RNA, 15 nt, Human
uuaagugcugcauuu

SEQ ID NO: 1853942 - RNA, 16 nt, Human
uuaagugcugcauuua

SEQ ID NO: 1853943 - RNA, 19 nt, Human
uuaagugcugcauuuaaaa

SEQ ID NO: 1853944 - RNA, 14 nt, Human
uuaagugcugcauu

SEQ ID NO: 1853945 - RNA, 23 nt, Human
aguugccagucaccccggccacc

SEQ ID NO: 1853946 - RNA, 17 nt, Human
aguuggguggaugccug

SEQ ID NO: 1853947 - RNA, 19 nt, Human
aguugggcuuccucauagu

SEQ ID NO: 1853948 - RNA, 13 nt, Human
aguugggcuuccu

SEQ ID NO: 1853949 - RNA, 14 nt, Human
aguuuaauugacuu

SEQ ID NO: 1853950 - RNA, 15 nt, Human
aguuuaauugacuua

SEQ ID NO: 1853951 - RNA, 18 nt, Human
aguuuaauugacuuauuu

SEQ ID NO: 1853952 - RNA, 13 nt, Human
uuaaaaaaaaucc

SEQ ID NO: 1853953 - RNA, 13 nt, Human
aguuggucccccu

SEQ ID NO: 1853954 - RNA, 11 nt, Human
aguuggucccc

SEQ ID NO: 1853955 - RNA, 17 nt, Human
aguuggucccccuucca

SEQ ID NO: 1853956 - RNA, 14 nt, Human
aguuuaaauuguaa

SEQ ID NO: 1853957 - RNA, 19 nt, Human
uuaacagaaauguacagca

SEQ ID NO: 1853958 - RNA, 20 nt, Human
uuaacagaaauguacagcaa

SEQ ID NO: 1853959 - RNA, 16 nt, Human
uuaaauaaugugaaac

SEQ ID NO: 1853960 - RNA, 18 nt, Human
uuaaauaaugugaaacug

SEQ ID NO: 1853961 - RNA, 15 nt, Human
uuaaauaaugugaaa

SEQ ID NO: 1853962 - RNA, 14 nt, Human
uuaaaaaucucaaa

SEQ ID NO: 1853963 - RNA, 15 nt, Human
uuaaaaaucucaaau

SEQ ID NO: 1853964 - RNA, 16 nt, Human
uuaaaaaucucaaauu

SEQ ID NO: 1853965 - RNA, 17 nt, Human
uuaaaaaucucaaauuu

SEQ ID NO: 1853966 - RNA, 15 nt, Human
auaaauaguuuauga

SEQ ID NO: 1853967 - RNA, 14 nt, Human
auaaauaaaaauaa

SEQ ID NO: 1853968 - RNA, 15 nt, Human
auaaagguucaugca

SEQ ID NO: 1853969 - RNA, 17 nt, Human
auaaagguucaugcaaa

SEQ ID NO: 1853970 - RNA, 13 nt, Human
auaaauaaaaaua

SEQ ID NO: 1853971 - RNA, 14 nt, Human
auaacguauaaaag

SEQ ID NO: 1853972 - RNA, 22 nt, Human
auaacgauaaaagacagugaaa

SEQ ID NO: 1853973 - RNA, 11 nt, Human
auaaauuauuu

SEQ ID NO: 1853974 - RNA, 23 nt, Human
uuacucuucaguuaagccuuugg

SEQ ID NO: 1853975 - RNA, 17 nt, Human
uuagaaauugcauuucc

SEQ ID NO: 1853976 - RNA, 13 nt, Human
uuagacagagucu

SEQ ID NO: 1853977 - RNA, 13 nt, Human
uuagacagucccu

SEQ ID NO: 1853978 - RNA, 20 nt, Human
uuagacagagucucacuguu

SEQ ID NO: 1853979 - RNA, 20 nt, Human
uuaccuuugacaaagguaaa

SEQ ID NO: 1853980 - RNA, 13 nt, Human
uuaccuuugacaa

SEQ ID NO: 1853981 - RNA, 24 nt, Human
uuacaggcgugagccaccgugccu

SEQ ID NO: 1853982 - RNA, 18 nt, Human
uuacaggcuccugccacc

SEQ ID NO: 1853983 - RNA, 16 nt, Human
uuacaggcuccugcca

SEQ ID NO: 1853984 - RNA, 19 nt, Human
uuacccucauguucuuaau

SEQ ID NO: 1853985 - RNA, 12 nt, Human
auaauacaccac

SEQ ID NO: 1853986 - RNA, 18 nt, Human
auaauacaccacuacauu

SEQ ID NO: 1853987 - RNA, 20 nt, Human
auaauacaccacuacauucu

SEQ ID NO: 1853988 - RNA, 19 nt, Human
auaauacuugcuuuggaaa

SEQ ID NO: 1853989 - RNA, 14 nt, Human
uuagacagucccug

SEQ ID NO: 1853990 - RNA, 22 nt, Human
auaauugacaggauuauuggaa

SEQ ID NO: 1853991 - RNA, 15 nt, Human
auaaugaaugaaaca

SEQ ID NO: 1853992 - RNA, 15 nt, Human
auaaugcgugcauac

SEQ ID NO: 1853993 - RNA, 20 nt, Human
auaaucuggacuccucuguc

SEQ ID NO: 1853994 - RNA, 19 nt, Human
auaaucuggacuccucugu

SEQ ID NO: 1853995 - RNA, 18 nt, Human
auaaucuggacuccucug

SEQ ID NO: 1853996 - RNA, 18 nt, Human
auaaucucuccauucccg

SEQ ID NO: 1853997 - RNA, 18 nt, Human
auaauccuaaacauauga

SEQ ID NO: 1853998 - RNA, 22 nt, Human
uuaguuugcaguuacacuaaaa

SEQ ID NO: 1853999 - RNA, 15 nt, Human
uuaguuucuccaagc

SEQ ID NO: 1854000 - RNA, 21 nt, Human
uuaggugugacugaauuucuu

SEQ ID NO: 1854001 - RNA, 16 nt, Human
uuaggugaggaagcaa

SEQ ID NO: 1854002 - RNA, 16 nt, Human
uuaggugugacugaau

SEQ ID NO: 1854003 - RNA, 20 nt, Human
uuagggaaggauacaaaagc

SEQ ID NO: 1854004 - RNA, 18 nt, Human
uuagcaaauucuguuuuu

SEQ ID NO: 1854005 - RNA, 12 nt, Human
uuagcaccaggg

SEQ ID NO: 1854006 - RNA, 18 nt, Human
auaauuuaccugaagucu

SEQ ID NO: 1854007 - RNA, 18 nt, Human
uuagccaagugugguaga

SEQ ID NO: 1854008 - RNA, 14 nt, Human
uuagcggagacgga

SEQ ID NO: 1854009 - RNA, 15 nt, Human
uuuuaagugcugcau

SEQ ID NO: 1854010 - RNA, 16 nt, Human
uuuuaaguaaggaauu

SEQ ID NO: 1854011 - RNA, 23 nt, Human
uuuuaaggguuuguggaaaauga

SEQ ID NO: 1854012 - RNA, 20 nt, Human
uuuuaaggguuuguggaaaa

SEQ ID NO: 1854013 - RNA, 16 nt, Human
uuuuaagaggcagggu

SEQ ID NO: 1854014 - RNA, 15 nt, Human
uuuuaagaggcaggg

SEQ ID NO: 1854015 - RNA, 18 nt, Human
uuuguuugaacugauaaa

SEQ ID NO: 1854016 - RNA, 16 nt, Human
uuuuaaaacacuucca

SEQ ID NO: 1854017 - RNA, 22 nt, Human
uuuuaaaacacuuccauaaucu

SEQ ID NO: 1854018 - RNA, 13 nt, Human
uuuguaaauuguc

SEQ ID NO: 1854019 - RNA, 13 nt, Human
uuuguagagccag

SEQ ID NO: 1854020 - RNA, 19 nt, Human
uuugugaggaagccgcugg

SEQ ID NO: 1854021 - RNA, 18 nt, Human
uuugugaggaagccgcug

SEQ ID NO: 1854022 - RNA, 12 nt, Human
uuuguuugaacu

SEQ ID NO: 1854023 - RNA, 13 nt, Human
uuuguuugaacug

SEQ ID NO: 1854024 - RNA, 14 nt, Human
uuuguuugaacuga

SEQ ID NO: 1854025 - RNA, 16 nt, Human
uuugugagcaggcugu

SEQ ID NO: 1854026 - RNA, 23 nt, Human
auguccaagaagcccaggaaagg

SEQ ID NO: 1854027 - RNA, 18 nt, Human
auguccaagaagcccagg

SEQ ID NO: 1854028 - RNA, 19 nt, Human
auguccaagaagcccagga

SEQ ID NO: 1854029 - RNA, 16 nt, Human
augucagugugacuga

SEQ ID NO: 1854030 - RNA, 15 nt, Human
augucagugugacug

SEQ ID NO: 1854031 - RNA, 21 nt, Human
augucagugugacugaucucu

SEQ ID NO: 1854032 - RNA, 20 nt, Human
augucccaacuuguaaaaau

SEQ ID NO: 1854033 - RNA, 16 nt, Human
auguccacugguucuu

SEQ ID NO: 1854034 - RNA, 24 nt, Human
augucccuaccgagucucuucucc

SEQ ID NO: 1854035 - RNA, 12 nt, Human
auguauguguaa

SEQ ID NO: 1854036 - RNA, 15 nt, Human
auguaucugagcagg

SEQ ID NO: 1854037 - RNA, 15 nt, Human
auguaucaaugagua

SEQ ID NO: 1854038 - RNA, 22 nt, Human
uuugggggaaaauuuagaaaua

SEQ ID NO: 1854039 - RNA, 22 nt, Human
uuugccauguuggccaggcugg

SEQ ID NO: 1854040 - RNA, 22 nt, Human
uuugggaggccaaggugggagg

SEQ ID NO: 1854041 - RNA, 14 nt, Human
uuuggggauauuuu

SEQ ID NO: 1854042 - RNA, 15 nt, Human
uuugcuucaaaaaca

SEQ ID NO: 1854043 - RNA, 21 nt, Human
uuugcuguagaagauggcacu

SEQ ID NO: 1854044 - RNA, 17 nt, Human
auguuuuucuucucccu

SEQ ID NO: 1854045 - RNA, 18 nt, Human
auguuuuucuucucccuc

SEQ ID NO: 1854046 - RNA, 14 nt, Human
auguuuuccaugag

SEQ ID NO: 1854047 - RNA, 14 nt, Human
auuaagaaagacua

SEQ ID NO: 1854048 - RNA, 13 nt, Human
auuaagaaagacu

SEQ ID NO: 1854049 - RNA, 23 nt, Human
auuaacuuuuauaaacuuuaccu

SEQ ID NO: 1854050 - RNA, 16 nt, Human
auuaacuuuuauaaac

SEQ ID NO: 1854051 - RNA, 17 nt, Human
auuaacuuuuauaaacu

SEQ ID NO: 1854052 - RNA, 19 nt, Human
auuaacuuuuauaaacuuu

SEQ ID NO: 1854053 - RNA, 20 nt, Human
auuaacuuuuauaaacuuua

SEQ ID NO: 1854054 - RNA, 12 nt, Human
auuaacuuuuau

SEQ ID NO: 1854055 - RNA, 17 nt, Human
auuaaacuuaaucuaaa

SEQ ID NO: 1854056 - RNA, 16 nt, Human
auuaaacuuaaucuaa

SEQ ID NO: 1854057 - RNA, 19 nt, Human
auuaaacuuaaucuaaaug

SEQ ID NO: 1854058 - RNA, 21 nt, Human
auuaaacuuaaucuaaaugga

SEQ ID NO: 1854059 - RNA, 17 nt, Human
auuaaccacuucagcug

SEQ ID NO: 1854060 - RNA, 20 nt, Human
auuaaccacuucagcugacu

SEQ ID NO: 1854061 - RNA, 18 nt, Human
auuaaccacuucagcuga

SEQ ID NO: 1854062 - RNA, 21 nt, Human
uuuuauucagcucauggacuu

SEQ ID NO: 1854063 - RNA, 17 nt, Human
uuuucagauauaaaaga

SEQ ID NO: 1854064 - RNA, 22 nt, Human
uuuucagauauaaaagacugac

SEQ ID NO: 1854065 - RNA, 19 nt, Human
uuuucagauauaaaagacu

SEQ ID NO: 1854066 - RNA, 21 nt, Human
uuuucagauauaaaagacuga

SEQ ID NO: 1854067 - RNA, 19 nt, Human
uuuuccagguuuaagcugu

SEQ ID NO: 1854068 - RNA, 18 nt, Human
uuuuaugugaaacauguu

SEQ ID NO: 1854069 - RNA, 19 nt, Human
uuuuaugugaaacauguuu

SEQ ID NO: 1854070 - RNA, 22 nt, Human
uuuuauguugcauagaauaaaa

SEQ ID NO: 1854071 - RNA, 19 nt, Human
uuuuauaaacuuuaccuuu

SEQ ID NO: 1854072 - RNA, 14 nt, Human
uuuuauaaacuuua

SEQ ID NO: 1854073 - RNA, 17 nt, Human
uuuuauaaacuuuaccu

SEQ ID NO: 1854074 - RNA, 13 nt, Human
auguuggccaggc

SEQ ID NO: 1854075 - RNA, 14 nt, Human
auguuggccaggcu

SEQ ID NO: 1854076 - RNA, 16 nt, Human
auguuggccaggcugc

SEQ ID NO: 1854077 - RNA, 16 nt, Human
auguuggccaggcugg

SEQ ID NO: 1854078 - RNA, 12 nt, Human
uuuuauaaacuu

SEQ ID NO: 1854079 - RNA, 13 nt, Human
uuuuauaaacuuu

SEQ ID NO: 1854080 - RNA, 19 nt, Human
uuuuaguugcaacuuugua

SEQ ID NO: 1854081 - RNA, 23 nt, Human
uuuuagaguugauacuacaguuu

SEQ ID NO: 1854082 - RNA, 15 nt, Human
auguugaagccuuug

SEQ ID NO: 1854083 - RNA, 16 nt, Human
auguugaagccuuugu

SEQ ID NO: 1854084 - RNA, 19 nt, Human
auguucaucaaugaaugaa

SEQ ID NO: 1854085 - RNA, 21 nt, Human
auguucaucauccuaagcuau

SEQ ID NO: 1854086 - RNA, 16 nt, Human
uuuuaagugcugcauu

SEQ ID NO: 1854087 - RNA, 17 nt, Human
uuuuaagugcugcauuu

SEQ ID NO: 1854088 - RNA, 21 nt, Human
uuuuaagugcugcauuuaaaa

SEQ ID NO: 1854089 - RNA, 21 nt, Human
uuuuaaguuacacauuuuuca

SEQ ID NO: 1854090 - RNA, 22 nt, Human
uuuuaaguuacacauuuuucag

SEQ ID NO: 1854091 - RNA, 20 nt, Human
auuccacuuauaggaauuga

SEQ ID NO: 1854092 - RNA, 13 nt, Human
auuccacagcugc

SEQ ID NO: 1854093 - RNA, 16 nt, Human
auuccccaggaggcca

SEQ ID NO: 1854094 - RNA, 20 nt, Human
auuccccagauugcaacagg

SEQ ID NO: 1854095 - RNA, 22 nt, Human
auuccccacccugaaagcccug

SEQ ID NO: 1854096 - RNA, 19 nt, Human
auuccccaggaggccagcc

SEQ ID NO: 1854097 - RNA, 22 nt, Human
auucaggaagcucagggccugg

SEQ ID NO: 1854098 - RNA, 21 nt, Human
auucaggaagcucagggccug

SEQ ID NO: 1854099 - RNA, 18 nt, Human
auucagcucugcaagaau

SEQ ID NO: 1854100 - RNA, 14 nt, Human
auucagcucugcaa

SEQ ID NO: 1854101 - RNA, 16 nt, Human
auucaguuguuagugu

SEQ ID NO: 1854102 - RNA, 23 nt, Human
auucaggaagcucagggccuggc

SEQ ID NO: 1854103 - RNA, 21 nt, Human
auucaguuguuagugugucuu

SEQ ID NO: 1854104 - RNA, 14 nt, Human
auucagcucaugga

SEQ ID NO: 1854105 - RNA, 16 nt, Human
auucaaaaugauguau

SEQ ID NO: 1854106 - RNA, 18 nt, Human
auuauuuuauguugcaua

SEQ ID NO: 1854107 - RNA, 16 nt, Human
auuauuuuauguugca

SEQ ID NO: 1854108 - RNA, 23 nt, Human
auuauuuauuaaaugcccagccc

SEQ ID NO: 1854109 - RNA, 17 nt, Human
auuauauuuacaaaugg

SEQ ID NO: 1854110 - RNA, 16 nt, Human
auuauauuuacaaaug

SEQ ID NO: 1854111 - RNA, 12 nt, Human
auuaccagggac

SEQ ID NO: 1854112 - RNA, 22 nt, Human
auuaccugaauuuuggcugugu

SEQ ID NO: 1854113 - RNA, 19 nt, Human
auuaccacagacauacuaa

SEQ ID NO: 1854114 - RNA, 22 nt, Human
uuuuuguuccacaaguuaaaua

SEQ ID NO: 1854115 - RNA, 23 nt, Human
auuucuuuugccguuauuaaaaa

SEQ ID NO: 1854116 - RNA, 20 nt, Human
auuuuacuguacagacagaa

SEQ ID NO: 1854117 - RNA, 22 nt, Human
auuuuacuguacagacagaaaa

SEQ ID NO: 1854118 - RNA, 17 nt, Human
auuuuauuaugcaugaa

SEQ ID NO: 1854119 - RNA, 14 nt, Human
auuuuauuaugcau

SEQ ID NO: 1854120 - RNA, 15 nt, Human
auuuuauuaugcaug

SEQ ID NO: 1854121 - RNA, 13 nt, Human
auuuuauuaugca

SEQ ID NO: 1854122 - RNA, 14 nt, Human
auuuuauguugcau

SEQ ID NO: 1854123 - RNA, 21 nt, Human
auuuuauguugcauagaauaa

SEQ ID NO: 1854124 - RNA, 18 nt, Human
auuuuauguugcauagaa

SEQ ID NO: 1854125 - RNA, 21 nt, Human
auuuuacuuuaaaaggagcca

SEQ ID NO: 1854126 - RNA, 21 nt, Human
auuucuaaaucuccaaaauaa

SEQ ID NO: 1854127 - RNA, 12 nt, Human
auuucuaaaucu

SEQ ID NO: 1854128 - RNA, 13 nt, Human
auuucuaaaucuc

SEQ ID NO: 1854129 - RNA, 16 nt, Human
auuuauuauggcacau

SEQ ID NO: 1854130 - RNA, 14 nt, Human
auuuccugugucuu

SEQ ID NO: 1854131 - RNA, 20 nt, Human
auuuauuaaaugcccagccc

SEQ ID NO: 1854132 - RNA, 22 nt, Human
auuuauuaaaugcccagccccu

SEQ ID NO: 1854133 - RNA, 13 nt, Human
auuuauuauggca

SEQ ID NO: 1854134 - RNA, 17 nt, Human
auuuggugguuucagaa

SEQ ID NO: 1854135 - RNA, 18 nt, Human
auuuggugguuucagaaa

SEQ ID NO: 1854136 - RNA, 20 nt, Human
auuuggugguuucagaaaug

SEQ ID NO: 1854137 - RNA, 20 nt, Human
auuucuuuugccguuauuaa

SEQ ID NO: 1854138 - RNA, 15 nt, Human
auuugaggucuguuc

SEQ ID NO: 1854139 - RNA, 23 nt, Human
auuugaggucuguucuuuccaaa

SEQ ID NO: 1854140 - RNA, 17 nt, Human
auuugagcagggcucag

SEQ ID NO: 1854141 - RNA, 22 nt, Human
auuugaggucuguucuuuccaa

SEQ ID NO: 1854142 - RNA, 23 nt, Human
auuggcuuuggguugcaggaccu

SEQ ID NO: 1854143 - RNA, 13 nt, Human
auugugccccugc

SEQ ID NO: 1854144 - RNA, 15 nt, Human
auugugaaauuauuc

SEQ ID NO: 1854145 - RNA, 15 nt, Human
auuguauuacaaauc

SEQ ID NO: 1854146 - RNA, 14 nt, Human
auuguauuacaaau

SEQ ID NO: 1854147 - RNA, 19 nt, Human
auuuaauuuuuuugagaca

SEQ ID NO: 1854148 - RNA, 23 nt, Human
auuuaauuuuuuugagacagagu

SEQ ID NO: 1854149 - RNA, 16 nt, Human
auuuacaaaugggaaa

SEQ ID NO: 1854150 - RNA, 19 nt, Human
auuuacccuucuuuucuga

SEQ ID NO: 1854151 - RNA, 22 nt, Human
auuuacaacugggggaggguga

SEQ ID NO: 1854152 - RNA, 20 nt, Human
auuuaacagaaauguacagc

SEQ ID NO: 1854153 - RNA, 17 nt, Human
auuuaacagaaauguac

SEQ ID NO: 1854154 - RNA, 19 nt, Human
auuuaacagaaauguacag

SEQ ID NO: 1854155 - RNA, 15 nt, Human
auuuaacagaaaugu

SEQ ID NO: 1854156 - RNA, 16 nt, Human
auuuaacagaaaugua

SEQ ID NO: 1854157 - RNA, 14 nt, Human
auugcuacuguccu

SEQ ID NO: 1854158 - RNA, 18 nt, Human
auucuccaccugccaggg

SEQ ID NO: 1854159 - RNA, 20 nt, Human
auugacacuuaaaaaugguu

SEQ ID NO: 1854160 - RNA, 17 nt, Human
auucuccaccugccagg

SEQ ID NO: 1854161 - RNA, 16 nt, Human
auucuccaccugccag

SEQ ID NO: 1854162 - RNA, 13 nt, Human
auucuccaccugc

SEQ ID NO: 1854163 - RNA, 20 nt, Human
auucucagaaucucaaauaa

SEQ ID NO: 1854164 - RNA, 18 nt, Human
auucucagaaucucaaau

SEQ ID NO: 1854165 - RNA, 16 nt, Human
auucuacuuugagugc

SEQ ID NO: 1854166 - RNA, 13 nt, Human
auucuacuuugag

SEQ ID NO: 1854167 - RNA, 14 nt, Human
auucucagaaucuc

SEQ ID NO: 1854168 - RNA, 16 nt, Human
auugcggacagccacg

SEQ ID NO: 1854169 - RNA, 18 nt, Human
auugcggacagccacggc

SEQ ID NO: 1854170 - RNA, 19 nt, Human
auugcggacagccacggcc

SEQ ID NO: 1854171 - RNA, 17 nt, Human
auugcccacgcuggagu

SEQ ID NO: 1854172 - RNA, 21 nt, Human
auugcccacgcuggagugcag

SEQ ID NO: 1854173 - RNA, 17 nt, Human
auugcauuuccugacag

SEQ ID NO: 1854174 - RNA, 16 nt, Human
auugcauuuccugaca

SEQ ID NO: 1854175 - RNA, 23 nt, Human
auugccauuucuuccacaagagc

SEQ ID NO: 1854176 - RNA, 12 nt, Human
auugcaauagaa

SEQ ID NO: 1854177 - RNA, 16 nt, Human
auugcaacaggcuggg

SEQ ID NO: 1854178 - RNA, 21 nt, Human
auugcaacaggcugggcuuca

SEQ ID NO: 1854179 - RNA, 21 nt, Human
auugacccacaagaaaugaaa

SEQ ID NO: 1854180 - RNA, 18 nt, Human
auugacaggauuauugga

SEQ ID NO: 1854181 - RNA, 13 nt, Human
auugaccugaggc

SEQ ID NO: 1854182 - RNA, 15 nt, Human
auugcaacaggcugg

SEQ ID NO: 1854183 - RNA, 11 nt, Human
uucagaaaugu

SEQ ID NO: 1854184 - RNA, 13 nt, Human
uucagaaaugugu

SEQ ID NO: 1854185 - RNA, 13 nt, Human
uucagugccuuau

SEQ ID NO: 1854186 - RNA, 12 nt, Human
uucagugccuua

SEQ ID NO: 1854187 - RNA, 16 nt, Human
uucagugccaaaaaca

SEQ ID NO: 1854188 - RNA, 18 nt, Human
uucagugccuuauggaac

SEQ ID NO: 1854189 - RNA, 19 nt, Human
uucauaauuauuauuuggc

SEQ ID NO: 1854190 - RNA, 17 nt, Human
uucaucccucuggggcu

SEQ ID NO: 1854191 - RNA, 21 nt, Human
uucaucccucuggggcuguuc

SEQ ID NO: 1854192 - RNA, 13 nt, Human
auauauuuuaaga

SEQ ID NO: 1854193 - RNA, 12 nt, Human
auauauuuuaag

SEQ ID NO: 1854194 - RNA, 14 nt, Human
auauauuuuaagac

SEQ ID NO: 1854195 - RNA, 20 nt, Human
auaucugaaaauguaugugu

SEQ ID NO: 1854196 - RNA, 17 nt, Human
auaucugaaaauguaug

SEQ ID NO: 1854197 - RNA, 16 nt, Human
auaucugaaaauguau

SEQ ID NO: 1854198 - RNA, 17 nt, Human
auauguaacaagccacc

SEQ ID NO: 1854199 - RNA, 16 nt, Human
auauguaacaagccac

SEQ ID NO: 1854200 - RNA, 14 nt, Human
auaugcacacauuu

SEQ ID NO: 1854201 - RNA, 15 nt, Human
auaugcacacauuuu

SEQ ID NO: 1854202 - RNA, 16 nt, Human
auaugcacacauuuuu

SEQ ID NO: 1854203 - RNA, 22 nt, Human
auaugcacacauuuuuuaaaug

SEQ ID NO: 1854204 - RNA, 17 nt, Human
uuccaaggguacuaagg

SEQ ID NO: 1854205 - RNA, 15 nt, Human
uuccaaggguacuaa

SEQ ID NO: 1854206 - RNA, 18 nt, Human
uucauuuaggugaggaag

SEQ ID NO: 1854207 - RNA, 15 nt, Human
auauguggaguucau

SEQ ID NO: 1854208 - RNA, 16 nt, Human
auauguggaguucauc

SEQ ID NO: 1854209 - RNA, 17 nt, Human
uuccaggggugggacac

SEQ ID NO: 1854210 - RNA, 19 nt, Human
uuccaccaucaagccacca

SEQ ID NO: 1854211 - RNA, 22 nt, Human
uuccacaagagcccaggccucc

SEQ ID NO: 1854212 - RNA, 22 nt, Human
uucccaccucucucacuccuug

SEQ ID NO: 1854213 - RNA, 12 nt, Human
uucccaccucuc

SEQ ID NO: 1854214 - RNA, 18 nt, Human
uucccaagcucugcuccu

SEQ ID NO: 1854215 - RNA, 13 nt, Human
uucccaagcucug

SEQ ID NO: 1854216 - RNA, 14 nt, Human
uucccaagcucugc

SEQ ID NO: 1854217 - RNA, 15 nt, Human
uucccaagcucugcu

SEQ ID NO: 1854218 - RNA, 16 nt, Human
uucccaagcucugcuc

SEQ ID NO: 1854219 - RNA, 22 nt, Human
uuccagugaggcucugcccuug

SEQ ID NO: 1854220 - RNA, 21 nt, Human
uuccagugaggcucugcccuu

SEQ ID NO: 1854221 - RNA, 20 nt, Human
uuccagugaggcucugcccu

SEQ ID NO: 1854222 - RNA, 19 nt, Human
uuccagugaggcucugccc

SEQ ID NO: 1854223 - RNA, 17 nt, Human
uuccagugaggcucugc

SEQ ID NO: 1854224 - RNA, 21 nt, Human
uuccaggggugggacacccug

SEQ ID NO: 1854225 - RNA, 23 nt, Human
uuccauaaucuggacuccucugu

SEQ ID NO: 1854226 - RNA, 22 nt, Human
uuccauaaucuggacuccucug

SEQ ID NO: 1854227 - RNA, 19 nt, Human
uuccauaaucuggacuccu

SEQ ID NO: 1854228 - RNA, 23 nt, Human
uucccaaagcagugcaugcuguc

SEQ ID NO: 1854229 - RNA, 22 nt, Human
auaguuaagcgugcauaaguua

SEQ ID NO: 1854230 - RNA, 20 nt, Human
auaguuguaccgcaauguga

SEQ ID NO: 1854231 - RNA, 22 nt, Human
auaguuggcuaggaccccucca

SEQ ID NO: 1854232 - RNA, 21 nt, Human
auagugaggcaucgcaaugua

SEQ ID NO: 1854233 - RNA, 15 nt, Human
auaguggugugauuu

SEQ ID NO: 1854234 - RNA, 17 nt, Human
auaguggcuuaaaacaa

SEQ ID NO: 1854235 - RNA, 16 nt, Human
auauaaaagacugacc

SEQ ID NO: 1854236 - RNA, 13 nt, Human
auauauaaccagu

SEQ ID NO: 1854237 - RNA, 12 nt, Human
auauauaaccag

SEQ ID NO: 1854238 - RNA, 15 nt, Human
uucacuuacagcacc

SEQ ID NO: 1854239 - RNA, 17 nt, Human
auaggaaaaacugauuu

SEQ ID NO: 1854240 - RNA, 16 nt, Human
auaggaaaaacugauu

SEQ ID NO: 1854241 - RNA, 14 nt, Human
auaggaaaaacuga

SEQ ID NO: 1854242 - RNA, 12 nt, Human
auaggaaaaacu

SEQ ID NO: 1854243 - RNA, 22 nt, Human
auagcuuuucccuuuuuuuaag

SEQ ID NO: 1854244 - RNA, 17 nt, Human
auaggcguaacuaauuu

SEQ ID NO: 1854245 - RNA, 20 nt, Human
uucacaguucucuccuucuu

SEQ ID NO: 1854246 - RNA, 15 nt, Human
uucacaguucucucc

SEQ ID NO: 1854247 - RNA, 20 nt, Human
uucacagaugggugcuugga

SEQ ID NO: 1854248 - RNA, 23 nt, Human
uucacaagacccaaaaggcagaa

SEQ ID NO: 1854249 - RNA, 17 nt, Human
uucaagugauucucaug

SEQ ID NO: 1854250 - RNA, 17 nt, Human
uucaaaauaaaaaugag

SEQ ID NO: 1854251 - RNA, 21 nt, Human
uucaaaauuguuacaaauugu

SEQ ID NO: 1854252 - RNA, 21 nt, Human
uucaagcgauucuucugcuuc

SEQ ID NO: 1854253 - RNA, 18 nt, Human
uuauuuuuagacagaguc

SEQ ID NO: 1854254 - RNA, 17 nt, Human
uuauuuuuagacagagu

SEQ ID NO: 1854255 - RNA, 13 nt, Human
uuauuuuuuucug

SEQ ID NO: 1854256 - RNA, 17 nt, Human
uuauuuuuuucugaauu

SEQ ID NO: 1854257 - RNA, 15 nt, Human
aucccaccaacccuc

SEQ ID NO: 1854258 - RNA, 15 nt, Human
uucuggcucuuccag

SEQ ID NO: 1854259 - RNA, 15 nt, Human
uucugccgcagcccu

SEQ ID NO: 1854260 - RNA, 14 nt, Human
uucugccgcagccc

SEQ ID NO: 1854261 - RNA, 18 nt, Human
uucuggcuaugcauuuga

SEQ ID NO: 1854262 - RNA, 20 nt, Human
uucuggcuaugcauuugaaa

SEQ ID NO: 1854263 - RNA, 22 nt, Human
uucugguugaugccugugaacu

SEQ ID NO: 1854264 - RNA, 23 nt, Human
aucaggccaggcccucugcccac

SEQ ID NO: 1854265 - RNA, 22 nt, Human
aucaggccaggcccucugccca

SEQ ID NO: 1854266 - RNA, 21 nt, Human
aucaggccaggcccucugccc

SEQ ID NO: 1854267 - RNA, 21 nt, Human
aucauugaaaucuuuuugcuu

SEQ ID NO: 1854268 - RNA, 13 nt, Human
uucuccugccuca

SEQ ID NO: 1854269 - RNA, 12 nt, Human
uucuccugccuc

SEQ ID NO: 1854270 - RNA, 14 nt, Human
uucuccugccucag

SEQ ID NO: 1854271 - RNA, 13 nt, Human
uucugccgcagcc

SEQ ID NO: 1854272 - RNA, 19 nt, Human
uucugcagccacuauuguu

SEQ ID NO: 1854273 - RNA, 14 nt, Human
uucugacccaugcu

SEQ ID NO: 1854274 - RNA, 15 nt, Human
uucugcacacagcac

SEQ ID NO: 1854275 - RNA, 16 nt, Human
uucucuuuucaaaaca

SEQ ID NO: 1854276 - RNA, 17 nt, Human
uucucuacucuagggaa

SEQ ID NO: 1854277 - RNA, 16 nt, Human
uugaaaguuuacagga

SEQ ID NO: 1854278 - RNA, 20 nt, Human
uugaaauauaggaacuuaaa

SEQ ID NO: 1854279 - RNA, 11 nt, Human
uugaaaucuuu

SEQ ID NO: 1854280 - RNA, 21 nt, Human
uugaaauuuuuauuaaauuau

SEQ ID NO: 1854281 - RNA, 18 nt, Human
uugaacccgggaggcaga

SEQ ID NO: 1854282 - RNA, 19 nt, Human
auccuaaugaaugcauaaa

SEQ ID NO: 1854283 - RNA, 14 nt, Human
auccuacaagacac

SEQ ID NO: 1854284 - RNA, 13 nt, Human
auccuaaugaaug

SEQ ID NO: 1854285 - RNA, 12 nt, Human
auccuaaugaau

SEQ ID NO: 1854286 - RNA, 13 nt, Human
auccuaguuccac

SEQ ID NO: 1854287 - RNA, 21 nt, Human
auccuaggcauuugcugaaua

SEQ ID NO: 1854288 - RNA, 13 nt, Human
uucuuaauucuua

SEQ ID NO: 1854289 - RNA, 23 nt, Human
uucuuccucccucccucuuuccc

SEQ ID NO: 1854290 - RNA, 13 nt, Human
uucuuccucugcu

SEQ ID NO: 1854291 - RNA, 12 nt, Human
uucuuccucugc

SEQ ID NO: 1854292 - RNA, 11 nt, Human
uucuuccucug

SEQ ID NO: 1854293 - RNA, 18 nt, Human
uucuguucuuucuggcua

SEQ ID NO: 1854294 - RNA, 16 nt, Human
uucuguugcugccuca

SEQ ID NO: 1854295 - RNA, 15 nt, Human
uucuguugcugccuc

SEQ ID NO: 1854296 - RNA, 20 nt, Human
uucuguuuuucuaggccugg

SEQ ID NO: 1854297 - RNA, 17 nt, Human
uucuguugcugccucau

SEQ ID NO: 1854298 - RNA, 21 nt, Human
uucuguuggccagugugacaa

SEQ ID NO: 1854299 - RNA, 22 nt, Human
uucuuucuggcuaugcauuuga

SEQ ID NO: 1854300 - RNA, 15 nt, Human
uucuuucuuccucug

SEQ ID NO: 1854301 - RNA, 13 nt, Human
uucuuucuuccuc

SEQ ID NO: 1854302 - RNA, 13 nt, Human
uucuugcaaagua

SEQ ID NO: 1854303 - RNA, 12 nt, Human
uucuugcaaagu

SEQ ID NO: 1854304 - RNA, 15 nt, Human
uucuaaaguaaaaac

SEQ ID NO: 1854305 - RNA, 13 nt, Human
uucgcuccugugu

SEQ ID NO: 1854306 - RNA, 19 nt, Human
uucuaaaucuccaaaauaa

SEQ ID NO: 1854307 - RNA, 21 nt, Human
uucgcaggauucuuccucccu

SEQ ID NO: 1854308 - RNA, 20 nt, Human
uucgauacaccgggccugga

SEQ ID NO: 1854309 - RNA, 13 nt, Human
uucucagaaucuc

SEQ ID NO: 1854310 - RNA, 13 nt, Human
uucucagcuccca

SEQ ID NO: 1854311 - RNA, 19 nt, Human
aucagacuaugaaguuuuu

SEQ ID NO: 1854312 - RNA, 14 nt, Human
aucaggccaggccc

SEQ ID NO: 1854313 - RNA, 13 nt, Human
aucaggccaggcc

SEQ ID NO: 1854314 - RNA, 21 nt, Human
uucucacugccaugccagcuu

SEQ ID NO: 1854315 - RNA, 14 nt, Human
uucuauaauuuaaa

SEQ ID NO: 1854316 - RNA, 13 nt, Human
uucuauaauuuaa

SEQ ID NO: 1854317 - RNA, 12 nt, Human
uuccucuccacu

SEQ ID NO: 1854318 - RNA, 15 nt, Human
uuccucuccacugcc

SEQ ID NO: 1854319 - RNA, 14 nt, Human
uuccucuccacugc

SEQ ID NO: 1854320 - RNA, 13 nt, Human
uuccucuccacug

SEQ ID NO: 1854321 - RNA, 20 nt, Human
uuccuucaaagcaaaugucu

SEQ ID NO: 1854322 - RNA, 23 nt, Human
aucaaguuggcuucuaaucaaag

SEQ ID NO: 1854323 - RNA, 22 nt, Human
aucaaguuggcuucuaaucaaa

SEQ ID NO: 1854324 - RNA, 19 nt, Human
aucaaccccuucgcuccug

SEQ ID NO: 1854325 - RNA, 20 nt, Human
aucaaccccuucgcuccugu

SEQ ID NO: 1854326 - RNA, 22 nt, Human
aucaaccccuucgcuccugugu

SEQ ID NO: 1854327 - RNA, 20 nt, Human
uucccuuuuuuggcugcuga

SEQ ID NO: 1854328 - RNA, 19 nt, Human
uucccuuuuuuggcugcug

SEQ ID NO: 1854329 - RNA, 18 nt, Human
uucccuuuuuuggcugcu

SEQ ID NO: 1854330 - RNA, 16 nt, Human
uucccuacuuccugug

SEQ ID NO: 1854331 - RNA, 14 nt, Human
uucccuacuuccug

SEQ ID NO: 1854332 - RNA, 17 nt, Human
uucccuacuuccuguga

SEQ ID NO: 1854333 - RNA, 22 nt, Human
uuccccuuccuaauuccacagc

SEQ ID NO: 1854334 - RNA, 14 nt, Human
uuccccuguucacu

SEQ ID NO: 1854335 - RNA, 17 nt, Human
uuccccuguucacucua

SEQ ID NO: 1854336 - RNA, 19 nt, Human
uugugauacaaugcugugc

SEQ ID NO: 1854337 - RNA, 18 nt, Human
uugugauacaaugcugug

SEQ ID NO: 1854338 - RNA, 21 nt, Human
uugugaggaagccgcuggggc

SEQ ID NO: 1854339 - RNA, 19 nt, Human
uuguucuggcucuuccagg

SEQ ID NO: 1854340 - RNA, 17 nt, Human
uuguguguuuauuguca

SEQ ID NO: 1854341 - RNA, 22 nt, Human
uuguucuggcucuuccaggcug

SEQ ID NO: 1854342 - RNA, 20 nt, Human
uuguucuggcucuuccaggc

SEQ ID NO: 1854343 - RNA, 13 nt, Human
uugugguuaaucu

SEQ ID NO: 1854344 - RNA, 19 nt, Human
augauuucagcucacugca

SEQ ID NO: 1854345 - RNA, 14 nt, Human
augauuuuuaaaga

SEQ ID NO: 1854346 - RNA, 16 nt, Human
augauuuuuaaagaaa

SEQ ID NO: 1854347 - RNA, 13 nt, Human
augcaccagcccu

SEQ ID NO: 1854348 - RNA, 12 nt, Human
augcacuuuguu

SEQ ID NO: 1854349 - RNA, 14 nt, Human
augcaccagcccuu

SEQ ID NO: 1854350 - RNA, 19 nt, Human
augauuaaccacuucagcu

SEQ ID NO: 1854351 - RNA, 21 nt, Human
augauuaaccacuucagcuga

SEQ ID NO: 1854352 - RNA, 20 nt, Human
augauuaaccacuucagcug

SEQ ID NO: 1854353 - RNA, 17 nt, Human
augauuucagcucacug

SEQ ID NO: 1854354 - RNA, 21 nt, Human
augauucaacagguuuuccug

SEQ ID NO: 1854355 - RNA, 17 nt, Human
uuuaagugcugcauuua

SEQ ID NO: 1854356 - RNA, 19 nt, Human
uuuaagugcugcauuuaaa

SEQ ID NO: 1854357 - RNA, 15 nt, Human
uuuaagugcugcauu

SEQ ID NO: 1854358 - RNA, 16 nt, Human
uuuaagugcugcauuu

SEQ ID NO: 1854359 - RNA, 12 nt, Human
uuuaauuuuaca

SEQ ID NO: 1854360 - RNA, 15 nt, Human
uuguuuuacugucuu

SEQ ID NO: 1854361 - RNA, 14 nt, Human
uuuaaauguuuuuu

SEQ ID NO: 1854362 - RNA, 16 nt, Human
uuguuuucaguguaca

SEQ ID NO: 1854363 - RNA, 13 nt, Human
uuguuuucagugu

SEQ ID NO: 1854364 - RNA, 15 nt, Human
augcacuuuguucug

SEQ ID NO: 1854365 - RNA, 16 nt, Human
augcacuuuguucugg

SEQ ID NO: 1854366 - RNA, 15 nt, Human
augccacuaaauuga

SEQ ID NO: 1854367 - RNA, 17 nt, Human
augccacuaaauugaca

SEQ ID NO: 1854368 - RNA, 15 nt, Human
augcaguuuuccuua

SEQ ID NO: 1854369 - RNA, 13 nt, Human
augcagccucaca

SEQ ID NO: 1854370 - RNA, 15 nt, Human
augcagccucacagu

SEQ ID NO: 1854371 - RNA, 14 nt, Human
augcagccucacag

SEQ ID NO: 1854372 - RNA, 17 nt, Human
augcagccucacagucc

SEQ ID NO: 1854373 - RNA, 23 nt, Human
auggacguguuaugacuccagaa

SEQ ID NO: 1854374 - RNA, 18 nt, Human
auggauuuccagccaaag

SEQ ID NO: 1854375 - RNA, 20 nt, Human
auggacguguuaugacucca

SEQ ID NO: 1854376 - RNA, 19 nt, Human
auggacguguuaugacucc

SEQ ID NO: 1854377 - RNA, 22 nt, Human
auggcacaaucucggcucacug

SEQ ID NO: 1854378 - RNA, 19 nt, Human
auggcaaggacugcaggga

SEQ ID NO: 1854379 - RNA, 17 nt, Human
auggcacaucagcacga

SEQ ID NO: 1854380 - RNA, 23 nt, Human
auggcacaucagcacgauuucug

SEQ ID NO: 1854381 - RNA, 21 nt, Human
auggccgggcgcgguggcuca

SEQ ID NO: 1854382 - RNA, 16 nt, Human
auggccagguggccac

SEQ ID NO: 1854383 - RNA, 22 nt, Human
auggccagguggccacuccaga

SEQ ID NO: 1854384 - RNA, 20 nt, Human
auggcuaguaucaaaagaaa

SEQ ID NO: 1854385 - RNA, 20 nt, Human
auggccuuugcuugaaagaa

SEQ ID NO: 1854386 - RNA, 16 nt, Human
auggaagacagcucuu

SEQ ID NO: 1854387 - RNA, 14 nt, Human
uuucacugcuggcu

SEQ ID NO: 1854388 - RNA, 18 nt, Human
uuucacugcuggcugccu

SEQ ID NO: 1854389 - RNA, 17 nt, Human
uuucacugcuggcugcc

SEQ ID NO: 1854390 - RNA, 22 nt, Human
uuucacugcuggcugccuuaga

SEQ ID NO: 1854391 - RNA, 20 nt, Human
uuucacugcuggcugccuua

SEQ ID NO: 1854392 - RNA, 13 nt, Human
uuucagaaaugug

SEQ ID NO: 1854393 - RNA, 14 nt, Human
auggacaugaucuu

SEQ ID NO: 1854394 - RNA, 19 nt, Human
auggacaugaucuucuuua

SEQ ID NO: 1854395 - RNA, 23 nt, Human
augcugucccuuacgugaguccu

SEQ ID NO: 1854396 - RNA, 19 nt, Human
augcugucccuuacgugag

SEQ ID NO: 1854397 - RNA, 15 nt, Human
auggaacacucugag

SEQ ID NO: 1854398 - RNA, 14 nt, Human
auggaacacucuga

SEQ ID NO: 1854399 - RNA, 11 nt, Human
auggaacacuc

SEQ ID NO: 1854400 - RNA, 16 nt, Human
auggaacacucugaga

SEQ ID NO: 1854401 - RNA, 15 nt, Human
auggaagacagcucu

SEQ ID NO: 1854402 - RNA, 22 nt, Human
augcuguaacuuucugaaauaa

SEQ ID NO: 1854403 - RNA, 13 nt, Human
augcugguuuuuc

SEQ ID NO: 1854404 - RNA, 15 nt, Human
augcucugcauguua

SEQ ID NO: 1854405 - RNA, 15 nt, Human
augcuagaacucccu

SEQ ID NO: 1854406 - RNA, 16 nt, Human
augcuagaacucccuu

SEQ ID NO: 1854407 - RNA, 19 nt, Human
augcuagaacucccuuuca

SEQ ID NO: 1854408 - RNA, 15 nt, Human
uuuaguagagacagg

SEQ ID NO: 1854409 - RNA, 16 nt, Human
uuuaguaucuuuuuau

SEQ ID NO: 1854410 - RNA, 24 nt, Human
uuuauggcuuuugugcauuaucua

SEQ ID NO: 1854411 - RNA, 22 nt, Human
uuuaugggucagaguuccgacu

SEQ ID NO: 1854412 - RNA, 20 nt, Human
uuuauggcuuuugugcauua

SEQ ID NO: 1854413 - RNA, 18 nt, Human
aucuugaauuguaaggaa

SEQ ID NO: 1854414 - RNA, 17 nt, Human
aucuugcucugcugaca

SEQ ID NO: 1854415 - RNA, 19 nt, Human
aucuugcucugcugacaga

SEQ ID NO: 1854416 - RNA, 17 nt, Human
aucuggguucacugcaa

SEQ ID NO: 1854417 - RNA, 19 nt, Human
aucuggguucacugcaacc

SEQ ID NO: 1854418 - RNA, 18 nt, Human
uugccgucuaccugaggg

SEQ ID NO: 1854419 - RNA, 15 nt, Human
uugccgucuaccuga

SEQ ID NO: 1854420 - RNA, 19 nt, Human
uugccgucuaccugagggg

SEQ ID NO: 1854421 - RNA, 14 nt, Human
uugccguuauuaaa

SEQ ID NO: 1854422 - RNA, 13 nt, Human
uugccgucuaccu

SEQ ID NO: 1854423 - RNA, 18 nt, Human
aucugaugcaagcaagaa

SEQ ID NO: 1854424 - RNA, 16 nt, Human
uugaugugugucuagg

SEQ ID NO: 1854425 - RNA, 14 nt, Human
uugauucagacagc

SEQ ID NO: 1854426 - RNA, 23 nt, Human
uugauggugaugaaauguaaaua

SEQ ID NO: 1854427 - RNA, 15 nt, Human
uugaugggauuuggu

SEQ ID NO: 1854428 - RNA, 12 nt, Human
uugaugccuggc

SEQ ID NO: 1854429 - RNA, 19 nt, Human
aucucuucuggguuccuuc

SEQ ID NO: 1854430 - RNA, 14 nt, Human
uugcaucugaaaau

SEQ ID NO: 1854431 - RNA, 12 nt, Human
uugcaugaggcu

SEQ ID NO: 1854432 - RNA, 16 nt, Human
uugauucagacagcug

SEQ ID NO: 1854433 - RNA, 15 nt, Human
uugauucagacagcu

SEQ ID NO: 1854434 - RNA, 19 nt, Human
uugcacaaaccaauuaaac

SEQ ID NO: 1854435 - RNA, 13 nt, Human
aucucccccagcc

SEQ ID NO: 1854436 - RNA, 12 nt, Human
aucucccccagc

SEQ ID NO: 1854437 - RNA, 14 nt, Human
aucucccccagccc

SEQ ID NO: 1854438 - RNA, 16 nt, Human
aucuccccaucauugg

SEQ ID NO: 1854439 - RNA, 15 nt, Human
aucuccacuccagau

SEQ ID NO: 1854440 - RNA, 13 nt, Human
aucuccaaaauaa

SEQ ID NO: 1854441 - RNA, 15 nt, Human
aucucacacaugagc

SEQ ID NO: 1854442 - RNA, 16 nt, Human
aucucacacaugagca

SEQ ID NO: 1854443 - RNA, 17 nt, Human
aucucaccuccugcugg

SEQ ID NO: 1854444 - RNA, 19 nt, Human
auccuaguuccaccaucaa

SEQ ID NO: 1854445 - RNA, 15 nt, Human
auccuaguuccacca

SEQ ID NO: 1854446 - RNA, 11 nt, Human
aucucagccca

SEQ ID NO: 1854447 - RNA, 21 nt, Human
aucucaccuccugcugggcag

SEQ ID NO: 1854448 - RNA, 20 nt, Human
aucucaccuccugcugggca

SEQ ID NO: 1854449 - RNA, 14 nt, Human
aucucagggccugg

SEQ ID NO: 1854450 - RNA, 14 nt, Human
augacacaugcaag

SEQ ID NO: 1854451 - RNA, 22 nt, Human
augacacaugcaaggucauuuu

SEQ ID NO: 1854452 - RNA, 23 nt, Human
augagaaaucuaaaaaacgaaaa

SEQ ID NO: 1854453 - RNA, 18 nt, Human
augagaaaucuaaaaaac

SEQ ID NO: 1854454 - RNA, 15 nt, Human
augagaaaucuaaaa

SEQ ID NO: 1854455 - RNA, 21 nt, Human
augagaaagguugaagcacca

SEQ ID NO: 1854456 - RNA, 22 nt, Human
augagaaagguugaagcaccaa

SEQ ID NO: 1854457 - RNA, 17 nt, Human
augagaaaaugucuuua

SEQ ID NO: 1854458 - RNA, 16 nt, Human
augacuuacuguacau

SEQ ID NO: 1854459 - RNA, 17 nt, Human
augacuuacuguacaug

SEQ ID NO: 1854460 - RNA, 18 nt, Human
augacacgaauauugcug

SEQ ID NO: 1854461 - RNA, 22 nt, Human
augacuuaagcacacuugacau

SEQ ID NO: 1854462 - RNA, 14 nt, Human
augacuuacuguac

SEQ ID NO: 1854463 - RNA, 22 nt, Human
aucuuuggacagaagcagcucu

SEQ ID NO: 1854464 - RNA, 18 nt, Human
aucuuugcagacaggcaa

SEQ ID NO: 1854465 - RNA, 21 nt, Human
aucuuuaauuuuacauuuccu

SEQ ID NO: 1854466 - RNA, 16 nt, Human
aucuuuaauuuuacau

SEQ ID NO: 1854467 - RNA, 22 nt, Human
aucuuuaauuuuacauuuccua

SEQ ID NO: 1854468 - RNA, 13 nt, Human
uuggcugcaggga

SEQ ID NO: 1854469 - RNA, 13 nt, Human
aucuuuuuauuca

SEQ ID NO: 1854470 - RNA, 23 nt, Human
aucuuuggacagaagcagcucuu

SEQ ID NO: 1854471 - RNA, 15 nt, Human
augaaagcagggacu

SEQ ID NO: 1854472 - RNA, 23 nt, Human
uuggcgcugccccuggcagcccc

SEQ ID NO: 1854473 - RNA, 18 nt, Human
uuggcuagagguucaaag

SEQ ID NO: 1854474 - RNA, 14 nt, Human
uuggggauauuuuu

SEQ ID NO: 1854475 - RNA, 18 nt, Human
uugggccccagaggcugg

SEQ ID NO: 1854476 - RNA, 22 nt, Human
uuggggggcugaggugggagga

SEQ ID NO: 1854477 - RNA, 15 nt, Human
augaaagggcccaga

SEQ ID NO: 1854478 - RNA, 18 nt, Human
augaagauguagaggaga

SEQ ID NO: 1854479 - RNA, 13 nt, Human
augaaugaauggc

SEQ ID NO: 1854480 - RNA, 20 nt, Human
augaaugucagugugacuga

SEQ ID NO: 1854481 - RNA, 12 nt, Human
cacagcugcuca

SEQ ID NO: 1854482 - RNA, 22 nt, Human
cacagcugcucaauaaaguaca

SEQ ID NO: 1854483 - RNA, 13 nt, Human
cacaggaaaccag

SEQ ID NO: 1854484 - RNA, 19 nt, Human
cacaggcccuuccucucca

SEQ ID NO: 1854485 - RNA, 18 nt, Human
cacaggcccuuccucucc

SEQ ID NO: 1854486 - RNA, 17 nt, Human
cacaggcccuuccucuc

SEQ ID NO: 1854487 - RNA, 16 nt, Human
cacaggcccuuccucu

SEQ ID NO: 1854488 - RNA, 19 nt, Human
cacagugcaucucagccca

SEQ ID NO: 1854489 - RNA, 18 nt, Human
cacagugcaucucagccc

SEQ ID NO: 1854490 - RNA, 17 nt, Human
cacagugcaucucagcc

SEQ ID NO: 1854491 - RNA, 21 nt, Human
cacaggcccuuccucuccacu

SEQ ID NO: 1854492 - RNA, 13 nt, Human
cacaguggaacca

SEQ ID NO: 1854493 - RNA, 19 nt, Human
cacaguggaaccagcccag

SEQ ID NO: 1854494 - RNA, 17 nt, Human
cacaguucaauucucau

SEQ ID NO: 1854495 - RNA, 15 nt, Human
caagacgcugugcug

SEQ ID NO: 1854496 - RNA, 13 nt, Human
caagacgcugugc

SEQ ID NO: 1854497 - RNA, 23 nt, Human
caagaccuucuccuucaccuuug

SEQ ID NO: 1854498 - RNA, 21 nt, Human
caagaccuucuccuucaccuu

SEQ ID NO: 1854499 - RNA, 13 nt, Human
caagagcccaggc

SEQ ID NO: 1854500 - RNA, 17 nt, Human
caagagcuuaacagugu

SEQ ID NO: 1854501 - RNA, 16 nt, Human
caacuuguaaaugugg

SEQ ID NO: 1854502 - RNA, 12 nt, Human
caacuugggaac

SEQ ID NO: 1854503 - RNA, 13 nt, Human
caagaagcccagg

SEQ ID NO: 1854504 - RNA, 14 nt, Human
caagaagcccagga

SEQ ID NO: 1854505 - RNA, 17 nt, Human
caagaaaugaaagcagg

SEQ ID NO: 1854506 - RNA, 19 nt, Human
caagaaaugaaagcaggga

SEQ ID NO: 1854507 - RNA, 18 nt, Human
caaagugcugggauuaca

SEQ ID NO: 1854508 - RNA, 23 nt, Human
caaagugcugggauuacaagcgu

SEQ ID NO: 1854509 - RNA, 20 nt, Human
caaaguucccuacuuccugu

SEQ ID NO: 1854510 - RNA, 13 nt, Human
caaagugcuggga

SEQ ID NO: 1854511 - RNA, 19 nt, Human
caaagugcugggauuacaa

SEQ ID NO: 1854512 - RNA, 18 nt, Human
caaauguucaucaaugaa

SEQ ID NO: 1854513 - RNA, 14 nt, Human
caaauguucaucaa

SEQ ID NO: 1854514 - RNA, 23 nt, Human
caaauggaaaugggcagagcaga

SEQ ID NO: 1854515 - RNA, 23 nt, Human
caaauauauucagccuggcuuca

SEQ ID NO: 1854516 - RNA, 15 nt, Human
caaauuucuaaaucu

SEQ ID NO: 1854517 - RNA, 22 nt, Human
caaauuucuaaaucuccaaaau

SEQ ID NO: 1854518 - RNA, 16 nt, Human
caaccuucuguggcuc

SEQ ID NO: 1854519 - RNA, 16 nt, Human
caaccuggucacagga

SEQ ID NO: 1854520 - RNA, 20 nt, Human
caaccuucuguggcucacag

SEQ ID NO: 1854521 - RNA, 19 nt, Human
caaccuucuguggcucaca

SEQ ID NO: 1854522 - RNA, 17 nt, Human
caaccuucuguggcuca

SEQ ID NO: 1854523 - RNA, 18 nt, Human
caaccugcucuccucuug

SEQ ID NO: 1854524 - RNA, 23 nt, Human
caaccugcucuccucuugccacu

SEQ ID NO: 1854525 - RNA, 21 nt, Human
caaccugcucuccucuugcca

SEQ ID NO: 1854526 - RNA, 20 nt, Human
caacauacucccaucuguga

SEQ ID NO: 1854527 - RNA, 19 nt, Human
caacauacucccaucugug

SEQ ID NO: 1854528 - RNA, 17 nt, Human
caacauacucccaucug

SEQ ID NO: 1854529 - RNA, 12 nt, Human
caacaggcuggg

SEQ ID NO: 1854530 - RNA, 13 nt, Human
caacaggcugggc

SEQ ID NO: 1854531 - RNA, 17 nt, Human
caaacucuugaccucag

SEQ ID NO: 1854532 - RNA, 19 nt, Human
caaacucuugaccucaggu

SEQ ID NO: 1854533 - RNA, 20 nt, Human
caaacucuugaccucaggug

SEQ ID NO: 1854534 - RNA, 12 nt, Human
caaagaaauuuc

SEQ ID NO: 1854535 - RNA, 18 nt, Human
caaagaaauuuccacuca

SEQ ID NO: 1854536 - RNA, 19 nt, Human
caaagaaauuuccacucag

SEQ ID NO: 1854537 - RNA, 21 nt, Human
caaacucuugaccucagguga

SEQ ID NO: 1854538 - RNA, 22 nt, Human
caaaaugaaacgcaaccaccac

SEQ ID NO: 1854539 - RNA, 11 nt, Human
caaaaugaaac

SEQ ID NO: 1854540 - RNA, 21 nt, Human
caaaaugagcccuguccugcc

SEQ ID NO: 1854541 - RNA, 15 nt, Human
caaacagaggccgcc

SEQ ID NO: 1854542 - RNA, 13 nt, Human
caaacagaggccg

SEQ ID NO: 1854543 - RNA, 21 nt, Human
caaaacgguuuuacugcagcu

SEQ ID NO: 1854544 - RNA, 15 nt, Human
caaaacgguuuuacu

SEQ ID NO: 1854545 - RNA, 18 nt, Human
auuuuauuuuauuaugca

SEQ ID NO: 1854546 - RNA, 16 nt, Human
caaaacucuccucugc

SEQ ID NO: 1854547 - RNA, 15 nt, Human
caaaacucuccucug

SEQ ID NO: 1854548 - RNA, 19 nt, Human
caaaacucuccucugcugc

SEQ ID NO: 1854549 - RNA, 14 nt, Human
caaaaguuucucuu

SEQ ID NO: 1854550 - RNA, 16 nt, Human
caaaauaaaacuuuuu

SEQ ID NO: 1854551 - RNA, 20 nt, Human
caaaauaaaacuuuuuaaaa

SEQ ID NO: 1854552 - RNA, 21 nt, Human
caaaaucgaugcagugcuucc

SEQ ID NO: 1854553 - RNA, 22 nt, Human
cacagauuugagcucagcccug

SEQ ID NO: 1854554 - RNA, 18 nt, Human
cacagauuugagcucagc

SEQ ID NO: 1854555 - RNA, 17 nt, Human
cacagauuugagcucag

SEQ ID NO: 1854556 - RNA, 16 nt, Human
cacagauuugagcuca

SEQ ID NO: 1854557 - RNA, 13 nt, Human
cacagaggcugcc

SEQ ID NO: 1854558 - RNA, 22 nt, Human
cacagaguuguuacauuuuuaa

SEQ ID NO: 1854559 - RNA, 21 nt, Human
cacagaguuguuacauuuuua

SEQ ID NO: 1854560 - RNA, 23 nt, Human
cacagaugggugcuuggaggaag

SEQ ID NO: 1854561 - RNA, 19 nt, Human
cacagagaaaguacuucuc

SEQ ID NO: 1854562 - RNA, 20 nt, Human
cacagagaaaguacuucucc

SEQ ID NO: 1854563 - RNA, 21 nt, Human
cacagagaaaguacuucucca

SEQ ID NO: 1854564 - RNA, 14 nt, Human
cacacuccagcugg

SEQ ID NO: 1854565 - RNA, 17 nt, Human
cacacacgcgugcacac

SEQ ID NO: 1854566 - RNA, 20 nt, Human
cacaagaaaugaaagcaggg

SEQ ID NO: 1854567 - RNA, 21 nt, Human
cacaagaaaugaaagcaggga

SEQ ID NO: 1854568 - RNA, 13 nt, Human
cacaaaggagagc

SEQ ID NO: 1854569 - RNA, 18 nt, Human
cacaagaaaugaaagcag

SEQ ID NO: 1854570 - RNA, 22 nt, Human
caaugugacuuaaugccacuaa

SEQ ID NO: 1854571 - RNA, 22 nt, Human
caaugugaaaagaaaaaugagc

SEQ ID NO: 1854572 - RNA, 21 nt, Human
caauaucuuuuuuuuaauaaa

SEQ ID NO: 1854573 - RNA, 17 nt, Human
caauuacaggaaguacu

SEQ ID NO: 1854574 - RNA, 14 nt, Human
cacaaacagaggcc

SEQ ID NO: 1854575 - RNA, 15 nt, Human
cacaaacagaggccg

SEQ ID NO: 1854576 - RNA, 18 nt, Human
cacaaagcccuuccaugu

SEQ ID NO: 1854577 - RNA, 13 nt, Human
cacaaacagaggc

SEQ ID NO: 1854578 - RNA, 18 nt, Human
caauuacaggaaguacug

SEQ ID NO: 1854579 - RNA, 18 nt, Human
caauaggaaaaacugauu

SEQ ID NO: 1854580 - RNA, 22 nt, Human
caagcugcacccucaggcaggu

SEQ ID NO: 1854581 - RNA, 21 nt, Human
caagcuggucccacucagucc

SEQ ID NO: 1854582 - RNA, 15 nt, Human
caagcgauucuucug

SEQ ID NO: 1854583 - RNA, 17 nt, Human
caagcgauucuucugcu

SEQ ID NO: 1854584 - RNA, 21 nt, Human
caagcugcacccucaggcagg

SEQ ID NO: 1854585 - RNA, 18 nt, Human
caagcgauucuucugcuu

SEQ ID NO: 1854586 - RNA, 22 nt, Human
caaggcugcagugagccgagau

SEQ ID NO: 1854587 - RNA, 17 nt, Human
caaggcugcagugagcc

SEQ ID NO: 1854588 - RNA, 20 nt, Human
caaggauccugagccagauu

SEQ ID NO: 1854589 - RNA, 22 nt, Human
caaggauccugagccagauuuc

SEQ ID NO: 1854590 - RNA, 19 nt, Human
caaggauccugagccagau

SEQ ID NO: 1854591 - RNA, 18 nt, Human
caaggauccugagccaga

SEQ ID NO: 1854592 - RNA, 16 nt, Human
caaggagauuuacaac

SEQ ID NO: 1854593 - RNA, 20 nt, Human
caaggaaaaaauaacaauga

SEQ ID NO: 1854594 - RNA, 22 nt, Human
caagcuggucccacucagucca

SEQ ID NO: 1854595 - RNA, 23 nt, Human
caagcuggucccacucaguccau

SEQ ID NO: 1854596 - RNA, 18 nt, Human
caaggaaaaaauaacaau

SEQ ID NO: 1854597 - RNA, 18 nt, Human
caaggcugggggaagaag

SEQ ID NO: 1854598 - RNA, 19 nt, Human
caaggguagggugggccuu

SEQ ID NO: 1854599 - RNA, 19 nt, Human
caauagauauuuaccuuuu

SEQ ID NO: 1854600 - RNA, 18 nt, Human
caauaauaauaccucccu

SEQ ID NO: 1854601 - RNA, 17 nt, Human
caauaggaaaaacugau

SEQ ID NO: 1854602 - RNA, 16 nt, Human
caauaggaaaaacuga

SEQ ID NO: 1854603 - RNA, 15 nt, Human
caauaggaaaaacug

SEQ ID NO: 1854604 - RNA, 17 nt, Human
cauauuuauaaaaauaa

SEQ ID NO: 1854605 - RNA, 17 nt, Human
cauauuuacuucuuaua

SEQ ID NO: 1854606 - RNA, 16 nt, Human
cauauuuacuucuuau

SEQ ID NO: 1854607 - RNA, 20 nt, Human
cauauuuacuucuuauacau

SEQ ID NO: 1854608 - RNA, 12 nt, Human
cauauuuauaaa

SEQ ID NO: 1854609 - RNA, 14 nt, Human
cauauuuacuucuu

SEQ ID NO: 1854610 - RNA, 13 nt, Human
cauaugccugggc

SEQ ID NO: 1854611 - RNA, 18 nt, Human
caucaaugaaugaaugaa

SEQ ID NO: 1854612 - RNA, 14 nt, Human
caucaagaugugac

SEQ ID NO: 1854613 - RNA, 22 nt, Human
caucaagucuuucacauuuaaa

SEQ ID NO: 1854614 - RNA, 23 nt, Human
cauagagagcaagacgcugugcu

SEQ ID NO: 1854615 - RNA, 21 nt, Human
cauagagagcaagacgcugug

SEQ ID NO: 1854616 - RNA, 19 nt, Human
cauagagagcaagacgcug

SEQ ID NO: 1854617 - RNA, 20 nt, Human
cauagaauaaaauuuuuaau

SEQ ID NO: 1854618 - RNA, 14 nt, Human
cauagaauaaaauu

SEQ ID NO: 1854619 - RNA, 20 nt, Human
cauacucccaucugugaaag

SEQ ID NO: 1854620 - RNA, 18 nt, Human
cauacucccaucugugaa

SEQ ID NO: 1854621 - RNA, 15 nt, Human
cauacucccaucugu

SEQ ID NO: 1854622 - RNA, 16 nt, Human
cauacucccaucugug

SEQ ID NO: 1854623 - RNA, 11 nt, Human
cauacucugcu

SEQ ID NO: 1854624 - RNA, 21 nt, Human
cauaugauguacauguacuga

SEQ ID NO: 1854625 - RNA, 17 nt, Human
cauaugauguacaugua

SEQ ID NO: 1854626 - RNA, 15 nt, Human
cauaugauguacaug

SEQ ID NO: 1854627 - RNA, 23 nt, Human
cauauauauguuuuaagaggcag

SEQ ID NO: 1854628 - RNA, 22 nt, Human
cauauauauguuuuaagaggca

SEQ ID NO: 1854629 - RNA, 18 nt, Human
cauaguaugguggcuggg

SEQ ID NO: 1854630 - RNA, 19 nt, Human
cauaguaugguggcugggu

SEQ ID NO: 1854631 - RNA, 22 nt, Human
cauagugaugguuccccuguuc

SEQ ID NO: 1854632 - RNA, 20 nt, Human
cauaguaugguggcuggguu

SEQ ID NO: 1854633 - RNA, 22 nt, Human
cauaguggcuuaaaacaacacu

SEQ ID NO: 1854634 - RNA, 21 nt, Human
caucccugaaggccccgccca

SEQ ID NO: 1854635 - RNA, 19 nt, Human
caucccugaaggccccgcc

SEQ ID NO: 1854636 - RNA, 18 nt, Human
caucccugaaggccccgc

SEQ ID NO: 1854637 - RNA, 17 nt, Human
caucccugaaggccccg

SEQ ID NO: 1854638 - RNA, 21 nt, Human
cauccuaacuccaugucucug

SEQ ID NO: 1854639 - RNA, 14 nt, Human
cauccuaacuccau

SEQ ID NO: 1854640 - RNA, 22 nt, Human
caucccugaaggccccgcccag

SEQ ID NO: 1854641 - RNA, 21 nt, Human
caucauugaaaucuuuuugcu

SEQ ID NO: 1854642 - RNA, 20 nt, Human
caucauugaaaucuuuuugc

SEQ ID NO: 1854643 - RNA, 15 nt, Human
caucauugaaaucuu

SEQ ID NO: 1854644 - RNA, 14 nt, Human
caucauugaaaucu

SEQ ID NO: 1854645 - RNA, 15 nt, Human
caucaccaacgucug

SEQ ID NO: 1854646 - RNA, 13 nt, Human
caucauugaaauc

SEQ ID NO: 1854647 - RNA, 19 nt, Human
caucccucuggggcuguuc

SEQ ID NO: 1854648 - RNA, 13 nt, Human
caucccugaaggc

SEQ ID NO: 1854649 - RNA, 11 nt, Human
caucccugaag

SEQ ID NO: 1854650 - RNA, 15 nt, Human
cauccagguucagcu

SEQ ID NO: 1854651 - RNA, 22 nt, Human
caucuuccaaggguacuaagga

SEQ ID NO: 1854652 - RNA, 16 nt, Human
caucucuuguuuaaau

SEQ ID NO: 1854653 - RNA, 14 nt, Human
caucuccacuccag

SEQ ID NO: 1854654 - RNA, 22 nt, Human
caucucuucuggguuccuuccu

SEQ ID NO: 1854655 - RNA, 13 nt, Human
caucuugcucugc

SEQ ID NO: 1854656 - RNA, 15 nt, Human
caucuugcucugcug

SEQ ID NO: 1854657 - RNA, 14 nt, Human
caucuugcucugcu

SEQ ID NO: 1854658 - RNA, 20 nt, Human
caucuugcucugcugacaga

SEQ ID NO: 1854659 - RNA, 16 nt, Human
cauccucauacccacc

SEQ ID NO: 1854660 - RNA, 15 nt, Human
cauccucauacccac

SEQ ID NO: 1854661 - RNA, 16 nt, Human
cauccuacaagacaca

SEQ ID NO: 1854662 - RNA, 19 nt, Human
cauccuccucagaucuucu

SEQ ID NO: 1854663 - RNA, 18 nt, Human
cauccuccucagaucuuc

SEQ ID NO: 1854664 - RNA, 16 nt, Human
cauccuccucagaucu

SEQ ID NO: 1854665 - RNA, 15 nt, Human
cauccuccucagauc

SEQ ID NO: 1854666 - RNA, 12 nt, Human
cauccuccucag

SEQ ID NO: 1854667 - RNA, 11 nt, Human
cauccuccuca

SEQ ID NO: 1854668 - RNA, 20 nt, Human
cauccuccgccucccggguu

SEQ ID NO: 1854669 - RNA, 22 nt, Human
cauccucauacccacccccacc

SEQ ID NO: 1854670 - RNA, 21 nt, Human
cauccucauacccacccccac

SEQ ID NO: 1854671 - RNA, 18 nt, Human
cauccucauacccacccc

SEQ ID NO: 1854672 - RNA, 17 nt, Human
cauccucauacccaccc

SEQ ID NO: 1854673 - RNA, 13 nt, Human
cauccucccaagg

SEQ ID NO: 1854674 - RNA, 18 nt, Human
cauccucuguacagagcc

SEQ ID NO: 1854675 - RNA, 15 nt, Human
cauccucuguacaga

SEQ ID NO: 1854676 - RNA, 19 nt, Human
cauccucuguacagagccc

SEQ ID NO: 1854677 - RNA, 21 nt, Human
cauccucuguacagagcccac

SEQ ID NO: 1854678 - RNA, 18 nt, Human
caucuagguaaauuacag

SEQ ID NO: 1854679 - RNA, 17 nt, Human
caucuagguaaauuaca

SEQ ID NO: 1854680 - RNA, 12 nt, Human
caucuaggauuu

SEQ ID NO: 1854681 - RNA, 15 nt, Human
caucuacccuccgau

SEQ ID NO: 1854682 - RNA, 17 nt, Human
caucucacacaugagca

SEQ ID NO: 1854683 - RNA, 16 nt, Human
caucucacacaugagc

SEQ ID NO: 1854684 - RNA, 20 nt, Human
caucucacacaugagcauca

SEQ ID NO: 1854685 - RNA, 18 nt, Human
caucucaccuccugcugg

SEQ ID NO: 1854686 - RNA, 17 nt, Human
caucucaccuccugcug

SEQ ID NO: 1854687 - RNA, 16 nt, Human
caucucaccuccugcu

SEQ ID NO: 1854688 - RNA, 13 nt, Human
caucucagcccac

SEQ ID NO: 1854689 - RNA, 20 nt, Human
cauacuaauuauacccccug

SEQ ID NO: 1854690 - RNA, 21 nt, Human
cauacccacccccacccaagg

SEQ ID NO: 1854691 - RNA, 18 nt, Human
cauacccacccccaccca

SEQ ID NO: 1854692 - RNA, 17 nt, Human
cauacccacccccaccc

SEQ ID NO: 1854693 - RNA, 14 nt, Human
cauacccaccccca

SEQ ID NO: 1854694 - RNA, 17 nt, Human
cauacguacacauuuua

SEQ ID NO: 1854695 - RNA, 18 nt, Human
cauacguacacauuuuau

SEQ ID NO: 1854696 - RNA, 14 nt, Human
cauacuaaccagca

SEQ ID NO: 1854697 - RNA, 21 nt, Human
cauacuaaccagcagaaaugc

SEQ ID NO: 1854698 - RNA, 15 nt, Human
cauacguacacauuu

SEQ ID NO: 1854699 - RNA, 16 nt, Human
cauacguacacauuuu

SEQ ID NO: 1854700 - RNA, 13 nt, Human
cauacguacacau

SEQ ID NO: 1854701 - RNA, 21 nt, Human
cauaaaaauuagccaagugug

SEQ ID NO: 1854702 - RNA, 22 nt, Human
cauaaacaagaccacguuucua

SEQ ID NO: 1854703 - RNA, 20 nt, Human
cauaaacaagaccacguuuc

SEQ ID NO: 1854704 - RNA, 21 nt, Human
cauaaacaagaccacguuucu

SEQ ID NO: 1854705 - RNA, 16 nt, Human
cauaaagcaggcagaa

SEQ ID NO: 1854706 - RNA, 14 nt, Human
cauaaagcaggcag

SEQ ID NO: 1854707 - RNA, 16 nt, Human
cauaaccuagccuuag

SEQ ID NO: 1854708 - RNA, 14 nt, Human
cauaagauaaaugu

SEQ ID NO: 1854709 - RNA, 13 nt, Human
cauaacuagaacu

SEQ ID NO: 1854710 - RNA, 15 nt, Human
cauaauacuugcuuu

SEQ ID NO: 1854711 - RNA, 13 nt, Human
cauaccacuuuug

SEQ ID NO: 1854712 - RNA, 14 nt, Human
cauaccacuuuugu

SEQ ID NO: 1854713 - RNA, 15 nt, Human
cauaccacuuuuguu

SEQ ID NO: 1854714 - RNA, 18 nt, Human
cauaccacuuuuguucuu

SEQ ID NO: 1854715 - RNA, 12 nt, Human
cauacccacccc

SEQ ID NO: 1854716 - RNA, 11 nt, Human
cauacccaccc

SEQ ID NO: 1854717 - RNA, 19 nt, Human
cauaccacuuuuguucuug

SEQ ID NO: 1854718 - RNA, 15 nt, Human
caguuuuuauugcuu

SEQ ID NO: 1854719 - RNA, 17 nt, Human
caguuguuagugugucu

SEQ ID NO: 1854720 - RNA, 22 nt, Human
caguuggucccccuuccaugga

SEQ ID NO: 1854721 - RNA, 21 nt, Human
caguuggucccccuuccaugg

SEQ ID NO: 1854722 - RNA, 20 nt, Human
caguuggucccccuuccaug

SEQ ID NO: 1854723 - RNA, 19 nt, Human
caguuggucccccuuccau

SEQ ID NO: 1854724 - RNA, 18 nt, Human
caguuggucccccuucca

SEQ ID NO: 1854725 - RNA, 18 nt, Human
caguuggguggaugccug

SEQ ID NO: 1854726 - RNA, 19 nt, Human
caguuggguggaugccugg

SEQ ID NO: 1854727 - RNA, 16 nt, Human
caguuggguggaugcc

SEQ ID NO: 1854728 - RNA, 23 nt, Human
caguugccagucaccccggccac

SEQ ID NO: 1854729 - RNA, 16 nt, Human
caguggaaccagccca

SEQ ID NO: 1854730 - RNA, 12 nt, Human
caguggcagcug

SEQ ID NO: 1854731 - RNA, 13 nt, Human
caguggcagcugc

SEQ ID NO: 1854732 - RNA, 14 nt, Human
caguggcagcugcu

SEQ ID NO: 1854733 - RNA, 15 nt, Human
caguggcagcugcuu

SEQ ID NO: 1854734 - RNA, 16 nt, Human
caguggcagcugcuuu

SEQ ID NO: 1854735 - RNA, 22 nt, Human
cagugguuccuaauccucuagg

SEQ ID NO: 1854736 - RNA, 11 nt, Human
cagugggaacu

SEQ ID NO: 1854737 - RNA, 12 nt, Human
cagugugacuga

SEQ ID NO: 1854738 - RNA, 14 nt, Human
cagugugacaagga

SEQ ID NO: 1854739 - RNA, 14 nt, Human
cagugucaaugcag

SEQ ID NO: 1854740 - RNA, 23 nt, Human
caguguacauggaauaacaugua

SEQ ID NO: 1854741 - RNA, 20 nt, Human
caguguacauggaauaacau

SEQ ID NO: 1854742 - RNA, 16 nt, Human
caguguacauggaaua

SEQ ID NO: 1854743 - RNA, 17 nt, Human
caguguacagucuugua

SEQ ID NO: 1854744 - RNA, 18 nt, Human
caguguacagucuuguau

SEQ ID NO: 1854745 - RNA, 12 nt, Human
caguguacaguc

SEQ ID NO: 1854746 - RNA, 15 nt, Human
caguguacagucuug

SEQ ID NO: 1854747 - RNA, 14 nt, Human
caguuacucagaau

SEQ ID NO: 1854748 - RNA, 14 nt, Human
caguuaagagaaau

SEQ ID NO: 1854749 - RNA, 13 nt, Human
caguuaagagaaa

SEQ ID NO: 1854750 - RNA, 17 nt, Human
caguuaagccuuuggaa

SEQ ID NO: 1854751 - RNA, 15 nt, Human
caguuaagccuuugg

SEQ ID NO: 1854752 - RNA, 14 nt, Human
caguuaagccuuug

SEQ ID NO: 1854753 - RNA, 20 nt, Human
caguuaagccuuuggaaaca

SEQ ID NO: 1854754 - RNA, 19 nt, Human
caguguuguggauuuaaca

SEQ ID NO: 1854755 - RNA, 20 nt, Human
caguguuguggauuuaacag

SEQ ID NO: 1854756 - RNA, 22 nt, Human
caguguuguggauuuaacagaa

SEQ ID NO: 1854757 - RNA, 22 nt, Human
caguucucuccuucuucccccc

SEQ ID NO: 1854758 - RNA, 15 nt, Human
caguucucuccuucu

SEQ ID NO: 1854759 - RNA, 14 nt, Human
caguucucuccuuc

SEQ ID NO: 1854760 - RNA, 13 nt, Human
caguucucuccuu

SEQ ID NO: 1854761 - RNA, 22 nt, Human
caguucggugagcuacaaaugc

SEQ ID NO: 1854762 - RNA, 19 nt, Human
caguugaaaaacagcugag

SEQ ID NO: 1854763 - RNA, 18 nt, Human
caguugaaaaacagcuga

SEQ ID NO: 1854764 - RNA, 12 nt, Human
caguugaaaaac

SEQ ID NO: 1854765 - RNA, 13 nt, Human
caugccccugaac

SEQ ID NO: 1854766 - RNA, 20 nt, Human
caugccagcuuaucucaggg

SEQ ID NO: 1854767 - RNA, 19 nt, Human
caugccagcuuaucucagg

SEQ ID NO: 1854768 - RNA, 13 nt, Human
caugccuggaugg

SEQ ID NO: 1854769 - RNA, 19 nt, Human
caugccucucucaggccaa

SEQ ID NO: 1854770 - RNA, 18 nt, Human
caugccucucucaggcca

SEQ ID NO: 1854771 - RNA, 17 nt, Human
caugccucucucaggcc

SEQ ID NO: 1854772 - RNA, 16 nt, Human
caugccucucucaggc

SEQ ID NO: 1854773 - RNA, 15 nt, Human
caugccucucucagg

SEQ ID NO: 1854774 - RNA, 14 nt, Human
caugccucucucag

SEQ ID NO: 1854775 - RNA, 17 nt, Human
cauggagguuugaagau

SEQ ID NO: 1854776 - RNA, 13 nt, Human
cauggacuuuguu

SEQ ID NO: 1854777 - RNA, 11 nt, Human
cauggacuuug

SEQ ID NO: 1854778 - RNA, 16 nt, Human
cauggaguauauguca

SEQ ID NO: 1854779 - RNA, 18 nt, Human
caugggaaugaaugucag

SEQ ID NO: 1854780 - RNA, 16 nt, Human
caugggccuccugugu

SEQ ID NO: 1854781 - RNA, 17 nt, Human
caugggccuccugugug

SEQ ID NO: 1854782 - RNA, 17 nt, Human
caugggacagggaggac

SEQ ID NO: 1854783 - RNA, 22 nt, Human
caugggaaugaaugucagugug

SEQ ID NO: 1854784 - RNA, 15 nt, Human
caugggccuccugug

SEQ ID NO: 1854785 - RNA, 22 nt, Human
caugcugucccuuacgugaguc

SEQ ID NO: 1854786 - RNA, 21 nt, Human
caugccuggauggggcugcac

SEQ ID NO: 1854787 - RNA, 18 nt, Human
caugccuggauggggcug

SEQ ID NO: 1854788 - RNA, 23 nt, Human
caugccuggauggggcugcaccg

SEQ ID NO: 1854789 - RNA, 22 nt, Human
cauggaaguacuauaauuuacc

SEQ ID NO: 1854790 - RNA, 20 nt, Human
cauggaaguacuauaauuua

SEQ ID NO: 1854791 - RNA, 18 nt, Human
cauggacaugaucuucuu

SEQ ID NO: 1854792 - RNA, 16 nt, Human
cauggaauaacaugua

SEQ ID NO: 1854793 - RNA, 21 nt, Human
cauguaauuaaguacuaugua

SEQ ID NO: 1854794 - RNA, 18 nt, Human
cauguaauuaaguacuau

SEQ ID NO: 1854795 - RNA, 15 nt, Human
caugucgccucugca

SEQ ID NO: 1854796 - RNA, 14 nt, Human
caugucgccucugc

SEQ ID NO: 1854797 - RNA, 20 nt, Human
caugucgccucugcauucag

SEQ ID NO: 1854798 - RNA, 18 nt, Human
caugucgccucugcauuc

SEQ ID NO: 1854799 - RNA, 23 nt, Human
caugucuuuucuugcaugaggcu

SEQ ID NO: 1854800 - RNA, 21 nt, Human
caugucuuuucuugcaugagg

SEQ ID NO: 1854801 - RNA, 19 nt, Human
caugucuuuucuugcauga

SEQ ID NO: 1854802 - RNA, 14 nt, Human
caugucuuuucuug

SEQ ID NO: 1854803 - RNA, 17 nt, Human
caugugaaaucauucau

SEQ ID NO: 1854804 - RNA, 16 nt, Human
caugugaaaucauuca

SEQ ID NO: 1854805 - RNA, 15 nt, Human
caugugaaaucauuc

SEQ ID NO: 1854806 - RNA, 16 nt, Human
cauggucggaaaacau

SEQ ID NO: 1854807 - RNA, 15 nt, Human
caugugcacaugcac

SEQ ID NO: 1854808 - RNA, 21 nt, Human
caugugccagguuuuuggucu

SEQ ID NO: 1854809 - RNA, 22 nt, Human
caugugccagguuuuuggucug

SEQ ID NO: 1854810 - RNA, 23 nt, Human
cauguuugauguaucugagcagg

SEQ ID NO: 1854811 - RNA, 22 nt, Human
cauguuucuuuguaaugaaaac

SEQ ID NO: 1854812 - RNA, 15 nt, Human
cauguuugugauuga

SEQ ID NO: 1854813 - RNA, 21 nt, Human
cauguuucuuuguaaugaaaa

SEQ ID NO: 1854814 - RNA, 20 nt, Human
cauguuucuuuguaaugaaa

SEQ ID NO: 1854815 - RNA, 18 nt, Human
cauguuuuucuucucccu

SEQ ID NO: 1854816 - RNA, 15 nt, Human
cauguuuuguuuacg

SEQ ID NO: 1854817 - RNA, 21 nt, Human
cauuaaagccugaguuugcuu

SEQ ID NO: 1854818 - RNA, 18 nt, Human
cauuagcaguuugcuuug

SEQ ID NO: 1854819 - RNA, 17 nt, Human
cauuagcaguuugcuuu

SEQ ID NO: 1854820 - RNA, 23 nt, Human
cauuucuuccacaagagcccagg

SEQ ID NO: 1854821 - RNA, 18 nt, Human
cauuugaggucuguucuu

SEQ ID NO: 1854822 - RNA, 19 nt, Human
cauuugaggucuguucuuu

SEQ ID NO: 1854823 - RNA, 17 nt, Human
cauuugaggucuguucu

SEQ ID NO: 1854824 - RNA, 16 nt, Human
cauuugagcagggcuc

SEQ ID NO: 1854825 - RNA, 14 nt, Human
cauuugagcagggc

SEQ ID NO: 1854826 - RNA, 18 nt, Human
ccaaaauaaaacuuuuua

SEQ ID NO: 1854827 - RNA, 21 nt, Human
ccaaaauaaaacuuuuuaaaa

SEQ ID NO: 1854828 - RNA, 20 nt, Human
cauuuuuaguagagacaggg

SEQ ID NO: 1854829 - RNA, 19 nt, Human
cauuuuauuuuauuaugca

SEQ ID NO: 1854830 - RNA, 21 nt, Human
cauuuuauuuuauuaugcaug

SEQ ID NO: 1854831 - RNA, 22 nt, Human
cauuugaggucuguucuuucca

SEQ ID NO: 1854832 - RNA, 23 nt, Human
cauuuugggguacccacugcucu

SEQ ID NO: 1854833 - RNA, 15 nt, Human
cauuuuuaagugcug

SEQ ID NO: 1854834 - RNA, 20 nt, Human
cauuuuuaagugcugcauuu

SEQ ID NO: 1854835 - RNA, 19 nt, Human
cauuuuuaguagagacagg

SEQ ID NO: 1854836 - RNA, 18 nt, Human
cauuuuuaguagagacag

SEQ ID NO: 1854837 - RNA, 24 nt, Human
cauuuugcuaaaugugaaugauga

SEQ ID NO: 1854838 - RNA, 21 nt, Human
cauuuugcuaaaugugaauga

SEQ ID NO: 1854839 - RNA, 18 nt, Human
cauuuugcuaaaugugaa

SEQ ID NO: 1854840 - RNA, 20 nt, Human
cauuuugggguacccacugc

SEQ ID NO: 1854841 - RNA, 21 nt, Human
cauuuugggguacccacugcu

SEQ ID NO: 1854842 - RNA, 22 nt, Human
cauuuugggguacccacugcuc

SEQ ID NO: 1854843 - RNA, 19 nt, Human
cauugaaaucuuuuugcuu

SEQ ID NO: 1854844 - RNA, 22 nt, Human
cauugaccugaggcccuucucu

SEQ ID NO: 1854845 - RNA, 13 nt, Human
cauugaccugagg

SEQ ID NO: 1854846 - RNA, 21 nt, Human
cauuucuuccacaagagccca

SEQ ID NO: 1854847 - RNA, 21 nt, Human
cauuuaaaagauacaguuacu

SEQ ID NO: 1854848 - RNA, 14 nt, Human
cauugcaauagaaa

SEQ ID NO: 1854849 - RNA, 13 nt, Human
cauugcaauagaa

SEQ ID NO: 1854850 - RNA, 15 nt, Human
cauugcaauagaaau

SEQ ID NO: 1854851 - RNA, 17 nt, Human
cauuuacuuuguguuca

SEQ ID NO: 1854852 - RNA, 21 nt, Human
cauuuacuuuguguucaccuu

SEQ ID NO: 1854853 - RNA, 19 nt, Human
ccacaagagcccaggccuc

SEQ ID NO: 1854854 - RNA, 18 nt, Human
ccacaagagcccaggccu

SEQ ID NO: 1854855 - RNA, 17 nt, Human
ccacaagagcccaggcc

SEQ ID NO: 1854856 - RNA, 16 nt, Human
ccacaagagcccaggc

SEQ ID NO: 1854857 - RNA, 21 nt, Human
ccacaagagcccaggccuccu

SEQ ID NO: 1854858 - RNA, 20 nt, Human
ccacaagagcccaggccucc

SEQ ID NO: 1854859 - RNA, 20 nt, Human
ccacaaguuaaauaaaucau

SEQ ID NO: 1854860 - RNA, 15 nt, Human
ccacaaguuaaauaa

SEQ ID NO: 1854861 - RNA, 20 nt, Human
ccaauauucauagcagcuua

SEQ ID NO: 1854862 - RNA, 16 nt, Human
ccaaguggcucccaca

SEQ ID NO: 1854863 - RNA, 13 nt, Human
ccaaguggcuccc

SEQ ID NO: 1854864 - RNA, 19 nt, Human
ccaaggcugauuaaaccaa

SEQ ID NO: 1854865 - RNA, 16 nt, Human
ccaaggcucugagcaa

SEQ ID NO: 1854866 - RNA, 14 nt, Human
ccaaggcuggggga

SEQ ID NO: 1854867 - RNA, 14 nt, Human
ccaauauuguacag

SEQ ID NO: 1854868 - RNA, 15 nt, Human
ccaauauuguacagu

SEQ ID NO: 1854869 - RNA, 16 nt, Human
ccaauauuguacaguu

SEQ ID NO: 1854870 - RNA, 18 nt, Human
ccaauauuguacaguuuu

SEQ ID NO: 1854871 - RNA, 16 nt, Human
ccacaagaaaugaaag

SEQ ID NO: 1854872 - RNA, 22 nt, Human
ccacaagaaaugaaagcaggga

SEQ ID NO: 1854873 - RNA, 13 nt, Human
ccacaagagccca

SEQ ID NO: 1854874 - RNA, 16 nt, Human
ccacaagacccuugug

SEQ ID NO: 1854875 - RNA, 13 nt, Human
ccacaacacacag

SEQ ID NO: 1854876 - RNA, 18 nt, Human
ccacaaaggagagcuagc

SEQ ID NO: 1854877 - RNA, 18 nt, Human
ccaaggcuagaaccaccu

SEQ ID NO: 1854878 - RNA, 14 nt, Human
ccaagcuccaucuc

SEQ ID NO: 1854879 - RNA, 13 nt, Human
ccaagcucccagg

SEQ ID NO: 1854880 - RNA, 12 nt, Human
ccaagcucccag

SEQ ID NO: 1854881 - RNA, 23 nt, Human
ccaagccguggcuucccgcucag

SEQ ID NO: 1854882 - RNA, 21 nt, Human
ccaagccguggcuucccgcuc

SEQ ID NO: 1854883 - RNA, 17 nt, Human
ccaagccguggcuuccc

SEQ ID NO: 1854884 - RNA, 16 nt, Human
ccaagccguggcuucc

SEQ ID NO: 1854885 - RNA, 15 nt, Human
ccaagccguggcuuc

SEQ ID NO: 1854886 - RNA, 14 nt, Human
ccaagcaggacaug

SEQ ID NO: 1854887 - RNA, 14 nt, Human
ccaagccguggcuu

SEQ ID NO: 1854888 - RNA, 23 nt, Human
ccaagcagagguugggaggccau

SEQ ID NO: 1854889 - RNA, 14 nt, Human
ccaaagaugcagcc

SEQ ID NO: 1854890 - RNA, 13 nt, Human
ccaaagaugcagc

SEQ ID NO: 1854891 - RNA, 22 nt, Human
ccaaauucuuucaguggcuacc

SEQ ID NO: 1854892 - RNA, 15 nt, Human
ccaaauucuuucagu

SEQ ID NO: 1854893 - RNA, 14 nt, Human
ccaacauacuccca

SEQ ID NO: 1854894 - RNA, 16 nt, Human
ccaacaucaacaucuu

SEQ ID NO: 1854895 - RNA, 15 nt, Human
ccaacccucaucacc

SEQ ID NO: 1854896 - RNA, 13 nt, Human
ccaacccucauca

SEQ ID NO: 1854897 - RNA, 18 nt, Human
ccaacccuggcacccagg

SEQ ID NO: 1854898 - RNA, 15 nt, Human
ccaagaccuucuccu

SEQ ID NO: 1854899 - RNA, 13 nt, Human
ccaggagcagcca

SEQ ID NO: 1854900 - RNA, 12 nt, Human
ccaggagcagcc

SEQ ID NO: 1854901 - RNA, 19 nt, Human
ccaggaagccagcaggcuc

SEQ ID NO: 1854902 - RNA, 17 nt, Human
ccaggaagccagcaggc

SEQ ID NO: 1854903 - RNA, 15 nt, Human
ccaggaagccagcag

SEQ ID NO: 1854904 - RNA, 22 nt, Human
ccagcugugcucuggacaggca

SEQ ID NO: 1854905 - RNA, 23 nt, Human
ccagcugugcucuggacaggcau

SEQ ID NO: 1854906 - RNA, 14 nt, Human
ccaggagcagccac

SEQ ID NO: 1854907 - RNA, 14 nt, Human
ccaggccagaggga

SEQ ID NO: 1854908 - RNA, 21 nt, Human
ccaggccagagggagugacag

SEQ ID NO: 1854909 - RNA, 21 nt, Human
ccaggccccugccacccuggg

SEQ ID NO: 1854910 - RNA, 23 nt, Human
ccaggccccugccacccugggga

SEQ ID NO: 1854911 - RNA, 19 nt, Human
ccaggccccugccacccug

SEQ ID NO: 1854912 - RNA, 19 nt, Human
ccaggccuccuacagcuug

SEQ ID NO: 1854913 - RNA, 18 nt, Human
ccaggccuccuacagcuu

SEQ ID NO: 1854914 - RNA, 13 nt, Human
ccaggccuccuac

SEQ ID NO: 1854915 - RNA, 19 nt, Human
ccaggcccucugcccacuc

SEQ ID NO: 1854916 - RNA, 18 nt, Human
ccaggcccucugcccacu

SEQ ID NO: 1854917 - RNA, 17 nt, Human
ccaggcccucugcccac

SEQ ID NO: 1854918 - RNA, 15 nt, Human
ccagcugcuugggcu

SEQ ID NO: 1854919 - RNA, 13 nt, Human
ccagcugcuuggg

SEQ ID NO: 1854920 - RNA, 18 nt, Human
ccagcugcuugggcuuca

SEQ ID NO: 1854921 - RNA, 16 nt, Human
ccagcugcuugggcuu

SEQ ID NO: 1854922 - RNA, 12 nt, Human
ccagcuggccgg

SEQ ID NO: 1854923 - RNA, 20 nt, Human
ccagcuggccgggagccuga

SEQ ID NO: 1854924 - RNA, 14 nt, Human
ccagcuggccggga

SEQ ID NO: 1854925 - RNA, 17 nt, Human
ccagcuggguuggaaaa

SEQ ID NO: 1854926 - RNA, 16 nt, Human
ccagcuggguuggaaa

SEQ ID NO: 1854927 - RNA, 18 nt, Human
ccagcugugcucuggaca

SEQ ID NO: 1854928 - RNA, 20 nt, Human
ccagcugugcucuggacagg

SEQ ID NO: 1854929 - RNA, 21 nt, Human
ccagcugugcucuggacaggc

SEQ ID NO: 1854930 - RNA, 23 nt, Human
ccauguuggccaggcuggucuca

SEQ ID NO: 1854931 - RNA, 12 nt, Human
ccaggccugccu

SEQ ID NO: 1854932 - RNA, 23 nt, Human
ccagggacagaggggguggccuc

SEQ ID NO: 1854933 - RNA, 12 nt, Human
ccaucacccgcu

SEQ ID NO: 1854934 - RNA, 23 nt, Human
ccauagagagcaagacgcugugc

SEQ ID NO: 1854935 - RNA, 15 nt, Human
ccauauucuguuggc

SEQ ID NO: 1854936 - RNA, 18 nt, Human
ccauauucuguuggccag

SEQ ID NO: 1854937 - RNA, 19 nt, Human
ccauauucuguuggccagu

SEQ ID NO: 1854938 - RNA, 16 nt, Human
ccaucgcugucaucuc

SEQ ID NO: 1854939 - RNA, 18 nt, Human
ccaucucaccuccugcug

SEQ ID NO: 1854940 - RNA, 21 nt, Human
ccaucucaccuccugcugggc

SEQ ID NO: 1854941 - RNA, 19 nt, Human
ccaucucaccuccugcugg

SEQ ID NO: 1854942 - RNA, 23 nt, Human
ccaucucaccuccugcugggcag

SEQ ID NO: 1854943 - RNA, 16 nt, Human
ccauccugaggcucca

SEQ ID NO: 1854944 - RNA, 15 nt, Human
ccauccugaggcucc

SEQ ID NO: 1854945 - RNA, 21 nt, Human
ccauccucuguacagagccca

SEQ ID NO: 1854946 - RNA, 14 nt, Human
ccaucaugucuggc

SEQ ID NO: 1854947 - RNA, 16 nt, Human
ccaucaugucuggcua

SEQ ID NO: 1854948 - RNA, 22 nt, Human
cccaugagccucagcauccugg

SEQ ID NO: 1854949 - RNA, 13 nt, Human
cccagguuucuau

SEQ ID NO: 1854950 - RNA, 18 nt, Human
cccaggcauuccccagga

SEQ ID NO: 1854951 - RNA, 17 nt, Human
cccaggcauuccccagg

SEQ ID NO: 1854952 - RNA, 19 nt, Human
cccagggugggaagggcua

SEQ ID NO: 1854953 - RNA, 16 nt, Human
cccaggaggccagccu

SEQ ID NO: 1854954 - RNA, 15 nt, Human
cccaggaggccagcc

SEQ ID NO: 1854955 - RNA, 15 nt, Human
cccaggcauucccca

SEQ ID NO: 1854956 - RNA, 23 nt, Human
cccaggcaggucuugaacuccug

SEQ ID NO: 1854957 - RNA, 14 nt, Human
cccaguuagcucuc

SEQ ID NO: 1854958 - RNA, 20 nt, Human
cccagugguuccuaauccuc

SEQ ID NO: 1854959 - RNA, 15 nt, Human
cccagugccgagaag

SEQ ID NO: 1854960 - RNA, 21 nt, Human
cccagugcccacaggaucagu

SEQ ID NO: 1854961 - RNA, 10 nt, Human
cccagucugg

SEQ ID NO: 1854962 - RNA, 18 nt, Human
cccagucuggaaugcagu

SEQ ID NO: 1854963 - RNA, 19 nt, Human
cccagucuggaaugcagug

SEQ ID NO: 1854964 - RNA, 13 nt, Human
cccaucucacaca

SEQ ID NO: 1854965 - RNA, 18 nt, Human
cccaucucacacaugagc

SEQ ID NO: 1854966 - RNA, 20 nt, Human
cccaucugugaaaggaaaga

SEQ ID NO: 1854967 - RNA, 13 nt, Human
cccaugcugcccu

SEQ ID NO: 1854968 - RNA, 12 nt, Human
cccaugcugccc

SEQ ID NO: 1854969 - RNA, 14 nt, Human
cccaugcugcccug

SEQ ID NO: 1854970 - RNA, 15 nt, Human
cccaugagccucagc

SEQ ID NO: 1854971 - RNA, 16 nt, Human
cccaugagccucagca

SEQ ID NO: 1854972 - RNA, 20 nt, Human
cccaugagccucagcauccu

SEQ ID NO: 1854973 - RNA, 17 nt, Human
cccaugucucgacucau

SEQ ID NO: 1854974 - RNA, 16 nt, Human
cccaugucucgacuca

SEQ ID NO: 1854975 - RNA, 21 nt, Human
ccccaaauggaaaugggcaga

SEQ ID NO: 1854976 - RNA, 18 nt, Human
cccaggaggccagccuug

SEQ ID NO: 1854977 - RNA, 16 nt, Human
cccagaggcuggguga

SEQ ID NO: 1854978 - RNA, 12 nt, Human
cccagccccauc

SEQ ID NO: 1854979 - RNA, 11 nt, Human
cccagccccau

SEQ ID NO: 1854980 - RNA, 17 nt, Human
cccagccccaaugaaca

SEQ ID NO: 1854981 - RNA, 13 nt, Human
cccagccccaaug

SEQ ID NO: 1854982 - RNA, 15 nt, Human
cccagccccauccuc

SEQ ID NO: 1854983 - RNA, 14 nt, Human
cccagccccauccu

SEQ ID NO: 1854984 - RNA, 14 nt, Human
cccagccccauccc

SEQ ID NO: 1854985 - RNA, 13 nt, Human
cccagccccaucc

SEQ ID NO: 1854986 - RNA, 19 nt, Human
cccagccccauccucugua

SEQ ID NO: 1854987 - RNA, 18 nt, Human
cccagccccauccucugu

SEQ ID NO: 1854988 - RNA, 20 nt, Human
cccagccuccaagcuccauc

SEQ ID NO: 1854989 - RNA, 18 nt, Human
cccagccuccaagcucca

SEQ ID NO: 1854990 - RNA, 23 nt, Human
cccagcccuccuuaucaaaggac

SEQ ID NO: 1854991 - RNA, 13 nt, Human
cccaggagccccg

SEQ ID NO: 1854992 - RNA, 14 nt, Human
cccaggagccccga

SEQ ID NO: 1854993 - RNA, 14 nt, Human
cccaggaggccagc

SEQ ID NO: 1854994 - RNA, 14 nt, Human
cccagcgagcccug

SEQ ID NO: 1854995 - RNA, 18 nt, Human
cccagcucugguccauag

SEQ ID NO: 1854996 - RNA, 16 nt, Human
cccagcucugguccau

SEQ ID NO: 1854997 - RNA, 15 nt, Human
cccagcucuggucca

SEQ ID NO: 1854998 - RNA, 14 nt, Human
cccagcucuggucc

SEQ ID NO: 1854999 - RNA, 13 nt, Human
cccagcucugguc

SEQ ID NO: 1855000 - RNA, 12 nt, Human
cccagcucuggu

SEQ ID NO: 1855001 - RNA, 18 nt, Human
ccauguuggccaggcugg

SEQ ID NO: 1855002 - RNA, 15 nt, Human
ccauguuggccaggc

SEQ ID NO: 1855003 - RNA, 19 nt, Human
ccauguuggccaggcuggu

SEQ ID NO: 1855004 - RNA, 21 nt, Human
ccauguuggccaggcuggucu

SEQ ID NO: 1855005 - RNA, 15 nt, Human
cccaccuggccucug

SEQ ID NO: 1855006 - RNA, 12 nt, Human
cccaccuggccu

SEQ ID NO: 1855007 - RNA, 17 nt, Human
cccaccuuggcugcagg

SEQ ID NO: 1855008 - RNA, 19 nt, Human
cccaccuuggcugcaggga

SEQ ID NO: 1855009 - RNA, 20 nt, Human
cccaccuuggcugcagggag

SEQ ID NO: 1855010 - RNA, 14 nt, Human
cccacgcccccacu

SEQ ID NO: 1855011 - RNA, 13 nt, Human
cccacgcccccac

SEQ ID NO: 1855012 - RNA, 15 nt, Human
cccacgcccccacug

SEQ ID NO: 1855013 - RNA, 18 nt, Human
ccaugcuccuggcccacu

SEQ ID NO: 1855014 - RNA, 15 nt, Human
ccaugcuccuggccc

SEQ ID NO: 1855015 - RNA, 15 nt, Human
ccaugcugcccugug

SEQ ID NO: 1855016 - RNA, 17 nt, Human
ccaugcugcccugugag

SEQ ID NO: 1855017 - RNA, 16 nt, Human
ccaugcugcccuguga

SEQ ID NO: 1855018 - RNA, 14 nt, Human
ccaugcugccucca

SEQ ID NO: 1855019 - RNA, 13 nt, Human
ccaugcuccuggc

SEQ ID NO: 1855020 - RNA, 13 nt, Human
ccauguuggccag

SEQ ID NO: 1855021 - RNA, 14 nt, Human
ccauguuggccagg

SEQ ID NO: 1855022 - RNA, 23 nt, Human
ccauggcacucuauguucuaaga

SEQ ID NO: 1855023 - RNA, 13 nt, Human
ccaugugccaggu

SEQ ID NO: 1855024 - RNA, 14 nt, Human
cccugguggcagcu

SEQ ID NO: 1855025 - RNA, 22 nt, Human
cccugccucucugcaggucccu

SEQ ID NO: 1855026 - RNA, 21 nt, Human
cccugccucucugcagguccc

SEQ ID NO: 1855027 - RNA, 16 nt, Human
cccugccucucugcag

SEQ ID NO: 1855028 - RNA, 13 nt, Human
cccugcugguuca

SEQ ID NO: 1855029 - RNA, 23 nt, Human
cccugcuuugggcugcccuggug

SEQ ID NO: 1855030 - RNA, 19 nt, Human
cccugcugguucaggguug

SEQ ID NO: 1855031 - RNA, 20 nt, Human
cccugcugguucaggguugg

SEQ ID NO: 1855032 - RNA, 21 nt, Human
cccuggacugugugcucagga

SEQ ID NO: 1855033 - RNA, 18 nt, Human
cccugggaggcucuggag

SEQ ID NO: 1855034 - RNA, 17 nt, Human
cccugggaggcucugga

SEQ ID NO: 1855035 - RNA, 16 nt, Human
cccugggaggcucugg

SEQ ID NO: 1855036 - RNA, 15 nt, Human
cccugggaggcucug

SEQ ID NO: 1855037 - RNA, 21 nt, Human
cccuggugcugccacacuuca

SEQ ID NO: 1855038 - RNA, 17 nt, Human
cccuggugcugccacac

SEQ ID NO: 1855039 - RNA, 22 nt, Human
cccugguggcagugggagcugc

SEQ ID NO: 1855040 - RNA, 23 nt, Human
cccugccuccuuugugaggaagc

SEQ ID NO: 1855041 - RNA, 16 nt, Human
cccugccuccuuugug

SEQ ID NO: 1855042 - RNA, 18 nt, Human
cccugccucucugcaggu

SEQ ID NO: 1855043 - RNA, 11 nt, Human
cccugccucuc

SEQ ID NO: 1855044 - RNA, 14 nt, Human
cccugccuccuuug

SEQ ID NO: 1855045 - RNA, 17 nt, Human
cccugccacccugggga

SEQ ID NO: 1855046 - RNA, 18 nt, Human
cccugccacccuggggag

SEQ ID NO: 1855047 - RNA, 12 nt, Human
cccugccacccu

SEQ ID NO: 1855048 - RNA, 14 nt, Human
cccugccacccugg

SEQ ID NO: 1855049 - RNA, 15 nt, Human
cccugccacccuggg

SEQ ID NO: 1855050 - RNA, 18 nt, Human
cccugcagagggcacaga

SEQ ID NO: 1855051 - RNA, 20 nt, Human
cccugcagagggcacagaaa

SEQ ID NO: 1855052 - RNA, 12 nt, Human
cccugcagaggg

SEQ ID NO: 1855053 - RNA, 16 nt, Human
cccugcaaccugauug

SEQ ID NO: 1855054 - RNA, 22 nt, Human
cccugcaaccugauugugucuc

SEQ ID NO: 1855055 - RNA, 19 nt, Human
cccucagggucccuggugg

SEQ ID NO: 1855056 - RNA, 18 nt, Human
cccucagggucccuggug

SEQ ID NO: 1855057 - RNA, 17 nt, Human
cccucagggucccuggu

SEQ ID NO: 1855058 - RNA, 16 nt, Human
cccucagggucccugg

SEQ ID NO: 1855059 - RNA, 15 nt, Human
cccucagggucccug

SEQ ID NO: 1855060 - RNA, 14 nt, Human
cccuaauaaagcug

SEQ ID NO: 1855061 - RNA, 13 nt, Human
cccuaauaaagcu

SEQ ID NO: 1855062 - RNA, 12 nt, Human
cccuaauaaagc

SEQ ID NO: 1855063 - RNA, 18 nt, Human
cccuaauaaagcugugug

SEQ ID NO: 1855064 - RNA, 15 nt, Human
cccuaauaaagcugu

SEQ ID NO: 1855065 - RNA, 17 nt, Human
cccuaaaguguauuuuu

SEQ ID NO: 1855066 - RNA, 22 nt, Human
cccuaaaguguauuuuuuuacu

SEQ ID NO: 1855067 - RNA, 16 nt, Human
cccggcaggguccuag

SEQ ID NO: 1855068 - RNA, 18 nt, Human
cccggaggggccuggcag

SEQ ID NO: 1855069 - RNA, 17 nt, Human
cccggaggggccuggca

SEQ ID NO: 1855070 - RNA, 22 nt, Human
cccucauccucauacccacccc

SEQ ID NO: 1855071 - RNA, 21 nt, Human
cccuccaagaccuucuccuuc

SEQ ID NO: 1855072 - RNA, 22 nt, Human
cccucauuccaccuucccaugc

SEQ ID NO: 1855073 - RNA, 20 nt, Human
cccucagucuggcccuuccu

SEQ ID NO: 1855074 - RNA, 21 nt, Human
cccucagggucccugguggca

SEQ ID NO: 1855075 - RNA, 15 nt, Human
cccucauagcccuca

SEQ ID NO: 1855076 - RNA, 13 nt, Human
cccucauagcccu

SEQ ID NO: 1855077 - RNA, 20 nt, Human
cccucauccucauacccacc

SEQ ID NO: 1855078 - RNA, 17 nt, Human
cccucauccucauaccc

SEQ ID NO: 1855079 - RNA, 22 nt, Human
cccucaucaccaacgucugugc

SEQ ID NO: 1855080 - RNA, 19 nt, Human
cccucauagcccucacccu

SEQ ID NO: 1855081 - RNA, 13 nt, Human
cccucccucuuuc

SEQ ID NO: 1855082 - RNA, 14 nt, Human
cccucccuucaacc

SEQ ID NO: 1855083 - RNA, 19 nt, Human
cccuccaucuaaacugccc

SEQ ID NO: 1855084 - RNA, 17 nt, Human
cccuccaugugggcuag

SEQ ID NO: 1855085 - RNA, 22 nt, Human
ccccagcuggggccaggcuggg

SEQ ID NO: 1855086 - RNA, 21 nt, Human
ccccagcuggggccaggcugg

SEQ ID NO: 1855087 - RNA, 13 nt, Human
ccccagccugcua

SEQ ID NO: 1855088 - RNA, 16 nt, Human
ccccagccccauccca

SEQ ID NO: 1855089 - RNA, 15 nt, Human
ccccagccccauccu

SEQ ID NO: 1855090 - RNA, 19 nt, Human
ccccagcccuccuuaucaa

SEQ ID NO: 1855091 - RNA, 22 nt, Human
ccccaggugguuauggagaggg

SEQ ID NO: 1855092 - RNA, 14 nt, Human
ccccuggcagcccc

SEQ ID NO: 1855093 - RNA, 12 nt, Human
ccccuggcagcc

SEQ ID NO: 1855094 - RNA, 15 nt, Human
ccccuggcagccccu

SEQ ID NO: 1855095 - RNA, 12 nt, Human
ccccaggaggcc

SEQ ID NO: 1855096 - RNA, 14 nt, Human
ccccuuaccacugc

SEQ ID NO: 1855097 - RNA, 20 nt, Human
ccccuguucuggcagaguug

SEQ ID NO: 1855098 - RNA, 12 nt, Human
ccccuucccccu

SEQ ID NO: 1855099 - RNA, 22 nt, Human
ccccuuccuaauuccacagcug

SEQ ID NO: 1855100 - RNA, 21 nt, Human
ccccuuccuaauuccacagcu

SEQ ID NO: 1855101 - RNA, 20 nt, Human
ccccuuccuaauuccacagc

SEQ ID NO: 1855102 - RNA, 22 nt, Human
ccccuguccccgcacugggcuu

SEQ ID NO: 1855103 - RNA, 23 nt, Human
ccccuggcuuuucacugcuggcu

SEQ ID NO: 1855104 - RNA, 20 nt, Human
cccgaggccuucucugaagg

SEQ ID NO: 1855105 - RNA, 15 nt, Human
cccgaggccuucucu

SEQ ID NO: 1855106 - RNA, 23 nt, Human
cccgcucagcccucccugccccu

SEQ ID NO: 1855107 - RNA, 22 nt, Human
cccgcuaagagggagggagggc

SEQ ID NO: 1855108 - RNA, 19 nt, Human
cccgcucagcccucccugc

SEQ ID NO: 1855109 - RNA, 15 nt, Human
ccuccucucugcccu

SEQ ID NO: 1855110 - RNA, 13 nt, Human
ccuccucucugcc

SEQ ID NO: 1855111 - RNA, 16 nt, Human
ccuccucucugcccua

SEQ ID NO: 1855112 - RNA, 21 nt, Human
ccuccuccagccgccaugcuc

SEQ ID NO: 1855113 - RNA, 22 nt, Human
ccucucccuuggauuguccccg

SEQ ID NO: 1855114 - RNA, 13 nt, Human
ccucucccuugga

SEQ ID NO: 1855115 - RNA, 20 nt, Human
ccucuccccagcaagugaga

SEQ ID NO: 1855116 - RNA, 15 nt, Human
ccucuccccagcaag

SEQ ID NO: 1855117 - RNA, 17 nt, Human
ccucugcacuccccugc

SEQ ID NO: 1855118 - RNA, 16 nt, Human
ccucugcacuccccug

SEQ ID NO: 1855119 - RNA, 12 nt, Human
ccucugagccuu

SEQ ID NO: 1855120 - RNA, 11 nt, Human
ccucugagccu

SEQ ID NO: 1855121 - RNA, 13 nt, Human
ccucugaggcuga

SEQ ID NO: 1855122 - RNA, 18 nt, Human
ccucugcacuccccugcu

SEQ ID NO: 1855123 - RNA, 23 nt, Human
ccucugcacuccccugcugggug

SEQ ID NO: 1855124 - RNA, 14 nt, Human
ccucugcagcaaua

SEQ ID NO: 1855125 - RNA, 18 nt, Human
ccucugcagcaauaaagc

SEQ ID NO: 1855126 - RNA, 16 nt, Human
ccucugcccacucccu

SEQ ID NO: 1855127 - RNA, 13 nt, Human
ccucugcccacuc

SEQ ID NO: 1855128 - RNA, 19 nt, Human
ccucugcagcaauaaagca

SEQ ID NO: 1855129 - RNA, 21 nt, Human
ccucugacacacagcucuguc

SEQ ID NO: 1855130 - RNA, 13 nt, Human
ccucugacacaca

SEQ ID NO: 1855131 - RNA, 15 nt, Human
ccucugacacacagc

SEQ ID NO: 1855132 - RNA, 14 nt, Human
ccucugacacacag

SEQ ID NO: 1855133 - RNA, 19 nt, Human
ccucugacacacagcucug

SEQ ID NO: 1855134 - RNA, 20 nt, Human
ccucugacacacagcucugu

SEQ ID NO: 1855135 - RNA, 12 nt, Human
ccuccuccagcc

SEQ ID NO: 1855136 - RNA, 11 nt, Human
ccuccucagau

SEQ ID NO: 1855137 - RNA, 13 nt, Human
ccucccucuuucc

SEQ ID NO: 1855138 - RNA, 19 nt, Human
ccucccgaguagcugggac

SEQ ID NO: 1855139 - RNA, 17 nt, Human
ccucccgaguagcuggg

SEQ ID NO: 1855140 - RNA, 18 nt, Human
ccucccgaguagcuggga

SEQ ID NO: 1855141 - RNA, 21 nt, Human
ccucccgaauagcugggacua

SEQ ID NO: 1855142 - RNA, 19 nt, Human
ccucccgaauagcugggac

SEQ ID NO: 1855143 - RNA, 20 nt, Human
ccucccgaauagcugggacu

SEQ ID NO: 1855144 - RNA, 15 nt, Human
ccucccaacucaccc

SEQ ID NO: 1855145 - RNA, 23 nt, Human
ccucccaaagugcugggauuaca

SEQ ID NO: 1855146 - RNA, 15 nt, Human
ccuccccuccuccug

SEQ ID NO: 1855147 - RNA, 18 nt, Human
ccucccgaauagcuggga

SEQ ID NO: 1855148 - RNA, 20 nt, Human
ccucaggugagaagcagagg

SEQ ID NO: 1855149 - RNA, 18 nt, Human
ccucaggugagaagcaga

SEQ ID NO: 1855150 - RNA, 17 nt, Human
ccucaggugagaagcag

SEQ ID NO: 1855151 - RNA, 12 nt, Human
ccucauacccac

SEQ ID NO: 1855152 - RNA, 12 nt, Human
ccuccaggugca

SEQ ID NO: 1855153 - RNA, 11 nt, Human
ccuccaggugc

SEQ ID NO: 1855154 - RNA, 17 nt, Human
ccuccaggugcacaagc

SEQ ID NO: 1855155 - RNA, 12 nt, Human
ccuccauguggg

SEQ ID NO: 1855156 - RNA, 15 nt, Human
ccuccaugugggcua

SEQ ID NO: 1855157 - RNA, 14 nt, Human
ccucccaacucacc

SEQ ID NO: 1855158 - RNA, 17 nt, Human
ccucccaaagugcuggg

SEQ ID NO: 1855159 - RNA, 12 nt, Human
ccuccauccuga

SEQ ID NO: 1855160 - RNA, 13 nt, Human
ccuccauccugag

SEQ ID NO: 1855161 - RNA, 16 nt, Human
ccuccaugcugccucc

SEQ ID NO: 1855162 - RNA, 19 nt, Human
ccuccaugcugccuccaga

SEQ ID NO: 1855163 - RNA, 22 nt, Human
ccucaggugagaagcagaggaa

SEQ ID NO: 1855164 - RNA, 22 nt, Human
ccucagggucccugguggcagc

SEQ ID NO: 1855165 - RNA, 20 nt, Human
ccucagggucccugguggca

SEQ ID NO: 1855166 - RNA, 17 nt, Human
ccucagggucccuggug

SEQ ID NO: 1855167 - RNA, 16 nt, Human
ccucagggucccuggu

SEQ ID NO: 1855168 - RNA, 16 nt, Human
ccucagaucuucugug

SEQ ID NO: 1855169 - RNA, 14 nt, Human
ccucacccuggggc

SEQ ID NO: 1855170 - RNA, 16 nt, Human
ccucagagccaccccu

SEQ ID NO: 1855171 - RNA, 17 nt, Human
ccuauuagagaagagau

SEQ ID NO: 1855172 - RNA, 16 nt, Human
ccuauuagagaagaga

SEQ ID NO: 1855173 - RNA, 23 nt, Human
ccucacaguccuuaccagcagag

SEQ ID NO: 1855174 - RNA, 24 nt, Human
ccucacaguccuuaccagcagagc

SEQ ID NO: 1855175 - RNA, 15 nt, Human
ccuaggugacagagu

SEQ ID NO: 1855176 - RNA, 13 nt, Human
cccuguucacucu

SEQ ID NO: 1855177 - RNA, 22 nt, Human
cccuguucacucuacuuagcau

SEQ ID NO: 1855178 - RNA, 14 nt, Human
cccuguucacucua

SEQ ID NO: 1855179 - RNA, 20 nt, Human
cccuuccuaauuccacagcu

SEQ ID NO: 1855180 - RNA, 19 nt, Human
cccuuccuaauuccacagc

SEQ ID NO: 1855181 - RNA, 14 nt, Human
cccuuccuaauucc

SEQ ID NO: 1855182 - RNA, 13 nt, Human
cccuuccuaauuc

SEQ ID NO: 1855183 - RNA, 12 nt, Human
cccuucccaccu

SEQ ID NO: 1855184 - RNA, 11 nt, Human
cccuucauuug

SEQ ID NO: 1855185 - RNA, 13 nt, Human
cccuucccaccuc

SEQ ID NO: 1855186 - RNA, 17 nt, Human
cccuuggauuguccccg

SEQ ID NO: 1855187 - RNA, 19 nt, Human
cccuucuuuuucuucuuuu

SEQ ID NO: 1855188 - RNA, 11 nt, Human
cccuucuuuuu

SEQ ID NO: 1855189 - RNA, 21 nt, Human
cccuuccuaauuccacagcug

SEQ ID NO: 1855190 - RNA, 23 nt, Human
cccuugguuaggcauugugggaa

SEQ ID NO: 1855191 - RNA, 22 nt, Human
cccuugguuaggcauuguggga

SEQ ID NO: 1855192 - RNA, 22 nt, Human
cccuuguggucccaccccacac

SEQ ID NO: 1855193 - RNA, 21 nt, Human
ccggaggggccuggcagccgu

SEQ ID NO: 1855194 - RNA, 17 nt, Human
ccggaggggccuggcag

SEQ ID NO: 1855195 - RNA, 17 nt, Human
ccgggaagggggcuggg

SEQ ID NO: 1855196 - RNA, 23 nt, Human
ccgggagccugaucaccugcccu

SEQ ID NO: 1855197 - RNA, 16 nt, Human
ccgggagccugaucac

SEQ ID NO: 1855198 - RNA, 12 nt, Human
ccguuauuaaaa

SEQ ID NO: 1855199 - RNA, 22 nt, Human
ccuagguauaauucacauugua

SEQ ID NO: 1855200 - RNA, 13 nt, Human
ccuaggugacaga

SEQ ID NO: 1855201 - RNA, 13 nt, Human
ccuacuuccccuu

SEQ ID NO: 1855202 - RNA, 16 nt, Human
ccuacuuccccuuccu

SEQ ID NO: 1855203 - RNA, 21 nt, Human
ccuagaaauuccccacccuga

SEQ ID NO: 1855204 - RNA, 19 nt, Human
ccuacuguaauuugugaua

SEQ ID NO: 1855205 - RNA, 18 nt, Human
ccuacccacccuccuuuc

SEQ ID NO: 1855206 - RNA, 13 nt, Human
ccuacccacccuc

SEQ ID NO: 1855207 - RNA, 19 nt, Human
ccuacagcuugaccgugag

SEQ ID NO: 1855208 - RNA, 22 nt, Human
ccuacaguugaaaaacagcuga

SEQ ID NO: 1855209 - RNA, 13 nt, Human
ccuaaacauauga

SEQ ID NO: 1855210 - RNA, 16 nt, Human
ccuaaaauucagugga

SEQ ID NO: 1855211 - RNA, 21 nt, Human
cuacuguaauuugugauacaa

SEQ ID NO: 1855212 - RNA, 17 nt, Human
cuagcacuuugggaggc

SEQ ID NO: 1855213 - RNA, 15 nt, Human
cuagagguucaaaga

SEQ ID NO: 1855214 - RNA, 21 nt, Human
cuagagugaacuugggccacu

SEQ ID NO: 1855215 - RNA, 17 nt, Human
cuagagugaacuugggc

SEQ ID NO: 1855216 - RNA, 21 nt, Human
cuagacgagcaggcuucuucc

SEQ ID NO: 1855217 - RNA, 20 nt, Human
cuagacgagcaggcuucuuc

SEQ ID NO: 1855218 - RNA, 18 nt, Human
cuagacucccaagcugga

SEQ ID NO: 1855219 - RNA, 15 nt, Human
cuacuugggaggcug

SEQ ID NO: 1855220 - RNA, 18 nt, Human
cuacuugggaggcugaga

SEQ ID NO: 1855221 - RNA, 19 nt, Human
cuacuugggaggcugagau

SEQ ID NO: 1855222 - RNA, 20 nt, Human
cuacuuccccuuccuaauuc

SEQ ID NO: 1855223 - RNA, 15 nt, Human
cuacuuccccuuccu

SEQ ID NO: 1855224 - RNA, 14 nt, Human
cuacuuccccuucc

SEQ ID NO: 1855225 - RNA, 20 nt, Human
cuacuuccugugacuucagc

SEQ ID NO: 1855226 - RNA, 14 nt, Human
cuacugaggugcua

SEQ ID NO: 1855227 - RNA, 17 nt, Human
cuacuguaauuugugau

SEQ ID NO: 1855228 - RNA, 16 nt, Human
cuacuguaauuuguga

SEQ ID NO: 1855229 - RNA, 21 nt, Human
cuacuguaaggcaaucauggu

SEQ ID NO: 1855230 - RNA, 21 nt, Human
cuacccgggaagggggcuggg

SEQ ID NO: 1855231 - RNA, 20 nt, Human
cuacccgggaagggggcugg

SEQ ID NO: 1855232 - RNA, 15 nt, Human
cuacccgggaagggg

SEQ ID NO: 1855233 - RNA, 14 nt, Human
cuacccgggaaggg

SEQ ID NO: 1855234 - RNA, 16 nt, Human
cuacucugugucaggu

SEQ ID NO: 1855235 - RNA, 21 nt, Human
cuacucugugucagguggggc

SEQ ID NO: 1855236 - RNA, 14 nt, Human
cuaaggcugaacuu

SEQ ID NO: 1855237 - RNA, 15 nt, Human
cuaaggugugcucug

SEQ ID NO: 1855238 - RNA, 21 nt, Human
cuaagcuauucaguaauaacu

SEQ ID NO: 1855239 - RNA, 19 nt, Human
cuaagcuauucaguaauaa

SEQ ID NO: 1855240 - RNA, 15 nt, Human
cuaagcaaaauguga

SEQ ID NO: 1855241 - RNA, 18 nt, Human
cuaagcaaaaugugauau

SEQ ID NO: 1855242 - RNA, 20 nt, Human
cuaagcacgggccauaugaa

SEQ ID NO: 1855243 - RNA, 23 nt, Human
cuaagcacgggccauaugaauaa

SEQ ID NO: 1855244 - RNA, 14 nt, Human
cuaagcaaaaugug

SEQ ID NO: 1855245 - RNA, 17 nt, Human
cuaaccagcagaaaugc

SEQ ID NO: 1855246 - RNA, 16 nt, Human
cuaaccagcagaaaug

SEQ ID NO: 1855247 - RNA, 17 nt, Human
cuaaccacgcuggaccu

SEQ ID NO: 1855248 - RNA, 17 nt, Human
cuacagaggccaugggc

SEQ ID NO: 1855249 - RNA, 17 nt, Human
cuacccacccuccuuuc

SEQ ID NO: 1855250 - RNA, 22 nt, Human
cuacccacccuccuuucaccac

SEQ ID NO: 1855251 - RNA, 12 nt, Human
cuacccaggugc

SEQ ID NO: 1855252 - RNA, 20 nt, Human
cuacccagcgagcccuggug

SEQ ID NO: 1855253 - RNA, 19 nt, Human
cuacccagcgagcccuggu

SEQ ID NO: 1855254 - RNA, 16 nt, Human
cuacacuccagugaga

SEQ ID NO: 1855255 - RNA, 21 nt, Human
cuacacacugcauguuuguga

SEQ ID NO: 1855256 - RNA, 17 nt, Human
cuacacuccagugagac

SEQ ID NO: 1855257 - RNA, 18 nt, Human
cuacacugugcugagucu

SEQ ID NO: 1855258 - RNA, 13 nt, Human
cuacacacugcau

SEQ ID NO: 1855259 - RNA, 15 nt, Human
cuacacacugcaugu

SEQ ID NO: 1855260 - RNA, 15 nt, Human
cuacagaggccaugg

SEQ ID NO: 1855261 - RNA, 16 nt, Human
cuaauccucuuuuucu

SEQ ID NO: 1855262 - RNA, 19 nt, Human
cuaaucagcauucucacuc

SEQ ID NO: 1855263 - RNA, 17 nt, Human
cuaaucagcauucucac

SEQ ID NO: 1855264 - RNA, 13 nt, Human
cuaauaaagcugu

SEQ ID NO: 1855265 - RNA, 21 nt, Human
cuaauaaaauuuaaaagucuu

SEQ ID NO: 1855266 - RNA, 12 nt, Human
cuaauaaagcug

SEQ ID NO: 1855267 - RNA, 16 nt, Human
cuaaggugugcucuga

SEQ ID NO: 1855268 - RNA, 14 nt, Human
cuaauguacugcau

SEQ ID NO: 1855269 - RNA, 16 nt, Human
cuaauguacugcauau

SEQ ID NO: 1855270 - RNA, 22 nt, Human
cuaaugaaugcauaaaauguua

SEQ ID NO: 1855271 - RNA, 19 nt, Human
cuaaugaaugcauaaaaug

SEQ ID NO: 1855272 - RNA, 15 nt, Human
cuacaagacacagug

SEQ ID NO: 1855273 - RNA, 14 nt, Human
cuaguuccaccauc

SEQ ID NO: 1855274 - RNA, 14 nt, Human
cuaugacacaugca

SEQ ID NO: 1855275 - RNA, 20 nt, Human
cuaucaaguauuauaccuuu

SEQ ID NO: 1855276 - RNA, 22 nt, Human
cuauauuuuuuguuaaaugauu

SEQ ID NO: 1855277 - RNA, 22 nt, Human
cuauauuguuuucaguguacau

SEQ ID NO: 1855278 - RNA, 20 nt, Human
cuauauuuuuuguuaaauga

SEQ ID NO: 1855279 - RNA, 23 nt, Human
cuauauuguuuucaguguacaug

SEQ ID NO: 1855280 - RNA, 12 nt, Human
cuagcagcaggg

SEQ ID NO: 1855281 - RNA, 15 nt, Human
cuaggaacacuccuu

SEQ ID NO: 1855282 - RNA, 13 nt, Human
cuaggaacacucc

SEQ ID NO: 1855283 - RNA, 21 nt, Human
cuaggaagacuuuggaaagag

SEQ ID NO: 1855284 - RNA, 17 nt, Human
cuaggaaauccagggug

SEQ ID NO: 1855285 - RNA, 16 nt, Human
cuaggaaauccagggu

SEQ ID NO: 1855286 - RNA, 17 nt, Human
cuaggaggucucuaaga

SEQ ID NO: 1855287 - RNA, 22 nt, Human
cuaggaccccuccaugugggcu

SEQ ID NO: 1855288 - RNA, 15 nt, Human
cuaguaucaaaagaa

SEQ ID NO: 1855289 - RNA, 17 nt, Human
cuaguaucaaaagaaag

SEQ ID NO: 1855290 - RNA, 23 nt, Human
cuaguaucaaaagaaagaaaauc

SEQ ID NO: 1855291 - RNA, 21 nt, Human
cuaggcauuugcugaauacag

SEQ ID NO: 1855292 - RNA, 15 nt, Human
cuaggcaggaccugu

SEQ ID NO: 1855293 - RNA, 16 nt, Human
cuaggcaggaccugug

SEQ ID NO: 1855294 - RNA, 23 nt, Human
cuagugugguguuuccuggcacu

SEQ ID NO: 1855295 - RNA, 22 nt, Human
cuagugugguguuuccuggcac

SEQ ID NO: 1855296 - RNA, 21 nt, Human
cuagugugguguuuccuggca

SEQ ID NO: 1855297 - RNA, 19 nt, Human
cuagugugguguuuccugg

SEQ ID NO: 1855298 - RNA, 11 nt, Human
cuaugcauuug

SEQ ID NO: 1855299 - RNA, 12 nt, Human
cuaugcauuuga

SEQ ID NO: 1855300 - RNA, 21 nt, Human
cuaugcauuugaaaauuuuga

SEQ ID NO: 1855301 - RNA, 14 nt, Human
cuaugcauuugaaa

SEQ ID NO: 1855302 - RNA, 22 nt, Human
cuauuuuaauaaacacucuuga

SEQ ID NO: 1855303 - RNA, 18 nt, Human
cuauuuuaauaaacacuc

SEQ ID NO: 1855304 - RNA, 21 nt, Human
cucaacucuccuccagaguca

SEQ ID NO: 1855305 - RNA, 20 nt, Human
cucaacucuccuccagaguc

SEQ ID NO: 1855306 - RNA, 13 nt, Human
cucaaauuucuaa

SEQ ID NO: 1855307 - RNA, 17 nt, Human
cucaagagggcacuggu

SEQ ID NO: 1855308 - RNA, 21 nt, Human
cucaagagggcacugguggcc

SEQ ID NO: 1855309 - RNA, 19 nt, Human
cucaagagggcacuggugg

SEQ ID NO: 1855310 - RNA, 19 nt, Human
cucaacucuccuccagagu

SEQ ID NO: 1855311 - RNA, 13 nt, Human
cucaccccagccc

SEQ ID NO: 1855312 - RNA, 12 nt, Human
cucaccccagcc

SEQ ID NO: 1855313 - RNA, 14 nt, Human
cucaccccagcccc

SEQ ID NO: 1855314 - RNA, 17 nt, Human
cucaccccuugccauaa

SEQ ID NO: 1855315 - RNA, 16 nt, Human
cucacuaggcuucugg

SEQ ID NO: 1855316 - RNA, 13 nt, Human
cucacuaggcuuc

SEQ ID NO: 1855317 - RNA, 21 nt, Human
cucacuaucccggcugcccuu

SEQ ID NO: 1855318 - RNA, 20 nt, Human
cucacuaucccggcugcccu

SEQ ID NO: 1855319 - RNA, 20 nt, Human
cucacuaggcuucugguuga

SEQ ID NO: 1855320 - RNA, 16 nt, Human
cucacuauguugccca

SEQ ID NO: 1855321 - RNA, 17 nt, Human
cucacuauguugcccag

SEQ ID NO: 1855322 - RNA, 18 nt, Human
cucaagugauucuccugc

SEQ ID NO: 1855323 - RNA, 19 nt, Human
cucaagugauucuccugcc

SEQ ID NO: 1855324 - RNA, 20 nt, Human
cucaagugauucuccugccu

SEQ ID NO: 1855325 - RNA, 20 nt, Human
cucaccagccccagugccca

SEQ ID NO: 1855326 - RNA, 21 nt, Human
cucaccagccccagugcccac

SEQ ID NO: 1855327 - RNA, 20 nt, Human
cucacauagcuuacaagcca

SEQ ID NO: 1855328 - RNA, 19 nt, Human
cucaccagccccagugccc

SEQ ID NO: 1855329 - RNA, 13 nt, Human
cucacauuuauau

SEQ ID NO: 1855330 - RNA, 22 nt, Human
cggugcuaucucccccagcccc

SEQ ID NO: 1855331 - RNA, 21 nt, Human
cggugcuaucucccccagccc

SEQ ID NO: 1855332 - RNA, 20 nt, Human
cggugcuaucucccccagcc

SEQ ID NO: 1855333 - RNA, 18 nt, Human
cggugcuaucucccccag

SEQ ID NO: 1855334 - RNA, 16 nt, Human
cgucuaccugaggggc

SEQ ID NO: 1855335 - RNA, 16 nt, Human
cgucucauacucaccu

SEQ ID NO: 1855336 - RNA, 16 nt, Human
cgucgacguagaaccu

SEQ ID NO: 1855337 - RNA, 16 nt, Human
cgugcacacaccagag

SEQ ID NO: 1855338 - RNA, 20 nt, Human
cgucugacaggcaaugcugg

SEQ ID NO: 1855339 - RNA, 21 nt, Human
cgucugacaggcaaugcuggc

SEQ ID NO: 1855340 - RNA, 22 nt, Human
cgucugacaggcaaugcuggcu

SEQ ID NO: 1855341 - RNA, 23 nt, Human
cgugcauaccacuuuuguucuug

SEQ ID NO: 1855342 - RNA, 21 nt, Human
cgugcaguggugcgaucuggg

SEQ ID NO: 1855343 - RNA, 22 nt, Human
cgugcaguggugcgaucugggu

SEQ ID NO: 1855344 - RNA, 18 nt, Human
cgugcacacaccagagcc

SEQ ID NO: 1855345 - RNA, 19 nt, Human
cgugcacacaccagagccc

SEQ ID NO: 1855346 - RNA, 15 nt, Human
cguggaacguuuuuc

SEQ ID NO: 1855347 - RNA, 20 nt, Human
cguggaacguuuuuccuguu

SEQ ID NO: 1855348 - RNA, 19 nt, Human
cguggcuucccgcucagcc

SEQ ID NO: 1855349 - RNA, 18 nt, Human
cguggcuucccgcucagc

SEQ ID NO: 1855350 - RNA, 21 nt, Human
cguggcuucccgcucagcccu

SEQ ID NO: 1855351 - RNA, 20 nt, Human
cguggcuucccgcucagccc

SEQ ID NO: 1855352 - RNA, 20 nt, Human
cuaaauauauuuuaagacga

SEQ ID NO: 1855353 - RNA, 18 nt, Human
cuaaauauauuuuaagac

SEQ ID NO: 1855354 - RNA, 18 nt, Human
cuaaauggaaccacucua

SEQ ID NO: 1855355 - RNA, 16 nt, Human
cuaaauggaaccacuc

SEQ ID NO: 1855356 - RNA, 17 nt, Human
cuaaauggaaccacucu

SEQ ID NO: 1855357 - RNA, 15 nt, Human
cuaaauggaaccacu

SEQ ID NO: 1855358 - RNA, 20 nt, Human
cuaaaucuccaaaauaaaac

SEQ ID NO: 1855359 - RNA, 16 nt, Human
cuaaauguugaaagau

SEQ ID NO: 1855360 - RNA, 23 nt, Human
cuaaauugacacuuaaaaauggu

SEQ ID NO: 1855361 - RNA, 15 nt, Human
cuaacaugauuuggg

SEQ ID NO: 1855362 - RNA, 17 nt, Human
cuaacauggaaguacua

SEQ ID NO: 1855363 - RNA, 15 nt, Human
cuaacauggaaguac

SEQ ID NO: 1855364 - RNA, 16 nt, Human
cgcccuggacugugug

SEQ ID NO: 1855365 - RNA, 21 nt, Human
cgccccucccacagcgcuggc

SEQ ID NO: 1855366 - RNA, 19 nt, Human
cgccccucccacagcgcug

SEQ ID NO: 1855367 - RNA, 12 nt, Human
cgcccagucugg

SEQ ID NO: 1855368 - RNA, 22 nt, Human
cgcccaggcuuagucacugaga

SEQ ID NO: 1855369 - RNA, 20 nt, Human
ccucugcccacucccugcaa

SEQ ID NO: 1855370 - RNA, 19 nt, Human
ccucugcccacucccugca

SEQ ID NO: 1855371 - RNA, 17 nt, Human
ccucugcccacucccug

SEQ ID NO: 1855372 - RNA, 22 nt, Human
cgccagauucuuuccugaggcu

SEQ ID NO: 1855373 - RNA, 16 nt, Human
cgccaucccagcccca

SEQ ID NO: 1855374 - RNA, 14 nt, Human
cgccaucccagccc

SEQ ID NO: 1855375 - RNA, 23 nt, Human
cgccaggggaaaaucagccugcu

SEQ ID NO: 1855376 - RNA, 17 nt, Human
cgccaucccagccccaa

SEQ ID NO: 1855377 - RNA, 18 nt, Human
cgcucucuggccuucggc

SEQ ID NO: 1855378 - RNA, 22 nt, Human
cgcugucagccauuccuguucc

SEQ ID NO: 1855379 - RNA, 17 nt, Human
cgcugugcugcccugcc

SEQ ID NO: 1855380 - RNA, 16 nt, Human
cgcugugcugcccugc

SEQ ID NO: 1855381 - RNA, 15 nt, Human
cgcugugcugcccug

SEQ ID NO: 1855382 - RNA, 18 nt, Human
cgcugugcugcccugccc

SEQ ID NO: 1855383 - RNA, 15 nt, Human
cggaaaacaugcuac

SEQ ID NO: 1855384 - RNA, 20 nt, Human
cggaaaacaugcuacacacu

SEQ ID NO: 1855385 - RNA, 14 nt, Human
cgcucucuggccuu

SEQ ID NO: 1855386 - RNA, 15 nt, Human
cgcucucuggccuuc

SEQ ID NO: 1855387 - RNA, 17 nt, Human
cgcuacccgggaagggg

SEQ ID NO: 1855388 - RNA, 12 nt, Human
cgcucagcccuc

SEQ ID NO: 1855389 - RNA, 21 nt, Human
cgcucagcccucccugccccu

SEQ ID NO: 1855390 - RNA, 16 nt, Human
cgcucagcccucccug

SEQ ID NO: 1855391 - RNA, 16 nt, Human
cgcuacccgggaaggg

SEQ ID NO: 1855392 - RNA, 22 nt, Human
cgcuaagagggagggagggcuc

SEQ ID NO: 1855393 - RNA, 13 nt, Human
cggaagagccuug

SEQ ID NO: 1855394 - RNA, 14 nt, Human
cggaauaguuggcu

SEQ ID NO: 1855395 - RNA, 17 nt, Human
cggccaccugcggugcu

SEQ ID NO: 1855396 - RNA, 16 nt, Human
cggccaccugcggugc

SEQ ID NO: 1855397 - RNA, 15 nt, Human
cggccaccugcggug

SEQ ID NO: 1855398 - RNA, 11 nt, Human
cggccaccugc

SEQ ID NO: 1855399 - RNA, 13 nt, Human
cggccccugcugg

SEQ ID NO: 1855400 - RNA, 18 nt, Human
cggccccugcugguucag

SEQ ID NO: 1855401 - RNA, 19 nt, Human
cggccccugcugguucagg

SEQ ID NO: 1855402 - RNA, 24 nt, Human
cggccaggccagagggagugacag

SEQ ID NO: 1855403 - RNA, 12 nt, Human
cggcugcccuuu

SEQ ID NO: 1855404 - RNA, 11 nt, Human
cggcugcccuu

SEQ ID NO: 1855405 - RNA, 12 nt, Human
cggccuccaucc

SEQ ID NO: 1855406 - RNA, 14 nt, Human
cggccuccauccug

SEQ ID NO: 1855407 - RNA, 23 nt, Human
cggggacagcuccuucuguccua

SEQ ID NO: 1855408 - RNA, 16 nt, Human
cgggguggauuggauu

SEQ ID NO: 1855409 - RNA, 15 nt, Human
cgggggcagagaggg

SEQ ID NO: 1855410 - RNA, 22 nt, Human
cggcuggccuggccccucaggg

SEQ ID NO: 1855411 - RNA, 23 nt, Human
cggcuggccuggccccucagggu

SEQ ID NO: 1855412 - RNA, 20 nt, Human
cgggaggucgaggcaggagg

SEQ ID NO: 1855413 - RNA, 18 nt, Human
cgggaggucgaggcagga

SEQ ID NO: 1855414 - RNA, 17 nt, Human
cgggauuaguacacacu

SEQ ID NO: 1855415 - RNA, 22 nt, Human
cggggacagcuccuucuguccu

SEQ ID NO: 1855416 - RNA, 14 nt, Human
cgggcacucagaag

SEQ ID NO: 1855417 - RNA, 22 nt, Human
cgggcacucagaagacacugau

SEQ ID NO: 1855418 - RNA, 11 nt, Human
cgggucacagg

SEQ ID NO: 1855419 - RNA, 19 nt, Human
cgggucacaggagggaggg

SEQ ID NO: 1855420 - RNA, 14 nt, Human
cgguccacccagga

SEQ ID NO: 1855421 - RNA, 15 nt, Human
cgguccacccaggag

SEQ ID NO: 1855422 - RNA, 16 nt, Human
cgguccacccaggagc

SEQ ID NO: 1855423 - RNA, 20 nt, Human
cgguccacccaggagccccg

SEQ ID NO: 1855424 - RNA, 20 nt, Human
cggugagaggggaacagacu

SEQ ID NO: 1855425 - RNA, 21 nt, Human
cggugagaggggaacagacug

SEQ ID NO: 1855426 - RNA, 17 nt, Human
cggugagcuacaaaugc

SEQ ID NO: 1855427 - RNA, 18 nt, Human
cucuccagccccuggaug

SEQ ID NO: 1855428 - RNA, 17 nt, Human
cucuccagccccuggau

SEQ ID NO: 1855429 - RNA, 16 nt, Human
cucuccagccccugga

SEQ ID NO: 1855430 - RNA, 15 nt, Human
cucuccagccccugg

SEQ ID NO: 1855431 - RNA, 14 nt, Human
cucuccagccccug

SEQ ID NO: 1855432 - RNA, 14 nt, Human
cucuccacugccuu

SEQ ID NO: 1855433 - RNA, 12 nt, Human
cucuccacugcc

SEQ ID NO: 1855434 - RNA, 11 nt, Human
cucuccacugc

SEQ ID NO: 1855435 - RNA, 21 nt, Human
cucucaggccagcugcuuggg

SEQ ID NO: 1855436 - RNA, 19 nt, Human
cucucaggccagcugcuug

SEQ ID NO: 1855437 - RNA, 18 nt, Human
cucucaggccagcugcuu

SEQ ID NO: 1855438 - RNA, 17 nt, Human
cucucaggccagcugcu

SEQ ID NO: 1855439 - RNA, 15 nt, Human
cucucaggccagcug

SEQ ID NO: 1855440 - RNA, 13 nt, Human
cucucaggccagc

SEQ ID NO: 1855441 - RNA, 23 nt, Human
cucucaggccaaacucaccugcc

SEQ ID NO: 1855442 - RNA, 22 nt, Human
cucucaggccaaacucaccugc

SEQ ID NO: 1855443 - RNA, 21 nt, Human
cucucaggccaaacucaccug

SEQ ID NO: 1855444 - RNA, 20 nt, Human
cucucaggccaaacucaccu

SEQ ID NO: 1855445 - RNA, 12 nt, Human
cucucaggccaa

SEQ ID NO: 1855446 - RNA, 15 nt, Human
cucuaguuugauuaa

SEQ ID NO: 1855447 - RNA, 19 nt, Human
cucuaguuugauuaaauuc

SEQ ID NO: 1855448 - RNA, 20 nt, Human
cucuaguuugauuaaauucu

SEQ ID NO: 1855449 - RNA, 21 nt, Human
cucuaguuugauuaaauucuu

SEQ ID NO: 1855450 - RNA, 12 nt, Human
cucucucacucc

SEQ ID NO: 1855451 - RNA, 13 nt, Human
cucucucaggcca

SEQ ID NO: 1855452 - RNA, 22 nt, Human
cucuccucuugccacugccucu

SEQ ID NO: 1855453 - RNA, 19 nt, Human
cucuccucuugccacugcc

SEQ ID NO: 1855454 - RNA, 17 nt, Human
cucuccucuugccacug

SEQ ID NO: 1855455 - RNA, 16 nt, Human
cucuccucuugccacu

SEQ ID NO: 1855456 - RNA, 15 nt, Human
cucuccucuugccac

SEQ ID NO: 1855457 - RNA, 14 nt, Human
cucuccucuugcca

SEQ ID NO: 1855458 - RNA, 18 nt, Human
cucuccucugcugcuggc

SEQ ID NO: 1855459 - RNA, 15 nt, Human
cucuccucugcugcu

SEQ ID NO: 1855460 - RNA, 14 nt, Human
cucuccucugcugc

SEQ ID NO: 1855461 - RNA, 13 nt, Human
cucuccucugcug

SEQ ID NO: 1855462 - RNA, 19 nt, Human
cucuccagccccuggaugc

SEQ ID NO: 1855463 - RNA, 15 nt, Human
cucuccacugccuuc

SEQ ID NO: 1855464 - RNA, 14 nt, Human
cucuccccagcaag

SEQ ID NO: 1855465 - RNA, 22 nt, Human
cucuccccagcaagugagagcu

SEQ ID NO: 1855466 - RNA, 12 nt, Human
cucuccucugcu

SEQ ID NO: 1855467 - RNA, 24 nt, Human
cucuccccagcaagugagagcugg

SEQ ID NO: 1855468 - RNA, 13 nt, Human
cucuacaaaaagc

SEQ ID NO: 1855469 - RNA, 13 nt, Human
cucuacagaggcc

SEQ ID NO: 1855470 - RNA, 21 nt, Human
cucuacagcuaaucagcauuc

SEQ ID NO: 1855471 - RNA, 19 nt, Human
cucuacagaggccaugggc

SEQ ID NO: 1855472 - RNA, 14 nt, Human
cucuacagaggcca

SEQ ID NO: 1855473 - RNA, 16 nt, Human
cucuacagaggccaug

SEQ ID NO: 1855474 - RNA, 14 nt, Human
cucggcucacugca

SEQ ID NO: 1855475 - RNA, 18 nt, Human
cucggcucacugcauccu

SEQ ID NO: 1855476 - RNA, 17 nt, Human
cucggcucacugcaucc

SEQ ID NO: 1855477 - RNA, 19 nt, Human
cuccuucacagaugggugc

SEQ ID NO: 1855478 - RNA, 13 nt, Human
cuccuucaccuuu

SEQ ID NO: 1855479 - RNA, 17 nt, Human
cuccuucacagaugggu

SEQ ID NO: 1855480 - RNA, 16 nt, Human
cuccuucacagauggg

SEQ ID NO: 1855481 - RNA, 20 nt, Human
cuccugugugugcgccuaca

SEQ ID NO: 1855482 - RNA, 16 nt, Human
cucuacuuagcauguc

SEQ ID NO: 1855483 - RNA, 20 nt, Human
cucuacuuagcaugucccua

SEQ ID NO: 1855484 - RNA, 19 nt, Human
cucuacuuagcaugucccu

SEQ ID NO: 1855485 - RNA, 17 nt, Human
cucuacuuagcaugucc

SEQ ID NO: 1855486 - RNA, 20 nt, Human
cucuaccauccccuguagag

SEQ ID NO: 1855487 - RNA, 13 nt, Human
cucuacccuggca

SEQ ID NO: 1855488 - RNA, 23 nt, Human
cucuagggaaaaaccagcgugug

SEQ ID NO: 1855489 - RNA, 15 nt, Human
cuccugccucagccu

SEQ ID NO: 1855490 - RNA, 16 nt, Human
cuccugugugugcgcc

SEQ ID NO: 1855491 - RNA, 19 nt, Human
cuccugugugugcgccuac

SEQ ID NO: 1855492 - RNA, 17 nt, Human
cuccugcaggcagccag

SEQ ID NO: 1855493 - RNA, 16 nt, Human
cuccugcaggcagcca

SEQ ID NO: 1855494 - RNA, 11 nt, Human
cuccugcaggc

SEQ ID NO: 1855495 - RNA, 20 nt, Human
cuccugcaggcagccaggcc

SEQ ID NO: 1855496 - RNA, 18 nt, Human
cuccugcaggcagccagg

SEQ ID NO: 1855497 - RNA, 11 nt, Human
cuccugcccuu

SEQ ID NO: 1855498 - RNA, 13 nt, Human
cuccugccucagc

SEQ ID NO: 1855499 - RNA, 14 nt, Human
cuccugccucagcc

SEQ ID NO: 1855500 - RNA, 17 nt, Human
cuccucccggugcccaa

SEQ ID NO: 1855501 - RNA, 15 nt, Human
cuccucccggugccc

SEQ ID NO: 1855502 - RNA, 14 nt, Human
cuccucccggugcc

SEQ ID NO: 1855503 - RNA, 22 nt, Human
cuccucuccccagcaagugaga

SEQ ID NO: 1855504 - RNA, 22 nt, Human
cuccuccagccgccaugcuccu

SEQ ID NO: 1855505 - RNA, 13 nt, Human
cucccucauucca

SEQ ID NO: 1855506 - RNA, 15 nt, Human
cuccgaccagacacc

SEQ ID NO: 1855507 - RNA, 20 nt, Human
cucccuuuuaauccuggcug

SEQ ID NO: 1855508 - RNA, 19 nt, Human
cucccuuuuaauccuggcu

SEQ ID NO: 1855509 - RNA, 22 nt, Human
cucccaacucaccccagcccca

SEQ ID NO: 1855510 - RNA, 17 nt, Human
cucccaacucaccccag

SEQ ID NO: 1855511 - RNA, 22 nt, Human
cucccaaagugcugggauuaca

SEQ ID NO: 1855512 - RNA, 18 nt, Human
cucccaaagugcugggau

SEQ ID NO: 1855513 - RNA, 23 nt, Human
cucccaucugugaaaggaaagag

SEQ ID NO: 1855514 - RNA, 18 nt, Human
cucccaucugugaaagga

SEQ ID NO: 1855515 - RNA, 15 nt, Human
cucccaucugugaaa

SEQ ID NO: 1855516 - RNA, 14 nt, Human
cucccaucugugaa

SEQ ID NO: 1855517 - RNA, 11 nt, Human
cucccaucugu

SEQ ID NO: 1855518 - RNA, 16 nt, Human
cuccaucuccacucca

SEQ ID NO: 1855519 - RNA, 22 nt, Human
cuccaugucucugagcauuaga

SEQ ID NO: 1855520 - RNA, 13 nt, Human
cuccaugucucug

SEQ ID NO: 1855521 - RNA, 17 nt, Human
cucccaaagugcuggga

SEQ ID NO: 1855522 - RNA, 13 nt, Human
cuccaugugggcu

SEQ ID NO: 1855523 - RNA, 11 nt, Human
cuccauccuga

SEQ ID NO: 1855524 - RNA, 16 nt, Human
cuccauccugaggcuc

SEQ ID NO: 1855525 - RNA, 18 nt, Human
cuccauccugaggcucca

SEQ ID NO: 1855526 - RNA, 14 nt, Human
cuccaucuccacuc

SEQ ID NO: 1855527 - RNA, 18 nt, Human
cucacuauguugcccagg

SEQ ID NO: 1855528 - RNA, 12 nt, Human
cuccccagcaag

SEQ ID NO: 1855529 - RNA, 20 nt, Human
cuccccagcaagugagagcu

SEQ ID NO: 1855530 - RNA, 21 nt, Human
cuccccagcaagugagagcug

SEQ ID NO: 1855531 - RNA, 12 nt, Human
cuccccugcugg

SEQ ID NO: 1855532 - RNA, 14 nt, Human
cuccccugcugggu

SEQ ID NO: 1855533 - RNA, 13 nt, Human
cuccccugcuggg

SEQ ID NO: 1855534 - RNA, 17 nt, Human
cucccgaauagcuggga

SEQ ID NO: 1855535 - RNA, 16 nt, Human
cucccgaauagcuggg

SEQ ID NO: 1855536 - RNA, 15 nt, Human
cucccgaguagcugg

SEQ ID NO: 1855537 - RNA, 18 nt, Human
cucccgaauagcugggac

SEQ ID NO: 1855538 - RNA, 16 nt, Human
cucccgaguagcuggg

SEQ ID NO: 1855539 - RNA, 17 nt, Human
cucccgaguagcuggga

SEQ ID NO: 1855540 - RNA, 19 nt, Human
cucccgaauagcugggacu

SEQ ID NO: 1855541 - RNA, 18 nt, Human
cucccgaguagcugggac

SEQ ID NO: 1855542 - RNA, 20 nt, Human
cucccggcuaugggggcacu

SEQ ID NO: 1855543 - RNA, 15 nt, Human
cugagacagcccggg

SEQ ID NO: 1855544 - RNA, 14 nt, Human
cugagacagcccgg

SEQ ID NO: 1855545 - RNA, 14 nt, Human
cugagaaauuuaua

SEQ ID NO: 1855546 - RNA, 11 nt, Human
cugagaaauuu

SEQ ID NO: 1855547 - RNA, 18 nt, Human
cugacuguuuucucuuga

SEQ ID NO: 1855548 - RNA, 16 nt, Human
cugacuguuuucucuu

SEQ ID NO: 1855549 - RNA, 15 nt, Human
cugacccaugcugcc

SEQ ID NO: 1855550 - RNA, 14 nt, Human
cugacccaugcugc

SEQ ID NO: 1855551 - RNA, 16 nt, Human
cugacccaugcugccc

SEQ ID NO: 1855552 - RNA, 13 nt, Human
cugacccaugcug

SEQ ID NO: 1855553 - RNA, 13 nt, Human
cugacccacugcu

SEQ ID NO: 1855554 - RNA, 14 nt, Human
cugacccacugcuu

SEQ ID NO: 1855555 - RNA, 19 nt, Human
cugaccaauauuguacagu

SEQ ID NO: 1855556 - RNA, 20 nt, Human
cugaccaauauuguacaguu

SEQ ID NO: 1855557 - RNA, 21 nt, Human
cugaccaauauuguacaguuu

SEQ ID NO: 1855558 - RNA, 12 nt, Human
cugacccacugc

SEQ ID NO: 1855559 - RNA, 15 nt, Human
cugaccaauauugua

SEQ ID NO: 1855560 - RNA, 18 nt, Human
cugaccaauauuguacag

SEQ ID NO: 1855561 - RNA, 22 nt, Human
cugacauuguuggccaaagcca

SEQ ID NO: 1855562 - RNA, 19 nt, Human
cugaagacucauucuucug

SEQ ID NO: 1855563 - RNA, 21 nt, Human
cugacaggcaaugcuggcugu

SEQ ID NO: 1855564 - RNA, 20 nt, Human
cugaggcccuucucuccagc

SEQ ID NO: 1855565 - RNA, 19 nt, Human
cugaggcccuucucuccag

SEQ ID NO: 1855566 - RNA, 18 nt, Human
cugaggcccuucucucca

SEQ ID NO: 1855567 - RNA, 15 nt, Human
cugaggcccuucucu

SEQ ID NO: 1855568 - RNA, 14 nt, Human
cugaggcccuucuc

SEQ ID NO: 1855569 - RNA, 23 nt, Human
cugaggcccagagggccugcaag

SEQ ID NO: 1855570 - RNA, 21 nt, Human
cugaggcccagagggccugca

SEQ ID NO: 1855571 - RNA, 19 nt, Human
cugaggcccagagggccug

SEQ ID NO: 1855572 - RNA, 18 nt, Human
cugaggcccagagggccu

SEQ ID NO: 1855573 - RNA, 17 nt, Human
cugaggcccagagggcc

SEQ ID NO: 1855574 - RNA, 16 nt, Human
cugaggcccagagggc

SEQ ID NO: 1855575 - RNA, 15 nt, Human
cugaggcccagaggg

SEQ ID NO: 1855576 - RNA, 14 nt, Human
cugaggcccagagg

SEQ ID NO: 1855577 - RNA, 13 nt, Human
cugaggcccagag

SEQ ID NO: 1855578 - RNA, 12 nt, Human
cugaggcccaga

SEQ ID NO: 1855579 - RNA, 17 nt, Human
cugaggaucagaguaau

SEQ ID NO: 1855580 - RNA, 19 nt, Human
cugaggaucagaguaaucc

SEQ ID NO: 1855581 - RNA, 21 nt, Human
cugagccagauuucacucucc

SEQ ID NO: 1855582 - RNA, 20 nt, Human
cugagccagauuucacucuc

SEQ ID NO: 1855583 - RNA, 19 nt, Human
cugagccagauuucacucu

SEQ ID NO: 1855584 - RNA, 18 nt, Human
cugagccagauuucacuc

SEQ ID NO: 1855585 - RNA, 17 nt, Human
cugagccagauuucacu

SEQ ID NO: 1855586 - RNA, 18 nt, Human
cugagacagcccgggcuc

SEQ ID NO: 1855587 - RNA, 17 nt, Human
cugagacagcccgggcu

SEQ ID NO: 1855588 - RNA, 16 nt, Human
cugagacagcccgggc

SEQ ID NO: 1855589 - RNA, 21 nt, Human
cugagccucagucucccuccc

SEQ ID NO: 1855590 - RNA, 16 nt, Human
cugagccucagucucc

SEQ ID NO: 1855591 - RNA, 16 nt, Human
cugagcgacagugaga

SEQ ID NO: 1855592 - RNA, 20 nt, Human
cugagcgacagugagacucu

SEQ ID NO: 1855593 - RNA, 22 nt, Human
cugagccucagucucccucccu

SEQ ID NO: 1855594 - RNA, 13 nt, Human
cucucuccucccu

SEQ ID NO: 1855595 - RNA, 21 nt, Human
cucugccugaagucacacagu

SEQ ID NO: 1855596 - RNA, 22 nt, Human
cucugccugaagucacacagug

SEQ ID NO: 1855597 - RNA, 15 nt, Human
cucuggacaggcaug

SEQ ID NO: 1855598 - RNA, 12 nt, Human
cucuggccuucg

SEQ ID NO: 1855599 - RNA, 16 nt, Human
cucuggcagcucagag

SEQ ID NO: 1855600 - RNA, 15 nt, Human
cucuggcagcucaga

SEQ ID NO: 1855601 - RNA, 19 nt, Human
cucuggccuucggccucca

SEQ ID NO: 1855602 - RNA, 16 nt, Human
cucuggcuccagcugg

SEQ ID NO: 1855603 - RNA, 15 nt, Human
cucuggcuccagcug

SEQ ID NO: 1855604 - RNA, 19 nt, Human
cucuggagcccacuguacu

SEQ ID NO: 1855605 - RNA, 16 nt, Human
cucuggacaggcaugu

SEQ ID NO: 1855606 - RNA, 22 nt, Human
cucuggacaggcauguucucug

SEQ ID NO: 1855607 - RNA, 14 nt, Human
cucuggcagcucag

SEQ ID NO: 1855608 - RNA, 12 nt, Human
cucuggcagcuc

SEQ ID NO: 1855609 - RNA, 19 nt, Human
cucugugucagguggggca

SEQ ID NO: 1855610 - RNA, 15 nt, Human
cucugugucaggugg

SEQ ID NO: 1855611 - RNA, 15 nt, Human
cucuuagaaaaacca

SEQ ID NO: 1855612 - RNA, 13 nt, Human
cucuuagaaaaac

SEQ ID NO: 1855613 - RNA, 15 nt, Human
cucuuccaggcuggg

SEQ ID NO: 1855614 - RNA, 14 nt, Human
cucuuccaggcugg

SEQ ID NO: 1855615 - RNA, 13 nt, Human
cucuuccaggcug

SEQ ID NO: 1855616 - RNA, 22 nt, Human
cucuggcuccagcuggccggga

SEQ ID NO: 1855617 - RNA, 19 nt, Human
cugaaagcccugagcuuuc

SEQ ID NO: 1855618 - RNA, 18 nt, Human
cugaaagcccugagcuuu

SEQ ID NO: 1855619 - RNA, 17 nt, Human
cugaaagcccugagcuu

SEQ ID NO: 1855620 - RNA, 16 nt, Human
cugaaagcccugagcu

SEQ ID NO: 1855621 - RNA, 23 nt, Human
cugaaagcccugagcuuucugcu

SEQ ID NO: 1855622 - RNA, 22 nt, Human
cugaaauagacccacaagaggc

SEQ ID NO: 1855623 - RNA, 17 nt, Human
cucuuucuauuguuucu

SEQ ID NO: 1855624 - RNA, 15 nt, Human
cugaaagcccugagc

SEQ ID NO: 1855625 - RNA, 19 nt, Human
cugaagaauugaaaaacca

SEQ ID NO: 1855626 - RNA, 17 nt, Human
cugaacucugacaacag

SEQ ID NO: 1855627 - RNA, 16 nt, Human
cugaacucugacaaca

SEQ ID NO: 1855628 - RNA, 17 nt, Human
cucuugguccugcugca

SEQ ID NO: 1855629 - RNA, 16 nt, Human
cucuugguccugcugc

SEQ ID NO: 1855630 - RNA, 15 nt, Human
cucuugguccugcug

SEQ ID NO: 1855631 - RNA, 13 nt, Human
cucuugguccugc

SEQ ID NO: 1855632 - RNA, 18 nt, Human
cucuuuaaugucacaggc

SEQ ID NO: 1855633 - RNA, 17 nt, Human
cucuuucccucccuucc

SEQ ID NO: 1855634 - RNA, 13 nt, Human
cucuuucccuccc

SEQ ID NO: 1855635 - RNA, 20 nt, Human
cucuuuaaugucacaggcag

SEQ ID NO: 1855636 - RNA, 21 nt, Human
cucuuuaaugucacaggcagg

SEQ ID NO: 1855637 - RNA, 22 nt, Human
cucuuuaaugucacaggcaggu

SEQ ID NO: 1855638 - RNA, 23 nt, Human
cucuuuaaugucacaggcagguc

SEQ ID NO: 1855639 - RNA, 22 nt, Human
cucuugaaauauaggaacuuaa

SEQ ID NO: 1855640 - RNA, 19 nt, Human
cucuuggguucaagugauu

SEQ ID NO: 1855641 - RNA, 21 nt, Human
cucuuggguucaagcgauucu

SEQ ID NO: 1855642 - RNA, 15 nt, Human
cucuugaacuccuga

SEQ ID NO: 1855643 - RNA, 19 nt, Human
cucuuggguucaagcgauu

SEQ ID NO: 1855644 - RNA, 14 nt, Human
cuggcaagaaugug

SEQ ID NO: 1855645 - RNA, 18 nt, Human
cuggaauauauaaccagu

SEQ ID NO: 1855646 - RNA, 20 nt, Human
cuggaagugcuaauuuugaa

SEQ ID NO: 1855647 - RNA, 16 nt, Human
cuggcacagggcagug

SEQ ID NO: 1855648 - RNA, 15 nt, Human
cuggcacagggcagu

SEQ ID NO: 1855649 - RNA, 16 nt, Human
cuggcacccggccccu

SEQ ID NO: 1855650 - RNA, 17 nt, Human
cuggcacccggccccug

SEQ ID NO: 1855651 - RNA, 18 nt, Human
cuggcacccggccccugc

SEQ ID NO: 1855652 - RNA, 24 nt, Human
cuggcaugggaaugaaugucagug

SEQ ID NO: 1855653 - RNA, 22 nt, Human
cuggcaugggaaugaaugucag

SEQ ID NO: 1855654 - RNA, 19 nt, Human
cuggcaugggaaugaaugu

SEQ ID NO: 1855655 - RNA, 18 nt, Human
cuggcaugggaaugaaug

SEQ ID NO: 1855656 - RNA, 16 nt, Human
cuggcaugggaaugaa

SEQ ID NO: 1855657 - RNA, 16 nt, Human
cuggcacuauaaugua

SEQ ID NO: 1855658 - RNA, 15 nt, Human
cuggcacuauaaugu

SEQ ID NO: 1855659 - RNA, 22 nt, Human
cuggcacuauaauguaagcucu

SEQ ID NO: 1855660 - RNA, 16 nt, Human
cuggccuucggccucc

SEQ ID NO: 1855661 - RNA, 17 nt, Human
cuggccuucggccucca

SEQ ID NO: 1855662 - RNA, 18 nt, Human
cuggccuucggccuccau

SEQ ID NO: 1855663 - RNA, 21 nt, Human
cuggccuucggccuccauccu

SEQ ID NO: 1855664 - RNA, 15 nt, Human
cuggccuucggccuc

SEQ ID NO: 1855665 - RNA, 19 nt, Human
cuggccuggccccucaggg

SEQ ID NO: 1855666 - RNA, 17 nt, Human
cuggccuggccccucag

SEQ ID NO: 1855667 - RNA, 16 nt, Human
cuggccuggccccuca

SEQ ID NO: 1855668 - RNA, 16 nt, Human
cuggccugagcuggga

SEQ ID NO: 1855669 - RNA, 16 nt, Human
cuggccucugcacucc

SEQ ID NO: 1855670 - RNA, 14 nt, Human
cuggccucugcacu

SEQ ID NO: 1855671 - RNA, 13 nt, Human
cuggccucugcac

SEQ ID NO: 1855672 - RNA, 18 nt, Human
cuggccugagcugggaug

SEQ ID NO: 1855673 - RNA, 15 nt, Human
cuggccugagcuggg

SEQ ID NO: 1855674 - RNA, 14 nt, Human
cuggccuggccccu

SEQ ID NO: 1855675 - RNA, 12 nt, Human
cuggccucugca

SEQ ID NO: 1855676 - RNA, 23 nt, Human
cuggccucaagugauucuccugc

SEQ ID NO: 1855677 - RNA, 21 nt, Human
cugggaggucaaggcugcagu

SEQ ID NO: 1855678 - RNA, 19 nt, Human
cugggaggucaaggcugca

SEQ ID NO: 1855679 - RNA, 22 nt, Human
cugggaggcucuggagcccacu

SEQ ID NO: 1855680 - RNA, 17 nt, Human
cugggaggcucuggagc

SEQ ID NO: 1855681 - RNA, 21 nt, Human
cugggaggcucuggagcccac

SEQ ID NO: 1855682 - RNA, 20 nt, Human
cugggaggcucuggagccca

SEQ ID NO: 1855683 - RNA, 18 nt, Human
cugggaggcucuggagcc

SEQ ID NO: 1855684 - RNA, 19 nt, Human
cugggccccaguuguauuu

SEQ ID NO: 1855685 - RNA, 15 nt, Human
cugggccccaguugu

SEQ ID NO: 1855686 - RNA, 18 nt, Human
cugggaugauuggagggg

SEQ ID NO: 1855687 - RNA, 20 nt, Human
cugggaucacauguggacuu

SEQ ID NO: 1855688 - RNA, 20 nt, Human
cugggaucccucauccucau

SEQ ID NO: 1855689 - RNA, 18 nt, Human
cugggauuacagguguga

SEQ ID NO: 1855690 - RNA, 16 nt, Human
cugggauuacaggugu

SEQ ID NO: 1855691 - RNA, 20 nt, Human
cugggauuacaggugugaac

SEQ ID NO: 1855692 - RNA, 17 nt, Human
cugggauuacaggugug

SEQ ID NO: 1855693 - RNA, 20 nt, Human
cugggagagccuuccagggg

SEQ ID NO: 1855694 - RNA, 19 nt, Human
cugggagagccuuccaggg

SEQ ID NO: 1855695 - RNA, 21 nt, Human
cugggagagccuuccaggggu

SEQ ID NO: 1855696 - RNA, 18 nt, Human
cugggagagccuuccagg

SEQ ID NO: 1855697 - RNA, 17 nt, Human
cugggagagccuuccag

SEQ ID NO: 1855698 - RNA, 23 nt, Human
cuggcuuuucacugcuggcugcc

SEQ ID NO: 1855699 - RNA, 18 nt, Human
cuggcuguuggcuggggg

SEQ ID NO: 1855700 - RNA, 20 nt, Human
cuggcugguuagagguuccc

SEQ ID NO: 1855701 - RNA, 16 nt, Human
cuggcuguuggcuggg

SEQ ID NO: 1855702 - RNA, 17 nt, Human
cuggcuguuggcugggg

SEQ ID NO: 1855703 - RNA, 13 nt, Human
cuggcugucgaga

SEQ ID NO: 1855704 - RNA, 18 nt, Human
cuguaaggcaaucauggu

SEQ ID NO: 1855705 - RNA, 23 nt, Human
cugguuaauauuuauaggucacu

SEQ ID NO: 1855706 - RNA, 20 nt, Human
cugguucaggguuggccccu

SEQ ID NO: 1855707 - RNA, 16 nt, Human
cuggucucgaacuccu

SEQ ID NO: 1855708 - RNA, 12 nt, Human
cugguggcagcu

SEQ ID NO: 1855709 - RNA, 14 nt, Human
cugguggcagcuca

SEQ ID NO: 1855710 - RNA, 13 nt, Human
cugguggcagcuc

SEQ ID NO: 1855711 - RNA, 16 nt, Human
cugguggcagcucacc

SEQ ID NO: 1855712 - RNA, 23 nt, Human
cuguacagagcccacgcccccac

SEQ ID NO: 1855713 - RNA, 21 nt, Human
cuguaauuugugauacaaugc

SEQ ID NO: 1855714 - RNA, 22 nt, Human
cuguaauuugugauacaaugcu

SEQ ID NO: 1855715 - RNA, 18 nt, Human
cuguaauuugugauacaa

SEQ ID NO: 1855716 - RNA, 17 nt, Human
cuguaauuugugauaca

SEQ ID NO: 1855717 - RNA, 21 nt, Human
cuguaccucuugagccuugaa

SEQ ID NO: 1855718 - RNA, 22 nt, Human
cuguacaugaaaacacauuuuu

SEQ ID NO: 1855719 - RNA, 23 nt, Human
cuguacaugaaaacacauuuuuc

SEQ ID NO: 1855720 - RNA, 22 nt, Human
cugggucgcccuggacugugug

SEQ ID NO: 1855721 - RNA, 18 nt, Human
cugggucgcccuggacug

SEQ ID NO: 1855722 - RNA, 17 nt, Human
cugggucgcccuggacu

SEQ ID NO: 1855723 - RNA, 15 nt, Human
cuggguuggagggug

SEQ ID NO: 1855724 - RNA, 22 nt, Human
cugggcucccuucccaccucuc

SEQ ID NO: 1855725 - RNA, 21 nt, Human
cugggcucccuucccaccucu

SEQ ID NO: 1855726 - RNA, 20 nt, Human
cugggcucccuucccaccuc

SEQ ID NO: 1855727 - RNA, 19 nt, Human
cuggguacuuguggacaca

SEQ ID NO: 1855728 - RNA, 18 nt, Human
cuggguacuuguggacac

SEQ ID NO: 1855729 - RNA, 16 nt, Human
cuggguacuuguggac

SEQ ID NO: 1855730 - RNA, 14 nt, Human
cuggguacuugugg

SEQ ID NO: 1855731 - RNA, 23 nt, Human
cuggucacaggacucugccuccu

SEQ ID NO: 1855732 - RNA, 22 nt, Human
cuggucacaggacucugccucc

SEQ ID NO: 1855733 - RNA, 21 nt, Human
cuggucacaggacucugccuc

SEQ ID NO: 1855734 - RNA, 20 nt, Human
cuggucacaggacucugccu

SEQ ID NO: 1855735 - RNA, 19 nt, Human
cuggucacaggacucugcc

SEQ ID NO: 1855736 - RNA, 23 nt, Human
cuggucucaaacucuugaccuca

SEQ ID NO: 1855737 - RNA, 14 nt, Human
cuggucccacucag

SEQ ID NO: 1855738 - RNA, 13 nt, Human
cuggucccacuca

SEQ ID NO: 1855739 - RNA, 14 nt, Human
cugucccccugaca

SEQ ID NO: 1855740 - RNA, 13 nt, Human
cugucccccugac

SEQ ID NO: 1855741 - RNA, 16 nt, Human
cuguccuacucugugu

SEQ ID NO: 1855742 - RNA, 17 nt, Human
cuguccuacucuguguc

SEQ ID NO: 1855743 - RNA, 18 nt, Human
cuguccuacucuguguca

SEQ ID NO: 1855744 - RNA, 20 nt, Human
cuguccuacucugugucagg

SEQ ID NO: 1855745 - RNA, 21 nt, Human
cugucucaagagggcacuggu

SEQ ID NO: 1855746 - RNA, 20 nt, Human
cugucucaagagggcacugg

SEQ ID NO: 1855747 - RNA, 19 nt, Human
cugucucaagagggcacug

SEQ ID NO: 1855748 - RNA, 18 nt, Human
cugucucaagagggcacu

SEQ ID NO: 1855749 - RNA, 22 nt, Human
cugucucaaaaaaagaaaaaga

SEQ ID NO: 1855750 - RNA, 21 nt, Human
cuguccuacucugugucaggu

SEQ ID NO: 1855751 - RNA, 18 nt, Human
cugucucuacuaaaaaua

SEQ ID NO: 1855752 - RNA, 19 nt, Human
cuguccaggcacugcugcc

SEQ ID NO: 1855753 - RNA, 18 nt, Human
cuguccaggcacugcugc

SEQ ID NO: 1855754 - RNA, 22 nt, Human
cuguccaggcacugcugcccag

SEQ ID NO: 1855755 - RNA, 21 nt, Human
cuguccaggcacugcugccca

SEQ ID NO: 1855756 - RNA, 20 nt, Human
cuguccaggcacugcugccc

SEQ ID NO: 1855757 - RNA, 22 nt, Human
cugucccagugccgagaaggaa

SEQ ID NO: 1855758 - RNA, 22 nt, Human
cuguaccucuugagccuugaac

SEQ ID NO: 1855759 - RNA, 14 nt, Human
cuguaucccaugag

SEQ ID NO: 1855760 - RNA, 15 nt, Human
cuguaucccaugagc

SEQ ID NO: 1855761 - RNA, 20 nt, Human
cuguaugucucgugguagga

SEQ ID NO: 1855762 - RNA, 19 nt, Human
cuguaucccaugagccuca

SEQ ID NO: 1855763 - RNA, 18 nt, Human
cuguaucccaugagccuc

SEQ ID NO: 1855764 - RNA, 13 nt, Human
cugcugcaguugc

SEQ ID NO: 1855765 - RNA, 10 nt, Human
cugcugcagu

SEQ ID NO: 1855766 - RNA, 14 nt, Human
cugcugcaguugcc

SEQ ID NO: 1855767 - RNA, 15 nt, Human
cugcugcaguugcca

SEQ ID NO: 1855768 - RNA, 23 nt, Human
cugcugccugcuuuuuauggccu

SEQ ID NO: 1855769 - RNA, 14 nt, Human
cugcugccugcuuu

SEQ ID NO: 1855770 - RNA, 19 nt, Human
cugcucuugaacuccugac

SEQ ID NO: 1855771 - RNA, 18 nt, Human
cugcucuugaacuccuga

SEQ ID NO: 1855772 - RNA, 16 nt, Human
cugcucuugaacuccu

SEQ ID NO: 1855773 - RNA, 12 nt, Human
cugcucugguua

SEQ ID NO: 1855774 - RNA, 20 nt, Human
cugcucugaugaagaggagu

SEQ ID NO: 1855775 - RNA, 23 nt, Human
cugcggugcuaucucccccagcc

SEQ ID NO: 1855776 - RNA, 22 nt, Human
cugcggugcuaucucccccagc

SEQ ID NO: 1855777 - RNA, 21 nt, Human
cugcggugcuaucucccccag

SEQ ID NO: 1855778 - RNA, 20 nt, Human
cugcggugcuaucuccccca

SEQ ID NO: 1855779 - RNA, 23 nt, Human
cugcuccucuccccagcaaguga

SEQ ID NO: 1855780 - RNA, 19 nt, Human
cugcuccucuccccagcaa

SEQ ID NO: 1855781 - RNA, 20 nt, Human
cugcuccucuccccagcaag

SEQ ID NO: 1855782 - RNA, 15 nt, Human
cugcucuccgaccag

SEQ ID NO: 1855783 - RNA, 22 nt, Human
cugccugcuuuuuauggccugu

SEQ ID NO: 1855784 - RNA, 21 nt, Human
cugcgggucacaggagggagg

SEQ ID NO: 1855785 - RNA, 15 nt, Human
cugcgggucacagga

SEQ ID NO: 1855786 - RNA, 19 nt, Human
cugcggugcuaucuccccc

SEQ ID NO: 1855787 - RNA, 18 nt, Human
cugcggugcuaucucccc

SEQ ID NO: 1855788 - RNA, 23 nt, Human
cugcgggucacaggagggagggg

SEQ ID NO: 1855789 - RNA, 22 nt, Human
cugcgggucacaggagggaggg

SEQ ID NO: 1855790 - RNA, 23 nt, Human
cugcgguccacccaggagccccg

SEQ ID NO: 1855791 - RNA, 21 nt, Human
cugccugcaguacuuuaccuc

SEQ ID NO: 1855792 - RNA, 20 nt, Human
cugccugcaguacuuuaccu

SEQ ID NO: 1855793 - RNA, 23 nt, Human
cugccugaagucacacagugagu

SEQ ID NO: 1855794 - RNA, 19 nt, Human
cugccugaagucacacagu

SEQ ID NO: 1855795 - RNA, 17 nt, Human
cugcccugcccaccugg

SEQ ID NO: 1855796 - RNA, 20 nt, Human
cugcccugcccaccuggccu

SEQ ID NO: 1855797 - RNA, 21 nt, Human
cugcccugcccaccuggccuc

SEQ ID NO: 1855798 - RNA, 18 nt, Human
cugccugaagucacacag

SEQ ID NO: 1855799 - RNA, 16 nt, Human
cugccugaagucacac

SEQ ID NO: 1855800 - RNA, 20 nt, Human
cugcuugcuugcuuuuuaau

SEQ ID NO: 1855801 - RNA, 22 nt, Human
cugcuugaggcaacucaucuua

SEQ ID NO: 1855802 - RNA, 18 nt, Human
cugcuugggcuucauccu

SEQ ID NO: 1855803 - RNA, 17 nt, Human
cugcuugggcuucaucc

SEQ ID NO: 1855804 - RNA, 15 nt, Human
cugcuugggcuucau

SEQ ID NO: 1855805 - RNA, 13 nt, Human
cugcuugggcuuc

SEQ ID NO: 1855806 - RNA, 19 nt, Human
cugcuugugaaaggaaaga

SEQ ID NO: 1855807 - RNA, 19 nt, Human
cugcuugggcuucauccuc

SEQ ID NO: 1855808 - RNA, 19 nt, Human
cugcuuuugucuaugggac

SEQ ID NO: 1855809 - RNA, 17 nt, Human
cugcuuuuggucugugu

SEQ ID NO: 1855810 - RNA, 13 nt, Human
cugcuuuggaaau

SEQ ID NO: 1855811 - RNA, 16 nt, Human
cugcuuugggcugccc

SEQ ID NO: 1855812 - RNA, 17 nt, Human
cugcuuugggcugcccu

SEQ ID NO: 1855813 - RNA, 15 nt, Human
cugcuuuuggucugu

SEQ ID NO: 1855814 - RNA, 17 nt, Human
cugcuggguguggcgca

SEQ ID NO: 1855815 - RNA, 15 nt, Human
cugcuggguguggcg

SEQ ID NO: 1855816 - RNA, 14 nt, Human
cugcuggguguggc

SEQ ID NO: 1855817 - RNA, 14 nt, Human
cugcugcuggcugg

SEQ ID NO: 1855818 - RNA, 13 nt, Human
cugcuggcugccu

SEQ ID NO: 1855819 - RNA, 15 nt, Human
cugcuggcugccuua

SEQ ID NO: 1855820 - RNA, 14 nt, Human
cugcuggcugccuu

SEQ ID NO: 1855821 - RNA, 13 nt, Human
cugcugcuggcug

SEQ ID NO: 1855822 - RNA, 12 nt, Human
cugcugcuggcu

SEQ ID NO: 1855823 - RNA, 21 nt, Human
cugcuugaggcaacucaucuu

SEQ ID NO: 1855824 - RNA, 20 nt, Human
cugcuugaggcaacucaucu

SEQ ID NO: 1855825 - RNA, 13 nt, Human
cugcuugaggcaa

SEQ ID NO: 1855826 - RNA, 21 nt, Human
cugcccuaaugcgcaggcugg

SEQ ID NO: 1855827 - RNA, 20 nt, Human
cugcccuaaugcgcaggcug

SEQ ID NO: 1855828 - RNA, 22 nt, Human
cugcccuaaugcgcaggcuggc

SEQ ID NO: 1855829 - RNA, 20 nt, Human
cugcccggcaggguccuaga

SEQ ID NO: 1855830 - RNA, 13 nt, Human
cugcccggcaggg

SEQ ID NO: 1855831 - RNA, 19 nt, Human
cugccccuggcagccccug

SEQ ID NO: 1855832 - RNA, 18 nt, Human
cugccccuggcagccccu

SEQ ID NO: 1855833 - RNA, 15 nt, Human
cugccauuucugaga

SEQ ID NO: 1855834 - RNA, 12 nt, Human
cugcccaccugg

SEQ ID NO: 1855835 - RNA, 14 nt, Human
cugcccaggccccu

SEQ ID NO: 1855836 - RNA, 15 nt, Human
cugcccaggccccug

SEQ ID NO: 1855837 - RNA, 17 nt, Human
cugcccaggccugccug

SEQ ID NO: 1855838 - RNA, 16 nt, Human
cugcccaggccccugc

SEQ ID NO: 1855839 - RNA, 18 nt, Human
cugcccaggccccugcca

SEQ ID NO: 1855840 - RNA, 19 nt, Human
cugcccaggccccugccac

SEQ ID NO: 1855841 - RNA, 20 nt, Human
cugcccaggccccugccacc

SEQ ID NO: 1855842 - RNA, 22 nt, Human
cugccaggaagccagcaggcuc

SEQ ID NO: 1855843 - RNA, 15 nt, Human
cugccauccucccaa

SEQ ID NO: 1855844 - RNA, 21 nt, Human
cugccauccagguucagcuug

SEQ ID NO: 1855845 - RNA, 20 nt, Human
cugccaucucaccuccugcu

SEQ ID NO: 1855846 - RNA, 21 nt, Human
cugccaggaagccagcaggcu

SEQ ID NO: 1855847 - RNA, 20 nt, Human
cugccaggaagccagcaggc

SEQ ID NO: 1855848 - RNA, 14 nt, Human
cugccaggaagcca

SEQ ID NO: 1855849 - RNA, 13 nt, Human
cugccaggaagcc

SEQ ID NO: 1855850 - RNA, 21 nt, Human
cugccacccuggggagaaagu

SEQ ID NO: 1855851 - RNA, 12 nt, Human
cugccacccugg

SEQ ID NO: 1855852 - RNA, 14 nt, Human
cugccacccugggg

SEQ ID NO: 1855853 - RNA, 15 nt, Human
cugcauaugaaagga

SEQ ID NO: 1855854 - RNA, 20 nt, Human
cugcaucaagaugugacaug

SEQ ID NO: 1855855 - RNA, 17 nt, Human
cugcagcaauaaagcag

SEQ ID NO: 1855856 - RNA, 18 nt, Human
cugcaggucccuaauaaa

SEQ ID NO: 1855857 - RNA, 17 nt, Human
cugcaggucccuaauaa

SEQ ID NO: 1855858 - RNA, 16 nt, Human
cugcaggucccuaaua

SEQ ID NO: 1855859 - RNA, 15 nt, Human
cugcaggucccuaau

SEQ ID NO: 1855860 - RNA, 14 nt, Human
cugcaggucccuaa

SEQ ID NO: 1855861 - RNA, 13 nt, Human
cugcaggucccua

SEQ ID NO: 1855862 - RNA, 12 nt, Human
cugcaggucccu

SEQ ID NO: 1855863 - RNA, 11 nt, Human
cugcagguccc

SEQ ID NO: 1855864 - RNA, 23 nt, Human
cugcaggucccuaauaaagcugu

SEQ ID NO: 1855865 - RNA, 22 nt, Human
cugcaggucccuaauaaagcug

SEQ ID NO: 1855866 - RNA, 21 nt, Human
cugcaggucccuaauaaagcu

SEQ ID NO: 1855867 - RNA, 20 nt, Human
cugcaggucccuaauaaagc

SEQ ID NO: 1855868 - RNA, 19 nt, Human
cugcaggucccuaauaaag

SEQ ID NO: 1855869 - RNA, 16 nt, Human
cugcaguugccaguca

SEQ ID NO: 1855870 - RNA, 13 nt, Human
cugcaguugccag

SEQ ID NO: 1855871 - RNA, 21 nt, Human
cugcacuccccugcugggugu

SEQ ID NO: 1855872 - RNA, 13 nt, Human
cugcagagggcac

SEQ ID NO: 1855873 - RNA, 15 nt, Human
cugcagcaauaaagc

SEQ ID NO: 1855874 - RNA, 16 nt, Human
cugcagcaauaaagca

SEQ ID NO: 1855875 - RNA, 10 nt, Human
cugcagaggg

SEQ ID NO: 1855876 - RNA, 20 nt, Human
cugcacuccccugcugggug

SEQ ID NO: 1855877 - RNA, 19 nt, Human
cugcacuccccugcugggu

SEQ ID NO: 1855878 - RNA, 13 nt, Human
cugcacuccccug

SEQ ID NO: 1855879 - RNA, 14 nt, Human
cugcacuccccugc

SEQ ID NO: 1855880 - RNA, 20 nt, Human
cugcacuccagccuggguga

SEQ ID NO: 1855881 - RNA, 18 nt, Human
cugcaccgggccacagag

SEQ ID NO: 1855882 - RNA, 20 nt, Human
cugcaccgggccacagagaa

SEQ ID NO: 1855883 - RNA, 14 nt, Human
cugcaccggcuggc

SEQ ID NO: 1855884 - RNA, 23 nt, Human
cugaggcccuucucuccagcccc

SEQ ID NO: 1855885 - RNA, 22 nt, Human
cugaggcccuucucuccagccc

SEQ ID NO: 1855886 - RNA, 16 nt, Human
cugcaccggcuggccu

SEQ ID NO: 1855887 - RNA, 15 nt, Human
cugcaccggcuggcc

SEQ ID NO: 1855888 - RNA, 14 nt, Human
cugcaccgggccac

SEQ ID NO: 1855889 - RNA, 15 nt, Human
cugcaccgggccaca

SEQ ID NO: 1855890 - RNA, 21 nt, Human
cuuuccugaggcugggcuccc

SEQ ID NO: 1855891 - RNA, 20 nt, Human
cuuuccugaggcugggcucc

SEQ ID NO: 1855892 - RNA, 16 nt, Human
cuuuccugaggcuggg

SEQ ID NO: 1855893 - RNA, 17 nt, Human
cuuuccugaggcugggc

SEQ ID NO: 1855894 - RNA, 23 nt, Human
cuuuggaaagaguaggaagacuu

SEQ ID NO: 1855895 - RNA, 19 nt, Human
cuuuggaaagaguaggaag

SEQ ID NO: 1855896 - RNA, 14 nt, Human
cuuugcagacaggc

SEQ ID NO: 1855897 - RNA, 15 nt, Human
cuuugcagacaggca

SEQ ID NO: 1855898 - RNA, 19 nt, Human
cuuuauuuuguguuuagga

SEQ ID NO: 1855899 - RNA, 21 nt, Human
cuuguggacacagcucuucuc

SEQ ID NO: 1855900 - RNA, 21 nt, Human
cuuuccgguguuuaagacauu

SEQ ID NO: 1855901 - RNA, 21 nt, Human
cuuuccccaugucucgacuca

SEQ ID NO: 1855902 - RNA, 20 nt, Human
cuuuccccaugucucgacuc

SEQ ID NO: 1855903 - RNA, 15 nt, Human
cuuuccccaugucuc

SEQ ID NO: 1855904 - RNA, 16 nt, Human
cuuuccaaaguacacu

SEQ ID NO: 1855905 - RNA, 16 nt, Human
cuuuccaaaugcccag

SEQ ID NO: 1855906 - RNA, 22 nt, Human
cuuuccaaaguacacuguuuca

SEQ ID NO: 1855907 - RNA, 14 nt, Human
cuuuccaggaaggc

SEQ ID NO: 1855908 - RNA, 16 nt, Human
cuuuuuuauacauaaa

SEQ ID NO: 1855909 - RNA, 17 nt, Human
cuuuuuuauacauaaac

SEQ ID NO: 1855910 - RNA, 15 nt, Human
cuuuuuuauacauaa

SEQ ID NO: 1855911 - RNA, 16 nt, Human
gaaaaagaaaaaauau

SEQ ID NO: 1855912 - RNA, 11 nt, Human
gaaaaagaaaa

SEQ ID NO: 1855913 - RNA, 19 nt, Human
cuuuuuuaucaugugaaau

SEQ ID NO: 1855914 - RNA, 18 nt, Human
cuuuuuuauacauaaaca

SEQ ID NO: 1855915 - RNA, 22 nt, Human
cuuuuuaauauugauaugcuua

SEQ ID NO: 1855916 - RNA, 13 nt, Human
cuuuucuuuucuu

SEQ ID NO: 1855917 - RNA, 17 nt, Human
cuuuucuuucagccaag

SEQ ID NO: 1855918 - RNA, 18 nt, Human
cuuuuaaaacacuuccau

SEQ ID NO: 1855919 - RNA, 15 nt, Human
cuuuuaauccuggcu

SEQ ID NO: 1855920 - RNA, 23 nt, Human
cuuuuccaacccucaucaccaac

SEQ ID NO: 1855921 - RNA, 13 nt, Human
cuuuuccaacccu

SEQ ID NO: 1855922 - RNA, 22 nt, Human
cuuuucauuuaggugaggaagc

SEQ ID NO: 1855923 - RNA, 12 nt, Human
cuuuucacugcu

SEQ ID NO: 1855924 - RNA, 21 nt, Human
cuuuucgcaggauucuuccuc

SEQ ID NO: 1855925 - RNA, 20 nt, Human
cuuuucgcaggauucuuccu

SEQ ID NO: 1855926 - RNA, 16 nt, Human
cuuuucacugcuggcu

SEQ ID NO: 1855927 - RNA, 14 nt, Human
cuuuucccuucuuu

SEQ ID NO: 1855928 - RNA, 19 nt, Human
cuugaaauauaggaacuua

SEQ ID NO: 1855929 - RNA, 17 nt, Human
cuucuuuuuuugugaug

SEQ ID NO: 1855930 - RNA, 19 nt, Human
cuugaacuccuggccucaa

SEQ ID NO: 1855931 - RNA, 16 nt, Human
cuugaacuggguacuu

SEQ ID NO: 1855932 - RNA, 15 nt, Human
cuugaacuuugaccu

SEQ ID NO: 1855933 - RNA, 18 nt, Human
cuugaacuggguacuugu

SEQ ID NO: 1855934 - RNA, 20 nt, Human
cuugaacuggguacuugugg

SEQ ID NO: 1855935 - RNA, 14 nt, Human
cuugaacccgggag

SEQ ID NO: 1855936 - RNA, 19 nt, Human
cuugaacccgggaggcaga

SEQ ID NO: 1855937 - RNA, 20 nt, Human
cuugaacccgggaggcagag

SEQ ID NO: 1855938 - RNA, 14 nt, Human
cuugaacuccuggc

SEQ ID NO: 1855939 - RNA, 15 nt, Human
cuugaacuccuggcc

SEQ ID NO: 1855940 - RNA, 17 nt, Human
cuugaacuccuggccuc

SEQ ID NO: 1855941 - RNA, 18 nt, Human
cuugaacuccuggccuca

SEQ ID NO: 1855942 - RNA, 21 nt, Human
cuugaccauucuccaccugcc

SEQ ID NO: 1855943 - RNA, 14 nt, Human
cuugagagggugga

SEQ ID NO: 1855944 - RNA, 20 nt, Human
cuugaccauucuccaccugc

SEQ ID NO: 1855945 - RNA, 17 nt, Human
cuugaccauucuccacc

SEQ ID NO: 1855946 - RNA, 19 nt, Human
cuugagccuugaacuuuga

SEQ ID NO: 1855947 - RNA, 20 nt, Human
cuugagccuugaacuuugac

SEQ ID NO: 1855948 - RNA, 22 nt, Human
cuugagccuugaacuuugaccu

SEQ ID NO: 1855949 - RNA, 13 nt, Human
cuugagcucagga

SEQ ID NO: 1855950 - RNA, 22 nt, Human
cuugcaaaguaucccuacugua

SEQ ID NO: 1855951 - RNA, 19 nt, Human
cuugcacguauuuuaauag

SEQ ID NO: 1855952 - RNA, 14 nt, Human
cuugcaauggcagc

SEQ ID NO: 1855953 - RNA, 21 nt, Human
cuugcaugguuuagaaagcuu

SEQ ID NO: 1855954 - RNA, 21 nt, Human
cuugcaugaggcuaguguggu

SEQ ID NO: 1855955 - RNA, 18 nt, Human
cuugcagacucuacagag

SEQ ID NO: 1855956 - RNA, 13 nt, Human
cuuguauuaaguu

SEQ ID NO: 1855957 - RNA, 17 nt, Human
cuuguauuaaguuguua

SEQ ID NO: 1855958 - RNA, 13 nt, Human
cuuguauuaugug

SEQ ID NO: 1855959 - RNA, 22 nt, Human
cuuguauuaaguuguuaauaaa

SEQ ID NO: 1855960 - RNA, 23 nt, Human
cuuguauuaaguuguuaauaaaa

SEQ ID NO: 1855961 - RNA, 21 nt, Human
cuuguaugaaagauggcugug

SEQ ID NO: 1855962 - RNA, 18 nt, Human
cuuguauuauguguguuu

SEQ ID NO: 1855963 - RNA, 17 nt, Human
cuuguggacacagcucu

SEQ ID NO: 1855964 - RNA, 18 nt, Human
cuuguggacacagcucuu

SEQ ID NO: 1855965 - RNA, 14 nt, Human
cuuggcugcaggga

SEQ ID NO: 1855966 - RNA, 19 nt, Human
cuuggggaccagagcugcc

SEQ ID NO: 1855967 - RNA, 18 nt, Human
cuuggggaccagagcugc

SEQ ID NO: 1855968 - RNA, 17 nt, Human
cuuggggaccagagcug

SEQ ID NO: 1855969 - RNA, 16 nt, Human
cuuggggaccagagcu

SEQ ID NO: 1855970 - RNA, 18 nt, Human
cuuguaaaaauuaaaagu

SEQ ID NO: 1855971 - RNA, 18 nt, Human
cuuguaaaggaauuuaaa

SEQ ID NO: 1855972 - RNA, 14 nt, Human
cuuggauugucccc

SEQ ID NO: 1855973 - RNA, 13 nt, Human
cuuggauuguccc

SEQ ID NO: 1855974 - RNA, 24 nt, Human
cuuggcucacugcaacuucugccu

SEQ ID NO: 1855975 - RNA, 23 nt, Human
cuuggcucaaguccucuuuucug

SEQ ID NO: 1855976 - RNA, 12 nt, Human
cuuggcugcagg

SEQ ID NO: 1855977 - RNA, 13 nt, Human
cuuggcugcaggg

SEQ ID NO: 1855978 - RNA, 15 nt, Human
cuugcuuuuaaaauc

SEQ ID NO: 1855979 - RNA, 13 nt, Human
cuugcuugcuuuu

SEQ ID NO: 1855980 - RNA, 17 nt, Human
cuugccaaauauaaaua

SEQ ID NO: 1855981 - RNA, 17 nt, Human
gaacuuggcgcugcccc

SEQ ID NO: 1855982 - RNA, 14 nt, Human
gaacuuaaauaaug

SEQ ID NO: 1855983 - RNA, 17 nt, Human
gaacuuaaauaauguga

SEQ ID NO: 1855984 - RNA, 16 nt, Human
gaacucccuuucaaca

SEQ ID NO: 1855985 - RNA, 15 nt, Human
gaacuccuaaaucaa

SEQ ID NO: 1855986 - RNA, 13 nt, Human
gaacuccugaccu

SEQ ID NO: 1855987 - RNA, 16 nt, Human
gaacuccuaaaucaag

SEQ ID NO: 1855988 - RNA, 20 nt, Human
gaaccacaucuugcucugcu

SEQ ID NO: 1855989 - RNA, 18 nt, Human
gaaccacaucuugcucug

SEQ ID NO: 1855990 - RNA, 16 nt, Human
gaacuuugaccucugc

SEQ ID NO: 1855991 - RNA, 22 nt, Human
gaacuuugaccucugcagcaau

SEQ ID NO: 1855992 - RNA, 15 nt, Human
gaacuuguuuucugg

SEQ ID NO: 1855993 - RNA, 12 nt, Human
gaacuugguucc

SEQ ID NO: 1855994 - RNA, 17 nt, Human
gaacuuuccaggaaggc

SEQ ID NO: 1855995 - RNA, 17 nt, Human
gaacuugggccacugug

SEQ ID NO: 1855996 - RNA, 18 nt, Human
gaacuuggcgcugccccu

SEQ ID NO: 1855997 - RNA, 22 nt, Human
gaacuuguaaaggaauuuaaaa

SEQ ID NO: 1855998 - RNA, 19 nt, Human
gaagacuucaucccucugg

SEQ ID NO: 1855999 - RNA, 17 nt, Human
gaagacuucaucccucu

SEQ ID NO: 1856000 - RNA, 12 nt, Human
gaagagccuugc

SEQ ID NO: 1856001 - RNA, 16 nt, Human
gaagacuucaucccuc

SEQ ID NO: 1856002 - RNA, 15 nt, Human
gaagacuucaucccu

SEQ ID NO: 1856003 - RNA, 17 nt, Human
gaagauguagaggagaa

SEQ ID NO: 1856004 - RNA, 22 nt, Human
gaagauugagauguguucacaa

SEQ ID NO: 1856005 - RNA, 17 nt, Human
gaagauugagauguguu

SEQ ID NO: 1856006 - RNA, 23 nt, Human
gaagauuuugaaauuuuuauuaa

SEQ ID NO: 1856007 - RNA, 15 nt, Human
gaaggaacguccccu

SEQ ID NO: 1856008 - RNA, 22 nt, Human
gaaggaaacccagcucuggucc

SEQ ID NO: 1856009 - RNA, 21 nt, Human
gaaggaaacccagcucugguc

SEQ ID NO: 1856010 - RNA, 19 nt, Human
gaaggaagacuucaucccu

SEQ ID NO: 1856011 - RNA, 22 nt, Human
gaaggacccggaggggccuggc

SEQ ID NO: 1856012 - RNA, 22 nt, Human
gaaggaauaaauugcuccuuga

SEQ ID NO: 1856013 - RNA, 19 nt, Human
gaaggacauugcggacagc

SEQ ID NO: 1856014 - RNA, 20 nt, Human
gaaggacauugcggacagcc

SEQ ID NO: 1856015 - RNA, 21 nt, Human
gaaggacauugcggacagcca

SEQ ID NO: 1856016 - RNA, 20 nt, Human
gaaggaaacccagcucuggu

SEQ ID NO: 1856017 - RNA, 19 nt, Human
gaaggaaacccagcucugg

SEQ ID NO: 1856018 - RNA, 14 nt, Human
gaagccgcuggggc

SEQ ID NO: 1856019 - RNA, 20 nt, Human
gaagccgcuggggccaguug

SEQ ID NO: 1856020 - RNA, 18 nt, Human
gaagccgcuggggccagu

SEQ ID NO: 1856021 - RNA, 21 nt, Human
gaagccgcuggggccaguugg

SEQ ID NO: 1856022 - RNA, 15 nt, Human
gaagucacugcacag

SEQ ID NO: 1856023 - RNA, 21 nt, Human
gaaggugaggagcuugaaacc

SEQ ID NO: 1856024 - RNA, 19 nt, Human
gaaguaauaugcacacauu

SEQ ID NO: 1856025 - RNA, 20 nt, Human
gaaguaauaugcacacauuu

SEQ ID NO: 1856026 - RNA, 21 nt, Human
gaaguaauaugcacacauuuu

SEQ ID NO: 1856027 - RNA, 13 nt, Human
gaagucacacagu

SEQ ID NO: 1856028 - RNA, 18 nt, Human
gaaggcagggagggccug

SEQ ID NO: 1856029 - RNA, 23 nt, Human
gaaggcagggagggccugggccc

SEQ ID NO: 1856030 - RNA, 22 nt, Human
gaaggcagggagggccugggcc

SEQ ID NO: 1856031 - RNA, 20 nt, Human
gaaggcagggagggccuggg

SEQ ID NO: 1856032 - RNA, 15 nt, Human
gaagggggcugggac

SEQ ID NO: 1856033 - RNA, 13 nt, Human
gaagggggcuggg

SEQ ID NO: 1856034 - RNA, 19 nt, Human
gaaaugggcagagcagaga

SEQ ID NO: 1856035 - RNA, 17 nt, Human
gaaaugggcagagcaga

SEQ ID NO: 1856036 - RNA, 17 nt, Human
gaaauguacagcaagga

SEQ ID NO: 1856037 - RNA, 11 nt, Human
gaaaugagcug

SEQ ID NO: 1856038 - RNA, 18 nt, Human
gaaaugaggucagagccu

SEQ ID NO: 1856039 - RNA, 15 nt, Human
gaaaugggcagagca

SEQ ID NO: 1856040 - RNA, 16 nt, Human
gaaaugggcagagcag

SEQ ID NO: 1856041 - RNA, 17 nt, Human
gaaauauaggaacuuaa

SEQ ID NO: 1856042 - RNA, 19 nt, Human
gaaauaucugaaaauguau

SEQ ID NO: 1856043 - RNA, 18 nt, Human
gaaauaucugaaaaugua

SEQ ID NO: 1856044 - RNA, 20 nt, Human
gaaauaucugaaaauguaug

SEQ ID NO: 1856045 - RNA, 22 nt, Human
gaacagacuggaagcacagcuu

SEQ ID NO: 1856046 - RNA, 23 nt, Human
gaaauuaguacuccccuccuuga

SEQ ID NO: 1856047 - RNA, 20 nt, Human
gaaauuuccacucaggucug

SEQ ID NO: 1856048 - RNA, 19 nt, Human
gaaauuuccacucaggucu

SEQ ID NO: 1856049 - RNA, 16 nt, Human
gaacacuccuucacag

SEQ ID NO: 1856050 - RNA, 15 nt, Human
gaacacuccuucaca

SEQ ID NO: 1856051 - RNA, 17 nt, Human
gaacacuccuucacaga

SEQ ID NO: 1856052 - RNA, 20 nt, Human
gaacagacuggaagcacagc

SEQ ID NO: 1856053 - RNA, 19 nt, Human
gaacagacuggaagcacag

SEQ ID NO: 1856054 - RNA, 13 nt, Human
gaaagcagaacag

SEQ ID NO: 1856055 - RNA, 14 nt, Human
gaaagcagaacagu

SEQ ID NO: 1856056 - RNA, 23 nt, Human
gaaagauggcugugccucugccu

SEQ ID NO: 1856057 - RNA, 16 nt, Human
gaaagaucaaaagguu

SEQ ID NO: 1856058 - RNA, 22 nt, Human
gaaagauggcugugccucugcc

SEQ ID NO: 1856059 - RNA, 17 nt, Human
gaaagacuguacaaagu

SEQ ID NO: 1856060 - RNA, 16 nt, Human
gaaaaaugagccuggc

SEQ ID NO: 1856061 - RNA, 20 nt, Human
gaaacuaggugcauauuuau

SEQ ID NO: 1856062 - RNA, 16 nt, Human
gaaaguuuacaggaaa

SEQ ID NO: 1856063 - RNA, 14 nt, Human
gaaaguuuacagga

SEQ ID NO: 1856064 - RNA, 13 nt, Human
gaaaguucaugcu

SEQ ID NO: 1856065 - RNA, 21 nt, Human
gaaagcuugcccuggugccuc

SEQ ID NO: 1856066 - RNA, 16 nt, Human
gaaaggaaagaggcuc

SEQ ID NO: 1856067 - RNA, 11 nt, Human
gaaaggaaaga

SEQ ID NO: 1856068 - RNA, 13 nt, Human
gagcccaccuugg

SEQ ID NO: 1856069 - RNA, 15 nt, Human
gagcccaccuuggcu

SEQ ID NO: 1856070 - RNA, 17 nt, Human
gagcccaccuuggcuca

SEQ ID NO: 1856071 - RNA, 18 nt, Human
gagccacugcaccgggcc

SEQ ID NO: 1856072 - RNA, 19 nt, Human
gagccacugcaccgggcca

SEQ ID NO: 1856073 - RNA, 19 nt, Human
gagccagauuucacucucc

SEQ ID NO: 1856074 - RNA, 18 nt, Human
gagccagauuucacucuc

SEQ ID NO: 1856075 - RNA, 15 nt, Human
gagccagauuucacu

SEQ ID NO: 1856076 - RNA, 20 nt, Human
gagccacugcaccgggccac

SEQ ID NO: 1856077 - RNA, 21 nt, Human
gagcagagaccaucccugaag

SEQ ID NO: 1856078 - RNA, 19 nt, Human
gagcagagaccaucccuga

SEQ ID NO: 1856079 - RNA, 23 nt, Human
gagcagagaccaucccugaaggc

SEQ ID NO: 1856080 - RNA, 21 nt, Human
gagcagccacauuccugaugc

SEQ ID NO: 1856081 - RNA, 22 nt, Human
gagcagccacauuccugaugcu

SEQ ID NO: 1856082 - RNA, 16 nt, Human
gagcagagaccauccc

SEQ ID NO: 1856083 - RNA, 18 nt, Human
gagcagagaccaucccug

SEQ ID NO: 1856084 - RNA, 17 nt, Human
gagcagagaccaucccu

SEQ ID NO: 1856085 - RNA, 21 nt, Human
gagauagccaaggccaaagga

SEQ ID NO: 1856086 - RNA, 20 nt, Human
gagauagccaaggccaaagg

SEQ ID NO: 1856087 - RNA, 13 nt, Human
gagccuccugccc

SEQ ID NO: 1856088 - RNA, 12 nt, Human
gagccugcaguu

SEQ ID NO: 1856089 - RNA, 13 nt, Human
gagccucagcauc

SEQ ID NO: 1856090 - RNA, 19 nt, Human
gagccucagucucccuccc

SEQ ID NO: 1856091 - RNA, 17 nt, Human
gagccucagcauccugg

SEQ ID NO: 1856092 - RNA, 14 nt, Human
gagccucagcaucc

SEQ ID NO: 1856093 - RNA, 15 nt, Human
gagccucagcauccu

SEQ ID NO: 1856094 - RNA, 21 nt, Human
gagccgagaucacgccacugc

SEQ ID NO: 1856095 - RNA, 22 nt, Human
gagccgagaucacgccacugca

SEQ ID NO: 1856096 - RNA, 18 nt, Human
gagcccacgcccccacug

SEQ ID NO: 1856097 - RNA, 21 nt, Human
gagcccacuguacuugcucuu

SEQ ID NO: 1856098 - RNA, 18 nt, Human
gagcccacuguacuugcu

SEQ ID NO: 1856099 - RNA, 19 nt, Human
gagccgagaucacgccacu

SEQ ID NO: 1856100 - RNA, 20 nt, Human
gagccgagaucacgccacug

SEQ ID NO: 1856101 - RNA, 15 nt, Human
gagccugcaguuauu

SEQ ID NO: 1856102 - RNA, 17 nt, Human
gagcuagcagcagggag

SEQ ID NO: 1856103 - RNA, 15 nt, Human
gagcuagcagcaggg

SEQ ID NO: 1856104 - RNA, 15 nt, Human
gagcugaguggggga

SEQ ID NO: 1856105 - RNA, 22 nt, Human
gagcuugaaacccguggcgcuu

SEQ ID NO: 1856106 - RNA, 22 nt, Human
gagcuuucugcuaucaaagagg

SEQ ID NO: 1856107 - RNA, 20 nt, Human
gagcuuugaaaauucagugg

SEQ ID NO: 1856108 - RNA, 23 nt, Human
gaggaaaaccaagccguggcuuc

SEQ ID NO: 1856109 - RNA, 21 nt, Human
gaggaaaaccaagccguggcu

SEQ ID NO: 1856110 - RNA, 20 nt, Human
gaggaaaaccaagccguggc

SEQ ID NO: 1856111 - RNA, 17 nt, Human
gaggaaagcaaaggaga

SEQ ID NO: 1856112 - RNA, 16 nt, Human
gaggaaagcaaaggag

SEQ ID NO: 1856113 - RNA, 18 nt, Human
gaggaagccgcuggggcc

SEQ ID NO: 1856114 - RNA, 17 nt, Human
gaggaagccgcuggggc

SEQ ID NO: 1856115 - RNA, 14 nt, Human
gaggaagccgcugg

SEQ ID NO: 1856116 - RNA, 13 nt, Human
gaggaagccgcug

SEQ ID NO: 1856117 - RNA, 17 nt, Human
gaggaagagaaaaaaua

SEQ ID NO: 1856118 - RNA, 16 nt, Human
gaggaacaaggcaagg

SEQ ID NO: 1856119 - RNA, 14 nt, Human
gaggaacaaggcaa

SEQ ID NO: 1856120 - RNA, 21 nt, Human
gagaaugcacaaacagaggcc

SEQ ID NO: 1856121 - RNA, 20 nt, Human
gagaaugcacaaacagaggc

SEQ ID NO: 1856122 - RNA, 22 nt, Human
gagaaugcacaaacagaggccg

SEQ ID NO: 1856123 - RNA, 17 nt, Human
gagacacaagccuucgg

SEQ ID NO: 1856124 - RNA, 15 nt, Human
gagacacaagccuuc

SEQ ID NO: 1856125 - RNA, 12 nt, Human
gagacagcccgg

SEQ ID NO: 1856126 - RNA, 16 nt, Human
gagacagccaacuaug

SEQ ID NO: 1856127 - RNA, 19 nt, Human
gagacagaguuuucacucu

SEQ ID NO: 1856128 - RNA, 14 nt, Human
gagaaauuuauaaa

SEQ ID NO: 1856129 - RNA, 12 nt, Human
gagaaaugaaaa

SEQ ID NO: 1856130 - RNA, 23 nt, Human
gagaaaguacuucuccacccugc

SEQ ID NO: 1856131 - RNA, 16 nt, Human
gagaaacagccugugu

SEQ ID NO: 1856132 - RNA, 18 nt, Human
gacucgcgacaaugcaaa

SEQ ID NO: 1856133 - RNA, 17 nt, Human
gacuccugcaggcagcc

SEQ ID NO: 1856134 - RNA, 19 nt, Human
gacucgcgacaaugcaaac

SEQ ID NO: 1856135 - RNA, 14 nt, Human
gacuuggaagcucc

SEQ ID NO: 1856136 - RNA, 15 nt, Human
gacuuggaagcuccg

SEQ ID NO: 1856137 - RNA, 16 nt, Human
gacuuggaagcuccgc

SEQ ID NO: 1856138 - RNA, 21 nt, Human
gagaaaauggacguguuauga

SEQ ID NO: 1856139 - RNA, 19 nt, Human
gacuugugacgguguaccu

SEQ ID NO: 1856140 - RNA, 15 nt, Human
gagacagcucugcau

SEQ ID NO: 1856141 - RNA, 18 nt, Human
gagacagcucugcauacu

SEQ ID NO: 1856142 - RNA, 13 nt, Human
gagacagcucugc

SEQ ID NO: 1856143 - RNA, 24 nt, Human
gagacagcccgggcucugccuccc

SEQ ID NO: 1856144 - RNA, 23 nt, Human
gagacagcccgggcucugccucc

SEQ ID NO: 1856145 - RNA, 22 nt, Human
gagacagcccgggcucugccuc

SEQ ID NO: 1856146 - RNA, 21 nt, Human
gagacagcccgggcucugccu

SEQ ID NO: 1856147 - RNA, 20 nt, Human
gagacagcccgggcucugcc

SEQ ID NO: 1856148 - RNA, 19 nt, Human
gagacagcccgggcucugc

SEQ ID NO: 1856149 - RNA, 18 nt, Human
gagacagcccgggcucug

SEQ ID NO: 1856150 - RNA, 17 nt, Human
gagacagcccgggcucu

SEQ ID NO: 1856151 - RNA, 14 nt, Human
gagacagcccgggc

SEQ ID NO: 1856152 - RNA, 22 nt, Human
gagacuccugcaggcagccagg

SEQ ID NO: 1856153 - RNA, 18 nt, Human
gagacucgcgacaaugca

SEQ ID NO: 1856154 - RNA, 16 nt, Human
gagacucgcgacaaug

SEQ ID NO: 1856155 - RNA, 12 nt, Human
gagaccaucccu

SEQ ID NO: 1856156 - RNA, 13 nt, Human
gagacuuguauga

SEQ ID NO: 1856157 - RNA, 23 nt, Human
gagacugucucaagagggcacug

SEQ ID NO: 1856158 - RNA, 22 nt, Human
gagacugucucaagagggcacu

SEQ ID NO: 1856159 - RNA, 14 nt, Human
gagacucugucuca

SEQ ID NO: 1856160 - RNA, 17 nt, Human
gagagaagagaaugcac

SEQ ID NO: 1856161 - RNA, 14 nt, Human
gagagccuuccagg

SEQ ID NO: 1856162 - RNA, 13 nt, Human
gagagccuuccag

SEQ ID NO: 1856163 - RNA, 21 nt, Human
gagagggugggagugggccca

SEQ ID NO: 1856164 - RNA, 13 nt, Human
gagaggggaacag

SEQ ID NO: 1856165 - RNA, 18 nt, Human
gagaggggaacagacugg

SEQ ID NO: 1856166 - RNA, 15 nt, Human
gagagugaacaaauu

SEQ ID NO: 1856167 - RNA, 19 nt, Human
gagagugaacaaauuuaca

SEQ ID NO: 1856168 - RNA, 17 nt, Human
gagauacagaauuuuau

SEQ ID NO: 1856169 - RNA, 23 nt, Human
gacacccugugauggggcccugc

SEQ ID NO: 1856170 - RNA, 22 nt, Human
gacacccugugauggggcccug

SEQ ID NO: 1856171 - RNA, 17 nt, Human
gacaccuacugaguggc

SEQ ID NO: 1856172 - RNA, 13 nt, Human
gacacccugugau

SEQ ID NO: 1856173 - RNA, 12 nt, Human
gacacccuguga

SEQ ID NO: 1856174 - RNA, 17 nt, Human
gacacagugaccauacu

SEQ ID NO: 1856175 - RNA, 18 nt, Human
gacacaggcccggcucca

SEQ ID NO: 1856176 - RNA, 15 nt, Human
gacacgaauauugcu

SEQ ID NO: 1856177 - RNA, 18 nt, Human
gacaccuugacagggcac

SEQ ID NO: 1856178 - RNA, 20 nt, Human
gacaccuugacagggcacac

SEQ ID NO: 1856179 - RNA, 15 nt, Human
gacaccuugacaggg

SEQ ID NO: 1856180 - RNA, 17 nt, Human
gacaccuugacagggca

SEQ ID NO: 1856181 - RNA, 18 nt, Human
gacacgaauauugcugau

SEQ ID NO: 1856182 - RNA, 17 nt, Human
gacacgaauauugcuga

SEQ ID NO: 1856183 - RNA, 19 nt, Human
gacacgaauauugcugaug

SEQ ID NO: 1856184 - RNA, 15 nt, Human
gacacuaaccacgcu

SEQ ID NO: 1856185 - RNA, 16 nt, Human
gacacuaaccacgcug

SEQ ID NO: 1856186 - RNA, 17 nt, Human
gacacuaaccacgcugg

SEQ ID NO: 1856187 - RNA, 18 nt, Human
gacacuaaccacgcugga

SEQ ID NO: 1856188 - RNA, 17 nt, Human
gacaaugacuuacugua

SEQ ID NO: 1856189 - RNA, 20 nt, Human
gacaaugacuuacuguacau

SEQ ID NO: 1856190 - RNA, 12 nt, Human
gacaaugcaaac

SEQ ID NO: 1856191 - RNA, 21 nt, Human
gacaaugacuuacuguacaug

SEQ ID NO: 1856192 - RNA, 18 nt, Human
gacaaugcaaaccaucau

SEQ ID NO: 1856193 - RNA, 16 nt, Human
gacaaugcaaaccauc

SEQ ID NO: 1856194 - RNA, 12 nt, Human
gacaauuuauua

SEQ ID NO: 1856195 - RNA, 13 nt, Human
gacaauuuauuau

SEQ ID NO: 1856196 - RNA, 19 nt, Human
gacaauuuauuauggcaca

SEQ ID NO: 1856197 - RNA, 13 nt, Human
gacacacagcucu

SEQ ID NO: 1856198 - RNA, 15 nt, Human
gacacaggcccggcu

SEQ ID NO: 1856199 - RNA, 17 nt, Human
gacacaggcccggcucc

SEQ ID NO: 1856200 - RNA, 16 nt, Human
gacaaugacccagugg

SEQ ID NO: 1856201 - RNA, 16 nt, Human
gaagucuuuguacaga

SEQ ID NO: 1856202 - RNA, 14 nt, Human
gaagucuuuguaca

SEQ ID NO: 1856203 - RNA, 22 nt, Human
gacaaggauugcuacuguccua

SEQ ID NO: 1856204 - RNA, 14 nt, Human
gacaggcaaugcug

SEQ ID NO: 1856205 - RNA, 16 nt, Human
gacaggcaaugcuggc

SEQ ID NO: 1856206 - RNA, 17 nt, Human
gacaggcaaugcuggcu

SEQ ID NO: 1856207 - RNA, 18 nt, Human
gacaggcauguucucuga

SEQ ID NO: 1856208 - RNA, 19 nt, Human
gacaggcauguucucugag

SEQ ID NO: 1856209 - RNA, 15 nt, Human
gacagcugccuggga

SEQ ID NO: 1856210 - RNA, 14 nt, Human
gacagcugccuggg

SEQ ID NO: 1856211 - RNA, 19 nt, Human
gacagccaacuauggccug

SEQ ID NO: 1856212 - RNA, 13 nt, Human
gacagcugccugg

SEQ ID NO: 1856213 - RNA, 12 nt, Human
gacagcugccug

SEQ ID NO: 1856214 - RNA, 22 nt, Human
gacagccaacuauggccugugg

SEQ ID NO: 1856215 - RNA, 13 nt, Human
gacagccacggcc

SEQ ID NO: 1856216 - RNA, 14 nt, Human
gacagacacaggcc

SEQ ID NO: 1856217 - RNA, 20 nt, Human
gacacuaaccacgcuggacc

SEQ ID NO: 1856218 - RNA, 21 nt, Human
gacacuaaccacgcuggaccu

SEQ ID NO: 1856219 - RNA, 23 nt, Human
gacagaucucugcuuuggaaauc

SEQ ID NO: 1856220 - RNA, 21 nt, Human
gacagaucucugcuuuggaaa

SEQ ID NO: 1856221 - RNA, 19 nt, Human
gacagaucucugcuuugga

SEQ ID NO: 1856222 - RNA, 15 nt, Human
gacagacacaggccc

SEQ ID NO: 1856223 - RNA, 16 nt, Human
gacagacacaggcccg

SEQ ID NO: 1856224 - RNA, 17 nt, Human
gacaugucuuuucuugc

SEQ ID NO: 1856225 - RNA, 21 nt, Human
gacaugucuuuucuugcauga

SEQ ID NO: 1856226 - RNA, 15 nt, Human
gacauacuaaccagc

SEQ ID NO: 1856227 - RNA, 16 nt, Human
gacauacuaaccagca

SEQ ID NO: 1856228 - RNA, 14 nt, Human
gacaucaacagaua

SEQ ID NO: 1856229 - RNA, 23 nt, Human
gacauacuaaccagcagaaaugc

SEQ ID NO: 1856230 - RNA, 23 nt, Human
gacccugucucaaaaaaagaaaa

SEQ ID NO: 1856231 - RNA, 16 nt, Human
gacccugcccuguggg

SEQ ID NO: 1856232 - RNA, 15 nt, Human
gacccugcccugugg

SEQ ID NO: 1856233 - RNA, 13 nt, Human
gacccugcccugu

SEQ ID NO: 1856234 - RNA, 21 nt, Human
gacccugaggcccagagggcc

SEQ ID NO: 1856235 - RNA, 12 nt, Human
gacccugcccug

SEQ ID NO: 1856236 - RNA, 20 nt, Human
gacccugaggcccagagggc

SEQ ID NO: 1856237 - RNA, 19 nt, Human
gacccugaggcccagaggg

SEQ ID NO: 1856238 - RNA, 22 nt, Human
gaccccucauagcccucacccu

SEQ ID NO: 1856239 - RNA, 20 nt, Human
gaccccgagccuggcuccaa

SEQ ID NO: 1856240 - RNA, 23 nt, Human
gaccccucauagcccucacccug

SEQ ID NO: 1856241 - RNA, 13 nt, Human
gaccccuccaugu

SEQ ID NO: 1856242 - RNA, 11 nt, Human
gacccacugcu

SEQ ID NO: 1856243 - RNA, 12 nt, Human
gacccacugcuu

SEQ ID NO: 1856244 - RNA, 17 nt, Human
gacccaugcugcccugu

SEQ ID NO: 1856245 - RNA, 16 nt, Human
gacccaugcugcccug

SEQ ID NO: 1856246 - RNA, 15 nt, Human
gacccaugcugcccu

SEQ ID NO: 1856247 - RNA, 14 nt, Human
gacccaugcugccc

SEQ ID NO: 1856248 - RNA, 15 nt, Human
gaccgugaggccaga

SEQ ID NO: 1856249 - RNA, 14 nt, Human
gaccgugaggccag

SEQ ID NO: 1856250 - RNA, 15 nt, Human
gaccugaggcccuuc

SEQ ID NO: 1856251 - RNA, 13 nt, Human
gaccucaggccug

SEQ ID NO: 1856252 - RNA, 12 nt, Human
gaccucaggccu

SEQ ID NO: 1856253 - RNA, 11 nt, Human
gaccucaggcc

SEQ ID NO: 1856254 - RNA, 21 nt, Human
gaccugaggcccuucucucca

SEQ ID NO: 1856255 - RNA, 18 nt, Human
gaccugaggcccuucucu

SEQ ID NO: 1856256 - RNA, 15 nt, Human
gaccugccucggccu

SEQ ID NO: 1856257 - RNA, 21 nt, Human
gaccugccccuccucucugcc

SEQ ID NO: 1856258 - RNA, 23 nt, Human
gaccugauuucugagcauuuaau

SEQ ID NO: 1856259 - RNA, 22 nt, Human
gacguguuaugacuccagaauu

SEQ ID NO: 1856260 - RNA, 17 nt, Human
gacuacucccccaggug

SEQ ID NO: 1856261 - RNA, 12 nt, Human
gacuacaggcac

SEQ ID NO: 1856262 - RNA, 16 nt, Human
gacuccugcaggcagc

SEQ ID NO: 1856263 - RNA, 15 nt, Human
gacuccugcaggcag

SEQ ID NO: 1856264 - RNA, 14 nt, Human
gacuccugcaggca

SEQ ID NO: 1856265 - RNA, 15 nt, Human
gacucagguugucug

SEQ ID NO: 1856266 - RNA, 15 nt, Human
gacucaguggggagg

SEQ ID NO: 1856267 - RNA, 20 nt, Human
gacguguuaugacuccagaa

SEQ ID NO: 1856268 - RNA, 17 nt, Human
gacguguuaugacucca

SEQ ID NO: 1856269 - RNA, 17 nt, Human
gacgggguuucaccaug

SEQ ID NO: 1856270 - RNA, 23 nt, Human
gacggagucccaccuuggcugca

SEQ ID NO: 1856271 - RNA, 21 nt, Human
gacggagucccaccuuggcug

SEQ ID NO: 1856272 - RNA, 14 nt, Human
gacggagucccacc

SEQ ID NO: 1856273 - RNA, 18 nt, Human
gacggagucccaccuugg

SEQ ID NO: 1856274 - RNA, 19 nt, Human
gaccugccucggccuccca

SEQ ID NO: 1856275 - RNA, 23 nt, Human
gaccuugaacuggguacuugugg

SEQ ID NO: 1856276 - RNA, 21 nt, Human
gaccuuucaauaggaaaaacu

SEQ ID NO: 1856277 - RNA, 20 nt, Human
gcagaguugaagacagagcu

SEQ ID NO: 1856278 - RNA, 18 nt, Human
gcagauaaacaguaguga

SEQ ID NO: 1856279 - RNA, 21 nt, Human
gcagaguugaagacagagcua

SEQ ID NO: 1856280 - RNA, 17 nt, Human
gcagacaguuaagagaa

SEQ ID NO: 1856281 - RNA, 22 nt, Human
gcagauacaggaaaagcugcug

SEQ ID NO: 1856282 - RNA, 20 nt, Human
gcagccccgugggguuccuc

SEQ ID NO: 1856283 - RNA, 21 nt, Human
gcagccccuguucuggcagag

SEQ ID NO: 1856284 - RNA, 20 nt, Human
gcagccccuguucuggcaga

SEQ ID NO: 1856285 - RNA, 13 nt, Human
gcagcccugcaga

SEQ ID NO: 1856286 - RNA, 16 nt, Human
gcagcaauaaagcagc

SEQ ID NO: 1856287 - RNA, 23 nt, Human
gcagcaauaaagcagcguuucua

SEQ ID NO: 1856288 - RNA, 17 nt, Human
gcagccccauucugccu

SEQ ID NO: 1856289 - RNA, 18 nt, Human
gcagccccauucugccug

SEQ ID NO: 1856290 - RNA, 19 nt, Human
gcagccccauucugccugc

SEQ ID NO: 1856291 - RNA, 21 nt, Human
gcagccccauucugccugccc

SEQ ID NO: 1856292 - RNA, 24 nt, Human
gcagccccauucugccugcccagg

SEQ ID NO: 1856293 - RNA, 17 nt, Human
gcagcccugcagagggc

SEQ ID NO: 1856294 - RNA, 16 nt, Human
gcagcccugcagaggg

SEQ ID NO: 1856295 - RNA, 15 nt, Human
gcagcccugcagagg

SEQ ID NO: 1856296 - RNA, 14 nt, Human
gcagcccugcagag

SEQ ID NO: 1856297 - RNA, 13 nt, Human
gcagcccugcuuu

SEQ ID NO: 1856298 - RNA, 15 nt, Human
gcagcucaccucucc

SEQ ID NO: 1856299 - RNA, 14 nt, Human
gcagcucaccucuc

SEQ ID NO: 1856300 - RNA, 15 nt, Human
gcagccuuggcaaac

SEQ ID NO: 1856301 - RNA, 14 nt, Human
gcaggcagccaggc

SEQ ID NO: 1856302 - RNA, 13 nt, Human
gcaggcagccagg

SEQ ID NO: 1856303 - RNA, 12 nt, Human
gcaggcagccag

SEQ ID NO: 1856304 - RNA, 20 nt, Human
gcaggaaggcugagaggaga

SEQ ID NO: 1856305 - RNA, 20 nt, Human
gcaggaggaucacuugaguc

SEQ ID NO: 1856306 - RNA, 23 nt, Human
gcaggaggaucacuugaguccag

SEQ ID NO: 1856307 - RNA, 16 nt, Human
gcaccagcagccugga

SEQ ID NO: 1856308 - RNA, 22 nt, Human
gcacccaccaucaugucuggcu

SEQ ID NO: 1856309 - RNA, 19 nt, Human
gcacccggccccugcuggu

SEQ ID NO: 1856310 - RNA, 22 nt, Human
gcaccacugcacuccagccugg

SEQ ID NO: 1856311 - RNA, 21 nt, Human
gcaccacugcacuccagccug

SEQ ID NO: 1856312 - RNA, 15 nt, Human
gcaccagcagccugg

SEQ ID NO: 1856313 - RNA, 12 nt, Human
gcaauggcagcc

SEQ ID NO: 1856314 - RNA, 13 nt, Human
gcaauggcagccu

SEQ ID NO: 1856315 - RNA, 20 nt, Human
gcaccacugcacuccagccu

SEQ ID NO: 1856316 - RNA, 14 nt, Human
gcaauggcagccuu

SEQ ID NO: 1856317 - RNA, 17 nt, Human
gcaccuuagacaguccc

SEQ ID NO: 1856318 - RNA, 14 nt, Human
gcaccuuagacagu

SEQ ID NO: 1856319 - RNA, 22 nt, Human
gcaccuggaauauauaaccagu

SEQ ID NO: 1856320 - RNA, 18 nt, Human
gcaccuggaauauauaac

SEQ ID NO: 1856321 - RNA, 21 nt, Human
gcaccuggaauauauaaccag

SEQ ID NO: 1856322 - RNA, 15 nt, Human
gcacccucaggcagg

SEQ ID NO: 1856323 - RNA, 18 nt, Human
gcaccuuagacagucccu

SEQ ID NO: 1856324 - RNA, 19 nt, Human
gcaccuuagacagucccug

SEQ ID NO: 1856325 - RNA, 12 nt, Human
gcacgauuucug

SEQ ID NO: 1856326 - RNA, 14 nt, Human
gcacguauuuuaau

SEQ ID NO: 1856327 - RNA, 15 nt, Human
gcacguauuuuaaua

SEQ ID NO: 1856328 - RNA, 20 nt, Human
gcacugcuuccagugaggcu

SEQ ID NO: 1856329 - RNA, 22 nt, Human
gcacugcuuccagugaggcucu

SEQ ID NO: 1856330 - RNA, 12 nt, Human
gcacugcugccc

SEQ ID NO: 1856331 - RNA, 24 nt, Human
gcacugguggcccgacagccuggc

SEQ ID NO: 1856332 - RNA, 23 nt, Human
gcacugguggcccgacagccugg

SEQ ID NO: 1856333 - RNA, 22 nt, Human
gcacugguggcccgacagccug

SEQ ID NO: 1856334 - RNA, 18 nt, Human
gcacugcuuccagugagg

SEQ ID NO: 1856335 - RNA, 16 nt, Human
gcacugcuuccaguga

SEQ ID NO: 1856336 - RNA, 15 nt, Human
gcagacaggaccagg

SEQ ID NO: 1856337 - RNA, 13 nt, Human
gcagacaggacca

SEQ ID NO: 1856338 - RNA, 12 nt, Human
gcagacaggacc

SEQ ID NO: 1856339 - RNA, 23 nt, Human
gcagacaggcaagcaccuccugc

SEQ ID NO: 1856340 - RNA, 18 nt, Human
gcagacaggaccagggau

SEQ ID NO: 1856341 - RNA, 19 nt, Human
gcagacaggcaagcaccuc

SEQ ID NO: 1856342 - RNA, 16 nt, Human
gcagugcaugcugucc

SEQ ID NO: 1856343 - RNA, 15 nt, Human
gcagugcaugcuguc

SEQ ID NO: 1856344 - RNA, 22 nt, Human
gcagguccaggguuugaguuca

SEQ ID NO: 1856345 - RNA, 19 nt, Human
gcaggucuugaacuccugg

SEQ ID NO: 1856346 - RNA, 20 nt, Human
gcaggucuugaacuccuggc

SEQ ID NO: 1856347 - RNA, 22 nt, Human
gcagggcucagcggggacagcu

SEQ ID NO: 1856348 - RNA, 17 nt, Human
gcagggucucacucugu

SEQ ID NO: 1856349 - RNA, 18 nt, Human
gcagggucucacucuguc

SEQ ID NO: 1856350 - RNA, 16 nt, Human
gcaggcagccaggcca

SEQ ID NO: 1856351 - RNA, 15 nt, Human
gcaggcagccaggcc

SEQ ID NO: 1856352 - RNA, 19 nt, Human
gcagggcucagcggggaca

SEQ ID NO: 1856353 - RNA, 21 nt, Human
gcagggcucagcggggacagc

SEQ ID NO: 1856354 - RNA, 17 nt, Human
gcauagguuuaauaauu

SEQ ID NO: 1856355 - RNA, 22 nt, Human
gcaguggugguuuucuguucuu

SEQ ID NO: 1856356 - RNA, 23 nt, Human
gcaguggugguuuucuguucuuu

SEQ ID NO: 1856357 - RNA, 13 nt, Human
gcagugggagcug

SEQ ID NO: 1856358 - RNA, 14 nt, Human
gcagugggagcugc

SEQ ID NO: 1856359 - RNA, 15 nt, Human
gcagugggagcugcc

SEQ ID NO: 1856360 - RNA, 13 nt, Human
gcauagaaguaaa

SEQ ID NO: 1856361 - RNA, 17 nt, Human
gcaguuauuaacacuaa

SEQ ID NO: 1856362 - RNA, 16 nt, Human
gcaucugaaaauugau

SEQ ID NO: 1856363 - RNA, 18 nt, Human
gcaugaaguaauaugcac

SEQ ID NO: 1856364 - RNA, 18 nt, Human
gcaugcgggcuuccuccu

SEQ ID NO: 1856365 - RNA, 20 nt, Human
gcauggcaaggacugcaggg

SEQ ID NO: 1856366 - RNA, 15 nt, Human
gcauguucucugagg

SEQ ID NO: 1856367 - RNA, 21 nt, Human
gcauguucucugaggacacua

SEQ ID NO: 1856368 - RNA, 22 nt, Human
gcauguucucugaggacacuaa

SEQ ID NO: 1856369 - RNA, 18 nt, Human
gcauuuguuugaacugau

SEQ ID NO: 1856370 - RNA, 16 nt, Human
gccaaacucaccugcc

SEQ ID NO: 1856371 - RNA, 14 nt, Human
gccaaacucaccug

SEQ ID NO: 1856372 - RNA, 19 nt, Human
gccaaagccuccuccagcc

SEQ ID NO: 1856373 - RNA, 16 nt, Human
gccaaagccuccucca

SEQ ID NO: 1856374 - RNA, 13 nt, Human
gccaaagccaaag

SEQ ID NO: 1856375 - RNA, 20 nt, Human
gccaaagccaaagcuaggcc

SEQ ID NO: 1856376 - RNA, 16 nt, Human
gccaaagcuaggccug

SEQ ID NO: 1856377 - RNA, 22 nt, Human
gccaaagcuaggccuggccaga

SEQ ID NO: 1856378 - RNA, 12 nt, Human
gccaaaggaagc

SEQ ID NO: 1856379 - RNA, 17 nt, Human
gcauuugcugaauacag

SEQ ID NO: 1856380 - RNA, 14 nt, Human
gcauuugcugaaua

SEQ ID NO: 1856381 - RNA, 16 nt, Human
gcauuuguuugaacug

SEQ ID NO: 1856382 - RNA, 13 nt, Human
gcauuugcugaau

SEQ ID NO: 1856383 - RNA, 21 nt, Human
gcauuugaggucuguucuuuc

SEQ ID NO: 1856384 - RNA, 17 nt, Human
gcauuaucuagauacug

SEQ ID NO: 1856385 - RNA, 13 nt, Human
gaucuuuggacag

SEQ ID NO: 1856386 - RNA, 21 nt, Human
gaucuuuggacagaagcagcu

SEQ ID NO: 1856387 - RNA, 18 nt, Human
gaucuuugcagacaggca

SEQ ID NO: 1856388 - RNA, 17 nt, Human
gaucuuugcagacaggc

SEQ ID NO: 1856389 - RNA, 22 nt, Human
gauccugagccagauuucacuc

SEQ ID NO: 1856390 - RNA, 21 nt, Human
gauccugagccagauuucacu

SEQ ID NO: 1856391 - RNA, 16 nt, Human
gaucccucauccucau

SEQ ID NO: 1856392 - RNA, 15 nt, Human
gaucccucauccuca

SEQ ID NO: 1856393 - RNA, 14 nt, Human
gauccccagcuguu

SEQ ID NO: 1856394 - RNA, 21 nt, Human
gauggcuaguaucaaaagaaa

SEQ ID NO: 1856395 - RNA, 19 nt, Human
gauggcugugccucugccu

SEQ ID NO: 1856396 - RNA, 18 nt, Human
gauggcugugccucugcc

SEQ ID NO: 1856397 - RNA, 17 nt, Human
gauggcugugccucugc

SEQ ID NO: 1856398 - RNA, 13 nt, Human
gauggcugugccu

SEQ ID NO: 1856399 - RNA, 22 nt, Human
gauggggcccugccuccuuugu

SEQ ID NO: 1856400 - RNA, 14 nt, Human
gauggggcccugcc

SEQ ID NO: 1856401 - RNA, 13 nt, Human
gauggggcccugc

SEQ ID NO: 1856402 - RNA, 20 nt, Human
gauggcugugccucugccug

SEQ ID NO: 1856403 - RNA, 22 nt, Human
gauggauuuccagccaaagccu

SEQ ID NO: 1856404 - RNA, 20 nt, Human
gaugccugguggcagcugcg

SEQ ID NO: 1856405 - RNA, 18 nt, Human
gaugccugguggcagcug

SEQ ID NO: 1856406 - RNA, 19 nt, Human
gaugccugguggcagcugc

SEQ ID NO: 1856407 - RNA, 12 nt, Human
gaugcagccuca

SEQ ID NO: 1856408 - RNA, 14 nt, Human
gaugcagccucaca

SEQ ID NO: 1856409 - RNA, 19 nt, Human
gaugcagccucacaguccu

SEQ ID NO: 1856410 - RNA, 21 nt, Human
gaugcacagaguuguuacauu

SEQ ID NO: 1856411 - RNA, 22 nt, Human
gaugcacagaguuguuacauuu

SEQ ID NO: 1856412 - RNA, 13 nt, Human
gaugcaccagccc

SEQ ID NO: 1856413 - RNA, 20 nt, Human
gauccccaagccuggcaagg

SEQ ID NO: 1856414 - RNA, 20 nt, Human
gaucauugugaaauuauuca

SEQ ID NO: 1856415 - RNA, 14 nt, Human
gaucauugugaaau

SEQ ID NO: 1856416 - RNA, 17 nt, Human
gaucauccacugugcca

SEQ ID NO: 1856417 - RNA, 19 nt, Human
gaucauccacugugccaug

SEQ ID NO: 1856418 - RNA, 21 nt, Human
gaucauccacugugccaugug

SEQ ID NO: 1856419 - RNA, 12 nt, Human
gaucacggcuca

SEQ ID NO: 1856420 - RNA, 15 nt, Human
gaucagccugggcaa

SEQ ID NO: 1856421 - RNA, 12 nt, Human
gaucagccuggg

SEQ ID NO: 1856422 - RNA, 22 nt, Human
gaucagucugauucccaagcuc

SEQ ID NO: 1856423 - RNA, 16 nt, Human
gaucacgccacugcac

SEQ ID NO: 1856424 - RNA, 18 nt, Human
gaucacgccacugcacua

SEQ ID NO: 1856425 - RNA, 21 nt, Human
gaggaaggaaacccagcucug

SEQ ID NO: 1856426 - RNA, 20 nt, Human
gaggaaggaaacccagcucu

SEQ ID NO: 1856427 - RNA, 19 nt, Human
gaggaaggaaacccagcuc

SEQ ID NO: 1856428 - RNA, 13 nt, Human
gaggaaggaaacc

SEQ ID NO: 1856429 - RNA, 19 nt, Human
gauaaaguugguaaaccuu

SEQ ID NO: 1856430 - RNA, 22 nt, Human
gauaaauaguuuaugauuccac

SEQ ID NO: 1856431 - RNA, 16 nt, Human
gauaaauaacuuuuuu

SEQ ID NO: 1856432 - RNA, 21 nt, Human
gauaaauaacuuuuuuuuaag

SEQ ID NO: 1856433 - RNA, 22 nt, Human
gauagcacagacccugcccugu

SEQ ID NO: 1856434 - RNA, 21 nt, Human
gauagcacagacccugcccug

SEQ ID NO: 1856435 - RNA, 18 nt, Human
gauacaggaaaagcugcu

SEQ ID NO: 1856436 - RNA, 19 nt, Human
gauacaggaaaagcugcug

SEQ ID NO: 1856437 - RNA, 14 nt, Human
gauaauacaccacu

SEQ ID NO: 1856438 - RNA, 18 nt, Human
gauaauacaccacuacau

SEQ ID NO: 1856439 - RNA, 21 nt, Human
gauaauacaccacuacauucu

SEQ ID NO: 1856440 - RNA, 22 nt, Human
gauaauacaccacuacauucug

SEQ ID NO: 1856441 - RNA, 19 nt, Human
gauacaccgggccuggaga

SEQ ID NO: 1856442 - RNA, 23 nt, Human
gauagauaggucagugcaaauac

SEQ ID NO: 1856443 - RNA, 19 nt, Human
gauucauauuuacuucuua

SEQ ID NO: 1856444 - RNA, 18 nt, Human
gauucauauuuacuucuu

SEQ ID NO: 1856445 - RNA, 17 nt, Human
gauucauauuuacuucu

SEQ ID NO: 1856446 - RNA, 22 nt, Human
gauuccagagaguggcuccucc

SEQ ID NO: 1856447 - RNA, 20 nt, Human
gauuccagagaguggcuccu

SEQ ID NO: 1856448 - RNA, 19 nt, Human
gauuccagagaguggcucc

SEQ ID NO: 1856449 - RNA, 15 nt, Human
gauucagcucugcaa

SEQ ID NO: 1856450 - RNA, 13 nt, Human
gauucagcucugc

SEQ ID NO: 1856451 - RNA, 19 nt, Human
gauucagacagcugccugg

SEQ ID NO: 1856452 - RNA, 23 nt, Human
gauggggcugcaccggcuggccu

SEQ ID NO: 1856453 - RNA, 12 nt, Human
gauucuuuccug

SEQ ID NO: 1856454 - RNA, 21 nt, Human
gauucccaagcucugcuccuc

SEQ ID NO: 1856455 - RNA, 19 nt, Human
gauucccaagcucugcucc

SEQ ID NO: 1856456 - RNA, 20 nt, Human
gauucccaagcucugcuccu

SEQ ID NO: 1856457 - RNA, 23 nt, Human
gauugcaccacugcacuccagcc

SEQ ID NO: 1856458 - RNA, 16 nt, Human
gauugcaccacugcac

SEQ ID NO: 1856459 - RNA, 21 nt, Human
gauugcaacaggcugggcuuc

SEQ ID NO: 1856460 - RNA, 17 nt, Human
gauucuuuccugaggcu

SEQ ID NO: 1856461 - RNA, 16 nt, Human
gauucuuuccugaggc

SEQ ID NO: 1856462 - RNA, 18 nt, Human
gauucuuuccugaggcug

SEQ ID NO: 1856463 - RNA, 20 nt, Human
gauugcaacaggcugggcuu

SEQ ID NO: 1856464 - RNA, 15 nt, Human
gauuuccguuaaaau

SEQ ID NO: 1856465 - RNA, 18 nt, Human
gauuuccguuaaaauacc

SEQ ID NO: 1856466 - RNA, 22 nt, Human
gauuuggucaacacuaacauga

SEQ ID NO: 1856467 - RNA, 11 nt, Human
gauuucuguuu

SEQ ID NO: 1856468 - RNA, 19 nt, Human
gauuucuguuuagauaaua

SEQ ID NO: 1856469 - RNA, 20 nt, Human
gauuugucuuuggugaacau

SEQ ID NO: 1856470 - RNA, 22 nt, Human
gauuugucuuuggugaacauug

SEQ ID NO: 1856471 - RNA, 19 nt, Human
gauuuguuaaugauagcua

SEQ ID NO: 1856472 - RNA, 22 nt, Human
gcaaugaccuuucaauaggaaa

SEQ ID NO: 1856473 - RNA, 20 nt, Human
gcaaugaccuuucaauagga

SEQ ID NO: 1856474 - RNA, 17 nt, Human
gcaaugaccuuucaaua

SEQ ID NO: 1856475 - RNA, 15 nt, Human
gcaaugaccuuucaa

SEQ ID NO: 1856476 - RNA, 17 nt, Human
gcaaucaaaucugcuuu

SEQ ID NO: 1856477 - RNA, 15 nt, Human
gcaaucaaaucugcu

SEQ ID NO: 1856478 - RNA, 14 nt, Human
gcaaggucauuuuu

SEQ ID NO: 1856479 - RNA, 23 nt, Human
gcaaugaccuuucaauaggaaaa

SEQ ID NO: 1856480 - RNA, 13 nt, Human
gcaaugcuggcug

SEQ ID NO: 1856481 - RNA, 14 nt, Human
gcaaugcuggcugu

SEQ ID NO: 1856482 - RNA, 22 nt, Human
gcaaugcuggcuguuggcuggg

SEQ ID NO: 1856483 - RNA, 23 nt, Human
gcaaugcuggcuguuggcugggg

SEQ ID NO: 1856484 - RNA, 11 nt, Human
gcaaggcuguc

SEQ ID NO: 1856485 - RNA, 13 nt, Human
gcaaggcugucaa

SEQ ID NO: 1856486 - RNA, 18 nt, Human
gcaaggagauuuacaacu

SEQ ID NO: 1856487 - RNA, 13 nt, Human
gcaaagcccagcu

SEQ ID NO: 1856488 - RNA, 21 nt, Human
gcaaagcccagcuugaaaccu

SEQ ID NO: 1856489 - RNA, 15 nt, Human
gauuuuugucuugug

SEQ ID NO: 1856490 - RNA, 16 nt, Human
gcaaaguaucccuacu

SEQ ID NO: 1856491 - RNA, 22 nt, Human
gcaagacgcugugcugcccugc

SEQ ID NO: 1856492 - RNA, 21 nt, Human
gcaagacgcugugcugcccug

SEQ ID NO: 1856493 - RNA, 20 nt, Human
gcaagacgcugugcugcccu

SEQ ID NO: 1856494 - RNA, 14 nt, Human
gcaagacgcugugc

SEQ ID NO: 1856495 - RNA, 23 nt, Human
gcaagacgcugugcugcccugcc

SEQ ID NO: 1856496 - RNA, 17 nt, Human
gcaagaauugaagcagg

SEQ ID NO: 1856497 - RNA, 14 nt, Human
gccucucucaggcc

SEQ ID NO: 1856498 - RNA, 13 nt, Human
gccucucucaggc

SEQ ID NO: 1856499 - RNA, 16 nt, Human
gccucucucaggccaa

SEQ ID NO: 1856500 - RNA, 17 nt, Human
gccucugacacacagcu

SEQ ID NO: 1856501 - RNA, 18 nt, Human
gccucugacacacagcuc

SEQ ID NO: 1856502 - RNA, 14 nt, Human
gccucugcacuccc

SEQ ID NO: 1856503 - RNA, 19 nt, Human
gccucugacacacagcucu

SEQ ID NO: 1856504 - RNA, 20 nt, Human
gccucugacacacagcucug

SEQ ID NO: 1856505 - RNA, 21 nt, Human
gccucugacacacagcucugu

SEQ ID NO: 1856506 - RNA, 18 nt, Human
gccucugccucugacaca

SEQ ID NO: 1856507 - RNA, 15 nt, Human
gccucugcacucccc

SEQ ID NO: 1856508 - RNA, 12 nt, Human
gccucugccucu

SEQ ID NO: 1856509 - RNA, 13 nt, Human
gccucugccucug

SEQ ID NO: 1856510 - RNA, 15 nt, Human
gccugcaagggagug

SEQ ID NO: 1856511 - RNA, 13 nt, Human
gccugcaagggag

SEQ ID NO: 1856512 - RNA, 18 nt, Human
gccucacaguccuuacca

SEQ ID NO: 1856513 - RNA, 21 nt, Human
gccucacaguccuuaccagca

SEQ ID NO: 1856514 - RNA, 15 nt, Human
gccucagcauccugg

SEQ ID NO: 1856515 - RNA, 16 nt, Human
gccucagcauccuggc

SEQ ID NO: 1856516 - RNA, 18 nt, Human
gccucccaaagugcuggg

SEQ ID NO: 1856517 - RNA, 13 nt, Human
gccucccaacuca

SEQ ID NO: 1856518 - RNA, 19 nt, Human
gccucccaaagugcuggga

SEQ ID NO: 1856519 - RNA, 19 nt, Human
gccucccaacucaccccag

SEQ ID NO: 1856520 - RNA, 18 nt, Human
gccucccaacucacccca

SEQ ID NO: 1856521 - RNA, 17 nt, Human
gccucccaacucacccc

SEQ ID NO: 1856522 - RNA, 16 nt, Human
gccucccaacucaccc

SEQ ID NO: 1856523 - RNA, 16 nt, Human
gccucccaucacccgc

SEQ ID NO: 1856524 - RNA, 14 nt, Human
gccucccaucaccc

SEQ ID NO: 1856525 - RNA, 17 nt, Human
gccucccaucacccgcu

SEQ ID NO: 1856526 - RNA, 20 nt, Human
gccucccgaguagcugggac

SEQ ID NO: 1856527 - RNA, 18 nt, Human
gccucccgaguagcuggg

SEQ ID NO: 1856528 - RNA, 19 nt, Human
gccucccgaguagcuggga

SEQ ID NO: 1856529 - RNA, 17 nt, Human
gccgucuaccugagggg

SEQ ID NO: 1856530 - RNA, 16 nt, Human
gccgucuaccugaggg

SEQ ID NO: 1856531 - RNA, 15 nt, Human
gccgucuaccugagg

SEQ ID NO: 1856532 - RNA, 20 nt, Human
gccguguaaccauggaccca

SEQ ID NO: 1856533 - RNA, 22 nt, Human
gccguggcuucccgcucagccc

SEQ ID NO: 1856534 - RNA, 21 nt, Human
gccguggcuucccgcucagcc

SEQ ID NO: 1856535 - RNA, 19 nt, Human
gccgugccuucagcucuac

SEQ ID NO: 1856536 - RNA, 17 nt, Human
gccgugccuucagcucu

SEQ ID NO: 1856537 - RNA, 15 nt, Human
gccgugccuucagcu

SEQ ID NO: 1856538 - RNA, 14 nt, Human
gccgugccuucagc

SEQ ID NO: 1856539 - RNA, 19 nt, Human
gccguggcuucccgcucag

SEQ ID NO: 1856540 - RNA, 22 nt, Human
gccuaugugcaugcagcaucua

SEQ ID NO: 1856541 - RNA, 18 nt, Human
gccucaaccuccugggcu

SEQ ID NO: 1856542 - RNA, 19 nt, Human
gccucaaccuccugggcua

SEQ ID NO: 1856543 - RNA, 17 nt, Human
gccucacaguccuuacc

SEQ ID NO: 1856544 - RNA, 13 nt, Human
gccucacaguccu

SEQ ID NO: 1856545 - RNA, 13 nt, Human
gccgcagcccugc

SEQ ID NO: 1856546 - RNA, 12 nt, Human
gccgcagcccug

SEQ ID NO: 1856547 - RNA, 11 nt, Human
gccgcagcccu

SEQ ID NO: 1856548 - RNA, 22 nt, Human
gccgagaucacgccacugcacu

SEQ ID NO: 1856549 - RNA, 20 nt, Human
gccgagaucacgccacugca

SEQ ID NO: 1856550 - RNA, 21 nt, Human
gccgagaucacgccacugcac

SEQ ID NO: 1856551 - RNA, 18 nt, Human
gccgggaccccgagccug

SEQ ID NO: 1856552 - RNA, 23 nt, Human
gccgggaccccgagccuggcucc

SEQ ID NO: 1856553 - RNA, 19 nt, Human
gccgggaccccgagccugg

SEQ ID NO: 1856554 - RNA, 21 nt, Human
gccgggcgcgguggcucacgc

SEQ ID NO: 1856555 - RNA, 20 nt, Human
gccgggcgugguggugagug

SEQ ID NO: 1856556 - RNA, 18 nt, Human
gcccugcuuugggcugcc

SEQ ID NO: 1856557 - RNA, 16 nt, Human
gcccugcuuugggcug

SEQ ID NO: 1856558 - RNA, 18 nt, Human
gcccuucucuccagcccc

SEQ ID NO: 1856559 - RNA, 17 nt, Human
gcccuucucuccagccc

SEQ ID NO: 1856560 - RNA, 16 nt, Human
gcccuucucuccagcc

SEQ ID NO: 1856561 - RNA, 14 nt, Human
gcccuucucuccag

SEQ ID NO: 1856562 - RNA, 15 nt, Human
gcgggucacaggagg

SEQ ID NO: 1856563 - RNA, 13 nt, Human
gcgggucacagga

SEQ ID NO: 1856564 - RNA, 15 nt, Human
gcggacagccacggc

SEQ ID NO: 1856565 - RNA, 20 nt, Human
gcgggucacaggagggaggg

SEQ ID NO: 1856566 - RNA, 19 nt, Human
gcgggucacaggagggagg

SEQ ID NO: 1856567 - RNA, 19 nt, Human
gcgucucauacucaccuca

SEQ ID NO: 1856568 - RNA, 11 nt, Human
gcggacagcca

SEQ ID NO: 1856569 - RNA, 13 nt, Human
gcggacagccacg

SEQ ID NO: 1856570 - RNA, 15 nt, Human
gcgccuacaggagug

SEQ ID NO: 1856571 - RNA, 22 nt, Human
gcgacagugagacucugucuca

SEQ ID NO: 1856572 - RNA, 12 nt, Human
gcgacagugaga

SEQ ID NO: 1856573 - RNA, 19 nt, Human
gcuagaacucccuuucaac

SEQ ID NO: 1856574 - RNA, 16 nt, Human
gcuaccuuuguauucu

SEQ ID NO: 1856575 - RNA, 20 nt, Human
gcuaccuuuguauucucucc

SEQ ID NO: 1856576 - RNA, 16 nt, Human
gcuaggaacacuccuu

SEQ ID NO: 1856577 - RNA, 22 nt, Human
gcuaggaaauccaggguggugg

SEQ ID NO: 1856578 - RNA, 15 nt, Human
gcuaggaacacuccu

SEQ ID NO: 1856579 - RNA, 19 nt, Human
gcuaggaaauccagggugg

SEQ ID NO: 1856580 - RNA, 14 nt, Human
gcuacacaggggaa

SEQ ID NO: 1856581 - RNA, 13 nt, Human
gcuacacacugca

SEQ ID NO: 1856582 - RNA, 20 nt, Human
gcuacacacugcauguuugu

SEQ ID NO: 1856583 - RNA, 20 nt, Human
gcuaagagggagggagggcu

SEQ ID NO: 1856584 - RNA, 13 nt, Human
gcuaagagggagg

SEQ ID NO: 1856585 - RNA, 20 nt, Human
gccuuacacaaugguuuucu

SEQ ID NO: 1856586 - RNA, 21 nt, Human
gccuuacacaaugguuuucuu

SEQ ID NO: 1856587 - RNA, 18 nt, Human
gccuuacccucauguucu

SEQ ID NO: 1856588 - RNA, 13 nt, Human
gccuguuuaagag

SEQ ID NO: 1856589 - RNA, 12 nt, Human
gccuguuuaaga

SEQ ID NO: 1856590 - RNA, 19 nt, Human
gccuuagaagucacacagu

SEQ ID NO: 1856591 - RNA, 17 nt, Human
gccuuagaagucacaca

SEQ ID NO: 1856592 - RNA, 18 nt, Human
gccuuagaagucacacag

SEQ ID NO: 1856593 - RNA, 14 nt, Human
gccuuauggaacac

SEQ ID NO: 1856594 - RNA, 10 nt, Human
gccuuaugga

SEQ ID NO: 1856595 - RNA, 13 nt, Human
gccugguggcagc

SEQ ID NO: 1856596 - RNA, 14 nt, Human
gccugguggcagcu

SEQ ID NO: 1856597 - RNA, 18 nt, Human
gccugguggcagcugcgg

SEQ ID NO: 1856598 - RNA, 19 nt, Human
gccugguggcagcugcggu

SEQ ID NO: 1856599 - RNA, 21 nt, Human
gccugguggcagcugcggucc

SEQ ID NO: 1856600 - RNA, 22 nt, Human
gccugggggcugggcagaggaa

SEQ ID NO: 1856601 - RNA, 13 nt, Human
gccuuuggcuuca

SEQ ID NO: 1856602 - RNA, 23 nt, Human
gcgacaaugcaaaccaucauuga

SEQ ID NO: 1856603 - RNA, 22 nt, Human
gccuuuggaaacagcucgacuu

SEQ ID NO: 1856604 - RNA, 20 nt, Human
gccuuauggaacacucugag

SEQ ID NO: 1856605 - RNA, 19 nt, Human
gccuuauggaacacucuga

SEQ ID NO: 1856606 - RNA, 18 nt, Human
gccuuauggaacacucug

SEQ ID NO: 1856607 - RNA, 16 nt, Human
gccuuauggaacacuc

SEQ ID NO: 1856608 - RNA, 12 nt, Human
gccuuccagggg

SEQ ID NO: 1856609 - RNA, 13 nt, Human
gccuucaucuccc

SEQ ID NO: 1856610 - RNA, 21 nt, Human
gccuucagggagugagggauu

SEQ ID NO: 1856611 - RNA, 13 nt, Human
gccuucagggagu

SEQ ID NO: 1856612 - RNA, 22 nt, Human
gccuucgauacaccgggccugg

SEQ ID NO: 1856613 - RNA, 18 nt, Human
gccuucgauacaccgggc

SEQ ID NO: 1856614 - RNA, 23 nt, Human
gccuucgauacaccgggccugga

SEQ ID NO: 1856615 - RNA, 16 nt, Human
gccuuccagggguggg

SEQ ID NO: 1856616 - RNA, 15 nt, Human
gccuuccaggggugg

SEQ ID NO: 1856617 - RNA, 21 nt, Human
gccuuccaggggugggacacc

SEQ ID NO: 1856618 - RNA, 17 nt, Human
gccccuguucuggcaga

SEQ ID NO: 1856619 - RNA, 15 nt, Human
gcccgacagccuggc

SEQ ID NO: 1856620 - RNA, 14 nt, Human
gcccgacagccugg

SEQ ID NO: 1856621 - RNA, 12 nt, Human
gcccgacagccu

SEQ ID NO: 1856622 - RNA, 18 nt, Human
gccccucagggucccugg

SEQ ID NO: 1856623 - RNA, 16 nt, Human
gccccucagggucccu

SEQ ID NO: 1856624 - RNA, 15 nt, Human
gccccgaggccuucu

SEQ ID NO: 1856625 - RNA, 14 nt, Human
gccccucagggucc

SEQ ID NO: 1856626 - RNA, 18 nt, Human
gccccgaggccuucucug

SEQ ID NO: 1856627 - RNA, 22 nt, Human
gccccgaggccuucucugaagg

SEQ ID NO: 1856628 - RNA, 14 nt, Human
gcccugcagagggc

SEQ ID NO: 1856629 - RNA, 13 nt, Human
gcccugcagaggg

SEQ ID NO: 1856630 - RNA, 15 nt, Human
gcccugcagagggca

SEQ ID NO: 1856631 - RNA, 16 nt, Human
gcccugcagagggcac

SEQ ID NO: 1856632 - RNA, 14 nt, Human
gcccugagcuuucu

SEQ ID NO: 1856633 - RNA, 19 nt, Human
gcccucugcccacucccug

SEQ ID NO: 1856634 - RNA, 18 nt, Human
gcccucugcccacucccu

SEQ ID NO: 1856635 - RNA, 16 nt, Human
gcccucugcccacucc

SEQ ID NO: 1856636 - RNA, 13 nt, Human
gcccucugcccac

SEQ ID NO: 1856637 - RNA, 21 nt, Human
gcccucccugccccucccuuc

SEQ ID NO: 1856638 - RNA, 23 nt, Human
gcccuccaagaccuucuccuuca

SEQ ID NO: 1856639 - RNA, 22 nt, Human
gcccuccaagaccuucuccuuc

SEQ ID NO: 1856640 - RNA, 21 nt, Human
gcccuccaucuaaacugcccc

SEQ ID NO: 1856641 - RNA, 20 nt, Human
gcccuccaucuaaacugccc

SEQ ID NO: 1856642 - RNA, 21 nt, Human
gcccuccaagaccuucuccuu

SEQ ID NO: 1856643 - RNA, 19 nt, Human
gcccuccaagaccuucucc

SEQ ID NO: 1856644 - RNA, 22 nt, Human
gccccauccucuguacagagcc

SEQ ID NO: 1856645 - RNA, 14 nt, Human
gccccauccucugu

SEQ ID NO: 1856646 - RNA, 13 nt, Human
gccccauccucug

SEQ ID NO: 1856647 - RNA, 15 nt, Human
gccccauucugccug

SEQ ID NO: 1856648 - RNA, 14 nt, Human
gccccauucugccu

SEQ ID NO: 1856649 - RNA, 15 nt, Human
gccccagugcccaca

SEQ ID NO: 1856650 - RNA, 13 nt, Human
gccccagugccca

SEQ ID NO: 1856651 - RNA, 14 nt, Human
gccccagugcccac

SEQ ID NO: 1856652 - RNA, 21 nt, Human
gccccauaauuuuuuuuuucc

SEQ ID NO: 1856653 - RNA, 19 nt, Human
gccccaguuguauuuauuu

SEQ ID NO: 1856654 - RNA, 18 nt, Human
gccccaucccaaacccuu

SEQ ID NO: 1856655 - RNA, 12 nt, Human
gccccagugccc

SEQ ID NO: 1856656 - RNA, 13 nt, Human
gcccaggccuccu

SEQ ID NO: 1856657 - RNA, 20 nt, Human
gcccaggcuggagugcaaug

SEQ ID NO: 1856658 - RNA, 15 nt, Human
gcccaggcuggagug

SEQ ID NO: 1856659 - RNA, 21 nt, Human
gcccagagaggguggugaccu

SEQ ID NO: 1856660 - RNA, 23 nt, Human
gcccaggccccugccacccuggg

SEQ ID NO: 1856661 - RNA, 12 nt, Human
gcccaggcuggc

SEQ ID NO: 1856662 - RNA, 16 nt, Human
gccaggagccuccugc

SEQ ID NO: 1856663 - RNA, 14 nt, Human
gccaggagccuccu

SEQ ID NO: 1856664 - RNA, 20 nt, Human
gccaggagccuccugcccuu

SEQ ID NO: 1856665 - RNA, 19 nt, Human
gccaggagccuccugcccu

SEQ ID NO: 1856666 - RNA, 15 nt, Human
gccaggaagccagca

SEQ ID NO: 1856667 - RNA, 13 nt, Human
gccagcuggagaa

SEQ ID NO: 1856668 - RNA, 14 nt, Human
gccaggaagccagc

SEQ ID NO: 1856669 - RNA, 13 nt, Human
gccaggaagccag

SEQ ID NO: 1856670 - RNA, 12 nt, Human
gccaggaagcca

SEQ ID NO: 1856671 - RNA, 20 nt, Human
gccagcugcuugggcuucau

SEQ ID NO: 1856672 - RNA, 18 nt, Human
gccagcugcuugggcuuc

SEQ ID NO: 1856673 - RNA, 17 nt, Human
gccagcugcuugggcuu

SEQ ID NO: 1856674 - RNA, 14 nt, Human
gccagaugcaccag

SEQ ID NO: 1856675 - RNA, 17 nt, Human
gccagagggagugacag

SEQ ID NO: 1856676 - RNA, 22 nt, Human
gccagccgagauagccaaggcc

SEQ ID NO: 1856677 - RNA, 13 nt, Human
gccagauuucacu

SEQ ID NO: 1856678 - RNA, 24 nt, Human
gccagauucuuuccugaggcuggg

SEQ ID NO: 1856679 - RNA, 20 nt, Human
gccagauucuuuccugaggc

SEQ ID NO: 1856680 - RNA, 15 nt, Human
gccagaugcaccagc

SEQ ID NO: 1856681 - RNA, 24 nt, Human
gccaaggccaaaggaagcacaugc

SEQ ID NO: 1856682 - RNA, 20 nt, Human
gccacuccagaccccuggcu

SEQ ID NO: 1856683 - RNA, 21 nt, Human
gccacuccagaccccuggcuu

SEQ ID NO: 1856684 - RNA, 20 nt, Human
gccaaggccaaaggaagcac

SEQ ID NO: 1856685 - RNA, 22 nt, Human
gccacuccagaccccuggcuuu

SEQ ID NO: 1856686 - RNA, 20 nt, Human
gccacugcaccgggccacag

SEQ ID NO: 1856687 - RNA, 21 nt, Human
gccacugcaccgggccacaga

SEQ ID NO: 1856688 - RNA, 22 nt, Human
gccagagacacaagccuucggc

SEQ ID NO: 1856689 - RNA, 21 nt, Human
gccagagacacaagccuucgg

SEQ ID NO: 1856690 - RNA, 22 nt, Human
gccacugcaccgggccacagag

SEQ ID NO: 1856691 - RNA, 24 nt, Human
gcccaccuggccucugcacucccc

SEQ ID NO: 1856692 - RNA, 21 nt, Human
gcccaccuggccucugcacuc

SEQ ID NO: 1856693 - RNA, 20 nt, Human
gcccaccuggccucugcacu

SEQ ID NO: 1856694 - RNA, 17 nt, Human
gcccaccuggccucugc

SEQ ID NO: 1856695 - RNA, 16 nt, Human
gcccaccuggccucug

SEQ ID NO: 1856696 - RNA, 15 nt, Human
gcccaccuggccucu

SEQ ID NO: 1856697 - RNA, 14 nt, Human
gcccacuucugcca

SEQ ID NO: 1856698 - RNA, 13 nt, Human
gcccaccuuggcu

SEQ ID NO: 1856699 - RNA, 15 nt, Human
gcccaccuuggcuca

SEQ ID NO: 1856700 - RNA, 16 nt, Human
gcccaccuuggcucaa

SEQ ID NO: 1856701 - RNA, 17 nt, Human
gcccaccuuggcucaag

SEQ ID NO: 1856702 - RNA, 20 nt, Human
gcccacauagugaugguucc

SEQ ID NO: 1856703 - RNA, 24 nt, Human
gcccaaccugcucuccucuugcca

SEQ ID NO: 1856704 - RNA, 22 nt, Human
gcccaagaauagaugcugacug

SEQ ID NO: 1856705 - RNA, 21 nt, Human
gcccaagaauagaugcugacu

SEQ ID NO: 1856706 - RNA, 24 nt, Human
gccaugcuccuggcccacugcauc

SEQ ID NO: 1856707 - RNA, 15 nt, Human
gccaugggccuccug

SEQ ID NO: 1856708 - RNA, 16 nt, Human
gccaugggccuccugu

SEQ ID NO: 1856709 - RNA, 14 nt, Human
gccaugcuccuggc

SEQ ID NO: 1856710 - RNA, 14 nt, Human
gccauccagguuca

SEQ ID NO: 1856711 - RNA, 17 nt, Human
gccaggcugggucgccc

SEQ ID NO: 1856712 - RNA, 23 nt, Human
gccaggcugggucgcccuggacu

SEQ ID NO: 1856713 - RNA, 13 nt, Human
gccaggcuggucu

SEQ ID NO: 1856714 - RNA, 23 nt, Human
gccaguaaaugggggugcauuug

SEQ ID NO: 1856715 - RNA, 15 nt, Human
gccaggcuggucuca

SEQ ID NO: 1856716 - RNA, 21 nt, Human
gccagucaccccggccaccug

SEQ ID NO: 1856717 - RNA, 18 nt, Human
uuuuuaaagacuuuuaug

SEQ ID NO: 1856718 - RNA, 13 nt, Human
uuuuuaaagacuu

SEQ ID NO: 1856719 - RNA, 12 nt, Human
uuuuuaaagacu

SEQ ID NO: 1856720 - RNA, 12 nt, Human
uuuuuaaagaaa

SEQ ID NO: 1856721 - RNA, 20 nt, Human
uuuuuaaagaaaaguuuugu

SEQ ID NO: 1856722 - RNA, 17 nt, Human
uuuuuaaagacagaguc

SEQ ID NO: 1856723 - RNA, 13 nt, Human
uuuugucuugugu

SEQ ID NO: 1856724 - RNA, 16 nt, Human
uuuugucauauaagau

SEQ ID NO: 1856725 - RNA, 19 nt, Human
uuuuguagagccagggucu

SEQ ID NO: 1856726 - RNA, 18 nt, Human
uuuucuaaaguaaaaaca

SEQ ID NO: 1856727 - RNA, 14 nt, Human
uuuuggcugcugaa

SEQ ID NO: 1856728 - RNA, 15 nt, Human
uuuuggucuguguga

SEQ ID NO: 1856729 - RNA, 20 nt, Human
uuuugacaaggggcaguggu

SEQ ID NO: 1856730 - RNA, 12 nt, Human
uuuuuuguuuca

SEQ ID NO: 1856731 - RNA, 13 nt, Human
uuuuuuguuucau

SEQ ID NO: 1856732 - RNA, 19 nt, Human
uuuuuccuucagugccuua

SEQ ID NO: 1856733 - RNA, 11 nt, Human
uuuuuccuuuu

SEQ ID NO: 1856734 - RNA, 11 nt, Human
uuuuuaaaugc

SEQ ID NO: 1856735 - RNA, 11 nt, Human
uuuuuccuuca

SEQ ID NO: 1856736 - RNA, 11 nt, Human
uuuuaaaugca

SEQ ID NO: 1856737 - RNA, 12 nt, Human
uuuuaaaugcac

SEQ ID NO: 1856738 - RNA, 21 nt, Human
uuuuaaaugcaccuggaauau

SEQ ID NO: 1856739 - RNA, 17 nt, Human
uuuuaaagaaugcucuu

SEQ ID NO: 1856740 - RNA, 14 nt, Human
uuuuaaagaaaagu

SEQ ID NO: 1856741 - RNA, 18 nt, Human
uuuuaaagacuuuuauga

SEQ ID NO: 1856742 - RNA, 15 nt, Human
uuuuaaagaaaaguu

SEQ ID NO: 1856743 - RNA, 21 nt, Human
uuuguucuggcucuuccaggc

SEQ ID NO: 1856744 - RNA, 14 nt, Human
uuuggaauuuugug

SEQ ID NO: 1856745 - RNA, 15 nt, Human
uuugcuuugugauuu

SEQ ID NO: 1856746 - RNA, 16 nt, Human
uuugcuuugugauuuu

SEQ ID NO: 1856747 - RNA, 15 nt, Human
uuugcaucugaaaau

SEQ ID NO: 1856748 - RNA, 23 nt, Human
uuuggugaacauugcaauagaaa

SEQ ID NO: 1856749 - RNA, 22 nt, Human
uuuggugaacauugcaauagaa

SEQ ID NO: 1856750 - RNA, 21 nt, Human
uuuggaauuuugugcccccau

SEQ ID NO: 1856751 - RNA, 20 nt, Human
uuuggagucagacagaugug

SEQ ID NO: 1856752 - RNA, 18 nt, Human
uuucuuagggaaggauac

SEQ ID NO: 1856753 - RNA, 23 nt, Human
uuucuuagggaaggauacaaaag

SEQ ID NO: 1856754 - RNA, 12 nt, Human
uuucuucucccu

SEQ ID NO: 1856755 - RNA, 16 nt, Human
uuucuuccucugcuga

SEQ ID NO: 1856756 - RNA, 14 nt, Human
uuucuuccucugcu

SEQ ID NO: 1856757 - RNA, 13 nt, Human
uuucuucucccuc

SEQ ID NO: 1856758 - RNA, 13 nt, Human
uuucuuccucugc

SEQ ID NO: 1856759 - RNA, 11 nt, Human
uuucuuccucu

SEQ ID NO: 1856760 - RNA, 14 nt, Human
uuugaacucuucaa

SEQ ID NO: 1856761 - RNA, 15 nt, Human
uuugaacugauaaag

SEQ ID NO: 1856762 - RNA, 17 nt, Human
uuugaacugauaaagau

SEQ ID NO: 1856763 - RNA, 19 nt, Human
uuugaacugauaaagauga

SEQ ID NO: 1856764 - RNA, 22 nt, Human
uuugaagaugccgcauuuggau

SEQ ID NO: 1856765 - RNA, 18 nt, Human
uuugaaucaucaagucuu

SEQ ID NO: 1856766 - RNA, 20 nt, Human
uuucuguucuuucuggcuau

SEQ ID NO: 1856767 - RNA, 20 nt, Human
uuucuaaaggcuaccuuugu

SEQ ID NO: 1856768 - RNA, 21 nt, Human
uuucuaaaggcuaccuuugua

SEQ ID NO: 1856769 - RNA, 14 nt, Human
uuucuaaaguaaaa

SEQ ID NO: 1856770 - RNA, 12 nt, Human
uuucuaaaguaa

SEQ ID NO: 1856771 - RNA, 23 nt, Human
uuucuacucgaguuacagacaaa

SEQ ID NO: 1856772 - RNA, 16 nt, Human
uuuccugaggcugggc

SEQ ID NO: 1856773 - RNA, 13 nt, Human
uuuccugcccugg

SEQ ID NO: 1856774 - RNA, 12 nt, Human
uuuccugcccug

SEQ ID NO: 1856775 - RNA, 14 nt, Human
uuaccacagacaua

SEQ ID NO: 1856776 - RNA, 17 nt, Human
uuaccacagacauacua

SEQ ID NO: 1856777 - RNA, 23 nt, Human
guagggcgggaggauguucuggg

SEQ ID NO: 1856778 - RNA, 21 nt, Human
guagggcgggaggauguucug

SEQ ID NO: 1856779 - RNA, 22 nt, Human
guagggcgggaggauguucugg

SEQ ID NO: 1856780 - RNA, 16 nt, Human
guagggcgggaggaug

SEQ ID NO: 1856781 - RNA, 15 nt, Human
guagagugugccuga

SEQ ID NO: 1856782 - RNA, 17 nt, Human
guauaauucacauugua

SEQ ID NO: 1856783 - RNA, 14 nt, Human
guagucaggugccu

SEQ ID NO: 1856784 - RNA, 14 nt, Human
guagggugggccuu

SEQ ID NO: 1856785 - RNA, 16 nt, Human
guaggguuauaauaau

SEQ ID NO: 1856786 - RNA, 22 nt, Human
guagggugggccuucagggagu

SEQ ID NO: 1856787 - RNA, 17 nt, Human
guagggugggccuucag

SEQ ID NO: 1856788 - RNA, 17 nt, Human
guauguugaagccuuug

SEQ ID NO: 1856789 - RNA, 21 nt, Human
guaugaucacggcucacugca

SEQ ID NO: 1856790 - RNA, 17 nt, Human
guaugaggcauuuguuu

SEQ ID NO: 1856791 - RNA, 20 nt, Human
guaugaggcauuuguuugaa

SEQ ID NO: 1856792 - RNA, 20 nt, Human
guaugaucacggcucacugc

SEQ ID NO: 1856793 - RNA, 23 nt, Human
guaugaaagauggcugugccucu

SEQ ID NO: 1856794 - RNA, 22 nt, Human
guaugaaagauggcugugccuc

SEQ ID NO: 1856795 - RNA, 19 nt, Human
guaucuggugacuuuccuc

SEQ ID NO: 1856796 - RNA, 12 nt, Human
guaucuggugac

SEQ ID NO: 1856797 - RNA, 12 nt, Human
guaucugagcag

SEQ ID NO: 1856798 - RNA, 19 nt, Human
guaugaauaaagacaccua

SEQ ID NO: 1856799 - RNA, 18 nt, Human
guaugaauaaagacaccu

SEQ ID NO: 1856800 - RNA, 13 nt, Human
guaugaggcauuu

SEQ ID NO: 1856801 - RNA, 15 nt, Human
guaugaggcauuugu

SEQ ID NO: 1856802 - RNA, 15 nt, Human
guauagaaaugcugg

SEQ ID NO: 1856803 - RNA, 22 nt, Human
guauagaaaugcugguuuuuca

SEQ ID NO: 1856804 - RNA, 14 nt, Human
guauagaaaugcug

SEQ ID NO: 1856805 - RNA, 23 nt, Human
guauagaaaugcugguuuuucag

SEQ ID NO: 1856806 - RNA, 22 nt, Human
guauaugucaagccauaauugu

SEQ ID NO: 1856807 - RNA, 16 nt, Human
guauauguugggugca

SEQ ID NO: 1856808 - RNA, 21 nt, Human
guauaugucucaggucccugc

SEQ ID NO: 1856809 - RNA, 15 nt, Human
guauaugucucaggu

SEQ ID NO: 1856810 - RNA, 13 nt, Human
guauaugucucag

SEQ ID NO: 1856811 - RNA, 20 nt, Human
gucccuaauaaagcugugug

SEQ ID NO: 1856812 - RNA, 18 nt, Human
gucccuaauaaagcugug

SEQ ID NO: 1856813 - RNA, 23 nt, Human
gucccuaccgagucucuucucca

SEQ ID NO: 1856814 - RNA, 22 nt, Human
gucccuaccgagucucuucucc

SEQ ID NO: 1856815 - RNA, 21 nt, Human
gucccuaccgagucucuucuc

SEQ ID NO: 1856816 - RNA, 16 nt, Human
gucccugcacuugcag

SEQ ID NO: 1856817 - RNA, 19 nt, Human
gucccugcacuugcagacu

SEQ ID NO: 1856818 - RNA, 21 nt, Human
gucccugcacuugcagacucu

SEQ ID NO: 1856819 - RNA, 17 nt, Human
guccccaccgcagacag

SEQ ID NO: 1856820 - RNA, 17 nt, Human
gucccuaauaaagcugu

SEQ ID NO: 1856821 - RNA, 16 nt, Human
gucccuaauaaagcug

SEQ ID NO: 1856822 - RNA, 19 nt, Human
gucccaggcugagccucag

SEQ ID NO: 1856823 - RNA, 18 nt, Human
gucccaggcugagccuca

SEQ ID NO: 1856824 - RNA, 21 nt, Human
gucccaggcugagccucaguc

SEQ ID NO: 1856825 - RNA, 17 nt, Human
gucccaggcugagccuc

SEQ ID NO: 1856826 - RNA, 16 nt, Human
gucccaggcugagccu

SEQ ID NO: 1856827 - RNA, 15 nt, Human
gucccaggcugagcc

SEQ ID NO: 1856828 - RNA, 23 nt, Human
gucccaccuuggcugcagggagu

SEQ ID NO: 1856829 - RNA, 13 nt, Human
guccacccaggag

SEQ ID NO: 1856830 - RNA, 12 nt, Human
guccacccagga

SEQ ID NO: 1856831 - RNA, 23 nt, Human
guccacccaggagccccgaggcc

SEQ ID NO: 1856832 - RNA, 21 nt, Human
gucccaccuuggcugcaggga

SEQ ID NO: 1856833 - RNA, 16 nt, Human
guccacaguggaacca

SEQ ID NO: 1856834 - RNA, 19 nt, Human
guccacaguggaaccagcc

SEQ ID NO: 1856835 - RNA, 21 nt, Human
guccacaguggaaccagccca

SEQ ID NO: 1856836 - RNA, 19 nt, Human
guauuuuguuuuugucuua

SEQ ID NO: 1856837 - RNA, 15 nt, Human
gucaagugaaaaagg

SEQ ID NO: 1856838 - RNA, 15 nt, Human
gucaaugcagccccc

SEQ ID NO: 1856839 - RNA, 14 nt, Human
guauuuuacuaaua

SEQ ID NO: 1856840 - RNA, 22 nt, Human
guauuaaguuguuaauaaaagu

SEQ ID NO: 1856841 - RNA, 13 nt, Human
guauuuuaaucac

SEQ ID NO: 1856842 - RNA, 18 nt, Human
gucaccccggccaccugc

SEQ ID NO: 1856843 - RNA, 17 nt, Human
gucaccccggccaccug

SEQ ID NO: 1856844 - RNA, 22 nt, Human
gucaccccggccaccugcggug

SEQ ID NO: 1856845 - RNA, 16 nt, Human
gucacucuggcagcuc

SEQ ID NO: 1856846 - RNA, 14 nt, Human
gucacucuggcagc

SEQ ID NO: 1856847 - RNA, 13 nt, Human
gucacucuggcag

SEQ ID NO: 1856848 - RNA, 12 nt, Human
gucacucuggca

SEQ ID NO: 1856849 - RNA, 19 nt, Human
gucacucuggcagcucaga

SEQ ID NO: 1856850 - RNA, 17 nt, Human
gucacucuggcagcuca

SEQ ID NO: 1856851 - RNA, 22 nt, Human
gucacucuggcagcucagagag

SEQ ID NO: 1856852 - RNA, 15 nt, Human
gucagagccugcagu

SEQ ID NO: 1856853 - RNA, 16 nt, Human
gucagagccugcaguu

SEQ ID NO: 1856854 - RNA, 14 nt, Human
gucagagccugcag

SEQ ID NO: 1856855 - RNA, 22 nt, Human
gucagaugcugugcaaauguua

SEQ ID NO: 1856856 - RNA, 17 nt, Human
gucucugguuccucccc

SEQ ID NO: 1856857 - RNA, 16 nt, Human
gucucugguuccuccc

SEQ ID NO: 1856858 - RNA, 18 nt, Human
gucucuucuccacuggau

SEQ ID NO: 1856859 - RNA, 21 nt, Human
gucucuggauuauauuaugaa

SEQ ID NO: 1856860 - RNA, 13 nt, Human
gucucugagcauu

SEQ ID NO: 1856861 - RNA, 17 nt, Human
gucucuggaauuugaaa

SEQ ID NO: 1856862 - RNA, 19 nt, Human
gucucgugguaggacugua

SEQ ID NO: 1856863 - RNA, 15 nt, Human
gucucacucugucgc

SEQ ID NO: 1856864 - RNA, 16 nt, Human
gucucacucugucgcc

SEQ ID NO: 1856865 - RNA, 18 nt, Human
gucucacucugucgccca

SEQ ID NO: 1856866 - RNA, 19 nt, Human
gucucacucugucgcccag

SEQ ID NO: 1856867 - RNA, 22 nt, Human
gucucacucugucgcccagucu

SEQ ID NO: 1856868 - RNA, 16 nt, Human
gucgggcaugacacga

SEQ ID NO: 1856869 - RNA, 21 nt, Human
gucggaaaacaugcuacacac

SEQ ID NO: 1856870 - RNA, 19 nt, Human
guccuuaccagcagagcac

SEQ ID NO: 1856871 - RNA, 18 nt, Human
guccuuaccagcagagca

SEQ ID NO: 1856872 - RNA, 21 nt, Human
guccuuaccagcagagcaccu

SEQ ID NO: 1856873 - RNA, 14 nt, Human
gucccugccaaugg

SEQ ID NO: 1856874 - RNA, 11 nt, Human
gucccugccaa

SEQ ID NO: 1856875 - RNA, 15 nt, Human
gucccugccaaugga

SEQ ID NO: 1856876 - RNA, 18 nt, Human
gucucacuauguugccca

SEQ ID NO: 1856877 - RNA, 11 nt, Human
gucucacucug

SEQ ID NO: 1856878 - RNA, 19 nt, Human
gucucacuauguugcccag

SEQ ID NO: 1856879 - RNA, 18 nt, Human
gucgucaaagcugaaaug

SEQ ID NO: 1856880 - RNA, 21 nt, Human
gucuugaacuccuggccucaa

SEQ ID NO: 1856881 - RNA, 18 nt, Human
gucuugaacuccuggccu

SEQ ID NO: 1856882 - RNA, 20 nt, Human
gucuugaacuccuggccuca

SEQ ID NO: 1856883 - RNA, 16 nt, Human
gucuugcaauggcagc

SEQ ID NO: 1856884 - RNA, 17 nt, Human
gucuugcaauggcagcc

SEQ ID NO: 1856885 - RNA, 18 nt, Human
gucuugcaauggcagccu

SEQ ID NO: 1856886 - RNA, 19 nt, Human
gucuugcaauggcagccuu

SEQ ID NO: 1856887 - RNA, 21 nt, Human
gucuuaaaaaguggaaaaaua

SEQ ID NO: 1856888 - RNA, 16 nt, Human
gucuugaacuccuggc

SEQ ID NO: 1856889 - RNA, 17 nt, Human
gucuugaacuccuggcc

SEQ ID NO: 1856890 - RNA, 16 nt, Human
gucuuuuuucacuaca

SEQ ID NO: 1856891 - RNA, 23 nt, Human
gucuugcaauggcagccuuggca

SEQ ID NO: 1856892 - RNA, 20 nt, Human
gucuugcaauggcagccuug

SEQ ID NO: 1856893 - RNA, 21 nt, Human
gucuugcaauggcagccuugg

SEQ ID NO: 1856894 - RNA, 22 nt, Human
gucugugagaugcuagaacucc

SEQ ID NO: 1856895 - RNA, 23 nt, Human
gucugugagaugcuagaacuccc

SEQ ID NO: 1856896 - RNA, 18 nt, Human
gucugugccauuuuguau

SEQ ID NO: 1856897 - RNA, 15 nt, Human
gucugugagaugcua

SEQ ID NO: 1856898 - RNA, 16 nt, Human
gucugugagaugcuag

SEQ ID NO: 1856899 - RNA, 17 nt, Human
gucugugagaugcuaga

SEQ ID NO: 1856900 - RNA, 21 nt, Human
gucugugagaugcuagaacuc

SEQ ID NO: 1856901 - RNA, 14 nt, Human
gucuguucuuucca

SEQ ID NO: 1856902 - RNA, 17 nt, Human
gucuguucuuuccaaag

SEQ ID NO: 1856903 - RNA, 12 nt, Human
gugacagaggca

SEQ ID NO: 1856904 - RNA, 13 nt, Human
gugacagaggcag

SEQ ID NO: 1856905 - RNA, 14 nt, Human
gugacagaggcagc

SEQ ID NO: 1856906 - RNA, 12 nt, Human
gugaccucugcc

SEQ ID NO: 1856907 - RNA, 15 nt, Human
gugacagaggcagcc

SEQ ID NO: 1856908 - RNA, 13 nt, Human
gugaccucugccu

SEQ ID NO: 1856909 - RNA, 14 nt, Human
gugaccucugccug

SEQ ID NO: 1856910 - RNA, 15 nt, Human
gugaccucugccuga

SEQ ID NO: 1856911 - RNA, 21 nt, Human
gugaaugaugauccuaggcau

SEQ ID NO: 1856912 - RNA, 20 nt, Human
gugacaaggauugcuacugu

SEQ ID NO: 1856913 - RNA, 21 nt, Human
gugaacaaauuuacagagaca

SEQ ID NO: 1856914 - RNA, 22 nt, Human
gugauccacccaccucagccuc

SEQ ID NO: 1856915 - RNA, 19 nt, Human
gugauauaaguguguguuu

SEQ ID NO: 1856916 - RNA, 17 nt, Human
gugaguugauagcacag

SEQ ID NO: 1856917 - RNA, 15 nt, Human
gugauacaaugcugu

SEQ ID NO: 1856918 - RNA, 17 nt, Human
gugauacaaugcugugc

SEQ ID NO: 1856919 - RNA, 15 nt, Human
gugagccacugcacc

SEQ ID NO: 1856920 - RNA, 20 nt, Human
gugagccacugcaccgggcc

SEQ ID NO: 1856921 - RNA, 17 nt, Human
gugaggaugaaaaaaua

SEQ ID NO: 1856922 - RNA, 18 nt, Human
gugaggagcuugaaaccc

SEQ ID NO: 1856923 - RNA, 19 nt, Human
gugagccgagaucacgcca

SEQ ID NO: 1856924 - RNA, 20 nt, Human
gugcccaagaauagaugcug

SEQ ID NO: 1856925 - RNA, 14 nt, Human
gugccaugugccag

SEQ ID NO: 1856926 - RNA, 16 nt, Human
gugccaugugccaggu

SEQ ID NO: 1856927 - RNA, 15 nt, Human
gugccuucagcucua

SEQ ID NO: 1856928 - RNA, 21 nt, Human
gugcgaucuggguucacugca

SEQ ID NO: 1856929 - RNA, 14 nt, Human
gugcggccuuuggc

SEQ ID NO: 1856930 - RNA, 14 nt, Human
gugcgccuacagga

SEQ ID NO: 1856931 - RNA, 20 nt, Human
gugcaguggugcgaucuggg

SEQ ID NO: 1856932 - RNA, 23 nt, Human
gugcaguggugcgaucuggguuc

SEQ ID NO: 1856933 - RNA, 22 nt, Human
gugcauaccacuuuuguucuug

SEQ ID NO: 1856934 - RNA, 13 nt, Human
gugcaucucagcc

SEQ ID NO: 1856935 - RNA, 23 nt, Human
gugauccacccaccucagccucc

SEQ ID NO: 1856936 - RNA, 24 nt, Human
gugauccacccaccucagccuccc

SEQ ID NO: 1856937 - RNA, 13 nt, Human
gugauuuuuguaa

SEQ ID NO: 1856938 - RNA, 18 nt, Human
gugauuuuuguaauuuuu

SEQ ID NO: 1856939 - RNA, 12 nt, Human
gugauuuucauu

SEQ ID NO: 1856940 - RNA, 13 nt, Human
guguggagaagcg

SEQ ID NO: 1856941 - RNA, 21 nt, Human
guguggagaagcggcuggcag

SEQ ID NO: 1856942 - RNA, 12 nt, Human
guguguuuuaaa

SEQ ID NO: 1856943 - RNA, 15 nt, Human
guguguuucugaucu

SEQ ID NO: 1856944 - RNA, 17 nt, Human
gugugcucaggagcccu

SEQ ID NO: 1856945 - RNA, 16 nt, Human
gugugcucaggagccc

SEQ ID NO: 1856946 - RNA, 19 nt, Human
gugugcucaggagcccugg

SEQ ID NO: 1856947 - RNA, 18 nt, Human
gugugcucaggagcccug

SEQ ID NO: 1856948 - RNA, 12 nt, Human
gugugcucugau

SEQ ID NO: 1856949 - RNA, 15 nt, Human
gugugcucugaucau

SEQ ID NO: 1856950 - RNA, 22 nt, Human
gugugcucugaucauccacugu

SEQ ID NO: 1856951 - RNA, 21 nt, Human
gugucucuugguccugcugca

SEQ ID NO: 1856952 - RNA, 20 nt, Human
gugucucuugguccugcugc

SEQ ID NO: 1856953 - RNA, 19 nt, Human
gugucucuugguccugcug

SEQ ID NO: 1856954 - RNA, 18 nt, Human
gugucucuugguccugcu

SEQ ID NO: 1856955 - RNA, 22 nt, Human
gugucucuugguccugcugcag

SEQ ID NO: 1856956 - RNA, 20 nt, Human
gugugagucaccaagcccag

SEQ ID NO: 1856957 - RNA, 14 nt, Human
gugucucuuggucc

SEQ ID NO: 1856958 - RNA, 17 nt, Human
gugucucccuucauccu

SEQ ID NO: 1856959 - RNA, 19 nt, Human
gugucuaggcaggaccugu

SEQ ID NO: 1856960 - RNA, 15 nt, Human
gugucgggcaugaca

SEQ ID NO: 1856961 - RNA, 14 nt, Human
guguccggucccug

SEQ ID NO: 1856962 - RNA, 23 nt, Human
gugucccugcacuugcagacucu

SEQ ID NO: 1856963 - RNA, 13 nt, Human
guguucugugaua

SEQ ID NO: 1856964 - RNA, 18 nt, Human
guguuuuucauaaagcag

SEQ ID NO: 1856965 - RNA, 19 nt, Human
guguguuuuaaaaugagaa

SEQ ID NO: 1856966 - RNA, 16 nt, Human
guguguuuuaaaauga

SEQ ID NO: 1856967 - RNA, 13 nt, Human
guguguuuuaaaa

SEQ ID NO: 1856968 - RNA, 14 nt, Human
guguguuuuucaua

SEQ ID NO: 1856969 - RNA, 18 nt, Human
guguuaugacuccagaau

SEQ ID NO: 1856970 - RNA, 12 nt, Human
guguuacuaagu

SEQ ID NO: 1856971 - RNA, 14 nt, Human
guguuacuaaguuu

SEQ ID NO: 1856972 - RNA, 13 nt, Human
guuacagacaaag

SEQ ID NO: 1856973 - RNA, 17 nt, Human
guuacacauuuuucaga

SEQ ID NO: 1856974 - RNA, 16 nt, Human
guuacacuaaaaggug

SEQ ID NO: 1856975 - RNA, 15 nt, Human
guuacacuaaaaggu

SEQ ID NO: 1856976 - RNA, 16 nt, Human
guuacacauuuuucag

SEQ ID NO: 1856977 - RNA, 18 nt, Human
guuaacugagugccuuuu

SEQ ID NO: 1856978 - RNA, 22 nt, Human
guuaaaauaccagccaguaaau

SEQ ID NO: 1856979 - RNA, 19 nt, Human
guuaaacuuacuuaguguu

SEQ ID NO: 1856980 - RNA, 21 nt, Human
guguaaguauucuuauuuaau

SEQ ID NO: 1856981 - RNA, 19 nt, Human
guggugcgaucuggguuca

SEQ ID NO: 1856982 - RNA, 21 nt, Human
guggugagaggcauccaguau

SEQ ID NO: 1856983 - RNA, 14 nt, Human
guggugaccucugc

SEQ ID NO: 1856984 - RNA, 17 nt, Human
guggugaccucugccug

SEQ ID NO: 1856985 - RNA, 18 nt, Human
gugguccuaaucuucuga

SEQ ID NO: 1856986 - RNA, 17 nt, Human
guggucccaccccacac

SEQ ID NO: 1856987 - RNA, 16 nt, Human
guggucccaccccaca

SEQ ID NO: 1856988 - RNA, 15 nt, Human
guggucccaccccac

SEQ ID NO: 1856989 - RNA, 14 nt, Human
guggucccacccca

SEQ ID NO: 1856990 - RNA, 17 nt, Human
gugguagagugugccug

SEQ ID NO: 1856991 - RNA, 19 nt, Human
gugguaugaucacggcuca

SEQ ID NO: 1856992 - RNA, 14 nt, Human
gugguauagaaaug

SEQ ID NO: 1856993 - RNA, 22 nt, Human
guguacauggaauaacauguaa

SEQ ID NO: 1856994 - RNA, 17 nt, Human
guguacauggaauaaca

SEQ ID NO: 1856995 - RNA, 13 nt, Human
guguacagucuug

SEQ ID NO: 1856996 - RNA, 16 nt, Human
guguacagucuuguau

SEQ ID NO: 1856997 - RNA, 22 nt, Human
guguacagucuuguauuaaguu

SEQ ID NO: 1856998 - RNA, 13 nt, Human
gugucccugcacu

SEQ ID NO: 1856999 - RNA, 16 nt, Human
gugucccugcacuugc

SEQ ID NO: 1857000 - RNA, 18 nt, Human
gugucccugcacuugcag

SEQ ID NO: 1857001 - RNA, 14 nt, Human
guggcucacgccug

SEQ ID NO: 1857002 - RNA, 15 nt, Human
gugcuaauuuugaaa

SEQ ID NO: 1857003 - RNA, 13 nt, Human
gugcuaauuuuga

SEQ ID NO: 1857004 - RNA, 14 nt, Human
guggcugcuucaag

SEQ ID NO: 1857005 - RNA, 12 nt, Human
guggcugcuuca

SEQ ID NO: 1857006 - RNA, 20 nt, Human
guggcuccucccggugccca

SEQ ID NO: 1857007 - RNA, 13 nt, Human
guggcuccucccg

SEQ ID NO: 1857008 - RNA, 22 nt, Human
guggcugcuucaaggauccuga

SEQ ID NO: 1857009 - RNA, 19 nt, Human
guggcugcuucaaggaucc

SEQ ID NO: 1857010 - RNA, 16 nt, Human
guggcugcuucaagga

SEQ ID NO: 1857011 - RNA, 15 nt, Human
guggcugcuucaagg

SEQ ID NO: 1857012 - RNA, 23 nt, Human
guggcugcuucaaggauccugag

SEQ ID NO: 1857013 - RNA, 19 nt, Human
guggcuggguuggagggug

SEQ ID NO: 1857014 - RNA, 20 nt, Human
guggcuucccgcucagcccu

SEQ ID NO: 1857015 - RNA, 19 nt, Human
guggcuucccgcucagccc

SEQ ID NO: 1857016 - RNA, 18 nt, Human
guggcuucccgcucagcc

SEQ ID NO: 1857017 - RNA, 22 nt, Human
guggcuuaaaacaacacucaca

SEQ ID NO: 1857018 - RNA, 17 nt, Human
gugggcccaaugcacuu

SEQ ID NO: 1857019 - RNA, 19 nt, Human
gugggccuucagggaguga

SEQ ID NO: 1857020 - RNA, 22 nt, Human
gugggcgugagaccugccccuc

SEQ ID NO: 1857021 - RNA, 21 nt, Human
gugggcgugagaccugccccu

SEQ ID NO: 1857022 - RNA, 18 nt, Human
gugggcgugagaccugcc

SEQ ID NO: 1857023 - RNA, 12 nt, Human
gugggcuaagca

SEQ ID NO: 1857024 - RNA, 15 nt, Human
gugggcuaguugggc

SEQ ID NO: 1857025 - RNA, 13 nt, Human
guggggaggggcu

SEQ ID NO: 1857026 - RNA, 18 nt, Human
guggggaccucaggccug

SEQ ID NO: 1857027 - RNA, 15 nt, Human
guggggaccucaggc

SEQ ID NO: 1857028 - RNA, 13 nt, Human
guggggcagcuug

SEQ ID NO: 1857029 - RNA, 17 nt, Human
guggggcagcuugaggg

SEQ ID NO: 1857030 - RNA, 23 nt, Human
guggguuucuaaagcugccagcc

SEQ ID NO: 1857031 - RNA, 21 nt, Human
guuaugacuccagaauuuccc

SEQ ID NO: 1857032 - RNA, 23 nt, Human
guucaauucucauuugucacaca

SEQ ID NO: 1857033 - RNA, 16 nt, Human
guucaauucucauuug

SEQ ID NO: 1857034 - RNA, 20 nt, Human
guucaagcgauucuucugcu

SEQ ID NO: 1857035 - RNA, 23 nt, Human
guucaagugauucucaugccuca

SEQ ID NO: 1857036 - RNA, 19 nt, Human
guuauuaaaaaucucaaau

SEQ ID NO: 1857037 - RNA, 19 nt, Human
guucaagcgauucuucugc

SEQ ID NO: 1857038 - RNA, 17 nt, Human
guuauuauauuuacaaa

SEQ ID NO: 1857039 - RNA, 19 nt, Human
guuacauaagauaaaugug

SEQ ID NO: 1857040 - RNA, 18 nt, Human
guuacauaagauaaaugu

SEQ ID NO: 1857041 - RNA, 17 nt, Human
guuacagacaaagcgug

SEQ ID NO: 1857042 - RNA, 15 nt, Human
guuacagacaaagcg

SEQ ID NO: 1857043 - RNA, 21 nt, Human
guuacauuuuuaagugcugca

SEQ ID NO: 1857044 - RNA, 23 nt, Human
guuaccauuuugggguacccacu

SEQ ID NO: 1857045 - RNA, 19 nt, Human
guuaguuucuccaagcagg

SEQ ID NO: 1857046 - RNA, 16 nt, Human
guuaguuucuccaagc

SEQ ID NO: 1857047 - RNA, 22 nt, Human
guuaguuucuccaagcaggaca

SEQ ID NO: 1857048 - RNA, 22 nt, Human
guuacuaaguuuuuauggcuuu

SEQ ID NO: 1857049 - RNA, 15 nt, Human
guuacucagaauucu

SEQ ID NO: 1857050 - RNA, 24 nt, Human
guucacucuacuuagcaugucccu

SEQ ID NO: 1857051 - RNA, 19 nt, Human
guucacugcaaccuccgcc

SEQ ID NO: 1857052 - RNA, 13 nt, Human
guucaucuugaau

SEQ ID NO: 1857053 - RNA, 12 nt, Human
guucaucuugaa

SEQ ID NO: 1857054 - RNA, 18 nt, Human
guucaucuugaauuguaa

SEQ ID NO: 1857055 - RNA, 16 nt, Human
guucaucaaugaauga

SEQ ID NO: 1857056 - RNA, 17 nt, Human
guucaucauccuaagcu

SEQ ID NO: 1857057 - RNA, 20 nt, Human
guuccaccaucaagccacca

SEQ ID NO: 1857058 - RNA, 17 nt, Human
guuccaccaucaagcca

SEQ ID NO: 1857059 - RNA, 21 nt, Human
guuccagcaauucuccugccu

SEQ ID NO: 1857060 - RNA, 20 nt, Human
guuccagcaauucuccugcc

SEQ ID NO: 1857061 - RNA, 23 nt, Human
guuccagcaauucuccugccuca

SEQ ID NO: 1857062 - RNA, 22 nt, Human
guuccucauuagcauuuugcua

SEQ ID NO: 1857063 - RNA, 14 nt, Human
guuccuaauccucu

SEQ ID NO: 1857064 - RNA, 23 nt, Human
guuccuccccuccuccuggacuc

SEQ ID NO: 1857065 - RNA, 17 nt, Human
guugaaaaacagcugag

SEQ ID NO: 1857066 - RNA, 13 nt, Human
guucuuuccaaag

SEQ ID NO: 1857067 - RNA, 14 nt, Human
guucuuuccaaagu

SEQ ID NO: 1857068 - RNA, 18 nt, Human
guucuuuccaaaguacac

SEQ ID NO: 1857069 - RNA, 20 nt, Human
guucuuuccaaaguacacug

SEQ ID NO: 1857070 - RNA, 15 nt, Human
guucuuucuuccucu

SEQ ID NO: 1857071 - RNA, 14 nt, Human
guucuuucuuccuc

SEQ ID NO: 1857072 - RNA, 19 nt, Human
guucuuucuuccucugcug

SEQ ID NO: 1857073 - RNA, 18 nt, Human
guucuuucuuccucugcu

SEQ ID NO: 1857074 - RNA, 17 nt, Human
guucuuucuuccucugc

SEQ ID NO: 1857075 - RNA, 16 nt, Human
guucuuucuuccucug

SEQ ID NO: 1857076 - RNA, 20 nt, Human
guucuggcucuuccaggcug

SEQ ID NO: 1857077 - RNA, 16 nt, Human
guucuggcucuuccag

SEQ ID NO: 1857078 - RNA, 12 nt, Human
guucuggcucuu

SEQ ID NO: 1857079 - RNA, 23 nt, Human
guucuggcagaguugaagacaga

SEQ ID NO: 1857080 - RNA, 11 nt, Human
guucugggaca

SEQ ID NO: 1857081 - RNA, 12 nt, Human
guucugggacac

SEQ ID NO: 1857082 - RNA, 14 nt, Human
guucugggacacag

SEQ ID NO: 1857083 - RNA, 15 nt, Human
guucugggacacagu

SEQ ID NO: 1857084 - RNA, 16 nt, Human
guucugggacacaguu

SEQ ID NO: 1857085 - RNA, 18 nt, Human
guucuuucacccuuuucu

SEQ ID NO: 1857086 - RNA, 23 nt, Human
guucugggacacaguucaauucu

SEQ ID NO: 1857087 - RNA, 14 nt, Human
guucuaaagaugga

SEQ ID NO: 1857088 - RNA, 17 nt, Human
guucuaaagauggaaaa

SEQ ID NO: 1857089 - RNA, 20 nt, Human
guucuaaagauggaaaaacc

SEQ ID NO: 1857090 - RNA, 23 nt, Human
guucuaaagauggaaaaaccacc

SEQ ID NO: 1857091 - RNA, 17 nt, Human
guuccuuccucugagcc

SEQ ID NO: 1857092 - RNA, 19 nt, Human
guuccuuccucugagccuu

SEQ ID NO: 1857093 - RNA, 18 nt, Human
guuccuuccucugagccu

SEQ ID NO: 1857094 - RNA, 19 nt, Human
guucugauccuaguuccac

SEQ ID NO: 1857095 - RNA, 16 nt, Human
guucugcacacagcac

SEQ ID NO: 1857096 - RNA, 15 nt, Human
guucugcacacagca

SEQ ID NO: 1857097 - RNA, 23 nt, Human
guugccagucaccccggccaccu

SEQ ID NO: 1857098 - RNA, 18 nt, Human
guugccagucaccccggc

SEQ ID NO: 1857099 - RNA, 17 nt, Human
guugccagucaccccgg

SEQ ID NO: 1857100 - RNA, 16 nt, Human
guugccagucaccccg

SEQ ID NO: 1857101 - RNA, 14 nt, Human
guugccagucaccc

SEQ ID NO: 1857102 - RNA, 13 nt, Human
guugccagucacc

SEQ ID NO: 1857103 - RNA, 12 nt, Human
guugcccaggca

SEQ ID NO: 1857104 - RNA, 15 nt, Human
guugcccaggcaggu

SEQ ID NO: 1857105 - RNA, 14 nt, Human
guugcccaggcagg

SEQ ID NO: 1857106 - RNA, 14 nt, Human
guuggccaggcugc

SEQ ID NO: 1857107 - RNA, 13 nt, Human
guuggccaggcug

SEQ ID NO: 1857108 - RNA, 15 nt, Human
guuggccaggcuggu

SEQ ID NO: 1857109 - RNA, 14 nt, Human
guuggccaggcugg

SEQ ID NO: 1857110 - RNA, 18 nt, Human
guuggccaggcuggucuc

SEQ ID NO: 1857111 - RNA, 19 nt, Human
guuggccaggcugcucuug

SEQ ID NO: 1857112 - RNA, 17 nt, Human
guuggccaggcuggucu

SEQ ID NO: 1857113 - RNA, 19 nt, Human
guuggccaggcuggucuca

SEQ ID NO: 1857114 - RNA, 14 nt, Human
guuggccaguguga

SEQ ID NO: 1857115 - RNA, 23 nt, Human
guuggccaaagccaaagcuaggc

SEQ ID NO: 1857116 - RNA, 18 nt, Human
guuggcaaaaaggcagga

SEQ ID NO: 1857117 - RNA, 20 nt, Human
guuggauuuuugucuugugu

SEQ ID NO: 1857118 - RNA, 14 nt, Human
guuggcaaaaaggc

SEQ ID NO: 1857119 - RNA, 14 nt, Human
guuggauuuuuguc

SEQ ID NO: 1857120 - RNA, 14 nt, Human
guugaagccuuugu

SEQ ID NO: 1857121 - RNA, 13 nt, Human
guugaagccuuug

SEQ ID NO: 1857122 - RNA, 16 nt, Human
guugaagacagagcua

SEQ ID NO: 1857123 - RNA, 15 nt, Human
guugcaggaccucag

SEQ ID NO: 1857124 - RNA, 14 nt, Human
guugcaacuuugua

SEQ ID NO: 1857125 - RNA, 23 nt, Human
guugauuucagcaccuacagugu

SEQ ID NO: 1857126 - RNA, 16 nt, Human
guugcaacuuuguaua

SEQ ID NO: 1857127 - RNA, 19 nt, Human
guuuaggaacuacugagga

SEQ ID NO: 1857128 - RNA, 14 nt, Human
guuguuacauuuuu

SEQ ID NO: 1857129 - RNA, 15 nt, Human
guuguuacauuuuua

SEQ ID NO: 1857130 - RNA, 20 nt, Human
guuguuugauucagacagcu

SEQ ID NO: 1857131 - RNA, 14 nt, Human
guuuagauaauaca

SEQ ID NO: 1857132 - RNA, 15 nt, Human
guuuagauaauacac

SEQ ID NO: 1857133 - RNA, 22 nt, Human
guugucugaagucacugcacag

SEQ ID NO: 1857134 - RNA, 19 nt, Human
guugucugaagucacugca

SEQ ID NO: 1857135 - RNA, 14 nt, Human
guugugguuaaucu

SEQ ID NO: 1857136 - RNA, 22 nt, Human
guuguggauuuaacagaaaugu

SEQ ID NO: 1857137 - RNA, 15 nt, Human
guuguuaauaaaagu

SEQ ID NO: 1857138 - RNA, 12 nt, Human
guugucagcuga

SEQ ID NO: 1857139 - RNA, 23 nt, Human
guuggcugggggccucagugcca

SEQ ID NO: 1857140 - RNA, 19 nt, Human
guuggcugggggccucagu

SEQ ID NO: 1857141 - RNA, 20 nt, Human
guuggccccugcccggcugc

SEQ ID NO: 1857142 - RNA, 13 nt, Human
guuggccccugcc

SEQ ID NO: 1857143 - RNA, 14 nt, Human
guuggccccugccc

SEQ ID NO: 1857144 - RNA, 12 nt, Human
guuggcuggggg

SEQ ID NO: 1857145 - RNA, 18 nt, Human
guuucuuuguaaugaaaa

SEQ ID NO: 1857146 - RNA, 16 nt, Human
guuucuuuaguuuuug

SEQ ID NO: 1857147 - RNA, 19 nt, Human
guuucuuuguaaugaaaac

SEQ ID NO: 1857148 - RNA, 18 nt, Human
guuugagaucagccuggg

SEQ ID NO: 1857149 - RNA, 23 nt, Human
guuugauuaaauucuugcaaagu

SEQ ID NO: 1857150 - RNA, 17 nt, Human
guuugagaucagccugg

SEQ ID NO: 1857151 - RNA, 21 nt, Human
guuugauucagacagcugccu

SEQ ID NO: 1857152 - RNA, 20 nt, Human
guuugauucagacagcugcc

SEQ ID NO: 1857153 - RNA, 16 nt, Human
guuugauucagacagc

SEQ ID NO: 1857154 - RNA, 20 nt, Human
guuuguaaauuaacuuuuau

SEQ ID NO: 1857155 - RNA, 18 nt, Human
guuuguuucugaaaggga

SEQ ID NO: 1857156 - RNA, 20 nt, Human
guuuuccaugaguccccugu

SEQ ID NO: 1857157 - RNA, 19 nt, Human
guuuuccaugaguccccug

SEQ ID NO: 1857158 - RNA, 20 nt, Human
guuuuccagguuuaagcugu

SEQ ID NO: 1857159 - RNA, 13 nt, Human
guuuuccugaaga

SEQ ID NO: 1857160 - RNA, 12 nt, Human
guuuuguaaauu

SEQ ID NO: 1857161 - RNA, 14 nt, Human
guuuuguaaauuuc

SEQ ID NO: 1857162 - RNA, 16 nt, Human
guuuuaaaaugagaaa

SEQ ID NO: 1857163 - RNA, 15 nt, Human
guuuuaaaaugagaa

SEQ ID NO: 1857164 - RNA, 20 nt, Human
guuuguuucugaaagggacg

SEQ ID NO: 1857165 - RNA, 17 nt, Human
guuuucaaaauaaaaau

SEQ ID NO: 1857166 - RNA, 20 nt, Human
guuuucaaaauuguuacaaa

SEQ ID NO: 1857167 - RNA, 17 nt, Human
guuuuaaaaugagaaau

SEQ ID NO: 1857168 - RNA, 24 nt, Human
guuuucaggaguggguugauuuca

SEQ ID NO: 1857169 - RNA, 11 nt, Human
guuuucacucu

SEQ ID NO: 1857170 - RNA, 12 nt, Human
guuuucacucuu

SEQ ID NO: 1857171 - RNA, 12 nt, Human
uaaaaggugacc

SEQ ID NO: 1857172 - RNA, 19 nt, Human
uaaaaggugaccaaugaug

SEQ ID NO: 1857173 - RNA, 12 nt, Human
uaaaaggagcca

SEQ ID NO: 1857174 - RNA, 21 nt, Human
uaaaagguaugcaaucaaauc

SEQ ID NO: 1857175 - RNA, 14 nt, Human
uaaaagauacaguu

SEQ ID NO: 1857176 - RNA, 17 nt, Human
uaaaagauacaguuacu

SEQ ID NO: 1857177 - RNA, 20 nt, Human
uaaaagauacaguuacucag

SEQ ID NO: 1857178 - RNA, 21 nt, Human
uaaaagauacaguuacucaga

SEQ ID NO: 1857179 - RNA, 17 nt, Human
uaaaaacaaagaaauua

SEQ ID NO: 1857180 - RNA, 21 nt, Human
uaaaaacaaagaaauuaugug

SEQ ID NO: 1857181 - RNA, 21 nt, Human
guuuuuaaggguuuguggaaa

SEQ ID NO: 1857182 - RNA, 17 nt, Human
guuuuuaauaaagacag

SEQ ID NO: 1857183 - RNA, 18 nt, Human
uaaaaaugguuuaaaugg

SEQ ID NO: 1857184 - RNA, 19 nt, Human
uaaaaaugguuuaaauggu

SEQ ID NO: 1857185 - RNA, 19 nt, Human
uaaaacacuuccauaaucu

SEQ ID NO: 1857186 - RNA, 23 nt, Human
uaaaacacaacaucuuuuucuac

SEQ ID NO: 1857187 - RNA, 22 nt, Human
uaaaacacaacaucuuuuucua

SEQ ID NO: 1857188 - RNA, 17 nt, Human
uaaaacacaacaucuuu

SEQ ID NO: 1857189 - RNA, 22 nt, Human
uaaaacaagcacuaaacaaaga

SEQ ID NO: 1857190 - RNA, 15 nt, Human
uaaaacaacacucac

SEQ ID NO: 1857191 - RNA, 16 nt, Human
uaaagaaaaguuuugu

SEQ ID NO: 1857192 - RNA, 22 nt, Human
uaaagaaaaguuuuguaaauuu

SEQ ID NO: 1857193 - RNA, 12 nt, Human
uaaagaaaacug

SEQ ID NO: 1857194 - RNA, 16 nt, Human
uaaagcagcguuucua

SEQ ID NO: 1857195 - RNA, 17 nt, Human
uaaagcagcguuucuau

SEQ ID NO: 1857196 - RNA, 19 nt, Human
uaaagcagcguuucuauga

SEQ ID NO: 1857197 - RNA, 18 nt, Human
uaaagcaggcagaacuca

SEQ ID NO: 1857198 - RNA, 15 nt, Human
uaaaggcuaccuuug

SEQ ID NO: 1857199 - RNA, 20 nt, Human
uaaagccugaguuugcuuuc

SEQ ID NO: 1857200 - RNA, 14 nt, Human
uaaagcugaaaacu

SEQ ID NO: 1857201 - RNA, 17 nt, Human
uaaaggcuaccuuugua

SEQ ID NO: 1857202 - RNA, 14 nt, Human
uaaaguguuugaaa

SEQ ID NO: 1857203 - RNA, 22 nt, Human
uaaacuugguuuuuaaaaaacu

SEQ ID NO: 1857204 - RNA, 21 nt, Human
uaaacaagaccacguuucuaa

SEQ ID NO: 1857205 - RNA, 22 nt, Human
uaaacaagaccacguuucuaaa

SEQ ID NO: 1857206 - RNA, 20 nt, Human
uaaacaagaccacguuucua

SEQ ID NO: 1857207 - RNA, 16 nt, Human
uaaaaucuugaaaaug

SEQ ID NO: 1857208 - RNA, 17 nt, Human
uaaacacucuugaaaaa

SEQ ID NO: 1857209 - RNA, 15 nt, Human
uaaacacucuugaaa

SEQ ID NO: 1857210 - RNA, 18 nt, Human
uaaacacucuugaaaaau

SEQ ID NO: 1857211 - RNA, 17 nt, Human
uaaaugcccagccccuu

SEQ ID NO: 1857212 - RNA, 16 nt, Human
uaaaugcccagccccu

SEQ ID NO: 1857213 - RNA, 15 nt, Human
uaaaugcccagcccc

SEQ ID NO: 1857214 - RNA, 14 nt, Human
uaaaugcccagccc

SEQ ID NO: 1857215 - RNA, 16 nt, Human
uaaauggaaccacucu

SEQ ID NO: 1857216 - RNA, 11 nt, Human
uaaaugcugcu

SEQ ID NO: 1857217 - RNA, 17 nt, Human
uaaaugcugcuuuuucu

SEQ ID NO: 1857218 - RNA, 13 nt, Human
uaaaugcccagcc

SEQ ID NO: 1857219 - RNA, 16 nt, Human
uaaaguugguaaaccu

SEQ ID NO: 1857220 - RNA, 17 nt, Human
uaaaguugguaaaccuu

SEQ ID NO: 1857221 - RNA, 18 nt, Human
uaaaugggggugcauuug

SEQ ID NO: 1857222 - RNA, 19 nt, Human
uaaaugggggugcauuuga

SEQ ID NO: 1857223 - RNA, 14 nt, Human
uaaaugggggugca

SEQ ID NO: 1857224 - RNA, 17 nt, Human
uaaaugggggugcauuu

SEQ ID NO: 1857225 - RNA, 15 nt, Human
uaaauguagaaagug

SEQ ID NO: 1857226 - RNA, 20 nt, Human
uaaaugucuaguuguaacac

SEQ ID NO: 1857227 - RNA, 22 nt, Human
uaaaugucucuuuaaugucaca

SEQ ID NO: 1857228 - RNA, 18 nt, Human
uaacaccaugauuaacca

SEQ ID NO: 1857229 - RNA, 20 nt, Human
uaaauugacacuuaaaaaug

SEQ ID NO: 1857230 - RNA, 23 nt, Human
uaaauugacacuuaaaaaugguu

SEQ ID NO: 1857231 - RNA, 17 nt, Human
uaaauucuugcaaagua

SEQ ID NO: 1857232 - RNA, 18 nt, Human
uaaauucuugcaaaguau

SEQ ID NO: 1857233 - RNA, 22 nt, Human
uaaauucuugcaaaguaucccu

SEQ ID NO: 1857234 - RNA, 16 nt, Human
uaaauucuugcaaagu

SEQ ID NO: 1857235 - RNA, 11 nt, Human
uaaauuauuuu

SEQ ID NO: 1857236 - RNA, 24 nt, Human
uaagaaagacuaucuaaauguuga

SEQ ID NO: 1857237 - RNA, 19 nt, Human
uaagaaccuuuugagugcc

SEQ ID NO: 1857238 - RNA, 16 nt, Human
uaagaaaaaggaugca

SEQ ID NO: 1857239 - RNA, 18 nt, Human
uaagaaaaaggaugcaca

SEQ ID NO: 1857240 - RNA, 19 nt, Human
uaagaaaaaggaugcacag

SEQ ID NO: 1857241 - RNA, 23 nt, Human
uaagaaaaaggaugcacagaguu

SEQ ID NO: 1857242 - RNA, 23 nt, Human
uaaccaguguuguggauuuaaca

SEQ ID NO: 1857243 - RNA, 16 nt, Human
uaaccacuucagcuga

SEQ ID NO: 1857244 - RNA, 13 nt, Human
uaaccagaucauu

SEQ ID NO: 1857245 - RNA, 12 nt, Human
uaacagaaaugu

SEQ ID NO: 1857246 - RNA, 11 nt, Human
uaacagaaaug

SEQ ID NO: 1857247 - RNA, 16 nt, Human
uaacuauguugauaaa

SEQ ID NO: 1857248 - RNA, 14 nt, Human
uaagugcugcauuu

SEQ ID NO: 1857249 - RNA, 23 nt, Human
uaagugaggaugaaaaaauaaca

SEQ ID NO: 1857250 - RNA, 12 nt, Human
uaagugagagag

SEQ ID NO: 1857251 - RNA, 22 nt, Human
uaagugauugcugguuuuaguu

SEQ ID NO: 1857252 - RNA, 13 nt, Human
uaagugaaauaag

SEQ ID NO: 1857253 - RNA, 15 nt, Human
uaagugcugcauuua

SEQ ID NO: 1857254 - RNA, 16 nt, Human
uaagugcugcauuuaa

SEQ ID NO: 1857255 - RNA, 18 nt, Human
uaagugcugcauuuaaaa

SEQ ID NO: 1857256 - RNA, 22 nt, Human
uaagugcugcauuuaaaagaua

SEQ ID NO: 1857257 - RNA, 15 nt, Human
uaaguggugugugua

SEQ ID NO: 1857258 - RNA, 16 nt, Human
uaagugguguguguau

SEQ ID NO: 1857259 - RNA, 12 nt, Human
uaauaaagcugu

SEQ ID NO: 1857260 - RNA, 15 nt, Human
uaagccaugggagac

SEQ ID NO: 1857261 - RNA, 12 nt, Human
uaagaggcaggg

SEQ ID NO: 1857262 - RNA, 15 nt, Human
uaagaggcagggucu

SEQ ID NO: 1857263 - RNA, 14 nt, Human
uaaggcaaucaugg

SEQ ID NO: 1857264 - RNA, 16 nt, Human
uaaggauguucuagca

SEQ ID NO: 1857265 - RNA, 14 nt, Human
uaagcuauucagua

SEQ ID NO: 1857266 - RNA, 17 nt, Human
uaaggguaucuggugac

SEQ ID NO: 1857267 - RNA, 20 nt, Human
uaagguggguacgggagggu

SEQ ID NO: 1857268 - RNA, 15 nt, Human
uaaggugugcucuga

SEQ ID NO: 1857269 - RNA, 23 nt, Human
uaaucugggccagaauuucaaac

SEQ ID NO: 1857270 - RNA, 18 nt, Human
uaaucugggccagaauuu

SEQ ID NO: 1857271 - RNA, 22 nt, Human
uaaucuggacuccucuguccag

SEQ ID NO: 1857272 - RNA, 21 nt, Human
uaaucuggacuccucugucca

SEQ ID NO: 1857273 - RNA, 20 nt, Human
uaaucuggacuccucugucc

SEQ ID NO: 1857274 - RNA, 19 nt, Human
uaaucuggacuccucuguc

SEQ ID NO: 1857275 - RNA, 15 nt, Human
uaaucuggacuccuc

SEQ ID NO: 1857276 - RNA, 18 nt, Human
uaaucuggacuccucugu

SEQ ID NO: 1857277 - RNA, 17 nt, Human
uaaucuggacuccucug

SEQ ID NO: 1857278 - RNA, 20 nt, Human
uaauccucuaggaggucucu

SEQ ID NO: 1857279 - RNA, 12 nt, Human
uaaucuaaaugg

SEQ ID NO: 1857280 - RNA, 13 nt, Human
uaaucuaaaugga

SEQ ID NO: 1857281 - RNA, 20 nt, Human
uaauauuaaggaagacaaug

SEQ ID NO: 1857282 - RNA, 15 nt, Human
uaauaugcacacauu

SEQ ID NO: 1857283 - RNA, 16 nt, Human
uaauaugcacacauuu

SEQ ID NO: 1857284 - RNA, 17 nt, Human
uaauaugcacacauuuu

SEQ ID NO: 1857285 - RNA, 18 nt, Human
uaauaugcacacauuuuu

SEQ ID NO: 1857286 - RNA, 19 nt, Human
uaauaugcacacauuuuuu

SEQ ID NO: 1857287 - RNA, 15 nt, Human
uaaugcgugcauacc

SEQ ID NO: 1857288 - RNA, 19 nt, Human
uaaugcgugcauaccacuu

SEQ ID NO: 1857289 - RNA, 22 nt, Human
uaaugcgugcauaccacuuuug

SEQ ID NO: 1857290 - RNA, 23 nt, Human
uaaugcgugcauaccacuuuugu

SEQ ID NO: 1857291 - RNA, 15 nt, Human
uaauggggcggugag

SEQ ID NO: 1857292 - RNA, 20 nt, Human
uaauuaaguacuauguauca

SEQ ID NO: 1857293 - RNA, 17 nt, Human
uaauuaaguacuaugua

SEQ ID NO: 1857294 - RNA, 14 nt, Human
uaauuaaguacuau

SEQ ID NO: 1857295 - RNA, 11 nt, Human
uaauguuuccu

SEQ ID NO: 1857296 - RNA, 11 nt, Human
uauagaaaugc

SEQ ID NO: 1857297 - RNA, 20 nt, Human
uaucaggugcugccauccag

SEQ ID NO: 1857298 - RNA, 14 nt, Human
uaucaaaagaaaga

SEQ ID NO: 1857299 - RNA, 19 nt, Human
uaucaggugcugccaucca

SEQ ID NO: 1857300 - RNA, 17 nt, Human
uaucaugacaaagacug

SEQ ID NO: 1857301 - RNA, 21 nt, Human
uauauuuuuuguuaaaugauu

SEQ ID NO: 1857302 - RNA, 15 nt, Human
uauaaacuuuaccuu

SEQ ID NO: 1857303 - RNA, 16 nt, Human
uauaaacuuuaccuuu

SEQ ID NO: 1857304 - RNA, 17 nt, Human
uauaaacuuuaccuuuu

SEQ ID NO: 1857305 - RNA, 18 nt, Human
uauaaacuuuaccuuuuu

SEQ ID NO: 1857306 - RNA, 13 nt, Human
uauaaacuuuacc

SEQ ID NO: 1857307 - RNA, 14 nt, Human
uauaaacuuuaccu

SEQ ID NO: 1857308 - RNA, 11 nt, Human
uauaaacuuua

SEQ ID NO: 1857309 - RNA, 16 nt, Human
uaguuugauuaaauuc

SEQ ID NO: 1857310 - RNA, 21 nt, Human
uaguuugauuaaauucuugca

SEQ ID NO: 1857311 - RNA, 15 nt, Human
uaguuugauuaaauu

SEQ ID NO: 1857312 - RNA, 20 nt, Human
uaguuguuugauucagacag

SEQ ID NO: 1857313 - RNA, 22 nt, Human
uaguuguuugauucagacagcu

SEQ ID NO: 1857314 - RNA, 21 nt, Human
uaguuguuugauucagacagc

SEQ ID NO: 1857315 - RNA, 15 nt, Human
uaguaugaggcauuu

SEQ ID NO: 1857316 - RNA, 16 nt, Human
uaguaugguggcuggg

SEQ ID NO: 1857317 - RNA, 20 nt, Human
uaguggcuuaaaacaacacu

SEQ ID NO: 1857318 - RNA, 22 nt, Human
uagcuggucuuauuuguaaagc

SEQ ID NO: 1857319 - RNA, 11 nt, Human
uagggaaaaac

SEQ ID NO: 1857320 - RNA, 11 nt, Human
uaggugacaga

SEQ ID NO: 1857321 - RNA, 16 nt, Human
uaggugacagagugag

SEQ ID NO: 1857322 - RNA, 17 nt, Human
uaggugugggggaagca

SEQ ID NO: 1857323 - RNA, 13 nt, Human
uagguguggggga

SEQ ID NO: 1857324 - RNA, 19 nt, Human
uaggugugacugaauuucu

SEQ ID NO: 1857325 - RNA, 21 nt, Human
uaggugugacugaauuucuuu

SEQ ID NO: 1857326 - RNA, 23 nt, Human
uaggugugacugaauuucuuuug

SEQ ID NO: 1857327 - RNA, 17 nt, Human
uaguaugaggcauuugu

SEQ ID NO: 1857328 - RNA, 18 nt, Human
uaguaugaggcauuuguu

SEQ ID NO: 1857329 - RNA, 16 nt, Human
uagcauacguacacau

SEQ ID NO: 1857330 - RNA, 17 nt, Human
uagcauacguacacauu

SEQ ID NO: 1857331 - RNA, 18 nt, Human
uagcauacguacacauuu

SEQ ID NO: 1857332 - RNA, 19 nt, Human
uagcauacguacacauuuu

SEQ ID NO: 1857333 - RNA, 11 nt, Human
uagcagggaaa

SEQ ID NO: 1857334 - RNA, 16 nt, Human
uagauacuguaucaug

SEQ ID NO: 1857335 - RNA, 16 nt, Human
uagccccucuccugga

SEQ ID NO: 1857336 - RNA, 16 nt, Human
uagccuaggugacaga

SEQ ID NO: 1857337 - RNA, 20 nt, Human
uagccugugccucugggacu

SEQ ID NO: 1857338 - RNA, 18 nt, Human
uagccugugccucuggga

SEQ ID NO: 1857339 - RNA, 12 nt, Human
uagcucauucuc

SEQ ID NO: 1857340 - RNA, 20 nt, Human
uagcucaggugucccugcac

SEQ ID NO: 1857341 - RNA, 21 nt, Human
uagcucaggugucccugcacu

SEQ ID NO: 1857342 - RNA, 15 nt, Human
uagcugggacuacag

SEQ ID NO: 1857343 - RNA, 17 nt, Human
uagcugggacuacaggc

SEQ ID NO: 1857344 - RNA, 19 nt, Human
uagcugggacuacaggcac

SEQ ID NO: 1857345 - RNA, 13 nt, Human
uagagaaggaccc

SEQ ID NO: 1857346 - RNA, 22 nt, Human
uagagaaggacccggaggggcc

SEQ ID NO: 1857347 - RNA, 11 nt, Human
uagagacaggg

SEQ ID NO: 1857348 - RNA, 14 nt, Human
uagagguucaaaga

SEQ ID NO: 1857349 - RNA, 15 nt, Human
uagagguucaaagau

SEQ ID NO: 1857350 - RNA, 12 nt, Human
uagagugggagc

SEQ ID NO: 1857351 - RNA, 14 nt, Human
uagaguugauacua

SEQ ID NO: 1857352 - RNA, 17 nt, Human
uagaguugauacuacag

SEQ ID NO: 1857353 - RNA, 20 nt, Human
uagacccacuggacucaccu

SEQ ID NO: 1857354 - RNA, 15 nt, Human
uagaauuaacacaug

SEQ ID NO: 1857355 - RNA, 16 nt, Human
uagaauuaacacauga

SEQ ID NO: 1857356 - RNA, 18 nt, Human
uagaauuaacacaugauc

SEQ ID NO: 1857357 - RNA, 23 nt, Human
uagaauuaguggcacuugcuuuu

SEQ ID NO: 1857358 - RNA, 14 nt, Human
uacuuguggacaca

SEQ ID NO: 1857359 - RNA, 23 nt, Human
uacauuuuuaagugcugcauuua

SEQ ID NO: 1857360 - RNA, 15 nt, Human
uacccacugcucugg

SEQ ID NO: 1857361 - RNA, 22 nt, Human
uaccuaacgaaguauccuucag

SEQ ID NO: 1857362 - RNA, 22 nt, Human
uaccgagucucuucuccacugg

SEQ ID NO: 1857363 - RNA, 21 nt, Human
uaccgagucucuucuccacug

SEQ ID NO: 1857364 - RNA, 18 nt, Human
uaccgagucucuucucca

SEQ ID NO: 1857365 - RNA, 17 nt, Human
uaccgagucucuucucc

SEQ ID NO: 1857366 - RNA, 15 nt, Human
uaccuacauacaauu

SEQ ID NO: 1857367 - RNA, 21 nt, Human
uacgaaaagaggggaagagac

SEQ ID NO: 1857368 - RNA, 18 nt, Human
uacgaaaagaggggaaga

SEQ ID NO: 1857369 - RNA, 13 nt, Human
uaccuuuuuuaua

SEQ ID NO: 1857370 - RNA, 16 nt, Human
uaccuuuuuuauacau

SEQ ID NO: 1857371 - RNA, 17 nt, Human
uaccuuuuuuauacaua

SEQ ID NO: 1857372 - RNA, 20 nt, Human
uacuaauagacaauuuauua

SEQ ID NO: 1857373 - RNA, 21 nt, Human
uacuaauagacaauuuauuau

SEQ ID NO: 1857374 - RNA, 14 nt, Human
uacuaaggaaucuu

SEQ ID NO: 1857375 - RNA, 13 nt, Human
uaccuuuuuuaga

SEQ ID NO: 1857376 - RNA, 19 nt, Human
uaccuuuuuuagaguugau

SEQ ID NO: 1857377 - RNA, 22 nt, Human
uaccuuuuuuagaguugauacu

SEQ ID NO: 1857378 - RNA, 21 nt, Human
uaccucuugagccuugaacuu

SEQ ID NO: 1857379 - RNA, 18 nt, Human
uaccucggugccuuccuc

SEQ ID NO: 1857380 - RNA, 21 nt, Human
uacugucuucaguaagccgug

SEQ ID NO: 1857381 - RNA, 16 nt, Human
uacuguccuacccacc

SEQ ID NO: 1857382 - RNA, 19 nt, Human
uacuugcucuugaugccug

SEQ ID NO: 1857383 - RNA, 18 nt, Human
uacuugcucuugaugccu

SEQ ID NO: 1857384 - RNA, 14 nt, Human
uacuugcucuugau

SEQ ID NO: 1857385 - RNA, 13 nt, Human
uacuugcucuuga

SEQ ID NO: 1857386 - RNA, 20 nt, Human
uacuugcucuugaugccugg

SEQ ID NO: 1857387 - RNA, 13 nt, Human
uacuuguggacac

SEQ ID NO: 1857388 - RNA, 22 nt, Human
uacuacaguccucccaucucac

SEQ ID NO: 1857389 - RNA, 13 nt, Human
uacuacaguuugu

SEQ ID NO: 1857390 - RNA, 14 nt, Human
uacuacaguuuguu

SEQ ID NO: 1857391 - RNA, 18 nt, Human
uacucgaguuacagacaa

SEQ ID NO: 1857392 - RNA, 22 nt, Human
uacucgaguuacagacaaagcg

SEQ ID NO: 1857393 - RNA, 12 nt, Human
uacuccucccag

SEQ ID NO: 1857394 - RNA, 15 nt, Human
uacuccccuccuuga

SEQ ID NO: 1857395 - RNA, 22 nt, Human
uacugcccaggccugccuguuc

SEQ ID NO: 1857396 - RNA, 21 nt, Human
uacugcccaggccugccuguu

SEQ ID NO: 1857397 - RNA, 20 nt, Human
uacugcccaggccugccugu

SEQ ID NO: 1857398 - RNA, 19 nt, Human
uacugcccaggccugccug

SEQ ID NO: 1857399 - RNA, 14 nt, Human
uacugccuauuuua

SEQ ID NO: 1857400 - RNA, 21 nt, Human
uacugccuauuuuaauaaaca

SEQ ID NO: 1857401 - RNA, 16 nt, Human
uacucuacccucuuag

SEQ ID NO: 1857402 - RNA, 15 nt, Human
uacacacugcauguu

SEQ ID NO: 1857403 - RNA, 21 nt, Human
uacacugugcugagucugaag

SEQ ID NO: 1857404 - RNA, 11 nt, Human
uacacacacac

SEQ ID NO: 1857405 - RNA, 18 nt, Human
uacaaaguagaagucuua

SEQ ID NO: 1857406 - RNA, 14 nt, Human
uacaaaguagaagu

SEQ ID NO: 1857407 - RNA, 22 nt, Human
uacauggaauaacauguaauua

SEQ ID NO: 1857408 - RNA, 19 nt, Human
uacauggaauaacauguaa

SEQ ID NO: 1857409 - RNA, 18 nt, Human
uacauggaauaacaugua

SEQ ID NO: 1857410 - RNA, 14 nt, Human
uacauggaauaaca

SEQ ID NO: 1857411 - RNA, 19 nt, Human
uacauuuuuaagugcugca

SEQ ID NO: 1857412 - RNA, 22 nt, Human
uacauuuuuaagugcugcauuu

SEQ ID NO: 1857413 - RNA, 14 nt, Human
uacauuuuuaagug

SEQ ID NO: 1857414 - RNA, 17 nt, Human
uacauaagauaaaugug

SEQ ID NO: 1857415 - RNA, 16 nt, Human
uacauaagauaaaugu

SEQ ID NO: 1857416 - RNA, 16 nt, Human
uacaugaaaacacauu

SEQ ID NO: 1857417 - RNA, 17 nt, Human
uacaugaaaacacauuu

SEQ ID NO: 1857418 - RNA, 18 nt, Human
uacaugaaaacacauuuu

SEQ ID NO: 1857419 - RNA, 19 nt, Human
uacaugaaaacacauuuuu

SEQ ID NO: 1857420 - RNA, 23 nt, Human
uacaugaaaacacauuuuucuua

SEQ ID NO: 1857421 - RNA, 19 nt, Human
uacaguuuguuaguaugag

SEQ ID NO: 1857422 - RNA, 21 nt, Human
uacaguuuguuaguaugaggc

SEQ ID NO: 1857423 - RNA, 16 nt, Human
uacauaaacaaguccu

SEQ ID NO: 1857424 - RNA, 13 nt, Human
uacagcugccugc

SEQ ID NO: 1857425 - RNA, 14 nt, Human
uacagcugccugca

SEQ ID NO: 1857426 - RNA, 13 nt, Human
uacaggaaguacu

SEQ ID NO: 1857427 - RNA, 18 nt, Human
uacaggaagguagaaaua

SEQ ID NO: 1857428 - RNA, 20 nt, Human
uacagcuugaccgugaggcc

SEQ ID NO: 1857429 - RNA, 23 nt, Human
uacacugugcugagucugaaggc

SEQ ID NO: 1857430 - RNA, 22 nt, Human
uacacugugcugagucugaagg

SEQ ID NO: 1857431 - RNA, 20 nt, Human
uacacuguuucaaacuuuac

SEQ ID NO: 1857432 - RNA, 16 nt, Human
uacacuuacacuuuau

SEQ ID NO: 1857433 - RNA, 22 nt, Human
uacacuguuucaaacuuuacua

SEQ ID NO: 1857434 - RNA, 18 nt, Human
uacagcuaaucagcauuc

SEQ ID NO: 1857435 - RNA, 16 nt, Human
uacagcuaaucagcau

SEQ ID NO: 1857436 - RNA, 19 nt, Human
uacaguugaaaaacagcug

SEQ ID NO: 1857437 - RNA, 17 nt, Human
uacaguugaaaaacagc

SEQ ID NO: 1857438 - RNA, 21 nt, Human
uacagcuugaccgugaggcca

SEQ ID NO: 1857439 - RNA, 20 nt, Human
uacaguugaaaaacagcuga

SEQ ID NO: 1857440 - RNA, 18 nt, Human
uacaguuuguuaguauga

SEQ ID NO: 1857441 - RNA, 15 nt, Human
uacaggaaguacugg

SEQ ID NO: 1857442 - RNA, 14 nt, Human
uacaggaaguacug

SEQ ID NO: 1857443 - RNA, 22 nt, Human
uacaggaaguacuggagaaaau

SEQ ID NO: 1857444 - RNA, 15 nt, Human
uacaggagugagcac

SEQ ID NO: 1857445 - RNA, 20 nt, Human
uacaggaugaugacuaugga

SEQ ID NO: 1857446 - RNA, 23 nt, Human
uacaguucggugagcuacaaaug

SEQ ID NO: 1857447 - RNA, 14 nt, Human
ugacacacagcucu

SEQ ID NO: 1857448 - RNA, 15 nt, Human
ugacacacagcucug

SEQ ID NO: 1857449 - RNA, 14 nt, Human
ugacagacacaggc

SEQ ID NO: 1857450 - RNA, 16 nt, Human
ugacagacacaggccc

SEQ ID NO: 1857451 - RNA, 13 nt, Human
ugacagacacagg

SEQ ID NO: 1857452 - RNA, 23 nt, Human
ugacaaggauugcuacuguccua

SEQ ID NO: 1857453 - RNA, 23 nt, Human
ugacaacacucauugaccugagg

SEQ ID NO: 1857454 - RNA, 15 nt, Human
ugacaacagacuucu

SEQ ID NO: 1857455 - RNA, 19 nt, Human
ugacaacagacuucugaaa

SEQ ID NO: 1857456 - RNA, 18 nt, Human
ugacaacagacuucugaa

SEQ ID NO: 1857457 - RNA, 13 nt, Human
ugacaacacucau

SEQ ID NO: 1857458 - RNA, 20 nt, Human
ugacaaagguaaaucagacu

SEQ ID NO: 1857459 - RNA, 13 nt, Human
ugaauuguaagga

SEQ ID NO: 1857460 - RNA, 21 nt, Human
ugaauuguaaggaaugauuaa

SEQ ID NO: 1857461 - RNA, 16 nt, Human
ugaccacugcagaaga

SEQ ID NO: 1857462 - RNA, 17 nt, Human
ugaccacugcagaagac

SEQ ID NO: 1857463 - RNA, 18 nt, Human
ugaccacugcagaagaca

SEQ ID NO: 1857464 - RNA, 13 nt, Human
ugacauguuuuau

SEQ ID NO: 1857465 - RNA, 23 nt, Human
ugaccagccuccaugcugccucc

SEQ ID NO: 1857466 - RNA, 22 nt, Human
ugaccagccuccaugcugccuc

SEQ ID NO: 1857467 - RNA, 21 nt, Human
ugaccagccuccaugcugccu

SEQ ID NO: 1857468 - RNA, 19 nt, Human
ugacauguguuggcagccu

SEQ ID NO: 1857469 - RNA, 15 nt, Human
ugacauauuuuugcu

SEQ ID NO: 1857470 - RNA, 23 nt, Human
ugacaucaacugcaucaagaugu

SEQ ID NO: 1857471 - RNA, 22 nt, Human
ugacagagcaagugagacccug

SEQ ID NO: 1857472 - RNA, 17 nt, Human
ugacagacacaggcccg

SEQ ID NO: 1857473 - RNA, 18 nt, Human
ugacagacacaggcccgg

SEQ ID NO: 1857474 - RNA, 17 nt, Human
ugaaucacguaaagcua

SEQ ID NO: 1857475 - RNA, 23 nt, Human
ugaaucacguaaagcuagaaaug

SEQ ID NO: 1857476 - RNA, 21 nt, Human
ugaaggcuggguucugauccu

SEQ ID NO: 1857477 - RNA, 20 nt, Human
ugaaggcuggguucugaucc

SEQ ID NO: 1857478 - RNA, 16 nt, Human
ugaaucuuggugucua

SEQ ID NO: 1857479 - RNA, 14 nt, Human
ugaaugcauaaaau

SEQ ID NO: 1857480 - RNA, 15 nt, Human
ugaaugaauggcuaa

SEQ ID NO: 1857481 - RNA, 20 nt, Human
ugaaugaauggcuaagcaaa

SEQ ID NO: 1857482 - RNA, 18 nt, Human
ugaaggccccgcccaggc

SEQ ID NO: 1857483 - RNA, 16 nt, Human
ugaagcuuuuauguga

SEQ ID NO: 1857484 - RNA, 21 nt, Human
ugaagcuuuuaugugaaacau

SEQ ID NO: 1857485 - RNA, 20 nt, Human
ugaaggccccgcccaggcuu

SEQ ID NO: 1857486 - RNA, 19 nt, Human
ugaaggccccgcccaggcu

SEQ ID NO: 1857487 - RNA, 16 nt, Human
ugaaacacuuugcaua

SEQ ID NO: 1857488 - RNA, 13 nt, Human
ugaaacauguuuc

SEQ ID NO: 1857489 - RNA, 19 nt, Human
ugaagacucauucuucugu

SEQ ID NO: 1857490 - RNA, 20 nt, Human
ugaagacucauucuucugua

SEQ ID NO: 1857491 - RNA, 16 nt, Human
ugaggcugggcucccu

SEQ ID NO: 1857492 - RNA, 15 nt, Human
ugaggcugggcuccc

SEQ ID NO: 1857493 - RNA, 18 nt, Human
ugaggcucugcccuuggu

SEQ ID NO: 1857494 - RNA, 15 nt, Human
ugaggcucugcccuu

SEQ ID NO: 1857495 - RNA, 16 nt, Human
ugaggcucugcccuug

SEQ ID NO: 1857496 - RNA, 21 nt, Human
ugagucccaggcugagccuca

SEQ ID NO: 1857497 - RNA, 20 nt, Human
ugagucccaggcugagccuc

SEQ ID NO: 1857498 - RNA, 21 nt, Human
ugaggcugggcucccuuccca

SEQ ID NO: 1857499 - RNA, 18 nt, Human
ugaggucagagccugcag

SEQ ID NO: 1857500 - RNA, 19 nt, Human
ugaggucagagccugcagu

SEQ ID NO: 1857501 - RNA, 23 nt, Human
ugagcuuaagaauuuugagcagg

SEQ ID NO: 1857502 - RNA, 22 nt, Human
ugaggaugaaaaaauaacacug

SEQ ID NO: 1857503 - RNA, 19 nt, Human
ugaggaucagaguaaucca

SEQ ID NO: 1857504 - RNA, 17 nt, Human
ugaggaucagaguaauc

SEQ ID NO: 1857505 - RNA, 13 nt, Human
ugaggaucagagu

SEQ ID NO: 1857506 - RNA, 23 nt, Human
ugagccgagaucacgccacugca

SEQ ID NO: 1857507 - RNA, 20 nt, Human
ugagcagggcucagcgggga

SEQ ID NO: 1857508 - RNA, 22 nt, Human
ugagcagggcucagcggggaca

SEQ ID NO: 1857509 - RNA, 23 nt, Human
ugagcagggcucagcggggacag

SEQ ID NO: 1857510 - RNA, 22 nt, Human
ugagccgagaucacgccacugc

SEQ ID NO: 1857511 - RNA, 19 nt, Human
ugagcucaggaguuugaga

SEQ ID NO: 1857512 - RNA, 11 nt, Human
ugagcucagga

SEQ ID NO: 1857513 - RNA, 12 nt, Human
ugagcucagccc

SEQ ID NO: 1857514 - RNA, 11 nt, Human
ugagcucagcc

SEQ ID NO: 1857515 - RNA, 20 nt, Human
ugagcucagcccuggugggc

SEQ ID NO: 1857516 - RNA, 16 nt, Human
ugacuuuccucuuugg

SEQ ID NO: 1857517 - RNA, 21 nt, Human
ugacucuuucuauuguuucuu

SEQ ID NO: 1857518 - RNA, 19 nt, Human
ugacucuuggcacagcaug

SEQ ID NO: 1857519 - RNA, 14 nt, Human
ugacucuuggcaca

SEQ ID NO: 1857520 - RNA, 13 nt, Human
ugaccauucucca

SEQ ID NO: 1857521 - RNA, 14 nt, Human
ugaccauucuccac

SEQ ID NO: 1857522 - RNA, 14 nt, Human
ugagaccaaccugg

SEQ ID NO: 1857523 - RNA, 12 nt, Human
ugagaccugccc

SEQ ID NO: 1857524 - RNA, 22 nt, Human
ugagaccugccccuccucucug

SEQ ID NO: 1857525 - RNA, 15 nt, Human
ugagaccugccccuc

SEQ ID NO: 1857526 - RNA, 14 nt, Human
ugagaccugccccu

SEQ ID NO: 1857527 - RNA, 13 nt, Human
ugagaccugcccc

SEQ ID NO: 1857528 - RNA, 19 nt, Human
ugagaggggaacagacugg

SEQ ID NO: 1857529 - RNA, 18 nt, Human
ugagaggggaacagacug

SEQ ID NO: 1857530 - RNA, 14 nt, Human
ugagaggggaacag

SEQ ID NO: 1857531 - RNA, 15 nt, Human
ugagaaauaaaguuu

SEQ ID NO: 1857532 - RNA, 22 nt, Human
ugacuuuucuguccgagcuuug

SEQ ID NO: 1857533 - RNA, 15 nt, Human
ucuugcucugcugac

SEQ ID NO: 1857534 - RNA, 23 nt, Human
ucuugcucugcugacagacacag

SEQ ID NO: 1857535 - RNA, 17 nt, Human
ucuugccacugccucuu

SEQ ID NO: 1857536 - RNA, 16 nt, Human
ucuugccacugccucu

SEQ ID NO: 1857537 - RNA, 14 nt, Human
ucuugcucugcuga

SEQ ID NO: 1857538 - RNA, 23 nt, Human
ucuugcauggcaaggacugcagg

SEQ ID NO: 1857539 - RNA, 19 nt, Human
ucuugccaaauauaaauaa

SEQ ID NO: 1857540 - RNA, 20 nt, Human
ucuugaaauauaggaacuua

SEQ ID NO: 1857541 - RNA, 21 nt, Human
ucuugaaauauaggaacuuaa

SEQ ID NO: 1857542 - RNA, 22 nt, Human
ucuugaagacuuuucuuucagc

SEQ ID NO: 1857543 - RNA, 13 nt, Human
ucuugaagacuuu

SEQ ID NO: 1857544 - RNA, 16 nt, Human
ucuucuuggucucagu

SEQ ID NO: 1857545 - RNA, 15 nt, Human
ucuuagauguauaua

SEQ ID NO: 1857546 - RNA, 22 nt, Human
ucugugucagguggggcagcuu

SEQ ID NO: 1857547 - RNA, 17 nt, Human
ucugugucagguggggc

SEQ ID NO: 1857548 - RNA, 20 nt, Human
ucugugucagguggggcagc

SEQ ID NO: 1857549 - RNA, 23 nt, Human
ucuuagguuggcaaaaaggcagg

SEQ ID NO: 1857550 - RNA, 20 nt, Human
ucuuagguuggcaaaaaggc

SEQ ID NO: 1857551 - RNA, 14 nt, Human
ucuuauaauuuaaa

SEQ ID NO: 1857552 - RNA, 13 nt, Human
ucuuauaauuuaa

SEQ ID NO: 1857553 - RNA, 22 nt, Human
ucuuauccaacaucaacaucuu

SEQ ID NO: 1857554 - RNA, 21 nt, Human
ucuucagagacuccugcaggc

SEQ ID NO: 1857555 - RNA, 14 nt, Human
ucuucagaucucua

SEQ ID NO: 1857556 - RNA, 22 nt, Human
ucuucaguuaagccuuuggaaa

SEQ ID NO: 1857557 - RNA, 20 nt, Human
ucuucaguuaagccuuugga

SEQ ID NO: 1857558 - RNA, 19 nt, Human
ucuucaguuaagccuuugg

SEQ ID NO: 1857559 - RNA, 15 nt, Human
ucuucagaucucuaa

SEQ ID NO: 1857560 - RNA, 14 nt, Human
ucuuugcagacagg

SEQ ID NO: 1857561 - RNA, 17 nt, Human
ucuuugcagacaggcaa

SEQ ID NO: 1857562 - RNA, 23 nt, Human
ucuuugagugaagcugggagaac

SEQ ID NO: 1857563 - RNA, 13 nt, Human
ucuuugcagacag

SEQ ID NO: 1857564 - RNA, 15 nt, Human
ucuuuggacccugag

SEQ ID NO: 1857565 - RNA, 14 nt, Human
ucuuuggacccuga

SEQ ID NO: 1857566 - RNA, 16 nt, Human
ucuuuggacccugagg

SEQ ID NO: 1857567 - RNA, 13 nt, Human
ucuuuggacccug

SEQ ID NO: 1857568 - RNA, 23 nt, Human
ucuuucccucccuuccucuuucc

SEQ ID NO: 1857569 - RNA, 13 nt, Human
ucuuucccucccu

SEQ ID NO: 1857570 - RNA, 12 nt, Human
ucuuucccuccc

SEQ ID NO: 1857571 - RNA, 13 nt, Human
ucuuguguguuua

SEQ ID NO: 1857572 - RNA, 23 nt, Human
ucuuuccaaaguacacuguuuca

SEQ ID NO: 1857573 - RNA, 15 nt, Human
ugaaacacuuugcau

SEQ ID NO: 1857574 - RNA, 12 nt, Human
ugaaaauuuuga

SEQ ID NO: 1857575 - RNA, 14 nt, Human
ugaaaauucagugg

SEQ ID NO: 1857576 - RNA, 20 nt, Human
ugaaaauuaggauuucauga

SEQ ID NO: 1857577 - RNA, 22 nt, Human
ugaaaagaaaaaugagccuggc

SEQ ID NO: 1857578 - RNA, 20 nt, Human
ugaaaagaaaaaugagccug

SEQ ID NO: 1857579 - RNA, 19 nt, Human
ugaaaagaaaaaugagccu

SEQ ID NO: 1857580 - RNA, 18 nt, Human
ugaaaaccacauuggaga

SEQ ID NO: 1857581 - RNA, 23 nt, Human
ugaaaacacuguucucugcccuc

SEQ ID NO: 1857582 - RNA, 22 nt, Human
ugaaaacacuguucucugcccu

SEQ ID NO: 1857583 - RNA, 21 nt, Human
ugaaaacacuguucucugccc

SEQ ID NO: 1857584 - RNA, 20 nt, Human
ugaaaacacuguucucugcc

SEQ ID NO: 1857585 - RNA, 17 nt, Human
ugaaaacacuguucucu

SEQ ID NO: 1857586 - RNA, 16 nt, Human
ucuuuuuauacuauua

SEQ ID NO: 1857587 - RNA, 21 nt, Human
ugaaaacacauuuuucuuagg

SEQ ID NO: 1857588 - RNA, 15 nt, Human
ucugcugcuggcugg

SEQ ID NO: 1857589 - RNA, 14 nt, Human
ucugcugcuggcug

SEQ ID NO: 1857590 - RNA, 17 nt, Human
ucugcugcuggcugguu

SEQ ID NO: 1857591 - RNA, 14 nt, Human
ucuggaauuugaaa

SEQ ID NO: 1857592 - RNA, 18 nt, Human
ucuggacuccucugucca

SEQ ID NO: 1857593 - RNA, 16 nt, Human
ucuggacuccucuguc

SEQ ID NO: 1857594 - RNA, 15 nt, Human
ucuggacuccucugu

SEQ ID NO: 1857595 - RNA, 22 nt, Human
ucuggacuccucuguccaggca

SEQ ID NO: 1857596 - RNA, 13 nt, Human
ucugcugcuggcu

SEQ ID NO: 1857597 - RNA, 11 nt, Human
ucugcugcugg

SEQ ID NO: 1857598 - RNA, 13 nt, Human
ucugcugaaggaa

SEQ ID NO: 1857599 - RNA, 17 nt, Human
ucugccugcccaggccc

SEQ ID NO: 1857600 - RNA, 18 nt, Human
ucugccugcccaggcccc

SEQ ID NO: 1857601 - RNA, 20 nt, Human
ucugccugcccaggccccug

SEQ ID NO: 1857602 - RNA, 22 nt, Human
ucuggagcccacuguacuugcu

SEQ ID NO: 1857603 - RNA, 16 nt, Human
ucuggagcccacugua

SEQ ID NO: 1857604 - RNA, 12 nt, Human
ucuggagcccac

SEQ ID NO: 1857605 - RNA, 16 nt, Human
ucuggugacuuuccuc

SEQ ID NO: 1857606 - RNA, 15 nt, Human
ucuguacagagccca

SEQ ID NO: 1857607 - RNA, 14 nt, Human
ucuguacagagccc

SEQ ID NO: 1857608 - RNA, 12 nt, Human
ucuguccuggga

SEQ ID NO: 1857609 - RNA, 17 nt, Human
ucugucgcccagucugg

SEQ ID NO: 1857610 - RNA, 13 nt, Human
ucugucuaggaau

SEQ ID NO: 1857611 - RNA, 14 nt, Human
ucugucucagucca

SEQ ID NO: 1857612 - RNA, 24 nt, Human
ucugagaucaaaacgguuuuacug

SEQ ID NO: 1857613 - RNA, 18 nt, Human
ucugagaggacuuuucuu

SEQ ID NO: 1857614 - RNA, 23 nt, Human
ucugacccaugcugcccugugag

SEQ ID NO: 1857615 - RNA, 22 nt, Human
ucugacccaugcugcccuguga

SEQ ID NO: 1857616 - RNA, 20 nt, Human
ucugacccaugcugcccugu

SEQ ID NO: 1857617 - RNA, 19 nt, Human
ucugacccaugcugcccug

SEQ ID NO: 1857618 - RNA, 13 nt, Human
ucugcacuccccu

SEQ ID NO: 1857619 - RNA, 22 nt, Human
ucugaggaauccagacccggcu

SEQ ID NO: 1857620 - RNA, 18 nt, Human
ucugaggaauccagaccc

SEQ ID NO: 1857621 - RNA, 21 nt, Human
ucugaggaauccagacccggc

SEQ ID NO: 1857622 - RNA, 16 nt, Human
ucugcccacucccugc

SEQ ID NO: 1857623 - RNA, 14 nt, Human
ucugcccacucccu

SEQ ID NO: 1857624 - RNA, 13 nt, Human
ucugcccacuccc

SEQ ID NO: 1857625 - RNA, 12 nt, Human
ucugccucccau

SEQ ID NO: 1857626 - RNA, 15 nt, Human
ucugccucccaucac

SEQ ID NO: 1857627 - RNA, 13 nt, Human
ucugccucccauc

SEQ ID NO: 1857628 - RNA, 12 nt, Human
ucugcccacucc

SEQ ID NO: 1857629 - RNA, 22 nt, Human
ucugccauauucuguuggccag

SEQ ID NO: 1857630 - RNA, 23 nt, Human
ucugccauauucuguuggccagu

SEQ ID NO: 1857631 - RNA, 18 nt, Human
ucugccauauucuguugg

SEQ ID NO: 1857632 - RNA, 23 nt, Human
ucugccucugacacacagcucug

SEQ ID NO: 1857633 - RNA, 21 nt, Human
ucugccucugacacacagcuc

SEQ ID NO: 1857634 - RNA, 22 nt, Human
ucugccucugacacacagcucu

SEQ ID NO: 1857635 - RNA, 19 nt, Human
ucugccugaagucacacag

SEQ ID NO: 1857636 - RNA, 20 nt, Human
ucugccugaagucacacagu

SEQ ID NO: 1857637 - RNA, 21 nt, Human
ucugccucccaucacccgcua

SEQ ID NO: 1857638 - RNA, 20 nt, Human
ucugccucccaucacccgcu

SEQ ID NO: 1857639 - RNA, 17 nt, Human
ucugccucccaucaccc

SEQ ID NO: 1857640 - RNA, 16 nt, Human
ucugccucccaucacc

SEQ ID NO: 1857641 - RNA, 15 nt, Human
ucugccucugacaca

SEQ ID NO: 1857642 - RNA, 18 nt, Human
ucugccucugacacacag

SEQ ID NO: 1857643 - RNA, 20 nt, Human
ucugccucacauagcuuaca

SEQ ID NO: 1857644 - RNA, 15 nt, Human
ucugccuccucuuca

SEQ ID NO: 1857645 - RNA, 17 nt, Human
ucaguuaagccuuugga

SEQ ID NO: 1857646 - RNA, 16 nt, Human
ucaguuaagccuuugg

SEQ ID NO: 1857647 - RNA, 18 nt, Human
ucagugugacugaucucu

SEQ ID NO: 1857648 - RNA, 17 nt, Human
ucagucugauucccaag

SEQ ID NO: 1857649 - RNA, 19 nt, Human
ucagucugauucccaagcu

SEQ ID NO: 1857650 - RNA, 14 nt, Human
ucagguggggcagc

SEQ ID NO: 1857651 - RNA, 18 nt, Human
ucaggugcugccauccag

SEQ ID NO: 1857652 - RNA, 20 nt, Human
ucaggugcugccauccaggu

SEQ ID NO: 1857653 - RNA, 15 nt, Human
ucagguggggcagcu

SEQ ID NO: 1857654 - RNA, 16 nt, Human
ucagguggggcagcuu

SEQ ID NO: 1857655 - RNA, 21 nt, Human
ucagguggggcagcuugaggg

SEQ ID NO: 1857656 - RNA, 17 nt, Human
ucagguggggcagcuug

SEQ ID NO: 1857657 - RNA, 20 nt, Human
ucagguggggucacucuggc

SEQ ID NO: 1857658 - RNA, 17 nt, Human
ucagguggggucacucu

SEQ ID NO: 1857659 - RNA, 21 nt, Human
ucagguggggucacucuggca

SEQ ID NO: 1857660 - RNA, 18 nt, Human
ucaguccccgugaaggag

SEQ ID NO: 1857661 - RNA, 18 nt, Human
ucaguccaugaagaugua

SEQ ID NO: 1857662 - RNA, 15 nt, Human
ucaguccauagcaga

SEQ ID NO: 1857663 - RNA, 24 nt, Human
ucauggacuucugccagcauaaua

SEQ ID NO: 1857664 - RNA, 16 nt, Human
ucagccugcuccagcu

SEQ ID NO: 1857665 - RNA, 22 nt, Human
ucagccucccaaagugcuggga

SEQ ID NO: 1857666 - RNA, 12 nt, Human
ucagccucccga

SEQ ID NO: 1857667 - RNA, 20 nt, Human
ucagccucccgaauagcugg

SEQ ID NO: 1857668 - RNA, 18 nt, Human
ucagcuccagcucaccag

SEQ ID NO: 1857669 - RNA, 21 nt, Human
ucagcuccagcucaccagccc

SEQ ID NO: 1857670 - RNA, 22 nt, Human
ucagcuccagcucaccagcccc

SEQ ID NO: 1857671 - RNA, 15 nt, Human
ucagcugcuacuacu

SEQ ID NO: 1857672 - RNA, 15 nt, Human
ucagcacgauuucug

SEQ ID NO: 1857673 - RNA, 16 nt, Human
ucagcacgauuucugu

SEQ ID NO: 1857674 - RNA, 20 nt, Human
ucagcaccuacaguguacag

SEQ ID NO: 1857675 - RNA, 21 nt, Human
ucagcaccuacaguguacagu

SEQ ID NO: 1857676 - RNA, 22 nt, Human
ucagcaccuacaguguacaguc

SEQ ID NO: 1857677 - RNA, 17 nt, Human
ucagcacgauuucuguu

SEQ ID NO: 1857678 - RNA, 12 nt, Human
ucagccucccaa

SEQ ID NO: 1857679 - RNA, 13 nt, Human
ucagccucccaaa

SEQ ID NO: 1857680 - RNA, 15 nt, Human
ucagcauccuggcac

SEQ ID NO: 1857681 - RNA, 16 nt, Human
ucagcauccuggcacc

SEQ ID NO: 1857682 - RNA, 17 nt, Human
ucagcauccuggcaccc

SEQ ID NO: 1857683 - RNA, 18 nt, Human
ucagcauccuggcacccg

SEQ ID NO: 1857684 - RNA, 15 nt, Human
ucagaucucuaacuu

SEQ ID NO: 1857685 - RNA, 16 nt, Human
ucccaggauguacaag

SEQ ID NO: 1857686 - RNA, 18 nt, Human
ucccaggcauuccccagg

SEQ ID NO: 1857687 - RNA, 17 nt, Human
ucccaggcauuccccag

SEQ ID NO: 1857688 - RNA, 19 nt, Human
ucccaggcauuccccagga

SEQ ID NO: 1857689 - RNA, 19 nt, Human
ucccaggcugagccucagu

SEQ ID NO: 1857690 - RNA, 15 nt, Human
ucccaugagccucag

SEQ ID NO: 1857691 - RNA, 16 nt, Human
ucccaugagccucagc

SEQ ID NO: 1857692 - RNA, 18 nt, Human
ucccaccucucucacucc

SEQ ID NO: 1857693 - RNA, 17 nt, Human
ucccaccucucucacuc

SEQ ID NO: 1857694 - RNA, 14 nt, Human
ucccaccucucuca

SEQ ID NO: 1857695 - RNA, 16 nt, Human
ucccaccucagccucc

SEQ ID NO: 1857696 - RNA, 18 nt, Human
ucccaccucagccucccg

SEQ ID NO: 1857697 - RNA, 20 nt, Human
ucccaccucucucacuccuu

SEQ ID NO: 1857698 - RNA, 19 nt, Human
ucccaccuuggcugcaggg

SEQ ID NO: 1857699 - RNA, 21 nt, Human
ucccaccuuggcugcagggag

SEQ ID NO: 1857700 - RNA, 14 nt, Human
ucccacucagucca

SEQ ID NO: 1857701 - RNA, 17 nt, Human
uccauagagagcaagac

SEQ ID NO: 1857702 - RNA, 23 nt, Human
uccauaaucuggacuccucuguc

SEQ ID NO: 1857703 - RNA, 20 nt, Human
uccauagagagcaagacgcu

SEQ ID NO: 1857704 - RNA, 18 nt, Human
ucccaacucaccccagcc

SEQ ID NO: 1857705 - RNA, 17 nt, Human
ucccaacucaccccagc

SEQ ID NO: 1857706 - RNA, 21 nt, Human
ucccaacucaccccagcccca

SEQ ID NO: 1857707 - RNA, 19 nt, Human
ucccaacucaccccagccc

SEQ ID NO: 1857708 - RNA, 14 nt, Human
ucccaacuuguaaa

SEQ ID NO: 1857709 - RNA, 18 nt, Human
uccaugucgccucugcau

SEQ ID NO: 1857710 - RNA, 17 nt, Human
uccaugucgccucugca

SEQ ID NO: 1857711 - RNA, 19 nt, Human
uccaugucgccucugcauu

SEQ ID NO: 1857712 - RNA, 16 nt, Human
uccaugucgccucugc

SEQ ID NO: 1857713 - RNA, 14 nt, Human
uccacuuucuagcc

SEQ ID NO: 1857714 - RNA, 17 nt, Human
uccacuuuaucuugaau

SEQ ID NO: 1857715 - RNA, 19 nt, Human
uccagagaguggcuccucc

SEQ ID NO: 1857716 - RNA, 22 nt, Human
uccagagaguggcuccucccgg

SEQ ID NO: 1857717 - RNA, 15 nt, Human
uccacuuuaucuuga

SEQ ID NO: 1857718 - RNA, 23 nt, Human
uccacuuagaaauugcauuuccu

SEQ ID NO: 1857719 - RNA, 21 nt, Human
uccacuuagaaauugcauuuc

SEQ ID NO: 1857720 - RNA, 22 nt, Human
uccacugugccaugugccaggu

SEQ ID NO: 1857721 - RNA, 21 nt, Human
uccacccugcucuccgaccag

SEQ ID NO: 1857722 - RNA, 13 nt, Human
uccacccugcucu

SEQ ID NO: 1857723 - RNA, 14 nt, Human
uccacccugcucuc

SEQ ID NO: 1857724 - RNA, 18 nt, Human
uccagcaauucuccugcc

SEQ ID NO: 1857725 - RNA, 21 nt, Human
uccagcaauucuccugccuca

SEQ ID NO: 1857726 - RNA, 20 nt, Human
uccagcaauucuccugccuc

SEQ ID NO: 1857727 - RNA, 19 nt, Human
uccagcaauucuccugccu

SEQ ID NO: 1857728 - RNA, 22 nt, Human
uccagauuuuuuacagcugccu

SEQ ID NO: 1857729 - RNA, 22 nt, Human
uccagcuggccgggagccugau

SEQ ID NO: 1857730 - RNA, 21 nt, Human
uccagcuggccgggagccuga

SEQ ID NO: 1857731 - RNA, 15 nt, Human
uccagcuggccggga

SEQ ID NO: 1857732 - RNA, 19 nt, Human
uccagcuggguuggaaaac

SEQ ID NO: 1857733 - RNA, 16 nt, Human
uccaagaagcccagga

SEQ ID NO: 1857734 - RNA, 15 nt, Human
uccaagaagcccagg

SEQ ID NO: 1857735 - RNA, 14 nt, Human
uccaagaagcccag

SEQ ID NO: 1857736 - RNA, 20 nt, Human
uccaagaccuucuccuucac

SEQ ID NO: 1857737 - RNA, 19 nt, Human
uccaagaagcccaggaaag

SEQ ID NO: 1857738 - RNA, 22 nt, Human
uccaagcaggacauggacaagg

SEQ ID NO: 1857739 - RNA, 14 nt, Human
uccaagcaggacau

SEQ ID NO: 1857740 - RNA, 17 nt, Human
uccaagcaaaugugaau

SEQ ID NO: 1857741 - RNA, 15 nt, Human
uccaagcaaauguga

SEQ ID NO: 1857742 - RNA, 19 nt, Human
uccacaagagcccaggccu

SEQ ID NO: 1857743 - RNA, 20 nt, Human
uccacaagagcccaggccuc

SEQ ID NO: 1857744 - RNA, 21 nt, Human
uccacaagagcccaggccucc

SEQ ID NO: 1857745 - RNA, 12 nt, Human
ucuacuaaaaau

SEQ ID NO: 1857746 - RNA, 15 nt, Human
ucuacuaaaaauaca

SEQ ID NO: 1857747 - RNA, 19 nt, Human
ucuacuaaaaauacaaaaa

SEQ ID NO: 1857748 - RNA, 14 nt, Human
ucuacuauuuaugu

SEQ ID NO: 1857749 - RNA, 21 nt, Human
ucuacucgaguuacagacaaa

SEQ ID NO: 1857750 - RNA, 20 nt, Human
ucuacucgaguuacagacaa

SEQ ID NO: 1857751 - RNA, 18 nt, Human
ucuacucuagggaaaaac

SEQ ID NO: 1857752 - RNA, 18 nt, Human
ucuaggaggucucuaaga

SEQ ID NO: 1857753 - RNA, 15 nt, Human
ucuagguaaauuaca

SEQ ID NO: 1857754 - RNA, 12 nt, Human
ucuagggaaaaa

SEQ ID NO: 1857755 - RNA, 19 nt, Human
ucuagggaaaaaccagcgu

SEQ ID NO: 1857756 - RNA, 17 nt, Human
ucucacuguugcccagg

SEQ ID NO: 1857757 - RNA, 14 nt, Human
ucucacuguugccc

SEQ ID NO: 1857758 - RNA, 15 nt, Human
ucucacuguugccca

SEQ ID NO: 1857759 - RNA, 13 nt, Human
ucucaaauuucua

SEQ ID NO: 1857760 - RNA, 22 nt, Human
ucuaucuuugagcgcccacuag

SEQ ID NO: 1857761 - RNA, 14 nt, Human
ucucaaauuucuaa

SEQ ID NO: 1857762 - RNA, 16 nt, Human
ucucaaauuucuaaau

SEQ ID NO: 1857763 - RNA, 18 nt, Human
ucucaaauuucuaaaucu

SEQ ID NO: 1857764 - RNA, 16 nt, Human
ucucacacaugagcau

SEQ ID NO: 1857765 - RNA, 23 nt, Human
ucucacacaugagcaucaggcca

SEQ ID NO: 1857766 - RNA, 20 nt, Human
ucucacugccaugccagcuu

SEQ ID NO: 1857767 - RNA, 21 nt, Human
ucucacacaugagcaucaggc

SEQ ID NO: 1857768 - RNA, 23 nt, Human
ucucacucugucgcccagucugg

SEQ ID NO: 1857769 - RNA, 15 nt, Human
ucggaaaacaugcua

SEQ ID NO: 1857770 - RNA, 18 nt, Human
ucggaaaacaugcuacac

SEQ ID NO: 1857771 - RNA, 14 nt, Human
ucgcccagucugga

SEQ ID NO: 1857772 - RNA, 19 nt, Human
ucgcccagucuggaaugca

SEQ ID NO: 1857773 - RNA, 23 nt, Human
ucgcccagucuggaaugcagugg

SEQ ID NO: 1857774 - RNA, 15 nt, Human
ucggccuccauccug

SEQ ID NO: 1857775 - RNA, 16 nt, Human
ucggccuccauccuga

SEQ ID NO: 1857776 - RNA, 17 nt, Human
ucggccuccauccugag

SEQ ID NO: 1857777 - RNA, 23 nt, Human
ucgcaggauucuuccucccuccc

SEQ ID NO: 1857778 - RNA, 21 nt, Human
ucgcaggauucuuccucccuc

SEQ ID NO: 1857779 - RNA, 17 nt, Human
ucgcaggauucuuccuc

SEQ ID NO: 1857780 - RNA, 22 nt, Human
uccuuuucgcaggauucuuccu

SEQ ID NO: 1857781 - RNA, 23 nt, Human
uccuugaaaacacuguucucugc

SEQ ID NO: 1857782 - RNA, 22 nt, Human
uccuugaaaacacuguucucug

SEQ ID NO: 1857783 - RNA, 17 nt, Human
uccuuaucaaaggacac

SEQ ID NO: 1857784 - RNA, 15 nt, Human
uccuuaucaaaggac

SEQ ID NO: 1857785 - RNA, 14 nt, Human
uccuuaucaaagga

SEQ ID NO: 1857786 - RNA, 21 nt, Human
uccuuaccagcagagcaccuu

SEQ ID NO: 1857787 - RNA, 22 nt, Human
uccuuugugaggaagccgcugg

SEQ ID NO: 1857788 - RNA, 18 nt, Human
uccuuugugaggaagccg

SEQ ID NO: 1857789 - RNA, 17 nt, Human
uccuuugugaggaagcc

SEQ ID NO: 1857790 - RNA, 22 nt, Human
uccuuggugucgggcaugacac

SEQ ID NO: 1857791 - RNA, 21 nt, Human
uccuuggugucgggcaugaca

SEQ ID NO: 1857792 - RNA, 18 nt, Human
uccuuggugucgggcaug

SEQ ID NO: 1857793 - RNA, 15 nt, Human
uccugaggcuccacu

SEQ ID NO: 1857794 - RNA, 21 nt, Human
uccugagccagauuucacucu

SEQ ID NO: 1857795 - RNA, 22 nt, Human
uccucuguccaggcacugcugc

SEQ ID NO: 1857796 - RNA, 19 nt, Human
uccugagccagauuucacu

SEQ ID NO: 1857797 - RNA, 18 nt, Human
uccugagccagauuucac

SEQ ID NO: 1857798 - RNA, 23 nt, Human
uccucuguacagagcccacgccc

SEQ ID NO: 1857799 - RNA, 17 nt, Human
uccugagccagauuuca

SEQ ID NO: 1857800 - RNA, 17 nt, Human
uccucuguccaggcacu

SEQ ID NO: 1857801 - RNA, 16 nt, Human
uccugaggcuccacuu

SEQ ID NO: 1857802 - RNA, 17 nt, Human
uccugaggcuccacuug

SEQ ID NO: 1857803 - RNA, 12 nt, Human
uccugaggcugg

SEQ ID NO: 1857804 - RNA, 19 nt, Human
uccugaggcugggcucccu

SEQ ID NO: 1857805 - RNA, 17 nt, Human
uccugaggcugggcucc

SEQ ID NO: 1857806 - RNA, 16 nt, Human
uccugaggcugggcuc

SEQ ID NO: 1857807 - RNA, 15 nt, Human
uccugaggcugggcu

SEQ ID NO: 1857808 - RNA, 15 nt, Human
uccucuggccugugu

SEQ ID NO: 1857809 - RNA, 13 nt, Human
uccucuguacaga

SEQ ID NO: 1857810 - RNA, 15 nt, Human
uccucuguacagagc

SEQ ID NO: 1857811 - RNA, 21 nt, Human
uccucuaggaggucucuaaga

SEQ ID NO: 1857812 - RNA, 17 nt, Human
uccucuaggaggucucu

SEQ ID NO: 1857813 - RNA, 13 nt, Human
uccuccuggacuc

SEQ ID NO: 1857814 - RNA, 21 nt, Human
uccuccuuuucacaguucucu

SEQ ID NO: 1857815 - RNA, 20 nt, Human
uccucaaaacuucagacaua

SEQ ID NO: 1857816 - RNA, 13 nt, Human
uccuccaggugca

SEQ ID NO: 1857817 - RNA, 12 nt, Human
uccuccaggugc

SEQ ID NO: 1857818 - RNA, 22 nt, Human
uccuccaggugcacaagcucca

SEQ ID NO: 1857819 - RNA, 20 nt, Human
uccuccaggugcacaagcuc

SEQ ID NO: 1857820 - RNA, 18 nt, Human
uccuccaggugcacaagc

SEQ ID NO: 1857821 - RNA, 14 nt, Human
uccuccaggugcac

SEQ ID NO: 1857822 - RNA, 12 nt, Human
uccuccucagau

SEQ ID NO: 1857823 - RNA, 17 nt, Human
uccuaguuccaccauca

SEQ ID NO: 1857824 - RNA, 14 nt, Human
uccuaguuccacca

SEQ ID NO: 1857825 - RNA, 18 nt, Human
uccuaagcuauucaguaa

SEQ ID NO: 1857826 - RNA, 16 nt, Human
uccuaagcuauucagu

SEQ ID NO: 1857827 - RNA, 21 nt, Human
uccuaguuccaccaucaagcc

SEQ ID NO: 1857828 - RNA, 22 nt, Human
uccuaguuccaccaucaagcca

SEQ ID NO: 1857829 - RNA, 22 nt, Human
uccgaaagggacuuggaagcuc

SEQ ID NO: 1857830 - RNA, 17 nt, Human
ucccuucuuuuucuucu

SEQ ID NO: 1857831 - RNA, 21 nt, Human
uccgaaagggacuuggaagcu

SEQ ID NO: 1857832 - RNA, 21 nt, Human
uccgcuuucuacccagcgagc

SEQ ID NO: 1857833 - RNA, 16 nt, Human
ucccuucccaccucuc

SEQ ID NO: 1857834 - RNA, 21 nt, Human
ucccuucccacuggaggcaug

SEQ ID NO: 1857835 - RNA, 17 nt, Human
ucccuucccaccucucu

SEQ ID NO: 1857836 - RNA, 18 nt, Human
ucccugccccucccuuca

SEQ ID NO: 1857837 - RNA, 14 nt, Human
ucccugccccuccc

SEQ ID NO: 1857838 - RNA, 16 nt, Human
ucccugccccccagcc

SEQ ID NO: 1857839 - RNA, 16 nt, Human
ucccugccaauggacu

SEQ ID NO: 1857840 - RNA, 14 nt, Human
ucccugccaaugga

SEQ ID NO: 1857841 - RNA, 13 nt, Human
ucccucuggggcu

SEQ ID NO: 1857842 - RNA, 17 nt, Human
ucccucuggggcuguuc

SEQ ID NO: 1857843 - RNA, 20 nt, Human
ucccugcacuugcagacucu

SEQ ID NO: 1857844 - RNA, 14 nt, Human
ucccucccuugggg

SEQ ID NO: 1857845 - RNA, 13 nt, Human
ucccucccuuggg

SEQ ID NO: 1857846 - RNA, 18 nt, Human
ucccucccuuccucuuuc

SEQ ID NO: 1857847 - RNA, 17 nt, Human
ucccuacuuccugugac

SEQ ID NO: 1857848 - RNA, 17 nt, Human
ucccaugagccucagca

SEQ ID NO: 1857849 - RNA, 22 nt, Human
ucccaugagccucagcauccug

SEQ ID NO: 1857850 - RNA, 23 nt, Human
ucccuaccgagucucuucuccac

SEQ ID NO: 1857851 - RNA, 22 nt, Human
ucccuaccgagucucuucucca

SEQ ID NO: 1857852 - RNA, 21 nt, Human
ucccuaccgagucucuucucc

SEQ ID NO: 1857853 - RNA, 19 nt, Human
ucccuaccgagucucuucu

SEQ ID NO: 1857854 - RNA, 16 nt, Human
uggacagaagcagcuc

SEQ ID NO: 1857855 - RNA, 15 nt, Human
uggacagaagcagcu

SEQ ID NO: 1857856 - RNA, 18 nt, Human
uggacagaagcagcucuu

SEQ ID NO: 1857857 - RNA, 17 nt, Human
uggacagaagcagcucu

SEQ ID NO: 1857858 - RNA, 20 nt, Human
uggacucaccucccccaucu

SEQ ID NO: 1857859 - RNA, 18 nt, Human
uggacucaccucccccau

SEQ ID NO: 1857860 - RNA, 19 nt, Human
uggacaugcacagcuaaca

SEQ ID NO: 1857861 - RNA, 13 nt, Human
uggacaugcacag

SEQ ID NO: 1857862 - RNA, 19 nt, Human
uggaauaacauguaauuaa

SEQ ID NO: 1857863 - RNA, 15 nt, Human
uggaauaacauguaa

SEQ ID NO: 1857864 - RNA, 14 nt, Human
uggaauaacaugua

SEQ ID NO: 1857865 - RNA, 21 nt, Human
uggaacguuuuuccuguucuu

SEQ ID NO: 1857866 - RNA, 15 nt, Human
uggaauauauaacca

SEQ ID NO: 1857867 - RNA, 16 nt, Human
uggaauauauaaccag

SEQ ID NO: 1857868 - RNA, 17 nt, Human
uggaauaaggagaauga

SEQ ID NO: 1857869 - RNA, 22 nt, Human
uggaauaauccuaaacauauga

SEQ ID NO: 1857870 - RNA, 20 nt, Human
uggaaaaauagccugccucu

SEQ ID NO: 1857871 - RNA, 17 nt, Human
uggaaaaauagccugcc

SEQ ID NO: 1857872 - RNA, 20 nt, Human
uggaaagaguaggaagacuu

SEQ ID NO: 1857873 - RNA, 14 nt, Human
uggaaagaguacuc

SEQ ID NO: 1857874 - RNA, 21 nt, Human
uggaaagacuuuuccaacccu

SEQ ID NO: 1857875 - RNA, 22 nt, Human
uggaaacagcucgacuuuaaaa

SEQ ID NO: 1857876 - RNA, 17 nt, Human
uggaaacagcucgacuu

SEQ ID NO: 1857877 - RNA, 13 nt, Human
uggcagugggagc

SEQ ID NO: 1857878 - RNA, 19 nt, Human
uggcaggaguuggaagugu

SEQ ID NO: 1857879 - RNA, 13 nt, Human
uggcagcugcuuu

SEQ ID NO: 1857880 - RNA, 21 nt, Human
uggcacccggccccugcuggu

SEQ ID NO: 1857881 - RNA, 20 nt, Human
uggccacuccagaccccugg

SEQ ID NO: 1857882 - RNA, 17 nt, Human
uggccacuccagacccc

SEQ ID NO: 1857883 - RNA, 20 nt, Human
uggccagaugcaccagcccu

SEQ ID NO: 1857884 - RNA, 21 nt, Human
uggccagaugcaccagcccuu

SEQ ID NO: 1857885 - RNA, 15 nt, Human
uggacuccugcacac

SEQ ID NO: 1857886 - RNA, 15 nt, Human
uggacuccucugucc

SEQ ID NO: 1857887 - RNA, 18 nt, Human
uggaggaaggaaacccag

SEQ ID NO: 1857888 - RNA, 12 nt, Human
uggaggaaggaa

SEQ ID NO: 1857889 - RNA, 20 nt, Human
uggaggaaggaaacccagcu

SEQ ID NO: 1857890 - RNA, 20 nt, Human
uggauuuaacagaaauguac

SEQ ID NO: 1857891 - RNA, 24 nt, Human
uggauuuaacagaaauguacagca

SEQ ID NO: 1857892 - RNA, 16 nt, Human
uggguucuacccaggu

SEQ ID NO: 1857893 - RNA, 15 nt, Human
uggguucuacccagg

SEQ ID NO: 1857894 - RNA, 22 nt, Human
uggguucuacccaggugcuagg

SEQ ID NO: 1857895 - RNA, 14 nt, Human
uggguuaguggaug

SEQ ID NO: 1857896 - RNA, 19 nt, Human
ugggguuuaucagaauucu

SEQ ID NO: 1857897 - RNA, 16 nt, Human
uggguaacuagggaag

SEQ ID NO: 1857898 - RNA, 18 nt, Human
uggguuucuaaagcugcc

SEQ ID NO: 1857899 - RNA, 17 nt, Human
uggguuucuaaagcugc

SEQ ID NO: 1857900 - RNA, 21 nt, Human
uggguuucuaaagcugccagc

SEQ ID NO: 1857901 - RNA, 22 nt, Human
ugguauagaaaugcugguuuuu

SEQ ID NO: 1857902 - RNA, 14 nt, Human
ugguauagaaaugc

SEQ ID NO: 1857903 - RNA, 16 nt, Human
ugguauagaaaugcug

SEQ ID NO: 1857904 - RNA, 13 nt, Human
ugguauagaaaug

SEQ ID NO: 1857905 - RNA, 23 nt, Human
ugguauuggcuagagguucaaag

SEQ ID NO: 1857906 - RNA, 18 nt, Human
ugguaugaucacggcuca

SEQ ID NO: 1857907 - RNA, 20 nt, Human
ugggggaucacagccucuga

SEQ ID NO: 1857908 - RNA, 21 nt, Human
ugggggaucacagccucugaa

SEQ ID NO: 1857909 - RNA, 18 nt, Human
ugggggcugggcagagga

SEQ ID NO: 1857910 - RNA, 17 nt, Human
ugggggcugggcagagg

SEQ ID NO: 1857911 - RNA, 19 nt, Human
ugggggcugggcagaggaa

SEQ ID NO: 1857912 - RNA, 12 nt, Human
ugggggugcauu

SEQ ID NO: 1857913 - RNA, 15 nt, Human
ugggggugcauuuga

SEQ ID NO: 1857914 - RNA, 16 nt, Human
ugggcagaggaaagca

SEQ ID NO: 1857915 - RNA, 20 nt, Human
ugggcgugagaccugccccu

SEQ ID NO: 1857916 - RNA, 22 nt, Human
ugggcuaagugauccucccacc

SEQ ID NO: 1857917 - RNA, 16 nt, Human
ugggcuaguugggcuu

SEQ ID NO: 1857918 - RNA, 23 nt, Human
ugggcuggguucuacccaggugc

SEQ ID NO: 1857919 - RNA, 17 nt, Human
ugggcuggugucaccug

SEQ ID NO: 1857920 - RNA, 15 nt, Human
ugggcuucaguggca

SEQ ID NO: 1857921 - RNA, 17 nt, Human
ugggcuucaguggcagc

SEQ ID NO: 1857922 - RNA, 14 nt, Human
uggcuuuugugcau

SEQ ID NO: 1857923 - RNA, 21 nt, Human
uggcuugaguuuaaauuguaa

SEQ ID NO: 1857924 - RNA, 21 nt, Human
uggcugcuucaaggauccuga

SEQ ID NO: 1857925 - RNA, 21 nt, Human
uggcugggggccucagugcca

SEQ ID NO: 1857926 - RNA, 15 nt, Human
ugggauccuccaggu

SEQ ID NO: 1857927 - RNA, 15 nt, Human
ugggagugagcuggu

SEQ ID NO: 1857928 - RNA, 17 nt, Human
ugggagcugccuguuca

SEQ ID NO: 1857929 - RNA, 21 nt, Human
ugggagcugccuguucagcuc

SEQ ID NO: 1857930 - RNA, 14 nt, Human
ugggaguacaaaag

SEQ ID NO: 1857931 - RNA, 22 nt, Human
ugggagcugccuguucagcucc

SEQ ID NO: 1857932 - RNA, 15 nt, Human
ugggcagaggaaagc

SEQ ID NO: 1857933 - RNA, 17 nt, Human
ugggauuacagguguga

SEQ ID NO: 1857934 - RNA, 21 nt, Human
ugggauuacagggaugagcca

SEQ ID NO: 1857935 - RNA, 13 nt, Human
ugggauccuggag

SEQ ID NO: 1857936 - RNA, 18 nt, Human
ugggauccuccaggugca

SEQ ID NO: 1857937 - RNA, 18 nt, Human
ugggauuacaggcuccug

SEQ ID NO: 1857938 - RNA, 16 nt, Human
ugggauuacaggugug

SEQ ID NO: 1857939 - RNA, 12 nt, Human
ugggacacccug

SEQ ID NO: 1857940 - RNA, 13 nt, Human
ugggacacccugu

SEQ ID NO: 1857941 - RNA, 13 nt, Human
ugggagcaaaaga

SEQ ID NO: 1857942 - RNA, 12 nt, Human
ugggagcugccu

SEQ ID NO: 1857943 - RNA, 13 nt, Human
ugggagcugccug

SEQ ID NO: 1857944 - RNA, 14 nt, Human
ugggagcugccugu

SEQ ID NO: 1857945 - RNA, 14 nt, Human
ugcacuuuguucug

SEQ ID NO: 1857946 - RNA, 12 nt, Human
ugcacuuuguuc

SEQ ID NO: 1857947 - RNA, 20 nt, Human
ugcagcaauaaagcagcguu

SEQ ID NO: 1857948 - RNA, 23 nt, Human
ugcagcaauaaagcagcguuucu

SEQ ID NO: 1857949 - RNA, 21 nt, Human
ugcagagcaggaaacaugacu

SEQ ID NO: 1857950 - RNA, 20 nt, Human
ugaguccccuguuuguuucu

SEQ ID NO: 1857951 - RNA, 17 nt, Human
ugcaccgggccacagag

SEQ ID NO: 1857952 - RNA, 22 nt, Human
ugcaccgggccacagagaaagu

SEQ ID NO: 1857953 - RNA, 23 nt, Human
ugcaccggcuggccuggccccuc

SEQ ID NO: 1857954 - RNA, 19 nt, Human
ugaguccccuguuuguuuc

SEQ ID NO: 1857955 - RNA, 14 nt, Human
ugcaccgggccaca

SEQ ID NO: 1857956 - RNA, 15 nt, Human
ugcaccgggccacag

SEQ ID NO: 1857957 - RNA, 14 nt, Human
ugcaggcagccagg

SEQ ID NO: 1857958 - RNA, 13 nt, Human
ugcaggcagccag

SEQ ID NO: 1857959 - RNA, 15 nt, Human
ugcaggcagccaggc

SEQ ID NO: 1857960 - RNA, 16 nt, Human
ugcagugcuuccaagg

SEQ ID NO: 1857961 - RNA, 22 nt, Human
ugcagugguaugaucacggcuc

SEQ ID NO: 1857962 - RNA, 20 nt, Human
ugcaguggugcgaucugggu

SEQ ID NO: 1857963 - RNA, 14 nt, Human
ugcaguugccaguc

SEQ ID NO: 1857964 - RNA, 13 nt, Human
ugcaguugccagu

SEQ ID NO: 1857965 - RNA, 15 nt, Human
ugcaguugccaguca

SEQ ID NO: 1857966 - RNA, 17 nt, Human
ugccccuggcagccccu

SEQ ID NO: 1857967 - RNA, 13 nt, Human
ugccccucccuuc

SEQ ID NO: 1857968 - RNA, 15 nt, Human
ugccccagggcuccc

SEQ ID NO: 1857969 - RNA, 23 nt, Human
ugccccucaacucuccuccagag

SEQ ID NO: 1857970 - RNA, 15 nt, Human
ugcccacucccugca

SEQ ID NO: 1857971 - RNA, 14 nt, Human
ugcccacucccugc

SEQ ID NO: 1857972 - RNA, 16 nt, Human
ugcccacucccugcaa

SEQ ID NO: 1857973 - RNA, 11 nt, Human
ugcccaggcug

SEQ ID NO: 1857974 - RNA, 21 nt, Human
ugcccacucccugcaaccuga

SEQ ID NO: 1857975 - RNA, 13 nt, Human
ugcccaggcugga

SEQ ID NO: 1857976 - RNA, 18 nt, Human
ugcccaggcuggagugca

SEQ ID NO: 1857977 - RNA, 20 nt, Human
ugcccaggcuggagugcaau

SEQ ID NO: 1857978 - RNA, 13 nt, Human
ugcccaggcuggc

SEQ ID NO: 1857979 - RNA, 14 nt, Human
ugcccaccuggccu

SEQ ID NO: 1857980 - RNA, 13 nt, Human
ugcccaccuggcc

SEQ ID NO: 1857981 - RNA, 21 nt, Human
ugccauccagguucagcuugu

SEQ ID NO: 1857982 - RNA, 20 nt, Human
ugccauccagguucagcuug

SEQ ID NO: 1857983 - RNA, 10 nt, Human
ugccaggcau

SEQ ID NO: 1857984 - RNA, 18 nt, Human
ugccagguuuuuggucug

SEQ ID NO: 1857985 - RNA, 19 nt, Human
ugccagguuuuuggucuga

SEQ ID NO: 1857986 - RNA, 22 nt, Human
ugccagguuuuuggucugaccc

SEQ ID NO: 1857987 - RNA, 20 nt, Human
ugccacuaaauugacacuua

SEQ ID NO: 1857988 - RNA, 19 nt, Human
ugccacccuggggagaaag

SEQ ID NO: 1857989 - RNA, 22 nt, Human
ugccacuacggaauaguuggcu

SEQ ID NO: 1857990 - RNA, 20 nt, Human
ugccacccuggggagaaagu

SEQ ID NO: 1857991 - RNA, 21 nt, Human
ugcauauuuauaaaaauaaaa

SEQ ID NO: 1857992 - RNA, 20 nt, Human
ugcauauuuauaaaaauaaa

SEQ ID NO: 1857993 - RNA, 18 nt, Human
ugccaaauauaaauaaaa

SEQ ID NO: 1857994 - RNA, 17 nt, Human
ugccaaauauaaauaaa

SEQ ID NO: 1857995 - RNA, 14 nt, Human
ugcaucaagaugug

SEQ ID NO: 1857996 - RNA, 19 nt, Human
ugcaucaagaugugacaug

SEQ ID NO: 1857997 - RNA, 22 nt, Human
ugccaaauauaaauaaaaauaa

SEQ ID NO: 1857998 - RNA, 19 nt, Human
ugccaaauauaaauaaaaa

SEQ ID NO: 1857999 - RNA, 15 nt, Human
ugcuaaaugugaaug

SEQ ID NO: 1858000 - RNA, 14 nt, Human
ugcgccuacaggag

SEQ ID NO: 1858001 - RNA, 16 nt, Human
ugcgccuacaggagug

SEQ ID NO: 1858002 - RNA, 22 nt, Human
ugcgccuacaggagugagcacu

SEQ ID NO: 1858003 - RNA, 21 nt, Human
ugccugugaacugaacucuga

SEQ ID NO: 1858004 - RNA, 18 nt, Human
ugccugugaacugaacuc

SEQ ID NO: 1858005 - RNA, 17 nt, Human
ugccugugaacugaacu

SEQ ID NO: 1858006 - RNA, 14 nt, Human
ugcgaucuggguuc

SEQ ID NO: 1858007 - RNA, 15 nt, Human
ugcgaucuggguuca

SEQ ID NO: 1858008 - RNA, 19 nt, Human
ugcgaucuggguucacugc

SEQ ID NO: 1858009 - RNA, 20 nt, Human
ugcgaucuggguucacugca

SEQ ID NO: 1858010 - RNA, 21 nt, Human
ugcgaucuggguucacugcaa

SEQ ID NO: 1858011 - RNA, 9 nt, Human
ugccucucu

SEQ ID NO: 1858012 - RNA, 18 nt, Human
ugccccuggcagccccug

SEQ ID NO: 1858013 - RNA, 20 nt, Human
ugccucgaacuggcugcaaa

SEQ ID NO: 1858014 - RNA, 18 nt, Human
ugccucgaacuggcugca

SEQ ID NO: 1858015 - RNA, 19 nt, Human
ugccucgaacuggcugcaa

SEQ ID NO: 1858016 - RNA, 18 nt, Human
ugccugggcagaaggaag

SEQ ID NO: 1858017 - RNA, 21 nt, Human
ugccugggaucccucauccuc

SEQ ID NO: 1858018 - RNA, 15 nt, Human
ugccuggcggggugg

SEQ ID NO: 1858019 - RNA, 14 nt, Human
ugccugugaacuga

SEQ ID NO: 1858020 - RNA, 14 nt, Human
ugccugguggcagc

SEQ ID NO: 1858021 - RNA, 15 nt, Human
ugccugguggcagcu

SEQ ID NO: 1858022 - RNA, 18 nt, Human
ugccuguaaucacagcua

SEQ ID NO: 1858023 - RNA, 16 nt, Human
ugccugguggcagcug

SEQ ID NO: 1858024 - RNA, 13 nt, Human
ugcugcuggcugg

SEQ ID NO: 1858025 - RNA, 18 nt, Human
ugcugcaguugccaguca

SEQ ID NO: 1858026 - RNA, 23 nt, Human
ugcugcaguugccagucaccccg

SEQ ID NO: 1858027 - RNA, 17 nt, Human
ugcugauggugcaauga

SEQ ID NO: 1858028 - RNA, 15 nt, Human
ugcugauggugcaau

SEQ ID NO: 1858029 - RNA, 13 nt, Human
ugcugauggugca

SEQ ID NO: 1858030 - RNA, 18 nt, Human
ugcugauggugcaaugac

SEQ ID NO: 1858031 - RNA, 12 nt, Human
ugcugaaggcuc

SEQ ID NO: 1858032 - RNA, 23 nt, Human
ugcugaaggaauaaauugcuccu

SEQ ID NO: 1858033 - RNA, 21 nt, Human
ugcugaaggcucgagcaugcc

SEQ ID NO: 1858034 - RNA, 13 nt, Human
ugcugaaggcucg

SEQ ID NO: 1858035 - RNA, 22 nt, Human
ugcugacagacacaggcccggc

SEQ ID NO: 1858036 - RNA, 23 nt, Human
ugcugacagacacaggcccggcu

SEQ ID NO: 1858037 - RNA, 14 nt, Human
ugcuccucucccca

SEQ ID NO: 1858038 - RNA, 17 nt, Human
ugcucagagcaguguuu

SEQ ID NO: 1858039 - RNA, 15 nt, Human
ugcucacauaucugu

SEQ ID NO: 1858040 - RNA, 16 nt, Human
ugcucacauaucuguc

SEQ ID NO: 1858041 - RNA, 22 nt, Human
ugcucuccucuugccacugccu

SEQ ID NO: 1858042 - RNA, 21 nt, Human
ugcucuccucuugccacugcc

SEQ ID NO: 1858043 - RNA, 18 nt, Human
ugcucuccucuugccacu

SEQ ID NO: 1858044 - RNA, 16 nt, Human
ugcucuccucuugcca

SEQ ID NO: 1858045 - RNA, 18 nt, Human
ugcuccuuucuuguuuua

SEQ ID NO: 1858046 - RNA, 17 nt, Human
ugcuccucuccccagca

SEQ ID NO: 1858047 - RNA, 18 nt, Human
ugcuccucuccccagcaa

SEQ ID NO: 1858048 - RNA, 21 nt, Human
ugucuuuucuugcaugaggcu

SEQ ID NO: 1858049 - RNA, 16 nt, Human
ugucuuuggacccuga

SEQ ID NO: 1858050 - RNA, 14 nt, Human
ugucuuuggacccu

SEQ ID NO: 1858051 - RNA, 23 nt, Human
ugucuuuucuugcaugaggcuag

SEQ ID NO: 1858052 - RNA, 23 nt, Human
ugugaaaagaaaaaugagccugg

SEQ ID NO: 1858053 - RNA, 17 nt, Human
ugugaaaaugugugugu

SEQ ID NO: 1858054 - RNA, 16 nt, Human
ugugaaaaugugugug

SEQ ID NO: 1858055 - RNA, 16 nt, Human
ugucugaagucacugc

SEQ ID NO: 1858056 - RNA, 18 nt, Human
ugucugaagucacugcac

SEQ ID NO: 1858057 - RNA, 17 nt, Human
ugucugaagucacugca

SEQ ID NO: 1858058 - RNA, 19 nt, Human
ugucugaagucacugcaca

SEQ ID NO: 1858059 - RNA, 16 nt, Human
ugugauauaagugugu

SEQ ID NO: 1858060 - RNA, 15 nt, Human
ugugagucaccaagc

SEQ ID NO: 1858061 - RNA, 17 nt, Human
ugugagucaccaagccc

SEQ ID NO: 1858062 - RNA, 19 nt, Human
ugugagucaccaagcccag

SEQ ID NO: 1858063 - RNA, 21 nt, Human
ugugagucaccaagcccaguu

SEQ ID NO: 1858064 - RNA, 18 nt, Human
ugugaggaagccgcuggg

SEQ ID NO: 1858065 - RNA, 13 nt, Human
ugugaggaagccg

SEQ ID NO: 1858066 - RNA, 20 nt, Human
ugugaggaagccgcuggggc

SEQ ID NO: 1858067 - RNA, 12 nt, Human
ugugaggaagcc

SEQ ID NO: 1858068 - RNA, 18 nt, Human
uguggacacagcucuucu

SEQ ID NO: 1858069 - RNA, 19 nt, Human
uguggacacagcucuucuc

SEQ ID NO: 1858070 - RNA, 10 nt, Human
uguggcucac

SEQ ID NO: 1858071 - RNA, 23 nt, Human
uguggcgcagcauauucaggaag

SEQ ID NO: 1858072 - RNA, 21 nt, Human
ugugggcgugagaccugcccc

SEQ ID NO: 1858073 - RNA, 20 nt, Human
ugugggcgugagaccugccc

SEQ ID NO: 1858074 - RNA, 22 nt, Human
ugugggcgugagaccugccccu

SEQ ID NO: 1858075 - RNA, 22 nt, Human
ugugggcuaguugggcuuccuc

SEQ ID NO: 1858076 - RNA, 16 nt, Human
uguguagggcgggagg

SEQ ID NO: 1858077 - RNA, 12 nt, Human
uguguagggcgg

SEQ ID NO: 1858078 - RNA, 20 nt, Human
ugugcauuaucuagauacug

SEQ ID NO: 1858079 - RNA, 21 nt, Human
ugugcauuaucuagauacugu

SEQ ID NO: 1858080 - RNA, 23 nt, Human
ugugcauuaucuagauacuguau

SEQ ID NO: 1858081 - RNA, 23 nt, Human
ugugcauuuggugguuucagaaa

SEQ ID NO: 1858082 - RNA, 14 nt, Human
ugugcauuaucuag

SEQ ID NO: 1858083 - RNA, 16 nt, Human
ugugcauuaucuagau

SEQ ID NO: 1858084 - RNA, 19 nt, Human
ugugcauuaucuagauacu

SEQ ID NO: 1858085 - RNA, 14 nt, Human
ugugcacguacaca

SEQ ID NO: 1858086 - RNA, 16 nt, Human
ugugcucaggagcccu

SEQ ID NO: 1858087 - RNA, 15 nt, Human
ugugcucaggagccc

SEQ ID NO: 1858088 - RNA, 17 nt, Human
ugugcucaggagcccug

SEQ ID NO: 1858089 - RNA, 20 nt, Human
ugugcucaggagcccuggga

SEQ ID NO: 1858090 - RNA, 14 nt, Human
ugugcuuguuaacu

SEQ ID NO: 1858091 - RNA, 14 nt, Human
ugugcgccuacagg

SEQ ID NO: 1858092 - RNA, 19 nt, Human
ugugcgccuacaggaguga

SEQ ID NO: 1858093 - RNA, 19 nt, Human
uguacugcauaugaaagga

SEQ ID NO: 1858094 - RNA, 15 nt, Human
uguacgucugacagg

SEQ ID NO: 1858095 - RNA, 18 nt, Human
uguagccccucuccugga

SEQ ID NO: 1858096 - RNA, 16 nt, Human
uguaccgcaaugugac

SEQ ID NO: 1858097 - RNA, 21 nt, Human
uguacagucuuguauuaaguu

SEQ ID NO: 1858098 - RNA, 18 nt, Human
uguacagagcccacgccc

SEQ ID NO: 1858099 - RNA, 17 nt, Human
uguacagagcccacgcc

SEQ ID NO: 1858100 - RNA, 16 nt, Human
uguacagagcccacgc

SEQ ID NO: 1858101 - RNA, 17 nt, Human
uguaauuaaguacuaug

SEQ ID NO: 1858102 - RNA, 23 nt, Human
uguacaaggacagccccuccucc

SEQ ID NO: 1858103 - RNA, 20 nt, Human
uguacaaggacagccccucc

SEQ ID NO: 1858104 - RNA, 16 nt, Human
uguacaaggacagccc

SEQ ID NO: 1858105 - RNA, 17 nt, Human
uggucacaggaaguaga

SEQ ID NO: 1858106 - RNA, 14 nt, Human
uguaaucacagcua

SEQ ID NO: 1858107 - RNA, 15 nt, Human
uguauuuaaaugaaa

SEQ ID NO: 1858108 - RNA, 20 nt, Human
uguauuuauuuaguauuuau

SEQ ID NO: 1858109 - RNA, 13 nt, Human
ugucacaggcagg

SEQ ID NO: 1858110 - RNA, 12 nt, Human
ugucacaggcag

SEQ ID NO: 1858111 - RNA, 17 nt, Human
ugucacacacuuuggcu

SEQ ID NO: 1858112 - RNA, 22 nt, Human
uguauaaaagggacugagaaau

SEQ ID NO: 1858113 - RNA, 22 nt, Human
uguauucucuccuguaccucuu

SEQ ID NO: 1858114 - RNA, 12 nt, Human
uguccuacucug

SEQ ID NO: 1858115 - RNA, 17 nt, Human
uguccuacucuguguca

SEQ ID NO: 1858116 - RNA, 16 nt, Human
uguccccgacccuugc

SEQ ID NO: 1858117 - RNA, 17 nt, Human
uguccccgacccuugcc

SEQ ID NO: 1858118 - RNA, 20 nt, Human
uguccuacccacccuccuuu

SEQ ID NO: 1858119 - RNA, 22 nt, Human
uguccccaccgcagacaggacc

SEQ ID NO: 1858120 - RNA, 19 nt, Human
uguccccaccgcagacagg

SEQ ID NO: 1858121 - RNA, 18 nt, Human
uguccccaccgcagacag

SEQ ID NO: 1858122 - RNA, 13 nt, Human
ugucaccugaaga

SEQ ID NO: 1858123 - RNA, 16 nt, Human
ugucccaacuuguaaa

SEQ ID NO: 1858124 - RNA, 19 nt, Human
ugucauuugagcagggcuc

SEQ ID NO: 1858125 - RNA, 16 nt, Human
ugucauuugagcaggg

SEQ ID NO: 1858126 - RNA, 18 nt, Human
uuaaagaaaaguuuugua

SEQ ID NO: 1858127 - RNA, 16 nt, Human
uuaaaugcccagcccc

SEQ ID NO: 1858128 - RNA, 15 nt, Human
uuaaaugcccagccc

SEQ ID NO: 1858129 - RNA, 14 nt, Human
uuaaaugcccagcc

SEQ ID NO: 1858130 - RNA, 11 nt, Human
uuaaaugcacc

SEQ ID NO: 1858131 - RNA, 14 nt, Human
uuaaaacccaagug

SEQ ID NO: 1858132 - RNA, 22 nt, Human
uuaaaaaaaaaccugagcccca

SEQ ID NO: 1858133 - RNA, 22 nt, Human
uguuuuaaggaugcuuguacau

SEQ ID NO: 1858134 - RNA, 23 nt, Human
uguuuuaaggaugcuuguacaua

SEQ ID NO: 1858135 - RNA, 17 nt, Human
uguuuuaagaggcaggg

SEQ ID NO: 1858136 - RNA, 16 nt, Human
uguuuuaagaggcagg

SEQ ID NO: 1858137 - RNA, 15 nt, Human
uguuuccuggcacug

SEQ ID NO: 1858138 - RNA, 14 nt, Human
uuaacuuuuauaaa

SEQ ID NO: 1858139 - RNA, 12 nt, Human
uuaagaguaaaa

SEQ ID NO: 1858140 - RNA, 15 nt, Human
uuaaauguagaaagu

SEQ ID NO: 1858141 - RNA, 12 nt, Human
uuaacuuuuaua

SEQ ID NO: 1858142 - RNA, 13 nt, Human
uuaacuuuuauaa

SEQ ID NO: 1858143 - RNA, 20 nt, Human
uuaauagcgucauaacuaga

SEQ ID NO: 1858144 - RNA, 20 nt, Human
uuacacuuuaugcacaaaau

SEQ ID NO: 1858145 - RNA, 13 nt, Human
uuacacuuuaugc

SEQ ID NO: 1858146 - RNA, 17 nt, Human
uuacacauuuuucagau

SEQ ID NO: 1858147 - RNA, 23 nt, Human
uuacacauuuuucagauauaaaa

SEQ ID NO: 1858148 - RNA, 12 nt, Human
uuacauuuuuaa

SEQ ID NO: 1858149 - RNA, 17 nt, Human
uuacauuuuuaagugcu

SEQ ID NO: 1858150 - RNA, 15 nt, Human
uuacacauuuuucag

SEQ ID NO: 1858151 - RNA, 22 nt, Human
uuaauuaaaacacaacaucuuu

SEQ ID NO: 1858152 - RNA, 12 nt, Human
uguuuaagagac

SEQ ID NO: 1858153 - RNA, 17 nt, Human
uguuggcugggggccuc

SEQ ID NO: 1858154 - RNA, 19 nt, Human
uguuggcugggggccucag

SEQ ID NO: 1858155 - RNA, 14 nt, Human
uguuggcagccucu

SEQ ID NO: 1858156 - RNA, 15 nt, Human
uguuggccaaagcca

SEQ ID NO: 1858157 - RNA, 15 nt, Human
uguuggccaggcugg

SEQ ID NO: 1858158 - RNA, 16 nt, Human
uguuggccaggcuggu

SEQ ID NO: 1858159 - RNA, 23 nt, Human
uguucuuucuggcuaugcauuug

SEQ ID NO: 1858160 - RNA, 20 nt, Human
uguucuggcucuuccaggcu

SEQ ID NO: 1858161 - RNA, 17 nt, Human
uguucuggcucuuccag

SEQ ID NO: 1858162 - RNA, 21 nt, Human
uguucuggcucuuccaggcug

SEQ ID NO: 1858163 - RNA, 15 nt, Human
uguucugcuuuccuc

SEQ ID NO: 1858164 - RNA, 12 nt, Human
uguucugggaca

SEQ ID NO: 1858165 - RNA, 15 nt, Human
uguugaagccuuugu

SEQ ID NO: 1858166 - RNA, 16 nt, Human
uguucucugcccucca

SEQ ID NO: 1858167 - RNA, 15 nt, Human
uguucucugcccucc

SEQ ID NO: 1858168 - RNA, 14 nt, Human
uguucucugcccuc

SEQ ID NO: 1858169 - RNA, 13 nt, Human
uguucucugcccu

SEQ ID NO: 1858170 - RNA, 16 nt, Human
uguucuggcucuucca

SEQ ID NO: 1858171 - RNA, 13 nt, Human
uguucuggcucuu

SEQ ID NO: 1858172 - RNA, 12 nt, Human
uguucuggcucu

SEQ ID NO: 1858173 - RNA, 13 nt, Human
uguucucugagga

SEQ ID NO: 1858174 - RNA, 19 nt, Human
uguucaucauccuaagcua

SEQ ID NO: 1858175 - RNA, 16 nt, Human
uguucucucuucucca

SEQ ID NO: 1858176 - RNA, 15 nt, Human
uguucucucuucucc

SEQ ID NO: 1858177 - RNA, 18 nt, Human
uguguuuuucauaaagca

SEQ ID NO: 1858178 - RNA, 20 nt, Human
uguguuuuuaauaaagacag

SEQ ID NO: 1858179 - RNA, 15 nt, Human
uguguuuuucauaaa

SEQ ID NO: 1858180 - RNA, 15 nt, Human
uguguuuuuaauaaa

SEQ ID NO: 1858181 - RNA, 16 nt, Human
uguguuuauugucaaa

SEQ ID NO: 1858182 - RNA, 19 nt, Human
ugugugugcuuauguauga

SEQ ID NO: 1858183 - RNA, 20 nt, Human
ugugugugcuuauguaugag

SEQ ID NO: 1858184 - RNA, 22 nt, Human
ugugugucuaggcaggaccugu

SEQ ID NO: 1858185 - RNA, 17 nt, Human
ugugugugaaaaugugu

SEQ ID NO: 1858186 - RNA, 18 nt, Human
uguguaugcgugugugug

SEQ ID NO: 1858187 - RNA, 15 nt, Human
ugugugcuuauguau

SEQ ID NO: 1858188 - RNA, 19 nt, Human
ugugugcacguacacacac

SEQ ID NO: 1858189 - RNA, 17 nt, Human
uguuagccccauaauuu

SEQ ID NO: 1858190 - RNA, 14 nt, Human
uguuacuaaguuuu

SEQ ID NO: 1858191 - RNA, 17 nt, Human
uguucauaaauaaaguu

SEQ ID NO: 1858192 - RNA, 20 nt, Human
uguucagcuccagcucacca

SEQ ID NO: 1858193 - RNA, 21 nt, Human
uguucagcuccagcucaccag

SEQ ID NO: 1858194 - RNA, 22 nt, Human
uguucagcuccagcucaccagc

SEQ ID NO: 1858195 - RNA, 17 nt, Human
uguuaguaugaggcauu

SEQ ID NO: 1858196 - RNA, 19 nt, Human
uguuaguaugaggcauuug

SEQ ID NO: 1858197 - RNA, 20 nt, Human
uguuaguaugaggcauuugu

SEQ ID NO: 1858198 - RNA, 17 nt, Human
aaaacacauuuuucuua

SEQ ID NO: 1858199 - RNA, 19 nt, Human
aaaacacuguucucugccc

SEQ ID NO: 1858200 - RNA, 11 nt, Human
aaaagaaaaag

SEQ ID NO: 1858201 - RNA, 17 nt, Human
aaaagaaagaaaaucag

SEQ ID NO: 1858202 - RNA, 16 nt, Human
aaaagaaaagucaagg

SEQ ID NO: 1858203 - RNA, 20 nt, Human
aaaagacaaggaaaaaauaa

SEQ ID NO: 1858204 - RNA, 14 nt, Human
aaaauaaaacuuuu

SEQ ID NO: 1858205 - RNA, 21 nt, Human
aaaaucagccugcuccagcug

SEQ ID NO: 1858206 - RNA, 17 nt, Human
aaaaucagccugcucca

SEQ ID NO: 1858207 - RNA, 13 nt, Human
aaaaucagccugc

SEQ ID NO: 1858208 - RNA, 16 nt, Human
aaaauaaaacuuuuua

SEQ ID NO: 1858209 - RNA, 15 nt, Human
aaagcccaaaguggu

SEQ ID NO: 1858210 - RNA, 15 nt, Human
aaaaucucaaauuuc

SEQ ID NO: 1858211 - RNA, 16 nt, Human
aaaaucucaaauuucu

SEQ ID NO: 1858212 - RNA, 18 nt, Human
aaaaucucaaauuucuaa

SEQ ID NO: 1858213 - RNA, 23 nt, Human
aaacugauuuuuuuuuccuucag

SEQ ID NO: 1858214 - RNA, 22 nt, Human
aaacugauuuuuuuuuccuuca

SEQ ID NO: 1858215 - RNA, 23 nt, Human
aaacucuuaaaacccaagugccu

SEQ ID NO: 1858216 - RNA, 12 nt, Human
aaacucuuaaaa

SEQ ID NO: 1858217 - RNA, 16 nt, Human
aaaccgccaaggcugg

SEQ ID NO: 1858218 - RNA, 15 nt, Human
aaaccgccaaggcug

SEQ ID NO: 1858219 - RNA, 16 nt, Human
aaacccagcucugguc

SEQ ID NO: 1858220 - RNA, 12 nt, Human
aaacccagcucu

SEQ ID NO: 1858221 - RNA, 18 nt, Human
aaacccagcucuggucca

SEQ ID NO: 1858222 - RNA, 17 nt, Human
aaauguucaucaaugaa

SEQ ID NO: 1858223 - RNA, 13 nt, Human
aaauguucaucaa

SEQ ID NO: 1858224 - RNA, 14 nt, Human
aaaggaugcacaga

SEQ ID NO: 1858225 - RNA, 20 nt, Human
aaaggaugcccaaagaugca

SEQ ID NO: 1858226 - RNA, 14 nt, Human
aaaucuuuuugcuu

SEQ ID NO: 1858227 - RNA, 13 nt, Human
aaaucuuuuugcu

SEQ ID NO: 1858228 - RNA, 19 nt, Human
aaaucuccaaaauaaaacu

SEQ ID NO: 1858229 - RNA, 19 nt, Human
aaaugcuguaacuuucuga

SEQ ID NO: 1858230 - RNA, 22 nt, Human
aaaugcugguuuuucaguuuuc

SEQ ID NO: 1858231 - RNA, 14 nt, Human
aaaugaaaaaauau

SEQ ID NO: 1858232 - RNA, 23 nt, Human
aaaugcugcuuuuucucaaaaug

SEQ ID NO: 1858233 - RNA, 10 nt, Human
aaaugcugcu

SEQ ID NO: 1858234 - RNA, 23 nt, Human
aaccuuuugagugccuuacacaa

SEQ ID NO: 1858235 - RNA, 16 nt, Human
aaccuuuugagugccu

SEQ ID NO: 1858236 - RNA, 18 nt, Human
aaccuuuguuugcaucug

SEQ ID NO: 1858237 - RNA, 23 nt, Human
aacauggccuuugcuugaaagaa

SEQ ID NO: 1858238 - RNA, 12 nt, Human
aacccucagagc

SEQ ID NO: 1858239 - RNA, 19 nt, Human
aacccucagagccaccccu

SEQ ID NO: 1858240 - RNA, 23 nt, Human
aaauucuucuccacuuucuagcc

SEQ ID NO: 1858241 - RNA, 15 nt, Human
aaauucuugcaaagu

SEQ ID NO: 1858242 - RNA, 18 nt, Human
aaauucuugcaaaguauc

SEQ ID NO: 1858243 - RNA, 11 nt, Human
aacaggcagau

SEQ ID NO: 1858244 - RNA, 15 nt, Human
aacagccugugucuu

SEQ ID NO: 1858245 - RNA, 12 nt, Human
aacagccugugu

SEQ ID NO: 1858246 - RNA, 22 nt, Human
aacauggccuuugcuugaaaga

SEQ ID NO: 1858247 - RNA, 16 nt, Human
aauaaacacucuugaa

SEQ ID NO: 1858248 - RNA, 11 nt, Human
aauaaacacuc

SEQ ID NO: 1858249 - RNA, 19 nt, Human
aauaaacacucuugaaaaa

SEQ ID NO: 1858250 - RNA, 22 nt, Human
aaguuguaggcauaaagucagg

SEQ ID NO: 1858251 - RNA, 22 nt, Human
aagugcugcauuuaaaagauac

SEQ ID NO: 1858252 - RNA, 12 nt, Human
aagugcugggau

SEQ ID NO: 1858253 - RNA, 19 nt, Human
aauaauguuaacauggaca

SEQ ID NO: 1858254 - RNA, 14 nt, Human
aauaaagcagcguu

SEQ ID NO: 1858255 - RNA, 17 nt, Human
aauaaugugaaacugga

SEQ ID NO: 1858256 - RNA, 22 nt, Human
aauaaugugaaacuggauuaaa

SEQ ID NO: 1858257 - RNA, 11 nt, Human
aauaaagacag

SEQ ID NO: 1858258 - RNA, 12 nt, Human
aauaaagacagg

SEQ ID NO: 1858259 - RNA, 21 nt, Human
aaucaccgaaaacguggcugc

SEQ ID NO: 1858260 - RNA, 22 nt, Human
aaucaaugcuauaacuauguug

SEQ ID NO: 1858261 - RNA, 23 nt, Human
aaucaccgaaaacguggcugcuu

SEQ ID NO: 1858262 - RNA, 15 nt, Human
aaucacguaaagcua

SEQ ID NO: 1858263 - RNA, 23 nt, Human
aaucaaguuggcuucuaaucaaa

SEQ ID NO: 1858264 - RNA, 13 nt, Human
aauauuaagaaag

SEQ ID NO: 1858265 - RNA, 23 nt, Human
aauauguggaguucaucuugaau

SEQ ID NO: 1858266 - RNA, 20 nt, Human
aaugaaagacuguacaaagu

SEQ ID NO: 1858267 - RNA, 18 nt, Human
aaugaaagacuguacaaa

SEQ ID NO: 1858268 - RNA, 21 nt, Human
aaugaaagacuguacaaagua

SEQ ID NO: 1858269 - RNA, 14 nt, Human
aaugaagcaaugcu

SEQ ID NO: 1858270 - RNA, 20 nt, Human
aaugaugccaugaggaacaa

SEQ ID NO: 1858271 - RNA, 20 nt, Human
aaugauguauguugaagccu

SEQ ID NO: 1858272 - RNA, 20 nt, Human
aaugaauacuuuauaaagga

SEQ ID NO: 1858273 - RNA, 10 nt, Human
aagccuuugu

SEQ ID NO: 1858274 - RNA, 14 nt, Human
aagcggcuggcagc

SEQ ID NO: 1858275 - RNA, 13 nt, Human
aagcuagaaauga

SEQ ID NO: 1858276 - RNA, 16 nt, Human
aagcgugagccacugc

SEQ ID NO: 1858277 - RNA, 15 nt, Human
aagcgugagccacug

SEQ ID NO: 1858278 - RNA, 21 nt, Human
aagauaauauuaaggaagaca

SEQ ID NO: 1858279 - RNA, 19 nt, Human
aagauaauauuaaggaaga

SEQ ID NO: 1858280 - RNA, 17 nt, Human
aagauacaguuacucag

SEQ ID NO: 1858281 - RNA, 23 nt, Human
aagauacaguuacucagaauucu

SEQ ID NO: 1858282 - RNA, 19 nt, Human
aagcugcacccucaggcag

SEQ ID NO: 1858283 - RNA, 13 nt, Human
aagcugcacccuc

SEQ ID NO: 1858284 - RNA, 22 nt, Human
aagcuagacgagcaggcuucuu

SEQ ID NO: 1858285 - RNA, 15 nt, Human
aaggcaaggcuguca

SEQ ID NO: 1858286 - RNA, 16 nt, Human
aaggcaaggcugucaa

SEQ ID NO: 1858287 - RNA, 22 nt, Human
aaggcagggagggccugggccc

SEQ ID NO: 1858288 - RNA, 19 nt, Human
aaggcagggagggccuggg

SEQ ID NO: 1858289 - RNA, 13 nt, Human
aaggcaaggcugu

SEQ ID NO: 1858290 - RNA, 13 nt, Human
aagagaaaaaaua

SEQ ID NO: 1858291 - RNA, 19 nt, Human
aagacuuuucuuucagcca

SEQ ID NO: 1858292 - RNA, 12 nt, Human
aagacuuuucuu

SEQ ID NO: 1858293 - RNA, 21 nt, Human
aagacuuuuccaacccucauc

SEQ ID NO: 1858294 - RNA, 15 nt, Human
aagaccacguuucua

SEQ ID NO: 1858295 - RNA, 17 nt, Human
aagaccacguuucuaaa

SEQ ID NO: 1858296 - RNA, 23 nt, Human
aagacagauacuccuccaagguu

SEQ ID NO: 1858297 - RNA, 12 nt, Human
aagacagagucu

SEQ ID NO: 1858298 - RNA, 17 nt, Human
aagacuuuuccaacccu

SEQ ID NO: 1858299 - RNA, 16 nt, Human
aacgcagcccugcuuu

SEQ ID NO: 1858300 - RNA, 12 nt, Human
aacgcagcccug

SEQ ID NO: 1858301 - RNA, 14 nt, Human
aagaacuagcauaa

SEQ ID NO: 1858302 - RNA, 20 nt, Human
aagacaaugugaaaagaaaa

SEQ ID NO: 1858303 - RNA, 19 nt, Human
aagacaaugugaaaagaaa

SEQ ID NO: 1858304 - RNA, 22 nt, Human
aagacaaugacuuacuguacau

SEQ ID NO: 1858305 - RNA, 21 nt, Human
aagacaaggaaaaaauaacaa

SEQ ID NO: 1858306 - RNA, 12 nt, Human
aagaguguggca

SEQ ID NO: 1858307 - RNA, 22 nt, Human
acucccaucugugaaaggaaag

SEQ ID NO: 1858308 - RNA, 15 nt, Human
acucccaagcuggac

SEQ ID NO: 1858309 - RNA, 18 nt, Human
acucccugccccccagcc

SEQ ID NO: 1858310 - RNA, 14 nt, Human
acucccuuucaaca

SEQ ID NO: 1858311 - RNA, 15 nt, Human
acucuacagaggcca

SEQ ID NO: 1858312 - RNA, 16 nt, Human
acugauuuuuuuuucc

SEQ ID NO: 1858313 - RNA, 20 nt, Human
acugauuuuuuuuuccuuca

SEQ ID NO: 1858314 - RNA, 19 nt, Human
acugauuuuuuuuuccuuc

SEQ ID NO: 1858315 - RNA, 18 nt, Human
acugauuuuuuuuuccuu

SEQ ID NO: 1858316 - RNA, 17 nt, Human
acugauuuuuuuuuccu

SEQ ID NO: 1858317 - RNA, 14 nt, Human
acugauuacugccu

SEQ ID NO: 1858318 - RNA, 20 nt, Human
acugauguaugaggaauuuc

SEQ ID NO: 1858319 - RNA, 23 nt, Human
acugaugggcaacccccagccug

SEQ ID NO: 1858320 - RNA, 12 nt, Human
acugaauuucuu

SEQ ID NO: 1858321 - RNA, 23 nt, Human
acugaauuucuuuugccguuauu

SEQ ID NO: 1858322 - RNA, 17 nt, Human
acugacauuguuggcca

SEQ ID NO: 1858323 - RNA, 18 nt, Human
acugacauuguuggccaa

SEQ ID NO: 1858324 - RNA, 16 nt, Human
acugucuuuuuucuaa

SEQ ID NO: 1858325 - RNA, 16 nt, Human
acugugaagagaacca

SEQ ID NO: 1858326 - RNA, 23 nt, Human
acugucuuuuuucuaaaguaaaa

SEQ ID NO: 1858327 - RNA, 22 nt, Human
acugucuuuuuucuaaaguaaa

SEQ ID NO: 1858328 - RNA, 17 nt, Human
acugugccaugugccag

SEQ ID NO: 1858329 - RNA, 18 nt, Human
acugugccaugugccagg

SEQ ID NO: 1858330 - RNA, 19 nt, Human
acugcccaggccugccugu

SEQ ID NO: 1858331 - RNA, 14 nt, Human
acugccaugccagc

SEQ ID NO: 1858332 - RNA, 12 nt, Human
acuggaacucuc

SEQ ID NO: 1858333 - RNA, 15 nt, Human
acugccuauuuuaau

SEQ ID NO: 1858334 - RNA, 12 nt, Human
acugguggcccg

SEQ ID NO: 1858335 - RNA, 17 nt, Human
acuguaaaauaauaacu

SEQ ID NO: 1858336 - RNA, 13 nt, Human
acuuggucuguga

SEQ ID NO: 1858337 - RNA, 23 nt, Human
acuuggggggcugaggugggagg

SEQ ID NO: 1858338 - RNA, 16 nt, Human
acuugaaaauuaacau

SEQ ID NO: 1858339 - RNA, 14 nt, Human
acuugaaaauuaac

SEQ ID NO: 1858340 - RNA, 12 nt, Human
acuugaaaauua

SEQ ID NO: 1858341 - RNA, 21 nt, Human
acuucagacauagaauuaaca

SEQ ID NO: 1858342 - RNA, 22 nt, Human
acuuaaaaaugguuuaaauggu

SEQ ID NO: 1858343 - RNA, 15 nt, Human
acuguuucaaacuuu

SEQ ID NO: 1858344 - RNA, 18 nt, Human
acuguuucaaacuuuacu

SEQ ID NO: 1858345 - RNA, 19 nt, Human
acuguuucaaacuuuacua

SEQ ID NO: 1858346 - RNA, 18 nt, Human
accgugaggccagagaca

SEQ ID NO: 1858347 - RNA, 23 nt, Human
accgggcugggagcucugcagag

SEQ ID NO: 1858348 - RNA, 21 nt, Human
accgggcugggagcucugcag

SEQ ID NO: 1858349 - RNA, 23 nt, Human
accgugaggccagagacacaagc

SEQ ID NO: 1858350 - RNA, 19 nt, Human
accgugccuggccacgccc

SEQ ID NO: 1858351 - RNA, 12 nt, Human
accucagccucc

SEQ ID NO: 1858352 - RNA, 11 nt, Human
accucagccuc

SEQ ID NO: 1858353 - RNA, 21 nt, Human
acccugugauggggcccugcc

SEQ ID NO: 1858354 - RNA, 20 nt, Human
acccugugauggggcccugc

SEQ ID NO: 1858355 - RNA, 19 nt, Human
acccugugauggggcccug

SEQ ID NO: 1858356 - RNA, 17 nt, Human
acccugugauggggccc

SEQ ID NO: 1858357 - RNA, 12 nt, Human
accgggcacuca

SEQ ID NO: 1858358 - RNA, 14 nt, Human
accgggcacucaga

SEQ ID NO: 1858359 - RNA, 16 nt, Human
accgggcacucagaag

SEQ ID NO: 1858360 - RNA, 11 nt, Human
accucaggccu

SEQ ID NO: 1858361 - RNA, 20 nt, Human
accucaggugauccacccac

SEQ ID NO: 1858362 - RNA, 21 nt, Human
accucaggugauccacccacc

SEQ ID NO: 1858363 - RNA, 13 nt, Human
acccuauugcugc

SEQ ID NO: 1858364 - RNA, 19 nt, Human
acccuauugcugcuugagg

SEQ ID NO: 1858365 - RNA, 14 nt, Human
acccuauugcugcu

SEQ ID NO: 1858366 - RNA, 11 nt, Human
acccucagagc

SEQ ID NO: 1858367 - RNA, 16 nt, Human
acccucaggcaggugg

SEQ ID NO: 1858368 - RNA, 15 nt, Human
acccucaggcaggug

SEQ ID NO: 1858369 - RNA, 13 nt, Human
acccucaucacca

SEQ ID NO: 1858370 - RNA, 14 nt, Human
acccucaggcaggu

SEQ ID NO: 1858371 - RNA, 13 nt, Human
acccucaggcagg

SEQ ID NO: 1858372 - RNA, 18 nt, Human
acccucagagccaccccu

SEQ ID NO: 1858373 - RNA, 23 nt, Human
acccuggcacuauaauguaagcu

SEQ ID NO: 1858374 - RNA, 18 nt, Human
acccuggcacccagggug

SEQ ID NO: 1858375 - RNA, 23 nt, Human
acccucaucaccaacgucugugc

SEQ ID NO: 1858376 - RNA, 21 nt, Human
acccugucucuacuaaaaaua

SEQ ID NO: 1858377 - RNA, 16 nt, Human
acccugugauggggcc

SEQ ID NO: 1858378 - RNA, 16 nt, Human
acccuggggagaaagu

SEQ ID NO: 1858379 - RNA, 20 nt, Human
accugccccucaacucuccu

SEQ ID NO: 1858380 - RNA, 15 nt, Human
accugccccucaacu

SEQ ID NO: 1858381 - RNA, 12 nt, Human
accugccccuca

SEQ ID NO: 1858382 - RNA, 23 nt, Human
accugccaggaagccagcaggcu

SEQ ID NO: 1858383 - RNA, 22 nt, Human
accugccaggaagccagcaggc

SEQ ID NO: 1858384 - RNA, 21 nt, Human
accugccaggaagccagcagg

SEQ ID NO: 1858385 - RNA, 17 nt, Human
accuguggccaaguucu

SEQ ID NO: 1858386 - RNA, 12 nt, Human
accucugccuga

SEQ ID NO: 1858387 - RNA, 20 nt, Human
accucugccugaagucacac

SEQ ID NO: 1858388 - RNA, 23 nt, Human
accucugccugaagucacacagu

SEQ ID NO: 1858389 - RNA, 18 nt, Human
acuaauggggcggugaga

SEQ ID NO: 1858390 - RNA, 20 nt, Human
acgauuucuguuuagauaau

SEQ ID NO: 1858391 - RNA, 23 nt, Human
acgauuucuguuuagauaauaca

SEQ ID NO: 1858392 - RNA, 19 nt, Human
acgauuucuguuuagauaa

SEQ ID NO: 1858393 - RNA, 19 nt, Human
acgcugugcugcccugccc

SEQ ID NO: 1858394 - RNA, 22 nt, Human
acgcugugcugcccugcccacc

SEQ ID NO: 1858395 - RNA, 23 nt, Human
acgcagcccugcuuugggcugcc

SEQ ID NO: 1858396 - RNA, 22 nt, Human
acgcagcccugcuuugggcugc

SEQ ID NO: 1858397 - RNA, 12 nt, Human
acgcagcccugc

SEQ ID NO: 1858398 - RNA, 13 nt, Human
acgucugugccau

SEQ ID NO: 1858399 - RNA, 12 nt, Human
acgucugugcca

SEQ ID NO: 1858400 - RNA, 19 nt, Human
acggacacucaaaagcugg

SEQ ID NO: 1858401 - RNA, 17 nt, Human
acggacacucaaaagcu

SEQ ID NO: 1858402 - RNA, 19 nt, Human
acggaauaguuggcuagga

SEQ ID NO: 1858403 - RNA, 19 nt, Human
acagcucuucuccaggcug

SEQ ID NO: 1858404 - RNA, 20 nt, Human
acagcucuucuccaggcugu

SEQ ID NO: 1858405 - RNA, 14 nt, Human
acaggauuauugga

SEQ ID NO: 1858406 - RNA, 15 nt, Human
acaggcaaugcuggc

SEQ ID NO: 1858407 - RNA, 16 nt, Human
acaggcaaugcuggcu

SEQ ID NO: 1858408 - RNA, 14 nt, Human
acaggcacccacca

SEQ ID NO: 1858409 - RNA, 17 nt, Human
acaggcaaugcuggcug

SEQ ID NO: 1858410 - RNA, 18 nt, Human
acaguggaaccagcccag

SEQ ID NO: 1858411 - RNA, 19 nt, Human
acagugauuaccagggacu

SEQ ID NO: 1858412 - RNA, 13 nt, Human
acagugcaucuca

SEQ ID NO: 1858413 - RNA, 18 nt, Human
acagugcaucucagccca

SEQ ID NO: 1858414 - RNA, 17 nt, Human
acagugcaucucagccc

SEQ ID NO: 1858415 - RNA, 15 nt, Human
acagugcaucucagc

SEQ ID NO: 1858416 - RNA, 23 nt, Human
acaggcacccaccaucaugucug

SEQ ID NO: 1858417 - RNA, 16 nt, Human
accagagcugccaccu

SEQ ID NO: 1858418 - RNA, 14 nt, Human
accagagcugccac

SEQ ID NO: 1858419 - RNA, 12 nt, Human
accagagcugcc

SEQ ID NO: 1858420 - RNA, 13 nt, Human
accagagcugcca

SEQ ID NO: 1858421 - RNA, 21 nt, Human
accaacgucugugccauuuug

SEQ ID NO: 1858422 - RNA, 14 nt, Human
accaagccguggcu

SEQ ID NO: 1858423 - RNA, 18 nt, Human
accaagccguggcuuccc

SEQ ID NO: 1858424 - RNA, 17 nt, Human
accaagccguggcuucc

SEQ ID NO: 1858425 - RNA, 16 nt, Human
accaagccguggcuuc

SEQ ID NO: 1858426 - RNA, 15 nt, Human
accaagccguggcuu

SEQ ID NO: 1858427 - RNA, 13 nt, Human
accacguuucuaa

SEQ ID NO: 1858428 - RNA, 14 nt, Human
accacguuucuaaa

SEQ ID NO: 1858429 - RNA, 18 nt, Human
accacgcuggaccuugaa

SEQ ID NO: 1858430 - RNA, 14 nt, Human
accacgcuggaccu

SEQ ID NO: 1858431 - RNA, 16 nt, Human
accacgcuggaccuug

SEQ ID NO: 1858432 - RNA, 17 nt, Human
accaacgucugugccau

SEQ ID NO: 1858433 - RNA, 14 nt, Human
accaacgucugugc

SEQ ID NO: 1858434 - RNA, 13 nt, Human
acaugcacgugug

SEQ ID NO: 1858435 - RNA, 20 nt, Human
acaugccucucucaggccaa

SEQ ID NO: 1858436 - RNA, 15 nt, Human
acauaagauaaaugu

SEQ ID NO: 1858437 - RNA, 20 nt, Human
acauaaguauuuaauucaug

SEQ ID NO: 1858438 - RNA, 20 nt, Human
acauacaggaagguagaaau

SEQ ID NO: 1858439 - RNA, 16 nt, Human
acauacaauuccaaac

SEQ ID NO: 1858440 - RNA, 19 nt, Human
acauguuuuucuucucccu

SEQ ID NO: 1858441 - RNA, 17 nt, Human
acauguuaaacuuacuu

SEQ ID NO: 1858442 - RNA, 17 nt, Human
acauguguuggcagccu

SEQ ID NO: 1858443 - RNA, 19 nt, Human
aauucucagaaucucaaau

SEQ ID NO: 1858444 - RNA, 14 nt, Human
aauucuacuuugag

SEQ ID NO: 1858445 - RNA, 22 nt, Human
aauucuagcuuugagcuuaaga

SEQ ID NO: 1858446 - RNA, 15 nt, Human
aauucucuuauccaa

SEQ ID NO: 1858447 - RNA, 15 nt, Human
aauucucuaguuuga

SEQ ID NO: 1858448 - RNA, 17 nt, Human
aauucucuaguuugauu

SEQ ID NO: 1858449 - RNA, 16 nt, Human
aauucuccugccucag

SEQ ID NO: 1858450 - RNA, 15 nt, Human
aauucuccugccuca

SEQ ID NO: 1858451 - RNA, 14 nt, Human
aauucuccugccuc

SEQ ID NO: 1858452 - RNA, 21 nt, Human
aauucucauuugucacacacu

SEQ ID NO: 1858453 - RNA, 22 nt, Human
aauuguaaggaaugauuaauua

SEQ ID NO: 1858454 - RNA, 13 nt, Human
aauucuuaaauau

SEQ ID NO: 1858455 - RNA, 22 nt, Human
aauuggauacgacaacuugcac

SEQ ID NO: 1858456 - RNA, 18 nt, Human
aauucuguuuuucuaggc

SEQ ID NO: 1858457 - RNA, 14 nt, Human
aauucuguuuuucu

SEQ ID NO: 1858458 - RNA, 19 nt, Human
aauuaugaguuauuuuuau

SEQ ID NO: 1858459 - RNA, 19 nt, Human
aauuauacccccugcaaag

SEQ ID NO: 1858460 - RNA, 17 nt, Human
aauuucccaaagcagug

SEQ ID NO: 1858461 - RNA, 15 nt, Human
aauuucccaaagcag

SEQ ID NO: 1858462 - RNA, 21 nt, Human
aauuuccacucaggucuguuu

SEQ ID NO: 1858463 - RNA, 11 nt, Human
aauuguaauag

SEQ ID NO: 1858464 - RNA, 14 nt, Human
acacagcucuucuc

SEQ ID NO: 1858465 - RNA, 16 nt, Human
acacagcucuucucca

SEQ ID NO: 1858466 - RNA, 18 nt, Human
acacagcucuucuccagg

SEQ ID NO: 1858467 - RNA, 18 nt, Human
acaccagagcccaccuug

SEQ ID NO: 1858468 - RNA, 23 nt, Human
acaccagagcccaccuuggcuca

SEQ ID NO: 1858469 - RNA, 15 nt, Human
acaccaauauucaua

SEQ ID NO: 1858470 - RNA, 13 nt, Human
acaccagagccca

SEQ ID NO: 1858471 - RNA, 20 nt, Human
acaaggcaaggcugucaauu

SEQ ID NO: 1858472 - RNA, 19 nt, Human
acaaggcaaggcugucaau

SEQ ID NO: 1858473 - RNA, 17 nt, Human
acaaggcaaggcuguca

SEQ ID NO: 1858474 - RNA, 16 nt, Human
acaaggcaaggcuguc

SEQ ID NO: 1858475 - RNA, 15 nt, Human
acaaguuaaauaaau

SEQ ID NO: 1858476 - RNA, 14 nt, Human
aucaaaagaaagaa

SEQ ID NO: 1858477 - RNA, 18 nt, Human
auauuuuuuucuuuucuu

SEQ ID NO: 1858478 - RNA, 12 nt, Human
aucaaaggacac

SEQ ID NO: 1858479 - RNA, 19 nt, Human
aucaaagagguuuuaaaaa

SEQ ID NO: 1858480 - RNA, 20 nt, Human
aucaaaagguuaauaaagua

SEQ ID NO: 1858481 - RNA, 24 nt, Human
aucaaaagguuaauaaaguaauua

SEQ ID NO: 1858482 - RNA, 14 nt, Human
auagcacagacccu

SEQ ID NO: 1858483 - RNA, 19 nt, Human
aucauggagguuugaagau

SEQ ID NO: 1858484 - RNA, 20 nt, Human
aucaugacaaagacugagua

SEQ ID NO: 1858485 - RNA, 15 nt, Human
aucauccuaagcuau

SEQ ID NO: 1858486 - RNA, 23 nt, Human
auccacuuuaucuugaauaaugu

SEQ ID NO: 1858487 - RNA, 21 nt, Human
auccacugugccaugugccag

SEQ ID NO: 1858488 - RNA, 22 nt, Human
aucuaggaagacuuuggaaaga

SEQ ID NO: 1858489 - RNA, 14 nt, Human
aucgaccugccucg

SEQ ID NO: 1858490 - RNA, 15 nt, Human
augggacagggagga

SEQ ID NO: 1858491 - RNA, 19 nt, Human
augcucugcauguuacaua

SEQ ID NO: 1858492 - RNA, 18 nt, Human
augcucugcauguuacau

SEQ ID NO: 1858493 - RNA, 22 nt, Human
augcuucuucagagacuccugc

SEQ ID NO: 1858494 - RNA, 21 nt, Human
augcuuuaggauguacaguua

SEQ ID NO: 1858495 - RNA, 20 nt, Human
augcuucuucagagacuccu

SEQ ID NO: 1858496 - RNA, 17 nt, Human
augcuucuucagagacu

SEQ ID NO: 1858497 - RNA, 14 nt, Human
augcuucuucagag

SEQ ID NO: 1858498 - RNA, 16 nt, Human
augcuuugaucccuuc

SEQ ID NO: 1858499 - RNA, 11 nt, Human
augccuggugg

SEQ ID NO: 1858500 - RNA, 12 nt, Human
augccugguggc

SEQ ID NO: 1858501 - RNA, 13 nt, Human
augccugguggca

SEQ ID NO: 1858502 - RNA, 14 nt, Human
augccugguggcag

SEQ ID NO: 1858503 - RNA, 19 nt, Human
augccugguggcagcugcg

SEQ ID NO: 1858504 - RNA, 18 nt, Human
augccugguggcagcugc

SEQ ID NO: 1858505 - RNA, 21 nt, Human
augccugguggcagcugcggu

SEQ ID NO: 1858506 - RNA, 24 nt, Human
augcauauuauuuuauguugcaua

SEQ ID NO: 1858507 - RNA, 23 nt, Human
aucuaggaagacuuuggaaagag

SEQ ID NO: 1858508 - RNA, 11 nt, Human
aucuaggauuu

SEQ ID NO: 1858509 - RNA, 19 nt, Human
aucuaggauuuuaagggaa

SEQ ID NO: 1858510 - RNA, 18 nt, Human
augaccuuucaauaggaa

SEQ ID NO: 1858511 - RNA, 15 nt, Human
augaccuuucaauag

SEQ ID NO: 1858512 - RNA, 13 nt, Human
augaccuuucaau

SEQ ID NO: 1858513 - RNA, 12 nt, Human
augagccuggca

SEQ ID NO: 1858514 - RNA, 11 nt, Human
augagccuggc

SEQ ID NO: 1858515 - RNA, 21 nt, Human
augagccucagcauccuggca

SEQ ID NO: 1858516 - RNA, 19 nt, Human
augagccucagcauccugg

SEQ ID NO: 1858517 - RNA, 12 nt, Human
augaaagacugu

SEQ ID NO: 1858518 - RNA, 23 nt, Human
augaagcauuuacuuuguguuca

SEQ ID NO: 1858519 - RNA, 13 nt, Human
augaaguacucau

SEQ ID NO: 1858520 - RNA, 23 nt, Human
augaaguaauaugcacacauuuu

SEQ ID NO: 1858521 - RNA, 14 nt, Human
augaaguaauaugc

SEQ ID NO: 1858522 - RNA, 21 nt, Human
augaaguaauaugcacacauu

SEQ ID NO: 1858523 - RNA, 17 nt, Human
augaauaaagacaccua

SEQ ID NO: 1858524 - RNA, 23 nt, Human
augaaguuuuuuuuauacaggau

SEQ ID NO: 1858525 - RNA, 18 nt, Human
aguccuuaccagcagagc

SEQ ID NO: 1858526 - RNA, 16 nt, Human
aguccuuaccagcaga

SEQ ID NO: 1858527 - RNA, 14 nt, Human
aguccucuuuucug

SEQ ID NO: 1858528 - RNA, 21 nt, Human
agucugauucccaagcucugc

SEQ ID NO: 1858529 - RNA, 22 nt, Human
agucugauucccaagcucugcu

SEQ ID NO: 1858530 - RNA, 16 nt, Human
agucgaggacagggag

SEQ ID NO: 1858531 - RNA, 18 nt, Human
agucuggcccuuccuuuu

SEQ ID NO: 1858532 - RNA, 16 nt, Human
agugacagaggcagcc

SEQ ID NO: 1858533 - RNA, 19 nt, Human
agugacagaggcagcccca

SEQ ID NO: 1858534 - RNA, 14 nt, Human
agugacagaggcag

SEQ ID NO: 1858535 - RNA, 19 nt, Human
agugauccucccaccucag

SEQ ID NO: 1858536 - RNA, 20 nt, Human
agugauccucccaccucagc

SEQ ID NO: 1858537 - RNA, 22 nt, Human
agugauccucccaccucagccu

SEQ ID NO: 1858538 - RNA, 23 nt, Human
agugauccucccaccucagccuc

SEQ ID NO: 1858539 - RNA, 13 nt, Human
agugauuaccagg

SEQ ID NO: 1858540 - RNA, 22 nt, Human
agugccuuauggaacacucuga

SEQ ID NO: 1858541 - RNA, 21 nt, Human
agugccuuauggaacacucug

SEQ ID NO: 1858542 - RNA, 20 nt, Human
agugccuuauggaacacucu

SEQ ID NO: 1858543 - RNA, 19 nt, Human
agugccuuauggaacacuc

SEQ ID NO: 1858544 - RNA, 18 nt, Human
agugauucuccugccuca

SEQ ID NO: 1858545 - RNA, 19 nt, Human
agugauucuccugccucag

SEQ ID NO: 1858546 - RNA, 20 nt, Human
agugauucuccugccucagc

SEQ ID NO: 1858547 - RNA, 21 nt, Human
aguaaaugggggugcauuuga

SEQ ID NO: 1858548 - RNA, 19 nt, Human
aguaaaugggggugcauuu

SEQ ID NO: 1858549 - RNA, 20 nt, Human
aguaaaugggggugcauuug

SEQ ID NO: 1858550 - RNA, 17 nt, Human
aguaacuuacuuaggug

SEQ ID NO: 1858551 - RNA, 15 nt, Human
aguacuggagaaaau

SEQ ID NO: 1858552 - RNA, 22 nt, Human
aguauauugauccagaaagaaa

SEQ ID NO: 1858553 - RNA, 20 nt, Human
aguacuucuccacccugcuc

SEQ ID NO: 1858554 - RNA, 19 nt, Human
aguacuucuccacccugcu

SEQ ID NO: 1858555 - RNA, 21 nt, Human
aguacuucuccacccugcucu

SEQ ID NO: 1858556 - RNA, 22 nt, Human
aguacuucuccacccugcucuc

SEQ ID NO: 1858557 - RNA, 17 nt, Human
auacaccacuacauucu

SEQ ID NO: 1858558 - RNA, 14 nt, Human
auacaccgggccug

SEQ ID NO: 1858559 - RNA, 18 nt, Human
auacaccgggccuggaga

SEQ ID NO: 1858560 - RNA, 19 nt, Human
auacuugaaaauuaacaug

SEQ ID NO: 1858561 - RNA, 21 nt, Human
auaaagaugagugagcaugcc

SEQ ID NO: 1858562 - RNA, 15 nt, Human
auacaccacuacauu

SEQ ID NO: 1858563 - RNA, 12 nt, Human
auaauguuaaca

SEQ ID NO: 1858564 - RNA, 23 nt, Human
auacaaugcugugcccuaaagug

SEQ ID NO: 1858565 - RNA, 11 nt, Human
aguuugcaguu

SEQ ID NO: 1858566 - RNA, 14 nt, Human
aguuugauuaaauu

SEQ ID NO: 1858567 - RNA, 15 nt, Human
auaaaagacagugaa

SEQ ID NO: 1858568 - RNA, 16 nt, Human
auaaaagacagugaaa

SEQ ID NO: 1858569 - RNA, 22 nt, Human
aguuguuagugugucuuagugu

SEQ ID NO: 1858570 - RNA, 17 nt, Human
aguuguuagugugucuu

SEQ ID NO: 1858571 - RNA, 18 nt, Human
aguugaaaaacagcugag

SEQ ID NO: 1858572 - RNA, 17 nt, Human
aguugaagacagagcua

SEQ ID NO: 1858573 - RNA, 16 nt, Human
aguugaagacagagcu

SEQ ID NO: 1858574 - RNA, 17 nt, Human
aguugaaaaacagcuga

SEQ ID NO: 1858575 - RNA, 21 nt, Human
aguuccaccaucaagccacca

SEQ ID NO: 1858576 - RNA, 18 nt, Human
aguuccaccaucaagcca

SEQ ID NO: 1858577 - RNA, 13 nt, Human
aguuacacauuuu

SEQ ID NO: 1858578 - RNA, 16 nt, Human
aguuacacauuuuuca

SEQ ID NO: 1858579 - RNA, 19 nt, Human
aguuacacauuuuucagau

SEQ ID NO: 1858580 - RNA, 14 nt, Human
aguucauacccugu

SEQ ID NO: 1858581 - RNA, 18 nt, Human
aguuacacuaaaagguga

SEQ ID NO: 1858582 - RNA, 12 nt, Human
agugcuccagcc

SEQ ID NO: 1858583 - RNA, 23 nt, Human
agaucucugcuuuggaaaucaca

SEQ ID NO: 1858584 - RNA, 18 nt, Human
agaucucugcuuuggaaa

SEQ ID NO: 1858585 - RNA, 22 nt, Human
agaugggugcuuggaggaagga

SEQ ID NO: 1858586 - RNA, 20 nt, Human
agaugggugcuuggaggaag

SEQ ID NO: 1858587 - RNA, 14 nt, Human
agauucuuuccuga

SEQ ID NO: 1858588 - RNA, 18 nt, Human
agaugacaucugucuagg

SEQ ID NO: 1858589 - RNA, 20 nt, Human
agauggcugugccucugccu

SEQ ID NO: 1858590 - RNA, 19 nt, Human
agauggcugugccucugcc

SEQ ID NO: 1858591 - RNA, 18 nt, Human
agauggcugugccucugc

SEQ ID NO: 1858592 - RNA, 17 nt, Human
agauggcugugccucug

SEQ ID NO: 1858593 - RNA, 22 nt, Human
agauggcugugccucugccugu

SEQ ID NO: 1858594 - RNA, 21 nt, Human
agauggcugugccucugccug

SEQ ID NO: 1858595 - RNA, 16 nt, Human
agauucuuuccugagg

SEQ ID NO: 1858596 - RNA, 15 nt, Human
agauucuuuccugag

SEQ ID NO: 1858597 - RNA, 18 nt, Human
agauucuuuccugaggcu

SEQ ID NO: 1858598 - RNA, 17 nt, Human
agauugagauguguuca

SEQ ID NO: 1858599 - RNA, 16 nt, Human
agauugcaacaggcug

SEQ ID NO: 1858600 - RNA, 16 nt, Human
agauugcaccacugca

SEQ ID NO: 1858601 - RNA, 17 nt, Human
agauugcaacaggcugg

SEQ ID NO: 1858602 - RNA, 19 nt, Human
agauugcaacaggcugggc

SEQ ID NO: 1858603 - RNA, 19 nt, Human
agcaaauucuguuuuucua

SEQ ID NO: 1858604 - RNA, 15 nt, Human
agaguggcuccuccc

SEQ ID NO: 1858605 - RNA, 14 nt, Human
agaguggcuccucc

SEQ ID NO: 1858606 - RNA, 13 nt, Human
agaguggcuccuc

SEQ ID NO: 1858607 - RNA, 12 nt, Human
agaguggcuccu

SEQ ID NO: 1858608 - RNA, 20 nt, Human
agagggucugaggaauccag

SEQ ID NO: 1858609 - RNA, 23 nt, Human
agaggggguggccucccaacuca

SEQ ID NO: 1858610 - RNA, 13 nt, Human
agaguugaagaca

SEQ ID NO: 1858611 - RNA, 15 nt, Human
agaguugaagacaga

SEQ ID NO: 1858612 - RNA, 14 nt, Human
agaguugaagacag

SEQ ID NO: 1858613 - RNA, 15 nt, Human
agauauaaaagacug

SEQ ID NO: 1858614 - RNA, 20 nt, Human
agauagccaaggccaaagga

SEQ ID NO: 1858615 - RNA, 20 nt, Human
agauagauaggucagugcaa

SEQ ID NO: 1858616 - RNA, 15 nt, Human
agcaauucuccugcc

SEQ ID NO: 1858617 - RNA, 20 nt, Human
agcaauucuccugccucagc

SEQ ID NO: 1858618 - RNA, 19 nt, Human
agcaauucuccugccucag

SEQ ID NO: 1858619 - RNA, 18 nt, Human
agcaauucuccugccuca

SEQ ID NO: 1858620 - RNA, 17 nt, Human
agcaauucuccugccuc

SEQ ID NO: 1858621 - RNA, 21 nt, Human
agcacagacccugcccugugg

SEQ ID NO: 1858622 - RNA, 17 nt, Human
agcagugcaugcugucc

SEQ ID NO: 1858623 - RNA, 19 nt, Human
agcagcguuucuaugacac

SEQ ID NO: 1858624 - RNA, 18 nt, Human
agcagcguuucuaugaca

SEQ ID NO: 1858625 - RNA, 20 nt, Human
agcagccuggacccugugga

SEQ ID NO: 1858626 - RNA, 16 nt, Human
agcagugcaugcuguc

SEQ ID NO: 1858627 - RNA, 13 nt, Human
agcagugcaugcu

SEQ ID NO: 1858628 - RNA, 16 nt, Human
agcagccuggacccug

SEQ ID NO: 1858629 - RNA, 22 nt, Human
agccagauuucacucuccuugg

SEQ ID NO: 1858630 - RNA, 20 nt, Human
agccagauuucacucuccuu

SEQ ID NO: 1858631 - RNA, 17 nt, Human
agccagauuucacucuc

SEQ ID NO: 1858632 - RNA, 14 nt, Human
agccagauuucacu

SEQ ID NO: 1858633 - RNA, 17 nt, Human
agccaacuauggccugu

SEQ ID NO: 1858634 - RNA, 20 nt, Human
agcccacgcccccacuggug

SEQ ID NO: 1858635 - RNA, 19 nt, Human
agcccacgcccccacuggu

SEQ ID NO: 1858636 - RNA, 18 nt, Human
agcccacgcccccacugg

SEQ ID NO: 1858637 - RNA, 17 nt, Human
agcccacgcccccacug

SEQ ID NO: 1858638 - RNA, 23 nt, Human
agcccaccccucaacaccucugc

SEQ ID NO: 1858639 - RNA, 13 nt, Human
agcccaccuuggc

SEQ ID NO: 1858640 - RNA, 23 nt, Human
agccagcaggcucucaggccagc

SEQ ID NO: 1858641 - RNA, 21 nt, Human
agccagcaggcucucaggcca

SEQ ID NO: 1858642 - RNA, 22 nt, Human
agccagcaggcucucaggccag

SEQ ID NO: 1858643 - RNA, 16 nt, Human
agcaucuaugugagac

SEQ ID NO: 1858644 - RNA, 18 nt, Human
agaagaugaaugagcaaa

SEQ ID NO: 1858645 - RNA, 19 nt, Human
agaagauggcacuuauaac

SEQ ID NO: 1858646 - RNA, 19 nt, Human
agaagucuuagauguauau

SEQ ID NO: 1858647 - RNA, 17 nt, Human
agaagucuuagauguau

SEQ ID NO: 1858648 - RNA, 14 nt, Human
agaagucacacagu

SEQ ID NO: 1858649 - RNA, 23 nt, Human
agaagagaaugcacaaacagagg

SEQ ID NO: 1858650 - RNA, 15 nt, Human
agaagagaaugcaca

SEQ ID NO: 1858651 - RNA, 21 nt, Human
agaaccaaaaagaggcuaugu

SEQ ID NO: 1858652 - RNA, 17 nt, Human
agaaccaggcaacuugg

SEQ ID NO: 1858653 - RNA, 20 nt, Human
agaaccaggcaacuugggaa

SEQ ID NO: 1858654 - RNA, 16 nt, Human
agaaugaaagggccca

SEQ ID NO: 1858655 - RNA, 17 nt, Human
agaaucucaaauaacua

SEQ ID NO: 1858656 - RNA, 23 nt, Human
agaaugcacaaacagaggccgcc

SEQ ID NO: 1858657 - RNA, 18 nt, Human
agaaugcucuuuacuuca

SEQ ID NO: 1858658 - RNA, 18 nt, Human
agaaccaaaaagaggcua

SEQ ID NO: 1858659 - RNA, 17 nt, Human
agaaccaaaaagaggcu

SEQ ID NO: 1858660 - RNA, 17 nt, Human
agaacaucccuccuggg

SEQ ID NO: 1858661 - RNA, 13 nt, Human
agaacaucccucc

SEQ ID NO: 1858662 - RNA, 22 nt, Human
agaacagugauuaccagggacu

SEQ ID NO: 1858663 - RNA, 16 nt, Human
agacucuuuggacacu

SEQ ID NO: 1858664 - RNA, 21 nt, Human
agacugaccaauauuguacag

SEQ ID NO: 1858665 - RNA, 12 nt, Human
agacugaccaau

SEQ ID NO: 1858666 - RNA, 23 nt, Human
agagagcaagacgcugugcugcc

SEQ ID NO: 1858667 - RNA, 19 nt, Human
agagagcaagacgcugugc

SEQ ID NO: 1858668 - RNA, 11 nt, Human
agagagcaaga

SEQ ID NO: 1858669 - RNA, 18 nt, Human
agagcccacgcccccacu

SEQ ID NO: 1858670 - RNA, 15 nt, Human
agaauuuugagcagg

SEQ ID NO: 1858671 - RNA, 20 nt, Human
agacaaugugaaaagaaaaa

SEQ ID NO: 1858672 - RNA, 19 nt, Human
agacaaggaaaaaauaaca

SEQ ID NO: 1858673 - RNA, 20 nt, Human
agacgcugugcugcccugcc

SEQ ID NO: 1858674 - RNA, 19 nt, Human
agacgcugugcugcccugc

SEQ ID NO: 1858675 - RNA, 18 nt, Human
agacgcugugcugcccug

SEQ ID NO: 1858676 - RNA, 17 nt, Human
agacgcugugcugcccu

SEQ ID NO: 1858677 - RNA, 15 nt, Human
agacuaucuaaaugu

SEQ ID NO: 1858678 - RNA, 23 nt, Human
agacagcccgggcucugccuccc

SEQ ID NO: 1858679 - RNA, 22 nt, Human
agacagcccgggcucugccucc

SEQ ID NO: 1858680 - RNA, 14 nt, Human
agacaauuuauuau

SEQ ID NO: 1858681 - RNA, 21 nt, Human
agacagcccgggcucugccuc

SEQ ID NO: 1858682 - RNA, 13 nt, Human
agacagcccucca

SEQ ID NO: 1858683 - RNA, 23 nt, Human
agaccaucccugaaggccccgcc

SEQ ID NO: 1858684 - RNA, 14 nt, Human
agaccacguuucua

SEQ ID NO: 1858685 - RNA, 17 nt, Human
agacccaaaaggcagaa

SEQ ID NO: 1858686 - RNA, 18 nt, Human
agacgaaacauuuguucu

SEQ ID NO: 1858687 - RNA, 22 nt, Human
agcucaccagccccagugccca

SEQ ID NO: 1858688 - RNA, 23 nt, Human
agcucaccagccccagugcccac

SEQ ID NO: 1858689 - RNA, 21 nt, Human
agcugacuuuucuguccgagc

SEQ ID NO: 1858690 - RNA, 15 nt, Human
agcugacuuuucugu

SEQ ID NO: 1858691 - RNA, 16 nt, Human
agcugguugagguuuc

SEQ ID NO: 1858692 - RNA, 14 nt, Human
agcuggguuggaaa

SEQ ID NO: 1858693 - RNA, 16 nt, Human
agcuggguuggaaaac

SEQ ID NO: 1858694 - RNA, 20 nt, Human
agcuggguuggaaaacagua

SEQ ID NO: 1858695 - RNA, 15 nt, Human
agcuggucccacuca

SEQ ID NO: 1858696 - RNA, 14 nt, Human
aggaagguagaaau

SEQ ID NO: 1858697 - RNA, 15 nt, Human
aggaaguacuggaga

SEQ ID NO: 1858698 - RNA, 11 nt, Human
aggaaguacug

SEQ ID NO: 1858699 - RNA, 12 nt, Human
aggaacacuccu

SEQ ID NO: 1858700 - RNA, 23 nt, Human
aggaaaaccaagccguggcuucc

SEQ ID NO: 1858701 - RNA, 22 nt, Human
aggaaaaccaagccguggcuuc

SEQ ID NO: 1858702 - RNA, 21 nt, Human
aggaaaaccaagccguggcuu

SEQ ID NO: 1858703 - RNA, 20 nt, Human
aggaaaaccaagccguggcu

SEQ ID NO: 1858704 - RNA, 15 nt, Human
aggaacacuccuuca

SEQ ID NO: 1858705 - RNA, 19 nt, Human
aggaaaaccaagccguggc

SEQ ID NO: 1858706 - RNA, 18 nt, Human
aggaaaaaauaacaauga

SEQ ID NO: 1858707 - RNA, 21 nt, Human
agcuuuguuuguugucagcug

SEQ ID NO: 1858708 - RNA, 22 nt, Human
agcuuuguuuguugucagcuga

SEQ ID NO: 1858709 - RNA, 14 nt, Human
agccuggacccugu

SEQ ID NO: 1858710 - RNA, 18 nt, Human
agccuggcacagggcagu

SEQ ID NO: 1858711 - RNA, 17 nt, Human
agccuggcacagggcag

SEQ ID NO: 1858712 - RNA, 20 nt, Human
agccuggcacagggcagugg

SEQ ID NO: 1858713 - RNA, 17 nt, Human
agccugcugccugcuuu

SEQ ID NO: 1858714 - RNA, 18 nt, Human
agccugggcaaugugaua

SEQ ID NO: 1858715 - RNA, 20 nt, Human
agcuaacauggaaguacuau

SEQ ID NO: 1858716 - RNA, 19 nt, Human
agcuaacauggaaguacua

SEQ ID NO: 1858717 - RNA, 13 nt, Human
agcgacagugaga

SEQ ID NO: 1858718 - RNA, 15 nt, Human
agcgacagugagacu

SEQ ID NO: 1858719 - RNA, 17 nt, Human
agcgauucuucugcuuc

SEQ ID NO: 1858720 - RNA, 19 nt, Human
agcgauucuucugcuucag

SEQ ID NO: 1858721 - RNA, 17 nt, Human
agcgacagugagacucu

SEQ ID NO: 1858722 - RNA, 15 nt, Human
agcgauucuucugcu

SEQ ID NO: 1858723 - RNA, 13 nt, Human
agcucaccagccc

SEQ ID NO: 1858724 - RNA, 14 nt, Human
agcucaccagcccc

SEQ ID NO: 1858725 - RNA, 15 nt, Human
agcucaccagcccca

SEQ ID NO: 1858726 - RNA, 21 nt, Human
agcucaccagccccagugccc

SEQ ID NO: 1858727 - RNA, 13 nt, Human
agcuacaaaugca

SEQ ID NO: 1858728 - RNA, 13 nt, Human
agcuaaugggaca

SEQ ID NO: 1858729 - RNA, 14 nt, Human
agcuaaugggacac

SEQ ID NO: 1858730 - RNA, 15 nt, Human
agcuaaugggacacu

SEQ ID NO: 1858731 - RNA, 12 nt, Human
agcuacaaaugc

SEQ ID NO: 1858732 - RNA, 16 nt, Human
aggcagccaggccaca

SEQ ID NO: 1858733 - RNA, 15 nt, Human
aggcagccaggccac

SEQ ID NO: 1858734 - RNA, 14 nt, Human
aggcagccaggcca

SEQ ID NO: 1858735 - RNA, 22 nt, Human
aggcagaacucaucuagguaaa

SEQ ID NO: 1858736 - RNA, 20 nt, Human
aggcagagguugcagugagc

SEQ ID NO: 1858737 - RNA, 13 nt, Human
aggcagauacagg

SEQ ID NO: 1858738 - RNA, 18 nt, Human
aggcagccaggccacaag

SEQ ID NO: 1858739 - RNA, 17 nt, Human
aggcaucgcaauguaag

SEQ ID NO: 1858740 - RNA, 24 nt, Human
aggcaugugaugagaggaaaucac

SEQ ID NO: 1858741 - RNA, 23 nt, Human
aggcaugugaugagaggaaauca

SEQ ID NO: 1858742 - RNA, 22 nt, Human
aggcaugugccacccacccaac

SEQ ID NO: 1858743 - RNA, 12 nt, Human
aggcauguucuc

SEQ ID NO: 1858744 - RNA, 23 nt, Human
aggcauuccccaggaggccagcc

SEQ ID NO: 1858745 - RNA, 22 nt, Human
aggcauuccccaggaggccagc

SEQ ID NO: 1858746 - RNA, 21 nt, Human
aggcauuccccaggaggccag

SEQ ID NO: 1858747 - RNA, 20 nt, Human
aggcauguucucugaggaca

SEQ ID NO: 1858748 - RNA, 22 nt, Human
aggcauguucucugaggacacu

SEQ ID NO: 1858749 - RNA, 23 nt, Human
aggccaggcccucugcccacucc

SEQ ID NO: 1858750 - RNA, 19 nt, Human
aggccaggcccucugccca

SEQ ID NO: 1858751 - RNA, 18 nt, Human
aggccaggcccucugccc

SEQ ID NO: 1858752 - RNA, 17 nt, Human
aggccaggcccucugcc

SEQ ID NO: 1858753 - RNA, 16 nt, Human
aggccaggcccucugc

SEQ ID NO: 1858754 - RNA, 16 nt, Human
aggccagcugcuuggg

SEQ ID NO: 1858755 - RNA, 14 nt, Human
aggccagcugcuug

SEQ ID NO: 1858756 - RNA, 13 nt, Human
aggccagcugcuu

SEQ ID NO: 1858757 - RNA, 14 nt, Human
aggccaugggccuc

SEQ ID NO: 1858758 - RNA, 16 nt, Human
aggccaugggccuccu

SEQ ID NO: 1858759 - RNA, 17 nt, Human
aggcccucugcccacuc

SEQ ID NO: 1858760 - RNA, 17 nt, Human
aggccaugggccuccug

SEQ ID NO: 1858761 - RNA, 23 nt, Human
aggccagcugcuugggcuucauc

SEQ ID NO: 1858762 - RNA, 18 nt, Human
aggaguuucguuuucaaa

SEQ ID NO: 1858763 - RNA, 14 nt, Human
aggagugagcacua

SEQ ID NO: 1858764 - RNA, 15 nt, Human
aggaggucucuaaga

SEQ ID NO: 1858765 - RNA, 12 nt, Human
aggagugagcac

SEQ ID NO: 1858766 - RNA, 14 nt, Human
aggaggucucuaag

SEQ ID NO: 1858767 - RNA, 16 nt, Human
aggagagcccuucauu

SEQ ID NO: 1858768 - RNA, 13 nt, Human
aggaaguagagga

SEQ ID NO: 1858769 - RNA, 19 nt, Human
aggaaguacuggagaaaau

SEQ ID NO: 1858770 - RNA, 14 nt, Human
agggacugagaaau

SEQ ID NO: 1858771 - RNA, 13 nt, Human
agggacugagaaa

SEQ ID NO: 1858772 - RNA, 15 nt, Human
agggacugagaaauu

SEQ ID NO: 1858773 - RNA, 17 nt, Human
agggacugagaaauuua

SEQ ID NO: 1858774 - RNA, 18 nt, Human
agggccuggcucaggugg

SEQ ID NO: 1858775 - RNA, 14 nt, Human
agggccuggcucag

SEQ ID NO: 1858776 - RNA, 13 nt, Human
agggccuggcuca

SEQ ID NO: 1858777 - RNA, 20 nt, Human
aggcccucugcccacucccu

SEQ ID NO: 1858778 - RNA, 19 nt, Human
aggcccucugcccacuccc

SEQ ID NO: 1858779 - RNA, 21 nt, Human
aggcccucugcccacucccug

SEQ ID NO: 1858780 - RNA, 22 nt, Human
aggcucuggagcccacuguacu

SEQ ID NO: 1858781 - RNA, 13 nt, Human
aggcugaggacuu

SEQ ID NO: 1858782 - RNA, 11 nt, Human
aggcugaggac

SEQ ID NO: 1858783 - RNA, 13 nt, Human
aggcugagccuca

SEQ ID NO: 1858784 - RNA, 11 nt, Human
aggcugagccu

SEQ ID NO: 1858785 - RNA, 13 nt, Human
aggcucuucuccu

SEQ ID NO: 1858786 - RNA, 12 nt, Human
aggcugucaauu

SEQ ID NO: 1858787 - RNA, 19 nt, Human
aggcugucaauuacaggaa

SEQ ID NO: 1858788 - RNA, 24 nt, Human
aggcuguaucccaugagccucagc

SEQ ID NO: 1858789 - RNA, 19 nt, Human
aggcugcagugagccgaga

SEQ ID NO: 1858790 - RNA, 17 nt, Human
aggcugcagugagccga

SEQ ID NO: 1858791 - RNA, 23 nt, Human
aggcuguaucccaugagccucag

SEQ ID NO: 1858792 - RNA, 13 nt, Human
cuccuaccuggua

SEQ ID NO: 1858793 - RNA, 14 nt, Human
cuccuuguguuacu

SEQ ID NO: 1858794 - RNA, 13 nt, Human
cuccuuucacaac

SEQ ID NO: 1858795 - RNA, 17 nt, Human
cuccuuucacaaccuuc

SEQ ID NO: 1858796 - RNA, 16 nt, Human
cuccuuucacaaccuu

SEQ ID NO: 1858797 - RNA, 15 nt, Human
cuccuuucaccacau

SEQ ID NO: 1858798 - RNA, 14 nt, Human
cuccuggggguucu

SEQ ID NO: 1858799 - RNA, 16 nt, Human
cuccuguaccucuuga

SEQ ID NO: 1858800 - RNA, 14 nt, Human
cuccucugcugcug

SEQ ID NO: 1858801 - RNA, 13 nt, Human
cuccucugcugcu

SEQ ID NO: 1858802 - RNA, 15 nt, Human
cuccucugcugcugg

SEQ ID NO: 1858803 - RNA, 15 nt, Human
cuccucuguccaggc

SEQ ID NO: 1858804 - RNA, 12 nt, Human
cuccucugucca

SEQ ID NO: 1858805 - RNA, 16 nt, Human
cuccucuugccacugc

SEQ ID NO: 1858806 - RNA, 15 nt, Human
cuccucuugccacug

SEQ ID NO: 1858807 - RNA, 12 nt, Human
cuccucuugcca

SEQ ID NO: 1858808 - RNA, 19 nt, Human
cuccuggcccacugcaucg

SEQ ID NO: 1858809 - RNA, 18 nt, Human
cuccucuugccacugccu

SEQ ID NO: 1858810 - RNA, 19 nt, Human
cuccuggccucaagugauu

SEQ ID NO: 1858811 - RNA, 18 nt, Human
cuccugggcuaagugauc

SEQ ID NO: 1858812 - RNA, 21 nt, Human
cucccacaggcccuuccucuc

SEQ ID NO: 1858813 - RNA, 20 nt, Human
cucccacaggcccuuccucu

SEQ ID NO: 1858814 - RNA, 16 nt, Human
cucccacaggcccuuc

SEQ ID NO: 1858815 - RNA, 14 nt, Human
cucccacaggcccu

SEQ ID NO: 1858816 - RNA, 15 nt, Human
cucccacaggcccuu

SEQ ID NO: 1858817 - RNA, 23 nt, Human
cuccaggugcacaagcuccaagc

SEQ ID NO: 1858818 - RNA, 15 nt, Human
cuccaggcuccuuua

SEQ ID NO: 1858819 - RNA, 23 nt, Human
cuccaggcuccuuuagcgcccag

SEQ ID NO: 1858820 - RNA, 20 nt, Human
cuccaggcuguaucccauga

SEQ ID NO: 1858821 - RNA, 22 nt, Human
cuccaggcuguaucccaugagc

SEQ ID NO: 1858822 - RNA, 20 nt, Human
cucccucuuucccucccuuc

SEQ ID NO: 1858823 - RNA, 20 nt, Human
cucccugaaguaagcaaaga

SEQ ID NO: 1858824 - RNA, 16 nt, Human
cucugcacuccccugc

SEQ ID NO: 1858825 - RNA, 15 nt, Human
cucugcacuccccug

SEQ ID NO: 1858826 - RNA, 21 nt, Human
cucugcacaagcugcacccuc

SEQ ID NO: 1858827 - RNA, 20 nt, Human
cucugcacaagcugcacccu

SEQ ID NO: 1858828 - RNA, 17 nt, Human
cucugcacuccccugcu

SEQ ID NO: 1858829 - RNA, 13 nt, Human
cucugcagguccc

SEQ ID NO: 1858830 - RNA, 21 nt, Human
cucugcuccucuccccagcaa

SEQ ID NO: 1858831 - RNA, 21 nt, Human
cucugcugacagacacaggcc

SEQ ID NO: 1858832 - RNA, 22 nt, Human
cucugcugacagacacaggccc

SEQ ID NO: 1858833 - RNA, 20 nt, Human
cucugcugacagacacaggc

SEQ ID NO: 1858834 - RNA, 13 nt, Human
cucugcugcuggc

SEQ ID NO: 1858835 - RNA, 23 nt, Human
cucugcugacagacacaggcccg

SEQ ID NO: 1858836 - RNA, 13 nt, Human
cucuguacagagc

SEQ ID NO: 1858837 - RNA, 15 nt, Human
cucuguacagagccc

SEQ ID NO: 1858838 - RNA, 14 nt, Human
cucuguacagagcc

SEQ ID NO: 1858839 - RNA, 15 nt, Human
cucugcugcuggcug

SEQ ID NO: 1858840 - RNA, 14 nt, Human
cucugcugcuggcu

SEQ ID NO: 1858841 - RNA, 16 nt, Human
cucugcugcuggcugg

SEQ ID NO: 1858842 - RNA, 16 nt, Human
cucuguacagagccca

SEQ ID NO: 1858843 - RNA, 13 nt, Human
cucuguccuggga

SEQ ID NO: 1858844 - RNA, 23 nt, Human
cuccuuugugaggaagccgcugg

SEQ ID NO: 1858845 - RNA, 18 nt, Human
cuccuuugugaggaagcc

SEQ ID NO: 1858846 - RNA, 17 nt, Human
cuccuuugugaggaagc

SEQ ID NO: 1858847 - RNA, 20 nt, Human
cuccuuucacaaccuucugu

SEQ ID NO: 1858848 - RNA, 16 nt, Human
cucgguguggagaagc

SEQ ID NO: 1858849 - RNA, 23 nt, Human
cucgguguggagaagcggcuggc

SEQ ID NO: 1858850 - RNA, 17 nt, Human
cucgguguggagaagcg

SEQ ID NO: 1858851 - RNA, 14 nt, Human
cucucuggccuucg

SEQ ID NO: 1858852 - RNA, 16 nt, Human
cucucuggccuucggc

SEQ ID NO: 1858853 - RNA, 13 nt, Human
cucucuggccuuc

SEQ ID NO: 1858854 - RNA, 16 nt, Human
cucuccuccagaguca

SEQ ID NO: 1858855 - RNA, 12 nt, Human
cucuccuccaga

SEQ ID NO: 1858856 - RNA, 15 nt, Human
cucuccuccagaguc

SEQ ID NO: 1858857 - RNA, 13 nt, Human
cucuccuccagag

SEQ ID NO: 1858858 - RNA, 19 nt, Human
cucuauguucuaagaagug

SEQ ID NO: 1858859 - RNA, 23 nt, Human
cucaauuauuuugcauuuuuucu

SEQ ID NO: 1858860 - RNA, 21 nt, Human
cucaagugauucuccugccuc

SEQ ID NO: 1858861 - RNA, 17 nt, Human
cuauccuacuuccccuu

SEQ ID NO: 1858862 - RNA, 14 nt, Human
cuaucucccccagc

SEQ ID NO: 1858863 - RNA, 13 nt, Human
cuaucucccccag

SEQ ID NO: 1858864 - RNA, 14 nt, Human
cuaugugagaccau

SEQ ID NO: 1858865 - RNA, 18 nt, Human
cuauguugcccaggcagg

SEQ ID NO: 1858866 - RNA, 19 nt, Human
cuauguugcccaggcaggu

SEQ ID NO: 1858867 - RNA, 21 nt, Human
cuauguugcccaggcaggucu

SEQ ID NO: 1858868 - RNA, 22 nt, Human
cuauguugcccaggcaggucuu

SEQ ID NO: 1858869 - RNA, 17 nt, Human
cuaugugagcacaaagg

SEQ ID NO: 1858870 - RNA, 18 nt, Human
cuauguucuaagaaguga

SEQ ID NO: 1858871 - RNA, 14 nt, Human
cuauguugcccagg

SEQ ID NO: 1858872 - RNA, 22 nt, Human
cucagguugucugaagucacug

SEQ ID NO: 1858873 - RNA, 23 nt, Human
cucaggugucccugcacuugcag

SEQ ID NO: 1858874 - RNA, 22 nt, Human
cucagucuggcccuuccuuuuc

SEQ ID NO: 1858875 - RNA, 20 nt, Human
cucagucuggcccuuccuuu

SEQ ID NO: 1858876 - RNA, 16 nt, Human
cucaguccaugaagau

SEQ ID NO: 1858877 - RNA, 14 nt, Human
cucagguugucuga

SEQ ID NO: 1858878 - RNA, 15 nt, Human
cucaguccauagcag

SEQ ID NO: 1858879 - RNA, 17 nt, Human
cucaguccauagcagag

SEQ ID NO: 1858880 - RNA, 20 nt, Human
cucaggccaaacucaccugc

SEQ ID NO: 1858881 - RNA, 19 nt, Human
cucaggccaaacucaccug

SEQ ID NO: 1858882 - RNA, 21 nt, Human
cucaggccaaacucaccugcc

SEQ ID NO: 1858883 - RNA, 20 nt, Human
cucaggccagcugcuugggc

SEQ ID NO: 1858884 - RNA, 18 nt, Human
cucaggccagcugcuugg

SEQ ID NO: 1858885 - RNA, 17 nt, Human
cucaggccagcugcuug

SEQ ID NO: 1858886 - RNA, 16 nt, Human
cucaggccagcugcuu

SEQ ID NO: 1858887 - RNA, 11 nt, Human
cucaggccugg

SEQ ID NO: 1858888 - RNA, 22 nt, Human
cucaggccugggggcugggcag

SEQ ID NO: 1858889 - RNA, 17 nt, Human
cucaccuuucccaucuu

SEQ ID NO: 1858890 - RNA, 13 nt, Human
cucagaagacacu

SEQ ID NO: 1858891 - RNA, 15 nt, Human
cucagaagacacuga

SEQ ID NO: 1858892 - RNA, 17 nt, Human
cucagaagacacugaug

SEQ ID NO: 1858893 - RNA, 20 nt, Human
cucagaagacacugaugggc

SEQ ID NO: 1858894 - RNA, 22 nt, Human
cucagaagacacugaugggcaa

SEQ ID NO: 1858895 - RNA, 19 nt, Human
cucagccucccgaauagcu

SEQ ID NO: 1858896 - RNA, 21 nt, Human
cucagccucccgaauagcugg

SEQ ID NO: 1858897 - RNA, 22 nt, Human
cucagccucccgaauagcuggg

SEQ ID NO: 1858898 - RNA, 23 nt, Human
cucagaagacacugaugggcaac

SEQ ID NO: 1858899 - RNA, 17 nt, Human
cguaaagcuagaaauga

SEQ ID NO: 1858900 - RNA, 20 nt, Human
cgguggcucacgccuguaau

SEQ ID NO: 1858901 - RNA, 22 nt, Human
cguacacauuuuauuuuauuau

SEQ ID NO: 1858902 - RNA, 13 nt, Human
cgggcucugccuc

SEQ ID NO: 1858903 - RNA, 12 nt, Human
cgggcucugccu

SEQ ID NO: 1858904 - RNA, 20 nt, Human
cgggcugggagcucugcaga

SEQ ID NO: 1858905 - RNA, 16 nt, Human
cgggcugggagcucug

SEQ ID NO: 1858906 - RNA, 19 nt, Human
cgggcucagcaaaagaugc

SEQ ID NO: 1858907 - RNA, 20 nt, Human
cgggccuggagaacuagaga

SEQ ID NO: 1858908 - RNA, 16 nt, Human
cgggccuggagaacua

SEQ ID NO: 1858909 - RNA, 18 nt, Human
cgggccagugcuccagcc

SEQ ID NO: 1858910 - RNA, 14 nt, Human
cgggccagugcucc

SEQ ID NO: 1858911 - RNA, 20 nt, Human
cggagacggagucccaccuu

SEQ ID NO: 1858912 - RNA, 17 nt, Human
cggagacggagucccac

SEQ ID NO: 1858913 - RNA, 21 nt, Human
cggagucccaccuuggcugca

SEQ ID NO: 1858914 - RNA, 22 nt, Human
cggagucccaccuuggcugcag

SEQ ID NO: 1858915 - RNA, 15 nt, Human
cggaggggccuggca

SEQ ID NO: 1858916 - RNA, 23 nt, Human
cggagucccaccuuggcugcagg

SEQ ID NO: 1858917 - RNA, 18 nt, Human
cggcuaauuuuuguauuu

SEQ ID NO: 1858918 - RNA, 16 nt, Human
cgagucucuucuccac

SEQ ID NO: 1858919 - RNA, 18 nt, Human
cgagucucuucuccacug

SEQ ID NO: 1858920 - RNA, 17 nt, Human
cgagucucuucuccacu

SEQ ID NO: 1858921 - RNA, 22 nt, Human
cgcaggcuggcccugcccuggu

SEQ ID NO: 1858922 - RNA, 21 nt, Human
cgcaggcuggcccugcccugg

SEQ ID NO: 1858923 - RNA, 21 nt, Human
cgagucucuucuccacuggau

SEQ ID NO: 1858924 - RNA, 20 nt, Human
cgagucucuucuccacugga

SEQ ID NO: 1858925 - RNA, 20 nt, Human
ccuuuucgcaggauucuucc

SEQ ID NO: 1858926 - RNA, 17 nt, Human
cgcuggagugcagugag

SEQ ID NO: 1858927 - RNA, 18 nt, Human
cgcuggagugcagugagc

SEQ ID NO: 1858928 - RNA, 21 nt, Human
cgcucuuggcagguacucagc

SEQ ID NO: 1858929 - RNA, 22 nt, Human
cgcucuguugcccaggcuggag

SEQ ID NO: 1858930 - RNA, 20 nt, Human
cgcucugucgcccaggcugg

SEQ ID NO: 1858931 - RNA, 19 nt, Human
cgcucuguugcccaggcug

SEQ ID NO: 1858932 - RNA, 20 nt, Human
cgcugccccuggcagccccu

SEQ ID NO: 1858933 - RNA, 19 nt, Human
cgcugccccuggcagcccc

SEQ ID NO: 1858934 - RNA, 22 nt, Human
cgugagccacugcaccgggcca

SEQ ID NO: 1858935 - RNA, 14 nt, Human
cgugaggccagaga

SEQ ID NO: 1858936 - RNA, 14 nt, Human
cgugagccacugca

SEQ ID NO: 1858937 - RNA, 15 nt, Human
cgugagccacugcac

SEQ ID NO: 1858938 - RNA, 20 nt, Human
cgugagccacugcaccgggc

SEQ ID NO: 1858939 - RNA, 14 nt, Human
cgugacaacacuug

SEQ ID NO: 1858940 - RNA, 15 nt, Human
cgugacaacacuugu

SEQ ID NO: 1858941 - RNA, 22 nt, Human
cuaacuugucuuuggacccuga

SEQ ID NO: 1858942 - RNA, 14 nt, Human
cuaacuugucuuug

SEQ ID NO: 1858943 - RNA, 16 nt, Human
cuaacuuuccuucauu

SEQ ID NO: 1858944 - RNA, 22 nt, Human
cuaagaaagcccuuaggaagaa

SEQ ID NO: 1858945 - RNA, 20 nt, Human
cuaacgaaguauccuucagc

SEQ ID NO: 1858946 - RNA, 19 nt, Human
cuaaaguguauuuuuuuac

SEQ ID NO: 1858947 - RNA, 23 nt, Human
cuaaaguaaaaacaaagaaauua

SEQ ID NO: 1858948 - RNA, 19 nt, Human
cguguuaugacuccagaau

SEQ ID NO: 1858949 - RNA, 15 nt, Human
cguguuaugacucca

SEQ ID NO: 1858950 - RNA, 18 nt, Human
cgugaguccuggcauggg

SEQ ID NO: 1858951 - RNA, 19 nt, Human
cgugaguccuggcauggga

SEQ ID NO: 1858952 - RNA, 16 nt, Human
cgugaggccagagaca

SEQ ID NO: 1858953 - RNA, 11 nt, Human
cuaaagcugcc

SEQ ID NO: 1858954 - RNA, 14 nt, Human
cuaaguuuuuaugg

SEQ ID NO: 1858955 - RNA, 20 nt, Human
cuaauaaaauuuaaaagucu

SEQ ID NO: 1858956 - RNA, 19 nt, Human
cuacaaaaagcauaaaaau

SEQ ID NO: 1858957 - RNA, 14 nt, Human
ccuugcauaauggu

SEQ ID NO: 1858958 - RNA, 17 nt, Human
ccuuucaauaggaaaaa

SEQ ID NO: 1858959 - RNA, 18 nt, Human
ccuuucaauaggaaaaac

SEQ ID NO: 1858960 - RNA, 14 nt, Human
ccuuuauucuggca

SEQ ID NO: 1858961 - RNA, 15 nt, Human
ccuuucaauaggaaa

SEQ ID NO: 1858962 - RNA, 19 nt, Human
ccuucccccuccaauccca

SEQ ID NO: 1858963 - RNA, 18 nt, Human
ccuuccuaauuccacagc

SEQ ID NO: 1858964 - RNA, 20 nt, Human
ccuuccuaauuccacagcug

SEQ ID NO: 1858965 - RNA, 19 nt, Human
ccuuccuaauuccacagcu

SEQ ID NO: 1858966 - RNA, 21 nt, Human
ccuuccuaauuccacagcugc

SEQ ID NO: 1858967 - RNA, 20 nt, Human
ccuucucuccagccccugga

SEQ ID NO: 1858968 - RNA, 17 nt, Human
ccuuccucuccacugcc

SEQ ID NO: 1858969 - RNA, 16 nt, Human
ccuuccucuccacugc

SEQ ID NO: 1858970 - RNA, 15 nt, Human
ccuuccucuccacug

SEQ ID NO: 1858971 - RNA, 14 nt, Human
ccuuccucuccacu

SEQ ID NO: 1858972 - RNA, 23 nt, Human
ccuucucuccagccccuggaugc

SEQ ID NO: 1858973 - RNA, 21 nt, Human
ccuucucuccagccccuggau

SEQ ID NO: 1858974 - RNA, 20 nt, Human
ccuuccucuccacugccuuc

SEQ ID NO: 1858975 - RNA, 14 nt, Human
ccuucucugaagga

SEQ ID NO: 1858976 - RNA, 16 nt, Human
ccuucucugaaggaca

SEQ ID NO: 1858977 - RNA, 22 nt, Human
ccuucuguccuacucuguguca

SEQ ID NO: 1858978 - RNA, 17 nt, Human
ccuucucuucacaguca

SEQ ID NO: 1858979 - RNA, 20 nt, Human
ccuucuguccuacucugugu

SEQ ID NO: 1858980 - RNA, 21 nt, Human
ccuucuguccuacucuguguc

SEQ ID NO: 1858981 - RNA, 21 nt, Human
ccuguucacucuacuuagcau

SEQ ID NO: 1858982 - RNA, 13 nt, Human
ccuguucagcucc

SEQ ID NO: 1858983 - RNA, 16 nt, Human
ccuuagcaaauucugu

SEQ ID NO: 1858984 - RNA, 19 nt, Human
ccuuagcagggaaacagcu

SEQ ID NO: 1858985 - RNA, 20 nt, Human
ccuuagcagggaaacagcua

SEQ ID NO: 1858986 - RNA, 20 nt, Human
ccuguugggccaggagccuc

SEQ ID NO: 1858987 - RNA, 19 nt, Human
ccuguugggccaggagccu

SEQ ID NO: 1858988 - RNA, 18 nt, Human
ccuguugggccaggagcc

SEQ ID NO: 1858989 - RNA, 17 nt, Human
ccuguugggccaggagc

SEQ ID NO: 1858990 - RNA, 16 nt, Human
ccuguugggccaggag

SEQ ID NO: 1858991 - RNA, 18 nt, Human
ccuguucccaugagauga

SEQ ID NO: 1858992 - RNA, 12 nt, Human
ccuguucccauu

SEQ ID NO: 1858993 - RNA, 17 nt, Human
ccuguucuggcagaguu

SEQ ID NO: 1858994 - RNA, 12 nt, Human
ccuguucuggca

SEQ ID NO: 1858995 - RNA, 16 nt, Human
ccuguucugcuuuccu

SEQ ID NO: 1858996 - RNA, 23 nt, Human
ccuguucagcuccagcucaccag

SEQ ID NO: 1858997 - RNA, 20 nt, Human
ccuguucagcuccagcucac

SEQ ID NO: 1858998 - RNA, 21 nt, Human
ccuguucagcuccagcucacc

SEQ ID NO: 1858999 - RNA, 14 nt, Human
ccuguucagcucca

SEQ ID NO: 1859000 - RNA, 15 nt, Human
ccuguucagcuccag

SEQ ID NO: 1859001 - RNA, 16 nt, Human
ccuguucagcuccagc

SEQ ID NO: 1859002 - RNA, 19 nt, Human
ccuguucagcuccagcuca

SEQ ID NO: 1859003 - RNA, 19 nt, Human
ccuucccaccucucucacu

SEQ ID NO: 1859004 - RNA, 14 nt, Human
ccuucccaccucuc

SEQ ID NO: 1859005 - RNA, 12 nt, Human
ccuucccaccuc

SEQ ID NO: 1859006 - RNA, 15 nt, Human
ccuucccaugcccug

SEQ ID NO: 1859007 - RNA, 18 nt, Human
ccuuauggaacacucuga

SEQ ID NO: 1859008 - RNA, 17 nt, Human
ccuuauggaacacucug

SEQ ID NO: 1859009 - RNA, 16 nt, Human
ccuuauggaacacucu

SEQ ID NO: 1859010 - RNA, 14 nt, Human
ccuuauggaacacu

SEQ ID NO: 1859011 - RNA, 20 nt, Human
ccuuauggaacacucugaga

SEQ ID NO: 1859012 - RNA, 19 nt, Human
ccuuauggaacacucugag

SEQ ID NO: 1859013 - RNA, 22 nt, Human
ccuuauggaacacucugagacu

SEQ ID NO: 1859014 - RNA, 18 nt, Human
ccuuaucaaaggacacca

SEQ ID NO: 1859015 - RNA, 14 nt, Human
ccuuaucaaaggac

SEQ ID NO: 1859016 - RNA, 12 nt, Human
ccuuauggaaca

SEQ ID NO: 1859017 - RNA, 13 nt, Human
ccuuaucaaagga

SEQ ID NO: 1859018 - RNA, 20 nt, Human
ccuuaggugauccacucgcc

SEQ ID NO: 1859019 - RNA, 20 nt, Human
ccugccuccuuugugaggaa

SEQ ID NO: 1859020 - RNA, 19 nt, Human
ccugccuccuuugugagga

SEQ ID NO: 1859021 - RNA, 15 nt, Human
ccugccuccuuugug

SEQ ID NO: 1859022 - RNA, 13 nt, Human
ccugccuccuuug

SEQ ID NO: 1859023 - RNA, 22 nt, Human
ccugccuccuuugugaggaagc

SEQ ID NO: 1859024 - RNA, 21 nt, Human
ccugccuccuuugugaggaag

SEQ ID NO: 1859025 - RNA, 23 nt, Human
ccugccuccuuugugaggaagcc

SEQ ID NO: 1859026 - RNA, 17 nt, Human
ccugccucucugcaggu

SEQ ID NO: 1859027 - RNA, 15 nt, Human
ccugccucuucucua

SEQ ID NO: 1859028 - RNA, 21 nt, Human
ccugccucucugcaggucccu

SEQ ID NO: 1859029 - RNA, 20 nt, Human
ccugccucucugcagguccc

SEQ ID NO: 1859030 - RNA, 16 nt, Human
ccugcugcaguugcca

SEQ ID NO: 1859031 - RNA, 12 nt, Human
ccugcugcaguu

SEQ ID NO: 1859032 - RNA, 11 nt, Human
ccugcugcagu

SEQ ID NO: 1859033 - RNA, 22 nt, Human
ccugcugcaguugccagucacc

SEQ ID NO: 1859034 - RNA, 19 nt, Human
ccucuuuggucuacacugu

SEQ ID NO: 1859035 - RNA, 16 nt, Human
ccucuuugagugaagc

SEQ ID NO: 1859036 - RNA, 19 nt, Human
ccucugccugucuccccca

SEQ ID NO: 1859037 - RNA, 15 nt, Human
ccucugccugucucc

SEQ ID NO: 1859038 - RNA, 21 nt, Human
ccucugccugaagucacacag

SEQ ID NO: 1859039 - RNA, 21 nt, Human
ccugcaggcagccaggccaca

SEQ ID NO: 1859040 - RNA, 20 nt, Human
ccugcaggcagccaggccac

SEQ ID NO: 1859041 - RNA, 19 nt, Human
ccugcaggcagccaggcca

SEQ ID NO: 1859042 - RNA, 18 nt, Human
ccugcaggcagccaggcc

SEQ ID NO: 1859043 - RNA, 23 nt, Human
ccugcaggcagccaggccacaag

SEQ ID NO: 1859044 - RNA, 14 nt, Human
ccugcagagggcac

SEQ ID NO: 1859045 - RNA, 17 nt, Human
ccugcaggcagccaggc

SEQ ID NO: 1859046 - RNA, 16 nt, Human
ccugcaggcagccagg

SEQ ID NO: 1859047 - RNA, 12 nt, Human
ccugcagagggc

SEQ ID NO: 1859048 - RNA, 15 nt, Human
ccugcaggcagccag

SEQ ID NO: 1859049 - RNA, 16 nt, Human
ccugaggggccucuua

SEQ ID NO: 1859050 - RNA, 12 nt, Human
ccugaggggccu

SEQ ID NO: 1859051 - RNA, 21 nt, Human
ccugaggcugggcucccuucc

SEQ ID NO: 1859052 - RNA, 19 nt, Human
ccugaggcugggcucccuu

SEQ ID NO: 1859053 - RNA, 17 nt, Human
ccugaggcugggcuccc

SEQ ID NO: 1859054 - RNA, 23 nt, Human
ccucccaacucaccccagcccca

SEQ ID NO: 1859055 - RNA, 21 nt, Human
ccucccaacucaccccagccc

SEQ ID NO: 1859056 - RNA, 20 nt, Human
ccucccaacucaccccagcc

SEQ ID NO: 1859057 - RNA, 17 nt, Human
ccucccaacucacccca

SEQ ID NO: 1859058 - RNA, 11 nt, Human
ccucaggcagg

SEQ ID NO: 1859059 - RNA, 18 nt, Human
ccucagccuccugaguag

SEQ ID NO: 1859060 - RNA, 15 nt, Human
ccucagccuccugag

SEQ ID NO: 1859061 - RNA, 20 nt, Human
ccuccuuugugaggaagccg

SEQ ID NO: 1859062 - RNA, 19 nt, Human
ccuccuuugugaggaagcc

SEQ ID NO: 1859063 - RNA, 18 nt, Human
ccuccuuugugaggaagc

SEQ ID NO: 1859064 - RNA, 16 nt, Human
ccucgagguuucucaa

SEQ ID NO: 1859065 - RNA, 16 nt, Human
ccucgaacuggcugca

SEQ ID NO: 1859066 - RNA, 15 nt, Human
ccucgaacuggcugc

SEQ ID NO: 1859067 - RNA, 16 nt, Human
ccuccgccucccgggu

SEQ ID NO: 1859068 - RNA, 13 nt, Human
ccuccgccucccg

SEQ ID NO: 1859069 - RNA, 12 nt, Human
ccucucucacuc

SEQ ID NO: 1859070 - RNA, 19 nt, Human
ccucucugcaggucccuaa

SEQ ID NO: 1859071 - RNA, 18 nt, Human
ccucucugcaggucccua

SEQ ID NO: 1859072 - RNA, 17 nt, Human
ccucucugcaggucccu

SEQ ID NO: 1859073 - RNA, 16 nt, Human
ccucucugcagguccc

SEQ ID NO: 1859074 - RNA, 14 nt, Human
ccucugcccugcgg

SEQ ID NO: 1859075 - RNA, 13 nt, Human
ccucugcccugcg

SEQ ID NO: 1859076 - RNA, 12 nt, Human
ccucugcccugc

SEQ ID NO: 1859077 - RNA, 11 nt, Human
ccucugcccug

SEQ ID NO: 1859078 - RNA, 20 nt, Human
ccucugccucugacacacag

SEQ ID NO: 1859079 - RNA, 21 nt, Human
ccucugccucugacacacagc

SEQ ID NO: 1859080 - RNA, 23 nt, Human
ccucugccucugacacacagcuc

SEQ ID NO: 1859081 - RNA, 11 nt, Human
ccucugccuga

SEQ ID NO: 1859082 - RNA, 20 nt, Human
ccucugccugaagucacaca

SEQ ID NO: 1859083 - RNA, 22 nt, Human
cccugacaacacucauugaccu

SEQ ID NO: 1859084 - RNA, 16 nt, Human
cccugacaacacucau

SEQ ID NO: 1859085 - RNA, 22 nt, Human
cccugaaggccccgcccaggcu

SEQ ID NO: 1859086 - RNA, 20 nt, Human
cccugaaggccccgcccagg

SEQ ID NO: 1859087 - RNA, 14 nt, Human
cccugacaacacuc

SEQ ID NO: 1859088 - RNA, 19 nt, Human
cccugaaggccccgcccag

SEQ ID NO: 1859089 - RNA, 16 nt, Human
cccugaaggccccgcc

SEQ ID NO: 1859090 - RNA, 14 nt, Human
cccugaaggccccg

SEQ ID NO: 1859091 - RNA, 13 nt, Human
cccugaaggcccc

SEQ ID NO: 1859092 - RNA, 12 nt, Human
cccugaaggccc

SEQ ID NO: 1859093 - RNA, 14 nt, Human
cccuccucucugcc

SEQ ID NO: 1859094 - RNA, 23 nt, Human
cccucgaggcggaucuuuggaca

SEQ ID NO: 1859095 - RNA, 22 nt, Human
cccucgaggcggaucuuuggac

SEQ ID NO: 1859096 - RNA, 18 nt, Human
cccuccuccuggacuccu

SEQ ID NO: 1859097 - RNA, 16 nt, Human
cccuccuccuggacuc

SEQ ID NO: 1859098 - RNA, 11 nt, Human
cccuccuccug

SEQ ID NO: 1859099 - RNA, 18 nt, Human
cccugaaagcccugagcu

SEQ ID NO: 1859100 - RNA, 19 nt, Human
cccuggauccaucaggcca

SEQ ID NO: 1859101 - RNA, 21 nt, Human
cccuggaugcagccucacagu

SEQ ID NO: 1859102 - RNA, 17 nt, Human
cccuggaugcagccuca

SEQ ID NO: 1859103 - RNA, 13 nt, Human
cccuggaugcagc

SEQ ID NO: 1859104 - RNA, 23 nt, Human
cccugcccugguuuccugcccug

SEQ ID NO: 1859105 - RNA, 22 nt, Human
cccugcccugguuuccugcccu

SEQ ID NO: 1859106 - RNA, 12 nt, Human
cccugcccuggu

SEQ ID NO: 1859107 - RNA, 11 nt, Human
cccugcccugg

SEQ ID NO: 1859108 - RNA, 20 nt, Human
cccuggcucccacaggcccu

SEQ ID NO: 1859109 - RNA, 14 nt, Human
cccugccccccagc

SEQ ID NO: 1859110 - RNA, 15 nt, Human
cccugccccccagcc

SEQ ID NO: 1859111 - RNA, 20 nt, Human
cccugccccccagcccuccu

SEQ ID NO: 1859112 - RNA, 22 nt, Human
cccugcccaccuggccucugca

SEQ ID NO: 1859113 - RNA, 17 nt, Human
cccugccccucccuuca

SEQ ID NO: 1859114 - RNA, 23 nt, Human
cccugccccucccuucaaccauu

SEQ ID NO: 1859115 - RNA, 19 nt, Human
cccugccccucccuucaac

SEQ ID NO: 1859116 - RNA, 18 nt, Human
cccugccccucccuucaa

SEQ ID NO: 1859117 - RNA, 14 nt, Human
cccugcccggcugc

SEQ ID NO: 1859118 - RNA, 17 nt, Human
cccugcccggcugcgga

SEQ ID NO: 1859119 - RNA, 16 nt, Human
cccugagcuuucugcu

SEQ ID NO: 1859120 - RNA, 20 nt, Human
cccugcccaccuggccucug

SEQ ID NO: 1859121 - RNA, 23 nt, Human
ccgaaggugaggagcuugaaacc

SEQ ID NO: 1859122 - RNA, 16 nt, Human
ccgaauagcugggacu

SEQ ID NO: 1859123 - RNA, 17 nt, Human
ccgaauagcugggacua

SEQ ID NO: 1859124 - RNA, 15 nt, Human
ccgaccaccugccca

SEQ ID NO: 1859125 - RNA, 18 nt, Human
ccgaccagacaccuugac

SEQ ID NO: 1859126 - RNA, 13 nt, Human
ccgaccagacacc

SEQ ID NO: 1859127 - RNA, 17 nt, Human
ccgaccagacaccuuga

SEQ ID NO: 1859128 - RNA, 17 nt, Human
ccgaaaacguggcugcu

SEQ ID NO: 1859129 - RNA, 16 nt, Human
ccgaaaacguggcugc

SEQ ID NO: 1859130 - RNA, 19 nt, Human
ccgaaagggacuuggaagc

SEQ ID NO: 1859131 - RNA, 15 nt, Human
cccuuccucuuucca

SEQ ID NO: 1859132 - RNA, 17 nt, Human
ccgcagacaggaccagg

SEQ ID NO: 1859133 - RNA, 16 nt, Human
ccgcagacaggaccag

SEQ ID NO: 1859134 - RNA, 12 nt, Human
ccgcccaggcuu

SEQ ID NO: 1859135 - RNA, 22 nt, Human
cccugugauggggcccugccuc

SEQ ID NO: 1859136 - RNA, 21 nt, Human
cccugugauggggcccugccu

SEQ ID NO: 1859137 - RNA, 21 nt, Human
cccuuccucuccacugccuuc

SEQ ID NO: 1859138 - RNA, 23 nt, Human
cccugugauggggcccugccucc

SEQ ID NO: 1859139 - RNA, 13 nt, Human
cccugucuaauga

SEQ ID NO: 1859140 - RNA, 18 nt, Human
ccggcaggguccuagaaa

SEQ ID NO: 1859141 - RNA, 16 nt, Human
ccggccaccugcggug

SEQ ID NO: 1859142 - RNA, 15 nt, Human
ccggccccugcuggu

SEQ ID NO: 1859143 - RNA, 20 nt, Human
ccuaacgaaguauccuucag

SEQ ID NO: 1859144 - RNA, 16 nt, Human
ccgugaggccagagac

SEQ ID NO: 1859145 - RNA, 14 nt, Human
ccgugaggccagag

SEQ ID NO: 1859146 - RNA, 13 nt, Human
ccgugaggccaga

SEQ ID NO: 1859147 - RNA, 12 nt, Human
ccgugaggccag

SEQ ID NO: 1859148 - RNA, 17 nt, Human
ccgucuaccugaggggc

SEQ ID NO: 1859149 - RNA, 15 nt, Human
ccgucuaccugaggg

SEQ ID NO: 1859150 - RNA, 14 nt, Human
ccgucuaccugagg

SEQ ID NO: 1859151 - RNA, 15 nt, Human
ccggcuccaggcucc

SEQ ID NO: 1859152 - RNA, 12 nt, Human
ccggcuccaggc

SEQ ID NO: 1859153 - RNA, 13 nt, Human
ccggcuccaggcu

SEQ ID NO: 1859154 - RNA, 14 nt, Human
ccggcuccaggcuc

SEQ ID NO: 1859155 - RNA, 19 nt, Human
ccuagcauacguacacauu

SEQ ID NO: 1859156 - RNA, 20 nt, Human
ccuaaugcgcaggcuggccc

SEQ ID NO: 1859157 - RNA, 17 nt, Human
ccuagcacuuugggagg

SEQ ID NO: 1859158 - RNA, 21 nt, Human
ccuagcauacguacacauuuu

SEQ ID NO: 1859159 - RNA, 20 nt, Human
ccuagccugugccucuggga

SEQ ID NO: 1859160 - RNA, 14 nt, Human
ccuaaucuucugaa

SEQ ID NO: 1859161 - RNA, 12 nt, Human
ccagcagccugg

SEQ ID NO: 1859162 - RNA, 11 nt, Human
ccagcagccug

SEQ ID NO: 1859163 - RNA, 16 nt, Human
ccagcagaaaugccuu

SEQ ID NO: 1859164 - RNA, 17 nt, Human
ccagcagaaaugccuua

SEQ ID NO: 1859165 - RNA, 22 nt, Human
ccagcagaaaugccuuacccuc

SEQ ID NO: 1859166 - RNA, 15 nt, Human
ccagccccuggaugc

SEQ ID NO: 1859167 - RNA, 14 nt, Human
ccagccccuggaug

SEQ ID NO: 1859168 - RNA, 13 nt, Human
ccagccccuggau

SEQ ID NO: 1859169 - RNA, 23 nt, Human
ccagccccauccucuguacagag

SEQ ID NO: 1859170 - RNA, 13 nt, Human
ccagcagccugga

SEQ ID NO: 1859171 - RNA, 17 nt, Human
ccagccccuucugaccc

SEQ ID NO: 1859172 - RNA, 16 nt, Human
ccagccccuucugacc

SEQ ID NO: 1859173 - RNA, 15 nt, Human
ccagccccuucugac

SEQ ID NO: 1859174 - RNA, 18 nt, Human
ccagccccuggaugcagc

SEQ ID NO: 1859175 - RNA, 18 nt, Human
ccagccccuucugaccca

SEQ ID NO: 1859176 - RNA, 21 nt, Human
ccagcgagcccugguggcagu

SEQ ID NO: 1859177 - RNA, 19 nt, Human
ccaggaaaggcuccaggag

SEQ ID NO: 1859178 - RNA, 18 nt, Human
ccaggaaaggcuccagga

SEQ ID NO: 1859179 - RNA, 17 nt, Human
ccaggaaaggcuccagg

SEQ ID NO: 1859180 - RNA, 20 nt, Human
ccaggaaaggcuccaggagc

SEQ ID NO: 1859181 - RNA, 20 nt, Human
ccagcuugaaaccuucacuu

SEQ ID NO: 1859182 - RNA, 16 nt, Human
ccagucaccccggcca

SEQ ID NO: 1859183 - RNA, 22 nt, Human
ccaguaucuugaagacuuuucu

SEQ ID NO: 1859184 - RNA, 19 nt, Human
ccaguaucuugaagacuuu

SEQ ID NO: 1859185 - RNA, 13 nt, Human
ccaguaucuugaa

SEQ ID NO: 1859186 - RNA, 22 nt, Human
ccaggggugggacacccuguga

SEQ ID NO: 1859187 - RNA, 21 nt, Human
ccaggggugggacacccugug

SEQ ID NO: 1859188 - RNA, 20 nt, Human
ccaggggugggacacccugu

SEQ ID NO: 1859189 - RNA, 13 nt, Human
ccaggcugagccu

SEQ ID NO: 1859190 - RNA, 16 nt, Human
ccaggcugagccucag

SEQ ID NO: 1859191 - RNA, 14 nt, Human
ccaggcugagccuc

SEQ ID NO: 1859192 - RNA, 22 nt, Human
ccaggcugagccucagucuccc

SEQ ID NO: 1859193 - RNA, 19 nt, Human
ccaggcugagccucagucu

SEQ ID NO: 1859194 - RNA, 17 nt, Human
ccaggcugagccucagu

SEQ ID NO: 1859195 - RNA, 18 nt, Human
ccagucaccccggccacc

SEQ ID NO: 1859196 - RNA, 17 nt, Human
ccagucaccccggccac

SEQ ID NO: 1859197 - RNA, 19 nt, Human
ccagucaccccggccaccu

SEQ ID NO: 1859198 - RNA, 18 nt, Human
ccagagacacaagccuuc

SEQ ID NO: 1859199 - RNA, 16 nt, Human
ccagagacacaagccu

SEQ ID NO: 1859200 - RNA, 13 nt, Human
ccagagagggugg

SEQ ID NO: 1859201 - RNA, 13 nt, Human
ccagaugcaccag

SEQ ID NO: 1859202 - RNA, 14 nt, Human
ccagaugcaccagc

SEQ ID NO: 1859203 - RNA, 13 nt, Human
ccacuuucuagcc

SEQ ID NO: 1859204 - RNA, 19 nt, Human
ccacuuucuagccagagga

SEQ ID NO: 1859205 - RNA, 18 nt, Human
ccacuuucuagccagagg

SEQ ID NO: 1859206 - RNA, 20 nt, Human
ccacuuucuagccagaggag

SEQ ID NO: 1859207 - RNA, 20 nt, Human
ccacuuggucugugagaugc

SEQ ID NO: 1859208 - RNA, 22 nt, Human
ccacuuggucugugagaugcua

SEQ ID NO: 1859209 - RNA, 15 nt, Human
ccacuuggucuguga

SEQ ID NO: 1859210 - RNA, 16 nt, Human
ccacuuggucugugag

SEQ ID NO: 1859211 - RNA, 17 nt, Human
ccacuuggucugugaga

SEQ ID NO: 1859212 - RNA, 19 nt, Human
ccacuuggucugugagaug

SEQ ID NO: 1859213 - RNA, 14 nt, Human
ccacuuuuguucuu

SEQ ID NO: 1859214 - RNA, 15 nt, Human
ccacuuuuguucuug

SEQ ID NO: 1859215 - RNA, 21 nt, Human
ccacuuuuguucuugguuugu

SEQ ID NO: 1859216 - RNA, 22 nt, Human
ccacuuuuguucuugguuugua

SEQ ID NO: 1859217 - RNA, 17 nt, Human
ccagacccggcugcgug

SEQ ID NO: 1859218 - RNA, 12 nt, Human
ccacuuggucug

SEQ ID NO: 1859219 - RNA, 18 nt, Human
ccacugcacuccagccug

SEQ ID NO: 1859220 - RNA, 19 nt, Human
ccacugcacuauagccuag

SEQ ID NO: 1859221 - RNA, 20 nt, Human
ccacugcacuauagccuagg

SEQ ID NO: 1859222 - RNA, 13 nt, Human
ccacugcaccggg

SEQ ID NO: 1859223 - RNA, 14 nt, Human
ccacugcaccgggc

SEQ ID NO: 1859224 - RNA, 17 nt, Human
ccacugcaccgggccac

SEQ ID NO: 1859225 - RNA, 19 nt, Human
ccacugcaccgggccacag

SEQ ID NO: 1859226 - RNA, 19 nt, Human
cccauccucuguacagagc

SEQ ID NO: 1859227 - RNA, 15 nt, Human
cccauccucuguaca

SEQ ID NO: 1859228 - RNA, 20 nt, Human
cccauccucuguacagagcc

SEQ ID NO: 1859229 - RNA, 23 nt, Human
cccagcuggggccaggcuggguc

SEQ ID NO: 1859230 - RNA, 22 nt, Human
cccagcuggggccaggcugggu

SEQ ID NO: 1859231 - RNA, 18 nt, Human
cccaggcuggcgugcagu

SEQ ID NO: 1859232 - RNA, 19 nt, Human
cccaggcuggcgugcagug

SEQ ID NO: 1859233 - RNA, 20 nt, Human
cccaggcuggcgugcagugg

SEQ ID NO: 1859234 - RNA, 14 nt, Human
cccauccucuguac

SEQ ID NO: 1859235 - RNA, 20 nt, Human
cccagcuggggccaggcugg

SEQ ID NO: 1859236 - RNA, 23 nt, Human
cccagccccaaaacucuccucug

SEQ ID NO: 1859237 - RNA, 21 nt, Human
cccagccccaaaacucuccuc

SEQ ID NO: 1859238 - RNA, 19 nt, Human
cccagcccacuucugccau

SEQ ID NO: 1859239 - RNA, 15 nt, Human
ccccauuguggucac

SEQ ID NO: 1859240 - RNA, 14 nt, Human
cccccuuccaugga

SEQ ID NO: 1859241 - RNA, 12 nt, Human
ccccgcccaggc

SEQ ID NO: 1859242 - RNA, 14 nt, Human
ccccgcccaggcuu

SEQ ID NO: 1859243 - RNA, 13 nt, Human
ccccggccaccug

SEQ ID NO: 1859244 - RNA, 18 nt, Human
ccccggccaccugcggug

SEQ ID NO: 1859245 - RNA, 14 nt, Human
ccccggccaccugc

SEQ ID NO: 1859246 - RNA, 12 nt, Human
ccccagccccaa

SEQ ID NO: 1859247 - RNA, 10 nt, Human
ccccagcccc

SEQ ID NO: 1859248 - RNA, 14 nt, Human
ccccagccccaaaa

SEQ ID NO: 1859249 - RNA, 14 nt, Human
ccccagccccaucc

SEQ ID NO: 1859250 - RNA, 21 nt, Human
ccccauucugccugcccaggc

SEQ ID NO: 1859251 - RNA, 18 nt, Human
ccccaaaacucuccucug

SEQ ID NO: 1859252 - RNA, 20 nt, Human
ccccaaaacucuccucugcu

SEQ ID NO: 1859253 - RNA, 21 nt, Human
ccccaaaacucuccucugcug

SEQ ID NO: 1859254 - RNA, 15 nt, Human
ccaugucucgacuca

SEQ ID NO: 1859255 - RNA, 14 nt, Human
ccaugucucgacuc

SEQ ID NO: 1859256 - RNA, 20 nt, Human
ccaugucucugagcauuaga

SEQ ID NO: 1859257 - RNA, 18 nt, Human
ccaugaggaacaaggcaa

SEQ ID NO: 1859258 - RNA, 17 nt, Human
ccaugaggaacaaggca

SEQ ID NO: 1859259 - RNA, 16 nt, Human
ccaugaggaacaaggc

SEQ ID NO: 1859260 - RNA, 13 nt, Human
ccaugagccucag

SEQ ID NO: 1859261 - RNA, 18 nt, Human
cccaccgcagacaggacc

SEQ ID NO: 1859262 - RNA, 15 nt, Human
cccaccgcagacagg

SEQ ID NO: 1859263 - RNA, 23 nt, Human
cccacuguacuugcucuugaugc

SEQ ID NO: 1859264 - RNA, 19 nt, Human
cccacuguacuugcucuug

SEQ ID NO: 1859265 - RNA, 18 nt, Human
cccacuguacuugcucuu

SEQ ID NO: 1859266 - RNA, 15 nt, Human
cccacccaagggccu

SEQ ID NO: 1859267 - RNA, 18 nt, Human
cccacccaagggccuggc

SEQ ID NO: 1859268 - RNA, 23 nt, Human
cccaagccuacuuuugccauuga

SEQ ID NO: 1859269 - RNA, 16 nt, Human
cccaagccuggcaagg

SEQ ID NO: 1859270 - RNA, 21 nt, Human
cccaagaauagaugcugacug

SEQ ID NO: 1859271 - RNA, 20 nt, Human
cccaagaauagaugcugacu

SEQ ID NO: 1859272 - RNA, 17 nt, Human
cccaagcucugcuccuc

SEQ ID NO: 1859273 - RNA, 21 nt, Human
cccaaccugcucuccucuugc

SEQ ID NO: 1859274 - RNA, 14 nt, Human
cccaaccugcucuc

SEQ ID NO: 1859275 - RNA, 13 nt, Human
cccaaccugcucu

SEQ ID NO: 1859276 - RNA, 23 nt, Human
cccaaccugcucuccucuugcca

SEQ ID NO: 1859277 - RNA, 22 nt, Human
ccauuguggucacaggaaguag

SEQ ID NO: 1859278 - RNA, 23 nt, Human
cacaucuugcucugcugacagac

SEQ ID NO: 1859279 - RNA, 17 nt, Human
cacauuuauucugcuca

SEQ ID NO: 1859280 - RNA, 18 nt, Human
cacauuuauucugcucac

SEQ ID NO: 1859281 - RNA, 17 nt, Human
caccagccccagugccc

SEQ ID NO: 1859282 - RNA, 19 nt, Human
caccagcccuuagcaggga

SEQ ID NO: 1859283 - RNA, 18 nt, Human
caccagccccagugccca

SEQ ID NO: 1859284 - RNA, 21 nt, Human
caccagccccagugcccacag

SEQ ID NO: 1859285 - RNA, 22 nt, Human
caccagccccagugcccacagg

SEQ ID NO: 1859286 - RNA, 12 nt, Human
cacccagcccac

SEQ ID NO: 1859287 - RNA, 13 nt, Human
cacaucuugcucu

SEQ ID NO: 1859288 - RNA, 14 nt, Human
cacaucuugcucug

SEQ ID NO: 1859289 - RNA, 15 nt, Human
cacaucuugcucugc

SEQ ID NO: 1859290 - RNA, 20 nt, Human
cacaucuugcucugcugaca

SEQ ID NO: 1859291 - RNA, 21 nt, Human
cacaucuugcucugcugacag

SEQ ID NO: 1859292 - RNA, 22 nt, Human
cacaucuugcucugcugacaga

SEQ ID NO: 1859293 - RNA, 16 nt, Human
cacuccagugagacag

SEQ ID NO: 1859294 - RNA, 21 nt, Human
cacuccagugagacagcucug

SEQ ID NO: 1859295 - RNA, 17 nt, Human
cacuccagaccccuggc

SEQ ID NO: 1859296 - RNA, 21 nt, Human
cacgcuggagugcagugagcc

SEQ ID NO: 1859297 - RNA, 16 nt, Human
cacgcuggagugcagu

SEQ ID NO: 1859298 - RNA, 17 nt, Human
cacgcuggagugcagug

SEQ ID NO: 1859299 - RNA, 18 nt, Human
cacgcuggagugcaguga

SEQ ID NO: 1859300 - RNA, 20 nt, Human
cacgcuggagugcagugagc

SEQ ID NO: 1859301 - RNA, 15 nt, Human
cacgcuggagugcag

SEQ ID NO: 1859302 - RNA, 16 nt, Human
cacuccagaccccugg

SEQ ID NO: 1859303 - RNA, 14 nt, Human
cacuccagaccccu

SEQ ID NO: 1859304 - RNA, 15 nt, Human
cacuacauucuguua

SEQ ID NO: 1859305 - RNA, 16 nt, Human
cacuagacccacugga

SEQ ID NO: 1859306 - RNA, 22 nt, Human
cacggaagagccuugcggaagg

SEQ ID NO: 1859307 - RNA, 16 nt, Human
cacggaagagccuugc

SEQ ID NO: 1859308 - RNA, 13 nt, Human
cacuacauucugu

SEQ ID NO: 1859309 - RNA, 14 nt, Human
cacuacauucuguu

SEQ ID NO: 1859310 - RNA, 20 nt, Human
caccugcggugcuaucuccc

SEQ ID NO: 1859311 - RNA, 19 nt, Human
caccugcggugcuaucucc

SEQ ID NO: 1859312 - RNA, 17 nt, Human
caccugcggugcuaucu

SEQ ID NO: 1859313 - RNA, 16 nt, Human
caccugcggugcuauc

SEQ ID NO: 1859314 - RNA, 12 nt, Human
caccugccaggg

SEQ ID NO: 1859315 - RNA, 11 nt, Human
caccugccagg

SEQ ID NO: 1859316 - RNA, 21 nt, Human
caccugccccucaacucuccu

SEQ ID NO: 1859317 - RNA, 18 nt, Human
caccugccccucaacucu

SEQ ID NO: 1859318 - RNA, 13 nt, Human
caccugccaggga

SEQ ID NO: 1859319 - RNA, 12 nt, Human
cacccuccuuuc

SEQ ID NO: 1859320 - RNA, 12 nt, Human
cacccugcucuc

SEQ ID NO: 1859321 - RNA, 17 nt, Human
caaguauuauaccuuuu

SEQ ID NO: 1859322 - RNA, 22 nt, Human
caaguauuauaccuuuuuuaga

SEQ ID NO: 1859323 - RNA, 14 nt, Human
caaggcaaggcugu

SEQ ID NO: 1859324 - RNA, 20 nt, Human
caaggauugcuacuguccua

SEQ ID NO: 1859325 - RNA, 18 nt, Human
caagcuccaagcucccag

SEQ ID NO: 1859326 - RNA, 17 nt, Human
caagcuccaagcuccca

SEQ ID NO: 1859327 - RNA, 21 nt, Human
caagcuccaagcucccaggca

SEQ ID NO: 1859328 - RNA, 19 nt, Human
caagcuccaagcucccagg

SEQ ID NO: 1859329 - RNA, 17 nt, Human
caagcuccaucuccacu

SEQ ID NO: 1859330 - RNA, 21 nt, Human
caagcuccaucuccacuccag

SEQ ID NO: 1859331 - RNA, 17 nt, Human
caagcucccaggcauuc

SEQ ID NO: 1859332 - RNA, 15 nt, Human
caagcucccaggcau

SEQ ID NO: 1859333 - RNA, 14 nt, Human
caagcucccaggca

SEQ ID NO: 1859334 - RNA, 12 nt, Human
caagcucccagg

SEQ ID NO: 1859335 - RNA, 15 nt, Human
caagcucugcuccuc

SEQ ID NO: 1859336 - RNA, 16 nt, Human
caagcucugcuccucu

SEQ ID NO: 1859337 - RNA, 20 nt, Human
caauuuauuauggcacauca

SEQ ID NO: 1859338 - RNA, 17 nt, Human
caauauuguacaguuuu

SEQ ID NO: 1859339 - RNA, 18 nt, Human
caauauuguacaguuuuu

SEQ ID NO: 1859340 - RNA, 16 nt, Human
caauauuguacaguuu

SEQ ID NO: 1859341 - RNA, 20 nt, Human
caauuggauacgacaacuug

SEQ ID NO: 1859342 - RNA, 12 nt, Human
caaugcuggcug

SEQ ID NO: 1859343 - RNA, 16 nt, Human
caauggcagccuuggc

SEQ ID NO: 1859344 - RNA, 13 nt, Human
caauggcagccuu

SEQ ID NO: 1859345 - RNA, 14 nt, Human
caauggcagccuug

SEQ ID NO: 1859346 - RNA, 15 nt, Human
caauggcagccuugg

SEQ ID NO: 1859347 - RNA, 14 nt, Human
caaucaaaucugcu

SEQ ID NO: 1859348 - RNA, 17 nt, Human
caagaaggaugauucaa

SEQ ID NO: 1859349 - RNA, 18 nt, Human
caagaagcccaggaaagg

SEQ ID NO: 1859350 - RNA, 18 nt, Human
caagaauagaugcugacu

SEQ ID NO: 1859351 - RNA, 20 nt, Human
caacucccugccccccagcc

SEQ ID NO: 1859352 - RNA, 19 nt, Human
caacucccugccccccagc

SEQ ID NO: 1859353 - RNA, 15 nt, Human
caagaagcccaggaa

SEQ ID NO: 1859354 - RNA, 21 nt, Human
caacucccugccccccagccc

SEQ ID NO: 1859355 - RNA, 14 nt, Human
caacuauggccugu

SEQ ID NO: 1859356 - RNA, 14 nt, Human
caacccccagccug

SEQ ID NO: 1859357 - RNA, 13 nt, Human
caacuauggccug

SEQ ID NO: 1859358 - RNA, 17 nt, Human
caaccccuucgcuccug

SEQ ID NO: 1859359 - RNA, 14 nt, Human
caaccccuucgcuc

SEQ ID NO: 1859360 - RNA, 16 nt, Human
caaccccuucgcuccu

SEQ ID NO: 1859361 - RNA, 18 nt, Human
caagcaccuagccucgcu

SEQ ID NO: 1859362 - RNA, 14 nt, Human
caagcaccuccugc

SEQ ID NO: 1859363 - RNA, 13 nt, Human
caagcaccuccug

SEQ ID NO: 1859364 - RNA, 19 nt, Human
caagcaaaugugaaucauu

SEQ ID NO: 1859365 - RNA, 17 nt, Human
caagcaaaugugaauca

SEQ ID NO: 1859366 - RNA, 15 nt, Human
caagcaaaugugaau

SEQ ID NO: 1859367 - RNA, 13 nt, Human
caagcaagaaaca

SEQ ID NO: 1859368 - RNA, 18 nt, Human
caagcaagaaacacuggg

SEQ ID NO: 1859369 - RNA, 14 nt, Human
caagaccacguuuc

SEQ ID NO: 1859370 - RNA, 16 nt, Human
caagaccacguuucua

SEQ ID NO: 1859371 - RNA, 20 nt, Human
auuucuguuuagauaauaca

SEQ ID NO: 1859372 - RNA, 19 nt, Human
auuucuguuuagauaauac

SEQ ID NO: 1859373 - RNA, 21 nt, Human
auuucuguuuagauaauacac

SEQ ID NO: 1859374 - RNA, 14 nt, Human
auuucacucuccuu

SEQ ID NO: 1859375 - RNA, 12 nt, Human
auuucacucucc

SEQ ID NO: 1859376 - RNA, 15 nt, Human
auuuauauaaauuuu

SEQ ID NO: 1859377 - RNA, 16 nt, Human
caaaccaucauugaaa

SEQ ID NO: 1859378 - RNA, 14 nt, Human
caaaccaucauuga

SEQ ID NO: 1859379 - RNA, 17 nt, Human
caaaccaucauugaaau

SEQ ID NO: 1859380 - RNA, 22 nt, Human
auuuuguuuuugucuuaaaaag

SEQ ID NO: 1859381 - RNA, 15 nt, Human
auuuuuuucugaauu

SEQ ID NO: 1859382 - RNA, 16 nt, Human
auuuuuauuaaauuau

SEQ ID NO: 1859383 - RNA, 15 nt, Human
auuuuuuuuguuuca

SEQ ID NO: 1859384 - RNA, 21 nt, Human
caaaagguauuuuaaucacca

SEQ ID NO: 1859385 - RNA, 19 nt, Human
caaaagcaucuaugugaga

SEQ ID NO: 1859386 - RNA, 13 nt, Human
caaaagcauguga

SEQ ID NO: 1859387 - RNA, 20 nt, Human
caaaagguuaauaaaguaau

SEQ ID NO: 1859388 - RNA, 15 nt, Human
auuuugaaaaacugc

SEQ ID NO: 1859389 - RNA, 13 nt, Human
auuuugaaaaacu

SEQ ID NO: 1859390 - RNA, 19 nt, Human
auuuucuauaauuuaaaua

SEQ ID NO: 1859391 - RNA, 18 nt, Human
auuuucuauaauuuaaau

SEQ ID NO: 1859392 - RNA, 17 nt, Human
auuuucuauaauuuaaa

SEQ ID NO: 1859393 - RNA, 14 nt, Human
auuuguuauaauga

SEQ ID NO: 1859394 - RNA, 19 nt, Human
auuuguucuauagcuuuuc

SEQ ID NO: 1859395 - RNA, 21 nt, Human
auuaacaugaauauuuagugu

SEQ ID NO: 1859396 - RNA, 16 nt, Human
auuacaggcuccugcc

SEQ ID NO: 1859397 - RNA, 15 nt, Human
auuacaggcuccugc

SEQ ID NO: 1859398 - RNA, 13 nt, Human
auuacagguguga

SEQ ID NO: 1859399 - RNA, 19 nt, Human
auuacaggcuccugccacc

SEQ ID NO: 1859400 - RNA, 17 nt, Human
auuacaggcuccugcca

SEQ ID NO: 1859401 - RNA, 22 nt, Human
auuacaagcgugagccacugca

SEQ ID NO: 1859402 - RNA, 15 nt, Human
auuaauggaaauguu

SEQ ID NO: 1859403 - RNA, 15 nt, Human
auucucuuauccaac

SEQ ID NO: 1859404 - RNA, 16 nt, Human
auucucuccuguaccu

SEQ ID NO: 1859405 - RNA, 14 nt, Human
auucucuuauccaa

SEQ ID NO: 1859406 - RNA, 12 nt, Human
auucucuuaucc

SEQ ID NO: 1859407 - RNA, 23 nt, Human
auucucuaguuugauuaaauucu

SEQ ID NO: 1859408 - RNA, 20 nt, Human
auucucuaguuugauuaaau

SEQ ID NO: 1859409 - RNA, 23 nt, Human
auuaugugccagauuuaugcaua

SEQ ID NO: 1859410 - RNA, 21 nt, Human
auuaugugccagauuuaugca

SEQ ID NO: 1859411 - RNA, 13 nt, Human
auuaugugccaga

SEQ ID NO: 1859412 - RNA, 14 nt, Human
auucauauuuacuu

SEQ ID NO: 1859413 - RNA, 12 nt, Human
caggccaggccc

SEQ ID NO: 1859414 - RNA, 11 nt, Human
caggccaggcc

SEQ ID NO: 1859415 - RNA, 23 nt, Human
caggaccucaggugagaagcaga

SEQ ID NO: 1859416 - RNA, 16 nt, Human
caggaccucaggugag

SEQ ID NO: 1859417 - RNA, 14 nt, Human
caggcaaugcuggc

SEQ ID NO: 1859418 - RNA, 15 nt, Human
caggcaaugcuggcu

SEQ ID NO: 1859419 - RNA, 16 nt, Human
caggcaaugcuggcug

SEQ ID NO: 1859420 - RNA, 17 nt, Human
caggcaaugcuggcugu

SEQ ID NO: 1859421 - RNA, 19 nt, Human
caggaggaucacuugaguc

SEQ ID NO: 1859422 - RNA, 19 nt, Human
caggaggccagccuugacc

SEQ ID NO: 1859423 - RNA, 18 nt, Human
caggaggccagccuugac

SEQ ID NO: 1859424 - RNA, 22 nt, Human
caggaggccagccuugaccauu

SEQ ID NO: 1859425 - RNA, 21 nt, Human
caggcugggagagccuuccag

SEQ ID NO: 1859426 - RNA, 21 nt, Human
caggcgugagccaccgugccu

SEQ ID NO: 1859427 - RNA, 14 nt, Human
caggccuccuacag

SEQ ID NO: 1859428 - RNA, 12 nt, Human
caggccuccuac

SEQ ID NO: 1859429 - RNA, 16 nt, Human
caggggaaaagaggag

SEQ ID NO: 1859430 - RNA, 14 nt, Human
caggggaaaagagg

SEQ ID NO: 1859431 - RNA, 17 nt, Human
caggggaaaaucagccu

SEQ ID NO: 1859432 - RNA, 23 nt, Human
caggcugggagagccuuccaggg

SEQ ID NO: 1859433 - RNA, 22 nt, Human
caggcugggagagccuuccagg

SEQ ID NO: 1859434 - RNA, 20 nt, Human
cagcgcuggccgggaccccg

SEQ ID NO: 1859435 - RNA, 21 nt, Human
cagcggaaagcccugugcucc

SEQ ID NO: 1859436 - RNA, 15 nt, Human
cagcuaacauggaag

SEQ ID NO: 1859437 - RNA, 16 nt, Human
cagccugcuccagcug

SEQ ID NO: 1859438 - RNA, 19 nt, Human
cagccugcuccagcuguuc

SEQ ID NO: 1859439 - RNA, 17 nt, Human
cagccugcuccagcugu

SEQ ID NO: 1859440 - RNA, 21 nt, Human
cagcugacuuuucuguccgag

SEQ ID NO: 1859441 - RNA, 17 nt, Human
caggaaaggcuccagga

SEQ ID NO: 1859442 - RNA, 16 nt, Human
caggaaaggcuccagg

SEQ ID NO: 1859443 - RNA, 20 nt, Human
caggaaaggcuccaggagca

SEQ ID NO: 1859444 - RNA, 19 nt, Human
caggaaaggcuccaggagc

SEQ ID NO: 1859445 - RNA, 14 nt, Human
cagacagcugccug

SEQ ID NO: 1859446 - RNA, 13 nt, Human
cagacagcugccu

SEQ ID NO: 1859447 - RNA, 14 nt, Human
cagacagcccucca

SEQ ID NO: 1859448 - RNA, 18 nt, Human
cagacagcugccugggau

SEQ ID NO: 1859449 - RNA, 17 nt, Human
cagacagcugccuggga

SEQ ID NO: 1859450 - RNA, 16 nt, Human
cagacagcugccuggg

SEQ ID NO: 1859451 - RNA, 15 nt, Human
cagacagcugccugg

SEQ ID NO: 1859452 - RNA, 16 nt, Human
cagacaggaccaggga

SEQ ID NO: 1859453 - RNA, 15 nt, Human
cagacaggaccaggg

SEQ ID NO: 1859454 - RNA, 13 nt, Human
cagacaggaccag

SEQ ID NO: 1859455 - RNA, 24 nt, Human
cagacaggaccagggauuuccaug

SEQ ID NO: 1859456 - RNA, 17 nt, Human
cagacaggaccagggau

SEQ ID NO: 1859457 - RNA, 11 nt, Human
cagacaggcaa

SEQ ID NO: 1859458 - RNA, 13 nt, Human
cagacaggcaagc

SEQ ID NO: 1859459 - RNA, 18 nt, Human
cagacaggcaagcaccuc

SEQ ID NO: 1859460 - RNA, 20 nt, Human
cagacaggcaagcaccuccu

SEQ ID NO: 1859461 - RNA, 21 nt, Human
cagacaggcaagcaccuccug

SEQ ID NO: 1859462 - RNA, 23 nt, Human
cagacucuacagaggccaugggc

SEQ ID NO: 1859463 - RNA, 18 nt, Human
cagacucuacagaggcca

SEQ ID NO: 1859464 - RNA, 19 nt, Human
cagacucuacagaggccau

SEQ ID NO: 1859465 - RNA, 20 nt, Human
cagacucuacagaggccaug

SEQ ID NO: 1859466 - RNA, 21 nt, Human
cagacucuacagaggccaugg

SEQ ID NO: 1859467 - RNA, 17 nt, Human
cagacucuacagaggcc

SEQ ID NO: 1859468 - RNA, 22 nt, Human
cagacaggcaagcaccuccugc

SEQ ID NO: 1859469 - RNA, 23 nt, Human
cagacaggcaagcaccuccugcc

SEQ ID NO: 1859470 - RNA, 13 nt, Human
cagacuggaagca

SEQ ID NO: 1859471 - RNA, 14 nt, Human
cagacuggaagcac

SEQ ID NO: 1859472 - RNA, 16 nt, Human
cagacuggaagcacag

SEQ ID NO: 1859473 - RNA, 17 nt, Human
cagacuggaagcacagc

SEQ ID NO: 1859474 - RNA, 18 nt, Human
cagacuggaagcacagcu

SEQ ID NO: 1859475 - RNA, 20 nt, Human
cagacuggaagcacagcuuc

SEQ ID NO: 1859476 - RNA, 21 nt, Human
cagacuggaagcacagcuuca

SEQ ID NO: 1859477 - RNA, 19 nt, Human
cagcaccaucucuccuccu

SEQ ID NO: 1859478 - RNA, 19 nt, Human
cagauuucacucuccuugg

SEQ ID NO: 1859479 - RNA, 17 nt, Human
cagcaccaucucuccuc

SEQ ID NO: 1859480 - RNA, 19 nt, Human
cagauuugaacucuucaau

SEQ ID NO: 1859481 - RNA, 20 nt, Human
cagauuucacucuccuuggu

SEQ ID NO: 1859482 - RNA, 13 nt, Human
cagauuucacucu

SEQ ID NO: 1859483 - RNA, 13 nt, Human
cagauuuaugcau

SEQ ID NO: 1859484 - RNA, 19 nt, Human
cagauugcaacaggcuggg

SEQ ID NO: 1859485 - RNA, 20 nt, Human
cagauugcaacaggcugggc

SEQ ID NO: 1859486 - RNA, 18 nt, Human
cagauugcaacaggcugg

SEQ ID NO: 1859487 - RNA, 14 nt, Human
cagcacgauuucug

SEQ ID NO: 1859488 - RNA, 15 nt, Human
cagcacgauuucugu

SEQ ID NO: 1859489 - RNA, 18 nt, Human
cagcacgggggccaagga

SEQ ID NO: 1859490 - RNA, 12 nt, Human
cagagagggugg

SEQ ID NO: 1859491 - RNA, 13 nt, Human
cagagaggguggg

SEQ ID NO: 1859492 - RNA, 17 nt, Human
cagagaggguggugacc

SEQ ID NO: 1859493 - RNA, 20 nt, Human
cagagaggguggugaccucu

SEQ ID NO: 1859494 - RNA, 22 nt, Human
cagagaggguggugaccucugc

SEQ ID NO: 1859495 - RNA, 13 nt, Human
cagagcugccacc

SEQ ID NO: 1859496 - RNA, 20 nt, Human
cagagagguuaaggugggua

SEQ ID NO: 1859497 - RNA, 23 nt, Human
cagagagggugggagugggccca

SEQ ID NO: 1859498 - RNA, 23 nt, Human
cagagaggguggugaccucugcc

SEQ ID NO: 1859499 - RNA, 19 nt, Human
cagaggaaagcaaaggaga

SEQ ID NO: 1859500 - RNA, 17 nt, Human
cagaggaaagcaaagga

SEQ ID NO: 1859501 - RNA, 13 nt, Human
cagaggggguggc

SEQ ID NO: 1859502 - RNA, 20 nt, Human
cagaggaaagcaaaggagau

SEQ ID NO: 1859503 - RNA, 19 nt, Human
cagauacuuggggggcuga

SEQ ID NO: 1859504 - RNA, 16 nt, Human
cagaggggguggccuc

SEQ ID NO: 1859505 - RNA, 14 nt, Human
cagaggggguggcc

SEQ ID NO: 1859506 - RNA, 19 nt, Human
cagauagauauaugcucug

SEQ ID NO: 1859507 - RNA, 22 nt, Human
cagauauaaaagacugaccaau

SEQ ID NO: 1859508 - RNA, 14 nt, Human
cagauccccaagcc

SEQ ID NO: 1859509 - RNA, 22 nt, Human
caguuguuagugugucuuagug

SEQ ID NO: 1859510 - RNA, 18 nt, Human
caguuguuagugugucuu

SEQ ID NO: 1859511 - RNA, 21 nt, Human
caguuuguuaguaugaggcau

SEQ ID NO: 1859512 - RNA, 23 nt, Human
caguuuguuaguaugaggcauuu

SEQ ID NO: 1859513 - RNA, 23 nt, Human
cauaaugcgugcauaccacuuuu

SEQ ID NO: 1859514 - RNA, 11 nt, Human
caguuuuccuu

SEQ ID NO: 1859515 - RNA, 16 nt, Human
cauacaguuugcacuu

SEQ ID NO: 1859516 - RNA, 23 nt, Human
cauacaggaagguagaaauaucu

SEQ ID NO: 1859517 - RNA, 18 nt, Human
cauaauuauuauuuggcc

SEQ ID NO: 1859518 - RNA, 21 nt, Human
cauauuauuuuauguugcaua

SEQ ID NO: 1859519 - RNA, 22 nt, Human
cauauuaccacagacauacuaa

SEQ ID NO: 1859520 - RNA, 20 nt, Human
cauagcagcuuauucacaag

SEQ ID NO: 1859521 - RNA, 19 nt, Human
cauagcagcuuauucacaa

SEQ ID NO: 1859522 - RNA, 23 nt, Human
cauagcagagaaugaaagggccc

SEQ ID NO: 1859523 - RNA, 16 nt, Human
cauagguuuaauaauu

SEQ ID NO: 1859524 - RNA, 18 nt, Human
cauccugaggcuccacuu

SEQ ID NO: 1859525 - RNA, 19 nt, Human
cauccugaggcuccacuug

SEQ ID NO: 1859526 - RNA, 21 nt, Human
caucuaaacugcccccucugc

SEQ ID NO: 1859527 - RNA, 15 nt, Human
caucuaaacugcccc

SEQ ID NO: 1859528 - RNA, 22 nt, Human
cauccucuguacagagcccacg

SEQ ID NO: 1859529 - RNA, 12 nt, Human
caucccagcccc

SEQ ID NO: 1859530 - RNA, 11 nt, Human
caucccagccc

SEQ ID NO: 1859531 - RNA, 20 nt, Human
caucccaaacccuucagugc

SEQ ID NO: 1859532 - RNA, 21 nt, Human
caucagcacgauuucuguuua

SEQ ID NO: 1859533 - RNA, 19 nt, Human
caucccaaacccuucagug

SEQ ID NO: 1859534 - RNA, 22 nt, Human
caguuauuauauuuacaaaugg

SEQ ID NO: 1859535 - RNA, 21 nt, Human
cagucugauucccaagcucug

SEQ ID NO: 1859536 - RNA, 22 nt, Human
cagucugauucccaagcucugc

SEQ ID NO: 1859537 - RNA, 20 nt, Human
cagugguaugaucacggcuc

SEQ ID NO: 1859538 - RNA, 16 nt, Human
cagugggagcugccug

SEQ ID NO: 1859539 - RNA, 17 nt, Human
cagugggagcugccugu

SEQ ID NO: 1859540 - RNA, 18 nt, Human
cagugggagcugccuguu

SEQ ID NO: 1859541 - RNA, 21 nt, Human
cagugcccacaggaucagucu

SEQ ID NO: 1859542 - RNA, 22 nt, Human
cagugcccacaggaucagucug

SEQ ID NO: 1859543 - RNA, 22 nt, Human
cagugauuaccagggacugagg

SEQ ID NO: 1859544 - RNA, 23 nt, Human
cagucugauucccaagcucugcu

SEQ ID NO: 1859545 - RNA, 20 nt, Human
caguuacucagaauucucua

SEQ ID NO: 1859546 - RNA, 21 nt, Human
cagugguaugaucacggcuca

SEQ ID NO: 1859547 - RNA, 19 nt, Human
caguggugcgaucuggguu

SEQ ID NO: 1859548 - RNA, 20 nt, Human
caguggugcgaucuggguuc

SEQ ID NO: 1859549 - RNA, 21 nt, Human
caguuauuauauuuacaaaug

SEQ ID NO: 1859550 - RNA, 17 nt, Human
caguuauuauauuuaca

SEQ ID NO: 1859551 - RNA, 12 nt, Human
caugcaagguca

SEQ ID NO: 1859552 - RNA, 15 nt, Human
caugcaaggucauuu

SEQ ID NO: 1859553 - RNA, 14 nt, Human
caugaugcgggcca

SEQ ID NO: 1859554 - RNA, 20 nt, Human
caugaugcgggccagugcuc

SEQ ID NO: 1859555 - RNA, 15 nt, Human
caugaugcgggccag

SEQ ID NO: 1859556 - RNA, 13 nt, Human
caugacaaagacu

SEQ ID NO: 1859557 - RNA, 16 nt, Human
caugaauuugugaagg

SEQ ID NO: 1859558 - RNA, 21 nt, Human
caugaauauuuaguguucaua

SEQ ID NO: 1859559 - RNA, 18 nt, Human
caugggaaaggggaaguu

SEQ ID NO: 1859560 - RNA, 20 nt, Human
caugggaaaugucaacaagu

SEQ ID NO: 1859561 - RNA, 21 nt, Human
cauggccucuucagaucucua

SEQ ID NO: 1859562 - RNA, 14 nt, Human
cauggccgugaacu

SEQ ID NO: 1859563 - RNA, 22 nt, Human
cauggccucuucagaucucuaa

SEQ ID NO: 1859564 - RNA, 16 nt, Human
caugcuccuggcccac

SEQ ID NO: 1859565 - RNA, 14 nt, Human
caugcuccuggccc

SEQ ID NO: 1859566 - RNA, 17 nt, Human
caugcuccuggcccacu

SEQ ID NO: 1859567 - RNA, 20 nt, Human
caugcuccuggcccacugca

SEQ ID NO: 1859568 - RNA, 15 nt, Human
cauggccagguggcc

SEQ ID NO: 1859569 - RNA, 17 nt, Human
cauguuacauaagauaa

SEQ ID NO: 1859570 - RNA, 16 nt, Human
cauguuacauaagaua

SEQ ID NO: 1859571 - RNA, 16 nt, Human
cauguccaagaagccc

SEQ ID NO: 1859572 - RNA, 15 nt, Human
cauguccaagaagcc

SEQ ID NO: 1859573 - RNA, 13 nt, Human
cauguucuuaauu

SEQ ID NO: 1859574 - RNA, 16 nt, Human
cauguucuuaauucuu

SEQ ID NO: 1859575 - RNA, 21 nt, Human
cauguuacauaagauaaaugu

SEQ ID NO: 1859576 - RNA, 18 nt, Human
cauguucuuaauucuuag

SEQ ID NO: 1859577 - RNA, 18 nt, Human
cauguuggccaggcuggu

SEQ ID NO: 1859578 - RNA, 17 nt, Human
cauguuggccaggcugg

SEQ ID NO: 1859579 - RNA, 20 nt, Human
cauguuggccaggcugcucu

SEQ ID NO: 1859580 - RNA, 19 nt, Human
cauguuggccaggcugguc

SEQ ID NO: 1859581 - RNA, 21 nt, Human
cauucuccaccugccagggac

SEQ ID NO: 1859582 - RNA, 19 nt, Human
cauucuccaccugccaggg

SEQ ID NO: 1859583 - RNA, 18 nt, Human
cauucuccaccugccagg

SEQ ID NO: 1859584 - RNA, 17 nt, Human
cauucuccaccugccag

SEQ ID NO: 1859585 - RNA, 20 nt, Human
cauucuccuuguguuacuaa

SEQ ID NO: 1859586 - RNA, 22 nt, Human
ccaaaguacacuguuucaaacu

SEQ ID NO: 1859587 - RNA, 14 nt, Human
ccaaagugcuggga

SEQ ID NO: 1859588 - RNA, 14 nt, Human
ccaaugggagcuca

SEQ ID NO: 1859589 - RNA, 23 nt, Human
ccaauggacuaacuugucuuugg

SEQ ID NO: 1859590 - RNA, 21 nt, Human
ccaauggagacugucucaaga

SEQ ID NO: 1859591 - RNA, 13 nt, Human
ccaacucacccca

SEQ ID NO: 1859592 - RNA, 16 nt, Human
ccaacuauggccugug

SEQ ID NO: 1859593 - RNA, 15 nt, Human
ccaacuauggccugu

SEQ ID NO: 1859594 - RNA, 14 nt, Human
ccaacuauggccug

SEQ ID NO: 1859595 - RNA, 15 nt, Human
ccaaaucagcugcua

SEQ ID NO: 1859596 - RNA, 23 nt, Human
ccaaaucagcugcuacuacuccu

SEQ ID NO: 1859597 - RNA, 16 nt, Human
ccaaaucauaguggcu

SEQ ID NO: 1859598 - RNA, 16 nt, Human
ccaagcucugcuccuc

SEQ ID NO: 1859599 - RNA, 14 nt, Human
ccaagcucugcucc

SEQ ID NO: 1859600 - RNA, 15 nt, Human
ccaagcucugcuccu

SEQ ID NO: 1859601 - RNA, 21 nt, Human
ccaacucaccccagccccaaa

SEQ ID NO: 1859602 - RNA, 16 nt, Human
cauuggagauguuuag

SEQ ID NO: 1859603 - RNA, 16 nt, Human
cauuuaggugaggaag

SEQ ID NO: 1859604 - RNA, 18 nt, Human
cauuuaggugaggaagca

SEQ ID NO: 1859605 - RNA, 14 nt, Human
ccaaaaggcagaag

SEQ ID NO: 1859606 - RNA, 23 nt, Human
cauuuuuuuuaagaaaaaggaug

SEQ ID NO: 1859607 - RNA, 21 nt, Human
cauuuggugguuucagaaaug

SEQ ID NO: 1859608 - RNA, 22 nt, Human
gcccugccuccuuugugaggaa

SEQ ID NO: 1859609 - RNA, 16 nt, Human
gcccugccuccuuugu

SEQ ID NO: 1859610 - RNA, 16 nt, Human
gcccugcugaguccca

SEQ ID NO: 1859611 - RNA, 22 nt, Human
gcccugcugagucccaggcuga

SEQ ID NO: 1859612 - RNA, 21 nt, Human
gcccugcugagucccaggcug

SEQ ID NO: 1859613 - RNA, 23 nt, Human
gcccugcugagucccaggcugag

SEQ ID NO: 1859614 - RNA, 15 nt, Human
gccgccaugcuccug

SEQ ID NO: 1859615 - RNA, 20 nt, Human
gcccuuaccugccaggaagc

SEQ ID NO: 1859616 - RNA, 16 nt, Human
gcccuuaccugccagg

SEQ ID NO: 1859617 - RNA, 16 nt, Human
gccgccaugcuccugg

SEQ ID NO: 1859618 - RNA, 13 nt, Human
gcccacucccugc

SEQ ID NO: 1859619 - RNA, 23 nt, Human
gcccacuagacccacuggacuca

SEQ ID NO: 1859620 - RNA, 17 nt, Human
gcccacuagacccacug

SEQ ID NO: 1859621 - RNA, 15 nt, Human
gcccacucccugcaa

SEQ ID NO: 1859622 - RNA, 14 nt, Human
gcccacucccugca

SEQ ID NO: 1859623 - RNA, 19 nt, Human
gcccacucccugcaaccug

SEQ ID NO: 1859624 - RNA, 22 nt, Human
gcccuaaaguguauuuuuuuac

SEQ ID NO: 1859625 - RNA, 22 nt, Human
gccccuggaugcagccucacag

SEQ ID NO: 1859626 - RNA, 18 nt, Human
gccccuggaugcagccuc

SEQ ID NO: 1859627 - RNA, 16 nt, Human
gccccuggaugcagcc

SEQ ID NO: 1859628 - RNA, 15 nt, Human
gccccugcccggcug

SEQ ID NO: 1859629 - RNA, 14 nt, Human
gcccccucugcccu

SEQ ID NO: 1859630 - RNA, 13 nt, Human
gccccugcccggc

SEQ ID NO: 1859631 - RNA, 14 nt, Human
gccccugcccggcu

SEQ ID NO: 1859632 - RNA, 19 nt, Human
gccccaaaacucuccucug

SEQ ID NO: 1859633 - RNA, 18 nt, Human
gccccaaaacucuccucu

SEQ ID NO: 1859634 - RNA, 13 nt, Human
gccuccuccagcc

SEQ ID NO: 1859635 - RNA, 12 nt, Human
gccucugggacu

SEQ ID NO: 1859636 - RNA, 14 nt, Human
gccucugggacugg

SEQ ID NO: 1859637 - RNA, 13 nt, Human
gccuccugugugu

SEQ ID NO: 1859638 - RNA, 12 nt, Human
gccucuuccucc

SEQ ID NO: 1859639 - RNA, 22 nt, Human
gccucuuccucccucauuccac

SEQ ID NO: 1859640 - RNA, 23 nt, Human
gccucuucucuacucuagggaaa

SEQ ID NO: 1859641 - RNA, 12 nt, Human
gccucuucucua

SEQ ID NO: 1859642 - RNA, 17 nt, Human
gccugcccaggccccug

SEQ ID NO: 1859643 - RNA, 18 nt, Human
gccugcccaggccccugc

SEQ ID NO: 1859644 - RNA, 19 nt, Human
gccugcccaggccccugcc

SEQ ID NO: 1859645 - RNA, 20 nt, Human
gccugcccaggccccugcca

SEQ ID NO: 1859646 - RNA, 16 nt, Human
gccugccucuucucua

SEQ ID NO: 1859647 - RNA, 17 nt, Human
gccugccuguucccauu

SEQ ID NO: 1859648 - RNA, 17 nt, Human
gccuggccccucagggu

SEQ ID NO: 1859649 - RNA, 16 nt, Human
gccuggccccucaggg

SEQ ID NO: 1859650 - RNA, 15 nt, Human
gccuggccccucagg

SEQ ID NO: 1859651 - RNA, 10 nt, Human
gccuggccug

SEQ ID NO: 1859652 - RNA, 22 nt, Human
gccuggccccucagggucccug

SEQ ID NO: 1859653 - RNA, 20 nt, Human
gccuggccccucaggguccc

SEQ ID NO: 1859654 - RNA, 18 nt, Human
gccugggaucccucaucc

SEQ ID NO: 1859655 - RNA, 21 nt, Human
gccugggaucccucauccuca

SEQ ID NO: 1859656 - RNA, 22 nt, Human
gccugugucuuuaaaugcugcu

SEQ ID NO: 1859657 - RNA, 13 nt, Human
gccugugucuuua

SEQ ID NO: 1859658 - RNA, 14 nt, Human
gccugggaucccuc

SEQ ID NO: 1859659 - RNA, 22 nt, Human
gccugggaggucaaggcugcag

SEQ ID NO: 1859660 - RNA, 21 nt, Human
gccugggaggucaaggcugca

SEQ ID NO: 1859661 - RNA, 20 nt, Human
gccacauuccugaugcuucu

SEQ ID NO: 1859662 - RNA, 16 nt, Human
gccacauuccugaugc

SEQ ID NO: 1859663 - RNA, 21 nt, Human
gccaccaacauacucccaucu

SEQ ID NO: 1859664 - RNA, 20 nt, Human
gccaccaacauacucccauc

SEQ ID NO: 1859665 - RNA, 19 nt, Human
gccaccaacauacucccau

SEQ ID NO: 1859666 - RNA, 14 nt, Human
gccaccacgcccgg

SEQ ID NO: 1859667 - RNA, 13 nt, Human
gccaccacgcccg

SEQ ID NO: 1859668 - RNA, 22 nt, Human
gccaccaacauacucccaucug

SEQ ID NO: 1859669 - RNA, 21 nt, Human
gccacugcacuauagccuagg

SEQ ID NO: 1859670 - RNA, 13 nt, Human
gccacccugggga

SEQ ID NO: 1859671 - RNA, 19 nt, Human
gccacccuggggagaaagu

SEQ ID NO: 1859672 - RNA, 23 nt, Human
gccacugcaccgggccacagaga

SEQ ID NO: 1859673 - RNA, 19 nt, Human
gccacugugaagagaacca

SEQ ID NO: 1859674 - RNA, 18 nt, Human
gccacugugaagagaacc

SEQ ID NO: 1859675 - RNA, 17 nt, Human
gccacugccucuuccuc

SEQ ID NO: 1859676 - RNA, 16 nt, Human
gccacugccucuuccu

SEQ ID NO: 1859677 - RNA, 13 nt, Human
gccacugccucuu

SEQ ID NO: 1859678 - RNA, 12 nt, Human
gccacugccucu

SEQ ID NO: 1859679 - RNA, 21 nt, Human
gccacuugaugacccccaacc

SEQ ID NO: 1859680 - RNA, 18 nt, Human
gcacuuggagacuuguau

SEQ ID NO: 1859681 - RNA, 19 nt, Human
gccauauucuguuggccag

SEQ ID NO: 1859682 - RNA, 20 nt, Human
gccauauucuguuggccagu

SEQ ID NO: 1859683 - RNA, 15 nt, Human
gccauguuggccagg

SEQ ID NO: 1859684 - RNA, 16 nt, Human
gccauguuggccaggc

SEQ ID NO: 1859685 - RNA, 17 nt, Human
gccauguuggccaggcu

SEQ ID NO: 1859686 - RNA, 18 nt, Human
gccauguuggccaggcug

SEQ ID NO: 1859687 - RNA, 14 nt, Human
gccauguuggccag

SEQ ID NO: 1859688 - RNA, 14 nt, Human
gcccacgcccccac

SEQ ID NO: 1859689 - RNA, 13 nt, Human
gcccacgccccca

SEQ ID NO: 1859690 - RNA, 18 nt, Human
gcccaccuuggcucaagu

SEQ ID NO: 1859691 - RNA, 15 nt, Human
gcccacgcuggagug

SEQ ID NO: 1859692 - RNA, 16 nt, Human
gcccacgcuggagugc

SEQ ID NO: 1859693 - RNA, 17 nt, Human
gcccacgcuggagugca

SEQ ID NO: 1859694 - RNA, 18 nt, Human
gccauuccccgucucugg

SEQ ID NO: 1859695 - RNA, 17 nt, Human
gccauuccccgucucug

SEQ ID NO: 1859696 - RNA, 19 nt, Human
gccauguuggccaggcugg

SEQ ID NO: 1859697 - RNA, 20 nt, Human
gccauguuggccaggcuggu

SEQ ID NO: 1859698 - RNA, 22 nt, Human
gccauguuggccaggcuggucu

SEQ ID NO: 1859699 - RNA, 24 nt, Human
gccauguuggccaggcuggucuca

SEQ ID NO: 1859700 - RNA, 23 nt, Human
gccaggccacaagacccuugugg

SEQ ID NO: 1859701 - RNA, 12 nt, Human
gccaggccagag

SEQ ID NO: 1859702 - RNA, 20 nt, Human
gccaggcccucugcccacuc

SEQ ID NO: 1859703 - RNA, 19 nt, Human
gccaggcccucugcccacu

SEQ ID NO: 1859704 - RNA, 21 nt, Human
gccaggcccucugcccacucc

SEQ ID NO: 1859705 - RNA, 17 nt, Human
gccaggcccucugccca

SEQ ID NO: 1859706 - RNA, 16 nt, Human
gccaggcccucugccc

SEQ ID NO: 1859707 - RNA, 13 nt, Human
gccaggccagagg

SEQ ID NO: 1859708 - RNA, 15 nt, Human
gccaggcccucugcc

SEQ ID NO: 1859709 - RNA, 22 nt, Human
gccagacaucaacagauaaaua

SEQ ID NO: 1859710 - RNA, 15 nt, Human
gccagaauuucaaac

SEQ ID NO: 1859711 - RNA, 23 nt, Human
gccagcaggcucucaggccagcu

SEQ ID NO: 1859712 - RNA, 21 nt, Human
gccagcaggcucucaggccag

SEQ ID NO: 1859713 - RNA, 20 nt, Human
gccagcaggcucucaggcca

SEQ ID NO: 1859714 - RNA, 19 nt, Human
gccagcaggcucucaggcc

SEQ ID NO: 1859715 - RNA, 18 nt, Human
gccagcaggcucucaggc

SEQ ID NO: 1859716 - RNA, 17 nt, Human
gccagcaggcucucagg

SEQ ID NO: 1859717 - RNA, 16 nt, Human
gccagcaggcucucag

SEQ ID NO: 1859718 - RNA, 13 nt, Human
gccagcaggcucu

SEQ ID NO: 1859719 - RNA, 22 nt, Human
gcucagguggggucacucuggc

SEQ ID NO: 1859720 - RNA, 21 nt, Human
gcucagguggggucacucugg

SEQ ID NO: 1859721 - RNA, 15 nt, Human
gcucagagagggugg

SEQ ID NO: 1859722 - RNA, 20 nt, Human
gcucagagagggugggagug

SEQ ID NO: 1859723 - RNA, 18 nt, Human
gcucagagagggugggag

SEQ ID NO: 1859724 - RNA, 22 nt, Human
gcucagagagggugggaguggg

SEQ ID NO: 1859725 - RNA, 14 nt, Human
gcucaggagcccug

SEQ ID NO: 1859726 - RNA, 18 nt, Human
gcucaggagcccugggag

SEQ ID NO: 1859727 - RNA, 15 nt, Human
gcucaggagcccugg

SEQ ID NO: 1859728 - RNA, 12 nt, Human
gcucagggccug

SEQ ID NO: 1859729 - RNA, 21 nt, Human
gcucaggagcccugggaggcu

SEQ ID NO: 1859730 - RNA, 16 nt, Human
gcucagggccuggcuc

SEQ ID NO: 1859731 - RNA, 13 nt, Human
gcucagggccugg

SEQ ID NO: 1859732 - RNA, 17 nt, Human
gcucagggccuggcuca

SEQ ID NO: 1859733 - RNA, 14 nt, Human
gccuguucagcucc

SEQ ID NO: 1859734 - RNA, 20 nt, Human
gccuguucagcuccagcuca

SEQ ID NO: 1859735 - RNA, 19 nt, Human
gccuguucagcuccagcuc

SEQ ID NO: 1859736 - RNA, 14 nt, Human
gccugugucuuuaa

SEQ ID NO: 1859737 - RNA, 21 nt, Human
gcuaggaacacuccuucacag

SEQ ID NO: 1859738 - RNA, 19 nt, Human
gcuaggaacacuccuucac

SEQ ID NO: 1859739 - RNA, 18 nt, Human
gcuaggaacacuccuuca

SEQ ID NO: 1859740 - RNA, 21 nt, Human
gcuauugucaccagggcugga

SEQ ID NO: 1859741 - RNA, 20 nt, Human
gcuauugucaccagggcugg

SEQ ID NO: 1859742 - RNA, 16 nt, Human
gcuauugucaccaggg

SEQ ID NO: 1859743 - RNA, 16 nt, Human
gcuaguaucaaaagaa

SEQ ID NO: 1859744 - RNA, 14 nt, Human
gcuaggccuggcca

SEQ ID NO: 1859745 - RNA, 15 nt, Human
gcuaggccuggccag

SEQ ID NO: 1859746 - RNA, 23 nt, Human
gcucuggagcccacuguacuugc

SEQ ID NO: 1859747 - RNA, 21 nt, Human
gcucugagcaaauguggcucc

SEQ ID NO: 1859748 - RNA, 20 nt, Human
gcucugagcaaauguggcuc

SEQ ID NO: 1859749 - RNA, 22 nt, Human
gcugaauacagaggcaacugca

SEQ ID NO: 1859750 - RNA, 17 nt, Human
gcugaaugguuuucaaa

SEQ ID NO: 1859751 - RNA, 20 nt, Human
gcugaaggcucgagcaugcc

SEQ ID NO: 1859752 - RNA, 12 nt, Human
gcugaaggcucg

SEQ ID NO: 1859753 - RNA, 16 nt, Human
gcugacagacacaggc

SEQ ID NO: 1859754 - RNA, 14 nt, Human
gcugacagacacag

SEQ ID NO: 1859755 - RNA, 15 nt, Human
gcugacagacacagg

SEQ ID NO: 1859756 - RNA, 19 nt, Human
gcucugucgcccaggcugg

SEQ ID NO: 1859757 - RNA, 16 nt, Human
gcucuguccugggagu

SEQ ID NO: 1859758 - RNA, 15 nt, Human
gcucuggccuccaag

SEQ ID NO: 1859759 - RNA, 17 nt, Human
gcucuggccuccaaguc

SEQ ID NO: 1859760 - RNA, 15 nt, Human
gcucuguccugggag

SEQ ID NO: 1859761 - RNA, 14 nt, Human
gcucuguccuggga

SEQ ID NO: 1859762 - RNA, 16 nt, Human
gcucuuccaggcuggg

SEQ ID NO: 1859763 - RNA, 15 nt, Human
gcucuuccaggcugg

SEQ ID NO: 1859764 - RNA, 12 nt, Human
gcucuuccaggc

SEQ ID NO: 1859765 - RNA, 21 nt, Human
gcucccaggcauuccccagga

SEQ ID NO: 1859766 - RNA, 20 nt, Human
gcucccaggcauuccccagg

SEQ ID NO: 1859767 - RNA, 14 nt, Human
gcuccccagcccca

SEQ ID NO: 1859768 - RNA, 22 nt, Human
gcucccaggcauuccccaggag

SEQ ID NO: 1859769 - RNA, 23 nt, Human
gcucccaggcauuccccaggagg

SEQ ID NO: 1859770 - RNA, 22 nt, Human
gcuccugccaccacgcccggcu

SEQ ID NO: 1859771 - RNA, 16 nt, Human
gcucucaggccagcug

SEQ ID NO: 1859772 - RNA, 15 nt, Human
gcucucaggccagcu

SEQ ID NO: 1859773 - RNA, 14 nt, Human
gcucucaggccagc

SEQ ID NO: 1859774 - RNA, 13 nt, Human
gcucucaggccag

SEQ ID NO: 1859775 - RNA, 22 nt, Human
gcucuacagcuaaucagcauuc

SEQ ID NO: 1859776 - RNA, 20 nt, Human
gcucuacagcuaaucagcau

SEQ ID NO: 1859777 - RNA, 14 nt, Human
gcugcaccggcugg

SEQ ID NO: 1859778 - RNA, 17 nt, Human
gcugcaccggcuggccu

SEQ ID NO: 1859779 - RNA, 16 nt, Human
gcugcaccggcuggcc

SEQ ID NO: 1859780 - RNA, 22 nt, Human
gcugcaccggcuggccuggccc

SEQ ID NO: 1859781 - RNA, 19 nt, Human
gcugcaccggcuggccugg

SEQ ID NO: 1859782 - RNA, 18 nt, Human
gcugcaccggcuggccug

SEQ ID NO: 1859783 - RNA, 21 nt, Human
gcugccagccgagauagccaa

SEQ ID NO: 1859784 - RNA, 19 nt, Human
gcugccagccgagauagcc

SEQ ID NO: 1859785 - RNA, 21 nt, Human
gcugccauccagguucagcuu

SEQ ID NO: 1859786 - RNA, 23 nt, Human
gcugccauccagguucagcuugu

SEQ ID NO: 1859787 - RNA, 22 nt, Human
gcugccaucucaccuccugcug

SEQ ID NO: 1859788 - RNA, 23 nt, Human
gcugccaucucaccuccugcugg

SEQ ID NO: 1859789 - RNA, 18 nt, Human
gcugagggugagugggug

SEQ ID NO: 1859790 - RNA, 18 nt, Human
gcugccugggaucccuca

SEQ ID NO: 1859791 - RNA, 16 nt, Human
gcugccugggaucccu

SEQ ID NO: 1859792 - RNA, 19 nt, Human
gcugccugggaucccucau

SEQ ID NO: 1859793 - RNA, 13 nt, Human
gcugccugggauc

SEQ ID NO: 1859794 - RNA, 17 nt, Human
gcuggagcucugcccau

SEQ ID NO: 1859795 - RNA, 12 nt, Human
gcuggagugcag

SEQ ID NO: 1859796 - RNA, 14 nt, Human
gcuggagcucugcc

SEQ ID NO: 1859797 - RNA, 20 nt, Human
gcugggcucccuucccaccu

SEQ ID NO: 1859798 - RNA, 17 nt, Human
gcugggcucccuuccca

SEQ ID NO: 1859799 - RNA, 16 nt, Human
gcugggcucccuuccc

SEQ ID NO: 1859800 - RNA, 12 nt, Human
gcugggcucccu

SEQ ID NO: 1859801 - RNA, 19 nt, Human
gcugggcagaggaaagcaa

SEQ ID NO: 1859802 - RNA, 17 nt, Human
gcugggcagaggaaagc

SEQ ID NO: 1859803 - RNA, 16 nt, Human
gcugggcagaggaaag

SEQ ID NO: 1859804 - RNA, 14 nt, Human
gcugggcagguugg

SEQ ID NO: 1859805 - RNA, 16 nt, Human
gcugggucgcccugga

SEQ ID NO: 1859806 - RNA, 18 nt, Human
gcugggucgcccuggacu

SEQ ID NO: 1859807 - RNA, 17 nt, Human
gcugggucgcccuggac

SEQ ID NO: 1859808 - RNA, 15 nt, Human
gcuggguguggcgca

SEQ ID NO: 1859809 - RNA, 19 nt, Human
gcugggucgcccuggacug

SEQ ID NO: 1859810 - RNA, 17 nt, Human
gcuggccuggccccuca

SEQ ID NO: 1859811 - RNA, 16 nt, Human
gcuggccuggccccuc

SEQ ID NO: 1859812 - RNA, 14 nt, Human
gcuggagugcagug

SEQ ID NO: 1859813 - RNA, 15 nt, Human
gcuggagugcaguga

SEQ ID NO: 1859814 - RNA, 19 nt, Human
gcuggccuggccccucagg

SEQ ID NO: 1859815 - RNA, 18 nt, Human
gcuggccuggccccucag

SEQ ID NO: 1859816 - RNA, 23 nt, Human
gcugggauuacaggcuccugcca

SEQ ID NO: 1859817 - RNA, 22 nt, Human
gcugggauuacaggcuccugcc

SEQ ID NO: 1859818 - RNA, 16 nt, Human
gcugggauuacaggug

SEQ ID NO: 1859819 - RNA, 15 nt, Human
gcugggcagaggaaa

SEQ ID NO: 1859820 - RNA, 14 nt, Human
gcugggcagaggaa

SEQ ID NO: 1859821 - RNA, 13 nt, Human
gcugggcagagga

SEQ ID NO: 1859822 - RNA, 17 nt, Human
gcugggauuacaggugu

SEQ ID NO: 1859823 - RNA, 17 nt, Human
gcugggauuacagggau

SEQ ID NO: 1859824 - RNA, 18 nt, Human
gcugggauuacaggugug

SEQ ID NO: 1859825 - RNA, 19 nt, Human
gcugggauuacagguguga

SEQ ID NO: 1859826 - RNA, 18 nt, Human
gcuucccgcucagcccuc

SEQ ID NO: 1859827 - RNA, 17 nt, Human
gcuucccgcucagcccu

SEQ ID NO: 1859828 - RNA, 16 nt, Human
gcuucccgcucagccc

SEQ ID NO: 1859829 - RNA, 15 nt, Human
gcuucccgcucagcc

SEQ ID NO: 1859830 - RNA, 23 nt, Human
gcuucccgcucagcccucccugc

SEQ ID NO: 1859831 - RNA, 14 nt, Human
gcuuguacauaaug

SEQ ID NO: 1859832 - RNA, 16 nt, Human
gcuuguacauaaugcg

SEQ ID NO: 1859833 - RNA, 19 nt, Human
gcuugggcuucauccuccu

SEQ ID NO: 1859834 - RNA, 19 nt, Human
gcuugaaacccguggcgcu

SEQ ID NO: 1859835 - RNA, 15 nt, Human
gcuggguucugaucc

SEQ ID NO: 1859836 - RNA, 15 nt, Human
gcuggguucuaccca

SEQ ID NO: 1859837 - RNA, 14 nt, Human
gcuggguuggaggg

SEQ ID NO: 1859838 - RNA, 21 nt, Human
gcuggguuggaggguguccca

SEQ ID NO: 1859839 - RNA, 14 nt, Human
gcugguuuuucagu

SEQ ID NO: 1859840 - RNA, 15 nt, Human
gcugguuuuucaguu

SEQ ID NO: 1859841 - RNA, 20 nt, Human
gcuguaucccaugagccuca

SEQ ID NO: 1859842 - RNA, 23 nt, Human
gcuguaucccaugagccucagca

SEQ ID NO: 1859843 - RNA, 20 nt, Human
gcuucacggaagagccuugc

SEQ ID NO: 1859844 - RNA, 14 nt, Human
gcuuaacuucacau

SEQ ID NO: 1859845 - RNA, 22 nt, Human
gcuucaaggauccugagccaga

SEQ ID NO: 1859846 - RNA, 21 nt, Human
gcuguuggcugggggccucag

SEQ ID NO: 1859847 - RNA, 22 nt, Human
gcuguuggcugggggccucagu

SEQ ID NO: 1859848 - RNA, 22 nt, Human
gcugugcugcccugcccaccug

SEQ ID NO: 1859849 - RNA, 19 nt, Human
gcugugcugcccugcccac

SEQ ID NO: 1859850 - RNA, 13 nt, Human
gcugugcugcccu

SEQ ID NO: 1859851 - RNA, 12 nt, Human
gcugugcugccc

SEQ ID NO: 1859852 - RNA, 21 nt, Human
gcugugcucuggacaggcaug

SEQ ID NO: 1859853 - RNA, 21 nt, Human
ggaccccgagccuggcuccaa

SEQ ID NO: 1859854 - RNA, 18 nt, Human
ggacccugaggcccagag

SEQ ID NO: 1859855 - RNA, 15 nt, Human
ggacccugaggccca

SEQ ID NO: 1859856 - RNA, 14 nt, Human
ggacccugaggccc

SEQ ID NO: 1859857 - RNA, 21 nt, Human
ggacccggaggggccuggcag

SEQ ID NO: 1859858 - RNA, 20 nt, Human
ggacccggaggggccuggca

SEQ ID NO: 1859859 - RNA, 19 nt, Human
ggacccugaggcccagagg

SEQ ID NO: 1859860 - RNA, 19 nt, Human
gcuuguacauaaugcgugc

SEQ ID NO: 1859861 - RNA, 15 nt, Human
ggagagcuagcagca

SEQ ID NO: 1859862 - RNA, 18 nt, Human
ggagagccuuccaggggu

SEQ ID NO: 1859863 - RNA, 17 nt, Human
ggagagccuuccagggg

SEQ ID NO: 1859864 - RNA, 22 nt, Human
ggagagccuuccagggguggga

SEQ ID NO: 1859865 - RNA, 16 nt, Human
ggagagccuuccaggg

SEQ ID NO: 1859866 - RNA, 13 nt, Human
ggagagccuucca

SEQ ID NO: 1859867 - RNA, 14 nt, Human
ggagagagacucca

SEQ ID NO: 1859868 - RNA, 23 nt, Human
ggacugugugcucaggagcccug

SEQ ID NO: 1859869 - RNA, 22 nt, Human
ggacugugugcucaggagcccu

SEQ ID NO: 1859870 - RNA, 17 nt, Human
ggacuuagcugggagaa

SEQ ID NO: 1859871 - RNA, 12 nt, Human
ggaccucaggcc

SEQ ID NO: 1859872 - RNA, 20 nt, Human
ggacuacaggugugagucac

SEQ ID NO: 1859873 - RNA, 16 nt, Human
ggacuaggguccuggg

SEQ ID NO: 1859874 - RNA, 22 nt, Human
ggacucaaugcacugacauugu

SEQ ID NO: 1859875 - RNA, 16 nt, Human
ggagacugucucaaga

SEQ ID NO: 1859876 - RNA, 13 nt, Human
ggagaacuagaga

SEQ ID NO: 1859877 - RNA, 22 nt, Human
ggagaaccaaaaagaggcuaug

SEQ ID NO: 1859878 - RNA, 18 nt, Human
ggagaaaugaaaaaauau

SEQ ID NO: 1859879 - RNA, 18 nt, Human
ggacuuuuauuuccagug

SEQ ID NO: 1859880 - RNA, 19 nt, Human
ggagaaaauggacguguua

SEQ ID NO: 1859881 - RNA, 15 nt, Human
ggacuuggaagcucc

SEQ ID NO: 1859882 - RNA, 17 nt, Human
ggacuuggaagcuccgc

SEQ ID NO: 1859883 - RNA, 15 nt, Human
ggagcccacuguacu

SEQ ID NO: 1859884 - RNA, 21 nt, Human
ggagcagccacauuccugaug

SEQ ID NO: 1859885 - RNA, 13 nt, Human
ggagcagccacau

SEQ ID NO: 1859886 - RNA, 18 nt, Human
ggaggucgaggcaggagg

SEQ ID NO: 1859887 - RNA, 15 nt, Human
ggaggcugagauggg

SEQ ID NO: 1859888 - RNA, 19 nt, Human
ggaggcugagaugggagaa

SEQ ID NO: 1859889 - RNA, 21 nt, Human
ggaggcucuggagcccacugu

SEQ ID NO: 1859890 - RNA, 16 nt, Human
ggaggucgaggcagga

SEQ ID NO: 1859891 - RNA, 15 nt, Human
ggaggucgaggcagg

SEQ ID NO: 1859892 - RNA, 22 nt, Human
ggagcccacuguacuugcucuu

SEQ ID NO: 1859893 - RNA, 18 nt, Human
ggagcccacuguacuugc

SEQ ID NO: 1859894 - RNA, 16 nt, Human
ggagcugaguggggga

SEQ ID NO: 1859895 - RNA, 22 nt, Human
ggagcugccuguucagcuccag

SEQ ID NO: 1859896 - RNA, 20 nt, Human
ggaggcucuggagcccacug

SEQ ID NO: 1859897 - RNA, 17 nt, Human
ggaggcucuggagccca

SEQ ID NO: 1859898 - RNA, 20 nt, Human
ggaggccaaggugggaggau

SEQ ID NO: 1859899 - RNA, 18 nt, Human
ggaggccaaggugggagg

SEQ ID NO: 1859900 - RNA, 13 nt, Human
ggaggccagccuu

SEQ ID NO: 1859901 - RNA, 21 nt, Human
ggaggcaugugaugagaggaa

SEQ ID NO: 1859902 - RNA, 20 nt, Human
ggaggaaaaccaagccgugg

SEQ ID NO: 1859903 - RNA, 22 nt, Human
ggaggaaaaccaagccguggcu

SEQ ID NO: 1859904 - RNA, 21 nt, Human
ggaggaaaaccaagccguggc

SEQ ID NO: 1859905 - RNA, 12 nt, Human
ggaggaagagaa

SEQ ID NO: 1859906 - RNA, 12 nt, Human
ggcauuguggga

SEQ ID NO: 1859907 - RNA, 21 nt, Human
ggccaaaggaagcacaugccu

SEQ ID NO: 1859908 - RNA, 13 nt, Human
ggccaaaggaagc

SEQ ID NO: 1859909 - RNA, 12 nt, Human
ggccaaaggaag

SEQ ID NO: 1859910 - RNA, 15 nt, Human
ggccaaagccaaagc

SEQ ID NO: 1859911 - RNA, 13 nt, Human
ggccaagguggga

SEQ ID NO: 1859912 - RNA, 21 nt, Human
ggccaaggaugccccgucccc

SEQ ID NO: 1859913 - RNA, 23 nt, Human
ggccagagggagugacagaggca

SEQ ID NO: 1859914 - RNA, 19 nt, Human
ggccagaugcaccagcccu

SEQ ID NO: 1859915 - RNA, 20 nt, Human
ggccagaugcaccagcccuu

SEQ ID NO: 1859916 - RNA, 19 nt, Human
ggccagguggccacuccag

SEQ ID NO: 1859917 - RNA, 17 nt, Human
ggcccgacagccuggca

SEQ ID NO: 1859918 - RNA, 16 nt, Human
ggcccgacagccuggc

SEQ ID NO: 1859919 - RNA, 15 nt, Human
ggcccgacagccugg

SEQ ID NO: 1859920 - RNA, 14 nt, Human
ggccucccaacuca

SEQ ID NO: 1859921 - RNA, 13 nt, Human
ggccucccaacuc

SEQ ID NO: 1859922 - RNA, 14 nt, Human
ggcccuuccuuuuc

SEQ ID NO: 1859923 - RNA, 13 nt, Human
ggccucccaaagu

SEQ ID NO: 1859924 - RNA, 22 nt, Human
ggcccuuccucuccacugccuu

SEQ ID NO: 1859925 - RNA, 19 nt, Human
ggcccuuccucuccacugc

SEQ ID NO: 1859926 - RNA, 18 nt, Human
ggcccuuccucuccacug

SEQ ID NO: 1859927 - RNA, 23 nt, Human
ggcccuuccucuccacugccuuc

SEQ ID NO: 1859928 - RNA, 12 nt, Human
ggcagaaggaag

SEQ ID NO: 1859929 - RNA, 17 nt, Human
ggcagccaggccacaag

SEQ ID NO: 1859930 - RNA, 15 nt, Human
ggcagccaggccaca

SEQ ID NO: 1859931 - RNA, 12 nt, Human
ggcagagcagag

SEQ ID NO: 1859932 - RNA, 10 nt, Human
ggcagagcag

SEQ ID NO: 1859933 - RNA, 18 nt, Human
ggcagccgugccuucagc

SEQ ID NO: 1859934 - RNA, 21 nt, Human
ggcagccgugccuucagcucu

SEQ ID NO: 1859935 - RNA, 19 nt, Human
ggcagccgugccuucagcu

SEQ ID NO: 1859936 - RNA, 22 nt, Human
ggcagccgugccuucagcucua

SEQ ID NO: 1859937 - RNA, 21 nt, Human
ggaugaauuccaaauucugcu

SEQ ID NO: 1859938 - RNA, 12 nt, Human
ggaugagaaagg

SEQ ID NO: 1859939 - RNA, 22 nt, Human
ggaugagaaagguugaagcacc

SEQ ID NO: 1859940 - RNA, 13 nt, Human
ggauguucuggga

SEQ ID NO: 1859941 - RNA, 21 nt, Human
ggauuuugauccaagcugguc

SEQ ID NO: 1859942 - RNA, 11 nt, Human
ggcaaaauaau

SEQ ID NO: 1859943 - RNA, 23 nt, Human
ggauuaaacuuaaucuaaaugga

SEQ ID NO: 1859944 - RNA, 20 nt, Human
aaaaagcuccaaaugcagcu

SEQ ID NO: 1859945 - RNA, 13 nt, Human
aaaaaaacacaaa

SEQ ID NO: 1859946 - RNA, 19 nt, Human
ggcuguaucccaugagccu

SEQ ID NO: 1859947 - RNA, 16 nt, Human
ggcuggugucaccuga

SEQ ID NO: 1859948 - RNA, 15 nt, Human
ggcuucaguggcagc

SEQ ID NO: 1859949 - RNA, 20 nt, Human
ggcuguaucccaugagccuc

SEQ ID NO: 1859950 - RNA, 22 nt, Human
ggcuguaucccaugagccucag

SEQ ID NO: 1859951 - RNA, 15 nt, Human
ggcugucaauuacag

SEQ ID NO: 1859952 - RNA, 23 nt, Human
ggcuguaucccaugagccucagc

SEQ ID NO: 1859953 - RNA, 16 nt, Human
ggcuucaguggcagcu

SEQ ID NO: 1859954 - RNA, 13 nt, Human
gggaaaaucagcc

SEQ ID NO: 1859955 - RNA, 23 nt, Human
gggaaaaucagccugcuccagcu

SEQ ID NO: 1859956 - RNA, 13 nt, Human
ggcugggagagcc

SEQ ID NO: 1859957 - RNA, 22 nt, Human
ggcuggccuggccccucagggu

SEQ ID NO: 1859958 - RNA, 17 nt, Human
ggcuggccuggccccuc

SEQ ID NO: 1859959 - RNA, 15 nt, Human
ggcuggcccugcccu

SEQ ID NO: 1859960 - RNA, 14 nt, Human
ggcuggcccugccc

SEQ ID NO: 1859961 - RNA, 13 nt, Human
ggcuggcccugcc

SEQ ID NO: 1859962 - RNA, 16 nt, Human
ggcuggcccugcccug

SEQ ID NO: 1859963 - RNA, 14 nt, Human
ggcuggcgugcagu

SEQ ID NO: 1859964 - RNA, 16 nt, Human
ggcuggcgugcagugg

SEQ ID NO: 1859965 - RNA, 20 nt, Human
ggcuggcgugcaguggugcg

SEQ ID NO: 1859966 - RNA, 22 nt, Human
ggcugccaucucaccuccugcu

SEQ ID NO: 1859967 - RNA, 21 nt, Human
ggcugccaucucaccuccugc

SEQ ID NO: 1859968 - RNA, 23 nt, Human
ggcugccaucucaccuccugcug

SEQ ID NO: 1859969 - RNA, 16 nt, Human
ggcucccuucccaccu

SEQ ID NO: 1859970 - RNA, 18 nt, Human
ggcucccuucccaccucu

SEQ ID NO: 1859971 - RNA, 17 nt, Human
ggcucccuucccaccuc

SEQ ID NO: 1859972 - RNA, 22 nt, Human
ggcucccuucccaccucucuca

SEQ ID NO: 1859973 - RNA, 20 nt, Human
ggcucccuucccaccucucu

SEQ ID NO: 1859974 - RNA, 17 nt, Human
ggcuccucccggugccc

SEQ ID NO: 1859975 - RNA, 13 nt, Human
ggcuccugccacc

SEQ ID NO: 1859976 - RNA, 12 nt, Human
ggcuccugccac

SEQ ID NO: 1859977 - RNA, 20 nt, Human
ggcucuuccaggcugggaga

SEQ ID NO: 1859978 - RNA, 24 nt, Human
ggcucuuccaggcugggagagccu

SEQ ID NO: 1859979 - RNA, 23 nt, Human
ggcucuuccaggcugggagagcc

SEQ ID NO: 1859980 - RNA, 18 nt, Human
ggcucgagcaugccugga

SEQ ID NO: 1859981 - RNA, 20 nt, Human
ggcugcaugcgggcuuccuc

SEQ ID NO: 1859982 - RNA, 22 nt, Human
ggcugcaugcgggcuuccuccu

SEQ ID NO: 1859983 - RNA, 17 nt, Human
ggcugcagggaguccga

SEQ ID NO: 1859984 - RNA, 12 nt, Human
aaaauagccugc

SEQ ID NO: 1859985 - RNA, 18 nt, Human
aaaauaguggugugauuu

SEQ ID NO: 1859986 - RNA, 18 nt, Human
aaaauauauaucaaauau

SEQ ID NO: 1859987 - RNA, 12 nt, Human
aaaauaaauuau

SEQ ID NO: 1859988 - RNA, 14 nt, Human
aaaauaccagccag

SEQ ID NO: 1859989 - RNA, 14 nt, Human
aaaauaccaaggaa

SEQ ID NO: 1859990 - RNA, 15 nt, Human
aaaauaccagccagu

SEQ ID NO: 1859991 - RNA, 16 nt, Human
aaaagggacugagaaa

SEQ ID NO: 1859992 - RNA, 18 nt, Human
aaaagggaacugaacauu

SEQ ID NO: 1859993 - RNA, 15 nt, Human
gggauuuccaugaug

SEQ ID NO: 1859994 - RNA, 20 nt, Human
gggaggcagagguugcagug

SEQ ID NO: 1859995 - RNA, 19 nt, Human
gggaggccaaggugggagg

SEQ ID NO: 1859996 - RNA, 13 nt, Human
gggagggcuccag

SEQ ID NO: 1859997 - RNA, 11 nt, Human
gggagggcucc

SEQ ID NO: 1859998 - RNA, 13 nt, Human
gggagggccuggg

SEQ ID NO: 1859999 - RNA, 11 nt, Human
gggaggcagag

SEQ ID NO: 1860000 - RNA, 21 nt, Human
aaaacuuuaugcuaagugaaa

SEQ ID NO: 1860001 - RNA, 18 nt, Human
aaaagccuguuuaagaga

SEQ ID NO: 1860002 - RNA, 16 nt, Human
aaaagccuguuuaaga

SEQ ID NO: 1860003 - RNA, 14 nt, Human
aaaagcugggcagg

SEQ ID NO: 1860004 - RNA, 22 nt, Human
aaaagcuccauuuuuagugaaa

SEQ ID NO: 1860005 - RNA, 15 nt, Human
aaaaccaauguucuc

SEQ ID NO: 1860006 - RNA, 18 nt, Human
aaaacguggcugcuucaa

SEQ ID NO: 1860007 - RNA, 17 nt, Human
aaaacguggcugcuuca

SEQ ID NO: 1860008 - RNA, 16 nt, Human
aaaacguggcugcuuc

SEQ ID NO: 1860009 - RNA, 14 nt, Human
aaaacguggcugcu

SEQ ID NO: 1860010 - RNA, 21 nt, Human
aaaacguggcugcuucaagga

SEQ ID NO: 1860011 - RNA, 19 nt, Human
aaaaccaagccguggcuuc

SEQ ID NO: 1860012 - RNA, 22 nt, Human
aaaacugauuuuuuuuuccuuc

SEQ ID NO: 1860013 - RNA, 18 nt, Human
aaaacugauuuuuuuuuc

SEQ ID NO: 1860014 - RNA, 20 nt, Human
aaaacugcugacuguuuucu

SEQ ID NO: 1860015 - RNA, 19 nt, Human
aaaacugcucauaugaugu

SEQ ID NO: 1860016 - RNA, 14 nt, Human
gggaacagacugga

SEQ ID NO: 1860017 - RNA, 19 nt, Human
aaaaaucucaaauuucuaa

SEQ ID NO: 1860018 - RNA, 20 nt, Human
aaaaaucucaaauuucuaaa

SEQ ID NO: 1860019 - RNA, 22 nt, Human
gggaacagacuggaagcacagc

SEQ ID NO: 1860020 - RNA, 20 nt, Human
ggguaucaggugcugccauc

SEQ ID NO: 1860021 - RNA, 14 nt, Human
aaaccaagccgugg

SEQ ID NO: 1860022 - RNA, 23 nt, Human
aaacauguuucuuuguaaugaaa

SEQ ID NO: 1860023 - RNA, 22 nt, Human
aaacauguuucuuuguaaugaa

SEQ ID NO: 1860024 - RNA, 19 nt, Human
aaacauguuucuuuguaau

SEQ ID NO: 1860025 - RNA, 22 nt, Human
gggucucacuauguugcccagg

SEQ ID NO: 1860026 - RNA, 12 nt, Human
gggucucacucu

SEQ ID NO: 1860027 - RNA, 23 nt, Human
gggucucacuauguugcccaggc

SEQ ID NO: 1860028 - RNA, 16 nt, Human
aaacuggauuaaacuu

SEQ ID NO: 1860029 - RNA, 21 nt, Human
aaacugcccccucugcccugc

SEQ ID NO: 1860030 - RNA, 20 nt, Human
aaacugcccccucugcccug

SEQ ID NO: 1860031 - RNA, 19 nt, Human
aaacugcccccucugcccu

SEQ ID NO: 1860032 - RNA, 17 nt, Human
aaacugcccccucugcc

SEQ ID NO: 1860033 - RNA, 13 nt, Human
aaacugcccccuc

SEQ ID NO: 1860034 - RNA, 11 nt, Human
aaacugccccc

SEQ ID NO: 1860035 - RNA, 12 nt, Human
aaacugcccccu

SEQ ID NO: 1860036 - RNA, 11 nt, Human
aaacuccugac

SEQ ID NO: 1860037 - RNA, 20 nt, Human
aaacguggcugcuucaagga

SEQ ID NO: 1860038 - RNA, 17 nt, Human
aaacguggcugcuucaa

SEQ ID NO: 1860039 - RNA, 16 nt, Human
aaacguggcugcuuca

SEQ ID NO: 1860040 - RNA, 12 nt, Human
aaacgugaaaau

SEQ ID NO: 1860041 - RNA, 21 nt, Human
aaaccacauuggagauguuua

SEQ ID NO: 1860042 - RNA, 23 nt, Human
aaacggccucacuaggcuucugg

SEQ ID NO: 1860043 - RNA, 23 nt, Human
ggggcccugccuccuuugugagg

SEQ ID NO: 1860044 - RNA, 19 nt, Human
ggggcccugccuccuuugu

SEQ ID NO: 1860045 - RNA, 16 nt, Human
ggggcccugccuccuu

SEQ ID NO: 1860046 - RNA, 19 nt, Human
ggggccaguuggucccccu

SEQ ID NO: 1860047 - RNA, 17 nt, Human
ggggccaguuggucccc

SEQ ID NO: 1860048 - RNA, 16 nt, Human
ggggccaggcuggguc

SEQ ID NO: 1860049 - RNA, 14 nt, Human
ggggccaggcuggg

SEQ ID NO: 1860050 - RNA, 13 nt, Human
ggggccaggcugg

SEQ ID NO: 1860051 - RNA, 17 nt, Human
ggggaccucaggccugg

SEQ ID NO: 1860052 - RNA, 16 nt, Human
ggggaccucaggccug

SEQ ID NO: 1860053 - RNA, 15 nt, Human
ggggaccucaggccu

SEQ ID NO: 1860054 - RNA, 13 nt, Human
ggggaccucaggc

SEQ ID NO: 1860055 - RNA, 16 nt, Human
aaacaugcuacacacu

SEQ ID NO: 1860056 - RNA, 22 nt, Human
aaacaugcuacacacugcaugu

SEQ ID NO: 1860057 - RNA, 13 nt, Human
aaacaaagaaauu

SEQ ID NO: 1860058 - RNA, 18 nt, Human
aaacaagaccacguuucu

SEQ ID NO: 1860059 - RNA, 19 nt, Human
aaaauuuuuaaucuuuaau

SEQ ID NO: 1860060 - RNA, 16 nt, Human
aaaauuuuuaaucuuu

SEQ ID NO: 1860061 - RNA, 15 nt, Human
aaaauuuuuaaucuu

SEQ ID NO: 1860062 - RNA, 21 nt, Human
aaaauggacguguuaugacuc

SEQ ID NO: 1860063 - RNA, 21 nt, Human
aaaauguaggguuauaauaau

SEQ ID NO: 1860064 - RNA, 18 nt, Human
gguauaaguggugugugu

SEQ ID NO: 1860065 - RNA, 19 nt, Human
gguccacccaggagccccg

SEQ ID NO: 1860066 - RNA, 23 nt, Human
gguauuggcuagagguucaaaga

SEQ ID NO: 1860067 - RNA, 14 nt, Human
aaacuuuaccuuuu

SEQ ID NO: 1860068 - RNA, 12 nt, Human
ggucccacccca

SEQ ID NO: 1860069 - RNA, 20 nt, Human
gguccacccaggagccccga

SEQ ID NO: 1860070 - RNA, 22 nt, Human
gguccacccaggagccccgagg

SEQ ID NO: 1860071 - RNA, 18 nt, Human
aaagaggcuaugugagca

SEQ ID NO: 1860072 - RNA, 13 nt, Human
aaagaggcuaugu

SEQ ID NO: 1860073 - RNA, 15 nt, Human
aaagaugagugagca

SEQ ID NO: 1860074 - RNA, 19 nt, Human
aaagacuuuuccaacccuc

SEQ ID NO: 1860075 - RNA, 15 nt, Human
aaagacuguacaaag

SEQ ID NO: 1860076 - RNA, 17 nt, Human
aaagaauggaaggugga

SEQ ID NO: 1860077 - RNA, 21 nt, Human
ggugauccacucgccuucauc

SEQ ID NO: 1860078 - RNA, 22 nt, Human
ggugcacaagcuccaagcuccc

SEQ ID NO: 1860079 - RNA, 16 nt, Human
ggugcacaagcuccaa

SEQ ID NO: 1860080 - RNA, 14 nt, Human
ggucugugagaugc

SEQ ID NO: 1860081 - RNA, 24 nt, Human
ggucugugagaugcuagaacuccc

SEQ ID NO: 1860082 - RNA, 12 nt, Human
ggucuguucuuu

SEQ ID NO: 1860083 - RNA, 17 nt, Human
ggucuguucuuuccaaa

SEQ ID NO: 1860084 - RNA, 19 nt, Human
ggucuguucuuuccaaagu

SEQ ID NO: 1860085 - RNA, 21 nt, Human
ggucuugaacuccuggccuca

SEQ ID NO: 1860086 - RNA, 22 nt, Human
ggucuugaacuccuggccucaa

SEQ ID NO: 1860087 - RNA, 22 nt, Human
aaagcagugcaugcugucccuu

SEQ ID NO: 1860088 - RNA, 21 nt, Human
aaagcagugcaugcugucccu

SEQ ID NO: 1860089 - RNA, 13 nt, Human
aaagcuagaaaug

SEQ ID NO: 1860090 - RNA, 18 nt, Human
aaagcuaggccuggccag

SEQ ID NO: 1860091 - RNA, 17 nt, Human
aaagcagugcaugcugu

SEQ ID NO: 1860092 - RNA, 11 nt, Human
aaaggaaagag

SEQ ID NO: 1860093 - RNA, 13 nt, Human
aaaggaauuuaaa

SEQ ID NO: 1860094 - RNA, 16 nt, Human
gacgcucucuggccuu

SEQ ID NO: 1860095 - RNA, 17 nt, Human
gacgcucucuggccuuc

SEQ ID NO: 1860096 - RNA, 15 nt, Human
gacgcucucuggccu

SEQ ID NO: 1860097 - RNA, 19 nt, Human
gacgcuacccgggaagggg

SEQ ID NO: 1860098 - RNA, 18 nt, Human
gacgcuacccgggaaggg

SEQ ID NO: 1860099 - RNA, 16 nt, Human
gacgcuacccgggaag

SEQ ID NO: 1860100 - RNA, 18 nt, Human
gacgccaucccagcccca

SEQ ID NO: 1860101 - RNA, 17 nt, Human
gacgccaucccagcccc

SEQ ID NO: 1860102 - RNA, 19 nt, Human
gacgccaucccagccccaa

SEQ ID NO: 1860103 - RNA, 16 nt, Human
gacgccaucccagccc

SEQ ID NO: 1860104 - RNA, 14 nt, Human
gaccugaggcccuu

SEQ ID NO: 1860105 - RNA, 13 nt, Human
gaccugaggcccu

SEQ ID NO: 1860106 - RNA, 11 nt, Human
gaccugaggcc

SEQ ID NO: 1860107 - RNA, 14 nt, Human
gaccucugcagcaa

SEQ ID NO: 1860108 - RNA, 20 nt, Human
gaccaucccugaaggccccg

SEQ ID NO: 1860109 - RNA, 22 nt, Human
gacucaccucccccaucucuuc

SEQ ID NO: 1860110 - RNA, 15 nt, Human
gacucaccuccccca

SEQ ID NO: 1860111 - RNA, 16 nt, Human
gacucugccuccucuu

SEQ ID NO: 1860112 - RNA, 12 nt, Human
gacucugccucc

SEQ ID NO: 1860113 - RNA, 19 nt, Human
gacucugucucaaaaaaac

SEQ ID NO: 1860114 - RNA, 14 nt, Human
gacugaauuucuuu

SEQ ID NO: 1860115 - RNA, 23 nt, Human
gacuguacuccucccaggcgccc

SEQ ID NO: 1860116 - RNA, 18 nt, Human
gacuguacuccucccagg

SEQ ID NO: 1860117 - RNA, 11 nt, Human
gacuguagaaa

SEQ ID NO: 1860118 - RNA, 22 nt, Human
gacugugugcucaggagcccug

SEQ ID NO: 1860119 - RNA, 14 nt, Human
gacacagcucuucu

SEQ ID NO: 1860120 - RNA, 16 nt, Human
gacacagcucuucucc

SEQ ID NO: 1860121 - RNA, 13 nt, Human
gacacagcucuuc

SEQ ID NO: 1860122 - RNA, 17 nt, Human
gacacagcucuucucca

SEQ ID NO: 1860123 - RNA, 22 nt, Human
gacacagcucuucuccaggcug

SEQ ID NO: 1860124 - RNA, 23 nt, Human
gacacagcucuucuccaggcugu

SEQ ID NO: 1860125 - RNA, 12 nt, Human
gacacaggcccg

SEQ ID NO: 1860126 - RNA, 21 nt, Human
gacagaaagcagaacagugau

SEQ ID NO: 1860127 - RNA, 17 nt, Human
gacagcccgggcucugc

SEQ ID NO: 1860128 - RNA, 15 nt, Human
gacagaagcagcucu

SEQ ID NO: 1860129 - RNA, 19 nt, Human
gacauuguuggccaaagcc

SEQ ID NO: 1860130 - RNA, 19 nt, Human
gacagcccgggcucugccu

SEQ ID NO: 1860131 - RNA, 18 nt, Human
gacagcccgggcucugcc

SEQ ID NO: 1860132 - RNA, 20 nt, Human
gacagcccgggcucugccuc

SEQ ID NO: 1860133 - RNA, 16 nt, Human
gacagaagcagcucuu

SEQ ID NO: 1860134 - RNA, 21 nt, Human
gacagugagacucugucucag

SEQ ID NO: 1860135 - RNA, 14 nt, Human
gacauugcggacag

SEQ ID NO: 1860136 - RNA, 15 nt, Human
gacauugcggacagc

SEQ ID NO: 1860137 - RNA, 18 nt, Human
gaccagggauuuccauga

SEQ ID NO: 1860138 - RNA, 19 nt, Human
gaccaucccugaaggcccc

SEQ ID NO: 1860139 - RNA, 18 nt, Human
gaccaucccugaaggccc

SEQ ID NO: 1860140 - RNA, 13 nt, Human
gaccaucccugaa

SEQ ID NO: 1860141 - RNA, 12 nt, Human
gaccaucccuga

SEQ ID NO: 1860142 - RNA, 20 nt, Human
gaccagggauuuccaugaug

SEQ ID NO: 1860143 - RNA, 13 nt, Human
gaccauacuaauu

SEQ ID NO: 1860144 - RNA, 20 nt, Human
gaauauugcugauggugcaa

SEQ ID NO: 1860145 - RNA, 19 nt, Human
gaauauugcugauggugca

SEQ ID NO: 1860146 - RNA, 20 nt, Human
gaauauuagugaccucagcu

SEQ ID NO: 1860147 - RNA, 15 nt, Human
gaauauugcugaugg

SEQ ID NO: 1860148 - RNA, 14 nt, Human
gaauauugcugaug

SEQ ID NO: 1860149 - RNA, 18 nt, Human
gaaguuuaauugacuuau

SEQ ID NO: 1860150 - RNA, 22 nt, Human
gaaggggagauaaggguaucug

SEQ ID NO: 1860151 - RNA, 20 nt, Human
gaagcuaucguaaaauuaag

SEQ ID NO: 1860152 - RNA, 19 nt, Human
gaagcuccgcuuucuaccc

SEQ ID NO: 1860153 - RNA, 17 nt, Human
gaaggccccgcccaggc

SEQ ID NO: 1860154 - RNA, 22 nt, Human
gaagcuccgcuuucuacccagc

SEQ ID NO: 1860155 - RNA, 21 nt, Human
gaagggcuuggacucaagcaa

SEQ ID NO: 1860156 - RNA, 22 nt, Human
gaaggcuggguucugauccuag

SEQ ID NO: 1860157 - RNA, 20 nt, Human
gaaggcuggguucugauccu

SEQ ID NO: 1860158 - RNA, 19 nt, Human
gaaggccccgcccaggcuu

SEQ ID NO: 1860159 - RNA, 18 nt, Human
gaaggccccgcccaggcu

SEQ ID NO: 1860160 - RNA, 21 nt, Human
gaaggcucgagcaugccugga

SEQ ID NO: 1860161 - RNA, 19 nt, Human
gaaggcuggguucugaucc

SEQ ID NO: 1860162 - RNA, 15 nt, Human
gaaggcuggguucug

SEQ ID NO: 1860163 - RNA, 20 nt, Human
gaacucugacaacagacuuc

SEQ ID NO: 1860164 - RNA, 11 nt, Human
gaacuggcugc

SEQ ID NO: 1860165 - RNA, 12 nt, Human
gaacuggcugca

SEQ ID NO: 1860166 - RNA, 15 nt, Human
gaagcagaggaagga

SEQ ID NO: 1860167 - RNA, 21 nt, Human
gaagcacaugccucucucagg

SEQ ID NO: 1860168 - RNA, 16 nt, Human
gaagacaaugacuuac

SEQ ID NO: 1860169 - RNA, 23 nt, Human
gaagacaaugugaaaagaaaaau

SEQ ID NO: 1860170 - RNA, 22 nt, Human
gaagacaaugacuuacuguaca

SEQ ID NO: 1860171 - RNA, 23 nt, Human
gaagcaacccaaauguucaucaa

SEQ ID NO: 1860172 - RNA, 20 nt, Human
gaagcaaugcuucaucccuu

SEQ ID NO: 1860173 - RNA, 20 nt, Human
gaagcacaugccucucucag

SEQ ID NO: 1860174 - RNA, 17 nt, Human
gaagcacaugccucucu

SEQ ID NO: 1860175 - RNA, 15 nt, Human
gaagcacaugccucu

SEQ ID NO: 1860176 - RNA, 12 nt, Human
gaggggccucuu

SEQ ID NO: 1860177 - RNA, 19 nt, Human
gaggcuccacuuggucugu

SEQ ID NO: 1860178 - RNA, 18 nt, Human
gaggcuccacuuggucug

SEQ ID NO: 1860179 - RNA, 18 nt, Human
gaggcuacuguaaggcaa

SEQ ID NO: 1860180 - RNA, 12 nt, Human
gaggcuccacuu

SEQ ID NO: 1860181 - RNA, 23 nt, Human
gaggcuccacuuggucugugaga

SEQ ID NO: 1860182 - RNA, 22 nt, Human
gaggcuagugugguguuuccug

SEQ ID NO: 1860183 - RNA, 19 nt, Human
gaggccagagacacaagcc

SEQ ID NO: 1860184 - RNA, 14 nt, Human
gaggccagagacac

SEQ ID NO: 1860185 - RNA, 13 nt, Human
gaggccagagaca

SEQ ID NO: 1860186 - RNA, 17 nt, Human
gaggcaucgcaauguaa

SEQ ID NO: 1860187 - RNA, 15 nt, Human
gaggacgcucucugg

SEQ ID NO: 1860188 - RNA, 14 nt, Human
gaggcagggucuca

SEQ ID NO: 1860189 - RNA, 22 nt, Human
gaggccaaggugggaggauugc

SEQ ID NO: 1860190 - RNA, 17 nt, Human
gaggccaaggugggagg

SEQ ID NO: 1860191 - RNA, 15 nt, Human
gaggcagggucucac

SEQ ID NO: 1860192 - RNA, 20 nt, Human
gagccuuccaggggugggac

SEQ ID NO: 1860193 - RNA, 23 nt, Human
gagccuuccaggggugggacacc

SEQ ID NO: 1860194 - RNA, 13 nt, Human
gagccuugaacuu

SEQ ID NO: 1860195 - RNA, 21 nt, Human
gagcgcccacuagacccacug

SEQ ID NO: 1860196 - RNA, 15 nt, Human
gaggucgaggcagga

SEQ ID NO: 1860197 - RNA, 23 nt, Human
gaggugaccccagguuucuaugu

SEQ ID NO: 1860198 - RNA, 17 nt, Human
gagucaccaagcccagu

SEQ ID NO: 1860199 - RNA, 16 nt, Human
gagucaccaagcccag

SEQ ID NO: 1860200 - RNA, 22 nt, Human
gagucagaaguuucugccgcag

SEQ ID NO: 1860201 - RNA, 12 nt, Human
gagucccaccuu

SEQ ID NO: 1860202 - RNA, 13 nt, Human
gagucccaccuug

SEQ ID NO: 1860203 - RNA, 18 nt, Human
gagugacagaggcagccc

SEQ ID NO: 1860204 - RNA, 17 nt, Human
gaguugauucagcucug

SEQ ID NO: 1860205 - RNA, 16 nt, Human
gaguugauucagcucu

SEQ ID NO: 1860206 - RNA, 15 nt, Human
gaguugauucagcuc

SEQ ID NO: 1860207 - RNA, 19 nt, Human
gagugcaaugacacagucu

SEQ ID NO: 1860208 - RNA, 20 nt, Human
gagugacagaggcagcccca

SEQ ID NO: 1860209 - RNA, 16 nt, Human
gaguuuaaauuguaau

SEQ ID NO: 1860210 - RNA, 22 nt, Human
gaguuguuacauuuuuaagugc

SEQ ID NO: 1860211 - RNA, 18 nt, Human
gaguugauucagcucugc

SEQ ID NO: 1860212 - RNA, 16 nt, Human
gaugagugagcaugcc

SEQ ID NO: 1860213 - RNA, 21 nt, Human
gaugaucuaggaagacuuugg

SEQ ID NO: 1860214 - RNA, 15 nt, Human
gaugaucuaggaaga

SEQ ID NO: 1860215 - RNA, 17 nt, Human
gauguagaggagaaacu

SEQ ID NO: 1860216 - RNA, 18 nt, Human
gauguagaggagaaacug

SEQ ID NO: 1860217 - RNA, 18 nt, Human
gauguaaaagacuuuuuu

SEQ ID NO: 1860218 - RNA, 12 nt, Human
gauuauuggaaa

SEQ ID NO: 1860219 - RNA, 20 nt, Human
gauuauaggcaccuaccacc

SEQ ID NO: 1860220 - RNA, 14 nt, Human
gauuauauuaugaa

SEQ ID NO: 1860221 - RNA, 20 nt, Human
gauguauguugaagccuuug

SEQ ID NO: 1860222 - RNA, 21 nt, Human
gauguauguugaagccuuugu

SEQ ID NO: 1860223 - RNA, 18 nt, Human
gauucuccugccucagcc

SEQ ID NO: 1860224 - RNA, 15 nt, Human
gauucuccugccuca

SEQ ID NO: 1860225 - RNA, 17 nt, Human
gauucuccugccucagc

SEQ ID NO: 1860226 - RNA, 20 nt, Human
gauuuuuuacagcugccugc

SEQ ID NO: 1860227 - RNA, 18 nt, Human
gauucuuccucccucccu

SEQ ID NO: 1860228 - RNA, 17 nt, Human
gauucuuccucccuccc

SEQ ID NO: 1860229 - RNA, 22 nt, Human
gcacuccccugcuggguguggc

SEQ ID NO: 1860230 - RNA, 13 nt, Human
gcacucagaagac

SEQ ID NO: 1860231 - RNA, 16 nt, Human
gcacucagaagacacu

SEQ ID NO: 1860232 - RNA, 17 nt, Human
gcacuccccugcugggu

SEQ ID NO: 1860233 - RNA, 17 nt, Human
gcacucagaagacacug

SEQ ID NO: 1860234 - RNA, 21 nt, Human
gcaccuaccaccacgcccggc

SEQ ID NO: 1860235 - RNA, 22 nt, Human
gcaccuaccaccacgcccggcu

SEQ ID NO: 1860236 - RNA, 23 nt, Human
gcaccgggccacagagaaaguac

SEQ ID NO: 1860237 - RNA, 22 nt, Human
gcacaucagcacgauuucuguu

SEQ ID NO: 1860238 - RNA, 23 nt, Human
gcacaucagcacgauuucuguuu

SEQ ID NO: 1860239 - RNA, 14 nt, Human
gcaccgggccacag

SEQ ID NO: 1860240 - RNA, 18 nt, Human
gcaagucagaauagaaau

SEQ ID NO: 1860241 - RNA, 21 nt, Human
gcacagugcaucucagcccac

SEQ ID NO: 1860242 - RNA, 20 nt, Human
gcacagugcaucucagccca

SEQ ID NO: 1860243 - RNA, 19 nt, Human
gcacagugcaucucagccc

SEQ ID NO: 1860244 - RNA, 20 nt, Human
gcacaccgggcacucagaag

SEQ ID NO: 1860245 - RNA, 22 nt, Human
gcacaagcugcacccucaggca

SEQ ID NO: 1860246 - RNA, 14 nt, Human
gcacacauuuuuua

SEQ ID NO: 1860247 - RNA, 14 nt, Human
gcacaccgggcacu

SEQ ID NO: 1860248 - RNA, 13 nt, Human
cuugcucugcuga

SEQ ID NO: 1860249 - RNA, 12 nt, Human
cuugcucugcug

SEQ ID NO: 1860250 - RNA, 23 nt, Human
cuugaaugaugccaugaggaaca

SEQ ID NO: 1860251 - RNA, 23 nt, Human
cuugccgucuaccugaggggccu

SEQ ID NO: 1860252 - RNA, 20 nt, Human
cuugccgucuaccugagggg

SEQ ID NO: 1860253 - RNA, 12 nt, Human
cuugacagggca

SEQ ID NO: 1860254 - RNA, 20 nt, Human
cuugaaugaugccaugagga

SEQ ID NO: 1860255 - RNA, 21 nt, Human
cuucuucagagacuccugcag

SEQ ID NO: 1860256 - RNA, 20 nt, Human
cuucuucagagacuccugca

SEQ ID NO: 1860257 - RNA, 22 nt, Human
cuucuucagagacuccugcagg

SEQ ID NO: 1860258 - RNA, 22 nt, Human
cuuucggggagaggcugaggac

SEQ ID NO: 1860259 - RNA, 17 nt, Human
cuuucuaaugugugaau

SEQ ID NO: 1860260 - RNA, 22 nt, Human
cuuugacgccaucccagcccca

SEQ ID NO: 1860261 - RNA, 21 nt, Human
cuuugacgccaucccagcccc

SEQ ID NO: 1860262 - RNA, 19 nt, Human
cuuugacgccaucccagcc

SEQ ID NO: 1860263 - RNA, 18 nt, Human
cuuugacgccaucccagc

SEQ ID NO: 1860264 - RNA, 16 nt, Human
cuuugagcuuaagaau

SEQ ID NO: 1860265 - RNA, 15 nt, Human
cuuuucaaaacauuu

SEQ ID NO: 1860266 - RNA, 19 nt, Human
cuuuuauuuagcaccaggg

SEQ ID NO: 1860267 - RNA, 19 nt, Human
cuuuuauaaacuuuaccuu

SEQ ID NO: 1860268 - RNA, 16 nt, Human
cuuuuauaaacuuuac

SEQ ID NO: 1860269 - RNA, 18 nt, Human
cuuuuauaaacuuuaccu

SEQ ID NO: 1860270 - RNA, 15 nt, Human
cuuuuauaaacuuua

SEQ ID NO: 1860271 - RNA, 18 nt, Human
cuuuuaggccaaaaaaau

SEQ ID NO: 1860272 - RNA, 16 nt, Human
cuuuuaggccaaaaaa

SEQ ID NO: 1860273 - RNA, 16 nt, Human
cuuuggucuacacugu

SEQ ID NO: 1860274 - RNA, 20 nt, Human
cuuuggucuacacugugcug

SEQ ID NO: 1860275 - RNA, 15 nt, Human
cuuuggugaacauug

SEQ ID NO: 1860276 - RNA, 16 nt, Human
cuuguggacacagcuc

SEQ ID NO: 1860277 - RNA, 15 nt, Human
cuuuaaaugcugcuu

SEQ ID NO: 1860278 - RNA, 14 nt, Human
cuuuaaaugcugcu

SEQ ID NO: 1860279 - RNA, 14 nt, Human
cuuguggacacagc

SEQ ID NO: 1860280 - RNA, 15 nt, Human
cuuguggacacagcu

SEQ ID NO: 1860281 - RNA, 13 nt, Human
cuuguggacacag

SEQ ID NO: 1860282 - RNA, 22 nt, Human
cuuucaauaggaaaaacugauu

SEQ ID NO: 1860283 - RNA, 21 nt, Human
cuuucaauaggaaaaacugau

SEQ ID NO: 1860284 - RNA, 20 nt, Human
cuuucaauaggaaaaacuga

SEQ ID NO: 1860285 - RNA, 17 nt, Human
cugugacuucagcucug

SEQ ID NO: 1860286 - RNA, 22 nt, Human
cugugacuucagcucuguuuua

SEQ ID NO: 1860287 - RNA, 22 nt, Human
cugugcugagucugaaggcugg

SEQ ID NO: 1860288 - RNA, 20 nt, Human
cugugcugagucugaaggcu

SEQ ID NO: 1860289 - RNA, 11 nt, Human
cugugcugccc

SEQ ID NO: 1860290 - RNA, 21 nt, Human
cugugucagguggggcagcuu

SEQ ID NO: 1860291 - RNA, 20 nt, Human
cugugucagcauagaaguaa

SEQ ID NO: 1860292 - RNA, 19 nt, Human
cugugucagguggggcagc

SEQ ID NO: 1860293 - RNA, 19 nt, Human
cugugucucccuucauccu

SEQ ID NO: 1860294 - RNA, 14 nt, Human
cugugucucccuuc

SEQ ID NO: 1860295 - RNA, 14 nt, Human
cugugucuugcaau

SEQ ID NO: 1860296 - RNA, 13 nt, Human
cuguucagcucca

SEQ ID NO: 1860297 - RNA, 14 nt, Human
cuguucagcuccag

SEQ ID NO: 1860298 - RNA, 15 nt, Human
cuguucacucuacuu

SEQ ID NO: 1860299 - RNA, 20 nt, Human
cugugucuugcaauggcagc

SEQ ID NO: 1860300 - RNA, 16 nt, Human
cugugucuugcaaugg

SEQ ID NO: 1860301 - RNA, 19 nt, Human
cugugucuugcaauggcag

SEQ ID NO: 1860302 - RNA, 14 nt, Human
cuguugcugccuca

SEQ ID NO: 1860303 - RNA, 17 nt, Human
cuguugcugccucaugc

SEQ ID NO: 1860304 - RNA, 16 nt, Human
cuguugcugccucaug

SEQ ID NO: 1860305 - RNA, 15 nt, Human
cuguugcugccucau

SEQ ID NO: 1860306 - RNA, 20 nt, Human
cuguugggccaggagccucc

SEQ ID NO: 1860307 - RNA, 17 nt, Human
cuguugggccaggagcc

SEQ ID NO: 1860308 - RNA, 16 nt, Human
cuguugggccaggagc

SEQ ID NO: 1860309 - RNA, 20 nt, Human
cuuaaaauauuccugcauuu

SEQ ID NO: 1860310 - RNA, 18 nt, Human
cuuaaaauauuccugcau

SEQ ID NO: 1860311 - RNA, 13 nt, Human
cuuacacaauggu

SEQ ID NO: 1860312 - RNA, 15 nt, Human
cuuaaagaguguggc

SEQ ID NO: 1860313 - RNA, 21 nt, Human
cuuaaagaguguggcaaaaua

SEQ ID NO: 1860314 - RNA, 17 nt, Human
cuuacccucauguucuu

SEQ ID NO: 1860315 - RNA, 18 nt, Human
cuuacccucauguucuua

SEQ ID NO: 1860316 - RNA, 19 nt, Human
cuuacccucauguucuuaa

SEQ ID NO: 1860317 - RNA, 13 nt, Human
cuuaccucggugc

SEQ ID NO: 1860318 - RNA, 13 nt, Human
cuuaccugccagg

SEQ ID NO: 1860319 - RNA, 21 nt, Human
cuuaccucggugccuuccucu

SEQ ID NO: 1860320 - RNA, 19 nt, Human
cuuaccucggugccuuccu

SEQ ID NO: 1860321 - RNA, 18 nt, Human
cuuagcagggaaacagcu

SEQ ID NO: 1860322 - RNA, 21 nt, Human
cuuagcagggaaacagcuaau

SEQ ID NO: 1860323 - RNA, 21 nt, Human
cuuaugggcuggguucuaccc

SEQ ID NO: 1860324 - RNA, 14 nt, Human
cuuaugggcugggu

SEQ ID NO: 1860325 - RNA, 23 nt, Human
cuuaugggcuggguucuacccag

SEQ ID NO: 1860326 - RNA, 22 nt, Human
cuuaugggcuggguucuaccca

SEQ ID NO: 1860327 - RNA, 12 nt, Human
cuuauugcccac

SEQ ID NO: 1860328 - RNA, 13 nt, Human
cuuauugcccacg

SEQ ID NO: 1860329 - RNA, 20 nt, Human
cuuccaugucgccucugcau

SEQ ID NO: 1860330 - RNA, 19 nt, Human
cuuccaugucgccucugca

SEQ ID NO: 1860331 - RNA, 18 nt, Human
cuuccaugucgccucugc

SEQ ID NO: 1860332 - RNA, 17 nt, Human
cuuccaugucgccucug

SEQ ID NO: 1860333 - RNA, 20 nt, Human
cuuccagugaggcucugccc

SEQ ID NO: 1860334 - RNA, 19 nt, Human
cuuccagugaggcucugcc

SEQ ID NO: 1860335 - RNA, 17 nt, Human
cuuccagugaggcucug

SEQ ID NO: 1860336 - RNA, 18 nt, Human
cuuccagugaggcucugc

SEQ ID NO: 1860337 - RNA, 17 nt, Human
cuuccauggacuuuguu

SEQ ID NO: 1860338 - RNA, 16 nt, Human
cuuccauggacuuugu

SEQ ID NO: 1860339 - RNA, 16 nt, Human
cuuccaugucgccucu

SEQ ID NO: 1860340 - RNA, 15 nt, Human
cuuccaugucgccuc

SEQ ID NO: 1860341 - RNA, 15 nt, Human
cuucauccuccucag

SEQ ID NO: 1860342 - RNA, 13 nt, Human
cuucaucccucug

SEQ ID NO: 1860343 - RNA, 18 nt, Human
cuucaguuaagccuuugg

SEQ ID NO: 1860344 - RNA, 24 nt, Human
cuucagagacuccugcaggcagcc

SEQ ID NO: 1860345 - RNA, 23 nt, Human
cuucagagacuccugcaggcagc

SEQ ID NO: 1860346 - RNA, 17 nt, Human
cuucaguuaagccuuug

SEQ ID NO: 1860347 - RNA, 18 nt, Human
cuucaguggcagcugcuu

SEQ ID NO: 1860348 - RNA, 16 nt, Human
cuucauccuccucaga

SEQ ID NO: 1860349 - RNA, 22 nt, Human
cuucaucucccaaagugcuggg

SEQ ID NO: 1860350 - RNA, 11 nt, Human
cuucagacaua

SEQ ID NO: 1860351 - RNA, 22 nt, Human
cuucagagacuccugcaggcag

SEQ ID NO: 1860352 - RNA, 21 nt, Human
cuucagagacuccugcaggca

SEQ ID NO: 1860353 - RNA, 16 nt, Human
cuucagagacuccugc

SEQ ID NO: 1860354 - RNA, 14 nt, Human
cuucaccuuugucc

SEQ ID NO: 1860355 - RNA, 18 nt, Human
cuuauugcccacgcugga

SEQ ID NO: 1860356 - RNA, 20 nt, Human
cuucaccuuuguccccaccg

SEQ ID NO: 1860357 - RNA, 17 nt, Human
cuucaccuuugucccca

SEQ ID NO: 1860358 - RNA, 12 nt, Human
cugcugaaggcu

SEQ ID NO: 1860359 - RNA, 16 nt, Human
cugcucacauaucugu

SEQ ID NO: 1860360 - RNA, 19 nt, Human
cugcucacauaucugucau

SEQ ID NO: 1860361 - RNA, 14 nt, Human
cugcucacauaucu

SEQ ID NO: 1860362 - RNA, 23 nt, Human
cugcugagucccaggcugagccu

SEQ ID NO: 1860363 - RNA, 19 nt, Human
cugcugagucccaggcuga

SEQ ID NO: 1860364 - RNA, 13 nt, Human
cugcugacagugu

SEQ ID NO: 1860365 - RNA, 15 nt, Human
cugcugacaguguug

SEQ ID NO: 1860366 - RNA, 14 nt, Human
cugcugaaggcucg

SEQ ID NO: 1860367 - RNA, 13 nt, Human
cugcugaaggcuc

SEQ ID NO: 1860368 - RNA, 15 nt, Human
cugcugaaggcucga

SEQ ID NO: 1860369 - RNA, 12 nt, Human
cugcugacagug

SEQ ID NO: 1860370 - RNA, 20 nt, Human
cugcuuaacuucacauauug

SEQ ID NO: 1860371 - RNA, 22 nt, Human
cuggaugcagccucacaguccu

SEQ ID NO: 1860372 - RNA, 15 nt, Human
cuggaugcagccuca

SEQ ID NO: 1860373 - RNA, 15 nt, Human
cuggaguucugguuc

SEQ ID NO: 1860374 - RNA, 17 nt, Human
cuggaguucugguuccu

SEQ ID NO: 1860375 - RNA, 16 nt, Human
cuggaguucugguucc

SEQ ID NO: 1860376 - RNA, 23 nt, Human
cuggacugugugcucaggagccc

SEQ ID NO: 1860377 - RNA, 22 nt, Human
cuggacugugugcucaggagcc

SEQ ID NO: 1860378 - RNA, 19 nt, Human
cuggacugugugcucagga

SEQ ID NO: 1860379 - RNA, 12 nt, Human
cuggcccuuccu

SEQ ID NO: 1860380 - RNA, 22 nt, Human
cuggcuaugcauuugaaaauuu

SEQ ID NO: 1860381 - RNA, 15 nt, Human
cuggcuaugcauuug

SEQ ID NO: 1860382 - RNA, 16 nt, Human
cuggcuaugcauuuga

SEQ ID NO: 1860383 - RNA, 13 nt, Human
cuggcuaugcauu

SEQ ID NO: 1860384 - RNA, 14 nt, Human
cuggcuaugcauuu

SEQ ID NO: 1860385 - RNA, 22 nt, Human
cugggacaugggaaaggggaag

SEQ ID NO: 1860386 - RNA, 18 nt, Human
cugggacaugggaaaggg

SEQ ID NO: 1860387 - RNA, 14 nt, Human
cugggacaugggaa

SEQ ID NO: 1860388 - RNA, 22 nt, Human
cugggagaaccaaaaagaggcu

SEQ ID NO: 1860389 - RNA, 17 nt, Human
cugggagaaaugaaaaa

SEQ ID NO: 1860390 - RNA, 16 nt, Human
cugggagaaaugaaaa

SEQ ID NO: 1860391 - RNA, 13 nt, Human
cugggacuacagg

SEQ ID NO: 1860392 - RNA, 15 nt, Human
cugggacuacaggca

SEQ ID NO: 1860393 - RNA, 16 nt, Human
cugggacuacaggcac

SEQ ID NO: 1860394 - RNA, 21 nt, Human
cuggugccucaccccuugcca

SEQ ID NO: 1860395 - RNA, 21 nt, Human
cuggguggcaccagcagccug

SEQ ID NO: 1860396 - RNA, 14 nt, Human
cuggguguggcgca

SEQ ID NO: 1860397 - RNA, 15 nt, Human
cuggguguggcgcag

SEQ ID NO: 1860398 - RNA, 20 nt, Human
cugggcagaggaaagcaaag

SEQ ID NO: 1860399 - RNA, 16 nt, Human
cugggcagaggaaagc

SEQ ID NO: 1860400 - RNA, 13 nt, Human
cugggcagaggaa

SEQ ID NO: 1860401 - RNA, 12 nt, Human
cugggcagagga

SEQ ID NO: 1860402 - RNA, 20 nt, Human
cugggcagguuggugggggc

SEQ ID NO: 1860403 - RNA, 20 nt, Human
cuggguggcaccagcagccu

SEQ ID NO: 1860404 - RNA, 18 nt, Human
cuggguggcaccagcagc

SEQ ID NO: 1860405 - RNA, 13 nt, Human
cuggggagaaagu

SEQ ID NO: 1860406 - RNA, 14 nt, Human
cuggggagaaagua

SEQ ID NO: 1860407 - RNA, 19 nt, Human
cugcccugugggcccccaa

SEQ ID NO: 1860408 - RNA, 18 nt, Human
cugccccuccucucugcc

SEQ ID NO: 1860409 - RNA, 17 nt, Human
cugccccuccucucugc

SEQ ID NO: 1860410 - RNA, 17 nt, Human
cugccccucccuucaac

SEQ ID NO: 1860411 - RNA, 14 nt, Human
cugccccucccuuc

SEQ ID NO: 1860412 - RNA, 13 nt, Human
cugccccucccuu

SEQ ID NO: 1860413 - RNA, 17 nt, Human
cugcccuuaccugccag

SEQ ID NO: 1860414 - RNA, 16 nt, Human
cugcccuuaccugcca

SEQ ID NO: 1860415 - RNA, 12 nt, Human
cugcccuuaccu

SEQ ID NO: 1860416 - RNA, 19 nt, Human
cugccccuccucucugccc

SEQ ID NO: 1860417 - RNA, 16 nt, Human
cugccauauucuguug

SEQ ID NO: 1860418 - RNA, 16 nt, Human
cugccauccagguuca

SEQ ID NO: 1860419 - RNA, 18 nt, Human
cugccauccagguucagc

SEQ ID NO: 1860420 - RNA, 19 nt, Human
cugccauccagguucagcu

SEQ ID NO: 1860421 - RNA, 13 nt, Human
cugccccccagcc

SEQ ID NO: 1860422 - RNA, 17 nt, Human
cugccagucccccugcc

SEQ ID NO: 1860423 - RNA, 21 nt, Human
cugccagucccccugccccag

SEQ ID NO: 1860424 - RNA, 20 nt, Human
cugccagucccccugcccca

SEQ ID NO: 1860425 - RNA, 22 nt, Human
cugccagucccccugccccagg

SEQ ID NO: 1860426 - RNA, 22 nt, Human
cugccagggacagagggggugg

SEQ ID NO: 1860427 - RNA, 20 nt, Human
cugccagggacagagggggu

SEQ ID NO: 1860428 - RNA, 17 nt, Human
cugcauuuaaaagauac

SEQ ID NO: 1860429 - RNA, 18 nt, Human
cugcauuuaaaagauaca

SEQ ID NO: 1860430 - RNA, 23 nt, Human
cugccagggacagaggggguggc

SEQ ID NO: 1860431 - RNA, 13 nt, Human
cugcauuggcuuu

SEQ ID NO: 1860432 - RNA, 14 nt, Human
cugcauuuaaaaga

SEQ ID NO: 1860433 - RNA, 20 nt, Human
cugcaggcagccaggccaca

SEQ ID NO: 1860434 - RNA, 19 nt, Human
cugcaggcagccaggccac

SEQ ID NO: 1860435 - RNA, 18 nt, Human
cugcaggcagccaggcca

SEQ ID NO: 1860436 - RNA, 17 nt, Human
cugcaggcagccaggcc

SEQ ID NO: 1860437 - RNA, 16 nt, Human
cugcaggcagccaggc

SEQ ID NO: 1860438 - RNA, 15 nt, Human
cugcaggcagccagg

SEQ ID NO: 1860439 - RNA, 14 nt, Human
cugcaggcagccag

SEQ ID NO: 1860440 - RNA, 13 nt, Human
cugcaggcagcca

SEQ ID NO: 1860441 - RNA, 12 nt, Human
cugcagcuuugu

SEQ ID NO: 1860442 - RNA, 17 nt, Human
cugcacuccagccuggg

SEQ ID NO: 1860443 - RNA, 16 nt, Human
cugcacuccagccugg

SEQ ID NO: 1860444 - RNA, 18 nt, Human
cugcacuccagccugggu

SEQ ID NO: 1860445 - RNA, 24 nt, Human
cugcagccucaaccuccugggcua

SEQ ID NO: 1860446 - RNA, 19 nt, Human
cugcacuccagccugggug

SEQ ID NO: 1860447 - RNA, 23 nt, Human
cugcagccucaaccuccugggcu

SEQ ID NO: 1860448 - RNA, 16 nt, Human
cugcacuauagccuag

SEQ ID NO: 1860449 - RNA, 17 nt, Human
cugcacuauagccuagg

SEQ ID NO: 1860450 - RNA, 18 nt, Human
cugcacuauagccuaggu

SEQ ID NO: 1860451 - RNA, 20 nt, Human
cugcacuauagccuagguga

SEQ ID NO: 1860452 - RNA, 17 nt, Human
cugcacuccagccugag

SEQ ID NO: 1860453 - RNA, 20 nt, Human
cugcacuccagccugagcga

SEQ ID NO: 1860454 - RNA, 16 nt, Human
cugcacuccagccuga

SEQ ID NO: 1860455 - RNA, 15 nt, Human
cugcacuccagccug

SEQ ID NO: 1860456 - RNA, 13 nt, Human
cugcacuccagcc

SEQ ID NO: 1860457 - RNA, 22 nt, Human
cugcacuauagccuaggugaca

SEQ ID NO: 1860458 - RNA, 23 nt, Human
cugcacuauagccuaggugacag

SEQ ID NO: 1860459 - RNA, 18 nt, Human
cugcaagaauugaagcag

SEQ ID NO: 1860460 - RNA, 19 nt, Human
cugcaacuuguaaaugugg

SEQ ID NO: 1860461 - RNA, 18 nt, Human
cugcaacuuguaaaugug

SEQ ID NO: 1860462 - RNA, 15 nt, Human
cugcaacuucugccu

SEQ ID NO: 1860463 - RNA, 14 nt, Human
cugcaacuucugcc

SEQ ID NO: 1860464 - RNA, 22 nt, Human
cugcaaccugauugugucucuu

SEQ ID NO: 1860465 - RNA, 22 nt, Human
cugcaaccuucgccaccugggu

SEQ ID NO: 1860466 - RNA, 20 nt, Human
cugcaaccuucgccaccugg

SEQ ID NO: 1860467 - RNA, 19 nt, Human
cugcaaccuucgccaccug

SEQ ID NO: 1860468 - RNA, 17 nt, Human
cugcaaccuucgccacc

SEQ ID NO: 1860469 - RNA, 20 nt, Human
cugcaaccuccgccucuugg

SEQ ID NO: 1860470 - RNA, 21 nt, Human
cugcaaccugauugugucucu

SEQ ID NO: 1860471 - RNA, 19 nt, Human
cugcaaccugauugugucu

SEQ ID NO: 1860472 - RNA, 14 nt, Human
cugcaaccugauug

SEQ ID NO: 1860473 - RNA, 22 nt, Human
cugcaaccuccgccucuugggu

SEQ ID NO: 1860474 - RNA, 20 nt, Human
cugcaagaauugaagcagga

SEQ ID NO: 1860475 - RNA, 12 nt, Human
cugcaagggagu

SEQ ID NO: 1860476 - RNA, 23 nt, Human
cugcaccgggccacagagaaagu

SEQ ID NO: 1860477 - RNA, 17 nt, Human
cugaugcuucuucagag

SEQ ID NO: 1860478 - RNA, 16 nt, Human
cugaugcuucuucaga

SEQ ID NO: 1860479 - RNA, 15 nt, Human
cucuuaugggcuggg

SEQ ID NO: 1860480 - RNA, 14 nt, Human
cucuuaugggcugg

SEQ ID NO: 1860481 - RNA, 20 nt, Human
cugaugcuucuucagagacu

SEQ ID NO: 1860482 - RNA, 19 nt, Human
cugaugcuucuucagagac

SEQ ID NO: 1860483 - RNA, 18 nt, Human
cugaugcuucuucagaga

SEQ ID NO: 1860484 - RNA, 18 nt, Human
cugaugggcaacccccag

SEQ ID NO: 1860485 - RNA, 21 nt, Human
cugaugggcaacccccagccu

SEQ ID NO: 1860486 - RNA, 24 nt, Human
cugaugggcaacccccagccugcu

SEQ ID NO: 1860487 - RNA, 22 nt, Human
cugaugggcaacccccagccug

SEQ ID NO: 1860488 - RNA, 23 nt, Human
cugaugggcaacccccagccugc

SEQ ID NO: 1860489 - RNA, 18 nt, Human
cugcaaagcccagcuuga

SEQ ID NO: 1860490 - RNA, 17 nt, Human
cugcaaagcccagcuug

SEQ ID NO: 1860491 - RNA, 21 nt, Human
cugcaaaggguaucaggugcu

SEQ ID NO: 1860492 - RNA, 22 nt, Human
cugcaaaggguaucaggugcug

SEQ ID NO: 1860493 - RNA, 14 nt, Human
aaauucaugcugcu

SEQ ID NO: 1860494 - RNA, 21 nt, Human
aaauuaacuuuuauaaacuuu

SEQ ID NO: 1860495 - RNA, 19 nt, Human
aaauuaacuuuuauaaacu

SEQ ID NO: 1860496 - RNA, 20 nt, Human
aaauguuaaguugaugguga

SEQ ID NO: 1860497 - RNA, 22 nt, Human
aaauuaacuuuuauaaacuuua

SEQ ID NO: 1860498 - RNA, 23 nt, Human
aaauuaacuuuuauaaacuuuac

SEQ ID NO: 1860499 - RNA, 16 nt, Human
guauuuaauucauguu

SEQ ID NO: 1860500 - RNA, 22 nt, Human
guauuggcuagagguucaaaga

SEQ ID NO: 1860501 - RNA, 18 nt, Human
gucaaaguggugagaggc

SEQ ID NO: 1860502 - RNA, 19 nt, Human
gucaaaguggugagaggca

SEQ ID NO: 1860503 - RNA, 17 nt, Human
guauuuuuuuacuaaua

SEQ ID NO: 1860504 - RNA, 21 nt, Human
guauuuuuuuacuaauagaca

SEQ ID NO: 1860505 - RNA, 16 nt, Human
gucacacacuuuggcu

SEQ ID NO: 1860506 - RNA, 20 nt, Human
gucacacaguauuacuucug

SEQ ID NO: 1860507 - RNA, 14 nt, Human
guauuuuuuuacua

SEQ ID NO: 1860508 - RNA, 15 nt, Human
guauuuuuuuacuaa

SEQ ID NO: 1860509 - RNA, 22 nt, Human
aaauuuccacucaggucuguuu

SEQ ID NO: 1860510 - RNA, 14 nt, Human
aaauuuccacucag

SEQ ID NO: 1860511 - RNA, 18 nt, Human
aaauuucagcagcugcag

SEQ ID NO: 1860512 - RNA, 17 nt, Human
aaauuucagcagcugca

SEQ ID NO: 1860513 - RNA, 14 nt, Human
guaugggagagaag

SEQ ID NO: 1860514 - RNA, 22 nt, Human
guaugaucacggcucacugcag

SEQ ID NO: 1860515 - RNA, 15 nt, Human
guaucccuacuguaa

SEQ ID NO: 1860516 - RNA, 15 nt, Human
guaugggagagaaga

SEQ ID NO: 1860517 - RNA, 16 nt, Human
guaugggacuggccuc

SEQ ID NO: 1860518 - RNA, 13 nt, Human
guaugguggcugg

SEQ ID NO: 1860519 - RNA, 15 nt, Human
guauucuuauuuaau

SEQ ID NO: 1860520 - RNA, 21 nt, Human
guauaaaagccuguuuaagag

SEQ ID NO: 1860521 - RNA, 18 nt, Human
guauaaaagccuguuuaa

SEQ ID NO: 1860522 - RNA, 18 nt, Human
guauaaaagggacugaga

SEQ ID NO: 1860523 - RNA, 22 nt, Human
guauauugauccagaaagaaaa

SEQ ID NO: 1860524 - RNA, 19 nt, Human
aaaugggggugcauuugag

SEQ ID NO: 1860525 - RNA, 17 nt, Human
aaaugggggugcauuug

SEQ ID NO: 1860526 - RNA, 18 nt, Human
aaaugggggugcauuuga

SEQ ID NO: 1860527 - RNA, 15 nt, Human
aaaugggggugcauu

SEQ ID NO: 1860528 - RNA, 16 nt, Human
aaaugggggugcauuu

SEQ ID NO: 1860529 - RNA, 17 nt, Human
guauaaaagccuguuua

SEQ ID NO: 1860530 - RNA, 19 nt, Human
aaaucuacacuccagugag

SEQ ID NO: 1860531 - RNA, 15 nt, Human
aaaucucaaauuucu

SEQ ID NO: 1860532 - RNA, 16 nt, Human
aaaucucaaauuucua

SEQ ID NO: 1860533 - RNA, 17 nt, Human
aaaucucaaauuucuaa

SEQ ID NO: 1860534 - RNA, 19 nt, Human
aaaucucaaauuucuaaau

SEQ ID NO: 1860535 - RNA, 11 nt, Human
aaaugaaaauu

SEQ ID NO: 1860536 - RNA, 17 nt, Human
aaaugaaaaucgugaca

SEQ ID NO: 1860537 - RNA, 18 nt, Human
aaaucccuuaccucggug

SEQ ID NO: 1860538 - RNA, 15 nt, Human
aaaucccauuuaaaa

SEQ ID NO: 1860539 - RNA, 13 nt, Human
aaaucgaugcagu

SEQ ID NO: 1860540 - RNA, 17 nt, Human
aaaggagagcuagcagc

SEQ ID NO: 1860541 - RNA, 17 nt, Human
guagcuggauuacaggc

SEQ ID NO: 1860542 - RNA, 12 nt, Human
guagcugggacu

SEQ ID NO: 1860543 - RNA, 18 nt, Human
guagcugggacuacaggc

SEQ ID NO: 1860544 - RNA, 19 nt, Human
guagcugggacuacaggca

SEQ ID NO: 1860545 - RNA, 18 nt, Human
guagcugggauuacaggc

SEQ ID NO: 1860546 - RNA, 21 nt, Human
guagcugggacuacaggcacc

SEQ ID NO: 1860547 - RNA, 15 nt, Human
guaggaagacuuugg

SEQ ID NO: 1860548 - RNA, 15 nt, Human
guaggacuguagaaa

SEQ ID NO: 1860549 - RNA, 18 nt, Human
guaggaagguuaauguuc

SEQ ID NO: 1860550 - RNA, 19 nt, Human
aaaugagccuggcaagaau

SEQ ID NO: 1860551 - RNA, 13 nt, Human
aaaugagccuggc

SEQ ID NO: 1860552 - RNA, 16 nt, Human
aaaugagaaaucuaaa

SEQ ID NO: 1860553 - RNA, 14 nt, Human
aaaugagaaaucua

SEQ ID NO: 1860554 - RNA, 13 nt, Human
aaaugagaaaucu

SEQ ID NO: 1860555 - RNA, 23 nt, Human
aaaugauccccagcuguuuaugc

SEQ ID NO: 1860556 - RNA, 23 nt, Human
aaaugagguacucuccuggaaau

SEQ ID NO: 1860557 - RNA, 16 nt, Human
aaaugagguacucucc

SEQ ID NO: 1860558 - RNA, 17 nt, Human
aaaugaggucagagccu

SEQ ID NO: 1860559 - RNA, 19 nt, Human
aaaugaggucagagccugc

SEQ ID NO: 1860560 - RNA, 11 nt, Human
aaaugagaaau

SEQ ID NO: 1860561 - RNA, 21 nt, Human
aaaugaaagcagggacuugaa

SEQ ID NO: 1860562 - RNA, 22 nt, Human
aaaugaaagcagggacuugaac

SEQ ID NO: 1860563 - RNA, 14 nt, Human
aaaugaaagugaga

SEQ ID NO: 1860564 - RNA, 13 nt, Human
aaaugcauguugc

SEQ ID NO: 1860565 - RNA, 18 nt, Human
aaaugcaccuggaauaua

SEQ ID NO: 1860566 - RNA, 22 nt, Human
aaaugcaccuggaauauauaac

SEQ ID NO: 1860567 - RNA, 14 nt, Human
aaaugcaccuggaa

SEQ ID NO: 1860568 - RNA, 23 nt, Human
aaaugccuuacccucauguucuu

SEQ ID NO: 1860569 - RNA, 20 nt, Human
aaaugggcagagcagagacc

SEQ ID NO: 1860570 - RNA, 18 nt, Human
aaaugggcagagcagaga

SEQ ID NO: 1860571 - RNA, 15 nt, Human
aaaugggcagagcag

SEQ ID NO: 1860572 - RNA, 13 nt, Human
aaaugcccagcuu

SEQ ID NO: 1860573 - RNA, 18 nt, Human
aaaugcccagccccuucu

SEQ ID NO: 1860574 - RNA, 15 nt, Human
aaaugcccagccccu

SEQ ID NO: 1860575 - RNA, 14 nt, Human
aaaugcccagcccc

SEQ ID NO: 1860576 - RNA, 13 nt, Human
aaaugcccagccc

SEQ ID NO: 1860577 - RNA, 14 nt, Human
aaaugcauuucuaa

SEQ ID NO: 1860578 - RNA, 16 nt, Human
gucucccucccuuggg

SEQ ID NO: 1860579 - RNA, 21 nt, Human
aaccaucauugaaaucuuuuu

SEQ ID NO: 1860580 - RNA, 23 nt, Human
aaccaucauugaaaucuuuuugc

SEQ ID NO: 1860581 - RNA, 20 nt, Human
aaccaucauugaaaucuuuu

SEQ ID NO: 1860582 - RNA, 19 nt, Human
aaccaucauugaaaucuuu

SEQ ID NO: 1860583 - RNA, 20 nt, Human
aaccacaucuugcucugcug

SEQ ID NO: 1860584 - RNA, 22 nt, Human
aaccacaucuugcucugcugac

SEQ ID NO: 1860585 - RNA, 18 nt, Human
aaccacaucuugcucugc

SEQ ID NO: 1860586 - RNA, 17 nt, Human
aaccuccgccucuuggg

SEQ ID NO: 1860587 - RNA, 14 nt, Human
aaccuccugggcua

SEQ ID NO: 1860588 - RNA, 13 nt, Human
aacccccagccug

SEQ ID NO: 1860589 - RNA, 14 nt, Human
aacccccagccugc

SEQ ID NO: 1860590 - RNA, 15 nt, Human
aacccccagccugcu

SEQ ID NO: 1860591 - RNA, 17 nt, Human
aacccagcucuggucca

SEQ ID NO: 1860592 - RNA, 20 nt, Human
aacccauauuuguacaccaa

SEQ ID NO: 1860593 - RNA, 18 nt, Human
aacccaaauguucaucaa

SEQ ID NO: 1860594 - RNA, 11 nt, Human
aacccagcucu

SEQ ID NO: 1860595 - RNA, 14 nt, Human
aacccagcucuggu

SEQ ID NO: 1860596 - RNA, 13 nt, Human
aacccagcucugg

SEQ ID NO: 1860597 - RNA, 13 nt, Human
aacccaaauguuc

SEQ ID NO: 1860598 - RNA, 13 nt, Human
aacucccuuucaa

SEQ ID NO: 1860599 - RNA, 14 nt, Human
aacucccuuucaac

SEQ ID NO: 1860600 - RNA, 19 nt, Human
gugaaccaccacacccagc

SEQ ID NO: 1860601 - RNA, 19 nt, Human
aacucccugccccccagcc

SEQ ID NO: 1860602 - RNA, 13 nt, Human
aacucccugcccc

SEQ ID NO: 1860603 - RNA, 19 nt, Human
aacguggcugcuucaagga

SEQ ID NO: 1860604 - RNA, 16 nt, Human
aacguggcugcuucaa

SEQ ID NO: 1860605 - RNA, 22 nt, Human
aacguggcugcuucaaggaucc

SEQ ID NO: 1860606 - RNA, 15 nt, Human
aacguggcugcuuca

SEQ ID NO: 1860607 - RNA, 20 nt, Human
aaccugcucuccucuugcca

SEQ ID NO: 1860608 - RNA, 15 nt, Human
aaccugcucuccucu

SEQ ID NO: 1860609 - RNA, 11 nt, Human
aaccugcucuc

SEQ ID NO: 1860610 - RNA, 15 nt, Human
gucuggcuucacaga

SEQ ID NO: 1860611 - RNA, 15 nt, Human
gucuuuggacccuga

SEQ ID NO: 1860612 - RNA, 14 nt, Human
gucuuuggacccug

SEQ ID NO: 1860613 - RNA, 17 nt, Human
gucuuuggacccugagg

SEQ ID NO: 1860614 - RNA, 18 nt, Human
gucuuuggacccugaggc

SEQ ID NO: 1860615 - RNA, 19 nt, Human
gucuuuucuugcaugaggc

SEQ ID NO: 1860616 - RNA, 14 nt, Human
gucuuuucuugcau

SEQ ID NO: 1860617 - RNA, 24 nt, Human
gucuuuucuugcaugaggcuagug

SEQ ID NO: 1860618 - RNA, 15 nt, Human
gucuuagauguauau

SEQ ID NO: 1860619 - RNA, 21 nt, Human
aacacuguucucugcccucca

SEQ ID NO: 1860620 - RNA, 11 nt, Human
aacacuuccau

SEQ ID NO: 1860621 - RNA, 21 nt, Human
gucauuugagcagggcucagc

SEQ ID NO: 1860622 - RNA, 22 nt, Human
gucauuugagcagggcucagcg

SEQ ID NO: 1860623 - RNA, 15 nt, Human
guccacaacacacag

SEQ ID NO: 1860624 - RNA, 21 nt, Human
aacacucauugaccugaggcc

SEQ ID NO: 1860625 - RNA, 11 nt, Human
aacacucugag

SEQ ID NO: 1860626 - RNA, 12 nt, Human
aacacuccuuca

SEQ ID NO: 1860627 - RNA, 13 nt, Human
aacacucugagac

SEQ ID NO: 1860628 - RNA, 12 nt, Human
aacacucugaga

SEQ ID NO: 1860629 - RNA, 14 nt, Human
aacacucugagacu

SEQ ID NO: 1860630 - RNA, 20 nt, Human
aacacuguucucugcccucc

SEQ ID NO: 1860631 - RNA, 15 nt, Human
aacacuguucucugc

SEQ ID NO: 1860632 - RNA, 23 nt, Human
aaauuuuuaaucuuuaauuuuac

SEQ ID NO: 1860633 - RNA, 16 nt, Human
gucacaggcaggucca

SEQ ID NO: 1860634 - RNA, 13 nt, Human
gucacaggcaggu

SEQ ID NO: 1860635 - RNA, 15 nt, Human
gucacaggcaggucc

SEQ ID NO: 1860636 - RNA, 16 nt, Human
aacaagaccacguuuc

SEQ ID NO: 1860637 - RNA, 17 nt, Human
aacaagaccacguuucu

SEQ ID NO: 1860638 - RNA, 19 nt, Human
aacaagaccacguuucuaa

SEQ ID NO: 1860639 - RNA, 20 nt, Human
aacaagaccacguuucuaaa

SEQ ID NO: 1860640 - RNA, 21 nt, Human
aacaagccuccuuuuaaagua

SEQ ID NO: 1860641 - RNA, 23 nt, Human
aacaaggcaaggcugucaauuac

SEQ ID NO: 1860642 - RNA, 10 nt, Human
aacagaaaug

SEQ ID NO: 1860643 - RNA, 11 nt, Human
aacagaaaugu

SEQ ID NO: 1860644 - RNA, 21 nt, Human
aacagaaauguacagcaagga

SEQ ID NO: 1860645 - RNA, 13 nt, Human
guccgagcuuuga

SEQ ID NO: 1860646 - RNA, 15 nt, Human
gucccaacuuguaaa

SEQ ID NO: 1860647 - RNA, 21 nt, Human
guccggucccugucccagugc

SEQ ID NO: 1860648 - RNA, 19 nt, Human
aacagacuggaagcacagc

SEQ ID NO: 1860649 - RNA, 22 nt, Human
aacaggcugggcuucaguggca

SEQ ID NO: 1860650 - RNA, 13 nt, Human
aacaggcugggcu

SEQ ID NO: 1860651 - RNA, 23 nt, Human
aacaggcugggcuucaguggcag

SEQ ID NO: 1860652 - RNA, 22 nt, Human
aacaguagugauaguuguaccg

SEQ ID NO: 1860653 - RNA, 15 nt, Human
aacauacucccaucu

SEQ ID NO: 1860654 - RNA, 14 nt, Human
aacauacucccauc

SEQ ID NO: 1860655 - RNA, 14 nt, Human
aacauugcaauaga

SEQ ID NO: 1860656 - RNA, 15 nt, Human
aacauugcaauagaa

SEQ ID NO: 1860657 - RNA, 16 nt, Human
aacauugcaauagaaa

SEQ ID NO: 1860658 - RNA, 20 nt, Human
aacauuuguucuauagcuuu

SEQ ID NO: 1860659 - RNA, 17 nt, Human
aacauugcaauagaaau

SEQ ID NO: 1860660 - RNA, 21 nt, Human
aagcucuacugaggugcuaug

SEQ ID NO: 1860661 - RNA, 22 nt, Human
aagcuauucaguaauaacucua

SEQ ID NO: 1860662 - RNA, 17 nt, Human
aagcuaucguaaaauua

SEQ ID NO: 1860663 - RNA, 20 nt, Human
guucccuacuuccugugacu

SEQ ID NO: 1860664 - RNA, 16 nt, Human
guucccauuugcuccu

SEQ ID NO: 1860665 - RNA, 20 nt, Human
guucccauuugcuccuuucu

SEQ ID NO: 1860666 - RNA, 20 nt, Human
guuccauggccucuucagau

SEQ ID NO: 1860667 - RNA, 14 nt, Human
guucuucaucuaag

SEQ ID NO: 1860668 - RNA, 21 nt, Human
guucuugguuuguaaauuaac

SEQ ID NO: 1860669 - RNA, 19 nt, Human
guucuuaguugcuguaugu

SEQ ID NO: 1860670 - RNA, 17 nt, Human
guucuuaguuugcaguu

SEQ ID NO: 1860671 - RNA, 22 nt, Human
guugaugaucuuugcagacagg

SEQ ID NO: 1860672 - RNA, 16 nt, Human
guucuacccaggugcu

SEQ ID NO: 1860673 - RNA, 22 nt, Human
guucccuuugacgccaucccag

SEQ ID NO: 1860674 - RNA, 21 nt, Human
guucccuuugacgccauccca

SEQ ID NO: 1860675 - RNA, 20 nt, Human
guucccuuugacgccauccc

SEQ ID NO: 1860676 - RNA, 13 nt, Human
guucucuccuucu

SEQ ID NO: 1860677 - RNA, 19 nt, Human
aagccuccuccagccgcca

SEQ ID NO: 1860678 - RNA, 17 nt, Human
aagcuaggccuggccag

SEQ ID NO: 1860679 - RNA, 18 nt, Human
aagcuaggccuggccaga

SEQ ID NO: 1860680 - RNA, 22 nt, Human
aagcuaggccuggccagaugca

SEQ ID NO: 1860681 - RNA, 17 nt, Human
guucaggguuggccccu

SEQ ID NO: 1860682 - RNA, 18 nt, Human
guucaggguuggccccug

SEQ ID NO: 1860683 - RNA, 19 nt, Human
guucaggguuggccccugc

SEQ ID NO: 1860684 - RNA, 18 nt, Human
guucagcuccagcucacc

SEQ ID NO: 1860685 - RNA, 16 nt, Human
guucagcuccagcuca

SEQ ID NO: 1860686 - RNA, 17 nt, Human
guucagcuccagcucac

SEQ ID NO: 1860687 - RNA, 16 nt, Human
guuaagccuuuggaaa

SEQ ID NO: 1860688 - RNA, 13 nt, Human
guuaagccuuugg

SEQ ID NO: 1860689 - RNA, 12 nt, Human
guuaagccuuug

SEQ ID NO: 1860690 - RNA, 18 nt, Human
guguuuuaaaaugagaaa

SEQ ID NO: 1860691 - RNA, 12 nt, Human
guuaauaaaagu

SEQ ID NO: 1860692 - RNA, 18 nt, Human
guuaaugauagcuacugu

SEQ ID NO: 1860693 - RNA, 22 nt, Human
guuaaguugauggugaugaaau

SEQ ID NO: 1860694 - RNA, 17 nt, Human
guuaguaugaggcauuu

SEQ ID NO: 1860695 - RNA, 20 nt, Human
guuaguaugaggcauuuguu

SEQ ID NO: 1860696 - RNA, 18 nt, Human
aaggaugcacagaguugu

SEQ ID NO: 1860697 - RNA, 15 nt, Human
aaggaugcuuguaca

SEQ ID NO: 1860698 - RNA, 16 nt, Human
aaggaugcuuguacau

SEQ ID NO: 1860699 - RNA, 17 nt, Human
aaggaugcuuguacaua

SEQ ID NO: 1860700 - RNA, 19 nt, Human
aaggaugcuuguacauaau

SEQ ID NO: 1860701 - RNA, 19 nt, Human
aaggaugccccgucccccu

SEQ ID NO: 1860702 - RNA, 23 nt, Human
aaggaugaucuaggaagacuuug

SEQ ID NO: 1860703 - RNA, 18 nt, Human
aaggaugaucuaggaaga

SEQ ID NO: 1860704 - RNA, 17 nt, Human
aaggauccugagccaga

SEQ ID NO: 1860705 - RNA, 15 nt, Human
aaggauccugagcca

SEQ ID NO: 1860706 - RNA, 14 nt, Human
aaggauccugagcc

SEQ ID NO: 1860707 - RNA, 21 nt, Human
guugaugccugugaacugaac

SEQ ID NO: 1860708 - RNA, 23 nt, Human
guugaugaucuuugcagacaggc

SEQ ID NO: 1860709 - RNA, 19 nt, Human
aaggcuaccuuuguauucu

SEQ ID NO: 1860710 - RNA, 18 nt, Human
aaggccaaaggaagcaca

SEQ ID NO: 1860711 - RNA, 14 nt, Human
aaggcuccaggagc

SEQ ID NO: 1860712 - RNA, 17 nt, Human
guugcccaggcaggucu

SEQ ID NO: 1860713 - RNA, 18 nt, Human
guugcccaggcaggucuu

SEQ ID NO: 1860714 - RNA, 19 nt, Human
guugcccaggcaggucuug

SEQ ID NO: 1860715 - RNA, 21 nt, Human
guugcccaggcuggcgugcag

SEQ ID NO: 1860716 - RNA, 20 nt, Human
guuuaagacauuuuuggaag

SEQ ID NO: 1860717 - RNA, 18 nt, Human
guuguaccgcaaugugac

SEQ ID NO: 1860718 - RNA, 18 nt, Human
guuggucccccuuccaug

SEQ ID NO: 1860719 - RNA, 13 nt, Human
guuggguggaugc

SEQ ID NO: 1860720 - RNA, 11 nt, Human
guuuucuguuc

SEQ ID NO: 1860721 - RNA, 12 nt, Human
guuuucuguucu

SEQ ID NO: 1860722 - RNA, 20 nt, Human
guuuucuuaaccagaucauu

SEQ ID NO: 1860723 - RNA, 15 nt, Human
guuuuacugcagcuu

SEQ ID NO: 1860724 - RNA, 23 nt, Human
guuuuacaauaaaaucuugaaaa

SEQ ID NO: 1860725 - RNA, 20 nt, Human
guuugggccccagaggcugg

SEQ ID NO: 1860726 - RNA, 18 nt, Human
guuuggggaugagaaagg

SEQ ID NO: 1860727 - RNA, 22 nt, Human
guuucuaaaggcuaccuuugua

SEQ ID NO: 1860728 - RNA, 23 nt, Human
guuucuaaaggcuaccuuuguau

SEQ ID NO: 1860729 - RNA, 22 nt, Human
guuugauucagacagcugccug

SEQ ID NO: 1860730 - RNA, 13 nt, Human
guuugccucugcc

SEQ ID NO: 1860731 - RNA, 16 nt, Human
guuugccucugccucu

SEQ ID NO: 1860732 - RNA, 17 nt, Human
aagggccuggccugagc

SEQ ID NO: 1860733 - RNA, 14 nt, Human
aagggccuggccug

SEQ ID NO: 1860734 - RNA, 19 nt, Human
aagggccuggccugagcug

SEQ ID NO: 1860735 - RNA, 22 nt, Human
aaggggaauguuugccucugcc

SEQ ID NO: 1860736 - RNA, 23 nt, Human
aaggggaauguuugccucugccu

SEQ ID NO: 1860737 - RNA, 13 nt, Human
aagggccuggccu

SEQ ID NO: 1860738 - RNA, 15 nt, Human
aaguaauaugcacac

SEQ ID NO: 1860739 - RNA, 16 nt, Human
aaguaauaugcacaca

SEQ ID NO: 1860740 - RNA, 19 nt, Human
guuucuaaaggcuaccuuu

SEQ ID NO: 1860741 - RNA, 12 nt, Human
aaguaauaugca

SEQ ID NO: 1860742 - RNA, 22 nt, Human
aaguaaaaacaaagaaauuaug

SEQ ID NO: 1860743 - RNA, 20 nt, Human
aaguaaaaacaaagaaauua

SEQ ID NO: 1860744 - RNA, 13 nt, Human
aaguaaaaacaaa

SEQ ID NO: 1860745 - RNA, 17 nt, Human
aaggguaucaggugcug

SEQ ID NO: 1860746 - RNA, 16 nt, Human
aaggguaucaggugcu

SEQ ID NO: 1860747 - RNA, 16 nt, Human
aagagcuuaacagugu

SEQ ID NO: 1860748 - RNA, 19 nt, Human
guggcccgacagccuggca

SEQ ID NO: 1860749 - RNA, 18 nt, Human
guggcccgacagccuggc

SEQ ID NO: 1860750 - RNA, 18 nt, Human
aagacuaucuaaauguug

SEQ ID NO: 1860751 - RNA, 17 nt, Human
aagacugaguacguugu

SEQ ID NO: 1860752 - RNA, 17 nt, Human
aagacuguacaaaguag

SEQ ID NO: 1860753 - RNA, 21 nt, Human
aagacugaguacguugugcau

SEQ ID NO: 1860754 - RNA, 22 nt, Human
aagacugaguacguugugcauu

SEQ ID NO: 1860755 - RNA, 21 nt, Human
aagacccuuguggucccaccc

SEQ ID NO: 1860756 - RNA, 18 nt, Human
aagacccuugugguccca

SEQ ID NO: 1860757 - RNA, 22 nt, Human
aagacccuuguggucccacccc

SEQ ID NO: 1860758 - RNA, 17 nt, Human
aagacuaucuaaauguu

SEQ ID NO: 1860759 - RNA, 16 nt, Human
aagacuaucuaaaugu

SEQ ID NO: 1860760 - RNA, 22 nt, Human
gugggacacccugugauggggc

SEQ ID NO: 1860761 - RNA, 23 nt, Human
guggcgcagcauauucaggaagc

SEQ ID NO: 1860762 - RNA, 13 nt, Human
gugggauccucca

SEQ ID NO: 1860763 - RNA, 14 nt, Human
gugggagugggccc

SEQ ID NO: 1860764 - RNA, 13 nt, Human
gugggagugggcc

SEQ ID NO: 1860765 - RNA, 16 nt, Human
gugguuucagaaaugu

SEQ ID NO: 1860766 - RNA, 14 nt, Human
guggugguuuucug

SEQ ID NO: 1860767 - RNA, 20 nt, Human
gugggggaucacagccucug

SEQ ID NO: 1860768 - RNA, 14 nt, Human
guggguacgggagg

SEQ ID NO: 1860769 - RNA, 18 nt, Human
aagaugugacauguuuua

SEQ ID NO: 1860770 - RNA, 14 nt, Human
aagaugugacaugu

SEQ ID NO: 1860771 - RNA, 22 nt, Human
aagcaaagacuuuccucuuagu

SEQ ID NO: 1860772 - RNA, 15 nt, Human
aagcaagauuucaga

SEQ ID NO: 1860773 - RNA, 13 nt, Human
aagcaaaggagau

SEQ ID NO: 1860774 - RNA, 12 nt, Human
aagcaaaggaga

SEQ ID NO: 1860775 - RNA, 12 nt, Human
aagaugcagccg

SEQ ID NO: 1860776 - RNA, 20 nt, Human
guggugguuuucuguucuuu

SEQ ID NO: 1860777 - RNA, 17 nt, Human
gugguuuucuguucuuu

SEQ ID NO: 1860778 - RNA, 18 nt, Human
aagagguuuuaaaaaaau

SEQ ID NO: 1860779 - RNA, 17 nt, Human
gugucuugcaauggcag

SEQ ID NO: 1860780 - RNA, 18 nt, Human
gugucuugcaauggcagc

SEQ ID NO: 1860781 - RNA, 17 nt, Human
gugugacuacuccccca

SEQ ID NO: 1860782 - RNA, 17 nt, Human
gugugaaaaugugugug

SEQ ID NO: 1860783 - RNA, 18 nt, Human
gugucuuuuuucacuaca

SEQ ID NO: 1860784 - RNA, 23 nt, Human
guguuuccuggcacugcuuccag

SEQ ID NO: 1860785 - RNA, 18 nt, Human
guguguaugcgugugugu

SEQ ID NO: 1860786 - RNA, 16 nt, Human
aagaauugaagcagga

SEQ ID NO: 1860787 - RNA, 16 nt, Human
guggcagcucaccucu

SEQ ID NO: 1860788 - RNA, 14 nt, Human
guggcagcucaccu

SEQ ID NO: 1860789 - RNA, 20 nt, Human
guggcagcucaccucucccu

SEQ ID NO: 1860790 - RNA, 19 nt, Human
guggcaccagcagccugga

SEQ ID NO: 1860791 - RNA, 20 nt, Human
guggauuuaacagaaaugua

SEQ ID NO: 1860792 - RNA, 18 nt, Human
guggauuuaacagaaaug

SEQ ID NO: 1860793 - RNA, 19 nt, Human
guggauuuaacagaaaugu

SEQ ID NO: 1860794 - RNA, 22 nt, Human
gugcuaucucccccagccccau

SEQ ID NO: 1860795 - RNA, 12 nt, Human
gugcuauguucu

SEQ ID NO: 1860796 - RNA, 15 nt, Human
gugcucaggagcccu

SEQ ID NO: 1860797 - RNA, 21 nt, Human
gugcugggauuacaagcguga

SEQ ID NO: 1860798 - RNA, 22 nt, Human
gugcugggauuacaagcgugag

SEQ ID NO: 1860799 - RNA, 20 nt, Human
gugcugggauuacaggcgug

SEQ ID NO: 1860800 - RNA, 19 nt, Human
guggaaguaguggagcccc

SEQ ID NO: 1860801 - RNA, 20 nt, Human
gugcugggauuacaggugug

SEQ ID NO: 1860802 - RNA, 23 nt, Human
guggacacagcucuucuccaggc

SEQ ID NO: 1860803 - RNA, 18 nt, Human
guggacacagcucuucuc

SEQ ID NO: 1860804 - RNA, 22 nt, Human
guggacacagcucuucuccagg

SEQ ID NO: 1860805 - RNA, 21 nt, Human
guggauggaaggggcugacag

SEQ ID NO: 1860806 - RNA, 21 nt, Human
guggaugccugguggcagcug

SEQ ID NO: 1860807 - RNA, 15 nt, Human
aagaaaaaggaugca

SEQ ID NO: 1860808 - RNA, 17 nt, Human
aagaaaaaggaugcaca

SEQ ID NO: 1860809 - RNA, 18 nt, Human
aagaaaaaggaugcacag

SEQ ID NO: 1860810 - RNA, 22 nt, Human
aagaaagacuaucuaaauguug

SEQ ID NO: 1860811 - RNA, 20 nt, Human
aagaaagacuaucuaaaugu

SEQ ID NO: 1860812 - RNA, 13 nt, Human
aagaaauauaccu

SEQ ID NO: 1860813 - RNA, 16 nt, Human
aagaagugaaaaucua

SEQ ID NO: 1860814 - RNA, 22 nt, Human
aagaagugaaaaucuacacucc

SEQ ID NO: 1860815 - RNA, 21 nt, Human
gugcuaucucccccagcccca

SEQ ID NO: 1860816 - RNA, 22 nt, Human
gugcuaggaacacuccuucaca

SEQ ID NO: 1860817 - RNA, 18 nt, Human
gugcuaggaacacuccuu

SEQ ID NO: 1860818 - RNA, 18 nt, Human
aacuugucuuuggacccu

SEQ ID NO: 1860819 - RNA, 22 nt, Human
aacuugucuuuggacccugagg

SEQ ID NO: 1860820 - RNA, 16 nt, Human
aacuuguauuaugugu

SEQ ID NO: 1860821 - RNA, 15 nt, Human
aacuuguauuaugug

SEQ ID NO: 1860822 - RNA, 11 nt, Human
gugccuuaugg

SEQ ID NO: 1860823 - RNA, 12 nt, Human
aacuugggaacu

SEQ ID NO: 1860824 - RNA, 13 nt, Human
aacuuuaccuuuu

SEQ ID NO: 1860825 - RNA, 23 nt, Human
gugccuuauggaacacucugaga

SEQ ID NO: 1860826 - RNA, 21 nt, Human
gugccuuauggaacacucuga

SEQ ID NO: 1860827 - RNA, 14 nt, Human
gugccuuauggaac

SEQ ID NO: 1860828 - RNA, 14 nt, Human
gugccucugggacu

SEQ ID NO: 1860829 - RNA, 15 nt, Human
gugccucugccuguc

SEQ ID NO: 1860830 - RNA, 13 nt, Human
gugccucugggac

SEQ ID NO: 1860831 - RNA, 12 nt, Human
gugccucuggga

SEQ ID NO: 1860832 - RNA, 13 nt, Human
gugccucugccug

SEQ ID NO: 1860833 - RNA, 21 nt, Human
gugaaccaccacacccagccc

SEQ ID NO: 1860834 - RNA, 15 nt, Human
gugccucaagagaag

SEQ ID NO: 1860835 - RNA, 20 nt, Human
uacaaaaagcauaaaaauua

SEQ ID NO: 1860836 - RNA, 15 nt, Human
uacaaaagcauguga

SEQ ID NO: 1860837 - RNA, 13 nt, Human
uaauuccacagcu

SEQ ID NO: 1860838 - RNA, 17 nt, Human
uaauuccacagcugcuc

SEQ ID NO: 1860839 - RNA, 14 nt, Human
uaauuccacagcug

SEQ ID NO: 1860840 - RNA, 16 nt, Human
aauggacguguuauga

SEQ ID NO: 1860841 - RNA, 24 nt, Human
aaugcccagccccuucugacccau

SEQ ID NO: 1860842 - RNA, 23 nt, Human
aaugcccagccccuucugaccca

SEQ ID NO: 1860843 - RNA, 22 nt, Human
aaugcccagccccuucugaccc

SEQ ID NO: 1860844 - RNA, 20 nt, Human
aaugcccagccccuucugac

SEQ ID NO: 1860845 - RNA, 20 nt, Human
aaugcugugcccuaaagugu

SEQ ID NO: 1860846 - RNA, 21 nt, Human
aaugcugugcccuaaagugua

SEQ ID NO: 1860847 - RNA, 13 nt, Human
aaugcugugcccu

SEQ ID NO: 1860848 - RNA, 14 nt, Human
uacaaggacagccc

SEQ ID NO: 1860849 - RNA, 13 nt, Human
aaugcauaaaaug

SEQ ID NO: 1860850 - RNA, 16 nt, Human
aaugcauaaaauguua

SEQ ID NO: 1860851 - RNA, 15 nt, Human
aaugcccagccccuu

SEQ ID NO: 1860852 - RNA, 14 nt, Human
aaugcccagccccu

SEQ ID NO: 1860853 - RNA, 19 nt, Human
uacauauaagugauugcug

SEQ ID NO: 1860854 - RNA, 12 nt, Human
aauguacugcau

SEQ ID NO: 1860855 - RNA, 21 nt, Human
uacauaaugcgugcauaccac

SEQ ID NO: 1860856 - RNA, 19 nt, Human
uacauaaugcgugcauacc

SEQ ID NO: 1860857 - RNA, 20 nt, Human
uacauaaugcgugcauacca

SEQ ID NO: 1860858 - RNA, 15 nt, Human
uacaguaucucaggg

SEQ ID NO: 1860859 - RNA, 17 nt, Human
uacauaaugcgugcaua

SEQ ID NO: 1860860 - RNA, 14 nt, Human
aauguauguguaag

SEQ ID NO: 1860861 - RNA, 12 nt, Human
aauguaugugua

SEQ ID NO: 1860862 - RNA, 18 nt, Human
aauguacugcauaugaaa

SEQ ID NO: 1860863 - RNA, 14 nt, Human
aauguacugcauau

SEQ ID NO: 1860864 - RNA, 14 nt, Human
aaugugacucaaga

SEQ ID NO: 1860865 - RNA, 14 nt, Human
aauguggcuccugg

SEQ ID NO: 1860866 - RNA, 11 nt, Human
aaugugauaug

SEQ ID NO: 1860867 - RNA, 14 nt, Human
uacacuccagugag

SEQ ID NO: 1860868 - RNA, 15 nt, Human
uacaggcauagaguu

SEQ ID NO: 1860869 - RNA, 18 nt, Human
uacagaggccaugggccu

SEQ ID NO: 1860870 - RNA, 22 nt, Human
uacaggcgugagccaccgugcc

SEQ ID NO: 1860871 - RNA, 15 nt, Human
uacaggcuccugcca

SEQ ID NO: 1860872 - RNA, 14 nt, Human
uacaggcuccugcc

SEQ ID NO: 1860873 - RNA, 17 nt, Human
uacaggcuccugccacc

SEQ ID NO: 1860874 - RNA, 19 nt, Human
uacaccacuacauucuguu

SEQ ID NO: 1860875 - RNA, 20 nt, Human
uacaccacuacauucuguua

SEQ ID NO: 1860876 - RNA, 15 nt, Human
uacaccacuacauuc

SEQ ID NO: 1860877 - RNA, 16 nt, Human
uacaccacuacauucu

SEQ ID NO: 1860878 - RNA, 17 nt, Human
uacaccacuacauucug

SEQ ID NO: 1860879 - RNA, 18 nt, Human
uacaccacuacauucugu

SEQ ID NO: 1860880 - RNA, 15 nt, Human
uacacauuuuucaga

SEQ ID NO: 1860881 - RNA, 17 nt, Human
uacacauuuuucagaua

SEQ ID NO: 1860882 - RNA, 21 nt, Human
uacacauuuuucagauauaaa

SEQ ID NO: 1860883 - RNA, 19 nt, Human
uacacauuuuucagauaua

SEQ ID NO: 1860884 - RNA, 21 nt, Human
aauggacguguuaugacucca

SEQ ID NO: 1860885 - RNA, 19 nt, Human
aauggacuuuuguacauag

SEQ ID NO: 1860886 - RNA, 15 nt, Human
aaugagccuggcaag

SEQ ID NO: 1860887 - RNA, 18 nt, Human
aaugacuuacuguacaug

SEQ ID NO: 1860888 - RNA, 14 nt, Human
aaugacuuacugua

SEQ ID NO: 1860889 - RNA, 17 nt, Human
aaugacuuacuguacau

SEQ ID NO: 1860890 - RNA, 15 nt, Human
aaugaaaaccacauu

SEQ ID NO: 1860891 - RNA, 13 nt, Human
uaaugaggaaacu

SEQ ID NO: 1860892 - RNA, 20 nt, Human
aaucuucugaacuuggcgcu

SEQ ID NO: 1860893 - RNA, 13 nt, Human
aaucuucugaacu

SEQ ID NO: 1860894 - RNA, 21 nt, Human
uaauagcgucauaacuagaac

SEQ ID NO: 1860895 - RNA, 19 nt, Human
uaaugaaagacuguacaaa

SEQ ID NO: 1860896 - RNA, 18 nt, Human
uaaugaaagacuguacaa

SEQ ID NO: 1860897 - RNA, 17 nt, Human
uaaugaaagacuguaca

SEQ ID NO: 1860898 - RNA, 14 nt, Human
uaaugaaagacugu

SEQ ID NO: 1860899 - RNA, 21 nt, Human
uaaugacuuaagcacacuuga

SEQ ID NO: 1860900 - RNA, 15 nt, Human
uaaugacuuaagcac

SEQ ID NO: 1860901 - RNA, 23 nt, Human
uaaugaaagacuguacaaaguag

SEQ ID NO: 1860902 - RNA, 22 nt, Human
uaaugaaagacuguacaaagua

SEQ ID NO: 1860903 - RNA, 20 nt, Human
uaaguuuuuauggcuuuugu

SEQ ID NO: 1860904 - RNA, 12 nt, Human
aaucagcauucu

SEQ ID NO: 1860905 - RNA, 17 nt, Human
aaucagacuaugaaguu

SEQ ID NO: 1860906 - RNA, 14 nt, Human
aaucagacuaugaa

SEQ ID NO: 1860907 - RNA, 17 nt, Human
aaucauggugcucagag

SEQ ID NO: 1860908 - RNA, 17 nt, Human
uaauaaaaguacauguu

SEQ ID NO: 1860909 - RNA, 15 nt, Human
aaucaucaagucuuu

SEQ ID NO: 1860910 - RNA, 15 nt, Human
aaucucaaauaacua

SEQ ID NO: 1860911 - RNA, 12 nt, Human
aaucucaaauuu

SEQ ID NO: 1860912 - RNA, 14 nt, Human
aaucucaaauuucu

SEQ ID NO: 1860913 - RNA, 16 nt, Human
aaucuuauaauuuaaa

SEQ ID NO: 1860914 - RNA, 14 nt, Human
aaucuuauaauuua

SEQ ID NO: 1860915 - RNA, 12 nt, Human
aaucuaaaugga

SEQ ID NO: 1860916 - RNA, 18 nt, Human
aaucuaaauggaaccacu

SEQ ID NO: 1860917 - RNA, 13 nt, Human
aaucuaaauggaa

SEQ ID NO: 1860918 - RNA, 15 nt, Human
aaucuaaauggaacc

SEQ ID NO: 1860919 - RNA, 14 nt, Human
uaacaugauuuggg

SEQ ID NO: 1860920 - RNA, 14 nt, Human
uaacauggaaguac

SEQ ID NO: 1860921 - RNA, 15 nt, Human
uaacauggaaguacu

SEQ ID NO: 1860922 - RNA, 16 nt, Human
uaacauggaaguacua

SEQ ID NO: 1860923 - RNA, 15 nt, Human
uaacuaaaagguaug

SEQ ID NO: 1860924 - RNA, 14 nt, Human
uaacuaaaagguau

SEQ ID NO: 1860925 - RNA, 16 nt, Human
aauagaugcugacugu

SEQ ID NO: 1860926 - RNA, 20 nt, Human
aauagccugccucuucucua

SEQ ID NO: 1860927 - RNA, 13 nt, Human
aauagcugggacu

SEQ ID NO: 1860928 - RNA, 14 nt, Human
aauagcugggacua

SEQ ID NO: 1860929 - RNA, 18 nt, Human
aauagacaauuuauuaug

SEQ ID NO: 1860930 - RNA, 23 nt, Human
aauagacaauuuauuauggcaca

SEQ ID NO: 1860931 - RNA, 18 nt, Human
aauagacccacaagaggc

SEQ ID NO: 1860932 - RNA, 16 nt, Human
aauaggaaaaacugau

SEQ ID NO: 1860933 - RNA, 15 nt, Human
aauaggaaaaacuga

SEQ ID NO: 1860934 - RNA, 18 nt, Human
aauaggaaaaacugauuu

SEQ ID NO: 1860935 - RNA, 17 nt, Human
aauaggaaaaacugauu

SEQ ID NO: 1860936 - RNA, 19 nt, Human
aauaggaaaaacugauuuu

SEQ ID NO: 1860937 - RNA, 18 nt, Human
aauaggcguaacuaauuu

SEQ ID NO: 1860938 - RNA, 15 nt, Human
uaacuuuuauaaacu

SEQ ID NO: 1860939 - RNA, 17 nt, Human
uaacuuuuauaaacuuu

SEQ ID NO: 1860940 - RNA, 18 nt, Human
uaacuuuuauaaacuuua

SEQ ID NO: 1860941 - RNA, 19 nt, Human
uaacuuuuauaaacuuuac

SEQ ID NO: 1860942 - RNA, 17 nt, Human
uaagacauuuuuggaag

SEQ ID NO: 1860943 - RNA, 19 nt, Human
aauaucuuuuuuuuaauaa

SEQ ID NO: 1860944 - RNA, 20 nt, Human
aauaucugaaaauguaugug

SEQ ID NO: 1860945 - RNA, 19 nt, Human
aauaucugaaaauguaugu

SEQ ID NO: 1860946 - RNA, 18 nt, Human
aauaucugaaaauguaug

SEQ ID NO: 1860947 - RNA, 17 nt, Human
aauaucugaaaauguau

SEQ ID NO: 1860948 - RNA, 16 nt, Human
aauaucugaaaaugua

SEQ ID NO: 1860949 - RNA, 15 nt, Human
aauaugcacacauuu

SEQ ID NO: 1860950 - RNA, 18 nt, Human
aauauugauaugcuuaua

SEQ ID NO: 1860951 - RNA, 22 nt, Human
aauauugcugauggugcaauga

SEQ ID NO: 1860952 - RNA, 21 nt, Human
aauauugcugauggugcaaug

SEQ ID NO: 1860953 - RNA, 18 nt, Human
aauauugcugauggugca

SEQ ID NO: 1860954 - RNA, 15 nt, Human
aauauugcugauggu

SEQ ID NO: 1860955 - RNA, 13 nt, Human
aauauugcugaug

SEQ ID NO: 1860956 - RNA, 12 nt, Human
aauauugcugau

SEQ ID NO: 1860957 - RNA, 11 nt, Human
aauauugcuga

SEQ ID NO: 1860958 - RNA, 13 nt, Human
aauauuguacagu

SEQ ID NO: 1860959 - RNA, 14 nt, Human
aauauuguacaguu

SEQ ID NO: 1860960 - RNA, 12 nt, Human
aauaacuuuuuu

SEQ ID NO: 1860961 - RNA, 19 nt, Human
uaaauaaugugaaacugga

SEQ ID NO: 1860962 - RNA, 21 nt, Human
uaaauaaaguuuguugaaaca

SEQ ID NO: 1860963 - RNA, 12 nt, Human
uaaauaaaguuu

SEQ ID NO: 1860964 - RNA, 18 nt, Human
uaaauuaacuuuuauaaa

SEQ ID NO: 1860965 - RNA, 17 nt, Human
uaaauuaacuuuuauaa

SEQ ID NO: 1860966 - RNA, 15 nt, Human
uaaauuaacuuuuau

SEQ ID NO: 1860967 - RNA, 16 nt, Human
uaaauuaacuuuuaua

SEQ ID NO: 1860968 - RNA, 12 nt, Human
uaaauuaacuuu

SEQ ID NO: 1860969 - RNA, 14 nt, Human
uaaauuaacuuuua

SEQ ID NO: 1860970 - RNA, 24 nt, Human
uaaauguuuuuuuuuaaagacuuu

SEQ ID NO: 1860971 - RNA, 20 nt, Human
uaaauguugaaagaucaaaa

SEQ ID NO: 1860972 - RNA, 23 nt, Human
uaaauguuuuuuuuuaaagacuu

SEQ ID NO: 1860973 - RNA, 15 nt, Human
uaaauguugaaagau

SEQ ID NO: 1860974 - RNA, 23 nt, Human
uaaaugcaccuggaauauauaac

SEQ ID NO: 1860975 - RNA, 14 nt, Human
uaaaucuccaaaau

SEQ ID NO: 1860976 - RNA, 15 nt, Human
uaaaucuccaaaaua

SEQ ID NO: 1860977 - RNA, 18 nt, Human
uaaaucuccaaaauaaaa

SEQ ID NO: 1860978 - RNA, 22 nt, Human
uaaaguaaaaacaaagaaauua

SEQ ID NO: 1860979 - RNA, 21 nt, Human
uaaaguaaaaacaaagaaauu

SEQ ID NO: 1860980 - RNA, 19 nt, Human
uaaaguaaaaacaaagaaa

SEQ ID NO: 1860981 - RNA, 22 nt, Human
uaaagguucaugcaaacuuuau

SEQ ID NO: 1860982 - RNA, 20 nt, Human
aaguuuuuauggcuuuugug

SEQ ID NO: 1860983 - RNA, 15 nt, Human
aaguuuuguaaauuu

SEQ ID NO: 1860984 - RNA, 16 nt, Human
aauaaaucauaaaacu

SEQ ID NO: 1860985 - RNA, 12 nt, Human
aauaaaacuuuu

SEQ ID NO: 1860986 - RNA, 14 nt, Human
aauaaaacuuuuua

SEQ ID NO: 1860987 - RNA, 15 nt, Human
aauaaaacuuuuuaa

SEQ ID NO: 1860988 - RNA, 18 nt, Human
aauaaaacuuuuuaaaau

SEQ ID NO: 1860989 - RNA, 20 nt, Human
aauaaauugcuccuugacau

SEQ ID NO: 1860990 - RNA, 16 nt, Human
aauaaauugcuccuug

SEQ ID NO: 1860991 - RNA, 21 nt, Human
aauaacaaugaaaguugauaa

SEQ ID NO: 1860992 - RNA, 15 nt, Human
aauaacgauaaaaga

SEQ ID NO: 1860993 - RNA, 17 nt, Human
acaacaucuuuuucuac

SEQ ID NO: 1860994 - RNA, 13 nt, Human
acaagacacagug

SEQ ID NO: 1860995 - RNA, 17 nt, Human
acaaauuuacagagaca

SEQ ID NO: 1860996 - RNA, 21 nt, Human
acaaauucugucucuggauua

SEQ ID NO: 1860997 - RNA, 22 nt, Human
acaagagcccaggccuccuaca

SEQ ID NO: 1860998 - RNA, 19 nt, Human
acaagagcuuaacagugug

SEQ ID NO: 1860999 - RNA, 18 nt, Human
acaagagcuuaacagugu

SEQ ID NO: 1861000 - RNA, 16 nt, Human
acaagaccacguuucu

SEQ ID NO: 1861001 - RNA, 14 nt, Human
acaagacacaguga

SEQ ID NO: 1861002 - RNA, 17 nt, Human
acaagaccacguuucua

SEQ ID NO: 1861003 - RNA, 13 nt, Human
acaagcuccaagc

SEQ ID NO: 1861004 - RNA, 17 nt, Human
acaagcgugagccacug

SEQ ID NO: 1861005 - RNA, 16 nt, Human
uagcucaggugucccu

SEQ ID NO: 1861006 - RNA, 16 nt, Human
uagcuacuaauuuuaa

SEQ ID NO: 1861007 - RNA, 19 nt, Human
acaagcuccaagcucccag

SEQ ID NO: 1861008 - RNA, 17 nt, Human
acaagcuccaagcuccc

SEQ ID NO: 1861009 - RNA, 16 nt, Human
acaagcuccaagcucc

SEQ ID NO: 1861010 - RNA, 15 nt, Human
acaagcuccaagcuc

SEQ ID NO: 1861011 - RNA, 22 nt, Human
acaagcuccaagcucccaggca

SEQ ID NO: 1861012 - RNA, 18 nt, Human
acaagcgugagccacugc

SEQ ID NO: 1861013 - RNA, 20 nt, Human
acaaucucggcucacugcau

SEQ ID NO: 1861014 - RNA, 18 nt, Human
acaaucucggcucacugc

SEQ ID NO: 1861015 - RNA, 13 nt, Human
uacuuuuuccugg

SEQ ID NO: 1861016 - RNA, 16 nt, Human
aauuuguuauaaugaa

SEQ ID NO: 1861017 - RNA, 22 nt, Human
aauuuuuuuaucgucacugcuu

SEQ ID NO: 1861018 - RNA, 22 nt, Human
aauuuuuaaucuuuaauuuuac

SEQ ID NO: 1861019 - RNA, 22 nt, Human
uagauaggucagugcaaauacu

SEQ ID NO: 1861020 - RNA, 21 nt, Human
acaaagcgugguggacaugca

SEQ ID NO: 1861021 - RNA, 18 nt, Human
acaaagcccuuccauguc

SEQ ID NO: 1861022 - RNA, 14 nt, Human
acaaaacuuuucua

SEQ ID NO: 1861023 - RNA, 17 nt, Human
uacugagagugaacaaa

SEQ ID NO: 1861024 - RNA, 19 nt, Human
uacugagagugaacaaauu

SEQ ID NO: 1861025 - RNA, 16 nt, Human
uacuguaauuugugau

SEQ ID NO: 1861026 - RNA, 17 nt, Human
uacuguaauuugugaua

SEQ ID NO: 1861027 - RNA, 15 nt, Human
uacuguaauuuguga

SEQ ID NO: 1861028 - RNA, 21 nt, Human
aauugacuuauuuauauaaau

SEQ ID NO: 1861029 - RNA, 18 nt, Human
uacuguacaugaaaacac

SEQ ID NO: 1861030 - RNA, 23 nt, Human
uacuguacagacagaaaaaacug

SEQ ID NO: 1861031 - RNA, 19 nt, Human
uacuguacagacagaaaaa

SEQ ID NO: 1861032 - RNA, 24 nt, Human
uacgcuccaucgcugucaucucag

SEQ ID NO: 1861033 - RNA, 15 nt, Human
uacgucugacaggca

SEQ ID NO: 1861034 - RNA, 22 nt, Human
uacucuacccucuuagaaaaac

SEQ ID NO: 1861035 - RNA, 18 nt, Human
uacuagggaaaugccuuu

SEQ ID NO: 1861036 - RNA, 18 nt, Human
uacuaaaaauacaaaaaa

SEQ ID NO: 1861037 - RNA, 14 nt, Human
uacuaaaaauacaa

SEQ ID NO: 1861038 - RNA, 13 nt, Human
uacgugaguccug

SEQ ID NO: 1861039 - RNA, 16 nt, Human
uacgucugacaggcaa

SEQ ID NO: 1861040 - RNA, 15 nt, Human
uacuugaaaauuaac

SEQ ID NO: 1861041 - RNA, 23 nt, Human
uacuuugauauuuucaacgcagc

SEQ ID NO: 1861042 - RNA, 15 nt, Human
uacuucuuauacauu

SEQ ID NO: 1861043 - RNA, 14 nt, Human
uacuucuuauacau

SEQ ID NO: 1861044 - RNA, 16 nt, Human
uacuucuuauacauuu

SEQ ID NO: 1861045 - RNA, 20 nt, Human
uacuucuccacccugcucuc

SEQ ID NO: 1861046 - RNA, 15 nt, Human
uacuucugcuacaua

SEQ ID NO: 1861047 - RNA, 20 nt, Human
uacuuccccuuccuaauucc

SEQ ID NO: 1861048 - RNA, 18 nt, Human
uacuuccccuuccuaauu

SEQ ID NO: 1861049 - RNA, 15 nt, Human
uacuuccccuuccua

SEQ ID NO: 1861050 - RNA, 14 nt, Human
uacuuccccuuccu

SEQ ID NO: 1861051 - RNA, 23 nt, Human
uacuuccugugacuucagcucug

SEQ ID NO: 1861052 - RNA, 13 nt, Human
uacuucuccaccc

SEQ ID NO: 1861053 - RNA, 18 nt, Human
uacuucuccacccugcuc

SEQ ID NO: 1861054 - RNA, 15 nt, Human
aauuugaaacacuuu

SEQ ID NO: 1861055 - RNA, 17 nt, Human
aauuuacagagacagaa

SEQ ID NO: 1861056 - RNA, 18 nt, Human
aauuuacagagacagaaa

SEQ ID NO: 1861057 - RNA, 17 nt, Human
aauuuaccugaagucuu

SEQ ID NO: 1861058 - RNA, 15 nt, Human
aauuuacauacucug

SEQ ID NO: 1861059 - RNA, 13 nt, Human
aauuuauuauggc

SEQ ID NO: 1861060 - RNA, 14 nt, Human
aauuuauuauggca

SEQ ID NO: 1861061 - RNA, 17 nt, Human
aauuuauuauggcacau

SEQ ID NO: 1861062 - RNA, 22 nt, Human
aauuuauaaacuuuuuucuuac

SEQ ID NO: 1861063 - RNA, 15 nt, Human
acacuguucucugcc

SEQ ID NO: 1861064 - RNA, 14 nt, Human
acacuguucucugc

SEQ ID NO: 1861065 - RNA, 20 nt, Human
acacuguucucugcccucca

SEQ ID NO: 1861066 - RNA, 18 nt, Human
acacuguucucugcccuc

SEQ ID NO: 1861067 - RNA, 17 nt, Human
acacuguucucugcccu

SEQ ID NO: 1861068 - RNA, 16 nt, Human
acacuguucucugccc

SEQ ID NO: 1861069 - RNA, 23 nt, Human
acacuguucucugcccuccaaga

SEQ ID NO: 1861070 - RNA, 22 nt, Human
acacuguucucugcccuccaag

SEQ ID NO: 1861071 - RNA, 14 nt, Human
acacuccagugaga

SEQ ID NO: 1861072 - RNA, 13 nt, Human
acacuccuucaca

SEQ ID NO: 1861073 - RNA, 13 nt, Human
acacucugagacu

SEQ ID NO: 1861074 - RNA, 11 nt, Human
acacucugaga

SEQ ID NO: 1861075 - RNA, 23 nt, Human
acacuuguugauuaauggaaaug

SEQ ID NO: 1861076 - RNA, 20 nt, Human
acacuuguugauuaauggaa

SEQ ID NO: 1861077 - RNA, 13 nt, Human
acacuuaaaaaug

SEQ ID NO: 1861078 - RNA, 15 nt, Human
acacuuaaaaauggu

SEQ ID NO: 1861079 - RNA, 16 nt, Human
acacuguuucaaacuu

SEQ ID NO: 1861080 - RNA, 15 nt, Human
acacuguuucaaacu

SEQ ID NO: 1861081 - RNA, 23 nt, Human
acacuguuucaaacuuuacuaug

SEQ ID NO: 1861082 - RNA, 17 nt, Human
acagacuggaagcacag

SEQ ID NO: 1861083 - RNA, 19 nt, Human
acagacuggaagcacagcu

SEQ ID NO: 1861084 - RNA, 21 nt, Human
acagacuggaagcacagcuuc

SEQ ID NO: 1861085 - RNA, 22 nt, Human
acagacuggaagcacagcuuca

SEQ ID NO: 1861086 - RNA, 18 nt, Human
acagacacaggcccggcu

SEQ ID NO: 1861087 - RNA, 22 nt, Human
acagacacaggcccggcuccag

SEQ ID NO: 1861088 - RNA, 19 nt, Human
acagaaagcagaacaguga

SEQ ID NO: 1861089 - RNA, 17 nt, Human
acagacacaggcccggc

SEQ ID NO: 1861090 - RNA, 12 nt, Human
uauauuuacaaa

SEQ ID NO: 1861091 - RNA, 19 nt, Human
uaucccuacuguaauuugu

SEQ ID NO: 1861092 - RNA, 20 nt, Human
uaucccuacuguaauuugug

SEQ ID NO: 1861093 - RNA, 16 nt, Human
uaucccggcugcccuu

SEQ ID NO: 1861094 - RNA, 15 nt, Human
uaucucagggccugg

SEQ ID NO: 1861095 - RNA, 13 nt, Human
uaucucagggccu

SEQ ID NO: 1861096 - RNA, 17 nt, Human
uauccuacuuccccuuc

SEQ ID NO: 1861097 - RNA, 14 nt, Human
uauccuacuucccc

SEQ ID NO: 1861098 - RNA, 21 nt, Human
acagagcaagugagacccugu

SEQ ID NO: 1861099 - RNA, 17 nt, Human
acagaguuguuacauuu

SEQ ID NO: 1861100 - RNA, 18 nt, Human
acagaguuguuacauuuu

SEQ ID NO: 1861101 - RNA, 19 nt, Human
acagaguuguuacauuuuu

SEQ ID NO: 1861102 - RNA, 20 nt, Human
acagaguuguuacauuuuua

SEQ ID NO: 1861103 - RNA, 16 nt, Human
acagaguuguuacauu

SEQ ID NO: 1861104 - RNA, 23 nt, Human
acagcccgggcucugccucccau

SEQ ID NO: 1861105 - RNA, 22 nt, Human
acagcccgggcucugccuccca

SEQ ID NO: 1861106 - RNA, 21 nt, Human
acagcccgggcucugccuccc

SEQ ID NO: 1861107 - RNA, 16 nt, Human
acagcaaggagauuua

SEQ ID NO: 1861108 - RNA, 23 nt, Human
uaugaaagauggcugugccucug

SEQ ID NO: 1861109 - RNA, 22 nt, Human
uaugaaagauggcugugccucu

SEQ ID NO: 1861110 - RNA, 20 nt, Human
uaugaaagauggcugugccu

SEQ ID NO: 1861111 - RNA, 21 nt, Human
acagaguuguuacauuuuuaa

SEQ ID NO: 1861112 - RNA, 22 nt, Human
acagaguuguuacauuuuuaag

SEQ ID NO: 1861113 - RNA, 20 nt, Human
acagauagauauaugcucug

SEQ ID NO: 1861114 - RNA, 20 nt, Human
acagauacuccuccaagguu

SEQ ID NO: 1861115 - RNA, 23 nt, Human
acagaugggugcuuggaggaagg

SEQ ID NO: 1861116 - RNA, 20 nt, Human
acagauguaaaagacuuuuu

SEQ ID NO: 1861117 - RNA, 13 nt, Human
uaguagagacagg

SEQ ID NO: 1861118 - RNA, 19 nt, Human
acacagucuuggcucacug

SEQ ID NO: 1861119 - RNA, 11 nt, Human
acacagugagu

SEQ ID NO: 1861120 - RNA, 21 nt, Human
uagguuggcaaaaaggcagga

SEQ ID NO: 1861121 - RNA, 17 nt, Human
acacagugaccauacua

SEQ ID NO: 1861122 - RNA, 13 nt, Human
acacagugagucg

SEQ ID NO: 1861123 - RNA, 11 nt, Human
acacacagcuc

SEQ ID NO: 1861124 - RNA, 12 nt, Human
acacacagcucu

SEQ ID NO: 1861125 - RNA, 14 nt, Human
acacacacauacac

SEQ ID NO: 1861126 - RNA, 21 nt, Human
acaaugguuuucuuguguguu

SEQ ID NO: 1861127 - RNA, 15 nt, Human
acaaugguuuucuug

SEQ ID NO: 1861128 - RNA, 22 nt, Human
uauaaccaguguuguggauuua

SEQ ID NO: 1861129 - RNA, 19 nt, Human
uauaacuauguugauaaaa

SEQ ID NO: 1861130 - RNA, 16 nt, Human
acacuaaccacgcugg

SEQ ID NO: 1861131 - RNA, 17 nt, Human
acacuaaccacgcugga

SEQ ID NO: 1861132 - RNA, 19 nt, Human
acacuaaccacgcuggacc

SEQ ID NO: 1861133 - RNA, 19 nt, Human
acaccucugcacaagcugc

SEQ ID NO: 1861134 - RNA, 14 nt, Human
acaccuugacaggg

SEQ ID NO: 1861135 - RNA, 15 nt, Human
acaccuugacagggc

SEQ ID NO: 1861136 - RNA, 16 nt, Human
acaccuugacagggca

SEQ ID NO: 1861137 - RNA, 18 nt, Human
acaccucugcacaagcug

SEQ ID NO: 1861138 - RNA, 19 nt, Human
acacauguccaagaagccc

SEQ ID NO: 1861139 - RNA, 18 nt, Human
acacauguccaagaagcc

SEQ ID NO: 1861140 - RNA, 13 nt, Human
acacauguccaag

SEQ ID NO: 1861141 - RNA, 22 nt, Human
acacauguccaagaagcccagg

SEQ ID NO: 1861142 - RNA, 21 nt, Human
acacauguccaagaagcccag

SEQ ID NO: 1861143 - RNA, 13 nt, Human
acacauuuuauuu

SEQ ID NO: 1861144 - RNA, 12 nt, Human
acacccagccca

SEQ ID NO: 1861145 - RNA, 13 nt, Human
acacccagcccac

SEQ ID NO: 1861146 - RNA, 14 nt, Human
uauaaaagacugac

SEQ ID NO: 1861147 - RNA, 21 nt, Human
uauaaaaauaaaaaacacugg

SEQ ID NO: 1861148 - RNA, 20 nt, Human
uauaaaaauaaaaaacacug

SEQ ID NO: 1861149 - RNA, 10 nt, Human
uaguuuuugu

SEQ ID NO: 1861150 - RNA, 18 nt, Human
uaguucagguaacaggca

SEQ ID NO: 1861151 - RNA, 20 nt, Human
ucaccccagccccaaaacuc

SEQ ID NO: 1861152 - RNA, 14 nt, Human
ucaccccagcccca

SEQ ID NO: 1861153 - RNA, 13 nt, Human
ucaccccagcccc

SEQ ID NO: 1861154 - RNA, 15 nt, Human
ucaccccggccaccu

SEQ ID NO: 1861155 - RNA, 16 nt, Human
ucacaacaaccugguc

SEQ ID NO: 1861156 - RNA, 22 nt, Human
ucacacgucuggcuucacagau

SEQ ID NO: 1861157 - RNA, 12 nt, Human
ucacauaucugu

SEQ ID NO: 1861158 - RNA, 15 nt, Human
ucacauaucugucau

SEQ ID NO: 1861159 - RNA, 15 nt, Human
ucacaguucucuccu

SEQ ID NO: 1861160 - RNA, 15 nt, Human
accaauguucucucu

SEQ ID NO: 1861161 - RNA, 18 nt, Human
accaauauuguacaguuu

SEQ ID NO: 1861162 - RNA, 19 nt, Human
accaauauuguacaguuuu

SEQ ID NO: 1861163 - RNA, 15 nt, Human
accaauauuguacag

SEQ ID NO: 1861164 - RNA, 14 nt, Human
accaauauuguaca

SEQ ID NO: 1861165 - RNA, 16 nt, Human
accaauauuguacagu

SEQ ID NO: 1861166 - RNA, 17 nt, Human
accaauauuguacaguu

SEQ ID NO: 1861167 - RNA, 22 nt, Human
accaacauacucccaucuguga

SEQ ID NO: 1861168 - RNA, 21 nt, Human
accaacauacucccaucugug

SEQ ID NO: 1861169 - RNA, 19 nt, Human
accaacauacucccaucug

SEQ ID NO: 1861170 - RNA, 20 nt, Human
ucaagugauucucaugccuc

SEQ ID NO: 1861171 - RNA, 23 nt, Human
ucaagugaaaaaggaggaagaga

SEQ ID NO: 1861172 - RNA, 17 nt, Human
ucaagugauucucaugc

SEQ ID NO: 1861173 - RNA, 15 nt, Human
ucaagugaaaaagga

SEQ ID NO: 1861174 - RNA, 14 nt, Human
accacacuccagcu

SEQ ID NO: 1861175 - RNA, 15 nt, Human
ucaauucuugccaaa

SEQ ID NO: 1861176 - RNA, 15 nt, Human
accacuuuuguucuu

SEQ ID NO: 1861177 - RNA, 16 nt, Human
accacuuuuguucuug

SEQ ID NO: 1861178 - RNA, 21 nt, Human
accacuuuuguucuugguuug

SEQ ID NO: 1861179 - RNA, 22 nt, Human
ucaccccggccaccugcggugc

SEQ ID NO: 1861180 - RNA, 21 nt, Human
accacugcacuccagccuggg

SEQ ID NO: 1861181 - RNA, 23 nt, Human
accacugcucugaugaagaggag

SEQ ID NO: 1861182 - RNA, 17 nt, Human
accacugcucugaugaa

SEQ ID NO: 1861183 - RNA, 15 nt, Human
accacugcucugaug

SEQ ID NO: 1861184 - RNA, 20 nt, Human
accacugcacuccagccugg

SEQ ID NO: 1861185 - RNA, 17 nt, Human
accacugcacuccagcc

SEQ ID NO: 1861186 - RNA, 18 nt, Human
ucaccccggccaccugcg

SEQ ID NO: 1861187 - RNA, 17 nt, Human
ucaccccggccaccugc

SEQ ID NO: 1861188 - RNA, 22 nt, Human
accacuuuuguucuugguuugu

SEQ ID NO: 1861189 - RNA, 12 nt, Human
accagagcccac

SEQ ID NO: 1861190 - RNA, 14 nt, Human
accagagcccaccu

SEQ ID NO: 1861191 - RNA, 16 nt, Human
accagagcccaccuug

SEQ ID NO: 1861192 - RNA, 14 nt, Human
accagacaccuuga

SEQ ID NO: 1861193 - RNA, 11 nt, Human
accagacaggu

SEQ ID NO: 1861194 - RNA, 13 nt, Human
ucaccugccccuc

SEQ ID NO: 1861195 - RNA, 15 nt, Human
ucaccugccccucaa

SEQ ID NO: 1861196 - RNA, 15 nt, Human
ucaccucucccuugg

SEQ ID NO: 1861197 - RNA, 16 nt, Human
ucaccugaagacucau

SEQ ID NO: 1861198 - RNA, 14 nt, Human
accagggacugagg

SEQ ID NO: 1861199 - RNA, 21 nt, Human
accagccuccaugcugccucc

SEQ ID NO: 1861200 - RNA, 20 nt, Human
accagccuccaugcugccuc

SEQ ID NO: 1861201 - RNA, 19 nt, Human
accagccuccaugcugccu

SEQ ID NO: 1861202 - RNA, 14 nt, Human
accagccuccaugc

SEQ ID NO: 1861203 - RNA, 17 nt, Human
accagagcccaccuugg

SEQ ID NO: 1861204 - RNA, 18 nt, Human
ucacuauguugcccaggc

SEQ ID NO: 1861205 - RNA, 17 nt, Human
ucacuauguugcccagg

SEQ ID NO: 1861206 - RNA, 19 nt, Human
ucacuauguugcccaggca

SEQ ID NO: 1861207 - RNA, 20 nt, Human
ucacuauguugcccaggcag

SEQ ID NO: 1861208 - RNA, 12 nt, Human
acccccacccaa

SEQ ID NO: 1861209 - RNA, 16 nt, Human
accccuucgcuccugu

SEQ ID NO: 1861210 - RNA, 14 nt, Human
accccuucgcuccu

SEQ ID NO: 1861211 - RNA, 15 nt, Human
accccuucgcuccug

SEQ ID NO: 1861212 - RNA, 12 nt, Human
ucagcucaugga

SEQ ID NO: 1861213 - RNA, 20 nt, Human
ucagcuuguaaauagcucag

SEQ ID NO: 1861214 - RNA, 16 nt, Human
ucagcucacugcaacc

SEQ ID NO: 1861215 - RNA, 13 nt, Human
ucagcucacugca

SEQ ID NO: 1861216 - RNA, 14 nt, Human
ucagcggggacagc

SEQ ID NO: 1861217 - RNA, 23 nt, Human
ucagccguguaaccauggaccca

SEQ ID NO: 1861218 - RNA, 19 nt, Human
acccagcgagcccuggugg

SEQ ID NO: 1861219 - RNA, 23 nt, Human
acccagcgagcccugguggcagu

SEQ ID NO: 1861220 - RNA, 22 nt, Human
ucagccaagaauucuuaaauau

SEQ ID NO: 1861221 - RNA, 24 nt, Human
acccagcgagcccugguggcagug

SEQ ID NO: 1861222 - RNA, 23 nt, Human
accccagcuggggccaggcuggg

SEQ ID NO: 1861223 - RNA, 16 nt, Human
acccccaaauuuucuu

SEQ ID NO: 1861224 - RNA, 20 nt, Human
ucagagacuccugcaggcag

SEQ ID NO: 1861225 - RNA, 17 nt, Human
ucagagacuccugcagg

SEQ ID NO: 1861226 - RNA, 21 nt, Human
ucagagacuccugcaggcagc

SEQ ID NO: 1861227 - RNA, 19 nt, Human
ucagaaucucaaauaacua

SEQ ID NO: 1861228 - RNA, 18 nt, Human
ucagaaucucaaauaacu

SEQ ID NO: 1861229 - RNA, 17 nt, Human
ucagaaucucucuucuu

SEQ ID NO: 1861230 - RNA, 21 nt, Human
ucagagagggugggagugggc

SEQ ID NO: 1861231 - RNA, 16 nt, Human
ucagagagggugggag

SEQ ID NO: 1861232 - RNA, 23 nt, Human
ucagagagggugggagugggccc

SEQ ID NO: 1861233 - RNA, 12 nt, Human
ucagagccugca

SEQ ID NO: 1861234 - RNA, 13 nt, Human
ucagagccugcag

SEQ ID NO: 1861235 - RNA, 14 nt, Human
ucagagccugcagu

SEQ ID NO: 1861236 - RNA, 15 nt, Human
ucagagccugcaguu

SEQ ID NO: 1861237 - RNA, 18 nt, Human
ucagagccugcaguuauu

SEQ ID NO: 1861238 - RNA, 14 nt, Human
ucagaagacacuga

SEQ ID NO: 1861239 - RNA, 22 nt, Human
ucagaaguuucugccgcagccc

SEQ ID NO: 1861240 - RNA, 19 nt, Human
ucagaaguuucugccgcag

SEQ ID NO: 1861241 - RNA, 19 nt, Human
ucagaaguuucucagcucc

SEQ ID NO: 1861242 - RNA, 15 nt, Human
ucacuccuaccuggu

SEQ ID NO: 1861243 - RNA, 21 nt, Human
ucacucuuauugcccacgcug

SEQ ID NO: 1861244 - RNA, 23 nt, Human
ucacucuuauugcccacgcugga

SEQ ID NO: 1861245 - RNA, 22 nt, Human
accauggucggaaaacaugcua

SEQ ID NO: 1861246 - RNA, 13 nt, Human
acccacugcucug

SEQ ID NO: 1861247 - RNA, 14 nt, Human
acccacugcucugg

SEQ ID NO: 1861248 - RNA, 15 nt, Human
acccacugcucuggu

SEQ ID NO: 1861249 - RNA, 11 nt, Human
acccacugcuu

SEQ ID NO: 1861250 - RNA, 10 nt, Human
acccacugcu

SEQ ID NO: 1861251 - RNA, 11 nt, Human
acccacugcuc

SEQ ID NO: 1861252 - RNA, 23 nt, Human
accauuucuugagguaaaagcau

SEQ ID NO: 1861253 - RNA, 18 nt, Human
ucaaaagaaagaaaauca

SEQ ID NO: 1861254 - RNA, 19 nt, Human
ucaaaauuguuacaaauug

SEQ ID NO: 1861255 - RNA, 16 nt, Human
ucaaaauuguuacaaa

SEQ ID NO: 1861256 - RNA, 14 nt, Human
ucaaagcugaaaug

SEQ ID NO: 1861257 - RNA, 19 nt, Human
acaugauccugcaauucca

SEQ ID NO: 1861258 - RNA, 19 nt, Human
acaugagcaucaggccagg

SEQ ID NO: 1861259 - RNA, 18 nt, Human
acaugagcaucaggccag

SEQ ID NO: 1861260 - RNA, 17 nt, Human
acaugagcaucaggcca

SEQ ID NO: 1861261 - RNA, 17 nt, Human
acaugaucuucuuuaua

SEQ ID NO: 1861262 - RNA, 15 nt, Human
acaugaucuucuuua

SEQ ID NO: 1861263 - RNA, 22 nt, Human
acaugcuacacacugcauguuu

SEQ ID NO: 1861264 - RNA, 20 nt, Human
acaugagcaucaggccaggc

SEQ ID NO: 1861265 - RNA, 18 nt, Human
ucaaauaacuaaaaggua

SEQ ID NO: 1861266 - RNA, 22 nt, Human
acauuagcaguuugcuuuguau

SEQ ID NO: 1861267 - RNA, 18 nt, Human
acauuagcaguuugcuuu

SEQ ID NO: 1861268 - RNA, 21 nt, Human
acauguccaagaagcccagga

SEQ ID NO: 1861269 - RNA, 15 nt, Human
acauucuguuaauca

SEQ ID NO: 1861270 - RNA, 15 nt, Human
ucaaauuucuaaauc

SEQ ID NO: 1861271 - RNA, 16 nt, Human
ucaaauuucuaaaucu

SEQ ID NO: 1861272 - RNA, 12 nt, Human
acauucuguuaa

SEQ ID NO: 1861273 - RNA, 17 nt, Human
ucaaauuucuaaaucuc

SEQ ID NO: 1861274 - RNA, 16 nt, Human
ucaacagguuuuccug

SEQ ID NO: 1861275 - RNA, 15 nt, Human
ucaagacuuccagag

SEQ ID NO: 1861276 - RNA, 23 nt, Human
ucaaguauuauaccuuuuuuaga

SEQ ID NO: 1861277 - RNA, 16 nt, Human
ucaaguauuauaccuu

SEQ ID NO: 1861278 - RNA, 21 nt, Human
ucaaguauuauaccuuuuuua

SEQ ID NO: 1861279 - RNA, 15 nt, Human
ucaaguauuauaccu

SEQ ID NO: 1861280 - RNA, 11 nt, Human
ucaaguauuau

SEQ ID NO: 1861281 - RNA, 18 nt, Human
acaugaaaacacauuuuu

SEQ ID NO: 1861282 - RNA, 19 nt, Human
acaugaaaacacauuuuuc

SEQ ID NO: 1861283 - RNA, 17 nt, Human
acaugaaaacacauuuu

SEQ ID NO: 1861284 - RNA, 21 nt, Human
acaucuugcucugcugacaga

SEQ ID NO: 1861285 - RNA, 18 nt, Human
acaucuugcucugcugac

SEQ ID NO: 1861286 - RNA, 19 nt, Human
acaucuugcucugcugaca

SEQ ID NO: 1861287 - RNA, 13 nt, Human
acaucuugcucug

SEQ ID NO: 1861288 - RNA, 14 nt, Human
acaucuugcucugc

SEQ ID NO: 1861289 - RNA, 13 nt, Human
acaucaacagaua

SEQ ID NO: 1861290 - RNA, 18 nt, Human
acaucaacaucuugguca

SEQ ID NO: 1861291 - RNA, 16 nt, Human
acaucaacaucuuggu

SEQ ID NO: 1861292 - RNA, 18 nt, Human
acauauugauuuccguua

SEQ ID NO: 1861293 - RNA, 22 nt, Human
acauauugauuuccguuaaaau

SEQ ID NO: 1861294 - RNA, 23 nt, Human
acauauugauuuccguuaaaaua

SEQ ID NO: 1861295 - RNA, 14 nt, Human
acauauugauuucc

SEQ ID NO: 1861296 - RNA, 16 nt, Human
acauauugauuuccgu

SEQ ID NO: 1861297 - RNA, 14 nt, Human
acauagaauuaaca

SEQ ID NO: 1861298 - RNA, 18 nt, Human
acauagaauuaacacaug

SEQ ID NO: 1861299 - RNA, 21 nt, Human
acauagcuuacaagccagcug

SEQ ID NO: 1861300 - RNA, 21 nt, Human
acauagugaugguuccccugu

SEQ ID NO: 1861301 - RNA, 16 nt, Human
acauagugaugguucc

SEQ ID NO: 1861302 - RNA, 15 nt, Human
acaguuuuuauugcu

SEQ ID NO: 1861303 - RNA, 16 nt, Human
acaguuuguuaguaug

SEQ ID NO: 1861304 - RNA, 20 nt, Human
acaguuuguuaguaugaggc

SEQ ID NO: 1861305 - RNA, 14 nt, Human
acauacucugcuua

SEQ ID NO: 1861306 - RNA, 17 nt, Human
acauacucccaucugug

SEQ ID NO: 1861307 - RNA, 21 nt, Human
acauacuaaccagcagaaaug

SEQ ID NO: 1861308 - RNA, 22 nt, Human
acauacuaaccagcagaaaugc

SEQ ID NO: 1861309 - RNA, 13 nt, Human
acauacucccauc

SEQ ID NO: 1861310 - RNA, 13 nt, Human
acauacuaaccag

SEQ ID NO: 1861311 - RNA, 16 nt, Human
acaguugaaaaacagc

SEQ ID NO: 1861312 - RNA, 15 nt, Human
acaguugaaaaacag

SEQ ID NO: 1861313 - RNA, 20 nt, Human
acaguugaaaaacagcugag

SEQ ID NO: 1861314 - RNA, 22 nt, Human
uauuucccucaccuuucccauc

SEQ ID NO: 1861315 - RNA, 23 nt, Human
uauuuccuauauuguuuucagug

SEQ ID NO: 1861316 - RNA, 14 nt, Human
accugaggcccuuc

SEQ ID NO: 1861317 - RNA, 21 nt, Human
accugaggcccuucucuccag

SEQ ID NO: 1861318 - RNA, 20 nt, Human
accugaggcccuucucucca

SEQ ID NO: 1861319 - RNA, 16 nt, Human
accugaggcccuucuc

SEQ ID NO: 1861320 - RNA, 15 nt, Human
accugaggcccuucu

SEQ ID NO: 1861321 - RNA, 22 nt, Human
accugaggcccuucucuccagc

SEQ ID NO: 1861322 - RNA, 18 nt, Human
accugauugugucucuug

SEQ ID NO: 1861323 - RNA, 17 nt, Human
accugauugugucucuu

SEQ ID NO: 1861324 - RNA, 15 nt, Human
accugauugugucuc

SEQ ID NO: 1861325 - RNA, 15 nt, Human
ucauugaccugaggc

SEQ ID NO: 1861326 - RNA, 14 nt, Human
ucauugaccugagg

SEQ ID NO: 1861327 - RNA, 12 nt, Human
ucauugaccuga

SEQ ID NO: 1861328 - RNA, 22 nt, Human
ucauugaaaucuuuuugcuuug

SEQ ID NO: 1861329 - RNA, 19 nt, Human
accucggugccuuccucuu

SEQ ID NO: 1861330 - RNA, 13 nt, Human
accuccugggcua

SEQ ID NO: 1861331 - RNA, 13 nt, Human
accuccugcuggg

SEQ ID NO: 1861332 - RNA, 16 nt, Human
accuccugcugggcag

SEQ ID NO: 1861333 - RNA, 14 nt, Human
accuccugcugggc

SEQ ID NO: 1861334 - RNA, 13 nt, Human
ucauugaaaucuu

SEQ ID NO: 1861335 - RNA, 12 nt, Human
ucauugaaaucu

SEQ ID NO: 1861336 - RNA, 12 nt, Human
ucauucuucugu

SEQ ID NO: 1861337 - RNA, 22 nt, Human
ucauccuucuggaauaaggaga

SEQ ID NO: 1861338 - RNA, 14 nt, Human
ucaucuaggauuuu

SEQ ID NO: 1861339 - RNA, 18 nt, Human
ucaucuagguaaauuaca

SEQ ID NO: 1861340 - RNA, 19 nt, Human
ucauccuccucagaucuuc

SEQ ID NO: 1861341 - RNA, 13 nt, Human
ucauccuccucag

SEQ ID NO: 1861342 - RNA, 18 nt, Human
ucauccucauacccaccc

SEQ ID NO: 1861343 - RNA, 14 nt, Human
ucauccuucuggaa

SEQ ID NO: 1861344 - RNA, 15 nt, Human
ucauccuaagcuauu

SEQ ID NO: 1861345 - RNA, 23 nt, Human
accuccugccucgaacuggcugc

SEQ ID NO: 1861346 - RNA, 12 nt, Human
accuccugcugg

SEQ ID NO: 1861347 - RNA, 11 nt, Human
accuccugcug

SEQ ID NO: 1861348 - RNA, 13 nt, Human
accuccugccucg

SEQ ID NO: 1861349 - RNA, 12 nt, Human
accuccugccuc

SEQ ID NO: 1861350 - RNA, 15 nt, Human
ucaggaagcucaggg

SEQ ID NO: 1861351 - RNA, 14 nt, Human
ucaggaagcucagg

SEQ ID NO: 1861352 - RNA, 13 nt, Human
ucaggaagcucag

SEQ ID NO: 1861353 - RNA, 12 nt, Human
ucaggaagcuca

SEQ ID NO: 1861354 - RNA, 20 nt, Human
accuaccaccacgcccggcu

SEQ ID NO: 1861355 - RNA, 16 nt, Human
accuaccaccacgccc

SEQ ID NO: 1861356 - RNA, 15 nt, Human
accuacaguguacag

SEQ ID NO: 1861357 - RNA, 16 nt, Human
accuacaguguacagu

SEQ ID NO: 1861358 - RNA, 17 nt, Human
accuacaguguacaguc

SEQ ID NO: 1861359 - RNA, 18 nt, Human
accuacaguguacagucu

SEQ ID NO: 1861360 - RNA, 20 nt, Human
accuacaguguacagucuug

SEQ ID NO: 1861361 - RNA, 14 nt, Human
uccaacccucauca

SEQ ID NO: 1861362 - RNA, 17 nt, Human
uccaacccucaucacca

SEQ ID NO: 1861363 - RNA, 16 nt, Human
uccaacccucaucacc

SEQ ID NO: 1861364 - RNA, 23 nt, Human
uccaacccucaucaccaacgucu

SEQ ID NO: 1861365 - RNA, 15 nt, Human
accugccaggaagcc

SEQ ID NO: 1861366 - RNA, 14 nt, Human
accugccaggaagc

SEQ ID NO: 1861367 - RNA, 12 nt, Human
accugccaggaa

SEQ ID NO: 1861368 - RNA, 12 nt, Human
uccaagaagccc

SEQ ID NO: 1861369 - RNA, 16 nt, Human
uccaagcuggucccac

SEQ ID NO: 1861370 - RNA, 20 nt, Human
uccaagcuggucccacucag

SEQ ID NO: 1861371 - RNA, 18 nt, Human
uccaaucccaccaacccu

SEQ ID NO: 1861372 - RNA, 19 nt, Human
uccaaguccacaguggaac

SEQ ID NO: 1861373 - RNA, 21 nt, Human
uccaagcuggucccacucagu

SEQ ID NO: 1861374 - RNA, 20 nt, Human
accuuagacagucccugcca

SEQ ID NO: 1861375 - RNA, 19 nt, Human
accuuagacagucccugcc

SEQ ID NO: 1861376 - RNA, 18 nt, Human
accuuagacagucccugc

SEQ ID NO: 1861377 - RNA, 19 nt, Human
accuguuucugcagccacu

SEQ ID NO: 1861378 - RNA, 21 nt, Human
accuggucacaggacucugcc

SEQ ID NO: 1861379 - RNA, 20 nt, Human
accuggccucugcacucccc

SEQ ID NO: 1861380 - RNA, 18 nt, Human
accuggccucugcacucc

SEQ ID NO: 1861381 - RNA, 23 nt, Human
accuggccucugcacuccccugc

SEQ ID NO: 1861382 - RNA, 17 nt, Human
accuggccucugcacuc

SEQ ID NO: 1861383 - RNA, 16 nt, Human
accuggccucugcacu

SEQ ID NO: 1861384 - RNA, 14 nt, Human
accuggccucugca

SEQ ID NO: 1861385 - RNA, 17 nt, Human
uccacccaccucagccu

SEQ ID NO: 1861386 - RNA, 18 nt, Human
uccacccaccucagccuc

SEQ ID NO: 1861387 - RNA, 19 nt, Human
uccacccaccucagccucc

SEQ ID NO: 1861388 - RNA, 12 nt, Human
uccacccaggag

SEQ ID NO: 1861389 - RNA, 14 nt, Human
uccacccaggagcc

SEQ ID NO: 1861390 - RNA, 15 nt, Human
uccacccaggagccc

SEQ ID NO: 1861391 - RNA, 13 nt, Human
uccagacacaugu

SEQ ID NO: 1861392 - RNA, 22 nt, Human
uccagaauuucccaaagcagug

SEQ ID NO: 1861393 - RNA, 20 nt, Human
uccagaauuucccaaagcag

SEQ ID NO: 1861394 - RNA, 22 nt, Human
uccacugccuucgauacaccgg

SEQ ID NO: 1861395 - RNA, 15 nt, Human
uccacugccuucgau

SEQ ID NO: 1861396 - RNA, 13 nt, Human
uccacugccuucg

SEQ ID NO: 1861397 - RNA, 16 nt, Human
uccagaauuucccaaa

SEQ ID NO: 1861398 - RNA, 14 nt, Human
uccagagacuggga

SEQ ID NO: 1861399 - RNA, 19 nt, Human
uccagacccggcugcgugg

SEQ ID NO: 1861400 - RNA, 15 nt, Human
uccagacccggcugc

SEQ ID NO: 1861401 - RNA, 18 nt, Human
uccagacccggcugcgug

SEQ ID NO: 1861402 - RNA, 17 nt, Human
uccacucaggucuguuu

SEQ ID NO: 1861403 - RNA, 18 nt, Human
uccaccuucccaugcccu

SEQ ID NO: 1861404 - RNA, 16 nt, Human
uccaccuucccaugcc

SEQ ID NO: 1861405 - RNA, 19 nt, Human
uccaccuucccaugcccug

SEQ ID NO: 1861406 - RNA, 20 nt, Human
accuuuugagugccuuacac

SEQ ID NO: 1861407 - RNA, 17 nt, Human
accuuuugagugccuua

SEQ ID NO: 1861408 - RNA, 14 nt, Human
accuuuugagugcc

SEQ ID NO: 1861409 - RNA, 14 nt, Human
uccaggcuguaucc

SEQ ID NO: 1861410 - RNA, 12 nt, Human
uccagccccugg

SEQ ID NO: 1861411 - RNA, 15 nt, Human
uccagagaguggcuc

SEQ ID NO: 1861412 - RNA, 17 nt, Human
uccagagaguggcuccu

SEQ ID NO: 1861413 - RNA, 16 nt, Human
uccagagaguggcucc

SEQ ID NO: 1861414 - RNA, 13 nt, Human
uccagccccugga

SEQ ID NO: 1861415 - RNA, 14 nt, Human
uccagccccuggau

SEQ ID NO: 1861416 - RNA, 19 nt, Human
accuuuuuuauacauaaac

SEQ ID NO: 1861417 - RNA, 20 nt, Human
accuuuuuuauacauaaaca

SEQ ID NO: 1861418 - RNA, 21 nt, Human
uccaggcuguaucccaugagc

SEQ ID NO: 1861419 - RNA, 21 nt, Human
accuuuuuuauacauaaacaa

SEQ ID NO: 1861420 - RNA, 22 nt, Human
accuuuuuuauacauaaacaag

SEQ ID NO: 1861421 - RNA, 14 nt, Human
acgagaaaacaaua

SEQ ID NO: 1861422 - RNA, 17 nt, Human
acgccagauucuuuccu

SEQ ID NO: 1861423 - RNA, 19 nt, Human
acgccagauucuuuccuga

SEQ ID NO: 1861424 - RNA, 16 nt, Human
acgagcaggcuucuuc

SEQ ID NO: 1861425 - RNA, 13 nt, Human
acuacaguuuguu

SEQ ID NO: 1861426 - RNA, 14 nt, Human
acuacaguuuguua

SEQ ID NO: 1861427 - RNA, 15 nt, Human
acuacaggcacccac

SEQ ID NO: 1861428 - RNA, 11 nt, Human
acuacaggcac

SEQ ID NO: 1861429 - RNA, 12 nt, Human
acuaaccacgcu

SEQ ID NO: 1861430 - RNA, 15 nt, Human
acuacaguuuguuag

SEQ ID NO: 1861431 - RNA, 11 nt, Human
acuacauucug

SEQ ID NO: 1861432 - RNA, 12 nt, Human
acuacauucugu

SEQ ID NO: 1861433 - RNA, 13 nt, Human
acuacauucuguu

SEQ ID NO: 1861434 - RNA, 14 nt, Human
acuacauucuguua

SEQ ID NO: 1861435 - RNA, 12 nt, Human
ucccagccccaa

SEQ ID NO: 1861436 - RNA, 17 nt, Human
ucccagcugugcucugg

SEQ ID NO: 1861437 - RNA, 21 nt, Human
uccccaccgcagacaggacca

SEQ ID NO: 1861438 - RNA, 18 nt, Human
uccccaccgcagacagga

SEQ ID NO: 1861439 - RNA, 17 nt, Human
uccccaccgcagacagg

SEQ ID NO: 1861440 - RNA, 22 nt, Human
uccccaccgcagacaggaccag

SEQ ID NO: 1861441 - RNA, 17 nt, Human
uccccaugucucgacuc

SEQ ID NO: 1861442 - RNA, 15 nt, Human
acuacauucuguuaa

SEQ ID NO: 1861443 - RNA, 22 nt, Human
ucccauaugccugggcagaagg

SEQ ID NO: 1861444 - RNA, 15 nt, Human
ucccaucacccgcua

SEQ ID NO: 1861445 - RNA, 20 nt, Human
acgggaggguaaggcugugg

SEQ ID NO: 1861446 - RNA, 13 nt, Human
ucccacagcgcug

SEQ ID NO: 1861447 - RNA, 20 nt, Human
ucccaccccacacacgccag

SEQ ID NO: 1861448 - RNA, 15 nt, Human
ucccaccccacacac

SEQ ID NO: 1861449 - RNA, 16 nt, Human
ucccacaaaggagagc

SEQ ID NO: 1861450 - RNA, 23 nt, Human
acguggcugcuucaaggauccug

SEQ ID NO: 1861451 - RNA, 17 nt, Human
acgguuuuacugcagcu

SEQ ID NO: 1861452 - RNA, 15 nt, Human
acgguuuuacugcag

SEQ ID NO: 1861453 - RNA, 22 nt, Human
acguauaaaagccuguuuaaga

SEQ ID NO: 1861454 - RNA, 13 nt, Human
uccaugaagaugu

SEQ ID NO: 1861455 - RNA, 21 nt, Human
uccaugaagauguagaggaga

SEQ ID NO: 1861456 - RNA, 20 nt, Human
uccauccugaggcuccacuu

SEQ ID NO: 1861457 - RNA, 21 nt, Human
uccauccugaggcuccacuug

SEQ ID NO: 1861458 - RNA, 23 nt, Human
acgccagauucuuuccugaggcu

SEQ ID NO: 1861459 - RNA, 22 nt, Human
acgccagauucuuuccugaggc

SEQ ID NO: 1861460 - RNA, 16 nt, Human
uccaucuaaacugccc

SEQ ID NO: 1861461 - RNA, 18 nt, Human
uccaucuaaacugccccc

SEQ ID NO: 1861462 - RNA, 18 nt, Human
ucccaaagcagugcaugc

SEQ ID NO: 1861463 - RNA, 17 nt, Human
ucccaaagcagugcaug

SEQ ID NO: 1861464 - RNA, 21 nt, Human
ucccaaagcagugcaugcugu

SEQ ID NO: 1861465 - RNA, 13 nt, Human
ucccaaagugcug

SEQ ID NO: 1861466 - RNA, 14 nt, Human
ucccaaagugcugg

SEQ ID NO: 1861467 - RNA, 18 nt, Human
ucccaaacccuucagugc

SEQ ID NO: 1861468 - RNA, 16 nt, Human
ucccaaagcagugcau

SEQ ID NO: 1861469 - RNA, 13 nt, Human
acuccagccuggg

SEQ ID NO: 1861470 - RNA, 12 nt, Human
acuccagccugg

SEQ ID NO: 1861471 - RNA, 23 nt, Human
acuccagaauuucccaaagcagu

SEQ ID NO: 1861472 - RNA, 17 nt, Human
acuccugcaggcagcca

SEQ ID NO: 1861473 - RNA, 15 nt, Human
acuccugaccucaag

SEQ ID NO: 1861474 - RNA, 19 nt, Human
acuccugcaggcagccagg

SEQ ID NO: 1861475 - RNA, 18 nt, Human
acuccugcaggcagccag

SEQ ID NO: 1861476 - RNA, 13 nt, Human
acuccucugucca

SEQ ID NO: 1861477 - RNA, 14 nt, Human
acuccucuguccag

SEQ ID NO: 1861478 - RNA, 17 nt, Human
acuccagaauuucccaa

SEQ ID NO: 1861479 - RNA, 15 nt, Human
acuccagaauuuccc

SEQ ID NO: 1861480 - RNA, 15 nt, Human
acucauugaccugag

SEQ ID NO: 1861481 - RNA, 14 nt, Human
acucauugaccuga

SEQ ID NO: 1861482 - RNA, 15 nt, Human
acucauucuucugua

SEQ ID NO: 1861483 - RNA, 17 nt, Human
ucccuuacgugaguccu

SEQ ID NO: 1861484 - RNA, 21 nt, Human
acuccugcaggcagccaggcc

SEQ ID NO: 1861485 - RNA, 12 nt, Human
ucccugucccag

SEQ ID NO: 1861486 - RNA, 15 nt, Human
ucccugguggcagcu

SEQ ID NO: 1861487 - RNA, 16 nt, Human
uccuagaaauucccca

SEQ ID NO: 1861488 - RNA, 14 nt, Human
uccuacuuccccuu

SEQ ID NO: 1861489 - RNA, 19 nt, Human
uccuaaauauauuuuaaga

SEQ ID NO: 1861490 - RNA, 17 nt, Human
uccggucccugucccag

SEQ ID NO: 1861491 - RNA, 12 nt, Human
ucccuuuuccuu

SEQ ID NO: 1861492 - RNA, 19 nt, Human
ucccuuuuaauccuggcug

SEQ ID NO: 1861493 - RNA, 14 nt, Human
ucccucuuucccuc

SEQ ID NO: 1861494 - RNA, 20 nt, Human
ucccucuuucccucccuucc

SEQ ID NO: 1861495 - RNA, 18 nt, Human
ucccucuuucccucccuu

SEQ ID NO: 1861496 - RNA, 21 nt, Human
ucccucuuucccucccuuccu

SEQ ID NO: 1861497 - RNA, 15 nt, Human
ucccugaaggccccg

SEQ ID NO: 1861498 - RNA, 11 nt, Human
ucccugaaggc

SEQ ID NO: 1861499 - RNA, 22 nt, Human
ucccggcugcccuuucugggca

SEQ ID NO: 1861500 - RNA, 18 nt, Human
ucccggcugcccuuucug

SEQ ID NO: 1861501 - RNA, 15 nt, Human
ucccggcugcccuuu

SEQ ID NO: 1861502 - RNA, 14 nt, Human
ucccggcugcccuu

SEQ ID NO: 1861503 - RNA, 13 nt, Human
ucccggcugcccu

SEQ ID NO: 1861504 - RNA, 16 nt, Human
ucccugaaggccccgc

SEQ ID NO: 1861505 - RNA, 17 nt, Human
ucccugaaggccccgcc

SEQ ID NO: 1861506 - RNA, 20 nt, Human
ucccgaauagcugggacuac

SEQ ID NO: 1861507 - RNA, 15 nt, Human
ucccgaguagcuggg

SEQ ID NO: 1861508 - RNA, 20 nt, Human
ucccgaguagcugagauuau

SEQ ID NO: 1861509 - RNA, 18 nt, Human
ucccgaguagcugggacu

SEQ ID NO: 1861510 - RNA, 16 nt, Human
ucccgaguagcuggga

SEQ ID NO: 1861511 - RNA, 17 nt, Human
ucccgaguagcugggac

SEQ ID NO: 1861512 - RNA, 17 nt, Human
acuacucccccaggugg

SEQ ID NO: 1861513 - RNA, 21 nt, Human
acuacuagggaaaugccuuug

SEQ ID NO: 1861514 - RNA, 12 nt, Human
acucaccccagc

SEQ ID NO: 1861515 - RNA, 14 nt, Human
acuguucucugccc

SEQ ID NO: 1861516 - RNA, 20 nt, Human
acuguucucugcccuccaag

SEQ ID NO: 1861517 - RNA, 15 nt, Human
acuguucucugcccu

SEQ ID NO: 1861518 - RNA, 21 nt, Human
acuguucucugcccuccaaga

SEQ ID NO: 1861519 - RNA, 15 nt, Human
ucuaaagcugccagc

SEQ ID NO: 1861520 - RNA, 16 nt, Human
ucuaaagcugccagcc

SEQ ID NO: 1861521 - RNA, 14 nt, Human
ucuaaagcugccag

SEQ ID NO: 1861522 - RNA, 13 nt, Human
ucuaaagcugcca

SEQ ID NO: 1861523 - RNA, 20 nt, Human
ucuaaagccauuguaguccu

SEQ ID NO: 1861524 - RNA, 17 nt, Human
acuuaaauaaugugaaa

SEQ ID NO: 1861525 - RNA, 18 nt, Human
acuuaaauaaugugaaac

SEQ ID NO: 1861526 - RNA, 16 nt, Human
acuuaaauaaugugaa

SEQ ID NO: 1861527 - RNA, 15 nt, Human
acuuaaauaauguga

SEQ ID NO: 1861528 - RNA, 12 nt, Human
acuguugcccag

SEQ ID NO: 1861529 - RNA, 13 nt, Human
acuguugcccagg

SEQ ID NO: 1861530 - RNA, 14 nt, Human
acuguugcccaggc

SEQ ID NO: 1861531 - RNA, 17 nt, Human
acuguugcccaggcugg

SEQ ID NO: 1861532 - RNA, 18 nt, Human
acuguugcccaggcuggc

SEQ ID NO: 1861533 - RNA, 13 nt, Human
acuuaaucuaaau

SEQ ID NO: 1861534 - RNA, 15 nt, Human
acuuaaucuaaaugg

SEQ ID NO: 1861535 - RNA, 16 nt, Human
acuuaaucuaaaugga

SEQ ID NO: 1861536 - RNA, 16 nt, Human
acuuagaaauugcauu

SEQ ID NO: 1861537 - RNA, 14 nt, Human
acuucagcucuguu

SEQ ID NO: 1861538 - RNA, 12 nt, Human
acugugugcuca

SEQ ID NO: 1861539 - RNA, 21 nt, Human
acugugugcucaggagcccug

SEQ ID NO: 1861540 - RNA, 20 nt, Human
acugugugcucaggagcccu

SEQ ID NO: 1861541 - RNA, 19 nt, Human
acugugugcucaggagccc

SEQ ID NO: 1861542 - RNA, 15 nt, Human
acugugugcucagga

SEQ ID NO: 1861543 - RNA, 16 nt, Human
acugggagaaaugaaa

SEQ ID NO: 1861544 - RNA, 18 nt, Human
acuguccuacccacccuc

SEQ ID NO: 1861545 - RNA, 23 nt, Human
acuguccuacccacccuccuuuc

SEQ ID NO: 1861546 - RNA, 17 nt, Human
acuguccuacccacccu

SEQ ID NO: 1861547 - RNA, 16 nt, Human
ucguaaaauuaagaaa

SEQ ID NO: 1861548 - RNA, 22 nt, Human
ucguuuucaaaauuguuacaaa

SEQ ID NO: 1861549 - RNA, 17 nt, Human
ucguuugaaucacagua

SEQ ID NO: 1861550 - RNA, 13 nt, Human
ucguaaaauuaag

SEQ ID NO: 1861551 - RNA, 18 nt, Human
ucggcucacugcauccuc

SEQ ID NO: 1861552 - RNA, 21 nt, Human
ucgggaggucgaggcaggagg

SEQ ID NO: 1861553 - RNA, 19 nt, Human
ucgggaggucgaggcagga

SEQ ID NO: 1861554 - RNA, 17 nt, Human
ucgggaggucgaggcag

SEQ ID NO: 1861555 - RNA, 12 nt, Human
ucgggcaugaca

SEQ ID NO: 1861556 - RNA, 11 nt, Human
ucgggcaugac

SEQ ID NO: 1861557 - RNA, 15 nt, Human
acugcuggcugccuu

SEQ ID NO: 1861558 - RNA, 14 nt, Human
acugcuggcugccu

SEQ ID NO: 1861559 - RNA, 18 nt, Human
acugcuuaacuucacaua

SEQ ID NO: 1861560 - RNA, 15 nt, Human
acuggauuaaacuua

SEQ ID NO: 1861561 - RNA, 20 nt, Human
acugcuuaacuucacauauu

SEQ ID NO: 1861562 - RNA, 17 nt, Human
acugcuuccagugaggc

SEQ ID NO: 1861563 - RNA, 21 nt, Human
acugcuugugaaaggaaagag

SEQ ID NO: 1861564 - RNA, 14 nt, Human
acugcuuuuggucu

SEQ ID NO: 1861565 - RNA, 15 nt, Human
acugcauguuuguga

SEQ ID NO: 1861566 - RNA, 16 nt, Human
acugcauguuugugau

SEQ ID NO: 1861567 - RNA, 23 nt, Human
acugcauccuccgccucccgggu

SEQ ID NO: 1861568 - RNA, 22 nt, Human
acugcaucaagaugugacaugu

SEQ ID NO: 1861569 - RNA, 20 nt, Human
acugcaucaagaugugacau

SEQ ID NO: 1861570 - RNA, 20 nt, Human
acugcauccuccgccucccg

SEQ ID NO: 1861571 - RNA, 17 nt, Human
acugcauccuccgccuc

SEQ ID NO: 1861572 - RNA, 16 nt, Human
acugcauaugaaagga

SEQ ID NO: 1861573 - RNA, 22 nt, Human
uccuagaaauuccccacccuga

SEQ ID NO: 1861574 - RNA, 21 nt, Human
uccuagaaauuccccacccug

SEQ ID NO: 1861575 - RNA, 21 nt, Human
acugccuauuuuaauaaacac

SEQ ID NO: 1861576 - RNA, 16 nt, Human
acugccuauuuuaaua

SEQ ID NO: 1861577 - RNA, 15 nt, Human
acugccucuuccucc

SEQ ID NO: 1861578 - RNA, 14 nt, Human
acugccucuuccuc

SEQ ID NO: 1861579 - RNA, 15 nt, Human
uccuucagugccuua

SEQ ID NO: 1861580 - RNA, 14 nt, Human
uccuucagugccuu

SEQ ID NO: 1861581 - RNA, 14 nt, Human
acuggccucugcug

SEQ ID NO: 1861582 - RNA, 17 nt, Human
uccuucagugccuuaug

SEQ ID NO: 1861583 - RNA, 16 nt, Human
uccuucagugccuuau

SEQ ID NO: 1861584 - RNA, 14 nt, Human
uccuuguguuacua

SEQ ID NO: 1861585 - RNA, 23 nt, Human
uccuuguguuacuaaguuuuuau

SEQ ID NO: 1861586 - RNA, 21 nt, Human
uccuuuaauuuuuuacuauuu

SEQ ID NO: 1861587 - RNA, 15 nt, Human
uccuuuagcgcccag

SEQ ID NO: 1861588 - RNA, 19 nt, Human
uccuuuagcgcccaguugg

SEQ ID NO: 1861589 - RNA, 18 nt, Human
ucgcuauugucaccaggg

SEQ ID NO: 1861590 - RNA, 18 nt, Human
ucgagcaugccuggaugg

SEQ ID NO: 1861591 - RNA, 16 nt, Human
ucgagcaugccuggau

SEQ ID NO: 1861592 - RNA, 19 nt, Human
ucgcgacaaugcaaaccau

SEQ ID NO: 1861593 - RNA, 16 nt, Human
ucgcgacaaugcaaac

SEQ ID NO: 1861594 - RNA, 13 nt, Human
ucgaggacaggga

SEQ ID NO: 1861595 - RNA, 22 nt, Human
uccuuuagcgcccaguugggug

SEQ ID NO: 1861596 - RNA, 23 nt, Human
uccuuuagcgcccaguugggugg

SEQ ID NO: 1861597 - RNA, 18 nt, Human
ucgagaaacagccugugu

SEQ ID NO: 1861598 - RNA, 19 nt, Human
agaaaacuuguauuaugug

SEQ ID NO: 1861599 - RNA, 18 nt, Human
agaaaaaggaugcacaga

SEQ ID NO: 1861600 - RNA, 21 nt, Human
agaaaacuuguauuaugugug

SEQ ID NO: 1861601 - RNA, 17 nt, Human
agaaaaaggaugcacag

SEQ ID NO: 1861602 - RNA, 21 nt, Human
ucucuggccuucggccuccau

SEQ ID NO: 1861603 - RNA, 22 nt, Human
ucucuggccuucggccuccauc

SEQ ID NO: 1861604 - RNA, 23 nt, Human
ucucuggccuucggccuccaucc

SEQ ID NO: 1861605 - RNA, 17 nt, Human
ucucuugagccugggag

SEQ ID NO: 1861606 - RNA, 18 nt, Human
ucucuugagccugggagg

SEQ ID NO: 1861607 - RNA, 16 nt, Human
ucucuugauucauaau

SEQ ID NO: 1861608 - RNA, 14 nt, Human
ucucuugauucaua

SEQ ID NO: 1861609 - RNA, 13 nt, Human
agaaaaagaaaaa

SEQ ID NO: 1861610 - RNA, 20 nt, Human
ucucuuuaaugucacaggca

SEQ ID NO: 1861611 - RNA, 21 nt, Human
ucucuuuaaugucacaggcag

SEQ ID NO: 1861612 - RNA, 19 nt, Human
ucucuccagccccuggaug

SEQ ID NO: 1861613 - RNA, 18 nt, Human
ucucuccagccccuggau

SEQ ID NO: 1861614 - RNA, 16 nt, Human
ucucuccagccccugg

SEQ ID NO: 1861615 - RNA, 17 nt, Human
ucucuccagccccugga

SEQ ID NO: 1861616 - RNA, 15 nt, Human
acuuugaccucugca

SEQ ID NO: 1861617 - RNA, 16 nt, Human
acuuugaccucugcag

SEQ ID NO: 1861618 - RNA, 18 nt, Human
acuuugaccucugcagca

SEQ ID NO: 1861619 - RNA, 15 nt, Human
ucucucacuccuuga

SEQ ID NO: 1861620 - RNA, 13 nt, Human
ucucucacuccuu

SEQ ID NO: 1861621 - RNA, 17 nt, Human
ucucugcccuccaagac

SEQ ID NO: 1861622 - RNA, 16 nt, Human
ucucugcccuccaaga

SEQ ID NO: 1861623 - RNA, 15 nt, Human
ucucugcccuccaag

SEQ ID NO: 1861624 - RNA, 11 nt, Human
ucucugcccuc

SEQ ID NO: 1861625 - RNA, 14 nt, Human
ucucuccuguaccu

SEQ ID NO: 1861626 - RNA, 16 nt, Human
ucucuccuguaccucu

SEQ ID NO: 1861627 - RNA, 17 nt, Human
ucucuccuguaccucuu

SEQ ID NO: 1861628 - RNA, 12 nt, Human
ucucuggccuuc

SEQ ID NO: 1861629 - RNA, 19 nt, Human
ucucuggaauuugaaacac

SEQ ID NO: 1861630 - RNA, 15 nt, Human
ucucuggaauuugaa

SEQ ID NO: 1861631 - RNA, 22 nt, Human
ucugcacuccccugcugggugu

SEQ ID NO: 1861632 - RNA, 18 nt, Human
ucugcagcaauaaagcag

SEQ ID NO: 1861633 - RNA, 20 nt, Human
ucugcacuccccugcugggu

SEQ ID NO: 1861634 - RNA, 17 nt, Human
ucugcaggucccuaaua

SEQ ID NO: 1861635 - RNA, 16 nt, Human
ucugcaggucccuaau

SEQ ID NO: 1861636 - RNA, 15 nt, Human
ucugcaggucccuaa

SEQ ID NO: 1861637 - RNA, 17 nt, Human
agaaauuuauaaacuuu

SEQ ID NO: 1861638 - RNA, 16 nt, Human
agaaauuuauaaacuu

SEQ ID NO: 1861639 - RNA, 22 nt, Human
agaaauuaugugccagauuuau

SEQ ID NO: 1861640 - RNA, 21 nt, Human
agaaauuaugugccagauuua

SEQ ID NO: 1861641 - RNA, 13 nt, Human
agaaauuaugugc

SEQ ID NO: 1861642 - RNA, 18 nt, Human
ucugcaggucccuaauaa

SEQ ID NO: 1861643 - RNA, 14 nt, Human
ucugcaggucccua

SEQ ID NO: 1861644 - RNA, 23 nt, Human
ucugagacucgcgacaaugcaaa

SEQ ID NO: 1861645 - RNA, 23 nt, Human
ucugaugcaagcaagaaacacug

SEQ ID NO: 1861646 - RNA, 19 nt, Human
ucugcacuccccugcuggg

SEQ ID NO: 1861647 - RNA, 18 nt, Human
ucugcacuccccugcugg

SEQ ID NO: 1861648 - RNA, 18 nt, Human
ucugauucccaagcucug

SEQ ID NO: 1861649 - RNA, 20 nt, Human
agaaauaucugaaaauguau

SEQ ID NO: 1861650 - RNA, 19 nt, Human
agaaauaucugaaaaugua

SEQ ID NO: 1861651 - RNA, 14 nt, Human
agaaauauaauuga

SEQ ID NO: 1861652 - RNA, 17 nt, Human
agaaaugaaaaaauaua

SEQ ID NO: 1861653 - RNA, 15 nt, Human
agaaaucuaaaaaac

SEQ ID NO: 1861654 - RNA, 12 nt, Human
agaaaucuaaaa

SEQ ID NO: 1861655 - RNA, 14 nt, Human
agaaagaaaaucag

SEQ ID NO: 1861656 - RNA, 14 nt, Human
agaaaugaaagcag

SEQ ID NO: 1861657 - RNA, 23 nt, Human
agaaaugaaaaaauauauaucaa

SEQ ID NO: 1861658 - RNA, 18 nt, Human
agaaaugaaaaaauauau

SEQ ID NO: 1861659 - RNA, 15 nt, Human
ucugacaacagacuu

SEQ ID NO: 1861660 - RNA, 16 nt, Human
ucugacaacagacuuc

SEQ ID NO: 1861661 - RNA, 12 nt, Human
ucugacacacag

SEQ ID NO: 1861662 - RNA, 18 nt, Human
ucugaagucacugcacag

SEQ ID NO: 1861663 - RNA, 16 nt, Human
ucugaagucacugcac

SEQ ID NO: 1861664 - RNA, 15 nt, Human
ucugaagucacugca

SEQ ID NO: 1861665 - RNA, 14 nt, Human
acuugcucuugaug

SEQ ID NO: 1861666 - RNA, 16 nt, Human
acuuguggacacagcu

SEQ ID NO: 1861667 - RNA, 17 nt, Human
acuuguggacacagcuc

SEQ ID NO: 1861668 - RNA, 18 nt, Human
acuuguggacacagcucu

SEQ ID NO: 1861669 - RNA, 21 nt, Human
acuugaacccgggaggcagag

SEQ ID NO: 1861670 - RNA, 19 nt, Human
acuugagcccagagugaac

SEQ ID NO: 1861671 - RNA, 21 nt, Human
acuugaacccauauuuguaca

SEQ ID NO: 1861672 - RNA, 19 nt, Human
acuugaacccgggaggcag

SEQ ID NO: 1861673 - RNA, 20 nt, Human
acuugaacccgggaggcaga

SEQ ID NO: 1861674 - RNA, 15 nt, Human
acuucuccacccugc

SEQ ID NO: 1861675 - RNA, 16 nt, Human
acuucuccacccugcu

SEQ ID NO: 1861676 - RNA, 15 nt, Human
acuuccugugacuuc

SEQ ID NO: 1861677 - RNA, 13 nt, Human
ucucacuccuuga

SEQ ID NO: 1861678 - RNA, 16 nt, Human
ucucacuauguugccc

SEQ ID NO: 1861679 - RNA, 16 nt, Human
ucucacucugucgccc

SEQ ID NO: 1861680 - RNA, 12 nt, Human
ucucacucuguc

SEQ ID NO: 1861681 - RNA, 14 nt, Human
acuucuccacccug

SEQ ID NO: 1861682 - RNA, 11 nt, Human
ucucacuccuu

SEQ ID NO: 1861683 - RNA, 14 nt, Human
acuucaggcucuuc

SEQ ID NO: 1861684 - RNA, 16 nt, Human
acuucagcugacuuuu

SEQ ID NO: 1861685 - RNA, 11 nt, Human
acuucagcuga

SEQ ID NO: 1861686 - RNA, 16 nt, Human
ucuccauguuugaugu

SEQ ID NO: 1861687 - RNA, 17 nt, Human
acuuucuagccagagga

SEQ ID NO: 1861688 - RNA, 16 nt, Human
acuuucuagccagagg

SEQ ID NO: 1861689 - RNA, 14 nt, Human
acuuugaccucugc

SEQ ID NO: 1861690 - RNA, 21 nt, Human
ucuccuccuuuucacaguucu

SEQ ID NO: 1861691 - RNA, 17 nt, Human
ucuccaaaauaaaacuu

SEQ ID NO: 1861692 - RNA, 19 nt, Human
ucuccaaaauaaaacuuuu

SEQ ID NO: 1861693 - RNA, 22 nt, Human
ucuccaaaauaaaacuuuuuaa

SEQ ID NO: 1861694 - RNA, 16 nt, Human
ucuccaggcuguaucc

SEQ ID NO: 1861695 - RNA, 13 nt, Human
ucucagggccugg

SEQ ID NO: 1861696 - RNA, 12 nt, Human
ucucagggccug

SEQ ID NO: 1861697 - RNA, 15 nt, Human
ucucagggccugguc

SEQ ID NO: 1861698 - RNA, 14 nt, Human
ucucagggccuggu

SEQ ID NO: 1861699 - RNA, 19 nt, Human
ucucagggccuggucguuu

SEQ ID NO: 1861700 - RNA, 23 nt, Human
agaaccccaggguccuguagccc

SEQ ID NO: 1861701 - RNA, 16 nt, Human
agaaauuuccacucag

SEQ ID NO: 1861702 - RNA, 22 nt, Human
agaaauuuccacucaggucugu

SEQ ID NO: 1861703 - RNA, 21 nt, Human
agaauguguuuaaacuugguu

SEQ ID NO: 1861704 - RNA, 19 nt, Human
agaauuaguggcacuugcu

SEQ ID NO: 1861705 - RNA, 22 nt, Human
ucuggguuccuuccucugagcc

SEQ ID NO: 1861706 - RNA, 23 nt, Human
ucuggguuccuuccucugagccu

SEQ ID NO: 1861707 - RNA, 14 nt, Human
agaauucucuaguu

SEQ ID NO: 1861708 - RNA, 20 nt, Human
agaauucucagaaucucaaa

SEQ ID NO: 1861709 - RNA, 20 nt, Human
agaauuauaauuaguuccuc

SEQ ID NO: 1861710 - RNA, 23 nt, Human
ucuguuuagauaauacaccacua

SEQ ID NO: 1861711 - RNA, 16 nt, Human
ucuguuuagauaauac

SEQ ID NO: 1861712 - RNA, 19 nt, Human
ucuguuuagauaauacacc

SEQ ID NO: 1861713 - RNA, 19 nt, Human
ucuguucugcacacagcac

SEQ ID NO: 1861714 - RNA, 18 nt, Human
ucuguucugcacacagca

SEQ ID NO: 1861715 - RNA, 17 nt, Human
ucuguucugcacacagc

SEQ ID NO: 1861716 - RNA, 18 nt, Human
ucuguacgucugacaggc

SEQ ID NO: 1861717 - RNA, 12 nt, Human
agacagaaaaaa

SEQ ID NO: 1861718 - RNA, 14 nt, Human
agacagcugccugg

SEQ ID NO: 1861719 - RNA, 13 nt, Human
agacagcugccug

SEQ ID NO: 1861720 - RNA, 22 nt, Human
agacacauguccaagaagccca

SEQ ID NO: 1861721 - RNA, 21 nt, Human
agacacauguccaagaagccc

SEQ ID NO: 1861722 - RNA, 23 nt, Human
agacacaggcccggcuccaggcu

SEQ ID NO: 1861723 - RNA, 19 nt, Human
agacaccuugacagggcac

SEQ ID NO: 1861724 - RNA, 24 nt, Human
agacacauguccaagaagcccagg

SEQ ID NO: 1861725 - RNA, 22 nt, Human
agacaccuugacagggcacacc

SEQ ID NO: 1861726 - RNA, 17 nt, Human
agaauucucuuauccaa

SEQ ID NO: 1861727 - RNA, 18 nt, Human
agaauucucuaguuugau

SEQ ID NO: 1861728 - RNA, 19 nt, Human
agaauucucuaguuugauu

SEQ ID NO: 1861729 - RNA, 13 nt, Human
agacacaagccuu

SEQ ID NO: 1861730 - RNA, 14 nt, Human
agacacaagccuuc

SEQ ID NO: 1861731 - RNA, 19 nt, Human
agacacaggcccggcucca

SEQ ID NO: 1861732 - RNA, 20 nt, Human
agacacaggcccggcuccag

SEQ ID NO: 1861733 - RNA, 21 nt, Human
agacacaggcccggcuccagg

SEQ ID NO: 1861734 - RNA, 22 nt, Human
agacacaggcccggcuccaggc

SEQ ID NO: 1861735 - RNA, 17 nt, Human
agacacaggcccggcuc

SEQ ID NO: 1861736 - RNA, 12 nt, Human
ucuuagauguau

SEQ ID NO: 1861737 - RNA, 14 nt, Human
ucuuagauguauau

SEQ ID NO: 1861738 - RNA, 19 nt, Human
ucuuacugucuuuuuucua

SEQ ID NO: 1861739 - RNA, 12 nt, Human
agacagucccug

SEQ ID NO: 1861740 - RNA, 16 nt, Human
agacagcugccuggga

SEQ ID NO: 1861741 - RNA, 15 nt, Human
agacagcugccuggg

SEQ ID NO: 1861742 - RNA, 14 nt, Human
agacagucccugcc

SEQ ID NO: 1861743 - RNA, 13 nt, Human
agacagucccugc

SEQ ID NO: 1861744 - RNA, 15 nt, Human
ucuuuaguuuuugug

SEQ ID NO: 1861745 - RNA, 14 nt, Human
ucuuuaauuuuaca

SEQ ID NO: 1861746 - RNA, 22 nt, Human
ucuuuaaugucacaggcagguc

SEQ ID NO: 1861747 - RNA, 16 nt, Human
ucuugguuuguaaauu

SEQ ID NO: 1861748 - RNA, 20 nt, Human
ucuuuaaugucacaggcagg

SEQ ID NO: 1861749 - RNA, 14 nt, Human
ucuugguuuguaaa

SEQ ID NO: 1861750 - RNA, 13 nt, Human
ucuuucugcuuug

SEQ ID NO: 1861751 - RNA, 20 nt, Human
ucuuuauaauucuacuuuga

SEQ ID NO: 1861752 - RNA, 18 nt, Human
ucuuucuggcuaugcauu

SEQ ID NO: 1861753 - RNA, 22 nt, Human
ucuuucugcagaaacagaaagg

SEQ ID NO: 1861754 - RNA, 14 nt, Human
ucuuucuuccucug

SEQ ID NO: 1861755 - RNA, 19 nt, Human
ucuuucuggcuaugcauuu

SEQ ID NO: 1861756 - RNA, 19 nt, Human
agacucgcgacaaugcaaa

SEQ ID NO: 1861757 - RNA, 18 nt, Human
agacucgcgacaaugcaa

SEQ ID NO: 1861758 - RNA, 17 nt, Human
agacucgcgacaaugca

SEQ ID NO: 1861759 - RNA, 15 nt, Human
agacucgcgacaaug

SEQ ID NO: 1861760 - RNA, 16 nt, Human
ucuuucuuccucugcu

SEQ ID NO: 1861761 - RNA, 15 nt, Human
ucuuucuuccucugc

SEQ ID NO: 1861762 - RNA, 17 nt, Human
ucuuucuuccucugcug

SEQ ID NO: 1861763 - RNA, 14 nt, Human
agacugucucaaga

SEQ ID NO: 1861764 - RNA, 15 nt, Human
agacuuccagagccu

SEQ ID NO: 1861765 - RNA, 16 nt, Human
agacuguacaaaguag

SEQ ID NO: 1861766 - RNA, 15 nt, Human
agacuguacaaagua

SEQ ID NO: 1861767 - RNA, 20 nt, Human
agacucgcgacaaugcaaac

SEQ ID NO: 1861768 - RNA, 22 nt, Human
agagaaaaaauauuuuccugcc

SEQ ID NO: 1861769 - RNA, 19 nt, Human
agacuuuuuuuaaauagua

SEQ ID NO: 1861770 - RNA, 18 nt, Human
agacuuguaugaaagaug

SEQ ID NO: 1861771 - RNA, 24 nt, Human
agagacagaaagcagaacagugau

SEQ ID NO: 1861772 - RNA, 15 nt, Human
agagacacaagccuu

SEQ ID NO: 1861773 - RNA, 17 nt, Human
ucuuauuuaaugaaaga

SEQ ID NO: 1861774 - RNA, 21 nt, Human
ucuucuguacgucugacaggc

SEQ ID NO: 1861775 - RNA, 22 nt, Human
ucuucuguacgucugacaggca

SEQ ID NO: 1861776 - RNA, 22 nt, Human
ucuucugcuucagccucccgag

SEQ ID NO: 1861777 - RNA, 14 nt, Human
agacauagaauuaa

SEQ ID NO: 1861778 - RNA, 23 nt, Human
agacauacuaaccagcagaaaug

SEQ ID NO: 1861779 - RNA, 23 nt, Human
ucuucuguacgucugacaggcaa

SEQ ID NO: 1861780 - RNA, 14 nt, Human
agaccccuggcuuu

SEQ ID NO: 1861781 - RNA, 15 nt, Human
agaccccuggcuuuu

SEQ ID NO: 1861782 - RNA, 21 nt, Human
agaccccuggcuuuucacugc

SEQ ID NO: 1861783 - RNA, 14 nt, Human
agacccggcugcgu

SEQ ID NO: 1861784 - RNA, 13 nt, Human
agaccugccccuc

SEQ ID NO: 1861785 - RNA, 16 nt, Human
agaccugccccuccuc

SEQ ID NO: 1861786 - RNA, 23 nt, Human
agaccugccccuccucucugccc

SEQ ID NO: 1861787 - RNA, 22 nt, Human
agaccugccccuccucucugcc

SEQ ID NO: 1861788 - RNA, 20 nt, Human
ucuugagccuugaacuuuga

SEQ ID NO: 1861789 - RNA, 18 nt, Human
ucuugagccuugaacuuu

SEQ ID NO: 1861790 - RNA, 19 nt, Human
ucuugagccuugaacuuug

SEQ ID NO: 1861791 - RNA, 21 nt, Human
agacucaguggggaggggcug

SEQ ID NO: 1861792 - RNA, 17 nt, Human
ucuugagccuugaacuu

SEQ ID NO: 1861793 - RNA, 15 nt, Human
agacucauucuucug

SEQ ID NO: 1861794 - RNA, 20 nt, Human
ugacaggcaaugcuggcugu

SEQ ID NO: 1861795 - RNA, 21 nt, Human
ugacacacagcucuguccugg

SEQ ID NO: 1861796 - RNA, 11 nt, Human
ugacagggcac

SEQ ID NO: 1861797 - RNA, 16 nt, Human
ugacagggcacaccgg

SEQ ID NO: 1861798 - RNA, 21 nt, Human
ugacagggcacaccgggcacu

SEQ ID NO: 1861799 - RNA, 20 nt, Human
ugacagggcacaccgggcac

SEQ ID NO: 1861800 - RNA, 12 nt, Human
agaucauuguga

SEQ ID NO: 1861801 - RNA, 15 nt, Human
agaucagccugggca

SEQ ID NO: 1861802 - RNA, 13 nt, Human
agaucagccuggg

SEQ ID NO: 1861803 - RNA, 18 nt, Human
ugaccaaugauggucacc

SEQ ID NO: 1861804 - RNA, 19 nt, Human
ugaccaauauuguacaguu

SEQ ID NO: 1861805 - RNA, 21 nt, Human
ugaccaauauuguacaguuuu

SEQ ID NO: 1861806 - RNA, 17 nt, Human
ugaccaauauuguacag

SEQ ID NO: 1861807 - RNA, 18 nt, Human
ugaccaauauuguacagu

SEQ ID NO: 1861808 - RNA, 22 nt, Human
ugacauuguagagcuucuggca

SEQ ID NO: 1861809 - RNA, 20 nt, Human
ugacauuguuggccaaagcc

SEQ ID NO: 1861810 - RNA, 21 nt, Human
ugacauuguuggccaaagcca

SEQ ID NO: 1861811 - RNA, 15 nt, Human
agaugcuucucacug

SEQ ID NO: 1861812 - RNA, 12 nt, Human
ugacccacugcu

SEQ ID NO: 1861813 - RNA, 13 nt, Human
ugacccacugcuu

SEQ ID NO: 1861814 - RNA, 17 nt, Human
ugacccacaagaaauga

SEQ ID NO: 1861815 - RNA, 23 nt, Human
ugaccauucuccaccugccaggg

SEQ ID NO: 1861816 - RNA, 14 nt, Human
agaugcuagaacuc

SEQ ID NO: 1861817 - RNA, 15 nt, Human
agaugcuagaacucc

SEQ ID NO: 1861818 - RNA, 14 nt, Human
agaugcaccagccc

SEQ ID NO: 1861819 - RNA, 15 nt, Human
agaugcaccagcccu

SEQ ID NO: 1861820 - RNA, 20 nt, Human
ugaaugguuuucaaaauaaa

SEQ ID NO: 1861821 - RNA, 19 nt, Human
ugaaugucagugugacuga

SEQ ID NO: 1861822 - RNA, 21 nt, Human
agaguuguuacauuuuuaagu

SEQ ID NO: 1861823 - RNA, 16 nt, Human
agaguuguuacauuuu

SEQ ID NO: 1861824 - RNA, 12 nt, Human
agaguuguuaca

SEQ ID NO: 1861825 - RNA, 20 nt, Human
agaguugaugguuguacaua

SEQ ID NO: 1861826 - RNA, 17 nt, Human
agaguugauacuacagu

SEQ ID NO: 1861827 - RNA, 20 nt, Human
agaguugauacuacaguuug

SEQ ID NO: 1861828 - RNA, 22 nt, Human
agaguugauacuacaguuuguu

SEQ ID NO: 1861829 - RNA, 12 nt, Human
agauaaaugugc

SEQ ID NO: 1861830 - RNA, 17 nt, Human
agauaaagguucaugca

SEQ ID NO: 1861831 - RNA, 14 nt, Human
agaucacgccacug

SEQ ID NO: 1861832 - RNA, 15 nt, Human
agaucacgccacugc

SEQ ID NO: 1861833 - RNA, 16 nt, Human
agaucacgccacugca

SEQ ID NO: 1861834 - RNA, 15 nt, Human
ugaauuucuuuugcc

SEQ ID NO: 1861835 - RNA, 17 nt, Human
agaucacgccacugcac

SEQ ID NO: 1861836 - RNA, 18 nt, Human
agaucacgccacugcacu

SEQ ID NO: 1861837 - RNA, 19 nt, Human
ugaacuuugaccucugcag

SEQ ID NO: 1861838 - RNA, 20 nt, Human
ugaacuuugaccucugcagc

SEQ ID NO: 1861839 - RNA, 22 nt, Human
ugaacuuugaccucugcagcaa

SEQ ID NO: 1861840 - RNA, 15 nt, Human
agagcuuaacagugu

SEQ ID NO: 1861841 - RNA, 22 nt, Human
agagcuucuguugcugccucau

SEQ ID NO: 1861842 - RNA, 19 nt, Human
ugaacaaauuuacagagac

SEQ ID NO: 1861843 - RNA, 20 nt, Human
ugaacaaauuuacagagaca

SEQ ID NO: 1861844 - RNA, 15 nt, Human
ugaaauuuuuauuaa

SEQ ID NO: 1861845 - RNA, 22 nt, Human
ugaaccgaugagaaauaaaguu

SEQ ID NO: 1861846 - RNA, 21 nt, Human
ugaacuaggauuguaguccca

SEQ ID NO: 1861847 - RNA, 12 nt, Human
ugaacuccuggc

SEQ ID NO: 1861848 - RNA, 14 nt, Human
ugaacuccuggccu

SEQ ID NO: 1861849 - RNA, 15 nt, Human
ugaacuccuggccuc

SEQ ID NO: 1861850 - RNA, 15 nt, Human
agagguugcagugag

SEQ ID NO: 1861851 - RNA, 19 nt, Human
agagguccacaacacacag

SEQ ID NO: 1861852 - RNA, 13 nt, Human
agaggcugaggac

SEQ ID NO: 1861853 - RNA, 17 nt, Human
agaggcuaugugagcac

SEQ ID NO: 1861854 - RNA, 19 nt, Human
agaggccaugggccuccug

SEQ ID NO: 1861855 - RNA, 10 nt, Human
agaggcaggg

SEQ ID NO: 1861856 - RNA, 13 nt, Human
agaggcagggucu

SEQ ID NO: 1861857 - RNA, 13 nt, Human
agaggcagcccca

SEQ ID NO: 1861858 - RNA, 19 nt, Human
agaggcagccccauucugc

SEQ ID NO: 1861859 - RNA, 24 nt, Human
agaggcagccccauucugccugcc

SEQ ID NO: 1861860 - RNA, 18 nt, Human
agagcagagaccaucccu

SEQ ID NO: 1861861 - RNA, 17 nt, Human
agagcagagaccauccc

SEQ ID NO: 1861862 - RNA, 20 nt, Human
agagcagagaccaucccuga

SEQ ID NO: 1861863 - RNA, 21 nt, Human
agagccuugcggaagguucua

SEQ ID NO: 1861864 - RNA, 11 nt, Human
agagccuugcg

SEQ ID NO: 1861865 - RNA, 12 nt, Human
agagcagagacc

SEQ ID NO: 1861866 - RNA, 21 nt, Human
ucuuuggacccugaggcccag

SEQ ID NO: 1861867 - RNA, 17 nt, Human
ucuuuggacccugaggc

SEQ ID NO: 1861868 - RNA, 17 nt, Human
ugaaauaagccagacau

SEQ ID NO: 1861869 - RNA, 18 nt, Human
ugaaauaagccagacauc

SEQ ID NO: 1861870 - RNA, 20 nt, Human
ugaaauaagccagacaucaa

SEQ ID NO: 1861871 - RNA, 23 nt, Human
ugaaauaagccagacaucaacag

SEQ ID NO: 1861872 - RNA, 18 nt, Human
agagcugccaccugccug

SEQ ID NO: 1861873 - RNA, 15 nt, Human
ugaaauuguauuaca

SEQ ID NO: 1861874 - RNA, 19 nt, Human
agcaggcucucaggccagc

SEQ ID NO: 1861875 - RNA, 18 nt, Human
agcaggcucucaggccag

SEQ ID NO: 1861876 - RNA, 17 nt, Human
agcaggcucucaggcca

SEQ ID NO: 1861877 - RNA, 16 nt, Human
agcaggcucucaggcc

SEQ ID NO: 1861878 - RNA, 15 nt, Human
agcaggcucucaggc

SEQ ID NO: 1861879 - RNA, 14 nt, Human
agcaggcucucagg

SEQ ID NO: 1861880 - RNA, 13 nt, Human
agcaggcucucag

SEQ ID NO: 1861881 - RNA, 17 nt, Human
agcaggcucgggcuccc

SEQ ID NO: 1861882 - RNA, 23 nt, Human
agcaggcucucaggccagcugcu

SEQ ID NO: 1861883 - RNA, 22 nt, Human
agcaggcucucaggccagcugc

SEQ ID NO: 1861884 - RNA, 21 nt, Human
agcaggcucucaggccagcug

SEQ ID NO: 1861885 - RNA, 15 nt, Human
agcaggcugugaguu

SEQ ID NO: 1861886 - RNA, 13 nt, Human
agcagggaaacag

SEQ ID NO: 1861887 - RNA, 14 nt, Human
agcagggaaacagc

SEQ ID NO: 1861888 - RNA, 15 nt, Human
agcagggaaacagcu

SEQ ID NO: 1861889 - RNA, 22 nt, Human
agcagggcucagcggggacagc

SEQ ID NO: 1861890 - RNA, 20 nt, Human
agcagggagggcuucugcca

SEQ ID NO: 1861891 - RNA, 13 nt, Human
agcagggcucagc

SEQ ID NO: 1861892 - RNA, 14 nt, Human
agcagggcucagcg

SEQ ID NO: 1861893 - RNA, 15 nt, Human
agcagggcucagcgg

SEQ ID NO: 1861894 - RNA, 19 nt, Human
ugacccaugcugcccugug

SEQ ID NO: 1861895 - RNA, 18 nt, Human
ugacccaugcugcccugu

SEQ ID NO: 1861896 - RNA, 17 nt, Human
ugacccaugcugcccug

SEQ ID NO: 1861897 - RNA, 20 nt, Human
ugacccaugcugcccuguga

SEQ ID NO: 1861898 - RNA, 11 nt, Human
agcagccacau

SEQ ID NO: 1861899 - RNA, 15 nt, Human
agcagccacauuccu

SEQ ID NO: 1861900 - RNA, 13 nt, Human
agcaggacaugga

SEQ ID NO: 1861901 - RNA, 16 nt, Human
agcagcagggagggcu

SEQ ID NO: 1861902 - RNA, 14 nt, Human
ugaguacuacaguc

SEQ ID NO: 1861903 - RNA, 20 nt, Human
ugaguacguugugcauuugg

SEQ ID NO: 1861904 - RNA, 18 nt, Human
ugagucaccaagcccagu

SEQ ID NO: 1861905 - RNA, 14 nt, Human
ugagugccuuacac

SEQ ID NO: 1861906 - RNA, 13 nt, Human
ugagugccuuaca

SEQ ID NO: 1861907 - RNA, 17 nt, Human
ugagugcagcucuggag

SEQ ID NO: 1861908 - RNA, 16 nt, Human
ugagugccuuacacaa

SEQ ID NO: 1861909 - RNA, 14 nt, Human
ugauacaaugcugu

SEQ ID NO: 1861910 - RNA, 15 nt, Human
ugauacaaugcugug

SEQ ID NO: 1861911 - RNA, 21 nt, Human
ugagugggggaucacagccuc

SEQ ID NO: 1861912 - RNA, 18 nt, Human
ugaguucauacccuguua

SEQ ID NO: 1861913 - RNA, 23 nt, Human
agcauaaaaauuagccaagugug

SEQ ID NO: 1861914 - RNA, 16 nt, Human
ugaguacguugugcau

SEQ ID NO: 1861915 - RNA, 17 nt, Human
ugaguacguugugcauu

SEQ ID NO: 1861916 - RNA, 18 nt, Human
ugaguacguugugcauuu

SEQ ID NO: 1861917 - RNA, 19 nt, Human
ugaguacguugugcauuug

SEQ ID NO: 1861918 - RNA, 19 nt, Human
agcauaaaaauuagccaag

SEQ ID NO: 1861919 - RNA, 14 nt, Human
agcaguuugcuuug

SEQ ID NO: 1861920 - RNA, 15 nt, Human
ugaucuaggaagacu

SEQ ID NO: 1861921 - RNA, 14 nt, Human
ugaucuaggaagac

SEQ ID NO: 1861922 - RNA, 22 nt, Human
ugaugaaaugaggucagagccu

SEQ ID NO: 1861923 - RNA, 18 nt, Human
ugaugaaauguaaauacu

SEQ ID NO: 1861924 - RNA, 23 nt, Human
ugaugaaaugaggucagagccug

SEQ ID NO: 1861925 - RNA, 19 nt, Human
ugaugaucuuugcagacag

SEQ ID NO: 1861926 - RNA, 20 nt, Human
ugaugaucuuugcagacagg

SEQ ID NO: 1861927 - RNA, 21 nt, Human
ugaugaucuuugcagacaggc

SEQ ID NO: 1861928 - RNA, 21 nt, Human
ugaugggcaacccccagccug

SEQ ID NO: 1861929 - RNA, 13 nt, Human
ugauggggcccug

SEQ ID NO: 1861930 - RNA, 22 nt, Human
ugaugggcaacccccagccugc

SEQ ID NO: 1861931 - RNA, 22 nt, Human
ugauggggcccugccuccuuug

SEQ ID NO: 1861932 - RNA, 23 nt, Human
ugauggguuaguggauggaaggg

SEQ ID NO: 1861933 - RNA, 19 nt, Human
ugauggguuaguggaugga

SEQ ID NO: 1861934 - RNA, 17 nt, Human
ugauguuuuccaugagu

SEQ ID NO: 1861935 - RNA, 21 nt, Human
ugauguuuuaaggaugcuugu

SEQ ID NO: 1861936 - RNA, 19 nt, Human
ugauguuuuccaugagucc

SEQ ID NO: 1861937 - RNA, 23 nt, Human
ugauguuuuccaugaguccccug

SEQ ID NO: 1861938 - RNA, 17 nt, Human
ugauuaaauucuugcaa

SEQ ID NO: 1861939 - RNA, 13 nt, Human
ugauuaaauucuu

SEQ ID NO: 1861940 - RNA, 16 nt, Human
ugauuaaauucuugca

SEQ ID NO: 1861941 - RNA, 16 nt, Human
agccacggccaggcca

SEQ ID NO: 1861942 - RNA, 13 nt, Human
agccaccacgccc

SEQ ID NO: 1861943 - RNA, 18 nt, Human
ugauccucccaccucagc

SEQ ID NO: 1861944 - RNA, 13 nt, Human
ugaucuaggaaga

SEQ ID NO: 1861945 - RNA, 19 nt, Human
ugauccucccaccucagcc

SEQ ID NO: 1861946 - RNA, 20 nt, Human
ugauccucccaccucagccu

SEQ ID NO: 1861947 - RNA, 13 nt, Human
ugauccagaaaga

SEQ ID NO: 1861948 - RNA, 14 nt, Human
ugauccacucgccu

SEQ ID NO: 1861949 - RNA, 18 nt, Human
ugauccacucgccuucau

SEQ ID NO: 1861950 - RNA, 23 nt, Human
ugauccagaaagaaaacuuguau

SEQ ID NO: 1861951 - RNA, 16 nt, Human
agcauauucaggaagc

SEQ ID NO: 1861952 - RNA, 12 nt, Human
agcaucaggcca

SEQ ID NO: 1861953 - RNA, 21 nt, Human
agcaucaggccaggcccucug

SEQ ID NO: 1861954 - RNA, 22 nt, Human
agcaucaggccaggcccucugc

SEQ ID NO: 1861955 - RNA, 23 nt, Human
agcaucaggccaggcccucugcc

SEQ ID NO: 1861956 - RNA, 13 nt, Human
agcauggcugcca

SEQ ID NO: 1861957 - RNA, 18 nt, Human
ugauacaaugcugugccc

SEQ ID NO: 1861958 - RNA, 21 nt, Human
agcauauucaggaagcucagg

SEQ ID NO: 1861959 - RNA, 19 nt, Human
agcauauucaggaagcuca

SEQ ID NO: 1861960 - RNA, 17 nt, Human
agcauauucaggaagcu

SEQ ID NO: 1861961 - RNA, 14 nt, Human
ugaucaccugcccu

SEQ ID NO: 1861962 - RNA, 18 nt, Human
ugaucacggcucacugca

SEQ ID NO: 1861963 - RNA, 15 nt, Human
ugaucacggcucacu

SEQ ID NO: 1861964 - RNA, 13 nt, Human
ugaucacggcuca

SEQ ID NO: 1861965 - RNA, 14 nt, Human
ugaucacggcucac

SEQ ID NO: 1861966 - RNA, 17 nt, Human
agcauuagauuucucau

SEQ ID NO: 1861967 - RNA, 19 nt, Human
agcauggcugccaauggga

SEQ ID NO: 1861968 - RNA, 20 nt, Human
agcauucucacuccuaccug

SEQ ID NO: 1861969 - RNA, 18 nt, Human
agcauucucacuccuacc

SEQ ID NO: 1861970 - RNA, 22 nt, Human
agcauucucacuccuaccuggu

SEQ ID NO: 1861971 - RNA, 22 nt, Human
agcauuuugcuaaaugugaaug

SEQ ID NO: 1861972 - RNA, 15 nt, Human
agcauuuugcuaaau

SEQ ID NO: 1861973 - RNA, 18 nt, Human
agccaaacauccuacaag

SEQ ID NO: 1861974 - RNA, 16 nt, Human
agcauuugucaacaaa

SEQ ID NO: 1861975 - RNA, 15 nt, Human
agcccgggcucugcc

SEQ ID NO: 1861976 - RNA, 14 nt, Human
agcccgggcucugc

SEQ ID NO: 1861977 - RNA, 13 nt, Human
agcccgggcucug

SEQ ID NO: 1861978 - RNA, 19 nt, Human
agccccuucugacccaugc

SEQ ID NO: 1861979 - RNA, 16 nt, Human
agccccuucugaccca

SEQ ID NO: 1861980 - RNA, 15 nt, Human
agccccuucugaccc

SEQ ID NO: 1861981 - RNA, 14 nt, Human
agccccuucugacc

SEQ ID NO: 1861982 - RNA, 19 nt, Human
agcccugcagagggcacag

SEQ ID NO: 1861983 - RNA, 16 nt, Human
agcccugcagagggca

SEQ ID NO: 1861984 - RNA, 15 nt, Human
agcccugcagagggc

SEQ ID NO: 1861985 - RNA, 14 nt, Human
agcccugcagaggg

SEQ ID NO: 1861986 - RNA, 16 nt, Human
agcccgggcucugccu

SEQ ID NO: 1861987 - RNA, 21 nt, Human
agcccaggccuccuacagcuu

SEQ ID NO: 1861988 - RNA, 19 nt, Human
agcccaggccuccuacagc

SEQ ID NO: 1861989 - RNA, 14 nt, Human
agcccaggccuccu

SEQ ID NO: 1861990 - RNA, 14 nt, Human
agccccgaggccuu

SEQ ID NO: 1861991 - RNA, 18 nt, Human
agccccgugggguuccuc

SEQ ID NO: 1861992 - RNA, 20 nt, Human
agcccugggaggcucuggag

SEQ ID NO: 1861993 - RNA, 18 nt, Human
agcccugggaggcucugg

SEQ ID NO: 1861994 - RNA, 17 nt, Human
agcccugggaggcucug

SEQ ID NO: 1861995 - RNA, 21 nt, Human
ugcaccacugcacuccagccu

SEQ ID NO: 1861996 - RNA, 13 nt, Human
ugcaccagcccuu

SEQ ID NO: 1861997 - RNA, 15 nt, Human
ugcacuccagccuga

SEQ ID NO: 1861998 - RNA, 14 nt, Human
ugcacuccagccug

SEQ ID NO: 1861999 - RNA, 16 nt, Human
ugcaccggcuggccug

SEQ ID NO: 1862000 - RNA, 15 nt, Human
ugcaccggcuggccu

SEQ ID NO: 1862001 - RNA, 14 nt, Human
ugcaccggcuggcc

SEQ ID NO: 1862002 - RNA, 17 nt, Human
ugcacuccagccugagc

SEQ ID NO: 1862003 - RNA, 15 nt, Human
ugcacuccagccugg

SEQ ID NO: 1862004 - RNA, 16 nt, Human
ugcacuccagccuggg

SEQ ID NO: 1862005 - RNA, 22 nt, Human
ugcagaagacaguauggcagcu

SEQ ID NO: 1862006 - RNA, 12 nt, Human
agcccaggccuc

SEQ ID NO: 1862007 - RNA, 15 nt, Human
ugcaaggucauuuuu

SEQ ID NO: 1862008 - RNA, 13 nt, Human
ugcaacaggcugg

SEQ ID NO: 1862009 - RNA, 17 nt, Human
agccacggccaggccag

SEQ ID NO: 1862010 - RNA, 18 nt, Human
agccacggccaggccaga

SEQ ID NO: 1862011 - RNA, 13 nt, Human
ugauuucauucaa

SEQ ID NO: 1862012 - RNA, 20 nt, Human
ugauuucagcaccuacagug

SEQ ID NO: 1862013 - RNA, 13 nt, Human
ugcaaaccaucau

SEQ ID NO: 1862014 - RNA, 12 nt, Human
ugcaaaccauca

SEQ ID NO: 1862015 - RNA, 12 nt, Human
ugauuuggaaaa

SEQ ID NO: 1862016 - RNA, 18 nt, Human
ugauuuccguuaaaauac

SEQ ID NO: 1862017 - RNA, 20 nt, Human
ugcaaaccaucauugaaauc

SEQ ID NO: 1862018 - RNA, 18 nt, Human
ugcaaaccaucauugaaa

SEQ ID NO: 1862019 - RNA, 17 nt, Human
ugcaaagcccagcuuga

SEQ ID NO: 1862020 - RNA, 15 nt, Human
ugcaaagcccagcuu

SEQ ID NO: 1862021 - RNA, 14 nt, Human
ugcaaagcccagcu

SEQ ID NO: 1862022 - RNA, 21 nt, Human
ugcaaaggguaucaggugcug

SEQ ID NO: 1862023 - RNA, 20 nt, Human
ugcaaaguaucccuacugua

SEQ ID NO: 1862024 - RNA, 23 nt, Human
ugcaaaguucccuacuuccugug

SEQ ID NO: 1862025 - RNA, 19 nt, Human
agccugugccucugggacu

SEQ ID NO: 1862026 - RNA, 18 nt, Human
agccugugccucugggac

SEQ ID NO: 1862027 - RNA, 17 nt, Human
agccugugccucuggga

SEQ ID NO: 1862028 - RNA, 19 nt, Human
agccuugcggaagguucua

SEQ ID NO: 1862029 - RNA, 21 nt, Human
agccuugaccauucuccaccu

SEQ ID NO: 1862030 - RNA, 19 nt, Human
agccuugaccauucuccac

SEQ ID NO: 1862031 - RNA, 18 nt, Human
agccuugaccauucucca

SEQ ID NO: 1862032 - RNA, 16 nt, Human
agccuugggaccccug

SEQ ID NO: 1862033 - RNA, 13 nt, Human
agccuugaacuuu

SEQ ID NO: 1862034 - RNA, 15 nt, Human
agccuguuuaagaga

SEQ ID NO: 1862035 - RNA, 22 nt, Human
agccuuagaagucacacaguau

SEQ ID NO: 1862036 - RNA, 20 nt, Human
agccuuagaagucacacagu

SEQ ID NO: 1862037 - RNA, 14 nt, Human
ugccaaugggagcu

SEQ ID NO: 1862038 - RNA, 13 nt, Human
ugccaauggacua

SEQ ID NO: 1862039 - RNA, 18 nt, Human
ugccaaugggagcucaug

SEQ ID NO: 1862040 - RNA, 16 nt, Human
ugcauuuaaaagauac

SEQ ID NO: 1862041 - RNA, 22 nt, Human
ugccagccgagauagccaaggc

SEQ ID NO: 1862042 - RNA, 17 nt, Human
ugccagccgagauagcc

SEQ ID NO: 1862043 - RNA, 13 nt, Human
ugccauaauuacu

SEQ ID NO: 1862044 - RNA, 18 nt, Human
agccuccugcccuuaccu

SEQ ID NO: 1862045 - RNA, 14 nt, Human
agccuccugcccuu

SEQ ID NO: 1862046 - RNA, 13 nt, Human
agccuccugcccu

SEQ ID NO: 1862047 - RNA, 12 nt, Human
ugcagacaggca

SEQ ID NO: 1862048 - RNA, 13 nt, Human
ugcagacaggcaa

SEQ ID NO: 1862049 - RNA, 21 nt, Human
ugcagacaggcaagcaccucc

SEQ ID NO: 1862050 - RNA, 22 nt, Human
ugcaggucccuaauaaagcugu

SEQ ID NO: 1862051 - RNA, 11 nt, Human
ugcaggucccu

SEQ ID NO: 1862052 - RNA, 21 nt, Human
ugcagccucacaguccuuacc

SEQ ID NO: 1862053 - RNA, 17 nt, Human
ugcagccucacaguccu

SEQ ID NO: 1862054 - RNA, 18 nt, Human
ugcagccucacaguccuu

SEQ ID NO: 1862055 - RNA, 21 nt, Human
ugcaugcugucccuuacguga

SEQ ID NO: 1862056 - RNA, 19 nt, Human
ugcaugcugucccuuacgu

SEQ ID NO: 1862057 - RNA, 18 nt, Human
ugcaugcugucccuuacg

SEQ ID NO: 1862058 - RNA, 15 nt, Human
ugcaucucagcccac

SEQ ID NO: 1862059 - RNA, 14 nt, Human
ugcaucucagccca

SEQ ID NO: 1862060 - RNA, 13 nt, Human
ugcaucucagccc

SEQ ID NO: 1862061 - RNA, 13 nt, Human
ugcauacucauua

SEQ ID NO: 1862062 - RNA, 19 nt, Human
ugcauacucauuaggaugg

SEQ ID NO: 1862063 - RNA, 17 nt, Human
ugcauagaauaaaauuu

SEQ ID NO: 1862064 - RNA, 16 nt, Human
ugcauaccacuuuugu

SEQ ID NO: 1862065 - RNA, 18 nt, Human
ugcauaccacuuuuguuc

SEQ ID NO: 1862066 - RNA, 20 nt, Human
ugcauaccacuuuuguucuu

SEQ ID NO: 1862067 - RNA, 13 nt, Human
aggaucagucuga

SEQ ID NO: 1862068 - RNA, 19 nt, Human
aggauucuuccucccuccc

SEQ ID NO: 1862069 - RNA, 17 nt, Human
aggauucuuccucccuc

SEQ ID NO: 1862070 - RNA, 23 nt, Human
aggaugaucuaggaagacuuugg

SEQ ID NO: 1862071 - RNA, 22 nt, Human
aggaugaucuaggaagacuuug

SEQ ID NO: 1862072 - RNA, 22 nt, Human
aggaugcacagaguuguuacau

SEQ ID NO: 1862073 - RNA, 16 nt, Human
ugcuuuuuauggccug

SEQ ID NO: 1862074 - RNA, 17 nt, Human
ugcuuuuucucaaaaug

SEQ ID NO: 1862075 - RNA, 23 nt, Human
uggaaauuuguuauaaugaauga

SEQ ID NO: 1862076 - RNA, 21 nt, Human
uggaaauuuguuauaaugaau

SEQ ID NO: 1862077 - RNA, 16 nt, Human
uggaagacagcucuua

SEQ ID NO: 1862078 - RNA, 15 nt, Human
ugcuuugggcugccc

SEQ ID NO: 1862079 - RNA, 14 nt, Human
ugcuuugggcugcc

SEQ ID NO: 1862080 - RNA, 15 nt, Human
ugcuugagcucagga

SEQ ID NO: 1862081 - RNA, 17 nt, Human
aggagccuccugcccuu

SEQ ID NO: 1862082 - RNA, 17 nt, Human
ugcuuugugauuuuugu

SEQ ID NO: 1862083 - RNA, 22 nt, Human
ugcuuugugauuuuuguaauuu

SEQ ID NO: 1862084 - RNA, 17 nt, Human
ugcuuugggcugcccug

SEQ ID NO: 1862085 - RNA, 16 nt, Human
ugcuuugggcugcccu

SEQ ID NO: 1862086 - RNA, 23 nt, Human
ugcuuuuuaauauugauaugcuu

SEQ ID NO: 1862087 - RNA, 20 nt, Human
ugcuuuugucuaugggacuc

SEQ ID NO: 1862088 - RNA, 18 nt, Human
ugcuuuuggucuguguga

SEQ ID NO: 1862089 - RNA, 15 nt, Human
aggacuaggguccug

SEQ ID NO: 1862090 - RNA, 18 nt, Human
aggacuaggguccugggg

SEQ ID NO: 1862091 - RNA, 16 nt, Human
aggacuaggguccugg

SEQ ID NO: 1862092 - RNA, 19 nt, Human
aggacuaggguccugggga

SEQ ID NO: 1862093 - RNA, 16 nt, Human
aggacgcucucuggcc

SEQ ID NO: 1862094 - RNA, 17 nt, Human
aggacgcucucuggccu

SEQ ID NO: 1862095 - RNA, 19 nt, Human
aggacgcucucuggccuuc

SEQ ID NO: 1862096 - RNA, 20 nt, Human
aggacgcucucuggccuucg

SEQ ID NO: 1862097 - RNA, 13 nt, Human
aggacgcucucug

SEQ ID NO: 1862098 - RNA, 14 nt, Human
aggacgcucucugg

SEQ ID NO: 1862099 - RNA, 16 nt, Human
aggagccuccugcccu

SEQ ID NO: 1862100 - RNA, 23 nt, Human
aggagcccugggaggcucuggag

SEQ ID NO: 1862101 - RNA, 17 nt, Human
aggagccccgaggccuu

SEQ ID NO: 1862102 - RNA, 13 nt, Human
aggagcagccaca

SEQ ID NO: 1862103 - RNA, 12 nt, Human
aggagcagccac

SEQ ID NO: 1862104 - RNA, 18 nt, Human
aggacucugccuccucuu

SEQ ID NO: 1862105 - RNA, 17 nt, Human
aggacucugccuccucu

SEQ ID NO: 1862106 - RNA, 16 nt, Human
aggacucugccuccuc

SEQ ID NO: 1862107 - RNA, 14 nt, Human
aggacucugccucc

SEQ ID NO: 1862108 - RNA, 13 nt, Human
aggacucugccuc

SEQ ID NO: 1862109 - RNA, 12 nt, Human
aggacucugccu

SEQ ID NO: 1862110 - RNA, 18 nt, Human
aggagaaacuggaacucu

SEQ ID NO: 1862111 - RNA, 19 nt, Human
aggagaaacuggaacucuc

SEQ ID NO: 1862112 - RNA, 22 nt, Human
aggacuuuucuuuguggcuucc

SEQ ID NO: 1862113 - RNA, 17 nt, Human
aggacuuuucuuugugg

SEQ ID NO: 1862114 - RNA, 19 nt, Human
aggacuuuucuuuguggcu

SEQ ID NO: 1862115 - RNA, 17 nt, Human
aggcaggugggauggau

SEQ ID NO: 1862116 - RNA, 15 nt, Human
aggcauaaagucagg

SEQ ID NO: 1862117 - RNA, 12 nt, Human
aggcagggucuc

SEQ ID NO: 1862118 - RNA, 22 nt, Human
aggcaggucuugaacuccuggc

SEQ ID NO: 1862119 - RNA, 20 nt, Human
aggcauuuaggccaugggac

SEQ ID NO: 1862120 - RNA, 18 nt, Human
aggcauugugggaagggg

SEQ ID NO: 1862121 - RNA, 22 nt, Human
aggcauaaagucagggguuccc

SEQ ID NO: 1862122 - RNA, 14 nt, Human
uggagaaaauggac

SEQ ID NO: 1862123 - RNA, 18 nt, Human
aggauugcuacuguccua

SEQ ID NO: 1862124 - RNA, 15 nt, Human
aggauugcuacuguc

SEQ ID NO: 1862125 - RNA, 17 nt, Human
aggauugcuacuguccu

SEQ ID NO: 1862126 - RNA, 16 nt, Human
aggcaaggcugucaau

SEQ ID NO: 1862127 - RNA, 17 nt, Human
aggcaaggcugucaauu

SEQ ID NO: 1862128 - RNA, 20 nt, Human
aggcaagcaccuccugccuc

SEQ ID NO: 1862129 - RNA, 18 nt, Human
aggcaagcaccuccugcc

SEQ ID NO: 1862130 - RNA, 19 nt, Human
aggcaagcaccuccugccu

SEQ ID NO: 1862131 - RNA, 17 nt, Human
uggagccaauggagacu

SEQ ID NO: 1862132 - RNA, 17 nt, Human
aggcaagcaccuccugc

SEQ ID NO: 1862133 - RNA, 15 nt, Human
aggccagccuugacc

SEQ ID NO: 1862134 - RNA, 12 nt, Human
aggccagcugcu

SEQ ID NO: 1862135 - RNA, 13 nt, Human
aggccagccuuga

SEQ ID NO: 1862136 - RNA, 22 nt, Human
uggcagcucaccucucccuugg

SEQ ID NO: 1862137 - RNA, 21 nt, Human
uggcagcucaccucucccuug

SEQ ID NO: 1862138 - RNA, 23 nt, Human
uggcagcucaccucucccuugga

SEQ ID NO: 1862139 - RNA, 13 nt, Human
uggcagcucagag

SEQ ID NO: 1862140 - RNA, 18 nt, Human
uggcacccggccccugcu

SEQ ID NO: 1862141 - RNA, 19 nt, Human
uggcacccggccccugcug

SEQ ID NO: 1862142 - RNA, 20 nt, Human
uggcacccggccccugcugg

SEQ ID NO: 1862143 - RNA, 13 nt, Human
aggcccagagggc

SEQ ID NO: 1862144 - RNA, 14 nt, Human
aggccccgcccagg

SEQ ID NO: 1862145 - RNA, 14 nt, Human
aggcccggccucuc

SEQ ID NO: 1862146 - RNA, 13 nt, Human
aggcccggccucu

SEQ ID NO: 1862147 - RNA, 15 nt, Human
aggcccggccucuca

SEQ ID NO: 1862148 - RNA, 13 nt, Human
aggcccggcucca

SEQ ID NO: 1862149 - RNA, 20 nt, Human
aggcauuugcugaauacaga

SEQ ID NO: 1862150 - RNA, 16 nt, Human
aggcauuugcugaaua

SEQ ID NO: 1862151 - RNA, 17 nt, Human
uggagugcaaugacaca

SEQ ID NO: 1862152 - RNA, 14 nt, Human
uggagugcagugag

SEQ ID NO: 1862153 - RNA, 14 nt, Human
uggaguugaaaauc

SEQ ID NO: 1862154 - RNA, 21 nt, Human
uggaugccugguggcagcugc

SEQ ID NO: 1862155 - RNA, 23 nt, Human
uggaugccugguggcagcugcgg

SEQ ID NO: 1862156 - RNA, 13 nt, Human
uggauggaagggg

SEQ ID NO: 1862157 - RNA, 23 nt, Human
uggcacaucagcacgauuucugu

SEQ ID NO: 1862158 - RNA, 21 nt, Human
ugccugcuuuuuauggccugu

SEQ ID NO: 1862159 - RNA, 20 nt, Human
ugccugcuuuuuauggccug

SEQ ID NO: 1862160 - RNA, 22 nt, Human
ugccugcuuuuuauggccugug

SEQ ID NO: 1862161 - RNA, 24 nt, Human
ugccugcccaggccccugccaccc

SEQ ID NO: 1862162 - RNA, 12 nt, Human
ugccucugccug

SEQ ID NO: 1862163 - RNA, 20 nt, Human
ugccugcccaggccccugcc

SEQ ID NO: 1862164 - RNA, 22 nt, Human
ugccugcccaggccccugccac

SEQ ID NO: 1862165 - RNA, 23 nt, Human
ugccugcccaggccccugccacc

SEQ ID NO: 1862166 - RNA, 14 nt, Human
ugccucagccuccc

SEQ ID NO: 1862167 - RNA, 18 nt, Human
ugccucugccucugacac

SEQ ID NO: 1862168 - RNA, 20 nt, Human
ugccucugccucugacacac

SEQ ID NO: 1862169 - RNA, 17 nt, Human
ugccucugccucugaca

SEQ ID NO: 1862170 - RNA, 19 nt, Human
agcuggccgggagccugau

SEQ ID NO: 1862171 - RNA, 18 nt, Human
agcuggccgggagccuga

SEQ ID NO: 1862172 - RNA, 16 nt, Human
agcugcuugggcuuca

SEQ ID NO: 1862173 - RNA, 20 nt, Human
agcugcuugggcuucauccu

SEQ ID NO: 1862174 - RNA, 21 nt, Human
ugccuggauggggcugcaccg

SEQ ID NO: 1862175 - RNA, 20 nt, Human
ugccuggauggggcugcacc

SEQ ID NO: 1862176 - RNA, 17 nt, Human
ugccuggauggggcugc

SEQ ID NO: 1862177 - RNA, 16 nt, Human
ugccuggauggggcug

SEQ ID NO: 1862178 - RNA, 19 nt, Human
agcugccuguucagcucca

SEQ ID NO: 1862179 - RNA, 18 nt, Human
agcugccuguucagcucc

SEQ ID NO: 1862180 - RNA, 14 nt, Human
agcugccuguucag

SEQ ID NO: 1862181 - RNA, 16 nt, Human
agcugccuguucagcu

SEQ ID NO: 1862182 - RNA, 18 nt, Human
agcuguuacugucuucag

SEQ ID NO: 1862183 - RNA, 19 nt, Human
agcugugcucuggacaggc

SEQ ID NO: 1862184 - RNA, 17 nt, Human
agcugugcucuggacag

SEQ ID NO: 1862185 - RNA, 18 nt, Human
agcugugcucuggacagg

SEQ ID NO: 1862186 - RNA, 23 nt, Human
agcugggguggggaccucaggcc

SEQ ID NO: 1862187 - RNA, 22 nt, Human
agcugggguggggaccucaggc

SEQ ID NO: 1862188 - RNA, 20 nt, Human
agcugggacuacaggcaccc

SEQ ID NO: 1862189 - RNA, 23 nt, Human
agcugggacuacaggcacccacc

SEQ ID NO: 1862190 - RNA, 20 nt, Human
agcugggguggggaccucag

SEQ ID NO: 1862191 - RNA, 16 nt, Human
agcugggacuacaggu

SEQ ID NO: 1862192 - RNA, 17 nt, Human
ugccuguugggccagga

SEQ ID NO: 1862193 - RNA, 16 nt, Human
ugccuguugggccagg

SEQ ID NO: 1862194 - RNA, 20 nt, Human
ugccuuacccucauguucuu

SEQ ID NO: 1862195 - RNA, 16 nt, Human
ugccuuggggacaaga

SEQ ID NO: 1862196 - RNA, 21 nt, Human
ugccuuacccucauguucuua

SEQ ID NO: 1862197 - RNA, 14 nt, Human
ugccuguucccauu

SEQ ID NO: 1862198 - RNA, 19 nt, Human
agcuguuacugucuucagu

SEQ ID NO: 1862199 - RNA, 20 nt, Human
agcugccagccgagauagcc

SEQ ID NO: 1862200 - RNA, 16 nt, Human
agcucuguccugggag

SEQ ID NO: 1862201 - RNA, 21 nt, Human
agcucuguccugggagugagc

SEQ ID NO: 1862202 - RNA, 23 nt, Human
agcucuguccugggagugagcug

SEQ ID NO: 1862203 - RNA, 14 nt, Human
ugccgcagcccugc

SEQ ID NO: 1862204 - RNA, 12 nt, Human
ugccgcagcccu

SEQ ID NO: 1862205 - RNA, 12 nt, Human
ugccucagccuc

SEQ ID NO: 1862206 - RNA, 13 nt, Human
ugccucagccucc

SEQ ID NO: 1862207 - RNA, 18 nt, Human
ugcccuuaccugccagga

SEQ ID NO: 1862208 - RNA, 17 nt, Human
agcucugguccauagag

SEQ ID NO: 1862209 - RNA, 12 nt, Human
agcucuggucca

SEQ ID NO: 1862210 - RNA, 16 nt, Human
agcuccuucuguccua

SEQ ID NO: 1862211 - RNA, 21 nt, Human
agcuccuucuguccuacucug

SEQ ID NO: 1862212 - RNA, 15 nt, Human
agcuccaucuccacu

SEQ ID NO: 1862213 - RNA, 13 nt, Human
agcuccaucucca

SEQ ID NO: 1862214 - RNA, 13 nt, Human
agcucccaggcau

SEQ ID NO: 1862215 - RNA, 16 nt, Human
agcuccaucuccacuc

SEQ ID NO: 1862216 - RNA, 23 nt, Human
agcucccaggcauuccccaggag

SEQ ID NO: 1862217 - RNA, 15 nt, Human
agcuccuucuguccu

SEQ ID NO: 1862218 - RNA, 16 nt, Human
aggaagcucagggccu

SEQ ID NO: 1862219 - RNA, 15 nt, Human
aggaagcucagggcc

SEQ ID NO: 1862220 - RNA, 15 nt, Human
aggaaggcugagagg

SEQ ID NO: 1862221 - RNA, 14 nt, Human
aggaagcucagggc

SEQ ID NO: 1862222 - RNA, 13 nt, Human
aggaagcucaggg

SEQ ID NO: 1862223 - RNA, 13 nt, Human
aggaagccagcag

SEQ ID NO: 1862224 - RNA, 18 nt, Human
aggaagcagcuuucccca

SEQ ID NO: 1862225 - RNA, 18 nt, Human
ugcuaucucccccagccc

SEQ ID NO: 1862226 - RNA, 17 nt, Human
ugcuaucucccccagcc

SEQ ID NO: 1862227 - RNA, 14 nt, Human
ugcuaucuccccca

SEQ ID NO: 1862228 - RNA, 13 nt, Human
ugcuaucuccccc

SEQ ID NO: 1862229 - RNA, 16 nt, Human
aggaaaagcugcugac

SEQ ID NO: 1862230 - RNA, 21 nt, Human
ugcuccagcuguucagcuggu

SEQ ID NO: 1862231 - RNA, 15 nt, Human
ugcucuugaacuccu

SEQ ID NO: 1862232 - RNA, 22 nt, Human
ugcucuugaacuccugaccuca

SEQ ID NO: 1862233 - RNA, 20 nt, Human
ugcucuugaacuccugaccu

SEQ ID NO: 1862234 - RNA, 14 nt, Human
ugcucugcugacag

SEQ ID NO: 1862235 - RNA, 15 nt, Human
ugcucugcugacaga

SEQ ID NO: 1862236 - RNA, 16 nt, Human
ugcucugcugacagac

SEQ ID NO: 1862237 - RNA, 20 nt, Human
ugcuaauuuugaaaaacugc

SEQ ID NO: 1862238 - RNA, 19 nt, Human
ugcuaauuuugaaaaacug

SEQ ID NO: 1862239 - RNA, 18 nt, Human
ugcuaauuuugaaaaacu

SEQ ID NO: 1862240 - RNA, 16 nt, Human
ugcuaauuuugaaaaa

SEQ ID NO: 1862241 - RNA, 13 nt, Human
agcuuaacagugu

SEQ ID NO: 1862242 - RNA, 13 nt, Human
agcuguuuaugca

SEQ ID NO: 1862243 - RNA, 14 nt, Human
ugcgguccacccag

SEQ ID NO: 1862244 - RNA, 15 nt, Human
ugcgguccacccagg

SEQ ID NO: 1862245 - RNA, 20 nt, Human
agcuugcccuggugccucac

SEQ ID NO: 1862246 - RNA, 23 nt, Human
agcuugaccgugaggccagagac

SEQ ID NO: 1862247 - RNA, 22 nt, Human
agcuugaccgugaggccagaga

SEQ ID NO: 1862248 - RNA, 20 nt, Human
agcuugaccgugaggccaga

SEQ ID NO: 1862249 - RNA, 15 nt, Human
agcuuacaagccagc

SEQ ID NO: 1862250 - RNA, 17 nt, Human
agcuuacaagccagcug

SEQ ID NO: 1862251 - RNA, 19 nt, Human
agcuuacaagccagcugga

SEQ ID NO: 1862252 - RNA, 22 nt, Human
agcuuuccccaugucucgacuc

SEQ ID NO: 1862253 - RNA, 14 nt, Human
aggaaaagcugcug

SEQ ID NO: 1862254 - RNA, 18 nt, Human
aggugccucaagagaagg

SEQ ID NO: 1862255 - RNA, 15 nt, Human
aggugggauccucca

SEQ ID NO: 1862256 - RNA, 17 nt, Human
aggugggauccuccagg

SEQ ID NO: 1862257 - RNA, 16 nt, Human
aggugggauccuccag

SEQ ID NO: 1862258 - RNA, 18 nt, Human
aggugggauccuccaggu

SEQ ID NO: 1862259 - RNA, 23 nt, Human
agguggggcagcuugaggguugg

SEQ ID NO: 1862260 - RNA, 14 nt, Human
aggugauccaccca

SEQ ID NO: 1862261 - RNA, 20 nt, Human
aggugauccacccaccucag

SEQ ID NO: 1862262 - RNA, 20 nt, Human
aggugcauauuuauaaaaau

SEQ ID NO: 1862263 - RNA, 14 nt, Human
agguuuaagcuguu

SEQ ID NO: 1862264 - RNA, 19 nt, Human
agguggggucacucuggca

SEQ ID NO: 1862265 - RNA, 17 nt, Human
aggugugaaccaccaca

SEQ ID NO: 1862266 - RNA, 15 nt, Human
aggugugcucugauc

SEQ ID NO: 1862267 - RNA, 20 nt, Human
aggugugcucugaucaucca

SEQ ID NO: 1862268 - RNA, 17 nt, Human
ugguuuucaaaauaaaa

SEQ ID NO: 1862269 - RNA, 15 nt, Human
ugguuuucaaaauaa

SEQ ID NO: 1862270 - RNA, 14 nt, Human
ugguuuucaaaaua

SEQ ID NO: 1862271 - RNA, 15 nt, Human
ugguuuguaaauuaa

SEQ ID NO: 1862272 - RNA, 13 nt, Human
ugguuuccugccc

SEQ ID NO: 1862273 - RNA, 12 nt, Human
ugguuuccugcc

SEQ ID NO: 1862274 - RNA, 20 nt, Human
ugguuuccugcccugggagg

SEQ ID NO: 1862275 - RNA, 15 nt, Human
ugguuuccugcccug

SEQ ID NO: 1862276 - RNA, 14 nt, Human
ugguuuccugcccu

SEQ ID NO: 1862277 - RNA, 14 nt, Human
ugguuauggagagg

SEQ ID NO: 1862278 - RNA, 15 nt, Human
uguaaauagcucagg

SEQ ID NO: 1862279 - RNA, 16 nt, Human
uguaaauagcucaggu

SEQ ID NO: 1862280 - RNA, 21 nt, Human
uguaaauacuguuuuuaacaa

SEQ ID NO: 1862281 - RNA, 19 nt, Human
uguaaauaaagaacuagca

SEQ ID NO: 1862282 - RNA, 16 nt, Human
aggugagaagcagagg

SEQ ID NO: 1862283 - RNA, 23 nt, Human
aggugagaagcagaggaaggaga

SEQ ID NO: 1862284 - RNA, 21 nt, Human
aggugagaagcagaggaagga

SEQ ID NO: 1862285 - RNA, 22 nt, Human
aggugacagagugagacucugu

SEQ ID NO: 1862286 - RNA, 13 nt, Human
aggugaccccagg

SEQ ID NO: 1862287 - RNA, 18 nt, Human
aggucuugaacuccuggc

SEQ ID NO: 1862288 - RNA, 17 nt, Human
aggucuugaacuccugg

SEQ ID NO: 1862289 - RNA, 13 nt, Human
aggugacagagug

SEQ ID NO: 1862290 - RNA, 15 nt, Human
aggugacagagugag

SEQ ID NO: 1862291 - RNA, 19 nt, Human
agguccacaacacacagau

SEQ ID NO: 1862292 - RNA, 16 nt, Human
aggucuugaacuccug

SEQ ID NO: 1862293 - RNA, 15 nt, Human
uggucagauuugaac

SEQ ID NO: 1862294 - RNA, 16 nt, Human
uggucagauuugaacu

SEQ ID NO: 1862295 - RNA, 13 nt, Human
aggucagagccug

SEQ ID NO: 1862296 - RNA, 14 nt, Human
aggucagagccugc

SEQ ID NO: 1862297 - RNA, 15 nt, Human
aggucagagccugca

SEQ ID NO: 1862298 - RNA, 17 nt, Human
aggucagagccugcagu

SEQ ID NO: 1862299 - RNA, 18 nt, Human
aggucagagccugcaguu

SEQ ID NO: 1862300 - RNA, 23 nt, Human
uggugugaccacugcagaagaca

SEQ ID NO: 1862301 - RNA, 20 nt, Human
ugguuaggcauugugggaag

SEQ ID NO: 1862302 - RNA, 18 nt, Human
ugguuaggcauuguggga

SEQ ID NO: 1862303 - RNA, 21 nt, Human
ugguggagaggcccggccucu

SEQ ID NO: 1862304 - RNA, 14 nt, Human
ugguggcagcugcg

SEQ ID NO: 1862305 - RNA, 13 nt, Human
ugguggcagcugc

SEQ ID NO: 1862306 - RNA, 15 nt, Human
ugguggcagcugcgg

SEQ ID NO: 1862307 - RNA, 12 nt, Human
ugguggcagugg

SEQ ID NO: 1862308 - RNA, 18 nt, Human
uggugcugccacacuuca

SEQ ID NO: 1862309 - RNA, 13 nt, Human
uggugcugccaca

SEQ ID NO: 1862310 - RNA, 16 nt, Human
uggugcgaucuggguu

SEQ ID NO: 1862311 - RNA, 17 nt, Human
uggugcgaucuggguuc

SEQ ID NO: 1862312 - RNA, 23 nt, Human
agucacacaguauuacuucugcu

SEQ ID NO: 1862313 - RNA, 19 nt, Human
agucaccccggccaccugc

SEQ ID NO: 1862314 - RNA, 15 nt, Human
agucacacagugagu

SEQ ID NO: 1862315 - RNA, 23 nt, Human
agucacacagugagucgaggaca

SEQ ID NO: 1862316 - RNA, 15 nt, Human
ugucaauuacaggaa

SEQ ID NO: 1862317 - RNA, 14 nt, Human
ugucaauuacagga

SEQ ID NO: 1862318 - RNA, 17 nt, Human
ugucaauuacaggaagu

SEQ ID NO: 1862319 - RNA, 19 nt, Human
ugucaauuacaggaaguac

SEQ ID NO: 1862320 - RNA, 15 nt, Human
aguaugguggcuggg

SEQ ID NO: 1862321 - RNA, 16 nt, Human
aguaugguggcugggu

SEQ ID NO: 1862322 - RNA, 15 nt, Human
aguauuacuucugcu

SEQ ID NO: 1862323 - RNA, 17 nt, Human
aguaugguggcuggguu

SEQ ID NO: 1862324 - RNA, 18 nt, Human
aguauuacuucugcuaca

SEQ ID NO: 1862325 - RNA, 17 nt, Human
uguaucaaugaguaaca

SEQ ID NO: 1862326 - RNA, 18 nt, Human
uguaugucucgugguagg

SEQ ID NO: 1862327 - RNA, 13 nt, Human
uguauuacaaauc

SEQ ID NO: 1862328 - RNA, 22 nt, Human
uguauuacaaauccaaugaaau

SEQ ID NO: 1862329 - RNA, 19 nt, Human
uguauucucuccuguaccu

SEQ ID NO: 1862330 - RNA, 20 nt, Human
uguauucucuccuguaccuc

SEQ ID NO: 1862331 - RNA, 20 nt, Human
aguagaagucuuagauguau

SEQ ID NO: 1862332 - RNA, 19 nt, Human
aguagaagucuuagaugua

SEQ ID NO: 1862333 - RNA, 21 nt, Human
aguagaagucuuagauguaua

SEQ ID NO: 1862334 - RNA, 14 nt, Human
aguacauguuaaac

SEQ ID NO: 1862335 - RNA, 11 nt, Human
aguagagacag

SEQ ID NO: 1862336 - RNA, 20 nt, Human
uguaggcauaaagucagggg

SEQ ID NO: 1862337 - RNA, 17 nt, Human
uguaggcauaaagucag

SEQ ID NO: 1862338 - RNA, 14 nt, Human
aguaauaugcacac

SEQ ID NO: 1862339 - RNA, 15 nt, Human
aguaauaugcacaca

SEQ ID NO: 1862340 - RNA, 13 nt, Human
aguaaaauccaca

SEQ ID NO: 1862341 - RNA, 18 nt, Human
uguagaaaagggaacuga

SEQ ID NO: 1862342 - RNA, 19 nt, Human
uguagaaaagggaacugaa

SEQ ID NO: 1862343 - RNA, 20 nt, Human
uguagaaaagggaacugaac

SEQ ID NO: 1862344 - RNA, 21 nt, Human
uguagaaaagggaacugaaca

SEQ ID NO: 1862345 - RNA, 23 nt, Human
uguacuugcucuugaugccuggc

SEQ ID NO: 1862346 - RNA, 22 nt, Human
uguacuugcucuugaugccugg

SEQ ID NO: 1862347 - RNA, 16 nt, Human
uguagaggagaaacug

SEQ ID NO: 1862348 - RNA, 14 nt, Human
uguagagcuucugg

SEQ ID NO: 1862349 - RNA, 23 nt, Human
uguagaaaagggaacugaacauu

SEQ ID NO: 1862350 - RNA, 16 nt, Human
uguagagccagggucu

SEQ ID NO: 1862351 - RNA, 18 nt, Human
uguagagccagggucuca

SEQ ID NO: 1862352 - RNA, 16 nt, Human
ugggagagccuuccag

SEQ ID NO: 1862353 - RNA, 18 nt, Human
ugggaggaucucuugagc

SEQ ID NO: 1862354 - RNA, 18 nt, Human
ugggagacugcugaguca

SEQ ID NO: 1862355 - RNA, 21 nt, Human
ugggagagaagagaaugcaca

SEQ ID NO: 1862356 - RNA, 19 nt, Human
ugggagagaagagaaugca

SEQ ID NO: 1862357 - RNA, 20 nt, Human
ugggacucaaugcacugaca

SEQ ID NO: 1862358 - RNA, 23 nt, Human
agggaggacgcucucuggccuuc

SEQ ID NO: 1862359 - RNA, 21 nt, Human
agggaggacgcucucuggccu

SEQ ID NO: 1862360 - RNA, 22 nt, Human
agggaggacgcucucuggccuu

SEQ ID NO: 1862361 - RNA, 14 nt, Human
ugggacuacaggca

SEQ ID NO: 1862362 - RNA, 15 nt, Human
ugggacuacaggcac

SEQ ID NO: 1862363 - RNA, 16 nt, Human
ugggacuacaggcacc

SEQ ID NO: 1862364 - RNA, 21 nt, Human
aggcccggcuccaggcuccuu

SEQ ID NO: 1862365 - RNA, 18 nt, Human
aggcccggcuccaggcuc

SEQ ID NO: 1862366 - RNA, 20 nt, Human
aggcccggcuccaggcuccu

SEQ ID NO: 1862367 - RNA, 13 nt, Human
agggaaauuucag

SEQ ID NO: 1862368 - RNA, 21 nt, Human
agggaauuucuucaacucccu

SEQ ID NO: 1862369 - RNA, 22 nt, Human
agggaaggauacaaaagcaugu

SEQ ID NO: 1862370 - RNA, 22 nt, Human
agggaaggggacaaggacuagg

SEQ ID NO: 1862371 - RNA, 13 nt, Human
agggaaggggaca

SEQ ID NO: 1862372 - RNA, 20 nt, Human
ugggaggccaaggugggagg

SEQ ID NO: 1862373 - RNA, 19 nt, Human
ugggaggccaaggugggag

SEQ ID NO: 1862374 - RNA, 22 nt, Human
ugggaggaucucuugagccugg

SEQ ID NO: 1862375 - RNA, 21 nt, Human
ugggaggaucucuugagccug

SEQ ID NO: 1862376 - RNA, 20 nt, Human
ugggaggaucucuugagccu

SEQ ID NO: 1862377 - RNA, 13 nt, Human
ugggcagagcaga

SEQ ID NO: 1862378 - RNA, 18 nt, Human
ugggccaggagccuccug

SEQ ID NO: 1862379 - RNA, 12 nt, Human
ugggcagagcag

SEQ ID NO: 1862380 - RNA, 11 nt, Human
ugggcagagca

SEQ ID NO: 1862381 - RNA, 12 nt, Human
ugggcagaagga

SEQ ID NO: 1862382 - RNA, 21 nt, Human
ugggcccccaaauggaaaugg

SEQ ID NO: 1862383 - RNA, 16 nt, Human
ugggcccccaaaugga

SEQ ID NO: 1862384 - RNA, 22 nt, Human
ugggccccaguuguauuuauuu

SEQ ID NO: 1862385 - RNA, 18 nt, Human
ugggccccaguuguauuu

SEQ ID NO: 1862386 - RNA, 17 nt, Human
agggagggagggcucca

SEQ ID NO: 1862387 - RNA, 15 nt, Human
agggagggagggcuc

SEQ ID NO: 1862388 - RNA, 19 nt, Human
ugggccccugccucucugc

SEQ ID NO: 1862389 - RNA, 15 nt, Human
ugggccccugccucu

SEQ ID NO: 1862390 - RNA, 20 nt, Human
ugggccccugccucucugca

SEQ ID NO: 1862391 - RNA, 19 nt, Human
agggcucagcggggacagc

SEQ ID NO: 1862392 - RNA, 20 nt, Human
agggcucagcggggacagcu

SEQ ID NO: 1862393 - RNA, 22 nt, Human
agggcucagcggggacagcucc

SEQ ID NO: 1862394 - RNA, 23 nt, Human
agggcucagcggggacagcuccu

SEQ ID NO: 1862395 - RNA, 15 nt, Human
agggagggcuccaga

SEQ ID NO: 1862396 - RNA, 14 nt, Human
agggagggcuccag

SEQ ID NO: 1862397 - RNA, 16 nt, Human
agggagggcuccagac

SEQ ID NO: 1862398 - RNA, 14 nt, Human
agggcacugguggc

SEQ ID NO: 1862399 - RNA, 16 nt, Human
agggcacugguggccc

SEQ ID NO: 1862400 - RNA, 21 nt, Human
aggggaauaaacuguugaguc

SEQ ID NO: 1862401 - RNA, 13 nt, Human
aggggaauguuug

SEQ ID NO: 1862402 - RNA, 22 nt, Human
aggggaaaaucagccugcucca

SEQ ID NO: 1862403 - RNA, 18 nt, Human
aggggaaaaucagccugc

SEQ ID NO: 1862404 - RNA, 14 nt, Human
aggggaacagacug

SEQ ID NO: 1862405 - RNA, 13 nt, Human
aggggaaaagagg

SEQ ID NO: 1862406 - RNA, 22 nt, Human
uggggucacucuggcagcucag

SEQ ID NO: 1862407 - RNA, 16 nt, Human
uggggucacucuggca

SEQ ID NO: 1862408 - RNA, 17 nt, Human
ugggguacccacugcuc

SEQ ID NO: 1862409 - RNA, 18 nt, Human
ugggguacccacugcucu

SEQ ID NO: 1862410 - RNA, 14 nt, Human
uggggucacucugg

SEQ ID NO: 1862411 - RNA, 13 nt, Human
uggggucacucug

SEQ ID NO: 1862412 - RNA, 19 nt, Human
ugggguacccacugcucug

SEQ ID NO: 1862413 - RNA, 17 nt, Human
uggggaccucaggccug

SEQ ID NO: 1862414 - RNA, 16 nt, Human
uggggaccucaggccu

SEQ ID NO: 1862415 - RNA, 15 nt, Human
uggggaccucaggcc

SEQ ID NO: 1862416 - RNA, 14 nt, Human
uggggaccucaggc

SEQ ID NO: 1862417 - RNA, 15 nt, Human
agggcuccagacaca

SEQ ID NO: 1862418 - RNA, 12 nt, Human
agggcuccagac

SEQ ID NO: 1862419 - RNA, 23 nt, Human
uggggcugcaccggcuggccugg

SEQ ID NO: 1862420 - RNA, 22 nt, Human
uggggcugcaccggcuggccug

SEQ ID NO: 1862421 - RNA, 21 nt, Human
uggggccaguuggucccccuu

SEQ ID NO: 1862422 - RNA, 12 nt, Human
uggggcccugcc

SEQ ID NO: 1862423 - RNA, 22 nt, Human
uggguggcaccagcagccugga

SEQ ID NO: 1862424 - RNA, 21 nt, Human
uggguggcaccagcagccugg

SEQ ID NO: 1862425 - RNA, 20 nt, Human
uggguggcaccagcagccug

SEQ ID NO: 1862426 - RNA, 17 nt, Human
uggguggcaccagcagc

SEQ ID NO: 1862427 - RNA, 20 nt, Human
ugguagagugugccugaagu

SEQ ID NO: 1862428 - RNA, 18 nt, Human
ugggucgcccuggacugu

SEQ ID NO: 1862429 - RNA, 16 nt, Human
ugggucgcccuggacu

SEQ ID NO: 1862430 - RNA, 16 nt, Human
aggguggugaccucug

SEQ ID NO: 1862431 - RNA, 18 nt, Human
aggggagcaugggaagug

SEQ ID NO: 1862432 - RNA, 19 nt, Human
aggggaauguuugccucug

SEQ ID NO: 1862433 - RNA, 20 nt, Human
aggggaauguuugccucugc

SEQ ID NO: 1862434 - RNA, 21 nt, Human
aggggaauguuugccucugcc

SEQ ID NO: 1862435 - RNA, 18 nt, Human
aggggugggacacccugu

SEQ ID NO: 1862436 - RNA, 20 nt, Human
aggggguggccucccaacuc

SEQ ID NO: 1862437 - RNA, 15 nt, Human
aggguaaggcugugg

SEQ ID NO: 1862438 - RNA, 14 nt, Human
agggucucacucug

SEQ ID NO: 1862439 - RNA, 15 nt, Human
agggucucacucugu

SEQ ID NO: 1862440 - RNA, 16 nt, Human
agggucucacucuguc

SEQ ID NO: 1862441 - RNA, 15 nt, Human
auaaaaguacauguu

SEQ ID NO: 1862442 - RNA, 21 nt, Human
auaaaaguacauguuaaacuu

SEQ ID NO: 1862443 - RNA, 17 nt, Human
uuaaguacuauguauca

SEQ ID NO: 1862444 - RNA, 22 nt, Human
uuaaguuacacauuuuucagau

SEQ ID NO: 1862445 - RNA, 22 nt, Human
uuaagugcugcauuuaaaagau

SEQ ID NO: 1862446 - RNA, 18 nt, Human
uuaaguaaggaauuuuau

SEQ ID NO: 1862447 - RNA, 15 nt, Human
uuaagaggcaggguc

SEQ ID NO: 1862448 - RNA, 16 nt, Human
uuaagaggcagggucu

SEQ ID NO: 1862449 - RNA, 13 nt, Human
uuaagaggcaggg

SEQ ID NO: 1862450 - RNA, 20 nt, Human
uuaaugaaagacuguacaaa

SEQ ID NO: 1862451 - RNA, 23 nt, Human
uuaaugaaagacuguacaaagua

SEQ ID NO: 1862452 - RNA, 13 nt, Human
uuaauaaagacag

SEQ ID NO: 1862453 - RNA, 14 nt, Human
uuaauaaagacagg

SEQ ID NO: 1862454 - RNA, 17 nt, Human
uuaauaaacacucuuga

SEQ ID NO: 1862455 - RNA, 13 nt, Human
uuaauaaacacuc

SEQ ID NO: 1862456 - RNA, 15 nt, Human
uuaauucuuagcuca

SEQ ID NO: 1862457 - RNA, 16 nt, Human
auaaaauuaaagcuga

SEQ ID NO: 1862458 - RNA, 19 nt, Human
uuaauuuuuuugagacaga

SEQ ID NO: 1862459 - RNA, 23 nt, Human
auaaacaagaccacguuucuaaa

SEQ ID NO: 1862460 - RNA, 15 nt, Human
auaaacaagaccacg

SEQ ID NO: 1862461 - RNA, 22 nt, Human
auaaacaagaccacguuucuaa

SEQ ID NO: 1862462 - RNA, 20 nt, Human
auaaaauuuuuaaucuuuaa

SEQ ID NO: 1862463 - RNA, 18 nt, Human
uuacucagaauucucuag

SEQ ID NO: 1862464 - RNA, 23 nt, Human
uuacucagaauucucuaguuuga

SEQ ID NO: 1862465 - RNA, 20 nt, Human
uuacauaagauaaaugugcu

SEQ ID NO: 1862466 - RNA, 14 nt, Human
uuagaaauauaauu

SEQ ID NO: 1862467 - RNA, 12 nt, Human
uuagaaauauaa

SEQ ID NO: 1862468 - RNA, 11 nt, Human
uuagaaauaua

SEQ ID NO: 1862469 - RNA, 13 nt, Human
uuagaaccuuucu

SEQ ID NO: 1862470 - RNA, 11 nt, Human
uuagacagagu

SEQ ID NO: 1862471 - RNA, 14 nt, Human
uuacaggaaguacu

SEQ ID NO: 1862472 - RNA, 14 nt, Human
uuacagcugccugc

SEQ ID NO: 1862473 - RNA, 13 nt, Human
uuacagcugccug

SEQ ID NO: 1862474 - RNA, 19 nt, Human
auaacuagaacugaauuuu

SEQ ID NO: 1862475 - RNA, 16 nt, Human
auaacuaaaagguaug

SEQ ID NO: 1862476 - RNA, 18 nt, Human
auaaacacucuugaaaaa

SEQ ID NO: 1862477 - RNA, 14 nt, Human
auaaauaacuuuuu

SEQ ID NO: 1862478 - RNA, 21 nt, Human
aguucugcagauaaacaguag

SEQ ID NO: 1862479 - RNA, 16 nt, Human
aguucugcagauaaac

SEQ ID NO: 1862480 - RNA, 16 nt, Human
aguucuuaguugcugu

SEQ ID NO: 1862481 - RNA, 14 nt, Human
aguucugguuccua

SEQ ID NO: 1862482 - RNA, 20 nt, Human
uguuuuccaugaguccccug

SEQ ID NO: 1862483 - RNA, 13 nt, Human
uguuuggagacag

SEQ ID NO: 1862484 - RNA, 21 nt, Human
uguuuuauuuuaauucaguug

SEQ ID NO: 1862485 - RNA, 19 nt, Human
uguugccuugcauaauggu

SEQ ID NO: 1862486 - RNA, 19 nt, Human
uguugcccaggcaggucuu

SEQ ID NO: 1862487 - RNA, 19 nt, Human
uguuuauugucaaaguggu

SEQ ID NO: 1862488 - RNA, 17 nt, Human
uguuuauugucaaagug

SEQ ID NO: 1862489 - RNA, 22 nt, Human
uguuugauucagacagcugccu

SEQ ID NO: 1862490 - RNA, 17 nt, Human
uguuugauucagacagc

SEQ ID NO: 1862491 - RNA, 19 nt, Human
uguuucuuuguaaugaaaa

SEQ ID NO: 1862492 - RNA, 18 nt, Human
uguuucuuuguaaugaaa

SEQ ID NO: 1862493 - RNA, 23 nt, Human
aguuguuugauucagacagcugc

SEQ ID NO: 1862494 - RNA, 21 nt, Human
aguuguuugauucagacagcu

SEQ ID NO: 1862495 - RNA, 18 nt, Human
aguuggucccccuuccau

SEQ ID NO: 1862496 - RNA, 20 nt, Human
aguucuuaguugcuguaugu

SEQ ID NO: 1862497 - RNA, 21 nt, Human
aguucuuaguugcuguauguc

SEQ ID NO: 1862498 - RNA, 16 nt, Human
aguuggcuaggacccc

SEQ ID NO: 1862499 - RNA, 13 nt, Human
aguuggcuucuaa

SEQ ID NO: 1862500 - RNA, 21 nt, Human
aguuggguggaugccuggugg

SEQ ID NO: 1862501 - RNA, 13 nt, Human
uuaaauaauguga

SEQ ID NO: 1862502 - RNA, 20 nt, Human
uuaaauucuugcaaaguauc

SEQ ID NO: 1862503 - RNA, 15 nt, Human
uuaaauuucuaccgc

SEQ ID NO: 1862504 - RNA, 14 nt, Human
uguuacaaauugua

SEQ ID NO: 1862505 - RNA, 17 nt, Human
aguggaaguaguggagc

SEQ ID NO: 1862506 - RNA, 17 nt, Human
aguggugcgaucugggu

SEQ ID NO: 1862507 - RNA, 19 nt, Human
aguggugguuuucuguucu

SEQ ID NO: 1862508 - RNA, 20 nt, Human
aguggugguuuucuguucuu

SEQ ID NO: 1862509 - RNA, 21 nt, Human
aguggugguuuucuguucuuu

SEQ ID NO: 1862510 - RNA, 23 nt, Human
aguggugguuuucuguucuuucu

SEQ ID NO: 1862511 - RNA, 17 nt, Human
aguggugguuuucuguu

SEQ ID NO: 1862512 - RNA, 18 nt, Human
aguggugguuuucuguuc

SEQ ID NO: 1862513 - RNA, 21 nt, Human
agugguggugaacagaacaaa

SEQ ID NO: 1862514 - RNA, 20 nt, Human
agugugguguuuccuggcac

SEQ ID NO: 1862515 - RNA, 19 nt, Human
agugugguguuuccuggca

SEQ ID NO: 1862516 - RNA, 17 nt, Human
agugugguguuuccugg

SEQ ID NO: 1862517 - RNA, 20 nt, Human
agugugccugaagucccaga

SEQ ID NO: 1862518 - RNA, 16 nt, Human
agugugguguuuccug

SEQ ID NO: 1862519 - RNA, 18 nt, Human
uguucugugauauaagug

SEQ ID NO: 1862520 - RNA, 15 nt, Human
uguucugugauauaa

SEQ ID NO: 1862521 - RNA, 13 nt, Human
uguugcccaggca

SEQ ID NO: 1862522 - RNA, 12 nt, Human
uguugcccaggc

SEQ ID NO: 1862523 - RNA, 15 nt, Human
uguugcccaggcagg

SEQ ID NO: 1862524 - RNA, 16 nt, Human
uguugcccaggcaggu

SEQ ID NO: 1862525 - RNA, 17 nt, Human
uguugcccaggcagguc

SEQ ID NO: 1862526 - RNA, 18 nt, Human
uguugcccaggcaggucu

SEQ ID NO: 1862527 - RNA, 16 nt, Human
uguucugggacacagu

SEQ ID NO: 1862528 - RNA, 20 nt, Human
agugugucuuagugugugca

SEQ ID NO: 1862529 - RNA, 20 nt, Human
uguuccacaaguuaaauaaa

SEQ ID NO: 1862530 - RNA, 20 nt, Human
ugugucucuugguccugcug

SEQ ID NO: 1862531 - RNA, 17 nt, Human
ugugucucuugguccug

SEQ ID NO: 1862532 - RNA, 22 nt, Human
ugugucucuugguccugcugca

SEQ ID NO: 1862533 - RNA, 21 nt, Human
ugugucucuugguccugcugc

SEQ ID NO: 1862534 - RNA, 21 nt, Human
ugugucuugcaauggcagccu

SEQ ID NO: 1862535 - RNA, 19 nt, Human
ugugucuuuaaaugcugcu

SEQ ID NO: 1862536 - RNA, 23 nt, Human
uguguguuuauugucaaaguggu

SEQ ID NO: 1862537 - RNA, 19 nt, Human
uguguguuuauugucaaag

SEQ ID NO: 1862538 - RNA, 16 nt, Human
agugcugcauuuaaaa

SEQ ID NO: 1862539 - RNA, 17 nt, Human
agugcugcauuuaaaag

SEQ ID NO: 1862540 - RNA, 19 nt, Human
agugcugcauuuaaaagau

SEQ ID NO: 1862541 - RNA, 20 nt, Human
agugcugggauuacaggugu

SEQ ID NO: 1862542 - RNA, 21 nt, Human
agugcugggauuacaggugug

SEQ ID NO: 1862543 - RNA, 23 nt, Human
agugaguugauagcacagacccu

SEQ ID NO: 1862544 - RNA, 22 nt, Human
agugaguugauagcacagaccc

SEQ ID NO: 1862545 - RNA, 12 nt, Human
agugcugcauuu

SEQ ID NO: 1862546 - RNA, 13 nt, Human
agugcugcauuua

SEQ ID NO: 1862547 - RNA, 20 nt, Human
uguggucacaggaaguagag

SEQ ID NO: 1862548 - RNA, 23 nt, Human
uguggguuucuaaagcugccagc

SEQ ID NO: 1862549 - RNA, 21 nt, Human
uguggguuucuaaagcugcca

SEQ ID NO: 1862550 - RNA, 16 nt, Human
ugugguguuuccuggc

SEQ ID NO: 1862551 - RNA, 14 nt, Human
ugugguguuuccug

SEQ ID NO: 1862552 - RNA, 20 nt, Human
ugugguguuuccuggcacug

SEQ ID NO: 1862553 - RNA, 15 nt, Human
uguggucccacccca

SEQ ID NO: 1862554 - RNA, 13 nt, Human
uguggucccaccc

SEQ ID NO: 1862555 - RNA, 16 nt, Human
uguggucccaccccac

SEQ ID NO: 1862556 - RNA, 15 nt, Human
ugugagaugcuagaa

SEQ ID NO: 1862557 - RNA, 19 nt, Human
ugugagaugcuagaacucc

SEQ ID NO: 1862558 - RNA, 16 nt, Human
ugugacugaauuucuu

SEQ ID NO: 1862559 - RNA, 15 nt, Human
ugugacugaauuucu

SEQ ID NO: 1862560 - RNA, 14 nt, Human
agucucuucuccac

SEQ ID NO: 1862561 - RNA, 13 nt, Human
agucucuucucca

SEQ ID NO: 1862562 - RNA, 14 nt, Human
agucuuuguacaga

SEQ ID NO: 1862563 - RNA, 22 nt, Human
agucuuguauuaaguuguuaau

SEQ ID NO: 1862564 - RNA, 15 nt, Human
agucuuggcucacug

SEQ ID NO: 1862565 - RNA, 16 nt, Human
agucuuguauuaaguu

SEQ ID NO: 1862566 - RNA, 18 nt, Human
agucuuguauuaaguugu

SEQ ID NO: 1862567 - RNA, 17 nt, Human
agucucuucuccacugg

SEQ ID NO: 1862568 - RNA, 18 nt, Human
agucucuucuccacugga

SEQ ID NO: 1862569 - RNA, 16 nt, Human
agucucuucuccacug

SEQ ID NO: 1862570 - RNA, 15 nt, Human
agucucuucuccacu

SEQ ID NO: 1862571 - RNA, 21 nt, Human
ugugaaaggaaagagggaggu

SEQ ID NO: 1862572 - RNA, 18 nt, Human
ugugaaaggaaagaggcu

SEQ ID NO: 1862573 - RNA, 15 nt, Human
ugugaaaggaaagag

SEQ ID NO: 1862574 - RNA, 12 nt, Human
ugugaaauuauu

SEQ ID NO: 1862575 - RNA, 18 nt, Human
ugucuuguguuucuuuag

SEQ ID NO: 1862576 - RNA, 15 nt, Human
ugucuuguguuucuu

SEQ ID NO: 1862577 - RNA, 14 nt, Human
ugugaagagaacca

SEQ ID NO: 1862578 - RNA, 19 nt, Human
ugugaaccaccacacccag

SEQ ID NO: 1862579 - RNA, 20 nt, Human
ugugaaccaccacacccagc

SEQ ID NO: 1862580 - RNA, 21 nt, Human
ugugaaccaccacacccagcc

SEQ ID NO: 1862581 - RNA, 17 nt, Human
agugaggcucugcccuu

SEQ ID NO: 1862582 - RNA, 16 nt, Human
agugaggcucugcccu

SEQ ID NO: 1862583 - RNA, 14 nt, Human
agugaggcucugcc

SEQ ID NO: 1862584 - RNA, 15 nt, Human
agugaggcucugccc

SEQ ID NO: 1862585 - RNA, 18 nt, Human
uguggccaaguucuuagu

SEQ ID NO: 1862586 - RNA, 20 nt, Human
agugaggcucugcccuuggu

SEQ ID NO: 1862587 - RNA, 19 nt, Human
agugaggcucugcccuugg

SEQ ID NO: 1862588 - RNA, 21 nt, Human
agugaggcucugcccuugguu

SEQ ID NO: 1862589 - RNA, 14 nt, Human
agugagggauuauc

SEQ ID NO: 1862590 - RNA, 21 nt, Human
agugaguugauagcacagacc

SEQ ID NO: 1862591 - RNA, 15 nt, Human
agugagucgaggaca

SEQ ID NO: 1862592 - RNA, 21 nt, Human
ugugcccccauguaagcaccc

SEQ ID NO: 1862593 - RNA, 21 nt, Human
uguggaguucaucuugaauug

SEQ ID NO: 1862594 - RNA, 17 nt, Human
uguggaguucaucuuga

SEQ ID NO: 1862595 - RNA, 20 nt, Human
ugugccagauuuaugcauau

SEQ ID NO: 1862596 - RNA, 20 nt, Human
ugugccagguuuuuggucug

SEQ ID NO: 1862597 - RNA, 12 nt, Human
ugugccaugugc

SEQ ID NO: 1862598 - RNA, 16 nt, Human
ugugccaugugccagg

SEQ ID NO: 1862599 - RNA, 18 nt, Human
ugugccagauuuaugcau

SEQ ID NO: 1862600 - RNA, 20 nt, Human
ugugauggggcccugccucc

SEQ ID NO: 1862601 - RNA, 19 nt, Human
ugugauggggcccugccuc

SEQ ID NO: 1862602 - RNA, 18 nt, Human
ugugaugagaggaaauca

SEQ ID NO: 1862603 - RNA, 16 nt, Human
agugaacaaauuuaca

SEQ ID NO: 1862604 - RNA, 20 nt, Human
agugaacaaauuuacagaga

SEQ ID NO: 1862605 - RNA, 15 nt, Human
agugaaagaaaauaa

SEQ ID NO: 1862606 - RNA, 14 nt, Human
uuccuucagugccu

SEQ ID NO: 1862607 - RNA, 11 nt, Human
uuccuucagug

SEQ ID NO: 1862608 - RNA, 20 nt, Human
uuccuguucuuaagacguga

SEQ ID NO: 1862609 - RNA, 15 nt, Human
uuccuucagugccuu

SEQ ID NO: 1862610 - RNA, 20 nt, Human
auauuuucaacgcagcccug

SEQ ID NO: 1862611 - RNA, 19 nt, Human
auauuuucaacgcagcccu

SEQ ID NO: 1862612 - RNA, 11 nt, Human
uuccucuuucc

SEQ ID NO: 1862613 - RNA, 17 nt, Human
uuccuguucccaugaga

SEQ ID NO: 1862614 - RNA, 15 nt, Human
uuccuaauccucuag

SEQ ID NO: 1862615 - RNA, 13 nt, Human
uuccuaauccucu

SEQ ID NO: 1862616 - RNA, 14 nt, Human
auauuuuaagacga

SEQ ID NO: 1862617 - RNA, 20 nt, Human
uuccuuuuaaaacacuucca

SEQ ID NO: 1862618 - RNA, 22 nt, Human
uuccuuuuaaaacacuuccaua

SEQ ID NO: 1862619 - RNA, 21 nt, Human
uuccuuuuaaaacacuuccau

SEQ ID NO: 1862620 - RNA, 14 nt, Human
aucacguaaagcua

SEQ ID NO: 1862621 - RNA, 21 nt, Human
aucacguaaagcuagaaauga

SEQ ID NO: 1862622 - RNA, 22 nt, Human
aucacggcucacugcagccuca

SEQ ID NO: 1862623 - RNA, 21 nt, Human
aucaagaugugacauguuuua

SEQ ID NO: 1862624 - RNA, 13 nt, Human
aucaaguauuaua

SEQ ID NO: 1862625 - RNA, 14 nt, Human
aucaaguauuauac

SEQ ID NO: 1862626 - RNA, 18 nt, Human
aucaaguauuauaccuuu

SEQ ID NO: 1862627 - RNA, 16 nt, Human
auauucuguuggccag

SEQ ID NO: 1862628 - RNA, 19 nt, Human
auauugauuuccguuaaaa

SEQ ID NO: 1862629 - RNA, 13 nt, Human
auauugaugugug

SEQ ID NO: 1862630 - RNA, 21 nt, Human
auauugauuuccguuaaaaua

SEQ ID NO: 1862631 - RNA, 22 nt, Human
auauugauuuccguuaaaauac

SEQ ID NO: 1862632 - RNA, 22 nt, Human
auauugauccagaaagaaaacu

SEQ ID NO: 1862633 - RNA, 15 nt, Human
auauugauccagaaa

SEQ ID NO: 1862634 - RNA, 20 nt, Human
auauguuuuaagaggcaggg

SEQ ID NO: 1862635 - RNA, 18 nt, Human
auauguuuuaagaggcag

SEQ ID NO: 1862636 - RNA, 22 nt, Human
auauuaaggaagacaaugugaa

SEQ ID NO: 1862637 - RNA, 24 nt, Human
auauuaagaaagacuaucuaaaug

SEQ ID NO: 1862638 - RNA, 20 nt, Human
auauuuguauuuaaaugaaa

SEQ ID NO: 1862639 - RNA, 20 nt, Human
auauuguuuucaguguacau

SEQ ID NO: 1862640 - RNA, 21 nt, Human
auauugcugauggugcaauga

SEQ ID NO: 1862641 - RNA, 17 nt, Human
auauugcugauggugca

SEQ ID NO: 1862642 - RNA, 22 nt, Human
uucucagaaucucaaauaacua

SEQ ID NO: 1862643 - RNA, 19 nt, Human
uucucagaaucucaaauaa

SEQ ID NO: 1862644 - RNA, 23 nt, Human
uucucagaaucucaaauaacuaa

SEQ ID NO: 1862645 - RNA, 13 nt, Human
uucuaggccuggg

SEQ ID NO: 1862646 - RNA, 17 nt, Human
aucagcacgauuucugu

SEQ ID NO: 1862647 - RNA, 18 nt, Human
aucagcacgauuucuguu

SEQ ID NO: 1862648 - RNA, 15 nt, Human
aucagcacgauuucu

SEQ ID NO: 1862649 - RNA, 16 nt, Human
aucagcacgauuucug

SEQ ID NO: 1862650 - RNA, 14 nt, Human
aucauucauuuucu

SEQ ID NO: 1862651 - RNA, 22 nt, Human
aucauuaaagccugaguuugcu

SEQ ID NO: 1862652 - RNA, 15 nt, Human
aucauugaaaucuuu

SEQ ID NO: 1862653 - RNA, 14 nt, Human
aucauugaaaucuu

SEQ ID NO: 1862654 - RNA, 23 nt, Human
aucauaguggcuuaaaacaacac

SEQ ID NO: 1862655 - RNA, 23 nt, Human
uucugccgcagcccugcagaggg

SEQ ID NO: 1862656 - RNA, 16 nt, Human
uucugccgcagcccug

SEQ ID NO: 1862657 - RNA, 10 nt, Human
uucugggaca

SEQ ID NO: 1862658 - RNA, 11 nt, Human
uucugggacac

SEQ ID NO: 1862659 - RNA, 22 nt, Human
uucugggacacaguucaauucu

SEQ ID NO: 1862660 - RNA, 15 nt, Human
uucugaaagggacgc

SEQ ID NO: 1862661 - RNA, 19 nt, Human
aucauugaaaucuuuuugc

SEQ ID NO: 1862662 - RNA, 20 nt, Human
aucauugaaaucuuuuugcu

SEQ ID NO: 1862663 - RNA, 17 nt, Human
aucccaggauguacaag

SEQ ID NO: 1862664 - RNA, 17 nt, Human
auccaggguggugguga

SEQ ID NO: 1862665 - RNA, 15 nt, Human
auccagguucagcuu

SEQ ID NO: 1862666 - RNA, 16 nt, Human
auccagguucagcuug

SEQ ID NO: 1862667 - RNA, 17 nt, Human
aucccauaugccugggc

SEQ ID NO: 1862668 - RNA, 16 nt, Human
aucccauaugccuggg

SEQ ID NO: 1862669 - RNA, 14 nt, Human
uuauuuaaauuuua

SEQ ID NO: 1862670 - RNA, 22 nt, Human
uuauuuaaugaaagacuguaca

SEQ ID NO: 1862671 - RNA, 18 nt, Human
uuauuuaaugaaagacug

SEQ ID NO: 1862672 - RNA, 23 nt, Human
auagcuggucuuauuuguaaagc

SEQ ID NO: 1862673 - RNA, 22 nt, Human
auagcuggucuuauuuguaaag

SEQ ID NO: 1862674 - RNA, 17 nt, Human
auagcugggacuacagg

SEQ ID NO: 1862675 - RNA, 15 nt, Human
uuauuuaguauuuau

SEQ ID NO: 1862676 - RNA, 16 nt, Human
uuauuuaguuccuuga

SEQ ID NO: 1862677 - RNA, 17 nt, Human
uuauuuagcaccaggga

SEQ ID NO: 1862678 - RNA, 19 nt, Human
auagcucaggugucccugc

SEQ ID NO: 1862679 - RNA, 18 nt, Human
auagcuacuaauuuuaaa

SEQ ID NO: 1862680 - RNA, 22 nt, Human
auagcucaggugucccugcacu

SEQ ID NO: 1862681 - RNA, 20 nt, Human
auagcucaggugucccugca

SEQ ID NO: 1862682 - RNA, 21 nt, Human
auagcucaggugucccugcac

SEQ ID NO: 1862683 - RNA, 12 nt, Human
auagcugggacu

SEQ ID NO: 1862684 - RNA, 17 nt, Human
auaagauaaaugugcug

SEQ ID NO: 1862685 - RNA, 13 nt, Human
auaagauaaaugu

SEQ ID NO: 1862686 - RNA, 18 nt, Human
auagccugccucuucucu

SEQ ID NO: 1862687 - RNA, 20 nt, Human
auagcgucauaacuagaacu

SEQ ID NO: 1862688 - RNA, 18 nt, Human
auagcgucauaacuagaa

SEQ ID NO: 1862689 - RNA, 17 nt, Human
auagcuacuaauuuuaa

SEQ ID NO: 1862690 - RNA, 14 nt, Human
auagcuacuaauuu

SEQ ID NO: 1862691 - RNA, 13 nt, Human
uucacaguucucu

SEQ ID NO: 1862692 - RNA, 17 nt, Human
uucacauauugauuucc

SEQ ID NO: 1862693 - RNA, 19 nt, Human
uucacauuguauucagagu

SEQ ID NO: 1862694 - RNA, 22 nt, Human
uucaccacaugugcacaugcac

SEQ ID NO: 1862695 - RNA, 22 nt, Human
auaggaauugacccacaagaaa

SEQ ID NO: 1862696 - RNA, 17 nt, Human
auaggcacaggaaacca

SEQ ID NO: 1862697 - RNA, 22 nt, Human
auaggcaccuaccaccacgccc

SEQ ID NO: 1862698 - RNA, 21 nt, Human
auaggaauugacccacaagaa

SEQ ID NO: 1862699 - RNA, 19 nt, Human
auaggaacuuaaauaaugu

SEQ ID NO: 1862700 - RNA, 22 nt, Human
auagcuuacaagccagcuggag

SEQ ID NO: 1862701 - RNA, 22 nt, Human
uucaccauguuggccaggcugg

SEQ ID NO: 1862702 - RNA, 22 nt, Human
uucaccauguuggccaggcugc

SEQ ID NO: 1862703 - RNA, 22 nt, Human
uucaagugauucucaugccuca

SEQ ID NO: 1862704 - RNA, 20 nt, Human
uucaagugauucucaugccu

SEQ ID NO: 1862705 - RNA, 20 nt, Human
uucaagugauucuccugccu

SEQ ID NO: 1862706 - RNA, 21 nt, Human
uucaaggauccugagccagau

SEQ ID NO: 1862707 - RNA, 19 nt, Human
uucaaggauccugagccag

SEQ ID NO: 1862708 - RNA, 18 nt, Human
uucaaggauccugagcca

SEQ ID NO: 1862709 - RNA, 16 nt, Human
uucaaggauccugagc

SEQ ID NO: 1862710 - RNA, 15 nt, Human
uucaaggauccugag

SEQ ID NO: 1862711 - RNA, 16 nt, Human
uucaaaauuguuacaa

SEQ ID NO: 1862712 - RNA, 17 nt, Human
auauaaauuuuuuuugu

SEQ ID NO: 1862713 - RNA, 22 nt, Human
auauaaauuuuuuuuguuucau

SEQ ID NO: 1862714 - RNA, 19 nt, Human
uucacugcuggcugccuua

SEQ ID NO: 1862715 - RNA, 18 nt, Human
uucacugcuggcugccuu

SEQ ID NO: 1862716 - RNA, 17 nt, Human
uucacugcuggcugccu

SEQ ID NO: 1862717 - RNA, 16 nt, Human
uucacugcuggcugcc

SEQ ID NO: 1862718 - RNA, 15 nt, Human
uucacugcuggcugc

SEQ ID NO: 1862719 - RNA, 13 nt, Human
uucacugcuggcu

SEQ ID NO: 1862720 - RNA, 15 nt, Human
uucagaaagaagugg

SEQ ID NO: 1862721 - RNA, 19 nt, Human
uucagccaagaauucuuaa

SEQ ID NO: 1862722 - RNA, 22 nt, Human
uucagcaccuacaguguacagu

SEQ ID NO: 1862723 - RNA, 23 nt, Human
uucagcaccuacaguguacaguc

SEQ ID NO: 1862724 - RNA, 17 nt, Human
uucagaucucuaacuuc

SEQ ID NO: 1862725 - RNA, 13 nt, Human
auaugcacacauu

SEQ ID NO: 1862726 - RNA, 14 nt, Human
auaugucaagccau

SEQ ID NO: 1862727 - RNA, 20 nt, Human
auaugauuuaaaucagccgu

SEQ ID NO: 1862728 - RNA, 22 nt, Human
auaucugaaaauguauguguaa

SEQ ID NO: 1862729 - RNA, 21 nt, Human
uucauauuuacuucuuauaca

SEQ ID NO: 1862730 - RNA, 16 nt, Human
uucauauuuacuucuu

SEQ ID NO: 1862731 - RNA, 14 nt, Human
uucaguaauaacuc

SEQ ID NO: 1862732 - RNA, 14 nt, Human
uucagccugccuuc

SEQ ID NO: 1862733 - RNA, 21 nt, Human
uucaucauccuaagcuauuca

SEQ ID NO: 1862734 - RNA, 18 nt, Human
uucaucauccuaagcuau

SEQ ID NO: 1862735 - RNA, 18 nt, Human
auauauucagccuggcuu

SEQ ID NO: 1862736 - RNA, 21 nt, Human
aucucaaauaacuaaaaggua

SEQ ID NO: 1862737 - RNA, 14 nt, Human
aucucaaauaacua

SEQ ID NO: 1862738 - RNA, 23 nt, Human
aucucaaauaacuaaaagguaug

SEQ ID NO: 1862739 - RNA, 14 nt, Human
aucucaaauuucua

SEQ ID NO: 1862740 - RNA, 19 nt, Human
aucuaggaagacuuuggaa

SEQ ID NO: 1862741 - RNA, 18 nt, Human
aucuaggaagacuuugga

SEQ ID NO: 1862742 - RNA, 17 nt, Human
aucuaggaagacuuugg

SEQ ID NO: 1862743 - RNA, 19 nt, Human
aucuagauacuguaucaug

SEQ ID NO: 1862744 - RNA, 18 nt, Human
aucuagauacuguaucau

SEQ ID NO: 1862745 - RNA, 23 nt, Human
aucuaauauguaacaagccaccc

SEQ ID NO: 1862746 - RNA, 17 nt, Human
uugauacuacaguuugu

SEQ ID NO: 1862747 - RNA, 18 nt, Human
uugauagcacagacccug

SEQ ID NO: 1862748 - RNA, 21 nt, Human
uugagugcugucuccauguuu

SEQ ID NO: 1862749 - RNA, 11 nt, Human
uugagugccuu

SEQ ID NO: 1862750 - RNA, 17 nt, Human
uugaccauucuccaccu

SEQ ID NO: 1862751 - RNA, 16 nt, Human
uugagcagggcucagc

SEQ ID NO: 1862752 - RNA, 12 nt, Human
uugagcagggcu

SEQ ID NO: 1862753 - RNA, 10 nt, Human
uugagacaga

SEQ ID NO: 1862754 - RNA, 11 nt, Human
uugagacagag

SEQ ID NO: 1862755 - RNA, 19 nt, Human
uugacaggauuauuggaaa

SEQ ID NO: 1862756 - RNA, 10 nt, Human
uugacagggc

SEQ ID NO: 1862757 - RNA, 12 nt, Human
uugacagggcac

SEQ ID NO: 1862758 - RNA, 16 nt, Human
uugacaucaacugcau

SEQ ID NO: 1862759 - RNA, 14 nt, Human
uugcaugaggcuag

SEQ ID NO: 1862760 - RNA, 21 nt, Human
uugcaccacugcacuccagcc

SEQ ID NO: 1862761 - RNA, 15 nt, Human
uugcaauagaaaucc

SEQ ID NO: 1862762 - RNA, 22 nt, Human
uugcaauagaaauccaauugga

SEQ ID NO: 1862763 - RNA, 14 nt, Human
uugcaauggcagcc

SEQ ID NO: 1862764 - RNA, 13 nt, Human
uugcccaggcagg

SEQ ID NO: 1862765 - RNA, 14 nt, Human
uugcccaggcaggu

SEQ ID NO: 1862766 - RNA, 16 nt, Human
uugcccaggcaggucu

SEQ ID NO: 1862767 - RNA, 18 nt, Human
uugcccaggcaggucuug

SEQ ID NO: 1862768 - RNA, 11 nt, Human
uugcccaggcu

SEQ ID NO: 1862769 - RNA, 12 nt, Human
uugcccaggcug

SEQ ID NO: 1862770 - RNA, 14 nt, Human
uugcccaggcuggc

SEQ ID NO: 1862771 - RNA, 23 nt, Human
uugcccaggcuggcgugcagugg

SEQ ID NO: 1862772 - RNA, 23 nt, Human
uugauguucuuucacccuuuucu

SEQ ID NO: 1862773 - RNA, 18 nt, Human
uugcaacuuuguauaaaa

SEQ ID NO: 1862774 - RNA, 17 nt, Human
uugcaacuuuguauaaa

SEQ ID NO: 1862775 - RNA, 16 nt, Human
uugcaacuuuguauaa

SEQ ID NO: 1862776 - RNA, 15 nt, Human
uugauuaaauucuug

SEQ ID NO: 1862777 - RNA, 16 nt, Human
uugauuaaauucuugc

SEQ ID NO: 1862778 - RNA, 20 nt, Human
uugauuaaauucuugcaaag

SEQ ID NO: 1862779 - RNA, 21 nt, Human
uugauuaaauucuugcaaagu

SEQ ID NO: 1862780 - RNA, 23 nt, Human
aucucacacaugagcaucaggcc

SEQ ID NO: 1862781 - RNA, 16 nt, Human
aucucaaauuucuaaa

SEQ ID NO: 1862782 - RNA, 17 nt, Human
aucucaaauuucuaaau

SEQ ID NO: 1862783 - RNA, 16 nt, Human
aucucaccuccugcug

SEQ ID NO: 1862784 - RNA, 15 nt, Human
aucucaccuccugcu

SEQ ID NO: 1862785 - RNA, 16 nt, Human
aucucuuguuuaaauu

SEQ ID NO: 1862786 - RNA, 22 nt, Human
aucucuuuguucuaaagaugga

SEQ ID NO: 1862787 - RNA, 12 nt, Human
aucugaaaaugu

SEQ ID NO: 1862788 - RNA, 12 nt, Human
uuguaaugaaaa

SEQ ID NO: 1862789 - RNA, 13 nt, Human
uuguaaauuguca

SEQ ID NO: 1862790 - RNA, 14 nt, Human
uuguaaauuucucu

SEQ ID NO: 1862791 - RNA, 19 nt, Human
uuggugucgggcaugacac

SEQ ID NO: 1862792 - RNA, 18 nt, Human
uuggugucgggcaugaca

SEQ ID NO: 1862793 - RNA, 17 nt, Human
uuggugucgggcaugac

SEQ ID NO: 1862794 - RNA, 14 nt, Human
uugguuuguaaauu

SEQ ID NO: 1862795 - RNA, 18 nt, Human
uuggugguuucagaaaug

SEQ ID NO: 1862796 - RNA, 19 nt, Human
uuggugguuucagaaaugu

SEQ ID NO: 1862797 - RNA, 18 nt, Human
augaaugucagugugacu

SEQ ID NO: 1862798 - RNA, 16 nt, Human
augaaugucaguguga

SEQ ID NO: 1862799 - RNA, 17 nt, Human
augaaugaaacauuuug

SEQ ID NO: 1862800 - RNA, 15 nt, Human
augaagcaaugcuuc

SEQ ID NO: 1862801 - RNA, 14 nt, Human
augaagcaaugcuu

SEQ ID NO: 1862802 - RNA, 16 nt, Human
augaaagugagacuuu

SEQ ID NO: 1862803 - RNA, 23 nt, Human
augaaccacaucuugcucugcug

SEQ ID NO: 1862804 - RNA, 22 nt, Human
augaaccacaucuugcucugcu

SEQ ID NO: 1862805 - RNA, 15 nt, Human
uugcuuugugauuuu

SEQ ID NO: 1862806 - RNA, 13 nt, Human
uugcuuuguaugc

SEQ ID NO: 1862807 - RNA, 18 nt, Human
uugcucuugaugccuggc

SEQ ID NO: 1862808 - RNA, 17 nt, Human
uugcucuugaugccugg

SEQ ID NO: 1862809 - RNA, 14 nt, Human
uugcucuugaugcc

SEQ ID NO: 1862810 - RNA, 20 nt, Human
uugcuuugugauuuuuguaa

SEQ ID NO: 1862811 - RNA, 16 nt, Human
uugcuuuguaugcacu

SEQ ID NO: 1862812 - RNA, 17 nt, Human
uuggaaaauaaauuauu

SEQ ID NO: 1862813 - RNA, 15 nt, Human
uuggaaaauaaauca

SEQ ID NO: 1862814 - RNA, 12 nt, Human
uuggaaaauaaa

SEQ ID NO: 1862815 - RNA, 12 nt, Human
aucugucauuug

SEQ ID NO: 1862816 - RNA, 17 nt, Human
aucugucauuugagcag

SEQ ID NO: 1862817 - RNA, 22 nt, Human
aucugucauuugagcagggcuc

SEQ ID NO: 1862818 - RNA, 15 nt, Human
aucuugcucugcuga

SEQ ID NO: 1862819 - RNA, 16 nt, Human
aucuugcucugcugac

SEQ ID NO: 1862820 - RNA, 15 nt, Human
aucuuauaauuuaaa

SEQ ID NO: 1862821 - RNA, 14 nt, Human
aucuugcucugcug

SEQ ID NO: 1862822 - RNA, 16 nt, Human
aucuuauaauuuaaaa

SEQ ID NO: 1862823 - RNA, 18 nt, Human
uuuaccugaagucuuugu

SEQ ID NO: 1862824 - RNA, 22 nt, Human
uuuaccugaagucuuuguacag

SEQ ID NO: 1862825 - RNA, 20 nt, Human
uuuacccuucuuuucugacu

SEQ ID NO: 1862826 - RNA, 16 nt, Human
augcgugugugugugu

SEQ ID NO: 1862827 - RNA, 16 nt, Human
uuuacugcagcuuugu

SEQ ID NO: 1862828 - RNA, 11 nt, Human
uuuacuuaaac

SEQ ID NO: 1862829 - RNA, 15 nt, Human
uuuacuucuuauaca

SEQ ID NO: 1862830 - RNA, 14 nt, Human
uuuacuucuuauac

SEQ ID NO: 1862831 - RNA, 13 nt, Human
uuuacuucuuaua

SEQ ID NO: 1862832 - RNA, 23 nt, Human
uuuaaugaaagacuguacaaagu

SEQ ID NO: 1862833 - RNA, 21 nt, Human
uuuaaugaaagacuguacaaa

SEQ ID NO: 1862834 - RNA, 17 nt, Human
augcccagccccuucug

SEQ ID NO: 1862835 - RNA, 18 nt, Human
augccccgucccccucug

SEQ ID NO: 1862836 - RNA, 21 nt, Human
augccccgucccccucuggcu

SEQ ID NO: 1862837 - RNA, 16 nt, Human
augcccagccccuucu

SEQ ID NO: 1862838 - RNA, 15 nt, Human
augcccagccccuuc

SEQ ID NO: 1862839 - RNA, 21 nt, Human
augccaugaggaacaaggcaa

SEQ ID NO: 1862840 - RNA, 15 nt, Human
augccucucucaggc

SEQ ID NO: 1862841 - RNA, 14 nt, Human
augccucucucagg

SEQ ID NO: 1862842 - RNA, 13 nt, Human
augccucucucag

SEQ ID NO: 1862843 - RNA, 13 nt, Human
augcgcaggcugg

SEQ ID NO: 1862844 - RNA, 22 nt, Human
augcgcaggcuggcccugcccu

SEQ ID NO: 1862845 - RNA, 20 nt, Human
augcgcaggcuggcccugcc

SEQ ID NO: 1862846 - RNA, 18 nt, Human
augcgcaggcuggcccug

SEQ ID NO: 1862847 - RNA, 14 nt, Human
augcgcaggcuggc

SEQ ID NO: 1862848 - RNA, 22 nt, Human
augcgugcauaccacuuuuguu

SEQ ID NO: 1862849 - RNA, 12 nt, Human
augcgugugugu

SEQ ID NO: 1862850 - RNA, 20 nt, Human
augcgugcauaccacuuuug

SEQ ID NO: 1862851 - RNA, 18 nt, Human
augcuacaggauuugaaa

SEQ ID NO: 1862852 - RNA, 14 nt, Human
uuuaucagaauucu

SEQ ID NO: 1862853 - RNA, 19 nt, Human
augcuccuggcccacugca

SEQ ID NO: 1862854 - RNA, 14 nt, Human
augcuccuggccca

SEQ ID NO: 1862855 - RNA, 18 nt, Human
augcuggcuguuggcugg

SEQ ID NO: 1862856 - RNA, 19 nt, Human
augcuggcuguuggcuggg

SEQ ID NO: 1862857 - RNA, 20 nt, Human
augcuggcuguuggcugggg

SEQ ID NO: 1862858 - RNA, 20 nt, Human
augcuucucacugccaugcc

SEQ ID NO: 1862859 - RNA, 16 nt, Human
augcuucucacugcca

SEQ ID NO: 1862860 - RNA, 18 nt, Human
auggaagacagcucuuau

SEQ ID NO: 1862861 - RNA, 17 nt, Human
auggaagacagcucuua

SEQ ID NO: 1862862 - RNA, 14 nt, Human
auggaaggggcuga

SEQ ID NO: 1862863 - RNA, 21 nt, Human
uuucagaaagaaguggggaca

SEQ ID NO: 1862864 - RNA, 12 nt, Human
uuucaaacuuua

SEQ ID NO: 1862865 - RNA, 15 nt, Human
uuucaaacuuuacua

SEQ ID NO: 1862866 - RNA, 11 nt, Human
uuucagaaaug

SEQ ID NO: 1862867 - RNA, 12 nt, Human
uuucagaaaugu

SEQ ID NO: 1862868 - RNA, 16 nt, Human
uuucccuauuagagaa

SEQ ID NO: 1862869 - RNA, 13 nt, Human
uugugaggaagcc

SEQ ID NO: 1862870 - RNA, 18 nt, Human
uugugaggaagccgcugg

SEQ ID NO: 1862871 - RNA, 17 nt, Human
uugugaggaagccgcug

SEQ ID NO: 1862872 - RNA, 20 nt, Human
uugugauacaaugcugugcc

SEQ ID NO: 1862873 - RNA, 16 nt, Human
uuguccccgacccuug

SEQ ID NO: 1862874 - RNA, 15 nt, Human
uuguccccgacccuu

SEQ ID NO: 1862875 - RNA, 20 nt, Human
uuguccccaccgcagacagg

SEQ ID NO: 1862876 - RNA, 18 nt, Human
uuguccccaccgcagaca

SEQ ID NO: 1862877 - RNA, 22 nt, Human
uugugaugucccaacuuguaaa

SEQ ID NO: 1862878 - RNA, 18 nt, Human
uugugaugucccaacuug

SEQ ID NO: 1862879 - RNA, 17 nt, Human
augagguacugagagug

SEQ ID NO: 1862880 - RNA, 18 nt, Human
augagguacugagaguga

SEQ ID NO: 1862881 - RNA, 15 nt, Human
augagguacugagag

SEQ ID NO: 1862882 - RNA, 22 nt, Human
augaggucagagccugcaguua

SEQ ID NO: 1862883 - RNA, 19 nt, Human
augaggucagagccugcag

SEQ ID NO: 1862884 - RNA, 20 nt, Human
augaggucagagccugcagu

SEQ ID NO: 1862885 - RNA, 21 nt, Human
augagguacaaccuguucugc

SEQ ID NO: 1862886 - RNA, 15 nt, Human
augaggucagagccu

SEQ ID NO: 1862887 - RNA, 16 nt, Human
augaggucagagccug

SEQ ID NO: 1862888 - RNA, 18 nt, Human
augaggucagagccugca

SEQ ID NO: 1862889 - RNA, 17 nt, Human
uugucacacacuuuggc

SEQ ID NO: 1862890 - RNA, 21 nt, Human
uugucauauaagauucauauu

SEQ ID NO: 1862891 - RNA, 23 nt, Human
augaguccccuguuuguuucuga

SEQ ID NO: 1862892 - RNA, 13 nt, Human
augaguccccugu

SEQ ID NO: 1862893 - RNA, 16 nt, Human
uuuaaugaaagacugu

SEQ ID NO: 1862894 - RNA, 22 nt, Human
uuuaaggguuuguggaaaauga

SEQ ID NO: 1862895 - RNA, 20 nt, Human
uuuaaggguuuguggaaaau

SEQ ID NO: 1862896 - RNA, 17 nt, Human
uuuaaggguuuguggaa

SEQ ID NO: 1862897 - RNA, 20 nt, Human
uuuaaggaugcuuguacaua

SEQ ID NO: 1862898 - RNA, 21 nt, Human
uuuaaggaugcuuguacauaa

SEQ ID NO: 1862899 - RNA, 22 nt, Human
uuuaaggaugcuuguacauaau

SEQ ID NO: 1862900 - RNA, 21 nt, Human
uuuaagcuguuacugucuuca

SEQ ID NO: 1862901 - RNA, 19 nt, Human
uuuaaggaugcuuguacau

SEQ ID NO: 1862902 - RNA, 12 nt, Human
uuuaagagaaau

SEQ ID NO: 1862903 - RNA, 14 nt, Human
uuuaagagacagcc

SEQ ID NO: 1862904 - RNA, 14 nt, Human
uuuaagaggcaggg

SEQ ID NO: 1862905 - RNA, 21 nt, Human
uuuaaaaaauuaaucugggcc

SEQ ID NO: 1862906 - RNA, 23 nt, Human
uuuaaaaauacagauagauauau

SEQ ID NO: 1862907 - RNA, 11 nt, Human
uuuaaaugcac

SEQ ID NO: 1862908 - RNA, 14 nt, Human
uuuaaaugcugcuu

SEQ ID NO: 1862909 - RNA, 13 nt, Human
uuuaaaugaaagu

SEQ ID NO: 1862910 - RNA, 21 nt, Human
uuuaaaugaaagugagacuuu

SEQ ID NO: 1862911 - RNA, 21 nt, Human
uuuaaauauaugcuaagucuu

SEQ ID NO: 1862912 - RNA, 17 nt, Human
uuguucuugguuuguaa

SEQ ID NO: 1862913 - RNA, 19 nt, Human
uuguucuugguuuguaaau

SEQ ID NO: 1862914 - RNA, 20 nt, Human
uuguucuugguuuguaaauu

SEQ ID NO: 1862915 - RNA, 13 nt, Human
augauuucauuca

SEQ ID NO: 1862916 - RNA, 21 nt, Human
augcacuuuguucuggcucuu

SEQ ID NO: 1862917 - RNA, 18 nt, Human
augcagagguccacaaca

SEQ ID NO: 1862918 - RNA, 17 nt, Human
augcagagguccacaac

SEQ ID NO: 1862919 - RNA, 18 nt, Human
uuuaaaaaaauuccaagu

SEQ ID NO: 1862920 - RNA, 23 nt, Human
augcacuuuguucuggcucuucc

SEQ ID NO: 1862921 - RNA, 16 nt, Human
auuucuuccacaagag

SEQ ID NO: 1862922 - RNA, 17 nt, Human
auuugaggucuguucuu

SEQ ID NO: 1862923 - RNA, 18 nt, Human
auuugaggucuguucuuu

SEQ ID NO: 1862924 - RNA, 15 nt, Human
auuugagcagggcuc

SEQ ID NO: 1862925 - RNA, 16 nt, Human
auuugagcagggcuca

SEQ ID NO: 1862926 - RNA, 21 nt, Human
auuugaggucuguucuuucca

SEQ ID NO: 1862927 - RNA, 21 nt, Human
auuuggugguuucagaaaugu

SEQ ID NO: 1862928 - RNA, 16 nt, Human
auuucccaaagcagug

SEQ ID NO: 1862929 - RNA, 14 nt, Human
auuucccaaagcag

SEQ ID NO: 1862930 - RNA, 17 nt, Human
auuuccguuaaaauacc

SEQ ID NO: 1862931 - RNA, 14 nt, Human
auuuccuaaauaua

SEQ ID NO: 1862932 - RNA, 21 nt, Human
auuuccuaaauauauuuuaag

SEQ ID NO: 1862933 - RNA, 14 nt, Human
auuuaaaaaaaauc

SEQ ID NO: 1862934 - RNA, 19 nt, Human
auuguuuucaguguacaug

SEQ ID NO: 1862935 - RNA, 18 nt, Human
auuguuuucaguguacau

SEQ ID NO: 1862936 - RNA, 17 nt, Human
auuuaaaaaaaaaccug

SEQ ID NO: 1862937 - RNA, 17 nt, Human
auuguuuucaguguaca

SEQ ID NO: 1862938 - RNA, 16 nt, Human
auuguaguccuguaau

SEQ ID NO: 1862939 - RNA, 15 nt, Human
auuuauaaacuuuuu

SEQ ID NO: 1862940 - RNA, 23 nt, Human
auuuauaaaaauaaaaaacacug

SEQ ID NO: 1862941 - RNA, 17 nt, Human
auuuaguguucauaaau

SEQ ID NO: 1862942 - RNA, 20 nt, Human
auuuacuucuuauacauuug

SEQ ID NO: 1862943 - RNA, 19 nt, Human
auuuacuucuuauacauuu

SEQ ID NO: 1862944 - RNA, 16 nt, Human
auuuaguguucauaaa

SEQ ID NO: 1862945 - RNA, 23 nt, Human
auuggcuagagguucaaagauau

SEQ ID NO: 1862946 - RNA, 19 nt, Human
auuggcuagagguucaaag

SEQ ID NO: 1862947 - RNA, 20 nt, Human
auuggcuagagguucaaaga

SEQ ID NO: 1862948 - RNA, 22 nt, Human
auuggcuagagguucaaagaua

SEQ ID NO: 1862949 - RNA, 17 nt, Human
auugcaacaggcugggc

SEQ ID NO: 1862950 - RNA, 18 nt, Human
auugcaacaggcugggcu

SEQ ID NO: 1862951 - RNA, 12 nt, Human
auugcaccacug

SEQ ID NO: 1862952 - RNA, 19 nt, Human
auugcaacaggcugggcuu

SEQ ID NO: 1862953 - RNA, 13 nt, Human
auuaaguuguuaa

SEQ ID NO: 1862954 - RNA, 13 nt, Human
auuagagaagaga

SEQ ID NO: 1862955 - RNA, 14 nt, Human
auuacuucugcuac

SEQ ID NO: 1862956 - RNA, 12 nt, Human
auuacuucugcu

SEQ ID NO: 1862957 - RNA, 13 nt, Human
auuacuucugcua

SEQ ID NO: 1862958 - RNA, 19 nt, Human
auuaaguacuauguaucaa

SEQ ID NO: 1862959 - RNA, 18 nt, Human
auuaaguacuauguauca

SEQ ID NO: 1862960 - RNA, 13 nt, Human
auuaaggaagaca

SEQ ID NO: 1862961 - RNA, 11 nt, Human
uuuuuguauuu

SEQ ID NO: 1862962 - RNA, 22 nt, Human
uuuuugggaaaagaaaagucaa

SEQ ID NO: 1862963 - RNA, 15 nt, Human
uuuuugaagcuguau

SEQ ID NO: 1862964 - RNA, 16 nt, Human
uuuuguuuuugucuua

SEQ ID NO: 1862965 - RNA, 21 nt, Human
uuuugugaaguuuaauugacu

SEQ ID NO: 1862966 - RNA, 15 nt, Human
auucagccuggcuuc

SEQ ID NO: 1862967 - RNA, 14 nt, Human
auucagccuggcuu

SEQ ID NO: 1862968 - RNA, 22 nt, Human
auuccccaggaggccagccuug

SEQ ID NO: 1862969 - RNA, 20 nt, Human
auuccccaggaggccagccu

SEQ ID NO: 1862970 - RNA, 18 nt, Human
auucccaagcucugcucc

SEQ ID NO: 1862971 - RNA, 19 nt, Human
auucccaagcucugcuccu

SEQ ID NO: 1862972 - RNA, 18 nt, Human
auuccagagaguggcucc

SEQ ID NO: 1862973 - RNA, 17 nt, Human
auucccaagcucugcuc

SEQ ID NO: 1862974 - RNA, 12 nt, Human
auuccacagcug

SEQ ID NO: 1862975 - RNA, 17 nt, Human
auuccaagugauugaaa

SEQ ID NO: 1862976 - RNA, 20 nt, Human
auuauauggcuugaguuuaa

SEQ ID NO: 1862977 - RNA, 23 nt, Human
uuucccucccuuccucuuuccau

SEQ ID NO: 1862978 - RNA, 19 nt, Human
uuugaccucugcagcaaua

SEQ ID NO: 1862979 - RNA, 21 nt, Human
uuugaccucugcagcaauaaa

SEQ ID NO: 1862980 - RNA, 14 nt, Human
uuugacaaggggca

SEQ ID NO: 1862981 - RNA, 18 nt, Human
uuugacaaagguaaauca

SEQ ID NO: 1862982 - RNA, 15 nt, Human
uuugauucagacagc

SEQ ID NO: 1862983 - RNA, 15 nt, Human
uuugauccaagcugg

SEQ ID NO: 1862984 - RNA, 13 nt, Human
uuugagacagagu

SEQ ID NO: 1862985 - RNA, 18 nt, Human
uuugaccucugcagcaau

SEQ ID NO: 1862986 - RNA, 22 nt, Human
uuuggauuggaugaauuccaaa

SEQ ID NO: 1862987 - RNA, 13 nt, Human
uuugcuguagaag

SEQ ID NO: 1862988 - RNA, 20 nt, Human
uuugcuggagcucugcccau

SEQ ID NO: 1862989 - RNA, 19 nt, Human
uuugcuggggccgaaagaa

SEQ ID NO: 1862990 - RNA, 22 nt, Human
uuugcuggggccgaaagaacag

SEQ ID NO: 1862991 - RNA, 18 nt, Human
uuugauucagacagcugc

SEQ ID NO: 1862992 - RNA, 13 nt, Human
uuuggcugcugaa

SEQ ID NO: 1862993 - RNA, 12 nt, Human
uuuggcugcuga

SEQ ID NO: 1862994 - RNA, 14 nt, Human
uuugggcugcccug

SEQ ID NO: 1862995 - RNA, 13 nt, Human
uuuggggaagaac

SEQ ID NO: 1862996 - RNA, 21 nt, Human
uuugggguacccacugcucug

SEQ ID NO: 1862997 - RNA, 22 nt, Human
uuugggguacccacugcucugg

SEQ ID NO: 1862998 - RNA, 14 nt, Human
uuugucuuaaaaag

SEQ ID NO: 1862999 - RNA, 13 nt, Human
uuugucuuaaaaa

SEQ ID NO: 1863000 - RNA, 23 nt, Human
uuugucuuaaaaaguggaaaaau

SEQ ID NO: 1863001 - RNA, 16 nt, Human
uuugugauacaaugcu

SEQ ID NO: 1863002 - RNA, 22 nt, Human
uuugugauacaaugcugugccc

SEQ ID NO: 1863003 - RNA, 15 nt, Human
uuugugauacaaugc

SEQ ID NO: 1863004 - RNA, 19 nt, Human
uuugugcauuaucuagaua

SEQ ID NO: 1863005 - RNA, 22 nt, Human
uuugugcauuaucuagauacug

SEQ ID NO: 1863006 - RNA, 13 nt, Human
uuuguuucauauu

SEQ ID NO: 1863007 - RNA, 16 nt, Human
uuuguuucugaaaggg

SEQ ID NO: 1863008 - RNA, 14 nt, Human
uuuguuucugaaag

SEQ ID NO: 1863009 - RNA, 14 nt, Human
uuuguacagacaac

SEQ ID NO: 1863010 - RNA, 16 nt, Human
uuuguaauuuuuuuau

SEQ ID NO: 1863011 - RNA, 18 nt, Human
augugauccuuuuggagu

SEQ ID NO: 1863012 - RNA, 15 nt, Human
augugaugagaggaa

SEQ ID NO: 1863013 - RNA, 19 nt, Human
auguauauuuuauaucaau

SEQ ID NO: 1863014 - RNA, 12 nt, Human
auguaucaauga

SEQ ID NO: 1863015 - RNA, 17 nt, Human
auguccaagaagcccag

SEQ ID NO: 1863016 - RNA, 16 nt, Human
auguccaagaagccca

SEQ ID NO: 1863017 - RNA, 13 nt, Human
augugagaccauu

SEQ ID NO: 1863018 - RNA, 14 nt, Human
augugagacugguu

SEQ ID NO: 1863019 - RNA, 23 nt, Human
augucgucaaagcugaaauggac

SEQ ID NO: 1863020 - RNA, 15 nt, Human
auguuuuuuuuuaaa

SEQ ID NO: 1863021 - RNA, 23 nt, Human
auuaaaaaucucaaauuucuaaa

SEQ ID NO: 1863022 - RNA, 19 nt, Human
auuaaaacacaacaucuuu

SEQ ID NO: 1863023 - RNA, 13 nt, Human
uuuucuguucuuu

SEQ ID NO: 1863024 - RNA, 21 nt, Human
uuuucuuaaccagaucauugu

SEQ ID NO: 1863025 - RNA, 17 nt, Human
auguuggccaggcuggu

SEQ ID NO: 1863026 - RNA, 12 nt, Human
uuuuauuaaauu

SEQ ID NO: 1863027 - RNA, 21 nt, Human
uuuuauggcuuuugugcauua

SEQ ID NO: 1863028 - RNA, 18 nt, Human
uuuuauggcuuuugugca

SEQ ID NO: 1863029 - RNA, 19 nt, Human
uuuuauggcuuuugugcau

SEQ ID NO: 1863030 - RNA, 15 nt, Human
uuuuaguagagacag

SEQ ID NO: 1863031 - RNA, 14 nt, Human
uuuucaguguacau

SEQ ID NO: 1863032 - RNA, 16 nt, Human
uuuucuauaauuuaaa

SEQ ID NO: 1863033 - RNA, 18 nt, Human
uuuuaaaaaacugcugac

SEQ ID NO: 1863034 - RNA, 21 nt, Human
uuuuaaaaaacugcugacugu

SEQ ID NO: 1863035 - RNA, 21 nt, Human
augugccagguuuuuggucug

SEQ ID NO: 1863036 - RNA, 15 nt, Human
auguguguuuuaaaa

SEQ ID NO: 1863037 - RNA, 12 nt, Human
auguugaaagau

SEQ ID NO: 1863038 - RNA, 18 nt, Human
auguugaaagaucaaaag

SEQ ID NO: 1863039 - RNA, 13 nt, Human
auguugcccaggc

SEQ ID NO: 1863040 - RNA, 14 nt, Human
auguugcccaggca

SEQ ID NO: 1863041 - RNA, 15 nt, Human
auguugcccaggcag

SEQ ID NO: 1863042 - RNA, 16 nt, Human
auguugcccaggcagg

SEQ ID NO: 1863043 - RNA, 21 nt, Human
uuuuagacccuauugcugcuu

SEQ ID NO: 1863044 - RNA, 17 nt, Human
uuuuagaguugauacua

SEQ ID NO: 1863045 - RNA, 19 nt, Human
auguuacauaagauaaaug

SEQ ID NO: 1863046 - RNA, 20 nt, Human
auguuacauaagauaaaugu

SEQ ID NO: 1863047 - RNA, 13 nt, Human
cacccaagggccu

SEQ ID NO: 1863048 - RNA, 22 nt, Human
cacacggacacucaaaagcugg

SEQ ID NO: 1863049 - RNA, 18 nt, Human
cacagcucuucuccaggc

SEQ ID NO: 1863050 - RNA, 23 nt, Human
cacaguccuuaccagcagagcac

SEQ ID NO: 1863051 - RNA, 14 nt, Human
cacaggcccggcuc

SEQ ID NO: 1863052 - RNA, 17 nt, Human
cacaggaucagucugau

SEQ ID NO: 1863053 - RNA, 16 nt, Human
cacaggacucugccuc

SEQ ID NO: 1863054 - RNA, 15 nt, Human
cacaggacucugccu

SEQ ID NO: 1863055 - RNA, 21 nt, Human
cacagcucuucuccaggcugu

SEQ ID NO: 1863056 - RNA, 19 nt, Human
cacagcucuucuccaggcu

SEQ ID NO: 1863057 - RNA, 20 nt, Human
cacagcucuucuccaggcug

SEQ ID NO: 1863058 - RNA, 17 nt, Human
cacaugagcaucaggcc

SEQ ID NO: 1863059 - RNA, 13 nt, Human
cacaugagcauca

SEQ ID NO: 1863060 - RNA, 21 nt, Human
cacaugagcaucaggccaggc

SEQ ID NO: 1863061 - RNA, 20 nt, Human
cacaugagcaucaggccagg

SEQ ID NO: 1863062 - RNA, 19 nt, Human
cacaugagcaucaggccag

SEQ ID NO: 1863063 - RNA, 18 nt, Human
cacaugagcaucaggcca

SEQ ID NO: 1863064 - RNA, 17 nt, Human
cacaugcaaggucauuu

SEQ ID NO: 1863065 - RNA, 19 nt, Human
cacaugcaaggucauuuuu

SEQ ID NO: 1863066 - RNA, 20 nt, Human
cacaugcaaggucauuuuuu

SEQ ID NO: 1863067 - RNA, 18 nt, Human
cacaugcacgugugugca

SEQ ID NO: 1863068 - RNA, 17 nt, Human
cacauguccaagaagcc

SEQ ID NO: 1863069 - RNA, 16 nt, Human
cacauguccaagaagc

SEQ ID NO: 1863070 - RNA, 20 nt, Human
cacaugccucucucaggcca

SEQ ID NO: 1863071 - RNA, 21 nt, Human
cacaugccucucucaggccaa

SEQ ID NO: 1863072 - RNA, 13 nt, Human
caccaagcccagu

SEQ ID NO: 1863073 - RNA, 12 nt, Human
caccaagcccag

SEQ ID NO: 1863074 - RNA, 22 nt, Human
cacauguccaagaagcccagga

SEQ ID NO: 1863075 - RNA, 21 nt, Human
cacauguccaagaagcccagg

SEQ ID NO: 1863076 - RNA, 19 nt, Human
cacauguccaagaagccca

SEQ ID NO: 1863077 - RNA, 18 nt, Human
cacauguccaagaagccc

SEQ ID NO: 1863078 - RNA, 17 nt, Human
caccaacgucugugcca

SEQ ID NO: 1863079 - RNA, 23 nt, Human
cacauguccaagaagcccaggaa

SEQ ID NO: 1863080 - RNA, 14 nt, Human
caccacgcccggcu

SEQ ID NO: 1863081 - RNA, 15 nt, Human
caccacgcccggcua

SEQ ID NO: 1863082 - RNA, 19 nt, Human
caccacacccagcccacuu

SEQ ID NO: 1863083 - RNA, 17 nt, Human
caccagagcccaccuug

SEQ ID NO: 1863084 - RNA, 18 nt, Human
caccagagcccaccuugg

SEQ ID NO: 1863085 - RNA, 20 nt, Human
caccagagcccaccuuggcu

SEQ ID NO: 1863086 - RNA, 22 nt, Human
caccagagcccaccuuggcuca

SEQ ID NO: 1863087 - RNA, 15 nt, Human
caccagagcccaccu

SEQ ID NO: 1863088 - RNA, 20 nt, Human
caccauguuggccaggcugg

SEQ ID NO: 1863089 - RNA, 20 nt, Human
caccauguuggccaggcugc

SEQ ID NO: 1863090 - RNA, 19 nt, Human
caccauguuggccaggcug

SEQ ID NO: 1863091 - RNA, 24 nt, Human
caccaucaagccaccaacauacuc

SEQ ID NO: 1863092 - RNA, 19 nt, Human
caccaucaagccaccaaca

SEQ ID NO: 1863093 - RNA, 17 nt, Human
caccaucaagccaccaa

SEQ ID NO: 1863094 - RNA, 16 nt, Human
caccaucaagccacca

SEQ ID NO: 1863095 - RNA, 15 nt, Human
caccaucaugucugg

SEQ ID NO: 1863096 - RNA, 17 nt, Human
caccaucaugucuggcu

SEQ ID NO: 1863097 - RNA, 18 nt, Human
caccaucaugucuggcua

SEQ ID NO: 1863098 - RNA, 21 nt, Human
caccauauuaccacagacaua

SEQ ID NO: 1863099 - RNA, 18 nt, Human
caccauaggucaccuuua

SEQ ID NO: 1863100 - RNA, 15 nt, Human
caccaucaagccacc

SEQ ID NO: 1863101 - RNA, 14 nt, Human
caccaucaagccac

SEQ ID NO: 1863102 - RNA, 13 nt, Human
caccaucaagcca

SEQ ID NO: 1863103 - RNA, 14 nt, Human
cacacccagcccac

SEQ ID NO: 1863104 - RNA, 20 nt, Human
cacacccagcccacuucugc

SEQ ID NO: 1863105 - RNA, 16 nt, Human
cacacagcucuguccu

SEQ ID NO: 1863106 - RNA, 21 nt, Human
cacaccagagcccaccuuggc

SEQ ID NO: 1863107 - RNA, 22 nt, Human
cacaccagagcccaccuuggcu

SEQ ID NO: 1863108 - RNA, 22 nt, Human
cacacagauuugagcucagccc

SEQ ID NO: 1863109 - RNA, 13 nt, Human
cacacagcucugu

SEQ ID NO: 1863110 - RNA, 14 nt, Human
cacacagcucuguc

SEQ ID NO: 1863111 - RNA, 15 nt, Human
cacacagcucugucc

SEQ ID NO: 1863112 - RNA, 24 nt, Human
cacaaucucggcucacugcauccu

SEQ ID NO: 1863113 - RNA, 23 nt, Human
cacaaucucggcucacugcaucc

SEQ ID NO: 1863114 - RNA, 22 nt, Human
cacaaucucggcucacugcauc

SEQ ID NO: 1863115 - RNA, 20 nt, Human
cacaaucucggcucacugca

SEQ ID NO: 1863116 - RNA, 15 nt, Human
cacacaccagagccc

SEQ ID NO: 1863117 - RNA, 16 nt, Human
cacacaccagagccca

SEQ ID NO: 1863118 - RNA, 20 nt, Human
cacacaccagagcccaccuu

SEQ ID NO: 1863119 - RNA, 21 nt, Human
cacacagaggcugccucuccc

SEQ ID NO: 1863120 - RNA, 20 nt, Human
cacacagauuugagcucagc

SEQ ID NO: 1863121 - RNA, 18 nt, Human
cacacagauuugagcuca

SEQ ID NO: 1863122 - RNA, 14 nt, Human
cacacacuuuggcu

SEQ ID NO: 1863123 - RNA, 23 nt, Human
cacaagaaaugaaagcagggacu

SEQ ID NO: 1863124 - RNA, 23 nt, Human
cacaagacccaaaaggcagaagc

SEQ ID NO: 1863125 - RNA, 19 nt, Human
cacaaucucggcucacugc

SEQ ID NO: 1863126 - RNA, 17 nt, Human
cacaaagguagcuuuuc

SEQ ID NO: 1863127 - RNA, 13 nt, Human
cacaagaaaugaa

SEQ ID NO: 1863128 - RNA, 15 nt, Human
cacaagaaaugaaag

SEQ ID NO: 1863129 - RNA, 17 nt, Human
cacaaacgggcucagca

SEQ ID NO: 1863130 - RNA, 18 nt, Human
caaugguuuucuugugug

SEQ ID NO: 1863131 - RNA, 14 nt, Human
caaugcacuuuguu

SEQ ID NO: 1863132 - RNA, 16 nt, Human
caaugaccuuucaaua

SEQ ID NO: 1863133 - RNA, 15 nt, Human
caaugaccuuucaau

SEQ ID NO: 1863134 - RNA, 13 nt, Human
caaugauggucac

SEQ ID NO: 1863135 - RNA, 14 nt, Human
caaugaccuuucaa

SEQ ID NO: 1863136 - RNA, 22 nt, Human
caaugcaaaccaucauugaaau

SEQ ID NO: 1863137 - RNA, 21 nt, Human
caaugcaaaccaucauugaaa

SEQ ID NO: 1863138 - RNA, 14 nt, Human
caaugcaaaccauc

SEQ ID NO: 1863139 - RNA, 14 nt, Human
caaugauggucacc

SEQ ID NO: 1863140 - RNA, 23 nt, Human
caaugcaaaccaucauugaaauc

SEQ ID NO: 1863141 - RNA, 13 nt, Human
caaugcacuuugu

SEQ ID NO: 1863142 - RNA, 14 nt, Human
caaugcacugacau

SEQ ID NO: 1863143 - RNA, 18 nt, Human
caaucucggcucacugca

SEQ ID NO: 1863144 - RNA, 20 nt, Human
caacaggcugggcuucagug

SEQ ID NO: 1863145 - RNA, 21 nt, Human
caaagagguuuuaaaaaaauc

SEQ ID NO: 1863146 - RNA, 14 nt, Human
caaagagguuuuaa

SEQ ID NO: 1863147 - RNA, 13 nt, Human
caaagcccagcuu

SEQ ID NO: 1863148 - RNA, 19 nt, Human
caaagcccaaagugguaua

SEQ ID NO: 1863149 - RNA, 17 nt, Human
caaagcccaaaguggua

SEQ ID NO: 1863150 - RNA, 12 nt, Human
caaagaaauuau

SEQ ID NO: 1863151 - RNA, 15 nt, Human
caaagaaauuaugug

SEQ ID NO: 1863152 - RNA, 13 nt, Human
caaagaaauuaug

SEQ ID NO: 1863153 - RNA, 20 nt, Human
caaaggguaucaggugcugc

SEQ ID NO: 1863154 - RNA, 21 nt, Human
caaaggguaucaggugcugcc

SEQ ID NO: 1863155 - RNA, 17 nt, Human
caaaguggugagaggca

SEQ ID NO: 1863156 - RNA, 16 nt, Human
caaaguggugagaggc

SEQ ID NO: 1863157 - RNA, 18 nt, Human
caaagugguauagaaaug

SEQ ID NO: 1863158 - RNA, 19 nt, Human
caaagugguauagaaaugc

SEQ ID NO: 1863159 - RNA, 23 nt, Human
caaaggguaucaggugcugccau

SEQ ID NO: 1863160 - RNA, 14 nt, Human
caaaggagauugga

SEQ ID NO: 1863161 - RNA, 18 nt, Human
caaagcccuuccaugucg

SEQ ID NO: 1863162 - RNA, 20 nt, Human
caaaggagauuggaaggaac

SEQ ID NO: 1863163 - RNA, 19 nt, Human
caaaguggugagaggcauc

SEQ ID NO: 1863164 - RNA, 21 nt, Human
caaaguucccuacuuccugug

SEQ ID NO: 1863165 - RNA, 22 nt, Human
caaaguucccuacuuccuguga

SEQ ID NO: 1863166 - RNA, 17 nt, Human
caaauauuccagagacu

SEQ ID NO: 1863167 - RNA, 13 nt, Human
caaauauuccaga

SEQ ID NO: 1863168 - RNA, 17 nt, Human
caaauuguaagcaugca

SEQ ID NO: 1863169 - RNA, 21 nt, Human
caaccugauugugucucuugg

SEQ ID NO: 1863170 - RNA, 19 nt, Human
caaccugauugugucucuu

SEQ ID NO: 1863171 - RNA, 17 nt, Human
caaccugauugugucuc

SEQ ID NO: 1863172 - RNA, 23 nt, Human
caacugcaucaagaugugacaug

SEQ ID NO: 1863173 - RNA, 20 nt, Human
caacugcaucaagaugugac

SEQ ID NO: 1863174 - RNA, 17 nt, Human
caacugcaucaagaugu

SEQ ID NO: 1863175 - RNA, 15 nt, Human
caacauacucccauc

SEQ ID NO: 1863176 - RNA, 14 nt, Human
caacauacucccau

SEQ ID NO: 1863177 - RNA, 16 nt, Human
caacauacucccaucu

SEQ ID NO: 1863178 - RNA, 17 nt, Human
caacaggcugggcuuca

SEQ ID NO: 1863179 - RNA, 16 nt, Human
caaauuuacagagaca

SEQ ID NO: 1863180 - RNA, 17 nt, Human
caaauuuacagagacag

SEQ ID NO: 1863181 - RNA, 23 nt, Human
caaauuuacagagacagaaagca

SEQ ID NO: 1863182 - RNA, 14 nt, Human
caacaggcugggcu

SEQ ID NO: 1863183 - RNA, 14 nt, Human
caaggauccugagc

SEQ ID NO: 1863184 - RNA, 21 nt, Human
caaggacuaggguccugggga

SEQ ID NO: 1863185 - RNA, 20 nt, Human
caaggacuaggguccugggg

SEQ ID NO: 1863186 - RNA, 19 nt, Human
caaggacuaggguccuggg

SEQ ID NO: 1863187 - RNA, 18 nt, Human
caaggacuaggguccugg

SEQ ID NO: 1863188 - RNA, 16 nt, Human
caaggacuaggguccu

SEQ ID NO: 1863189 - RNA, 21 nt, Human
caaggcugucaauuacaggaa

SEQ ID NO: 1863190 - RNA, 23 nt, Human
caagggaauuucuucaacucccu

SEQ ID NO: 1863191 - RNA, 14 nt, Human
caaggcugucaauu

SEQ ID NO: 1863192 - RNA, 13 nt, Human
caaggcugucaau

SEQ ID NO: 1863193 - RNA, 21 nt, Human
caaggcugggggaagaagcuc

SEQ ID NO: 1863194 - RNA, 16 nt, Human
caaggauccugagcca

SEQ ID NO: 1863195 - RNA, 15 nt, Human
caaggauccugagcc

SEQ ID NO: 1863196 - RNA, 17 nt, Human
caaggauccugagccag

SEQ ID NO: 1863197 - RNA, 20 nt, Human
caagagggcacugguggccc

SEQ ID NO: 1863198 - RNA, 19 nt, Human
caagagggcacugguggcc

SEQ ID NO: 1863199 - RNA, 18 nt, Human
caagagggcacugguggc

SEQ ID NO: 1863200 - RNA, 17 nt, Human
caagagggcacuggugg

SEQ ID NO: 1863201 - RNA, 17 nt, Human
caagagcccaggccucc

SEQ ID NO: 1863202 - RNA, 12 nt, Human
caagagggucug

SEQ ID NO: 1863203 - RNA, 16 nt, Human
caagagggucugagga

SEQ ID NO: 1863204 - RNA, 17 nt, Human
caagagggucugaggaa

SEQ ID NO: 1863205 - RNA, 23 nt, Human
caagacccuuguggucccacccc

SEQ ID NO: 1863206 - RNA, 15 nt, Human
caagaaaugaaagca

SEQ ID NO: 1863207 - RNA, 13 nt, Human
caagaaaugaaag

SEQ ID NO: 1863208 - RNA, 22 nt, Human
caagacgcugugcugcccugcc

SEQ ID NO: 1863209 - RNA, 21 nt, Human
caagacgcugugcugcccugc

SEQ ID NO: 1863210 - RNA, 20 nt, Human
caagacgcugugcugcccug

SEQ ID NO: 1863211 - RNA, 13 nt, Human
caagaccuucucc

SEQ ID NO: 1863212 - RNA, 16 nt, Human
caagggccuggccuga

SEQ ID NO: 1863213 - RNA, 14 nt, Human
caagugagacccug

SEQ ID NO: 1863214 - RNA, 23 nt, Human
caagugaaaaaggaggaagagaa

SEQ ID NO: 1863215 - RNA, 22 nt, Human
caagugaaaaaggaggaagaga

SEQ ID NO: 1863216 - RNA, 20 nt, Human
caagugauucuccugccuca

SEQ ID NO: 1863217 - RNA, 19 nt, Human
caagugagacccugucuca

SEQ ID NO: 1863218 - RNA, 15 nt, Human
caagugagacccugu

SEQ ID NO: 1863219 - RNA, 19 nt, Human
caagugauucuccugccuc

SEQ ID NO: 1863220 - RNA, 18 nt, Human
caagugauucuccugccu

SEQ ID NO: 1863221 - RNA, 23 nt, Human
caaggggaauguuugccucugcc

SEQ ID NO: 1863222 - RNA, 13 nt, Human
caaggucauuuuu

SEQ ID NO: 1863223 - RNA, 14 nt, Human
caagggccuggccu

SEQ ID NO: 1863224 - RNA, 13 nt, Human
caagggccuggcc

SEQ ID NO: 1863225 - RNA, 15 nt, Human
caagggccuggccug

SEQ ID NO: 1863226 - RNA, 21 nt, Human
caaggggaauguuugccucug

SEQ ID NO: 1863227 - RNA, 13 nt, Human
uuuuuucuuacug

SEQ ID NO: 1863228 - RNA, 22 nt, Human
cauuugaaaauuuugauguuuu

SEQ ID NO: 1863229 - RNA, 20 nt, Human
cauuugaaaauuuugauguu

SEQ ID NO: 1863230 - RNA, 14 nt, Human
cauuugcuccuuuc

SEQ ID NO: 1863231 - RNA, 13 nt, Human
cauuugcuccuuu

SEQ ID NO: 1863232 - RNA, 17 nt, Human
cauuuguuugaacugau

SEQ ID NO: 1863233 - RNA, 13 nt, Human
cauuugcugaaua

SEQ ID NO: 1863234 - RNA, 20 nt, Human
cauuuguuugaacugauaaa

SEQ ID NO: 1863235 - RNA, 22 nt, Human
cauuuguuugaacugauaaaga

SEQ ID NO: 1863236 - RNA, 20 nt, Human
cauuugagcagggcucagcg

SEQ ID NO: 1863237 - RNA, 17 nt, Human
cauuugagcagggcuca

SEQ ID NO: 1863238 - RNA, 18 nt, Human
cauuugagcagggcucag

SEQ ID NO: 1863239 - RNA, 17 nt, Human
ccaaacucaccugcccc

SEQ ID NO: 1863240 - RNA, 20 nt, Human
ccaaacauccuacaagacac

SEQ ID NO: 1863241 - RNA, 19 nt, Human
ccaaacauccuacaagaca

SEQ ID NO: 1863242 - RNA, 23 nt, Human
cauuuuucuuagggaaggauaca

SEQ ID NO: 1863243 - RNA, 20 nt, Human
cauuuuucagauauaaaaga

SEQ ID NO: 1863244 - RNA, 18 nt, Human
cauuuuucagauauaaaa

SEQ ID NO: 1863245 - RNA, 17 nt, Human
cauuuaggccaugggac

SEQ ID NO: 1863246 - RNA, 20 nt, Human
cauuuccugacagaaggacu

SEQ ID NO: 1863247 - RNA, 13 nt, Human
cauuuccugacag

SEQ ID NO: 1863248 - RNA, 15 nt, Human
cauuuccuaaauaua

SEQ ID NO: 1863249 - RNA, 12 nt, Human
cauuuaaaagau

SEQ ID NO: 1863250 - RNA, 15 nt, Human
cauuuaaaagauaca

SEQ ID NO: 1863251 - RNA, 16 nt, Human
cauuuaaaagauacag

SEQ ID NO: 1863252 - RNA, 12 nt, Human
cauuuccugugu

SEQ ID NO: 1863253 - RNA, 13 nt, Human
cauuuccuguguc

SEQ ID NO: 1863254 - RNA, 21 nt, Human
cauuguagagcuucuggcacu

SEQ ID NO: 1863255 - RNA, 19 nt, Human
cauuguagagcuucuggca

SEQ ID NO: 1863256 - RNA, 17 nt, Human
cauuguagagcuucugg

SEQ ID NO: 1863257 - RNA, 16 nt, Human
cauuguagagcuucug

SEQ ID NO: 1863258 - RNA, 15 nt, Human
cauuguagagcuucu

SEQ ID NO: 1863259 - RNA, 15 nt, Human
cacccaagggccugg

SEQ ID NO: 1863260 - RNA, 14 nt, Human
cacccaagggccug

SEQ ID NO: 1863261 - RNA, 23 nt, Human
cauuguauucagaguugaugguu

SEQ ID NO: 1863262 - RNA, 18 nt, Human
cauuguuggccaaagcca

SEQ ID NO: 1863263 - RNA, 17 nt, Human
cauuguuggccaaagcc

SEQ ID NO: 1863264 - RNA, 22 nt, Human
ccaauaguuguugauuggcagg

SEQ ID NO: 1863265 - RNA, 23 nt, Human
ccaagguuuggggaagaacgaag

SEQ ID NO: 1863266 - RNA, 13 nt, Human
ccaaggugggagg

SEQ ID NO: 1863267 - RNA, 18 nt, Human
ccaaggugggaggauugc

SEQ ID NO: 1863268 - RNA, 20 nt, Human
ccaagucaagugaaaaagga

SEQ ID NO: 1863269 - RNA, 21 nt, Human
ccaaggccaaaggaagcacau

SEQ ID NO: 1863270 - RNA, 18 nt, Human
ccaaggccaaaggaagca

SEQ ID NO: 1863271 - RNA, 15 nt, Human
ccaagggccuggccu

SEQ ID NO: 1863272 - RNA, 18 nt, Human
ccaagggccuggccugag

SEQ ID NO: 1863273 - RNA, 16 nt, Human
ccaagggccuggccug

SEQ ID NO: 1863274 - RNA, 19 nt, Human
ccaagggccuggccugagc

SEQ ID NO: 1863275 - RNA, 22 nt, Human
ccaaggggaauguuugccucug

SEQ ID NO: 1863276 - RNA, 17 nt, Human
ccaaggccaaaggaagc

SEQ ID NO: 1863277 - RNA, 22 nt, Human
ccaagcucccaggcauucccca

SEQ ID NO: 1863278 - RNA, 16 nt, Human
ccaagcucccaggcau

SEQ ID NO: 1863279 - RNA, 15 nt, Human
ccaagcucccaggca

SEQ ID NO: 1863280 - RNA, 14 nt, Human
ccaagcucccaggc

SEQ ID NO: 1863281 - RNA, 15 nt, Human
ccaagccuggcaagg

SEQ ID NO: 1863282 - RNA, 22 nt, Human
ccaagccuacuuuugccauuga

SEQ ID NO: 1863283 - RNA, 13 nt, Human
ccaagccguggcu

SEQ ID NO: 1863284 - RNA, 20 nt, Human
ccaagaagcccaggaaaggc

SEQ ID NO: 1863285 - RNA, 19 nt, Human
ccaagaagcccaggaaagg

SEQ ID NO: 1863286 - RNA, 19 nt, Human
ccaagaauagaugcugacu

SEQ ID NO: 1863287 - RNA, 20 nt, Human
ccaagaauagaugcugacug

SEQ ID NO: 1863288 - RNA, 12 nt, Human
ccaacccucauc

SEQ ID NO: 1863289 - RNA, 15 nt, Human
ccaagaagcccagga

SEQ ID NO: 1863290 - RNA, 15 nt, Human
ccaacccucagagcc

SEQ ID NO: 1863291 - RNA, 14 nt, Human
ccaacccucagagc

SEQ ID NO: 1863292 - RNA, 16 nt, Human
ccaacauacucccauc

SEQ ID NO: 1863293 - RNA, 20 nt, Human
ccaacauacucccaucugug

SEQ ID NO: 1863294 - RNA, 19 nt, Human
ccaacauacucccaucugu

SEQ ID NO: 1863295 - RNA, 18 nt, Human
ccaacauacucccaucug

SEQ ID NO: 1863296 - RNA, 17 nt, Human
ccaacauacucccaucu

SEQ ID NO: 1863297 - RNA, 22 nt, Human
ccaacauacucccaucugugaa

SEQ ID NO: 1863298 - RNA, 21 nt, Human
ccaacauacucccaucuguga

SEQ ID NO: 1863299 - RNA, 13 nt, Human
ccaacaucaacau

SEQ ID NO: 1863300 - RNA, 20 nt, Human
ccaaccaaguggcucccaca

SEQ ID NO: 1863301 - RNA, 20 nt, Human
ccaaaguacacuguuucaaa

SEQ ID NO: 1863302 - RNA, 17 nt, Human
ccaaauuuucuuuuuau

SEQ ID NO: 1863303 - RNA, 15 nt, Human
ccaaaguacacuguu

SEQ ID NO: 1863304 - RNA, 18 nt, Human
ccaaaguacacuguuuca

SEQ ID NO: 1863305 - RNA, 23 nt, Human
ccaaaggaagcacaugccucucu

SEQ ID NO: 1863306 - RNA, 15 nt, Human
ccaaaggaagcacau

SEQ ID NO: 1863307 - RNA, 21 nt, Human
ccaaagcuaggccuggccaga

SEQ ID NO: 1863308 - RNA, 16 nt, Human
ccaaagcuaggccugg

SEQ ID NO: 1863309 - RNA, 17 nt, Human
ccaaagcuaggccuggc

SEQ ID NO: 1863310 - RNA, 15 nt, Human
ccaaagcuaggccug

SEQ ID NO: 1863311 - RNA, 20 nt, Human
ccaaacucaccugccccuca

SEQ ID NO: 1863312 - RNA, 22 nt, Human
ccaaagccuccuccagccgcca

SEQ ID NO: 1863313 - RNA, 17 nt, Human
ccaaagccuccuccagc

SEQ ID NO: 1863314 - RNA, 19 nt, Human
ccaaagcagugcaugcugu

SEQ ID NO: 1863315 - RNA, 23 nt, Human
ccaaagcagugcaugcugucccu

SEQ ID NO: 1863316 - RNA, 19 nt, Human
ccaaagccaaagcuaggcc

SEQ ID NO: 1863317 - RNA, 15 nt, Human
ccaccccacacacgc

SEQ ID NO: 1863318 - RNA, 14 nt, Human
ccacgguguucugu

SEQ ID NO: 1863319 - RNA, 23 nt, Human
ccacggccaggccagagggagug

SEQ ID NO: 1863320 - RNA, 18 nt, Human
ccacgcuggagugcagug

SEQ ID NO: 1863321 - RNA, 19 nt, Human
ccacgcuggagugcaguga

SEQ ID NO: 1863322 - RNA, 16 nt, Human
ccacggccaggccaga

SEQ ID NO: 1863323 - RNA, 18 nt, Human
ccacggccaggccagagg

SEQ ID NO: 1863324 - RNA, 15 nt, Human
ccacccccacccaag

SEQ ID NO: 1863325 - RNA, 16 nt, Human
ccacgcuggagugcag

SEQ ID NO: 1863326 - RNA, 16 nt, Human
ccacuacauucuguua

SEQ ID NO: 1863327 - RNA, 17 nt, Human
ccacuacauucuguuaa

SEQ ID NO: 1863328 - RNA, 17 nt, Human
ccacuagacccacugga

SEQ ID NO: 1863329 - RNA, 15 nt, Human
ccacuagacccacug

SEQ ID NO: 1863330 - RNA, 11 nt, Human
ccacuacauuc

SEQ ID NO: 1863331 - RNA, 15 nt, Human
ccacuacauucuguu

SEQ ID NO: 1863332 - RNA, 14 nt, Human
ccacuacauucugu

SEQ ID NO: 1863333 - RNA, 11 nt, Human
ccacucagguc

SEQ ID NO: 1863334 - RNA, 16 nt, Human
ccacucaggucuguuu

SEQ ID NO: 1863335 - RNA, 22 nt, Human
ccacuccagaccccuggcuuuu

SEQ ID NO: 1863336 - RNA, 21 nt, Human
ccacuccagaccccuggcuuu

SEQ ID NO: 1863337 - RNA, 20 nt, Human
ccacuccagaccccuggcuu

SEQ ID NO: 1863338 - RNA, 18 nt, Human
ccacucaguccauagcag

SEQ ID NO: 1863339 - RNA, 14 nt, Human
ccagaccccuggcu

SEQ ID NO: 1863340 - RNA, 17 nt, Human
ccagaccccuggcuuuu

SEQ ID NO: 1863341 - RNA, 16 nt, Human
ccagaccccuggcuuu

SEQ ID NO: 1863342 - RNA, 15 nt, Human
ccagaccccuggcuu

SEQ ID NO: 1863343 - RNA, 19 nt, Human
ccagaauuucccaaagcag

SEQ ID NO: 1863344 - RNA, 12 nt, Human
ccagaauuuccc

SEQ ID NO: 1863345 - RNA, 13 nt, Human
ccagaauuucaaa

SEQ ID NO: 1863346 - RNA, 23 nt, Human
ccagaauggucuuucuaaugugu

SEQ ID NO: 1863347 - RNA, 16 nt, Human
ccagaaugcuuuagga

SEQ ID NO: 1863348 - RNA, 21 nt, Human
ccagaauuucccaaagcagug

SEQ ID NO: 1863349 - RNA, 21 nt, Human
ccagacaccuugacagggcac

SEQ ID NO: 1863350 - RNA, 18 nt, Human
ccagaauuucccaaagca

SEQ ID NO: 1863351 - RNA, 22 nt, Human
ccagaaguuugagaucagccug

SEQ ID NO: 1863352 - RNA, 23 nt, Human
ccagaaguuugagaucagccugg

SEQ ID NO: 1863353 - RNA, 14 nt, Human
ccacuucagcugac

SEQ ID NO: 1863354 - RNA, 13 nt, Human
ccacuucagcuga

SEQ ID NO: 1863355 - RNA, 21 nt, Human
ccacuuagaaauugcauuucc

SEQ ID NO: 1863356 - RNA, 13 nt, Human
ccacugcagaaga

SEQ ID NO: 1863357 - RNA, 18 nt, Human
ccacugcagaagacagua

SEQ ID NO: 1863358 - RNA, 19 nt, Human
ccacuuagaaauugcauuu

SEQ ID NO: 1863359 - RNA, 17 nt, Human
ccacccccacccaaggg

SEQ ID NO: 1863360 - RNA, 23 nt, Human
ccacccaggagccccgaggccuu

SEQ ID NO: 1863361 - RNA, 21 nt, Human
ccacccaggagccccgaggcc

SEQ ID NO: 1863362 - RNA, 16 nt, Human
ccaauauucauagcag

SEQ ID NO: 1863363 - RNA, 20 nt, Human
ccacaguggaaccagcccag

SEQ ID NO: 1863364 - RNA, 20 nt, Human
ccacaucuugcucugcugac

SEQ ID NO: 1863365 - RNA, 19 nt, Human
ccacaucuugcucugcuga

SEQ ID NO: 1863366 - RNA, 18 nt, Human
ccacaucuugcucugcug

SEQ ID NO: 1863367 - RNA, 17 nt, Human
ccacaucuugcucugcu

SEQ ID NO: 1863368 - RNA, 16 nt, Human
ccacauuccugaugcu

SEQ ID NO: 1863369 - RNA, 16 nt, Human
ccacaugugcacaugc

SEQ ID NO: 1863370 - RNA, 21 nt, Human
ccaccaacauacucccaucug

SEQ ID NO: 1863371 - RNA, 15 nt, Human
ccaccaacccucaga

SEQ ID NO: 1863372 - RNA, 20 nt, Human
ccacacccagcccacuucug

SEQ ID NO: 1863373 - RNA, 15 nt, Human
ccacacccagcccac

SEQ ID NO: 1863374 - RNA, 21 nt, Human
ccacacccagcccacuucugc

SEQ ID NO: 1863375 - RNA, 22 nt, Human
ccacacccagcccacuucugcc

SEQ ID NO: 1863376 - RNA, 12 nt, Human
ccacacuccagc

SEQ ID NO: 1863377 - RNA, 23 nt, Human
ccacaggcccuuccucuccacug

SEQ ID NO: 1863378 - RNA, 22 nt, Human
ccacaggcccuuccucuccacu

SEQ ID NO: 1863379 - RNA, 19 nt, Human
ccacaggcccuuccucucc

SEQ ID NO: 1863380 - RNA, 18 nt, Human
ccacaggcccuuccucuc

SEQ ID NO: 1863381 - RNA, 17 nt, Human
ccacaggcccuuccucu

SEQ ID NO: 1863382 - RNA, 16 nt, Human
ccacaggcccuuccuc

SEQ ID NO: 1863383 - RNA, 15 nt, Human
ccacaggcccuuccu

SEQ ID NO: 1863384 - RNA, 16 nt, Human
ccacaggaucagucug

SEQ ID NO: 1863385 - RNA, 22 nt, Human
ccccucagggucccugguggca

SEQ ID NO: 1863386 - RNA, 17 nt, Human
ccccaggaggccagccu

SEQ ID NO: 1863387 - RNA, 18 nt, Human
cccaugcugcccugugag

SEQ ID NO: 1863388 - RNA, 17 nt, Human
cccaugcugcccuguga

SEQ ID NO: 1863389 - RNA, 16 nt, Human
cccaugcugcccugug

SEQ ID NO: 1863390 - RNA, 15 nt, Human
cccaugcugcccugu

SEQ ID NO: 1863391 - RNA, 17 nt, Human
cccagugccgagaagga

SEQ ID NO: 1863392 - RNA, 18 nt, Human
cccagugccgagaaggaa

SEQ ID NO: 1863393 - RNA, 15 nt, Human
cccagugcccacagg

SEQ ID NO: 1863394 - RNA, 20 nt, Human
cccagugcccacaggaucag

SEQ ID NO: 1863395 - RNA, 22 nt, Human
ccccaaauggaaaugggcagag

SEQ ID NO: 1863396 - RNA, 13 nt, Human
cccauucugccug

SEQ ID NO: 1863397 - RNA, 20 nt, Human
ccccacccaagggccuggcc

SEQ ID NO: 1863398 - RNA, 14 nt, Human
ccccacccaagggc

SEQ ID NO: 1863399 - RNA, 14 nt, Human
ccccaagccuggca

SEQ ID NO: 1863400 - RNA, 13 nt, Human
ccccaagccuggc

SEQ ID NO: 1863401 - RNA, 19 nt, Human
cccaagggccuggccugag

SEQ ID NO: 1863402 - RNA, 18 nt, Human
cccaagggccuggccuga

SEQ ID NO: 1863403 - RNA, 23 nt, Human
cccaagggccuggccugagcugg

SEQ ID NO: 1863404 - RNA, 23 nt, Human
cccaaugcacuuuguucuggcuc

SEQ ID NO: 1863405 - RNA, 18 nt, Human
cccagagggccugcaagg

SEQ ID NO: 1863406 - RNA, 20 nt, Human
cccagagggccugcaaggga

SEQ ID NO: 1863407 - RNA, 20 nt, Human
cccagauugcaacaggcugg

SEQ ID NO: 1863408 - RNA, 21 nt, Human
cccagauugcaacaggcuggg

SEQ ID NO: 1863409 - RNA, 22 nt, Human
cccagauugcaacaggcugggc

SEQ ID NO: 1863410 - RNA, 16 nt, Human
cccagcaagugagagc

SEQ ID NO: 1863411 - RNA, 18 nt, Human
cccagcaagugagagcug

SEQ ID NO: 1863412 - RNA, 18 nt, Human
cccagccccuucugaccc

SEQ ID NO: 1863413 - RNA, 12 nt, Human
cccagccugcua

SEQ ID NO: 1863414 - RNA, 19 nt, Human
cccagcaagugagagcugg

SEQ ID NO: 1863415 - RNA, 20 nt, Human
cccagcaagugagagcuggg

SEQ ID NO: 1863416 - RNA, 21 nt, Human
cccagcaagugagagcugggu

SEQ ID NO: 1863417 - RNA, 22 nt, Human
cccagcaagugagagcugggug

SEQ ID NO: 1863418 - RNA, 23 nt, Human
cccagcaagugagagcugggugu

SEQ ID NO: 1863419 - RNA, 23 nt, Human
cccagauugcaacaggcugggcu

SEQ ID NO: 1863420 - RNA, 11 nt, Human
cccagccccuu

SEQ ID NO: 1863421 - RNA, 19 nt, Human
cccagcgagcccugguggc

SEQ ID NO: 1863422 - RNA, 23 nt, Human
cccagcgagcccugguggcagug

SEQ ID NO: 1863423 - RNA, 17 nt, Human
cccagcgagcccuggug

SEQ ID NO: 1863424 - RNA, 18 nt, Human
cccagcgagcccuggugg

SEQ ID NO: 1863425 - RNA, 15 nt, Human
cccagcgagcccugg

SEQ ID NO: 1863426 - RNA, 23 nt, Human
cccaggcauuccccaggaggcca

SEQ ID NO: 1863427 - RNA, 22 nt, Human
cccaggcauuccccaggaggcc

SEQ ID NO: 1863428 - RNA, 21 nt, Human
cccaggcauuccccaggaggc

SEQ ID NO: 1863429 - RNA, 20 nt, Human
cccaggcauuccccaggagg

SEQ ID NO: 1863430 - RNA, 17 nt, Human
cccaggcaggucuugaa

SEQ ID NO: 1863431 - RNA, 11 nt, Human
cccaggccccu

SEQ ID NO: 1863432 - RNA, 16 nt, Human
cccaggccccugccac

SEQ ID NO: 1863433 - RNA, 18 nt, Human
cccaggccccugccaccc

SEQ ID NO: 1863434 - RNA, 21 nt, Human
cccaggccccugccacccugg

SEQ ID NO: 1863435 - RNA, 22 nt, Human
cccaggccccugccacccuggg

SEQ ID NO: 1863436 - RNA, 11 nt, Human
cccaggcaggu

SEQ ID NO: 1863437 - RNA, 13 nt, Human
cccaggcaggucu

SEQ ID NO: 1863438 - RNA, 22 nt, Human
cccaggaggccagccuugacca

SEQ ID NO: 1863439 - RNA, 13 nt, Human
cccaggaggccag

SEQ ID NO: 1863440 - RNA, 21 nt, Human
cccaggagccccgaggccuuc

SEQ ID NO: 1863441 - RNA, 18 nt, Human
cccaggagccccgaggcc

SEQ ID NO: 1863442 - RNA, 14 nt, Human
cccaggcugagccu

SEQ ID NO: 1863443 - RNA, 18 nt, Human
cccaggcgccccuucccc

SEQ ID NO: 1863444 - RNA, 16 nt, Human
cccaggccugccuguu

SEQ ID NO: 1863445 - RNA, 15 nt, Human
cccaggccugccugu

SEQ ID NO: 1863446 - RNA, 18 nt, Human
cccaggccuccuacagcu

SEQ ID NO: 1863447 - RNA, 17 nt, Human
cccaggccuccuacagc

SEQ ID NO: 1863448 - RNA, 13 nt, Human
cccagugcccaca

SEQ ID NO: 1863449 - RNA, 20 nt, Human
cccagucuggaaugcagugg

SEQ ID NO: 1863450 - RNA, 23 nt, Human
cccaggugcuaggaacacuccuu

SEQ ID NO: 1863451 - RNA, 22 nt, Human
cccaggugcuaggaacacuccu

SEQ ID NO: 1863452 - RNA, 22 nt, Human
ccagcucugguccauagagagc

SEQ ID NO: 1863453 - RNA, 21 nt, Human
ccagcucugguccauagagag

SEQ ID NO: 1863454 - RNA, 17 nt, Human
ccagcucugguccauag

SEQ ID NO: 1863455 - RNA, 14 nt, Human
ccagcucuggucca

SEQ ID NO: 1863456 - RNA, 24 nt, Human
ccagcuggagaaauaugguacuca

SEQ ID NO: 1863457 - RNA, 23 nt, Human
ccagcugcuugggcuucauccuc

SEQ ID NO: 1863458 - RNA, 20 nt, Human
ccagcugcuugggcuucauc

SEQ ID NO: 1863459 - RNA, 20 nt, Human
ccagccuugaccauucucca

SEQ ID NO: 1863460 - RNA, 19 nt, Human
ccagccuugaccauucucc

SEQ ID NO: 1863461 - RNA, 22 nt, Human
ccagagcccaccuuggcucaag

SEQ ID NO: 1863462 - RNA, 16 nt, Human
ccagagcccaccuugg

SEQ ID NO: 1863463 - RNA, 13 nt, Human
ccagcucuggucc

SEQ ID NO: 1863464 - RNA, 12 nt, Human
ccagcucugguc

SEQ ID NO: 1863465 - RNA, 11 nt, Human
ccagcucuggu

SEQ ID NO: 1863466 - RNA, 22 nt, Human
ccagccuugaccauucuccacc

SEQ ID NO: 1863467 - RNA, 14 nt, Human
ccagcgagcccugg

SEQ ID NO: 1863468 - RNA, 15 nt, Human
ccagcgagcccuggu

SEQ ID NO: 1863469 - RNA, 16 nt, Human
ccagcgagcccuggug

SEQ ID NO: 1863470 - RNA, 20 nt, Human
ccaggaagccagcaggcucu

SEQ ID NO: 1863471 - RNA, 22 nt, Human
ccaggaagccagcaggcucuca

SEQ ID NO: 1863472 - RNA, 23 nt, Human
ccagcuggggccaggcugggucg

SEQ ID NO: 1863473 - RNA, 22 nt, Human
ccagcuggggccaggcuggguc

SEQ ID NO: 1863474 - RNA, 21 nt, Human
ccagcuggggccaggcugggu

SEQ ID NO: 1863475 - RNA, 20 nt, Human
ccagcuggggccaggcuggg

SEQ ID NO: 1863476 - RNA, 19 nt, Human
ccagcuggggccaggcugg

SEQ ID NO: 1863477 - RNA, 18 nt, Human
ccagcuggggccaggcug

SEQ ID NO: 1863478 - RNA, 17 nt, Human
ccagcuggggccaggcu

SEQ ID NO: 1863479 - RNA, 14 nt, Human
ccaggcauucccca

SEQ ID NO: 1863480 - RNA, 17 nt, Human
ccaggcauuccccagga

SEQ ID NO: 1863481 - RNA, 13 nt, Human
ccaggcauggugg

SEQ ID NO: 1863482 - RNA, 22 nt, Human
ccaggcauuccccaggaggcca

SEQ ID NO: 1863483 - RNA, 23 nt, Human
ccaggcauuccccaggaggccag

SEQ ID NO: 1863484 - RNA, 24 nt, Human
ccaggcauuccccaggaggccagc

SEQ ID NO: 1863485 - RNA, 21 nt, Human
ccaggccacaagacccuugug

SEQ ID NO: 1863486 - RNA, 13 nt, Human
ccaggaggccagc

SEQ ID NO: 1863487 - RNA, 14 nt, Human
ccaggaggccagcc

SEQ ID NO: 1863488 - RNA, 12 nt, Human
ccaggaggccag

SEQ ID NO: 1863489 - RNA, 14 nt, Human
ccaggagccuccug

SEQ ID NO: 1863490 - RNA, 13 nt, Human
ccaggagccuccu

SEQ ID NO: 1863491 - RNA, 18 nt, Human
ccaggagccuccugcccu

SEQ ID NO: 1863492 - RNA, 19 nt, Human
ccaggagccuccugcccuu

SEQ ID NO: 1863493 - RNA, 16 nt, Human
ccaggagcagccacau

SEQ ID NO: 1863494 - RNA, 15 nt, Human
ccaggagcagccaca

SEQ ID NO: 1863495 - RNA, 15 nt, Human
ccaggagccccgagg

SEQ ID NO: 1863496 - RNA, 19 nt, Human
ccaggcuuuuuuaucaugu

SEQ ID NO: 1863497 - RNA, 12 nt, Human
ccagggaagggg

SEQ ID NO: 1863498 - RNA, 20 nt, Human
ccaggcuguaucccaugagc

SEQ ID NO: 1863499 - RNA, 21 nt, Human
ccaggcuggucucgaacuccu

SEQ ID NO: 1863500 - RNA, 19 nt, Human
ccaggcuggucucaaacuc

SEQ ID NO: 1863501 - RNA, 13 nt, Human
ccaggccccugcc

SEQ ID NO: 1863502 - RNA, 19 nt, Human
ccaggugcuaggaacacuc

SEQ ID NO: 1863503 - RNA, 20 nt, Human
ccagugaaaucaguuacucu

SEQ ID NO: 1863504 - RNA, 14 nt, Human
ccagguucagcuug

SEQ ID NO: 1863505 - RNA, 15 nt, Human
ccagguucagcuugu

SEQ ID NO: 1863506 - RNA, 20 nt, Human
ccauccucuguacagagccc

SEQ ID NO: 1863507 - RNA, 19 nt, Human
ccagugaggcucugcccuu

SEQ ID NO: 1863508 - RNA, 18 nt, Human
ccagugaggcucugcccu

SEQ ID NO: 1863509 - RNA, 20 nt, Human
ccagugaggcucugcccuug

SEQ ID NO: 1863510 - RNA, 23 nt, Human
ccauacuaauuauacccccugca

SEQ ID NO: 1863511 - RNA, 13 nt, Human
ccauacuaauuau

SEQ ID NO: 1863512 - RNA, 12 nt, Human
ccauacuaauua

SEQ ID NO: 1863513 - RNA, 13 nt, Human
ccaucaccagaca

SEQ ID NO: 1863514 - RNA, 19 nt, Human
ccauccucuguacagagcc

SEQ ID NO: 1863515 - RNA, 12 nt, Human
ccauccucugua

SEQ ID NO: 1863516 - RNA, 22 nt, Human
ccaucauugaaaucuuuuugcu

SEQ ID NO: 1863517 - RNA, 13 nt, Human
ccaugcugcccug

SEQ ID NO: 1863518 - RNA, 11 nt, Human
ccaugcugccc

SEQ ID NO: 1863519 - RNA, 14 nt, Human
ccaugcugcccugu

SEQ ID NO: 1863520 - RNA, 18 nt, Human
ccaugauguuuuccauga

SEQ ID NO: 1863521 - RNA, 21 nt, Human
ccaugauuaaccacuucagcu

SEQ ID NO: 1863522 - RNA, 19 nt, Human
ccaugauuaaccacuucag

SEQ ID NO: 1863523 - RNA, 14 nt, Human
ccaugaagauguag

SEQ ID NO: 1863524 - RNA, 21 nt, Human
cccacaaaggagagcuagcag

SEQ ID NO: 1863525 - RNA, 16 nt, Human
ccauucuccaccugcc

SEQ ID NO: 1863526 - RNA, 15 nt, Human
ccauucuccaccugc

SEQ ID NO: 1863527 - RNA, 14 nt, Human
ccauggacuuuguu

SEQ ID NO: 1863528 - RNA, 13 nt, Human
ccauggacuuugu

SEQ ID NO: 1863529 - RNA, 21 nt, Human
ccauucugccugcccaggccc

SEQ ID NO: 1863530 - RNA, 19 nt, Human
ccauucugccugcccaggc

SEQ ID NO: 1863531 - RNA, 20 nt, Human
ccauucugccugcccaggcc

SEQ ID NO: 1863532 - RNA, 16 nt, Human
ccauucugccugccca

SEQ ID NO: 1863533 - RNA, 17 nt, Human
ccauucuccaccugcca

SEQ ID NO: 1863534 - RNA, 17 nt, Human
ccauucugccugcccag

SEQ ID NO: 1863535 - RNA, 18 nt, Human
ccauucugccugcccagg

SEQ ID NO: 1863536 - RNA, 15 nt, Human
cccaaagaugcagcc

SEQ ID NO: 1863537 - RNA, 12 nt, Human
cccaaagaugca

SEQ ID NO: 1863538 - RNA, 16 nt, Human
cccaaagcagugcaug

SEQ ID NO: 1863539 - RNA, 22 nt, Human
ccauuuugggguacccacugcu

SEQ ID NO: 1863540 - RNA, 23 nt, Human
ccauuuuggauucuuauggacaa

SEQ ID NO: 1863541 - RNA, 20 nt, Human
ccauuuugggguacccacug

SEQ ID NO: 1863542 - RNA, 13 nt, Human
cccaaaaggcaga

SEQ ID NO: 1863543 - RNA, 18 nt, Human
cccaaaaggcagaagcaa

SEQ ID NO: 1863544 - RNA, 14 nt, Human
cgcagacaggacca

SEQ ID NO: 1863545 - RNA, 13 nt, Human
cgcagacaggacc

SEQ ID NO: 1863546 - RNA, 20 nt, Human
cgcccaggcuggagugcaau

SEQ ID NO: 1863547 - RNA, 19 nt, Human
cgcccaggcuggagugcaa

SEQ ID NO: 1863548 - RNA, 12 nt, Human
cgcccaggcugg

SEQ ID NO: 1863549 - RNA, 15 nt, Human
cgcccccacugguga

SEQ ID NO: 1863550 - RNA, 17 nt, Human
cgcgacaaugcaaacca

SEQ ID NO: 1863551 - RNA, 16 nt, Human
cgcgacaaugcaaacc

SEQ ID NO: 1863552 - RNA, 14 nt, Human
cgcuaagagggagg

SEQ ID NO: 1863553 - RNA, 16 nt, Human
cgcuaagagggaggga

SEQ ID NO: 1863554 - RNA, 15 nt, Human
cgcuaagagggaggg

SEQ ID NO: 1863555 - RNA, 21 nt, Human
cgcuaagagggagggagggcu

SEQ ID NO: 1863556 - RNA, 16 nt, Human
cgcgugcacacaccag

SEQ ID NO: 1863557 - RNA, 19 nt, Human
cgcgugcacacaccagagc

SEQ ID NO: 1863558 - RNA, 20 nt, Human
cgcgugcacacaccagagcc

SEQ ID NO: 1863559 - RNA, 15 nt, Human
ccuuuguauucucuc

SEQ ID NO: 1863560 - RNA, 18 nt, Human
ccuuuguauucucuccug

SEQ ID NO: 1863561 - RNA, 20 nt, Human
ccuuuguauucucuccugua

SEQ ID NO: 1863562 - RNA, 14 nt, Human
cgaggacagggagg

SEQ ID NO: 1863563 - RNA, 13 nt, Human
cgaggacagggag

SEQ ID NO: 1863564 - RNA, 12 nt, Human
cgaggacaggga

SEQ ID NO: 1863565 - RNA, 18 nt, Human
cgaggccuucucugaagg

SEQ ID NO: 1863566 - RNA, 19 nt, Human
cgaggccuucucugaagga

SEQ ID NO: 1863567 - RNA, 19 nt, Human
cgaucuggguucacugcaa

SEQ ID NO: 1863568 - RNA, 21 nt, Human
cgauucuucugcuucagccuc

SEQ ID NO: 1863569 - RNA, 13 nt, Human
cgauucuucugcu

SEQ ID NO: 1863570 - RNA, 19 nt, Human
cgauucuucugcuucagcc

SEQ ID NO: 1863571 - RNA, 12 nt, Human
cgauuucuguuu

SEQ ID NO: 1863572 - RNA, 11 nt, Human
cgcaaugugac

SEQ ID NO: 1863573 - RNA, 14 nt, Human
ccuuugacaaaggu

SEQ ID NO: 1863574 - RNA, 23 nt, Human
ccuuugacgccaucccagcccca

SEQ ID NO: 1863575 - RNA, 16 nt, Human
ccuuugcuugaaagaa

SEQ ID NO: 1863576 - RNA, 12 nt, Human
ccuuggcugcag

SEQ ID NO: 1863577 - RNA, 13 nt, Human
ccuuggcugcagg

SEQ ID NO: 1863578 - RNA, 19 nt, Human
ccuuguggucccaccccac

SEQ ID NO: 1863579 - RNA, 16 nt, Human
ccuuguggucccaccc

SEQ ID NO: 1863580 - RNA, 20 nt, Human
ccuuguggucccaccccaca

SEQ ID NO: 1863581 - RNA, 14 nt, Human
ccuuggcugcaggg

SEQ ID NO: 1863582 - RNA, 13 nt, Human
ccuuuaagagaaa

SEQ ID NO: 1863583 - RNA, 14 nt, Human
ccuuuaagagaaau

SEQ ID NO: 1863584 - RNA, 12 nt, Human
cgggcaugacac

SEQ ID NO: 1863585 - RNA, 15 nt, Human
cgggcaugacacgaa

SEQ ID NO: 1863586 - RNA, 17 nt, Human
cgggaggucgaggcagg

SEQ ID NO: 1863587 - RNA, 16 nt, Human
cgggaggucgaggcag

SEQ ID NO: 1863588 - RNA, 21 nt, Human
cgggaggauguucugggacac

SEQ ID NO: 1863589 - RNA, 21 nt, Human
cgggagccugaucaccugccc

SEQ ID NO: 1863590 - RNA, 22 nt, Human
cgggagccugaucaccugcccu

SEQ ID NO: 1863591 - RNA, 20 nt, Human
cgggaggauguucugggaca

SEQ ID NO: 1863592 - RNA, 19 nt, Human
cggcuggccuggccccuca

SEQ ID NO: 1863593 - RNA, 18 nt, Human
cggcuggccuggccccuc

SEQ ID NO: 1863594 - RNA, 16 nt, Human
cggcuggccuggcccc

SEQ ID NO: 1863595 - RNA, 15 nt, Human
cggcuggccuggccc

SEQ ID NO: 1863596 - RNA, 15 nt, Human
cggccuuuggcuuca

SEQ ID NO: 1863597 - RNA, 14 nt, Human
cggccucccaaagu

SEQ ID NO: 1863598 - RNA, 16 nt, Human
cggccuccauccugag

SEQ ID NO: 1863599 - RNA, 17 nt, Human
cggccuccauccugagg

SEQ ID NO: 1863600 - RNA, 20 nt, Human
cggaaugaaccacaucuugc

SEQ ID NO: 1863601 - RNA, 15 nt, Human
cggacagccacggcc

SEQ ID NO: 1863602 - RNA, 16 nt, Human
cggacagccacggcca

SEQ ID NO: 1863603 - RNA, 18 nt, Human
cggacagccacggccagg

SEQ ID NO: 1863604 - RNA, 17 nt, Human
cgcuauugucaccaggg

SEQ ID NO: 1863605 - RNA, 13 nt, Human
cgcuccugugucu

SEQ ID NO: 1863606 - RNA, 17 nt, Human
cggaaagcccugugcuc

SEQ ID NO: 1863607 - RNA, 20 nt, Human
cggacagccacggccaggcc

SEQ ID NO: 1863608 - RNA, 19 nt, Human
cggaucuuuggacagaagc

SEQ ID NO: 1863609 - RNA, 16 nt, Human
cggaucuuuggacaga

SEQ ID NO: 1863610 - RNA, 14 nt, Human
cgucauaacuagaa

SEQ ID NO: 1863611 - RNA, 16 nt, Human
cgucauaacuagaacu

SEQ ID NO: 1863612 - RNA, 17 nt, Human
cgucauaacuagaacug

SEQ ID NO: 1863613 - RNA, 21 nt, Human
cgucccccucuggcuccagcu

SEQ ID NO: 1863614 - RNA, 14 nt, Human
cgucccccucuggc

SEQ ID NO: 1863615 - RNA, 22 nt, Human
cguauaugucucaggucccugc

SEQ ID NO: 1863616 - RNA, 22 nt, Human
cguauaaaagccuguuuaagag

SEQ ID NO: 1863617 - RNA, 21 nt, Human
cguauaaaagccuguuuaaga

SEQ ID NO: 1863618 - RNA, 17 nt, Human
cguauaaaagccuguuu

SEQ ID NO: 1863619 - RNA, 16 nt, Human
cguauaaaagccuguu

SEQ ID NO: 1863620 - RNA, 23 nt, Human
cggugcuaucucccccagcccca

SEQ ID NO: 1863621 - RNA, 12 nt, Human
cgugacaacacu

SEQ ID NO: 1863622 - RNA, 20 nt, Human
cgugcacacaccagagccca

SEQ ID NO: 1863623 - RNA, 21 nt, Human
cgugcacacaccagagcccac

SEQ ID NO: 1863624 - RNA, 19 nt, Human
cgugcauaccacuuuuguu

SEQ ID NO: 1863625 - RNA, 14 nt, Human
cgugcauaccacuu

SEQ ID NO: 1863626 - RNA, 18 nt, Human
cgugcauaccacuuuugu

SEQ ID NO: 1863627 - RNA, 22 nt, Human
cgugcacacaccagagcccacc

SEQ ID NO: 1863628 - RNA, 14 nt, Human
cguccccugucccc

SEQ ID NO: 1863629 - RNA, 11 nt, Human
cguccccuguc

SEQ ID NO: 1863630 - RNA, 22 nt, Human
cgucccccucuggcuccagcug

SEQ ID NO: 1863631 - RNA, 14 nt, Human
cgucuaccugaggg

SEQ ID NO: 1863632 - RNA, 13 nt, Human
cgucugacaggca

SEQ ID NO: 1863633 - RNA, 14 nt, Human
cgucugacaggcaa

SEQ ID NO: 1863634 - RNA, 17 nt, Human
cguggcugcuucaagga

SEQ ID NO: 1863635 - RNA, 15 nt, Human
cguggcugcuucaag

SEQ ID NO: 1863636 - RNA, 14 nt, Human
cguggcugcuucaa

SEQ ID NO: 1863637 - RNA, 12 nt, Human
cguggcugcuuc

SEQ ID NO: 1863638 - RNA, 16 nt, Human
cgugccuggccacgcc

SEQ ID NO: 1863639 - RNA, 12 nt, Human
cgugccuggcca

SEQ ID NO: 1863640 - RNA, 18 nt, Human
cgugccuucagcucuaca

SEQ ID NO: 1863641 - RNA, 16 nt, Human
cgugccuucagcucua

SEQ ID NO: 1863642 - RNA, 15 nt, Human
cgugccuucagcucu

SEQ ID NO: 1863643 - RNA, 13 nt, Human
cgugccuucagcu

SEQ ID NO: 1863644 - RNA, 20 nt, Human
cguuucuaugacacaugcaa

SEQ ID NO: 1863645 - RNA, 19 nt, Human
cguuucuaaaggcuaccuu

SEQ ID NO: 1863646 - RNA, 21 nt, Human
cguuucuaaaggcuaccuuug

SEQ ID NO: 1863647 - RNA, 12 nt, Human
cguucucugccu

SEQ ID NO: 1863648 - RNA, 22 nt, Human
cguuccuucaaagcaaaugucu

SEQ ID NO: 1863649 - RNA, 19 nt, Human
ccuucagugccuuauggaa

SEQ ID NO: 1863650 - RNA, 15 nt, Human
ccuucagugccuuau

SEQ ID NO: 1863651 - RNA, 20 nt, Human
ccuucagugccuuauggaac

SEQ ID NO: 1863652 - RNA, 14 nt, Human
ccuucagugccuua

SEQ ID NO: 1863653 - RNA, 13 nt, Human
ccuucagugccuu

SEQ ID NO: 1863654 - RNA, 10 nt, Human
ccuucagugc

SEQ ID NO: 1863655 - RNA, 22 nt, Human
ccuuccaggggugggacacccu

SEQ ID NO: 1863656 - RNA, 18 nt, Human
ccuuccaggggugggaca

SEQ ID NO: 1863657 - RNA, 23 nt, Human
ccuuccaugucgccucugcauuc

SEQ ID NO: 1863658 - RNA, 21 nt, Human
ccuuccaugucgccucugcau

SEQ ID NO: 1863659 - RNA, 20 nt, Human
ccuuccaugucgccucugca

SEQ ID NO: 1863660 - RNA, 19 nt, Human
ccuuccaugucgccucugc

SEQ ID NO: 1863661 - RNA, 16 nt, Human
ccuuccagggguggga

SEQ ID NO: 1863662 - RNA, 15 nt, Human
ccuuccagggguggg

SEQ ID NO: 1863663 - RNA, 13 nt, Human
ccuucgccaccug

SEQ ID NO: 1863664 - RNA, 23 nt, Human
ccuucgauacaccgggccuggag

SEQ ID NO: 1863665 - RNA, 22 nt, Human
ccuucgauacaccgggccugga

SEQ ID NO: 1863666 - RNA, 20 nt, Human
ccuucgauacaccgggccug

SEQ ID NO: 1863667 - RNA, 15 nt, Human
ccuucgauacaccgg

SEQ ID NO: 1863668 - RNA, 14 nt, Human
ccuuccucuuucca

SEQ ID NO: 1863669 - RNA, 14 nt, Human
ccuuccucugaggc

SEQ ID NO: 1863670 - RNA, 17 nt, Human
ccuuagacagucccugc

SEQ ID NO: 1863671 - RNA, 16 nt, Human
ccuuagacagucccug

SEQ ID NO: 1863672 - RNA, 18 nt, Human
ccuuagaaccuuucuuac

SEQ ID NO: 1863673 - RNA, 16 nt, Human
ccuuagaaccuuucuu

SEQ ID NO: 1863674 - RNA, 15 nt, Human
ccuuagaaccuuucu

SEQ ID NO: 1863675 - RNA, 14 nt, Human
ccuuagaaccuuuc

SEQ ID NO: 1863676 - RNA, 19 nt, Human
ccuuagacagucccugcca

SEQ ID NO: 1863677 - RNA, 18 nt, Human
ccuuagacagucccugcc

SEQ ID NO: 1863678 - RNA, 21 nt, Human
ccuuagacagucccugccaau

SEQ ID NO: 1863679 - RNA, 14 nt, Human
ccuucaaccauucc

SEQ ID NO: 1863680 - RNA, 19 nt, Human
ccuucaaagcaaaugucuu

SEQ ID NO: 1863681 - RNA, 15 nt, Human
ccuucaaagcaaaug

SEQ ID NO: 1863682 - RNA, 14 nt, Human
ccuuaccugccagg

SEQ ID NO: 1863683 - RNA, 20 nt, Human
ccuuaccucggugccuuccu

SEQ ID NO: 1863684 - RNA, 16 nt, Human
ccuuaccagcagagca

SEQ ID NO: 1863685 - RNA, 15 nt, Human
ccuuaccagcagagc

SEQ ID NO: 1863686 - RNA, 17 nt, Human
ccuuaccagcagagcac

SEQ ID NO: 1863687 - RNA, 14 nt, Human
ccuuaccagcagag

SEQ ID NO: 1863688 - RNA, 20 nt, Human
ccuguggccaaguucuuagu

SEQ ID NO: 1863689 - RNA, 11 nt, Human
ccuuuggcuuc

SEQ ID NO: 1863690 - RNA, 13 nt, Human
ccuugacagggca

SEQ ID NO: 1863691 - RNA, 23 nt, Human
ccuugaguugauucagcucugca

SEQ ID NO: 1863692 - RNA, 22 nt, Human
ccuugaguugauucagcucugc

SEQ ID NO: 1863693 - RNA, 21 nt, Human
ccuugaccauucuccaccugc

SEQ ID NO: 1863694 - RNA, 22 nt, Human
ccuugaccauucuccaccugcc

SEQ ID NO: 1863695 - RNA, 14 nt, Human
ccuugacagggcac

SEQ ID NO: 1863696 - RNA, 20 nt, Human
ccuugaccauucuccaccug

SEQ ID NO: 1863697 - RNA, 19 nt, Human
ccuugaccauucuccaccu

SEQ ID NO: 1863698 - RNA, 15 nt, Human
ccuugacagggcaca

SEQ ID NO: 1863699 - RNA, 17 nt, Human
ccuugacagggcacacc

SEQ ID NO: 1863700 - RNA, 15 nt, Human
ccuugaaaacacugu

SEQ ID NO: 1863701 - RNA, 16 nt, Human
ccuucuuuuucuucuu

SEQ ID NO: 1863702 - RNA, 14 nt, Human
ccuucuuuuucuuc

SEQ ID NO: 1863703 - RNA, 13 nt, Human
ccuucgcuccugu

SEQ ID NO: 1863704 - RNA, 14 nt, Human
ccuucgcuccugug

SEQ ID NO: 1863705 - RNA, 15 nt, Human
ccuucgcuccugugu

SEQ ID NO: 1863706 - RNA, 18 nt, Human
ccuucgcuccugugucuu

SEQ ID NO: 1863707 - RNA, 21 nt, Human
ccuugaaaacacuguucucug

SEQ ID NO: 1863708 - RNA, 19 nt, Human
ccuugaaaacacuguucuc

SEQ ID NO: 1863709 - RNA, 22 nt, Human
ccuugaaaacacuguucucugc

SEQ ID NO: 1863710 - RNA, 14 nt, Human
ccuugaacugggua

SEQ ID NO: 1863711 - RNA, 19 nt, Human
ccuugaacuuugaccucug

SEQ ID NO: 1863712 - RNA, 17 nt, Human
ccuugaaugaugccaug

SEQ ID NO: 1863713 - RNA, 17 nt, Human
ccuugaacuuugaccuc

SEQ ID NO: 1863714 - RNA, 16 nt, Human
ccuugaacuggguacu

SEQ ID NO: 1863715 - RNA, 23 nt, Human
ccugcgucucauacucaccucac

SEQ ID NO: 1863716 - RNA, 16 nt, Human
ccugcaaccugauugu

SEQ ID NO: 1863717 - RNA, 19 nt, Human
ccugcaacaccuuguuucc

SEQ ID NO: 1863718 - RNA, 19 nt, Human
ccugcaaagcccagcuuga

SEQ ID NO: 1863719 - RNA, 18 nt, Human
ccugcaacaccuuguuuc

SEQ ID NO: 1863720 - RNA, 22 nt, Human
ccugcuccagcuguucagcugg

SEQ ID NO: 1863721 - RNA, 14 nt, Human
ccugcuccagcugu

SEQ ID NO: 1863722 - RNA, 13 nt, Human
ccugcuccagcug

SEQ ID NO: 1863723 - RNA, 12 nt, Human
ccugcuccagcu

SEQ ID NO: 1863724 - RNA, 17 nt, Human
ccugcuaauuccccaga

SEQ ID NO: 1863725 - RNA, 17 nt, Human
ccugcuuugggcugccc

SEQ ID NO: 1863726 - RNA, 18 nt, Human
ccugcuuugggcugcccu

SEQ ID NO: 1863727 - RNA, 20 nt, Human
ccugcuuuuuauggccugug

SEQ ID NO: 1863728 - RNA, 13 nt, Human
ccugcugguucag

SEQ ID NO: 1863729 - RNA, 19 nt, Human
ccugcugguucaggguugg

SEQ ID NO: 1863730 - RNA, 14 nt, Human
ccuggacccugugg

SEQ ID NO: 1863731 - RNA, 13 nt, Human
ccuggacccugug

SEQ ID NO: 1863732 - RNA, 20 nt, Human
ccuggacugugugcucagga

SEQ ID NO: 1863733 - RNA, 17 nt, Human
ccuggacugugugcuca

SEQ ID NO: 1863734 - RNA, 14 nt, Human
ccuggacuccugca

SEQ ID NO: 1863735 - RNA, 17 nt, Human
ccuggcacugcuuccag

SEQ ID NO: 1863736 - RNA, 20 nt, Human
ccuggcacugcuuccaguga

SEQ ID NO: 1863737 - RNA, 17 nt, Human
ccuggcaugggaaugaa

SEQ ID NO: 1863738 - RNA, 16 nt, Human
ccuggcaugggaauga

SEQ ID NO: 1863739 - RNA, 19 nt, Human
ccuggcagccgugccuuca

SEQ ID NO: 1863740 - RNA, 18 nt, Human
ccuggcagccgugccuuc

SEQ ID NO: 1863741 - RNA, 12 nt, Human
ccuggcagccgu

SEQ ID NO: 1863742 - RNA, 16 nt, Human
ccuggcagccccuguu

SEQ ID NO: 1863743 - RNA, 21 nt, Human
ccuggcacugcuuccagugag

SEQ ID NO: 1863744 - RNA, 20 nt, Human
ccugggaucccucauccuca

SEQ ID NO: 1863745 - RNA, 16 nt, Human
ccugggaucccucauc

SEQ ID NO: 1863746 - RNA, 20 nt, Human
ccugggaggucaaggcugca

SEQ ID NO: 1863747 - RNA, 21 nt, Human
ccugggaggcucuggagccca

SEQ ID NO: 1863748 - RNA, 13 nt, Human
ccugggaggcucu

SEQ ID NO: 1863749 - RNA, 13 nt, Human
ccugggaggcagu

SEQ ID NO: 1863750 - RNA, 14 nt, Human
ccugggcagaagga

SEQ ID NO: 1863751 - RNA, 12 nt, Human
ccugggcagaag

SEQ ID NO: 1863752 - RNA, 16 nt, Human
ccuggccccucagggu

SEQ ID NO: 1863753 - RNA, 14 nt, Human
ccuggccccucagg

SEQ ID NO: 1863754 - RNA, 12 nt, Human
ccuggcggggug

SEQ ID NO: 1863755 - RNA, 20 nt, Human
ccuggcuccaaacccucgag

SEQ ID NO: 1863756 - RNA, 23 nt, Human
ccuggcaugggaaugaaugucag

SEQ ID NO: 1863757 - RNA, 18 nt, Human
ccuggcaugggaaugaau

SEQ ID NO: 1863758 - RNA, 23 nt, Human
ccuguagagugggagcugagugg

SEQ ID NO: 1863759 - RNA, 19 nt, Human
ccuguagagugggagcuga

SEQ ID NO: 1863760 - RNA, 21 nt, Human
ccuguagagugggagcugagu

SEQ ID NO: 1863761 - RNA, 20 nt, Human
ccuguaauccuagcacuuug

SEQ ID NO: 1863762 - RNA, 18 nt, Human
ccugguggcagcucaccu

SEQ ID NO: 1863763 - RNA, 17 nt, Human
ccugguggcagcucacc

SEQ ID NO: 1863764 - RNA, 16 nt, Human
ccugguggcagcucac

SEQ ID NO: 1863765 - RNA, 14 nt, Human
ccugguggcagcuc

SEQ ID NO: 1863766 - RNA, 12 nt, Human
ccugguggcagc

SEQ ID NO: 1863767 - RNA, 13 nt, Human
ccugguggcagcu

SEQ ID NO: 1863768 - RNA, 15 nt, Human
ccuggugcugccaca

SEQ ID NO: 1863769 - RNA, 21 nt, Human
ccuggugcugccacacuucag

SEQ ID NO: 1863770 - RNA, 18 nt, Human
ccuggugcugccacacuu

SEQ ID NO: 1863771 - RNA, 18 nt, Human
ccuguccccgcacugggc

SEQ ID NO: 1863772 - RNA, 17 nt, Human
ccugucccccugacaac

SEQ ID NO: 1863773 - RNA, 16 nt, Human
ccugucccccugacaa

SEQ ID NO: 1863774 - RNA, 20 nt, Human
ccugugaguacuacaguccu

SEQ ID NO: 1863775 - RNA, 22 nt, Human
ccugugagcuaggaauuguguu

SEQ ID NO: 1863776 - RNA, 19 nt, Human
ccugugauggggcccugcc

SEQ ID NO: 1863777 - RNA, 18 nt, Human
ccugugauggggcccugc

SEQ ID NO: 1863778 - RNA, 17 nt, Human
ccugugauggggcccug

SEQ ID NO: 1863779 - RNA, 21 nt, Human
ccugugauggggcccugccuc

SEQ ID NO: 1863780 - RNA, 20 nt, Human
ccugugauggggcccugccu

SEQ ID NO: 1863781 - RNA, 22 nt, Human
ccugugauggggcccugccucc

SEQ ID NO: 1863782 - RNA, 17 nt, Human
ccugugccucugggacu

SEQ ID NO: 1863783 - RNA, 15 nt, Human
ccugugccucuggga

SEQ ID NO: 1863784 - RNA, 19 nt, Human
ccugugccucugggacugg

SEQ ID NO: 1863785 - RNA, 21 nt, Human
ccucugcacuccccugcuggg

SEQ ID NO: 1863786 - RNA, 20 nt, Human
ccucugcacuccccugcugg

SEQ ID NO: 1863787 - RNA, 15 nt, Human
ccucugcacuccccu

SEQ ID NO: 1863788 - RNA, 19 nt, Human
ccucugcacuccccugcug

SEQ ID NO: 1863789 - RNA, 14 nt, Human
ccucugcacucccc

SEQ ID NO: 1863790 - RNA, 22 nt, Human
ccucugcacuccccugcugggu

SEQ ID NO: 1863791 - RNA, 19 nt, Human
ccucugcacaagcugcacc

SEQ ID NO: 1863792 - RNA, 17 nt, Human
ccucugcacaagcugca

SEQ ID NO: 1863793 - RNA, 20 nt, Human
ccucugcacaagcugcaccc

SEQ ID NO: 1863794 - RNA, 15 nt, Human
ccucugcacaagcug

SEQ ID NO: 1863795 - RNA, 11 nt, Human
ccucugcacaa

SEQ ID NO: 1863796 - RNA, 17 nt, Human
ccucugacacacagcuc

SEQ ID NO: 1863797 - RNA, 18 nt, Human
ccucugacacacagcucu

SEQ ID NO: 1863798 - RNA, 17 nt, Human
ccucuggcuccagcugg

SEQ ID NO: 1863799 - RNA, 16 nt, Human
ccucuggcuccagcug

SEQ ID NO: 1863800 - RNA, 12 nt, Human
ccucugggacug

SEQ ID NO: 1863801 - RNA, 20 nt, Human
ccuccuuaucaaaggacacc

SEQ ID NO: 1863802 - RNA, 18 nt, Human
ccuccuuaucaaaggaca

SEQ ID NO: 1863803 - RNA, 23 nt, Human
ccuccugugugugcgccuacagg

SEQ ID NO: 1863804 - RNA, 12 nt, Human
ccucucccauca

SEQ ID NO: 1863805 - RNA, 16 nt, Human
ccucuccacugccuuc

SEQ ID NO: 1863806 - RNA, 14 nt, Human
ccucuccacugccu

SEQ ID NO: 1863807 - RNA, 13 nt, Human
ccucuccacugcc

SEQ ID NO: 1863808 - RNA, 12 nt, Human
ccucuccacugc

SEQ ID NO: 1863809 - RNA, 19 nt, Human
ccucuccacugccuucgau

SEQ ID NO: 1863810 - RNA, 23 nt, Human
ccucugaaaaccaauguucucuc

SEQ ID NO: 1863811 - RNA, 16 nt, Human
ccucugacacacagcu

SEQ ID NO: 1863812 - RNA, 13 nt, Human
ccucucugcccua

SEQ ID NO: 1863813 - RNA, 17 nt, Human
ccuccugggaaugaagc

SEQ ID NO: 1863814 - RNA, 13 nt, Human
ccuccuggacucc

SEQ ID NO: 1863815 - RNA, 13 nt, Human
ccuccugggcuaa

SEQ ID NO: 1863816 - RNA, 13 nt, Human
ccuccugugugug

SEQ ID NO: 1863817 - RNA, 15 nt, Human
ccuccugugugugcg

SEQ ID NO: 1863818 - RNA, 22 nt, Human
ccuccugugugugcgccuacag

SEQ ID NO: 1863819 - RNA, 14 nt, Human
ccuccuccuggacu

SEQ ID NO: 1863820 - RNA, 13 nt, Human
ccuccugccucga

SEQ ID NO: 1863821 - RNA, 16 nt, Human
ccucccucccucuuuc

SEQ ID NO: 1863822 - RNA, 15 nt, Human
ccucccucccucuuu

SEQ ID NO: 1863823 - RNA, 13 nt, Human
ccucccucccucu

SEQ ID NO: 1863824 - RNA, 16 nt, Human
ccucccggugcccaag

SEQ ID NO: 1863825 - RNA, 13 nt, Human
ccucccggugccc

SEQ ID NO: 1863826 - RNA, 14 nt, Human
ccucagucucccuc

SEQ ID NO: 1863827 - RNA, 15 nt, Human
ccucagucuggcccu

SEQ ID NO: 1863828 - RNA, 15 nt, Human
ccucagggucccugg

SEQ ID NO: 1863829 - RNA, 21 nt, Human
ccucagguaaucgaccugccu

SEQ ID NO: 1863830 - RNA, 16 nt, Human
ccucaggugagaagca

SEQ ID NO: 1863831 - RNA, 23 nt, Human
ccucagguaaucgaccugccucg

SEQ ID NO: 1863832 - RNA, 22 nt, Human
ccucagguaaucgaccugccuc

SEQ ID NO: 1863833 - RNA, 22 nt, Human
ccucaggugauccacccaccuc

SEQ ID NO: 1863834 - RNA, 17 nt, Human
ccucaggugauccaccc

SEQ ID NO: 1863835 - RNA, 19 nt, Human
ccucaggugauccacccac

SEQ ID NO: 1863836 - RNA, 21 nt, Human
ccucaggccugggggcugggc

SEQ ID NO: 1863837 - RNA, 14 nt, Human
ccucaggccugggg

SEQ ID NO: 1863838 - RNA, 11 nt, Human
ccucaggccug

SEQ ID NO: 1863839 - RNA, 14 nt, Human
ccucagggucccug

SEQ ID NO: 1863840 - RNA, 23 nt, Human
ccucaggccugggggcugggcag

SEQ ID NO: 1863841 - RNA, 16 nt, Human
ccucagcauccuggca

SEQ ID NO: 1863842 - RNA, 17 nt, Human
ccucagcauccuggcac

SEQ ID NO: 1863843 - RNA, 14 nt, Human
ccucagcauccugg

SEQ ID NO: 1863844 - RNA, 21 nt, Human
ccucacuaucccggcugcccu

SEQ ID NO: 1863845 - RNA, 21 nt, Human
ccucacuaggcuucugguuga

SEQ ID NO: 1863846 - RNA, 22 nt, Human
ccucacuaucccggcugcccuu

SEQ ID NO: 1863847 - RNA, 20 nt, Human
ccugaggcccuucucuccag

SEQ ID NO: 1863848 - RNA, 19 nt, Human
ccugaggcccuucucucca

SEQ ID NO: 1863849 - RNA, 17 nt, Human
ccugaggcccuucucuc

SEQ ID NO: 1863850 - RNA, 16 nt, Human
ccugaggcccuucucu

SEQ ID NO: 1863851 - RNA, 22 nt, Human
ccugaggcccuucucuccagcc

SEQ ID NO: 1863852 - RNA, 21 nt, Human
ccugaggcccuucucuccagc

SEQ ID NO: 1863853 - RNA, 23 nt, Human
ccugaggcccuucucuccagccc

SEQ ID NO: 1863854 - RNA, 16 nt, Human
ccugacaacacucauu

SEQ ID NO: 1863855 - RNA, 15 nt, Human
ccugacaacacucau

SEQ ID NO: 1863856 - RNA, 14 nt, Human
ccugacaacacuca

SEQ ID NO: 1863857 - RNA, 12 nt, Human
ccugacaacacu

SEQ ID NO: 1863858 - RNA, 14 nt, Human
ccugaggcccagag

SEQ ID NO: 1863859 - RNA, 13 nt, Human
ccugaggcccaga

SEQ ID NO: 1863860 - RNA, 12 nt, Human
ccugaggcccag

SEQ ID NO: 1863861 - RNA, 18 nt, Human
ccugaggcuccacuuggu

SEQ ID NO: 1863862 - RNA, 20 nt, Human
ccugaggcuccacuuggucu

SEQ ID NO: 1863863 - RNA, 14 nt, Human
ccugaugcuucuuc

SEQ ID NO: 1863864 - RNA, 18 nt, Human
ccugaugcuucuucagag

SEQ ID NO: 1863865 - RNA, 17 nt, Human
ccugaugcuucuucaga

SEQ ID NO: 1863866 - RNA, 23 nt, Human
ccugauugugucucuugguccug

SEQ ID NO: 1863867 - RNA, 23 nt, Human
ccucuguacagagcccacgcccc

SEQ ID NO: 1863868 - RNA, 18 nt, Human
ccucuguacagagcccac

SEQ ID NO: 1863869 - RNA, 17 nt, Human
ccucuguacagagccca

SEQ ID NO: 1863870 - RNA, 16 nt, Human
ccucuguacagagccc

SEQ ID NO: 1863871 - RNA, 15 nt, Human
ccucuguacagagcc

SEQ ID NO: 1863872 - RNA, 14 nt, Human
ccucuguacagagc

SEQ ID NO: 1863873 - RNA, 17 nt, Human
ccucuguccaggcacug

SEQ ID NO: 1863874 - RNA, 14 nt, Human
ccucuuaugggcug

SEQ ID NO: 1863875 - RNA, 16 nt, Human
ccucuuaugggcuggg

SEQ ID NO: 1863876 - RNA, 15 nt, Human
ccucuuaugggcugg

SEQ ID NO: 1863877 - RNA, 14 nt, Human
ccucuuagaaaaac

SEQ ID NO: 1863878 - RNA, 21 nt, Human
ccucuguucugcacacagcac

SEQ ID NO: 1863879 - RNA, 17 nt, Human
ccucuuaugggcugggu

SEQ ID NO: 1863880 - RNA, 19 nt, Human
ccucuuccucccucauucc

SEQ ID NO: 1863881 - RNA, 16 nt, Human
ccucuuccucccucau

SEQ ID NO: 1863882 - RNA, 15 nt, Human
ccucuuccucccuca

SEQ ID NO: 1863883 - RNA, 22 nt, Human
ccucuuuggucuacacugugcu

SEQ ID NO: 1863884 - RNA, 23 nt, Human
ccugaaagaggaaugaaguacuc

SEQ ID NO: 1863885 - RNA, 18 nt, Human
ccugaaagaggaaugaag

SEQ ID NO: 1863886 - RNA, 23 nt, Human
ccugaagcuaucguaaaauuaag

SEQ ID NO: 1863887 - RNA, 22 nt, Human
ccugaagcuaucguaaaauuaa

SEQ ID NO: 1863888 - RNA, 20 nt, Human
ccugaagcuaucguaaaauu

SEQ ID NO: 1863889 - RNA, 21 nt, Human
ccugaagacucauucuucugu

SEQ ID NO: 1863890 - RNA, 13 nt, Human
ccugaaggccccg

SEQ ID NO: 1863891 - RNA, 15 nt, Human
ccugaagucacacag

SEQ ID NO: 1863892 - RNA, 16 nt, Human
ccugaagucacacagu

SEQ ID NO: 1863893 - RNA, 17 nt, Human
ccugaagucacacagug

SEQ ID NO: 1863894 - RNA, 20 nt, Human
ccccucagggucccuggugg

SEQ ID NO: 1863895 - RNA, 18 nt, Human
ccccucagggucccuggu

SEQ ID NO: 1863896 - RNA, 17 nt, Human
ccccucagggucccugg

SEQ ID NO: 1863897 - RNA, 21 nt, Human
cccugguuuccugcccuggga

SEQ ID NO: 1863898 - RNA, 21 nt, Human
cccugguggcagugggagcug

SEQ ID NO: 1863899 - RNA, 16 nt, Human
cccugguggcaguggg

SEQ ID NO: 1863900 - RNA, 19 nt, Human
cccugguggcagugggagc

SEQ ID NO: 1863901 - RNA, 16 nt, Human
cccugugggcccccaa

SEQ ID NO: 1863902 - RNA, 21 nt, Human
cccuguagagugggagcugag

SEQ ID NO: 1863903 - RNA, 23 nt, Human
cccugguuuccugcccugggagg

SEQ ID NO: 1863904 - RNA, 22 nt, Human
cccugguuuccugcccugggag

SEQ ID NO: 1863905 - RNA, 18 nt, Human
cccugugggcccccaaau

SEQ ID NO: 1863906 - RNA, 15 nt, Human
cccuguuuguuucug

SEQ ID NO: 1863907 - RNA, 16 nt, Human
cccuguuuguuucuga

SEQ ID NO: 1863908 - RNA, 21 nt, Human
cccccgcugucagccauuccu

SEQ ID NO: 1863909 - RNA, 16 nt, Human
cccccucugcccugcg

SEQ ID NO: 1863910 - RNA, 14 nt, Human
cccccucugcccug

SEQ ID NO: 1863911 - RNA, 13 nt, Human
cccccucugcccu

SEQ ID NO: 1863912 - RNA, 21 nt, Human
ccccgucucugguuccucccc

SEQ ID NO: 1863913 - RNA, 20 nt, Human
ccccgucccccucuggcucc

SEQ ID NO: 1863914 - RNA, 16 nt, Human
ccccgucccccucugg

SEQ ID NO: 1863915 - RNA, 16 nt, Human
cccccaucucuucugg

SEQ ID NO: 1863916 - RNA, 12 nt, Human
cccccagcccca

SEQ ID NO: 1863917 - RNA, 14 nt, Human
ccccacuggugaca

SEQ ID NO: 1863918 - RNA, 13 nt, Human
ccccacuggugac

SEQ ID NO: 1863919 - RNA, 12 nt, Human
ccccacugguga

SEQ ID NO: 1863920 - RNA, 23 nt, Human
cccccaaccaaguggcucccaca

SEQ ID NO: 1863921 - RNA, 22 nt, Human
ccccaggaggccagccuugacc

SEQ ID NO: 1863922 - RNA, 21 nt, Human
ccccaggaggccagccuugac

SEQ ID NO: 1863923 - RNA, 15 nt, Human
ccccaggaggccagc

SEQ ID NO: 1863924 - RNA, 14 nt, Human
ccccaggaggccag

SEQ ID NO: 1863925 - RNA, 13 nt, Human
ccccaggaggcca

SEQ ID NO: 1863926 - RNA, 13 nt, Human
cccuuuucuguuu

SEQ ID NO: 1863927 - RNA, 11 nt, Human
cccuuuuccuu

SEQ ID NO: 1863928 - RNA, 18 nt, Human
cccuuuuuuggcugcuga

SEQ ID NO: 1863929 - RNA, 17 nt, Human
cccuuuuuuggcugcug

SEQ ID NO: 1863930 - RNA, 22 nt, Human
ccgagauagccaaggccaaagg

SEQ ID NO: 1863931 - RNA, 19 nt, Human
ccgagauagccaaggccaa

SEQ ID NO: 1863932 - RNA, 17 nt, Human
ccgagaaggaagccucc

SEQ ID NO: 1863933 - RNA, 19 nt, Human
cccuuuuuuggcugcugaa

SEQ ID NO: 1863934 - RNA, 22 nt, Human
ccgagucucuucuccacuggau

SEQ ID NO: 1863935 - RNA, 19 nt, Human
ccgagccuggcuccaaacc

SEQ ID NO: 1863936 - RNA, 16 nt, Human
ccgagccuggcuccaa

SEQ ID NO: 1863937 - RNA, 18 nt, Human
ccgagaucacgccacugc

SEQ ID NO: 1863938 - RNA, 16 nt, Human
cccuuguggucccacc

SEQ ID NO: 1863939 - RNA, 14 nt, Human
cccuugugguccca

SEQ ID NO: 1863940 - RNA, 18 nt, Human
cccuuggggagcaggcuc

SEQ ID NO: 1863941 - RNA, 18 nt, Human
cccuuguggucccacccc

SEQ ID NO: 1863942 - RNA, 20 nt, Human
cccuuguggucccaccccac

SEQ ID NO: 1863943 - RNA, 20 nt, Human
cccuuugacgccaucccagc

SEQ ID NO: 1863944 - RNA, 22 nt, Human
cccuuucugggcaccggggccu

SEQ ID NO: 1863945 - RNA, 18 nt, Human
cccuugccgucuaccuga

SEQ ID NO: 1863946 - RNA, 17 nt, Human
cccuugccgucuaccug

SEQ ID NO: 1863947 - RNA, 22 nt, Human
cccuugccgucuaccugagggg

SEQ ID NO: 1863948 - RNA, 20 nt, Human
cccuuccucuccacugccuu

SEQ ID NO: 1863949 - RNA, 17 nt, Human
cccuuccucuccacugc

SEQ ID NO: 1863950 - RNA, 16 nt, Human
cccuuccucuccacug

SEQ ID NO: 1863951 - RNA, 19 nt, Human
cccuuaccucggugccuuc

SEQ ID NO: 1863952 - RNA, 21 nt, Human
cccuuaccacugcucugauga

SEQ ID NO: 1863953 - RNA, 17 nt, Human
cccuuaccacugcucug

SEQ ID NO: 1863954 - RNA, 13 nt, Human
cccuuccucucca

SEQ ID NO: 1863955 - RNA, 12 nt, Human
ccuaccugguaa

SEQ ID NO: 1863956 - RNA, 17 nt, Human
ccuaauuccacagcugc

SEQ ID NO: 1863957 - RNA, 16 nt, Human
ccuaauuccacagcug

SEQ ID NO: 1863958 - RNA, 15 nt, Human
ccuaauuccacagcu

SEQ ID NO: 1863959 - RNA, 14 nt, Human
ccuaauuccacagc

SEQ ID NO: 1863960 - RNA, 13 nt, Human
ccuaauuccacag

SEQ ID NO: 1863961 - RNA, 14 nt, Human
ccuaaaguguauuu

SEQ ID NO: 1863962 - RNA, 12 nt, Human
ccuaaagagaua

SEQ ID NO: 1863963 - RNA, 23 nt, Human
ccguggcuucccgcucagcccuc

SEQ ID NO: 1863964 - RNA, 21 nt, Human
ccguggcuucccgcucagccc

SEQ ID NO: 1863965 - RNA, 15 nt, Human
ccguggcuucccgcu

SEQ ID NO: 1863966 - RNA, 17 nt, Human
ccgugccuucagcucua

SEQ ID NO: 1863967 - RNA, 16 nt, Human
ccgugccuucagcucu

SEQ ID NO: 1863968 - RNA, 15 nt, Human
ccgugccuucagcuc

SEQ ID NO: 1863969 - RNA, 14 nt, Human
ccgugccuucagcu

SEQ ID NO: 1863970 - RNA, 19 nt, Human
ccgggccuggagaacuaga

SEQ ID NO: 1863971 - RNA, 20 nt, Human
ccgggcacucagaagacacu

SEQ ID NO: 1863972 - RNA, 12 nt, Human
ccggcuggccug

SEQ ID NO: 1863973 - RNA, 12 nt, Human
ccggcugcccuu

SEQ ID NO: 1863974 - RNA, 22 nt, Human
ccgggaggcagagguugcagug

SEQ ID NO: 1863975 - RNA, 13 nt, Human
ccggcuggccugg

SEQ ID NO: 1863976 - RNA, 15 nt, Human
ccgggcacucagaag

SEQ ID NO: 1863977 - RNA, 23 nt, Human
ccgcuuucuacccagcgagcccu

SEQ ID NO: 1863978 - RNA, 17 nt, Human
ccucaccuuucccaucu

SEQ ID NO: 1863979 - RNA, 12 nt, Human
ccucaccccacu

SEQ ID NO: 1863980 - RNA, 22 nt, Human
ccucacaguccuuaccagcaga

SEQ ID NO: 1863981 - RNA, 20 nt, Human
ccucacaguccuuaccagca

SEQ ID NO: 1863982 - RNA, 15 nt, Human
ccucaccccacugug

SEQ ID NO: 1863983 - RNA, 17 nt, Human
ccuaucagaaguuucuc

SEQ ID NO: 1863984 - RNA, 17 nt, Human
ccucacaguccuuacca

SEQ ID NO: 1863985 - RNA, 16 nt, Human
cugcccugcccaccug

SEQ ID NO: 1863986 - RNA, 15 nt, Human
cugcccugcccaccu

SEQ ID NO: 1863987 - RNA, 14 nt, Human
cugcccugcccacc

SEQ ID NO: 1863988 - RNA, 13 nt, Human
cugcccugcccac

SEQ ID NO: 1863989 - RNA, 11 nt, Human
cugcccggcug

SEQ ID NO: 1863990 - RNA, 19 nt, Human
cugcccuccaagaccuucu

SEQ ID NO: 1863991 - RNA, 15 nt, Human
cugcccggcugcgga

SEQ ID NO: 1863992 - RNA, 17 nt, Human
cugccccuggcagcccc

SEQ ID NO: 1863993 - RNA, 16 nt, Human
cugccccuggcagccc

SEQ ID NO: 1863994 - RNA, 15 nt, Human
cugccccuggcagcc

SEQ ID NO: 1863995 - RNA, 14 nt, Human
cugccccuggcagc

SEQ ID NO: 1863996 - RNA, 18 nt, Human
cugcccaggccugccugu

SEQ ID NO: 1863997 - RNA, 19 nt, Human
cugcccaggccugccuguu

SEQ ID NO: 1863998 - RNA, 19 nt, Human
cugcccaaccugcucuccu

SEQ ID NO: 1863999 - RNA, 13 nt, Human
cugcccaggcccc

SEQ ID NO: 1864000 - RNA, 17 nt, Human
cugcccaaccugcucuc

SEQ ID NO: 1864001 - RNA, 16 nt, Human
cugccauuucugagau

SEQ ID NO: 1864002 - RNA, 19 nt, Human
cugccaggaagccagcagg

SEQ ID NO: 1864003 - RNA, 18 nt, Human
cugccaggaagccagcag

SEQ ID NO: 1864004 - RNA, 16 nt, Human
cugccaggaagccagc

SEQ ID NO: 1864005 - RNA, 15 nt, Human
cugccaggaagccag

SEQ ID NO: 1864006 - RNA, 19 nt, Human
cugccagccgagauagcca

SEQ ID NO: 1864007 - RNA, 19 nt, Human
cugccaugccagcuuaucu

SEQ ID NO: 1864008 - RNA, 17 nt, Human
cugccaugccagcuuau

SEQ ID NO: 1864009 - RNA, 22 nt, Human
cugccacacuucaggcucuucu

SEQ ID NO: 1864010 - RNA, 17 nt, Human
cugccacacuucaggcu

SEQ ID NO: 1864011 - RNA, 13 nt, Human
cugccacacuuca

SEQ ID NO: 1864012 - RNA, 19 nt, Human
cugccaccacgcccggcua

SEQ ID NO: 1864013 - RNA, 15 nt, Human
cugccacccugggga

SEQ ID NO: 1864014 - RNA, 16 nt, Human
cugccacccuggggag

SEQ ID NO: 1864015 - RNA, 20 nt, Human
cugccacccuggggagaaag

SEQ ID NO: 1864016 - RNA, 20 nt, Human
cugcggaaugaaccacaucu

SEQ ID NO: 1864017 - RNA, 15 nt, Human
cugcgguccacccag

SEQ ID NO: 1864018 - RNA, 21 nt, Human
cugcggaaugaaccacaucuu

SEQ ID NO: 1864019 - RNA, 17 nt, Human
cugcgguccacccagga

SEQ ID NO: 1864020 - RNA, 16 nt, Human
cugcgguccacccagg

SEQ ID NO: 1864021 - RNA, 14 nt, Human
cugcuccagcuguu

SEQ ID NO: 1864022 - RNA, 15 nt, Human
cugcuccagcuguuc

SEQ ID NO: 1864023 - RNA, 16 nt, Human
cugcuccucuccccag

SEQ ID NO: 1864024 - RNA, 17 nt, Human
cugcuccucuccccagc

SEQ ID NO: 1864025 - RNA, 18 nt, Human
cugcuccucuccccagca

SEQ ID NO: 1864026 - RNA, 14 nt, Human
cugccucuucucua

SEQ ID NO: 1864027 - RNA, 13 nt, Human
cugccucuucucu

SEQ ID NO: 1864028 - RNA, 12 nt, Human
cugccucuuccu

SEQ ID NO: 1864029 - RNA, 14 nt, Human
cugccucucugcag

SEQ ID NO: 1864030 - RNA, 13 nt, Human
cugccucucugca

SEQ ID NO: 1864031 - RNA, 12 nt, Human
cugccucucugc

SEQ ID NO: 1864032 - RNA, 13 nt, Human
cugccugcccagg

SEQ ID NO: 1864033 - RNA, 14 nt, Human
cugccugcccaggc

SEQ ID NO: 1864034 - RNA, 15 nt, Human
cugccugcccaggcc

SEQ ID NO: 1864035 - RNA, 15 nt, Human
cugccuaagugcagc

SEQ ID NO: 1864036 - RNA, 13 nt, Human
cugccuauuuuaa

SEQ ID NO: 1864037 - RNA, 22 nt, Human
cugcccugggaggcagugaugg

SEQ ID NO: 1864038 - RNA, 15 nt, Human
cugcccugggaggca

SEQ ID NO: 1864039 - RNA, 11 nt, Human
cugcccuggga

SEQ ID NO: 1864040 - RNA, 13 nt, Human
cugcccugggagg

SEQ ID NO: 1864041 - RNA, 12 nt, Human
cugcccugggag

SEQ ID NO: 1864042 - RNA, 14 nt, Human
cugccucagccucc

SEQ ID NO: 1864043 - RNA, 13 nt, Human
cugccucagccuc

SEQ ID NO: 1864044 - RNA, 17 nt, Human
cugcagggacugccagu

SEQ ID NO: 1864045 - RNA, 15 nt, Human
cugcagggacugcca

SEQ ID NO: 1864046 - RNA, 16 nt, Human
cugcagggccaagcac

SEQ ID NO: 1864047 - RNA, 22 nt, Human
cugcagggaguccgaaagggac

SEQ ID NO: 1864048 - RNA, 22 nt, Human
cugcagccucaaccuccugggc

SEQ ID NO: 1864049 - RNA, 19 nt, Human
cugcagccucaaccuccug

SEQ ID NO: 1864050 - RNA, 20 nt, Human
cugcagccucaaccuccugg

SEQ ID NO: 1864051 - RNA, 11 nt, Human
cugcagccuca

SEQ ID NO: 1864052 - RNA, 20 nt, Human
cugcaccggcuggccuggcc

SEQ ID NO: 1864053 - RNA, 19 nt, Human
cugcaccggcuggccuggc

SEQ ID NO: 1864054 - RNA, 18 nt, Human
cugcaccggcuggccugg

SEQ ID NO: 1864055 - RNA, 17 nt, Human
cugcaccggcuggccug

SEQ ID NO: 1864056 - RNA, 14 nt, Human
cugcacuugcagac

SEQ ID NO: 1864057 - RNA, 16 nt, Human
cugcacuugcagacuc

SEQ ID NO: 1864058 - RNA, 17 nt, Human
cugcacuugcagacucu

SEQ ID NO: 1864059 - RNA, 20 nt, Human
cugcagagcaggaaacauga

SEQ ID NO: 1864060 - RNA, 13 nt, Human
cugcagaagacag

SEQ ID NO: 1864061 - RNA, 23 nt, Human
cugcagaagacaguauggcagcu

SEQ ID NO: 1864062 - RNA, 22 nt, Human
cugcacagugcaucucagccca

SEQ ID NO: 1864063 - RNA, 21 nt, Human
cugcacagugcaucucagccc

SEQ ID NO: 1864064 - RNA, 18 nt, Human
cugcacccucaggcaggu

SEQ ID NO: 1864065 - RNA, 17 nt, Human
cugcacccucaggcagg

SEQ ID NO: 1864066 - RNA, 16 nt, Human
cugcacaagcugcacc

SEQ ID NO: 1864067 - RNA, 15 nt, Human
cugcacaagcugcac

SEQ ID NO: 1864068 - RNA, 14 nt, Human
cugcacaagcugca

SEQ ID NO: 1864069 - RNA, 13 nt, Human
cugcacaagcugc

SEQ ID NO: 1864070 - RNA, 18 nt, Human
cugcacaagcugcacccu

SEQ ID NO: 1864071 - RNA, 18 nt, Human
cugcacagugcaucucag

SEQ ID NO: 1864072 - RNA, 13 nt, Human
cugcacaaagccc

SEQ ID NO: 1864073 - RNA, 20 nt, Human
cugcacaaagcccuuccaug

SEQ ID NO: 1864074 - RNA, 18 nt, Human
cugcacaaagcccuucca

SEQ ID NO: 1864075 - RNA, 21 nt, Human
cugcacaaagcccuuccaugu

SEQ ID NO: 1864076 - RNA, 16 nt, Human
cugagucugaaggcug

SEQ ID NO: 1864077 - RNA, 15 nt, Human
cugagucugaaggcu

SEQ ID NO: 1864078 - RNA, 14 nt, Human
cugagucugaaggc

SEQ ID NO: 1864079 - RNA, 13 nt, Human
cugagucugaagg

SEQ ID NO: 1864080 - RNA, 17 nt, Human
cugagucugaaggcugg

SEQ ID NO: 1864081 - RNA, 14 nt, Human
cugagugccuuuug

SEQ ID NO: 1864082 - RNA, 16 nt, Human
cugagugccuuuuggu

SEQ ID NO: 1864083 - RNA, 15 nt, Human
cugagugccuuuugg

SEQ ID NO: 1864084 - RNA, 22 nt, Human
cugagugggggaucacagccuc

SEQ ID NO: 1864085 - RNA, 13 nt, Human
cugauaaagauga

SEQ ID NO: 1864086 - RNA, 21 nt, Human
cugauaaagaugagugagcau

SEQ ID NO: 1864087 - RNA, 14 nt, Human
cugaucucucguga

SEQ ID NO: 1864088 - RNA, 22 nt, Human
cugauucccaagcucugcuccu

SEQ ID NO: 1864089 - RNA, 19 nt, Human
cugauucccaagcucugcu

SEQ ID NO: 1864090 - RNA, 20 nt, Human
cugauucccaagcucugcuc

SEQ ID NO: 1864091 - RNA, 17 nt, Human
cugauucccaagcucug

SEQ ID NO: 1864092 - RNA, 18 nt, Human
cugauucccaagcucugc

SEQ ID NO: 1864093 - RNA, 15 nt, Human
cugauucccaagcuc

SEQ ID NO: 1864094 - RNA, 22 nt, Human
cuggcuuuucacugcuggcugc

SEQ ID NO: 1864095 - RNA, 20 nt, Human
cuggcuuuucacugcuggcu

SEQ ID NO: 1864096 - RNA, 19 nt, Human
cuggcuuuucacugcuggc

SEQ ID NO: 1864097 - RNA, 17 nt, Human
cuggcuuuucacugcug

SEQ ID NO: 1864098 - RNA, 19 nt, Human
cugggaacaccauagguca

SEQ ID NO: 1864099 - RNA, 16 nt, Human
cuggcuuuucacugcu

SEQ ID NO: 1864100 - RNA, 15 nt, Human
cuggcuuuucacugc

SEQ ID NO: 1864101 - RNA, 14 nt, Human
cuggcuucacagau

SEQ ID NO: 1864102 - RNA, 20 nt, Human
cuggcuguuggcugggggcc

SEQ ID NO: 1864103 - RNA, 21 nt, Human
cuggcuggguggcaccagcag

SEQ ID NO: 1864104 - RNA, 22 nt, Human
cuggcuggguggcaccagcagc

SEQ ID NO: 1864105 - RNA, 19 nt, Human
cuggcuguuggcugggggc

SEQ ID NO: 1864106 - RNA, 19 nt, Human
cuggcugccuuagaaccuu

SEQ ID NO: 1864107 - RNA, 14 nt, Human
cuggcugccuuaga

SEQ ID NO: 1864108 - RNA, 19 nt, Human
cuggcucuuccaggcuggg

SEQ ID NO: 1864109 - RNA, 18 nt, Human
cuggcucuuccaggcugg

SEQ ID NO: 1864110 - RNA, 20 nt, Human
cuggcucuuccaggcuggga

SEQ ID NO: 1864111 - RNA, 13 nt, Human
cuggccugagcug

SEQ ID NO: 1864112 - RNA, 17 nt, Human
cuggcucuuccaggcug

SEQ ID NO: 1864113 - RNA, 20 nt, Human
cugggcaaugugauaaaacc

SEQ ID NO: 1864114 - RNA, 10 nt, Human
cugggccccu

SEQ ID NO: 1864115 - RNA, 17 nt, Human
cugggccccugccucuc

SEQ ID NO: 1864116 - RNA, 16 nt, Human
cugggccccugccucu

SEQ ID NO: 1864117 - RNA, 12 nt, Human
cugggccccugc

SEQ ID NO: 1864118 - RNA, 23 nt, Human
cugggauuacaggcuccugccac

SEQ ID NO: 1864119 - RNA, 22 nt, Human
cugggauuacaggcuccugcca

SEQ ID NO: 1864120 - RNA, 21 nt, Human
cugggauuacaggcuccugcc

SEQ ID NO: 1864121 - RNA, 21 nt, Human
cugggauuacaggcgugagcc

SEQ ID NO: 1864122 - RNA, 20 nt, Human
cugggauuacaggcuccugc

SEQ ID NO: 1864123 - RNA, 19 nt, Human
cugggauuacaggcuccug

SEQ ID NO: 1864124 - RNA, 16 nt, Human
cugggagugagcuggu

SEQ ID NO: 1864125 - RNA, 13 nt, Human
cugggagugagcu

SEQ ID NO: 1864126 - RNA, 12 nt, Human
cugggagugagc

SEQ ID NO: 1864127 - RNA, 15 nt, Human
cugggagcucugcag

SEQ ID NO: 1864128 - RNA, 14 nt, Human
cugggagcucugca

SEQ ID NO: 1864129 - RNA, 13 nt, Human
cugggagcucugc

SEQ ID NO: 1864130 - RNA, 16 nt, Human
cugggaggcucuggag

SEQ ID NO: 1864131 - RNA, 15 nt, Human
cugggaggcucugga

SEQ ID NO: 1864132 - RNA, 16 nt, Human
cugggaggcagugaug

SEQ ID NO: 1864133 - RNA, 14 nt, Human
cugggaggcaguga

SEQ ID NO: 1864134 - RNA, 18 nt, Human
cugggaggucaaggcugc

SEQ ID NO: 1864135 - RNA, 21 nt, Human
cuggguacuuguggacacagc

SEQ ID NO: 1864136 - RNA, 23 nt, Human
cuggguacuuguggacacagcuc

SEQ ID NO: 1864137 - RNA, 22 nt, Human
cugggguggggaccucaggccu

SEQ ID NO: 1864138 - RNA, 21 nt, Human
cugggguggggaccucaggcc

SEQ ID NO: 1864139 - RNA, 23 nt, Human
cugggguggggaccucaggccug

SEQ ID NO: 1864140 - RNA, 20 nt, Human
cuggguacuuguggacacag

SEQ ID NO: 1864141 - RNA, 19 nt, Human
cugggguggggaccucagg

SEQ ID NO: 1864142 - RNA, 18 nt, Human
cugggguggggaccucag

SEQ ID NO: 1864143 - RNA, 17 nt, Human
cugggguggggaccuca

SEQ ID NO: 1864144 - RNA, 13 nt, Human
cugggggccucag

SEQ ID NO: 1864145 - RNA, 17 nt, Human
cugggggccucagugcc

SEQ ID NO: 1864146 - RNA, 18 nt, Human
cugggggccucagugcca

SEQ ID NO: 1864147 - RNA, 18 nt, Human
cugggcuucaguggcagc

SEQ ID NO: 1864148 - RNA, 17 nt, Human
cugggcuucaguggcag

SEQ ID NO: 1864149 - RNA, 19 nt, Human
cugggcuucaguggcagcu

SEQ ID NO: 1864150 - RNA, 20 nt, Human
cugggcuucaguggcagcug

SEQ ID NO: 1864151 - RNA, 21 nt, Human
cugggcuucaguggcagcugc

SEQ ID NO: 1864152 - RNA, 22 nt, Human
cugggcuucaguggcagcugcu

SEQ ID NO: 1864153 - RNA, 13 nt, Human
cugggcuugggga

SEQ ID NO: 1864154 - RNA, 23 nt, Human
cugggcuucaguggcagcugcuu

SEQ ID NO: 1864155 - RNA, 20 nt, Human
cugggcuuggggaccagagc

SEQ ID NO: 1864156 - RNA, 17 nt, Human
cugggcuuggggaccag

SEQ ID NO: 1864157 - RNA, 21 nt, Human
cugggcuuggggaccagagcu

SEQ ID NO: 1864158 - RNA, 19 nt, Human
cugggcucccuucccaccu

SEQ ID NO: 1864159 - RNA, 18 nt, Human
cuggucucaaacuccuga

SEQ ID NO: 1864160 - RNA, 19 nt, Human
cugguggcagugggagcug

SEQ ID NO: 1864161 - RNA, 23 nt, Human
cugguggcagugggagcugccug

SEQ ID NO: 1864162 - RNA, 17 nt, Human
cugguccauagagagca

SEQ ID NO: 1864163 - RNA, 15 nt, Human
cugguccauagagag

SEQ ID NO: 1864164 - RNA, 18 nt, Human
cuggguuggaaaacagua

SEQ ID NO: 1864165 - RNA, 13 nt, Human
cuggguuggaaaa

SEQ ID NO: 1864166 - RNA, 13 nt, Human
cuggguuggaggg

SEQ ID NO: 1864167 - RNA, 19 nt, Human
cuggguucuacccaggugc

SEQ ID NO: 1864168 - RNA, 21 nt, Human
cugguccauagagagcaagac

SEQ ID NO: 1864169 - RNA, 18 nt, Human
cugguccauagagagcaa

SEQ ID NO: 1864170 - RNA, 15 nt, Human
cuggucccacucagu

SEQ ID NO: 1864171 - RNA, 18 nt, Human
cuggucccacucagucca

SEQ ID NO: 1864172 - RNA, 17 nt, Human
cuggccuagcauacgua

SEQ ID NO: 1864173 - RNA, 13 nt, Human
cuggcccacugca

SEQ ID NO: 1864174 - RNA, 12 nt, Human
cuggcccacugc

SEQ ID NO: 1864175 - RNA, 23 nt, Human
cuggccuagcauacguacacauu

SEQ ID NO: 1864176 - RNA, 22 nt, Human
cuggccucaagugauucuccug

SEQ ID NO: 1864177 - RNA, 22 nt, Human
cuggccagaugcaccagcccuu

SEQ ID NO: 1864178 - RNA, 21 nt, Human
cuggccagaugcaccagcccu

SEQ ID NO: 1864179 - RNA, 17 nt, Human
cuggccagaugcaccag

SEQ ID NO: 1864180 - RNA, 18 nt, Human
cuggccagaugcaccagc

SEQ ID NO: 1864181 - RNA, 19 nt, Human
cuggccagaugcaccagcc

SEQ ID NO: 1864182 - RNA, 20 nt, Human
cuggccagaugcaccagccc

SEQ ID NO: 1864183 - RNA, 18 nt, Human
cuggcacugcuuccagug

SEQ ID NO: 1864184 - RNA, 17 nt, Human
cuggcacugcuuccagu

SEQ ID NO: 1864185 - RNA, 16 nt, Human
cuggcacugcuuccag

SEQ ID NO: 1864186 - RNA, 15 nt, Human
cuggcacugcuucca

SEQ ID NO: 1864187 - RNA, 16 nt, Human
cuggccaacgggguga

SEQ ID NO: 1864188 - RNA, 16 nt, Human
cuggccagaugcacca

SEQ ID NO: 1864189 - RNA, 23 nt, Human
cuggcacuauaauguaagcucua

SEQ ID NO: 1864190 - RNA, 14 nt, Human
cuggcacugcuucc

SEQ ID NO: 1864191 - RNA, 13 nt, Human
cuggcacugcuuc

SEQ ID NO: 1864192 - RNA, 17 nt, Human
cuggcacagggcagugg

SEQ ID NO: 1864193 - RNA, 17 nt, Human
cuggauuauauuaugaa

SEQ ID NO: 1864194 - RNA, 23 nt, Human
cuggauuauucaaaaugauguau

SEQ ID NO: 1864195 - RNA, 13 nt, Human
cuggauuaaacuu

SEQ ID NO: 1864196 - RNA, 23 nt, Human
cuggauuaaacuuaaucuaaaug

SEQ ID NO: 1864197 - RNA, 16 nt, Human
cuggauggggcugcac

SEQ ID NO: 1864198 - RNA, 15 nt, Human
cuggauggggcugca

SEQ ID NO: 1864199 - RNA, 21 nt, Human
cuggauggaggaaaaccaagc

SEQ ID NO: 1864200 - RNA, 16 nt, Human
cuggacucaccucccc

SEQ ID NO: 1864201 - RNA, 20 nt, Human
cuggagcccacuguacuugc

SEQ ID NO: 1864202 - RNA, 17 nt, Human
cuggagcccacuguacu

SEQ ID NO: 1864203 - RNA, 16 nt, Human
cuggagcccacuguac

SEQ ID NO: 1864204 - RNA, 15 nt, Human
cuggagcccacugua

SEQ ID NO: 1864205 - RNA, 13 nt, Human
cuggagcccacug

SEQ ID NO: 1864206 - RNA, 21 nt, Human
cuggagcccacuguacuugcu

SEQ ID NO: 1864207 - RNA, 12 nt, Human
cugcucugauga

SEQ ID NO: 1864208 - RNA, 18 nt, Human
cugcuuugggcugcccug

SEQ ID NO: 1864209 - RNA, 20 nt, Human
cugcuuugggcugcccuggu

SEQ ID NO: 1864210 - RNA, 19 nt, Human
cugcuuugggcugcccugg

SEQ ID NO: 1864211 - RNA, 23 nt, Human
cugcuuugggcugcccuggugcu

SEQ ID NO: 1864212 - RNA, 22 nt, Human
cugcuuugggcugcccuggugc

SEQ ID NO: 1864213 - RNA, 21 nt, Human
cugcuuugggcugcccuggug

SEQ ID NO: 1864214 - RNA, 14 nt, Human
cuggaaugcagugg

SEQ ID NO: 1864215 - RNA, 15 nt, Human
cuggaaugcaguggu

SEQ ID NO: 1864216 - RNA, 15 nt, Human
cuggaagcacagcuu

SEQ ID NO: 1864217 - RNA, 18 nt, Human
cuggaagcacagcuucau

SEQ ID NO: 1864218 - RNA, 21 nt, Human
cuggaagugcuaauuuugaaa

SEQ ID NO: 1864219 - RNA, 23 nt, Human
cuggaauaauccuaaacauauga

SEQ ID NO: 1864220 - RNA, 18 nt, Human
cucccaucucacacauga

SEQ ID NO: 1864221 - RNA, 15 nt, Human
cucccaucucacaca

SEQ ID NO: 1864222 - RNA, 21 nt, Human
cucccaucucacacaugagca

SEQ ID NO: 1864223 - RNA, 14 nt, Human
cucccaucucacac

SEQ ID NO: 1864224 - RNA, 14 nt, Human
cucccaucacccgc

SEQ ID NO: 1864225 - RNA, 23 nt, Human
cucccuucccaccucucucacuc

SEQ ID NO: 1864226 - RNA, 10 nt, Human
cucccuuccu

SEQ ID NO: 1864227 - RNA, 20 nt, Human
cucccuucaaccauucccca

SEQ ID NO: 1864228 - RNA, 19 nt, Human
cucccuucaaccauucccc

SEQ ID NO: 1864229 - RNA, 18 nt, Human
cucccuucaaccauuccc

SEQ ID NO: 1864230 - RNA, 12 nt, Human
cucccuucaacc

SEQ ID NO: 1864231 - RNA, 13 nt, Human
cucccuuucaaca

SEQ ID NO: 1864232 - RNA, 20 nt, Human
cucccuuggauuguccccga

SEQ ID NO: 1864233 - RNA, 17 nt, Human
cucccuuggauuguccc

SEQ ID NO: 1864234 - RNA, 17 nt, Human
cucccuuucuucccuac

SEQ ID NO: 1864235 - RNA, 13 nt, Human
cucccuuccucuu

SEQ ID NO: 1864236 - RNA, 14 nt, Human
cucccuuccucuuu

SEQ ID NO: 1864237 - RNA, 16 nt, Human
cucccuucucuucaca

SEQ ID NO: 1864238 - RNA, 14 nt, Human
cuccugcaggcagc

SEQ ID NO: 1864239 - RNA, 13 nt, Human
cuccugcaggcag

SEQ ID NO: 1864240 - RNA, 22 nt, Human
cuccugaguagcugggauuaca

SEQ ID NO: 1864241 - RNA, 12 nt, Human
cuccugcaggca

SEQ ID NO: 1864242 - RNA, 17 nt, Human
cuccugaguagcuggga

SEQ ID NO: 1864243 - RNA, 21 nt, Human
cuccugaguagcuggauuaca

SEQ ID NO: 1864244 - RNA, 14 nt, Human
cuccugaccuuagg

SEQ ID NO: 1864245 - RNA, 14 nt, Human
cuccugaccucagg

SEQ ID NO: 1864246 - RNA, 19 nt, Human
cuccucuugccacugccuc

SEQ ID NO: 1864247 - RNA, 14 nt, Human
cuccucagaucuuc

SEQ ID NO: 1864248 - RNA, 12 nt, Human
cuccucagaucu

SEQ ID NO: 1864249 - RNA, 22 nt, Human
cuccuaucagaaguuucucagc

SEQ ID NO: 1864250 - RNA, 21 nt, Human
cuccuucaccuuuguccccac

SEQ ID NO: 1864251 - RNA, 19 nt, Human
cuccuucaccuuugucccc

SEQ ID NO: 1864252 - RNA, 16 nt, Human
cuccuucaccuuuguc

SEQ ID NO: 1864253 - RNA, 14 nt, Human
cuccuucaccuuug

SEQ ID NO: 1864254 - RNA, 14 nt, Human
cuccugugugugcg

SEQ ID NO: 1864255 - RNA, 21 nt, Human
cuccugcaggcagccaggcca

SEQ ID NO: 1864256 - RNA, 15 nt, Human
cuccugcaggcagcc

SEQ ID NO: 1864257 - RNA, 22 nt, Human
cuccugcaggcagccaggccac

SEQ ID NO: 1864258 - RNA, 11 nt, Human
cuccugccacc

SEQ ID NO: 1864259 - RNA, 15 nt, Human
cuccugugucuugca

SEQ ID NO: 1864260 - RNA, 23 nt, Human
cuccugugucuugcaauggcagc

SEQ ID NO: 1864261 - RNA, 11 nt, Human
cuccugugugu

SEQ ID NO: 1864262 - RNA, 21 nt, Human
cuccuugaaaacacuguucuc

SEQ ID NO: 1864263 - RNA, 11 nt, Human
cuccuucuucc

SEQ ID NO: 1864264 - RNA, 16 nt, Human
cucgaacuggcugcaa

SEQ ID NO: 1864265 - RNA, 14 nt, Human
cuccuucuguccua

SEQ ID NO: 1864266 - RNA, 15 nt, Human
cuccuucuguccuac

SEQ ID NO: 1864267 - RNA, 20 nt, Human
cuccuucuguccuacucugu

SEQ ID NO: 1864268 - RNA, 19 nt, Human
cucggacuuagcugggaga

SEQ ID NO: 1864269 - RNA, 18 nt, Human
cucggacuuagcugggag

SEQ ID NO: 1864270 - RNA, 21 nt, Human
cucgcuauugucaccagggcu

SEQ ID NO: 1864271 - RNA, 22 nt, Human
cucgcuauugucaccagggcug

SEQ ID NO: 1864272 - RNA, 22 nt, Human
cucggccucccaaagugcuggg

SEQ ID NO: 1864273 - RNA, 23 nt, Human
cucggccucccaaagugcuggga

SEQ ID NO: 1864274 - RNA, 15 nt, Human
cucgcgacaaugcaa

SEQ ID NO: 1864275 - RNA, 19 nt, Human
cucgcuauugucaccaggg

SEQ ID NO: 1864276 - RNA, 13 nt, Human
cucgcgacaaugc

SEQ ID NO: 1864277 - RNA, 17 nt, Human
cucgagguuucucaaag

SEQ ID NO: 1864278 - RNA, 16 nt, Human
cucgaguuacagacaa

SEQ ID NO: 1864279 - RNA, 20 nt, Human
cucgaguuacagacaaagcg

SEQ ID NO: 1864280 - RNA, 20 nt, Human
cuccagaccccuggcuuuuc

SEQ ID NO: 1864281 - RNA, 19 nt, Human
cuccagaccccuggcuuuu

SEQ ID NO: 1864282 - RNA, 18 nt, Human
cuccagaccccuggcuuu

SEQ ID NO: 1864283 - RNA, 17 nt, Human
cuccagaccccuggcuu

SEQ ID NO: 1864284 - RNA, 15 nt, Human
cuccagaccccuggc

SEQ ID NO: 1864285 - RNA, 14 nt, Human
cuccagaccccugg

SEQ ID NO: 1864286 - RNA, 11 nt, Human
cuccacugccu

SEQ ID NO: 1864287 - RNA, 19 nt, Human
cuccagcucaccagcccca

SEQ ID NO: 1864288 - RNA, 20 nt, Human
cuccagcucaccagccccag

SEQ ID NO: 1864289 - RNA, 11 nt, Human
cuccacccugc

SEQ ID NO: 1864290 - RNA, 15 nt, Human
cuccaccugccaggg

SEQ ID NO: 1864291 - RNA, 17 nt, Human
cuccaccugccagggac

SEQ ID NO: 1864292 - RNA, 21 nt, Human
cuccaccugccagggacagag

SEQ ID NO: 1864293 - RNA, 18 nt, Human
cuccaccugccagggaca

SEQ ID NO: 1864294 - RNA, 12 nt, Human
cuccacccugcu

SEQ ID NO: 1864295 - RNA, 14 nt, Human
cucccaggcgcccc

SEQ ID NO: 1864296 - RNA, 22 nt, Human
cucccaggcauuccccaggagg

SEQ ID NO: 1864297 - RNA, 21 nt, Human
cucccaggcauuccccaggag

SEQ ID NO: 1864298 - RNA, 20 nt, Human
cucccaggcauuccccagga

SEQ ID NO: 1864299 - RNA, 19 nt, Human
cucccaggcauuccccagg

SEQ ID NO: 1864300 - RNA, 17 nt, Human
cucccaggcauucccca

SEQ ID NO: 1864301 - RNA, 24 nt, Human
cuccauucccguggaacguuuuuc

SEQ ID NO: 1864302 - RNA, 14 nt, Human
cuccaugugggcua

SEQ ID NO: 1864303 - RNA, 22 nt, Human
cucccaaggggcccaaauucuu

SEQ ID NO: 1864304 - RNA, 21 nt, Human
cucccaaggggcccaaauucu

SEQ ID NO: 1864305 - RNA, 15 nt, Human
cucccaggcauuccc

SEQ ID NO: 1864306 - RNA, 13 nt, Human
cuccagcuguuca

SEQ ID NO: 1864307 - RNA, 19 nt, Human
cuccagcuggguuggaaaa

SEQ ID NO: 1864308 - RNA, 19 nt, Human
cuccagcuguucagcuggu

SEQ ID NO: 1864309 - RNA, 18 nt, Human
cuccagcuguucagcugg

SEQ ID NO: 1864310 - RNA, 23 nt, Human
cuccauccugaggcuccacuugg

SEQ ID NO: 1864311 - RNA, 17 nt, Human
cuccaucuaaacugccc

SEQ ID NO: 1864312 - RNA, 20 nt, Human
cuccaucgcugucaucucag

SEQ ID NO: 1864313 - RNA, 13 nt, Human
cuccaucuccacu

SEQ ID NO: 1864314 - RNA, 18 nt, Human
cuccaucuaaacugcccc

SEQ ID NO: 1864315 - RNA, 21 nt, Human
cuccauccugaggcuccacuu

SEQ ID NO: 1864316 - RNA, 20 nt, Human
cuccauccugaggcuccacu

SEQ ID NO: 1864317 - RNA, 11 nt, Human
cuccaggcucc

SEQ ID NO: 1864318 - RNA, 12 nt, Human
cucagggucccu

SEQ ID NO: 1864319 - RNA, 23 nt, Human
cuaaaagguaugcaaucaaaucu

SEQ ID NO: 1864320 - RNA, 14 nt, Human
cucagggucccugg

SEQ ID NO: 1864321 - RNA, 18 nt, Human
cucaggucccugcagggc

SEQ ID NO: 1864322 - RNA, 17 nt, Human
cucaggucccugcaggg

SEQ ID NO: 1864323 - RNA, 15 nt, Human
cucaggucuguuuuc

SEQ ID NO: 1864324 - RNA, 23 nt, Human
cucagguggggucacucuggcag

SEQ ID NO: 1864325 - RNA, 22 nt, Human
cucagguggggucacucuggca

SEQ ID NO: 1864326 - RNA, 15 nt, Human
cucaggugucccugc

SEQ ID NO: 1864327 - RNA, 16 nt, Human
cucaggugucccugca

SEQ ID NO: 1864328 - RNA, 17 nt, Human
cucaggugucccugcac

SEQ ID NO: 1864329 - RNA, 18 nt, Human
cucaggugucccugcacu

SEQ ID NO: 1864330 - RNA, 14 nt, Human
cucaggugagaagc

SEQ ID NO: 1864331 - RNA, 19 nt, Human
cucaggugucccugcacuu

SEQ ID NO: 1864332 - RNA, 20 nt, Human
cucauaguaugguggcuggg

SEQ ID NO: 1864333 - RNA, 18 nt, Human
cucauaguaugguggcug

SEQ ID NO: 1864334 - RNA, 19 nt, Human
cucauaguaugguggcugg

SEQ ID NO: 1864335 - RNA, 17 nt, Human
cucauuaggauggcuag

SEQ ID NO: 1864336 - RNA, 18 nt, Human
cucauuaggauggcuagu

SEQ ID NO: 1864337 - RNA, 21 nt, Human
cucauuagcauuuugcuaaau

SEQ ID NO: 1864338 - RNA, 17 nt, Human
cucaucuccccaucauu

SEQ ID NO: 1864339 - RNA, 21 nt, Human
cucaucuagguaaauuacagu

SEQ ID NO: 1864340 - RNA, 16 nt, Human
cucauugaccugaggc

SEQ ID NO: 1864341 - RNA, 15 nt, Human
cucauugaccugagg

SEQ ID NO: 1864342 - RNA, 13 nt, Human
cucauugaccuga

SEQ ID NO: 1864343 - RNA, 23 nt, Human
cucauucuucuguacgucugaca

SEQ ID NO: 1864344 - RNA, 18 nt, Human
cucauuccaccuucccau

SEQ ID NO: 1864345 - RNA, 21 nt, Human
cucauuccaccuucccaugcc

SEQ ID NO: 1864346 - RNA, 13 nt, Human
cucauucuucugu

SEQ ID NO: 1864347 - RNA, 14 nt, Human
cucauucuucugua

SEQ ID NO: 1864348 - RNA, 12 nt, Human
cucuggagccca

SEQ ID NO: 1864349 - RNA, 14 nt, Human
cucuggacaggcau

SEQ ID NO: 1864350 - RNA, 14 nt, Human
cucuggaauuugaa

SEQ ID NO: 1864351 - RNA, 15 nt, Human
cucugcuuuggaaau

SEQ ID NO: 1864352 - RNA, 16 nt, Human
cucugccuccucuuca

SEQ ID NO: 1864353 - RNA, 15 nt, Human
cucugccuccucuuc

SEQ ID NO: 1864354 - RNA, 14 nt, Human
cucugccucugaca

SEQ ID NO: 1864355 - RNA, 16 nt, Human
cucugccucugacaca

SEQ ID NO: 1864356 - RNA, 23 nt, Human
cucugcccuccaagaccuucucc

SEQ ID NO: 1864357 - RNA, 16 nt, Human
cucugcccuccaagac

SEQ ID NO: 1864358 - RNA, 15 nt, Human
cucugcccuccaaga

SEQ ID NO: 1864359 - RNA, 14 nt, Human
cucugcccuccaag

SEQ ID NO: 1864360 - RNA, 11 nt, Human
cucugcccugc

SEQ ID NO: 1864361 - RNA, 23 nt, Human
cucugcccuaaugcgcaggcugg

SEQ ID NO: 1864362 - RNA, 12 nt, Human
cucugcccuugg

SEQ ID NO: 1864363 - RNA, 12 nt, Human
cucugcccugcg

SEQ ID NO: 1864364 - RNA, 14 nt, Human
cucugccuccucuu

SEQ ID NO: 1864365 - RNA, 15 nt, Human
cucugagccuuggga

SEQ ID NO: 1864366 - RNA, 16 nt, Human
cucugagcaaaugugg

SEQ ID NO: 1864367 - RNA, 21 nt, Human
cucucugcccuaaugcgcagg

SEQ ID NO: 1864368 - RNA, 13 nt, Human
cucucugcccuaa

SEQ ID NO: 1864369 - RNA, 12 nt, Human
cucucugcccua

SEQ ID NO: 1864370 - RNA, 20 nt, Human
cucugagacucgcgacaaug

SEQ ID NO: 1864371 - RNA, 22 nt, Human
cucugcaagaauugaagcagga

SEQ ID NO: 1864372 - RNA, 17 nt, Human
cucugaugaagaggagu

SEQ ID NO: 1864373 - RNA, 10 nt, Human
cucugcacaa

SEQ ID NO: 1864374 - RNA, 23 nt, Human
cucugcaggucccuaauaaagcu

SEQ ID NO: 1864375 - RNA, 23 nt, Human
cucugcauacucauuaggauggc

SEQ ID NO: 1864376 - RNA, 12 nt, Human
cucucucaggcc

SEQ ID NO: 1864377 - RNA, 16 nt, Human
cucucucacuccuuga

SEQ ID NO: 1864378 - RNA, 15 nt, Human
cucucucacuccuug

SEQ ID NO: 1864379 - RNA, 14 nt, Human
cucucucacuccuu

SEQ ID NO: 1864380 - RNA, 22 nt, Human
cucucugcaggucccuaauaaa

SEQ ID NO: 1864381 - RNA, 19 nt, Human
cucucugcaggucccuaau

SEQ ID NO: 1864382 - RNA, 17 nt, Human
cucucugcaggucccua

SEQ ID NO: 1864383 - RNA, 16 nt, Human
cucucugcaggucccu

SEQ ID NO: 1864384 - RNA, 14 nt, Human
cucucugcaggucc

SEQ ID NO: 1864385 - RNA, 13 nt, Human
cucucugcagguc

SEQ ID NO: 1864386 - RNA, 12 nt, Human
cucucugcaggu

SEQ ID NO: 1864387 - RNA, 22 nt, Human
cucuccuguaccucuugagccu

SEQ ID NO: 1864388 - RNA, 17 nt, Human
cucuccuguaccucuug

SEQ ID NO: 1864389 - RNA, 18 nt, Human
cucuccuguaccucuuga

SEQ ID NO: 1864390 - RNA, 13 nt, Human
cucuccuguaccu

SEQ ID NO: 1864391 - RNA, 14 nt, Human
cucuccuguaccuc

SEQ ID NO: 1864392 - RNA, 15 nt, Human
cucuccuguaccucu

SEQ ID NO: 1864393 - RNA, 13 nt, Human
cucuccccagcaa

SEQ ID NO: 1864394 - RNA, 18 nt, Human
cucucccaucacuucccu

SEQ ID NO: 1864395 - RNA, 14 nt, Human
cucucccaucacuu

SEQ ID NO: 1864396 - RNA, 20 nt, Human
cucucccaucacuucccuac

SEQ ID NO: 1864397 - RNA, 13 nt, Human
cucucccaucacu

SEQ ID NO: 1864398 - RNA, 13 nt, Human
cucuccagccccu

SEQ ID NO: 1864399 - RNA, 12 nt, Human
cucuccagcccc

SEQ ID NO: 1864400 - RNA, 21 nt, Human
cucuccauucccguggaacgu

SEQ ID NO: 1864401 - RNA, 16 nt, Human
cucuccacugccuucg

SEQ ID NO: 1864402 - RNA, 23 nt, Human
cucucaggccagcugcuugggcu

SEQ ID NO: 1864403 - RNA, 22 nt, Human
cucucaggccagcugcuugggc

SEQ ID NO: 1864404 - RNA, 19 nt, Human
cucuugguccugcugcagu

SEQ ID NO: 1864405 - RNA, 18 nt, Human
cucuugguccugcugcag

SEQ ID NO: 1864406 - RNA, 18 nt, Human
cucuucuggguuccuucc

SEQ ID NO: 1864407 - RNA, 18 nt, Human
cucuugaacuccugaccu

SEQ ID NO: 1864408 - RNA, 16 nt, Human
cucuugaccucaggug

SEQ ID NO: 1864409 - RNA, 13 nt, Human
cucuugaccucag

SEQ ID NO: 1864410 - RNA, 15 nt, Human
cucuugaccucaggu

SEQ ID NO: 1864411 - RNA, 17 nt, Human
cucuuuccaucuacccu

SEQ ID NO: 1864412 - RNA, 18 nt, Human
cucuuuggacacucacac

SEQ ID NO: 1864413 - RNA, 15 nt, Human
cucuuuggacacuca

SEQ ID NO: 1864414 - RNA, 23 nt, Human
cucuucaguuaagccuuuggaaa

SEQ ID NO: 1864415 - RNA, 20 nt, Human
cucuucaguuaagccuuugg

SEQ ID NO: 1864416 - RNA, 19 nt, Human
cucuucaguuaagccuuug

SEQ ID NO: 1864417 - RNA, 24 nt, Human
cucuuaaaacccaagugccuuagc

SEQ ID NO: 1864418 - RNA, 13 nt, Human
cucuuaaaaccca

SEQ ID NO: 1864419 - RNA, 19 nt, Human
cucuggcagcucagagagg

SEQ ID NO: 1864420 - RNA, 20 nt, Human
cucuggcagcucagagaggg

SEQ ID NO: 1864421 - RNA, 19 nt, Human
cucuguucugcacacagca

SEQ ID NO: 1864422 - RNA, 21 nt, Human
cucuguucugcacacagcacg

SEQ ID NO: 1864423 - RNA, 20 nt, Human
cucuguucugcacacagcac

SEQ ID NO: 1864424 - RNA, 18 nt, Human
cucuggcagcucagagag

SEQ ID NO: 1864425 - RNA, 17 nt, Human
cucuggcagcucagaga

SEQ ID NO: 1864426 - RNA, 15 nt, Human
cucuggagcccacug

SEQ ID NO: 1864427 - RNA, 16 nt, Human
cucuucuccuuucaca

SEQ ID NO: 1864428 - RNA, 15 nt, Human
cucuucuccuuucac

SEQ ID NO: 1864429 - RNA, 13 nt, Human
cucuucuccuuuc

SEQ ID NO: 1864430 - RNA, 21 nt, Human
cucuuccaggcugggagagcc

SEQ ID NO: 1864431 - RNA, 22 nt, Human
cucuuccaggcugggagagccu

SEQ ID NO: 1864432 - RNA, 23 nt, Human
cucuuccaggcugggagagccuu

SEQ ID NO: 1864433 - RNA, 14 nt, Human
cucuucuccacugg

SEQ ID NO: 1864434 - RNA, 17 nt, Human
cucuucuccacuggaug

SEQ ID NO: 1864435 - RNA, 15 nt, Human
cucuucuccacugga

SEQ ID NO: 1864436 - RNA, 19 nt, Human
cucuucuccacuggaugga

SEQ ID NO: 1864437 - RNA, 12 nt, Human
cucuucuccagg

SEQ ID NO: 1864438 - RNA, 21 nt, Human
cucuuuggucuacacugugcu

SEQ ID NO: 1864439 - RNA, 19 nt, Human
cucuuuggucuacacugug

SEQ ID NO: 1864440 - RNA, 18 nt, Human
cucuuugggccuggcucc

SEQ ID NO: 1864441 - RNA, 21 nt, Human
cugaaccuggguaacuaggga

SEQ ID NO: 1864442 - RNA, 21 nt, Human
cugaacuuggcgcugccccug

SEQ ID NO: 1864443 - RNA, 16 nt, Human
cugaacuuggcgcugc

SEQ ID NO: 1864444 - RNA, 15 nt, Human
cugaacuuggcgcug

SEQ ID NO: 1864445 - RNA, 21 nt, Human
cugaagacucauucuucugua

SEQ ID NO: 1864446 - RNA, 16 nt, Human
cugaauacagaggcaa

SEQ ID NO: 1864447 - RNA, 24 nt, Human
cugaagucuuuguacagacaacaa

SEQ ID NO: 1864448 - RNA, 22 nt, Human
cugaagucacugcacagugcau

SEQ ID NO: 1864449 - RNA, 16 nt, Human
cugaagucacugcaca

SEQ ID NO: 1864450 - RNA, 17 nt, Human
cugaagucacugcacag

SEQ ID NO: 1864451 - RNA, 14 nt, Human
cugaagucacacag

SEQ ID NO: 1864452 - RNA, 15 nt, Human
cugaagucacacagu

SEQ ID NO: 1864453 - RNA, 16 nt, Human
cugaagucacacagug

SEQ ID NO: 1864454 - RNA, 19 nt, Human
cugacagacacaggcccgg

SEQ ID NO: 1864455 - RNA, 11 nt, Human
cugacaggcaa

SEQ ID NO: 1864456 - RNA, 19 nt, Human
cugacagacagcccuccau

SEQ ID NO: 1864457 - RNA, 17 nt, Human
cugacagacagcccucc

SEQ ID NO: 1864458 - RNA, 21 nt, Human
cugacagacacaggcccggcu

SEQ ID NO: 1864459 - RNA, 17 nt, Human
cugacauuguuggccaa

SEQ ID NO: 1864460 - RNA, 20 nt, Human
cugacaggcaaugcuggcug

SEQ ID NO: 1864461 - RNA, 16 nt, Human
cugacaggcaaugcug

SEQ ID NO: 1864462 - RNA, 17 nt, Human
cugacaggcaaugcugg

SEQ ID NO: 1864463 - RNA, 18 nt, Human
cugacaggcaaugcuggc

SEQ ID NO: 1864464 - RNA, 19 nt, Human
cugacaggcaaugcuggcu

SEQ ID NO: 1864465 - RNA, 11 nt, Human
cugacccacug

SEQ ID NO: 1864466 - RNA, 21 nt, Human
cugacauuguuggccaaagcc

SEQ ID NO: 1864467 - RNA, 12 nt, Human
cuuaacuucaca

SEQ ID NO: 1864468 - RNA, 14 nt, Human
cuuaacuucacaua

SEQ ID NO: 1864469 - RNA, 15 nt, Human
cuuaacuucacauau

SEQ ID NO: 1864470 - RNA, 16 nt, Human
cuuaacuucacauauu

SEQ ID NO: 1864471 - RNA, 17 nt, Human
cuuaacuucacauauug

SEQ ID NO: 1864472 - RNA, 22 nt, Human
cuuaacuucacauauugauuuc

SEQ ID NO: 1864473 - RNA, 18 nt, Human
cuuaaugccacuaaauug

SEQ ID NO: 1864474 - RNA, 14 nt, Human
cuuaaucuaaaugg

SEQ ID NO: 1864475 - RNA, 16 nt, Human
cuuaaucuaaauggaa

SEQ ID NO: 1864476 - RNA, 16 nt, Human
cuuaaguuuauacucu

SEQ ID NO: 1864477 - RNA, 23 nt, Human
cuguuuguuucugaaagggacgc

SEQ ID NO: 1864478 - RNA, 21 nt, Human
cuguuuguuucugaaagggac

SEQ ID NO: 1864479 - RNA, 21 nt, Human
cuguuuuauuuuaauucaguu

SEQ ID NO: 1864480 - RNA, 14 nt, Human
cuguuuucucuuga

SEQ ID NO: 1864481 - RNA, 13 nt, Human
cuguuuucucuug

SEQ ID NO: 1864482 - RNA, 17 nt, Human
cuguuuucucuugagag

SEQ ID NO: 1864483 - RNA, 18 nt, Human
cuguuuguuucugaaagg

SEQ ID NO: 1864484 - RNA, 17 nt, Human
cugguugaugccuguga

SEQ ID NO: 1864485 - RNA, 12 nt, Human
cuguuuagauaa

SEQ ID NO: 1864486 - RNA, 18 nt, Human
cuuagacagucccugcca

SEQ ID NO: 1864487 - RNA, 17 nt, Human
cuuagacagucccugcc

SEQ ID NO: 1864488 - RNA, 19 nt, Human
cuuagacagucccugccaa

SEQ ID NO: 1864489 - RNA, 11 nt, Human
cuuagacaguc

SEQ ID NO: 1864490 - RNA, 15 nt, Human
cuuagaaccuuucuu

SEQ ID NO: 1864491 - RNA, 17 nt, Human
cuuagaaauugcauuuc

SEQ ID NO: 1864492 - RNA, 16 nt, Human
cuuagacagucccugc

SEQ ID NO: 1864493 - RNA, 15 nt, Human
cuuagacagucccug

SEQ ID NO: 1864494 - RNA, 14 nt, Human
cuuagacagucccu

SEQ ID NO: 1864495 - RNA, 15 nt, Human
cuuagaagucacaca

SEQ ID NO: 1864496 - RNA, 14 nt, Human
cuuacuuaguguua

SEQ ID NO: 1864497 - RNA, 16 nt, Human
cuuacuguacaugaaa

SEQ ID NO: 1864498 - RNA, 19 nt, Human
cuuacuaguuucccuugca

SEQ ID NO: 1864499 - RNA, 15 nt, Human
cuuacgugaguccug

SEQ ID NO: 1864500 - RNA, 19 nt, Human
cuuauaggaauugacccac

SEQ ID NO: 1864501 - RNA, 15 nt, Human
cuuauacauuugaua

SEQ ID NO: 1864502 - RNA, 14 nt, Human
cuuauaauuuaaaa

SEQ ID NO: 1864503 - RNA, 17 nt, Human
cuuagguuggcaaaaag

SEQ ID NO: 1864504 - RNA, 20 nt, Human
cuuaggugauccacucgccu

SEQ ID NO: 1864505 - RNA, 13 nt, Human
cuuauaauuuaaa

SEQ ID NO: 1864506 - RNA, 15 nt, Human
cuuauuuaaugaaag

SEQ ID NO: 1864507 - RNA, 14 nt, Human
cuuaucaaaggaca

SEQ ID NO: 1864508 - RNA, 16 nt, Human
cuuaucaaaggacacc

SEQ ID NO: 1864509 - RNA, 18 nt, Human
cuucccgcucagcccucc

SEQ ID NO: 1864510 - RNA, 17 nt, Human
cuucccgcucagcccuc

SEQ ID NO: 1864511 - RNA, 16 nt, Human
cuucccgcucagcccu

SEQ ID NO: 1864512 - RNA, 15 nt, Human
cuucccgcucagccc

SEQ ID NO: 1864513 - RNA, 15 nt, Human
cuuccagugaggcuc

SEQ ID NO: 1864514 - RNA, 14 nt, Human
cuuccagugaggcu

SEQ ID NO: 1864515 - RNA, 24 nt, Human
cuuccaggggugggacacccugug

SEQ ID NO: 1864516 - RNA, 22 nt, Human
cuuccaggggugggacacccug

SEQ ID NO: 1864517 - RNA, 11 nt, Human
cuucagcugac

SEQ ID NO: 1864518 - RNA, 14 nt, Human
cuucaggcucuucu

SEQ ID NO: 1864519 - RNA, 18 nt, Human
cuucaggcucuucuccuu

SEQ ID NO: 1864520 - RNA, 17 nt, Human
cuucaggcucuucuccu

SEQ ID NO: 1864521 - RNA, 16 nt, Human
cuucaggcucuucucc

SEQ ID NO: 1864522 - RNA, 15 nt, Human
cuucaggcucuucuc

SEQ ID NO: 1864523 - RNA, 22 nt, Human
cuuccacaagagcccaggccuc

SEQ ID NO: 1864524 - RNA, 23 nt, Human
cuuccacaagagcccaggccucc

SEQ ID NO: 1864525 - RNA, 14 nt, Human
cuucauuuggagau

SEQ ID NO: 1864526 - RNA, 13 nt, Human
cuucauuuggaga

SEQ ID NO: 1864527 - RNA, 12 nt, Human
cuucagugccuu

SEQ ID NO: 1864528 - RNA, 11 nt, Human
cuucagugccu

SEQ ID NO: 1864529 - RNA, 14 nt, Human
cuucagugccuuau

SEQ ID NO: 1864530 - RNA, 13 nt, Human
cuucagugccuua

SEQ ID NO: 1864531 - RNA, 18 nt, Human
cuucauuuccugugucuu

SEQ ID NO: 1864532 - RNA, 17 nt, Human
cuucuccaggcuguauc

SEQ ID NO: 1864533 - RNA, 16 nt, Human
cuucuccacccugcuc

SEQ ID NO: 1864534 - RNA, 14 nt, Human
cuucuccaggcugu

SEQ ID NO: 1864535 - RNA, 14 nt, Human
cuucuccacccugc

SEQ ID NO: 1864536 - RNA, 15 nt, Human
cuucuccacccugcu

SEQ ID NO: 1864537 - RNA, 17 nt, Human
cuucuccuuucacaacc

SEQ ID NO: 1864538 - RNA, 14 nt, Human
cuucuccuuucaca

SEQ ID NO: 1864539 - RNA, 22 nt, Human
cuucuccuuucacaaccuucug

SEQ ID NO: 1864540 - RNA, 20 nt, Human
cuucuccuuucacaaccuuc

SEQ ID NO: 1864541 - RNA, 22 nt, Human
cuucuccuucaccuuugucccc

SEQ ID NO: 1864542 - RNA, 18 nt, Human
cuucugcuucagccuccc

SEQ ID NO: 1864543 - RNA, 16 nt, Human
cuucugcuucagccuc

SEQ ID NO: 1864544 - RNA, 17 nt, Human
cuucugcuucagccucc

SEQ ID NO: 1864545 - RNA, 20 nt, Human
cuucugccauuucugagauc

SEQ ID NO: 1864546 - RNA, 21 nt, Human
cuucugccauauucuguuggc

SEQ ID NO: 1864547 - RNA, 15 nt, Human
cuucugccauauucu

SEQ ID NO: 1864548 - RNA, 17 nt, Human
cuucugccauauucugu

SEQ ID NO: 1864549 - RNA, 21 nt, Human
cuucgggaggucgaggcagga

SEQ ID NO: 1864550 - RNA, 20 nt, Human
cuucgggaggucgaggcagg

SEQ ID NO: 1864551 - RNA, 18 nt, Human
cuucggccuccauccuga

SEQ ID NO: 1864552 - RNA, 19 nt, Human
cuucggccuccauccugag

SEQ ID NO: 1864553 - RNA, 17 nt, Human
cuucggccuccauccug

SEQ ID NO: 1864554 - RNA, 16 nt, Human
cuucgcuccugugucu

SEQ ID NO: 1864555 - RNA, 14 nt, Human
cuucgcuccugugu

SEQ ID NO: 1864556 - RNA, 15 nt, Human
cuucgcuccuguguc

SEQ ID NO: 1864557 - RNA, 13 nt, Human
cuucgcuccugug

SEQ ID NO: 1864558 - RNA, 17 nt, Human
cuuugacaaagguaaau

SEQ ID NO: 1864559 - RNA, 19 nt, Human
cuuucuuuuuuuuuuuuga

SEQ ID NO: 1864560 - RNA, 16 nt, Human
cuuucuuccucugcug

SEQ ID NO: 1864561 - RNA, 15 nt, Human
cuuucugcagaaaca

SEQ ID NO: 1864562 - RNA, 16 nt, Human
cuuuccucuuuggucu

SEQ ID NO: 1864563 - RNA, 13 nt, Human
cuuucugaaauaa

SEQ ID NO: 1864564 - RNA, 19 nt, Human
cuuuccucaaaacuucaga

SEQ ID NO: 1864565 - RNA, 23 nt, Human
cuuugugaggaagccgcuggggc

SEQ ID NO: 1864566 - RNA, 17 nt, Human
cuuugggccuggcuccc

SEQ ID NO: 1864567 - RNA, 23 nt, Human
cuuugggaggccaaggugggagg

SEQ ID NO: 1864568 - RNA, 21 nt, Human
cuuuguucuggcucuuccagg

SEQ ID NO: 1864569 - RNA, 16 nt, Human
cuuuguucuggcucuu

SEQ ID NO: 1864570 - RNA, 19 nt, Human
cuuugugaggaagccgcug

SEQ ID NO: 1864571 - RNA, 12 nt, Human
cuuugugauuuu

SEQ ID NO: 1864572 - RNA, 13 nt, Human
cuuuguggcuucc

SEQ ID NO: 1864573 - RNA, 19 nt, Human
cuuugacaaagguaaauca

SEQ ID NO: 1864574 - RNA, 14 nt, Human
cuuugcuugaaaga

SEQ ID NO: 1864575 - RNA, 23 nt, Human
cuuuggaaagacuuuuccaaccc

SEQ ID NO: 1864576 - RNA, 12 nt, Human
cuuuggaaagac

SEQ ID NO: 1864577 - RNA, 22 nt, Human
cuuuuguucuugguuuguaaau

SEQ ID NO: 1864578 - RNA, 15 nt, Human
cuuuucuguuugcua

SEQ ID NO: 1864579 - RNA, 21 nt, Human
cuuuguuuguugucagcugaa

SEQ ID NO: 1864580 - RNA, 17 nt, Human
cuuuguuuuacugucuu

SEQ ID NO: 1864581 - RNA, 16 nt, Human
cuuuuuuagaguugau

SEQ ID NO: 1864582 - RNA, 21 nt, Human
gaaaacacuguucucugcccu

SEQ ID NO: 1864583 - RNA, 20 nt, Human
gaaaacacuguucucugccc

SEQ ID NO: 1864584 - RNA, 16 nt, Human
gaaaacaugcuacaca

SEQ ID NO: 1864585 - RNA, 18 nt, Human
gaaaacaugcuacacacu

SEQ ID NO: 1864586 - RNA, 19 nt, Human
gaaaacacuguucucugcc

SEQ ID NO: 1864587 - RNA, 14 nt, Human
gaaaacguggcugc

SEQ ID NO: 1864588 - RNA, 19 nt, Human
gaaaacaugcuacacacug

SEQ ID NO: 1864589 - RNA, 22 nt, Human
gaaaagucaaggguaggguggg

SEQ ID NO: 1864590 - RNA, 19 nt, Human
gaaaauaacaauaaaagac

SEQ ID NO: 1864591 - RNA, 20 nt, Human
cuugggccacugugaagaga

SEQ ID NO: 1864592 - RNA, 18 nt, Human
cuugggccacugugaaga

SEQ ID NO: 1864593 - RNA, 22 nt, Human
cuuggagccaauggagacuguc

SEQ ID NO: 1864594 - RNA, 20 nt, Human
cuugguuuguaaauuaacuu

SEQ ID NO: 1864595 - RNA, 14 nt, Human
cuugguuuguaaau

SEQ ID NO: 1864596 - RNA, 15 nt, Human
cuugguuuguaaauu

SEQ ID NO: 1864597 - RNA, 15 nt, Human
cuuggggccuaugca

SEQ ID NO: 1864598 - RNA, 15 nt, Human
cuuguggucccaccc

SEQ ID NO: 1864599 - RNA, 19 nt, Human
cuuguggucccaccccaca

SEQ ID NO: 1864600 - RNA, 16 nt, Human
cuuguggucccacccc

SEQ ID NO: 1864601 - RNA, 16 nt, Human
cuuguuaagauaguua

SEQ ID NO: 1864602 - RNA, 19 nt, Human
cuuuaccuuuuuuauacau

SEQ ID NO: 1864603 - RNA, 20 nt, Human
cuuuaccuuuuuuauacaua

SEQ ID NO: 1864604 - RNA, 17 nt, Human
cuuuaccuuuuuuauac

SEQ ID NO: 1864605 - RNA, 21 nt, Human
cuuuaaaaagcuccaaaugca

SEQ ID NO: 1864606 - RNA, 22 nt, Human
cuuuaaaaaauuaaucugggcc

SEQ ID NO: 1864607 - RNA, 19 nt, Human
cuugaguugauucagcucu

SEQ ID NO: 1864608 - RNA, 18 nt, Human
cuugaguugauucagcuc

SEQ ID NO: 1864609 - RNA, 20 nt, Human
cuugaguugauucagcucug

SEQ ID NO: 1864610 - RNA, 21 nt, Human
cuugaguugauucagcucugc

SEQ ID NO: 1864611 - RNA, 15 nt, Human
cuugcaauggcagcc

SEQ ID NO: 1864612 - RNA, 16 nt, Human
cuugcaauggcagccu

SEQ ID NO: 1864613 - RNA, 17 nt, Human
cuugcaauggcagccuu

SEQ ID NO: 1864614 - RNA, 18 nt, Human
cuugcaauggcagccuug

SEQ ID NO: 1864615 - RNA, 21 nt, Human
cuugcagacucuacagaggcc

SEQ ID NO: 1864616 - RNA, 20 nt, Human
cuugcagacucuacagaggc

SEQ ID NO: 1864617 - RNA, 17 nt, Human
cuucuggcacuuggaga

SEQ ID NO: 1864618 - RNA, 15 nt, Human
cuugagccugggagg

SEQ ID NO: 1864619 - RNA, 12 nt, Human
cuugagccuggg

SEQ ID NO: 1864620 - RNA, 15 nt, Human
cuugaggguugggcu

SEQ ID NO: 1864621 - RNA, 17 nt, Human
cuugaggguugggcugg

SEQ ID NO: 1864622 - RNA, 18 nt, Human
cuugcccuggugccucac

SEQ ID NO: 1864623 - RNA, 14 nt, Human
cuugcaugaggcua

SEQ ID NO: 1864624 - RNA, 13 nt, Human
cuugcaugaggcu

SEQ ID NO: 1864625 - RNA, 17 nt, Human
cuugcaugaggcuagug

SEQ ID NO: 1864626 - RNA, 18 nt, Human
cuugcucuugaugccugg

SEQ ID NO: 1864627 - RNA, 17 nt, Human
cuugcucuugaugccug

SEQ ID NO: 1864628 - RNA, 19 nt, Human
cuugcucuugaugccuggc

SEQ ID NO: 1864629 - RNA, 22 nt, Human
cuugcucugcugacagacacag

SEQ ID NO: 1864630 - RNA, 20 nt, Human
cuuggaagcuccgcuuucua

SEQ ID NO: 1864631 - RNA, 14 nt, Human
cuuggaagcuccgc

SEQ ID NO: 1864632 - RNA, 20 nt, Human
cuugcuugauuguauggugg

SEQ ID NO: 1864633 - RNA, 18 nt, Human
gaauuucccaaagcagug

SEQ ID NO: 1864634 - RNA, 16 nt, Human
gaauuucccaaagcag

SEQ ID NO: 1864635 - RNA, 22 nt, Human
gaauuucccaaagcagugcaug

SEQ ID NO: 1864636 - RNA, 22 nt, Human
gacacgaauauugcugauggug

SEQ ID NO: 1864637 - RNA, 16 nt, Human
gacacuagaagauuuu

SEQ ID NO: 1864638 - RNA, 17 nt, Human
gacagacacaggcccgg

SEQ ID NO: 1864639 - RNA, 20 nt, Human
gacagacacaggcccggcuc

SEQ ID NO: 1864640 - RNA, 22 nt, Human
gacagacacaggcccggcucca

SEQ ID NO: 1864641 - RNA, 16 nt, Human
gacagacagcccucca

SEQ ID NO: 1864642 - RNA, 20 nt, Human
gacagagcuacacaggggaa

SEQ ID NO: 1864643 - RNA, 12 nt, Human
gacagaggcagc

SEQ ID NO: 1864644 - RNA, 13 nt, Human
gacagagggggug

SEQ ID NO: 1864645 - RNA, 23 nt, Human
gacagaggcagccccauucugcc

SEQ ID NO: 1864646 - RNA, 19 nt, Human
gacagagugagacucuguc

SEQ ID NO: 1864647 - RNA, 21 nt, Human
gacagagucucacuguugccc

SEQ ID NO: 1864648 - RNA, 16 nt, Human
gacagagugagacucu

SEQ ID NO: 1864649 - RNA, 16 nt, Human
gacaucaacugcauca

SEQ ID NO: 1864650 - RNA, 23 nt, Human
gacaucaacugcaucaagaugug

SEQ ID NO: 1864651 - RNA, 22 nt, Human
gacagggcauggccagguggcc

SEQ ID NO: 1864652 - RNA, 20 nt, Human
gacagggcauggccaggugg

SEQ ID NO: 1864653 - RNA, 15 nt, Human
gacagggcauggcca

SEQ ID NO: 1864654 - RNA, 14 nt, Human
gacagggcauggcc

SEQ ID NO: 1864655 - RNA, 22 nt, Human
gacaggcauguucucugaggac

SEQ ID NO: 1864656 - RNA, 24 nt, Human
gacaggcaaugcuggcuguuggcu

SEQ ID NO: 1864657 - RNA, 23 nt, Human
gacaggcaaugcuggcuguuggc

SEQ ID NO: 1864658 - RNA, 20 nt, Human
gacaggcauguucucugagg

SEQ ID NO: 1864659 - RNA, 21 nt, Human
gacaggcauguucucugagga

SEQ ID NO: 1864660 - RNA, 20 nt, Human
gacaggcaagcaccuccugc

SEQ ID NO: 1864661 - RNA, 21 nt, Human
gacaggcaagcaccuccugcc

SEQ ID NO: 1864662 - RNA, 18 nt, Human
gacaggcaaugcuggcug

SEQ ID NO: 1864663 - RNA, 19 nt, Human
gacaggcaaugcuggcugu

SEQ ID NO: 1864664 - RNA, 13 nt, Human
gacaggcaagcac

SEQ ID NO: 1864665 - RNA, 17 nt, Human
gacaggcaagcaccucc

SEQ ID NO: 1864666 - RNA, 18 nt, Human
gacaggcaagcaccuccu

SEQ ID NO: 1864667 - RNA, 18 nt, Human
gaccacaaaacuuuucua

SEQ ID NO: 1864668 - RNA, 17 nt, Human
gaccaauauuguacagu

SEQ ID NO: 1864669 - RNA, 18 nt, Human
gaccaauauuguacaguu

SEQ ID NO: 1864670 - RNA, 19 nt, Human
gaccaauauuguacaguuu

SEQ ID NO: 1864671 - RNA, 21 nt, Human
gaccaauauuguacaguuuuu

SEQ ID NO: 1864672 - RNA, 22 nt, Human
gaccacacuccagcugggauca

SEQ ID NO: 1864673 - RNA, 16 nt, Human
gaccacacuccagcug

SEQ ID NO: 1864674 - RNA, 14 nt, Human
gaccacacuccagc

SEQ ID NO: 1864675 - RNA, 21 nt, Human
gaccagcaccaucucuccucc

SEQ ID NO: 1864676 - RNA, 20 nt, Human
gaccagcaccaucucuccuc

SEQ ID NO: 1864677 - RNA, 21 nt, Human
gaccagagcugccaccugccu

SEQ ID NO: 1864678 - RNA, 23 nt, Human
gaccagacaccuugacagggcac

SEQ ID NO: 1864679 - RNA, 24 nt, Human
gaccagacaccuugacagggcaca

SEQ ID NO: 1864680 - RNA, 16 nt, Human
gaccacugcagaagac

SEQ ID NO: 1864681 - RNA, 18 nt, Human
gaccacugcagaagacag

SEQ ID NO: 1864682 - RNA, 22 nt, Human
gaccagacaccuugacagggca

SEQ ID NO: 1864683 - RNA, 21 nt, Human
gaccagacaccuugacagggc

SEQ ID NO: 1864684 - RNA, 16 nt, Human
gaccacguuucuaaag

SEQ ID NO: 1864685 - RNA, 22 nt, Human
gacccugcccugugggccccca

SEQ ID NO: 1864686 - RNA, 20 nt, Human
gacccugcccugugggcccc

SEQ ID NO: 1864687 - RNA, 17 nt, Human
gacccugcccugugggc

SEQ ID NO: 1864688 - RNA, 18 nt, Human
gacccugaggcccagagg

SEQ ID NO: 1864689 - RNA, 16 nt, Human
gacccugaggcccaga

SEQ ID NO: 1864690 - RNA, 12 nt, Human
gacccugaggcc

SEQ ID NO: 1864691 - RNA, 11 nt, Human
gacccugaggc

SEQ ID NO: 1864692 - RNA, 20 nt, Human
gacccaugcugcccugugag

SEQ ID NO: 1864693 - RNA, 19 nt, Human
gacccaugcugcccuguga

SEQ ID NO: 1864694 - RNA, 18 nt, Human
gacccaugcugcccugug

SEQ ID NO: 1864695 - RNA, 13 nt, Human
gacccaugcugcc

SEQ ID NO: 1864696 - RNA, 20 nt, Human
gacccaaaaggcagaagcaa

SEQ ID NO: 1864697 - RNA, 19 nt, Human
gacccacuggacucaccuc

SEQ ID NO: 1864698 - RNA, 18 nt, Human
gacccaaaaggcagaagc

SEQ ID NO: 1864699 - RNA, 19 nt, Human
gacccaaaaggcagaagca

SEQ ID NO: 1864700 - RNA, 21 nt, Human
gacugaccaauauuguacagu

SEQ ID NO: 1864701 - RNA, 22 nt, Human
gacugaccaauauuguacaguu

SEQ ID NO: 1864702 - RNA, 11 nt, Human
gacugagaaau

SEQ ID NO: 1864703 - RNA, 21 nt, Human
gacucuacagaggccaugggc

SEQ ID NO: 1864704 - RNA, 16 nt, Human
gacugaauuucuuuug

SEQ ID NO: 1864705 - RNA, 15 nt, Human
gacucuacagaggcc

SEQ ID NO: 1864706 - RNA, 21 nt, Human
gacuccugcaggcagccaggc

SEQ ID NO: 1864707 - RNA, 20 nt, Human
gacuccugcaggcagccagg

SEQ ID NO: 1864708 - RNA, 19 nt, Human
gacuccugcaggcagccag

SEQ ID NO: 1864709 - RNA, 18 nt, Human
gacuccugcaggcagcca

SEQ ID NO: 1864710 - RNA, 18 nt, Human
gacuacaggcacccacca

SEQ ID NO: 1864711 - RNA, 13 nt, Human
gacuacaggcacc

SEQ ID NO: 1864712 - RNA, 15 nt, Human
gacuacaggcaccca

SEQ ID NO: 1864713 - RNA, 16 nt, Human
gacugaggggagggga

SEQ ID NO: 1864714 - RNA, 18 nt, Human
gacugaguacguugugca

SEQ ID NO: 1864715 - RNA, 13 nt, Human
gacugagaaauuu

SEQ ID NO: 1864716 - RNA, 20 nt, Human
gacugccagucccccugccc

SEQ ID NO: 1864717 - RNA, 15 nt, Human
gacuuacuguacaug

SEQ ID NO: 1864718 - RNA, 16 nt, Human
gacuuacuguacauga

SEQ ID NO: 1864719 - RNA, 12 nt, Human
gacuuacuguac

SEQ ID NO: 1864720 - RNA, 18 nt, Human
gacuuacuguacaugaaa

SEQ ID NO: 1864721 - RNA, 23 nt, Human
gacuuacuguacaugaaaacaca

SEQ ID NO: 1864722 - RNA, 15 nt, Human
gacuuagcugggaga

SEQ ID NO: 1864723 - RNA, 16 nt, Human
gacuuauuuauauaaa

SEQ ID NO: 1864724 - RNA, 20 nt, Human
gacuucaucccucuggggcu

SEQ ID NO: 1864725 - RNA, 12 nt, Human
gacuucaucccu

SEQ ID NO: 1864726 - RNA, 14 nt, Human
gacuucagcucugu

SEQ ID NO: 1864727 - RNA, 23 nt, Human
gacuggccaagguuuggggaaga

SEQ ID NO: 1864728 - RNA, 15 nt, Human
gacccuugugguccc

SEQ ID NO: 1864729 - RNA, 23 nt, Human
gacccuugccgucuaccugaggg

SEQ ID NO: 1864730 - RNA, 20 nt, Human
gacccuugccgucuaccuga

SEQ ID NO: 1864731 - RNA, 19 nt, Human
gacccuugccgucuaccug

SEQ ID NO: 1864732 - RNA, 19 nt, Human
gaccuguggccaaguucuu

SEQ ID NO: 1864733 - RNA, 16 nt, Human
gaccuucuccuucacc

SEQ ID NO: 1864734 - RNA, 15 nt, Human
gaccuucuccuucac

SEQ ID NO: 1864735 - RNA, 14 nt, Human
gaccuucuccuuca

SEQ ID NO: 1864736 - RNA, 21 nt, Human
gaccuucuccuucaccuuugu

SEQ ID NO: 1864737 - RNA, 20 nt, Human
gaccuucuccuucaccuuug

SEQ ID NO: 1864738 - RNA, 14 nt, Human
gaccuugaacuggg

SEQ ID NO: 1864739 - RNA, 16 nt, Human
gacgugauuuugcugu

SEQ ID NO: 1864740 - RNA, 17 nt, Human
gacgugauuuugcugua

SEQ ID NO: 1864741 - RNA, 20 nt, Human
gaccuuucaauaggaaaaac

SEQ ID NO: 1864742 - RNA, 19 nt, Human
gaccuuucaauaggaaaaa

SEQ ID NO: 1864743 - RNA, 11 nt, Human
gaccuuucaau

SEQ ID NO: 1864744 - RNA, 22 nt, Human
gaccuuuaagagaaaugagcug

SEQ ID NO: 1864745 - RNA, 22 nt, Human
gacgcugugcugcccugcccac

SEQ ID NO: 1864746 - RNA, 21 nt, Human
gacgcugugcugcccugccca

SEQ ID NO: 1864747 - RNA, 13 nt, Human
gacggagucccac

SEQ ID NO: 1864748 - RNA, 23 nt, Human
gacuaacuugucuuuggacccug

SEQ ID NO: 1864749 - RNA, 16 nt, Human
gacuaacuugucuuug

SEQ ID NO: 1864750 - RNA, 15 nt, Human
gacguguuaugacuc

SEQ ID NO: 1864751 - RNA, 14 nt, Human
gacguguuaugacu

SEQ ID NO: 1864752 - RNA, 11 nt, Human
gacguguuaug

SEQ ID NO: 1864753 - RNA, 16 nt, Human
gaacagugauuaccag

SEQ ID NO: 1864754 - RNA, 20 nt, Human
gaacagugauuaccagggac

SEQ ID NO: 1864755 - RNA, 15 nt, Human
gaacacucugagacu

SEQ ID NO: 1864756 - RNA, 14 nt, Human
gaacacucugagac

SEQ ID NO: 1864757 - RNA, 13 nt, Human
gaacacucugaga

SEQ ID NO: 1864758 - RNA, 17 nt, Human
gaaauuuauaaacuuuu

SEQ ID NO: 1864759 - RNA, 16 nt, Human
gaaauuuauaaacuuu

SEQ ID NO: 1864760 - RNA, 18 nt, Human
gaaauuguauuacaaauc

SEQ ID NO: 1864761 - RNA, 23 nt, Human
gaaaauaaaucaaugcuauaacu

SEQ ID NO: 1864762 - RNA, 16 nt, Human
gaaauuguauuacaaa

SEQ ID NO: 1864763 - RNA, 14 nt, Human
gaacaucccuccug

SEQ ID NO: 1864764 - RNA, 13 nt, Human
gaacauugcaaua

SEQ ID NO: 1864765 - RNA, 15 nt, Human
gaacauugcaauaga

SEQ ID NO: 1864766 - RNA, 17 nt, Human
gaacauugcaauagaaa

SEQ ID NO: 1864767 - RNA, 21 nt, Human
gaaccuuuugagugccuuaca

SEQ ID NO: 1864768 - RNA, 19 nt, Human
gaaccuuuugagugccuua

SEQ ID NO: 1864769 - RNA, 18 nt, Human
gaaccuuuugagugccuu

SEQ ID NO: 1864770 - RNA, 14 nt, Human
gaacuacugaggau

SEQ ID NO: 1864771 - RNA, 12 nt, Human
gaacguuuuucc

SEQ ID NO: 1864772 - RNA, 15 nt, Human
gaacguuuuuccugu

SEQ ID NO: 1864773 - RNA, 22 nt, Human
gaaccuuuugagugccuuacac

SEQ ID NO: 1864774 - RNA, 13 nt, Human
gaagacuuuggaa

SEQ ID NO: 1864775 - RNA, 11 nt, Human
gaagacuuugg

SEQ ID NO: 1864776 - RNA, 23 nt, Human
gaacuuugaccucugcagcaaua

SEQ ID NO: 1864777 - RNA, 21 nt, Human
gaacucaucuagguaaauuac

SEQ ID NO: 1864778 - RNA, 20 nt, Human
gaacucaucuagguaaauua

SEQ ID NO: 1864779 - RNA, 22 nt, Human
gaacucaucuagguaaauuaca

SEQ ID NO: 1864780 - RNA, 19 nt, Human
gaagagaaugcacaaacag

SEQ ID NO: 1864781 - RNA, 20 nt, Human
gaagacuuuucuuucagcca

SEQ ID NO: 1864782 - RNA, 17 nt, Human
gaagacuuuggaaagag

SEQ ID NO: 1864783 - RNA, 14 nt, Human
gaagacuuuggaaa

SEQ ID NO: 1864784 - RNA, 23 nt, Human
gaagcccuucuaccuuccugcaa

SEQ ID NO: 1864785 - RNA, 19 nt, Human
gaagcccaggaaaggcucc

SEQ ID NO: 1864786 - RNA, 16 nt, Human
gaagcccaggaaaggc

SEQ ID NO: 1864787 - RNA, 15 nt, Human
gaagcccaggaaagg

SEQ ID NO: 1864788 - RNA, 13 nt, Human
gaagcccaggaaa

SEQ ID NO: 1864789 - RNA, 22 nt, Human
gaagccagcaggcucucaggcc

SEQ ID NO: 1864790 - RNA, 21 nt, Human
gaagccagcaggcucucaggc

SEQ ID NO: 1864791 - RNA, 20 nt, Human
gaagccagcaggcucucagg

SEQ ID NO: 1864792 - RNA, 17 nt, Human
gaagcauuuacuuugug

SEQ ID NO: 1864793 - RNA, 18 nt, Human
gaagcauuuacuuugugu

SEQ ID NO: 1864794 - RNA, 20 nt, Human
gaagauaauauuaaggaaga

SEQ ID NO: 1864795 - RNA, 18 nt, Human
gaagauguagaggagaaa

SEQ ID NO: 1864796 - RNA, 19 nt, Human
gaagggggcugggacaugg

SEQ ID NO: 1864797 - RNA, 16 nt, Human
gaagggggcugggaca

SEQ ID NO: 1864798 - RNA, 22 nt, Human
gaaguaauaugcacacauuuuu

SEQ ID NO: 1864799 - RNA, 18 nt, Human
gaaguacuauaauuuacc

SEQ ID NO: 1864800 - RNA, 15 nt, Human
gaaguacuggagaaa

SEQ ID NO: 1864801 - RNA, 20 nt, Human
gaaguuucugccgcagcccu

SEQ ID NO: 1864802 - RNA, 15 nt, Human
gaagucuuagaugua

SEQ ID NO: 1864803 - RNA, 21 nt, Human
gaaguuucugccgcagcccug

SEQ ID NO: 1864804 - RNA, 18 nt, Human
gaagucuuagauguauau

SEQ ID NO: 1864805 - RNA, 16 nt, Human
gaaguauccuucagcc

SEQ ID NO: 1864806 - RNA, 14 nt, Human
gaaguauccuucag

SEQ ID NO: 1864807 - RNA, 23 nt, Human
gaaguaguggagccccugcucug

SEQ ID NO: 1864808 - RNA, 19 nt, Human
gaauaacauguaauuaagu

SEQ ID NO: 1864809 - RNA, 18 nt, Human
gaauaacauguaauuaag

SEQ ID NO: 1864810 - RNA, 20 nt, Human
gaaguuugagaucagccugg

SEQ ID NO: 1864811 - RNA, 17 nt, Human
gaauaauacaguaucuc

SEQ ID NO: 1864812 - RNA, 21 nt, Human
gaauacagaggcaacugcauu

SEQ ID NO: 1864813 - RNA, 15 nt, Human
gaauaccuguccccc

SEQ ID NO: 1864814 - RNA, 13 nt, Human
gaauaccuguccc

SEQ ID NO: 1864815 - RNA, 23 nt, Human
gaauagcugggacuacaggugug

SEQ ID NO: 1864816 - RNA, 22 nt, Human
gaauagcugggacuacaggugu

SEQ ID NO: 1864817 - RNA, 23 nt, Human
gaauuguguuuauaauuuuaaau

SEQ ID NO: 1864818 - RNA, 15 nt, Human
gaauuguguuuauaa

SEQ ID NO: 1864819 - RNA, 22 nt, Human
gaauuguaaggaaugauuaauu

SEQ ID NO: 1864820 - RNA, 15 nt, Human
gaauuucccaaagca

SEQ ID NO: 1864821 - RNA, 14 nt, Human
gaauugaagcagga

SEQ ID NO: 1864822 - RNA, 14 nt, Human
gaauugaaaaacca

SEQ ID NO: 1864823 - RNA, 19 nt, Human
gaauucucuaguuugauua

SEQ ID NO: 1864824 - RNA, 21 nt, Human
gaaugucagugugacugaucu

SEQ ID NO: 1864825 - RNA, 20 nt, Human
gaaugucagugugacugauc

SEQ ID NO: 1864826 - RNA, 17 nt, Human
gaauucucagaaucuca

SEQ ID NO: 1864827 - RNA, 17 nt, Human
gaauucucuaguuugau

SEQ ID NO: 1864828 - RNA, 22 nt, Human
gaaugguuuucaaaauaaaaau

SEQ ID NO: 1864829 - RNA, 14 nt, Human
gaaugucaguguga

SEQ ID NO: 1864830 - RNA, 13 nt, Human
gaaugcuuuagga

SEQ ID NO: 1864831 - RNA, 14 nt, Human
gaaugcauaaaaug

SEQ ID NO: 1864832 - RNA, 11 nt, Human
gaaugcagugg

SEQ ID NO: 1864833 - RNA, 22 nt, Human
gaaugaaccacaucuugcucug

SEQ ID NO: 1864834 - RNA, 18 nt, Human
gaaugaaccacaucuugc

SEQ ID NO: 1864835 - RNA, 23 nt, Human
gaaugaaccacaucuugcucugc

SEQ ID NO: 1864836 - RNA, 12 nt, Human
gauaauacacca

SEQ ID NO: 1864837 - RNA, 23 nt, Human
gauaauacaccacuacauucugu

SEQ ID NO: 1864838 - RNA, 24 nt, Human
gauaauacaccacuacauucuguu

SEQ ID NO: 1864839 - RNA, 13 nt, Human
gaguucugguucc

SEQ ID NO: 1864840 - RNA, 13 nt, Human
gauaaacaguagu

SEQ ID NO: 1864841 - RNA, 16 nt, Human
gaucacauguggacuu

SEQ ID NO: 1864842 - RNA, 14 nt, Human
gaucacagccucug

SEQ ID NO: 1864843 - RNA, 23 nt, Human
gaucacggcucacugcagccuca

SEQ ID NO: 1864844 - RNA, 20 nt, Human
gaucacggcucacugcagcc

SEQ ID NO: 1864845 - RNA, 20 nt, Human
gauagugucccacggugccu

SEQ ID NO: 1864846 - RNA, 18 nt, Human
gauauaaaagacugacca

SEQ ID NO: 1864847 - RNA, 18 nt, Human
gauauaugcucugcaugu

SEQ ID NO: 1864848 - RNA, 18 nt, Human
gauaauucuagcuuugag

SEQ ID NO: 1864849 - RNA, 17 nt, Human
gauacaaaagcauguga

SEQ ID NO: 1864850 - RNA, 16 nt, Human
gauacaaaagcaugug

SEQ ID NO: 1864851 - RNA, 17 nt, Human
gauaggucagugcaaau

SEQ ID NO: 1864852 - RNA, 18 nt, Human
gauccuaggcauuugcug

SEQ ID NO: 1864853 - RNA, 23 nt, Human
gauccuaaugaaugcauaaaaug

SEQ ID NO: 1864854 - RNA, 14 nt, Human
gauccuccaggugc

SEQ ID NO: 1864855 - RNA, 16 nt, Human
gauccucccaccucag

SEQ ID NO: 1864856 - RNA, 17 nt, Human
gauccucccaccucagc

SEQ ID NO: 1864857 - RNA, 18 nt, Human
gauccucccaccucagcc

SEQ ID NO: 1864858 - RNA, 13 nt, Human
gaucauccacugu

SEQ ID NO: 1864859 - RNA, 16 nt, Human
gaucauccacugugcc

SEQ ID NO: 1864860 - RNA, 20 nt, Human
gaucuaggaagacuuuggaa

SEQ ID NO: 1864861 - RNA, 18 nt, Human
gaucuaggaagacuuugg

SEQ ID NO: 1864862 - RNA, 14 nt, Human
gaucuaggaagacu

SEQ ID NO: 1864863 - RNA, 13 nt, Human
gaucuaggaagac

SEQ ID NO: 1864864 - RNA, 12 nt, Human
gauccugagcca

SEQ ID NO: 1864865 - RNA, 16 nt, Human
gauccucccaggcuuc

SEQ ID NO: 1864866 - RNA, 16 nt, Human
gaugagaggaaaucac

SEQ ID NO: 1864867 - RNA, 14 nt, Human
gaugcagugcuucc

SEQ ID NO: 1864868 - RNA, 14 nt, Human
gaugccugguggca

SEQ ID NO: 1864869 - RNA, 15 nt, Human
gaugccugguggcag

SEQ ID NO: 1864870 - RNA, 16 nt, Human
gaugccugguggcagc

SEQ ID NO: 1864871 - RNA, 20 nt, Human
gaugaccuugaaugaugcca

SEQ ID NO: 1864872 - RNA, 23 nt, Human
gaugagaaauaaaguuucuguug

SEQ ID NO: 1864873 - RNA, 18 nt, Human
gaugaccuugaaugaugc

SEQ ID NO: 1864874 - RNA, 14 nt, Human
gaugagaggaaauc

SEQ ID NO: 1864875 - RNA, 14 nt, Human
gaugcaccagcccu

SEQ ID NO: 1864876 - RNA, 15 nt, Human
gaugcaccagcccuu

SEQ ID NO: 1864877 - RNA, 23 nt, Human
gaugcaccagcccuuagcaggga

SEQ ID NO: 1864878 - RNA, 22 nt, Human
gaucuucuguggguuucuaaag

SEQ ID NO: 1864879 - RNA, 19 nt, Human
gaucuucuuuauaauucua

SEQ ID NO: 1864880 - RNA, 15 nt, Human
gaugaaaugagguca

SEQ ID NO: 1864881 - RNA, 21 nt, Human
gaugaaaugaggucagagccu

SEQ ID NO: 1864882 - RNA, 16 nt, Human
gaugaaauguaaauac

SEQ ID NO: 1864883 - RNA, 21 nt, Human
gcaaaccaucauugaaaucuu

SEQ ID NO: 1864884 - RNA, 20 nt, Human
gcaaaccaucauugaaaucu

SEQ ID NO: 1864885 - RNA, 19 nt, Human
gcaaaccaucauugaaauc

SEQ ID NO: 1864886 - RNA, 17 nt, Human
gcaaaccaucauugaaa

SEQ ID NO: 1864887 - RNA, 16 nt, Human
gcaaaccaucauugaa

SEQ ID NO: 1864888 - RNA, 18 nt, Human
gcaaacuuuauuuugugu

SEQ ID NO: 1864889 - RNA, 12 nt, Human
gcaaaugugaau

SEQ ID NO: 1864890 - RNA, 18 nt, Human
gcaacugcauuggcuuug

SEQ ID NO: 1864891 - RNA, 20 nt, Human
gcaaacuuuauuuuguguuu

SEQ ID NO: 1864892 - RNA, 23 nt, Human
gcaaaguucccuacuuccuguga

SEQ ID NO: 1864893 - RNA, 22 nt, Human
gcaacuuuguauaaaagggacu

SEQ ID NO: 1864894 - RNA, 18 nt, Human
gcaagcaagaaacacugg

SEQ ID NO: 1864895 - RNA, 15 nt, Human
gcaagcaccuccugc

SEQ ID NO: 1864896 - RNA, 16 nt, Human
gcaagcaccuccugcc

SEQ ID NO: 1864897 - RNA, 18 nt, Human
gcaagcaccuccugccuc

SEQ ID NO: 1864898 - RNA, 20 nt, Human
gcaagcaccuccugccucga

SEQ ID NO: 1864899 - RNA, 18 nt, Human
gcaaggcugucaauuaca

SEQ ID NO: 1864900 - RNA, 14 nt, Human
gcaaggcugucaau

SEQ ID NO: 1864901 - RNA, 21 nt, Human
gcaagggaauuucuucaacuc

SEQ ID NO: 1864902 - RNA, 17 nt, Human
gcaauccugcaagaaca

SEQ ID NO: 1864903 - RNA, 15 nt, Human
gauucccaagcucug

SEQ ID NO: 1864904 - RNA, 18 nt, Human
gauucagacagcugccug

SEQ ID NO: 1864905 - RNA, 17 nt, Human
gauucagacagcugccu

SEQ ID NO: 1864906 - RNA, 14 nt, Human
gauucagacagcug

SEQ ID NO: 1864907 - RNA, 13 nt, Human
gauucagacagcu

SEQ ID NO: 1864908 - RNA, 13 nt, Human
gauuacaagcgug

SEQ ID NO: 1864909 - RNA, 21 nt, Human
gauuacaagcgugagccacug

SEQ ID NO: 1864910 - RNA, 21 nt, Human
gauguuuuaaggaugcuugua

SEQ ID NO: 1864911 - RNA, 14 nt, Human
gauguucugggaca

SEQ ID NO: 1864912 - RNA, 18 nt, Human
gauguucuagcauggcug

SEQ ID NO: 1864913 - RNA, 22 nt, Human
gaugcgggccagugcuccagcc

SEQ ID NO: 1864914 - RNA, 16 nt, Human
gaugcuagaacucccu

SEQ ID NO: 1864915 - RNA, 20 nt, Human
gaugcgggccagugcuccag

SEQ ID NO: 1864916 - RNA, 17 nt, Human
gaugccugguggcagcu

SEQ ID NO: 1864917 - RNA, 20 nt, Human
gaugccugugaacugaacuc

SEQ ID NO: 1864918 - RNA, 17 nt, Human
gauugcaacaggcuggg

SEQ ID NO: 1864919 - RNA, 18 nt, Human
gauugcaacaggcugggc

SEQ ID NO: 1864920 - RNA, 18 nt, Human
gauugcuugagcucagga

SEQ ID NO: 1864921 - RNA, 16 nt, Human
gauucccaagcucugc

SEQ ID NO: 1864922 - RNA, 17 nt, Human
gauucccaagcucugcu

SEQ ID NO: 1864923 - RNA, 19 nt, Human
gauucuuuccugaggcugg

SEQ ID NO: 1864924 - RNA, 18 nt, Human
gauucccaagcucugcuc

SEQ ID NO: 1864925 - RNA, 22 nt, Human
gauucuuuccugaggcugggcu

SEQ ID NO: 1864926 - RNA, 20 nt, Human
gauucuuuccugaggcuggg

SEQ ID NO: 1864927 - RNA, 16 nt, Human
gauugcaacaggcugg

SEQ ID NO: 1864928 - RNA, 16 nt, Human
gauugggaauccgccc

SEQ ID NO: 1864929 - RNA, 22 nt, Human
gauuucuguuuagauaauacac

SEQ ID NO: 1864930 - RNA, 21 nt, Human
gauuucuguuuagauaauaca

SEQ ID NO: 1864931 - RNA, 14 nt, Human
gcagccgugccuuc

SEQ ID NO: 1864932 - RNA, 17 nt, Human
gcagccgugccuucagc

SEQ ID NO: 1864933 - RNA, 15 nt, Human
gcagccgugccuuca

SEQ ID NO: 1864934 - RNA, 19 nt, Human
gcagccucaaccuccuggg

SEQ ID NO: 1864935 - RNA, 20 nt, Human
gcagccucaaccuccugggc

SEQ ID NO: 1864936 - RNA, 14 nt, Human
gcagccuggacccu

SEQ ID NO: 1864937 - RNA, 18 nt, Human
gcagccgugccuucagcu

SEQ ID NO: 1864938 - RNA, 21 nt, Human
gcagccucaaccuccugggcu

SEQ ID NO: 1864939 - RNA, 22 nt, Human
gcagccucaaccuccugggcua

SEQ ID NO: 1864940 - RNA, 21 nt, Human
gcaggaguuucguuuucaaaa

SEQ ID NO: 1864941 - RNA, 20 nt, Human
gcaggaguuucguuuucaaa

SEQ ID NO: 1864942 - RNA, 18 nt, Human
gcagaaggaagacuucau

SEQ ID NO: 1864943 - RNA, 19 nt, Human
gcagagaaugaaagggccc

SEQ ID NO: 1864944 - RNA, 20 nt, Human
gcagagaaugaaagggccca

SEQ ID NO: 1864945 - RNA, 21 nt, Human
gcagagaaugaaagggcccag

SEQ ID NO: 1864946 - RNA, 21 nt, Human
gcagagaauucucuuauccaa

SEQ ID NO: 1864947 - RNA, 22 nt, Human
gcagagaaugaaagggcccaga

SEQ ID NO: 1864948 - RNA, 23 nt, Human
gcagagaaugaaagggcccagag

SEQ ID NO: 1864949 - RNA, 19 nt, Human
gcagagaccaucccugaag

SEQ ID NO: 1864950 - RNA, 17 nt, Human
gcagagaccaucccuga

SEQ ID NO: 1864951 - RNA, 15 nt, Human
gcagagaccaucccu

SEQ ID NO: 1864952 - RNA, 14 nt, Human
gcagagaccauccc

SEQ ID NO: 1864953 - RNA, 15 nt, Human
gcagaguugaagaca

SEQ ID NO: 1864954 - RNA, 17 nt, Human
gcagaguugaagacaga

SEQ ID NO: 1864955 - RNA, 16 nt, Human
gcagaguugaagacag

SEQ ID NO: 1864956 - RNA, 19 nt, Human
gcagaguugaagacagagc

SEQ ID NO: 1864957 - RNA, 12 nt, Human
gcagcaauaaag

SEQ ID NO: 1864958 - RNA, 14 nt, Human
gcacccggccccug

SEQ ID NO: 1864959 - RNA, 15 nt, Human
gcacccggccccugc

SEQ ID NO: 1864960 - RNA, 17 nt, Human
gcacccggccccugcug

SEQ ID NO: 1864961 - RNA, 14 nt, Human
gcaccuccugccuc

SEQ ID NO: 1864962 - RNA, 15 nt, Human
gcaccuccugccucg

SEQ ID NO: 1864963 - RNA, 19 nt, Human
gcaccacugcacuccagcc

SEQ ID NO: 1864964 - RNA, 14 nt, Human
gcaaugaccuuuca

SEQ ID NO: 1864965 - RNA, 13 nt, Human
gcaaugaccuuuc

SEQ ID NO: 1864966 - RNA, 19 nt, Human
gcacagcuaacauggaagu

SEQ ID NO: 1864967 - RNA, 16 nt, Human
gcacagcuucauuucc

SEQ ID NO: 1864968 - RNA, 14 nt, Human
gcagaagacaguau

SEQ ID NO: 1864969 - RNA, 14 nt, Human
gcagaaggaagacu

SEQ ID NO: 1864970 - RNA, 13 nt, Human
gcagaaggaagac

SEQ ID NO: 1864971 - RNA, 12 nt, Human
gcagaaggaaga

SEQ ID NO: 1864972 - RNA, 23 nt, Human
gcacugggcuuggggaccagagc

SEQ ID NO: 1864973 - RNA, 22 nt, Human
gcacugggcuuggggaccagag

SEQ ID NO: 1864974 - RNA, 17 nt, Human
gcacugaggaccagcca

SEQ ID NO: 1864975 - RNA, 19 nt, Human
gcacuaaggugugcucuga

SEQ ID NO: 1864976 - RNA, 18 nt, Human
gcacuaaggugugcucug

SEQ ID NO: 1864977 - RNA, 17 nt, Human
gcacuaaggugugcucu

SEQ ID NO: 1864978 - RNA, 18 nt, Human
gcacccggccccugcugg

SEQ ID NO: 1864979 - RNA, 11 nt, Human
gcaggucccua

SEQ ID NO: 1864980 - RNA, 10 nt, Human
gcaggucccu

SEQ ID NO: 1864981 - RNA, 13 nt, Human
gcaggucccuaau

SEQ ID NO: 1864982 - RNA, 12 nt, Human
gcaggucccuaa

SEQ ID NO: 1864983 - RNA, 23 nt, Human
gcagugcuuccaaggauggacca

SEQ ID NO: 1864984 - RNA, 16 nt, Human
gcagugggagcugccu

SEQ ID NO: 1864985 - RNA, 17 nt, Human
gcagggagggccugggc

SEQ ID NO: 1864986 - RNA, 14 nt, Human
gcagggagggccug

SEQ ID NO: 1864987 - RNA, 20 nt, Human
gcaggauucuuccucccucc

SEQ ID NO: 1864988 - RNA, 16 nt, Human
gcagggagggcuucug

SEQ ID NO: 1864989 - RNA, 22 nt, Human
gcagggagggccugggccccag

SEQ ID NO: 1864990 - RNA, 18 nt, Human
gcagggagggccugggcc

SEQ ID NO: 1864991 - RNA, 14 nt, Human
gcagggcucagcgg

SEQ ID NO: 1864992 - RNA, 12 nt, Human
gcagggcucagc

SEQ ID NO: 1864993 - RNA, 15 nt, Human
gcauauucaggaagc

SEQ ID NO: 1864994 - RNA, 23 nt, Human
gcauauuauuuuauguugcauag

SEQ ID NO: 1864995 - RNA, 18 nt, Human
gcauauuauuuuauguug

SEQ ID NO: 1864996 - RNA, 20 nt, Human
gcauauucaggaagcucagg

SEQ ID NO: 1864997 - RNA, 18 nt, Human
gcauauucaggaagcuca

SEQ ID NO: 1864998 - RNA, 17 nt, Human
gcauauucaggaagcuc

SEQ ID NO: 1864999 - RNA, 21 nt, Human
gcaucaagaugugacauguuu

SEQ ID NO: 1865000 - RNA, 19 nt, Human
gcauauuuauaaaaauaaa

SEQ ID NO: 1865001 - RNA, 17 nt, Human
gcagugggagcugccug

SEQ ID NO: 1865002 - RNA, 18 nt, Human
gcagugggagcugccugu

SEQ ID NO: 1865003 - RNA, 20 nt, Human
gcauuagauuucucauuugc

SEQ ID NO: 1865004 - RNA, 15 nt, Human
gcaugcugucccuua

SEQ ID NO: 1865005 - RNA, 17 nt, Human
gcauguuugugauugac

SEQ ID NO: 1865006 - RNA, 22 nt, Human
gcaugccuggauggggcugcac

SEQ ID NO: 1865007 - RNA, 17 nt, Human
gcaugccuggauggggc

SEQ ID NO: 1865008 - RNA, 17 nt, Human
gcaugaauuugugaagg

SEQ ID NO: 1865009 - RNA, 20 nt, Human
gcaugacacgaauauugcug

SEQ ID NO: 1865010 - RNA, 15 nt, Human
gcaugaauuugugaa

SEQ ID NO: 1865011 - RNA, 17 nt, Human
gcaucaggccaggcccu

SEQ ID NO: 1865012 - RNA, 16 nt, Human
gcaucaggccaggccc

SEQ ID NO: 1865013 - RNA, 15 nt, Human
gcaucaggccaggcc

SEQ ID NO: 1865014 - RNA, 13 nt, Human
gcaucaggccagg

SEQ ID NO: 1865015 - RNA, 17 nt, Human
gcauuuuacuguacaga

SEQ ID NO: 1865016 - RNA, 16 nt, Human
gcauuuuacuguacag

SEQ ID NO: 1865017 - RNA, 21 nt, Human
gcauuuggugguuucagaaau

SEQ ID NO: 1865018 - RNA, 23 nt, Human
gcauuugcugaauacagaggcaa

SEQ ID NO: 1865019 - RNA, 12 nt, Human
gcauuccccacu

SEQ ID NO: 1865020 - RNA, 12 nt, Human
gcauuccccagg

SEQ ID NO: 1865021 - RNA, 15 nt, Human
gcauucucacuccua

SEQ ID NO: 1865022 - RNA, 13 nt, Human
gcauucucacucc

SEQ ID NO: 1865023 - RNA, 18 nt, Human
gcauucucacuccuaccu

SEQ ID NO: 1865024 - RNA, 20 nt, Human
gccaaaggaagcacaugccu

SEQ ID NO: 1865025 - RNA, 16 nt, Human
gccaaaggaagcacau

SEQ ID NO: 1865026 - RNA, 14 nt, Human
gccaaaggaagcac

SEQ ID NO: 1865027 - RNA, 19 nt, Human
gccaaacucaccugccccu

SEQ ID NO: 1865028 - RNA, 21 nt, Human
gccaaacucaccugccccuca

SEQ ID NO: 1865029 - RNA, 22 nt, Human
gcauuuugcuaaaugugaauga

SEQ ID NO: 1865030 - RNA, 12 nt, Human
gccagccuugac

SEQ ID NO: 1865031 - RNA, 20 nt, Human
gccagccgagauagccaagg

SEQ ID NO: 1865032 - RNA, 21 nt, Human
gccagccgagauagccaaggc

SEQ ID NO: 1865033 - RNA, 19 nt, Human
gccagauucuuuccugagg

SEQ ID NO: 1865034 - RNA, 17 nt, Human
gccagauucuuuccuga

SEQ ID NO: 1865035 - RNA, 16 nt, Human
gccagauucuuuccug

SEQ ID NO: 1865036 - RNA, 19 nt, Human
gccagagggagugacagag

SEQ ID NO: 1865037 - RNA, 20 nt, Human
gccagagggagugacagagg

SEQ ID NO: 1865038 - RNA, 22 nt, Human
gccagccuugaccauucuccac

SEQ ID NO: 1865039 - RNA, 21 nt, Human
gccagccuugaccauucucca

SEQ ID NO: 1865040 - RNA, 20 nt, Human
gccagccuugaccauucucc

SEQ ID NO: 1865041 - RNA, 14 nt, Human
gccagccuugacca

SEQ ID NO: 1865042 - RNA, 15 nt, Human
gccagcugcuugggc

SEQ ID NO: 1865043 - RNA, 16 nt, Human
gccagcugcuugggcu

SEQ ID NO: 1865044 - RNA, 14 nt, Human
gccagcugcuuggg

SEQ ID NO: 1865045 - RNA, 15 nt, Human
gccagagacacaagc

SEQ ID NO: 1865046 - RNA, 12 nt, Human
gccagagacaca

SEQ ID NO: 1865047 - RNA, 18 nt, Human
gccagagggagugacaga

SEQ ID NO: 1865048 - RNA, 19 nt, Human
gccacuccagaccccuggc

SEQ ID NO: 1865049 - RNA, 18 nt, Human
gccacuccagaccccugg

SEQ ID NO: 1865050 - RNA, 16 nt, Human
gccacuccagaccccu

SEQ ID NO: 1865051 - RNA, 19 nt, Human
gccacugcaccgggccaca

SEQ ID NO: 1865052 - RNA, 17 nt, Human
gccacugcaccgggcca

SEQ ID NO: 1865053 - RNA, 18 nt, Human
gccacugcaccgggccac

SEQ ID NO: 1865054 - RNA, 14 nt, Human
gccacggccaggcc

SEQ ID NO: 1865055 - RNA, 15 nt, Human
gccacggccaggcca

SEQ ID NO: 1865056 - RNA, 21 nt, Human
gccacuauuguuagucucuug

SEQ ID NO: 1865057 - RNA, 16 nt, Human
gccacggccaggccag

SEQ ID NO: 1865058 - RNA, 22 nt, Human
gccacguucuuacuaguuuccc

SEQ ID NO: 1865059 - RNA, 18 nt, Human
gccaggaagccagcaggc

SEQ ID NO: 1865060 - RNA, 17 nt, Human
gccaggaagccagcagg

SEQ ID NO: 1865061 - RNA, 11 nt, Human
gccaggaagcc

SEQ ID NO: 1865062 - RNA, 19 nt, Human
gccaggaagccagcaggcu

SEQ ID NO: 1865063 - RNA, 20 nt, Human
gccaggaagccagcaggcuc

SEQ ID NO: 1865064 - RNA, 23 nt, Human
gccaggggaaaaucagccugcuc

SEQ ID NO: 1865065 - RNA, 22 nt, Human
gccaggggaaaaucagccugcu

SEQ ID NO: 1865066 - RNA, 21 nt, Human
gccaggggaaaaucagccugc

SEQ ID NO: 1865067 - RNA, 17 nt, Human
gccaggggaaaaucagc

SEQ ID NO: 1865068 - RNA, 17 nt, Human
gccaucccagccccaau

SEQ ID NO: 1865069 - RNA, 16 nt, Human
gccaucccagccccaa

SEQ ID NO: 1865070 - RNA, 15 nt, Human
gccaucccagcccca

SEQ ID NO: 1865071 - RNA, 14 nt, Human
gccaucccagcccc

SEQ ID NO: 1865072 - RNA, 13 nt, Human
gccaucccagccc

SEQ ID NO: 1865073 - RNA, 19 nt, Human
gccauccagguucagcuug

SEQ ID NO: 1865074 - RNA, 20 nt, Human
gccauccagguucagcuugu

SEQ ID NO: 1865075 - RNA, 14 nt, Human
gccaugggacaggg

SEQ ID NO: 1865076 - RNA, 19 nt, Human
gccaugggacagggaggac

SEQ ID NO: 1865077 - RNA, 22 nt, Human
gccauuucuuccacaagagccc

SEQ ID NO: 1865078 - RNA, 20 nt, Human
gccauuucuuccacaagagc

SEQ ID NO: 1865079 - RNA, 17 nt, Human
gccauuucuuccacaag

SEQ ID NO: 1865080 - RNA, 15 nt, Human
gcccaccccucaaca

SEQ ID NO: 1865081 - RNA, 19 nt, Human
gcccacaggaucagucuga

SEQ ID NO: 1865082 - RNA, 13 nt, Human
gcccacaggauca

SEQ ID NO: 1865083 - RNA, 18 nt, Human
gcccacaggaucagucug

SEQ ID NO: 1865084 - RNA, 16 nt, Human
gcccaaagaugcagcc

SEQ ID NO: 1865085 - RNA, 15 nt, Human
gcccaaagaugcagc

SEQ ID NO: 1865086 - RNA, 16 nt, Human
gccauuuguguuuaua

SEQ ID NO: 1865087 - RNA, 19 nt, Human
gcccaaagugguauagaaa

SEQ ID NO: 1865088 - RNA, 22 nt, Human
gcccaucugggggccucuucug

SEQ ID NO: 1865089 - RNA, 16 nt, Human
gccccagugcccacag

SEQ ID NO: 1865090 - RNA, 17 nt, Human
gccccagugcccacagg

SEQ ID NO: 1865091 - RNA, 21 nt, Human
gccccagugcccacaggauca

SEQ ID NO: 1865092 - RNA, 23 nt, Human
gccccauccucuguacagagccc

SEQ ID NO: 1865093 - RNA, 17 nt, Human
gccccauucugccugcc

SEQ ID NO: 1865094 - RNA, 18 nt, Human
gccccauucugccugccc

SEQ ID NO: 1865095 - RNA, 20 nt, Human
gccccauucugccugcccag

SEQ ID NO: 1865096 - RNA, 21 nt, Human
gccccauucugccugcccagg

SEQ ID NO: 1865097 - RNA, 22 nt, Human
gcccagucuggaaugcaguggu

SEQ ID NO: 1865098 - RNA, 16 nt, Human
gcccaggcuggcgugc

SEQ ID NO: 1865099 - RNA, 14 nt, Human
gcccaggcuggcgu

SEQ ID NO: 1865100 - RNA, 15 nt, Human
gcccaggcuggcgug

SEQ ID NO: 1865101 - RNA, 18 nt, Human
gcccaggccuccuacagc

SEQ ID NO: 1865102 - RNA, 16 nt, Human
gcccaggaaaggcucc

SEQ ID NO: 1865103 - RNA, 15 nt, Human
gcccaggaaaggcuc

SEQ ID NO: 1865104 - RNA, 12 nt, Human
gcccaggaaagg

SEQ ID NO: 1865105 - RNA, 17 nt, Human
gcccaggccugccuguu

SEQ ID NO: 1865106 - RNA, 11 nt, Human
gcccaggcugg

SEQ ID NO: 1865107 - RNA, 12 nt, Human
gcccggcuccag

SEQ ID NO: 1865108 - RNA, 19 nt, Human
gccccuucugacccaugcu

SEQ ID NO: 1865109 - RNA, 20 nt, Human
gccccuucugacccaugcug

SEQ ID NO: 1865110 - RNA, 18 nt, Human
gcccgggcucugccuccc

SEQ ID NO: 1865111 - RNA, 15 nt, Human
gcccgggcucugccu

SEQ ID NO: 1865112 - RNA, 14 nt, Human
gcccgggcucugcc

SEQ ID NO: 1865113 - RNA, 13 nt, Human
gcccgggcucugc

SEQ ID NO: 1865114 - RNA, 13 nt, Human
gcccggcuccagg

SEQ ID NO: 1865115 - RNA, 14 nt, Human
gcccggcuccaggc

SEQ ID NO: 1865116 - RNA, 12 nt, Human
gcccgggcucug

SEQ ID NO: 1865117 - RNA, 15 nt, Human
gcccggcuccaggcu

SEQ ID NO: 1865118 - RNA, 22 nt, Human
gcccucugcccacucccugcaa

SEQ ID NO: 1865119 - RNA, 20 nt, Human
gcccgggcucugccucccau

SEQ ID NO: 1865120 - RNA, 19 nt, Human
gcccgggcucugccuccca

SEQ ID NO: 1865121 - RNA, 21 nt, Human
gcccgggcucugccucccauc

SEQ ID NO: 1865122 - RNA, 15 nt, Human
gcccucccugccccu

SEQ ID NO: 1865123 - RNA, 19 nt, Human
gccccugcacuccagccug

SEQ ID NO: 1865124 - RNA, 23 nt, Human
gccccuggcagccccuguucugg

SEQ ID NO: 1865125 - RNA, 13 nt, Human
gccccugcacaaa

SEQ ID NO: 1865126 - RNA, 18 nt, Human
gccccucccacagcgcug

SEQ ID NO: 1865127 - RNA, 17 nt, Human
gccccuucccccuccaa

SEQ ID NO: 1865128 - RNA, 23 nt, Human
gccccucaacucuccuccagagu

SEQ ID NO: 1865129 - RNA, 21 nt, Human
gccccucagggucccuggugg

SEQ ID NO: 1865130 - RNA, 19 nt, Human
gccccucagggucccuggu

SEQ ID NO: 1865131 - RNA, 14 nt, Human
gccccgcccaggcu

SEQ ID NO: 1865132 - RNA, 22 nt, Human
gccccauucugccugcccaggc

SEQ ID NO: 1865133 - RNA, 23 nt, Human
gccccauucugccugcccaggcc

SEQ ID NO: 1865134 - RNA, 23 nt, Human
gccccgaggccuucucugaagga

SEQ ID NO: 1865135 - RNA, 17 nt, Human
gccccgugggguuccuc

SEQ ID NO: 1865136 - RNA, 21 nt, Human
gccccgucccccucuggcucc

SEQ ID NO: 1865137 - RNA, 17 nt, Human
gccccgucccccucugg

SEQ ID NO: 1865138 - RNA, 13 nt, Human
gcccuucucucca

SEQ ID NO: 1865139 - RNA, 22 nt, Human
gcccuuccucuccacugccuuc

SEQ ID NO: 1865140 - RNA, 16 nt, Human
gccgagauagccaagg

SEQ ID NO: 1865141 - RNA, 19 nt, Human
gccgagauagccaaggcca

SEQ ID NO: 1865142 - RNA, 17 nt, Human
gccgagauagccaaggc

SEQ ID NO: 1865143 - RNA, 17 nt, Human
gccgcagcccugcagag

SEQ ID NO: 1865144 - RNA, 16 nt, Human
gccgcagcccugcaga

SEQ ID NO: 1865145 - RNA, 15 nt, Human
gccgcagcccugcag

SEQ ID NO: 1865146 - RNA, 19 nt, Human
gccgcagcccugcagaggg

SEQ ID NO: 1865147 - RNA, 12 nt, Human
gccgggguggau

SEQ ID NO: 1865148 - RNA, 22 nt, Human
gccucaagugauucuccugccu

SEQ ID NO: 1865149 - RNA, 24 nt, Human
gccucaagugauucuccugccuca

SEQ ID NO: 1865150 - RNA, 18 nt, Human
gccucagcauccuggcac

SEQ ID NO: 1865151 - RNA, 17 nt, Human
gccucagcauccuggca

SEQ ID NO: 1865152 - RNA, 21 nt, Human
gccucagcauccuggcacccg

SEQ ID NO: 1865153 - RNA, 14 nt, Human
gccuaaggcugaac

SEQ ID NO: 1865154 - RNA, 17 nt, Human
gccuauuuuaauaaaca

SEQ ID NO: 1865155 - RNA, 23 nt, Human
gccgucuaccugaggggccucuu

SEQ ID NO: 1865156 - RNA, 22 nt, Human
gccgucuaccugaggggccucu

SEQ ID NO: 1865157 - RNA, 20 nt, Human
gccgucuaccugaggggccu

SEQ ID NO: 1865158 - RNA, 18 nt, Human
gccgucuaccugaggggc

SEQ ID NO: 1865159 - RNA, 15 nt, Human
gccguggcuucccgc

SEQ ID NO: 1865160 - RNA, 13 nt, Human
gccguggcuuccc

SEQ ID NO: 1865161 - RNA, 12 nt, Human
gccguggcuucc

SEQ ID NO: 1865162 - RNA, 11 nt, Human
gccguggcuuc

SEQ ID NO: 1865163 - RNA, 15 nt, Human
gccucucccaucacu

SEQ ID NO: 1865164 - RNA, 17 nt, Human
gccucucugcagguccc

SEQ ID NO: 1865165 - RNA, 16 nt, Human
gccucucugcaggucc

SEQ ID NO: 1865166 - RNA, 14 nt, Human
gccucucugcaggu

SEQ ID NO: 1865167 - RNA, 10 nt, Human
gccucucugc

SEQ ID NO: 1865168 - RNA, 12 nt, Human
gccucagccucc

SEQ ID NO: 1865169 - RNA, 14 nt, Human
gccucagccuccca

SEQ ID NO: 1865170 - RNA, 22 nt, Human
gccucagccucccaaagugcug

SEQ ID NO: 1865171 - RNA, 18 nt, Human
gccucccgaauagcuggg

SEQ ID NO: 1865172 - RNA, 19 nt, Human
gccucccgaauagcuggga

SEQ ID NO: 1865173 - RNA, 21 nt, Human
gccucccgaguagcugggacu

SEQ ID NO: 1865174 - RNA, 23 nt, Human
gccucccgaguagcugggacuac

SEQ ID NO: 1865175 - RNA, 20 nt, Human
gccucccgaauagcugggac

SEQ ID NO: 1865176 - RNA, 14 nt, Human
gccuggacccugug

SEQ ID NO: 1865177 - RNA, 11 nt, Human
gccugcccagg

SEQ ID NO: 1865178 - RNA, 12 nt, Human
gccugcccaggc

SEQ ID NO: 1865179 - RNA, 21 nt, Human
gccucugcacuccccugcugg

SEQ ID NO: 1865180 - RNA, 12 nt, Human
gccucugcauuc

SEQ ID NO: 1865181 - RNA, 15 nt, Human
gccucugcauucagg

SEQ ID NO: 1865182 - RNA, 15 nt, Human
gccugaagucacaca

SEQ ID NO: 1865183 - RNA, 20 nt, Human
gccucugcacuccccugcug

SEQ ID NO: 1865184 - RNA, 19 nt, Human
gccucugcacuccccugcu

SEQ ID NO: 1865185 - RNA, 18 nt, Human
gccucugcacuccccugc

SEQ ID NO: 1865186 - RNA, 17 nt, Human
gccucugcacuccccug

SEQ ID NO: 1865187 - RNA, 16 nt, Human
gccucugcacuccccu

SEQ ID NO: 1865188 - RNA, 16 nt, Human
gccucugacacacagc

SEQ ID NO: 1865189 - RNA, 15 nt, Human
gccucugacacacag

SEQ ID NO: 1865190 - RNA, 20 nt, Human
gcgccuacaggagugagcac

SEQ ID NO: 1865191 - RNA, 21 nt, Human
gcgccuacaggagugagcacu

SEQ ID NO: 1865192 - RNA, 14 nt, Human
gcgcugccccuggc

SEQ ID NO: 1865193 - RNA, 19 nt, Human
gcgcuggccgggaccccga

SEQ ID NO: 1865194 - RNA, 17 nt, Human
gcgcugccccuggcagc

SEQ ID NO: 1865195 - RNA, 18 nt, Human
gcgccuacaggagugagc

SEQ ID NO: 1865196 - RNA, 19 nt, Human
gcggaaugaaccacaucuu

SEQ ID NO: 1865197 - RNA, 16 nt, Human
gcggacagccacggcc

SEQ ID NO: 1865198 - RNA, 19 nt, Human
gcggacagccacggccagg

SEQ ID NO: 1865199 - RNA, 23 nt, Human
gcggacagccacggccaggccag

SEQ ID NO: 1865200 - RNA, 19 nt, Human
gcggggacagcuccuucug

SEQ ID NO: 1865201 - RNA, 23 nt, Human
gcggggacagcuccuucuguccu

SEQ ID NO: 1865202 - RNA, 20 nt, Human
gcgguccacccaggagcccc

SEQ ID NO: 1865203 - RNA, 23 nt, Human
gcgguccacccaggagccccgag

SEQ ID NO: 1865204 - RNA, 22 nt, Human
gcuacacaggggaaaagaggag

SEQ ID NO: 1865205 - RNA, 14 nt, Human
gcuaacauggaagu

SEQ ID NO: 1865206 - RNA, 18 nt, Human
gcuaacauggaaguacua

SEQ ID NO: 1865207 - RNA, 17 nt, Human
gcuaacauggaaguacu

SEQ ID NO: 1865208 - RNA, 14 nt, Human
gcgugagccacugc

SEQ ID NO: 1865209 - RNA, 16 nt, Human
gcgugagaccugcccc

SEQ ID NO: 1865210 - RNA, 16 nt, Human
gcgugagccacugcac

SEQ ID NO: 1865211 - RNA, 15 nt, Human
gcgugagccacugca

SEQ ID NO: 1865212 - RNA, 22 nt, Human
gcuagacgagcaggcuucuucc

SEQ ID NO: 1865213 - RNA, 21 nt, Human
gcuagacgagcaggcuucuuc

SEQ ID NO: 1865214 - RNA, 19 nt, Human
gccuuacccucauguucuu

SEQ ID NO: 1865215 - RNA, 16 nt, Human
gccuuagaaccuuucu

SEQ ID NO: 1865216 - RNA, 17 nt, Human
gccuuagaaccuuucuu

SEQ ID NO: 1865217 - RNA, 20 nt, Human
gccuuagaagucacacagua

SEQ ID NO: 1865218 - RNA, 23 nt, Human
gccuuauggaacacucugagacu

SEQ ID NO: 1865219 - RNA, 22 nt, Human
gccuuauggaacacucugagac

SEQ ID NO: 1865220 - RNA, 21 nt, Human
gccuuauggaacacucugaga

SEQ ID NO: 1865221 - RNA, 15 nt, Human
gccugguggcagcug

SEQ ID NO: 1865222 - RNA, 18 nt, Human
gccuguaaucacagcuac

SEQ ID NO: 1865223 - RNA, 16 nt, Human
gccugguggcagcugc

SEQ ID NO: 1865224 - RNA, 17 nt, Human
gccugguggcagcugcg

SEQ ID NO: 1865225 - RNA, 18 nt, Human
gccuucggccuccauccu

SEQ ID NO: 1865226 - RNA, 16 nt, Human
gccuucagcucuacag

SEQ ID NO: 1865227 - RNA, 13 nt, Human
gccuucagcucua

SEQ ID NO: 1865228 - RNA, 19 nt, Human
gccuucggccuccauccug

SEQ ID NO: 1865229 - RNA, 14 nt, Human
ggucccaccccaca

SEQ ID NO: 1865230 - RNA, 17 nt, Human
ggucccaccccacacac

SEQ ID NO: 1865231 - RNA, 17 nt, Human
ggucucaaacuccugac

SEQ ID NO: 1865232 - RNA, 21 nt, Human
ggucucacuauguugcccagg

SEQ ID NO: 1865233 - RNA, 22 nt, Human
ggucucacucugucgcccaguc

SEQ ID NO: 1865234 - RNA, 23 nt, Human
ggucucacucugucgcccagucu

SEQ ID NO: 1865235 - RNA, 14 nt, Human
ggucugacccacug

SEQ ID NO: 1865236 - RNA, 22 nt, Human
ggugaccagcaccaucucuccu

SEQ ID NO: 1865237 - RNA, 22 nt, Human
gguggccucccaacucacccca

SEQ ID NO: 1865238 - RNA, 23 nt, Human
gguggccacuccagaccccuggc

SEQ ID NO: 1865239 - RNA, 22 nt, Human
gguggccacuccagaccccugg

SEQ ID NO: 1865240 - RNA, 21 nt, Human
gguggccacuccagaccccug

SEQ ID NO: 1865241 - RNA, 20 nt, Human
gguggccacuccagaccccu

SEQ ID NO: 1865242 - RNA, 23 nt, Human
gguggccucccaacucaccccag

SEQ ID NO: 1865243 - RNA, 21 nt, Human
ggugcuaucucccccagcccc

SEQ ID NO: 1865244 - RNA, 15 nt, Human
ggugcugccauccag

SEQ ID NO: 1865245 - RNA, 21 nt, Human
ggugcugccauccagguucag

SEQ ID NO: 1865246 - RNA, 19 nt, Human
gguggcagugggagcugcc

SEQ ID NO: 1865247 - RNA, 22 nt, Human
gguggcagugggagcugccugu

SEQ ID NO: 1865248 - RNA, 20 nt, Human
ggugcuaucucccccagccc

SEQ ID NO: 1865249 - RNA, 19 nt, Human
ggugcuaucucccccagcc

SEQ ID NO: 1865250 - RNA, 17 nt, Human
ggugcuaucucccccag

SEQ ID NO: 1865251 - RNA, 16 nt, Human
ggugcuaucuccccca

SEQ ID NO: 1865252 - RNA, 15 nt, Human
ggugagaagcagagg

SEQ ID NO: 1865253 - RNA, 16 nt, Human
ggugagaggggaacag

SEQ ID NO: 1865254 - RNA, 16 nt, Human
gguggugaccucugcc

SEQ ID NO: 1865255 - RNA, 14 nt, Human
gguggugaccucug

SEQ ID NO: 1865256 - RNA, 15 nt, Human
gguggugaccucugc

SEQ ID NO: 1865257 - RNA, 15 nt, Human
ggugguuuucuguuc

SEQ ID NO: 1865258 - RNA, 18 nt, Human
ggugguuuucuguucuuu

SEQ ID NO: 1865259 - RNA, 21 nt, Human
ggugguuauggagaggguguc

SEQ ID NO: 1865260 - RNA, 17 nt, Human
ggugguuucagaaaugu

SEQ ID NO: 1865261 - RNA, 18 nt, Human
ggugguuucagaaaugug

SEQ ID NO: 1865262 - RNA, 19 nt, Human
ggugucaccugaagacuca

SEQ ID NO: 1865263 - RNA, 19 nt, Human
ggugucaagagggucugag

SEQ ID NO: 1865264 - RNA, 17 nt, Human
ggugucaagagggucug

SEQ ID NO: 1865265 - RNA, 13 nt, Human
gguuauggagagg

SEQ ID NO: 1865266 - RNA, 22 nt, Human
gguuaguggauggaaggggcug

SEQ ID NO: 1865267 - RNA, 21 nt, Human
gguuaguggauggaaggggcu

SEQ ID NO: 1865268 - RNA, 17 nt, Human
gguuaggcauuguggga

SEQ ID NO: 1865269 - RNA, 21 nt, Human
gguuacccaguuagcucucaa

SEQ ID NO: 1865270 - RNA, 13 nt, Human
gguucaaagauau

SEQ ID NO: 1865271 - RNA, 21 nt, Human
gguucaaagauauuuugcuuu

SEQ ID NO: 1865272 - RNA, 16 nt, Human
gguucuuucuuccucu

SEQ ID NO: 1865273 - RNA, 14 nt, Human
gguucuuucuuccu

SEQ ID NO: 1865274 - RNA, 13 nt, Human
gguugagguuuca

SEQ ID NO: 1865275 - RNA, 22 nt, Human
gguagaagcccuucuaccuucc

SEQ ID NO: 1865276 - RNA, 23 nt, Human
gguagaaauaucugaaaauguau

SEQ ID NO: 1865277 - RNA, 11 nt, Human
gguacccacug

SEQ ID NO: 1865278 - RNA, 16 nt, Human
gguacccacugcucug

SEQ ID NO: 1865279 - RNA, 13 nt, Human
gguacccacugcu

SEQ ID NO: 1865280 - RNA, 22 nt, Human
gguagaaauaucugaaaaugua

SEQ ID NO: 1865281 - RNA, 20 nt, Human
gguacuuguggacacagcuc

SEQ ID NO: 1865282 - RNA, 16 nt, Human
gguacuuguggacaca

SEQ ID NO: 1865283 - RNA, 17 nt, Human
gguacuuguggacacag

SEQ ID NO: 1865284 - RNA, 12 nt, Human
ggucacucuggc

SEQ ID NO: 1865285 - RNA, 18 nt, Human
ggucacaggacucugccu

SEQ ID NO: 1865286 - RNA, 16 nt, Human
ggucacaggacucugc

SEQ ID NO: 1865287 - RNA, 16 nt, Human
ggucccaccccacaca

SEQ ID NO: 1865288 - RNA, 15 nt, Human
ggucccaccccacac

SEQ ID NO: 1865289 - RNA, 11 nt, Human
ggucagagccu

SEQ ID NO: 1865290 - RNA, 19 nt, Human
gggugacagagcaagugag

SEQ ID NO: 1865291 - RNA, 17 nt, Human
gggugaagugaagacaa

SEQ ID NO: 1865292 - RNA, 17 nt, Human
gggugcugggccccugc

SEQ ID NO: 1865293 - RNA, 18 nt, Human
gggugcugggccccugcc

SEQ ID NO: 1865294 - RNA, 22 nt, Human
ggguucaagcgauucuucugcu

SEQ ID NO: 1865295 - RNA, 23 nt, Human
ggguucaagcgauucuucugcuu

SEQ ID NO: 1865296 - RNA, 19 nt, Human
ggguuccuuccucugagcc

SEQ ID NO: 1865297 - RNA, 12 nt, Human
ggguucuaccca

SEQ ID NO: 1865298 - RNA, 21 nt, Human
ggguuccuuccucugagccuu

SEQ ID NO: 1865299 - RNA, 20 nt, Human
ggguuccuuccucugagccu

SEQ ID NO: 1865300 - RNA, 16 nt, Human
ggguucuuucuuccuc

SEQ ID NO: 1865301 - RNA, 17 nt, Human
ggguucuuucuuccucu

SEQ ID NO: 1865302 - RNA, 19 nt, Human
ggguucuuucuuccucugc

SEQ ID NO: 1865303 - RNA, 16 nt, Human
ggggcaacccugguga

SEQ ID NO: 1865304 - RNA, 17 nt, Human
ggggcugaggugggagg

SEQ ID NO: 1865305 - RNA, 19 nt, Human
ggggaaaaucagccugcuc

SEQ ID NO: 1865306 - RNA, 17 nt, Human
ggggaaaaucagccugc

SEQ ID NO: 1865307 - RNA, 16 nt, Human
ggggaaaaucagccug

SEQ ID NO: 1865308 - RNA, 11 nt, Human
gggccugggcc

SEQ ID NO: 1865309 - RNA, 22 nt, Human
gggcuuggggaccagagcugcc

SEQ ID NO: 1865310 - RNA, 24 nt, Human
ggggaaaaucagccugcuccagcu

SEQ ID NO: 1865311 - RNA, 21 nt, Human
ggggaaaaucagccugcucca

SEQ ID NO: 1865312 - RNA, 18 nt, Human
ggggaggggcugugggcg

SEQ ID NO: 1865313 - RNA, 22 nt, Human
ggggcugcaccggcuggccugg

SEQ ID NO: 1865314 - RNA, 21 nt, Human
ggggcugcaccggcuggccug

SEQ ID NO: 1865315 - RNA, 12 nt, Human
ggggcugcaccg

SEQ ID NO: 1865316 - RNA, 19 nt, Human
ggggcugaggugggaggau

SEQ ID NO: 1865317 - RNA, 23 nt, Human
ggggcugcaccggcuggccuggc

SEQ ID NO: 1865318 - RNA, 22 nt, Human
gggggaggugggauccuccagg

SEQ ID NO: 1865319 - RNA, 17 nt, Human
gggguggggaccucagg

SEQ ID NO: 1865320 - RNA, 20 nt, Human
gggguggggggggugcuggg

SEQ ID NO: 1865321 - RNA, 18 nt, Human
ggggugcugggccccugc

SEQ ID NO: 1865322 - RNA, 12 nt, Human
gggguggccucc

SEQ ID NO: 1865323 - RNA, 12 nt, Human
gggucugaggaa

SEQ ID NO: 1865324 - RNA, 21 nt, Human
gggucugaggaauccagaccc

SEQ ID NO: 1865325 - RNA, 17 nt, Human
ggguaagugagagaggg

SEQ ID NO: 1865326 - RNA, 14 nt, Human
gggucucacucugu

SEQ ID NO: 1865327 - RNA, 21 nt, Human
gggccccugccucucugcagg

SEQ ID NO: 1865328 - RNA, 19 nt, Human
gggccccugccucucugca

SEQ ID NO: 1865329 - RNA, 18 nt, Human
gggccccugccucucugc

SEQ ID NO: 1865330 - RNA, 17 nt, Human
gggccccugccucucug

SEQ ID NO: 1865331 - RNA, 15 nt, Human
gggccccugccucuc

SEQ ID NO: 1865332 - RNA, 13 nt, Human
gggccccugccuc

SEQ ID NO: 1865333 - RNA, 14 nt, Human
gggccccagaggcu

SEQ ID NO: 1865334 - RNA, 13 nt, Human
gggccuggccuga

SEQ ID NO: 1865335 - RNA, 13 nt, Human
gggcccugccucc

SEQ ID NO: 1865336 - RNA, 22 nt, Human
gggccccugccucucugcaggu

SEQ ID NO: 1865337 - RNA, 13 nt, Human
gggccuggcuccc

SEQ ID NO: 1865338 - RNA, 17 nt, Human
gggccuggcucaggugg

SEQ ID NO: 1865339 - RNA, 18 nt, Human
gggccuggccugagcugg

SEQ ID NO: 1865340 - RNA, 14 nt, Human
gggccuggccugag

SEQ ID NO: 1865341 - RNA, 19 nt, Human
gggccuggccugagcuggg

SEQ ID NO: 1865342 - RNA, 20 nt, Human
gggcauggccagguggccac

SEQ ID NO: 1865343 - RNA, 17 nt, Human
gggcauggccagguggc

SEQ ID NO: 1865344 - RNA, 15 nt, Human
gggcauggccaggug

SEQ ID NO: 1865345 - RNA, 12 nt, Human
gggcaugacacg

SEQ ID NO: 1865346 - RNA, 23 nt, Human
gggccacagagaaaguacuucuc

SEQ ID NO: 1865347 - RNA, 16 nt, Human
gggccacagagaaagu

SEQ ID NO: 1865348 - RNA, 17 nt, Human
gggcccagagagggugg

SEQ ID NO: 1865349 - RNA, 20 nt, Human
gggcaacccccagccugcua

SEQ ID NO: 1865350 - RNA, 18 nt, Human
gggcaacccuggugacca

SEQ ID NO: 1865351 - RNA, 23 nt, Human
gggauccuggaguucugguuccu

SEQ ID NO: 1865352 - RNA, 16 nt, Human
gggauccuccaggugc

SEQ ID NO: 1865353 - RNA, 15 nt, Human
gggauccuccaggug

SEQ ID NO: 1865354 - RNA, 21 nt, Human
gggauaugauuuaaaucagcc

SEQ ID NO: 1865355 - RNA, 13 nt, Human
gggauagagagag

SEQ ID NO: 1865356 - RNA, 13 nt, Human
gggacugagaaau

SEQ ID NO: 1865357 - RNA, 17 nt, Human
gggaggugggauccucc

SEQ ID NO: 1865358 - RNA, 16 nt, Human
gggaggugaccccagg

SEQ ID NO: 1865359 - RNA, 18 nt, Human
gggagugacagaggcagc

SEQ ID NO: 1865360 - RNA, 11 nt, Human
gggagugagcu

SEQ ID NO: 1865361 - RNA, 14 nt, Human
gggagugagcuggu

SEQ ID NO: 1865362 - RNA, 17 nt, Human
gggcagguugguggggg

SEQ ID NO: 1865363 - RNA, 12 nt, Human
gggcagagcaga

SEQ ID NO: 1865364 - RNA, 11 nt, Human
gggcagagcag

SEQ ID NO: 1865365 - RNA, 18 nt, Human
gggcagaaggaagacuuc

SEQ ID NO: 1865366 - RNA, 14 nt, Human
gggcagaaggaaga

SEQ ID NO: 1865367 - RNA, 16 nt, Human
gggcacugguggcccg

SEQ ID NO: 1865368 - RNA, 13 nt, Human
gggcacugguggc

SEQ ID NO: 1865369 - RNA, 20 nt, Human
gggcacucagaagacacuga

SEQ ID NO: 1865370 - RNA, 16 nt, Human
gggcacagggucucua

SEQ ID NO: 1865371 - RNA, 13 nt, Human
gggcacagggucu

SEQ ID NO: 1865372 - RNA, 14 nt, Human
gggcaccggggccu

SEQ ID NO: 1865373 - RNA, 16 nt, Human
gggcacucagaagaca

SEQ ID NO: 1865374 - RNA, 19 nt, Human
gggcacucagaagacacug

SEQ ID NO: 1865375 - RNA, 21 nt, Human
gggcacagaaaauggaagaca

SEQ ID NO: 1865376 - RNA, 20 nt, Human
gggcacagaaaauggaagac

SEQ ID NO: 1865377 - RNA, 18 nt, Human
gggcacagaaaauggaag

SEQ ID NO: 1865378 - RNA, 23 nt, Human
gggcacaccgggcacucagaaga

SEQ ID NO: 1865379 - RNA, 23 nt, Human
ggcugcuucaaggauccugagcc

SEQ ID NO: 1865380 - RNA, 19 nt, Human
ggcugggagagccuuccag

SEQ ID NO: 1865381 - RNA, 23 nt, Human
ggcugggagagccuuccaggggu

SEQ ID NO: 1865382 - RNA, 20 nt, Human
ggcugggagagccuuccagg

SEQ ID NO: 1865383 - RNA, 14 nt, Human
ggcugggcagagga

SEQ ID NO: 1865384 - RNA, 13 nt, Human
ggcugggcagagg

SEQ ID NO: 1865385 - RNA, 19 nt, Human
ggcugggcagaggaaagca

SEQ ID NO: 1865386 - RNA, 15 nt, Human
ggcugggcagaggaa

SEQ ID NO: 1865387 - RNA, 18 nt, Human
ggcugggagagccuucca

SEQ ID NO: 1865388 - RNA, 22 nt, Human
ggcugcuucaaggauccugagc

SEQ ID NO: 1865389 - RNA, 14 nt, Human
ggcugcuucaagga

SEQ ID NO: 1865390 - RNA, 12 nt, Human
ggcugcuucaag

SEQ ID NO: 1865391 - RNA, 11 nt, Human
ggcugcuucaa

SEQ ID NO: 1865392 - RNA, 17 nt, Human
ggcugcugaaggcucga

SEQ ID NO: 1865393 - RNA, 15 nt, Human
ggcugcugaaggcuc

SEQ ID NO: 1865394 - RNA, 18 nt, Human
ggcugcugaaggcucgag

SEQ ID NO: 1865395 - RNA, 12 nt, Human
ggcugcagggag

SEQ ID NO: 1865396 - RNA, 14 nt, Human
ggcugcugaaggcu

SEQ ID NO: 1865397 - RNA, 13 nt, Human
ggcugcagggagu

SEQ ID NO: 1865398 - RNA, 14 nt, Human
ggcucuggagccca

SEQ ID NO: 1865399 - RNA, 13 nt, Human
ggcucuggagccc

SEQ ID NO: 1865400 - RNA, 17 nt, Human
ggcucugccucccauca

SEQ ID NO: 1865401 - RNA, 20 nt, Human
ggccccugcccggcugcgga

SEQ ID NO: 1865402 - RNA, 16 nt, Human
ggccccugcccggcug

SEQ ID NO: 1865403 - RNA, 17 nt, Human
ggccccugcccggcugc

SEQ ID NO: 1865404 - RNA, 15 nt, Human
ggcugaggugggagg

SEQ ID NO: 1865405 - RNA, 13 nt, Human
ggcugagguggga

SEQ ID NO: 1865406 - RNA, 19 nt, Human
ggcugcaccggcuggccug

SEQ ID NO: 1865407 - RNA, 18 nt, Human
ggcugcaccggcuggccu

SEQ ID NO: 1865408 - RNA, 17 nt, Human
ggcugcaccggcuggcc

SEQ ID NO: 1865409 - RNA, 24 nt, Human
ggcugcaaaggguaucaggugcug

SEQ ID NO: 1865410 - RNA, 22 nt, Human
ggcugcaaaggguaucaggugc

SEQ ID NO: 1865411 - RNA, 23 nt, Human
ggcugcaaaggguaucaggugcu

SEQ ID NO: 1865412 - RNA, 18 nt, Human
ggcugcaaaggguaucag

SEQ ID NO: 1865413 - RNA, 21 nt, Human
ggcuuagucacugagacagcc

SEQ ID NO: 1865414 - RNA, 18 nt, Human
ggcugggcuucaguggca

SEQ ID NO: 1865415 - RNA, 13 nt, Human
ggcugggcuucag

SEQ ID NO: 1865416 - RNA, 17 nt, Human
ggcugggcuucaguggc

SEQ ID NO: 1865417 - RNA, 17 nt, Human
ggcugggcucccuuccc

SEQ ID NO: 1865418 - RNA, 18 nt, Human
ggcugggcucccuuccca

SEQ ID NO: 1865419 - RNA, 12 nt, Human
ggcugggcuuca

SEQ ID NO: 1865420 - RNA, 17 nt, Human
ggcuuuucacugcuggc

SEQ ID NO: 1865421 - RNA, 15 nt, Human
ggcuuuucacugcug

SEQ ID NO: 1865422 - RNA, 14 nt, Human
ggcuuuucacugcu

SEQ ID NO: 1865423 - RNA, 10 nt, Human
ggcuuuugug

SEQ ID NO: 1865424 - RNA, 22 nt, Human
ggcuuuucacugcuggcugccu

SEQ ID NO: 1865425 - RNA, 19 nt, Human
ggcuuuucacugcuggcug

SEQ ID NO: 1865426 - RNA, 21 nt, Human
ggcuuggggaccagagcugcc

SEQ ID NO: 1865427 - RNA, 22 nt, Human
ggcuugaguuuaaauuguaaua

SEQ ID NO: 1865428 - RNA, 16 nt, Human
gggaagggggcuggga

SEQ ID NO: 1865429 - RNA, 14 nt, Human
gggaagggggcugg

SEQ ID NO: 1865430 - RNA, 17 nt, Human
gggaagggggcugggac

SEQ ID NO: 1865431 - RNA, 14 nt, Human
ggcuuuugugcauu

SEQ ID NO: 1865432 - RNA, 21 nt, Human
gggaaggauacaaaagcaugu

SEQ ID NO: 1865433 - RNA, 23 nt, Human
gggaaggauacaaaagcauguga

SEQ ID NO: 1865434 - RNA, 22 nt, Human
gggaaggcagggagggccuggg

SEQ ID NO: 1865435 - RNA, 14 nt, Human
gggaccccugagcu

SEQ ID NO: 1865436 - RNA, 20 nt, Human
gggaccccgagccuggcucc

SEQ ID NO: 1865437 - RNA, 18 nt, Human
gggaccccgagccuggcu

SEQ ID NO: 1865438 - RNA, 17 nt, Human
gggaauuucuucaacuc

SEQ ID NO: 1865439 - RNA, 23 nt, Human
gggacaaggacuaggguccuggg

SEQ ID NO: 1865440 - RNA, 15 nt, Human
gggaccucaggccug

SEQ ID NO: 1865441 - RNA, 13 nt, Human
gggaccucaggcc

SEQ ID NO: 1865442 - RNA, 12 nt, Human
gggaccucaggc

SEQ ID NO: 1865443 - RNA, 17 nt, Human
gggacuacaggcaccca

SEQ ID NO: 1865444 - RNA, 16 nt, Human
gggacucaaugcacug

SEQ ID NO: 1865445 - RNA, 20 nt, Human
gcugggacaugggaaagggg

SEQ ID NO: 1865446 - RNA, 17 nt, Human
gcuggccgggagccuga

SEQ ID NO: 1865447 - RNA, 13 nt, Human
gcuggcccugccc

SEQ ID NO: 1865448 - RNA, 13 nt, Human
gcuggccgggacc

SEQ ID NO: 1865449 - RNA, 12 nt, Human
gcuggcccugcc

SEQ ID NO: 1865450 - RNA, 19 nt, Human
gcugggacuacagguguga

SEQ ID NO: 1865451 - RNA, 13 nt, Human
gcugggacuacag

SEQ ID NO: 1865452 - RNA, 18 nt, Human
gcugggacuacaggcacc

SEQ ID NO: 1865453 - RNA, 19 nt, Human
gcugggacuacaggcaccc

SEQ ID NO: 1865454 - RNA, 20 nt, Human
gcugggacuacaggcaccca

SEQ ID NO: 1865455 - RNA, 16 nt, Human
gcuggauuacaggcau

SEQ ID NO: 1865456 - RNA, 22 nt, Human
gcugcuugggcuucauccuccu

SEQ ID NO: 1865457 - RNA, 17 nt, Human
gcugcuugggcuucauc

SEQ ID NO: 1865458 - RNA, 18 nt, Human
gcuggaccuugaacuggg

SEQ ID NO: 1865459 - RNA, 21 nt, Human
gcuggaccuugaacuggguac

SEQ ID NO: 1865460 - RNA, 22 nt, Human
gcuggaccuugaacuggguacu

SEQ ID NO: 1865461 - RNA, 16 nt, Human
gcugcuugggcuucau

SEQ ID NO: 1865462 - RNA, 22 nt, Human
gcugcuucaaggauccugagcc

SEQ ID NO: 1865463 - RNA, 21 nt, Human
gcugcuucaaggauccugagc

SEQ ID NO: 1865464 - RNA, 23 nt, Human
gcugcuucaaggauccugagcca

SEQ ID NO: 1865465 - RNA, 13 nt, Human
gcugcuucaagga

SEQ ID NO: 1865466 - RNA, 19 nt, Human
gcugcgguccacccaggag

SEQ ID NO: 1865467 - RNA, 17 nt, Human
gcugcgguccacccagg

SEQ ID NO: 1865468 - RNA, 18 nt, Human
gcugcgguccacccagga

SEQ ID NO: 1865469 - RNA, 22 nt, Human
gcuagcagcagggagggcuucu

SEQ ID NO: 1865470 - RNA, 19 nt, Human
gcugcccuggugcugccac

SEQ ID NO: 1865471 - RNA, 18 nt, Human
gcugcccuggugcugcca

SEQ ID NO: 1865472 - RNA, 11 nt, Human
gcugcccugug

SEQ ID NO: 1865473 - RNA, 22 nt, Human
gcugcccuggugcugccacacu

SEQ ID NO: 1865474 - RNA, 20 nt, Human
gcugcccuggugcugccaca

SEQ ID NO: 1865475 - RNA, 14 nt, Human
gcugcccugugagu

SEQ ID NO: 1865476 - RNA, 12 nt, Human
gcugcccuguga

SEQ ID NO: 1865477 - RNA, 23 nt, Human
gcugcccuggugcugccacacuu

SEQ ID NO: 1865478 - RNA, 17 nt, Human
gcugcccuuucugggca

SEQ ID NO: 1865479 - RNA, 23 nt, Human
gcugggggaagaagcucucuccu

SEQ ID NO: 1865480 - RNA, 12 nt, Human
gcuggggccagu

SEQ ID NO: 1865481 - RNA, 19 nt, Human
gcuggggccaggcuggguc

SEQ ID NO: 1865482 - RNA, 16 nt, Human
gcuggggccaggcugg

SEQ ID NO: 1865483 - RNA, 18 nt, Human
gcugggcuucaguggcag

SEQ ID NO: 1865484 - RNA, 19 nt, Human
gcugggcuucaguggcagc

SEQ ID NO: 1865485 - RNA, 13 nt, Human
gcugggggccuca

SEQ ID NO: 1865486 - RNA, 15 nt, Human
gcuggucccacucag

SEQ ID NO: 1865487 - RNA, 19 nt, Human
gcuggucccacucagucca

SEQ ID NO: 1865488 - RNA, 19 nt, Human
gcugggggccucagugcca

SEQ ID NO: 1865489 - RNA, 20 nt, Human
gcugggggccucagugccac

SEQ ID NO: 1865490 - RNA, 18 nt, Human
gcugggagagccuuccag

SEQ ID NO: 1865491 - RNA, 17 nt, Human
gcugggagagccuucca

SEQ ID NO: 1865492 - RNA, 13 nt, Human
gcugggagagccu

SEQ ID NO: 1865493 - RNA, 12 nt, Human
gcugggagagcc

SEQ ID NO: 1865494 - RNA, 22 nt, Human
gcugggagagccuuccaggggu

SEQ ID NO: 1865495 - RNA, 19 nt, Human
gcugggagagccuuccagg

SEQ ID NO: 1865496 - RNA, 21 nt, Human
gcugggaugauuggagggggg

SEQ ID NO: 1865497 - RNA, 15 nt, Human
gcugggagcucugca

SEQ ID NO: 1865498 - RNA, 16 nt, Human
gcugggagcucugcag

SEQ ID NO: 1865499 - RNA, 20 nt, Human
gcugggauuacaggcuccug

SEQ ID NO: 1865500 - RNA, 19 nt, Human
gcugggauuacaggcuccu

SEQ ID NO: 1865501 - RNA, 18 nt, Human
gcugggauuacaggcgug

SEQ ID NO: 1865502 - RNA, 17 nt, Human
gcugggauuacaggcgu

SEQ ID NO: 1865503 - RNA, 21 nt, Human
gcugggauuacaggcuccugc

SEQ ID NO: 1865504 - RNA, 17 nt, Human
gcugggcuucaguggca

SEQ ID NO: 1865505 - RNA, 23 nt, Human
gcugucaauuacaggaaguacug

SEQ ID NO: 1865506 - RNA, 22 nt, Human
gcugucaauuacaggaaguacu

SEQ ID NO: 1865507 - RNA, 19 nt, Human
gcugucaauuacaggaagu

SEQ ID NO: 1865508 - RNA, 17 nt, Human
gcugucaauuacaggaa

SEQ ID NO: 1865509 - RNA, 21 nt, Human
gcugucccuuacgugaguccu

SEQ ID NO: 1865510 - RNA, 22 nt, Human
gcugucccuuacgugaguccug

SEQ ID NO: 1865511 - RNA, 19 nt, Human
gcugucccuuacgugaguc

SEQ ID NO: 1865512 - RNA, 17 nt, Human
gcugucuccauguuuga

SEQ ID NO: 1865513 - RNA, 21 nt, Human
gcugguuagagguucccuuug

SEQ ID NO: 1865514 - RNA, 15 nt, Human
gcugguucaggguug

SEQ ID NO: 1865515 - RNA, 16 nt, Human
gcugucaauuacagga

SEQ ID NO: 1865516 - RNA, 22 nt, Human
gcugguucaggguuggccccug

SEQ ID NO: 1865517 - RNA, 16 nt, Human
gcuggugucaccugaa

SEQ ID NO: 1865518 - RNA, 18 nt, Human
gcuggugucaccugaaga

SEQ ID NO: 1865519 - RNA, 20 nt, Human
gcuggucccacucaguccau

SEQ ID NO: 1865520 - RNA, 13 nt, Human
gcuguucagcugg

SEQ ID NO: 1865521 - RNA, 20 nt, Human
gcuuccagugaggcucugcc

SEQ ID NO: 1865522 - RNA, 19 nt, Human
gcuuccagugaggcucugc

SEQ ID NO: 1865523 - RNA, 21 nt, Human
gcuuccagugaggcucugccc

SEQ ID NO: 1865524 - RNA, 17 nt, Human
gcuucucacugccaugc

SEQ ID NO: 1865525 - RNA, 17 nt, Human
gcuugcccuggugccuc

SEQ ID NO: 1865526 - RNA, 19 nt, Human
gcuugcccuggugccucac

SEQ ID NO: 1865527 - RNA, 13 nt, Human
gcuuggaggaagg

SEQ ID NO: 1865528 - RNA, 15 nt, Human
gcuuggaggaaggaa

SEQ ID NO: 1865529 - RNA, 14 nt, Human
gcuuggaggaagga

SEQ ID NO: 1865530 - RNA, 16 nt, Human
gcuucuguugcugccu

SEQ ID NO: 1865531 - RNA, 22 nt, Human
gcuugcagagaugaggccgcca

SEQ ID NO: 1865532 - RNA, 14 nt, Human
gcuuugggcugccc

SEQ ID NO: 1865533 - RNA, 14 nt, Human
ggaaaaacugauuu

SEQ ID NO: 1865534 - RNA, 19 nt, Human
ggaaaaaccacccccaaau

SEQ ID NO: 1865535 - RNA, 13 nt, Human
ggaaaaauagccu

SEQ ID NO: 1865536 - RNA, 15 nt, Human
ggaaaaauagccugc

SEQ ID NO: 1865537 - RNA, 22 nt, Human
ggaaaaccaagccguggcuucc

SEQ ID NO: 1865538 - RNA, 16 nt, Human
gcuuugggcugcccug

SEQ ID NO: 1865539 - RNA, 15 nt, Human
gcuuugggcugcccu

SEQ ID NO: 1865540 - RNA, 14 nt, Human
gcuuuuacuuaaac

SEQ ID NO: 1865541 - RNA, 20 nt, Human
ggaaaaaauaacaaugaaag

SEQ ID NO: 1865542 - RNA, 14 nt, Human
ggaagccagcaggc

SEQ ID NO: 1865543 - RNA, 13 nt, Human
ggaagccagcagg

SEQ ID NO: 1865544 - RNA, 18 nt, Human
ggaagccagcaggcucuc

SEQ ID NO: 1865545 - RNA, 17 nt, Human
ggaagccagcaggcucu

SEQ ID NO: 1865546 - RNA, 16 nt, Human
ggaagccagcaggcuc

SEQ ID NO: 1865547 - RNA, 15 nt, Human
ggaagccagcaggcu

SEQ ID NO: 1865548 - RNA, 22 nt, Human
ggaagcacaugccucucucagg

SEQ ID NO: 1865549 - RNA, 21 nt, Human
ggaagcacaugccucucucag

SEQ ID NO: 1865550 - RNA, 23 nt, Human
ggaagcacaugccucucucaggc

SEQ ID NO: 1865551 - RNA, 13 nt, Human
ggaagcagcuuuc

SEQ ID NO: 1865552 - RNA, 13 nt, Human
ggaagagccuugc

SEQ ID NO: 1865553 - RNA, 17 nt, Human
ggaagcacaugccucuc

SEQ ID NO: 1865554 - RNA, 15 nt, Human
ggaagcacaugccuc

SEQ ID NO: 1865555 - RNA, 14 nt, Human
ggaagcacaugccu

SEQ ID NO: 1865556 - RNA, 13 nt, Human
ggaagcacaugcc

SEQ ID NO: 1865557 - RNA, 17 nt, Human
ggaagcacagcuucauu

SEQ ID NO: 1865558 - RNA, 17 nt, Human
ggaacagacuggaagca

SEQ ID NO: 1865559 - RNA, 14 nt, Human
ggaaaauaaauuau

SEQ ID NO: 1865560 - RNA, 15 nt, Human
ggaaaaucagccugc

SEQ ID NO: 1865561 - RNA, 19 nt, Human
ggaacagacuggaagcaca

SEQ ID NO: 1865562 - RNA, 20 nt, Human
ggaacagacuggaagcacag

SEQ ID NO: 1865563 - RNA, 23 nt, Human
ggaacuagacucccaagcuggac

SEQ ID NO: 1865564 - RNA, 20 nt, Human
ggagcaaaaucgaugcagug

SEQ ID NO: 1865565 - RNA, 12 nt, Human
ggagcccuggga

SEQ ID NO: 1865566 - RNA, 13 nt, Human
ggagcccugggag

SEQ ID NO: 1865567 - RNA, 20 nt, Human
ggagauuuacaacuggggga

SEQ ID NO: 1865568 - RNA, 15 nt, Human
ggagaggggcacagg

SEQ ID NO: 1865569 - RNA, 21 nt, Human
ggacugccagucccccugccc

SEQ ID NO: 1865570 - RNA, 21 nt, Human
ggagaccccuuggggagcagg

SEQ ID NO: 1865571 - RNA, 21 nt, Human
ggagagcuagcagcagggagg

SEQ ID NO: 1865572 - RNA, 17 nt, Human
ggagagcuagcagcagg

SEQ ID NO: 1865573 - RNA, 11 nt, Human
ggacucugccu

SEQ ID NO: 1865574 - RNA, 12 nt, Human
ggacuccucugu

SEQ ID NO: 1865575 - RNA, 14 nt, Human
ggacuccucugucc

SEQ ID NO: 1865576 - RNA, 15 nt, Human
ggacuccucugucca

SEQ ID NO: 1865577 - RNA, 20 nt, Human
ggaagccagcaggcucucag

SEQ ID NO: 1865578 - RNA, 11 nt, Human
ggagugacaga

SEQ ID NO: 1865579 - RNA, 16 nt, Human
ggagugacagaggcag

SEQ ID NO: 1865580 - RNA, 20 nt, Human
ggagucccaccuuggcugca

SEQ ID NO: 1865581 - RNA, 21 nt, Human
ggagucccaccuuggcugcag

SEQ ID NO: 1865582 - RNA, 15 nt, Human
ggagggcuccagaca

SEQ ID NO: 1865583 - RNA, 14 nt, Human
ggagggcuccagac

SEQ ID NO: 1865584 - RNA, 17 nt, Human
ggagggcuccagacaca

SEQ ID NO: 1865585 - RNA, 23 nt, Human
ggagugaguugauagcacagacc

SEQ ID NO: 1865586 - RNA, 16 nt, Human
ggaucacagccucuga

SEQ ID NO: 1865587 - RNA, 17 nt, Human
ggagugacagaggcagc

SEQ ID NO: 1865588 - RNA, 18 nt, Human
ggagugacagaggcagcc

SEQ ID NO: 1865589 - RNA, 19 nt, Human
ggagugacagaggcagccc

SEQ ID NO: 1865590 - RNA, 21 nt, Human
ggagugacagaggcagcccca

SEQ ID NO: 1865591 - RNA, 12 nt, Human
ggagugagcugg

SEQ ID NO: 1865592 - RNA, 21 nt, Human
ggagugaguugauagcacaga

SEQ ID NO: 1865593 - RNA, 14 nt, Human
ggagugagcugguu

SEQ ID NO: 1865594 - RNA, 20 nt, Human
ggaggacgcucucuggccuu

SEQ ID NO: 1865595 - RNA, 21 nt, Human
ggaggacgcucucuggccuuc

SEQ ID NO: 1865596 - RNA, 19 nt, Human
ggaggacgcucucuggccu

SEQ ID NO: 1865597 - RNA, 12 nt, Human
ggagggagggcu

SEQ ID NO: 1865598 - RNA, 13 nt, Human
ggagggcuccaga

SEQ ID NO: 1865599 - RNA, 12 nt, Human
ggagggcuccag

SEQ ID NO: 1865600 - RNA, 21 nt, Human
ggaggaucucuugagccuggg

SEQ ID NO: 1865601 - RNA, 17 nt, Human
ggaggaucucuugagcc

SEQ ID NO: 1865602 - RNA, 23 nt, Human
ggaggaucacuugaguccagaag

SEQ ID NO: 1865603 - RNA, 15 nt, Human
ggaggauguucuggg

SEQ ID NO: 1865604 - RNA, 21 nt, Human
ggccccucagggucccuggug

SEQ ID NO: 1865605 - RNA, 20 nt, Human
ggccccucagggucccuggu

SEQ ID NO: 1865606 - RNA, 19 nt, Human
ggccccucagggucccugg

SEQ ID NO: 1865607 - RNA, 16 nt, Human
ggccccucaggguccc

SEQ ID NO: 1865608 - RNA, 17 nt, Human
ggccccugccacccugg

SEQ ID NO: 1865609 - RNA, 18 nt, Human
ggccccugccacccuggg

SEQ ID NO: 1865610 - RNA, 13 nt, Human
ggccccugcccgg

SEQ ID NO: 1865611 - RNA, 13 nt, Human
ggccccugccacc

SEQ ID NO: 1865612 - RNA, 16 nt, Human
ggccccugccacccug

SEQ ID NO: 1865613 - RNA, 12 nt, Human
ggccccugccac

SEQ ID NO: 1865614 - RNA, 12 nt, Human
ggccaggcuggu

SEQ ID NO: 1865615 - RNA, 22 nt, Human
ggccaugggacagggaggacgc

SEQ ID NO: 1865616 - RNA, 13 nt, Human
ggccaugggccuc

SEQ ID NO: 1865617 - RNA, 11 nt, Human
ggccacuguga

SEQ ID NO: 1865618 - RNA, 14 nt, Human
ggccaggagccucc

SEQ ID NO: 1865619 - RNA, 16 nt, Human
ggccacugugaagaga

SEQ ID NO: 1865620 - RNA, 16 nt, Human
ggccaggagccuccug

SEQ ID NO: 1865621 - RNA, 14 nt, Human
ggccaggccagagg

SEQ ID NO: 1865622 - RNA, 16 nt, Human
ggccaggccagaggga

SEQ ID NO: 1865623 - RNA, 22 nt, Human
ggccaggcugggucgcccugga

SEQ ID NO: 1865624 - RNA, 18 nt, Human
ggccaggcugggucgccc

SEQ ID NO: 1865625 - RNA, 11 nt, Human
ggccaggcugg

SEQ ID NO: 1865626 - RNA, 17 nt, Human
ggccacaagacccuugu

SEQ ID NO: 1865627 - RNA, 16 nt, Human
ggccacaagacccuug

SEQ ID NO: 1865628 - RNA, 15 nt, Human
ggcauuccccaggag

SEQ ID NO: 1865629 - RNA, 12 nt, Human
ggccaaguucuu

SEQ ID NO: 1865630 - RNA, 22 nt, Human
ggccaccugcggugcuaucucc

SEQ ID NO: 1865631 - RNA, 16 nt, Human
ggccaccugcggugcu

SEQ ID NO: 1865632 - RNA, 15 nt, Human
ggcagguuggugggg

SEQ ID NO: 1865633 - RNA, 23 nt, Human
ggcauguucucugaggacacuaa

SEQ ID NO: 1865634 - RNA, 21 nt, Human
ggcagcucaccucucccuugg

SEQ ID NO: 1865635 - RNA, 18 nt, Human
ggcagcucaccucucccu

SEQ ID NO: 1865636 - RNA, 22 nt, Human
ggcagcucaccucucccuugga

SEQ ID NO: 1865637 - RNA, 21 nt, Human
ggcagcuugaggguugggcug

SEQ ID NO: 1865638 - RNA, 19 nt, Human
ggcagcugcgguccaccca

SEQ ID NO: 1865639 - RNA, 23 nt, Human
ggcaggucuugaacuccuggccu

SEQ ID NO: 1865640 - RNA, 14 nt, Human
ggcaggaaggcuga

SEQ ID NO: 1865641 - RNA, 13 nt, Human
ggcagguccaggg

SEQ ID NO: 1865642 - RNA, 17 nt, Human
ggcagaggaaagcaaag

SEQ ID NO: 1865643 - RNA, 23 nt, Human
ggcagaguugaagacagagcuac

SEQ ID NO: 1865644 - RNA, 23 nt, Human
ggcagauacaggaaaagcugcug

SEQ ID NO: 1865645 - RNA, 16 nt, Human
ggcaaggcugucaauu

SEQ ID NO: 1865646 - RNA, 17 nt, Human
ggcacccggccccugcu

SEQ ID NO: 1865647 - RNA, 15 nt, Human
ggcacccggccccug

SEQ ID NO: 1865648 - RNA, 16 nt, Human
ggcacccggccccugc

SEQ ID NO: 1865649 - RNA, 16 nt, Human
ggcagagcagagacca

SEQ ID NO: 1865650 - RNA, 15 nt, Human
ggcagagcagagacc

SEQ ID NO: 1865651 - RNA, 20 nt, Human
ggcagagcagagaccauccc

SEQ ID NO: 1865652 - RNA, 19 nt, Human
ggcaacugcauuggcuuug

SEQ ID NO: 1865653 - RNA, 15 nt, Human
ggcaaggcugucaau

SEQ ID NO: 1865654 - RNA, 23 nt, Human
ggcaacuugggaacuagacuccc

SEQ ID NO: 1865655 - RNA, 18 nt, Human
ggcaacuugggaacuaga

SEQ ID NO: 1865656 - RNA, 18 nt, Human
ggcaacugcauuggcuuu

SEQ ID NO: 1865657 - RNA, 21 nt, Human
ggaucagucugauucccaagc

SEQ ID NO: 1865658 - RNA, 19 nt, Human
ggcaacccccagccugcua

SEQ ID NO: 1865659 - RNA, 17 nt, Human
uauaaauuuuuuuuguu

SEQ ID NO: 1865660 - RNA, 21 nt, Human
uauaaauuuuuuuuguuucau

SEQ ID NO: 1865661 - RNA, 18 nt, Human
uauaaugaaugaaacauu

SEQ ID NO: 1865662 - RNA, 20 nt, Human
uauaaugaaugaaacauuuu

SEQ ID NO: 1865663 - RNA, 17 nt, Human
uauaauucuacuuugag

SEQ ID NO: 1865664 - RNA, 20 nt, Human
uauaauucacauuguauuca

SEQ ID NO: 1865665 - RNA, 20 nt, Human
uauaauguaagcucuacuga

SEQ ID NO: 1865666 - RNA, 19 nt, Human
uauaauguaagcucuacug

SEQ ID NO: 1865667 - RNA, 14 nt, Human
uauaauguaagcuc

SEQ ID NO: 1865668 - RNA, 17 nt, Human
uauacccccugcaaagc

SEQ ID NO: 1865669 - RNA, 20 nt, Human
uauacucuuauagacaacau

SEQ ID NO: 1865670 - RNA, 18 nt, Human
uagugaugguuccccugu

SEQ ID NO: 1865671 - RNA, 14 nt, Human
uagugaugguuccc

SEQ ID NO: 1865672 - RNA, 13 nt, Human
uagugaugguucc

SEQ ID NO: 1865673 - RNA, 21 nt, Human
uaguuguaccgcaaugugacu

SEQ ID NO: 1865674 - RNA, 12 nt, Human
uaguuugcaguu

SEQ ID NO: 1865675 - RNA, 23 nt, Human
uaguuugauuaaauucuugcaaa

SEQ ID NO: 1865676 - RNA, 13 nt, Human
uaguuucuccaag

SEQ ID NO: 1865677 - RNA, 15 nt, Human
uaguggauguucuga

SEQ ID NO: 1865678 - RNA, 15 nt, Human
uaguggauggaaggg

SEQ ID NO: 1865679 - RNA, 18 nt, Human
uaguggauggaaggggcu

SEQ ID NO: 1865680 - RNA, 19 nt, Human
uauauuuuuuguuaaauga

SEQ ID NO: 1865681 - RNA, 17 nt, Human
uaucaggugcugccauc

SEQ ID NO: 1865682 - RNA, 16 nt, Human
uaucaugucaaacgug

SEQ ID NO: 1865683 - RNA, 16 nt, Human
uaucaugacaaagacu

SEQ ID NO: 1865684 - RNA, 22 nt, Human
uauccugcuucugauaugcagu

SEQ ID NO: 1865685 - RNA, 22 nt, Human
uaucaugugaaaucauucauuu

SEQ ID NO: 1865686 - RNA, 17 nt, Human
uaucaugugaaaucauu

SEQ ID NO: 1865687 - RNA, 21 nt, Human
uaucaugucaaacgugaaaau

SEQ ID NO: 1865688 - RNA, 15 nt, Human
uaucuaaauguugaa

SEQ ID NO: 1865689 - RNA, 19 nt, Human
uaucgucacugcuuaacuu

SEQ ID NO: 1865690 - RNA, 14 nt, Human
uauauuuuaagacg

SEQ ID NO: 1865691 - RNA, 13 nt, Human
uauauuuuaagac

SEQ ID NO: 1865692 - RNA, 20 nt, Human
uauaugcucugcauguuaca

SEQ ID NO: 1865693 - RNA, 16 nt, Human
uagcacuuugggaggc

SEQ ID NO: 1865694 - RNA, 19 nt, Human
uagcagagaaugaaagggc

SEQ ID NO: 1865695 - RNA, 23 nt, Human
uagcagagaaugaaagggcccag

SEQ ID NO: 1865696 - RNA, 12 nt, Human
uagauguauaua

SEQ ID NO: 1865697 - RNA, 18 nt, Human
uagauaauacaccacuac

SEQ ID NO: 1865698 - RNA, 19 nt, Human
uagagguucaaagauauuu

SEQ ID NO: 1865699 - RNA, 16 nt, Human
uagagguucaaagaua

SEQ ID NO: 1865700 - RNA, 21 nt, Human
uagagguucaaagauauuuug

SEQ ID NO: 1865701 - RNA, 16 nt, Human
uagagagagaccacuu

SEQ ID NO: 1865702 - RNA, 23 nt, Human
uagaaccaggcaacuugggaacu

SEQ ID NO: 1865703 - RNA, 12 nt, Human
uagaaccaggca

SEQ ID NO: 1865704 - RNA, 21 nt, Human
uagaaccucgagguuucucaa

SEQ ID NO: 1865705 - RNA, 17 nt, Human
uaggaagacuuuggaaa

SEQ ID NO: 1865706 - RNA, 16 nt, Human
uaggaagacuuuggaa

SEQ ID NO: 1865707 - RNA, 15 nt, Human
uaggaagacuuugga

SEQ ID NO: 1865708 - RNA, 14 nt, Human
uaggaagacuuugg

SEQ ID NO: 1865709 - RNA, 13 nt, Human
uaggaagacuuug

SEQ ID NO: 1865710 - RNA, 14 nt, Human
uaggaacacuccuu

SEQ ID NO: 1865711 - RNA, 13 nt, Human
uaggaacacuccu

SEQ ID NO: 1865712 - RNA, 21 nt, Human
uaggaacuuaaauaaugugaa

SEQ ID NO: 1865713 - RNA, 17 nt, Human
uaggaacacuccuucac

SEQ ID NO: 1865714 - RNA, 13 nt, Human
uaggccaugggac

SEQ ID NO: 1865715 - RNA, 17 nt, Human
uaggccguuccuucaaa

SEQ ID NO: 1865716 - RNA, 14 nt, Human
uaggccuggccaga

SEQ ID NO: 1865717 - RNA, 13 nt, Human
uaggccuggccag

SEQ ID NO: 1865718 - RNA, 23 nt, Human
uaggaauugacccacaagaaaug

SEQ ID NO: 1865719 - RNA, 20 nt, Human
uaggaauugacccacaagaa

SEQ ID NO: 1865720 - RNA, 14 nt, Human
uaggaauuguguuu

SEQ ID NO: 1865721 - RNA, 15 nt, Human
uaggaagguuaaugu

SEQ ID NO: 1865722 - RNA, 13 nt, Human
uagccccauaauu

SEQ ID NO: 1865723 - RNA, 18 nt, Human
uagcccucacccuggggc

SEQ ID NO: 1865724 - RNA, 14 nt, Human
uagcccaaaaccaa

SEQ ID NO: 1865725 - RNA, 21 nt, Human
uagcucuaggagggcuggcaa

SEQ ID NO: 1865726 - RNA, 17 nt, Human
uagccugccucuucucu

SEQ ID NO: 1865727 - RNA, 22 nt, Human
uagcucauucuccuuguguuac

SEQ ID NO: 1865728 - RNA, 11 nt, Human
uagcugggacu

SEQ ID NO: 1865729 - RNA, 22 nt, Human
uagcugggagaaagagagagcu

SEQ ID NO: 1865730 - RNA, 18 nt, Human
uagcugggacuacaggug

SEQ ID NO: 1865731 - RNA, 12 nt, Human
uagcugggacua

SEQ ID NO: 1865732 - RNA, 20 nt, Human
uagcugggacuacaggcacc

SEQ ID NO: 1865733 - RNA, 23 nt, Human
uacacaaugguuuucuugugugu

SEQ ID NO: 1865734 - RNA, 21 nt, Human
uacacaaugguuuucuugugu

SEQ ID NO: 1865735 - RNA, 17 nt, Human
uacacaaugguuuucuu

SEQ ID NO: 1865736 - RNA, 17 nt, Human
uacacacugcauguuug

SEQ ID NO: 1865737 - RNA, 21 nt, Human
uacacacacacgcgugcacac

SEQ ID NO: 1865738 - RNA, 15 nt, Human
uacacacacauacac

SEQ ID NO: 1865739 - RNA, 16 nt, Human
uacacugugcugaguc

SEQ ID NO: 1865740 - RNA, 14 nt, Human
uacacuguuucaaa

SEQ ID NO: 1865741 - RNA, 22 nt, Human
uacacacugcauguuugugauu

SEQ ID NO: 1865742 - RNA, 17 nt, Human
uaauuuugaaaaacugc

SEQ ID NO: 1865743 - RNA, 13 nt, Human
uaauuuugaaaaa

SEQ ID NO: 1865744 - RNA, 19 nt, Human
uacaagagcuuaacagugu

SEQ ID NO: 1865745 - RNA, 15 nt, Human
uacaagacacaguga

SEQ ID NO: 1865746 - RNA, 22 nt, Human
uacagcuugaccgugaggccag

SEQ ID NO: 1865747 - RNA, 23 nt, Human
uacagcuugaccgugaggccaga

SEQ ID NO: 1865748 - RNA, 17 nt, Human
uacaggaaaagcugcug

SEQ ID NO: 1865749 - RNA, 18 nt, Human
uacaggaaaagcugcuga

SEQ ID NO: 1865750 - RNA, 13 nt, Human
uacaguguacagu

SEQ ID NO: 1865751 - RNA, 22 nt, Human
uacaguguacagucuuguauua

SEQ ID NO: 1865752 - RNA, 15 nt, Human
uacaguguacagucu

SEQ ID NO: 1865753 - RNA, 16 nt, Human
uacaguguacagucuu

SEQ ID NO: 1865754 - RNA, 19 nt, Human
uacaggaaaagcugcugac

SEQ ID NO: 1865755 - RNA, 16 nt, Human
uacaggcacccaccau

SEQ ID NO: 1865756 - RNA, 14 nt, Human
uacaggauuugaaa

SEQ ID NO: 1865757 - RNA, 17 nt, Human
uacacuguuucaaacuu

SEQ ID NO: 1865758 - RNA, 18 nt, Human
uacacuguuucaaacuuu

SEQ ID NO: 1865759 - RNA, 19 nt, Human
uacacuguuucaaacuuua

SEQ ID NO: 1865760 - RNA, 13 nt, Human
uacacuuuaugca

SEQ ID NO: 1865761 - RNA, 24 nt, Human
uacagcaaggagauuuacaacugg

SEQ ID NO: 1865762 - RNA, 13 nt, Human
uacagaauuuuau

SEQ ID NO: 1865763 - RNA, 19 nt, Human
uacccacccccacccaagg

SEQ ID NO: 1865764 - RNA, 17 nt, Human
uacccacccccacccaa

SEQ ID NO: 1865765 - RNA, 23 nt, Human
uacccacccccacccaagggccu

SEQ ID NO: 1865766 - RNA, 15 nt, Human
uacccacccccaccc

SEQ ID NO: 1865767 - RNA, 12 nt, Human
uacccaccccca

SEQ ID NO: 1865768 - RNA, 11 nt, Human
uacccacugcu

SEQ ID NO: 1865769 - RNA, 12 nt, Human
uacccacugcuc

SEQ ID NO: 1865770 - RNA, 13 nt, Human
uacccacugcucu

SEQ ID NO: 1865771 - RNA, 14 nt, Human
uacccacugcucug

SEQ ID NO: 1865772 - RNA, 16 nt, Human
uacccagcgagcccug

SEQ ID NO: 1865773 - RNA, 22 nt, Human
uacccaggugcuaggaacacuc

SEQ ID NO: 1865774 - RNA, 18 nt, Human
uacccagcgagcccuggu

SEQ ID NO: 1865775 - RNA, 13 nt, Human
uaccacagacaua

SEQ ID NO: 1865776 - RNA, 15 nt, Human
uaccaccacgcccgg

SEQ ID NO: 1865777 - RNA, 23 nt, Human
uaccauuuugggguacccacugc

SEQ ID NO: 1865778 - RNA, 19 nt, Human
uacauaagauaaaugugcu

SEQ ID NO: 1865779 - RNA, 18 nt, Human
uacauaagauaaaugugc

SEQ ID NO: 1865780 - RNA, 18 nt, Human
uacaguuccuagguauaa

SEQ ID NO: 1865781 - RNA, 19 nt, Human
uacaguuacucagaauucu

SEQ ID NO: 1865782 - RNA, 23 nt, Human
uacaguuacucagaauucucuag

SEQ ID NO: 1865783 - RNA, 22 nt, Human
uacauaagauaaaugugcugaa

SEQ ID NO: 1865784 - RNA, 21 nt, Human
uacaugagguacugagaguga

SEQ ID NO: 1865785 - RNA, 22 nt, Human
uacaugagguacugagagugaa

SEQ ID NO: 1865786 - RNA, 21 nt, Human
uacauuuuguauauuuguauu

SEQ ID NO: 1865787 - RNA, 17 nt, Human
uacuacaguccucccau

SEQ ID NO: 1865788 - RNA, 12 nt, Human
uacuacaguccu

SEQ ID NO: 1865789 - RNA, 13 nt, Human
uacuaacuuuccu

SEQ ID NO: 1865790 - RNA, 22 nt, Human
uacuaauaaaauuuaaaagucu

SEQ ID NO: 1865791 - RNA, 15 nt, Human
uacuaauagacaauu

SEQ ID NO: 1865792 - RNA, 17 nt, Human
uacuaauagacaauuua

SEQ ID NO: 1865793 - RNA, 19 nt, Human
uacuaaccagcagaaaugc

SEQ ID NO: 1865794 - RNA, 17 nt, Human
uacuaaccagcagaaau

SEQ ID NO: 1865795 - RNA, 18 nt, Human
uacuaaccagcagaaaug

SEQ ID NO: 1865796 - RNA, 22 nt, Human
uaccuuuuuuauacauaaacaa

SEQ ID NO: 1865797 - RNA, 14 nt, Human
uacgacaacuugca

SEQ ID NO: 1865798 - RNA, 15 nt, Human
uacgacaacuugcac

SEQ ID NO: 1865799 - RNA, 18 nt, Human
uaccuuuuuuauacauaa

SEQ ID NO: 1865800 - RNA, 19 nt, Human
uaccuuuuuuauacauaaa

SEQ ID NO: 1865801 - RNA, 20 nt, Human
uaccuuuuuuauacauaaac

SEQ ID NO: 1865802 - RNA, 20 nt, Human
uaccuuuguauucucuccug

SEQ ID NO: 1865803 - RNA, 19 nt, Human
uaccuuugacaaagguaaa

SEQ ID NO: 1865804 - RNA, 22 nt, Human
uacccaucccauaugccugggc

SEQ ID NO: 1865805 - RNA, 20 nt, Human
uacuacaguuuguuaguaug

SEQ ID NO: 1865806 - RNA, 20 nt, Human
uacuacaguccucccaucuc

SEQ ID NO: 1865807 - RNA, 12 nt, Human
uacucaccucac

SEQ ID NO: 1865808 - RNA, 14 nt, Human
uacucaccucaccc

SEQ ID NO: 1865809 - RNA, 16 nt, Human
uacucagaauucucua

SEQ ID NO: 1865810 - RNA, 22 nt, Human
uacucagaauucucuaguuuga

SEQ ID NO: 1865811 - RNA, 15 nt, Human
uacugaggugcuaug

SEQ ID NO: 1865812 - RNA, 17 nt, Human
uacucccaucugugaaa

SEQ ID NO: 1865813 - RNA, 16 nt, Human
uacucccaucugugaa

SEQ ID NO: 1865814 - RNA, 14 nt, Human
uacucccaucugug

SEQ ID NO: 1865815 - RNA, 12 nt, Human
uacucccaucug

SEQ ID NO: 1865816 - RNA, 15 nt, Human
uagaaagaagaugaa

SEQ ID NO: 1865817 - RNA, 23 nt, Human
uagaaauaucugaaaauguaugu

SEQ ID NO: 1865818 - RNA, 21 nt, Human
uagaaauaucugaaaauguau

SEQ ID NO: 1865819 - RNA, 20 nt, Human
uagaaauaucugaaaaugua

SEQ ID NO: 1865820 - RNA, 15 nt, Human
uagaaauauaauuga

SEQ ID NO: 1865821 - RNA, 19 nt, Human
uacuuguggacacagcucu

SEQ ID NO: 1865822 - RNA, 15 nt, Human
uacuuguggacacag

SEQ ID NO: 1865823 - RNA, 18 nt, Human
uacuuguggacacagcuc

SEQ ID NO: 1865824 - RNA, 21 nt, Human
uacuugcucuugaugccuggc

SEQ ID NO: 1865825 - RNA, 17 nt, Human
uacugcauaugaaagga

SEQ ID NO: 1865826 - RNA, 21 nt, Human
uacuguaucaugacaaagacu

SEQ ID NO: 1865827 - RNA, 17 nt, Human
uaauuaaaacacaacau

SEQ ID NO: 1865828 - RNA, 23 nt, Human
uaaugcgcaggcuggcccugccc

SEQ ID NO: 1865829 - RNA, 14 nt, Human
uaaugcgugcauac

SEQ ID NO: 1865830 - RNA, 22 nt, Human
uaaugcgcaggcuggcccugcc

SEQ ID NO: 1865831 - RNA, 19 nt, Human
uaaugcgcaggcuggcccu

SEQ ID NO: 1865832 - RNA, 20 nt, Human
uaauugacaggauuauugga

SEQ ID NO: 1865833 - RNA, 22 nt, Human
uaauugacaggauuauuggaaa

SEQ ID NO: 1865834 - RNA, 18 nt, Human
uaauucuuagcucauucu

SEQ ID NO: 1865835 - RNA, 19 nt, Human
uaauuugugauacaaugcu

SEQ ID NO: 1865836 - RNA, 22 nt, Human
uaauuugugauacaaugcugug

SEQ ID NO: 1865837 - RNA, 14 nt, Human
uaauuugugauaca

SEQ ID NO: 1865838 - RNA, 15 nt, Human
uaauuugugauacaa

SEQ ID NO: 1865839 - RNA, 18 nt, Human
uaauuugugauacaaugc

SEQ ID NO: 1865840 - RNA, 14 nt, Human
uaauacaccacuac

SEQ ID NO: 1865841 - RNA, 21 nt, Human
uaauaguucagguaacaggca

SEQ ID NO: 1865842 - RNA, 11 nt, Human
uaauaaagcug

SEQ ID NO: 1865843 - RNA, 13 nt, Human
uaauaaagacagg

SEQ ID NO: 1865844 - RNA, 20 nt, Human
uaagugguacuaacuuuccu

SEQ ID NO: 1865845 - RNA, 11 nt, Human
uaaucuaaaug

SEQ ID NO: 1865846 - RNA, 23 nt, Human
uaaugaugucguuugaaucacag

SEQ ID NO: 1865847 - RNA, 17 nt, Human
uaaugaugucguuugaa

SEQ ID NO: 1865848 - RNA, 19 nt, Human
uaaugccacuaaauugaca

SEQ ID NO: 1865849 - RNA, 16 nt, Human
uaaucguguccccuau

SEQ ID NO: 1865850 - RNA, 16 nt, Human
uaaucgaccugccucg

SEQ ID NO: 1865851 - RNA, 14 nt, Human
uaaucgaccugccu

SEQ ID NO: 1865852 - RNA, 13 nt, Human
uaaucgaccugcc

SEQ ID NO: 1865853 - RNA, 17 nt, Human
uaagauaaaugugcuga

SEQ ID NO: 1865854 - RNA, 16 nt, Human
uaagauaaaugugcug

SEQ ID NO: 1865855 - RNA, 18 nt, Human
uaagaucguucucugccu

SEQ ID NO: 1865856 - RNA, 23 nt, Human
uaagagggagggagggcuccaga

SEQ ID NO: 1865857 - RNA, 22 nt, Human
uaagagggagggagggcuccag

SEQ ID NO: 1865858 - RNA, 12 nt, Human
uaagagggaggg

SEQ ID NO: 1865859 - RNA, 14 nt, Human
uaagauaaaugugc

SEQ ID NO: 1865860 - RNA, 21 nt, Human
uaacuuuuauaaacuuuaccu

SEQ ID NO: 1865861 - RNA, 22 nt, Human
uaacuuuuauaaacuuuaccuu

SEQ ID NO: 1865862 - RNA, 22 nt, Human
uaagaaccuuuugagugccuua

SEQ ID NO: 1865863 - RNA, 22 nt, Human
uaagaggcagggucucacucug

SEQ ID NO: 1865864 - RNA, 20 nt, Human
uaaggaugcuuguacauaau

SEQ ID NO: 1865865 - RNA, 21 nt, Human
uaaggaugcuuguacauaaug

SEQ ID NO: 1865866 - RNA, 22 nt, Human
uaaggaugcuuguacauaaugc

SEQ ID NO: 1865867 - RNA, 23 nt, Human
uaaggaugcuuguacauaaugcg

SEQ ID NO: 1865868 - RNA, 18 nt, Human
uaaggaugcuuguacaua

SEQ ID NO: 1865869 - RNA, 15 nt, Human
uaaggcaaucauggu

SEQ ID NO: 1865870 - RNA, 19 nt, Human
uaaggaugcuuguacauaa

SEQ ID NO: 1865871 - RNA, 21 nt, Human
uaagccuuuggaaacagcucg

SEQ ID NO: 1865872 - RNA, 17 nt, Human
uaagccuuuggaaacag

SEQ ID NO: 1865873 - RNA, 14 nt, Human
uaagccuuuggaaa

SEQ ID NO: 1865874 - RNA, 20 nt, Human
uaagccagacaucaacagau

SEQ ID NO: 1865875 - RNA, 21 nt, Human
uaagccagacaucaacagaua

SEQ ID NO: 1865876 - RNA, 13 nt, Human
uaagccagacauc

SEQ ID NO: 1865877 - RNA, 15 nt, Human
uaagcaugcacaaau

SEQ ID NO: 1865878 - RNA, 20 nt, Human
uaacuuuuauaaacuuuacc

SEQ ID NO: 1865879 - RNA, 17 nt, Human
uaacugagugccuuuug

SEQ ID NO: 1865880 - RNA, 16 nt, Human
uaacugagugccuuuu

SEQ ID NO: 1865881 - RNA, 14 nt, Human
uaaccagcagaaau

SEQ ID NO: 1865882 - RNA, 16 nt, Human
uaaccagcagaaaugc

SEQ ID NO: 1865883 - RNA, 19 nt, Human
uaaccagcagaaaugccuu

SEQ ID NO: 1865884 - RNA, 19 nt, Human
uaacaggcagauacaggaa

SEQ ID NO: 1865885 - RNA, 14 nt, Human
uaacagaaauguac

SEQ ID NO: 1865886 - RNA, 15 nt, Human
uaacagaaauguaca

SEQ ID NO: 1865887 - RNA, 13 nt, Human
uaacagaaaugua

SEQ ID NO: 1865888 - RNA, 15 nt, Human
uaaauugcuccuuga

SEQ ID NO: 1865889 - RNA, 19 nt, Human
uaaaucagccguguaacca

SEQ ID NO: 1865890 - RNA, 20 nt, Human
uaaaucagacuaugaaguuu

SEQ ID NO: 1865891 - RNA, 19 nt, Human
uaaaucaaguuggcuucua

SEQ ID NO: 1865892 - RNA, 22 nt, Human
uaaauauauuuuaagacgaaac

SEQ ID NO: 1865893 - RNA, 16 nt, Human
uaaauauauuuuaaga

SEQ ID NO: 1865894 - RNA, 18 nt, Human
uaaauauaugcuaagucu

SEQ ID NO: 1865895 - RNA, 22 nt, Human
uaaaguguauuuuuuuacuaau

SEQ ID NO: 1865896 - RNA, 23 nt, Human
uaaaguguauuuuuuuacuaaua

SEQ ID NO: 1865897 - RNA, 21 nt, Human
uaaaguguauuuuuuuacuaa

SEQ ID NO: 1865898 - RNA, 13 nt, Human
uaaaguuucuguu

SEQ ID NO: 1865899 - RNA, 14 nt, Human
uaaaguuuguugaa

SEQ ID NO: 1865900 - RNA, 17 nt, Human
uaaauaaaaauaauccu

SEQ ID NO: 1865901 - RNA, 20 nt, Human
uaaacuuuuuucuuacuguc

SEQ ID NO: 1865902 - RNA, 15 nt, Human
uaaagcuagaaauga

SEQ ID NO: 1865903 - RNA, 14 nt, Human
uaaagcuagaaaug

SEQ ID NO: 1865904 - RNA, 14 nt, Human
uaaaggaauuuaaa

SEQ ID NO: 1865905 - RNA, 21 nt, Human
uaaacacucuugaaaaaugca

SEQ ID NO: 1865906 - RNA, 23 nt, Human
uaaacaagaccacguuucuaaag

SEQ ID NO: 1865907 - RNA, 19 nt, Human
uaaacaagaccacguuucu

SEQ ID NO: 1865908 - RNA, 18 nt, Human
uaaacaagaccacguuuc

SEQ ID NO: 1865909 - RNA, 21 nt, Human
uaaacugcccccucugcccug

SEQ ID NO: 1865910 - RNA, 20 nt, Human
uaaacugcccccucugcccu

SEQ ID NO: 1865911 - RNA, 23 nt, Human
uaaacugcccccucugcccugcg

SEQ ID NO: 1865912 - RNA, 22 nt, Human
uaaacugcccccucugcccugc

SEQ ID NO: 1865913 - RNA, 22 nt, Human
uaaacuuuaccuuuuuuauaca

SEQ ID NO: 1865914 - RNA, 16 nt, Human
uaaacuuuaccuuuuu

SEQ ID NO: 1865915 - RNA, 14 nt, Human
uaaacuuaaucuaa

SEQ ID NO: 1865916 - RNA, 13 nt, Human
uaaacuuaaucua

SEQ ID NO: 1865917 - RNA, 18 nt, Human
uaaacuuaaucuaaaugg

SEQ ID NO: 1865918 - RNA, 19 nt, Human
uaaacuuaaucuaaaugga

SEQ ID NO: 1865919 - RNA, 21 nt, Human
uaaaagggacugagaaauuua

SEQ ID NO: 1865920 - RNA, 20 nt, Human
uaaaagggacugagaaauuu

SEQ ID NO: 1865921 - RNA, 19 nt, Human
uaaaagggacugagaaauu

SEQ ID NO: 1865922 - RNA, 17 nt, Human
uaaaagggacugagaaa

SEQ ID NO: 1865923 - RNA, 15 nt, Human
uaaaaaugguuuaaa

SEQ ID NO: 1865924 - RNA, 16 nt, Human
uaaaaugagaaaucua

SEQ ID NO: 1865925 - RNA, 15 nt, Human
uaaaaugagaaaucu

SEQ ID NO: 1865926 - RNA, 13 nt, Human
uaaaaugagaaau

SEQ ID NO: 1865927 - RNA, 19 nt, Human
guuuguggaaaaugaaaau

SEQ ID NO: 1865928 - RNA, 18 nt, Human
guuuguuccccaagacau

SEQ ID NO: 1865929 - RNA, 17 nt, Human
guuuguaaauuaacuuu

SEQ ID NO: 1865930 - RNA, 19 nt, Human
guuuguaaauuaacuuuua

SEQ ID NO: 1865931 - RNA, 17 nt, Human
guuugauuaaauucuug

SEQ ID NO: 1865932 - RNA, 19 nt, Human
guuugauuaaauucuugca

SEQ ID NO: 1865933 - RNA, 22 nt, Human
guuugauuaaauucuugcaaag

SEQ ID NO: 1865934 - RNA, 14 nt, Human
guuucuuuguaaug

SEQ ID NO: 1865935 - RNA, 17 nt, Human
guuucuuuguaaugaaa

SEQ ID NO: 1865936 - RNA, 16 nt, Human
guuugaaccaagaacu

SEQ ID NO: 1865937 - RNA, 15 nt, Human
guuucuaaagcugcc

SEQ ID NO: 1865938 - RNA, 14 nt, Human
guuucuaaagcugc

SEQ ID NO: 1865939 - RNA, 16 nt, Human
guuucuaaagcugcca

SEQ ID NO: 1865940 - RNA, 20 nt, Human
guuucuaaagcugccagccg

SEQ ID NO: 1865941 - RNA, 20 nt, Human
guuuccuggcacugcuucca

SEQ ID NO: 1865942 - RNA, 16 nt, Human
guuuccuggcacugcu

SEQ ID NO: 1865943 - RNA, 17 nt, Human
guuuccugcccugggag

SEQ ID NO: 1865944 - RNA, 13 nt, Human
guuuccugcccug

SEQ ID NO: 1865945 - RNA, 22 nt, Human
guuuccuggcacugcuuccagu

SEQ ID NO: 1865946 - RNA, 21 nt, Human
guuuccuggcacugcuuccag

SEQ ID NO: 1865947 - RNA, 16 nt, Human
guuuccuuauauuaug

SEQ ID NO: 1865948 - RNA, 22 nt, Human
guuuccugcccugggaggcagu

SEQ ID NO: 1865949 - RNA, 14 nt, Human
guuucagaaaugug

SEQ ID NO: 1865950 - RNA, 18 nt, Human
guuucagaaauguguuau

SEQ ID NO: 1865951 - RNA, 16 nt, Human
guuuaguaaucauauu

SEQ ID NO: 1865952 - RNA, 20 nt, Human
guuuaggauguugaaaaagu

SEQ ID NO: 1865953 - RNA, 13 nt, Human
guuuagaaagcuu

SEQ ID NO: 1865954 - RNA, 17 nt, Human
guuuagaaagcuugccc

SEQ ID NO: 1865955 - RNA, 21 nt, Human
gguuggccccugcccggcugc

SEQ ID NO: 1865956 - RNA, 16 nt, Human
guuuguugugaggauu

SEQ ID NO: 1865957 - RNA, 16 nt, Human
guuuucaguguacaug

SEQ ID NO: 1865958 - RNA, 17 nt, Human
guuuucaguguacaugg

SEQ ID NO: 1865959 - RNA, 19 nt, Human
guuuuuauggcuuuugugc

SEQ ID NO: 1865960 - RNA, 22 nt, Human
guuuuuauggcuuuugugcauu

SEQ ID NO: 1865961 - RNA, 23 nt, Human
guuuuuauggcuuuugugcauua

SEQ ID NO: 1865962 - RNA, 19 nt, Human
guuuucucuugagagggug

SEQ ID NO: 1865963 - RNA, 12 nt, Human
guuuucucuuga

SEQ ID NO: 1865964 - RNA, 12 nt, Human
guuuuucaguuu

SEQ ID NO: 1865965 - RNA, 11 nt, Human
uaaaaaacacu

SEQ ID NO: 1865966 - RNA, 23 nt, Human
uaaaaaacugcugacuguuuucu

SEQ ID NO: 1865967 - RNA, 20 nt, Human
uaaaaaacugcugacuguuu

SEQ ID NO: 1865968 - RNA, 12 nt, Human
uaaaaaacacug

SEQ ID NO: 1865969 - RNA, 13 nt, Human
ucaauaggaaaaa

SEQ ID NO: 1865970 - RNA, 14 nt, Human
ucaauaggaaaaac

SEQ ID NO: 1865971 - RNA, 14 nt, Human
ucaaugcacugaca

SEQ ID NO: 1865972 - RNA, 18 nt, Human
ucaauuacaggaaguacu

SEQ ID NO: 1865973 - RNA, 13 nt, Human
ucaauuacaggaa

SEQ ID NO: 1865974 - RNA, 17 nt, Human
ucaaugcuauaacuaug

SEQ ID NO: 1865975 - RNA, 18 nt, Human
ucaaugcacugacauugu

SEQ ID NO: 1865976 - RNA, 20 nt, Human
ucaauuacaggaaguacugg

SEQ ID NO: 1865977 - RNA, 19 nt, Human
ucaauuacaggaaguacug

SEQ ID NO: 1865978 - RNA, 21 nt, Human
ucacacaguauuacuucugcu

SEQ ID NO: 1865979 - RNA, 22 nt, Human
ucacacaguauuacuucugcua

SEQ ID NO: 1865980 - RNA, 13 nt, Human
ucacacagugagu

SEQ ID NO: 1865981 - RNA, 21 nt, Human
ucacacaugagcaucaggcca

SEQ ID NO: 1865982 - RNA, 22 nt, Human
ucacacagugagucgaggacag

SEQ ID NO: 1865983 - RNA, 23 nt, Human
ucacacagugagucgaggacagg

SEQ ID NO: 1865984 - RNA, 14 nt, Human
ucacaggaaguaga

SEQ ID NO: 1865985 - RNA, 19 nt, Human
ucacaggaaguagaggagg

SEQ ID NO: 1865986 - RNA, 11 nt, Human
ucacaggcagg

SEQ ID NO: 1865987 - RNA, 16 nt, Human
ucaagcgauucuucug

SEQ ID NO: 1865988 - RNA, 17 nt, Human
ucaagcgauucuucugc

SEQ ID NO: 1865989 - RNA, 19 nt, Human
ucaaggauccugagccaga

SEQ ID NO: 1865990 - RNA, 18 nt, Human
ucaaggauccugagccag

SEQ ID NO: 1865991 - RNA, 20 nt, Human
ucaaggauccugagccagau

SEQ ID NO: 1865992 - RNA, 23 nt, Human
ucaaggauccugagccagauuuc

SEQ ID NO: 1865993 - RNA, 22 nt, Human
ucaagugauucuccugccucag

SEQ ID NO: 1865994 - RNA, 16 nt, Human
ucaaacuuuacuaugg

SEQ ID NO: 1865995 - RNA, 15 nt, Human
ucaaacuuuacuaug

SEQ ID NO: 1865996 - RNA, 13 nt, Human
ucaaacuuuacua

SEQ ID NO: 1865997 - RNA, 22 nt, Human
ucaaacucuugaccucagguga

SEQ ID NO: 1865998 - RNA, 13 nt, Human
ucaaccuccuggg

SEQ ID NO: 1865999 - RNA, 14 nt, Human
ucaaccuccugggc

SEQ ID NO: 1866000 - RNA, 15 nt, Human
uauuuuuuuacuaau

SEQ ID NO: 1866001 - RNA, 22 nt, Human
uauuuuuuucugaauuauuuuc

SEQ ID NO: 1866002 - RNA, 15 nt, Human
ucaaaaacauucuua

SEQ ID NO: 1866003 - RNA, 14 nt, Human
ucaaacucuuaaaa

SEQ ID NO: 1866004 - RNA, 16 nt, Human
ucaaacgugaaaaugc

SEQ ID NO: 1866005 - RNA, 15 nt, Human
ucaaacgugaaaaug

SEQ ID NO: 1866006 - RNA, 23 nt, Human
ucaaacggccucacuaggcuucu

SEQ ID NO: 1866007 - RNA, 22 nt, Human
ucaaaacgguuuuacugcagcu

SEQ ID NO: 1866008 - RNA, 16 nt, Human
uauuuuauguugcaua

SEQ ID NO: 1866009 - RNA, 15 nt, Human
uauuuuauguugcau

SEQ ID NO: 1866010 - RNA, 21 nt, Human
uauuuucaacgcagcccugcu

SEQ ID NO: 1866011 - RNA, 23 nt, Human
uauuuauuaaaugcccagccccu

SEQ ID NO: 1866012 - RNA, 20 nt, Human
uaucugaaaauguaugugua

SEQ ID NO: 1866013 - RNA, 15 nt, Human
uaucugaaaauguau

SEQ ID NO: 1866014 - RNA, 14 nt, Human
uaucugaaaaugua

SEQ ID NO: 1866015 - RNA, 20 nt, Human
ucacgccuguaauccuagca

SEQ ID NO: 1866016 - RNA, 19 nt, Human
ucacgccuguaauccuagc

SEQ ID NO: 1866017 - RNA, 16 nt, Human
ucacgccacugcacua

SEQ ID NO: 1866018 - RNA, 13 nt, Human
ucacgccacugca

SEQ ID NO: 1866019 - RNA, 14 nt, Human
ucacgccacugcac

SEQ ID NO: 1866020 - RNA, 18 nt, Human
ucaccuuuguccccaccg

SEQ ID NO: 1866021 - RNA, 17 nt, Human
ucaccuuuguccccacc

SEQ ID NO: 1866022 - RNA, 15 nt, Human
ucaccuuugucccca

SEQ ID NO: 1866023 - RNA, 14 nt, Human
ucaccuuugucccc

SEQ ID NO: 1866024 - RNA, 22 nt, Human
ucaccuuuguccccaccgcaga

SEQ ID NO: 1866025 - RNA, 12 nt, Human
ucacaggcaggu

SEQ ID NO: 1866026 - RNA, 15 nt, Human
ucacaggcaggucca

SEQ ID NO: 1866027 - RNA, 12 nt, Human
ucaccuuugucc

SEQ ID NO: 1866028 - RNA, 14 nt, Human
ucaccuuucccauc

SEQ ID NO: 1866029 - RNA, 13 nt, Human
ucaccuuuauucu

SEQ ID NO: 1866030 - RNA, 20 nt, Human
ucacucuacuuagcaugucc

SEQ ID NO: 1866031 - RNA, 19 nt, Human
ucacucuacuuagcauguc

SEQ ID NO: 1866032 - RNA, 14 nt, Human
ucacucuccuuggu

SEQ ID NO: 1866033 - RNA, 12 nt, Human
ucacucuccuug

SEQ ID NO: 1866034 - RNA, 13 nt, Human
ucacucuggcagc

SEQ ID NO: 1866035 - RNA, 12 nt, Human
ucacucuggcag

SEQ ID NO: 1866036 - RNA, 23 nt, Human
ucacucuccuuggugucgggcau

SEQ ID NO: 1866037 - RNA, 22 nt, Human
ucacucuggcagcucagagagg

SEQ ID NO: 1866038 - RNA, 20 nt, Human
ucacucuggcagcucagaga

SEQ ID NO: 1866039 - RNA, 19 nt, Human
ucacucuggcagcucagag

SEQ ID NO: 1866040 - RNA, 18 nt, Human
ucacucuggcagcucaga

SEQ ID NO: 1866041 - RNA, 17 nt, Human
ucacucuggcagcucag

SEQ ID NO: 1866042 - RNA, 16 nt, Human
ucacucuggcagcuca

SEQ ID NO: 1866043 - RNA, 15 nt, Human
ucacucuggcagcuc

SEQ ID NO: 1866044 - RNA, 14 nt, Human
ucacucuggcagcu

SEQ ID NO: 1866045 - RNA, 17 nt, Human
ucacggaagagccuugc

SEQ ID NO: 1866046 - RNA, 16 nt, Human
ucacggaagagccuug

SEQ ID NO: 1866047 - RNA, 14 nt, Human
ucacggaagagccu

SEQ ID NO: 1866048 - RNA, 13 nt, Human
ucacggcucacug

SEQ ID NO: 1866049 - RNA, 15 nt, Human
ucacggcucacugca

SEQ ID NO: 1866050 - RNA, 20 nt, Human
ucacggcucacugcagccuc

SEQ ID NO: 1866051 - RNA, 13 nt, Human
ucacuccuugaaa

SEQ ID NO: 1866052 - RNA, 18 nt, Human
ucacuccuaccugguaau

SEQ ID NO: 1866053 - RNA, 22 nt, Human
ucagacauagaauuaacacaug

SEQ ID NO: 1866054 - RNA, 19 nt, Human
ucagacauagaauuaacac

SEQ ID NO: 1866055 - RNA, 20 nt, Human
ucagacagcugccugggauc

SEQ ID NO: 1866056 - RNA, 19 nt, Human
ucagacagcugccugggau

SEQ ID NO: 1866057 - RNA, 18 nt, Human
ucagacagcugccuggga

SEQ ID NO: 1866058 - RNA, 17 nt, Human
ucagacagcugccuggg

SEQ ID NO: 1866059 - RNA, 16 nt, Human
ucagacagcugccugg

SEQ ID NO: 1866060 - RNA, 15 nt, Human
ucagacagcugccug

SEQ ID NO: 1866061 - RNA, 18 nt, Human
ucagcacgauuucuguuu

SEQ ID NO: 1866062 - RNA, 19 nt, Human
ucagcacgauuucuguuua

SEQ ID NO: 1866063 - RNA, 22 nt, Human
ucagaguugaugguuguacaua

SEQ ID NO: 1866064 - RNA, 21 nt, Human
ucagaggggaauaaacuguug

SEQ ID NO: 1866065 - RNA, 15 nt, Human
ucacugcuuaacuuc

SEQ ID NO: 1866066 - RNA, 17 nt, Human
ucacugcuuaacuucac

SEQ ID NO: 1866067 - RNA, 18 nt, Human
ucacugcuuaacuucaca

SEQ ID NO: 1866068 - RNA, 20 nt, Human
ucacugcuuaacuucacaua

SEQ ID NO: 1866069 - RNA, 22 nt, Human
ucacucugucgcccagucugga

SEQ ID NO: 1866070 - RNA, 19 nt, Human
ucacucugucgcccagucu

SEQ ID NO: 1866071 - RNA, 12 nt, Human
ucacucugucgc

SEQ ID NO: 1866072 - RNA, 16 nt, Human
ucacucugucgcccag

SEQ ID NO: 1866073 - RNA, 22 nt, Human
ucacuuuuauuuagcaccaggg

SEQ ID NO: 1866074 - RNA, 12 nt, Human
ucacuuuuauuu

SEQ ID NO: 1866075 - RNA, 15 nt, Human
ucagucuggcccuuc

SEQ ID NO: 1866076 - RNA, 20 nt, Human
ucaguggggcccauggaugu

SEQ ID NO: 1866077 - RNA, 24 nt, Human
ucagucugauucccaagcucugcu

SEQ ID NO: 1866078 - RNA, 17 nt, Human
ucagugugacugaucuc

SEQ ID NO: 1866079 - RNA, 13 nt, Human
ucagugugacuga

SEQ ID NO: 1866080 - RNA, 11 nt, Human
ucaguguacau

SEQ ID NO: 1866081 - RNA, 23 nt, Human
ucagugguuggcaauuguuucaa

SEQ ID NO: 1866082 - RNA, 15 nt, Human
ucaguuacucuucag

SEQ ID NO: 1866083 - RNA, 13 nt, Human
ucauaaugacuua

SEQ ID NO: 1866084 - RNA, 17 nt, Human
ucaguuguuaguguguc

SEQ ID NO: 1866085 - RNA, 15 nt, Human
ucauaauuauuauuu

SEQ ID NO: 1866086 - RNA, 13 nt, Human
ucauacccacccc

SEQ ID NO: 1866087 - RNA, 15 nt, Human
ucauacccaccccca

SEQ ID NO: 1866088 - RNA, 14 nt, Human
ucauacccaccccc

SEQ ID NO: 1866089 - RNA, 20 nt, Human
ucauacccacccccacccaa

SEQ ID NO: 1866090 - RNA, 21 nt, Human
ucauacccacccccacccaag

SEQ ID NO: 1866091 - RNA, 16 nt, Human
ucauuaggugugacug

SEQ ID NO: 1866092 - RNA, 18 nt, Human
ucauuaggugugacugaa

SEQ ID NO: 1866093 - RNA, 21 nt, Human
ucauuaggugugacugaauuu

SEQ ID NO: 1866094 - RNA, 22 nt, Human
ucauuaggugugacugaauuuc

SEQ ID NO: 1866095 - RNA, 14 nt, Human
uccaccuacaugag

SEQ ID NO: 1866096 - RNA, 12 nt, Human
uccaccugccag

SEQ ID NO: 1866097 - RNA, 14 nt, Human
uccacaagagccca

SEQ ID NO: 1866098 - RNA, 15 nt, Human
uccacaagagcccag

SEQ ID NO: 1866099 - RNA, 14 nt, Human
uccacaacacacag

SEQ ID NO: 1866100 - RNA, 12 nt, Human
uccacuuggucu

SEQ ID NO: 1866101 - RNA, 13 nt, Human
uccacuuggucug

SEQ ID NO: 1866102 - RNA, 13 nt, Human
uccaccugccagg

SEQ ID NO: 1866103 - RNA, 14 nt, Human
uccacuuggucugu

SEQ ID NO: 1866104 - RNA, 23 nt, Human
uccagccaaagccuccuccagcc

SEQ ID NO: 1866105 - RNA, 20 nt, Human
uccaagaagcccaggaaagg

SEQ ID NO: 1866106 - RNA, 22 nt, Human
uccaagaagcccaggaaaggcu

SEQ ID NO: 1866107 - RNA, 13 nt, Human
uccaagcaaaugu

SEQ ID NO: 1866108 - RNA, 19 nt, Human
uccaagaccuucuccuuca

SEQ ID NO: 1866109 - RNA, 16 nt, Human
uccaaaauaaaacuuu

SEQ ID NO: 1866110 - RNA, 17 nt, Human
uccaaaauaaaacuuuu

SEQ ID NO: 1866111 - RNA, 19 nt, Human
uccaaacuaccuuccaguu

SEQ ID NO: 1866112 - RNA, 15 nt, Human
uccauggacuuuguu

SEQ ID NO: 1866113 - RNA, 14 nt, Human
uccauggacuuugu

SEQ ID NO: 1866114 - RNA, 13 nt, Human
uccauggacuuug

SEQ ID NO: 1866115 - RNA, 16 nt, Human
uccauccaggccauuc

SEQ ID NO: 1866116 - RNA, 23 nt, Human
uccagcucaccagccccagugcc

SEQ ID NO: 1866117 - RNA, 13 nt, Human
ucccaacucaccc

SEQ ID NO: 1866118 - RNA, 15 nt, Human
ucccaacucacccca

SEQ ID NO: 1866119 - RNA, 14 nt, Human
ucccaacucacccc

SEQ ID NO: 1866120 - RNA, 16 nt, Human
ucccaacucaccccag

SEQ ID NO: 1866121 - RNA, 18 nt, Human
ucccaaggcucugagcaa

SEQ ID NO: 1866122 - RNA, 17 nt, Human
ucccaagcucugcuccu

SEQ ID NO: 1866123 - RNA, 12 nt, Human
ucccaagcucug

SEQ ID NO: 1866124 - RNA, 13 nt, Human
ucccaagcucugc

SEQ ID NO: 1866125 - RNA, 14 nt, Human
ucccaagcucugcu

SEQ ID NO: 1866126 - RNA, 15 nt, Human
ucccaagcucugcuc

SEQ ID NO: 1866127 - RNA, 22 nt, Human
ucccaggcauuccccaggaggc

SEQ ID NO: 1866128 - RNA, 15 nt, Human
ucccaggcugagccu

SEQ ID NO: 1866129 - RNA, 21 nt, Human
ucccaggcgccccuucccccu

SEQ ID NO: 1866130 - RNA, 18 nt, Human
ucccaggcgccccuuccc

SEQ ID NO: 1866131 - RNA, 20 nt, Human
ucccaggcgccccuuccccc

SEQ ID NO: 1866132 - RNA, 21 nt, Human
ucccaggcauuccccaggagg

SEQ ID NO: 1866133 - RNA, 20 nt, Human
ucccaggcauuccccaggag

SEQ ID NO: 1866134 - RNA, 22 nt, Human
ucccaaggcucugagcaaaugu

SEQ ID NO: 1866135 - RNA, 13 nt, Human
ucccaccucagcc

SEQ ID NO: 1866136 - RNA, 14 nt, Human
ucccaccucagccu

SEQ ID NO: 1866137 - RNA, 15 nt, Human
ucccaccucagccuc

SEQ ID NO: 1866138 - RNA, 12 nt, Human
ucccaugcccug

SEQ ID NO: 1866139 - RNA, 20 nt, Human
ucccaucucacacaugagca

SEQ ID NO: 1866140 - RNA, 18 nt, Human
ucccaggcugagccucag

SEQ ID NO: 1866141 - RNA, 16 nt, Human
ucccaggcugagccuc

SEQ ID NO: 1866142 - RNA, 23 nt, Human
ucccaucucacacaugagcauca

SEQ ID NO: 1866143 - RNA, 22 nt, Human
uccccacuugagaauuacccuu

SEQ ID NO: 1866144 - RNA, 17 nt, Human
ucccccaucucuucugg

SEQ ID NO: 1866145 - RNA, 13 nt, Human
ucccccugcccca

SEQ ID NO: 1866146 - RNA, 13 nt, Human
ucccccucuggcu

SEQ ID NO: 1866147 - RNA, 13 nt, Human
uccccaggaggcc

SEQ ID NO: 1866148 - RNA, 15 nt, Human
uccccagcuguuuau

SEQ ID NO: 1866149 - RNA, 14 nt, Human
uccccagcuguuua

SEQ ID NO: 1866150 - RNA, 21 nt, Human
ucccccuuccauggacuuugu

SEQ ID NO: 1866151 - RNA, 20 nt, Human
uccccgcacugggcuugggg

SEQ ID NO: 1866152 - RNA, 21 nt, Human
uccccugcuggguguggcgca

SEQ ID NO: 1866153 - RNA, 20 nt, Human
uccccugcuggguguggcgc

SEQ ID NO: 1866154 - RNA, 15 nt, Human
uccccugcugggugu

SEQ ID NO: 1866155 - RNA, 14 nt, Human
uccccugcugggug

SEQ ID NO: 1866156 - RNA, 23 nt, Human
uccccuguccccgcacugggcuu

SEQ ID NO: 1866157 - RNA, 22 nt, Human
uccccuguagagugggagcuga

SEQ ID NO: 1866158 - RNA, 15 nt, Human
uccccuguucacucu

SEQ ID NO: 1866159 - RNA, 19 nt, Human
uccccuguagagugggagc

SEQ ID NO: 1866160 - RNA, 24 nt, Human
uccccugcuggguguggcgcagca

SEQ ID NO: 1866161 - RNA, 15 nt, Human
ucccucccucuuucc

SEQ ID NO: 1866162 - RNA, 16 nt, Human
ucccuacuuccuguga

SEQ ID NO: 1866163 - RNA, 15 nt, Human
ucccuacuuccugug

SEQ ID NO: 1866164 - RNA, 17 nt, Human
ucccucccucuuucccu

SEQ ID NO: 1866165 - RNA, 15 nt, Human
ucccuacuguaauuu

SEQ ID NO: 1866166 - RNA, 13 nt, Human
ucccuaauaaagc

SEQ ID NO: 1866167 - RNA, 12 nt, Human
ucccuaauaaag

SEQ ID NO: 1866168 - RNA, 11 nt, Human
ucccuaauaaa

SEQ ID NO: 1866169 - RNA, 22 nt, Human
uccccuuccuaauuccacagcu

SEQ ID NO: 1866170 - RNA, 21 nt, Human
uccccuuccuaauuccacagc

SEQ ID NO: 1866171 - RNA, 18 nt, Human
uccccuguuuguuucuga

SEQ ID NO: 1866172 - RNA, 15 nt, Human
ucucucgugaguaua

SEQ ID NO: 1866173 - RNA, 13 nt, Human
ucucugaggacac

SEQ ID NO: 1866174 - RNA, 15 nt, Human
ucucuacaaaaagca

SEQ ID NO: 1866175 - RNA, 13 nt, Human
ucuccuguaccuc

SEQ ID NO: 1866176 - RNA, 21 nt, Human
ucucuacugucucaguuuaca

SEQ ID NO: 1866177 - RNA, 18 nt, Human
ucucuaguuugauuaaau

SEQ ID NO: 1866178 - RNA, 19 nt, Human
ucucuaguuugauuaaauu

SEQ ID NO: 1866179 - RNA, 21 nt, Human
ucucagugucaaugcagcccc

SEQ ID NO: 1866180 - RNA, 15 nt, Human
ucucaggucccugca

SEQ ID NO: 1866181 - RNA, 17 nt, Human
ucucccccagccccauc

SEQ ID NO: 1866182 - RNA, 15 nt, Human
ucucccccagcccca

SEQ ID NO: 1866183 - RNA, 14 nt, Human
ucucccccagcccc

SEQ ID NO: 1866184 - RNA, 20 nt, Human
ucucccccagccccauccuc

SEQ ID NO: 1866185 - RNA, 18 nt, Human
ucucccccagccccaucc

SEQ ID NO: 1866186 - RNA, 22 nt, Human
ucucccccagccccauccucug

SEQ ID NO: 1866187 - RNA, 22 nt, Human
ucuccugccucagccucccaaa

SEQ ID NO: 1866188 - RNA, 20 nt, Human
ucugaacuuggcgcugcccc

SEQ ID NO: 1866189 - RNA, 21 nt, Human
ucugaacuuggcgcugccccu

SEQ ID NO: 1866190 - RNA, 14 nt, Human
ucugacccaugcug

SEQ ID NO: 1866191 - RNA, 18 nt, Human
ucugacccaugcugcccu

SEQ ID NO: 1866192 - RNA, 17 nt, Human
ucugacccaugcugccc

SEQ ID NO: 1866193 - RNA, 16 nt, Human
ucugacccaugcugcc

SEQ ID NO: 1866194 - RNA, 15 nt, Human
ucugacccaugcugc

SEQ ID NO: 1866195 - RNA, 20 nt, Human
ucugagcauuagauuucuca

SEQ ID NO: 1866196 - RNA, 14 nt, Human
ucugcacaagcugc

SEQ ID NO: 1866197 - RNA, 19 nt, Human
ucugcacaagcugcacccu

SEQ ID NO: 1866198 - RNA, 23 nt, Human
ucugauucccaagcucugcuccu

SEQ ID NO: 1866199 - RNA, 22 nt, Human
ucugagcauuagauuucucauu

SEQ ID NO: 1866200 - RNA, 16 nt, Human
ucugaggaauccagac

SEQ ID NO: 1866201 - RNA, 17 nt, Human
ucugaggaauccagacc

SEQ ID NO: 1866202 - RNA, 20 nt, Human
ucugaggacacuaaccacgc

SEQ ID NO: 1866203 - RNA, 23 nt, Human
ucugaggacacuaaccacgcugg

SEQ ID NO: 1866204 - RNA, 13 nt, Human
ucugaaagggacg

SEQ ID NO: 1866205 - RNA, 23 nt, Human
ucugaaaauguauguguaaguau

SEQ ID NO: 1866206 - RNA, 17 nt, Human
ucucuuuguucuaaaga

SEQ ID NO: 1866207 - RNA, 15 nt, Human
ucucuuuucaaaaca

SEQ ID NO: 1866208 - RNA, 16 nt, Human
ucucuuuucaaaacau

SEQ ID NO: 1866209 - RNA, 16 nt, Human
ucugaaaauguaugug

SEQ ID NO: 1866210 - RNA, 11 nt, Human
ucucugcaggu

SEQ ID NO: 1866211 - RNA, 18 nt, Human
ucucuucacagucacauu

SEQ ID NO: 1866212 - RNA, 11 nt, Human
ucucuucucca

SEQ ID NO: 1866213 - RNA, 16 nt, Human
ucucuucuccacugga

SEQ ID NO: 1866214 - RNA, 15 nt, Human
ucucuucuccacugg

SEQ ID NO: 1866215 - RNA, 14 nt, Human
ucucuucuccacug

SEQ ID NO: 1866216 - RNA, 13 nt, Human
ucucuucuccacu

SEQ ID NO: 1866217 - RNA, 17 nt, Human
ucuacacuccagugaga

SEQ ID NO: 1866218 - RNA, 14 nt, Human
ucuacacugugcug

SEQ ID NO: 1866219 - RNA, 12 nt, Human
ucuacacugugc

SEQ ID NO: 1866220 - RNA, 19 nt, Human
ucuacugaggugcuauguu

SEQ ID NO: 1866221 - RNA, 18 nt, Human
ucuacugaggugcuaugu

SEQ ID NO: 1866222 - RNA, 15 nt, Human
ucuacacugugcuga

SEQ ID NO: 1866223 - RNA, 21 nt, Human
ucuacacugugcugagucuga

SEQ ID NO: 1866224 - RNA, 22 nt, Human
ucuagggaaaaaccagcgugug

SEQ ID NO: 1866225 - RNA, 22 nt, Human
ucuacugaggugcuauguucuu

SEQ ID NO: 1866226 - RNA, 22 nt, Human
ucuaacuucaccauauuaccac

SEQ ID NO: 1866227 - RNA, 15 nt, Human
ucuaacuucaccaua

SEQ ID NO: 1866228 - RNA, 16 nt, Human
ucuaacuucaccauau

SEQ ID NO: 1866229 - RNA, 22 nt, Human
ucuaaaucuccaaaauaaaacu

SEQ ID NO: 1866230 - RNA, 21 nt, Human
ucucagaaucucaaauaacua

SEQ ID NO: 1866231 - RNA, 17 nt, Human
ucucagaaucucaaaua

SEQ ID NO: 1866232 - RNA, 18 nt, Human
ucucacuguugcccaggc

SEQ ID NO: 1866233 - RNA, 19 nt, Human
ucucacuguugcccaggcu

SEQ ID NO: 1866234 - RNA, 20 nt, Human
ucucacuguugcccaggcug

SEQ ID NO: 1866235 - RNA, 21 nt, Human
ucucacuguugcccaggcugg

SEQ ID NO: 1866236 - RNA, 18 nt, Human
ucucacucugucgcccag

SEQ ID NO: 1866237 - RNA, 22 nt, Human
ucucacucugucgcccagucug

SEQ ID NO: 1866238 - RNA, 17 nt, Human
ucucacucugucgccca

SEQ ID NO: 1866239 - RNA, 19 nt, Human
ucucaaagaaauuuccacu

SEQ ID NO: 1866240 - RNA, 17 nt, Human
ucucaaagaaauuucca

SEQ ID NO: 1866241 - RNA, 22 nt, Human
ucucaaacucuugaccucaggu

SEQ ID NO: 1866242 - RNA, 13 nt, Human
ucucaaacucuug

SEQ ID NO: 1866243 - RNA, 21 nt, Human
ucucaaacucuugaccucagg

SEQ ID NO: 1866244 - RNA, 14 nt, Human
ucucaaacuccuga

SEQ ID NO: 1866245 - RNA, 14 nt, Human
ucgcccaggcugga

SEQ ID NO: 1866246 - RNA, 12 nt, Human
ucgcccaggcug

SEQ ID NO: 1866247 - RNA, 19 nt, Human
ucgcccaggcuggagugca

SEQ ID NO: 1866248 - RNA, 17 nt, Human
ucgcaauguaagacucg

SEQ ID NO: 1866249 - RNA, 23 nt, Human
uccuuuuggagucagacagaugu

SEQ ID NO: 1866250 - RNA, 14 nt, Human
uccuuuuggaguca

SEQ ID NO: 1866251 - RNA, 17 nt, Human
ucgaguuacagacaaag

SEQ ID NO: 1866252 - RNA, 15 nt, Human
ucgaguuacagacaa

SEQ ID NO: 1866253 - RNA, 15 nt, Human
uccugguguggaaga

SEQ ID NO: 1866254 - RNA, 17 nt, Human
uccuggcccacugcauc

SEQ ID NO: 1866255 - RNA, 22 nt, Human
uccuggcaugggaaugaauguc

SEQ ID NO: 1866256 - RNA, 10 nt, Human
ucccucccuu

SEQ ID NO: 1866257 - RNA, 14 nt, Human
uccuuaccagcaga

SEQ ID NO: 1866258 - RNA, 16 nt, Human
uccuucaaagcaaaug

SEQ ID NO: 1866259 - RNA, 12 nt, Human
uccuucuguccu

SEQ ID NO: 1866260 - RNA, 19 nt, Human
uccuucuguccuacucugu

SEQ ID NO: 1866261 - RNA, 13 nt, Human
ugaacugauaaag

SEQ ID NO: 1866262 - RNA, 19 nt, Human
ugaacugaacucugacaac

SEQ ID NO: 1866263 - RNA, 17 nt, Human
ugaacugaacucugaca

SEQ ID NO: 1866264 - RNA, 15 nt, Human
ugaacugauaaagau

SEQ ID NO: 1866265 - RNA, 18 nt, Human
ugaacucuucaaucucuu

SEQ ID NO: 1866266 - RNA, 14 nt, Human
ugaacugaacucug

SEQ ID NO: 1866267 - RNA, 20 nt, Human
ugaaccacaucuugcucugc

SEQ ID NO: 1866268 - RNA, 21 nt, Human
ugaaccacaucuugcucugcu

SEQ ID NO: 1866269 - RNA, 15 nt, Human
ugaacucuucaaucu

SEQ ID NO: 1866270 - RNA, 22 nt, Human
ugaaccacaucuugcucugcug

SEQ ID NO: 1866271 - RNA, 13 nt, Human
ugaacauuccaga

SEQ ID NO: 1866272 - RNA, 14 nt, Human
ugaacauuccagag

SEQ ID NO: 1866273 - RNA, 15 nt, Human
ugaacauugcaauag

SEQ ID NO: 1866274 - RNA, 17 nt, Human
ugaacauugcaauagaa

SEQ ID NO: 1866275 - RNA, 19 nt, Human
ugaaauggacuuuuguaca

SEQ ID NO: 1866276 - RNA, 20 nt, Human
ugaaggcucgagcaugccug

SEQ ID NO: 1866277 - RNA, 21 nt, Human
ugaaggcucgagcaugccugg

SEQ ID NO: 1866278 - RNA, 20 nt, Human
ugaaggagagcccuucauuu

SEQ ID NO: 1866279 - RNA, 12 nt, Human
ugaacuugguuc

SEQ ID NO: 1866280 - RNA, 14 nt, Human
ugaacuuggcgcug

SEQ ID NO: 1866281 - RNA, 19 nt, Human
ugaacuggguacuugugga

SEQ ID NO: 1866282 - RNA, 16 nt, Human
ugaagacagagcuaca

SEQ ID NO: 1866283 - RNA, 14 nt, Human
ugaagacagagcua

SEQ ID NO: 1866284 - RNA, 22 nt, Human
ugaacuuguaaaggaauuuaaa

SEQ ID NO: 1866285 - RNA, 22 nt, Human
ugaagacuuuucuuucagccaa

SEQ ID NO: 1866286 - RNA, 17 nt, Human
ugaagacuuuucuuuca

SEQ ID NO: 1866287 - RNA, 14 nt, Human
ugaagacuuuucuu

SEQ ID NO: 1866288 - RNA, 23 nt, Human
ugaacuggguacuuguggacaca

SEQ ID NO: 1866289 - RNA, 19 nt, Human
ugaaaacuuuaugcuaagu

SEQ ID NO: 1866290 - RNA, 15 nt, Human
ugaaaagaaaaauga

SEQ ID NO: 1866291 - RNA, 16 nt, Human
ucuuuuugcuuugcuu

SEQ ID NO: 1866292 - RNA, 17 nt, Human
ucuuuugccguuauuaa

SEQ ID NO: 1866293 - RNA, 19 nt, Human
ucuuuugccguuauuaaaa

SEQ ID NO: 1866294 - RNA, 21 nt, Human
ucuuuucucccuuuuaauccu

SEQ ID NO: 1866295 - RNA, 23 nt, Human
ugaaaugaggucagagccugcag

SEQ ID NO: 1866296 - RNA, 21 nt, Human
ugaaaugaggucagagccugc

SEQ ID NO: 1866297 - RNA, 22 nt, Human
ugaaaugaggucagagccugca

SEQ ID NO: 1866298 - RNA, 19 nt, Human
ugaaaugaggucagagccu

SEQ ID NO: 1866299 - RNA, 20 nt, Human
ugaaaugaggucagagccug

SEQ ID NO: 1866300 - RNA, 17 nt, Human
ugaaaucuuuuugcuuu

SEQ ID NO: 1866301 - RNA, 15 nt, Human
ugaaaucauucauuu

SEQ ID NO: 1866302 - RNA, 15 nt, Human
ugaaagggcccagag

SEQ ID NO: 1866303 - RNA, 16 nt, Human
ugaaagggcccagaga

SEQ ID NO: 1866304 - RNA, 17 nt, Human
ugaaagggcccagagag

SEQ ID NO: 1866305 - RNA, 18 nt, Human
ugaaagggcccagagagg

SEQ ID NO: 1866306 - RNA, 21 nt, Human
ugaaagauggcugugccucug

SEQ ID NO: 1866307 - RNA, 23 nt, Human
ugaaagauggcugugccucugcc

SEQ ID NO: 1866308 - RNA, 22 nt, Human
ugaaagauggcugugccucugc

SEQ ID NO: 1866309 - RNA, 18 nt, Human
ugaaacccugucucuacu

SEQ ID NO: 1866310 - RNA, 18 nt, Human
ugaaagcagggacuugaa

SEQ ID NO: 1866311 - RNA, 19 nt, Human
ugaaagcagggacuugaac

SEQ ID NO: 1866312 - RNA, 23 nt, Human
ugaaagcagggacuugaacccau

SEQ ID NO: 1866313 - RNA, 17 nt, Human
ugaaaggaaagaggcuc

SEQ ID NO: 1866314 - RNA, 12 nt, Human
ugaaaggaaaga

SEQ ID NO: 1866315 - RNA, 16 nt, Human
ucuggcucuuccaggc

SEQ ID NO: 1866316 - RNA, 15 nt, Human
ucuggcucuuccagg

SEQ ID NO: 1866317 - RNA, 17 nt, Human
ucuggcucuuccaggcu

SEQ ID NO: 1866318 - RNA, 13 nt, Human
ucugggacacagu

SEQ ID NO: 1866319 - RNA, 12 nt, Human
ucugggacacag

SEQ ID NO: 1866320 - RNA, 23 nt, Human
ucuguacagagcccacgccccca

SEQ ID NO: 1866321 - RNA, 23 nt, Human
ucuggagcccacuguacuugcuc

SEQ ID NO: 1866322 - RNA, 14 nt, Human
ucuggcuaugcauu

SEQ ID NO: 1866323 - RNA, 17 nt, Human
ucuggcuaugcauuuga

SEQ ID NO: 1866324 - RNA, 18 nt, Human
ucuuaaaaaguggaaaaa

SEQ ID NO: 1866325 - RNA, 23 nt, Human
ucuguggguuucuaaagcugcca

SEQ ID NO: 1866326 - RNA, 17 nt, Human
ucuguacgucugacagg

SEQ ID NO: 1866327 - RNA, 19 nt, Human
ucuguccgagcuuugaaaa

SEQ ID NO: 1866328 - RNA, 22 nt, Human
ucuguggguuucuaaagcugcc

SEQ ID NO: 1866329 - RNA, 21 nt, Human
ucuuguuuuuuuuuuccacuu

SEQ ID NO: 1866330 - RNA, 18 nt, Human
ucuuguuuuuuuuuucca

SEQ ID NO: 1866331 - RNA, 16 nt, Human
ucuuguauuaaguugu

SEQ ID NO: 1866332 - RNA, 18 nt, Human
ucuuguauuaaguuguua

SEQ ID NO: 1866333 - RNA, 22 nt, Human
ucuuguauuaaguuguuaauaa

SEQ ID NO: 1866334 - RNA, 12 nt, Human
ucuugcucugcu

SEQ ID NO: 1866335 - RNA, 13 nt, Human
ucuugcucugcug

SEQ ID NO: 1866336 - RNA, 11 nt, Human
ucuugcucugc

SEQ ID NO: 1866337 - RNA, 21 nt, Human
ucuugaauuguaaggaaugau

SEQ ID NO: 1866338 - RNA, 15 nt, Human
ucuucuccaggcugu

SEQ ID NO: 1866339 - RNA, 16 nt, Human
ucuugaacuccuggcc

SEQ ID NO: 1866340 - RNA, 17 nt, Human
ucuugaacuccuggccu

SEQ ID NO: 1866341 - RNA, 18 nt, Human
ucuugaacuccuggccuc

SEQ ID NO: 1866342 - RNA, 13 nt, Human
ucuucuccaggcu

SEQ ID NO: 1866343 - RNA, 14 nt, Human
ucuucuccaggcug

SEQ ID NO: 1866344 - RNA, 16 nt, Human
ucuucuccacuggaug

SEQ ID NO: 1866345 - RNA, 12 nt, Human
ucuucuccaggc

SEQ ID NO: 1866346 - RNA, 15 nt, Human
ucuucaguaagccgu

SEQ ID NO: 1866347 - RNA, 13 nt, Human
ucuuaugggcugg

SEQ ID NO: 1866348 - RNA, 14 nt, Human
ucuuauacauuuga

SEQ ID NO: 1866349 - RNA, 15 nt, Human
ucuuauacauuugau

SEQ ID NO: 1866350 - RNA, 16 nt, Human
ucuuaguggauguucu

SEQ ID NO: 1866351 - RNA, 14 nt, Human
ucuuagugugugca

SEQ ID NO: 1866352 - RNA, 13 nt, Human
ucuucuccacugg

SEQ ID NO: 1866353 - RNA, 21 nt, Human
ucuucuccacuuucuagccag

SEQ ID NO: 1866354 - RNA, 19 nt, Human
ucuucuccacuuucuagcc

SEQ ID NO: 1866355 - RNA, 14 nt, Human
ucuuccaggcuggg

SEQ ID NO: 1866356 - RNA, 16 nt, Human
ucuucaguaagccgug

SEQ ID NO: 1866357 - RNA, 21 nt, Human
ucuuccacaagagcccaggcc

SEQ ID NO: 1866358 - RNA, 14 nt, Human
ugcucaggagcccu

SEQ ID NO: 1866359 - RNA, 19 nt, Human
ugcuccucuccccagcaag

SEQ ID NO: 1866360 - RNA, 20 nt, Human
ugcuagaacucccuuucaac

SEQ ID NO: 1866361 - RNA, 21 nt, Human
ugcuagaacucccuuucaaca

SEQ ID NO: 1866362 - RNA, 19 nt, Human
ugcuaggaacacuccuuca

SEQ ID NO: 1866363 - RNA, 17 nt, Human
ugcuaggaacacuccuu

SEQ ID NO: 1866364 - RNA, 16 nt, Human
ugcuaggaacacuccu

SEQ ID NO: 1866365 - RNA, 19 nt, Human
ugcuagaacucccuuucaa

SEQ ID NO: 1866366 - RNA, 18 nt, Human
ugcuagaacucccuuuca

SEQ ID NO: 1866367 - RNA, 15 nt, Human
ugcgugcauaccacu

SEQ ID NO: 1866368 - RNA, 19 nt, Human
ugcuccuggcccacugcau

SEQ ID NO: 1866369 - RNA, 23 nt, Human
ugcugaauacagaggcaacugca

SEQ ID NO: 1866370 - RNA, 18 nt, Human
ugcugaauacagaggcaa

SEQ ID NO: 1866371 - RNA, 22 nt, Human
ugcugaaugguuuucaaaauaa

SEQ ID NO: 1866372 - RNA, 18 nt, Human
ugcugaaugguuuucaaa

SEQ ID NO: 1866373 - RNA, 17 nt, Human
ugcugaaugguuuucaa

SEQ ID NO: 1866374 - RNA, 23 nt, Human
ugcugauggugcaaugaccuuuc

SEQ ID NO: 1866375 - RNA, 20 nt, Human
ugcugauggugcaaugaccu

SEQ ID NO: 1866376 - RNA, 16 nt, Human
ugcugcaguugccagu

SEQ ID NO: 1866377 - RNA, 15 nt, Human
ugcugcaguugccag

SEQ ID NO: 1866378 - RNA, 15 nt, Human
ugcugacagacacag

SEQ ID NO: 1866379 - RNA, 16 nt, Human
ugcugacagacacagg

SEQ ID NO: 1866380 - RNA, 19 nt, Human
ugcugacagacacaggccc

SEQ ID NO: 1866381 - RNA, 22 nt, Human
ugccuuauggaacacucugaga

SEQ ID NO: 1866382 - RNA, 21 nt, Human
ugccuuauggaacacucugag

SEQ ID NO: 1866383 - RNA, 20 nt, Human
ugccuuauggaacacucuga

SEQ ID NO: 1866384 - RNA, 18 nt, Human
ugccuuauggaacacucu

SEQ ID NO: 1866385 - RNA, 18 nt, Human
ugccuucagcucuacagc

SEQ ID NO: 1866386 - RNA, 17 nt, Human
ugccuucagcucuacag

SEQ ID NO: 1866387 - RNA, 13 nt, Human
ugccuucagcucu

SEQ ID NO: 1866388 - RNA, 19 nt, Human
ugcgcaggcuggcccugcc

SEQ ID NO: 1866389 - RNA, 17 nt, Human
ugcgcaggcuggcccug

SEQ ID NO: 1866390 - RNA, 16 nt, Human
ugcgcaggcuggcccu

SEQ ID NO: 1866391 - RNA, 13 nt, Human
ugcgcaggcuggc

SEQ ID NO: 1866392 - RNA, 23 nt, Human
ugcggugcuaucucccccagccc

SEQ ID NO: 1866393 - RNA, 13 nt, Human
ugcgccuacagga

SEQ ID NO: 1866394 - RNA, 19 nt, Human
ugccuaaggcugaacuugu

SEQ ID NO: 1866395 - RNA, 11 nt, Human
ugcccagcccc

SEQ ID NO: 1866396 - RNA, 23 nt, Human
ugcccaggcuggcgugcaguggu

SEQ ID NO: 1866397 - RNA, 22 nt, Human
ugccugaagucacacagugagu

SEQ ID NO: 1866398 - RNA, 18 nt, Human
ugccugaagucacacagu

SEQ ID NO: 1866399 - RNA, 17 nt, Human
ugccugaagucacacag

SEQ ID NO: 1866400 - RNA, 14 nt, Human
ugccucugggacug

SEQ ID NO: 1866401 - RNA, 18 nt, Human
ugccuccuuugugaggaa

SEQ ID NO: 1866402 - RNA, 17 nt, Human
ugccuccuuugugagga

SEQ ID NO: 1866403 - RNA, 16 nt, Human
ugccuccuuugugagg

SEQ ID NO: 1866404 - RNA, 10 nt, Human
ugcccagccc

SEQ ID NO: 1866405 - RNA, 19 nt, Human
ugcccaccuggccucugca

SEQ ID NO: 1866406 - RNA, 18 nt, Human
ugcccaccuggccucugc

SEQ ID NO: 1866407 - RNA, 17 nt, Human
ugcccaccuggccucug

SEQ ID NO: 1866408 - RNA, 15 nt, Human
ugcccaccuggccuc

SEQ ID NO: 1866409 - RNA, 23 nt, Human
ugccaucucaccuccugcugggc

SEQ ID NO: 1866410 - RNA, 22 nt, Human
ugccaucucaccuccugcuggg

SEQ ID NO: 1866411 - RNA, 21 nt, Human
ugccaucucaccuccugcugg

SEQ ID NO: 1866412 - RNA, 20 nt, Human
ugccaucucaccuccugcug

SEQ ID NO: 1866413 - RNA, 22 nt, Human
ugccagggacagaggggguggc

SEQ ID NO: 1866414 - RNA, 11 nt, Human
ugccagggaca

SEQ ID NO: 1866415 - RNA, 14 nt, Human
ugccagucaccccg

SEQ ID NO: 1866416 - RNA, 24 nt, Human
ugccagguuuuuggucugacccac

SEQ ID NO: 1866417 - RNA, 21 nt, Human
ugcauccuccgccucccgggu

SEQ ID NO: 1866418 - RNA, 18 nt, Human
ugcauccuccgccucccg

SEQ ID NO: 1866419 - RNA, 15 nt, Human
ugcaucguuucaucu

SEQ ID NO: 1866420 - RNA, 17 nt, Human
ugcaucguuucaucuuc

SEQ ID NO: 1866421 - RNA, 19 nt, Human
ugcaggcagccaggccaca

SEQ ID NO: 1866422 - RNA, 18 nt, Human
ugcaggcagccaggccac

SEQ ID NO: 1866423 - RNA, 17 nt, Human
ugcaggcagccaggcca

SEQ ID NO: 1866424 - RNA, 16 nt, Human
ugcaggcagccaggcc

SEQ ID NO: 1866425 - RNA, 19 nt, Human
ugcauguuacauaagauaa

SEQ ID NO: 1866426 - RNA, 14 nt, Human
ugcagcaauaaagc

SEQ ID NO: 1866427 - RNA, 15 nt, Human
ugcagcaauaaagca

SEQ ID NO: 1866428 - RNA, 16 nt, Human
ugcagcaauaaagcag

SEQ ID NO: 1866429 - RNA, 13 nt, Human
ugcagcuuuaaaa

SEQ ID NO: 1866430 - RNA, 14 nt, Human
ugcaggaccucagg

SEQ ID NO: 1866431 - RNA, 22 nt, Human
ugcagcuuuaaaaaauuaaucu

SEQ ID NO: 1866432 - RNA, 16 nt, Human
ugcaggaccucaggug

SEQ ID NO: 1866433 - RNA, 15 nt, Human
ugcaggaccucaggu

SEQ ID NO: 1866434 - RNA, 18 nt, Human
ugcaggaccucaggugag

SEQ ID NO: 1866435 - RNA, 16 nt, Human
ugcagauaaacaguag

SEQ ID NO: 1866436 - RNA, 17 nt, Human
ugcagauaaacaguagu

SEQ ID NO: 1866437 - RNA, 20 nt, Human
ugcacuuuguucuggcucuu

SEQ ID NO: 1866438 - RNA, 19 nt, Human
ugcacuuuguucuggcucu

SEQ ID NO: 1866439 - RNA, 18 nt, Human
ugcacuuuguucuggcuc

SEQ ID NO: 1866440 - RNA, 15 nt, Human
ugcacuuuguucugg

SEQ ID NO: 1866441 - RNA, 21 nt, Human
ugcacuugcagacucuacaga

SEQ ID NO: 1866442 - RNA, 16 nt, Human
ugcacuugcagacucu

SEQ ID NO: 1866443 - RNA, 19 nt, Human
ugcacguacacacacauac

SEQ ID NO: 1866444 - RNA, 16 nt, Human
ugcacguacacacaca

SEQ ID NO: 1866445 - RNA, 17 nt, Human
ugcacagcuaacaugga

SEQ ID NO: 1866446 - RNA, 23 nt, Human
ugcacagaguuguuacauuuuua

SEQ ID NO: 1866447 - RNA, 21 nt, Human
ugcacagaguuguuacauuuu

SEQ ID NO: 1866448 - RNA, 22 nt, Human
ugcacagaguuguuacauuuuu

SEQ ID NO: 1866449 - RNA, 22 nt, Human
ugaagucuuuguacagacaaca

SEQ ID NO: 1866450 - RNA, 20 nt, Human
ugaagucuuuguacagacaa

SEQ ID NO: 1866451 - RNA, 17 nt, Human
ugaagucuuuguacaga

SEQ ID NO: 1866452 - RNA, 16 nt, Human
ugaaggcuggguucug

SEQ ID NO: 1866453 - RNA, 23 nt, Human
ugcacagcuaacauggaaguacu

SEQ ID NO: 1866454 - RNA, 20 nt, Human
ugcacagcuaacauggaagu

SEQ ID NO: 1866455 - RNA, 18 nt, Human
ugcacagcuaacauggaa

SEQ ID NO: 1866456 - RNA, 20 nt, Human
ugcacagugcaucucagccc

SEQ ID NO: 1866457 - RNA, 19 nt, Human
ugcacagugcaucucagcc

SEQ ID NO: 1866458 - RNA, 18 nt, Human
ugcacagugcaucucagc

SEQ ID NO: 1866459 - RNA, 15 nt, Human
uggaagacagcucuu

SEQ ID NO: 1866460 - RNA, 14 nt, Human
uggaagacagcucu

SEQ ID NO: 1866461 - RNA, 21 nt, Human
uggaagugugugaucuguggg

SEQ ID NO: 1866462 - RNA, 15 nt, Human
uggaaaauaaaucaa

SEQ ID NO: 1866463 - RNA, 11 nt, Human
uggaaaauaaa

SEQ ID NO: 1866464 - RNA, 20 nt, Human
uggaaaaaccacccccaaau

SEQ ID NO: 1866465 - RNA, 16 nt, Human
uggaaaauaaauuauu

SEQ ID NO: 1866466 - RNA, 15 nt, Human
uggaaaauaaauuau

SEQ ID NO: 1866467 - RNA, 12 nt, Human
uggaagacagcu

SEQ ID NO: 1866468 - RNA, 11 nt, Human
uggaagacagc

SEQ ID NO: 1866469 - RNA, 14 nt, Human
uggaacucucgagc

SEQ ID NO: 1866470 - RNA, 18 nt, Human
ugcuuccagugaggcucu

SEQ ID NO: 1866471 - RNA, 14 nt, Human
ugcugccuccagaa

SEQ ID NO: 1866472 - RNA, 13 nt, Human
ugcugccucaugc

SEQ ID NO: 1866473 - RNA, 20 nt, Human
ugcuuccagugaggcucugc

SEQ ID NO: 1866474 - RNA, 19 nt, Human
ugcuuccagugaggcucug

SEQ ID NO: 1866475 - RNA, 21 nt, Human
ugcuuccagugaggcucugcc

SEQ ID NO: 1866476 - RNA, 12 nt, Human
ugcuucucacug

SEQ ID NO: 1866477 - RNA, 16 nt, Human
ugcuucuucagagacu

SEQ ID NO: 1866478 - RNA, 14 nt, Human
ugcuuguuggauuu

SEQ ID NO: 1866479 - RNA, 18 nt, Human
ugcuuguuaacugagugc

SEQ ID NO: 1866480 - RNA, 13 nt, Human
uggagauguuuag

SEQ ID NO: 1866481 - RNA, 20 nt, Human
uggagaggcccggccucuca

SEQ ID NO: 1866482 - RNA, 12 nt, Human
uggacaggcaug

SEQ ID NO: 1866483 - RNA, 16 nt, Human
uggacaggcauguucu

SEQ ID NO: 1866484 - RNA, 17 nt, Human
uggagacugucucaaga

SEQ ID NO: 1866485 - RNA, 17 nt, Human
uggacaggcauguucuc

SEQ ID NO: 1866486 - RNA, 19 nt, Human
uggauacgacaacuugcac

SEQ ID NO: 1866487 - RNA, 22 nt, Human
uggaggcaugugaugagaggaa

SEQ ID NO: 1866488 - RNA, 23 nt, Human
uggcagcugcgguccacccagga

SEQ ID NO: 1866489 - RNA, 21 nt, Human
uggcagcugcgguccacccag

SEQ ID NO: 1866490 - RNA, 22 nt, Human
uggcagcugcgguccacccagg

SEQ ID NO: 1866491 - RNA, 18 nt, Human
uggcacugcuuccaguga

SEQ ID NO: 1866492 - RNA, 16 nt, Human
uggcacugcuuccagu

SEQ ID NO: 1866493 - RNA, 14 nt, Human
uggcacugcuucca

SEQ ID NO: 1866494 - RNA, 14 nt, Human
uggaugccuggugg

SEQ ID NO: 1866495 - RNA, 14 nt, Human
uggcagugggagcu

SEQ ID NO: 1866496 - RNA, 15 nt, Human
uggcagugggagcug

SEQ ID NO: 1866497 - RNA, 16 nt, Human
uggcagugggagcugc

SEQ ID NO: 1866498 - RNA, 19 nt, Human
uggcagugggagcugccug

SEQ ID NO: 1866499 - RNA, 22 nt, Human
uggccacuccagaccccuggcu

SEQ ID NO: 1866500 - RNA, 20 nt, Human
uggcagugggagcugccugu

SEQ ID NO: 1866501 - RNA, 14 nt, Human
ugggccuccugugu

SEQ ID NO: 1866502 - RNA, 18 nt, Human
ugggccuucagggaguga

SEQ ID NO: 1866503 - RNA, 16 nt, Human
ugggccuccugugugu

SEQ ID NO: 1866504 - RNA, 22 nt, Human
ugggccuccugugugugcgccu

SEQ ID NO: 1866505 - RNA, 24 nt, Human
ugggagcugccuguucagcuccag

SEQ ID NO: 1866506 - RNA, 19 nt, Human
ugggcgugagaccugcccc

SEQ ID NO: 1866507 - RNA, 18 nt, Human
ugggcgugagaccugccc

SEQ ID NO: 1866508 - RNA, 17 nt, Human
ugggcgugagaccugcc

SEQ ID NO: 1866509 - RNA, 18 nt, Human
ugggcuucaguggcagcu

SEQ ID NO: 1866510 - RNA, 19 nt, Human
ugggcuucaguggcagcug

SEQ ID NO: 1866511 - RNA, 19 nt, Human
ugggcuuggggaccagagc

SEQ ID NO: 1866512 - RNA, 20 nt, Human
ugggcuucaguggcagcugc

SEQ ID NO: 1866513 - RNA, 22 nt, Human
ugggcuuggggaccagagcugc

SEQ ID NO: 1866514 - RNA, 21 nt, Human
ugggcuuggggaccagagcug

SEQ ID NO: 1866515 - RNA, 16 nt, Human
uggggcagcuugaggg

SEQ ID NO: 1866516 - RNA, 21 nt, Human
ugggugucaagagggucugag

SEQ ID NO: 1866517 - RNA, 23 nt, Human
ugggugucaagagggucugagga

SEQ ID NO: 1866518 - RNA, 14 nt, Human
uggguguggcgcag

SEQ ID NO: 1866519 - RNA, 23 nt, Human
uggguucaagcgauucuucugcu

SEQ ID NO: 1866520 - RNA, 16 nt, Human
uggguucacugcaacc

SEQ ID NO: 1866521 - RNA, 17 nt, Human
uggguuggaaaacagua

SEQ ID NO: 1866522 - RNA, 22 nt, Human
uggguuccuuccucugagccuu

SEQ ID NO: 1866523 - RNA, 21 nt, Human
uggguuccuuccucugagccu

SEQ ID NO: 1866524 - RNA, 21 nt, Human
uggguuccagcaauucuccug

SEQ ID NO: 1866525 - RNA, 17 nt, Human
ugggguggggaccucag

SEQ ID NO: 1866526 - RNA, 19 nt, Human
ugggguggggggggugcug

SEQ ID NO: 1866527 - RNA, 22 nt, Human
ugggguggggggggugcugggc

SEQ ID NO: 1866528 - RNA, 21 nt, Human
ugggguggggggggugcuggg

SEQ ID NO: 1866529 - RNA, 23 nt, Human
ugggagcugccuguucagcucca

SEQ ID NO: 1866530 - RNA, 16 nt, Human
ugggacaugggaaagg

SEQ ID NO: 1866531 - RNA, 16 nt, Human
ugggacagggcauggc

SEQ ID NO: 1866532 - RNA, 22 nt, Human
ugggaaugaaugucagugugac

SEQ ID NO: 1866533 - RNA, 15 nt, Human
uggcuuuucacugcu

SEQ ID NO: 1866534 - RNA, 14 nt, Human
uggcuuuucacugc

SEQ ID NO: 1866535 - RNA, 22 nt, Human
uggcugguuagagguucccuuu

SEQ ID NO: 1866536 - RNA, 14 nt, Human
uggcugggggccuc

SEQ ID NO: 1866537 - RNA, 15 nt, Human
uggcugggggccuca

SEQ ID NO: 1866538 - RNA, 14 nt, Human
uggcgcugccccug

SEQ ID NO: 1866539 - RNA, 15 nt, Human
uggcgcugccccugg

SEQ ID NO: 1866540 - RNA, 22 nt, Human
uggcgugcaguggugcgaucug

SEQ ID NO: 1866541 - RNA, 20 nt, Human
uggccuucggccuccauccu

SEQ ID NO: 1866542 - RNA, 17 nt, Human
uggccuucggccuccau

SEQ ID NO: 1866543 - RNA, 18 nt, Human
uggccuucggccuccauc

SEQ ID NO: 1866544 - RNA, 15 nt, Human
uggccagaugcacca

SEQ ID NO: 1866545 - RNA, 20 nt, Human
uggcucagguggggucacuc

SEQ ID NO: 1866546 - RNA, 22 nt, Human
uggcucagguggggucacucug

SEQ ID NO: 1866547 - RNA, 20 nt, Human
uggcuccaaacccucgaggc

SEQ ID NO: 1866548 - RNA, 18 nt, Human
uggcuccaaacccucgag

SEQ ID NO: 1866549 - RNA, 16 nt, Human
uggcuccaaacccucg

SEQ ID NO: 1866550 - RNA, 15 nt, Human
uggcucuuccaggcu

SEQ ID NO: 1866551 - RNA, 13 nt, Human
uggcucuuccagg

SEQ ID NO: 1866552 - RNA, 16 nt, Human
uggcucuuccaggcug

SEQ ID NO: 1866553 - RNA, 12 nt, Human
uggcugggggcc

SEQ ID NO: 1866554 - RNA, 16 nt, Human
uuaaacuuaaucuaaa

SEQ ID NO: 1866555 - RNA, 18 nt, Human
uuaaacuuaaucuaaaug

SEQ ID NO: 1866556 - RNA, 20 nt, Human
uuaaacuuaaucuaaaugga

SEQ ID NO: 1866557 - RNA, 22 nt, Human
uuaaacuuaaucuaaauggaac

SEQ ID NO: 1866558 - RNA, 14 nt, Human
uuaaagacuuuuau

SEQ ID NO: 1866559 - RNA, 16 nt, Human
uuaaaugcaccuggaa

SEQ ID NO: 1866560 - RNA, 17 nt, Human
uuaaaugcaccuggaau

SEQ ID NO: 1866561 - RNA, 18 nt, Human
uuaaaugcaccuggaaua

SEQ ID NO: 1866562 - RNA, 18 nt, Human
uuaaauaguaaaaauaaa

SEQ ID NO: 1866563 - RNA, 18 nt, Human
uuaaaugcccagccccuu

SEQ ID NO: 1866564 - RNA, 13 nt, Human
uuaaaugcccagc

SEQ ID NO: 1866565 - RNA, 17 nt, Human
uuaaaugcccagccccu

SEQ ID NO: 1866566 - RNA, 12 nt, Human
uuaaaugcugcu

SEQ ID NO: 1866567 - RNA, 18 nt, Human
uguuuuaaaaugagaaau

SEQ ID NO: 1866568 - RNA, 16 nt, Human
uguuuguugucagcug

SEQ ID NO: 1866569 - RNA, 17 nt, Human
uguuuguugucagcuga

SEQ ID NO: 1866570 - RNA, 22 nt, Human
uguuuccuggcacugcuuccag

SEQ ID NO: 1866571 - RNA, 21 nt, Human
uguuuccuggcacugcuucca

SEQ ID NO: 1866572 - RNA, 20 nt, Human
uguuuccuggcacugcuucc

SEQ ID NO: 1866573 - RNA, 23 nt, Human
uguuuccuggcacugcuuccagu

SEQ ID NO: 1866574 - RNA, 23 nt, Human
uguuuuaaaaugagaaaucuaaa

SEQ ID NO: 1866575 - RNA, 13 nt, Human
uguuuuugucuua

SEQ ID NO: 1866576 - RNA, 17 nt, Human
uuaaggaugcuuguaca

SEQ ID NO: 1866577 - RNA, 18 nt, Human
uuaaggaugcuuguacau

SEQ ID NO: 1866578 - RNA, 19 nt, Human
uuaaggaugcuuguacaua

SEQ ID NO: 1866579 - RNA, 20 nt, Human
uuaaggaugcuuguacauaa

SEQ ID NO: 1866580 - RNA, 21 nt, Human
uuaaggaagacaaugugaaaa

SEQ ID NO: 1866581 - RNA, 22 nt, Human
uuaaggaugcuuguacauaaug

SEQ ID NO: 1866582 - RNA, 18 nt, Human
uuaaugucacaggcaggu

SEQ ID NO: 1866583 - RNA, 14 nt, Human
uuaauggaaauguu

SEQ ID NO: 1866584 - RNA, 17 nt, Human
uuaaugucacaggcagg

SEQ ID NO: 1866585 - RNA, 22 nt, Human
uuaaugucaauucuugccaaau

SEQ ID NO: 1866586 - RNA, 14 nt, Human
uuaccagcagagca

SEQ ID NO: 1866587 - RNA, 20 nt, Human
uuacauuuuuaagugcugca

SEQ ID NO: 1866588 - RNA, 21 nt, Human
uuacauuuuuaagugcugcau

SEQ ID NO: 1866589 - RNA, 22 nt, Human
uuacauuuuuaagugcugcauu

SEQ ID NO: 1866590 - RNA, 23 nt, Human
uuacauuuuuaagugcugcauuu

SEQ ID NO: 1866591 - RNA, 19 nt, Human
uuaccuuuuuuauacauaa

SEQ ID NO: 1866592 - RNA, 20 nt, Human
uuaccuuuuuuauacauaaa

SEQ ID NO: 1866593 - RNA, 22 nt, Human
uuaccuuuuuuauacauaaaca

SEQ ID NO: 1866594 - RNA, 20 nt, Human
uuacgguuuuccagguuuaa

SEQ ID NO: 1866595 - RNA, 20 nt, Human
uuacagagacagaaagcaga

SEQ ID NO: 1866596 - RNA, 23 nt, Human
uuacaauaaaaucuugaaaaugc

SEQ ID NO: 1866597 - RNA, 14 nt, Human
uuacauuuccuaaa

SEQ ID NO: 1866598 - RNA, 13 nt, Human
uguucauaaauaa

SEQ ID NO: 1866599 - RNA, 12 nt, Human
uguucuauagcu

SEQ ID NO: 1866600 - RNA, 16 nt, Human
uguucucugaggacac

SEQ ID NO: 1866601 - RNA, 12 nt, Human
uguucucugccc

SEQ ID NO: 1866602 - RNA, 18 nt, Human
uguucucugaggacacua

SEQ ID NO: 1866603 - RNA, 11 nt, Human
uguugaaagau

SEQ ID NO: 1866604 - RNA, 20 nt, Human
uguucuuucuggcuaugcau

SEQ ID NO: 1866605 - RNA, 22 nt, Human
uguucuuucuggcuaugcauuu

SEQ ID NO: 1866606 - RNA, 14 nt, Human
uguucuuucuggcu

SEQ ID NO: 1866607 - RNA, 17 nt, Human
uguucugcacacagcac

SEQ ID NO: 1866608 - RNA, 18 nt, Human
uguucugacccugcuuca

SEQ ID NO: 1866609 - RNA, 15 nt, Human
uguucugacccugcu

SEQ ID NO: 1866610 - RNA, 19 nt, Human
uguucucugcccuccaaga

SEQ ID NO: 1866611 - RNA, 13 nt, Human
uguugcugccuca

SEQ ID NO: 1866612 - RNA, 17 nt, Human
uguuggauuuuugucuu

SEQ ID NO: 1866613 - RNA, 20 nt, Human
uguuggauuuuugucuugug

SEQ ID NO: 1866614 - RNA, 11 nt, Human
uguuggccagg

SEQ ID NO: 1866615 - RNA, 14 nt, Human
uguugcugccucau

SEQ ID NO: 1866616 - RNA, 17 nt, Human
uguuuacagauccccaa

SEQ ID NO: 1866617 - RNA, 18 nt, Human
uguuggccaggcugcucu

SEQ ID NO: 1866618 - RNA, 13 nt, Human
uguuggccaggcu

SEQ ID NO: 1866619 - RNA, 14 nt, Human
uguuggccaggcug

SEQ ID NO: 1866620 - RNA, 16 nt, Human
uguuacugucuucagu

SEQ ID NO: 1866621 - RNA, 15 nt, Human
uguuacugucuucag

SEQ ID NO: 1866622 - RNA, 22 nt, Human
uguuacauuuuuaagugcugca

SEQ ID NO: 1866623 - RNA, 13 nt, Human
uguuacauuuuua

SEQ ID NO: 1866624 - RNA, 15 nt, Human
uguucagcuccagcu

SEQ ID NO: 1866625 - RNA, 16 nt, Human
uguucagcuccagcuc

SEQ ID NO: 1866626 - RNA, 11 nt, Human
uguucagcugg

SEQ ID NO: 1866627 - RNA, 18 nt, Human
uguucagcuccagcucac

SEQ ID NO: 1866628 - RNA, 14 nt, Human
uguucagcuccagc

SEQ ID NO: 1866629 - RNA, 13 nt, Human
uguguuuauuguc

SEQ ID NO: 1866630 - RNA, 22 nt, Human
uguguuuaggaacuacugagga

SEQ ID NO: 1866631 - RNA, 23 nt, Human
ugucccaaaaagaaaggagggga

SEQ ID NO: 1866632 - RNA, 20 nt, Human
ugucagugugacugaucucu

SEQ ID NO: 1866633 - RNA, 12 nt, Human
ugucagugugac

SEQ ID NO: 1866634 - RNA, 14 nt, Human
uguaugcacuuugu

SEQ ID NO: 1866635 - RNA, 19 nt, Human
uguaucccaugagccucag

SEQ ID NO: 1866636 - RNA, 23 nt, Human
uguaucccaugagccucagcauc

SEQ ID NO: 1866637 - RNA, 13 nt, Human
uguacuccuccca

SEQ ID NO: 1866638 - RNA, 12 nt, Human
uguacuccuccc

SEQ ID NO: 1866639 - RNA, 17 nt, Human
uguacgucugacaggca

SEQ ID NO: 1866640 - RNA, 16 nt, Human
uguacgucugacaggc

SEQ ID NO: 1866641 - RNA, 17 nt, Human
uguagauaauacaguuc

SEQ ID NO: 1866642 - RNA, 15 nt, Human
uguaccgcaauguga

SEQ ID NO: 1866643 - RNA, 22 nt, Human
uguaccucuugagccuugaacu

SEQ ID NO: 1866644 - RNA, 14 nt, Human
uguaccucuugagc

SEQ ID NO: 1866645 - RNA, 23 nt, Human
uguaccucuugagccuugaacuu

SEQ ID NO: 1866646 - RNA, 12 nt, Human
uguacagucuug

SEQ ID NO: 1866647 - RNA, 14 nt, Human
uguacagucuugua

SEQ ID NO: 1866648 - RNA, 15 nt, Human
uguacagucuuguau

SEQ ID NO: 1866649 - RNA, 17 nt, Human
uguacagucuuguauua

SEQ ID NO: 1866650 - RNA, 13 nt, Human
uguaaauuaacuu

SEQ ID NO: 1866651 - RNA, 14 nt, Human
uguaaauuaacuuu

SEQ ID NO: 1866652 - RNA, 15 nt, Human
uguaaauuaacuuuu

SEQ ID NO: 1866653 - RNA, 16 nt, Human
uguaaauuaacuuuua

SEQ ID NO: 1866654 - RNA, 17 nt, Human
uguaaauuaacuuuuau

SEQ ID NO: 1866655 - RNA, 17 nt, Human
ugguaggacuguagaaa

SEQ ID NO: 1866656 - RNA, 18 nt, Human
ugguaggacuguagaaaa

SEQ ID NO: 1866657 - RNA, 15 nt, Human
uguaaucacagcuac

SEQ ID NO: 1866658 - RNA, 14 nt, Human
ugugaaaggaaaga

SEQ ID NO: 1866659 - RNA, 13 nt, Human
ugugaaaggaaag

SEQ ID NO: 1866660 - RNA, 13 nt, Human
ugugaaacauguu

SEQ ID NO: 1866661 - RNA, 18 nt, Human
ugucuuuggacccugagg

SEQ ID NO: 1866662 - RNA, 17 nt, Human
ugucuuuggacccugag

SEQ ID NO: 1866663 - RNA, 22 nt, Human
ugucuuuggacccugaggccca

SEQ ID NO: 1866664 - RNA, 19 nt, Human
ugucuuuggacccugaggc

SEQ ID NO: 1866665 - RNA, 14 nt, Human
ugucuuuuuucuaa

SEQ ID NO: 1866666 - RNA, 16 nt, Human
ugucuuuuuucacuac

SEQ ID NO: 1866667 - RNA, 17 nt, Human
ugucucaggucccugca

SEQ ID NO: 1866668 - RNA, 16 nt, Human
ugucucaggucccugc

SEQ ID NO: 1866669 - RNA, 21 nt, Human
ugucucaagagggcacuggug

SEQ ID NO: 1866670 - RNA, 20 nt, Human
ugucucaagagggcacuggu

SEQ ID NO: 1866671 - RNA, 23 nt, Human
ugucucaagagggcacugguggc

SEQ ID NO: 1866672 - RNA, 13 nt, Human
uguccccaccgca

SEQ ID NO: 1866673 - RNA, 19 nt, Human
ugucucaagagggcacugg

SEQ ID NO: 1866674 - RNA, 21 nt, Human
ugucucaguccaugaagaugu

SEQ ID NO: 1866675 - RNA, 22 nt, Human
ugucucaguccaugaagaugua

SEQ ID NO: 1866676 - RNA, 23 nt, Human
ugugaguacuacaguccucccau

SEQ ID NO: 1866677 - RNA, 20 nt, Human
ugugaguacuacaguccucc

SEQ ID NO: 1866678 - RNA, 19 nt, Human
ugugaguacuacaguccuc

SEQ ID NO: 1866679 - RNA, 18 nt, Human
ugugaguacuacaguccu

SEQ ID NO: 1866680 - RNA, 13 nt, Human
ugugauauaagug

SEQ ID NO: 1866681 - RNA, 21 nt, Human
ugugauacaaugcugugcccu

SEQ ID NO: 1866682 - RNA, 22 nt, Human
ugugaccacugcagaagacagu

SEQ ID NO: 1866683 - RNA, 15 nt, Human
ugugacauguuuuau

SEQ ID NO: 1866684 - RNA, 16 nt, Human
ugugaaucauuuuacc

SEQ ID NO: 1866685 - RNA, 21 nt, Human
ugugacaaggauugcuacugu

SEQ ID NO: 1866686 - RNA, 21 nt, Human
uguggagaagcggcuggcagc

SEQ ID NO: 1866687 - RNA, 12 nt, Human
uguggagaagcg

SEQ ID NO: 1866688 - RNA, 21 nt, Human
uguggcuccuggggguucuuu

SEQ ID NO: 1866689 - RNA, 15 nt, Human
uguggacacagcucu

SEQ ID NO: 1866690 - RNA, 16 nt, Human
uguggacacagcucuu

SEQ ID NO: 1866691 - RNA, 17 nt, Human
uguggaaaaugaaaauu

SEQ ID NO: 1866692 - RNA, 14 nt, Human
uguggacacagcuc

SEQ ID NO: 1866693 - RNA, 13 nt, Human
uguggacacagcu

SEQ ID NO: 1866694 - RNA, 12 nt, Human
ugugggaagggg

SEQ ID NO: 1866695 - RNA, 16 nt, Human
ugugccucugggacug

SEQ ID NO: 1866696 - RNA, 15 nt, Human
ugugccucugggacu

SEQ ID NO: 1866697 - RNA, 13 nt, Human
ugugccucuggga

SEQ ID NO: 1866698 - RNA, 14 nt, Human
ugugccucugccug

SEQ ID NO: 1866699 - RNA, 16 nt, Human
ugugcacaugcacgug

SEQ ID NO: 1866700 - RNA, 22 nt, Human
ugugcacaugcacgugugugca

SEQ ID NO: 1866701 - RNA, 20 nt, Human
ugugcgugcauguguguuca

SEQ ID NO: 1866702 - RNA, 17 nt, Human
ugugccucugggacugg

SEQ ID NO: 1866703 - RNA, 15 nt, Human
ugugccucugccugu

SEQ ID NO: 1866704 - RNA, 22 nt, Human
ugugcuuauguaugagguacaa

SEQ ID NO: 1866705 - RNA, 22 nt, Human
uugaaaacacuguucucugccc

SEQ ID NO: 1866706 - RNA, 18 nt, Human
uucuuuauaauucuacuu

SEQ ID NO: 1866707 - RNA, 21 nt, Human
uugaaaacacuguucucugcc

SEQ ID NO: 1866708 - RNA, 19 nt, Human
uugaaaacacuguucucug

SEQ ID NO: 1866709 - RNA, 15 nt, Human
uugaaaaaugcaugu

SEQ ID NO: 1866710 - RNA, 22 nt, Human
uugaacuuugaccucugcagca

SEQ ID NO: 1866711 - RNA, 16 nt, Human
uugaacugauaaagau

SEQ ID NO: 1866712 - RNA, 19 nt, Human
uugaacucuucaaucucuu

SEQ ID NO: 1866713 - RNA, 17 nt, Human
uugaagacagagcuaca

SEQ ID NO: 1866714 - RNA, 19 nt, Human
uugaagacuuuucuuucag

SEQ ID NO: 1866715 - RNA, 23 nt, Human
uucuguggguuucuaaagcugcc

SEQ ID NO: 1866716 - RNA, 16 nt, Human
uucuguggcucacaga

SEQ ID NO: 1866717 - RNA, 12 nt, Human
uucuguggcuca

SEQ ID NO: 1866718 - RNA, 19 nt, Human
uucuguccuacucuguguc

SEQ ID NO: 1866719 - RNA, 17 nt, Human
uucuguccuacucugug

SEQ ID NO: 1866720 - RNA, 21 nt, Human
uucuguccgagcuuugaaaau

SEQ ID NO: 1866721 - RNA, 17 nt, Human
uucuguccgagcuuuga

SEQ ID NO: 1866722 - RNA, 14 nt, Human
uucugagcauuuaa

SEQ ID NO: 1866723 - RNA, 14 nt, Human
uucuucaacucccu

SEQ ID NO: 1866724 - RNA, 23 nt, Human
uucuuauuuaaugaaagacugua

SEQ ID NO: 1866725 - RNA, 19 nt, Human
uucuuauuuaaugaaagac

SEQ ID NO: 1866726 - RNA, 11 nt, Human
uucuguucuuu

SEQ ID NO: 1866727 - RNA, 17 nt, Human
uucuugguuuguaaauu

SEQ ID NO: 1866728 - RNA, 18 nt, Human
uucuugguuuguaaauua

SEQ ID NO: 1866729 - RNA, 23 nt, Human
uucuugguuuguaaauuaacuuu

SEQ ID NO: 1866730 - RNA, 13 nt, Human
uucuugguuugua

SEQ ID NO: 1866731 - RNA, 16 nt, Human
uucuugguuuguaaau

SEQ ID NO: 1866732 - RNA, 20 nt, Human
uugauagcacagacccugcc

SEQ ID NO: 1866733 - RNA, 19 nt, Human
uugauagcacagacccugc

SEQ ID NO: 1866734 - RNA, 21 nt, Human
uugaccgugaggccagagaca

SEQ ID NO: 1866735 - RNA, 20 nt, Human
uugaccgugaggccagagac

SEQ ID NO: 1866736 - RNA, 15 nt, Human
uugaccucaggugau

SEQ ID NO: 1866737 - RNA, 22 nt, Human
uugaccugaggcccuucucucc

SEQ ID NO: 1866738 - RNA, 19 nt, Human
uugaccugaggcccuucuc

SEQ ID NO: 1866739 - RNA, 12 nt, Human
uugaccugaggc

SEQ ID NO: 1866740 - RNA, 14 nt, Human
uugacgccauccca

SEQ ID NO: 1866741 - RNA, 22 nt, Human
uugacgccaucccagccccaau

SEQ ID NO: 1866742 - RNA, 15 nt, Human
uugacgccaucccag

SEQ ID NO: 1866743 - RNA, 23 nt, Human
uugauagcacagacccugcccug

SEQ ID NO: 1866744 - RNA, 21 nt, Human
uugauagcacagacccugccc

SEQ ID NO: 1866745 - RNA, 18 nt, Human
uugauuuccguuaaaaua

SEQ ID NO: 1866746 - RNA, 14 nt, Human
uugcaacaggcugg

SEQ ID NO: 1866747 - RNA, 17 nt, Human
uugcaacaggcugggcu

SEQ ID NO: 1866748 - RNA, 14 nt, Human
uugcauagaauaaa

SEQ ID NO: 1866749 - RNA, 15 nt, Human
uugccacugccucuu

SEQ ID NO: 1866750 - RNA, 14 nt, Human
uugccacugccucu

SEQ ID NO: 1866751 - RNA, 16 nt, Human
uugcagacaggcaagc

SEQ ID NO: 1866752 - RNA, 22 nt, Human
uugcagacaggcaagcaccucc

SEQ ID NO: 1866753 - RNA, 13 nt, Human
uuggcauucccca

SEQ ID NO: 1866754 - RNA, 14 nt, Human
uuggccaggcuggu

SEQ ID NO: 1866755 - RNA, 24 nt, Human
uuggccaaagccaaagcuaggccu

SEQ ID NO: 1866756 - RNA, 18 nt, Human
uuggcugggggccucagu

SEQ ID NO: 1866757 - RNA, 16 nt, Human
uuggcugcugaaggcu

SEQ ID NO: 1866758 - RNA, 21 nt, Human
uuggcugggggccucagugcc

SEQ ID NO: 1866759 - RNA, 22 nt, Human
uuggcugggggccucagugcca

SEQ ID NO: 1866760 - RNA, 22 nt, Human
uuggcuuuggguugcaggaccu

SEQ ID NO: 1866761 - RNA, 12 nt, Human
uugggaggcuga

SEQ ID NO: 1866762 - RNA, 16 nt, Human
uugggaggccauuugu

SEQ ID NO: 1866763 - RNA, 14 nt, Human
uugguaaaccuuuu

SEQ ID NO: 1866764 - RNA, 12 nt, Human
uugguaaaccuu

SEQ ID NO: 1866765 - RNA, 16 nt, Human
uuggguggaugccugg

SEQ ID NO: 1866766 - RNA, 13 nt, Human
uuguacagacaac

SEQ ID NO: 1866767 - RNA, 12 nt, Human
uuguacagacaa

SEQ ID NO: 1866768 - RNA, 13 nt, Human
uugguccugcugc

SEQ ID NO: 1866769 - RNA, 12 nt, Human
uugguccugcug

SEQ ID NO: 1866770 - RNA, 16 nt, Human
uuggucccccuuccau

SEQ ID NO: 1866771 - RNA, 22 nt, Human
uuggucccccuuccauggacuu

SEQ ID NO: 1866772 - RNA, 16 nt, Human
uuguaaaggaauuuaa

SEQ ID NO: 1866773 - RNA, 14 nt, Human
uuguacauaaugcg

SEQ ID NO: 1866774 - RNA, 16 nt, Human
uuguacaguuuuuauu

SEQ ID NO: 1866775 - RNA, 12 nt, Human
uuguacaguuuu

SEQ ID NO: 1866776 - RNA, 13 nt, Human
uuguacaguuuuu

SEQ ID NO: 1866777 - RNA, 14 nt, Human
uuguagagccaggg

SEQ ID NO: 1866778 - RNA, 15 nt, Human
uuguagagccagggu

SEQ ID NO: 1866779 - RNA, 21 nt, Human
uuguauucucuccuguaccuc

SEQ ID NO: 1866780 - RNA, 14 nt, Human
uuguauucagaguu

SEQ ID NO: 1866781 - RNA, 14 nt, Human
uuguauuacaaauc

SEQ ID NO: 1866782 - RNA, 22 nt, Human
uugcugauggugcaaugaccuu

SEQ ID NO: 1866783 - RNA, 20 nt, Human
uugcugauggugcaaugacc

SEQ ID NO: 1866784 - RNA, 15 nt, Human
uugcugccucaugcu

SEQ ID NO: 1866785 - RNA, 12 nt, Human
uugcugccucau

SEQ ID NO: 1866786 - RNA, 11 nt, Human
uugcugccuca

SEQ ID NO: 1866787 - RNA, 16 nt, Human
uugccucugccucuga

SEQ ID NO: 1866788 - RNA, 18 nt, Human
uugccucugccucugaca

SEQ ID NO: 1866789 - RNA, 11 nt, Human
uugccucugcc

SEQ ID NO: 1866790 - RNA, 14 nt, Human
uugccucugccucu

SEQ ID NO: 1866791 - RNA, 18 nt, Human
uugccagucaccccggcc

SEQ ID NO: 1866792 - RNA, 18 nt, Human
uugccacugccucuuccu

SEQ ID NO: 1866793 - RNA, 23 nt, Human
uugcccacgcuggagugcaguga

SEQ ID NO: 1866794 - RNA, 11 nt, Human
uugcccaggca

SEQ ID NO: 1866795 - RNA, 20 nt, Human
uugcuggggccgaaagaaca

SEQ ID NO: 1866796 - RNA, 20 nt, Human
uugcuguagaagauggcacu

SEQ ID NO: 1866797 - RNA, 17 nt, Human
uuggcaaaaaggcagga

SEQ ID NO: 1866798 - RNA, 14 nt, Human
uuggauuguccccg

SEQ ID NO: 1866799 - RNA, 18 nt, Human
uuggauuuuugucuugug

SEQ ID NO: 1866800 - RNA, 19 nt, Human
uuggaaggaacguccccug

SEQ ID NO: 1866801 - RNA, 11 nt, Human
uuggaaggaac

SEQ ID NO: 1866802 - RNA, 21 nt, Human
uucugacccaugcugcccugu

SEQ ID NO: 1866803 - RNA, 20 nt, Human
uucugacccaugcugcccug

SEQ ID NO: 1866804 - RNA, 18 nt, Human
uucugacccaugcugccc

SEQ ID NO: 1866805 - RNA, 16 nt, Human
uucugacccaugcugc

SEQ ID NO: 1866806 - RNA, 11 nt, Human
uucuccaggcu

SEQ ID NO: 1866807 - RNA, 16 nt, Human
uucuccaagcaggaca

SEQ ID NO: 1866808 - RNA, 13 nt, Human
uucuccacccugc

SEQ ID NO: 1866809 - RNA, 18 nt, Human
uucucuccagccccugga

SEQ ID NO: 1866810 - RNA, 13 nt, Human
uucucaaagaaau

SEQ ID NO: 1866811 - RNA, 15 nt, Human
uucucaaagaaauuu

SEQ ID NO: 1866812 - RNA, 19 nt, Human
uucucaaagaaauuuccac

SEQ ID NO: 1866813 - RNA, 20 nt, Human
uucucaaagaaauuuccacu

SEQ ID NO: 1866814 - RNA, 12 nt, Human
uucucaugccuc

SEQ ID NO: 1866815 - RNA, 11 nt, Human
uucucaugccu

SEQ ID NO: 1866816 - RNA, 21 nt, Human
uucucaugccucagccuccug

SEQ ID NO: 1866817 - RNA, 14 nt, Human
uucucaugccucag

SEQ ID NO: 1866818 - RNA, 14 nt, Human
uucuauuguuucuu

SEQ ID NO: 1866819 - RNA, 16 nt, Human
uucuaugacacaugca

SEQ ID NO: 1866820 - RNA, 17 nt, Human
uucuaugacacaugcaa

SEQ ID NO: 1866821 - RNA, 22 nt, Human
uucggccuccauccugaggcuc

SEQ ID NO: 1866822 - RNA, 18 nt, Human
uucggccuccauccugag

SEQ ID NO: 1866823 - RNA, 19 nt, Human
uucggccuccauccugagg

SEQ ID NO: 1866824 - RNA, 17 nt, Human
uucuaaaggcuaccuuu

SEQ ID NO: 1866825 - RNA, 18 nt, Human
uucuaaaggcuaccuuug

SEQ ID NO: 1866826 - RNA, 16 nt, Human
uucuaaaggcuaccuu

SEQ ID NO: 1866827 - RNA, 13 nt, Human
uucuaaagaugga

SEQ ID NO: 1866828 - RNA, 19 nt, Human
uuccuucauucaacccacc

SEQ ID NO: 1866829 - RNA, 23 nt, Human
uuccuucagugccuuauggaaca

SEQ ID NO: 1866830 - RNA, 19 nt, Human
uuccuucagugccuuaugg

SEQ ID NO: 1866831 - RNA, 16 nt, Human
uuccuucagugccuua

SEQ ID NO: 1866832 - RNA, 11 nt, Human
uuccugcccug

SEQ ID NO: 1866833 - RNA, 22 nt, Human
uuccugcccugggaggcaguga

SEQ ID NO: 1866834 - RNA, 16 nt, Human
uuccugcccugggagg

SEQ ID NO: 1866835 - RNA, 13 nt, Human
uuccugcccuggg

SEQ ID NO: 1866836 - RNA, 17 nt, Human
uuccuuccucugagccu

SEQ ID NO: 1866837 - RNA, 13 nt, Human
uuccuuccucuga

SEQ ID NO: 1866838 - RNA, 22 nt, Human
uuccccacuugagaauuacccu

SEQ ID NO: 1866839 - RNA, 19 nt, Human
uucccuuugacgccauccc

SEQ ID NO: 1866840 - RNA, 21 nt, Human
uuccucccucccucuuucccu

SEQ ID NO: 1866841 - RNA, 19 nt, Human
uuccucccucccucuuucc

SEQ ID NO: 1866842 - RNA, 12 nt, Human
uuccucccuccc

SEQ ID NO: 1866843 - RNA, 22 nt, Human
uuccucccucccucuuucccuc

SEQ ID NO: 1866844 - RNA, 20 nt, Human
uuccuagguauaauucacau

SEQ ID NO: 1866845 - RNA, 23 nt, Human
uuccucauaguaugguggcuggg

SEQ ID NO: 1866846 - RNA, 23 nt, Human
uucauaaugacuuaagcacacuu

SEQ ID NO: 1866847 - RNA, 13 nt, Human
uucauaaugacuu

SEQ ID NO: 1866848 - RNA, 15 nt, Human
uucaucuaggauuuu

SEQ ID NO: 1866849 - RNA, 12 nt, Human
uucaguuuucag

SEQ ID NO: 1866850 - RNA, 21 nt, Human
uucagugccuuauggaacacu

SEQ ID NO: 1866851 - RNA, 19 nt, Human
uucagugccuuauggaaca

SEQ ID NO: 1866852 - RNA, 16 nt, Human
uucaggcucuucuccu

SEQ ID NO: 1866853 - RNA, 13 nt, Human
uucaguggcagcu

SEQ ID NO: 1866854 - RNA, 19 nt, Human
uucauuuaggugaggaagc

SEQ ID NO: 1866855 - RNA, 11 nt, Human
uucaucuugaa

SEQ ID NO: 1866856 - RNA, 20 nt, Human
uucaucuuccaacucaaacu

SEQ ID NO: 1866857 - RNA, 12 nt, Human
uucaucuugaau

SEQ ID NO: 1866858 - RNA, 17 nt, Human
uucaucuugaauuguaa

SEQ ID NO: 1866859 - RNA, 17 nt, Human
uuccaugaguccccugu

SEQ ID NO: 1866860 - RNA, 19 nt, Human
uuccaugucgccucugcau

SEQ ID NO: 1866861 - RNA, 18 nt, Human
uuccaugucgccucugca

SEQ ID NO: 1866862 - RNA, 17 nt, Human
uuccaugucgccucugc

SEQ ID NO: 1866863 - RNA, 14 nt, Human
uuccccaagacauu

SEQ ID NO: 1866864 - RNA, 21 nt, Human
uuccaugucgccucugcauuc

SEQ ID NO: 1866865 - RNA, 20 nt, Human
uuccaugucgccucugcauu

SEQ ID NO: 1866866 - RNA, 19 nt, Human
uuccacuuauaggaauuga

SEQ ID NO: 1866867 - RNA, 21 nt, Human
uuccacuuagaaauugcauuu

SEQ ID NO: 1866868 - RNA, 19 nt, Human
uucaggaagcucagggccu

SEQ ID NO: 1866869 - RNA, 17 nt, Human
uucaggaagcucagggc

SEQ ID NO: 1866870 - RNA, 15 nt, Human
uucaggaagcucagg

SEQ ID NO: 1866871 - RNA, 20 nt, Human
uucaggaagcucagggccug

SEQ ID NO: 1866872 - RNA, 15 nt, Human
uucaggcucuucucc

SEQ ID NO: 1866873 - RNA, 17 nt, Human
uucagcugacuuuucug

SEQ ID NO: 1866874 - RNA, 18 nt, Human
uucagcugcauacaguuu

SEQ ID NO: 1866875 - RNA, 16 nt, Human
uucaggaagcucaggg

SEQ ID NO: 1866876 - RNA, 21 nt, Human
uucagcugguugagguuucaa

SEQ ID NO: 1866877 - RNA, 24 nt, Human
uucagcucugcaagaauugaagca

SEQ ID NO: 1866878 - RNA, 17 nt, Human
uucagcucugcaagaau

SEQ ID NO: 1866879 - RNA, 23 nt, Human
uucagcuccagcucaccagcccc

SEQ ID NO: 1866880 - RNA, 14 nt, Human
uucacucuccuugg

SEQ ID NO: 1866881 - RNA, 15 nt, Human
uucagagacuccugc

SEQ ID NO: 1866882 - RNA, 14 nt, Human
uuacgugaguccug

SEQ ID NO: 1866883 - RNA, 13 nt, Human
uuacgugaguccu

SEQ ID NO: 1866884 - RNA, 13 nt, Human
uucaaagauauuu

SEQ ID NO: 1866885 - RNA, 15 nt, Human
uucaaagcaaauguc

SEQ ID NO: 1866886 - RNA, 23 nt, Human
uucaaauuguaagcaugcacaaa

SEQ ID NO: 1866887 - RNA, 16 nt, Human
uucaaucccaggaugu

SEQ ID NO: 1866888 - RNA, 15 nt, Human
uucaacgcagcccug

SEQ ID NO: 1866889 - RNA, 14 nt, Human
uucaacgcagcccu

SEQ ID NO: 1866890 - RNA, 21 nt, Human
uucaacagguuuuccugaaga

SEQ ID NO: 1866891 - RNA, 13 nt, Human
uucaacgcagccc

SEQ ID NO: 1866892 - RNA, 20 nt, Human
uucaaccauuccccauggga

SEQ ID NO: 1866893 - RNA, 17 nt, Human
uucaaccauuccccaug

SEQ ID NO: 1866894 - RNA, 18 nt, Human
uucaauucucauuuguca

SEQ ID NO: 1866895 - RNA, 16 nt, Human
uuuaucgucacugcuu

SEQ ID NO: 1866896 - RNA, 16 nt, Human
uuuauaaacuuuaccu

SEQ ID NO: 1866897 - RNA, 21 nt, Human
uuuaucgucacugcuuaacuu

SEQ ID NO: 1866898 - RNA, 14 nt, Human
uuuauaaacuuuac

SEQ ID NO: 1866899 - RNA, 16 nt, Human
uuuauugucaaagugg

SEQ ID NO: 1866900 - RNA, 14 nt, Human
uuuauugucaaagu

SEQ ID NO: 1866901 - RNA, 14 nt, Human
uuuaugcauauuau

SEQ ID NO: 1866902 - RNA, 13 nt, Human
uuuauugcuuguu

SEQ ID NO: 1866903 - RNA, 15 nt, Human
uuuacuuuguguuca

SEQ ID NO: 1866904 - RNA, 23 nt, Human
uuguauuuaaaugaaagugagac

SEQ ID NO: 1866905 - RNA, 20 nt, Human
uuguauuuuacuaauaaaau

SEQ ID NO: 1866906 - RNA, 15 nt, Human
uuguauuuauuuagu

SEQ ID NO: 1866907 - RNA, 22 nt, Human
uuucauugcugggcuugucugu

SEQ ID NO: 1866908 - RNA, 16 nt, Human
uuucagccaagaauuc

SEQ ID NO: 1866909 - RNA, 15 nt, Human
uuucagccaagaauu

SEQ ID NO: 1866910 - RNA, 13 nt, Human
uuuccaggaaggc

SEQ ID NO: 1866911 - RNA, 12 nt, Human
uuuccaaaguac

SEQ ID NO: 1866912 - RNA, 15 nt, Human
uuuccaaaguacacu

SEQ ID NO: 1866913 - RNA, 15 nt, Human
uuucagcagcugcag

SEQ ID NO: 1866914 - RNA, 13 nt, Human
uuuauuuccagug

SEQ ID NO: 1866915 - RNA, 22 nt, Human
uuucaauaggaaaaacugauuu

SEQ ID NO: 1866916 - RNA, 20 nt, Human
uuucaauaggaaaaacugau

SEQ ID NO: 1866917 - RNA, 15 nt, Human
uuucuagccagagga

SEQ ID NO: 1866918 - RNA, 15 nt, Human
uuucuaaugugugaa

SEQ ID NO: 1866919 - RNA, 17 nt, Human
uuucuaaagcugccagc

SEQ ID NO: 1866920 - RNA, 14 nt, Human
uuucuaaagcugcc

SEQ ID NO: 1866921 - RNA, 14 nt, Human
uuucuaaaggcuac

SEQ ID NO: 1866922 - RNA, 18 nt, Human
uuucuaaaggcuaccuuu

SEQ ID NO: 1866923 - RNA, 21 nt, Human
uuuccucuuuggucuacacug

SEQ ID NO: 1866924 - RNA, 23 nt, Human
uuuccugacagaaggacucaggu

SEQ ID NO: 1866925 - RNA, 22 nt, Human
uuuccucaaaacuucagacaua

SEQ ID NO: 1866926 - RNA, 20 nt, Human
uuuucacugcuggcugccuu

SEQ ID NO: 1866927 - RNA, 19 nt, Human
uuuucacugcuggcugccu

SEQ ID NO: 1866928 - RNA, 15 nt, Human
uuuucacaguucucu

SEQ ID NO: 1866929 - RNA, 22 nt, Human
uuuucaacgcagcccugcuuug

SEQ ID NO: 1866930 - RNA, 21 nt, Human
uuuucaacgcagcccugcuuu

SEQ ID NO: 1866931 - RNA, 17 nt, Human
uuuucaacgcagcccug

SEQ ID NO: 1866932 - RNA, 19 nt, Human
uuuuccaugaguccccugu

SEQ ID NO: 1866933 - RNA, 18 nt, Human
uuuuccaugaguccccug

SEQ ID NO: 1866934 - RNA, 15 nt, Human
uuuuccuucagugcc

SEQ ID NO: 1866935 - RNA, 17 nt, Human
uuuucuugcaugaggcu

SEQ ID NO: 1866936 - RNA, 14 nt, Human
uuuucuucucccuc

SEQ ID NO: 1866937 - RNA, 20 nt, Human
uuuuauaucaauuuaaaaaa

SEQ ID NO: 1866938 - RNA, 14 nt, Human
uuuuacuguacaga

SEQ ID NO: 1866939 - RNA, 18 nt, Human
uuuuaucgucacugcuua

SEQ ID NO: 1866940 - RNA, 20 nt, Human
uuuuaugauacuugaaaauu

SEQ ID NO: 1866941 - RNA, 16 nt, Human
uuuuaugauacuugaa

SEQ ID NO: 1866942 - RNA, 16 nt, Human
uuuuacagcugccugc

SEQ ID NO: 1866943 - RNA, 22 nt, Human
uuuuaaaaugagaaaucuaaaa

SEQ ID NO: 1866944 - RNA, 15 nt, Human
uuuuaaaaugagaaa

SEQ ID NO: 1866945 - RNA, 15 nt, Human
uuuguaaauuaacuu

SEQ ID NO: 1866946 - RNA, 16 nt, Human
uuuguaaauuaacuuu

SEQ ID NO: 1866947 - RNA, 17 nt, Human
uuuguaaauuaacuuuu

SEQ ID NO: 1866948 - RNA, 19 nt, Human
uuuggugguuucagaaaug

SEQ ID NO: 1866949 - RNA, 22 nt, Human
uuuguaaauuaacuuuuauaaa

SEQ ID NO: 1866950 - RNA, 21 nt, Human
uuuguccccaccgcagacagg

SEQ ID NO: 1866951 - RNA, 13 nt, Human
uuuguccccaccg

SEQ ID NO: 1866952 - RNA, 16 nt, Human
uuuguugucagcugaa

SEQ ID NO: 1866953 - RNA, 13 nt, Human
uuugagugccuua

SEQ ID NO: 1866954 - RNA, 17 nt, Human
uuugaggucuguucuuu

SEQ ID NO: 1866955 - RNA, 22 nt, Human
uuugaggucuguucuuuccaaa

SEQ ID NO: 1866956 - RNA, 14 nt, Human
uuugagcucagccc

SEQ ID NO: 1866957 - RNA, 22 nt, Human
uuucuuacugucuuuuuucuaa

SEQ ID NO: 1866958 - RNA, 15 nt, Human
uuugagcagggcuca

SEQ ID NO: 1866959 - RNA, 23 nt, Human
uuugcauaacguauaaaagccug

SEQ ID NO: 1866960 - RNA, 19 nt, Human
uuugcauaacguauaaaag

SEQ ID NO: 1866961 - RNA, 14 nt, Human
uuugcagacaggca

SEQ ID NO: 1866962 - RNA, 16 nt, Human
uuugccagugggaacu

SEQ ID NO: 1866963 - RNA, 15 nt, Human
uuugccagugggaac

SEQ ID NO: 1866964 - RNA, 18 nt, Human
uuugccauguuggccagg

SEQ ID NO: 1866965 - RNA, 17 nt, Human
uuuuuuccuucagugcc

SEQ ID NO: 1866966 - RNA, 12 nt, Human
uuuuuuacuaau

SEQ ID NO: 1866967 - RNA, 20 nt, Human
uuuuuuauacaggaugauga

SEQ ID NO: 1866968 - RNA, 13 nt, Human
uuuugaaaaacug

SEQ ID NO: 1866969 - RNA, 18 nt, Human
gcaaucaaaucugcuuuu

SEQ ID NO: 1866970 - RNA, 18 nt, Human
gccucaaaugagaaaaug

SEQ ID NO: 1866971 - RNA, 18 nt, Human
gaaaaaguucugcagaua

SEQ ID NO: 1866972 - RNA, 18 nt, Human
gcaccgggccacagagaa

SEQ ID NO: 1866973 - RNA, 20 nt, Human
gaucagaguaauccaagcaa

SEQ ID NO: 1866974 - RNA, 16 nt, Human
ucccaugagccucagc

SEQ ID NO: 1866975 - RNA, 17 nt, Human
ggaaucuuucugcuuug

SEQ ID NO: 1866976 - RNA, 14 nt, Human
gggccaaagaaaca

SEQ ID NO: 1866977 - RNA, 14 nt, Human
ggccacagaaaauu

SEQ ID NO: 1866978 - RNA, 24 nt, Human
ggccacuccagaccccuggcuuuu

SEQ ID NO: 1866979 - RNA, 19 nt, Human
guaaaaauuaaaaguuaug

SEQ ID NO: 1866980 - RNA, 19 nt, Human
gugcauaaaaacaagaaca

SEQ ID NO: 1866981 - RNA, 22 nt, Human
gugccccugcacuccagccuga

SEQ ID NO: 1866982 - RNA, 16 nt, Human
aaugugauaaaacccc

SEQ ID NO: 1866983 - RNA, 17 nt, Human
aauuuuuauuaaauuau

SEQ ID NO: 1866984 - RNA, 13 nt, Human
accagggcuggaa

SEQ ID NO: 1866985 - RNA, 14 nt, Human
aacaggcagauaca

SEQ ID NO: 1866986 - RNA, 20 nt, Human
ccguuauuaaaaaucucaaa

SEQ ID NO: 1866987 - RNA, 10 nt, Human
uuugggcucu

SEQ ID NO: 1866988 - RNA, 15 nt, Human
ccccaggaggccagc

SEQ ID NO: 1866989 - RNA, 18 nt, Human
uuguacagacaacaaacc

SEQ ID NO: 1866990 - RNA, 16 nt, Human
uuucuaaaucuccaaa

SEQ ID NO: 1866991 - RNA, 16 nt, Human
uuugggguaugggaga

SEQ ID NO: 1866992 - RNA, 12 nt, Human
uuaaaaguaucc

SEQ ID NO: 1866993 - RNA, 12 nt, Human
cccacugcuuuu

SEQ ID NO: 1866994 - RNA, 18 nt, Human
cccuggcucccacaggcc

SEQ ID NO: 1866995 - RNA, 16 nt, Human
guauccuucagccuga

SEQ ID NO: 1866996 - RNA, 22 nt, Human
ggugaacauugcaauagaaauc

SEQ ID NO: 1866997 - RNA, 22 nt, Human
gguucuacgccaggggaaaauc

SEQ ID NO: 1866998 - RNA, 15 nt, Human
ggguccuagaaauuc

SEQ ID NO: 1866999 - RNA, 17 nt, Human
guguuagugguuaccca

SEQ ID NO: 1867000 - RNA, 13 nt, Human
gugaaagaaaaua

SEQ ID NO: 1867001 - RNA, 20 nt, Human
ggaaacaugacucguauaug

SEQ ID NO: 1867002 - RNA, 13 nt, Human
ggcagcugcuuuu

SEQ ID NO: 1867003 - RNA, 14 nt, Human
gggcacagaaaaug

SEQ ID NO: 1867004 - RNA, 17 nt, Human
ucugugagaugcuagaa

SEQ ID NO: 1867005 - RNA, 22 nt, Human
uagcauggcugccaaugggagc

SEQ ID NO: 1867006 - RNA, 20 nt, Human
gucgcaauuacuaagaagca

SEQ ID NO: 1867007 - RNA, 15 nt, Human
gguuuuaaaaaaauc

SEQ ID NO: 1867008 - RNA, 19 nt, Human
ucuguugcccaggcuggag

SEQ ID NO: 1867009 - RNA, 15 nt, Human
uccaagaagcccagg

SEQ ID NO: 1867010 - RNA, 19 nt, Human
cugccuguucagcuccagc

SEQ ID NO: 1867011 - RNA, 18 nt, Human
gaaugaaugcuguauaug

SEQ ID NO: 1867012 - RNA, 18 nt, Human
cucccaacucaccccagc

SEQ ID NO: 1867013 - RNA, 19 nt, Human
cugcccauccugccccuga

SEQ ID NO: 1867014 - RNA, 12 nt, Human
gagaguggcucc

SEQ ID NO: 1867015 - RNA, 16 nt, Human
gaucucuugagccugg

SEQ ID NO: 1867016 - RNA, 18 nt, Human
gauaaagguucaugcaaa

SEQ ID NO: 1867017 - RNA, 14 nt, Human
gcaaauguggcucc

SEQ ID NO: 1867018 - RNA, 16 nt, Human
gcagggggcaugaugc

SEQ ID NO: 1867019 - RNA, 11 nt, Human
aaauaaauuau

SEQ ID NO: 1867020 - RNA, 11 nt, Human
aauaaacacuc

SEQ ID NO: 1867021 - RNA, 19 nt, Human
accgggcacucagaagaca

SEQ ID NO: 1867022 - RNA, 21 nt, Human
accauguuggccaggcugguc

SEQ ID NO: 1867023 - RNA, 13 nt, Human
uuaaaacacaaca

SEQ ID NO: 1867024 - RNA, 17 nt, Human
uggugacugugggcucc

SEQ ID NO: 1867025 - RNA, 20 nt, Human
uguaacaccaugauuaacca

SEQ ID NO: 1867026 - RNA, 19 nt, Human
ucugucgcccaggcuggag

SEQ ID NO: 1867027 - RNA, 16 nt, Human
cugccaggaagccagc

SEQ ID NO: 1867028 - RNA, 21 nt, Human
cggugucccccagcagccugg

SEQ ID NO: 1867029 - RNA, 18 nt, Human
cuuccacaagagcccagg

SEQ ID NO: 1867030 - RNA, 22 nt, Human
ccaucccugaaggccccgccca

SEQ ID NO: 1867031 - RNA, 15 nt, Human
ccaucuacccuccga

SEQ ID NO: 1867032 - RNA, 12 nt, Human
ccaaguggcucc

SEQ ID NO: 1867033 - RNA, 16 nt, Human
cgggcucugccuccca

SEQ ID NO: 1867034 - RNA, 18 nt, Human
cgacagccuggcacaggg

SEQ ID NO: 1867035 - RNA, 13 nt, Human
cacuccagccugg

SEQ ID NO: 1867036 - RNA, 17 nt, Human
cacaugauccugcaauu

SEQ ID NO: 1867037 - RNA, 19 nt, Human
cacaaccuucuguggcuca

SEQ ID NO: 1867038 - RNA, 15 nt, Human
cacaccagagcccac

SEQ ID NO: 1867039 - RNA, 13 nt, Human
cagcccugcuuug

SEQ ID NO: 1867040 - RNA, 22 nt, Human
cagcgcuggccgggaccccgag

SEQ ID NO: 1867041 - RNA, 21 nt, Human
caggauucuuccucccucccu

SEQ ID NO: 1867042 - RNA, 14 nt, Human
ccaccacacccagc

SEQ ID NO: 1867043 - RNA, 16 nt, Human
cagagacagaaagcag

SEQ ID NO: 1867044 - RNA, 15 nt, Human
caaaaugggacuugu

SEQ ID NO: 1867045 - RNA, 18 nt, Human
caaaagaaagaaaaucag

SEQ ID NO: 1867046 - RNA, 16 nt, Human
caagaaaugaaagcag

SEQ ID NO: 1867047 - RNA, 18 nt, Human
guuucuuucaaagaagcc

SEQ ID NO: 1867048 - RNA, 14 nt, Human
ucaccaagcccagu

SEQ ID NO: 1867049 - RNA, 16 nt, Human
aguccacaguggaacc

SEQ ID NO: 1867050 - RNA, 18 nt, Human
aguggaaguaguggagcc

SEQ ID NO: 1867051 - RNA, 19 nt, Human
aucugagcagguugcucca

SEQ ID NO: 1867052 - RNA, 15 nt, Human
aaauaaaaaacacug

SEQ ID NO: 1867053 - RNA, 14 nt, Human
acucuuaaaaccca

SEQ ID NO: 1867054 - RNA, 17 nt, Human
aauacacacaaguauac

SEQ ID NO: 1867055 - RNA, 21 nt, Human
aucugguuuauuuuuguucca

SEQ ID NO: 1867056 - RNA, 15 nt, Human
cugccgcagcccugc

SEQ ID NO: 1867057 - RNA, 17 nt, Human
cuuuaaaugcugcuuuu

SEQ ID NO: 1867058 - RNA, 20 nt, Human
gacuguacuccucccaggcg

SEQ ID NO: 1867059 - RNA, 16 nt, Human
gagacagcucugcaua

SEQ ID NO: 1867060 - RNA, 20 nt, Human herpesvirus 3
cucccacgguuugugcacug

SEQ ID NO: 1867061 - RNA, 17 nt, Human herpesvirus 3
auaucucauacucaugc

SEQ ID NO: 1867062 - RNA, 14 nt, Human herpesvirus 3
gaaagcggacacau

SEQ ID NO: 1867063 - RNA, 16 nt, Human herpesvirus 3
caacucuuuucccaaa

SEQ ID NO: 1867064 - RNA, 15 nt, Human herpesvirus 3
guuacaucuauagca

SEQ ID NO: 1867065 - RNA, 12 nt, Human herpesvirus 3
cagccgcucgcu

SEQ ID NO: 1867066 - RNA, 17 nt, Human herpesvirus 3
gaagcuauuggcuccac

SEQ ID NO: 1867067 - RNA, 22 nt, Human herpesvirus 3
accuguuagaauaguaaauacc

SEQ ID NO: 1867068 - RNA, 17 nt, Human herpesvirus 3
aacgcugcugacaaaau

SEQ ID NO: 1867069 - RNA, 21 nt, Human herpesvirus 3
aacuuuugcuuauauuuuaca

SEQ ID NO: 1867070 - RNA, 19 nt, Human herpesvirus 3
cuauauaacgccucccagc

SEQ ID NO: 1867071 - RNA, 20 nt, Human herpesvirus 3
uagauguguugcgaauguaa

SEQ ID NO: 1867072 - RNA, 22 nt, Human herpesvirus 3
agcggaacgguuuuuaugaaaa

SEQ ID NO: 1867073 - RNA, 22 nt, Human herpesvirus 3
auuuuugauuuuuuuaaacaaa

SEQ ID NO: 1867074 - RNA, 18 nt, Human herpesvirus 3
auucaaguaaauaugugc

SEQ ID NO: 1867075 - RNA, 14 nt, Human herpesvirus 3
cgaauaucgccaug

SEQ ID NO: 1867076 - RNA, 16 nt, Human herpesvirus 3
auauacgagcaaaaua

SEQ ID NO: 1867077 - RNA, 17 nt, Human herpesvirus 3
guggugaagaaggacag

SEQ ID NO: 1867078 - RNA, 12 nt, Human herpesvirus 3
ugcauuggaagu

SEQ ID NO: 1867079 - RNA, 14 nt, Human herpesvirus 3
uguuauacuacuua

SEQ ID NO: 1867080 - RNA, 18 nt, Human herpesvirus 3
aacucgccuccacugcau

SEQ ID NO: 1867081 - RNA, 19 nt, Human herpesvirus 3
gcggaucccgcggugagca

SEQ ID NO: 1867082 - RNA, 22 nt, Human herpesvirus 3
cuugggcuguuaggguugggag

SEQ ID NO: 1867083 - RNA, 14 nt, Human herpesvirus 3
caauacguaaaugu

SEQ ID NO: 1867084 - RNA, 15 nt, Human herpesvirus 3
auauuacuuaaaacg

SEQ ID NO: 1867085 - RNA, 20 nt, Human herpesvirus 3
ccaaauaacgccuuaaaagu

SEQ ID NO: 1867086 - RNA, 22 nt, Human herpesvirus 3
acaguggcggauaacugccugu

SEQ ID NO: 1867087 - RNA, 12 nt, Human herpesvirus 3
guuaauuuuaca

SEQ ID NO: 1867088 - RNA, 20 nt, Human herpesvirus 3
gguagacaacugacagaaac

SEQ ID NO: 1867089 - RNA, 13 nt, Human herpesvirus 3
uccgcgcucaauc

SEQ ID NO: 1867090 - RNA, 16 nt, Human herpesvirus 3
uaguaccacgugguau

SEQ ID NO: 1867091 - RNA, 12 nt, Human herpesvirus 3
uuuuuaaucauu

SEQ ID NO: 1867092 - RNA, 16 nt, Human herpesvirus 3
cccaccucggccgcuu

SEQ ID NO: 1867093 - RNA, 16 nt, Human herpesvirus 3
uaaaacauaucaauuu

SEQ ID NO: 1867094 - RNA, 13 nt, Human herpesvirus 3
ucuacgcauuuac

SEQ ID NO: 1867095 - RNA, 14 nt, Human herpesvirus 3
uauuuuugucuacc

SEQ ID NO: 1867096 - RNA, 19 nt, Human herpesvirus 3
aucauuaaacgugcauuuu

SEQ ID NO: 1867097 - RNA, 18 nt, Human herpesvirus 3
ucuauagcaaaauucaga

SEQ ID NO: 1867098 - RNA, 21 nt, Human herpesvirus 3
acaucauccguccaaacagug

SEQ ID NO: 1867099 - RNA, 20 nt, Human herpesvirus 3
uaucaguugaaccaaaucca

SEQ ID NO: 1867100 - RNA, 14 nt, Human herpesvirus 3
cggaucaugaacaa

SEQ ID NO: 1867101 - RNA, 15 nt, Human herpesvirus 3
acguuugcauuuacc

SEQ ID NO: 1867102 - RNA, 18 nt, Human herpesvirus 3
uauauuaaagguuaaauu

SEQ ID NO: 1867103 - RNA, 13 nt, Human herpesvirus 3
uaaauauaaauuu

SEQ ID NO: 1867104 - RNA, 14 nt, Human herpesvirus 3
uauguacauuaaag

SEQ ID NO: 1867105 - RNA, 19 nt, Human herpesvirus 3
aacagucguugggaauuua

SEQ ID NO: 1867106 - RNA, 12 nt, Human herpesvirus 3
guacacccagcu

SEQ ID NO: 1867107 - RNA, 20 nt, Human herpesvirus 3
cgcuggguguggcuauuaga

SEQ ID NO: 1867108 - RNA, 13 nt, Human herpesvirus 3
cucacuguuuucg

SEQ ID NO: 1867109 - RNA, 18 nt, Human herpesvirus 3
ccauuacaacaaggauaa

SEQ ID NO: 1867110 - RNA, 14 nt, Human herpesvirus 3
ggcaguucagagac

SEQ ID NO: 1867111 - RNA, 19 nt, Human herpesvirus 3
gauguuuuuauuagaacgu

SEQ ID NO: 1867112 - RNA, 19 nt, Human herpesvirus 3
auguacugugucucucaaa

SEQ ID NO: 1867113 - RNA, 15 nt, Human herpesvirus 3
uuuaggaaucaagac

SEQ ID NO: 1867114 - RNA, 14 nt, Human herpesvirus 3
ucgcuacuccaggc

SEQ ID NO: 1867115 - RNA, 20 nt, Human herpesvirus 3
cccacgggguccccacacgg

SEQ ID NO: 1867116 - RNA, 12 nt, Human herpesvirus 3
agaucuuacacc

SEQ ID NO: 1867117 - RNA, 21 nt, Human herpesvirus 3
acaucgaucaucgaaaagacu

SEQ ID NO: 1867118 - RNA, 21 nt, Human herpesvirus 3
cagcgccaauaaaagcagaca

SEQ ID NO: 1867119 - RNA, 12 nt, Human herpesvirus 3
accucggccgcu

SEQ ID NO: 1867120 - RNA, 19 nt, Human herpesvirus 3
guacguaaccauauauaag

SEQ ID NO: 1867121 - RNA, 14 nt, Human herpesvirus 3
guggguagguaggg

SEQ ID NO: 1867122 - RNA, 15 nt, Human herpesvirus 3
auaucccaaggcaaa

SEQ ID NO: 1867123 - RNA, 13 nt, Human herpesvirus 3
gcccacaccuacc

SEQ ID NO: 1867124 - RNA, 18 nt, Human herpesvirus 3
cacccauaaaaacgccuu

SEQ ID NO: 1867125 - RNA, 18 nt, Human herpesvirus 3
cccgcgcguuugcggggc

SEQ ID NO: 1867126 - RNA, 13 nt, Human herpesvirus 3
aaacuauuccaaa

SEQ ID NO: 1867127 - RNA, 20 nt, Human herpesvirus 3
auucaagacuaacauuuauc

SEQ ID NO: 1867128 - RNA, 13 nt, Human herpesvirus 3
cagauucuucacc

SEQ ID NO: 1867129 - RNA, 19 nt, Human herpesvirus 3
aggacgaaggggaauuaaa

SEQ ID NO: 1867130 - RNA, 21 nt, Human herpesvirus 3
uguaaaguuauuucuccggga

SEQ ID NO: 1867131 - RNA, 17 nt, Human herpesvirus 3
cauuuuaaaaauaccug

SEQ ID NO: 1867132 - RNA, 16 nt, Human herpesvirus 3
guguucuaaaacacug

SEQ ID NO: 1867133 - RNA, 22 nt, Human herpesvirus 3
ccaacuggaaaugugcugucaa

SEQ ID NO: 1867134 - RNA, 16 nt, Human herpesvirus 3
gggacccgcagcccag

SEQ ID NO: 1867135 - RNA, 16 nt, Human herpesvirus 3
guuaauaaaagcggaa

SEQ ID NO: 1867136 - RNA, 21 nt, Human herpesvirus 3
ccuuuacaagauauaauuugu

SEQ ID NO: 1867137 - RNA, 12 nt, Human herpesvirus 3
ccagaguacagg

SEQ ID NO: 1867138 - RNA, 18 nt, Human herpesvirus 3
aauauuuuguuaauacag

SEQ ID NO: 1867139 - RNA, 23 nt, Human herpesvirus 3
agguuuauuuacuuuacaacccg

SEQ ID NO: 1867140 - RNA, 17 nt, Human herpesvirus 3
auuuuuauuuaaaugug

SEQ ID NO: 1867141 - RNA, 21 nt, Human herpesvirus 3
guuuucguuuugguguuacau

SEQ ID NO: 1867142 - RNA, 18 nt, Human herpesvirus 3
uucuauauuaauaaaaga

SEQ ID NO: 1867143 - RNA, 18 nt, Human herpesvirus 3
ggacuaacaaaguuggaa

SEQ ID NO: 1867144 - RNA, 19 nt, Human herpesvirus 3
uaaaauucuaacaacucug

SEQ ID NO: 1867145 - RNA, 18 nt, Human herpesvirus 3
uuuacaggccggaguguc

SEQ ID NO: 1867146 - RNA, 13 nt, Human herpesvirus 3
gugaaagagcugu

SEQ ID NO: 1867147 - RNA, 14 nt, Human herpesvirus 3
gcgaacaccgcugu

SEQ ID NO: 1867148 - RNA, 15 nt, Human herpesvirus 3
aaacaaauacgauca

SEQ ID NO: 1867149 - RNA, 17 nt, Human herpesvirus 3
auuugccccaaaccacu

SEQ ID NO: 1867150 - RNA, 15 nt, Human herpesvirus 3
gcgcccaccucggcc

SEQ ID NO: 1867151 - RNA, 14 nt, Human herpesvirus 3
cauuaaaguauuug

SEQ ID NO: 1867152 - RNA, 22 nt, Human herpesvirus 3
gauguuuuuaauccaauguuug

SEQ ID NO: 1867153 - RNA, 15 nt, Human herpesvirus 3
ccuucaaguuaaaua

SEQ ID NO: 1867154 - RNA, 12 nt, Human herpesvirus 3
caccgcucugcg

SEQ ID NO: 1867155 - RNA, 12 nt, Human herpesvirus 3
gucagaaacacu

SEQ ID NO: 1867156 - RNA, 21 nt, Human herpesvirus 3
aaauugggggauuugggagaa

SEQ ID NO: 1867157 - RNA, 20 nt, Human herpesvirus 3
uuuaugaaaaaagugucugu

SEQ ID NO: 1867158 - RNA, 13 nt, Human herpesvirus 3
uacauaaauacua

SEQ ID NO: 1867159 - RNA, 20 nt, Human herpesvirus 3
agacaucaccgaacauggac

SEQ ID NO: 1867160 - RNA, 21 nt, Human herpesvirus 3
ccacuggcgcgcggacuguuu

SEQ ID NO: 1867161 - RNA, 15 nt, Human herpesvirus 3
cgaauaaacgacaca

SEQ ID NO: 1867162 - RNA, 16 nt, Human herpesvirus 3
uagguucggcaaaucu

SEQ ID NO: 1867163 - RNA, 16 nt, Human herpesvirus 3
caaauaacugaacauu

SEQ ID NO: 1867164 - RNA, 13 nt, Human herpesvirus 3
ucaggucugucau

SEQ ID NO: 1867165 - RNA, 23 nt, Human herpesvirus 3
auuuuaauguaucuggaaggcau

SEQ ID NO: 1867166 - RNA, 21 nt, Human herpesvirus 3
uuauauacguagaauuuacag

SEQ ID NO: 1867167 - RNA, 16 nt, Human herpesvirus 3
ucgccaugguuucaaa

SEQ ID NO: 1867168 - RNA, 24 nt, Human herpesvirus 3
auaucuuacagauucuucaccaag

SEQ ID NO: 1867169 - RNA, 18 nt, Human herpesvirus 3
uuccacaagguacgaaaa

SEQ ID NO: 1867170 - RNA, 14 nt, Human herpesvirus 3
gaucgucaguaaau

SEQ ID NO: 1867171 - RNA, 23 nt, Human herpesvirus 3
uguucauuuuauuaucccagcac

SEQ ID NO: 1867172 - RNA, 12 nt, Human herpesvirus 3
ggaauacaggca

SEQ ID NO: 1867173 - RNA, 12 nt, Human herpesvirus 3
augacuuccaca

SEQ ID NO: 1867174 - RNA, 16 nt, Human herpesvirus 3
caagguguaaauacug

SEQ ID NO: 1867175 - RNA, 20 nt, Human herpesvirus 3
aaugggguuggggauugcau

SEQ ID NO: 1867176 - RNA, 21 nt, Human herpesvirus 3
cuggaaggccagcguaauaca

SEQ ID NO: 1867177 - RNA, 16 nt, Human herpesvirus 3
aggcauuuguguccca

SEQ ID NO: 1867178 - RNA, 16 nt, Human herpesvirus 3
cguucuaauaaaaaca

SEQ ID NO: 1867179 - RNA, 14 nt, Human herpesvirus 3
ccacauacaacaug

SEQ ID NO: 1867180 - RNA, 18 nt, Human herpesvirus 3
cuugauacccucaaacac

SEQ ID NO: 1867181 - RNA, 15 nt, Human herpesvirus 3
gaauuacuccuuuaa

SEQ ID NO: 1867182 - RNA, 16 nt, Human herpesvirus 3
cacgccgcaacaaccc

SEQ ID NO: 1867183 - RNA, 24 nt, Human herpesvirus 3
guggacaucgcugaugccagaagc

SEQ ID NO: 1867184 - RNA, 20 nt, Human herpesvirus 3
gcggccguugccgcauuaga

SEQ ID NO: 1867185 - RNA, 13 nt, Human herpesvirus 3
uacuuggacuguu

SEQ ID NO: 1867186 - RNA, 22 nt, Human herpesvirus 3
cgcguguacgaaaaccgcagcc

SEQ ID NO: 1867187 - RNA, 16 nt, Human herpesvirus 3
aucagaucaucugaca

SEQ ID NO: 1867188 - RNA, 16 nt, Human herpesvirus 3
ugcacugcaucuggag

SEQ ID NO: 1867189 - RNA, 14 nt, Human herpesvirus 3
aaacuuuacagagg

SEQ ID NO: 1867190 - RNA, 16 nt, Human herpesvirus 3
cgcuucccgaaagccc

SEQ ID NO: 1867191 - RNA, 22 nt, Human herpesvirus 3
acaugcacugcaucuggagaac

SEQ ID NO: 1867192 - RNA, 19 nt, Human herpesvirus 3
augacggcgacuuuaagaa

SEQ ID NO: 1867193 - RNA, 14 nt, Human herpesvirus 3
cugccguauuuugc

SEQ ID NO: 1867194 - RNA, 14 nt, Human herpesvirus 3
cgauaacugcgaua

SEQ ID NO: 1867195 - RNA, 14 nt, Human herpesvirus 3
cuuagaaaagccag

SEQ ID NO: 1867196 - RNA, 20 nt, Human herpesvirus 3
aaauuaacucgcguacaaau

SEQ ID NO: 1867197 - RNA, 14 nt, Human herpesvirus 3
uauuuaaauuuaca

SEQ ID NO: 1867198 - RNA, 17 nt, Human herpesvirus 3
aaauuuauaaaacacuc

SEQ ID NO: 1867199 - RNA, 20 nt, Human herpesvirus 3
auuuccacaaccagguuaaa

SEQ ID NO: 1867200 - RNA, 17 nt, Human herpesvirus 3
cccggcggaccccggga

SEQ ID NO: 1867201 - RNA, 16 nt, Human herpesvirus 3
augaccgcuauuuuca

SEQ ID NO: 1867202 - RNA, 19 nt, Human herpesvirus 3
ucguucgaauccuagaagc

SEQ ID NO: 1867203 - RNA, 13 nt, Human herpesvirus 3
gcucaaugaacag

SEQ ID NO: 1867204 - RNA, 18 nt, Human herpesvirus 3
caguugaaccaaauccac

SEQ ID NO: 1867205 - RNA, 14 nt, Human herpesvirus 3
guucaguaacuuaa

SEQ ID NO: 1867206 - RNA, 23 nt, Human herpesvirus 3
aaaagcggaacgguuuuuaugaa

SEQ ID NO: 1867207 - RNA, 18 nt, Human herpesvirus 3
cagacaagcuuauuuuua

SEQ ID NO: 1867208 - RNA, 21 nt, Human herpesvirus 3
uuugaaguguucuaaaacacu

SEQ ID NO: 1867209 - RNA, 15 nt, Human herpesvirus 3
caaagcaacgguuuc

SEQ ID NO: 1867210 - RNA, 14 nt, Human herpesvirus 3
ucagauauuuugca

SEQ ID NO: 1867211 - RNA, 22 nt, Human herpesvirus 3
gauauaaauccguaucucggag

SEQ ID NO: 1867212 - RNA, 14 nt, Human herpesvirus 3
uguucuaaaacacu

SEQ ID NO: 1867213 - RNA, 17 nt, Human herpesvirus 3
ugcgucuaucugcaggg

SEQ ID NO: 1867214 - RNA, 12 nt, Human herpesvirus 3
acggcugcugcc

SEQ ID NO: 1867215 - RNA, 19 nt, Human herpesvirus 3
uuugucuaccacuaagaac

SEQ ID NO: 1867216 - RNA, 22 nt, Human herpesvirus 3
cgcucgaugugauacaaugagc

SEQ ID NO: 1867217 - RNA, 23 nt, Human herpesvirus 3
ugcuauagccgucagaagguuca

SEQ ID NO: 1867218 - RNA, 20 nt, Human herpesvirus 3
augaaaaaagugucugucug

SEQ ID NO: 1867219 - RNA, 20 nt, Human herpesvirus 3
augcuugucaaaacauacua

SEQ ID NO: 1867220 - RNA, 18 nt, Human herpesvirus 3
uaaugcaacccugucauc

SEQ ID NO: 1867221 - RNA, 13 nt, Human herpesvirus 3
cccacccccgcag

SEQ ID NO: 1867222 - RNA, 14 nt, Human herpesvirus 3
uuaaguguauuugg

SEQ ID NO: 1867223 - RNA, 16 nt, Human herpesvirus 3
cacaauccacagauuc

SEQ ID NO: 1867224 - RNA, 15 nt, Human herpesvirus 3
ucuaaaaauaauguu

SEQ ID NO: 1867225 - RNA, 14 nt, Human herpesvirus 3
caucauacgcauuu

SEQ ID NO: 1867226 - RNA, 20 nt, Human herpesvirus 3
uacuccacggggucuacacc

SEQ ID NO: 1867227 - RNA, 15 nt, Human herpesvirus 3
gcuucccgaaagccc

SEQ ID NO: 1867228 - RNA, 23 nt, Human herpesvirus 3
acugaauuauauaccucggccgc

SEQ ID NO: 1867229 - RNA, 14 nt, Human herpesvirus 3
auaucuguuacauu

SEQ ID NO: 1867230 - RNA, 15 nt, Human herpesvirus 3
uauccucuuaacguu

SEQ ID NO: 1867231 - RNA, 23 nt, Human herpesvirus 3
ggaccggcgucaggucugucaug

SEQ ID NO: 1867232 - RNA, 15 nt, Human herpesvirus 3
uggcgcgcggacugu

SEQ ID NO: 1867233 - RNA, 16 nt, Human herpesvirus 3
ucaggguuuaacauuu

SEQ ID NO: 1867234 - RNA, 21 nt, Human herpesvirus 3
ccacuaagaacuuuauagccc

SEQ ID NO: 1867235 - RNA, 18 nt, Human herpesvirus 3
caugggccaauccgucaa

SEQ ID NO: 1867236 - RNA, 12 nt, Human herpesvirus 3
cgcgggugagug

SEQ ID NO: 1867237 - RNA, 22 nt, Human herpesvirus 3
auucuacagauuuauuuuuaca

SEQ ID NO: 1867238 - RNA, 18 nt, Human herpesvirus 3
uagcauauguucagcagc

SEQ ID NO: 1867239 - RNA, 20 nt, Human herpesvirus 3
gauucaagugagguguccug

SEQ ID NO: 1867240 - RNA, 19 nt, Human herpesvirus 3
ggcaccguagaaccgacug

SEQ ID NO: 1867241 - RNA, 18 nt, Human herpesvirus 3
uggauggccuaucuggau

SEQ ID NO: 1867242 - RNA, 22 nt, Human herpesvirus 3
uaggcggguucuucacuggacu

SEQ ID NO: 1867243 - RNA, 19 nt, Human herpesvirus 3
accaauaugccaucaauau

SEQ ID NO: 1867244 - RNA, 19 nt, Human herpesvirus 3
aagcguacgaccaaacauu

SEQ ID NO: 1867245 - RNA, 13 nt, Human herpesvirus 3
cuguacaccgcua

SEQ ID NO: 1867246 - RNA, 15 nt, Human herpesvirus 3
caauugucuguauau

SEQ ID NO: 1867247 - RNA, 17 nt, Human herpesvirus 3
uauuacauucauaaaag

SEQ ID NO: 1867248 - RNA, 23 nt, Human herpesvirus 3
acuagcuaccguuagaggcuuaa

SEQ ID NO: 1867249 - RNA, 23 nt, Human herpesvirus 3
aaauagcuguaaaaaccauggac

SEQ ID NO: 1867250 - RNA, 22 nt, Human herpesvirus 3
cccgccgucgcgcccaccucgg

SEQ ID NO: 1867251 - RNA, 12 nt, Human herpesvirus 3
auaccccaggcc

SEQ ID NO: 1867252 - RNA, 22 nt, Human herpesvirus 3
gacgcgaacaccgcugugcugu

SEQ ID NO: 1867253 - RNA, 13 nt, Human herpesvirus 3
cguauuguguaau

SEQ ID NO: 1867254 - RNA, 21 nt, Human herpesvirus 3
aucuuguccaacuguaucugu

SEQ ID NO: 1867255 - RNA, 22 nt, Human herpesvirus 3
aucccgccgucgcgcccaccuc

SEQ ID NO: 1867256 - RNA, 12 nt, Human herpesvirus 3
cugucugucugu

SEQ ID NO: 1867257 - RNA, 16 nt, Human herpesvirus 3
caucucuggaccccca

SEQ ID NO: 1867258 - RNA, 19 nt, Human herpesvirus 3
uauaucauuuuauuacauu

SEQ ID NO: 1867259 - RNA, 13 nt, Human herpesvirus 3
ugaccauuuacca

SEQ ID NO: 1867260 - RNA, 21 nt, Human herpesvirus 3
cuggcuggcgugguuauuaca

SEQ ID NO: 1867261 - RNA, 14 nt, Human herpesvirus 3
gugacagacuuugu

SEQ ID NO: 1867262 - RNA, 13 nt, Human herpesvirus 3
cauuuggacacua

SEQ ID NO: 1867263 - RNA, 14 nt, Human herpesvirus 3
cuuugcguauauga

SEQ ID NO: 1867264 - RNA, 20 nt, Human herpesvirus 3
uucaaguuaaauaacauguc

SEQ ID NO: 1867265 - RNA, 21 nt, Human herpesvirus 3
uacaaacgcgcaauguuuuga

SEQ ID NO: 1867266 - RNA, 16 nt, Human herpesvirus 3
aacaacaguaggaggu

SEQ ID NO: 1867267 - RNA, 11 nt, Human herpesvirus 3
gaauuuugcuc

SEQ ID NO: 1867268 - RNA, 23 nt, Human herpesvirus 3
ugagggugaccggcgggguccca

SEQ ID NO: 1867269 - RNA, 19 nt, Human herpesvirus 3
gucuuuuuuugaugucugu

SEQ ID NO: 1867270 - RNA, 14 nt, Human herpesvirus 3
guuccguuuggaaa

SEQ ID NO: 1867271 - RNA, 17 nt, Human herpesvirus 3
auguuuuucuaaauuac

SEQ ID NO: 1867272 - RNA, 18 nt, Human herpesvirus 3
ccauagaggugugugcac

SEQ ID NO: 1867273 - RNA, 21 nt, Human herpesvirus 3
cuuacacccccguugcuuuaa

SEQ ID NO: 1867274 - RNA, 18 nt, Human herpesvirus 3
gcaacugcaaacacgcaa

SEQ ID NO: 1867275 - RNA, 18 nt, Human herpesvirus 3
accgaacauggacugucg

SEQ ID NO: 1867276 - RNA, 13 nt, Human herpesvirus 3
acaagaaaccaug

SEQ ID NO: 1867277 - RNA, 23 nt, Human herpesvirus 3
guauauaaaauuaaaacauugcu

SEQ ID NO: 1867278 - RNA, 14 nt, Human herpesvirus 3
aacauuggcggaag

SEQ ID NO: 1867279 - RNA, 23 nt, Human herpesvirus 3
auagagguauuguuaccaggaga

SEQ ID NO: 1867280 - RNA, 22 nt, Human herpesvirus 3
aggugggguguuaaauaguuuu

SEQ ID NO: 1867281 - RNA, 19 nt, Human herpesvirus 3
ugggcaaaugaugaagcua

SEQ ID NO: 1867282 - RNA, 15 nt, Human herpesvirus 3
augcuuguaaaacau

SEQ ID NO: 1867283 - RNA, 23 nt, Human herpesvirus 3
cagacuccccccgucacacacac

SEQ ID NO: 1867284 - RNA, 20 nt, Human herpesvirus 3
cuauaaaaacauaacaccag

SEQ ID NO: 1867285 - RNA, 20 nt, Human herpesvirus 3
cuauagcugucacuguugcg

SEQ ID NO: 1867286 - RNA, 16 nt, Human herpesvirus 3
gcuguccaugaugaaa

SEQ ID NO: 1867287 - RNA, 23 nt, Human herpesvirus 3
gccaguggaccuuugcaaccugg

SEQ ID NO: 1867288 - RNA, 23 nt, Human herpesvirus 3
agcgccacuggcgcgcggacugu

SEQ ID NO: 1867289 - RNA, 13 nt, Human herpesvirus 3
cacagaacggucu

SEQ ID NO: 1867290 - RNA, 10 nt, Human herpesvirus 3
ucggaccccc

SEQ ID NO: 1867291 - RNA, 14 nt, Human herpesvirus 3
agauguguuauuau

SEQ ID NO: 1867292 - RNA, 20 nt, Human herpesvirus 3
aauaguaaauaccuauuuca

SEQ ID NO: 1867293 - RNA, 14 nt, Human herpesvirus 3
auaaaccaacuccu

SEQ ID NO: 1867294 - RNA, 19 nt, Human herpesvirus 3
cgcguuccaaauuauccaa

SEQ ID NO: 1867295 - RNA, 14 nt, Human herpesvirus 3
augucacaaaucau

SEQ ID NO: 1867296 - RNA, 17 nt, Human herpesvirus 3
ugucaucagacaugauu

SEQ ID NO: 1867297 - RNA, 19 nt, Human herpesvirus 3
uuagacguucaaaauaucu

SEQ ID NO: 1867298 - RNA, 18 nt, Human herpesvirus 3
ggaccuuugcaaccuggu

SEQ ID NO: 1867299 - RNA, 16 nt, Human herpesvirus 3
uauucucccaaaacau

SEQ ID NO: 1867300 - RNA, 17 nt, Human herpesvirus 3
uaacaauagaaucggag

SEQ ID NO: 1867301 - RNA, 20 nt, Human herpesvirus 3
aauaaaacguuuuaaaagcc

SEQ ID NO: 1867302 - RNA, 22 nt, Human herpesvirus 3
gcuucaagucucaaugaaacag

SEQ ID NO: 1867303 - RNA, 21 nt, Human herpesvirus 3
uaaucaguugggauaaauguu

SEQ ID NO: 1867304 - RNA, 18 nt, Human herpesvirus 3
gggucugccguauuuugc

SEQ ID NO: 1867305 - RNA, 16 nt, Human herpesvirus 3
ccaccucggccgcuuc

SEQ ID NO: 1867306 - RNA, 15 nt, Human herpesvirus 3
cgggcuugcuguucu

SEQ ID NO: 1867307 - RNA, 17 nt, Human herpesvirus 3
augcacugcaucuggag

SEQ ID NO: 1867308 - RNA, 21 nt, Human herpesvirus 3
auccucgcgguccguuucaua

SEQ ID NO: 1867309 - RNA, 23 nt, Human herpesvirus 3
gaaucucuucauauguaauuuua

SEQ ID NO: 1867310 - RNA, 19 nt, Human herpesvirus 3
gauggugaugaaaucagag

SEQ ID NO: 1867311 - RNA, 21 nt, Human herpesvirus 3
ugguaagguuuuauuuaaguu

SEQ ID NO: 1867312 - RNA, 21 nt, Human herpesvirus 3
uaauauuaacaggauuugcuu

SEQ ID NO: 1867313 - RNA, 20 nt, Human herpesvirus 3
uaugaucguccuucaacaca

SEQ ID NO: 1867314 - RNA, 14 nt, Human herpesvirus 3
uuuaucugaaaaga

SEQ ID NO: 1867315 - RNA, 13 nt, Human herpesvirus 3
cccggucugcuca

SEQ ID NO: 1867316 - RNA, 19 nt, Human herpesvirus 3
uuagcggugguaauucuuc

SEQ ID NO: 1867317 - RNA, 21 nt, Human herpesvirus 3
agacuuaguacgauagaauuu

SEQ ID NO: 1867318 - RNA, 17 nt, Human herpesvirus 3
caaaccguuuguuuuga

SEQ ID NO: 1867319 - RNA, 18 nt, Human herpesvirus 3
aaauguguauuauauguc

SEQ ID NO: 1867320 - RNA, 15 nt, Human herpesvirus 3
agucugaccauuuac

SEQ ID NO: 1867321 - RNA, 12 nt, Human herpesvirus 3
gacccaccccac

SEQ ID NO: 1867322 - RNA, 20 nt, Human herpesvirus 3
gaauucuuagaaaagccagc

SEQ ID NO: 1867323 - RNA, 15 nt, Human herpesvirus 3
cggcuuaacgagaga

SEQ ID NO: 1867324 - RNA, 21 nt, Human herpesvirus 3
agucaauguuuaaagacagcc

SEQ ID NO: 1867325 - RNA, 21 nt, Human herpesvirus 3
uguuuggugcacucuaccaaa

SEQ ID NO: 1867326 - RNA, 19 nt, Human herpesvirus 3
uucuacaccuuugcaugac

SEQ ID NO: 1867327 - RNA, 20 nt, Human herpesvirus 3
gaaucguugcggguacaaua

SEQ ID NO: 1867328 - RNA, 12 nt, Human herpesvirus 3
aucagaagauau

SEQ ID NO: 1867329 - RNA, 16 nt, Human herpesvirus 3
aaauucuacaacauug

SEQ ID NO: 1867330 - RNA, 19 nt, Human herpesvirus 3
gcggaacgguuuuuaugaa

SEQ ID NO: 1867331 - RNA, 12 nt, Human herpesvirus 3
aaaauuugagau

SEQ ID NO: 1867332 - RNA, 19 nt, Human herpesvirus 3
uuauaucuguuacauuucg

SEQ ID NO: 1867333 - RNA, 16 nt, Human herpesvirus 3
caaaauaaaaacauac

SEQ ID NO: 1867334 - RNA, 13 nt, Human herpesvirus 3
cgcgauauucucc

SEQ ID NO: 1867335 - RNA, 21 nt, Human herpesvirus 3
gccgagaagggggauuuacaa

SEQ ID NO: 1867336 - RNA, 16 nt, Human herpesvirus 3
aaacaggcguguuuau

SEQ ID NO: 1867337 - RNA, 23 nt, Human herpesvirus 3
acaauggcgaccacgacagcagu

SEQ ID NO: 1867338 - RNA, 18 nt, Human herpesvirus 3
cugcguuagacgccuggc

SEQ ID NO: 1867339 - RNA, 13 nt, Human herpesvirus 3
ccgguuuauauuc

SEQ ID NO: 1867340 - RNA, 22 nt, Human herpesvirus 3
cucuguucggugaguuaaacgg

SEQ ID NO: 1867341 - RNA, 17 nt, Human herpesvirus 3
auaauaugauacauaaa

SEQ ID NO: 1867342 - RNA, 19 nt, Human herpesvirus 3
caacguauccgaagccuuu

SEQ ID NO: 1867343 - RNA, 15 nt, Human herpesvirus 3
ucgugagcgccacug

SEQ ID NO: 1867344 - RNA, 14 nt, Human herpesvirus 3
gagcgccacuggcg

SEQ ID NO: 1867345 - RNA, 15 nt, Human herpesvirus 3
caacacaaagggccu

SEQ ID NO: 1867346 - RNA, 18 nt, Human herpesvirus 3
cuuuaugaauuugcuacc

SEQ ID NO: 1867347 - RNA, 14 nt, Human herpesvirus 3
uauagucaaauuca

SEQ ID NO: 1867348 - RNA, 19 nt, Human herpesvirus 3
cuccaagcucguuuuauga

SEQ ID NO: 1867349 - RNA, 21 nt, Human herpesvirus 3
cuauuucaugcuuguaaaaca

SEQ ID NO: 1867350 - RNA, 14 nt, Human herpesvirus 3
ggauccucgagcag

SEQ ID NO: 1867351 - RNA, 21 nt, Human herpesvirus 3
gaauaauuuuaaggcaaggaa

SEQ ID NO: 1867352 - RNA, 22 nt, Human herpesvirus 3
cugauacauaaacacagagucu

SEQ ID NO: 1867353 - RNA, 20 nt, Human herpesvirus 3
uaugaucauuaaacgugcau

SEQ ID NO: 1867354 - RNA, 16 nt, Human herpesvirus 3
acucuacgcauuuacg

SEQ ID NO: 1867355 - RNA, 11 nt, Human herpesvirus 3
ugugacaaauu

SEQ ID NO: 1867356 - RNA, 19 nt, Human herpesvirus 3
aauaugcuauauaacgccu

SEQ ID NO: 1867357 - RNA, 12 nt, Human herpesvirus 3
aaggaaaugccu

SEQ ID NO: 1867358 - RNA, 13 nt, Human herpesvirus 3
cauaacaccgcua

SEQ ID NO: 1867359 - RNA, 18 nt, Human herpesvirus 3
auuuucgguggaagcaau

SEQ ID NO: 1867360 - RNA, 23 nt, Human herpesvirus 3
aagaggccccaagguauuguccc

SEQ ID NO: 1867361 - RNA, 23 nt, Human herpesvirus 3
uucaugguaucaucuauugacga

SEQ ID NO: 1867362 - RNA, 19 nt, Human herpesvirus 3
cauuuucgguggaagcaau

SEQ ID NO: 1867363 - RNA, 14 nt, Human herpesvirus 3
cuuucaauauucca

SEQ ID NO: 1867364 - RNA, 18 nt, Human herpesvirus 3
uuuaugaaaaaagugucu

SEQ ID NO: 1867365 - RNA, 13 nt, Human herpesvirus 3
guaacugucccaa

SEQ ID NO: 1867366 - RNA, 14 nt, Human herpesvirus 3
aagccucuguacaa

SEQ ID NO: 1867367 - RNA, 15 nt, Human herpesvirus 3
uuaaugcaaccauca

SEQ ID NO: 1867368 - RNA, 23 nt, Human herpesvirus 3
guuacauaaauacuaagccucug

SEQ ID NO: 1867369 - RNA, 20 nt, Human herpesvirus 3
aagucgcaacgcugcugaca

SEQ ID NO: 1867370 - RNA, 17 nt, Human herpesvirus 3
guuuuacgucugcccac

SEQ ID NO: 1867371 - RNA, 20 nt, Human herpesvirus 3
auagaaucggagacucgugg

SEQ ID NO: 1867372 - RNA, 20 nt, Human herpesvirus 3
agacgaucucccguuuuuau

SEQ ID NO: 1867373 - RNA, 23 nt, Human herpesvirus 3
ggccgugugguaugaaucucugc

SEQ ID NO: 1867374 - RNA, 22 nt, Human herpesvirus 3
acguaauuugccccaaaccacu

SEQ ID NO: 1867375 - RNA, 17 nt, Human herpesvirus 3
gcgcccaccucggccgc

SEQ ID NO: 1867376 - RNA, 19 nt, Human herpesvirus 3
cauuucgaauaauuuuaag

SEQ ID NO: 1867377 - RNA, 20 nt, Human herpesvirus 3
agaccauguuuuuggagcaa

SEQ ID NO: 1867378 - RNA, 18 nt, Human herpesvirus 3
ccuugguuugcaaccuua

SEQ ID NO: 1867379 - RNA, 16 nt, Human herpesvirus 3
uggguuuuuagaauuu

SEQ ID NO: 1867380 - RNA, 16 nt, Human herpesvirus 3
cguuacgggggugugg

SEQ ID NO: 1867381 - RNA, 14 nt, Human herpesvirus 3
uggauaggucaucu

SEQ ID NO: 1867382 - RNA, 12 nt, Human herpesvirus 3
ccguucugugag

SEQ ID NO: 1867383 - RNA, 15 nt, Human herpesvirus 3
uguuggcucggucug

SEQ ID NO: 1867384 - RNA, 16 nt, Human herpesvirus 3
gaaagagcuguccaug

SEQ ID NO: 1867385 - RNA, 15 nt, Human herpesvirus 3
guguuacuuggaaac

SEQ ID NO: 1867386 - RNA, 19 nt, Human herpesvirus 3
aagucucaaugaaacagua

SEQ ID NO: 1867387 - RNA, 19 nt, Human herpesvirus 3
acgcgucaaaaagccugug

SEQ ID NO: 1867388 - RNA, 16 nt, Human herpesvirus 3
gacagucguguuuuua

SEQ ID NO: 1867389 - RNA, 17 nt, Human herpesvirus 3
cguguuuuuaauagaga

SEQ ID NO: 1867390 - RNA, 16 nt, Human herpesvirus 3
cgugagcgccacuggc

SEQ ID NO: 1867391 - RNA, 16 nt, Human herpesvirus 3
gacaaaccccacgcaa

SEQ ID NO: 1867392 - RNA, 12 nt, Human herpesvirus 3
gcucucaugaac

SEQ ID NO: 1867393 - RNA, 22 nt, Human herpesvirus 3
aaccuuuuauuuuaaggauggg

SEQ ID NO: 1867394 - RNA, 19 nt, Human herpesvirus 3
uuaugaaaaaagugucugu

SEQ ID NO: 1867395 - RNA, 22 nt, Human herpesvirus 3
aagcgauuuuaucauugaagau

SEQ ID NO: 1867396 - RNA, 14 nt, Human herpesvirus 3
ucagcgccaauaaa

SEQ ID NO: 1867397 - RNA, 19 nt, Human herpesvirus 3
cacacauuuuacaguaaac

SEQ ID NO: 1867398 - RNA, 21 nt, Human herpesvirus 3
auuaccaacuguauguaaauu

SEQ ID NO: 1867399 - RNA, 22 nt, Human herpesvirus 3
cauggugcgauuuaaccaccaa

SEQ ID NO: 1867400 - RNA, 22 nt, Human herpesvirus 3
uagauguguugcgaauguaaua

SEQ ID NO: 1867401 - RNA, 17 nt, Human herpesvirus 3
uaagcaacuacuuacaa

SEQ ID NO: 1867402 - RNA, 18 nt, Human herpesvirus 3
uauuaucgggcgacaauc

SEQ ID NO: 1867403 - RNA, 16 nt, Human herpesvirus 3
gaccguaauaugucuc

SEQ ID NO: 1867404 - RNA, 19 nt, Human herpesvirus 3
gguugcguuucccagagac

SEQ ID NO: 1867405 - RNA, 17 nt, Human herpesvirus 3
caccaauuauaacugcu

SEQ ID NO: 1867406 - RNA, 20 nt, Human herpesvirus 3
gauucaaguaaauaugugca

SEQ ID NO: 1867407 - RNA, 22 nt, Human herpesvirus 3
uugauuuuuuuaaacaaauacg

SEQ ID NO: 1867408 - RNA, 19 nt, Human herpesvirus 3
gccgcucgcugagcuccag

SEQ ID NO: 1867409 - RNA, 14 nt, Human herpesvirus 3
ccguggaccccugu

SEQ ID NO: 1867410 - RNA, 22 nt, Human herpesvirus 3
uacgacuuuuaaacgccagugg

SEQ ID NO: 1867411 - RNA, 21 nt, Human herpesvirus 3
ggacuguuuaacggaagauga

SEQ ID NO: 1867412 - RNA, 17 nt, Human herpesvirus 3
guuuccgaauaaaugug

SEQ ID NO: 1867413 - RNA, 16 nt, Human herpesvirus 3
gaugauucagacgacu

SEQ ID NO: 1867414 - RNA, 14 nt, Human herpesvirus 3
ggacauaugucugc

SEQ ID NO: 1867415 - RNA, 16 nt, Human herpesvirus 3
guaggagguccaugug

SEQ ID NO: 1867416 - RNA, 18 nt, Human herpesvirus 3
cucgugagcgccacuggc

SEQ ID NO: 1867417 - RNA, 16 nt, Human herpesvirus 3
aggaucccgugucccc

SEQ ID NO: 1867418 - RNA, 22 nt, Human herpesvirus 3
cgaacgugauuugcccacaccu

SEQ ID NO: 1867419 - RNA, 21 nt, Human herpesvirus 3
cgccgucgcgcccaccucggc

SEQ ID NO: 1867420 - RNA, 16 nt, Human herpesvirus 3
ugagguuuagcaacga

SEQ ID NO: 1867421 - RNA, 14 nt, Human herpesvirus 3
ccuugguuugcaac

SEQ ID NO: 1867422 - RNA, 17 nt, Human herpesvirus 3
cauuugcgaauucuuag

SEQ ID NO: 1867423 - RNA, 15 nt, Human herpesvirus 3
caauuauaacugcua

SEQ ID NO: 1867424 - RNA, 17 nt, Human herpesvirus 3
aaaauguuaaacccuga

SEQ ID NO: 1867425 - RNA, 19 nt, Human herpesvirus 3
ucaugcuuguaaaacauau

SEQ ID NO: 1867426 - RNA, 13 nt, Human herpesvirus 3
aucuauagcaaaa

SEQ ID NO: 1867427 - RNA, 19 nt, Human herpesvirus 3
uggagcaacguuuaagaac

SEQ ID NO: 1867428 - RNA, 22 nt, Human herpesvirus 3
ccuccuuuucucgugagcgcca

SEQ ID NO: 1867429 - RNA, 16 nt, Human herpesvirus 3
ccgcacacguuuacac

SEQ ID NO: 1867430 - RNA, 13 nt, Human herpesvirus 3
ucaugugucucca

SEQ ID NO: 1867431 - RNA, 21 nt, Human herpesvirus 3
aagauguacugugucucucaa

SEQ ID NO: 1867432 - RNA, 13 nt, Human herpesvirus 3
aaguauaacugaa

SEQ ID NO: 1867433 - RNA, 18 nt, Human herpesvirus 3
gcgaagcugccgucaaug

SEQ ID NO: 1867434 - RNA, 14 nt, Human herpesvirus 3
cugauuacauuuca

SEQ ID NO: 1867435 - RNA, 13 nt, Human herpesvirus 3
ucuuuuuguagau

SEQ ID NO: 1867436 - RNA, 19 nt, Human herpesvirus 3
uacaaucgucuuuuaaauu

SEQ ID NO: 1867437 - RNA, 21 nt, Human herpesvirus 3
cuguacgcagaaagcagucaa

SEQ ID NO: 1867438 - RNA, 20 nt, Human herpesvirus 3
caguguucuccugcaggcca

SEQ ID NO: 1867439 - RNA, 17 nt, Human herpesvirus 3
uaacgugauuacuacaa

SEQ ID NO: 1867440 - RNA, 22 nt, Human herpesvirus 3
acuagcuaccguuagaggcuua

SEQ ID NO: 1867441 - RNA, 17 nt, Human herpesvirus 3
cuccggcaucuccauca

SEQ ID NO: 1867442 - RNA, 19 nt, Human herpesvirus 3
acaaaggugccggguuuua

SEQ ID NO: 1867443 - RNA, 18 nt, Human herpesvirus 3
auuguauuguaguacagg

SEQ ID NO: 1867444 - RNA, 19 nt, Human herpesvirus 3
ucgucguuuaaagccccuc

SEQ ID NO: 1867445 - RNA, 14 nt, Human herpesvirus 3
ucuuccgugugguc

SEQ ID NO: 1867446 - RNA, 17 nt, Human herpesvirus 3
ggcgacgggcgggcugg

SEQ ID NO: 1867447 - RNA, 21 nt, Human herpesvirus 3
ucauacgccgacaugccuggc

SEQ ID NO: 1867448 - RNA, 16 nt, Human herpesvirus 3
ucuaacguugucgauc

SEQ ID NO: 1867449 - RNA, 13 nt, Human herpesvirus 3
gucgggucauuau

SEQ ID NO: 1867450 - RNA, 18 nt, Human herpesvirus 3
uucaaaauaucuuacaga

SEQ ID NO: 1867451 - RNA, 18 nt, Human herpesvirus 3
aacacggguuccguugcu

SEQ ID NO: 1867452 - RNA, 13 nt, Human herpesvirus 3
auuguauauacaa

SEQ ID NO: 1867453 - RNA, 21 nt, Human herpesvirus 3
uugaaacgucguuauauucac

SEQ ID NO: 1867454 - RNA, 18 nt, Human herpesvirus 3
auguaaaauaaacugaau

SEQ ID NO: 1867455 - RNA, 18 nt, Human herpesvirus 3
ucucgugagcgccacugg

SEQ ID NO: 1867456 - RNA, 15 nt, Human herpesvirus 3
guccggacuccagca

SEQ ID NO: 1867457 - RNA, 23 nt, Human herpesvirus 3
aacaacgcguacgugccuaggaa

SEQ ID NO: 1867458 - RNA, 13 nt, Human herpesvirus 3
auuuuauuacauu

SEQ ID NO: 1867459 - RNA, 17 nt, Human herpesvirus 3
uacaauacguaaauguc

SEQ ID NO: 1867460 - RNA, 20 nt, Human herpesvirus 3
augccuggcuuaacagugcc

SEQ ID NO: 1867461 - RNA, 19 nt, Human herpesvirus 3
ggucucuccaagcucguuu

SEQ ID NO: 1867462 - RNA, 21 nt, Human herpesvirus 3
gcgcccggcggaccccgggag

SEQ ID NO: 1867463 - RNA, 15 nt, Human herpesvirus 3
uguaaaauaaaaucu

SEQ ID NO: 1867464 - RNA, 23 nt, Human herpesvirus 3
uauuucccaacgcauaaccagcg

SEQ ID NO: 1867465 - RNA, 15 nt, Human herpesvirus 3
cuguuacauuucgaa

SEQ ID NO: 1867466 - RNA, 22 nt, Human herpesvirus 3
guccaguggacaguaacagccc

SEQ ID NO: 1867467 - RNA, 18 nt, Human herpesvirus 3
guugcuuugcguauauga

SEQ ID NO: 1867468 - RNA, 13 nt, Human herpesvirus 3
cguugaacaccau

SEQ ID NO: 1867469 - RNA, 17 nt, Human herpesvirus 3
gacgccuuucuccggga

SEQ ID NO: 1867470 - RNA, 16 nt, Human herpesvirus 3
ccggcggaccccggga

SEQ ID NO: 1867471 - RNA, 20 nt, Human herpesvirus 3
ugacaaauucccccggggcg

SEQ ID NO: 1867472 - RNA, 14 nt, Human herpesvirus 3
auuuggacacuacu

SEQ ID NO: 1867473 - RNA, 18 nt, Human herpesvirus 3
aggauaggugucuucaaa

SEQ ID NO: 1867474 - RNA, 17 nt, Human herpesvirus 3
auaaauucuacaacauu

SEQ ID NO: 1867475 - RNA, 15 nt, Human herpesvirus 3
caaaugaugaagcua

SEQ ID NO: 1867476 - RNA, 21 nt, Human herpesvirus 3
gcuuacguuugcauuuaccga

SEQ ID NO: 1867477 - RNA, 14 nt, Human herpesvirus 3
gugagcacccgggc

SEQ ID NO: 1867478 - RNA, 23 nt, Human herpesvirus 3
cuauuccgcccggauaauguccu

SEQ ID NO: 1867479 - RNA, 20 nt, Human herpesvirus 3
aacauccacagucugcuuua

SEQ ID NO: 1867480 - RNA, 13 nt, Human herpesvirus 3
guacagauuaaaa

SEQ ID NO: 1867481 - RNA, 13 nt, Human herpesvirus 3
auauauucacaac

SEQ ID NO: 1867482 - RNA, 17 nt, Human herpesvirus 3
aaaaacacaguugauuu

SEQ ID NO: 1867483 - RNA, 20 nt, Human herpesvirus 3
cgucaucgagcuucacuggu

SEQ ID NO: 1867484 - RNA, 15 nt, Human herpesvirus 3
agcaacguuuaagaa

SEQ ID NO: 1867485 - RNA, 21 nt, Human herpesvirus 3
gauuuucacaccgaugaagac

SEQ ID NO: 1867486 - RNA, 15 nt, Human herpesvirus 3
cuaacaacucuggag

SEQ ID NO: 1867487 - RNA, 18 nt, Human herpesvirus 3
uucaugcuugucaaaaca

SEQ ID NO: 1867488 - RNA, 19 nt, Human herpesvirus 3
cccgccgucgcgcccaccu

SEQ ID NO: 1867489 - RNA, 13 nt, Human herpesvirus 3
cgcuggcauuucc

SEQ ID NO: 1867490 - RNA, 22 nt, Human herpesvirus 3
ggcgcccggcggaccccgggag

SEQ ID NO: 1867491 - RNA, 23 nt, Human herpesvirus 3
cacugguggauauagcgcugucg

SEQ ID NO: 1867492 - RNA, 19 nt, Human herpesvirus 3
ggacuguuuguuguuaaua

SEQ ID NO: 1867493 - RNA, 23 nt, Human herpesvirus 3
uauuauacauaaccgauuuaccg

SEQ ID NO: 1867494 - RNA, 13 nt, Human herpesvirus 3
gcgaucgaacagg

SEQ ID NO: 1867495 - RNA, 22 nt, Human herpesvirus 3
uuauccaacuguuuacauagau

SEQ ID NO: 1867496 - RNA, 13 nt, Human herpesvirus 3
aguuaauaaaccu

SEQ ID NO: 1867497 - RNA, 16 nt, Human herpesvirus 3
cuccagcaucaucugc

SEQ ID NO: 1867498 - RNA, 21 nt, Human herpesvirus 3
ccacguaauuugccccaaacc

SEQ ID NO: 1867499 - RNA, 14 nt, Human herpesvirus 3
aaacucuguuguau

SEQ ID NO: 1867500 - RNA, 13 nt, Human herpesvirus 3
cauauuacauuaa

SEQ ID NO: 1867501 - RNA, 14 nt, Human herpesvirus 3
agaucuaacguuuu

SEQ ID NO: 1867502 - RNA, 16 nt, Human herpesvirus 3
acggcccccuggacau

SEQ ID NO: 1867503 - RNA, 19 nt, Human herpesvirus 3
aguaccacgugguauuaug

SEQ ID NO: 1867504 - RNA, 17 nt, Human herpesvirus 3
acuguuuuuuauuuaaa

SEQ ID NO: 1867505 - RNA, 16 nt, Human herpesvirus 3
cuguuuguuguuaaua

SEQ ID NO: 1867506 - RNA, 19 nt, Human herpesvirus 3
guuuuucuaaauuacagau

SEQ ID NO: 1867507 - RNA, 23 nt, Human herpesvirus 3
cgaugcguguacgcuccagaacg

SEQ ID NO: 1867508 - RNA, 21 nt, Human herpesvirus 3
auugcagucauuuuuuuuaca

SEQ ID NO: 1867509 - RNA, 22 nt, Human herpesvirus 3
auuauuaagacgaccccuguca

SEQ ID NO: 1867510 - RNA, 22 nt, Human herpesvirus 3
uuucucgugagcgccacuggcg

SEQ ID NO: 1867511 - RNA, 21 nt, Human herpesvirus 3
uacauauguuccacucuacau

SEQ ID NO: 1867512 - RNA, 13 nt, Human herpesvirus 3
aggggagcgugga

SEQ ID NO: 1867513 - RNA, 23 nt, Human herpesvirus 3
ucucuuauauauguaacguuugu

SEQ ID NO: 1867514 - RNA, 20 nt, Human herpesvirus 3
agcugccgucaaugcaacua

SEQ ID NO: 1867515 - RNA, 20 nt, Human herpesvirus 3
ccuccucgaccgcuggauga

SEQ ID NO: 1867516 - RNA, 17 nt, Human herpesvirus 3
ccagcuaaaauuuggaa

SEQ ID NO: 1867517 - RNA, 15 nt, Human herpesvirus 3
caacgucccaaagcg

SEQ ID NO: 1867518 - RNA, 18 nt, Human herpesvirus 3
ggaauuguggaguuuccc

SEQ ID NO: 1867519 - RNA, 13 nt, Human herpesvirus 3
acgggccgugugg

SEQ ID NO: 1867520 - RNA, 21 nt, Human herpesvirus 3
cccaugucacaaaucaugcgg

SEQ ID NO: 1867521 - RNA, 18 nt, Human herpesvirus 3
acuguuuguuguuaauaa

SEQ ID NO: 1867522 - RNA, 12 nt, Human herpesvirus 3
cguuuaaagccc

SEQ ID NO: 1867523 - RNA, 17 nt, Human herpesvirus 3
cgguaugccacauuuac

SEQ ID NO: 1867524 - RNA, 17 nt, Human herpesvirus 3
cucgugagcgccacugg

SEQ ID NO: 1867525 - RNA, 16 nt, Human herpesvirus 3
ccaagguuuuggauuc

SEQ ID NO: 1867526 - RNA, 18 nt, Human herpesvirus 3
ccgcgcguuugcggggcg

SEQ ID NO: 1867527 - RNA, 12 nt, Human herpesvirus 3
ggcauugcuuca

SEQ ID NO: 1867528 - RNA, 21 nt, Human herpesvirus 3
gaauguaauucgugugcaaua

SEQ ID NO: 1867529 - RNA, 23 nt, Human herpesvirus 3
ccacguaauuugccccaaaccac

SEQ ID NO: 1867530 - RNA, 14 nt, Human herpesvirus 3
gguauacacaccca

SEQ ID NO: 1867531 - RNA, 20 nt, Human herpesvirus 3
uuuacggcagucugaccauu

SEQ ID NO: 1867532 - RNA, 20 nt, Human herpesvirus 3
acgccagccagcaauguuuu

SEQ ID NO: 1867533 - RNA, 13 nt, Human herpesvirus 3
agagaccgugcgc

SEQ ID NO: 1867534 - RNA, 17 nt, Human herpesvirus 3
gucgaaccgaucgggcg

SEQ ID NO: 1867535 - RNA, 21 nt, Human herpesvirus 3
gauauaacccggucugcucau

SEQ ID NO: 1867536 - RNA, 15 nt, Human herpesvirus 3
aaaguuugaacauga

SEQ ID NO: 1867537 - RNA, 14 nt, Human herpesvirus 3
cuggucggaccccc

SEQ ID NO: 1867538 - RNA, 22 nt, Human herpesvirus 3
uauaauaaaaagucacuauaaa

SEQ ID NO: 1867539 - RNA, 19 nt, Human herpesvirus 3
gaagcugacgaagagaacu

SEQ ID NO: 1867540 - RNA, 15 nt, Human herpesvirus 3
ugugcgggcgggcga

SEQ ID NO: 1867541 - RNA, 16 nt, Human herpesvirus 3
agcuguccaugaugaa

SEQ ID NO: 1867542 - RNA, 13 nt, Human herpesvirus 3
aucugguaaaugu

SEQ ID NO: 1867543 - RNA, 21 nt, Human herpesvirus 3
gaagcugacgaagagaacugu

SEQ ID NO: 1867544 - RNA, 21 nt, Human herpesvirus 3
ccugcaagcgguuuagcauuu

SEQ ID NO: 1867545 - RNA, 18 nt, Human herpesvirus 3
acuugacgcgaacaccgc

SEQ ID NO: 1867546 - RNA, 16 nt, Human herpesvirus 3
aaacagguagccagcc

SEQ ID NO: 1867547 - RNA, 16 nt, Human herpesvirus 3
uacagaagacaucacc

SEQ ID NO: 1867548 - RNA, 11 nt, Human herpesvirus 3
uauccaauggg

SEQ ID NO: 1867549 - RNA, 18 nt, Human herpesvirus 3
caacguauucgguuggug

SEQ ID NO: 1867550 - RNA, 17 nt, Human herpesvirus 3
aucccgccgacagcgga

SEQ ID NO: 1867551 - RNA, 17 nt, Human herpesvirus 3
uaaacagagaucucugu

SEQ ID NO: 1867552 - RNA, 14 nt, Human herpesvirus 3
aaaacguuguguuu

SEQ ID NO: 1867553 - RNA, 12 nt, Human herpesvirus 3
gcucacagagcu

SEQ ID NO: 1867554 - RNA, 13 nt, Human herpesvirus 3
aggacgaagggga

SEQ ID NO: 1867555 - RNA, 19 nt, Human herpesvirus 3
uaugcgcauggaauuaaug

SEQ ID NO: 1867556 - RNA, 12 nt, Human herpesvirus 3
ccguuaaggcaa

SEQ ID NO: 1867557 - RNA, 13 nt, Human herpesvirus 3
uaagguguuaaua

SEQ ID NO: 1867558 - RNA, 12 nt, Human herpesvirus 3
cgcgccaaacau

SEQ ID NO: 1867559 - RNA, 11 nt, Human herpesvirus 3
cuuuuuaugca

SEQ ID NO: 1867560 - RNA, 22 nt, Human herpesvirus 3
caaacacacagacgcguaaaau

SEQ ID NO: 1867561 - RNA, 21 nt, Human herpesvirus 3
gccgucgcgcccaccucggcc

SEQ ID NO: 1867562 - RNA, 20 nt, Human herpesvirus 3
cuaacaaugcacugaaccac

SEQ ID NO: 1867563 - RNA, 19 nt, Human herpesvirus 3
ggguaaaacacacaccaga

SEQ ID NO: 1867564 - RNA, 22 nt, Human herpesvirus 3
uguaagacccgucgguaaauga

SEQ ID NO: 1867565 - RNA, 18 nt, Human herpesvirus 3
cacuaaaaucacuuugau

SEQ ID NO: 1867566 - RNA, 16 nt, Human herpesvirus 3
uauuauaaauguguau

SEQ ID NO: 1867567 - RNA, 18 nt, Human herpesvirus 3
uaucuguuacauuucgaa

SEQ ID NO: 1867568 - RNA, 17 nt, Human herpesvirus 3
uuccacccccucuuaaa

SEQ ID NO: 1867569 - RNA, 21 nt, Human herpesvirus 3
ugaaucguugcggguacaaua

SEQ ID NO: 1867570 - RNA, 23 nt, Human herpesvirus 3
uuuauuacauucgcaacacaucu

SEQ ID NO: 1867571 - RNA, 17 nt, Human herpesvirus 3
gcgcguguaugcacaac

SEQ ID NO: 1867572 - RNA, 16 nt, Human herpesvirus 3
aucccacauguauaaa

SEQ ID NO: 1867573 - RNA, 17 nt, Human herpesvirus 3
uguugagucauuuucau

SEQ ID NO: 1867574 - RNA, 18 nt, Human herpesvirus 3
cuacugcugcaagcccuc

SEQ ID NO: 1867575 - RNA, 14 nt, Human herpesvirus 3
cgaaaagacugugu

SEQ ID NO: 1867576 - RNA, 20 nt, Human herpesvirus 3
cuguaucgcuaucagauucc

SEQ ID NO: 1867577 - RNA, 20 nt, Human herpesvirus 3
aaaacacgggaucauuuucu

SEQ ID NO: 1867578 - RNA, 19 nt, Human herpesvirus 3
auaucucauacucaugccu

SEQ ID NO: 1867579 - RNA, 18 nt, Human herpesvirus 3
agucuaguuacauuucac

SEQ ID NO: 1867580 - RNA, 14 nt, Human herpesvirus 3
cacgcgggugagug

SEQ ID NO: 1867581 - RNA, 18 nt, Human herpesvirus 3
agaguguuuaacaaccau

SEQ ID NO: 1867582 - RNA, 19 nt, Human herpesvirus 3
acgacucguuggguuacau

SEQ ID NO: 1867583 - RNA, 15 nt, Human herpesvirus 3
aagguccauuuaaca

SEQ ID NO: 1867584 - RNA, 14 nt, Human herpesvirus 3
cgcccaccucggcc

SEQ ID NO: 1867585 - RNA, 15 nt, Human herpesvirus 3
agaugagaaaaauaa

SEQ ID NO: 1867586 - RNA, 18 nt, Human herpesvirus 3
gacaucguuuguuucuuu

SEQ ID NO: 1867587 - RNA, 22 nt, Human herpesvirus 3
uuaugaaaaaagugucugucug

SEQ ID NO: 1867588 - RNA, 20 nt, Human herpesvirus 3
acguauuuuuauuuaaaugu

SEQ ID NO: 1867589 - RNA, 16 nt, Human herpesvirus 3
uuucucuaacgcaauu

SEQ ID NO: 1867590 - RNA, 15 nt, Human herpesvirus 3
cugcuuuauuaccaa

SEQ ID NO: 1867591 - RNA, 19 nt, Human herpesvirus 3
cccuggagacggcugcugc

SEQ ID NO: 1867592 - RNA, 14 nt, Human herpesvirus 3
uaucaauuguuuau

SEQ ID NO: 1867593 - RNA, 15 nt, Human herpesvirus 3
uggugaagaaggaca

SEQ ID NO: 1867594 - RNA, 13 nt, Human herpesvirus 3
aauaaaaaacagu

SEQ ID NO: 1867595 - RNA, 14 nt, Human herpesvirus 3
aagguguaaauacu

SEQ ID NO: 1867596 - RNA, 14 nt, Human herpesvirus 3
uugcgucuguuuug

SEQ ID NO: 1867597 - RNA, 13 nt, Human herpesvirus 3
agucauuuucaua

SEQ ID NO: 1867598 - RNA, 14 nt, Human herpesvirus 3
acgccgagcgugua

SEQ ID NO: 1867599 - RNA, 14 nt, Human herpesvirus 3
acgggcgggcuggu

SEQ ID NO: 1867600 - RNA, 16 nt, Human herpesvirus 3
cgcuacccgaaagccc

SEQ ID NO: 1867601 - RNA, 18 nt, Human herpesvirus 3
cguagauuccgaguccuc

SEQ ID NO: 1867602 - RNA, 15 nt, Human herpesvirus 3
gguggucagacgaac

SEQ ID NO: 1867603 - RNA, 19 nt, Human herpesvirus 3
cuugacgcgaacaccgcug

SEQ ID NO: 1867604 - RNA, 15 nt, Human herpesvirus 3
cgccgucgcgcccac

SEQ ID NO: 1867605 - RNA, 13 nt, Human herpesvirus 3
ugggucagacagu

SEQ ID NO: 1867606 - RNA, 12 nt, Human herpesvirus 3
ugguaagguuuu

SEQ ID NO: 1867607 - RNA, 19 nt, Human herpesvirus 3
caacgccgagcguguaaau

SEQ ID NO: 1867608 - RNA, 20 nt, Human herpesvirus 3
gccggacuuuacugcacacg

SEQ ID NO: 1867609 - RNA, 23 nt, Human herpesvirus 3
acacuuggcguguuaaacacugu

SEQ ID NO: 1867610 - RNA, 16 nt, Human herpesvirus 3
cuuacguuugcauuua

SEQ ID NO: 1867611 - RNA, 16 nt, Human herpesvirus 3
uguuuaagaacaucuu

SEQ ID NO: 1867612 - RNA, 16 nt, Human herpesvirus 3
cggugagcacccgggc

SEQ ID NO: 1867613 - RNA, 18 nt, Human herpesvirus 3
cucuggagucuccaaaug

SEQ ID NO: 1867614 - RNA, 12 nt, Human herpesvirus 3
cgcgcaccaggc

SEQ ID NO: 1867615 - RNA, 21 nt, Human herpesvirus 3
ugggguucggaauuaucacgg

SEQ ID NO: 1867616 - RNA, 14 nt, Human herpesvirus 3
aacaguuauguuuu

SEQ ID NO: 1867617 - RNA, 13 nt, Human herpesvirus 3
cacuacugacagc

SEQ ID NO: 1867618 - RNA, 18 nt, Human herpesvirus 3
uccgccuauagcugucac

SEQ ID NO: 1867619 - RNA, 16 nt, Human herpesvirus 3
caguaagggugagaau

SEQ ID NO: 1867620 - RNA, 21 nt, Human herpesvirus 3
acacucgauuucaacggcuuc

SEQ ID NO: 1867621 - RNA, 21 nt, Human herpesvirus 3
acuacauuggggguacaguug

SEQ ID NO: 1867622 - RNA, 12 nt, Human herpesvirus 3
guuaauaaaagc

SEQ ID NO: 1867623 - RNA, 22 nt, Human herpesvirus 3
gacguccacacagccucaggag

SEQ ID NO: 1867624 - RNA, 22 nt, Human herpesvirus 3
cacauuugggcggggauguuuu

SEQ ID NO: 1867625 - RNA, 22 nt, Human herpesvirus 3
uauaaaccgauuaugucaacau

SEQ ID NO: 1867626 - RNA, 18 nt, Human herpesvirus 3
cuugagaugagcagcgca

SEQ ID NO: 1867627 - RNA, 14 nt, Human herpesvirus 3
cagacgugucuacu

SEQ ID NO: 1867628 - RNA, 21 nt, Human herpesvirus 3
agaaacguuuuuaguuuuuau

SEQ ID NO: 1867629 - RNA, 15 nt, Human herpesvirus 3
cccugucaucagaca

SEQ ID NO: 1867630 - RNA, 23 nt, Human herpesvirus 3
caaaggcauuacccgauauugua

SEQ ID NO: 1867631 - RNA, 18 nt, Human herpesvirus 3
uugagaaaaccaaagacg

SEQ ID NO: 1867632 - RNA, 13 nt, Human herpesvirus 3
aauccaauguuug

SEQ ID NO: 1867633 - RNA, 18 nt, Human herpesvirus 3
uuuaacggaagaugaacu

SEQ ID NO: 1867634 - RNA, 23 nt, Human herpesvirus 3
aguuuagugucguuuccaaauaa

SEQ ID NO: 1867635 - RNA, 13 nt, Human herpesvirus 3
ugcagguuuuacu

SEQ ID NO: 1867636 - RNA, 16 nt, Human herpesvirus 3
uauguuuuuauuuugu

SEQ ID NO: 1867637 - RNA, 18 nt, Human herpesvirus 3
uauaacugcuacaacgga

SEQ ID NO: 1867638 - RNA, 22 nt, Human herpesvirus 3
cugcugaagcugacgaagagaa

SEQ ID NO: 1867639 - RNA, 22 nt, Human herpesvirus 3
augugauacaaugagcgguggu

SEQ ID NO: 1867640 - RNA, 20 nt, Human herpesvirus 3
ccacguuuuacgucugccca

SEQ ID NO: 1867641 - RNA, 15 nt, Human herpesvirus 3
ggcgaggacuccaca

SEQ ID NO: 1867642 - RNA, 14 nt, Human herpesvirus 3
uucuacaccuuugc

SEQ ID NO: 1867643 - RNA, 16 nt, Human herpesvirus 3
ccccuccuuuucucgu

SEQ ID NO: 1867644 - RNA, 19 nt, Human herpesvirus 3
aaagccgguacacagcauu

SEQ ID NO: 1867645 - RNA, 14 nt, Human herpesvirus 3
cagcgccaauaaaa

SEQ ID NO: 1867646 - RNA, 12 nt, Human herpesvirus 3
ccugaugauggu

SEQ ID NO: 1867647 - RNA, 18 nt, Human herpesvirus 3
cgacaucguuuguuucuu

SEQ ID NO: 1867648 - RNA, 21 nt, Human herpesvirus 3
acgacauacauuagaguguuu

SEQ ID NO: 1867649 - RNA, 24 nt, Human herpesvirus 3
gcgcucaaucaauccaaggaugug

SEQ ID NO: 1867650 - RNA, 15 nt, Human herpesvirus 3
auaucauaaauauua

SEQ ID NO: 1867651 - RNA, 22 nt, Human herpesvirus 3
gauuauauacguagaauuuaca

SEQ ID NO: 1867652 - RNA, 14 nt, Human herpesvirus 3
ggaugauauuuuaa

SEQ ID NO: 1867653 - RNA, 21 nt, Human herpesvirus 3
guuacuacauggaguguguua

SEQ ID NO: 1867654 - RNA, 17 nt, Human herpesvirus 3
ccuggcuuaacagugcc

SEQ ID NO: 1867655 - RNA, 13 nt, Human herpesvirus 3
ggcgcccggcgga

SEQ ID NO: 1867656 - RNA, 22 nt, Human herpesvirus 3
uuaaucccgccuuuaucucccu

SEQ ID NO: 1867657 - RNA, 21 nt, Human herpesvirus 3
gggguacuugcaccacaccau

SEQ ID NO: 1867658 - RNA, 19 nt, Human herpesvirus 3
aaguaugcagucgggucau

SEQ ID NO: 1867659 - RNA, 13 nt, Human herpesvirus 3
gacccccccccga

SEQ ID NO: 1867660 - RNA, 19 nt, Human herpesvirus 3
ccguuuccacccccucuua

SEQ ID NO: 1867661 - RNA, 17 nt, Human herpesvirus 3
caacuggaaaugugcug

SEQ ID NO: 1867662 - RNA, 22 nt, Human herpesvirus 3
uccccuccuuuucucgugagcg

SEQ ID NO: 1867663 - RNA, 17 nt, Human herpesvirus 3
uaaaacaaguggaugau

SEQ ID NO: 1867664 - RNA, 19 nt, Human herpesvirus 3
cugauucggguaaaacaca

SEQ ID NO: 1867665 - RNA, 14 nt, Human herpesvirus 3
aacacugucagaaa

SEQ ID NO: 1867666 - RNA, 23 nt, Human herpesvirus 3
ccgcuagacuguuuuucugcuca

SEQ ID NO: 1867667 - RNA, 21 nt, Human herpesvirus 3
gccgguacaauuaccccgcga

SEQ ID NO: 1867668 - RNA, 19 nt, Human herpesvirus 3
caugaucgcccaauagcac

SEQ ID NO: 1867669 - RNA, 15 nt, Human herpesvirus 3
uacaccgcuacgggu

SEQ ID NO: 1867670 - RNA, 15 nt, Human herpesvirus 3
ccauccgccgcagcu

SEQ ID NO: 1867671 - RNA, 19 nt, Human herpesvirus 3
cuccucgaccgcuggauga

SEQ ID NO: 1867672 - RNA, 21 nt, Human herpesvirus 3
gacugcguuauuuaaaggucu

SEQ ID NO: 1867673 - RNA, 11 nt, Human herpesvirus 3
cggucauauaa

SEQ ID NO: 1867674 - RNA, 18 nt, Human herpesvirus 3
aucguaguaaaacggaac

SEQ ID NO: 1867675 - RNA, 11 nt, Human herpesvirus 3
ccguugccgca

SEQ ID NO: 1867676 - RNA, 16 nt, Human herpesvirus 3
uaaauaacauaaccaa

SEQ ID NO: 1867677 - RNA, 18 nt, Human herpesvirus 3
aaacuguuuaaauaguac

SEQ ID NO: 1867678 - RNA, 21 nt, Human herpesvirus 3
cugccuuuggggguuaagcua

SEQ ID NO: 1867679 - RNA, 22 nt, Human herpesvirus 3
agccgccagauguacacccagc

SEQ ID NO: 1867680 - RNA, 22 nt, Human herpesvirus 3
uggaaacacccauacauauguu

SEQ ID NO: 1867681 - RNA, 13 nt, Human herpesvirus 3
ggcgauggccguc

SEQ ID NO: 1867682 - RNA, 14 nt, Human herpesvirus 3
cccaauagccgcca

SEQ ID NO: 1867683 - RNA, 15 nt, Human herpesvirus 3
uguauuaaaucgacu

SEQ ID NO: 1867684 - RNA, 23 nt, Human herpesvirus 3
cuguaagacccgucgguaaauga

SEQ ID NO: 1867685 - RNA, 21 nt, Human herpesvirus 3
guauugcguaccgcgacccug

SEQ ID NO: 1867686 - RNA, 18 nt, Human herpesvirus 3
aaauacgguucaaaggca

SEQ ID NO: 1867687 - RNA, 22 nt, Human herpesvirus 3
cccagcuguccggacuccagca

SEQ ID NO: 1867688 - RNA, 14 nt, Human herpesvirus 3
aaauaaacugaauu

SEQ ID NO: 1867689 - RNA, 22 nt, Human herpesvirus 3
cuggcgugguuauuacauuuaa

SEQ ID NO: 1867690 - RNA, 22 nt, Human herpesvirus 3
acucacguuuguguugugacuu

SEQ ID NO: 1867691 - RNA, 22 nt, Human herpesvirus 3
gaaaauaacccccccccgguuu

SEQ ID NO: 1867692 - RNA, 14 nt, Human herpesvirus 3
cguguauacaauua

SEQ ID NO: 1867693 - RNA, 15 nt, Human herpesvirus 3
uuaccuuauguguua

SEQ ID NO: 1867694 - RNA, 22 nt, Human herpesvirus 3
uagacguucaaaauaucuuaca

SEQ ID NO: 1867695 - RNA, 15 nt, Human herpesvirus 3
uggauucccuggaga

SEQ ID NO: 1867696 - RNA, 15 nt, Human herpesvirus 3
auuugcauuuucagu

SEQ ID NO: 1867697 - RNA, 15 nt, Human herpesvirus 3
caauuguuuauguga

SEQ ID NO: 1867698 - RNA, 22 nt, Human herpesvirus 3
aaaacacugucagaaacacuug

SEQ ID NO: 1867699 - RNA, 15 nt, Human herpesvirus 3
cuaaaaacguuucug

SEQ ID NO: 1867700 - RNA, 22 nt, Human herpesvirus 3
ucggacccccccccgaaaauaa

SEQ ID NO: 1867701 - RNA, 14 nt, Human herpesvirus 3
cucgugagcgccac

SEQ ID NO: 1867702 - RNA, 14 nt, Human herpesvirus 3
auacuaauuuguau

SEQ ID NO: 1867703 - RNA, 18 nt, Human herpesvirus 3
ugucuacgugguaccaaa

SEQ ID NO: 1867704 - RNA, 23 nt, Human herpesvirus 3
cacugcauuuacaucuuguccaa

SEQ ID NO: 1867705 - RNA, 22 nt, Human herpesvirus 3
caaccaauugguauacacaccc

SEQ ID NO: 1867706 - RNA, 19 nt, Human herpesvirus 3
aauaccuuuuucaugcuug

SEQ ID NO: 1867707 - RNA, 11 nt, Human herpesvirus 3
cagauauuguc

SEQ ID NO: 1867708 - RNA, 18 nt, Human herpesvirus 3
cgugguaccaaaaacaca

SEQ ID NO: 1867709 - RNA, 15 nt, Human herpesvirus 3
uauuaccaacuguau

SEQ ID NO: 1867710 - RNA, 17 nt, Human herpesvirus 3
caacugauuacauuuca

SEQ ID NO: 1867711 - RNA, 23 nt, Human herpesvirus 3
uuguguuuauaacguauaacccg

SEQ ID NO: 1867712 - RNA, 16 nt, Human herpesvirus 3
gcgagcgcgugaggga

SEQ ID NO: 1867713 - RNA, 15 nt, Human herpesvirus 3
cauaguccgccgaca

SEQ ID NO: 1867714 - RNA, 12 nt, Human herpesvirus 3
ccacuuauccaa

SEQ ID NO: 1867715 - RNA, 15 nt, Human herpesvirus 3
cgugguaagugcggc

SEQ ID NO: 1867716 - RNA, 19 nt, Human herpesvirus 3
caggcuguacguaaccaua

SEQ ID NO: 1867717 - RNA, 19 nt, Human herpesvirus 3
caauaaaauggauauaauu

SEQ ID NO: 1867718 - RNA, 14 nt, Human herpesvirus 3
agcaacguuuaaga

SEQ ID NO: 1867719 - RNA, 11 nt, Human herpesvirus 3
uuucugggcgc

SEQ ID NO: 1867720 - RNA, 12 nt, Human herpesvirus 3
aaccgagggugg

SEQ ID NO: 1867721 - RNA, 14 nt, Human herpesvirus 3
gagacguauguucu

SEQ ID NO: 1867722 - RNA, 17 nt, Human herpesvirus 3
aagcuauuaaugguaca

SEQ ID NO: 1867723 - RNA, 14 nt, Human herpesvirus 3
aagauguuuccaca

SEQ ID NO: 1867724 - RNA, 13 nt, Human herpesvirus 3
uccagaguacagg

SEQ ID NO: 1867725 - RNA, 17 nt, Human herpesvirus 3
ucuuucccgaagguuuu

SEQ ID NO: 1867726 - RNA, 21 nt, Human herpesvirus 3
aaagguuuauuccggagccua

SEQ ID NO: 1867727 - RNA, 22 nt, Human herpesvirus 3
cacuuuaauuccucuaaacgug

SEQ ID NO: 1867728 - RNA, 16 nt, Human herpesvirus 3
ccaaacacgccuuuua

SEQ ID NO: 1867729 - RNA, 19 nt, Human herpesvirus 3
cucgaacccccgugacucc

SEQ ID NO: 1867730 - RNA, 17 nt, Human herpesvirus 3
auauuaauaaaagacua

SEQ ID NO: 1867731 - RNA, 16 nt, Human herpesvirus 3
uucuacgagaauauuc

SEQ ID NO: 1867732 - RNA, 19 nt, Human herpesvirus 3
gaaaauagcguugaugcaa

SEQ ID NO: 1867733 - RNA, 21 nt, Human herpesvirus 3
cugcuaaccauagacuguucu

SEQ ID NO: 1867734 - RNA, 14 nt, Human herpesvirus 3
auaacgcuguuguu

SEQ ID NO: 1867735 - RNA, 11 nt, Human herpesvirus 3
aaacacgcaug

SEQ ID NO: 1867736 - RNA, 12 nt, Human herpesvirus 3
cacgugaggaaa

SEQ ID NO: 1867737 - RNA, 19 nt, Human herpesvirus 3
aaguguucuaaaacacugu

SEQ ID NO: 1867738 - RNA, 22 nt, Human herpesvirus 3
uccgggaucguggccuugggac

SEQ ID NO: 1867739 - RNA, 14 nt, Human herpesvirus 3
auacguaaauguca

SEQ ID NO: 1867740 - RNA, 22 nt, Human herpesvirus 3
uaugguauaccgcucguguaaa

SEQ ID NO: 1867741 - RNA, 20 nt, Human herpesvirus 3
ugaguugcggcgcugaaggg

SEQ ID NO: 1867742 - RNA, 21 nt, Human herpesvirus 3
ucaugcuugucaaaacauacu

SEQ ID NO: 1867743 - RNA, 15 nt, Human herpesvirus 3
uaaagguuaaauuua

SEQ ID NO: 1867744 - RNA, 15 nt, Human herpesvirus 3
gauauaauuugucca

SEQ ID NO: 1867745 - RNA, 23 nt, Human herpesvirus 3
ggccaagguuuuggauucccugg

SEQ ID NO: 1867746 - RNA, 16 nt, Human herpesvirus 3
cuuuaucugaaaagac

SEQ ID NO: 1867747 - RNA, 22 nt, Human herpesvirus 3
auuauuagcguaauauaacaga

SEQ ID NO: 1867748 - RNA, 14 nt, Human herpesvirus 3
auuuaggaggcugc

SEQ ID NO: 1867749 - RNA, 18 nt, Human herpesvirus 3
uccauaucgcaauguuuu

SEQ ID NO: 1867750 - RNA, 17 nt, Human herpesvirus 3
gucugucugucugugcg

SEQ ID NO: 1867751 - RNA, 15 nt, Human herpesvirus 3
ugugggaggucuaca

SEQ ID NO: 1867752 - RNA, 16 nt, Human herpesvirus 3
uuuagacguucaaaau

SEQ ID NO: 1867753 - RNA, 20 nt, Human herpesvirus 3
ggacuaggcacuuuggcggu

SEQ ID NO: 1867754 - RNA, 12 nt, Human herpesvirus 3
ucauaacaccgc

SEQ ID NO: 1867755 - RNA, 15 nt, Human herpesvirus 3
uaaggggggggcgcg

SEQ ID NO: 1867756 - RNA, 21 nt, Human herpesvirus 3
gcacaucauccguccaaacag

SEQ ID NO: 1867757 - RNA, 19 nt, Human herpesvirus 3
aauaaaacguuuuaaaagc

SEQ ID NO: 1867758 - RNA, 12 nt, Human herpesvirus 3
ugaaaaaagugu

SEQ ID NO: 1867759 - RNA, 18 nt, Human herpesvirus 3
uacacauuuaaauaaaaa

SEQ ID NO: 1867760 - RNA, 21 nt, Human herpesvirus 3
uuucagcaaguuuaacauuuc

SEQ ID NO: 1867761 - RNA, 17 nt, Human herpesvirus 3
ugacuuugaugagaaug

SEQ ID NO: 1867762 - RNA, 20 nt, Human herpesvirus 3
ccacacaacgccgcccacga

SEQ ID NO: 1867763 - RNA, 12 nt, Human herpesvirus 3
guuucugggcgc

SEQ ID NO: 1867764 - RNA, 17 nt, Human herpesvirus 3
ugaucugguaaauguua

SEQ ID NO: 1867765 - RNA, 18 nt, Human herpesvirus 3
cccacgguuugugcacug

SEQ ID NO: 1867766 - RNA, 23 nt, Human herpesvirus 3
cagacaguggcggauaacugccu

SEQ ID NO: 1867767 - RNA, 19 nt, Human herpesvirus 3
gacaucaaccaguggaaua

SEQ ID NO: 1867768 - RNA, 19 nt, Human herpesvirus 3
gaacauccuaguacagaua

SEQ ID NO: 1867769 - RNA, 16 nt, Human herpesvirus 3
acgccgcaacaaccca

SEQ ID NO: 1867770 - RNA, 13 nt, Human herpesvirus 3
guuucccagagac

SEQ ID NO: 1867771 - RNA, 16 nt, Human herpesvirus 3
auaaaccaacuccugu

SEQ ID NO: 1867772 - RNA, 17 nt, Human herpesvirus 3
gcccggcggaccccggg

SEQ ID NO: 1867773 - RNA, 17 nt, Human herpesvirus 3
aauaacgccuuaaaagu

SEQ ID NO: 1867774 - RNA, 13 nt, Human herpesvirus 3
guguuaaacacug

SEQ ID NO: 1867775 - RNA, 15 nt, Human herpesvirus 3
gaaauacuaauauaa

SEQ ID NO: 1867776 - RNA, 15 nt, Human herpesvirus 3
gugagcgccacuggc

SEQ ID NO: 1867777 - RNA, 21 nt, Human herpesvirus 3
ccagaguacaggguaucuaag

SEQ ID NO: 1867778 - RNA, 14 nt, Human herpesvirus 3
gcagauacagcaua

SEQ ID NO: 1867779 - RNA, 22 nt, Human herpesvirus 3
agacacgcuacagaagacauca

SEQ ID NO: 1867780 - RNA, 23 nt, Human herpesvirus 3
uauguggggugcuuguuguauuu

SEQ ID NO: 1867781 - RNA, 21 nt, Human herpesvirus 3
caugacuuccacacucuucaa

SEQ ID NO: 1867782 - RNA, 16 nt, Human herpesvirus 3
uaugccacauuuaccg

SEQ ID NO: 1867783 - RNA, 12 nt, Human herpesvirus 3
auuuucauagac

SEQ ID NO: 1867784 - RNA, 13 nt, Human herpesvirus 3
gguucggugauca

SEQ ID NO: 1867785 - RNA, 23 nt, Human herpesvirus 3
ucaauaugucacggagaacguau

SEQ ID NO: 1867786 - RNA, 20 nt, Human herpesvirus 3
cauaucaauuuauauuuuua

SEQ ID NO: 1867787 - RNA, 17 nt, Human herpesvirus 3
gagcugguauacacgag

SEQ ID NO: 1867788 - RNA, 19 nt, Human herpesvirus 3
acaaauuucugauguuccc

SEQ ID NO: 1867789 - RNA, 21 nt, Human herpesvirus 3
aucagcgccaauaaaagcaga

SEQ ID NO: 1867790 - RNA, 21 nt, Human herpesvirus 3
aaauucaucugccguuucauu

SEQ ID NO: 1867791 - RNA, 22 nt, Human herpesvirus 3
auuguggauccggcaugcauug

SEQ ID NO: 1867792 - RNA, 15 nt, Human herpesvirus 3
gcugcaagcccuccg

SEQ ID NO: 1867793 - RNA, 21 nt, Human herpesvirus 3
cugugcgggcgggcgacgggc

SEQ ID NO: 1867794 - RNA, 15 nt, Human herpesvirus 3
aagcuauacacaagu

SEQ ID NO: 1867795 - RNA, 18 nt, Human herpesvirus 3
acuuguaaacccccaagc

SEQ ID NO: 1867796 - RNA, 13 nt, Human herpesvirus 3
gucgcgcccaccu

SEQ ID NO: 1867797 - RNA, 22 nt, Human herpesvirus 3
cuuuuaaacgccaguggaccuu

SEQ ID NO: 1867798 - RNA, 16 nt, Human herpesvirus 3
gaauaaacgacacaaa

SEQ ID NO: 1867799 - RNA, 19 nt, Human herpesvirus 3
acacgcgggugaguguacg

SEQ ID NO: 1867800 - RNA, 19 nt, Human herpesvirus 3
gccagugaaauaugacggc

SEQ ID NO: 1867801 - RNA, 15 nt, Human herpesvirus 3
gacaauuaacacaga

SEQ ID NO: 1867802 - RNA, 16 nt, Human herpesvirus 3
augcuugucaaaacau

SEQ ID NO: 1867803 - RNA, 13 nt, Human herpesvirus 3
ggucaucccggga

SEQ ID NO: 1867804 - RNA, 18 nt, Human herpesvirus 3
ugaaccggaaccuacaac

SEQ ID NO: 1867805 - RNA, 17 nt, Human herpesvirus 3
gaauccggucagagcau

SEQ ID NO: 1867806 - RNA, 22 nt, Human herpesvirus 3
aaauaacgccuuaaaaguuaca

SEQ ID NO: 1867807 - RNA, 21 nt, Human herpesvirus 3
cgaucucugguauacuuggca

SEQ ID NO: 1867808 - RNA, 13 nt, Human herpesvirus 3
ugacuuugaagac

SEQ ID NO: 1867809 - RNA, 18 nt, Human herpesvirus 3
acaucgugcuugaauugc

SEQ ID NO: 1867810 - RNA, 20 nt, Human herpesvirus 3
auaauuuguccauaucgcaa

SEQ ID NO: 1867811 - RNA, 17 nt, Human herpesvirus 3
gacuguuuguuguuaau

SEQ ID NO: 1867812 - RNA, 20 nt, Human herpesvirus 3
guuaucuuuauuuggaaugc

SEQ ID NO: 1867813 - RNA, 16 nt, Human herpesvirus 3
aaacgcgccaaacauu

SEQ ID NO: 1867814 - RNA, 18 nt, Human herpesvirus 3
aguuagcauccaaauuaa

SEQ ID NO: 1867815 - RNA, 23 nt, Human herpesvirus 3
caggucaaaacgcugacccaccc

SEQ ID NO: 1867816 - RNA, 16 nt, Human herpesvirus 3
uauauuuuuaaucauu

SEQ ID NO: 1867817 - RNA, 14 nt, Human herpesvirus 3
aucguuuaacaaaa

SEQ ID NO: 1867818 - RNA, 13 nt, Human herpesvirus 3
augccagaagcau

SEQ ID NO: 1867819 - RNA, 22 nt, Human herpesvirus 3
cguuauagcaggggucuccaga

SEQ ID NO: 1867820 - RNA, 22 nt, Human herpesvirus 3
cuaggcacuuuggcggucauuu

SEQ ID NO: 1867821 - RNA, 20 nt, Human herpesvirus 3
acaaucgcccgaaaacuuug

SEQ ID NO: 1867822 - RNA, 22 nt, Human herpesvirus 3
agaguuuucuccaaaagaacaa

SEQ ID NO: 1867823 - RNA, 19 nt, Human herpesvirus 3
gucugugcgggcgggcgac

SEQ ID NO: 1867824 - RNA, 22 nt, Human herpesvirus 3
caucgugcuugaauugccaucu

SEQ ID NO: 1867825 - RNA, 16 nt, Human herpesvirus 3
cuguuuaugaacagca

SEQ ID NO: 1867826 - RNA, 15 nt, Human herpesvirus 3
aacgcgcaauguuuu

SEQ ID NO: 1867827 - RNA, 16 nt, Human herpesvirus 3
uuacauugcuuucaaa

SEQ ID NO: 1867828 - RNA, 22 nt, Human herpesvirus 3
cauaguccgccgacagccgcuc

SEQ ID NO: 1867829 - RNA, 23 nt, Human herpesvirus 3
ugcugaguugcggcgcugaaggg

SEQ ID NO: 1867830 - RNA, 20 nt, Human herpesvirus 3
accaagcguacgaccaaaca

SEQ ID NO: 1867831 - RNA, 18 nt, Human herpesvirus 3
cacuguacgcagaaagca

SEQ ID NO: 1867832 - RNA, 15 nt, Human herpesvirus 3
aauacuuuuauuugu

SEQ ID NO: 1867833 - RNA, 20 nt, Human herpesvirus 3
aagguuaaauuuauaaaaca

SEQ ID NO: 1867834 - RNA, 19 nt, Human herpesvirus 3
uggcgcgcggacuguuugu

SEQ ID NO: 1867835 - RNA, 19 nt, Human herpesvirus 3
ccaccucggccgcuucccg

SEQ ID NO: 1867836 - RNA, 20 nt, Human herpesvirus 3
uagaaacgcgccaaacauug

SEQ ID NO: 1867837 - RNA, 23 nt, Human herpesvirus 3
acguaauuugccccaaaccacug

SEQ ID NO: 1867838 - RNA, 17 nt, Human herpesvirus 3
acggcuguggucugcuu

SEQ ID NO: 1867839 - RNA, 21 nt, Human herpesvirus 3
agauucaagacuaacauuuau

SEQ ID NO: 1867840 - RNA, 17 nt, Human herpesvirus 3
aacaaacauucacagua

SEQ ID NO: 1867841 - RNA, 14 nt, Human herpesvirus 3
aagauaggguguau

SEQ ID NO: 1867842 - RNA, 19 nt, Human herpesvirus 3
guaggggaugggggucgca

SEQ ID NO: 1867843 - RNA, 13 nt, Human herpesvirus 3
uuuuaaagcaucu

SEQ ID NO: 1867844 - RNA, 18 nt, Human herpesvirus 3
aauacuaagccucuguac

SEQ ID NO: 1867845 - RNA, 15 nt, Human herpesvirus 3
agauugucccaucgc

SEQ ID NO: 1867846 - RNA, 15 nt, Human herpesvirus 3
aacgcugcugacaaa

SEQ ID NO: 1867847 - RNA, 17 nt, Human herpesvirus 3
acugcagauacagcaua

SEQ ID NO: 1867848 - RNA, 22 nt, Human herpesvirus 3
ugcauaaccuguccauuugcau

SEQ ID NO: 1867849 - RNA, 15 nt, Human herpesvirus 3
aucuaauaacaauuu

SEQ ID NO: 1867850 - RNA, 15 nt, Human herpesvirus 3
ucggaugacuuugca

SEQ ID NO: 1867851 - RNA, 14 nt, Human herpesvirus 3
agccagccaaaaaa

SEQ ID NO: 1867852 - RNA, 15 nt, Human herpesvirus 3
augcacugaaccaca

SEQ ID NO: 1867853 - RNA, 23 nt, Human herpesvirus 3
ccgauauuguauuguaguacagg

SEQ ID NO: 1867854 - RNA, 19 nt, Human herpesvirus 3
cauuuccaaacacauuacg

SEQ ID NO: 1867855 - RNA, 21 nt, Human herpesvirus 3
uugaaaacauagaccauguuu

SEQ ID NO: 1867856 - RNA, 19 nt, Human herpesvirus 3
caugacaacggaaaacacg

SEQ ID NO: 1867857 - RNA, 21 nt, Human herpesvirus 3
aagguguauuuuauuuaguga

SEQ ID NO: 1867858 - RNA, 17 nt, Human herpesvirus 3
uacgccacgcuacaucc

SEQ ID NO: 1867859 - RNA, 17 nt, Human herpesvirus 3
aaccauucagcuuacag

SEQ ID NO: 1867860 - RNA, 12 nt, Human herpesvirus 3
uguauguuuuua

SEQ ID NO: 1867861 - RNA, 23 nt, Human herpesvirus 3
cggcagaugaucugguaaauguu

SEQ ID NO: 1867862 - RNA, 14 nt, Human herpesvirus 3
ugaauuugcuacca

SEQ ID NO: 1867863 - RNA, 19 nt, Human herpesvirus 3
uauucgcguaugaaaugua

SEQ ID NO: 1867864 - RNA, 19 nt, Human herpesvirus 3
gggaauuuaggaggcugca

SEQ ID NO: 1867865 - RNA, 15 nt, Human herpesvirus 3
ucguauaacagcuca

SEQ ID NO: 1867866 - RNA, 21 nt, Human herpesvirus 3
gguggauauagcgcugucguc

SEQ ID NO: 1867867 - RNA, 16 nt, Human herpesvirus 3
ucauguaauuguaaau

SEQ ID NO: 1867868 - RNA, 21 nt, Human herpesvirus 3
caaaaagaauuaaaaaagccg

SEQ ID NO: 1867869 - RNA, 16 nt, Human herpesvirus 3
auucucaucaaaguca

SEQ ID NO: 1867870 - RNA, 13 nt, Human herpesvirus 3
ucguguaaaguuu

SEQ ID NO: 1867871 - RNA, 18 nt, Human herpesvirus 3
aaaaagaggcggggagaa

SEQ ID NO: 1867872 - RNA, 13 nt, Human herpesvirus 3
accgcacccgaua

SEQ ID NO: 1867873 - RNA, 16 nt, Human herpesvirus 3
aauucgugugcaauaa

SEQ ID NO: 1867874 - RNA, 22 nt, Human herpesvirus 3
auauuuacacguuucauuaacu

SEQ ID NO: 1867875 - RNA, 19 nt, Human herpesvirus 3
ugcgaagcugccgucaaug

SEQ ID NO: 1867876 - RNA, 17 nt, Human herpesvirus 3
cccgugacucccuccaa

SEQ ID NO: 1867877 - RNA, 15 nt, Human herpesvirus 3
ccuucaacacaccca

SEQ ID NO: 1867878 - RNA, 19 nt, Human herpesvirus 3
gcccacacgcgggugagug

SEQ ID NO: 1867879 - RNA, 19 nt, Human herpesvirus 3
aagguagacaacugacaga

SEQ ID NO: 1867880 - RNA, 15 nt, Human herpesvirus 3
cccccgguuucuggg

SEQ ID NO: 1867881 - RNA, 22 nt, Human herpesvirus 3
ugauucaagugagguguccugu

SEQ ID NO: 1867882 - RNA, 14 nt, Human herpesvirus 3
guacacccagcugu

SEQ ID NO: 1867883 - RNA, 16 nt, Human herpesvirus 3
gcaccacagucucugu

SEQ ID NO: 1867884 - RNA, 20 nt, Human herpesvirus 3
uauaaauccguaucucggag

SEQ ID NO: 1867885 - RNA, 21 nt, Human herpesvirus 3
uaaacguauucuauuaacaau

SEQ ID NO: 1867886 - RNA, 19 nt, Human herpesvirus 3
ugaucaccgaaccggggca

SEQ ID NO: 1867887 - RNA, 18 nt, Human herpesvirus 3
cgcccggcggaccccggg

SEQ ID NO: 1867888 - RNA, 20 nt, Human herpesvirus 3
uacauuucacgcgucuuguu

SEQ ID NO: 1867889 - RNA, 23 nt, Human herpesvirus 3
cagaaacauuaguugcgguucaa

SEQ ID NO: 1867890 - RNA, 21 nt, Human herpesvirus 3
uuaggguugggagaguggguc

SEQ ID NO: 1867891 - RNA, 14 nt, Human herpesvirus 3
ggucgccuguaaua

SEQ ID NO: 1867892 - RNA, 18 nt, Human herpesvirus 3
auggguuuuuagaauuuc

SEQ ID NO: 1867893 - RNA, 14 nt, Human herpesvirus 3
cccgguuucugggc

SEQ ID NO: 1867894 - RNA, 20 nt, Human herpesvirus 3
caauaucagccgcucgcuga

SEQ ID NO: 1867895 - RNA, 18 nt, Human herpesvirus 3
ccuuaaccgcgacagcca

SEQ ID NO: 1867896 - RNA, 15 nt, Human herpesvirus 3
uauuuaauaggcaua

SEQ ID NO: 1867897 - RNA, 18 nt, Human herpesvirus 3
cucaucaacguuaagagg

SEQ ID NO: 1867898 - RNA, 15 nt, Human herpesvirus 3
uaccucugucagguu

SEQ ID NO: 1867899 - RNA, 16 nt, Human herpesvirus 3
guguggauuauaucca

SEQ ID NO: 1867900 - RNA, 19 nt, Human herpesvirus 3
cagcaaguuuaacauuucc

SEQ ID NO: 1867901 - RNA, 18 nt, Human herpesvirus 3
acacccauacagugaccc

SEQ ID NO: 1867902 - RNA, 15 nt, Human herpesvirus 3
aucauuuuauuacau

SEQ ID NO: 1867903 - RNA, 12 nt, Human herpesvirus 3
caauuaaagccc

SEQ ID NO: 1867904 - RNA, 17 nt, Human herpesvirus 3
gguucuucacuggacuu

SEQ ID NO: 1867905 - RNA, 16 nt, Human herpesvirus 3
uaagccucuguacaac

SEQ ID NO: 1867906 - RNA, 22 nt, Human herpesvirus 3
agacuugauacccucaaacacg

SEQ ID NO: 1867907 - RNA, 13 nt, Human herpesvirus 3
guacgauuagaac

SEQ ID NO: 1867908 - RNA, 17 nt, Human herpesvirus 3
ucguuuugguguuacau

SEQ ID NO: 1867909 - RNA, 17 nt, Human herpesvirus 3
ccgcuucccgaaagccc

SEQ ID NO: 1867910 - RNA, 14 nt, Human herpesvirus 3
uucaacacacccau

SEQ ID NO: 1867911 - RNA, 22 nt, Human herpesvirus 3
cgcagucuauggggggaauaca

SEQ ID NO: 1867912 - RNA, 20 nt, Human herpesvirus 3
aauugggggauuugggagaa

SEQ ID NO: 1867913 - RNA, 18 nt, Human herpesvirus 3
aaauauaacauacaucau

SEQ ID NO: 1867914 - RNA, 19 nt, Human herpesvirus 3
aaaacuuugguuguuguau

SEQ ID NO: 1867915 - RNA, 20 nt, Human herpesvirus 3
cguauuuuuauuuaaaugug

SEQ ID NO: 1867916 - RNA, 21 nt, Human herpesvirus 3
ccauuaaagagccauuuccau

SEQ ID NO: 1867917 - RNA, 19 nt, Human herpesvirus 3
caaaccauucgaggaaaac

SEQ ID NO: 1867918 - RNA, 23 nt, Human herpesvirus 3
aaguuuauacguacaucuuucag

SEQ ID NO: 1867919 - RNA, 14 nt, Human herpesvirus 3
uugcauaugcauau

SEQ ID NO: 1867920 - RNA, 12 nt, Human herpesvirus 3
gcgcauggccaa

SEQ ID NO: 1867921 - RNA, 13 nt, Human herpesvirus 3
ccgcggccagugc

SEQ ID NO: 1867922 - RNA, 18 nt, Human herpesvirus 3
gacgccgauaaauccaca

SEQ ID NO: 1867923 - RNA, 22 nt, Human herpesvirus 3
acccacgggguccccacacggg

SEQ ID NO: 1867924 - RNA, 16 nt, Human herpesvirus 3
aacgaaggcacggaag

SEQ ID NO: 1867925 - RNA, 15 nt, Human herpesvirus 3
cacagagucuguauc

SEQ ID NO: 1867926 - RNA, 13 nt, Human herpesvirus 3
uauuacauuuaau

SEQ ID NO: 1867927 - RNA, 13 nt, Human herpesvirus 3
cgaaacgcuuuga

SEQ ID NO: 1867928 - RNA, 22 nt, Human herpesvirus 3
uugucuaccacuaagaacuuua

SEQ ID NO: 1867929 - RNA, 15 nt, Human herpesvirus 3
uguugauauuuucca

SEQ ID NO: 1867930 - RNA, 14 nt, Human herpesvirus 3
agaaacuuaauaca

SEQ ID NO: 1867931 - RNA, 13 nt, Human herpesvirus 3
auguacacccagc

SEQ ID NO: 1867932 - RNA, 15 nt, Human herpesvirus 3
caggagggguugcgg

SEQ ID NO: 1867933 - RNA, 13 nt, Human herpesvirus 3
gccgcgcuaugcg

SEQ ID NO: 1867934 - RNA, 22 nt, Human herpesvirus 3
cguacaaucgaaaaaaggugua

SEQ ID NO: 1867935 - RNA, 15 nt, Human herpesvirus 3
auuuaaauaaaaaac

SEQ ID NO: 1867936 - RNA, 14 nt, Human herpesvirus 3
ccgaaccggggcaa

SEQ ID NO: 1867937 - RNA, 15 nt, Human herpesvirus 3
gaacguuuaauuaau

SEQ ID NO: 1867938 - RNA, 19 nt, Human herpesvirus 3
auuuaggucucggagguua

SEQ ID NO: 1867939 - RNA, 14 nt, Human herpesvirus 3
auggcuacaaggaa

SEQ ID NO: 1867940 - RNA, 18 nt, Human herpesvirus 3
uucagcaaguuuaacauu

SEQ ID NO: 1867941 - RNA, 18 nt, Human herpesvirus 3
uuacaggacaaaccccac

SEQ ID NO: 1867942 - RNA, 17 nt, Human herpesvirus 3
ggcgcugaagggugcau

SEQ ID NO: 1867943 - RNA, 21 nt, Human herpesvirus 3
agcaauaaaauggauauaauu

SEQ ID NO: 1867944 - RNA, 21 nt, Human herpesvirus 3
ucucaucaaagucaaagucuu

SEQ ID NO: 1867945 - RNA, 20 nt, Human herpesvirus 3
cgaaccuucggaugacuuug

SEQ ID NO: 1867946 - RNA, 13 nt, Human herpesvirus 3
aaauaaacuauau

SEQ ID NO: 1867947 - RNA, 23 nt, Human herpesvirus 3
augauucaaguaaauaugugcau

SEQ ID NO: 1867948 - RNA, 16 nt, Human herpesvirus 3
agaauaccaaaaagaa

SEQ ID NO: 1867949 - RNA, 18 nt, Human herpesvirus 3
ccuugggacaucaaccag

SEQ ID NO: 1867950 - RNA, 15 nt, Human herpesvirus 3
uuccacacucuucaa

SEQ ID NO: 1867951 - RNA, 16 nt, Human herpesvirus 3
gccaugguuucaaaac

SEQ ID NO: 1867952 - RNA, 14 nt, Human herpesvirus 3
uauaugucaacauu

SEQ ID NO: 1867953 - RNA, 15 nt, Human herpesvirus 3
uggcauuaaacccac

SEQ ID NO: 1867954 - RNA, 16 nt, Human herpesvirus 3
aucauacgcauuuacg

SEQ ID NO: 1867955 - RNA, 20 nt, Human herpesvirus 3
uauaugggcgggauuacauu

SEQ ID NO: 1867956 - RNA, 17 nt, Human herpesvirus 3
uauggaaucgucuaaca

SEQ ID NO: 1867957 - RNA, 21 nt, Human herpesvirus 3
gaugguaguuaccaaaguuuu

SEQ ID NO: 1867958 - RNA, 19 nt, Human herpesvirus 3
cuuuguuugcugcagacac

SEQ ID NO: 1867959 - RNA, 18 nt, Human herpesvirus 3
acaugccuggcuuaacag

SEQ ID NO: 1867960 - RNA, 23 nt, Human herpesvirus 3
gcacuaucgucucaaaacuuaag

SEQ ID NO: 1867961 - RNA, 17 nt, Human herpesvirus 3
uaaccauagacuguucu

SEQ ID NO: 1867962 - RNA, 18 nt, Human herpesvirus 3
cacgggguccccacacgg

SEQ ID NO: 1867963 - RNA, 22 nt, Human herpesvirus 3
cuggcuauggaaccuaauuuaa

SEQ ID NO: 1867964 - RNA, 19 nt, Human herpesvirus 3
uucucgugagcgccacugg

SEQ ID NO: 1867965 - RNA, 19 nt, Human herpesvirus 3
caacgcuuugaucuucaag

SEQ ID NO: 1867966 - RNA, 15 nt, Human herpesvirus 3
gcggaccccgggaga

SEQ ID NO: 1867967 - RNA, 13 nt, Human herpesvirus 3
acccgguauuaug

SEQ ID NO: 1867968 - RNA, 21 nt, Human herpesvirus 3
cuuccaacaucuauuccggau

SEQ ID NO: 1867969 - RNA, 17 nt, Human herpesvirus 3
ccccgguuucugggcgc

SEQ ID NO: 1867970 - RNA, 14 nt, Human herpesvirus 3
uaauauggggacag

SEQ ID NO: 1867971 - RNA, 21 nt, Human herpesvirus 3
cuccguuuaucccccuucaaa

SEQ ID NO: 1867972 - RNA, 18 nt, Human herpesvirus 3
gugcgacaaaggcauuug

SEQ ID NO: 1867973 - RNA, 18 nt, Human herpesvirus 3
guuuaucccccuucaaac

SEQ ID NO: 1867974 - RNA, 12 nt, Human herpesvirus 3
uuguaguacagg

SEQ ID NO: 1867975 - RNA, 14 nt, Human herpesvirus 3
gacccgcagcccag

SEQ ID NO: 1867976 - RNA, 21 nt, Human herpesvirus 3
gaucccgccgucgcgcccacc

SEQ ID NO: 1867977 - RNA, 19 nt, Human herpesvirus 3
gccagauguacacccagcu

SEQ ID NO: 1867978 - RNA, 15 nt, Human herpesvirus 3
guuauacuacuuauu

SEQ ID NO: 1867979 - RNA, 19 nt, Human herpesvirus 3
uugcugcagacaccaugac

SEQ ID NO: 1867980 - RNA, 23 nt, Human herpesvirus 3
ggugagcacccgggcggugaaua

SEQ ID NO: 1867981 - RNA, 18 nt, Human herpesvirus 3
guguuuuuaauagagagu

SEQ ID NO: 1867982 - RNA, 13 nt, Human herpesvirus 3
cuuacuugagauu

SEQ ID NO: 1867983 - RNA, 18 nt, Human herpesvirus 3
uaccauauauggacaucc

SEQ ID NO: 1867984 - RNA, 19 nt, Human herpesvirus 3
cuucugucaaguugcaugu

SEQ ID NO: 1867985 - RNA, 19 nt, Human herpesvirus 3
uguuuucggaguugccucc

SEQ ID NO: 1867986 - RNA, 12 nt, Human herpesvirus 3
gcucaauacuug

SEQ ID NO: 1867987 - RNA, 19 nt, Human herpesvirus 3
cccaugucuacgugguacc

SEQ ID NO: 1867988 - RNA, 12 nt, Human herpesvirus 3
auaaagggaugg

SEQ ID NO: 1867989 - RNA, 15 nt, Human herpesvirus 3
aacaccgcugugcug

SEQ ID NO: 1867990 - RNA, 19 nt, Human herpesvirus 3
ugucuacuauuugugaaga

SEQ ID NO: 1867991 - RNA, 18 nt, Human herpesvirus 3
cuacuuagcggacaugcu

SEQ ID NO: 1867992 - RNA, 24 nt, Human herpesvirus 3
ccgguucggugaucaccgggucuu

SEQ ID NO: 1867993 - RNA, 15 nt, Human herpesvirus 3
ccgaucgcguacccc

SEQ ID NO: 1867994 - RNA, 16 nt, Human herpesvirus 3
cgacuccucagccaug

SEQ ID NO: 1867995 - RNA, 21 nt, Human herpesvirus 3
uacacauccuggacacagucc

SEQ ID NO: 1867996 - RNA, 20 nt, Human herpesvirus 3
gaggguccaucaaacacaca

SEQ ID NO: 1867997 - RNA, 12 nt, Human herpesvirus 3
cccgccaugagc

SEQ ID NO: 1867998 - RNA, 23 nt, Human herpesvirus 3
agguauaugucaacauuuacagu

SEQ ID NO: 1867999 - RNA, 19 nt, Human herpesvirus 3
cggucgcguguacgaaaac

SEQ ID NO: 1868000 - RNA, 14 nt, Human herpesvirus 3
gacaugcacugcau

SEQ ID NO: 1868001 - RNA, 18 nt, Human herpesvirus 3
uguagucuuugaucccag

SEQ ID NO: 1868002 - RNA, 19 nt, Human herpesvirus 3
guuaauuaacgcgauuuua

SEQ ID NO: 1868003 - RNA, 13 nt, Human herpesvirus 3
uaguauuuacgua

SEQ ID NO: 1868004 - RNA, 15 nt, Human herpesvirus 3
uaauugucacgcuua

SEQ ID NO: 1868005 - RNA, 18 nt, Human herpesvirus 3
gcuucccgaaagcccgau

SEQ ID NO: 1868006 - RNA, 16 nt, Human herpesvirus 3
auuuuacgucauuucu

SEQ ID NO: 1868007 - RNA, 20 nt, Human herpesvirus 3
ccauguggguugggauuacg

SEQ ID NO: 1868008 - RNA, 14 nt, Human herpesvirus 3
uacgaccaaacauu

SEQ ID NO: 1868009 - RNA, 12 nt, Human herpesvirus 3
uuguauauacaa

SEQ ID NO: 1868010 - RNA, 22 nt, Human herpesvirus 3
accagaaacguuuuuaguuuuu

SEQ ID NO: 1868011 - RNA, 23 nt, Human herpesvirus 3
gugguuauuacauuuaauguuuu

SEQ ID NO: 1868012 - RNA, 20 nt, Human herpesvirus 3
aucggccguuauauuuuaca

SEQ ID NO: 1868013 - RNA, 21 nt, Human herpesvirus 3
guacacgauucggaaugcccg

SEQ ID NO: 1868014 - RNA, 17 nt, Human herpesvirus 3
uguguuuuuaucugcaa

SEQ ID NO: 1868015 - RNA, 22 nt, Human herpesvirus 3
gaaucacggccgugcggucucc

SEQ ID NO: 1868016 - RNA, 23 nt, Human herpesvirus 3
auggcaucuuccgacggugacag

SEQ ID NO: 1868017 - RNA, 12 nt, Human herpesvirus 3
gaacuaacucag

SEQ ID NO: 1868018 - RNA, 13 nt, Human herpesvirus 3
uauucuacagauu

SEQ ID NO: 1868019 - RNA, 18 nt, Human herpesvirus 3
uacaccagaaacguuuuu

SEQ ID NO: 1868020 - RNA, 16 nt, Human herpesvirus 3
agcaucucuggacccc

SEQ ID NO: 1868021 - RNA, 18 nt, Human herpesvirus 3
ucauaaaaacaagaaguu

SEQ ID NO: 1868022 - RNA, 15 nt, Human herpesvirus 3
guguucauaacaccg

SEQ ID NO: 1868023 - RNA, 13 nt, Human herpesvirus 3
gcaauuggccguu

SEQ ID NO: 1868024 - RNA, 17 nt, Human herpesvirus 3
cauuaggaugaaaagaa

SEQ ID NO: 1868025 - RNA, 21 nt, Human herpesvirus 3
cugcagggcggcguccucggc

SEQ ID NO: 1868026 - RNA, 16 nt, Human herpesvirus 3
aaccaauaucuuugca

SEQ ID NO: 1868027 - RNA, 16 nt, Human herpesvirus 3
aauaucuuugcaauuc

SEQ ID NO: 1868028 - RNA, 14 nt, Human herpesvirus 3
caguaacgguuuac

SEQ ID NO: 1868029 - RNA, 22 nt, Human herpesvirus 3
cggcuuuuaauuugaagacacc

SEQ ID NO: 1868030 - RNA, 17 nt, Human herpesvirus 3
guccgccgacagccgcu

SEQ ID NO: 1868031 - RNA, 12 nt, Human herpesvirus 3
uccaauguuuga

SEQ ID NO: 1868032 - RNA, 20 nt, Human herpesvirus 3
caugguugugggaaacauca

SEQ ID NO: 1868033 - RNA, 21 nt, Human herpesvirus 3
acugaauuauauaccucggcc

SEQ ID NO: 1868034 - RNA, 18 nt, Human herpesvirus 3
ugaagauaggguguauac

SEQ ID NO: 1868035 - RNA, 17 nt, Human herpesvirus 3
caacacacccauacagu

SEQ ID NO: 1868036 - RNA, 21 nt, Human herpesvirus 3
gccuucuguuuguuuaacacg

SEQ ID NO: 1868037 - RNA, 17 nt, Human herpesvirus 3
cgcguuugcggggcgac

SEQ ID NO: 1868038 - RNA, 23 nt, Human herpesvirus 3
uguauguggagcguacugcagau

SEQ ID NO: 1868039 - RNA, 17 nt, Human herpesvirus 3
uguucucggucuggaau

SEQ ID NO: 1868040 - RNA, 16 nt, Human herpesvirus 3
gacauggccgugaaug

SEQ ID NO: 1868041 - RNA, 17 nt, Human herpesvirus 3
augcgcguuccaaauua

SEQ ID NO: 1868042 - RNA, 14 nt, Human herpesvirus 3
ugugaugaauguaa

SEQ ID NO: 1868043 - RNA, 14 nt, Human herpesvirus 3
uguucuauuuccca

SEQ ID NO: 1868044 - RNA, 15 nt, Human herpesvirus 3
guuacucaugugucu

SEQ ID NO: 1868045 - RNA, 14 nt, Human herpesvirus 3
cuccagaguacagg

SEQ ID NO: 1868046 - RNA, 12 nt, Human herpesvirus 3
cauaaaacugua

SEQ ID NO: 1868047 - RNA, 22 nt, Human herpesvirus 3
aaauuuguguuuuuaucugcaa

SEQ ID NO: 1868048 - RNA, 13 nt, Human herpesvirus 3
ccgguuucugggc

SEQ ID NO: 1868049 - RNA, 18 nt, Human herpesvirus 3
guacaauacguaaauguc

SEQ ID NO: 1868050 - RNA, 17 nt, Human herpesvirus 3
guuauuguauauacaac

SEQ ID NO: 1868051 - RNA, 21 nt, Human herpesvirus 3
gaagggggauuuacaaugaca

SEQ ID NO: 1868052 - RNA, 16 nt, Human herpesvirus 3
ccgguuucugggcgcc

SEQ ID NO: 1868053 - RNA, 16 nt, Human herpesvirus 3
auauucacaacaguug

SEQ ID NO: 1868054 - RNA, 12 nt, Human herpesvirus 3
auucuauuaaca

SEQ ID NO: 1868055 - RNA, 14 nt, Human herpesvirus 3
auaguaaauaccua

SEQ ID NO: 1868056 - RNA, 16 nt, Human herpesvirus 3
ggugaugaaaucagag

SEQ ID NO: 1868057 - RNA, 12 nt, Human herpesvirus 3
gucugcccaccg

SEQ ID NO: 1868058 - RNA, 20 nt, Human herpesvirus 3
uauucucgcuugcagcuugu

SEQ ID NO: 1868059 - RNA, 23 nt, Human herpesvirus 3
aaaauauacgcucuucugauauu

SEQ ID NO: 1868060 - RNA, 19 nt, Human herpesvirus 3
uguucugcauaagcucugu

SEQ ID NO: 1868061 - RNA, 15 nt, Human herpesvirus 3
cccagcaaccccacc

SEQ ID NO: 1868062 - RNA, 17 nt, Human herpesvirus 3
acuuauccaacaaauug

SEQ ID NO: 1868063 - RNA, 12 nt, Human herpesvirus 3
cggccgcuuccc

SEQ ID NO: 1868064 - RNA, 14 nt, Human herpesvirus 3
cccccgaaaauaac

SEQ ID NO: 1868065 - RNA, 14 nt, Human herpesvirus 3
uaacaacucuggag

SEQ ID NO: 1868066 - RNA, 19 nt, Human herpesvirus 3
uuaccccgccauaaacaga

SEQ ID NO: 1868067 - RNA, 22 nt, Human herpesvirus 3
ugaacuuaccuccgaagacuuu

SEQ ID NO: 1868068 - RNA, 13 nt, Human herpesvirus 3
cuuuuaaagcauc

SEQ ID NO: 1868069 - RNA, 22 nt, Human herpesvirus 3
gaucccgccgucgcgcccaccu

SEQ ID NO: 1868070 - RNA, 15 nt, Human herpesvirus 3
gcuggucggaccccc

SEQ ID NO: 1868071 - RNA, 20 nt, Human herpesvirus 3
agccgcucgcugagcuccag

SEQ ID NO: 1868072 - RNA, 18 nt, Human herpesvirus 3
gcgaacgugauuugccca

SEQ ID NO: 1868073 - RNA, 21 nt, Human herpesvirus 3
agguguuaauaaaaacacaac

SEQ ID NO: 1868074 - RNA, 16 nt, Human herpesvirus 3
gcccacacaaucagaa

SEQ ID NO: 1868075 - RNA, 15 nt, Human herpesvirus 3
ccaucauuuaaauuc

SEQ ID NO: 1868076 - RNA, 20 nt, Human herpesvirus 3
ucaaaaaagcguguaaauca

SEQ ID NO: 1868077 - RNA, 13 nt, Human herpesvirus 3
uauuucuccggga

SEQ ID NO: 1868078 - RNA, 13 nt, Human herpesvirus 3
aguccaguggaca

SEQ ID NO: 1868079 - RNA, 22 nt, Human herpesvirus 3
gagcugguauacacgagagcag

SEQ ID NO: 1868080 - RNA, 15 nt, Human herpesvirus 3
augaaaaccugggug

SEQ ID NO: 1868081 - RNA, 23 nt, Human herpesvirus 3
cuuuaauaggcgcuacuuuauau

SEQ ID NO: 1868082 - RNA, 15 nt, Human herpesvirus 3
guguguugugugggg

SEQ ID NO: 1868083 - RNA, 17 nt, Human herpesvirus 3
aacccaagguguaaaua

SEQ ID NO: 1868084 - RNA, 17 nt, Human herpesvirus 3
aucuauuaacaggaccu

SEQ ID NO: 1868085 - RNA, 15 nt, Human herpesvirus 3
gagacggcugcugcc

SEQ ID NO: 1868086 - RNA, 14 nt, Human herpesvirus 3
uauauucucgaagg

SEQ ID NO: 1868087 - RNA, 15 nt, Human herpesvirus 3
aacgcuguuguugcu

SEQ ID NO: 1868088 - RNA, 17 nt, Human herpesvirus 3
aaccuucggaugacuuu

SEQ ID NO: 1868089 - RNA, 17 nt, Human herpesvirus 3
agcacccuuuuguaaaa

SEQ ID NO: 1868090 - RNA, 22 nt, Human herpesvirus 3
acaugcauggaaucaccagaac

SEQ ID NO: 1868091 - RNA, 19 nt, Human herpesvirus 3
uagacuguucuacugacuu

SEQ ID NO: 1868092 - RNA, 20 nt, Human herpesvirus 3
gauuuuaucauugaagauga

SEQ ID NO: 1868093 - RNA, 14 nt, Human herpesvirus 3
ucgcccgaaaacuu

SEQ ID NO: 1868094 - RNA, 12 nt, Human herpesvirus 3
acaacauuuaaa

SEQ ID NO: 1868095 - RNA, 23 nt, Human herpesvirus 3
acccaagguguaaauacugcccc

SEQ ID NO: 1868096 - RNA, 21 nt, Human herpesvirus 3
aaagaauuuuuaauacgguuc

SEQ ID NO: 1868097 - RNA, 16 nt, Human herpesvirus 3
cagagacucugcgaug

SEQ ID NO: 1868098 - RNA, 13 nt, Human herpesvirus 3
ggcggaccccggg

SEQ ID NO: 1868099 - RNA, 21 nt, Human herpesvirus 3
ccgaaaauaacccccccccgg

SEQ ID NO: 1868100 - RNA, 16 nt, Human herpesvirus 3
cuccgcgccuguuaau

SEQ ID NO: 1868101 - RNA, 18 nt, Human herpesvirus 3
aggaucauuuuuugaaac

SEQ ID NO: 1868102 - RNA, 23 nt, Human herpesvirus 3
agauucgccuuuuacaugaucca

SEQ ID NO: 1868103 - RNA, 16 nt, Human herpesvirus 3
cuccucagccaugcgg

SEQ ID NO: 1868104 - RNA, 20 nt, Human herpesvirus 3
aucugaaaagaccgacagcc

SEQ ID NO: 1868105 - RNA, 14 nt, Human herpesvirus 3
uguccggacuccag

SEQ ID NO: 1868106 - RNA, 22 nt, Human herpesvirus 3
ccgucgcgcccaccucggccgc

SEQ ID NO: 1868107 - RNA, 13 nt, Human herpesvirus 3
ucguuuaucccac

SEQ ID NO: 1868108 - RNA, 19 nt, Human herpesvirus 3
ccaaccuucaaguuaaaua

SEQ ID NO: 1868109 - RNA, 16 nt, Human herpesvirus 3
auggaguucaaaagaa

SEQ ID NO: 1868110 - RNA, 22 nt, Human herpesvirus 3
gcgcgcaaauuaacccccgagg

SEQ ID NO: 1868111 - RNA, 20 nt, Human herpesvirus 3
agaaacuauccgacagagaa

SEQ ID NO: 1868112 - RNA, 14 nt, Human herpesvirus 3
aagguaucccccag

SEQ ID NO: 1868113 - RNA, 22 nt, Human herpesvirus 3
cccuccuuuucucgugagcgcc

SEQ ID NO: 1868114 - RNA, 18 nt, Human herpesvirus 3
aacgccucccagcaaaau

SEQ ID NO: 1868115 - RNA, 19 nt, Human herpesvirus 3
gaauauucauaaaacugua

SEQ ID NO: 1868116 - RNA, 19 nt, Human herpesvirus 3
acauggccgugaaugguga

SEQ ID NO: 1868117 - RNA, 17 nt, Human herpesvirus 3
uucaaaccaauaucuuu

SEQ ID NO: 1868118 - RNA, 21 nt, Human herpesvirus 3
caucuggaguacuacacccag

SEQ ID NO: 1868119 - RNA, 21 nt, Human herpesvirus 3
auccauuaaagagccauuucc

SEQ ID NO: 1868120 - RNA, 11 nt, Human herpesvirus 3
uaucaauaaau

SEQ ID NO: 1868121 - RNA, 15 nt, Human herpesvirus 3
uuugcuuccccacac

SEQ ID NO: 1868122 - RNA, 20 nt, Human herpesvirus 3
uuaacaacucgugucucugg

SEQ ID NO: 1868123 - RNA, 15 nt, Human herpesvirus 3
aucucggagcgggcc

SEQ ID NO: 1868124 - RNA, 21 nt, Human herpesvirus 3
uucccaacgcauaaccagcga

SEQ ID NO: 1868125 - RNA, 19 nt, Human herpesvirus 3
cacaucuacugucuugaca

SEQ ID NO: 1868126 - RNA, 20 nt, Human herpesvirus 3
gacuccccccgucacacaca

SEQ ID NO: 1868127 - RNA, 22 nt, Human herpesvirus 3
cauuguacacccgguaugccac

SEQ ID NO: 1868128 - RNA, 23 nt, Human herpesvirus 3
gauggcaccacagucucuguuug

SEQ ID NO: 1868129 - RNA, 16 nt, Human herpesvirus 3
gcaauucccaguaaac

SEQ ID NO: 1868130 - RNA, 17 nt, Human herpesvirus 3
cugaucgucaggucugu

SEQ ID NO: 1868131 - RNA, 13 nt, Human herpesvirus 3
aauucaaaauacg

SEQ ID NO: 1868132 - RNA, 23 nt, Human herpesvirus 3
cccucuuuauccaauuaaagccc

SEQ ID NO: 1868133 - RNA, 16 nt, Human herpesvirus 3
aguuaaaucguuuaac

SEQ ID NO: 1868134 - RNA, 14 nt, Human herpesvirus 3
ccgggaucguggcc

SEQ ID NO: 1868135 - RNA, 14 nt, Human herpesvirus 3
cacucuacgcauuu

SEQ ID NO: 1868136 - RNA, 21 nt, Human herpesvirus 3
cgcaaggucccccccagaaga

SEQ ID NO: 1868137 - RNA, 19 nt, Human herpesvirus 3
cgggucuuaucuauauaca

SEQ ID NO: 1868138 - RNA, 14 nt, Human herpesvirus 3
cuauacgcauuucg

SEQ ID NO: 1868139 - RNA, 10 nt, Human herpesvirus 3
gugucugucu

SEQ ID NO: 1868140 - RNA, 19 nt, Human herpesvirus 3
caaugcgccguauauggua

SEQ ID NO: 1868141 - RNA, 20 nt, Human herpesvirus 3
acagccuuuacucggcucaa

SEQ ID NO: 1868142 - RNA, 14 nt, Human herpesvirus 3
ccgggauaucucau

SEQ ID NO: 1868143 - RNA, 18 nt, Human herpesvirus 3
cugucauguuuaagaaca

SEQ ID NO: 1868144 - RNA, 16 nt, Human herpesvirus 3
ccgacaugcacugcau

SEQ ID NO: 1868145 - RNA, 19 nt, Human herpesvirus 3
uguucaauaauuggacugc

SEQ ID NO: 1868146 - RNA, 21 nt, Human herpesvirus 3
uagauaucacaccaauuauaa

SEQ ID NO: 1868147 - RNA, 13 nt, Human herpesvirus 3
ugagcgccacugg

SEQ ID NO: 1868148 - RNA, 14 nt, Human herpesvirus 3
aagacauggccgug

SEQ ID NO: 1868149 - RNA, 19 nt, Human herpesvirus 3
ugucuacgugguaccaaaa

SEQ ID NO: 1868150 - RNA, 14 nt, Human herpesvirus 3
ggaaggauuaagaa

SEQ ID NO: 1868151 - RNA, 12 nt, Human herpesvirus 3
cuagccacaccc

SEQ ID NO: 1868152 - RNA, 21 nt, Human herpesvirus 3
ucugccguggaccccuguauu

SEQ ID NO: 1868153 - RNA, 14 nt, Human herpesvirus 3
uuauuuuaauguau

SEQ ID NO: 1868154 - RNA, 16 nt, Human herpesvirus 3
cgaagagaacugugaa

SEQ ID NO: 1868155 - RNA, 22 nt, Human herpesvirus 3
ucccgccgucgcgcccaccucg

SEQ ID NO: 1868156 - RNA, 17 nt, Human herpesvirus 3
auacacauccuggacac

SEQ ID NO: 1868157 - RNA, 13 nt, Human herpesvirus 3
ucaugcuugucaa

SEQ ID NO: 1868158 - RNA, 22 nt, Human herpesvirus 3
gacgggcgggcuggucggaccc

SEQ ID NO: 1868159 - RNA, 18 nt, Human herpesvirus 3
accugcgguauucuguaa

SEQ ID NO: 1868160 - RNA, 22 nt, Human herpesvirus 3
aucauuuaaauuccgcgguggg

SEQ ID NO: 1868161 - RNA, 22 nt, Human herpesvirus 3
aagucgcaacgcugcugacaaa

SEQ ID NO: 1868162 - RNA, 15 nt, Human herpesvirus 3
uuccuuuuccagcga

SEQ ID NO: 1868163 - RNA, 22 nt, Human herpesvirus 3
cauucgcaacacaucuacuguc

SEQ ID NO: 1868164 - RNA, 21 nt, Human herpesvirus 3
ggauaaauguuagucuugaau

SEQ ID NO: 1868165 - RNA, 13 nt, Human herpesvirus 3
ccuuaaaauuugu

SEQ ID NO: 1868166 - RNA, 18 nt, Human herpesvirus 3
ggcggaagauacaggcaa

SEQ ID NO: 1868167 - RNA, 16 nt, Human herpesvirus 3
uggcgcgcggacuguu

SEQ ID NO: 1868168 - RNA, 22 nt, Human herpesvirus 3
auaauucggcgcggaugcauuu

SEQ ID NO: 1868169 - RNA, 18 nt, Human herpesvirus 3
uccccguucgcugggugu

SEQ ID NO: 1868170 - RNA, 21 nt, Human herpesvirus 3
uaugaaaaaagugucugucug

SEQ ID NO: 1868171 - RNA, 19 nt, Human herpesvirus 3
cauaguuauuguauauaca

SEQ ID NO: 1868172 - RNA, 19 nt, Human herpesvirus 3
agauucgccuuuuacauga

SEQ ID NO: 1868173 - RNA, 18 nt, Human herpesvirus 3
augaacugccaauauaca

SEQ ID NO: 1868174 - RNA, 13 nt, Human herpesvirus 3
uccacacaacgcc

SEQ ID NO: 1868175 - RNA, 21 nt, Human herpesvirus 3
aagaaaacauugcagcguaca

SEQ ID NO: 1868176 - RNA, 20 nt, Human herpesvirus 3
ccagguacgcgucaaaaagc

SEQ ID NO: 1868177 - RNA, 14 nt, Human herpesvirus 3
uccgaauaaaugug

SEQ ID NO: 1868178 - RNA, 16 nt, Human herpesvirus 3
caucugcauuacagaa

SEQ ID NO: 1868179 - RNA, 19 nt, Human herpesvirus 3
acuuggcguguuaaacacu

SEQ ID NO: 1868180 - RNA, 20 nt, Human herpesvirus 3
acgagagcaguccaugguuu

SEQ ID NO: 1868181 - RNA, 17 nt, Human herpesvirus 3
cuccacuucgucugugg

SEQ ID NO: 1868182 - RNA, 15 nt, Human herpesvirus 3
uguauuauaugucac

SEQ ID NO: 1868183 - RNA, 19 nt, Human herpesvirus 3
cgcaugccccccucccuca

SEQ ID NO: 1868184 - RNA, 21 nt, Human herpesvirus 3
cccauccgagugaaucuuaaa

SEQ ID NO: 1868185 - RNA, 14 nt, Human herpesvirus 3
uuagcauccaaauu

SEQ ID NO: 1868186 - RNA, 15 nt, Human herpesvirus 3
ccaccagacacgcuc

SEQ ID NO: 1868187 - RNA, 13 nt, Human herpesvirus 3
acacgcggccugu

SEQ ID NO: 1868188 - RNA, 21 nt, Human herpesvirus 3
uaacguuuuaguaaaauacca

SEQ ID NO: 1868189 - RNA, 22 nt, Human herpesvirus 3
aaaucguuuaacaaaauagucu

SEQ ID NO: 1868190 - RNA, 18 nt, Human herpesvirus 3
auacauaaccgauuuacc

SEQ ID NO: 1868191 - RNA, 20 nt, Human herpesvirus 3
gauuccaucauaagcgcagu

SEQ ID NO: 1868192 - RNA, 20 nt, Human herpesvirus 3
uauaaacggccgaaaacgga

SEQ ID NO: 1868193 - RNA, 20 nt, Human herpesvirus 3
auuuauucucgcuugcagcu

SEQ ID NO: 1868194 - RNA, 23 nt, Human herpesvirus 3
gcgcguuuguuugucucgguuau

SEQ ID NO: 1868195 - RNA, 22 nt, Human herpesvirus 3
uuaagaccaacgguuggcuuaa

SEQ ID NO: 1868196 - RNA, 14 nt, Human herpesvirus 3
uggcagaagguuua

SEQ ID NO: 1868197 - RNA, 18 nt, Human herpesvirus 3
auugucccguaaacuaau

SEQ ID NO: 1868198 - RNA, 16 nt, Human herpesvirus 3
aauggucuaaauacuu

SEQ ID NO: 1868199 - RNA, 22 nt, Human herpesvirus 3
cagagaaaacgcgcgaaaugug

SEQ ID NO: 1868200 - RNA, 15 nt, Human herpesvirus 3
uguacaauugucugu

SEQ ID NO: 1868201 - RNA, 13 nt, Human herpesvirus 3
ugacaaaaugaca

SEQ ID NO: 1868202 - RNA, 22 nt, Human herpesvirus 3
acccuggacauugcggauccca

SEQ ID NO: 1868203 - RNA, 22 nt, Human herpesvirus 3
gcaucuggagaaccgcgucuau

SEQ ID NO: 1868204 - RNA, 17 nt, Human herpesvirus 3
cgccgucgcgcccaccu

SEQ ID NO: 1868205 - RNA, 14 nt, Human herpesvirus 3
cuugucaaaacaua

SEQ ID NO: 1868206 - RNA, 22 nt, Human herpesvirus 3
agaugguuaauaauagugacaa

SEQ ID NO: 1868207 - RNA, 16 nt, Human herpesvirus 3
uuccacacucuucaau

SEQ ID NO: 1868208 - RNA, 13 nt, Human herpesvirus 3
cgccacuggcgcg

SEQ ID NO: 1868209 - RNA, 15 nt, Human herpesvirus 3
agguuagauguguua

SEQ ID NO: 1868210 - RNA, 12 nt, Human herpesvirus 3
guuagacagaga

SEQ ID NO: 1868211 - RNA, 22 nt, Human herpesvirus 3
gcuucccgaaagcccgaucccg

SEQ ID NO: 1868212 - RNA, 17 nt, Human herpesvirus 3
cucgccuccacugcauu

SEQ ID NO: 1868213 - RNA, 14 nt, Human herpesvirus 3
cucccacccacugu

SEQ ID NO: 1868214 - RNA, 15 nt, Human herpesvirus 3
aaauugggggauuug

SEQ ID NO: 1868215 - RNA, 13 nt, Human herpesvirus 3
cggccgcuucccg

SEQ ID NO: 1868216 - RNA, 19 nt, Human herpesvirus 3
aacgucuagaacuguguau

SEQ ID NO: 1868217 - RNA, 15 nt, Human herpesvirus 3
uugcauuggaaguca

SEQ ID NO: 1868218 - RNA, 21 nt, Human herpesvirus 3
gugagggugaccggcgggguc

SEQ ID NO: 1868219 - RNA, 14 nt, Human herpesvirus 3
aauuaucgacugaa

SEQ ID NO: 1868220 - RNA, 16 nt, Human herpesvirus 3
cgaauuguucugggaa

SEQ ID NO: 1868221 - RNA, 12 nt, Human herpesvirus 3
uuuacaguaaac

SEQ ID NO: 1868222 - RNA, 13 nt, Human herpesvirus 3
gaagacuccagua

SEQ ID NO: 1868223 - RNA, 16 nt, Human herpesvirus 3
cgcgcaauguuuugaa

SEQ ID NO: 1868224 - RNA, 15 nt, Human herpesvirus 3
cuuuuaaagcaguac

SEQ ID NO: 1868225 - RNA, 15 nt, Human herpesvirus 3
aguuuuagcgguggu

SEQ ID NO: 1868226 - RNA, 16 nt, Human herpesvirus 3
uaccuauuucaugcuu

SEQ ID NO: 1868227 - RNA, 15 nt, Human herpesvirus 3
uuauuagaacguuua

SEQ ID NO: 1868228 - RNA, 22 nt, Human herpesvirus 3
cuucaaguuaaauaacauguca

SEQ ID NO: 1868229 - RNA, 22 nt, Human herpesvirus 3
gcgauggugaugaaaucagaga

SEQ ID NO: 1868230 - RNA, 19 nt, Human herpesvirus 3
ggagcguacugcagauaca

SEQ ID NO: 1868231 - RNA, 15 nt, Human herpesvirus 3
aagguguuucagugg

SEQ ID NO: 1868232 - RNA, 22 nt, Human herpesvirus 3
agacaguggcggauaacugccu

SEQ ID NO: 1868233 - RNA, 13 nt, Human herpesvirus 3
ucaaguugcaugu

SEQ ID NO: 1868234 - RNA, 13 nt, Human herpesvirus 3
caaugaaacagua

SEQ ID NO: 1868235 - RNA, 14 nt, Human herpesvirus 3
ugucugucugugcg

SEQ ID NO: 1868236 - RNA, 21 nt, Human herpesvirus 3
auuuuauauuaaauaaacuau

SEQ ID NO: 1868237 - RNA, 13 nt, Human herpesvirus 3
ccuauaggcuuua

SEQ ID NO: 1868238 - RNA, 21 nt, Human herpesvirus 3
auauuaacacgauuaacguug

SEQ ID NO: 1868239 - RNA, 19 nt, Human herpesvirus 3
uuuaugaaaaaagugucug

SEQ ID NO: 1868240 - RNA, 16 nt, Human herpesvirus 3
uggcaacgcuggcauu

SEQ ID NO: 1868241 - RNA, 22 nt, Human herpesvirus 3
aaucaaccacaccgguggaauu

SEQ ID NO: 1868242 - RNA, 20 nt, Human herpesvirus 3
cuuaaugguucauuguuuua

SEQ ID NO: 1868243 - RNA, 17 nt, Human herpesvirus 3
cgggcuggucggacccc

SEQ ID NO: 1868244 - RNA, 13 nt, Human herpesvirus 3
aaucuuuuacaac

SEQ ID NO: 1868245 - RNA, 15 nt, Human herpesvirus 3
uauccgacagagaaa

SEQ ID NO: 1868246 - RNA, 18 nt, Human herpesvirus 3
auacaccguguaacucga

SEQ ID NO: 1868247 - RNA, 19 nt, Human herpesvirus 3
gccuucggacggaugugcg

SEQ ID NO: 1868248 - RNA, 18 nt, Human herpesvirus 3
ggcgugaaagcuaccacc

SEQ ID NO: 1868249 - RNA, 17 nt, Human herpesvirus 3
agaugccgguauugcuu

SEQ ID NO: 1868250 - RNA, 15 nt, Human herpesvirus 3
auccaauuaaagccc

SEQ ID NO: 1868251 - RNA, 16 nt, Human herpesvirus 3
agccagcaauguuuua

SEQ ID NO: 1868252 - RNA, 21 nt, Human herpesvirus 3
aggggguauuuauacccgaua

SEQ ID NO: 1868253 - RNA, 21 nt, Human herpesvirus 3
cucacugcuauagccgucaga

SEQ ID NO: 1868254 - RNA, 14 nt, Human herpesvirus 3
guauuguguaauug

SEQ ID NO: 1868255 - RNA, 14 nt, Human herpesvirus 3
gauucuauauuaau

SEQ ID NO: 1868256 - RNA, 22 nt, Human herpesvirus 3
auuaccccgccauaaacagaga

SEQ ID NO: 1868257 - RNA, 13 nt, Human herpesvirus 3
cucgugucucugg

SEQ ID NO: 1868258 - RNA, 19 nt, Human herpesvirus 3
cuggacauguguuuaagua

SEQ ID NO: 1868259 - RNA, 23 nt, Human herpesvirus 3
agccaacgucgccaucuggagua

SEQ ID NO: 1868260 - RNA, 13 nt, Human herpesvirus 3
gguuaugcuuuuu

SEQ ID NO: 1868261 - RNA, 12 nt, Human herpesvirus 3
uuaccguacaac

SEQ ID NO: 1868262 - RNA, 17 nt, Human herpesvirus 3
uauaccuuaacucaacc

SEQ ID NO: 1868263 - RNA, 21 nt, Human herpesvirus 3
cuaacauuaacgcgcuacaac

SEQ ID NO: 1868264 - RNA, 21 nt, Human herpesvirus 3
cgagaagggggauuuacaaug

SEQ ID NO: 1868265 - RNA, 18 nt, Human herpesvirus 3
aaguguucuaaaacacug

SEQ ID NO: 1868266 - RNA, 15 nt, Human herpesvirus 3
ucaaaguauuuuccu

SEQ ID NO: 1868267 - RNA, 17 nt, Human herpesvirus 3
ugugguccauuaaaagu

SEQ ID NO: 1868268 - RNA, 21 nt, Human herpesvirus 3
ucccgccgucgcgcccaccuc

SEQ ID NO: 1868269 - RNA, 13 nt, Human herpesvirus 3
uaugaaucucugc

SEQ ID NO: 1868270 - RNA, 23 nt, Human herpesvirus 3
aacacuuggcguguuaaacacug

SEQ ID NO: 1868271 - RNA, 15 nt, Human herpesvirus 3
aguacuaaaaauccu

SEQ ID NO: 1868272 - RNA, 14 nt, Human herpesvirus 3
accuuuucgccuua

SEQ ID NO: 1868273 - RNA, 14 nt, Human herpesvirus 3
uacaaguacaaccc

SEQ ID NO: 1868274 - RNA, 16 nt, Human herpesvirus 3
gaugguaguuaccaaa

SEQ ID NO: 1868275 - RNA, 15 nt, Human herpesvirus 3
cuccuuuucucguga

SEQ ID NO: 1868276 - RNA, 14 nt, Human herpesvirus 3
auuuauaaaacacu

SEQ ID NO: 1868277 - RNA, 16 nt, Human herpesvirus 3
auuaugaacaguuuau

SEQ ID NO: 1868278 - RNA, 23 nt, Human herpesvirus 3
agcugaaaaucgucccauuuaaa

SEQ ID NO: 1868279 - RNA, 17 nt, Human herpesvirus 3
guccaaguccaaucaaa

SEQ ID NO: 1868280 - RNA, 16 nt, Human herpesvirus 3
uaauaaaucuuacgua

SEQ ID NO: 1868281 - RNA, 14 nt, Human herpesvirus 3
aucagagaagcuau

SEQ ID NO: 1868282 - RNA, 20 nt, Human herpesvirus 3
gagcgccacuggcgcgcgga

SEQ ID NO: 1868283 - RNA, 19 nt, Human herpesvirus 3
ucacgcgucuuguuuuuau

SEQ ID NO: 1868284 - RNA, 21 nt, Human herpesvirus 3
uuaaagccccucgaagaacaa

SEQ ID NO: 1868285 - RNA, 23 nt, Human herpesvirus 3
uaaaaaauaccuuuuucaugcuu

SEQ ID NO: 1868286 - RNA, 21 nt, Human herpesvirus 3
ucugcgaagcugccgucaaug

SEQ ID NO: 1868287 - RNA, 15 nt, Human herpesvirus 3
aucggcauuaacaac

SEQ ID NO: 1868288 - RNA, 16 nt, Human herpesvirus 3
cguccuucaacacacc

SEQ ID NO: 1868289 - RNA, 19 nt, Human herpesvirus 3
uacacgauucggaaugccc

SEQ ID NO: 1868290 - RNA, 17 nt, Human herpesvirus 3
aaacgcgccaaacauug

SEQ ID NO: 1868291 - RNA, 15 nt, Human herpesvirus 3
aguuuaggguuuaaa

SEQ ID NO: 1868292 - RNA, 22 nt, Human herpesvirus 3
gacuccaagggacccgcagccc

SEQ ID NO: 1868293 - RNA, 22 nt, Human herpesvirus 3
aagaauuuauccgguugaaaac

SEQ ID NO: 1868294 - RNA, 16 nt, Human herpesvirus 3
cuugaaucugucuuua

SEQ ID NO: 1868295 - RNA, 21 nt, Human herpesvirus 3
cuuguuuuuauuuaauaggca

SEQ ID NO: 1868296 - RNA, 20 nt, Human herpesvirus 3
ccagauguacacccagcugu

SEQ ID NO: 1868297 - RNA, 15 nt, Human herpesvirus 3
ucgcguacccccuuc

SEQ ID NO: 1868298 - RNA, 12 nt, Human herpesvirus 3
gccgucgcgccc

SEQ ID NO: 1868299 - RNA, 13 nt, Human herpesvirus 3
aggucuacagcac

SEQ ID NO: 1868300 - RNA, 18 nt, Human herpesvirus 3
uguaauucgugugcaaua

SEQ ID NO: 1868301 - RNA, 18 nt, Human herpesvirus 3
acuuuguuugcugcagac

SEQ ID NO: 1868302 - RNA, 16 nt, Human herpesvirus 3
auggccgucuugaauc

SEQ ID NO: 1868303 - RNA, 14 nt, Human herpesvirus 3
ucauacgcauuuac

SEQ ID NO: 1868304 - RNA, 15 nt, Human herpesvirus 3
aauugcgcgaguucc

SEQ ID NO: 1868305 - RNA, 23 nt, Human herpesvirus 3
agacuuuaugaauuugcuaccag

SEQ ID NO: 1868306 - RNA, 17 nt, Human herpesvirus 3
uugggggauuugggaga

SEQ ID NO: 1868307 - RNA, 20 nt, Human herpesvirus 3
gguuaaggcgaaaagguuuc

SEQ ID NO: 1868308 - RNA, 21 nt, Human herpesvirus 3
cauucagcuuacaguccagug

SEQ ID NO: 1868309 - RNA, 22 nt, Human herpesvirus 3
ggcgggcuggucggaccccccc

SEQ ID NO: 1868310 - RNA, 20 nt, Human herpesvirus 3
cagauguacacccagcuguc

SEQ ID NO: 1868311 - RNA, 16 nt, Human herpesvirus 3
aaugguucauuguuuu

SEQ ID NO: 1868312 - RNA, 19 nt, Human herpesvirus 3
acccuugccgcguggaaca

SEQ ID NO: 1868313 - RNA, 17 nt, Human herpesvirus 3
gugguaccaaaaacaca

SEQ ID NO: 1868314 - RNA, 14 nt, Human herpesvirus 3
uacuacauugaaca

SEQ ID NO: 1868315 - RNA, 24 nt, Human herpesvirus 3
ucaccaaacggguuuugggugcau

SEQ ID NO: 1868316 - RNA, 16 nt, Human herpesvirus 3
auuacgaguacuaaaa

SEQ ID NO: 1868317 - RNA, 11 nt, Human herpesvirus 3
ugguuaacacc

SEQ ID NO: 1868318 - RNA, 14 nt, Human herpesvirus 3
augcuuguaaaaca

SEQ ID NO: 1868319 - RNA, 17 nt, Human herpesvirus 3
caugcuuguaaaacaua

SEQ ID NO: 1868320 - RNA, 13 nt, Human herpesvirus 3
gagacauaaaagu

SEQ ID NO: 1868321 - RNA, 19 nt, Human herpesvirus 3
cauggccgugaauggugaa

SEQ ID NO: 1868322 - RNA, 14 nt, Human herpesvirus 3
cccggcggaccccg

SEQ ID NO: 1868323 - RNA, 22 nt, Human herpesvirus 3
augcaccgguccaacacuccgc

SEQ ID NO: 1868324 - RNA, 17 nt, Human herpesvirus 3
auggugcgauuuaacca

SEQ ID NO: 1868325 - RNA, 21 nt, Human herpesvirus 3
gcgguauauuaauuaacuggc

SEQ ID NO: 1868326 - RNA, 18 nt, Human herpesvirus 3
uguaaaaaccauggacag

SEQ ID NO: 1868327 - RNA, 14 nt, Human herpesvirus 3
uuaaugguucauug

SEQ ID NO: 1868328 - RNA, 23 nt, Human herpesvirus 3
gugagcgccacuggcgcgcggac

SEQ ID NO: 1868329 - RNA, 23 nt, Human herpesvirus 3
aaccauagacuguucuacugacu

SEQ ID NO: 1868330 - RNA, 22 nt, Human herpesvirus 3
augcggugcuguuugaagcggc

SEQ ID NO: 1868331 - RNA, 15 nt, Human herpesvirus 3
auuuaggaaccgaac

SEQ ID NO: 1868332 - RNA, 18 nt, Human herpesvirus 3
uguguuuuuaucugcaau

SEQ ID NO: 1868333 - RNA, 23 nt, Human herpesvirus 3
cgccaguugacuuuguuugcugc

SEQ ID NO: 1868334 - RNA, 15 nt, Human herpesvirus 3
ccagguacgcgucaa

SEQ ID NO: 1868335 - RNA, 18 nt, Human herpesvirus 3
aguguucuaaaacacugu

SEQ ID NO: 1868336 - RNA, 16 nt, Human herpesvirus 3
ugaccgauccccgggu

SEQ ID NO: 1868337 - RNA, 17 nt, Human herpesvirus 3
cgugagcgccacuggcg

SEQ ID NO: 1868338 - RNA, 15 nt, Human herpesvirus 3
uguccggacuccagc

SEQ ID NO: 1868339 - RNA, 21 nt, Human herpesvirus 3
aucccgcggugagcacccggg

SEQ ID NO: 1868340 - RNA, 15 nt, Human herpesvirus 3
cgggucuuaucuaua

SEQ ID NO: 1868341 - RNA, 20 nt, Human herpesvirus 3
caaauuaacccaagacgaca

SEQ ID NO: 1868342 - RNA, 16 nt, Human herpesvirus 3
ccuuuucucgugagcg

SEQ ID NO: 1868343 - RNA, 17 nt, Human herpesvirus 3
ucaugaacaaacacucu

SEQ ID NO: 1868344 - RNA, 19 nt, Human herpesvirus 3
gacucugcgaugcauuaac

SEQ ID NO: 1868345 - RNA, 16 nt, Human herpesvirus 3
cuccaagggacccgca

SEQ ID NO: 1868346 - RNA, 23 nt, Human herpesvirus 3
aaaaacguuucugguguauguuu

SEQ ID NO: 1868347 - RNA, 13 nt, Human herpesvirus 3
cucuguuacauuc

SEQ ID NO: 1868348 - RNA, 18 nt, Human herpesvirus 3
cauuuuauagacacgcua

SEQ ID NO: 1868349 - RNA, 17 nt, Human herpesvirus 3
gauuacgcguugugaua

SEQ ID NO: 1868350 - RNA, 18 nt, Human herpesvirus 3
ggaagaguuagcauccaa

SEQ ID NO: 1868351 - RNA, 15 nt, Human herpesvirus 3
guuggacaaaggugc

SEQ ID NO: 1868352 - RNA, 14 nt, Human herpesvirus 3
aguaacuuaacaaa

SEQ ID NO: 1868353 - RNA, 19 nt, Human herpesvirus 3
ucauacgccgacaugccug

SEQ ID NO: 1868354 - RNA, 19 nt, Human herpesvirus 3
aacuuuacuguuagggaua

SEQ ID NO: 1868355 - RNA, 18 nt, Human herpesvirus 3
ugcauuacccuaucccag

SEQ ID NO: 1868356 - RNA, 12 nt, Human herpesvirus 3
ugcaagcucgau

SEQ ID NO: 1868357 - RNA, 24 nt, Human herpesvirus 3
ucugucgaugauacacauaugcac

SEQ ID NO: 1868358 - RNA, 21 nt, Human herpesvirus 3
cguuuagccguacagauuaaa

SEQ ID NO: 1868359 - RNA, 19 nt, Human herpesvirus 3
uaaauccguaucucggagc

SEQ ID NO: 1868360 - RNA, 14 nt, Human herpesvirus 3
ucugauugguugau

SEQ ID NO: 1868361 - RNA, 16 nt, Human herpesvirus 3
ucuucaaauuaaaagc

SEQ ID NO: 1868362 - RNA, 16 nt, Human herpesvirus 3
ucaucuggguggcagc

SEQ ID NO: 1868363 - RNA, 18 nt, Human herpesvirus 3
ugguccauuaaaaguuua

SEQ ID NO: 1868364 - RNA, 23 nt, Human herpesvirus 3
ucuaucggacauaugucugcucu

SEQ ID NO: 1868365 - RNA, 18 nt, Human herpesvirus 3
cauguuuucccaugucua

SEQ ID NO: 1868366 - RNA, 17 nt, Human herpesvirus 3
acucacguuuguguugu

SEQ ID NO: 1868367 - RNA, 19 nt, Human herpesvirus 3
uuaacauaccccaggccuu

SEQ ID NO: 1868368 - RNA, 14 nt, Human herpesvirus 3
uaagacguugcaua

SEQ ID NO: 1868369 - RNA, 17 nt, Human herpesvirus 3
gguguucuauuucccaa

SEQ ID NO: 1868370 - RNA, 21 nt, Human herpesvirus 3
guacaauacguaaaugucacu

SEQ ID NO: 1868371 - RNA, 19 nt, Human herpesvirus 3
ugcauaacguugcggugau

SEQ ID NO: 1868372 - RNA, 19 nt, Human herpesvirus 3
cagauguacacccagcugu

SEQ ID NO: 1868373 - RNA, 16 nt, Human herpesvirus 3
acugcagauacagcau

SEQ ID NO: 1868374 - RNA, 15 nt, Human herpesvirus 3
cagacaccaugacgg

SEQ ID NO: 1868375 - RNA, 21 nt, Human herpesvirus 3
agaucgucguuuaaagccccu

SEQ ID NO: 1868376 - RNA, 22 nt, Human herpesvirus 3
ucaaaacauacuaauuuguauu

SEQ ID NO: 1868377 - RNA, 13 nt, Human herpesvirus 3
caaggcguaaaau

SEQ ID NO: 1868378 - RNA, 20 nt, Human herpesvirus 3
aacauaccccaggccuugaa

SEQ ID NO: 1868379 - RNA, 16 nt, Human herpesvirus 3
uacaccggauaaaagc

SEQ ID NO: 1868380 - RNA, 12 nt, Human herpesvirus 3
cuccccccgcga

SEQ ID NO: 1868381 - RNA, 17 nt, Human herpesvirus 3
ccacgugagcuugcaag

SEQ ID NO: 1868382 - RNA, 18 nt, Human herpesvirus 3
aucucuucauauguaauu

SEQ ID NO: 1868383 - RNA, 22 nt, Human herpesvirus 3
uagaugacacgaauaggugaua

SEQ ID NO: 1868384 - RNA, 17 nt, Human herpesvirus 3
uuuaaaagccguucugu

SEQ ID NO: 1868385 - RNA, 14 nt, Human herpesvirus 3
augaaaucagagaa

SEQ ID NO: 1868386 - RNA, 13 nt, Human herpesvirus 3
caccucggccgcu

SEQ ID NO: 1868387 - RNA, 14 nt, Human herpesvirus 3
acucugcgaugcau

SEQ ID NO: 1868388 - RNA, 20 nt, Human herpesvirus 3
uagcauccaaauuaacccaa

SEQ ID NO: 1868389 - RNA, 14 nt, Human herpesvirus 3
gccgagaacagugg

SEQ ID NO: 1868390 - RNA, 17 nt, Human herpesvirus 3
ucuaacccggugacaga

SEQ ID NO: 1868391 - RNA, 17 nt, Human herpesvirus 3
gcccacacaaucagaag

SEQ ID NO: 1868392 - RNA, 17 nt, Human herpesvirus 3
cguacauauccugcgca

SEQ ID NO: 1868393 - RNA, 22 nt, Human herpesvirus 3
ccccauacuccgauacccugga

SEQ ID NO: 1868394 - RNA, 22 nt, Human herpesvirus 3
aacucaaccgccguuguggaaa

SEQ ID NO: 1868395 - RNA, 12 nt, Human herpesvirus 3
ugaaagcuacca

SEQ ID NO: 1868396 - RNA, 15 nt, Human herpesvirus 3
uggaucagaaagauu

SEQ ID NO: 1868397 - RNA, 20 nt, Human herpesvirus 3
cuuaaaccgugugugcggag

SEQ ID NO: 1868398 - RNA, 21 nt, Human herpesvirus 3
gaauuuauccgguugaaaaca

SEQ ID NO: 1868399 - RNA, 15 nt, Human herpesvirus 3
cccaccuccccgcgc

SEQ ID NO: 1868400 - RNA, 20 nt, Human herpesvirus 3
uuaucccaacugauuacauu

SEQ ID NO: 1868401 - RNA, 19 nt, Human herpesvirus 3
guuguuaauaaaagcggaa

SEQ ID NO: 1868402 - RNA, 24 nt, Human herpesvirus 3
acuugggcggagacaauuaaccga

SEQ ID NO: 1868403 - RNA, 20 nt, Human herpesvirus 3
uuuuuaugaaaaaagugucu

SEQ ID NO: 1868404 - RNA, 21 nt, Human herpesvirus 3
ucagaaagauugcagucauuu

SEQ ID NO: 1868405 - RNA, 21 nt, Human herpesvirus 3
uguuguagccacaauuuacau

SEQ ID NO: 1868406 - RNA, 20 nt, Human herpesvirus 3
cgggcgggcgacgggcgggc

SEQ ID NO: 1868407 - RNA, 23 nt, Human herpesvirus 3
aguggaccuuugcaaccugguca

SEQ ID NO: 1868408 - RNA, 19 nt, Human herpesvirus 3
uccccuccuuuucucguga

SEQ ID NO: 1868409 - RNA, 21 nt, Human herpesvirus 3
aggguggacguuuuuccacaa

SEQ ID NO: 1868410 - RNA, 17 nt, Human herpesvirus 3
ccuccuuuucucgugag

SEQ ID NO: 1868411 - RNA, 13 nt, Human herpesvirus 3
uuauuuugaacau

SEQ ID NO: 1868412 - RNA, 21 nt, Human herpesvirus 3
caauuggccguuuguaucaau

SEQ ID NO: 1868413 - RNA, 21 nt, Human herpesvirus 3
cgucuugcgauacgaugauuu

SEQ ID NO: 1868414 - RNA, 16 nt, Human herpesvirus 3
agggacccgcagccca

SEQ ID NO: 1868415 - RNA, 23 nt, Human herpesvirus 3
ccagacucucgcggcuucuguaa

SEQ ID NO: 1868416 - RNA, 17 nt, Human herpesvirus 3
cugauucggguaaaaca

SEQ ID NO: 1868417 - RNA, 17 nt, Human herpesvirus 3
gcgauacgaugauuuuc

SEQ ID NO: 1868418 - RNA, 13 nt, Human herpesvirus 3
acaacccacgcua

SEQ ID NO: 1868419 - RNA, 12 nt, Human herpesvirus 3
caaacagcacca

SEQ ID NO: 1868420 - RNA, 14 nt, Human herpesvirus 3
ucugaccauuuacc

SEQ ID NO: 1868421 - RNA, 20 nt, Human herpesvirus 3
aaacauugcagcguacaagu

SEQ ID NO: 1868422 - RNA, 24 nt, Human herpesvirus 3
uacuaauuuguauuuuuaaucauu

SEQ ID NO: 1868423 - RNA, 10 nt, Human herpesvirus 3
uugaaccacu

SEQ ID NO: 1868424 - RNA, 17 nt, Human herpesvirus 3
uccguuuaucccccuuc

SEQ ID NO: 1868425 - RNA, 15 nt, Human herpesvirus 3
aacacugucagaaac

SEQ ID NO: 1868426 - RNA, 23 nt, Human herpesvirus 3
ucgcgcccaccucggccgcuucc

SEQ ID NO: 1868427 - RNA, 21 nt, Human herpesvirus 3
cuucaaguuaaauaacauguc

SEQ ID NO: 1868428 - RNA, 20 nt, Human herpesvirus 3
cgucauauuacauuaacggu

SEQ ID NO: 1868429 - RNA, 13 nt, Human herpesvirus 3
uggacggcucccg

SEQ ID NO: 1868430 - RNA, 19 nt, Human herpesvirus 3
cuguuguugcuaguauuuu

SEQ ID NO: 1868431 - RNA, 21 nt, Human herpesvirus 3
gacgcgugaaauguaacuaga

SEQ ID NO: 1868432 - RNA, 23 nt, Human herpesvirus 3
acguauguucugugggacagcua

SEQ ID NO: 1868433 - RNA, 20 nt, Human herpesvirus 3
auuuggaaugggagcucuuu

SEQ ID NO: 1868434 - RNA, 15 nt, Human herpesvirus 3
agcaucuauaugauu

SEQ ID NO: 1868435 - RNA, 19 nt, Human herpesvirus 3
acgggcgggcuggucggac

SEQ ID NO: 1868436 - RNA, 19 nt, Human herpesvirus 3
cccgcggugagcacccggg

SEQ ID NO: 1868437 - RNA, 14 nt, Human herpesvirus 3
ggcuucaccagagu

SEQ ID NO: 1868438 - RNA, 14 nt, Human herpesvirus 3
gccgcuucccgaaa

SEQ ID NO: 1868439 - RNA, 15 nt, Human herpesvirus 3
cauuuccauuuuuag

SEQ ID NO: 1868440 - RNA, 20 nt, Human herpesvirus 3
uccccuccuuuucucgugag

SEQ ID NO: 1868441 - RNA, 19 nt, Human herpesvirus 3
agaugaucugguaaauguu

SEQ ID NO: 1868442 - RNA, 23 nt, Human herpesvirus 3
cuaauaaaaauguaauauugugg

SEQ ID NO: 1868443 - RNA, 15 nt, Human herpesvirus 3
auaugauucaaguaa

SEQ ID NO: 1868444 - RNA, 13 nt, Human herpesvirus 3
ucaacugcuuuua

SEQ ID NO: 1868445 - RNA, 19 nt, Human herpesvirus 3
aacgugauuugcccacacc

SEQ ID NO: 1868446 - RNA, 14 nt, Human herpesvirus 3
aauaaccccccccc

SEQ ID NO: 1868447 - RNA, 22 nt, Human herpesvirus 3
cuguaugcguuaccccauguca

SEQ ID NO: 1868448 - RNA, 21 nt, Human herpesvirus 3
gcaucccccauuguaugaauu

SEQ ID NO: 1868449 - RNA, 11 nt, Human herpesvirus 3
uguaauuguaa

SEQ ID NO: 1868450 - RNA, 21 nt, Human herpesvirus 3
uuguaaaccacucaacguuuu

SEQ ID NO: 1868451 - RNA, 22 nt, Human herpesvirus 3
aaagaacucugaguucaaagca

SEQ ID NO: 1868452 - RNA, 13 nt, Human herpesvirus 3
ucauuuauuacca

SEQ ID NO: 1868453 - RNA, 17 nt, Human herpesvirus 3
gaucauuuuuugaaaca

SEQ ID NO: 1868454 - RNA, 21 nt, Human herpesvirus 3
auugguugauuggguuauaaa

SEQ ID NO: 1868455 - RNA, 17 nt, Human herpesvirus 3
uugugaucuauuaacag

SEQ ID NO: 1868456 - RNA, 16 nt, Human herpesvirus 3
uauuugugaagacuuu

SEQ ID NO: 1868457 - RNA, 18 nt, Human herpesvirus 3
gccgucgcgcccaccucg

SEQ ID NO: 1868458 - RNA, 14 nt, Human herpesvirus 3
cgggcgggcugguc

SEQ ID NO: 1868459 - RNA, 17 nt, Human herpesvirus 3
auaugucaacauuuaca

SEQ ID NO: 1868460 - RNA, 17 nt, Human herpesvirus 3
uauguaacguuuguaaa

SEQ ID NO: 1868461 - RNA, 16 nt, Human herpesvirus 3
uguuuuuaucugcaau

SEQ ID NO: 1868462 - RNA, 23 nt, Human herpesvirus 3
aucagccgcucgcugagcuccag

SEQ ID NO: 1868463 - RNA, 14 nt, Human herpesvirus 3
acaauuaacacaga

SEQ ID NO: 1868464 - RNA, 14 nt, Human herpesvirus 3
gccgcuacccgaaa

SEQ ID NO: 1868465 - RNA, 15 nt, Human herpesvirus 3
ccccaggccuugaaa

SEQ ID NO: 1868466 - RNA, 17 nt, Human herpesvirus 3
cguguuacuuggaaaca

SEQ ID NO: 1868467 - RNA, 18 nt, Human herpesvirus 3
auauguucagcagcuuaa

SEQ ID NO: 1868468 - RNA, 19 nt, Human herpesvirus 3
cugggcgcccggcggaccc

SEQ ID NO: 1868469 - RNA, 14 nt, Human herpesvirus 3
auuuuauauacaaa

SEQ ID NO: 1868470 - RNA, 14 nt, Human herpesvirus 3
augccacauuuacc

SEQ ID NO: 1868471 - RNA, 22 nt, Human herpesvirus 3
cgauauuguauuguaguacagg

SEQ ID NO: 1868472 - RNA, 11 nt, Human herpesvirus 3
uugcuggcugg

SEQ ID NO: 1868473 - RNA, 17 nt, Human herpesvirus 3
auuagugucacuauaaa

SEQ ID NO: 1868474 - RNA, 23 nt, Human herpesvirus 3
gugcaucgcauaggguguuauaa

SEQ ID NO: 1868475 - RNA, 19 nt, Human herpesvirus 3
aacauacauuggggauuca

SEQ ID NO: 1868476 - RNA, 13 nt, Human herpesvirus 3
caaacagcaccaa

SEQ ID NO: 1868477 - RNA, 18 nt, Human herpesvirus 3
acaccuuccgguacccca

SEQ ID NO: 1868478 - RNA, 19 nt, Human herpesvirus 3
ugacggcgacuuuaagaau

SEQ ID NO: 1868479 - RNA, 13 nt, Human herpesvirus 3
gauaauguccuag

SEQ ID NO: 1868480 - RNA, 15 nt, Human herpesvirus 3
agcaaaauaaaacaa

SEQ ID NO: 1868481 - RNA, 19 nt, Human herpesvirus 3
uggacaucgcugaugccag

SEQ ID NO: 1868482 - RNA, 14 nt, Human herpesvirus 3
uguauucuggugau

SEQ ID NO: 1868483 - RNA, 14 nt, Human herpesvirus 3
uguuuuaauuccaa

SEQ ID NO: 1868484 - RNA, 19 nt, Human herpesvirus 3
uaacgaucgcguguauaca

SEQ ID NO: 1868485 - RNA, 18 nt, Human herpesvirus 3
gccgugcggucucccgga

SEQ ID NO: 1868486 - RNA, 22 nt, Human herpesvirus 3
uaggcgaccgcgggucaaugga

SEQ ID NO: 1868487 - RNA, 15 nt, Human herpesvirus 3
gagcucccauuccaa

SEQ ID NO: 1868488 - RNA, 17 nt, Human herpesvirus 3
cacuuacaggacaaacc

SEQ ID NO: 1868489 - RNA, 17 nt, Human herpesvirus 3
gacgggcgggcuggucg

SEQ ID NO: 1868490 - RNA, 19 nt, Human herpesvirus 3
gaaaaucuauuaucaggag

SEQ ID NO: 1868491 - RNA, 19 nt, Human herpesvirus 3
aucuucacgcucaaugaac

SEQ ID NO: 1868492 - RNA, 15 nt, Human herpesvirus 3
auuaaagguuaaauu

SEQ ID NO: 1868493 - RNA, 22 nt, Human herpesvirus 3
ucuacaauauuguagaacuaac

SEQ ID NO: 1868494 - RNA, 16 nt, Human herpesvirus 3
uaggggaugggggucg

SEQ ID NO: 1868495 - RNA, 13 nt, Human herpesvirus 3
uuuaaaaauaccu

SEQ ID NO: 1868496 - RNA, 14 nt, Human herpesvirus 3
aacaccgcugugcu

SEQ ID NO: 1868497 - RNA, 16 nt, Human herpesvirus 3
agaucaauggcgguga

SEQ ID NO: 1868498 - RNA, 22 nt, Human herpesvirus 3
cuacuauuugugaagacuuuau

SEQ ID NO: 1868499 - RNA, 18 nt, Human herpesvirus 3
cuggcauuuccaaacaca

SEQ ID NO: 1868500 - RNA, 13 nt, Human herpesvirus 3
gcgugguuauuac

SEQ ID NO: 1868501 - RNA, 17 nt, Human herpesvirus 3
uacguaaaugucacuau

SEQ ID NO: 1868502 - RNA, 17 nt, Human herpesvirus 3
cauaguuauuguauaua

SEQ ID NO: 1868503 - RNA, 20 nt, Human herpesvirus 3
ccgggauuuccacuuacagg

SEQ ID NO: 1868504 - RNA, 17 nt, Human herpesvirus 3
uggcgcgcggacuguuu

SEQ ID NO: 1868505 - RNA, 21 nt, Human herpesvirus 3
aucaugguugguuacugugaa

SEQ ID NO: 1868506 - RNA, 13 nt, Human herpesvirus 3
gcuccguguaugu

SEQ ID NO: 1868507 - RNA, 17 nt, Human herpesvirus 3
caugcauugcucgcgua

SEQ ID NO: 1868508 - RNA, 14 nt, Human herpesvirus 3
cguguccccucugg

SEQ ID NO: 1868509 - RNA, 17 nt, Human herpesvirus 3
uagguucggcaaaucua

SEQ ID NO: 1868510 - RNA, 22 nt, Human herpesvirus 3
uguacaacacaaagggccucua

SEQ ID NO: 1868511 - RNA, 17 nt, Human herpesvirus 3
augcaacccugucauca

SEQ ID NO: 1868512 - RNA, 15 nt, Human herpesvirus 3
augccauuugagaua

SEQ ID NO: 1868513 - RNA, 20 nt, Human herpesvirus 3
aggcugccgccuuugcgaug

SEQ ID NO: 1868514 - RNA, 23 nt, Human herpesvirus 3
gcaacuacuuacaacccccgcgg

SEQ ID NO: 1868515 - RNA, 16 nt, Human herpesvirus 3
uucugggcgcccggcg

SEQ ID NO: 1868516 - RNA, 19 nt, Human herpesvirus 3
ugcgauaacugcgauaaga

SEQ ID NO: 1868517 - RNA, 12 nt, Human herpesvirus 3
auuauacauaac

SEQ ID NO: 1868518 - RNA, 18 nt, Human herpesvirus 3
gaaaacgcgcgaaaugug

SEQ ID NO: 1868519 - RNA, 20 nt, Human herpesvirus 3
caacccccgcggcuuccgaa

SEQ ID NO: 1868520 - RNA, 16 nt, Human herpesvirus 3
agcaaaauucagaaac

SEQ ID NO: 1868521 - RNA, 22 nt, Human herpesvirus 3
ggguacaaacgcgcaauguuuu

SEQ ID NO: 1868522 - RNA, 18 nt, Human herpesvirus 3
agaaucuccuaacuauaa

SEQ ID NO: 1868523 - RNA, 17 nt, Human herpesvirus 3
gguucagcggacgcugc

SEQ ID NO: 1868524 - RNA, 22 nt, Human herpesvirus 3
uaauuccaauauuuuguuaaua

SEQ ID NO: 1868525 - RNA, 13 nt, Human herpesvirus 3
cgcucucgcuguu

SEQ ID NO: 1868526 - RNA, 23 nt, Human herpesvirus 3
uugggagggggaaggaaaugccu

SEQ ID NO: 1868527 - RNA, 16 nt, Human herpesvirus 3
gccgugugguaugaau

SEQ ID NO: 1868528 - RNA, 22 nt, Human herpesvirus 3
guugcacguaacaagcucguug

SEQ ID NO: 1868529 - RNA, 15 nt, Human herpesvirus 3
aaaaagugucugucu

SEQ ID NO: 1868530 - RNA, 20 nt, Human herpesvirus 3
uaaaaacggauauuaacacg

SEQ ID NO: 1868531 - RNA, 15 nt, Human herpesvirus 3
aaucgucuaacauua

SEQ ID NO: 1868532 - RNA, 15 nt, Human herpesvirus 3
auaugucaacauuua

SEQ ID NO: 1868533 - RNA, 21 nt, Human herpesvirus 3
uuuuacgucauuucucccguu

SEQ ID NO: 1868534 - RNA, 13 nt, Human herpesvirus 3
ggccgcuucccga

SEQ ID NO: 1868535 - RNA, 16 nt, Human herpesvirus 3
cauuccaacuggaaau

SEQ ID NO: 1868536 - RNA, 13 nt, Human herpesvirus 3
cagaucccacccc

SEQ ID NO: 1868537 - RNA, 18 nt, Human herpesvirus 3
uuaauuccaauauuuugu

SEQ ID NO: 1868538 - RNA, 18 nt, Human herpesvirus 3
accgguaccaugggagac

SEQ ID NO: 1868539 - RNA, 17 nt, Human herpesvirus 3
gucgugugcuccuugga

SEQ ID NO: 1868540 - RNA, 16 nt, Human herpesvirus 3
agguccauuuaacaau

SEQ ID NO: 1868541 - RNA, 18 nt, Human herpesvirus 3
aaagguauacuuggagau

SEQ ID NO: 1868542 - RNA, 16 nt, Human herpesvirus 3
gcaguccaugguuuua

SEQ ID NO: 1868543 - RNA, 22 nt, Human herpesvirus 3
guacauaguuauuguauauaca

SEQ ID NO: 1868544 - RNA, 22 nt, Human herpesvirus 3
aagcgcuccgcccuaaauuaca

SEQ ID NO: 1868545 - RNA, 20 nt, Human herpesvirus 3
cauacuaauuuguauuuuua

SEQ ID NO: 1868546 - RNA, 23 nt, Human herpesvirus 3
cccuggagacggcugcugccgag

SEQ ID NO: 1868547 - RNA, 15 nt, Human herpesvirus 3
uaacagugccagugc

SEQ ID NO: 1868548 - RNA, 23 nt, Human herpesvirus 3
caaagaacucugaguucaaagca

SEQ ID NO: 1868549 - RNA, 11 nt, Human herpesvirus 3
uuugaagccac

SEQ ID NO: 1868550 - RNA, 15 nt, Human herpesvirus 3
aggcgaaaagguuuc

SEQ ID NO: 1868551 - RNA, 17 nt, Human herpesvirus 3
ugcaucguagguauaaa

SEQ ID NO: 1868552 - RNA, 17 nt, Human herpesvirus 3
gccuguuggugggugag

SEQ ID NO: 1868553 - RNA, 12 nt, Human herpesvirus 3
cacgguguauau

SEQ ID NO: 1868554 - RNA, 18 nt, Human herpesvirus 3
ccuggccccuugaaccac

SEQ ID NO: 1868555 - RNA, 19 nt, Human herpesvirus 3
acacuuggcguguuaaaca

SEQ ID NO: 1868556 - RNA, 14 nt, Human herpesvirus 3
caacgaguguaugc

SEQ ID NO: 1868557 - RNA, 15 nt, Human herpesvirus 3
caauauuuauacaag

SEQ ID NO: 1868558 - RNA, 22 nt, Human herpesvirus 3
cgccaaaauggaugcaagaaac

SEQ ID NO: 1868559 - RNA, 16 nt, Human herpesvirus 3
aagcagacaucccucg

SEQ ID NO: 1868560 - RNA, 17 nt, Human herpesvirus 3
acuguacagcugagaug

SEQ ID NO: 1868561 - RNA, 14 nt, Human herpesvirus 3
aucacguccggguu

SEQ ID NO: 1868562 - RNA, 13 nt, Human herpesvirus 3
auaggugucuuca

SEQ ID NO: 1868563 - RNA, 12 nt, Human herpesvirus 3
auagcugucacu

SEQ ID NO: 1868564 - RNA, 18 nt, Human herpesvirus 3
agguacgcgucaaaaagc

SEQ ID NO: 1868565 - RNA, 16 nt, Human herpesvirus 3
uagauuuaaaaccaau

SEQ ID NO: 1868566 - RNA, 17 nt, Human herpesvirus 3
auacuaauuuguauuuu

SEQ ID NO: 1868567 - RNA, 16 nt, Human herpesvirus 3
acguagcaaagcuaca

SEQ ID NO: 1868568 - RNA, 14 nt, Human herpesvirus 3
uguuaaacaaacag

SEQ ID NO: 1868569 - RNA, 18 nt, Human herpesvirus 3
cgaauguuggaaacuguu

SEQ ID NO: 1868570 - RNA, 12 nt, Human herpesvirus 3
cucguauauaca

SEQ ID NO: 1868571 - RNA, 17 nt, Human herpesvirus 3
cauucagcuuacagucc

SEQ ID NO: 1868572 - RNA, 15 nt, Human herpesvirus 3
auacacauccuggac

SEQ ID NO: 1868573 - RNA, 17 nt, Human herpesvirus 3
cgugucacgacaaaaac

SEQ ID NO: 1868574 - RNA, 17 nt, Human herpesvirus 3
uacaggcaacugcaaac

SEQ ID NO: 1868575 - RNA, 11 nt, Human herpesvirus 3
acuuauccauu

SEQ ID NO: 1868576 - RNA, 17 nt, Human herpesvirus 3
aaccggguggguggcau

SEQ ID NO: 1868577 - RNA, 20 nt, Human herpesvirus 3
cacggaaggcgugaaagcua

SEQ ID NO: 1868578 - RNA, 15 nt, Human herpesvirus 3
caacugacagaaacu

SEQ ID NO: 1868579 - RNA, 14 nt, Human herpesvirus 3
cgagcaugugcaac

SEQ ID NO: 1868580 - RNA, 21 nt, Human herpesvirus 3
auaugagccguauaacccacu

SEQ ID NO: 1868581 - RNA, 17 nt, Human herpesvirus 3
auauacacggacauaau

SEQ ID NO: 1868582 - RNA, 14 nt, Human herpesvirus 3
auauuaacacgauu

SEQ ID NO: 1868583 - RNA, 14 nt, Human herpesvirus 3
auguaauuguaaau

SEQ ID NO: 1868584 - RNA, 15 nt, Human herpesvirus 3
uauaucuguuacauu

SEQ ID NO: 1868585 - RNA, 13 nt, Human herpesvirus 3
acgcgggugagug

SEQ ID NO: 1868586 - RNA, 22 nt, Human herpesvirus 3
aacuguauguaaauuaugauca

SEQ ID NO: 1868587 - RNA, 20 nt, Human herpesvirus 3
gauacacauaugcacgcauc

SEQ ID NO: 1868588 - RNA, 17 nt, Human herpesvirus 3
uuaacacgauuaacguu

SEQ ID NO: 1868589 - RNA, 19 nt, Human herpesvirus 3
ggccgcuacccgaaagccc

SEQ ID NO: 1868590 - RNA, 22 nt, Human herpesvirus 3
aucgcugaugccagaagcauuu

SEQ ID NO: 1868591 - RNA, 12 nt, Human herpesvirus 3
cucgugagcgcc

SEQ ID NO: 1868592 - RNA, 18 nt, Human herpesvirus 3
acucaugugucuccauua

SEQ ID NO: 1868593 - RNA, 21 nt, Human herpesvirus 3
cggcuuaacgagagauccaau

SEQ ID NO: 1868594 - RNA, 20 nt, Human herpesvirus 3
gaacuaauauucuacagauu

SEQ ID NO: 1868595 - RNA, 16 nt, Human herpesvirus 3
cguuauggaguucaaa

SEQ ID NO: 1868596 - RNA, 12 nt, Human herpesvirus 3
guagagcccaca

SEQ ID NO: 1868597 - RNA, 11 nt, Human herpesvirus 3
uacacaacacc

SEQ ID NO: 1868598 - RNA, 12 nt, Human herpesvirus 3
agaugacuuuga

SEQ ID NO: 1868599 - RNA, 19 nt, Human herpesvirus 3
ggccgcuucccgaaagccc

SEQ ID NO: 1868600 - RNA, 17 nt, Human herpesvirus 3
uauuuacguauguacca

SEQ ID NO: 1868601 - RNA, 15 nt, Human herpesvirus 3
cggacccccccccga

SEQ ID NO: 1868602 - RNA, 14 nt, Human herpesvirus 3
ccaggcucucauga

SEQ ID NO: 1868603 - RNA, 23 nt, Human herpesvirus 3
acggauauuaacacgauuaacgu

SEQ ID NO: 1868604 - RNA, 15 nt, Human herpesvirus 3
ugauaugaggggaag

SEQ ID NO: 1868605 - RNA, 16 nt, Human herpesvirus 3
uaacccccccccgguu

SEQ ID NO: 1868606 - RNA, 19 nt, Human herpesvirus 3
cgcccggcggaccccggga

SEQ ID NO: 1868607 - RNA, 19 nt, Human herpesvirus 3
gagugaaucuuaaaccuga

SEQ ID NO: 1868608 - RNA, 14 nt, Human herpesvirus 3
uuggagaaacauua

SEQ ID NO: 1868609 - RNA, 15 nt, Human herpesvirus 3
uacgaccaaacauua

SEQ ID NO: 1868610 - RNA, 13 nt, Human herpesvirus 3
ucguauauacaug

SEQ ID NO: 1868611 - RNA, 17 nt, Human herpesvirus 3
aauucuuagaaaagcca

SEQ ID NO: 1868612 - RNA, 21 nt, Human herpesvirus 3
uuaaauaguuuugguacauua

SEQ ID NO: 1868613 - RNA, 21 nt, Human herpesvirus 3
guuaauaccauauauggacau

SEQ ID NO: 1868614 - RNA, 17 nt, Human herpesvirus 3
guugguuacugugaaug

SEQ ID NO: 1868615 - RNA, 20 nt, Human herpesvirus 3
uggacguuuuuccacaauuu

SEQ ID NO: 1868616 - RNA, 17 nt, Human herpesvirus 3
ccccaaggcccauaucc

SEQ ID NO: 1868617 - RNA, 19 nt, Human herpesvirus 3
aauaccuauuucaugcuug

SEQ ID NO: 1868618 - RNA, 20 nt, Human herpesvirus 3
acauuagaguguuuaacaac

SEQ ID NO: 1868619 - RNA, 22 nt, Human herpesvirus 3
uuuauuuugcucguauauacau

SEQ ID NO: 1868620 - RNA, 19 nt, Human herpesvirus 3
ccccaguaaucucacuguu

SEQ ID NO: 1868621 - RNA, 11 nt, Human herpesvirus 3
uaaucuuuuau

SEQ ID NO: 1868622 - RNA, 14 nt, Human herpesvirus 3
gcucgcugagcucc

SEQ ID NO: 1868623 - RNA, 23 nt, Human herpesvirus 3
ucguuuaaagccccucgaagaac

SEQ ID NO: 1868624 - RNA, 14 nt, Human herpesvirus 3
agaagggggauuua

SEQ ID NO: 1868625 - RNA, 13 nt, Human herpesvirus 3
ucgcgcccaccuc

SEQ ID NO: 1868626 - RNA, 19 nt, Human herpesvirus 3
ugauagaacgcguaaaucu

SEQ ID NO: 1868627 - RNA, 17 nt, Human herpesvirus 3
cuguuacuuaaaccgug

SEQ ID NO: 1868628 - RNA, 13 nt, Human herpesvirus 3
acuauaugcguuu

SEQ ID NO: 1868629 - RNA, 16 nt, Human herpesvirus 3
acugcuuuuauaacuu

SEQ ID NO: 1868630 - RNA, 13 nt, Human herpesvirus 3
ggggguacaguug

SEQ ID NO: 1868631 - RNA, 13 nt, Human herpesvirus 3
gccugcaagcggu

SEQ ID NO: 1868632 - RNA, 12 nt, Human herpesvirus 3
agcccgaucccg

SEQ ID NO: 1868633 - RNA, 17 nt, Human herpesvirus 3
uuuaauccaauguuuga

SEQ ID NO: 1868634 - RNA, 17 nt, Human herpesvirus 3
ucuaaaacacugucaga

SEQ ID NO: 1868635 - RNA, 21 nt, Human herpesvirus 3
cguccccuuauaucugccaua

SEQ ID NO: 1868636 - RNA, 17 nt, Human herpesvirus 3
guagaggguccaucaaa

SEQ ID NO: 1868637 - RNA, 19 nt, Human herpesvirus 3
ggucauuuccacaaccagg

SEQ ID NO: 1868638 - RNA, 19 nt, Human herpesvirus 3
ccggguggguggcauuaaa

SEQ ID NO: 1868639 - RNA, 18 nt, Human herpesvirus 3
caggcgcguuuguuuguc

SEQ ID NO: 1868640 - RNA, 19 nt, Human herpesvirus 3
gguuuuuagaauuuccaaa

SEQ ID NO: 1868641 - RNA, 16 nt, Human herpesvirus 3
cguaauacaugcuuug

SEQ ID NO: 1868642 - RNA, 15 nt, Human herpesvirus 3
cguacgaccaaacau

SEQ ID NO: 1868643 - RNA, 17 nt, Human herpesvirus 3
auucgacgcaaaaauuc

SEQ ID NO: 1868644 - RNA, 18 nt, Human herpesvirus 3
cgacagcaguaaggguga

SEQ ID NO: 1868645 - RNA, 14 nt, Human herpesvirus 3
auaacugccugucg

SEQ ID NO: 1868646 - RNA, 21 nt, Human herpesvirus 3
gaucgucguuuaaagccccuc

SEQ ID NO: 1868647 - RNA, 16 nt, Human herpesvirus 3
gcggaccccgggagag

SEQ ID NO: 1868648 - RNA, 22 nt, Human herpesvirus 3
uaaggggagcguggauguguca

SEQ ID NO: 1868649 - RNA, 20 nt, Human herpesvirus 3
acguagcaaagcuacacuuu

SEQ ID NO: 1868650 - RNA, 22 nt, Human herpesvirus 3
ucaaaccaauaucuuugcaauu

SEQ ID NO: 1868651 - RNA, 13 nt, Human herpesvirus 3
acguuccgggguu

SEQ ID NO: 1868652 - RNA, 13 nt, Human herpesvirus 3
auaagggagucua

SEQ ID NO: 1868653 - RNA, 19 nt, Human herpesvirus 3
guuugaaguguucuaaaac

SEQ ID NO: 1868654 - RNA, 14 nt, Human herpesvirus 3
uuaaauacacccgc

SEQ ID NO: 1868655 - RNA, 20 nt, Human herpesvirus 3
gcgcugguauguauggcuuc

SEQ ID NO: 1868656 - RNA, 15 nt, Human herpesvirus 3
ugaugguaguuacca

SEQ ID NO: 1868657 - RNA, 13 nt, Human herpesvirus 3
ucuggagucucca

SEQ ID NO: 1868658 - RNA, 14 nt, Human herpesvirus 3
aucaggacagcagu

SEQ ID NO: 1868659 - RNA, 16 nt, Human herpesvirus 3
caucuucacgcucaau

SEQ ID NO: 1868660 - RNA, 14 nt, Human herpesvirus 3
aucaaacacacaga

SEQ ID NO: 1868661 - RNA, 12 nt, Human herpesvirus 3
accaugggagac

SEQ ID NO: 1868662 - RNA, 18 nt, Human herpesvirus 3
gacuugacgcgaacaccg

SEQ ID NO: 1868663 - RNA, 12 nt, Human herpesvirus 3
cgauggugauga

SEQ ID NO: 1868664 - RNA, 16 nt, Human herpesvirus 3
gugauauuauauacug

SEQ ID NO: 1868665 - RNA, 23 nt, Human herpesvirus 3
uccauccugaccgauccccgggu

SEQ ID NO: 1868666 - RNA, 18 nt, Human herpesvirus 3
acuuguguguaccauaga

SEQ ID NO: 1868667 - RNA, 12 nt, Human herpesvirus 3
uuuaucccccuu

SEQ ID NO: 1868668 - RNA, 19 nt, Human herpesvirus 3
gacggaugugcggggagcu

SEQ ID NO: 1868669 - RNA, 13 nt, Human herpesvirus 3
uuuuuaauucagg

SEQ ID NO: 1868670 - RNA, 13 nt, Human herpesvirus 3
cugcaucuggaga

SEQ ID NO: 1868671 - RNA, 23 nt, Human herpesvirus 3
gacaaaauuaacucgcguacaaa

SEQ ID NO: 1868672 - RNA, 15 nt, Human herpesvirus 3
caucugauuugcaaa

SEQ ID NO: 1868673 - RNA, 16 nt, Human herpesvirus 3
uaguuaccaaaguuuu

SEQ ID NO: 1868674 - RNA, 15 nt, Human herpesvirus 3
gccccaaaccacugu

SEQ ID NO: 1868675 - RNA, 23 nt, Human herpesvirus 3
cuggaauaaaacguuuuaaaagc

SEQ ID NO: 1868676 - RNA, 15 nt, Human herpesvirus 3
aaaccaaacacgccu

SEQ ID NO: 1868677 - RNA, 20 nt, Human herpesvirus 3
uaguccuuacccauaugacc

SEQ ID NO: 1868678 - RNA, 15 nt, Human herpesvirus 3
caaaauucgaauugu

SEQ ID NO: 1868679 - RNA, 15 nt, Human herpesvirus 3
aacccccccccgguu

SEQ ID NO: 1868680 - RNA, 15 nt, Human herpesvirus 3
uccgauacccuggac

SEQ ID NO: 1868681 - RNA, 15 nt, Human herpesvirus 3
ucccccgaucucugg

SEQ ID NO: 1868682 - RNA, 15 nt, Human herpesvirus 3
cagagaagcuauaca

SEQ ID NO: 1868683 - RNA, 15 nt, Human herpesvirus 3
aaguguucuaaaaca

SEQ ID NO: 1868684 - RNA, 14 nt, Human herpesvirus 3
cuugacaacauuua

SEQ ID NO: 1868685 - RNA, 19 nt, Human herpesvirus 3
gugcauaacguugcgguga

SEQ ID NO: 1868686 - RNA, 15 nt, Human herpesvirus 3
agauuccgaguccuc

SEQ ID NO: 1868687 - RNA, 22 nt, Human herpesvirus 3
cugcguuauuuaaaggucugau

SEQ ID NO: 1868688 - RNA, 12 nt, Human herpesvirus 3
acccccccccgg

SEQ ID NO: 1868689 - RNA, 16 nt, Human herpesvirus 3
acgugaggaaaaagag

SEQ ID NO: 1868690 - RNA, 18 nt, Human herpesvirus 3
aagucuucaaagaacucu

SEQ ID NO: 1868691 - RNA, 20 nt, Human herpesvirus 3
ccacgcccacauacccacuc

SEQ ID NO: 1868692 - RNA, 18 nt, Human herpesvirus 3
cugcauaagcucuguaug

SEQ ID NO: 1868693 - RNA, 21 nt, Human herpesvirus 3
agacaucccucguuuauggaa

SEQ ID NO: 1868694 - RNA, 13 nt, Human herpesvirus 3
gucccaggucggc

SEQ ID NO: 1868695 - RNA, 16 nt, Human herpesvirus 3
auauaaaauuaaaaca

SEQ ID NO: 1868696 - RNA, 12 nt, Human herpesvirus 3
guacaacacaaa

SEQ ID NO: 1868697 - RNA, 12 nt, Human herpesvirus 3
ccaccacauuuu

SEQ ID NO: 1868698 - RNA, 21 nt, Human herpesvirus 3
ugucuacuauuugugaagacu

SEQ ID NO: 1868699 - RNA, 18 nt, Human herpesvirus 3
uacacugguaaaugguca

SEQ ID NO: 1868700 - RNA, 12 nt, Human herpesvirus 3
gccacacccaca

SEQ ID NO: 1868701 - RNA, 15 nt, Human herpesvirus 3
gaaaaaagugucugu

SEQ ID NO: 1868702 - RNA, 15 nt, Human herpesvirus 3
cugaucguauugcug

SEQ ID NO: 1868703 - RNA, 18 nt, Human herpesvirus 3
cagcccgauaacauggaa

SEQ ID NO: 1868704 - RNA, 13 nt, Human herpesvirus 3
gcugaagggugca

SEQ ID NO: 1868705 - RNA, 15 nt, Human herpesvirus 3
uauucuauuaacaau

SEQ ID NO: 1868706 - RNA, 22 nt, Human herpesvirus 3
auuuaaaaauccauuaaagagc

SEQ ID NO: 1868707 - RNA, 14 nt, Human herpesvirus 3
guugcaaaagccgu

SEQ ID NO: 1868708 - RNA, 14 nt, Human herpesvirus 3
gucguuuaaagccc

SEQ ID NO: 1868709 - RNA, 18 nt, Human herpesvirus 3
gguggacguuuuuccaca

SEQ ID NO: 1868710 - RNA, 16 nt, Human herpesvirus 3
gcguguuaaacacugu

SEQ ID NO: 1868711 - RNA, 18 nt, Human herpesvirus 3
acuuggucacaaauuacu

SEQ ID NO: 1868712 - RNA, 16 nt, Human herpesvirus 3
gcguccucuguuacau

SEQ ID NO: 1868713 - RNA, 18 nt, Human herpesvirus 3
aggcgugaaagcuaccac

SEQ ID NO: 1868714 - RNA, 17 nt, Human herpesvirus 3
cugccacggccucggcg

SEQ ID NO: 1868715 - RNA, 18 nt, Human herpesvirus 3
gacauaccgacaguaaaa

SEQ ID NO: 1868716 - RNA, 16 nt, Human herpesvirus 3
agaauuaaaaaagccg

SEQ ID NO: 1868717 - RNA, 15 nt, Human herpesvirus 3
cauuaacccacgggg

SEQ ID NO: 1868718 - RNA, 16 nt, Human herpesvirus 3
guuucaaauaacugaa

SEQ ID NO: 1868719 - RNA, 21 nt, Human herpesvirus 3
cuccaucgcuguuuguacaau

SEQ ID NO: 1868720 - RNA, 22 nt, Human herpesvirus 3
aaacauguauaauaaaaaguca

SEQ ID NO: 1868721 - RNA, 20 nt, Human herpesvirus 3
aaaagcggaacgguuuuuau

SEQ ID NO: 1868722 - RNA, 19 nt, Human herpesvirus 3
cauuguauaaaaacacgca

SEQ ID NO: 1868723 - RNA, 17 nt, Human herpesvirus 3
agggacccgcagcccag

SEQ ID NO: 1868724 - RNA, 17 nt, Human herpesvirus 3
cagcaaguuuaacauuu

SEQ ID NO: 1868725 - RNA, 17 nt, Human herpesvirus 3
gcuacucccacccacug

SEQ ID NO: 1868726 - RNA, 12 nt, Human herpesvirus 3
gacaugcacugc

SEQ ID NO: 1868727 - RNA, 18 nt, Human herpesvirus 3
gaauucuuagaaaagcca

SEQ ID NO: 1868728 - RNA, 19 nt, Human herpesvirus 3
aguccccuccuuuucucgu

SEQ ID NO: 1868729 - RNA, 16 nt, Human herpesvirus 3
cguuauacaagguguu

SEQ ID NO: 1868730 - RNA, 14 nt, Human herpesvirus 3
uuuacacuugaauc

SEQ ID NO: 1868731 - RNA, 13 nt, Human herpesvirus 3
cuuauccaacaaa

SEQ ID NO: 1868732 - RNA, 19 nt, Human herpesvirus 3
uaaagucguuuauaucugu

SEQ ID NO: 1868733 - RNA, 19 nt, Human herpesvirus 3
acagcaguaagggugagaa

SEQ ID NO: 1868734 - RNA, 13 nt, Human herpesvirus 3
aucaaucugagaa

SEQ ID NO: 1868735 - RNA, 23 nt, Human herpesvirus 3
aagcauauacacauccuggacac

SEQ ID NO: 1868736 - RNA, 14 nt, Human herpesvirus 3
gaaaugugcuguca

SEQ ID NO: 1868737 - RNA, 23 nt, Human herpesvirus 3
cgaccacgacagcaguaagggug

SEQ ID NO: 1868738 - RNA, 21 nt, Human herpesvirus 3
ugugggaggucuacagcaccc

SEQ ID NO: 1868739 - RNA, 14 nt, Human herpesvirus 3
ugaguuuaggguuu

SEQ ID NO: 1868740 - RNA, 21 nt, Human herpesvirus 3
caccucggccgcuucccgaaa

SEQ ID NO: 1868741 - RNA, 13 nt, Human herpesvirus 3
cgacgugagggug

SEQ ID NO: 1868742 - RNA, 23 nt, Human herpesvirus 3
gaucgguuagaugcauauuugga

SEQ ID NO: 1868743 - RNA, 23 nt, Human herpesvirus 3
gcauauacacauccuggacacag

SEQ ID NO: 1868744 - RNA, 18 nt, Human herpesvirus 3
agccucuguacaacacaa

SEQ ID NO: 1868745 - RNA, 22 nt, Human herpesvirus 3
uguugggucagaaccgacccag

SEQ ID NO: 1868746 - RNA, 13 nt, Human herpesvirus 3
ucaugcaggcuuu

SEQ ID NO: 1868747 - RNA, 23 nt, Human herpesvirus 3
ggaacccaagguguaaauacugc

SEQ ID NO: 1868748 - RNA, 20 nt, Human herpesvirus 3
cugucuugacaacauuuaaa

SEQ ID NO: 1868749 - RNA, 17 nt, Human herpesvirus 3
uccuauauacagugcuu

SEQ ID NO: 1868750 - RNA, 19 nt, Human herpesvirus 3
uuucauuaggaugaaaaga

SEQ ID NO: 1868751 - RNA, 15 nt, Human herpesvirus 3
auacaccggauaaaa

SEQ ID NO: 1868752 - RNA, 16 nt, Human herpesvirus 3
gaaguguucuaaaaca

SEQ ID NO: 1868753 - RNA, 21 nt, Human herpesvirus 3
auaugucaacauuuacaguaa

SEQ ID NO: 1868754 - RNA, 17 nt, Human herpesvirus 3
agguauuguuaccagga

SEQ ID NO: 1868755 - RNA, 12 nt, Human herpesvirus 3
gggugaaguaau

SEQ ID NO: 1868756 - RNA, 14 nt, Human herpesvirus 3
caucagacaugauu

SEQ ID NO: 1868757 - RNA, 20 nt, Human herpesvirus 3
cgauuacagcugccgggaaa

SEQ ID NO: 1868758 - RNA, 16 nt, Human herpesvirus 3
uuuaucccccuucaaa

SEQ ID NO: 1868759 - RNA, 22 nt, Human herpesvirus 3
guucauaacaccgcuauacgca

SEQ ID NO: 1868760 - RNA, 14 nt, Human herpesvirus 3
ccuacacaacaccc

SEQ ID NO: 1868761 - RNA, 22 nt, Human herpesvirus 3
gugaggaaaaagaggcggggag

SEQ ID NO: 1868762 - RNA, 23 nt, Human herpesvirus 3
ucagguuauccaacuguuuacau

SEQ ID NO: 1868763 - RNA, 15 nt, Human herpesvirus 3
cguguuaaacacugu

SEQ ID NO: 1868764 - RNA, 15 nt, Human herpesvirus 3
aggcaacugcaaaca

SEQ ID NO: 1868765 - RNA, 17 nt, Human herpesvirus 3
uaauaaaaagucacuau

SEQ ID NO: 1868766 - RNA, 19 nt, Human herpesvirus 3
cuuugcauuggaagucacc

SEQ ID NO: 1868767 - RNA, 16 nt, Human herpesvirus 3
uaucaaguggucguuu

SEQ ID NO: 1868768 - RNA, 20 nt, Human herpesvirus 3
cuggucaccguguggacauc

SEQ ID NO: 1868769 - RNA, 16 nt, Human herpesvirus 3
gaugaaauaguuucau

SEQ ID NO: 1868770 - RNA, 15 nt, Human herpesvirus 3
aauaaauguacuaua

SEQ ID NO: 1868771 - RNA, 22 nt, Human herpesvirus 3
ugaguugggagguuccucggga

SEQ ID NO: 1868772 - RNA, 23 nt, Human herpesvirus 3
gcaucuuccgacggugacagacu

SEQ ID NO: 1868773 - RNA, 17 nt, Human herpesvirus 3
acgccaguggucucucu

SEQ ID NO: 1868774 - RNA, 20 nt, Human herpesvirus 3
agaaacuuaauacagaguca

SEQ ID NO: 1868775 - RNA, 18 nt, Human herpesvirus 3
uauaagggagucuacaau

SEQ ID NO: 1868776 - RNA, 21 nt, Human herpesvirus 3
acgugguaccaaaaacacagu

SEQ ID NO: 1868777 - RNA, 19 nt, Human herpesvirus 3
gauuuuuuuaaacaaauac

SEQ ID NO: 1868778 - RNA, 15 nt, Human herpesvirus 3
ugauauaagguguua

SEQ ID NO: 1868779 - RNA, 19 nt, Human herpesvirus 3
gagugggguguuguggaua

SEQ ID NO: 1868780 - RNA, 21 nt, Human herpesvirus 3
cucccaaggcggucccucgga

SEQ ID NO: 1868781 - RNA, 18 nt, Human herpesvirus 3
uucaaaggacgaagggga

SEQ ID NO: 1868782 - RNA, 13 nt, Human herpesvirus 3
uauaacugcuaca

SEQ ID NO: 1868783 - RNA, 18 nt, Human herpesvirus 3
guuucugggcgcccggcg

SEQ ID NO: 1868784 - RNA, 14 nt, Human herpesvirus 3
ucccgauuuggaaa

SEQ ID NO: 1868785 - RNA, 17 nt, Human herpesvirus 3
uugccaugacuuccaca

SEQ ID NO: 1868786 - RNA, 12 nt, Human herpesvirus 3
aucguaugccuc

SEQ ID NO: 1868787 - RNA, 20 nt, Human herpesvirus 3
ccuaggaacgcgacaugacc

SEQ ID NO: 1868788 - RNA, 19 nt, Human herpesvirus 3
cauuuugcgcauuuggaau

SEQ ID NO: 1868789 - RNA, 14 nt, Human herpesvirus 3
gucugcgaagcugc

SEQ ID NO: 1868790 - RNA, 20 nt, Human herpesvirus 3
aauuguucugggaacacgua

SEQ ID NO: 1868791 - RNA, 18 nt, Human herpesvirus 3
gauaaauaaaguuuuuaa

SEQ ID NO: 1868792 - RNA, 16 nt, Human herpesvirus 3
uuguaaaacauaucaa

SEQ ID NO: 1868793 - RNA, 12 nt, Human herpesvirus 3
gcugagcuccag

SEQ ID NO: 1868794 - RNA, 14 nt, Human herpesvirus 3
auaucgcaauguuu

SEQ ID NO: 1868795 - RNA, 22 nt, Human herpesvirus 3
ccacguagcaaagcuacacuuu

SEQ ID NO: 1868796 - RNA, 16 nt, Human herpesvirus 3
aguccccuccuuuucu

SEQ ID NO: 1868797 - RNA, 20 nt, Human herpesvirus 3
gccacaauaacauaagggau

SEQ ID NO: 1868798 - RNA, 17 nt, Human herpesvirus 3
augggugguaagguuuu

SEQ ID NO: 1868799 - RNA, 15 nt, Human herpesvirus 3
caagaaaccauguuu

SEQ ID NO: 1868800 - RNA, 23 nt, Human herpesvirus 3
gggucagaaccgacccaggacau

SEQ ID NO: 1868801 - RNA, 18 nt, Human herpesvirus 3
accucggccgcuucccga

SEQ ID NO: 1868802 - RNA, 16 nt, Human herpesvirus 3
uuucugggcgcccggc

SEQ ID NO: 1868803 - RNA, 20 nt, Human herpesvirus 3
gcgacgguauauuacaaaga

SEQ ID NO: 1868804 - RNA, 18 nt, Human herpesvirus 3
ucugcaaucauaaaugca

SEQ ID NO: 1868805 - RNA, 23 nt, Human herpesvirus 3
ugggucagaaccgacccaggaca

SEQ ID NO: 1868806 - RNA, 22 nt, Human herpesvirus 3
uuaauaaaaacacaaccagucu

SEQ ID NO: 1868807 - RNA, 16 nt, Human herpesvirus 3
uugacuuuguuugcug

SEQ ID NO: 1868808 - RNA, 23 nt, Human herpesvirus 3
uuaugaacgccugugaaauaacg

SEQ ID NO: 1868809 - RNA, 14 nt, Human herpesvirus 3
ucgauguaacacca

SEQ ID NO: 1868810 - RNA, 14 nt, Human herpesvirus 3
aggcuuuaucugaa

SEQ ID NO: 1868811 - RNA, 16 nt, Human herpesvirus 3
gagccgcggccagugc

SEQ ID NO: 1868812 - RNA, 22 nt, Human herpesvirus 3
ucauuaugagcaucuagaagau

SEQ ID NO: 1868813 - RNA, 14 nt, Human herpesvirus 3
uccacugcauuuac

SEQ ID NO: 1868814 - RNA, 20 nt, Human herpesvirus 3
auaaacaagucaauauuaca

SEQ ID NO: 1868815 - RNA, 19 nt, Human herpesvirus 3
acccaguacguugcauaac

SEQ ID NO: 1868816 - RNA, 23 nt, Human herpesvirus 3
aaacaucaaccggaacaguaucc

SEQ ID NO: 1868817 - RNA, 23 nt, Human herpesvirus 3
aacacuuggcguguuaaacacug

SEQ ID NO: 1868818 - RNA, 17 nt, Human herpesvirus 3
cuccgcccuaaauuaca

SEQ ID NO: 1868819 - RNA, 20 nt, Human herpesvirus 3
cucccucauaauaugauaca

SEQ ID NO: 1868820 - RNA, 19 nt, Human herpesvirus 3
cuccguaucccugucuuca

SEQ ID NO: 1868821 - RNA, 23 nt, Human herpesvirus 3
acguacaaucgaaaaaaggugua

SEQ ID NO: 1868822 - RNA, 20 nt, Human herpesvirus 3
caccugcauucgaauuacga

SEQ ID NO: 1868823 - RNA, 13 nt, Human herpesvirus 3
ccucaaacacggg

SEQ ID NO: 1868824 - RNA, 17 nt, Human herpesvirus 3
ccguuuggaaacaacaa

SEQ ID NO: 1868825 - RNA, 13 nt, Human herpesvirus 3
cguuaucggucaa

SEQ ID NO: 1868826 - RNA, 17 nt, Human herpesvirus 3
ccgauguucgucgagac

SEQ ID NO: 1868827 - RNA, 21 nt, Human herpesvirus 3
ccgaucccgccgucgcgccca

SEQ ID NO: 1868828 - RNA, 21 nt, Human herpesvirus 3
guacagauacguggaaucgua

SEQ ID NO: 1868829 - RNA, 20 nt, Human herpesvirus 3
gcauuaccgcaaaucuuggc

SEQ ID NO: 1868830 - RNA, 18 nt, Human herpesvirus 3
gcauagacccgaaacgcu

SEQ ID NO: 1868831 - RNA, 16 nt, Human herpesvirus 3
gcaguuauaacacggg

SEQ ID NO: 1868832 - RNA, 13 nt, Human herpesvirus 3
cuuaaaauaaaag

SEQ ID NO: 1868833 - RNA, 20 nt, Human herpesvirus 3
gacgacauuaaacguauucu

SEQ ID NO: 1868834 - RNA, 20 nt, Human herpesvirus 3
gacgcauuugaugaaucguu

SEQ ID NO: 1868835 - RNA, 22 nt, Human herpesvirus 3
cggcaauccgcuagacuguuuu

SEQ ID NO: 1868836 - RNA, 15 nt, Human herpesvirus 3
ccacuggcgcgcgga

SEQ ID NO: 1868837 - RNA, 18 nt, Human herpesvirus 3
cgacagcggauaucgucu

SEQ ID NO: 1868838 - RNA, 12 nt, Human herpesvirus 3
cgcccaccucgg

SEQ ID NO: 1868839 - RNA, 15 nt, Human herpesvirus 3
cgaucaacugcuuuu

SEQ ID NO: 1868840 - RNA, 15 nt, Human herpesvirus 3
cgaucacaacagaca

SEQ ID NO: 1868841 - RNA, 14 nt, Human herpesvirus 3
cggauaucgucuaa

SEQ ID NO: 1868842 - RNA, 14 nt, Human herpesvirus 3
caugcuuguaaaac

SEQ ID NO: 1868843 - RNA, 13 nt, Human herpesvirus 3
cauaaaaacgccu

SEQ ID NO: 1868844 - RNA, 14 nt, Human herpesvirus 3
cagguuauccaacu

SEQ ID NO: 1868845 - RNA, 12 nt, Human herpesvirus 3
augauauacaca

SEQ ID NO: 1868846 - RNA, 21 nt, Human herpesvirus 3
aguacaggguaucuaaguacc

SEQ ID NO: 1868847 - RNA, 15 nt, Human herpesvirus 3
uuuaagguauggagu

SEQ ID NO: 1868848 - RNA, 19 nt, Human herpesvirus 3
ucgucguucgaauccuaga

SEQ ID NO: 1868849 - RNA, 19 nt, Human herpesvirus 3
ucccccacauacaacauga

SEQ ID NO: 1868850 - RNA, 15 nt, Human herpesvirus 3
caccaaaaauauacg

SEQ ID NO: 1868851 - RNA, 16 nt, Human herpesvirus 3
acuguauguaaauuau

SEQ ID NO: 1868852 - RNA, 17 nt, Human herpesvirus 3
acugcuuuuauaacuuu

SEQ ID NO: 1868853 - RNA, 15 nt, Human herpesvirus 3
acuaaaaacguuucu

SEQ ID NO: 1868854 - RNA, 14 nt, Human herpesvirus 3
acuauaauuguuca

SEQ ID NO: 1868855 - RNA, 16 nt, Human herpesvirus 3
gauuuuacagaaaaua

SEQ ID NO: 1868856 - RNA, 22 nt, Human herpesvirus 3
ccgucucugauucggguaaaac

SEQ ID NO: 1868857 - RNA, 16 nt, Human herpesvirus 3
uugucgaucauacgcc

SEQ ID NO: 1868858 - RNA, 20 nt, Human herpesvirus 3
uugucauaaaaacaagaagu

SEQ ID NO: 1868859 - RNA, 21 nt, Human herpesvirus 3
uucccaaaaggauauucacca

SEQ ID NO: 1868860 - RNA, 22 nt, Human herpesvirus 3
uuauuaccgguaccaugggaga

SEQ ID NO: 1868861 - RNA, 19 nt, Human herpesvirus 3
uuaagacguccacacagcc

SEQ ID NO: 1868862 - RNA, 20 nt, Human herpesvirus 3
uuaauucagggcuuacguuu

SEQ ID NO: 1868863 - RNA, 20 nt, Human herpesvirus 3
uuacacgggaaacuauucca

SEQ ID NO: 1868864 - RNA, 12 nt, Human herpesvirus 3
uuaaaacauaca

SEQ ID NO: 1868865 - RNA, 16 nt, Human herpesvirus 3
uguaaccuacacaaca

SEQ ID NO: 1868866 - RNA, 21 nt, Human herpesvirus 3
uagaaaaucgacaucguuugu

SEQ ID NO: 1868867 - RNA, 16 nt, Human herpesvirus 3
cgucauagcaaauaca

SEQ ID NO: 1868868 - RNA, 18 nt, Human herpesvirus 3
gacauaauuaaugcaacc

SEQ ID NO: 1868869 - RNA, 18 nt, Human herpesvirus 3
cuuuuaaagcaguaccgg

SEQ ID NO: 1868870 - RNA, 17 nt, Human herpesvirus 3
cuuugguuauacgggga

SEQ ID NO: 1868871 - RNA, 15 nt, Human herpesvirus 3
gacguccaaguccaa

SEQ ID NO: 1868872 - RNA, 18 nt, Human herpesvirus 3
gacguuauacaagguguu

SEQ ID NO: 1868873 - RNA, 20 nt, Human herpesvirus 3
guauacacacccaccccaga

SEQ ID NO: 1868874 - RNA, 15 nt, Human herpesvirus 3
gcugccgucaaugca

SEQ ID NO: 1868875 - RNA, 21 nt, Human herpesvirus 3
auauaaaagaagccccaacga

SEQ ID NO: 1868876 - RNA, 18 nt, Human herpesvirus 3
caacgaguguaugcguau

SEQ ID NO: 1868877 - RNA, 20 nt, Human herpesvirus 3
caacuguauguaaauuauga

SEQ ID NO: 1868878 - RNA, 15 nt, Human herpesvirus 3
auccucuuaacguug

SEQ ID NO: 1868879 - RNA, 21 nt, Human herpesvirus 3
aagcgcuccgcccuaaauuac

SEQ ID NO: 1868880 - RNA, 18 nt, Human herpesvirus 3
aaguguucuaaaacacug

SEQ ID NO: 1868881 - RNA, 21 nt, Human herpesvirus 3
aauagauaguuauggacuagg

SEQ ID NO: 1868882 - RNA, 23 nt, Human herpesvirus 3
aagguuaaauuuauaaaacacuc

SEQ ID NO: 1868883 - RNA, 20 nt, Human herpesvirus 3
aaucggagacucguggucag

SEQ ID NO: 1868884 - RNA, 20 nt, Human herpesvirus 3
acagugauacccaauagccg

SEQ ID NO: 1868885 - RNA, 18 nt, Human herpesvirus 3
cgaaaacgugcaugcguu

SEQ ID NO: 1868886 - RNA, 16 nt, Human herpesvirus 3
ccuuaaacaacauggc

SEQ ID NO: 1868887 - RNA, 13 nt, Human herpesvirus 3
ccuuaaacaucca

SEQ ID NO: 1868888 - RNA, 21 nt, Human herpesvirus 3
ccuugccgcguggaacacggg

SEQ ID NO: 1868889 - RNA, 14 nt, Human herpesvirus 3
cccgaaagcccgau

SEQ ID NO: 1868890 - RNA, 17 nt, Human herpesvirus 3
gagcauuucgaaucguu

SEQ ID NO: 1868891 - RNA, 23 nt, Human herpesvirus 3
gagcaucucuggacccccaacga

SEQ ID NO: 1868892 - RNA, 22 nt, Human herpesvirus 3
cucacugcuauagccgucagaa

SEQ ID NO: 1868893 - RNA, 15 nt, Human herpesvirus 3
cuccaucacgauaaa

SEQ ID NO: 1868894 - RNA, 13 nt, Human herpesvirus 3
ccgcgcucaauca

SEQ ID NO: 1868895 - RNA, 15 nt, Human herpesvirus 3
auuagaucuaacguu

SEQ ID NO: 1868896 - RNA, 20 nt, Human herpesvirus 3
auguuuuuggagcaacguuu

SEQ ID NO: 1868897 - RNA, 16 nt, Human herpesvirus 3
auuacauuuaauguuu

SEQ ID NO: 1868898 - RNA, 19 nt, Human herpesvirus 3
auucccaguaaacaacagu

SEQ ID NO: 1868899 - RNA, 20 nt, Human herpesvirus 3
auuguaaauuuuaauuacga

SEQ ID NO: 1868900 - RNA, 21 nt, Human herpesvirus 3
auuuauaaaacacucacguuu

SEQ ID NO: 1868901 - RNA, 15 nt, Human herpesvirus 3
aauugggggauuugg

SEQ ID NO: 1868902 - RNA, 12 nt, Human herpesvirus 3
acccaaggugua

SEQ ID NO: 1868903 - RNA, 19 nt, Human herpesvirus 3
agauucaagacuaacauuu

SEQ ID NO: 1868904 - RNA, 14 nt, Human herpesvirus 3
gcucugcaaauaca

SEQ ID NO: 1868905 - RNA, 18 nt, Human herpesvirus 3
gcuguaggucaacauaca

SEQ ID NO: 1868906 - RNA, 16 nt, Human herpesvirus 3
gcuguauugagaaaac

SEQ ID NO: 1868907 - RNA, 16 nt, Human herpesvirus 3
ggugacguuccggggu

SEQ ID NO: 1868908 - RNA, 21 nt, Human herpesvirus 3
uacaucggcauuaacaacgcg

SEQ ID NO: 1868909 - RNA, 19 nt, Human herpesvirus 3
ugcaucguagguauaaacg

SEQ ID NO: 1868910 - RNA, 14 nt, Human herpesvirus 3
gacaaaccccacgc

SEQ ID NO: 1868911 - RNA, 20 nt, Human herpesvirus 3
gacuccagcaucaucugcug

SEQ ID NO: 1868912 - RNA, 22 nt, Human herpesvirus 3
gaaaauaacccccccccgguuu

SEQ ID NO: 1868913 - RNA, 18 nt, Human herpesvirus 3
cgucaacugcaacaugca

SEQ ID NO: 1868914 - RNA, 18 nt, Human herpesvirus 3
ggcuguaggucaacauac

SEQ ID NO: 1868915 - RNA, 16 nt, Human herpesvirus 3
gagauauggguucgga

SEQ ID NO: 1868916 - RNA, 20 nt, Human herpesvirus 3
cucgcaguuuucuuguuccc

SEQ ID NO: 1868917 - RNA, 18 nt, Human herpesvirus 3
gagcaaacuaaagguaua

SEQ ID NO: 1868918 - RNA, 16 nt, Human herpesvirus 3
gaggggaugaaucguu

SEQ ID NO: 1868919 - RNA, 18 nt, Human
aaaacaagaaaguuuccc

SEQ ID NO: 1868920 - RNA, 17 nt, Human
aaaacaagaaaguuucc

SEQ ID NO: 1868921 - RNA, 14 nt, Human
aaaaauugugauca

SEQ ID NO: 1868922 - RNA, 16 nt, Human
agcuccucacucaccu

SEQ ID NO: 1868923 - RNA, 15 nt, Human
aggaccuccaagcca

SEQ ID NO: 1868924 - RNA, 21 nt, Human
aggaccuccaagccacugagc

SEQ ID NO: 1868925 - RNA, 16 nt, Human
agggcacaaagauggg

SEQ ID NO: 1868926 - RNA, 11 nt, Human
agguucuaaaa

SEQ ID NO: 1868927 - RNA, 17 nt, Human
agguaccccuuucuggc

SEQ ID NO: 1868928 - RNA, 21 nt, Human
agguaccccuuucuggcucuc

SEQ ID NO: 1868929 - RNA, 15 nt, Human
agcagccagccguga

SEQ ID NO: 1868930 - RNA, 21 nt, Human
agcaucuuugaauacaaagaa

SEQ ID NO: 1868931 - RNA, 14 nt, Human
agccgucaccccug

SEQ ID NO: 1868932 - RNA, 21 nt, Human
agauaggucagugcaaauacu

SEQ ID NO: 1868933 - RNA, 16 nt, Human
agagccuggugcugcu

SEQ ID NO: 1868934 - RNA, 18 nt, Human
agagccuggugcugcugc

SEQ ID NO: 1868935 - RNA, 17 nt, Human
agacugaucaggaccuc

SEQ ID NO: 1868936 - RNA, 16 nt, Human
agacugaucaggaccu

SEQ ID NO: 1868937 - RNA, 14 nt, Human
agacugaucaggac

SEQ ID NO: 1868938 - RNA, 19 nt, Human
agacugaucaggaccucca

SEQ ID NO: 1868939 - RNA, 13 nt, Human
agaccauaauguu

SEQ ID NO: 1868940 - RNA, 12 nt, Human
agacuaaaagau

SEQ ID NO: 1868941 - RNA, 22 nt, Human
aucuuauaauuuaaaauaugcu

SEQ ID NO: 1868942 - RNA, 14 nt, Human
auguguagccugug

SEQ ID NO: 1868943 - RNA, 15 nt, Human
auguaaucaauguuu

SEQ ID NO: 1868944 - RNA, 16 nt, Human
auguaaucaauguuuc

SEQ ID NO: 1868945 - RNA, 13 nt, Human
augucuuggacac

SEQ ID NO: 1868946 - RNA, 16 nt, Human
augucuuggacacugu

SEQ ID NO: 1868947 - RNA, 19 nt, Human
augucuuggacacuguaca

SEQ ID NO: 1868948 - RNA, 20 nt, Human
augucuuggacacuguacaa

SEQ ID NO: 1868949 - RNA, 14 nt, Human
augucuuguacaug

SEQ ID NO: 1868950 - RNA, 17 nt, Human
augucuuguacaugugu

SEQ ID NO: 1868951 - RNA, 22 nt, Human
augucuuguacauguguagccu

SEQ ID NO: 1868952 - RNA, 18 nt, Human
augcacauauggacucug

SEQ ID NO: 1868953 - RNA, 19 nt, Human
augcacauauggacucugc

SEQ ID NO: 1868954 - RNA, 18 nt, Human
auggcucuaaaaaguuuu

SEQ ID NO: 1868955 - RNA, 18 nt, Human
augggaaucaagauuuaa

SEQ ID NO: 1868956 - RNA, 16 nt, Human
auaauuauaauauacu

SEQ ID NO: 1868957 - RNA, 16 nt, Human
auaccucugugugcuc

SEQ ID NO: 1868958 - RNA, 17 nt, Human
auaccucugugugcucc

SEQ ID NO: 1868959 - RNA, 21 nt, Human
auauaauguuguuauuuaaag

SEQ ID NO: 1868960 - RNA, 22 nt, Human
auauaauguuguuauuuaaaga

SEQ ID NO: 1868961 - RNA, 15 nt, Human
auauggacucugcac

SEQ ID NO: 1868962 - RNA, 16 nt, Human
accccgacgccacagc

SEQ ID NO: 1868963 - RNA, 16 nt, Human
acauccugugccucca

SEQ ID NO: 1868964 - RNA, 19 nt, Human
acagaacaaauguuuguuu

SEQ ID NO: 1868965 - RNA, 21 nt, Human
acacugcugcuccagugcagg

SEQ ID NO: 1868966 - RNA, 16 nt, Human
aauuauaauauacuau

SEQ ID NO: 1868967 - RNA, 14 nt, Human
agaaaauaacaaua

SEQ ID NO: 1868968 - RNA, 18 nt, Human
acugugaugcccugcccu

SEQ ID NO: 1868969 - RNA, 17 nt, Human
acugucuucucccugca

SEQ ID NO: 1868970 - RNA, 19 nt, Human
acuuguaaaggaauuuaaa

SEQ ID NO: 1868971 - RNA, 20 nt, Human
acuuguaaaggaauuuaaaa

SEQ ID NO: 1868972 - RNA, 18 nt, Human
acuuguaaaggaauuuaa

SEQ ID NO: 1868973 - RNA, 15 nt, Human
acuucuuucagcaga

SEQ ID NO: 1868974 - RNA, 14 nt, Human
acuagcuauggugu

SEQ ID NO: 1868975 - RNA, 18 nt, Human
accuugugucuguacacg

SEQ ID NO: 1868976 - RNA, 21 nt, Human
accuugugucuguacacgugu

SEQ ID NO: 1868977 - RNA, 12 nt, Human
accuugugucug

SEQ ID NO: 1868978 - RNA, 13 nt, Human
accuugugucugu

SEQ ID NO: 1868979 - RNA, 15 nt, Human
accuugugucuguac

SEQ ID NO: 1868980 - RNA, 13 nt, Human
aacagcugccucu

SEQ ID NO: 1868981 - RNA, 21 nt, Human
aacaagaagccacagaccuag

SEQ ID NO: 1868982 - RNA, 16 nt, Human
aacaagaaaguuuccc

SEQ ID NO: 1868983 - RNA, 15 nt, Human
aacaagaaaguuucc

SEQ ID NO: 1868984 - RNA, 21 nt, Human
aaagaaaaauuauuaaaggaa

SEQ ID NO: 1868985 - RNA, 12 nt, Human
aaauaacaauga

SEQ ID NO: 1868986 - RNA, 20 nt, Human
aaauaaagcuugcaacaaaa

SEQ ID NO: 1868987 - RNA, 15 nt, Human
aaagucuugugacua

SEQ ID NO: 1868988 - RNA, 18 nt, Human
aaagucuugugacuagug

SEQ ID NO: 1868989 - RNA, 19 nt, Human
aaagucuugugacuagugc

SEQ ID NO: 1868990 - RNA, 21 nt, Human
aaagucuugugacuagugcug

SEQ ID NO: 1868991 - RNA, 22 nt, Human
aaagucuugugacuagugcuga

SEQ ID NO: 1868992 - RNA, 23 nt, Human
aaagucuugugacuagugcugaa

SEQ ID NO: 1868993 - RNA, 22 nt, Human
aaagucucucauucuaggccuc

SEQ ID NO: 1868994 - RNA, 20 nt, Human
aaauagucuagacuaaaaga

SEQ ID NO: 1868995 - RNA, 21 nt, Human
aaauagucuagacuaaaagau

SEQ ID NO: 1868996 - RNA, 18 nt, Human
aagcuaauaaaauaucau

SEQ ID NO: 1868997 - RNA, 20 nt, Human
aagcuaauaaaauaucauuc

SEQ ID NO: 1868998 - RNA, 21 nt, Human
aagcuaauaaaauaucauuca

SEQ ID NO: 1868999 - RNA, 17 nt, Human
aagcuaauaaaauauca

SEQ ID NO: 1869000 - RNA, 21 nt, Human
aagcuaaauccuuuacuguua

SEQ ID NO: 1869001 - RNA, 19 nt, Human
aagaacacccuauauuuug

SEQ ID NO: 1869002 - RNA, 21 nt, Human
aagaacacccuauauuuugca

SEQ ID NO: 1869003 - RNA, 16 nt, Human
aagcagagaagcucuc

SEQ ID NO: 1869004 - RNA, 14 nt, Human
aagcagagaagcuc

SEQ ID NO: 1869005 - RNA, 21 nt, Human
aauaauccuaaacauaugaau

SEQ ID NO: 1869006 - RNA, 13 nt, Human
aauaaacuaaaga

SEQ ID NO: 1869007 - RNA, 21 nt, Human
aagucucucauucuaggccuc

SEQ ID NO: 1869008 - RNA, 18 nt, Human
cucuucaaggacuuucug

SEQ ID NO: 1869009 - RNA, 21 nt, Human
cugaccugguccacagggcac

SEQ ID NO: 1869010 - RNA, 20 nt, Human
cugaccugguccacagggca

SEQ ID NO: 1869011 - RNA, 18 nt, Human
cugaccugguccacaggg

SEQ ID NO: 1869012 - RNA, 17 nt, Human
cugaccugguccacagg

SEQ ID NO: 1869013 - RNA, 16 nt, Human
cugaccugguccacag

SEQ ID NO: 1869014 - RNA, 13 nt, Human
cucucacauuacu

SEQ ID NO: 1869015 - RNA, 14 nt, Human
cucucacauuacug

SEQ ID NO: 1869016 - RNA, 16 nt, Human
cuccaacucagaaggg

SEQ ID NO: 1869017 - RNA, 14 nt, Human
ccuuucauuuacug

SEQ ID NO: 1869018 - RNA, 16 nt, Human
ccuuucauuuacugug

SEQ ID NO: 1869019 - RNA, 22 nt, Human
ccuuucauuuacuguggcuucu

SEQ ID NO: 1869020 - RNA, 18 nt, Human
ccuuucauuuacuguggc

SEQ ID NO: 1869021 - RNA, 19 nt, Human
ccuuucauuuacuguggcu

SEQ ID NO: 1869022 - RNA, 17 nt, Human
cgacacugggaggccag

SEQ ID NO: 1869023 - RNA, 14 nt, Human
cgaccuuggccgca

SEQ ID NO: 1869024 - RNA, 15 nt, Human
cgacgccacagccca

SEQ ID NO: 1869025 - RNA, 23 nt, Human
cgacgccacagcccagccacgga

SEQ ID NO: 1869026 - RNA, 16 nt, Human
cgaccuuggccgcacc

SEQ ID NO: 1869027 - RNA, 23 nt, Human
cgcaggagcacacccagccccca

SEQ ID NO: 1869028 - RNA, 18 nt, Human
cgcaggagcacacccagc

SEQ ID NO: 1869029 - RNA, 15 nt, Human
cggcuccacuaggac

SEQ ID NO: 1869030 - RNA, 22 nt, Human
cggcucccggggcagggcagcc

SEQ ID NO: 1869031 - RNA, 21 nt, Human
cggcucccggggcagggcagc

SEQ ID NO: 1869032 - RNA, 13 nt, Human
ccauuuccugaga

SEQ ID NO: 1869033 - RNA, 21 nt, Human
ccagucacugugagcucccag

SEQ ID NO: 1869034 - RNA, 21 nt, Human
ccaggaguguggccacguggg

SEQ ID NO: 1869035 - RNA, 23 nt, Human
ccagcguggcgcaguggcccuga

SEQ ID NO: 1869036 - RNA, 20 nt, Human
ccuguaaucauauaauaaau

SEQ ID NO: 1869037 - RNA, 22 nt, Human
ccugccucccgcccccuuggcu

SEQ ID NO: 1869038 - RNA, 22 nt, Human
ccaaucauuuuaauuauuauuc

SEQ ID NO: 1869039 - RNA, 12 nt, Human
ccaaucauuuua

SEQ ID NO: 1869040 - RNA, 14 nt, Human
ccaaucauuuuaau

SEQ ID NO: 1869041 - RNA, 18 nt, Human
cauauggacucugcacau

SEQ ID NO: 1869042 - RNA, 15 nt, Human
cauauggacucugca

SEQ ID NO: 1869043 - RNA, 17 nt, Human
cauauggacucugcaca

SEQ ID NO: 1869044 - RNA, 20 nt, Human
cauauggacucugcacauga

SEQ ID NO: 1869045 - RNA, 22 nt, Human
cauggcuauaaacaauuacaug

SEQ ID NO: 1869046 - RNA, 23 nt, Human
cauucuaggccuccuggcccagg

SEQ ID NO: 1869047 - RNA, 15 nt, Human
cagaucauccagaag

SEQ ID NO: 1869048 - RNA, 14 nt, Human
cagccagccgugag

SEQ ID NO: 1869049 - RNA, 20 nt, Human
cagccaggacaccgggcagg

SEQ ID NO: 1869050 - RNA, 12 nt, Human
cagccaggacac

SEQ ID NO: 1869051 - RNA, 16 nt, Human
cagccaggacaccggg

SEQ ID NO: 1869052 - RNA, 11 nt, Human
cagccaggaca

SEQ ID NO: 1869053 - RNA, 18 nt, Human
cagggcucccacagagac

SEQ ID NO: 1869054 - RNA, 15 nt, Human
cagggcucccacaga

SEQ ID NO: 1869055 - RNA, 19 nt, Human
cagggcucccacagagaca

SEQ ID NO: 1869056 - RNA, 14 nt, Human
caccuaaagcagcc

SEQ ID NO: 1869057 - RNA, 17 nt, Human
caccuaaagcagccagc

SEQ ID NO: 1869058 - RNA, 15 nt, Human
caccuaaagcagcca

SEQ ID NO: 1869059 - RNA, 23 nt, Human
caccucaagaagaagaggggcau

SEQ ID NO: 1869060 - RNA, 15 nt, Human
caccuugugucugua

SEQ ID NO: 1869061 - RNA, 17 nt, Human
caccuugugucuguaca

SEQ ID NO: 1869062 - RNA, 21 nt, Human
caccuugugucuguacacgug

SEQ ID NO: 1869063 - RNA, 15 nt, Human
cacaagccagggugu

SEQ ID NO: 1869064 - RNA, 12 nt, Human
cacaagccaggg

SEQ ID NO: 1869065 - RNA, 17 nt, Human
auucuugccaaauauaa

SEQ ID NO: 1869066 - RNA, 16 nt, Human
auuucagcagcugcag

SEQ ID NO: 1869067 - RNA, 17 nt, Human
cuggcagcucagcuucc

SEQ ID NO: 1869068 - RNA, 13 nt, Human
cuggcagcucagc

SEQ ID NO: 1869069 - RNA, 14 nt, Human
cuggcucccaggac

SEQ ID NO: 1869070 - RNA, 16 nt, Human
cuggcucccaggacac

SEQ ID NO: 1869071 - RNA, 15 nt, Human
cuggcuccccaaagg

SEQ ID NO: 1869072 - RNA, 15 nt, Human
cuggcucccaggaca

SEQ ID NO: 1869073 - RNA, 14 nt, Human
cuggcuccccaaag

SEQ ID NO: 1869074 - RNA, 19 nt, Human
cuggaaacauucaggagcu

SEQ ID NO: 1869075 - RNA, 19 nt, Human
cuguuaucaaaacuuucuu

SEQ ID NO: 1869076 - RNA, 15 nt, Human
cuuuuuuuggcccag

SEQ ID NO: 1869077 - RNA, 16 nt, Human
cuuuuuuuggcccagg

SEQ ID NO: 1869078 - RNA, 21 nt, Human
gaacaagcaaacccagacggc

SEQ ID NO: 1869079 - RNA, 16 nt, Human
gaacaagcaaacccag

SEQ ID NO: 1869080 - RNA, 21 nt, Human
cuuggccgcaccuaaagcagc

SEQ ID NO: 1869081 - RNA, 22 nt, Human
cuuggccgcaccuaaagcagcc

SEQ ID NO: 1869082 - RNA, 16 nt, Human
gaucucugcagggccg

SEQ ID NO: 1869083 - RNA, 15 nt, Human
gaucucugcagggcc

SEQ ID NO: 1869084 - RNA, 20 nt, Human
gaucucugcagggccgccag

SEQ ID NO: 1869085 - RNA, 13 nt, Human
gcagccagccgug

SEQ ID NO: 1869086 - RNA, 22 nt, Human
gcagccagccgugagugcagac

SEQ ID NO: 1869087 - RNA, 23 nt, Human
gcagccagccgugagugcagacc

SEQ ID NO: 1869088 - RNA, 12 nt, Human
gcagccaggaca

SEQ ID NO: 1869089 - RNA, 14 nt, Human
gcaguuggccagag

SEQ ID NO: 1869090 - RNA, 22 nt, Human
gcaguuggccagagagccuggu

SEQ ID NO: 1869091 - RNA, 17 nt, Human
gcagucuguccaggcuc

SEQ ID NO: 1869092 - RNA, 23 nt, Human
gcauccacuucuuucagcagacu

SEQ ID NO: 1869093 - RNA, 18 nt, Human
gcauccuccacaauagca

SEQ ID NO: 1869094 - RNA, 20 nt, Human
gcaucuagcaugucgucaaa

SEQ ID NO: 1869095 - RNA, 23 nt, Human
gacacugggaggccagugagcca

SEQ ID NO: 1869096 - RNA, 17 nt, Human
gacacugggaggccagu

SEQ ID NO: 1869097 - RNA, 16 nt, Human
gacacugggaggccag

SEQ ID NO: 1869098 - RNA, 23 nt, Human
gacgccacagcccagccacggac

SEQ ID NO: 1869099 - RNA, 16 nt, Human
gaccuccaagccacug

SEQ ID NO: 1869100 - RNA, 13 nt, Human
gaccucagggcac

SEQ ID NO: 1869101 - RNA, 20 nt, Human
gaccucaguuuuaucauuuu

SEQ ID NO: 1869102 - RNA, 21 nt, Human
gaccucaguuuuaucauuuuc

SEQ ID NO: 1869103 - RNA, 12 nt, Human
gaggggagaagc

SEQ ID NO: 1869104 - RNA, 20 nt, Human
gagaccuggacacaggccug

SEQ ID NO: 1869105 - RNA, 19 nt, Human
gagaccuggacacaggccu

SEQ ID NO: 1869106 - RNA, 19 nt, Human
gagaccuggcacuggaugc

SEQ ID NO: 1869107 - RNA, 16 nt, Human
gccuggcucccaggac

SEQ ID NO: 1869108 - RNA, 18 nt, Human
gccuggcucccaggacac

SEQ ID NO: 1869109 - RNA, 17 nt, Human
gccuggcucccaggaca

SEQ ID NO: 1869110 - RNA, 13 nt, Human
gcguggacucugc

SEQ ID NO: 1869111 - RNA, 14 nt, Human
gcguggacucugca

SEQ ID NO: 1869112 - RNA, 17 nt, Human
gcguggacucugcacau

SEQ ID NO: 1869113 - RNA, 18 nt, Human
gcguggacucugcacaug

SEQ ID NO: 1869114 - RNA, 15 nt, Human
gcggcucccggggca

SEQ ID NO: 1869115 - RNA, 22 nt, Human
gcggcucccggggcagggcagc

SEQ ID NO: 1869116 - RNA, 12 nt, Human
ggaaucaagauu

SEQ ID NO: 1869117 - RNA, 18 nt, Human
ggacacaggccugcucuc

SEQ ID NO: 1869118 - RNA, 13 nt, Human
ggacacaggccug

SEQ ID NO: 1869119 - RNA, 12 nt, Human
ggacaccgggca

SEQ ID NO: 1869120 - RNA, 16 nt, Human
ggaaaaaauaacaaug

SEQ ID NO: 1869121 - RNA, 19 nt, Human
ggcucccggggcagggcag

SEQ ID NO: 1869122 - RNA, 22 nt, Human
ggcuggcaugauccaagcaaga

SEQ ID NO: 1869123 - RNA, 12 nt, Human
ggcuggcaugau

SEQ ID NO: 1869124 - RNA, 23 nt, Human
aaaaaguuuugcccuuuuuaagg

SEQ ID NO: 1869125 - RNA, 17 nt, Human
ggccgcccgggcccaga

SEQ ID NO: 1869126 - RNA, 21 nt, Human
ggccgcccgggcccagaggag

SEQ ID NO: 1869127 - RNA, 16 nt, Human
ggccuggcagcucagc

SEQ ID NO: 1869128 - RNA, 14 nt, Human
ggccuggcagcuca

SEQ ID NO: 1869129 - RNA, 20 nt, Human
ggcuaagcuucacuguaaaa

SEQ ID NO: 1869130 - RNA, 20 nt, Human
ggauuucaugauuucauuuc

SEQ ID NO: 1869131 - RNA, 22 nt, Human
ggcagggccgcccgggcccaga

SEQ ID NO: 1869132 - RNA, 20 nt, Human
ggcagccuggcucccaggac

SEQ ID NO: 1869133 - RNA, 21 nt, Human
ggcagccuggcucccaggaca

SEQ ID NO: 1869134 - RNA, 14 nt, Human
ggcagccuggcucc

SEQ ID NO: 1869135 - RNA, 18 nt, Human
ggcagccuggcucccagg

SEQ ID NO: 1869136 - RNA, 19 nt, Human
ggcagccuggcucccagga

SEQ ID NO: 1869137 - RNA, 22 nt, Human
ggcagccuggcucccaggacac

SEQ ID NO: 1869138 - RNA, 22 nt, Human
ggccagagagccuggugcugcu

SEQ ID NO: 1869139 - RNA, 18 nt, Human
ggccagagagccuggugc

SEQ ID NO: 1869140 - RNA, 21 nt, Human
ggccagagagccuggugcugc

SEQ ID NO: 1869141 - RNA, 13 nt, Human
ggagugugugucu

SEQ ID NO: 1869142 - RNA, 18 nt, Human
aaauauaugcuaagucuu

SEQ ID NO: 1869143 - RNA, 20 nt, Human
aaauauauuuaagauaauua

SEQ ID NO: 1869144 - RNA, 21 nt, Human
aaauauauuuaagauaauuau

SEQ ID NO: 1869145 - RNA, 12 nt, Human
aaauauauuuaa

SEQ ID NO: 1869146 - RNA, 22 nt, Human
aaauauauuuaagauaauuaua

SEQ ID NO: 1869147 - RNA, 17 nt, Human
aaauaucauucagcaac

SEQ ID NO: 1869148 - RNA, 16 nt, Human
aaauaucauucagcaa

SEQ ID NO: 1869149 - RNA, 13 nt, Human
aaauaucauucag

SEQ ID NO: 1869150 - RNA, 14 nt, Human
aaauaucauucagc

SEQ ID NO: 1869151 - RNA, 15 nt, Human
aaauaucauucagca

SEQ ID NO: 1869152 - RNA, 14 nt, Human
guaaucaauguuuc

SEQ ID NO: 1869153 - RNA, 18 nt, Human
ggguuuuccaaugugacu

SEQ ID NO: 1869154 - RNA, 13 nt, Human
gguaaaauacuuc

SEQ ID NO: 1869155 - RNA, 14 nt, Human
ggucagugcaaaua

SEQ ID NO: 1869156 - RNA, 21 nt, Human
gguccagaaggagacaggcag

SEQ ID NO: 1869157 - RNA, 17 nt, Human
ggguccagaaggagaca

SEQ ID NO: 1869158 - RNA, 13 nt, Human
ggguccagaagga

SEQ ID NO: 1869159 - RNA, 16 nt, Human
aaaauggaaccaggcu

SEQ ID NO: 1869160 - RNA, 13 nt, Human
aaaauaucauuca

SEQ ID NO: 1869161 - RNA, 14 nt, Human
aaaauaucauucag

SEQ ID NO: 1869162 - RNA, 16 nt, Human
aaaauaucauucagca

SEQ ID NO: 1869163 - RNA, 23 nt, Human
gggccgccagggagaccuggaca

SEQ ID NO: 1869164 - RNA, 20 nt, Human
gggccgcccgggcccagagg

SEQ ID NO: 1869165 - RNA, 20 nt, Human
gggccgccagggagaccugg

SEQ ID NO: 1869166 - RNA, 13 nt, Human
auuaaagacagag

SEQ ID NO: 1869167 - RNA, 15 nt, Human
uuuugccauuaaacu

SEQ ID NO: 1869168 - RNA, 19 nt, Human
uuuuugugaaaagcuccau

SEQ ID NO: 1869169 - RNA, 23 nt, Human
auuagucauucaauaaauuguaa

SEQ ID NO: 1869170 - RNA, 13 nt, Human
auguuguuauuua

SEQ ID NO: 1869171 - RNA, 14 nt, Human
auguuguuauuuaa

SEQ ID NO: 1869172 - RNA, 15 nt, Human
auguuguuauuuaaa

SEQ ID NO: 1869173 - RNA, 17 nt, Human
auguuguuauuuaaaga

SEQ ID NO: 1869174 - RNA, 12 nt, Human
auguuguuauuu

SEQ ID NO: 1869175 - RNA, 15 nt, Human
auucuaaaugaaugu

SEQ ID NO: 1869176 - RNA, 17 nt, Human
auucuaaaugaauguuu

SEQ ID NO: 1869177 - RNA, 18 nt, Human
auucuaaaugaauguuua

SEQ ID NO: 1869178 - RNA, 19 nt, Human
auuucauuuuuacccuuac

SEQ ID NO: 1869179 - RNA, 18 nt, Human
auuucauuucaacuguuu

SEQ ID NO: 1869180 - RNA, 23 nt, Human
auugugaucagaccauaauguua

SEQ ID NO: 1869181 - RNA, 22 nt, Human
auuuucaguuauuauauuuaca

SEQ ID NO: 1869182 - RNA, 23 nt, Human
auuuuaauuauuauucuucauaa

SEQ ID NO: 1869183 - RNA, 13 nt, Human
auuuuaauuauua

SEQ ID NO: 1869184 - RNA, 19 nt, Human
auuuuaauuauuauucuuc

SEQ ID NO: 1869185 - RNA, 18 nt, Human
auuuugguccaaguugug

SEQ ID NO: 1869186 - RNA, 15 nt, Human
uugcuaucuauugau

SEQ ID NO: 1869187 - RNA, 15 nt, Human
aucuaauaccucugu

SEQ ID NO: 1869188 - RNA, 17 nt, Human
aucuaauaccucugugu

SEQ ID NO: 1869189 - RNA, 19 nt, Human
aucuaauaccucugugugc

SEQ ID NO: 1869190 - RNA, 17 nt, Human
aucuuuucacaaauaaa

SEQ ID NO: 1869191 - RNA, 13 nt, Human
aucuuuucacaaa

SEQ ID NO: 1869192 - RNA, 14 nt, Human
aucuuuucacaaau

SEQ ID NO: 1869193 - RNA, 15 nt, Human
aucuuuucacaaaua

SEQ ID NO: 1869194 - RNA, 16 nt, Human
aucuuuucacaaauaa

SEQ ID NO: 1869195 - RNA, 15 nt, Human
augcaccuugugucu

SEQ ID NO: 1869196 - RNA, 16 nt, Human
augcaccuugugucug

SEQ ID NO: 1869197 - RNA, 18 nt, Human
augcaccuugugucugua

SEQ ID NO: 1869198 - RNA, 19 nt, Human
augcaccuugugucuguac

SEQ ID NO: 1869199 - RNA, 18 nt, Human
augagaugccugaagcca

SEQ ID NO: 1869200 - RNA, 15 nt, Human
uuucuccagggucag

SEQ ID NO: 1869201 - RNA, 22 nt, Human
uuucuuuucuggaauguaauca

SEQ ID NO: 1869202 - RNA, 18 nt, Human
uuucuggaauguaaucaa

SEQ ID NO: 1869203 - RNA, 19 nt, Human
uuuccuuucauuuacugug

SEQ ID NO: 1869204 - RNA, 16 nt, Human
uuuccuuccagcccag

SEQ ID NO: 1869205 - RNA, 15 nt, Human
uuuccuuccagccca

SEQ ID NO: 1869206 - RNA, 13 nt, Human
uuuauauauguau

SEQ ID NO: 1869207 - RNA, 17 nt, Human
auggaaccaggcuugga

SEQ ID NO: 1869208 - RNA, 16 nt, Human
auggaaccaggcuugg

SEQ ID NO: 1869209 - RNA, 21 nt, Human
uucaguaacccccacuggacu

SEQ ID NO: 1869210 - RNA, 13 nt, Human
auauaugcuaagu

SEQ ID NO: 1869211 - RNA, 15 nt, Human
auauggccucaagau

SEQ ID NO: 1869212 - RNA, 16 nt, Human
auauggccucaagauc

SEQ ID NO: 1869213 - RNA, 19 nt, Human
aucaauguuucuucuaggu

SEQ ID NO: 1869214 - RNA, 13 nt, Human
auauuuacaaaug

SEQ ID NO: 1869215 - RNA, 21 nt, Human
uucuuuucuggaauguaauca

SEQ ID NO: 1869216 - RNA, 19 nt, Human
uugagaggcccugggguuc

SEQ ID NO: 1869217 - RNA, 16 nt, Human
aucauauaauaaaugu

SEQ ID NO: 1869218 - RNA, 20 nt, Human
aucauauaauaaauguacau

SEQ ID NO: 1869219 - RNA, 18 nt, Human
uucucccugcacaagcca

SEQ ID NO: 1869220 - RNA, 21 nt, Human
uucuucuagguucuaaaaauu

SEQ ID NO: 1869221 - RNA, 18 nt, Human
uucuucuagguucuaaaa

SEQ ID NO: 1869222 - RNA, 12 nt, Human
aggcuggcauga

SEQ ID NO: 1869223 - RNA, 18 nt, Human
uggacgagaaaacaauaa

SEQ ID NO: 1869224 - RNA, 23 nt, Human
uggcacccaagaccucagggcac

SEQ ID NO: 1869225 - RNA, 14 nt, Human
uggcacccaagacc

SEQ ID NO: 1869226 - RNA, 23 nt, Human
uggccgcaccuaaagcagccagc

SEQ ID NO: 1869227 - RNA, 21 nt, Human
uggccgcaccuaaagcagcca

SEQ ID NO: 1869228 - RNA, 22 nt, Human
uggccgcaccuaaagcagccag

SEQ ID NO: 1869229 - RNA, 12 nt, Human
uggccuggcaca

SEQ ID NO: 1869230 - RNA, 16 nt, Human
uggccuggcacacauc

SEQ ID NO: 1869231 - RNA, 18 nt, Human
uggccuggcacacaucag

SEQ ID NO: 1869232 - RNA, 21 nt, Human
aggcccaaauuaucaagcuaa

SEQ ID NO: 1869233 - RNA, 14 nt, Human
aggccuccuggccc

SEQ ID NO: 1869234 - RNA, 11 nt, Human
aggaauuuaaa

SEQ ID NO: 1869235 - RNA, 17 nt, Human
aggacuuucugaagccu

SEQ ID NO: 1869236 - RNA, 21 nt, Human
aggacugugaugcccugcccu

SEQ ID NO: 1869237 - RNA, 20 nt, Human
aggacugugaugcccugccc

SEQ ID NO: 1869238 - RNA, 14 nt, Human
aggacugugaugcc

SEQ ID NO: 1869239 - RNA, 12 nt, Human
ugcauucuagua

SEQ ID NO: 1869240 - RNA, 20 nt, Human
agcuccccgcuucugccugc

SEQ ID NO: 1869241 - RNA, 21 nt, Human
agcuccccgcuucugccugca

SEQ ID NO: 1869242 - RNA, 17 nt, Human
ugcagaccccuuggcca

SEQ ID NO: 1869243 - RNA, 19 nt, Human
ugcagaccccuuggccagc

SEQ ID NO: 1869244 - RNA, 11 nt, Human
agcccagccac

SEQ ID NO: 1869245 - RNA, 15 nt, Human
agcccagccacggac

SEQ ID NO: 1869246 - RNA, 15 nt, Human
ugauuucauuaauac

SEQ ID NO: 1869247 - RNA, 18 nt, Human
ugaugaacucuuaaucaa

SEQ ID NO: 1869248 - RNA, 14 nt, Human
agccagaggacugu

SEQ ID NO: 1869249 - RNA, 13 nt, Human
agccagaggacug

SEQ ID NO: 1869250 - RNA, 17 nt, Human
agccagaggacugugau

SEQ ID NO: 1869251 - RNA, 22 nt, Human
aguugcauagguuuaauaauuu

SEQ ID NO: 1869252 - RNA, 15 nt, Human
aguuuuaucauuuuc

SEQ ID NO: 1869253 - RNA, 14 nt, Human
aguuuuaucauuuu

SEQ ID NO: 1869254 - RNA, 20 nt, Human
aguuuuaucauuuucaaaau

SEQ ID NO: 1869255 - RNA, 19 nt, Human
aguuuccuuccagcccaga

SEQ ID NO: 1869256 - RNA, 20 nt, Human
uguuugccuucuacuuuuaa

SEQ ID NO: 1869257 - RNA, 12 nt, Human
aguucuugugcc

SEQ ID NO: 1869258 - RNA, 13 nt, Human
aguucuugugcca

SEQ ID NO: 1869259 - RNA, 14 nt, Human
aguucuugugccau

SEQ ID NO: 1869260 - RNA, 18 nt, Human
uguuauuuuuuaauuauu

SEQ ID NO: 1869261 - RNA, 20 nt, Human
aguuauuauauuuacaaaug

SEQ ID NO: 1869262 - RNA, 16 nt, Human
uguuguaaacauuucu

SEQ ID NO: 1869263 - RNA, 21 nt, Human
uuaucagucauaacuaaauaa

SEQ ID NO: 1869264 - RNA, 23 nt, Human
uuaucagucauaacuaaauaaag

SEQ ID NO: 1869265 - RNA, 13 nt, Human
uuaucaagcuaau

SEQ ID NO: 1869266 - RNA, 20 nt, Human
uuaucaagcuaauaaaauau

SEQ ID NO: 1869267 - RNA, 15 nt, Human
uuaucaacaauagug

SEQ ID NO: 1869268 - RNA, 16 nt, Human
uuaucaaaacuuucuu

SEQ ID NO: 1869269 - RNA, 21 nt, Human
auacaguucggugagcuacaa

SEQ ID NO: 1869270 - RNA, 14 nt, Human
uuauauauguauuu

SEQ ID NO: 1869271 - RNA, 17 nt, Human
uuauauauguauuuaua

SEQ ID NO: 1869272 - RNA, 17 nt, Human
auaaacuaaagaaaaau

SEQ ID NO: 1869273 - RNA, 12 nt, Human
auaaacuaaaga

SEQ ID NO: 1869274 - RNA, 12 nt, Human
auaaaugucugu

SEQ ID NO: 1869275 - RNA, 15 nt, Human
auaaaugucuguuga

SEQ ID NO: 1869276 - RNA, 14 nt, Human
auaaugaauacuuu

SEQ ID NO: 1869277 - RNA, 23 nt, Human
auaaguucuaguugcuuguaaaa

SEQ ID NO: 1869278 - RNA, 21 nt, Human
auaaguuucugggaccucagu

SEQ ID NO: 1869279 - RNA, 19 nt, Human
ugggugaaggcuggcauga

SEQ ID NO: 1869280 - RNA, 16 nt, Human
ugggugaaggcuggca

SEQ ID NO: 1869281 - RNA, 15 nt, Human
ugggugaaggcuggc

SEQ ID NO: 1869282 - RNA, 14 nt, Human
ugggugaaggcugg

SEQ ID NO: 1869283 - RNA, 21 nt, Human
ugguccacagggcaccugcca

SEQ ID NO: 1869284 - RNA, 15 nt, Human
ugguccacagggcac

SEQ ID NO: 1869285 - RNA, 14 nt, Human
ugguccacagggca

SEQ ID NO: 1869286 - RNA, 13 nt, Human
ugguccacagggc

SEQ ID NO: 1869287 - RNA, 21 nt, Human
aggggucgacuucgggcuggc

SEQ ID NO: 1869288 - RNA, 19 nt, Human
aggggucgacuucgggcug

SEQ ID NO: 1869289 - RNA, 14 nt, Human
ugggaaucaagauu

SEQ ID NO: 1869290 - RNA, 15 nt, Human
aggucagugcaaaua

SEQ ID NO: 1869291 - RNA, 22 nt, Human
ugguccaugggccauaugaaaa

SEQ ID NO: 1869292 - RNA, 17 nt, Human
uguacauguguagccug

SEQ ID NO: 1869293 - RNA, 20 nt, Human
uguacauguguagccugugc

SEQ ID NO: 1869294 - RNA, 21 nt, Human
uguacauguguagccugugca

SEQ ID NO: 1869295 - RNA, 14 nt, Human
uguacauuaauuac

SEQ ID NO: 1869296 - RNA, 22 nt, Human
uguacauuagucauucaauaaa

SEQ ID NO: 1869297 - RNA, 17 nt, Human
agugaaagaaaauaaca

SEQ ID NO: 1869298 - RNA, 15 nt, Human
agugagccacuccgg

SEQ ID NO: 1869299 - RNA, 17 nt, Human
ugucuucucccugcaca

SEQ ID NO: 1869300 - RNA, 13 nt, Human
ugucuuggacacu

SEQ ID NO: 1869301 - RNA, 15 nt, Human
ugucuuggacacugu

SEQ ID NO: 1869302 - RNA, 21 nt, Human
agucacagaacaaauguuugu

SEQ ID NO: 1869303 - RNA, 23 nt, Human
agucacauggccuaugcacauau

SEQ ID NO: 1869304 - RNA, 24 nt, Human
uguccuguaguugcguggacucug

SEQ ID NO: 1869305 - RNA, 13 nt, Human
ugaaagaaaauaa

SEQ ID NO: 1869306 - RNA, 17 nt, Human
ucuuuuuuuggcccagg

SEQ ID NO: 1869307 - RNA, 19 nt, Human
agacucuacccauauuaca

SEQ ID NO: 1869308 - RNA, 22 nt, Human
ugaagaagcuaaauccuuuacu

SEQ ID NO: 1869309 - RNA, 13 nt, Human
agcaagucucuuu

SEQ ID NO: 1869310 - RNA, 15 nt, Human
ugacuuaagaagccu

SEQ ID NO: 1869311 - RNA, 20 nt, Human
ugaccugguccacagggcac

SEQ ID NO: 1869312 - RNA, 15 nt, Human
ugaccugguccacag

SEQ ID NO: 1869313 - RNA, 14 nt, Human
ugacuagugcugaa

SEQ ID NO: 1869314 - RNA, 15 nt, Human
ugacuagugcugaag

SEQ ID NO: 1869315 - RNA, 17 nt, Human
ugacuagugcugaagcu

SEQ ID NO: 1869316 - RNA, 18 nt, Human
ugacuagugcugaagcuu

SEQ ID NO: 1869317 - RNA, 22 nt, Human
ugacuagugcugaagcuuauua

SEQ ID NO: 1869318 - RNA, 21 nt, Human
ugacuagugcugaagcuuauu

SEQ ID NO: 1869319 - RNA, 16 nt, Human
acuuauucucaagaag

SEQ ID NO: 1869320 - RNA, 14 nt, Human
ucuaauaccucugu

SEQ ID NO: 1869321 - RNA, 16 nt, Human
ucuaauaccucugugu

SEQ ID NO: 1869322 - RNA, 17 nt, Human
ucuaauaccucugugug

SEQ ID NO: 1869323 - RNA, 20 nt, Human
ucuaauaccucugugugcuc

SEQ ID NO: 1869324 - RNA, 14 nt, Human
ucuagacuaaaaga

SEQ ID NO: 1869325 - RNA, 18 nt, Human
ucuaguugcuuguaaaau

SEQ ID NO: 1869326 - RNA, 21 nt, Human
ucuauugauaauuuagacauu

SEQ ID NO: 1869327 - RNA, 18 nt, Human
ucugggauaaguaaguuu

SEQ ID NO: 1869328 - RNA, 20 nt, Human
ucugcagggccgccagggag

SEQ ID NO: 1869329 - RNA, 13 nt, Human
ucugaagccucac

SEQ ID NO: 1869330 - RNA, 21 nt, Human
agaaauaugcacaauagcagu

SEQ ID NO: 1869331 - RNA, 14 nt, Human
acucuuaaucaaau

SEQ ID NO: 1869332 - RNA, 15 nt, Human
acugacugcagggac

SEQ ID NO: 1869333 - RNA, 22 nt, Human
acugaccugguccacagggcac

SEQ ID NO: 1869334 - RNA, 21 nt, Human
acugaccugguccacagggca

SEQ ID NO: 1869335 - RNA, 17 nt, Human
acugaccugguccacag

SEQ ID NO: 1869336 - RNA, 13 nt, Human
acucuuuguaaga

SEQ ID NO: 1869337 - RNA, 14 nt, Human
acucuuuguaagag

SEQ ID NO: 1869338 - RNA, 14 nt, Human
acugagccuuguaa

SEQ ID NO: 1869339 - RNA, 15 nt, Human
acuaauuuuaaaaug

SEQ ID NO: 1869340 - RNA, 21 nt, Human
acucaauguuacuaucugcuu

SEQ ID NO: 1869341 - RNA, 12 nt, Human
acuaucugcuuu

SEQ ID NO: 1869342 - RNA, 13 nt, Human
acuaucugcuuuu

SEQ ID NO: 1869343 - RNA, 22 nt, Human
acggcuccacuaggacuucaaa

SEQ ID NO: 1869344 - RNA, 24 nt, Human
acgcggcucccggggcagggcagc

SEQ ID NO: 1869345 - RNA, 13 nt, Human
acgaaacccacuc

SEQ ID NO: 1869346 - RNA, 12 nt, Human
acgaaauguuau

SEQ ID NO: 1869347 - RNA, 13 nt, Human
acgaaauguuauu

SEQ ID NO: 1869348 - RNA, 23 nt, Human
acgaaauguuauuuuuuaauuau

SEQ ID NO: 1869349 - RNA, 16 nt, Human
acgaaauguuauuuuu

SEQ ID NO: 1869350 - RNA, 21 nt, Human
ucauauguaccauguacauga

SEQ ID NO: 1869351 - RNA, 22 nt, Human
ucauauguaccauguacaugaa

SEQ ID NO: 1869352 - RNA, 15 nt, Human
ucauauaauaaaugu

SEQ ID NO: 1869353 - RNA, 16 nt, Human
ucauauaauaaaugua

SEQ ID NO: 1869354 - RNA, 17 nt, Human
ucaguuuuugugaaaag

SEQ ID NO: 1869355 - RNA, 15 nt, Human
ucaguuuuugugaaa

SEQ ID NO: 1869356 - RNA, 16 nt, Human
ucaguuuuaucauuuu

SEQ ID NO: 1869357 - RNA, 17 nt, Human
ucaguuuuaucauuuuc

SEQ ID NO: 1869358 - RNA, 19 nt, Human
ucaguuuuaucauuuucaa

SEQ ID NO: 1869359 - RNA, 17 nt, Human
ucaugauuucauuucaa

SEQ ID NO: 1869360 - RNA, 23 nt, Human
ucaugauuucauuucaacuguuu

SEQ ID NO: 1869361 - RNA, 13 nt, Human
accauaauguuac

SEQ ID NO: 1869362 - RNA, 15 nt, Human
accauaauguuacau

SEQ ID NO: 1869363 - RNA, 18 nt, Human
accauaauguuacauuau

SEQ ID NO: 1869364 - RNA, 17 nt, Human
acccaggaguguggcca

SEQ ID NO: 1869365 - RNA, 18 nt, Human
accccagccuggccacgc

SEQ ID NO: 1869366 - RNA, 20 nt, Human
acccgggcagggcucccaca

SEQ ID NO: 1869367 - RNA, 20 nt, Human
acaugaaucccacccacaug

SEQ ID NO: 1869368 - RNA, 21 nt, Human
acaugaaucccacccacaugu

SEQ ID NO: 1869369 - RNA, 23 nt, Human
acaugaaucccacccacauguga

SEQ ID NO: 1869370 - RNA, 20 nt, Human
ucaagucggaucuaguccag

SEQ ID NO: 1869371 - RNA, 16 nt, Human
ucacugugagcuccca

SEQ ID NO: 1869372 - RNA, 16 nt, Human
ucaauucuugccaaau

SEQ ID NO: 1869373 - RNA, 20 nt, Human
uaacgauaaaagacagugaa

SEQ ID NO: 1869374 - RNA, 14 nt, Human
uaacauauaauguu

SEQ ID NO: 1869375 - RNA, 23 nt, Human
uaacauauaauguuguuauuuaa

SEQ ID NO: 1869376 - RNA, 20 nt, Human
aauaucagcaagucucuuua

SEQ ID NO: 1869377 - RNA, 13 nt, Human
aauccuuuacugu

SEQ ID NO: 1869378 - RNA, 19 nt, Human
aaucuuauaauuuaaaaua

SEQ ID NO: 1869379 - RNA, 18 nt, Human
aaucauauaauaaaugua

SEQ ID NO: 1869380 - RNA, 21 nt, Human
aaucauauaauaaauguacau

SEQ ID NO: 1869381 - RNA, 23 nt, Human
aaugaauguuuacacucuuugua

SEQ ID NO: 1869382 - RNA, 15 nt, Human
uaaucuuuucacaaa

SEQ ID NO: 1869383 - RNA, 16 nt, Human
uaaucuuuucacaaau

SEQ ID NO: 1869384 - RNA, 17 nt, Human
uaaucuuuucacaaaua

SEQ ID NO: 1869385 - RNA, 18 nt, Human
uaaucuuuucacaaauaa

SEQ ID NO: 1869386 - RNA, 19 nt, Human
uaaucuuuucacaaauaaa

SEQ ID NO: 1869387 - RNA, 21 nt, Human
aauuaccuugagccaguaauu

SEQ ID NO: 1869388 - RNA, 18 nt, Human
aauuccaagugauugaaa

SEQ ID NO: 1869389 - RNA, 22 nt, Human
aauuauuauuuauauauguauu

SEQ ID NO: 1869390 - RNA, 20 nt, Human
aauugcauuuuuuaaaacaa

SEQ ID NO: 1869391 - RNA, 21 nt, Human
aauugcauuuuuuaaaacaag

SEQ ID NO: 1869392 - RNA, 14 nt, Human
uacuauauuuaugg

SEQ ID NO: 1869393 - RNA, 13 nt, Human
uacacguguccug

SEQ ID NO: 1869394 - RNA, 17 nt, Human
uacacguguccuguagu

SEQ ID NO: 1869395 - RNA, 16 nt, Human
uacauguguagccugu

SEQ ID NO: 1869396 - RNA, 19 nt, Human
uacauguguagccugugca

SEQ ID NO: 1869397 - RNA, 18 nt, Human
uacauguguagccugugc

SEQ ID NO: 1869398 - RNA, 14 nt, Human
uaugucuuggacac

SEQ ID NO: 1869399 - RNA, 17 nt, Human
uaugucuuggacacugu

SEQ ID NO: 1869400 - RNA, 19 nt, Human
uaugucuuggacacuguac

SEQ ID NO: 1869401 - RNA, 21 nt, Human
uaugucuuggacacuguacaa

SEQ ID NO: 1869402 - RNA, 12 nt, Human
uaucaagcuaau

SEQ ID NO: 1869403 - RNA, 13 nt, Human
uaucaagcuaaua

SEQ ID NO: 1869404 - RNA, 15 nt, Human
uaucaagcuaauaaa

SEQ ID NO: 1869405 - RNA, 23 nt, Human
uaucaagcuaauaaaauaucauu

SEQ ID NO: 1869406 - RNA, 13 nt, Human
uaugcuaaucagg

SEQ ID NO: 1869407 - RNA, 16 nt, Human
uaguaccaaucauuuu

SEQ ID NO: 1869408 - RNA, 23 nt, Human
uaguaccaaucauuuuaauuauu

SEQ ID NO: 1869409 - RNA, 17 nt, Human
acacauaccuuugguua

SEQ ID NO: 1869410 - RNA, 14 nt, Human
acacauaccuuugg

SEQ ID NO: 1869411 - RNA, 14 nt, Human
acaaggagggcaca

SEQ ID NO: 1869412 - RNA, 20 nt, Human
uaggaggaccagagcuacug

SEQ ID NO: 1869413 - RNA, 15 nt, Human
uagccagaggacugu

SEQ ID NO: 1869414 - RNA, 18 nt, Human
acaaaaggauaaugaaua

SEQ ID NO: 1869415 - RNA, 18 nt, Human
acaaaggcaaagggucca

SEQ ID NO: 1869416 - RNA, 22 nt, Human
acaaagaugggugaaggcuggc

SEQ ID NO: 1869417 - RNA, 21 nt, Human
acaaagaugggugaaggcugg

SEQ ID NO: 1869418 - RNA, 14 nt, Human
gugcuccuccuugg

SEQ ID NO: 1869419 - RNA, 13 nt, Human
gucuugugacuag

SEQ ID NO: 1869420 - RNA, 19 nt, Human
gucuugugacuagugcuga

SEQ ID NO: 1869421 - RNA, 20 nt, Human
gucuugugacuagugcugaa

SEQ ID NO: 1869422 - RNA, 21 nt, Human
gucuugugacuagugcugaag

SEQ ID NO: 1869423 - RNA, 19 nt, Human
gucuuauauauuguagaua

SEQ ID NO: 1869424 - RNA, 21 nt, Human
gucucuuuuuuuggcccaggc

SEQ ID NO: 1869425 - RNA, 20 nt, Human
gucucuuuuuuuggcccagg

SEQ ID NO: 1869426 - RNA, 17 nt, Human
aaauuccaagugauuga

SEQ ID NO: 1869427 - RNA, 17 nt, Human
aaauuguauuacaaauc

SEQ ID NO: 1869428 - RNA, 13 nt, Human
guauuuauaaaua

SEQ ID NO: 1869429 - RNA, 21 nt, Human
gucacauggccuaugcacaua

SEQ ID NO: 1869430 - RNA, 23 nt, Human
gucacauggccuaugcacauaug

SEQ ID NO: 1869431 - RNA, 15 nt, Human
gucagaaacaggacc

SEQ ID NO: 1869432 - RNA, 13 nt, Human
aacauauaauguu

SEQ ID NO: 1869433 - RNA, 18 nt, Human
aacauauaauguuguuau

SEQ ID NO: 1869434 - RNA, 21 nt, Human
aacauauaauguuguuauuua

SEQ ID NO: 1869435 - RNA, 21 nt, Human
aacaguuuuuuaugcuaauca

SEQ ID NO: 1869436 - RNA, 22 nt, Human
aacauauaauguuguuauuuaa

SEQ ID NO: 1869437 - RNA, 14 nt, Human
aacauucaggagcu

SEQ ID NO: 1869438 - RNA, 13 nt, Human
aacauucaggagc

SEQ ID NO: 1869439 - RNA, 14 nt, Human
uaaaauaucauuca

SEQ ID NO: 1869440 - RNA, 15 nt, Human
uaaaauaucauucag

SEQ ID NO: 1869441 - RNA, 17 nt, Human
uaaaauaucauucagca

SEQ ID NO: 1869442 - RNA, 16 nt, Human
uaaaauaucauucagc

SEQ ID NO: 1869443 - RNA, 15 nt, Human
aaguuugauuucauu

SEQ ID NO: 1869444 - RNA, 16 nt, Human
aaguuugauuucauua

SEQ ID NO: 1869445 - RNA, 21 nt, Human
aaguuuccuuccagcccagaa

SEQ ID NO: 1869446 - RNA, 20 nt, Human
aaguuuccuuccagcccaga

SEQ ID NO: 1869447 - RNA, 19 nt, Human
aaguuuccuuccagcccag

SEQ ID NO: 1869448 - RNA, 18 nt, Human
aaguuuccuuccagccca

SEQ ID NO: 1869449 - RNA, 17 nt, Human
aaguuuccccaccagug

SEQ ID NO: 1869450 - RNA, 22 nt, Human
guuucaauuccaccugcaauca

SEQ ID NO: 1869451 - RNA, 11 nt, Human
aaguauuuugc

SEQ ID NO: 1869452 - RNA, 14 nt, Human
guucuaguugcuug

SEQ ID NO: 1869453 - RNA, 20 nt, Human
guuauuauauuuacaaaugg

SEQ ID NO: 1869454 - RNA, 13 nt, Human
guuauuuaaagaa

SEQ ID NO: 1869455 - RNA, 19 nt, Human
guuauuauauuuacaaaug

SEQ ID NO: 1869456 - RNA, 16 nt, Human
aagcacuaaacaaaga

SEQ ID NO: 1869457 - RNA, 15 nt, Human
aagcacgaaauguua

SEQ ID NO: 1869458 - RNA, 14 nt, Human
gugcugcugcugcu

SEQ ID NO: 1869459 - RNA, 15 nt, Human
gugcugcugcugcug

SEQ ID NO: 1869460 - RNA, 12 nt, Human
gugucuguacac

SEQ ID NO: 1869461 - RNA, 13 nt, Human
gugucuguacacg

SEQ ID NO: 1869462 - RNA, 16 nt, Human
gugucuguacacgugu

SEQ ID NO: 1869463 - RNA, 21 nt, Human
gugucuguacacguguccugu

SEQ ID NO: 1869464 - RNA, 22 nt, Human
gugucuguacacguguccugua

SEQ ID NO: 1869465 - RNA, 18 nt, Human
caaauuaucaagcuaaua

SEQ ID NO: 1869466 - RNA, 20 nt, Human
caaauuaucaagcuaauaaa

SEQ ID NO: 1869467 - RNA, 21 nt, Human
caaauuaucaagcuaauaaaa

SEQ ID NO: 1869468 - RNA, 16 nt, Human
caaauuaucaagcuaa

SEQ ID NO: 1869469 - RNA, 17 nt, Human
caaauuaucaagcuaau

SEQ ID NO: 1869470 - RNA, 22 nt, Human
auuuugguaaaauacuucuuga

SEQ ID NO: 1869471 - RNA, 20 nt, Human
caaggagggcacaggugucu

SEQ ID NO: 1869472 - RNA, 15 nt, Human
caaggagggcacagg

SEQ ID NO: 1869473 - RNA, 19 nt, Human
caauguuacuaucugcuuu

SEQ ID NO: 1869474 - RNA, 18 nt, Human
cacauaugcaccuugugu

SEQ ID NO: 1869475 - RNA, 19 nt, Human
cacauaugcaccuuguguc

SEQ ID NO: 1869476 - RNA, 20 nt, Human
cacauaugcaccuugugucu

SEQ ID NO: 1869477 - RNA, 21 nt, Human
cacauaugcaccuugugucug

SEQ ID NO: 1869478 - RNA, 22 nt, Human
cacauaugcaccuugugucugu

SEQ ID NO: 1869479 - RNA, 20 nt, Human
uuaucuaauaccucugugug

SEQ ID NO: 1869480 - RNA, 19 nt, Human
uuaucuaauaccucugugu

SEQ ID NO: 1869481 - RNA, 16 nt, Human
uuauauuuacaaaugg

SEQ ID NO: 1869482 - RNA, 12 nt, Human
uuauaauuuaaa

SEQ ID NO: 1869483 - RNA, 13 nt, Human
uuauaauauacua

SEQ ID NO: 1869484 - RNA, 11 nt, Human
uuccagaaucc

SEQ ID NO: 1869485 - RNA, 23 nt, Human
uucaguuauuauauuuacaaaug

SEQ ID NO: 1869486 - RNA, 18 nt, Human
uucaauaaaugucuguug

SEQ ID NO: 1869487 - RNA, 19 nt, Human
uucaauaaaugucuguuga

SEQ ID NO: 1869488 - RNA, 11 nt, Human
uucacaaauaa

SEQ ID NO: 1869489 - RNA, 16 nt, Human
uugacaaccaugagac

SEQ ID NO: 1869490 - RNA, 15 nt, Human
uugacucuuuugcca

SEQ ID NO: 1869491 - RNA, 21 nt, Human
uugacucuuuugccauuaaac

SEQ ID NO: 1869492 - RNA, 22 nt, Human
uucuggaauguaaucaauguuu

SEQ ID NO: 1869493 - RNA, 15 nt, Human
uucuggaauguaauc

SEQ ID NO: 1869494 - RNA, 16 nt, Human
uucuggaauguaauca

SEQ ID NO: 1869495 - RNA, 20 nt, Human
uucuggaauguaaucaaugu

SEQ ID NO: 1869496 - RNA, 18 nt, Human
uucggugagcuacaaaug

SEQ ID NO: 1869497 - RNA, 16 nt, Human
uuccuuucauuuacug

SEQ ID NO: 1869498 - RNA, 20 nt, Human
uuccuuucauuuacuguggc

SEQ ID NO: 1869499 - RNA, 14 nt, Human
uuucagcagacuga

SEQ ID NO: 1869500 - RNA, 14 nt, Human
uuucauuuacugug

SEQ ID NO: 1869501 - RNA, 17 nt, Human
uuucauuuacuguggcu

SEQ ID NO: 1869502 - RNA, 12 nt, Human
uuucacaaauaa

SEQ ID NO: 1869503 - RNA, 13 nt, Human
uuucacaaauaaa

SEQ ID NO: 1869504 - RNA, 16 nt, Human
uuuacacucuuuguaa

SEQ ID NO: 1869505 - RNA, 19 nt, Human
uuuaacucuauaauguguu

SEQ ID NO: 1869506 - RNA, 22 nt, Human
uugugccauagucacauggccu

SEQ ID NO: 1869507 - RNA, 16 nt, Human
uuguauuaaagacaga

SEQ ID NO: 1869508 - RNA, 14 nt, Human
uuguauuaaagaca

SEQ ID NO: 1869509 - RNA, 20 nt, Human
uuguacauguguagccugug

SEQ ID NO: 1869510 - RNA, 21 nt, Human
uuguacauguguagccugugc

SEQ ID NO: 1869511 - RNA, 21 nt, Human
uuuuaaaguaacccuacaaaa

SEQ ID NO: 1869512 - RNA, 14 nt, Human
uuuucaaaauggag

SEQ ID NO: 1869513 - RNA, 13 nt, Human
ugcauguaugucu

SEQ ID NO: 1869514 - RNA, 14 nt, Human
ugcauguaugucuu

SEQ ID NO: 1869515 - RNA, 15 nt, Human
ugcauguaugucuug

SEQ ID NO: 1869516 - RNA, 16 nt, Human
ugcauguaugucuugg

SEQ ID NO: 1869517 - RNA, 19 nt, Human
ugccacugacugcagggac

SEQ ID NO: 1869518 - RNA, 16 nt, Human
ugccucccgcccccuu

SEQ ID NO: 1869519 - RNA, 14 nt, Human
ugcaccuugugucu

SEQ ID NO: 1869520 - RNA, 15 nt, Human
ugcaccuugugucug

SEQ ID NO: 1869521 - RNA, 16 nt, Human
ugcaccuugugucugu

SEQ ID NO: 1869522 - RNA, 23 nt, Human
ugagcucccaggugcagccagag

SEQ ID NO: 1869523 - RNA, 21 nt, Human
ugagcucccaggugcagccag

SEQ ID NO: 1869524 - RNA, 19 nt, Human
ugaguuucucucacauuac

SEQ ID NO: 1869525 - RNA, 16 nt, Human
ugaguccuagagcuac

SEQ ID NO: 1869526 - RNA, 14 nt, Human
ugaugcccugcccu

SEQ ID NO: 1869527 - RNA, 18 nt, Human
ugaucagaccauaauguu

SEQ ID NO: 1869528 - RNA, 19 nt, Human
uggacucugcacaugucuu

SEQ ID NO: 1869529 - RNA, 15 nt, Human
uggacucugcacaug

SEQ ID NO: 1869530 - RNA, 16 nt, Human
uggacucugcacauga

SEQ ID NO: 1869531 - RNA, 17 nt, Human
uggacucugcacaugaa

SEQ ID NO: 1869532 - RNA, 17 nt, Human
uggacucugcacauguc

SEQ ID NO: 1869533 - RNA, 18 nt, Human
uggacucugcacaugucu

SEQ ID NO: 1869534 - RNA, 22 nt, Human
uggacucugcacaugucuugua

SEQ ID NO: 1869535 - RNA, 13 nt, Human
uggcacuggaugc

SEQ ID NO: 1869536 - RNA, 15 nt, Human
uggcacuggaugcag

SEQ ID NO: 1869537 - RNA, 18 nt, Human
uggcacuggaugcagaaa

SEQ ID NO: 1869538 - RNA, 19 nt, Human
uggcacugacugggcauag

SEQ ID NO: 1869539 - RNA, 15 nt, Human
uggcuccccaaaggg

SEQ ID NO: 1869540 - RNA, 14 nt, Human
uggcuccccaaagg

SEQ ID NO: 1869541 - RNA, 13 nt, Human
uggccucaagauc

SEQ ID NO: 1869542 - RNA, 21 nt, Human
uggccucaagaucaaugaaau

SEQ ID NO: 1869543 - RNA, 22 nt, Human
uggccucaagaucaaugaaaug

SEQ ID NO: 1869544 - RNA, 18 nt, Human
uguccucccagcuccuca

SEQ ID NO: 1869545 - RNA, 16 nt, Human
uguacacguguccugu

SEQ ID NO: 1869546 - RNA, 17 nt, Human
uguacacguguccugua

SEQ ID NO: 1869547 - RNA, 14 nt, Human
ucccggggcagggc

SEQ ID NO: 1869548 - RNA, 16 nt, Human
ucccggggcagggcag

SEQ ID NO: 1869549 - RNA, 21 nt, Human
ucccggggcagggcagccguc

SEQ ID NO: 1869550 - RNA, 18 nt, Human
ucccugcacaagccaggg

SEQ ID NO: 1869551 - RNA, 15 nt, Human
ucccugcacaagcca

SEQ ID NO: 1869552 - RNA, 16 nt, Human
ucccugcacaagccag

SEQ ID NO: 1869553 - RNA, 16 nt, Human
uccuccuuggugccug

SEQ ID NO: 1869554 - RNA, 17 nt, Human
uccuccuuggugccugg

SEQ ID NO: 1869555 - RNA, 19 nt, Human
uccuccuuggugccuggcc

SEQ ID NO: 1869556 - RNA, 13 nt, Human
uccuauaugcacu

SEQ ID NO: 1869557 - RNA, 14 nt, Human
ucuaauaucagcaa

SEQ ID NO: 1869558 - RNA, 16 nt, Human
ucugcauucuaguacu

SEQ ID NO: 1869559 - RNA, 16 nt, Human
ucugcacaugucuugu

SEQ ID NO: 1869560 - RNA, 17 nt, Human
ucugcacaugucuugua

SEQ ID NO: 1869561 - RNA, 19 nt, Human
ucugcacaugucuuguaca

SEQ ID NO: 1869562 - RNA, 12 nt, Human
ucugcacauguc

SEQ ID NO: 1869563 - RNA, 15 nt, Human
ucugcacaugucuug

SEQ ID NO: 1869564 - RNA, 12 nt, Human
ucugcacaugaa

SEQ ID NO: 1869565 - RNA, 23 nt, Human
ucugcacaugaaucccacccaca

SEQ ID NO: 1869566 - RNA, 19 nt, Human
ucucuuuuuuuggcccagg

SEQ ID NO: 1869567 - RNA, 13 nt, Human
ucugggaccucag

SEQ ID NO: 1869568 - RNA, 16 nt, Human
ucugggaccucaguuu

SEQ ID NO: 1869569 - RNA, 17 nt, Human
ucugguuaggauggcag

SEQ ID NO: 1869570 - RNA, 16 nt, Human
uauuuauauauguauu

SEQ ID NO: 1869571 - RNA, 23 nt, Human
uauuuauauauguauuuauaaau

SEQ ID NO: 1869572 - RNA, 19 nt, Human
ucaauaaacuaaagaaaaa

SEQ ID NO: 1869573 - RNA, 16 nt, Human
ucaauaaaugucuguu

SEQ ID NO: 1869574 - RNA, 15 nt, Human
ucaauaaaugucugu

SEQ ID NO: 1869575 - RNA, 16 nt, Human
uauuuauaaauauauu

SEQ ID NO: 1869576 - RNA, 17 nt, Human
uauuuauaaauauauuu

SEQ ID NO: 1869577 - RNA, 19 nt, Human
uauuuauaaauauauuuaa

SEQ ID NO: 1869578 - RNA, 15 nt, Human
uauuaaugcuaaggg

SEQ ID NO: 1869579 - RNA, 16 nt, Human
uauguaccauguacau

SEQ ID NO: 1869580 - RNA, 12 nt, Human
uauguauuuaua

SEQ ID NO: 1869581 - RNA, 12 nt, Human
uauuaaugcuaa

SEQ ID NO: 1869582 - RNA, 13 nt, Human
uauuaaugcuaag

SEQ ID NO: 1869583 - RNA, 14 nt, Human
uauuaaugcuaagg

SEQ ID NO: 1869584 - RNA, 13 nt, Human
ucauucaauaaau

SEQ ID NO: 1869585 - RNA, 15 nt, Human
ucagggaggucauuu

SEQ ID NO: 1869586 - RNA, 15 nt, Human
ucagaccauaauguu

SEQ ID NO: 1869587 - RNA, 23 nt, Human
ucagaccauaauguuacauuauu

SEQ ID NO: 1869588 - RNA, 14 nt, Human
ucagaaacaggacc

SEQ ID NO: 1869589 - RNA, 13 nt, Human
ucacugccauaua

SEQ ID NO: 1869590 - RNA, 17 nt, Human
gcuauaaacaauuacau

SEQ ID NO: 1869591 - RNA, 13 nt, Human
gccuggcacacau

SEQ ID NO: 1869592 - RNA, 16 nt, Human
gccuggcacacaucag

SEQ ID NO: 1869593 - RNA, 14 nt, Human
gccuggcacacauc

SEQ ID NO: 1869594 - RNA, 17 nt, Human
gccuuguaauucuaaau

SEQ ID NO: 1869595 - RNA, 20 nt, Human
gccuuguaauucuaaaugaa

SEQ ID NO: 1869596 - RNA, 15 nt, Human
gcgcaguggcccuga

SEQ ID NO: 1869597 - RNA, 18 nt, Human
gcgcaguggcccugagca

SEQ ID NO: 1869598 - RNA, 21 nt, Human
gcuggcaugauccaagcaaga

SEQ ID NO: 1869599 - RNA, 23 nt, Human
gcuggccaucugguuaggauggc

SEQ ID NO: 1869600 - RNA, 12 nt, Human
gggaaucaagau

SEQ ID NO: 1869601 - RNA, 21 nt, Human
gggagcuccaacucagaaggg

SEQ ID NO: 1869602 - RNA, 18 nt, Human
gggagcuagccagaggac

SEQ ID NO: 1869603 - RNA, 15 nt, Human
gggagcuagccagag

SEQ ID NO: 1869604 - RNA, 16 nt, Human
gggagccgggccgcag

SEQ ID NO: 1869605 - RNA, 14 nt, Human
ggcucccaggacac

SEQ ID NO: 1869606 - RNA, 12 nt, Human
ggccucaagauc

SEQ ID NO: 1869607 - RNA, 18 nt, Human
ggccucaagaucaaugaa

SEQ ID NO: 1869608 - RNA, 22 nt, Human
ggcccagaggagcugggagccg

SEQ ID NO: 1869609 - RNA, 22 nt, Human
ggcacccaagaccucagggcac

SEQ ID NO: 1869610 - RNA, 18 nt, Human
ggcacccaagaccucagg

SEQ ID NO: 1869611 - RNA, 18 nt, Human
ggcagagcugcuccccuc

SEQ ID NO: 1869612 - RNA, 18 nt, Human
ggcaugauccaagcaaga

SEQ ID NO: 1869613 - RNA, 16 nt, Human
ggcaugauccaagcaa

SEQ ID NO: 1869614 - RNA, 15 nt, Human
ggcaugauccaagca

SEQ ID NO: 1869615 - RNA, 17 nt, Human
ggagcacacccagcccc

SEQ ID NO: 1869616 - RNA, 15 nt, Human
ggagcacacccagcc

SEQ ID NO: 1869617 - RNA, 14 nt, Human
ggagcacacccagc

SEQ ID NO: 1869618 - RNA, 17 nt, Human
ggagacaggcagagcug

SEQ ID NO: 1869619 - RNA, 23 nt, Human
ggagcgaacuggcgccuccgagg

SEQ ID NO: 1869620 - RNA, 20 nt, Human
ggagcuccaacucagaaggg

SEQ ID NO: 1869621 - RNA, 15 nt, Human
ggagcuagccagagg

SEQ ID NO: 1869622 - RNA, 12 nt, Human
ggagcuagccag

SEQ ID NO: 1869623 - RNA, 12 nt, Human
ggagacaggcag

SEQ ID NO: 1869624 - RNA, 13 nt, Human
ggacgcuggcucc

SEQ ID NO: 1869625 - RNA, 23 nt, Human
ggaccaugcgacacugggaggcc

SEQ ID NO: 1869626 - RNA, 13 nt, Human
gccacagcccagc

SEQ ID NO: 1869627 - RNA, 19 nt, Human
gccacagcccagccacgga

SEQ ID NO: 1869628 - RNA, 13 nt, Human
gccacgcagccag

SEQ ID NO: 1869629 - RNA, 14 nt, Human
gccacgcagccagg

SEQ ID NO: 1869630 - RNA, 15 nt, Human
gccacgcagccagga

SEQ ID NO: 1869631 - RNA, 16 nt, Human
gccacgcagccaggac

SEQ ID NO: 1869632 - RNA, 17 nt, Human
gccacgcagccaggaca

SEQ ID NO: 1869633 - RNA, 18 nt, Human
gccacgcagccaggacac

SEQ ID NO: 1869634 - RNA, 16 nt, Human
gccacggacgcuggcu

SEQ ID NO: 1869635 - RNA, 18 nt, Human
gccacggacgcuggcucc

SEQ ID NO: 1869636 - RNA, 22 nt, Human
gcccaaauuaucaagcuaauaa

SEQ ID NO: 1869637 - RNA, 23 nt, Human
gcccaaauuaucaagcuaauaaa

SEQ ID NO: 1869638 - RNA, 15 nt, Human
gccagugagccacuc

SEQ ID NO: 1869639 - RNA, 19 nt, Human
gccagggagaccuggacac

SEQ ID NO: 1869640 - RNA, 18 nt, Human
gccagggagaccuggaca

SEQ ID NO: 1869641 - RNA, 15 nt, Human
gccagggagaccugg

SEQ ID NO: 1869642 - RNA, 22 nt, Human
gccagggagaccuggacacagg

SEQ ID NO: 1869643 - RNA, 21 nt, Human
gccagggagaccuggacacag

SEQ ID NO: 1869644 - RNA, 23 nt, Human
gcccagccacggacgcuggcucc

SEQ ID NO: 1869645 - RNA, 22 nt, Human
gcccagaggagcugggagccgg

SEQ ID NO: 1869646 - RNA, 22 nt, Human
gcauccacuucuuucagcagac

SEQ ID NO: 1869647 - RNA, 17 nt, Human
gcagggcucccacagag

SEQ ID NO: 1869648 - RNA, 12 nt, Human
gcagggcagccg

SEQ ID NO: 1869649 - RNA, 22 nt, Human
gcaggcccaaauuaucaagcua

SEQ ID NO: 1869650 - RNA, 17 nt, Human
gcagagaagcucucggg

SEQ ID NO: 1869651 - RNA, 18 nt, Human
gcagacugaucaggaccu

SEQ ID NO: 1869652 - RNA, 15 nt, Human
gcagcucagcuuccc

SEQ ID NO: 1869653 - RNA, 17 nt, Human
gcaggacgugggcuggg

SEQ ID NO: 1869654 - RNA, 20 nt, Human
gauggcaggacgugggcugg

SEQ ID NO: 1869655 - RNA, 13 nt, Human
gaugcccugcccu

SEQ ID NO: 1869656 - RNA, 21 nt, Human
gaguugaaaaucuuauaauuu

SEQ ID NO: 1869657 - RNA, 15 nt, Human
gaguucuugugccau

SEQ ID NO: 1869658 - RNA, 15 nt, Human
gagccacuccggccc

SEQ ID NO: 1869659 - RNA, 16 nt, Human
gagcacacccagcccc

SEQ ID NO: 1869660 - RNA, 15 nt, Human
gagcacacccagccc

SEQ ID NO: 1869661 - RNA, 13 nt, Human
gagcacacccagc

SEQ ID NO: 1869662 - RNA, 14 nt, Human
gagcuacaaaugca

SEQ ID NO: 1869663 - RNA, 19 nt, Human
gagcuccaacucagaaggg

SEQ ID NO: 1869664 - RNA, 18 nt, Human
gagcuccaacucagaagg

SEQ ID NO: 1869665 - RNA, 19 nt, Human
gagcuuccuguccucccag

SEQ ID NO: 1869666 - RNA, 12 nt, Human
gagcuacaaaug

SEQ ID NO: 1869667 - RNA, 13 nt, Human
gagcuacaaaugc

SEQ ID NO: 1869668 - RNA, 16 nt, Human
gagccuggugcugcug

SEQ ID NO: 1869669 - RNA, 17 nt, Human
gagccuggugcugcugc

SEQ ID NO: 1869670 - RNA, 19 nt, Human
gaggagcugggagccgggc

SEQ ID NO: 1869671 - RNA, 15 nt, Human
gaggccagugagcca

SEQ ID NO: 1869672 - RNA, 22 nt, Human
gagggacgcggcucccggggca

SEQ ID NO: 1869673 - RNA, 14 nt, Human
cucacucaccuuca

SEQ ID NO: 1869674 - RNA, 14 nt, Human
cucaccacccacuu

SEQ ID NO: 1869675 - RNA, 20 nt, Human
cucaagaagaagaggggcau

SEQ ID NO: 1869676 - RNA, 19 nt, Human
cucaagaagaagaggggca

SEQ ID NO: 1869677 - RNA, 18 nt, Human
cgccagggagaccuggac

SEQ ID NO: 1869678 - RNA, 13 nt, Human
cuagguucuaaaa

SEQ ID NO: 1869679 - RNA, 20 nt, Human
cuaugcacauauggacucug

SEQ ID NO: 1869680 - RNA, 21 nt, Human
cuaugcacauauggacucugc

SEQ ID NO: 1869681 - RNA, 18 nt, Human
cuaugcacauauggacuc

SEQ ID NO: 1869682 - RNA, 22 nt, Human
cuaugcacauauggacucugca

SEQ ID NO: 1869683 - RNA, 16 nt, Human
cucccggggcagggca

SEQ ID NO: 1869684 - RNA, 17 nt, Human
cucccggggcagggcag

SEQ ID NO: 1869685 - RNA, 18 nt, Human
cucccggggcagggcagc

SEQ ID NO: 1869686 - RNA, 15 nt, Human
cucccggggcagggc

SEQ ID NO: 1869687 - RNA, 14 nt, Human
cuccuuggugccug

SEQ ID NO: 1869688 - RNA, 15 nt, Human
cuccuuggugccugg

SEQ ID NO: 1869689 - RNA, 19 nt, Human
cuccuuggugccuggccug

SEQ ID NO: 1869690 - RNA, 22 nt, Human
cuccuuggugccuggccuggca

SEQ ID NO: 1869691 - RNA, 12 nt, Human
cucuuuguaaga

SEQ ID NO: 1869692 - RNA, 12 nt, Human
cucugaguguga

SEQ ID NO: 1869693 - RNA, 14 nt, Human
cucugcauucuagu

SEQ ID NO: 1869694 - RNA, 15 nt, Human
cucugcauucuagua

SEQ ID NO: 1869695 - RNA, 13 nt, Human
cucugugugcucc

SEQ ID NO: 1869696 - RNA, 19 nt, Human
cugccacugacugcaggga

SEQ ID NO: 1869697 - RNA, 20 nt, Human
cugccacugacugcagggac

SEQ ID NO: 1869698 - RNA, 21 nt, Human
cugccacugacugcagggaca

SEQ ID NO: 1869699 - RNA, 22 nt, Human
cugcacaugaaucccacccaca

SEQ ID NO: 1869700 - RNA, 23 nt, Human
cugcacaugaaucccacccacau

SEQ ID NO: 1869701 - RNA, 21 nt, Human
cugcacaugucuuguacaugu

SEQ ID NO: 1869702 - RNA, 23 nt, Human
cugcacaugucuuguacaugugu

SEQ ID NO: 1869703 - RNA, 14 nt, Human
cugcacaugucuug

SEQ ID NO: 1869704 - RNA, 16 nt, Human
cugcacaugucuugua

SEQ ID NO: 1869705 - RNA, 18 nt, Human
cugaucaggaccuccaag

SEQ ID NO: 1869706 - RNA, 20 nt, Human
cugagggagcuccaacucag

SEQ ID NO: 1869707 - RNA, 21 nt, Human
gaacuuguaaaggaauuuaaa

SEQ ID NO: 1869708 - RNA, 23 nt, Human
gaagaaaauggaaccaggcuugg

SEQ ID NO: 1869709 - RNA, 15 nt, Human
gaacucaacuuugac

SEQ ID NO: 1869710 - RNA, 15 nt, Human
gaaccguaggaccca

SEQ ID NO: 1869711 - RNA, 18 nt, Human
gaaauaugcacaauagca

SEQ ID NO: 1869712 - RNA, 17 nt, Human
gaaauaugcacaauagc

SEQ ID NO: 1869713 - RNA, 21 nt, Human
gaaauguuauuuuuuaauuau

SEQ ID NO: 1869714 - RNA, 22 nt, Human
gaaauguuauuuuuuaauuauu

SEQ ID NO: 1869715 - RNA, 20 nt, Human
gaauaauccuaaacauauga

SEQ ID NO: 1869716 - RNA, 14 nt, Human
gaauacuuuauaaa

SEQ ID NO: 1869717 - RNA, 15 nt, Human
gaaggcaaagcacga

SEQ ID NO: 1869718 - RNA, 18 nt, Human
gaaggagacaggcagagc

SEQ ID NO: 1869719 - RNA, 16 nt, Human
gaaggagacaggcaga

SEQ ID NO: 1869720 - RNA, 15 nt, Human
gaaggagacaggcag

SEQ ID NO: 1869721 - RNA, 24 nt, Human
gaaggcacuaaaaagagcuguccu

SEQ ID NO: 1869722 - RNA, 22 nt, Human
gaaaacaauaacgauaaaagac

SEQ ID NO: 1869723 - RNA, 19 nt, Human
gaaaaucuuauaauuuaaa

SEQ ID NO: 1869724 - RNA, 19 nt, Human
gaaaauaacgauaaaagac

SEQ ID NO: 1869725 - RNA, 20 nt, Human
gaaaaucuuauaauuuaaaa

SEQ ID NO: 1869726 - RNA, 18 nt, Human
cuuuucuggaauguaauc

SEQ ID NO: 1869727 - RNA, 19 nt, Human
cuuuucuggaauguaauca

SEQ ID NO: 1869728 - RNA, 19 nt, Human
cuuguaaaggaauuuaaaa

SEQ ID NO: 1869729 - RNA, 22 nt, Human
cuuggaaccguaggacccaagc

SEQ ID NO: 1869730 - RNA, 21 nt, Human
cuuuauuuucuauaauuuaaa

SEQ ID NO: 1869731 - RNA, 18 nt, Human
cuuucauuuacuguggcu

SEQ ID NO: 1869732 - RNA, 21 nt, Human
cuuaaucuuuucacaaauaaa

SEQ ID NO: 1869733 - RNA, 17 nt, Human
cuuaaucuuuucacaaa

SEQ ID NO: 1869734 - RNA, 18 nt, Human
cuuaaucuuuucacaaau

SEQ ID NO: 1869735 - RNA, 19 nt, Human
cuuaaucuuuucacaaaua

SEQ ID NO: 1869736 - RNA, 20 nt, Human
cuuaaucuuuucacaaauaa

SEQ ID NO: 1869737 - RNA, 19 nt, Human
cuuaccugggcauucuugu

SEQ ID NO: 1869738 - RNA, 20 nt, Human
cuucaguaacccccacugga

SEQ ID NO: 1869739 - RNA, 22 nt, Human
cuucaguaacccccacuggacu

SEQ ID NO: 1869740 - RNA, 18 nt, Human
cuuccccaacacgcagga

SEQ ID NO: 1869741 - RNA, 18 nt, Human
cuuccuauaugcacuuau

SEQ ID NO: 1869742 - RNA, 23 nt, Human
cugucuucucccugcacaagcca

SEQ ID NO: 1869743 - RNA, 20 nt, Human
cugugagcucccaggugcag

SEQ ID NO: 1869744 - RNA, 14 nt, Human
cugugaugcccugc

SEQ ID NO: 1869745 - RNA, 22 nt, Human
cuguggcuucuuaaucuuuuca

SEQ ID NO: 1869746 - RNA, 20 nt, Human
cugggccuggcagcucagcu

SEQ ID NO: 1869747 - RNA, 18 nt, Human
cugggccuggcagcucag

SEQ ID NO: 1869748 - RNA, 19 nt, Human
cugguuaggauggcaggac

SEQ ID NO: 1869749 - RNA, 18 nt, Human
cugguuaggauggcagga

SEQ ID NO: 1869750 - RNA, 16 nt, Human
cugguuaggauggcag

SEQ ID NO: 1869751 - RNA, 20 nt, Human
cuguaguugcguggacucug

SEQ ID NO: 1869752 - RNA, 17 nt, Human
ccgcaccuaaagcagcc

SEQ ID NO: 1869753 - RNA, 19 nt, Human
ccgcaccuaaagcagccag

SEQ ID NO: 1869754 - RNA, 14 nt, Human
ccuaugcacauaug

SEQ ID NO: 1869755 - RNA, 20 nt, Human
ccuaugcacauauggacucu

SEQ ID NO: 1869756 - RNA, 21 nt, Human
ccuaugcacauauggacucug

SEQ ID NO: 1869757 - RNA, 16 nt, Human
cccugcacaagccagg

SEQ ID NO: 1869758 - RNA, 18 nt, Human
cccggggcagggcagccg

SEQ ID NO: 1869759 - RNA, 16 nt, Human
cccgggcccagaggag

SEQ ID NO: 1869760 - RNA, 13 nt, Human
cccgggcccagag

SEQ ID NO: 1869761 - RNA, 14 nt, Human
cccgggcccagagg

SEQ ID NO: 1869762 - RNA, 12 nt, Human
cccgggcccaga

SEQ ID NO: 1869763 - RNA, 21 nt, Human
cccgggcagggcucccacaga

SEQ ID NO: 1869764 - RNA, 22 nt, Human
cccgggcagggcucccacagag

SEQ ID NO: 1869765 - RNA, 12 nt, Human
cccgggcagggc

SEQ ID NO: 1869766 - RNA, 13 nt, Human
cccgggcagggcu

SEQ ID NO: 1869767 - RNA, 15 nt, Human
cccacaaaggcaaag

SEQ ID NO: 1869768 - RNA, 19 nt, Human
cccacaugugacacauaug

SEQ ID NO: 1869769 - RNA, 13 nt, Human
cgaacuggcgccu

SEQ ID NO: 1869770 - RNA, 15 nt, Human
cgcagccaggacacc

SEQ ID NO: 1869771 - RNA, 12 nt, Human
cgcagccaggac

SEQ ID NO: 1869772 - RNA, 13 nt, Human
cgcagccaggaca

SEQ ID NO: 1869773 - RNA, 14 nt, Human
cgcagccaggacac

SEQ ID NO: 1869774 - RNA, 16 nt, Human
cgccagggagaccugg

SEQ ID NO: 1869775 - RNA, 17 nt, Human
ccuugaagaaccucuca

SEQ ID NO: 1869776 - RNA, 18 nt, Human
ccuugaagaaccucucac

SEQ ID NO: 1869777 - RNA, 17 nt, Human
ccugguccacagggcac

SEQ ID NO: 1869778 - RNA, 14 nt, Human
ccuggcagcucagc

SEQ ID NO: 1869779 - RNA, 20 nt, Human
ccuggacacaggccugcucu

SEQ ID NO: 1869780 - RNA, 16 nt, Human
ccuggacacaggccug

SEQ ID NO: 1869781 - RNA, 13 nt, Human
ccuggacacaggc

SEQ ID NO: 1869782 - RNA, 17 nt, Human
ccacggacgcuggcucc

SEQ ID NO: 1869783 - RNA, 14 nt, Human
ccacaccugccucu

SEQ ID NO: 1869784 - RNA, 22 nt, Human
ccagaggacugugaugcccugc

SEQ ID NO: 1869785 - RNA, 20 nt, Human
ccagaggacugugaugcccu

SEQ ID NO: 1869786 - RNA, 22 nt, Human
ccagaggcaccucaagaagaag

SEQ ID NO: 1869787 - RNA, 20 nt, Human
ccagaggagcugggagccgg

SEQ ID NO: 1869788 - RNA, 21 nt, Human
ccagaggagcugggagccggg

SEQ ID NO: 1869789 - RNA, 22 nt, Human
ccagaggagcugggagccgggc

SEQ ID NO: 1869790 - RNA, 21 nt, Human
ccagccacggacgcuggcucc

SEQ ID NO: 1869791 - RNA, 13 nt, Human
cccaaagggugug

SEQ ID NO: 1869792 - RNA, 15 nt, Human
ccauagucacauggc

SEQ ID NO: 1869793 - RNA, 22 nt, Human
ccagggagaccuggacacaggc

SEQ ID NO: 1869794 - RNA, 21 nt, Human
ccagggagaccuggacacagg

SEQ ID NO: 1869795 - RNA, 23 nt, Human
ccagggagaccuggacacaggcc

SEQ ID NO: 1869796 - RNA, 13 nt, Human
cauucuggaauaa

SEQ ID NO: 1869797 - RNA, 16 nt, Human
cauucaggagcuuccu

SEQ ID NO: 1869798 - RNA, 12 nt, Human
cauuuacugugg

SEQ ID NO: 1869799 - RNA, 13 nt, Human
cauuuacuguggc

SEQ ID NO: 1869800 - RNA, 14 nt, Human
cauuuacuguggcu

SEQ ID NO: 1869801 - RNA, 15 nt, Human
cauuuacuguggcuu

SEQ ID NO: 1869802 - RNA, 20 nt, Human
cauguacaugaagaagcuaa

SEQ ID NO: 1869803 - RNA, 23 nt, Human
cauguacugagccuuguaauucu

SEQ ID NO: 1869804 - RNA, 19 nt, Human
cauguacugagccuuguaa

SEQ ID NO: 1869805 - RNA, 22 nt, Human
cauguacugagccuuguaauuc

SEQ ID NO: 1869806 - RNA, 14 nt, Human
cauguguagccugu

SEQ ID NO: 1869807 - RNA, 16 nt, Human
cauguguagccugugc

SEQ ID NO: 1869808 - RNA, 18 nt, Human
cauguguagccugugcau

SEQ ID NO: 1869809 - RNA, 13 nt, Human
caugucuuguaca

SEQ ID NO: 1869810 - RNA, 14 nt, Human
caugucuuguacau

SEQ ID NO: 1869811 - RNA, 15 nt, Human
caugucuuguacaug

SEQ ID NO: 1869812 - RNA, 17 nt, Human
caugucuuguacaugug

SEQ ID NO: 1869813 - RNA, 23 nt, Human
cauccagucucccaacuuguauu

SEQ ID NO: 1869814 - RNA, 22 nt, Human
cauaguaccaaucauuuuaauu

SEQ ID NO: 1869815 - RNA, 16 nt, Human
cauaguaccaaucauu

SEQ ID NO: 1869816 - RNA, 18 nt, Human
cauaguaccaaucauuuu

SEQ ID NO: 1869817 - RNA, 13 nt, Human
cauagucacaugg

SEQ ID NO: 1869818 - RNA, 19 nt, Human
caugagaccacuguuauca

SEQ ID NO: 1869819 - RNA, 17 nt, Human
caugagaccacuguuau

SEQ ID NO: 1869820 - RNA, 20 nt, Human
caugauccaagcaagacuga

SEQ ID NO: 1869821 - RNA, 22 nt, Human
caucuucuuuuugaaaucagca

SEQ ID NO: 1869822 - RNA, 16 nt, Human
cagggacacgggcagc

SEQ ID NO: 1869823 - RNA, 15 nt, Human
cagggacacgggcag

SEQ ID NO: 1869824 - RNA, 21 nt, Human
cagggacacgggcagccuggc

SEQ ID NO: 1869825 - RNA, 17 nt, Human
cagggacacgggcagcc

SEQ ID NO: 1869826 - RNA, 22 nt, Human
cagggccgccagggagaccugg

SEQ ID NO: 1869827 - RNA, 19 nt, Human
cagggccgcccgggcccag

SEQ ID NO: 1869828 - RNA, 16 nt, Human
cagggccgccagggag

SEQ ID NO: 1869829 - RNA, 14 nt, Human
cagggccgccaggg

SEQ ID NO: 1869830 - RNA, 20 nt, Human
cagggccgcccgggcccaga

SEQ ID NO: 1869831 - RNA, 21 nt, Human
cagggccgcccgggcccagag

SEQ ID NO: 1869832 - RNA, 22 nt, Human
cagggccgcccgggcccagagg

SEQ ID NO: 1869833 - RNA, 23 nt, Human
cagggccgcccgggcccagagga

SEQ ID NO: 1869834 - RNA, 15 nt, Human
cagggcaccugccac

SEQ ID NO: 1869835 - RNA, 20 nt, Human
cagggcagccgucaccccug

SEQ ID NO: 1869836 - RNA, 21 nt, Human
caggcuuuuuuccagacucua

SEQ ID NO: 1869837 - RNA, 12 nt, Human
caggcauccucc

SEQ ID NO: 1869838 - RNA, 17 nt, Human
caggcaguuggccagag

SEQ ID NO: 1869839 - RNA, 23 nt, Human
caggcccaaauuaucaagcuaau

SEQ ID NO: 1869840 - RNA, 16 nt, Human
caggacgugggcuggg

SEQ ID NO: 1869841 - RNA, 17 nt, Human
caggacgugggcugggc

SEQ ID NO: 1869842 - RNA, 19 nt, Human
caggagcacacccagcccc

SEQ ID NO: 1869843 - RNA, 16 nt, Human
caggagcacacccagc

SEQ ID NO: 1869844 - RNA, 15 nt, Human
caggagcacacccag

SEQ ID NO: 1869845 - RNA, 21 nt, Human
caggagcacacccagccccca

SEQ ID NO: 1869846 - RNA, 21 nt, Human
caggaguucaauaaaugucug

SEQ ID NO: 1869847 - RNA, 23 nt, Human
caggaguucaauaaaugucuguu

SEQ ID NO: 1869848 - RNA, 21 nt, Human
caguaauugguccgaucuuug

SEQ ID NO: 1869849 - RNA, 14 nt, Human
caguaacuaaagcu

SEQ ID NO: 1869850 - RNA, 18 nt, Human
caggugucugcccccucu

SEQ ID NO: 1869851 - RNA, 16 nt, Human
cagggucagaaacagg

SEQ ID NO: 1869852 - RNA, 10 nt, Human
cagggucaga

SEQ ID NO: 1869853 - RNA, 19 nt, Human
cagggucagaaacaggacc

SEQ ID NO: 1869854 - RNA, 18 nt, Human
cagggucagaaacaggac

SEQ ID NO: 1869855 - RNA, 16 nt, Human
caggugaaacccaguc

SEQ ID NO: 1869856 - RNA, 16 nt, Human
cagugaaagaaaauaa

SEQ ID NO: 1869857 - RNA, 20 nt, Human
cagugaaagaaaauaacaau

SEQ ID NO: 1869858 - RNA, 13 nt, Human
cagugagccacuc

SEQ ID NO: 1869859 - RNA, 15 nt, Human
cagucauaacuaaau

SEQ ID NO: 1869860 - RNA, 14 nt, Human
cagcucagcuuccc

SEQ ID NO: 1869861 - RNA, 13 nt, Human
cagcucagcuucc

SEQ ID NO: 1869862 - RNA, 17 nt, Human
cagccuggccacgcagc

SEQ ID NO: 1869863 - RNA, 18 nt, Human
cagccuggccacgcagcc

SEQ ID NO: 1869864 - RNA, 20 nt, Human
cagccuggcucccaggacac

SEQ ID NO: 1869865 - RNA, 12 nt, Human
cagccuggcucc

SEQ ID NO: 1869866 - RNA, 13 nt, Human
cagccuggcuccc

SEQ ID NO: 1869867 - RNA, 19 nt, Human
cagccuggcucccaggaca

SEQ ID NO: 1869868 - RNA, 21 nt, Human
cagccuggcucccaggacacg

SEQ ID NO: 1869869 - RNA, 19 nt, Human
cagccuggccacgcagcca

SEQ ID NO: 1869870 - RNA, 20 nt, Human
cagccuggccacgcagccag

SEQ ID NO: 1869871 - RNA, 21 nt, Human
cagccuggccacgcagccagg

SEQ ID NO: 1869872 - RNA, 22 nt, Human
cagccuggccacgcagccagga

SEQ ID NO: 1869873 - RNA, 18 nt, Human
cagccgucaccccugccu

SEQ ID NO: 1869874 - RNA, 20 nt, Human
cagccacggacgcuggcucc

SEQ ID NO: 1869875 - RNA, 15 nt, Human
cagcccagccacgga

SEQ ID NO: 1869876 - RNA, 18 nt, Human
cagcagacugaucaggac

SEQ ID NO: 1869877 - RNA, 11 nt, Human
cagcagacuga

SEQ ID NO: 1869878 - RNA, 14 nt, Human
cagcaagucucuuu

SEQ ID NO: 1869879 - RNA, 13 nt, Human
cagaccccuuggc

SEQ ID NO: 1869880 - RNA, 15 nt, Human
cagaccccuuggcca

SEQ ID NO: 1869881 - RNA, 16 nt, Human
cagaccccuuggccag

SEQ ID NO: 1869882 - RNA, 22 nt, Human
cagaccuaggauuucaugauuu

SEQ ID NO: 1869883 - RNA, 16 nt, Human
cagaccauaauguuac

SEQ ID NO: 1869884 - RNA, 16 nt, Human
cagaagcuucugccca

SEQ ID NO: 1869885 - RNA, 18 nt, Human
cagaaggagacaggcaga

SEQ ID NO: 1869886 - RNA, 17 nt, Human
cagaaggagacaggcag

SEQ ID NO: 1869887 - RNA, 13 nt, Human
cagaaggagacag

SEQ ID NO: 1869888 - RNA, 22 nt, Human
cagaaggagacaggcagagcug

SEQ ID NO: 1869889 - RNA, 21 nt, Human
cagaagggagcuagccagagg

SEQ ID NO: 1869890 - RNA, 20 nt, Human
cagaagggagcuagccagag

SEQ ID NO: 1869891 - RNA, 19 nt, Human
cagaagggagcuagccaga

SEQ ID NO: 1869892 - RNA, 13 nt, Human
cagaaacaggacc

SEQ ID NO: 1869893 - RNA, 19 nt, Human
cagagaagcucucgggcua

SEQ ID NO: 1869894 - RNA, 16 nt, Human
cagagacaaggagggc

SEQ ID NO: 1869895 - RNA, 20 nt, Human
cagagacaaggagggcacag

SEQ ID NO: 1869896 - RNA, 13 nt, Human
cagagacaaggag

SEQ ID NO: 1869897 - RNA, 14 nt, Human
cagaggacugugau

SEQ ID NO: 1869898 - RNA, 21 nt, Human
cagaggacugugaugcccugc

SEQ ID NO: 1869899 - RNA, 20 nt, Human
cagaggagcugggagccggg

SEQ ID NO: 1869900 - RNA, 21 nt, Human
cagaggagcugggagccgggc

SEQ ID NO: 1869901 - RNA, 13 nt, Human
caccgggcagggc

SEQ ID NO: 1869902 - RNA, 14 nt, Human
caccgggcagggcc

SEQ ID NO: 1869903 - RNA, 23 nt, Human
caccugccacccugggccuggca

SEQ ID NO: 1869904 - RNA, 20 nt, Human
caccugccacccugggccug

SEQ ID NO: 1869905 - RNA, 15 nt, Human
caccugccacccugg

SEQ ID NO: 1869906 - RNA, 22 nt, Human
caccccugccucccgcccccuu

SEQ ID NO: 1869907 - RNA, 13 nt, Human
cacuaaacaaaga

SEQ ID NO: 1869908 - RNA, 15 nt, Human
cacguguccuguagu

SEQ ID NO: 1869909 - RNA, 16 nt, Human
cacguguccuguaguu

SEQ ID NO: 1869910 - RNA, 12 nt, Human
cacgggcagccu

SEQ ID NO: 1869911 - RNA, 14 nt, Human
cacgggcagccugg

SEQ ID NO: 1869912 - RNA, 15 nt, Human
cacgggcagccuggc

SEQ ID NO: 1869913 - RNA, 18 nt, Human
cacgggcagccuggcucc

SEQ ID NO: 1869914 - RNA, 22 nt, Human
cacgggcagccuggcucccagg

SEQ ID NO: 1869915 - RNA, 23 nt, Human
caccuucaguaacccccacugga

SEQ ID NO: 1869916 - RNA, 22 nt, Human
caccuugaagaaccucucacuu

SEQ ID NO: 1869917 - RNA, 17 nt, Human
cacgaaauguuauuuuu

SEQ ID NO: 1869918 - RNA, 21 nt, Human
cacgcacaugcgaccccgagg

SEQ ID NO: 1869919 - RNA, 20 nt, Human
cacgcaggagcacacccagc

SEQ ID NO: 1869920 - RNA, 19 nt, Human
cacgcaggagcacacccag

SEQ ID NO: 1869921 - RNA, 12 nt, Human
cacgcaggagca

SEQ ID NO: 1869922 - RNA, 21 nt, Human
cacgcagccaggacaccgggc

SEQ ID NO: 1869923 - RNA, 13 nt, Human
cacgcagccagga

SEQ ID NO: 1869924 - RNA, 15 nt, Human
cacgcagccaggaca

SEQ ID NO: 1869925 - RNA, 16 nt, Human
cacgcagccaggacac

SEQ ID NO: 1869926 - RNA, 19 nt, Human
cacgcagccaggacaccgg

SEQ ID NO: 1869927 - RNA, 14 nt, Human
cacuucacccugga

SEQ ID NO: 1869928 - RNA, 22 nt, Human
cacugugagcucccaggugcag

SEQ ID NO: 1869929 - RNA, 15 nt, Human
cacuguuaucaaaac

SEQ ID NO: 1869930 - RNA, 17 nt, Human
cacugugagcucccagg

SEQ ID NO: 1869931 - RNA, 16 nt, Human
cacugugagcucccag

SEQ ID NO: 1869932 - RNA, 20 nt, Human
cacuguacaagguaccccuu

SEQ ID NO: 1869933 - RNA, 16 nt, Human
cacugacugcagggac

SEQ ID NO: 1869934 - RNA, 16 nt, Human
cacuggacugaccugg

SEQ ID NO: 1869935 - RNA, 17 nt, Human
cacuggacugaccuggu

SEQ ID NO: 1869936 - RNA, 15 nt, Human
cacuggaugcagaaa

SEQ ID NO: 1869937 - RNA, 12 nt, Human
aguccuguaaug

SEQ ID NO: 1869938 - RNA, 22 nt, Human
aguugaaaaucuuauaauuuaa

SEQ ID NO: 1869939 - RNA, 23 nt, Human
aguugaaaaucuuauaauuuaaa

SEQ ID NO: 1869940 - RNA, 18 nt, Human
auaaaggauuaaugucaa

SEQ ID NO: 1869941 - RNA, 12 nt, Human
auaccucugugu

SEQ ID NO: 1869942 - RNA, 13 nt, Human
auaccucugugug

SEQ ID NO: 1869943 - RNA, 14 nt, Human
auaccucugugugc

SEQ ID NO: 1869944 - RNA, 15 nt, Human
auagguuuaauaauu

SEQ ID NO: 1869945 - RNA, 23 nt, Human
auagcaucuuugaauacaaagaa

SEQ ID NO: 1869946 - RNA, 15 nt, Human
auaucauucagcaac

SEQ ID NO: 1869947 - RNA, 13 nt, Human
auaucauucagca

SEQ ID NO: 1869948 - RNA, 14 nt, Human
auaucauucagcaa

SEQ ID NO: 1869949 - RNA, 20 nt, Human
agguaaaagcaucacaugaa

SEQ ID NO: 1869950 - RNA, 21 nt, Human
aggguccagaaggagacaggc

SEQ ID NO: 1869951 - RNA, 19 nt, Human
aggguccagaaggagacag

SEQ ID NO: 1869952 - RNA, 18 nt, Human
aggguccagaaggagaca

SEQ ID NO: 1869953 - RNA, 22 nt, Human
agggacgcggcucccggggcag

SEQ ID NO: 1869954 - RNA, 22 nt, Human
agcuuccccaacacgcaggagc

SEQ ID NO: 1869955 - RNA, 16 nt, Human
aggaguguggccacgu

SEQ ID NO: 1869956 - RNA, 18 nt, Human
aggacccaagcagagaag

SEQ ID NO: 1869957 - RNA, 15 nt, Human
aggacccaagcagag

SEQ ID NO: 1869958 - RNA, 13 nt, Human
aggacccaagcag

SEQ ID NO: 1869959 - RNA, 14 nt, Human
agccgugagugcag

SEQ ID NO: 1869960 - RNA, 14 nt, Human
agccgggccgcaga

SEQ ID NO: 1869961 - RNA, 11 nt, Human
agccgggccgc

SEQ ID NO: 1869962 - RNA, 15 nt, Human
aauccaaugaaauga

SEQ ID NO: 1869963 - RNA, 19 nt, Human
aaugaaagucuugugacua

SEQ ID NO: 1869964 - RNA, 20 nt, Human
aaugaaagucuugugacuag

SEQ ID NO: 1869965 - RNA, 21 nt, Human
aaugaaagucuugugacuagu

SEQ ID NO: 1869966 - RNA, 23 nt, Human
aaugaaagucuugugacuagugc

SEQ ID NO: 1869967 - RNA, 17 nt, Human
aauauacuauauuuaug

SEQ ID NO: 1869968 - RNA, 20 nt, Human
aaucaagauuuaauccuaga

SEQ ID NO: 1869969 - RNA, 20 nt, Human
aauguuuacacucuuuguaa

SEQ ID NO: 1869970 - RNA, 23 nt, Human
aauguuuacacucuuuguaagag

SEQ ID NO: 1869971 - RNA, 22 nt, Human
aauguuucuucuagguucuaaa

SEQ ID NO: 1869972 - RNA, 23 nt, Human
aauguuucuucuagguucuaaaa

SEQ ID NO: 1869973 - RNA, 17 nt, Human
aagggagcuagccagag

SEQ ID NO: 1869974 - RNA, 17 nt, Human
aaguccuacaagcuaaa

SEQ ID NO: 1869975 - RNA, 22 nt, Human
aagucucuuuuuuuggcccagg

SEQ ID NO: 1869976 - RNA, 19 nt, Human
aacuuuccucuuccugccu

SEQ ID NO: 1869977 - RNA, 16 nt, Human
aagcagccagccguga

SEQ ID NO: 1869978 - RNA, 17 nt, Human
aaaucuuauaauuuaaa

SEQ ID NO: 1869979 - RNA, 14 nt, Human
aacacgcaggagca

SEQ ID NO: 1869980 - RNA, 13 nt, Human
aacacgcaggagc

SEQ ID NO: 1869981 - RNA, 18 nt, Human
aacacuaacauauaaugu

SEQ ID NO: 1869982 - RNA, 22 nt, Human
aaccacuggaaaguuuaugguu

SEQ ID NO: 1869983 - RNA, 12 nt, Human
aacucagaaggg

SEQ ID NO: 1869984 - RNA, 21 nt, Human
acaugugacacauaugcaccu

SEQ ID NO: 1869985 - RNA, 21 nt, Human
acaagaaaguuuccccaccag

SEQ ID NO: 1869986 - RNA, 15 nt, Human
acaagaaaguuuccc

SEQ ID NO: 1869987 - RNA, 17 nt, Human
acaagaaaguuucccca

SEQ ID NO: 1869988 - RNA, 17 nt, Human
acuagugcugaagcuua

SEQ ID NO: 1869989 - RNA, 18 nt, Human
acuagugcugaagcuuau

SEQ ID NO: 1869990 - RNA, 19 nt, Human
acuagugcugaagcuuauu

SEQ ID NO: 1869991 - RNA, 14 nt, Human
acuagugcugaagc

SEQ ID NO: 1869992 - RNA, 15 nt, Human
acuagugcugaagcu

SEQ ID NO: 1869993 - RNA, 16 nt, Human
acuagugcugaagcuu

SEQ ID NO: 1869994 - RNA, 20 nt, Human
acgccacagcccagccacgg

SEQ ID NO: 1869995 - RNA, 15 nt, Human
acgccacagcccagc

SEQ ID NO: 1869996 - RNA, 14 nt, Human
acgccacagcccag

SEQ ID NO: 1869997 - RNA, 20 nt, Human
agaaaguuuccccaccagug

SEQ ID NO: 1869998 - RNA, 12 nt, Human
agaaaguuuccc

SEQ ID NO: 1869999 - RNA, 20 nt, Human
agaaaauggaaccaggcuug

SEQ ID NO: 1870000 - RNA, 22 nt, Human
agaaaauggaaccaggcuugga

SEQ ID NO: 1870001 - RNA, 19 nt, Human
agaaaauggaaccaggcuu

SEQ ID NO: 1870002 - RNA, 22 nt, Human
acuuuauuuucuauaauuuaaa

SEQ ID NO: 1870003 - RNA, 23 nt, Human
acuuuaucuaauaccucugugug

SEQ ID NO: 1870004 - RNA, 20 nt, Human
acuuggggagauggaguucu

SEQ ID NO: 1870005 - RNA, 21 nt, Human
acuguuugccuucuacuuuua

SEQ ID NO: 1870006 - RNA, 22 nt, Human
acuguuugccuucuacuuuuaa

SEQ ID NO: 1870007 - RNA, 22 nt, Human
acuguuuggacuuuuauuuugg

SEQ ID NO: 1870008 - RNA, 21 nt, Human
acugugagcucccaggugcag

SEQ ID NO: 1870009 - RNA, 16 nt, Human
cucuuuuuuuggccca

SEQ ID NO: 1870010 - RNA, 18 nt, Human
cucuuuuuuuggcccagg

SEQ ID NO: 1870011 - RNA, 19 nt, Human
cucuuuuuuuggcccaggc

SEQ ID NO: 1870012 - RNA, 13 nt, Human
cgcuggcucccca

SEQ ID NO: 1870013 - RNA, 16 nt, Human
cgcuggcuccccaaag

SEQ ID NO: 1870014 - RNA, 16 nt, Human
cuauaaacaauuacau

SEQ ID NO: 1870015 - RNA, 17 nt, Human
cuauaaacaauuacaug

SEQ ID NO: 1870016 - RNA, 18 nt, Human
cuaggccuccuggcccag

SEQ ID NO: 1870017 - RNA, 17 nt, Human
cuaggccuccuggccca

SEQ ID NO: 1870018 - RNA, 19 nt, Human
cuaggccuccuggcccagg

SEQ ID NO: 1870019 - RNA, 22 nt, Human
cucagaagggagcuagccagag

SEQ ID NO: 1870020 - RNA, 21 nt, Human
cucagaagggagcuagccaga

SEQ ID NO: 1870021 - RNA, 14 nt, Human
cucacuucacccug

SEQ ID NO: 1870022 - RNA, 15 nt, Human
ccuggccuggcacac

SEQ ID NO: 1870023 - RNA, 16 nt, Human
ccuggccuggcacaca

SEQ ID NO: 1870024 - RNA, 19 nt, Human
ccuggccuggcacacauca

SEQ ID NO: 1870025 - RNA, 12 nt, Human
ccuggccuggca

SEQ ID NO: 1870026 - RNA, 13 nt, Human
ccuggccuggcac

SEQ ID NO: 1870027 - RNA, 12 nt, Human
ccuggcacacau

SEQ ID NO: 1870028 - RNA, 13 nt, Human
ccuggcacacauc

SEQ ID NO: 1870029 - RNA, 15 nt, Human
ccuggcacacaucag

SEQ ID NO: 1870030 - RNA, 21 nt, Human
ccuggcacacaucaggaguuc

SEQ ID NO: 1870031 - RNA, 15 nt, Human
ccugagggagcucca

SEQ ID NO: 1870032 - RNA, 13 nt, Human
ccugagggagcuc

SEQ ID NO: 1870033 - RNA, 16 nt, Human
ccuccgagggacgcgg

SEQ ID NO: 1870034 - RNA, 16 nt, Human
ccauguacaugaagaa

SEQ ID NO: 1870035 - RNA, 18 nt, Human
cccaagaccucagggcac

SEQ ID NO: 1870036 - RNA, 15 nt, Human
cccacccacauguga

SEQ ID NO: 1870037 - RNA, 21 nt, Human
ccauugcuaucuauugauaau

SEQ ID NO: 1870038 - RNA, 17 nt, Human
caaucauuuuaauuauu

SEQ ID NO: 1870039 - RNA, 21 nt, Human
cacugggaggccagugagcca

SEQ ID NO: 1870040 - RNA, 14 nt, Human
cacugggaggccag

SEQ ID NO: 1870041 - RNA, 14 nt, Human
cacugccauauacu

SEQ ID NO: 1870042 - RNA, 13 nt, Human
cacgaaauguuau

SEQ ID NO: 1870043 - RNA, 15 nt, Human
cacgaaauguuauuu

SEQ ID NO: 1870044 - RNA, 16 nt, Human
cacgaaauguuauuuu

SEQ ID NO: 1870045 - RNA, 22 nt, Human
caccuacuuuucuuuccucaga

SEQ ID NO: 1870046 - RNA, 21 nt, Human
caaaggguccagaaggagaca

SEQ ID NO: 1870047 - RNA, 17 nt, Human
caaaggguccagaagga

SEQ ID NO: 1870048 - RNA, 11 nt, Human
caaagggugug

SEQ ID NO: 1870049 - RNA, 18 nt, Human
caaccaugagaccacugu

SEQ ID NO: 1870050 - RNA, 23 nt, Human
caaccaugagaccacuguuauca

SEQ ID NO: 1870051 - RNA, 21 nt, Human
caaaaggauaaugaauacuuu

SEQ ID NO: 1870052 - RNA, 18 nt, Human
auuaugggaaucaagauu

SEQ ID NO: 1870053 - RNA, 17 nt, Human
auuaugggaaucaagau

SEQ ID NO: 1870054 - RNA, 13 nt, Human
auucaauaaauug

SEQ ID NO: 1870055 - RNA, 12 nt, Human
auuucacuuaau

SEQ ID NO: 1870056 - RNA, 17 nt, Human
auuucacuuaauaaugu

SEQ ID NO: 1870057 - RNA, 12 nt, Human
cagggugugucu

SEQ ID NO: 1870058 - RNA, 20 nt, Human
caggugaguccuagagcuac

SEQ ID NO: 1870059 - RNA, 23 nt, Human
caggugaguccuagagcuacagg

SEQ ID NO: 1870060 - RNA, 22 nt, Human
caggugaguccuagagcuacag

SEQ ID NO: 1870061 - RNA, 16 nt, Human
caggugcagccagagg

SEQ ID NO: 1870062 - RNA, 15 nt, Human
caggugcagccagag

SEQ ID NO: 1870063 - RNA, 14 nt, Human
caggugcagccaga

SEQ ID NO: 1870064 - RNA, 19 nt, Human
caggugcagccagaggcac

SEQ ID NO: 1870065 - RNA, 17 nt, Human
caggugcagccagaggc

SEQ ID NO: 1870066 - RNA, 23 nt, Human
caggagcuuccuguccucccagc

SEQ ID NO: 1870067 - RNA, 12 nt, Human
caggagcuuccu

SEQ ID NO: 1870068 - RNA, 21 nt, Human
cagcugccucugccacugacu

SEQ ID NO: 1870069 - RNA, 15 nt, Human
cauuuuuuaaaacaa

SEQ ID NO: 1870070 - RNA, 16 nt, Human
cauuuuuuaaaacaag

SEQ ID NO: 1870071 - RNA, 17 nt, Human
cauuuuuuaaaacaaga

SEQ ID NO: 1870072 - RNA, 17 nt, Human
ccacagagacaaggagg

SEQ ID NO: 1870073 - RNA, 20 nt, Human
ccacagcccagccacggacg

SEQ ID NO: 1870074 - RNA, 15 nt, Human
ccacagcccagccac

SEQ ID NO: 1870075 - RNA, 18 nt, Human
ccacagcccagccacgga

SEQ ID NO: 1870076 - RNA, 19 nt, Human
ccacagcccagccacggac

SEQ ID NO: 1870077 - RNA, 17 nt, Human
ccacgcagccaggacac

SEQ ID NO: 1870078 - RNA, 15 nt, Human
ccacgcagccaggac

SEQ ID NO: 1870079 - RNA, 16 nt, Human
ccacgcagccaggaca

SEQ ID NO: 1870080 - RNA, 13 nt, Human
ccacgcagccagg

SEQ ID NO: 1870081 - RNA, 14 nt, Human
ccacgcagccagga

SEQ ID NO: 1870082 - RNA, 21 nt, Human
cugccucccgcccccuuggcu

SEQ ID NO: 1870083 - RNA, 21 nt, Human
cugaugaacucuuaaucaaau

SEQ ID NO: 1870084 - RNA, 14 nt, Human
cuggacugaccugg

SEQ ID NO: 1870085 - RNA, 21 nt, Human
cuggacugaccugguccacag

SEQ ID NO: 1870086 - RNA, 20 nt, Human
cuggcucucccauuuccuga

SEQ ID NO: 1870087 - RNA, 18 nt, Human
cuguuagucauuugcuga

SEQ ID NO: 1870088 - RNA, 14 nt, Human
cuguuagucauuug

SEQ ID NO: 1870089 - RNA, 15 nt, Human
cuguuagucauuugc

SEQ ID NO: 1870090 - RNA, 13 nt, Human
cuguuagucauuu

SEQ ID NO: 1870091 - RNA, 21 nt, Human
cuuugacucuuuugccauuaa

SEQ ID NO: 1870092 - RNA, 20 nt, Human
cuuugguuaaauagucuaga

SEQ ID NO: 1870093 - RNA, 17 nt, Human
cuuucagcagacugauc

SEQ ID NO: 1870094 - RNA, 15 nt, Human
cuugugcaguguuga

SEQ ID NO: 1870095 - RNA, 20 nt, Human
cuugugacuagugcugaagc

SEQ ID NO: 1870096 - RNA, 19 nt, Human
cuugugccauagucacaug

SEQ ID NO: 1870097 - RNA, 11 nt, Human
cuugugccaua

SEQ ID NO: 1870098 - RNA, 14 nt, Human
cuugugacuagugc

SEQ ID NO: 1870099 - RNA, 15 nt, Human
cuugugacuagugcu

SEQ ID NO: 1870100 - RNA, 16 nt, Human
cuugugacuagugcug

SEQ ID NO: 1870101 - RNA, 17 nt, Human
cuugugacuagugcuga

SEQ ID NO: 1870102 - RNA, 18 nt, Human
cuugugacuagugcugaa

SEQ ID NO: 1870103 - RNA, 19 nt, Human
cuugugacuagugcugaag

SEQ ID NO: 1870104 - RNA, 13 nt, Human
cuucucacauuua

SEQ ID NO: 1870105 - RNA, 20 nt, Human
cuucucacauuuauauuuuu

SEQ ID NO: 1870106 - RNA, 16 nt, Human
cuucuagguucuaaaa

SEQ ID NO: 1870107 - RNA, 23 nt, Human
cuucuuaaucuuuucacaaauaa

SEQ ID NO: 1870108 - RNA, 21 nt, Human
cuucuuaaucuuuucacaaau

SEQ ID NO: 1870109 - RNA, 22 nt, Human
cuucuuaaucuuuucacaaaua

SEQ ID NO: 1870110 - RNA, 16 nt, Human
cuucuuaaucuuuuca

SEQ ID NO: 1870111 - RNA, 17 nt, Human
cuucuuaaucuuuucac

SEQ ID NO: 1870112 - RNA, 20 nt, Human
cuucuuaaucuuuucacaaa

SEQ ID NO: 1870113 - RNA, 20 nt, Human
cuugaauugcauuuuuuaaa

SEQ ID NO: 1870114 - RNA, 16 nt, Human
gaacacccuauauuuu

SEQ ID NO: 1870115 - RNA, 13 nt, Human
gaacucuuaauca

SEQ ID NO: 1870116 - RNA, 20 nt, Human
gaacucuuaaucaaauagca

SEQ ID NO: 1870117 - RNA, 15 nt, Human
gaaccaggcuuggaa

SEQ ID NO: 1870118 - RNA, 17 nt, Human
gaaccccuucauccucu

SEQ ID NO: 1870119 - RNA, 12 nt, Human
gacuagugcuga

SEQ ID NO: 1870120 - RNA, 13 nt, Human
gacuagugcugaa

SEQ ID NO: 1870121 - RNA, 14 nt, Human
gacuagugcugaag

SEQ ID NO: 1870122 - RNA, 15 nt, Human
gacuagugcugaagc

SEQ ID NO: 1870123 - RNA, 16 nt, Human
gacuagugcugaagcu

SEQ ID NO: 1870124 - RNA, 17 nt, Human
gacuagugcugaagcuu

SEQ ID NO: 1870125 - RNA, 18 nt, Human
gacuagugcugaagcuua

SEQ ID NO: 1870126 - RNA, 23 nt, Human
gacuagugcugaagcuuauuaau

SEQ ID NO: 1870127 - RNA, 19 nt, Human
gacuagugcugaagcuuau

SEQ ID NO: 1870128 - RNA, 12 nt, Human
gacgcuggcucc

SEQ ID NO: 1870129 - RNA, 23 nt, Human
gaccaggcauccuccacaauagc

SEQ ID NO: 1870130 - RNA, 15 nt, Human
gaccauaauguuaca

SEQ ID NO: 1870131 - RNA, 21 nt, Human
gagaagcucucgggcuaggaa

SEQ ID NO: 1870132 - RNA, 16 nt, Human
gauggaguucuugugc

SEQ ID NO: 1870133 - RNA, 18 nt, Human
gauggaguucuugugcca

SEQ ID NO: 1870134 - RNA, 19 nt, Human
gauggaguucuugugccau

SEQ ID NO: 1870135 - RNA, 14 nt, Human
gcauguaugucuug

SEQ ID NO: 1870136 - RNA, 15 nt, Human
gcauguaugucuugg

SEQ ID NO: 1870137 - RNA, 18 nt, Human
gcagggacacgggcagcc

SEQ ID NO: 1870138 - RNA, 19 nt, Human
gcagggacacgggcagccu

SEQ ID NO: 1870139 - RNA, 22 nt, Human
gcagggacacgggcagccuggc

SEQ ID NO: 1870140 - RNA, 12 nt, Human
gcucccaggaca

SEQ ID NO: 1870141 - RNA, 13 nt, Human
gcucccaggacac

SEQ ID NO: 1870142 - RNA, 19 nt, Human
gcuccugagggagcuccaa

SEQ ID NO: 1870143 - RNA, 17 nt, Human
gcuccugagggagcucc

SEQ ID NO: 1870144 - RNA, 20 nt, Human
gcucccggggcagggcagcc

SEQ ID NO: 1870145 - RNA, 19 nt, Human
gcucccggggcagggcagc

SEQ ID NO: 1870146 - RNA, 20 nt, Human
gcuccccucugcacggacca

SEQ ID NO: 1870147 - RNA, 17 nt, Human
gcucccggggcagggca

SEQ ID NO: 1870148 - RNA, 14 nt, Human
gcuaauaaaauauc

SEQ ID NO: 1870149 - RNA, 17 nt, Human
gcuaauaaaauaucauu

SEQ ID NO: 1870150 - RNA, 23 nt, Human
gcuaauaaaauaucauucagcaa

SEQ ID NO: 1870151 - RNA, 18 nt, Human
gcuaauaaaauaucauuc

SEQ ID NO: 1870152 - RNA, 19 nt, Human
gcuaauaaaauaucauuca

SEQ ID NO: 1870153 - RNA, 20 nt, Human
gcuaauaaaauaucauucag

SEQ ID NO: 1870154 - RNA, 21 nt, Human
gcuaauaaaauaucauucagc

SEQ ID NO: 1870155 - RNA, 22 nt, Human
gcgugguguggagugugugucu

SEQ ID NO: 1870156 - RNA, 15 nt, Human
gccuccaucagcuaa

SEQ ID NO: 1870157 - RNA, 13 nt, Human
gccuggccuggca

SEQ ID NO: 1870158 - RNA, 16 nt, Human
gccuggccuggcacac

SEQ ID NO: 1870159 - RNA, 17 nt, Human
gcccucaccacccacuu

SEQ ID NO: 1870160 - RNA, 15 nt, Human
gccgcccgggcccag

SEQ ID NO: 1870161 - RNA, 16 nt, Human
gccgcccgggcccaga

SEQ ID NO: 1870162 - RNA, 18 nt, Human
gccgcccgggcccagagg

SEQ ID NO: 1870163 - RNA, 21 nt, Human
ggacacgggcagccuggcucc

SEQ ID NO: 1870164 - RNA, 13 nt, Human
ggaauaauaccua

SEQ ID NO: 1870165 - RNA, 13 nt, Human
ggacgugggcugg

SEQ ID NO: 1870166 - RNA, 21 nt, Human
gcuggcuccccaaagggugug

SEQ ID NO: 1870167 - RNA, 13 nt, Human
gcuggcuccccaa

SEQ ID NO: 1870168 - RNA, 17 nt, Human
gcuggcuccccaaaggg

SEQ ID NO: 1870169 - RNA, 19 nt, Human
gcuuauuaaugcuaagggc

SEQ ID NO: 1870170 - RNA, 20 nt, Human
gcuuauuaaugcuaagggca

SEQ ID NO: 1870171 - RNA, 15 nt, Human
gcuuauuaaugcuaa

SEQ ID NO: 1870172 - RNA, 16 nt, Human
gcuuauuaaugcuaag

SEQ ID NO: 1870173 - RNA, 17 nt, Human
ggcagggcucccacaga

SEQ ID NO: 1870174 - RNA, 21 nt, Human
ggcagggcucccacagagaca

SEQ ID NO: 1870175 - RNA, 14 nt, Human
ggcaguuggccaga

SEQ ID NO: 1870176 - RNA, 14 nt, Human
aaaaauaacaauga

SEQ ID NO: 1870177 - RNA, 14 nt, Human
gggacacgggcagc

SEQ ID NO: 1870178 - RNA, 14 nt, Human
gggaggucauuuug

SEQ ID NO: 1870179 - RNA, 16 nt, Human
guacugagccuuguaa

SEQ ID NO: 1870180 - RNA, 21 nt, Human
guaccaaucauuuuaauuauu

SEQ ID NO: 1870181 - RNA, 14 nt, Human
guaccaaucauuuu

SEQ ID NO: 1870182 - RNA, 15 nt, Human
guaccaaucauuuua

SEQ ID NO: 1870183 - RNA, 19 nt, Human
guacauguguagccugugc

SEQ ID NO: 1870184 - RNA, 20 nt, Human
guacauguguagccugugca

SEQ ID NO: 1870185 - RNA, 20 nt, Human
guaauaggcguaacuaauuu

SEQ ID NO: 1870186 - RNA, 14 nt, Human
guacacguguccug

SEQ ID NO: 1870187 - RNA, 15 nt, Human
guacacguguccugu

SEQ ID NO: 1870188 - RNA, 17 nt, Human
guacacguguccuguag

SEQ ID NO: 1870189 - RNA, 17 nt, Human
gggucgacuucgggcug

SEQ ID NO: 1870190 - RNA, 13 nt, Human
aaagacagugaaa

SEQ ID NO: 1870191 - RNA, 20 nt, Human
aaacuuuccucuuccugccu

SEQ ID NO: 1870192 - RNA, 19 nt, Human
aaagcacgaaauguuauuu

SEQ ID NO: 1870193 - RNA, 17 nt, Human
ggucgacuucgggcugg

SEQ ID NO: 1870194 - RNA, 17 nt, Human
ggugcagccagaggcac

SEQ ID NO: 1870195 - RNA, 13 nt, Human
ggugcagccagag

SEQ ID NO: 1870196 - RNA, 20 nt, Human
auuucuugagguaaaagcau

SEQ ID NO: 1870197 - RNA, 19 nt, Human
auuggacaguaaaauccac

SEQ ID NO: 1870198 - RNA, 19 nt, Human
auuuaaagaacacccuaua

SEQ ID NO: 1870199 - RNA, 14 nt, Human
auuuucuauaauuu

SEQ ID NO: 1870200 - RNA, 15 nt, Human
auuuucuauaauuua

SEQ ID NO: 1870201 - RNA, 22 nt, Human
auuuuugugauuuugugauuga

SEQ ID NO: 1870202 - RNA, 15 nt, Human
auuuuuuaaaacaag

SEQ ID NO: 1870203 - RNA, 17 nt, Human
auuuuuuaaaacaagaa

SEQ ID NO: 1870204 - RNA, 15 nt, Human
auuuuuuaauuauua

SEQ ID NO: 1870205 - RNA, 20 nt, Human
auuuuuuaauuauuauuuau

SEQ ID NO: 1870206 - RNA, 15 nt, Human
auuauauuuacaaau

SEQ ID NO: 1870207 - RNA, 15 nt, Human
auuauuauucuucau

SEQ ID NO: 1870208 - RNA, 15 nt, Human
auuaucaagcuaaua

SEQ ID NO: 1870209 - RNA, 13 nt, Human
auuaucaagcuaa

SEQ ID NO: 1870210 - RNA, 14 nt, Human
auuaucaagcuaau

SEQ ID NO: 1870211 - RNA, 16 nt, Human
auuauuauucuucaua

SEQ ID NO: 1870212 - RNA, 20 nt, Human
auucuaggccuccuggccca

SEQ ID NO: 1870213 - RNA, 19 nt, Human
auucuaggccuccuggccc

SEQ ID NO: 1870214 - RNA, 18 nt, Human
auucuaggccuccuggcc

SEQ ID NO: 1870215 - RNA, 15 nt, Human
uuugaaaucagcaua

SEQ ID NO: 1870216 - RNA, 18 nt, Human
augggugaaggcuggcau

SEQ ID NO: 1870217 - RNA, 17 nt, Human
augggugaaggcuggca

SEQ ID NO: 1870218 - RNA, 16 nt, Human
augggugaaggcuggc

SEQ ID NO: 1870219 - RNA, 15 nt, Human
augggugaaggcugg

SEQ ID NO: 1870220 - RNA, 14 nt, Human
augggugaaggcug

SEQ ID NO: 1870221 - RNA, 16 nt, Human
uuucugggauaaguaa

SEQ ID NO: 1870222 - RNA, 14 nt, Human
auguacauuaauua

SEQ ID NO: 1870223 - RNA, 15 nt, Human
auguaccauguacau

SEQ ID NO: 1870224 - RNA, 21 nt, Human
auguaccauguacaugaagaa

SEQ ID NO: 1870225 - RNA, 18 nt, Human
auguacugagccuuguaa

SEQ ID NO: 1870226 - RNA, 19 nt, Human
uuugcugagcauguacuga

SEQ ID NO: 1870227 - RNA, 12 nt, Human
uuugacucuuuu

SEQ ID NO: 1870228 - RNA, 18 nt, Human
uuuaaauauaugcuaagu

SEQ ID NO: 1870229 - RNA, 23 nt, Human
uuuaauuauuauuuauauaugua

SEQ ID NO: 1870230 - RNA, 14 nt, Human
uuuaauuauuauuc

SEQ ID NO: 1870231 - RNA, 23 nt, Human
uuuaauuauuauucuucauaaca

SEQ ID NO: 1870232 - RNA, 22 nt, Human
augcccuuucuugaauugcauu

SEQ ID NO: 1870233 - RNA, 20 nt, Human
uuggugccuggccuggcaca

SEQ ID NO: 1870234 - RNA, 22 nt, Human
uuggugccuggccuggcacaca

SEQ ID NO: 1870235 - RNA, 17 nt, Human
augauccaagcaagacu

SEQ ID NO: 1870236 - RNA, 15 nt, Human
augauccaagcaaga

SEQ ID NO: 1870237 - RNA, 15 nt, Human
uuuaaaacaagaaag

SEQ ID NO: 1870238 - RNA, 20 nt, Human
uuuaaaacaagaaaguuucc

SEQ ID NO: 1870239 - RNA, 12 nt, Human
uuuaucauuuuc

SEQ ID NO: 1870240 - RNA, 20 nt, Human
augcuaagggcaggcccaaa

SEQ ID NO: 1870241 - RNA, 21 nt, Human
uuucauuaauacagggcauuu

SEQ ID NO: 1870242 - RNA, 15 nt, Human
auggacucugcacau

SEQ ID NO: 1870243 - RNA, 21 nt, Human
auggcaggacgugggcugggc

SEQ ID NO: 1870244 - RNA, 20 nt, Human
auggcaggacgugggcuggg

SEQ ID NO: 1870245 - RNA, 16 nt, Human
auccaagcaagacuga

SEQ ID NO: 1870246 - RNA, 19 nt, Human
uucugggcacccucccacc

SEQ ID NO: 1870247 - RNA, 17 nt, Human
uugaaauuguauuacaa

SEQ ID NO: 1870248 - RNA, 23 nt, Human
auccuagagauuugguguacaau

SEQ ID NO: 1870249 - RNA, 21 nt, Human
auccuagagauuugguguaca

SEQ ID NO: 1870250 - RNA, 19 nt, Human
uucuuaaucuuuucacaaa

SEQ ID NO: 1870251 - RNA, 20 nt, Human
uucuuaaucuuuucacaaau

SEQ ID NO: 1870252 - RNA, 21 nt, Human
uucuuaaucuuuucacaaaua

SEQ ID NO: 1870253 - RNA, 19 nt, Human
uuccguagguuauuuucag

SEQ ID NO: 1870254 - RNA, 14 nt, Human
uuccuguccuccca

SEQ ID NO: 1870255 - RNA, 20 nt, Human
uuccuguccucccagcuccu

SEQ ID NO: 1870256 - RNA, 15 nt, Human
aucaagcuaauaaaa

SEQ ID NO: 1870257 - RNA, 13 nt, Human
aucaagcuaauaa

SEQ ID NO: 1870258 - RNA, 21 nt, Human
aucagcaagucucuuuauaug

SEQ ID NO: 1870259 - RNA, 18 nt, Human
aucagggaggucauuuug

SEQ ID NO: 1870260 - RNA, 12 nt, Human
uucuaaaugaau

SEQ ID NO: 1870261 - RNA, 15 nt, Human
uucuaaaugaauguu

SEQ ID NO: 1870262 - RNA, 18 nt, Human
uucuaaaugaauguuuac

SEQ ID NO: 1870263 - RNA, 21 nt, Human
uucuaaaugaauguuuacacu

SEQ ID NO: 1870264 - RNA, 19 nt, Human
aucuagacccaucuucuuu

SEQ ID NO: 1870265 - RNA, 23 nt, Human
uugcauaguaccaaucauuuuaa

SEQ ID NO: 1870266 - RNA, 17 nt, Human
uugaagggaaauuucag

SEQ ID NO: 1870267 - RNA, 18 nt, Human
auccucugagugugacca

SEQ ID NO: 1870268 - RNA, 22 nt, Human
aucuaauaccucugugugcucc

SEQ ID NO: 1870269 - RNA, 18 nt, Human
augaacuuguaaaggaau

SEQ ID NO: 1870270 - RNA, 19 nt, Human
augaagacucgcaauuuca

SEQ ID NO: 1870271 - RNA, 12 nt, Human
uuggugccuggc

SEQ ID NO: 1870272 - RNA, 13 nt, Human
uuggugccuggcc

SEQ ID NO: 1870273 - RNA, 22 nt, Human
uuggccgcaccuaaagcagcca

SEQ ID NO: 1870274 - RNA, 14 nt, Human
aucuuauaauuuaa

SEQ ID NO: 1870275 - RNA, 15 nt, Human
uugccaaaaaggggu

SEQ ID NO: 1870276 - RNA, 18 nt, Human
uugcauuuuuuaaaacaa

SEQ ID NO: 1870277 - RNA, 17 nt, Human
aucugguuaggauggca

SEQ ID NO: 1870278 - RNA, 19 nt, Human
auaaauuguaauuguaaag

SEQ ID NO: 1870279 - RNA, 21 nt, Human
uuaaguuuccuuccagcccag

SEQ ID NO: 1870280 - RNA, 20 nt, Human
uuaaguuuccuuccagccca

SEQ ID NO: 1870281 - RNA, 16 nt, Human
uuaaucuuuucacaaa

SEQ ID NO: 1870282 - RNA, 17 nt, Human
uuaaucuuuucacaaau

SEQ ID NO: 1870283 - RNA, 12 nt, Human
aguuuuaucauu

SEQ ID NO: 1870284 - RNA, 13 nt, Human
aguuuuaucauuu

SEQ ID NO: 1870285 - RNA, 17 nt, Human
aguuuaaauuguaauag

SEQ ID NO: 1870286 - RNA, 20 nt, Human
aguuuaaauuguaauaggcg

SEQ ID NO: 1870287 - RNA, 15 nt, Human
uuauaaauauauuua

SEQ ID NO: 1870288 - RNA, 14 nt, Human
auacuauauuuaug

SEQ ID NO: 1870289 - RNA, 15 nt, Human
uuaucaaaacuuucu

SEQ ID NO: 1870290 - RNA, 23 nt, Human
uuaugggaaccccuucauccucu

SEQ ID NO: 1870291 - RNA, 17 nt, Human
uuaugggaaucaagauu

SEQ ID NO: 1870292 - RNA, 12 nt, Human
uuaucauuuuca

SEQ ID NO: 1870293 - RNA, 16 nt, Human
uuaucauuuucaaaau

SEQ ID NO: 1870294 - RNA, 14 nt, Human
uuauuauauuuaca

SEQ ID NO: 1870295 - RNA, 15 nt, Human
uuauuauauuuacaa

SEQ ID NO: 1870296 - RNA, 13 nt, Human
auagaaguaaaaa

SEQ ID NO: 1870297 - RNA, 18 nt, Human
auagauaggucagugcaa

SEQ ID NO: 1870298 - RNA, 14 nt, Human
auagaguguuauca

SEQ ID NO: 1870299 - RNA, 21 nt, Human
agugcagaccccuuggccagc

SEQ ID NO: 1870300 - RNA, 16 nt, Human
ugugcuccuccuuggu

SEQ ID NO: 1870301 - RNA, 18 nt, Human
agucuuucacauuuaaau

SEQ ID NO: 1870302 - RNA, 16 nt, Human
agucuuucacauuuaa

SEQ ID NO: 1870303 - RNA, 17 nt, Human
agucuugugacuagugc

SEQ ID NO: 1870304 - RNA, 20 nt, Human
agucuugugacuagugcuga

SEQ ID NO: 1870305 - RNA, 21 nt, Human
agucuugugacuagugcugaa

SEQ ID NO: 1870306 - RNA, 23 nt, Human
agucuugugacuagugcugaagc

SEQ ID NO: 1870307 - RNA, 22 nt, Human
agucuugugacuagugcugaag

SEQ ID NO: 1870308 - RNA, 16 nt, Human
ugugaugcccugcccu

SEQ ID NO: 1870309 - RNA, 23 nt, Human
ugugagcucccaggugcagccag

SEQ ID NO: 1870310 - RNA, 19 nt, Human
ugugagcucccaggugcag

SEQ ID NO: 1870311 - RNA, 17 nt, Human
ugugacuuaagaagccu

SEQ ID NO: 1870312 - RNA, 23 nt, Human
agucucuuuuuuuggcccaggcc

SEQ ID NO: 1870313 - RNA, 20 nt, Human
agucucuuuuuuuggcccag

SEQ ID NO: 1870314 - RNA, 21 nt, Human
agucucuuuuuuuggcccagg

SEQ ID NO: 1870315 - RNA, 14 nt, Human
agugugaccaggca

SEQ ID NO: 1870316 - RNA, 11 nt, Human
agugugugucu

SEQ ID NO: 1870317 - RNA, 12 nt, Human
agugugugucuu

SEQ ID NO: 1870318 - RNA, 14 nt, Human
agugugugucuuuc

SEQ ID NO: 1870319 - RNA, 13 nt, Human
ugugucuguacac

SEQ ID NO: 1870320 - RNA, 14 nt, Human
ugugucuguacacg

SEQ ID NO: 1870321 - RNA, 21 nt, Human
ugugucuguacacguguccug

SEQ ID NO: 1870322 - RNA, 22 nt, Human
aguaauugguccgaucuuugac

SEQ ID NO: 1870323 - RNA, 22 nt, Human
uguacaugaagaagcuaaaucc

SEQ ID NO: 1870324 - RNA, 11 nt, Human
uguacaugugu

SEQ ID NO: 1870325 - RNA, 15 nt, Human
uguacauguguagcc

SEQ ID NO: 1870326 - RNA, 16 nt, Human
aguaccaaucauuuua

SEQ ID NO: 1870327 - RNA, 15 nt, Human
aguaccaaucauuuu

SEQ ID NO: 1870328 - RNA, 13 nt, Human
uguaauucuaaau

SEQ ID NO: 1870329 - RNA, 14 nt, Human
uguaauucuaaaug

SEQ ID NO: 1870330 - RNA, 15 nt, Human
uguaauucuaaauga

SEQ ID NO: 1870331 - RNA, 16 nt, Human
uguaauucuaaaugaa

SEQ ID NO: 1870332 - RNA, 20 nt, Human
aguccuacaagcuaaaauua

SEQ ID NO: 1870333 - RNA, 19 nt, Human
agucgcaucucagugcagg

SEQ ID NO: 1870334 - RNA, 24 nt, Human
agucacugugagcucccaggugca

SEQ ID NO: 1870335 - RNA, 23 nt, Human
agucacugugagcucccaggugc

SEQ ID NO: 1870336 - RNA, 16 nt, Human
agggagaccuggacac

SEQ ID NO: 1870337 - RNA, 22 nt, Human
agggagaccuggacacaggccu

SEQ ID NO: 1870338 - RNA, 21 nt, Human
agggagaccuggacacaggcc

SEQ ID NO: 1870339 - RNA, 23 nt, Human
agggagcuagccagaggacugug

SEQ ID NO: 1870340 - RNA, 17 nt, Human
agggagcuagccagagg

SEQ ID NO: 1870341 - RNA, 22 nt, Human
agggagcuccaacucagaaggg

SEQ ID NO: 1870342 - RNA, 16 nt, Human
agggagcuagccagag

SEQ ID NO: 1870343 - RNA, 15 nt, Human
agggagcuagccaga

SEQ ID NO: 1870344 - RNA, 14 nt, Human
ugggcaaacaggca

SEQ ID NO: 1870345 - RNA, 15 nt, Human
ugggcaaacaggcag

SEQ ID NO: 1870346 - RNA, 16 nt, Human
ugggcaaacaggcagu

SEQ ID NO: 1870347 - RNA, 18 nt, Human
ugggaaacaaaaggauaa

SEQ ID NO: 1870348 - RNA, 17 nt, Human
aggcuuuuuuccagacu

SEQ ID NO: 1870349 - RNA, 20 nt, Human
ugggaaccccuucauccucu

SEQ ID NO: 1870350 - RNA, 22 nt, Human
ugggaaccccuucauccucuga

SEQ ID NO: 1870351 - RNA, 19 nt, Human
aggauuucaugauuucauu

SEQ ID NO: 1870352 - RNA, 20 nt, Human
aggauuucaugauuucauuu

SEQ ID NO: 1870353 - RNA, 14 nt, Human
agcuuauuaaugcu

SEQ ID NO: 1870354 - RNA, 15 nt, Human
agcuuauuaaugcua

SEQ ID NO: 1870355 - RNA, 16 nt, Human
agcuuauuaaugcuaa

SEQ ID NO: 1870356 - RNA, 17 nt, Human
agcuuauuaaugcuaag

SEQ ID NO: 1870357 - RNA, 18 nt, Human
agcuuauuaaugcuaagg

SEQ ID NO: 1870358 - RNA, 19 nt, Human
agcuuauuaaugcuaaggg

SEQ ID NO: 1870359 - RNA, 21 nt, Human
agcuuauuaaugcuaagggca

SEQ ID NO: 1870360 - RNA, 22 nt, Human
agcuuauuaaugcuaagggcag

SEQ ID NO: 1870361 - RNA, 21 nt, Human
aggaaacucugcauucuagua

SEQ ID NO: 1870362 - RNA, 19 nt, Human
ugcgacacugggaggccag

SEQ ID NO: 1870363 - RNA, 19 nt, Human
agcugccucugccacugac

SEQ ID NO: 1870364 - RNA, 15 nt, Human
agcugggagccgggc

SEQ ID NO: 1870365 - RNA, 14 nt, Human
agcugggagccggg

SEQ ID NO: 1870366 - RNA, 18 nt, Human
ugcccuuggcacccaaga

SEQ ID NO: 1870367 - RNA, 21 nt, Human
agcguggcgcaguggcccuga

SEQ ID NO: 1870368 - RNA, 22 nt, Human
agcguggcgcaguggcccugag

SEQ ID NO: 1870369 - RNA, 24 nt, Human
agcguggcgcaguggcccugagca

SEQ ID NO: 1870370 - RNA, 18 nt, Human
ugccauagucacauggcc

SEQ ID NO: 1870371 - RNA, 19 nt, Human
ugccauagucacauggccu

SEQ ID NO: 1870372 - RNA, 19 nt, Human
agcuauggugucauaggcu

SEQ ID NO: 1870373 - RNA, 16 nt, Human
ugcccucaccacccac

SEQ ID NO: 1870374 - RNA, 19 nt, Human
ugcacaugucuuguacaug

SEQ ID NO: 1870375 - RNA, 22 nt, Human
ugcacaugucuuguacaugugu

SEQ ID NO: 1870376 - RNA, 15 nt, Human
ugcacaugucuugua

SEQ ID NO: 1870377 - RNA, 23 nt, Human
ugcacaugaaucccacccacaug

SEQ ID NO: 1870378 - RNA, 13 nt, Human
ugcacaagccagg

SEQ ID NO: 1870379 - RNA, 14 nt, Human
ugcacaagccaggg

SEQ ID NO: 1870380 - RNA, 19 nt, Human
ugcagucuguccaggcucg

SEQ ID NO: 1870381 - RNA, 21 nt, Human
ucuggagucucacuugucuca

SEQ ID NO: 1870382 - RNA, 23 nt, Human
agaagaaaauggaaccaggcuug

SEQ ID NO: 1870383 - RNA, 22 nt, Human
agaagaaaauggaaccaggcuu

SEQ ID NO: 1870384 - RNA, 20 nt, Human
agaagaaaauggaaccaggc

SEQ ID NO: 1870385 - RNA, 19 nt, Human
agaagaaaauggaaccagg

SEQ ID NO: 1870386 - RNA, 17 nt, Human
ucuuaaucuuuucacaa

SEQ ID NO: 1870387 - RNA, 18 nt, Human
ucuuaaucuuuucacaaa

SEQ ID NO: 1870388 - RNA, 16 nt, Human
ucuuggacacuguaca

SEQ ID NO: 1870389 - RNA, 17 nt, Human
ucuuggacacuguacaa

SEQ ID NO: 1870390 - RNA, 12 nt, Human
agauaauuauaa

SEQ ID NO: 1870391 - RNA, 16 nt, Human
ugaagcuuauuaaugc

SEQ ID NO: 1870392 - RNA, 17 nt, Human
ugaagcuuauuaaugcu

SEQ ID NO: 1870393 - RNA, 18 nt, Human
ugaagcuuauuaaugcua

SEQ ID NO: 1870394 - RNA, 19 nt, Human
ugaagcuuauuaaugcuaa

SEQ ID NO: 1870395 - RNA, 20 nt, Human
ugaagcuuauuaaugcuaag

SEQ ID NO: 1870396 - RNA, 23 nt, Human
ugaagcuuauuaaugcuaagggc

SEQ ID NO: 1870397 - RNA, 22 nt, Human
ugaagcuuauuaaugcuaaggg

SEQ ID NO: 1870398 - RNA, 19 nt, Human
agauggaguucuugugcca

SEQ ID NO: 1870399 - RNA, 22 nt, Human
ugaccccgacgccacagcccag

SEQ ID NO: 1870400 - RNA, 21 nt, Human
ugaccccgacgccacagccca

SEQ ID NO: 1870401 - RNA, 17 nt, Human
ugaccacaccugccucu

SEQ ID NO: 1870402 - RNA, 18 nt, Human
ugacuuggggagauggag

SEQ ID NO: 1870403 - RNA, 19 nt, Human
ugacuuggggagauggagu

SEQ ID NO: 1870404 - RNA, 18 nt, Human
ugagcaauguauaacccc

SEQ ID NO: 1870405 - RNA, 17 nt, Human
ugagcaauguauaaccc

SEQ ID NO: 1870406 - RNA, 17 nt, Human
agcacgaaauguuauuu

SEQ ID NO: 1870407 - RNA, 18 nt, Human
agcacgaaauguuauuuu

SEQ ID NO: 1870408 - RNA, 19 nt, Human
agcagacugaucaggaccu

SEQ ID NO: 1870409 - RNA, 18 nt, Human
agcagacugaucaggacc

SEQ ID NO: 1870410 - RNA, 17 nt, Human
agcagacugaucaggac

SEQ ID NO: 1870411 - RNA, 16 nt, Human
agcagacugaucagga

SEQ ID NO: 1870412 - RNA, 21 nt, Human
agcagacaguguuuucuggga

SEQ ID NO: 1870413 - RNA, 13 nt, Human
ugagcuacaaaug

SEQ ID NO: 1870414 - RNA, 14 nt, Human
ugagcuacaaaugc

SEQ ID NO: 1870415 - RNA, 13 nt, Human
ugagccuuguaau

SEQ ID NO: 1870416 - RNA, 16 nt, Human
ugagcuacaaaugcau

SEQ ID NO: 1870417 - RNA, 23 nt, Human
ugaggggucgacuucgggcuggc

SEQ ID NO: 1870418 - RNA, 19 nt, Human
acccaagaccucagggcac

SEQ ID NO: 1870419 - RNA, 18 nt, Human
acccaagaccucagggca

SEQ ID NO: 1870420 - RNA, 17 nt, Human
accccuuucuggcucuc

SEQ ID NO: 1870421 - RNA, 18 nt, Human
accugguccacagggcac

SEQ ID NO: 1870422 - RNA, 17 nt, Human
accugguccacagggca

SEQ ID NO: 1870423 - RNA, 16 nt, Human
accugguccacagggc

SEQ ID NO: 1870424 - RNA, 15 nt, Human
accugguccacaggg

SEQ ID NO: 1870425 - RNA, 13 nt, Human
ucauuuuaauuau

SEQ ID NO: 1870426 - RNA, 14 nt, Human
ucauuuuaauuauu

SEQ ID NO: 1870427 - RNA, 19 nt, Human
uccugugccuccaucagcu

SEQ ID NO: 1870428 - RNA, 12 nt, Human
acugcagggaca

SEQ ID NO: 1870429 - RNA, 22 nt, Human
acugcagggacacgggcagccu

SEQ ID NO: 1870430 - RNA, 16 nt, Human
uccuuucauuuacugu

SEQ ID NO: 1870431 - RNA, 20 nt, Human
uccuuucauuuacuguggcu

SEQ ID NO: 1870432 - RNA, 15 nt, Human
acuggcgccuccgag

SEQ ID NO: 1870433 - RNA, 17 nt, Human
ucccaggugcagccaga

SEQ ID NO: 1870434 - RNA, 17 nt, Human
ucccauagccaggaaac

SEQ ID NO: 1870435 - RNA, 14 nt, Human
uccccaaagggugu

SEQ ID NO: 1870436 - RNA, 11 nt, Human
acucugcacau

SEQ ID NO: 1870437 - RNA, 13 nt, Human
acucugcacaugu

SEQ ID NO: 1870438 - RNA, 17 nt, Human
acucugcacaugucuug

SEQ ID NO: 1870439 - RNA, 16 nt, Human
acucugcauucuagua

SEQ ID NO: 1870440 - RNA, 18 nt, Human
acucugcacaugucuugu

SEQ ID NO: 1870441 - RNA, 19 nt, Human
acucugcacaugucuugua

SEQ ID NO: 1870442 - RNA, 21 nt, Human
acucugcacaugucuuguaca

SEQ ID NO: 1870443 - RNA, 22 nt, Human
acucugcacaugucuuguacau

SEQ ID NO: 1870444 - RNA, 19 nt, Human
uccucagaucauccagaag

SEQ ID NO: 1870445 - RNA, 17 nt, Human
acagcccagccacggac

SEQ ID NO: 1870446 - RNA, 16 nt, Human
acagcccagccacgga

SEQ ID NO: 1870447 - RNA, 15 nt, Human
uauauuuacaaaugg

SEQ ID NO: 1870448 - RNA, 14 nt, Human
uauauuuacaaaug

SEQ ID NO: 1870449 - RNA, 12 nt, Human
acacccagcccc

SEQ ID NO: 1870450 - RNA, 17 nt, Human
acacccagcccccacau

SEQ ID NO: 1870451 - RNA, 23 nt, Human
acaguucggugagcuacaaaugc

SEQ ID NO: 1870452 - RNA, 19 nt, Human
acaguucggugagcuacaa

SEQ ID NO: 1870453 - RNA, 22 nt, Human
acaguucggugagcuacaaaug

SEQ ID NO: 1870454 - RNA, 15 nt, Human
acaguucauauguac

SEQ ID NO: 1870455 - RNA, 14 nt, Human
uauucuucauaaca

SEQ ID NO: 1870456 - RNA, 17 nt, Human
uauuuaagauaauuaua

SEQ ID NO: 1870457 - RNA, 20 nt, Human
uauuuaagauaauuauaaua

SEQ ID NO: 1870458 - RNA, 20 nt, Human
acagugaaagaaaauaacaa

SEQ ID NO: 1870459 - RNA, 17 nt, Human
acagggcaccugccacc

SEQ ID NO: 1870460 - RNA, 15 nt, Human
acagggcaccugcca

SEQ ID NO: 1870461 - RNA, 12 nt, Human
uauuaaagacag

SEQ ID NO: 1870462 - RNA, 21 nt, Human
aauucuugccaaauauaaaua

SEQ ID NO: 1870463 - RNA, 22 nt, Human
uacucaauguuacuaucugcuu

SEQ ID NO: 1870464 - RNA, 18 nt, Human
acaagcacuaaacaaaga

SEQ ID NO: 1870465 - RNA, 19 nt, Human
acaagcaaacccagacggc

SEQ ID NO: 1870466 - RNA, 16 nt, Human
acaagcaaacccagac

SEQ ID NO: 1870467 - RNA, 14 nt, Human
acaagcuaaaauua

SEQ ID NO: 1870468 - RNA, 11 nt, Human
acaagccaggg

SEQ ID NO: 1870469 - RNA, 15 nt, Human
acaagccagggugug

SEQ ID NO: 1870470 - RNA, 20 nt, Human
acaagaagccacagaccuag

SEQ ID NO: 1870471 - RNA, 21 nt, Human
uagcaugucgucaaagcugaa

SEQ ID NO: 1870472 - RNA, 18 nt, Human
uagcaugucgucaaagcu

SEQ ID NO: 1870473 - RNA, 18 nt, Human
uaauaccucugugugcuc

SEQ ID NO: 1870474 - RNA, 13 nt, Human
uaauaccucugug

SEQ ID NO: 1870475 - RNA, 14 nt, Human
uaauaccucugugu

SEQ ID NO: 1870476 - RNA, 15 nt, Human
uaauaccucugugug

SEQ ID NO: 1870477 - RNA, 19 nt, Human
uaaucagggaggucauuuu

SEQ ID NO: 1870478 - RNA, 18 nt, Human
aaucuuuucacaaauaaa

SEQ ID NO: 1870479 - RNA, 14 nt, Human
aaucuuuucacaaa

SEQ ID NO: 1870480 - RNA, 15 nt, Human
aaucuuuucacaaau

SEQ ID NO: 1870481 - RNA, 16 nt, Human
aaucuuuucacaaaua

SEQ ID NO: 1870482 - RNA, 17 nt, Human
aaucuuuucacaaauaa

SEQ ID NO: 1870483 - RNA, 16 nt, Human
uaauuaucuaaaguau

SEQ ID NO: 1870484 - RNA, 15 nt, Human
aauguacauuaauua

SEQ ID NO: 1870485 - RNA, 16 nt, Human
aauuaaggcauaagaa

SEQ ID NO: 1870486 - RNA, 18 nt, Human
uaccccuuucuggcucuc

SEQ ID NO: 1870487 - RNA, 18 nt, Human
guugacaguucauaugua

SEQ ID NO: 1870488 - RNA, 16 nt, Human
aaggaaaaaauaacaa

SEQ ID NO: 1870489 - RNA, 19 nt, Human
aaggaaaaaauaacaauga

SEQ ID NO: 1870490 - RNA, 13 nt, Human
aaggauaaugaau

SEQ ID NO: 1870491 - RNA, 16 nt, Human
aaggagacaggcagag

SEQ ID NO: 1870492 - RNA, 14 nt, Human
aaggagacaggcag

SEQ ID NO: 1870493 - RNA, 19 nt, Human
aaggagacaggcagagcug

SEQ ID NO: 1870494 - RNA, 23 nt, Human
guugcugaugaacucuuaaucaa

SEQ ID NO: 1870495 - RNA, 22 nt, Human
aagucuuauauauuguagauaa

SEQ ID NO: 1870496 - RNA, 15 nt, Human
guuuuuuaugcuaau

SEQ ID NO: 1870497 - RNA, 18 nt, Human
guuugccuucuacuuuua

SEQ ID NO: 1870498 - RNA, 19 nt, Human
uaaagaacacccuauauuu

SEQ ID NO: 1870499 - RNA, 15 nt, Human
uaaagacagaggcag

SEQ ID NO: 1870500 - RNA, 17 nt, Human
uaaacuaaagaaaaauu

SEQ ID NO: 1870501 - RNA, 17 nt, Human
uaaauccuuuacuguua

SEQ ID NO: 1870502 - RNA, 21 nt, Human
uaaauagucuagacuaaaaga

SEQ ID NO: 1870503 - RNA, 13 nt, Human
uaaaugaauguuu

SEQ ID NO: 1870504 - RNA, 15 nt, Human
aauaacaauaaaaga

SEQ ID NO: 1870505 - RNA, 12 nt, Human
aauaaaaauaau

SEQ ID NO: 1870506 - RNA, 18 nt, Human
aauaaaauaucauucagc

SEQ ID NO: 1870507 - RNA, 19 nt, Human
aauaaaauaucauucagca

SEQ ID NO: 1870508 - RNA, 20 nt, Human
aauaaaauaucauucagcaa

SEQ ID NO: 1870509 - RNA, 12 nt, Human
aauaaaauauca

SEQ ID NO: 1870510 - RNA, 14 nt, Human
aauaaaauaucauu

SEQ ID NO: 1870511 - RNA, 15 nt, Human
aauaaaauaucauuc

SEQ ID NO: 1870512 - RNA, 16 nt, Human
aauaaaauaucauuca

SEQ ID NO: 1870513 - RNA, 17 nt, Human
aauaaaauaucauucag

SEQ ID NO: 1870514 - RNA, 21 nt, Human
aauaaaauaucauucagcaac

SEQ ID NO: 1870515 - RNA, 14 nt, Human
guggacucugcaca

SEQ ID NO: 1870516 - RNA, 17 nt, Human
guggacucugcacaugu

SEQ ID NO: 1870517 - RNA, 13 nt, Human
aagaaaguuuccc

SEQ ID NO: 1870518 - RNA, 15 nt, Human
aagaaaguuucccca

SEQ ID NO: 1870519 - RNA, 19 nt, Human
aagaagccacagaccuagg

SEQ ID NO: 1870520 - RNA, 23 nt, Human
aagaaaguuuccccaccagugaa

SEQ ID NO: 1870521 - RNA, 17 nt, Human
aacuuguauuaaagaca

SEQ ID NO: 1870522 - RNA, 12 nt, Human
gugccuggccug

SEQ ID NO: 1870523 - RNA, 15 nt, Human
gugccuggccuggca

SEQ ID NO: 1870524 - RNA, 19 nt, Human
gugccuggccuggcacaca

SEQ ID NO: 1870525 - RNA, 19 nt, Human
aagcaaacccagacggcuc

SEQ ID NO: 1870526 - RNA, 16 nt, Human
aagcaaacccagacgg

SEQ ID NO: 1870527 - RNA, 13 nt, Human
aagcaaacccaga

SEQ ID NO: 1870528 - RNA, 16 nt, Human
aagagcuguccuggua

SEQ ID NO: 1870529 - RNA, 14 nt, Human
guggcuucuuaauc

SEQ ID NO: 1870530 - RNA, 17 nt, Human
gugggcaaacaggcagu

SEQ ID NO: 1870531 - RNA, 12 nt, Human
guagccugugca

SEQ ID NO: 1870532 - RNA, 18 nt, Human
gucgacuucgggcuggcc

SEQ ID NO: 1870533 - RNA, 16 nt, Human
gucuagacuaaaagau

SEQ ID NO: 1870534 - RNA, 23 nt, Human
aacuaagaaauaugcacaauagc

SEQ ID NO: 1870535 - RNA, 22 nt, Human
aaccaugagaccacuguuauca

SEQ ID NO: 1870536 - RNA, 19 nt, Human
gugaguccuagagcuacag

SEQ ID NO: 1870537 - RNA, 16 nt, Human
aacucugcauucuagu

SEQ ID NO: 1870538 - RNA, 13 nt, Human
gugaaggcuggca

SEQ ID NO: 1870539 - RNA, 12 nt, Human
gugaaggcuggc

SEQ ID NO: 1870540 - RNA, 14 nt, Human
gugaaggcuggcau

SEQ ID NO: 1870541 - RNA, 17 nt, Human
gugaccaggcauccucc

SEQ ID NO: 1870542 - RNA, 17 nt, Human
caagcacuaaacaaaga

SEQ ID NO: 1870543 - RNA, 15 nt, Human
caaauagcauaaguu

SEQ ID NO: 1870544 - RNA, 22 nt, Human
cacaaagaugggugaaggcugg

SEQ ID NO: 1870545 - RNA, 15 nt, Human
caccacgucacuuca

SEQ ID NO: 1870546 - RNA, 15 nt, Human
cacauggccuaugca

SEQ ID NO: 1870547 - RNA, 15 nt, Human
cacaugucuuguaca

SEQ ID NO: 1870548 - RNA, 20 nt, Human
cacaugucuuguacaugugu

SEQ ID NO: 1870549 - RNA, 13 nt, Human
cacaugugacaca

SEQ ID NO: 1870550 - RNA, 15 nt, Human
cacaugugacacaua

SEQ ID NO: 1870551 - RNA, 21 nt, Human
cacccacaugugacacauaug

SEQ ID NO: 1870552 - RNA, 12 nt, Human
cacccacaugug

SEQ ID NO: 1870553 - RNA, 13 nt, Human
cacccacauguga

SEQ ID NO: 1870554 - RNA, 19 nt, Human
cacccacaugugacacaua

SEQ ID NO: 1870555 - RNA, 21 nt, Human
uugaaaaucuuauaauuuaaa

SEQ ID NO: 1870556 - RNA, 22 nt, Human
uucuugugccauagucacaugg

SEQ ID NO: 1870557 - RNA, 18 nt, Human
uucuucauaacaauuuua

SEQ ID NO: 1870558 - RNA, 21 nt, Human
uucuucauaacaauuuuagga

SEQ ID NO: 1870559 - RNA, 18 nt, Human
uugaucccuucuguuggu

SEQ ID NO: 1870560 - RNA, 23 nt, Human
uugaauugcauuuuuuaaaacaa

SEQ ID NO: 1870561 - RNA, 15 nt, Human
uuggacacuguacaa

SEQ ID NO: 1870562 - RNA, 17 nt, Human
uugccuucuacuuuuaa

SEQ ID NO: 1870563 - RNA, 12 nt, Human
uuuaaaaugucu

SEQ ID NO: 1870564 - RNA, 21 nt, Human
uuuaaaacaagaaaguuuccc

SEQ ID NO: 1870565 - RNA, 22 nt, Human
uuuaaaacaagaaaguuucccc

SEQ ID NO: 1870566 - RNA, 14 nt, Human
uuucauuucaacug

SEQ ID NO: 1870567 - RNA, 22 nt, Human
uuucaauuccaccugcaaucaa

SEQ ID NO: 1870568 - RNA, 20 nt, Human
uuucucuccagccugacuug

SEQ ID NO: 1870569 - RNA, 20 nt, Human
uuugguaaaauacuucuuga

SEQ ID NO: 1870570 - RNA, 21 nt, Human
uuugaaauuguauuacaaauc

SEQ ID NO: 1870571 - RNA, 14 nt, Human
uucaccuugaagaa

SEQ ID NO: 1870572 - RNA, 10 nt, Human
uuauuaaagg

SEQ ID NO: 1870573 - RNA, 13 nt, Human
uuauuaaugcuaa

SEQ ID NO: 1870574 - RNA, 14 nt, Human
uuauuaaugcuaag

SEQ ID NO: 1870575 - RNA, 15 nt, Human
uuauuaaugcuaagg

SEQ ID NO: 1870576 - RNA, 16 nt, Human
uuauuaaugcuaaggg

SEQ ID NO: 1870577 - RNA, 18 nt, Human
uucuaaaaauugugauca

SEQ ID NO: 1870578 - RNA, 14 nt, Human
uucgggcuggccau

SEQ ID NO: 1870579 - RNA, 12 nt, Human
uuccuauaugca

SEQ ID NO: 1870580 - RNA, 16 nt, Human
uuacuguggcuucuua

SEQ ID NO: 1870581 - RNA, 18 nt, Human
uuacuguuagucauuugc

SEQ ID NO: 1870582 - RNA, 15 nt, Human
uuacuuuccauugcu

SEQ ID NO: 1870583 - RNA, 15 nt, Human
uuaggauggcaggac

SEQ ID NO: 1870584 - RNA, 12 nt, Human
uuaaagacagag

SEQ ID NO: 1870585 - RNA, 19 nt, Human
uggacugaccugguccaca

SEQ ID NO: 1870586 - RNA, 17 nt, Human
uggacugaccuggucca

SEQ ID NO: 1870587 - RNA, 14 nt, Human
uggacacuguacaa

SEQ ID NO: 1870588 - RNA, 17 nt, Human
uggcccaggugaguccu

SEQ ID NO: 1870589 - RNA, 20 nt, Human
uggccuaugcacauauggac

SEQ ID NO: 1870590 - RNA, 13 nt, Human
uggccuaugcaca

SEQ ID NO: 1870591 - RNA, 14 nt, Human
uggccuaugcacau

SEQ ID NO: 1870592 - RNA, 15 nt, Human
uggccuaugcacaua

SEQ ID NO: 1870593 - RNA, 17 nt, Human
uggccuaugcacauaug

SEQ ID NO: 1870594 - RNA, 13 nt, Human
uggcucccaggac

SEQ ID NO: 1870595 - RNA, 14 nt, Human
uggcucccaggaca

SEQ ID NO: 1870596 - RNA, 15 nt, Human
uggcucccaggacac

SEQ ID NO: 1870597 - RNA, 19 nt, Human
ugcaguuugagacaggaga

SEQ ID NO: 1870598 - RNA, 20 nt, Human
ugcauaguaccaaucauuuu

SEQ ID NO: 1870599 - RNA, 21 nt, Human
ugcauaguaccaaucauuuua

SEQ ID NO: 1870600 - RNA, 22 nt, Human
ugcauaguaccaaucauuuuaa

SEQ ID NO: 1870601 - RNA, 12 nt, Human
ugcugcugcugc

SEQ ID NO: 1870602 - RNA, 13 nt, Human
ugauuauauguca

SEQ ID NO: 1870603 - RNA, 23 nt, Human
ugaugcuacaggauuugaaauug

SEQ ID NO: 1870604 - RNA, 20 nt, Human
ugaugcuacaggauuugaaa

SEQ ID NO: 1870605 - RNA, 20 nt, Human
ugaucaggaccuccaagcca

SEQ ID NO: 1870606 - RNA, 12 nt, Human
ugaucaggaccu

SEQ ID NO: 1870607 - RNA, 18 nt, Human
ugauccaagcaagacuga

SEQ ID NO: 1870608 - RNA, 14 nt, Human
ugagaccacuguua

SEQ ID NO: 1870609 - RNA, 21 nt, Human
ugagaccacagagagagggga

SEQ ID NO: 1870610 - RNA, 20 nt, Human
ugaaaagcuccauuuuuagu

SEQ ID NO: 1870611 - RNA, 12 nt, Human
ucuuuucacaaa

SEQ ID NO: 1870612 - RNA, 13 nt, Human
ucuuuucacaaau

SEQ ID NO: 1870613 - RNA, 14 nt, Human
ucuuuucacaaaua

SEQ ID NO: 1870614 - RNA, 15 nt, Human
ucuuuucacaaauaa

SEQ ID NO: 1870615 - RNA, 16 nt, Human
ucuuuucacaaauaaa

SEQ ID NO: 1870616 - RNA, 20 nt, Human
ugaaacccagucacugugag

SEQ ID NO: 1870617 - RNA, 11 nt, Human
ugaaacccagu

SEQ ID NO: 1870618 - RNA, 17 nt, Human
ugaaacaagaagccaca

SEQ ID NO: 1870619 - RNA, 23 nt, Human
ugaacaagcaaacccagacggcu

SEQ ID NO: 1870620 - RNA, 12 nt, Human
ucuuugccaagu

SEQ ID NO: 1870621 - RNA, 17 nt, Human
ucuuucacauuuaaaua

SEQ ID NO: 1870622 - RNA, 14 nt, Human
ucuuguuucaauuc

SEQ ID NO: 1870623 - RNA, 22 nt, Human
ugaauugcauuuuuuaaaacaa

SEQ ID NO: 1870624 - RNA, 21 nt, Human
ugaauugcauuuuuuaaaaca

SEQ ID NO: 1870625 - RNA, 16 nt, Human
ugaccaggcauccucc

SEQ ID NO: 1870626 - RNA, 14 nt, Human
ugaacucuuaauca

SEQ ID NO: 1870627 - RNA, 15 nt, Human
ugaacucuuaaucaa

SEQ ID NO: 1870628 - RNA, 20 nt, Human
ugaaugaaagucuugugacu

SEQ ID NO: 1870629 - RNA, 23 nt, Human
ugaaugaaagucuugugacuagu

SEQ ID NO: 1870630 - RNA, 21 nt, Human
ugaaugaaagucuugugacua

SEQ ID NO: 1870631 - RNA, 20 nt, Human
ugaaucccacccacauguga

SEQ ID NO: 1870632 - RNA, 16 nt, Human
uccugagaccacagag

SEQ ID NO: 1870633 - RNA, 20 nt, Human
uccaugggccauaugaaaag

SEQ ID NO: 1870634 - RNA, 12 nt, Human
uccauaaucacu

SEQ ID NO: 1870635 - RNA, 11 nt, Human
ucccaggacac

SEQ ID NO: 1870636 - RNA, 13 nt, Human
ucauuuacugugg

SEQ ID NO: 1870637 - RNA, 15 nt, Human
ucauuuacuguggcu

SEQ ID NO: 1870638 - RNA, 20 nt, Human
ucauuuacuguggcuucuua

SEQ ID NO: 1870639 - RNA, 17 nt, Human
uauuauauuuacaaaug

SEQ ID NO: 1870640 - RNA, 13 nt, Human
uauuauuuauaua

SEQ ID NO: 1870641 - RNA, 15 nt, Human
uauuaucaacaauag

SEQ ID NO: 1870642 - RNA, 15 nt, Human
uauggacucugcaca

SEQ ID NO: 1870643 - RNA, 12 nt, Human
uauggacucugc

SEQ ID NO: 1870644 - RNA, 16 nt, Human
uauggacucugcacau

SEQ ID NO: 1870645 - RNA, 12 nt, Human
ucacauuuaaau

SEQ ID NO: 1870646 - RNA, 14 nt, Human
ucaauuccaccugc

SEQ ID NO: 1870647 - RNA, 18 nt, Human
ucaauguuucuucuaggu

SEQ ID NO: 1870648 - RNA, 20 nt, Human
ucaaggacuuucugaagccu

SEQ ID NO: 1870649 - RNA, 16 nt, Human
uaggucagugcaaaua

SEQ ID NO: 1870650 - RNA, 16 nt, Human
uaggacccaagcagag

SEQ ID NO: 1870651 - RNA, 14 nt, Human
uaggacccaagcag

SEQ ID NO: 1870652 - RNA, 17 nt, Human
uauaauguuguuauuua

SEQ ID NO: 1870653 - RNA, 19 nt, Human
uauaauguuguuauuuaaa

SEQ ID NO: 1870654 - RNA, 18 nt, Human
uauaauguuguuauuuaa

SEQ ID NO: 1870655 - RNA, 20 nt, Human
uauaauauacuauauuuaug

SEQ ID NO: 1870656 - RNA, 16 nt, Human
uauaauaaauguacau

SEQ ID NO: 1870657 - RNA, 17 nt, Human
uauaauauacuauauuu

SEQ ID NO: 1870658 - RNA, 22 nt, Human
uaguugcguggacucugcacau

SEQ ID NO: 1870659 - RNA, 13 nt, Human
uaugcacauaugg

SEQ ID NO: 1870660 - RNA, 14 nt, Human
uaugcaccuugugu

SEQ ID NO: 1870661 - RNA, 19 nt, Human
uaugcacauauggacucug

SEQ ID NO: 1870662 - RNA, 20 nt, Human
uaugcacauauggacucugc

SEQ ID NO: 1870663 - RNA, 18 nt, Human
uaugcaccuugugucugu

SEQ ID NO: 1870664 - RNA, 19 nt, Human
uaugcaccuugugucugua

SEQ ID NO: 1870665 - RNA, 20 nt, Human
uaugcaccuugugucuguac

SEQ ID NO: 1870666 - RNA, 22 nt, Human
uaugcaccuugugucuguacac

SEQ ID NO: 1870667 - RNA, 16 nt, Human
uaucuaauaccucugu

SEQ ID NO: 1870668 - RNA, 15 nt, Human
uaucuaauaccucug

SEQ ID NO: 1870669 - RNA, 20 nt, Human
uaucuaauaccucugugugc

SEQ ID NO: 1870670 - RNA, 23 nt, Human
uaucugcuuuugguuauaaugug

SEQ ID NO: 1870671 - RNA, 21 nt, Human
gugcuuaucccauagccagga

SEQ ID NO: 1870672 - RNA, 14 nt, Human
gugcugaagcuuau

SEQ ID NO: 1870673 - RNA, 15 nt, Human
gugcugaagcuuauu

SEQ ID NO: 1870674 - RNA, 21 nt, Human
gugcugaagcuuauuaaugcu

SEQ ID NO: 1870675 - RNA, 14 nt, Human
gugagcuacaaaug

SEQ ID NO: 1870676 - RNA, 22 nt, Human
gugagcucccaggugcagccag

SEQ ID NO: 1870677 - RNA, 19 nt, Human
gugaaagaaaauaacaaua

SEQ ID NO: 1870678 - RNA, 24 nt, Human
gugaaacccagucacugugagcuc

SEQ ID NO: 1870679 - RNA, 17 nt, Human
gugccauagucacaugg

SEQ ID NO: 1870680 - RNA, 22 nt, Human
gucucacuugugcaguguugac

SEQ ID NO: 1870681 - RNA, 23 nt, Human
guccuguaguugcguggacucug

SEQ ID NO: 1870682 - RNA, 21 nt, Human
guccuguaguugcguggacuc

SEQ ID NO: 1870683 - RNA, 15 nt, Human
guccucccagcuccu

SEQ ID NO: 1870684 - RNA, 20 nt, Human
guccagaaggagacaggcag

SEQ ID NO: 1870685 - RNA, 19 nt, Human
guccagaaggagacaggca

SEQ ID NO: 1870686 - RNA, 17 nt, Human
guccagaaggagacagg

SEQ ID NO: 1870687 - RNA, 16 nt, Human
guccagaaggagacag

SEQ ID NO: 1870688 - RNA, 14 nt, Human
guccagaaggagac

SEQ ID NO: 1870689 - RNA, 11 nt, Human
guccagaagga

SEQ ID NO: 1870690 - RNA, 17 nt, Human
ggggcuggcacugacug

SEQ ID NO: 1870691 - RNA, 13 nt, Human
ggcucccaggaca

SEQ ID NO: 1870692 - RNA, 16 nt, Human
gggccuggcagcucag

SEQ ID NO: 1870693 - RNA, 19 nt, Human
gguaccccuuucuggcucu

SEQ ID NO: 1870694 - RNA, 17 nt, Human
ggugaggggcuggcacu

SEQ ID NO: 1870695 - RNA, 13 nt, Human
ggugaaggcuggc

SEQ ID NO: 1870696 - RNA, 18 nt, Human
guaauucuaaaugaaugu

SEQ ID NO: 1870697 - RNA, 22 nt, Human
guaauucuaaaugaauguuuac

SEQ ID NO: 1870698 - RNA, 12 nt, Human
guaauucuaaau

SEQ ID NO: 1870699 - RNA, 14 nt, Human
guaauucuaaauga

SEQ ID NO: 1870700 - RNA, 15 nt, Human
guaauucuaaaugaa

SEQ ID NO: 1870701 - RNA, 23 nt, Human
guacuuuauuuucuauaauuuaa

SEQ ID NO: 1870702 - RNA, 18 nt, Human
gcuagccagaggacugug

SEQ ID NO: 1870703 - RNA, 15 nt, Human
gcuagccagaggacu

SEQ ID NO: 1870704 - RNA, 13 nt, Human
gcuagccagagga

SEQ ID NO: 1870705 - RNA, 12 nt, Human
gcuagccagagg

SEQ ID NO: 1870706 - RNA, 19 nt, Human
gcuaaauccuuuacuguua

SEQ ID NO: 1870707 - RNA, 19 nt, Human
gccugugcauguaugucuu

SEQ ID NO: 1870708 - RNA, 20 nt, Human
gcuccauuuuuagugaaaua

SEQ ID NO: 1870709 - RNA, 17 nt, Human
gcucucccauuuccuga

SEQ ID NO: 1870710 - RNA, 16 nt, Human
gcugcauacccgggca

SEQ ID NO: 1870711 - RNA, 20 nt, Human
gccuggcagcucagcuuccc

SEQ ID NO: 1870712 - RNA, 20 nt, Human
gccuggccacgcagccagga

SEQ ID NO: 1870713 - RNA, 21 nt, Human
gccuggccacgcagccaggac

SEQ ID NO: 1870714 - RNA, 22 nt, Human
gccuggccacgcagccaggaca

SEQ ID NO: 1870715 - RNA, 23 nt, Human
gccuggccacgcagccaggacac

SEQ ID NO: 1870716 - RNA, 13 nt, Human
gccuggcagcuca

SEQ ID NO: 1870717 - RNA, 15 nt, Human
gccuggccacgcagc

SEQ ID NO: 1870718 - RNA, 17 nt, Human
gccuggccacgcagcca

SEQ ID NO: 1870719 - RNA, 18 nt, Human
gccuggccacgcagccag

SEQ ID NO: 1870720 - RNA, 19 nt, Human
gccuggccacgcagccagg

SEQ ID NO: 1870721 - RNA, 14 nt, Human
gcccuuuuuaagga

SEQ ID NO: 1870722 - RNA, 17 nt, Human
ggagagucacagaacaa

SEQ ID NO: 1870723 - RNA, 14 nt, Human
ggaaccaggcuugg

SEQ ID NO: 1870724 - RNA, 12 nt, Human
gcuucugccugc

SEQ ID NO: 1870725 - RNA, 13 nt, Human
gcuucugccugca

SEQ ID NO: 1870726 - RNA, 12 nt, Human
ggcacccuccca

SEQ ID NO: 1870727 - RNA, 23 nt, Human
ggccacgugggcaaacaggcagu

SEQ ID NO: 1870728 - RNA, 21 nt, Human
ggcccaaauuaucaagcuaau

SEQ ID NO: 1870729 - RNA, 23 nt, Human
ggcccaaauuaucaagcuaauaa

SEQ ID NO: 1870730 - RNA, 21 nt, Human
ggccuaugcacauauggacuc

SEQ ID NO: 1870731 - RNA, 20 nt, Human
ggccuaugcacauauggacu

SEQ ID NO: 1870732 - RNA, 15 nt, Human
ggcucccacagagac

SEQ ID NO: 1870733 - RNA, 17 nt, Human
gaguccuagagcuacag

SEQ ID NO: 1870734 - RNA, 16 nt, Human
gaggccagugagccac

SEQ ID NO: 1870735 - RNA, 15 nt, Human
gaggccuugagaggc

SEQ ID NO: 1870736 - RNA, 21 nt, Human
gaggggucgacuucgggcugg

SEQ ID NO: 1870737 - RNA, 23 nt, Human
gagggagcuccaacucagaaggg

SEQ ID NO: 1870738 - RNA, 14 nt, Human
gcaccuugugucug

SEQ ID NO: 1870739 - RNA, 20 nt, Human
gcaccuugugucuguacacg

SEQ ID NO: 1870740 - RNA, 23 nt, Human
gcacaaagaugggugaaggcugg

SEQ ID NO: 1870741 - RNA, 17 nt, Human
gcacaagccagggugug

SEQ ID NO: 1870742 - RNA, 12 nt, Human
gcacaagccagg

SEQ ID NO: 1870743 - RNA, 13 nt, Human
gcacaagccaggg

SEQ ID NO: 1870744 - RNA, 16 nt, Human
gaucagaccauaaugu

SEQ ID NO: 1870745 - RNA, 21 nt, Human
gaugggugaaggcuggcauga

SEQ ID NO: 1870746 - RNA, 16 nt, Human
gaugggugaaggcugg

SEQ ID NO: 1870747 - RNA, 22 nt, Human
gauugagaaguuacuuuccauu

SEQ ID NO: 1870748 - RNA, 19 nt, Human
gauugauagaguguuauca

SEQ ID NO: 1870749 - RNA, 16 nt, Human
gacaaggaaaaaauaa

SEQ ID NO: 1870750 - RNA, 22 nt, Human
gaaugcagucuguccaggcucg

SEQ ID NO: 1870751 - RNA, 20 nt, Human
gaaugcagucuguccaggcu

SEQ ID NO: 1870752 - RNA, 23 nt, Human
gaaugaaagucuugugacuagug

SEQ ID NO: 1870753 - RNA, 20 nt, Human
gaaugaaagucuugugacua

SEQ ID NO: 1870754 - RNA, 21 nt, Human
gaaugaaagucuugugacuag

SEQ ID NO: 1870755 - RNA, 18 nt, Human
gaaucccacccacaugug

SEQ ID NO: 1870756 - RNA, 22 nt, Human
gaaucccacccacaugugacac

SEQ ID NO: 1870757 - RNA, 20 nt, Human
gaauguuuacacucuuugua

SEQ ID NO: 1870758 - RNA, 21 nt, Human
gaauguuuacacucuuuguaa

SEQ ID NO: 1870759 - RNA, 21 nt, Human
gaauugcauuuuuuaaaacaa

SEQ ID NO: 1870760 - RNA, 23 nt, Human
gaauugcauuuuuuaaaacaaga

SEQ ID NO: 1870761 - RNA, 11 nt, Human
gaauguaauca

SEQ ID NO: 1870762 - RNA, 13 nt, Human
gaauguaaucaau

SEQ ID NO: 1870763 - RNA, 16 nt, Human
gaauguaaucaauguu

SEQ ID NO: 1870764 - RNA, 18 nt, Human
gaauguaaucaauguuuc

SEQ ID NO: 1870765 - RNA, 19 nt, Human
gaauguaaucaauguuucu

SEQ ID NO: 1870766 - RNA, 14 nt, Human
gaccacuguuauca

SEQ ID NO: 1870767 - RNA, 13 nt, Human
gacuugaccccga

SEQ ID NO: 1870768 - RNA, 20 nt, Human
gacuuggggagauggaguuc

SEQ ID NO: 1870769 - RNA, 21 nt, Human
gacugcagggacacgggcagc

SEQ ID NO: 1870770 - RNA, 22 nt, Human
gacugcagggacacgggcagcc

SEQ ID NO: 1870771 - RNA, 19 nt, Human
gagacaggcagagcugcuc

SEQ ID NO: 1870772 - RNA, 16 nt, Human
gagacaggcagagcug

SEQ ID NO: 1870773 - RNA, 14 nt, Human
gagacaggcagagc

SEQ ID NO: 1870774 - RNA, 12 nt, Human
gagacaggcaga

SEQ ID NO: 1870775 - RNA, 17 nt, Human
cugccgcaacaguuuuu

SEQ ID NO: 1870776 - RNA, 18 nt, Human
cuggccuggcacacauca

SEQ ID NO: 1870777 - RNA, 22 nt, Human
cuggccuggcacacaucaggag

SEQ ID NO: 1870778 - RNA, 13 nt, Human
cuggccuggcaca

SEQ ID NO: 1870779 - RNA, 14 nt, Human
cuggccuggcacac

SEQ ID NO: 1870780 - RNA, 16 nt, Human
cuggccuggcacacau

SEQ ID NO: 1870781 - RNA, 17 nt, Human
cuggccuggcacacauc

SEQ ID NO: 1870782 - RNA, 21 nt, Human
cuggcacuggaugcagaaaca

SEQ ID NO: 1870783 - RNA, 22 nt, Human
cuggccaucugguuaggauggc

SEQ ID NO: 1870784 - RNA, 15 nt, Human
cuggacacaggccug

SEQ ID NO: 1870785 - RNA, 14 nt, Human
cuggacacaggccu

SEQ ID NO: 1870786 - RNA, 13 nt, Human
cuggacacaggcc

SEQ ID NO: 1870787 - RNA, 15 nt, Human
cugugcauguauguc

SEQ ID NO: 1870788 - RNA, 16 nt, Human
cugugcauguaugucu

SEQ ID NO: 1870789 - RNA, 17 nt, Human
cugugcauguaugucuu

SEQ ID NO: 1870790 - RNA, 16 nt, Human
cugugccuccaucagc

SEQ ID NO: 1870791 - RNA, 15 nt, Human
cugugccuccaucag

SEQ ID NO: 1870792 - RNA, 16 nt, Human
cuguggggcccccaca

SEQ ID NO: 1870793 - RNA, 18 nt, Human
cugugugcuccuccuugg

SEQ ID NO: 1870794 - RNA, 23 nt, Human
cugugugcuccuccuuggugccu

SEQ ID NO: 1870795 - RNA, 12 nt, Human
cuggugcugcug

SEQ ID NO: 1870796 - RNA, 19 nt, Human
cuguaaucauauaauaaau

SEQ ID NO: 1870797 - RNA, 13 nt, Human
cuguccaggcucg

SEQ ID NO: 1870798 - RNA, 12 nt, Human
cuguccaggcuc

SEQ ID NO: 1870799 - RNA, 16 nt, Human
cuguacacguguccug

SEQ ID NO: 1870800 - RNA, 17 nt, Human
cuguacacguguccugu

SEQ ID NO: 1870801 - RNA, 18 nt, Human
cuguacacguguccugua

SEQ ID NO: 1870802 - RNA, 15 nt, Human
cuucacccuggagcc

SEQ ID NO: 1870803 - RNA, 12 nt, Human
cuucugccugca

SEQ ID NO: 1870804 - RNA, 22 nt, Human
cuucucccugcacaagccaggg

SEQ ID NO: 1870805 - RNA, 16 nt, Human
cuuuaugguaaagaug

SEQ ID NO: 1870806 - RNA, 13 nt, Human
cuuucuggcucuc

SEQ ID NO: 1870807 - RNA, 19 nt, Human
cuugaguuuaaauuguaau

SEQ ID NO: 1870808 - RNA, 13 nt, Human
cuuguacaugugu

SEQ ID NO: 1870809 - RNA, 17 nt, Human
cuuguacuuuauuuucu

SEQ ID NO: 1870810 - RNA, 14 nt, Human
cuuguacaugugua

SEQ ID NO: 1870811 - RNA, 19 nt, Human
cuuguacauguguagccug

SEQ ID NO: 1870812 - RNA, 20 nt, Human
cuuguacauguguagccugu

SEQ ID NO: 1870813 - RNA, 22 nt, Human
cuuguacauguguagccugugc

SEQ ID NO: 1870814 - RNA, 23 nt, Human
cuuguacauguguagccugugca

SEQ ID NO: 1870815 - RNA, 20 nt, Human
cuuuauauggccucaagauc

SEQ ID NO: 1870816 - RNA, 21 nt, Human
cuuuaucuaauaccucugugu

SEQ ID NO: 1870817 - RNA, 22 nt, Human
cuuuaucuaauaccucugugug

SEQ ID NO: 1870818 - RNA, 15 nt, Human
cuuuuugaaaucagc

SEQ ID NO: 1870819 - RNA, 18 nt, Human
cuuuuugaaaucagcaua

SEQ ID NO: 1870820 - RNA, 18 nt, Human
gaaaaucuuauaauuuaa

SEQ ID NO: 1870821 - RNA, 23 nt, Human
ccuguaguugcguggacucugca

SEQ ID NO: 1870822 - RNA, 21 nt, Human
ccuguaguugcguggacucug

SEQ ID NO: 1870823 - RNA, 14 nt, Human
ccuggcucccagga

SEQ ID NO: 1870824 - RNA, 15 nt, Human
ccuggcucccaggac

SEQ ID NO: 1870825 - RNA, 16 nt, Human
ccuggcucccaggaca

SEQ ID NO: 1870826 - RNA, 17 nt, Human
ccuggcucccaggacac

SEQ ID NO: 1870827 - RNA, 15 nt, Human
ccuggccacgcagcc

SEQ ID NO: 1870828 - RNA, 18 nt, Human
ccuggccacgcagccagg

SEQ ID NO: 1870829 - RNA, 19 nt, Human
ccuggccacgcagccagga

SEQ ID NO: 1870830 - RNA, 20 nt, Human
ccuggccacgcagccaggac

SEQ ID NO: 1870831 - RNA, 22 nt, Human
ccuggccacgcagccaggacac

SEQ ID NO: 1870832 - RNA, 15 nt, Human
ccucuuccugccuag

SEQ ID NO: 1870833 - RNA, 21 nt, Human
ccugaagccaggccauggcua

SEQ ID NO: 1870834 - RNA, 21 nt, Human
ccugccacccugggccuggca

SEQ ID NO: 1870835 - RNA, 15 nt, Human
ccugccacccugggc

SEQ ID NO: 1870836 - RNA, 24 nt, Human
ccugccacccugggccuggcagcu

SEQ ID NO: 1870837 - RNA, 15 nt, Human
ccugcacaagccagg

SEQ ID NO: 1870838 - RNA, 16 nt, Human
ccugcacaagccaggg

SEQ ID NO: 1870839 - RNA, 17 nt, Human
ccugcacaagccagggu

SEQ ID NO: 1870840 - RNA, 13 nt, Human
ccugcccuuggca

SEQ ID NO: 1870841 - RNA, 13 nt, Human
cgaaauguuauuu

SEQ ID NO: 1870842 - RNA, 14 nt, Human
cgaaauguuauuuu

SEQ ID NO: 1870843 - RNA, 22 nt, Human
cgaaauguuauuuuuuaauuau

SEQ ID NO: 1870844 - RNA, 23 nt, Human
cgaagucucuuuuuuuggcccag

SEQ ID NO: 1870845 - RNA, 13 nt, Human
ccuuccagcccag

SEQ ID NO: 1870846 - RNA, 14 nt, Human
ccuuccagcccaga

SEQ ID NO: 1870847 - RNA, 23 nt, Human
ccuuggccgcaccuaaagcagcc

SEQ ID NO: 1870848 - RNA, 16 nt, Human
ccuuguaauucuaaau

SEQ ID NO: 1870849 - RNA, 19 nt, Human
ccuuguaauucuaaaugaa

SEQ ID NO: 1870850 - RNA, 13 nt, Human
cgcccgggcccag

SEQ ID NO: 1870851 - RNA, 14 nt, Human
cgcccgggcccaga

SEQ ID NO: 1870852 - RNA, 16 nt, Human
cgcccgggcccagagg

SEQ ID NO: 1870853 - RNA, 17 nt, Human
cgcccgggcccagagga

SEQ ID NO: 1870854 - RNA, 18 nt, Human
cgcccgggcccagaggag

SEQ ID NO: 1870855 - RNA, 14 nt, Human
cgcuucugccugca

SEQ ID NO: 1870856 - RNA, 20 nt, Human
cgcaccuaaagcagccagcc

SEQ ID NO: 1870857 - RNA, 13 nt, Human
cgcaccuaaagca

SEQ ID NO: 1870858 - RNA, 22 nt, Human
cucagcuuccccaacacgcagg

SEQ ID NO: 1870859 - RNA, 17 nt, Human
cucagcuuccccaacac

SEQ ID NO: 1870860 - RNA, 15 nt, Human
cucccacagagacaa

SEQ ID NO: 1870861 - RNA, 13 nt, Human
cucccacagagac

SEQ ID NO: 1870862 - RNA, 14 nt, Human
cucccauuuccuga

SEQ ID NO: 1870863 - RNA, 18 nt, Human
cucaguuuuaucauuuuc

SEQ ID NO: 1870864 - RNA, 17 nt, Human
cucaguuuuaucauuuu

SEQ ID NO: 1870865 - RNA, 12 nt, Human
cuauaauuuaaa

SEQ ID NO: 1870866 - RNA, 13 nt, Human
cuauaauuuaaau

SEQ ID NO: 1870867 - RNA, 12 nt, Human
cuaugcacauau

SEQ ID NO: 1870868 - RNA, 13 nt, Human
cuaugcacauaug

SEQ ID NO: 1870869 - RNA, 16 nt, Human
cuauugauaauuuaga

SEQ ID NO: 1870870 - RNA, 22 nt, Human
cuagaaaacgcgaccuuggccg

SEQ ID NO: 1870871 - RNA, 23 nt, Human
cuacacgagauacagaauuuuau

SEQ ID NO: 1870872 - RNA, 19 nt, Human
cuaaucagggaggucauuu

SEQ ID NO: 1870873 - RNA, 20 nt, Human
cuaaucagggaggucauuuu

SEQ ID NO: 1870874 - RNA, 21 nt, Human
cuaaucagggaggucauuuug

SEQ ID NO: 1870875 - RNA, 21 nt, Human
cuaagcuucacuguaaaauaa

SEQ ID NO: 1870876 - RNA, 13 nt, Human
cuaauaccucugu

SEQ ID NO: 1870877 - RNA, 15 nt, Human
cuaauaccucugugu

SEQ ID NO: 1870878 - RNA, 16 nt, Human
cuaauaccucugugug

SEQ ID NO: 1870879 - RNA, 17 nt, Human
cuaauaccucugugugc

SEQ ID NO: 1870880 - RNA, 12 nt, Human
cuaauaucagca

SEQ ID NO: 1870881 - RNA, 23 nt, Human
cuaaauaaagcuugcaacaaaau

SEQ ID NO: 1870882 - RNA, 12 nt, Human
cuaacauauaau

SEQ ID NO: 1870883 - RNA, 22 nt, Human
cuaacauauaauguuguuauuu

SEQ ID NO: 1870884 - RNA, 23 nt, Human
cuaacauauaauguuguuauuua

SEQ ID NO: 1870885 - RNA, 12 nt, Human
cuaaaugaaugu

SEQ ID NO: 1870886 - RNA, 14 nt, Human
cuaaaugaauguuu

SEQ ID NO: 1870887 - RNA, 20 nt, Human
ccgggcagggcucccacaga

SEQ ID NO: 1870888 - RNA, 21 nt, Human
ccgaggaaacgaaacccacuc

SEQ ID NO: 1870889 - RNA, 18 nt, Human
ccgacgccacagcccagc

SEQ ID NO: 1870890 - RNA, 21 nt, Human
ccgacgccacagcccagccac

SEQ ID NO: 1870891 - RNA, 15 nt, Human
cccgacgccacagcc

SEQ ID NO: 1870892 - RNA, 23 nt, Human
cccgacgccacagcccagccacg

SEQ ID NO: 1870893 - RNA, 18 nt, Human
cccgacgccacagcccag

SEQ ID NO: 1870894 - RNA, 16 nt, Human
ccccuucauccucuga

SEQ ID NO: 1870895 - RNA, 18 nt, Human
ccagcuccucacucaccu

SEQ ID NO: 1870896 - RNA, 20 nt, Human
ccagccgugagugcagaccc

SEQ ID NO: 1870897 - RNA, 18 nt, Human
ccagaaggagacaggcag

SEQ ID NO: 1870898 - RNA, 17 nt, Human
ccagaaggagacaggca

SEQ ID NO: 1870899 - RNA, 14 nt, Human
ccagaaggagacag

SEQ ID NO: 1870900 - RNA, 18 nt, Human
ccacuggacugaccuggu

SEQ ID NO: 1870901 - RNA, 13 nt, Human
ccacuggacugac

SEQ ID NO: 1870902 - RNA, 14 nt, Human
ccacuguuaucaaa

SEQ ID NO: 1870903 - RNA, 16 nt, Human
ccaggugcagccagag

SEQ ID NO: 1870904 - RNA, 15 nt, Human
ccaggugcagccaga

SEQ ID NO: 1870905 - RNA, 14 nt, Human
ccaggugcagccag

SEQ ID NO: 1870906 - RNA, 12 nt, Human
cccacagagaca

SEQ ID NO: 1870907 - RNA, 16 nt, Human
cccacaugugacacau

SEQ ID NO: 1870908 - RNA, 15 nt, Human
acggacgcuggcucc

SEQ ID NO: 1870909 - RNA, 11 nt, Human
acgcuggcucc

SEQ ID NO: 1870910 - RNA, 18 nt, Human
acgcuggcuccccaaagg

SEQ ID NO: 1870911 - RNA, 14 nt, Human
acgcagccaggaca

SEQ ID NO: 1870912 - RNA, 12 nt, Human
acgcagccagga

SEQ ID NO: 1870913 - RNA, 13 nt, Human
acgcagccaggac

SEQ ID NO: 1870914 - RNA, 15 nt, Human
acgcagccaggacac

SEQ ID NO: 1870915 - RNA, 22 nt, Human
acuaaugaccacaccugccucu

SEQ ID NO: 1870916 - RNA, 15 nt, Human
accgggcagggccgc

SEQ ID NO: 1870917 - RNA, 12 nt, Human
accucagggcac

SEQ ID NO: 1870918 - RNA, 17 nt, Human
accucaguuuuaucauu

SEQ ID NO: 1870919 - RNA, 18 nt, Human
accucaguuuuaucauuu

SEQ ID NO: 1870920 - RNA, 20 nt, Human
acuugggagaccuguaauca

SEQ ID NO: 1870921 - RNA, 19 nt, Human
acucuagaaaacgcgaccu

SEQ ID NO: 1870922 - RNA, 23 nt, Human
acucuagaaaacgcgaccuuggc

SEQ ID NO: 1870923 - RNA, 16 nt, Human
acacgggcagccuggc

SEQ ID NO: 1870924 - RNA, 19 nt, Human
acacgggcagccuggcucc

SEQ ID NO: 1870925 - RNA, 20 nt, Human
acacugggaggccagugagc

SEQ ID NO: 1870926 - RNA, 15 nt, Human
acacugggaggccag

SEQ ID NO: 1870927 - RNA, 14 nt, Human
acacugggaggcca

SEQ ID NO: 1870928 - RNA, 14 nt, Human
acaucaggaguuca

SEQ ID NO: 1870929 - RNA, 14 nt, Human
acaugugacacaua

SEQ ID NO: 1870930 - RNA, 15 nt, Human
acaugugacacauau

SEQ ID NO: 1870931 - RNA, 12 nt, Human
acaugugacaca

SEQ ID NO: 1870932 - RNA, 15 nt, Human
acccacaugugacac

SEQ ID NO: 1870933 - RNA, 16 nt, Human
acccacaugugacaca

SEQ ID NO: 1870934 - RNA, 22 nt, Human
aagauugagaaguuacuuucca

SEQ ID NO: 1870935 - RNA, 14 nt, Human
aagauugagaaguu

SEQ ID NO: 1870936 - RNA, 19 nt, Human
aagauugagaaguuacuuu

SEQ ID NO: 1870937 - RNA, 23 nt, Human
aagacagugaaagaaaauaacaa

SEQ ID NO: 1870938 - RNA, 19 nt, Human
aacuuaccugggcauucuu

SEQ ID NO: 1870939 - RNA, 22 nt, Human
aagggcaggcccaaauuaucaa

SEQ ID NO: 1870940 - RNA, 21 nt, Human
aaggcaaaggguccagaagga

SEQ ID NO: 1870941 - RNA, 20 nt, Human
aaggcaaagcacgaaauguu

SEQ ID NO: 1870942 - RNA, 15 nt, Human
aaucauuuuaauuau

SEQ ID NO: 1870943 - RNA, 16 nt, Human
aaucauuuuaauuauu

SEQ ID NO: 1870944 - RNA, 17 nt, Human
aaucauuuuaauuauua

SEQ ID NO: 1870945 - RNA, 19 nt, Human
aaucauuuuaauuauuauu

SEQ ID NO: 1870946 - RNA, 20 nt, Human
aaucauuuuaauuauuauuc

SEQ ID NO: 1870947 - RNA, 22 nt, Human
aaucauuuuaauuauuauucuu

SEQ ID NO: 1870948 - RNA, 17 nt, Human
aaugcuaagggcaggcc

SEQ ID NO: 1870949 - RNA, 18 nt, Human
aauaauaccuaagccuuc

SEQ ID NO: 1870950 - RNA, 16 nt, Human
aacacccuauauuuug

SEQ ID NO: 1870951 - RNA, 17 nt, Human
aacaggaccggguggaa

SEQ ID NO: 1870952 - RNA, 12 nt, Human
aacaggaccggg

SEQ ID NO: 1870953 - RNA, 14 nt, Human
aacgaaacccacuc

SEQ ID NO: 1870954 - RNA, 21 nt, Human
aaagaaccaagaaaaaggaau

SEQ ID NO: 1870955 - RNA, 14 nt, Human
aaacagcugccucu

SEQ ID NO: 1870956 - RNA, 11 nt, Human
aaacaggcagu

SEQ ID NO: 1870957 - RNA, 21 nt, Human
aaacaggcaguuggccagaga

SEQ ID NO: 1870958 - RNA, 12 nt, Human
aggacccaagca

SEQ ID NO: 1870959 - RNA, 18 nt, Human
agcuucacuguaaaauaa

SEQ ID NO: 1870960 - RNA, 21 nt, Human
agcuaauaaaauaucauucag

SEQ ID NO: 1870961 - RNA, 23 nt, Human
agcuaauaaaauaucauucagca

SEQ ID NO: 1870962 - RNA, 17 nt, Human
agcuaauaaaauaucau

SEQ ID NO: 1870963 - RNA, 18 nt, Human
agcuaauaaaauaucauu

SEQ ID NO: 1870964 - RNA, 19 nt, Human
agcuaauaaaauaucauuc

SEQ ID NO: 1870965 - RNA, 20 nt, Human
agcuaauaaaauaucauuca

SEQ ID NO: 1870966 - RNA, 14 nt, Human
agcuaauaaaauau

SEQ ID NO: 1870967 - RNA, 15 nt, Human
agcuaauaaaauauc

SEQ ID NO: 1870968 - RNA, 16 nt, Human
agcuaauaaaauauca

SEQ ID NO: 1870969 - RNA, 17 nt, Human
agccuggcucccaggac

SEQ ID NO: 1870970 - RNA, 18 nt, Human
agccuggcucccaggaca

SEQ ID NO: 1870971 - RNA, 19 nt, Human
agccuggcucccaggacac

SEQ ID NO: 1870972 - RNA, 14 nt, Human
aggguuuuccaaug

SEQ ID NO: 1870973 - RNA, 19 nt, Human
agggucagaaacaggaccg

SEQ ID NO: 1870974 - RNA, 15 nt, Human
agggucagaaacagg

SEQ ID NO: 1870975 - RNA, 14 nt, Human
aggccagugagcca

SEQ ID NO: 1870976 - RNA, 15 nt, Human
agcaaacccagacgg

SEQ ID NO: 1870977 - RNA, 13 nt, Human
agcaaacccagac

SEQ ID NO: 1870978 - RNA, 18 nt, Human
acuuuccucuuccugccu

SEQ ID NO: 1870979 - RNA, 20 nt, Human
agaggagcugggagccgggc

SEQ ID NO: 1870980 - RNA, 15 nt, Human
agacugaggggucga

SEQ ID NO: 1870981 - RNA, 23 nt, Human
aguacuugggagaccuguaauca

SEQ ID NO: 1870982 - RNA, 18 nt, Human
aguaacccccacuggacu

SEQ ID NO: 1870983 - RNA, 14 nt, Human
auaauguuguuauu

SEQ ID NO: 1870984 - RNA, 19 nt, Human
auaauguuguuauuuaaag

SEQ ID NO: 1870985 - RNA, 14 nt, Human
auaacaaugaaagu

SEQ ID NO: 1870986 - RNA, 16 nt, Human
auagcagacaguguuu

SEQ ID NO: 1870987 - RNA, 17 nt, Human
auaguaccaaucauuuu

SEQ ID NO: 1870988 - RNA, 21 nt, Human
auauaauaaauguacauuaau

SEQ ID NO: 1870989 - RNA, 19 nt, Human
auaugcaccuugugucugu

SEQ ID NO: 1870990 - RNA, 20 nt, Human
auaugcaccuugugucugua

SEQ ID NO: 1870991 - RNA, 21 nt, Human
auaugcaccuugugucuguac

SEQ ID NO: 1870992 - RNA, 15 nt, Human
auaugcaccuugugu

SEQ ID NO: 1870993 - RNA, 17 nt, Human
auaugcaccuugugucu

SEQ ID NO: 1870994 - RNA, 16 nt, Human
auauggacucugcaca

SEQ ID NO: 1870995 - RNA, 14 nt, Human
auaucagcaagucu

SEQ ID NO: 1870996 - RNA, 19 nt, Human
auccucaguuuuugugaaa

SEQ ID NO: 1870997 - RNA, 16 nt, Human
auggagggaauaauac

SEQ ID NO: 1870998 - RNA, 17 nt, Human
auguauuuauaaauaua

SEQ ID NO: 1870999 - RNA, 15 nt, Human
auguguagccugugc

SEQ ID NO: 1871000 - RNA, 16 nt, Human
auguguagccugugca

SEQ ID NO: 1871001 - RNA, 17 nt, Human
auguguagccugugcau

SEQ ID NO: 1871002 - RNA, 23 nt, Human
auguguagccugugcauguaugu

SEQ ID NO: 1871003 - RNA, 15 nt, Human
auguuucuucuaggu

SEQ ID NO: 1871004 - RNA, 15 nt, Human
cucugcacaugucuu

SEQ ID NO: 1871005 - RNA, 16 nt, Human
cucugcacaugucuug

SEQ ID NO: 1871006 - RNA, 18 nt, Human
cucugcacaugucuugua

SEQ ID NO: 1871007 - RNA, 20 nt, Human
cugaagcuuauuaaugcuaa

SEQ ID NO: 1871008 - RNA, 21 nt, Human
cugaagcuuauuaaugcuaag

SEQ ID NO: 1871009 - RNA, 12 nt, Human
cugaagcuuauu

SEQ ID NO: 1871010 - RNA, 14 nt, Human
cugaagcuuauuaa

SEQ ID NO: 1871011 - RNA, 16 nt, Human
cugaagcuuauuaaug

SEQ ID NO: 1871012 - RNA, 17 nt, Human
cugaagcuuauuaaugc

SEQ ID NO: 1871013 - RNA, 18 nt, Human
cugaagcuuauuaaugcu

SEQ ID NO: 1871014 - RNA, 23 nt, Human
cugaagcuuauuaaugcuaaggg

SEQ ID NO: 1871015 - RNA, 21 nt, Human
cuccagggucagaaacaggac

SEQ ID NO: 1871016 - RNA, 20 nt, Human
cuccagggucagaaacagga

SEQ ID NO: 1871017 - RNA, 14 nt, Human
cuccccgcuucugc

SEQ ID NO: 1871018 - RNA, 19 nt, Human
cucccugcacaagccaggg

SEQ ID NO: 1871019 - RNA, 20 nt, Human
cucccugcacaagccagggu

SEQ ID NO: 1871020 - RNA, 14 nt, Human
cgccuccgagggac

SEQ ID NO: 1871021 - RNA, 11 nt, Human
cgaccuuggcc

SEQ ID NO: 1871022 - RNA, 16 nt, Human
ccguagguuauuuuca

SEQ ID NO: 1871023 - RNA, 17 nt, Human
ccguaggacccaagcag

SEQ ID NO: 1871024 - RNA, 17 nt, Human
ccucaagaugaaggcaa

SEQ ID NO: 1871025 - RNA, 20 nt, Human
ccgaauguugagguggacuc

SEQ ID NO: 1871026 - RNA, 20 nt, Human
ccgccagggagaccuggaca

SEQ ID NO: 1871027 - RNA, 12 nt, Human
ccugagaccaca

SEQ ID NO: 1871028 - RNA, 18 nt, Human
ccugagaccacagagaga

SEQ ID NO: 1871029 - RNA, 23 nt, Human
ccugacuuggggagauggaguuc

SEQ ID NO: 1871030 - RNA, 19 nt, Human
ccugacuuggggagaugga

SEQ ID NO: 1871031 - RNA, 14 nt, Human
ccccgacgccacag

SEQ ID NO: 1871032 - RNA, 18 nt, Human
ccccgacgccacagccca

SEQ ID NO: 1871033 - RNA, 21 nt, Human
ccccgacgccacagcccagcc

SEQ ID NO: 1871034 - RNA, 14 nt, Human
ccccgcuucugccu

SEQ ID NO: 1871035 - RNA, 22 nt, Human
cccagccacggacgcuggcucc

SEQ ID NO: 1871036 - RNA, 14 nt, Human
cccacccacaugug

SEQ ID NO: 1871037 - RNA, 19 nt, Human
ccagggucagaaacaggac

SEQ ID NO: 1871038 - RNA, 18 nt, Human
ccagggucagaaacagga

SEQ ID NO: 1871039 - RNA, 17 nt, Human
ccagggucagaaacagg

SEQ ID NO: 1871040 - RNA, 10 nt, Human
ccagggucag

SEQ ID NO: 1871041 - RNA, 23 nt, Human
ccaggaaacucugcauucuagua

SEQ ID NO: 1871042 - RNA, 16 nt, Human
cagggaggucauuuug

SEQ ID NO: 1871043 - RNA, 15 nt, Human
caggacaccgggcag

SEQ ID NO: 1871044 - RNA, 22 nt, Human
cagagagaggggagaagccugg

SEQ ID NO: 1871045 - RNA, 19 nt, Human
cagagagccuggugcugcu

SEQ ID NO: 1871046 - RNA, 20 nt, Human
cagagagccuggugcugcug

SEQ ID NO: 1871047 - RNA, 17 nt, Human
cagcccccacauccugu

SEQ ID NO: 1871048 - RNA, 13 nt, Human
cagccagaggcac

SEQ ID NO: 1871049 - RNA, 14 nt, Human
cauuuuuuaaaaca

SEQ ID NO: 1871050 - RNA, 15 nt, Human
cauuucaacuguuug

SEQ ID NO: 1871051 - RNA, 18 nt, Human
ccaaauuaucaagcuaau

SEQ ID NO: 1871052 - RNA, 22 nt, Human
ccaaauuaucaagcuaauaaaa

SEQ ID NO: 1871053 - RNA, 23 nt, Human
ccaacuuguauuaaagacagagg

SEQ ID NO: 1871054 - RNA, 19 nt, Human
ccaaauuaucaagcuaaua

SEQ ID NO: 1871055 - RNA, 23 nt, Human
ccaccuacuuuucuuuccucaga

SEQ ID NO: 1871056 - RNA, 19 nt, Human
cauccugugccuccaucag

SEQ ID NO: 1871057 - RNA, 15 nt, Human
cauagccaggaaacu

SEQ ID NO: 1871058 - RNA, 15 nt, Human
caauucuugccaaau

SEQ ID NO: 1871059 - RNA, 13 nt, Human
cacacaucaggag

SEQ ID NO: 1871060 - RNA, 23 nt, Human
caagcuaauaaaauaucauucag

SEQ ID NO: 1871061 - RNA, 22 nt, Human
caagcuaauaaaauaucauuca

SEQ ID NO: 1871062 - RNA, 16 nt, Human
caagcuaauaaaauau

SEQ ID NO: 1871063 - RNA, 17 nt, Human
caagcuaauaaaauauc

SEQ ID NO: 1871064 - RNA, 19 nt, Human
caagcuaauaaaauaucau

SEQ ID NO: 1871065 - RNA, 21 nt, Human
caagcuaauaaaauaucauuc

SEQ ID NO: 1871066 - RNA, 17 nt, Human
cacuuauucucaagaag

SEQ ID NO: 1871067 - RNA, 15 nt, Human
cacucuuuguaagag

SEQ ID NO: 1871068 - RNA, 12 nt, Human
cacucuuuguaa

SEQ ID NO: 1871069 - RNA, 16 nt, Human
cacccucccacccggc

SEQ ID NO: 1871070 - RNA, 20 nt, Human
caaacccagacggcuccacu

SEQ ID NO: 1871071 - RNA, 24 nt, Human
caaacccagacggcuccacuagga

SEQ ID NO: 1871072 - RNA, 16 nt, Human
caacacgcaggagcac

SEQ ID NO: 1871073 - RNA, 15 nt, Human
caacacgcaggagca

SEQ ID NO: 1871074 - RNA, 22 nt, Human
caaagaugggugaaggcuggca

SEQ ID NO: 1871075 - RNA, 21 nt, Human
caaagaugggugaaggcuggc

SEQ ID NO: 1871076 - RNA, 20 nt, Human
caaagaugggugaaggcugg

SEQ ID NO: 1871077 - RNA, 20 nt, Human
caaagcacgaaauguuauuu

SEQ ID NO: 1871078 - RNA, 22 nt, Human
caaagcacgaaauguuauuuuu

SEQ ID NO: 1871079 - RNA, 17 nt, Human
auuuuauagcuacuaau

SEQ ID NO: 1871080 - RNA, 19 nt, Human
auuuuauagcuacuaauuu

SEQ ID NO: 1871081 - RNA, 19 nt, Human
auuacagaugggcaaauua

SEQ ID NO: 1871082 - RNA, 21 nt, Human
auuacagaugggcaaauuaag

SEQ ID NO: 1871083 - RNA, 22 nt, Human
auguuucuucuagguucuaaaa

SEQ ID NO: 1871084 - RNA, 23 nt, Human
auuguaauaggcguaacuaauuu

SEQ ID NO: 1871085 - RNA, 18 nt, Human
auugauagaguguuauca

SEQ ID NO: 1871086 - RNA, 21 nt, Human
auugcuaucuauugauaauuu

SEQ ID NO: 1871087 - RNA, 17 nt, Human
auugcuaucuauugaua

SEQ ID NO: 1871088 - RNA, 20 nt, Human
gcguggcgcaguggcccuga

SEQ ID NO: 1871089 - RNA, 21 nt, Human
gcguggcgcaguggcccugag

SEQ ID NO: 1871090 - RNA, 16 nt, Human
gccauaugaaaaggcu

SEQ ID NO: 1871091 - RNA, 16 nt, Human
gccauagucacauggc

SEQ ID NO: 1871092 - RNA, 19 nt, Human
gccauauacucuucaagga

SEQ ID NO: 1871093 - RNA, 18 nt, Human
ggaaacgaaacccacucu

SEQ ID NO: 1871094 - RNA, 22 nt, Human
gcuucuuaaucuuuucacaaau

SEQ ID NO: 1871095 - RNA, 23 nt, Human
gcuucuuaaucuuuucacaaaua

SEQ ID NO: 1871096 - RNA, 19 nt, Human
gcuucuuaaucuuuucaca

SEQ ID NO: 1871097 - RNA, 21 nt, Human
gcuucuuaaucuuuucacaaa

SEQ ID NO: 1871098 - RNA, 21 nt, Human
gcuuccuguccucccagcucc

SEQ ID NO: 1871099 - RNA, 16 nt, Human
gcuuccuguccuccca

SEQ ID NO: 1871100 - RNA, 22 nt, Human
gcucccaggugcagccagaggc

SEQ ID NO: 1871101 - RNA, 20 nt, Human
gcucccaggugcagccagag

SEQ ID NO: 1871102 - RNA, 19 nt, Human
gcucccaggugcagccaga

SEQ ID NO: 1871103 - RNA, 14 nt, Human
gcucccaggugcag

SEQ ID NO: 1871104 - RNA, 23 nt, Human
gcucucuuuuucuccagggucag

SEQ ID NO: 1871105 - RNA, 22 nt, Human
gcucucuuuuucuccaggguca

SEQ ID NO: 1871106 - RNA, 21 nt, Human
ggcauagcuccccgcuucugc

SEQ ID NO: 1871107 - RNA, 23 nt, Human
ggccagagagccuggugcugcug

SEQ ID NO: 1871108 - RNA, 22 nt, Human
ggccaucugguuaggauggcag

SEQ ID NO: 1871109 - RNA, 21 nt, Human
ggccaucugguuaggauggca

SEQ ID NO: 1871110 - RNA, 21 nt, Human
ggccgcaccuaaagcagccag

SEQ ID NO: 1871111 - RNA, 22 nt, Human
ggccgcaccuaaagcagccagc

SEQ ID NO: 1871112 - RNA, 15 nt, Human
ggcccaggugagucc

SEQ ID NO: 1871113 - RNA, 23 nt, Human
ggaggugaacaagcaaacccaga

SEQ ID NO: 1871114 - RNA, 22 nt, Human
ggauggcaggacgugggcuggg

SEQ ID NO: 1871115 - RNA, 21 nt, Human
ggauggcaggacgugggcugg

SEQ ID NO: 1871116 - RNA, 19 nt, Human
gggagauggaguucuugug

SEQ ID NO: 1871117 - RNA, 17 nt, Human
gggaggccagugagcca

SEQ ID NO: 1871118 - RNA, 12 nt, Human
gggcagggcagc

SEQ ID NO: 1871119 - RNA, 15 nt, Human
gggcagccuggcucc

SEQ ID NO: 1871120 - RNA, 18 nt, Human
gggcagccuggcucccag

SEQ ID NO: 1871121 - RNA, 20 nt, Human
gggcagccuggcucccagga

SEQ ID NO: 1871122 - RNA, 22 nt, Human
gggcagccuggcucccaggaca

SEQ ID NO: 1871123 - RNA, 23 nt, Human
gggcagccuggcucccaggacac

SEQ ID NO: 1871124 - RNA, 20 nt, Human
aaacaagcacuaaacaaaga

SEQ ID NO: 1871125 - RNA, 14 nt, Human
gggccgccagggag

SEQ ID NO: 1871126 - RNA, 15 nt, Human
gguccacagggcacc

SEQ ID NO: 1871127 - RNA, 14 nt, Human
gguccacagggcac

SEQ ID NO: 1871128 - RNA, 18 nt, Human
gguucucccccuuucucu

SEQ ID NO: 1871129 - RNA, 22 nt, Human
aaaguuuccccaccagugaaug

SEQ ID NO: 1871130 - RNA, 19 nt, Human
gcagccaggacaccgggca

SEQ ID NO: 1871131 - RNA, 14 nt, Human
gcagccagaggcac

SEQ ID NO: 1871132 - RNA, 12 nt, Human
gcagccagaggc

SEQ ID NO: 1871133 - RNA, 13 nt, Human
gcagccaggacac

SEQ ID NO: 1871134 - RNA, 19 nt, Human
gcaagucucuuuauauggc

SEQ ID NO: 1871135 - RNA, 18 nt, Human
gcacauauggacucugca

SEQ ID NO: 1871136 - RNA, 16 nt, Human
gcaccuaaagcagcca

SEQ ID NO: 1871137 - RNA, 17 nt, Human
gcaccuaaagcagccag

SEQ ID NO: 1871138 - RNA, 18 nt, Human
gcaccuaaagcagccagc

SEQ ID NO: 1871139 - RNA, 14 nt, Human
gcaccuaaagcagc

SEQ ID NO: 1871140 - RNA, 16 nt, Human
gcacugacugggcaua

SEQ ID NO: 1871141 - RNA, 17 nt, Human
gcacugacugggcauag

SEQ ID NO: 1871142 - RNA, 17 nt, Human
gaagggagcuagccaga

SEQ ID NO: 1871143 - RNA, 14 nt, Human
gacagugaaagaaa

SEQ ID NO: 1871144 - RNA, 12 nt, Human
gacacuguacaa

SEQ ID NO: 1871145 - RNA, 13 nt, Human
gacacuguacaag

SEQ ID NO: 1871146 - RNA, 14 nt, Human
gacucugcacauga

SEQ ID NO: 1871147 - RNA, 15 nt, Human
gacucugcacauguc

SEQ ID NO: 1871148 - RNA, 19 nt, Human
gacucugcacaugucuugu

SEQ ID NO: 1871149 - RNA, 12 nt, Human
gacucugcacau

SEQ ID NO: 1871150 - RNA, 17 nt, Human
gacucuuuugccauuaa

SEQ ID NO: 1871151 - RNA, 22 nt, Human
gagcauguacugagccuuguaa

SEQ ID NO: 1871152 - RNA, 13 nt, Human
gagcugggagccg

SEQ ID NO: 1871153 - RNA, 14 nt, Human
gagcugggagccgg

SEQ ID NO: 1871154 - RNA, 16 nt, Human
gagcugggagccgggc

SEQ ID NO: 1871155 - RNA, 22 nt, Human
gagcugggagccgggccgcaga

SEQ ID NO: 1871156 - RNA, 18 nt, Human
gagauggaguucuugugc

SEQ ID NO: 1871157 - RNA, 15 nt, Human
cuuugaucccuucug

SEQ ID NO: 1871158 - RNA, 15 nt, Human
gaaaauggaaccagg

SEQ ID NO: 1871159 - RNA, 18 nt, Human
gaaaauggaaccaggcuu

SEQ ID NO: 1871160 - RNA, 17 nt, Human
cuuuugccauuaaacuu

SEQ ID NO: 1871161 - RNA, 13 nt, Human
cuucuacuuuuaa

SEQ ID NO: 1871162 - RNA, 21 nt, Human
cuucuacuuuuaaguugcuga

SEQ ID NO: 1871163 - RNA, 21 nt, Human
cuuggcacccaagaccucagg

SEQ ID NO: 1871164 - RNA, 15 nt, Human
cuucacuguaaaaua

SEQ ID NO: 1871165 - RNA, 15 nt, Human
cuucauaacaauuuu

SEQ ID NO: 1871166 - RNA, 19 nt, Human
cuucauaacaauuuuagga

SEQ ID NO: 1871167 - RNA, 22 nt, Human
cuucaugcaggugaaacccagu

SEQ ID NO: 1871168 - RNA, 12 nt, Human
cuggcagcucag

SEQ ID NO: 1871169 - RNA, 20 nt, Human
cuggacugucuucucccugc

SEQ ID NO: 1871170 - RNA, 14 nt, Human
augaacucaacuuu

SEQ ID NO: 1871171 - RNA, 16 nt, Human
augaacucuuaaucaa

SEQ ID NO: 1871172 - RNA, 11 nt, Human
augaauguuua

SEQ ID NO: 1871173 - RNA, 22 nt, Human
augaauguuuacacucuuugua

SEQ ID NO: 1871174 - RNA, 14 nt, Human
augaccacaccugc

SEQ ID NO: 1871175 - RNA, 21 nt, Human
augagaagaaaauggaaccag

SEQ ID NO: 1871176 - RNA, 18 nt, Human
augagaccacuguuauca

SEQ ID NO: 1871177 - RNA, 23 nt, Human
augagaagaaaauggaaccaggc

SEQ ID NO: 1871178 - RNA, 13 nt, Human
uuucacugccaua

SEQ ID NO: 1871179 - RNA, 18 nt, Human
auggccuaugcacauaug

SEQ ID NO: 1871180 - RNA, 21 nt, Human
auggccucaagaucaaugaaa

SEQ ID NO: 1871181 - RNA, 21 nt, Human
auggcuauaaacaauuacaug

SEQ ID NO: 1871182 - RNA, 17 nt, Human
augcaggugaaacccag

SEQ ID NO: 1871183 - RNA, 18 nt, Human
augcagucuguccaggcu

SEQ ID NO: 1871184 - RNA, 18 nt, Human
augcaggugaaacccagu

SEQ ID NO: 1871185 - RNA, 20 nt, Human
augcagucuguccaggcucg

SEQ ID NO: 1871186 - RNA, 19 nt, Human
augcagucuguccaggcuc

SEQ ID NO: 1871187 - RNA, 14 nt, Human
uuuaagauaauuau

SEQ ID NO: 1871188 - RNA, 15 nt, Human
uuuaagauaauuaua

SEQ ID NO: 1871189 - RNA, 21 nt, Human
augcacauauggacucugcac

SEQ ID NO: 1871190 - RNA, 13 nt, Human
uugugacuagugc

SEQ ID NO: 1871191 - RNA, 16 nt, Human
uugugacuagugcuga

SEQ ID NO: 1871192 - RNA, 17 nt, Human
uugugacuagugcugaa

SEQ ID NO: 1871193 - RNA, 21 nt, Human
uugugacuagugcugaagcuu

SEQ ID NO: 1871194 - RNA, 23 nt, Human
uugugacuagugcugaagcuuau

SEQ ID NO: 1871195 - RNA, 22 nt, Human
uugugacuagugcugaagcuua

SEQ ID NO: 1871196 - RNA, 22 nt, Human
uugugauaaguucuaguugcuu

SEQ ID NO: 1871197 - RNA, 13 nt, Human
uucuauaauuuaa

SEQ ID NO: 1871198 - RNA, 14 nt, Human
uucuauaauuuaaa

SEQ ID NO: 1871199 - RNA, 16 nt, Human
aucagaccauaauguu

SEQ ID NO: 1871200 - RNA, 20 nt, Human
aucagaccauaauguuacau

SEQ ID NO: 1871201 - RNA, 15 nt, Human
aucccacccacaugu

SEQ ID NO: 1871202 - RNA, 18 nt, Human
aucccacccacaugugac

SEQ ID NO: 1871203 - RNA, 20 nt, Human
aucccacccacaugugacac

SEQ ID NO: 1871204 - RNA, 23 nt, Human
aucccacccacaugugacacaua

SEQ ID NO: 1871205 - RNA, 22 nt, Human
uucuuaaucuuuucacaaauaa

SEQ ID NO: 1871206 - RNA, 23 nt, Human
uucuuaaucuuuucacaaauaaa

SEQ ID NO: 1871207 - RNA, 16 nt, Human
uucuggcucucccauu

SEQ ID NO: 1871208 - RNA, 22 nt, Human
uucuggcucucccauuuccuga

SEQ ID NO: 1871209 - RNA, 14 nt, Human
aucccacccacaug

SEQ ID NO: 1871210 - RNA, 14 nt, Human
uuauuuuuuaauua

SEQ ID NO: 1871211 - RNA, 16 nt, Human
uuauuuuuuaauuauu

SEQ ID NO: 1871212 - RNA, 17 nt, Human
auaggcguaacuaauuu

SEQ ID NO: 1871213 - RNA, 19 nt, Human
auagucuagacuaaaagau

SEQ ID NO: 1871214 - RNA, 16 nt, Human
uucauuuacuguggcu

SEQ ID NO: 1871215 - RNA, 19 nt, Human
uucauuuacuguggcuucu

SEQ ID NO: 1871216 - RNA, 13 nt, Human
uucauuuacugug

SEQ ID NO: 1871217 - RNA, 14 nt, Human
auauguaccaugua

SEQ ID NO: 1871218 - RNA, 19 nt, Human
auauguaccauguacauga

SEQ ID NO: 1871219 - RNA, 12 nt, Human
auauauguauuu

SEQ ID NO: 1871220 - RNA, 20 nt, Human
uucauauguaccauguacau

SEQ ID NO: 1871221 - RNA, 21 nt, Human
auugcauuuuuuaaaacaaga

SEQ ID NO: 1871222 - RNA, 18 nt, Human
auugcauuuuuuaaaaca

SEQ ID NO: 1871223 - RNA, 19 nt, Human
auugcauuuuuuaaaacaa

SEQ ID NO: 1871224 - RNA, 20 nt, Human
auugcauuuuuuaaaacaag

SEQ ID NO: 1871225 - RNA, 13 nt, Human
auugacagaagcu

SEQ ID NO: 1871226 - RNA, 16 nt, Human
auuuacaaaugggaaa

SEQ ID NO: 1871227 - RNA, 14 nt, Human
auuguauuacaaau

SEQ ID NO: 1871228 - RNA, 15 nt, Human
auuguauuacaaauc

SEQ ID NO: 1871229 - RNA, 16 nt, Human
auuauauuuacaaaug

SEQ ID NO: 1871230 - RNA, 22 nt, Human
auuauaauauacuauauuuaug

SEQ ID NO: 1871231 - RNA, 17 nt, Human
auuauauuuacaaaugg

SEQ ID NO: 1871232 - RNA, 16 nt, Human
auuaucaagcuaauaa

SEQ ID NO: 1871233 - RNA, 17 nt, Human
auuaucaagcuaauaaa

SEQ ID NO: 1871234 - RNA, 22 nt, Human
auuaucaagcuaauaaaauauc

SEQ ID NO: 1871235 - RNA, 23 nt, Human
auuaucaagcuaauaaaauauca

SEQ ID NO: 1871236 - RNA, 11 nt, Human
auuauuaaagg

SEQ ID NO: 1871237 - RNA, 16 nt, Human
auuauuuauauaugua

SEQ ID NO: 1871238 - RNA, 17 nt, Human
auucagcggaauauuga

SEQ ID NO: 1871239 - RNA, 16 nt, Human
auuccaccugcaauca

SEQ ID NO: 1871240 - RNA, 14 nt, Human
uuuuaaguugcuga

SEQ ID NO: 1871241 - RNA, 13 nt, Human
auguugaggugga

SEQ ID NO: 1871242 - RNA, 22 nt, Human
auguuuacacucuuuguaagag

SEQ ID NO: 1871243 - RNA, 16 nt, Human
augucuguugaugacu

SEQ ID NO: 1871244 - RNA, 22 nt, Human
uuuuaaaacaagaaaguuuccc

SEQ ID NO: 1871245 - RNA, 18 nt, Human
auaauccuaaacauauga

SEQ ID NO: 1871246 - RNA, 15 nt, Human
auaauaaauguacau

SEQ ID NO: 1871247 - RNA, 23 nt, Human
auaaccguuuccuuucauuuacu

SEQ ID NO: 1871248 - RNA, 22 nt, Human
auaacgauaaaagacagugaaa

SEQ ID NO: 1871249 - RNA, 13 nt, Human
auaaauaaaaaua

SEQ ID NO: 1871250 - RNA, 14 nt, Human
auaaauaaaaauaa

SEQ ID NO: 1871251 - RNA, 14 nt, Human
aguuuaaauuguaa

SEQ ID NO: 1871252 - RNA, 14 nt, Human
aguugcuuguaaaa

SEQ ID NO: 1871253 - RNA, 20 nt, Human
auaaaauaucauucagcaac

SEQ ID NO: 1871254 - RNA, 18 nt, Human
uuaaucuuuucacaaaua

SEQ ID NO: 1871255 - RNA, 19 nt, Human
uuaaucuuuucacaaauaa

SEQ ID NO: 1871256 - RNA, 20 nt, Human
uuaaucuuuucacaaauaaa

SEQ ID NO: 1871257 - RNA, 17 nt, Human
aguuuccccaccaguga

SEQ ID NO: 1871258 - RNA, 23 nt, Human
aguuuccccaccagugaaugaaa

SEQ ID NO: 1871259 - RNA, 22 nt, Human
aguuuccccaccagugaaugaa

SEQ ID NO: 1871260 - RNA, 18 nt, Human
auaaaauaucauucagca

SEQ ID NO: 1871261 - RNA, 19 nt, Human
auaaaauaucauucagcaa

SEQ ID NO: 1871262 - RNA, 13 nt, Human
auaaaauaucauu

SEQ ID NO: 1871263 - RNA, 15 nt, Human
auaaaauaucauuca

SEQ ID NO: 1871264 - RNA, 16 nt, Human
auaaaauaucauucag

SEQ ID NO: 1871265 - RNA, 17 nt, Human
auaaaauaucauucagc

SEQ ID NO: 1871266 - RNA, 20 nt, Human
uguuaucaaaacuuucuuuu

SEQ ID NO: 1871267 - RNA, 14 nt, Human
uguuauuuaaagaa

SEQ ID NO: 1871268 - RNA, 16 nt, Human
aguguuaucagucaua

SEQ ID NO: 1871269 - RNA, 23 nt, Human
aguguuaucagucauaacuaaau

SEQ ID NO: 1871270 - RNA, 20 nt, Human
aguucggugagcuacaaaug

SEQ ID NO: 1871271 - RNA, 19 nt, Human
aguucggugagcuacaaau

SEQ ID NO: 1871272 - RNA, 15 nt, Human
aguucuaguugcuug

SEQ ID NO: 1871273 - RNA, 18 nt, Human
aguucaauaaaugucugu

SEQ ID NO: 1871274 - RNA, 19 nt, Human
aguucaauaaaugucuguu

SEQ ID NO: 1871275 - RNA, 21 nt, Human
aguucaauaaaugucuguuga

SEQ ID NO: 1871276 - RNA, 11 nt, Human
uguuguuauuu

SEQ ID NO: 1871277 - RNA, 13 nt, Human
uguuguuauuuaa

SEQ ID NO: 1871278 - RNA, 22 nt, Human
agugccguguguugcaugcagc

SEQ ID NO: 1871279 - RNA, 16 nt, Human
agucuagacuaaaaga

SEQ ID NO: 1871280 - RNA, 13 nt, Human
aggugcagccaga

SEQ ID NO: 1871281 - RNA, 18 nt, Human
aggugcagccagaggcac

SEQ ID NO: 1871282 - RNA, 17 nt, Human
aggugcagccagaggca

SEQ ID NO: 1871283 - RNA, 16 nt, Human
aggugcagccagaggc

SEQ ID NO: 1871284 - RNA, 15 nt, Human
aggugcagccagagg

SEQ ID NO: 1871285 - RNA, 14 nt, Human
aggugcagccagag

SEQ ID NO: 1871286 - RNA, 12 nt, Human
uguaccauguac

SEQ ID NO: 1871287 - RNA, 17 nt, Human
uguaccauguacaugaa

SEQ ID NO: 1871288 - RNA, 15 nt, Human
agggugugcccucac

SEQ ID NO: 1871289 - RNA, 23 nt, Human
ugggauugacagaagcuucugcc

SEQ ID NO: 1871290 - RNA, 23 nt, Human
agggccgccagggagaccuggac

SEQ ID NO: 1871291 - RNA, 20 nt, Human
agggccgccagggagaccug

SEQ ID NO: 1871292 - RNA, 20 nt, Human
agggccgcccgggcccagag

SEQ ID NO: 1871293 - RNA, 19 nt, Human
agggccgcccgggcccaga

SEQ ID NO: 1871294 - RNA, 20 nt, Human
agggcagccgucaccccugc

SEQ ID NO: 1871295 - RNA, 18 nt, Human
ugggcccacaaaggcaaa

SEQ ID NO: 1871296 - RNA, 16 nt, Human
ugggcugggcccacaa

SEQ ID NO: 1871297 - RNA, 19 nt, Human
ugcuccuccuuggugccug

SEQ ID NO: 1871298 - RNA, 16 nt, Human
uggcaugauccaagca

SEQ ID NO: 1871299 - RNA, 20 nt, Human
aggcaaaggguccagaagga

SEQ ID NO: 1871300 - RNA, 19 nt, Human
aggcaaaggguccagaagg

SEQ ID NO: 1871301 - RNA, 16 nt, Human
aggcaaaggguccaga

SEQ ID NO: 1871302 - RNA, 15 nt, Human
uggacacaggccugc

SEQ ID NO: 1871303 - RNA, 13 nt, Human
uggacacaggccu

SEQ ID NO: 1871304 - RNA, 18 nt, Human
aggcaccucaagaagaag

SEQ ID NO: 1871305 - RNA, 12 nt, Human
aggcaccucaag

SEQ ID NO: 1871306 - RNA, 19 nt, Human
uggaagggauggggugcca

SEQ ID NO: 1871307 - RNA, 20 nt, Human
aggagcuuccuguccuccca

SEQ ID NO: 1871308 - RNA, 16 nt, Human
aggagcuuccuguccu

SEQ ID NO: 1871309 - RNA, 11 nt, Human
aggagcuuccu

SEQ ID NO: 1871310 - RNA, 15 nt, Human
aggagcugggagccg

SEQ ID NO: 1871311 - RNA, 18 nt, Human
aggagcugggagccgggc

SEQ ID NO: 1871312 - RNA, 17 nt, Human
aggagcugggagccggg

SEQ ID NO: 1871313 - RNA, 17 nt, Human
ugcacccacccaggagu

SEQ ID NO: 1871314 - RNA, 18 nt, Human
ugcacccacccaggagug

SEQ ID NO: 1871315 - RNA, 19 nt, Human
agcuacuaauuuuaaaaug

SEQ ID NO: 1871316 - RNA, 19 nt, Human
agcuagccagaggacugug

SEQ ID NO: 1871317 - RNA, 17 nt, Human
agcuagccagaggacug

SEQ ID NO: 1871318 - RNA, 12 nt, Human
agcuagccagag

SEQ ID NO: 1871319 - RNA, 14 nt, Human
agccuggugcugcu

SEQ ID NO: 1871320 - RNA, 15 nt, Human
agccuggugcugcug

SEQ ID NO: 1871321 - RNA, 16 nt, Human
agccuggugcugcugc

SEQ ID NO: 1871322 - RNA, 18 nt, Human
agccuuguaauucuaaau

SEQ ID NO: 1871323 - RNA, 16 nt, Human
agccuuguaauucuaa

SEQ ID NO: 1871324 - RNA, 22 nt, Human
agccaggacaccgggcagggcc

SEQ ID NO: 1871325 - RNA, 15 nt, Human
agccacugagcaaug

SEQ ID NO: 1871326 - RNA, 19 nt, Human
agccacggacgcuggcucc

SEQ ID NO: 1871327 - RNA, 22 nt, Human
ugaguaacugauuuguaacaag

SEQ ID NO: 1871328 - RNA, 17 nt, Human
agcauaaguuucuggga

SEQ ID NO: 1871329 - RNA, 23 nt, Human
agcauaaguuucugggaccucag

SEQ ID NO: 1871330 - RNA, 17 nt, Human
agcaugucgucaaagcu

SEQ ID NO: 1871331 - RNA, 20 nt, Human
agcaugucgucaaagcugaa

SEQ ID NO: 1871332 - RNA, 21 nt, Human
agcauguacugagccuuguaa

SEQ ID NO: 1871333 - RNA, 20 nt, Human
agcaucacaugaacuuguaa

SEQ ID NO: 1871334 - RNA, 17 nt, Human
agauggaguucuugugc

SEQ ID NO: 1871335 - RNA, 13 nt, Human
ugacuagugcuga

SEQ ID NO: 1871336 - RNA, 22 nt, Human
ugagaagaaaauggaaccaggc

SEQ ID NO: 1871337 - RNA, 20 nt, Human
ugagaagaaaauggaaccag

SEQ ID NO: 1871338 - RNA, 21 nt, Human
ugacacauaugcaccuugugu

SEQ ID NO: 1871339 - RNA, 22 nt, Human
ugacacauaugcaccuuguguc

SEQ ID NO: 1871340 - RNA, 15 nt, Human
ugaauacuuuauaaa

SEQ ID NO: 1871341 - RNA, 16 nt, Human
ucuucugggcacccuc

SEQ ID NO: 1871342 - RNA, 13 nt, Human
agaccuguaauca

SEQ ID NO: 1871343 - RNA, 20 nt, Human
ugaaaaucuuauaauuuaaa

SEQ ID NO: 1871344 - RNA, 16 nt, Human
agaaggagacaggcag

SEQ ID NO: 1871345 - RNA, 19 nt, Human
agaagcucucgggcuagga

SEQ ID NO: 1871346 - RNA, 15 nt, Human
acuuucuuuucugga

SEQ ID NO: 1871347 - RNA, 19 nt, Human
acuuucuuuucuggaaugu

SEQ ID NO: 1871348 - RNA, 20 nt, Human
acuuugccuuuccauaauca

SEQ ID NO: 1871349 - RNA, 15 nt, Human
ucuacccauauuaca

SEQ ID NO: 1871350 - RNA, 16 nt, Human
acuucaugcaggugaa

SEQ ID NO: 1871351 - RNA, 13 nt, Human
ucuauaauuuaaa

SEQ ID NO: 1871352 - RNA, 22 nt, Human
acuugaccccgacgccacagcc

SEQ ID NO: 1871353 - RNA, 18 nt, Human
acuuguauuaaagacaga

SEQ ID NO: 1871354 - RNA, 15 nt, Human
ucacuucacccugga

SEQ ID NO: 1871355 - RNA, 23 nt, Human
accaugcgacacugggaggccag

SEQ ID NO: 1871356 - RNA, 22 nt, Human
accaugcgacacugggaggcca

SEQ ID NO: 1871357 - RNA, 21 nt, Human
accccagccuggccacgcagc

SEQ ID NO: 1871358 - RNA, 22 nt, Human
accccagccuggccacgcagcc

SEQ ID NO: 1871359 - RNA, 16 nt, Human
ucauaagcgaucacuu

SEQ ID NO: 1871360 - RNA, 17 nt, Human
acccccacuggacugac

SEQ ID NO: 1871361 - RNA, 18 nt, Human
acauuauuaucaacaaua

SEQ ID NO: 1871362 - RNA, 16 nt, Human
ucacauggccuaugca

SEQ ID NO: 1871363 - RNA, 21 nt, Human
ucacauggccuaugcacauau

SEQ ID NO: 1871364 - RNA, 19 nt, Human
ucacauuacuguauauacu

SEQ ID NO: 1871365 - RNA, 13 nt, Human
acaugaagaagcu

SEQ ID NO: 1871366 - RNA, 22 nt, Human
acaugucuuguacauguguagc

SEQ ID NO: 1871367 - RNA, 16 nt, Human
acaugucuuguacaug

SEQ ID NO: 1871368 - RNA, 19 nt, Human
acaugucuuguacaugugu

SEQ ID NO: 1871369 - RNA, 13 nt, Human
acaugucuuguac

SEQ ID NO: 1871370 - RNA, 14 nt, Human
acaugucuuguaca

SEQ ID NO: 1871371 - RNA, 20 nt, Human
acauggcucuaaaaaguuuu

SEQ ID NO: 1871372 - RNA, 17 nt, Human
acauggccuaugcacau

SEQ ID NO: 1871373 - RNA, 18 nt, Human
acauggccuaugcacaua

SEQ ID NO: 1871374 - RNA, 20 nt, Human
acauggccuaugcacauaug

SEQ ID NO: 1871375 - RNA, 15 nt, Human
ucccacccacaugug

SEQ ID NO: 1871376 - RNA, 16 nt, Human
ucccacccacauguga

SEQ ID NO: 1871377 - RNA, 18 nt, Human
ucccacccacaugugaca

SEQ ID NO: 1871378 - RNA, 22 nt, Human
ucccacccacaugugacacaua

SEQ ID NO: 1871379 - RNA, 19 nt, Human
uccacgcacaugcgacccc

SEQ ID NO: 1871380 - RNA, 14 nt, Human
acgacacacuuuga

SEQ ID NO: 1871381 - RNA, 16 nt, Human
ucauaauaaguugcau

SEQ ID NO: 1871382 - RNA, 22 nt, Human
accugauuaacugaggcaucca

SEQ ID NO: 1871383 - RNA, 17 nt, Human
accugauuaacugaggc

SEQ ID NO: 1871384 - RNA, 22 nt, Human
ucauuuugguaaaauacuucuu

SEQ ID NO: 1871385 - RNA, 14 nt, Human
accuggacacaggc

SEQ ID NO: 1871386 - RNA, 17 nt, Human
accuggacacaggccug

SEQ ID NO: 1871387 - RNA, 22 nt, Human
accuucaguaacccccacugga

SEQ ID NO: 1871388 - RNA, 18 nt, Human
uccccgcuucugccugca

SEQ ID NO: 1871389 - RNA, 17 nt, Human
acucagaagggagcuag

SEQ ID NO: 1871390 - RNA, 16 nt, Human
acacaggccugcucuc

SEQ ID NO: 1871391 - RNA, 21 nt, Human
uacuuugccuuuccauaauca

SEQ ID NO: 1871392 - RNA, 16 nt, Human
uaugggaaucaagauu

SEQ ID NO: 1871393 - RNA, 14 nt, Human
acaggagaccuggc

SEQ ID NO: 1871394 - RNA, 21 nt, Human
aauuauuauuuauauauguau

SEQ ID NO: 1871395 - RNA, 11 nt, Human
aauuauuauuu

SEQ ID NO: 1871396 - RNA, 13 nt, Human
aauuauuauuuau

SEQ ID NO: 1871397 - RNA, 16 nt, Human
aauuauuauuuauaua

SEQ ID NO: 1871398 - RNA, 18 nt, Human
aauuauuauuuauauaug

SEQ ID NO: 1871399 - RNA, 13 nt, Human
aauuauuauucuu

SEQ ID NO: 1871400 - RNA, 21 nt, Human
aauuauuauucuucauaacaa

SEQ ID NO: 1871401 - RNA, 15 nt, Human
uacccgggcagggcu

SEQ ID NO: 1871402 - RNA, 19 nt, Human
aauguuauuuuuuaauuau

SEQ ID NO: 1871403 - RNA, 20 nt, Human
aauguuauuuuuuaauuauu

SEQ ID NO: 1871404 - RNA, 15 nt, Human
aauguuacauuauua

SEQ ID NO: 1871405 - RNA, 16 nt, Human
aauguuacauuauuau

SEQ ID NO: 1871406 - RNA, 17 nt, Human
uacagggguucuggaaa

SEQ ID NO: 1871407 - RNA, 21 nt, Human
aauguuauuuuuuaauuauua

SEQ ID NO: 1871408 - RNA, 15 nt, Human
aauguuguuauuuaa

SEQ ID NO: 1871409 - RNA, 21 nt, Human
uacauuagucauucaauaaau

SEQ ID NO: 1871410 - RNA, 22 nt, Human
uaauuccguagguuauuuucag

SEQ ID NO: 1871411 - RNA, 14 nt, Human
uaauuauuauuuau

SEQ ID NO: 1871412 - RNA, 17 nt, Human
uaauuauuauuuauaua

SEQ ID NO: 1871413 - RNA, 22 nt, Human
uaauuauuauuuauauauguau

SEQ ID NO: 1871414 - RNA, 12 nt, Human
uaauuauuauuc

SEQ ID NO: 1871415 - RNA, 14 nt, Human
uaauuauuauucuu

SEQ ID NO: 1871416 - RNA, 12 nt, Human
uaauuauuauuu

SEQ ID NO: 1871417 - RNA, 13 nt, Human
uaauuauuauuua

SEQ ID NO: 1871418 - RNA, 22 nt, Human
aaugagaagaaaauggaaccag

SEQ ID NO: 1871419 - RNA, 19 nt, Human
aauguaaucaauguuucuu

SEQ ID NO: 1871420 - RNA, 17 nt, Human
aauggaaccaggcuugg

SEQ ID NO: 1871421 - RNA, 16 nt, Human
aauggaaccaggcuug

SEQ ID NO: 1871422 - RNA, 14 nt, Human
aauggaaccaggcu

SEQ ID NO: 1871423 - RNA, 20 nt, Human
aauccucaguuuuugugaaa

SEQ ID NO: 1871424 - RNA, 17 nt, Human
aaucccacccacaugug

SEQ ID NO: 1871425 - RNA, 18 nt, Human
aaucccacccacauguga

SEQ ID NO: 1871426 - RNA, 19 nt, Human
uaaguuuccuuccagccca

SEQ ID NO: 1871427 - RNA, 21 nt, Human
uaaguuuccuuccagcccaga

SEQ ID NO: 1871428 - RNA, 19 nt, Human
aaucagggaggucauuuug

SEQ ID NO: 1871429 - RNA, 18 nt, Human
aaucagggaggucauuuu

SEQ ID NO: 1871430 - RNA, 13 nt, Human
aauaccucugugu

SEQ ID NO: 1871431 - RNA, 14 nt, Human
aauaccucugugug

SEQ ID NO: 1871432 - RNA, 15 nt, Human
aauaccucugugugc

SEQ ID NO: 1871433 - RNA, 16 nt, Human
aauaccucugugugcu

SEQ ID NO: 1871434 - RNA, 16 nt, Human
aauacagggcauuuug

SEQ ID NO: 1871435 - RNA, 20 nt, Human
uaaauuaugggaaucaagau

SEQ ID NO: 1871436 - RNA, 21 nt, Human
uaaauuaugggaaucaagauu

SEQ ID NO: 1871437 - RNA, 12 nt, Human
uaaaugaauguu

SEQ ID NO: 1871438 - RNA, 19 nt, Human
aauauauuuaagauaauua

SEQ ID NO: 1871439 - RNA, 20 nt, Human
aauauauuuaagauaauuau

SEQ ID NO: 1871440 - RNA, 15 nt, Human
aauauauuuaagaua

SEQ ID NO: 1871441 - RNA, 19 nt, Human
aauagucuagacuaaaaga

SEQ ID NO: 1871442 - RNA, 20 nt, Human
aauagucuagacuaaaagau

SEQ ID NO: 1871443 - RNA, 18 nt, Human
aagaugggugaaggcugg

SEQ ID NO: 1871444 - RNA, 18 nt, Human
aagaucucugcagggccg

SEQ ID NO: 1871445 - RNA, 16 nt, Human
guuauuuuuuaauuau

SEQ ID NO: 1871446 - RNA, 21 nt, Human
guuauuuuuuaauuauuauuu

SEQ ID NO: 1871447 - RNA, 15 nt, Human
guuaggauggcagga

SEQ ID NO: 1871448 - RNA, 20 nt, Human
uaaaagacagugaaagaaaa

SEQ ID NO: 1871449 - RNA, 18 nt, Human
uaaaauaucauucagcaa

SEQ ID NO: 1871450 - RNA, 19 nt, Human
uaaaauaucauucagcaac

SEQ ID NO: 1871451 - RNA, 16 nt, Human
aagucuuucacauuua

SEQ ID NO: 1871452 - RNA, 21 nt, Human
aagucuugugacuagugcuga

SEQ ID NO: 1871453 - RNA, 22 nt, Human
aagucuugugacuagugcugaa

SEQ ID NO: 1871454 - RNA, 14 nt, Human
aagucuugugacua

SEQ ID NO: 1871455 - RNA, 19 nt, Human
aagucuugugacuagugcu

SEQ ID NO: 1871456 - RNA, 20 nt, Human
aagucuugugacuagugcug

SEQ ID NO: 1871457 - RNA, 23 nt, Human
aagucuugugacuagugcugaag

SEQ ID NO: 1871458 - RNA, 16 nt, Human
guuuacacucuuugua

SEQ ID NO: 1871459 - RNA, 23 nt, Human
guugcguggacucugcacauguc

SEQ ID NO: 1871460 - RNA, 12 nt, Human
aacaauaaaaga

SEQ ID NO: 1871461 - RNA, 18 nt, Human
gucauaacuaaauaaagc

SEQ ID NO: 1871462 - RNA, 15 nt, Human
aaauuauuaaaggaa

SEQ ID NO: 1871463 - RNA, 14 nt, Human
aaauuauuaaagga

SEQ ID NO: 1871464 - RNA, 16 nt, Human
gucuuucacauuuaaa

SEQ ID NO: 1871465 - RNA, 21 nt, Human
gucuguacacguguccuguag

SEQ ID NO: 1871466 - RNA, 14 nt, Human
gucuguacacgugu

SEQ ID NO: 1871467 - RNA, 19 nt, Human
gucuguacacguguccugu

SEQ ID NO: 1871468 - RNA, 20 nt, Human
gucuguacacguguccugua

SEQ ID NO: 1871469 - RNA, 21 nt, Human
aacccagacggcuccacuagg

SEQ ID NO: 1871470 - RNA, 20 nt, Human
aacccccacuggacugaccu

SEQ ID NO: 1871471 - RNA, 16 nt, Human
aacccccacuggacug

SEQ ID NO: 1871472 - RNA, 12 nt, Human
aacccccacugg

SEQ ID NO: 1871473 - RNA, 16 nt, Human
gugcauguaugucuug

SEQ ID NO: 1871474 - RNA, 23 nt, Human
gugcauguaugucuuggacacug

SEQ ID NO: 1871475 - RNA, 16 nt, Human
gugaugcccugcccuu

SEQ ID NO: 1871476 - RNA, 19 nt, Human
caauagcagacaguguuuu

SEQ ID NO: 1871477 - RNA, 14 nt, Human
caauaaaugucugu

SEQ ID NO: 1871478 - RNA, 15 nt, Human
caauaaaugucuguu

SEQ ID NO: 1871479 - RNA, 16 nt, Human
caauaaaugucuguug

SEQ ID NO: 1871480 - RNA, 18 nt, Human
caaggaaaaaauaacaau

SEQ ID NO: 1871481 - RNA, 20 nt, Human
caaggaaaaaauaacaauga

SEQ ID NO: 1871482 - RNA, 13 nt, Human
caauuccaccugc

SEQ ID NO: 1871483 - RNA, 17 nt, Human
caauguuucuucuaggu

SEQ ID NO: 1871484 - RNA, 20 nt, Human
cacaaaggcaaaggguccag

SEQ ID NO: 1871485 - RNA, 23 nt, Human
caacuuguauuaaagacagaggc

SEQ ID NO: 1871486 - RNA, 15 nt, Human
uguuagucauuugcu

SEQ ID NO: 1871487 - RNA, 15 nt, Human
uguuacuaucugcuu

SEQ ID NO: 1871488 - RNA, 16 nt, Human
uguuacuaucugcuuu

SEQ ID NO: 1871489 - RNA, 17 nt, Human
uguugacaguucauaug

SEQ ID NO: 1871490 - RNA, 19 nt, Human
uuacauuauuaucaacaau

SEQ ID NO: 1871491 - RNA, 14 nt, Human
uuacacucuuugua

SEQ ID NO: 1871492 - RNA, 15 nt, Human
uuacacucuuuguaa

SEQ ID NO: 1871493 - RNA, 16 nt, Human
uuaagauaauuauaau

SEQ ID NO: 1871494 - RNA, 14 nt, Human
uuaagauaauuaua

SEQ ID NO: 1871495 - RNA, 19 nt, Human
ugucauguuguaaacauuu

SEQ ID NO: 1871496 - RNA, 21 nt, Human
uguaguugcguggacucugca

SEQ ID NO: 1871497 - RNA, 15 nt, Human
uguaguugcguggac

SEQ ID NO: 1871498 - RNA, 20 nt, Human
uguaguugcguggacucugc

SEQ ID NO: 1871499 - RNA, 20 nt, Human
uguaaucaauguuucuucua

SEQ ID NO: 1871500 - RNA, 14 nt, Human
uguaaucaauguuu

SEQ ID NO: 1871501 - RNA, 22 nt, Human
uguagccugugcauguaugucu

SEQ ID NO: 1871502 - RNA, 16 nt, Human
uguagccugugcaugu

SEQ ID NO: 1871503 - RNA, 20 nt, Human
uguagccugugcauguaugu

SEQ ID NO: 1871504 - RNA, 13 nt, Human
uguagccugugca

SEQ ID NO: 1871505 - RNA, 14 nt, Human
uguagccugugcau

SEQ ID NO: 1871506 - RNA, 15 nt, Human
uguagccugugcaug

SEQ ID NO: 1871507 - RNA, 15 nt, Human
uguguagccugugca

SEQ ID NO: 1871508 - RNA, 16 nt, Human
uguguagccugugcau

SEQ ID NO: 1871509 - RNA, 23 nt, Human
uguguagccugugcauguauguc

SEQ ID NO: 1871510 - RNA, 15 nt, Human
ugugaucagaccaua

SEQ ID NO: 1871511 - RNA, 13 nt, Human
ugucuguacacgu

SEQ ID NO: 1871512 - RNA, 15 nt, Human
ugucuguacacgugu

SEQ ID NO: 1871513 - RNA, 19 nt, Human
ugucuguacacguguccug

SEQ ID NO: 1871514 - RNA, 20 nt, Human
ugucuguacacguguccugu

SEQ ID NO: 1871515 - RNA, 21 nt, Human
ugucuguacacguguccugua

SEQ ID NO: 1871516 - RNA, 23 nt, Human
ugcuccuccuuggugccuggccu

SEQ ID NO: 1871517 - RNA, 20 nt, Human
ugcugaagcuuauuaaugcu

SEQ ID NO: 1871518 - RNA, 21 nt, Human
ugcugaagcuuauuaaugcua

SEQ ID NO: 1871519 - RNA, 22 nt, Human
ugcugaagcuuauuaaugcuaa

SEQ ID NO: 1871520 - RNA, 23 nt, Human
ugcugaagcuuauuaaugcuaag

SEQ ID NO: 1871521 - RNA, 13 nt, Human
ugcugaagcuuau

SEQ ID NO: 1871522 - RNA, 18 nt, Human
ugcugaagcuuauuaaug

SEQ ID NO: 1871523 - RNA, 19 nt, Human
ugcugaagcuuauuaaugc

SEQ ID NO: 1871524 - RNA, 16 nt, Human
ugccuucuacuuuuaa

SEQ ID NO: 1871525 - RNA, 19 nt, Human
ugccaaauauaaauaaaaa

SEQ ID NO: 1871526 - RNA, 22 nt, Human
ugccaaauauaaauaaaaauaa

SEQ ID NO: 1871527 - RNA, 17 nt, Human
ugccaaauauaaauaaa

SEQ ID NO: 1871528 - RNA, 18 nt, Human
ugccaaauauaaauaaaa

SEQ ID NO: 1871529 - RNA, 23 nt, Human
ugggaccucaguuuuaucauuuu

SEQ ID NO: 1871530 - RNA, 14 nt, Human
ugggaguacaaaag

SEQ ID NO: 1871531 - RNA, 17 nt, Human
uggcucucccauuuccu

SEQ ID NO: 1871532 - RNA, 21 nt, Human
uggcuugaguuuaaauuguaa

SEQ ID NO: 1871533 - RNA, 22 nt, Human
ugguaucuagacccaucuucuu

SEQ ID NO: 1871534 - RNA, 13 nt, Human
uggacucugcaca

SEQ ID NO: 1871535 - RNA, 14 nt, Human
uggacucugcacau

SEQ ID NO: 1871536 - RNA, 17 nt, Human
uggccacgcagccagga

SEQ ID NO: 1871537 - RNA, 19 nt, Human
uggccacgcagccaggaca

SEQ ID NO: 1871538 - RNA, 20 nt, Human
uggccacgcagccaggacac

SEQ ID NO: 1871539 - RNA, 14 nt, Human
uggccacgcagcca

SEQ ID NO: 1871540 - RNA, 15 nt, Human
uggccacgcagccag

SEQ ID NO: 1871541 - RNA, 16 nt, Human
uggccacgcagccagg

SEQ ID NO: 1871542 - RNA, 20 nt, Human
uggcaggacgugggcugggc

SEQ ID NO: 1871543 - RNA, 18 nt, Human
uggaaacauucaggagcu

SEQ ID NO: 1871544 - RNA, 22 nt, Human
uggaauaauccuaaacauauga

SEQ ID NO: 1871545 - RNA, 13 nt, Human
uggaaccaggcuu

SEQ ID NO: 1871546 - RNA, 14 nt, Human
uccuuggugccugg

SEQ ID NO: 1871547 - RNA, 18 nt, Human
uccuuggugccuggccug

SEQ ID NO: 1871548 - RNA, 20 nt, Human
ucuaggccuccuggcccagg

SEQ ID NO: 1871549 - RNA, 23 nt, Human
ucuagguucuaaaaauugugauc

SEQ ID NO: 1871550 - RNA, 14 nt, Human
ucuagguucuaaaa

SEQ ID NO: 1871551 - RNA, 17 nt, Human
uccaagccacugagcaa

SEQ ID NO: 1871552 - RNA, 12 nt, Human
uccacagggcac

SEQ ID NO: 1871553 - RNA, 12 nt, Human
uaucauucagca

SEQ ID NO: 1871554 - RNA, 14 nt, Human
uaucauucagcaac

SEQ ID NO: 1871555 - RNA, 13 nt, Human
uaucauucagcaa

SEQ ID NO: 1871556 - RNA, 20 nt, Human
ucaggaccuccaagccacug

SEQ ID NO: 1871557 - RNA, 18 nt, Human
ucaggaccuccaagccac

SEQ ID NO: 1871558 - RNA, 17 nt, Human
ucuguacacguguccug

SEQ ID NO: 1871559 - RNA, 13 nt, Human
ucuguacacgugu

SEQ ID NO: 1871560 - RNA, 15 nt, Human
ucuggaauguaauca

SEQ ID NO: 1871561 - RNA, 16 nt, Human
ucuggaauguaaucaa

SEQ ID NO: 1871562 - RNA, 18 nt, Human
ucuggaauguaaucaaug

SEQ ID NO: 1871563 - RNA, 22 nt, Human
ucuggaauguaaucaauguuuc

SEQ ID NO: 1871564 - RNA, 23 nt, Human
ucuugugacuagugcugaagcuu

SEQ ID NO: 1871565 - RNA, 18 nt, Human
ucuuugaauacaaagaac

SEQ ID NO: 1871566 - RNA, 20 nt, Human
ucuucauaacaauuuuagga

SEQ ID NO: 1871567 - RNA, 13 nt, Human
ucuuauaauuuaa

SEQ ID NO: 1871568 - RNA, 14 nt, Human
ucuuauaauuuaaa

SEQ ID NO: 1871569 - RNA, 21 nt, Human
ucuucuuuuugaaaucagcau

SEQ ID NO: 1871570 - RNA, 19 nt, Human
ucuugccaaauauaaauaa

SEQ ID NO: 1871571 - RNA, 14 nt, Human
ucuuguacaugugu

SEQ ID NO: 1871572 - RNA, 17 nt, Human
ucuuguacauguguagc

SEQ ID NO: 1871573 - RNA, 19 nt, Human
ucuuguacauguguagccu

SEQ ID NO: 1871574 - RNA, 24 nt, Human
ucuuguacauguguagccugugca

SEQ ID NO: 1871575 - RNA, 13 nt, Human
ugagaccacagag

SEQ ID NO: 1871576 - RNA, 23 nt, Human
ugaaugcagucuguccaggcucg

SEQ ID NO: 1871577 - RNA, 19 nt, Human
ugaauguuuacacucuuug

SEQ ID NO: 1871578 - RNA, 22 nt, Human
ugaaugcagucuguccaggcuc

SEQ ID NO: 1871579 - RNA, 22 nt, Human
ugaauguuuacacucuuuguaa

SEQ ID NO: 1871580 - RNA, 19 nt, Human
ugacaaccaugagaccacu

SEQ ID NO: 1871581 - RNA, 23 nt, Human
uacaguucggugagcuacaaaug

SEQ ID NO: 1871582 - RNA, 19 nt, Human
uacaaagaaccaagaaaaa

SEQ ID NO: 1871583 - RNA, 11 nt, Human
uaauucuaaau

SEQ ID NO: 1871584 - RNA, 18 nt, Human
uaauucuaaaugaauguu

SEQ ID NO: 1871585 - RNA, 16 nt, Human
uacacucuuuguaaga

SEQ ID NO: 1871586 - RNA, 12 nt, Human
uaccucugugug

SEQ ID NO: 1871587 - RNA, 14 nt, Human
uaccucugugugcu

SEQ ID NO: 1871588 - RNA, 15 nt, Human
uagacccaucuucuu

SEQ ID NO: 1871589 - RNA, 12 nt, Human
uagacuaaaaga

SEQ ID NO: 1871590 - RNA, 12 nt, Human
uagguucuaaaa

SEQ ID NO: 1871591 - RNA, 19 nt, Human
uaucaaaacuuucuuuucu

SEQ ID NO: 1871592 - RNA, 22 nt, Human
uaucagucauaacuaaauaaag

SEQ ID NO: 1871593 - RNA, 14 nt, Human
uaauguuguuauuu

SEQ ID NO: 1871594 - RNA, 18 nt, Human
uaauguuguuauuuaaag

SEQ ID NO: 1871595 - RNA, 18 nt, Human
uaacccccacuggacuga

SEQ ID NO: 1871596 - RNA, 12 nt, Human
uaaaugucuguu

SEQ ID NO: 1871597 - RNA, 19 nt, Human
uaacaccugauuaacugag

SEQ ID NO: 1871598 - RNA, 18 nt, Human
uaacaccugauuaacuga

SEQ ID NO: 1871599 - RNA, 14 nt, Human
uaaaguguuugaaa

SEQ ID NO: 1871600 - RNA, 19 nt, Human
uaaagcuugcaacaaaauu

SEQ ID NO: 1871601 - RNA, 13 nt, Human
uaaagcagccagc

SEQ ID NO: 1871602 - RNA, 17 nt, Human
uaaaacaagaaaguuuc

SEQ ID NO: 1871603 - RNA, 22 nt, Human
uaaaacaagcacuaaacaaaga

SEQ ID NO: 1871604 - RNA, 17 nt, Human
uaaaaauugugaucaga

SEQ ID NO: 1871605 - RNA, 20 nt, Human
uaaaacaagaaaguuucccc

SEQ ID NO: 1871606 - RNA, 18 nt, Human
uaaaacaagaaaguuucc

SEQ ID NO: 1871607 - RNA, 19 nt, Human
uaaaacaagaaaguuuccc

SEQ ID NO: 1871608 - RNA, 14 nt, Human
uaaaagauugagaa

SEQ ID NO: 1871609 - RNA, 16 nt, Human
guuucuuuagcaguuu

SEQ ID NO: 1871610 - RNA, 17 nt, Human
guuuccccaccagugaa

SEQ ID NO: 1871611 - RNA, 15 nt, Human
guuuccccaccagug

SEQ ID NO: 1871612 - RNA, 20 nt, Human
guuuccccaccagugaauga

SEQ ID NO: 1871613 - RNA, 19 nt, Human
guucuaaaaauugugauca

SEQ ID NO: 1871614 - RNA, 22 nt, Human
guucaccuugaagaaccucuca

SEQ ID NO: 1871615 - RNA, 14 nt, Human
guuacuaucugcuu

SEQ ID NO: 1871616 - RNA, 17 nt, Human
guuauuauauuuacaaa

SEQ ID NO: 1871617 - RNA, 14 nt, Human
guguagccugugca

SEQ ID NO: 1871618 - RNA, 16 nt, Human
guguuaaucauuucau

SEQ ID NO: 1871619 - RNA, 21 nt, Human
guguccuguaguugcguggac

SEQ ID NO: 1871620 - RNA, 14 nt, Human
gugucugcccccuc

SEQ ID NO: 1871621 - RNA, 20 nt, Human
gugcagaccccuuggccagc

SEQ ID NO: 1871622 - RNA, 14 nt, Human
gugcagccagaggc

SEQ ID NO: 1871623 - RNA, 13 nt, Human
gugcagccagagg

SEQ ID NO: 1871624 - RNA, 12 nt, Human
gugcagccagag

SEQ ID NO: 1871625 - RNA, 17 nt, Human
gugcccucaccacccac

SEQ ID NO: 1871626 - RNA, 21 nt, Human
gugacuagugcugaagcuuau

SEQ ID NO: 1871627 - RNA, 11 nt, Human
gugacuagugc

SEQ ID NO: 1871628 - RNA, 13 nt, Human
gugacuagugcug

SEQ ID NO: 1871629 - RNA, 14 nt, Human
gugacuagugcuga

SEQ ID NO: 1871630 - RNA, 15 nt, Human
gugacuagugcugaa

SEQ ID NO: 1871631 - RNA, 17 nt, Human
gugacuagugcugaagc

SEQ ID NO: 1871632 - RNA, 18 nt, Human
gugacuagugcugaagcu

SEQ ID NO: 1871633 - RNA, 22 nt, Human
gugacuagugcugaagcuuauu

SEQ ID NO: 1871634 - RNA, 20 nt, Human
gugaucagaccauaauguua

SEQ ID NO: 1871635 - RNA, 19 nt, Human
gugaacaagcaaacccaga

SEQ ID NO: 1871636 - RNA, 15 nt, Human
gucuuguacaugugu

SEQ ID NO: 1871637 - RNA, 22 nt, Human
gugaaugaaagucuugugacua

SEQ ID NO: 1871638 - RNA, 14 nt, Human
gucuuggacacugu

SEQ ID NO: 1871639 - RNA, 15 nt, Human
gucuuggacacugua

SEQ ID NO: 1871640 - RNA, 18 nt, Human
gucuuggacacuguacaa

SEQ ID NO: 1871641 - RNA, 18 nt, Human
gucgucaaagcugaaaug

SEQ ID NO: 1871642 - RNA, 19 nt, Human
gucucuucugggcacccuc

SEQ ID NO: 1871643 - RNA, 15 nt, Human
gucauucaauaaauu

SEQ ID NO: 1871644 - RNA, 13 nt, Human
guccacagggcac

SEQ ID NO: 1871645 - RNA, 20 nt, Human
guaucuagacccaucuucuu

SEQ ID NO: 1871646 - RNA, 13 nt, Human
guauuaaagacag

SEQ ID NO: 1871647 - RNA, 18 nt, Human
uuugaaucaucaagucuu

SEQ ID NO: 1871648 - RNA, 21 nt, Human
uuuugguccaaguugugcuua

SEQ ID NO: 1871649 - RNA, 11 nt, Human
uuuuaauuauu

SEQ ID NO: 1871650 - RNA, 16 nt, Human
uuuuaauuauuauucu

SEQ ID NO: 1871651 - RNA, 17 nt, Human
uuuuaauuauuauucuu

SEQ ID NO: 1871652 - RNA, 20 nt, Human
uuuuaauuauuauuuauaua

SEQ ID NO: 1871653 - RNA, 23 nt, Human
uuuuaauuauuauuuauauaugu

SEQ ID NO: 1871654 - RNA, 23 nt, Human
gccaucugguuaggauggcagga

SEQ ID NO: 1871655 - RNA, 13 nt, Human
gccagaggcaccu

SEQ ID NO: 1871656 - RNA, 21 nt, Human
gccagagagccuggugcugcu

SEQ ID NO: 1871657 - RNA, 20 nt, Human
gccaggacaccgggcagggc

SEQ ID NO: 1871658 - RNA, 15 nt, Human
gccaggacaccgggc

SEQ ID NO: 1871659 - RNA, 10 nt, Human
gcccaggccu

SEQ ID NO: 1871660 - RNA, 23 nt, Human
gcccccacaauggucccaaacag

SEQ ID NO: 1871661 - RNA, 13 nt, Human
gcccgggcccaga

SEQ ID NO: 1871662 - RNA, 14 nt, Human
gcccgggcccagag

SEQ ID NO: 1871663 - RNA, 15 nt, Human
gcccgggcccagagg

SEQ ID NO: 1871664 - RNA, 13 nt, Human
gccuggugcugcu

SEQ ID NO: 1871665 - RNA, 18 nt, Human
gcgacacugggaggccag

SEQ ID NO: 1871666 - RNA, 20 nt, Human
gccgcaccuaaagcagccag

SEQ ID NO: 1871667 - RNA, 21 nt, Human
gccgcaccuaaagcagccagc

SEQ ID NO: 1871668 - RNA, 14 nt, Human
gccuaugcacauau

SEQ ID NO: 1871669 - RNA, 23 nt, Human
gccuaugcacauauggacucugc

SEQ ID NO: 1871670 - RNA, 20 nt, Human
gccuaugcacauauggacuc

SEQ ID NO: 1871671 - RNA, 22 nt, Human
gccuaugcacauauggacucug

SEQ ID NO: 1871672 - RNA, 18 nt, Human
gccguguguugcaugcag

SEQ ID NO: 1871673 - RNA, 16 nt, Human
gccgucaccccugccu

SEQ ID NO: 1871674 - RNA, 13 nt, Human
gccuccgagggac

SEQ ID NO: 1871675 - RNA, 21 nt, Human
gccuccgagggacgcggcucc

SEQ ID NO: 1871676 - RNA, 16 nt, Human
gccucugccacugacu

SEQ ID NO: 1871677 - RNA, 22 nt, Human
gcaaaggguccagaaggagaca

SEQ ID NO: 1871678 - RNA, 18 nt, Human
gcaaaggguccagaagga

SEQ ID NO: 1871679 - RNA, 19 nt, Human
gauuugguguacaauucag

SEQ ID NO: 1871680 - RNA, 22 nt, Human
gauugcaauuugcacaaguuuu

SEQ ID NO: 1871681 - RNA, 14 nt, Human
gauugcaauuugca

SEQ ID NO: 1871682 - RNA, 21 nt, Human
gauugcaauuugcacaaguuu

SEQ ID NO: 1871683 - RNA, 23 nt, Human
gauagauaggucagugcaaauac

SEQ ID NO: 1871684 - RNA, 13 nt, Human
gaucaaugaaaug

SEQ ID NO: 1871685 - RNA, 23 nt, Human
gaucaagucggaucuaguccagc

SEQ ID NO: 1871686 - RNA, 14 nt, Human
gauaguagcuuccu

SEQ ID NO: 1871687 - RNA, 17 nt, Human
gcauuuuuuaaaacaag

SEQ ID NO: 1871688 - RNA, 18 nt, Human
gcauuuuuuaaaacaaga

SEQ ID NO: 1871689 - RNA, 15 nt, Human
gcauuuuuuaaaaca

SEQ ID NO: 1871690 - RNA, 16 nt, Human
gcauuuuuuaaaacaa

SEQ ID NO: 1871691 - RNA, 23 nt, Human
gcaugauccaagcaagacugagg

SEQ ID NO: 1871692 - RNA, 22 nt, Human
gcaugauccaagcaagacugag

SEQ ID NO: 1871693 - RNA, 19 nt, Human
gcaugauccaagcaagacu

SEQ ID NO: 1871694 - RNA, 18 nt, Human
gcaugauccaagcaagac

SEQ ID NO: 1871695 - RNA, 20 nt, Human
gcaucuuugaauacaaagaa

SEQ ID NO: 1871696 - RNA, 13 nt, Human
gcauagaaguaaa

SEQ ID NO: 1871697 - RNA, 17 nt, Human
gcauagguuuaauaauu

SEQ ID NO: 1871698 - RNA, 20 nt, Human
gcauaguaccaaucauuuua

SEQ ID NO: 1871699 - RNA, 23 nt, Human
gcagggccgccagggagaccugg

SEQ ID NO: 1871700 - RNA, 21 nt, Human
gcagggccgcccgggcccaga

SEQ ID NO: 1871701 - RNA, 22 nt, Human
gcagggccgcccgggcccagag

SEQ ID NO: 1871702 - RNA, 15 nt, Human
gcagggccgccaggg

SEQ ID NO: 1871703 - RNA, 23 nt, Human
gcagggccgcccgggcccagagg

SEQ ID NO: 1871704 - RNA, 20 nt, Human
gcaggugaaacccagucacu

SEQ ID NO: 1871705 - RNA, 17 nt, Human
gcaggugaaacccaguc

SEQ ID NO: 1871706 - RNA, 16 nt, Human
gcaggugaaacccagu

SEQ ID NO: 1871707 - RNA, 21 nt, Human
gcacggaccaugcgacacugg

SEQ ID NO: 1871708 - RNA, 22 nt, Human
gcaccuugugucuguacacgug

SEQ ID NO: 1871709 - RNA, 15 nt, Human
gcacgaaauguuauu

SEQ ID NO: 1871710 - RNA, 21 nt, Human
gcacccaagaccucagggcac

SEQ ID NO: 1871711 - RNA, 17 nt, Human
gcacccaagaccucagg

SEQ ID NO: 1871712 - RNA, 18 nt, Human
gcagaccccuuggccagc

SEQ ID NO: 1871713 - RNA, 18 nt, Human
gaccuggacacaggccug

SEQ ID NO: 1871714 - RNA, 22 nt, Human
gacgccacagcccagccacgga

SEQ ID NO: 1871715 - RNA, 14 nt, Human
gacgccacagccca

SEQ ID NO: 1871716 - RNA, 15 nt, Human
gacgccacagcccag

SEQ ID NO: 1871717 - RNA, 23 nt, Human
gaccugauuucugagcauuuaau

SEQ ID NO: 1871718 - RNA, 22 nt, Human
gaccccgacgccacagcccagc

SEQ ID NO: 1871719 - RNA, 14 nt, Human
gacaggcagagcug

SEQ ID NO: 1871720 - RNA, 18 nt, Human
gacaggagaccuggcacu

SEQ ID NO: 1871721 - RNA, 21 nt, Human
gacaggagaccuggcacugga

SEQ ID NO: 1871722 - RNA, 12 nt, Human
gacacaggccug

SEQ ID NO: 1871723 - RNA, 22 nt, Human
gacacauaugcaccuugugucu

SEQ ID NO: 1871724 - RNA, 17 nt, Human
gagauacagaauuuuau

SEQ ID NO: 1871725 - RNA, 13 nt, Human
gagagccuggugc

SEQ ID NO: 1871726 - RNA, 17 nt, Human
gagagccuggugcugcu

SEQ ID NO: 1871727 - RNA, 19 nt, Human
gagagccuggugcugcugc

SEQ ID NO: 1871728 - RNA, 18 nt, Human
gagacaaggagggcacag

SEQ ID NO: 1871729 - RNA, 20 nt, Human
gagcucccaggugcagccag

SEQ ID NO: 1871730 - RNA, 16 nt, Human
gagcucccaggugcag

SEQ ID NO: 1871731 - RNA, 22 nt, Human
gagcucccaggugcagccagag

SEQ ID NO: 1871732 - RNA, 21 nt, Human
gagcucccaggugcagccaga

SEQ ID NO: 1871733 - RNA, 18 nt, Human
gagcuagccagaggacug

SEQ ID NO: 1871734 - RNA, 15 nt, Human
gagcuagccagagga

SEQ ID NO: 1871735 - RNA, 14 nt, Human
gagcuagccagagg

SEQ ID NO: 1871736 - RNA, 13 nt, Human
gagcuagccagag

SEQ ID NO: 1871737 - RNA, 12 nt, Human
gagcuagccaga

SEQ ID NO: 1871738 - RNA, 14 nt, Human
gagccgggccgcag

SEQ ID NO: 1871739 - RNA, 15 nt, Human
gagccgggccgcaga

SEQ ID NO: 1871740 - RNA, 11 nt, Human
gaaaguuuccc

SEQ ID NO: 1871741 - RNA, 23 nt, Human
gaaaguuuccccaccagugaaug

SEQ ID NO: 1871742 - RNA, 22 nt, Human
gaaaguuuggggacaugugauu

SEQ ID NO: 1871743 - RNA, 20 nt, Human
gaaaguuuccccaccaguga

SEQ ID NO: 1871744 - RNA, 19 nt, Human
gaaagucuugugacuagug

SEQ ID NO: 1871745 - RNA, 20 nt, Human
gaaagucuugugacuagugc

SEQ ID NO: 1871746 - RNA, 21 nt, Human
gaaagucuugugacuagugcu

SEQ ID NO: 1871747 - RNA, 22 nt, Human
gaaagucuugugacuagugcug

SEQ ID NO: 1871748 - RNA, 15 nt, Human
gaaccaacacuaaca

SEQ ID NO: 1871749 - RNA, 14 nt, Human
gaagcuuauuaaug

SEQ ID NO: 1871750 - RNA, 15 nt, Human
gaagcuuauuaaugc

SEQ ID NO: 1871751 - RNA, 16 nt, Human
gaagcuuauuaaugcu

SEQ ID NO: 1871752 - RNA, 17 nt, Human
gaagcuuauuaaugcua

SEQ ID NO: 1871753 - RNA, 19 nt, Human
gaagcuuauuaaugcuaag

SEQ ID NO: 1871754 - RNA, 20 nt, Human
gaagcuuauuaaugcuaagg

SEQ ID NO: 1871755 - RNA, 21 nt, Human
gaagcuuauuaaugcuaaggg

SEQ ID NO: 1871756 - RNA, 23 nt, Human
gaagcuuauuaaugcuaagggca

SEQ ID NO: 1871757 - RNA, 17 nt, Human
gaagccuuaccacgcag

SEQ ID NO: 1871758 - RNA, 18 nt, Human
gaagccuuaccacgcagu

SEQ ID NO: 1871759 - RNA, 22 nt, Human
gaagcuuauuaaugcuaagggc

SEQ ID NO: 1871760 - RNA, 22 nt, Human
gaagaucucugcagggccgcca

SEQ ID NO: 1871761 - RNA, 19 nt, Human
gaagaucucugcagggccg

SEQ ID NO: 1871762 - RNA, 22 nt, Human
gaacuuguaaaggaauuuaaaa

SEQ ID NO: 1871763 - RNA, 22 nt, Human
gaagaacaucuuuaugguaaag

SEQ ID NO: 1871764 - RNA, 17 nt, Human
cuugccaaauauaaaua

SEQ ID NO: 1871765 - RNA, 18 nt, Human
cuuguaaaggaauuuaaa

SEQ ID NO: 1871766 - RNA, 17 nt, Human
cuuguauuaaagacaga

SEQ ID NO: 1871767 - RNA, 13 nt, Human
cuugagccaguaa

SEQ ID NO: 1871768 - RNA, 16 nt, Human
cuugagccaguaauug

SEQ ID NO: 1871769 - RNA, 12 nt, Human
cuuuucacaaau

SEQ ID NO: 1871770 - RNA, 13 nt, Human
cuuuucacaaaua

SEQ ID NO: 1871771 - RNA, 14 nt, Human
cuuuucacaaauaa

SEQ ID NO: 1871772 - RNA, 15 nt, Human
cuuuucacaaauaaa

SEQ ID NO: 1871773 - RNA, 16 nt, Human
cuuucauuuacugugg

SEQ ID NO: 1871774 - RNA, 17 nt, Human
cuuucauuuacuguggc

SEQ ID NO: 1871775 - RNA, 12 nt, Human
cuugugucugua

SEQ ID NO: 1871776 - RNA, 14 nt, Human
cuugugucuguaca

SEQ ID NO: 1871777 - RNA, 15 nt, Human
cuugugucuguacac

SEQ ID NO: 1871778 - RNA, 18 nt, Human
cuugugucuguacacgug

SEQ ID NO: 1871779 - RNA, 22 nt, Human
cuuucaauaaacuaaagaaaaa

SEQ ID NO: 1871780 - RNA, 18 nt, Human
cuuucaauaaacuaaaga

SEQ ID NO: 1871781 - RNA, 22 nt, Human
cuuucuuuucuggaauguaauc

SEQ ID NO: 1871782 - RNA, 19 nt, Human
cugcaguuugagacaggag

SEQ ID NO: 1871783 - RNA, 21 nt, Human
cugcaguuugagacaggagac

SEQ ID NO: 1871784 - RNA, 17 nt, Human
cugcauacccgggcagg

SEQ ID NO: 1871785 - RNA, 17 nt, Human
cugccacccugggccug

SEQ ID NO: 1871786 - RNA, 16 nt, Human
cugccacccugggccu

SEQ ID NO: 1871787 - RNA, 23 nt, Human
cugccacccugggccuggcagcu

SEQ ID NO: 1871788 - RNA, 14 nt, Human
cugcugcugcugug

SEQ ID NO: 1871789 - RNA, 15 nt, Human
cugccugcaccccug

SEQ ID NO: 1871790 - RNA, 22 nt, Human
cugguccacagggcaccugcca

SEQ ID NO: 1871791 - RNA, 16 nt, Human
cugguccacagggcac

SEQ ID NO: 1871792 - RNA, 13 nt, Human
cugguccacaggg

SEQ ID NO: 1871793 - RNA, 15 nt, Human
cuggcgccuccgagg

SEQ ID NO: 1871794 - RNA, 19 nt, Human
cugggagccgggccgcaga

SEQ ID NO: 1871795 - RNA, 18 nt, Human
cuggcaugauccaagcaa

SEQ ID NO: 1871796 - RNA, 17 nt, Human
cuggcaugauccaagca

SEQ ID NO: 1871797 - RNA, 14 nt, Human
cuggccacgcagcc

SEQ ID NO: 1871798 - RNA, 15 nt, Human
cuggccacgcagcca

SEQ ID NO: 1871799 - RNA, 18 nt, Human
cuggccacgcagccagga

SEQ ID NO: 1871800 - RNA, 20 nt, Human
cuggccacgcagccaggaca

SEQ ID NO: 1871801 - RNA, 21 nt, Human
cuggccacgcagccaggacac

SEQ ID NO: 1871802 - RNA, 22 nt, Human
cucuuuauauggccucaagauc

SEQ ID NO: 1871803 - RNA, 15 nt, Human
cugagccuuguaauu

SEQ ID NO: 1871804 - RNA, 16 nt, Human
cugagccuuguaauuc

SEQ ID NO: 1871805 - RNA, 21 nt, Human
cugagccuuguaauucuaaau

SEQ ID NO: 1871806 - RNA, 20 nt, Human
cugacuuggggagauggagu

SEQ ID NO: 1871807 - RNA, 21 nt, Human
cugacuuggggagauggaguu

SEQ ID NO: 1871808 - RNA, 22 nt, Human
cugacuuggggagauggaguuc

SEQ ID NO: 1871809 - RNA, 16 nt, Human
cuccccaaagggugug

SEQ ID NO: 1871810 - RNA, 18 nt, Human
cucccaggugcagccaga

SEQ ID NO: 1871811 - RNA, 23 nt, Human
cucccaggugcagccagaggcac

SEQ ID NO: 1871812 - RNA, 17 nt, Human
cucccaggugcagccag

SEQ ID NO: 1871813 - RNA, 19 nt, Human
cuccuccuuggugccuggc

SEQ ID NO: 1871814 - RNA, 19 nt, Human
cucuacccauauuacagau

SEQ ID NO: 1871815 - RNA, 16 nt, Human
cucuacccauauuaca

SEQ ID NO: 1871816 - RNA, 14 nt, Human
cucuccagccugac

SEQ ID NO: 1871817 - RNA, 17 nt, Human
cggugagcuacaaaugc

SEQ ID NO: 1871818 - RNA, 15 nt, Human
cgguagcugugcgug

SEQ ID NO: 1871819 - RNA, 19 nt, Human
cgcggcucccggggcaggg

SEQ ID NO: 1871820 - RNA, 22 nt, Human
cgcggcucccggggcagggcag

SEQ ID NO: 1871821 - RNA, 13 nt, Human
cgcccccuuggcu

SEQ ID NO: 1871822 - RNA, 15 nt, Human
cuaaaugaauguuua

SEQ ID NO: 1871823 - RNA, 16 nt, Human
cuaaaugaauguuuac

SEQ ID NO: 1871824 - RNA, 17 nt, Human
cuaaauccuuuacuguu

SEQ ID NO: 1871825 - RNA, 21 nt, Human
cuaaauccuuuacuguuaguc

SEQ ID NO: 1871826 - RNA, 22 nt, Human
cgugggcugggcccacaaaggc

SEQ ID NO: 1871827 - RNA, 13 nt, Human
cguggacucugca

SEQ ID NO: 1871828 - RNA, 16 nt, Human
cguggacucugcacau

SEQ ID NO: 1871829 - RNA, 13 nt, Human
cucacauuuauau

SEQ ID NO: 1871830 - RNA, 16 nt, Human
cucaagaugaaggcaa

SEQ ID NO: 1871831 - RNA, 17 nt, Human
cucaagaucaaugaaau

SEQ ID NO: 1871832 - RNA, 18 nt, Human
cucaagaucaaugaaaug

SEQ ID NO: 1871833 - RNA, 22 nt, Human
cuagugcugaagcuuauuaaug

SEQ ID NO: 1871834 - RNA, 16 nt, Human
cuagugcugaagcuua

SEQ ID NO: 1871835 - RNA, 17 nt, Human
cuagugcugaagcuuau

SEQ ID NO: 1871836 - RNA, 20 nt, Human
cuagugcugaagcuuauuaa

SEQ ID NO: 1871837 - RNA, 21 nt, Human
cuagugcugaagcuuauuaau

SEQ ID NO: 1871838 - RNA, 12 nt, Human
cuagugcugaag

SEQ ID NO: 1871839 - RNA, 13 nt, Human
cuagugcugaagc

SEQ ID NO: 1871840 - RNA, 14 nt, Human
cuagugcugaagcu

SEQ ID NO: 1871841 - RNA, 15 nt, Human
cuagugcugaagcuu

SEQ ID NO: 1871842 - RNA, 22 nt, Human
cuaguacuugggagaccuguaa

SEQ ID NO: 1871843 - RNA, 23 nt, Human
cuaggaagaucucugcagggccg

SEQ ID NO: 1871844 - RNA, 17 nt, Human
cuaggacuucaaauugg

SEQ ID NO: 1871845 - RNA, 13 nt, Human
cuaggauuucaug

SEQ ID NO: 1871846 - RNA, 17 nt, Human
cuacaagcuaaaauuag

SEQ ID NO: 1871847 - RNA, 19 nt, Human
cuacaagcuaaaauuagau

SEQ ID NO: 1871848 - RNA, 21 nt, Human
cuagacuaaaagauugagaag

SEQ ID NO: 1871849 - RNA, 13 nt, Human
ccuaaacauauga

SEQ ID NO: 1871850 - RNA, 14 nt, Human
ccggggcagggcag

SEQ ID NO: 1871851 - RNA, 16 nt, Human
ccggggcagggcagcc

SEQ ID NO: 1871852 - RNA, 15 nt, Human
ccucaccacccacuu

SEQ ID NO: 1871853 - RNA, 19 nt, Human
ccucaguuuuaucauuuuc

SEQ ID NO: 1871854 - RNA, 15 nt, Human
ccuccuuggugccug

SEQ ID NO: 1871855 - RNA, 17 nt, Human
ccuccuuggugccuggc

SEQ ID NO: 1871856 - RNA, 16 nt, Human
ccccagccuggccacg

SEQ ID NO: 1871857 - RNA, 21 nt, Human
ccccagccuggccacgcagcc

SEQ ID NO: 1871858 - RNA, 23 nt, Human
ccccagccuggccacgcagccag

SEQ ID NO: 1871859 - RNA, 22 nt, Human
ccccagccuggccacgcagcca

SEQ ID NO: 1871860 - RNA, 12 nt, Human
cccuggagccca

SEQ ID NO: 1871861 - RNA, 22 nt, Human
ccaugcgacacugggaggccag

SEQ ID NO: 1871862 - RNA, 21 nt, Human
ccaugcgacacugggaggcca

SEQ ID NO: 1871863 - RNA, 16 nt, Human
ccaugcgacacuggga

SEQ ID NO: 1871864 - RNA, 21 nt, Human
cccagacggcuccacuaggac

SEQ ID NO: 1871865 - RNA, 20 nt, Human
cccagaggagcugggagccg

SEQ ID NO: 1871866 - RNA, 22 nt, Human
cccagaggagcugggagccggg

SEQ ID NO: 1871867 - RNA, 17 nt, Human
ccagggagaccuggaca

SEQ ID NO: 1871868 - RNA, 16 nt, Human
ccagggagaccuggac

SEQ ID NO: 1871869 - RNA, 18 nt, Human
ccagggagaccuggacac

SEQ ID NO: 1871870 - RNA, 19 nt, Human
ccagccuggccacgcagcc

SEQ ID NO: 1871871 - RNA, 23 nt, Human
ccagccuggccacgcagccagga

SEQ ID NO: 1871872 - RNA, 16 nt, Human
ccagccuggccacgca

SEQ ID NO: 1871873 - RNA, 17 nt, Human
ccaagaccucagggcac

SEQ ID NO: 1871874 - RNA, 16 nt, Human
ccacaaaggcaaaggg

SEQ ID NO: 1871875 - RNA, 20 nt, Human
ccacaaaggcaaagggucca

SEQ ID NO: 1871876 - RNA, 19 nt, Human
ccacaacaugaaaacucca

SEQ ID NO: 1871877 - RNA, 17 nt, Human
cauuuuaauuauuauuc

SEQ ID NO: 1871878 - RNA, 16 nt, Human
caugugacacauaugc

SEQ ID NO: 1871879 - RNA, 14 nt, Human
caugugacacauau

SEQ ID NO: 1871880 - RNA, 15 nt, Human
caugugacacauaug

SEQ ID NO: 1871881 - RNA, 12 nt, Human
caugugacacau

SEQ ID NO: 1871882 - RNA, 13 nt, Human
caugugacacaua

SEQ ID NO: 1871883 - RNA, 23 nt, Human
caugucuuguacauguguagccu

SEQ ID NO: 1871884 - RNA, 15 nt, Human
cauguacaugaagaa

SEQ ID NO: 1871885 - RNA, 22 nt, Human
caugcgacacugggaggccagu

SEQ ID NO: 1871886 - RNA, 22 nt, Human
caguucggugagcuacaaaugc

SEQ ID NO: 1871887 - RNA, 15 nt, Human
caguguuuucuggga

SEQ ID NO: 1871888 - RNA, 22 nt, Human
caguguuuucugggauaaguaa

SEQ ID NO: 1871889 - RNA, 17 nt, Human
caguuggccagagagcc

SEQ ID NO: 1871890 - RNA, 16 nt, Human
caguuggccagagagc

SEQ ID NO: 1871891 - RNA, 16 nt, Human
caguuuuuuaugcuaa

SEQ ID NO: 1871892 - RNA, 19 nt, Human
cauaagaaaacuaagaaau

SEQ ID NO: 1871893 - RNA, 12 nt, Human
cauaaguuucug

SEQ ID NO: 1871894 - RNA, 19 nt, Human
cauacucaauguuacuauc

SEQ ID NO: 1871895 - RNA, 15 nt, Human
cauauaauguuguua

SEQ ID NO: 1871896 - RNA, 17 nt, Human
cauauaauguuguuauu

SEQ ID NO: 1871897 - RNA, 18 nt, Human
cauauaauguuguuauuu

SEQ ID NO: 1871898 - RNA, 22 nt, Human
caucaagucuuucacauuuaaa

SEQ ID NO: 1871899 - RNA, 16 nt, Human
cauaugcaccuugugu

SEQ ID NO: 1871900 - RNA, 17 nt, Human
cauaugcaccuuguguc

SEQ ID NO: 1871901 - RNA, 18 nt, Human
cauaugcaccuugugucu

SEQ ID NO: 1871902 - RNA, 19 nt, Human
cauaugcaccuugugucug

SEQ ID NO: 1871903 - RNA, 20 nt, Human
cauaugcaccuugugucugu

SEQ ID NO: 1871904 - RNA, 21 nt, Human
cauaugcaccuugugucugua

SEQ ID NO: 1871905 - RNA, 23 nt, Human
cauaugcaccuugugucuguaca

SEQ ID NO: 1871906 - RNA, 18 nt, Human
aggagacaggcagagcug

SEQ ID NO: 1871907 - RNA, 13 nt, Human
aggagacaggcag

SEQ ID NO: 1871908 - RNA, 21 nt, Human
aggagaccuggcacuggaugc

SEQ ID NO: 1871909 - RNA, 21 nt, Human
aggagugccguguguugcaug

SEQ ID NO: 1871910 - RNA, 22 nt, Human
aggauggcaggacgugggcugg

SEQ ID NO: 1871911 - RNA, 15 nt, Human
aggauggcaggacgu

SEQ ID NO: 1871912 - RNA, 12 nt, Human
agcuacaaaugc

SEQ ID NO: 1871913 - RNA, 13 nt, Human
agcuacaaaugca

SEQ ID NO: 1871914 - RNA, 13 nt, Human
agcuaaauccuuu

SEQ ID NO: 1871915 - RNA, 11 nt, Human
agccuggcucc

SEQ ID NO: 1871916 - RNA, 16 nt, Human
agccuggccacgcagc

SEQ ID NO: 1871917 - RNA, 20 nt, Human
agccuggccacgcagccagg

SEQ ID NO: 1871918 - RNA, 21 nt, Human
agccuggccacgcagccagga

SEQ ID NO: 1871919 - RNA, 22 nt, Human
agccuggccacgcagccaggac

SEQ ID NO: 1871920 - RNA, 23 nt, Human
agccuggccacgcagccaggaca

SEQ ID NO: 1871921 - RNA, 18 nt, Human
aggaaaaaauaacaauga

SEQ ID NO: 1871922 - RNA, 19 nt, Human
agacaaggaaaaaauaaca

SEQ ID NO: 1871923 - RNA, 13 nt, Human
agaaucucuuucg

SEQ ID NO: 1871924 - RNA, 18 nt, Human
agaagggagcuagccaga

SEQ ID NO: 1871925 - RNA, 19 nt, Human
agaagggagcuagccagag

SEQ ID NO: 1871926 - RNA, 20 nt, Human
agauagauaggucagugcaa

SEQ ID NO: 1871927 - RNA, 21 nt, Human
agaugggugaaggcuggcaug

SEQ ID NO: 1871928 - RNA, 17 nt, Human
agaugggugaaggcugg

SEQ ID NO: 1871929 - RNA, 16 nt, Human
agaucucugcagggcc

SEQ ID NO: 1871930 - RNA, 17 nt, Human
agaucucugcagggccg

SEQ ID NO: 1871931 - RNA, 15 nt, Human
aguguuuucugggau

SEQ ID NO: 1871932 - RNA, 13 nt, Human
aguguuuucuggg

SEQ ID NO: 1871933 - RNA, 18 nt, Human
aguucauauguaccaugu

SEQ ID NO: 1871934 - RNA, 22 nt, Human
aguucauauguaccauguacau

SEQ ID NO: 1871935 - RNA, 16 nt, Human
auaaaagacagugaaa

SEQ ID NO: 1871936 - RNA, 15 nt, Human
auaaaagacagugaa

SEQ ID NO: 1871937 - RNA, 17 nt, Human
aguuucugggaccucag

SEQ ID NO: 1871938 - RNA, 13 nt, Human
auaaguaaguuug

SEQ ID NO: 1871939 - RNA, 20 nt, Human
aguaacccccacuggacuga

SEQ ID NO: 1871940 - RNA, 15 nt, Human
agucuguccaggcuc

SEQ ID NO: 1871941 - RNA, 19 nt, Human
agucauuugcugagcaugu

SEQ ID NO: 1871942 - RNA, 22 nt, Human
agucauuugcugagcauguacu

SEQ ID NO: 1871943 - RNA, 15 nt, Human
auggaguucuugugc

SEQ ID NO: 1871944 - RNA, 22 nt, Human
auccacuucuuucagcagacug

SEQ ID NO: 1871945 - RNA, 14 nt, Human
auccacuucuuuca

SEQ ID NO: 1871946 - RNA, 14 nt, Human
aucauccagaaguu

SEQ ID NO: 1871947 - RNA, 15 nt, Human
aucaaaacuuucuuu

SEQ ID NO: 1871948 - RNA, 21 nt, Human
aucaaaacuuucuuuucugga

SEQ ID NO: 1871949 - RNA, 21 nt, Human
acaagguaccccuuucuggcu

SEQ ID NO: 1871950 - RNA, 12 nt, Human
acacguguccug

SEQ ID NO: 1871951 - RNA, 15 nt, Human
acacgcaggagcaca

SEQ ID NO: 1871952 - RNA, 14 nt, Human
acacgcaggagcac

SEQ ID NO: 1871953 - RNA, 13 nt, Human
acacgcaggagca

SEQ ID NO: 1871954 - RNA, 11 nt, Human
aauuguaauag

SEQ ID NO: 1871955 - RNA, 15 nt, Human
aauuaucaagcuaau

SEQ ID NO: 1871956 - RNA, 16 nt, Human
aauuaucaagcuaaua

SEQ ID NO: 1871957 - RNA, 19 nt, Human
aauuaucaagcuaauaaaa

SEQ ID NO: 1871958 - RNA, 19 nt, Human
aauucuaaaugaauguuua

SEQ ID NO: 1871959 - RNA, 13 nt, Human
aauucuaaaugaa

SEQ ID NO: 1871960 - RNA, 20 nt, Human
acauguguagccugugcaug

SEQ ID NO: 1871961 - RNA, 17 nt, Human
acauguguagccugugc

SEQ ID NO: 1871962 - RNA, 18 nt, Human
acauguguagccugugca

SEQ ID NO: 1871963 - RNA, 14 nt, Human
acaugcgaccccga

SEQ ID NO: 1871964 - RNA, 13 nt, Human
acaggcagagcug

SEQ ID NO: 1871965 - RNA, 15 nt, Human
acgcacaugcgaccc

SEQ ID NO: 1871966 - RNA, 15 nt, Human
accucugugugcucc

SEQ ID NO: 1871967 - RNA, 11 nt, Human
accucugugug

SEQ ID NO: 1871968 - RNA, 12 nt, Human
accucugugugc

SEQ ID NO: 1871969 - RNA, 11 nt, Human
accuguaauca

SEQ ID NO: 1871970 - RNA, 22 nt, Human
acccugggccuggcagcucagc

SEQ ID NO: 1871971 - RNA, 15 nt, Human
acccugggccuggca

SEQ ID NO: 1871972 - RNA, 13 nt, Human
acccuggagccca

SEQ ID NO: 1871973 - RNA, 23 nt, Human
acccuauauuuugcauaguacca

SEQ ID NO: 1871974 - RNA, 17 nt, Human
accuccaagccacugag

SEQ ID NO: 1871975 - RNA, 17 nt, Human
acuguaaaauaauaacu

SEQ ID NO: 1871976 - RNA, 17 nt, Human
acucuacccauauuaca

SEQ ID NO: 1871977 - RNA, 19 nt, Human
acucuacccauauuacaga

SEQ ID NO: 1871978 - RNA, 18 nt, Human
acugaucaggaccuccaa

SEQ ID NO: 1871979 - RNA, 21 nt, Human
aagacaaggaaaaaauaacaa

SEQ ID NO: 1871980 - RNA, 12 nt, Human
aagauaauuaua

SEQ ID NO: 1871981 - RNA, 16 nt, Human
aagccagggugugucu

SEQ ID NO: 1871982 - RNA, 18 nt, Human
aagcgaucacuuccuaua

SEQ ID NO: 1871983 - RNA, 20 nt, Human
aaugaauacuuuauaaagga

SEQ ID NO: 1871984 - RNA, 21 nt, Human
aaauguuauuuuuuaauuauu

SEQ ID NO: 1871985 - RNA, 20 nt, Human
aaauguuauuuuuuaauuau

SEQ ID NO: 1871986 - RNA, 20 nt, Human
aaaagacaaggaaaaaauaa

SEQ ID NO: 1871987 - RNA, 14 nt, Human
cuccuggcccaggu

SEQ ID NO: 1871988 - RNA, 12 nt, Human
cuccuggcccag

SEQ ID NO: 1871989 - RNA, 11 nt, Human
cucccaggaca

SEQ ID NO: 1871990 - RNA, 12 nt, Human
cucccaggacac

SEQ ID NO: 1871991 - RNA, 19 nt, Human
cucugcagggccgccaggg

SEQ ID NO: 1871992 - RNA, 13 nt, Human
cucugcagggccg

SEQ ID NO: 1871993 - RNA, 13 nt, Human
cucugcacauguc

SEQ ID NO: 1871994 - RNA, 14 nt, Human
cucugcacaugucu

SEQ ID NO: 1871995 - RNA, 19 nt, Human
cucaauguuacuaucugcu

SEQ ID NO: 1871996 - RNA, 13 nt, Human
cuaauaaaauauc

SEQ ID NO: 1871997 - RNA, 14 nt, Human
cuaauaaaauauca

SEQ ID NO: 1871998 - RNA, 15 nt, Human
cuaauaaaauaucau

SEQ ID NO: 1871999 - RNA, 16 nt, Human
cuaauaaaauaucauu

SEQ ID NO: 1872000 - RNA, 17 nt, Human
cuaauaaaauaucauuc

SEQ ID NO: 1872001 - RNA, 18 nt, Human
cuaauaaaauaucauuca

SEQ ID NO: 1872002 - RNA, 19 nt, Human
cuaauaaaauaucauucag

SEQ ID NO: 1872003 - RNA, 20 nt, Human
cuaauaaaauaucauucagc

SEQ ID NO: 1872004 - RNA, 21 nt, Human
cuaauaaaauaucauucagca

SEQ ID NO: 1872005 - RNA, 22 nt, Human
cuaauaaaauaucauucagcaa

SEQ ID NO: 1872006 - RNA, 23 nt, Human
cuaauaaaauaucauucagcaac

SEQ ID NO: 1872007 - RNA, 14 nt, Human
cuaaagcagccagc

SEQ ID NO: 1872008 - RNA, 15 nt, Human
cgugagugcagaccc

SEQ ID NO: 1872009 - RNA, 15 nt, Human
cuaaaguaugaagca

SEQ ID NO: 1872010 - RNA, 20 nt, Human
cuaagaaauaugcacaauag

SEQ ID NO: 1872011 - RNA, 21 nt, Human
cgccacagcccagccacggac

SEQ ID NO: 1872012 - RNA, 14 nt, Human
cgccacagcccagc

SEQ ID NO: 1872013 - RNA, 15 nt, Human
cgcaguggcccugag

SEQ ID NO: 1872014 - RNA, 14 nt, Human
cgggcccagaggag

SEQ ID NO: 1872015 - RNA, 15 nt, Human
cgggcccagaggagc

SEQ ID NO: 1872016 - RNA, 14 nt, Human
cccaagcagagaag

SEQ ID NO: 1872017 - RNA, 20 nt, Human
cccauccagucucccaacuu

SEQ ID NO: 1872018 - RNA, 16 nt, Human
ccacugacugcaggga

SEQ ID NO: 1872019 - RNA, 17 nt, Human
ccacugacugcagggac

SEQ ID NO: 1872020 - RNA, 20 nt, Human
ccagacggcuccacuaggac

SEQ ID NO: 1872021 - RNA, 15 nt, Human
ccagacggcuccacu

SEQ ID NO: 1872022 - RNA, 21 nt, Human
ccagagagccuggugcugcug

SEQ ID NO: 1872023 - RNA, 22 nt, Human
ccagagagccuggugcugcugc

SEQ ID NO: 1872024 - RNA, 17 nt, Human
cccugaagcugugcgga

SEQ ID NO: 1872025 - RNA, 19 nt, Human
cccugaagcugugcggagc

SEQ ID NO: 1872026 - RNA, 14 nt, Human
ccaacucagaaggg

SEQ ID NO: 1872027 - RNA, 13 nt, Human
cauuauuaucaac

SEQ ID NO: 1872028 - RNA, 13 nt, Human
cauguaugucuug

SEQ ID NO: 1872029 - RNA, 17 nt, Human
cauguaugucuuggaca

SEQ ID NO: 1872030 - RNA, 18 nt, Human
cauguaugucuuggacac

SEQ ID NO: 1872031 - RNA, 21 nt, Human
cauguaugucuuggacacugu

SEQ ID NO: 1872032 - RNA, 22 nt, Human
cauguaugucuuggacacugua

SEQ ID NO: 1872033 - RNA, 17 nt, Human
cauggccuaugcacaua

SEQ ID NO: 1872034 - RNA, 19 nt, Human
cauggccuaugcacauaug

SEQ ID NO: 1872035 - RNA, 16 nt, Human
cauggccuaugcacau

SEQ ID NO: 1872036 - RNA, 21 nt, Human
caugaaucccacccacaugug

SEQ ID NO: 1872037 - RNA, 17 nt, Human
caguuauuauauuuaca

SEQ ID NO: 1872038 - RNA, 21 nt, Human
caguuauuauauuuacaaaug

SEQ ID NO: 1872039 - RNA, 22 nt, Human
caguuauuauauuuacaaaugg

SEQ ID NO: 1872040 - RNA, 23 nt, Human
caguucauauguaccauguacau

SEQ ID NO: 1872041 - RNA, 20 nt, Human
caucagcuaaacaccacguc

SEQ ID NO: 1872042 - RNA, 18 nt, Human
caucagcuaaacaccacg

SEQ ID NO: 1872043 - RNA, 17 nt, Human
caucugguuaggauggc

SEQ ID NO: 1872044 - RNA, 16 nt, Human
cauagguuuaauaauu

SEQ ID NO: 1872045 - RNA, 15 nt, Human
cauauguaccaugua

SEQ ID NO: 1872046 - RNA, 21 nt, Human
cauauguaccauguacaugaa

SEQ ID NO: 1872047 - RNA, 18 nt, Human
cauaauguuacauuauua

SEQ ID NO: 1872048 - RNA, 15 nt, Human
caguuuuaucauuuu

SEQ ID NO: 1872049 - RNA, 17 nt, Human
cauaauguuacauuauu

SEQ ID NO: 1872050 - RNA, 24 nt, Human
caguuugaaugcagucuguccagg

SEQ ID NO: 1872051 - RNA, 15 nt, Human
caguuugagacagga

SEQ ID NO: 1872052 - RNA, 16 nt, Human
caguuugagacaggag

SEQ ID NO: 1872053 - RNA, 18 nt, Human
caguuugagacaggagac

SEQ ID NO: 1872054 - RNA, 16 nt, Human
cagacugaucaggacc

SEQ ID NO: 1872055 - RNA, 17 nt, Human
cagacugaucaggaccu

SEQ ID NO: 1872056 - RNA, 19 nt, Human
cagacaguguuuucuggga

SEQ ID NO: 1872057 - RNA, 20 nt, Human
cagggagaccuggacacagg

SEQ ID NO: 1872058 - RNA, 21 nt, Human
cagggagaccuggacacaggc

SEQ ID NO: 1872059 - RNA, 23 nt, Human
caggaccuccaagccacugagca

SEQ ID NO: 1872060 - RNA, 20 nt, Human
caggaccuccaagccacuga

SEQ ID NO: 1872061 - RNA, 19 nt, Human
caggaccuccaagccacug

SEQ ID NO: 1872062 - RNA, 17 nt, Human
caggaccuccaagccac

SEQ ID NO: 1872063 - RNA, 14 nt, Human
auuaaugcuaaggg

SEQ ID NO: 1872064 - RNA, 15 nt, Human
auuaaugcuaagggc

SEQ ID NO: 1872065 - RNA, 23 nt, Human
auuaaugcuaagggcaggcccaa

SEQ ID NO: 1872066 - RNA, 17 nt, Human
auuuucuauaauuuaaa

SEQ ID NO: 1872067 - RNA, 18 nt, Human
auuuucuauaauuuaaau

SEQ ID NO: 1872068 - RNA, 19 nt, Human
auuuucuauaauuuaaaua

SEQ ID NO: 1872069 - RNA, 14 nt, Human
auuuauauauguau

SEQ ID NO: 1872070 - RNA, 15 nt, Human
auuuauauauguauu

SEQ ID NO: 1872071 - RNA, 15 nt, Human
auuuaagauaauuau

SEQ ID NO: 1872072 - RNA, 15 nt, Human
auuugcacaaguuuu

SEQ ID NO: 1872073 - RNA, 13 nt, Human
caagcaagacuga

SEQ ID NO: 1872074 - RNA, 14 nt, Human
caagcaagacugag

SEQ ID NO: 1872075 - RNA, 17 nt, Human
caagcaaacccagacgg

SEQ ID NO: 1872076 - RNA, 14 nt, Human
caagcaaacccaga

SEQ ID NO: 1872077 - RNA, 22 nt, Human
caauuucacgacacacuuugau

SEQ ID NO: 1872078 - RNA, 19 nt, Human
cacggacgcuggcucccca

SEQ ID NO: 1872079 - RNA, 16 nt, Human
cacggacgcuggcucc

SEQ ID NO: 1872080 - RNA, 23 nt, Human
cacggacgcuggcuccccaaagg

SEQ ID NO: 1872081 - RNA, 15 nt, Human
gccuccuggcccagg

SEQ ID NO: 1872082 - RNA, 19 nt, Human
gccuccuggcccaggugag

SEQ ID NO: 1872083 - RNA, 23 nt, Human
gccaccccagccuggccacgcag

SEQ ID NO: 1872084 - RNA, 22 nt, Human
gcugaagcuuauuaaugcuaag

SEQ ID NO: 1872085 - RNA, 21 nt, Human
gcugaagcuuauuaaugcuaa

SEQ ID NO: 1872086 - RNA, 12 nt, Human
gcugcugcugcu

SEQ ID NO: 1872087 - RNA, 20 nt, Human
ggaccggguggaagggaugg

SEQ ID NO: 1872088 - RNA, 15 nt, Human
ggacuuuuauuuugg

SEQ ID NO: 1872089 - RNA, 17 nt, Human
ggaggccagugagccac

SEQ ID NO: 1872090 - RNA, 16 nt, Human
ggaggccagugagcca

SEQ ID NO: 1872091 - RNA, 19 nt, Human
ggagcuuccuguccuccca

SEQ ID NO: 1872092 - RNA, 11 nt, Human
ggcccaggccu

SEQ ID NO: 1872093 - RNA, 18 nt, Human
ggcaggacgugggcuggg

SEQ ID NO: 1872094 - RNA, 23 nt, Human
ggcaaacaggcaguuggccagag

SEQ ID NO: 1872095 - RNA, 13 nt, Human
ggcaaacaggcag

SEQ ID NO: 1872096 - RNA, 22 nt, Human
ggcaaagcacgaaauguuauuu

SEQ ID NO: 1872097 - RNA, 19 nt, Human
ggcaaaggguccagaagga

SEQ ID NO: 1872098 - RNA, 19 nt, Human
ggcuccugagggagcucca

SEQ ID NO: 1872099 - RNA, 21 nt, Human
ggcugcauacccgggcagggc

SEQ ID NO: 1872100 - RNA, 22 nt, Human
aaaagcuccauuuuuagugaaa

SEQ ID NO: 1872101 - RNA, 13 nt, Human
gggagaccuggac

SEQ ID NO: 1872102 - RNA, 14 nt, Human
gggcaaacaggcag

SEQ ID NO: 1872103 - RNA, 15 nt, Human
gggcaaacaggcagu

SEQ ID NO: 1872104 - RNA, 13 nt, Human
aaaggaauuuaaa

SEQ ID NO: 1872105 - RNA, 19 nt, Human
aaagcuugcaacaaaauuc

SEQ ID NO: 1872106 - RNA, 19 nt, Human
aaagaugggugaaggcugg

SEQ ID NO: 1872107 - RNA, 20 nt, Human
ggucccaaacagcugccucu

SEQ ID NO: 1872108 - RNA, 20 nt, Human
gguccagaaggagacaggca

SEQ ID NO: 1872109 - RNA, 13 nt, Human
aaaauugugauca

SEQ ID NO: 1872110 - RNA, 16 nt, Human
aaacaagaaaguuucc

SEQ ID NO: 1872111 - RNA, 17 nt, Human
aaacaagaaaguuuccc

SEQ ID NO: 1872112 - RNA, 18 nt, Human
aaacaagaaaguuucccc

SEQ ID NO: 1872113 - RNA, 15 nt, Human
aaacaagaaaguuuc

SEQ ID NO: 1872114 - RNA, 16 nt, Human
gggucagaaacaggac

SEQ ID NO: 1872115 - RNA, 18 nt, Human
gggucagaaacaggaccg

SEQ ID NO: 1872116 - RNA, 22 nt, Human
ggggucgacuucgggcuggcca

SEQ ID NO: 1872117 - RNA, 24 nt, Human
gaccaugcgacacugggaggccag

SEQ ID NO: 1872118 - RNA, 21 nt, Human
gacuuuaucuaauaccucugu

SEQ ID NO: 1872119 - RNA, 22 nt, Human
gacuuuaucuaauaccucugug

SEQ ID NO: 1872120 - RNA, 20 nt, Human
gacucugcacaugucuugua

SEQ ID NO: 1872121 - RNA, 20 nt, Human
gaccauaauguuacauuauu

SEQ ID NO: 1872122 - RNA, 19 nt, Human
gaagcucucgggcuaggaa

SEQ ID NO: 1872123 - RNA, 18 nt, Human
gaaggcuggcaugaucca

SEQ ID NO: 1872124 - RNA, 14 nt, Human
gaaggcuggcauga

SEQ ID NO: 1872125 - RNA, 23 nt, Human
gaggugaacaagcaaacccagac

SEQ ID NO: 1872126 - RNA, 16 nt, Human
gaguuuaaauuguaau

SEQ ID NO: 1872127 - RNA, 13 nt, Human
gcacauauggacu

SEQ ID NO: 1872128 - RNA, 22 nt, Human
cuugugacuagugcugaagcuu

SEQ ID NO: 1872129 - RNA, 18 nt, Human
cugugacuuaagaagccu

SEQ ID NO: 1872130 - RNA, 14 nt, Human
cuuauuaaugcuaa

SEQ ID NO: 1872131 - RNA, 15 nt, Human
cuuauuaaugcuaag

SEQ ID NO: 1872132 - RNA, 19 nt, Human
cuuauuaaugcuaagggca

SEQ ID NO: 1872133 - RNA, 16 nt, Human
cuuauuaaugcuaagg

SEQ ID NO: 1872134 - RNA, 11 nt, Human
cuucauccucu

SEQ ID NO: 1872135 - RNA, 17 nt, Human
cugggcccacaaaggca

SEQ ID NO: 1872136 - RNA, 14 nt, Human
auguuacauuauua

SEQ ID NO: 1872137 - RNA, 17 nt, Human
auguuauuuuuuaauua

SEQ ID NO: 1872138 - RNA, 19 nt, Human
auguuauuuuuuaauuauu

SEQ ID NO: 1872139 - RNA, 20 nt, Human
auguuauuuuuuaauuauua

SEQ ID NO: 1872140 - RNA, 16 nt, Human
uuuucuauaauuuaaa

SEQ ID NO: 1872141 - RNA, 16 nt, Human
auguuuacacucuuug

SEQ ID NO: 1872142 - RNA, 18 nt, Human
auguuuacacucuuugua

SEQ ID NO: 1872143 - RNA, 19 nt, Human
auguuuacacucuuuguaa

SEQ ID NO: 1872144 - RNA, 21 nt, Human
auguuuacacucuuuguaaga

SEQ ID NO: 1872145 - RNA, 18 nt, Human
uuuucuggaauguaauca

SEQ ID NO: 1872146 - RNA, 23 nt, Human
augucgucaaagcugaaauggac

SEQ ID NO: 1872147 - RNA, 11 nt, Human
augugacacau

SEQ ID NO: 1872148 - RNA, 14 nt, Human
uuugauuucauuaa

SEQ ID NO: 1872149 - RNA, 13 nt, Human
uuugagacaggag

SEQ ID NO: 1872150 - RNA, 20 nt, Human
auuauauggcuugaguuuaa

SEQ ID NO: 1872151 - RNA, 17 nt, Human
auuccaagugauugaaa

SEQ ID NO: 1872152 - RNA, 12 nt, Human
uuuuuaauuauu

SEQ ID NO: 1872153 - RNA, 15 nt, Human
uuuuugaagcuguau

SEQ ID NO: 1872154 - RNA, 13 nt, Human
auuacuguuugga

SEQ ID NO: 1872155 - RNA, 12 nt, Human
auugauuagaaa

SEQ ID NO: 1872156 - RNA, 13 nt, Human
auugccuucauuu

SEQ ID NO: 1872157 - RNA, 20 nt, Human
auugccuucauuuuaugaua

SEQ ID NO: 1872158 - RNA, 22 nt, Human
auuuauaaauauauuuaagaua

SEQ ID NO: 1872159 - RNA, 16 nt, Human
auuguaguccuguaau

SEQ ID NO: 1872160 - RNA, 15 nt, Human
auuucaugauuucau

SEQ ID NO: 1872161 - RNA, 18 nt, Human
uuuaaaaaaauuccaagu

SEQ ID NO: 1872162 - RNA, 21 nt, Human
augcaccuugugucuguacac

SEQ ID NO: 1872163 - RNA, 14 nt, Human
augauuucauuuca

SEQ ID NO: 1872164 - RNA, 21 nt, Human
uuuaaauauaugcuaagucuu

SEQ ID NO: 1872165 - RNA, 23 nt, Human
uugugaucagaccauaauguuac

SEQ ID NO: 1872166 - RNA, 13 nt, Human
uugugucuguaca

SEQ ID NO: 1872167 - RNA, 14 nt, Human
uugugucuguacac

SEQ ID NO: 1872168 - RNA, 15 nt, Human
uugugucuguacacg

SEQ ID NO: 1872169 - RNA, 18 nt, Human
augcuacaggauuugaaa

SEQ ID NO: 1872170 - RNA, 20 nt, Human
augcgacacugggaggccag

SEQ ID NO: 1872171 - RNA, 16 nt, Human
aucuuauaauuuaaaa

SEQ ID NO: 1872172 - RNA, 15 nt, Human
aucuuauaauuuaaa

SEQ ID NO: 1872173 - RNA, 18 nt, Human
augaaagucuugugacua

SEQ ID NO: 1872174 - RNA, 19 nt, Human
augaaagucuugugacuag

SEQ ID NO: 1872175 - RNA, 20 nt, Human
augaaagucuugugacuagu

SEQ ID NO: 1872176 - RNA, 21 nt, Human
augaaucccacccacauguga

SEQ ID NO: 1872177 - RNA, 18 nt, Human
augaaucccacccacaug

SEQ ID NO: 1872178 - RNA, 20 nt, Human
uuguaagaguggaaccaaca

SEQ ID NO: 1872179 - RNA, 14 nt, Human
uuguaauucuaaau

SEQ ID NO: 1872180 - RNA, 17 nt, Human
uuguaauucuaaaugaa

SEQ ID NO: 1872181 - RNA, 23 nt, Human
uuguaauucuaaaugaauguuua

SEQ ID NO: 1872182 - RNA, 15 nt, Human
auaugcacaauagca

SEQ ID NO: 1872183 - RNA, 16 nt, Human
uucaaaauggagggaa

SEQ ID NO: 1872184 - RNA, 14 nt, Human
auagcuacuaauuu

SEQ ID NO: 1872185 - RNA, 17 nt, Human
auagcuacuaauuuuaa

SEQ ID NO: 1872186 - RNA, 23 nt, Human
auagcuccccgcuucugccugca

SEQ ID NO: 1872187 - RNA, 20 nt, Human
auagcuccccgcuucugccu

SEQ ID NO: 1872188 - RNA, 18 nt, Human
auagcuacuaauuuuaaa

SEQ ID NO: 1872189 - RNA, 14 nt, Human
aucauuuuaauuau

SEQ ID NO: 1872190 - RNA, 15 nt, Human
aucauuuuaauuauu

SEQ ID NO: 1872191 - RNA, 12 nt, Human
aucauucagcaa

SEQ ID NO: 1872192 - RNA, 13 nt, Human
aucauucagcaac

SEQ ID NO: 1872193 - RNA, 19 nt, Human
aucagucauaacuaaauaa

SEQ ID NO: 1872194 - RNA, 15 nt, Human
uucuagguucuaaaa

SEQ ID NO: 1872195 - RNA, 15 nt, Human
agugaaagaaaauaa

SEQ ID NO: 1872196 - RNA, 16 nt, Human
ugugccauagucacau

SEQ ID NO: 1872197 - RNA, 18 nt, Human
ugugccauagucacaugg

SEQ ID NO: 1872198 - RNA, 21 nt, Human
ugugccauagucacauggccu

SEQ ID NO: 1872199 - RNA, 20 nt, Human
ugugacuagugcugaagcuu

SEQ ID NO: 1872200 - RNA, 22 nt, Human
ugugacuagugcugaagcuuau

SEQ ID NO: 1872201 - RNA, 23 nt, Human
ugugacuagugcugaagcuuauu

SEQ ID NO: 1872202 - RNA, 14 nt, Human
ugugacuagugcug

SEQ ID NO: 1872203 - RNA, 15 nt, Human
ugugacuagugcuga

SEQ ID NO: 1872204 - RNA, 16 nt, Human
ugugacuagugcugaa

SEQ ID NO: 1872205 - RNA, 17 nt, Human
ugugacuagugcugaag

SEQ ID NO: 1872206 - RNA, 19 nt, Human
ugugacuagugcugaagcu

SEQ ID NO: 1872207 - RNA, 16 nt, Human
ugucuuguacaugugu

SEQ ID NO: 1872208 - RNA, 17 nt, Human
ugucuuguacaugugua

SEQ ID NO: 1872209 - RNA, 20 nt, Human
ugucuuguacauguguagcc

SEQ ID NO: 1872210 - RNA, 22 nt, Human
ugucuuguacauguguagccug

SEQ ID NO: 1872211 - RNA, 19 nt, Human
ugucuuggacacuguacaa

SEQ ID NO: 1872212 - RNA, 13 nt, Human
ugucuuguacaug

SEQ ID NO: 1872213 - RNA, 23 nt, Human
agugcugaagcuuauuaaugcua

SEQ ID NO: 1872214 - RNA, 21 nt, Human
agugcugaagcuuauuaaugc

SEQ ID NO: 1872215 - RNA, 22 nt, Human
agugcugaagcuuauuaaugcu

SEQ ID NO: 1872216 - RNA, 12 nt, Human
agugcugaagcu

SEQ ID NO: 1872217 - RNA, 13 nt, Human
agugcugaagcuu

SEQ ID NO: 1872218 - RNA, 15 nt, Human
agugcugaagcuuau

SEQ ID NO: 1872219 - RNA, 16 nt, Human
agugcugaagcuuauu

SEQ ID NO: 1872220 - RNA, 17 nt, Human
aguuucacugccauaua

SEQ ID NO: 1872221 - RNA, 16 nt, Human
aguuggccagagagcc

SEQ ID NO: 1872222 - RNA, 16 nt, Human
aguugcguggacucug

SEQ ID NO: 1872223 - RNA, 20 nt, Human
aguugcguggacucugcaca

SEQ ID NO: 1872224 - RNA, 14 nt, Human
auaacuaaauaaag

SEQ ID NO: 1872225 - RNA, 15 nt, Human
auaaauguacauuaa

SEQ ID NO: 1872226 - RNA, 18 nt, Human
uuaccugggcauucuugu

SEQ ID NO: 1872227 - RNA, 18 nt, Human
uuaaguugcugaugaacu

SEQ ID NO: 1872228 - RNA, 15 nt, Human
agggguaugucuuua

SEQ ID NO: 1872229 - RNA, 22 nt, Human
ugggguccuguggggcccccac

SEQ ID NO: 1872230 - RNA, 23 nt, Human
ugggguccuguggggcccccaca

SEQ ID NO: 1872231 - RNA, 20 nt, Human
agggcaggcccaaauuauca

SEQ ID NO: 1872232 - RNA, 13 nt, Human
agggaaauuucag

SEQ ID NO: 1872233 - RNA, 20 nt, Human
agggacacgggcagccuggc

SEQ ID NO: 1872234 - RNA, 23 nt, Human
agggacacgggcagccuggcucc

SEQ ID NO: 1872235 - RNA, 18 nt, Human
ugggagaccuguaaucau

SEQ ID NO: 1872236 - RNA, 13 nt, Human
aguaaaauccaca

SEQ ID NO: 1872237 - RNA, 22 nt, Human
uguauuacaaauccaaugaaau

SEQ ID NO: 1872238 - RNA, 13 nt, Human
uguauuacaaauc

SEQ ID NO: 1872239 - RNA, 14 nt, Human
uguaugucuuggac

SEQ ID NO: 1872240 - RNA, 19 nt, Human
uguaugucuuggacacugu

SEQ ID NO: 1872241 - RNA, 19 nt, Human
uggugcugcugcugcugug

SEQ ID NO: 1872242 - RNA, 12 nt, Human
uggugccuggcc

SEQ ID NO: 1872243 - RNA, 13 nt, Human
uggugccuggccu

SEQ ID NO: 1872244 - RNA, 14 nt, Human
uggugccuggccug

SEQ ID NO: 1872245 - RNA, 17 nt, Human
uggugccuggccuggca

SEQ ID NO: 1872246 - RNA, 18 nt, Human
uggugccuggccuggcac

SEQ ID NO: 1872247 - RNA, 19 nt, Human
uggugccuggccuggcaca

SEQ ID NO: 1872248 - RNA, 22 nt, Human
uggugccuggccuggcacacau

SEQ ID NO: 1872249 - RNA, 23 nt, Human
uggugccuggccuggcacacauc

SEQ ID NO: 1872250 - RNA, 24 nt, Human
uggugccuggccuggcacacauca

SEQ ID NO: 1872251 - RNA, 16 nt, Human
uguaaaggaauuuaaa

SEQ ID NO: 1872252 - RNA, 22 nt, Human
ugguuaggauggcaggacgugg

SEQ ID NO: 1872253 - RNA, 12 nt, Human
ugguuaggaugg

SEQ ID NO: 1872254 - RNA, 22 nt, Human
ugcuaaucagggaggucauuuu

SEQ ID NO: 1872255 - RNA, 23 nt, Human
ugcuaaucagggaggucauuuug

SEQ ID NO: 1872256 - RNA, 20 nt, Human
aggaagaucucugcagggcc

SEQ ID NO: 1872257 - RNA, 21 nt, Human
aggaagaucucugcagggccg

SEQ ID NO: 1872258 - RNA, 22 nt, Human
agcucccaggugcagccagagg

SEQ ID NO: 1872259 - RNA, 21 nt, Human
agcucccaggugcagccagag

SEQ ID NO: 1872260 - RNA, 20 nt, Human
agcucccaggugcagccaga

SEQ ID NO: 1872261 - RNA, 15 nt, Human
agcucccaggugcag

SEQ ID NO: 1872262 - RNA, 17 nt, Human
ugccauagucacauggc

SEQ ID NO: 1872263 - RNA, 16 nt, Human
ugccauagucacaugg

SEQ ID NO: 1872264 - RNA, 16 nt, Human
uggaguucuugugcca

SEQ ID NO: 1872265 - RNA, 14 nt, Human
uggaguucuugugc

SEQ ID NO: 1872266 - RNA, 15 nt, Human
uggaguucuugugcc

SEQ ID NO: 1872267 - RNA, 14 nt, Human
uggaguugaaaauc

SEQ ID NO: 1872268 - RNA, 22 nt, Human
aggcccaaauuaucaagcuaau

SEQ ID NO: 1872269 - RNA, 23 nt, Human
aggcccaaauuaucaagcuaaua

SEQ ID NO: 1872270 - RNA, 15 nt, Human
aggagcacacccagc

SEQ ID NO: 1872271 - RNA, 17 nt, Human
aggagagucacagaaca

SEQ ID NO: 1872272 - RNA, 19 nt, Human
aggacgugggcugggccca

SEQ ID NO: 1872273 - RNA, 15 nt, Human
aggacgugggcuggg

SEQ ID NO: 1872274 - RNA, 16 nt, Human
ugcaggugaaacccag

SEQ ID NO: 1872275 - RNA, 14 nt, Human
agccuuaccacgca

SEQ ID NO: 1872276 - RNA, 21 nt, Human
agccugugcauguaugucuug

SEQ ID NO: 1872277 - RNA, 13 nt, Human
ugauuucauuuca

SEQ ID NO: 1872278 - RNA, 17 nt, Human
ugauuucauuucaacug

SEQ ID NO: 1872279 - RNA, 13 nt, Human
ugcaacaaaauuc

SEQ ID NO: 1872280 - RNA, 23 nt, Human
ugcacaugucuuguacaugugua

SEQ ID NO: 1872281 - RNA, 12 nt, Human
ugauggccacaa

SEQ ID NO: 1872282 - RNA, 13 nt, Human
ugagugcagaccc

SEQ ID NO: 1872283 - RNA, 21 nt, Human
ugagugcagaccccuuggcca

SEQ ID NO: 1872284 - RNA, 15 nt, Human
ugaaauuguauuaca

SEQ ID NO: 1872285 - RNA, 17 nt, Human
ugaaagucuugugacua

SEQ ID NO: 1872286 - RNA, 18 nt, Human
ugaaagucuugugacuag

SEQ ID NO: 1872287 - RNA, 20 nt, Human
ugaaagucuugugacuagug

SEQ ID NO: 1872288 - RNA, 21 nt, Human
ugaaagucuugugacuagugc

SEQ ID NO: 1872289 - RNA, 22 nt, Human
ugaaagucuugugacuagugcu

SEQ ID NO: 1872290 - RNA, 23 nt, Human
ugaaagucuugugacuagugcug

SEQ ID NO: 1872291 - RNA, 17 nt, Human
ugaacucaacuuugaca

SEQ ID NO: 1872292 - RNA, 15 nt, Human
agaugccugaagcca

SEQ ID NO: 1872293 - RNA, 21 nt, Human
agaucauccagaaguuccuca

SEQ ID NO: 1872294 - RNA, 18 nt, Human
agaccuggacacaggccu

SEQ ID NO: 1872295 - RNA, 16 nt, Human
agaccuggacacaggc

SEQ ID NO: 1872296 - RNA, 19 nt, Human
agaccuggacacaggccug

SEQ ID NO: 1872297 - RNA, 15 nt, Human
agaccucagggcaca

SEQ ID NO: 1872298 - RNA, 14 nt, Human
agaccucagggcac

SEQ ID NO: 1872299 - RNA, 13 nt, Human
agaccucagggca

SEQ ID NO: 1872300 - RNA, 21 nt, Human
ucuuaaucuuuucacaaauaa

SEQ ID NO: 1872301 - RNA, 22 nt, Human
ucuuaaucuuuucacaaauaaa

SEQ ID NO: 1872302 - RNA, 19 nt, Human
ucuuaaucuuuucacaaau

SEQ ID NO: 1872303 - RNA, 20 nt, Human
ucuuaaucuuuucacaaaua

SEQ ID NO: 1872304 - RNA, 17 nt, Human
ucugggguuaugauggc

SEQ ID NO: 1872305 - RNA, 18 nt, Human
ucuccagggucagaaaca

SEQ ID NO: 1872306 - RNA, 21 nt, Human
ucuccagggucagaaacagga

SEQ ID NO: 1872307 - RNA, 14 nt, Human
acuucgggcuggcc

SEQ ID NO: 1872308 - RNA, 13 nt, Human
agaaacaggaccg

SEQ ID NO: 1872309 - RNA, 17 nt, Human
ucgacuucgggcuggcc

SEQ ID NO: 1872310 - RNA, 15 nt, Human
uccuuccagcccaga

SEQ ID NO: 1872311 - RNA, 17 nt, Human
acuggaugcagaaacag

SEQ ID NO: 1872312 - RNA, 18 nt, Human
acuggaugcagaaacagu

SEQ ID NO: 1872313 - RNA, 13 nt, Human
acuuaauaaugug

SEQ ID NO: 1872314 - RNA, 17 nt, Human
acuuaauaauguguaca

SEQ ID NO: 1872315 - RNA, 20 nt, Human
ucuaaagccauuguaguccu

SEQ ID NO: 1872316 - RNA, 16 nt, Human
acgugggcaaacaggc

SEQ ID NO: 1872317 - RNA, 23 nt, Human
acgugggcugggcccacaaaggc

SEQ ID NO: 1872318 - RNA, 19 nt, Human
acgugggcaaacaggcagu

SEQ ID NO: 1872319 - RNA, 22 nt, Human
acgggcagccuggcucccagga

SEQ ID NO: 1872320 - RNA, 17 nt, Human
acgggcagccuggcucc

SEQ ID NO: 1872321 - RNA, 13 nt, Human
uccccaccaguga

SEQ ID NO: 1872322 - RNA, 21 nt, Human
uccccaccagugaaugaaagu

SEQ ID NO: 1872323 - RNA, 15 nt, Human
acuaacauauaaugu

SEQ ID NO: 1872324 - RNA, 17 nt, Human
acuaacauauaauguug

SEQ ID NO: 1872325 - RNA, 14 nt, Human
acgagaaaacaaua

SEQ ID NO: 1872326 - RNA, 22 nt, Human
accugccacccugggccuggca

SEQ ID NO: 1872327 - RNA, 23 nt, Human
acauauaauguuguuauuuaaag

SEQ ID NO: 1872328 - RNA, 23 nt, Human
acauauggacucugcacaugaau

SEQ ID NO: 1872329 - RNA, 19 nt, Human
acauaugcaccuugugucu

SEQ ID NO: 1872330 - RNA, 20 nt, Human
acauaugcaccuugugucug

SEQ ID NO: 1872331 - RNA, 15 nt, Human
acauaugcaccuugu

SEQ ID NO: 1872332 - RNA, 16 nt, Human
acauaugcaccuugug

SEQ ID NO: 1872333 - RNA, 17 nt, Human
acauaugcaccuugugu

SEQ ID NO: 1872334 - RNA, 18 nt, Human
acauaugcaccuuguguc

SEQ ID NO: 1872335 - RNA, 22 nt, Human
ucaagaucaaugaaaugauguc

SEQ ID NO: 1872336 - RNA, 16 nt, Human
ucaagaucaaugaaau

SEQ ID NO: 1872337 - RNA, 13 nt, Human
acauucaggagcu

SEQ ID NO: 1872338 - RNA, 16 nt, Human
acaugaagaagcuaaa

SEQ ID NO: 1872339 - RNA, 14 nt, Human
ucaaagcugaaaug

SEQ ID NO: 1872340 - RNA, 22 nt, Human
ucaaaggagagucacagaacaa

SEQ ID NO: 1872341 - RNA, 23 nt, Human
accauuucuugagguaaaagcau

SEQ ID NO: 1872342 - RNA, 22 nt, Human
acccagacggcuccacuaggac

SEQ ID NO: 1872343 - RNA, 21 nt, Human
acccagacggcuccacuagga

SEQ ID NO: 1872344 - RNA, 17 nt, Human
acccagacggcuccacu

SEQ ID NO: 1872345 - RNA, 17 nt, Human
accauguacaugaagaa

SEQ ID NO: 1872346 - RNA, 11 nt, Human
accauguacau

SEQ ID NO: 1872347 - RNA, 23 nt, Human
ucagaagggagcuagccagagga

SEQ ID NO: 1872348 - RNA, 21 nt, Human
ucagaagggagcuagccagag

SEQ ID NO: 1872349 - RNA, 16 nt, Human
ucaccuucaguaaccc

SEQ ID NO: 1872350 - RNA, 15 nt, Human
ucaauucuugccaaa

SEQ ID NO: 1872351 - RNA, 11 nt, Human
ucacaaauaaa

SEQ ID NO: 1872352 - RNA, 13 nt, Human
accaaucauuuua

SEQ ID NO: 1872353 - RNA, 20 nt, Human
accaaucauuuuaauuauua

SEQ ID NO: 1872354 - RNA, 16 nt, Human
acagaugggcaaauua

SEQ ID NO: 1872355 - RNA, 12 nt, Human
uauauuuacaaa

SEQ ID NO: 1872356 - RNA, 12 nt, Human
acacucuuugua

SEQ ID NO: 1872357 - RNA, 16 nt, Human
acacucuuuguaagag

SEQ ID NO: 1872358 - RNA, 22 nt, Human
uagauaggucagugcaaauacu

SEQ ID NO: 1872359 - RNA, 15 nt, Human
uagaugaacucaacu

SEQ ID NO: 1872360 - RNA, 16 nt, Human
uagcuacuaauuuuaa

SEQ ID NO: 1872361 - RNA, 15 nt, Human
acaagcaaacccaga

SEQ ID NO: 1872362 - RNA, 15 nt, Human
aauaacgauaaaaga

SEQ ID NO: 1872363 - RNA, 21 nt, Human
aauaacaaugaaaguugauaa

SEQ ID NO: 1872364 - RNA, 20 nt, Human
aauaaauuguaauuguaaag

SEQ ID NO: 1872365 - RNA, 21 nt, Human
aauacaaagaaccaagaaaaa

SEQ ID NO: 1872366 - RNA, 18 nt, Human
aauaggcguaacuaauuu

SEQ ID NO: 1872367 - RNA, 13 nt, Human
aauaucauucagc

SEQ ID NO: 1872368 - RNA, 14 nt, Human
aauaucauucagca

SEQ ID NO: 1872369 - RNA, 15 nt, Human
aauaucauucagcaa

SEQ ID NO: 1872370 - RNA, 16 nt, Human
aauaucauucagcaac

SEQ ID NO: 1872371 - RNA, 14 nt, Human
aaucuuauaauuua

SEQ ID NO: 1872372 - RNA, 16 nt, Human
aaucuuauaauuuaaa

SEQ ID NO: 1872373 - RNA, 15 nt, Human
aaucaucaagucuuu

SEQ ID NO: 1872374 - RNA, 20 nt, Human
uaauaaaauaucauucagca

SEQ ID NO: 1872375 - RNA, 21 nt, Human
uaauaaaauaucauucagcaa

SEQ ID NO: 1872376 - RNA, 12 nt, Human
uaauaaaauauc

SEQ ID NO: 1872377 - RNA, 15 nt, Human
uaauaaaauaucauu

SEQ ID NO: 1872378 - RNA, 16 nt, Human
uaauaaaauaucauuc

SEQ ID NO: 1872379 - RNA, 17 nt, Human
uaauaaaauaucauuca

SEQ ID NO: 1872380 - RNA, 18 nt, Human
uaauaaaauaucauucag

SEQ ID NO: 1872381 - RNA, 14 nt, Human
uaaguuucugggac

SEQ ID NO: 1872382 - RNA, 16 nt, Human
uaaguuugauuucauu

SEQ ID NO: 1872383 - RNA, 20 nt, Human
uaaugaccacaccugccucu

SEQ ID NO: 1872384 - RNA, 15 nt, Human
uaaucauauaauaaa

SEQ ID NO: 1872385 - RNA, 20 nt, Human
uaaucauauaauaaauguac

SEQ ID NO: 1872386 - RNA, 22 nt, Human
uaaucauauaauaaauguacau

SEQ ID NO: 1872387 - RNA, 18 nt, Human
uaaucaauguuucuucua

SEQ ID NO: 1872388 - RNA, 19 nt, Human
aaugaccacaccugccucu

SEQ ID NO: 1872389 - RNA, 19 nt, Human
aauggacuuuuguacauag

SEQ ID NO: 1872390 - RNA, 20 nt, Human
aaugcagucuguccaggcuc

SEQ ID NO: 1872391 - RNA, 19 nt, Human
aaugcagucuguccaggcu

SEQ ID NO: 1872392 - RNA, 20 nt, Human
gugccguguguugcaugcag

SEQ ID NO: 1872393 - RNA, 14 nt, Human
gugccucauugcuu

SEQ ID NO: 1872394 - RNA, 13 nt, Human
aagcaagacugag

SEQ ID NO: 1872395 - RNA, 15 nt, Human
aagaccucagggcac

SEQ ID NO: 1872396 - RNA, 15 nt, Human
guuugauuucauuaa

SEQ ID NO: 1872397 - RNA, 22 nt, Human
guuagucauuugcugagcaugu

SEQ ID NO: 1872398 - RNA, 12 nt, Human
guuagucauuug

SEQ ID NO: 1872399 - RNA, 20 nt, Human
gugugucuuuccucccugaa

SEQ ID NO: 1872400 - RNA, 17 nt, Human
aagccugggauugacag

SEQ ID NO: 1872401 - RNA, 19 nt, Human
guucauauguaccauguac

SEQ ID NO: 1872402 - RNA, 22 nt, Human
guucauauguaccauguacaug

SEQ ID NO: 1872403 - RNA, 19 nt, Human
aagcuuauuaaugcuaagg

SEQ ID NO: 1872404 - RNA, 14 nt, Human
aagcuuauuaaugc

SEQ ID NO: 1872405 - RNA, 15 nt, Human
aagcuuauuaaugcu

SEQ ID NO: 1872406 - RNA, 16 nt, Human
aagcuuauuaaugcua

SEQ ID NO: 1872407 - RNA, 17 nt, Human
aagcuuauuaaugcuaa

SEQ ID NO: 1872408 - RNA, 18 nt, Human
aagcuuauuaaugcuaag

SEQ ID NO: 1872409 - RNA, 20 nt, Human
aagcuuauuaaugcuaaggg

SEQ ID NO: 1872410 - RNA, 19 nt, Human
gucccaaacagcugccucu

SEQ ID NO: 1872411 - RNA, 15 nt, Human
guccgaucuuugacu

SEQ ID NO: 1872412 - RNA, 23 nt, Human
aacaauuuuaggaggaccagagc

SEQ ID NO: 1872413 - RNA, 21 nt, Human
aacaagccuccuuuuaaagua

SEQ ID NO: 1872414 - RNA, 21 nt, Human
gucauuugcugagcauguacu

SEQ ID NO: 1872415 - RNA, 22 nt, Human
gucauuugcugagcauguacug

SEQ ID NO: 1872416 - RNA, 18 nt, Human
aaccucucacuucacccu

SEQ ID NO: 1872417 - RNA, 17 nt, Human
aacccagucacugugag

SEQ ID NO: 1872418 - RNA, 14 nt, Human
aaaugcauuucuaa

SEQ ID NO: 1872419 - RNA, 18 nt, Human
guaggacccaagcagaga

SEQ ID NO: 1872420 - RNA, 16 nt, Human
aaauccuuuacuguua

SEQ ID NO: 1872421 - RNA, 17 nt, Human
aaauuucagcagcugca

SEQ ID NO: 1872422 - RNA, 18 nt, Human
aaauuucagcagcugcag

SEQ ID NO: 1872423 - RNA, 14 nt, Human
aaauuagaugaacu

SEQ ID NO: 1872424 - RNA, 15 nt, Human
aaauuaucaagcuaa

SEQ ID NO: 1872425 - RNA, 16 nt, Human
aaauuaucaagcuaau

SEQ ID NO: 1872426 - RNA, 17 nt, Human
aaauuaucaagcuaaua

SEQ ID NO: 1872427 - RNA, 18 nt, Human
aaauuaucaagcuaauaa

SEQ ID NO: 1872428 - RNA, 19 nt, Human
aaauuaucaagcuaauaaa

SEQ ID NO: 1872429 - RNA, 20 nt, Human
aaauuaucaagcuaauaaaa

SEQ ID NO: 1872430 - RNA, 24 nt, Human
caagaccucagggcacaaagaugg

SEQ ID NO: 1872431 - RNA, 23 nt, Human
caagaccucagggcacaaagaug

SEQ ID NO: 1872432 - RNA, 16 nt, Human
caagaccucagggcac

SEQ ID NO: 1872433 - RNA, 15 nt, Human
caagaccucagggca

SEQ ID NO: 1872434 - RNA, 13 nt, Human
caagaaaguuucc

SEQ ID NO: 1872435 - RNA, 14 nt, Human
caagaaaguuuccc

SEQ ID NO: 1872436 - RNA, 14 nt, Human
caagccagggugug

SEQ ID NO: 1872437 - RNA, 18 nt, Human
caagccagggugugucuc

SEQ ID NO: 1872438 - RNA, 22 nt, Human
caacaguuuuuuaugcuaauca

SEQ ID NO: 1872439 - RNA, 19 nt, Human
caaauugccuucauuuuau

SEQ ID NO: 1872440 - RNA, 16 nt, Human
caaaggguccagaagg

SEQ ID NO: 1872441 - RNA, 20 nt, Human
caaaggagagucacagaaca

SEQ ID NO: 1872442 - RNA, 10 nt, Human
cacaaauaaa

SEQ ID NO: 1872443 - RNA, 20 nt, Human
caccagugaaugaaagucuu

SEQ ID NO: 1872444 - RNA, 22 nt, Human
caccagugaaugaaagucuugu

SEQ ID NO: 1872445 - RNA, 24 nt, Human
cacaugaaucccacccacauguga

SEQ ID NO: 1872446 - RNA, 12 nt, Human
cacagcccagcc

SEQ ID NO: 1872447 - RNA, 13 nt, Human
cacagcccagcca

SEQ ID NO: 1872448 - RNA, 16 nt, Human
cacagcccagccacgg

SEQ ID NO: 1872449 - RNA, 23 nt, Human
cacagcccagccacggacgcugg

SEQ ID NO: 1872450 - RNA, 20 nt, Human
cacccaagaccucagggcac

SEQ ID NO: 1872451 - RNA, 13 nt, Human
uuuuuuaugcuaa

SEQ ID NO: 1872452 - RNA, 16 nt, Human
uuuuuuaugcuaauca

SEQ ID NO: 1872453 - RNA, 23 nt, Human
uuugcauaguaccaaucauuuua

SEQ ID NO: 1872454 - RNA, 19 nt, Human
uuuuaucauuuucaaaaug

SEQ ID NO: 1872455 - RNA, 13 nt, Human
uuuucacaaauaa

SEQ ID NO: 1872456 - RNA, 14 nt, Human
uuuucacaaauaaa

SEQ ID NO: 1872457 - RNA, 17 nt, Human
uuuccucuuccugccua

SEQ ID NO: 1872458 - RNA, 20 nt, Human
uuuccugagaccacagagag

SEQ ID NO: 1872459 - RNA, 15 nt, Human
uuucagcagcugcag

SEQ ID NO: 1872460 - RNA, 20 nt, Human
uuuaucuaauaccucugugu

SEQ ID NO: 1872461 - RNA, 23 nt, Human
uucaugauuucauuucaacuguu

SEQ ID NO: 1872462 - RNA, 17 nt, Human
uucaugauuucauuuca

SEQ ID NO: 1872463 - RNA, 15 nt, Human
uucauuucaacuguu

SEQ ID NO: 1872464 - RNA, 21 nt, Human
uuccccaccagugaaugaaag

SEQ ID NO: 1872465 - RNA, 21 nt, Human
uuccuuucauuuacuguggcu

SEQ ID NO: 1872466 - RNA, 14 nt, Human
uuccuuccagccca

SEQ ID NO: 1872467 - RNA, 18 nt, Human
uuccugccgcaacaguuu

SEQ ID NO: 1872468 - RNA, 14 nt, Human
uucuccagggucag

SEQ ID NO: 1872469 - RNA, 15 nt, Human
uugcguggacucugc

SEQ ID NO: 1872470 - RNA, 18 nt, Human
uugcguggacucugcaca

SEQ ID NO: 1872471 - RNA, 14 nt, Human
uuguauuacaaauc

SEQ ID NO: 1872472 - RNA, 16 nt, Human
uuguaaaggaauuuaa

SEQ ID NO: 1872473 - RNA, 22 nt, Human
uugcauaguaccaaucauuuua

SEQ ID NO: 1872474 - RNA, 14 nt, Human
uucugagcauuuaa

SEQ ID NO: 1872475 - RNA, 12 nt, Human
ugugcaguguug

SEQ ID NO: 1872476 - RNA, 20 nt, Human
ugugcauguaugucuuggac

SEQ ID NO: 1872477 - RNA, 23 nt, Human
ugugcauguaugucuuggacacu

SEQ ID NO: 1872478 - RNA, 22 nt, Human
uguggcuucuuaaucuuuucac

SEQ ID NO: 1872479 - RNA, 17 nt, Human
ugugacacauaugcacc

SEQ ID NO: 1872480 - RNA, 22 nt, Human
ugugacacauaugcaccuugug

SEQ ID NO: 1872481 - RNA, 13 nt, Human
ugucugcccccuc

SEQ ID NO: 1872482 - RNA, 17 nt, Human
uguaaucauauaauaaa

SEQ ID NO: 1872483 - RNA, 17 nt, Human
uguaaaauuucacuuaa

SEQ ID NO: 1872484 - RNA, 17 nt, Human
uguagauaauacaguuc

SEQ ID NO: 1872485 - RNA, 17 nt, Human
uguacugagccuuguaa

SEQ ID NO: 1872486 - RNA, 22 nt, Human
uguacugagccuuguaauucua

SEQ ID NO: 1872487 - RNA, 19 nt, Human
uguacugagccuuguaauu

SEQ ID NO: 1872488 - RNA, 20 nt, Human
uguacugagccuuguaauuc

SEQ ID NO: 1872489 - RNA, 14 nt, Human
uguauuuauaaaua

SEQ ID NO: 1872490 - RNA, 21 nt, Human
uguauuuauaaauauauuuaa

SEQ ID NO: 1872491 - RNA, 14 nt, Human
uguguagccugugc

SEQ ID NO: 1872492 - RNA, 15 nt, Human
uguuacauuauuauc

SEQ ID NO: 1872493 - RNA, 19 nt, Human
uguuuacacucuuuguaag

SEQ ID NO: 1872494 - RNA, 16 nt, Human
uguuuacacucuuugu

SEQ ID NO: 1872495 - RNA, 18 nt, Human
uguuuacacucuuuguaa

SEQ ID NO: 1872496 - RNA, 12 nt, Human
uuacauggcucu

SEQ ID NO: 1872497 - RNA, 22 nt, Human
uuaaugucaauucuugccaaau

SEQ ID NO: 1872498 - RNA, 14 nt, Human
uuaauuauuauucu

SEQ ID NO: 1872499 - RNA, 17 nt, Human
uuaauuauuauucuuca

SEQ ID NO: 1872500 - RNA, 14 nt, Human
uuaauuauuauuua

SEQ ID NO: 1872501 - RNA, 13 nt, Human
uuaaugcuaaggg

SEQ ID NO: 1872502 - RNA, 21 nt, Human
uuaaugcuaagggcaggccca

SEQ ID NO: 1872503 - RNA, 11 nt, Human
uuaaaacaaga

SEQ ID NO: 1872504 - RNA, 19 nt, Human
uuaaaacaagaaaguuucc

SEQ ID NO: 1872505 - RNA, 20 nt, Human
uuaaaacaagaaaguuuccc

SEQ ID NO: 1872506 - RNA, 17 nt, Human
uggcgccuccgagggac

SEQ ID NO: 1872507 - RNA, 13 nt, Human
uggccagagagcc

SEQ ID NO: 1872508 - RNA, 23 nt, Human
uggccagagagccuggugcugcu

SEQ ID NO: 1872509 - RNA, 15 nt, Human
uggaaccaggcuugg

SEQ ID NO: 1872510 - RNA, 14 nt, Human
uggaauguaaucaa

SEQ ID NO: 1872511 - RNA, 19 nt, Human
ugcacauauggacucugca

SEQ ID NO: 1872512 - RNA, 14 nt, Human
ugcacauauggacu

SEQ ID NO: 1872513 - RNA, 15 nt, Human
ugcacauauggacuc

SEQ ID NO: 1872514 - RNA, 17 nt, Human
ugcacauauggacucug

SEQ ID NO: 1872515 - RNA, 18 nt, Human
ugcacauauggacucugc

SEQ ID NO: 1872516 - RNA, 20 nt, Human
ugaaggcuggcaugauccaa

SEQ ID NO: 1872517 - RNA, 14 nt, Human
ugcagccagaggca

SEQ ID NO: 1872518 - RNA, 13 nt, Human
ugcagccagaggc

SEQ ID NO: 1872519 - RNA, 11 nt, Human
ugcagccagag

SEQ ID NO: 1872520 - RNA, 15 nt, Human
ugcauuuuuuaaaac

SEQ ID NO: 1872521 - RNA, 17 nt, Human
ugcauuuuuuaaaacaa

SEQ ID NO: 1872522 - RNA, 19 nt, Human
ugcauuuuuuaaaacaaga

SEQ ID NO: 1872523 - RNA, 15 nt, Human
ugccuagaggcccca

SEQ ID NO: 1872524 - RNA, 22 nt, Human
ugccuggccuggcacacaucag

SEQ ID NO: 1872525 - RNA, 17 nt, Human
ugccuggccuggcacac

SEQ ID NO: 1872526 - RNA, 20 nt, Human
ugccuggccuggcacacauc

SEQ ID NO: 1872527 - RNA, 16 nt, Human
ugccuggccuggcaca

SEQ ID NO: 1872528 - RNA, 21 nt, Human
ugcugaugaacucuuaaucaa

SEQ ID NO: 1872529 - RNA, 16 nt, Human
ugcguggacucugcac

SEQ ID NO: 1872530 - RNA, 17 nt, Human
ugcguggacucugcaca

SEQ ID NO: 1872531 - RNA, 23 nt, Human
ugcgugguguggagugugugucu

SEQ ID NO: 1872532 - RNA, 18 nt, Human
ugcguggacucugcacau

SEQ ID NO: 1872533 - RNA, 22 nt, Human
ugcguggacucugcacaugucu

SEQ ID NO: 1872534 - RNA, 17 nt, Human
ucuucuagguucuaaaa

SEQ ID NO: 1872535 - RNA, 16 nt, Human
ucuugugacuagugcu

SEQ ID NO: 1872536 - RNA, 18 nt, Human
ucuugugacuagugcuga

SEQ ID NO: 1872537 - RNA, 19 nt, Human
ucuugugacuagugcugaa

SEQ ID NO: 1872538 - RNA, 21 nt, Human
ucuugugacuagugcugaagc

SEQ ID NO: 1872539 - RNA, 22 nt, Human
ucuugugacuagugcugaagcu

SEQ ID NO: 1872540 - RNA, 11 nt, Human
ucuugugacua

SEQ ID NO: 1872541 - RNA, 14 nt, Human
ucuugugacuagug

SEQ ID NO: 1872542 - RNA, 21 nt, Human
ucugcacaugucuuguacaug

SEQ ID NO: 1872543 - RNA, 22 nt, Human
ucugcacaugucuuguacaugu

SEQ ID NO: 1872544 - RNA, 19 nt, Human
ucuuuucuggaauguaauc

SEQ ID NO: 1872545 - RNA, 19 nt, Human
ucuuucaauaaacuaaaga

SEQ ID NO: 1872546 - RNA, 20 nt, Human
ucuuucaauaaacuaaagaa

SEQ ID NO: 1872547 - RNA, 21 nt, Human
ucuuucaauaaacuaaagaaa

SEQ ID NO: 1872548 - RNA, 22 nt, Human
ugaacuuguaaaggaauuuaaa

SEQ ID NO: 1872549 - RNA, 16 nt, Human
ugaaggcuggcaugau

SEQ ID NO: 1872550 - RNA, 13 nt, Human
ugaaggcuggcau

SEQ ID NO: 1872551 - RNA, 12 nt, Human
ugaaggcuggca

SEQ ID NO: 1872552 - RNA, 11 nt, Human
ugaaggcuggc

SEQ ID NO: 1872553 - RNA, 19 nt, Human
ugaaauggacuuuuguaca

SEQ ID NO: 1872554 - RNA, 21 nt, Human
ugaacucuuaaucaaauagca

SEQ ID NO: 1872555 - RNA, 21 nt, Human
uccuguaguugcguggacucu

SEQ ID NO: 1872556 - RNA, 22 nt, Human
uccuguaguugcguggacucug

SEQ ID NO: 1872557 - RNA, 23 nt, Human
uccuguaguugcguggacucugc

SEQ ID NO: 1872558 - RNA, 22 nt, Human
ucuaguacuugggagaccugua

SEQ ID NO: 1872559 - RNA, 20 nt, Human
ucugcacaugucuuguacau

SEQ ID NO: 1872560 - RNA, 10 nt, Human
ucauucagca

SEQ ID NO: 1872561 - RNA, 19 nt, Human
uccagaaggagacaggcag

SEQ ID NO: 1872562 - RNA, 14 nt, Human
uccagaaggagaca

SEQ ID NO: 1872563 - RNA, 20 nt, Human
uccacuucuuucagcagacu

SEQ ID NO: 1872564 - RNA, 13 nt, Human
ucagcagacugau

SEQ ID NO: 1872565 - RNA, 17 nt, Human
ucacuugugcaguguug

SEQ ID NO: 1872566 - RNA, 12 nt, Human
uauuuuuuaauu

SEQ ID NO: 1872567 - RNA, 15 nt, Human
uauuuuuuaauuauu

SEQ ID NO: 1872568 - RNA, 13 nt, Human
ucaagcuaauaaa

SEQ ID NO: 1872569 - RNA, 19 nt, Human
ucaagcuaauaaaauauca

SEQ ID NO: 1872570 - RNA, 20 nt, Human
ucaagcuaauaaaauaucau

SEQ ID NO: 1872571 - RNA, 22 nt, Human
ucaagcuaauaaaauaucauuc

SEQ ID NO: 1872572 - RNA, 23 nt, Human
ucaagcuaauaaaauaucauuca

SEQ ID NO: 1872573 - RNA, 23 nt, Human
guuuccuuucauuuacuguggcu

SEQ ID NO: 1872574 - RNA, 17 nt, Human
guuuccuuucauuuacu

SEQ ID NO: 1872575 - RNA, 20 nt, Human
guuuccuuucauuuacugug

SEQ ID NO: 1872576 - RNA, 17 nt, Human
guuuccuuccagcccag

SEQ ID NO: 1872577 - RNA, 14 nt, Human
uaaaggaauuuaaa

SEQ ID NO: 1872578 - RNA, 17 nt, Human
uaaauaaaaauaauccu

SEQ ID NO: 1872579 - RNA, 18 nt, Human
uaaauauaugcuaagucu

SEQ ID NO: 1872580 - RNA, 17 nt, Human
uaaauauauuuaagaua

SEQ ID NO: 1872581 - RNA, 22 nt, Human
uaaauauauuuaagauaauuau

SEQ ID NO: 1872582 - RNA, 12 nt, Human
uaagauaauuau

SEQ ID NO: 1872583 - RNA, 13 nt, Human
uaagauaauuaua

SEQ ID NO: 1872584 - RNA, 16 nt, Human
uaauauacuauauuua

SEQ ID NO: 1872585 - RNA, 17 nt, Human
uaauaaauguacauuaa

SEQ ID NO: 1872586 - RNA, 19 nt, Human
uaauaaauguacauuaauu

SEQ ID NO: 1872587 - RNA, 18 nt, Human
uaauugguccgaucuuug

SEQ ID NO: 1872588 - RNA, 15 nt, Human
uacuguggcuucuua

SEQ ID NO: 1872589 - RNA, 21 nt, Human
uacuugggagaccuguaauca

SEQ ID NO: 1872590 - RNA, 23 nt, Human
uacuugggagaccuguaaucaua

SEQ ID NO: 1872591 - RNA, 19 nt, Human
uacugagccuuguaauucu

SEQ ID NO: 1872592 - RNA, 23 nt, Human
uacugagccuuguaauucuaaau

SEQ ID NO: 1872593 - RNA, 15 nt, Human
uacugagccuuguaa

SEQ ID NO: 1872594 - RNA, 18 nt, Human
uacugagccuuguaauuc

SEQ ID NO: 1872595 - RNA, 22 nt, Human
uaccaaucauuuuaauuauuau

SEQ ID NO: 1872596 - RNA, 15 nt, Human
uaccaaucauuuuaa

SEQ ID NO: 1872597 - RNA, 19 nt, Human
uaccaaucauuuuaauuau

SEQ ID NO: 1872598 - RNA, 20 nt, Human
uaccaaucauuuuaauuauu

SEQ ID NO: 1872599 - RNA, 13 nt, Human
uacagaauuuuau

SEQ ID NO: 1872600 - RNA, 22 nt, Human
uacacugugacuuaagaagccu

SEQ ID NO: 1872601 - RNA, 14 nt, Human
uacaggauuugaaa

SEQ ID NO: 1872602 - RNA, 15 nt, Human
uacacacauccacgc

SEQ ID NO: 1872603 - RNA, 21 nt, Human
uagcuccccgcuucugccugc

SEQ ID NO: 1872604 - RNA, 15 nt, Human
uagcagacaguguuu

SEQ ID NO: 1872605 - RNA, 17 nt, Human
uauauggccucaagauc

SEQ ID NO: 1872606 - RNA, 21 nt, Human
uagucacauggccuaugcaca

SEQ ID NO: 1872607 - RNA, 23 nt, Human
uagucacauggccuaugcacaua

SEQ ID NO: 1872608 - RNA, 12 nt, Human
uagugcugaagc

SEQ ID NO: 1872609 - RNA, 14 nt, Human
uagugcugaagcuu

SEQ ID NO: 1872610 - RNA, 15 nt, Human
uagugcugaagcuua

SEQ ID NO: 1872611 - RNA, 17 nt, Human
uagugcugaagcuuauu

SEQ ID NO: 1872612 - RNA, 18 nt, Human
uagugcugaagcuuauua

SEQ ID NO: 1872613 - RNA, 22 nt, Human
uagugcugaagcuuauuaaugc

SEQ ID NO: 1872614 - RNA, 19 nt, Human
uagugcugaagcuuauuaa

SEQ ID NO: 1872615 - RNA, 16 nt, Human
uauacuauauuuaugg

SEQ ID NO: 1872616 - RNA, 15 nt, Human
uauaaauauauuuaa

SEQ ID NO: 1872617 - RNA, 22 nt, Human
ggcaccugccacccugggccug

SEQ ID NO: 1872618 - RNA, 13 nt, Human
ggccacgcagcca

SEQ ID NO: 1872619 - RNA, 14 nt, Human
ggccacgcagccag

SEQ ID NO: 1872620 - RNA, 15 nt, Human
ggccacgcagccagg

SEQ ID NO: 1872621 - RNA, 16 nt, Human
ggccacgcagccagga

SEQ ID NO: 1872622 - RNA, 18 nt, Human
ggccacgcagccaggaca

SEQ ID NO: 1872623 - RNA, 19 nt, Human
ggccacgcagccaggacac

SEQ ID NO: 1872624 - RNA, 15 nt, Human
ggagccgggccgcag

SEQ ID NO: 1872625 - RNA, 21 nt, Human
ggacucugcacaugucuugua

SEQ ID NO: 1872626 - RNA, 15 nt, Human
ggacucugcacauga

SEQ ID NO: 1872627 - RNA, 20 nt, Human
ggacucugcacaugucuugu

SEQ ID NO: 1872628 - RNA, 13 nt, Human
ggacucugcacau

SEQ ID NO: 1872629 - RNA, 21 nt, Human
ggagaccuggacacaggccug

SEQ ID NO: 1872630 - RNA, 13 nt, Human
ggagauggaguuc

SEQ ID NO: 1872631 - RNA, 21 nt, Human
ggaaccguaggacccaagcag

SEQ ID NO: 1872632 - RNA, 16 nt, Human
ggaaccguaggaccca

SEQ ID NO: 1872633 - RNA, 20 nt, Human
ggaagaucucugcagggccg

SEQ ID NO: 1872634 - RNA, 19 nt, Human
ggaagaucucugcagggcc

SEQ ID NO: 1872635 - RNA, 20 nt, Human
ggaaaaaauaacaaugaaag

SEQ ID NO: 1872636 - RNA, 22 nt, Human
ggcuugaguuuaaauuguaaua

SEQ ID NO: 1872637 - RNA, 12 nt, Human
gggcaccugcca

SEQ ID NO: 1872638 - RNA, 14 nt, Human
gggcacccucccac

SEQ ID NO: 1872639 - RNA, 23 nt, Human
gggcacaggugucugcccccucu

SEQ ID NO: 1872640 - RNA, 23 nt, Human
gggcagggccgcccgggcccaga

SEQ ID NO: 1872641 - RNA, 15 nt, Human
gggcagggcucccac

SEQ ID NO: 1872642 - RNA, 18 nt, Human
gggcagggcucccacaga

SEQ ID NO: 1872643 - RNA, 13 nt, Human
gggcagggcagcc

SEQ ID NO: 1872644 - RNA, 14 nt, Human
gggcagggccgccc

SEQ ID NO: 1872645 - RNA, 22 nt, Human
gggcagggccgcccgggcccag

SEQ ID NO: 1872646 - RNA, 12 nt, Human
gggcccagagga

SEQ ID NO: 1872647 - RNA, 14 nt, Human
gggcccagaggagc

SEQ ID NO: 1872648 - RNA, 15 nt, Human
gggugaaggcuggca

SEQ ID NO: 1872649 - RNA, 14 nt, Human
gggugaaggcuggc

SEQ ID NO: 1872650 - RNA, 13 nt, Human
gggugaaggcugg

SEQ ID NO: 1872651 - RNA, 12 nt, Human
gggugaaggcug

SEQ ID NO: 1872652 - RNA, 17 nt, Human
ggucagaaacaggaccg

SEQ ID NO: 1872653 - RNA, 16 nt, Human
ggucagaaacaggacc

SEQ ID NO: 1872654 - RNA, 15 nt, Human
ggucagaaacaggac

SEQ ID NO: 1872655 - RNA, 18 nt, Human
ggucagaaacaggaccgg

SEQ ID NO: 1872656 - RNA, 15 nt, Human
gcgaccuuggccgca

SEQ ID NO: 1872657 - RNA, 15 nt, Human
gccgggccgcagacu

SEQ ID NO: 1872658 - RNA, 21 nt, Human
gcccaggugaguccuagagcu

SEQ ID NO: 1872659 - RNA, 23 nt, Human
gcccacaaaggcaaaggguccag

SEQ ID NO: 1872660 - RNA, 17 nt, Human
gcccaaauuaucaagcu

SEQ ID NO: 1872661 - RNA, 19 nt, Human
gcccaaauuaucaagcuaa

SEQ ID NO: 1872662 - RNA, 20 nt, Human
gcccaaauuaucaagcuaau

SEQ ID NO: 1872663 - RNA, 21 nt, Human
gcccaaauuaucaagcuaaua

SEQ ID NO: 1872664 - RNA, 21 nt, Human
gccacgugggcaaacaggcag

SEQ ID NO: 1872665 - RNA, 19 nt, Human
gccacugacugcagggaca

SEQ ID NO: 1872666 - RNA, 18 nt, Human
gccacugacugcagggac

SEQ ID NO: 1872667 - RNA, 14 nt, Human
gccagcguggcgca

SEQ ID NO: 1872668 - RNA, 16 nt, Human
gccagcguggcgcagu

SEQ ID NO: 1872669 - RNA, 13 nt, Human
gcauucuaguacu

SEQ ID NO: 1872670 - RNA, 21 nt, Human
gcacaugucuuguacaugugu

SEQ ID NO: 1872671 - RNA, 13 nt, Human
gcacaugucuugu

SEQ ID NO: 1872672 - RNA, 20 nt, Human
gcacaugucuuguacaugug

SEQ ID NO: 1872673 - RNA, 20 nt, Human
gcaggagcacacccagcccc

SEQ ID NO: 1872674 - RNA, 17 nt, Human
gcaggagcacacccagc

SEQ ID NO: 1872675 - RNA, 16 nt, Human
gcaggagcacacccag

SEQ ID NO: 1872676 - RNA, 13 nt, Human
gcagccuggcucc

SEQ ID NO: 1872677 - RNA, 19 nt, Human
gcagccuggcucccaggac

SEQ ID NO: 1872678 - RNA, 20 nt, Human
gcagccuggcucccaggaca

SEQ ID NO: 1872679 - RNA, 21 nt, Human
gcagccuggcucccaggacac

SEQ ID NO: 1872680 - RNA, 20 nt, Human
gauuucauuucaacuguuug

SEQ ID NO: 1872681 - RNA, 13 nt, Human
gauuucaugauuu

SEQ ID NO: 1872682 - RNA, 21 nt, Human
gauuucauuucaacuguuugc

SEQ ID NO: 1872683 - RNA, 15 nt, Human
gcaaacccagacggc

SEQ ID NO: 1872684 - RNA, 17 nt, Human
gauaggucagugcaaau

SEQ ID NO: 1872685 - RNA, 14 nt, Human
gauaauuauaauau

SEQ ID NO: 1872686 - RNA, 22 nt, Human
gaguucaauaaaugucuguuga

SEQ ID NO: 1872687 - RNA, 23 nt, Human
gaagucucuuuuuuuggcccagg

SEQ ID NO: 1872688 - RNA, 16 nt, Human
gaacucaacuuugaca

SEQ ID NO: 1872689 - RNA, 16 nt, Human
gaaauuguauuacaaa

SEQ ID NO: 1872690 - RNA, 18 nt, Human
gaaauuguauuacaaauc

SEQ ID NO: 1872691 - RNA, 20 nt, Human
gacgugggcugggcccacaa

SEQ ID NO: 1872692 - RNA, 13 nt, Human
gacgugggcuggg

SEQ ID NO: 1872693 - RNA, 18 nt, Human
gacggcuccacuaggacu

SEQ ID NO: 1872694 - RNA, 12 nt, Human
gacggcuccacu

SEQ ID NO: 1872695 - RNA, 19 nt, Human
gaccugguccacagggcac

SEQ ID NO: 1872696 - RNA, 18 nt, Human
gaccugguccacagggca

SEQ ID NO: 1872697 - RNA, 17 nt, Human
gaccugguccacagggc

SEQ ID NO: 1872698 - RNA, 12 nt, Human
gaccuguaauca

SEQ ID NO: 1872699 - RNA, 18 nt, Human
gaccuggcacuggaugca

SEQ ID NO: 1872700 - RNA, 22 nt, Human
gaccuggcacuggaugcagaaa

SEQ ID NO: 1872701 - RNA, 15 nt, Human
gacugaucaggaccu

SEQ ID NO: 1872702 - RNA, 23 nt, Human
gacugaccugguccacagggcac

SEQ ID NO: 1872703 - RNA, 22 nt, Human
gacugaccugguccacagggca

SEQ ID NO: 1872704 - RNA, 20 nt, Human
gacugaccugguccacaggg

SEQ ID NO: 1872705 - RNA, 19 nt, Human
gacugaccugguccacagg

SEQ ID NO: 1872706 - RNA, 15 nt, Human
gacugaccuggucca

SEQ ID NO: 1872707 - RNA, 17 nt, Human
gaccccgacgccacagc

SEQ ID NO: 1872708 - RNA, 18 nt, Human
gaccccgacgccacagcc

SEQ ID NO: 1872709 - RNA, 21 nt, Human
gaccccgacgccacagcccag

SEQ ID NO: 1872710 - RNA, 12 nt, Human
gaccacaccugc

SEQ ID NO: 1872711 - RNA, 16 nt, Human
gaccacaccugccucu

SEQ ID NO: 1872712 - RNA, 15 nt, Human
gacaguucauaugua

SEQ ID NO: 1872713 - RNA, 17 nt, Human
gacaguucauauguacc

SEQ ID NO: 1872714 - RNA, 20 nt, Human
gacacgggcagccuggcucc

SEQ ID NO: 1872715 - RNA, 17 nt, Human
gacacgggcagccuggc

SEQ ID NO: 1872716 - RNA, 20 nt, Human
cuugcuugauuguauggugg

SEQ ID NO: 1872717 - RNA, 22 nt, Human
cuuguuucaauuccaccugcaa

SEQ ID NO: 1872718 - RNA, 12 nt, Human
cuuguuucaauu

SEQ ID NO: 1872719 - RNA, 13 nt, Human
cuuguaauucuaa

SEQ ID NO: 1872720 - RNA, 15 nt, Human
cuuguaauucuaaau

SEQ ID NO: 1872721 - RNA, 16 nt, Human
cuuguaauucuaaaug

SEQ ID NO: 1872722 - RNA, 23 nt, Human
cuuguaauucuaaaugaauguuu

SEQ ID NO: 1872723 - RNA, 13 nt, Human
cuuggacacugua

SEQ ID NO: 1872724 - RNA, 19 nt, Human
gaaaauaacaauaaaagac

SEQ ID NO: 1872725 - RNA, 20 nt, Human
cuuucugaagccucacuuau

SEQ ID NO: 1872726 - RNA, 19 nt, Human
cuucgggcuggccaucugg

SEQ ID NO: 1872727 - RNA, 13 nt, Human
cuuccagcccaga

SEQ ID NO: 1872728 - RNA, 13 nt, Human
cuuauaauuuaaa

SEQ ID NO: 1872729 - RNA, 14 nt, Human
cuuauaauuuaaaa

SEQ ID NO: 1872730 - RNA, 15 nt, Human
cucuaauaucagcaa

SEQ ID NO: 1872731 - RNA, 14 nt, Human
cucucccauuuccu

SEQ ID NO: 1872732 - RNA, 19 nt, Human
cucugccacugacugcagg

SEQ ID NO: 1872733 - RNA, 20 nt, Human
cucauugcuuggaauucagc

SEQ ID NO: 1872734 - RNA, 17 nt, Human
cuccucacucaccuuca

SEQ ID NO: 1872735 - RNA, 23 nt, Human
cuggaauaauccuaaacauauga

SEQ ID NO: 1872736 - RNA, 14 nt, Human
cuggaauguaauca

SEQ ID NO: 1872737 - RNA, 15 nt, Human
cuggaauguaaucaa

SEQ ID NO: 1872738 - RNA, 20 nt, Human
cuggaauguaaucaauguuu

SEQ ID NO: 1872739 - RNA, 21 nt, Human
cuggaauguaaucaauguuuc

SEQ ID NO: 1872740 - RNA, 21 nt, Human
cuggcacacaucaggaguuca

SEQ ID NO: 1872741 - RNA, 12 nt, Human
cuggcacacauc

SEQ ID NO: 1872742 - RNA, 20 nt, Human
cuggcacugacugggcauag

SEQ ID NO: 1872743 - RNA, 14 nt, Human
cuggugcugcugcu

SEQ ID NO: 1872744 - RNA, 14 nt, Human
cugggaggccagug

SEQ ID NO: 1872745 - RNA, 16 nt, Human
cugggcacccucccac

SEQ ID NO: 1872746 - RNA, 17 nt, Human
cugggcacccucccacc

SEQ ID NO: 1872747 - RNA, 21 nt, Human
cugggcacccucccacccggc

SEQ ID NO: 1872748 - RNA, 15 nt, Human
cugcacaagccaggg

SEQ ID NO: 1872749 - RNA, 18 nt, Human
cugcacaagccagggugu

SEQ ID NO: 1872750 - RNA, 19 nt, Human
cugcacaagccagggugug

SEQ ID NO: 1872751 - RNA, 22 nt, Human
cugcacaagccagggugugucu

SEQ ID NO: 1872752 - RNA, 15 nt, Human
cugcagggacacggg

SEQ ID NO: 1872753 - RNA, 20 nt, Human
cugcagggacacgggcagcc

SEQ ID NO: 1872754 - RNA, 24 nt, Human
cugcucucuuuuucuccaggguca

SEQ ID NO: 1872755 - RNA, 20 nt, Human
cugcucucuuuuucuccagg

SEQ ID NO: 1872756 - RNA, 21 nt, Human
cugcuccccucugcacggacc

SEQ ID NO: 1872757 - RNA, 19 nt, Human
cugcagggccgccagggag

SEQ ID NO: 1872758 - RNA, 18 nt, Human
cugcagggccgccaggga

SEQ ID NO: 1872759 - RNA, 13 nt, Human
ccuagaggcccca

SEQ ID NO: 1872760 - RNA, 15 nt, Human
ccgcuucugccugca

SEQ ID NO: 1872761 - RNA, 18 nt, Human
ccggcugcauacccgggc

SEQ ID NO: 1872762 - RNA, 22 nt, Human
ccggcugcauacccgggcaggg

SEQ ID NO: 1872763 - RNA, 20 nt, Human
ccgggcccagaggagcuggg

SEQ ID NO: 1872764 - RNA, 13 nt, Human
ccgggcccagagg

SEQ ID NO: 1872765 - RNA, 16 nt, Human
ccgggcccagaggagc

SEQ ID NO: 1872766 - RNA, 10 nt, Human
ccgggcccag

SEQ ID NO: 1872767 - RNA, 23 nt, Human
ccguuuccuuucauuuacugugg

SEQ ID NO: 1872768 - RNA, 15 nt, Human
ccuaaagcagccagc

SEQ ID NO: 1872769 - RNA, 14 nt, Human
ccuaaagcagccag

SEQ ID NO: 1872770 - RNA, 14 nt, Human
cccuuggcugggac

SEQ ID NO: 1872771 - RNA, 14 nt, Human
cccuuucuggcucu

SEQ ID NO: 1872772 - RNA, 14 nt, Human
ccgcccgggcccag

SEQ ID NO: 1872773 - RNA, 15 nt, Human
ccgcccgggcccaga

SEQ ID NO: 1872774 - RNA, 16 nt, Human
ccgcccgggcccagag

SEQ ID NO: 1872775 - RNA, 20 nt, Human
ccccacuggacugaccuggu

SEQ ID NO: 1872776 - RNA, 19 nt, Human
ccccacuggacugaccugg

SEQ ID NO: 1872777 - RNA, 12 nt, Human
ccccacuggacu

SEQ ID NO: 1872778 - RNA, 19 nt, Human
ccucugugugcuccuccuu

SEQ ID NO: 1872779 - RNA, 11 nt, Human
ccucagggcac

SEQ ID NO: 1872780 - RNA, 15 nt, Human
ccuccuggcccaggu

SEQ ID NO: 1872781 - RNA, 16 nt, Human
ccugugccuccaucag

SEQ ID NO: 1872782 - RNA, 14 nt, Human
ccugugcauguaug

SEQ ID NO: 1872783 - RNA, 17 nt, Human
ccugugcauguaugucu

SEQ ID NO: 1872784 - RNA, 20 nt, Human
ccugugcauguaugucuugg

SEQ ID NO: 1872785 - RNA, 22 nt, Human
ccuguccucccagcuccucacu

SEQ ID NO: 1872786 - RNA, 13 nt, Human
ccuguccucccag

SEQ ID NO: 1872787 - RNA, 12 nt, Human
ccuggugcugcu

SEQ ID NO: 1872788 - RNA, 13 nt, Human
ccuggugcugcug

SEQ ID NO: 1872789 - RNA, 18 nt, Human
ccuguaguugcguggacu

SEQ ID NO: 1872790 - RNA, 19 nt, Human
ccuguaguugcguggacuc

SEQ ID NO: 1872791 - RNA, 20 nt, Human
ccuguaguugcguggacucu

SEQ ID NO: 1872792 - RNA, 22 nt, Human
ccuucaguaacccccacuggac

SEQ ID NO: 1872793 - RNA, 16 nt, Human
ccuucaguaaccccca

SEQ ID NO: 1872794 - RNA, 14 nt, Human
cggggcagggcagc

SEQ ID NO: 1872795 - RNA, 14 nt, Human
cggacgcuggcucc

SEQ ID NO: 1872796 - RNA, 15 nt, Human
cggacgcuggcuccc

SEQ ID NO: 1872797 - RNA, 13 nt, Human
cgggcagccuggc

SEQ ID NO: 1872798 - RNA, 14 nt, Human
cgggcagccuggcu

SEQ ID NO: 1872799 - RNA, 16 nt, Human
cgggcagccuggcucc

SEQ ID NO: 1872800 - RNA, 18 nt, Human
cgggcagccuggcuccca

SEQ ID NO: 1872801 - RNA, 22 nt, Human
cgggcagccuggcucccaggac

SEQ ID NO: 1872802 - RNA, 23 nt, Human
cgggcagccuggcucccaggaca

SEQ ID NO: 1872803 - RNA, 15 nt, Human
cgggcagggcuccca

SEQ ID NO: 1872804 - RNA, 16 nt, Human
cgggcagggcucccac

SEQ ID NO: 1872805 - RNA, 17 nt, Human
cgggcagggcucccaca

SEQ ID NO: 1872806 - RNA, 14 nt, Human
ccuuucuggcucuc

SEQ ID NO: 1872807 - RNA, 15 nt, Human
ccuuggccgcaccua

SEQ ID NO: 1872808 - RNA, 22 nt, Human
cgaggaaacgaaacccacucua

SEQ ID NO: 1872809 - RNA, 20 nt, Human
cgaggaaacgaaacccacuc

SEQ ID NO: 1872810 - RNA, 14 nt, Human
cgcgaccuuggccg

SEQ ID NO: 1872811 - RNA, 23 nt, Human
ccaucugguuaggauggcaggac

SEQ ID NO: 1872812 - RNA, 22 nt, Human
ccaucugguuaggauggcagga

SEQ ID NO: 1872813 - RNA, 21 nt, Human
ccaggugaguccuagagcuac

SEQ ID NO: 1872814 - RNA, 12 nt, Human
ccaggcuuggaa

SEQ ID NO: 1872815 - RNA, 20 nt, Human
ccaggcauccuccacaauag

SEQ ID NO: 1872816 - RNA, 14 nt, Human
ccaggacaccgggc

SEQ ID NO: 1872817 - RNA, 18 nt, Human
ccaggacaccgggcaggg

SEQ ID NO: 1872818 - RNA, 20 nt, Human
cccaggugcagccagaggca

SEQ ID NO: 1872819 - RNA, 15 nt, Human
cccaggugcagccag

SEQ ID NO: 1872820 - RNA, 21 nt, Human
cccaggugcagccagaggcac

SEQ ID NO: 1872821 - RNA, 20 nt, Human
cccagccuggccacgcagcc

SEQ ID NO: 1872822 - RNA, 21 nt, Human
cccagccuggccacgcagcca

SEQ ID NO: 1872823 - RNA, 23 nt, Human
cccagccuggccacgcagccagg

SEQ ID NO: 1872824 - RNA, 22 nt, Human
cccagccuggccacgcagccag

SEQ ID NO: 1872825 - RNA, 18 nt, Human
cccaacacgcaggagcac

SEQ ID NO: 1872826 - RNA, 19 nt, Human
cccaaauuaucaagcuaau

SEQ ID NO: 1872827 - RNA, 20 nt, Human
cccaaauuaucaagcuaaua

SEQ ID NO: 1872828 - RNA, 21 nt, Human
cccaaauuaucaagcuaauaa

SEQ ID NO: 1872829 - RNA, 15 nt, Human
ccacaugugacacau

SEQ ID NO: 1872830 - RNA, 19 nt, Human
ccacaugugacacauaugc

SEQ ID NO: 1872831 - RNA, 19 nt, Human
ccacagggcaccugccacc

SEQ ID NO: 1872832 - RNA, 11 nt, Human
ccacagggcac

SEQ ID NO: 1872833 - RNA, 13 nt, Human
ccaacacgcagga

SEQ ID NO: 1872834 - RNA, 12 nt, Human
ccaagccacuga

SEQ ID NO: 1872835 - RNA, 13 nt, Human
ccaaguauuuugc

SEQ ID NO: 1872836 - RNA, 15 nt, Human
ccaagcaagacugag

SEQ ID NO: 1872837 - RNA, 19 nt, Human
cauuuccugagaccacaga

SEQ ID NO: 1872838 - RNA, 16 nt, Human
ccaaacagcugccucu

SEQ ID NO: 1872839 - RNA, 17 nt, Human herpesvirus 4 (Epstein-Barr virus)
cagaggacacgcugguc

SEQ ID NO: 1872840 - RNA, 17 nt, Human herpesvirus 4 (Epstein-Barr virus)
gggcagagaggcgggaa

SEQ ID NO: 1872841 - RNA, 17 nt, Human herpesvirus 4 (Epstein-Barr virus)
ugagauuuaacccaccc

SEQ ID NO: 1872842 - RNA, 17 nt, Human herpesvirus 4 (Epstein-Barr virus)
cgcccugucccuggagc

SEQ ID NO: 1872843 - RNA, 19 nt, Human herpesvirus 4 (Epstein-Barr virus)
ccccuggcggcccagcccg

SEQ ID NO: 1872844 - RNA, 10 nt, Human herpesvirus 4 (Epstein-Barr virus)
aaaauucagu

SEQ ID NO: 1872845 - RNA, 16 nt, Human herpesvirus 4 (Epstein-Barr virus)
cggagagggaugggcu

SEQ ID NO: 1872846 - RNA, 23 nt, Human herpesvirus 4 (Epstein-Barr virus)
gauccagggcccguuccaggcuc

SEQ ID NO: 1872847 - RNA, 16 nt, Human herpesvirus 4 (Epstein-Barr virus)
caaacagcagcagcag

SEQ ID NO: 1872848 - RNA, 15 nt, Human herpesvirus 4 (Epstein-Barr virus)
ugcauccgcaccaca

SEQ ID NO: 1872849 - RNA, 14 nt, Human herpesvirus 4 (Epstein-Barr virus)
acucaucucaaggg

SEQ ID NO: 1872850 - RNA, 23 nt, Human herpesvirus 4 (Epstein-Barr virus)
gcucgcccacacagcgccagcag

SEQ ID NO: 1872851 - RNA, 14 nt, Human herpesvirus 4 (Epstein-Barr virus)
gaccaaugccaaag

SEQ ID NO: 1872852 - RNA, 15 nt, Human herpesvirus 4 (Epstein-Barr virus)
ugacaucccaguucu

SEQ ID NO: 1872853 - RNA, 15 nt, Human herpesvirus 4 (Epstein-Barr virus)
acugcgagggggccu

SEQ ID NO: 1872854 - RNA, 22 nt, Human herpesvirus 4 (Epstein-Barr virus)
ggaggagcuccgugagcaggag

SEQ ID NO: 1872855 - RNA, 21 nt, Human herpesvirus 4 (Epstein-Barr virus)
gggcccagagugcuccggcug

SEQ ID NO: 1872856 - RNA, 22 nt, Human herpesvirus 4 (Epstein-Barr virus)
cucuugaagaucgugaggccug

SEQ ID NO: 1872857 - RNA, 18 nt, Human herpesvirus 4 (Epstein-Barr virus)
ccgacaaugagcggggag

SEQ ID NO: 1872858 - RNA, 22 nt, Human herpesvirus 4 (Epstein-Barr virus)
gacauugguguuccacagccug

SEQ ID NO: 1872859 - RNA, 22 nt, Human herpesvirus 4 (Epstein-Barr virus)
acccucgcgccccaucuuggcc

SEQ ID NO: 1872860 - RNA, 15 nt, Human herpesvirus 4 (Epstein-Barr virus)
uagccggccaggcag

SEQ ID NO: 1872861 - RNA, 15 nt, Human herpesvirus 4 (Epstein-Barr virus)
gauggcccugaucug

SEQ ID NO: 1872862 - RNA, 17 nt, Human herpesvirus 4 (Epstein-Barr virus)
cggaagggcaccguggg

SEQ ID NO: 1872863 - RNA, 15 nt, Human herpesvirus 4 (Epstein-Barr virus)
cagauccagggcccg

SEQ ID NO: 1872864 - RNA, 18 nt, Human herpesvirus 4 (Epstein-Barr virus)
accuauagauccugggcc

SEQ ID NO: 1872865 - RNA, 20 nt, Human herpesvirus 4 (Epstein-Barr virus)
gaaggcuccggcggcagugg

SEQ ID NO: 1872866 - RNA, 14 nt, Human herpesvirus 4 (Epstein-Barr virus)
gucuuugccaaccu

SEQ ID NO: 1872867 - RNA, 19 nt, Human herpesvirus 4 (Epstein-Barr virus)
cagcccggccgaggccugc

SEQ ID NO: 1872868 - RNA, 11 nt, Human herpesvirus 4 (Epstein-Barr virus)
gaggggggcag

SEQ ID NO: 1872869 - RNA, 14 nt, Human herpesvirus 4 (Epstein-Barr virus)
auuuagaaaccuug

SEQ ID NO: 1872870 - RNA, 18 nt, Human herpesvirus 4 (Epstein-Barr virus)
acugggcaucgggcuuug

SEQ ID NO: 1872871 - RNA, 12 nt, Human herpesvirus 4 (Epstein-Barr virus)
cccugggcucuc

SEQ ID NO: 1872872 - RNA, 17 nt, Human herpesvirus 4 (Epstein-Barr virus)
aggcgggaauggccgcc

SEQ ID NO: 1872873 - RNA, 17 nt, Human herpesvirus 4 (Epstein-Barr virus)
agaacggacugcggaga

SEQ ID NO: 1872874 - RNA, 18 nt, Human herpesvirus 4 (Epstein-Barr virus)
gccuggauguugacucca

SEQ ID NO: 1872875 - RNA, 21 nt, Human herpesvirus 4 (Epstein-Barr virus)
aauccuugggugaccuggcca

SEQ ID NO: 1872876 - RNA, 23 nt, Human herpesvirus 4 (Epstein-Barr virus)
aguggccgucuggcagggggccg

SEQ ID NO: 1872877 - RNA, 19 nt, Human herpesvirus 4 (Epstein-Barr virus)
gcccccucugccuccggcc

SEQ ID NO: 1872878 - RNA, 20 nt, Human herpesvirus 4 (Epstein-Barr virus)
cagagccucugccacaaggc

SEQ ID NO: 1872879 - RNA, 19 nt, Human herpesvirus 4 (Epstein-Barr virus)
cacggcgucaaacagguga

SEQ ID NO: 1872880 - RNA, 18 nt, Human herpesvirus 4 (Epstein-Barr virus)
aguccggagacugaggcc

SEQ ID NO: 1872881 - RNA, 17 nt, Human herpesvirus 4 (Epstein-Barr virus)
gggccuuccagagcucu

SEQ ID NO: 1872882 - RNA, 14 nt, Human herpesvirus 4 (Epstein-Barr virus)
cggcugugagcgca

SEQ ID NO: 1872883 - RNA, 17 nt, Human herpesvirus 4 (Epstein-Barr virus)
gccacgcaggauguuca

SEQ ID NO: 1872884 - RNA, 22 nt, Human herpesvirus 4 (Epstein-Barr virus)
ccaauguaucccaaauaaaugu

SEQ ID NO: 1872885 - RNA, 18 nt, Human herpesvirus 4 (Epstein-Barr virus)
ggcccuuugccuggggcu

SEQ ID NO: 1872886 - RNA, 16 nt, Human herpesvirus 4 (Epstein-Barr virus)
ugaucugggagaugag

SEQ ID NO: 1872887 - RNA, 14 nt, Human herpesvirus 4 (Epstein-Barr virus)
aacuucagcuccag

SEQ ID NO: 1872888 - RNA, 19 nt, Human herpesvirus 4 (Epstein-Barr virus)
auacucaucugugagacaa

SEQ ID NO: 1872889 - RNA, 22 nt, Human herpesvirus 4 (Epstein-Barr virus)
augcaacaauagaaguggaaac

SEQ ID NO: 1872890 - RNA, 21 nt, Human herpesvirus 4 (Epstein-Barr virus)
cacccuaaaacguaugaccuc

SEQ ID NO: 1872891 - RNA, 13 nt, Human herpesvirus 4 (Epstein-Barr virus)
ugugugacaugcu

SEQ ID NO: 1872892 - RNA, 21 nt, Human herpesvirus 4 (Epstein-Barr virus)
ugggugaccacugagggagug

SEQ ID NO: 1872893 - RNA, 17 nt, Human herpesvirus 4 (Epstein-Barr virus)
agaaugaugguggggga

SEQ ID NO: 1872894 - RNA, 18 nt, Human herpesvirus 4 (Epstein-Barr virus)
ccucagcccccccugugc

SEQ ID NO: 1872895 - RNA, 20 nt, Human herpesvirus 4 (Epstein-Barr virus)
ugaccucccgcccugagcug

SEQ ID NO: 1872896 - RNA, 16 nt, Human herpesvirus 4 (Epstein-Barr virus)
ccugggggccuguguc

SEQ ID NO: 1872897 - RNA, 20 nt, Human herpesvirus 4 (Epstein-Barr virus)
cacaccauccacagccccac

SEQ ID NO: 1872898 - RNA, 19 nt, Human herpesvirus 4 (Epstein-Barr virus)
cccuucugcugcugcuggu

SEQ ID NO: 1872899 - RNA, 16 nt, Human herpesvirus 4 (Epstein-Barr virus)
gugagcccaccugucu

SEQ ID NO: 1872900 - RNA, 17 nt, Human herpesvirus 4 (Epstein-Barr virus)
acaccgagcagaaggcc

SEQ ID NO: 1872901 - RNA, 22 nt, Human herpesvirus 4 (Epstein-Barr virus)
gacagcagcguccuggccccau

SEQ ID NO: 1872902 - RNA, 22 nt, Human herpesvirus 4 (Epstein-Barr virus)
cagcgucaggaaguacagccgg

SEQ ID NO: 1872903 - RNA, 13 nt, Human herpesvirus 4 (Epstein-Barr virus)
cuccguggccccg

SEQ ID NO: 1872904 - RNA, 16 nt, Human herpesvirus 4 (Epstein-Barr virus)
cgugaucaugagggcu

SEQ ID NO: 1872905 - RNA, 16 nt, Human herpesvirus 4 (Epstein-Barr virus)
aggagcaggaggggca

SEQ ID NO: 1872906 - RNA, 15 nt, Human herpesvirus 4 (Epstein-Barr virus)
ggccucgguggcagu

SEQ ID NO: 1872907 - RNA, 21 nt, Human herpesvirus 4 (Epstein-Barr virus)
ucgcacucuuguugcuagccu

SEQ ID NO: 1872908 - RNA, 16 nt, Human herpesvirus 4 (Epstein-Barr virus)
aggcggcuguggccuc

SEQ ID NO: 1872909 - RNA, 15 nt, Human herpesvirus 4 (Epstein-Barr virus)
caugcaggccuggac

SEQ ID NO: 1872910 - RNA, 22 nt, Human herpesvirus 4 (Epstein-Barr virus)
gccagaaucgguaaggaggggc

SEQ ID NO: 1872911 - RNA, 19 nt, Human herpesvirus 4 (Epstein-Barr virus)
cccagccuacucuccacuc

SEQ ID NO: 1872912 - RNA, 20 nt, Human herpesvirus 4 (Epstein-Barr virus)
cuaaggcaguccaggggcca

SEQ ID NO: 1872913 - RNA, 15 nt, Human herpesvirus 4 (Epstein-Barr virus)
cccaggggucucuag

SEQ ID NO: 1872914 - RNA, 15 nt, Human herpesvirus 4 (Epstein-Barr virus)
aacuuuguccagaug

SEQ ID NO: 1872915 - RNA, 16 nt, Human herpesvirus 4 (Epstein-Barr virus)
ggacccuauggagggc

SEQ ID NO: 1872916 - RNA, 19 nt, Human herpesvirus 4 (Epstein-Barr virus)
gcucuggucgcccccucug

SEQ ID NO: 1872917 - RNA, 23 nt, Human herpesvirus 4 (Epstein-Barr virus)
ugccuguggccccggcuggccau

SEQ ID NO: 1872918 - RNA, 19 nt, Human herpesvirus 4 (Epstein-Barr virus)
cugcagugggccucucugg

SEQ ID NO: 1872919 - RNA, 18 nt, Human herpesvirus 4 (Epstein-Barr virus)
ugcuaugaccaugcccag

SEQ ID NO: 1872920 - RNA, 22 nt, Human herpesvirus 4 (Epstein-Barr virus)
agugggccucucuggcugugcu

SEQ ID NO: 1872921 - RNA, 18 nt, Human herpesvirus 4 (Epstein-Barr virus)
cagggugcacagacuagc

SEQ ID NO: 1872922 - RNA, 17 nt, Human herpesvirus 4 (Epstein-Barr virus)
auugguguuccacagcc

SEQ ID NO: 1872923 - RNA, 19 nt, Human herpesvirus 4 (Epstein-Barr virus)
uguucacugcguagaugag

SEQ ID NO: 1872924 - RNA, 22 nt, Human herpesvirus 4 (Epstein-Barr virus)
cggcuagccugacuaaggguga

SEQ ID NO: 1872925 - RNA, 17 nt, Human herpesvirus 4 (Epstein-Barr virus)
cagaggaggccccggcc

SEQ ID NO: 1872926 - RNA, 15 nt, Human herpesvirus 4 (Epstein-Barr virus)
caaaagggcucugac

SEQ ID NO: 1872927 - RNA, 20 nt, Human herpesvirus 4 (Epstein-Barr virus)
gcugcuggucauggcggacu

SEQ ID NO: 1872928 - RNA, 17 nt, Human herpesvirus 4 (Epstein-Barr virus)
uacccggucgcauggug

SEQ ID NO: 1872929 - RNA, 18 nt, Human herpesvirus 4 (Epstein-Barr virus)
ggcccagcccuccucaga

SEQ ID NO: 1872930 - RNA, 17 nt, Human herpesvirus 4 (Epstein-Barr virus)
accccagagcagcccgc

SEQ ID NO: 1872931 - RNA, 14 nt, Human herpesvirus 4 (Epstein-Barr virus)
ccuggccagggcgg

SEQ ID NO: 1872932 - RNA, 20 nt, Human herpesvirus 4 (Epstein-Barr virus)
guagucguuguucagggccg

SEQ ID NO: 1872933 - RNA, 19 nt, Human herpesvirus 4 (Epstein-Barr virus)
ccgcagguggcugcugcca

SEQ ID NO: 1872934 - RNA, 21 nt, Human herpesvirus 4 (Epstein-Barr virus)
gggcaggcccccagcuucuga

SEQ ID NO: 1872935 - RNA, 23 nt, Human herpesvirus 4 (Epstein-Barr virus)
augccccccguaaaacuccacag

SEQ ID NO: 1872936 - RNA, 21 nt, Human herpesvirus 4 (Epstein-Barr virus)
gcguaggucuauggggacccu

SEQ ID NO: 1872937 - RNA, 21 nt, Human herpesvirus 4 (Epstein-Barr virus)
gugacgaagacccaucugagg

SEQ ID NO: 1872938 - RNA, 12 nt, Human herpesvirus 4 (Epstein-Barr virus)
aauaaaguugau

SEQ ID NO: 1872939 - RNA, 20 nt, Human herpesvirus 4 (Epstein-Barr virus)
aguaggcacaucuggaccug

SEQ ID NO: 1872940 - RNA, 20 nt, Human herpesvirus 4 (Epstein-Barr virus)
cuggcuuucguccucuggcu

SEQ ID NO: 1872941 - RNA, 16 nt, Human herpesvirus 4 (Epstein-Barr virus)
gaaucuaguaugaagg

SEQ ID NO: 1872942 - RNA, 15 nt, Human herpesvirus 4 (Epstein-Barr virus)
gcagcuucuccagcg

SEQ ID NO: 1872943 - RNA, 15 nt, Human herpesvirus 4 (Epstein-Barr virus)
cagggccuugagccc

SEQ ID NO: 1872944 - RNA, 16 nt, Human herpesvirus 4 (Epstein-Barr virus)
aucucuugcgcccagg

SEQ ID NO: 1872945 - RNA, 13 nt, Human herpesvirus 4 (Epstein-Barr virus)
ccagcccgacccc

SEQ ID NO: 1872946 - RNA, 14 nt, Human herpesvirus 4 (Epstein-Barr virus)
gaggacgugaguga

SEQ ID NO: 1872947 - RNA, 14 nt, Human herpesvirus 4 (Epstein-Barr virus)
ugacccacuccagu

SEQ ID NO: 1872948 - RNA, 22 nt, Human herpesvirus 4 (Epstein-Barr virus)
ccuccaagcggcacagauuaga

SEQ ID NO: 1872949 - RNA, 15 nt, Human herpesvirus 4 (Epstein-Barr virus)
cagccagagccagcc

SEQ ID NO: 1872950 - RNA, 18 nt, Human herpesvirus 4 (Epstein-Barr virus)
gcugccgucccagggccg

SEQ ID NO: 1872951 - RNA, 17 nt, Human herpesvirus 4 (Epstein-Barr virus)
uacccucuuagggaggu

SEQ ID NO: 1872952 - RNA, 21 nt, Human herpesvirus 4 (Epstein-Barr virus)
ccaggaggaggacgugaguga

SEQ ID NO: 1872953 - RNA, 16 nt, Human herpesvirus 4 (Epstein-Barr virus)
ugcuggccgcagcugg

SEQ ID NO: 1872954 - RNA, 15 nt, Human herpesvirus 4 (Epstein-Barr virus)
gaaaauauauugcaa

SEQ ID NO: 1872955 - RNA, 15 nt, Human herpesvirus 4 (Epstein-Barr virus)
gccuacgcagaggcc

SEQ ID NO: 1872956 - RNA, 22 nt, Human herpesvirus 4 (Epstein-Barr virus)
cccuccucugggccgcccggcc

SEQ ID NO: 1872957 - RNA, 21 nt, Human herpesvirus 4 (Epstein-Barr virus)
guccagaagcagauagccggc

SEQ ID NO: 1872958 - RNA, 17 nt, Human herpesvirus 4 (Epstein-Barr virus)
gcacugcguccaccugg

SEQ ID NO: 1872959 - RNA, 18 nt, Human herpesvirus 4 (Epstein-Barr virus)
acgugcccagcuccgugg

SEQ ID NO: 1872960 - RNA, 17 nt, Human herpesvirus 4 (Epstein-Barr virus)
acugggggcaaagccag

SEQ ID NO: 1872961 - RNA, 17 nt, Human herpesvirus 4 (Epstein-Barr virus)
ggaaaugagggaauuug

SEQ ID NO: 1872962 - RNA, 13 nt, Human herpesvirus 4 (Epstein-Barr virus)
cggcggcugcugc

SEQ ID NO: 1872963 - RNA, 18 nt, Human herpesvirus 4 (Epstein-Barr virus)
gaccggcuacgcgggcca

SEQ ID NO: 1872964 - RNA, 11 nt, Human herpesvirus 4 (Epstein-Barr virus)
ugcgcgccgcc

SEQ ID NO: 1872965 - RNA, 21 nt, Human herpesvirus 4 (Epstein-Barr virus)
gccgucucaaacggggaagga

SEQ ID NO: 1872966 - RNA, 19 nt, Human herpesvirus 4 (Epstein-Barr virus)
gcuagaagugcugggaggu

SEQ ID NO: 1872967 - RNA, 13 nt, Human herpesvirus 4 (Epstein-Barr virus)
ucucaucuccaaa

SEQ ID NO: 1872968 - RNA, 16 nt, Human herpesvirus 4 (Epstein-Barr virus)
auguuuucuggacaca

SEQ ID NO: 1872969 - RNA, 22 nt, Human herpesvirus 4 (Epstein-Barr virus)
cauguaacaagaacugggauga

SEQ ID NO: 1872970 - RNA, 20 nt, Human herpesvirus 4 (Epstein-Barr virus)
gcaccgauagcauggccgcc

SEQ ID NO: 1872971 - RNA, 14 nt, Human herpesvirus 4 (Epstein-Barr virus)
agauugucacagcu

SEQ ID NO: 1872972 - RNA, 14 nt, Human herpesvirus 4 (Epstein-Barr virus)
cgcccccugaccuc

SEQ ID NO: 1872973 - RNA, 20 nt, Human herpesvirus 4 (Epstein-Barr virus)
ugucggcucucuuugaagug

SEQ ID NO: 1872974 - RNA, 18 nt, Human herpesvirus 4 (Epstein-Barr virus)
uccggagacugaggccuu

SEQ ID NO: 1872975 - RNA, 16 nt, Human herpesvirus 4 (Epstein-Barr virus)
agcaggacggggggcu

SEQ ID NO: 1872976 - RNA, 17 nt, Human herpesvirus 4 (Epstein-Barr virus)
ugucucggccuccuggc

SEQ ID NO: 1872977 - RNA, 15 nt, Human herpesvirus 4 (Epstein-Barr virus)
cucggccacacagug

SEQ ID NO: 1872978 - RNA, 22 nt, Human herpesvirus 4 (Epstein-Barr virus)
gugaggacggugucugugguug

SEQ ID NO: 1872979 - RNA, 15 nt, Human herpesvirus 4 (Epstein-Barr virus)
ugcacccggacaugu

SEQ ID NO: 1872980 - RNA, 17 nt, Human herpesvirus 4 (Epstein-Barr virus)
aaacagaggcuggaugc

SEQ ID NO: 1872981 - RNA, 16 nt, Human herpesvirus 4 (Epstein-Barr virus)
gucgcuggcugguggg

SEQ ID NO: 1872982 - RNA, 14 nt, Human herpesvirus 4 (Epstein-Barr virus)
gagcauggcggccu

SEQ ID NO: 1872983 - RNA, 17 nt, Human herpesvirus 4 (Epstein-Barr virus)
gccuucugcguccagac

SEQ ID NO: 1872984 - RNA, 21 nt, Human herpesvirus 4 (Epstein-Barr virus)
uccacagauggagagauuuca

SEQ ID NO: 1872985 - RNA, 21 nt, Human herpesvirus 4 (Epstein-Barr virus)
ccuccacccagcagcagcccg

SEQ ID NO: 1872986 - RNA, 15 nt, Human herpesvirus 4 (Epstein-Barr virus)
uuccgucagccaggg

SEQ ID NO: 1872987 - RNA, 21 nt, Human herpesvirus 4 (Epstein-Barr virus)
ggcccacgccauaccugcacg

SEQ ID NO: 1872988 - RNA, 16 nt, Human herpesvirus 4 (Epstein-Barr virus)
aacugcgagggggccu

SEQ ID NO: 1872989 - RNA, 18 nt, Human herpesvirus 4 (Epstein-Barr virus)
gcauuacaccaucccaug

SEQ ID NO: 1872990 - RNA, 13 nt, Human herpesvirus 4 (Epstein-Barr virus)
ggacccugcugcg

SEQ ID NO: 1872991 - RNA, 12 nt, Human herpesvirus 4 (Epstein-Barr virus)
ugucugacuugg

SEQ ID NO: 1872992 - RNA, 14 nt, Human herpesvirus 4 (Epstein-Barr virus)
cuagagguuuugcu

SEQ ID NO: 1872993 - RNA, 13 nt, Human herpesvirus 4 (Epstein-Barr virus)
cacgacuguuccu

SEQ ID NO: 1872994 - RNA, 20 nt, Human herpesvirus 4 (Epstein-Barr virus)
gccucuggcacgccguggcc

SEQ ID NO: 1872995 - RNA, 21 nt, Human herpesvirus 4 (Epstein-Barr virus)
acgcccaguaugcagucucaa

SEQ ID NO: 1872996 - RNA, 20 nt, Human herpesvirus 4 (Epstein-Barr virus)
aguuguccugggcugccccg

SEQ ID NO: 1872997 - RNA, 16 nt, Human herpesvirus 4 (Epstein-Barr virus)
ccuacaccaccccacc

SEQ ID NO: 1872998 - RNA, 19 nt, Human herpesvirus 4 (Epstein-Barr virus)
ucgagaaccccagcaacau

SEQ ID NO: 1872999 - RNA, 18 nt, Human herpesvirus 4 (Epstein-Barr virus)
gauagugaacguggaggu

SEQ ID NO: 1873000 - RNA, 19 nt, Human herpesvirus 4 (Epstein-Barr virus)
cggcccuuugccuggggcu

SEQ ID NO: 1873001 - RNA, 19 nt, Human herpesvirus 4 (Epstein-Barr virus)
ucaaagaacaaggccaaga

SEQ ID NO: 1873002 - RNA, 17 nt, Human herpesvirus 4 (Epstein-Barr virus)
ugccuccccagcaacag

SEQ ID NO: 1873003 - RNA, 17 nt, Human herpesvirus 4 (Epstein-Barr virus)
ggaggccucaggcaaca

SEQ ID NO: 1873004 - RNA, 15 nt, Human herpesvirus 4 (Epstein-Barr virus)
aucucuauugccucu

SEQ ID NO: 1873005 - RNA, 14 nt, Human herpesvirus 4 (Epstein-Barr virus)
caucuggcucuccu

SEQ ID NO: 1873006 - RNA, 17 nt, Human herpesvirus 4 (Epstein-Barr virus)
ccauucgugaguccagg

SEQ ID NO: 1873007 - RNA, 15 nt, Human herpesvirus 4 (Epstein-Barr virus)
uccgaugcccaccag

SEQ ID NO: 1873008 - RNA, 17 nt, Human herpesvirus 4 (Epstein-Barr virus)
ggccaucgcaagcuccu

SEQ ID NO: 1873009 - RNA, 11 nt, Human herpesvirus 4 (Epstein-Barr virus)
ccggugguggg

SEQ ID NO: 1873010 - RNA, 22 nt, Human herpesvirus 4 (Epstein-Barr virus)
cccgagaccggcuccggauuca

SEQ ID NO: 1873011 - RNA, 15 nt, Human herpesvirus 4 (Epstein-Barr virus)
uaacauuggcagcag

SEQ ID NO: 1873012 - RNA, 15 nt, Human herpesvirus 4 (Epstein-Barr virus)
gaacugacgcuccag

SEQ ID NO: 1873013 - RNA, 16 nt, Human herpesvirus 4 (Epstein-Barr virus)
cgcugcucgccccugg

SEQ ID NO: 1873014 - RNA, 14 nt, Human herpesvirus 4 (Epstein-Barr virus)
cuccccucugcaga

SEQ ID NO: 1873015 - RNA, 14 nt, Human herpesvirus 4 (Epstein-Barr virus)
ugggccaggucaca

SEQ ID NO: 1873016 - RNA, 17 nt, Human herpesvirus 4 (Epstein-Barr virus)
ccuaggagaaggagccu

SEQ ID NO: 1873017 - RNA, 14 nt, Human herpesvirus 4 (Epstein-Barr virus)
cugcccagccuacu

SEQ ID NO: 1873018 - RNA, 18 nt, Human herpesvirus 4 (Epstein-Barr virus)
ggaugcaucuaaggucca

SEQ ID NO: 1873019 - RNA, 20 nt, Human herpesvirus 4 (Epstein-Barr virus)
cucaaggcagucuccaccuu

SEQ ID NO: 1873020 - RNA, 18 nt, Human herpesvirus 4 (Epstein-Barr virus)
caaccaauguaucccaaa

SEQ ID NO: 1873021 - RNA, 10 nt, Human herpesvirus 4 (Epstein-Barr virus)
agcaggagga

SEQ ID NO: 1873022 - RNA, 19 nt, Human herpesvirus 4 (Epstein-Barr virus)
agauagccggccaggcaga

SEQ ID NO: 1873023 - RNA, 21 nt, Human herpesvirus 4 (Epstein-Barr virus)
ucccaaguguuuccagacacc

SEQ ID NO: 1873024 - RNA, 22 nt, Human herpesvirus 4 (Epstein-Barr virus)
cccggggguggaggcugcgccu

SEQ ID NO: 1873025 - RNA, 21 nt, Human herpesvirus 4 (Epstein-Barr virus)
uugcucuguguuuuuugccug

SEQ ID NO: 1873026 - RNA, 14 nt, Human herpesvirus 4 (Epstein-Barr virus)
gggcgccccagggc

SEQ ID NO: 1873027 - RNA, 21 nt, Human herpesvirus 4 (Epstein-Barr virus)
caaggacgggggugggcaccu

SEQ ID NO: 1873028 - RNA, 13 nt, Human herpesvirus 4 (Epstein-Barr virus)
gccugagagccgg

SEQ ID NO: 1873029 - RNA, 15 nt, Human herpesvirus 4 (Epstein-Barr virus)
gcugguuuggagaaa

SEQ ID NO: 1873030 - RNA, 23 nt, Human herpesvirus 4 (Epstein-Barr virus)
cuccucagaaaacucugcaugga

SEQ ID NO: 1873031 - RNA, 17 nt, Human herpesvirus 4 (Epstein-Barr virus)
ucuacgcggagcugcac

SEQ ID NO: 1873032 - RNA, 20 nt, Human herpesvirus 4 (Epstein-Barr virus)
ccaggccugccaaagagcca

SEQ ID NO: 1873033 - RNA, 20 nt, Human herpesvirus 4 (Epstein-Barr virus)
agaaaagagagcggcuguga

SEQ ID NO: 1873034 - RNA, 23 nt, Human herpesvirus 4 (Epstein-Barr virus)
gucucgccgcuaguugguccagg

SEQ ID NO: 1873035 - RNA, 22 nt, Human herpesvirus 4 (Epstein-Barr virus)
ccgagucaguuacacacacagu

SEQ ID NO: 1873036 - RNA, 14 nt, Human herpesvirus 4 (Epstein-Barr virus)
cgagggggccuggu

SEQ ID NO: 1873037 - RNA, 14 nt, Human herpesvirus 4 (Epstein-Barr virus)
cacugggacggggu

SEQ ID NO: 1873038 - RNA, 23 nt, Human herpesvirus 4 (Epstein-Barr virus)
aucaucucgcuggcucgccucau

SEQ ID NO: 1873039 - RNA, 11 nt, Human herpesvirus 4 (Epstein-Barr virus)
ugaccaacaug

SEQ ID NO: 1873040 - RNA, 18 nt, Human herpesvirus 4 (Epstein-Barr virus)
ggauugcugaacuggggc

SEQ ID NO: 1873041 - RNA, 21 nt, Human herpesvirus 4 (Epstein-Barr virus)
guccagcaggcucaggccgcc

SEQ ID NO: 1873042 - RNA, 14 nt, Human herpesvirus 4 (Epstein-Barr virus)
gaggccgagcaggg

SEQ ID NO: 1873043 - RNA, 16 nt, Human herpesvirus 4 (Epstein-Barr virus)
cacacucccuccagaa

SEQ ID NO: 1873044 - RNA, 21 nt, Human herpesvirus 4 (Epstein-Barr virus)
caaccuuuccaucacugaccc

SEQ ID NO: 1873045 - RNA, 18 nt, Human herpesvirus 4 (Epstein-Barr virus)
cagcgaccggcagauccc

SEQ ID NO: 1873046 - RNA, 19 nt, Human herpesvirus 4 (Epstein-Barr virus)
aacuggccaugcaggccug

SEQ ID NO: 1873047 - RNA, 20 nt, Human herpesvirus 4 (Epstein-Barr virus)
ugguagccggcgcugugugg

SEQ ID NO: 1873048 - RNA, 18 nt, Human herpesvirus 4 (Epstein-Barr virus)
ucaacuucagcuccaggg

SEQ ID NO: 1873049 - RNA, 15 nt, Human herpesvirus 4 (Epstein-Barr virus)
cuugggggugguggg

SEQ ID NO: 1873050 - RNA, 19 nt, Human herpesvirus 4 (Epstein-Barr virus)
acguacccauaacugggca

SEQ ID NO: 1873051 - RNA, 14 nt, Human herpesvirus 4 (Epstein-Barr virus)
gguuuggggcaggc

SEQ ID NO: 1873052 - RNA, 15 nt, Human herpesvirus 4 (Epstein-Barr virus)
ccugacggugguggg

SEQ ID NO: 1873053 - RNA, 21 nt, Human herpesvirus 4 (Epstein-Barr virus)
gaguccaacauuaaagccucc

SEQ ID NO: 1873054 - RNA, 17 nt, Human herpesvirus 4 (Epstein-Barr virus)
acgggcucccucccccu

SEQ ID NO: 1873055 - RNA, 21 nt, Human herpesvirus 4 (Epstein-Barr virus)
gauuucaaauaccgagaugua

SEQ ID NO: 1873056 - RNA, 16 nt, Human herpesvirus 4 (Epstein-Barr virus)
cgucuuacugcccagc

SEQ ID NO: 1873057 - RNA, 15 nt, Human herpesvirus 4 (Epstein-Barr virus)
ccaggguccaggaga

SEQ ID NO: 1873058 - RNA, 23 nt, Human herpesvirus 4 (Epstein-Barr virus)
gcugucacccaugccuccccagc

SEQ ID NO: 1873059 - RNA, 17 nt, Human herpesvirus 4 (Epstein-Barr virus)
cagcccgacccccgggc

SEQ ID NO: 1873060 - RNA, 13 nt, Human herpesvirus 4 (Epstein-Barr virus)
uggcuauggucau

SEQ ID NO: 1873061 - RNA, 14 nt, Human herpesvirus 4 (Epstein-Barr virus)
ugagcuggacgagg

SEQ ID NO: 1873062 - RNA, 21 nt, Human herpesvirus 4 (Epstein-Barr virus)
ccagcaaaaccagcccgggga

SEQ ID NO: 1873063 - RNA, 17 nt, Human herpesvirus 4 (Epstein-Barr virus)
cagcuccagggacaggg

SEQ ID NO: 1873064 - RNA, 18 nt, Human herpesvirus 4 (Epstein-Barr virus)
caggagguacaugggcca

SEQ ID NO: 1873065 - RNA, 15 nt, Human herpesvirus 4 (Epstein-Barr virus)
aaucucgcucagagc

SEQ ID NO: 1873066 - RNA, 16 nt, Human herpesvirus 4 (Epstein-Barr virus)
acgcgcagugccaaga

SEQ ID NO: 1873067 - RNA, 19 nt, Human herpesvirus 4 (Epstein-Barr virus)
uugaaaccacgccugcuuc

SEQ ID NO: 1873068 - RNA, 19 nt, Human herpesvirus 4 (Epstein-Barr virus)
cagagcccagaggaggccc

SEQ ID NO: 1873069 - RNA, 16 nt, Human herpesvirus 4 (Epstein-Barr virus)
auaacugccagagcug

SEQ ID NO: 1873070 - RNA, 18 nt, Human herpesvirus 4 (Epstein-Barr virus)
augaccaacaugagggca

SEQ ID NO: 1873071 - RNA, 19 nt, Human herpesvirus 4 (Epstein-Barr virus)
gucuccccucugcagagag

SEQ ID NO: 1873072 - RNA, 23 nt, Human herpesvirus 4 (Epstein-Barr virus)
gcuacacucuggggucucaggcc

SEQ ID NO: 1873073 - RNA, 16 nt, Human herpesvirus 4 (Epstein-Barr virus)
ucaccggcaccgccag

SEQ ID NO: 1873074 - RNA, 16 nt, Human herpesvirus 4 (Epstein-Barr virus)
agggugagcccaccug

SEQ ID NO: 1873075 - RNA, 21 nt, Human herpesvirus 4 (Epstein-Barr virus)
ugaacuggggcugguggccug

SEQ ID NO: 1873076 - RNA, 22 nt, Human herpesvirus 4 (Epstein-Barr virus)
caucugaaaaugacaggcugcg

SEQ ID NO: 1873077 - RNA, 20 nt, Human herpesvirus 4 (Epstein-Barr virus)
cgaaggugcagcuggcccac

SEQ ID NO: 1873078 - RNA, 23 nt, Human herpesvirus 4 (Epstein-Barr virus)
ucagcgagguuaagcugcaccug

SEQ ID NO: 1873079 - RNA, 21 nt, Human herpesvirus 4 (Epstein-Barr virus)
gguuugcccaacucuuauucu

SEQ ID NO: 1873080 - RNA, 23 nt, Human herpesvirus 4 (Epstein-Barr virus)
ccugagcuggacgagguccugga

SEQ ID NO: 1873081 - RNA, 19 nt, Human herpesvirus 4 (Epstein-Barr virus)
gagaggccucuggggucca

SEQ ID NO: 1873082 - RNA, 16 nt, Human herpesvirus 4 (Epstein-Barr virus)
cggcugcucccgccuc

SEQ ID NO: 1873083 - RNA, 13 nt, Human herpesvirus 4 (Epstein-Barr virus)
gaagggcagggcu

SEQ ID NO: 1873084 - RNA, 22 nt, Human herpesvirus 4 (Epstein-Barr virus)
agaagcggggcugggugggaga

SEQ ID NO: 1873085 - RNA, 21 nt, Human herpesvirus 4 (Epstein-Barr virus)
gcuuacaagaauaacaugcca

SEQ ID NO: 1873086 - RNA, 17 nt, Human herpesvirus 4 (Epstein-Barr virus)
acuccggggguccagcc

SEQ ID NO: 1873087 - RNA, 18 nt, Human herpesvirus 4 (Epstein-Barr virus)
gggcgcccccaaacuuug

SEQ ID NO: 1873088 - RNA, 17 nt, Human herpesvirus 4 (Epstein-Barr virus)
agagccccuuuugcccc

SEQ ID NO: 1873089 - RNA, 13 nt, Human herpesvirus 4 (Epstein-Barr virus)
gacgcuguuuugc

SEQ ID NO: 1873090 - RNA, 12 nt, Human herpesvirus 4 (Epstein-Barr virus)
ccgccgccgcag

SEQ ID NO: 1873091 - RNA, 22 nt, Human herpesvirus 4 (Epstein-Barr virus)
caguuucuuuccgcgguggugg

SEQ ID NO: 1873092 - RNA, 18 nt, Human herpesvirus 4 (Epstein-Barr virus)
cgggaggaaacaggagga

SEQ ID NO: 1873093 - RNA, 15 nt, Human herpesvirus 4 (Epstein-Barr virus)
caucucauccccaga

SEQ ID NO: 1873094 - RNA, 13 nt, Human herpesvirus 4 (Epstein-Barr virus)
aggacgaggaggc

SEQ ID NO: 1873095 - RNA, 19 nt, Human herpesvirus 4 (Epstein-Barr virus)
cagcagcucuggcacugcu

SEQ ID NO: 1873096 - RNA, 15 nt, Human herpesvirus 4 (Epstein-Barr virus)
gaaggcuugccaaaa

SEQ ID NO: 1873097 - RNA, 13 nt, Human herpesvirus 4 (Epstein-Barr virus)
auguuacuucuuu

SEQ ID NO: 1873098 - RNA, 15 nt, Human herpesvirus 4 (Epstein-Barr virus)
ggaacaccgggcagg

SEQ ID NO: 1873099 - RNA, 18 nt, Human herpesvirus 4 (Epstein-Barr virus)
guccaggggccacacagc

SEQ ID NO: 1873100 - RNA, 14 nt, Human herpesvirus 4 (Epstein-Barr virus)
ccccuaccucggca

SEQ ID NO: 1873101 - RNA, 23 nt, Human herpesvirus 4 (Epstein-Barr virus)
auucacugggacaacugucacac

SEQ ID NO: 1873102 - RNA, 14 nt, Human herpesvirus 4 (Epstein-Barr virus)
ccaccacucccacc

SEQ ID NO: 1873103 - RNA, 16 nt, Human herpesvirus 4 (Epstein-Barr virus)
gucucuuucuggccaa

SEQ ID NO: 1873104 - RNA, 12 nt, Human herpesvirus 4 (Epstein-Barr virus)
gcgugccaaacu

SEQ ID NO: 1873105 - RNA, 18 nt, Human herpesvirus 4 (Epstein-Barr virus)
ucaugcgugaccaccugg

SEQ ID NO: 1873106 - RNA, 14 nt, Human herpesvirus 4 (Epstein-Barr virus)
gcucaguggccguc

SEQ ID NO: 1873107 - RNA, 14 nt, Human herpesvirus 4 (Epstein-Barr virus)
cagaagacuccugc

SEQ ID NO: 1873108 - RNA, 20 nt, Human herpesvirus 4 (Epstein-Barr virus)
cccucggugggccagauacu

SEQ ID NO: 1873109 - RNA, 17 nt, Human herpesvirus 4 (Epstein-Barr virus)
cgaggcccugcaagcca

SEQ ID NO: 1873110 - RNA, 16 nt, Human herpesvirus 4 (Epstein-Barr virus)
agccagcgcacccggg

SEQ ID NO: 1873111 - RNA, 19 nt, Human herpesvirus 4 (Epstein-Barr virus)
uagccacccgucccgggua

SEQ ID NO: 1873112 - RNA, 22 nt, Human herpesvirus 4 (Epstein-Barr virus)
cuaauggaauauuaauaaauau

SEQ ID NO: 1873113 - RNA, 20 nt, Human herpesvirus 4 (Epstein-Barr virus)
cagcacgucgucagagaggu

SEQ ID NO: 1873114 - RNA, 15 nt, Human herpesvirus 4 (Epstein-Barr virus)
gaugcagcgcaucag

SEQ ID NO: 1873115 - RNA, 19 nt, Human herpesvirus 4 (Epstein-Barr virus)
agccccacucuugccucgg

SEQ ID NO: 1873116 - RNA, 14 nt, Human herpesvirus 4 (Epstein-Barr virus)
gauagauagccacc

SEQ ID NO: 1873117 - RNA, 15 nt, Human herpesvirus 4 (Epstein-Barr virus)
ggaacacccccaccc

SEQ ID NO: 1873118 - RNA, 23 nt, Human herpesvirus 4 (Epstein-Barr virus)
agauggacuugaggugggcugac

SEQ ID NO: 1873119 - RNA, 13 nt, Human herpesvirus 4 (Epstein-Barr virus)
gguggugggcugc

SEQ ID NO: 1873120 - RNA, 15 nt, Human herpesvirus 4 (Epstein-Barr virus)
aucagggccaagaca

SEQ ID NO: 1873121 - RNA, 16 nt, Human herpesvirus 4 (Epstein-Barr virus)
gguagauggcgagacu

SEQ ID NO: 1873122 - RNA, 23 nt, Human herpesvirus 4 (Epstein-Barr virus)
auggccuauggguuaccaggcau

SEQ ID NO: 1873123 - RNA, 23 nt, Human herpesvirus 4 (Epstein-Barr virus)
guuucggcgccgcccgggggcca

SEQ ID NO: 1873124 - RNA, 22 nt, Human herpesvirus 4 (Epstein-Barr virus)
uccaacgagggcagacaccacc

SEQ ID NO: 1873125 - RNA, 22 nt, Human herpesvirus 4 (Epstein-Barr virus)
ggcagaaccaucagcucgccca

SEQ ID NO: 1873126 - RNA, 15 nt, Human herpesvirus 4 (Epstein-Barr virus)
gaacauggaugugaa

SEQ ID NO: 1873127 - RNA, 16 nt, Human herpesvirus 4 (Epstein-Barr virus)
cagaggaggcuggugc

SEQ ID NO: 1873128 - RNA, 14 nt, Human herpesvirus 4 (Epstein-Barr virus)
cagcgcuggcucca

SEQ ID NO: 1873129 - RNA, 22 nt, Human herpesvirus 4 (Epstein-Barr virus)
cgcugauaaaguuguccugggc

SEQ ID NO: 1873130 - RNA, 18 nt, Human herpesvirus 4 (Epstein-Barr virus)
aguuguuauucccaccuc

SEQ ID NO: 1873131 - RNA, 22 nt, Human herpesvirus 4 (Epstein-Barr virus)
gacccuauggagggcagcgaag

SEQ ID NO: 1873132 - RNA, 13 nt, Human herpesvirus 4 (Epstein-Barr virus)
ugauggggacagg

SEQ ID NO: 1873133 - RNA, 18 nt, Human herpesvirus 4 (Epstein-Barr virus)
gcccccgccagcgccucc

SEQ ID NO: 1873134 - RNA, 12 nt, Human herpesvirus 4 (Epstein-Barr virus)
cuguagccaccc

SEQ ID NO: 1873135 - RNA, 16 nt, Human herpesvirus 4 (Epstein-Barr virus)
acgcuguccgccagga

SEQ ID NO: 1873136 - RNA, 12 nt, Human herpesvirus 4 (Epstein-Barr virus)
ucuccccucugc

SEQ ID NO: 1873137 - RNA, 13 nt, Human herpesvirus 4 (Epstein-Barr virus)
cgccugcuucacg

SEQ ID NO: 1873138 - RNA, 13 nt, Human herpesvirus 4 (Epstein-Barr virus)
ccaggcuccugga

SEQ ID NO: 1873139 - RNA, 11 nt, Human herpesvirus 4 (Epstein-Barr virus)
auggccaggcu

SEQ ID NO: 1873140 - RNA, 22 nt, Human herpesvirus 4 (Epstein-Barr virus)
cuuuguggccuuccucugccug

SEQ ID NO: 1873141 - RNA, 14 nt, Human herpesvirus 4 (Epstein-Barr virus)
cacggcccuccagc

SEQ ID NO: 1873142 - RNA, 20 nt, Human herpesvirus 4 (Epstein-Barr virus)
uucgggcaagauggagaggc

SEQ ID NO: 1873143 - RNA, 15 nt, Human herpesvirus 4 (Epstein-Barr virus)
cuggccgagcuggag

SEQ ID NO: 1873144 - RNA, 18 nt, Human herpesvirus 4 (Epstein-Barr virus)
gggccugagacuggaccc

SEQ ID NO: 1873145 - RNA, 20 nt, Human herpesvirus 4 (Epstein-Barr virus)
cuuggccagcggggagaggg

SEQ ID NO: 1873146 - RNA, 16 nt, Human herpesvirus 4 (Epstein-Barr virus)
cggcgugccagaggcc

SEQ ID NO: 1873147 - RNA, 22 nt, Human herpesvirus 4 (Epstein-Barr virus)
gccaauccaugccaauggggga

SEQ ID NO: 1873148 - RNA, 19 nt, Human herpesvirus 4 (Epstein-Barr virus)
gaaugacgggcucccuccc

SEQ ID NO: 1873149 - RNA, 18 nt, Human herpesvirus 4 (Epstein-Barr virus)
cagugccuccgccugagc

SEQ ID NO: 1873150 - RNA, 20 nt, Human herpesvirus 4 (Epstein-Barr virus)
cccguugguggucagcagca

SEQ ID NO: 1873151 - RNA, 18 nt, Human herpesvirus 4 (Epstein-Barr virus)
ccguuccaggcucuccag

SEQ ID NO: 1873152 - RNA, 21 nt, Human herpesvirus 4 (Epstein-Barr virus)
ccaggugugcuucuuuuuggu

SEQ ID NO: 1873153 - RNA, 18 nt, Human herpesvirus 4 (Epstein-Barr virus)
aucucugauuauagcucu

SEQ ID NO: 1873154 - RNA, 15 nt, Human herpesvirus 4 (Epstein-Barr virus)
cuaauucagccaccu

SEQ ID NO: 1873155 - RNA, 17 nt, Human herpesvirus 4 (Epstein-Barr virus)
aaacaggugagucagcc

SEQ ID NO: 1873156 - RNA, 12 nt, Human herpesvirus 4 (Epstein-Barr virus)
gcgcggcagagg

SEQ ID NO: 1873157 - RNA, 20 nt, Human herpesvirus 4 (Epstein-Barr virus)
cuacgagggccucuggcacg

SEQ ID NO: 1873158 - RNA, 22 nt, Human herpesvirus 4 (Epstein-Barr virus)
gcagccgcggccaucaccuggg

SEQ ID NO: 1873159 - RNA, 17 nt, Human herpesvirus 4 (Epstein-Barr virus)
gagacucaggcccucau

SEQ ID NO: 1873160 - RNA, 16 nt, Human herpesvirus 4 (Epstein-Barr virus)
acagcgccagcagggc

SEQ ID NO: 1873161 - RNA, 17 nt, Human herpesvirus 4 (Epstein-Barr virus)
guucagggacuuguccu

SEQ ID NO: 1873162 - RNA, 22 nt, Human herpesvirus 4 (Epstein-Barr virus)
ggcgcccugcgaguccaagcug

SEQ ID NO: 1873163 - RNA, 16 nt, Human herpesvirus 4 (Epstein-Barr virus)
aggccccggccgccgu

SEQ ID NO: 1873164 - RNA, 18 nt, Human herpesvirus 4 (Epstein-Barr virus)
cuguaauucuaugggaau

SEQ ID NO: 1873165 - RNA, 15 nt, Human herpesvirus 4 (Epstein-Barr virus)
caaacacgggccugg

SEQ ID NO: 1873166 - RNA, 17 nt, Human herpesvirus 4 (Epstein-Barr virus)
gcuccgugguccugagg

SEQ ID NO: 1873167 - RNA, 14 nt, Human herpesvirus 4 (Epstein-Barr virus)
agaucgugaggccu

SEQ ID NO: 1873168 - RNA, 13 nt, Human herpesvirus 4 (Epstein-Barr virus)
ccaggcuggugac

SEQ ID NO: 1873169 - RNA, 14 nt, Human herpesvirus 4 (Epstein-Barr virus)
guccugcugaaggg

SEQ ID NO: 1873170 - RNA, 20 nt, Human herpesvirus 4 (Epstein-Barr virus)
accuguccuugucugcugcc

SEQ ID NO: 1873171 - RNA, 17 nt, Human herpesvirus 4 (Epstein-Barr virus)
agcucggccagcaggcc

SEQ ID NO: 1873172 - RNA, 20 nt, Human herpesvirus 4 (Epstein-Barr virus)
ggugcugccugggggcuuug

SEQ ID NO: 1873173 - RNA, 15 nt, Human herpesvirus 4 (Epstein-Barr virus)
uggagcuggacggca

SEQ ID NO: 1873174 - RNA, 19 nt, Human herpesvirus 4 (Epstein-Barr virus)
aggaccauggaugugaaug

SEQ ID NO: 1873175 - RNA, 23 nt, Human herpesvirus 4 (Epstein-Barr virus)
caauguaucccaaauaaauguua

SEQ ID NO: 1873176 - RNA, 18 nt, Human herpesvirus 4 (Epstein-Barr virus)
ggaggaaaugaacccagg

SEQ ID NO: 1873177 - RNA, 16 nt, Human herpesvirus 4 (Epstein-Barr virus)
ccaggcgccgcagggg

SEQ ID NO: 1873178 - RNA, 21 nt, Human herpesvirus 4 (Epstein-Barr virus)
uauggugccggggcccacgug

SEQ ID NO: 1873179 - RNA, 14 nt, Human herpesvirus 4 (Epstein-Barr virus)
ugaggaaggggccu

SEQ ID NO: 1873180 - RNA, 19 nt, Human herpesvirus 4 (Epstein-Barr virus)
uggccucgucaggagggca

SEQ ID NO: 1873181 - RNA, 16 nt, Human herpesvirus 4 (Epstein-Barr virus)
guugucuucccagacu

SEQ ID NO: 1873182 - RNA, 19 nt, Human herpesvirus 4 (Epstein-Barr virus)
gccuguuuguccagcaggg

SEQ ID NO: 1873183 - RNA, 22 nt, Human herpesvirus 4 (Epstein-Barr virus)
cuccgaugcccaccagccagcg

SEQ ID NO: 1873184 - RNA, 12 nt, Human herpesvirus 4 (Epstein-Barr virus)
gcgccggugggg

SEQ ID NO: 1873185 - RNA, 14 nt, Human herpesvirus 4 (Epstein-Barr virus)
cugcguagaugagc

SEQ ID NO: 1873186 - RNA, 14 nt, Human herpesvirus 4 (Epstein-Barr virus)
accguggccaggcc

SEQ ID NO: 1873187 - RNA, 17 nt, Human herpesvirus 4 (Epstein-Barr virus)
gcucggccagcaggccg

SEQ ID NO: 1873188 - RNA, 16 nt, Human herpesvirus 4 (Epstein-Barr virus)
gucaucagccgcugcg

SEQ ID NO: 1873189 - RNA, 15 nt, Human herpesvirus 4 (Epstein-Barr virus)
gaacaggagcaggag

SEQ ID NO: 1873190 - RNA, 23 nt, Human herpesvirus 4 (Epstein-Barr virus)
auagauccugggccccccggagg

SEQ ID NO: 1873191 - RNA, 21 nt, Human herpesvirus 4 (Epstein-Barr virus)
aagcuggacgugaaccucccc

SEQ ID NO: 1873192 - RNA, 23 nt, Human herpesvirus 4 (Epstein-Barr virus)
cugaccucccgcccugagcugga

SEQ ID NO: 1873193 - RNA, 13 nt, Human herpesvirus 4 (Epstein-Barr virus)
gcuucuggcucuu

SEQ ID NO: 1873194 - RNA, 15 nt, Human herpesvirus 4 (Epstein-Barr virus)
cuacgcgggccacag

SEQ ID NO: 1873195 - RNA, 20 nt, Human herpesvirus 4 (Epstein-Barr virus)
caugacagucccguuggugg

SEQ ID NO: 1873196 - RNA, 20 nt, Human herpesvirus 4 (Epstein-Barr virus)
ccgguccccccagaagcccc

SEQ ID NO: 1873197 - RNA, 16 nt, Human herpesvirus 4 (Epstein-Barr virus)
ccucugaugguggccg

SEQ ID NO: 1873198 - RNA, 22 nt, Human herpesvirus 4 (Epstein-Barr virus)
ccuuggcgggucauccgccacc

SEQ ID NO: 1873199 - RNA, 13 nt, Human herpesvirus 4 (Epstein-Barr virus)
gcaacugcguccu

SEQ ID NO: 1873200 - RNA, 16 nt, Human herpesvirus 4 (Epstein-Barr virus)
gccacguccagacucc

SEQ ID NO: 1873201 - RNA, 14 nt, Human herpesvirus 4 (Epstein-Barr virus)
aacaagggaagagg

SEQ ID NO: 1873202 - RNA, 12 nt, Human herpesvirus 4 (Epstein-Barr virus)
cuauaaaaauuc

SEQ ID NO: 1873203 - RNA, 17 nt, Human herpesvirus 4 (Epstein-Barr virus)
gagggccuuccagagcu

SEQ ID NO: 1873204 - RNA, 17 nt, Human herpesvirus 4 (Epstein-Barr virus)
auggagaggggaguggg

SEQ ID NO: 1873205 - RNA, 17 nt, Human herpesvirus 4 (Epstein-Barr virus)
acucucucccccgggcg

SEQ ID NO: 1873206 - RNA, 15 nt, Human herpesvirus 4 (Epstein-Barr virus)
gcgcccuccucuggg

SEQ ID NO: 1873207 - RNA, 17 nt, Human herpesvirus 4 (Epstein-Barr virus)
cgccugcuucacgccuc

SEQ ID NO: 1873208 - RNA, 15 nt, Human herpesvirus 4 (Epstein-Barr virus)
aggaauucuuccaga

SEQ ID NO: 1873209 - RNA, 12 nt, Human herpesvirus 4 (Epstein-Barr virus)
ugcaaggacggg

SEQ ID NO: 1873210 - RNA, 15 nt, Human herpesvirus 4 (Epstein-Barr virus)
gggcuggggagauga

SEQ ID NO: 1873211 - RNA, 12 nt, Human herpesvirus 4 (Epstein-Barr virus)
ccaccacacagc

SEQ ID NO: 1873212 - RNA, 16 nt, Human herpesvirus 4 (Epstein-Barr virus)
ccacacucccuccaga

SEQ ID NO: 1873213 - RNA, 14 nt, Human herpesvirus 4 (Epstein-Barr virus)
ggaaacggcgagca

SEQ ID NO: 1873214 - RNA, 21 nt, Human herpesvirus 4 (Epstein-Barr virus)
aggagccucgccuugagggca

SEQ ID NO: 1873215 - RNA, 17 nt, Human herpesvirus 4 (Epstein-Barr virus)
ugcacgccaacagcgac

SEQ ID NO: 1873216 - RNA, 14 nt, Human herpesvirus 4 (Epstein-Barr virus)
aggccccggccgcc

SEQ ID NO: 1873217 - RNA, 16 nt, Human herpesvirus 4 (Epstein-Barr virus)
ggcggcugcugagacc

SEQ ID NO: 1873218 - RNA, 20 nt, Human herpesvirus 4 (Epstein-Barr virus)
ugcugcggcuaugcagccca

SEQ ID NO: 1873219 - RNA, 16 nt, Human herpesvirus 4 (Epstein-Barr virus)
auuuuauuuacagcca

SEQ ID NO: 1873220 - RNA, 21 nt, Human herpesvirus 4 (Epstein-Barr virus)
aacuggccaugcaggccugga

SEQ ID NO: 1873221 - RNA, 10 nt, Human herpesvirus 4 (Epstein-Barr virus)
ucucaggccu

SEQ ID NO: 1873222 - RNA, 22 nt, Human herpesvirus 4 (Epstein-Barr virus)
gucaugacaauuuuagaugagg

SEQ ID NO: 1873223 - RNA, 20 nt, Human herpesvirus 4 (Epstein-Barr virus)
cuucuggcacgacuguuccu

SEQ ID NO: 1873224 - RNA, 20 nt, Human herpesvirus 4 (Epstein-Barr virus)
ugacagcugucacccaugcc

SEQ ID NO: 1873225 - RNA, 18 nt, Human herpesvirus 4 (Epstein-Barr virus)
agguguccagcgcucugg

SEQ ID NO: 1873226 - RNA, 21 nt, Human herpesvirus 4 (Epstein-Barr virus)
aagcuacaaacacgggccugg

SEQ ID NO: 1873227 - RNA, 22 nt, Human herpesvirus 4 (Epstein-Barr virus)
cucauuucaguggcccucagaa

SEQ ID NO: 1873228 - RNA, 13 nt, Human herpesvirus 4 (Epstein-Barr virus)
aggagcuguuugg

SEQ ID NO: 1873229 - RNA, 20 nt, Human herpesvirus 4 (Epstein-Barr virus)
cugagcaagauccuucuggc

SEQ ID NO: 1873230 - RNA, 13 nt, Human herpesvirus 4 (Epstein-Barr virus)
caugcaggccugg

SEQ ID NO: 1873231 - RNA, 21 nt, Human herpesvirus 4 (Epstein-Barr virus)
uccagagaggcgcagcccagc

SEQ ID NO: 1873232 - RNA, 22 nt, Human herpesvirus 4 (Epstein-Barr virus)
agcacgguagccuugggggccu

SEQ ID NO: 1873233 - RNA, 19 nt, Human herpesvirus 4 (Epstein-Barr virus)
agcccccucccgccccugu

SEQ ID NO: 1873234 - RNA, 14 nt, Human herpesvirus 4 (Epstein-Barr virus)
ugagccacacccac

SEQ ID NO: 1873235 - RNA, 22 nt, Human herpesvirus 4 (Epstein-Barr virus)
agccacccgucccggguacaag

SEQ ID NO: 1873236 - RNA, 23 nt, Human herpesvirus 4 (Epstein-Barr virus)
uggcacacgccagagacaaggca

SEQ ID NO: 1873237 - RNA, 15 nt, Human herpesvirus 4 (Epstein-Barr virus)
ccucuuuuggcuggc

SEQ ID NO: 1873238 - RNA, 21 nt, Human herpesvirus 4 (Epstein-Barr virus)
cgccccgaugcggaggacugc

SEQ ID NO: 1873239 - RNA, 16 nt, Human herpesvirus 4 (Epstein-Barr virus)
agcagcuggauguaca

SEQ ID NO: 1873240 - RNA, 20 nt, Human herpesvirus 4 (Epstein-Barr virus)
caccggagccaccacagcac

SEQ ID NO: 1873241 - RNA, 16 nt, Human herpesvirus 4 (Epstein-Barr virus)
cugccuggggaaaaug

SEQ ID NO: 1873242 - RNA, 19 nt, Human herpesvirus 4 (Epstein-Barr virus)
ccagaguucccggcugcuc

SEQ ID NO: 1873243 - RNA, 21 nt, Human herpesvirus 4 (Epstein-Barr virus)
ucacaccccacggccaugcua

SEQ ID NO: 1873244 - RNA, 12 nt, Human herpesvirus 4 (Epstein-Barr virus)
guaugggggccc

SEQ ID NO: 1873245 - RNA, 18 nt, Human herpesvirus 4 (Epstein-Barr virus)
uggcggcuauugccgccu

SEQ ID NO: 1873246 - RNA, 21 nt, Human herpesvirus 4 (Epstein-Barr virus)
agugcaacaaucuggacucuc

SEQ ID NO: 1873247 - RNA, 16 nt, Human herpesvirus 4 (Epstein-Barr virus)
gcuuugcgaaaacgaa

SEQ ID NO: 1873248 - RNA, 15 nt, Human herpesvirus 4 (Epstein-Barr virus)
cuuucaguggucacc

SEQ ID NO: 1873249 - RNA, 20 nt, Human herpesvirus 4 (Epstein-Barr virus)
ugcgaggaacuggcucagcu

SEQ ID NO: 1873250 - RNA, 17 nt, Human herpesvirus 4 (Epstein-Barr virus)
uuuucugccccucagcc

SEQ ID NO: 1873251 - RNA, 13 nt, Human herpesvirus 4 (Epstein-Barr virus)
augagggaaaagg

SEQ ID NO: 1873252 - RNA, 14 nt, Human herpesvirus 4 (Epstein-Barr virus)
gaccuggaugcugu

SEQ ID NO: 1873253 - RNA, 14 nt, Human herpesvirus 4 (Epstein-Barr virus)
gcgagaaaaugagc

SEQ ID NO: 1873254 - RNA, 16 nt, Human herpesvirus 4 (Epstein-Barr virus)
cuucaggggaaucucu

SEQ ID NO: 1873255 - RNA, 15 nt, Human herpesvirus 4 (Epstein-Barr virus)
gcaacauccggggca

SEQ ID NO: 1873256 - RNA, 16 nt, Human herpesvirus 4 (Epstein-Barr virus)
ucagcuucgaggucuc

SEQ ID NO: 1873257 - RNA, 16 nt, Human herpesvirus 4 (Epstein-Barr virus)
cccuccgcauccuagg

SEQ ID NO: 1873258 - RNA, 13 nt, Human herpesvirus 4 (Epstein-Barr virus)
ugaggagcgccca

SEQ ID NO: 1873259 - RNA, 17 nt, Human herpesvirus 4 (Epstein-Barr virus)
acucccccaaacauguc

SEQ ID NO: 1873260 - RNA, 15 nt, Human herpesvirus 4 (Epstein-Barr virus)
uucccgacgccaaug

SEQ ID NO: 1873261 - RNA, 13 nt, Human herpesvirus 4 (Epstein-Barr virus)
ggcaaaccuccaa

SEQ ID NO: 1873262 - RNA, 13 nt, Human herpesvirus 4 (Epstein-Barr virus)
uagccccuaggcc

SEQ ID NO: 1873263 - RNA, 15 nt, Human herpesvirus 4 (Epstein-Barr virus)
caccaccccccccac

SEQ ID NO: 1873264 - RNA, 16 nt, Human herpesvirus 4 (Epstein-Barr virus)
ggaagacaacgaggua

SEQ ID NO: 1873265 - RNA, 14 nt, Human herpesvirus 4 (Epstein-Barr virus)
caguucuggugaug

SEQ ID NO: 1873266 - RNA, 18 nt, Human herpesvirus 4 (Epstein-Barr virus)
gcacgagaccccugggcu

SEQ ID NO: 1873267 - RNA, 15 nt, Human herpesvirus 4 (Epstein-Barr virus)
ccuuagccacacugu

SEQ ID NO: 1873268 - RNA, 22 nt, Human herpesvirus 4 (Epstein-Barr virus)
ccacggcgaccuguuccgcuuc

SEQ ID NO: 1873269 - RNA, 19 nt, Human herpesvirus 4 (Epstein-Barr virus)
cugcuucuggaccgugcca

SEQ ID NO: 1873270 - RNA, 16 nt, Human herpesvirus 4 (Epstein-Barr virus)
gucgcccccucugccu

SEQ ID NO: 1873271 - RNA, 14 nt, Human herpesvirus 4 (Epstein-Barr virus)
uuugcaaacaaacu

SEQ ID NO: 1873272 - RNA, 13 nt, Human herpesvirus 4 (Epstein-Barr virus)
gugccuccagagc

SEQ ID NO: 1873273 - RNA, 17 nt, Human herpesvirus 4 (Epstein-Barr virus)
ccucuagcaucugcuau

SEQ ID NO: 1873274 - RNA, 17 nt, Human herpesvirus 4 (Epstein-Barr virus)
acacuugugguucuccu

SEQ ID NO: 1873275 - RNA, 19 nt, Human herpesvirus 4 (Epstein-Barr virus)
cucccauguaagccugccu

SEQ ID NO: 1873276 - RNA, 19 nt, Human herpesvirus 4 (Epstein-Barr virus)
auuguaucucggucuuggc

SEQ ID NO: 1873277 - RNA, 15 nt, Human herpesvirus 4 (Epstein-Barr virus)
ccccgggagccacgg

SEQ ID NO: 1873278 - RNA, 18 nt, Human herpesvirus 4 (Epstein-Barr virus)
uaggugccuccagagccc

SEQ ID NO: 1873279 - RNA, 15 nt, Human herpesvirus 4 (Epstein-Barr virus)
ccagggacagggcgc

SEQ ID NO: 1873280 - RNA, 22 nt, Human herpesvirus 4 (Epstein-Barr virus)
ugcuucgcauuacaccauccca

SEQ ID NO: 1873281 - RNA, 17 nt, Human herpesvirus 4 (Epstein-Barr virus)
gugccagaugugccugg

SEQ ID NO: 1873282 - RNA, 16 nt, Human herpesvirus 4 (Epstein-Barr virus)
cuauagauccugggcc

SEQ ID NO: 1873283 - RNA, 15 nt, Human herpesvirus 4 (Epstein-Barr virus)
agcggccuccgccgu

SEQ ID NO: 1873284 - RNA, 22 nt, Human herpesvirus 4 (Epstein-Barr virus)
aggccgagucaguuacacacac

SEQ ID NO: 1873285 - RNA, 20 nt, Human herpesvirus 4 (Epstein-Barr virus)
ugggguccucaaggauggca

SEQ ID NO: 1873286 - RNA, 21 nt, Human herpesvirus 4 (Epstein-Barr virus)
cauucgugaguccagggcccu

SEQ ID NO: 1873287 - RNA, 15 nt, Human herpesvirus 4 (Epstein-Barr virus)
caaggugucaauaau

SEQ ID NO: 1873288 - RNA, 16 nt, Human herpesvirus 4 (Epstein-Barr virus)
gccauucgacaggcca

SEQ ID NO: 1873289 - RNA, 22 nt, Human herpesvirus 4 (Epstein-Barr virus)
cuggccaccacaucggacgggc

SEQ ID NO: 1873290 - RNA, 18 nt, Human herpesvirus 4 (Epstein-Barr virus)
aguugggguccucaagga

SEQ ID NO: 1873291 - RNA, 15 nt, Human herpesvirus 4 (Epstein-Barr virus)
agccagcgcacccgg

SEQ ID NO: 1873292 - RNA, 13 nt, Human herpesvirus 4 (Epstein-Barr virus)
cuccggcugcccg

SEQ ID NO: 1873293 - RNA, 18 nt, Human herpesvirus 4 (Epstein-Barr virus)
uagccuugggggccugga

SEQ ID NO: 1873294 - RNA, 16 nt, Human herpesvirus 4 (Epstein-Barr virus)
cuccucagucuuugca

SEQ ID NO: 1873295 - RNA, 19 nt, Human herpesvirus 4 (Epstein-Barr virus)
uugaucuuugacugacaca

SEQ ID NO: 1873296 - RNA, 22 nt, Human herpesvirus 4 (Epstein-Barr virus)
cuuccacccccuggagccagcg

SEQ ID NO: 1873297 - RNA, 13 nt, Human herpesvirus 4 (Epstein-Barr virus)
aagucaggauucu

SEQ ID NO: 1873298 - RNA, 21 nt, Human herpesvirus 4 (Epstein-Barr virus)
gccaaccugcucucucuggag

SEQ ID NO: 1873299 - RNA, 19 nt, Human herpesvirus 4 (Epstein-Barr virus)
cucuggcugugcugacccu

SEQ ID NO: 1873300 - RNA, 18 nt, Human herpesvirus 4 (Epstein-Barr virus)
cauuggcagcagcucugg

SEQ ID NO: 1873301 - RNA, 15 nt, Human herpesvirus 4 (Epstein-Barr virus)
agagugcccuggagg

SEQ ID NO: 1873302 - RNA, 22 nt, Human herpesvirus 4 (Epstein-Barr virus)
uggccuucucugauggccugga

SEQ ID NO: 1873303 - RNA, 20 nt, Human herpesvirus 4 (Epstein-Barr virus)
uucuggccaaccugccucuc

SEQ ID NO: 1873304 - RNA, 14 nt, Human herpesvirus 4 (Epstein-Barr virus)
guauccaccuagaa

SEQ ID NO: 1873305 - RNA, 22 nt, Human herpesvirus 4 (Epstein-Barr virus)
ccuagagguuuugcuagggagg

SEQ ID NO: 1873306 - RNA, 19 nt, Human herpesvirus 4 (Epstein-Barr virus)
gcccucuuccgugccucgg

SEQ ID NO: 1873307 - RNA, 12 nt, Human herpesvirus 4 (Epstein-Barr virus)
guggcugcugcc

SEQ ID NO: 1873308 - RNA, 23 nt, Human herpesvirus 4 (Epstein-Barr virus)
agccacccgucccggguacaagu

SEQ ID NO: 1873309 - RNA, 16 nt, Human herpesvirus 4 (Epstein-Barr virus)
auucaucagaagcuac

SEQ ID NO: 1873310 - RNA, 16 nt, Human herpesvirus 4 (Epstein-Barr virus)
ccuuccucugcccgcu

SEQ ID NO: 1873311 - RNA, 16 nt, Human herpesvirus 4 (Epstein-Barr virus)
gccugccaaagagcca

SEQ ID NO: 1873312 - RNA, 20 nt, Human herpesvirus 4 (Epstein-Barr virus)
gccucgccuucuccucagcc

SEQ ID NO: 1873313 - RNA, 18 nt, Human herpesvirus 4 (Epstein-Barr virus)
aaccccuaccucggcauc

SEQ ID NO: 1873314 - RNA, 13 nt, Human herpesvirus 4 (Epstein-Barr virus)
cccugucaccagg

SEQ ID NO: 1873315 - RNA, 21 nt, Human herpesvirus 4 (Epstein-Barr virus)
cuacucguuuaagguccgcuc

SEQ ID NO: 1873316 - RNA, 17 nt, Human herpesvirus 4 (Epstein-Barr virus)
aucugacacuuuagagc

SEQ ID NO: 1873317 - RNA, 18 nt, Human herpesvirus 4 (Epstein-Barr virus)
uguacagaaacagagagu

SEQ ID NO: 1873318 - RNA, 23 nt, Human herpesvirus 4 (Epstein-Barr virus)
acuggaugcaggaccuagaaugu

SEQ ID NO: 1873319 - RNA, 17 nt, Human herpesvirus 4 (Epstein-Barr virus)
gcaugagcuccucucca

SEQ ID NO: 1873320 - RNA, 18 nt, Human herpesvirus 4 (Epstein-Barr virus)
aaaacagaggcuggaugc

SEQ ID NO: 1873321 - RNA, 18 nt, Human herpesvirus 4 (Epstein-Barr virus)
cacucuggggucucaggc

SEQ ID NO: 1873322 - RNA, 15 nt, Human herpesvirus 4 (Epstein-Barr virus)
gguccugaggggcgg

SEQ ID NO: 1873323 - RNA, 17 nt, Human herpesvirus 4 (Epstein-Barr virus)
gcuccgagagcuccgcc

SEQ ID NO: 1873324 - RNA, 19 nt, Human herpesvirus 4 (Epstein-Barr virus)
gucuagccacauagcaggu

SEQ ID NO: 1873325 - RNA, 21 nt, Human herpesvirus 4 (Epstein-Barr virus)
aacucugcccuucagugucug

SEQ ID NO: 1873326 - RNA, 13 nt, Human herpesvirus 4 (Epstein-Barr virus)
guaccagaagagu

SEQ ID NO: 1873327 - RNA, 13 nt, Human herpesvirus 4 (Epstein-Barr virus)
cccggcucucagg

SEQ ID NO: 1873328 - RNA, 22 nt, Human herpesvirus 4 (Epstein-Barr virus)
uccgugagagccuacccaugac

SEQ ID NO: 1873329 - RNA, 19 nt, Human herpesvirus 4 (Epstein-Barr virus)
uggacgagggggcgcggcu

SEQ ID NO: 1873330 - RNA, 12 nt, Human herpesvirus 4 (Epstein-Barr virus)
gugcccccacca

SEQ ID NO: 1873331 - RNA, 17 nt, Human herpesvirus 4 (Epstein-Barr virus)
ucaacuucagcuccagg

SEQ ID NO: 1873332 - RNA, 19 nt, Human herpesvirus 4 (Epstein-Barr virus)
ggggcaggaggggcaggag

SEQ ID NO: 1873333 - RNA, 22 nt, Human herpesvirus 4 (Epstein-Barr virus)
ccccauacaugucucagaggcc

SEQ ID NO: 1873334 - RNA, 12 nt, Human herpesvirus 4 (Epstein-Barr virus)
ccagcugguggu

SEQ ID NO: 1873335 - RNA, 13 nt, Human herpesvirus 4 (Epstein-Barr virus)
cugacauuucuca

SEQ ID NO: 1873336 - RNA, 20 nt, Human herpesvirus 4 (Epstein-Barr virus)
gcuuugagcuaaugccauag

SEQ ID NO: 1873337 - RNA, 19 nt, Human herpesvirus 4 (Epstein-Barr virus)
uagccucgcgacucguggg

SEQ ID NO: 1873338 - RNA, 12 nt, Human herpesvirus 4 (Epstein-Barr virus)
ggggcuggccug

SEQ ID NO: 1873339 - RNA, 15 nt, Human herpesvirus 4 (Epstein-Barr virus)
uaacugccagagcug

SEQ ID NO: 1873340 - RNA, 22 nt, Human herpesvirus 4 (Epstein-Barr virus)
acuggcacacacucccuuagcc

SEQ ID NO: 1873341 - RNA, 20 nt, Human herpesvirus 4 (Epstein-Barr virus)
acuuauuggagaugcucugg

SEQ ID NO: 1873342 - RNA, 12 nt, Human herpesvirus 4 (Epstein-Barr virus)
gagcgccguggc

SEQ ID NO: 1873343 - RNA, 11 nt, Human herpesvirus 4 (Epstein-Barr virus)
cgcugcugcua

SEQ ID NO: 1873344 - RNA, 21 nt, Human herpesvirus 4 (Epstein-Barr virus)
gccaagguugaagagcagauu

SEQ ID NO: 1873345 - RNA, 15 nt, Human herpesvirus 4 (Epstein-Barr virus)
cgccuccucgcaggc

SEQ ID NO: 1873346 - RNA, 15 nt, Human herpesvirus 4 (Epstein-Barr virus)
cuaggcgggcgggcu

SEQ ID NO: 1873347 - RNA, 14 nt, Human herpesvirus 4 (Epstein-Barr virus)
caggguccaggaga

SEQ ID NO: 1873348 - RNA, 13 nt, Human herpesvirus 4 (Epstein-Barr virus)
gggggaaugaggg

SEQ ID NO: 1873349 - RNA, 23 nt, Human herpesvirus 4 (Epstein-Barr virus)
cucagaugccggccaugcgcuuu

SEQ ID NO: 1873350 - RNA, 19 nt, Human herpesvirus 4 (Epstein-Barr virus)
ccaggagucugcugcggcu

SEQ ID NO: 1873351 - RNA, 16 nt, Human herpesvirus 4 (Epstein-Barr virus)
gagggcacggcaaggc

SEQ ID NO: 1873352 - RNA, 21 nt, Human herpesvirus 4 (Epstein-Barr virus)
cacacauuucagguaccccaa

SEQ ID NO: 1873353 - RNA, 16 nt, Human herpesvirus 4 (Epstein-Barr virus)
cuaaaagcagccaccu

SEQ ID NO: 1873354 - RNA, 23 nt, Human herpesvirus 4 (Epstein-Barr virus)
caccugcacgagaccccugggcu

SEQ ID NO: 1873355 - RNA, 19 nt, Human herpesvirus 4 (Epstein-Barr virus)
uccagacgcgauggcacac

SEQ ID NO: 1873356 - RNA, 17 nt, Human herpesvirus 4 (Epstein-Barr virus)
ucuggcugugcugaccc

SEQ ID NO: 1873357 - RNA, 17 nt, Human herpesvirus 4 (Epstein-Barr virus)
cugcacggcccuccagc

SEQ ID NO: 1873358 - RNA, 13 nt, Human herpesvirus 4 (Epstein-Barr virus)
agccggccaggca

SEQ ID NO: 1873359 - RNA, 17 nt, Human herpesvirus 4 (Epstein-Barr virus)
ucuacgccccagaugaa

SEQ ID NO: 1873360 - RNA, 20 nt, Human herpesvirus 4 (Epstein-Barr virus)
guccugggccucccaccacc

SEQ ID NO: 1873361 - RNA, 17 nt, Human herpesvirus 4 (Epstein-Barr virus)
gccuugggggugguggg

SEQ ID NO: 1873362 - RNA, 18 nt, Human herpesvirus 4 (Epstein-Barr virus)
ccggcgcuguguggcuga

SEQ ID NO: 1873363 - RNA, 23 nt, Human herpesvirus 4 (Epstein-Barr virus)
acuacuuguuucuggaaugcuuc

SEQ ID NO: 1873364 - RNA, 18 nt, Human herpesvirus 4 (Epstein-Barr virus)
auguaucccaaauaaaug

SEQ ID NO: 1873365 - RNA, 13 nt, Human herpesvirus 4 (Epstein-Barr virus)
ccgugcaccugcc

SEQ ID NO: 1873366 - RNA, 13 nt, Human herpesvirus 4 (Epstein-Barr virus)
acuaauguggugg

SEQ ID NO: 1873367 - RNA, 13 nt, Human herpesvirus 4 (Epstein-Barr virus)
agcaggaggaggg

SEQ ID NO: 1873368 - RNA, 22 nt, Human herpesvirus 4 (Epstein-Barr virus)
gcagauagccggccaggcagag

SEQ ID NO: 1873369 - RNA, 18 nt, Human herpesvirus 4 (Epstein-Barr virus)
gagcauggcggccuggca

SEQ ID NO: 1873370 - RNA, 21 nt, Human herpesvirus 4 (Epstein-Barr virus)
caccuugaggugccacagagc

SEQ ID NO: 1873371 - RNA, 13 nt, Human herpesvirus 4 (Epstein-Barr virus)
gccacauagcagg

SEQ ID NO: 1873372 - RNA, 22 nt, Human herpesvirus 4 (Epstein-Barr virus)
ugccuggaagaaucauggccua

SEQ ID NO: 1873373 - RNA, 15 nt, Human herpesvirus 4 (Epstein-Barr virus)
agugggugggcauug

SEQ ID NO: 1873374 - RNA, 13 nt, Human herpesvirus 4 (Epstein-Barr virus)
uugcuagggagga

SEQ ID NO: 1873375 - RNA, 20 nt, Human herpesvirus 4 (Epstein-Barr virus)
uccgcuuuaagaccaaggcc

SEQ ID NO: 1873376 - RNA, 13 nt, Human herpesvirus 4 (Epstein-Barr virus)
acacaaaaugagg

SEQ ID NO: 1873377 - RNA, 18 nt, Human herpesvirus 4 (Epstein-Barr virus)
ggcaucauguuuuuggca

SEQ ID NO: 1873378 - RNA, 18 nt, Human herpesvirus 4 (Epstein-Barr virus)
cagccccgcccuccccau

SEQ ID NO: 1873379 - RNA, 21 nt, Human herpesvirus 4 (Epstein-Barr virus)
gggccauucgugaguccaggg

SEQ ID NO: 1873380 - RNA, 22 nt, Human herpesvirus 4 (Epstein-Barr virus)
aaggcucuucgggcaagaugga

SEQ ID NO: 1873381 - RNA, 13 nt, Human herpesvirus 4 (Epstein-Barr virus)
caauacccaggau

SEQ ID NO: 1873382 - RNA, 21 nt, Human herpesvirus 4 (Epstein-Barr virus)
gccaucgcaagcuccuuugcc

SEQ ID NO: 1873383 - RNA, 17 nt, Human herpesvirus 4 (Epstein-Barr virus)
aucagaauuagcaucag

SEQ ID NO: 1873384 - RNA, 23 nt, Human herpesvirus 4 (Epstein-Barr virus)
ccaggaccuggaugcuguagugg

SEQ ID NO: 1873385 - RNA, 19 nt, Human herpesvirus 4 (Epstein-Barr virus)
ucaucuauuagcagccucc

SEQ ID NO: 1873386 - RNA, 21 nt, Human herpesvirus 4 (Epstein-Barr virus)
gaaaauaguuccaggugacag

SEQ ID NO: 1873387 - RNA, 20 nt, Human herpesvirus 4 (Epstein-Barr virus)
ugcugcuacuggcuuucguc

SEQ ID NO: 1873388 - RNA, 16 nt, Human herpesvirus 4 (Epstein-Barr virus)
cugcggaguugagccc

SEQ ID NO: 1873389 - RNA, 15 nt, Human herpesvirus 4 (Epstein-Barr virus)
cauuccuaggagaag

SEQ ID NO: 1873390 - RNA, 14 nt, Human herpesvirus 4 (Epstein-Barr virus)
ccaagcggcacaga

SEQ ID NO: 1873391 - RNA, 21 nt, Human herpesvirus 4 (Epstein-Barr virus)
aaauacuucucuagagccagg

SEQ ID NO: 1873392 - RNA, 14 nt, Human herpesvirus 4 (Epstein-Barr virus)
caagugcuaugacc

SEQ ID NO: 1873393 - RNA, 14 nt, Human herpesvirus 4 (Epstein-Barr virus)
cauugcaccuugcc

SEQ ID NO: 1873394 - RNA, 17 nt, Human herpesvirus 4 (Epstein-Barr virus)
ucacauauccagagcug

SEQ ID NO: 1873395 - RNA, 19 nt, Human herpesvirus 4 (Epstein-Barr virus)
gaggcacacaaaaugagga

SEQ ID NO: 1873396 - RNA, 20 nt, Human herpesvirus 4 (Epstein-Barr virus)
gagaugugaauugggauggu

SEQ ID NO: 1873397 - RNA, 18 nt, Human herpesvirus 4 (Epstein-Barr virus)
cggagguggagaggcccg

SEQ ID NO: 1873398 - RNA, 21 nt, Human herpesvirus 4 (Epstein-Barr virus)
cuggcggccgcugcgcccugu

SEQ ID NO: 1873399 - RNA, 20 nt, Human herpesvirus 4 (Epstein-Barr virus)
ccucaacaaggagugccucu

SEQ ID NO: 1873400 - RNA, 14 nt, Human herpesvirus 4 (Epstein-Barr virus)
agguguccagcgcu

SEQ ID NO: 1873401 - RNA, 22 nt, Human herpesvirus 4 (Epstein-Barr virus)
ccgggagaggcagccccaaagc

SEQ ID NO: 1873402 - RNA, 21 nt, Human herpesvirus 4 (Epstein-Barr virus)
gcgacggcuuuagccuggccu

SEQ ID NO: 1873403 - RNA, 14 nt, Human herpesvirus 4 (Epstein-Barr virus)
ucccccccagaccu

SEQ ID NO: 1873404 - RNA, 18 nt, Human herpesvirus 4 (Epstein-Barr virus)
ucucccccgggcgcugcc

SEQ ID NO: 1873405 - RNA, 16 nt, Human herpesvirus 4 (Epstein-Barr virus)
ccagcagauccagggc

SEQ ID NO: 1873406 - RNA, 15 nt, Human herpesvirus 4 (Epstein-Barr virus)
cugccgcuacugcug

SEQ ID NO: 1873407 - RNA, 17 nt, Human herpesvirus 4 (Epstein-Barr virus)
gcuggcucgccucaucc

SEQ ID NO: 1873408 - RNA, 22 nt, Human herpesvirus 4 (Epstein-Barr virus)
cgucccagggccggaaccugag

SEQ ID NO: 1873409 - RNA, 14 nt, Human herpesvirus 4 (Epstein-Barr virus)
cccagccacagcac

SEQ ID NO: 1873410 - RNA, 22 nt, Human herpesvirus 4 (Epstein-Barr virus)
caaauaaauguuacuucuuuug

SEQ ID NO: 1873411 - RNA, 18 nt, Human herpesvirus 4 (Epstein-Barr virus)
ggagguaauuagcacggu

SEQ ID NO: 1873412 - RNA, 17 nt, Human herpesvirus 4 (Epstein-Barr virus)
gaaaccccacggagcag

SEQ ID NO: 1873413 - RNA, 16 nt, Human herpesvirus 4 (Epstein-Barr virus)
acgaccuugaccacga

SEQ ID NO: 1873414 - RNA, 13 nt, Human herpesvirus 4 (Epstein-Barr virus)
gauggcggggccu

SEQ ID NO: 1873415 - RNA, 20 nt, Human herpesvirus 4 (Epstein-Barr virus)
guggcuacuugcucagguuu

SEQ ID NO: 1873416 - RNA, 14 nt, Human herpesvirus 4 (Epstein-Barr virus)
ccauaccaggugcc

SEQ ID NO: 1873417 - RNA, 23 nt, Human herpesvirus 4 (Epstein-Barr virus)
gucugagaauaaggcucugaagc

SEQ ID NO: 1873418 - RNA, 20 nt, Human herpesvirus 4 (Epstein-Barr virus)
ucgcugaaucuaguaugaag

SEQ ID NO: 1873419 - RNA, 13 nt, Human herpesvirus 4 (Epstein-Barr virus)
uggugccggggcc

SEQ ID NO: 1873420 - RNA, 16 nt, Human herpesvirus 4 (Epstein-Barr virus)
uuauucuugauugccu

SEQ ID NO: 1873421 - RNA, 13 nt, Human herpesvirus 4 (Epstein-Barr virus)
ucagaaaagugag

SEQ ID NO: 1873422 - RNA, 19 nt, Human herpesvirus 4 (Epstein-Barr virus)
guaaaacuuggaggcugcu

SEQ ID NO: 1873423 - RNA, 22 nt, Human herpesvirus 4 (Epstein-Barr virus)
acuaucacccauggccaggcuc

SEQ ID NO: 1873424 - RNA, 13 nt, Human herpesvirus 4 (Epstein-Barr virus)
ccgaacaugggua

SEQ ID NO: 1873425 - RNA, 18 nt, Human herpesvirus 4 (Epstein-Barr virus)
auccugcguggcuggacg

SEQ ID NO: 1873426 - RNA, 18 nt, Human herpesvirus 4 (Epstein-Barr virus)
gguccaggguccaggaga

SEQ ID NO: 1873427 - RNA, 13 nt, Human herpesvirus 4 (Epstein-Barr virus)
gcgccccagggca

SEQ ID NO: 1873428 - RNA, 12 nt, Human herpesvirus 4 (Epstein-Barr virus)
gaaucucugcca

SEQ ID NO: 1873429 - RNA, 14 nt, Human herpesvirus 4 (Epstein-Barr virus)
cccgggggcgggag

SEQ ID NO: 1873430 - RNA, 14 nt, Human herpesvirus 4 (Epstein-Barr virus)
gcagccacguccag

SEQ ID NO: 1873431 - RNA, 16 nt, Human herpesvirus 4 (Epstein-Barr virus)
cugcuagcgucacuga

SEQ ID NO: 1873432 - RNA, 20 nt, Human herpesvirus 4 (Epstein-Barr virus)
auguaucccaaauaaauguu

SEQ ID NO: 1873433 - RNA, 14 nt, Human herpesvirus 4 (Epstein-Barr virus)
cuucguauaugugu

SEQ ID NO: 1873434 - RNA, 14 nt, Human herpesvirus 4 (Epstein-Barr virus)
agcuggacgagguc

SEQ ID NO: 1873435 - RNA, 13 nt, Human herpesvirus 4 (Epstein-Barr virus)
cuccuccacccag

SEQ ID NO: 1873436 - RNA, 20 nt, Human herpesvirus 4 (Epstein-Barr virus)
gcaggaggggcaggaggggc

SEQ ID NO: 1873437 - RNA, 16 nt, Human herpesvirus 4 (Epstein-Barr virus)
cggggguggcagcccc

SEQ ID NO: 1873438 - RNA, 17 nt, Human herpesvirus 4 (Epstein-Barr virus)
aggcuggugccuuggcu

SEQ ID NO: 1873439 - RNA, 14 nt, Human herpesvirus 4 (Epstein-Barr virus)
gcugguuggggcug

SEQ ID NO: 1873440 - RNA, 15 nt, Human herpesvirus 4 (Epstein-Barr virus)
aucaauggaacccua

SEQ ID NO: 1873441 - RNA, 23 nt, Human herpesvirus 4 (Epstein-Barr virus)
cugcccauccaucaacuucagcu

SEQ ID NO: 1873442 - RNA, 20 nt, Human herpesvirus 4 (Epstein-Barr virus)
gucaccagcuucgagagcca

SEQ ID NO: 1873443 - RNA, 23 nt, Human herpesvirus 4 (Epstein-Barr virus)
uacagcuacaccgaucaccagac

SEQ ID NO: 1873444 - RNA, 14 nt, Human herpesvirus 4 (Epstein-Barr virus)
agauugccuucugu

SEQ ID NO: 1873445 - RNA, 21 nt, Human herpesvirus 4 (Epstein-Barr virus)
ccaucagcucgcccacacagc

SEQ ID NO: 1873446 - RNA, 17 nt, Human herpesvirus 4 (Epstein-Barr virus)
acaacacauagaauugu

SEQ ID NO: 1873447 - RNA, 19 nt, Human herpesvirus 4 (Epstein-Barr virus)
gguccaucuuaggagcccg

SEQ ID NO: 1873448 - RNA, 17 nt, Human herpesvirus 4 (Epstein-Barr virus)
cccccuggcggcccagc

SEQ ID NO: 1873449 - RNA, 21 nt, Human herpesvirus 4 (Epstein-Barr virus)
uggugggcuccuuagacugag

SEQ ID NO: 1873450 - RNA, 19 nt, Human herpesvirus 4 (Epstein-Barr virus)
ccacggccguagcccaguc

SEQ ID NO: 1873451 - RNA, 22 nt, Human herpesvirus 4 (Epstein-Barr virus)
cucccgccccuguccacugccc

SEQ ID NO: 1873452 - RNA, 19 nt, Human herpesvirus 4 (Epstein-Barr virus)
augagcgauuuuaucacag

SEQ ID NO: 1873453 - RNA, 13 nt, Human herpesvirus 4 (Epstein-Barr virus)
ugcccaagccugg

SEQ ID NO: 1873454 - RNA, 16 nt, Human herpesvirus 4 (Epstein-Barr virus)
ucaggccgccgcaucc

SEQ ID NO: 1873455 - RNA, 16 nt, Human herpesvirus 4 (Epstein-Barr virus)
uuagcuauuccaccaa

SEQ ID NO: 1873456 - RNA, 18 nt, Human herpesvirus 4 (Epstein-Barr virus)
gccccucagccugcuccu

SEQ ID NO: 1873457 - RNA, 15 nt, Human herpesvirus 4 (Epstein-Barr virus)
ucuccaucagggcca

SEQ ID NO: 1873458 - RNA, 18 nt, Human herpesvirus 4 (Epstein-Barr virus)
cucucuggagaucuucuc

SEQ ID NO: 1873459 - RNA, 15 nt, Human herpesvirus 4 (Epstein-Barr virus)
cccaccacccccacc

SEQ ID NO: 1873460 - RNA, 21 nt, Human herpesvirus 4 (Epstein-Barr virus)
uccaggaucucccgcgccgca

SEQ ID NO: 1873461 - RNA, 18 nt, Human herpesvirus 4 (Epstein-Barr virus)
ucaugcagggugcacaga

SEQ ID NO: 1873462 - RNA, 21 nt, Human herpesvirus 4 (Epstein-Barr virus)
agcgccucgcucagcccacua

SEQ ID NO: 1873463 - RNA, 16 nt, Human herpesvirus 4 (Epstein-Barr virus)
ccaagauagugaccaa

SEQ ID NO: 1873464 - RNA, 22 nt, Human herpesvirus 4 (Epstein-Barr virus)
acccaccccuccuacacacauc

SEQ ID NO: 1873465 - RNA, 22 nt, Human herpesvirus 4 (Epstein-Barr virus)
uggaguccaugaccagggggca

SEQ ID NO: 1873466 - RNA, 14 nt, Human herpesvirus 4 (Epstein-Barr virus)
gacugcaaacccug

SEQ ID NO: 1873467 - RNA, 19 nt, Human herpesvirus 4 (Epstein-Barr virus)
cccgagccccgccuggcgg

SEQ ID NO: 1873468 - RNA, 12 nt, Human herpesvirus 4 (Epstein-Barr virus)
cguggagcugga

SEQ ID NO: 1873469 - RNA, 19 nt, Human herpesvirus 4 (Epstein-Barr virus)
ccgguccccccagaagccc

SEQ ID NO: 1873470 - RNA, 15 nt, Human herpesvirus 4 (Epstein-Barr virus)
ugaggccugagagcc

SEQ ID NO: 1873471 - RNA, 19 nt, Human herpesvirus 4 (Epstein-Barr virus)
uccacagccccacucuugc

SEQ ID NO: 1873472 - RNA, 16 nt, Human herpesvirus 4 (Epstein-Barr virus)
acaucugggaguguag

SEQ ID NO: 1873473 - RNA, 21 nt, Human herpesvirus 4 (Epstein-Barr virus)
ggcuguacgccgccgccagca

SEQ ID NO: 1873474 - RNA, 14 nt, Human herpesvirus 4 (Epstein-Barr virus)
agcauggcagccgg

SEQ ID NO: 1873475 - RNA, 17 nt, Human herpesvirus 4 (Epstein-Barr virus)
ggcggagaagacgggcu

SEQ ID NO: 1873476 - RNA, 18 nt, Human herpesvirus 4 (Epstein-Barr virus)
ccguccuuguccaggaga

SEQ ID NO: 1873477 - RNA, 20 nt, Human herpesvirus 4 (Epstein-Barr virus)
gcauuuuuggugcugccugg

SEQ ID NO: 1873478 - RNA, 22 nt, Human herpesvirus 4 (Epstein-Barr virus)
agcccgacccccgggcgccccc

SEQ ID NO: 1873479 - RNA, 23 nt, Human herpesvirus 4 (Epstein-Barr virus)
ugucuucccagacucugcuuucu

SEQ ID NO: 1873480 - RNA, 15 nt, Human herpesvirus 4 (Epstein-Barr virus)
auaccgagauguaca

SEQ ID NO: 1873481 - RNA, 13 nt, Human herpesvirus 4 (Epstein-Barr virus)
ugccaaagcugaa

SEQ ID NO: 1873482 - RNA, 14 nt, Human herpesvirus 4 (Epstein-Barr virus)
gggacauccccaga

SEQ ID NO: 1873483 - RNA, 17 nt, Human herpesvirus 4 (Epstein-Barr virus)
gccuugguuucagccuc

SEQ ID NO: 1873484 - RNA, 14 nt, Human herpesvirus 4 (Epstein-Barr virus)
cagaggaggccccg

SEQ ID NO: 1873485 - RNA, 14 nt, Human herpesvirus 4 (Epstein-Barr virus)
ccggggaggccagg

SEQ ID NO: 1873486 - RNA, 12 nt, Human herpesvirus 4 (Epstein-Barr virus)
ggggaggagaga

SEQ ID NO: 1873487 - RNA, 16 nt, Human herpesvirus 4 (Epstein-Barr virus)
gcuaacaggacauguu

SEQ ID NO: 1873488 - RNA, 12 nt, Human herpesvirus 4 (Epstein-Barr virus)
aggugccacaga

SEQ ID NO: 1873489 - RNA, 15 nt, Human herpesvirus 4 (Epstein-Barr virus)
accaaugccaaagcu

SEQ ID NO: 1873490 - RNA, 19 nt, Human herpesvirus 4 (Epstein-Barr virus)
cgcccugucaccaggccug

SEQ ID NO: 1873491 - RNA, 15 nt, Human herpesvirus 4 (Epstein-Barr virus)
ccgcagggguggugg

SEQ ID NO: 1873492 - RNA, 12 nt, Human herpesvirus 4 (Epstein-Barr virus)
aaugaacacuca

SEQ ID NO: 1873493 - RNA, 13 nt, Human herpesvirus 4 (Epstein-Barr virus)
agcaccacccagc

SEQ ID NO: 1873494 - RNA, 15 nt, Human herpesvirus 4 (Epstein-Barr virus)
ugcugccgcuacugc

SEQ ID NO: 1873495 - RNA, 23 nt, Human herpesvirus 4 (Epstein-Barr virus)
acaccagauguuuuacacgagga

SEQ ID NO: 1873496 - RNA, 20 nt, Human herpesvirus 4 (Epstein-Barr virus)
cacggggugcucccccugga

SEQ ID NO: 1873497 - RNA, 12 nt, Human herpesvirus 4 (Epstein-Barr virus)
cuggcucagcuu

SEQ ID NO: 1873498 - RNA, 19 nt, Human herpesvirus 4 (Epstein-Barr virus)
uauggcagagcuuugcccc

SEQ ID NO: 1873499 - RNA, 18 nt, Human herpesvirus 4 (Epstein-Barr virus)
accgcgaccaagacucaa

SEQ ID NO: 1873500 - RNA, 13 nt, Human herpesvirus 4 (Epstein-Barr virus)
ccuuugccugggg

SEQ ID NO: 1873501 - RNA, 18 nt, Human herpesvirus 4 (Epstein-Barr virus)
cucauggaggggcggcag

SEQ ID NO: 1873502 - RNA, 17 nt, Human herpesvirus 4 (Epstein-Barr virus)
cuggcacgacuguuccu

SEQ ID NO: 1873503 - RNA, 13 nt, Human herpesvirus 4 (Epstein-Barr virus)
gugagggggccug

SEQ ID NO: 1873504 - RNA, 16 nt, Human herpesvirus 4 (Epstein-Barr virus)
agaaguuggugguggg

SEQ ID NO: 1873505 - RNA, 17 nt, Human herpesvirus 4 (Epstein-Barr virus)
cugacccuucugcugcu

SEQ ID NO: 1873506 - RNA, 22 nt, Human herpesvirus 4 (Epstein-Barr virus)
ggggaguaaggccgcugccagg

SEQ ID NO: 1873507 - RNA, 22 nt, Human herpesvirus 4 (Epstein-Barr virus)
aguagcacuggugguggaggag

SEQ ID NO: 1873508 - RNA, 17 nt, Human herpesvirus 4 (Epstein-Barr virus)
cagcaggcucaggccgc

SEQ ID NO: 1873509 - RNA, 13 nt, Human herpesvirus 4 (Epstein-Barr virus)
ucuuuguggccuu

SEQ ID NO: 1873510 - RNA, 14 nt, Human herpesvirus 4 (Epstein-Barr virus)
cuucagcuccaggg

SEQ ID NO: 1873511 - RNA, 17 nt, Human herpesvirus 4 (Epstein-Barr virus)
ugcgcgccgccagcaug

SEQ ID NO: 1873512 - RNA, 15 nt, Human herpesvirus 4 (Epstein-Barr virus)
gcaggguccaagguu

SEQ ID NO: 1873513 - RNA, 20 nt, Human herpesvirus 4 (Epstein-Barr virus)
auggauagauagccacccgc

SEQ ID NO: 1873514 - RNA, 16 nt, Human herpesvirus 4 (Epstein-Barr virus)
gggaauaaucaaccug

SEQ ID NO: 1873515 - RNA, 18 nt, Human herpesvirus 4 (Epstein-Barr virus)
ugccgggcccgggacagc

SEQ ID NO: 1873516 - RNA, 20 nt, Human herpesvirus 4 (Epstein-Barr virus)
agggagacguuugaguccaa

SEQ ID NO: 1873517 - RNA, 16 nt, Human herpesvirus 4 (Epstein-Barr virus)
uggugggcugcugagg

SEQ ID NO: 1873518 - RNA, 13 nt, Human herpesvirus 4 (Epstein-Barr virus)
uuguaaaacuugg

SEQ ID NO: 1873519 - RNA, 19 nt, Human herpesvirus 4 (Epstein-Barr virus)
caggaggggcaggagcagg

SEQ ID NO: 1873520 - RNA, 15 nt, Human herpesvirus 4 (Epstein-Barr virus)
uucugccccucagcc

SEQ ID NO: 1873521 - RNA, 12 nt, Human herpesvirus 4 (Epstein-Barr virus)
cagaugcagugg

SEQ ID NO: 1873522 - RNA, 15 nt, Human herpesvirus 4 (Epstein-Barr virus)
gcaccuguguccugg

SEQ ID NO: 1873523 - RNA, 16 nt, Human herpesvirus 4 (Epstein-Barr virus)
gcccucgagaacccca

SEQ ID NO: 1873524 - RNA, 23 nt, Human herpesvirus 4 (Epstein-Barr virus)
aaccccagcaacauccggggcag

SEQ ID NO: 1873525 - RNA, 15 nt, Human herpesvirus 4 (Epstein-Barr virus)
uggaggcccccggcu

SEQ ID NO: 1873526 - RNA, 19 nt, Human herpesvirus 4 (Epstein-Barr virus)
ucagccuugcccccgccag

SEQ ID NO: 1873527 - RNA, 11 nt, Human herpesvirus 4 (Epstein-Barr virus)
gaccugugugc

SEQ ID NO: 1873528 - RNA, 15 nt, Human herpesvirus 4 (Epstein-Barr virus)
uucugcccccugucu

SEQ ID NO: 1873529 - RNA, 17 nt, Human herpesvirus 4 (Epstein-Barr virus)
caaaacucacaggacau

SEQ ID NO: 1873530 - RNA, 13 nt, Human herpesvirus 4 (Epstein-Barr virus)
acgagaaggagga

SEQ ID NO: 1873531 - RNA, 22 nt, Human herpesvirus 4 (Epstein-Barr virus)
cuucgcccccucuuuguggccu

SEQ ID NO: 1873532 - RNA, 12 nt, Human herpesvirus 4 (Epstein-Barr virus)
caaauaaauguu

SEQ ID NO: 1873533 - RNA, 19 nt, Human herpesvirus 4 (Epstein-Barr virus)
ccccuccauuccacccacu

SEQ ID NO: 1873534 - RNA, 13 nt, Human herpesvirus 4 (Epstein-Barr virus)
uaaccugucuacu

SEQ ID NO: 1873535 - RNA, 16 nt, Human herpesvirus 4 (Epstein-Barr virus)
aagagcuuccuggccg

SEQ ID NO: 1873536 - RNA, 14 nt, Human herpesvirus 4 (Epstein-Barr virus)
ggccgacgaggccc

SEQ ID NO: 1873537 - RNA, 13 nt, Human herpesvirus 4 (Epstein-Barr virus)
gcuccuggaucug

SEQ ID NO: 1873538 - RNA, 20 nt, Human herpesvirus 4 (Epstein-Barr virus)
caaggacgggggugggcacc

SEQ ID NO: 1873539 - RNA, 19 nt, Human herpesvirus 4 (Epstein-Barr virus)
accccacacucccuccaga

SEQ ID NO: 1873540 - RNA, 18 nt, Human herpesvirus 4 (Epstein-Barr virus)
augacgucaacuuuacuu

SEQ ID NO: 1873541 - RNA, 13 nt, Human herpesvirus 4 (Epstein-Barr virus)
caaugccaaagcu

SEQ ID NO: 1873542 - RNA, 17 nt, Human herpesvirus 4 (Epstein-Barr virus)
ggugcucccccuggaca

SEQ ID NO: 1873543 - RNA, 18 nt, Human herpesvirus 4 (Epstein-Barr virus)
acuguuccuauaugcucu

SEQ ID NO: 1873544 - RNA, 16 nt, Human herpesvirus 4 (Epstein-Barr virus)
uguggcuguagccacc

SEQ ID NO: 1873545 - RNA, 16 nt, Human herpesvirus 4 (Epstein-Barr virus)
gugggauggcggggcc

SEQ ID NO: 1873546 - RNA, 24 nt, Human herpesvirus 4 (Epstein-Barr virus)
caauaaaguugaugauauugaauu

SEQ ID NO: 1873547 - RNA, 17 nt, Human herpesvirus 4 (Epstein-Barr virus)
gcacgagaccccugggc

SEQ ID NO: 1873548 - RNA, 22 nt, Human herpesvirus 4 (Epstein-Barr virus)
cccagcccccucucgcccaagc

SEQ ID NO: 1873549 - RNA, 18 nt, Human herpesvirus 4 (Epstein-Barr virus)
cccaccaccccccccacc

SEQ ID NO: 1873550 - RNA, 16 nt, Human herpesvirus 4 (Epstein-Barr virus)
ggccagcaaaaccagc

SEQ ID NO: 1873551 - RNA, 19 nt, Human herpesvirus 4 (Epstein-Barr virus)
ccaacuccggcccacgcca

SEQ ID NO: 1873552 - RNA, 15 nt, Human herpesvirus 4 (Epstein-Barr virus)
ggcugcgguggugcg

SEQ ID NO: 1873553 - RNA, 23 nt, Human herpesvirus 4 (Epstein-Barr virus)
agggguccccgagggugaggccc

SEQ ID NO: 1873554 - RNA, 17 nt, Human herpesvirus 4 (Epstein-Barr virus)
gcagccccaaagcgggu

SEQ ID NO: 1873555 - RNA, 13 nt, Human herpesvirus 4 (Epstein-Barr virus)
cggugccugugga

SEQ ID NO: 1873556 - RNA, 15 nt, Human herpesvirus 4 (Epstein-Barr virus)
cauggccgagaagcu

SEQ ID NO: 1873557 - RNA, 13 nt, Human herpesvirus 4 (Epstein-Barr virus)
aaccugcucucuc

SEQ ID NO: 1873558 - RNA, 13 nt, Human herpesvirus 4 (Epstein-Barr virus)
ccguccucuggac

SEQ ID NO: 1873559 - RNA, 17 nt, Human herpesvirus 4 (Epstein-Barr virus)
acguuggcgggacuggc

SEQ ID NO: 1873560 - RNA, 19 nt, Human herpesvirus 4 (Epstein-Barr virus)
gagcugagugcccagggca

SEQ ID NO: 1873561 - RNA, 14 nt, Human herpesvirus 4 (Epstein-Barr virus)
gagagaggccucug

SEQ ID NO: 1873562 - RNA, 20 nt, Human herpesvirus 4 (Epstein-Barr virus)
ucgugcaaccaggcccacug

SEQ ID NO: 1873563 - RNA, 20 nt, Human herpesvirus 4 (Epstein-Barr virus)
aggauggcccugcaaacuga

SEQ ID NO: 1873564 - RNA, 14 nt, Human herpesvirus 4 (Epstein-Barr virus)
ccgcccccaccacc

SEQ ID NO: 1873565 - RNA, 15 nt, Human herpesvirus 4 (Epstein-Barr virus)
caccguggagccggg

SEQ ID NO: 1873566 - RNA, 17 nt, Human herpesvirus 4 (Epstein-Barr virus)
accccgaguccaaggcc

SEQ ID NO: 1873567 - RNA, 22 nt, Human herpesvirus 4 (Epstein-Barr virus)
ucaaggggcacgagauggccca

SEQ ID NO: 1873568 - RNA, 15 nt, Human herpesvirus 4 (Epstein-Barr virus)
gccugagcugccugg

SEQ ID NO: 1873569 - RNA, 20 nt, Human herpesvirus 4 (Epstein-Barr virus)
agacucccauguaagccugc

SEQ ID NO: 1873570 - RNA, 13 nt, Human herpesvirus 4 (Epstein-Barr virus)
gcugacccuucug

SEQ ID NO: 1873571 - RNA, 18 nt, Human herpesvirus 4 (Epstein-Barr virus)
ccauggugccaagcucag

SEQ ID NO: 1873572 - RNA, 24 nt, Human herpesvirus 4 (Epstein-Barr virus)
cccggggaaaagagagcugaugga

SEQ ID NO: 1873573 - RNA, 23 nt, Human herpesvirus 4 (Epstein-Barr virus)
uugcaaacaaacuucaagaguuu

SEQ ID NO: 1873574 - RNA, 16 nt, Human herpesvirus 4 (Epstein-Barr virus)
uggcuugggcuguggu

SEQ ID NO: 1873575 - RNA, 15 nt, Human herpesvirus 4 (Epstein-Barr virus)
ugcugacccuucugc

SEQ ID NO: 1873576 - RNA, 21 nt, Human herpesvirus 4 (Epstein-Barr virus)
gacucuauugguugaucuccu

SEQ ID NO: 1873577 - RNA, 18 nt, Human herpesvirus 4 (Epstein-Barr virus)
gaugccucuacgccccag

SEQ ID NO: 1873578 - RNA, 15 nt, Human herpesvirus 4 (Epstein-Barr virus)
gcacggcccuccagc

SEQ ID NO: 1873579 - RNA, 14 nt, Human herpesvirus 4 (Epstein-Barr virus)
caggauuccugauu

SEQ ID NO: 1873580 - RNA, 14 nt, Human herpesvirus 4 (Epstein-Barr virus)
aagcuugcuggggc

SEQ ID NO: 1873581 - RNA, 16 nt, Human herpesvirus 4 (Epstein-Barr virus)
cucucgcccaagcugc

SEQ ID NO: 1873582 - RNA, 21 nt, Human herpesvirus 4 (Epstein-Barr virus)
cuacaucaauggaacccuagc

SEQ ID NO: 1873583 - RNA, 15 nt, Human herpesvirus 4 (Epstein-Barr virus)
ccggccaugggggcu

SEQ ID NO: 1873584 - RNA, 20 nt, Human herpesvirus 4 (Epstein-Barr virus)
cacucaggaagcuggccagg

SEQ ID NO: 1873585 - RNA, 14 nt, Human herpesvirus 4 (Epstein-Barr virus)
cuaggagagaaggg

SEQ ID NO: 1873586 - RNA, 23 nt, Human herpesvirus 4 (Epstein-Barr virus)
cagagaggcgggaauggccgcca

SEQ ID NO: 1873587 - RNA, 14 nt, Human herpesvirus 4 (Epstein-Barr virus)
gaauaugaugagga

SEQ ID NO: 1873588 - RNA, 14 nt, Human herpesvirus 4 (Epstein-Barr virus)
gcacaggaugacag

SEQ ID NO: 1873589 - RNA, 13 nt, Human herpesvirus 4 (Epstein-Barr virus)
cuggaggccucag

SEQ ID NO: 1873590 - RNA, 18 nt, Human herpesvirus 4 (Epstein-Barr virus)
accgauagcauggccgcc

SEQ ID NO: 1873591 - RNA, 15 nt, Human herpesvirus 4 (Epstein-Barr virus)
ugugcacccggcugg

SEQ ID NO: 1873592 - RNA, 21 nt, Human herpesvirus 4 (Epstein-Barr virus)
acauuggcagcagcucuggca

SEQ ID NO: 1873593 - RNA, 16 nt, Human herpesvirus 4 (Epstein-Barr virus)
ggugccuccagagccc

SEQ ID NO: 1873594 - RNA, 13 nt, Human herpesvirus 4 (Epstein-Barr virus)
gagcagggcccag

SEQ ID NO: 1873595 - RNA, 16 nt, Human herpesvirus 4 (Epstein-Barr virus)
cgggaugagcuggaga

SEQ ID NO: 1873596 - RNA, 13 nt, Human herpesvirus 4 (Epstein-Barr virus)
caguccuccgcau

SEQ ID NO: 1873597 - RNA, 13 nt, Human herpesvirus 4 (Epstein-Barr virus)
ccuugaucuucuu

SEQ ID NO: 1873598 - RNA, 13 nt, Human herpesvirus 4 (Epstein-Barr virus)
ccccuccacggga

SEQ ID NO: 1873599 - RNA, 17 nt, Human herpesvirus 4 (Epstein-Barr virus)
cucgaaggugcagcugg

SEQ ID NO: 1873600 - RNA, 14 nt, Human herpesvirus 4 (Epstein-Barr virus)
ccgcgcccuccucu

SEQ ID NO: 1873601 - RNA, 19 nt, Human herpesvirus 4 (Epstein-Barr virus)
cgagcucuccagccacggc

SEQ ID NO: 1873602 - RNA, 11 nt, Human herpesvirus 4 (Epstein-Barr virus)
gugaaucaugu

SEQ ID NO: 1873603 - RNA, 16 nt, Human herpesvirus 4 (Epstein-Barr virus)
ccuuguccgcugggcc

SEQ ID NO: 1873604 - RNA, 16 nt, Human herpesvirus 4 (Epstein-Barr virus)
cagaaaaucgcagcag

SEQ ID NO: 1873605 - RNA, 18 nt, Human herpesvirus 4 (Epstein-Barr virus)
uccccgaggucagaaaga

SEQ ID NO: 1873606 - RNA, 22 nt, Human herpesvirus 4 (Epstein-Barr virus)
accugucucucuuugagggggc

SEQ ID NO: 1873607 - RNA, 21 nt, Human herpesvirus 4 (Epstein-Barr virus)
cgcccacacagcgccagcagg

SEQ ID NO: 1873608 - RNA, 18 nt, Human herpesvirus 4 (Epstein-Barr virus)
acccgaggucaagucccg

SEQ ID NO: 1873609 - RNA, 17 nt, Human herpesvirus 4 (Epstein-Barr virus)
auuucaguggcccucag

SEQ ID NO: 1873610 - RNA, 19 nt, Human herpesvirus 4 (Epstein-Barr virus)
agccugcuccugagaaugc

SEQ ID NO: 1873611 - RNA, 21 nt, Human herpesvirus 4 (Epstein-Barr virus)
ucugcacaggcuuggaaacac

SEQ ID NO: 1873612 - RNA, 12 nt, Human herpesvirus 4 (Epstein-Barr virus)
uccuccaccgcc

SEQ ID NO: 1873613 - RNA, 13 nt, Human herpesvirus 4 (Epstein-Barr virus)
gggucucaggccu

SEQ ID NO: 1873614 - RNA, 19 nt, Human herpesvirus 4 (Epstein-Barr virus)
ggugccuccagagccccuu

SEQ ID NO: 1873615 - RNA, 18 nt, Human herpesvirus 4 (Epstein-Barr virus)
ccaccggggaggccaggu

SEQ ID NO: 1873616 - RNA, 16 nt, Human herpesvirus 4 (Epstein-Barr virus)
guagccccuaggccug

SEQ ID NO: 1873617 - RNA, 15 nt, Human herpesvirus 4 (Epstein-Barr virus)
uauugccauguccaa

SEQ ID NO: 1873618 - RNA, 22 nt, Human herpesvirus 4 (Epstein-Barr virus)
gucugugguugucuucccagac

SEQ ID NO: 1873619 - RNA, 15 nt, Human herpesvirus 4 (Epstein-Barr virus)
acguccaccccaccc

SEQ ID NO: 1873620 - RNA, 20 nt, Human herpesvirus 4 (Epstein-Barr virus)
ucagggaaaaacuggccaug

SEQ ID NO: 1873621 - RNA, 16 nt, Human herpesvirus 4 (Epstein-Barr virus)
agagcggguggaggag

SEQ ID NO: 1873622 - RNA, 14 nt, Human herpesvirus 4 (Epstein-Barr virus)
gcaugagccacagg

SEQ ID NO: 1873623 - RNA, 17 nt, Human herpesvirus 4 (Epstein-Barr virus)
gggagccacggcgucaa

SEQ ID NO: 1873624 - RNA, 22 nt, Human herpesvirus 4 (Epstein-Barr virus)
caugacgcugcugcuacuggcu

SEQ ID NO: 1873625 - RNA, 13 nt, Human herpesvirus 4 (Epstein-Barr virus)
agaagugcuggga

SEQ ID NO: 1873626 - RNA, 14 nt, Human herpesvirus 4 (Epstein-Barr virus)
gcggcguggagcug

SEQ ID NO: 1873627 - RNA, 19 nt, Human herpesvirus 4 (Epstein-Barr virus)
ucggcaccuagcccacucc

SEQ ID NO: 1873628 - RNA, 16 nt, Human herpesvirus 4 (Epstein-Barr virus)
ugaagagcccccaccg

SEQ ID NO: 1873629 - RNA, 23 nt, Human herpesvirus 4 (Epstein-Barr virus)
cugcuccaccgccuuaaggccga

SEQ ID NO: 1873630 - RNA, 13 nt, Human herpesvirus 4 (Epstein-Barr virus)
gugucuuggccag

SEQ ID NO: 1873631 - RNA, 12 nt, Human herpesvirus 4 (Epstein-Barr virus)
gaaaagagacug

SEQ ID NO: 1873632 - RNA, 17 nt, Human herpesvirus 4 (Epstein-Barr virus)
ucuacucgaccagcacg

SEQ ID NO: 1873633 - RNA, 13 nt, Human herpesvirus 4 (Epstein-Barr virus)
acugacacacagg

SEQ ID NO: 1873634 - RNA, 20 nt, Human herpesvirus 4 (Epstein-Barr virus)
ugccuuucccccacccugga

SEQ ID NO: 1873635 - RNA, 16 nt, Human herpesvirus 4 (Epstein-Barr virus)
ccuauagauccugggc

SEQ ID NO: 1873636 - RNA, 17 nt, Human herpesvirus 4 (Epstein-Barr virus)
ccccaguggacaaggca

SEQ ID NO: 1873637 - RNA, 21 nt, Human herpesvirus 4 (Epstein-Barr virus)
gccagcgccuccucgcaggcc

SEQ ID NO: 1873638 - RNA, 23 nt, Human herpesvirus 4 (Epstein-Barr virus)
cccggggaaaagagagcugaugg

SEQ ID NO: 1873639 - RNA, 20 nt, Human herpesvirus 4 (Epstein-Barr virus)
cacggcaccgucagccacac

SEQ ID NO: 1873640 - RNA, 13 nt, Human herpesvirus 4 (Epstein-Barr virus)
gagaucaggccaa

SEQ ID NO: 1873641 - RNA, 14 nt, Human herpesvirus 4 (Epstein-Barr virus)
gcgacgcucccggg

SEQ ID NO: 1873642 - RNA, 12 nt, Human herpesvirus 4 (Epstein-Barr virus)
aggcccccggcu

SEQ ID NO: 1873643 - RNA, 23 nt, Human herpesvirus 4 (Epstein-Barr virus)
ucuggucacuaaaguuggucagg

SEQ ID NO: 1873644 - RNA, 19 nt, Human herpesvirus 4 (Epstein-Barr virus)
cugugguugucuucccaga

SEQ ID NO: 1873645 - RNA, 18 nt, Human herpesvirus 4 (Epstein-Barr virus)
uggacucggccacacagu

SEQ ID NO: 1873646 - RNA, 14 nt, Human herpesvirus 4 (Epstein-Barr virus)
guggaacaggagca

SEQ ID NO: 1873647 - RNA, 23 nt, Human herpesvirus 4 (Epstein-Barr virus)
cgccgccccaggggucucuagac

SEQ ID NO: 1873648 - RNA, 18 nt, Human herpesvirus 4 (Epstein-Barr virus)
cuggggcucagacuuagg

SEQ ID NO: 1873649 - RNA, 12 nt, Human herpesvirus 4 (Epstein-Barr virus)
cacagcugcugg

SEQ ID NO: 1873650 - RNA, 15 nt, Human herpesvirus 4 (Epstein-Barr virus)
gguccauggcugcac

SEQ ID NO: 1873651 - RNA, 18 nt, Human herpesvirus 4 (Epstein-Barr virus)
cugggaggugcugaggcc

SEQ ID NO: 1873652 - RNA, 20 nt, Human herpesvirus 4 (Epstein-Barr virus)
aaaacucugcauggagaagc

SEQ ID NO: 1873653 - RNA, 15 nt, Human herpesvirus 4 (Epstein-Barr virus)
cagggcucuguucac

SEQ ID NO: 1873654 - RNA, 10 nt, Human herpesvirus 4 (Epstein-Barr virus)
uaguuggagc

SEQ ID NO: 1873655 - RNA, 13 nt, Human herpesvirus 4 (Epstein-Barr virus)
ccucgguggccug

SEQ ID NO: 1873656 - RNA, 17 nt, Human herpesvirus 4 (Epstein-Barr virus)
agcggcauccucaaggg

SEQ ID NO: 1873657 - RNA, 18 nt, Human herpesvirus 4 (Epstein-Barr virus)
aagucuauacggccacaa

SEQ ID NO: 1873658 - RNA, 21 nt, Human herpesvirus 4 (Epstein-Barr virus)
cggugcugaccggcucggcca

SEQ ID NO: 1873659 - RNA, 15 nt, Human herpesvirus 4 (Epstein-Barr virus)
agccacauucuggaa

SEQ ID NO: 1873660 - RNA, 21 nt, Human herpesvirus 4 (Epstein-Barr virus)
cugagcgugugcacccggcug

SEQ ID NO: 1873661 - RNA, 22 nt, Human herpesvirus 4 (Epstein-Barr virus)
cucugccaacuuugagcugggc

SEQ ID NO: 1873662 - RNA, 21 nt, Human herpesvirus 4 (Epstein-Barr virus)
gugccuaaacgugauggugcu

SEQ ID NO: 1873663 - RNA, 20 nt, Human herpesvirus 4 (Epstein-Barr virus)
ccaaguugcauuggcugcaa

SEQ ID NO: 1873664 - RNA, 17 nt, Human herpesvirus 4 (Epstein-Barr virus)
caggucgcggaccaggg

SEQ ID NO: 1873665 - RNA, 21 nt, Human herpesvirus 4 (Epstein-Barr virus)
aggagaugauaaugaugagga

SEQ ID NO: 1873666 - RNA, 12 nt, Human herpesvirus 4 (Epstein-Barr virus)
aggacaugugca

SEQ ID NO: 1873667 - RNA, 20 nt, Human herpesvirus 4 (Epstein-Barr virus)
gcucuucauguccacugagc

SEQ ID NO: 1873668 - RNA, 17 nt, Human herpesvirus 4 (Epstein-Barr virus)
caaggauggaagagagg

SEQ ID NO: 1873669 - RNA, 13 nt, Human herpesvirus 4 (Epstein-Barr virus)
ccggccugcuggc

SEQ ID NO: 1873670 - RNA, 19 nt, Human herpesvirus 4 (Epstein-Barr virus)
cagcugugugcgcgccgcc

SEQ ID NO: 1873671 - RNA, 17 nt, Human herpesvirus 4 (Epstein-Barr virus)
ugucuaucucuauugcc

SEQ ID NO: 1873672 - RNA, 14 nt, Human herpesvirus 4 (Epstein-Barr virus)
uggagccgggggca

SEQ ID NO: 1873673 - RNA, 18 nt, Human herpesvirus 4 (Epstein-Barr virus)
caugugcauggccugggc

SEQ ID NO: 1873674 - RNA, 22 nt, Human herpesvirus 4 (Epstein-Barr virus)
cgacacgguuauggcagagcuu

SEQ ID NO: 1873675 - RNA, 21 nt, Human herpesvirus 4 (Epstein-Barr virus)
gugggccucucuggcugugcu

SEQ ID NO: 1873676 - RNA, 16 nt, Human herpesvirus 4 (Epstein-Barr virus)
cguggguccccucugc

SEQ ID NO: 1873677 - RNA, 14 nt, Human herpesvirus 4 (Epstein-Barr virus)
gccucugcucuggu

SEQ ID NO: 1873678 - RNA, 17 nt, Human herpesvirus 4 (Epstein-Barr virus)
caccagucccaacaacu

SEQ ID NO: 1873679 - RNA, 12 nt, Human herpesvirus 4 (Epstein-Barr virus)
gcauggccuggg

SEQ ID NO: 1873680 - RNA, 18 nt, Human herpesvirus 4 (Epstein-Barr virus)
gaggggcaggagcaggag

SEQ ID NO: 1873681 - RNA, 16 nt, Human herpesvirus 4 (Epstein-Barr virus)
ccugagacuggacccu

SEQ ID NO: 1873682 - RNA, 13 nt, Human herpesvirus 4 (Epstein-Barr virus)
ugugagacaagcc

SEQ ID NO: 1873683 - RNA, 22 nt, Human herpesvirus 4 (Epstein-Barr virus)
acuucauucucaaacagucccg

SEQ ID NO: 1873684 - RNA, 18 nt, Human herpesvirus 4 (Epstein-Barr virus)
ccugcaccaguggcugcc

SEQ ID NO: 1873685 - RNA, 20 nt, Human herpesvirus 4 (Epstein-Barr virus)
ugcugcgauuuucugaccuu

SEQ ID NO: 1873686 - RNA, 19 nt, Human herpesvirus 4 (Epstein-Barr virus)
aacacggagaucucagaau

SEQ ID NO: 1873687 - RNA, 19 nt, Human herpesvirus 4 (Epstein-Barr virus)
gugucuggcggccgcugcg

SEQ ID NO: 1873688 - RNA, 16 nt, Human herpesvirus 4 (Epstein-Barr virus)
cuggucauggcggacu

SEQ ID NO: 1873689 - RNA, 16 nt, Human herpesvirus 4 (Epstein-Barr virus)
cuaaugccauagucac

SEQ ID NO: 1873690 - RNA, 18 nt, Human herpesvirus 4 (Epstein-Barr virus)
acacccccacuuuuccaa

SEQ ID NO: 1873691 - RNA, 14 nt, Human herpesvirus 4 (Epstein-Barr virus)
aaccuugggggcaa

SEQ ID NO: 1873692 - RNA, 14 nt, Human herpesvirus 4 (Epstein-Barr virus)
guuugcauugcugg

SEQ ID NO: 1873693 - RNA, 18 nt, Human herpesvirus 4 (Epstein-Barr virus)
aggcacggccucgugcaa

SEQ ID NO: 1873694 - RNA, 17 nt, Human herpesvirus 4 (Epstein-Barr virus)
caggagacguggguccc

SEQ ID NO: 1873695 - RNA, 18 nt, Human herpesvirus 4 (Epstein-Barr virus)
ugcggagggucagauuuu

SEQ ID NO: 1873696 - RNA, 24 nt, Human herpesvirus 4 (Epstein-Barr virus)
aggagaugauaaugaugaggagca

SEQ ID NO: 1873697 - RNA, 14 nt, Human herpesvirus 4 (Epstein-Barr virus)
agaccugaucaggg

SEQ ID NO: 1873698 - RNA, 15 nt, Human herpesvirus 4 (Epstein-Barr virus)
ggaggacgugaguga

SEQ ID NO: 1873699 - RNA, 17 nt, Human herpesvirus 4 (Epstein-Barr virus)
ccgccugguggugggug

SEQ ID NO: 1873700 - RNA, 23 nt, Human herpesvirus 4 (Epstein-Barr virus)
gaagcccaagaagaagcccaccu

SEQ ID NO: 1873701 - RNA, 15 nt, Human herpesvirus 4 (Epstein-Barr virus)
aaacucgacuucuga

SEQ ID NO: 1873702 - RNA, 18 nt, Human herpesvirus 4 (Epstein-Barr virus)
caguccaggggccacaca

SEQ ID NO: 1873703 - RNA, 16 nt, Human herpesvirus 4 (Epstein-Barr virus)
ccucgcgacucguggg

SEQ ID NO: 1873704 - RNA, 13 nt, Human herpesvirus 4 (Epstein-Barr virus)
ccauucacagggg

SEQ ID NO: 1873705 - RNA, 15 nt, Human herpesvirus 4 (Epstein-Barr virus)
auauugaauuccaca

SEQ ID NO: 1873706 - RNA, 14 nt, Human herpesvirus 4 (Epstein-Barr virus)
cauuccacccacug

SEQ ID NO: 1873707 - RNA, 21 nt, Human herpesvirus 4 (Epstein-Barr virus)
cagcucgcccacacagcgcca

SEQ ID NO: 1873708 - RNA, 16 nt, Human herpesvirus 4 (Epstein-Barr virus)
cgggaccgcgcccucc

SEQ ID NO: 1873709 - RNA, 14 nt, Human herpesvirus 4 (Epstein-Barr virus)
acgggggucaagca

SEQ ID NO: 1873710 - RNA, 14 nt, Human herpesvirus 4 (Epstein-Barr virus)
aaggcaguccaggg

SEQ ID NO: 1873711 - RNA, 13 nt, Human herpesvirus 4 (Epstein-Barr virus)
ugcugccuggggg

SEQ ID NO: 1873712 - RNA, 22 nt, Human herpesvirus 4 (Epstein-Barr virus)
cuuuaggcguaacuugucuaca

SEQ ID NO: 1873713 - RNA, 22 nt, Human herpesvirus 4 (Epstein-Barr virus)
cccugaccggcgcgggagccgg

SEQ ID NO: 1873714 - RNA, 14 nt, Human herpesvirus 4 (Epstein-Barr virus)
uggccuggagagca

SEQ ID NO: 1873715 - RNA, 15 nt, Human herpesvirus 4 (Epstein-Barr virus)
gcgcuggcuccaggg

SEQ ID NO: 1873716 - RNA, 16 nt, Human herpesvirus 4 (Epstein-Barr virus)
ggccgcgcugcgaggc

SEQ ID NO: 1873717 - RNA, 17 nt, Human herpesvirus 4 (Epstein-Barr virus)
ccgcgacuucgggggcg

SEQ ID NO: 1873718 - RNA, 16 nt, Human herpesvirus 4 (Epstein-Barr virus)
agccuuauuuggacau

SEQ ID NO: 1873719 - RNA, 18 nt, Human herpesvirus 4 (Epstein-Barr virus)
ucccgcgccgcaagcaug

SEQ ID NO: 1873720 - RNA, 20 nt, Human herpesvirus 4 (Epstein-Barr virus)
uuccacccccuggagccagc

SEQ ID NO: 1873721 - RNA, 20 nt, Human herpesvirus 4 (Epstein-Barr virus)
ugcugccagagccucugcca

SEQ ID NO: 1873722 - RNA, 15 nt, Human herpesvirus 4 (Epstein-Barr virus)
accugcacagaucug

SEQ ID NO: 1873723 - RNA, 18 nt, Human herpesvirus 4 (Epstein-Barr virus)
cccaccgacuccgaugcc

SEQ ID NO: 1873724 - RNA, 14 nt, Human herpesvirus 4 (Epstein-Barr virus)
aggagucugcugcg

SEQ ID NO: 1873725 - RNA, 21 nt, Human herpesvirus 4 (Epstein-Barr virus)
cccagcuccgugguccugagg

SEQ ID NO: 1873726 - RNA, 15 nt, Human herpesvirus 4 (Epstein-Barr virus)
cauuucaguggcccu

SEQ ID NO: 1873727 - RNA, 17 nt, Human herpesvirus 4 (Epstein-Barr virus)
gagggccucuggcacgc

SEQ ID NO: 1873728 - RNA, 17 nt, Human herpesvirus 4 (Epstein-Barr virus)
gcguugccagacuccgc

SEQ ID NO: 1873729 - RNA, 22 nt, Human herpesvirus 4 (Epstein-Barr virus)
ccauaccuacaccaccccacca

SEQ ID NO: 1873730 - RNA, 16 nt, Human herpesvirus 4 (Epstein-Barr virus)
cucaugcgccagagcg

SEQ ID NO: 1873731 - RNA, 23 nt, Human herpesvirus 4 (Epstein-Barr virus)
ggggguggaggcugcgccugagc

SEQ ID NO: 1873732 - RNA, 19 nt, Human herpesvirus 4 (Epstein-Barr virus)
cacgggccuggggccauag

SEQ ID NO: 1873733 - RNA, 17 nt, Human herpesvirus 4 (Epstein-Barr virus)
cuggcacacacucccuu

SEQ ID NO: 1873734 - RNA, 23 nt, Human herpesvirus 4 (Epstein-Barr virus)
cccuggggcggcgaugucggggc

SEQ ID NO: 1873735 - RNA, 16 nt, Human herpesvirus 4 (Epstein-Barr virus)
cuacaccaccccacca

SEQ ID NO: 1873736 - RNA, 16 nt, Human herpesvirus 4 (Epstein-Barr virus)
gauggaaagggcaugu

SEQ ID NO: 1873737 - RNA, 12 nt, Human herpesvirus 4 (Epstein-Barr virus)
ccggccucgccu

SEQ ID NO: 1873738 - RNA, 15 nt, Human herpesvirus 4 (Epstein-Barr virus)
ccgucagccagggug

SEQ ID NO: 1873739 - RNA, 15 nt, Human herpesvirus 4 (Epstein-Barr virus)
agugcuccggcugcc

SEQ ID NO: 1873740 - RNA, 19 nt, Human herpesvirus 4 (Epstein-Barr virus)
caacgccggccugcuggcc

SEQ ID NO: 1873741 - RNA, 17 nt, Human herpesvirus 4 (Epstein-Barr virus)
ccgugguccugaggggc

SEQ ID NO: 1873742 - RNA, 16 nt, Human herpesvirus 4 (Epstein-Barr virus)
gccuggcucgccugga

SEQ ID NO: 1873743 - RNA, 20 nt, Human herpesvirus 4 (Epstein-Barr virus)
cuguguacgugccucagaua

SEQ ID NO: 1873744 - RNA, 21 nt, Human herpesvirus 4 (Epstein-Barr virus)
cuagcguacagaaggagaugg

SEQ ID NO: 1873745 - RNA, 16 nt, Human herpesvirus 4 (Epstein-Barr virus)
agaggcccgggggccu

SEQ ID NO: 1873746 - RNA, 13 nt, Human herpesvirus 4 (Epstein-Barr virus)
ucgcccccucugc

SEQ ID NO: 1873747 - RNA, 20 nt, Human herpesvirus 4 (Epstein-Barr virus)
uccaugccaaugggggagga

SEQ ID NO: 1873748 - RNA, 22 nt, Human herpesvirus 4 (Epstein-Barr virus)
caagguucggaaaucuguugac

SEQ ID NO: 1873749 - RNA, 15 nt, Human herpesvirus 4 (Epstein-Barr virus)
ccggccgccccgggc

SEQ ID NO: 1873750 - RNA, 15 nt, Human herpesvirus 4 (Epstein-Barr virus)
ggagaggcagcccca

SEQ ID NO: 1873751 - RNA, 13 nt, Human herpesvirus 4 (Epstein-Barr virus)
cugccuggaucug

SEQ ID NO: 1873752 - RNA, 14 nt, Human herpesvirus 4 (Epstein-Barr virus)
ggcagcagcucugg

SEQ ID NO: 1873753 - RNA, 13 nt, Human herpesvirus 4 (Epstein-Barr virus)
ggaggggcggcag

SEQ ID NO: 1873754 - RNA, 15 nt, Human herpesvirus 4 (Epstein-Barr virus)
cugcaucuuccaggu

SEQ ID NO: 1873755 - RNA, 22 nt, Human herpesvirus 4 (Epstein-Barr virus)
cggcgaugucggggcugcuggc

SEQ ID NO: 1873756 - RNA, 15 nt, Human herpesvirus 4 (Epstein-Barr virus)
aguauuuugcaaaca

SEQ ID NO: 1873757 - RNA, 17 nt, Human herpesvirus 4 (Epstein-Barr virus)
ugcauggagaagcugga

SEQ ID NO: 1873758 - RNA, 12 nt, Human herpesvirus 4 (Epstein-Barr virus)
ccccuggccacc

SEQ ID NO: 1873759 - RNA, 22 nt, Human herpesvirus 4 (Epstein-Barr virus)
gguccccgagggugaggcccag

SEQ ID NO: 1873760 - RNA, 22 nt, Human herpesvirus 4 (Epstein-Barr virus)
uggccaccacaucggacgggca

SEQ ID NO: 1873761 - RNA, 17 nt, Human herpesvirus 4 (Epstein-Barr virus)
ucuuacaccagaggcca

SEQ ID NO: 1873762 - RNA, 14 nt, Human herpesvirus 4 (Epstein-Barr virus)
caugauggugcaga

SEQ ID NO: 1873763 - RNA, 16 nt, Human herpesvirus 4 (Epstein-Barr virus)
guccaggggccacaca

SEQ ID NO: 1873764 - RNA, 12 nt, Human herpesvirus 4 (Epstein-Barr virus)
caggcuccugga

SEQ ID NO: 1873765 - RNA, 22 nt, Human herpesvirus 4 (Epstein-Barr virus)
aggaccggaucgaaggagagcu

SEQ ID NO: 1873766 - RNA, 15 nt, Human herpesvirus 4 (Epstein-Barr virus)
uagggguaacccugu

SEQ ID NO: 1873767 - RNA, 13 nt, Human herpesvirus 4 (Epstein-Barr virus)
cucagccuccaac

SEQ ID NO: 1873768 - RNA, 19 nt, Human herpesvirus 4 (Epstein-Barr virus)
acucgagagaggccucugc

SEQ ID NO: 1873769 - RNA, 17 nt, Human herpesvirus 4 (Epstein-Barr virus)
caggcgacgcucccggg

SEQ ID NO: 1873770 - RNA, 21 nt, Human herpesvirus 4 (Epstein-Barr virus)
gcaucaugcgugaccaccugg

SEQ ID NO: 1873771 - RNA, 14 nt, Human herpesvirus 4 (Epstein-Barr virus)
aauggaauauuaau

SEQ ID NO: 1873772 - RNA, 19 nt, Human herpesvirus 4 (Epstein-Barr virus)
gguacucuuggugcagccc

SEQ ID NO: 1873773 - RNA, 17 nt, Human herpesvirus 4 (Epstein-Barr virus)
ugcucaaggcagucucc

SEQ ID NO: 1873774 - RNA, 15 nt, Human herpesvirus 4 (Epstein-Barr virus)
aagugauuaggagca

SEQ ID NO: 1873775 - RNA, 14 nt, Human herpesvirus 4 (Epstein-Barr virus)
ucgccgccccaggg

SEQ ID NO: 1873776 - RNA, 14 nt, Human herpesvirus 4 (Epstein-Barr virus)
gccacacagccuga

SEQ ID NO: 1873777 - RNA, 19 nt, Human herpesvirus 4 (Epstein-Barr virus)
agucaccuuccagacuaug

SEQ ID NO: 1873778 - RNA, 13 nt, Human herpesvirus 4 (Epstein-Barr virus)
agcagggcccagu

SEQ ID NO: 1873779 - RNA, 21 nt, Human herpesvirus 4 (Epstein-Barr virus)
cucgugcaagcagcaccuguc

SEQ ID NO: 1873780 - RNA, 21 nt, Human herpesvirus 4 (Epstein-Barr virus)
gugguggcccucggugguggg

SEQ ID NO: 1873781 - RNA, 13 nt, Human herpesvirus 4 (Epstein-Barr virus)
gaaccaucagcuc

SEQ ID NO: 1873782 - RNA, 21 nt, Human herpesvirus 4 (Epstein-Barr virus)
ggcccgagguucucuucacua

SEQ ID NO: 1873783 - RNA, 13 nt, Human herpesvirus 4 (Epstein-Barr virus)
gcauggcagccgg

SEQ ID NO: 1873784 - RNA, 18 nt, Human herpesvirus 4 (Epstein-Barr virus)
cgguggccugcucaccau

SEQ ID NO: 1873785 - RNA, 17 nt, Human herpesvirus 4 (Epstein-Barr virus)
uucucuaaucccucugg

SEQ ID NO: 1873786 - RNA, 14 nt, Human herpesvirus 4 (Epstein-Barr virus)
caaggcaguagagg

SEQ ID NO: 1873787 - RNA, 22 nt, Human herpesvirus 4 (Epstein-Barr virus)
gcaccaacaacgaucccaggcc

SEQ ID NO: 1873788 - RNA, 12 nt, Human herpesvirus 4 (Epstein-Barr virus)
agccguggccuu

SEQ ID NO: 1873789 - RNA, 17 nt, Human herpesvirus 4 (Epstein-Barr virus)
acuuuuauuuauugcau

SEQ ID NO: 1873790 - RNA, 12 nt, Human herpesvirus 4 (Epstein-Barr virus)
ccccagccacag

SEQ ID NO: 1873791 - RNA, 16 nt, Human herpesvirus 4 (Epstein-Barr virus)
gaaucugacauuucuc

SEQ ID NO: 1873792 - RNA, 15 nt, Human herpesvirus 4 (Epstein-Barr virus)
agcccggccgaggcc

SEQ ID NO: 1873793 - RNA, 17 nt, Human herpesvirus 4 (Epstein-Barr virus)
aaagucccgagcggccu

SEQ ID NO: 1873794 - RNA, 21 nt, Human herpesvirus 4 (Epstein-Barr virus)
cggaggacugcauccaacgcu

SEQ ID NO: 1873795 - RNA, 15 nt, Human herpesvirus 4 (Epstein-Barr virus)
ugcagcaccucagcu

SEQ ID NO: 1873796 - RNA, 13 nt, Human herpesvirus 4 (Epstein-Barr virus)
ggaggccccggcc

SEQ ID NO: 1873797 - RNA, 19 nt, Human herpesvirus 4 (Epstein-Barr virus)
cccgcaccagggccaggcg

SEQ ID NO: 1873798 - RNA, 21 nt, Human herpesvirus 4 (Epstein-Barr virus)
gucucugaaggauccaugcaa

SEQ ID NO: 1873799 - RNA, 19 nt, Human herpesvirus 4 (Epstein-Barr virus)
aacccccggcucucaggcc

SEQ ID NO: 1873800 - RNA, 19 nt, Human herpesvirus 4 (Epstein-Barr virus)
caggguccaggagaaggcu

SEQ ID NO: 1873801 - RNA, 16 nt, Human herpesvirus 4 (Epstein-Barr virus)
caccuguguccugggc

SEQ ID NO: 1873802 - RNA, 13 nt, Human herpesvirus 4 (Epstein-Barr virus)
ccuagccccgggc

SEQ ID NO: 1873803 - RNA, 16 nt, Human herpesvirus 4 (Epstein-Barr virus)
gccugaguccaacauu

SEQ ID NO: 1873804 - RNA, 22 nt, Human herpesvirus 4 (Epstein-Barr virus)
gccuguggccccggcuggccau

SEQ ID NO: 1873805 - RNA, 15 nt, Human herpesvirus 4 (Epstein-Barr virus)
agcgcggcagaggcc

SEQ ID NO: 1873806 - RNA, 17 nt, Human herpesvirus 4 (Epstein-Barr virus)
uuuauuaggcacaaacu

SEQ ID NO: 1873807 - RNA, 16 nt, Human herpesvirus 4 (Epstein-Barr virus)
cgcuguuuugcagcug

SEQ ID NO: 1873808 - RNA, 13 nt, Human herpesvirus 4 (Epstein-Barr virus)
ucacaggacaugu

SEQ ID NO: 1873809 - RNA, 20 nt, Human herpesvirus 4 (Epstein-Barr virus)
gaagcuggccaggcugguga

SEQ ID NO: 1873810 - RNA, 18 nt, Human herpesvirus 4 (Epstein-Barr virus)
caaacugcgagggggccu

SEQ ID NO: 1873811 - RNA, 13 nt, Human herpesvirus 4 (Epstein-Barr virus)
cuguccugcugaa

SEQ ID NO: 1873812 - RNA, 14 nt, Human herpesvirus 4 (Epstein-Barr virus)
cgggccuggggcca

SEQ ID NO: 1873813 - RNA, 18 nt, Human herpesvirus 4 (Epstein-Barr virus)
uguacgugccucagauag

SEQ ID NO: 1873814 - RNA, 15 nt, Human herpesvirus 4 (Epstein-Barr virus)
ucucuuucuggccaa

SEQ ID NO: 1873815 - RNA, 14 nt, Human herpesvirus 4 (Epstein-Barr virus)
ccugcauggccagg

SEQ ID NO: 1873816 - RNA, 19 nt, Human herpesvirus 4 (Epstein-Barr virus)
gacccgaucagagccccau

SEQ ID NO: 1873817 - RNA, 18 nt, Human herpesvirus 4 (Epstein-Barr virus)
ggugaaacuggcuucugu

SEQ ID NO: 1873818 - RNA, 20 nt, Human herpesvirus 4 (Epstein-Barr virus)
cagcagaagggucagcacag

SEQ ID NO: 1873819 - RNA, 14 nt, Human herpesvirus 4 (Epstein-Barr virus)
cuagguacucuugg

SEQ ID NO: 1873820 - RNA, 18 nt, Human herpesvirus 4 (Epstein-Barr virus)
cuuccagcgcaagcuugc

SEQ ID NO: 1873821 - RNA, 13 nt, Human herpesvirus 4 (Epstein-Barr virus)
uggcuagauuucc

SEQ ID NO: 1873822 - RNA, 21 nt, Human herpesvirus 4 (Epstein-Barr virus)
ccugucucuuucuggccaacc

SEQ ID NO: 1873823 - RNA, 18 nt, Human herpesvirus 4 (Epstein-Barr virus)
ucacuuuguacagacuuu

SEQ ID NO: 1873824 - RNA, 13 nt, Human herpesvirus 4 (Epstein-Barr virus)
ccaugcagcggcg

SEQ ID NO: 1873825 - RNA, 18 nt, Human herpesvirus 4 (Epstein-Barr virus)
cuccgagagcuccgccac

SEQ ID NO: 1873826 - RNA, 15 nt, Human herpesvirus 4 (Epstein-Barr virus)
gucgcguagcucugg

SEQ ID NO: 1873827 - RNA, 15 nt, Human herpesvirus 4 (Epstein-Barr virus)
ccugucucccaccca

SEQ ID NO: 1873828 - RNA, 20 nt, Human herpesvirus 4 (Epstein-Barr virus)
gcauugcuggccgcagcugg

SEQ ID NO: 1873829 - RNA, 14 nt, Human herpesvirus 4 (Epstein-Barr virus)
ucaaaaucaaagua

SEQ ID NO: 1873830 - RNA, 16 nt, Human herpesvirus 4 (Epstein-Barr virus)
cgggagaggcagcccc

SEQ ID NO: 1873831 - RNA, 21 nt, Human herpesvirus 4 (Epstein-Barr virus)
acguggcugcgguggugcgca

SEQ ID NO: 1873832 - RNA, 14 nt, Human herpesvirus 4 (Epstein-Barr virus)
cccgaguuggcauc

SEQ ID NO: 1873833 - RNA, 18 nt, Human herpesvirus 4 (Epstein-Barr virus)
aggagacguguguggcug

SEQ ID NO: 1873834 - RNA, 23 nt, Human herpesvirus 4 (Epstein-Barr virus)
cauggugagacaccuggcccacu

SEQ ID NO: 1873835 - RNA, 13 nt, Human herpesvirus 4 (Epstein-Barr virus)
acacgggccuggg

SEQ ID NO: 1873836 - RNA, 20 nt, Human herpesvirus 4 (Epstein-Barr virus)
gcgagggggccuggugccag

SEQ ID NO: 1873837 - RNA, 13 nt, Human herpesvirus 4 (Epstein-Barr virus)
cacuauauucucc

SEQ ID NO: 1873838 - RNA, 15 nt, Human herpesvirus 4 (Epstein-Barr virus)
aggagaagagaggcu

SEQ ID NO: 1873839 - RNA, 15 nt, Human herpesvirus 4 (Epstein-Barr virus)
acacacaggccuggc

SEQ ID NO: 1873840 - RNA, 22 nt, Human herpesvirus 4 (Epstein-Barr virus)
uuugccaaccugcucucucugg

SEQ ID NO: 1873841 - RNA, 21 nt, Human herpesvirus 4 (Epstein-Barr virus)
gcaacccccggcucucaggcc

SEQ ID NO: 1873842 - RNA, 18 nt, Human herpesvirus 4 (Epstein-Barr virus)
uucccagacucugcuuuc

SEQ ID NO: 1873843 - RNA, 18 nt, Human herpesvirus 4 (Epstein-Barr virus)
caguccacagccaccggc

SEQ ID NO: 1873844 - RNA, 19 nt, Human herpesvirus 4 (Epstein-Barr virus)
ccuggaagaaucauggccu

SEQ ID NO: 1873845 - RNA, 16 nt, Human herpesvirus 4 (Epstein-Barr virus)
acgugaaccucccccc

SEQ ID NO: 1873846 - RNA, 20 nt, Human herpesvirus 4 (Epstein-Barr virus)
aggcagccccaaagcgggug

SEQ ID NO: 1873847 - RNA, 12 nt, Human herpesvirus 4 (Epstein-Barr virus)
aucacuggcaaa

SEQ ID NO: 1873848 - RNA, 16 nt, Human herpesvirus 4 (Epstein-Barr virus)
ugaauuccgucaaggc

SEQ ID NO: 1873849 - RNA, 13 nt, Human herpesvirus 4 (Epstein-Barr virus)
agaagcccaccua

SEQ ID NO: 1873850 - RNA, 20 nt, Human herpesvirus 4 (Epstein-Barr virus)
gggguccggucuugcaggga

SEQ ID NO: 1873851 - RNA, 17 nt, Human herpesvirus 4 (Epstein-Barr virus)
caccuguguccugggca

SEQ ID NO: 1873852 - RNA, 21 nt, Human herpesvirus 4 (Epstein-Barr virus)
aggcacuggacacacauggca

SEQ ID NO: 1873853 - RNA, 17 nt, Human herpesvirus 4 (Epstein-Barr virus)
agcggaugguggggcuu

SEQ ID NO: 1873854 - RNA, 18 nt, Human herpesvirus 4 (Epstein-Barr virus)
cucgugagucugcuggac

SEQ ID NO: 1873855 - RNA, 15 nt, Human herpesvirus 4 (Epstein-Barr virus)
ccucugggguccagg

SEQ ID NO: 1873856 - RNA, 11 nt, Human herpesvirus 4 (Epstein-Barr virus)
uucuccaggcu

SEQ ID NO: 1873857 - RNA, 17 nt, Human herpesvirus 4 (Epstein-Barr virus)
ggagcaggagcaggagc

SEQ ID NO: 1873858 - RNA, 16 nt, Human herpesvirus 4 (Epstein-Barr virus)
cuuggacccugcugcg

SEQ ID NO: 1873859 - RNA, 16 nt, Human herpesvirus 4 (Epstein-Barr virus)
cuuucuggccaaccug

SEQ ID NO: 1873860 - RNA, 15 nt, Human herpesvirus 4 (Epstein-Barr virus)
uaccuggucaagagc

SEQ ID NO: 1873861 - RNA, 18 nt, Human herpesvirus 4 (Epstein-Barr virus)
uauggauagauagccacc

SEQ ID NO: 1873862 - RNA, 17 nt, Human herpesvirus 4 (Epstein-Barr virus)
caggugcccgagccccg

SEQ ID NO: 1873863 - RNA, 17 nt, Human herpesvirus 4 (Epstein-Barr virus)
auucagccaccuccccu

SEQ ID NO: 1873864 - RNA, 15 nt, Human herpesvirus 4 (Epstein-Barr virus)
ugaggcccagccccc

SEQ ID NO: 1873865 - RNA, 12 nt, Human herpesvirus 4 (Epstein-Barr virus)
accccccucuga

SEQ ID NO: 1873866 - RNA, 17 nt, Human herpesvirus 4 (Epstein-Barr virus)
caaugccaacuccccca

SEQ ID NO: 1873867 - RNA, 15 nt, Human herpesvirus 4 (Epstein-Barr virus)
cccaccaccaggcgg

SEQ ID NO: 1873868 - RNA, 16 nt, Human herpesvirus 4 (Epstein-Barr virus)
acgccggccugcuggc

SEQ ID NO: 1873869 - RNA, 13 nt, Human herpesvirus 4 (Epstein-Barr virus)
cuggcagcggccu

SEQ ID NO: 1873870 - RNA, 18 nt, Human herpesvirus 4 (Epstein-Barr virus)
ccggcuggccgccguggc

SEQ ID NO: 1873871 - RNA, 17 nt, Human herpesvirus 4 (Epstein-Barr virus)
gcgccgccucccccagc

SEQ ID NO: 1873872 - RNA, 19 nt, Human herpesvirus 4 (Epstein-Barr virus)
aaggcgacgcggagagguc

SEQ ID NO: 1873873 - RNA, 15 nt, Human herpesvirus 4 (Epstein-Barr virus)
cuucauguccacuga

SEQ ID NO: 1873874 - RNA, 19 nt, Human herpesvirus 4 (Epstein-Barr virus)
cccugcucauaccuccacu

SEQ ID NO: 1873875 - RNA, 13 nt, Human herpesvirus 4 (Epstein-Barr virus)
guggugggcucug

SEQ ID NO: 1873876 - RNA, 15 nt, Human herpesvirus 4 (Epstein-Barr virus)
accgucagccacaca

SEQ ID NO: 1873877 - RNA, 16 nt, Human herpesvirus 4 (Epstein-Barr virus)
agaguaauugcagugg

SEQ ID NO: 1873878 - RNA, 16 nt, Human herpesvirus 4 (Epstein-Barr virus)
cagcaguagcuuggga

SEQ ID NO: 1873879 - RNA, 23 nt, Human herpesvirus 4 (Epstein-Barr virus)
ccugccucucuuaugccuguggc

SEQ ID NO: 1873880 - RNA, 15 nt, Human herpesvirus 4 (Epstein-Barr virus)
cccgcccuccccauc

SEQ ID NO: 1873881 - RNA, 20 nt, Human herpesvirus 4 (Epstein-Barr virus)
cgucagcaacugcguccucu

SEQ ID NO: 1873882 - RNA, 16 nt, Human herpesvirus 4 (Epstein-Barr virus)
gcauauuuucagaccc

SEQ ID NO: 1873883 - RNA, 20 nt, Human herpesvirus 4 (Epstein-Barr virus)
ucuggucgcccccucugccu

SEQ ID NO: 1873884 - RNA, 13 nt, Human herpesvirus 4 (Epstein-Barr virus)
ucuuaucagagag

SEQ ID NO: 1873885 - RNA, 20 nt, Human herpesvirus 4 (Epstein-Barr virus)
ggcggaggagauccgccagg

SEQ ID NO: 1873886 - RNA, 18 nt, Human herpesvirus 4 (Epstein-Barr virus)
ggcacacacucccuuagc

SEQ ID NO: 1873887 - RNA, 17 nt, Human herpesvirus 4 (Epstein-Barr virus)
ccaggcuuucuaugccu

SEQ ID NO: 1873888 - RNA, 14 nt, Human herpesvirus 4 (Epstein-Barr virus)
acccgaucagagcc

SEQ ID NO: 1873889 - RNA, 22 nt, Human herpesvirus 4 (Epstein-Barr virus)
uggcucagcuuggggccaccgg

SEQ ID NO: 1873890 - RNA, 22 nt, Human herpesvirus 4 (Epstein-Barr virus)
gaucagggccaagacauagaga

SEQ ID NO: 1873891 - RNA, 13 nt, Human herpesvirus 4 (Epstein-Barr virus)
caagcucagcccc

SEQ ID NO: 1873892 - RNA, 20 nt, Human herpesvirus 4 (Epstein-Barr virus)
aacccuugcccucuccagca

SEQ ID NO: 1873893 - RNA, 13 nt, Human herpesvirus 4 (Epstein-Barr virus)
gugacgaggaugg

SEQ ID NO: 1873894 - RNA, 18 nt, Human herpesvirus 4 (Epstein-Barr virus)
cuaccugucggcccugcg

SEQ ID NO: 1873895 - RNA, 15 nt, Human herpesvirus 4 (Epstein-Barr virus)
cagggccaggcuguc

SEQ ID NO: 1873896 - RNA, 17 nt, Human herpesvirus 4 (Epstein-Barr virus)
uucccggacaauacacc

SEQ ID NO: 1873897 - RNA, 22 nt, Human herpesvirus 4 (Epstein-Barr virus)
cucugguaguaggcacaucugg

SEQ ID NO: 1873898 - RNA, 19 nt, Human herpesvirus 4 (Epstein-Barr virus)
aacugcgagggggccuggu

SEQ ID NO: 1873899 - RNA, 18 nt, Human herpesvirus 4 (Epstein-Barr virus)
caguagcuugggaacacc

SEQ ID NO: 1873900 - RNA, 18 nt, Human herpesvirus 4 (Epstein-Barr virus)
aggcccccgggugggcug

SEQ ID NO: 1873901 - RNA, 19 nt, Human herpesvirus 4 (Epstein-Barr virus)
ggcccacgucuuuaccacc

SEQ ID NO: 1873902 - RNA, 20 nt, Human herpesvirus 4 (Epstein-Barr virus)
caagaggcagagagccagug

SEQ ID NO: 1873903 - RNA, 15 nt, Human herpesvirus 4 (Epstein-Barr virus)
gcccacgucaaggcc

SEQ ID NO: 1873904 - RNA, 17 nt, Human herpesvirus 4 (Epstein-Barr virus)
acugccuuguccacugg

SEQ ID NO: 1873905 - RNA, 17 nt, Human herpesvirus 4 (Epstein-Barr virus)
cgguuagggaggacacu

SEQ ID NO: 1873906 - RNA, 17 nt, Human herpesvirus 4 (Epstein-Barr virus)
ccagcagggcacagagg

SEQ ID NO: 1873907 - RNA, 22 nt, Human herpesvirus 4 (Epstein-Barr virus)
ccccaaaaguagaggcucaggc

SEQ ID NO: 1873908 - RNA, 14 nt, Human herpesvirus 4 (Epstein-Barr virus)
gcucaaggaggggc

SEQ ID NO: 1873909 - RNA, 18 nt, Human herpesvirus 4 (Epstein-Barr virus)
ggguauguggugccaugu

SEQ ID NO: 1873910 - RNA, 17 nt, Human herpesvirus 4 (Epstein-Barr virus)
cucaugggggaaugagg

SEQ ID NO: 1873911 - RNA, 21 nt, Human herpesvirus 4 (Epstein-Barr virus)
ugagcccaccugucugacuug

SEQ ID NO: 1873912 - RNA, 21 nt, Human herpesvirus 4 (Epstein-Barr virus)
uaguggcaguucgacggccuc

SEQ ID NO: 1873913 - RNA, 20 nt, Human herpesvirus 4 (Epstein-Barr virus)
cggggcuccccagccacagc

SEQ ID NO: 1873914 - RNA, 13 nt, Human herpesvirus 4 (Epstein-Barr virus)
gucaucuggcucu

SEQ ID NO: 1873915 - RNA, 14 nt, Human herpesvirus 4 (Epstein-Barr virus)
ucagcaucacaggu

SEQ ID NO: 1873916 - RNA, 13 nt, Human herpesvirus 4 (Epstein-Barr virus)
guauugcagcugg

SEQ ID NO: 1873917 - RNA, 23 nt, Human herpesvirus 4 (Epstein-Barr virus)
ggaaaaucucgcucagagcuggg

SEQ ID NO: 1873918 - RNA, 12 nt, Human herpesvirus 4 (Epstein-Barr virus)
gcggagauggau

SEQ ID NO: 1873919 - RNA, 16 nt, Human herpesvirus 4 (Epstein-Barr virus)
ggccgcugccaggccg

SEQ ID NO: 1873920 - RNA, 21 nt, Human herpesvirus 4 (Epstein-Barr virus)
ccacagccccacucuugccuc

SEQ ID NO: 1873921 - RNA, 15 nt, Human herpesvirus 4 (Epstein-Barr virus)
ugaaaggggccgagg

SEQ ID NO: 1873922 - RNA, 15 nt, Human herpesvirus 4 (Epstein-Barr virus)
acggaccccccucug

SEQ ID NO: 1873923 - RNA, 21 nt, Human herpesvirus 4 (Epstein-Barr virus)
gcaggaggaggggcaggagca

SEQ ID NO: 1873924 - RNA, 14 nt, Human herpesvirus 4 (Epstein-Barr virus)
uggucacucaggca

SEQ ID NO: 1873925 - RNA, 21 nt, Human herpesvirus 4 (Epstein-Barr virus)
cacugugcacucucucccccg

SEQ ID NO: 1873926 - RNA, 19 nt, Human herpesvirus 4 (Epstein-Barr virus)
aggcggaagaccaggagcc

SEQ ID NO: 1873927 - RNA, 16 nt, Human herpesvirus 4 (Epstein-Barr virus)
ggagucgaagcucuug

SEQ ID NO: 1873928 - RNA, 21 nt, Human herpesvirus 4 (Epstein-Barr virus)
auugcuugccuuuuugccaca

SEQ ID NO: 1873929 - RNA, 16 nt, Human herpesvirus 4 (Epstein-Barr virus)
cagcauggcagccggg

SEQ ID NO: 1873930 - RNA, 17 nt, Human herpesvirus 4 (Epstein-Barr virus)
ggcaagggcucaccagg

SEQ ID NO: 1873931 - RNA, 13 nt, Human herpesvirus 4 (Epstein-Barr virus)
ccagggguccccg

SEQ ID NO: 1873932 - RNA, 22 nt, Human herpesvirus 4 (Epstein-Barr virus)
ugcaccgauagcauggccgcca

SEQ ID NO: 1873933 - RNA, 13 nt, Human herpesvirus 4 (Epstein-Barr virus)
gcaaaagauggac

SEQ ID NO: 1873934 - RNA, 12 nt, Human herpesvirus 4 (Epstein-Barr virus)
ggagcaggagga

SEQ ID NO: 1873935 - RNA, 13 nt, Human herpesvirus 4 (Epstein-Barr virus)
gcagcucuggcac

SEQ ID NO: 1873936 - RNA, 20 nt, Human herpesvirus 4 (Epstein-Barr virus)
gcgaggggcgccccagggca

SEQ ID NO: 1873937 - RNA, 12 nt, Human herpesvirus 4 (Epstein-Barr virus)
cucccucccccu

SEQ ID NO: 1873938 - RNA, 16 nt, Human herpesvirus 4 (Epstein-Barr virus)
uacgcugcccuagagg

SEQ ID NO: 1873939 - RNA, 11 nt, Human herpesvirus 4 (Epstein-Barr virus)
ucagagagcau

SEQ ID NO: 1873940 - RNA, 14 nt, Human herpesvirus 4 (Epstein-Barr virus)
ugccgucccagggc

SEQ ID NO: 1873941 - RNA, 22 nt, Human herpesvirus 4 (Epstein-Barr virus)
guggacaaggcaguagaggaca

SEQ ID NO: 1873942 - RNA, 14 nt, Human herpesvirus 4 (Epstein-Barr virus)
ggcucccucccccu

SEQ ID NO: 1873943 - RNA, 20 nt, Human herpesvirus 4 (Epstein-Barr virus)
ccuggggccauaguggcggc

SEQ ID NO: 1873944 - RNA, 13 nt, Human herpesvirus 4 (Epstein-Barr virus)
aacacgggccugg

SEQ ID NO: 1873945 - RNA, 16 nt, Human herpesvirus 4 (Epstein-Barr virus)
acccuucugcugcugc

SEQ ID NO: 1873946 - RNA, 17 nt, Human herpesvirus 4 (Epstein-Barr virus)
cuguacuuguccgggcu

SEQ ID NO: 1873947 - RNA, 23 nt, Human herpesvirus 4 (Epstein-Barr virus)
ucucuggcugugcugacccuucu

SEQ ID NO: 1873948 - RNA, 15 nt, Human herpesvirus 4 (Epstein-Barr virus)
uccaggugacagcag

SEQ ID NO: 1873949 - RNA, 18 nt, Human herpesvirus 4 (Epstein-Barr virus)
ggacacugccaagguuga

SEQ ID NO: 1873950 - RNA, 13 nt, Human herpesvirus 4 (Epstein-Barr virus)
augcaggccugga

SEQ ID NO: 1873951 - RNA, 21 nt, Human herpesvirus 4 (Epstein-Barr virus)
cauugcaucgcucaccccugu

SEQ ID NO: 1873952 - RNA, 22 nt, Human herpesvirus 4 (Epstein-Barr virus)
uuguauugugaggaaaggccuu

SEQ ID NO: 1873953 - RNA, 12 nt, Human herpesvirus 4 (Epstein-Barr virus)
agguggccacac

SEQ ID NO: 1873954 - RNA, 20 nt, Human herpesvirus 4 (Epstein-Barr virus)
gugaggcuauaacgcagguc

SEQ ID NO: 1873955 - RNA, 16 nt, Human herpesvirus 4 (Epstein-Barr virus)
agacccaucugagggc

SEQ ID NO: 1873956 - RNA, 22 nt, Human herpesvirus 4 (Epstein-Barr virus)
uacacucuggggucucaggccu

SEQ ID NO: 1873957 - RNA, 14 nt, Human herpesvirus 4 (Epstein-Barr virus)
uguacugcgaugag

SEQ ID NO: 1873958 - RNA, 18 nt, Human herpesvirus 4 (Epstein-Barr virus)
ucgcagcuggaggaaugc

SEQ ID NO: 1873959 - RNA, 20 nt, Human herpesvirus 4 (Epstein-Barr virus)
ccgaggcagacaaggccccg

SEQ ID NO: 1873960 - RNA, 21 nt, Human herpesvirus 4 (Epstein-Barr virus)
guagaagugugucccccucca

SEQ ID NO: 1873961 - RNA, 15 nt, Human herpesvirus 4 (Epstein-Barr virus)
cccuuugccuggggc

SEQ ID NO: 1873962 - RNA, 21 nt, Human herpesvirus 4 (Epstein-Barr virus)
uucugaggcggcuguggccuc

SEQ ID NO: 1873963 - RNA, 21 nt, Human herpesvirus 4 (Epstein-Barr virus)
acuuauguuucaagcagcuca

SEQ ID NO: 1873964 - RNA, 22 nt, Human herpesvirus 4 (Epstein-Barr virus)
ugccuaucauguuucaaccgcu

SEQ ID NO: 1873965 - RNA, 22 nt, Human herpesvirus 4 (Epstein-Barr virus)
cucgccucauccuggcccccaa

SEQ ID NO: 1873966 - RNA, 22 nt, Human herpesvirus 4 (Epstein-Barr virus)
gugcgcgccgccagcauggcag

SEQ ID NO: 1873967 - RNA, 17 nt, Human herpesvirus 4 (Epstein-Barr virus)
gcucaccccugugcagg

SEQ ID NO: 1873968 - RNA, 15 nt, Human herpesvirus 4 (Epstein-Barr virus)
gccuguaauuguugc

SEQ ID NO: 1873969 - RNA, 22 nt, Human herpesvirus 4 (Epstein-Barr virus)
agacaccuggcccacuggaugc

SEQ ID NO: 1873970 - RNA, 14 nt, Human herpesvirus 4 (Epstein-Barr virus)
ccugcuucacgccu

SEQ ID NO: 1873971 - RNA, 23 nt, Human herpesvirus 4 (Epstein-Barr virus)
acaccaccccaccauaugaugac

SEQ ID NO: 1873972 - RNA, 19 nt, Human herpesvirus 4 (Epstein-Barr virus)
ugggggcuacaggaggcca

SEQ ID NO: 1873973 - RNA, 22 nt, Human herpesvirus 4 (Epstein-Barr virus)
aaugggacgucuuguaaaacuu

SEQ ID NO: 1873974 - RNA, 14 nt, Human herpesvirus 4 (Epstein-Barr virus)
cucucaggaacucc

SEQ ID NO: 1873975 - RNA, 16 nt, Human herpesvirus 4 (Epstein-Barr virus)
agaaucugggcuggga

SEQ ID NO: 1873976 - RNA, 21 nt, Human herpesvirus 4 (Epstein-Barr virus)
cugucucuuucuggccaaccu

SEQ ID NO: 1873977 - RNA, 21 nt, Human herpesvirus 4 (Epstein-Barr virus)
ucuugccguggcgccugggga

SEQ ID NO: 1873978 - RNA, 23 nt, Human herpesvirus 4 (Epstein-Barr virus)
gcacuuugaaagaugucaaacau

SEQ ID NO: 1873979 - RNA, 20 nt, Human herpesvirus 4 (Epstein-Barr virus)
auacaggcccgcaauuucca

SEQ ID NO: 1873980 - RNA, 16 nt, Human herpesvirus 4 (Epstein-Barr virus)
acgaggacgaggaggc

SEQ ID NO: 1873981 - RNA, 16 nt, Human herpesvirus 4 (Epstein-Barr virus)
aaagggcauguggugg

SEQ ID NO: 1873982 - RNA, 19 nt, Human herpesvirus 4 (Epstein-Barr virus)
aggccucagcgucaggaga

SEQ ID NO: 1873983 - RNA, 18 nt, Human herpesvirus 4 (Epstein-Barr virus)
ggccauucgacaggccau

SEQ ID NO: 1873984 - RNA, 15 nt, Human herpesvirus 4 (Epstein-Barr virus)
gcaguccaggggcca

SEQ ID NO: 1873985 - RNA, 16 nt, Human herpesvirus 4 (Epstein-Barr virus)
gccacccgucccgggu

SEQ ID NO: 1873986 - RNA, 14 nt, Human herpesvirus 4 (Epstein-Barr virus)
gcugagcgugugca

SEQ ID NO: 1873987 - RNA, 13 nt, Human herpesvirus 4 (Epstein-Barr virus)
cagacagccgcgg

SEQ ID NO: 1873988 - RNA, 20 nt, Human herpesvirus 4 (Epstein-Barr virus)
caugccuccccagcaacaga

SEQ ID NO: 1873989 - RNA, 20 nt, Human herpesvirus 4 (Epstein-Barr virus)
agcucauaugccgcugcaca

SEQ ID NO: 1873990 - RNA, 18 nt, Human herpesvirus 4 (Epstein-Barr virus)
ccaucugcuucuggcucu

SEQ ID NO: 1873991 - RNA, 18 nt, Human herpesvirus 4 (Epstein-Barr virus)
uccgcaccacagaaacua

SEQ ID NO: 1873992 - RNA, 14 nt, Human herpesvirus 4 (Epstein-Barr virus)
auuugcugacauau

SEQ ID NO: 1873993 - RNA, 17 nt, Human herpesvirus 4 (Epstein-Barr virus)
uuaauguccaguggggu

SEQ ID NO: 1873994 - RNA, 13 nt, Human herpesvirus 4 (Epstein-Barr virus)
guuuuaacaccug

SEQ ID NO: 1873995 - RNA, 17 nt, Human herpesvirus 4 (Epstein-Barr virus)
aacggcccguggccugc

SEQ ID NO: 1873996 - RNA, 14 nt, Human herpesvirus 4 (Epstein-Barr virus)
guccaggagucugc

SEQ ID NO: 1873997 - RNA, 16 nt, Human herpesvirus 4 (Epstein-Barr virus)
aggggcaggaggggca

SEQ ID NO: 1873998 - RNA, 22 nt, Human herpesvirus 4 (Epstein-Barr virus)
aagcuacaaacacgggccuggg

SEQ ID NO: 1873999 - RNA, 18 nt, Human herpesvirus 4 (Epstein-Barr virus)
ggccaaccugccucucuu

SEQ ID NO: 1874000 - RNA, 18 nt, Human herpesvirus 4 (Epstein-Barr virus)
ccggcgccaccugcaggg

SEQ ID NO: 1874001 - RNA, 19 nt, Human herpesvirus 4 (Epstein-Barr virus)
aagacuccugccugaauca

SEQ ID NO: 1874002 - RNA, 14 nt, Human herpesvirus 4 (Epstein-Barr virus)
cguggguccccucu

SEQ ID NO: 1874003 - RNA, 17 nt, Human herpesvirus 4 (Epstein-Barr virus)
uugucggacgaggagga

SEQ ID NO: 1874004 - RNA, 16 nt, Human herpesvirus 4 (Epstein-Barr virus)
agcaggauuccugauu

SEQ ID NO: 1874005 - RNA, 21 nt, Human herpesvirus 4 (Epstein-Barr virus)
agacccaucugagggcaguga

SEQ ID NO: 1874006 - RNA, 16 nt, Human herpesvirus 4 (Epstein-Barr virus)
cccuagccaccguggc

SEQ ID NO: 1874007 - RNA, 14 nt, Human herpesvirus 4 (Epstein-Barr virus)
cuauggaggccccc

SEQ ID NO: 1874008 - RNA, 13 nt, Human herpesvirus 4 (Epstein-Barr virus)
uggugggacugag

SEQ ID NO: 1874009 - RNA, 14 nt, Human herpesvirus 4 (Epstein-Barr virus)
cuuggcaguguccu

SEQ ID NO: 1874010 - RNA, 12 nt, Human herpesvirus 4 (Epstein-Barr virus)
uauuuacagcca

SEQ ID NO: 1874011 - RNA, 16 nt, Human herpesvirus 4 (Epstein-Barr virus)
ggaaugacgggcuccc

SEQ ID NO: 1874012 - RNA, 21 nt, Human herpesvirus 4 (Epstein-Barr virus)
gaauccaguaugccugccugu

SEQ ID NO: 1874013 - RNA, 17 nt, Human herpesvirus 4 (Epstein-Barr virus)
aacggcgagcaggguga

SEQ ID NO: 1874014 - RNA, 19 nt, Human herpesvirus 4 (Epstein-Barr virus)
uccccgagggugaggccca

SEQ ID NO: 1874015 - RNA, 14 nt, Human herpesvirus 4 (Epstein-Barr virus)
cuuugccagcaacu

SEQ ID NO: 1874016 - RNA, 16 nt, Human herpesvirus 4 (Epstein-Barr virus)
acggggugcucccccu

SEQ ID NO: 1874017 - RNA, 23 nt, Human herpesvirus 4 (Epstein-Barr virus)
aacuuguuaggagacgcccucaa

SEQ ID NO: 1874018 - RNA, 12 nt, Human herpesvirus 4 (Epstein-Barr virus)
cggcucucaggc

SEQ ID NO: 1874019 - RNA, 14 nt, Human herpesvirus 4 (Epstein-Barr virus)
cuggcucuucuggg

SEQ ID NO: 1874020 - RNA, 13 nt, Human herpesvirus 4 (Epstein-Barr virus)
ccaggugguuaca

SEQ ID NO: 1874021 - RNA, 21 nt, Human herpesvirus 4 (Epstein-Barr virus)
gccauaaguccucauggcagg

SEQ ID NO: 1874022 - RNA, 15 nt, Human herpesvirus 4 (Epstein-Barr virus)
caagcuccggcugcc

SEQ ID NO: 1874023 - RNA, 19 nt, Human herpesvirus 4 (Epstein-Barr virus)
cuaugcauuuccugcccuc

SEQ ID NO: 1874024 - RNA, 17 nt, Human herpesvirus 4 (Epstein-Barr virus)
ccaugacaucacagagg

SEQ ID NO: 1874025 - RNA, 14 nt, Human herpesvirus 4 (Epstein-Barr virus)
cgcggugagggccg

SEQ ID NO: 1874026 - RNA, 14 nt, Human herpesvirus 4 (Epstein-Barr virus)
agguggcugcugcc

SEQ ID NO: 1874027 - RNA, 14 nt, Human herpesvirus 4 (Epstein-Barr virus)
caggaucagggcca

SEQ ID NO: 1874028 - RNA, 14 nt, Human herpesvirus 4 (Epstein-Barr virus)
aucugaccacggcc

SEQ ID NO: 1874029 - RNA, 14 nt, Human herpesvirus 4 (Epstein-Barr virus)
uugaugauauugaa

SEQ ID NO: 1874030 - RNA, 18 nt, Human herpesvirus 4 (Epstein-Barr virus)
gcucagcucaaccgccag

SEQ ID NO: 1874031 - RNA, 13 nt, Human herpesvirus 4 (Epstein-Barr virus)
gccuccuggccag

SEQ ID NO: 1874032 - RNA, 19 nt, Human herpesvirus 4 (Epstein-Barr virus)
gccacguccccggccuccc

SEQ ID NO: 1874033 - RNA, 23 nt, Human herpesvirus 4 (Epstein-Barr virus)
ggcaccuguccuugucugcugcc

SEQ ID NO: 1874034 - RNA, 22 nt, Human herpesvirus 4 (Epstein-Barr virus)
uagaaacuaugcaugagccaca

SEQ ID NO: 1874035 - RNA, 20 nt, Human herpesvirus 4 (Epstein-Barr virus)
acucuggggucucaggccuc

SEQ ID NO: 1874036 - RNA, 14 nt, Human herpesvirus 4 (Epstein-Barr virus)
cccugcaagccaag

SEQ ID NO: 1874037 - RNA, 15 nt, Human herpesvirus 4 (Epstein-Barr virus)
aagcuggccaggcug

SEQ ID NO: 1874038 - RNA, 15 nt, Human herpesvirus 4 (Epstein-Barr virus)
cagcuuggggccacc

SEQ ID NO: 1874039 - RNA, 22 nt, Human herpesvirus 4 (Epstein-Barr virus)
ccggucguagucauccgaggcu

SEQ ID NO: 1874040 - RNA, 16 nt, Human herpesvirus 4 (Epstein-Barr virus)
cgcgcagccuguucau

SEQ ID NO: 1874041 - RNA, 16 nt, Human herpesvirus 4 (Epstein-Barr virus)
aaaccagucuacgacc

SEQ ID NO: 1874042 - RNA, 13 nt, Human herpesvirus 4 (Epstein-Barr virus)
gugcguggucggg

SEQ ID NO: 1874043 - RNA, 15 nt, Human herpesvirus 4 (Epstein-Barr virus)
acgugcaaggaugga

SEQ ID NO: 1874044 - RNA, 17 nt, Human herpesvirus 4 (Epstein-Barr virus)
caaguaccagcuggugg

SEQ ID NO: 1874045 - RNA, 14 nt, Human herpesvirus 4 (Epstein-Barr virus)
ccuggcggcccagc

SEQ ID NO: 1874046 - RNA, 17 nt, Human herpesvirus 4 (Epstein-Barr virus)
agcggacgguggggcuc

SEQ ID NO: 1874047 - RNA, 22 nt, Human herpesvirus 4 (Epstein-Barr virus)
gagcagauuuccgucagccagg

SEQ ID NO: 1874048 - RNA, 18 nt, Human herpesvirus 4 (Epstein-Barr virus)
ccuuggggguggugggcu

SEQ ID NO: 1874049 - RNA, 18 nt, Human herpesvirus 4 (Epstein-Barr virus)
cuccguccuuguccagga

SEQ ID NO: 1874050 - RNA, 17 nt, Human herpesvirus 4 (Epstein-Barr virus)
augcagaaggggcccug

SEQ ID NO: 1874051 - RNA, 16 nt, Human herpesvirus 4 (Epstein-Barr virus)
ugcucaccaugguagc

SEQ ID NO: 1874052 - RNA, 15 nt, Human herpesvirus 4 (Epstein-Barr virus)
agagcucuggaggac

SEQ ID NO: 1874053 - RNA, 15 nt, Human herpesvirus 4 (Epstein-Barr virus)
cauccccagcccagc

SEQ ID NO: 1874054 - RNA, 18 nt, Human herpesvirus 4 (Epstein-Barr virus)
cauugggcuaacgggagg

SEQ ID NO: 1874055 - RNA, 22 nt, Human herpesvirus 4 (Epstein-Barr virus)
ccggguuugauguuucuguggc

SEQ ID NO: 1874056 - RNA, 15 nt, Human herpesvirus 4 (Epstein-Barr virus)
cgggcccgggugccu

SEQ ID NO: 1874057 - RNA, 22 nt, Human herpesvirus 4 (Epstein-Barr virus)
augcgugaccaccuggccaggg

SEQ ID NO: 1874058 - RNA, 10 nt, Human herpesvirus 4 (Epstein-Barr virus)
ggcacccagg

SEQ ID NO: 1874059 - RNA, 22 nt, Human herpesvirus 4 (Epstein-Barr virus)
caagggaaaggaagggggcccu

SEQ ID NO: 1874060 - RNA, 17 nt, Human herpesvirus 4 (Epstein-Barr virus)
uauacuaacacgaaugc

SEQ ID NO: 1874061 - RNA, 21 nt, Human herpesvirus 4 (Epstein-Barr virus)
cuguaccugaugagucacacc

SEQ ID NO: 1874062 - RNA, 16 nt, Human herpesvirus 4 (Epstein-Barr virus)
ggacuuccugggaggu

SEQ ID NO: 1874063 - RNA, 13 nt, Human herpesvirus 4 (Epstein-Barr virus)
gugccagaggccc

SEQ ID NO: 1874064 - RNA, 17 nt, Human herpesvirus 4 (Epstein-Barr virus)
cgcagccacguccagac

SEQ ID NO: 1874065 - RNA, 20 nt, Human herpesvirus 4 (Epstein-Barr virus)
ccagaaggcuccggcggcag

SEQ ID NO: 1874066 - RNA, 19 nt, Human herpesvirus 4 (Epstein-Barr virus)
aucugggaguguagaggug

SEQ ID NO: 1874067 - RNA, 14 nt, Human herpesvirus 4 (Epstein-Barr virus)
ccaugagugccaug

SEQ ID NO: 1874068 - RNA, 16 nt, Human herpesvirus 4 (Epstein-Barr virus)
ggcuccccauagacuc

SEQ ID NO: 1874069 - RNA, 17 nt, Human herpesvirus 4 (Epstein-Barr virus)
cgaggacggggaagagg

SEQ ID NO: 1874070 - RNA, 20 nt, Human herpesvirus 4 (Epstein-Barr virus)
ugcagugggccucucuggcu

SEQ ID NO: 1874071 - RNA, 17 nt, Human herpesvirus 4 (Epstein-Barr virus)
ggcccagugcacccagg

SEQ ID NO: 1874072 - RNA, 19 nt, Human herpesvirus 4 (Epstein-Barr virus)
uaugaaggcuggcaaagau

SEQ ID NO: 1874073 - RNA, 19 nt, Human herpesvirus 4 (Epstein-Barr virus)
uuccucauuggcuuugccc

SEQ ID NO: 1874074 - RNA, 23 nt, Human herpesvirus 4 (Epstein-Barr virus)
aggggccagguacaggaccugga

SEQ ID NO: 1874075 - RNA, 21 nt, Human herpesvirus 4 (Epstein-Barr virus)
agguuucugggcauaaauucu

SEQ ID NO: 1874076 - RNA, 15 nt, Human herpesvirus 4 (Epstein-Barr virus)
ugccaucgggacaga

SEQ ID NO: 1874077 - RNA, 17 nt, Human herpesvirus 4 (Epstein-Barr virus)
cggugcaaggacggggg

SEQ ID NO: 1874078 - RNA, 14 nt, Human herpesvirus 4 (Epstein-Barr virus)
uagauauagaggcu

SEQ ID NO: 1874079 - RNA, 20 nt, Human herpesvirus 4 (Epstein-Barr virus)
caggacuaaccaugccaucu

SEQ ID NO: 1874080 - RNA, 12 nt, Human herpesvirus 4 (Epstein-Barr virus)
ugagggaaaagg

SEQ ID NO: 1874081 - RNA, 12 nt, Human herpesvirus 4 (Epstein-Barr virus)
cauggccugggc

SEQ ID NO: 1874082 - RNA, 23 nt, Human herpesvirus 4 (Epstein-Barr virus)
ggcagcgaagaacacuccacaga

SEQ ID NO: 1874083 - RNA, 20 nt, Human herpesvirus 4 (Epstein-Barr virus)
ccacagagcaucagaugaga

SEQ ID NO: 1874084 - RNA, 13 nt, Human herpesvirus 4 (Epstein-Barr virus)
caauauccaucug

SEQ ID NO: 1874085 - RNA, 18 nt, Human herpesvirus 4 (Epstein-Barr virus)
aagaucgugaggccugag

SEQ ID NO: 1874086 - RNA, 20 nt, Human herpesvirus 4 (Epstein-Barr virus)
aagugauuaggagcagggcc

SEQ ID NO: 1874087 - RNA, 19 nt, Human herpesvirus 4 (Epstein-Barr virus)
cugcguggcuggacggagg

SEQ ID NO: 1874088 - RNA, 14 nt, Human herpesvirus 4 (Epstein-Barr virus)
gucucaugggggaa

SEQ ID NO: 1874089 - RNA, 15 nt, Human herpesvirus 4 (Epstein-Barr virus)
cccuccgcagccgcu

SEQ ID NO: 1874090 - RNA, 17 nt, Human herpesvirus 4 (Epstein-Barr virus)
agcuacacucugggguc

SEQ ID NO: 1874091 - RNA, 14 nt, Human herpesvirus 4 (Epstein-Barr virus)
agccccagccccuc

SEQ ID NO: 1874092 - RNA, 16 nt, Human herpesvirus 4 (Epstein-Barr virus)
uaggagacgcccucaa

SEQ ID NO: 1874093 - RNA, 17 nt, Human herpesvirus 4 (Epstein-Barr virus)
cgugguugggcagaacc

SEQ ID NO: 1874094 - RNA, 15 nt, Human herpesvirus 4 (Epstein-Barr virus)
gcaggucaggucccc

SEQ ID NO: 1874095 - RNA, 12 nt, Human herpesvirus 4 (Epstein-Barr virus)
ccaggucacaga

SEQ ID NO: 1874096 - RNA, 15 nt, Human herpesvirus 4 (Epstein-Barr virus)
cccggggguggcagc

SEQ ID NO: 1874097 - RNA, 17 nt, Human herpesvirus 4 (Epstein-Barr virus)
uuuaaggaaugaacacu

SEQ ID NO: 1874098 - RNA, 13 nt, Human herpesvirus 4 (Epstein-Barr virus)
accaaggcccuag

SEQ ID NO: 1874099 - RNA, 14 nt, Human herpesvirus 4 (Epstein-Barr virus)
acucaagagaucag

SEQ ID NO: 1874100 - RNA, 17 nt, Human herpesvirus 4 (Epstein-Barr virus)
ccagaucgccugccacu

SEQ ID NO: 1874101 - RNA, 23 nt, Human herpesvirus 4 (Epstein-Barr virus)
uacccucauugugcugaagccca

SEQ ID NO: 1874102 - RNA, 13 nt, Human herpesvirus 4 (Epstein-Barr virus)
uggggcaggcccc

SEQ ID NO: 1874103 - RNA, 15 nt, Human herpesvirus 4 (Epstein-Barr virus)
ugcaccagcuccagg

SEQ ID NO: 1874104 - RNA, 20 nt, Human herpesvirus 4 (Epstein-Barr virus)
agaggcaaacauacaggagg

SEQ ID NO: 1874105 - RNA, 20 nt, Human herpesvirus 4 (Epstein-Barr virus)
gccuccaacaggugcccgag

SEQ ID NO: 1874106 - RNA, 18 nt, Human herpesvirus 4 (Epstein-Barr virus)
guagccacccgucccggg

SEQ ID NO: 1874107 - RNA, 14 nt, Human herpesvirus 4 (Epstein-Barr virus)
cugcccuucagugu

SEQ ID NO: 1874108 - RNA, 19 nt, Human herpesvirus 4 (Epstein-Barr virus)
ggcuggcaaagauccccag

SEQ ID NO: 1874109 - RNA, 20 nt, Human herpesvirus 4 (Epstein-Barr virus)
gccuccagcucggccagcag

SEQ ID NO: 1874110 - RNA, 16 nt, Human herpesvirus 4 (Epstein-Barr virus)
ggugggggugggugca

SEQ ID NO: 1874111 - RNA, 13 nt, Human herpesvirus 4 (Epstein-Barr virus)
cgagggugaggcc

SEQ ID NO: 1874112 - RNA, 18 nt, Human herpesvirus 4 (Epstein-Barr virus)
ccggcccuuugccugggg

SEQ ID NO: 1874113 - RNA, 13 nt, Human herpesvirus 4 (Epstein-Barr virus)
ucgcucagagcug

SEQ ID NO: 1874114 - RNA, 16 nt, Human herpesvirus 4 (Epstein-Barr virus)
ccucaaaggccucggc

SEQ ID NO: 1874115 - RNA, 20 nt, Human herpesvirus 4 (Epstein-Barr virus)
ccccagcgcuggcuccaggg

SEQ ID NO: 1874116 - RNA, 19 nt, Human herpesvirus 4 (Epstein-Barr virus)
caugcuauggugccggggc

SEQ ID NO: 1874117 - RNA, 18 nt, Human herpesvirus 4 (Epstein-Barr virus)
ccaccacggugcagccua

SEQ ID NO: 1874118 - RNA, 16 nt, Human herpesvirus 4 (Epstein-Barr virus)
gauaaucugggcagcc

SEQ ID NO: 1874119 - RNA, 14 nt, Human herpesvirus 4 (Epstein-Barr virus)
ccagccaucaugcu

SEQ ID NO: 1874120 - RNA, 13 nt, Human herpesvirus 4 (Epstein-Barr virus)
gccuccggccgcc

SEQ ID NO: 1874121 - RNA, 23 nt, Human herpesvirus 4 (Epstein-Barr virus)
ccugaauccgcgcagccuguuca

SEQ ID NO: 1874122 - RNA, 15 nt, Human herpesvirus 4 (Epstein-Barr virus)
aggucuccagagggc

SEQ ID NO: 1874123 - RNA, 19 nt, Human herpesvirus 4 (Epstein-Barr virus)
ccgcuucagacagccgcgg

SEQ ID NO: 1874124 - RNA, 22 nt, Human herpesvirus 4 (Epstein-Barr virus)
caccauccacagccccacucuu

SEQ ID NO: 1874125 - RNA, 16 nt, Human herpesvirus 4 (Epstein-Barr virus)
uauugaugugacuugu

SEQ ID NO: 1874126 - RNA, 15 nt, Human herpesvirus 4 (Epstein-Barr virus)
aguuggcauuggcgu

SEQ ID NO: 1874127 - RNA, 23 nt, Human herpesvirus 4 (Epstein-Barr virus)
ggccugcuggccgagcuggaggc

SEQ ID NO: 1874128 - RNA, 18 nt, Human herpesvirus 4 (Epstein-Barr virus)
gucacuaaaguuggucag

SEQ ID NO: 1874129 - RNA, 19 nt, Human herpesvirus 4 (Epstein-Barr virus)
caauaaaguugaugauauu

SEQ ID NO: 1874130 - RNA, 18 nt, Human herpesvirus 4 (Epstein-Barr virus)
ucccgucauucuuucggg

SEQ ID NO: 1874131 - RNA, 17 nt, Human herpesvirus 4 (Epstein-Barr virus)
cguccuuguccaggaga

SEQ ID NO: 1874132 - RNA, 18 nt, Human herpesvirus 4 (Epstein-Barr virus)
ugucuccugacgccaaug

SEQ ID NO: 1874133 - RNA, 18 nt, Human herpesvirus 4 (Epstein-Barr virus)
ggaggggaccacuagguc

SEQ ID NO: 1874134 - RNA, 19 nt, Human herpesvirus 4 (Epstein-Barr virus)
aguaaggccgcugccaggc

SEQ ID NO: 1874135 - RNA, 19 nt, Human herpesvirus 4 (Epstein-Barr virus)
cugucauugagguaaaaag

SEQ ID NO: 1874136 - RNA, 21 nt, Human herpesvirus 4 (Epstein-Barr virus)
caaaacugguggacucuauug

SEQ ID NO: 1874137 - RNA, 15 nt, Human herpesvirus 4 (Epstein-Barr virus)
uacccccuggccacc

SEQ ID NO: 1874138 - RNA, 16 nt, Human herpesvirus 4 (Epstein-Barr virus)
gggaacgugacaggca

SEQ ID NO: 1874139 - RNA, 11 nt, Human herpesvirus 4 (Epstein-Barr virus)
gccugccaaag

SEQ ID NO: 1874140 - RNA, 15 nt, Human herpesvirus 4 (Epstein-Barr virus)
cuugugcuccugaua

SEQ ID NO: 1874141 - RNA, 18 nt, Human herpesvirus 4 (Epstein-Barr virus)
cccagcccuuaacacacc

SEQ ID NO: 1874142 - RNA, 22 nt, Human herpesvirus 4 (Epstein-Barr virus)
cagucucaaucucucccacgga

SEQ ID NO: 1874143 - RNA, 19 nt, Human herpesvirus 4 (Epstein-Barr virus)
ggccuuccucugccuggcc

SEQ ID NO: 1874144 - RNA, 13 nt, Human herpesvirus 4 (Epstein-Barr virus)
ugacgcuccagga

SEQ ID NO: 1874145 - RNA, 16 nt, Human herpesvirus 4 (Epstein-Barr virus)
ucccgcauugcgccgc

SEQ ID NO: 1874146 - RNA, 18 nt, Human herpesvirus 4 (Epstein-Barr virus)
cuagcucacuuucagugg

SEQ ID NO: 1874147 - RNA, 17 nt, Human herpesvirus 4 (Epstein-Barr virus)
gaccucaaagaagaggg

SEQ ID NO: 1874148 - RNA, 23 nt, Human herpesvirus 4 (Epstein-Barr virus)
ucgaguaggugccuccagagccc

SEQ ID NO: 1874149 - RNA, 20 nt, Human herpesvirus 4 (Epstein-Barr virus)
aggugcagcuggcccaccua

SEQ ID NO: 1874150 - RNA, 21 nt, Human herpesvirus 4 (Epstein-Barr virus)
gccccgaaagcggcccagcag

SEQ ID NO: 1874151 - RNA, 15 nt, Human herpesvirus 4 (Epstein-Barr virus)
cucacaggacauguu

SEQ ID NO: 1874152 - RNA, 15 nt, Human herpesvirus 4 (Epstein-Barr virus)
cacuuugccagcaac

SEQ ID NO: 1874153 - RNA, 19 nt, Human herpesvirus 4 (Epstein-Barr virus)
caggccccccgcaccaggg

SEQ ID NO: 1874154 - RNA, 21 nt, Human herpesvirus 4 (Epstein-Barr virus)
cuaccaggggcgagcagcgcg

SEQ ID NO: 1874155 - RNA, 15 nt, Human herpesvirus 4 (Epstein-Barr virus)
ucuggccaaccugcc

SEQ ID NO: 1874156 - RNA, 17 nt, Human herpesvirus 4 (Epstein-Barr virus)
ccaggccucagcgucag

SEQ ID NO: 1874157 - RNA, 17 nt, Human herpesvirus 4 (Epstein-Barr virus)
acgacuauccaggucuu

SEQ ID NO: 1874158 - RNA, 20 nt, Human herpesvirus 4 (Epstein-Barr virus)
ggaaaaucucgcucagagcu

SEQ ID NO: 1874159 - RNA, 19 nt, Human herpesvirus 4 (Epstein-Barr virus)
ucucuagcaggugcaccag

SEQ ID NO: 1874160 - RNA, 15 nt, Human herpesvirus 4 (Epstein-Barr virus)
aucccaaauaaaugu

SEQ ID NO: 1874161 - RNA, 21 nt, Human herpesvirus 4 (Epstein-Barr virus)
acuggcacgguggcuugggcu

SEQ ID NO: 1874162 - RNA, 18 nt, Human herpesvirus 4 (Epstein-Barr virus)
aacagggguauguggugc

SEQ ID NO: 1874163 - RNA, 17 nt, Human herpesvirus 4 (Epstein-Barr virus)
ccugcucauaccuccac

SEQ ID NO: 1874164 - RNA, 20 nt, Human herpesvirus 4 (Epstein-Barr virus)
cugcgaugagggccuuccag

SEQ ID NO: 1874165 - RNA, 18 nt, Human herpesvirus 4 (Epstein-Barr virus)
ccuuuaggcguaacuugu

SEQ ID NO: 1874166 - RNA, 19 nt, Human herpesvirus 4 (Epstein-Barr virus)
gacucccauguaagccugc

SEQ ID NO: 1874167 - RNA, 19 nt, Human herpesvirus 4 (Epstein-Barr virus)
gggccaggucacagaccag

SEQ ID NO: 1874168 - RNA, 20 nt, Human herpesvirus 4 (Epstein-Barr virus)
gcgaagggugggggugggug

SEQ ID NO: 1874169 - RNA, 21 nt, Human herpesvirus 4 (Epstein-Barr virus)
ggcaccccacggggugcuccc

SEQ ID NO: 1874170 - RNA, 18 nt, Human herpesvirus 4 (Epstein-Barr virus)
ggcacacauuacggugcu

SEQ ID NO: 1874171 - RNA, 13 nt, Human herpesvirus 4 (Epstein-Barr virus)
gugcugccagagc

SEQ ID NO: 1874172 - RNA, 21 nt, Human herpesvirus 4 (Epstein-Barr virus)
gacauggccgcccgccuggcu

SEQ ID NO: 1874173 - RNA, 21 nt, Human herpesvirus 4 (Epstein-Barr virus)
gugauuaggagcagggcccag

SEQ ID NO: 1874174 - RNA, 20 nt, Human herpesvirus 4 (Epstein-Barr virus)
gaguccccuccuuggagcug

SEQ ID NO: 1874175 - RNA, 14 nt, Human herpesvirus 4 (Epstein-Barr virus)
caguagaggacacc

SEQ ID NO: 1874176 - RNA, 17 nt, Human herpesvirus 4 (Epstein-Barr virus)
uuccacagcaauggcac

SEQ ID NO: 1874177 - RNA, 16 nt, Human herpesvirus 4 (Epstein-Barr virus)
ucuuggguuccuagug

SEQ ID NO: 1874178 - RNA, 16 nt, Human herpesvirus 4 (Epstein-Barr virus)
aggccgcugccaggcc

SEQ ID NO: 1874179 - RNA, 20 nt, Human herpesvirus 4 (Epstein-Barr virus)
caccuuaacuggcacacacu

SEQ ID NO: 1874180 - RNA, 11 nt, Human herpesvirus 4 (Epstein-Barr virus)
cgccccagggc

SEQ ID NO: 1874181 - RNA, 18 nt, Human herpesvirus 4 (Epstein-Barr virus)
cuaugcaugagccacagg

SEQ ID NO: 1874182 - RNA, 11 nt, Human herpesvirus 4 (Epstein-Barr virus)
guggccaggcc

SEQ ID NO: 1874183 - RNA, 16 nt, Human herpesvirus 4 (Epstein-Barr virus)
uggccggcagccuggc

SEQ ID NO: 1874184 - RNA, 19 nt, Human herpesvirus 4 (Epstein-Barr virus)
cacucguccgccuacuggu

SEQ ID NO: 1874185 - RNA, 19 nt, Human herpesvirus 4 (Epstein-Barr virus)
acucucccuccauuuacug

SEQ ID NO: 1874186 - RNA, 17 nt, Human herpesvirus 4 (Epstein-Barr virus)
ccaacuuugagcugggc

SEQ ID NO: 1874187 - RNA, 17 nt, Human herpesvirus 4 (Epstein-Barr virus)
gucauccgaggcugaga

SEQ ID NO: 1874188 - RNA, 19 nt, Human herpesvirus 4 (Epstein-Barr virus)
gucucucuuugagggggcc

SEQ ID NO: 1874189 - RNA, 17 nt, Human herpesvirus 4 (Epstein-Barr virus)
cgccaugcucagggcca

SEQ ID NO: 1874190 - RNA, 13 nt, Human herpesvirus 4 (Epstein-Barr virus)
aggacccugggcc

SEQ ID NO: 1874191 - RNA, 21 nt, Human herpesvirus 4 (Epstein-Barr virus)
cacgaccucgggagggacggg

SEQ ID NO: 1874192 - RNA, 19 nt, Human herpesvirus 4 (Epstein-Barr virus)
acucacccccagccugugc

SEQ ID NO: 1874193 - RNA, 23 nt, Human herpesvirus 4 (Epstein-Barr virus)
gccccgguccccccagaagcccc

SEQ ID NO: 1874194 - RNA, 20 nt, Human herpesvirus 4 (Epstein-Barr virus)
caguacuagcauggagaggu

SEQ ID NO: 1874195 - RNA, 18 nt, Human herpesvirus 4 (Epstein-Barr virus)
cccaucugagggcaguga

SEQ ID NO: 1874196 - RNA, 13 nt, Human herpesvirus 4 (Epstein-Barr virus)
aguggcugccccg

SEQ ID NO: 1874197 - RNA, 12 nt, Human herpesvirus 4 (Epstein-Barr virus)
ggccugagagcc

SEQ ID NO: 1874198 - RNA, 19 nt, Human herpesvirus 4 (Epstein-Barr virus)
gccuccauccaguggggcu

SEQ ID NO: 1874199 - RNA, 16 nt, Human herpesvirus 4 (Epstein-Barr virus)
augcaggccuggacag

SEQ ID NO: 1874200 - RNA, 18 nt, Human herpesvirus 4 (Epstein-Barr virus)
uuuguacagacuuuuggc

SEQ ID NO: 1874201 - RNA, 20 nt, Human herpesvirus 4 (Epstein-Barr virus)
cgggggcgacugccgccgcc

SEQ ID NO: 1874202 - RNA, 17 nt, Human herpesvirus 4 (Epstein-Barr virus)
gaugacgccgagaccua

SEQ ID NO: 1874203 - RNA, 19 nt, Human herpesvirus 4 (Epstein-Barr virus)
aaaauggggguuggagaaa

SEQ ID NO: 1874204 - RNA, 19 nt, Human herpesvirus 4 (Epstein-Barr virus)
cgucugcaccccaguggac

SEQ ID NO: 1874205 - RNA, 11 nt, Human herpesvirus 4 (Epstein-Barr virus)
ucugcuucugg

SEQ ID NO: 1874206 - RNA, 12 nt, Human herpesvirus 4 (Epstein-Barr virus)
gaaaaugaugaa

SEQ ID NO: 1874207 - RNA, 20 nt, Human herpesvirus 4 (Epstein-Barr virus)
cuuucuggccaaccugccuc

SEQ ID NO: 1874208 - RNA, 18 nt, Human herpesvirus 4 (Epstein-Barr virus)
uggccugccuggaucuga

SEQ ID NO: 1874209 - RNA, 21 nt, Human herpesvirus 4 (Epstein-Barr virus)
caccggcuuggcccucucacu

SEQ ID NO: 1874210 - RNA, 14 nt, Human herpesvirus 4 (Epstein-Barr virus)
gcuggccugccugg

SEQ ID NO: 1874211 - RNA, 19 nt, Human herpesvirus 4 (Epstein-Barr virus)
aggcacacaaaaugaggaa

SEQ ID NO: 1874212 - RNA, 14 nt, Human herpesvirus 4 (Epstein-Barr virus)
cugggcucucagga

SEQ ID NO: 1874213 - RNA, 22 nt, Human herpesvirus 4 (Epstein-Barr virus)
auaacggggaaugugugacaug

SEQ ID NO: 1874214 - RNA, 12 nt, Human herpesvirus 4 (Epstein-Barr virus)
ggagcaggaggg

SEQ ID NO: 1874215 - RNA, 20 nt, Human herpesvirus 4 (Epstein-Barr virus)
gaggcggaagaccaggagcc

SEQ ID NO: 1874216 - RNA, 15 nt, Human herpesvirus 4 (Epstein-Barr virus)
caaauaaauguuacu

SEQ ID NO: 1874217 - RNA, 15 nt, Human herpesvirus 4 (Epstein-Barr virus)
cgaggauggaaaggg

SEQ ID NO: 1874218 - RNA, 22 nt, Human herpesvirus 4 (Epstein-Barr virus)
uacuggcuuucguccucuggcu

SEQ ID NO: 1874219 - RNA, 22 nt, Human herpesvirus 4 (Epstein-Barr virus)
caaaccuccaaucaccagccac

SEQ ID NO: 1874220 - RNA, 16 nt, Human herpesvirus 4 (Epstein-Barr virus)
ggcgcgggucccccua

SEQ ID NO: 1874221 - RNA, 14 nt, Human herpesvirus 4 (Epstein-Barr virus)
cccuggcggcccag

SEQ ID NO: 1874222 - RNA, 21 nt, Human herpesvirus 4 (Epstein-Barr virus)
ccagcaaccaauguaucccaa

SEQ ID NO: 1874223 - RNA, 17 nt, Human herpesvirus 4 (Epstein-Barr virus)
acgucuuguaaaacuug

SEQ ID NO: 1874224 - RNA, 14 nt, Human herpesvirus 4 (Epstein-Barr virus)
uacagcaggauucc

SEQ ID NO: 1874225 - RNA, 17 nt, Human herpesvirus 4 (Epstein-Barr virus)
gugaagggcagggcucg

SEQ ID NO: 1874226 - RNA, 20 nt, Human herpesvirus 4 (Epstein-Barr virus)
uccucuuacaccagaggcca

SEQ ID NO: 1874227 - RNA, 15 nt, Human herpesvirus 4 (Epstein-Barr virus)
cucaaggcagucucc

SEQ ID NO: 1874228 - RNA, 13 nt, Human herpesvirus 4 (Epstein-Barr virus)
aggaccuggaugc

SEQ ID NO: 1874229 - RNA, 14 nt, Human herpesvirus 4 (Epstein-Barr virus)
uaacuugucuacau

SEQ ID NO: 1874230 - RNA, 13 nt, Human herpesvirus 4 (Epstein-Barr virus)
caucugcuucugg

SEQ ID NO: 1874231 - RNA, 21 nt, Human herpesvirus 4 (Epstein-Barr virus)
gcugcaucuuaccccuggcuu

SEQ ID NO: 1874232 - RNA, 14 nt, Human herpesvirus 4 (Epstein-Barr virus)
gguuuucugccccu

SEQ ID NO: 1874233 - RNA, 15 nt, Human herpesvirus 4 (Epstein-Barr virus)
agucccuccucacca

SEQ ID NO: 1874234 - RNA, 19 nt, Human herpesvirus 4 (Epstein-Barr virus)
ccccgccuuugggcacccc

SEQ ID NO: 1874235 - RNA, 19 nt, Human herpesvirus 4 (Epstein-Barr virus)
gggccuggugccagacucu

SEQ ID NO: 1874236 - RNA, 23 nt, Human herpesvirus 4 (Epstein-Barr virus)
acaggagacguggguccccucug

SEQ ID NO: 1874237 - RNA, 13 nt, Human herpesvirus 4 (Epstein-Barr virus)
acucaggcacggu

SEQ ID NO: 1874238 - RNA, 18 nt, Human herpesvirus 4 (Epstein-Barr virus)
caccacccccgcccccac

SEQ ID NO: 1874239 - RNA, 21 nt, Human herpesvirus 4 (Epstein-Barr virus)
aguugaugaaaggggccgagg

SEQ ID NO: 1874240 - RNA, 13 nt, Human herpesvirus 4 (Epstein-Barr virus)
agcaacugcugca

SEQ ID NO: 1874241 - RNA, 15 nt, Human herpesvirus 4 (Epstein-Barr virus)
acgaggacgaggagg

SEQ ID NO: 1874242 - RNA, 13 nt, Human herpesvirus 4 (Epstein-Barr virus)
gagcggcugugag

SEQ ID NO: 1874243 - RNA, 22 nt, Human herpesvirus 4 (Epstein-Barr virus)
guggguuucugcccccugucuc

SEQ ID NO: 1874244 - RNA, 20 nt, Human herpesvirus 4 (Epstein-Barr virus)
cccccguaaaacuccacaga

SEQ ID NO: 1874245 - RNA, 16 nt, Human herpesvirus 4 (Epstein-Barr virus)
ccguguuucucccacu

SEQ ID NO: 1874246 - RNA, 17 nt, Human herpesvirus 4 (Epstein-Barr virus)
ccuuguccacuggggug

SEQ ID NO: 1874247 - RNA, 20 nt, Human herpesvirus 4 (Epstein-Barr virus)
uauggacacuugguaaguuu

SEQ ID NO: 1874248 - RNA, 16 nt, Human herpesvirus 4 (Epstein-Barr virus)
agcauggcggccuggc

SEQ ID NO: 1874249 - RNA, 16 nt, Human herpesvirus 4 (Epstein-Barr virus)
gcccacacagcgccag

SEQ ID NO: 1874250 - RNA, 22 nt, Human herpesvirus 4 (Epstein-Barr virus)
ccugugccucgucuaccucugu

SEQ ID NO: 1874251 - RNA, 21 nt, Human herpesvirus 4 (Epstein-Barr virus)
agcagugguguuugcuugccc

SEQ ID NO: 1874252 - RNA, 14 nt, Human herpesvirus 4 (Epstein-Barr virus)
ccaaucaccagcca

SEQ ID NO: 1874253 - RNA, 13 nt, Human herpesvirus 4 (Epstein-Barr virus)
gccucggccuggg

SEQ ID NO: 1874254 - RNA, 15 nt, Human herpesvirus 4 (Epstein-Barr virus)
cagcuaacaggacau

SEQ ID NO: 1874255 - RNA, 16 nt, Human herpesvirus 4 (Epstein-Barr virus)
agacugcaaacccugg

SEQ ID NO: 1874256 - RNA, 16 nt, Human herpesvirus 4 (Epstein-Barr virus)
cgcgacucgugggaaa

SEQ ID NO: 1874257 - RNA, 22 nt, Human herpesvirus 4 (Epstein-Barr virus)
aguuccucaacaaggagugccu

SEQ ID NO: 1874258 - RNA, 16 nt, Human herpesvirus 4 (Epstein-Barr virus)
acagcagcuggaugua

SEQ ID NO: 1874259 - RNA, 18 nt, Human herpesvirus 4 (Epstein-Barr virus)
cuguagccacccgucccg

SEQ ID NO: 1874260 - RNA, 16 nt, Human herpesvirus 4 (Epstein-Barr virus)
caggcacggccgggcu

SEQ ID NO: 1874261 - RNA, 13 nt, Human herpesvirus 4 (Epstein-Barr virus)
gacccuucugcug

SEQ ID NO: 1874262 - RNA, 16 nt, Human herpesvirus 4 (Epstein-Barr virus)
uaaagaaugcccacca

SEQ ID NO: 1874263 - RNA, 21 nt, Human herpesvirus 4 (Epstein-Barr virus)
ggccccccgcaccagggccag

SEQ ID NO: 1874264 - RNA, 17 nt, Human herpesvirus 4 (Epstein-Barr virus)
cugaagcaacagguccu

SEQ ID NO: 1874265 - RNA, 22 nt, Human herpesvirus 4 (Epstein-Barr virus)
ccccugugcuucuaccaagacu

SEQ ID NO: 1874266 - RNA, 23 nt, Human herpesvirus 4 (Epstein-Barr virus)
caggaagcuggccaggcugguga

SEQ ID NO: 1874267 - RNA, 20 nt, Human herpesvirus 4 (Epstein-Barr virus)
uguagccacccgucccgggu

SEQ ID NO: 1874268 - RNA, 18 nt, Human herpesvirus 4 (Epstein-Barr virus)
ggcgucgggaaacacagc

SEQ ID NO: 1874269 - RNA, 18 nt, Human herpesvirus 4 (Epstein-Barr virus)
gugggcuucgggggccug

SEQ ID NO: 1874270 - RNA, 13 nt, Human herpesvirus 4 (Epstein-Barr virus)
ccuggcgcuuugc

SEQ ID NO: 1874271 - RNA, 13 nt, Human herpesvirus 4 (Epstein-Barr virus)
aaucgcagcucua

SEQ ID NO: 1874272 - RNA, 13 nt, Human herpesvirus 4 (Epstein-Barr virus)
cgagggccucugg

SEQ ID NO: 1874273 - RNA, 20 nt, Human herpesvirus 4 (Epstein-Barr virus)
agcacaagugauuaggagca

SEQ ID NO: 1874274 - RNA, 19 nt, Human herpesvirus 4 (Epstein-Barr virus)
ugccuggggcucagacuua

SEQ ID NO: 1874275 - RNA, 21 nt, Human herpesvirus 4 (Epstein-Barr virus)
ccaccgccuuaugaggaccca

SEQ ID NO: 1874276 - RNA, 17 nt, Human herpesvirus 4 (Epstein-Barr virus)
cacagaggugauguaga

SEQ ID NO: 1874277 - RNA, 17 nt, Human herpesvirus 4 (Epstein-Barr virus)
augugcccaagccugga

SEQ ID NO: 1874278 - RNA, 14 nt, Human herpesvirus 4 (Epstein-Barr virus)
ccagcgacugaucc

SEQ ID NO: 1874279 - RNA, 18 nt, Human herpesvirus 4 (Epstein-Barr virus)
uggccgagcuggaggcca

SEQ ID NO: 1874280 - RNA, 17 nt, Human herpesvirus 4 (Epstein-Barr virus)
aacaucucauccccaga

SEQ ID NO: 1874281 - RNA, 18 nt, Human herpesvirus 4 (Epstein-Barr virus)
ggaaaauaguuccaggug

SEQ ID NO: 1874282 - RNA, 16 nt, Human herpesvirus 4 (Epstein-Barr virus)
guaacuugucuacauc

SEQ ID NO: 1874283 - RNA, 13 nt, Human herpesvirus 4 (Epstein-Barr virus)
ggacgggcaggca

SEQ ID NO: 1874284 - RNA, 15 nt, Human herpesvirus 4 (Epstein-Barr virus)
cacagccugcaccag

SEQ ID NO: 1874285 - RNA, 20 nt, Human herpesvirus 4 (Epstein-Barr virus)
caaacucucucaucuccaaa

SEQ ID NO: 1874286 - RNA, 14 nt, Human herpesvirus 4 (Epstein-Barr virus)
guccaggagaaggc

SEQ ID NO: 1874287 - RNA, 24 nt, Human herpesvirus 4 (Epstein-Barr virus)
acguggguggauguagggagcacu

SEQ ID NO: 1874288 - RNA, 15 nt, Human herpesvirus 4 (Epstein-Barr virus)
gcgccagcagggcac

SEQ ID NO: 1874289 - RNA, 16 nt, Human herpesvirus 4 (Epstein-Barr virus)
ggucaccccagaugcc

SEQ ID NO: 1874290 - RNA, 18 nt, Human herpesvirus 4 (Epstein-Barr virus)
gccgccgccuccgccgcc

SEQ ID NO: 1874291 - RNA, 20 nt, Human herpesvirus 4 (Epstein-Barr virus)
ggaucccauggaggagauga

SEQ ID NO: 1874292 - RNA, 18 nt, Human herpesvirus 4 (Epstein-Barr virus)
aggcguaacuugucuaca

SEQ ID NO: 1874293 - RNA, 22 nt, Human herpesvirus 4 (Epstein-Barr virus)
cgggggucaagcaaacggccug

SEQ ID NO: 1874294 - RNA, 19 nt, Human herpesvirus 4 (Epstein-Barr virus)
cugagaccaugcucagugg

SEQ ID NO: 1874295 - RNA, 14 nt, Human herpesvirus 4 (Epstein-Barr virus)
ggaccacauacauc

SEQ ID NO: 1874296 - RNA, 22 nt, Human herpesvirus 4 (Epstein-Barr virus)
uggagucugagaauaaggcucu

SEQ ID NO: 1874297 - RNA, 17 nt, Human herpesvirus 4 (Epstein-Barr virus)
gugaguccagggcccug

SEQ ID NO: 1874298 - RNA, 17 nt, Human herpesvirus 4 (Epstein-Barr virus)
guccaggguccaggaga

SEQ ID NO: 1874299 - RNA, 24 nt, Human herpesvirus 4 (Epstein-Barr virus)
ggacguuggcgggacuggcacggu

SEQ ID NO: 1874300 - RNA, 16 nt, Human herpesvirus 4 (Epstein-Barr virus)
caucggacgggcaggc

SEQ ID NO: 1874301 - RNA, 21 nt, Human herpesvirus 4 (Epstein-Barr virus)
cguauauguguugagaugagu

SEQ ID NO: 1874302 - RNA, 12 nt, Human herpesvirus 4 (Epstein-Barr virus)
uguuccuucugc

SEQ ID NO: 1874303 - RNA, 14 nt, Human herpesvirus 4 (Epstein-Barr virus)
uccagccagugguc

SEQ ID NO: 1874304 - RNA, 13 nt, Human herpesvirus 4 (Epstein-Barr virus)
caccaucuggcag

SEQ ID NO: 1874305 - RNA, 21 nt, Human herpesvirus 4 (Epstein-Barr virus)
aguacgugcagaggacuuuug

SEQ ID NO: 1874306 - RNA, 18 nt, Human herpesvirus 4 (Epstein-Barr virus)
ggaggaggacgugaguga

SEQ ID NO: 1874307 - RNA, 18 nt, Human herpesvirus 4 (Epstein-Barr virus)
cugucucuuucuggccaa

SEQ ID NO: 1874308 - RNA, 23 nt, Human herpesvirus 4 (Epstein-Barr virus)
gccucgaguaggugccuccagag

SEQ ID NO: 1874309 - RNA, 13 nt, Human herpesvirus 4 (Epstein-Barr virus)
ucgcaggcccccc

SEQ ID NO: 1874310 - RNA, 19 nt, Human herpesvirus 4 (Epstein-Barr virus)
uuccugcccucccacuuuu

SEQ ID NO: 1874311 - RNA, 18 nt, Human herpesvirus 4 (Epstein-Barr virus)
uggagcuguaacuguggu

SEQ ID NO: 1874312 - RNA, 15 nt, Human herpesvirus 4 (Epstein-Barr virus)
agagaaugacagcaa

SEQ ID NO: 1874313 - RNA, 14 nt, Human herpesvirus 4 (Epstein-Barr virus)
ccaaugugcauggg

SEQ ID NO: 1874314 - RNA, 20 nt, Human herpesvirus 4 (Epstein-Barr virus)
aaauuugcugacauauguac

SEQ ID NO: 1874315 - RNA, 13 nt, Human herpesvirus 4 (Epstein-Barr virus)
agcgaagaacacu

SEQ ID NO: 1874316 - RNA, 14 nt, Human herpesvirus 4 (Epstein-Barr virus)
gcagcucuggcacu

SEQ ID NO: 1874317 - RNA, 15 nt, Human herpesvirus 4 (Epstein-Barr virus)
uguucuacuccuggc

SEQ ID NO: 1874318 - RNA, 14 nt, Human herpesvirus 4 (Epstein-Barr virus)
ccuucuccucagcc

SEQ ID NO: 1874319 - RNA, 22 nt, Human herpesvirus 4 (Epstein-Barr virus)
uaacugugucccacuccaccug

SEQ ID NO: 1874320 - RNA, 14 nt, Human herpesvirus 4 (Epstein-Barr virus)
ugcagacuccaggu

SEQ ID NO: 1874321 - RNA, 19 nt, Human herpesvirus 4 (Epstein-Barr virus)
cugcucuucaaccuuggca

SEQ ID NO: 1874322 - RNA, 20 nt, Human herpesvirus 4 (Epstein-Barr virus)
gugguuuggggcaggccccc

SEQ ID NO: 1874323 - RNA, 21 nt, Human herpesvirus 4 (Epstein-Barr virus)
gcuagucacacccguggaggu

SEQ ID NO: 1874324 - RNA, 17 nt, Human herpesvirus 4 (Epstein-Barr virus)
caucuggaccagaaggc

SEQ ID NO: 1874325 - RNA, 21 nt, Human herpesvirus 4 (Epstein-Barr virus)
gcccgucuuacugcccagccu

SEQ ID NO: 1874326 - RNA, 15 nt, Human herpesvirus 4 (Epstein-Barr virus)
ccuuuggcuccuccu

SEQ ID NO: 1874327 - RNA, 19 nt, Human herpesvirus 4 (Epstein-Barr virus)
acauuacggugcuggagau

SEQ ID NO: 1874328 - RNA, 14 nt, Human herpesvirus 4 (Epstein-Barr virus)
cacugcaggcugga

SEQ ID NO: 1874329 - RNA, 16 nt, Human herpesvirus 4 (Epstein-Barr virus)
agucagauugccuucu

SEQ ID NO: 1874330 - RNA, 18 nt, Human herpesvirus 4 (Epstein-Barr virus)
cuggaccagaaggcuccg

SEQ ID NO: 1874331 - RNA, 16 nt, Human herpesvirus 4 (Epstein-Barr virus)
cuccggauucaccggc

SEQ ID NO: 1874332 - RNA, 18 nt, Human herpesvirus 4 (Epstein-Barr virus)
caguggccagcucauaug

SEQ ID NO: 1874333 - RNA, 16 nt, Human herpesvirus 4 (Epstein-Barr virus)
ggacagggggacucua

SEQ ID NO: 1874334 - RNA, 16 nt, Human herpesvirus 4 (Epstein-Barr virus)
cuggcauacucuucau

SEQ ID NO: 1874335 - RNA, 11 nt, Human herpesvirus 4 (Epstein-Barr virus)
ggcuggccgug

SEQ ID NO: 1874336 - RNA, 22 nt, Human herpesvirus 4 (Epstein-Barr virus)
acaaaauggggguuggagaaag

SEQ ID NO: 1874337 - RNA, 15 nt, Human herpesvirus 4 (Epstein-Barr virus)
cugugugcgcgccgc

SEQ ID NO: 1874338 - RNA, 16 nt, Human herpesvirus 4 (Epstein-Barr virus)
ggcucaggccaugcgc

SEQ ID NO: 1874339 - RNA, 15 nt, Human herpesvirus 4 (Epstein-Barr virus)
gcugaacuggggcug

SEQ ID NO: 1874340 - RNA, 19 nt, Human herpesvirus 4 (Epstein-Barr virus)
uagccguccuguccaagug

SEQ ID NO: 1874341 - RNA, 20 nt, Human herpesvirus 4 (Epstein-Barr virus)
acacuacuuguuucuggaau

SEQ ID NO: 1874342 - RNA, 21 nt, Human herpesvirus 4 (Epstein-Barr virus)
cgccagcgccuccucgcaggc

SEQ ID NO: 1874343 - RNA, 20 nt, Human herpesvirus 4 (Epstein-Barr virus)
gcugaagaugauggacccaa

SEQ ID NO: 1874344 - RNA, 17 nt, Human herpesvirus 4 (Epstein-Barr virus)
cucugcuuucugccguc

SEQ ID NO: 1874345 - RNA, 20 nt, Human herpesvirus 4 (Epstein-Barr virus)
ccagcccccucccgccccug

SEQ ID NO: 1874346 - RNA, 15 nt, Human herpesvirus 4 (Epstein-Barr virus)
agccugagccacacc

SEQ ID NO: 1874347 - RNA, 17 nt, Human herpesvirus 4 (Epstein-Barr virus)
uggcuguacgccgccgc

SEQ ID NO: 1874348 - RNA, 20 nt, Human herpesvirus 4 (Epstein-Barr virus)
ugacuguaaucacuggcaaa

SEQ ID NO: 1874349 - RNA, 16 nt, Human herpesvirus 4 (Epstein-Barr virus)
ugcaccagcuccaggg

SEQ ID NO: 1874350 - RNA, 17 nt, Human herpesvirus 4 (Epstein-Barr virus)
gacauucuucugaagga

SEQ ID NO: 1874351 - RNA, 18 nt, Human herpesvirus 4 (Epstein-Barr virus)
ugcucuucaaccuuggca

SEQ ID NO: 1874352 - RNA, 10 nt, Human herpesvirus 4 (Epstein-Barr virus)
gcccccacca

SEQ ID NO: 1874353 - RNA, 21 nt, Human herpesvirus 4 (Epstein-Barr virus)
ccccgacaucgccgccccagg

SEQ ID NO: 1874354 - RNA, 16 nt, Human herpesvirus 4 (Epstein-Barr virus)
gaugcaacagaggauu

SEQ ID NO: 1874355 - RNA, 15 nt, Human herpesvirus 4 (Epstein-Barr virus)
ugcccaccagccagc

SEQ ID NO: 1874356 - RNA, 19 nt, Human herpesvirus 4 (Epstein-Barr virus)
uguacuugggauugcaaca

SEQ ID NO: 1874357 - RNA, 21 nt, Human herpesvirus 4 (Epstein-Barr virus)
acuugcucagguuucugggca

SEQ ID NO: 1874358 - RNA, 19 nt, Human herpesvirus 4 (Epstein-Barr virus)
cgaagcagcuccgcccuca

SEQ ID NO: 1874359 - RNA, 16 nt, Human herpesvirus 4 (Epstein-Barr virus)
cguguuccacaaugcc

SEQ ID NO: 1874360 - RNA, 23 nt, Human herpesvirus 4 (Epstein-Barr virus)
uaaauguuacuucuuuugcucuu

SEQ ID NO: 1874361 - RNA, 13 nt, Human herpesvirus 4 (Epstein-Barr virus)
ugacacagacuug

SEQ ID NO: 1874362 - RNA, 18 nt, Human herpesvirus 4 (Epstein-Barr virus)
auugcuggccgcagcugg

SEQ ID NO: 1874363 - RNA, 18 nt, Human herpesvirus 4 (Epstein-Barr virus)
uaggcaaaccuccaauca

SEQ ID NO: 1874364 - RNA, 23 nt, Human herpesvirus 4 (Epstein-Barr virus)
cagauagccggccaggcagagga

SEQ ID NO: 1874365 - RNA, 16 nt, Human herpesvirus 4 (Epstein-Barr virus)
uaaggcucugaagcaa

SEQ ID NO: 1874366 - RNA, 22 nt, Human herpesvirus 4 (Epstein-Barr virus)
caugcaggucaggucccccucc

SEQ ID NO: 1874367 - RNA, 20 nt, Human herpesvirus 4 (Epstein-Barr virus)
ucaggagguacaugggccac

SEQ ID NO: 1874368 - RNA, 22 nt, Human herpesvirus 4 (Epstein-Barr virus)
ccucuugauagggauccgcuag

SEQ ID NO: 1874369 - RNA, 22 nt, Human herpesvirus 4 (Epstein-Barr virus)
acugccccgguccccccagaag

SEQ ID NO: 1874370 - RNA, 16 nt, Human herpesvirus 4 (Epstein-Barr virus)
agcggggguucuccag

SEQ ID NO: 1874371 - RNA, 14 nt, Human herpesvirus 4 (Epstein-Barr virus)
ucugcugcugcugg

SEQ ID NO: 1874372 - RNA, 13 nt, Human herpesvirus 4 (Epstein-Barr virus)
caggugacagcag

SEQ ID NO: 1874373 - RNA, 21 nt, Human herpesvirus 4 (Epstein-Barr virus)
ugcccucuccagcaaccaaug

SEQ ID NO: 1874374 - RNA, 19 nt, Human herpesvirus 4 (Epstein-Barr virus)
gcagccuugcguggugcug

SEQ ID NO: 1874375 - RNA, 14 nt, Human herpesvirus 4 (Epstein-Barr virus)
gccuuccagagcuc

SEQ ID NO: 1874376 - RNA, 19 nt, Human herpesvirus 4 (Epstein-Barr virus)
guccgugagagccuaccca

SEQ ID NO: 1874377 - RNA, 15 nt, Human herpesvirus 4 (Epstein-Barr virus)
agugucccugcugcc

SEQ ID NO: 1874378 - RNA, 14 nt, Human herpesvirus 4 (Epstein-Barr virus)
gccccucagccugc

SEQ ID NO: 1874379 - RNA, 16 nt, Human herpesvirus 4 (Epstein-Barr virus)
ccggcucucaggccuc

SEQ ID NO: 1874380 - RNA, 14 nt, Human herpesvirus 4 (Epstein-Barr virus)
caccguggagccgg

SEQ ID NO: 1874381 - RNA, 23 nt, Human herpesvirus 4 (Epstein-Barr virus)
ccacucuugccucggcgcuggga

SEQ ID NO: 1874382 - RNA, 12 nt, Human herpesvirus 4 (Epstein-Barr virus)
acaauaaaguug

SEQ ID NO: 1874383 - RNA, 17 nt, Human herpesvirus 4 (Epstein-Barr virus)
ggaccuacaggacaaga

SEQ ID NO: 1874384 - RNA, 22 nt, Human herpesvirus 4 (Epstein-Barr virus)
ggcccugaucugggagaugaga

SEQ ID NO: 1874385 - RNA, 17 nt, Human herpesvirus 4 (Epstein-Barr virus)
ucaugggggaaugaggg

SEQ ID NO: 1874386 - RNA, 16 nt, Human herpesvirus 4 (Epstein-Barr virus)
ggugccugagacagag

SEQ ID NO: 1874387 - RNA, 15 nt, Human herpesvirus 4 (Epstein-Barr virus)
agggcgccagggauc

SEQ ID NO: 1874388 - RNA, 21 nt, Human herpesvirus 4 (Epstein-Barr virus)
cagccccucaucccugacccu

SEQ ID NO: 1874389 - RNA, 13 nt, Human herpesvirus 4 (Epstein-Barr virus)
ugaagauggccuc

SEQ ID NO: 1874390 - RNA, 17 nt, Human herpesvirus 4 (Epstein-Barr virus)
gaaaaucucgcucagag

SEQ ID NO: 1874391 - RNA, 18 nt, Human herpesvirus 4 (Epstein-Barr virus)
gcuggacgcgcagugcca

SEQ ID NO: 1874392 - RNA, 22 nt, Human herpesvirus 4 (Epstein-Barr virus)
agacuucagguggucauguuuc

SEQ ID NO: 1874393 - RNA, 19 nt, Human herpesvirus 4 (Epstein-Barr virus)
caaccugauucccccugcu

SEQ ID NO: 1874394 - RNA, 20 nt, Human herpesvirus 4 (Epstein-Barr virus)
caguggaccucaaagaagag

SEQ ID NO: 1874395 - RNA, 18 nt, Human herpesvirus 4 (Epstein-Barr virus)
aacugacacacaggccug

SEQ ID NO: 1874396 - RNA, 18 nt, Human herpesvirus 4 (Epstein-Barr virus)
agagugcccuggaggccu

SEQ ID NO: 1874397 - RNA, 18 nt, Human herpesvirus 4 (Epstein-Barr virus)
agauucagacgagucuga

SEQ ID NO: 1874398 - RNA, 16 nt, Human herpesvirus 4 (Epstein-Barr virus)
ugauugagaucagaaa

SEQ ID NO: 1874399 - RNA, 15 nt, Human herpesvirus 4 (Epstein-Barr virus)
gggaucaugaagccc

SEQ ID NO: 1874400 - RNA, 23 nt, Human herpesvirus 4 (Epstein-Barr virus)
uugcuagucacacccguggaggu

SEQ ID NO: 1874401 - RNA, 20 nt, Human herpesvirus 4 (Epstein-Barr virus)
gcggcccagcagauccaggg

SEQ ID NO: 1874402 - RNA, 17 nt, Human herpesvirus 4 (Epstein-Barr virus)
uacggcuuuccaguucc

SEQ ID NO: 1874403 - RNA, 21 nt, Human herpesvirus 4 (Epstein-Barr virus)
uggcgccguuugacuguuugu

SEQ ID NO: 1874404 - RNA, 13 nt, Human herpesvirus 4 (Epstein-Barr virus)
ugggaucaugaag

SEQ ID NO: 1874405 - RNA, 15 nt, Human herpesvirus 4 (Epstein-Barr virus)
uauucucagaugcag

SEQ ID NO: 1874406 - RNA, 21 nt, Human herpesvirus 4 (Epstein-Barr virus)
cuggugagaaguugguggugg

SEQ ID NO: 1874407 - RNA, 15 nt, Human herpesvirus 4 (Epstein-Barr virus)
acacgccagagacaa

SEQ ID NO: 1874408 - RNA, 15 nt, Human herpesvirus 4 (Epstein-Barr virus)
uuaccugguacauug

SEQ ID NO: 1874409 - RNA, 16 nt, Human herpesvirus 4 (Epstein-Barr virus)
guuuuaguguggcauu

SEQ ID NO: 1874410 - RNA, 16 nt, Human herpesvirus 4 (Epstein-Barr virus)
cucggccacacagugg

SEQ ID NO: 1874411 - RNA, 17 nt, Human herpesvirus 4 (Epstein-Barr virus)
cggcgcuugcgucugcc

SEQ ID NO: 1874412 - RNA, 22 nt, Human herpesvirus 4 (Epstein-Barr virus)
ucgcagcucuaacuuggcaucu

SEQ ID NO: 1874413 - RNA, 21 nt, Human herpesvirus 4 (Epstein-Barr virus)
gccaccguggccaggcccgag

SEQ ID NO: 1874414 - RNA, 20 nt, Human herpesvirus 4 (Epstein-Barr virus)
uacaccgucaacagauuucc

SEQ ID NO: 1874415 - RNA, 20 nt, Human herpesvirus 4 (Epstein-Barr virus)
uacgaggcccuggcccaccg

SEQ ID NO: 1874416 - RNA, 22 nt, Human herpesvirus 4 (Epstein-Barr virus)
auuaggcacuggacacacaugg

SEQ ID NO: 1874417 - RNA, 21 nt, Human herpesvirus 4 (Epstein-Barr virus)
acggccucaaaggccucggcg

SEQ ID NO: 1874418 - RNA, 15 nt, Human herpesvirus 4 (Epstein-Barr virus)
gaggggcaggagcag

SEQ ID NO: 1874419 - RNA, 14 nt, Human herpesvirus 4 (Epstein-Barr virus)
ccugcccucccacu

SEQ ID NO: 1874420 - RNA, 20 nt, Human herpesvirus 4 (Epstein-Barr virus)
ucacuuccucugcuuuucuc

SEQ ID NO: 1874421 - RNA, 16 nt, Human herpesvirus 4 (Epstein-Barr virus)
acgcuuccacccccug

SEQ ID NO: 1874422 - RNA, 16 nt, Human herpesvirus 4 (Epstein-Barr virus)
cauggacgaggacggg

SEQ ID NO: 1874423 - RNA, 13 nt, Human herpesvirus 4 (Epstein-Barr virus)
gucccccuagccc

SEQ ID NO: 1874424 - RNA, 19 nt, Human herpesvirus 4 (Epstein-Barr virus)
ugccucgggucucgccgcu

SEQ ID NO: 1874425 - RNA, 20 nt, Human herpesvirus 4 (Epstein-Barr virus)
acgcagaggccugcaccagu

SEQ ID NO: 1874426 - RNA, 16 nt, Human herpesvirus 4 (Epstein-Barr virus)
gaagacuccugccuga

SEQ ID NO: 1874427 - RNA, 17 nt, Human herpesvirus 4 (Epstein-Barr virus)
cucccauguaagccugc

SEQ ID NO: 1874428 - RNA, 13 nt, Human herpesvirus 4 (Epstein-Barr virus)
ucuccagccacgg

SEQ ID NO: 1874429 - RNA, 18 nt, Human herpesvirus 4 (Epstein-Barr virus)
gccuggugccagacucuc

SEQ ID NO: 1874430 - RNA, 11 nt, Human herpesvirus 4 (Epstein-Barr virus)
guccucuggac

SEQ ID NO: 1874431 - RNA, 13 nt, Human herpesvirus 4 (Epstein-Barr virus)
cguagaugagccu

SEQ ID NO: 1874432 - RNA, 20 nt, Human herpesvirus 4 (Epstein-Barr virus)
cgcaccuguguccugggcaa

SEQ ID NO: 1874433 - RNA, 16 nt, Human herpesvirus 4 (Epstein-Barr virus)
cgcaccaccgcagcca

SEQ ID NO: 1874434 - RNA, 17 nt, Human herpesvirus 4 (Epstein-Barr virus)
uggucgcccccucugcc

SEQ ID NO: 1874435 - RNA, 14 nt, Human herpesvirus 4 (Epstein-Barr virus)
ugggcucccucugg

SEQ ID NO: 1874436 - RNA, 21 nt, Human herpesvirus 4 (Epstein-Barr virus)
agaugaggccccuuacuucca

SEQ ID NO: 1874437 - RNA, 16 nt, Human herpesvirus 4 (Epstein-Barr virus)
cccugagcauggcggc

SEQ ID NO: 1874438 - RNA, 19 nt, Human herpesvirus 4 (Epstein-Barr virus)
caggcuacaacaggcugcu

SEQ ID NO: 1874439 - RNA, 23 nt, Human herpesvirus 4 (Epstein-Barr virus)
ggugccugagacagaggugcuca

SEQ ID NO: 1874440 - RNA, 21 nt, Human herpesvirus 4 (Epstein-Barr virus)
cagcccccucccgccccuguc

SEQ ID NO: 1874441 - RNA, 17 nt, Human herpesvirus 4 (Epstein-Barr virus)
gaagauugucacagcug

SEQ ID NO: 1874442 - RNA, 19 nt, Human herpesvirus 4 (Epstein-Barr virus)
ccaucaccuggguacccaa

SEQ ID NO: 1874443 - RNA, 14 nt, Human herpesvirus 4 (Epstein-Barr virus)
acugccgccgccuc

SEQ ID NO: 1874444 - RNA, 15 nt, Human herpesvirus 4 (Epstein-Barr virus)
cuaacacgcaauaaa

SEQ ID NO: 1874445 - RNA, 17 nt, Human herpesvirus 4 (Epstein-Barr virus)
cuaucacccauggccag

SEQ ID NO: 1874446 - RNA, 20 nt, Human herpesvirus 4 (Epstein-Barr virus)
ccauccaucaacuucagcuc

SEQ ID NO: 1874447 - RNA, 17 nt, Human herpesvirus 4 (Epstein-Barr virus)
cuucagcaucaauguca

SEQ ID NO: 1874448 - RNA, 20 nt, Human herpesvirus 4 (Epstein-Barr virus)
acaacggcugugacuacacc

SEQ ID NO: 1874449 - RNA, 12 nt, Human herpesvirus 4 (Epstein-Barr virus)
aggaucagaauc

SEQ ID NO: 1874450 - RNA, 23 nt, Human herpesvirus 4 (Epstein-Barr virus)
gggccuagguacucuuggugcag

SEQ ID NO: 1874451 - RNA, 15 nt, Human herpesvirus 4 (Epstein-Barr virus)
cacgagauggcccag

SEQ ID NO: 1874452 - RNA, 15 nt, Human herpesvirus 4 (Epstein-Barr virus)
uacgcgggccacagg

SEQ ID NO: 1874453 - RNA, 21 nt, Human herpesvirus 4 (Epstein-Barr virus)
ugcgcaacgccggccugcugg

SEQ ID NO: 1874454 - RNA, 17 nt, Human herpesvirus 4 (Epstein-Barr virus)
uucuggccaaccugccu

SEQ ID NO: 1874455 - RNA, 15 nt, Human herpesvirus 4 (Epstein-Barr virus)
ggagcgggaggggca

SEQ ID NO: 1874456 - RNA, 18 nt, Human herpesvirus 4 (Epstein-Barr virus)
ccaggcagccuugcgugg

SEQ ID NO: 1874457 - RNA, 23 nt, Human herpesvirus 4 (Epstein-Barr virus)
ggaaugacgggcucccucccccu

SEQ ID NO: 1874458 - RNA, 19 nt, Human herpesvirus 4 (Epstein-Barr virus)
ggucacagaccagccccuc

SEQ ID NO: 1874459 - RNA, 21 nt, Human herpesvirus 4 (Epstein-Barr virus)
cccucugcagagagccacauu

SEQ ID NO: 1874460 - RNA, 20 nt, Human herpesvirus 4 (Epstein-Barr virus)
uccagagcugagugcccagg

SEQ ID NO: 1874461 - RNA, 18 nt, Human herpesvirus 4 (Epstein-Barr virus)
gaauuguuaguuuaaaca

SEQ ID NO: 1874462 - RNA, 19 nt, Human herpesvirus 4 (Epstein-Barr virus)
ccuugaggugccacagagc

SEQ ID NO: 1874463 - RNA, 20 nt, Human herpesvirus 4 (Epstein-Barr virus)
auugcugaacuggggcuggu

SEQ ID NO: 1874464 - RNA, 21 nt, Human herpesvirus 4 (Epstein-Barr virus)
cuacacucuggggucucaggc

SEQ ID NO: 1874465 - RNA, 20 nt, Human herpesvirus 4 (Epstein-Barr virus)
aggauggcacgggcagagga

SEQ ID NO: 1874466 - RNA, 13 nt, Human herpesvirus 4 (Epstein-Barr virus)
cacccaggcagcc

SEQ ID NO: 1874467 - RNA, 17 nt, Human herpesvirus 4 (Epstein-Barr virus)
auccgccaggaccugga

SEQ ID NO: 1874468 - RNA, 16 nt, Human herpesvirus 4 (Epstein-Barr virus)
cuugaccuugauguac

SEQ ID NO: 1874469 - RNA, 18 nt, Human herpesvirus 4 (Epstein-Barr virus)
gaggcuauaacgcagguc

SEQ ID NO: 1874470 - RNA, 10 nt, Human herpesvirus 4 (Epstein-Barr virus)
aaaggagaaa

SEQ ID NO: 1874471 - RNA, 17 nt, Human herpesvirus 4 (Epstein-Barr virus)
agauuggugugaaagga

SEQ ID NO: 1874472 - RNA, 14 nt, Human herpesvirus 4 (Epstein-Barr virus)
guuggauuggcugu

SEQ ID NO: 1874473 - RNA, 11 nt, Human herpesvirus 4 (Epstein-Barr virus)
uuccagagagg

SEQ ID NO: 1874474 - RNA, 23 nt, Human herpesvirus 4 (Epstein-Barr virus)
uguugcgcccuaccucuuuuggc

SEQ ID NO: 1874475 - RNA, 18 nt, Human herpesvirus 4 (Epstein-Barr virus)
cccagccuacucuccacu

SEQ ID NO: 1874476 - RNA, 21 nt, Human herpesvirus 4 (Epstein-Barr virus)
cuggaacggugggaagcucag

SEQ ID NO: 1874477 - RNA, 20 nt, Human herpesvirus 4 (Epstein-Barr virus)
ccugaauccgcgcagccugu

SEQ ID NO: 1874478 - RNA, 13 nt, Human herpesvirus 4 (Epstein-Barr virus)
ccugggccuuggc

SEQ ID NO: 1874479 - RNA, 12 nt, Human herpesvirus 4 (Epstein-Barr virus)
aaaaguccagcg

SEQ ID NO: 1874480 - RNA, 14 nt, Human herpesvirus 4 (Epstein-Barr virus)
aaauuuacaccuga

SEQ ID NO: 1874481 - RNA, 22 nt, Human herpesvirus 4 (Epstein-Barr virus)
ccacuaucacccauggccaggc

SEQ ID NO: 1874482 - RNA, 14 nt, Human herpesvirus 4 (Epstein-Barr virus)
auauguacaaugag

SEQ ID NO: 1874483 - RNA, 15 nt, Human herpesvirus 4 (Epstein-Barr virus)
accucuguuccuucu

SEQ ID NO: 1874484 - RNA, 23 nt, Human herpesvirus 4 (Epstein-Barr virus)
ucaaaggccuugguuucagccuc

SEQ ID NO: 1874485 - RNA, 21 nt, Human herpesvirus 4 (Epstein-Barr virus)
ccaaggacccccgcgucacug

SEQ ID NO: 1874486 - RNA, 13 nt, Human herpesvirus 4 (Epstein-Barr virus)
ucccaaguacaga

SEQ ID NO: 1874487 - RNA, 17 nt, Human herpesvirus 4 (Epstein-Barr virus)
cucuguuccuucugcuc

SEQ ID NO: 1874488 - RNA, 23 nt, Human herpesvirus 4 (Epstein-Barr virus)
agagauucgagaggaugaggcug

SEQ ID NO: 1874489 - RNA, 15 nt, Human herpesvirus 4 (Epstein-Barr virus)
gagcuggacgagguc

SEQ ID NO: 1874490 - RNA, 17 nt, Human herpesvirus 4 (Epstein-Barr virus)
agucuauacggccacaa

SEQ ID NO: 1874491 - RNA, 19 nt, Human herpesvirus 4 (Epstein-Barr virus)
uuucagacccaccauggaa

SEQ ID NO: 1874492 - RNA, 19 nt, Human herpesvirus 4 (Epstein-Barr virus)
ccuaggccugccacguggg

SEQ ID NO: 1874493 - RNA, 17 nt, Human herpesvirus 4 (Epstein-Barr virus)
cuggagauuuucccacu

SEQ ID NO: 1874494 - RNA, 13 nt, Human herpesvirus 4 (Epstein-Barr virus)
acugcgagggggc

SEQ ID NO: 1874495 - RNA, 21 nt, Human herpesvirus 4 (Epstein-Barr virus)
cuccaggaucucccgcgccgc

SEQ ID NO: 1874496 - RNA, 13 nt, Human herpesvirus 4 (Epstein-Barr virus)
ccccagaagcccc

SEQ ID NO: 1874497 - RNA, 14 nt, Human herpesvirus 4 (Epstein-Barr virus)
agacucuugaagau

SEQ ID NO: 1874498 - RNA, 13 nt, Human herpesvirus 4 (Epstein-Barr virus)
augaggcugauga

SEQ ID NO: 1874499 - RNA, 17 nt, Human herpesvirus 4 (Epstein-Barr virus)
ccagcuaacaggacaug

SEQ ID NO: 1874500 - RNA, 22 nt, Human herpesvirus 4 (Epstein-Barr virus)
ugggcuucgggggccugugugc

SEQ ID NO: 1874501 - RNA, 17 nt, Human herpesvirus 4 (Epstein-Barr virus)
acuggugcuuguggugu

SEQ ID NO: 1874502 - RNA, 19 nt, Human herpesvirus 4 (Epstein-Barr virus)
caugcugcccggacggccu

SEQ ID NO: 1874503 - RNA, 20 nt, Human herpesvirus 4 (Epstein-Barr virus)
cgacccccgggcgcccccaa

SEQ ID NO: 1874504 - RNA, 20 nt, Human herpesvirus 4 (Epstein-Barr virus)
ugcgacggcuuuagccuggc

SEQ ID NO: 1874505 - RNA, 19 nt, Human herpesvirus 4 (Epstein-Barr virus)
ccgucccggguacaagucc

SEQ ID NO: 1874506 - RNA, 18 nt, Human herpesvirus 4 (Epstein-Barr virus)
cgaggacggggaagagga

SEQ ID NO: 1874507 - RNA, 16 nt, Human herpesvirus 4 (Epstein-Barr virus)
aaucaaaacuuuagag

SEQ ID NO: 1874508 - RNA, 19 nt, Human herpesvirus 4 (Epstein-Barr virus)
gugcugccugggggcuuug

SEQ ID NO: 1874509 - RNA, 19 nt, Human herpesvirus 4 (Epstein-Barr virus)
cuggaugcuguaguggccu

SEQ ID NO: 1874510 - RNA, 20 nt, Human herpesvirus 4 (Epstein-Barr virus)
cagccacacaaucagccggg

SEQ ID NO: 1874511 - RNA, 13 nt, Human herpesvirus 4 (Epstein-Barr virus)
gcacaaccuugga

SEQ ID NO: 1874512 - RNA, 21 nt, Human herpesvirus 4 (Epstein-Barr virus)
gcuggacgugaaccucccccc

SEQ ID NO: 1874513 - RNA, 11 nt, Human herpesvirus 4 (Epstein-Barr virus)
uuaaucuggau

SEQ ID NO: 1874514 - RNA, 16 nt, Human herpesvirus 4 (Epstein-Barr virus)
agcuuugaugaggcug

SEQ ID NO: 1874515 - RNA, 23 nt, Human herpesvirus 4 (Epstein-Barr virus)
augggggcucggggcuggggaga

SEQ ID NO: 1874516 - RNA, 23 nt, Human herpesvirus 4 (Epstein-Barr virus)
ggccacgcugggaguccggcccu

SEQ ID NO: 1874517 - RNA, 21 nt, Human herpesvirus 4 (Epstein-Barr virus)
aacuaugcaugagccacaggc

SEQ ID NO: 1874518 - RNA, 20 nt, Human herpesvirus 4 (Epstein-Barr virus)
gauuuugggcacacuuaacu

SEQ ID NO: 1874519 - RNA, 14 nt, Human herpesvirus 4 (Epstein-Barr virus)
gacuggcaacuccu

SEQ ID NO: 1874520 - RNA, 19 nt, Human herpesvirus 4 (Epstein-Barr virus)
aguguccagagaggaagac

SEQ ID NO: 1874521 - RNA, 15 nt, Human herpesvirus 4 (Epstein-Barr virus)
guccauggcugcacc

SEQ ID NO: 1874522 - RNA, 18 nt, Human herpesvirus 4 (Epstein-Barr virus)
ccugucaccaggccugcc

SEQ ID NO: 1874523 - RNA, 17 nt, Human herpesvirus 4 (Epstein-Barr virus)
ugcgcaacgccggccug

SEQ ID NO: 1874524 - RNA, 18 nt, Human herpesvirus 4 (Epstein-Barr virus)
gccaguguggcuggggcu

SEQ ID NO: 1874525 - RNA, 19 nt, Human herpesvirus 4 (Epstein-Barr virus)
ggcggugggaucaugaagc

SEQ ID NO: 1874526 - RNA, 22 nt, Human herpesvirus 4 (Epstein-Barr virus)
ugugucccacuccaccugccgg

SEQ ID NO: 1874527 - RNA, 15 nt, Human herpesvirus 4 (Epstein-Barr virus)
aaaggaagggggccc

SEQ ID NO: 1874528 - RNA, 15 nt, Human herpesvirus 4 (Epstein-Barr virus)
aucgaaggagagcug

SEQ ID NO: 1874529 - RNA, 17 nt, Human herpesvirus 4 (Epstein-Barr virus)
cagccagagccagccgg

SEQ ID NO: 1874530 - RNA, 15 nt, Human herpesvirus 4 (Epstein-Barr virus)
ccugcauggccaggc

SEQ ID NO: 1874531 - RNA, 20 nt, Human herpesvirus 4 (Epstein-Barr virus)
auggauugaguaagcauggg

SEQ ID NO: 1874532 - RNA, 14 nt, Human herpesvirus 4 (Epstein-Barr virus)
aggaggcuggugcc

SEQ ID NO: 1874533 - RNA, 22 nt, Human herpesvirus 4 (Epstein-Barr virus)
ggggaaugagggaaaaggcccu

SEQ ID NO: 1874534 - RNA, 23 nt, Human herpesvirus 4 (Epstein-Barr virus)
acaagaaucggguggcuuccaga

SEQ ID NO: 1874535 - RNA, 14 nt, Human herpesvirus 4 (Epstein-Barr virus)
ccgcuacugcugcu

SEQ ID NO: 1874536 - RNA, 21 nt, Human herpesvirus 4 (Epstein-Barr virus)
cugagaacugacgcuccagga

SEQ ID NO: 1874537 - RNA, 16 nt, Human herpesvirus 4 (Epstein-Barr virus)
acaagaacugggauga

SEQ ID NO: 1874538 - RNA, 13 nt, Human herpesvirus 4 (Epstein-Barr virus)
cagaugaagacga

SEQ ID NO: 1874539 - RNA, 15 nt, Human herpesvirus 4 (Epstein-Barr virus)
ggcguacaccuggcu

SEQ ID NO: 1874540 - RNA, 16 nt, Human herpesvirus 4 (Epstein-Barr virus)
caccgugggaaaauag

SEQ ID NO: 1874541 - RNA, 22 nt, Human herpesvirus 4 (Epstein-Barr virus)
gcagcuaaguuuucuaagggca

SEQ ID NO: 1874542 - RNA, 20 nt, Human herpesvirus 4 (Epstein-Barr virus)
ccucaucguucgguggggug

SEQ ID NO: 1874543 - RNA, 20 nt, Human herpesvirus 4 (Epstein-Barr virus)
cccaauauccaucugcuucu

SEQ ID NO: 1874544 - RNA, 19 nt, Human herpesvirus 4 (Epstein-Barr virus)
gcacaacggcugugacuac

SEQ ID NO: 1874545 - RNA, 13 nt, Human herpesvirus 4 (Epstein-Barr virus)
uagcccccacgcu

SEQ ID NO: 1874546 - RNA, 20 nt, Human herpesvirus 4 (Epstein-Barr virus)
caccuggccagggcggagga

SEQ ID NO: 1874547 - RNA, 23 nt, Human herpesvirus 4 (Epstein-Barr virus)
acucugcauggagaagcuggacg

SEQ ID NO: 1874548 - RNA, 21 nt, Human herpesvirus 4 (Epstein-Barr virus)
cggugucugugguugucuucc

SEQ ID NO: 1874549 - RNA, 13 nt, Human herpesvirus 4 (Epstein-Barr virus)
gcgcuguguggcu

SEQ ID NO: 1874550 - RNA, 14 nt, Human herpesvirus 4 (Epstein-Barr virus)
gcagggacgaggac

SEQ ID NO: 1874551 - RNA, 14 nt, Human herpesvirus 4 (Epstein-Barr virus)
cuuuugucugccug

SEQ ID NO: 1874552 - RNA, 16 nt, Human herpesvirus 4 (Epstein-Barr virus)
gcaguccggagacuga

SEQ ID NO: 1874553 - RNA, 12 nt, Human herpesvirus 4 (Epstein-Barr virus)
agacgcagcugu

SEQ ID NO: 1874554 - RNA, 19 nt, Human herpesvirus 4 (Epstein-Barr virus)
aggcaaacauacaggagga

SEQ ID NO: 1874555 - RNA, 21 nt, Human herpesvirus 4 (Epstein-Barr virus)
agaagcagauagccggccagg

SEQ ID NO: 1874556 - RNA, 17 nt, Human herpesvirus 4 (Epstein-Barr virus)
aaaccugcgaaacuugg

SEQ ID NO: 1874557 - RNA, 22 nt, Human herpesvirus 4 (Epstein-Barr virus)
gaagcagauagccggccaggca

SEQ ID NO: 1874558 - RNA, 16 nt, Human herpesvirus 4 (Epstein-Barr virus)
ugaguccccuccuugg

SEQ ID NO: 1874559 - RNA, 23 nt, Human herpesvirus 4 (Epstein-Barr virus)
aggcccucgagccauuugaggaa

SEQ ID NO: 1874560 - RNA, 14 nt, Human herpesvirus 4 (Epstein-Barr virus)
ucgcccccucuuug

SEQ ID NO: 1874561 - RNA, 13 nt, Human herpesvirus 4 (Epstein-Barr virus)
cuuggaggcugcu

SEQ ID NO: 1874562 - RNA, 18 nt, Human herpesvirus 4 (Epstein-Barr virus)
cccacuuuuaccccaguc

SEQ ID NO: 1874563 - RNA, 22 nt, Human herpesvirus 4 (Epstein-Barr virus)
gacugugguauccaccuagaaa

SEQ ID NO: 1874564 - RNA, 15 nt, Human herpesvirus 4 (Epstein-Barr virus)
ugccuggcgcuuugc

SEQ ID NO: 1874565 - RNA, 20 nt, Human herpesvirus 4 (Epstein-Barr virus)
guagccgaauaucuggaggu

SEQ ID NO: 1874566 - RNA, 23 nt, Human herpesvirus 4 (Epstein-Barr virus)
guucaggaacagccuccgccgcc

SEQ ID NO: 1874567 - RNA, 22 nt, Human herpesvirus 4 (Epstein-Barr virus)
ccaggccugccaaagagccaga

SEQ ID NO: 1874568 - RNA, 23 nt, Human herpesvirus 4 (Epstein-Barr virus)
cgcucuggucgcccccucugccu

SEQ ID NO: 1874569 - RNA, 23 nt, Human herpesvirus 4 (Epstein-Barr virus)
cuggugaugcuugugcuccugau

SEQ ID NO: 1874570 - RNA, 19 nt, Human herpesvirus 4 (Epstein-Barr virus)
uagcguagaauccagccag

SEQ ID NO: 1874571 - RNA, 15 nt, Human herpesvirus 4 (Epstein-Barr virus)
uggugggaggcccag

SEQ ID NO: 1874572 - RNA, 21 nt, Human herpesvirus 4 (Epstein-Barr virus)
uacaacucagccccaucuucc

SEQ ID NO: 1874573 - RNA, 23 nt, Human herpesvirus 4 (Epstein-Barr virus)
cagacaugguguagacagauccc

SEQ ID NO: 1874574 - RNA, 19 nt, Human herpesvirus 4 (Epstein-Barr virus)
gaggcgggaauggccgcca

SEQ ID NO: 1874575 - RNA, 14 nt, Human herpesvirus 4 (Epstein-Barr virus)
ugaucagggagaac

SEQ ID NO: 1874576 - RNA, 21 nt, Human herpesvirus 4 (Epstein-Barr virus)
accacacagguagcaaggacc

SEQ ID NO: 1874577 - RNA, 14 nt, Human herpesvirus 4 (Epstein-Barr virus)
ggacucggggugau

SEQ ID NO: 1874578 - RNA, 19 nt, Human herpesvirus 4 (Epstein-Barr virus)
ggcugcugccgucccaggg

SEQ ID NO: 1874579 - RNA, 22 nt, Human herpesvirus 4 (Epstein-Barr virus)
ggaagucuuuuauaaggcuccg

SEQ ID NO: 1874580 - RNA, 13 nt, Human herpesvirus 4 (Epstein-Barr virus)
agaggauuggcug

SEQ ID NO: 1874581 - RNA, 19 nt, Human herpesvirus 4 (Epstein-Barr virus)
cgcuggcucgccucauccu

SEQ ID NO: 1874582 - RNA, 14 nt, Human herpesvirus 4 (Epstein-Barr virus)
ccacuaggaaccca

SEQ ID NO: 1874583 - RNA, 21 nt, Human herpesvirus 4 (Epstein-Barr virus)
gcuacacucuggggucucagg

SEQ ID NO: 1874584 - RNA, 15 nt, Human herpesvirus 4 (Epstein-Barr virus)
gcgggaggggcagga

SEQ ID NO: 1874585 - RNA, 15 nt, Human herpesvirus 4 (Epstein-Barr virus)
cugcuccagugccuc

SEQ ID NO: 1874586 - RNA, 13 nt, Human herpesvirus 4 (Epstein-Barr virus)
accauccacagcc

SEQ ID NO: 1874587 - RNA, 16 nt, Human herpesvirus 4 (Epstein-Barr virus)
ggccuuuucccucauu

SEQ ID NO: 1874588 - RNA, 11 nt, Human herpesvirus 4 (Epstein-Barr virus)
cagggguggca

SEQ ID NO: 1874589 - RNA, 13 nt, Human herpesvirus 4 (Epstein-Barr virus)
cucauccugcuca

SEQ ID NO: 1874590 - RNA, 21 nt, Human herpesvirus 4 (Epstein-Barr virus)
cugccucgaguaggugccucc

SEQ ID NO: 1874591 - RNA, 14 nt, Human herpesvirus 4 (Epstein-Barr virus)
gugucuucugucuc

SEQ ID NO: 1874592 - RNA, 16 nt, Human herpesvirus 4 (Epstein-Barr virus)
gcuugugcuccugaua

SEQ ID NO: 1874593 - RNA, 12 nt, Human herpesvirus 4 (Epstein-Barr virus)
ucagcuccaggg

SEQ ID NO: 1874594 - RNA, 14 nt, Human herpesvirus 4 (Epstein-Barr virus)
ccaggcacaucugg

SEQ ID NO: 1874595 - RNA, 15 nt, Human herpesvirus 4 (Epstein-Barr virus)
agaucgccugccacu

SEQ ID NO: 1874596 - RNA, 20 nt, Human herpesvirus 4 (Epstein-Barr virus)
ggcacacacucccuuagcca

SEQ ID NO: 1874597 - RNA, 14 nt, Human herpesvirus 4 (Epstein-Barr virus)
gcauggcggccugg

SEQ ID NO: 1874598 - RNA, 13 nt, Human herpesvirus 4 (Epstein-Barr virus)
ccugcggggaacu

SEQ ID NO: 1874599 - RNA, 17 nt, Human herpesvirus 4 (Epstein-Barr virus)
cugcugcugcuggucau

SEQ ID NO: 1874600 - RNA, 18 nt, Human herpesvirus 4 (Epstein-Barr virus)
aacugcgagggggccugg

SEQ ID NO: 1874601 - RNA, 14 nt, Human herpesvirus 4 (Epstein-Barr virus)
cagagccucugcca

SEQ ID NO: 1874602 - RNA, 17 nt, Human herpesvirus 4 (Epstein-Barr virus)
cagcgccguccacggcc

SEQ ID NO: 1874603 - RNA, 19 nt, Human herpesvirus 4 (Epstein-Barr virus)
cccauccccagcccagccg

SEQ ID NO: 1874604 - RNA, 12 nt, Human herpesvirus 4 (Epstein-Barr virus)
cggguacaaguc

SEQ ID NO: 1874605 - RNA, 21 nt, Human herpesvirus 4 (Epstein-Barr virus)
aucaccuggguacccaaacca

SEQ ID NO: 1874606 - RNA, 15 nt, Human herpesvirus 4 (Epstein-Barr virus)
ccuggaucuggggcu

SEQ ID NO: 1874607 - RNA, 17 nt, Human herpesvirus 4 (Epstein-Barr virus)
gccaccggcuuggcccu

SEQ ID NO: 1874608 - RNA, 15 nt, Human herpesvirus 4 (Epstein-Barr virus)
ggcucgacgcgggcc

SEQ ID NO: 1874609 - RNA, 23 nt, Human herpesvirus 4 (Epstein-Barr virus)
ugcuaugaccaugcccagacuca

SEQ ID NO: 1874610 - RNA, 22 nt, Human herpesvirus 4 (Epstein-Barr virus)
ugagaccgugucacucccgagg

SEQ ID NO: 1874611 - RNA, 14 nt, Human herpesvirus 4 (Epstein-Barr virus)
aggaguuuaaccug

SEQ ID NO: 1874612 - RNA, 16 nt, Human herpesvirus 4 (Epstein-Barr virus)
gcacggucgccccucc

SEQ ID NO: 1874613 - RNA, 17 nt, Human herpesvirus 4 (Epstein-Barr virus)
gccuccaacaggugccc

SEQ ID NO: 1874614 - RNA, 22 nt, Human herpesvirus 4 (Epstein-Barr virus)
cuccuacgcgcuaccuccuauc

SEQ ID NO: 1874615 - RNA, 12 nt, Human herpesvirus 4 (Epstein-Barr virus)
ugacugagcgca

SEQ ID NO: 1874616 - RNA, 22 nt, Human herpesvirus 4 (Epstein-Barr virus)
acuggccaugcaggccuggaca

SEQ ID NO: 1874617 - RNA, 21 nt, Human herpesvirus 4 (Epstein-Barr virus)
auaucuggaggucuucucuga

SEQ ID NO: 1874618 - RNA, 21 nt, Human herpesvirus 4 (Epstein-Barr virus)
gccacgcugggaguccggccc

SEQ ID NO: 1874619 - RNA, 14 nt, Human herpesvirus 4 (Epstein-Barr virus)
agcuccgcccucac

SEQ ID NO: 1874620 - RNA, 20 nt, Human herpesvirus 4 (Epstein-Barr virus)
guaaggccgcugccaggccg

SEQ ID NO: 1874621 - RNA, 21 nt, Human herpesvirus 4 (Epstein-Barr virus)
agugguuguauguucagagcu

SEQ ID NO: 1874622 - RNA, 20 nt, Human herpesvirus 4 (Epstein-Barr virus)
ucauauguaugccuuggcau

SEQ ID NO: 1874623 - RNA, 19 nt, Human herpesvirus 4 (Epstein-Barr virus)
uggagacggugaccugacu

SEQ ID NO: 1874624 - RNA, 22 nt, Human herpesvirus 4 (Epstein-Barr virus)
cagcccuuuuaacauuggcagc

SEQ ID NO: 1874625 - RNA, 19 nt, Human herpesvirus 4 (Epstein-Barr virus)
gcccagcagauccagggcc

SEQ ID NO: 1874626 - RNA, 19 nt, Human herpesvirus 4 (Epstein-Barr virus)
uaugaugacgccgagaccu

SEQ ID NO: 1874627 - RNA, 17 nt, Human herpesvirus 4 (Epstein-Barr virus)
agcggggagagggugga

SEQ ID NO: 1874628 - RNA, 19 nt, Human herpesvirus 4 (Epstein-Barr virus)
guucacugcguagaugagc

SEQ ID NO: 1874629 - RNA, 13 nt, Human herpesvirus 4 (Epstein-Barr virus)
caagcggcacaga

SEQ ID NO: 1874630 - RNA, 20 nt, Human herpesvirus 4 (Epstein-Barr virus)
ccugggccccccggaggggc

SEQ ID NO: 1874631 - RNA, 23 nt, Human herpesvirus 4 (Epstein-Barr virus)
aaaguguaacauuuaauguggga

SEQ ID NO: 1874632 - RNA, 21 nt, Human herpesvirus 4 (Epstein-Barr virus)
gaucacuacuacaccgagcag

SEQ ID NO: 1874633 - RNA, 16 nt, Human herpesvirus 4 (Epstein-Barr virus)
gcaagaauuggggcug

SEQ ID NO: 1874634 - RNA, 14 nt, Human herpesvirus 4 (Epstein-Barr virus)
ucucucaucuccaa

SEQ ID NO: 1874635 - RNA, 13 nt, Human herpesvirus 4 (Epstein-Barr virus)
ucgccgccccagg

SEQ ID NO: 1874636 - RNA, 15 nt, Human herpesvirus 4 (Epstein-Barr virus)
acugcagugggccuc

SEQ ID NO: 1874637 - RNA, 14 nt, Human herpesvirus 4 (Epstein-Barr virus)
gccgccccgggccc

SEQ ID NO: 1874638 - RNA, 16 nt, Human herpesvirus 4 (Epstein-Barr virus)
ccgcaccagggccagg

SEQ ID NO: 1874639 - RNA, 15 nt, Human herpesvirus 4 (Epstein-Barr virus)
gagacacggcucugu

SEQ ID NO: 1874640 - RNA, 14 nt, Human herpesvirus 4 (Epstein-Barr virus)
caggacggggggcu

SEQ ID NO: 1874641 - RNA, 22 nt, Human herpesvirus 4 (Epstein-Barr virus)
uccuggcauacuuuuugccacc

SEQ ID NO: 1874642 - RNA, 16 nt, Human herpesvirus 4 (Epstein-Barr virus)
ugacccuucugcugcu

SEQ ID NO: 1874643 - RNA, 14 nt, Human herpesvirus 4 (Epstein-Barr virus)
gucuccgggucagg

SEQ ID NO: 1874644 - RNA, 15 nt, Human herpesvirus 4 (Epstein-Barr virus)
ccccggcucucaggc

SEQ ID NO: 1874645 - RNA, 12 nt, Human herpesvirus 4 (Epstein-Barr virus)
uuugccuggggc

SEQ ID NO: 1874646 - RNA, 14 nt, Human herpesvirus 4 (Epstein-Barr virus)
ucucccgcgccgca

SEQ ID NO: 1874647 - RNA, 18 nt, Human herpesvirus 4 (Epstein-Barr virus)
cucaggccucccagucua

SEQ ID NO: 1874648 - RNA, 12 nt, Human herpesvirus 4 (Epstein-Barr virus)
ggugcucccccu

SEQ ID NO: 1874649 - RNA, 14 nt, Human herpesvirus 4 (Epstein-Barr virus)
cuucuggcucuucu

SEQ ID NO: 1874650 - RNA, 17 nt, Human herpesvirus 4 (Epstein-Barr virus)
accugucuacuucgcca

SEQ ID NO: 1874651 - RNA, 18 nt, Human herpesvirus 4 (Epstein-Barr virus)
cagcucaaccgccagggc

SEQ ID NO: 1874652 - RNA, 19 nt, Human herpesvirus 4 (Epstein-Barr virus)
gccugauauugucccccua

SEQ ID NO: 1874653 - RNA, 14 nt, Human herpesvirus 4 (Epstein-Barr virus)
caggcccucauucc

SEQ ID NO: 1874654 - RNA, 20 nt, Human herpesvirus 4 (Epstein-Barr virus)
agaagacguuguaggugucc

SEQ ID NO: 1874655 - RNA, 23 nt, Human herpesvirus 4 (Epstein-Barr virus)
gacuggggugugaagggcagggc

SEQ ID NO: 1874656 - RNA, 17 nt, Human herpesvirus 4 (Epstein-Barr virus)
uacgauggcggaaacaa

SEQ ID NO: 1874657 - RNA, 16 nt, Human herpesvirus 4 (Epstein-Barr virus)
ugcauggagaagcugg

SEQ ID NO: 1874658 - RNA, 22 nt, Human herpesvirus 4 (Epstein-Barr virus)
caggccucagcgucaggagagg

SEQ ID NO: 1874659 - RNA, 13 nt, Human herpesvirus 4 (Epstein-Barr virus)
cagcagcccggcc

SEQ ID NO: 1874660 - RNA, 13 nt, Human herpesvirus 4 (Epstein-Barr virus)
gcuggacgagguc

SEQ ID NO: 1874661 - RNA, 20 nt, Human herpesvirus 4 (Epstein-Barr virus)
accgccucuacccuccccau

SEQ ID NO: 1874662 - RNA, 17 nt, Human herpesvirus 4 (Epstein-Barr virus)
ugucuuugccaaccugc

SEQ ID NO: 1874663 - RNA, 14 nt, Human herpesvirus 4 (Epstein-Barr virus)
ccaccuccaccacc

SEQ ID NO: 1874664 - RNA, 17 nt, Human herpesvirus 4 (Epstein-Barr virus)
gccuucuccucagccuc

SEQ ID NO: 1874665 - RNA, 14 nt, Human herpesvirus 4 (Epstein-Barr virus)
ucuucugggaacac

SEQ ID NO: 1874666 - RNA, 13 nt, Human herpesvirus 4 (Epstein-Barr virus)
gacaaggcaggcg

SEQ ID NO: 1874667 - RNA, 16 nt, Human herpesvirus 4 (Epstein-Barr virus)
cccggcggcugcugcc

SEQ ID NO: 1874668 - RNA, 23 nt, Human herpesvirus 4 (Epstein-Barr virus)
auuuucugcgugagaugaacacc

SEQ ID NO: 1874669 - RNA, 23 nt, Human herpesvirus 4 (Epstein-Barr virus)
ggugggaucaugaagcccccagg

SEQ ID NO: 1874670 - RNA, 16 nt, Human herpesvirus 4 (Epstein-Barr virus)
gcccuccgcagccgcu

SEQ ID NO: 1874671 - RNA, 20 nt, Human herpesvirus 4 (Epstein-Barr virus)
ccccacggggugcucccccu

SEQ ID NO: 1874672 - RNA, 16 nt, Human herpesvirus 4 (Epstein-Barr virus)
uaaauguuacuucuuu

SEQ ID NO: 1874673 - RNA, 22 nt, Human herpesvirus 4 (Epstein-Barr virus)
gaaauaucuagcacggcacccu

SEQ ID NO: 1874674 - RNA, 16 nt, Human herpesvirus 4 (Epstein-Barr virus)
cagcagcagugguguu

SEQ ID NO: 1874675 - RNA, 12 nt, Human herpesvirus 4 (Epstein-Barr virus)
ccuccuggccag

SEQ ID NO: 1874676 - RNA, 17 nt, Human herpesvirus 4 (Epstein-Barr virus)
ucaccuuccagacuaug

SEQ ID NO: 1874677 - RNA, 13 nt, Human herpesvirus 4 (Epstein-Barr virus)
gaagaagauugaa

SEQ ID NO: 1874678 - RNA, 15 nt, Human herpesvirus 4 (Epstein-Barr virus)
cuuguuucucagaga

SEQ ID NO: 1874679 - RNA, 19 nt, Human herpesvirus 4 (Epstein-Barr virus)
caguggccgucuggcaggg

SEQ ID NO: 1874680 - RNA, 18 nt, Human herpesvirus 4 (Epstein-Barr virus)
cucaucuccaaaaaguug

SEQ ID NO: 1874681 - RNA, 22 nt, Human herpesvirus 4 (Epstein-Barr virus)
aggaggacaugugcauggccug

SEQ ID NO: 1874682 - RNA, 21 nt, Human herpesvirus 4 (Epstein-Barr virus)
auccugcucauuauugcucuc

SEQ ID NO: 1874683 - RNA, 15 nt, Human herpesvirus 4 (Epstein-Barr virus)
aggccgggaggccuu

SEQ ID NO: 1874684 - RNA, 19 nt, Human herpesvirus 4 (Epstein-Barr virus)
aguaaacccgauggccccg

SEQ ID NO: 1874685 - RNA, 15 nt, Human herpesvirus 4 (Epstein-Barr virus)
gacugauccgcagaa

SEQ ID NO: 1874686 - RNA, 14 nt, Human herpesvirus 4 (Epstein-Barr virus)
ccugggcugccccg

SEQ ID NO: 1874687 - RNA, 20 nt, Human herpesvirus 4 (Epstein-Barr virus)
agaaucggguggcuuccaga

SEQ ID NO: 1874688 - RNA, 14 nt, Human herpesvirus 4 (Epstein-Barr virus)
ucggagucuucaag

SEQ ID NO: 1874689 - RNA, 12 nt, Human herpesvirus 4 (Epstein-Barr virus)
acgaugacuccc

SEQ ID NO: 1874690 - RNA, 17 nt, Human herpesvirus 4 (Epstein-Barr virus)
cuguguccgacgccugc

SEQ ID NO: 1874691 - RNA, 16 nt, Human herpesvirus 4 (Epstein-Barr virus)
uaagucaugacaauuu

SEQ ID NO: 1874692 - RNA, 22 nt, Human herpesvirus 4 (Epstein-Barr virus)
ggagcggggguucuccaggcuc

SEQ ID NO: 1874693 - RNA, 12 nt, Human herpesvirus 4 (Epstein-Barr virus)
caggucaggucc

SEQ ID NO: 1874694 - RNA, 21 nt, Human herpesvirus 4 (Epstein-Barr virus)
ccugacggugccgcuccuuug

SEQ ID NO: 1874695 - RNA, 14 nt, Human herpesvirus 4 (Epstein-Barr virus)
agaagagaggcuuc

SEQ ID NO: 1874696 - RNA, 19 nt, Human herpesvirus 4 (Epstein-Barr virus)
cacuucuacucuuggcagc

SEQ ID NO: 1874697 - RNA, 14 nt, Human herpesvirus 4 (Epstein-Barr virus)
ugugcugaagccca

SEQ ID NO: 1874698 - RNA, 18 nt, Human herpesvirus 4 (Epstein-Barr virus)
ucucauccccagagggcg

SEQ ID NO: 1874699 - RNA, 15 nt, Human herpesvirus 4 (Epstein-Barr virus)
gcagcccccuccucc

SEQ ID NO: 1874700 - RNA, 18 nt, Human herpesvirus 4 (Epstein-Barr virus)
ccaggguuucuaggacgc

SEQ ID NO: 1874701 - RNA, 17 nt, Human herpesvirus 4 (Epstein-Barr virus)
caggcaccccaucuucc

SEQ ID NO: 1874702 - RNA, 18 nt, Human herpesvirus 4 (Epstein-Barr virus)
ccacuuacaaccaagcca

SEQ ID NO: 1874703 - RNA, 13 nt, Human herpesvirus 4 (Epstein-Barr virus)
gaggccucaggca

SEQ ID NO: 1874704 - RNA, 23 nt, Human herpesvirus 4 (Epstein-Barr virus)
auuccuaggagaaggagccucgc

SEQ ID NO: 1874705 - RNA, 14 nt, Human herpesvirus 4 (Epstein-Barr virus)
cgggucccgccucu

SEQ ID NO: 1874706 - RNA, 15 nt, Human herpesvirus 4 (Epstein-Barr virus)
ccagaagcagaugga

SEQ ID NO: 1874707 - RNA, 14 nt, Human herpesvirus 4 (Epstein-Barr virus)
cuccaucagggcca

SEQ ID NO: 1874708 - RNA, 17 nt, Human herpesvirus 4 (Epstein-Barr virus)
ugggaacugaguaggcu

SEQ ID NO: 1874709 - RNA, 13 nt, Human herpesvirus 4 (Epstein-Barr virus)
caccacacaggua

SEQ ID NO: 1874710 - RNA, 14 nt, Human herpesvirus 4 (Epstein-Barr virus)
caacacgaccaccu

SEQ ID NO: 1874711 - RNA, 16 nt, Human herpesvirus 4 (Epstein-Barr virus)
ccuacucuccacggga

SEQ ID NO: 1874712 - RNA, 13 nt, Human herpesvirus 4 (Epstein-Barr virus)
gugggcucccucu

SEQ ID NO: 1874713 - RNA, 15 nt, Human herpesvirus 4 (Epstein-Barr virus)
cccuccuccacccag

SEQ ID NO: 1874714 - RNA, 22 nt, Human herpesvirus 4 (Epstein-Barr virus)
aacauguccuguuagcuggugc

SEQ ID NO: 1874715 - RNA, 17 nt, Human herpesvirus 4 (Epstein-Barr virus)
gagucugcuggacuccg

SEQ ID NO: 1874716 - RNA, 17 nt, Human herpesvirus 4 (Epstein-Barr virus)
gcaggagcaggaggagg

SEQ ID NO: 1874717 - RNA, 14 nt, Human herpesvirus 4 (Epstein-Barr virus)
gguaccagaagagu

SEQ ID NO: 1874718 - RNA, 13 nt, Human herpesvirus 4 (Epstein-Barr virus)
gggugggcugguu

SEQ ID NO: 1874719 - RNA, 16 nt, Human herpesvirus 4 (Epstein-Barr virus)
uggcauucagauuucu

SEQ ID NO: 1874720 - RNA, 18 nt, Human herpesvirus 4 (Epstein-Barr virus)
ucagaagaauguccaaaa

SEQ ID NO: 1874721 - RNA, 22 nt, Human herpesvirus 4 (Epstein-Barr virus)
gcccgcuuuugcgaccccucug

SEQ ID NO: 1874722 - RNA, 20 nt, Human herpesvirus 4 (Epstein-Barr virus)
guuaucaccguaccaugagu

SEQ ID NO: 1874723 - RNA, 16 nt, Human herpesvirus 4 (Epstein-Barr virus)
ugacacccccagcgcu

SEQ ID NO: 1874724 - RNA, 18 nt, Human herpesvirus 4 (Epstein-Barr virus)
uggugggggcggaugagg

SEQ ID NO: 1874725 - RNA, 15 nt, Human herpesvirus 4 (Epstein-Barr virus)
cugccuccggccgcc

SEQ ID NO: 1874726 - RNA, 13 nt, Human herpesvirus 4 (Epstein-Barr virus)
cugacgcuccagg

SEQ ID NO: 1874727 - RNA, 13 nt, Human herpesvirus 4 (Epstein-Barr virus)
gaccaagcuacca

SEQ ID NO: 1874728 - RNA, 22 nt, Human herpesvirus 4 (Epstein-Barr virus)
agauccaacuccggcccacgcc

SEQ ID NO: 1874729 - RNA, 15 nt, Human herpesvirus 4 (Epstein-Barr virus)
uccuagagggacagc

SEQ ID NO: 1874730 - RNA, 20 nt, Human herpesvirus 4 (Epstein-Barr virus)
cgaugccucuacgccccaga

SEQ ID NO: 1874731 - RNA, 20 nt, Human herpesvirus 4 (Epstein-Barr virus)
aagucuauacggccacaacc

SEQ ID NO: 1874732 - RNA, 21 nt, Human herpesvirus 4 (Epstein-Barr virus)
aaggcaguccaggggccacac

SEQ ID NO: 1874733 - RNA, 15 nt, Human herpesvirus 4 (Epstein-Barr virus)
aggcucggcccuccg

SEQ ID NO: 1874734 - RNA, 17 nt, Human herpesvirus 4 (Epstein-Barr virus)
uaucacccauggccagg

SEQ ID NO: 1874735 - RNA, 20 nt, Human herpesvirus 4 (Epstein-Barr virus)
cacguccccggccucccgcu

SEQ ID NO: 1874736 - RNA, 11 nt, Human herpesvirus 4 (Epstein-Barr virus)
cgcugcaugca

SEQ ID NO: 1874737 - RNA, 17 nt, Human herpesvirus 4 (Epstein-Barr virus)
cacccgucccggguaca

SEQ ID NO: 1874738 - RNA, 23 nt, Human herpesvirus 4 (Epstein-Barr virus)
gcccgcuuuugcgaccccucuga

SEQ ID NO: 1874739 - RNA, 13 nt, Human herpesvirus 4 (Epstein-Barr virus)
gccggcagccugg

SEQ ID NO: 1874740 - RNA, 21 nt, Human herpesvirus 4 (Epstein-Barr virus)
agcaugggcgaggggcgcccc

SEQ ID NO: 1874741 - RNA, 13 nt, Human herpesvirus 4 (Epstein-Barr virus)
ccuccccuguggc

SEQ ID NO: 1874742 - RNA, 19 nt, Human herpesvirus 4 (Epstein-Barr virus)
gccagcaaaaccagcccgg

SEQ ID NO: 1874743 - RNA, 14 nt, Human herpesvirus 4 (Epstein-Barr virus)
gccuccgccugagc

SEQ ID NO: 1874744 - RNA, 19 nt, Human herpesvirus 4 (Epstein-Barr virus)
cacagugaugaacaccacc

SEQ ID NO: 1874745 - RNA, 16 nt, Human herpesvirus 4 (Epstein-Barr virus)
aaggcccuaauucagc

SEQ ID NO: 1874746 - RNA, 16 nt, Human herpesvirus 4 (Epstein-Barr virus)
aggccucuggggucca

SEQ ID NO: 1874747 - RNA, 20 nt, Human herpesvirus 4 (Epstein-Barr virus)
ccuuggauccccuuaaucua

SEQ ID NO: 1874748 - RNA, 20 nt, Human herpesvirus 4 (Epstein-Barr virus)
aacuggccaugcaggccugg

SEQ ID NO: 1874749 - RNA, 22 nt, Human herpesvirus 4 (Epstein-Barr virus)
acaaggagugccucugggugcu

SEQ ID NO: 1874750 - RNA, 22 nt, Human herpesvirus 4 (Epstein-Barr virus)
accggccaagguccugggccuc

SEQ ID NO: 1874751 - RNA, 18 nt, Human herpesvirus 4 (Epstein-Barr virus)
ucugggccgcccggccuc

SEQ ID NO: 1874752 - RNA, 14 nt, Human herpesvirus 4 (Epstein-Barr virus)
uaauacgcccgaca

SEQ ID NO: 1874753 - RNA, 15 nt, Human herpesvirus 4 (Epstein-Barr virus)
gcuguugacaugagc

SEQ ID NO: 1874754 - RNA, 15 nt, Human herpesvirus 4 (Epstein-Barr virus)
gcaugaucaggaccc

SEQ ID NO: 1874755 - RNA, 15 nt, Human herpesvirus 4 (Epstein-Barr virus)
agcaccacccagccc

SEQ ID NO: 1874756 - RNA, 20 nt, Human herpesvirus 4 (Epstein-Barr virus)
gcaggccccccgcaccaggg

SEQ ID NO: 1874757 - RNA, 22 nt, Human herpesvirus 4 (Epstein-Barr virus)
uguugagaugagucaucccgug

SEQ ID NO: 1874758 - RNA, 19 nt, Human herpesvirus 4 (Epstein-Barr virus)
accagagcccagaggaggc

SEQ ID NO: 1874759 - RNA, 16 nt, Human herpesvirus 4 (Epstein-Barr virus)
ccaggcauacagcagc

SEQ ID NO: 1874760 - RNA, 22 nt, Human herpesvirus 4 (Epstein-Barr virus)
ccugggcugccccgggcccacc

SEQ ID NO: 1874761 - RNA, 19 nt, Human herpesvirus 4 (Epstein-Barr virus)
caccguggagccgggcuuc

SEQ ID NO: 1874762 - RNA, 20 nt, Human herpesvirus 4 (Epstein-Barr virus)
cugccccgguccccccagaa

SEQ ID NO: 1874763 - RNA, 15 nt, Human herpesvirus 4 (Epstein-Barr virus)
cuggucgcccccucu

SEQ ID NO: 1874764 - RNA, 14 nt, Human herpesvirus 4 (Epstein-Barr virus)
gaccaccuggccag

SEQ ID NO: 1874765 - RNA, 17 nt, Human herpesvirus 4 (Epstein-Barr virus)
ugaagauugucacagcu

SEQ ID NO: 1874766 - RNA, 20 nt, Human herpesvirus 4 (Epstein-Barr virus)
caugcaaguggaugcaucua

SEQ ID NO: 1874767 - RNA, 21 nt, Human herpesvirus 4 (Epstein-Barr virus)
uggaggcaauggucgccaggg

SEQ ID NO: 1874768 - RNA, 17 nt, Human herpesvirus 4 (Epstein-Barr virus)
ugcgagcucuccagcca

SEQ ID NO: 1874769 - RNA, 18 nt, Human herpesvirus 4 (Epstein-Barr virus)
acuccggacgcagaggcc

SEQ ID NO: 1874770 - RNA, 20 nt, Human herpesvirus 4 (Epstein-Barr virus)
gucauucuaucaauuaaaca

SEQ ID NO: 1874771 - RNA, 22 nt, Human herpesvirus 4 (Epstein-Barr virus)
cucgguggugggcugcugaggg

SEQ ID NO: 1874772 - RNA, 16 nt, Human herpesvirus 4 (Epstein-Barr virus)
caaggaggggcggcag

SEQ ID NO: 1874773 - RNA, 14 nt, Human herpesvirus 4 (Epstein-Barr virus)
gccgccgccagcag

SEQ ID NO: 1874774 - RNA, 13 nt, Human herpesvirus 4 (Epstein-Barr virus)
ugguggaggagga

SEQ ID NO: 1874775 - RNA, 19 nt, Human herpesvirus 4 (Epstein-Barr virus)
cuucacagagcagcagcua

SEQ ID NO: 1874776 - RNA, 13 nt, Human herpesvirus 4 (Epstein-Barr virus)
gcuggccaggcug

SEQ ID NO: 1874777 - RNA, 18 nt, Human herpesvirus 4 (Epstein-Barr virus)
uuaauggguaaaggggga

SEQ ID NO: 1874778 - RNA, 16 nt, Human herpesvirus 4 (Epstein-Barr virus)
agagccgcuccguggc

SEQ ID NO: 1874779 - RNA, 13 nt, Human herpesvirus 4 (Epstein-Barr virus)
ucaggccucccag

SEQ ID NO: 1874780 - RNA, 21 nt, Human herpesvirus 4 (Epstein-Barr virus)
uggggcuggcaguccuugugu

SEQ ID NO: 1874781 - RNA, 14 nt, Human herpesvirus 4 (Epstein-Barr virus)
caucauuagcccag

SEQ ID NO: 1874782 - RNA, 13 nt, Human herpesvirus 4 (Epstein-Barr virus)
cugccagccucag

SEQ ID NO: 1874783 - RNA, 18 nt, Human herpesvirus 4 (Epstein-Barr virus)
cgcggcccaggucgagca

SEQ ID NO: 1874784 - RNA, 19 nt, Human herpesvirus 4 (Epstein-Barr virus)
cccaaaaguagaggcucag

SEQ ID NO: 1874785 - RNA, 17 nt, Human herpesvirus 4 (Epstein-Barr virus)
aacugucacaccagucc

SEQ ID NO: 1874786 - RNA, 21 nt, Human herpesvirus 4 (Epstein-Barr virus)
ggagcuccgagagcuccgcca

SEQ ID NO: 1874787 - RNA, 19 nt, Human herpesvirus 4 (Epstein-Barr virus)
aggaaguuuuaacaccuga

SEQ ID NO: 1874788 - RNA, 15 nt, Human herpesvirus 4 (Epstein-Barr virus)
caaagucaagggaaa

SEQ ID NO: 1874789 - RNA, 16 nt, Human herpesvirus 4 (Epstein-Barr virus)
ugcccccgccagcgcc

SEQ ID NO: 1874790 - RNA, 18 nt, Human herpesvirus 4 (Epstein-Barr virus)
ggcuccuggaucuggggc

SEQ ID NO: 1874791 - RNA, 13 nt, Human herpesvirus 4 (Epstein-Barr virus)
gcaccagcuccag

SEQ ID NO: 1874792 - RNA, 20 nt, Human herpesvirus 4 (Epstein-Barr virus)
aagagccgcuccguggcccc

SEQ ID NO: 1874793 - RNA, 19 nt, Human herpesvirus 4 (Epstein-Barr virus)
ucagcacuuugccagcaac

SEQ ID NO: 1874794 - RNA, 13 nt, Human herpesvirus 4 (Epstein-Barr virus)
gaugauauugaau

SEQ ID NO: 1874795 - RNA, 16 nt, Human herpesvirus 4 (Epstein-Barr virus)
cagcuccagggccagc

SEQ ID NO: 1874796 - RNA, 13 nt, Human herpesvirus 4 (Epstein-Barr virus)
gagcuggaggcca

SEQ ID NO: 1874797 - RNA, 21 nt, Human herpesvirus 4 (Epstein-Barr virus)
cccauguugcgggugccggcc

SEQ ID NO: 1874798 - RNA, 20 nt, Human herpesvirus 4 (Epstein-Barr virus)
cgcccagggacauccccaga

SEQ ID NO: 1874799 - RNA, 13 nt, Human herpesvirus 4 (Epstein-Barr virus)
guggcugcggugg

SEQ ID NO: 1874800 - RNA, 14 nt, Human herpesvirus 4 (Epstein-Barr virus)
agccaguguggcug

SEQ ID NO: 1874801 - RNA, 20 nt, Human herpesvirus 4 (Epstein-Barr virus)
accuucugucuguaaacuau

SEQ ID NO: 1874802 - RNA, 20 nt, Human herpesvirus 4 (Epstein-Barr virus)
augacucccucccgcacccu

SEQ ID NO: 1874803 - RNA, 17 nt, Human herpesvirus 4 (Epstein-Barr virus)
cagcagauccagggccc

SEQ ID NO: 1874804 - RNA, 18 nt, Human herpesvirus 4 (Epstein-Barr virus)
guccccguggaggaccgc

SEQ ID NO: 1874805 - RNA, 22 nt, Human herpesvirus 4 (Epstein-Barr virus)
ugcagcugaguccccuccuugg

SEQ ID NO: 1874806 - RNA, 14 nt, Human herpesvirus 4 (Epstein-Barr virus)
ucgucagagagguu

SEQ ID NO: 1874807 - RNA, 21 nt, Human herpesvirus 4 (Epstein-Barr virus)
ggggcgauaccuugggcauca

SEQ ID NO: 1874808 - RNA, 11 nt, Human herpesvirus 4 (Epstein-Barr virus)
gccauggccaa

SEQ ID NO: 1874809 - RNA, 18 nt, Human herpesvirus 4 (Epstein-Barr virus)
agguuaaaugugaagccc

SEQ ID NO: 1874810 - RNA, 19 nt, Human herpesvirus 4 (Epstein-Barr virus)
gagcaugaucaggacccug

SEQ ID NO: 1874811 - RNA, 19 nt, Human herpesvirus 4 (Epstein-Barr virus)
ccuugcccucuccagcaac

SEQ ID NO: 1874812 - RNA, 19 nt, Human herpesvirus 4 (Epstein-Barr virus)
ugcugccagagccucugcc

SEQ ID NO: 1874813 - RNA, 20 nt, Human herpesvirus 4 (Epstein-Barr virus)
ggagagauuucauccucaga

SEQ ID NO: 1874814 - RNA, 14 nt, Human herpesvirus 4 (Epstein-Barr virus)
aucccaggccucag

SEQ ID NO: 1874815 - RNA, 16 nt, Human herpesvirus 4 (Epstein-Barr virus)
ucgaagcggucucaga

SEQ ID NO: 1874816 - RNA, 20 nt, Human herpesvirus 4 (Epstein-Barr virus)
cagguuaaaugugaagcccg

SEQ ID NO: 1874817 - RNA, 16 nt, Human herpesvirus 4 (Epstein-Barr virus)
cugucaccaggccugc

SEQ ID NO: 1874818 - RNA, 21 nt, Human herpesvirus 4 (Epstein-Barr virus)
ggccucuaaguacaggucgcg

SEQ ID NO: 1874819 - RNA, 16 nt, Human herpesvirus 4 (Epstein-Barr virus)
agcugaggggcaaccu

SEQ ID NO: 1874820 - RNA, 16 nt, Human herpesvirus 4 (Epstein-Barr virus)
aguaagcauggggcuc

SEQ ID NO: 1874821 - RNA, 19 nt, Human herpesvirus 4 (Epstein-Barr virus)
gugggccucucuggcugug

SEQ ID NO: 1874822 - RNA, 19 nt, Human herpesvirus 4 (Epstein-Barr virus)
ggcagccuugcguggugcu

SEQ ID NO: 1874823 - RNA, 12 nt, Human herpesvirus 4 (Epstein-Barr virus)
cucggcaccucc

SEQ ID NO: 1874824 - RNA, 18 nt, Human herpesvirus 4 (Epstein-Barr virus)
gcagaaaggcuggccgug

SEQ ID NO: 1874825 - RNA, 19 nt, Human herpesvirus 4 (Epstein-Barr virus)
gcaacccccggcucucagg

SEQ ID NO: 1874826 - RNA, 22 nt, Human herpesvirus 4 (Epstein-Barr virus)
cuaguaugaaggcuggcaaaga

SEQ ID NO: 1874827 - RNA, 22 nt, Human herpesvirus 4 (Epstein-Barr virus)
caacgcuuccacccccuggagc

SEQ ID NO: 1874828 - RNA, 19 nt, Human herpesvirus 4 (Epstein-Barr virus)
gagcgcccaccgaccccau

SEQ ID NO: 1874829 - RNA, 19 nt, Human herpesvirus 4 (Epstein-Barr virus)
caucaugcgugaccaccug

SEQ ID NO: 1874830 - RNA, 12 nt, Human herpesvirus 4 (Epstein-Barr virus)
gcuugcuggggc

SEQ ID NO: 1874831 - RNA, 19 nt, Human herpesvirus 4 (Epstein-Barr virus)
gggggccaaaagggcucug

SEQ ID NO: 1874832 - RNA, 16 nt, Human herpesvirus 4 (Epstein-Barr virus)
gccguccucgaaggcu

SEQ ID NO: 1874833 - RNA, 17 nt, Human herpesvirus 4 (Epstein-Barr virus)
augucggggcugcuggc

SEQ ID NO: 1874834 - RNA, 14 nt, Human herpesvirus 4 (Epstein-Barr virus)
ugucuccccucugc

SEQ ID NO: 1874835 - RNA, 17 nt, Human herpesvirus 4 (Epstein-Barr virus)
cagcaccugucccuggg

SEQ ID NO: 1874836 - RNA, 22 nt, Human herpesvirus 4 (Epstein-Barr virus)
cauauccagagcugagugccca

SEQ ID NO: 1874837 - RNA, 15 nt, Human herpesvirus 4 (Epstein-Barr virus)
ccgccuagagcauuu

SEQ ID NO: 1874838 - RNA, 14 nt, Human herpesvirus 4 (Epstein-Barr virus)
guccucuggcucuc

SEQ ID NO: 1874839 - RNA, 17 nt, Human herpesvirus 4 (Epstein-Barr virus)
cuuuuggccuucuuccu

SEQ ID NO: 1874840 - RNA, 21 nt, Human herpesvirus 4 (Epstein-Barr virus)
ugauggccuggagagcaugca

SEQ ID NO: 1874841 - RNA, 18 nt, Human herpesvirus 4 (Epstein-Barr virus)
uccagggcccuggucagg

SEQ ID NO: 1874842 - RNA, 14 nt, Human herpesvirus 4 (Epstein-Barr virus)
ccagggccaggcga

SEQ ID NO: 1874843 - RNA, 16 nt, Human herpesvirus 4 (Epstein-Barr virus)
aggcccccggcuggcc

SEQ ID NO: 1874844 - RNA, 18 nt, Human herpesvirus 4 (Epstein-Barr virus)
cacaucuggaccuggacu

SEQ ID NO: 1874845 - RNA, 18 nt, Human herpesvirus 4 (Epstein-Barr virus)
ccaaacauaaaugcccca

SEQ ID NO: 1874846 - RNA, 15 nt, Human herpesvirus 4 (Epstein-Barr virus)
ccuucucaugcuccu

SEQ ID NO: 1874847 - RNA, 19 nt, Human herpesvirus 4 (Epstein-Barr virus)
accuuaacuggcacacacu

SEQ ID NO: 1874848 - RNA, 20 nt, Human herpesvirus 4 (Epstein-Barr virus)
cuugagcgccguggccaccu

SEQ ID NO: 1874849 - RNA, 15 nt, Human herpesvirus 4 (Epstein-Barr virus)
cgagaaaaugagcca

SEQ ID NO: 1874850 - RNA, 12 nt, Human herpesvirus 4 (Epstein-Barr virus)
ucaauuaaacaa

SEQ ID NO: 1874851 - RNA, 15 nt, Human herpesvirus 4 (Epstein-Barr virus)
ccuggacgagggggc

SEQ ID NO: 1874852 - RNA, 13 nt, Human herpesvirus 4 (Epstein-Barr virus)
cgcuacugcugcu

SEQ ID NO: 1874853 - RNA, 21 nt, Human herpesvirus 4 (Epstein-Barr virus)
gcuaaucgcugguggcaguau

SEQ ID NO: 1874854 - RNA, 22 nt, Human herpesvirus 4 (Epstein-Barr virus)
cgcucgcgggguuccccucccc

SEQ ID NO: 1874855 - RNA, 20 nt, Human herpesvirus 4 (Epstein-Barr virus)
cagcgaagaacacuccacag

SEQ ID NO: 1874856 - RNA, 14 nt, Human herpesvirus 4 (Epstein-Barr virus)
uggugggacugaga

SEQ ID NO: 1874857 - RNA, 22 nt, Human herpesvirus 4 (Epstein-Barr virus)
gccauggugccaagcucagccc

SEQ ID NO: 1874858 - RNA, 17 nt, Human herpesvirus 4 (Epstein-Barr virus)
ucagcgucaggagaggg

SEQ ID NO: 1874859 - RNA, 21 nt, Human herpesvirus 4 (Epstein-Barr virus)
cccacugaaaaaccagacacg

SEQ ID NO: 1874860 - RNA, 18 nt, Human herpesvirus 4 (Epstein-Barr virus)
acgcuguuuugcagcuga

SEQ ID NO: 1874861 - RNA, 17 nt, Human herpesvirus 4 (Epstein-Barr virus)
ccugcacggcccuccag

SEQ ID NO: 1874862 - RNA, 17 nt, Human herpesvirus 4 (Epstein-Barr virus)
ucaggaagcuggccagg

SEQ ID NO: 1874863 - RNA, 16 nt, Human herpesvirus 4 (Epstein-Barr virus)
auggcacgggcagagg

SEQ ID NO: 1874864 - RNA, 12 nt, Human herpesvirus 4 (Epstein-Barr virus)
gcaugugguggc

SEQ ID NO: 1874865 - RNA, 16 nt, Human herpesvirus 4 (Epstein-Barr virus)
cgcugggaccggggcc

SEQ ID NO: 1874866 - RNA, 18 nt, Human herpesvirus 4 (Epstein-Barr virus)
ccgaagauuuggcgucua

SEQ ID NO: 1874867 - RNA, 21 nt, Human herpesvirus 4 (Epstein-Barr virus)
ccuggagagcaugcaggucag

SEQ ID NO: 1874868 - RNA, 14 nt, Human herpesvirus 4 (Epstein-Barr virus)
ggcccguuccaggc

SEQ ID NO: 1874869 - RNA, 20 nt, Human herpesvirus 4 (Epstein-Barr virus)
cacgcuuuugucugccugga

SEQ ID NO: 1874870 - RNA, 17 nt, Human herpesvirus 4 (Epstein-Barr virus)
caugcagggugcacaga

SEQ ID NO: 1874871 - RNA, 14 nt, Human herpesvirus 4 (Epstein-Barr virus)
guuucggacacacc

SEQ ID NO: 1874872 - RNA, 23 nt, Human herpesvirus 4 (Epstein-Barr virus)
ggcguaacuugucuacaucccau

SEQ ID NO: 1874873 - RNA, 16 nt, Human herpesvirus 4 (Epstein-Barr virus)
ccuuuuaauucucuuc

SEQ ID NO: 1874874 - RNA, 20 nt, Human herpesvirus 4 (Epstein-Barr virus)
cucaggccucccagucuauc

SEQ ID NO: 1874875 - RNA, 16 nt, Human herpesvirus 4 (Epstein-Barr virus)
gauaaaguuguccugg

SEQ ID NO: 1874876 - RNA, 15 nt, Human herpesvirus 4 (Epstein-Barr virus)
aucuggggcuggccu

SEQ ID NO: 1874877 - RNA, 22 nt, Human herpesvirus 4 (Epstein-Barr virus)
auggagaugugcgcccugcucu

SEQ ID NO: 1874878 - RNA, 22 nt, Human herpesvirus 4 (Epstein-Barr virus)
ggucccccuccacgggagggcg

SEQ ID NO: 1874879 - RNA, 22 nt, Human herpesvirus 4 (Epstein-Barr virus)
gaaaagagagcugauggaggcc

SEQ ID NO: 1874880 - RNA, 19 nt, Human herpesvirus 4 (Epstein-Barr virus)
gcagaggacuuuuggggug

SEQ ID NO: 1874881 - RNA, 22 nt, Human herpesvirus 4 (Epstein-Barr virus)
ucuuccgugccucgggccucaa

SEQ ID NO: 1874882 - RNA, 20 nt, Human herpesvirus 4 (Epstein-Barr virus)
gaugcugccgcuacugcugc

SEQ ID NO: 1874883 - RNA, 19 nt, Human herpesvirus 4 (Epstein-Barr virus)
aacgaucccaggccucagc

SEQ ID NO: 1874884 - RNA, 16 nt, Human herpesvirus 4 (Epstein-Barr virus)
cggcguggagcugggc

SEQ ID NO: 1874885 - RNA, 21 nt, Human herpesvirus 4 (Epstein-Barr virus)
ucaagagucucgccaucuacc

SEQ ID NO: 1874886 - RNA, 20 nt, Human herpesvirus 4 (Epstein-Barr virus)
cccugaacaucucaucccca

SEQ ID NO: 1874887 - RNA, 18 nt, Human herpesvirus 4 (Epstein-Barr virus)
gaccuguugucccugaga

SEQ ID NO: 1874888 - RNA, 15 nt, Human herpesvirus 4 (Epstein-Barr virus)
agccacguccagacu

SEQ ID NO: 1874889 - RNA, 12 nt, Human herpesvirus 4 (Epstein-Barr virus)
ggaugccuggcg

SEQ ID NO: 1874890 - RNA, 17 nt, Human herpesvirus 4 (Epstein-Barr virus)
gaucuggggcuggccug

SEQ ID NO: 1874891 - RNA, 19 nt, Human herpesvirus 4 (Epstein-Barr virus)
cucagcuuggggccaccgg

SEQ ID NO: 1874892 - RNA, 20 nt, Human herpesvirus 4 (Epstein-Barr virus)
gagcgggaggggcaggagca

SEQ ID NO: 1874893 - RNA, 22 nt, Human herpesvirus 4 (Epstein-Barr virus)
ccacugagcaagauccuucugg

SEQ ID NO: 1874894 - RNA, 17 nt, Human herpesvirus 4 (Epstein-Barr virus)
cagacucugcuuucugc

SEQ ID NO: 1874895 - RNA, 19 nt, Human herpesvirus 4 (Epstein-Barr virus)
uacccagaggaggacaugu

SEQ ID NO: 1874896 - RNA, 13 nt, Human herpesvirus 4 (Epstein-Barr virus)
cacccauggccag

SEQ ID NO: 1874897 - RNA, 18 nt, Human herpesvirus 4 (Epstein-Barr virus)
cuggagaugauucauggg

SEQ ID NO: 1874898 - RNA, 23 nt, Human herpesvirus 4 (Epstein-Barr virus)
gccagggugaccuggcucagguc

SEQ ID NO: 1874899 - RNA, 16 nt, Human herpesvirus 4 (Epstein-Barr virus)
gauagcauggccgcca

SEQ ID NO: 1874900 - RNA, 20 nt, Human herpesvirus 4 (Epstein-Barr virus)
agugacacugaugagucuga

SEQ ID NO: 1874901 - RNA, 23 nt, Human herpesvirus 4 (Epstein-Barr virus)
cggccucgccuucuccucagccu

SEQ ID NO: 1874902 - RNA, 14 nt, Human herpesvirus 4 (Epstein-Barr virus)
aaggagugccucug

SEQ ID NO: 1874903 - RNA, 21 nt, Human herpesvirus 4 (Epstein-Barr virus)
gccaggaccuggaugcuguag

SEQ ID NO: 1874904 - RNA, 15 nt, Human herpesvirus 4 (Epstein-Barr virus)
cccuggaggccucag

SEQ ID NO: 1874905 - RNA, 16 nt, Human herpesvirus 4 (Epstein-Barr virus)
ccagcucggccagcag

SEQ ID NO: 1874906 - RNA, 16 nt, Human herpesvirus 4 (Epstein-Barr virus)
uuccugcccucccacu

SEQ ID NO: 1874907 - RNA, 20 nt, Human herpesvirus 4 (Epstein-Barr virus)
uaauucucuucuguuugcau

SEQ ID NO: 1874908 - RNA, 19 nt, Human herpesvirus 4 (Epstein-Barr virus)
cgggccauucgugagucca

SEQ ID NO: 1874909 - RNA, 16 nt, Human herpesvirus 4 (Epstein-Barr virus)
gccggaaccugagccu

SEQ ID NO: 1874910 - RNA, 18 nt, Human herpesvirus 4 (Epstein-Barr virus)
agcugacggugggcauga

SEQ ID NO: 1874911 - RNA, 20 nt, Human herpesvirus 4 (Epstein-Barr virus)
ggaggcacacaaaaugagga

SEQ ID NO: 1874912 - RNA, 19 nt, Human herpesvirus 4 (Epstein-Barr virus)
ccuccauuccacccacuga

SEQ ID NO: 1874913 - RNA, 18 nt, Human herpesvirus 4 (Epstein-Barr virus)
uggcaucuuccuccuugu

SEQ ID NO: 1874914 - RNA, 15 nt, Human herpesvirus 4 (Epstein-Barr virus)
caggagcuugaggcc

SEQ ID NO: 1874915 - RNA, 24 nt, Human herpesvirus 4 (Epstein-Barr virus)
ccgccauaacgccaucugcguggc

SEQ ID NO: 1874916 - RNA, 23 nt, Human herpesvirus 4 (Epstein-Barr virus)
ccaguguacugcgaugagggccu

SEQ ID NO: 1874917 - RNA, 21 nt, Human herpesvirus 4 (Epstein-Barr virus)
gcuccguccuuguccaggaga

SEQ ID NO: 1874918 - RNA, 12 nt, Human herpesvirus 4 (Epstein-Barr virus)
ucccucugggag

SEQ ID NO: 1874919 - RNA, 14 nt, Human herpesvirus 4 (Epstein-Barr virus)
ccacagccccacuc

SEQ ID NO: 1874920 - RNA, 13 nt, Human herpesvirus 4 (Epstein-Barr virus)
gcggacugcgccu

SEQ ID NO: 1874921 - RNA, 12 nt, Human herpesvirus 4 (Epstein-Barr virus)
agauccuucugg

SEQ ID NO: 1874922 - RNA, 15 nt, Human herpesvirus 4 (Epstein-Barr virus)
cggcaccgucagcca

SEQ ID NO: 1874923 - RNA, 20 nt, Human herpesvirus 4 (Epstein-Barr virus)
ucuccugugcuucagcagua

SEQ ID NO: 1874924 - RNA, 15 nt, Human herpesvirus 4 (Epstein-Barr virus)
auaaaccuuaaaagu

SEQ ID NO: 1874925 - RNA, 13 nt, Human herpesvirus 4 (Epstein-Barr virus)
ggcggcaguggac

SEQ ID NO: 1874926 - RNA, 16 nt, Human herpesvirus 4 (Epstein-Barr virus)
cagcucuaacuuggca

SEQ ID NO: 1874927 - RNA, 14 nt, Human herpesvirus 4 (Epstein-Barr virus)
agacuaugcauaca

SEQ ID NO: 1874928 - RNA, 14 nt, Human herpesvirus 4 (Epstein-Barr virus)
uggauuugaaagug

SEQ ID NO: 1874929 - RNA, 14 nt, Human herpesvirus 4 (Epstein-Barr virus)
ggaaugccuuagcu

SEQ ID NO: 1874930 - RNA, 22 nt, Human herpesvirus 4 (Epstein-Barr virus)
cucaggaagcuggccaggcugg

SEQ ID NO: 1874931 - RNA, 21 nt, Human herpesvirus 4 (Epstein-Barr virus)
caacccccggcucucaggccu

SEQ ID NO: 1874932 - RNA, 12 nt, Human herpesvirus 4 (Epstein-Barr virus)
agcccccucucg

SEQ ID NO: 1874933 - RNA, 24 nt, Human herpesvirus 4 (Epstein-Barr virus)
aagagaggcuucccgccuagagca

SEQ ID NO: 1874934 - RNA, 15 nt, Human herpesvirus 4 (Epstein-Barr virus)
gccucuaccuuccac

SEQ ID NO: 1874935 - RNA, 17 nt, Human herpesvirus 4 (Epstein-Barr virus)
ccucuuccgugccucgg

SEQ ID NO: 1874936 - RNA, 22 nt, Human herpesvirus 4 (Epstein-Barr virus)
aggucuugccguggcgccuggg

SEQ ID NO: 1874937 - RNA, 22 nt, Human herpesvirus 4 (Epstein-Barr virus)
gucaaacaggugagucagccuu

SEQ ID NO: 1874938 - RNA, 15 nt, Human herpesvirus 4 (Epstein-Barr virus)
ccccagagcagcccg

SEQ ID NO: 1874939 - RNA, 19 nt, Human herpesvirus 4 (Epstein-Barr virus)
ugggguauucucagaugca

SEQ ID NO: 1874940 - RNA, 16 nt, Human herpesvirus 4 (Epstein-Barr virus)
gcagaggccugcacca

SEQ ID NO: 1874941 - RNA, 22 nt, Human herpesvirus 4 (Epstein-Barr virus)
ucugggccgcccggccucgccu

SEQ ID NO: 1874942 - RNA, 17 nt, Human herpesvirus 4 (Epstein-Barr virus)
gacccuauggagggcag

SEQ ID NO: 1874943 - RNA, 16 nt, Human herpesvirus 4 (Epstein-Barr virus)
ccauacaugucucaga

SEQ ID NO: 1874944 - RNA, 21 nt, Human herpesvirus 4 (Epstein-Barr virus)
auaaaguugaugauauugaau

SEQ ID NO: 1874945 - RNA, 16 nt, Human herpesvirus 4 (Epstein-Barr virus)
ggggcaggagcaggag

SEQ ID NO: 1874946 - RNA, 21 nt, Human herpesvirus 4 (Epstein-Barr virus)
ccuuuugucuccccucugcag

SEQ ID NO: 1874947 - RNA, 16 nt, Human herpesvirus 4 (Epstein-Barr virus)
gccguagcccaguccg

SEQ ID NO: 1874948 - RNA, 15 nt, Human herpesvirus 4 (Epstein-Barr virus)
gggucgccugacccu

SEQ ID NO: 1874949 - RNA, 13 nt, Human herpesvirus 4 (Epstein-Barr virus)
ggcguggguguca

SEQ ID NO: 1874950 - RNA, 19 nt, Human herpesvirus 4 (Epstein-Barr virus)
cuuucuggccaaccugccu

SEQ ID NO: 1874951 - RNA, 15 nt, Human herpesvirus 4 (Epstein-Barr virus)
caugacgcugcugcu

SEQ ID NO: 1874952 - RNA, 17 nt, Human herpesvirus 4 (Epstein-Barr virus)
cgagcuccgugggccca

SEQ ID NO: 1874953 - RNA, 21 nt, Human herpesvirus 4 (Epstein-Barr virus)
gagcagauuuccgucagccag

SEQ ID NO: 1874954 - RNA, 18 nt, Human herpesvirus 4 (Epstein-Barr virus)
cuugugguucuccugauu

SEQ ID NO: 1874955 - RNA, 21 nt, Human herpesvirus 4 (Epstein-Barr virus)
cccaccacccccaccaccucc

SEQ ID NO: 1874956 - RNA, 21 nt, Human herpesvirus 4 (Epstein-Barr virus)
ugucugugguugucuucccag

SEQ ID NO: 1874957 - RNA, 14 nt, Human herpesvirus 4 (Epstein-Barr virus)
gugacauguccggg

SEQ ID NO: 1874958 - RNA, 17 nt, Human herpesvirus 4 (Epstein-Barr virus)
gccugcggacucaggcc

SEQ ID NO: 1874959 - RNA, 15 nt, Human herpesvirus 4 (Epstein-Barr virus)
uggugcaccugcuag

SEQ ID NO: 1874960 - RNA, 21 nt, Human herpesvirus 4 (Epstein-Barr virus)
gguccuggacgagggggcgcg

SEQ ID NO: 1874961 - RNA, 15 nt, Human herpesvirus 4 (Epstein-Barr virus)
agccccagccccucc

SEQ ID NO: 1874962 - RNA, 18 nt, Human herpesvirus 4 (Epstein-Barr virus)
ucagcucaaccgccaggg

SEQ ID NO: 1874963 - RNA, 21 nt, Human herpesvirus 4 (Epstein-Barr virus)
ccuuccagagcucuacaaccc

SEQ ID NO: 1874964 - RNA, 15 nt, Human herpesvirus 4 (Epstein-Barr virus)
gcaaagauccccagu

SEQ ID NO: 1874965 - RNA, 22 nt, Human herpesvirus 4 (Epstein-Barr virus)
gcagccacguccagacuccggg

SEQ ID NO: 1874966 - RNA, 21 nt, Human herpesvirus 4 (Epstein-Barr virus)
caggaggccaccgacgagcag

SEQ ID NO: 1874967 - RNA, 21 nt, Human herpesvirus 4 (Epstein-Barr virus)
ggagucugagaauaaggcucu

SEQ ID NO: 1874968 - RNA, 23 nt, Human herpesvirus 4 (Epstein-Barr virus)
caguccgccaugaccagcagcag

SEQ ID NO: 1874969 - RNA, 22 nt, Human herpesvirus 4 (Epstein-Barr virus)
cugcgccugagcugccugguga

SEQ ID NO: 1874970 - RNA, 20 nt, Human herpesvirus 4 (Epstein-Barr virus)
gccugaagcuugcuggggcg

SEQ ID NO: 1874971 - RNA, 11 nt, Human herpesvirus 4 (Epstein-Barr virus)
aaaagagacug

SEQ ID NO: 1874972 - RNA, 13 nt, Human herpesvirus 4 (Epstein-Barr virus)
augacgcugcugc

SEQ ID NO: 1874973 - RNA, 18 nt, Human herpesvirus 4 (Epstein-Barr virus)
cguuaacauggacaugcu

SEQ ID NO: 1874974 - RNA, 21 nt, Human herpesvirus 4 (Epstein-Barr virus)
guggaaaaucucgcucagagc

SEQ ID NO: 1874975 - RNA, 21 nt, Human herpesvirus 4 (Epstein-Barr virus)
cugccaacuuugagcugggca

SEQ ID NO: 1874976 - RNA, 22 nt, Human herpesvirus 4 (Epstein-Barr virus)
ccugucgauaucccugcugucu

SEQ ID NO: 1874977 - RNA, 16 nt, Human herpesvirus 4 (Epstein-Barr virus)
acacagcgccagcagg

SEQ ID NO: 1874978 - RNA, 16 nt, Human herpesvirus 4 (Epstein-Barr virus)
aucaccagagcccaga

SEQ ID NO: 1874979 - RNA, 21 nt, Human herpesvirus 4 (Epstein-Barr virus)
auauggcuauacacaggagcc

SEQ ID NO: 1874980 - RNA, 19 nt, Human herpesvirus 4 (Epstein-Barr virus)
ggcagaggccucucucgag

SEQ ID NO: 1874981 - RNA, 16 nt, Human herpesvirus 4 (Epstein-Barr virus)
uucugccccucagccu

SEQ ID NO: 1874982 - RNA, 20 nt, Human herpesvirus 4 (Epstein-Barr virus)
gacacccacccugcacacau

SEQ ID NO: 1874983 - RNA, 20 nt, Human herpesvirus 4 (Epstein-Barr virus)
aggcagaugaggccccuuac

SEQ ID NO: 1874984 - RNA, 19 nt, Human herpesvirus 4 (Epstein-Barr virus)
acuacgagggccucuggca

SEQ ID NO: 1874985 - RNA, 15 nt, Human herpesvirus 4 (Epstein-Barr virus)
caagauggagaggca

SEQ ID NO: 1874986 - RNA, 21 nt, Human herpesvirus 4 (Epstein-Barr virus)
cauuuuuggugcugccugggg

SEQ ID NO: 1874987 - RNA, 16 nt, Human herpesvirus 4 (Epstein-Barr virus)
uggacacccacccugc

SEQ ID NO: 1874988 - RNA, 21 nt, Human herpesvirus 4 (Epstein-Barr virus)
ugacggugggcaugacacagg

SEQ ID NO: 1874989 - RNA, 13 nt, Human herpesvirus 4 (Epstein-Barr virus)
acucggccacaca

SEQ ID NO: 1874990 - RNA, 22 nt, Human herpesvirus 4 (Epstein-Barr virus)
agaggccucugggguccaggag

SEQ ID NO: 1874991 - RNA, 18 nt, Human herpesvirus 4 (Epstein-Barr virus)
acccggguucgggcacgc

SEQ ID NO: 1874992 - RNA, 20 nt, Human herpesvirus 4 (Epstein-Barr virus)
cagcaccucagcuguuccca

SEQ ID NO: 1874993 - RNA, 18 nt, Human herpesvirus 4 (Epstein-Barr virus)
aagaccaauacccaggau

SEQ ID NO: 1874994 - RNA, 22 nt, Human herpesvirus 4 (Epstein-Barr virus)
agcuguguuucccgacgccaau

SEQ ID NO: 1874995 - RNA, 20 nt, Human herpesvirus 4 (Epstein-Barr virus)
acacgggccuggggccauag

SEQ ID NO: 1874996 - RNA, 22 nt, Human herpesvirus 4 (Epstein-Barr virus)
aaguacugaaacgucaggucuu

SEQ ID NO: 1874997 - RNA, 17 nt, Human herpesvirus 4 (Epstein-Barr virus)
cgccuucuccucagccu

SEQ ID NO: 1874998 - RNA, 14 nt, Human herpesvirus 4 (Epstein-Barr virus)
ugcacucugaccag

SEQ ID NO: 1874999 - RNA, 19 nt, Human herpesvirus 4 (Epstein-Barr virus)
cacucaggaagcuggccag

SEQ ID NO: 1875000 - RNA, 23 nt, Human herpesvirus 4 (Epstein-Barr virus)
guugagcccgacgaacuccucca

SEQ ID NO: 1875001 - RNA, 20 nt, Human herpesvirus 4 (Epstein-Barr virus)
gccggcgcuguguggcugac

SEQ ID NO: 1875002 - RNA, 22 nt, Human herpesvirus 4 (Epstein-Barr virus)
aacgcccagggacauccccaga

SEQ ID NO: 1875003 - RNA, 22 nt, Human herpesvirus 4 (Epstein-Barr virus)
gcgccaucuagcgggagauguu

SEQ ID NO: 1875004 - RNA, 16 nt, Human herpesvirus 4 (Epstein-Barr virus)
gacggugaccugacug

SEQ ID NO: 1875005 - RNA, 23 nt, Human herpesvirus 4 (Epstein-Barr virus)
acaaacaccaguguccagagagg

SEQ ID NO: 1875006 - RNA, 17 nt, Human herpesvirus 4 (Epstein-Barr virus)
acaggcugcugaaaacc

SEQ ID NO: 1875007 - RNA, 14 nt, Human herpesvirus 4 (Epstein-Barr virus)
aggccucaggcaac

SEQ ID NO: 1875008 - RNA, 21 nt, Human herpesvirus 4 (Epstein-Barr virus)
ccgugcuuuuugccaggccug

SEQ ID NO: 1875009 - RNA, 15 nt, Human herpesvirus 4 (Epstein-Barr virus)
uccgccaccuccggg

SEQ ID NO: 1875010 - RNA, 17 nt, Human herpesvirus 4 (Epstein-Barr virus)
cuaggccugccacgugg

SEQ ID NO: 1875011 - RNA, 19 nt, Human herpesvirus 4 (Epstein-Barr virus)
agagagguugcgcugcuug

SEQ ID NO: 1875012 - RNA, 22 nt, Human herpesvirus 4 (Epstein-Barr virus)
uggcagaaucaccagagcccag

SEQ ID NO: 1875013 - RNA, 16 nt, Human herpesvirus 4 (Epstein-Barr virus)
augugcauggccuggg

SEQ ID NO: 1875014 - RNA, 11 nt, Human herpesvirus 4 (Epstein-Barr virus)
uccccucugcc

SEQ ID NO: 1875015 - RNA, 17 nt, Human herpesvirus 4 (Epstein-Barr virus)
ccuccaacaggugcccg

SEQ ID NO: 1875016 - RNA, 16 nt, Human herpesvirus 4 (Epstein-Barr virus)
uuaaggaaugaacacu

SEQ ID NO: 1875017 - RNA, 23 nt, Human herpesvirus 4 (Epstein-Barr virus)
acgcuuuugucugccuggauucu

SEQ ID NO: 1875018 - RNA, 19 nt, Human herpesvirus 4 (Epstein-Barr virus)
guccgccggguucucaggg

SEQ ID NO: 1875019 - RNA, 21 nt, Human herpesvirus 4 (Epstein-Barr virus)
gagcaccggagccaccacagc

SEQ ID NO: 1875020 - RNA, 16 nt, Human herpesvirus 4 (Epstein-Barr virus)
ggacgaggaggcggaa

SEQ ID NO: 1875021 - RNA, 15 nt, Human herpesvirus 4 (Epstein-Barr virus)
uuagccccagccccu

SEQ ID NO: 1875022 - RNA, 22 nt, Human herpesvirus 4 (Epstein-Barr virus)
gcagcugaguccccuccuugga

SEQ ID NO: 1875023 - RNA, 17 nt, Human herpesvirus 4 (Epstein-Barr virus)
ugcaacagaggauuggc

SEQ ID NO: 1875024 - RNA, 13 nt, Human herpesvirus 4 (Epstein-Barr virus)
aggacuaauguuc

SEQ ID NO: 1875025 - RNA, 15 nt, Human herpesvirus 4 (Epstein-Barr virus)
cagggcccagugcac

SEQ ID NO: 1875026 - RNA, 20 nt, Human herpesvirus 4 (Epstein-Barr virus)
acucggccacacagugggcu

SEQ ID NO: 1875027 - RNA, 16 nt, Human herpesvirus 4 (Epstein-Barr virus)
cggccacguccccggc

SEQ ID NO: 1875028 - RNA, 22 nt, Human herpesvirus 4 (Epstein-Barr virus)
ugggcugacacagacuuggccu

SEQ ID NO: 1875029 - RNA, 15 nt, Human herpesvirus 4 (Epstein-Barr virus)
uguggccccggcugg

SEQ ID NO: 1875030 - RNA, 22 nt, Human herpesvirus 4 (Epstein-Barr virus)
auccaucaacuucagcuccagg

SEQ ID NO: 1875031 - RNA, 14 nt, Human herpesvirus 4 (Epstein-Barr virus)
cuccugacgccaau

SEQ ID NO: 1875032 - RNA, 21 nt, Human herpesvirus 4 (Epstein-Barr virus)
gugccaaacugcgagggggcc

SEQ ID NO: 1875033 - RNA, 20 nt, Human herpesvirus 4 (Epstein-Barr virus)
aaaaaugugcagcuucucca

SEQ ID NO: 1875034 - RNA, 13 nt, Human herpesvirus 4 (Epstein-Barr virus)
gcauggccaggcc

SEQ ID NO: 1875035 - RNA, 16 nt, Human herpesvirus 4 (Epstein-Barr virus)
gggcucccucccccuc

SEQ ID NO: 1875036 - RNA, 15 nt, Human herpesvirus 4 (Epstein-Barr virus)
aagccugccucaucc

SEQ ID NO: 1875037 - RNA, 13 nt, Human herpesvirus 4 (Epstein-Barr virus)
guccaaggcccaa

SEQ ID NO: 1875038 - RNA, 21 nt, Human herpesvirus 4 (Epstein-Barr virus)
cccaccagaucgccugccacu

SEQ ID NO: 1875039 - RNA, 17 nt, Human herpesvirus 4 (Epstein-Barr virus)
cagagccucugccacaa

SEQ ID NO: 1875040 - RNA, 23 nt, Human herpesvirus 4 (Epstein-Barr virus)
caagcugcuuugauuccugggau

SEQ ID NO: 1875041 - RNA, 12 nt, Human herpesvirus 4 (Epstein-Barr virus)
agcaccaacaca

SEQ ID NO: 1875042 - RNA, 16 nt, Human herpesvirus 4 (Epstein-Barr virus)
aagcaaacggccuggc

SEQ ID NO: 1875043 - RNA, 17 nt, Human herpesvirus 4 (Epstein-Barr virus)
ggcccacgucuuuacca

SEQ ID NO: 1875044 - RNA, 13 nt, Human herpesvirus 4 (Epstein-Barr virus)
ggaacauuugagg

SEQ ID NO: 1875045 - RNA, 16 nt, Human herpesvirus 4 (Epstein-Barr virus)
ccucagcccccccugu

SEQ ID NO: 1875046 - RNA, 19 nt, Human herpesvirus 4 (Epstein-Barr virus)
uccuagcacaaaccagucu

SEQ ID NO: 1875047 - RNA, 17 nt, Human herpesvirus 4 (Epstein-Barr virus)
ugcucagaccccggguu

SEQ ID NO: 1875048 - RNA, 15 nt, Human herpesvirus 4 (Epstein-Barr virus)
acgaugaaggagggc

SEQ ID NO: 1875049 - RNA, 11 nt, Human herpesvirus 4 (Epstein-Barr virus)
gaugcccucau

SEQ ID NO: 1875050 - RNA, 22 nt, Human herpesvirus 4 (Epstein-Barr virus)
gcgggaguauggggccagaggc

SEQ ID NO: 1875051 - RNA, 13 nt, Human herpesvirus 4 (Epstein-Barr virus)
ccggacggccuag

SEQ ID NO: 1875052 - RNA, 14 nt, Human herpesvirus 4 (Epstein-Barr virus)
cucagagagcauuu

SEQ ID NO: 1875053 - RNA, 18 nt, Human herpesvirus 4 (Epstein-Barr virus)
ucagcacuuugccagcaa

SEQ ID NO: 1875054 - RNA, 14 nt, Human herpesvirus 4 (Epstein-Barr virus)
gugucuguaaucuc

SEQ ID NO: 1875055 - RNA, 18 nt, Human herpesvirus 4 (Epstein-Barr virus)
guccuugugucucuauca

SEQ ID NO: 1875056 - RNA, 20 nt, Human herpesvirus 4 (Epstein-Barr virus)
caggccaugcgcgcccuguc

SEQ ID NO: 1875057 - RNA, 13 nt, Human herpesvirus 4 (Epstein-Barr virus)
cugucucucuuug

SEQ ID NO: 1875058 - RNA, 16 nt, Human herpesvirus 4 (Epstein-Barr virus)
uaugcaaugcccaccc

SEQ ID NO: 1875059 - RNA, 14 nt, Human herpesvirus 4 (Epstein-Barr virus)
guccggucagguuu

SEQ ID NO: 1875060 - RNA, 16 nt, Human herpesvirus 4 (Epstein-Barr virus)
uagggagguggccaca

SEQ ID NO: 1875061 - RNA, 13 nt, Human herpesvirus 4 (Epstein-Barr virus)
agaggcucaggcc

SEQ ID NO: 1875062 - RNA, 14 nt, Human herpesvirus 4 (Epstein-Barr virus)
gcacgggcagagga

SEQ ID NO: 1875063 - RNA, 21 nt, Human herpesvirus 4 (Epstein-Barr virus)
cagcaaccaauguaucccaaa

SEQ ID NO: 1875064 - RNA, 18 nt, Human herpesvirus 4 (Epstein-Barr virus)
cgccgccccaggggucuc

SEQ ID NO: 1875065 - RNA, 19 nt, Human herpesvirus 4 (Epstein-Barr virus)
cgcaccuguguccugggca

SEQ ID NO: 1875066 - RNA, 15 nt, Human herpesvirus 4 (Epstein-Barr virus)
cauuaaagccuccuc

SEQ ID NO: 1875067 - RNA, 16 nt, Human herpesvirus 4 (Epstein-Barr virus)
cuuaacuugacuacaa

SEQ ID NO: 1875068 - RNA, 16 nt, Human herpesvirus 4 (Epstein-Barr virus)
aacguccaaguugcau

SEQ ID NO: 1875069 - RNA, 21 nt, Human herpesvirus 4 (Epstein-Barr virus)
ccagauguccagggguccccg

SEQ ID NO: 1875070 - RNA, 16 nt, Human herpesvirus 4 (Epstein-Barr virus)
ggagcaggagcaggag

SEQ ID NO: 1875071 - RNA, 17 nt, Human herpesvirus 4 (Epstein-Barr virus)
cucagguuucugggcau

SEQ ID NO: 1875072 - RNA, 20 nt, Human herpesvirus 4 (Epstein-Barr virus)
gcaugaucaggacccugggc

SEQ ID NO: 1875073 - RNA, 19 nt, Human herpesvirus 4 (Epstein-Barr virus)
aacucccccaaacaugucc

SEQ ID NO: 1875074 - RNA, 18 nt, Human herpesvirus 4 (Epstein-Barr virus)
ccugagccugagccacac

SEQ ID NO: 1875075 - RNA, 13 nt, Human herpesvirus 4 (Epstein-Barr virus)
uaaggcuguugac

SEQ ID NO: 1875076 - RNA, 18 nt, Human herpesvirus 4 (Epstein-Barr virus)
gcugaugugcugccccaa

SEQ ID NO: 1875077 - RNA, 18 nt, Human herpesvirus 4 (Epstein-Barr virus)
ggccgccacccucccccu

SEQ ID NO: 1875078 - RNA, 14 nt, Human herpesvirus 4 (Epstein-Barr virus)
cugagccugagcca

SEQ ID NO: 1875079 - RNA, 15 nt, Human herpesvirus 4 (Epstein-Barr virus)
gaaaaacuggccaug

SEQ ID NO: 1875080 - RNA, 12 nt, Human herpesvirus 4 (Epstein-Barr virus)
ugcuugugcucc

SEQ ID NO: 1875081 - RNA, 23 nt, Human herpesvirus 4 (Epstein-Barr virus)
ucucagacaccaacacagacugc

SEQ ID NO: 1875082 - RNA, 19 nt, Human herpesvirus 4 (Epstein-Barr virus)
ccgcaggggugguggaugu

SEQ ID NO: 1875083 - RNA, 16 nt, Human herpesvirus 4 (Epstein-Barr virus)
ucccucaccagggcug

SEQ ID NO: 1875084 - RNA, 16 nt, Human herpesvirus 4 (Epstein-Barr virus)
ugccaugcacggcccu

SEQ ID NO: 1875085 - RNA, 12 nt, Human herpesvirus 4 (Epstein-Barr virus)
gaggggcaggag

SEQ ID NO: 1875086 - RNA, 12 nt, Human herpesvirus 4 (Epstein-Barr virus)
gccauggccaau

SEQ ID NO: 1875087 - RNA, 15 nt, Human herpesvirus 4 (Epstein-Barr virus)
cacccucccccugcc

SEQ ID NO: 1875088 - RNA, 14 nt, Human herpesvirus 4 (Epstein-Barr virus)
gaggaggcggaaga

SEQ ID NO: 1875089 - RNA, 15 nt, Human herpesvirus 4 (Epstein-Barr virus)
cacaucuggaccugg

SEQ ID NO: 1875090 - RNA, 17 nt, Human herpesvirus 4 (Epstein-Barr virus)
aacaugagaaaauacuu

SEQ ID NO: 1875091 - RNA, 14 nt, Human herpesvirus 4 (Epstein-Barr virus)
ucgcugucgagcug

SEQ ID NO: 1875092 - RNA, 13 nt, Human herpesvirus 4 (Epstein-Barr virus)
uccagccaucaug

SEQ ID NO: 1875093 - RNA, 15 nt, Human herpesvirus 4 (Epstein-Barr virus)
aaacauacaggagga

SEQ ID NO: 1875094 - RNA, 22 nt, Human herpesvirus 4 (Epstein-Barr virus)
guuggcuucugcugcugcuugu

SEQ ID NO: 1875095 - RNA, 13 nt, Human herpesvirus 4 (Epstein-Barr virus)
ggugcucccccug

SEQ ID NO: 1875096 - RNA, 18 nt, Human herpesvirus 4 (Epstein-Barr virus)
guacaggaccaugucggc

SEQ ID NO: 1875097 - RNA, 15 nt, Human herpesvirus 4 (Epstein-Barr virus)
uauccaggaggagga

SEQ ID NO: 1875098 - RNA, 21 nt, Human herpesvirus 4 (Epstein-Barr virus)
ccugcuggccgagcuggaggc

SEQ ID NO: 1875099 - RNA, 18 nt, Human herpesvirus 4 (Epstein-Barr virus)
gcaggaggaggggcagga

SEQ ID NO: 1875100 - RNA, 21 nt, Human herpesvirus 4 (Epstein-Barr virus)
gagugcugcagguaaaccuuc

SEQ ID NO: 1875101 - RNA, 18 nt, Human herpesvirus 4 (Epstein-Barr virus)
ccaucggauaaacagggg

SEQ ID NO: 1875102 - RNA, 13 nt, Human herpesvirus 4 (Epstein-Barr virus)
ccagcaggcucag

SEQ ID NO: 1875103 - RNA, 17 nt, Human herpesvirus 4 (Epstein-Barr virus)
cuggcuucugugacuuu

SEQ ID NO: 1875104 - RNA, 17 nt, Human herpesvirus 4 (Epstein-Barr virus)
aacgccggccugcuggc

SEQ ID NO: 1875105 - RNA, 19 nt, Human herpesvirus 4 (Epstein-Barr virus)
cgaucccaggccucagcgu

SEQ ID NO: 1875106 - RNA, 10 nt, Human herpesvirus 4 (Epstein-Barr virus)
gagggggcca

SEQ ID NO: 1875107 - RNA, 22 nt, Human herpesvirus 4 (Epstein-Barr virus)
ccggaccaaugccaaagcugaa

SEQ ID NO: 1875108 - RNA, 18 nt, Human herpesvirus 4 (Epstein-Barr virus)
ggucgucaucuggcucuc

SEQ ID NO: 1875109 - RNA, 16 nt, Human herpesvirus 4 (Epstein-Barr virus)
cuacucuuggcagcag

SEQ ID NO: 1875110 - RNA, 22 nt, Human herpesvirus 4 (Epstein-Barr virus)
ggaacaugagaaaauacuucuc

SEQ ID NO: 1875111 - RNA, 23 nt, Human herpesvirus 4 (Epstein-Barr virus)
agaggcucaggccaugcgcgccc

SEQ ID NO: 1875112 - RNA, 16 nt, Human herpesvirus 4 (Epstein-Barr virus)
ucuccuuguugaccuc

SEQ ID NO: 1875113 - RNA, 24 nt, Human herpesvirus 4 (Epstein-Barr virus)
cagcuucugaggcggcuguggccu

SEQ ID NO: 1875114 - RNA, 17 nt, Human herpesvirus 4 (Epstein-Barr virus)
guagccgggguggaggg

SEQ ID NO: 1875115 - RNA, 18 nt, Human herpesvirus 4 (Epstein-Barr virus)
ugcacagacuagcgagga

SEQ ID NO: 1875116 - RNA, 21 nt, Human herpesvirus 4 (Epstein-Barr virus)
accauggaugugaaugccccc

SEQ ID NO: 1875117 - RNA, 20 nt, Human herpesvirus 4 (Epstein-Barr virus)
cgggcggcucaggaucaggg

SEQ ID NO: 1875118 - RNA, 15 nt, Human herpesvirus 4 (Epstein-Barr virus)
gaccacggcccacgu

SEQ ID NO: 1875119 - RNA, 19 nt, Human herpesvirus 4 (Epstein-Barr virus)
ugaccucuacacgcuugga

SEQ ID NO: 1875120 - RNA, 18 nt, Human herpesvirus 4 (Epstein-Barr virus)
auucucuaaucccucugg

SEQ ID NO: 1875121 - RNA, 19 nt, Human herpesvirus 4 (Epstein-Barr virus)
caccugucccugggggccu

SEQ ID NO: 1875122 - RNA, 23 nt, Human herpesvirus 4 (Epstein-Barr virus)
uacagcacaaccuuggacccugc

SEQ ID NO: 1875123 - RNA, 21 nt, Human herpesvirus 4 (Epstein-Barr virus)
gccuaaucaccguuccucauu

SEQ ID NO: 1875124 - RNA, 18 nt, Human herpesvirus 4 (Epstein-Barr virus)
aagucaggauucucuaau

SEQ ID NO: 1875125 - RNA, 19 nt, Human herpesvirus 4 (Epstein-Barr virus)
guccugaauccgcgcagcc

SEQ ID NO: 1875126 - RNA, 19 nt, Human herpesvirus 4 (Epstein-Barr virus)
gggcuccauguccuguggu

SEQ ID NO: 1875127 - RNA, 15 nt, Human herpesvirus 4 (Epstein-Barr virus)
agaggaggaggauga

SEQ ID NO: 1875128 - RNA, 15 nt, Human herpesvirus 4 (Epstein-Barr virus)
guccucauggcagga

SEQ ID NO: 1875129 - RNA, 16 nt, Human herpesvirus 4 (Epstein-Barr virus)
cucgcuggcucgccuc

SEQ ID NO: 1875130 - RNA, 15 nt, Human herpesvirus 4 (Epstein-Barr virus)
ccuugagggcaaaga

SEQ ID NO: 1875131 - RNA, 18 nt, Human herpesvirus 4 (Epstein-Barr virus)
acuuuguuuagggacaga

SEQ ID NO: 1875132 - RNA, 20 nt, Human herpesvirus 4 (Epstein-Barr virus)
ugggggcuacaggaggccac

SEQ ID NO: 1875133 - RNA, 21 nt, Human herpesvirus 4 (Epstein-Barr virus)
cccgcuguaugaggaaggggc

SEQ ID NO: 1875134 - RNA, 19 nt, Human herpesvirus 4 (Epstein-Barr virus)
cagaccucugcacaacaca

SEQ ID NO: 1875135 - RNA, 21 nt, Human herpesvirus 4 (Epstein-Barr virus)
ggcggccucggaggugcccgg

SEQ ID NO: 1875136 - RNA, 15 nt, Human herpesvirus 4 (Epstein-Barr virus)
gugggcugacacaga

SEQ ID NO: 1875137 - RNA, 16 nt, Human herpesvirus 4 (Epstein-Barr virus)
agacugcacaggauga

SEQ ID NO: 1875138 - RNA, 19 nt, Human herpesvirus 4 (Epstein-Barr virus)
ccugggagggggcgagcag

SEQ ID NO: 1875139 - RNA, 17 nt, Human herpesvirus 4 (Epstein-Barr virus)
acagauugucuuccaca

SEQ ID NO: 1875140 - RNA, 14 nt, Human herpesvirus 4 (Epstein-Barr virus)
aacaauuacagaua

SEQ ID NO: 1875141 - RNA, 18 nt, Human herpesvirus 4 (Epstein-Barr virus)
gcaacagacugcggggag

SEQ ID NO: 1875142 - RNA, 18 nt, Human herpesvirus 4 (Epstein-Barr virus)
cucgcucagagcugggaa

SEQ ID NO: 1875143 - RNA, 21 nt, Human herpesvirus 4 (Epstein-Barr virus)
cucaggcacggucgccccucc

SEQ ID NO: 1875144 - RNA, 19 nt, Human herpesvirus 4 (Epstein-Barr virus)
cagcacagccagagaggcc

SEQ ID NO: 1875145 - RNA, 20 nt, Human herpesvirus 4 (Epstein-Barr virus)
cucucuggcugugcugaccc

SEQ ID NO: 1875146 - RNA, 15 nt, Human herpesvirus 4 (Epstein-Barr virus)
aagcaccacccagcc

SEQ ID NO: 1875147 - RNA, 17 nt, Human herpesvirus 4 (Epstein-Barr virus)
cuggccggccgcccccu

SEQ ID NO: 1875148 - RNA, 17 nt, Human herpesvirus 4 (Epstein-Barr virus)
gagacaaggcaggcgcu

SEQ ID NO: 1875149 - RNA, 16 nt, Human herpesvirus 4 (Epstein-Barr virus)
ccaaacuuuguccaga

SEQ ID NO: 1875150 - RNA, 19 nt, Human herpesvirus 4 (Epstein-Barr virus)
ggaucagucgcuggcuggu

SEQ ID NO: 1875151 - RNA, 21 nt, Human herpesvirus 4 (Epstein-Barr virus)
gaaaccuugccuacgggcgca

SEQ ID NO: 1875152 - RNA, 18 nt, Human herpesvirus 4 (Epstein-Barr virus)
ugaccaugauggugcaga

SEQ ID NO: 1875153 - RNA, 22 nt, Human herpesvirus 4 (Epstein-Barr virus)
uggccugggaggugcugaggcc

SEQ ID NO: 1875154 - RNA, 16 nt, Human herpesvirus 4 (Epstein-Barr virus)
ccuccucugggccgcc

SEQ ID NO: 1875155 - RNA, 13 nt, Human herpesvirus 4 (Epstein-Barr virus)
uacgcgggccaca

SEQ ID NO: 1875156 - RNA, 19 nt, Human herpesvirus 4 (Epstein-Barr virus)
uaccgccacgcgucagcaa

SEQ ID NO: 1875157 - RNA, 21 nt, Human herpesvirus 4 (Epstein-Barr virus)
gccccggucaccccagaugcc

SEQ ID NO: 1875158 - RNA, 13 nt, Human herpesvirus 4 (Epstein-Barr virus)
cguuggcccauaa

SEQ ID NO: 1875159 - RNA, 18 nt, Human herpesvirus 4 (Epstein-Barr virus)
agagauuucauccucaga

SEQ ID NO: 1875160 - RNA, 14 nt, Human herpesvirus 4 (Epstein-Barr virus)
acccaccacacagc

SEQ ID NO: 1875161 - RNA, 21 nt, Human herpesvirus 4 (Epstein-Barr virus)
gccuucuccucagccuccaac

SEQ ID NO: 1875162 - RNA, 16 nt, Human herpesvirus 4 (Epstein-Barr virus)
agaccaauacccagga

SEQ ID NO: 1875163 - RNA, 20 nt, Human herpesvirus 4 (Epstein-Barr virus)
gcagcucaccuauggucacu

SEQ ID NO: 1875164 - RNA, 13 nt, Human herpesvirus 4 (Epstein-Barr virus)
uguuauucccacc

SEQ ID NO: 1875165 - RNA, 18 nt, Human herpesvirus 4 (Epstein-Barr virus)
acagcagcguccuggccc

SEQ ID NO: 1875166 - RNA, 22 nt, Human herpesvirus 4 (Epstein-Barr virus)
ggaguaaggccgcugccaggcc

SEQ ID NO: 1875167 - RNA, 14 nt, Human herpesvirus 4 (Epstein-Barr virus)
cccuggcugacgga

SEQ ID NO: 1875168 - RNA, 14 nt, Human herpesvirus 4 (Epstein-Barr virus)
aggaagcuggccag

SEQ ID NO: 1875169 - RNA, 14 nt, Human herpesvirus 4 (Epstein-Barr virus)
cugcuacuggcuuu

SEQ ID NO: 1875170 - RNA, 21 nt, Human herpesvirus 4 (Epstein-Barr virus)
guugcauuggcugcaaaggga

SEQ ID NO: 1875171 - RNA, 18 nt, Human herpesvirus 4 (Epstein-Barr virus)
gguagccuugggggccug

SEQ ID NO: 1875172 - RNA, 19 nt, Human herpesvirus 4 (Epstein-Barr virus)
cgauuggaaaagggcccag

SEQ ID NO: 1875173 - RNA, 18 nt, Human herpesvirus 4 (Epstein-Barr virus)
caggggcgccgaaagcag

SEQ ID NO: 1875174 - RNA, 19 nt, Human herpesvirus 4 (Epstein-Barr virus)
cagcuggugguccgcaugu

SEQ ID NO: 1875175 - RNA, 12 nt, Human herpesvirus 4 (Epstein-Barr virus)
gggacugccugg

SEQ ID NO: 1875176 - RNA, 14 nt, Human herpesvirus 4 (Epstein-Barr virus)
caucugcccggcua

SEQ ID NO: 1875177 - RNA, 17 nt, Human herpesvirus 4 (Epstein-Barr virus)
uucccgacggcaugccu

SEQ ID NO: 1875178 - RNA, 17 nt, Human herpesvirus 4 (Epstein-Barr virus)
aggcccaggaccuuggc

SEQ ID NO: 1875179 - RNA, 19 nt, Human herpesvirus 4 (Epstein-Barr virus)
cacaaccacggugacauuc

SEQ ID NO: 1875180 - RNA, 17 nt, Human herpesvirus 4 (Epstein-Barr virus)
acgccugcuucacgccu

SEQ ID NO: 1875181 - RNA, 22 nt, Human herpesvirus 4 (Epstein-Barr virus)
gccuguuuguccagcagggccu

SEQ ID NO: 1875182 - RNA, 18 nt, Human herpesvirus 4 (Epstein-Barr virus)
gcccagcuccgugguccu

SEQ ID NO: 1875183 - RNA, 12 nt, Human herpesvirus 4 (Epstein-Barr virus)
cuggcuccccau

SEQ ID NO: 1875184 - RNA, 12 nt, Human herpesvirus 4 (Epstein-Barr virus)
ucagcuccuugu

SEQ ID NO: 1875185 - RNA, 23 nt, Human herpesvirus 4 (Epstein-Barr virus)
gcgagcuccgugggcccagagug

SEQ ID NO: 1875186 - RNA, 18 nt, Human herpesvirus 4 (Epstein-Barr virus)
cuggcggccgcugcgccc

SEQ ID NO: 1875187 - RNA, 16 nt, Human herpesvirus 4 (Epstein-Barr virus)
cccaacagucuucagg

SEQ ID NO: 1875188 - RNA, 12 nt, Human herpesvirus 4 (Epstein-Barr virus)
ugaaggagggcu

SEQ ID NO: 1875189 - RNA, 14 nt, Human herpesvirus 4 (Epstein-Barr virus)
gcagaaaggcuggc

SEQ ID NO: 1875190 - RNA, 16 nt, Human herpesvirus 4 (Epstein-Barr virus)
cuccgcaguccggaga

SEQ ID NO: 1875191 - RNA, 21 nt, Human herpesvirus 4 (Epstein-Barr virus)
agcgcccugucccuggagcug

SEQ ID NO: 1875192 - RNA, 18 nt, Human herpesvirus 4 (Epstein-Barr virus)
cagggcuucguccagggg

SEQ ID NO: 1875193 - RNA, 18 nt, Human herpesvirus 4 (Epstein-Barr virus)
ggacccacgguggaacag

SEQ ID NO: 1875194 - RNA, 19 nt, Human herpesvirus 4 (Epstein-Barr virus)
cugccaacuuugagcuggg

SEQ ID NO: 1875195 - RNA, 17 nt, Human herpesvirus 4 (Epstein-Barr virus)
gcaggagcgggaggggc

SEQ ID NO: 1875196 - RNA, 17 nt, Human herpesvirus 4 (Epstein-Barr virus)
acgguggaacaggagca

SEQ ID NO: 1875197 - RNA, 21 nt, Human herpesvirus 4 (Epstein-Barr virus)
uccaccuagaaagagccaugg

SEQ ID NO: 1875198 - RNA, 21 nt, Human herpesvirus 4 (Epstein-Barr virus)
caagcagcaccugucccuggg

SEQ ID NO: 1875199 - RNA, 20 nt, Human herpesvirus 4 (Epstein-Barr virus)
ugggaauggagaggggagug

SEQ ID NO: 1875200 - RNA, 16 nt, Human herpesvirus 4 (Epstein-Barr virus)
cggggguucuccaggc

SEQ ID NO: 1875201 - RNA, 14 nt, Human herpesvirus 4 (Epstein-Barr virus)
acccaucugagggc

SEQ ID NO: 1875202 - RNA, 21 nt, Human herpesvirus 4 (Epstein-Barr virus)
ucugagagauugguaccagaa

SEQ ID NO: 1875203 - RNA, 15 nt, Human herpesvirus 4 (Epstein-Barr virus)
caggccuuagcccag

SEQ ID NO: 1875204 - RNA, 21 nt, Human herpesvirus 4 (Epstein-Barr virus)
gacgcagaaugugcagggauu

SEQ ID NO: 1875205 - RNA, 17 nt, Human herpesvirus 4 (Epstein-Barr virus)
gagcacauuccccccgc

SEQ ID NO: 1875206 - RNA, 19 nt, Human herpesvirus 4 (Epstein-Barr virus)
agaacccccugcaggacac

SEQ ID NO: 1875207 - RNA, 21 nt, Human herpesvirus 4 (Epstein-Barr virus)
gggaucuuuacguggguggau

SEQ ID NO: 1875208 - RNA, 18 nt, Human herpesvirus 4 (Epstein-Barr virus)
gggccuagguacucuugg

SEQ ID NO: 1875209 - RNA, 12 nt, Human herpesvirus 4 (Epstein-Barr virus)
cggcccucuucc

SEQ ID NO: 1875210 - RNA, 15 nt, Human herpesvirus 4 (Epstein-Barr virus)
acugcgggugucuca

SEQ ID NO: 1875211 - RNA, 21 nt, Human herpesvirus 4 (Epstein-Barr virus)
cccuugagaagcagcucuucu

SEQ ID NO: 1875212 - RNA, 18 nt, Human herpesvirus 4 (Epstein-Barr virus)
cagcgcggcagaggccuc

SEQ ID NO: 1875213 - RNA, 16 nt, Human herpesvirus 4 (Epstein-Barr virus)
cgguuagugugccucu

SEQ ID NO: 1875214 - RNA, 23 nt, Human herpesvirus 4 (Epstein-Barr virus)
acauucguacaucuccaggcgac

SEQ ID NO: 1875215 - RNA, 12 nt, Human herpesvirus 4 (Epstein-Barr virus)
cccacccccacc

SEQ ID NO: 1875216 - RNA, 15 nt, Human herpesvirus 4 (Epstein-Barr virus)
ccccgcaccagggcc

SEQ ID NO: 1875217 - RNA, 14 nt, Human herpesvirus 4 (Epstein-Barr virus)
cuguguccugggca

SEQ ID NO: 1875218 - RNA, 14 nt, Human herpesvirus 4 (Epstein-Barr virus)
cccucuccagcaac

SEQ ID NO: 1875219 - RNA, 23 nt, Human herpesvirus 4 (Epstein-Barr virus)
cucuacaauugccaaguacugaa

SEQ ID NO: 1875220 - RNA, 15 nt, Human herpesvirus 4 (Epstein-Barr virus)
cgucagccaggguga

SEQ ID NO: 1875221 - RNA, 13 nt, Human herpesvirus 4 (Epstein-Barr virus)
gccaggcucggca

SEQ ID NO: 1875222 - RNA, 22 nt, Human herpesvirus 4 (Epstein-Barr virus)
gaucgauuggaaaagggcccag

SEQ ID NO: 1875223 - RNA, 15 nt, Human herpesvirus 4 (Epstein-Barr virus)
uggguccccucugcc

SEQ ID NO: 1875224 - RNA, 20 nt, Human herpesvirus 4 (Epstein-Barr virus)
uaaugauucaucagaagcua

SEQ ID NO: 1875225 - RNA, 20 nt, Human herpesvirus 4 (Epstein-Barr virus)
cucuggcacgccguggcccu

SEQ ID NO: 1875226 - RNA, 16 nt, Human herpesvirus 4 (Epstein-Barr virus)
gcucgaauaugaugag

SEQ ID NO: 1875227 - RNA, 22 nt, Human herpesvirus 4 (Epstein-Barr virus)
cugcgugagaugaacaccccca

SEQ ID NO: 1875228 - RNA, 16 nt, Human herpesvirus 4 (Epstein-Barr virus)
cuugaccaguguguac

SEQ ID NO: 1875229 - RNA, 16 nt, Human herpesvirus 4 (Epstein-Barr virus)
cggcuuggcccucuca

SEQ ID NO: 1875230 - RNA, 18 nt, Human herpesvirus 4 (Epstein-Barr virus)
uagaaauuuugcauauuu

SEQ ID NO: 1875231 - RNA, 14 nt, Human herpesvirus 4 (Epstein-Barr virus)
acuauaccaaagcu

SEQ ID NO: 1875232 - RNA, 17 nt, Human herpesvirus 4 (Epstein-Barr virus)
aagaucgugaggccuga

SEQ ID NO: 1875233 - RNA, 17 nt, Human herpesvirus 4 (Epstein-Barr virus)
caucccggcccucuucc

SEQ ID NO: 1875234 - RNA, 14 nt, Human herpesvirus 4 (Epstein-Barr virus)
acuccucuuacacc

SEQ ID NO: 1875235 - RNA, 19 nt, Human herpesvirus 4 (Epstein-Barr virus)
ugagccugagccacaccca

SEQ ID NO: 1875236 - RNA, 12 nt, Human herpesvirus 4 (Epstein-Barr virus)
aacccccucccc

SEQ ID NO: 1875237 - RNA, 14 nt, Human herpesvirus 4 (Epstein-Barr virus)
agagcucuggagga

SEQ ID NO: 1875238 - RNA, 21 nt, Human herpesvirus 4 (Epstein-Barr virus)
gucgaugggcagcuauauuca

SEQ ID NO: 1875239 - RNA, 16 nt, Human herpesvirus 4 (Epstein-Barr virus)
caggagacacacgugg

SEQ ID NO: 1875240 - RNA, 13 nt, Human herpesvirus 4 (Epstein-Barr virus)
aaacgcugcuugg

SEQ ID NO: 1875241 - RNA, 19 nt, Human herpesvirus 4 (Epstein-Barr virus)
guggccuuccucugccugg

SEQ ID NO: 1875242 - RNA, 12 nt, Human herpesvirus 4 (Epstein-Barr virus)
gaccacugaggg

SEQ ID NO: 1875243 - RNA, 14 nt, Human herpesvirus 4 (Epstein-Barr virus)
gcugaacuggggcu

SEQ ID NO: 1875244 - RNA, 14 nt, Human herpesvirus 4 (Epstein-Barr virus)
accaagcuaccaga

SEQ ID NO: 1875245 - RNA, 18 nt, Human herpesvirus 4 (Epstein-Barr virus)
ccgccaacgcucagugcg

SEQ ID NO: 1875246 - RNA, 18 nt, Human herpesvirus 4 (Epstein-Barr virus)
cggggguggaggcugcgc

SEQ ID NO: 1875247 - RNA, 21 nt, Human herpesvirus 4 (Epstein-Barr virus)
cucacuucuacucuuggcagc

SEQ ID NO: 1875248 - RNA, 13 nt, Human herpesvirus 4 (Epstein-Barr virus)
cagaagcccccaa

SEQ ID NO: 1875249 - RNA, 20 nt, Human herpesvirus 4 (Epstein-Barr virus)
cugaacaucucauccccaga

SEQ ID NO: 1875250 - RNA, 22 nt, Human herpesvirus 4 (Epstein-Barr virus)
ugcccaccagagggugagccca

SEQ ID NO: 1875251 - RNA, 19 nt, Human herpesvirus 4 (Epstein-Barr virus)
gcccgacccccgggcgccc

SEQ ID NO: 1875252 - RNA, 23 nt, Human herpesvirus 4 (Epstein-Barr virus)
gccccgcccuccccauccccagc

SEQ ID NO: 1875253 - RNA, 17 nt, Human herpesvirus 4 (Epstein-Barr virus)
ucagauagccggaccuc

SEQ ID NO: 1875254 - RNA, 16 nt, Human herpesvirus 4 (Epstein-Barr virus)
gcuugcgucugccccc

SEQ ID NO: 1875255 - RNA, 17 nt, Human herpesvirus 4 (Epstein-Barr virus)
ccuggccgggcgccugc

SEQ ID NO: 1875256 - RNA, 23 nt, Human herpesvirus 4 (Epstein-Barr virus)
gcaggacggggggcuggcgaaga

SEQ ID NO: 1875257 - RNA, 18 nt, Human herpesvirus 4 (Epstein-Barr virus)
ccucauucccccaugaga

SEQ ID NO: 1875258 - RNA, 23 nt, Human herpesvirus 4 (Epstein-Barr virus)
uacugcagugggccucucuggcu

SEQ ID NO: 1875259 - RNA, 16 nt, Human herpesvirus 4 (Epstein-Barr virus)
ugccccucagccugcu

SEQ ID NO: 1875260 - RNA, 17 nt, Human herpesvirus 4 (Epstein-Barr virus)
uaggcacaucuggaccu

SEQ ID NO: 1875261 - RNA, 17 nt, Human herpesvirus 4 (Epstein-Barr virus)
gcagcuggacgcgcagu

SEQ ID NO: 1875262 - RNA, 21 nt, Human herpesvirus 4 (Epstein-Barr virus)
uggacacuuauguuucaagca

SEQ ID NO: 1875263 - RNA, 16 nt, Human herpesvirus 4 (Epstein-Barr virus)
ugggaggcgaauguag

SEQ ID NO: 1875264 - RNA, 14 nt, Human herpesvirus 4 (Epstein-Barr virus)
aggugcugaggccc

SEQ ID NO: 1875265 - RNA, 22 nt, Human herpesvirus 4 (Epstein-Barr virus)
agcaggaggaggggcaggagca

SEQ ID NO: 1875266 - RNA, 17 nt, Human herpesvirus 4 (Epstein-Barr virus)
gucuucccagacucugc

SEQ ID NO: 1875267 - RNA, 16 nt, Human herpesvirus 4 (Epstein-Barr virus)
caggagcaggagcagg

SEQ ID NO: 1875268 - RNA, 16 nt, Human herpesvirus 4 (Epstein-Barr virus)
gccuccucgcaggccc

SEQ ID NO: 1875269 - RNA, 16 nt, Human herpesvirus 4 (Epstein-Barr virus)
gagaaaaugagccaug

SEQ ID NO: 1875270 - RNA, 15 nt, Human herpesvirus 4 (Epstein-Barr virus)
cgggcacugcgucca

SEQ ID NO: 1875271 - RNA, 22 nt, Human herpesvirus 4 (Epstein-Barr virus)
cuauuagcagccuccgggccgc

SEQ ID NO: 1875272 - RNA, 16 nt, Human herpesvirus 4 (Epstein-Barr virus)
ccaggccuuagcccag

SEQ ID NO: 1875273 - RNA, 15 nt, Human herpesvirus 4 (Epstein-Barr virus)
aaggccacaaagagg

SEQ ID NO: 1875274 - RNA, 21 nt, Human herpesvirus 4 (Epstein-Barr virus)
cugagcauggcggccuggcag

SEQ ID NO: 1875275 - RNA, 17 nt, Human herpesvirus 4 (Epstein-Barr virus)
cccuaagcagcugaggg

SEQ ID NO: 1875276 - RNA, 23 nt, Human herpesvirus 4 (Epstein-Barr virus)
uacuggcuuucguccucuggcuc

SEQ ID NO: 1875277 - RNA, 19 nt, Human herpesvirus 4 (Epstein-Barr virus)
uccccucugcagagagcca

SEQ ID NO: 1875278 - RNA, 18 nt, Human herpesvirus 4 (Epstein-Barr virus)
cgucacucggacuaucaa

SEQ ID NO: 1875279 - RNA, 16 nt, Human herpesvirus 4 (Epstein-Barr virus)
cggccgaggccugcga

SEQ ID NO: 1875280 - RNA, 15 nt, Human herpesvirus 4 (Epstein-Barr virus)
ugacccacuccagug

SEQ ID NO: 1875281 - RNA, 17 nt, Human herpesvirus 4 (Epstein-Barr virus)
ggcaccauagcauguca

SEQ ID NO: 1875282 - RNA, 18 nt, Human herpesvirus 4 (Epstein-Barr virus)
cgggcaucuuaucagaga

SEQ ID NO: 1875283 - RNA, 17 nt, Human herpesvirus 4 (Epstein-Barr virus)
ugaccacggcccacguc

SEQ ID NO: 1875284 - RNA, 14 nt, Human herpesvirus 4 (Epstein-Barr virus)
ccaccaccuccacc

SEQ ID NO: 1875285 - RNA, 15 nt, Human herpesvirus 4 (Epstein-Barr virus)
agagccucugccaca

SEQ ID NO: 1875286 - RNA, 19 nt, Human herpesvirus 4 (Epstein-Barr virus)
gcccagccguucacucggc

SEQ ID NO: 1875287 - RNA, 15 nt, Human herpesvirus 4 (Epstein-Barr virus)
ccaccauaugaugac

SEQ ID NO: 1875288 - RNA, 14 nt, Human herpesvirus 4 (Epstein-Barr virus)
caacugcgggcucc

SEQ ID NO: 1875289 - RNA, 17 nt, Human herpesvirus 4 (Epstein-Barr virus)
cugccagagccucugcc

SEQ ID NO: 1875290 - RNA, 15 nt, Human herpesvirus 4 (Epstein-Barr virus)
cuggaucuggggcug

SEQ ID NO: 1875291 - RNA, 14 nt, Human herpesvirus 4 (Epstein-Barr virus)
cuggagcuggugca

SEQ ID NO: 1875292 - RNA, 17 nt, Human herpesvirus 4 (Epstein-Barr virus)
ugcagggugcacagacu

SEQ ID NO: 1875293 - RNA, 19 nt, Human herpesvirus 4 (Epstein-Barr virus)
aggcccgggggccuugucc

SEQ ID NO: 1875294 - RNA, 14 nt, Human herpesvirus 4 (Epstein-Barr virus)
ccggcaccgccagg

SEQ ID NO: 1875295 - RNA, 12 nt, Human herpesvirus 4 (Epstein-Barr virus)
ggaguuucgcuu

SEQ ID NO: 1875296 - RNA, 11 nt, Human herpesvirus 4 (Epstein-Barr virus)
ggccuggugcc

SEQ ID NO: 1875297 - RNA, 13 nt, Human herpesvirus 4 (Epstein-Barr virus)
aagacuccugccu

SEQ ID NO: 1875298 - RNA, 14 nt, Human herpesvirus 4 (Epstein-Barr virus)
ggcagacacccacg

SEQ ID NO: 1875299 - RNA, 14 nt, Human herpesvirus 4 (Epstein-Barr virus)
ugaugguggccggc

SEQ ID NO: 1875300 - RNA, 19 nt, Human herpesvirus 4 (Epstein-Barr virus)
gcacuuuauuaauaaacaa

SEQ ID NO: 1875301 - RNA, 14 nt, Human herpesvirus 4 (Epstein-Barr virus)
ccgcagcuggcgga

SEQ ID NO: 1875302 - RNA, 14 nt, Human herpesvirus 4 (Epstein-Barr virus)
auggcauaauuucc

SEQ ID NO: 1875303 - RNA, 23 nt, Human herpesvirus 4 (Epstein-Barr virus)
cacaggcuuggaaacacccauuc

SEQ ID NO: 1875304 - RNA, 18 nt, Human herpesvirus 4 (Epstein-Barr virus)
cccacggaagcccucugg

SEQ ID NO: 1875305 - RNA, 22 nt, Human herpesvirus 4 (Epstein-Barr virus)
ccaggagccccgggcggcucag

SEQ ID NO: 1875306 - RNA, 19 nt, Human herpesvirus 4 (Epstein-Barr virus)
gcucaugcacaccuuggcg

SEQ ID NO: 1875307 - RNA, 13 nt, Human herpesvirus 4 (Epstein-Barr virus)
cucagagcuggga

SEQ ID NO: 1875308 - RNA, 21 nt, Human herpesvirus 4 (Epstein-Barr virus)
gacaaggcaguagaggacacc

SEQ ID NO: 1875309 - RNA, 16 nt, Human herpesvirus 4 (Epstein-Barr virus)
gcgacauuuaccuggu

SEQ ID NO: 1875310 - RNA, 18 nt, Human herpesvirus 4 (Epstein-Barr virus)
accggcaccgccaggugg

SEQ ID NO: 1875311 - RNA, 14 nt, Human herpesvirus 4 (Epstein-Barr virus)
gcagucgcugcugc

SEQ ID NO: 1875312 - RNA, 15 nt, Human herpesvirus 4 (Epstein-Barr virus)
uguuccacagccugc

SEQ ID NO: 1875313 - RNA, 16 nt, Human herpesvirus 4 (Epstein-Barr virus)
cuugguauugcgcugg

SEQ ID NO: 1875314 - RNA, 15 nt, Human herpesvirus 4 (Epstein-Barr virus)
cgaaggugcagcugg

SEQ ID NO: 1875315 - RNA, 17 nt, Human herpesvirus 4 (Epstein-Barr virus)
aaggcuccggccccacg

SEQ ID NO: 1875316 - RNA, 16 nt, Human herpesvirus 4 (Epstein-Barr virus)
guacaggaccuggaaa

SEQ ID NO: 1875317 - RNA, 12 nt, Human herpesvirus 4 (Epstein-Barr virus)
ugcagacuccag

SEQ ID NO: 1875318 - RNA, 21 nt, Human herpesvirus 4 (Epstein-Barr virus)
aacuggggcugguggccuggg

SEQ ID NO: 1875319 - RNA, 12 nt, Human herpesvirus 4 (Epstein-Barr virus)
cuggcacacacu

SEQ ID NO: 1875320 - RNA, 16 nt, Human herpesvirus 4 (Epstein-Barr virus)
cccacggaccccccuc

SEQ ID NO: 1875321 - RNA, 18 nt, Human herpesvirus 4 (Epstein-Barr virus)
cccugugcagggacgagg

SEQ ID NO: 1875322 - RNA, 23 nt, Human herpesvirus 4 (Epstein-Barr virus)
aggcuccuggaucuggggcuggc

SEQ ID NO: 1875323 - RNA, 21 nt, Human herpesvirus 4 (Epstein-Barr virus)
cccuagccaccguggccaggc

SEQ ID NO: 1875324 - RNA, 16 nt, Human herpesvirus 4 (Epstein-Barr virus)
gcuauagugagccagg

SEQ ID NO: 1875325 - RNA, 14 nt, Human herpesvirus 4 (Epstein-Barr virus)
auagccggccaggc

SEQ ID NO: 1875326 - RNA, 18 nt, Human herpesvirus 4 (Epstein-Barr virus)
ccugccucucuuaugccu

SEQ ID NO: 1875327 - RNA, 17 nt, Human herpesvirus 4 (Epstein-Barr virus)
ugucccuuucagugguc

SEQ ID NO: 1875328 - RNA, 19 nt, Human herpesvirus 4 (Epstein-Barr virus)
gcacacuuaacuugacuac

SEQ ID NO: 1875329 - RNA, 22 nt, Human herpesvirus 4 (Epstein-Barr virus)
agaggucccauguacagcacaa

SEQ ID NO: 1875330 - RNA, 15 nt, Human herpesvirus 4 (Epstein-Barr virus)
ggugcuguccugcug

SEQ ID NO: 1875331 - RNA, 16 nt, Human herpesvirus 4 (Epstein-Barr virus)
agccccuccauaggcc

SEQ ID NO: 1875332 - RNA, 17 nt, Human herpesvirus 4 (Epstein-Barr virus)
gccccgggcccagcccu

SEQ ID NO: 1875333 - RNA, 13 nt, Human herpesvirus 4 (Epstein-Barr virus)
cugacggugaugu

SEQ ID NO: 1875334 - RNA, 14 nt, Human herpesvirus 4 (Epstein-Barr virus)
cugacgaggggcca

SEQ ID NO: 1875335 - RNA, 17 nt, Human herpesvirus 4 (Epstein-Barr virus)
cacuguugcgcccggcc

SEQ ID NO: 1875336 - RNA, 13 nt, Human herpesvirus 4 (Epstein-Barr virus)
ccccugugcuucu

SEQ ID NO: 1875337 - RNA, 21 nt, Human herpesvirus 4 (Epstein-Barr virus)
ccucgugcaaccaggcccacu

SEQ ID NO: 1875338 - RNA, 14 nt, Human herpesvirus 4 (Epstein-Barr virus)
gccguggcgccugg

SEQ ID NO: 1875339 - RNA, 20 nt, Human herpesvirus 4 (Epstein-Barr virus)
acagccagguguacgcccug

SEQ ID NO: 1875340 - RNA, 17 nt, Human herpesvirus 4 (Epstein-Barr virus)
cugucucggccuccugg

SEQ ID NO: 1875341 - RNA, 13 nt, Human herpesvirus 4 (Epstein-Barr virus)
cugggguccagga

SEQ ID NO: 1875342 - RNA, 18 nt, Human herpesvirus 4 (Epstein-Barr virus)
gacacuuuagagcucugg

SEQ ID NO: 1875343 - RNA, 19 nt, Human herpesvirus 4 (Epstein-Barr virus)
ggcccucagaauuucugcu

SEQ ID NO: 1875344 - RNA, 20 nt, Human herpesvirus 4 (Epstein-Barr virus)
ccuuugggcaccccacgggg

SEQ ID NO: 1875345 - RNA, 14 nt, Human herpesvirus 4 (Epstein-Barr virus)
acaugucucagagg

SEQ ID NO: 1875346 - RNA, 18 nt, Human herpesvirus 4 (Epstein-Barr virus)
cgcggacuccgugaccaa

SEQ ID NO: 1875347 - RNA, 15 nt, Human herpesvirus 4 (Epstein-Barr virus)
gcaccugucccuggg

SEQ ID NO: 1875348 - RNA, 22 nt, Human herpesvirus 4 (Epstein-Barr virus)
ucaccugcacagaucugaccac

SEQ ID NO: 1875349 - RNA, 15 nt, Human herpesvirus 4 (Epstein-Barr virus)
gcggcacuguggggg

SEQ ID NO: 1875350 - RNA, 16 nt, Human herpesvirus 4 (Epstein-Barr virus)
uugaggcaauggccac

SEQ ID NO: 1875351 - RNA, 17 nt, Human herpesvirus 4 (Epstein-Barr virus)
cgggcaaacagggcaga

SEQ ID NO: 1875352 - RNA, 19 nt, Human herpesvirus 4 (Epstein-Barr virus)
agcgggaggggcaggagca

SEQ ID NO: 1875353 - RNA, 12 nt, Human herpesvirus 4 (Epstein-Barr virus)
cgccagccaccc

SEQ ID NO: 1875354 - RNA, 14 nt, Human herpesvirus 4 (Epstein-Barr virus)
gagcggcaagggcu

SEQ ID NO: 1875355 - RNA, 18 nt, Human herpesvirus 4 (Epstein-Barr virus)
gagacacaucuggaccag

SEQ ID NO: 1875356 - RNA, 23 nt, Human herpesvirus 4 (Epstein-Barr virus)
uggagagauuucauccucagagg

SEQ ID NO: 1875357 - RNA, 18 nt, Human herpesvirus 4 (Epstein-Barr virus)
aggcucugcaugaggucc

SEQ ID NO: 1875358 - RNA, 17 nt, Human herpesvirus 4 (Epstein-Barr virus)
cgagaagacguuguagg

SEQ ID NO: 1875359 - RNA, 17 nt, Human herpesvirus 4 (Epstein-Barr virus)
gcagcugaguccccucc

SEQ ID NO: 1875360 - RNA, 17 nt, Human herpesvirus 4 (Epstein-Barr virus)
gcuuucguccucuggcu

SEQ ID NO: 1875361 - RNA, 20 nt, Human herpesvirus 4 (Epstein-Barr virus)
gguggcauugcggguggaua

SEQ ID NO: 1875362 - RNA, 15 nt, Human herpesvirus 4 (Epstein-Barr virus)
ccuuguccgcugggc

SEQ ID NO: 1875363 - RNA, 15 nt, Human herpesvirus 4 (Epstein-Barr virus)
gccauggccgagaag

SEQ ID NO: 1875364 - RNA, 20 nt, Human herpesvirus 4 (Epstein-Barr virus)
cuucgaggucuccccugacg

SEQ ID NO: 1875365 - RNA, 20 nt, Human herpesvirus 4 (Epstein-Barr virus)
ucuacugccuuguccacugg

SEQ ID NO: 1875366 - RNA, 13 nt, Human herpesvirus 4 (Epstein-Barr virus)
gccaacuccccca

SEQ ID NO: 1875367 - RNA, 18 nt, Human herpesvirus 4 (Epstein-Barr virus)
gugaugaaaacagaggcu

SEQ ID NO: 1875368 - RNA, 19 nt, Human herpesvirus 4 (Epstein-Barr virus)
guuucuguggcugccgaag

SEQ ID NO: 1875369 - RNA, 15 nt, Human herpesvirus 4 (Epstein-Barr virus)
cgcccaguaugcagu

SEQ ID NO: 1875370 - RNA, 19 nt, Human herpesvirus 4 (Epstein-Barr virus)
gaaggaacggcggagagua

SEQ ID NO: 1875371 - RNA, 13 nt, Human herpesvirus 4 (Epstein-Barr virus)
uccuucuuggccu

SEQ ID NO: 1875372 - RNA, 19 nt, Human herpesvirus 4 (Epstein-Barr virus)
agcgaagcagcuccgcccu

SEQ ID NO: 1875373 - RNA, 18 nt, Human herpesvirus 4 (Epstein-Barr virus)
ccucagaauuucugcuag

SEQ ID NO: 1875374 - RNA, 14 nt, Human herpesvirus 4 (Epstein-Barr virus)
ccugaccaucacau

SEQ ID NO: 1875375 - RNA, 14 nt, Human herpesvirus 4 (Epstein-Barr virus)
ccuuuacccagccc

SEQ ID NO: 1875376 - RNA, 20 nt, Human herpesvirus 4 (Epstein-Barr virus)
gggaucaugaagcccccagg

SEQ ID NO: 1875377 - RNA, 13 nt, Human herpesvirus 4 (Epstein-Barr virus)
gcaggugagggug

SEQ ID NO: 1875378 - RNA, 18 nt, Human herpesvirus 4 (Epstein-Barr virus)
ggagcaggaggaggggca

SEQ ID NO: 1875379 - RNA, 18 nt, Human herpesvirus 4 (Epstein-Barr virus)
ggccacggcgugccagag

SEQ ID NO: 1875380 - RNA, 17 nt, Human herpesvirus 4 (Epstein-Barr virus)
accugcucucucuggag

SEQ ID NO: 1875381 - RNA, 15 nt, Human herpesvirus 4 (Epstein-Barr virus)
ccucuuuguggccuu

SEQ ID NO: 1875382 - RNA, 19 nt, Human herpesvirus 4 (Epstein-Barr virus)
guccucuacugccuugucc

SEQ ID NO: 1875383 - RNA, 14 nt, Human herpesvirus 4 (Epstein-Barr virus)
caggaggaaaggcu

SEQ ID NO: 1875384 - RNA, 22 nt, Human herpesvirus 4 (Epstein-Barr virus)
uggaccaagggcagggcaaugg

SEQ ID NO: 1875385 - RNA, 18 nt, Human herpesvirus 4 (Epstein-Barr virus)
ucucaggcuaugaagaag

SEQ ID NO: 1875386 - RNA, 17 nt, Human herpesvirus 4 (Epstein-Barr virus)
gaacucgagagaggccu

SEQ ID NO: 1875387 - RNA, 15 nt, Human herpesvirus 4 (Epstein-Barr virus)
caacugucacaccag

SEQ ID NO: 1875388 - RNA, 12 nt, Human herpesvirus 4 (Epstein-Barr virus)
ccggggcccacg

SEQ ID NO: 1875389 - RNA, 19 nt, Human herpesvirus 4 (Epstein-Barr virus)
cuuuguccagauguccagg

SEQ ID NO: 1875390 - RNA, 22 nt, Human herpesvirus 4 (Epstein-Barr virus)
aacgggggaaggaaaggccugc

SEQ ID NO: 1875391 - RNA, 12 nt, Human herpesvirus 4 (Epstein-Barr virus)
ucagcacuuugc

SEQ ID NO: 1875392 - RNA, 13 nt, Human herpesvirus 4 (Epstein-Barr virus)
ugggaccggggcc

SEQ ID NO: 1875393 - RNA, 19 nt, Human herpesvirus 4 (Epstein-Barr virus)
ccucggagaucaucccacu

SEQ ID NO: 1875394 - RNA, 16 nt, Human herpesvirus 4 (Epstein-Barr virus)
uccucugccuggccgg

SEQ ID NO: 1875395 - RNA, 23 nt, Human herpesvirus 4 (Epstein-Barr virus)
cccagagggcgaaugggcugcag

SEQ ID NO: 1875396 - RNA, 16 nt, Human herpesvirus 4 (Epstein-Barr virus)
ggccagguagcccagc

SEQ ID NO: 1875397 - RNA, 16 nt, Human herpesvirus 4 (Epstein-Barr virus)
uggcucuccuguguga

SEQ ID NO: 1875398 - RNA, 14 nt, Human herpesvirus 4 (Epstein-Barr virus)
ucugauggccugga

SEQ ID NO: 1875399 - RNA, 19 nt, Human herpesvirus 4 (Epstein-Barr virus)
gcgugaagucgguguccag

SEQ ID NO: 1875400 - RNA, 21 nt, Human herpesvirus 4 (Epstein-Barr virus)
cugauuuuccucauuggcuuu

SEQ ID NO: 1875401 - RNA, 21 nt, Human herpesvirus 4 (Epstein-Barr virus)
agaaaacucugcauggagaag

SEQ ID NO: 1875402 - RNA, 22 nt, Human herpesvirus 4 (Epstein-Barr virus)
guuguagguguccagcgcucug

SEQ ID NO: 1875403 - RNA, 15 nt, Human herpesvirus 4 (Epstein-Barr virus)
ggcgucucaggcuau

SEQ ID NO: 1875404 - RNA, 23 nt, Human herpesvirus 4 (Epstein-Barr virus)
aagucccgggggaggagaagaga

SEQ ID NO: 1875405 - RNA, 22 nt, Human herpesvirus 4 (Epstein-Barr virus)
uuaccaugucauaggcuugccu

SEQ ID NO: 1875406 - RNA, 16 nt, Human herpesvirus 4 (Epstein-Barr virus)
gugcgcggaaucagga

SEQ ID NO: 1875407 - RNA, 15 nt, Human herpesvirus 4 (Epstein-Barr virus)
ccaaagcuaacugua

SEQ ID NO: 1875408 - RNA, 22 nt, Human herpesvirus 4 (Epstein-Barr virus)
gauagcauggccgccagaguuc

SEQ ID NO: 1875409 - RNA, 23 nt, Human herpesvirus 4 (Epstein-Barr virus)
ugcucaaggcagucuccaccuuu

SEQ ID NO: 1875410 - RNA, 13 nt, Human herpesvirus 4 (Epstein-Barr virus)
ccggcggcagugg

SEQ ID NO: 1875411 - RNA, 20 nt, Human herpesvirus 4 (Epstein-Barr virus)
cuuggggguggugggcuccu

SEQ ID NO: 1875412 - RNA, 19 nt, Human herpesvirus 4 (Epstein-Barr virus)
acaaacucucucaucucca

SEQ ID NO: 1875413 - RNA, 16 nt, Human herpesvirus 4 (Epstein-Barr virus)
uugcgccgccuccccc

SEQ ID NO: 1875414 - RNA, 20 nt, Human herpesvirus 4 (Epstein-Barr virus)
cagucuauccaggaggagga

SEQ ID NO: 1875415 - RNA, 14 nt, Human herpesvirus 4 (Epstein-Barr virus)
gcugagugcccagg

SEQ ID NO: 1875416 - RNA, 21 nt, Human herpesvirus 4 (Epstein-Barr virus)
gagugcccuggaggccucagg

SEQ ID NO: 1875417 - RNA, 17 nt, Human herpesvirus 4 (Epstein-Barr virus)
cgguggugggcugcuga

SEQ ID NO: 1875418 - RNA, 23 nt, Human herpesvirus 4 (Epstein-Barr virus)
cauaacugagcagggcaaagcca

SEQ ID NO: 1875419 - RNA, 13 nt, Human herpesvirus 4 (Epstein-Barr virus)
cuaguuaccacag

SEQ ID NO: 1875420 - RNA, 16 nt, Human herpesvirus 4 (Epstein-Barr virus)
gcccggccgaggccug

SEQ ID NO: 1875421 - RNA, 20 nt, Human herpesvirus 4 (Epstein-Barr virus)
cacucuggggucucaggccu

SEQ ID NO: 1875422 - RNA, 14 nt, Human herpesvirus 4 (Epstein-Barr virus)
guaacaggugggac

SEQ ID NO: 1875423 - RNA, 21 nt, Human herpesvirus 4 (Epstein-Barr virus)
acugggaugaacccuggggca

SEQ ID NO: 1875424 - RNA, 21 nt, Human herpesvirus 4 (Epstein-Barr virus)
agggcccguuccaggcucucc

SEQ ID NO: 1875425 - RNA, 15 nt, Human herpesvirus 4 (Epstein-Barr virus)
uaacucuuaaaacuu

SEQ ID NO: 1875426 - RNA, 15 nt, Human herpesvirus 4 (Epstein-Barr virus)
cuaguugguccaggg

SEQ ID NO: 1875427 - RNA, 16 nt, Human herpesvirus 4 (Epstein-Barr virus)
aguaaaagcagaacag

SEQ ID NO: 1875428 - RNA, 20 nt, Human herpesvirus 4 (Epstein-Barr virus)
ggagcaggaggggcaggagc

SEQ ID NO: 1875429 - RNA, 18 nt, Human herpesvirus 4 (Epstein-Barr virus)
agggcugguuggggagcu

SEQ ID NO: 1875430 - RNA, 21 nt, Human herpesvirus 4 (Epstein-Barr virus)
cacucaggaagcuggccaggc

SEQ ID NO: 1875431 - RNA, 21 nt, Human herpesvirus 4 (Epstein-Barr virus)
gcggcagcggaugguggggcu

SEQ ID NO: 1875432 - RNA, 12 nt, Human herpesvirus 4 (Epstein-Barr virus)
caaacacuacaa

SEQ ID NO: 1875433 - RNA, 15 nt, Human herpesvirus 4 (Epstein-Barr virus)
ccauguaagccugcc

SEQ ID NO: 1875434 - RNA, 14 nt, Human herpesvirus 4 (Epstein-Barr virus)
aaucaccuuaacug

SEQ ID NO: 1875435 - RNA, 20 nt, Human herpesvirus 4 (Epstein-Barr virus)
augcacggucauucugccgu

SEQ ID NO: 1875436 - RNA, 22 nt, Human herpesvirus 4 (Epstein-Barr virus)
cuccauuuacugggaaugccuu

SEQ ID NO: 1875437 - RNA, 16 nt, Human herpesvirus 4 (Epstein-Barr virus)
ugccuccagagccccu

SEQ ID NO: 1875438 - RNA, 14 nt, Human herpesvirus 4 (Epstein-Barr virus)
gugugcgcgccgcc

SEQ ID NO: 1875439 - RNA, 22 nt, Human herpesvirus 4 (Epstein-Barr virus)
acagcuagcagacauugguguu

SEQ ID NO: 1875440 - RNA, 18 nt, Human herpesvirus 4 (Epstein-Barr virus)
cggcuggccgccguggcc

SEQ ID NO: 1875441 - RNA, 13 nt, Human herpesvirus 4 (Epstein-Barr virus)
gaacccuggggca

SEQ ID NO: 1875442 - RNA, 16 nt, Human herpesvirus 4 (Epstein-Barr virus)
caagcagcucaccuau

SEQ ID NO: 1875443 - RNA, 17 nt, Human herpesvirus 4 (Epstein-Barr virus)
cacggggugcucccccu

SEQ ID NO: 1875444 - RNA, 16 nt, Human herpesvirus 4 (Epstein-Barr virus)
cuguguacgugccuca

SEQ ID NO: 1875445 - RNA, 15 nt, Human herpesvirus 4 (Epstein-Barr virus)
gccagaucuaaggcc

SEQ ID NO: 1875446 - RNA, 15 nt, Human herpesvirus 4 (Epstein-Barr virus)
aggagcuugaggcca

SEQ ID NO: 1875447 - RNA, 16 nt, Human herpesvirus 4 (Epstein-Barr virus)
ucccggcacaccagac

SEQ ID NO: 1875448 - RNA, 18 nt, Human herpesvirus 4 (Epstein-Barr virus)
ggggauuacccgacccag

SEQ ID NO: 1875449 - RNA, 18 nt, Human herpesvirus 4 (Epstein-Barr virus)
cagcaaaaccagcccggg

SEQ ID NO: 1875450 - RNA, 19 nt, Human herpesvirus 4 (Epstein-Barr virus)
ucuaaaaaucaaaacuuua

SEQ ID NO: 1875451 - RNA, 19 nt, Human herpesvirus 4 (Epstein-Barr virus)
aguacaggauuauugccaa

SEQ ID NO: 1875452 - RNA, 21 nt, Human herpesvirus 4 (Epstein-Barr virus)
gaggaacggugauuaggcacu

SEQ ID NO: 1875453 - RNA, 19 nt, Human herpesvirus 4 (Epstein-Barr virus)
uacacugaauuuagccuga

SEQ ID NO: 1875454 - RNA, 17 nt, Human herpesvirus 4 (Epstein-Barr virus)
agcccagaggaggcccc

SEQ ID NO: 1875455 - RNA, 17 nt, Human herpesvirus 4 (Epstein-Barr virus)
ggccaucauggccgacg

SEQ ID NO: 1875456 - RNA, 13 nt, Human herpesvirus 4 (Epstein-Barr virus)
ugagucucucgag

SEQ ID NO: 1875457 - RNA, 14 nt, Human herpesvirus 4 (Epstein-Barr virus)
ccugucggcccugc

SEQ ID NO: 1875458 - RNA, 18 nt, Human herpesvirus 4 (Epstein-Barr virus)
uucagcuccagggccagc

SEQ ID NO: 1875459 - RNA, 16 nt, Human herpesvirus 4 (Epstein-Barr virus)
aucuuugacugacaca

SEQ ID NO: 1875460 - RNA, 12 nt, Human herpesvirus 4 (Epstein-Barr virus)
augacucaucuc

SEQ ID NO: 1875461 - RNA, 17 nt, Human herpesvirus 4 (Epstein-Barr virus)
uccuagcacaaaccagu

SEQ ID NO: 1875462 - RNA, 17 nt, Human herpesvirus 4 (Epstein-Barr virus)
cuacugccuuacacugg

SEQ ID NO: 1875463 - RNA, 16 nt, Human herpesvirus 4 (Epstein-Barr virus)
ccuggcggcccagccc

SEQ ID NO: 1875464 - RNA, 11 nt, Human herpesvirus 4 (Epstein-Barr virus)
caacugcugca

SEQ ID NO: 1875465 - RNA, 21 nt, Human herpesvirus 4 (Epstein-Barr virus)
gggaugggcuugauggcccug

SEQ ID NO: 1875466 - RNA, 13 nt, Human herpesvirus 4 (Epstein-Barr virus)
aagcaauaaagua

SEQ ID NO: 1875467 - RNA, 19 nt, Human herpesvirus 4 (Epstein-Barr virus)
cacagguagcaaggacccg

SEQ ID NO: 1875468 - RNA, 12 nt, Human herpesvirus 4 (Epstein-Barr virus)
uaagaccaaggc

SEQ ID NO: 1875469 - RNA, 12 nt, Human herpesvirus 4 (Epstein-Barr virus)
uuggcagacacc

SEQ ID NO: 1875470 - RNA, 15 nt, Human herpesvirus 4 (Epstein-Barr virus)
cagugucuggcggcc

SEQ ID NO: 1875471 - RNA, 13 nt, Human herpesvirus 4 (Epstein-Barr virus)
gaagaggacgagg

SEQ ID NO: 1875472 - RNA, 18 nt, Human herpesvirus 4 (Epstein-Barr virus)
cagcccuuuuuccagugg

SEQ ID NO: 1875473 - RNA, 23 nt, Human herpesvirus 4 (Epstein-Barr virus)
uauaaauuacuggcgugaauugu

SEQ ID NO: 1875474 - RNA, 12 nt, Human herpesvirus 4 (Epstein-Barr virus)
aggagagcugga

SEQ ID NO: 1875475 - RNA, 14 nt, Human herpesvirus 4 (Epstein-Barr virus)
cguggcgccugggg

SEQ ID NO: 1875476 - RNA, 14 nt, Human herpesvirus 4 (Epstein-Barr virus)
ucuucccagacucu

SEQ ID NO: 1875477 - RNA, 15 nt, Human herpesvirus 4 (Epstein-Barr virus)
cccggcccucuuccg

SEQ ID NO: 1875478 - RNA, 18 nt, Human herpesvirus 4 (Epstein-Barr virus)
gcaagauccuucuggcac

SEQ ID NO: 1875479 - RNA, 16 nt, Human herpesvirus 4 (Epstein-Barr virus)
aaagucccgagcggcc

SEQ ID NO: 1875480 - RNA, 18 nt, Human herpesvirus 4 (Epstein-Barr virus)
ucaucuggcucuccugug

SEQ ID NO: 1875481 - RNA, 20 nt, Human herpesvirus 4 (Epstein-Barr virus)
gcccccaaaaguagaggcuc

SEQ ID NO: 1875482 - RNA, 19 nt, Human herpesvirus 4 (Epstein-Barr virus)
cuccaaucaccagccaccu

SEQ ID NO: 1875483 - RNA, 22 nt, Human herpesvirus 4 (Epstein-Barr virus)
cagggggcagucugagaaccug

SEQ ID NO: 1875484 - RNA, 20 nt, Human herpesvirus 4 (Epstein-Barr virus)
cugcacgagaccccugggcu

SEQ ID NO: 1875485 - RNA, 21 nt, Human herpesvirus 4 (Epstein-Barr virus)
ucccacuuuuaccccaguccc

SEQ ID NO: 1875486 - RNA, 14 nt, Human herpesvirus 4 (Epstein-Barr virus)
cggaagcccucugg

SEQ ID NO: 1875487 - RNA, 18 nt, Human herpesvirus 4 (Epstein-Barr virus)
uggacccuauggagggca

SEQ ID NO: 1875488 - RNA, 14 nt, Human herpesvirus 4 (Epstein-Barr virus)
cacacgcucagcuc

SEQ ID NO: 1875489 - RNA, 21 nt, Human herpesvirus 4 (Epstein-Barr virus)
uccgcagccgcugaagccagg

SEQ ID NO: 1875490 - RNA, 17 nt, Human herpesvirus 4 (Epstein-Barr virus)
ccuagagguuuugcuag

SEQ ID NO: 1875491 - RNA, 23 nt, Human herpesvirus 4 (Epstein-Barr virus)
uaugguaaggcucuucgggcaag

SEQ ID NO: 1875492 - RNA, 23 nt, Human herpesvirus 4 (Epstein-Barr virus)
cugaacaucucauccccagaggg

SEQ ID NO: 1875493 - RNA, 14 nt, Human herpesvirus 4 (Epstein-Barr virus)
gaucuuugacugac

SEQ ID NO: 1875494 - RNA, 20 nt, Human herpesvirus 4 (Epstein-Barr virus)
acccuguacaccccgaccca

SEQ ID NO: 1875495 - RNA, 22 nt, Human herpesvirus 4 (Epstein-Barr virus)
agcuuuugaccaagcuaccaga

SEQ ID NO: 1875496 - RNA, 15 nt, Human herpesvirus 4 (Epstein-Barr virus)
accuggacuggggug

SEQ ID NO: 1875497 - RNA, 21 nt, Human herpesvirus 4 (Epstein-Barr virus)
agcuggugguccgcauguuuu

SEQ ID NO: 1875498 - RNA, 14 nt, Human herpesvirus 4 (Epstein-Barr virus)
gucaccugcacaga

SEQ ID NO: 1875499 - RNA, 14 nt, Human herpesvirus 4 (Epstein-Barr virus)
cccugucaccaggc

SEQ ID NO: 1875500 - RNA, 18 nt, Human herpesvirus 4 (Epstein-Barr virus)
agcgaggauaaucugggc

SEQ ID NO: 1875501 - RNA, 22 nt, Human herpesvirus 4 (Epstein-Barr virus)
auuggacgucccuuuggaggac

SEQ ID NO: 1875502 - RNA, 23 nt, Human herpesvirus 4 (Epstein-Barr virus)
uccuggccggccgcccccugacc

SEQ ID NO: 1875503 - RNA, 14 nt, Human herpesvirus 4 (Epstein-Barr virus)
gacaugcagacucc

SEQ ID NO: 1875504 - RNA, 15 nt, Human herpesvirus 4 (Epstein-Barr virus)
cagcauggcagccgg

SEQ ID NO: 1875505 - RNA, 21 nt, Human herpesvirus 4 (Epstein-Barr virus)
cuugguaaguuuucccuuccu

SEQ ID NO: 1875506 - RNA, 16 nt, Human herpesvirus 4 (Epstein-Barr virus)
gccuuccucugccugg

SEQ ID NO: 1875507 - RNA, 14 nt, Human herpesvirus 4 (Epstein-Barr virus)
cuccagugcgagga

SEQ ID NO: 1875508 - RNA, 16 nt, Human herpesvirus 4 (Epstein-Barr virus)
cagugggccucucugg

SEQ ID NO: 1875509 - RNA, 18 nt, Human herpesvirus 4 (Epstein-Barr virus)
ugcuguacaugggaccuc

SEQ ID NO: 1875510 - RNA, 19 nt, Human herpesvirus 4 (Epstein-Barr virus)
cucguccaucuugagcgcc

SEQ ID NO: 1875511 - RNA, 12 nt, Human herpesvirus 4 (Epstein-Barr virus)
aucucagggaca

SEQ ID NO: 1875512 - RNA, 21 nt, Human herpesvirus 4 (Epstein-Barr virus)
ccuggucaagagcuuccuggc

SEQ ID NO: 1875513 - RNA, 19 nt, Human herpesvirus 4 (Epstein-Barr virus)
cauuuacguucuggugaug

SEQ ID NO: 1875514 - RNA, 22 nt, Human herpesvirus 4 (Epstein-Barr virus)
cugccagagccucugccacaag

SEQ ID NO: 1875515 - RNA, 20 nt, Human herpesvirus 4 (Epstein-Barr virus)
ggccaccggggaggccaggu

SEQ ID NO: 1875516 - RNA, 14 nt, Human herpesvirus 4 (Epstein-Barr virus)
aaacaauuacagau

SEQ ID NO: 1875517 - RNA, 15 nt, Human herpesvirus 4 (Epstein-Barr virus)
aaggcggagaagacg

SEQ ID NO: 1875518 - RNA, 15 nt, Human herpesvirus 4 (Epstein-Barr virus)
gccucggccuggggu

SEQ ID NO: 1875519 - RNA, 20 nt, Human herpesvirus 4 (Epstein-Barr virus)
cggcggggaacgugacaggc

SEQ ID NO: 1875520 - RNA, 18 nt, Human herpesvirus 4 (Epstein-Barr virus)
aguaagcauggggcucug

SEQ ID NO: 1875521 - RNA, 17 nt, Human herpesvirus 4 (Epstein-Barr virus)
ccaucugcuucuggcuc

SEQ ID NO: 1875522 - RNA, 16 nt, Human herpesvirus 4 (Epstein-Barr virus)
aggcagccccaaagcg

SEQ ID NO: 1875523 - RNA, 16 nt, Human herpesvirus 4 (Epstein-Barr virus)
cuccaggcuccuggau

SEQ ID NO: 1875524 - RNA, 18 nt, Human herpesvirus 4 (Epstein-Barr virus)
accgcagccacguccaga

SEQ ID NO: 1875525 - RNA, 16 nt, Human herpesvirus 4 (Epstein-Barr virus)
caccugcacagaucug

SEQ ID NO: 1875526 - RNA, 17 nt, Human herpesvirus 4 (Epstein-Barr virus)
aagaauaacaugccaau

SEQ ID NO: 1875527 - RNA, 15 nt, Human herpesvirus 4 (Epstein-Barr virus)
aggcacggccgggcu

SEQ ID NO: 1875528 - RNA, 11 nt, Human herpesvirus 4 (Epstein-Barr virus)
agggcaaagac

SEQ ID NO: 1875529 - RNA, 14 nt, Human herpesvirus 4 (Epstein-Barr virus)
cugcuucuccccga

SEQ ID NO: 1875530 - RNA, 16 nt, Human herpesvirus 4 (Epstein-Barr virus)
acaauugccaaguacu

SEQ ID NO: 1875531 - RNA, 16 nt, Human herpesvirus 4 (Epstein-Barr virus)
acagcaauggcacgga

SEQ ID NO: 1875532 - RNA, 14 nt, Human herpesvirus 4 (Epstein-Barr virus)
gcugcugcugguca

SEQ ID NO: 1875533 - RNA, 20 nt, Human herpesvirus 4 (Epstein-Barr virus)
caagugauuaggagcagggc

SEQ ID NO: 1875534 - RNA, 14 nt, Human herpesvirus 4 (Epstein-Barr virus)
cucggccuccuggc

SEQ ID NO: 1875535 - RNA, 17 nt, Human herpesvirus 4 (Epstein-Barr virus)
ccgaugauucuggccau

SEQ ID NO: 1875536 - RNA, 19 nt, Human herpesvirus 4 (Epstein-Barr virus)
ggcgacaguaacacagggu

SEQ ID NO: 1875537 - RNA, 18 nt, Human herpesvirus 4 (Epstein-Barr virus)
cagggaaaaacuggccau

SEQ ID NO: 1875538 - RNA, 17 nt, Human herpesvirus 4 (Epstein-Barr virus)
aggcugcuaagccagga

SEQ ID NO: 1875539 - RNA, 20 nt, Human herpesvirus 4 (Epstein-Barr virus)
guggccucuacgccaggcuc

SEQ ID NO: 1875540 - RNA, 17 nt, Human herpesvirus 4 (Epstein-Barr virus)
agguggaggggggcggc

SEQ ID NO: 1875541 - RNA, 17 nt, Human herpesvirus 4 (Epstein-Barr virus)
ccgugccauccucucgg

SEQ ID NO: 1875542 - RNA, 16 nt, Human herpesvirus 4 (Epstein-Barr virus)
auaauacgcccgacaa

SEQ ID NO: 1875543 - RNA, 21 nt, Human herpesvirus 4 (Epstein-Barr virus)
ucucuggugaaacuggcuucu

SEQ ID NO: 1875544 - RNA, 23 nt, Human herpesvirus 4 (Epstein-Barr virus)
ccucgaguaggugccuccagagc

SEQ ID NO: 1875545 - RNA, 12 nt, Human herpesvirus 4 (Epstein-Barr virus)
uccagggcccug

SEQ ID NO: 1875546 - RNA, 19 nt, Human herpesvirus 4 (Epstein-Barr virus)
cucgaagcggucucagaca

SEQ ID NO: 1875547 - RNA, 21 nt, Human herpesvirus 4 (Epstein-Barr virus)
ugcaauaaauaaaaguacaga

SEQ ID NO: 1875548 - RNA, 21 nt, Human herpesvirus 4 (Epstein-Barr virus)
cauguguacuuguccucaucg

SEQ ID NO: 1875549 - RNA, 21 nt, Human herpesvirus 4 (Epstein-Barr virus)
cugcagugggccucucuggcu

SEQ ID NO: 1875550 - RNA, 14 nt, Human herpesvirus 4 (Epstein-Barr virus)
gcagcaccuguccc

SEQ ID NO: 1875551 - RNA, 15 nt, Human herpesvirus 4 (Epstein-Barr virus)
ucuacucuuggcagc

SEQ ID NO: 1875552 - RNA, 13 nt, Human herpesvirus 4 (Epstein-Barr virus)
aagaccaaggccc

SEQ ID NO: 1875553 - RNA, 13 nt, Human herpesvirus 4 (Epstein-Barr virus)
ggcucucaggccu

SEQ ID NO: 1875554 - RNA, 16 nt, Human herpesvirus 4 (Epstein-Barr virus)
ccuugcucgcagcugg

SEQ ID NO: 1875555 - RNA, 19 nt, Human herpesvirus 4 (Epstein-Barr virus)
ugcuucuggcucuucuggg

SEQ ID NO: 1875556 - RNA, 23 nt, Human herpesvirus 4 (Epstein-Barr virus)
gcaggccccccgcaccagggcca

SEQ ID NO: 1875557 - RNA, 21 nt, Human herpesvirus 4 (Epstein-Barr virus)
ccauggugccaagcucagccc

SEQ ID NO: 1875558 - RNA, 23 nt, Human herpesvirus 4 (Epstein-Barr virus)
cauaaguccucauggcaggagag

SEQ ID NO: 1875559 - RNA, 23 nt, Human herpesvirus 4 (Epstein-Barr virus)
acuggggugugaagggcagggcu

SEQ ID NO: 1875560 - RNA, 13 nt, Human herpesvirus 4 (Epstein-Barr virus)
cacgggccugggg

SEQ ID NO: 1875561 - RNA, 19 nt, Human herpesvirus 4 (Epstein-Barr virus)
augugcagggauugggcuu

SEQ ID NO: 1875562 - RNA, 22 nt, Human herpesvirus 4 (Epstein-Barr virus)
ugcagcgcccugucccuggagc

SEQ ID NO: 1875563 - RNA, 20 nt, Human herpesvirus 4 (Epstein-Barr virus)
cgaugucggggcugcuggcg

SEQ ID NO: 1875564 - RNA, 16 nt, Human herpesvirus 4 (Epstein-Barr virus)
cgauggucgucaucug

SEQ ID NO: 1875565 - RNA, 12 nt, Human herpesvirus 4 (Epstein-Barr virus)
gcccucuccagc

SEQ ID NO: 1875566 - RNA, 22 nt, Human herpesvirus 4 (Epstein-Barr virus)
uggggugcgggugcgggugaug

SEQ ID NO: 1875567 - RNA, 16 nt, Human herpesvirus 4 (Epstein-Barr virus)
cugaccacggcccacg

SEQ ID NO: 1875568 - RNA, 14 nt, Human herpesvirus 4 (Epstein-Barr virus)
cuggccgagcugga

SEQ ID NO: 1875569 - RNA, 14 nt, Human herpesvirus 4 (Epstein-Barr virus)
ucggcccuccgcau

SEQ ID NO: 1875570 - RNA, 20 nt, Human herpesvirus 4 (Epstein-Barr virus)
accccuguuagcuauuugau

SEQ ID NO: 1875571 - RNA, 15 nt, Human herpesvirus 4 (Epstein-Barr virus)
caucucaacacauau

SEQ ID NO: 1875572 - RNA, 14 nt, Human herpesvirus 4 (Epstein-Barr virus)
cguguggaagagga

SEQ ID NO: 1875573 - RNA, 16 nt, Human herpesvirus 4 (Epstein-Barr virus)
acccccuggagccagc

SEQ ID NO: 1875574 - RNA, 15 nt, Human herpesvirus 4 (Epstein-Barr virus)
ccgaagaagggaggg

SEQ ID NO: 1875575 - RNA, 22 nt, Human herpesvirus 4 (Epstein-Barr virus)
cgagacuuggaccaagggcagg

SEQ ID NO: 1875576 - RNA, 13 nt, Human herpesvirus 4 (Epstein-Barr virus)
cucccgcccugag

SEQ ID NO: 1875577 - RNA, 15 nt, Human herpesvirus 4 (Epstein-Barr virus)
ucuggucgcccccuc

SEQ ID NO: 1875578 - RNA, 14 nt, Human herpesvirus 4 (Epstein-Barr virus)
gggcccgggugccu

SEQ ID NO: 1875579 - RNA, 19 nt, Human herpesvirus 4 (Epstein-Barr virus)
uguacugaccacucaggaa

SEQ ID NO: 1875580 - RNA, 13 nt, Human herpesvirus 4 (Epstein-Barr virus)
auguuccuucuca

SEQ ID NO: 1875581 - RNA, 20 nt, Human herpesvirus 4 (Epstein-Barr virus)
cgcucugcgccagccccgcc

SEQ ID NO: 1875582 - RNA, 15 nt, Human herpesvirus 4 (Epstein-Barr virus)
ccuacgcagaggcca

SEQ ID NO: 1875583 - RNA, 14 nt, Human herpesvirus 4 (Epstein-Barr virus)
uggcggcccagccc

SEQ ID NO: 1875584 - RNA, 19 nt, Human herpesvirus 4 (Epstein-Barr virus)
gauuggaaaagggcccagg

SEQ ID NO: 1875585 - RNA, 17 nt, Human herpesvirus 4 (Epstein-Barr virus)
uguuucccgacgccaau

SEQ ID NO: 1875586 - RNA, 16 nt, Human herpesvirus 4 (Epstein-Barr virus)
gcucagugcggugcua

SEQ ID NO: 1875587 - RNA, 19 nt, Human herpesvirus 4 (Epstein-Barr virus)
cccagagggcgaaugggcu

SEQ ID NO: 1875588 - RNA, 18 nt, Human herpesvirus 4 (Epstein-Barr virus)
agugccuccgccugagcc

SEQ ID NO: 1875589 - RNA, 19 nt, Human herpesvirus 4 (Epstein-Barr virus)
ggagcggggguucuccagg

SEQ ID NO: 1875590 - RNA, 15 nt, Human herpesvirus 4 (Epstein-Barr virus)
agcaggagcuugagg

SEQ ID NO: 1875591 - RNA, 14 nt, Human herpesvirus 4 (Epstein-Barr virus)
accacugaccuggu

SEQ ID NO: 1875592 - RNA, 20 nt, Human herpesvirus 4 (Epstein-Barr virus)
gccaccgacgagcagaggac

SEQ ID NO: 1875593 - RNA, 14 nt, Human herpesvirus 4 (Epstein-Barr virus)
acccacuccagugc

SEQ ID NO: 1875594 - RNA, 22 nt, Human herpesvirus 4 (Epstein-Barr virus)
aggagcguguccccguggagga

SEQ ID NO: 1875595 - RNA, 19 nt, Human herpesvirus 4 (Epstein-Barr virus)
gggaacacccccaccccac

SEQ ID NO: 1875596 - RNA, 19 nt, Human herpesvirus 4 (Epstein-Barr virus)
ugcgaugaggcggugggug

SEQ ID NO: 1875597 - RNA, 15 nt, Human herpesvirus 4 (Epstein-Barr virus)
ccucauuggcuuugc

SEQ ID NO: 1875598 - RNA, 22 nt, Human herpesvirus 4 (Epstein-Barr virus)
gcuucucguagagaucaggcca

SEQ ID NO: 1875599 - RNA, 16 nt, Human herpesvirus 4 (Epstein-Barr virus)
uaacggguggaagcau

SEQ ID NO: 1875600 - RNA, 19 nt, Human herpesvirus 4 (Epstein-Barr virus)
ccugaucugggagaugaga

SEQ ID NO: 1875601 - RNA, 18 nt, Human herpesvirus 4 (Epstein-Barr virus)
ggacgcuguccgccagga

SEQ ID NO: 1875602 - RNA, 23 nt, Human herpesvirus 4 (Epstein-Barr virus)
uggcauacuuuuugccacccagg

SEQ ID NO: 1875603 - RNA, 14 nt, Human herpesvirus 4 (Epstein-Barr virus)
ccaaguugcauugg

SEQ ID NO: 1875604 - RNA, 13 nt, Human herpesvirus 4 (Epstein-Barr virus)
ccucggccugggg

SEQ ID NO: 1875605 - RNA, 15 nt, Human herpesvirus 4 (Epstein-Barr virus)
ccgaggccugcgacg

SEQ ID NO: 1875606 - RNA, 18 nt, Human herpesvirus 4 (Epstein-Barr virus)
gggugaggcccagccccc

SEQ ID NO: 1875607 - RNA, 13 nt, Human herpesvirus 4 (Epstein-Barr virus)
aacuugacuacaa

SEQ ID NO: 1875608 - RNA, 17 nt, Human herpesvirus 4 (Epstein-Barr virus)
ggugugaagggcagggc

SEQ ID NO: 1875609 - RNA, 14 nt, Human herpesvirus 4 (Epstein-Barr virus)
caggggagguggcu

SEQ ID NO: 1875610 - RNA, 17 nt, Human herpesvirus 4 (Epstein-Barr virus)
agcaggagcaggagcgg

SEQ ID NO: 1875611 - RNA, 17 nt, Human herpesvirus 4 (Epstein-Barr virus)
gaacacuugggcacgga

SEQ ID NO: 1875612 - RNA, 14 nt, Human herpesvirus 4 (Epstein-Barr virus)
ggacgaggacgaga

SEQ ID NO: 1875613 - RNA, 22 nt, Human herpesvirus 4 (Epstein-Barr virus)
gcggcccagcagauccagggcc

SEQ ID NO: 1875614 - RNA, 18 nt, Human herpesvirus 4 (Epstein-Barr virus)
auacccagagcaaaagca

SEQ ID NO: 1875615 - RNA, 12 nt, Human herpesvirus 4 (Epstein-Barr virus)
cccucugggaga

SEQ ID NO: 1875616 - RNA, 20 nt, Human herpesvirus 4 (Epstein-Barr virus)
caggccggcguugcgcacca

SEQ ID NO: 1875617 - RNA, 13 nt, Human herpesvirus 4 (Epstein-Barr virus)
gccguccucugga

SEQ ID NO: 1875618 - RNA, 19 nt, Human herpesvirus 4 (Epstein-Barr virus)
acacaucuggaccagaagg

SEQ ID NO: 1875619 - RNA, 17 nt, Human herpesvirus 4 (Epstein-Barr virus)
gaaaaugagccaugacu

SEQ ID NO: 1875620 - RNA, 15 nt, Human herpesvirus 4 (Epstein-Barr virus)
cacacucccuccaga

SEQ ID NO: 1875621 - RNA, 20 nt, Human herpesvirus 4 (Epstein-Barr virus)
uggaaacccucagucacggg

SEQ ID NO: 1875622 - RNA, 21 nt, Human herpesvirus 4 (Epstein-Barr virus)
aggaauuauuuaccacacccc

SEQ ID NO: 1875623 - RNA, 15 nt, Human herpesvirus 4 (Epstein-Barr virus)
gucccuuuggaggac

SEQ ID NO: 1875624 - RNA, 23 nt, Human herpesvirus 4 (Epstein-Barr virus)
ggcgguccuccacggggacacgc

SEQ ID NO: 1875625 - RNA, 21 nt, Human herpesvirus 4 (Epstein-Barr virus)
acggcccacgucuuuaccacc

SEQ ID NO: 1875626 - RNA, 14 nt, Human herpesvirus 4 (Epstein-Barr virus)
gcaggaggaggggc

SEQ ID NO: 1875627 - RNA, 20 nt, Human herpesvirus 4 (Epstein-Barr virus)
agagucuaucaggaccuggg

SEQ ID NO: 1875628 - RNA, 22 nt, Human herpesvirus 4 (Epstein-Barr virus)
cuccacuuacaaccaagccacu

SEQ ID NO: 1875629 - RNA, 21 nt, Human herpesvirus 4 (Epstein-Barr virus)
cggcaucaugcgugaccaccu

SEQ ID NO: 1875630 - RNA, 14 nt, Human herpesvirus 4 (Epstein-Barr virus)
agaccccugggcuc

SEQ ID NO: 1875631 - RNA, 13 nt, Human herpesvirus 4 (Epstein-Barr virus)
cuuugccaaccug

SEQ ID NO: 1875632 - RNA, 23 nt, Human herpesvirus 4 (Epstein-Barr virus)
ggggccuuguccgcugggccagg

SEQ ID NO: 1875633 - RNA, 22 nt, Human herpesvirus 4 (Epstein-Barr virus)
cauacucaagagaucagcaacc

SEQ ID NO: 1875634 - RNA, 20 nt, Human herpesvirus 4 (Epstein-Barr virus)
uccuggccggccgcccccug

SEQ ID NO: 1875635 - RNA, 18 nt, Human herpesvirus 4 (Epstein-Barr virus)
agugggcuucgggggccu

SEQ ID NO: 1875636 - RNA, 12 nt, Human herpesvirus 4 (Epstein-Barr virus)
cgacuucuggaa

SEQ ID NO: 1875637 - RNA, 20 nt, Human herpesvirus 4 (Epstein-Barr virus)
gccaauuggggugauccugu

SEQ ID NO: 1875638 - RNA, 12 nt, Human herpesvirus 4 (Epstein-Barr virus)
ccucugccuggc

SEQ ID NO: 1875639 - RNA, 17 nt, Human herpesvirus 4 (Epstein-Barr virus)
agcuccgugggcccaga

SEQ ID NO: 1875640 - RNA, 20 nt, Human herpesvirus 4 (Epstein-Barr virus)
uaugccuguggccccggcug

SEQ ID NO: 1875641 - RNA, 18 nt, Human herpesvirus 4 (Epstein-Barr virus)
uggcuguagccacccguc

SEQ ID NO: 1875642 - RNA, 19 nt, Human herpesvirus 4 (Epstein-Barr virus)
agggggcgcggcuggaugc

SEQ ID NO: 1875643 - RNA, 14 nt, Human herpesvirus 4 (Epstein-Barr virus)
cccacuccccucuc

SEQ ID NO: 1875644 - RNA, 12 nt, Human herpesvirus 4 (Epstein-Barr virus)
gaaccugagccu

SEQ ID NO: 1875645 - RNA, 13 nt, Human herpesvirus 4 (Epstein-Barr virus)
ugccugugccucg

SEQ ID NO: 1875646 - RNA, 15 nt, Human herpesvirus 4 (Epstein-Barr virus)
cucugaccgacgggc

SEQ ID NO: 1875647 - RNA, 15 nt, Human herpesvirus 4 (Epstein-Barr virus)
uaaccauggacgagg

SEQ ID NO: 1875648 - RNA, 15 nt, Human herpesvirus 4 (Epstein-Barr virus)
gcaggaggggcagga

SEQ ID NO: 1875649 - RNA, 22 nt, Human herpesvirus 4 (Epstein-Barr virus)
guugucacgucacucagcuccg

SEQ ID NO: 1875650 - RNA, 23 nt, Human herpesvirus 4 (Epstein-Barr virus)
gcagcagacaaggacaggugcca

SEQ ID NO: 1875651 - RNA, 16 nt, Human herpesvirus 4 (Epstein-Barr virus)
ccgaggcugagggggc

SEQ ID NO: 1875652 - RNA, 12 nt, Human herpesvirus 4 (Epstein-Barr virus)
cgguguccaggu

SEQ ID NO: 1875653 - RNA, 14 nt, Human herpesvirus 4 (Epstein-Barr virus)
ccagcauggcagcc

SEQ ID NO: 1875654 - RNA, 11 nt, Human herpesvirus 4 (Epstein-Barr virus)
guccccucugc

SEQ ID NO: 1875655 - RNA, 15 nt, Human herpesvirus 4 (Epstein-Barr virus)
aucucccgcgccgca

SEQ ID NO: 1875656 - RNA, 19 nt, Human herpesvirus 4 (Epstein-Barr virus)
ugucggcuaaugccaugca

SEQ ID NO: 1875657 - RNA, 19 nt, Human herpesvirus 4 (Epstein-Barr virus)
gggaggcauaacgguggug

SEQ ID NO: 1875658 - RNA, 18 nt, Human herpesvirus 4 (Epstein-Barr virus)
aggacacccaccaccagg

SEQ ID NO: 1875659 - RNA, 17 nt, Human herpesvirus 4 (Epstein-Barr virus)
cccuugcccucuccagc

SEQ ID NO: 1875660 - RNA, 16 nt, Human herpesvirus 4 (Epstein-Barr virus)
gguggcuugggcugug

SEQ ID NO: 1875661 - RNA, 16 nt, Human herpesvirus 4 (Epstein-Barr virus)
acccccacccuucgcc

SEQ ID NO: 1875662 - RNA, 15 nt, Human herpesvirus 4 (Epstein-Barr virus)
gugccucugggugcu

SEQ ID NO: 1875663 - RNA, 23 nt, Human herpesvirus 4 (Epstein-Barr virus)
ccccaaaaguagaggcucaggcc

SEQ ID NO: 1875664 - RNA, 18 nt, Human herpesvirus 4 (Epstein-Barr virus)
gcccucaugcgccagagc

SEQ ID NO: 1875665 - RNA, 14 nt, Human herpesvirus 4 (Epstein-Barr virus)
uuagguaucuggau

SEQ ID NO: 1875666 - RNA, 22 nt, Human herpesvirus 4 (Epstein-Barr virus)
ccuaucacgggggucaagcaaa

SEQ ID NO: 1875667 - RNA, 23 nt, Human herpesvirus 4 (Epstein-Barr virus)
aggcacggccucgugcaaccagg

SEQ ID NO: 1875668 - RNA, 20 nt, Human herpesvirus 4 (Epstein-Barr virus)
gaaggaggauggccuccagc

SEQ ID NO: 1875669 - RNA, 16 nt, Human herpesvirus 4 (Epstein-Barr virus)
caucaaccagugggua

SEQ ID NO: 1875670 - RNA, 19 nt, Human herpesvirus 4 (Epstein-Barr virus)
uccccagcaacagaucuug

SEQ ID NO: 1875671 - RNA, 15 nt, Human herpesvirus 4 (Epstein-Barr virus)
caagguugaagagca

SEQ ID NO: 1875672 - RNA, 18 nt, Human herpesvirus 4 (Epstein-Barr virus)
ccuugguuucagccucac

SEQ ID NO: 1875673 - RNA, 11 nt, Human herpesvirus 4 (Epstein-Barr virus)
cgcgacugagg

SEQ ID NO: 1875674 - RNA, 18 nt, Human herpesvirus 4 (Epstein-Barr virus)
gacaauaaaguugaugau

SEQ ID NO: 1875675 - RNA, 16 nt, Human herpesvirus 4 (Epstein-Barr virus)
gaacgugacaggcaca

SEQ ID NO: 1875676 - RNA, 23 nt, Human herpesvirus 4 (Epstein-Barr virus)
agagaucagcaaccuugggggca

SEQ ID NO: 1875677 - RNA, 20 nt, Human herpesvirus 4 (Epstein-Barr virus)
acugcguccaccuggccacc

SEQ ID NO: 1875678 - RNA, 16 nt, Human herpesvirus 4 (Epstein-Barr virus)
ucgcucaccccugugc

SEQ ID NO: 1875679 - RNA, 20 nt, Human herpesvirus 4 (Epstein-Barr virus)
gauauagcucugcacaggcu

SEQ ID NO: 1875680 - RNA, 22 nt, Human herpesvirus 4 (Epstein-Barr virus)
aggagcaggagcgggaggggca

SEQ ID NO: 1875681 - RNA, 17 nt, Human herpesvirus 4 (Epstein-Barr virus)
ccggcaccgccaggugg

SEQ ID NO: 1875682 - RNA, 21 nt, Human herpesvirus 4 (Epstein-Barr virus)
cuacucaccuacaugucaacc

SEQ ID NO: 1875683 - RNA, 12 nt, Human herpesvirus 4 (Epstein-Barr virus)
ggcuuucguccu

SEQ ID NO: 1875684 - RNA, 21 nt, Human herpesvirus 4 (Epstein-Barr virus)
acccuguagucaccugcacag

SEQ ID NO: 1875685 - RNA, 18 nt, Human herpesvirus 4 (Epstein-Barr virus)
cgagagaagagagcggcg

SEQ ID NO: 1875686 - RNA, 20 nt, Human herpesvirus 4 (Epstein-Barr virus)
caucucugauuauagcucug

SEQ ID NO: 1875687 - RNA, 20 nt, Human herpesvirus 4 (Epstein-Barr virus)
auuggucgucuucuuccccu

SEQ ID NO: 1875688 - RNA, 23 nt, Human herpesvirus 4 (Epstein-Barr virus)
ucacagcugcugguuuggagaaa

SEQ ID NO: 1875689 - RNA, 22 nt, Human herpesvirus 4 (Epstein-Barr virus)
ccaugcgcgcccugucaccagg

SEQ ID NO: 1875690 - RNA, 18 nt, Human herpesvirus 4 (Epstein-Barr virus)
cugacuggcagaaaggcu

SEQ ID NO: 1875691 - RNA, 19 nt, Human herpesvirus 4 (Epstein-Barr virus)
cgccugcggacucaggcca

SEQ ID NO: 1875692 - RNA, 16 nt, Human herpesvirus 4 (Epstein-Barr virus)
ccugguacaggaccau

SEQ ID NO: 1875693 - RNA, 20 nt, Human herpesvirus 4 (Epstein-Barr virus)
aagaacacuccacagaugga

SEQ ID NO: 1875694 - RNA, 18 nt, Human herpesvirus 4 (Epstein-Barr virus)
gugaccggacgggucuca

SEQ ID NO: 1875695 - RNA, 12 nt, Human herpesvirus 4 (Epstein-Barr virus)
ggggaagaggac

SEQ ID NO: 1875696 - RNA, 21 nt, Human herpesvirus 4 (Epstein-Barr virus)
uccccgagggugaggcccagc

SEQ ID NO: 1875697 - RNA, 21 nt, Human herpesvirus 4 (Epstein-Barr virus)
ggugggacaaaauggggucug

SEQ ID NO: 1875698 - RNA, 15 nt, Human herpesvirus 4 (Epstein-Barr virus)
ccucgguggugggcu

SEQ ID NO: 1875699 - RNA, 14 nt, Human herpesvirus 4 (Epstein-Barr virus)
cuacaacucagccc

SEQ ID NO: 1875700 - RNA, 16 nt, Human herpesvirus 4 (Epstein-Barr virus)
gacgcggagaggucca

SEQ ID NO: 1875701 - RNA, 12 nt, Human herpesvirus 4 (Epstein-Barr virus)
agcucaccuaug

SEQ ID NO: 1875702 - RNA, 22 nt, Human herpesvirus 4 (Epstein-Barr virus)
cucgcccacacagcgccagcag

SEQ ID NO: 1875703 - RNA, 16 nt, Human herpesvirus 4 (Epstein-Barr virus)
aaucccucugggagaa

SEQ ID NO: 1875704 - RNA, 21 nt, Human herpesvirus 4 (Epstein-Barr virus)
uggaccgugccauccucucgg

SEQ ID NO: 1875705 - RNA, 13 nt, Human herpesvirus 4 (Epstein-Barr virus)
ggagacgcccuca

SEQ ID NO: 1875706 - RNA, 22 nt, Human herpesvirus 4 (Epstein-Barr virus)
ccgggaccgcgcccuccucugg

SEQ ID NO: 1875707 - RNA, 21 nt, Human herpesvirus 4 (Epstein-Barr virus)
uggggguggacaugaggaggu

SEQ ID NO: 1875708 - RNA, 13 nt, Human herpesvirus 4 (Epstein-Barr virus)
uccgaggcugaga

SEQ ID NO: 1875709 - RNA, 14 nt, Human herpesvirus 4 (Epstein-Barr virus)
gccugagacagagg

SEQ ID NO: 1875710 - RNA, 12 nt, Human herpesvirus 4 (Epstein-Barr virus)
ccaccuggccag

SEQ ID NO: 1875711 - RNA, 19 nt, Human herpesvirus 4 (Epstein-Barr virus)
cagucaccuuccagacuau

SEQ ID NO: 1875712 - RNA, 14 nt, Human herpesvirus 4 (Epstein-Barr virus)
gaaacgucaggucu

SEQ ID NO: 1875713 - RNA, 12 nt, Human herpesvirus 4 (Epstein-Barr virus)
cgaugcggagga

SEQ ID NO: 1875714 - RNA, 18 nt, Human herpesvirus 4 (Epstein-Barr virus)
cacaggguggggguggac

SEQ ID NO: 1875715 - RNA, 22 nt, Human herpesvirus 4 (Epstein-Barr virus)
ggagcaggaggaggggcaggag

SEQ ID NO: 1875716 - RNA, 18 nt, Human herpesvirus 4 (Epstein-Barr virus)
cacgguggaacaggagca

SEQ ID NO: 1875717 - RNA, 13 nt, Human herpesvirus 4 (Epstein-Barr virus)
cgcaccacagaaa

SEQ ID NO: 1875718 - RNA, 23 nt, Human herpesvirus 4 (Epstein-Barr virus)
gcuccggauucaccggcaccgcc

SEQ ID NO: 1875719 - RNA, 20 nt, Human herpesvirus 4 (Epstein-Barr virus)
ggcccacgccauaccugcac

SEQ ID NO: 1875720 - RNA, 13 nt, Human herpesvirus 4 (Epstein-Barr virus)
aagggaggagugc

SEQ ID NO: 1875721 - RNA, 20 nt, Human herpesvirus 4 (Epstein-Barr virus)
gcccgacccccgggcgcccc

SEQ ID NO: 1875722 - RNA, 15 nt, Human herpesvirus 4 (Epstein-Barr virus)
cuugguuucagccuc

SEQ ID NO: 1875723 - RNA, 19 nt, Human herpesvirus 4 (Epstein-Barr virus)
cacaaccuuggacccugcu

SEQ ID NO: 1875724 - RNA, 14 nt, Human herpesvirus 4 (Epstein-Barr virus)
gcuguaacuguggu

SEQ ID NO: 1875725 - RNA, 19 nt, Human herpesvirus 4 (Epstein-Barr virus)
ccuagccaccguggccagg

SEQ ID NO: 1875726 - RNA, 21 nt, Human herpesvirus 4 (Epstein-Barr virus)
cugccggaguuuucuccccca

SEQ ID NO: 1875727 - RNA, 21 nt, Human herpesvirus 4 (Epstein-Barr virus)
caaaggccuugguuucagccu

SEQ ID NO: 1875728 - RNA, 16 nt, Human herpesvirus 4 (Epstein-Barr virus)
ugguugugcggucugu

SEQ ID NO: 1875729 - RNA, 19 nt, Human herpesvirus 4 (Epstein-Barr virus)
uacaagaguucucugguga

SEQ ID NO: 1875730 - RNA, 23 nt, Human herpesvirus 4 (Epstein-Barr virus)
acuccccucuccauucccagccc

SEQ ID NO: 1875731 - RNA, 17 nt, Human herpesvirus 4 (Epstein-Barr virus)
ggccaggcaccccaucu

SEQ ID NO: 1875732 - RNA, 16 nt, Human herpesvirus 4 (Epstein-Barr virus)
ccucugccuggccggc

SEQ ID NO: 1875733 - RNA, 16 nt, Human herpesvirus 4 (Epstein-Barr virus)
ugcaaguuuggccgcu

SEQ ID NO: 1875734 - RNA, 20 nt, Human herpesvirus 4 (Epstein-Barr virus)
accuuuccaucacugaccca

SEQ ID NO: 1875735 - RNA, 15 nt, Human herpesvirus 4 (Epstein-Barr virus)
cgcagguggcugcug

SEQ ID NO: 1875736 - RNA, 14 nt, Human herpesvirus 4 (Epstein-Barr virus)
ggagccggcggccu

SEQ ID NO: 1875737 - RNA, 18 nt, Human herpesvirus 4 (Epstein-Barr virus)
gccaaccugcucucucug

SEQ ID NO: 1875738 - RNA, 17 nt, Human herpesvirus 4 (Epstein-Barr virus)
ggacgauagcccaggca

SEQ ID NO: 1875739 - RNA, 19 nt, Human herpesvirus 4 (Epstein-Barr virus)
caacccuaacacucuuuuu

SEQ ID NO: 1875740 - RNA, 21 nt, Human herpesvirus 4 (Epstein-Barr virus)
ggcgguuagggaggacacugc

SEQ ID NO: 1875741 - RNA, 20 nt, Human herpesvirus 4 (Epstein-Barr virus)
ugcccucaugcgccagagcg

SEQ ID NO: 1875742 - RNA, 16 nt, Human herpesvirus 4 (Epstein-Barr virus)
gaugcaggaccuagaa

SEQ ID NO: 1875743 - RNA, 16 nt, Human herpesvirus 4 (Epstein-Barr virus)
gaccucccgcccugag

SEQ ID NO: 1875744 - RNA, 17 nt, Human herpesvirus 4 (Epstein-Barr virus)
cauucgugaguccaggg

SEQ ID NO: 1875745 - RNA, 22 nt, Human herpesvirus 4 (Epstein-Barr virus)
gugccuaaacgugauggugcug

SEQ ID NO: 1875746 - RNA, 16 nt, Human herpesvirus 4 (Epstein-Barr virus)
aucuguacgggaacau

SEQ ID NO: 1875747 - RNA, 19 nt, Human herpesvirus 4 (Epstein-Barr virus)
gcugccagagccucugcca

SEQ ID NO: 1875748 - RNA, 18 nt, Human herpesvirus 4 (Epstein-Barr virus)
aagcggcccagcagaucc

SEQ ID NO: 1875749 - RNA, 13 nt, Human herpesvirus 4 (Epstein-Barr virus)
uccaccagcuucu

SEQ ID NO: 1875750 - RNA, 13 nt, Human herpesvirus 4 (Epstein-Barr virus)
caccccugugcag

SEQ ID NO: 1875751 - RNA, 16 nt, Human herpesvirus 4 (Epstein-Barr virus)
gcucaccuauggucac

SEQ ID NO: 1875752 - RNA, 17 nt, Human herpesvirus 4 (Epstein-Barr virus)
caggcagaggaaggcca

SEQ ID NO: 1875753 - RNA, 14 nt, Human herpesvirus 4 (Epstein-Barr virus)
agauggacuugagg

SEQ ID NO: 1875754 - RNA, 20 nt, Human herpesvirus 4 (Epstein-Barr virus)
ggccugggaggugcugaggc

SEQ ID NO: 1875755 - RNA, 13 nt, Human herpesvirus 4 (Epstein-Barr virus)
agaucgccugcca

SEQ ID NO: 1875756 - RNA, 21 nt, Human herpesvirus 4 (Epstein-Barr virus)
agaggcaaacauacaggagga

SEQ ID NO: 1875757 - RNA, 15 nt, Human herpesvirus 4 (Epstein-Barr virus)
caagaaucggguggc

SEQ ID NO: 1875758 - RNA, 17 nt, Human herpesvirus 4 (Epstein-Barr virus)
agccacuacggccacgu

SEQ ID NO: 1875759 - RNA, 19 nt, Human herpesvirus 4 (Epstein-Barr virus)
cccggagucuggacguggc

SEQ ID NO: 1875760 - RNA, 13 nt, Human herpesvirus 4 (Epstein-Barr virus)
ucaucucgcuggc

SEQ ID NO: 1875761 - RNA, 16 nt, Human herpesvirus 4 (Epstein-Barr virus)
gguggcaguauuuugc

SEQ ID NO: 1875762 - RNA, 13 nt, Human herpesvirus 4 (Epstein-Barr virus)
ccucaccaaggac

SEQ ID NO: 1875763 - RNA, 18 nt, Human herpesvirus 4 (Epstein-Barr virus)
cggacuacguguccaugu

SEQ ID NO: 1875764 - RNA, 14 nt, Human herpesvirus 4 (Epstein-Barr virus)
cucgaguucucuag

SEQ ID NO: 1875765 - RNA, 21 nt, Human herpesvirus 4 (Epstein-Barr virus)
agaagcaccucaaccuggaga

SEQ ID NO: 1875766 - RNA, 15 nt, Human herpesvirus 4 (Epstein-Barr virus)
accacgaugacuccc

SEQ ID NO: 1875767 - RNA, 19 nt, Human herpesvirus 4 (Epstein-Barr virus)
uuuaacucuuaaaacuugc

SEQ ID NO: 1875768 - RNA, 21 nt, Human herpesvirus 4 (Epstein-Barr virus)
augguguuaacuuucuccccu

SEQ ID NO: 1875769 - RNA, 15 nt, Human herpesvirus 4 (Epstein-Barr virus)
gguucuccaggcucc

SEQ ID NO: 1875770 - RNA, 12 nt, Human herpesvirus 4 (Epstein-Barr virus)
cggggcugggga

SEQ ID NO: 1875771 - RNA, 19 nt, Human herpesvirus 4 (Epstein-Barr virus)
cguggcuuccagagaggcg

SEQ ID NO: 1875772 - RNA, 13 nt, Human herpesvirus 4 (Epstein-Barr virus)
acaacggccgaga

SEQ ID NO: 1875773 - RNA, 14 nt, Human herpesvirus 4 (Epstein-Barr virus)
aucucgcucagagc

SEQ ID NO: 1875774 - RNA, 15 nt, Human herpesvirus 4 (Epstein-Barr virus)
ccggaggcagacacc

SEQ ID NO: 1875775 - RNA, 17 nt, Human herpesvirus 4 (Epstein-Barr virus)
ucuggaccuggacuggg

SEQ ID NO: 1875776 - RNA, 10 nt, Human herpesvirus 4 (Epstein-Barr virus)
uggccgccgu

SEQ ID NO: 1875777 - RNA, 15 nt, Human herpesvirus 4 (Epstein-Barr virus)
ugcccucuccagcaa

SEQ ID NO: 1875778 - RNA, 11 nt, Human herpesvirus 4 (Epstein-Barr virus)
gggccaggcug

SEQ ID NO: 1875779 - RNA, 16 nt, Human herpesvirus 4 (Epstein-Barr virus)
agcuggcggacuacaa

SEQ ID NO: 1875780 - RNA, 15 nt, Human herpesvirus 4 (Epstein-Barr virus)
uguccagcagggccu

SEQ ID NO: 1875781 - RNA, 14 nt, Human herpesvirus 4 (Epstein-Barr virus)
uaccugaugaguca

SEQ ID NO: 1875782 - RNA, 15 nt, Human herpesvirus 4 (Epstein-Barr virus)
aaggcaguccagggg

SEQ ID NO: 1875783 - RNA, 21 nt, Human herpesvirus 4 (Epstein-Barr virus)
ccacggcccggggguggcagc

SEQ ID NO: 1875784 - RNA, 15 nt, Human herpesvirus 4 (Epstein-Barr virus)
acugcgaucuggacc

SEQ ID NO: 1875785 - RNA, 13 nt, Human herpesvirus 4 (Epstein-Barr virus)
gagcuccgugggc

SEQ ID NO: 1875786 - RNA, 17 nt, Human herpesvirus 4 (Epstein-Barr virus)
uccccugacgcuguggc

SEQ ID NO: 1875787 - RNA, 23 nt, Human herpesvirus 4 (Epstein-Barr virus)
aucaccgccguaaucuguggugg

SEQ ID NO: 1875788 - RNA, 15 nt, Human herpesvirus 4 (Epstein-Barr virus)
gaagcuggccaggcu

SEQ ID NO: 1875789 - RNA, 14 nt, Human herpesvirus 4 (Epstein-Barr virus)
ugccuccagagccc

SEQ ID NO: 1875790 - RNA, 12 nt, Human herpesvirus 4 (Epstein-Barr virus)
cagggcggagga

SEQ ID NO: 1875791 - RNA, 20 nt, Human herpesvirus 4 (Epstein-Barr virus)
cacugauuuugggcacacuu

SEQ ID NO: 1875792 - RNA, 13 nt, Human herpesvirus 4 (Epstein-Barr virus)
caguguggcccga

SEQ ID NO: 1875793 - RNA, 13 nt, Human herpesvirus 4 (Epstein-Barr virus)
ccagcccuccuca

SEQ ID NO: 1875794 - RNA, 12 nt, Human herpesvirus 4 (Epstein-Barr virus)
uccuggccccca

SEQ ID NO: 1875795 - RNA, 19 nt, Human herpesvirus 4 (Epstein-Barr virus)
aaucuucuucauagccuga

SEQ ID NO: 1875796 - RNA, 22 nt, Human herpesvirus 4 (Epstein-Barr virus)
uugucuucccagacucugcuuu

SEQ ID NO: 1875797 - RNA, 11 nt, Human herpesvirus 4 (Epstein-Barr virus)
caccaccccac

SEQ ID NO: 1875798 - RNA, 23 nt, Human herpesvirus 4 (Epstein-Barr virus)
agcgcucuggucgcccccucugc

SEQ ID NO: 1875799 - RNA, 13 nt, Human herpesvirus 4 (Epstein-Barr virus)
ccacucaggaagc

SEQ ID NO: 1875800 - RNA, 16 nt, Human herpesvirus 4 (Epstein-Barr virus)
cccagggacaucccca

SEQ ID NO: 1875801 - RNA, 20 nt, Human herpesvirus 4 (Epstein-Barr virus)
uugcucuucgugcucuucau

SEQ ID NO: 1875802 - RNA, 15 nt, Human herpesvirus 4 (Epstein-Barr virus)
ucccccccagaccug

SEQ ID NO: 1875803 - RNA, 13 nt, Human herpesvirus 4 (Epstein-Barr virus)
caggcucuccagc

SEQ ID NO: 1875804 - RNA, 22 nt, Human herpesvirus 4 (Epstein-Barr virus)
acagccagguguacgcccuggc

SEQ ID NO: 1875805 - RNA, 17 nt, Human herpesvirus 4 (Epstein-Barr virus)
cuaaugccaugcagcgg

SEQ ID NO: 1875806 - RNA, 13 nt, Human herpesvirus 4 (Epstein-Barr virus)
aggggcaggagca

SEQ ID NO: 1875807 - RNA, 17 nt, Human herpesvirus 4 (Epstein-Barr virus)
uaaggaacacggucugg

SEQ ID NO: 1875808 - RNA, 23 nt, Human herpesvirus 4 (Epstein-Barr virus)
ccucacgcgaagggaaacguggg

SEQ ID NO: 1875809 - RNA, 20 nt, Human herpesvirus 4 (Epstein-Barr virus)
gcagcacacgaagccugccu

SEQ ID NO: 1875810 - RNA, 13 nt, Human herpesvirus 4 (Epstein-Barr virus)
cggccgaggccug

SEQ ID NO: 1875811 - RNA, 21 nt, Human herpesvirus 4 (Epstein-Barr virus)
aggggcggugggcgcgugcac

SEQ ID NO: 1875812 - RNA, 17 nt, Human herpesvirus 4 (Epstein-Barr virus)
acacuuuagagcucugg

SEQ ID NO: 1875813 - RNA, 20 nt, Human herpesvirus 4 (Epstein-Barr virus)
ccggaaccugagccugagcc

SEQ ID NO: 1875814 - RNA, 22 nt, Human herpesvirus 4 (Epstein-Barr virus)
agcggcacagauuagaagauga

SEQ ID NO: 1875815 - RNA, 18 nt, Human herpesvirus 4 (Epstein-Barr virus)
gaccucccgcccugagcu

SEQ ID NO: 1875816 - RNA, 22 nt, Human herpesvirus 4 (Epstein-Barr virus)
ugugucccccuccauuccaccc

SEQ ID NO: 1875817 - RNA, 16 nt, Human herpesvirus 4 (Epstein-Barr virus)
cgugccauccucucgg

SEQ ID NO: 1875818 - RNA, 13 nt, Human herpesvirus 4 (Epstein-Barr virus)
aguucccuucucc

SEQ ID NO: 1875819 - RNA, 21 nt, Human herpesvirus 4 (Epstein-Barr virus)
cucucgaggucugcgaugagg

SEQ ID NO: 1875820 - RNA, 16 nt, Human herpesvirus 4 (Epstein-Barr virus)
cgagcggccuccgccg

SEQ ID NO: 1875821 - RNA, 17 nt, Human herpesvirus 4 (Epstein-Barr virus)
cucagcucaaccgccag

SEQ ID NO: 1875822 - RNA, 23 nt, Human herpesvirus 4 (Epstein-Barr virus)
agagccagccggguccgugcggc

SEQ ID NO: 1875823 - RNA, 12 nt, Human herpesvirus 4 (Epstein-Barr virus)
uguccucccggg

SEQ ID NO: 1875824 - RNA, 14 nt, Human herpesvirus 4 (Epstein-Barr virus)
agaggaugauccug

SEQ ID NO: 1875825 - RNA, 16 nt, Human herpesvirus 4 (Epstein-Barr virus)
cgaagcggucucagac

SEQ ID NO: 1875826 - RNA, 17 nt, Human herpesvirus 4 (Epstein-Barr virus)
ccuaaugcauccgcacc

SEQ ID NO: 1875827 - RNA, 20 nt, Human herpesvirus 4 (Epstein-Barr virus)
ccugagcauggcggccuggc

SEQ ID NO: 1875828 - RNA, 14 nt, Human herpesvirus 4 (Epstein-Barr virus)
cuggagccagcgcu

SEQ ID NO: 1875829 - RNA, 13 nt, Human herpesvirus 4 (Epstein-Barr virus)
cagcuggcccacc

SEQ ID NO: 1875830 - RNA, 19 nt, Human herpesvirus 4 (Epstein-Barr virus)
cuggugccagacucucuuc

SEQ ID NO: 1875831 - RNA, 22 nt, Human herpesvirus 4 (Epstein-Barr virus)
ccaaagcgggugcaguaacagg

SEQ ID NO: 1875832 - RNA, 15 nt, Human herpesvirus 4 (Epstein-Barr virus)
acuugaggugggcug

SEQ ID NO: 1875833 - RNA, 22 nt, Human herpesvirus 4 (Epstein-Barr virus)
acucgaagcggucucagacacc

SEQ ID NO: 1875834 - RNA, 16 nt, Human herpesvirus 4 (Epstein-Barr virus)
uacuuucaagccacgc

SEQ ID NO: 1875835 - RNA, 14 nt, Human herpesvirus 4 (Epstein-Barr virus)
accaguggcugccc

SEQ ID NO: 1875836 - RNA, 16 nt, Human herpesvirus 4 (Epstein-Barr virus)
cauaccuacaccaccc

SEQ ID NO: 1875837 - RNA, 12 nt, Human herpesvirus 4 (Epstein-Barr virus)
cugcauggccag

SEQ ID NO: 1875838 - RNA, 18 nt, Human herpesvirus 4 (Epstein-Barr virus)
accaggggcgagcagcgc

SEQ ID NO: 1875839 - RNA, 23 nt, Human herpesvirus 4 (Epstein-Barr virus)
ccucgcaggccccccgcaccagg

SEQ ID NO: 1875840 - RNA, 20 nt, Human herpesvirus 4 (Epstein-Barr virus)
gccucgcgacucgugggaaa

SEQ ID NO: 1875841 - RNA, 10 nt, Human herpesvirus 4 (Epstein-Barr virus)
caggccccca

SEQ ID NO: 1875842 - RNA, 21 nt, Human herpesvirus 4 (Epstein-Barr virus)
gcccugaucugggagaugaga

SEQ ID NO: 1875843 - RNA, 15 nt, Human herpesvirus 4 (Epstein-Barr virus)
ccucugcacaacaca

SEQ ID NO: 1875844 - RNA, 20 nt, Human herpesvirus 4 (Epstein-Barr virus)
cagcagcccggccgaggccu

SEQ ID NO: 1875845 - RNA, 23 nt, Human herpesvirus 4 (Epstein-Barr virus)
uacucuccgccguuccuucagaa

SEQ ID NO: 1875846 - RNA, 23 nt, Human herpesvirus 4 (Epstein-Barr virus)
ggccaccacaucggacgggcagg

SEQ ID NO: 1875847 - RNA, 13 nt, Human herpesvirus 4 (Epstein-Barr virus)
ccuggccagggcg

SEQ ID NO: 1875848 - RNA, 17 nt, Human herpesvirus 4 (Epstein-Barr virus)
ugucuccugacgccaau

SEQ ID NO: 1875849 - RNA, 21 nt, Human herpesvirus 4 (Epstein-Barr virus)
cagccagguguacgcccuggc

SEQ ID NO: 1875850 - RNA, 16 nt, Human herpesvirus 4 (Epstein-Barr virus)
acguccgugagagccu

SEQ ID NO: 1875851 - RNA, 18 nt, Human herpesvirus 4 (Epstein-Barr virus)
ccagggccggaaccugag

SEQ ID NO: 1875852 - RNA, 22 nt, Human herpesvirus 4 (Epstein-Barr virus)
ccguggccccgggagccacggc

SEQ ID NO: 1875853 - RNA, 15 nt, Human herpesvirus 4 (Epstein-Barr virus)
gagcaugcaggucag

SEQ ID NO: 1875854 - RNA, 19 nt, Human herpesvirus 4 (Epstein-Barr virus)
caccuagaaagagccaugg

SEQ ID NO: 1875855 - RNA, 14 nt, Human herpesvirus 4 (Epstein-Barr virus)
gagagcauuucagg

SEQ ID NO: 1875856 - RNA, 14 nt, Human herpesvirus 4 (Epstein-Barr virus)
ugcauggccaggcc

SEQ ID NO: 1875857 - RNA, 13 nt, Human herpesvirus 4 (Epstein-Barr virus)
gucaagagcuucc

SEQ ID NO: 1875858 - RNA, 14 nt, Human herpesvirus 4 (Epstein-Barr virus)
uugaucuucuucuc

SEQ ID NO: 1875859 - RNA, 16 nt, Human herpesvirus 4 (Epstein-Barr virus)
gaguucucuagcaggu

SEQ ID NO: 1875860 - RNA, 15 nt, Human herpesvirus 4 (Epstein-Barr virus)
accggggccuuggca

SEQ ID NO: 1875861 - RNA, 12 nt, Human herpesvirus 4 (Epstein-Barr virus)
ccggcuggccau

SEQ ID NO: 1875862 - RNA, 15 nt, Human herpesvirus 4 (Epstein-Barr virus)
gaguaauugcagugg

SEQ ID NO: 1875863 - RNA, 14 nt, Human herpesvirus 4 (Epstein-Barr virus)
acucuuaaaacuug

SEQ ID NO: 1875864 - RNA, 14 nt, Human herpesvirus 4 (Epstein-Barr virus)
caucgccgccccag

SEQ ID NO: 1875865 - RNA, 18 nt, Human herpesvirus 4 (Epstein-Barr virus)
ccccacacucccuccaga

SEQ ID NO: 1875866 - RNA, 16 nt, Human herpesvirus 4 (Epstein-Barr virus)
agcccaagaagaagcc

SEQ ID NO: 1875867 - RNA, 16 nt, Human herpesvirus 4 (Epstein-Barr virus)
ccaccuccccuguggc

SEQ ID NO: 1875868 - RNA, 11 nt, Human herpesvirus 4 (Epstein-Barr virus)
gggcaccccac

SEQ ID NO: 1875869 - RNA, 22 nt, Human herpesvirus 4 (Epstein-Barr virus)
uacucuuggcagcaguggccag

SEQ ID NO: 1875870 - RNA, 17 nt, Human herpesvirus 4 (Epstein-Barr virus)
uauaacugccagagcug

SEQ ID NO: 1875871 - RNA, 15 nt, Human herpesvirus 4 (Epstein-Barr virus)
agcaaacggccuggc

SEQ ID NO: 1875872 - RNA, 15 nt, Human herpesvirus 4 (Epstein-Barr virus)
ccggcauccagugcg

SEQ ID NO: 1875873 - RNA, 17 nt, Human herpesvirus 4 (Epstein-Barr virus)
cgcuccgcgcucggccu

SEQ ID NO: 1875874 - RNA, 23 nt, Human herpesvirus 4 (Epstein-Barr virus)
acuucgggggcgacugccgccgc

SEQ ID NO: 1875875 - RNA, 22 nt, Human herpesvirus 4 (Epstein-Barr virus)
gcucagacuuagggccggggcc

SEQ ID NO: 1875876 - RNA, 17 nt, Human herpesvirus 4 (Epstein-Barr virus)
uggccagguacgggcug

SEQ ID NO: 1875877 - RNA, 11 nt, Human herpesvirus 4 (Epstein-Barr virus)
acguuggcuuc

SEQ ID NO: 1875878 - RNA, 16 nt, Human herpesvirus 4 (Epstein-Barr virus)
gccacagagcaucaga

SEQ ID NO: 1875879 - RNA, 13 nt, Human herpesvirus 4 (Epstein-Barr virus)
cagaccacccgga

SEQ ID NO: 1875880 - RNA, 14 nt, Human herpesvirus 4 (Epstein-Barr virus)
ccaucugcuucugg

SEQ ID NO: 1875881 - RNA, 22 nt, Human herpesvirus 4 (Epstein-Barr virus)
gggcccuuagcaugggaggcgc

SEQ ID NO: 1875882 - RNA, 15 nt, Human herpesvirus 4 (Epstein-Barr virus)
ugcuguaguggccuu

SEQ ID NO: 1875883 - RNA, 18 nt, Human herpesvirus 4 (Epstein-Barr virus)
acacgcuuuugucugccu

SEQ ID NO: 1875884 - RNA, 17 nt, Human herpesvirus 4 (Epstein-Barr virus)
gcucuucaaccuuggca

SEQ ID NO: 1875885 - RNA, 18 nt, Human herpesvirus 4 (Epstein-Barr virus)
gcuccuggaucuggggcu

SEQ ID NO: 1875886 - RNA, 22 nt, Human herpesvirus 4 (Epstein-Barr virus)
cgggcguugccagacuccgcca

SEQ ID NO: 1875887 - RNA, 19 nt, Human herpesvirus 4 (Epstein-Barr virus)
gggucaacagguggucgug

SEQ ID NO: 1875888 - RNA, 15 nt, Human herpesvirus 4 (Epstein-Barr virus)
guaccagcugguggu

SEQ ID NO: 1875889 - RNA, 22 nt, Human herpesvirus 4 (Epstein-Barr virus)
uaacaagggaagagggaaaaga

SEQ ID NO: 1875890 - RNA, 10 nt, Human herpesvirus 4 (Epstein-Barr virus)
ccguggccuu

SEQ ID NO: 1875891 - RNA, 15 nt, Human herpesvirus 4 (Epstein-Barr virus)
cccggguggugagga

SEQ ID NO: 1875892 - RNA, 22 nt, Human herpesvirus 4 (Epstein-Barr virus)
gacuuuauacauaggucucggc

SEQ ID NO: 1875893 - RNA, 14 nt, Human herpesvirus 4 (Epstein-Barr virus)
gugacacagugccc

SEQ ID NO: 1875894 - RNA, 16 nt, Human herpesvirus 4 (Epstein-Barr virus)
accggggaggccaggu

SEQ ID NO: 1875895 - RNA, 18 nt, Human herpesvirus 4 (Epstein-Barr virus)
cagccagagccagccggg

SEQ ID NO: 1875896 - RNA, 23 nt, Human herpesvirus 4 (Epstein-Barr virus)
gucagcuguguacgugccucaga

SEQ ID NO: 1875897 - RNA, 17 nt, Human herpesvirus 4 (Epstein-Barr virus)
ggccugggaggugcuga

SEQ ID NO: 1875898 - RNA, 16 nt, Human herpesvirus 4 (Epstein-Barr virus)
uuccccccagccugag

SEQ ID NO: 1875899 - RNA, 17 nt, Human herpesvirus 4 (Epstein-Barr virus)
ccaaggcggcugcugag

SEQ ID NO: 1875900 - RNA, 15 nt, Human herpesvirus 4 (Epstein-Barr virus)
caggagucugcugcg

SEQ ID NO: 1875901 - RNA, 21 nt, Human herpesvirus 4 (Epstein-Barr virus)
agugcauggauauagcucugc

SEQ ID NO: 1875902 - RNA, 15 nt, Human herpesvirus 4 (Epstein-Barr virus)
gaaagugcuggccau

SEQ ID NO: 1875903 - RNA, 19 nt, Human herpesvirus 4 (Epstein-Barr virus)
gacagguacuaacacgcaa

SEQ ID NO: 1875904 - RNA, 21 nt, Human herpesvirus 4 (Epstein-Barr virus)
cgggugcacacgcucagcuca

SEQ ID NO: 1875905 - RNA, 14 nt, Human herpesvirus 4 (Epstein-Barr virus)
ccggcauccagugc

SEQ ID NO: 1875906 - RNA, 20 nt, Human herpesvirus 4 (Epstein-Barr virus)
uacaaacacgggccuggggc

SEQ ID NO: 1875907 - RNA, 20 nt, Human herpesvirus 4 (Epstein-Barr virus)
cgugguggcauuaaugucca

SEQ ID NO: 1875908 - RNA, 16 nt, Human herpesvirus 4 (Epstein-Barr virus)
cccaaagcgggugcag

SEQ ID NO: 1875909 - RNA, 17 nt, Human herpesvirus 4 (Epstein-Barr virus)
gugcagggauugggcuu

SEQ ID NO: 1875910 - RNA, 13 nt, Human herpesvirus 4 (Epstein-Barr virus)
gucaccaggccug

SEQ ID NO: 1875911 - RNA, 19 nt, Human herpesvirus 4 (Epstein-Barr virus)
caacccccggcucucaggc

SEQ ID NO: 1875912 - RNA, 14 nt, Human herpesvirus 4 (Epstein-Barr virus)
cgccaugcucaggg

SEQ ID NO: 1875913 - RNA, 17 nt, Human herpesvirus 4 (Epstein-Barr virus)
ggcccuuugccuggggc

SEQ ID NO: 1875914 - RNA, 18 nt, Human herpesvirus 4 (Epstein-Barr virus)
ggagccagcgcugggggu

SEQ ID NO: 1875915 - RNA, 19 nt, Human herpesvirus 4 (Epstein-Barr virus)
ggcagacaccaccugcucg

SEQ ID NO: 1875916 - RNA, 20 nt, Human herpesvirus 4 (Epstein-Barr virus)
gacacuuuagagcucuggag

SEQ ID NO: 1875917 - RNA, 20 nt, Human herpesvirus 4 (Epstein-Barr virus)
ccaaaaugcacccggacaug

SEQ ID NO: 1875918 - RNA, 15 nt, Human herpesvirus 4 (Epstein-Barr virus)
gccaugcaggccugg

SEQ ID NO: 1875919 - RNA, 12 nt, Human herpesvirus 4 (Epstein-Barr virus)
agucgaagcucu

SEQ ID NO: 1875920 - RNA, 15 nt, Human herpesvirus 4 (Epstein-Barr virus)
uggugaugcuugugc

SEQ ID NO: 1875921 - RNA, 16 nt, Human herpesvirus 4 (Epstein-Barr virus)
cagcucggccagcagg

SEQ ID NO: 1875922 - RNA, 16 nt, Human herpesvirus 4 (Epstein-Barr virus)
uaugcagaaggggccc

SEQ ID NO: 1875923 - RNA, 14 nt, Human herpesvirus 4 (Epstein-Barr virus)
caacgcauccacca

SEQ ID NO: 1875924 - RNA, 19 nt, Human herpesvirus 4 (Epstein-Barr virus)
gaaaguuguugggugaaag

SEQ ID NO: 1875925 - RNA, 20 nt, Human herpesvirus 4 (Epstein-Barr virus)
ucugggcagccagagccagc

SEQ ID NO: 1875926 - RNA, 13 nt, Human herpesvirus 4 (Epstein-Barr virus)
cugucuguaaacu

SEQ ID NO: 1875927 - RNA, 17 nt, Human herpesvirus 4 (Epstein-Barr virus)
guggccgucuggcaggg

SEQ ID NO: 1875928 - RNA, 16 nt, Human herpesvirus 4 (Epstein-Barr virus)
cagcagacaaggacag

SEQ ID NO: 1875929 - RNA, 15 nt, Human herpesvirus 4 (Epstein-Barr virus)
ccaggagucugcugc

SEQ ID NO: 1875930 - RNA, 20 nt, Human herpesvirus 4 (Epstein-Barr virus)
uggaucuacuuauuggagau

SEQ ID NO: 1875931 - RNA, 16 nt, Human herpesvirus 4 (Epstein-Barr virus)
gcccugucccuggagc

SEQ ID NO: 1875932 - RNA, 21 nt, Human herpesvirus 4 (Epstein-Barr virus)
gugcugccugggggcuuuguu

SEQ ID NO: 1875933 - RNA, 17 nt, Human herpesvirus 4 (Epstein-Barr virus)
gucccaggccuuagccc

SEQ ID NO: 1875934 - RNA, 15 nt, Human herpesvirus 4 (Epstein-Barr virus)
caccugcagggcuuc

SEQ ID NO: 1875935 - RNA, 14 nt, Human herpesvirus 4 (Epstein-Barr virus)
agcccuuggaacug

SEQ ID NO: 1875936 - RNA, 17 nt, Human herpesvirus 4 (Epstein-Barr virus)
cuggucgcccccucugc

SEQ ID NO: 1875937 - RNA, 15 nt, Human herpesvirus 4 (Epstein-Barr virus)
ccccggccucccgcu

SEQ ID NO: 1875938 - RNA, 15 nt, Human herpesvirus 4 (Epstein-Barr virus)
gugaucauggaaacc

SEQ ID NO: 1875939 - RNA, 19 nt, Human herpesvirus 4 (Epstein-Barr virus)
ugccuccggccgccccggg

SEQ ID NO: 1875940 - RNA, 19 nt, Human herpesvirus 4 (Epstein-Barr virus)
acguggguccccucugccg

SEQ ID NO: 1875941 - RNA, 18 nt, Human herpesvirus 4 (Epstein-Barr virus)
caccagggaggccuggga

SEQ ID NO: 1875942 - RNA, 15 nt, Human herpesvirus 4 (Epstein-Barr virus)
uuucagcaucacagg

SEQ ID NO: 1875943 - RNA, 14 nt, Human herpesvirus 4 (Epstein-Barr virus)
aguuuacuuucaag

SEQ ID NO: 1875944 - RNA, 22 nt, Human herpesvirus 4 (Epstein-Barr virus)
acacgccagagacaaggcaggc

SEQ ID NO: 1875945 - RNA, 13 nt, Human herpesvirus 4 (Epstein-Barr virus)
acuuagggccggg

SEQ ID NO: 1875946 - RNA, 15 nt, Human herpesvirus 4 (Epstein-Barr virus)
aggucgccggagguc

SEQ ID NO: 1875947 - RNA, 19 nt, Human herpesvirus 4 (Epstein-Barr virus)
cgaagcucuuggucaaggu

SEQ ID NO: 1875948 - RNA, 19 nt, Human herpesvirus 4 (Epstein-Barr virus)
cagcgccagcagggcacag

SEQ ID NO: 1875949 - RNA, 11 nt, Human herpesvirus 4 (Epstein-Barr virus)
gccuggggcuc

SEQ ID NO: 1875950 - RNA, 21 nt, Human herpesvirus 4 (Epstein-Barr virus)
uggacuggggugugaagggca

SEQ ID NO: 1875951 - RNA, 14 nt, Human herpesvirus 4 (Epstein-Barr virus)
cggcggcugcugcc

SEQ ID NO: 1875952 - RNA, 21 nt, Human herpesvirus 4 (Epstein-Barr virus)
aguccucauggcaggagaggc

SEQ ID NO: 1875953 - RNA, 13 nt, Human herpesvirus 4 (Epstein-Barr virus)
ucggccuccuggc

SEQ ID NO: 1875954 - RNA, 12 nt, Human herpesvirus 4 (Epstein-Barr virus)
agagcggcgaga

SEQ ID NO: 1875955 - RNA, 13 nt, Human herpesvirus 4 (Epstein-Barr virus)
auuauugauguga

SEQ ID NO: 1875956 - RNA, 18 nt, Human herpesvirus 4 (Epstein-Barr virus)
acugcguccaccuggcca

SEQ ID NO: 1875957 - RNA, 17 nt, Human herpesvirus 4 (Epstein-Barr virus)
cuuucaguggucaccgg

SEQ ID NO: 1875958 - RNA, 16 nt, Human herpesvirus 4 (Epstein-Barr virus)
cuucugucucggccuc

SEQ ID NO: 1875959 - RNA, 16 nt, Human herpesvirus 4 (Epstein-Barr virus)
gcuuuugucugccugg

SEQ ID NO: 1875960 - RNA, 19 nt, Human herpesvirus 4 (Epstein-Barr virus)
aggagcaggaggaggggca

SEQ ID NO: 1875961 - RNA, 18 nt, Human herpesvirus 4 (Epstein-Barr virus)
augccaaagcugaagaac

SEQ ID NO: 1875962 - RNA, 12 nt, Human herpesvirus 4 (Epstein-Barr virus)
ugcugccugggg

SEQ ID NO: 1875963 - RNA, 21 nt, Human herpesvirus 4 (Epstein-Barr virus)
caccacccccaccacccccac

SEQ ID NO: 1875964 - RNA, 12 nt, Human herpesvirus 4 (Epstein-Barr virus)
gcgccugcucca

SEQ ID NO: 1875965 - RNA, 15 nt, Human herpesvirus 4 (Epstein-Barr virus)
ccggcgccaccugca

SEQ ID NO: 1875966 - RNA, 14 nt, Human herpesvirus 4 (Epstein-Barr virus)
gacccgucgggcca

SEQ ID NO: 1875967 - RNA, 18 nt, Human herpesvirus 4 (Epstein-Barr virus)
gcagcccccuccuccagg

SEQ ID NO: 1875968 - RNA, 15 nt, Human herpesvirus 4 (Epstein-Barr virus)
gaaacuugggggcag

SEQ ID NO: 1875969 - RNA, 21 nt, Human herpesvirus 4 (Epstein-Barr virus)
gcaaccaauguaucccaaaua

SEQ ID NO: 1875970 - RNA, 16 nt, Human herpesvirus 4 (Epstein-Barr virus)
caucaagcagaaaggc

SEQ ID NO: 1875971 - RNA, 19 nt, Human herpesvirus 4 (Epstein-Barr virus)
ugucuaacacgcuuuuguc

SEQ ID NO: 1875972 - RNA, 14 nt, Human herpesvirus 4 (Epstein-Barr virus)
cgcggugguggccc

SEQ ID NO: 1875973 - RNA, 20 nt, Human herpesvirus 4 (Epstein-Barr virus)
cggugggaucaugaagcccc

SEQ ID NO: 1875974 - RNA, 22 nt, Human herpesvirus 4 (Epstein-Barr virus)
cacuggaugcaggaccuagaau

SEQ ID NO: 1875975 - RNA, 13 nt, Human herpesvirus 4 (Epstein-Barr virus)
ccugcggcccacu

SEQ ID NO: 1875976 - RNA, 21 nt, Human herpesvirus 4 (Epstein-Barr virus)
cccaccuuuuaauucucuucu

SEQ ID NO: 1875977 - RNA, 14 nt, Human herpesvirus 4 (Epstein-Barr virus)
gaacgugacaggca

SEQ ID NO: 1875978 - RNA, 17 nt, Human herpesvirus 4 (Epstein-Barr virus)
cuacaaccccuuccacg

SEQ ID NO: 1875979 - RNA, 19 nt, Human herpesvirus 4 (Epstein-Barr virus)
uccccauagacucccaugu

SEQ ID NO: 1875980 - RNA, 22 nt, Human herpesvirus 4 (Epstein-Barr virus)
aggaaggggccucggccugggg

SEQ ID NO: 1875981 - RNA, 16 nt, Human herpesvirus 4 (Epstein-Barr virus)
cauuguccucaccaag

SEQ ID NO: 1875982 - RNA, 15 nt, Human herpesvirus 4 (Epstein-Barr virus)
ucauggccgacgagg

SEQ ID NO: 1875983 - RNA, 22 nt, Human herpesvirus 4 (Epstein-Barr virus)
caccuggcuguacgccgccgcc

SEQ ID NO: 1875984 - RNA, 17 nt, Human herpesvirus 4 (Epstein-Barr virus)
uagaaugacagccuggu

SEQ ID NO: 1875985 - RNA, 10 nt, Human herpesvirus 4 (Epstein-Barr virus)
gucucagagg

SEQ ID NO: 1875986 - RNA, 20 nt, Human herpesvirus 4 (Epstein-Barr virus)
ggcucgccucauccuggccc

SEQ ID NO: 1875987 - RNA, 22 nt, Human herpesvirus 4 (Epstein-Barr virus)
cccugcaaacugacacacaggc

SEQ ID NO: 1875988 - RNA, 14 nt, Human herpesvirus 4 (Epstein-Barr virus)
ugccggaguuuucu

SEQ ID NO: 1875989 - RNA, 14 nt, Human herpesvirus 4 (Epstein-Barr virus)
gccugccaaagagc

SEQ ID NO: 1875990 - RNA, 18 nt, Human herpesvirus 4 (Epstein-Barr virus)
cacaagagccaucaccuc

SEQ ID NO: 1875991 - RNA, 15 nt, Human herpesvirus 4 (Epstein-Barr virus)
agggugaggcccagc

SEQ ID NO: 1875992 - RNA, 17 nt, Human herpesvirus 4 (Epstein-Barr virus)
ccccagcuucugaggcg

SEQ ID NO: 1875993 - RNA, 15 nt, Human herpesvirus 4 (Epstein-Barr virus)
uuaacauggacaugc

SEQ ID NO: 1875994 - RNA, 22 nt, Human herpesvirus 4 (Epstein-Barr virus)
gccuggcucaaacgcugcuugg

SEQ ID NO: 1875995 - RNA, 18 nt, Human herpesvirus 4 (Epstein-Barr virus)
ggcucggggcuggggaga

SEQ ID NO: 1875996 - RNA, 15 nt, Human herpesvirus 4 (Epstein-Barr virus)
cggcggaggccgagc

SEQ ID NO: 1875997 - RNA, 15 nt, Human herpesvirus 4 (Epstein-Barr virus)
gagagaagagagcgg

SEQ ID NO: 1875998 - RNA, 17 nt, Human herpesvirus 4 (Epstein-Barr virus)
cguggccaggcccgagg

SEQ ID NO: 1875999 - RNA, 17 nt, Human herpesvirus 4 (Epstein-Barr virus)
ggggcggguauagagca

SEQ ID NO: 1876000 - RNA, 23 nt, Human herpesvirus 4 (Epstein-Barr virus)
guagauggcgagacucuugaaga

SEQ ID NO: 1876001 - RNA, 10 nt, Human herpesvirus 4 (Epstein-Barr virus)
agcaggaggg

SEQ ID NO: 1876002 - RNA, 23 nt, Human herpesvirus 4 (Epstein-Barr virus)
gacugggucgugguuuucugccc

SEQ ID NO: 1876003 - RNA, 15 nt, Human herpesvirus 4 (Epstein-Barr virus)
aguggacaaggcagu

SEQ ID NO: 1876004 - RNA, 22 nt, Human herpesvirus 4 (Epstein-Barr virus)
guaaaauuuacaccugacccau

SEQ ID NO: 1876005 - RNA, 15 nt, Human herpesvirus 4 (Epstein-Barr virus)
uuacugggaaugccu

SEQ ID NO: 1876006 - RNA, 12 nt, Human herpesvirus 4 (Epstein-Barr virus)
cauggggcucug

SEQ ID NO: 1876007 - RNA, 14 nt, Human herpesvirus 4 (Epstein-Barr virus)
gcuggugcaccugc

SEQ ID NO: 1876008 - RNA, 18 nt, Human herpesvirus 4 (Epstein-Barr virus)
ccuccgccgccgcagccg

SEQ ID NO: 1876009 - RNA, 21 nt, Human herpesvirus 4 (Epstein-Barr virus)
cguuccuggccauggccgaga

SEQ ID NO: 1876010 - RNA, 16 nt, Human herpesvirus 4 (Epstein-Barr virus)
cggggagcggcaaggg

SEQ ID NO: 1876011 - RNA, 14 nt, Human herpesvirus 4 (Epstein-Barr virus)
auccccagcccagc

SEQ ID NO: 1876012 - RNA, 13 nt, Human herpesvirus 4 (Epstein-Barr virus)
cccuuucuaccag

SEQ ID NO: 1876013 - RNA, 20 nt, Human herpesvirus 4 (Epstein-Barr virus)
agguuuagcuauuccaccaa

SEQ ID NO: 1876014 - RNA, 17 nt, Human herpesvirus 4 (Epstein-Barr virus)
cuuacauucuuauugaa

SEQ ID NO: 1876015 - RNA, 19 nt, Human herpesvirus 4 (Epstein-Barr virus)
ggccucuacgccaggcucg

SEQ ID NO: 1876016 - RNA, 18 nt, Human herpesvirus 4 (Epstein-Barr virus)
ggacgaggacggggaaga

SEQ ID NO: 1876017 - RNA, 22 nt, Human herpesvirus 4 (Epstein-Barr virus)
ucuccagcgucauuucuuccaa

SEQ ID NO: 1876018 - RNA, 17 nt, Human herpesvirus 4 (Epstein-Barr virus)
uguguaaccucacugua

SEQ ID NO: 1876019 - RNA, 18 nt, Human herpesvirus 4 (Epstein-Barr virus)
acacgggggugcccccac

SEQ ID NO: 1876020 - RNA, 18 nt, Human herpesvirus 4 (Epstein-Barr virus)
agcugccucccugccccu

SEQ ID NO: 1876021 - RNA, 14 nt, Human herpesvirus 4 (Epstein-Barr virus)
acugcgaugagggc

SEQ ID NO: 1876022 - RNA, 22 nt, Human herpesvirus 4 (Epstein-Barr virus)
caacugcuauucugagcaccaa

SEQ ID NO: 1876023 - RNA, 15 nt, Human herpesvirus 4 (Epstein-Barr virus)
augaacccuggggca

SEQ ID NO: 1876024 - RNA, 17 nt, Human herpesvirus 4 (Epstein-Barr virus)
cagguagcaaggacccg

SEQ ID NO: 1876025 - RNA, 19 nt, Human herpesvirus 4 (Epstein-Barr virus)
ccguuauugaaaccacgcc

SEQ ID NO: 1876026 - RNA, 21 nt, Human herpesvirus 4 (Epstein-Barr virus)
ucuacaucccauaccuacacc

SEQ ID NO: 1876027 - RNA, 22 nt, Human herpesvirus 4 (Epstein-Barr virus)
aucucccgcuagauggcgcccu

SEQ ID NO: 1876028 - RNA, 16 nt, Human herpesvirus 4 (Epstein-Barr virus)
cacacuuaacuugacu

SEQ ID NO: 1876029 - RNA, 24 nt, Human herpesvirus 4 (Epstein-Barr virus)
uuacugcccagccuacucuccacu

SEQ ID NO: 1876030 - RNA, 22 nt, Human herpesvirus 4 (Epstein-Barr virus)
uccaugcaaguggaugcaucua

SEQ ID NO: 1876031 - RNA, 22 nt, Human herpesvirus 4 (Epstein-Barr virus)
caggccgccaugcucagggcca

SEQ ID NO: 1876032 - RNA, 16 nt, Human herpesvirus 4 (Epstein-Barr virus)
cccgggggaggagaag

SEQ ID NO: 1876033 - RNA, 16 nt, Human herpesvirus 4 (Epstein-Barr virus)
aaugaccgugcaugca

SEQ ID NO: 1876034 - RNA, 18 nt, Human herpesvirus 4 (Epstein-Barr virus)
gcaugccaccgugaaguu

SEQ ID NO: 1876035 - RNA, 14 nt, Human herpesvirus 4 (Epstein-Barr virus)
uggcuacuuugugu

SEQ ID NO: 1876036 - RNA, 14 nt, Human herpesvirus 4 (Epstein-Barr virus)
cccaguccgcgacc

SEQ ID NO: 1876037 - RNA, 16 nt, Human herpesvirus 4 (Epstein-Barr virus)
ucaucucaagggagga

SEQ ID NO: 1876038 - RNA, 16 nt, Human herpesvirus 4 (Epstein-Barr virus)
gucaccugcacagauc

SEQ ID NO: 1876039 - RNA, 14 nt, Human herpesvirus 4 (Epstein-Barr virus)
gcaccuagcccacu

SEQ ID NO: 1876040 - RNA, 14 nt, Human herpesvirus 4 (Epstein-Barr virus)
aaugacuaugagga

SEQ ID NO: 1876041 - RNA, 18 nt, Human herpesvirus 4 (Epstein-Barr virus)
gagcuguaacugugguuu

SEQ ID NO: 1876042 - RNA, 19 nt, Human herpesvirus 4 (Epstein-Barr virus)
agucgcguacucuguggag

SEQ ID NO: 1876043 - RNA, 18 nt, Human herpesvirus 4 (Epstein-Barr virus)
accuguuucggcgccgcc

SEQ ID NO: 1876044 - RNA, 21 nt, Human herpesvirus 4 (Epstein-Barr virus)
gagucacaccccacggccaug

SEQ ID NO: 1876045 - RNA, 23 nt, Human herpesvirus 4 (Epstein-Barr virus)
agagcagauuuccgucagccagg

SEQ ID NO: 1876046 - RNA, 22 nt, Human herpesvirus 4 (Epstein-Barr virus)
caaaccaugacaucacagagga

SEQ ID NO: 1876047 - RNA, 19 nt, Human herpesvirus 4 (Epstein-Barr virus)
cuugccguggcgccugggg

SEQ ID NO: 1876048 - RNA, 19 nt, Human herpesvirus 4 (Epstein-Barr virus)
ccugucugacuuggccccu

SEQ ID NO: 1876049 - RNA, 18 nt, Human herpesvirus 4 (Epstein-Barr virus)
gucucggcacccaggcag

SEQ ID NO: 1876050 - RNA, 20 nt, Human herpesvirus 4 (Epstein-Barr virus)
cagcgcggcagaggccucuc

SEQ ID NO: 1876051 - RNA, 15 nt, Human herpesvirus 4 (Epstein-Barr virus)
gcuacuugcucaggu

SEQ ID NO: 1876052 - RNA, 11 nt, Human herpesvirus 4 (Epstein-Barr virus)
ccauggccagg

SEQ ID NO: 1876053 - RNA, 22 nt, Human herpesvirus 4 (Epstein-Barr virus)
cugagccacuccggacgcagag

SEQ ID NO: 1876054 - RNA, 14 nt, Human herpesvirus 4 (Epstein-Barr virus)
uaaauaaacucauc

SEQ ID NO: 1876055 - RNA, 14 nt, Human herpesvirus 4 (Epstein-Barr virus)
ccuguguccugggc

SEQ ID NO: 1876056 - RNA, 13 nt, Human herpesvirus 4 (Epstein-Barr virus)
ggcugcuggcggc

SEQ ID NO: 1876057 - RNA, 23 nt, Human herpesvirus 4 (Epstein-Barr virus)
ggaccagaaggcuccggcggcag

SEQ ID NO: 1876058 - RNA, 20 nt, Human herpesvirus 4 (Epstein-Barr virus)
ccguugugaccgccaccggc

SEQ ID NO: 1876059 - RNA, 18 nt, Human herpesvirus 4 (Epstein-Barr virus)
ggagaugaccuccuacac

SEQ ID NO: 1876060 - RNA, 19 nt, Human herpesvirus 4 (Epstein-Barr virus)
agauuagggguaacccugu

SEQ ID NO: 1876061 - RNA, 13 nt, Human herpesvirus 4 (Epstein-Barr virus)
ggaggaagauggc

SEQ ID NO: 1876062 - RNA, 17 nt, Human herpesvirus 4 (Epstein-Barr virus)
gaaugcccccgggggcg

SEQ ID NO: 1876063 - RNA, 22 nt, Human herpesvirus 4 (Epstein-Barr virus)
cucucgaggucugcgaugaggc

SEQ ID NO: 1876064 - RNA, 16 nt, Human herpesvirus 4 (Epstein-Barr virus)
gauggcaaagguccca

SEQ ID NO: 1876065 - RNA, 22 nt, Human herpesvirus 4 (Epstein-Barr virus)
caucggggcggacgccuccucc

SEQ ID NO: 1876066 - RNA, 18 nt, Human herpesvirus 4 (Epstein-Barr virus)
cuucugggaacaccccca

SEQ ID NO: 1876067 - RNA, 12 nt, Human herpesvirus 4 (Epstein-Barr virus)
gcuuuucuccuc

SEQ ID NO: 1876068 - RNA, 17 nt, Human herpesvirus 4 (Epstein-Barr virus)
agccacauucuggaacu

SEQ ID NO: 1876069 - RNA, 18 nt, Human herpesvirus 4 (Epstein-Barr virus)
cuuagagucccugcgcca

SEQ ID NO: 1876070 - RNA, 13 nt, Human herpesvirus 4 (Epstein-Barr virus)
augcaguggguga

SEQ ID NO: 1876071 - RNA, 18 nt, Human herpesvirus 4 (Epstein-Barr virus)
cggcuagccugacuaagg

SEQ ID NO: 1876072 - RNA, 16 nt, Human herpesvirus 4 (Epstein-Barr virus)
ggaggaaacaggagga

SEQ ID NO: 1876073 - RNA, 14 nt, Human herpesvirus 4 (Epstein-Barr virus)
uauuuacaaacacu

SEQ ID NO: 1876074 - RNA, 22 nt, Human herpesvirus 4 (Epstein-Barr virus)
gcuccagugccuccgccugagc

SEQ ID NO: 1876075 - RNA, 15 nt, Human herpesvirus 4 (Epstein-Barr virus)
uccacucccagucca

SEQ ID NO: 1876076 - RNA, 13 nt, Human herpesvirus 4 (Epstein-Barr virus)
aauucagaccuga

SEQ ID NO: 1876077 - RNA, 17 nt, Human herpesvirus 4 (Epstein-Barr virus)
aggugggcugacacaga

SEQ ID NO: 1876078 - RNA, 15 nt, Human herpesvirus 4 (Epstein-Barr virus)
gucuggcagggggcc

SEQ ID NO: 1876079 - RNA, 13 nt, Human herpesvirus 4 (Epstein-Barr virus)
ggacaagacaguc

SEQ ID NO: 1876080 - RNA, 20 nt, Human herpesvirus 4 (Epstein-Barr virus)
gguguucccagaagagccag

SEQ ID NO: 1876081 - RNA, 16 nt, Human herpesvirus 4 (Epstein-Barr virus)
caacaggugcccgagc

SEQ ID NO: 1876082 - RNA, 19 nt, Human herpesvirus 4 (Epstein-Barr virus)
ggcccccagcuucugaggc

SEQ ID NO: 1876083 - RNA, 13 nt, Human herpesvirus 4 (Epstein-Barr virus)
agaugcugccgcu

SEQ ID NO: 1876084 - RNA, 23 nt, Human herpesvirus 4 (Epstein-Barr virus)
uagcccaggcacaucuggcaccu

SEQ ID NO: 1876085 - RNA, 13 nt, Human herpesvirus 4 (Epstein-Barr virus)
gcugccugggggc

SEQ ID NO: 1876086 - RNA, 16 nt, Human herpesvirus 4 (Epstein-Barr virus)
gcucucguugccaaaa

SEQ ID NO: 1876087 - RNA, 18 nt, Human herpesvirus 4 (Epstein-Barr virus)
augguguccggagacccc

SEQ ID NO: 1876088 - RNA, 13 nt, Human herpesvirus 4 (Epstein-Barr virus)
cuggaccagaagg

SEQ ID NO: 1876089 - RNA, 12 nt, Human herpesvirus 4 (Epstein-Barr virus)
guugucuuccca

SEQ ID NO: 1876090 - RNA, 17 nt, Human herpesvirus 4 (Epstein-Barr virus)
aggccagguagcccagc

SEQ ID NO: 1876091 - RNA, 22 nt, Human herpesvirus 4 (Epstein-Barr virus)
gugaaauaaaagcuucugguug

SEQ ID NO: 1876092 - RNA, 16 nt, Human herpesvirus 4 (Epstein-Barr virus)
aggucuccagagggca

SEQ ID NO: 1876093 - RNA, 19 nt, Human herpesvirus 4 (Epstein-Barr virus)
cacuugugguucuccugau

SEQ ID NO: 1876094 - RNA, 16 nt, Human herpesvirus 4 (Epstein-Barr virus)
cagaccugugugcugu

SEQ ID NO: 1876095 - RNA, 12 nt, Human herpesvirus 4 (Epstein-Barr virus)
uaaucuggaugu

SEQ ID NO: 1876096 - RNA, 21 nt, Human herpesvirus 4 (Epstein-Barr virus)
ccucagagggggugccugugc

SEQ ID NO: 1876097 - RNA, 18 nt, Human herpesvirus 4 (Epstein-Barr virus)
ccugucuccccucgagcg

SEQ ID NO: 1876098 - RNA, 14 nt, Human herpesvirus 4 (Epstein-Barr virus)
acugucacaccagu

SEQ ID NO: 1876099 - RNA, 14 nt, Human herpesvirus 4 (Epstein-Barr virus)
gucagaccugaaga

SEQ ID NO: 1876100 - RNA, 15 nt, Human herpesvirus 4 (Epstein-Barr virus)
ggccugcuggccgag

SEQ ID NO: 1876101 - RNA, 17 nt, Human herpesvirus 4 (Epstein-Barr virus)
gguccuguuccggggcg

SEQ ID NO: 1876102 - RNA, 16 nt, Human herpesvirus 4 (Epstein-Barr virus)
ccugacugacucuccc

SEQ ID NO: 1876103 - RNA, 18 nt, Human herpesvirus 4 (Epstein-Barr virus)
cccauccccagcccagcc

SEQ ID NO: 1876104 - RNA, 22 nt, Human herpesvirus 4 (Epstein-Barr virus)
ccagcaggcucaggccgccgca

SEQ ID NO: 1876105 - RNA, 14 nt, Human herpesvirus 4 (Epstein-Barr virus)
ggggagggagcccg

SEQ ID NO: 1876106 - RNA, 16 nt, Human herpesvirus 4 (Epstein-Barr virus)
ucuauaaaaauucaga

SEQ ID NO: 1876107 - RNA, 21 nt, Human herpesvirus 4 (Epstein-Barr virus)
cggugcugccagagccucugc

SEQ ID NO: 1876108 - RNA, 20 nt, Human herpesvirus 4 (Epstein-Barr virus)
gacguggguccccucugccg

SEQ ID NO: 1876109 - RNA, 21 nt, Human herpesvirus 4 (Epstein-Barr virus)
ucagccaccuccccuguggcc

SEQ ID NO: 1876110 - RNA, 16 nt, Human herpesvirus 4 (Epstein-Barr virus)
gcauggauauagcucu

SEQ ID NO: 1876111 - RNA, 11 nt, Human herpesvirus 4 (Epstein-Barr virus)
acauuggcagc

SEQ ID NO: 1876112 - RNA, 16 nt, Human herpesvirus 4 (Epstein-Barr virus)
acuucuggaacauuug

SEQ ID NO: 1876113 - RNA, 12 nt, Human herpesvirus 4 (Epstein-Barr virus)
aagcgggccuga

SEQ ID NO: 1876114 - RNA, 17 nt, Human herpesvirus 4 (Epstein-Barr virus)
caccggggaggccaggu

SEQ ID NO: 1876115 - RNA, 22 nt, Human herpesvirus 4 (Epstein-Barr virus)
augagggacguaucugggcacu

SEQ ID NO: 1876116 - RNA, 16 nt, Human herpesvirus 4 (Epstein-Barr virus)
ccguaaucuguggugg

SEQ ID NO: 1876117 - RNA, 12 nt, Human herpesvirus 4 (Epstein-Barr virus)
gcauccuaggca

SEQ ID NO: 1876118 - RNA, 17 nt, Human herpesvirus 4 (Epstein-Barr virus)
agcagaaggccauggag

SEQ ID NO: 1876119 - RNA, 11 nt, Human herpesvirus 4 (Epstein-Barr virus)
cuggagcuggu

SEQ ID NO: 1876120 - RNA, 16 nt, Human herpesvirus 4 (Epstein-Barr virus)
agauagccggccaggc

SEQ ID NO: 1876121 - RNA, 13 nt, Human herpesvirus 4 (Epstein-Barr virus)
ccucggugguggg

SEQ ID NO: 1876122 - RNA, 14 nt, Human herpesvirus 4 (Epstein-Barr virus)
uucugucucggccu

SEQ ID NO: 1876123 - RNA, 16 nt, Human herpesvirus 4 (Epstein-Barr virus)
gccaggcuggugacaa

SEQ ID NO: 1876124 - RNA, 22 nt, Human herpesvirus 4 (Epstein-Barr virus)
cauucccaaguguuuccagaca

SEQ ID NO: 1876125 - RNA, 15 nt, Human herpesvirus 4 (Epstein-Barr virus)
cugauggccuggaga

SEQ ID NO: 1876126 - RNA, 16 nt, Human herpesvirus 4 (Epstein-Barr virus)
aacugggcaucgggcu

SEQ ID NO: 1876127 - RNA, 17 nt, Human herpesvirus 4 (Epstein-Barr virus)
gcuucuuuuuggugaaa

SEQ ID NO: 1876128 - RNA, 21 nt, Human herpesvirus 4 (Epstein-Barr virus)
gaacugggaugaacccugggg

SEQ ID NO: 1876129 - RNA, 16 nt, Human herpesvirus 4 (Epstein-Barr virus)
caagauuguuccaggu

SEQ ID NO: 1876130 - RNA, 16 nt, Human herpesvirus 4 (Epstein-Barr virus)
accggcgcgggagccg

SEQ ID NO: 1876131 - RNA, 22 nt, Human herpesvirus 4 (Epstein-Barr virus)
gcccaccccacacucccuccag

SEQ ID NO: 1876132 - RNA, 17 nt, Human herpesvirus 4 (Epstein-Barr virus)
ccacacucccuccagaa

SEQ ID NO: 1876133 - RNA, 22 nt, Human herpesvirus 4 (Epstein-Barr virus)
aggccggggcgauaccuugggc

SEQ ID NO: 1876134 - RNA, 20 nt, Human herpesvirus 4 (Epstein-Barr virus)
gaagcagauagccggccagg

SEQ ID NO: 1876135 - RNA, 15 nt, Human herpesvirus 4 (Epstein-Barr virus)
caaccugauuccccc

SEQ ID NO: 1876136 - RNA, 20 nt, Human herpesvirus 4 (Epstein-Barr virus)
gcaaugggacgucuuguaaa

SEQ ID NO: 1876137 - RNA, 20 nt, Human herpesvirus 4 (Epstein-Barr virus)
gcaugcuuagugccccccuu

SEQ ID NO: 1876138 - RNA, 23 nt, Human herpesvirus 4 (Epstein-Barr virus)
aguaagaugcauacgcugaguga

SEQ ID NO: 1876139 - RNA, 20 nt, Human herpesvirus 4 (Epstein-Barr virus)
caugacaauuuuagaugagg

SEQ ID NO: 1876140 - RNA, 13 nt, Human herpesvirus 4 (Epstein-Barr virus)
uggucaagagcuu

SEQ ID NO: 1876141 - RNA, 17 nt, Human herpesvirus 4 (Epstein-Barr virus)
ugcacgagaccccuggg

SEQ ID NO: 1876142 - RNA, 19 nt, Human herpesvirus 4 (Epstein-Barr virus)
gccugagcugccuggugag

SEQ ID NO: 1876143 - RNA, 18 nt, Human herpesvirus 4 (Epstein-Barr virus)
gugauggguggagaggcc

SEQ ID NO: 1876144 - RNA, 17 nt, Human herpesvirus 4 (Epstein-Barr virus)
cugacggaaaucugcuc

SEQ ID NO: 1876145 - RNA, 19 nt, Human herpesvirus 4 (Epstein-Barr virus)
cuucccagcuaguagcccu

SEQ ID NO: 1876146 - RNA, 16 nt, Human herpesvirus 4 (Epstein-Barr virus)
gaaacacagcucuggc

SEQ ID NO: 1876147 - RNA, 22 nt, Human herpesvirus 4 (Epstein-Barr virus)
caccuguguccugggcaaggag

SEQ ID NO: 1876148 - RNA, 13 nt, Human herpesvirus 4 (Epstein-Barr virus)
caugagggcaccg

SEQ ID NO: 1876149 - RNA, 16 nt, Human herpesvirus 4 (Epstein-Barr virus)
ggaggugcugaggccc

SEQ ID NO: 1876150 - RNA, 22 nt, Human herpesvirus 4 (Epstein-Barr virus)
ggaggaugaagauccaacuccg

SEQ ID NO: 1876151 - RNA, 23 nt, Human herpesvirus 4 (Epstein-Barr virus)
guacccuuucuaccaggggcgag

SEQ ID NO: 1876152 - RNA, 16 nt, Human herpesvirus 4 (Epstein-Barr virus)
aucagacggggaggug

SEQ ID NO: 1876153 - RNA, 17 nt, Human herpesvirus 4 (Epstein-Barr virus)
acgccccgaaagcggcc

SEQ ID NO: 1876154 - RNA, 15 nt, Human herpesvirus 4 (Epstein-Barr virus)
auugguugaucuccu

SEQ ID NO: 1876155 - RNA, 19 nt, Human herpesvirus 4 (Epstein-Barr virus)
uacaucccauaccuacacc

SEQ ID NO: 1876156 - RNA, 13 nt, Human herpesvirus 4 (Epstein-Barr virus)
aucuggcucuccu

SEQ ID NO: 1876157 - RNA, 18 nt, Human herpesvirus 4 (Epstein-Barr virus)
agcugugugcgcgccgcc

SEQ ID NO: 1876158 - RNA, 15 nt, Human herpesvirus 4 (Epstein-Barr virus)
uaaccuaugccugga

SEQ ID NO: 1876159 - RNA, 16 nt, Human herpesvirus 4 (Epstein-Barr virus)
cucuggcugugcugac

SEQ ID NO: 1876160 - RNA, 17 nt, Human herpesvirus 4 (Epstein-Barr virus)
ggcuacaacaggcugcu

SEQ ID NO: 1876161 - RNA, 19 nt, Human herpesvirus 4 (Epstein-Barr virus)
aggccgcugccaggccgcc

SEQ ID NO: 1876162 - RNA, 17 nt, Human herpesvirus 4 (Epstein-Barr virus)
uccaggcccccgggugg

SEQ ID NO: 1876163 - RNA, 22 nt, Human herpesvirus 4 (Epstein-Barr virus)
ggcaucguuugugauucccaga

SEQ ID NO: 1876164 - RNA, 23 nt, Human herpesvirus 4 (Epstein-Barr virus)
ugacggugggcaugacacaggac

SEQ ID NO: 1876165 - RNA, 21 nt, Human herpesvirus 4 (Epstein-Barr virus)
agccgcuucagacagccgcgg

SEQ ID NO: 1876166 - RNA, 16 nt, Human herpesvirus 4 (Epstein-Barr virus)
cacccaggcagccuug

SEQ ID NO: 1876167 - RNA, 19 nt, Human herpesvirus 4 (Epstein-Barr virus)
uggaguuuuacggggggca

SEQ ID NO: 1876168 - RNA, 20 nt, Human herpesvirus 4 (Epstein-Barr virus)
caaccgccgugucagcugug

SEQ ID NO: 1876169 - RNA, 19 nt, Human herpesvirus 4 (Epstein-Barr virus)
accuuuugucuccccucug

SEQ ID NO: 1876170 - RNA, 23 nt, Human herpesvirus 4 (Epstein-Barr virus)
cagggccggaaccugagccugag

SEQ ID NO: 1876171 - RNA, 14 nt, Human herpesvirus 4 (Epstein-Barr virus)
cuagaagugcuggg

SEQ ID NO: 1876172 - RNA, 19 nt, Human herpesvirus 4 (Epstein-Barr virus)
acuaaaguuggucaggcug

SEQ ID NO: 1876173 - RNA, 16 nt, Human herpesvirus 4 (Epstein-Barr virus)
ccucgcucagcccacu

SEQ ID NO: 1876174 - RNA, 19 nt, Human herpesvirus 4 (Epstein-Barr virus)
cagugucccugcugcccau

SEQ ID NO: 1876175 - RNA, 16 nt, Human herpesvirus 4 (Epstein-Barr virus)
aaaggcgcaguccgcc

SEQ ID NO: 1876176 - RNA, 15 nt, Human herpesvirus 4 (Epstein-Barr virus)
acucggccacacagu

SEQ ID NO: 1876177 - RNA, 16 nt, Human herpesvirus 4 (Epstein-Barr virus)
ggccucucuggcugug

SEQ ID NO: 1876178 - RNA, 16 nt, Human herpesvirus 4 (Epstein-Barr virus)
cuucagggaaaaacug

SEQ ID NO: 1876179 - RNA, 21 nt, Human herpesvirus 4 (Epstein-Barr virus)
accacucaggaagcuggccag

SEQ ID NO: 1876180 - RNA, 20 nt, Human herpesvirus 4 (Epstein-Barr virus)
ccuuuaggcguaacuugucu

SEQ ID NO: 1876181 - RNA, 21 nt, Human herpesvirus 4 (Epstein-Barr virus)
ggcgucaggagacacggcucu

SEQ ID NO: 1876182 - RNA, 22 nt, Human herpesvirus 4 (Epstein-Barr virus)
guacaacuaccugucugauugc

SEQ ID NO: 1876183 - RNA, 13 nt, Human herpesvirus 4 (Epstein-Barr virus)
augaacccugggg

SEQ ID NO: 1876184 - RNA, 22 nt, Human herpesvirus 4 (Epstein-Barr virus)
ccucuggcacgccguggcccug

SEQ ID NO: 1876185 - RNA, 17 nt, Human herpesvirus 4 (Epstein-Barr virus)
cagcuccagggccagca

SEQ ID NO: 1876186 - RNA, 14 nt, Human herpesvirus 4 (Epstein-Barr virus)
guccgcugggccag

SEQ ID NO: 1876187 - RNA, 16 nt, Human herpesvirus 4 (Epstein-Barr virus)
caccggggaggccagg

SEQ ID NO: 1876188 - RNA, 19 nt, Human herpesvirus 4 (Epstein-Barr virus)
ggcuggaugcccucaugcg

SEQ ID NO: 1876189 - RNA, 17 nt, Human herpesvirus 4 (Epstein-Barr virus)
uaucccaaauaaauguu

SEQ ID NO: 1876190 - RNA, 13 nt, Human herpesvirus 4 (Epstein-Barr virus)
agagggaaaagag

SEQ ID NO: 1876191 - RNA, 12 nt, Human herpesvirus 4 (Epstein-Barr virus)
ccaccuggccac

SEQ ID NO: 1876192 - RNA, 20 nt, Human herpesvirus 4 (Epstein-Barr virus)
ccugagccacacccaccuau

SEQ ID NO: 1876193 - RNA, 15 nt, Human herpesvirus 4 (Epstein-Barr virus)
cgugcauggcagcag

SEQ ID NO: 1876194 - RNA, 16 nt, Human herpesvirus 4 (Epstein-Barr virus)
aacacucuuuuuucaa

SEQ ID NO: 1876195 - RNA, 13 nt, Human herpesvirus 4 (Epstein-Barr virus)
uaugcagucucaa

SEQ ID NO: 1876196 - RNA, 15 nt, Human herpesvirus 4 (Epstein-Barr virus)
agcucuaacuuggca

SEQ ID NO: 1876197 - RNA, 14 nt, Human herpesvirus 4 (Epstein-Barr virus)
auguccuguggugu

SEQ ID NO: 1876198 - RNA, 14 nt, Human herpesvirus 4 (Epstein-Barr virus)
cuacguguccaugu

SEQ ID NO: 1876199 - RNA, 19 nt, Human herpesvirus 4 (Epstein-Barr virus)
cuaggagaaggagccucgc

SEQ ID NO: 1876200 - RNA, 16 nt, Human herpesvirus 4 (Epstein-Barr virus)
ggucagacggccgcgc

SEQ ID NO: 1876201 - RNA, 14 nt, Human herpesvirus 4 (Epstein-Barr virus)
agcgcggcagaggc

SEQ ID NO: 1876202 - RNA, 17 nt, Human herpesvirus 4 (Epstein-Barr virus)
caagcaaacggccuggc

SEQ ID NO: 1876203 - RNA, 13 nt, Human herpesvirus 4 (Epstein-Barr virus)
ucuggugaaacug

SEQ ID NO: 1876204 - RNA, 20 nt, Human herpesvirus 4 (Epstein-Barr virus)
ucagcaucaaugucaaggcu

SEQ ID NO: 1876205 - RNA, 19 nt, Human herpesvirus 4 (Epstein-Barr virus)
gauaggggauuccugucca

SEQ ID NO: 1876206 - RNA, 22 nt, Human herpesvirus 4 (Epstein-Barr virus)
cagacacauucgggugaaggcu

SEQ ID NO: 1876207 - RNA, 15 nt, Human herpesvirus 4 (Epstein-Barr virus)
gucugcugccaugca

SEQ ID NO: 1876208 - RNA, 16 nt, Human herpesvirus 4 (Epstein-Barr virus)
ccaggucuugccgugg

SEQ ID NO: 1876209 - RNA, 18 nt, Human herpesvirus 4 (Epstein-Barr virus)
ccuggcggcccagcccga

SEQ ID NO: 1876210 - RNA, 18 nt, Human herpesvirus 4 (Epstein-Barr virus)
caugcuccuauggacacu

SEQ ID NO: 1876211 - RNA, 20 nt, Human herpesvirus 4 (Epstein-Barr virus)
gcacaaaggaaacugcugac

SEQ ID NO: 1876212 - RNA, 12 nt, Human herpesvirus 4 (Epstein-Barr virus)
caagggaagagg

SEQ ID NO: 1876213 - RNA, 16 nt, Human herpesvirus 4 (Epstein-Barr virus)
ggagucggugggcggu

SEQ ID NO: 1876214 - RNA, 16 nt, Human herpesvirus 4 (Epstein-Barr virus)
cuacgcgggccacagg

SEQ ID NO: 1876215 - RNA, 13 nt, Human herpesvirus 4 (Epstein-Barr virus)
ccuccuggccagc

SEQ ID NO: 1876216 - RNA, 16 nt, Human herpesvirus 4 (Epstein-Barr virus)
cagggcccguuccagg

SEQ ID NO: 1876217 - RNA, 12 nt, Human herpesvirus 4 (Epstein-Barr virus)
gggugggugcaa

SEQ ID NO: 1876218 - RNA, 22 nt, Human herpesvirus 4 (Epstein-Barr virus)
gucauuuauuaggcacaaacuu

SEQ ID NO: 1876219 - RNA, 21 nt, Human herpesvirus 4 (Epstein-Barr virus)
gguaaggcucuucgggcaaga

SEQ ID NO: 1876220 - RNA, 15 nt, Human herpesvirus 4 (Epstein-Barr virus)
aacaaugugaaccuu

SEQ ID NO: 1876221 - RNA, 17 nt, Human herpesvirus 4 (Epstein-Barr virus)
aguccaggggccacaca

SEQ ID NO: 1876222 - RNA, 22 nt, Human herpesvirus 4 (Epstein-Barr virus)
aggcuguugacaugagcaugga

SEQ ID NO: 1876223 - RNA, 16 nt, Human herpesvirus 4 (Epstein-Barr virus)
gcucccccuggacacu

SEQ ID NO: 1876224 - RNA, 23 nt, Human herpesvirus 4 (Epstein-Barr virus)
ucaugcgugaccaccuggccagg

SEQ ID NO: 1876225 - RNA, 18 nt, Human herpesvirus 4 (Epstein-Barr virus)
cugccgggaggugcuggg

SEQ ID NO: 1876226 - RNA, 23 nt, Human herpesvirus 4 (Epstein-Barr virus)
cgaggaggcggaagaccaggagc

SEQ ID NO: 1876227 - RNA, 20 nt, Human herpesvirus 4 (Epstein-Barr virus)
gcagaaucaccagagcccag

SEQ ID NO: 1876228 - RNA, 14 nt, Human herpesvirus 4 (Epstein-Barr virus)
cugcuaagccagga

SEQ ID NO: 1876229 - RNA, 17 nt, Human herpesvirus 4 (Epstein-Barr virus)
uacaucccauaccuaca

SEQ ID NO: 1876230 - RNA, 13 nt, Human herpesvirus 4 (Epstein-Barr virus)
cucaaccgccagg

SEQ ID NO: 1876231 - RNA, 21 nt, Human herpesvirus 4 (Epstein-Barr virus)
cccuuucuaccaggggcgagc

SEQ ID NO: 1876232 - RNA, 20 nt, Human herpesvirus 4 (Epstein-Barr virus)
accagcccuuuuuccagugg

SEQ ID NO: 1876233 - RNA, 19 nt, Human herpesvirus 4 (Epstein-Barr virus)
ccucgguggccugcucacc

SEQ ID NO: 1876234 - RNA, 11 nt, Human herpesvirus 4 (Epstein-Barr virus)
cacccccacca

SEQ ID NO: 1876235 - RNA, 18 nt, Human herpesvirus 4 (Epstein-Barr virus)
ggugccaaugggcgcggg

SEQ ID NO: 1876236 - RNA, 14 nt, Human herpesvirus 4 (Epstein-Barr virus)
cuucuggaacauuu

SEQ ID NO: 1876237 - RNA, 16 nt, Human herpesvirus 4 (Epstein-Barr virus)
cagggcaaagccacaa

SEQ ID NO: 1876238 - RNA, 21 nt, Human herpesvirus 4 (Epstein-Barr virus)
agccucugccacaaggccagc

SEQ ID NO: 1876239 - RNA, 14 nt, Human herpesvirus 4 (Epstein-Barr virus)
cagcuccagggcca

SEQ ID NO: 1876240 - RNA, 12 nt, Human herpesvirus 4 (Epstein-Barr virus)
guucuccugauu

SEQ ID NO: 1876241 - RNA, 23 nt, Human herpesvirus 4 (Epstein-Barr virus)
gcagccuugcguggugcuguccu

SEQ ID NO: 1876242 - RNA, 17 nt, Human herpesvirus 4 (Epstein-Barr virus)
ccaguuccccccagccu

SEQ ID NO: 1876243 - RNA, 22 nt, Human herpesvirus 4 (Epstein-Barr virus)
cucuggucgcccccucugccuc

SEQ ID NO: 1876244 - RNA, 20 nt, Human herpesvirus 4 (Epstein-Barr virus)
uguccucccuaaccgccugg

SEQ ID NO: 1876245 - RNA, 18 nt, Human herpesvirus 4 (Epstein-Barr virus)
cgggggcgacugccgccg

SEQ ID NO: 1876246 - RNA, 12 nt, Human herpesvirus 4 (Epstein-Barr virus)
cgucaggagggc

SEQ ID NO: 1876247 - RNA, 16 nt, Human herpesvirus 4 (Epstein-Barr virus)
aguaggugccuccaga

SEQ ID NO: 1876248 - RNA, 23 nt, Human herpesvirus 4 (Epstein-Barr virus)
agacguguguggcuguagccacc

SEQ ID NO: 1876249 - RNA, 23 nt, Human herpesvirus 4 (Epstein-Barr virus)
gaggcguguggaaguacgagauc

SEQ ID NO: 1876250 - RNA, 17 nt, Human herpesvirus 4 (Epstein-Barr virus)
cagggcccuggucaggg

SEQ ID NO: 1876251 - RNA, 23 nt, Human herpesvirus 4 (Epstein-Barr virus)
acaggcccucgagccauuugagg

SEQ ID NO: 1876252 - RNA, 14 nt, Human herpesvirus 4 (Epstein-Barr virus)
ggaggccagguagc

SEQ ID NO: 1876253 - RNA, 18 nt, Human herpesvirus 4 (Epstein-Barr virus)
ccauaccuacaccacccc

SEQ ID NO: 1876254 - RNA, 21 nt, Human herpesvirus 4 (Epstein-Barr virus)
ccuugggugaccuggccaggc

SEQ ID NO: 1876255 - RNA, 17 nt, Human herpesvirus 4 (Epstein-Barr virus)
ucaccugcacagaucug

SEQ ID NO: 1876256 - RNA, 16 nt, Human herpesvirus 4 (Epstein-Barr virus)
cugcaccggagccugc

SEQ ID NO: 1876257 - RNA, 19 nt, Human herpesvirus 4 (Epstein-Barr virus)
cucugauuauagcucuggc

SEQ ID NO: 1876258 - RNA, 21 nt, Human herpesvirus 4 (Epstein-Barr virus)
agaaguuaccugguauuucug

SEQ ID NO: 1876259 - RNA, 14 nt, Human herpesvirus 4 (Epstein-Barr virus)
aucaccccgagucc

SEQ ID NO: 1876260 - RNA, 22 nt, Human herpesvirus 4 (Epstein-Barr virus)
uccaacauuaaagccuccucgc

SEQ ID NO: 1876261 - RNA, 18 nt, Human herpesvirus 4 (Epstein-Barr virus)
uucccucgaaucccuacc

SEQ ID NO: 1876262 - RNA, 20 nt, Human herpesvirus 4 (Epstein-Barr virus)
ugcuggagauuuucccacug

SEQ ID NO: 1876263 - RNA, 21 nt, Human herpesvirus 4 (Epstein-Barr virus)
ggccgagcagggacuggcggc

SEQ ID NO: 1876264 - RNA, 15 nt, Human herpesvirus 4 (Epstein-Barr virus)
gguggugggcugcug

SEQ ID NO: 1876265 - RNA, 17 nt, Human herpesvirus 4 (Epstein-Barr virus)
ccuuggaacugacgggc

SEQ ID NO: 1876266 - RNA, 18 nt, Human herpesvirus 4 (Epstein-Barr virus)
gcucaggccaugcgcgcc

SEQ ID NO: 1876267 - RNA, 13 nt, Human herpesvirus 4 (Epstein-Barr virus)
agcuggccaggcu

SEQ ID NO: 1876268 - RNA, 19 nt, Human herpesvirus 4 (Epstein-Barr virus)
guuuauggcauaaugggag

SEQ ID NO: 1876269 - RNA, 23 nt, Human herpesvirus 4 (Epstein-Barr virus)
caucucgcuggcucgccucaucc

SEQ ID NO: 1876270 - RNA, 15 nt, Human herpesvirus 4 (Epstein-Barr virus)
guguacgugccucag

SEQ ID NO: 1876271 - RNA, 14 nt, Human herpesvirus 4 (Epstein-Barr virus)
gccgcugccaggcc

SEQ ID NO: 1876272 - RNA, 20 nt, Human herpesvirus 4 (Epstein-Barr virus)
gccaaccugcucucucugga

SEQ ID NO: 1876273 - RNA, 17 nt, Human herpesvirus 4 (Epstein-Barr virus)
guggccucuacgccagg

SEQ ID NO: 1876274 - RNA, 15 nt, Human herpesvirus 4 (Epstein-Barr virus)
uacauuccaguuucc

SEQ ID NO: 1876275 - RNA, 12 nt, Human herpesvirus 4 (Epstein-Barr virus)
cagauuucuagu

SEQ ID NO: 1876276 - RNA, 14 nt, Human herpesvirus 4 (Epstein-Barr virus)
ucaugcgugaccac

SEQ ID NO: 1876277 - RNA, 18 nt, Human herpesvirus 4 (Epstein-Barr virus)
ugcuucuaccaagacucc

SEQ ID NO: 1876278 - RNA, 13 nt, Human herpesvirus 4 (Epstein-Barr virus)
gagccgggggcau

SEQ ID NO: 1876279 - RNA, 22 nt, Human herpesvirus 4 (Epstein-Barr virus)
caguagccgaauaucuggaggu

SEQ ID NO: 1876280 - RNA, 16 nt, Human herpesvirus 4 (Epstein-Barr virus)
auaaauaucuuccugu

SEQ ID NO: 1876281 - RNA, 20 nt, Human herpesvirus 4 (Epstein-Barr virus)
cuccuacacacaucagaccu

SEQ ID NO: 1876282 - RNA, 14 nt, Human herpesvirus 4 (Epstein-Barr virus)
uagugcagggggcu

SEQ ID NO: 1876283 - RNA, 22 nt, Human herpesvirus 4 (Epstein-Barr virus)
cagugggccucucuggcugugc

SEQ ID NO: 1876284 - RNA, 13 nt, Human herpesvirus 4 (Epstein-Barr virus)
acugcgaaaauuc

SEQ ID NO: 1876285 - RNA, 16 nt, Human herpesvirus 4 (Epstein-Barr virus)
caucauaacugagcag

SEQ ID NO: 1876286 - RNA, 23 nt, Human herpesvirus 4 (Epstein-Barr virus)
agagcuccgccaccuccgggggc

SEQ ID NO: 1876287 - RNA, 14 nt, Human herpesvirus 4 (Epstein-Barr virus)
uugcuauucaauca

SEQ ID NO: 1876288 - RNA, 18 nt, Human herpesvirus 4 (Epstein-Barr virus)
cauuuuuagccccagccc

SEQ ID NO: 1876289 - RNA, 21 nt, Human herpesvirus 4 (Epstein-Barr virus)
cucucuggcugugcugacccu

SEQ ID NO: 1876290 - RNA, 19 nt, Human herpesvirus 4 (Epstein-Barr virus)
cgugcaugcagcgcccugu

SEQ ID NO: 1876291 - RNA, 13 nt, Human herpesvirus 4 (Epstein-Barr virus)
ggggcggcagcgg

SEQ ID NO: 1876292 - RNA, 21 nt, Human herpesvirus 4 (Epstein-Barr virus)
cacugauaauacgcccgacaa

SEQ ID NO: 1876293 - RNA, 21 nt, Human herpesvirus 4 (Epstein-Barr virus)
ccugucucucuuugagggggc

SEQ ID NO: 1876294 - RNA, 17 nt, Human herpesvirus 4 (Epstein-Barr virus)
cacggggccgugcaccu

SEQ ID NO: 1876295 - RNA, 21 nt, Human herpesvirus 4 (Epstein-Barr virus)
uggcacacauuacggugcugg

SEQ ID NO: 1876296 - RNA, 15 nt, Human herpesvirus 4 (Epstein-Barr virus)
ccucagaggaggagg

SEQ ID NO: 1876297 - RNA, 19 nt, Human herpesvirus 4 (Epstein-Barr virus)
cgagggugaggcccagccc

SEQ ID NO: 1876298 - RNA, 15 nt, Human herpesvirus 4 (Epstein-Barr virus)
guggaccucaaagaa

SEQ ID NO: 1876299 - RNA, 10 nt, Human herpesvirus 4 (Epstein-Barr virus)
aggccgccgc

SEQ ID NO: 1876300 - RNA, 15 nt, Human herpesvirus 4 (Epstein-Barr virus)
gcagaugaggccccu

SEQ ID NO: 1876301 - RNA, 13 nt, Human herpesvirus 4 (Epstein-Barr virus)
cgcccccucugcc

SEQ ID NO: 1876302 - RNA, 19 nt, Human herpesvirus 4 (Epstein-Barr virus)
cgugaccaccuggccaggg

SEQ ID NO: 1876303 - RNA, 21 nt, Human herpesvirus 4 (Epstein-Barr virus)
uagaauuguuaguuuaaacag

SEQ ID NO: 1876304 - RNA, 22 nt, Human herpesvirus 4 (Epstein-Barr virus)
augcuguugaggcaaaagacua

SEQ ID NO: 1876305 - RNA, 21 nt, Human herpesvirus 4 (Epstein-Barr virus)
cagcucggccagcaggccggc

SEQ ID NO: 1876306 - RNA, 20 nt, Human herpesvirus 4 (Epstein-Barr virus)
uggggaguuagcauuggcgu

SEQ ID NO: 1876307 - RNA, 13 nt, Human herpesvirus 4 (Epstein-Barr virus)
gcaagcagcaccu

SEQ ID NO: 1876308 - RNA, 21 nt, Human herpesvirus 4 (Epstein-Barr virus)
ggcgucgggaaacacagcucu

SEQ ID NO: 1876309 - RNA, 18 nt, Human herpesvirus 4 (Epstein-Barr virus)
guagccuugggggccugg

SEQ ID NO: 1876310 - RNA, 21 nt, Human herpesvirus 4 (Epstein-Barr virus)
agaugauaaugaugaggagca

SEQ ID NO: 1876311 - RNA, 18 nt, Human herpesvirus 4 (Epstein-Barr virus)
gcgcccugucaccaggcc

SEQ ID NO: 1876312 - RNA, 24 nt, Human herpesvirus 4 (Epstein-Barr virus)
ccgcaccccccgccaccacggugc

SEQ ID NO: 1876313 - RNA, 17 nt, Human herpesvirus 4 (Epstein-Barr virus)
ccgguccccccagaagc

SEQ ID NO: 1876314 - RNA, 23 nt, Human herpesvirus 4 (Epstein-Barr virus)
auagcgugaagucgguguccagg

SEQ ID NO: 1876315 - RNA, 15 nt, Human herpesvirus 4 (Epstein-Barr virus)
cagaugcagugggug

SEQ ID NO: 1876316 - RNA, 18 nt, Human herpesvirus 4 (Epstein-Barr virus)
ggcugcucccgccucagg

SEQ ID NO: 1876317 - RNA, 17 nt, Human herpesvirus 4 (Epstein-Barr virus)
ugacccuucugcugcug

SEQ ID NO: 1876318 - RNA, 22 nt, Human herpesvirus 4 (Epstein-Barr virus)
agggcucaccagggaggccugg

SEQ ID NO: 1876319 - RNA, 17 nt, Human herpesvirus 4 (Epstein-Barr virus)
aggggccucggccuggg

SEQ ID NO: 1876320 - RNA, 17 nt, Human herpesvirus 4 (Epstein-Barr virus)
cugccuggaucugagcu

SEQ ID NO: 1876321 - RNA, 18 nt, Human herpesvirus 4 (Epstein-Barr virus)
gaugcauacgcugaguga

SEQ ID NO: 1876322 - RNA, 17 nt, Human herpesvirus 4 (Epstein-Barr virus)
guagaggcgcgggucug

SEQ ID NO: 1876323 - RNA, 16 nt, Human herpesvirus 4 (Epstein-Barr virus)
gccacugcaggcugga

SEQ ID NO: 1876324 - RNA, 22 nt, Human herpesvirus 4 (Epstein-Barr virus)
ugucucuuucuggccaaccugc

SEQ ID NO: 1876325 - RNA, 14 nt, Human herpesvirus 4 (Epstein-Barr virus)
uggguccccucugc

SEQ ID NO: 1876326 - RNA, 14 nt, Human herpesvirus 4 (Epstein-Barr virus)
agacaccuggccca

SEQ ID NO: 1876327 - RNA, 22 nt, Human herpesvirus 4 (Epstein-Barr virus)
caggguuucuaggacgcugucc

SEQ ID NO: 1876328 - RNA, 20 nt, Human herpesvirus 4 (Epstein-Barr virus)
gcacaucuggcaccuguccu

SEQ ID NO: 1876329 - RNA, 21 nt, Human herpesvirus 4 (Epstein-Barr virus)
caggugcccgagccccgccug

SEQ ID NO: 1876330 - RNA, 15 nt, Human herpesvirus 4 (Epstein-Barr virus)
ucaaggcagucucca

SEQ ID NO: 1876331 - RNA, 18 nt, Human herpesvirus 4 (Epstein-Barr virus)
cagagagccacauucugg

SEQ ID NO: 1876332 - RNA, 19 nt, Human herpesvirus 4 (Epstein-Barr virus)
ccugaagcuugcuggggcg

SEQ ID NO: 1876333 - RNA, 17 nt, Human herpesvirus 4 (Epstein-Barr virus)
auacaugucucagaggc

SEQ ID NO: 1876334 - RNA, 18 nt, Human herpesvirus 4 (Epstein-Barr virus)
aaguacgagaucuucccc

SEQ ID NO: 1876335 - RNA, 18 nt, Human herpesvirus 4 (Epstein-Barr virus)
cgugguuuucugccccuc

SEQ ID NO: 1876336 - RNA, 21 nt, Human herpesvirus 4 (Epstein-Barr virus)
caggauguucacgugggcccc

SEQ ID NO: 1876337 - RNA, 16 nt, Human herpesvirus 4 (Epstein-Barr virus)
gacucaggcccucauu

SEQ ID NO: 1876338 - RNA, 17 nt, Human herpesvirus 4 (Epstein-Barr virus)
ccacggccguagcccag

SEQ ID NO: 1876339 - RNA, 23 nt, Human herpesvirus 4 (Epstein-Barr virus)
cucagagggggugccugugccuc

SEQ ID NO: 1876340 - RNA, 16 nt, Human herpesvirus 4 (Epstein-Barr virus)
cguuaacauggacaug

SEQ ID NO: 1876341 - RNA, 19 nt, Human herpesvirus 4 (Epstein-Barr virus)
cugaccucccgcccugagc

SEQ ID NO: 1876342 - RNA, 16 nt, Human herpesvirus 4 (Epstein-Barr virus)
ugucucggccuccugg

SEQ ID NO: 1876343 - RNA, 18 nt, Human herpesvirus 4 (Epstein-Barr virus)
gccuuccucugccuggcc

SEQ ID NO: 1876344 - RNA, 16 nt, Human herpesvirus 4 (Epstein-Barr virus)
ccuggcuccccauaga

SEQ ID NO: 1876345 - RNA, 16 nt, Human herpesvirus 4 (Epstein-Barr virus)
ugcccagggcagacug

SEQ ID NO: 1876346 - RNA, 14 nt, Human herpesvirus 4 (Epstein-Barr virus)
gugcagggggcucg

SEQ ID NO: 1876347 - RNA, 20 nt, Human herpesvirus 4 (Epstein-Barr virus)
cauuggcugcaaagggaccc

SEQ ID NO: 1876348 - RNA, 13 nt, Human herpesvirus 4 (Epstein-Barr virus)
ccacucagacucu

SEQ ID NO: 1876349 - RNA, 20 nt, Human herpesvirus 4 (Epstein-Barr virus)
gcucccgggcaaacagggca

SEQ ID NO: 1876350 - RNA, 19 nt, Human herpesvirus 4 (Epstein-Barr virus)
ggucagugauggaaagguu

SEQ ID NO: 1876351 - RNA, 14 nt, Human herpesvirus 4 (Epstein-Barr virus)
cuacgcagaggcca

SEQ ID NO: 1876352 - RNA, 21 nt, Human herpesvirus 4 (Epstein-Barr virus)
gugggcgcgugcacauauacc

SEQ ID NO: 1876353 - RNA, 18 nt, Human herpesvirus 4 (Epstein-Barr virus)
ggcauguguacuuguccu

SEQ ID NO: 1876354 - RNA, 15 nt, Human herpesvirus 4 (Epstein-Barr virus)
gcaccggagccacca

SEQ ID NO: 1876355 - RNA, 20 nt, Human herpesvirus 4 (Epstein-Barr virus)
acccuugcccucuccagcaa

SEQ ID NO: 1876356 - RNA, 13 nt, Human herpesvirus 4 (Epstein-Barr virus)
uaacaggacaugu

SEQ ID NO: 1876357 - RNA, 21 nt, Human herpesvirus 4 (Epstein-Barr virus)
agauagccacccgcuguauga

SEQ ID NO: 1876358 - RNA, 19 nt, Human herpesvirus 4 (Epstein-Barr virus)
ucccaccaccccccccacc

SEQ ID NO: 1876359 - RNA, 23 nt, Human herpesvirus 4 (Epstein-Barr virus)
cuuccagacuaugcauacacuga

SEQ ID NO: 1876360 - RNA, 20 nt, Human herpesvirus 4 (Epstein-Barr virus)
cccagggcagacugcacagg

SEQ ID NO: 1876361 - RNA, 20 nt, Human herpesvirus 4 (Epstein-Barr virus)
cagaguucccggcugcuccc

SEQ ID NO: 1876362 - RNA, 17 nt, Human herpesvirus 4 (Epstein-Barr virus)
cuccagccacggcgacc

SEQ ID NO: 1876363 - RNA, 14 nt, Human herpesvirus 4 (Epstein-Barr virus)
ccgccgccgcagcc

SEQ ID NO: 1876364 - RNA, 21 nt, Human herpesvirus 4 (Epstein-Barr virus)
uccuugggugaccuggccagg

SEQ ID NO: 1876365 - RNA, 23 nt, Human herpesvirus 4 (Epstein-Barr virus)
guacugcagugggccucucuggc

SEQ ID NO: 1876366 - RNA, 21 nt, Human herpesvirus 4 (Epstein-Barr virus)
uucuggcgauuuuaaucugga

SEQ ID NO: 1876367 - RNA, 21 nt, Human herpesvirus 4 (Epstein-Barr virus)
ucugcgccagccccgcccucc

SEQ ID NO: 1876368 - RNA, 23 nt, Human herpesvirus 4 (Epstein-Barr virus)
cugguacguuggcuucugcugcu

SEQ ID NO: 1876369 - RNA, 18 nt, Human herpesvirus 4 (Epstein-Barr virus)
agaggaugaggcugauga

SEQ ID NO: 1876370 - RNA, 22 nt, Human herpesvirus 4 (Epstein-Barr virus)
cuggccggcuaucugcuucugg

SEQ ID NO: 1876371 - RNA, 14 nt, Human herpesvirus 4 (Epstein-Barr virus)
agguccaucccgga

SEQ ID NO: 1876372 - RNA, 13 nt, Human herpesvirus 4 (Epstein-Barr virus)
gaauccgcgcagc

SEQ ID NO: 1876373 - RNA, 21 nt, Human herpesvirus 4 (Epstein-Barr virus)
ccuccaccgccgguuaacuuu

SEQ ID NO: 1876374 - RNA, 15 nt, Human herpesvirus 4 (Epstein-Barr virus)
cacaacuaccaggca

SEQ ID NO: 1876375 - RNA, 19 nt, Human herpesvirus 4 (Epstein-Barr virus)
ccuguggagauuaggggua

SEQ ID NO: 1876376 - RNA, 14 nt, Human herpesvirus 4 (Epstein-Barr virus)
ggagucuggacgug

SEQ ID NO: 1876377 - RNA, 19 nt, Human herpesvirus 4 (Epstein-Barr virus)
aggcccccggcuggccgcc

SEQ ID NO: 1876378 - RNA, 20 nt, Human herpesvirus 4 (Epstein-Barr virus)
aggaagcuggccaggcuggu

SEQ ID NO: 1876379 - RNA, 21 nt, Human herpesvirus 4 (Epstein-Barr virus)
caggccgccaugcucagggcc

SEQ ID NO: 1876380 - RNA, 19 nt, Human herpesvirus 4 (Epstein-Barr virus)
ucgcgccccaucuuggccc

SEQ ID NO: 1876381 - RNA, 15 nt, Human herpesvirus 4 (Epstein-Barr virus)
cuccaggcuccugga

SEQ ID NO: 1876382 - RNA, 15 nt, Human herpesvirus 4 (Epstein-Barr virus)
cccucugccuccggc

SEQ ID NO: 1876383 - RNA, 19 nt, Human herpesvirus 4 (Epstein-Barr virus)
ccaggcccccgggugggcu

SEQ ID NO: 1876384 - RNA, 17 nt, Human herpesvirus 4 (Epstein-Barr virus)
ggggaggagaagagagg

SEQ ID NO: 1876385 - RNA, 22 nt, Human herpesvirus 4 (Epstein-Barr virus)
agguuugagaaucugggcuggg

SEQ ID NO: 1876386 - RNA, 17 nt, Human herpesvirus 4 (Epstein-Barr virus)
aagggcaccgugggaaa

SEQ ID NO: 1876387 - RNA, 19 nt, Human herpesvirus 4 (Epstein-Barr virus)
auuggggugauccuguagc

SEQ ID NO: 1876388 - RNA, 17 nt, Human herpesvirus 4 (Epstein-Barr virus)
acugugcacucucuccc

SEQ ID NO: 1876389 - RNA, 16 nt, Human herpesvirus 4 (Epstein-Barr virus)
gagggaaaaggcccua

SEQ ID NO: 1876390 - RNA, 14 nt, Human herpesvirus 4 (Epstein-Barr virus)
uguuuccagacacc

SEQ ID NO: 1876391 - RNA, 21 nt, Human herpesvirus 4 (Epstein-Barr virus)
cguccucgugagucugcugga

SEQ ID NO: 1876392 - RNA, 13 nt, Human herpesvirus 4 (Epstein-Barr virus)
cuggccagcaccc

SEQ ID NO: 1876393 - RNA, 16 nt, Human herpesvirus 4 (Epstein-Barr virus)
cugccccucagccugc

SEQ ID NO: 1876394 - RNA, 14 nt, Human herpesvirus 4 (Epstein-Barr virus)
cugccccucagccu

SEQ ID NO: 1876395 - RNA, 22 nt, Human herpesvirus 4 (Epstein-Barr virus)
guaaagaucuaccccagcugca

SEQ ID NO: 1876396 - RNA, 20 nt, Human herpesvirus 4 (Epstein-Barr virus)
gaccaccuacggcagccgcu

SEQ ID NO: 1876397 - RNA, 20 nt, Human herpesvirus 4 (Epstein-Barr virus)
ucucaaacggggaaggagga

SEQ ID NO: 1876398 - RNA, 14 nt, Human herpesvirus 4 (Epstein-Barr virus)
gaacccuagccacc

SEQ ID NO: 1876399 - RNA, 16 nt, Human herpesvirus 4 (Epstein-Barr virus)
ugccgucccagggccg

SEQ ID NO: 1876400 - RNA, 14 nt, Human herpesvirus 4 (Epstein-Barr virus)
gugucaauaauuuc

SEQ ID NO: 1876401 - RNA, 14 nt, Human herpesvirus 4 (Epstein-Barr virus)
cucaaggcagucuc

SEQ ID NO: 1876402 - RNA, 15 nt, Human herpesvirus 4 (Epstein-Barr virus)
uccaccaccuucacc

SEQ ID NO: 1876403 - RNA, 17 nt, Human herpesvirus 4 (Epstein-Barr virus)
gguguagugggugggca

SEQ ID NO: 1876404 - RNA, 13 nt, Human herpesvirus 4 (Epstein-Barr virus)
cccagccacagca

SEQ ID NO: 1876405 - RNA, 16 nt, Human herpesvirus 4 (Epstein-Barr virus)
ccuagguacucuuggu

SEQ ID NO: 1876406 - RNA, 15 nt, Human herpesvirus 4 (Epstein-Barr virus)
acaggaccuggaaau

SEQ ID NO: 1876407 - RNA, 16 nt, Human herpesvirus 4 (Epstein-Barr virus)
aaccaugccaucucug

SEQ ID NO: 1876408 - RNA, 19 nt, Human herpesvirus 4 (Epstein-Barr virus)
gugaggccugagagccggg

SEQ ID NO: 1876409 - RNA, 16 nt, Human herpesvirus 4 (Epstein-Barr virus)
gucgcguacucugugg

SEQ ID NO: 1876410 - RNA, 17 nt, Human herpesvirus 4 (Epstein-Barr virus)
augcucagggccacggc

SEQ ID NO: 1876411 - RNA, 21 nt, Human herpesvirus 4 (Epstein-Barr virus)
gagguccuggacgagggggcg

SEQ ID NO: 1876412 - RNA, 12 nt, Human herpesvirus 4 (Epstein-Barr virus)
ggucgggggcac

SEQ ID NO: 1876413 - RNA, 13 nt, Human herpesvirus 4 (Epstein-Barr virus)
gcagccagagcca

SEQ ID NO: 1876414 - RNA, 16 nt, Human herpesvirus 4 (Epstein-Barr virus)
ggcaaaggucccaggc

SEQ ID NO: 1876415 - RNA, 23 nt, Human herpesvirus 4 (Epstein-Barr virus)
ccagcgccuccucgcaggccccc

SEQ ID NO: 1876416 - RNA, 16 nt, Human herpesvirus 4 (Epstein-Barr virus)
ccccauagacucccau

SEQ ID NO: 1876417 - RNA, 21 nt, Human herpesvirus 4 (Epstein-Barr virus)
ggauggaagagaggggcaggg

SEQ ID NO: 1876418 - RNA, 16 nt, Human herpesvirus 4 (Epstein-Barr virus)
ucacagaccagccccu

SEQ ID NO: 1876419 - RNA, 11 nt, Human herpesvirus 4 (Epstein-Barr virus)
cacugacccau

SEQ ID NO: 1876420 - RNA, 19 nt, Human herpesvirus 4 (Epstein-Barr virus)
ccaggcagaugaggccccu

SEQ ID NO: 1876421 - RNA, 23 nt, Human herpesvirus 4 (Epstein-Barr virus)
gucuucugucucggccuccuggc

SEQ ID NO: 1876422 - RNA, 21 nt, Human herpesvirus 4 (Epstein-Barr virus)
gcggcagcggacgguggggcu

SEQ ID NO: 1876423 - RNA, 22 nt, Human herpesvirus 4 (Epstein-Barr virus)
ggcugggugggagagcgcggcc

SEQ ID NO: 1876424 - RNA, 17 nt, Human herpesvirus 4 (Epstein-Barr virus)
gaggcugcgccugagcu

SEQ ID NO: 1876425 - RNA, 15 nt, Human herpesvirus 4 (Epstein-Barr virus)
ucaaguaccagcugg

SEQ ID NO: 1876426 - RNA, 15 nt, Human herpesvirus 4 (Epstein-Barr virus)
ucccccuccauucca

SEQ ID NO: 1876427 - RNA, 13 nt, Human herpesvirus 4 (Epstein-Barr virus)
agagcgacgagga

SEQ ID NO: 1876428 - RNA, 22 nt, Human herpesvirus 4 (Epstein-Barr virus)
aucucugauuauagcucuggca

SEQ ID NO: 1876429 - RNA, 18 nt, Human herpesvirus 4 (Epstein-Barr virus)
uuagcagccuccgggccg

SEQ ID NO: 1876430 - RNA, 19 nt, Human herpesvirus 4 (Epstein-Barr virus)
ccaugacgcugcugcuacu

SEQ ID NO: 1876431 - RNA, 22 nt, Human herpesvirus 4 (Epstein-Barr virus)
caggaccuggaaauggccuagg

SEQ ID NO: 1876432 - RNA, 13 nt, Human herpesvirus 4 (Epstein-Barr virus)
ggcgcgggagccg

SEQ ID NO: 1876433 - RNA, 15 nt, Human herpesvirus 4 (Epstein-Barr virus)
ccacucuugccucgg

SEQ ID NO: 1876434 - RNA, 21 nt, Human herpesvirus 4 (Epstein-Barr virus)
ccaugucugggggacucuucu

SEQ ID NO: 1876435 - RNA, 23 nt, Human herpesvirus 4 (Epstein-Barr virus)
cacggcaccgucagccacacaau

SEQ ID NO: 1876436 - RNA, 14 nt, Human herpesvirus 4 (Epstein-Barr virus)
cugugcugacccuu

SEQ ID NO: 1876437 - RNA, 15 nt, Human herpesvirus 4 (Epstein-Barr virus)
cagcuccgcccucac

SEQ ID NO: 1876438 - RNA, 18 nt, Human herpesvirus 4 (Epstein-Barr virus)
gcagcuacacucuggggu

SEQ ID NO: 1876439 - RNA, 14 nt, Human herpesvirus 4 (Epstein-Barr virus)
gcccgagccccgcc

SEQ ID NO: 1876440 - RNA, 15 nt, Human herpesvirus 4 (Epstein-Barr virus)
gccugacugacucuc

SEQ ID NO: 1876441 - RNA, 19 nt, Human herpesvirus 4 (Epstein-Barr virus)
agaugcauacgcugaguga

SEQ ID NO: 1876442 - RNA, 14 nt, Human herpesvirus 4 (Epstein-Barr virus)
ggcgggcgggcuug

SEQ ID NO: 1876443 - RNA, 21 nt, Human herpesvirus 4 (Epstein-Barr virus)
aacacgcuuuugucugccugg

SEQ ID NO: 1876444 - RNA, 11 nt, Human
aaaaaauuggu

SEQ ID NO: 1876445 - RNA, 14 nt, Human
aaaaacacaaaagu

SEQ ID NO: 1876446 - RNA, 14 nt, Human
aaaaauugugauca

SEQ ID NO: 1876447 - RNA, 18 nt, Human
aaaaauugguucuuuauu

SEQ ID NO: 1876448 - RNA, 12 nt, Human
aaaaagaggcua

SEQ ID NO: 1876449 - RNA, 14 nt, Human
aaaaagacagggcu

SEQ ID NO: 1876450 - RNA, 16 nt, Human
aaaaagaugacccauu

SEQ ID NO: 1876451 - RNA, 15 nt, Human
aaaaacugauuuuuu

SEQ ID NO: 1876452 - RNA, 14 nt, Human
aaaaagaaguaggg

SEQ ID NO: 1876453 - RNA, 19 nt, Human
aaaaacuuugccagccauu

SEQ ID NO: 1876454 - RNA, 14 nt, Human
aaaaacauggccuu

SEQ ID NO: 1876455 - RNA, 13 nt, Human
aaaaacugauuuu

SEQ ID NO: 1876456 - RNA, 17 nt, Human
aaaacaagaaaguuucc

SEQ ID NO: 1876457 - RNA, 22 nt, Human
aaaacaacuauggaucagaaua

SEQ ID NO: 1876458 - RNA, 18 nt, Human
aaaacaagaaaguuuccc

SEQ ID NO: 1876459 - RNA, 12 nt, Human
aaaacacauuuu

SEQ ID NO: 1876460 - RNA, 21 nt, Human
aagucucucauucuaggccuc

SEQ ID NO: 1876461 - RNA, 17 nt, Human
aagucucuaacaaugua

SEQ ID NO: 1876462 - RNA, 19 nt, Human
aagucucuggaauuugaaa

SEQ ID NO: 1876463 - RNA, 16 nt, Human
aagucuuagauguaua

SEQ ID NO: 1876464 - RNA, 11 nt, Human
aaguacuucuu

SEQ ID NO: 1876465 - RNA, 15 nt, Human
aagguuuaggcuggu

SEQ ID NO: 1876466 - RNA, 19 nt, Human
aagguuuaggcugguggcc

SEQ ID NO: 1876467 - RNA, 20 nt, Human
aagguuuaggcugguggccc

SEQ ID NO: 1876468 - RNA, 21 nt, Human
aagguuuaggcugguggccca

SEQ ID NO: 1876469 - RNA, 14 nt, Human
aaguacuuuuggca

SEQ ID NO: 1876470 - RNA, 15 nt, Human
aaguacuuuuggcau

SEQ ID NO: 1876471 - RNA, 22 nt, Human
aagguuuaggcugguggcccag

SEQ ID NO: 1876472 - RNA, 23 nt, Human
aaguccaggcuuuuuuaucaugu

SEQ ID NO: 1876473 - RNA, 16 nt, Human
aaguaucccuacugua

SEQ ID NO: 1876474 - RNA, 15 nt, Human
aaguaugggaaauga

SEQ ID NO: 1876475 - RNA, 20 nt, Human
aagguuaauguucaucaucc

SEQ ID NO: 1876476 - RNA, 13 nt, Human
aagguuguauugc

SEQ ID NO: 1876477 - RNA, 17 nt, Human
aagguuguauugcauau

SEQ ID NO: 1876478 - RNA, 18 nt, Human
aagguuguuuugaaacug

SEQ ID NO: 1876479 - RNA, 15 nt, Human
aagguuaauaaagua

SEQ ID NO: 1876480 - RNA, 16 nt, Human
aagguuaauaaaguaa

SEQ ID NO: 1876481 - RNA, 11 nt, Human
aaggugggagg

SEQ ID NO: 1876482 - RNA, 18 nt, Human
aaggugcugacggccagg

SEQ ID NO: 1876483 - RNA, 13 nt, Human
aauaaacuaaaga

SEQ ID NO: 1876484 - RNA, 18 nt, Human
aauaaacuggcagcucag

SEQ ID NO: 1876485 - RNA, 19 nt, Human
aauaaacuauuuguaaagu

SEQ ID NO: 1876486 - RNA, 22 nt, Human
aauaaguuaacuauuuuauuuu

SEQ ID NO: 1876487 - RNA, 16 nt, Human
aauaaacgucuuaaau

SEQ ID NO: 1876488 - RNA, 17 nt, Human
aauaaacgucuuaaaua

SEQ ID NO: 1876489 - RNA, 17 nt, Human
aagugguauagaaaugc

SEQ ID NO: 1876490 - RNA, 13 nt, Human
aagugguauagaa

SEQ ID NO: 1876491 - RNA, 17 nt, Human
aaguggugguaacccug

SEQ ID NO: 1876492 - RNA, 18 nt, Human
aaguggugguaacccugg

SEQ ID NO: 1876493 - RNA, 15 nt, Human
aaguuguuaauaaaa

SEQ ID NO: 1876494 - RNA, 18 nt, Human
aaguuguucaaacauuua

SEQ ID NO: 1876495 - RNA, 21 nt, Human
aauaauccuaaacauaugaau

SEQ ID NO: 1876496 - RNA, 13 nt, Human
aauaaucuuauua

SEQ ID NO: 1876497 - RNA, 19 nt, Human
aauaaucuuauuagggaga

SEQ ID NO: 1876498 - RNA, 23 nt, Human
aauaaucuuauuagggagaaaau

SEQ ID NO: 1876499 - RNA, 13 nt, Human
aauaaucauugga

SEQ ID NO: 1876500 - RNA, 12 nt, Human
aauaauguaaga

SEQ ID NO: 1876501 - RNA, 19 nt, Human
aauaauguaagacaaauau

SEQ ID NO: 1876502 - RNA, 16 nt, Human
aauaaugugaaacugg

SEQ ID NO: 1876503 - RNA, 13 nt, Human
aauaaugucucug

SEQ ID NO: 1876504 - RNA, 12 nt, Human
aauaaugucucu

SEQ ID NO: 1876505 - RNA, 11 nt, Human
aauaaugucuc

SEQ ID NO: 1876506 - RNA, 22 nt, Human
aagugcugggauuacaggugug

SEQ ID NO: 1876507 - RNA, 14 nt, Human
aagcagagaagcuc

SEQ ID NO: 1876508 - RNA, 16 nt, Human
aagcagagaagcucuc

SEQ ID NO: 1876509 - RNA, 14 nt, Human
aagcagaggaagga

SEQ ID NO: 1876510 - RNA, 14 nt, Human
aagcagacagcucc

SEQ ID NO: 1876511 - RNA, 15 nt, Human
aagcagacagcucca

SEQ ID NO: 1876512 - RNA, 12 nt, Human
aagcagacagcu

SEQ ID NO: 1876513 - RNA, 17 nt, Human
aagauuuuaaucaaguu

SEQ ID NO: 1876514 - RNA, 18 nt, Human
aagauuuuaaucaaguug

SEQ ID NO: 1876515 - RNA, 11 nt, Human
aagcagcucuu

SEQ ID NO: 1876516 - RNA, 17 nt, Human
aagcagcucuccccuca

SEQ ID NO: 1876517 - RNA, 14 nt, Human
aagcagcucucccc

SEQ ID NO: 1876518 - RNA, 20 nt, Human
aagccaggaauuucccagga

SEQ ID NO: 1876519 - RNA, 21 nt, Human
aagccaggaauuucccaggac

SEQ ID NO: 1876520 - RNA, 22 nt, Human
aagccaggaauuucccaggacc

SEQ ID NO: 1876521 - RNA, 20 nt, Human
aagccagaagcuaagcugca

SEQ ID NO: 1876522 - RNA, 21 nt, Human
aagaacacccuauauuuugca

SEQ ID NO: 1876523 - RNA, 19 nt, Human
aagaacacccuauauuuug

SEQ ID NO: 1876524 - RNA, 16 nt, Human
aagaacacccucuaaa

SEQ ID NO: 1876525 - RNA, 15 nt, Human
aagaacaauauugac

SEQ ID NO: 1876526 - RNA, 21 nt, Human
aagaacaauauugacuuuguc

SEQ ID NO: 1876527 - RNA, 21 nt, Human
aagaaauuuccacucaggucu

SEQ ID NO: 1876528 - RNA, 13 nt, Human
aagaaauuaugug

SEQ ID NO: 1876529 - RNA, 16 nt, Human
aagaaaugcaaaaauc

SEQ ID NO: 1876530 - RNA, 22 nt, Human
aagaaauuaugugccagauuua

SEQ ID NO: 1876531 - RNA, 18 nt, Human
aagccauaauuguucuua

SEQ ID NO: 1876532 - RNA, 15 nt, Human
aagccaucuuucuuu

SEQ ID NO: 1876533 - RNA, 21 nt, Human
aagcuaaauccuuuacuguua

SEQ ID NO: 1876534 - RNA, 17 nt, Human
aagcuaauaaaauauca

SEQ ID NO: 1876535 - RNA, 21 nt, Human
aagcugcacccucaggcaggu

SEQ ID NO: 1876536 - RNA, 20 nt, Human
aagcugcacccucaggcagg

SEQ ID NO: 1876537 - RNA, 21 nt, Human
aagcuaauaaaauaucauuca

SEQ ID NO: 1876538 - RNA, 20 nt, Human
aagcuaauaaaauaucauuc

SEQ ID NO: 1876539 - RNA, 18 nt, Human
aagcuaauaaaauaucau

SEQ ID NO: 1876540 - RNA, 22 nt, Human
aagcugcacccucaggcaggug

SEQ ID NO: 1876541 - RNA, 23 nt, Human
aagcugccuccccucuccuuccu

SEQ ID NO: 1876542 - RNA, 12 nt, Human
aagcguggugga

SEQ ID NO: 1876543 - RNA, 11 nt, Human
aagcugggcag

SEQ ID NO: 1876544 - RNA, 18 nt, Human
aaggacauugcggacagc

SEQ ID NO: 1876545 - RNA, 15 nt, Human
aagcugggcagguug

SEQ ID NO: 1876546 - RNA, 13 nt, Human
aagcugggcaggu

SEQ ID NO: 1876547 - RNA, 17 nt, Human
aaggcaaggcugucaau

SEQ ID NO: 1876548 - RNA, 18 nt, Human
aaggcaaggcugucaauu

SEQ ID NO: 1876549 - RNA, 15 nt, Human
aaggcaaaaauguaa

SEQ ID NO: 1876550 - RNA, 14 nt, Human
aaggcaaaaaugua

SEQ ID NO: 1876551 - RNA, 21 nt, Human
aaugaugauccuaggcauuug

SEQ ID NO: 1876552 - RNA, 17 nt, Human
aaugaagauacugaaau

SEQ ID NO: 1876553 - RNA, 12 nt, Human
aaugaagauacu

SEQ ID NO: 1876554 - RNA, 22 nt, Human
aaucugcuuuuuaaagaaugcu

SEQ ID NO: 1876555 - RNA, 21 nt, Human
aaucugcugguuuuaacaacu

SEQ ID NO: 1876556 - RNA, 23 nt, Human
aaugaaccacaucuugcucugcu

SEQ ID NO: 1876557 - RNA, 17 nt, Human
aaugaaccacaucuugc

SEQ ID NO: 1876558 - RNA, 16 nt, Human
aaugaaccacaucuug

SEQ ID NO: 1876559 - RNA, 21 nt, Human
aauccaggcagauccaggacu

SEQ ID NO: 1876560 - RNA, 22 nt, Human
aauccaggcagauccaggacua

SEQ ID NO: 1876561 - RNA, 20 nt, Human
aauccaggcagauccaggac

SEQ ID NO: 1876562 - RNA, 18 nt, Human
aaucuccaaaauaaaacu

SEQ ID NO: 1876563 - RNA, 14 nt, Human
aaucuccaaaauaa

SEQ ID NO: 1876564 - RNA, 13 nt, Human
aaucuccaaaaua

SEQ ID NO: 1876565 - RNA, 18 nt, Human
aaucccaaauuugauuga

SEQ ID NO: 1876566 - RNA, 11 nt, Human
aaucccaaauu

SEQ ID NO: 1876567 - RNA, 16 nt, Human
aaucccaaauuugauu

SEQ ID NO: 1876568 - RNA, 19 nt, Human
aaugaugccaugaggaaca

SEQ ID NO: 1876569 - RNA, 17 nt, Human
aaugaucuuuucaaguu

SEQ ID NO: 1876570 - RNA, 18 nt, Human
aauauaggaacuuaaaua

SEQ ID NO: 1876571 - RNA, 14 nt, Human
aauauaauacugua

SEQ ID NO: 1876572 - RNA, 21 nt, Human
aauauaggaacuuaaauaaug

SEQ ID NO: 1876573 - RNA, 20 nt, Human
aauauaggaacuuaaauaau

SEQ ID NO: 1876574 - RNA, 13 nt, Human
aauauacacacag

SEQ ID NO: 1876575 - RNA, 17 nt, Human
aauauggacacuuaaua

SEQ ID NO: 1876576 - RNA, 21 nt, Human
aauauggacacuuaauacuac

SEQ ID NO: 1876577 - RNA, 18 nt, Human
aauaugguguacauucuu

SEQ ID NO: 1876578 - RNA, 20 nt, Human
aaugucucuuuaaugucaca

SEQ ID NO: 1876579 - RNA, 17 nt, Human
aaugucugagugaaccu

SEQ ID NO: 1876580 - RNA, 18 nt, Human
aaugucucugugagacuc

SEQ ID NO: 1876581 - RNA, 17 nt, Human
aaugucucugugagacu

SEQ ID NO: 1876582 - RNA, 14 nt, Human
aaugucuauuaagg

SEQ ID NO: 1876583 - RNA, 22 nt, Human
aaugucuaguuguaacaccaug

SEQ ID NO: 1876584 - RNA, 17 nt, Human
aaugucagugugacuga

SEQ ID NO: 1876585 - RNA, 21 nt, Human
aaugucagugugacugaucuc

SEQ ID NO: 1876586 - RNA, 15 nt, Human
aaugucagugugacu

SEQ ID NO: 1876587 - RNA, 16 nt, Human
aaugucagugugacug

SEQ ID NO: 1876588 - RNA, 13 nt, Human
aaugucaguguga

SEQ ID NO: 1876589 - RNA, 22 nt, Human
aaugucaguauguggaagugug

SEQ ID NO: 1876590 - RNA, 16 nt, Human
aaugucaguaugugga

SEQ ID NO: 1876591 - RNA, 15 nt, Human
aaugggcagagcaga

SEQ ID NO: 1876592 - RNA, 13 nt, Human
aaugggcagagca

SEQ ID NO: 1876593 - RNA, 12 nt, Human
aauggggccaga

SEQ ID NO: 1876594 - RNA, 13 nt, Human
aauggggccagau

SEQ ID NO: 1876595 - RNA, 14 nt, Human
aauggggccagauc

SEQ ID NO: 1876596 - RNA, 17 nt, Human
aaugguaggcauuuccu

SEQ ID NO: 1876597 - RNA, 18 nt, Human
aaugguaggcauuuccua

SEQ ID NO: 1876598 - RNA, 19 nt, Human
aauguuugccucugccucu

SEQ ID NO: 1876599 - RNA, 13 nt, Human
aauguuuuaaauu

SEQ ID NO: 1876600 - RNA, 14 nt, Human
aauguuuuaaauuc

SEQ ID NO: 1876601 - RNA, 15 nt, Human
aauguuuuaaauucu

SEQ ID NO: 1876602 - RNA, 18 nt, Human
aauguuugccucugccuc

SEQ ID NO: 1876603 - RNA, 17 nt, Human
aaugucuucuagaauau

SEQ ID NO: 1876604 - RNA, 18 nt, Human
aauuaaaacacaacaucu

SEQ ID NO: 1876605 - RNA, 18 nt, Human
aauuaguggcacuugcuu

SEQ ID NO: 1876606 - RNA, 21 nt, Human
aaauagucuagacuaaaagau

SEQ ID NO: 1876607 - RNA, 20 nt, Human
aaauagucuagacuaaaaga

SEQ ID NO: 1876608 - RNA, 14 nt, Human
aaauauaauugaca

SEQ ID NO: 1876609 - RNA, 16 nt, Human
aaauggaaaugggcag

SEQ ID NO: 1876610 - RNA, 18 nt, Human
aaauggaagacagcucuu

SEQ ID NO: 1876611 - RNA, 20 nt, Human
aaaugcuuuuuauuucugca

SEQ ID NO: 1876612 - RNA, 20 nt, Human
aaauggacguguuaugacuc

SEQ ID NO: 1876613 - RNA, 21 nt, Human
aaauggacguguuaugacucc

SEQ ID NO: 1876614 - RNA, 22 nt, Human
aaauggacguguuaugacucca

SEQ ID NO: 1876615 - RNA, 13 nt, Human
aaaucuugaaauu

SEQ ID NO: 1876616 - RNA, 21 nt, Human
aaauggcgucuggaaguccaa

SEQ ID NO: 1876617 - RNA, 22 nt, Human
aaauggcuucagaauuaaaacu

SEQ ID NO: 1876618 - RNA, 23 nt, Human
aaauggcugcaucccccccaccu

SEQ ID NO: 1876619 - RNA, 22 nt, Human
aaagucucucauucuaggccuc

SEQ ID NO: 1876620 - RNA, 19 nt, Human
aaagucucuggaauuugaa

SEQ ID NO: 1876621 - RNA, 16 nt, Human
aaagggacugagaaau

SEQ ID NO: 1876622 - RNA, 21 nt, Human
aaagggaacugaacauuccag

SEQ ID NO: 1876623 - RNA, 16 nt, Human
aaagggaacugaacau

SEQ ID NO: 1876624 - RNA, 23 nt, Human
aaagucuugugacuagugcugaa

SEQ ID NO: 1876625 - RNA, 22 nt, Human
aaagucuugugacuagugcuga

SEQ ID NO: 1876626 - RNA, 21 nt, Human
aaagucuugugacuagugcug

SEQ ID NO: 1876627 - RNA, 19 nt, Human
aaagucuugugacuagugc

SEQ ID NO: 1876628 - RNA, 18 nt, Human
aaagucuugugacuagug

SEQ ID NO: 1876629 - RNA, 15 nt, Human
aaagucuugugacua

SEQ ID NO: 1876630 - RNA, 20 nt, Human
aaagugaaaguccagaaacu

SEQ ID NO: 1876631 - RNA, 20 nt, Human
aaagucucuggaauuugaaa

SEQ ID NO: 1876632 - RNA, 22 nt, Human
aaagucucuggaauuugaaaca

SEQ ID NO: 1876633 - RNA, 20 nt, Human
aaauaaagcuugcaacaaaa

SEQ ID NO: 1876634 - RNA, 12 nt, Human
aaauaaagcccu

SEQ ID NO: 1876635 - RNA, 23 nt, Human
aaauaaaggaugugauuguggaa

SEQ ID NO: 1876636 - RNA, 13 nt, Human
aaauaaaggaacc

SEQ ID NO: 1876637 - RNA, 12 nt, Human
aaauaacaauga

SEQ ID NO: 1876638 - RNA, 17 nt, Human
aaauaaacgucuuaaau

SEQ ID NO: 1876639 - RNA, 14 nt, Human
aaagugcugggauu

SEQ ID NO: 1876640 - RNA, 12 nt, Human
aaagugcuggga

SEQ ID NO: 1876641 - RNA, 14 nt, Human
aaagugcugcggag

SEQ ID NO: 1876642 - RNA, 18 nt, Human
aaauaaaaggaagccaaa

SEQ ID NO: 1876643 - RNA, 11 nt, Human
aaagugcuggg

SEQ ID NO: 1876644 - RNA, 23 nt, Human
aaagugagacuuugaggguguau

SEQ ID NO: 1876645 - RNA, 19 nt, Human
aaauaaauuugguucuaau

SEQ ID NO: 1876646 - RNA, 21 nt, Human
aaagaaaaauuauuaaaggaa

SEQ ID NO: 1876647 - RNA, 12 nt, Human
aaagaaaacuug

SEQ ID NO: 1876648 - RNA, 20 nt, Human
aaagaaaacuuguauuaugu

SEQ ID NO: 1876649 - RNA, 17 nt, Human
aaagaguacucuuguuu

SEQ ID NO: 1876650 - RNA, 13 nt, Human
aaagaguagaauu

SEQ ID NO: 1876651 - RNA, 18 nt, Human
aaagaguagaauugcauu

SEQ ID NO: 1876652 - RNA, 12 nt, Human
aaagaguacucu

SEQ ID NO: 1876653 - RNA, 20 nt, Human
aaagauauaugaauaugaca

SEQ ID NO: 1876654 - RNA, 11 nt, Human
aaagaacaucc

SEQ ID NO: 1876655 - RNA, 15 nt, Human
aaagaaauuaugugc

SEQ ID NO: 1876656 - RNA, 19 nt, Human
aaagaaaugucuauuaagg

SEQ ID NO: 1876657 - RNA, 13 nt, Human
aaagaaauuaugu

SEQ ID NO: 1876658 - RNA, 21 nt, Human
aaagaucuguuuugaaggcaa

SEQ ID NO: 1876659 - RNA, 19 nt, Human
aaacacuguucucugcccu

SEQ ID NO: 1876660 - RNA, 22 nt, Human
aaacacuguucucugcccucca

SEQ ID NO: 1876661 - RNA, 20 nt, Human
aaacagacucgauucauauu

SEQ ID NO: 1876662 - RNA, 13 nt, Human
aaacacucuugaa

SEQ ID NO: 1876663 - RNA, 14 nt, Human
aaacacucuugaaa

SEQ ID NO: 1876664 - RNA, 17 nt, Human
aaacacucuugaaaaau

SEQ ID NO: 1876665 - RNA, 18 nt, Human
aaacacuguucucugccc

SEQ ID NO: 1876666 - RNA, 13 nt, Human
aaaauucagugga

SEQ ID NO: 1876667 - RNA, 14 nt, Human
aaaauucaauugua

SEQ ID NO: 1876668 - RNA, 17 nt, Human
aaaauucaauuguaaau

SEQ ID NO: 1876669 - RNA, 15 nt, Human
aaaacacauuuuucu

SEQ ID NO: 1876670 - RNA, 13 nt, Human
aaaacacauuuuu

SEQ ID NO: 1876671 - RNA, 15 nt, Human
aacaagaaaguuucc

SEQ ID NO: 1876672 - RNA, 15 nt, Human
aacaaagcagccacg

SEQ ID NO: 1876673 - RNA, 14 nt, Human
aacaaagcagccac

SEQ ID NO: 1876674 - RNA, 16 nt, Human
aacaagaaaguuuccc

SEQ ID NO: 1876675 - RNA, 21 nt, Human
aacaagaagccacagaccuag

SEQ ID NO: 1876676 - RNA, 22 nt, Human
aacaagaccaccacuucgaaac

SEQ ID NO: 1876677 - RNA, 19 nt, Human
aacacauuuuucuuaggga

SEQ ID NO: 1876678 - RNA, 14 nt, Human
aacaccaagcacag

SEQ ID NO: 1876679 - RNA, 17 nt, Human
aacaccaagcacagcag

SEQ ID NO: 1876680 - RNA, 18 nt, Human
aacaccaagcacagcagc

SEQ ID NO: 1876681 - RNA, 19 nt, Human
aacaccaagcacagcagcc

SEQ ID NO: 1876682 - RNA, 21 nt, Human
aacaccaagcacagcagccug

SEQ ID NO: 1876683 - RNA, 13 nt, Human
aaauugcaaaucu

SEQ ID NO: 1876684 - RNA, 14 nt, Human
aaauugcaaaucuu

SEQ ID NO: 1876685 - RNA, 19 nt, Human
aaauugcaaaucuugaaau

SEQ ID NO: 1876686 - RNA, 15 nt, Human
aacaaagaaauuaug

SEQ ID NO: 1876687 - RNA, 17 nt, Human
aacaaagaaauuaugug

SEQ ID NO: 1876688 - RNA, 13 nt, Human
aacaaaaauuagg

SEQ ID NO: 1876689 - RNA, 14 nt, Human
aacaaaaauuaggu

SEQ ID NO: 1876690 - RNA, 9 nt, Human
aacaaaaca

SEQ ID NO: 1876691 - RNA, 14 nt, Human
aacacgcaccugcc

SEQ ID NO: 1876692 - RNA, 15 nt, Human
aacacgcaccugccu

SEQ ID NO: 1876693 - RNA, 19 nt, Human
aacacgcaccugccucagg

SEQ ID NO: 1876694 - RNA, 13 nt, Human
aacagcugccucu

SEQ ID NO: 1876695 - RNA, 13 nt, Human
aacaugauuuggg

SEQ ID NO: 1876696 - RNA, 17 nt, Human
aaccaguguuguggauu

SEQ ID NO: 1876697 - RNA, 18 nt, Human
aaccaguccccccacccu

SEQ ID NO: 1876698 - RNA, 22 nt, Human
aaccaguccccccacccucauu

SEQ ID NO: 1876699 - RNA, 14 nt, Human
aaccagcuaagaaa

SEQ ID NO: 1876700 - RNA, 16 nt, Human
aaccagcuaagaaaag

SEQ ID NO: 1876701 - RNA, 21 nt, Human
aaccagcuaagaaaagauuuu

SEQ ID NO: 1876702 - RNA, 22 nt, Human
aaccacucuaucaaguauuaua

SEQ ID NO: 1876703 - RNA, 23 nt, Human
aacauguaauuaaguacuaugua

SEQ ID NO: 1876704 - RNA, 14 nt, Human
aacauguaauuaag

SEQ ID NO: 1876705 - RNA, 21 nt, Human
aacauguaauuaaguacuaug

SEQ ID NO: 1876706 - RNA, 14 nt, Human
aaccagaucauugu

SEQ ID NO: 1876707 - RNA, 12 nt, Human
aaccagaucauu

SEQ ID NO: 1876708 - RNA, 14 nt, Human
aacccuggugacca

SEQ ID NO: 1876709 - RNA, 19 nt, Human
aacugauuuuuuuuuccuu

SEQ ID NO: 1876710 - RNA, 17 nt, Human
aacugauuuuuuuuucc

SEQ ID NO: 1876711 - RNA, 15 nt, Human
aacugaauuuugucu

SEQ ID NO: 1876712 - RNA, 19 nt, Human
aacuuaaauaaugugaaac

SEQ ID NO: 1876713 - RNA, 17 nt, Human
aacuuaaauaaugugaa

SEQ ID NO: 1876714 - RNA, 21 nt, Human
aacuuaugaccucuuccuuua

SEQ ID NO: 1876715 - RNA, 21 nt, Human
aacuuauuaaauggaaacuga

SEQ ID NO: 1876716 - RNA, 14 nt, Human
aacugaauuuuguc

SEQ ID NO: 1876717 - RNA, 15 nt, Human
aacucaguuuuaacu

SEQ ID NO: 1876718 - RNA, 18 nt, Human
aacucaguuuuaacuaga

SEQ ID NO: 1876719 - RNA, 12 nt, Human
aacucaccccag

SEQ ID NO: 1876720 - RNA, 21 nt, Human
aacucaauauuuuccaugaaa

SEQ ID NO: 1876721 - RNA, 20 nt, Human
aacucaauauuuuccaugaa

SEQ ID NO: 1876722 - RNA, 14 nt, Human
aacucaauauuuuc

SEQ ID NO: 1876723 - RNA, 13 nt, Human
aacucaauauuuu

SEQ ID NO: 1876724 - RNA, 12 nt, Human
aacucaauauuu

SEQ ID NO: 1876725 - RNA, 15 nt, Human
aacucaccccagccc

SEQ ID NO: 1876726 - RNA, 15 nt, Human
aacucaccugccccu

SEQ ID NO: 1876727 - RNA, 16 nt, Human
aacucaccugccccuc

SEQ ID NO: 1876728 - RNA, 13 nt, Human
aacuucacauauu

SEQ ID NO: 1876729 - RNA, 14 nt, Human
aacuuuuuuuuaag

SEQ ID NO: 1876730 - RNA, 20 nt, Human
aacuuuuuuuuaaguuacac

SEQ ID NO: 1876731 - RNA, 19 nt, Human
aacuuuuauaaacuuuacc

SEQ ID NO: 1876732 - RNA, 16 nt, Human
aacuuuuauaaacuuu

SEQ ID NO: 1876733 - RNA, 20 nt, Human
aacuuugaccucugcagcaa

SEQ ID NO: 1876734 - RNA, 19 nt, Human
aacuuugaccucugcagca

SEQ ID NO: 1876735 - RNA, 15 nt, Human
aacuuuuauaaacuu

SEQ ID NO: 1876736 - RNA, 12 nt, Human
aacuuuuauaaa

SEQ ID NO: 1876737 - RNA, 17 nt, Human
aacuuugaccucugcag

SEQ ID NO: 1876738 - RNA, 14 nt, Human
aacuuugaccucug

SEQ ID NO: 1876739 - RNA, 13 nt, Human
aacuuugaccucu

SEQ ID NO: 1876740 - RNA, 15 nt, Human
accuugugucuguac

SEQ ID NO: 1876741 - RNA, 13 nt, Human
accuugugucugu

SEQ ID NO: 1876742 - RNA, 12 nt, Human
accuugugucug

SEQ ID NO: 1876743 - RNA, 21 nt, Human
accuugugucuguacacgugu

SEQ ID NO: 1876744 - RNA, 18 nt, Human
accuugugucuguacacg

SEQ ID NO: 1876745 - RNA, 14 nt, Human
accuuggcugcagg

SEQ ID NO: 1876746 - RNA, 16 nt, Human
accuuucaauaggaaa

SEQ ID NO: 1876747 - RNA, 12 nt, Human
accuuggcucaa

SEQ ID NO: 1876748 - RNA, 12 nt, Human
accuuggcugca

SEQ ID NO: 1876749 - RNA, 14 nt, Human
accuuggcucaagu

SEQ ID NO: 1876750 - RNA, 21 nt, Human
accuguauaaguggaggcacu

SEQ ID NO: 1876751 - RNA, 23 nt, Human
accuguauaaguggaggcacuuu

SEQ ID NO: 1876752 - RNA, 17 nt, Human
accuuucaauaggaaaa

SEQ ID NO: 1876753 - RNA, 21 nt, Human
accuuucaauaggaaaaacug

SEQ ID NO: 1876754 - RNA, 23 nt, Human
accuuucaauaggaaaaacugau

SEQ ID NO: 1876755 - RNA, 15 nt, Human
accuuucaaagccau

SEQ ID NO: 1876756 - RNA, 18 nt, Human
accuuucaaagccauuuu

SEQ ID NO: 1876757 - RNA, 18 nt, Human
accuuucauaaucuuugc

SEQ ID NO: 1876758 - RNA, 21 nt, Human
accucugcacaagcugcaccc

SEQ ID NO: 1876759 - RNA, 16 nt, Human
accucuuaauauucug

SEQ ID NO: 1876760 - RNA, 16 nt, Human
accucugcacaagcug

SEQ ID NO: 1876761 - RNA, 18 nt, Human
accucugcacaagcugca

SEQ ID NO: 1876762 - RNA, 23 nt, Human
accugccccucaacucuccucca

SEQ ID NO: 1876763 - RNA, 18 nt, Human
accugcccccgcaucccc

SEQ ID NO: 1876764 - RNA, 20 nt, Human
accugcccccgcauccccug

SEQ ID NO: 1876765 - RNA, 23 nt, Human
accugcccccgcauccccugccu

SEQ ID NO: 1876766 - RNA, 14 nt, Human
accucuucuggcuc

SEQ ID NO: 1876767 - RNA, 16 nt, Human
accucuucuggcucaa

SEQ ID NO: 1876768 - RNA, 17 nt, Human
accugccccaacucucc

SEQ ID NO: 1876769 - RNA, 13 nt, Human
acguggcugcuuc

SEQ ID NO: 1876770 - RNA, 14 nt, Human
acguggcugcuuca

SEQ ID NO: 1876771 - RNA, 15 nt, Human
acguggcugcuucaa

SEQ ID NO: 1876772 - RNA, 15 nt, Human
acgcugugcugcccu

SEQ ID NO: 1876773 - RNA, 16 nt, Human
acgcugugcugcccug

SEQ ID NO: 1876774 - RNA, 17 nt, Human
acgcugugcugcccugc

SEQ ID NO: 1876775 - RNA, 18 nt, Human
acgcugugcugcccugcc

SEQ ID NO: 1876776 - RNA, 19 nt, Human
acgugauuuugcuguagaa

SEQ ID NO: 1876777 - RNA, 22 nt, Human
acuaaguuuuuauggcuuuugu

SEQ ID NO: 1876778 - RNA, 15 nt, Human
acuaaguuuuuaugg

SEQ ID NO: 1876779 - RNA, 13 nt, Human
acuaagcagagga

SEQ ID NO: 1876780 - RNA, 14 nt, Human
acuaagcagaggag

SEQ ID NO: 1876781 - RNA, 15 nt, Human
acuaagcagaggagg

SEQ ID NO: 1876782 - RNA, 12 nt, Human
acuaagcagagg

SEQ ID NO: 1876783 - RNA, 18 nt, Human
acgccacugcacuauagc

SEQ ID NO: 1876784 - RNA, 17 nt, Human
acgauuucuguuuagau

SEQ ID NO: 1876785 - RNA, 14 nt, Human
acgauuucuguuua

SEQ ID NO: 1876786 - RNA, 13 nt, Human
acgauuucuguuu

SEQ ID NO: 1876787 - RNA, 12 nt, Human
acgauuucuguu

SEQ ID NO: 1876788 - RNA, 18 nt, Human
acgauuuagaaagaagcc

SEQ ID NO: 1876789 - RNA, 14 nt, Human
acuagcuauggugu

SEQ ID NO: 1876790 - RNA, 17 nt, Human
acuaggggacaaagcaa

SEQ ID NO: 1876791 - RNA, 21 nt, Human
acuagggugaggguuuucugu

SEQ ID NO: 1876792 - RNA, 14 nt, Human
acuagguaacuuca

SEQ ID NO: 1876793 - RNA, 15 nt, Human
acuagguaacuucau

SEQ ID NO: 1876794 - RNA, 16 nt, Human
acuagguaacuucaua

SEQ ID NO: 1876795 - RNA, 15 nt, Human
acuaggauacugcug

SEQ ID NO: 1876796 - RNA, 18 nt, Human
acuaggaaauccauucac

SEQ ID NO: 1876797 - RNA, 13 nt, Human
acucagucuuuaa

SEQ ID NO: 1876798 - RNA, 17 nt, Human
acucagggcagcgccag

SEQ ID NO: 1876799 - RNA, 20 nt, Human
acucagggcagcgccaggcu

SEQ ID NO: 1876800 - RNA, 21 nt, Human
acucagggcagcgccaggcug

SEQ ID NO: 1876801 - RNA, 22 nt, Human
acucagggcagcgccaggcuga

SEQ ID NO: 1876802 - RNA, 17 nt, Human
acucaggcccaaagccu

SEQ ID NO: 1876803 - RNA, 22 nt, Human
acucagcucuuggcuccacugg

SEQ ID NO: 1876804 - RNA, 12 nt, Human
acuccccuccuu

SEQ ID NO: 1876805 - RNA, 13 nt, Human
acuccccugcugg

SEQ ID NO: 1876806 - RNA, 17 nt, Human
acuccccugcugggugu

SEQ ID NO: 1876807 - RNA, 17 nt, Human
acuccccgaagucuuuu

SEQ ID NO: 1876808 - RNA, 14 nt, Human
acucccccaggugg

SEQ ID NO: 1876809 - RNA, 14 nt, Human
acuccccgaagucu

SEQ ID NO: 1876810 - RNA, 16 nt, Human
acuccccgaagucuuu

SEQ ID NO: 1876811 - RNA, 15 nt, Human
acucaguuuuaacua

SEQ ID NO: 1876812 - RNA, 22 nt, Human
acucaguuuuaacuagaauuua

SEQ ID NO: 1876813 - RNA, 11 nt, Human
acuauaaugua

SEQ ID NO: 1876814 - RNA, 17 nt, Human
acucaaacucuuaaaac

SEQ ID NO: 1876815 - RNA, 16 nt, Human
acucaaacucuuaaaa

SEQ ID NO: 1876816 - RNA, 11 nt, Human
acucagaucca

SEQ ID NO: 1876817 - RNA, 12 nt, Human
acucagauccag

SEQ ID NO: 1876818 - RNA, 14 nt, Human
acucagauccaggg

SEQ ID NO: 1876819 - RNA, 16 nt, Human
acucagauccagggac

SEQ ID NO: 1876820 - RNA, 17 nt, Human
acucagauccagggaca

SEQ ID NO: 1876821 - RNA, 19 nt, Human
acucagauccagggacaga

SEQ ID NO: 1876822 - RNA, 14 nt, Human
acucaaaggccaga

SEQ ID NO: 1876823 - RNA, 19 nt, Human
acucaaaguuucagagacc

SEQ ID NO: 1876824 - RNA, 20 nt, Human
acucaaaguuucagagacca

SEQ ID NO: 1876825 - RNA, 22 nt, Human
acucaaaguuucagagaccauu

SEQ ID NO: 1876826 - RNA, 15 nt, Human
acucagcacaaggcc

SEQ ID NO: 1876827 - RNA, 13 nt, Human
acucccuuucaac

SEQ ID NO: 1876828 - RNA, 12 nt, Human
acucccuuucaa

SEQ ID NO: 1876829 - RNA, 14 nt, Human
acucuaucaaguau

SEQ ID NO: 1876830 - RNA, 15 nt, Human
acucuauagacucua

SEQ ID NO: 1876831 - RNA, 18 nt, Human
acucuauagacucuagga

SEQ ID NO: 1876832 - RNA, 16 nt, Human
acucuaucaaguauua

SEQ ID NO: 1876833 - RNA, 14 nt, Human
acucugggcuccag

SEQ ID NO: 1876834 - RNA, 16 nt, Human
acucugggcuccagag

SEQ ID NO: 1876835 - RNA, 16 nt, Human
acucugugucaggugg

SEQ ID NO: 1876836 - RNA, 11 nt, Human
acucuuaaaac

SEQ ID NO: 1876837 - RNA, 18 nt, Human
acucuuaaaacccaagug

SEQ ID NO: 1876838 - RNA, 20 nt, Human
acucuguugcaagugcaaua

SEQ ID NO: 1876839 - RNA, 21 nt, Human
acucuacccucuuagaaaaac

SEQ ID NO: 1876840 - RNA, 13 nt, Human
acucuacccucuu

SEQ ID NO: 1876841 - RNA, 18 nt, Human
acucuacccucuuagaaa

SEQ ID NO: 1876842 - RNA, 15 nt, Human
acuucuuucagcaga

SEQ ID NO: 1876843 - RNA, 19 nt, Human
acuucugccauauucuguu

SEQ ID NO: 1876844 - RNA, 18 nt, Human
acuucugccauauucugu

SEQ ID NO: 1876845 - RNA, 22 nt, Human
acuucugccagcauaauacuug

SEQ ID NO: 1876846 - RNA, 23 nt, Human
acuucacauauugauuuccguua

SEQ ID NO: 1876847 - RNA, 18 nt, Human
acuuguaaaggaauuuaa

SEQ ID NO: 1876848 - RNA, 15 nt, Human
acuuggucugugaga

SEQ ID NO: 1876849 - RNA, 14 nt, Human
acuuggucugugag

SEQ ID NO: 1876850 - RNA, 20 nt, Human
acuuguaaaggaauuuaaaa

SEQ ID NO: 1876851 - RNA, 19 nt, Human
acuuguaaaggaauuuaaa

SEQ ID NO: 1876852 - RNA, 21 nt, Human
acuuggucugugagaugcuag

SEQ ID NO: 1876853 - RNA, 13 nt, Human
acuguuucaaacu

SEQ ID NO: 1876854 - RNA, 22 nt, Human
acuguuuggacuuuuauuuugg

SEQ ID NO: 1876855 - RNA, 24 nt, Human
acuguuuuaauuuauacuggcaug

SEQ ID NO: 1876856 - RNA, 15 nt, Human
acuguugucccugca

SEQ ID NO: 1876857 - RNA, 15 nt, Human
acuuauuuauauaaa

SEQ ID NO: 1876858 - RNA, 15 nt, Human
acuuauuuaaacucu

SEQ ID NO: 1876859 - RNA, 13 nt, Human
acuuauuuaaugc

SEQ ID NO: 1876860 - RNA, 19 nt, Human
acuucacauauugauuucc

SEQ ID NO: 1876861 - RNA, 23 nt, Human
acuuauuguagcauccuggaaua

SEQ ID NO: 1876862 - RNA, 20 nt, Human
acuuauuguagcauccugga

SEQ ID NO: 1876863 - RNA, 17 nt, Human
acugucuucucccugca

SEQ ID NO: 1876864 - RNA, 12 nt, Human
acugucuuuccu

SEQ ID NO: 1876865 - RNA, 12 nt, Human
acugucuucagu

SEQ ID NO: 1876866 - RNA, 23 nt, Human
acugucuguguuuuuuuggcagu

SEQ ID NO: 1876867 - RNA, 18 nt, Human
acugugaugcccugcccu

SEQ ID NO: 1876868 - RNA, 14 nt, Human
acugucuuuccuag

SEQ ID NO: 1876869 - RNA, 16 nt, Human
acugugccaugugcca

SEQ ID NO: 1876870 - RNA, 17 nt, Human
acuguccugggccugca

SEQ ID NO: 1876871 - RNA, 16 nt, Human
acuguccugggccugc

SEQ ID NO: 1876872 - RNA, 19 nt, Human
acuguccugggccugcaga

SEQ ID NO: 1876873 - RNA, 14 nt, Human
acuggagaaaaugg

SEQ ID NO: 1876874 - RNA, 14 nt, Human
acuggacuccggcc

SEQ ID NO: 1876875 - RNA, 16 nt, Human
acuggacuccggcccu

SEQ ID NO: 1876876 - RNA, 19 nt, Human
acuggacuccggcccuccu

SEQ ID NO: 1876877 - RNA, 18 nt, Human
acuggacuccggcccucc

SEQ ID NO: 1876878 - RNA, 14 nt, Human
acuggaagcacagc

SEQ ID NO: 1876879 - RNA, 15 nt, Human
acuggaagcacagcu

SEQ ID NO: 1876880 - RNA, 16 nt, Human
acuggaagcacagcuu

SEQ ID NO: 1876881 - RNA, 12 nt, Human
acugcauuuuag

SEQ ID NO: 1876882 - RNA, 17 nt, Human
acugccaaaaugcucua

SEQ ID NO: 1876883 - RNA, 18 nt, Human
acugccaaaaugcucuag

SEQ ID NO: 1876884 - RNA, 23 nt, Human
agaaaauggaagacagcucuuau

SEQ ID NO: 1876885 - RNA, 15 nt, Human
agaaaauggacgugu

SEQ ID NO: 1876886 - RNA, 20 nt, Human
agaaaauggacguguuauga

SEQ ID NO: 1876887 - RNA, 22 nt, Human
agaaaauggacguguuaugacu

SEQ ID NO: 1876888 - RNA, 23 nt, Human
agaaaauggacguguuaugacuc

SEQ ID NO: 1876889 - RNA, 19 nt, Human
agaaaauguuauuuaacag

SEQ ID NO: 1876890 - RNA, 13 nt, Human
agaaaauguuauu

SEQ ID NO: 1876891 - RNA, 16 nt, Human
agaaaauguuauuuaa

SEQ ID NO: 1876892 - RNA, 18 nt, Human
agaaaauguuauuuaaca

SEQ ID NO: 1876893 - RNA, 17 nt, Human
agaaaauucaauuguaa

SEQ ID NO: 1876894 - RNA, 18 nt, Human
agaaaauucaauuguaaa

SEQ ID NO: 1876895 - RNA, 16 nt, Human
agaaaauguugagaau

SEQ ID NO: 1876896 - RNA, 17 nt, Human
agaaaauguugagaauc

SEQ ID NO: 1876897 - RNA, 12 nt, Human
agaaaauucaau

SEQ ID NO: 1876898 - RNA, 13 nt, Human
agaaaauucaauu

SEQ ID NO: 1876899 - RNA, 15 nt, Human
agaaaauucaauugu

SEQ ID NO: 1876900 - RNA, 20 nt, Human
agaaaagggaacugaacauu

SEQ ID NO: 1876901 - RNA, 21 nt, Human
agaaaaguugaauuuuacaug

SEQ ID NO: 1876902 - RNA, 18 nt, Human
agaaaaguugaauuuuac

SEQ ID NO: 1876903 - RNA, 22 nt, Human
acuuuuauaaacuuuaccuuuu

SEQ ID NO: 1876904 - RNA, 19 nt, Human
acuuuuauaaacuuuaccu

SEQ ID NO: 1876905 - RNA, 15 nt, Human
acuuuuauaaacuuu

SEQ ID NO: 1876906 - RNA, 23 nt, Human
acuuuuauacucuuucuguauau

SEQ ID NO: 1876907 - RNA, 23 nt, Human
acuuuguucuggcucuuccaggc

SEQ ID NO: 1876908 - RNA, 17 nt, Human
acuuucuacaaugugaa

SEQ ID NO: 1876909 - RNA, 19 nt, Human
acuuucuacaaugugaacu

SEQ ID NO: 1876910 - RNA, 21 nt, Human
acuuucuacaaugugaacuuu

SEQ ID NO: 1876911 - RNA, 23 nt, Human
acuuuccuucauucaacccaccu

SEQ ID NO: 1876912 - RNA, 23 nt, Human
acuuucauuuuuuuccaggcugg

SEQ ID NO: 1876913 - RNA, 21 nt, Human
acuuucauuuuuuuccaggcu

SEQ ID NO: 1876914 - RNA, 23 nt, Human
acuuuagggaaguacuuuuggca

SEQ ID NO: 1876915 - RNA, 15 nt, Human
acuuuagggcuguaa

SEQ ID NO: 1876916 - RNA, 22 nt, Human
acuuuagggcuguaaaaugcau

SEQ ID NO: 1876917 - RNA, 23 nt, Human
acuuuagggcuguaaaaugcaug

SEQ ID NO: 1876918 - RNA, 18 nt, Human
acuuucagugaaagcauc

SEQ ID NO: 1876919 - RNA, 20 nt, Human
acuuucauuuuuuuccaggc

SEQ ID NO: 1876920 - RNA, 17 nt, Human
acuuucauuuuuuucca

SEQ ID NO: 1876921 - RNA, 14 nt, Human
acuuucauuggaaa

SEQ ID NO: 1876922 - RNA, 23 nt, Human
agaaaggaggggauagagagaga

SEQ ID NO: 1876923 - RNA, 20 nt, Human
agaaaggaggggauagagag

SEQ ID NO: 1876924 - RNA, 15 nt, Human
agaaauaaaguuucu

SEQ ID NO: 1876925 - RNA, 19 nt, Human
agaaauaaaaggaagccaa

SEQ ID NO: 1876926 - RNA, 20 nt, Human
agaaauaaaaggaagccaaa

SEQ ID NO: 1876927 - RNA, 18 nt, Human
agaaauaaaguuucuguu

SEQ ID NO: 1876928 - RNA, 18 nt, Human
agaaauaaaguuugcuua

SEQ ID NO: 1876929 - RNA, 16 nt, Human
aauuauaauauacuau

SEQ ID NO: 1876930 - RNA, 14 nt, Human
aauuauaaaagcca

SEQ ID NO: 1876931 - RNA, 13 nt, Human
aauuuugaaaaac

SEQ ID NO: 1876932 - RNA, 15 nt, Human
aauuuuauaaacaaa

SEQ ID NO: 1876933 - RNA, 19 nt, Human
aauuuuaguagagacaggg

SEQ ID NO: 1876934 - RNA, 13 nt, Human
acaaagacugagu

SEQ ID NO: 1876935 - RNA, 14 nt, Human
acaaagagaaaaag

SEQ ID NO: 1876936 - RNA, 20 nt, Human
acaaagagaaaaagaaaugc

SEQ ID NO: 1876937 - RNA, 21 nt, Human
acaaagagaaaaagaaaugca

SEQ ID NO: 1876938 - RNA, 21 nt, Human
acaaaccuguuucugcagcca

SEQ ID NO: 1876939 - RNA, 15 nt, Human
acaaacgggcucagc

SEQ ID NO: 1876940 - RNA, 20 nt, Human
acaaaauguaggguuauaau

SEQ ID NO: 1876941 - RNA, 20 nt, Human
acaaaauggaauacucuuau

SEQ ID NO: 1876942 - RNA, 21 nt, Human
aauuuugaauaaauaaaugua

SEQ ID NO: 1876943 - RNA, 19 nt, Human
acaaaauggaauacucuua

SEQ ID NO: 1876944 - RNA, 15 nt, Human
acaaaauggaauacu

SEQ ID NO: 1876945 - RNA, 24 nt, Human
acaacuugcacguauuuuaauagc

SEQ ID NO: 1876946 - RNA, 17 nt, Human
acaacuauggaucagaa

SEQ ID NO: 1876947 - RNA, 17 nt, Human
acaacuuuaagaggaca

SEQ ID NO: 1876948 - RNA, 20 nt, Human
acaagucagucauucagaua

SEQ ID NO: 1876949 - RNA, 12 nt, Human
acaccagagccc

SEQ ID NO: 1876950 - RNA, 14 nt, Human
acaccacuacauuc

SEQ ID NO: 1876951 - RNA, 21 nt, Human
acaccacuacauucuguuaau

SEQ ID NO: 1876952 - RNA, 14 nt, Human
acaccagacagaca

SEQ ID NO: 1876953 - RNA, 12 nt, Human
acacagcucugu

SEQ ID NO: 1876954 - RNA, 11 nt, Human
acacagcucug

SEQ ID NO: 1876955 - RNA, 14 nt, Human
acacagcucugucc

SEQ ID NO: 1876956 - RNA, 21 nt, Human
acacagaaaccuuuuuaaaaa

SEQ ID NO: 1876957 - RNA, 13 nt, Human
acacagaaaccuu

SEQ ID NO: 1876958 - RNA, 18 nt, Human
acacagaaaccuuuuuaa

SEQ ID NO: 1876959 - RNA, 19 nt, Human
acacagaaaccuuuuuaaa

SEQ ID NO: 1876960 - RNA, 15 nt, Human
acacagacucauauu

SEQ ID NO: 1876961 - RNA, 16 nt, Human
acacagacucauauua

SEQ ID NO: 1876962 - RNA, 15 nt, Human
acacuaaccacgcug

SEQ ID NO: 1876963 - RNA, 14 nt, Human
acacuaaccacgcu

SEQ ID NO: 1876964 - RNA, 15 nt, Human
acacggacacucaaa

SEQ ID NO: 1876965 - RNA, 18 nt, Human
acacggagcccagcccuc

SEQ ID NO: 1876966 - RNA, 22 nt, Human
acacggagcccagcccucccca

SEQ ID NO: 1876967 - RNA, 15 nt, Human
acaauuuauuauggc

SEQ ID NO: 1876968 - RNA, 22 nt, Human
acaaugugucuuucuuuuugga

SEQ ID NO: 1876969 - RNA, 23 nt, Human
acaaugugucuuucuuuuuggac

SEQ ID NO: 1876970 - RNA, 17 nt, Human
acaauguuaacauuuuu

SEQ ID NO: 1876971 - RNA, 16 nt, Human
acaauuuauuauggca

SEQ ID NO: 1876972 - RNA, 18 nt, Human
acacaaacgggcucagca

SEQ ID NO: 1876973 - RNA, 14 nt, Human
acacaaacuguaaa

SEQ ID NO: 1876974 - RNA, 15 nt, Human
acacaaacuguaaau

SEQ ID NO: 1876975 - RNA, 16 nt, Human
acacaaacuguaaaua

SEQ ID NO: 1876976 - RNA, 19 nt, Human
acacaaacuguaaauaaaa

SEQ ID NO: 1876977 - RNA, 22 nt, Human
acacaaagagaaaaagaaaugc

SEQ ID NO: 1876978 - RNA, 19 nt, Human
acaaugugaacuuuauuaa

SEQ ID NO: 1876979 - RNA, 22 nt, Human
acaaugugaacuuuauuaaaua

SEQ ID NO: 1876980 - RNA, 21 nt, Human
acacugcugcuccagugcagg

SEQ ID NO: 1876981 - RNA, 21 nt, Human
acacugauuuccccuuuugca

SEQ ID NO: 1876982 - RNA, 13 nt, Human
acacugucuugaa

SEQ ID NO: 1876983 - RNA, 19 nt, Human
acagaacaaauguuuguuu

SEQ ID NO: 1876984 - RNA, 14 nt, Human
acagaacacugucu

SEQ ID NO: 1876985 - RNA, 12 nt, Human
acagaacacugu

SEQ ID NO: 1876986 - RNA, 16 nt, Human
acagaagaaggcagca

SEQ ID NO: 1876987 - RNA, 12 nt, Human
acagaagcagcu

SEQ ID NO: 1876988 - RNA, 20 nt, Human
acagaagaaggcagcaggug

SEQ ID NO: 1876989 - RNA, 13 nt, Human
acagaagcagcuc

SEQ ID NO: 1876990 - RNA, 14 nt, Human
acagaagcagcucu

SEQ ID NO: 1876991 - RNA, 15 nt, Human
acagaagcagcucuu

SEQ ID NO: 1876992 - RNA, 22 nt, Human
acacugagaauguaagaacuac

SEQ ID NO: 1876993 - RNA, 20 nt, Human
acacugagaauguaagaacu

SEQ ID NO: 1876994 - RNA, 19 nt, Human
acacugagaauguaagaac

SEQ ID NO: 1876995 - RNA, 22 nt, Human
acacugaugcuuagauguucca

SEQ ID NO: 1876996 - RNA, 22 nt, Human
acacugauuuccccuuuugcau

SEQ ID NO: 1876997 - RNA, 15 nt, Human
acacugauccagccc

SEQ ID NO: 1876998 - RNA, 19 nt, Human
acagagucucacuguugcc

SEQ ID NO: 1876999 - RNA, 17 nt, Human
acagagucucacuguug

SEQ ID NO: 1877000 - RNA, 14 nt, Human
acagagucucacug

SEQ ID NO: 1877001 - RNA, 12 nt, Human
acagagucucac

SEQ ID NO: 1877002 - RNA, 22 nt, Human
acagaggggguggccucccaac

SEQ ID NO: 1877003 - RNA, 23 nt, Human
acagaguacuuggcuguuagccc

SEQ ID NO: 1877004 - RNA, 22 nt, Human
acagaauacuguuaaaggaaaa

SEQ ID NO: 1877005 - RNA, 19 nt, Human
acagccacggccaggccag

SEQ ID NO: 1877006 - RNA, 19 nt, Human
acagcauuuuccucugcuu

SEQ ID NO: 1877007 - RNA, 14 nt, Human
acagcauuuuccuc

SEQ ID NO: 1877008 - RNA, 15 nt, Human
acagcauuuuccucu

SEQ ID NO: 1877009 - RNA, 18 nt, Human
acagcauuuuccucugcu

SEQ ID NO: 1877010 - RNA, 15 nt, Human
acagccaugauucuu

SEQ ID NO: 1877011 - RNA, 18 nt, Human
acagcccaaagaaggaaa

SEQ ID NO: 1877012 - RNA, 17 nt, Human
acagcccaaagaaggaa

SEQ ID NO: 1877013 - RNA, 16 nt, Human
acagcccaaagaagga

SEQ ID NO: 1877014 - RNA, 16 nt, Human
acaggcaagcaccucc

SEQ ID NO: 1877015 - RNA, 15 nt, Human
acaggcaagcaccuc

SEQ ID NO: 1877016 - RNA, 18 nt, Human
acaggcaagcaccuccug

SEQ ID NO: 1877017 - RNA, 19 nt, Human
acaggcaagcaccuccugc

SEQ ID NO: 1877018 - RNA, 17 nt, Human
acaggggccagaagaug

SEQ ID NO: 1877019 - RNA, 23 nt, Human
acaggggccagaagaugaacaga

SEQ ID NO: 1877020 - RNA, 12 nt, Human
acaggggccaga

SEQ ID NO: 1877021 - RNA, 14 nt, Human
acaggggccagaag

SEQ ID NO: 1877022 - RNA, 15 nt, Human
acaggggcaggagga

SEQ ID NO: 1877023 - RNA, 20 nt, Human
acagcugcuccuagagggag

SEQ ID NO: 1877024 - RNA, 21 nt, Human
acagcugcuccuagagggagg

SEQ ID NO: 1877025 - RNA, 23 nt, Human
acaggugugaaccaccacaccca

SEQ ID NO: 1877026 - RNA, 20 nt, Human
acaggugugaaccaccacac

SEQ ID NO: 1877027 - RNA, 22 nt, Human
acagguagaauuaucuaauuua

SEQ ID NO: 1877028 - RNA, 15 nt, Human
acagguaauauaaaa

SEQ ID NO: 1877029 - RNA, 15 nt, Human
acagcuccuucuguc

SEQ ID NO: 1877030 - RNA, 20 nt, Human
acagcucugcauacucauua

SEQ ID NO: 1877031 - RNA, 14 nt, Human
acagcugccuggga

SEQ ID NO: 1877032 - RNA, 23 nt, Human
acagcugccugggaucccucauc

SEQ ID NO: 1877033 - RNA, 10 nt, Human
acagcugcuc

SEQ ID NO: 1877034 - RNA, 14 nt, Human
acagcuccuucugu

SEQ ID NO: 1877035 - RNA, 13 nt, Human
acagcuccuucug

SEQ ID NO: 1877036 - RNA, 12 nt, Human
acagcuccuucu

SEQ ID NO: 1877037 - RNA, 16 nt, Human
acauccugugccucca

SEQ ID NO: 1877038 - RNA, 15 nt, Human
acaucgcacugugga

SEQ ID NO: 1877039 - RNA, 20 nt, Human
acauccaauauuuucuuuaa

SEQ ID NO: 1877040 - RNA, 22 nt, Human
acaucagcacgauuucuguuua

SEQ ID NO: 1877041 - RNA, 13 nt, Human
acauaaauuagag

SEQ ID NO: 1877042 - RNA, 21 nt, Human
acaucagcacgauuucuguuu

SEQ ID NO: 1877043 - RNA, 20 nt, Human
acaucagcacgauuucuguu

SEQ ID NO: 1877044 - RNA, 23 nt, Human
acauaaacaagaccacguuucua

SEQ ID NO: 1877045 - RNA, 13 nt, Human
acauaaagcaaau

SEQ ID NO: 1877046 - RNA, 21 nt, Human
acauaaagcaaauagacacag

SEQ ID NO: 1877047 - RNA, 15 nt, Human
acauaaagcaaauag

SEQ ID NO: 1877048 - RNA, 18 nt, Human
acauaaagcaaauagaca

SEQ ID NO: 1877049 - RNA, 18 nt, Human
acagguuugggaccccug

SEQ ID NO: 1877050 - RNA, 15 nt, Human
acagguuugggaccc

SEQ ID NO: 1877051 - RNA, 19 nt, Human
acaugcaaggucauuuuuu

SEQ ID NO: 1877052 - RNA, 15 nt, Human
acaucuaagccugaa

SEQ ID NO: 1877053 - RNA, 13 nt, Human
acaucuaagccug

SEQ ID NO: 1877054 - RNA, 20 nt, Human
acaugcacagcuaacaugga

SEQ ID NO: 1877055 - RNA, 23 nt, Human
acaugcacagcuaacauggaagu

SEQ ID NO: 1877056 - RNA, 21 nt, Human
acauguuuuucuucucccuca

SEQ ID NO: 1877057 - RNA, 13 nt, Human
acauguuacaaca

SEQ ID NO: 1877058 - RNA, 20 nt, Human
accaagccuggucagcccaa

SEQ ID NO: 1877059 - RNA, 19 nt, Human
accaagccuggucagccca

SEQ ID NO: 1877060 - RNA, 14 nt, Human
accacuacauucug

SEQ ID NO: 1877061 - RNA, 19 nt, Human
accacguuucuaaaggcua

SEQ ID NO: 1877062 - RNA, 15 nt, Human
accacguuucuaaag

SEQ ID NO: 1877063 - RNA, 13 nt, Human
accagcagccugg

SEQ ID NO: 1877064 - RNA, 14 nt, Human
accagcagccugga

SEQ ID NO: 1877065 - RNA, 17 nt, Human
accagcagccuggaccc

SEQ ID NO: 1877066 - RNA, 17 nt, Human
accagcagcgccuuucc

SEQ ID NO: 1877067 - RNA, 18 nt, Human
accagcagcgccuuuccc

SEQ ID NO: 1877068 - RNA, 15 nt, Human
acauuuggaauacuu

SEQ ID NO: 1877069 - RNA, 16 nt, Human
acauuuggaauacuuu

SEQ ID NO: 1877070 - RNA, 17 nt, Human
acauuuggaauacuuuu

SEQ ID NO: 1877071 - RNA, 18 nt, Human
acauuuggaauacuuuuu

SEQ ID NO: 1877072 - RNA, 21 nt, Human
acauuuguagcauccucuuua

SEQ ID NO: 1877073 - RNA, 23 nt, Human
accaacugucacucauugcugag

SEQ ID NO: 1877074 - RNA, 12 nt, Human
acauuuggaaua

SEQ ID NO: 1877075 - RNA, 16 nt, Human
accccgacgccacagc

SEQ ID NO: 1877076 - RNA, 20 nt, Human
accccggggugcccacaggc

SEQ ID NO: 1877077 - RNA, 21 nt, Human
accccggggugcccacaggcc

SEQ ID NO: 1877078 - RNA, 23 nt, Human
accccggggugcccacaggccgc

SEQ ID NO: 1877079 - RNA, 14 nt, Human
accccgucaacaaa

SEQ ID NO: 1877080 - RNA, 15 nt, Human
accccggccaccugc

SEQ ID NO: 1877081 - RNA, 13 nt, Human
acccaagggccug

SEQ ID NO: 1877082 - RNA, 16 nt, Human
acccaagggccuggcc

SEQ ID NO: 1877083 - RNA, 15 nt, Human
acccacaagaaauga

SEQ ID NO: 1877084 - RNA, 13 nt, Human
acccaauccaaau

SEQ ID NO: 1877085 - RNA, 14 nt, Human
acccaauccaaaug

SEQ ID NO: 1877086 - RNA, 17 nt, Human
acccaugcugcccugug

SEQ ID NO: 1877087 - RNA, 18 nt, Human
acccaugcugcccuguga

SEQ ID NO: 1877088 - RNA, 20 nt, Human
acccaugaguuggggucugg

SEQ ID NO: 1877089 - RNA, 21 nt, Human
acccaugaguuggggucuggc

SEQ ID NO: 1877090 - RNA, 19 nt, Human
acccaugcugcccugugag

SEQ ID NO: 1877091 - RNA, 16 nt, Human
acccaugcugcccugu

SEQ ID NO: 1877092 - RNA, 17 nt, Human
accaucaugucuggcua

SEQ ID NO: 1877093 - RNA, 16 nt, Human
accaucaugucuggcu

SEQ ID NO: 1877094 - RNA, 18 nt, Human
accaucccugaaggcccc

SEQ ID NO: 1877095 - RNA, 21 nt, Human
accaucccugaaggccccgcc

SEQ ID NO: 1877096 - RNA, 22 nt, Human
accaucccugaaggccccgccc

SEQ ID NO: 1877097 - RNA, 15 nt, Human
acccaagcuuagaac

SEQ ID NO: 1877098 - RNA, 14 nt, Human
accaucaugucugg

SEQ ID NO: 1877099 - RNA, 12 nt, Human
accaucauccua

SEQ ID NO: 1877100 - RNA, 20 nt, Human
accccucaacaccucugcac

SEQ ID NO: 1877101 - RNA, 15 nt, Human
auauggacacuuaau

SEQ ID NO: 1877102 - RNA, 20 nt, Human
auauggacacuuaauacuac

SEQ ID NO: 1877103 - RNA, 19 nt, Human
auauggaacuuacauuguu

SEQ ID NO: 1877104 - RNA, 14 nt, Human
auaugcuuauacac

SEQ ID NO: 1877105 - RNA, 16 nt, Human
auaugcuuauacacuu

SEQ ID NO: 1877106 - RNA, 19 nt, Human
auaugcuuauacacuuaca

SEQ ID NO: 1877107 - RNA, 17 nt, Human
auaugcaguuuuccuua

SEQ ID NO: 1877108 - RNA, 22 nt, Human
auauccuucuagaucauacaca

SEQ ID NO: 1877109 - RNA, 22 nt, Human
auaugccugggcagaaggaaga

SEQ ID NO: 1877110 - RNA, 18 nt, Human
auauccauucuuucugau

SEQ ID NO: 1877111 - RNA, 17 nt, Human
auauccauucuuucuga

SEQ ID NO: 1877112 - RNA, 17 nt, Human
auauucaggaagcucag

SEQ ID NO: 1877113 - RNA, 14 nt, Human
auauucaggaagcu

SEQ ID NO: 1877114 - RNA, 16 nt, Human
auauucaggaagcuca

SEQ ID NO: 1877115 - RNA, 13 nt, Human
auauucaggaagc

SEQ ID NO: 1877116 - RNA, 22 nt, Human
auauuauaauuuuuuucaauau

SEQ ID NO: 1877117 - RNA, 18 nt, Human
auauuuaguguucauaaa

SEQ ID NO: 1877118 - RNA, 16 nt, Human
auauuuauaaaaauaa

SEQ ID NO: 1877119 - RNA, 14 nt, Human
auauuuagcuccaa

SEQ ID NO: 1877120 - RNA, 14 nt, Human
auauuuauaaaacu

SEQ ID NO: 1877121 - RNA, 14 nt, Human
auauuuauuaccuc

SEQ ID NO: 1877122 - RNA, 16 nt, Human
auauuuauuaccucug

SEQ ID NO: 1877123 - RNA, 22 nt, Human
auauaauguuguuauuuaaaga

SEQ ID NO: 1877124 - RNA, 21 nt, Human
auauaauguuguuauuuaaag

SEQ ID NO: 1877125 - RNA, 15 nt, Human
auauaaguguguguu

SEQ ID NO: 1877126 - RNA, 16 nt, Human
auaguaugguggcugg

SEQ ID NO: 1877127 - RNA, 15 nt, Human
auauaagugauugcu

SEQ ID NO: 1877128 - RNA, 15 nt, Human
auaguaugguggcug

SEQ ID NO: 1877129 - RNA, 15 nt, Human
auacuugaaaauuaa

SEQ ID NO: 1877130 - RNA, 16 nt, Human
auacuugaaaauuaac

SEQ ID NO: 1877131 - RNA, 21 nt, Human
auacuuccuuaugcuucuuuc

SEQ ID NO: 1877132 - RNA, 16 nt, Human
auauaggaacuuaaau

SEQ ID NO: 1877133 - RNA, 16 nt, Human
auauagcccagccagg

SEQ ID NO: 1877134 - RNA, 17 nt, Human
auaccucugugugcucc

SEQ ID NO: 1877135 - RNA, 16 nt, Human
auaccucugugugcuc

SEQ ID NO: 1877136 - RNA, 17 nt, Human
auaccugggauacugug

SEQ ID NO: 1877137 - RNA, 13 nt, Human
auaccuaagcaaa

SEQ ID NO: 1877138 - RNA, 13 nt, Human
auaccuguccccc

SEQ ID NO: 1877139 - RNA, 20 nt, Human
auaccugggauacugugccc

SEQ ID NO: 1877140 - RNA, 12 nt, Human
auaccugucccc

SEQ ID NO: 1877141 - RNA, 16 nt, Human
auaauuauaauauacu

SEQ ID NO: 1877142 - RNA, 14 nt, Human
auaauuacuauguc

SEQ ID NO: 1877143 - RNA, 16 nt, Human
auacuuaagcaaaagu

SEQ ID NO: 1877144 - RNA, 14 nt, Human
auacuuaagcaaaa

SEQ ID NO: 1877145 - RNA, 18 nt, Human
auaaugugaaacuggauu

SEQ ID NO: 1877146 - RNA, 22 nt, Human
auaaguuaacuauuuuauuuuc

SEQ ID NO: 1877147 - RNA, 19 nt, Human
auaaguguguguuuuucau

SEQ ID NO: 1877148 - RNA, 22 nt, Human
auaaguguguguuuuucauaaa

SEQ ID NO: 1877149 - RNA, 21 nt, Human
auaaugugaaacuggauuaaa

SEQ ID NO: 1877150 - RNA, 19 nt, Human
auaaugugaaacuggauua

SEQ ID NO: 1877151 - RNA, 19 nt, Human
auaaguauuuaauucaugu

SEQ ID NO: 1877152 - RNA, 14 nt, Human
auaaguguauuuuu

SEQ ID NO: 1877153 - RNA, 16 nt, Human
auaaguguauuuuuca

SEQ ID NO: 1877154 - RNA, 19 nt, Human
auaacagauuuuuuuugga

SEQ ID NO: 1877155 - RNA, 15 nt, Human
agugauuaccaggga

SEQ ID NO: 1877156 - RNA, 18 nt, Human
agugauuaccagggacug

SEQ ID NO: 1877157 - RNA, 14 nt, Human
agugauuacuguca

SEQ ID NO: 1877158 - RNA, 16 nt, Human
agugucuuuccacucc

SEQ ID NO: 1877159 - RNA, 23 nt, Human
agugugacaaggauugcuacugu

SEQ ID NO: 1877160 - RNA, 18 nt, Human
agugugaauaaagugcug

SEQ ID NO: 1877161 - RNA, 20 nt, Human
agugugaagcuuccuuggcu

SEQ ID NO: 1877162 - RNA, 19 nt, Human
aguuaagacaugauuuccu

SEQ ID NO: 1877163 - RNA, 20 nt, Human
aguuaagacaugauuuccuu

SEQ ID NO: 1877164 - RNA, 16 nt, Human
aguuaacuauuuuauu

SEQ ID NO: 1877165 - RNA, 15 nt, Human
aguuguuacauuuuu

SEQ ID NO: 1877166 - RNA, 13 nt, Human
aguuguuacauuu

SEQ ID NO: 1877167 - RNA, 23 nt, Human
aguuguuaauaaaaguacauguu

SEQ ID NO: 1877168 - RNA, 16 nt, Human
aguuguuacauuuuua

SEQ ID NO: 1877169 - RNA, 18 nt, Human
aguuacagacaaagcgug

SEQ ID NO: 1877170 - RNA, 13 nt, Human
aguuaagaccugg

SEQ ID NO: 1877171 - RNA, 16 nt, Human
aguuaagaccuggcag

SEQ ID NO: 1877172 - RNA, 17 nt, Human
aguuaagaccuggcagc

SEQ ID NO: 1877173 - RNA, 20 nt, Human
aguuacagccuguuaguaac

SEQ ID NO: 1877174 - RNA, 22 nt, Human
aguuacagccuguuaguaacau

SEQ ID NO: 1877175 - RNA, 23 nt, Human
aguugaauugaggggauuaauau

SEQ ID NO: 1877176 - RNA, 19 nt, Human
aguuguaccgcaaugugac

SEQ ID NO: 1877177 - RNA, 18 nt, Human
aguuguaccgcaauguga

SEQ ID NO: 1877178 - RNA, 15 nt, Human
aguugaauuuuacau

SEQ ID NO: 1877179 - RNA, 23 nt, Human
aguuguaucagcacguguggccu

SEQ ID NO: 1877180 - RNA, 20 nt, Human
aguuguaucagcacgugugg

SEQ ID NO: 1877181 - RNA, 16 nt, Human
agucaagugaaaaagg

SEQ ID NO: 1877182 - RNA, 20 nt, Human
agucaagcuccuccucccug

SEQ ID NO: 1877183 - RNA, 22 nt, Human
agucaagcuccuccucccugca

SEQ ID NO: 1877184 - RNA, 13 nt, Human
agucaagcuccuc

SEQ ID NO: 1877185 - RNA, 14 nt, Human
agucaagcuccucc

SEQ ID NO: 1877186 - RNA, 15 nt, Human
agucaagcuccuccu

SEQ ID NO: 1877187 - RNA, 16 nt, Human
agucaagcuccuccuc

SEQ ID NO: 1877188 - RNA, 17 nt, Human
agucaagcuccuccucc

SEQ ID NO: 1877189 - RNA, 18 nt, Human
agucaagcuccuccuccc

SEQ ID NO: 1877190 - RNA, 20 nt, Human
agucaagugaaaaaggagga

SEQ ID NO: 1877191 - RNA, 17 nt, Human
agucaauauuuuuagau

SEQ ID NO: 1877192 - RNA, 14 nt, Human
aguccaauguggca

SEQ ID NO: 1877193 - RNA, 11 nt, Human
aguccaagcug

SEQ ID NO: 1877194 - RNA, 14 nt, Human
aguccaagcuggga

SEQ ID NO: 1877195 - RNA, 16 nt, Human
aguccaagcugggaga

SEQ ID NO: 1877196 - RNA, 15 nt, Human
agucauuggcugucu

SEQ ID NO: 1877197 - RNA, 17 nt, Human
agucauucguucugugg

SEQ ID NO: 1877198 - RNA, 20 nt, Human
agucauucucauugaauuau

SEQ ID NO: 1877199 - RNA, 23 nt, Human
agucauucagauaugauucaaau

SEQ ID NO: 1877200 - RNA, 20 nt, Human
agucauucagauaugauuca

SEQ ID NO: 1877201 - RNA, 15 nt, Human
agucauucagauaug

SEQ ID NO: 1877202 - RNA, 13 nt, Human
agugauccuccca

SEQ ID NO: 1877203 - RNA, 16 nt, Human
aguccacaguggaacc

SEQ ID NO: 1877204 - RNA, 20 nt, Human
aguccagaaacuguucccac

SEQ ID NO: 1877205 - RNA, 18 nt, Human
augggaaucaagauuuaa

SEQ ID NO: 1877206 - RNA, 18 nt, Human
augggaaggugggcgggc

SEQ ID NO: 1877207 - RNA, 21 nt, Human
augggaaggugggcgggcagg

SEQ ID NO: 1877208 - RNA, 21 nt, Human
augggaaugaaugucagugug

SEQ ID NO: 1877209 - RNA, 15 nt, Human
augggaaugaauguc

SEQ ID NO: 1877210 - RNA, 18 nt, Human
auggcucuaaaaaguuuu

SEQ ID NO: 1877211 - RNA, 12 nt, Human
auggcuccucuc

SEQ ID NO: 1877212 - RNA, 13 nt, Human
auggcuccucuca

SEQ ID NO: 1877213 - RNA, 23 nt, Human
auggcugccaaugggagcucaug

SEQ ID NO: 1877214 - RNA, 19 nt, Human
auggaugggggaacucaga

SEQ ID NO: 1877215 - RNA, 12 nt, Human
auggauggaaaa

SEQ ID NO: 1877216 - RNA, 21 nt, Human
auggauggaaaacgcucucua

SEQ ID NO: 1877217 - RNA, 13 nt, Human
auggaugccaaua

SEQ ID NO: 1877218 - RNA, 22 nt, Human
auggaugccaauauuaaaucug

SEQ ID NO: 1877219 - RNA, 23 nt, Human
auggaugccaauauuaaaucugc

SEQ ID NO: 1877220 - RNA, 21 nt, Human
auggaaaacgcucucuacucu

SEQ ID NO: 1877221 - RNA, 19 nt, Human
auggaaaugggcagagcag

SEQ ID NO: 1877222 - RNA, 20 nt, Human
auggaaaugggcagagcaga

SEQ ID NO: 1877223 - RNA, 22 nt, Human
augcuuuuuauuauuauuauuu

SEQ ID NO: 1877224 - RNA, 16 nt, Human
augcuuuuuauuucug

SEQ ID NO: 1877225 - RNA, 19 nt, Human
augcuuuuuauuucugcau

SEQ ID NO: 1877226 - RNA, 23 nt, Human
augcuuuuuauuucugcauaugu

SEQ ID NO: 1877227 - RNA, 19 nt, Human
auggaaaacgcucucuacu

SEQ ID NO: 1877228 - RNA, 22 nt, Human
augcuuuuauauuuuuuuaaaa

SEQ ID NO: 1877229 - RNA, 14 nt, Human
augcuucuuucaaa

SEQ ID NO: 1877230 - RNA, 18 nt, Human
augcacauauggacucug

SEQ ID NO: 1877231 - RNA, 20 nt, Human
augcaugaaguaauaugcac

SEQ ID NO: 1877232 - RNA, 23 nt, Human
augcaugaaguaauaugcacaca

SEQ ID NO: 1877233 - RNA, 18 nt, Human
augcauuugaaaauuuug

SEQ ID NO: 1877234 - RNA, 12 nt, Human
augcauuugaaa

SEQ ID NO: 1877235 - RNA, 10 nt, Human
augcauuuga

SEQ ID NO: 1877236 - RNA, 17 nt, Human
augccugguggcagcug

SEQ ID NO: 1877237 - RNA, 16 nt, Human
augccugguggcagcu

SEQ ID NO: 1877238 - RNA, 15 nt, Human
augccugguggcagc

SEQ ID NO: 1877239 - RNA, 21 nt, Human
augccuggauggggcugcacc

SEQ ID NO: 1877240 - RNA, 23 nt, Human
augccuggauggggcugcaccgg

SEQ ID NO: 1877241 - RNA, 17 nt, Human
augccugggcagaagga

SEQ ID NO: 1877242 - RNA, 21 nt, Human
augcacagcuaacauggaagu

SEQ ID NO: 1877243 - RNA, 23 nt, Human
augcacacauuuuuuaaaugcac

SEQ ID NO: 1877244 - RNA, 14 nt, Human
augcacagcuaaca

SEQ ID NO: 1877245 - RNA, 22 nt, Human
augcacacauuuuuuaaaugca

SEQ ID NO: 1877246 - RNA, 19 nt, Human
augcacacauuuuuuaaau

SEQ ID NO: 1877247 - RNA, 17 nt, Human
augcacacauuuuuuaa

SEQ ID NO: 1877248 - RNA, 19 nt, Human
augaugugggucaaggaau

SEQ ID NO: 1877249 - RNA, 19 nt, Human
augauguguacccaaacgu

SEQ ID NO: 1877250 - RNA, 21 nt, Human
augccuuuguacuuuagggaa

SEQ ID NO: 1877251 - RNA, 14 nt, Human
augccuuuuauuuc

SEQ ID NO: 1877252 - RNA, 22 nt, Human
augucuuguacauguguagccu

SEQ ID NO: 1877253 - RNA, 17 nt, Human
augucuuguacaugugu

SEQ ID NO: 1877254 - RNA, 14 nt, Human
augucuuguacaug

SEQ ID NO: 1877255 - RNA, 20 nt, Human
augucuuggacacuguacaa

SEQ ID NO: 1877256 - RNA, 19 nt, Human
augucuuggacacuguaca

SEQ ID NO: 1877257 - RNA, 16 nt, Human
augucuuggacacugu

SEQ ID NO: 1877258 - RNA, 13 nt, Human
augucuuggacac

SEQ ID NO: 1877259 - RNA, 16 nt, Human
auguaaucaauguuuc

SEQ ID NO: 1877260 - RNA, 15 nt, Human
auguaaucaauguuu

SEQ ID NO: 1877261 - RNA, 16 nt, Human
auguaaguaaacgguc

SEQ ID NO: 1877262 - RNA, 17 nt, Human
auguaagcucuacugag

SEQ ID NO: 1877263 - RNA, 23 nt, Human
auggugacuuuugaaaagaggug

SEQ ID NO: 1877264 - RNA, 24 nt, Human
auggugaaaccccgucucuacuaa

SEQ ID NO: 1877265 - RNA, 17 nt, Human
auguacauguacugauu

SEQ ID NO: 1877266 - RNA, 20 nt, Human
auguacaggaugcuuugguu

SEQ ID NO: 1877267 - RNA, 14 nt, Human
auguacaagaugaa

SEQ ID NO: 1877268 - RNA, 20 nt, Human
auguacaauaagaacuucua

SEQ ID NO: 1877269 - RNA, 14 nt, Human
auguacaggaugcu

SEQ ID NO: 1877270 - RNA, 17 nt, Human
auguacaggaugcuuug

SEQ ID NO: 1877271 - RNA, 15 nt, Human
auguacaugagaagg

SEQ ID NO: 1877272 - RNA, 17 nt, Human
augucacaggcaggucc

SEQ ID NO: 1877273 - RNA, 16 nt, Human
augucacaggcagguc

SEQ ID NO: 1877274 - RNA, 14 nt, Human
augucacaggcagg

SEQ ID NO: 1877275 - RNA, 15 nt, Human
augucacaggcaggu

SEQ ID NO: 1877276 - RNA, 14 nt, Human
auguguagccugug

SEQ ID NO: 1877277 - RNA, 18 nt, Human
auguucucugaggacacu

SEQ ID NO: 1877278 - RNA, 18 nt, Human
auguuucuuuguaaugaa

SEQ ID NO: 1877279 - RNA, 20 nt, Human
auguucuuucacccuuuucu

SEQ ID NO: 1877280 - RNA, 15 nt, Human
auguucuuaauucuu

SEQ ID NO: 1877281 - RNA, 20 nt, Human
auguucuuaguggauguucu

SEQ ID NO: 1877282 - RNA, 22 nt, Human
auguucugacccugcuucaaau

SEQ ID NO: 1877283 - RNA, 18 nt, Human
auguuuuaagaggcaggg

SEQ ID NO: 1877284 - RNA, 16 nt, Human
auguuuuaagaggcag

SEQ ID NO: 1877285 - RNA, 16 nt, Human
auguuugcacuuguga

SEQ ID NO: 1877286 - RNA, 14 nt, Human
auuaaaugcccagc

SEQ ID NO: 1877287 - RNA, 15 nt, Human
auuaaaugcccagcc

SEQ ID NO: 1877288 - RNA, 16 nt, Human
auuaaaugcccagccc

SEQ ID NO: 1877289 - RNA, 13 nt, Human
auuaaauucacaa

SEQ ID NO: 1877290 - RNA, 13 nt, Human
auuaaauucuugc

SEQ ID NO: 1877291 - RNA, 14 nt, Human
auuaaauucacaaa

SEQ ID NO: 1877292 - RNA, 16 nt, Human
auuaaauucacaaacu

SEQ ID NO: 1877293 - RNA, 17 nt, Human
auuaaauucacaaacuu

SEQ ID NO: 1877294 - RNA, 18 nt, Human
auuaaauucacaaacuuu

SEQ ID NO: 1877295 - RNA, 14 nt, Human
auguguaaguauuc

SEQ ID NO: 1877296 - RNA, 21 nt, Human
augugguuacacagugugaau

SEQ ID NO: 1877297 - RNA, 16 nt, Human
augugggucaaggaau

SEQ ID NO: 1877298 - RNA, 18 nt, Human
augugggggucugugugu

SEQ ID NO: 1877299 - RNA, 17 nt, Human
augugggggucugugug

SEQ ID NO: 1877300 - RNA, 16 nt, Human
augugggggucugugu

SEQ ID NO: 1877301 - RNA, 22 nt, Human
aucuuauaauuuaaaauaugcu

SEQ ID NO: 1877302 - RNA, 15 nt, Human
aucugggcacugaag

SEQ ID NO: 1877303 - RNA, 19 nt, Human
aucuggaaccucagccugg

SEQ ID NO: 1877304 - RNA, 20 nt, Human
aucuggaaccucagccuggc

SEQ ID NO: 1877305 - RNA, 21 nt, Human
aucuggaaccucagccuggcc

SEQ ID NO: 1877306 - RNA, 22 nt, Human
aucuggaaccucagccuggcca

SEQ ID NO: 1877307 - RNA, 21 nt, Human
aucuggaaucuggagaccagg

SEQ ID NO: 1877308 - RNA, 19 nt, Human
aucuuccaacucaaacucu

SEQ ID NO: 1877309 - RNA, 22 nt, Human
aucuuaucaagaguugugacaa

SEQ ID NO: 1877310 - RNA, 18 nt, Human
aucuuaucauggucucag

SEQ ID NO: 1877311 - RNA, 20 nt, Human
aucuuaucauggucucaguc

SEQ ID NO: 1877312 - RNA, 15 nt, Human
aucucucuucuuuuc

SEQ ID NO: 1877313 - RNA, 14 nt, Human
aucucucugcccaa

SEQ ID NO: 1877314 - RNA, 20 nt, Human
aucugcucuccuuccuggag

SEQ ID NO: 1877315 - RNA, 17 nt, Human
aucugcucuccuuccug

SEQ ID NO: 1877316 - RNA, 16 nt, Human
aucugcucuccuuccu

SEQ ID NO: 1877317 - RNA, 15 nt, Human
aucugcucuccuucc

SEQ ID NO: 1877318 - RNA, 14 nt, Human
aucugcucuccuuc

SEQ ID NO: 1877319 - RNA, 13 nt, Human
aucugcucuccuu

SEQ ID NO: 1877320 - RNA, 21 nt, Human
aucugcucuccuuccuggagc

SEQ ID NO: 1877321 - RNA, 14 nt, Human
aucugcuggaguuu

SEQ ID NO: 1877322 - RNA, 18 nt, Human
aucugcuggaguuucaug

SEQ ID NO: 1877323 - RNA, 19 nt, Human
aucuggaacccagacucag

SEQ ID NO: 1877324 - RNA, 23 nt, Human
aucuggaacccagacucagacau

SEQ ID NO: 1877325 - RNA, 11 nt, Human
aucuggaaccu

SEQ ID NO: 1877326 - RNA, 16 nt, Human
aucuggaaccucagcc

SEQ ID NO: 1877327 - RNA, 17 nt, Human
aucuggaaccucagccu

SEQ ID NO: 1877328 - RNA, 18 nt, Human
aucuggaaccucagccug

SEQ ID NO: 1877329 - RNA, 22 nt, Human
aucucucgugauugauaagaac

SEQ ID NO: 1877330 - RNA, 18 nt, Human
aucucuaacagcucagga

SEQ ID NO: 1877331 - RNA, 20 nt, Human
aucucuaacagcucaggauc

SEQ ID NO: 1877332 - RNA, 17 nt, Human
aucuugaagacuuuucu

SEQ ID NO: 1877333 - RNA, 23 nt, Human
aucuugaaauuaagaaggcaaaa

SEQ ID NO: 1877334 - RNA, 21 nt, Human
aucuugaaauuaagaaggcaa

SEQ ID NO: 1877335 - RNA, 22 nt, Human
aucuugaaauuaagaaggcaaa

SEQ ID NO: 1877336 - RNA, 17 nt, Human
aucuucuuuauaauucu

SEQ ID NO: 1877337 - RNA, 12 nt, Human
aucuugaaauua

SEQ ID NO: 1877338 - RNA, 22 nt, Human
augaaaaaauauauaucaaaua

SEQ ID NO: 1877339 - RNA, 14 nt, Human
augaaaaaauauau

SEQ ID NO: 1877340 - RNA, 17 nt, Human
augaaaaaauauauauc

SEQ ID NO: 1877341 - RNA, 12 nt, Human
augaaaacuuau

SEQ ID NO: 1877342 - RNA, 17 nt, Human
augacuccagaauuucc

SEQ ID NO: 1877343 - RNA, 12 nt, Human
augacuccagaa

SEQ ID NO: 1877344 - RNA, 16 nt, Human
augacuccagaauuuc

SEQ ID NO: 1877345 - RNA, 19 nt, Human
augacucaggacauccccc

SEQ ID NO: 1877346 - RNA, 15 nt, Human
augacucaagauucc

SEQ ID NO: 1877347 - RNA, 16 nt, Human
augacucaagauuccc

SEQ ID NO: 1877348 - RNA, 19 nt, Human
augacucaagauucccagg

SEQ ID NO: 1877349 - RNA, 20 nt, Human
augacucaagauucccagga

SEQ ID NO: 1877350 - RNA, 21 nt, Human
augacucaagauucccaggag

SEQ ID NO: 1877351 - RNA, 22 nt, Human
augacucaagauucccaggagu

SEQ ID NO: 1877352 - RNA, 23 nt, Human
augacucaagauucccaggaguu

SEQ ID NO: 1877353 - RNA, 16 nt, Human
augacuaauucuugca

SEQ ID NO: 1877354 - RNA, 17 nt, Human
augacuaauucuugcau

SEQ ID NO: 1877355 - RNA, 18 nt, Human
augaagcuuuuaugugaa

SEQ ID NO: 1877356 - RNA, 19 nt, Human
augaagcuuuuaugugaaa

SEQ ID NO: 1877357 - RNA, 20 nt, Human
augaagcuuuuaugugaaac

SEQ ID NO: 1877358 - RNA, 21 nt, Human
augaagcuuuuaugugaaaca

SEQ ID NO: 1877359 - RNA, 12 nt, Human
augacccagugg

SEQ ID NO: 1877360 - RNA, 18 nt, Human
augaccucuuccuuuagg

SEQ ID NO: 1877361 - RNA, 13 nt, Human
augagccuggcaa

SEQ ID NO: 1877362 - RNA, 14 nt, Human
augagccuggcaag

SEQ ID NO: 1877363 - RNA, 14 nt, Human
auccuccucagauc

SEQ ID NO: 1877364 - RNA, 13 nt, Human
aucgaugcagugc

SEQ ID NO: 1877365 - RNA, 23 nt, Human
auccucauacccacccccaccca

SEQ ID NO: 1877366 - RNA, 11 nt, Human
auccuccucag

SEQ ID NO: 1877367 - RNA, 13 nt, Human
auccuccaggugc

SEQ ID NO: 1877368 - RNA, 14 nt, Human
auccuccaggugca

SEQ ID NO: 1877369 - RNA, 19 nt, Human
auccuccaggugcacaagc

SEQ ID NO: 1877370 - RNA, 22 nt, Human
auccuccaggugcacaagcucc

SEQ ID NO: 1877371 - RNA, 20 nt, Human
auccacccaccucagccucc

SEQ ID NO: 1877372 - RNA, 18 nt, Human
auccacccaccucagccu

SEQ ID NO: 1877373 - RNA, 15 nt, Human
aucccuacuguaauu

SEQ ID NO: 1877374 - RNA, 22 nt, Human
aucccuaggucuugggagcucu

SEQ ID NO: 1877375 - RNA, 18 nt, Human
auccucauacccaccccc

SEQ ID NO: 1877376 - RNA, 19 nt, Human
auccucauacccaccccca

SEQ ID NO: 1877377 - RNA, 22 nt, Human
auccucauacccacccccaccc

SEQ ID NO: 1877378 - RNA, 11 nt, Human
aucagccuggg

SEQ ID NO: 1877379 - RNA, 20 nt, Human
aucagccugggcaaugugau

SEQ ID NO: 1877380 - RNA, 21 nt, Human
aucagccugggcaaugugaua

SEQ ID NO: 1877381 - RNA, 12 nt, Human
aucagcugcuac

SEQ ID NO: 1877382 - RNA, 13 nt, Human
aucagcugcuacu

SEQ ID NO: 1877383 - RNA, 23 nt, Human
aucagcugcuacuacuccuguag

SEQ ID NO: 1877384 - RNA, 15 nt, Human
aucaucuuugugaag

SEQ ID NO: 1877385 - RNA, 13 nt, Human
aucaucugccgug

SEQ ID NO: 1877386 - RNA, 12 nt, Human
agacuaaaagau

SEQ ID NO: 1877387 - RNA, 12 nt, Human
agacuaaaugaa

SEQ ID NO: 1877388 - RNA, 13 nt, Human
agacuaaaugaaa

SEQ ID NO: 1877389 - RNA, 19 nt, Human
agacggagucccaccuugg

SEQ ID NO: 1877390 - RNA, 18 nt, Human
agacgggggcagagaggg

SEQ ID NO: 1877391 - RNA, 14 nt, Human
agacguguuugugu

SEQ ID NO: 1877392 - RNA, 13 nt, Human
agaccauaauguu

SEQ ID NO: 1877393 - RNA, 13 nt, Human
agaccaucccuga

SEQ ID NO: 1877394 - RNA, 15 nt, Human
agaccagggagccuu

SEQ ID NO: 1877395 - RNA, 14 nt, Human
agaccaucccugaa

SEQ ID NO: 1877396 - RNA, 17 nt, Human
agaccaucccugaaggc

SEQ ID NO: 1877397 - RNA, 18 nt, Human
agaccaucccugaaggcc

SEQ ID NO: 1877398 - RNA, 21 nt, Human
agaccaucccugaaggccccg

SEQ ID NO: 1877399 - RNA, 18 nt, Human
agacagcccgggcucugc

SEQ ID NO: 1877400 - RNA, 20 nt, Human
agacagcccgggcucugccu

SEQ ID NO: 1877401 - RNA, 17 nt, Human
agacagcccgggcucug

SEQ ID NO: 1877402 - RNA, 16 nt, Human
agaccaccacuucgaa

SEQ ID NO: 1877403 - RNA, 21 nt, Human
agacaauuuauuauggcacau

SEQ ID NO: 1877404 - RNA, 15 nt, Human
agacaauuuauuaug

SEQ ID NO: 1877405 - RNA, 19 nt, Human
agacaaugacuuacuguac

SEQ ID NO: 1877406 - RNA, 17 nt, Human
agacaaugacuuacugu

SEQ ID NO: 1877407 - RNA, 13 nt, Human
agacaaugacuua

SEQ ID NO: 1877408 - RNA, 19 nt, Human
agacugaucaggaccucca

SEQ ID NO: 1877409 - RNA, 14 nt, Human
agacugaucaggac

SEQ ID NO: 1877410 - RNA, 16 nt, Human
agacugaucaggaccu

SEQ ID NO: 1877411 - RNA, 17 nt, Human
agacugaucaggaccuc

SEQ ID NO: 1877412 - RNA, 23 nt, Human
agacugaguacguugugcauuug

SEQ ID NO: 1877413 - RNA, 18 nt, Human
agagccuggugcugcugc

SEQ ID NO: 1877414 - RNA, 16 nt, Human
agagccuggugcugcu

SEQ ID NO: 1877415 - RNA, 23 nt, Human
agagaggguggugaccucugccu

SEQ ID NO: 1877416 - RNA, 18 nt, Human
agagaaaguacuucucca

SEQ ID NO: 1877417 - RNA, 23 nt, Human
agagaaaggggagcccacugucc

SEQ ID NO: 1877418 - RNA, 10 nt, Human
agagaagaga

SEQ ID NO: 1877419 - RNA, 21 nt, Human
agagaagagauugugguuuca

SEQ ID NO: 1877420 - RNA, 18 nt, Human
agagaaaggggagcccac

SEQ ID NO: 1877421 - RNA, 14 nt, Human
agagaaagcgcaga

SEQ ID NO: 1877422 - RNA, 19 nt, Human
agagaaaggggagcccacu

SEQ ID NO: 1877423 - RNA, 21 nt, Human
agagaaaggggagcccacugu

SEQ ID NO: 1877424 - RNA, 21 nt, Human
agauaggucagugcaaauacu

SEQ ID NO: 1877425 - RNA, 15 nt, Human
agauagccaaggcca

SEQ ID NO: 1877426 - RNA, 16 nt, Human
agauagccaaggccaa

SEQ ID NO: 1877427 - RNA, 15 nt, Human
agauaguuacuauau

SEQ ID NO: 1877428 - RNA, 19 nt, Human
agaucuucaaacagaauaa

SEQ ID NO: 1877429 - RNA, 18 nt, Human
agaucuguuuugaaggca

SEQ ID NO: 1877430 - RNA, 19 nt, Human
agaucuguccucagccuug

SEQ ID NO: 1877431 - RNA, 23 nt, Human
agaucuguccucagccuugccag

SEQ ID NO: 1877432 - RNA, 14 nt, Human
agaucuguuuugaa

SEQ ID NO: 1877433 - RNA, 21 nt, Human
agaucuguuuugaaggcaaaa

SEQ ID NO: 1877434 - RNA, 13 nt, Human
agauagccaaggc

SEQ ID NO: 1877435 - RNA, 17 nt, Human
agauacuuugcuagccg

SEQ ID NO: 1877436 - RNA, 22 nt, Human
agauacuuggggggcugaggug

SEQ ID NO: 1877437 - RNA, 18 nt, Human
agaggggcagauggaaag

SEQ ID NO: 1877438 - RNA, 22 nt, Human
agaggggaacagacuggaagca

SEQ ID NO: 1877439 - RNA, 18 nt, Human
agaggggaaaagagauga

SEQ ID NO: 1877440 - RNA, 16 nt, Human
agaggggaagagacuu

SEQ ID NO: 1877441 - RNA, 18 nt, Human
agaggaugcugugaaauu

SEQ ID NO: 1877442 - RNA, 18 nt, Human
agaggauaauuagcaucu

SEQ ID NO: 1877443 - RNA, 16 nt, Human
agaggggaaaagagau

SEQ ID NO: 1877444 - RNA, 13 nt, Human
agaggagaggggc

SEQ ID NO: 1877445 - RNA, 14 nt, Human
agccgucaccccug

SEQ ID NO: 1877446 - RNA, 19 nt, Human
agccucccaaagugcuggg

SEQ ID NO: 1877447 - RNA, 18 nt, Human
agccucccaaagugcugg

SEQ ID NO: 1877448 - RNA, 21 nt, Human
agccgagaucacgccacugca

SEQ ID NO: 1877449 - RNA, 19 nt, Human
agccgagauugcaccacug

SEQ ID NO: 1877450 - RNA, 20 nt, Human
agccgagauugcaccacugc

SEQ ID NO: 1877451 - RNA, 14 nt, Human
agcccugaguuccu

SEQ ID NO: 1877452 - RNA, 14 nt, Human
agccgcuggggcca

SEQ ID NO: 1877453 - RNA, 22 nt, Human
agccgcuggggccaguuggucc

SEQ ID NO: 1877454 - RNA, 22 nt, Human
agccucccgaguagcugggacu

SEQ ID NO: 1877455 - RNA, 13 nt, Human
agccucccugaag

SEQ ID NO: 1877456 - RNA, 11 nt, Human
agccuccugag

SEQ ID NO: 1877457 - RNA, 14 nt, Human
agccucccugaagc

SEQ ID NO: 1877458 - RNA, 15 nt, Human
agccucccugaagcc

SEQ ID NO: 1877459 - RNA, 16 nt, Human
agccucccugaagccu

SEQ ID NO: 1877460 - RNA, 17 nt, Human
agccucccgaguagcug

SEQ ID NO: 1877461 - RNA, 22 nt, Human
agccucccgaauagcugggacu

SEQ ID NO: 1877462 - RNA, 20 nt, Human
agccucccgaauagcuggga

SEQ ID NO: 1877463 - RNA, 19 nt, Human
agccucccgaauagcuggg

SEQ ID NO: 1877464 - RNA, 18 nt, Human
agccucccgaauagcugg

SEQ ID NO: 1877465 - RNA, 20 nt, Human
agccucccaaagugcuggga

SEQ ID NO: 1877466 - RNA, 19 nt, Human
agccuccugaguagcugga

SEQ ID NO: 1877467 - RNA, 20 nt, Human
agccgagaucacgccacugc

SEQ ID NO: 1877468 - RNA, 19 nt, Human
agccgagaucacgccacug

SEQ ID NO: 1877469 - RNA, 15 nt, Human
agcccugagcuuucu

SEQ ID NO: 1877470 - RNA, 13 nt, Human
agcccugacccug

SEQ ID NO: 1877471 - RNA, 15 nt, Human
agcccugacccugug

SEQ ID NO: 1877472 - RNA, 17 nt, Human
agcccugacccugugga

SEQ ID NO: 1877473 - RNA, 21 nt, Human
agcccugacccuguggaagca

SEQ ID NO: 1877474 - RNA, 16 nt, Human
agccccagugcccaca

SEQ ID NO: 1877475 - RNA, 20 nt, Human
agccccaucccaaacccuuc

SEQ ID NO: 1877476 - RNA, 11 nt, Human
agccccauccu

SEQ ID NO: 1877477 - RNA, 23 nt, Human
agcccaaagugguauagaaaugc

SEQ ID NO: 1877478 - RNA, 20 nt, Human
agcccaaagugguauagaaa

SEQ ID NO: 1877479 - RNA, 16 nt, Human
agcccaagggaucugg

SEQ ID NO: 1877480 - RNA, 21 nt, Human
agcccaagggaucugguccua

SEQ ID NO: 1877481 - RNA, 22 nt, Human
agcccaagggaucugguccuac

SEQ ID NO: 1877482 - RNA, 21 nt, Human
agcaucuuugaauacaaagaa

SEQ ID NO: 1877483 - RNA, 23 nt, Human
agccaaagcuaggccuggccaga

SEQ ID NO: 1877484 - RNA, 20 nt, Human
agccaaagcuaggccuggcc

SEQ ID NO: 1877485 - RNA, 19 nt, Human
agccaaagcuaggccuggc

SEQ ID NO: 1877486 - RNA, 14 nt, Human
agcaugcacaaauu

SEQ ID NO: 1877487 - RNA, 12 nt, Human
agcaugccugga

SEQ ID NO: 1877488 - RNA, 17 nt, Human
agcaugaucugaaaaau

SEQ ID NO: 1877489 - RNA, 20 nt, Human
agccagaggagagaggaccc

SEQ ID NO: 1877490 - RNA, 16 nt, Human
agccaaggcucuguuu

SEQ ID NO: 1877491 - RNA, 13 nt, Human
agccagaggucug

SEQ ID NO: 1877492 - RNA, 22 nt, Human
agccaaggccaaaggaagcaca

SEQ ID NO: 1877493 - RNA, 23 nt, Human
agccaaggccaaaggaagcacau

SEQ ID NO: 1877494 - RNA, 21 nt, Human
agccaaggcucuguuuaugcu

SEQ ID NO: 1877495 - RNA, 13 nt, Human
agccagcacacag

SEQ ID NO: 1877496 - RNA, 16 nt, Human
agcccaaagaaggaaa

SEQ ID NO: 1877497 - RNA, 15 nt, Human
agcagccagccguga

SEQ ID NO: 1877498 - RNA, 10 nt, Human
agcagccacg

SEQ ID NO: 1877499 - RNA, 13 nt, Human
agcagccacgagg

SEQ ID NO: 1877500 - RNA, 19 nt, Human
agcacuaaggugugcucug

SEQ ID NO: 1877501 - RNA, 20 nt, Human
agcacuaaggugugcucuga

SEQ ID NO: 1877502 - RNA, 21 nt, Human
agcagccacauuccugaugcu

SEQ ID NO: 1877503 - RNA, 14 nt, Human
agauguagaggaga

SEQ ID NO: 1877504 - RNA, 21 nt, Human
agaugggagaaucacuugaac

SEQ ID NO: 1877505 - RNA, 22 nt, Human
agauguaauuguuugucuuuaa

SEQ ID NO: 1877506 - RNA, 21 nt, Human
agguaccccuuucuggcucuc

SEQ ID NO: 1877507 - RNA, 17 nt, Human
agguaccccuuucuggc

SEQ ID NO: 1877508 - RNA, 17 nt, Human
aggucccuaauaaagcu

SEQ ID NO: 1877509 - RNA, 18 nt, Human
aggucccuaauaaagcug

SEQ ID NO: 1877510 - RNA, 19 nt, Human
aggucccuaauaaagcugu

SEQ ID NO: 1877511 - RNA, 20 nt, Human
aggucccuaauaaagcugug

SEQ ID NO: 1877512 - RNA, 18 nt, Human
agguaauauaaaaagcuu

SEQ ID NO: 1877513 - RNA, 17 nt, Human
agguaaggaauaccugu

SEQ ID NO: 1877514 - RNA, 17 nt, Human
aggggccgcugccaccc

SEQ ID NO: 1877515 - RNA, 11 nt, Human
agguucuaaaa

SEQ ID NO: 1877516 - RNA, 14 nt, Human
agguucccaagcuc

SEQ ID NO: 1877517 - RNA, 15 nt, Human
agguucccaagcuca

SEQ ID NO: 1877518 - RNA, 16 nt, Human
agguucccaagcucag

SEQ ID NO: 1877519 - RNA, 13 nt, Human
agguucagcuugu

SEQ ID NO: 1877520 - RNA, 17 nt, Human
agguucaugcaaacuuu

SEQ ID NO: 1877521 - RNA, 17 nt, Human
agguucaaagauauuuu

SEQ ID NO: 1877522 - RNA, 14 nt, Human
agguuaauguucau

SEQ ID NO: 1877523 - RNA, 15 nt, Human
agguuaauaaaguaa

SEQ ID NO: 1877524 - RNA, 23 nt, Human
agguggcaucagugucuuuccac

SEQ ID NO: 1877525 - RNA, 22 nt, Human
agguggcaucagugucuuucca

SEQ ID NO: 1877526 - RNA, 17 nt, Human
aggugcugccauccagg

SEQ ID NO: 1877527 - RNA, 16 nt, Human
aggugcugccauccag

SEQ ID NO: 1877528 - RNA, 16 nt, Human
aggugcugacggccag

SEQ ID NO: 1877529 - RNA, 17 nt, Human
aggugcugacggccagg

SEQ ID NO: 1877530 - RNA, 20 nt, Human
aggugcugacggccagggag

SEQ ID NO: 1877531 - RNA, 14 nt, Human
aggucgaggcagga

SEQ ID NO: 1877532 - RNA, 15 nt, Human
agguggaaauaaacu

SEQ ID NO: 1877533 - RNA, 16 nt, Human
agguggaagagggcug

SEQ ID NO: 1877534 - RNA, 16 nt, Human
agggcacaaagauggg

SEQ ID NO: 1877535 - RNA, 17 nt, Human
agggcacaccgggcacu

SEQ ID NO: 1877536 - RNA, 21 nt, Human
agggcacaccgggcacucaga

SEQ ID NO: 1877537 - RNA, 20 nt, Human
agggcacaccgggcacucag

SEQ ID NO: 1877538 - RNA, 22 nt, Human
agggcacagaaaauggaagaca

SEQ ID NO: 1877539 - RNA, 15 nt, Human
agggccuggccugag

SEQ ID NO: 1877540 - RNA, 14 nt, Human
agggcacaggccau

SEQ ID NO: 1877541 - RNA, 17 nt, Human
agggcacaggccaugga

SEQ ID NO: 1877542 - RNA, 19 nt, Human
agggcacaggccauggaug

SEQ ID NO: 1877543 - RNA, 16 nt, Human
agggccuggccugagc

SEQ ID NO: 1877544 - RNA, 17 nt, Human
agggccuggccugagcu

SEQ ID NO: 1877545 - RNA, 19 nt, Human
agggcgggaggauguucug

SEQ ID NO: 1877546 - RNA, 18 nt, Human
agggccuggccugagcug

SEQ ID NO: 1877547 - RNA, 21 nt, Human
aggggauagagagagaccacu

SEQ ID NO: 1877548 - RNA, 18 nt, Human
aggggauuaauaugaaaa

SEQ ID NO: 1877549 - RNA, 15 nt, Human
aggggcacagggucu

SEQ ID NO: 1877550 - RNA, 15 nt, Human
aggggcagauggaaa

SEQ ID NO: 1877551 - RNA, 19 nt, Human
aggggcagauggaaaggag

SEQ ID NO: 1877552 - RNA, 15 nt, Human
aggggccgcugccac

SEQ ID NO: 1877553 - RNA, 16 nt, Human
aggggccgcugccacc

SEQ ID NO: 1877554 - RNA, 22 nt, Human
aggggccgcugccacccaccuc

SEQ ID NO: 1877555 - RNA, 13 nt, Human
aggggcccggcca

SEQ ID NO: 1877556 - RNA, 15 nt, Human
aggggcccggccagc

SEQ ID NO: 1877557 - RNA, 17 nt, Human
aggggcccggccagcca

SEQ ID NO: 1877558 - RNA, 19 nt, Human
aggggcccggccagccaug

SEQ ID NO: 1877559 - RNA, 21 nt, Human
aggggcccggccagccauguc

SEQ ID NO: 1877560 - RNA, 23 nt, Human
aggggcccggccagccaugucug

SEQ ID NO: 1877561 - RNA, 18 nt, Human
aggcugccucucccauca

SEQ ID NO: 1877562 - RNA, 20 nt, Human
agggacucaucauuuccauu

SEQ ID NO: 1877563 - RNA, 21 nt, Human
agggacgcuacccgggaaggg

SEQ ID NO: 1877564 - RNA, 21 nt, Human
agggacgcuuugggagaaugu

SEQ ID NO: 1877565 - RNA, 12 nt, Human
agggacagaggg

SEQ ID NO: 1877566 - RNA, 17 nt, Human
agggacagaggccccag

SEQ ID NO: 1877567 - RNA, 20 nt, Human
agggacagaggccccagccu

SEQ ID NO: 1877568 - RNA, 21 nt, Human
agggacagaggccccagccuc

SEQ ID NO: 1877569 - RNA, 22 nt, Human
agggacagaggccccagccucc

SEQ ID NO: 1877570 - RNA, 13 nt, Human
agggacagagggg

SEQ ID NO: 1877571 - RNA, 20 nt, Human
agggacagaggggguggccu

SEQ ID NO: 1877572 - RNA, 23 nt, Human
aggcuagugugguguuuccuggc

SEQ ID NO: 1877573 - RNA, 19 nt, Human
aggcuauggggauagaugu

SEQ ID NO: 1877574 - RNA, 22 nt, Human
aggcuauggggauagaugugug

SEQ ID NO: 1877575 - RNA, 21 nt, Human
aggcuauggggauagaugugu

SEQ ID NO: 1877576 - RNA, 18 nt, Human
aggcugaggcuggcacag

SEQ ID NO: 1877577 - RNA, 21 nt, Human
aggcugcaagguuuaggcugg

SEQ ID NO: 1877578 - RNA, 22 nt, Human
aggcugcaagguuuaggcuggu

SEQ ID NO: 1877579 - RNA, 18 nt, Human
aggcugcagccaggccac

SEQ ID NO: 1877580 - RNA, 21 nt, Human
aggaccuccaagccacugagc

SEQ ID NO: 1877581 - RNA, 15 nt, Human
aggaccuccaagcca

SEQ ID NO: 1877582 - RNA, 14 nt, Human
aggaccucagguga

SEQ ID NO: 1877583 - RNA, 20 nt, Human
aggaccucaggugagaagca

SEQ ID NO: 1877584 - RNA, 11 nt, Human
aggagaagcca

SEQ ID NO: 1877585 - RNA, 12 nt, Human
aggagaagccag

SEQ ID NO: 1877586 - RNA, 13 nt, Human
aggagaagccagg

SEQ ID NO: 1877587 - RNA, 21 nt, Human
aggagaacucauguuauuuuu

SEQ ID NO: 1877588 - RNA, 15 nt, Human
aggagagcuagcagc

SEQ ID NO: 1877589 - RNA, 14 nt, Human
aggagaagccagga

SEQ ID NO: 1877590 - RNA, 15 nt, Human
aggagaagccaggaa

SEQ ID NO: 1877591 - RNA, 14 nt, Human
aggagaggggcaca

SEQ ID NO: 1877592 - RNA, 16 nt, Human
aggagaggggcacagg

SEQ ID NO: 1877593 - RNA, 18 nt, Human
aggagaggggcacagggu

SEQ ID NO: 1877594 - RNA, 20 nt, Human
aggaccccuccaugugggcu

SEQ ID NO: 1877595 - RNA, 23 nt, Human
aggaccagcucaggacagaugcc

SEQ ID NO: 1877596 - RNA, 13 nt, Human
aggaccagcucag

SEQ ID NO: 1877597 - RNA, 14 nt, Human
aggaccagcucagg

SEQ ID NO: 1877598 - RNA, 15 nt, Human
aggaccagcucagga

SEQ ID NO: 1877599 - RNA, 18 nt, Human
aggaccagcucaggacag

SEQ ID NO: 1877600 - RNA, 12 nt, Human
aggaccagcuca

SEQ ID NO: 1877601 - RNA, 15 nt, Human
aggaacuacugagga

SEQ ID NO: 1877602 - RNA, 16 nt, Human
aggaacugcugggcuu

SEQ ID NO: 1877603 - RNA, 20 nt, Human
aggauguucugggacacagu

SEQ ID NO: 1877604 - RNA, 14 nt, Human
aggauguugaaaaa

SEQ ID NO: 1877605 - RNA, 17 nt, Human
aggauguugaaaaaguu

SEQ ID NO: 1877606 - RNA, 17 nt, Human
aggaggggauagagaga

SEQ ID NO: 1877607 - RNA, 13 nt, Human
aggaggggccgcu

SEQ ID NO: 1877608 - RNA, 16 nt, Human
aggauucuuccucccu

SEQ ID NO: 1877609 - RNA, 12 nt, Human
aggauucuuccu

SEQ ID NO: 1877610 - RNA, 19 nt, Human
aggauuccucuuuucucug

SEQ ID NO: 1877611 - RNA, 15 nt, Human
aggauuccucuuuuc

SEQ ID NO: 1877612 - RNA, 16 nt, Human
aggauuccucuuuucu

SEQ ID NO: 1877613 - RNA, 16 nt, Human
agcuccucacucaccu

SEQ ID NO: 1877614 - RNA, 13 nt, Human
agcuccuccuccc

SEQ ID NO: 1877615 - RNA, 14 nt, Human
agcuccuccucccu

SEQ ID NO: 1877616 - RNA, 15 nt, Human
agcuccuccucccug

SEQ ID NO: 1877617 - RNA, 16 nt, Human
agcuccuccucccugc

SEQ ID NO: 1877618 - RNA, 17 nt, Human
agcuccuccucccugca

SEQ ID NO: 1877619 - RNA, 23 nt, Human
agcuccuccucccugcaucugac

SEQ ID NO: 1877620 - RNA, 21 nt, Human
agcuccuccucccugcaucug

SEQ ID NO: 1877621 - RNA, 21 nt, Human
agcuggucccacucaguccau

SEQ ID NO: 1877622 - RNA, 22 nt, Human
agcugggugucaagagggucug

SEQ ID NO: 1877623 - RNA, 17 nt, Human
agcugggugucaagagg

SEQ ID NO: 1877624 - RNA, 15 nt, Human
agcugggucaggcag

SEQ ID NO: 1877625 - RNA, 16 nt, Human
agcugggucaggcagg

SEQ ID NO: 1877626 - RNA, 17 nt, Human
agcugggucaggcaggg

SEQ ID NO: 1877627 - RNA, 17 nt, Human
agcugcuccuagaggga

SEQ ID NO: 1877628 - RNA, 18 nt, Human
agcugcuccuagagggag

SEQ ID NO: 1877629 - RNA, 19 nt, Human
agcugcuccuagagggagg

SEQ ID NO: 1877630 - RNA, 20 nt, Human
agcugcuccuagagggaggg

SEQ ID NO: 1877631 - RNA, 22 nt, Human
agcugcuccuagagggaggggc

SEQ ID NO: 1877632 - RNA, 16 nt, Human
agcugacccagccccu

SEQ ID NO: 1877633 - RNA, 23 nt, Human
agcugacccagccccuugagaaa

SEQ ID NO: 1877634 - RNA, 21 nt, Human
agcugaggccacacucagcac

SEQ ID NO: 1877635 - RNA, 22 nt, Human
agcugaggccacacucagcaca

SEQ ID NO: 1877636 - RNA, 15 nt, Human
agcugagugaaaaau

SEQ ID NO: 1877637 - RNA, 19 nt, Human
agcuucucauccugcaggc

SEQ ID NO: 1877638 - RNA, 14 nt, Human
agcuuccuuggcuu

SEQ ID NO: 1877639 - RNA, 15 nt, Human
agcuuccuuggcuuu

SEQ ID NO: 1877640 - RNA, 20 nt, Human
aggaaauggcuguggagugu

SEQ ID NO: 1877641 - RNA, 21 nt, Human
agcuuuuaugugaaacauguu

SEQ ID NO: 1877642 - RNA, 14 nt, Human
aggaaaaacagguc

SEQ ID NO: 1877643 - RNA, 15 nt, Human
agcuuuucccuuuuu

SEQ ID NO: 1877644 - RNA, 13 nt, Human
aggaaaaacugau

SEQ ID NO: 1877645 - RNA, 15 nt, Human
aggaaaaacugauuu

SEQ ID NO: 1877646 - RNA, 17 nt, Human
cugcuaucaaagagguu

SEQ ID NO: 1877647 - RNA, 24 nt, Human
cugcugaaggcucgagcaugccug

SEQ ID NO: 1877648 - RNA, 23 nt, Human
cugcugaaggcucgagcaugccu

SEQ ID NO: 1877649 - RNA, 18 nt, Human
cugcugaaggcucgagca

SEQ ID NO: 1877650 - RNA, 23 nt, Human
cugccuguucagcuccagcucac

SEQ ID NO: 1877651 - RNA, 20 nt, Human
cugccuguucagcuccagcu

SEQ ID NO: 1877652 - RNA, 20 nt, Human
cugcuacucaaguagcauuu

SEQ ID NO: 1877653 - RNA, 23 nt, Human
cugcuacucaaguagcauuuacu

SEQ ID NO: 1877654 - RNA, 17 nt, Human
cugcuacuggcaaaagg

SEQ ID NO: 1877655 - RNA, 18 nt, Human
cugcuacuguaauuuuau

SEQ ID NO: 1877656 - RNA, 14 nt, Human
cugccuccuuugug

SEQ ID NO: 1877657 - RNA, 14 nt, Human
cugccucgaacugg

SEQ ID NO: 1877658 - RNA, 23 nt, Human
cugccuccuuugugaggaagccg

SEQ ID NO: 1877659 - RNA, 17 nt, Human
cugccuccuuugugagg

SEQ ID NO: 1877660 - RNA, 21 nt, Human
cugccuccuuugugaggaagc

SEQ ID NO: 1877661 - RNA, 20 nt, Human
cugccucgaacuggcugcaa

SEQ ID NO: 1877662 - RNA, 15 nt, Human
cugccucgaaacaca

SEQ ID NO: 1877663 - RNA, 18 nt, Human
cugccucgaaacacagaa

SEQ ID NO: 1877664 - RNA, 19 nt, Human
cugccucgaacuggcugca

SEQ ID NO: 1877665 - RNA, 21 nt, Human
cugccucucacagcugaguug

SEQ ID NO: 1877666 - RNA, 22 nt, Human
cugccucucacagcugaguugu

SEQ ID NO: 1877667 - RNA, 14 nt, Human
cugccucucacagc

SEQ ID NO: 1877668 - RNA, 16 nt, Human
cugccucucacagcug

SEQ ID NO: 1877669 - RNA, 19 nt, Human
cugccucgaaacacagaaa

SEQ ID NO: 1877670 - RNA, 22 nt, Human
cugcccuuaccugccaggaagc

SEQ ID NO: 1877671 - RNA, 23 nt, Human
cugcccuuaccugccaggaagcc

SEQ ID NO: 1877672 - RNA, 11 nt, Human
cugcccugugg

SEQ ID NO: 1877673 - RNA, 12 nt, Human
cugcccuguggg

SEQ ID NO: 1877674 - RNA, 14 nt, Human
cugcccugugggcc

SEQ ID NO: 1877675 - RNA, 19 nt, Human
cugcccuuaccugccagga

SEQ ID NO: 1877676 - RNA, 24 nt, Human
cugcccugugaguacuacaguccu

SEQ ID NO: 1877677 - RNA, 20 nt, Human
cuggcagaguugaagacaga

SEQ ID NO: 1877678 - RNA, 21 nt, Human
cuggcagaguugaagacagag

SEQ ID NO: 1877679 - RNA, 23 nt, Human
cuggcagccccuguucuggcaga

SEQ ID NO: 1877680 - RNA, 22 nt, Human
cuggcagaguugaagacagagc

SEQ ID NO: 1877681 - RNA, 17 nt, Human
cugggacuacaggugug

SEQ ID NO: 1877682 - RNA, 21 nt, Human
cugggacuacaggcacccacc

SEQ ID NO: 1877683 - RNA, 17 nt, Human
cugggacuacaggcacc

SEQ ID NO: 1877684 - RNA, 13 nt, Human
cuggcucuuccag

SEQ ID NO: 1877685 - RNA, 14 nt, Human
cuggcucuuccagg

SEQ ID NO: 1877686 - RNA, 15 nt, Human
cuggcucuuccaggc

SEQ ID NO: 1877687 - RNA, 14 nt, Human
cuggcuccccaaag

SEQ ID NO: 1877688 - RNA, 15 nt, Human
cuggcucccaggaca

SEQ ID NO: 1877689 - RNA, 15 nt, Human
cuggcuccccaaagg

SEQ ID NO: 1877690 - RNA, 16 nt, Human
cuggcucccaggacac

SEQ ID NO: 1877691 - RNA, 14 nt, Human
cuggcucccaggac

SEQ ID NO: 1877692 - RNA, 18 nt, Human
cuggccgcgccaaauaau

SEQ ID NO: 1877693 - RNA, 16 nt, Human
cuggccgaguccaagc

SEQ ID NO: 1877694 - RNA, 17 nt, Human
cuggccgaguccaagcu

SEQ ID NO: 1877695 - RNA, 18 nt, Human
cuggccgaguccaagcug

SEQ ID NO: 1877696 - RNA, 20 nt, Human
cuggccgaguccaagcuggg

SEQ ID NO: 1877697 - RNA, 23 nt, Human
cuggccgaguccaagcugggaga

SEQ ID NO: 1877698 - RNA, 13 nt, Human
cuggcagcucagc

SEQ ID NO: 1877699 - RNA, 17 nt, Human
cuggcagcucagcuucc

SEQ ID NO: 1877700 - RNA, 23 nt, Human
cuggcccuaugcuuccggccucc

SEQ ID NO: 1877701 - RNA, 16 nt, Human
cuggcagcucagagag

SEQ ID NO: 1877702 - RNA, 17 nt, Human
cuggcagcucagagagg

SEQ ID NO: 1877703 - RNA, 19 nt, Human
cuggcagcucagagagggu

SEQ ID NO: 1877704 - RNA, 18 nt, Human
cuggaugcagccucacag

SEQ ID NO: 1877705 - RNA, 15 nt, Human
cuggaugcagccuca

SEQ ID NO: 1877706 - RNA, 15 nt, Human
cuggauccugaaaua

SEQ ID NO: 1877707 - RNA, 16 nt, Human
cuggaugcagccucac

SEQ ID NO: 1877708 - RNA, 17 nt, Human
cuggaugcagccucaca

SEQ ID NO: 1877709 - RNA, 14 nt, Human
cugcuucaaggauc

SEQ ID NO: 1877710 - RNA, 16 nt, Human
cugcuucaaggauccu

SEQ ID NO: 1877711 - RNA, 19 nt, Human
cugcuucaaggauccugag

SEQ ID NO: 1877712 - RNA, 20 nt, Human
cugcuucaaggauccugagc

SEQ ID NO: 1877713 - RNA, 19 nt, Human
cuggaaacauucaggagcu

SEQ ID NO: 1877714 - RNA, 23 nt, Human
cugcuucagccucccgaguagcu

SEQ ID NO: 1877715 - RNA, 14 nt, Human
cugcuuccagugag

SEQ ID NO: 1877716 - RNA, 24 nt, Human
cuggaguggccacuaagcagagga

SEQ ID NO: 1877717 - RNA, 13 nt, Human
cuggaguggccac

SEQ ID NO: 1877718 - RNA, 14 nt, Human
cuggaguggccacu

SEQ ID NO: 1877719 - RNA, 23 nt, Human
cuggaguggccacuaagcagagg

SEQ ID NO: 1877720 - RNA, 21 nt, Human
cuggagaaaauggacguguua

SEQ ID NO: 1877721 - RNA, 22 nt, Human
cugucuaaugaaaccugugucu

SEQ ID NO: 1877722 - RNA, 14 nt, Human
cugucuaaaaaaca

SEQ ID NO: 1877723 - RNA, 18 nt, Human
cugucuaaaaaacaaaac

SEQ ID NO: 1877724 - RNA, 18 nt, Human
cuguaggaagguuaaugu

SEQ ID NO: 1877725 - RNA, 13 nt, Human
cugucagucacag

SEQ ID NO: 1877726 - RNA, 14 nt, Human
cugucagucacagc

SEQ ID NO: 1877727 - RNA, 15 nt, Human
cugucagucacagcc

SEQ ID NO: 1877728 - RNA, 17 nt, Human
cugucagucacagccac

SEQ ID NO: 1877729 - RNA, 20 nt, Human
cuguccugggagugagcugg

SEQ ID NO: 1877730 - RNA, 14 nt, Human
cuguccugggagug

SEQ ID NO: 1877731 - RNA, 13 nt, Human
cuguccugggagu

SEQ ID NO: 1877732 - RNA, 14 nt, Human
cugucauuugagca

SEQ ID NO: 1877733 - RNA, 18 nt, Human
cugucagucacagccacc

SEQ ID NO: 1877734 - RNA, 14 nt, Human
cugucaucugugca

SEQ ID NO: 1877735 - RNA, 21 nt, Human
cugucaucugugcacugccca

SEQ ID NO: 1877736 - RNA, 15 nt, Human
cugucaucugugcac

SEQ ID NO: 1877737 - RNA, 16 nt, Human
cugguuuuucaguuuu

SEQ ID NO: 1877738 - RNA, 15 nt, Human
cugguuuuucaguuu

SEQ ID NO: 1877739 - RNA, 14 nt, Human
cugguuuuucaguu

SEQ ID NO: 1877740 - RNA, 16 nt, Human
cuguacuugcucuuga

SEQ ID NO: 1877741 - RNA, 19 nt, Human
cuguacuugcucuugaugc

SEQ ID NO: 1877742 - RNA, 20 nt, Human
cuguacuugcucuugaugcc

SEQ ID NO: 1877743 - RNA, 15 nt, Human
cuguagagugggagc

SEQ ID NO: 1877744 - RNA, 17 nt, Human
cuguaaauuuggcuucu

SEQ ID NO: 1877745 - RNA, 18 nt, Human
cuguaaauuuggcuucug

SEQ ID NO: 1877746 - RNA, 18 nt, Human
cuggucuuauuuguaaag

SEQ ID NO: 1877747 - RNA, 20 nt, Human
cuggucugaugacuugcuua

SEQ ID NO: 1877748 - RNA, 23 nt, Human
cuggugaccuuccaagagccuga

SEQ ID NO: 1877749 - RNA, 22 nt, Human
cuggugaccuuccaagagccug

SEQ ID NO: 1877750 - RNA, 15 nt, Human
cuguuggccagugug

SEQ ID NO: 1877751 - RNA, 12 nt, Human
cuguuggccagu

SEQ ID NO: 1877752 - RNA, 20 nt, Human
cuuaaaaaugguuuaaaugg

SEQ ID NO: 1877753 - RNA, 13 nt, Human
cuuaaaaaugguu

SEQ ID NO: 1877754 - RNA, 19 nt, Human
cuuaaauaaugugaaacug

SEQ ID NO: 1877755 - RNA, 16 nt, Human
cuuaaauaaugugaaa

SEQ ID NO: 1877756 - RNA, 14 nt, Human
cuuaaauaauguga

SEQ ID NO: 1877757 - RNA, 13 nt, Human
cuuaaauaaugug

SEQ ID NO: 1877758 - RNA, 20 nt, Human
cuuaaaauacgguaccuggc

SEQ ID NO: 1877759 - RNA, 18 nt, Human
cugugaacgauuuagaaa

SEQ ID NO: 1877760 - RNA, 17 nt, Human
cugugcucuggacaggc

SEQ ID NO: 1877761 - RNA, 23 nt, Human
cugugagaugcuagaacucccuu

SEQ ID NO: 1877762 - RNA, 22 nt, Human
cugugaacgauuuagaaagaag

SEQ ID NO: 1877763 - RNA, 23 nt, Human
cugugaauugagcugcagaaacg

SEQ ID NO: 1877764 - RNA, 15 nt, Human
cugugaauugagcug

SEQ ID NO: 1877765 - RNA, 19 nt, Human
cugugaauugagcugcaga

SEQ ID NO: 1877766 - RNA, 21 nt, Human
cugugaauugagcugcagaaa

SEQ ID NO: 1877767 - RNA, 12 nt, Human
cuguucagcugg

SEQ ID NO: 1877768 - RNA, 18 nt, Human
cuguucagcugguugagg

SEQ ID NO: 1877769 - RNA, 22 nt, Human
cuguucagcuccagcucaccag

SEQ ID NO: 1877770 - RNA, 19 nt, Human
cuguucagcuccagcucac

SEQ ID NO: 1877771 - RNA, 18 nt, Human
cuguucagcuccagcuca

SEQ ID NO: 1877772 - RNA, 16 nt, Human
cuguucagcuccagcu

SEQ ID NO: 1877773 - RNA, 19 nt, Human
cuguuaucaaaacuuucuu

SEQ ID NO: 1877774 - RNA, 19 nt, Human
cuguuaucccugccugguc

SEQ ID NO: 1877775 - RNA, 15 nt, Human
cuguucagcuccagc

SEQ ID NO: 1877776 - RNA, 17 nt, Human
cuguuauccuauuuaga

SEQ ID NO: 1877777 - RNA, 19 nt, Human
cugugcucuggacaggcau

SEQ ID NO: 1877778 - RNA, 18 nt, Human
cugugcucuggacaggca

SEQ ID NO: 1877779 - RNA, 14 nt, Human
cugugagcccagcu

SEQ ID NO: 1877780 - RNA, 22 nt, Human
cugugucagguggggcagcuug

SEQ ID NO: 1877781 - RNA, 17 nt, Human
cuguuacugucuucagu

SEQ ID NO: 1877782 - RNA, 15 nt, Human
cuguuagcagacagg

SEQ ID NO: 1877783 - RNA, 13 nt, Human
cuguuagcagaca

SEQ ID NO: 1877784 - RNA, 19 nt, Human
cuuuuaugugaaacauguu

SEQ ID NO: 1877785 - RNA, 17 nt, Human
cuuuuauugacacagaa

SEQ ID NO: 1877786 - RNA, 18 nt, Human
cuuuuauugacacagaaa

SEQ ID NO: 1877787 - RNA, 18 nt, Human
gaaaauuuugauguuuua

SEQ ID NO: 1877788 - RNA, 14 nt, Human
gaaaauuuuaaaaa

SEQ ID NO: 1877789 - RNA, 14 nt, Human
gaaaauuaacauga

SEQ ID NO: 1877790 - RNA, 21 nt, Human
gaaaauguugagaaucccaaa

SEQ ID NO: 1877791 - RNA, 20 nt, Human
gaaaagcggacaucagcugg

SEQ ID NO: 1877792 - RNA, 13 nt, Human
gaaaauuaacacu

SEQ ID NO: 1877793 - RNA, 15 nt, Human
gaaaauuaacacugc

SEQ ID NO: 1877794 - RNA, 18 nt, Human
gaaaagcggacaucagcu

SEQ ID NO: 1877795 - RNA, 14 nt, Human
gaaaagcagcucuc

SEQ ID NO: 1877796 - RNA, 17 nt, Human
gaaaagcagcucucccc

SEQ ID NO: 1877797 - RNA, 23 nt, Human
gaaaacuuaugaccucuuccuuu

SEQ ID NO: 1877798 - RNA, 18 nt, Human
gaaaacuuguauuaugug

SEQ ID NO: 1877799 - RNA, 18 nt, Human
cuuuugccguuauuaaaa

SEQ ID NO: 1877800 - RNA, 14 nt, Human
cuuuugcuuuauuc

SEQ ID NO: 1877801 - RNA, 17 nt, Human
cuuuugucuaugggacu

SEQ ID NO: 1877802 - RNA, 14 nt, Human
cuuuugucccagaa

SEQ ID NO: 1877803 - RNA, 16 nt, Human
cuuuuggucuguguga

SEQ ID NO: 1877804 - RNA, 15 nt, Human
cuuuuggucugugug

SEQ ID NO: 1877805 - RNA, 16 nt, Human
cuuuuuuuggcccagg

SEQ ID NO: 1877806 - RNA, 15 nt, Human
cuuuuuuuggcccag

SEQ ID NO: 1877807 - RNA, 15 nt, Human
cuuuuuuucuuuggu

SEQ ID NO: 1877808 - RNA, 14 nt, Human
cuuuuuuuuaaguu

SEQ ID NO: 1877809 - RNA, 14 nt, Human
cuuuuuuuucuuua

SEQ ID NO: 1877810 - RNA, 15 nt, Human
cuuuuuuuucuuuaa

SEQ ID NO: 1877811 - RNA, 18 nt, Human
cuuuugugcauuaucuag

SEQ ID NO: 1877812 - RNA, 14 nt, Human
cuuuugugcauuau

SEQ ID NO: 1877813 - RNA, 13 nt, Human
cuuuugugucuua

SEQ ID NO: 1877814 - RNA, 14 nt, Human
gaaaaaauauauau

SEQ ID NO: 1877815 - RNA, 19 nt, Human
gaaaaaauauuuuccugcc

SEQ ID NO: 1877816 - RNA, 21 nt, Human
cuuuuuuuuuuuuuuugacaa

SEQ ID NO: 1877817 - RNA, 15 nt, Human
cuuuuuuuuguaugu

SEQ ID NO: 1877818 - RNA, 21 nt, Human
gaacaaggcaaggcugucaau

SEQ ID NO: 1877819 - RNA, 14 nt, Human
gaacaaggcaaggc

SEQ ID NO: 1877820 - RNA, 15 nt, Human
gaacaaggcaaggcu

SEQ ID NO: 1877821 - RNA, 17 nt, Human
gaacaaggcaaggcugu

SEQ ID NO: 1877822 - RNA, 18 nt, Human
gaacaaggcaaggcuguc

SEQ ID NO: 1877823 - RNA, 20 nt, Human
gaaacuguucccaccugcug

SEQ ID NO: 1877824 - RNA, 21 nt, Human
gaaacuguucccaccugcugg

SEQ ID NO: 1877825 - RNA, 22 nt, Human
gaaacuguucccaccugcugga

SEQ ID NO: 1877826 - RNA, 17 nt, Human
gaaagaauuucauaugc

SEQ ID NO: 1877827 - RNA, 16 nt, Human
gaaagacagagcuggg

SEQ ID NO: 1877828 - RNA, 14 nt, Human
gaaagacagagcug

SEQ ID NO: 1877829 - RNA, 11 nt, Human
gaaacuuggau

SEQ ID NO: 1877830 - RNA, 16 nt, Human
gaacaagcaaacccag

SEQ ID NO: 1877831 - RNA, 21 nt, Human
gaacaagcaaacccagacggc

SEQ ID NO: 1877832 - RNA, 23 nt, Human
gaacaaauuuacagagacagaaa

SEQ ID NO: 1877833 - RNA, 19 nt, Human
gaaauuuuuauuaaauuau

SEQ ID NO: 1877834 - RNA, 18 nt, Human
gaacaaauuuacagagac

SEQ ID NO: 1877835 - RNA, 17 nt, Human
gaacaaauuuacagaga

SEQ ID NO: 1877836 - RNA, 17 nt, Human
gaaaucaccgaaaacgu

SEQ ID NO: 1877837 - RNA, 17 nt, Human
gaaaugaaagcagggac

SEQ ID NO: 1877838 - RNA, 18 nt, Human
gaaauuuuuauuaaauua

SEQ ID NO: 1877839 - RNA, 18 nt, Human
gaaaugaaagcagggacu

SEQ ID NO: 1877840 - RNA, 21 nt, Human
gaaaguacuucuccacccugc

SEQ ID NO: 1877841 - RNA, 22 nt, Human
gaaaguacuucuccacccugcu

SEQ ID NO: 1877842 - RNA, 13 nt, Human
gaaagguuuugag

SEQ ID NO: 1877843 - RNA, 19 nt, Human
gaaaggcuccaggagcagc

SEQ ID NO: 1877844 - RNA, 17 nt, Human
gaaaggcuccaggagca

SEQ ID NO: 1877845 - RNA, 18 nt, Human
gaaaggcuccaggagcag

SEQ ID NO: 1877846 - RNA, 18 nt, Human
gaaagacuaucuaaaugu

SEQ ID NO: 1877847 - RNA, 17 nt, Human
gaaagacagcuucucau

SEQ ID NO: 1877848 - RNA, 16 nt, Human
gaaagacagcuucuca

SEQ ID NO: 1877849 - RNA, 12 nt, Human
cuuccucccucc

SEQ ID NO: 1877850 - RNA, 13 nt, Human
cuuccucccuccc

SEQ ID NO: 1877851 - RNA, 14 nt, Human
cuuccucccucccu

SEQ ID NO: 1877852 - RNA, 18 nt, Human
cuuccucccucccucuuu

SEQ ID NO: 1877853 - RNA, 19 nt, Human
cuucugaacuuggcgcugc

SEQ ID NO: 1877854 - RNA, 15 nt, Human
cuucugacccaugcu

SEQ ID NO: 1877855 - RNA, 22 nt, Human
cuucugaacuuggcgcugcccc

SEQ ID NO: 1877856 - RNA, 16 nt, Human
cuucuauauauuguau

SEQ ID NO: 1877857 - RNA, 15 nt, Human
cuucuauaauuguau

SEQ ID NO: 1877858 - RNA, 17 nt, Human
cuucuaccucuuggcug

SEQ ID NO: 1877859 - RNA, 23 nt, Human
cuucugaacuuggcgcugccccu

SEQ ID NO: 1877860 - RNA, 18 nt, Human
cuucugacccaugcugcc

SEQ ID NO: 1877861 - RNA, 16 nt, Human
cuucugacccaugcug

SEQ ID NO: 1877862 - RNA, 17 nt, Human
cuucugacccaugcugc

SEQ ID NO: 1877863 - RNA, 13 nt, Human
cuucuuauacauu

SEQ ID NO: 1877864 - RNA, 16 nt, Human
cuucuuauacauuuga

SEQ ID NO: 1877865 - RNA, 19 nt, Human
cuucuuauggaauugauuu

SEQ ID NO: 1877866 - RNA, 23 nt, Human
cuucuuauggaauugauuugcau

SEQ ID NO: 1877867 - RNA, 22 nt, Human
cuucuuauggaauugauuugca

SEQ ID NO: 1877868 - RNA, 12 nt, Human
cuucuugaaggu

SEQ ID NO: 1877869 - RNA, 21 nt, Human
cuucuucuacuucagucuucu

SEQ ID NO: 1877870 - RNA, 17 nt, Human
cuuucaauaggaaaaac

SEQ ID NO: 1877871 - RNA, 18 nt, Human
cuuucaauaggaaaaacu

SEQ ID NO: 1877872 - RNA, 20 nt, Human
cuuuaaugucacaggcaggu

SEQ ID NO: 1877873 - RNA, 19 nt, Human
cuuuaaugucacaggcagg

SEQ ID NO: 1877874 - RNA, 18 nt, Human
cuuuaaugucacaggcag

SEQ ID NO: 1877875 - RNA, 17 nt, Human
cuuuaaugucacaggca

SEQ ID NO: 1877876 - RNA, 22 nt, Human
cuuuaaugucacaggcaggucc

SEQ ID NO: 1877877 - RNA, 23 nt, Human
cuuuaaugcaucuagauuaugga

SEQ ID NO: 1877878 - RNA, 12 nt, Human
cuuuaaugcuuu

SEQ ID NO: 1877879 - RNA, 14 nt, Human
cuuucaauaggaaa

SEQ ID NO: 1877880 - RNA, 15 nt, Human
cuuucaauaggaaaa

SEQ ID NO: 1877881 - RNA, 21 nt, Human
cuugucuuuggacccugaggc

SEQ ID NO: 1877882 - RNA, 22 nt, Human
cuugucuuuggacccugaggcc

SEQ ID NO: 1877883 - RNA, 21 nt, Human
cuuuaagggaguguacuccca

SEQ ID NO: 1877884 - RNA, 23 nt, Human
cuuuaagggaguguacucccagg

SEQ ID NO: 1877885 - RNA, 12 nt, Human
cuuuaaugcauc

SEQ ID NO: 1877886 - RNA, 13 nt, Human
cuuuaaugcaucu

SEQ ID NO: 1877887 - RNA, 14 nt, Human
cuuuaaugcaucua

SEQ ID NO: 1877888 - RNA, 14 nt, Human
cuuuaagaggacau

SEQ ID NO: 1877889 - RNA, 15 nt, Human
cuugguccugcugca

SEQ ID NO: 1877890 - RNA, 16 nt, Human
cuugguccugcugcag

SEQ ID NO: 1877891 - RNA, 17 nt, Human
cuugguccugcugcagu

SEQ ID NO: 1877892 - RNA, 18 nt, Human
cuugguccugcugcaguu

SEQ ID NO: 1877893 - RNA, 20 nt, Human
cuugguccugcugcaguugc

SEQ ID NO: 1877894 - RNA, 13 nt, Human
cuugucuguagau

SEQ ID NO: 1877895 - RNA, 13 nt, Human
cuugucucugggc

SEQ ID NO: 1877896 - RNA, 14 nt, Human
cuugucucugggcu

SEQ ID NO: 1877897 - RNA, 20 nt, Human
cuugucuuuggacccugagg

SEQ ID NO: 1877898 - RNA, 20 nt, Human
cuugucucccagcucagggc

SEQ ID NO: 1877899 - RNA, 22 nt, Human
cuugguccugcugcaguugcca

SEQ ID NO: 1877900 - RNA, 23 nt, Human
cuuggucucagugucaaugcagc

SEQ ID NO: 1877901 - RNA, 20 nt, Human
cuugguucccauuugcuccu

SEQ ID NO: 1877902 - RNA, 20 nt, Human
cuugguuccagccugccacu

SEQ ID NO: 1877903 - RNA, 16 nt, Human
cuugguucccauuugc

SEQ ID NO: 1877904 - RNA, 19 nt, Human
cuugguuccagccugccac

SEQ ID NO: 1877905 - RNA, 17 nt, Human
cuugguuccagccugcc

SEQ ID NO: 1877906 - RNA, 15 nt, Human
cuugauguguuaucu

SEQ ID NO: 1877907 - RNA, 19 nt, Human
cuugauucauaaugacuua

SEQ ID NO: 1877908 - RNA, 13 nt, Human
cuugauucugcag

SEQ ID NO: 1877909 - RNA, 17 nt, Human
cuugauucugcaguaaa

SEQ ID NO: 1877910 - RNA, 20 nt, Human
cuugauucugcaguaaaucu

SEQ ID NO: 1877911 - RNA, 21 nt, Human
cuugauucugcaguaaaucuu

SEQ ID NO: 1877912 - RNA, 22 nt, Human
cuugauucugcaguaaaucuuu

SEQ ID NO: 1877913 - RNA, 19 nt, Human
cuugccgucuaccugaggg

SEQ ID NO: 1877914 - RNA, 23 nt, Human
cuugccgcgucgcccucccaggc

SEQ ID NO: 1877915 - RNA, 18 nt, Human
cuugccgucuaccugagg

SEQ ID NO: 1877916 - RNA, 18 nt, Human
cuugccgcgucgcccucc

SEQ ID NO: 1877917 - RNA, 21 nt, Human
cuugccgcgucgcccucccag

SEQ ID NO: 1877918 - RNA, 22 nt, Human
cuuggccgcaccuaaagcagcc

SEQ ID NO: 1877919 - RNA, 21 nt, Human
cuuggccgcaccuaaagcagc

SEQ ID NO: 1877920 - RNA, 23 nt, Human
cuuggcgcugccccuggcagccc

SEQ ID NO: 1877921 - RNA, 21 nt, Human
cuuggcgcugccccuggcagc

SEQ ID NO: 1877922 - RNA, 22 nt, Human
cuuggcgcugccccuggcagcc

SEQ ID NO: 1877923 - RNA, 22 nt, Human
cuuggauuguccccgacccuug

SEQ ID NO: 1877924 - RNA, 17 nt, Human
cuugccucuguccccuu

SEQ ID NO: 1877925 - RNA, 18 nt, Human
cuuggauuguccccgacc

SEQ ID NO: 1877926 - RNA, 20 nt, Human
cuuggauuguccccgacccu

SEQ ID NO: 1877927 - RNA, 15 nt, Human
cuuggauuguccccg

SEQ ID NO: 1877928 - RNA, 20 nt, Human
gcaaccuccgccucuugggu

SEQ ID NO: 1877929 - RNA, 16 nt, Human
gcaaccucuuggccug

SEQ ID NO: 1877930 - RNA, 23 nt, Human
gcaaccucuuggccugaucagac

SEQ ID NO: 1877931 - RNA, 14 nt, Human
gcaaccugcuucca

SEQ ID NO: 1877932 - RNA, 19 nt, Human
gcaaccuccgccucuuggg

SEQ ID NO: 1877933 - RNA, 16 nt, Human
gcaacccccagccugc

SEQ ID NO: 1877934 - RNA, 15 nt, Human
gcaacccccagccug

SEQ ID NO: 1877935 - RNA, 14 nt, Human
gcaacccccagccu

SEQ ID NO: 1877936 - RNA, 19 nt, Human
gcaaccccaggcugaagca

SEQ ID NO: 1877937 - RNA, 14 nt, Human
gcaaccacuaagaa

SEQ ID NO: 1877938 - RNA, 17 nt, Human
gcaaccagggagcugca

SEQ ID NO: 1877939 - RNA, 23 nt, Human
gcaaccagggagcugcaggggca

SEQ ID NO: 1877940 - RNA, 13 nt, Human
gcaacaggcuggg

SEQ ID NO: 1877941 - RNA, 15 nt, Human
gcaacaggcugggcu

SEQ ID NO: 1877942 - RNA, 14 nt, Human
gcaacaggcugggc

SEQ ID NO: 1877943 - RNA, 23 nt, Human
gcaaaaggaucuuuguggccaag

SEQ ID NO: 1877944 - RNA, 19 nt, Human
gcaacaggcugggcuucag

SEQ ID NO: 1877945 - RNA, 16 nt, Human
gcaacaggcugggcuu

SEQ ID NO: 1877946 - RNA, 13 nt, Human
gcaacauccaaaa

SEQ ID NO: 1877947 - RNA, 17 nt, Human
gcaacauccaaaauagu

SEQ ID NO: 1877948 - RNA, 13 nt, Human
gcaaccaccacca

SEQ ID NO: 1877949 - RNA, 16 nt, Human
gcaaccaccaccaacc

SEQ ID NO: 1877950 - RNA, 18 nt, Human
gcaaccaccaccaaccac

SEQ ID NO: 1877951 - RNA, 15 nt, Human
gcaagugagagcugg

SEQ ID NO: 1877952 - RNA, 16 nt, Human
gcaagugagagcuggg

SEQ ID NO: 1877953 - RNA, 12 nt, Human
gauucuucugcu

SEQ ID NO: 1877954 - RNA, 15 nt, Human
gauucuucugcuuca

SEQ ID NO: 1877955 - RNA, 13 nt, Human
gauucuucugcuu

SEQ ID NO: 1877956 - RNA, 20 nt, Human
gauucuucugcuucagccuc

SEQ ID NO: 1877957 - RNA, 16 nt, Human
gauuuaacagaaaugu

SEQ ID NO: 1877958 - RNA, 18 nt, Human
gauuuaacagaaauguac

SEQ ID NO: 1877959 - RNA, 17 nt, Human
gauuuaacagaaaugua

SEQ ID NO: 1877960 - RNA, 19 nt, Human
gauuuaacagaaauguaca

SEQ ID NO: 1877961 - RNA, 11 nt, Human
gauuucacucu

SEQ ID NO: 1877962 - RNA, 16 nt, Human
gauuuuuuuuuccuuc

SEQ ID NO: 1877963 - RNA, 12 nt, Human
gauuucacucuc

SEQ ID NO: 1877964 - RNA, 17 nt, Human
gauuuuuuuuuccuuca

SEQ ID NO: 1877965 - RNA, 18 nt, Human
gauuuuuuuuuccuucag

SEQ ID NO: 1877966 - RNA, 17 nt, Human
gcaaaagaugcuucuca

SEQ ID NO: 1877967 - RNA, 22 nt, Human
gcaaaagaugcuucucacugcc

SEQ ID NO: 1877968 - RNA, 20 nt, Human
gcaaaaggaucuuuguggcc

SEQ ID NO: 1877969 - RNA, 21 nt, Human
gcaaaaggaucuuuguggcca

SEQ ID NO: 1877970 - RNA, 14 nt, Human
gcaaaaauauuuau

SEQ ID NO: 1877971 - RNA, 23 nt, Human
gcaaaaauauuuauaaaacuucu

SEQ ID NO: 1877972 - RNA, 14 nt, Human
gcaaaaaggcagga

SEQ ID NO: 1877973 - RNA, 21 nt, Human
gauuuuuuuuuccuucagugc

SEQ ID NO: 1877974 - RNA, 21 nt, Human
gauggaaguugcagugagcug

SEQ ID NO: 1877975 - RNA, 13 nt, Human
gauggaaugaugg

SEQ ID NO: 1877976 - RNA, 23 nt, Human
gauacaguuacucagaauucucu

SEQ ID NO: 1877977 - RNA, 19 nt, Human
gauacaguuacucagaauu

SEQ ID NO: 1877978 - RNA, 16 nt, Human
gauacaguuacucaga

SEQ ID NO: 1877979 - RNA, 20 nt, Human
gauacauccaaagcagacag

SEQ ID NO: 1877980 - RNA, 21 nt, Human
gauacauccaaagcagacagc

SEQ ID NO: 1877981 - RNA, 23 nt, Human
gauacauccaaagcagacagcuc

SEQ ID NO: 1877982 - RNA, 21 nt, Human
gauacauacaccagcauuccu

SEQ ID NO: 1877983 - RNA, 17 nt, Human
gauacauccaaagcaga

SEQ ID NO: 1877984 - RNA, 21 nt, Human
gauacuguaucaugacaaaga

SEQ ID NO: 1877985 - RNA, 17 nt, Human
gauacugucucuuucau

SEQ ID NO: 1877986 - RNA, 17 nt, Human
gauacuguaucaugaca

SEQ ID NO: 1877987 - RNA, 12 nt, Human
gauacugaaaua

SEQ ID NO: 1877988 - RNA, 23 nt, Human
gauacugcuacuguaauuuuaua

SEQ ID NO: 1877989 - RNA, 19 nt, Human
gauccaagcuggucccacu

SEQ ID NO: 1877990 - RNA, 17 nt, Human
gauccaagcugguccca

SEQ ID NO: 1877991 - RNA, 16 nt, Human
gauccaagcugguccc

SEQ ID NO: 1877992 - RNA, 12 nt, Human
gauccaagcugg

SEQ ID NO: 1877993 - RNA, 16 nt, Human
gaucaacaucuuuucu

SEQ ID NO: 1877994 - RNA, 14 nt, Human
gaucaacaucuuuu

SEQ ID NO: 1877995 - RNA, 13 nt, Human
gauccaaaagaag

SEQ ID NO: 1877996 - RNA, 20 nt, Human
gaucaacaucuuuucuugcc

SEQ ID NO: 1877997 - RNA, 17 nt, Human
gaucaacaucuuuucuu

SEQ ID NO: 1877998 - RNA, 23 nt, Human
gauccaaaagaagcccccagcua

SEQ ID NO: 1877999 - RNA, 16 nt, Human
gauccaaaagaagccc

SEQ ID NO: 1878000 - RNA, 19 nt, Human
gauccaaaagaagccccca

SEQ ID NO: 1878001 - RNA, 20 nt, Human
gauccaaaagaagcccccag

SEQ ID NO: 1878002 - RNA, 22 nt, Human
gauccaaaagaagcccccagcu

SEQ ID NO: 1878003 - RNA, 19 nt, Human
gauccacccaccucagccu

SEQ ID NO: 1878004 - RNA, 18 nt, Human
gauccacccaccucagcc

SEQ ID NO: 1878005 - RNA, 21 nt, Human
gauccaagcuggucccacuca

SEQ ID NO: 1878006 - RNA, 18 nt, Human
gaucaaccagcuaagaaa

SEQ ID NO: 1878007 - RNA, 21 nt, Human
gauccacccaccucagccucc

SEQ ID NO: 1878008 - RNA, 20 nt, Human
gauccacccaccucagccuc

SEQ ID NO: 1878009 - RNA, 22 nt, Human
gauccacccaccucagccuccc

SEQ ID NO: 1878010 - RNA, 13 nt, Human
gauauuugugcau

SEQ ID NO: 1878011 - RNA, 15 nt, Human
gauauuuugcuuugu

SEQ ID NO: 1878012 - RNA, 17 nt, Human
gauauuuuuuucuuuuc

SEQ ID NO: 1878013 - RNA, 20 nt, Human
gaucaaaagguuaauaaagu

SEQ ID NO: 1878014 - RNA, 23 nt, Human
gaucaaaagguuaauaaaguaau

SEQ ID NO: 1878015 - RNA, 17 nt, Human
gaucaaaggcacacagc

SEQ ID NO: 1878016 - RNA, 21 nt, Human
gaugcuucuucagagacuccu

SEQ ID NO: 1878017 - RNA, 17 nt, Human
gauggaacacggccaca

SEQ ID NO: 1878018 - RNA, 17 nt, Human
gaugcuucuucagagac

SEQ ID NO: 1878019 - RNA, 20 nt, Human
gaugcuucuucagagacucc

SEQ ID NO: 1878020 - RNA, 22 nt, Human
gaugauuggaggggggaggugg

SEQ ID NO: 1878021 - RNA, 13 nt, Human
gaugauccuaggc

SEQ ID NO: 1878022 - RNA, 14 nt, Human
gaugauccuaggca

SEQ ID NO: 1878023 - RNA, 18 nt, Human
gaucuggaaccucagccu

SEQ ID NO: 1878024 - RNA, 19 nt, Human
gaucuggaaccucagccug

SEQ ID NO: 1878025 - RNA, 20 nt, Human
gaucuggaaccucagccugg

SEQ ID NO: 1878026 - RNA, 21 nt, Human
gaucuggaaccucagccuggc

SEQ ID NO: 1878027 - RNA, 15 nt, Human
gaucuggaacccaga

SEQ ID NO: 1878028 - RNA, 16 nt, Human
gaucuggaacccagac

SEQ ID NO: 1878029 - RNA, 17 nt, Human
gaucuggaacccagacu

SEQ ID NO: 1878030 - RNA, 18 nt, Human
gaucuggaacccagacuc

SEQ ID NO: 1878031 - RNA, 20 nt, Human
gaucuggaacccagacucag

SEQ ID NO: 1878032 - RNA, 12 nt, Human
gaucuggaaccu

SEQ ID NO: 1878033 - RNA, 16 nt, Human
gaucuggaaccucagc

SEQ ID NO: 1878034 - RNA, 17 nt, Human
gaucuggaaccucagcc

SEQ ID NO: 1878035 - RNA, 12 nt, Human
gaucuggaaccc

SEQ ID NO: 1878036 - RNA, 14 nt, Human
gaucuggaacccag

SEQ ID NO: 1878037 - RNA, 20 nt, Human
gaucucugcagggccgccag

SEQ ID NO: 1878038 - RNA, 17 nt, Human
gaucugacaugauuccu

SEQ ID NO: 1878039 - RNA, 19 nt, Human
gaucugacaugauuccuuc

SEQ ID NO: 1878040 - RNA, 19 nt, Human
gaucucuugagccugggag

SEQ ID NO: 1878041 - RNA, 21 nt, Human
gaucugacaugauuccuuccu

SEQ ID NO: 1878042 - RNA, 22 nt, Human
gaucugacaugauuccuuccug

SEQ ID NO: 1878043 - RNA, 15 nt, Human
gaucucugcagggcc

SEQ ID NO: 1878044 - RNA, 16 nt, Human
gaucucugcagggccg

SEQ ID NO: 1878045 - RNA, 23 nt, Human
gaucucugcaggaaauggcugug

SEQ ID NO: 1878046 - RNA, 18 nt, Human
gaucucuugagccuggga
